(19) United States
(12) Patent Application Publication
(10) Pub. No.: US 2016/0319361 A1
(43) Pub. Date: Nov. 3, 2016

(54) OLIGONUCLEOTIDE PROBES AND USES THEREOF

(71) Applicant: CARIS LIFE SCIENCES SWITZERLAND HOLDINGS GMBH, Basel (CH)

(72) Inventors: David SPETZLER, Paradise Valley, AZ (US); Valeriy DOMENYUK, Phoenix, AZ (US); Nianqing XIAO, Rockville, MD (US); Adam STARK, Surprise, AZ (US); Zhenyu ZHONG, Peoria, AZ (US)

(21) Appl. No.: 14/915,249

(22) PCT Filed: Aug. 28, 2014
(86) PCT No.: PCT/US14/53306

§ 371 Date: Feb. 28, 2016

Related U.S. Application Data
(60) Provisional application No. 61/871,107, filed on Aug. 28, 2013.
(60) Provisional application No. 61/874,621, filed on Sep. 6, 2013.
(60) Provisional application No. 61/900,975, filed on Nov. 6, 2013.
(60) Provisional application No. 61/912,471, filed on Dec. 5, 2013.
(60) Provisional application No. 61/924,192, filed on Jan. 6, 2014.
(60) Provisional application No. 61/949,216, filed on Mar. 6, 2014.
(60) Provisional application No. 61/974,949, filed on Apr. 3, 2014.
(60) Provisional application No. 61/990,085, filed on May 7, 2014.
(60) Provisional application No. 61/994,704, filed on May 16, 2014.
(60) Provisional application No. 62/024,436, filed on Jul. 14, 2014.

(51) Int. Cl. C12Q 1/68; C12N 15/10; C12N 15/115

(52) U.S. Cl. CPC C12Q 1/6886; C12N 15/115; C12N 15/1048; C12N 2310/16; C12Q 2600/112

(57) ABSTRACT

Methods and compositions are provided for oligonucleotides that bind target biomarkers and allow characterization of a phenotype. The target biomarkers may include microvesicle antigens, including microvesicles derived from various diseases. The characterization may comprise detection, diagnosis, prognosis, theranosis or other characterization of a disease or disorder.

### CROSS REFERENCE

[0001] This application claims the benefit of U.S. Provisional Patent Application No. 61/871,107, filed Aug. 28, 2013; 61/874,621, filed Sep. 6, 2013; 61/900,975, filed Nov. 6, 2013; 61/912,471, filed Dec. 5, 2013; 61/924,192, filed Jan. 6, 2014; 61/949,216, filed Mar. 6, 2014; 61/974,949, filed Apr. 3, 2014]; 61/990,085, filed May 7, 2014; 61/994,704, filed May 16, 2014; and 62/024,436, filed Jul. 14, 2014; all of which applications are incorporated herein by reference in their entirety.

### SEQUENCE LISTING SUBMITTED VIA EFS-WEB

[0002] The entire content of the following electronic submission of the sequence listing via the USPTO EFS-WEB server, as authorized and set forth in MPEP §1730 II.B.2(a), is incorporated herein by reference in its entirety for all purposes. The sequence listing is within the electronically filed text file that is identified as follows:

[0003] File Name: 37901820601SeqList.txt

[0004] Date of Creation: Aug. 27, 2014

[0005] Size (bytes): 101,923,503 bytes

### BACKGROUND OF THE INVENTION

[0006] The invention relates generally to the field of aptamers capable of binding to microvesicle surface antigens, which are useful as therapeutics in and diagnostics of cancer and/or other diseases or disorders in which microvesicles implicated. The invention further relates to materials and methods for the administration of aptamers capable of binding to microvesicles. The microvesicles may be derived from cells indicative of cancer, e.g., a breast cancer.

[0007] Aptamers are multi-meric nucleic acid molecules having specific binding affinity to molecules, which may be through interactions other than classic Watson-Crick base pairing. The terms aptamer, oligonucleotide, polynucleotide, or the like may be used interchangeably herein.

[0008] Aptamers, like peptides generated by phage display or monoclonal antibodies (“mAbs”), are capable of specifically binding to selected targets and modulating the target's activity, e.g., through binding aptamers may block their target's ability to function. Created by an in vitro selection process from pools of random sequence oligonucleotides, aptamers have been generated for over 100 proteins including growth factors, transcription factors, enzymes, immunoglobulins, and receptors. A typical aptamer is 10-15 kDa in size (30-45 nucleotides), binds its target with sub-nanomolar affinity, and discriminates against closely related targets (e.g., aptamers will typically not bind other proteins from the same gene family). A series of structural studies have shown that aptamers are capable of using the same types of binding interactions (e.g., hydrogen bonding, electrostatic complementarity, hydrophobic contacts, steric exclusion) that drive affinity and specificity in antibody-antigen complexes.

[0009] Aptamers have a number of desirable characteristics for use as therapeutics and diagnostics including high specificity and affinity, biological efficacy, and excellent pharmacokinetic properties. In addition, they offer specific competitive advantages over antibodies and other protein biologics, for example:

[0010] Speed and control. Aptamers are produced by an entirely in vitro process, allowing for the rapid generation of initial leads, including therapeutic leads. In vitro selection allows the specificity and affinity of the aptamer to be tightly controlled and allows the generation of leads, including leads against both toxic and non-immunogenic targets.

[0011] Toxicity and Immunogenicity. Aptamers as a class have demonstrated little or no toxicity or immunogenicity. In chronic dosing of rats or woodchucks with high levels of aptamer (10 mg/kg daily for 90 days), no toxicity is observed by any clinical, cellular, or biochemical measure. Whereas the efficacy of many monoclonal antibodies can be severely limited by immune response to antibodies themselves, it is extremely difficult to elicit antibodies to aptamers most likely because aptamers cannot be presented by T-cells via the MHC and the immune response is generally trained not to recognize nucleic acid fragments.

[0012] Administration. Whereas most currently approved antibody therapeutics are administered by intravenous infusion (typically over 2-4 hours), aptamers can be administered by subcutaneous injection (aptamer bioavailability via subcutaneous administration is >80% in monkey studies (Tucker et al., J. Chromatography B. 732: 203-212, 1999)). This difference is primarily due to the comparatively low solubility and thus large volumes necessary for most therapeutic mAbs. With good solubility (>150 mg/mL) and comparatively low molecular weight (aptamer: 10-50 kDa; antibody: 150 kDa), a weekly dose of aptamer may be delivered by injection in a volume of less than 0.5 mL. In addition, the small size of aptamers allows them to penetrate into areas of conformational constrictions that do not allow for antibodies or antibody fragments to penetrate, presenting yet another advantage of aptamer-based therapeutics or prophylaxis.

[0013] Scalability and cost. Aptamers are chemically synthesized and are readily scaled as needed to meet production demand for diagnostic or therapeutic applications. Whereas difficulties in scaling production are currently limiting the availability of some biologics and the capital cost of a large-scale protein production plant is enormous, a single large-scale oligonucleotide synthesizer can produce upwards of 100 kg/year and requires a relatively modest initial investment. The current cost of goods for aptamer synthesis at the kilogram scale is estimated at $100/g, comparable to that for highly optimized antibodies.

[0014] Stability. Aptamers are chemically robust. They are intrinsically adapted to regain activity following exposure to factors such as heat and denaturants and can be stored for extended periods (>1 yr) at room temperature as lyophilized powders.

### INCORPORATION BY REFERENCE

[0015] All publications, patents and patent applications mentioned in this specification are herein incorporated by reference to the same extent as if each individual publication, patent or patent application was specifically and individually indicated to be incorporated by reference.

### SUMMARY OF THE INVENTION

[0016] Compositions and methods of the invention provide aptamers that bind biomarkers of interest such as microvesicle surface antigens or functional fragments of microvesicle surface antigens. In various embodiments, aptamers of the invention are used in diagnostic, prognostic or theranostic processes to screen a biological sample for the presence or levels of microvesicle surface antigens determined to provide a diagnostic readout. The diagnosis may be related to a cancer, e.g., a breast cancer. In other embodiments, aptamers of the invention are chemically modified or composed in a pharmaceutical composition for therapeutic applications.

[0017] In an aspect, the invention provides an oligonucleotide at least 50, 55, 60, 65, 70, 75, 80, 85, 90, 95, 96, 97, 98, 99 or 100 percent homologous to SEQ ID NO. 10558. In a related aspect, the invention provides a plurality of oligonucleotides comprising at least 1, 2, 3, 4, 5, 6, 7, 8, 9, 10, 11, 12, 13, 14, 15, 16, 17, 18, 19, 20, 25, 30, 40, 45, 50, 55, 60, 65, 70, 75, 80, 85, 90, 95, 100, 125, 150, 175, 200, 300, 400, 500, 600, 700, 800, 900, 1000, 2000, 3000, 4000, 5000, 6000, 7000, 8000, 9000, 10000, 20000, 30000, 40000, 50000, 60000, 70000, 80000, 90000, 100000, 200000, 300000, 400000, 500000, 10⁶, 10⁷, 10⁸, 10⁹, 10¹⁰, 10¹¹, 10¹², 10¹³, 10¹⁴, 10¹⁵, 10¹⁶, 10¹⁷, or at least 10¹⁸ different oligonucleotide sequences, wherein each of the oligonucleotide sequences or a portion thereof is at least 50, 55, 60, 65, 70, 75, 80, 85, 90, 95, 96, 97, 98, 99 or 100 percent homologous to SEQ ID NO. 10558.

[0018] In another aspect, the invention provides a plurality of oligonucleotides comprising at least 1, 2, 3, 4, 5, 6, 7, 8, 9, 10, 11, 12, 13, 14, 15, 16, 17, 18, 19, 20, 25, 30, 40, 45, 50, 55, 60, 65, 70, 75, 80, 85, 90, 95, 100, 125, 150, 175, 200, 300, 400, 500, 600, 700, 800, 900, 1000, 2000, 3000, 4000, 5000, 6000, 7000, 8000, 9000, 10000, 20000, 30000, 40000, 50000, 60000, 70000, 80000, 90000, 100000, 200000, 300000, 400000, or 500000 different oligonucleotide sequences, wherein each of the oligonucleotide sequences or a portion thereof is at least 50, 55, 60, 65, 70, 75, 80, 85, 90, 95, 96, 97, 98, 99 or 100 percent homologous to a sequence selected from SEQ ID NOs. 10559-510558. In a related aspect, the invention provides an oligonucleotide probe library comprising at least 50%, 60%, 70%, 80%, 90%, 95%, 96%, 97%, 98% or at least 99% of the oligonucleotides listed in SEQ ID NOs. 10559-510558.

[0019] In still another aspect, the invention provides an oligonucleotide comprising a nucleic acid sequence or a portion thereof that is at least 50, 55, 60, 65, 70, 75, 80, 85, 90, 95, 96, 97, 98, 99 or 100 percent homologous to a sequence selected from SEQ ID NOs. 510559-510578. In a related aspect, the invention provides a plurality of oligonucleotides comprising at least 1, 2, 3, 4, 5, 6, 7, 8, 9, 10, 11, 12, 13, 14, 15, 16, 17, 18, 19, 20 different oligonucleotide sequences, wherein each of the oligonucleotide sequences or a portion thereof is at least 50, 55, 60, 65, 70, 75, 80, 85, 90, 95, 96, 97, 98, 99 or 100 percent homologous to SEQ ID NOs. 510559-510578.

[0020] In yet another aspect, the invention provides an oligonucleotide comprising a nucleic acid sequence or a portion thereof that is at least 50, 55, 60, 65, 70, 75, 80, 85, 90, 95, 96, 97, 98, 99 or 100 percent homologous to a sequence selected from SEQ ID NOs. 510579-510598. In a related aspect, the invention provides a plurality of oligonucleotides comprising at least 1, 2, 3, 4, 5, 6, 7, 8, 9, 10, 11, 12, 13, 14, 15, 16, 17, 18, 19, 20 different oligonucleotide sequences, wherein each of the oligonucleotide sequences or a portion thereof is at least 50, 55, 60, 65, 70, 75, 80, 85, 90, 95, 96, 97, 98, 99 or 100 percent homologous to SEQ ID NOs. 510579-510598.

[0021] In an aspect, the invention provides an oligonucleotide comprising a nucleic acid sequence or a portion thereof that is at least 50, 55, 60, 65, 70, 75, 80, 85, 90, 95, 96, 97, 98, 99 or 100 percent homologous to a sequence selected from SEQ ID NOs. 510599-510763. In a related aspect, the invention provides a plurality of oligonucleotides comprising at least 1, 2, 3, 4, 5, 6, 7, 8, 9, 10, 11, 12, 13, 14, 15, 16, 17, 18, 19, 20, 25, 30, 40, 45, 50, 55, 60, 65, 70, 75, 80, 85, 90, 95, 100, 110, 120, 125, 130, 140, 150, 160 or 165 different oligonucleotide sequences, wherein each of the oligonucleotide sequences or a portion thereof is at least 50, 55, 60, 65, 70, 75, 80, 85, 90, 95, 96, 97, 98, 99 or 100 percent homologous to SEQ ID NOs. 510599-510763. In still another related aspect, the invention provides a plurality of oligonucleotides comprising at least 1, 2, 3, 4, 5, 6, 7, 8, 9, 10, 11, 12, 13, 14, 15, 16, 17, 18, 19, 20, 25, 30, 40, 45, 50, 55, 60, 65, 70, 75, 80, 85, 90, 95, 100, 110, 120, 125, 130, 140, 150, 160 or 165 different oligonucleotide sequences, wherein each of the oligonucleotide sequences or a portion thereof is at least 50, 55, 60, 65, 70, 75, 80, 85, 90, 95, 96, 97, 98, 99 or 100 percent homologous to the SEQ ID NOs. in a row in Table 16.

[0022] The nucleic acid sequences provided herein can also be modified as desired so long as the functional aspects are still maintained (e.g., binding to various targets or ability to characterize a phenotype). Such a modification may be referred to as a “functional modification” herein. A functional modification may enhance or have minimal or no effect on functional aspects of an oligonucleotide. For example, the oligonucleotides may comprise DNA or RNA, incorporate various non-natural nucleotides, incorporate other chemical modifications, or comprise various deletions or insertions. Such modifications may facilitate synthesis, stability, delivery, labeling, etc, or may have little to no effect in practice. In some cases, some nucleotides in an oligonucleotide may be substituted while maintaining functional aspects of the oligonucleotide. Similarly, 5′ and 3′ flanking regions may be substituted. In still other cases, only a portion of an oligonucleotide may be determined to direct its functionality such that other portions can be deleted or substituted. Numerous techniques to synthesize and modify nucleotides and polynucleotides, including various chemical modifications, are disclosed herein or are known in the art.

[0023] In an aspect, the invention also provides a method comprising contacting an oligonucleotide or plurality of oligonucleotides with a sample and detecting the presence or level of binding of the oligonucleotide or plurality of oligonucleotides to a target in the sample, wherein the oligonucleotide or plurality of oligonucleotides can be those provided by the invention above. The sample may comprise a biological sample, an organic sample, an inorganic sample, a tissue, a cell culture, a bodily fluid, blood, serum, a cell, a microvesicle, a protein complex, a lipid complex, a carbohydrate, or any combination, fraction or variation thereof. The target may comprise a cell, an organelle, a protein complex, a lipoprotein, a carbohydrate, a microvesicle, a membrane fragment, a small molecule, a heavy metal, a toxin, or a drug.

[0024] In a related aspect, the invention provides a method comprising: a) contacting a biological sample comprising microvesicles with an oligonucleotide probe library, wherein optionally the oligonucleotide probe library comprises an oligonucleotide or plurality of oligonucleotides those provided by the invention above; b) identifying oligonucleotides bound to at least a portion of the microvesicles; and c) characterizing the sample based on a profile of the identified oligonucleotides.

[0025] In another aspect, the invention provides a method comprising: a) contacting a sample with an oligonucleotide probe library comprising at least 10⁶, 10⁷, 10⁸, 10⁹, 10¹⁰, 10¹¹, 10¹², 10¹³, 10¹⁴, 10¹⁵, 10¹⁶, 10¹⁷, or at least 10¹⁸ different oligonucleotide sequences oligonucleotides to form a mixture in solution, wherein the oligonucleotides are capable of binding a plurality of entities in the sample to form complexes, wherein optionally the oligonucleotide probe library comprises an oligonucleotide or plurality of oligonucleotides as provided by the invention above; b) partitioning the complexes formed in step (a) from the mixture; and c) detecting oligonucleotides present in the complexes partitioned in step (b) to identify an oligonucleotide profile for the sample. In an embodiment, the detecting step comprises performing sequencing of all or some of the oligonucleotides in the complexes, amplification of all or some of the oligonucleotides in the complexes, and/or hybridization of all or some of the oligonucleotides in the complexes to an array. The array can be any useful array, such as a planar or particle-based array.

[0026] In still another aspect, the invention provides a method for generating an enriched oligonucleotide probe library comprising: a) contacting a first oligonucleotide library with a biological test sample and a biological control sample, wherein complexes are formed between biological entities present in the biological samples and a plurality of oligonucleotides present in the first oligonucleotide library; b) partitioning the complexes formed in step (a) and isolating the oligonucleotides in the complexes to produce a subset of oligonucleotides for each of the biological test sample and biological control sample; c) contacting the subsets of oligonucleotides in (b) with the biological test sample and biological control sample wherein complexes are formed between biological entities present in the biological samples and a second plurality of oligonucleotides present in the subsets of oligonucleotides to generate a second subset group of oligonucleotides; and d) optionally repeating steps b)-c), one, two, three or more times to produce a respective third, fourth, fifth or more subset group of oligonucleotides, thereby producing the enriched oligonucleotide probe library. In a related aspect, the invention provides a plurality of oligonucleotides comprising at least 2, 3, 4, 5, 6, 7, 8, 9, 10, 11, 12, 13, 14, 15, 16, 17, 18, 19, 20, 25, 30, 40, 45, 50, 55, 60, 65, 70, 75, 80, 85, 90, 95, 100, 125, 150, 175, 200, 300, 400, 500, 600, 700, 800, 900, 1000, 2000, 3000, 4000, 5000, 6000, 7000, 8000, 9000, 10000, 20000, 30000, 40000, 50000, 60000, 70000, 80000, 90000, 100000, 200000, 300000, 400000, or 500000 different oligonucleotide sequences, wherein the plurality results from the method in this paragraph, wherein the library is capable of distinguishing a first phenotype from a second phenotype. In some embodiments, the first phenotype comprises a disease or disorder and the second phenotype comprises a healthy state; or wherein the first phenotype comprises a disease or disorder and the second phenotype comprises a different disease or disorder; or wherein the first phenotype comprises a stage or progression of a disease or disorder and the second phenotype comprises a different stage or progression of the same disease or disorder; or wherein the first phenotype comprises a positive response to a therapy and the second phenotype comprises a negative response to the same therapy.

[0027] In yet another aspect, the invention provides a method of characterizing a disease or disorder, comprising: a) contacting a biological test sample with the oligonucleotide or plurality of oligonucleotides provided by the invention; b) detecting a presence or level of complexes formed in step (a) between the oligonucleotide or plurality of oligonucleotides provided by the invention and a target in the biological test sample; and c) comparing the presence or level detected in step (b) to a reference level from a biological control sample, thereby characterizing the disease or disorder. The step of detecting may comprise performing sequencing of all or some of the oligonucleotides in the complexes, amplification of all or some of the oligonucleotides in the complexes, and/or hybridization of all or some of the oligonucleotides in the complexes to an array. The sequencing may be high-throughput or next generation sequencing.

[0028] In the methods of the invention, the biological test sample and biological control sample may each comprise a tissue sample, a cell culture, or a biological fluid. In some embodiments, the biological fluid comprises a bodily fluid. Useful bodily fluids within the method of the invention comprise peripheral blood, sera, plasma, ascites, urine, cerebrospinal fluid (CSF), sputum, saliva, bone marrow, synovial fluid, aqueous humor, amniotic fluid, cerumen, breast milk, broncheoalveolar lavage fluid, semen, prostatic fluid, cowper's fluid or pre-ejaculatory fluid, female ejaculate, sweat, fecal matter, hair, tears, cyst fluid, pleural and peritoneal fluid, pericardial fluid, lymph, chyme, chyle, bile, interstitial fluid, menses, pus, sebum, vomit, vaginal secretions, mucosal secretion, stool water, pancreatic juice, lavage fluids from sinus cavities, bronchopulmonary aspirates, blastocyl cavity fluid, or umbilical cord blood. In some preferred embodiments, the bodily fluid comprises blood, serum or plasma. The biological fluid may comprise microvesicles. In such case, the complexes may be formed between the oligonucleotide or plurality of oligonucleotides and at least one of the microvesicles.

[0029] The biological test sample and biological control sample may further comprise isolated microvesicles, wherein optionally the microvesicles are isolated using at least one of chromatography, filtration, ultrafiltration, centrifugation, ultracentrifugation, flow cytometry, affinity capture (e.g., to a planar surface, column or bead), polymer precipitation, and using microfluidics. The vesicles can also be isolated after contact with the oligonucleotide or plurality of oligonucleotides.

[0030] In various embodiments of the methods of the invention, the oligonucleotide or plurality of oligonucleotides binds a polypeptide or fragment thereof. The polypeptide or fragment thereof can be soluble or membrane bound, wherein optionally the membrane comprises a microvesicle membrane. The membrane could also be from a cell or a fragment of a cell of vesicle. In some embodiments, the polypeptide or fragment thereof comprises a biomarker in Table 3 or Table 4. For example, the polypeptide or fragment thereof could be a general vesicle marker such as in Table 3 or a tissue-related or disease-related marker such as in Table 4. The oligonucleotide or plurality of oligonucleotides may bind a microvesicle surface antigen in the biological sample. For example, the oligonucleotide or plurality of oligonucleotides can be enriched from a naïve library against microvesicles.

[0031] The disease or disorder detected by the oligonucleotide, plurality of oligonucleotides, or methods provided here may comprise any appropriate disease or disorder of interest, including without limitation Breast Cancer, Alzheimer's disease, bronchial asthma, Transitional cell carcinoma of the bladder, Giant cellular osteoblastoclastoma, Brain Tumor, Colorectal adenocarcinoma, Chronic obstructive pulmonary disease (COPD), Squamous cell carcinoma of the cervix, acute myocardial infarction (AMI)/acute heart failure, Chron's Disease, diabetes mellitus type II, Esophageal carcinoma, Squamous cell carcinoma of the larynx, Acute and chronic leukemia of the bone marrow, Lung carcinoma, Malignant lymphoma, Multiple Sclerosis, Ovarian carcinoma, Parkinson disease, Prostate adenocarcinoma, psoriasis, Rheumatoid Arthritis, Renal cell carcinoma, Squamous cell carcinoma of skin, Adenocarcinoma of the stomach, carcinoma of the thyroid gland, Testicular cancer, ulcerative colitis, or Uterine adenocarcinoma.

[0032] In some embodiments, the disease or disorder comprises a cancer, a premalignant condition, an inflammatory disease, an immune disease, an autoimmune disease or disorder, a cardiovascular disease or disorder, neurological disease or disorder, infectious disease or pain. The cancer can include without limitation one of acute lymphoblastic leukemia; acute myeloid leukemia; adrenocortical carcinoma; AIDS-related cancers; AIDS-related lymphoma; anal cancer; appendix cancer; astrocytomas; atypical teratoid/rhabdoid tumor; basal cell carcinoma; bladder cancer; brain stem glioma; brain tumor (including brain stem glioma, central nervous system atypical teratoid/rhabdoid tumor, central nervous system embryonal tumors, astrocytomas, craniopharyngioma, ependymoblastoma, ependymoma, medulloblastoma, medulloepithelioma, pineal parenchymal tumors of intermediate differentiation, supratentorial primitive neuroectodermal tumors and pineoblastoma); breast cancer; bronchial tumors; Burkitt lymphoma; cancer of unknown primary site; carcinoid tumor; carcinoma of unknown primary site; central nervous system atypical teratoid/rhabdoid tumor; central nervous system embryonal tumors; cervical cancer; childhood cancers; chordoma; chronic lymphocytic leukemia; chronic myelogenous leukemia; chronic myeloproliferative disorders; colon cancer; colorectal cancer; craniopharyngioma; cutaneous T-cell lymphoma; endocrine pancreas islet cell tumors; endometrial cancer; ependymoblastoma; ependymoma; esophageal cancer; esthesioneuroblastoma; Ewing sarcoma; extracranial germ cell tumor; extragonadal germ cell tumor; extrahepatic bile duct cancer; gallbladder cancer; gastric (stomach) cancer; gastrointestinal carcinoid tumor; gastrointestinal stromal cell tumor; gastrointestinal stromal tumor (GIST); gestational trophoblastic tumor; glioma; hairy cell leukemia; head and neck cancer; heart cancer; Hodgkin lymphoma; hypopharyngeal cancer; intraocular melanoma; islet cell tumors; Kaposi sarcoma; kidney cancer; Langerhans cell histiocytosis; laryngeal cancer; lip cancer; liver cancer; lung cancer; malignant fibrous histiocytoma bone cancer; medulloblastoma; medulloepithelioma; melanoma; Merkel cell carcinoma; Merkel cell skin carcinoma; mesothelioma; metastatic squamous neck cancer with occult primary; mouth cancer; multiple endocrine neoplasia syndromes; multiple myeloma; multiple myeloma/plasma cell neoplasm; mycosis fungoides; myelodysplastic syndromes; myeloproliferative neoplasms; nasal cavity cancer; nasopharyngeal cancer; neuroblastoma; Non-Hodgkin lymphoma; nonmelanoma skin cancer; non-small cell lung cancer; oral cancer; oral cavity cancer; oropharyngeal cancer; osteosarcoma; other brain and spinal cord tumors; ovarian cancer; ovarian epithelial cancer; ovarian germ cell tumor; ovarian low malignant potential tumor; pancreatic cancer; papillomatosis; paranasal sinus cancer; parathyroid cancer; pelvic cancer; penile cancer; pharyngeal cancer; pineal parenchymal tumors of intermediate differentiation; pineoblastoma; pituitary tumor; plasma cell neoplasm/multiple myeloma; pleuropulmonary blastoma; primary central nervous system (CNS) lymphoma; primary hepatocellular liver cancer; prostate cancer; rectal cancer; renal cancer; renal cell (kidney) cancer; renal cell cancer; respiratory tract cancer; retinoblastoma; rhabdomyosarcoma; salivary gland cancer; Sézary syndrome; small cell lung cancer; small intestine cancer; soft tissue sarcoma; squamous cell carcinoma; squamous neck cancer; stomach (gastric) cancer; supratentorial primitive neuroectodermal tumors; T-cell lymphoma; testicular cancer; throat cancer; thymic carcinoma; thymoma; thyroid cancer; transitional cell cancer; transitional cell cancer of the renal pelvis and ureter; trophoblastic tumor; ureter cancer; urethral cancer; uterine cancer; uterine sarcoma; vaginal cancer; vulvar cancer; Waldenström macroglobulinemia; or Wilm's tumor. The premalignant condition can include without limitation Barrett's Esophagus. The autoimmune disease can include without limitation one of inflammatory bowel disease (IBD), Crohn's disease (CD), ulcerative colitis (UC), pelvic inflammation, vasculitis, psoriasis, diabetes, autoimmune hepatitis, multiple sclerosis, myasthenia gravis, Type I diabetes, rheumatoid arthritis, psoriasis, systemic lupus erythematosis (SLE), Hashimoto's Thyroiditis, Grave's disease, Ankylosing Spondylitis Sjogrens Disease, CREST syndrome, Scleroderma, Rheumatic Disease, organ rejection, Primary Sclerosing Cholangitis, or sepsis. The cardiovascular disease can include without limitation one of atherosclerosis, congestive heart failure, vulnerable plaque, stroke, ischemia, high blood pressure, stenosis, vessel occlusion or a thrombotic event. The neurological disease can include without limitation one of Multiple Sclerosis (MS), Parkinson's Disease (PD), Alzheimer's Disease (AD), schizophrenia, bipolar disorder, depression, autism, Prion Disease, Pick's disease, dementia, Huntington disease (HD), Down's syndrome, cerebrovascular disease, Rasmussen's encephalitis, viral meningitis, neurospsychiatric systemic lupus erythematosus (NPSLE), amyotrophic lateral sclerosis, Creutzfeldt-Jacob disease, Gerstmann-Straussler-Scheinker disease, transmissible spongiform encephalopathy, ischemic reperfusion damage (e.g. stroke), brain trauma, microbial infection, or chronic fatigue syndrome. The pain can include without limitation one of fibromyalgia, chronic neuropathic pain, or peripheral neuropathic pain. The infectious disease can include without limitation one of a bacterial infection, viral infection, yeast infection, Whipple's Disease, Prion Disease, cirrhosis, methicillin-resistant staphylococcus aureus, HIV, HCV, hepatitis, syphilis, meningitis, malaria, tuberculosis, or influenza. One of skill will appreciate that the oligonucleotide or plurality of oligonucleotides or methods of the invention can be used to assess any number of these or other related diseases and disorders.

[0033] In some embodiments of the invention, the oligonucleotide or plurality of oligonucleotides and methods of use thereof are useful for characterizing certain diseases or disease states. As desired, a pool of oligonucleotides useful for characterizing various diseases is assembled to create a master pool that can be used to probe useful for characterizing the various diseases. For example, the combination of SEQ ID NOs. 510599-510763 provided herein comprise such a pool. One of skill will also appreciate that pools of oligonucleotides useful for characterizing specific diseases or disorders can be created as well. The oligonucleotides and pools thereof can be modified as described herein.

[0034] In an embodiment, the disease or disorder comprises a breast cancer and the oligonucleotide or plurality of oligonucleotides useful for characterization thereof comprises at least 1, 2, 3, 4, 5, 6, 7, 8, 9, 10, 11, 12, 13, 14, 15, 16, 17, 18, 19, 20, 25, 30 or at least 40 of SEQ ID NOs. 510559-510598. The oligonucleotides may incorporate various chemical modifications, additions, deletions, insertions, substitutions or other modifications so long as functional aspects of the oligonucleotides are enhanced or maintained in whole or in part.

[0035] In another embodiment, and the disease or disorder comprises Alzheimer's disease and the oligonucleotide or plurality of oligonucleotides useful for characterization thereof comprises at least 1, 2, 3, 4, 5, 6, 7, 8, 9, 10, 11, 12, 13, 14, 15, 16, 17, 18, 19, 20, 25, 30, 40, 45, 50 or all of SEQ ID NOs. 510600, 510604, 510605, 510608, 510609, 510612, 510614, 510629, 510632, 510633, 510634, 510641, 510642, 510643, 510646, 510648, 510649, 510651, 510652, 510653, 510655, 510661, 510667, 510673, 510675, 510676, 510677, 510678, 510679, 510681, 510683, 510685, 510687, 510688, 510690, 510694, 510696, 510702, 510707, 510709, 510726, 510727, 510728, 510729, 510730, 510731, 510732, 510737, 510740, 510748, 510749, 510751, 510752, 510754, 510756, 510757, 510758, 510761, and 510762. In a related embodiment, the disease or disorder comprises Alzheimer's disease and the oligonucleotide or plurality of oligonucleotides useful for characterization thereof comprises at least 1, 2, 3, 4, 5, 6, 7, 8, 9, 10, 11, 12, 13, 14, 15, 16, 17, 18, 19, 20, 25, 30, 40, 45, 50 or all of SEQ ID NOs. 510599, 510601, 510603, 510606, 510608, 510609, 510611, 510613, 510614, 510615, 510619, 510621, 510625, 510628, 510629, 510630, 510632, 510634, 510635, 510636, 510637, 510644, 510647, 510648, 510651, 510652, 510654, 510657, 510665, 510666, 510667, 510668, 510677, 510678, 510679, 510687, 510692, 510693, 510696, 510698, 510699, 510701, 510702, 510707, 510708, 510710, 510713, 510716, 510725, 510726, 510728, 510731, 510732, 510733, 510734, 510736, 510741, 510748, 510749, 510755, 510757, 510758, 510761, and 510762. The oligonucleotides may incorporate various chemical modifications, additions, deletions, insertions, substitutions or other modifications so long as functional aspects of the oligonucleotides are enhanced or maintained in whole or in part.

[0036] The disease or disorder may comprise bronchial asthma and the oligonucleotide or plurality of oligonucleotides useful for characterization thereof comprises at least 1, 2, 3, 4, 5, 6, 7, 8, 9, 10, 11, 12, 13, 14, 15, 16, 17, 18, 19, 20, 25, 30, 40, 45, 50 or all of SEQ ID NOs. 510601, 510614, 510619, 510623, 510627, 510631, 510633, 510635, 510647, 510655, 510656, 510660, 510672, 510689, 510690, 510693, 510698, 510701, 510702, 510707, 510709, 510710, 510713, 510720, 510723, 510724, 510726, 510728, 510729, 510730, 510731, 510734, 510735, 510738, 510743, 510744, 510745, 510746, 510748, 510749, 510750, 510751, 510752, 510754, 510755, 510757, 510758, 510759, 510760, 510761, and 510762. The disease or disorder may also comprise bronchial asthma and the oligonucleotide or plurality of oligonucleotides useful for characterization thereof comprises at least 1, 2, 3, 4, 5, 6, 7, 8, 9, 10, 11, 12, 13, 14, 15, 16, 17, 18, 19, 20, 25, 30, 40, 45, 50 or all of SEQ ID NOs. 510600, 510608, 510609, 510610, 510611, 510617, 510619, 510622, 510631, 510632, 510634, 510635, 510637, 510642, 510643, 510644, 510652, 510655, 510657, 510658, 510665, 510668, 510673, 510675, 510676, 510677, 510678, 510679, 510683, 510691, 510701, 510703, 510704, 510706, 510708, 510709, 510714, 510725, 510736, 510737, 510740, 510741, 510742, and 510756. The oligonucleotides may incorporate various chemical modifications, additions, deletions, insertions, substitutions or other modifications so long as functional aspects of the oligonucleotides are enhanced or maintained in whole or in part.

[0037] In some embodiments, the disease or disorder comprises a transitional cell carcinoma of the bladder and the oligonucleotide or plurality of oligonucleotides useful for characterization thereof comprises at least 1, 2, 3, 4, 5, 6, 7, 8, 9, 10, 11, 12, 13, 14, 15, 16, 17, 18, 19, 20, 25, 30, 40, 45, 50 or all of SEQ ID NOs. 510607, 510619, 510623, 510631, 510632, 510635, 510641, 510642, 510647, 510656, 510657, 510658, 510659, 510673, 510674, 510683, 510686, 510693, 510695, 510701, 510702, 510707, 510708, 510711, 510716, 510722, 510725, 510726, 510728, 510731, 510734, 510737, 510744, 510748, 510749, 510751, 510752, 510753, 510756, 510757, 510758, 510761, and 510762. The oligonucleotides may incorporate various chemical modifications, additions, deletions, insertions, substitutions or other modifications so long as functional aspects of the oligonucleotides are enhanced or maintained in whole or in part.

[0038] In another embodiment, the disease or disorder comprises a giant cellular osteoblastoclastoma and the oligonucleotide or plurality of oligonucleotides useful for characterization thereof comprises at least 1, 2, 3, 4, 5, 6, 7, 8, 9, 10, 11, 12, 13, 14, 15, 16, 17, 18, 19, 20, 25, 30, 40, 45, 50 or all of SEQ ID NOs. 510612, 510620, 510635, 510637, 510641, 510644, 510648, 510658, 510662, 510663, 510667, 510668, 510670, 510676, 510678, 510679, 510682, 510683, 510685, 510686, 510699, 510708, 510712, 510722, 510737, and 510753. The oligonucleotides may incorporate various chemical modifications, additions, deletions, insertions, substitutions or other modifications so long as functional aspects of the oligonucleotides are enhanced or maintained in whole or in part.

[0039] The disease or disorder may comprise a brain tumor and the oligonucleotide or plurality of oligonucleotides useful for characterization thereof comprises at least 1, 2, 3, 4, 5, 6, 7, 8, 9, 10, 11, 12, 13, 14, 15, 16, 17, 18, 19, 20, 25, 30, 40, 45, 50 or all of SEQ ID NOs. 510607, 510619, 510624, 510628, 510639, 510641, 510645, 510647, 510648, 510655, 510657, 510665, 510668, 510673, 510674, 510689, 510695, 510698, 510699, 510705, 510710, 510711, 510712, 510713, 510716, 510734, 510737, 510738, and 510762. The oligonucleotides may incorporate various chemical modifications, additions, deletions, insertions, substitutions or other modifications so long as functional aspects of the oligonucleotides are enhanced or maintained in whole or in part.

[0040] In another embodiment, the disease or disorder comprises a colorectal adenocarcinoma and the oligonucleotide or plurality of oligonucleotides useful for characterization thereof comprises at least 1, 2, 3, 4, 5, 6, 7, 8, 9, 10, 11, 12, 13, 14, 15, 16, 17, 18, 19, 20, 25, 30, 40, 45, 50 or all of SEQ ID NOs. 510603, 510607, 510611, 510616, 510618, 510619, 510623, 510624, 510641, 510644, 510646, 510647, 510655, 510656, 510672, 510673, 510690, 510693, 510695, 510698, 510701, 510702, 510709, 510711, 510714, 510716, 510719, 510723, 510724, 510725, 510726, 510730, 510731, 510734, 510735, 510737, 510738, 510743, 510744, 510748, 510749, 510751, 510752, 510754, 510755, 510757, 510758, 510760, 510761, 510762, and 510763. The oligonucleotides may incorporate various chemical modifications, additions, deletions, insertions, substitutions or other modifications so long as functional aspects of the oligonucleotides are enhanced or maintained in whole or in part.

[0041] In still another embodiment, the disease or disorder comprises a chronic obstructive pulmonary disease (COPD) and the oligonucleotide or plurality of oligonucleotides useful for characterization thereof comprises at least 1, 2, 3, 4, 5, 6, 7, 8, 9, 10, 11, 12, 13, 14, 15, 16, 17, 18, 19, 20, 25, 30, 40, 45, 50 or all of SEQ ID NOs. 510604, 510608, 510609, 510612, 510614, 510616, 510619, 510620, 510629, 510634, 510637, 510640, 510647, 510649, 510653, 510661, 510666, 510667, 510669, 510673, 510678, 510682, 510689, 510690, 510701, 510707, 510715, 510723, 510727, 510728, 510749, 510754, 510755, 510757, 510758, 510762, and 510763. In a related embodiment, the disease or disorder comprises a chronic obstructive pulmonary disease (COPD) and the oligonucleotide or plurality of oligonucleotides useful for characterization thereof comprises at least 1, 2, 3, 4, 5, 6, 7, 8, 9, 10, 11, 12, 13, 14, 15, 16, 17, 18, 19, 20, 25, 30, 40, 45, 50 or all of SEQ ID NOs. 510601, 510609, 510611, 510613, 510620, 510634, 510637, 510647, 510648, 510654, 510664, 510668, 510679, 510694, 510696, 510698, 510699, 510701, 510705, 510706, 510710, 510718, 510734, and 510741. The oligonucleotides may incorporate various chemical modifications, additions, deletions, insertions, substitutions or other modifications so long as functional aspects of the oligonucleotides are enhanced or maintained in whole or in part.

[0042] The disease or disorder can be a squamous cell carcinoma of the cervix and the oligonucleotide or plurality of oligonucleotides useful for characterization thereof comprises at least 1, 2, 3, 4, 5, 6, 7, 8, 9, 10, 11, 12, 13, 14, 15, 16, 17, 18, 19, 20, 25, 30, 40, 45, 50 or all of SEQ ID NOs. 510615, 510619, 510623, 510626, 510630, 510632, 510633, 510635, 510638, 510639, 510641, 510642, 510644, 510647, 510650, 510655, 510656, 510657, 510661, 510673, 510674, 510677, 510683, 510688, 510693, 510695, 510698, 510711, 510712, 510714, 510716, 510717, 510722, 510725, 510729, 510731, 510734, 510737, 510743, 510745, 510747, 510753, 510755, 510756, 510758, 510759, and 510763. The oligonucleotides may incorporate various chemical modifications, additions, deletions, insertions, substitutions or other modifications so long as functional aspects of the oligonucleotides are enhanced or maintained in whole or in part.

[0043] The disease or disorder may comprise an acute myocardial infarction (AMI) or acute heart failure and the oligonucleotide or plurality of oligonucleotides useful for characterization thereof comprises at least 1, 2, 3, 4, 5, 6, 7, 8, 9, 10, 11, 12, 13, 14, 15, 16, 17, 18, 19, 20, 25, 30, 40, 45, 50 or all of SEQ ID NOs. 510607, 510608, 510613, 510626, 510629, 510631, 510634, 510635, 510638, 510639, 510646, 510648, 510656, 510667, 510669, 510671, 510672, 510675, 510682, 510689, 510698, 510701, 510707, 510710, 510715, 510721, 510723, 510727, 510728, 510730, 510731, 510734, 510735, 510743, 510744, 510748, 510749, 510751, 510752, 510757, 510758, 510760, 510761, and 510762. In a related embodiment, the disease or disorder comprises an acute myocardial infarction (AMI) or acute heart failure and the oligonucleotide or plurality of oligonucleotides useful for characterization thereof comprises at least 1, 2, 3, 4, 5, 6, 7, 8, 9, 10, 11, 12, 13, 14, 15, 16, 17, 18, 19, 20, 25, 30, 40, 45, 50 or all of SEQ ID NOs. 510599, 510601, 510606, 510607, 510608, 510609, 510611, 510614, 510616, 510619, 510622, 510624, 510626, 510635, 510636, 510637, 510640, 510641, 510643, 510644, 510648, 510651, 510665, 510668, 510669, 510672, 510675, 510677, 510678, 510679, 510682, 510692, 510695, 510696, 510698, 510699, 510701, 510703, 510707, 510710, 510725, 510726, 510728, 510729, 510730, 510731, 510733, 510734, 510736, 510743, 510750, 510751, 510752, 510755, 510757, 510758, 510759, 510760, 510761, and 510762. The oligonucleotides may incorporate various chemical modifications, additions, deletions, insertions, substitutions or other modifications so long as functional aspects of the oligonucleotides are enhanced or maintained in whole or in part.

[0044] In some embodiments, the disease or disorder comprises Chron's Disease and the oligonucleotide or plurality of oligonucleotides useful for characterization thereof comprises at least 1, 2, 3, 4, 5, 6, 7, 8, 9, 10, 11, 12, 13, 14, 15, 16, 17, 18, 19, 20, 25, 30, 40, 45, 50 or all of SEQ ID NOs. 510600, 510602, 510608, 510611, 510624, 510644, 510653, 510656, 510659, 510669, 510671, 510676, 510686, 510689, 510690, 510697, 510698, 510700, 510713, 510727, 510728, 510729, 510731, 510734, 510744, 510751, and 510757. In a related embodiment, the disease or disorder comprises Chron's Disease and the oligonucleotide or plurality of oligonucleotides useful for characterization thereof comprises at least 1, 2, 3, 4, 5, 6, 7, 8, 9, 10, 11, 12, 13, 14, 15, 16, 17, 18, 19, 20, 25, 30, 40, 45, 50 or all of SEQ ID NOs. 510600, 510610, 510611, 510615, 510618, 510621, 510623, 510625, 510626, 510628, 510631, 510632, 510635, 510637, 510638, 510643, 510647, 510648, 510649, 510653, 510654, 510655, 510657, 510658, 510666, 510667, 510668, 510672, 510675, 510677, 510678, 510679, 510680, 510682, 510684, 510689, 510691, 510694, 510696, 510698, 510701, 510707, 510708, 510709, 510710, 510713, 510714, 510715, 510719, 510725, 510727, 510728, 510729, 510730, 510731, 510734, 510736, 510738, 510743, 510744, 510748, 510750, 510751, 510755, 510757, 510758, 510759, 510760, 510761, 510762, and 510763. The oligonucleotides may incorporate various chemical modifications, additions, deletions, insertions, substitutions or other modifications so long as functional aspects of the oligonucleotides are enhanced or maintained in whole or in part.

[0045] The disease or disorder may comprise diabetes mellitus type II and the oligonucleotide or plurality of oligonucleotides useful for characterization thereof comprises at least 1, 2, 3, 4, 5, 6, 7, 8, 9, 10, 11, 12, 13, 14, 15, 16, 17, 18, 19, 20, 25, 30, 40, 45, 50 or all of SEQ ID NOs. 510600, 510604, 510608, 510610, 510611, 510614, 510616, 510620, 510624, 510629, 510632, 510634, 510640, 510649, 510667, 510669, 510670, 510671, 510678, 510685, 510700, 510701, 510702, 510707, 510709, 510718, 510721, 510723, 510726, 510727, 510728, 510729, 510730, 510731, 510733, 510735, 510743, 510748, 510749, 510752, 510754, 510755, 510757, 510758, 510760, 510761, 510762, and 510763. Relatedly, the disease or disorder may comprise diabetes mellitus type II and the oligonucleotide or plurality of oligonucleotides useful for characterization thereof comprises at least 1, 2, 3, 4, 5, 6, 7, 8, 9, 10, 11, 12, 13, 14, 15, 16, 17, 18, 19, 20, 25, 30, 40, 45, 50 or all of SEQ ID NOs. 510613, 510632, 510635, 510636, 510641, 510645, 510647, 510648, 510654, 510660, 510664, 510667, 510668, 510670, 510675, 510684, 510691, 510695, 510696, 510706, 510710, 510734, and 510749. The oligonucleotides may incorporate various chemical modifications, additions, deletions, insertions, substitutions or other modifications so long as functional aspects of the oligonucleotides are enhanced or maintained in whole or in part.

[0046] In some embodiments, the disease or disorder comprises an esophageal carcinoma and the oligonucleotide or plurality of oligonucleotides useful for characterization thereof comprises at least 1, 2, 3, 4, 5, 6, 7, 8, 9, 10, 11, 12, 13, 14, 15, 16, 17, 18, 19, 20, 25, 30, 40, 45, 50 or all of SEQ ID NOs. 510602, 510619, 510623, 510632, 510635, 510638, 510641, 510644, 510653, 510656, 510661, 510671, 510682, 510689, 510693, 510698, 510714, 510722, 510725, 510731, 510734, 510738, 510753, and 510761. The oligonucleotides may incorporate various chemical modifications, additions, deletions, insertions, substitutions or other modifications so long as functional aspects of the oligonucleotides are enhanced or maintained in whole or in part.

[0047] In another embodiment, the disease or disorder comprises a squamous cell carcinoma of the larynx and the oligonucleotide or plurality of oligonucleotides useful for characterization thereof comprises at least 1, 2, 3, 4, 5, 6, 7, 8, 9, 10, 11, 12, 13, 14, 15, 16, 17, 18, 19, 20, 25, 30, 40, 45, 50 or all of SEQ ID NOs. 510605, 510607, 510612, 510614, 510619, 510623, 510632, 510635, 510641, 510642, 510655, 510656, 510657, 510659, 510661, 510668, 510673, 510674, 510689, 510690, 510693, 510695, 510698, 510708, 510712, 510732, 510734, 510737, 510738, 510745, 510747, 510753, and 510755. The oligonucleotides may incorporate various chemical modifications, additions, deletions, insertions, substitutions or other modifications so long as functional aspects of the oligonucleotides are enhanced or maintained in whole or in part.

[0048] In still another embodiment, the disease or disorder comprises an acute or chronic leukemia of the bone marrow and the oligonucleotide or plurality of oligonucleotides useful for characterization thereof comprises at least 1, 2, 3, 4, 5, 6, 7, 8, 9, 10, 11, 12, 13, 14, 15, 16, 17, 18, 19, 20, 25, 30, 40, 45, 50 or all of SEQ ID NOs. 510600, 510605, 510607, 510610, 510612, 510628, 510631, 510633, 510641, 510644, 510650, 510664, 510670, 510673, 510674, 510675, 510681, 510684, 510685, 510686, 510701, 510711, 510712, 510717, 510718, 510719, 510720, 510721, 510724, 510729, 510732, 510739, 510740, 510743, 510745, 510746, 510747, 510752, 510754, and 510763. The oligonucleotides may incorporate various chemical modifications, additions, deletions, insertions, substitutions or other modifications so long as functional aspects of the oligonucleotides are enhanced or maintained in whole or in part.

[0049] In yet another embodiment, the disease or disorder comprises a lung carcinoma and the oligonucleotide or plurality of oligonucleotides useful for characterization thereof comprises at least 1, 2, 3, 4, 5, 6, 7, 8, 9, 10, 11, 12, 13, 14, 15, 16, 17, 18, 19, 20, 25, 30, 40, 45, 50 or all of SEQ ID NOs. 510604, 510626, 510628, 510631, 510633, 510635, 510649, 510650, 510654, 510668, 510672, 510674, 510677, 510699, 510701, 510702, 510710, 510712, 510715, 510717, 510719, 510720, 510721, 510723, 510724, 510726, 510727, 510733, 510735, 510738, 510743, 510744, 510745, 510746, 510747, 510750, 510751, 510754, 510755, 510758, 510760, and 510763. The oligonucleotides may incorporate various chemical modifications, additions, deletions, insertions, substitutions or other modifications so long as functional aspects of the oligonucleotides are enhanced or maintained in whole or in part.

[0050] The disease or disorder may comprise a malignant lymphoma and the oligonucleotide or plurality of oligonucleotides useful for characterization thereof comprises at least 1, 2, 3, 4, 5, 6, 7, 8, 9, 10, 11, 12, 13, 14, 15, 16, 17, 18, 19, 20, 25, 30, 40, 45, 50 or all of SEQ ID NOs. 510601, 510611, 510618, 510623, 510624, 510631, 510632, 510636, 510638, 510641, 510644, 510645, 510647, 510656, 510660, 510662, 510672, 510673, 510675, 510690, 510693, 510701, 510702, 510707, 510708, 510713, 510717, 510719, 510721, 510723, 510724, 510725, 510726, 510728, 510729, 510730, 510731, 510734, 510735, 510737, 510743, 510744, 510749, 510751, 510752, 510754, 510755, 510756, 510757, 510758, 510760, 510762, and 510763. The oligonucleotides may incorporate various chemical modifications, additions, deletions, insertions, substitutions or other modifications so long as functional aspects of the oligonucleotides are enhanced or maintained in whole or in part.

[0051] The disease or disorder may also comprise multiple sclerosis and the oligonucleotide or plurality of oligonucleotides useful for characterization thereof comprises at least 1, 2, 3, 4, 5, 6, 7, 8, 9, 10, 11, 12, 13, 14, 15, 16, 17, 18, 19, 20, 25, 30, 40, 45, 50 or all of SEQ ID NOs. 510607, 510612, 510620, 510646, 510653, 510655, 510661, 510663, 510669, 510675, 510682, 510685, 510686, 510690, 510699, 510701, 510710, 510713, 510731, 510738, 510747, 510758, and 510762. Relatedly, the disease or disorder may comprise multiple sclerosis and the oligonucleotide or plurality of oligonucleotides useful for characterization thereof comprises at least 1, 2, 3, 4, 5, 6, 7, 8, 9, 10, 11, 12, 13, 14, 15, 16, 17, 18, 19, 20, 25, 30, 40, 45, 50 or all of SEQ ID NOs. 510599, 510604, 510609, 510610, 510613, 510617, 510618, 510622, 510632, 510635, 510647, 510670, 510675, 510677, 510687, 510690, 510692, 510695, 510701, 510706, 510708, 510731, and 510733. The oligonucleotides may incorporate various chemical modifications, additions, deletions, insertions, substitutions or other modifications so long as functional aspects of the oligonucleotides are enhanced or maintained in whole or in part.

[0052] In an embodiment, the disease or disorder comprises an ovarian carcinoma and the oligonucleotide or plurality of oligonucleotides useful for characterization thereof comprises at least 1, 2, 3, 4, 5, 6, 7, 8, 9, 10, 11, 12, 13, 14, 15, 16, 17, 18, 19, 20, 25, 30, 40, 45, 50 or all of SEQ ID NOs. 510618, 510626, 510628, 510633, 510638, 510641, 510642, 510643, 510645, 510646, 510647, 510650, 510652, 510658, 510665, 510666, 510673, 510674, 510677, 510682, 510683, 510689, 510705, 510707, 510712, 510717, 510722, 510724, 510729, 510732, 510735, 510737, 510745, 510746, 510747, 510753, and 510756. The oligonucleotides may incorporate various chemical modifications, additions, deletions, insertions, substitutions or other modifications so long as functional aspects of the oligonucleotides are enhanced or maintained in whole or in part.

[0053] In another embodiment, the disease or disorder comprises Parkinson disease and the oligonucleotide or plurality of oligonucleotides useful for characterization thereof comprises at least 1, 2, 3, 4, 5, 6, 7, 8, 9, 10, 11, 12, 13, 14, 15, 16, 17, 18, 19, 20, 25, 30, 40, 45, 50 or all of SEQ ID NOs. 510600, 510601, 510604, 510608, 510609, 510612, 510614, 510624, 510631, 510633, 510634, 510640, 510641, 510642, 510649, 510650, 510651, 510653, 510667, 510673, 510675, 510676, 510677, 510683, 510686, 510689, 510694, 510700, 510703, 510704, 510705, 510706, 510707, 510709, 510713, 510715, 510721, 510723, 510724, 510726, 510727, 510729, 510730, 510731, 510732, 510734, 510735, 510736, 510737, 510739, 510740, 510741, 510742, 510744, 510745, 510746, 510747, 510748, 510751, 510752, 510754, 510756, 510757, 510758, 510759, 510760, 510761, and 510762. In a related embodiment, the disease or disorder comprises Parkinson disease and the oligonucleotide or plurality of oligonucleotides useful for characterization thereof comprises at least 1, 2, 3, 4, 5, 6, 7, 8, 9, 10, 11, 12, 13, 14, 15, 16, 17, 18, 19, 20, 25, 30, 40, 45, 50 or all of SEQ ID NOs. 510601, 510606, 510608, 510609, 510610, 510614, 510616, 510632, 510634, 510643, 510644, 510647, 510648, 510654, 510662, 510664, 510665, 510667, 510668, 510670, 510677, 510678, 510679, 510687, 510692, 510696, 510698, 510699, 510701, 510703, 510704, 510706, 510708, 510710, 510722, 510727, 510734, 510736, 510741, 510742, 510753, and 510756. The oligonucleotides may incorporate various chemical modifications, additions, deletions, insertions, substitutions or other modifications so long as functional aspects of the oligonucleotides are enhanced or maintained in whole or in part.

[0054] In still another embodiment, the disease or disorder comprises a prostate adenocarcinoma and the oligonucleotide or plurality of oligonucleotides useful for characterization thereof comprises at least 1, 2, 3, 4, 5, 6, 7, 8, 9, 10, 11, 12, 13, 14, 15, 16, 17, 18, 19, 20, 25, 30, 40, 45, 50 or all of SEQ ID NOs. 510600, 510603, 510607, 510619, 510623, 510624, 510628, 510641, 510642, 510644, 510647, 510650, 510655, 510656, 510657, 510669, 510673, 510674, 510677, 510684, 510688, 510689, 510690, 510695, 510698, 510701, 510709, 510710, 510718, 510726, 510734, 510737, 510738, 510739, 510757, and 510762. The oligonucleotides may incorporate various chemical modifications, additions, deletions, insertions, substitutions or other modifications so long as functional aspects of the oligonucleotides are enhanced or maintained in whole or in part.

[0055] In yet another embodiment, the disease or disorder comprises psoriasis and the oligonucleotide or plurality of oligonucleotides useful for characterization thereof comprises at least 1, 2, 3, 4, 5, 6, 7, 8, 9, 10, 11, 12, 13, 14, 15, 16, 17, 18, 19, 20, 25, 30, 40, 45, 50 or all of SEQ ID NOs. 510600, 510601, 510608, 510609, 510611, 510614, 510620, 510624, 510626, 510631, 510633, 510634, 510635, 510638, 510647, 510649, 510650, 510653, 510656, 510665, 510666, 510667, 510669, 510672, 510674, 510675, 510680, 510685, 510689, 510698, 510702, 510707, 510711, 510712, 510715, 510717, 510719, 510720, 510721, 510723, 510724, 510726, 510727, 510728, 510729, 510730, 510731, 510734, 510735, 510743, 510744, 510745, 510746, 510747, 510748, 510749, 510750, 510751, 510752, 510754, 510755, 510757, 510758, 510759, 510760, 510761, 510762, and 510763. The oligonucleotides may incorporate various chemical modifications, additions, deletions, insertions, substitutions or other modifications so long as functional aspects of the oligonucleotides are enhanced or maintained in whole or in part.

[0056] The disease or disorder can be psoriasis and the oligonucleotide or plurality of oligonucleotides useful for characterization thereof comprises at least 1, 2, 3, 4, 5, 6, 7, 8, 9, 10, 11, 12, 13, 14, 15, 16, 17, 18, 19, 20, 25, 30, 40, 45, 50 or all of SEQ ID NOs. 510600, 510601, 510604, 510613, 510621, 510627, 510637, 510641, 510644, 510648, 510650, 510652, 510663, 510667, 510668, 510676, 510680, 510681, 510699, 510701, 510703, 510705, 510709, 510710, 510722, 510734, 510739, 510750, and 510753. The oligonucleotides may incorporate various chemical modifications, additions, deletions, insertions, substitutions or other modifications so long as functional aspects of the oligonucleotides are enhanced or maintained in whole or in part.

[0057] The disease or disorder can also be rheumatoid arthritis and the oligonucleotide or plurality of oligonucleotides useful for characterization thereof comprises at least 1, 2, 3, 4, 5, 6, 7, 8, 9, 10, 11, 12, 13, 14, 15, 16, 17, 18, 19, 20, 25, 30, 40, 45, 50 or all of SEQ ID NOs. 510599, 510603, 510604, 510607, 510608, 510609, 510614, 510616, 510622, 510625, 510627, 510629, 510630, 510634, 510635, 510636, 510637, 510640, 510642, 510646, 510649, 510650, 510651, 510653, 510656, 510664, 510665, 510667, 510671, 510675, 510677, 510678, 510679, 510682, 510689, 510699, 510707, 510726, 510727, 510728, 510729, 510731, 510733, 510737, 510738, 510748, 510755, 510758, 510761, and 510762. The oligonucleotides may incorporate various chemical modifications, additions, deletions, insertions, substitutions or other modifications so long as functional aspects of the oligonucleotides are enhanced or maintained in whole or in part.

[0058] In some embodiments, the disease or disorder comprises rheumatoid arthritis and the oligonucleotide or plurality of oligonucleotides useful for characterization thereof comprises at least 1, 2, 3, 4, 5, 6, 7, 8, 9, 10, 11, 12, 13, 14, 15, 16, 17, 18, 19, 20, 25, 30, 40, 45, 50 or all of SEQ ID NOs. 510599, 510601, 510603, 510604, 510606, 510607, 510608, 510609, 510610, 510611, 510612, 510613, 510614, 510616, 510617, 510618, 510622, 510623, 510625, 510629, 510630, 510634, 510635, 510636, 510637, 510638, 510639, 510640, 510641, 510643, 510644, 510645, 510646, 510648, 510649, 510651, 510652, 510653, 510654, 510658, 510662, 510663, 510664, 510665, 510666, 510667, 510668, 510669, 510671, 510673, 510677, 510678, 510679, 510682, 510685, 510692, 510696, 510697, 510698, 510699, 510701, 510703, 510710, 510716, 510722, 510725, 510726, 510727, 510730, 510733, 510734, 510738, 510741, 510743, 510753, 510755, and 510757. The oligonucleotides may incorporate various chemical modifications, additions, deletions, insertions, substitutions or other modifications so long as functional aspects of the oligonucleotides are enhanced or maintained in whole or in part.

[0059] In another embodiment, the disease or disorder comprises a renal cell carcinoma and the oligonucleotide or plurality of oligonucleotides useful for characterization thereof comprises at least 1, 2, 3, 4, 5, 6, 7, 8, 9, 10, 11, 12, 13, 14, 15, 16, 17, 18, 19, 20, 25, 30, 40, 45, 50 or all of SEQ ID NOs. 510600, 510603, 510604, 510606, 510608, 510614, 510616, 510622, 510628, 510629, 510630, 510632, 510634, 510635, 510640, 510644, 510645, 510646, 510652, 510653, 510656, 510664, 510665, 510666, 510667, 510671, 510675, 510677, 510683, 510685, 510687, 510690, 510701, 510722, 510726, 510728, 510729, 510730, 510731, 510732, 510733, 510734, 510738, 510748, 510749, 510752, 510753, 510758, 510761, and 510762. The oligonucleotides may incorporate various chemical modifications, additions, deletions, insertions, substitutions or other modifications so long as functional aspects of the oligonucleotides are enhanced or maintained in whole or in part.

[0060] In still another embodiment, the disease or disorder comprises a squamous cell carcinoma of skin and the oligonucleotide or plurality of oligonucleotides useful for characterization thereof comprises at least 1, 2, 3, 4, 5, 6, 7, 8, 9, 10, 11, 12, 13, 14, 15, 16, 17, 18, 19, 20, 25, 30, 40, 45, 50 or all of SEQ ID NOs. 510618, 510622, 510626, 510639, 510641, 510642, 510650, 510658, 510673, 510674, 510683, 510696, 510708, 510712, 510717, 510720, 510722, 510723, 510724, 510727, 510729, 510743, 510745, 510746, 510747, 510752, 510753, 510754, 510755, 510756, 510759, 510761, and 510763. The oligonucleotides may incorporate various chemical modifications, additions, deletions, insertions, substitutions or other modifications so long as functional aspects of the oligonucleotides are enhanced or maintained in whole or in part.

[0061] In various embodiments, the disease or disorder comprises an adenocarcinoma of the stomach and the oligonucleotide or plurality of oligonucleotides useful for characterization thereof comprises at least 1, 2, 3, 4, 5, 6, 7, 8, 9, 10, 11, 12, 13, 14, 15, 16, 17, 18, 19, 20, 25, 30, 40, 45, 50 or all of SEQ ID NOs. 510600, 510604, 510608, 510609, 510612, 510626, 510631, 510632, 510634, 510639, 510653, 510658, 510663, 510667, 510681, 510689, 510692, 510693, 510696, 510698, 510699, 510705, 510711, 510715, 510717, 510719, 510723, 510725, 510729, 510731, 510734, 510735, 510736, 510743, 510746, 510748, 510751, 510754, 510757, 510760, 510762, and 510763. The oligonucleotides may incorporate various chemical modifications, additions, deletions, insertions, substitutions or other modifications so long as functional aspects of the oligonucleotides are enhanced or maintained in whole or in part.

[0062] The disease or disorder may comprise a carcinoma of the thyroid gland and the oligonucleotide or plurality of oligonucleotides useful for characterization thereof comprises at least 1, 2, 3, 4, 5, 6, 7, 8, 9, 10, 11, 12, 13, 14, 15, 16, 17, 18, 19, 20, 25, 30, 40, 45, 50 or all of SEQ ID NOs. 510602, 510603, 510614, 510626, 510638, 510641, 510644, 510646, 510653, 510658, 510659, 510661, 510662, 510674, 510689, 510693, 510695, 510698, 510699, 510701, 510704, 510705, 510708, 510717, 510718, 510722, 510727, 510731, 510734, 510736, 510739, 510740, 510741, 510747, 510753, and 510755. The oligonucleotides may incorporate various chemical modifications, additions, deletions, insertions, substitutions or other modifications so long as functional aspects of the oligonucleotides are enhanced or maintained in whole or in part.

[0063] The disease or disorder may also comprise a testicular cancer and the oligonucleotide or plurality of oligonucleotides useful for characterization thereof comprises at least 1, 2, 3, 4, 5, 6, 7, 8, 9, 10, 11, 12, 13, 14, 15, 16, 17, 18, 19, 20, 25, 30, 40, 45, 50 or all of SEQ ID NOs. 510600, 510603, 510607, 510615, 510616, 510618, 510619, 510621, 510622, 510623, 510624, 510630, 510636, 510637, 510641, 510644, 510645, 510647, 510650, 510654, 510655, 510656, 510657, 510659, 510662, 510665, 510670, 510673, 510674, 510681, 510684, 510685, 510687, 510688, 510689, 510690, 510692, 510693, 510695, 510696, 510698, 510700, 510701, 510704, 510707, 510712, 510713, 510717, 510718, 510726, 510734, 510737, 510738, 510739, 510740, 510742, 510747, 510756, and 510757. The oligonucleotides may incorporate various chemical modifications, additions, deletions, insertions, substitutions or other modifications so long as functional aspects of the oligonucleotides are enhanced or maintained in whole or in part.

[0064] The disease or disorder can be ulcerative colitis and the oligonucleotide or plurality of oligonucleotides useful for characterization thereof comprises at least 1, 2, 3, 4, 5, 6, 7, 8, 9, 10, 11, 12, 13, 14, 15, 16, 17, 18, 19, 20, 25, 30, 40, 45, 50 or all of SEQ ID NOs. 510599, 510607, 510611, 510612, 510616, 510620, 510621, 510622, 510624, 510626, 510632, 510633, 510636, 510646, 510655, 510659, 510672, 510673, 510675, 510676, 510677, 510682, 510684, 510691, 510692, 510702, 510703, 510704, 510705, 510706, 510707, 510709, 510710, 510715, 510721, 510723, 510724, 510728, 510729, 510730, 510731, 510735, 510736, 510737, 510739, 510740, 510741, 510743, 510744, 510748, 510751, 510752, 510754, 510757, 510758, 510759, 510760, 510761, and 510762. In a related embodiment, the disease or disorder comprises ulcerative colitis and the oligonucleotide or plurality of oligonucleotides useful for characterization thereof comprises at least 1, 2, 3, 4, 5, 6, 7, 8, 9, 10, 11, 12, 13, 14, 15, 16, 17, 18, 19, 20, 25, 30, 40, 45, 50 or all of SEQ ID NOs. 510610, 510611, 510612, 510619, 510622, 510623, 510634, 510635, 510641, 510647, 510648, 510654, 510657, 510664, 510668, 510670, 510671, 510676, 510677, 510678, 510679, 510689, 510691, 510696, 510701, 510703, 510704, 510710, 510722, 510734, 510742, and 510753. The oligonucleotides may incorporate various chemical modifications, additions, deletions, insertions, substitutions or other modifications so long as functional aspects of the oligonucleotides are enhanced or maintained in whole or in part.

[0065] The disease or disorder can also be a uterine adenocarcinoma and the oligonucleotide or plurality of oligonucleotides useful for characterization thereof comprises at least 1, 2, 3, 4, 5, 6, 7, 8, 9, 10, 11, 12, 13, 14, 15, 16, 17, 18, 19, 20, 25, 30, 40, 45, 50 or all of SEQ ID NOs. 510601, 510612, 510621, 510626, 510637, 510641, 510644, 510650, 510653, 510669, 510675, 510684, 510686, 510687, 510696, 510714, 510717, 510722, 510739, 510743, 510745, 510746, 510753, 510755, and 510762. The oligonucleotides may incorporate various chemical modifications, additions, deletions, insertions, substitutions or other modifications so long as functional aspects of the oligonucleotides are enhanced or maintained in whole or in part.

[0066] In an aspect, the invention provides a kit comprising a reagent for carrying out the methods of the invention provided herein. In a similar aspect, the invention contemplates use of a reagent for carrying out the methods of the invention provided herein. In embodiments, the reagent comprises an oligonucleotide or plurality of oligonucleotides. The oligonucleotide or plurality of oligonucleotides can be those provided herein. The reagent may comprise various other useful components including without limitation one or more of: a) a reagent configured to isolate a microvesicle, optionally wherein the at least one reagent configured to isolate a microvesicle comprises a binding agent to a microvesicle antigen, a column, a substrate, a filtration unit, a polymer, polyethylene glycol, PEG4000, PEG8000, a particle or a bead; b) at least one oligonucleotide configured to act as a primer or probe in order to amplify, sequence, hybridize or detect the oligonucleotide or plurality of oligonucleotides; and c) a reagent configured to remove one or more abundant protein from a sample, wherein optionally the one or more abundant protein comprises at least one of albumin, immunoglobulin, fibrinogen and fibrin.

[0067] In another aspect, the invention provides an aptamer comprising a nucleic acid sequence that is at least about 50, 55, 60, 65, 70, 75, 80, 85, 90, 95, 96, 97, 98, 99 or 100 percent homologous of any of: a) SEQ ID NOs. 8-21 or a variable sequence thereof as described in Table 8; b) SEQ ID NOs. 24-43 or a variable sequence thereof as described in Table 11; c) SEQ ID NOs. 44-10527; d) SEQ ID NOs. 10528-10557 or a variable sequence thereof as described in Table 12; or e) a functional fragment of any preceding sequence. The aptamer may recognize a microvesicle surface antigen. The aptamers of the invention may be identified herein in the form of DNA or RNA. Unless otherwise specified, one of skill in the art will appreciate that an aptamer may generally be synthesized in various forms of nucleic acid. The aptamers may also carry various chemical modifications and remain within the scope of the invention.

[0068] In some embodiments, an aptamer of the invention is modified to comprise at least one chemical modification. The modification may include without limitation a chemical substitution at a sugar position; a chemical substitution at a phosphate position; and a chemical substitution at a base position of the nucleic acid. In some embodiments, the modification is selected from the group consisting of: biotinylation, incorporation of a fluorescent label, incorporation of a modified nucleotide, a 2′-modified pyrimidine, 3′ capping, conjugation to an amine linker, conjugation to a high molecular weight, non-immunogenic compound, conjugation to a lipophilic compound, conjugation to a drug, conjugation to a cytotoxic moiety, and labeling with a radioisotope, or other modification as disclosed herein. The position of the modification can be varied as desired. For example, the biotinylation, fluorescent label, or cytotoxic moiety can be conjugated to the 5′ end of the aptamer. The biotinylation, fluorescent label, or cytotoxic moiety can also be conjugated to the 3′ end of the aptamer.

[0069] In some embodiments, the cytotoxic moiety is encapsulated in a nanoparticle. The nanoparticle can be selected from the group consisting of: liposomes, dendrimers, and comb polymers. In other embodiments, the cytotoxic moiety comprises a small molecule cytotoxic moiety. The small molecule cytotoxic moiety can include without limtation vinblastine hydrazide, calicheamicin, vinca alkaloid, a cryptophycin, a tubulysin, dolastatin-10, dolastatin-15, auristatin E, rhizoxin, epothilone B, epithilone D, taxoids, maytansinoids and any variants and derivatives thereof. In still other embodiments, the cytotoxic moiety comprises a protein toxin. For example, the protein toxin can be selected from the group consisting of diphtheria toxin, ricin, abrin, gelonin, and Pseudomonas exotoxin A. Non-immunogenic, high molecular weight compounds for use with the invention include polyalkylene glycols, e.g., polyethylene glycol. Appropriate radioisotopes include yttrium-90, indium-111, iodine-131, lutetium-177, copper-67, rhenium-186, rhenium-188, bismuth-212, bismuth-213, astatine-211, and actinium-225. The aptamer may be labeled with a gamma-emitting radioisotope.

[0070] In some embodiments of the invention, an active agent is conjugated to the aptamer. For example, the active agent may be a therapeutic agent or a diagnostic agent. The therapeutic agent may be selected from the group consisting of tyrosine kinase inhibitors, kinase inhibitors, biologically active agents, biological molecules, radionuclides, adriamycin, ansamycin antibiotics, asparaginase, bleomycin, busulphan, cisplatin, carboplatin, carmustine, capecotabine, chlorambucil, cytarabine, cyclophosphamide, camptothecin, dacarbazine, dactinomycin, daunorubicin, dexrazoxane, docetaxel, doxorubicin, etoposide, epothilones, floxuridine, fludarabine, fluorouracil, gemcitabine, hydroxyurea, idarubicin, ifosfamide, irinotecan, lomustine, mechlorethamine, mercaptopurine, melphalan, methotrexate, rapamycin (sirolimus), mitomycin, mitotane, mitoxantrone, nitrosurea, paclitaxel, pamidronate, pentostatin, plicamycin, procarbazine, rituximab, streptozocin, teniposide, thioguanine, thiotepa, taxanes, vinblastine, vincristine, vinorelbine, taxol, combretastatins, discodermolides, transplatinum, anti-vascular endothelial growth factor compounds (“anti-VEGFs”), anti-epidermal growth factor receptor compounds (“anti-EGFRs”), 5-fluorouracil and derivatives, radionuclides, polypeptide toxins, apoptosis inducers, therapy sensitizers, enzyme or active fragment thereof, and combinations thereof.

[0071] The invention further provides a pharmaceutical composition comprising a therapeutically effective amount of the aptamer described above or a salt thereof, and a pharmaceutically acceptable carrier or diluent. The invention also provides a pharmaceutical composition comprising a therapeutically effective amount of the aptamer or a salt thereof, and a pharmaceutically acceptable carrier or diluent. Relatedly, the invention provides a method of treating or ameliorating a disease or disorder, comprising administering the pharmaceutical composition to a subject in need thereof. Administering a therapeutically effective amount of the composition to the subject may result in: (a) an enhancement of the delivery of the active agent to a disease site relative to delivery of the active agent alone; or (b) an enhancement of microvesicles clearance resulting in a decrease of at least 10%, 20%, 30%, 40%, 50%, 60%, 70%, 80%, or 90% in a blood level of microvesicles targeted by the aptamer; or (c) an decrease in biological activity of microvesicles targeted by the aptamer of at least 10%, 20%, 30%, 40%, 50%, 60%, 70%, 80%, or 90%. In an embodiment, the biological activity of microvesicles comprises immune suppression or transfer of genetic information. The disease or disorder can include without limitation those disclosed herein. For example, the disease or disorder may comprise a neoplastic, proliferative, or inflammatory, metabolic, cardiovascular, or neurological disease or disorder. See above and further section “Phenotypes.”

[0072] The invention further provides a kit comprising an aptamer disclosed herein, or a pharmaceutical composition thereof.

[0073] In an aspect, the invention provides a method comprising contacting the aptamer as described above with a biological sample and detecting the presence or absence of binding of the aptamer to a microvesicle in the biological sample. As disclosed herein, the biological sample can be a tissue, fluid or cell culture sample. For example, the biological sample may comprise blood or a blood component. In some embodiments, the aptamer is conjugated to a substrate prior to the contacting with the biological sample. For example, the substrate may comprise a bead or a plate well. The aptamer may also be conjugated to a detectable label. Various configurations of the method are provided herein. See, e.g., FIGS. 2A-2B and 16A.

[0074] In a related aspect, the invention provides a method of detecting a presence or level of a microvesicle population in a biological sample suspected of containing the microvesicle population, comprising contacting the biological sample with one or more binding agent specific to the microvesicle population and one or more aptamer as described above, and detecting microvesicles that are recognized by both the one or more binding agent and the one or more aptamer, thereby detecting the presence or level of the microvesicle population in the biological sample.

[0075] The biological sample can be a tissue sample, a cell culture, or a bodily fluid. The bodily fluid can be any useful fluid, including without limitation one or more of peripheral blood, sera, plasma, ascites, urine, cerebrospinal fluid (CSF), sputum, saliva, bone marrow, synovial fluid, aqueous humor, amniotic fluid, cerumen, breast milk, broncheoalveolar lavage fluid, semen, prostatic fluid, cowper's fluid or pre-ejaculatory fluid, female ejaculate, sweat, fecal matter, hair, tears, cyst fluid, pleural and peritoneal fluid, pericardial fluid, lymph, chyme, chyle, bile, interstitial fluid, menses, pus, sebum, vomit, vaginal secretions, mucosal secretion, stool water, pancreatic juice, lavage fluids from sinus cavities, bronchopulmonary aspirates, blastocyl cavity fluid, and umbilical cord blood. In some embodiments, the bodily fluid comprises blood, serum or plasma.

[0076] Any useful binding agent can be used in the subject methods. In some embodiments, the one or more binding agent comprises an antibody or aptamer to a microvesicle surface antigen selected from Table 3, Table 4, and a combination thereof. For example, the one or more binding agent may be an antibody or aptamer to a microvesicle surface antigen selected from the group consisting of EpCam, CD9, PCSA, CD63, CD81, PSMA, B7H3, PSCA, ICAM, STEAP, KLK2, SSX2, SSX4, PBP, SPDEF, EGFR, and a combination thereof. The one or more binding agent can also comprise an antibody or aptamer to a microvesicle surface antigen selected from the group consisting of EGFR, PBP, EpCAM, KLK2, and a combination thereof.

[0077] The invention contemplates various configurations. For example, a “sandwich” format can be used. See, e.g., FIGS. 2A-2B. In some embodiments of the method, the one or more binding agent is conjugated to a substrate prior to the contacting with the biological sample. In this configuration, the one or more aptamer may be conjugated to a detectable label to serve as a detector agent. In other embodiments, the one or more binding agent is conjugated to a detectable label. In this configuration, the one or more aptamer may be conjugated to a substrate prior to the contacting with the biological sample to serve as a capture agent. Furthermore, the one or more aptamer can be conjugated to a substrate prior to the contacting with the biological sample, and/or the one or more aptamer is conjugated to a detectable label. In such cases, the one or more aptamer can act as either or both of a capture agent and a detection agent.

[0078] In another related aspect, the invention provides a method of characterizing a disease or disorder, comprising: (a) contacting a biological test sample with one or more aptamer as provided herein; (b) detecting a presence or level of a complex between the one or more aptamer and the target bound by the one or more aptamer in the biological test sample formed in step (a); and (c) comparing the presence or level detected in step (b) to a reference level from a biological control sample, thereby characterizing the disease or disorder. The reference level may be derived from a level of the target in a healthy sample individual, e.g., one that does not have or is not known to have the disease or disorder. The reference level may also be derived from an individual or sample having a treated, controlled, or alternate disease.

[0079] The biological test sample and biological control sample may each comprise a tissue sample, a cell culture, or a biological fluid. In some embodiments, the biological fluid comprises a bodily fluid. The bodily fluid can be any useful fluid, including without limitation one or more of peripheral blood, sera, plasma, ascites, urine, cerebrospinal fluid (CSF), sputum, saliva, bone marrow, synovial fluid, aqueous humor, amniotic fluid, cerumen, breast milk, broncheoalveolar lavage fluid, semen, prostatic fluid, cowper's fluid or pre-ejaculatory fluid, female ejaculate, sweat, fecal matter, hair, tears, cyst fluid, pleural and peritoneal fluid, pericardial fluid, lymph, chyme, chyle, bile, interstitial fluid, menses, pus, sebum, vomit, vaginal secretions, mucosal secretion, stool water, pancreatic juice, lavage fluids from sinus cavities, bronchopulmonary aspirates, blastocyl cavity fluid, or umbilical cord blood. In some embodiments, the bodily fluid comprises blood, serum or plasma. The biological fluid may comprise or be suspected to comprise microvesicles.

[0080] The one or more aptamer may bind a polypeptide or fragment thereof. The binding may be promiscuous or selective as desired. The polypeptide or fragment thereof can be soluble or membrane bound, e.g., in the membrane of a microvesicle or cell fragment. The polypeptide or fragment thereof comprises a biomarker in Table 3 or Table 4. The one or more aptamer can bind a microvesicle surface antigen in the biological sample.

[0081] The method provided herein of detecting aptamer binding to a microvesicle or of characterizing a disease or disorder may include providing a diagnosis, prognosis or theranosis of the disease or disorder. The disease or disorder can include without limitation those disclosed herein. For example, the disease or disorder may comprise a cancer, a premalignant condition, an inflammatory disease, an immune disease, an autoimmune disease or disorder, a cardiovascular disease or disorder, a neurological disease or disorder, an infectious disease, and/or pain. See, e.g., section “Phenotypes” herein.

[0082] The invention further provides a kit comprising a reagent for carrying out the methods herein and also use of the reagent for carrying out the methods related to the aptamers of the invention. For example, the reagent may comprise an aptamer disclosed herein. The reagent may further comprise other useful components disclosed herein including without limitation at least one of: a) a reagent configured to isolate a microvesicle, optionally wherein the at least one reagent configured to isolate a microvesicle comprises a binding agent to a microvesicle antigen, a column, a substrate, a filtration unit, a polymer, polyethylene glycol, PEG4000, PEG8000, a particle or a bead; b) at least one oligonucleotide configured to act as a primer or probe in order to amplify, sequence, hybridize or detect the oligonucleotide or plurality of oligonucleotides; and c) a reagent configured to remove one or more abundant protein from a sample, wherein optionally the one or more abundant protein comprises at least one of albumin, immunoglobulin, fibrinogen and fibrin.

[0083] In an aspect, the invention provides a composition comprising an input oligonucleotide library for assessing a cellular or extracellular vesicle sample comprising at least two subset oligonucleotide libraries to generate the input oligonucleotide library, wherein at least one of the at least two subset oligonucleotide libraries are manufactured with amounts of nucleotides with a total G and C content that is not equal to 50%. For example, the total G and C content can be less than 50%, or the total G and C content can be more than 50%. In one embodiment, at least one subset library is manufactured with a total G and C content that is more than 50% and another subset library is manufactured with a total G and C content less than 50%. In an embodiment, the at least two subset libraries comprises three subset libraries manufactured with 25%, 50% and 75% G and C content, respectively. The at least two subset libraries can be manufactured with amounts of nucleotides similar or equal to at least two rows in Table 13. The nucleotides can consist of naturally occurring nucleotides or modified naturally occurring nucleotides as desired. The nucleotides can also comprise non-naturally occurring nucleotides. Such input oligonucleotide libraries may be referred to as “GC” libraries herein.

[0084] In a related aspect, the invention provides a method of generating an input oligonucleotide library of the invention, comprising contacting the at least two subset oligonucleotide libraries to generate the input oligonucleotide library. The input oligonucleotide library can be screened or enriched to provide various aptamers or oligonucleotide probe libraries using the methods described herein.

[0085] In an aspect, the invention provides an oligonucleotide having a sequence that comprises a 5′ transposon adapter region, an offset region comprising 0 or more nucleotides located 5′ to the transposon adapter region, a variable region located 5′ to the offset region, and a left primer region located 5′ to the variable region. In a related aspect, the invention provides a plurality of oligonucleotides comprising at least 1, 2, 3, 4, 5, 6, 7, 8, 9, 10, 11, 12, 13, 14, 15, 16, 17, 18, 19, 20, 25, 30, 40, 45, 50, 55, 60, 65, 70, 75, 80, 85, 90, 95, 100, 125, 150, 175, 200, 300, 400, 500, 600, 700, 800, 900, 1000, 2000, 3000, 4000, 5000, 6000, 7000, 8000, 9000, 10000, 20000, 30000, 40000, 50000, 60000, 70000, 80000, 90000, 100000, 200000, 300000, 400000, 500000, 10⁶, 10⁷, 10⁸, 10⁹, 10¹⁰, 10¹¹, 10¹², 10¹³, 10¹⁴, 10¹⁵, 10¹⁶, 10¹⁷, or at least 10¹⁸ different oligonucleotide sequences, wherein each of the oligonucleotide sequences comprises a 5′ transposon adapter region, an offset region comprising 0 or more nucleotides located 5′ to the transposon adapter region, a variable region located 5′ to the offset region, and a left primer region located 5′ to the variable region. Such oligonucleotides may be referred to herein as “balanced” oligonucleotides.

[0086] The balanced oligonucleotide or plurality of oligonucleotides of the invention can be such that: a) the transposon adapter region comprises 20-40 nucleotides; b) the offset region comprises 0, 1, 2, 3, 4, 5, 6, 7, 8, 9 or 10 nucleotides; c) the variable region comprises 20-50 nucleotides; and/or d) the left primer region comprises 20-40 nucleotides. In some embodiments, the balanced oligonucleotides are such that: a) the transposon adapter region comprises a nucleic acid sequence that is at least about 50, 55, 60, 65, 70, 75, 80, 85, 90, 95, 96, 97, 98, 99 or 100 percent homologous to the sequence 5′-TCGTCGGCAGCGTCAGATGTGTATAAGAGACAG (SEQ ID NO. 510764); b) the offset region comprises 1, 2, 3, 4, 5, 6, 7, 8, 9 or 10 nucleotides that are at least about 50, 55, 60, 65, 70, 75, 80, 85, 90, 95, 96, 97, 98, 99 or 100 percent homologous to at least one of the following sequences: 5′-T (SEQ ID NO. 510765), 5′-CT (SEQ ID NO. 510766) and 5′-ACT (SEQ ID NO. 510767); c) the variable region comprises 20, 21, 22, 23, 24, 25 26 27, 28, 29, 30, 31, 32, 33, 34, 35, 36, 37, 38, 39, 40, 41, 42, 43, 44, 45, 46, 47, 48, 49 or 50 nucleotides; and/or d) the left primer region comprises a nucleic acid sequence that is at least about 50, 55, 60, 65, 70, 75, 80, 85, 90, 95, 96, 97, 98, 99 or 100 percent homologous to a sequence selected from SEQ ID NOs. 510768 and 510769. The variable region may comprise “GC” library sequences as provided herein.

[0087] In an aspect, the invention provides a method of identifying an aptamer, comprising performing a selection or enrichment process using a balanced oligonucleotide or plurality of balanced oligonucleotides as a naïve input library. Such selection or enrichment processes are described or provided herein, including without limitation SELEX and variations thereof. In an embodiment, the selection process comprises at least one round of positive selection against a target of interest and optionally at least one round of negative selection against a target other than the target of interest.

[0088] In another aspect, the invention provides a method comprising contacting a balanced oligonucleotide or plurality of balanced oligonucleotides with a sample and detecting the presence or level of binding of the oligonucleotide or plurality of oligonucleotides to a target in the sample. The sample may comprise a biological sample, such as an organic sample, an inorganic sample, a tissue, a cell culture, a bodily fluid, blood, serum, a cell, a microvesicle, a protein complex, a lipid complex, a carbohydrate, or any combination, fraction or variation thereof. The target can be any useful target, including without limitation a cell, an organelle, a protein complex, a lipoprotein, a carbohydrate, a microvesicle, a membrane fragment, a small molecule, a heavy metal, a toxin, or a drug.

[0089] In a related aspect, the invention provides a method comprising: a) contacting a biological sample comprising microvesicles with an oligonucleotide probe library, wherein the oligonucleotide probe library comprises a balanced oligonucleotide or plurality of balanced oligonucleotides; b) identifying oligonucleotides bound to at least a portion of the microvesicles; and c) characterizing the sample based on a profile of the identified oligonucleotides.

[0090] In another related aspect, the invention provides a method comprising: a) contacting a sample with an oligonucleotide probe library comprising at least 10⁶, 10⁷, 10⁸, 10⁹, 10¹⁰, 10¹¹, 10¹², 10¹³, 10¹⁴, 10¹⁵, 10¹⁶, 10¹⁷, or at least 10¹⁸ different oligonucleotide sequences oligonucleotides to form a mixture in solution, wherein the oligonucleotides are capable of binding a plurality of entities in the sample to form complexes, wherein the oligonucleotide probe library comprises a balanced oligonucleotide or plurality of balanced oligonucleotides; d) partitioning the complexes formed in step (a) from the mixture; and c) detecting oligonucleotides present in the complexes partitioned in step (b) to identify an oligonucleotide profile for the sample. In a related aspect, the invention provides a method of characterizing a disease or disorder, comprising: a) contacting a biological test sample with a balanced oligonucleotide or plurality of balanced oligonucleotides; b) detecting a presence or level of complexes formed in step (a) between the balanced oligonucleotide or plurality of balanced oligonucleotides and a target in the biological test sample; and c) comparing the presence or level detected in step (b) to a reference level from a biological control sample, thereby characterizing the disease or disorder. The step of detecting may comprise performing sequencing of all or some of the oligonucleotides in the complexes, amplification of all or some of the oligonucleotides in the complexes, and/or hybridization of all or some of the oligonucleotides in the complexes to an array. In some embodiments, the sequencing comprises high-throughput sequencing.

[0091] In the methods of the invention comprising use of a balanced oligonucleotide or plurality of balanced oligonucleotides, the biological test sample and biological control sample may each comprise a tissue sample, a cell culture, or a biological fluid. In some embodiments, the biological fluid comprises a bodily fluid. Useful bodily fluids within the method of the invention comprise peripheral blood, sera, plasma, ascites, urine, cerebrospinal fluid (CSF), sputum, saliva, bone marrow, synovial fluid, aqueous humor, amniotic fluid, cerumen, breast milk, broncheoalveolar lavage fluid, semen, prostatic fluid, cowper's fluid or pre-ejaculatory fluid, female ejaculate, sweat, fecal matter, hair, tears, cyst fluid, pleural and peritoneal fluid, pericardial fluid, lymph, chyme, chyle, bile, interstitial fluid, menses, pus, sebum, vomit, vaginal secretions, mucosal secretion, stool water, pancreatic juice, lavage fluids from sinus cavities, bronchopulmonary aspirates, blastocyl cavity fluid, or umbilical cord blood. In some preferred embodiments, the bodily fluid comprises blood, serum or plasma. The biological fluid may comprise microvesicles. In such case, the complexes may be formed between the oligonucleotide or plurality of oligonucleotides and at least one of the microvesicles. The biological test sample and biological control sample may further comprise isolated microvesicles, wherein optionally the microvesicles are isolated using at least one of chromatography, filtration, ultrafiltration, centrifugation, ultracentrifugation, flow cytometry, affinity capture (e.g., to a planar surface, column or bead), polymer precipitation, and using microfluidics. The vesicles can also be isolated after contact with the oligonucleotide or plurality of oligonucleotides.

[0092] In various embodiments of the methods of the invention comprising use of a balanced oligonucleotide or plurality of balanced oligonucleotides, the oligonucleotide or plurality of oligonucleotides binds a polypeptide or fragment thereof. The polypeptide or fragment thereof can be soluble or membrane bound, wherein optionally the membrane comprises a microvesicle membrane. The membrane could also be from a cell or a fragment of a cell of vesicle. In some embodiments, the polypeptide or fragment thereof comprises a biomarker in Table 3 or Table 4. For example, the polypeptide or fragment thereof could be a general vesicle marker such as in Table 3 or a tissue-related or disease-related marker such as in Table 4. The oligonucleotide or plurality of oligonucleotides may bind a microvesicle surface antigen in the biological sample. For example, the oligonucleotide or plurality of oligonucleotides can be enriched from a naïve library against microvesicles.

[0093] The disease or disorder detected by the oligonucleotide, plurality of oligonucleotides, or methods provided herein comprising use of a balanced oligonucleotide or plurality of balanced oligonucleotides may comprise any appropriate disease or disorder of interest. For example, the disease or disorder may comprise a cancer, a premalignant condition, an inflammatory disease, an immune disease, an autoimmune disease or disorder, a cardiovascular disease or disorder, a neurological disease or disorder, an infectious disease, and/or pain. See, e.g., section “Phenotypes” herein. The disease or disorder may include without limitation Breast Cancer, Alzheimer's disease, bronchial asthma, Transitional cell carcinoma of the bladder, Giant cellular osteoblastoclastoma, Brain Tumor, Colorectal adenocarcinoma, Chronic obstructive pulmonary disease (COPD), Squamous cell carcinoma of the cervix, acute myocardial infarction (AMI)/acute heart failure, Chron's Disease, diabetes mellitus type II, Esophageal carcinoma, Squamous cell carcinoma of the larynx, Acute and chronic leukemia of the bone marrow, Lung carcinoma, Malignant lymphoma, Multiple Sclerosis, Ovarian carcinoma, Parkinson disease, Prostate adenocarcinoma, psoriasis, Rheumatoid Arthritis, Renal cell carcinoma, Squamous cell carcinoma of skin, Adenocarcinoma of the stomach, carcinoma of the thyroid gland, Testicular cancer, ulcerative colitis, or Uterine adenocarcinoma.

[0094] The invention further provides a kit comprising a reagent for carrying out the methods herein and also use of the reagent for carrying out the methods related to GC libraries or balanced oligonucleotides of the invention. For example, the reagent may comprise one or more oligonucleotide having a sequence derived from a GC libraries and/or a balanced oligonucleotide library. The reagent may further comprise other useful components disclosed herein including without limitation at least one of: a) a reagent configured to isolate a microvesicle, optionally wherein the at least one reagent configured to isolate a microvesicle comprises a binding agent to a microvesicle antigen, a column, a substrate, a filtration unit, a polymer, polyethylene glycol, PEG4000, PEG8000, a particle or a bead; b) at least one oligonucleotide configured to act as a primer or probe in order to amplify, sequence, hybridize or detect the oligonucleotide or plurality of oligonucleotides; and c) a reagent configured to remove one or more abundant protein from a sample, wherein optionally the one or more abundant protein comprises at least one of albumin, immunoglobulin, fibrinogen and fibrin.

### BRIEF DESCRIPTION OF THE DRAWINGS

[0095] FIG. 1 illustrates a competitive assay selection strategy: the random pool of aptamer (the library) is incubated with the target protein, in this case, EpCAM. After washing and elution from the target, the eluted aptamers are again added to the target and allowed to bind. The antibody is then added to the reaction, competing with the aptamers at the epitope of the antibody. The aptamers displaced by the antibody are then collected.

[0096] FIGS. 2A-2F illustrate methods of assessing biomarkers such as microvesicle surface antigens. FIG. 2A is a schematic of a planar substrate coated with a capture agent, such as an aptamer or antibody, which captures vesicles expressing the target antigen of the capture agent. The capture agent may bind a protein expressed on the surface of vesicles shed from diseased cells (“disease vesicle”). The detection agent, which may also be an aptamer or antibody, carries a detectable label, here a fluorescent signal. The detection agent binds to the captured vesicle and provides a detectable signal via its fluorescent label. The detection agent can detect an antigen that is generally associated with vesicles, or is associated with a cell-of-origin or a disease, e.g., a cancer. FIG. 2B is a schematic of a particle bead conjugated with a capture agent, which captures vesicles expressing the target antigen of the capture agent. The capture agent may bind a protein expressed on the surface of vesicles shed from diseased cells (“disease vesicle”). The detection agent, which may also be an aptamer or antibody, carries a detectable label, here a fluorescent signal. The detection agent binds to the captured vesicle and provides a detectable signal via its fluorescent label. The detection agent can detect an antigen that is generally associated with vesicles, or is associated with a cell-of-origin or a disease, e.g., a cancer. FIG. 2C is an example of a screening scheme that can be performed by using different combinations of capture and detection agents to the indicated biomarkers. The biomarker combinations can be detected using assays as shown in FIGS. 2A-2B. FIGS. 2D-2E present illustrative schemes for capturing and detecting vesicles to characterize a phenotype. FIG. 2F presents illustrative schemes for assessing vesicle payload to characterize a phenotype.

[0097] FIGS. 3A-3B illustrate a non-limiting example of an aptamer nucleotide sequence and its secondary structure. FIG. 3A illustrates a secondary structure of a 32-mer oligonucleotide, Aptamer 4, with sequence 5′-CCCCCCGAATCACATGACTTGGGCGGGGGTCG (SEQ ID NO. 1). In the figure, the sequence is shown with 6 thymine nucleotides added to the end, which can act as a spacer to attach a biotin molecule. This particular oligo has a high binding affinity to the target, EpCAM (see Table 5). Additional candidate EpCAM binders are identified by modeling the entire database of sequenced oligos to the secondary structure of this oligo. FIG. 3B illustrates another 32-mer oligo with sequence 5′-ACCGGATAGCGGTTGGAGGCGTGCTCCACTCG (SEQ ID NO. 2) that has a different secondary structure than the aptamer in FIG. 3A. This aptamer is also shown with a 6-thymine tail.

[0098] FIG. 4 illustrates a process for producing a target-specific set of aptamers using a cell subtraction method, wherein the target is a biomarker associated with a specific disease. In Step 1, a random pool of oligonucleotides is contacted with a biological sample from a normal patient. In Step 2, the oligos that did not bind in Step 1 are added to a biological sample isolated from diseased patients. The bound oligos from this step are then eluted, captured via their biotin linkage and then combined again with normal biological sample. The unbound oligos are then added again to disease-derived biological sample and isolated. This process can be repeated iteratively. The final eluted aptamers are tested against patient samples to measure the sensitivity and specificity of the set. Biological samples can include blood, including plasma or serum, or other components of the circulatory system, such as microvesicles.

[0099] FIG. 5 illustrates results from a binding assay showing the binding affinity of an exemplary aptamer (Aptamer ID BTX176881 (SEQ ID NO: 3)) to the target EpCAM protein at various target concentrations. The aptamer to be tested is fixed to a substrate using a biotin tail and is incubated with various concentrations of target (125, 250 and 500 nM). The test is performed on a surface plasmon resonance machine (SPR). The SPR machine detects association and disassociation of the aptamer and the target. Target is applied until the association and disassociation events are equal, resulting in a plateau of the curve. The equations describing the curve at each concentration can then be used to calculate the K_{D} of the aptamer (see Table 5).

[0100] FIG. 6 illustrates the use of an anti-EpCAM aptamer (Aptamer 4; SEQ ID NO. 1) to detect a microvesicle population. Vesicles in patient plasma samples were captured using bead-conjugated antibodies to the indicated microvesicle surface antigens: A) EGFR; B) PBP; C) EpCAM; D) KLK2. Fluorescently labeled Aptamer 4 was used as a detector in the microbead assay. The figure shows average median fluorescence values (MFI values) for three cancer (C1-C3) and three normal samples (N1-N3) in each plot. In each plot, the samples from left to right are ordered as: C1, C2, C3, N1, N2, N3.

[0101] FIG. 7A illustrates the sequence of EPCAM aptamer CAR003 (SEQ ID NO. 4). FIG. 7B illustrates the optimal secondary structure of CAR003 with a minimum free energy (ΔG) of −30.00 kcal/mol. For purposes of illustration, the aptamer is shown as an RNA aptamer (SEQ ID NO. 5) corresponding to the DNA sequence in FIG. 7A. FIG. 7C illustrates aptamer pool purification. The figure comprises an FPLC chromatogram with all product and fractions assigned in pools after checking quality on gel. FIG. 7D illustrates a SYBR GOLD stained gel with different FPLC fractions of CAR003 aptamer after synthesis. Different fractions were combined in pools based on amount of un-finished chains in order high to low (pool 1-pool 3). The pools 1-3 correspond to those indicated in FIG. 7C. FIG. 7E-F illustrate binding of CAR003 to EPCAM protein in 25 mM HEPES with PBS-BN (FIG. 7E) or in 25 mM HEPES with 1 mM MgCl₂ (FIG. 7F). FIG. 7G illustrates CAR003 binding to EpCAM in the indicated salts with and without addition of bovine serum albumin (BSA). FIG. 7H illustrates the effect of denaturing on CAR003 binding to EPCAM protein. In each group of four bars, the aptamer is from left to right: Aptamer 4, CAR003 Pool 1, CAR003 Pool 2, and CAR003 Pool 3. FIG. 7I illustrates titration of aptamers against EPCAM recombinant protein (constant input 5 μg). FIG. 7J illustrates a Western blot with CAR003 aptamer versus EPCAM his-tagged protein, BSA, and HSA (5 μg each). The gel was blocked 0.5% F127 and probed with ˜50 μg/ml CAR003 biotinylated aptamer, fraction 3. The blot was visualized with NeutrAvidin-HRP followed by SuperSignal West Femto Chemiluminescent Substrate.

[0102] FIGS. 8A-8D illustrates methods to attach microvesicles to a substrate. FIG. 8A illustrates direct conjugation of a carboxylated microsphere to a vesicle surface antigen. FIG. 8B illustrates anchoring of a microvesicle to a microsphere via a biotin functionalized lipid anchor. FIG. 8C illustrates antibody binding to a vesicle surface antigen, wherein the antibody is conjugated to a carboxylated microsphere. FIG. 8D illustrates aptamer binding to a vesicle surface antigen, wherein the aptamer is conjugated to a carboxylated microsphere.

[0103] FIG. 9 comprises a schematic for identifying a target of a selected aptamer, such as an aptamer selected by the above process. The figure shows a binding agent 902, here an aptamer for purposes of illustration, tethered to a substrate 901. The binding agent 902 can be covalently attached to substrate 901. The binding agent 902 may also be non-covalently attached. For example, binding agent 902 can comprise a label which can be attracted to the substrate, such as a biotin group which can form a complex with an avidin/streptavidin molecule that is covalently attached to the substrate. The binding agent 902 binds to a surface antigen 903 of microvesicle 904. In the step signified by arrow (i), the microvesicle is disrupted while leaving the complex between the binding agent 902 and surface antigen 903 intact. Disrupted microvesicle 905 is removed, e.g., via washing or buffer exchange, in the step signified by arrow (ii). In the step signified by arrow (iii), the surface antigen 903 is released from the binding agent 902. The surface antigen 903 can be analyzed to determine its identity.

[0104] FIGS. 10A-C illustrate binding of selected aptamers against microbeads conjugated to various input sample. The aptamers were selected from an aptamer library as binding to microbeads conjugated to breast cancer-derived microvesicles. Experimental details are in the Examples herein. Each plot shows a different aptamer. The Y-axis indicates level of binding. In each group of samples, binding of 9 purified aptamer candidates is shown. The input sample is indicated on the X axis from left to right as follows: 1) Cancer Exosome: aptamer binding to microbeads conjugated to microvesicles isolated from plasma samples from breast cancer patients; 2) Cancer Non-exosome: aptamer binding to microbeads conjugated to plasma samples from breast cancer patients after removal of microvesicles by ultracentrifugation; 3) Non-Cancer Exosome: aptamer binding to microbeads conjugated to microvesicles isolated from plasma samples from normal (i.e., non-breast cancer) patients; 4) Non-Cancer Non-Exosome: aptamer binding to microbeads conjugated to plasma samples from breast cancer patients after removal of microvesicles by ultracentrifugation.

[0105] FIGS. 11A-G illustrate selection schemes used to enrich a starting aptamer library to a target of interest. In FIG. 11A, “Selection A” indicates 13 rounds of positive selection against microvesicles isolated from the plasma of breast cancer patients and non-breast cancer individuals. Cal refers to round 1 of cancer vesicle selection, etc. nCa1 refers to round 1 of non-cancer vesicle selection, etc. “Selection B” indicates a derivative wherein the aptamer pools after 3 rounds of positive selection in “Selection A” were used as input for 9 additions rounds (i.e., rounds 4-12) of positive and negative selection against microvesicles isolated from the plasma of breast cancer patients and non-breast cancer individuals. “noE” indicates the negative selection rounds. FIG. 11B show the recovered aptamer library after the indicated rounds of enrichment as run on agarose gels. Aptamers selected against cancer vesicles (“Ca”) and non-cancer microvesicles (“nCa”) are shown. FIG. 11C illustrates enrichment of aptamers that bind to cancer vesicles (three leftmost columns “Ca”) and non-cancer microvesicles (three rightmost columns “nCa”) through the rounds of selection 1 (R1), 7 (R7) and 13 (R13). Labeled aptamers after the indicated round of selection were incubated with bead-captured microvesicles. The number of aptamers binding to the bead-captured microvesicles was determined. The Y-axis indicates the percentage of bound aptamers compared to total input. The fall off from rounds 7 to 13 may indicate removal of non-specific binders. FIG. 11D and FIG. 11E indicate additional selection done for cancer and non-cancer microvesicles, respectively, after rounds 9 of “Selection B.” FIG. 11F presents another view of FIG. 11D. FIG. 11G shows a third selection “Selection C” performed after rounds 9 of “Selection B” with alternating rounds of selection against cancer-derived (Ca#) and non-cancer derived (nCa#) microvesicles.

[0106] FIG. 12 illustrates distribution of aptamer frequency observed in a selection steps versus sequence GC content. The library in this figure comprised of randomly generated sequences 30 nucleotides in length flanked by primer annealing sequences.

[0107] FIGS. 13A-I illustrate development and use of an oligonucleotide probe library to distinguish biological sample types.

[0108] FIGS. 14A-L illustrate application of the approach outlined in FIGS. 13A-I applied to distinguish breast cancer and normal (i.e., non-cancer) samples by probing plasma-derived microvesicles with an oligonucleotide probe library.

[0109] FIGS. 15A-AN comprise heat maps created using cluster analysis of oligonucleotide probe library analysis for various indications versus normal samples.

[0110] FIGS. 16A-C illustrate use of aptamers in methods of characterizing a phenotype. FIG. 16A is a schematic 1600 showing an assay configuration that can be used to detect and/or quantify a target of interest. In the figure, capture aptamer 1602 is attached to substrate 1601. Target of interest 1603 is bound by capture aptamer 1602. Detection aptamer 1604 is also bound to target of interest 1603. Detection aptamer 1604 carries label 1605 which can be detected to identify target captured to substrate 1601 via capture aptamer 1602. FIG. 16B is a schematic 1610 showing use of an aptamer pool to characterize a phenotype. A pool of aptamers to a target of interest is provided 1611. The pool is contacted with a test sample to be characterized 1612. The mixture is washed to remove unbound aptamers. The remaining aptamers are disassociated and collected 1613. The collected aptamers are identified 1614 and the identity of the retained aptamers is used to characterize the phenotype 1615. FIG. 16C is a schematic 1620 showing an implementation of the method in FIG. 16B. A pool of aptamers identified as binding a microvesicle population is provided 1621. The input sample comprises microvesicles that are isolated from a test sample 1622. The pool is contacted with the isolated microvesicles to be characterized 1623. The mixture is washed to remove unbound aptamers and the remaining aptamers are disassociated and collected 1625. The collected aptamers are identified and the identity of the retained aptamers is used to characterize the phenotype 1626.

[0111] FIGS. 17A-H illustrate an optimized aptamer library design for high throughput (Next Generation) sequencing.

### DETAILED DESCRIPTION OF THE INVENTION

[0112] The details of one or more embodiments of the invention are set forth in the accompanying description below. Although any methods and materials similar or equivalent to those described herein can be used in the practice or testing of the present invention, the preferred methods and materials are now described. Other features, objects, and advantages of the invention will be apparent from the description. In the specification, the singular forms also include the plural unless the context clearly dictates otherwise. Unless defined otherwise, all technical and scientific terms used herein have the same meaning as commonly understood by one of ordinary skill in the art to which this invention belongs. In the case of conflict, the present Specification will control.

[0113] Disclosed herein are compositions and methods that can be used to assess a biomarker profile, which can include a presence or level of one or more biomarkers. The compositions and methods of the invention comprise the use of aptamers that bind microvesicle surface antigens or a functional fragment thereof. The antigens typically comprise proteins or polypeptides but can be any component displayed on a microvesicle surface including lipids and/or carbohydrates. In general, aptamers disclosed are nucleic acid molecules, including DNA and RNA, and variations thereof. The methods disclosed comprise diagnostic processes and techniques using one or more aptamer of the invention, to determine level or presence of relevant microvesicle surface antigens or a functional fragment thereof. Alternatively, an aptamer of the invention can also be used as a binding agent to capture, isolate, or enrich, a cell, cell fragment, vesicle or any other fragment or complex that comprises the surface antigens or functional fragments thereof.

[0114] The compositions and methods of the invention comprise individual oligonucleotides that are identified for use in assessing a biomarker profile. The invention further discloses compositions and methods of oligonucleotide pools that can be used to detect a biomarker profile in a given sample.

[0115] Aptamers and sequences disclosed in the compositions and methods of the invention may be identified herein in the form of DNA or RNA. Unless otherwise specified, one of skill in the art will appreciate that an aptamer may generally be synthesized as either form of nucleic acid and carry various chemical modifications and remain within the scope of the invention. The term aptamer may be used in the art to refer to a single oligonucleotide that binds specifically to a target of interest through mechanisms other than Watson crick base pairing, similar to binding of a monoclonal antibody to a particular antigen. Within the scope of this disclosure and unless stated explicitly or otherwise implicit in context, the terms aptamer and oligonucleotide can be used interchangeably to refer to an oligonucleotide capable of distinguishing biological entities of interest (e.g, biomarkers) whether or not the specific entity has been identified or whether the precise mode of binding has been determined.

[0116] An aptamer of the invention can also be used to provide in vitro or in vivo detection or imaging, to provide any appropriate diagnostic readout (e.g., diagnostic, prognostic or theranostic).

[0117] Separately, an aptamer of the invention can also be used in for treatment or as a therapeutic to specifically target a cell, tissue or organ.

### Aptamers

[0118] SELEX. A suitable method for generating an aptamer is with the process entitled “Systematic Evolution of Ligands by Exponential Enrichment” (“SELEX”) generally described in, e.g., U.S. patent application Ser. No. 07/536,428, filed Jun. 11, 1990, now abandoned, U.S. Pat. No. 5,475,096 entitled “Nucleic Acid Ligands”, and U.S. Pat. No. 5,270,163 (see also WO 91/19813) entitled “Nucleic Acid Ligands”. Each SELEX-identified nucleic acid ligand, i.e., each aptamer, is a specific ligand of a given target compound or molecule. The SELEX process is based on the unique insight that nucleic acids have sufficient capacity for forming a variety of two- and three-dimensional structures and sufficient chemical versatility available within their monomers to act as ligands (i.e., form specific binding pairs) with virtually any chemical compound, whether monomeric or polymeric. Molecules of any size or composition can serve as targets.

[0119] SELEX relies as a starting point upon a large library or pool of single stranded oligonucleotides comprising randomized sequences. The oligonucleotides can be modified or unmodified DNA, RNA, or DNA/RNA hybrids. In some examples, the pool comprises 100% random or partially random oligonucleotides. In other examples, the pool comprises random or partially random oligonucleotides containing at least one fixed and/or conserved sequence incorporated within randomized sequence. In other examples, the pool comprises random or partially random oligonucleotides containing at least one fixed and/or conserved sequence at its 5′ and/or 3′ end which may comprise a sequence shared by all the molecules of the oligonucleotide pool. Fixed sequences are sequences such as hybridization sites for PCR primers, promoter sequences for RNA polymerases (e.g., T3, T4, T7, and SP6), restriction sites, or homopolymeric sequences, such as poly A or poly T tracts, catalytic cores, sites for selective binding to affinity columns, and other sequences to facilitate cloning and/or sequencing of an oligonucleotide of interest. Conserved sequences are sequences, other than the previously described fixed sequences, shared by a number of aptamers that bind to the same target.

[0120] The oligonucleotides of the pool preferably include a randomized sequence portion as well as fixed sequences useful for efficient amplification. Typically the oligonucleotides of the starting pool contain fixed 5′ and 3′ terminal sequences which flank an internal region of 30-50 random nucleotides. The randomized nucleotides can be produced in a number of ways including chemical synthesis and size selection from randomly cleaved cellular nucleic acids. Sequence variation in test nucleic acids can also be introduced or increased by mutagenesis before or during the selection/amplification iterations.

[0121] The random sequence portion of the oligonucleotide can be of any length and can comprise ribonucleotides and/or deoxyribonucleotides and can include modified or non-natural nucleotides or nucleotide analogs. See, e.g. U.S. Pat. No. 5,958,691; U.S. Pat. No. 5,660,985; U.S. Pat. No. 5,958,691; U.S. Pat. No. 5,698,687; U.S. Pat. No. 5,817,635; U.S. Pat. No. 5,672,695, and PCT Publication WO 92/07065. Random oligonucleotides can be synthesized from phosphodiester-linked nucleotides using solid phase oligonucleotide synthesis techniques well known in the art. See, e.g., Froehler et al., Nucl. Acid Res. 14:5399-5467 (1986) and Froehler et al., Tet. Lett. 27:5575-5578 (1986). Random oligonucleotides can also be synthesized using solution phase methods such as triester synthesis methods. See, e.g., Sood et al., Nucl. Acid Res. 4:2557 (1977) and Hirose et al., Tet. Lett., 28:2449 (1978). Typical syntheses carried out on automated DNA synthesis equipment yield 10¹⁴-10¹⁶ individual molecules, a number sufficient for most SELEX experiments. Sufficiently large regions of random sequence in the sequence design increases the likelihood that each synthesized molecule is likely to represent a unique sequence.

[0122] The starting library of oligonucleotides may be generated by automated chemical synthesis on a DNA synthesizer. To synthesize randomized sequences, mixtures of all four nucleotides are added at each nucleotide addition step during the synthesis process, allowing for random incorporation of nucleotides. As stated above, in one embodiment, random oligonucleotides comprise entirely random sequences; however, in other embodiments, random oligonucleotides can comprise stretches of nonrandom or partially random sequences. Partially random sequences can be created by adding the four nucleotides in different molar ratios at each addition step.

[0123] The starting library of oligonucleotides may be for example, RNA, DNA, or RNA/DNA hybrid. In those instances where an RNA library is to be used as the starting library it is typically generated by transcribing a DNA library in vitro using T7 RNA polymerase or modified T7 RNA polymerases and purified. The library is then mixed with the target under conditions favorable for binding and subjected to step-wise iterations of binding, partitioning and amplification, using the same general selection scheme, to achieve virtually any desired criterion of binding affinity and selectivity. More specifically, starting with a mixture containing the starting pool of nucleic acids, the SELEX method includes steps of: (a) contacting the mixture with the target under conditions favorable for binding; (b) partitioning unbound nucleic acids from those nucleic acids which have bound specifically to target molecules; (c) dissociating the nucleic acid-target complexes; (d) amplifying the nucleic acids dissociated from the nucleic acid-target complexes to yield a ligand-enriched mixture of nucleic acids; and (e) reiterating the steps of binding, partitioning, dissociating and amplifying through as many cycles as desired to yield highly specific, high affinity nucleic acid ligands to the target molecule. In those instances where RNA aptamers are being selected, the SELEX method further comprises the steps of: (i) reverse transcribing the nucleic acids dissociated from the nucleic acid-target complexes before amplification in step (d); and (ii) transcribing the amplified nucleic acids from step (d) before restarting the process.

[0124] Within a nucleic acid mixture containing a large number of possible sequences and structures, there is a wide range of binding affinities for a given target. A nucleic acid mixture comprising, for example, a 20 nucleotide randomized segment can have 4²⁰ candidate possibilities. Those which have the higher affinity constants for the target are most likely to bind to the target. After partitioning, dissociation and amplification, a second nucleic acid mixture is generated, enriched for the higher binding affinity candidates. Additional rounds of selection progressively favor better ligands until the resulting nucleic acid mixture is predominantly composed of only one or a few sequences. These can then be cloned, sequenced and individually tested for binding affinity as pure ligands or aptamers.

[0125] Cycles of selection and amplification are repeated until a desired goal is achieved. In the most general case, selection/amplification is continued until no significant improvement in binding strength is achieved on repetition of the cycle. The method is typically used to sample approximately 10¹⁴ different nucleic acid species but may be used to sample as many as about 10¹⁸ different nucleic acid species. Generally, nucleic acid aptamer molecules are selected in a 5 to 20 cycle procedure. In one embodiment, heterogeneity is introduced only in the initial selection stages and does not occur throughout the replicating process.

[0126] In one embodiment of SELEX, the selection process is so efficient at isolating those nucleic acid ligands that bind most strongly to the selected target, that only one cycle of selection and amplification is required. Such an efficient selection may occur, for example, in a chromatographic-type process wherein the ability of nucleic acids to associate with targets bound on a column operates in such a manner that the column is sufficiently able to allow separation and isolation of the highest affinity nucleic acid ligands.

[0127] In many cases, it is not necessarily desirable to perform the iterative steps of SELEX until a single nucleic acid ligand is identified. The target-specific nucleic acid ligand solution may include a family of nucleic acid structures or motifs that have a number of conserved sequences and a number of sequences which can be substituted or added without significantly affecting the affinity of the nucleic acid ligands to the target. By terminating the SELEX process prior to completion, it is possible to determine the sequence of a number of members of the nucleic acid ligand solution family. The invention provides for the identification of aptamer pools and uses thereof that jointly can be used to characterize a test sample. For example, the aptamer pools can be identified through rounds of positive and negative selection to identify microvesicle indicative of a disease or condition. The invention further provides use of such aptamer pools to detect and/or quantify such microvesicles in a sample, thereby allowing a diagnosis, prognosis or theranosis to be provided.

[0128] A variety of nucleic acid primary, secondary and tertiary structures are known to exist. The structures or motifs that have been shown most commonly to be involved in non-Watson-Crick type interactions are referred to as hairpin loops, symmetric and asymmetric bulges, pseudoknots and myriad combinations of the same. Almost all known cases of such motifs suggest that they can be formed in a nucleic acid sequence of no more than 30 nucleotides. For this reason, it is often preferred that SELEX procedures with contiguous randomized segments be initiated with nucleic acid sequences containing a randomized segment of between about 20 to about 50 nucleotides and in some embodiments, about 30 to about 40 nucleotides. In one example, the 5′-fixed:random:3′-fixed sequence comprises a random sequence of about 30 to about 50 nucleotides.

[0129] The core SELEX method has been modified to achieve a number of specific objectives. For example, U.S. Pat. No. 5,707,796 describes the use of SELEX in conjunction with gel electrophoresis to select nucleic acid molecules with specific structural characteristics, such as bent DNA. U.S. Pat. No. 5,763,177 describes SELEX based methods for selecting nucleic acid ligands containing photoreactive groups capable of binding and/or photocrosslinking to and/or photoinactivating a target molecule. U.S. Pat. No. 5,567,588 and U.S. Pat. No. 5,861,254 describe SELEX based methods which achieve highly efficient partitioning between oligonucleotides having high and low affinity for a target molecule. U.S. Pat. No. 5,496,938 describes methods for obtaining improved nucleic acid ligands after the SELEX process has been performed. U.S. Pat. No. 5,705,337 describes methods for covalently linking a ligand to its target.

[0130] SELEX can also be used to obtain nucleic acid ligands that bind to more than one site on the target molecule, and to obtain nucleic acid ligands that include non-nucleic acid species that bind to specific sites on the target. SELEX provides means for isolating and identifying nucleic acid ligands which bind to any envisionable target, including large and small biomolecules such as nucleic acid-binding proteins and proteins not known to bind nucleic acids as part of their biological function as well as cofactors and other small molecules. For example, U.S. Pat. No. 5,580,737 discloses nucleic acid sequences identified through SELEX which are capable of binding with high affinity to caffeine and the closely related analog, theophylline.

[0131] Counter-SELEX is a method for improving the specificity of nucleic acid ligands to a target molecule by eliminating nucleic acid ligand sequences with cross-reactivity to one or more non-target molecules. Counter-SELEX is comprised of the steps of: (a) preparing a candidate mixture of nucleic acids; (b) contacting the candidate mixture with the target, wherein nucleic acids having an increased affinity to the target relative to the candidate mixture may be partitioned from the remainder of the candidate mixture; (c) partitioning the increased affinity nucleic acids from the remainder of the candidate mixture; (d) dissociating the increased affinity nucleic acids from the target; e) contacting the increased affinity nucleic acids with one or more non-target molecules such that nucleic acid ligands with specific affinity for the non-target molecule(s) are removed; and (f) amplifying the nucleic acids with specific affinity only to the target molecule to yield a mixture of nucleic acids enriched for nucleic acid sequences with a relatively higher affinity and specificity for binding to the target molecule. As described above for SELEX, cycles of selection and amplification are repeated until a desired goal is achieved.

[0132] One potential problem encountered in the use of nucleic acids as therapeutics and vaccines is that oligonucleotides in their phosphodiester form may be quickly degraded in body fluids by intracellular and extracellular enzymes such as endonucleases and exonucleases before the desired effect is manifest. The SELEX method thus encompasses the identification of high-affinity nucleic acid ligands containing modified nucleotides conferring improved characteristics on the ligand, such as improved in vivo stability or improved delivery characteristics. Examples of such modifications include chemical substitutions at the ribose and/or phosphate and/or base positions. SELEX identified nucleic acid ligands containing modified nucleotides are described, e.g., in U.S. Pat. No. 5,660,985, which describes oligonucleotides containing nucleotide derivatives chemically modified at the 2′ position of ribose, 5 position of pyrimidines, and 8 position of purines, U.S. Pat. No. 5,756,703 which describes oligonucleotides containing various 2′-modified pyrimidines, and U.S. Pat. No. 5,580,737 which describes highly specific nucleic acid ligands containing one or more nucleotides modified with 2′-amino (2′-NH₂), 2′-fluoro (2′-F), and/or 2′-O-methyl (2′-OMe) substituents.

[0133] Modifications of the nucleic acid ligands contemplated in this invention include, but are not limited to, those which provide other chemical groups that incorporate additional charge, polarizability, hydrophobicity, hydrogen bonding, electrostatic interaction, and fluxionality to the nucleic acid ligand bases or to the nucleic acid ligand as a whole. Modifications to generate oligonucleotide populations which are resistant to nucleases can also include one or more substitute internucleotide linkages, altered sugars, altered bases, or combinations thereof. Such modifications include, but are not limited to, 2′-position sugar modifications, 5-position pyrimidine modifications, 8-position purine modifications, modifications at exocyclic amines, substitution of 4-thiouridine, substitution of 5-bromo or 5-iodo-uracil; backbone modifications, phosphorothioate or allyl phosphate modifications, methylations, and unusual base-pairing combinations such as the isobases isocytidine and isoguanosine. Modifications can also include 3′ and 5′ modifications such as capping.

[0134] In one embodiment, oligonucleotides are provided in which the P(O)O group is replaced by P(O)S (“thioate”), P(S)S (“dithioate”), P(O)NR₂ (“amidate”), P(O)R, P(O)OR′, CO or CH₂ (“formacetal”) or 3′-amine (—NH—CH₂—CH₂—), wherein each R or R′ is independently H or substituted or unsubstituted alkyl. Linkage groups can be attached to adjacent nucleotides through an —O—, —N—, or —S— linkage. Not all linkages in the oligonucleotide are required to be identical. As used herein, the term phosphorothioate encompasses one or more non-bridging oxygen atoms in a phosphodiester bond replaced by one or more sulfur atoms.

[0135] In further embodiments, the oligonucleotides comprise modified sugar groups, for example, one or more of the hydroxyl groups is replaced with halogen, aliphatic groups, or functionalized as ethers or amines. In one embodiment, the 2′-position of the furanose residue is substituted by any of an O-methyl, O-alkyl, 0-allyl, S-alkyl, S-allyl, or halo group. Methods of synthesis of 2′-modified sugars are described, e.g., in Sproat, et al., Nucl. Acid Res. 19:733-738 (1991); Cotten, et al., Nucl. Acid Res. 19:2629-2635 (1991); and Hobbs, et al., Biochemistry 12:5138-5145 (1973). Other modifications are known to one of ordinary skill in the art. Such modifications may be pre-SELEX process modifications or post-SELEX process modifications (modification of previously identified unmodified ligands) or may be made by incorporation into the SELEX process.

[0136] Pre-SELEX process modifications or those made by incorporation into the SELEX process yield nucleic acid ligands with both specificity for their SELEX target and improved stability, e.g., in vivo stability. Post-SELEX process modifications made to nucleic acid ligands may result in improved stability, e.g., in vivo stability without adversely affecting the binding capacity of the nucleic acid ligand.

[0137] The SELEX method encompasses combining selected oligonucleotides with other selected oligonucleotides and non-oligonucleotide functional units as described in U.S. Pat. No. 5,637,459 and U.S. Pat. No. 5,683,867. The SELEX method further encompasses combining selected nucleic acid ligands with lipophilic or non-immunogenic high molecular weight compounds in a diagnostic or therapeutic complex, as described, e.g., in U.S. Pat. No. 6,011,020, U.S. Pat. No. 6,051,698, and PCT Publication No. WO 98/18480. These patents and applications teach the combination of a broad array of shapes and other properties, with the efficient amplification and replication properties of oligonucleotides, and with the desirable properties of other molecules.

[0138] The identification of nucleic acid ligands to small, flexible peptides via the SELEX method has also been explored. Small peptides have flexible structures and usually exist in solution in an equilibrium of multiple conformers, and thus it was initially thought that binding affinities may be limited by the conformational entropy lost upon binding a flexible peptide. However, the feasibility of identifying nucleic acid ligands to small peptides in solution was demonstrated in U.S. Pat. No. 5,648,214. In this patent, high affinity RNA nucleic acid ligands to substance P, an 11 amino acid peptide, were identified.

[0139] The aptamers with specificity and binding affinity to the target(s) of the present invention can be selected by the SELEX N process as described herein. As part of the SELEX process, the sequences selected to bind to the target are then optionally minimized to determine the minimal sequence having the desired binding affinity. The selected sequences and/or the minimized sequences are optionally optimized by performing random or directed mutagenesis of the sequence to increase binding affinity or alternatively to determine which positions in the sequence are essential for binding activity. Additionally, selections can be performed with sequences incorporating modified nucleotides to stabilize the aptamer molecules against degradation in vivo.

[0140] 2′ Modified SELEX

[0141] In order for an aptamer to be suitable for use as a therapeutic, it is preferably inexpensive to synthesize, safe and stable in vivo. Wild-type RNA and DNA aptamers are typically not stable is vivo because of their susceptibility to degradation by nucleases. Resistance to nuclease degradation can be greatly increased by the incorporation of modifying groups at the 2′-position.

[0142] Fluoro and amino groups have been successfully incorporated into oligonucleotide pools from which aptamers have been subsequently selected. However, these modifications greatly increase the cost of synthesis of the resultant aptamer, and may introduce safety concerns in some cases because of the possibility that the modified nucleotides could be recycled into host DNA by degradation of the modified oligonucleotides and subsequent use of the nucleotides as substrates for DNA synthesis.

[0143] Aptamers that contain 2′-O-methyl (“2′-OMe”) nucleotides, as provided herein, may overcome one or more potential drawbacks. Oligonucleotides containing 2′-OMe nucleotides are nuclease-resistant and inexpensive to synthesize. Although 2′-OMe nucleotides are ubiquitous in biological systems, natural polymerases do not accept 2′-OMe NTPs as substrates under physiological conditions, thus there are no safety concerns over the recycling of 2′-OMe nucleotides into host DNA. The SELEX method used to generate 2′-modified aptamers is described, e.g., in U.S. Provisional Patent Application Ser. No. 60/430,761, filed Dec. 3, 2002, U.S. Provisional Patent Application Ser. No. 60/487,474, filed Jul. 15, 2003, U.S. Provisional Patent Application Ser. No. 60/517,039, filed Nov. 4, 2003, U.S. patent application Ser. No. 10/729,581, filed Dec. 3, 2003, and U.S. patent application Ser. No. 10/873,856, filed Jun. 21, 2004, entitled “Method for in vitro Selection of 2′-O-methyl substituted Nucleic Acids,” each of which is herein incorporated by reference in its entirety.

### Methods

[0144] Biomarker Detection and Diagnostics

[0145] The aptamers of the invention can be used in various methods to assess presence or level of biomarkers in a biological sample, e.g., biological entities of interest such as proteins, nucleic acids, or microvesicles. The aptamer functions as a binding agent to assess presence or level of the cognate target molecule. Therefore, in various embodiments of the invention directed to diagnostics, prognostics or theranostics, one or more aptamers of the invention are configured in a ligand-target based assay, where one or more aptamer of the invention is contacted with a selected biological sample, where the or more aptamer associates with or binds to its target molecules. Aptamers of the invention are used to identify candidate biosignatures based on the biological samples assessed and biomarkers detected. In further embodiments, aptamers may themselves provide a biosignature for a particular condition or disease. A biosignature refers to a biomarker profile of a biological sample comprising a presence, level or other characteristic that can be assessed (including without limitation a sequence, mutation, rearrangement, translocation, deletion, epigenetic modification, methylation, post-translational modification, allele, activity, complex partners, stability, half life, and the like) of one or more biomarker of interest. Biosignatures can be used to evaluate diagnostic and/or prognostic criteria such as presence of disease, disease staging, disease monitoring, disease stratification, or surveillance for detection, metastasis or recurrence or progression of disease. For example, methods of the invention using aptamers against microvesicle surface antigen are useful for correlating a biosignature comprising microvesicle antigens to a selected condition or disease. A biosignature can also be used clinically in making decisions concerning treatment modalities including therapeutic intervention. A biosignature can further be used clinically to make treatment decisions, including whether to perform surgery or what treatment standards should be used along with surgery (e.g., either pre-surgery or post-surgery). As an illustrative example, a biosignature of circulating biomarkers that indicates an aggressive form of cancer may call for a more aggressive surgical procedure and/or more aggressive therapeutic regimen to treat the patient.

[0146] A biosignature can be used in any methods disclosed herein, e.g., to assess whether a subject is afflicted with disease, is at risk for developing disease or to assess the stage or progression of the disease. For example, a biosignature can be used to assess whether a subject has prostate cancer, colon cancer, or other cancer as described herein. Furthermore, a biosignature can be used to determine a stage of a disease or condition, such as colon cancer. The biosignature/biomarker profile comprising a microvesicle can include assessment of payload within the microvesicle. For example, one or more aptamer of the invention can be used to capture a microvesicle population, thereby providing readout of microvesicle antigens, and then the payload content within the captured microvesicles can be assessed, thereby providing further biomarker readout of the payload content.

[0147] A biosignature for characterizing a phenotype may comprise any number of useful criteria. As described further below, the term “phenotype” as used herein can mean any trait or characteristic that is attributed to a biosignature/biomarker profile. A phenotype can be detected or identified in part or in whole using the compositions and/or methods of the invention. In some embodiments, at least one criterion is used for each biomarker. In some embodiments, at least 1, 2, 3, 4, 5, 6, 7, 8, 9, 10, 15, 20, 30, 40, 50, 60, 70, 80, 90 or at least 100 criteria are used. For example, for the characterizing of a cancer, a number of different criteria can be used when the subject is diagnosed with a cancer: 1) if the amount of microRNA in a sample from a subject is higher than a reference value; 2) if the amount of a microRNA within cell type specific vesicles (i.e. vesicles derived from a specific tissue or organ) is higher than a reference value; or 3) if the amount of microRNA within vesicles with one or more cancer specific biomarkers is higher than a reference value. Similar rules can apply if the amount of microRNA is less than or the same as the reference. The method can further include a quality control measure, such that the results are provided for the subject if the samples meet the quality control measure. In some embodiments, if the criteria are met but the quality control is questionable, the subject is reassessed.

[0148] Theranostics

[0149] A biosignature can be used in therapy related diagnostics to provide tests useful to diagnose a disease or choose the correct treatment regimen, such as provide a theranosis. Theranostics includes diagnostic testing that provides the ability to affect therapy or treatment of a diseased state. Theranostics testing provides a theranosis in a similar manner that diagnostics or prognostic testing provides a diagnosis or prognosis, respectively. As used herein, theranostics encompasses any desired form of therapy related testing, including predictive medicine, personalized medicine, integrated medicine, pharmacodiagnostics and Dx/Rx partnering. Therapy related tests can be used to predict and assess drug response in individual subjects, i.e., to provide personalized medicine. Predicting a drug response can be determining whether a subject is a likely responder or a likely non-responder to a candidate therapeutic agent, e.g., before the subject has been exposed or otherwise treated with the treatment. Assessing a drug response can be monitoring a response to a drug, e.g., monitoring the subject's improvement or lack thereof over a time course after initiating the treatment. Therapy related tests are useful to select a subject for treatment who is particularly likely to benefit from the treatment or to provide an early and objective indication of treatment efficacy in an individual subject. Thus, a biosignature as disclosed herein may indicate that treatment should be altered to select a more promising treatment, thereby avoiding the great expense of delaying beneficial treatment and avoiding the financial and morbidity costs of administering an ineffective drug(s).

[0150] The compositions and methods of the invention can be used to identify or detect a biosignature that associated with selected diseases and disorders, which include, but are not limited to cardiovascular disease, cancer, infectious diseases, sepsis, neurological diseases, central nervous system related diseases, endovascular related diseases, and autoimmune related diseases. Therapy related diagnostics also aid in the prediction of drug toxicity, drug resistance or drug response. Therapy related tests may be developed in any suitable diagnostic testing format, which include, but are not limited to, e.g., immunohistochemical tests, clinical chemistry, immunoassay, cell-based technologies, nucleic acid tests or body imaging methods. Therapy related tests can further include but are not limited to, testing that aids in the determination of therapy, testing that monitors for therapeutic toxicity, or response to therapy testing. Thus, a biosignature can be used to predict or monitor a subject's response to a treatment. A biosignature can be determined at different time points for a subject after initiating, removing, or altering a particular treatment.

[0151] In some embodiments, the compositions and methods of the invention provide for a determination or prediction as to whether a subject is responding to a treatment is made based on a change in the amount of one or more components of a biosignature (i.e., the microRNA, vesicles and/or biomarkers of interest), an amount of one or more components of a particular biosignature, or the biosignature detected for the components. In another embodiment, a subject's condition is monitored by determining a biosignature at different time points. The progression, regression, or recurrence of a condition is determined. Response to therapy can also be measured over a time course. Thus, the invention provides a method of monitoring a status of a disease or other medical condition in a subject, comprising isolating or detecting a biosignature from a biological sample from the subject, detecting the overall amount of the components of a particular biosignature, or detecting the biosignature of one or more components (such as the presence, absence, or expression level of a biomarker). The biosignatures are used to monitor the status of the disease or condition.

[0152] One or more novel biosignatures of a vesicle can also be identified. For example, one or more vesicles can be isolated from a subject that responds to a drug treatment or treatment regimen and compared to a reference, such as another subject that does not respond to the drug treatment or treatment regimen. Differences between the biosignatures can be determined and used to identify other subjects as responders or non-responders to a particular drug or treatment regimen.

[0153] In some embodiments, a biosignature is used to determine whether a particular disease or condition is resistant to a drug, in which case a physician need not waste valuable time with such drug treatment. To obtain early validation of a drug choice or treatment regimen, a biosignature is determined for a sample obtained from a subject. The biosignature is used to assess whether the particular subject's disease has the biomarker associated with drug resistance. Such a determination enables doctors to devote critical time as well as the patient's financial resources to effective treatments.

[0154] Biosignatures can be used in the theranosis of a cancer, such as identifying whether a subject suffering from cancer is a likely responder or non-responder to a particular cancer treatment. The subject methods can be used to theranose cancers including those listed herein, e.g., in the “Phenotypes” section below. These include without limitation lung cancer, non-small cell lung cancer small cell lung cancer (including small cell carcinoma (oat cell cancer), mixed small cell/large cell carcinoma, and combined small cell carcinoma), colon cancer, breast cancer, prostate cancer, liver cancer, pancreatic cancer, brain cancer, kidney cancer, ovarian cancer, stomach cancer, melanoma, bone cancer, gastric cancer, breast cancer, glioma, glioblastoma, hepatocellular carcinoma, papillary renal carcinoma, head and neck squamous cell carcinoma, leukemia, lymphoma, myeloma, or other solid tumors.

[0155] A biosignature of circulating biomarkers, including markers associated with a component present in a biological sample (e.g., cell, cell-fragment, cell-derived extracellular vesicle), in a sample from a subject suffering from a cancer can be used select a candidate treatment for the subject. The biosignature can be determined according to the methods of the invention presented herein. In some embodiments, the candidate treatment comprises a standard of care for the cancer. The treatment can be a cancer treatment such as radiation, surgery, chemotherapy or a combination thereof. The cancer treatment can be a therapeutic such as anti-cancer agents and chemotherapeutic regimens. Further drug associations and rules that are used in embodiments of the invention are found in U.S. patent application Ser. No. 12/658,770, filed Feb. 12, 2010; International PCT Patent Publication WO/2010/093465, filed Feb. 11, 2010; International PCT Patent Publication WO/2011/056688, filed Oct. 27, 2010; and U.S. Provisional Patent Application 61/427,788, filed Dec. 28, 2010; all of which applications are incorporated by reference herein in their entirety. See, e.g., “Table 4: Rules Summary for Treatment Selection” of WO/2011/056688.

### Biomarker Detection

[0156] The compositions and methods of the invention can be used to assess any useful biomarkers in a biological sample for charactering a phenotype associated with the sample. Such biomarkers include all sorts of biological entities such as proteins, nucleic acids, lipids, carbohydrates, complexes of any thereof, and microvesicles. Various molecules associated with a microvesicle surface or enclosed within the microvesicle (referred to herein as “payload”) can serve as biomarkers. The microvesicles themselves can also be used as biomarkers.

[0157] The aptamers of the invention can be used to assess levels or presence of a microvesicle population. See, e.g., FIGS. 16B-16C. The aptamers of the invention can also be used to assess levels or presence of their specific target molecule. See, e.g., FIG. 16A. In addition, aptamers of the invention are used to capture or isolated a component present in a biological sample that has the aptamer's target molecule present. For example, if a given microvesicle surface antigen is present on a cell, cell fragment or cell-derived extracellular vesicle. A binding agent to the biomarker, including without limitation an aptamer provided by the invention, may be used to capture or isolate the cell, cell fragment or cell-derived extracellular vesicles. See, e.g., FIGS. 2A-2B, 16A. Such captured or isolated entities may be further characterized to assess additional surface antigens or internal “payload” molecules present (i.e., nucleic acid molecules, lipids, sugars, polypeptides or functional fragments thereof, or anything else present in the cellular milieu that may be used as a biomarker), where one or more biomarkers provide a biosignature to assess a desired phenotype, such as disease or condition. See, e.g., FIG. 2F. Therefore, aptamers of the invention are used not only to assess one or more microvesicle surface antigen of interest but are also used to separate a component present in a biological sample, where the components themselves can be further assessed to identify a candidate biosignature.

[0158] The methods of the invention can comprise multiplex analysis of at least 2, 3, 4, 5, 6, 7, 8, 9, 10, 11, 12, 13, 14, 15, 16, 17, 18, 19, 20, 25, 50, 75 or 100 different biomarkers. For example, an assay of a heterogeneous population of vesicles can be performed with a plurality of particles that are differentially labeled. There can be at least 2, 3, 4, 5, 6, 7, 8, 9, 10, 11, 12, 13, 14, 15, 16, 17, 18, 19, 20, 25, 50, 75 or 100 differentially labeled particles. The particles may be externally labeled, such as with a tag, or they may be intrinsically labeled. Each differentially labeled particle can be coupled to a capture agent, such as a binding agent, for a vesicle, resulting in capture of a vesicle. The multiple capture agents can be selected to characterize a phenotype of interest, including capture agents against general vesicle biomarkers, cell-of-origin specific biomarkers, and disease biomarkers. One or more biomarkers of the captured vesicle can then be detected by a plurality of binding agents. The binding agent can be directly labeled to facilitate detection. Alternatively, the binding agent is labeled by a secondary agent. For example, the binding agent may be an antibody for a biomarker on the vesicle, wherein the binding agent is linked to biotin. A secondary agent comprises streptavidin linked to a reporter and can be added to detect the biomarker. In some embodiments, the captured vesicle is assayed for at least 2, 3, 4, 5, 6, 7, 8, 9, 10, 11, 12, 13, 14, 15, 16, 17, 18, 19, 20, 25, 50, 75 or 100 different biomarkers. For example, multiple detectors, i.e., detection of multiple biomarkers of a captured vesicle or population of vesicles, can increase the signal obtained, permitted increased sensitivity, specificity, or both, and the use of smaller amounts of samples. Detection can be with more than one biomarker, including without limitation more than one general vesicle marker such as in Table 3.

[0159] An immunoassay based method (e.g., sandwich assay) can be used to detect a biomarker of a vesicle. An example includes ELISA. A binding agent can be bound to a well. For example, a binding agent such as an aptamer or antibody to an antigen of a vesicle can be attached to a well. A biomarker on the captured vesicle can be detected based on the methods described herein. FIG. 2A shows an illustrative schematic for a sandwich-type of immunoassay. The capture agent can be against a vesicle antigen of interest, e.g., a general vesicle biomarker, a cell-of-origin marker, or a disease marker. In the figure, the captured vesicles are detected using fluorescently labeled binding agent (detection agent) against vesicle antigens of interest. Multiple capture binding agents can be used, e.g., in distinguishable addresses on an array or different wells of an immunoassay plate. The detection binding agents can be against the same antigen as the capture binding agent, or can be directed against other markers. The capture binding agent can be any useful binding agent, e.g., tethered aptamers, antibodies or lectins, and/or the detector antibodies can be similarly substituted, e.g., with detectable (e.g., labeled) aptamers, antibodies, lectins or other binding proteins or entities. In an embodiment, one or more capture agents to a general vesicle biomarker, a cell-of-origin marker, and/or a disease marker are used along with detection agents against general vesicle biomarker, such as tetraspanin molecules including without limitation one or more of CD9, CD63 and CD81, or other markers in Table 3 herein. Examples of microvesicle surface antigens are disclosed herein, e.g. in Tables 3 or 4, or are known in the art, and examples useful in methods and compositions of the invention are disclosed of International Patent Publication No. WO/2011/127219, entitled “Circulating Biomarkers for Disease” and filed Apr. 6, 2011.

[0160] FIG. 2D presents an illustrative schematic for analyzing vesicles according to the methods of the invention. Capture agents are used to capture vesicles, detectors are used to detect the captured vesicles, and the level or presence of the captured and detected microvesicles is used to characterize a phenotype. Capture agents, detectors and characterizing phenotypes can be any of those described herein. For example, capture agents include antibodies or aptamers tethered to a substrate that recognize a vesicle antigen of interest, detectors include labeled antibodies or aptamers to a vesicle antigen of interest, and characterizing a phenotype includes a diagnosis, prognosis, or theranosis of a disease. In the scheme shown in FIG. 2D i), a population of vesicles is captured with one or more capture agents against general vesicle biomarkers (200). The captured vesicles are then labeled with detectors against cell-of-origin biomarkers (201) and/or disease specific biomarkers (202). If only cell-of-origin detectors are used (201), the biosignature used to characterize the phenotype (203) can include the general vesicle markers (200) and the cell-of-origin biomarkers (201). If only disease detectors are used (202), the biosignature used to characterize the phenotype (203) can include the general vesicle markers (200) and the disease biomarkers (202). Alternately, detectors are used to detect both cell-of-origin biomarkers (201) and disease specific biomarkers (202). In this case, the biosignature used to characterize the phenotype (203) can include the general vesicle markers (200), the cell-of-origin biomarkers (201) and the disease biomarkers (202). The biomarkers combinations are selected to characterize the phenotype of interest and can be selected from the biomarkers and phenotypes described herein, e.g., in Tables 3 or 4.

[0161] In the scheme shown in FIG. 2D ii), a population of vesicles is captured with one or more capture agents against cell-of-origin biomarkers (210) and/or disease biomarkers (211). The captured vesicles are then detected using detectors against general vesicle biomarkers (212). If only cell-of-origin capture agents are used (210), the biosignature used to characterize the phenotype (213) can include the cell-of-origin biomarkers (210) and the general vesicle markers (212). If only disease biomarker capture agents are used (211), the biosignature used to characterize the phenotype (213) can include the disease biomarkers (211) and the general vesicle biomarkers (212). Alternately, capture agents to one or more cell-of-origin biomarkers (210) and one or more disease specific biomarkers (211) are used to capture vesicles. In this case, the biosignature used to characterize the phenotype (213) can include the cell-of-origin biomarkers (210), the disease biomarkers (211), and the general vesicle markers (213). The biomarkers combinations are selected to characterize the phenotype of interest and can be selected from the biomarkers and phenotypes described herein.

[0162] The methods of the invention comprise capture and detection of microvesicles of interest using any combination of useful biomarkers. For example, a microvesicle population can be captured using one or more binding agent to any desired combination of cell of origin, disease specific, or general vesicle markers. The captured microvesicles can then be detected using one or more binding agent to any desired combination of cell of origin, disease specific, or general vesicle markers. FIG. 2E represents a flow diagram of such configurations. Any one or more of a cell-of-origin biomarker (240), disease biomarkers (241), and general vesicle biomarker (242) is used to capture a microvesicle population. Thereafter, any one or more of a cell-of-origin biomarker (243), disease biomarkers (244), and general vesicle biomarker (245) is used to detect the captured microvesicle population. The biosignature of captured and detected microvesicles is then used to characterize a phenotype. The biomarkers combinations are selected to characterize the phenotype of interest and can be selected from the biomarkers and phenotypes described herein.

[0163] A microvesicle payload molecule can be assessed as a member of a biosignature panel. A payload molecule comprises any of the biological entities contained within a cell, cell fragment or vesicle membrane. These entities include without limitation nucleic acids, e.g., mRNA, microRNA, or DNA fragments; protein, e.g., soluble and membrane associated proteins; carbohydrates; lipids; metabolites; and various small molecules, e.g., hormones. The payload can be part of the cellular milieu that is encapsulated as a vesicle is formed in the cellular environment. In some embodiments of the invention, the payload is analyzed in addition to detecting vesicle surface antigens. Specific populations of vesicles can be captured as described above then the payload in the captured vesicles can be used to characterize a phenotype. For example, vesicles captured on a substrate can be further isolated to assess the payload therein. Alternately, the vesicles in a sample are detected and sorted without capture. The vesicles so detected can be further isolated to assess the payload therein. In an embodiment, vesicle populations are sorted by flow cytometry and the payload in the sorted vesicles is analyzed. In the scheme shown in FIG. 2F iv), a population of vesicles is captured and/or detected (220) using one or more of cell-of-origin biomarkers (220), disease biomarkers (221), and/or general vesicle markers (222). The payload of the isolated vesicles is assessed (223). A biosignature detected within the payload can be used to characterize a phenotype (224). In a non-limiting example, a vesicle population can be analyzed in a plasma sample from a patient using antibodies against one or more vesicle antigens of interest. The antibodies can be capture antibodies which are tethered to a substrate to isolate a desired vesicle population. Alternately, the antibodies can be directly labeled and the labeled vesicles isolated by sorting with flow cytometry. The presence or level of microRNA or mRNA extracted from the isolated vesicle population can be used to detect a biosignature. The biosignature is then used to diagnose, prognose or theranose the patient.

[0164] In other embodiments, vesicle or cellular payload is analyzed in a population (e.g., cells or vesicles) without first capturing or detected subpopulations of vesicles. For example, a cellular or extracellular vesicle population can be generally isolated from a sample using centrifugation, filtration, chromatography, or other techniques as described herein and known in the art. The payload of such sample components can be analyzed thereafter to detect a biosignature and characterize a phenotype. In the scheme shown in FIG. 2F v), a population of vesicles is isolated (230) and the payload of the isolated vesicles is assessed (231). A biosignature detected within the payload can be used to characterize a phenotype (232). In a non-limiting example, a vesicle population is isolated from a plasma sample from a patient using size exclusion and membrane filtration. The presence or level of microRNA or mRNA extracted from the vesicle population is used to detect a biosignature. The biosignature is then used to diagnose, prognose or theranose the patient.

[0165] The biomarkers used to detect a vesicle population can be selected to detect a microvesicle population of interest, e.g., a population of vesicles that provides a diagnosis, prognosis or theranosis of a selected condition or disease, including but not limited to a cancer, a premalignant condition, an inflammatory disease, an immune disease, an autoimmune disease or disorder, a cardiovascular disease or disorder, neurological disease or disorder, infectious disease or pain. See Section “Phenotypes” herein for more detail. In an embodiment, the biomarkers are selected from the group consisting of EpCam (epithelial cell adhesion molecule), CD9 (tetraspanin CD9 molecule), PCSA (prostate cell specific antigen, see Rokhlin et al., 5E10: a prostate-specific surface-reactive monoclonal antibody. Cancer Lett. 1998 131:129-36), CD63 (tetraspanin CD63 molecule), CD81 (tetraspanin CD81 molecule), PSMA (FOLH1, folate hydrolase (prostate-specific membrane antigen) 1), B7H3 (CD276 molecule), PSCA (prostate stem cell antigen), ICAM (intercellular adhesion molecule), STEAP (STEAP1, six transmembrane epithelial antigen of the prostate 1), KLK2 (kallikrein-related peptidase 2), SSX2 (synovial sarcoma, X breakpoint 2), SSX4 (synovial sarcoma, X breakpoint 4), PBP (prostatic binding protein), SPDEF (SAM pointed domain containing ets transcription factor), EGFR (epidermal growth factor receptor), and a combination thereof. One or more of these markers can provide a biosignature for a specific condition, such as to detect a cancer, including without limitation a carcinoma, a prostate cancer, a breast cancer, a lung cancer, a colorectal cancer, an ovarian cancer, melanoma, a brain cancer, or other type of cancer as disclosed herein. In an embodiment, a binding agent to one or more of these markers is used to capture a microvesicle population, and an aptamer of the invention is used to assist in detection of the capture vesicles as described herein. In other embodiments, an aptamer of the invention is used to capture a microvesicle population, and a binding agent to one or more of these markers is used to assist in detection of the capture vesicles as described herein. The binding agents can be any useful binding agent as disclosed herein or known in the art, e.g., antibodies or aptamers.

[0166] The methods of characterizing a phenotype can employ a combination of techniques to assess a component or population of components present in a biological sample of interest. For example, an aptamer of the invention can be used to assess a single cell, or a single extracellular vesicle or a population of cells or population of vesicles. A sample may be split into various aliquots, where each is analyzed separately. For example, protein content of one or more aliquot is determined and microRNA content of one or more other aliquot is determined. The protein content and microRNA content can be combined to characterize a phenotype. In another embodiment, a component present in a biological sample of interest is isolated and the payload therein is assessed (e.g., capture a population of subpopulation of vesicles using an aptamer of the invention and further assess nucleic acid or proteins present in the isolated vesicles).

[0167] In one embodiment, a population of vesicles with a given surface marker can be isolated by using a binding agent to a microvesicle surface marker. See, e.g., FIGS. 2A, 2B, 16A. The binding agent can be an aptamer that was identified to target the microvesicle surface marker using to the methods of the invention. The isolated vesicles is assessed for additional biomarkers such as surface content or payload, which can be contemporaneous to detection of the aptamer-specific target or the assessment of additional biomarkers can be before or subsequent to aptamer-specific target detection.

[0168] A biosignature can be detected qualitatively or quantitatively by detecting a presence, level or concentration of a circulating biomarker, e.g., a microRNA, protein, vesicle or other biomarker, as disclosed herein. These biosignature components can be detected using a number of techniques known to those of skill in the art. For example, a biomarker can be detected by microarray analysis, polymerase chain reaction (PCR) (including PCR-based methods such as real time polymerase chain reaction (RT-PCR), quantitative real time polymerase chain reaction (Q-PCR/qPCR) and the like), hybridization with allele-specific probes, enzymatic mutation detection, ligation chain reaction (LCR), oligonucleotide ligation assay (OLA), flow-cytometric heteroduplex analysis, chemical cleavage of mismatches, mass spectrometry, nucleic acid sequencing, single strand conformation polymorphism (SSCP), denaturing gradient gel electrophoresis (DGGE), temperature gradient gel electrophoresis (TGGE), restriction fragment polymorphisms, serial analysis of gene expression (SAGE), or combinations thereof. A biomarker, such as a nucleic acid, can be amplified prior to detection. A biomarker can also be detected by immunoassay, immunoblot, immunoprecipitation, enzyme-linked immunosorbent assay (ELISA; EIA), radioimmunoassay (RIA), flow cytometry, or electron microscopy (EM).

[0169] Biosignatures can be detected using aptamers of the invention that function as either as capture agents and detection agents, as described herein. A capture agent can comprise an antibody, aptamer or other entity which recognizes a biomarker and can be used for capturing the biomarker. Biomarkers that can be captured include circulating biomarkers, e.g., a protein, nucleic acid, lipid or biological complex in solution in a bodily fluid. Similarly, the capture agent can be used for capturing a vesicle. A detection agent can comprise an antibody or other entity which recognizes a biomarker and can be used for detecting the biomarker vesicle, or which recognizes a vesicle and is useful for detecting a vesicle. In some embodiments, the detection agent is labeled and the label is detected, thereby detecting the biomarker or vesicle. The detection agent can be a binding agent, e.g., an antibody or aptamer. In other embodiments, the detection agent comprises a small molecule such as a membrane protein labeling agent. See, e.g., the membrane protein labeling agents disclosed in Alroy et al., US. Patent Publication US 2005/0158708. In an embodiment, vesicles are isolated or captured as described herein, and one or more membrane protein labeling agent is used to detect the vesicles. In many cases, the antigen or other vesicle-moiety that is recognized by the capture and detection agents are interchangeable.

[0170] In a non-limiting embodiment, a vesicle having a cell-of-origin specific antigen on its surface and a cancer-specific antigen on its surface, is captured using a binding agent that is specific to a cells-specific antigen, e.g., by tethering the capture antibody or aptamer to a substrate, and then the vesicle is detected using a binding agent to a disease-specific antigen, e.g., by labeling the binding agent used for detection with a fluorescent dye and detecting the fluorescent radiation emitted by the dye.

[0171] It will be apparent to one of skill in the art that where the target molecule for a binding agent (such as an aptamer of the invention) is informative as to assessing a condition or disease, the same binding agent can be used to both capture a component comprising the target molecule (e.g., microvesicle surface antigen of interest) and also be modified to comprise a detectable label so as to detect the target molecule, e.g., binding agent₁-antigen-binding agent₂*, wherein the * signifies a detectable label; binding agent₁ and binding agent₂ may be the same binding agent or a different binding agent (e.g., same aptamer or different aptamer). In addition, binding agent and binding agent₂ can be selected from wholly different categories of binding agents (e.g., antibody, aptamer, synthetic antibody, peptide-nucleic acid molecule, or any molecule that is configured to specifically bind to or associate with its target molecule). Such binding molecules can be selected solely based on their binding specificity for a target molecule.

[0172] Techniques of detecting biomarkers or capturing sample components using an aptamer of the invention include the use of a planar substrate such as an array (e.g., biochip or microarray), with molecules immobilized to the substrate as capture agents that facilitate the detection of a particular biosignature. The array can be provided as part of a kit for assaying one or more biomarkers. Additional examples of binding agents described above and useful in the compositions and methods of the invention are disclosed in International Patent Publication No. WO/2011/127219, entitled “Circulating Biomarkers for Disease” and filed Apr. 6, 2011, which application is incorporated by reference in its entirety herein. Aptamers of the invention can be included in an array for detection and diagnosis of diseases including presymptomatic diseases. In some embodiments, an array comprises a custom array comprising biomolecules selected to specifically identify biomarkers of interest. Customized arrays can be modified to detect biomarkers that increase statistical performance, e.g., additional biomolecules that identifies a biosignature which lead to improved cross-validated error rates in multivariate prediction models (e.g., logistic regression, discriminant analysis, or regression tree models). In some embodiments, customized array(s) are constructed to study the biology of a disease, condition or syndrome and profile biosignatures in defined physiological states. Markers for inclusion on the customized array be chosen based upon statistical criteria, e.g., having a desired level of statistical significance in differentiating between phenotypes or physiological states. In some embodiments, standard significance of p-value=0.05 is chosen to exclude or include biomolecules on the microarray. The p-values can be corrected for multiple comparisons. As an illustrative example, nucleic acids extracted from samples from a subject with or without a disease can be hybridized to a high density microarray that binds to thousands of gene sequences. Nucleic acids whose levels are significantly different between the samples with or without the disease can be selected as biomarkers to distinguish samples as having the disease or not. A customized array can be constructed to detect the selected biomarkers. In some embodiments, customized arrays comprise low density microarrays, which refer to arrays with lower number of addressable binding agents, e.g., tens or hundreds instead of thousands. Low density arrays can be formed on a substrate. In some embodiments, customizable low density arrays use PCR amplification in plate wells, e.g., TaqMan® Gene Expression Assays (Applied Biosystems by Life Technologies Corporation, Carlsbad, Calif.).

[0173] An aptamer of the invention or other useful binding agent may be linked directly or indirectly to a solid surface or substrate. See, e.g., FIGS. 2A-2B, 9, 16A. A solid surface or substrate can be any physically separable solid to which a binding agent can be directly or indirectly attached including, but not limited to, surfaces provided by microarrays and wells, particles such as beads, columns, optical fibers, wipes, glass and modified or functionalized glass, quartz, mica, diazotized membranes (paper or nylon), polyformaldehyde, cellulose, cellulose acetate, paper, ceramics, metals, metalloids, semiconductive materials, quantum dots, coated beads or particles, other chromatographic materials, magnetic particles; plastics (including acrylics, polystyrene, copolymers of styrene or other materials, polypropylene, polyethylene, polybutylene, polyurethanes, Teflon material, etc.), polysaccharides, nylon or nitrocellulose, resins, silica or silica-based materials including silicon and modified silicon, carbon, metals, inorganic glasses, plastics, ceramics, conducting polymers (including polymers such as polypyrole and polyindole); micro or nanostructured surfaces such as nucleic acid tiling arrays, nanotube, nanowire, or nanoparticulate decorated surfaces; or porous surfaces or gels such as methacrylates, acrylamides, sugar polymers, cellulose, silicates, or other fibrous or stranded polymers. In addition, as is known the art, the substrate may be coated using passive or chemically-derivatized coatings with any number of materials, including polymers, such as dextrans, acrylamides, gelatins or agarose. Such coatings can facilitate the use of the array with a biological sample.

[0174] As provided in the examples, below, an aptamer or other useful binding agent can be conjugated to a detectable entity or label. Appropriate labels include without limitation a magnetic label, a fluorescent moiety, an enzyme, a chemiluminescent probe, a metal particle, a non-metal colloidal particle, a polymeric dye particle, a pigment molecule, a pigment particle, an electrochemically active species, semiconductor nanocrystal or other nanoparticles including quantum dots or gold particles, fluorophores, quantum dots, or radioactive labels. Protein labels include green fluorescent protein (GFP) and variants thereof (e.g., cyan fluorescent protein and yellow fluorescent protein); and luminescent proteins such as luciferase, as described below. Radioactive labels include without limitation radioisotopes (radionuclides), such as ³H, ¹¹C, ¹⁴C, ¹⁸F, ³²P, ³⁵S, ⁶⁴Cu, ⁶⁸Ga, ⁸⁶Y, ⁹⁹Tc, ¹¹¹In, ¹²³I, ¹²⁴I, ¹²⁵I, ¹³¹I, ¹³³Xe, ¹⁷⁷Lu, ²¹¹At, or ²¹³Bi. Fluorescent labels include without limitation a rare earth chelate (e.g., europium chelate), rhodamine; fluorescein types including without limitation FITC, 5-carboxyfluorescein, 6-carboxy fluorescein; a rhodamine type including without limitation TAMRA; dansyl; Lissamine; cyanines; phycoerythrins; Texas Red; Cy3, Cy5, dapoxyl, NBD, Cascade Yellow, dansyl, PyMPO, pyrene, 7-diethylaminocoumarin-3-carboxylic acid and other coumarin derivatives, Marina Blue™, Pacific Blue™ Cascade Blue™, 2-anthracenesulfonyl, PyMPO, 3,4,9,10-perylene-tetracarboxylic acid, 2,7-difluorofluorescein (Oregon Green™ 488-X), 5-carboxyfluorescein, Texas Red™-X, Alexa Fluor 430, 5-carboxytetramethylrhodamine (5-TAMRA), 6-carboxytetramethylrhodamine (6-TAMRA), BODIPY FL, bimane, and Alexa Fluor 350, 405, 488, 500, 514, 532, 546, 555, 568, 594, 610, 633, 647, 660, 680, 700, and 750, and derivatives thereof, among many others. See, e.g., “The Handbook—A Guide to Fluorescent Probes and Labeling Technologies,” Tenth Edition, available on the internet at probes (dot) invitrogen (dot) com/handbook. The fluorescent label can be one or more of FAM, dRHO, 5-FAM, 6FAM, dR6G, JOE, HEX, VIC, TET, dTAMRA, TAMRA, NED, dROX, PET, BHQ, Gold540 and LIZ.

[0175] Using conventional techniques, an aptamer can be directly or indirectly labeled, e.g., the label is attached to the aptamer through biotin-streptavidin (e.g., synthesize a biotinylated aptamer, which is then capable of binding a streptavidin molecule that is itself conjugated to a detectable label; non-limiting example is streptavidin, phycoerythrin conjugated (SAPE)). Methods for chemical coupling using multiple step procedures include biotinylation, coupling of trinitrophenol (TNP) or digoxigenin using for example succinimide esters of these compounds. Biotinylation can be accomplished by, for example, the use of D-biotinyl-N-hydroxysuccinimide. Succinimide groups react effectively with amino groups at pH values above 7, and preferentially between about pH 8.0 and about pH 8.5. Alternatively, an aptamer is not labeled, but is later contacted with a second antibody that is labeled after the first antibody is bound to an antigen of interest.

[0176] Various enzyme-substrate labels may also be used in conjunction with a composition or method of the invention. Such enzyme-substrate labels are available commercially (e.g., U.S. Pat. No. 4,275,149). The enzyme generally catalyzes a chemical alteration of a chromogenic substrate that can be measured using various techniques. For example, the enzyme may catalyze a color change in a substrate, which can be measured spectrophotometrically. Alternatively, the enzyme may alter the fluorescence or chemiluminescence of the substrate. Examples of enzymatic labels include luciferases (e.g., firefly luciferase and bacterial luciferase; U.S. Pat. No. 4,737,456), luciferin, 2,3-dihydrophthalazinediones, malate dehydrogenase, urease, peroxidase such as horseradish peroxidase (HRP), alkaline phosphatase (AP), β-galactosidase, glucoamylase, lysozyme, saccharide oxidases (e.g., glucose oxidase, galactose oxidase, and glucose-6-phosphate dehydrogenase), heterocyclic oxidases (such as uricase and xanthine oxidase), lactoperoxidase, microperoxidase, and the like. Examples of enzyme-substrate combinations include, but are not limited to, horseradish peroxidase (HRP) with hydrogen peroxidase as a substrate, wherein the hydrogen peroxidase oxidizes a dye precursor (e.g., orthophenylene diamine (OPD) or 3,3′,5,5′-tetramethylbenzidine hydrochloride (TMB)); alkaline phosphatase (AP) with para-nitrophenyl phosphate as chromogenic substrate; and β-D-galactosidase (β-D-Gal) with a chromogenic substrate (e.g., p-nitrophenyl-β-D-galactosidase) or fluorogenic substrate 4-methylumbelliferyl-β-D-galactosidase.

[0177] Aptamer(s) can be linked to a substrate such as a planar substrate. A planar array generally contains addressable locations (e.g., pads, addresses, or micro-locations) of biomolecules in an array format. The size of the array will depend on the composition and end use of the array. Arrays can be made containing from 2 different molecules to many thousands. Generally, the array comprises from two to as many as 100,000 or more molecules, depending on the end use of the array and the method of manufacture. A microarray for use with the invention comprises at least one biomolecule that identifies or captures a biomarker present in a biosignature of interest, e.g., a microRNA or other biomolecule or vesicle that makes up the biosignature. In some arrays, multiple substrates are used, either of different or identical compositions. Accordingly, planar arrays may comprise a plurality of smaller substrates.

[0178] The present invention can make use of many types of arrays for detecting a biomarker, e.g., a biomarker associated with a biosignature of interest. Useful arrays or microarrays include without limitation DNA microarrays, such as cDNA microarrays, oligonucleotide microarrays and SNP microarrays, microRNA arrays, protein microarrays, antibody microarrays, tissue microarrays, cellular microarrays (also called transfection microarrays), chemical compound microarrays, and carbohydrate arrays (glycoarrays). These arrays are described in more detail above. In some embodiments, microarrays comprise biochips that provide high-density immobilized arrays of recognition molecules (e.g., aptamers or antibodies), where biomarker binding is monitored indirectly (e.g., via fluorescence).

[0179] An array or microarray that can be used to detect one or more biomarkers of a biosignature and comprising one or more aptamers can be made according to the methods described in U.S. Pat. Nos. 6,329,209; 6,365,418; 6,406,921; 6,475,808; and 6,475,809, and U.S. patent application Ser. No. 10/884,269, each of which is herein incorporated by reference in its entirety. Custom arrays to detect specific selections of sets of biomarkers described herein can be made using the methods described in these patents. Commercially available microarrays can also be used to carry out the methods of the invention, including without limitation those from Affymetrix (Santa Clara, Calif.), Illumina (San Diego, Calif.), Agilent (Santa Clara, Calif.), Exiqon (Denmark), or Invitrogen (Carlsbad, Calif.). Custom and/or commercial arrays include arrays for detection proteins, nucleic acids, and other biological molecules and entities (e.g., cells, vesicles, virii) as described herein.

[0180] In some embodiments, multiple capture molecules are disposed on an array, e.g., proteins, peptides or additional nucleic acid molecules. In certain embodiments, the proteins are immobilized using methods and materials that minimize the denaturing of the proteins, that minimize alterations in the activity of the proteins, or that minimize interactions between the protein and the surface on which they are immobilized. The capture molecules can comprise one or more aptamer of the invention. In one embodiment, an array is constructed for the hybridization of a pool of aptamers. The array can then be used to identify pool members that bind a sample, thereby facilitating characterization of a phenotype. See FIGS. 16B-16C and related disclosure for further details.

[0181] Array surfaces useful may be of any desired shape, form, or size. Non-limiting examples of surfaces include chips, continuous surfaces, curved surfaces, flexible surfaces, films, plates, sheets, or tubes. Surfaces can have areas ranging from approximately a square micron to approximately 500 cm². The area, length, and width of surfaces may be varied according to the requirements of the assay to be performed. Considerations may include, for example, ease of handling, limitations of the material(s) of which the surface is formed, requirements of detection systems, requirements of deposition systems (e.g., arrayers), or the like.

[0182] In certain embodiments, it is desirable to employ a physical means for separating groups or arrays of binding islands or immobilized biomolecules: such physical separation facilitates exposure of different groups or arrays to different solutions of interest. Therefore, in certain embodiments, arrays are situated within microwell plates having any number of wells. In such embodiments, the bottoms of the wells may serve as surfaces for the formation of arrays, or arrays may be formed on other surfaces and then placed into wells. In certain embodiments, such as where a surface without wells is used, binding islands may be formed or molecules may be immobilized on a surface and a gasket having holes spatially arranged so that they correspond to the islands or biomolecules may be placed on the surface. Such a gasket is preferably liquid tight. A gasket may be placed on a surface at any time during the process of making the array and may be removed if separation of groups or arrays is no longer desired.

[0183] In some embodiments, the immobilized molecules can bind to one or more biomarkers or vesicles present in a biological sample contacting the immobilized molecules. In some embodiments, the immobilized molecules modify or are modified by molecules present in the one or more vesicles contacting the immobilized molecules. Contacting the sample typically comprises overlaying the sample upon the array.

[0184] Modifications or binding of molecules in solution or immobilized on an array can be detected using detection techniques known in the art. Examples of such techniques include immunological techniques such as competitive binding assays and sandwich assays; fluorescence detection using instruments such as confocal scanners, confocal microscopes, or CCD-based systems and techniques such as fluorescence, fluorescence polarization (FP), fluorescence resonant energy transfer (FRET), total internal reflection fluorescence (TIRF), fluorescence correlation spectroscopy (FCS); colorimetric/spectrometric techniques; surface plasmon resonance, by which changes in mass of materials adsorbed at surfaces are measured; techniques using radioisotopes, including conventional radioisotope binding and scintillation proximity assays (SPA); mass spectroscopy, such as matrix-assisted laser desorption/ionization mass spectroscopy (MALDI) and MALDI-time of flight (TOF) mass spectroscopy; ellipsometry, which is an optical method of measuring thickness of protein films; quartz crystal microbalance (QCM), a very sensitive method for measuring mass of materials adsorbing to surfaces; scanning probe microscopies, such as atomic force microscopy (AFM), scanning force microscopy (SFM) or scanning electron microscopy (SEM); and techniques such as electrochemical, impedance, acoustic, microwave, and IR/Raman detection. See, e.g., Mere L, et al., “Miniaturized FRET assays and microfluidics: key components for ultra-high-throughput screening,” Drug Discovery Today 4(8):363-369 (1999), and references cited therein; Lakowicz J R, Principles of Fluorescence Spectroscopy, 2nd Edition, Plenum Press (1999), or Jain K K: Integrative Omics, Pharmacoproteomics, and Human Body Fluids. In: Thongboonkerd V, ed., ed. Proteomics of Human Body Fluids: Principles, Methods and Applications. Volume 1: Totowa, N.J.: Humana Press, 2007, each of which is herein incorporated by reference in its entirety.

[0185] Microarray technology can be combined with mass spectroscopy (MS) analysis and other tools. Electrospray interface to a mass spectrometer can be integrated with a capillary in a microfluidics device. For example, one commercially available system contains eTag reporters that are fluorescent labels with unique and well-defined electrophoretic mobilities; each label is coupled to biological or chemical probes via cleavable linkages. The distinct mobility address of each eTag reporter allows mixtures of these tags to be rapidly deconvoluted and quantitated by capillary electrophoresis. This system allows concurrent gene expression, protein expression, and protein function analyses from the same sample Jain K K: Integrative Omics, Pharmacoproteomics, and Human Body Fluids. In: Thongboonkerd V, ed., ed. Proteomics of Human Body Fluids: Principles, Methods and Applications. Volume 1: Totowa, N.J.: Humana Press, 2007, which is herein incorporated by reference in its entirety.

[0186] A biochip can include components for a microfluidic or nanofluidic assay. A microfluidic device can be used for isolating or analyzing biomarkers, such as determining a biosignature. Microfluidic systems allow for the miniaturization and compartmentalization of one or more processes for isolating, capturing or detecting a vesicle, detecting a microRNA, detecting a circulating biomarker, detecting a biosignature, and other processes. The microfluidic devices can use one or more detection reagents in at least one aspect of the system, and such a detection reagent can be used to detect one or more biomarkers. In one embodiment, the device detects a biomarker on an isolated or bound vesicle. Various probes, antibodies, proteins, or other binding agents can be used to detect a biomarker within the microfluidic system. The detection agents may be immobilized in different compartments of the microfluidic device or be entered into a hybridization or detection reaction through various channels of the device.

[0187] A vesicle in a microfluidic device can be lysed and its contents detected within the microfluidic device, such as proteins or nucleic acids, e.g., DNA or RNA such as miRNA or mRNA. The nucleic acid may be amplified prior to detection, or directly detected, within the microfluidic device. Thus microfluidic system can also be used for multiplexing detection of various biomarkers. In an embodiment, vesicles are captured within the microfluidic device, the captured vesicles are lysed, and a biosignature of microRNA from the vesicle payload is determined. The biosignature can further comprise the capture agent used to capture the vesicle.

[0188] Novel nanofabrication techniques are opening up the possibilities for biosensing applications that rely on fabrication of high-density, precision arrays, e.g., nucleotide-based chips and protein arrays otherwise known as heterogeneous nanoarrays. Nanofluidics allows a further reduction in the quantity of fluid analyte in a microchip to nanoliter levels, and the chips used here are referred to as nanochips. See, e.g., Unger M et al., Biotechniques 1999; 27(5):1008-14, Kartalov E P et al., Biotechniques 2006; 40(1):85-90, each of which are herein incorporated by reference in their entireties. Commercially available nanochips currently provide simple one step assays such as total cholesterol, total protein or glucose assays that can be run by combining sample and reagents, mixing and monitoring of the reaction. Gel-free analytical approaches based on liquid chromatography (LC) and nanoLC separations (Cutillas et al. Proteomics, 2005; 5:101-112 and Cutillas et al., Mol Cell Proteomics 2005; 4:1038-1051, each of which is herein incorporated by reference in its entirety) can be used in combination with the nanochips.

[0189] An array suitable for identifying a disease, condition, syndrome or physiological status can be included in a kit. A kit can include, an aptamer of the invention, including as non-limiting examples, one or more reagents useful for preparing molecules for immobilization onto binding islands or areas of an array, reagents useful for detecting binding of a vesicle to immobilized molecules, and instructions for use.

[0190] Further provided herein is a rapid detection device that facilitates the detection of a particular biosignature in a biological sample. The device can integrate biological sample preparation with polymerase chain reaction (PCR) on a chip. The device can facilitate the detection of a particular biosignature of a vesicle in a biological sample, and an example is provided as described in Pipper et al., Angewandte Chemie, 47(21), p. 3900-3904 (2008), which is herein incorporated by reference in its entirety. A biosignature can be incorporated using micro-/nano-electrochemical system (MEMS/NEMS) sensors and oral fluid for diagnostic applications as described in Li et al., Adv Dent Res 18(1): 3-5 (2005), which is herein incorporated by reference in its entirety.

### Particle Arrays

[0191] As an alternative to planar arrays, assays using particles, such as bead based assays are also capable of use with an aptamer of the invention. Aptamers are easily conjugated with commercially available beads. See, e.g., Srinivas et al. Anal. Chem. 2011 Oct. 21, Aptamer functionalized Microgel Particles for Protein Detection; See also, review article on aptamers as therapeutic and diagnostic agents, Brody and Gold, Rev. Mol. Biotech. 2000, 74:5-13.

[0192] Multiparametric assays or other high throughput detection assays using bead coatings with cognate ligands and reporter molecules with specific activities consistent with high sensitivity automation can be used. In a bead based assay system, a binding agent for a biomarker or vesicle, such as a capture agent (e.g. capture antibody), can be immobilized on an addressable microsphere. Each binding agent for each individual binding assay can be coupled to a distinct type of microsphere (i.e., microbead) and the assay reaction takes place on the surface of the microsphere, such as depicted in FIG. 2B. A binding agent for a vesicle can be a capture antibody coupled to a bead. Dyed microspheres with discrete fluorescence intensities are loaded separately with their appropriate binding agent or capture probes. The different bead sets carrying different binding agents can be pooled as desired to generate custom bead arrays. Bead arrays are then incubated with the sample in a single reaction vessel to perform the assay.

[0193] Bead-based assays can also be used with one or more aptamers of the invention. A bead substrate can provide a platform for attaching one or more binding agents, including aptamer(s). For multiplexing, multiple different bead sets (e.g., Illumina, Luminex) can have different binding agents (specific to different target molecules). For example, a bead can be conjugated to an aptamer of the invention used to detect the presence (quantitatively or qualitatively) of an antigen of interest, or it can also be used to isolate a component present in a selected biological sample (e.g., cell, cell-fragment or vesicle comprising the target molecule to which the aptamer is configured to bind or associate). Any molecule of organic origin can be successfully conjugated to a polystyrene bead through use of commercially available kits.

[0194] One or more aptamers of the invention can be used with any bead based substrate, including but not limited to magnetic capture method, fluorescence activated cell sorting (FACS) or laser cytometry. Magnetic capture methods can include, but are not limited to, the use of magnetically activated cell sorter (MACS) microbeads or magnetic columns. Examples of bead or particle based methods that can be modified to use an aptamer of the invention include methods and bead systems described in U.S. Pat. Nos. 4,551,435, 4,795,698, 4,925,788, 5,108,933, 5,186,827, 5,200,084 or 5,158,871; 7,399,632; 8,124,015; 8,008,019; 7,955,802; 7,445,844; 7,274,316; 6,773,812; 6,623,526; 6,599,331; 6,057,107; 5,736,330; International Patent Publication No. WO/2012/174282; WO/1993/022684.

### Flow Cytometry

[0195] Isolation or detection of circulating biomarkers, e.g., protein antigens, from a biological sample, or of the biomarker-comprising cells, cell fragments or vesicles may also be achieved using an aptamer of the invention in a cytometry process. As a non-limiting example, aptamers of the invention can be used in an assay comprising using a particle such as a bead or microsphere The invention provides aptamers as binding agents, which may be conjugated to the particle. Flow cytometry can be used for sorting microscopic particles suspended in a stream of fluid. As particles pass through they can be selectively charged and on their exit can be deflected into separate paths of flow. It is therefore possible to separate populations from an original mix, such as a biological sample, with a high degree of accuracy and speed. Flow cytometry allows simultaneous multiparametric analysis of the physical and/or chemical characteristics of single cells flowing through an optical/electronic detection apparatus. A beam of light, usually laser light, of a single frequency (color) is directed onto a hydrodynamically focused stream of fluid. A number of detectors are aimed at the point where the stream passes through the light beam; one in line with the light beam (Forward Scatter or FSC) and several perpendicular to it (Side Scatter or SSC) and one or more fluorescent detectors.

[0196] Each suspended particle passing through the beam scatters the light in some way, and fluorescent chemicals in the particle may be excited into emitting light at a lower frequency than the light source. This combination of scattered and fluorescent light is picked up by the detectors, and by analyzing fluctuations in brightness at each detector (one for each fluorescent emission peak), it is possible to deduce various facts about the physical and chemical structure of each individual particle. FSC correlates with the cell size and SSC depends on the inner complexity of the particle, such as shape of the nucleus, the amount and type of cytoplasmic granules or the membrane roughness. Some flow cytometers have eliminated the need for fluorescence and use only light scatter for measurement.

[0197] Flow cytometers can analyze several thousand particles every second in “real time” and can actively separate out and isolate particles having specified properties. They offer high-throughput automated quantification, and separation, of the set parameters for a high number of single cells during each analysis session. Flow cytometers can have multiple lasers and fluorescence detectors, allowing multiple labels to be used to more precisely specify a target population by their phenotype. Thus, a flow cytometer, such as a multicolor flow cytometer, can be used to detect one or more vesicles with multiple fluorescent labels or colors. In some embodiments, the flow cytometer can also sort or isolate different vesicle populations, such as by size or by different markers.

[0198] The flow cytometer may have one or more lasers, such as 1, 2, 3, 4, 5, 6, 7, 8, 9, 10 or more lasers. In some embodiments, the flow cytometer can detect more than one color or fluorescent label, such as at least 2, 3, 4, 5, 6, 7, 8, 9, 10, 11, 12, 13, 14, 15, 16, 17, 18, 19, or 20 different colors or fluorescent labels. For example, the flow cytometer can have at least 2, 3, 4, 5, 6, 7, 8, 9, 10, 11, 12, 13, 14, 15, 16, 17, 18, 19, or 20 fluorescence detectors.

[0199] Examples of commercially available flow cytometers that can be used to detect or analyze one or more vesicles, to sort or separate different populations of vesicles, include, but are not limited to the MoFlo™ XDP Cell Sorter (Beckman Coulter, Brea, Calif.), MoFlo™ Legacy Cell Sorter (Beckman Coulter, Brea, Calif.), BD FACSAria™ Cell Sorter (BD Biosciences, San Jose, Calif.), BD™ LSRII (BD Biosciences, San Jose, Calif.), and BD FACSCalibur™ (BD Biosciences, San Jose, Calif.). Use of multicolor or multi-fluor cytometers can be used in multiplex analysis of vesicles, as further described below. In some embodiments, the flow cytometer can sort, and thereby collect or sort more than one population of vesicles based one or more characteristics. For example, two populations of vesicles differ in size, such that the vesicles within each population have a similar size range and can be differentially detected or sorted. In another embodiment, two different populations of vesicles are differentially labeled.

[0200] The data resulting from flow-cytometers can be plotted in 1 dimension to produce histograms or seen in 2 dimensions as dot plots or in 3 dimensions with newer software. The regions on these plots can be sequentially separated by a series of subset extractions which are termed gates. Specific gating protocols exist for diagnostic and clinical purposes especially in relation to hematology. The plots are often made on logarithmic scales. Because different fluorescent dye's emission spectra overlap, signals at the detectors have to be compensated electronically as well as computationally. Fluorophores for labeling biomarkers may include those described in Ormerod, Flow Cytometry 2nd ed., Springer-Verlag, New York (1999), and in Nida et al., Gynecologic Oncology 2005; 4 889-894 which is incorporated herein by reference. In a multiplexed assay, including but not limited to a flow cytometry assay, one or more different target molecules can be assessed. In some embodiments, at least one of the target molecules is a biomarker, e.g., a microvesicle surface antigen, assessed using an aptamer of the invention.

### Microfluidics

[0201] One or more aptamer of the invention can be disposed on any useful planar or bead substrate. In one aspect of the invention one or more aptamer of the invention is disposed on a microfluidic device, thereby facilitating assessing, characterizing or isolating a component of a biological sample comprising a polypeptide antigen of interest or a functional fragment thereof. For example, the circulating antigen or a cell, cell fragment or cell-derived vesicles comprising the antigen can be assessed using one or more aptamers of the invention (alternatively along with additional binding agents). Microfluidic devices, which may also be referred to as “lab-on-a-chip” systems, biomedical micro-electro-mechanical systems (bioMEMs), or multicomponent integrated systems, can be used for isolating and analyzing a vesicle. Such systems miniaturize and compartmentalize processes that allow for binding of vesicles, detection of biosignatures, and other processes.

[0202] A microfluidic device can also be used for isolation of a vesicle through size differential or affinity selection. For example, a microfluidic device can use one more channels for isolating a vesicle from a biological sample based on size or by using one or more binding agents for isolating a vesicle from a biological sample. A biological sample can be introduced into one or more microfluidic channels, which selectively allows the passage of a vesicle. The selection can be based on a property of the vesicle, such as the size, shape, deformability, or biosignature of the vesicle.

[0203] In one embodiment, a heterogeneous population of vesicles can be introduced into a microfluidic device, and one or more different homogeneous populations of vesicles can be obtained. For example, different channels can have different size selections or binding agents to select for different vesicle populations. Thus, a microfluidic device can isolate a plurality of vesicles wherein at least a subset of the plurality of vesicles comprises a different biosignature from another subset of the plurality of vesicles. For example, the microfluidic device can isolate at least 2, 3, 4, 5, 6, 7, 8, 9, 10, 15, 20, 25, 30, 40, 50, 60, 70, 80, 90, or 100 different subsets of vesicles, wherein each subset of vesicles comprises a different biosignature.

[0204] In some embodiments, the microfluidic device can comprise one or more channels that permit further enrichment or selection of a vesicle. A population of vesicles that has been enriched after passage through a first channel can be introduced into a second channel, which allows the passage of the desired vesicle or vesicle population to be further enriched, such as through one or more binding agents present in the second channel.

[0205] Array-based assays and bead-based assays can be used with microfluidic device. For example, the binding agent can be coupled to beads and the binding reaction between the beads and vesicle can be performed in a microfluidic device. Multiplexing can also be performed using a microfluidic device. Different compartments can comprise different binding agents for different populations of vesicles, where each population is of a different cell-of-origin specific vesicle population. In one embodiment, each population has a different biosignature. The hybridization reaction between the microsphere and vesicle can be performed in a microfluidic device and the reaction mixture can be delivered to a detection device. The detection device, such as a dual or multiple laser detection system can be part of the microfluidic system and can use a laser to identify each bead or microsphere by its color-coding, and another laser can detect the hybridization signal associated with each bead.

[0206] Any appropriate microfluidic device can be used in the methods of the invention. Examples of microfluidic devices that may be used, or adapted for use with vesicles, include but are not limited to those described in U.S. Pat. Nos. 7,591,936, 7,581,429, 7,579,136, 7,575,722, 7,568,399, 7,552,741, 7,544,506, 7,541,578, 7,518,726, 7,488,596, 7,485,214, 7,467,928, 7,452,713, 7,452,509, 7,449,096, 7,431,887, 7,422,725, 7,422,669, 7,419,822, 7,419,639, 7,413,709, 7,411,184, 7,402,229, 7,390,463, 7,381,471, 7,357,864, 7,351,592, 7,351,380, 7,338,637, 7,329,391, 7,323,140, 7,261,824, 7,258,837, 7,253,003, 7,238,324, 7,238,255, 7,233,865, 7,229,538, 7,201,881, 7,195,986, 7,189,581, 7,189,580, 7,189,368, 7,141,978, 7,138,062, 7,135,147, 7,125,711, 7,118,910, 7,118,661, 7,640,947, 7,666,361, 7,704,735; and International Patent Publication WO 2010/072410; each of which patents or applications are incorporated herein by reference in their entirety. Another example for use with methods disclosed herein is described in Chen et al., “Microfluidic isolation and transcriptome analysis of serum vesicles,” Lab on a Chip, Dec. 8, 2009 DOI: 10.1039/b916199f.

[0207] Other microfluidic devices for use with the invention include devices comprising elastomeric layers, valves and pumps, including without limitation those disclosed in U.S. Pat. Nos. 5,376,252, 6,408,878, 6,645,432, 6,719,868, 6,793,753, 6,899,137, 6,929,030, 7,040,338, 7,118,910, 7,144,616, 7,216,671, 7,250,128, 7,494,555, 7,501,245, 7,601,270, 7,691,333, 7,754,010, 7,837,946; U.S. Patent Application Nos. 2003/0061687, 2005/0084421, 2005/0112882, 2005/0129581, 2005/0145496, 2005/0201901, 2005/0214173, 2005/0252773, 2006/0006067; and EP Patent Nos. 0527905 and 1065378; each of which application is herein incorporated by reference. In some instances, much or all of the devices are composed of elastomeric material. Certain devices are designed to conduct thermal cycling reactions (e.g., PCR) with devices that include one or more elastomeric valves to regulate solution flow through the device. The devices can comprise arrays of reaction sites thereby allowing a plurality of reactions to be performed. Thus, the devices can be used to assess circulating microRNAs in a multiplex fashion, including microRNAs isolated from vesicles. In an embodiment, the microfluidic device comprises (a) a first plurality of flow channels formed in an elastomeric substrate; (b) a second plurality of flow channels formed in the elastomeric substrate that intersect the first plurality of flow channels to define an array of reaction sites, each reaction site located at an intersection of one of the first and second flow channels; (c) a plurality of isolation valves disposed along the first and second plurality of flow channels and spaced between the reaction sites that can be actuated to isolate a solution within each of the reaction sites from solutions at other reaction sites, wherein the isolation valves comprise one or more control channels that each overlay and intersect one or more of the flow channels; and (d) means for simultaneously actuating the valves for isolating the reaction sites from each other. Various modifications to the basic structure of the device are envisioned within the scope of the invention. MicroRNAs can be detected in each of the reaction sites by using PCR methods. For example, the method can comprise the steps of the steps of: (i) providing a microfluidic device, the microfluidic device comprising: a first fluidic channel having a first end and a second end in fluid communication with each other through the channel; a plurality of flow channels, each flow channel terminating at a terminal wall; wherein each flow channel branches from and is in fluid communication with the first fluidic channel, wherein an aqueous fluid that enters one of the flow channels from the first fluidic channel can flow out of the flow channel only through the first fluidic channel; and, an inlet in fluid communication with the first fluidic channel, the inlet for introducing a sample fluid; wherein each flow channel is associated with a valve that when closed isolates one end of the flow channel from the first fluidic channel, whereby an isolated reaction site is formed between the valve and the terminal wall; a control channel; wherein each the valve is a deflectable membrane which is deflected into the flow channel associated with the valve when an actuating force is applied to the control channel, thereby closing the valve; and wherein when the actuating force is applied to the control channel a valve in each of the flow channels is closed, so as to produce the isolated reaction site in each flow channel; (ii) introducing the sample fluid into the inlet, the sample fluid filling the flow channels; (iii) actuating the valve to separate the sample fluid into the separate portions within the flow channels; (iv) amplifying the nucleic acid in the sample fluid; (v) analyzing the portions of the sample fluid to determine whether the amplifying produced the reaction. The sample fluid can contain an amplifiable nucleic acid target, e.g., a microRNA, and the conditions can be polymerase chain reaction (PCR) conditions, so that the reaction results in a PCR product being formed.

[0208] The microfluidic device can have one or more binding agents attached to a surface in a channel, or present in a channel. For example, the microchannel can have one or more capture agents, such as a capture agent for one or more general microvesicle antigen in Table 3 or a cell-of-origin or cancer related antigen in Table 4, including without limitation EpCam, CD9, PCSA, CD63, CD81, PSMA, B7H3, PSCA, ICAM, STEAP, KLK2, SSX2, SSX4, PBP, SPDEF, and EGFR. The capture agent may be an aptamer selected by the methods of the invention. The surface of the channel can also be contacted with a blocking aptamer of the invention. In one embodiment, a microchannel surface is treated with avidin and a capture agent, such as an antibody, that is biotinylated can be injected into the channel to bind the avidin. In other embodiments, the capture agents are present in chambers or other components of a microfluidic device. The capture agents can also be attached to beads that can be manipulated to move through the microfluidic channels. In one embodiment, the capture agents are attached to magnetic beads. The beads can be manipulated using magnets.

[0209] A biological sample can be flowed into the microfluidic device, or a microchannel, at rates such as at least about 1, 2, 3, 4, 5, 6, 7, 8, 9, 10, 11, 12, 13, 14, 15, 16, 17, 18, 19, 20, 25, 30, 35, 40, 45, or 50 μl per minute, such as between about 1-50, 5-40, 5-30, 3-20 or 5-15 μl per minute. One or more vesicles can be captured and directly detected in the microfluidic device. Alternatively, the captured vesicle may be released and exit the microfluidic device prior to analysis. In another embodiment, one or more captured vesicles are lysed in the microchannel and the lysate can be analyzed, e.g., to examine payload within the vesicles. Lysis buffer can be flowed through the channel and lyse the captured vesicles. For example, the lysis buffer can be flowed into the device or microchannel at rates such as at least about a, 2, 3, 4, 5, 6, 7, 8, 9, 10, 11, 12, 13, 14, 15, 16, 17, 18, 19, 20, 25, 26, 27, 28, 29, 30, 35, 40, 45, or 50 μl per minute, such as between about 1-50, 5-40, 10-30, 5-30 or 10-35 μl per minute. The lysate can be collected and analyzed, such as performing RT-PCR, PCR, mass spectrometry, Western blotting, or other assays, to detect one or more biomarkers of the vesicle.

### Phenotypes

[0210] Disclosed herein are products and processes for characterizing a phenotype using the methods and compositions of the invention. The term “phenotype” as used herein can mean any trait or characteristic that is attributed to a biomarker profile that is identified using in part or in whole the compositions and/or methods of the invention. For example, a phenotype can be a diagnostic, prognostic or theranostic determination based on a characterized biomarker profile for a sample obtained from a subject. A phenotype can be any observable characteristic or trait of, such as a disease or condition, a stage of a disease or condition, susceptibility to a disease or condition, prognosis of a disease stage or condition, a physiological state, or response/potential response to therapeutics. A phenotype can result from a subject's genetic makeup as well as the influence of environmental factors and the interactions between the two, as well as from epigenetic modifications to nucleic acid sequences.

[0211] A phenotype in a subject can be characterized by obtaining a biological sample from a subject and analyzing the sample using the compositions and/or methods of the invention. For example, characterizing a phenotype for a subject or individual can include detecting a disease or condition (including pre-symptomatic early stage detecting), determining a prognosis, diagnosis, or theranosis of a disease or condition, or determining the stage or progression of a disease or condition. Characterizing a phenotype can include identifying appropriate treatments or treatment efficacy for specific diseases, conditions, disease stages and condition stages, predictions and likelihood analysis of disease progression, particularly disease recurrence, metastatic spread or disease relapse. A phenotype can also be a clinically distinct type or subtype of a condition or disease, such as a cancer or tumor. Phenotype determination can also be a determination of a physiological condition, or an assessment of organ distress or organ rejection, such as post-transplantation. The compositions and methods described herein allow assessment of a subject on an individual basis, which can provide benefits of more efficient and economical decisions in treatment.

[0212] In an aspect, the invention relates to the analysis of biomarkers such as microvesicles to provide a diagnosis, prognosis, and/or theranosis of a disease or condition. Theranostics includes diagnostic testing that provides the ability to affect therapy or treatment of a disease or disease state. Theranostics testing provides a theranosis in a similar manner that diagnostics or prognostic testing provides a diagnosis or prognosis, respectively. As used herein, theranostics encompasses any desired form of therapy related testing, including predictive medicine, personalized medicine, integrated medicine, pharmacodiagnostics and Dx/Rx partnering. Therapy related tests can be used to predict and assess drug response in individual subjects, i.e., to provide personalized medicine. Predicting a drug response can be determining whether a subject is a likely responder or a likely non-responder to a candidate therapeutic agent, e.g., before the subject has been exposed or otherwise treated with the treatment. Assessing a drug response can be monitoring a response to a drug, e.g., monitoring the subject's improvement or lack thereof over a time course after initiating the treatment. Therapy related tests are useful to select a subject for treatment who is particularly likely to benefit from the treatment or to provide an early and objective indication of treatment efficacy in an individual subject. Thus, analysis using the compositions and methods of the invention may indicate that treatment should be altered to select a more promising treatment, thereby avoiding the great expense of delaying beneficial treatment and avoiding the financial and morbidity costs of administering an ineffective drug(s).

[0213] Thus, the compositions and methods of the invention may help predict whether a subject is likely to respond to a treatment for a disease or disorder. Characterizating a phenotype includes predicting the responder/non-responder status of the subject, wherein a responder responds to a treatment for a disease and a non-responder does not respond to the treatment. Biomarkers such as microvesicles can be analyzed in the subject and compared against that of previous subjects that were known to respond or not to a treatment. If the biomarker profile in the subject more closely aligns with that of previous subjects that were known to respond to the treatment, the subject can be characterized, or predicted, as a responder to the treatment. Similarly, if the biomarker profile in the subject more closely aligns with that of previous subjects that did not respond to the treatment, the subject can be characterized, or predicted as a non-responder to the treatment. The treatment can be for any appropriate disease, disorder or other condition, including without limitation those disclosed herein.

[0214] In some embodiments, the phenotype comprises a disease or condition such as those listed in Tables 1 or 16. For example, the phenotype can comprise detecting the presence of or likelihood of developing a tumor, neoplasm, or cancer, or characterizing the tumor, neoplasm, or cancer (e.g., stage, grade, aggressiveness, likelihood of metastatis or recurrence, etc). Cancers that can be detected or assessed by methods or compositions described herein include, but are not limited to, breast cancer, ovarian cancer, lung cancer, colon cancer, hyperplastic polyp, adenoma, colorectal cancer, high grade dysplasia, low grade dysplasia, prostatic hyperplasia, prostate cancer, melanoma, pancreatic cancer, brain cancer (such as a glioblastoma), hematological malignancy, hepatocellular carcinoma, cervical cancer, endometrial cancer, head and neck cancer, esophageal cancer, gastrointestinal stromal tumor (GIST), renal cell carcinoma (RCC) or gastric cancer. The colorectal cancer can be CRC Dukes B or Dukes C-D. The hematological malignancy can be B-Cell Chronic Lymphocytic Leukemia, B-Cell Lymphoma-DLBCL, B-Cell Lymphoma-DLBCL-germinal center-like, B-Cell Lymphoma-DLBCL-activated B-cell-like, and Burkitt's lymphoma.

[0215] The phenotype can be a premalignant condition, such as actinic keratosis, atrophic gastritis, leukoplakia, erythroplasia, Lymphomatoid Granulomatosis, preleukemia, fibrosis, cervical dysplasia, uterine cervical dysplasia, xeroderma pigmentosum, Barrett's Esophagus, colorectal polyp, or other abnormal tissue growth or lesion that is likely to develop into a malignant tumor. Transformative viral infections such as HIV and HPV also present phenotypes that can be assessed according to the invention.

[0216] A cancer characterized by the methods of the invention can comprise, without limitation, a carcinoma, a sarcoma, a lymphoma or leukemia, a germ cell tumor, a blastoma, or other cancers. Carcinomas include without limitation epithelial neoplasms, squamous cell neoplasms squamous cell carcinoma, basal cell neoplasms basal cell carcinoma, transitional cell papillomas and carcinomas, adenomas and adenocarcinomas (glands), adenoma, adenocarcinoma, linitis plastica insulinoma, glucagonoma, gastrinoma, vipoma, cholangiocarcinoma, hepatocellular carcinoma, adenoid cystic carcinoma, carcinoid tumor of appendix, prolactinoma, oncocytoma, hurthle cell adenoma, renal cell carcinoma, grawitz tumor, multiple endocrine adenomas, endometrioid adenoma, adnexal and skin appendage neoplasms, mucoepidermoid neoplasms, cystic, mucinous and serous neoplasms, cystadenoma, pseudomyxoma peritonei, ductal, lobular and medullary neoplasms, acinar cell neoplasms, complex epithelial neoplasms, warthin's tumor, thymoma, specialized gonadal neoplasms, sex cord stromal tumor, thecoma, granulosa cell tumor, arrhenoblastoma, sertoli leydig cell tumor, glomus tumors, paraganglioma, pheochromocytoma, glomus tumor, nevi and melanomas, melanocytic nevus, malignant melanoma, melanoma, nodular melanoma, dysplastic nevus, lentigo maligna melanoma, superficial spreading melanoma, and malignant acral lentiginous melanoma. Sarcoma includes without limitation Askin's tumor, botryodies, chondrosarcoma, Ewing's sarcoma, malignant hemangio endothelioma, malignant schwannoma, osteosarcoma, soft tissue sarcomas including: alveolar soft part sarcoma, angiosarcoma, cystosarcoma phyllodes, dermatofibrosarcoma, desmoid tumor, desmoplastic small round cell tumor, epithelioid sarcoma, extraskeletal chondrosarcoma, extraskeletal osteosarcoma, fibrosarcoma, hemangiopericytoma, hemangiosarcoma, kaposi's sarcoma, leiomyosarcoma, liposarcoma, lymphangiosarcoma, lymphosarcoma, malignant fibrous histiocytoma, neurofibrosarcoma, rhabdomyosarcoma, and synovialsarcoma. Lymphoma and leukemia include without limitation chronic lymphocytic leukemia/small lymphocytic lymphoma, B-cell prolymphocytic leukemia, lymphoplasmacytic lymphoma (such as waldenstrom macroglobulinemia), splenic marginal zone lymphoma, plasma cell myeloma, plasmacytoma, monoclonal immunoglobulin deposition diseases, heavy chain diseases, extranodal marginal zone B cell lymphoma, also called malt lymphoma, nodal marginal zone B cell lymphoma (nmzl), follicular lymphoma, mantle cell lymphoma, diffuse large B cell lymphoma, mediastinal (thymic) large B cell lymphoma, intravascular large B cell lymphoma, primary effusion lymphoma, burkitt lymphoma/leukemia, T cell prolymphocytic leukemia, T cell large granular lymphocytic leukemia, aggressive NK cell leukemia, adult T cell leukemia/lymphoma, extranodal NK/T cell lymphoma, nasal type, enteropathy-type T cell lymphoma, hepatosplenic T cell lymphoma, blastic NK cell lymphoma, mycosis fungoides/sezary syndrome, primary cutaneous CD30-positive T cell lymphoproliferative disorders, primary cutaneous anaplastic large cell lymphoma, lymphomatoid papulosis, angioimmunoblastic T cell lymphoma, peripheral T cell lymphoma, unspecified, anaplastic large cell lymphoma, classical hodgkin lymphomas (nodular sclerosis, mixed cellularity, lymphocyte-rich, lymphocyte depleted or not depleted), and nodular lymphocyte-predominant hodgkin lymphoma. Germ cell tumors include without limitation germinoma, dysgerminoma, seminoma, nongerminomatous germ cell tumor, embryonal carcinoma, endodermal sinus turmor, choriocarcinoma, teratoma, polyembryoma, and gonadoblastoma. Blastoma includes without limitation nephroblastoma, medulloblastoma, and retinoblastoma. Other cancers include without limitation labial carcinoma, larynx carcinoma, hypopharynx carcinoma, tongue carcinoma, salivary gland carcinoma, gastric carcinoma, adenocarcinoma, thyroid cancer (medullary and papillary thyroid carcinoma), renal carcinoma, kidney parenchyma carcinoma, cervix carcinoma, uterine corpus carcinoma, endometrium carcinoma, chorion carcinoma, testis carcinoma, urinary carcinoma, melanoma, brain tumors such as glioblastoma, astrocytoma, meningioma, medulloblastoma and peripheral neuroectodermal tumors, gall bladder carcinoma, bronchial carcinoma, multiple myeloma, basalioma, teratoma, retinoblastoma, choroidea melanoma, seminoma, rhabdomyosarcoma, craniopharyngeoma, osteosarcoma, chondrosarcoma, myosarcoma, liposarcoma, fibrosarcoma, Ewing sarcoma, and plasmocytoma.

[0217] In a further embodiment, the cancer under analysis may be a lung cancer including non-small cell lung cancer and small cell lung cancer (including small cell carcinoma (oat cell cancer), mixed small cell/large cell carcinoma, and combined small cell carcinoma), colon cancer, breast cancer, prostate cancer, liver cancer, pancreas cancer, brain cancer, kidney cancer, ovarian cancer, stomach cancer, skin cancer, bone cancer, gastric cancer, breast cancer, pancreatic cancer, glioma, glioblastoma, hepatocellular carcinoma, papillary renal carcinoma, head and neck squamous cell carcinoma, leukemia, lymphoma, myeloma, or a solid tumor.

[0218] In embodiments, the cancer comprises an acute lymphoblastic leukemia; acute myeloid leukemia; adrenocortical carcinoma; AIDS-related cancers; AIDS-related lymphoma; anal cancer; appendix cancer; astrocytomas; atypical teratoid/rhabdoid tumor; basal cell carcinoma; bladder cancer; brain stem glioma; brain tumor (including brain stem glioma, central nervous system atypical teratoid/rhabdoid tumor, central nervous system embryonal tumors, astrocytomas, craniopharyngioma, ependymoblastoma, ependymoma, medulloblastoma, medulloepithelioma, pineal parenchymal tumors of intermediate differentiation, supratentorial primitive neuroectodermal tumors and pineoblastoma); breast cancer; bronchial tumors; Burkitt lymphoma; cancer of unknown primary site; carcinoid tumor; carcinoma of unknown primary site; central nervous system atypical teratoid/rhabdoid tumor; central nervous system embryonal tumors; cervical cancer; childhood cancers; chordoma; chronic lymphocytic leukemia; chronic myelogenous leukemia; chronic myeloproliferative disorders; colon cancer; colorectal cancer; craniopharyngioma; cutaneous T-cell lymphoma; endocrine pancreas islet cell tumors; endometrial cancer; ependymoblastoma; ependymoma; esophageal cancer; esthesioneuroblastoma; Ewing sarcoma; extracranial germ cell tumor; extragonadal germ cell tumor; extrahepatic bile duct cancer; gallbladder cancer; gastric (stomach) cancer; gastrointestinal carcinoid tumor; gastrointestinal stromal cell tumor; gastrointestinal stromal tumor (GIST); gestational trophoblastic tumor; glioma; hairy cell leukemia; head and neck cancer; heart cancer; Hodgkin lymphoma; hypopharyngeal cancer; intraocular melanoma; islet cell tumors; Kaposi sarcoma; kidney cancer; Langerhans cell histiocytosis; laryngeal cancer; lip cancer; liver cancer; malignant fibrous histiocytoma bone cancer; medulloblastoma; medulloepithelioma; melanoma; Merkel cell carcinoma; Merkel cell skin carcinoma; mesothelioma; metastatic squamous neck cancer with occult primary; mouth cancer; multiple endocrine neoplasia syndromes; multiple myeloma; multiple myeloma/plasma cell neoplasm; mycosis fungoides; myelodysplastic syndromes; myeloproliferative neoplasms; nasal cavity cancer; nasopharyngeal cancer; neuroblastoma; Non-Hodgkin lymphoma; nonmelanoma skin cancer; non-small cell lung cancer; oral cancer; oral cavity cancer; oropharyngeal cancer; osteosarcoma; other brain and spinal cord tumors; ovarian cancer; ovarian epithelial cancer; ovarian germ cell tumor; ovarian low malignant potential tumor; pancreatic cancer; papillomatosis; paranasal sinus cancer; parathyroid cancer; pelvic cancer; penile cancer; pharyngeal cancer; pineal parenchymal tumors of intermediate differentiation; pineoblastoma; pituitary tumor; plasma cell neoplasm/multiple myeloma; pleuropulmonary blastoma; primary central nervous system (CNS) lymphoma; primary hepatocellular liver cancer; prostate cancer; rectal cancer; renal cancer; renal cell (kidney) cancer; renal cell cancer; respiratory tract cancer; retinoblastoma; rhabdomyosarcoma; salivary gland cancer; Sézary syndrome; small cell lung cancer; small intestine cancer; soft tissue sarcoma; squamous cell carcinoma; squamous neck cancer; stomach (gastric) cancer; supratentorial primitive neuroectodermal tumors; T-cell lymphoma; testicular cancer; throat cancer; thymic carcinoma; thymoma; thyroid cancer; transitional cell cancer; transitional cell cancer of the renal pelvis and ureter; trophoblastic tumor; ureter cancer; urethral cancer; uterine cancer; uterine sarcoma; vaginal cancer; vulvar cancer; Waldenström macroglobulinemia; or Wilm's tumor. The methods of the invention can be used to characterize these and other cancers. Thus, characterizing a phenotype can be providing a diagnosis, prognosis or theranosis of one of the cancers disclosed herein.

[0219] In some embodiments, the cancer comprises an acute myeloid leukemia (AML), breast carcinoma, cholangiocarcinoma, colorectal adenocarcinoma, extrahepatic bile duct adenocarcinoma, female genital tract malignancy, gastric adenocarcinoma, gastroesophageal adenocarcinoma, gastrointestinal stromal tumors (GIST), glioblastoma, head and neck squamous carcinoma, leukemia, liver hepatocellular carcinoma, low grade glioma, lung bronchioloalveolar carcinoma (BAC), lung non-small cell lung cancer (NSCLC), lung small cell cancer (SCLC), lymphoma, male genital tract malignancy, malignant solitary fibrous tumor of the pleura (MSFT), melanoma, multiple myeloma, neuroendocrine tumor, nodal diffuse large B-cell lymphoma, non epithelial ovarian cancer (non-EOC), ovarian surface epithelial carcinoma, pancreatic adenocarcinoma, pituitary carcinomas, oligodendroglioma, prostatic adenocarcinoma, retroperitoneal or peritoneal carcinoma, retroperitoneal or peritoneal sarcoma, small intestinal malignancy, soft tissue tumor, thymic carcinoma, thyroid carcinoma, or uveal melanoma. The methods of the invention can be used to characterize these and other cancers. Thus, characterizing a phenotype can be providing a diagnosis, prognosis or theranosis of one of the cancers disclosed herein.

[0220] The phenotype can also be an inflammatory disease, immune disease, or autoimmune disease. For example, the disease may be inflammatory bowel disease (IBD), Crohn's disease (CD), ulcerative colitis (UC), pelvic inflammation, vasculitis, psoriasis, diabetes, autoimmune hepatitis, Multiple Sclerosis, Myasthenia Gravis, Type I diabetes, Rheumatoid Arthritis, Psoriasis, Systemic Lupus Erythematosis (SLE), Hashimoto's Thyroiditis, Grave's disease, Ankylosing Spondylitis Sjogrens Disease, CREST syndrome, Scleroderma, Rheumatic Disease, organ rejection, Primary Sclerosing Cholangitis, or sepsis.

[0221] The phenotype can also comprise a cardiovascular disease, such as atherosclerosis, congestive heart failure, vulnerable plaque, stroke, or ischemia. The cardiovascular disease or condition can be high blood pressure, stenosis, vessel occlusion or a thrombotic event.

[0222] The phenotype can also comprise a neurological disease, such as Multiple Sclerosis (MS), Parkinson's Disease (PD), Alzheimer's Disease (AD), schizophrenia, bipolar disorder, depression, autism, Prion Disease, Pick's disease, dementia, Huntington disease (HD), Down's syndrome, cerebrovascular disease, Rasmussen's encephalitis, viral meningitis, neurospsychiatric systemic lupus erythematosus (NPSLE), amyotrophic lateral sclerosis, Creutzfeldt-Jacob disease, Gerstmann-Straussler-Scheinker disease, transmissible spongiform encephalopathy, ischemic reperfusion damage (e.g. stroke), brain trauma, microbial infection, or chronic fatigue syndrome. The phenotype may also be a condition such as fibromyalgia, chronic neuropathic pain, or peripheral neuropathic pain.

[0223] The phenotype may also comprise an infectious disease, such as a bacterial, viral or yeast infection. For example, the disease or condition may be Whipple's Disease, Prion Disease, cirrhosis, methicillin-resistant staphylococcus aureus, HIV, hepatitis, syphilis, meningitis, malaria, tuberculosis, or influenza. Viral proteins, such as HIV or HCV-like particles can be assessed in a vesicle, to characterize a viral condition.

[0224] The phenotype can also comprise a perinatal or pregnancy related condition (e.g. preeclampsia or preterm birth), metabolic disease or condition, such as a metabolic disease or condition associated with iron metabolism. For example, hepcidin can be assayed in a vesicle to characterize an iron deficiency. The metabolic disease or condition can also be diabetes, inflammation, or a perinatal condition.

[0225] The compositions and methods of the invention can be used to characterize these and other diseases and disorders that can be assessed via biomarkers. Thus, characterizing a phenotype can be providing a diagnosis, prognosis or theranosis of one of the diseases and disorders disclosed herein.

### Subject

[0226] One or more phenotypes of a subject can be determined by analyzing one or more vesicles, such as vesicles, in a biological sample obtained from the subject. A subject or patient can include, but is not limited to, mammals such as bovine, avian, canine, equine, feline, ovine, porcine, or primate animals (including humans and non-human primates). A subject can also include a mammal of importance due to being endangered, such as a Siberian tiger; or economic importance, such as an animal raised on a farm for consumption by humans, or an animal of social importance to humans, such as an animal kept as a pet or in a zoo. Examples of such animals include, but are not limited to, carnivores such as cats and dogs; swine including pigs, hogs and wild boars; ruminants or ungulates such as cattle, oxen, sheep, giraffes, deer, goats, bison, camels or horses. Also included are birds that are endangered or kept in zoos, as well as fowl and more particularly domesticated fowl, i.e. poultry, such as turkeys and chickens, ducks, geese, guinea fowl. Also included are domesticated swine and horses (including race horses). In addition, any animal species connected to commercial activities are also included such as those animals connected to agriculture and aquaculture and other activities in which disease monitoring, diagnosis, and therapy selection are routine practice in husbandry for economic productivity and/or safety of the food chain.

[0227] The subject can have a pre-existing disease or condition, such as cancer. Alternatively, the subject may not have any known pre-existing condition. The subject may also be non-responsive to an existing or past treatment, such as a treatment for cancer.

### Samples

[0228] A sample used and/or assessed via the compositions and methods of the invention includes any relevant biological sample that can be used for biomarker assessment, including without limitation sections of tissues such as biopsy or tissue removed during surgical or other procedures, bodily fluids, autopsy samples, frozen sections taken for histological purposes, and cell cultures. Such samples include blood and blood fractions or products (e.g., serum, buffy coat, plasma, platelets, red blood cells, and the like), sputum, malignant effusion, cheek cells tissue, cultured cells (e.g., primary cultures, explants, and transformed cells), stool, urine, other biological or bodily fluids (e.g., prostatic fluid, gastric fluid, intestinal fluid, renal fluid, lung fluid, cerebrospinal fluid, and the like), etc. The sample can comprise biological material that is a fresh frozen & formalin fixed paraffin embedded (FFPE) block, formalin-fixed paraffin embedded, or is within an RNA preservative+formalin fixative. More than one sample of more than one type can be used for each patient.

[0229] The sample used in the methods described herein can be a formalin fixed paraffin embedded (FFPE) sample. The FFPE sample can be one or more of fixed tissue, unstained slides, bone marrow core or clot, core needle biopsy, malignant fluids and fine needle aspirate (FNA). In an embodiment, the fixed tissue comprises a tumor containing formalin fixed paraffin embedded (FFPE) block from a surgery or biopsy. In another embodiment, the unstained slides comprise unstained, charged, unbaked slides from a paraffin block. In another embodiment, bone marrow core or clot comprises a decalcified core. A formalin fixed core and/or clot can be paraffin-embedded. In still another embodiment, the core needle biopsy comprises 1, 2, 3, 4, 5, 6, 7, 8, 9, 10 or more, e.g., 3-4, paraffin embedded biopsy samples. An 18 gauge needle biopsy can be used. The malignant fluid can comprise a sufficient volume of fresh pleural/ascitic fluid to produce a 5×5×2 mm cell pellet. The fluid can be formalin fixed in a paraffin block. In an embodiment, the core needle biopsy comprises 1, 2, 3, 4, 5, 6, 7, 8, 9, 10 or more, e.g., 4-6, paraffin embedded aspirates.

[0230] A sample may be processed according to techniques understood by those in the art. A sample can be without limitation fresh, frozen or fixed cells or tissue. In some embodiments, a sample comprises formalin-fixed paraffin-embedded (FFPE) tissue, fresh tissue or fresh frozen (FF) tissue. A sample can comprise cultured cells, including primary or immortalized cell lines derived from a subject sample. A sample can also refer to an extract from a sample from a subject. For example, a sample can comprise DNA, RNA or protein extracted from a tissue or a bodily fluid. Many techniques and commercial kits are available for such purposes. The fresh sample from the individual can be treated with an agent to preserve RNA prior to further processing, e.g., cell lysis and extraction. Samples can include frozen samples collected for other purposes. Samples can be associated with relevant information such as age, gender, and clinical symptoms present in the subject; source of the sample; and methods of collection and storage of the sample. A sample is typically obtained from a subject.

[0231] A biopsy comprises the process of removing a tissue sample for diagnostic or prognostic evaluation, and to the tissue specimen itself. Any biopsy technique known in the art can be applied to the molecular profiling methods of the present invention. The biopsy technique applied can depend on the tissue type to be evaluated (e.g., colon, prostate, kidney, bladder, lymph node, liver, bone marrow, blood cell, lung, breast, etc.), the size and type of the tumor (e.g., solid or suspended, blood or ascites), among other factors. Representative biopsy techniques include, but are not limited to, excisional biopsy, incisional biopsy, needle biopsy, surgical biopsy, and bone marrow biopsy. An “excisional biopsy” refers to the removal of an entire tumor mass with a small margin of normal tissue surrounding it. An “incisional biopsy” refers to the removal of a wedge of tissue that includes a cross-sectional diameter of the tumor. Molecular profiling can use a “core-needle biopsy” of the tumor mass, or a “fine-needle aspiration biopsy” which generally obtains a suspension of cells from within the tumor mass. Biopsy techniques are discussed, for example, in Harrison's Principles of Internal Medicine, Kasper, et al., eds., 16th ed., 2005, Chapter 70, and throughout Part V.

[0232] Standard molecular biology techniques known in the art and not specifically described are generally followed as in Sambrook et al., Molecular Cloning: A Laboratory Manual, Cold Spring Harbor Laboratory Press, New York (1989), and as in Ausubel et al., Current Protocols in Molecular Biology, John Wiley and Sons, Baltimore, Md. (1989) and as in Perbal, A Practical Guide to Molecular Cloning, John Wiley & Sons, New York (1988), and as in Watson et al., Recombinant DNA, Scientific American Books, New York and in Birren et al (eds) Genome Analysis: A Laboratory Manual Series, Vols. 1-4 Cold Spring Harbor Laboratory Press, New York (1998) and methodology as set forth in U.S. Pat. Nos. 4,666,828; 4,683,202; 4,801,531; 5,192,659 and 5,272,057 and incorporated herein by reference. Polymerase chain reaction (PCR) can be carried out generally as in PCR Protocols: A Guide to Methods and Applications, Academic Press, San Diego, Calif. (1990).

[0233] The biological sample assessed using the compositions and methods of the invention can be any useful bodily or biological fluid, including but not limited to peripheral blood, sera, plasma, ascites, urine, cerebrospinal fluid (CSF), sputum, saliva, bone marrow, synovial fluid, aqueous humor, amniotic fluid, cerumen, breast milk, broncheoalveolar lavage fluid, semen (including prostatic fluid), Cowper's fluid or pre-ejaculatory fluid, female ejaculate, sweat, fecal matter, hair, tears, cyst fluid, pleural and peritoneal fluid, pericardial fluid, lymph, chyme, chyle, bile, interstitial fluid, menses, pus, sebum, vomit, vaginal secretions, mucosal secretion, stool water, pancreatic juice, lavage fluids from sinus cavities, bronchopulmonary aspirates or other lavage fluids, cells, cell culture, or a cell culture supernatant. A biological sample may also include the blastocyl cavity, umbilical cord blood, or maternal circulation which may be of fetal or maternal origin. The biological sample may also be a cell culture, tissue sample or biopsy from which vesicles and other circulating biomarkers may be obtained. For example, cells of interest can be cultured and vesicles isolated from the culture. In various embodiments, biomarkers or more particularly biosignatures disclosed herein can be assessed directly from such biological samples (e.g., identification of presence or levels of nucleic acid or polypeptide biomarkers or functional fragments thereof) using various methods, such as extraction of nucleic acid molecules from blood, plasma, serum or any of the foregoing biological samples, use of protein or antibody arrays to identify polypeptide (or functional fragment) biomarker(s), as well as other array, sequencing, PCR and proteomic techniques known in the art for identification and assessment of nucleic acid and polypeptide molecules. In addition, one or more components present in such samples can be first isolated or enriched and further processed to assess the presence or levels of selected biomarkers, to assess a given biosignature (e.g., isolated microvesicles prior to profiling for protein and/or nucleic acid biomarkers).

[0234] Table 1 presents a non-limiting listing of diseases, conditions, or biological states and corresponding biological samples that may be used for analysis according to the methods of the invention.

TABLE 1
Examples of Biological Samples for Various Diseases,
Conditions, or Biological States

| Illustrative Disease, Condition or Biological | |
|---|---|
| State | Illustrative Biological Samples |
| Cancers/neoplasms affecting the following tissue | Tumor, blood, serum, plasma, cerebrospinal fluid |
| types/bodily systems: breast, lung, ovarian, colon, | (CSF), urine, sputum, ascites, synovial fluid, |
| rectal, prostate, pancreatic, brain, bone, connective | semen, nipple aspirates, saliva, bronchoalveolar |
| tissue, glands, skin, lymph, nervous system, | lavage fluid, tears, oropharyngeal washes, feces, |
| endocrine, germ cell, genitourinary, | peritoneal fluids, pleural effusion, sweat, tears, |
| hematologic/blood, bone marrow, muscle, eye, | aqueous humor, pericardial fluid, lymph, chyme, |
| esophageal, fat tissue, thyroid, pituitary, spinal | chyle, bile, stool water, amniotic fluid, breast milk, |
| cord, bile duct, heart, gall bladder, bladder, testes, | pancreatic juice, cerumen, Cowper's fluid or pre- |
| cervical, endometrial, renal, ovarian, | ejaculatory fluid, female ejaculate, interstitial fluid, |
| digestive/gastrointestinal, stomach, head and neck, | menses, mucus, pus, sebum, vaginal lubrication, |
| liver, leukemia, respiratory/thorasic, cancers of | vomit |
| unknown primary (CUP) | |
| Neurodegenerative/neurological disorders: | Blood, serum, plasma, CSF, urine |
| Parkinson's disease, Alzheimer's Disease and | |
| multiple sclerosis, Schizophrenia, and bipolar | |
| disorder, spasticity disorders, epilepsy | |
| Cardiovascular Disease: atherosclerosis, | Blood, serum, plasma, CSF, urine |
| cardiomyopathy, endocarditis, vunerable plaques, | |
| infection | |
| Stroke: ischemic, intracerebral hemorrhage, | Blood, serum, plasma, CSF, urine |
| subarachnoid hemorrhage, transient ischemic | |
| attacks (TIA) | |
| Pain disorders: peripheral neuropathic pain and | Blood, serum, plasma, CSF, urine |
| chronic neuropathic pain, and fibromyalgia, | |
| Autoimmune disease: systemic and localized | Blood, serum, plasma, CSF, urine, synovial fluid |
| diseases, rheumatic disease, Lupus, Sjogren's | |
| syndrome | |
| Digestive system abnormalities: Barrett's | Blood, serum, plasma, CSF, urine |
| esophagus, irritable bowel syndrome, ulcerative | |
| colitis, Crohn's disease, Diverticulosis and | |
| Diverticulitis, Celiac Disease | |
| Endocrine disorders: diabetes mellitus, various | Blood, serum, plasma, CSF, urine |
| forms of Thyroiditis, adrenal disorders, pituitary | |
| disorders | |
| Diseases and disorders of the skin: psoriasis | Blood, serum, plasma, CSF, urine, synovial fluid, |
| | tears |
| Urological disorders: benign prostatic hypertrophy | Blood, serum, plasma, urine |
| (BPH), polycystic kidney disease, interstitial | |
| cystitis | |
| Hepatic disease/injury: Cirrhosis, induced | Blood, serum, plasma, urine |
| hepatotoxicity (due to exposure to natural or | |
| synthetic chemical sources) | |
| Kidney disease/injury: acute, sub-acute, chronic | Blood, serum, plasma, urine |
| conditions, Podocyte injury, focal segmental | |
| glomerulosclerosis | |
| Endometriosis | Blood, serum, plasma, urine, vaginal fluids |
| Osteoporosis | Blood, serum, plasma, urine, synovial fluid |
| Pancreatitis | Blood, serum, plasma, urine, pancreatic juice |
| Asthma | Blood, serum, plasma, urine, sputum, bronchiolar |
| | lavage fluid |
| Allergies | Blood, serum, plasma, urine, sputum, bronchiolar |
| | lavage fluid |
| Prion-related diseases | Blood, serum, plasma, CSF, urine |
| Viral Infections: HIV/AIDS | Blood, serum, plasma, urine |
| Sepsis | Blood, serum, plasma, urine, tears, nasal lavage |
| Organ rejection/transplantation | Blood, serum, plasma, urine, various lavage fluids |
| Differentiating conditions: adenoma versus | Blood, serum, plasma, urine, sputum, feces, colonic |
| hyperplastic polyp, irritable bowel syndrome (IBS) | lavage fluid |
| versus normal, classifying Dukes stages A, B, C, | |
| and/or D of colon cancer, adenoma with low-grade | |
| hyperplasia versus high-grade hyperplasia, | |
| adenoma versus normal, colorectal cancer versus | |
| normal, IBS versus. ulcerative colitis (UC) versus | |
| Crohn's disease (CD), | |
| Pregnancy related physiological states, conditions, | Maternal serum, plasma, amniotic fluid, cord blood |
| or affiliated diseases: genetic risk, adverse | |
| pregnancy outcomes | |

[0235] The methods of the invention can be used to characterize a phenotype using a blood sample or blood derivative. Blood derivatives include plasma and serum. Blood plasma is the liquid component of whole blood, and makes up approximately 55% of the total blood volume. It is composed primarily of water with small amounts of minerals, salts, ions, nutrients, and proteins in solution. In whole blood, red blood cells, leukocytes, and platelets are suspended within the plasma. Blood serum refers to blood plasma without fibrinogen or other clotting factors (i.e., whole blood minus both the cells and the clotting factors).

[0236] The biological sample may be obtained through a third party, such as a party not performing the analysis of the biomarkers, whether direct assessment of a biological sample or by profiling one or more vesicles obtained from the biological sample. For example, the sample may be obtained through a clinician, physician, or other health care manager of a subject from which the sample is derived. Alternatively, the biological sample may obtained by the same party analyzing the vesicle. In addition, biological samples be assayed, are archived (e.g., frozen) or otherwise stored in under preservative conditions.

[0237] Furthermore, a biological sample can comprise a vesicle or cell membrane fragment that is derived from a cell of origin and available extracellularly in a subject's biological fluid or extracellular milieu.

[0238] Methods of the invention can include assessing one or more vesicles, including assessing vesicle populations. A vesicle, as used herein, is a membrane vesicle that is shed from cells. Vesicles or membrane vesicles include without limitation: circulating microvesicles (cMVs), microvesicle, exosome, nanovesicle, dexosome, bleb, blebby, prostasome, microparticle, intralumenal vesicle, membrane fragment, intralumenal endosomal vesicle, endosomal-like vesicle, exocytosis vehicle, endosome vesicle, endosomal vesicle, apoptotic body, multivesicular body, secretory vesicle, phospholipid vesicle, liposomal vesicle, argosome, texasome, secresome, tolerosome, melanosome, oncosome, or exocytosed vehicle. Furthermore, although vesicles may be produced by different cellular processes, the methods of the invention are not limited to or reliant on any one mechanism, insofar as such vesicles are present in a biological sample and are capable of being characterized by the methods disclosed herein. Unless otherwise specified, methods that make use of a species of vesicle can be applied to other types of vesicles. Vesicles comprise spherical structures with a lipid bilayer similar to cell membranes which surrounds an inner compartment which can contain soluble components, sometimes referred to as the payload. In some embodiments, the methods of the invention make use of exosomes, which are small secreted vesicles of about 40-100 nm in diameter. For a review of membrane vesicles, including types and characterizations, see Thery et al., Nat Rev Immunol. 2009 August; 9(8):581-93. Some properties of different types of vesicles include those in Table 2:

TABLE 2
Vesicle Properties

| | | | | Membrane | Exosome- | Apoptotic |
|---|---|---|---|---|---|---|
| Feature | Exosomes | Microvesicles | Ectosomes | particles | like vesicles | vesicles |
| Size | 50-100 nm | 100-1,000 nm | 50-200 nm | 50-80 nm | 20-50 nm | 50-500 nm |
| Density in | 1.13-1.19 g/ml | | | 1.04-1.07 g/ml | 1.1 g/ml | 1.16-1.28 g/ml |
| sucrose | | | | | | |
| EM | Cup shape | Irregular | Bilamellar | Round | Irregular | Heterogeneous |
| appearance | | shape, | round | | shape | |
| | | electron | structures | | | |
| | | dense | | | | |
| Sedimentation | 100,000 g | 10,000 g | 160,000-200,000 g | 100,000-200,000 g | 175,000 g | 1,200 g, |
| | | | | | | 10,000 g, |
| | | | | | | 100,000 g |
| Lipid | Enriched in | Expose PPS | Enriched in | | No lipid | |
| composition | cholesterol, | | cholesterol | | rafts | |
| | sphingomyelin | | and | | | |
| | and ceramide; | | diacylglycerol; | | | |
| | contains lipid | | expose PPS | | | |
| | rafts; expose | | | | | |
| | PPS | | | | | |
| Major protein | Tetraspanins | Integrins, | CR1 and | CD133; no | TNFRI | Histones |
| markers | (e.g., CD63, | selectins and | proteolytic | CD63 | | |
| | CD9), Alix, | CD40 ligand | enzymes; no | | | |
| | TSG101 | | CD63 | | | |
| Intracellular | Internal | Plasma | Plasma | Plasma | | |
| origin | compartments | membrane | membrane | membrane | | |
| | (endosomes) | | | | | |

Abbreviations:
phosphatidylserine (PPS);
electron microscopy (EM)

[0239] Vesicles include shed membrane bound particles, or “microparticles,” that are derived from either the plasma membrane or an internal membrane. Vesicles can be released into the extracellular environment from cells. Cells releasing vesicles include without limitation cells that originate from, or are derived from, the ectoderm, endoderm, or mesoderm. The cells may have undergone genetic, environmental, and/or any other variations or alterations. For example, the cell can be tumor cells. A vesicle can reflect any changes in the source cell, and thereby reflect changes in the originating cells, e.g., cells having various genetic mutations. In one mechanism, a vesicle is generated intracellularly when a segment of the cell membrane spontaneously invaginates and is ultimately exocytosed (see for example, Keller et al., Immunol. Lett. 107 (2): 102-8 (2006)). Vesicles also include cell-derived structures bounded by a lipid bilayer membrane arising from both herniated evagination (blebbing) separation and sealing of portions of the plasma membrane or from the export of any intracellular membrane-bounded vesicular structure containing various membrane-associated proteins of tumor origin, including surface-bound molecules derived from the host circulation that bind selectively to the tumor-derived proteins together with molecules contained in the vesicle lumen, including but not limited to tumor-derived microRNAs or intracellular proteins. Blebs and blebbing are further described in Charras et al., Nature Reviews Molecular and Cell Biology, Vol. 9, No. 11, p. 730-736 (2008). A vesicle shed into circulation or bodily fluids from tumor cells may be referred to as a “circulating tumor-derived vesicle.” When such vesicle is an exosome, it may be referred to as a circulating-tumor derived exosome (CTE). In some instances, a vesicle can be derived from a specific cell of origin. CTE, as with a cell-of-origin specific vesicle, typically have one or more unique biomarkers that permit isolation of the CTE or cell-of-origin specific vesicle, e.g., from a bodily fluid and sometimes in a specific manner. For example, a cell or tissue specific markers are used to identify the cell of origin. Examples of such cell or tissue specific markers are disclosed herein and can further be accessed in the Tissue-specific Gene Expression and Regulation (TiGER) Database, available at bioinfo.wilmer.jhu.edu/tiger/; Liu et al. (2008) TiGER: a database for tissue-specific gene expression and regulation. BMC Bioinformatics. 9:271; TissueDistributionDBs, available at genome.dkfz-heidelberg.de/menu/tissue_db/index.html.

[0240] A vesicle can have a diameter of greater than about 10 nm, 20 nm, or 30 nm. A vesicle can have a diameter of greater than 40 nm, 50 nm, 100 nm, 200 nm, 500 nm, 1000 nm, 1500 nm, 2000 nm or greater than 10,000 nm. A vesicle can have a diameter of about 20-2000 nm, about 20-1500 nm, about 30-1000 nm, about 30-800 nm, about 30-200 nm, or about 30-100 nm. In some embodiments, the vesicle has a diameter of less than 10,000 nm, 2000 nm, 1500 nm, 1000 nm, 800 nm, 500 nm, 200 nm, 100 nm, 50 nm, 40 nm, 30 nm, 20 nm or less than 10 nm. As used herein the term “about” in reference to a numerical value means that variations of 10% above or below the numerical value are within the range ascribed to the specified value. Typical sizes for various types of vesicles are shown in Table 2. Vesicles can be assessed to measure the diameter of a single vesicle or any number of vesicles. For example, the range of diameters of a vesicle population or an average diameter of a vesicle population can be determined Vesicle diameter can be assessed using methods known in the art, e.g., imaging technologies such as electron microscopy. In an embodiment, a diameter of one or more vesicles is determined using optical particle detection. See, e.g., U.S. Pat. No. 7,751,053, entitled “Optical Detection and Analysis of Particles” and issued Jul. 6, 2010; and U.S. Pat. No. 7,399,600, entitled “Optical Detection and Analysis of Particles” and issued Jul. 15, 2010.

[0241] In some embodiments, the methods of the invention comprise assessing vesicles directly such as in a biological sample without prior isolation, purification, or concentration from the biological sample. For example, the amount of vesicles in the sample can by itself provide a biosignature that provides a diagnostic, prognostic or theranostic determination. Alternatively, the vesicle in the sample may be isolated, captured, purified, or concentrated from a sample prior to analysis. As noted, isolation, capture or purification as used herein comprises partial isolation, partial capture or partial purification apart from other components in the sample. Vesicle isolation can be performed using various techniques as described herein, e.g., chromatography, filtration, centrifugation, flow cytometry, affinity capture (e.g., to a planar surface or bead), and/or using microfluidics. FIGS. 13A-I and 16B-16C present an overview of a method of the invention for assessing microvesicles using an aptamer pool.

[0242] Vesicles such as exosomes can be assessed to provide a phenotypic characterization by comparing vesicle characteristics to a reference. In some embodiments, surface antigens on a vesicle are assessed. The surface antigens can provide an indication of the anatomical origin and/or cellular of the vesicles and other phenotypic information, e.g., tumor status. For example, wherein vesicles found in a patient sample, e.g., a bodily fluid such as blood, serum or plasma, are assessed for surface antigens indicative of colorectal origin and the presence of cancer. The surface antigens may comprise any informative biological entity that can be detected on the vesicle membrane surface, including without limitation surface proteins, lipids, carbohydrates, and other membrane components. For example, positive detection of colon derived vesicles expressing tumor antigens can indicate that the patient has colorectal cancer. As such, methods of the invention can be used to characterize any disease or condition associated with an anatomical or cellular origin, by assessing, for example, disease-specific and cell-specific biomarkers of one or more vesicles obtained from a subject.

[0243] In another embodiment, the methods of the invention comprise assessing one or more vesicle payload to provide a phenotypic characterization. The payload with a vesicle comprises any informative biological entity that can be detected as encapsulated within the vesicle, including without limitation proteins and nucleic acids, e.g., genomic or cDNA, mRNA, or functional fragments thereof, as well as microRNAs (miRs). In addition, methods of the invention are directed to detecting vesicle surface antigens (in addition or exclusive to vesicle payload) to provide a phenotypic characterization. For example, vesicles can be characterized by using binding agents (e.g., antibodies or aptamers) that are specific to vesicle surface antigens, and the bound vesicles can be further assessed to identify one or more payload components disclosed therein. As described herein, the levels of vesicles with surface antigens of interest or with payload of interest can be compared to a reference to characterize a phenotype. For example, overexpression in a sample of cancer-related surface antigens or vesicle payload, e.g., a tumor associated mRNA or microRNA, as compared to a reference, can indicate the presence of cancer in the sample. The biomarkers assessed can be present or absent, increased or reduced based on the selection of the desired target sample and comparison of the target sample to the desired reference sample. Non-limiting examples of target samples include: disease; treated/not-treated; different time points, such as a in a longitudinal study; and non-limiting examples of reference sample: non-disease; normal; different time points; and sensitive or resistant to candidate treatment(s).

### Microvesicle Isolation and Analysis

[0244] Sample Processing

[0245] A vesicle or a population of vesicles may be isolated, purified, concentrated or otherwise enriched prior to and/or during analysis. Unless otherwise specified, the terms “purified,” “isolated,” or similar as used herein in reference to vesicles or biomarker components are intended to include partial or complete purification or isolation of such components from a cell or organism. Analysis of a vesicle can include quantitiating the amount one or more vesicle populations of a biological sample. For example, a heterogeneous population of vesicles can be quantitated, or a homogeneous population of vesicles, such as a population of vesicles with a particular biomarker profile, a particular biosignature, or derived from a particular cell type can be isolated from a heterogeneous population of vesicles and quantitated. Analysis of a vesicle can also include detecting, quantitatively or qualitatively, one or more particular biomarker profile or biosignature of a vesicle, as described herein.

[0246] A vesicle can be stored and archived, such as in a bio-fluid bank and retrieved for analysis as desired. A vesicle may also be isolated from a biological sample that has been previously harvested and stored from a living or deceased subject. In addition, a vesicle may be isolated from a biological sample which has been collected as described in King et al., Breast Cancer Res 7(5): 198-204 (2005). A vesicle can be isolated from an archived or stored sample. Alternatively, a vesicle may be isolated from a biological sample and analyzed without storing or archiving of the sample. Furthermore, a third party may obtain or store the biological sample, or obtain or store the vesicle for analysis.

[0247] An enriched population of vesicles can be obtained from a biological sample. For example, vesicles may be concentrated or isolated from a biological sample using size exclusion chromatography, density gradient centrifugation, differential centrifugation, nanomembrane ultrafiltration, immunoabsorbent capture, affinity purification, microfluidic separation, or combinations thereof.

[0248] Size exclusion chromatography, such as gel permeation columns, centrifugation or density gradient centrifugation, and filtration methods can be used. For example, a vesicle can be isolated by differential centrifugation, anion exchange and/or gel permeation chromatography (for example, as described in U.S. Pat. Nos. 6,899,863 and 6,812,023), sucrose density gradients, organelle electrophoresis (for example, as described in U.S. Pat. No. 7,198,923), magnetic activated cell sorting (MACS), or with a nanomembrane ultrafiltration concentrator. Various combinations of isolation or concentration methods can be used.

[0249] Highly abundant proteins, such as albumin and immunoglobulin in blood samples, may hinder isolation of vesicles from a biological sample. For example, a vesicle can be isolated from a biological sample using a system that uses multiple antibodies that are specific to the most abundant proteins found in a biological sample, such as blood. Such a system can remove up to several proteins at once, thus unveiling the lower abundance species such as cell-of-origin specific vesicles. This type of system can be used for isolation of vesicles from biological samples such as blood, cerebrospinal fluid or urine. The isolation of vesicles from a biological sample may also be enhanced by high abundant protein removal methods as described in Chromy et al. J Proteome Res 2004; 3:1120-1127. In another embodiment, the isolation of vesicles from a biological sample may also be enhanced by removing serum proteins using glycopeptide capture as described in Zhang et al, Mol Cell Proteomics 2005; 4:144-155. In addition, vesicles from a biological sample such as urine may be isolated by differential centrifugation followed by contact with antibodies directed to cytoplasmic or anti-cytoplasmic epitopes as described in Pisitkun et al., Proc Natl Acad Sci USA, 2004; 101:13368-13373.

[0250] Plasma contains a large variety of proteins including albumin, immunoglobulins, and clotting proteins such as fibrinogen. About 60% of plasma protein comprises the protein albumin (e.g., human serum albumin or HSA), which contributes to osmotic pressure of plasma to assist in the transport of lipids and steroid hormones. Globulins make up about 35% of plasma proteins and are used in the transport of ions, hormones and lipids assisting in immune function. About 4% of plasma protein comprises fibrinogen which is essential in the clotting of blood and can be converted into the insoluble protein fibrin. Other types of blood proteins include: Prealbumin, Alpha 1 antitrypsin, Alpha 1 acid glycoprotein, Alpha 1 fetoprotein, Haptoglobin, Alpha 2 macroglobulin, Ceruloplasmin, Transferrin, complement proteins C3 and C4, Beta 2 microglobulin, Beta lipoprotein, Gamma globulin proteins, C-reactive protein (CRP), Lipoproteins (chylomicrons, VLDL, LDL, HDL), other globulins (types alpha, beta and gamma), Prothrombin and Mannose-binding lectin (MBL). Any of these proteins, including classes of proteins, or derivatives thereof (such as fibrin which is derived from the cleavage of fibrinogen) can be selectively depleted from a biological sample prior to further analysis performed on the sample. Without being bound by theory, removal of such background proteins may facilitate more sensitive, accurate, or precise detection of the biomarkers of interest in the sample.

[0251] Abundant proteins in blood or blood derivatives (e.g., plasma or serum) include without limitation albumin, IgG, transferrin, fibrinogen, IgA, α₂-Macroglobulin, IgM, α₁-Antitrypsin, complement C3, haptoglobulin, apolipoprotein A1, apolipoprotein A3, apolipoprotein B, α₁-Acid Glycoprotein, ceruloplasmin, complement C4, C1q, IgD, prealbumin (transthyretin), and plasminogen. Such proteins can be depleted using commercially available columns and kits. Examples of such columns comprise the Multiple Affinity Removal System from Agilent Technologies (Santa Clara, Calif.). This system include various cartridges designed to deplete different protein profiles, including the following cartridges with performance characteristics according to the manufacturer: Human 14, which eliminates approximately 94% of total protein (albumin, IgG, antitrypsin, IgA, transferrin, haptoglobin, fibrinogen, alpha2-macroglobulin, alpha1-acid glycoprotein (orosomucoid), IgM, apolipoprotein AI, apolipoprotein AII, complement C3 and transthyretin); Human 7, which eliminates approximately 85-90% of total protein (albumin, IgG, IgA, transferrin, haptoglobin, antitrypsin, and fibrinogen); Human 6, which eliminates approximately 85-90% of total protein (albumin, IgG, IgA, transferrin, haptoglobin, and antitrypsin); Human Albumin/IgG, which eliminates approximately 69% of total protein (albumin and IgG); and Human Albumin, which eliminates approximately 50-55% of total protein (albumin). The ProteoPrep® 20 Plasma Immunodepletion Kit from Sigma-Aldrich is intended to specifically remove the 20 most abundant proteins from human plasma or serum, which is about remove 97-98% of the total protein mass in plasma or serum (Sigma-Aldrich, St. Louis, Mo.). According to the manufacturer, the ProteoPrep® 20 removes: albumin, IgG, transferrin, fibrinogen, IgA, α₂-Macroglobulin, IgM, α₁-Antitrypsin, complement C3, haptoglobulin, apolipoprotein A1, A3 and B; α₁-Acid Glycoprotein, ceruloplasmin, complement C4, C1q; IgD, prealbumin, and plasminogen. Sigma-Aldrich also manufactures ProteoPrep® columns to remove albumin (HSA) and immunoglobulins (IgG). The ProteomeLab IgY-12 High Capacity Proteome Partitioning kits from Beckman Coulter (Fullerton, Calif.) are specifically designed to remove twelve highly abundant proteins (Albumin, IgG, Transferrin, Fibrinogen, IgA, α2-macroglobulin, IgM, α1-Antitrypsin, Haptoglobin, Orosomucoid, Apolipoprotein A-I, Apolipoprotein A-II) from the human biological fluids such as serum and plasma. Generally, such systems rely on immunodepletion to remove the target proteins, e.g., using small ligands and/or full antibodies. The PureProteome™ Human Albumin/Immunoglobulin Depletion Kit from Millipore (EMD Millipore Corporation, Billerica, Mass., USA) is a magnetic bead based kit that enables high depletion efficiency (typically >99%) of Albumin and all Immunoglobulins (i.e., IgG, IgA, IgM, IgE and IgD) from human serum or plasma samples. The ProteoExtract® Albumin/IgG Removal Kit, also from Millipore, is designed to deplete >80% of albumin and IgG from body fluid samples. Other similar protein depletion products include without limitation the following: Aurum™ Affi-Gels Blue mini kit (Bio-Rad, Hercules, Calif., USA); Vivapure® anti-HSA/IgG kit (Sartorius Stedim Biotech, Goettingen, Germany), Qproteome albumin/IgG depletion kit (Qiagen, Hilden, Germany); Seppro® MIXED12-LC20 column (GenWay Biotech, San Diego, Calif., USA); Abundant Serum Protein Depletion Kit (Norgen Biotek Corp., Ontario, Canada); GBC Human Albumin/IgG/Transferrin 3 in 1 Depletion Column/Kit (Good Biotech Corp., Taiwan). These systems and similar systems can be used to remove abundant proteins from a biological sample, thereby improving the ability to detect low abundance circulating biomarkers such as proteins and vesicles.

[0252] Thromboplastin is a plasma protein aiding blood coagulation through conversion of prothrombin to thrombin. Thrombin in turn acts as a serine protease that converts soluble fibrinogen into insoluble strands of fibrin, as well as catalyzing many other coagulation-related reactions. Thus, thromboplastin is a protein that can be used to facilitate precipitation of fibrinogen/fibrin (blood clotting factors) out of plasma. In addition to or as an alternative to immunoaffinity protein removal, a blood sample can be treated with thromboplastin to deplete fibrinogen/fibrin. Thromboplastin removal can be performed in addition to or as an alternative to immunoaffinity protein removal as described above using methods known in the art. Precipitation of other proteins and/or other sample particulate can also improve detection of circulating biomarkers such as vesicles in a sample. For example, ammonium sulfate treatment as known in the art can be used to precipitate immunoglobulins and other highly abundant proteins.

[0253] In an embodiment, the invention provides a method of detecting a presence or level of one or more circulating biomarker such as a microvesicle in a biological sample, comprising: (a) providing a biological sample comprising or suspected to comprise the one or more circulating biomarker; (b) selectively depleting one or more abundant protein from the biological sample provided in step (a); (c) performing affinity selection of the one or more circulating biomarker from the sample depleted in step (b), thereby detecting the presence or level of one or more circulating biomarker. The biological sample may comprise a bodily fluid, e.g., peripheral blood, sera, plasma, ascites, urine, cerebrospinal fluid (CSF), sputum, saliva, bone marrow, synovial fluid, aqueous humor, amniotic fluid, cerumen, breast milk, broncheoalveolar lavage fluid, semen, prostatic fluid, cowper's fluid or pre-ejaculatory fluid, female ejaculate, sweat, fecal matter, hair, tears, cyst fluid, pleural and peritoneal fluid, pericardial fluid, lymph, chyme, chyle, bile, interstitial fluid, menses, pus, sebum, vomit, vaginal secretions, mucosal secretion, stool water, pancreatic juice, lavage fluids from sinus cavities, bronchopulmonary aspirates, blastocyl cavity fluid, umbilical cord blood, or a derivative of any thereof. In some embodiments, the biological sample comprises peripheral blood, serum or plasma. Illustrative protocols and results from selectively depleting one or more abundant protein from blood plasma prior to vesicle detection can be found in Example 40 of International Patent Publication No. WO/2014/082083, filed Nov. 26, 2013, which patent publication is incorporated by reference herein in its entirety.

[0254] An abundant protein may comprise a protein in the sample that is present in the sample at a high enough concentration to potentially interfere with downstream processing or analysis. Typically, an abundant protein is not the target of any further analysis of the sample. The abundant protein may constitute at least 10⁻⁵, 10⁻⁴, 10⁻³, 0.01, 0.02, 0.03, 0.04, 0.05, 0.06, 0.07, 0.08, 0.09, 0.1, 0.2, 0.3, 0.4, 0.5, 0.6, 0.7, 0.8, 0.9, 1, 2, 3, 4, 5, 6, 7, 8, 9, 10, 11, 12, 13, 14, 15, 20, 25, 30, 35, 40, 45, 50, 55, 60, 65, 70, 75, 80, 85, 90, 95, 96, 97, 98 or at least 99% of the total protein mass in the sample. In some embodiments, the abundant protein is present at less than 10⁻⁵% of the total protein mass in the sample, e.g., in the case of a rare target of interest. As described herein, in the case of blood or a derivative thereof, the one or more abundant protein may comprise one or more of albumin, IgG, transferrin, fibrinogen, fibrin, IgA, α2-Marcroglobulin, IgM, α1-Antitrypsin, complement C3, haptoglobulin, apolipoprotein A1, A3 and B; α1-Acid Glycoprotein, ceruloplasmin, complement C4, C1q, IgD, prealbumin (transthyretin), plasminogen, a derivative of any thereof, and a combination thereof. The one or more abundant protein in blood or a blood derivative may also comprise one or more of Albumin, Immunoglobulins, Fibrinogen, Prealbumin, Alpha 1 antitrypsin, Alpha 1 acid glycoprotein, Alpha 1 fetoprotein, Haptoglobin, Alpha 2 macroglobulin, Ceruloplasmin, Transferrin, complement proteins C3 and C4, Beta 2 microglobulin, Beta lipoprotein, Gamma globulin proteins, C-reactive protein (CRP), Lipoproteins (chylomicrons, VLDL, LDL, HDL), other globulins (types alpha, beta and gamma), Prothrombin, Mannose-binding lectin (MBL), a derivative of any thereof, and a combination thereof.

[0255] In some embodiments, selectively depleting the one or more abundant protein comprises contacting the biological sample with thromboplastin to initiate precipitation of fibrin. The one or more abundant protein may also be depleted by immunoaffinity, precipitation, or a combination thereof. For example, the sample can be treated with thromboplastin to precipitate fibrin, and then the sample may be passed through a column to remove HSA, IgG, and other abundant proteins as desired.

[0256] “Selectively depleting” the one or more abundant protein comprises depleting the abundant protein from the sample at a higher percentage than depletion another entity in the sample, such as another protein or microvesicle, including a target of interest for downstream processing or analysis. Selectively depleting the one or more abundant protein may comprise depleting the abundant protein at a 1.1-fold, 1.2-fold, 1.3-fold, 1.4-fold, 1.5-fold, 1.6-fold, 1.7-fold, 1.8-fold, 1.9-fold, 2-fold, 3-fold, 4-fold, 5-fold, 6-fold, 7-fold, 8-fold, 9-fold, 10-fold, 11-fold, 12-fold, 13-fold, 14-fold, 15-fold, 16-fold, 17-fold, 18-fold, 19-fold, 20-fold, 25-fold, 30-fold, 40-fold, 50-fold, 60-fold, 70-fold, 80-fold, 90-fold, 100-fold, 200-fold, 300-fold, 400-fold, 500-fold, 600-fold, 700-fold, 800-fold, 900-fold, 1000-fold, 10⁴-fold, 10⁵-fold, 10⁶-fold, 10⁷-fold, 10⁸-fold, 10⁹-fold, 10¹⁰-fold, 10¹¹-fold, 10¹²-fold, 10¹³-fold, 10¹⁴-fold, 10¹⁵-fold, 10¹⁶-fold, 10¹⁷-fold, 10¹⁸-fold, 10¹⁹-fold, 10²⁰-fold, or higher rate than another entity in the sample, such as another protein or microvesicle, including a target of interest for downstream processing or analysis. In an embodiment, there is little to no observable depletion of the target of interest as compared to the depletion of the abundant protein. In some embodiments, selectively depleting the one or more abundant protein from the biological sample comprises depleting at least 25%, 30%, 35%, 40%, 45%, 50%, 55%, 60%, 65%, 70%, 75%, 80%, 85%, 90%, 91%, 92%, 93%, 94%, 95%, 96%, 97%, 98%, 99% or 100% of the one or more abundant protein.

[0257] Removal of highly abundant proteins and other non-desired entities can further be facilitated with a non-stringent size exclusion step. For example, the sample can be processed using a high molecular weight cutoff size exclusion step to preferentially enrich high molecular weight vesicles apart from lower molecular weight proteins and other entities. In some embodiments, a sample is processed with a column (e.g., a gel filtration column) or filter having a molecular weight cutoff (MWCO) of 500, 600, 700, 800, 900, 1000, 1500, 2000, 2500, 3000, 3500, 4000, 4500, 5000, 5500, 6000, 6500, 7000, 7500, 8000, 8500, 9000, 9500, 10000, or greater than 10000 kiloDaltons (kDa). In an embodiment, a 700 kDa filtration column is used. In such a step, the vesicles will be retained or flow more slowly than the column or filter than the lower molecular weight entities. Such columns and filters are known in the art.

[0258] Isolation or enrichment of a vesicle from a biological sample can also be enhanced by use of sonication (for example, by applying ultrasound), detergents, other membrane-activating agents, or any combination thereof. For example, ultrasonic energy can be applied to a potential tumor site, and without being bound by theory, release of vesicles from a tissue can be increased, allowing an enriched population of vesicles that can be analyzed or assessed from a biological sample using one or more methods disclosed herein.

[0259] With methods of detecting circulating biomarkers as described here, e.g., antibody affinity isolation, the consistency of the results can be optimized as desired using various concentration or isolation procedures. Such steps can include agitation such as shaking or vortexing, different isolation techniques such as polymer based isolation, e.g., with PEG, and concentration to different levels during filtration or other steps. It will be understood by those in the art that such treatments can be applied at various stages of testing the vesicle containing sample. In one embodiment, the sample itself, e.g., a bodily fluid such as plasma or serum, is vortexed. In some embodiments, the sample is vortexed after one or more sample treatment step, e.g., vesicle isolation, has occurred. Agitation can occur at some or all appropriate sample treatment steps as desired. Additives can be introduced at the various steps to improve the process, e.g., to control aggregation or degradation of the biomarkers of interest.

[0260] The results can also be optimized as desirable by treating the sample with various agents. Such agents include additives to control aggregation and/or additives to adjust pH or ionic strength. Additives that control aggregation include blocking agents such as bovine serum albumin (BSA), milk or StabilGuard® (a BSA-free blocking agent; Product code SG02, Surmodics, Eden Prairie, Minn.), chaotropic agents such as guanidium hydro chloride, and detergents or surfactants. Useful ionic detergents include sodium dodecyl sulfate (SDS, sodium lauryl sulfate (SLS)), sodium laureth sulfate (SLS, sodium lauryl ether sulfate (SLES)), ammonium lauryl sulfate (ALS), cetrimonium bromide, cetrimonium chloride, cetrimonium stearate, and the like. Useful non-ionic (zwitterionic) detergents include polyoxyethylene glycols, polysorbate 20 (also known as Tween 20), other polysorbates (e.g., 40, 60, 65, 80, etc), Triton-X (e.g., X100, X114), 3-[(3-cholamidopropyl)dimethylammonio]-1-propanesulfonate (CHAPS), CHAPSO, deoxycholic acid, sodium deoxycholate, NP-40, glycosides, octyl-thio-glucosides, maltosides, and the like. In some embodiments, Pluronic F-68, a surfactant shown to reduce platelet aggregation, is used to treat samples containing vesicles during isolation and/or detection. F68 can be used from a 0.1% to 10% concentration, e.g., a 1%, 2.5% or 5% concentration. The pH and/or ionic strength of the solution can be adjusted with various acids, bases, buffers or salts, including without limitation sodium chloride (NaCl), phosphate-buffered saline (PBS), tris-buffered saline (TBS), sodium phosphate, potassium chloride, potassium phosphate, sodium citrate and saline-sodium citrate (SSC) buffer. In some embodiments, NaCl is added at a concentration of 0.1% to 10%, e.g., 1%, 2.5% or 5% final concentration. In some embodiments, Tween 20 is added to 0.005 to 2% concentration, e.g., 0.05%, 0.25% or 0.5% final concentration. Blocking agents for use with the invention comprise inert proteins, e.g., milk proteins, non-fat dry milk protein, albumin, BSA, casein, or serum such as newborn calf serum (NBCS), goat serum, rabbit serum or salmon serum. The proteins can be added at a 0.1% to 10% concentration, e.g., 1%, 2%, 3%, 3.5%, 4%, 5%, 6%, 7%, 8%, 9% or 10% concentration. In some embodiments, BSA is added to 0.1% to 10% concentration, e.g., 1%, 2%, 3%, 3.5%, 4%, 5%, 6%, 7%, 8%, 9% or 10% concentration. In an embodiment, the sample is treated according to the methodology presented in U.S. patent application Ser. No. 11/632,946, filed Jul. 13, 2005, which application is incorporated herein by reference in its entirety. Commercially available blockers may be used, such as SuperBlock, StartingBlock, Protein-Free from Pierce (a division of Thermo Fisher Scientific, Rockford, Ill.). In some embodiments, SSC/detergent (e.g., 20×SSC with 0.5% Tween 20 or 0.1% Triton-X 100) is added to 0.1% to 10% concentration, e.g., at 1.0% or 5.0% concentration.

[0261] The methods of detecting vesicles and other circulating biomarkers can be optimized as desired with various combinations of protocols and treatments as described herein. A detection protocol can be optimized by various combinations of agitation, isolation methods, and additives. In some embodiments, the patient sample is vortexed before and after isolation steps, and the sample is treated with blocking agents including BSA and/or F68. Such treatments may reduce the formation of large aggregates or protein or other biological debris and thus provide a more consistent detection reading.

[0262] Filtration and Ultrafiltration

[0263] A vesicle can be isolated from a biological sample by filtering a biological sample from a subject through a filtration module and collecting from the filtration module a retentate comprising the vesicle, thereby isolating the vesicle from the biological sample. The method can comprise filtering a biological sample from a subject through a filtration module comprising a filter (also referred to herein as a selection membrane); and collecting from the filtration module a retentate comprising the vesicle, thereby isolating the vesicle from the biological sample. For example, in one embodiment, the filter retains molecules greater than about 100 kiloDaltons. In such cases, microvesicles are generally found within the retentate of the filtration process whereas smaller entities such as proteins, protein complexes, nucleic acids, etc, pass through into the filtrate.

[0264] The method can be used when determining a biosignature of one or more microvesicle. The method can also further comprise contacting the retentate from the filtration to a plurality of substrates, wherein each substrate is coupled to one or more capture agents, and each subset of the plurality of substrates comprises a different capture agent or combination of capture agents than another subset of the plurality of substrates.

[0265] Also provided herein is a method of determining a biosignature of a vesicle in a sample comprising: filtering a biological sample from a subject with a disorder through a filtration module, collecting from the filtration module a retentate comprising one or more vesicles, and determining a biosignature of the one or more vesicles. In one embodiment, the filtration module comprises a filter that retains molecules greater than about 100 or 150 kiloDaltons.

[0266] The method disclosed herein can further comprise characterizing a phenotype in a subject by filtering a biological sample from a subject through a filtration module, collecting from the filtration module a retentate comprising one or more vesicles; detecting a biosignature of the one or more vesicles; and characterizing a phenotype in the subject based on the biosignature, wherein characterizing is with at least 70% sensitivity. In some embodiments, characterizing comprises determining an amount of one or more vesicle having the biosignature. Furthermore, the characterizing can be from about 80% to 100% sensitivity.

[0267] Also provided herein is a method for multiplex analysis of a plurality of vesicles. In some embodiments, the method comprises filtering a biological sample from a subject through a filtration module; collecting from the filtration module a retentate comprising the plurality of vesicles, applying the plurality of vesicles to a plurality of capture agents, wherein the plurality of capture agents is coupled to a plurality of substrates, and each subset of the plurality of substrates is differentially labeled from another subset of the plurality of substrates; capturing at least a subset of the plurality of vesicles; and determining a biosignature for at least a subset of the captured vesicles. In one embodiment, each substrate is coupled to one or more capture agents, and each subset of the plurality of substrates comprises a different capture agent or combination of capture agents as compared to another subset of the plurality of substrates. In some embodiments, at least a subset of the plurality of substrates is intrinsically labeled, such as comprising one or more labels. The substrate can be a particle or bead, or any combination thereof. In some embodiments, the filter retains molecules greater than 1, 2, 3, 4, 5, 6, 7, 8, 9, 10, 15, 20, 25, 30, 40, 50, 60, 70, 80, 90, 100, 110, 120, 130, 140, 150, 160, 170, 180, 190, 200, 250, 300, 400, 500, 600, 700, 800, 900, 1000, 1500, 2000, 2500, 3000, 3500, 4000, 4500, 5000, 5500, 6000, 6500, 7000, 7500, 8000, 8500, 9000, 9500, 10000, or greater than 10000 kiloDaltons (kDa). In one embodiment, the filtration module comprises a filter that retains molecules greater than about 100 or 150 kiloDaltons. In one embodiment, the filtration module comprises a filter that retains molecules greater than about 9, 20, 100 or 150 kiloDaltons. In still another embodiment, the filtration module comprises a filter that retains molecules greater than about 7000 kDa.

[0268] In some embodiments, the method for multiplex analysis of a plurality of vesicles comprises filtering a biological sample from a subject through a filtration module, wherein the filtration module comprises a filter that retains molecules greater than about 100 kiloDaltons; collecting from the filtration module a retentate comprising the plurality of vesicles; applying the plurality of vesicles to a plurality of capture agents, wherein the plurality of capture agents is coupled to a microarray; capturing at least a subset of the plurality of vesicles on the microarray; and determining a biosignature for at least a subset of the captured vesicles. In some embodiments, the filter retains molecules greater than 1, 2, 3, 4, 5, 6, 7, 8, 9, 10, 15, 20, 25, 30, 40, 50, 60, 70, 80, 90, 100, 110, 120, 130, 140, 150, 160, 170, 180, 190, 200, 250, 300, 400, 500, 600, 700, 800, 900, 1000, 1500, 2000, 2500, 3000, 3500, 4000, 4500, 5000, 5500, 6000, 6500, 7000, 7500, 8000, 8500, 9000, 9500, 10000, or greater than 10000 kiloDaltons (kDa). In one embodiment, the filtration module comprises a filter that retains molecules greater than about 100 or 150 kiloDaltons. In one embodiment, the filtration module comprises a filter that retains molecules greater than about 9, 20, 100 or 150 kiloDaltons. In still another embodiment, the filtration module comprises a filter that retains molecules greater than about 7000 kDa.

[0269] The biological sample can be clarified prior to isolation by filtration. Clarification comprises selective removal of cellular debris and other undesirable materials. For example, cellular debris and other components that may interfere with detection of the circulating biomarkers can be removed. The clarification can be by low-speed centrifugation, such as at about 5,000×g, 4,000×g, 3,000×g, 2,000×g, 1,000×g, or less. The supernatant, or clarified biological sample, containing the vesicle can then be collected and filtered to isolate the vesicle from the clarified biological sample. In some embodiments, the biological sample is not clarified prior to isolation of a vesicle by filtration.

[0270] In some embodiments, isolation of a vesicle from a sample does not use high-speed centrifugation, such as ultracentrifugation. For example, isolation may not require the use of centrifugal speeds, such as about 100,000×g or more. In some embodiments, isolation of a vesicle from a sample uses speeds of less than 50,000×g, 40,000×g, 30,000×g, 20,000×g, 15,000×g, 12,000×g, or 10,000×g.

[0271] Any number of applicable filter configurations can be used to filter a sample of interest. In some embodiments, the filtration module used to isolate the circulating biomarkers from the biological sample is a fiber-based filtration cartridge. For example, the fiber can be a hollow polymeric fiber, such as a polypropylene hollow fiber. A biological sample can be introduced into the filtration module by pumping the sample fluid, such as a biological fluid as disclosed herein, into the module with a pump device, such as a peristaltic pump. The pump flow rate can vary, such as at about 0.25, 0.5, 1, 1.5, 2, 2.5, 3, 3.5, 4, 4.5, 5, 6, 7, 8, 9, or 10 mL/minute. The flow rate can be adjusted given the configuration, e.g., size and throughput, of the filtration module.

[0272] The filtration module can be a membrane filtration module. For example, the membrane filtration module can comprise a filter disc membrane, such as a hydrophilic polyvinylidene difluoride (PVDF) filter disc membrane housed in a stirred cell apparatus (e.g., comprising a magnetic stirrer). In some embodiments, the sample moves through the filter as a result of a pressure gradient established on either side of the filter membrane.

[0273] The filter can comprise a material having low hydrophobic absorptivity and/or high hydrophilic properties. For example, the filter can have an average pore size for vesicle retention and permeation of most proteins as well as a surface that is hydrophilic, thereby limiting protein adsorption. For example, the filter can comprise a material selected from the group consisting of polypropylene, PVDF, polyethylene, polyfluoroethylene, cellulose, secondary cellulose acetate, polyvinylalcohol, and ethylenevinyl alcohol (EVAL®, Kuraray Co., Okayama, Japan). Additional materials that can be used in a filter include, but are not limited to, polysulfone and polyethersulfone.

[0274] The filtration module can have a filter that retains molecules greater than about 1, 2, 3, 4, 5, 6, 7, 8, 9, 10, 15, 20, 25, 30, 40, 50, 60, 70, 80, 90, 100, 110, 120, 130, 140, 150, 160, 170, 180, 190, 200, 250, 300, 400, 500, 600, 700, 800, or 900 kiloDaltons (kDa), such as a filter that has a MWCO (molecular weight cut off) of about 1, 2, 3, 4, 5, 6, 7, 8, 9, 10, 15, 20, 25, 30, 40, 50, 60, 70, 80, 90, 100, 110, 120, 130, 140, 150, 160, 170, 180, 190, 200, 250, 300, 400, 500, 600, 700, 800, or 900 kDa, respectively. In embodiments, the filtration module has a MWCO of 1000 kDa, 1500 kDa, 2000 kDa, 2500 kDa, 3000 kDa, 3500 kDa, 4000 kDa, 4500 kDa, 5000 kDa, 5500 kDa, 6000 kDa, 6500 kDa, 7000 kDa, 7500 kDa, 8000 kDa, 8500 kDa, 9000 kDa, 9500 kDa, 10000 kDa, or greater than 10000 kDa. Ultrafiltration membranes with a range of MWCO of 9 kDa, 20 kDa and/or 150 kDa can be used. In some embodiments, the filter within the filtration module has an average pore diameter of about 0.01 μm to about 0.15 μm, and in some embodiments from about 0.05 μm to about 0.12 μm. In some embodiments, the filter has an average pore diameter of about 0.06 μm, 0.07 μm, 0.08 μm, 0.09 μm, 0.1 μm, 0.11 μm or 0.2 μm.

[0275] The filtration module can be a commerically available column, such as a column typically used for concentrating proteins or for isolating proteins (e.g., ultrafiltration). Examples include, but are not limited to, columns from Millpore (Billerica, Mass.), such as Amicon® centrifugal filters, or from Pierce® (Rockford, Ill.), such as Pierce Concentrator filter devices. Useful columns from Pierce include disposable ultrafiltration centrifugal devices with a MWCO of 9 kDa, 20 kDa and/or 150 kDa. These concentrators consist of a high-performance regenerated cellulose membrane welded to a conical device. The filters can be as described in U.S. Pat. No. 6,269,957 or 6,357,601, both of which applications are incorporated by reference in their entirety herein.

[0276] The retentate comprising the isolated vesicle can be collected from the filtration module. The retentate can be collected by flushing the retentate from the filter. Selection of a filter composition having hydrophilic surface properties, thereby limiting protein adsorption, can be used, without being bound by theory, for easier collection of the retentate and minimize use of harsh or time-consuming collection techniques.

[0277] The collected retentate can then be used subsequent analysis, such as assessing a biosignature of one or more vesicles in the retentate, as further described herein. The analysis can be directly performed on the collected retentate. Alternatively, the collected retentate can be further concentrated or purified, prior to analysis of one or more vesicles. For example, the retentate can be further concentrated or vesicles further isolated from the retentate using size exclusion chromatography, density gradient centrifugation, differential centrifugation, immunoabsorbent capture, affinity purification, microfluidic separation, or combinations thereof, such as described herein. In some embodiments, the retentate can undergo another step of filtration. Alternatively, prior to isolation of a vesicle using a filter, the vesicle is concentrated or isolated using techniques including without limitation size exclusion chromatography, density gradient centrifugation, differential centrifugation, immunoabsorbent capture, affinity purification, microfluidic separation, or combinations thereof.

[0278] Combinations of filters can be used for concentrating and isolating biomarkers. For example, the biological sample may first be filtered through a filter having a porosity or pore size of between about 0.01 μm to about 10 μm, e.g., 0.01 μm to about 2 μm or about 0.05 μm to about 1.5 μm, and then the sample is filtered. For example, prior to filtering a biological sample through a filtration module with a filter that retains molecules greater than about 1, 2, 3, 4, 5, 6, 7, 8, 9, 10, 15, 20, 25, 30, 40, 50, 60, 70, 80, 90, 100, 110, 120, 130, 140, 150, 160, 170, 180, 190, 200, 250, 300, 400, 500, 600, 700, 800, 900, 1000, 1500, 2000, 2500, 3000, 3500, 4000, 4500, 5000, 5500, 6000, 6500, 7000, 7500, 8000, 8500, 9000, 9500, 10000, or greater than 10000 kiloDaltons (kDa), such as a filter that has a MWCO (molecular weight cut off) of about 1, 2, 3, 4, 5, 6, 7, 8, 9, 10, 15, 20, 25, 30, 40, 50, 60, 70, 80, 90, 100, 110, 120, 130, 140, 150, 160, 170, 180, 190, 200, 250, 300, 400, 500, 600, 700, 800, 900, 1000, 1500, 2000, 2500, 3000, 3500, 4000, 4500, 5000, 5500, 6000, 6500, 7000, 7500, 8000, 8500, 9000, 9500, 10000, or greater than 10000 kDa, respectively, the biological sample may first be filtered through a filter having a porosity or pore size of between about 0.01 μm to about 10 μm, e.g., 0.01 μm to about 2 μm or about 0.05 μm to about 1.5 μm. In some embodiments, the filter has a pore size of about 0.01, 0.02, 0.03, 0.04, 0.05, 0.06, 0.07, 0.08, 0.09, 0.1, 0.2, 0.3, 0.4, 0.5, 0.6, 0.7, 0.8, 0.9, 1.0, 1.1, 1.2, 1.3, 1.4, 1.5, 1.6, 1.7, 1.8, 1.9 or 2.0, 3.0, 4.0, 5.0, 6.0, 7.0, 8.0, 9.0 or 10.0 μm. The filter may be a syringe filter. Thus, in one embodiment, the method comprises filtering the biological sample through a filter, such as a syringe filter, wherein the syringe filter has a porosity of greater than about 1 μm, prior to filtering the sample through a filtration module comprising a filter that retains molecules greater than about 100 or 150 kiloDaltons. In an embodiment, the filter is 1.2 μM filter and the filtration is followed by passage of the sample through a 7 ml or 20 ml concentrator column with a 150 kDa cutoff. Multiple concentrator columns may be used, e.g., in series. For example, a 7000 MWCO filtration unit can be used before a 150 MWCO unit.

[0279] The filtration module can be a component of a microfluidic device. Microfluidic devices, which may also be referred to as “lab-on-a-chip” systems, biomedical micro-electro-mechanical systems (bioMEMs), or multicomponent integrated systems, can be used for isolating, and analyzing, vesicles. Such systems miniaturize and compartmentalize processes that allow for binding of vesicles, detection of biomarkers, and other processes, such as further described herein.

[0280] The filtration module and assessment can be as described in Grant, R., et al., A filtration-based protocol to isolate human Plasma Membrane-derived Vesicles and exosomes from blood plasma, J Immunol Methods (2011) 371:143-51 (Epub 2011 Jun. 30), which reference is incorporated herein by reference in its entirety.

[0281] A microfluidic device can also be used for isolation of a vesicle by comprising a filtration module. For example, a microfluidic device can use one more channels for isolating a vesicle from a biological sample based on size from a biological sample. A biological sample can be introduced into one or more microfluidic channels, which selectively allows the passage of vesicles. The microfluidic device can further comprise binding agents, or more than one filtration module to select vesicles based on a property of the vesicles, for example, size, shape, deformability, biomarker profile, or biosignature.

[0282] The retentate from a filtration step can be further processed before assessment of microvesicles or other biomarkers therein. In an embodiment, the retentate is diluted prior to biomarker assessment, e.g., with an appropriate diluent such as a biologically compatible buffer. In some cases, the retentate is serially diluted. In an aspect, the invention provides a method for detecting a microvesicle population from a biological sample comprising: a) concentrating the biological sample using a selection membrane having a pore size of from 0.01 μm to about 10 μm, or a molecular weight cut off (MWCO) from about 1 kDa to 10000 kDa; b) diluting a retentate from the concentration step into one or more aliquots; and c) contacting each of the one or more aliquots of retentate with one or more binding agent specific to a molecule of at least one microvesicle in the microvesicle population. In a related aspect, the invention provides a method for detecting a microvesicle population from a biological sample comprising: a) concentrating the biological sample using a selection membrane having a pore size of from 0.01 μm to about 10 μm, or a molecular weight cut off (MWCO) from about 1 kDa to 10000 kDa; and b) contacting one or more aliquots of the retentate from the concentrating step with one or more binding agent specific to a molecule of at least one microvesicle in the microvesicle population.

[0283] The selection membrane can be sized to retain the desired biomarkers in the retentate or to allow the desired biomarkers to pass through the filter into the filtrate. The filter membrane can be chosen to have a certain pore size or MWCO value. The selection membrane can have a pore size of about 0.01, 0.02, 0.03, 0.04, 0.05, 0.06, 0.07, 0.08, 0.09, 0.1, 0.2, 0.3, 0.4, 0.5, 0.6, 0.7, 0.8, 0.9, 1.0, 1.1, 1.2, 1.3, 1.4, 1.5, 1.6, 1.7, 1.8, 1.9 or 2.0, 3.0, 4.0, 5.0, 6.0, 7.0, 8.0, 9.0 or 10.0 μm. The selection membrane can also have a MWCO of about 1, 2, 3, 4, 5, 6, 7, 8, 9, 10, 15, 20, 25, 30, 40, 50, 60, 70, 80, 90, 100, 110, 120, 130, 140, 150, 160, 170, 180, 190, 200, 250, 300, 400, 500, 600, 700, 800, 900, 1000, 2000, 3000, 4000, 5000, 6000, 7000, 8000, 9000 or 10000 kDa.

[0284] The retentate can be separated and/or diluted into any number of desired aliquots. For example, multiple aliquots without any dilution or the same dilution can be used to determine reproducibility. In another example, multiple aliquots at different dilutions can be used to construct a concentration curve. In an embodiment, the retentate is separated and/or diluted into at least 1, 2, 3, 4, 5, 6, 7, 8, 9, 10, 11, 12, 13, 14, 15, 16, 17, 18, 19, 20, 25, 30, 35, 40, 45, 50, 55, 60, 65, 70, 75, 80, 85, 90, 95, 100, 150, 200, 250, 300, 350 or 400 aliquots. The aliquots can be at a same dilution or at different dilutions.

[0285] A dilution factor is the ratio of the final volume of a mixture (the mixture of the diluents and aliquot) divided by the initial volume of the aliquot. The retentate can be diluted into one or more aliquots at a dilution factor of about 0, 1, 2, 3, 4, 5, 6, 7, 8, 9, 10, 15, 20, 25, 30, 40, 50, 60, 70, 80, 90, 100, 110, 120, 130, 140, 150, 160, 170, 180, 190, 200, 250, 300, 400, 500, 600, 700, 800, 900, 1000, 1500, 2000, 2500, 3000, 3500, 4000, 4500, 5000, 5500, 6000, 6500, 7000, 7500, 8000, 8500, 9000, 9500, 10000, 20000, 30000, 40000, 50000, 60000, 70000, 80000, 90000 and/or 100000. For example, the retentate can be diluted into one or more aliquot at a dilution factor of about 500.

[0286] To estimate a concentration or form a curve, the retentate can be diluted into multiple aliquots. In an embodiment of the method, the retentate is diluted into one or more aliquots at a dilution factor of about 100, 250, 500, 1000, 10000 and 100000. As desired, the method can further comprise detecting an amount of microvesicles in each aliquot of retentate, e.g., that formed a complex with the one or more binding agent. The curve can be used to determine a linear range of the amount of microvesicles in each aliquot detected versus dilution factor. A concentration of the detected microvesicles for the biological sample can be determined using the amount of microvesicles determined in one or more aliquot within the linear range. The concentration can be compared to a reference concentration, e.g., in order to characterize a phenotype as described herein.

[0287] The invention also provides a related method comprising filtering a biological sample from a subject through a filtration module and collecting a filtrate comprising the vesicle, thereby isolating the vesicle from the biological sample. In such cases cells and other large entities can be retained in the retentate while microvesicles pass through into the filtrate. It will be appreciated that strategies to retain and filter microvesicles can be used in concert. For example, a sample can be filtered with a selection membrane that allows microvesicles to pass through, thereby isolating the microvesicles from large particles (cells, complexes, etc). The filtrate comprising the microvesicle can then be filtered using a selection membrane that retains microvesicles, thereby isolating the microvesicles from smaller particles (proteins, nucleic acids, etc). The isolated microvesicles can be further assessed according to the methods of the invention, e.g., to characterize a phenotype.

[0288] Precipitation

[0289] Vesicles can be isolated using a polymeric precipitation method. The method can be in combination with or in place of the other isolation methods described herein. In one embodiment, the sample containing the vesicles is contacted with a formulation of polyethylene glycol (PEG). The polymeric formulation is incubated with the vesicle containing sample then precipitated by centrifugation. The PEG can bind to the vesicles and can be treated to specifically capture vesicles by addition of a capture moiety, e.g., a pegylated-binding protein such as an antibody. One of skill will appreciate that other polymers in addition to PEG can be used, e.g., PEG derivatives including methoxypolyethylene glycols, poly (ethylene oxide), and various polymers of formula HO—CH₂—(CH₂—O—CH₂—)n-CH₂—OH having different molecular weights. The efficiency of isolation may depend on various factors including the length of the polymer chains and concentration of polymer used. In preferred embodiments, PEG4000 or PEG8000 may be used at a concentration of 1%, 2%, 3%, 4%, 5%, 6%, 7%, 8%, 9%, or 10%, e.g., 4% or 8%.

[0290] In some embodiments of the invention, the vesicles are concentrated from a sample using the polymer precipitation method and the isolated vesicles are further separated using another approach. The second step can be used to identify a subpopulation of vesicles, e.g., that display certain biomarkers. The second separation step can comprise size exclusion, a binding agent, an antibody capture step, microbeads, as described herein.

[0291] In an embodiment, vesicles are isolated according to the ExoQuick™ and ExoQuick-TC™ kits from System Biosciences, Mountain View, Calif. USA. These kits use a polymer-based precipitation method to pellet vesicles. Similarly, the vesicles can be isolated using the Total Exosome Isolation (from Serum) or Total Exosome Isolation (from Cell Culture Media) kits from Invitrogen/Life Technologies (Carlsbad, Calif. USA). The Total Exosome Isolation reagent forces less-soluble components such as vesicles out of solution, allowing them to be collected by a short, low-speed centrifugation. The reagent is added to the biological sample, and the solution is incubated overnight at 2° C. to 8° C. The precipitated vesicles are recovered by standard centrifugation.

[0292] Binding Agents

[0293] Binding agents (also referred to as binding reagents) include agents that are capable of binding a target biomarker. A binding agent can be specific for the target biomarker, meaning the agent is capable of binding a target biomarker. The target can be any useful biomarker disclosed herein, such as a biomarker on the vesicle surface. In some embodiments, the target is a single molecule, such as a single protein, so that the binding agent is specific to the single protein. In other embodiments, the target can be a group of molecules, such as a family or proteins having a similar epitope or moiety, so that the binding agent is specific to the family or group of proteins. The group of molecules can also be a class of molecules, such as protein, DNA or RNA. The binding agent can be a capture agent used to capture a vesicle by binding a component or biomarker of a vesicle. In some embodiments, a capture agent comprises an antibody or fragment thereof, or an aptamer, that binds to an antigen on a vesicle. The capture agent can be optionally coupled to a substrate and used to isolate a vesicle, as further described herein.

[0294] A binding agent is an agent that binds to a circulating biomarker, such as a vesicle or a component of a vesicle. The binding agent can be used as a capture agent and/or a detection agent. A capture agent can bind and capture a circulating biomarker, such as by binding a component or biomarker of a vesicle. For example, the capture agent can be a capture antibody or capture antigen that binds to an antigen on a vesicle. A detection agent can bind to a circulating biomarker thereby facilitating detection of the biomarker. For example, a capture agent comprising an antibody or aptamer that is sequestered to a substrate can be used to capture a vesicle in a sample, and a detection agent comprising an antibody or aptamer that carries a label can be used to detect the captured vesicle via detection of the detection agent's label. In some embodiments, a vesicle is assessed using capture and detection agents that recognize the same vesicle biomarkers. For example, a vesicle population can be captured using a tetraspanin such as by using an anti-CD9 antibody bound to a substrate, and the captured vesicles can be detected using a fluorescently labeled anti-CD9 antibody to label the captured vesicles. In other embodiments, a vesicle is assessed using capture and detection agents that recognize different vesicle biomarkers. For example, a vesicle population can be captured using a cell-specific marker such as by using an anti-PCSA antibody bound to a substrate, and the captured vesicles can be detected using a fluorescently labeled anti-CD9 antibody to label the captured vesicles. Similarly, the vesicle population can be captured using a general vesicle marker such as by using an anti-CD9 antibody bound to a substrate, and the captured vesicles can be detected using a fluorescently labeled antibody to a cell-specific or disease specific marker to label the captured vesicles.

[0295] The biomarkers recognized by the binding agent are sometimes referred to herein as an antigen. Unless otherwise specified, antigen as used herein is meant to encompass any entity that is capable of being bound by a binding agent, regardless of the type of binding agent or the immunogenicity of the biomarker. The antigen further encompasses a functional fragment thereof. For example, an antigen can encompass a protein biomarker capable of being bound by a binding agent, including a fragment of the protein that is capable of being bound by a binding agent.

[0296] In one embodiment, a vesicle is captured using a capture agent that binds to a biomarker on a vesicle. The capture agent can be coupled to a substrate and used to isolate a vesicle, as further described herein. In one embodiment, a capture agent is used for affinity capture or isolation of a vesicle present in a substance or sample.

[0297] A binding agent can be used after a vesicle is concentrated or isolated from a biological sample. For example, a vesicle can first be isolated from a biological sample before a vesicle with a specific biosignature is isolated or detected. The vesicle with a specific biosignature can be isolated or detected using a binding agent for the biomarker. A vesicle with the specific biomarker can be isolated or detected from a heterogeneous population of vesicles. Alternatively, a binding agent may be used on a biological sample comprising vesicles without a prior isolation or concentration step. For example, a binding agent is used to isolate or detect a vesicle with a specific biosignature directly from a biological sample.

[0298] A binding agent can be a nucleic acid, protein, or other molecule that can bind to a component of a vesicle. The binding agent can comprise DNA, RNA, monoclonal antibodies, polyclonal antibodies, Fabs, Fab′, single chain antibodies, synthetic antibodies, aptamers (DNA/RNA), peptoids, zDNA, peptide nucleic acids (PNAs), locked nucleic acids (LNAs), lectins, synthetic or naturally occurring chemical compounds (including but not limited to drugs, labeling reagents), dendrimers, or a combination thereof. For example, the binding agent can be a capture antibody. In embodiments of the invention, the binding agent comprises a membrane protein labeling agent. See, e.g., the membrane protein labeling agents disclosed in Alroy et al., US. Patent Publication US 2005/0158708. In an embodiment, vesicles are isolated or captured as described herein, and one or more membrane protein labeling agent is used to detect the vesicles.

[0299] In some instances, a single binding agent can be employed to isolate or detect a vesicle. In other instances, a combination of different binding agents may be employed to isolate or detect a vesicle. For example, at least 2, 3, 4, 5, 6, 7, 8, 9, 10, 11, 12, 13, 14, 15, 16, 17, 18, 19, 20, 25, 50, 75 or 100 different binding agents may be used to isolate or detect a vesicle from a biological sample. Furthermore, the one or more different binding agents for a vesicle can form a biosignature of a vesicle, as further described below.

[0300] Different binding agents can also be used for multiplexing. For example, isolation or detection of more than one population of vesicles can be performed by isolating or detecting each vesicle population with a different binding agent. Different binding agents can be bound to different particles, wherein the different particles are labeled. In another embodiment, an array comprising different binding agents can be used for multiplex analysis, wherein the different binding agents are differentially labeled or can be ascertained based on the location of the binding agent on the array. Multiplexing can be accomplished up to the resolution capability of the labels or detection method, such as described below. The binding agents can be used to detect the vesicles, such as for detecting cell-of-origin specific vesicles. A binding agent or multiple binding agents can themselves form a binding agent profile that provides a biosignature for a vesicle. One or more binding agents can be selected from FIG. 2 of International Patent Publication No. WO/2011/127219, entitled “Circulating Biomarkers for Disease” and filed Apr. 6, 2011, which application is incorporated by reference in its entirety herein. For example, if a vesicle population is detected or isolated using two, three, four or more binding agents in a differential detection or isolation of a vesicle from a heterogeneous population of vesicles, the particular binding agent profile for the vesicle population provides a biosignature for the particular vesicle population. The vesicle can be detected using any number of binding agents in a multiplex fashion. Thus, the binding agent can also be used to form a biosignature for a vesicle. The biosignature can be used to characterize a phenotype.

[0301] The binding agent can be a lectin. Lectins are proteins that bind selectively to polysaccharides and glycoproteins and are widely distributed in plants and animals. For example, lectins such as those derived from Galanthus nivalis in the form of Galanthus nivalis agglutinin (“GNA”), Narcissus pseudonarcissus in the form of Narcissus pseudonarcissus agglutinin (“NPA”) and the blue green algae Nostoc ellipsosporum called “cyanovirin” (Boyd et al. Antimicrob Agents Chemother 41(7): 1521 1530, 1997; Hammar et al. Ann N Y Acad Sci 724: 166 169, 1994; Kaku et al. Arch Biochem Biophys 279(2): 298 304, 1990) can be used to isolate a vesicle. These lectins can bind to glycoproteins having a high mannose content (Chervenak et al. Biochemistry 34(16): 5685 5695, 1995). High mannose glycoprotein refers to glycoproteins having mannose-mannose linkages in the form of α-1→3 or α-1→6 mannose-mannose linkages.

[0302] The binding agent can be an agent that binds one or more lectins. Lectin capture can be applied to the isolation of the biomarker cathepsin D since it is a glycosylated protein capable of binding the lectins Galanthus nivalis agglutinin (GNA) and concanavalin A (ConA).

[0303] Methods and devices for using lectins to capture vesicles are described in International Patent Publications WO/2011/066589, entitled “METHODS AND SYSTEMS FOR ISOLATING, STORING, AND ANALYZING VESICLES” and filed Nov. 30, 2010; WO/2010/065765, entitled “AFFINITY CAPTURE OF CIRCULATING BIOMARKERS” and filed Dec. 3, 2009; WO/2010/141862, entitled “METHODS AND MATERIALS FOR ISOLATING EXOSOMES” and filed Jun. 4, 2010; and WO/2007/103572, entitled “EXTRACORPOREAL REMOVAL OF MICROVESICULAR PARTICLES” and filed Mar. 9, 2007, each of which applications is incorporated by reference herein in its entirety.

[0304] The binding agent can be an antibody. For example, a vesicle may be isolated using one or more antibodies specific for one or more antigens present on the vesicle. For example, a vesicle can have CD63 on its surface, and an antibody, or capture antibody, for CD63 can be used to isolate the vesicle. Alternatively, a vesicle derived from a tumor cell can express EpCam, the vesicle can be isolated using an antibody for EpCam and CD63. Other antibodies for isolating vesicles can include an antibody, or capture antibody, to CD9, PSCA, TNFR, CD63, B7H3, MFG-E8, EpCam, Rab, CD81, STEAP, PCSA, PSMA, or 5T4. Other antibodies for isolating vesicles can include an antibody, or capture antibody, to DR3, STEAP, epha2, TMEM211, MFG-E8, Tissue Factor (TF), unc93A, A33, CD24, NGAL, EpCam, MUC17, TROP2, or TETS.

[0305] In some embodiments, the capture agent is an antibody to CD9, CD63, CD81, PSMA, PCSA, B7H3, EpCam, PSCA, ICAM, STEAP, or EGFR. The capture agent can also be used to identify a biomarker of a vesicle. For example, a capture agent such as an antibody to CD9 would identify CD9 as a biomarker of the vesicle. In some embodiments, a plurality of capture agents can be used, such as in multiplex analysis. The plurality of captures agents can comprise binding agents to one or more of: CD9, CD63, CD81, PSMA, PCSA, B7H3, EpCam, PSCA, ICAM, STEAP, and EGFR. In some embodiments, the plurality of capture agents comprise binding agents to CD9, CD63, CD81, PSMA, PCSA, B7H3, MFG-E8, and/or EpCam. In yet other embodiments, the plurality of capture agents comprises binding agents to CD9, CD63, CD81, PSMA, PCSA, B7H3, EpCam, PSCA, ICAM, STEAP, and/or EGFR. The plurality of capture agents comprises binding agents to TMEM211, MFG-E8, Tissue Factor (TF), and/or CD24.

[0306] The antibodies referenced herein can be immunoglobulin molecules or immunologically active portions of immunoglobulin molecules, i.e., molecules that contain an antigen binding site that specifically binds an antigen and synthetic antibodies. The immunoglobulin molecules can be of any class (e.g., IgG, IgE, IgM, IgD or IgA) or subclass of immunoglobulin molecule. Antibodies include, but are not limited to, polyclonal, monoclonal, bispecific, synthetic, humanized and chimeric antibodies, single chain antibodies, Fab fragments and F(ab′)₂ fragments, Fv or Fv′ portions, fragments produced by a Fab expression library, anti-idiotypic (anti-Id) antibodies, or epitope-binding fragments of any of the above. An antibody, or generally any molecule, “binds specifically” to an antigen (or other molecule) if the antibody binds preferentially to the antigen, and, e.g., has less than about 30%, 20%, 10%, 5% or 1% cross-reactivity with another molecule.

[0307] The binding agent can also be a polypeptide or peptide. Polypeptide is used in its broadest sense and may include a sequence of subunit amino acids, amino acid analogs, or peptidomimetics. The subunits may be linked by peptide bonds. The polypeptides may be naturally occurring, processed forms of naturally occurring polypeptides (such as by enzymatic digestion), chemically synthesized or recombinantly expressed. The polypeptides for use in the methods of the present invention may be chemically synthesized using standard techniques. The polypeptides may comprise D-amino acids (which are resistant to L-amino acid-specific proteases), a combination of D- and L-amino acids, β amino acids, or various other designer or non-naturally occurring amino acids (e.g., β-methyl amino acids, Cα-methyl amino acids, and Nα-methyl amino acids, etc.) to convey special properties. Synthetic amino acids may include ornithine for lysine, and norleucine for leucine or isoleucine. In addition, the polypeptides can have peptidomimetic bonds, such as ester bonds, to prepare polypeptides with novel properties. For example, a polypeptide may be generated that incorporates a reduced peptide bond, i.e., R₁—CH₂—NH—R₂, where R₁ and R₂ are amino acid residues or sequences. A reduced peptide bond may be introduced as a dipeptide subunit. Such a polypeptide would be resistant to protease activity, and would possess an extended half-live in vivo. Polypeptides can also include peptoids (N-substituted glycines), in which the side chains are appended to nitrogen atoms along the molecule's backbone, rather than to the α-carbons, as in amino acids. Polypeptides and peptides are intended to be used interchangeably throughout this application, i.e. where the term peptide is used, it may also include polypeptides and where the term polypeptides is used, it may also include peptides. The term “protein” is also intended to be used interchangeably throughout this application with the terms “polypeptides” and “peptides” unless otherwise specified.

[0308] A vesicle may be isolated, captured or detected using a binding agent. The binding agent can be an agent that binds a vesicle “housekeeping protein,” or general vesicle biomarker. The biomarker can be CD63, CD9, CD81, CD82, CD37, CD53, Rab-5b, Annexin V, MFG-E8 or other commonly observed vesicle markers include those listed in Table 3. Furthermore, any of the markers disclosed herein or in Table 3 can be selected in identifying a candidate biosignature for a disease or condition, where the one or more selected biomarkers have a direct or indirect role or function in mechanisms involved in the disease or condition.

[0309] The binding agent can also be an agent that binds to a vesicle derived from a specific cell type, such as a tumor cell (e.g. binding agent for Tissue factor, EpCam, B7H3, RAGE or CD24) or a specific cell-of-origin. The binding agent used to isolate or detect a vesicle can be a binding agent for an antigen selected from FIG. 1 of International Patent Publication No. WO/2011/127219, entitled “Circulating Biomarkers for Disease” and filed Apr. 6, 2011, which application is incorporated by reference in its entirety herein. The binding agent for a vesicle can also be selected from those listed in FIG. 2 of International Patent Publication No. WO/2011/127219. The binding agent can be for an antigen such as a tetraspanin, MFG-E8, Annexin V, 5T4, B7H3, caveolin, CD63, CD9, E-Cadherin, Tissue factor, MFG-E8, TMEM211, CD24, PSCA, PCSA, PSMA, Rab-5B, STEAP, TNFR1, CD81, EpCam, CD59, CD81, ICAM, EGFR, or CD66. A binding agent for a platelet can be a glycoprotein such as GpIa-IIa, GpIIb-IIIa, GpIIIb, GpIb, or GpIX. A binding agent can be for an antigen comprisine one or more of CD9, Erb2, Erb4, CD81, Erb3, MUC16, CD63, DLL4, HLA-Drpe, B7H3, IFNAR, 5T4, PCSA, MICB, PSMA, MFG-E8, Muc1, PSA, Muc2, Unc93a, VEGFR2, EpCAM, VEGF A, TMPRSS2, RAGE, PSCA, CD40, Muc17, IL-17-RA, and CD80. For example, the binding agent can be one or more of CD9, CD63, CD81, B7H3, PCSA, MFG-E8, MUC2, EpCam, RAGE and Muc17. One or more binding agents, such as one or more binding agents for two or more of the antigens, can be used for isolating or detecting a vesicle. The binding agent used can be selected based on the desire of isolating or detecting a vesicle derived from a particular cell type or cell-of-origin specific vesicle. The binding agent can be to one or more vesicle marker in Table 4.

[0310] A binding agent can also be linked directly or indirectly to a solid surface or substrate. A solid surface or substrate can be any physically separable solid to which a binding agent can be directly or indirectly attached including, but not limited to, surfaces provided by microarrays and wells, particles such as beads, columns, optical fibers, wipes, glass and modified or functionalized glass, quartz, mica, diazotized membranes (paper or nylon), polyformaldehyde, cellulose, cellulose acetate, paper, ceramics, metals, metalloids, semiconductive materials, quantum dots, coated beads or particles, other chromatographic materials, magnetic particles; plastics (including acrylics, polystyrene, copolymers of styrene or other materials, polypropylene, polyethylene, polybutylene, polyurethanes, polytetrafluoroethylene (PTFE, Teflon®), etc.), polysaccharides, nylon or nitrocellulose, resins, silica or silica-based materials including silicon and modified silicon, carbon, metals, inorganic glasses, plastics, ceramics, conducting polymers (including polymers such as polypyrole and polyindole); micro or nanostructured surfaces such as nucleic acid tiling arrays, nanotube, nanowire, or nanoparticulate decorated surfaces; or porous surfaces or gels such as methacrylates, acrylamides, sugar polymers, cellulose, silicates, or other fibrous or stranded polymers. In addition, as is known the art, the substrate may be coated using passive or chemically-derivatized coatings with any number of materials, including polymers, such as dextrans, acrylamides, gelatins or agarose. Such coatings can facilitate the use of the array with a biological sample.

[0311] For example, an antibody used to isolate a vesicle can be bound to a solid substrate such as a well, such as commercially available plates (e.g. from Nunc, Milan Italy). Each well can be coated with the antibody. In some embodiments, the antibody used to isolate a vesicle is bound to a solid substrate such as an array. The array can have a predetermined spatial arrangement of molecule interactions, binding islands, biomolecules, zones, domains or spatial arrangements of binding islands or binding agents deposited within discrete boundaries. Further, the term array may be used herein to refer to multiple arrays arranged on a surface, such as would be the case where a surface bore multiple copies of an array. Such surfaces bearing multiple arrays may also be referred to as multiple arrays or repeating arrays.

[0312] Arrays typically contain addressable moieties that can detect the presence of an entity, e.g., a vesicle in the sample via a binding event. An array may be referred to as a microarray. Arrays or microarrays include without limitation DNA microarrays, such as cDNA microarrays, oligonucleotide microarrays and SNP microarrays, microRNA arrays, protein microarrays, antibody microarrays, tissue microarrays, cellular microarrays (also called transfection microarrays), chemical compound microarrays, and carbohydrate arrays (glycoarrays). DNA arrays typically comprise addressable nucleotide sequences that can bind to sequences present in a sample. MicroRNA arrays, e.g., the MMChips array from the University of Louisville or commercial systems from Agilent, can be used to detect microRNAs. Protein microarrays can be used to identify protein-protein interactions, including without limitation identifying substrates of protein kinases, transcription factor protein-activation, or to identify the targets of biologically active small molecules. Protein arrays may comprise an array of different protein molecules, commonly antibodies, or nucleotide sequences that bind to proteins of interest. In a non-limiting example, a protein array can be used to detect vesicles having certain proteins on their surface. Antibody arrays comprise antibodies spotted onto the protein chip that are used as capture molecules to detect proteins or other biological materials from a sample, e.g., from cell or tissue lysate solutions. For example, antibody arrays can be used to detect vesicle-associated biomarkers from bodily fluids, e.g., serum or urine. Tissue microarrays comprise separate tissue cores assembled in array fashion to allow multiplex histological analysis. Cellular microarrays, also called transfection microarrays, comprise various capture agents, such as antibodies, proteins, or lipids, which can interact with cells to facilitate their capture on addressable locations. Cellular arrays can also be used to capture vesicles due to the similarity between a vesicle and cellular membrane. Chemical compound microarrays comprise arrays of chemical compounds and can be used to detect protein or other biological materials that bind the compounds. Carbohydrate arrays (glycoarrays) comprise arrays of carbohydrates and can detect, e.g., protein that bind sugar moieties. One of skill will appreciate that similar technologies or improvements can be used according to the methods of the invention.

[0313] A binding agent can also be bound to particles such as beads or microspheres. For example, an antibody specific for a component of a vesicle can be bound to a particle, and the antibody-bound particle is used to isolate a vesicle from a biological sample. In some embodiments, the microspheres may be magnetic or fluorescently labeled. In addition, a binding agent for isolating vesicles can be a solid substrate itself. For example, latex beads, such as aldehyde/sulfate beads (Interfacial Dynamics, Portland, Oreg.) can be used.

[0314] A binding agent bound to a magnetic bead can also be used to isolate a vesicle. For example, a biological sample such as serum from a patient can be collected for colon cancer screening. The sample can be incubated with anti-CCSA-3 (Colon Cancer—Specific Antigen) coupled to magnetic microbeads. A low-density microcolumn can be placed in the magnetic field of a MACS Separator and the column is then washed with a buffer solution such as Tris-buffered saline. The magnetic immune complexes can then be applied to the column and unbound, non-specific material can be discarded. The CCSA-3 selected vesicle can be recovered by removing the column from the separator and placing it on a collection tube. A buffer can be added to the column and the magnetically labeled vesicle can be released by applying the plunger supplied with the column. The isolated vesicle can be diluted in IgG elution buffer and the complex can then be centrifuged to separate the microbeads from the vesicle. The pelleted isolated cell-of-origin specific vesicle can be resuspended in buffer such as phosphate-buffered saline and quantitated. Alternatively, due to the strong adhesion force between the antibody captured cell-of-origin specific vesicle and the magnetic microbeads, a proteolytic enzyme such as trypsin can be used for the release of captured vesicles without the need for centrifugation. The proteolytic enzyme can be incubated with the antibody captured cell-of-origin specific vesicles for at least a time sufficient to release the vesicles.

[0315] A binding agent, such as an antibody, for isolating vesicles is preferably contacted with the biological sample comprising the vesicles of interest for at least a time sufficient for the binding agent to bind to a component of the vesicle. For example, an antibody may be contacted with a biological sample for various intervals ranging from seconds days, including but not limited to, about 10 minutes, 30 minutes, 1 hour, 3 hours, 5 hours, 7 hours, 10 hours, 15 hours, 1 day, 3 days, 7 days or 10 days.

[0316] A binding agent, such as an antibody specific to an antigen listed in FIG. 1 of International Patent Publication No. WO/2011/127219, entitled “Circulating Biomarkers for Disease” and filed Apr. 6, 2011, which application is incorporated by reference in its entirety herein, or a binding agent listed in FIG. 2 of International Patent Publication No. WO/2011/127219, can be labeled to facilitate detection. Appropriate labels include without limitation a magnetic label, a fluorescent moiety, an enzyme, a chemiluminescent probe, a metal particle, a non-metal colloidal particle, a polymeric dye particle, a pigment molecule, a pigment particle, an electrochemically active species, semiconductor nanocrystal or other nanoparticles including quantum dots or gold particles, fluorophores, quantum dots, or radioactive labels. Various protein, radioactive, fluorescent, enzymatic, and other labels are described further above.

[0317] A binding agent can be directly or indirectly labeled, e.g., the label is attached to the antibody through biotin-streptavidin. Alternatively, an antibody is not labeled, but is later contacted with a second antibody that is labeled after the first antibody is bound to an antigen of interest.

[0318] Depending on the method of isolation or detection used, the binding agent may be linked to a solid surface or substrate, such as arrays, particles, wells and other substrates described above. Methods for direct chemical coupling of antibodies, to the cell surface are known in the art, and may include, for example, coupling using glutaraldehyde or maleimide activated antibodies. Methods for chemical coupling using multiple step procedures include biotinylation, coupling of trinitrophenol (TNP) or digoxigenin using for example succinimide esters of these compounds. Biotinylation can be accomplished by, for example, the use of D-biotinyl-N-hydroxysuccinimide Succinimide groups react effectively with amino groups at pH values above 7, and preferentially between about pH 8.0 and about pH 8.5. Biotinylation can be accomplished by, for example, treating the cells with dithiothreitol followed by the addition of biotin maleimide.

[0319] Particle-Based Assays

[0320] As an alternative to planar arrays, assays using particles or microspheres, such as bead based assays, are capable of use with a binding agent. For example, antibodies or aptamers are easily conjugated with commercially available beads. See, e.g., Fan et al., Illumina universal bead arrays. Methods Enzymol. 2006 410:57-73; Srinivas et al. Anal. Chem. 2011 Oct. 21, Aptamer functionalized Microgel Particles for Protein Detection; See also, review article on aptamers as therapeutic and diagnostic agents, Brody and Gold, Rev. Mol. Biotech. 2000, 74:5-13.

[0321] Multiparametric assays or other high throughput detection assays using bead coatings with cognate ligands and reporter molecules with specific activities consistent with high sensitivity automation can be used. In a bead based assay system, a binding agent for a biomarker or vesicle, such as a capture agent (e.g. capture antibody), can be immobilized on an addressable microsphere. Each binding agent for each individual binding assay can be coupled to a distinct type of microsphere (i.e., microbead) and the assay reaction takes place on the surface of the microsphere, such as depicted in FIG. 2B. A binding agent for a vesicle can be a capture antibody or aptamer coupled to a bead. Dyed microspheres with discrete fluorescence intensities are loaded separately with their appropriate binding agent or capture probes. The different bead sets carrying different binding agents can be pooled as desired to generate custom bead arrays. Bead arrays are then incubated with the sample in a single reaction vessel to perform the assay.

[0322] Various particle/bead substrates and systems useful for the methods of the invention are described further above.

[0323] Flow Cytometry

[0324] In various embodiments of the invention, flow cytometry, which is described in further detail above, is used to assess a microvesicle population in a biological sample. If desired, the microvesicle population can be sorted from other particles (e.g., cell debris, protein aggregates, etc) in a sample by labeling the vesicles using one or more general vesicle marker. The general vesicle marker can be a marker in Table 3. Commonly used vesicle markers include tetraspanins such as CD9, CD63 and/or CD81. Vesicles comprising one or more tetraspanin are sometimes referred to as “Tet+” herein to indicate that the vesicles are tetraspanin-positive. The sorted microvesicles can be further assessed using methodology described herein. E.g., surface antigens on the sorted microvesicles can be detected using flow or other methods. In some embodiments, payload within the sorted microvesicles is assessed. As an illustrative example, a population of microvesicles is contacted with a labeled binding agent to a surface antigen of interest, the contacted microvesicles are sorted using flow cytometry, and payload with the microvesicles is assessed. The payload may be polypeptides, nucleic acids (e.g., mRNA or microRNA) or other biological entities as desired. Such assessment is used to characterize a phenotype as described herein, e.g., to diagnose, prognose or theranose a cancer.

[0325] In an embodiment, flow sorting is used to distinguish microvesicle populations from other biological complexes. In a non-limiting example, Ago2+/Tet+ and Ago2+/Tet− particles are detected using flow methodology to separate Ago2+ vesicles from vesicle-free Ago2+ complexes, respectively.

[0326] Multiplexing

[0327] Multiplex experiments comprise experiments that can simultaneously measure multiple analytes in a single assay. Vesicles and associated biomarkers can be assessed in a multiplex fashion. Different binding agents can be used for multiplexing different circulating biomarkers, e.g., microRNA, protein, or vesicle populations. Different biomarkers, e.g., different vesicle populations, can be isolated or detected using different binding agents. Each population in a biological sample can be labeled with a different signaling label, such as a fluorophore, quantum dot, or radioactive label, such as described above. The label can be directly conjugated to a binding agent or indirectly used to detect a binding agent that binds a vesicle. The number of populations detected in a multiplexing assay is dependent on the resolution capability of the labels and the summation of signals, as more than two differentially labeled vesicle populations that bind two or more affinity elements can produce summed signals.

[0328] Multiplexing of at least 2, 3, 4, 5, 6, 7, 8, 9, 10, 11, 12, 13, 14, 15, 16, 17, 18, 19, 20, 25, 50, 75 or 100 different circulating biomarkers may be performed. For example, one population of vesicles specific to a cell-of-origin can be assayed along with a second population of vesicles specific to a different cell-of-origin, where each population is labeled with a different label. Alternatively, a population of vesicles with a particular biomarker or biosignature can be assayed along with a second population of vesicles with a different biomarker or biosignature. In some cases, hundreds or thousands of vesicles are assessed in a single assay.

[0329] In one embodiment, multiplex analysis is performed by applying a plurality of vesicles comprising more than one population of vesicles to a plurality of substrates, such as beads. Each bead is coupled to one or more capture agents. The plurality of beads is divided into subsets, where beads with the same capture agent or combination of capture agents form a subset of beads, such that each subset of beads has a different capture agent or combination of capture agents than another subset of beads. The beads can then be used to capture vesicles that comprise a component that binds to the capture agent. The different subsets can be used to capture different populations of vesicles. The captured vesicles can then be analyzed by detecting one or more biomarkers.

[0330] Flow cytometry can be used in combination with a particle-based or bead based assay. Multiparametric immunoassays or other high throughput detection assays using bead coatings with cognate ligands and reporter molecules with specific activities consistent with high sensitivity automation can be used. For example, beads in each subset can be differentially labeled from another subset. In a particle based assay system, a binding agent or capture agent for a vesicle, such as a capture antibody, can be immobilized on addressable beads or microspheres. Each binding agent for each individual binding assay (such as an immunoassay when the binding agent is an antibody) can be coupled to a distinct type of microsphere (i.e., microbead) and the binding assay reaction takes place on the surface of the microspheres. Microspheres can be distinguished by different labels, for example, a microsphere with a specific capture agent would have a different signaling label as compared to another microsphere with a different capture agent. For example, microspheres can be dyed with discrete fluorescence intensities such that the fluorescence intensity of a microsphere with a specific binding agent is different than that of another microsphere with a different binding agent. Biomarkers bound by different capture agents can be differentially detected using different labels.

[0331] A microsphere can be labeled or dyed with at least 2 different labels or dyes. In some embodiments, the microsphere is labeled with at least 3, 4, 5, 6, 7, 8, 9, or 10 different labels. Different microspheres in a plurality of microspheres can have more than one label or dye, wherein various subsets of the microspheres have various ratios and combinations of the labels or dyes permitting detection of different microspheres with different binding agents. For example, the various ratios and combinations of labels and dyes can permit different fluorescent intensities. Alternatively, the various ratios and combinations maybe used to generate different detection patters to identify the binding agent. The microspheres can be labeled or dyed externally or may have intrinsic fluorescence or signaling labels. Beads can be loaded separately with their appropriate binding agents and thus, different vesicle populations can be isolated based on the different binding agents on the differentially labeled microspheres to which the different binding agents are coupled.

[0332] In another embodiment, multiplex analysis can be performed using a planar substrate, wherein the substrate comprises a plurality of capture agents. The plurality of capture agents can capture one or more populations of vesicles, and one or more biomarkers of the captured vesicles detected. The planar substrate can be a microarray or other substrate as further described herein.

[0333] Binding Agents

[0334] A vesicle may be isolated or detected using a binding agent for a novel component of a vesicle, such as an antibody for a novel antigen specific to a vesicle of interest. Novel antigens that are specific to a vesicle of interest may be isolated or identified using different test compounds of known composition bound to a substrate, such as an array or a plurality of particles, which can allow a large amount of chemical/structural space to be adequately sampled using only a small fraction of the space. The novel antigen identified can also serve as a biomarker for the vesicle. For example, a novel antigen identified for a cell-of-origin specific vesicle can be a useful biomarker.

[0335] The term “agent” or “reagent” as used in respect to contacting a sample can mean any entity designed to bind, hybridize, associate with or otherwise detect or facilitate detection of a target molecule, including target polypeptides, peptides, nucleic acid molecules, leptins, lipids, or any other biological entity that can be detected as described herein or as known in the art. Examples of such agents/reagents are well known in the art, and include but are not limited to universal or specific nucleic acid primers, nucleic acid probes, antibodies, aptamers, peptoid, peptide nucleic acid, locked nucleic acid, lectin, dendrimer, chemical compound, or other entities described herein or known in the art.

[0336] A binding agent can be identified by screening either a homogeneous or heterogeneous vesicle population against test compounds. Since the composition of each test compound on the substrate surface is known, this constitutes a screen for affinity elements. For example, a test compound array comprises test compounds at specific locations on the substrate addressable locations, and can be used to identify one or more binding agents for a vesicle. The test compounds can all be unrelated or related based on minor variations of a core sequence or structure. The different test compounds may include variants of a given test compound (such as polypeptide isoforms), test compounds that are structurally or compositionally unrelated, or a combination thereof.

[0337] A test compound can be a peptoid, polysaccharide, organic compound, inorganic compound, polymer, lipids, nucleic acid, polypeptide, antibody, protein, polysaccharide, or other compound. The test compound can be natural or synthetic. The test compound can comprise or consist of linear or branched heteropolymeric compounds based on any of a number of linkages or combinations of linkages (e.g., amide, ester, ether, thiol, radical additions, metal coordination, etc.), dendritic structures, circular structures, cavity structures or other structures with multiple nearby sites of attachment that serve as scaffolds upon which specific additions are made. These test compound can be spotted on a substrate or synthesized in situ, using standard methods in the art. In addition, the test compound can be spotted or synthesized in situ in combinations in order to detect useful interactions, such as cooperative binding.

[0338] The test compound can be a polypeptide with known amino acid sequence, thus, detection of a test compound binding with a vesicle can lead to identification of a polypeptide of known amino sequence that can be used as a binding agent. For example, a homogenous population of vesicles can be applied to a spotted array on a slide containing between a few and 1,000,000 test polypeptides having a length of variable amino acids. The polypeptides can be attached to the surface through the C-terminus. The sequence of the polypeptides can be generated randomly from 19 amino acids, excluding cysteine. The binding reaction can include a non-specific competitor, such as excess bacterial proteins labeled with another dye such that the specificity ratio for each polypeptide binding target can be determined. The polypeptides with the highest specificity and binding can be selected. The identity of the polypeptide on each spot is known, and thus can be readily identified. Once the novel antigens specific to the homogeneous vesicle population, such as a cell-of-origin specific vesicle is identified, such cell-of-origin specific vesicles may subsequently be isolated using such antigens in methods described hereafter.

[0339] An array can also be used for identifying an antibody as a binding agent for a vesicle. Test antibodies can be attached to an array and screened against a heterogeneous population of vesicles to identify antibodies that can be used to isolate or identify a vesicle. A homogeneous population of vesicles such as cell-of-origin specific vesicles can also be screened with an antibody array. Other than identifying antibodies to isolate or detect a homogeneous population of vesicles, one or more protein biomarkers specific to the homogenous population can be identified. Commercially available platforms with test antibodies pre-selected or custom selection of test antibodies attached to the array can be used. For example, an antibody array from Full Moon Biosystems can be screened using prostate cancer cell derived vesicles identifying antibodies to Bcl-XL, ERCC1, Keratin 15, CD81/TAPA-1, CD9, Epithelial Specific Antigen (ESA), and Mast Cell Chymase as binding agents, and the proteins identified can be used as biomarkers for the vesicles. The biomarker can be present or absent, underexpressed or overexpressed, mutated, or modified in or on a vesicle and used in characterizing a condition.

[0340] An antibody or synthetic antibody to be used as a binding agent can also be identified through a peptide array. Another method is the use of synthetic antibody generation through antibody phage display. M13 bacteriophage libraries of antibodies (e.g. Fabs) are displayed on the surfaces of phage particles as fusions to a coat protein. Each phage particle displays a unique antibody and also encapsulates a vector that contains the encoding DNA. Highly diverse libraries can be constructed and represented as phage pools, which can be used in antibody selection for binding to immobilized antigens. Antigen-binding phages are retained by the immobilized antigen, and the nonbinding phages are removed by washing. The retained phage pool can be amplified by infection of an Escherichia coli host and the amplified pool can be used for additional rounds of selection to eventually obtain a population that is dominated by antigen-binding clones. At this stage, individual phase clones can be isolated and subjected to DNA sequencing to decode the sequences of the displayed antibodies. Through the use of phase display and other methods known in the art, high affinity designer antibodies for vesicles can be generated.

[0341] Bead-based assays can also be used to identify novel binding agents to isolate or detect a vesicle. A test antibody or peptide can be conjugated to a particle. For example, a bead can be conjugated to an antibody or peptide and used to detect and quantify the proteins expressed on the surface of a population of vesicles in order to discover and specifically select for novel antibodies that can target vesicles from specific tissue or tumor types. Any molecule of organic origin can be successfully conjugated to a polystyrene bead through use of a commercially available kit according to manufacturer's instructions. Each bead set can be colored a certain detectable wavelength and each can be linked to a known antibody or peptide which can be used to specifically measure which beads are linked to exosomal proteins matching the epitope of previously conjugated antibodies or peptides. The beads can be dyed with discrete fluorescence intensities such that each bead with a different intensity has a different binding agent as described above.

[0342] For example, a purified vesicle preparation can be diluted in assay buffer to an appropriate concentration according to empirically determined dynamic range of assay. A sufficient volume of coupled beads can be prepared and approximately 1 μl of the antibody-coupled beads can be aliqouted into a well and adjusted to a final volume of approximately 50 μl. Once the antibody-conjugated beads have been added to a vacuum compatible plate, the beads can be washed to ensure proper binding conditions. An appropriate volume of vesicle preparation can then be added to each well being tested and the mixture incubated, such as for 15-18 hours. A sufficient volume of detection antibodies using detection antibody diluent solution can be prepared and incubated with the mixture for 1 hour or more. The beads can then be washed before the addition of detection antibody (biotin expressing) mixture composed of streptavidin phycoereythin. The beads can then be washed and vacuum aspirated several times before analysis on a suspension array system using software provided with an instrument. The identity of antigens that can be used to selectively extract the vesicles can then be elucidated from the analysis.

[0343] Assays using imaging systems can be used to detect and quantify proteins expressed on the surface of a vesicle in order to discover and specifically select for and enrich vesicles from specific tissue, cell or tumor types. Antibodies, peptides or cells conjugated to multiple well multiplex carbon coated plates can be used. Simultaneous measurement of many analytes in a well can be achieved through the use of capture antibodies arrayed on the patterned carbon working surface. Analytes can then be detected with antibodies labeled with reagents in electrode wells with an enhanced electro-chemiluminescent plate. Any molecule of organic origin can be successfully conjugated to the carbon coated plate. Proteins expressed on the surface of vesicles can be identified from this assay and can be used as targets to specifically select for and enrich vesicles from specific tissue or tumor types.

[0344] The binding agent can also be an aptamer to a specific target. The term “specific” as used herein in regards to a binding agent can mean that an agent has a greater affinity for its target than other targets, typically with a much great affinity, but does not require that the binding agent is absolutely specific for its target.

[0345] Microfluidics

[0346] The methods for isolating or identifying vesicles can be used in combination with microfluidic devices. The methods of isolating or detecting a vesicle, such as described herein, can be performed using a microfluidic device. Microfluidic devices, which may also be referred to as “lab-on-a-chip” systems, biomedical micro-electro-mechanical systems (bioMEMs), or multicomponent integrated systems, can be used for isolating and analyzing a vesicle. Such systems miniaturize and compartmentalize processes that allow for binding of vesicles, detection of biosignatures, and other processes.

[0347] A microfluidic device can also be used for isolation of a vesicle through size differential or affinity selection. For example, a microfluidic device can use one more channels for isolating a vesicle from a biological sample based on size or by using one or more binding agents for isolating a vesicle from a biological sample. A biological sample can be introduced into one or more microfluidic channels, which selectively allows the passage of a vesicle. The selection can be based on a property of the vesicle, such as the size, shape, deformability, or biosignature of the vesicle.

[0348] In one embodiment, a heterogeneous population of vesicles can be introduced into a microfluidic device, and one or more different homogeneous populations of vesicles can be obtained. For example, different channels can have different size selections or binding agents to select for different vesicle populations. Thus, a microfluidic device can isolate a plurality of vesicles wherein at least a subset of the plurality of vesicles comprises a different biosignature from another subset of the plurality of vesicles. For example, the microfluidic device can isolate at least 2, 3, 4, 5, 6, 7, 8, 9, 10, 15, 20, 25, 30, 40, 50, 60, 70, 80, 90, or 100 different subsets of vesicles, wherein each subset of vesicles comprises a different biosignature.

[0349] In some embodiments, the microfluidic device can comprise one or more channels that permit further enrichment or selection of a vesicle. A population of vesicles that has been enriched after passage through a first channel can be introduced into a second channel, which allows the passage of the desired vesicle or vesicle population to be further enriched, such as through one or more binding agents present in the second channel.

[0350] Array-based assays and bead-based assays can be used with microfluidic device. For example, the binding agent can be coupled to beads and the binding reaction between the beads and vesicle can be performed in a microfluidic device. Multiplexing can also be performed using a microfluidic device. Different compartments can comprise different binding agents for different populations of vesicles, where each population is of a different cell-of-origin specific vesicle population. In one embodiment, each population has a different biosignature. The hybridization reaction between the microsphere and vesicle can be performed in a microfluidic device and the reaction mixture can be delivered to a detection device. The detection device, such as a dual or multiple laser detection system can be part of the microfluidic system and can use a laser to identify each bead or microsphere by its color-coding, and another laser can detect the hybridization signal associated with each bead.

[0351] Various microfluidic devices and methods are described above.

[0352] Combined Isolation Methodology

[0353] One of skill will appreciate that various methods of sample treatment and isolating and concentrating circulating biomarkers such as vesicles can be combined as desired. For example, a biological sample can be treated to prevent aggregation, remove undesired particulate and/or deplete highly abundant proteins. The steps used can be chosen to optimize downstream analysis steps. Next, biomarkers such as vesicles can be isolated, e.g., by chromotography, centrifugation, density gradient, filtration, precipitation, or affinity techniques. Any number of the later steps can be combined, e.g., a sample could be subjected to one or more of chromotography, centrifugation, density gradient, filtration and precipitation in order to isolate or concentrate all or most microvesicles. In a subsequent step, affinity techniques, e.g., using binding agents to one or more target of interest, can be used to isolate or identify microvesicles carrying desired biomarker profiles. Microfluidic systems can be employed to perform some or all of these steps.

[0354] An exemplary yet non-limiting isolation scheme for isolating and analysis of microvesicles includes the following: Plasma or serum collection->highly abundant protein removal->ultrafiltration->nanomembrane concentration->flow cytometry or particle-based assay.

[0355] Using the methods disclosed herein or known in the art, circulating biomarkers such as vesicles can be isolated or concentrated by at least about 2-fold, 3-fold, 1-fold, 2-fold, 3-fold, 4-fold, 5-fold, 6-fold, 7-fold, 8-fold, 9-fold, 10-fold, 12-fold, 15-fold, 20-fold, 25-fold, 30-fold, 35-fold, 40-fold, 45-fold, 50-fold, 55-fold, 60-fold, 65-fold, 70-fold, 75-fold, 80-fold, 90-fold, 95-fold, 100-fold, 110-fold, 120-fold, 125-fold, 130-fold, 140-fold, 150-fold, 160-fold, 170-fold, 175-fold, 180-fold, 190-fold, 200-fold, 225-fold, 250-fold, 275-fold, 300-fold, 325-fold, 350-fold, 375-fold, 400-fold, 425-fold, 450-fold, 475-fold, 500-fold, 525-fold, 550-fold, 575-fold, 600-fold, 625-fold, 650-fold, 675-fold, 700-fold, 725-fold, 750-fold, 775-fold, 800-fold, 825-fold, 850-fold, 875-fold, 900-fold, 925-fold, 950-fold, 975-fold, 1000-fold, 1500-fold, 2000-fold, 2500-fold, 3000-fold, 4000-fold, 5000-fold, 6000-fold, 7000-fold, 8000-fold, 9000-fold, or at least 10,000-fold. In some embodiments, the vesicles are isolated or concentrated by at least 1 order of magnitude, 2 orders of magnitude, 3 orders of magnitude, 4 orders of magnitude, 5 orders of magnitude, 6 orders of magnitude, 7 orders of magnitude, 8 orders of magnitude, 9 orders of magnitude, or 10 orders of magnitude or more.

[0356] Once concentrated or isolated, the circulating biomarkers can be assessed, e.g., in order to characterize a phenotype as described herein. In some embodiments, the concentration or isolation steps themselves shed light on the phenotype of interest. For example, affinity methods can detect the presence or level of specific biomarkers of interest.

[0357] The various isolation and detection systems described herein can be used to isolate or detect circulating biomarkers such as vesicles that are informative for diagnosis, prognosis, disease stratification, theranosis, prediction of responder/non-responder status, disease monitoring, treatment monitoring and the like as related to such diseases and disorders. Combinations of the isolation techniques are within the scope of the invention. In a non-limiting example, a sample can be run through a chromatography column to isolate vesicles based on a property such as size of electrophoretic motility, and the vesicles can then be passed through a microfluidic device. Binding agents can be used before, during or after these steps.

[0358] The methods and compositions of the invention can be used with microvesicles isolated or detected using such methods as described herein. In various non-limiting examples: an aptamer provided by the methods of the invention can be used as a capture and/or detector agent for a biomarker such as a protein or microvesicle; a sample such as a bodily fluid can be contacted with an oligonucleotide probe library of the invention before microvesicles in the sample are isolated using one or more technique described herein (e.g., chromatography, centrifugation, flow cytometry, filtration, affinity isolation, polymer precipitation, etc); microvesicles in a sample are isolated using one or more technique described herein (e.g., chromatography, centrifugation, flow cytometry, filtration, affinity isolation, polymer precipitation, etc) before contacting the microvesicles with an aptamer or oligonucleotide probe library of the invention. Contaminants such as highly abundant proteins can be removed in whole or in part at any appropriate step in such processes. These and various other useful iterations of such techniques for assessment of microvesicles and other biomarkers are contemplated by the invention.

### Biomarkers

[0359] As described herein, the methods and compositions of the invention can be used in assays to detect the presence or level of one or more biomarker of interest. The biomarker can be any useful biomarker disclosed herein or known to those of skill in the art. In an embodiment, the biomarker comprises a protein or polypeptide. As used herein, “protein,” “polypeptide” and “peptide” are used interchangeably unless stated otherwise. The biomarker can be a nucleic acid, including DNA, RNA, and various subspecies of any thereof as disclosed herein or known in the art. The biomarker can comprise a lipid. The biomarker can comprise a carbohydrate. The biomarker can also be a complex, e.g., a complex comprising protein, nucleic acids, lipids and/or carbohydrates. In some embodiments, the biomarker comprises a microvesicle. In an embodiment, the invention provides a method wherein a pool of aptamers is used to assess the presence and/or level of a population of microvesicles of interest without knowing the precise microvesicle antigen targeted by each member of the pool. See, e.g., FIGS. 16B-C. In other cases, biomarkers associated with microvesicles are assessed according to the methods of the invention. See, e.g., FIGS. 2A-2F; FIG. 16A.

[0360] A biosignature comprising more than one biomarker can comprise one type of biomarker or multiple types of biomarkers. As a non-limiting example, a biosignature can comprise multiple proteins, multiple nucleic acids, multiple lipids, multiple carbohydrates, multiple biomarker complexes, multiple microvesicles, or a combination of any thereof. For example, the biosignature may comprise one or more microvesicle, one or more protein, and one or more microRNA, wherein the one or more protein and/or one or more microRNA is optionally in association with the microvesicle as a surface antigen and/or payload, as appropriate.

[0361] In some embodiments, vesicles are detected using vesicle surface antigens. A commonly expressed vesicle surface antigen can be referred to as a “housekeeping protein,” or general vesicle biomarker. The biomarker can be CD63, CD9, CD81, CD82, CD37, CD53, Rab-5b, Annexin V or MFG-E8. Tetraspanins, a family of membrane proteins with four transmembrane domains, can be used as general vesicle biomarkers. The tetraspanins include CD151, CD53, CD37, CD82, CD81, CD9 and CD63. There have been over 30 tetraspanins identified in mammals, including the TSPAN1 (TSP-1), TSPAN2 (TSP-2), TSPAN3 (TSP-3), TSPAN4 (TSP-4, NAG-2), TSPAN5 (TSP-5), TSPAN6 (TSP-6), TSPAN7 (CD231, TALLA-1, A15), TSPAN8 (CO-029), TSPAN9 (NET-5), TSPAN10 (Oculospanin), TSPAN11 (CD151-like), TSPAN12 (NET-2), TSPAN13 (NET-6), TSPAN14, TSPAN15 (NET-7), TSPAN16 (TM4-B), TSPAN17, TSPAN18, TSPAN19, TSPAN20 (UP1b, UPK1B), TSPAN21 (UP1a, UPK1A), TSPAN22 (RDS, PRPH2), TSPAN23 (ROM1), TSPAN24 (CD151), TSPAN25 (CD53), TSPAN26 (CD37), TSPAN27 (CD82), TSPAN28 (CD81), TSPAN29 (CD9), TSPAN30 (CD63), TSPAN31 (SAS), TSPAN32 (TSSC6), TSPAN33, and TSPAN34. Other commonly observed vesicle markers include those listed in Table 3. One or more of these proteins can be useful biomarkers for the characterizing a phenotype using the subject methods and compositions.

TABLE 3
Proteins Observed in Vesicles from Multiple Cell Types

| Class | Protein |
|---|---|
| Antigen Presentation | MHC class I, MHC class II, Integrins, Alpha 4 beta 1, Alpha M beta 2, |
| | Beta 2 |
| Immunoglobulin family | ICAM1/CD54, P-selection |
| Cell-surface peptidases | Dipeptidylpeptidase IV/CD26, Aminopeptidase n/CD13 |
| Tetraspanins | CD151, CD53, CD37, CD82, CD81, CD9 and CD63 |
| Heat-shock proteins | Hsp70, Hsp84/90 |
| Cytoskeletal proteins | Actin, Actin-binding proteins, Tubulin |
| Membrane transport | Annexin I, Annexin II, Annexin IV, Annexin V, Annexin VI, |
| and fusion | RAB7/RAP1B/RADGDI |
| Signal transduction | Gi2alpha/14-3-3, CBL/LCK |
| Abundant membrane | CD63, GAPDH, CD9, CD81, ANXA2, ENO1, SDCBP, MSN, MFGE8, |
| proteins | EZR, GK, ANXA1, LAMP2, DPP4, TSG101, HSPA1A, GDI2, CLTC, |
| | LAMP1, Cd86, ANPEP, TFRC, SLC3A2, RDX, RAP1B, RAB5C, |
| | RAB5B, MYH9, ICAM1, FN1, RAB11B, PIGR, LGALS3, ITGB1, |
| | EHD1, CLIC1, ATP1A1, ARF1, RAP1A, P4HB, MUC1, KRT10, HLA- |
| | A, FLOT1, CD59, C1orf58, BASP1, TACSTD1, STOM |
| Other Transmembrane | Cadherins: CDH1, CDH2, CDH12, CDH3, Deomoglein, DSG1, DSG2, |
| Proteins | DSG3, DSG4, Desmocollin, DSC1, DSC2, DSC3, Protocadherins, |
| | PCDH1, PCDH10, PCDH11x, PCDH11y, PCDH12, FAT, FAT2, FAT4, |
| | PCDH15, PCDH17, PCDH18, PCDH19; PCDH20; PCDH7, PCDH8, |
| | PCDH9, PCDHA1, PCDHA10, PCDHA11, PCDHA12, PCDHA13, |
| | PCDHA2, PCDHA3, PCDHA4, PCDHA5, PCDHA6, PCDHA7, |
| | PCDHA8, PCDHA9, PCDHAC1, PCDHAC2, PCDHB1, PCDHB10, |
| | PCDHB11, PCDHB12, PCDHB13, PCDHB14, PCDHB15, PCDHB16, |
| | PCDHB17, PCDHB18, PCDHB2, PCDHB3, PCDHB4, PCDHB5, |
| | PCDHB6, PCDHB7, PCDHB8, PCDHB9, PCDHGA1, PCDHGA10, |
| | PCDHGA11, PCDHGA12, PCDHGA2; PCDHGA3, PCDHGA4, |
| | PCDHGA5, PCDHGA6, PCDHGA7, PCDHGA8, PCDHGA9, |
| | PCDHGB1, PCDHGB2, PCDHGB3, PCDHGB4, PCDHGB5, |
| | PCDHGB6, PCDHGB7, PCDHGC3, PCDHGC4, PCDHGC5, CDH9 |
| | (cadherin 9, type 2 (T1-cadherin)), CDH10 (cadherin 10, type 2 (T2- |
| | cadherin)), CDH5 (VE-cadherin (vascular endothelial)), CDH6 (K- |
| | cadherin (kidney)), CDH7 (cadherin 7, type 2), CDH8 (cadherin 8, type |
| | 2), CDH11 (OB-cadherin (osteoblast)), CDH13 (T-cadherin-H-cadherin |
| | (heart)), CDH15 (M-cadherin (myotubule)), CDH16 (KSP-cadherin), |
| | CDH17 (LI cadherin (liver-intestine)), CDH18 (cadherin 18, type 2), |
| | CDH19 (cadherin 19, type 2), CDH20 (cadherin 20, type 2), CDH23 |
| | (cadherin 23, (neurosensory epithelium)), CDH10, CDH11, CDH13, |
| | CDH15, CDH16, CDH17, CDH18, CDH19, CDH20, CDH22, CDH23, |
| | CDH24, CDH26, CDH28, CDH4, CDH5, CDH6, CDH7, CDH8, CDH9, |
| | CELSR1, CELSR2, CELSR3, CLSTN1, CLSTN2, CLSTN3, DCHS1, |
| | DCHS2, LOC389118, PCLKC, RESDA1, RET |

[0362] Any of the types of biomarkers described herein can be used and/or assessed via the subject methods and compositions. Exemplary biomarkers include without limitation those in Table 4. The markers can be detected as protein or as mRNA, which can be circulating freely or in a complex with other biological molecules. As appropriate, the markers in Table 4 can also be used for capture and/or detection of vesicles for characterizing phenotypes as disclosed herein. In some cases, multiple capture and/or detectors are used to enhance the characterization. See, e.g., FIGS. 2D-E. The markers can be detected as vesicle surface antigens and/or vesicle payload. The “Illustrative Class” indicates indications for which the markers are known markers. Those of skill will appreciate that the markers can also be used in alternate settings in certain instances. For example, a marker which can be used to characterize one type disease may also be used to characterize another disease as appropriate. Consider a non-limiting example of a tumor marker which can be used as a biomarker for tumors from various lineages. The biomarker references in Table 4 are those commonly used in the art. Gene aliases and descriptions can be found using a variety of online databases, including GeneCards® (www.genecards.org), HUGO Gene Nomenclature (www.genenames.org), Entrez Gene (www.ncbi.nlm.nih.gov/entrez/query.fcgi?db=gene), UniProtKB/Swiss-Prot (www.uniprot.org), UniProtKB/TrEMBL (www.uniprot.org), OMIM (www.ncbi.nlm.nih.gov/entrez/query.fcgi?db=OMIM), GeneLoc (genecards.weizmann.ac.il/geneloc/), and Ensembl (www.ensembl.org). Generally, gene symbols and names below correspond to those approved by HUGO, and protein names are those recommended by UniProtKB/Swiss-Prot. Common alternatives are provided as well. In some cases, biomarkers are referred to by Ensembl reference numbers, which are of the form “ENSG” followed by a number, e.g., ENSG00000005893 which corresponds to LAMP2. In Table 4, solely for sake of brevity, “E.” is sometimes used to represent “ENSG00000”. For example, “E.005893 represents “ENSG00000005893.” Where a protein name indicates a precursor, the mature protein is also implied. Throughout the application, gene and protein symbols may be used interchangeably and the meaning can be derived from context as necessary.

TABLE 4
Illustrative Biomarkers

| Illustrative | |
|---|---|
| Class | Biomarkers |
| Drug associated | ABCC1, ABCG2, ACE2, ADA, ADH1C, ADH4, AGT, AR, AREG, ASNS, BCL2, |
| targets and | BCRP, BDCA1, beta III tubulin, BIRC5, B-RAF, BRCA1, BRCA2, CA2, caveolin, |
| prognostic | CD20, CD25, CD33, CD52, CDA, CDKN2A, CDKN1A, CDKN1B, CDK2, |
| markers | CDW52, CES2, CK 14, CK 17, CK 5/6, c-KIT, c-Met, c-Myc, COX-2, Cyclin D1, |
| | DCK, DHFR, DNMT1, DNMT3A, DNMT3B, E-Cadherin, ECGF1, EGFR, EML4- |
| | ALK fusion, EPHA2, Epiregulin, ER, ERBR2, ERCC1, ERCC3, EREG, ESR1, |
| | FLT1, folate receptor, FOLR1, FOLR2, FSHB, FSHPRH1, FSHR, FYN, GART, |
| | GNA11, GNAQ, GNRH1, GNRHR1, GSTP1, HCK, HDAC1, hENT-1, Her2/Neu, |
| | HGF, HIF1A, HIG1, HSP90, HSP90AA1, HSPCA, IGF-1R, IGFRBP, IGFRBP3, |
| | IGFRBP4, IGFRBP5, IL13RA1, IL2RA, KDR, Ki67, KIT, K-RAS, LCK, LTB, |
| | Lymphotoxin Beta Receptor, LYN, MET, MGMT, MLH1, MMR, MRP1, MS4A1, |
| | MSH2, MSH5, Myc, NFKB1, NFKB2, NFKBIA, NRAS, ODC1, OGFR, p16, p21, |
| | p27, p53, p95, PARP-1, PDGFC, PDGFR, PDGFRA, PDGFRB, PGP, PGR, PI3K, |
| | POLA, POLA1, PPARG, PPARGC1, PR, PTEN, PTGS2, PTPN12, RAF1, RARA, |
| | ROS1, RRM1, RRM2, RRM2B, RXRB, RXRG, SIK2, SPARC, SRC, SSTR1, |
| | SSTR2, SSTR3, SSTR4, SSTR5, Survivin, TK1, TLE3, TNF, TOP1, TOP2A, |
| | TOP2B, TS, TUBB3, TXN, TXNRD1, TYMS, VDR, VEGF, VEGFA, VEGFC, |
| | VHL, YES1, ZAP70 |
| Drug associated | ABL1, STK11, FGFR2, ERBB4, SMARCB1, CDKN2A, CTNNB1, FGFR1, FLT3, |
| targets and | NOTCH1, NPM1, SRC, SMAD4, FBXW7, PTEN, TP53, AKT1, ALK, APC, |
| prognostic | CDH1, C-Met, HRAS, IDH1, JAK2, MPL, PDGFRA, SMO, VHL, ATM, CSF1R, |
| markers | FGFR3, GNAS, ERBB2, HNF1A, JAK3, KDR, MLH1, PTPN11, RB1, RET, c-Kit, |
| | EGFR, PIK3CA, NRAS, GNA11, GNAQ, KRAS, BRAF |
| Drug associated | ALK, AR, BRAF, cKIT, cMET, EGFR, ER, ERCC1, GNA11, HER2, IDH1, KRAS, |
| targets and | MGMT, MGMT promoter methylation, NRAS, PDGFRA, Pgp, PIK3CA, PR, |
| prognostic | PTEN, ROS1, RRM1, SPARC, TLE3, TOP2A, TOPO1, TS, TUBB3, VHL |
| markers | |
| Drug associated | ABL1, AKT1, ALK, APC, AR, ATM, BRAF, BRAF, BRCA1, BRCA2, CDH1, |
| targets | cKIT, cMET, CSF1R, CTNNB1, EGFR, EGFR (H-score), EGFRvIII, ER, ERBB2 |
| | (HER2), ERBB4, ERCC1, FBXW7, FGFR1, FGFR2, FLT3, GNA11, GNAQ, |
| | GNAS, HER2, HNF1A, HRAS, IDH1, IDH2, JAK2, JAK3, KDR (VEGFR2), |
| | KRAS, MGMT, MGMT Promoter Methylation, microsatellite instability (MSI), |
| | MLH1, MPL, MSH2, MSH6, NOTCH1, NPM1, NRAS, PD-1, PDGFRA, PD-L1, |
| | Pgp, PIK3CA, PMS2, PR, PTEN, PTPN11, RB1, RET, ROS1, RRM1, SMAD4, |
| | SMARCB1, SMO, SPARC, STK11, TLE3, TOP2A, TOPO1, TP53, TS, TUBB3, |
| | VHL |
| Drug associated | 1p19q co-deletion, ABL1, AKT1, ALK, APC, AR, ARAF, ATM, BAP1, BRAF, |
| targets | BRCA1, BRCA2, CDH1, CHEK1, CHEK2, cKIT, cMET, CSF1R, CTNNB1, |
| | DDR2, EGFR, EGFRvIII, ER, ERBB2 (HER2), ERBB3, ERBB4, ERCC1, FBXW7, |
| | FGFR1, FGFR2, FLT3, GNA11, GNAQ, GNAS, H3K36me3, HER2, HNF1A, |
| | HRAS, IDH1, IDH2, JAK2, JAK3, KDR (VEGFR2), KRAS, MDMT, MGMT, |
| | MGMT Methylation, Microsatellite instability, MLH1, MPL, MSH2, MSH6, NF1, |
| | NOTCH1, NPM1, NRAS, NY-ESO-1, PD-1, PDGFRA, PD-L1, Pgp, PIK3CA, |
| | PMS2, PR, PTEN, PTPN11, RAF1, RB1, RET, ROS1, ROS1, RRM1, SMAD4, |
| | SMARCB1, SMO, SPARC, STK11, TLE3, TOP2A, TOPO1, TP53, TRKA, TS, |
| | TUBB3, VHL, WT1 |
| Drug associated | ABL1, AKT1, ALK, APC, AR, ATM, BRAF, BRAF, BRCA1, BRCA2, CDH1, |
| targets | cKIT, cMET, CSF1R, CTNNB1, EGFR, EGFR (H-score), EGFRvIII, ER, ERBB2 |
| | (HER2), ERBB4, ERCC1, FBXW7, FGFR1, FGFR2, FLT3, GNA11, GNAQ, |
| | GNAS, HER2, HNF1A, HRAS, IDH1, IDH2, JAK2, JAK3, KDR (VEGFR2), |
| | KRAS, MGMT, MGMT Promoter Methylation, microsatellite instability (MSI), |
| | MLH1, MPL, MSH2, MSH6, NOTCH1, NPM1, NRAS, PD-1, PDGFRA, PD-L1, |
| | Pgp, PIK3CA, PMS2, PR, PTEN, PTPN11, RB1, RET, ROS1, RRM1, SMAD4, |
| | SMARCB1, SMO, SPARC, STK11, TLE3, TOP2A, TOPO1, TP53, TS, TUBB3, |
| | VHL |
| Drug associated | TOP2A, Chromosome 17 alteration, PBRM1 (PB1/BAF180), BAP1, SETD2 (ANTI- |
| targets | HISTONE H3), MDM2, Chromosome 12 alteration, ALK, CTLA4, CD3, NY-ESO- |
| | 1, MAGE-A, TP, EGFR |
| 5-aminosalicyclic | μ-protocadherin, KLF4, CEBPα |
| acid (5-ASA) | |
| efficacy | |
| Cancer treatment | AR, AREG (Amphiregulin), BRAF, BRCA1, cKIT, cMET, EGFR, EGFR |
| associated | w/T790M, EML4-ALK, ER, ERBB3, ERBB4, ERCC1, EREG, GNA11, GNAQ, |
| markers | hENT-1, Her2, Her2 Exon 20 insert, IGF1R, Ki67, KRAS, MGMT, MGMT |
| | methylation, MSH2, MSI, NRAS, PGP (MDR1), PIK3CA, PR, PTEN, ROS1, ROS1 |
| | translocation, RRM1, SPARC, TLE3, TOPO1, TOPO2A, TS, TUBB3, VEGFR2 |
| Cancer treatment | AR, AREG, BRAF, BRCA1, cKIT, cMET, EGFR, EGFR w/T790M, EML4-ALK, |
| associated | ER, ERBB3, ERBB4, ERCC1, EREG, GNA11, GNAQ, Her2, Her2 Exon 20 insert, |
| markers | IGFR1, Ki67, KRAS, MGMT-Me, MSH2, MSI, NRAS, PGP (MDR-1), PIK3CA, |
| | PR, PTEN, ROS1 translocation, RRM1, SPARC, TLE3, TOPO1, TOPO2A, TS, |
| | TUBB3, VEGFR2 |
| Colon cancer | AREG, BRAF, EGFR, EML4-ALK, ERCC1, EREG, KRAS, MSI, NRAS, PIK3CA, |
| treatment | PTEN, TS, VEGFR2 |
| associated | |
| markers | |
| Colon cancer | AREG, BRAF, EGFR, EML4-ALK, ERCC1, EREG, KRAS, MSI, NRAS, PIK3CA, |
| treatment | PTEN, TS, VEGFR2 |
| associated | |
| markers | |
| Melanoma | BRAF, cKIT, ERBB3, ERBB4, ERCC1, GNA11, GNAQ, MGMT, MGMT |
| treatment | methylation, NRAS, PIK3CA, TUBB3, VEGFR2 |
| associated | |
| markers | |
| Melanoma | BRAF, cKIT, ERBB3, ERBB4, ERCC1, GNA11, GNAQ, MGMT-Me, NRAS, |
| treatment | PIK3CA, TUBB3, VEGFR2 |
| associated | |
| markers | |
| Ovarian cancer | BRCA1, cMET, EML4-ALK, ER, ERBB3, ERCC1, KENT-1, HER2, IGF1R, |
| treatment | PGP(MDR1), PIK3CA, PR, PTEN, RRM1, TLE3, TOPO1, TOPO2A, TS |
| associated | |
| markers | |
| Ovarian cancer | BRCA1, cMET, EML4-ALK (translocation), ER, ERBB3, ERCC1, HER2, PIK3CA, |
| treatment | PR, PTEN, RRM1, TLE3, TS |
| associated | |
| markers | |
| Breast cancer | BRAF, BRCA1, EGFR, EGFR T790M, EML4-ALK, ER, ERBB3, ERCC1, HER2, |
| treatment | Ki67, PGP (MDR1), PIK3CA, PR, PTEN, ROS1, ROS1 translocation, RRM1, |
| associated | TLE3, TOPO1, TOPO2A, TS |
| markers | |
| Breast cancer | BRAF, BRCA1, EGFR w/T790M, EML4-ALK, ER, ERBB3, ERCC1, HER2, Ki67, |
| treatment | KRAS, PIK3CA, PR, PTEN, ROS1 translocation, RRM1, TLE3, TOPO1, TOPO2A, |
| associated | TS |
| markers | |
| NSCLC cancer | BRAF, BRCA1, cMET, EGFR, EGFR w/T790M, EML4-ALK, ERCC1, Her2 Exon |
| treatment | 20 insert, KRAS, MSH2, PIK3CA, PTEN, ROS1 (trans), RRM1, TLE3, TS, |
| associated | VEGFR2 |
| markers | |
| NSCLC cancer | BRAF, cMET, EGFR, EGFR w/T790M, EML4-ALK, ERCC1, Her2 Exon 20 insert, |
| treatment | KRAS, MSH2, PIK3CA, PTEN, ROS1 translocation, RRM1, TLE3, TS |
| associated | |
| markers | |
| Mutated in | AKT1, ALK, APC, ATM, BRAF, CDH1, CDKN2A, c-Kit, C-Met, CSF1R, |
| cancers | CTNNB1, EGFR, ERBB2, ERBB4, FBXW7, FGFR1, FGFR2, FGFR3, FLT3, |
| | GNA11, GNAQ, GNAS, HNF1A, HRAS, IDH1, JAK2, JAK3, KDR, KRAS, |
| | MLH1, MPL, NOTCH1, NPM1, NRAS, PDGFRA, PIK3CA, PTEN, PTPN11, RB1, |
| | RET, SMAD4, SMARCB1, SMO, SRC, STK11, TP53, VHL |
| Mutated in | ALK, BRAF, BRCA1, BRCA2, EGFR, ERRB2, GNA11, GNAQ, IDH1, IDH2, |
| cancers | KIT, KRAS, MET, NRAS, PDGFRA, PIK3CA, PTEN, RET, SRC, TP53 |
| Mutated in | AKT1, HRAS, GNAS, MEK1, MEK2, ERK1, ERK2, ERBB3, CDKN2A, PDGFRB, |
| cancers | IFG1R, FGFR1, FGFR2, FGFR3, ERBB4, SMO, DDR2, GRB1, PTCH, SHH, PD1, |
| | UGT1A1, BIM, ESR1, MLL, AR, CDK4, SMAD4 |
| Mutated in | ABL, APC, ATM, CDH1, CSFR1, CTNNB1, FBXW7, FLT3, HNF1A, JAK2, |
| cancers | JAK3, KDR, MLH1, MPL, NOTCH1, NPM1, PTPN11, RB1, SMARCB1, STK11, |
| | VHL |
| Mutated in | ABL1, AKT1, AKT2, AKT3, ALK, APC, AR, ARAF, ARFRP1, ARID1A, ARID2, |
| cancers | ASXL1, ATM, ATR, ATRX, AURKA, AURKB, AXL, BAP1, BARD1, BCL2, |
| | BCL2L2, BCL6, BCOR, BCORL1, BLM, BRAF, BRCA1, BRCA2, BRIP1, BTK, |
| | CARD11, CBFB, CBL, CCND1, CCND2, CCND3, CCNE1, CD79A, CD79B, |
| | CDC73, CDH1, CDK12, CDK4, CDK6, CDK8, CDKN1B, CDKN2A, CDKN2B, |
| | CDKN2C, CEBPA, CHEK1, CHEK2, CIC, CREBBP, CRKL, CRLF2, CSF1R, |
| | CTCF, CTNNA1, CTNNB1, DAXX, DDR2, DNMT3A, DOT1L, EGFR, EMSY |
| | (C11orf30), EP300, EPHA3, EPHA5, EPHB1, ERBB2, ERBB3, ERBB4, ERG, |
| | ESR1, EZH2, FAM123B (WTX), FAM46C, FANCA, FANCC, FANCD2, FANCE, |
| | FANCF, FANCG, FANCL, FBXW7, FGF10, FGF14, FGF19, FGF23, FGF3, FGF4, |
| | FGF6, FGFR1, FGFR2, FGFR3, FGFR4, FLT1, FLT3, FLT4, FOXL2, GATA1, |
| | GATA2, GATA3, GID4 (C17orf39), GNA11, GNA13, GNAQ, GNAS, GPR124, |
| | GRIN2A, GSK3B, HGF, HRAS, IDH1, IDH2, IGF1R, IKBKE, IKZF1, IL7R, |
| | INHBA, IRF4, IRS2, JAK1, JAK2, JAK3, JUN, KAT6A (MYST3), KDM5A, |
| | KDM5C, KDM6A, KDR, KEAP1, KIT, KLHL6, KRAS, LRP1B, MAP2K1, |
| | MAP2K2, MAP2K4, MAP3K1, MCL1, MDM2, MDM4, MED12, MEF2B, MEN1, |
| | MET, MITF, MLH1, MLL, MLL2, MPL, MRE11A, MSH2, MSH6, MTOR, |
| | MUTYH, MYC, MYCL1, MYCN, MYD88, NF1, NF2, NFE2L2, NFKBIA, NKX2- |
| | 1, NOTCH1, NOTCH2, NPM1, NRAS, NTRK1, NTRK2, NTRK3, NUP93, PAK3, |
| | PALB2, PAX5, PBRM1, PDGFRA, PDGFRB, PDK1, PIK3CA, PIK3CG, PIK3R1, |
| | PIK3R2, PPP2R1A, PRDM1, PRKAR1A, PRKDC, PTCH1, PTEN, PTPN11, |
| | RAD50, RAD51, RAF1, RARA, RB1, RET, RICTOR, RNF43, RPTOR, RUNX1, |
| | SETD2, SF3B1, SMAD2, SMAD4, SMARCA4, SMARCB1, SMO, SOCS1, |
| | SOX10, SOX2, SPEN, SPOP, SRC, STAG2, STAT4, STK11, SUFU, TET2, |
| | TGFBR2, TNFAIP3, TNFRSF14, TOP1, TP53, TSC1, TSC2, TSHR, VHL, WISP3, |
| | WT1, XPO1, ZNF217, ZNF703 |
| Gene | ALK, BCR, BCL2, BRAF, EGFR, ETV1, ETV4, ETV5, ETV6, EWSR1, MLL, |
| rearrangement in | MYC, NTRK1, PDGFRA, RAF1, RARA, RET, ROS1, TMPRSS2 |
| cancer | |
| Cancer Related | ABL1, ACE2, ADA, ADH1C, ADH4, AGT, AKT1, AKT2, AKT3, ALK, APC, AR, |
| | ARAF, AREG, ARFRP1, ARID1A, ARID2, ASNS, ASXL1, ATM, ATR, ATRX, |
| | AURKA, AURKB, AXL, BAP1, BARD1, BCL2, BCL2L2, BCL6, BCOR, |
| | BCORL1, BCR, BIRC5 (survivin), BLM, BRAF, BRCA1, BRCA2, BRIP1, BTK, |
| | CA2, CARD11, CAV, CBFB, CBL, CCND1, CCND2, CCND3, CCNE1, CD33, |
| | CD52 (CDW52), CD79A, CD79B, CDC73, CDH1, CDK12, CDK2, CDK4, CDK6, |
| | CDK8, CDKN1B, CDKN2A, CDKN2B, CDKN2C, CEBPA, CES2, CHEK1, |
| | CHEK2, CIC, CREBBP, CRKL, CRLF2, CSF1R, CTCF, CTNNA1, CTNNB1, |
| | DAXX, DCK, DDR2, DHFR, DNMT1, DNMT3A, DNMT3B, DOT1L, EGFR, |
| | EMSY (C11orf30), EP300, EPHA2, EPHA3, EPHA5, EPHB1, ERBB2, ERBB3, |
| | ERBB4, ERBR2 (typo?), ERCC3, EREG, ERG, ESR1, ETV1, ETV4, ETV5, ETV6, |
| | EWSR1, EZH2, FAM123B (WTX), FAM46C, FANCA, FANCC, FANCD2, |
| | FANCE, FANCF, FANCG, FANCL, FBXW7, FGF10, FGF14, FGF19, FGF23, |
| | FGF3, FGF4, FGF6, FGFR1, FGFR2, FGFR3, FGFR4, FLT1, FLT3, FLT4, FOLR1, |
| | FOLR2, FOXL2, FSHB, FSHPRH1, FSHR, GART, GATA1, GATA2, GATA3, |
| | GID4 (C17orf39), GNA11, GNA13, GNAQ, GNAS, GNRH1, GNRHR1, GPR124, |
| | GRIN2A, GSK3B, GSTP1, HDAC1, HGF, HIG1, HNF1A, HRAS, HSPCA |
| | (HSP90), IDH1, IDH2, IGF1R, IKBKE, IKZF1, IL13RA1, IL2, IL2RA (CD25), |
| | IL7R, INHBA, IRF4, IRS2, JAK1, JAK2, JAK3, JUN, KAT6A (MYST3), KDM5A, |
| | KDM5C, KDM6A, KDR (VEGFR2), KEAP1, KIT, KLHL6, KRAS, LCK, LRP1B, |
| | LTB, LTBR, MAP2K1, MAP2K2, MAP2K4, MAP3K1, MAPK, MCL1, MDM2, |
| | MDM4, MED12, MEF2B, MEN1, MET, MGMT, MITF, MLH1, MLL, MLL2, |
| | MPL, MRE11A, MS4A1 (CD20), MSH2, MSH6, MTAP, MTOR, MUTYH, MYC, |
| | MYCL1, MYCN, MYD88, NF1, NF2, NFE2L2, NFKB1, NFKB2, NFKBIA, NGF, |
| | NKX2-1, NOTCH1, NOTCH2, NPM1, NRAS, NTRK1, NTRK2, NTRK3, NUP93, |
| | ODC1, OGFR, PAK3, PALB2, PAX5, PBRM1, PDGFC, PDGFRA, PDGFRB, |
| | PDK1, PGP, PGR (PR), PIK3CA, PIK3CG, PIK3R1, PIK3R2, POLA, PPARG, |
| | PPARGC1, PPP2R1A, PRDM1, PRKAR1A, PRKDC, PTCH1, PTEN, PTPN11, |
| | RAD50, RAD51, RAF1, RARA, RB1, RET, RICTOR, RNF43, ROS1, RPTOR, |
| | RRM1, RRM2, RRM2B, RUNX1, RXR, RXRB, RXRG, SETD2, SF3B1, SMAD2, |
| | SMAD4, SMARCA4, SMARCB1, SMO, SOCS1, SOX10, SOX2, SPARC, SPEN, |
| | SPOP, SRC, SST, SSTR1, SSTR2, SSTR3, SSTR4, SSTR5, STAG2, STAT4, |
| | STK11, SUFU, TET2, TGFBR2, TK1, TLE3, TMPRSS2, TNF, TNFAIP3, |
| | TNFRSF14, TOP1, TOP2, TOP2A, TOP2B, TP53, TS, TSC1, TSC2, TSHR, |
| | TUBB3, TXN, TYMP, VDR, VEGF (VEGFA), VEGFC, VHL, WISP3, WT1, XDH, |
| | XPO1, YES1, ZAP70, ZNF217, ZNF703 |
| Cytohesions | cytohesin-1 (CYTH1), cytohesin-2 (CYTH2; ARNO), cytohesin-3 (CYTH3; Grp1; |
| | ARNO3), cytohesin-4 (CYTH4) |
| Cancer/Angio | Erb 2, Erb 3, Erb 4, UNC93a, B7H3, MUC1, MUC2, MUC16, MUC17, 5T4, |
| | RAGE, VEGF A, VEGFR2, FLT1, DLL4, Epcam |
| Tissue (Breast) | BIG H3, GCDFP-15, PR(B), GPR 30, CYFRA 21, BRCA 1, BRCA 2, ESR 1, ESR2 |
| Tissue (Prostate) | PSMA, PCSA, PSCA, PSA, TMPRSS2 |
| Inflammation/Immune | MFG-E8, IFNAR, CD40, CD80, MICB, HLA-DRb, IL-17-Ra |
| Common vesicle | HSPA8, CD63, Actb, GAPDH, CD9, CD81, ANXA2, HSP90AA1, ENO1, |
| markers | YWHAZ, PDCD6IP, CFL1, SDCBP, PKN2, MSN, MFGE8, EZR, YWHAG, PGK1, |
| | EEF1A1, PPIA, GLC1F, GK, ANXA6, ANXA1, ALDOA, ACTG1, TPI1, LAMP2, |
| | HSP90AB1, DPP4, YWHAB, TSG101, PFN1, LDHB, HSPA1B, HSPA1A, GSTP1, |
| | GNAI2, GDI2, CLTC, ANXA5, YWHAQ, TUBA1A, THBS1, PRDX1, LDHA, |
| | LAMP1, CLU, CD86 |
| Common vesicle | CD63, GAPDH, CD9, CD81, ANXA2, ENO1, SDCBP, MSN, MFGE8, EZR, GK, |
| membrane | ANXA1, LAMP2, DPP4, TSG101, HSPA1A, GDI2, CLTC, LAMP1, CD86, |
| markers | ANPEP, TFRC, SLC3A2, RDX, RAP1B, RAB5C, RAB5B, MYH9, ICAM1, FN1, |
| | RAB11B, PIGR, LGALS3, ITGB1, EHD1, CLIC1, ATP1A1, ARF1, RAP1A, |
| | P4HB, MUC1, KRT10, HLA-A, FLOT1, CD59, C1orf58, BASP1, TACSTD1, |
| | STOM |
| Common vesicle | MHC class I, MHC class II, Integrins, Alpha 4 beta 1, Alpha M beta 2, Beta 2, |
| markers | ICAM1/CD54, P-selection, Dipeptidylpeptidase IV/CD26, Aminopeptidase n/CD13, |
| | CD151, CD53, CD37, CD82, CD81, CD9, CD63, Hsp70, Hsp84/90 |
| | Actin, Actin-binding proteins, Tubulin, Annexin I, Annexin II, Annexin IV, Annexin |
| | V, Annexin VI, RAB7/RAP1B/RADGDI, Gi2alpha/14-3-3, CBL/LCK, CD63, |
| | GAPDH, CD9, CD81, ANXA2, ENO1, SDCBP, MSN, MFGE8, EZR, GK, |
| | ANXA1, LAMP2, DPP4, TSG101, HSPA1A, GDI2, CLTC, LAMP1, Cd86, |
| | ANPEP, TFRC, SLC3A2, RDX, RAP1B, RAB5C, RAB5B, MYH9, ICAM1, FN1, |
| | RAB11B, PIGR, LGALS3, ITGB1, EHD1, CLIC1, ATP1A1, ARF1, RAP1A, |
| | P4HB, MUC1, KRT10, HLA-A, FLOT1, CD59, C1orf58, BASP1, TACSTD1, |
| | STOM |
| Vesicle markers | A33, a33 n15, AFP, ALA, ALIX, ALP, AnnexinV, APC, ASCA, ASPH (246-260), |
| | ASPH (666-680), ASPH (A-10), ASPH (D01P), ASPH (D03), ASPH (G-20), ASPH |
| | (H-300), AURKA, AURKB, B7H3, B7H4, BCA-225, BCNP, BDNF, BRCA, |
| | CA125 (MUC16), CA-19-9, C-Bir, CD1.1, CD10, CD174 (Lewis y), CD24, CD44, |
| | CD46, CD59 (MEM-43), CD63, CD66e CEA, CD73, CD81, CD9, CDA, CDAC11a2, |
| | CEA, C-Erb2, C-erbB2, CRMP-2, CRP, CXCL12, CYFRA21-1, DLL4, DR3, |
| | EGFR, Epcam, EphA2, EphA2 (H-77), ER, ErbB4, EZH2, FASL, FRT, FRT c.f23, |
| | GDF15, GPCR, GPR30, Gro-alpha, HAP, HBD 1, HBD2, HER 3 (ErbB3), HSP, |
| | HSP70, hVEGFR2, iC3b, IL 6 Unc, IL-1B, IL6 Unc, IL6R, IL8, IL-8, INSIG-2, |
| | KLK2, L1CAM, LAMN, LDH, MACC-1, MAPK4, MART-1, MCP-1, M-CSF, |
| | MFG-E8, MIC1, MIF, MIS RII, MMG, MMP26, MMP7, MMP9, MS4A1, MUC1, |
| | MUC1 seq1, MUC1 seq11A, MUC17, MUC2, Ncam, NGAL, NPGP/NPFF2, OPG, |
| | OPN, p53, p53, PA2G4, PBP, PCSA, PDGFRB, PGP9.5, PIM1, PR (B), PRL, PSA, |
| | PSMA, PSME3, PTEN, R5-CD9 Tube 1, Reg IV, RUNX2, SCRN1, seprase, |
| | SERPINB3, SPARC, SPB, SPDEF, SRVN, STAT 3, STEAP1, TF (FL-295), TFF3, |
| | TGM2, TIMP-1, TIMP1, TIMP2, TMEM211, TMPRSS2, TNF-alpha, Trail-R2, |
| | Trail-R4, TrKB, TROP2, Tsg 101, TWEAK, UNC93A, VEGF A, YPSMA-1 |
| Vesicle markers | NSE, TRIM29, CD63, CD151, ASPH, LAMP2, TSPAN1, SNAIL, CD45, CKS1, |
| | NSE, FSHR, OPN, FTH1, PGP9, ANNEXIN 1, SPD, CD81, EPCAM, PTH1R, |
| | CEA, CYTO 7, CCL2, SPA, KRAS, TWIST1, AURKB, MMP9, P27, MMP1, HLA, |
| | HIF, CEACAM, CENPH, BTUB, INTG b4, EGFR, NACC1, CYTO 18, NAP2, |
| | CYTO 19, ANNEXIN V, TGM2, ERB2, BRCA1, B7H3, SFTPC, PNT, NCAM, |
| | MS4A1, P53, INGA3, MUC2, SPA, OPN, CD63, CD9, MUC1, UNCR3, PAN |
| | ADH, HCG, TIMP, PSMA, GPCR, RACK1, PSCA, VEGF, BMP2, CD81, CRP, |
| | PRO GRP, B7H3, MUC1, M2PK, CD9, PCSA, PSMA |
| Vesicle markers | TFF3, MS4A1, EphA2, GAL3, EGFR, N-gal, PCSA, CD63, MUC1, TGM2, CD81, |
| | DR3, MACC-1, TrKB, CD24, TIMP-1, A33, CD66 CEA, PRL, MMP9, MMP7, |
| | TMEM211, SCRN1, TROP2, TWEAK, CDACC1, UNC93A, APC, C-Erb, CD10, |
| | BDNF, FRT, GPR30, P53, SPR, OPN, MUC2, GRO-1, tsg 101, GDF15 |
| Vesicle markers | CD9, Erb2, Erb4, CD81, Erb3, MUC16, CD63, DLL4, HLA-Drpe, B7H3, IFNAR, |
| | 5T4, PCSA, MICB, PSMA, MFG-E8, Muc1, PSA, Muc2, Unc93a, VEGFR2, |
| | EpCAM, VEGF A, TMPRSS2, RAGE, PSCA, CD40, Muc17, IL-17-RA, CD80 |
| Benign Prostate | BCMA, CEACAM-1, HVEM, IL-1 R4, IL-10 Rb, Trappin-2, p53, hsa-miR-329, |
| Hyperplasia | hsa-miR-30a, hsa-miR-335, hsa-miR-152, hsa-miR-151-5p, hsa-miR-200a, hsa-miR- |
| (BPH) | 145, hsa-miR-29a, hsa-miR-106b, hsa-miR-595, hsa-miR-142-5p, hsa-miR-99a, hsa- |
| | miR-20b, hsa-miR-373, hsa-miR-502-5p, hsa-miR-29b, hsa-miR-142-3p, hsa-miR- |
| | 663, hsa-miR-423-5p, hsa-miR-15a, hsa-miR-888, hsa-miR-361-3p, hsa-miR-365, |
| | hsa-miR-10b, hsa-miR-199a-3p, hsa-miR-181a, hsa-miR-19a, hsa-miR-125b, hsa- |
| | miR-760, hsa-miR-7a, hsa-miR-671-5p, hsa-miR-7c, hsa-miR-1979, hsa-miR-103 |
| Metastatic | hsa-miR-100, hsa-miR-1236, hsa-miR-1296, hsa-miR-141, hsa-miR-146b-5p, hsa- |
| Prostate Cancer | miR-17*, hsa-miR-181a, hsa-miR-200b, hsa-miR-20a*, hsa-miR-23a*, hsa-miR- |
| | 331-3p, hsa-miR-375, hsa-miR-452, hsa-miR-572, hsa-miR-574-3p, hsa-miR-577, |
| | hsa-miR-582-3p, hsa-miR-937, miR-10a, miR-134, miR-141, miR-200b, miR-30a, |
| | miR-32, miR-375, miR-495, miR-564, miR-570, miR-574-3p, miR-885-3p |
| Metastatic | hsa-miR-200b, hsa-miR-375, hsa-miR-141, hsa-miR-331-3p, hsa-miR-181a, hsa- |
| Prostate Cancer | miR-574-3p |
| Prostate Cancer | hsa-miR-574-3p, hsa-miR-141, hsa-miR-432, hsa-miR-326, hsa-miR-2110, hsa-miR- |
| | 181a-2*, hsa-miR-107, hsa-miR-301a, hsa-miR-484, hsa-miR-625* |
| Metastatic | hsa-miR-582-3p, hsa-miR-20a*, hsa-miR-375, hsa-miR-200b, hsa-miR-379, hsa- |
| Prostate Cancer | miR-572, hsa-miR-513a-5p, hsa-miR-577, hsa-miR-23a*, hsa-miR-1236, hsa-miR- |
| | 609, hsa-miR-17*, hsa-miR-130b, hsa-miR-619, hsa-miR-624*, hsa-miR-198 |
| Metastatic | FOX01A, SOX9, CLNS1A, PTGDS, XPO1, LETMD1, RAD23B, ABCC3, APC, |
| Prostate Cancer | CHES1, EDNRA, FRZB, HSPG2, TMPRSS2_ETV1 fusion |
| Prostate Cancer | hsa-let-7b, hsa-miR-107, hsa-miR-1205, hsa-miR-1270, hsa-miR-130b, hsa-miR- |
| | 141, hsa-miR-143, hsa-miR-148b*, hsa-miR-150, hsa-miR-154*, hsa-miR-181a*, |
| | hsa-miR-181a-2*, hsa-miR-18a*, hsa-miR-19b-1*, hsa-miR-204, hsa-miR-2110, |
| | hsa-miR-215, hsa-miR-217, hsa-miR-219-2-3p, hsa-miR-23b*, hsa-miR-299-5p, |
| | hsa-miR-301a, hsa-miR-301a, hsa-miR-326, hsa-miR-331-3p, hsa-miR-365*, hsa- |
| | miR-373*, hsa-miR-424, hsa-miR-424*, hsa-miR-432, hsa-miR-450a, hsa-miR-451, |
| | hsa-miR-484, hsa-miR-497, hsa-miR-517*, hsa-miR-517a, hsa-miR-518f, hsa-miR- |
| | 574-3p, hsa-miR-595, hsa-miR-617, hsa-miR-625*, hsa-miR-628-5p, hsa-miR-629, |
| | hsa-miR-634, hsa-miR-769-5p, hsa-miR-93, hsa-miR-96 |
| Prostate Cancer | CD9, PSMA, PCSA, CD63, CD81, B7H3, IL 6, OPG-13, IL6R, PA2G4, EZH2, |
| | RUNX2, SERPINB3, EpCam |
| Prostate Cancer | A33, a33 n15, AFP, ALA, ALIX, ALP, AnnexinV, APC, ASCA, ASPH (246-260), |
| | ASPH (666-680), ASPH (A-10), ASPH (D01P), ASPH (D03), ASPH (G-20), ASPH |
| | (H-300), AURKA, AURKB, B7H3, B7H4, BCA-225, BCNP, BDNF, BRCA, |
| | CA125 (MUC16), CA-19-9, C-Bir, CD1.1, CD10, CD174 (Lewis y), CD24, CD44, |
| | CD46, CD59 (MEM-43), CD63, CD66e CEA, CD73, CD81, CD9, CDA, CDAC11a2, |
| | CEA, C-Erb2, C-erbB2, CRMP-2, CRP, CXCL12, CYFRA21-1, DLL4, DR3, |
| | EGFR, Epcam, EphA2, EphA2 (H-77), ER, ErbB4, EZH2, FASL, FRT, FRT c.f23, |
| | GDF15, GPCR, GPR30, Gro-alpha, HAP, HBD 1, HBD2, HER 3 (ErbB3), HSP, |
| | HSP70, hVEGFR2, iC3b, IL 6 Unc, IL-1B, IL6 Unc, IL6R, IL8, IL-8, INSIG-2, |
| | KLK2, L1CAM, LAMN, LDH, MACC-1, MAPK4, MART-1, MCP-1, M-CSF, |
| | MFG-E8, MIC1, MIF, MIS RII, MMG, MMP26, MMP7, MMP9, MS4A1, MUC1, |
| | MUC1 seq1, MUC1 seq11A, MUC17, MUC2, Ncam, NGAL, NPGP/NPFF2, OPG, |
| | OPN, p53, p53, PA2G4, PBP, PCSA, PDGFRB, PGP9.5, PIM1, PR (B), PRL, PSA, |
| | PSMA, PSME3, PTEN, R5-CD9 Tube 1, Reg IV, RUNX2, SCRN1, seprase, |
| | SERPINB3, SPARC, SPB, SPDEF, SRVN, STAT 3, STEAP1, TF (FL-295), TFF3, |
| | TGM2, TIMP-1, TIMP1, TIMP2, TMEM211, TMPRSS2, TNF-alpha, Trail-R2, |
| | Trail-R4, TrKB, TROP2, Tsg 101, TWEAK, UNC93A, VEGF A, YPSMA-1 |
| Prostate Cancer | 5T4, ACTG1, ADAM10, ADAM15, ALDOA, ANXA2, ANXA6, APOA1, |
| Vesicle Markers | ATP1A1, BASP1, C1orf58, C20orf114, C8B, CAPZA1, CAV1, CD151, CD2AP, |
| | CD59, CD9, CD9, CFL1, CFP, CHMP4B, CLTC, COTL1, CTNND1, CTSB, CTSZ, |
| | CYCS, DPP4, EEF1A1, EHD1, ENO1, F11R, F2, F5, FAM125A, FNBP1L, |
| | FOLH1, GAPDH, GLB1, GPX3, HIST1H1C, HIST1H2AB, HSP90AB1, HSPA1B, |
| | HSPA8, IGSF8, ITGB1, ITIH3, JUP, LDHA, LDHB, LUM, LYZ, MFGE8, MGAM, |
| | MMP9, MYH2, MYL6B, NME1, NME2, PABPC1, PABPC4, PACSIN2, PCBP2, |
| | PDCD6IP, PRDX2, PSA, PSMA, PSMA1, PSMA2, PSMA4, PSMA6, PSMA7, |
| | PSMB1, PSMB2, PSMB3, PSMB4, PSMB5, PSMB6, PSMB8, PTGFRN, RPS27A, |
| | SDCBP, SERINC5, SH3GL1, SLC3A2, SMPDL3B, SNX9, TACSTD1, TCN2, |
| | THBS1, TPI1, TSG101, TUBB, VDAC2, VPS37B, YWHAG, YWHAQ, YWHAZ |
| Prostate Cancer | FLNA, DCRN, HER 3 (ErbB3), VCAN, CD9, GAL3, CDADC1, GM-CSF, EGFR, |
| Vesicle Markers | RANK, CSA, PSMA, ChickenIgY, B7H3, PCSA, CD63, CD3, MUC1, TGM2, |
| | CD81, S100-A4, MFG-E8, Integrin, NK-2R(C-21), PSA, CD24, TIMP-1, IL6 Unc, |
| | PBP, PIM1, CA-19-9, Trail-R4, MMP9, PRL, EphA2, TWEAK, NY-ESO-1, |
| | Mammaglobin, UNC93A, A33, AURKB, CD41, XAGE-1, SPDEF, AMACR, |
| | seprase/FAP, NGAL, CXCL12, FRT, CD66e CEA, SIM2 (C-15), C-Bir, STEAP, |
| | PSIP1/LEDGF, MUC17, hVEGFR2, ERG, MUC2, ADAM10, ASPH (A-10), |
| | CA125, Gro-alpha, Tsg 101, SSX2, Trail-R4 |
| Prostate Cancer | NT5E (CD73), A33, ABL2, ADAM10, AFP, ALA, ALIX, ALPL, AMACR, ApoJ/ |
| Vesicle Markers | CLU, ASCA, ASPH (A-10), ASPH (D01P), AURKB, B7H3, B7H4, BCNP, |
| | BDNF, CA125 (MUC16), CA-19-9, C-Bir (Flagellin), CD10, CD151, CD24, CD3, |
| | CD41, CD44, CD46, CD59(MEM-43), CD63, CD66e CEA, CD81, CD9, CDA, |
| | CDADC1, C-erbB2, CRMP-2, CRP, CSA, CXCL12, CXCR3, CYFRA21-1, DCRN, |
| | DDX-1, DLL4, EGFR, EpCAM, EphA2, ERG, EZH2, FASL, FLNA, FRT, GAL3, |
| | GATA2, GM-CSF, Gro-alpha, HAP, HER3 (ErbB3), HSP70, HSPB1, hVEGFR2, |
| | iC3b, IL-1B, IL6 R, IL6 Unc, IL7 R alpha/CD127, IL8, INSIG-2, Integrin, KLK2, |
| | Label, LAMN, Mammaglobin, M-CSF, MFG-E8, MIF, MIS RII, MMP7, MMP9, |
| | MS4A1, MUC1, MUC17, MUC2, Ncam, NDUFB7, NGAL, NK-2R(C-21), NY- |
| | ESO-1, p53, PBP, PCSA, PDGFRB, PIM1, PRL, PSA, PSIP1/LEDGF, PSMA, |
| | RAGE, RANK, Reg IV, RUNX2, S100-A4, seprase/FAP, SERPINB3, SIM2 (C-15), |
| | SPARC, SPC, SPDEF, SPP1, SSX2, SSX4, STEAP, STEAP4, TFF3, TGM2, TIMP- |
| | 1, TMEM211, Trail-R2, Trail-R4, TrKB (poly), Trop2, Tsg 101, TWEAK, |
| | UNC93A, VCAN, VEGF A, wnt-5a(C-16), XAGE, XAGE-1 |
| Prostate Vesicle | ADAM 9, ADAM10, AGR2, ALDOA, ALIX, ANXA1, ANXA2, ANXA4, ARF6, |
| Membrane | ATP1A3, B7H3, BCHE, BCL2L14 (Bcl G), BCNP1, BDKRB2, BDNFCAV1- |
| | Caveolin1, CCR2 (CC chemokine receptor 2, CD192), CCR5 (CC chemokine |
| | receptor 5), CCT2 (TCP1-beta), CD10, CD151, CD166/ALCAM, CD24, |
| | CD283/TLR3, CD41, CD46, CD49d (Integrin alpha 4, ITGA4), CD63, CD81, CD9, |
| | CD90/THY1, CDH1, CDH2, CDKN1A cyclin-dependent kinase inhibitor (p21), |
| | CGA gene (coding for the alpha subunit of glycoprotein hormones), CLDN3—Claudin3, |
| | COX2 (PTGS2), CSE1L (Cellular Apoptosis Susceptibility), CXCR3, |
| | Cytokeratin 18, Eag1 (KCNH1), EDIL3 (del-1), EDNRB—Endothelial Receptor |
| | Type B, EGFR, EpoR, EZH2 (enhancer of Zeste Homolog2), EZR, FABP5, |
| | Farnesyltransferase/geranylgeranyl diphosphate synthase 1 (GGPS1), Fatty acid |
| | synthase (FASN), FTL (light and heavy), GAL3, GDF15-Growth Differentiation |
| | Factor 15, GloI, GM-CSF, GSTP1, H3F3A, HGF (hepatocyte growth factor), hK2/ |
| | Kif2a, HSP90AA1, HSPA1A/HSP70-1, HSPB1, IGFBP-2, IGFBP-3, IL1alpha, IL- |
| | 6, IQGAP1, ITGAL (Integrin alpha L chain), Ki67, KLK1, KLK10, KLK11, |
| | KLK12, KLK13, KLK14, KLK15, KLK4, KLK5, KLK6, KLK7, KLK8, KLK9, |
| | Lamp-2, LDH-A, LGALS3BP, LGALS8, MMP 1, MMP 2, MMP 25, MMP 3, |
| | MMP10, MMP-14/MT1-MMP, MMP7, MTA1nAnS, Nav1.7, NKX3-1, Notch1, |
| | NRP1/CD304, PAP (ACPP), PGP, PhIP, PIP3/BPNT1, PKM2, PKP1 |
| | (plakophilin1), PKP3 (plakophilin3), Plasma chromogranin-A (CgA), PRDX2, |
| | Prostate secretory protein (PSP94)/β-Microseminoprotein (MSP)/IGBF, PSAP, |
| | PSMA, PSMA1, PTENPTPN13/PTPL1, RPL19, seprase/FAPSET, SLC3A2/CD98, |
| | SRVN, STEAP1, Syndecan/CD138, TGFB, TGM2, TIMP-1TLR4 (CD284), TLR9 |
| | (CD289), TMPRSS1/hepsin, TMPRSS2, TNFR1, TNFα, Transferrin |
| | receptor/CD71/TRFR, Trop2 (TACSTD2), TWEAK uPA (urokinase plasminoge |
| | activator) degrades extracellular matrix, uPAR (uPA receptor)/CD87, VEGFR1, |
| | VEGFR2 |
| Prostate Vesicle | ADAM 34, ADAM 9, AGR2, ALDOA, ANXA1, ANXA 11, ANXA4, ANXA 7, |
| Markers | ANXA2, ARF6, ATP1A1, ATP1A2, ATP1A3, BCHE, BCL2L14 (Bcl G), |
| | BDKRB2, CA215, CAV1—Caveolin1, CCR2 (CC chemokine receptor 2, CD192), |
| | CCR5 (CC chemokine receptor 5), CCT2 (TCP1-beta), CD166/ALCAM, CD49b |
| | (Integrin alpha 2, ITGA4), CD90/THY1, CDH1, CDH2, CDKN1A cyclin-dependent |
| | kinase inhibitor (p21), CGA gene (coding for the alpha subunit of glycoprotein |
| | hormones), CHMP4B, CLDN3—Claudin3, CLSTN1 (Calsyntenin-1), COX2 |
| | (PTGS2), CSE1L (Cellular Apoptosis Susceptibility), Cytokeratin 18, Eag1 |
| | (KCNH1) (plasma membrane-K+-voltage gated channel), EDIL3 (del-1), EDNRB—Endothelial |
| | Receptor Type B, Endoglin/CD105, ENOX2—Ecto-NOX disulphide |
| | Thiol exchanger 2, EPCA-2 Early prostate cancer antigen2, EpoR, EZH2 (enhancer |
| | of Zeste Homolog2), EZR, FABP5, Farnesyltransferase/geranylgeranyl diphosphate |
| | synthase 1 (GGPS1), Fatty acid synthase (FASN, plasma membrane protein), FTL |
| | (light and heavy), GDF15—Growth Differentiation Factor 15, GloI, GSTP1, H3F3A, |
| | HGF (hepatocyte growth factor), hK2 (KLK2), HSP90AA1, HSPA1A/HSP70-1, |
| | IGFBP-2, IGFBP-3, IL1alpha, IL-6, IQGAP1, ITGAL (Integrin alpha L chain), |
| | Ki67, KLK1, KLK10, KLK11, KLK12, KLK13, KLK14, KLK15, KLK4, KLK5, |
| | KLK6, KLK7, KLK8, KLK9, Lamp-2, LDH-A, LGALS3BP, LGALS8, MFAP5, |
| | MMP 1, MMP 2, MMP 24, MMP 25, MMP 3, MMP10, MMP-14/MT1-MMP, |
| | MTA1, nAnS, Nav1.7, NCAM2—Neural cell Adhesion molecule 2, NGEP/D- |
| | TMPP/IPCA-5/ANO7, NKX3-1, Notch1, NRP1/CD304, PGP, PAP (ACPP), |
| | PCA3—Prostate cancer antigen 3, Pdia3/ERp57, PhIP, phosphatidylethanolamine |
| | (PE), PIP3, PKP1 (plakophilin1), PKP3 (plakophilin3), Plasma chromogranin-A |
| | (CgA), PRDX2, Prostate secretory protein (PSP94)/β-Microseminoprotein (MSP)/ |
| | IGBF, PSAP, PSMA1, PTEN, PTGFRN, PTPN13/PTPL1, PKM2, RPL19, SCA-1/ |
| | ATXN1, SERINC5/TPO1, SET, SLC3A2/CD98, STEAP1, STEAP-3, SRVN, |
| | Syndecan/CD138, TGFB, Tissue Polypeptide Specific antigen TPS, TLR4 |
| | (CD284), TLR9 (CD289), TMPRSS1/hepsin, TMPRSS2, TNFR1, TNFα, |
| | CD283/TLR3, Transferrin receptor/CD71/TRFR, uPA (urokinase plasminoge |
| | activator), uPAR (uPA receptor)/CD87, VEGFR1, VEGFR2 |
| Prostate Cancer | hsa-miR-1974, hsa-miR-27b, hsa-miR-103, hsa-miR-146a, hsa-miR-22, hsa-miR- |
| Treatment | 382, hsa-miR-23a, hsa-miR-376c, hsa-miR-335, hsa-miR-142-5p, hsa-miR-221, hsa- |
| | miR-142-3p, hsa-miR-151-3p, hsa-miR-21, hsa-miR-16 |
| Prostate Cancer | let-7d, miR-148a, miR-195, miR-25, miR-26b, miR-329, miR-376c, miR-574-3p, |
| | miR-888, miR-9, miR1204, miR-16-2*, miR-497, miR-588, miR-614, miR-765, |
| | miR92b*, miR-938, let-7f-2*, miR-300, miR-523, miR-525-5p, miR-1182, miR- |
| | 1244, miR-520d-3p, miR-379, let-7b, miR-125a-3p, miR-1296, miR-134, miR-149, |
| | miR-150, miR-187, miR-32, miR-324-3p, miR-324-5p, miR-342-3p, miR-378, miR- |
| | 378*, miR-384, miR-451, miR-455-3p, miR-485-3p, miR-487a, miR-490-3p, miR- |
| | 502-5p, miR-548a-5p, miR-550, miR-562, miR-593, miR-593*, miR-595, miR-602, |
| | miR-603, miR-654-5p, miR-877*, miR-886-5p, miR-125a-5p, miR-140-3p, miR- |
| | 192, miR-196a, miR-2110, miR-212, miR-222, miR-224*, miR-30b*, miR-499-3p, |
| | miR-505* |
| Prostate (PCSA + | miR-182, miR-663, miR-155, mirR-125a-5p, miR-548a-5p, miR-628-5p, miR-517*, |
| cMVs) | miR-450a, miR-920, hsa-miR-619, miR-1913, miR-224*, miR-502-5p, miR-888, |
| | miR-376a, miR-542-5p, miR-30b*, miR-1179 |
| Prostate Cancer | miR-183-96-182 cluster (miRs-183, 96 and 182), metal ion transporter such as |
| | hZIP1, SLC39A1, SLC39A2, SLC39A3, SLC39A4, SLC39A5, SLC39A6, |
| | SLC39A7, SLC39A8, SLC39A9, SLC39A10, SLC39A11, SLC39A12, SLC39A13, |
| | SLC39A14 |
| Prostate Cancer | RAD23B, FBP1, TNFRSF1A, CCNG2, NOTCH3, ETV1, BID, SIM2, LETMD1, |
| | ANXA1, miR-519d, miR-647 |
| Prostate Cancer | RAD23B, FBP1, TNFRSF1A, NOTCH3, ETV1, BID, SIM2, ANXA1, BCL2 |
| Prostate Cancer | ANPEP, ABL1, PSCA, EFNA1, HSPB1, INMT, TRIP13 |
| Prostate Cancer | E2F3, c-met, pRB, EZH2, e-cad, CAXII, CAIX, HIF-1α, Jagged, PIM-1, hepsin, |
| | RECK, Clusterin, MMP9, MTSP-1, MMP24, MMP15, IGFBP-2, IGFBP-3, E2F4, |
| | caveolin, EF-1A, Kallikrein 2, Kallikrein 3, PSGR |
| Prostate Cancer | A2ML1, BAX, C10orf47, C1orf162, CSDA, EIFC3, ETFB, GABARAPL2, GUK1, |
| | GZMH, HIST1H3B, HLA-A, HSP90AA1, NRGN, PRDX5, PTMA, RABAC1, |
| | RABAGAP1L, RPL22, SAP18, SEPW1, SOX1 |
| Prostate Cancer | NY-ESO-1, SSX-2, SSX-4, XAGE-lb, AMACR, p90 autoantigen, LEDGF |
| Prostate Cancer | A33, ABL2, ADAM10, AFP, ALA, ALIX, ALPL, ApoJ/CLU, ASCA, ASPH(A-10), |
| | ASPH(D01P), AURKB, B7H3, B7H3, B7H4, BCNP, BDNF, CA125(MUC16), CA- |
| | 19-9, C-Bir, CD10, CD151, CD24, CD41, CD44, CD46, CD59(MEM-43), CD63, |
| | CD63, CD66eCEA, CD81, CD81, CD9, CD9, CDA, CDADC1, CRMP-2, CRP, |
| | CXCL12, CXCR3, CYFRA21-1, DDX-1, DLL4, DLL4, EGFR, Epcam, EphA2, |
| | ErbB2, ERG, EZH2, FASL, FLNA, FRT, GAL3, GATA2, GM-CSF, Gro-alpha, |
| | HAP, HER3(ErbB3), HSP70, HSPB1, hVEGFR2, iC3b, IL-1B, IL6R, IL6Unc, |
| | IL7Ralpha/CD127, IL8, INSIG-2, Integrin, KLK2, LAMN, Mammoglobin, M-CSF, |
| | MFG-E8, MIF, MISRII, MMP7, MMP9, MUC1, Muc1, MUC17, MUC2, Ncam, |
| | NDUFB7, NGAL, NK-2R(C-21), NT5E (CD73), p53, PBP, PCSA, PCSA, |
| | PDGFRB, PIM1, PRL, PSA, PSA, PSMA, PSMA, RAGE, RANK, RegIV, RUNX2, |
| | S100-A4, seprase/FAP, SERPINB3, SIM2(C-15), SPARC, SPC, SPDEF, SPP1, |
| | STEAP, STEAP4, TFF3, TGM2, TIMP-1, TMEM211, Trail-R2, Trail-R4, |
| | TrKB(poly), Trop2, Tsg101, TWEAK, UNC93A, VEGFA, wnt-5a(C-16) |
| Prostate Vesicles | CD9, CD63, CD81, PCSA, MUC2, MFG-E8 |
| Prostate Cancer | miR-148a, miR-329, miR-9, miR-378*, miR-25, miR-614, miR-518c*, miR-378, |
| | miR-765, let-7f-2*, miR-574-3p, miR-497, miR-32, miR-379, miR-520g, miR-542- |
| | 5p, miR-342-3p, miR-1206, miR-663, miR-222 |
| Prostate Cancer | hsa-miR-877*, hsa-miR-593, hsa-miR-595, hsa-miR-300, hsa-miR-324-5p, hsa-miR- |
| | 548a-5p, hsa-miR-329, hsa-miR-550, hsa-miR-886-5p, hsa-miR-603, hsa-miR-490- |
| | 3p, hsa-miR-938, hsa-miR-149, hsa-miR-150, hsa-miR-1296, hsa-miR-384, hsa- |
| | miR-487a, hsa-miRPlus-C1089, hsa-miR-485-3p, hsa-miR-525-5p |
| Prostate Cancer | hsa-miR-451, hsa-miR-223, hsa-miR-593*, hsa-miR-1974, hsa-miR-486-5p, hsa- |
| | miR-19b, hsa-miR-320b, hsa-miR-92a, hsa-miR-21, hsa-miR-675*, hsa-miR-16, |
| | hsa-miR-876-5p, hsa-miR-144, hsa-miR-126, hsa-miR-137, hsa-miR-1913, hsa-miR- |
| | 29b-1*, hsa-miR-15a, hsa-miR-93, hsa-miR-1266 |
| Inflammatory | miR-588, miR-1258, miR-16-2*, miR-938, miR-526b, miR-92b*, let-7d, miR-378*, |
| Disease | miR-124, miR-376c, miR-26b, miR-1204, miR-574-3p, miR-195, miR-499-3p, miR- |
| | 2110, miR-888 |
| Prostate Cancer | A33, ADAM10, AMACR, ASPH (A-10), AURKB, B7H3, CA125, CA-19-9, C-Bir, |
| | CD24, CD3, CD41, CD63, CD66e CEA, CD81, CD9, CDADC1, CSA, CXCL12, |
| | DCRN, EGFR, EphA2, ERG, FLNA, FRT, GAL3, GM-CSF, Gro-alpha, HER 3 |
| | (ErbB3), hVEGFR2, IL6 Unc, Integrin, Mammaglobin, MFG-E8, MMP9, MUC1, |
| | MUC17, MUC2, NGAL, NK-2R(C-21), NY-ESO-1, PBP, PCSA, PIM1, PRL, PSA, |
| | PSIP1/LEDGF, PSMA, RANK, S100-A4, seprase/FAP, SIM2 (C-15), SPDEF, |
| | SSX2, STEAP, TGM2, TIMP-1, Trail-R4, Tsg 101, TWEAK, UNC93A, VCAN, |
| | XAGE-1 |
| Prostate Cancer | A33, ADAM10, ALIX, AMACR, ASCA, ASPH (A-10), AURKB, B7H3, BCNP, |
| | CA125, CA-19-9, C-Bir (Flagellin), CD24, CD3, CD41, CD63, CD66e CEA, CD81, |
| | CD9, CDADC1, CRP, CSA, CXCL12, CYFRA21-1, DCRN, EGFR, EpCAM, |
| | EphA2, ERG, FLNA, GAL3, GATA2, GM-CSF, Gro alpha, HER3 (ErbB3), HSP70, |
| | hVEGFR2, iC3b, IL-1B, IL6 Unc, IL8, Integrin, KLK2, Mammaglobin, MFG-E8, |
| | MMP7, MMP9, MS4A1, MUC1, MUC17, MUC2, NGAL, NK-2R(C-21), NY-ESO- |
| | 1, p53, PBP, PCSA, PIM1, PRL, PSA, PSMA, RANK, RUNX2, S100-A4, |
| | seprase/FAP, SERPINB3, SIM2 (C-15), SPC, SPDEF, SSX2, SSX4, STEAP, |
| | TGM2, TIMP-1, TRAIL R2, Trail-R4, Tsg 101, TWEAK, VCAN, VEGF A, XAGE |
| Prostate Vesicles | EpCam, CD81, PCSA, MUC2, MFG-E8 |
| Prostate Vesicles | CD9, CD63, CD81, MMP7, EpCAM |
| Prostate Cancer | let-7d, miR-148a, miR-195, miR-25, miR-26b, miR-329, miR-376c, miR-574-3p, |
| | miR-888, miR-9, miR1204, miR-16-2*, miR-497, miR-588, miR-614, miR-765, |
| | miR92b*, miR-938, let-7f-2*, miR-300, miR-523, miR-525-5p, miR-1182, miR- |
| | 1244, miR-520d-3p, miR-379, let-7b, miR-125a-3p, miR-1296, miR-134, miR-149, |
| | miR-150, miR-187, miR-32, miR-324-3p, miR-324-5p, miR-342-3p, miR-378, miR- |
| | 378*, miR-384, miR-451, miR-455-3p, miR-485-3p, miR-487a, miR-490-3p, miR- |
| | 502-5p, miR-548a-5p, miR-550, miR-562, miR-593, miR-593*, miR-595, miR-602, |
| | miR-603, miR-654-5p, miR-877*, miR-886-5p, miR-125a-5p, miR-140-3p, miR- |
| | 192, miR-196a, miR-2110, miR-212, miR-222, miR-224*, miR-30b*, miR-499-3p, |
| | miR-505* |
| Prostate Cancer | STAT3, EZH2, p53, MACC1, SPDEF, RUNX2, YB-1, AURKA, AURKB |
| Prostate Cancer | E.001036, E.001497, E.001561, E.002330, E.003402, E.003756, E.004838, |
| (Ensembl ENSG | E.005471, E.005882, E.005893, E.006210, E.006453, E.006625, E.006695, |
| identifiers) | E.006756, E.007264, E.007952, E.008118, E.008196, E.009694, E.009830, |
| | E.010244, E.010256, E.010278, E.010539, E.010810, E.011052, E.011114, |
| | E.011143, E.011304, E.011451, E.012061, E.012779, E.014216, E.014257, |
| | E.015133, E.015171, E.015479, E.015676, E.016402, E.018189, E.018699, |
| | E.020922, E.022976, E.023909, E.026508, E.026559, E.029363, E.029725, |
| | E.030582, E.033030, E.035141, E.036257, E.036448, E.038002, E.039068, |
| | E.039560, E.041353, E.044115, E.047410, E.047597, E.048544, E.048828, |
| | E.049239, E.049246, E.049883, E.051596, E.051620, E.052795, E.053108, |
| | E.054118, E.054938, E.056097, E.057252, E.057608, E.058729, E.059122, |
| | E.059378, E.059691, E.060339, E.060688, E.061794, E.061918, E.062485, |
| | E.063241, E.063244, E.064201, E.064489, E.064655, E.064886, E.065054, |
| | E.065057, E.065308, E.065427, E.065457, E.065485, E.065526, E.065548, |
| | E.065978, E.066455, E.066557, E.067248, E.067369, E.067704, E.068724, |
| | E.068885, E.069535, E.069712, E.069849, E.069869, E.069956, E.070501, |
| | E.070785, E.070814, E.071246, E.071626, E.071859, E.072042, E.072071, |
| | E.072110, E.072506, E.073050, E.073350, E.073584, E.073756, E.074047, |
| | E.074071, E.074964, E.075131, E.075239, E.075624, E.075651, E.075711, |
| | E.075856, E.075886, E.076043, E.076248, E.076554, E.076864, E.077097, |
| | E.077147, E.077312, E.077514, E.077522, E.078269, E.078295, E.078808, |
| | E.078902, E.079246, E.079313, E.079785, E.080572, E.080823, E.081087, |
| | E.081138, E.081181, E.081721, E.081842, E.082212, E.082258, E.082556, |
| | E.083093, E.083720, E.084234, E.084463, E.085224, E.085733, E.086062, |
| | E.086205, E.086717, E.087087, E.087301, E.088888, E.088899, E.088930, |
| | E.088992, E.089048, E.089127, E.089154, E.089177, E.089248, E.089280, |
| | E.089902, E.090013, E.090060, E.090565, E.090612, E.090615, E.090674, |
| | E.090861, E.090889, E.091140, E.091483, E.091542, E.091732, E.092020, |
| | E.092199, E.092421, E.092621, E.092820, E.092871, E.092978, E.093010, |
| | E.094755, E.095139, E.095380, E.095485, E.095627, E.096060, E.096384, |
| | E.099331, E.099715, E.099783, E.099785, E.099800, E.099821, E.099899, |
| | E.099917, E.099956, E.100023, E.100056, E.100065, E.100084, E.100142, |
| | E.100191, E.100216, E.100242, E.100271, E.100284, E.100299, E.100311, |
| | E.100348, E.100359, E.100393, E.100399, E.100401, E.100412, E.100442, |
| | E.100575, E.100577, E.100583, E.100601, E.100603, E.100612, E.100632, |
| | E.100714, E.100739, E.100796, E.100802, E.100815, E.100823, E.100836, |
| | E.100883, E.101057, E.101126, E.101152, E.101222, E.101246, E.101265, |
| | E.101365, E.101439, E.101557, E.101639, E.101654, E.101811, E.101812, |
| | E.101901, E.102030, E.102054, E.102103, E.102158, E.102174, E.102241, |
| | E.102290, E.102316, E.102362, E.102384, E.102710, E.102780, E.102904, |
| | E.103035, E.103067, E.103175, E.103194, E.103449, E.103479, E.103591, |
| | E.103599, E.103855, E.103978, E.104064, E.104067, E.104131, E.104164, |
| | E.104177, E.104228, E.104331, E.104365, E.104419, E.104442, E.104611, |
| | E.104626, E.104723, E.104760, E.104805, E.104812, E.104823, E.104824, |
| | E.105127, E.105220, E.105221, E.105281, E.105379, E.105402, E.105404, |
| | E.105409, E.105419, E.105428, E.105486, E.105514, E.105518, E.105618, |
| | E.105705, E.105723, E.105939, E.105948, E.106049, E.106078, E.106128, |
| | E.106153, E.106346, E.106392, E.106554, E.106565, E.106603, E.106633, |
| | E.107104, E.107164, E.107404, E.107485, E.107551, E.107581, E.107623, |
| | E.107798, E.107816, E.107833, E.107890, E.107897, E.107968, E.108296, |
| | E.108312, E.108375, E.108387, E.108405, E.108417, E.108465, E.108561, |
| | E.108582, E.108639, E.108641, E.108848, E.108883, E.108953, E.109062, |
| | E.109184, E.109572, E.109625, E.109758, E.109790, E.109814, E.109846, |
| | E.109956, E.110063, E.110066, E.110104, E.110107, E.110321, E.110328, |
| | E.110921, E.110955, E.111057, E.111218, E.111261, E.111335, E.111540, |
| | E.111605, E.111647, E.111785, E.111790, E.111801, E.111907, E.112039, |
| | E.112081, E.112096, E.112110, E.112144, E.112232, E.112234, E.112473, |
| | E.112578, E.112584, E.112715, E.112941, E.113013, E.113163, E.113282, |
| | E.113368, E.113441, E.113448, E.113522, E.113580, E.113645, E.113719, |
| | E.113739, E.113790, E.114054, E.114127, E.114302, E.114331, E.114388, |
| | E.114491, E.114861, E.114867, E.115053, E.115221, E.115234, E.115239, |
| | E.115241, E.115257, E.115339, E.115540, E.115541, E.115561, E.115604, |
| | E.115648, E.115738, E.115758, E.116044, E.116096, E.116127, E.116254, |
| | E.116288, E.116455, E.116478, E.116604, E.116649, E.116726, E.116754, |
| | E.116833, E.117298, E.117308, E.117335, E.117362, E.117411, E.117425, |
| | E.117448, E.117480, E.117592, E.117593, E.117614, E.117676, E.117713, |
| | E.117748, E.117751, E.117877, E.118181, E.118197, E.118260, E.118292, |
| | E.118513, E.118523, E.118640, E.118898, E.119121, E.119138, E.119318, |
| | E.119321, E.119335, E.119383, E.119421, E.119636, E.119681, E.119711, |
| | E.119820, E.119888, E.119906, E.120159, E.120328, E.120337, E.120370, |
| | E.120656, E.120733, E.120837, E.120868, E.120915, E.120948, E.121022, |
| | E.121057, E.121068, E.121104, E.121390, E.121671, E.121690, E.121749, |
| | E.121774, E.121879, E.121892, E.121903, E.121940, E.121957, E.122025, |
| | E.122033, E.122126, E.122507, E.122566, E.122705, E.122733, E.122870, |
| | E.122884, E.122952, E.123066, E.123080, E.123143, E.123154, E.123178, |
| | E.123416, E.123427, E.123595, E.123901, E.123908, E.123983, E.123992, |
| | E.124143, E.124164, E.124181, E.124193, E.124216, E.124232, E.124529, |
| | E.124562, E.124570, E.124693, E.124749, E.124767, E.124788, E.124795, |
| | E.124831, E.124942, E.125246, E.125257, E.125304, E.125352, E.125375, |
| | E.125445, E.125492, E.125676, E.125753, E.125798, E.125844, E.125868, |
| | E.125901, E.125944, E.125995, E.126062, E.126267, E.126653, E.126773, |
| | E.126777, E.126814, E.126858, E.126883, E.126934, E.126945, E.126952, |
| | E.127022, E.127328, E.127329, E.127399, E.127415, E.127554, E.127616, |
| | E.127720, E.127824, E.127884, E.127914, E.127946, E.127948, E.128050, |
| | E.128311, E.128342, E.128609, E.128626, E.128683, E.128708, E.128881, |
| | E.129315, E.129351, E.129355, E.129514, E.129636, E.129657, E.129757, |
| | E.129810, E.129990, E.130175, E.130177, E.130193, E.130255, E.130299, |
| | E.130305, E.130338, E.130340, E.130402, E.130413, E.130612, E.130713, |
| | E.130764, E.130770, E.130810, E.130826, E.130935, E.131351, E.131467, |
| | E.131473, E.131771, E.131773, E.132002, E.132275, E.132323, E.132382, |
| | E.132475, E.132481, E.132589, E.132646, E.132716, E.132881, E.133313, |
| | E.133315, E.133687, E.133835, E.133863, E.133874, E.133961, E.134077, |
| | E.134138, E.134207, E.134248, E.134308, E.134444, E.134452, E.134548, |
| | E.134684, E.134759, E.134809, E.134851, E.134955, E.135052, E.135297, |
| | E.135298, E.135387, E.135390, E.135476, E.135486, E.135525, E.135597, |
| | E.135679, E.135740, E.135829, E.135842, E.135870, E.135900, E.135914, |
| | E.135926, E.135940, E.135999, E.136044, E.136068, E.136152, E.136169, |
| | E.136280, E.136371, E.136383, E.136450, E.136521, E.136527, E.136574, |
| | E.136710, E.136750, E.136807, E.136874, E.136875, E.136930, E.136933, |
| | E.136935, E.137055, E.137124, E.137312, E.137409, E.137497, E.137513, |
| | E.137558, E.137601, E.137727, E.137776, E.137806, E.137814, E.137815, |
| | E.137948, E.137955, E.138028, E.138031, E.138041, E.138050, E.138061, |
| | E.138069, E.138073, E.138095, E.138160, E.138294, E.138347, E.138363, |
| | E.138385, E.138587, E.138594, E.138621, E.138674, E.138756, E.138757, |
| | E.138760, E.138772, E.138796, E.139211, E.139405, E.139428, E.139517, |
| | E.139613, E.139626, E.139684, E.139697, E.139874, E.140263, E.140265, |
| | E.140326, E.140350, E.140374, E.140382, E.140451, E.140481, E.140497, |
| | E.140632, E.140678, E.140694, E.140743, E.140932, E.141002, E.141012, |
| | E.141258, E.141378, E.141425, E.141429, E.141522, E.141543, E.141639, |
| | E.141744, E.141873, E.141994, E.142025, E.142208, E.142515, E.142606, |
| | E.142698, E.142765, E.142864, E.142875, E.143013, E.143294, E.143321, |
| | E.143353, E.143374, E.143375, E.143390, E.143578, E.143614, E.143621, |
| | E.143633, E.143771, E.143797, E.143816, E.143889, E.143924, E.143933, |
| | E.143947, E.144136, E.144224, E.144306, E.144381, E.144410, E.144485, |
| | E.144566, E.144671, E.144741, E.144935, E.145020, E.145632, E.145741, |
| | E.145833, E.145888, E.145907, E.145908, E.145919, E.145990, E.146067, |
| | E.146070, E.146281, E.146433, E.146457, E.146535, E.146701, E.146856, |
| | E.146966, E.147044, E.147127, E.147130, E.147133, E.147140, E.147231, |
| | E.147257, E.147403, E.147475, E.147548, E.147697, E.147724, E.148158, |
| | E.148396, E.148488, E.148672, E.148737, E.148835, E.149182, E.149218, |
| | E.149311, E.149480, E.149548, E.149646, E.150051, E.150593, E.150961, |
| | E.150991, E.151092, E.151093, E.151247, E.151304, E.151491, E.151690, |
| | E.151715, E.151726, E.151779, E.151806, E.152086, E.152207, E.152234, |
| | E.152291, E.152359, E.152377, E.152409, E.152422, E.152582, E.152763, |
| | E.152818, E.152942, E.153113, E.153140, E.153391, E.153904, E.153936, |
| | E.154099, E.154127, E.154380, E.154639, E.154723, E.154781, E.154832, |
| | E.154864, E.154889, E.154957, E.155368, E.155380, E.155508, E.155660, |
| | E.155714, E.155959, E.155980, E.156006, E.156194, E.156282, E.156304, |
| | E.156467, E.156515, E.156603, E.156650, E.156735, E.156976, E.157064, |
| | E.157103, E.157502, E.157510, E.157538, E.157551, E.157637, E.157764, |
| | E.157827, E.157992, E.158042, E.158290, E.158321, E.158485, E.158545, |
| | E.158604, E.158669, E.158715, E.158747, E.158813, E.158863, E.158901, |
| | E.158941, E.158987, E.159147, E.159184, E.159348, E.159363, E.159387, |
| | E.159423, E.159658, E.159692, E.159761, E.159921, E.160049, E.160226, |
| | E.160285, E.160294, E.160633, E.160685, E.160691, E.160789, E.160862, |
| | E.160867, E.160948, E.160972, E.161202, E.161267, E.161649, E.161692, |
| | E.161714, E.161813, E.161939, E.162069, E.162298, E.162385, E.162437, |
| | E.162490, E.162613, E.162641, E.162694, E.162910, E.162975, E.163041, |
| | E.163064, E.163110, E.163257, E.163468, E.163492, E.163530, E.163576, |
| | E.163629, E.163644, E.163749, E.163755, E.163781, E.163825, E.163913, |
| | E.163923, E.163930, E.163932, E.164045, E.164051, E.164053, E.164163, |
| | E.164244, E.164270, E.164300, E.164309, E.164442, E.164488, E.164520, |
| | E.164597, E.164749, E.164754, E.164828, E.164916, E.164919, E.164924, |
| | E.165084, E.165119, E.165138, E.165215, E.165259, E.165264, E.165280, |
| | E.165359, E.165410, E.165496, E.165637, E.165646, E.165661, E.165688, |
| | E.165695, E.165699, E.165792, E.165807, E.165813, E.165898, E.165923, |
| | E.165934, E.166263, E.166266, E.166329, E.166337, E.166341, E.166484, |
| | E.166526, E.166596, E.166598, E.166710, E.166747, E.166833, E.166860, |
| | E.166946, E.166971, E.167004, E.167085, E.167110, E.167113, E.167258, |
| | E.167513, E.167552, E.167553, E.167604, E.167635, E.167642, E.167658, |
| | E.167699, E.167744, E.167751, E.167766, E.167772, E.167799, E.167815, |
| | E.167969, E.167978, E.167987, E.167996, E.168014, E.168036, E.168066, |
| | E.168071, E.168148, E.168298, E.168393, E.168575, E.168653, E.168746, |
| | E.168763, E.168769, E.168803, E.168916, E.169087, E.169093, E.169122, |
| | E.169189, E.169213, E.169242, E.169410, E.169418, E.169562, E.169592, |
| | E.169612, E.169710, E.169763, E.169789, E.169807, E.169826, E.169957, |
| | E.170017, E.170027, E.170037, E.170088, E.170144, E.170275, E.170310, |
| | E.170315, E.170348, E.170374, E.170381, E.170396, E.170421, E.170430, |
| | E.170445, E.170549, E.170632, E.170703, E.170743, E.170837, E.170854, |
| | E.170906, E.170927, E.170954, E.170959, E.171121, E.171155, E.171180, |
| | E.171202, E.171262, E.171302, E.171345, E.171428, E.171488, E.171490, |
| | E.171492, E.171540, E.171643, E.171680, E.171723, E.171793, E.171861, |
| | E.171953, E.172115, E.172283, E.172345, E.172346, E.172466, E.172590, |
| | E.172594, E.172653, E.172717, E.172725, E.172733, E.172831, E.172867, |
| | E.172893, E.172939, E.173039, E.173230, E.173366, E.173473, E.173540, |
| | E.173585, E.173599, E.173714, E.173726, E.173805, E.173809, E.173826, |
| | E.173889, E.173898, E.173905, E.174021, E.174100, E.174332, E.174842, |
| | E.174996, E.175063, E.175110, E.175166, E.175175, E.175182, E.175198, |
| | E.175203, E.175216, E.175220, E.175334, E.175416, E.175602, E.175866, |
| | E.175946, E.176102, E.176105, E.176155, E.176171, E.176371, E.176515, |
| | E.176900, E.176971, E.176978, E.176994, E.177156, E.177239, E.177354, |
| | E.177409, E.177425, E.177459, E.177542, E.177548, E.177565, E.177595, |
| | E.177628, E.177674, E.177679, E.177694, E.177697, E.177731, E.177752, |
| | E.177951, E.178026, E.178078, E.178104, E.178163, E.178175, E.178187, |
| | E.178234, E.178381, E.178473, E.178741, E.178828, E.178950, E.179091, |
| | E.179115, E.179119, E.179348, E.179388, E.179776, E.179796, E.179869, |
| | E.179912, E.179981, E.180035, E.180198, E.180287, E.180318, E.180667, |
| | E.180869, E.180979, E.180998, E.181072, E.181163, E.181222, E.181234, |
| | E.181513, E.181523, E.181610, E.181773, E.181873, E.181885, E.181924, |
| | E.182013, E.182054, E.182217, E.182271, E.182318, E.182319, E.182512, |
| | E.182732, E.182795, E.182872, E.182890, E.182944, E.183048, E.183092, |
| | E.183098, E.183128, E.183207, E.183292, E.183431, E.183520, E.183684, |
| | E.183723, E.183785, E.183831, E.183856, E.184007, E.184047, E.184113, |
| | E.184156, E.184254, E.184363, E.184378, E.184470, E.184481, E.184508, |
| | E.184634, E.184661, E.184697, E.184708, E.184735, E.184840, E.184916, |
| | E.185043, E.185049, E.185122, E.185219, E.185359, E.185499, E.185554, |
| | E.185591, E.185619, E.185736, E.185860, E.185896, E.185945, E.185972, |
| | E.186198, E.186205, E.186376, E.186472, E.186575, E.186591, E.186660, |
| | E.186814, E.186834, E.186868, E.186889, E.187097, E.187323, E.187492, |
| | E.187634, E.187764, E.187792, E.187823, E.187837, E.187840, E.188021, |
| | E.188171, E.188186, E.188739, E.188771, E.188846, E.189060, E.189091, |
| | E.189143, E.189144, E.189221, E.189283, E.196236, E.196419, E.196436, |
| | E.196497, E.196504, E.196526, E.196591, E.196700, E.196743, E.196796, |
| | E.196812, E.196872, E.196975, E.196993, E.197081, E.197157, E.197217, |
| | E.197223, E.197299, E.197323, E.197353, E.197451, E.197479, E.197746, |
| | E.197779, E.197813, E.197837, E.197857, E.197872, E.197969, E.197976, |
| | E.198001, E.198033, E.198040, E.198087, E.198131, E.198156, E.198168, |
| | E.198205, E.198216, E.198231, E.198265, E.198366, E.198431, E.198455, |
| | E.198563, E.198586, E.198589, E.198712, E.198721, E.198732, E.198783, |
| | E.198793, E.198804, E.198807, E.198824, E.198841, E.198951, E.203301, |
| | E.203795, E.203813, E.203837, E.203879, E.203908, E.204231, E.204316, |
| | E.204389, E.204406, E.204560, E.204574 |
| Prostate Markers | E.005893 (LAMP2), E.006756 (ARSD), E.010539 (ZNF200), E.014257 (ACPP), |
| (Ensembl ENSG | E.015133 (CCDC88C), E.018699 (TTC27), E.044115 (CTNNA1), E.048828 |
| identifiers) | (FAM120A), E.051620 (HEBP2), E.056097 (ZFR), E.060339 (CCAR1), E.063241 |
| | (ISOC2), E.064489 (MEF2BNB-MEF2B), E.064886 (CHI3L2), E.066455 |
| | (GOLGA5), E.069535 (MAOB), E.072042 (RDH11), E.072071 (LPHN1), E.074047 |
| | (GLI2), E.076248 (UNG), E.076554 (TPD52), E.077147 (TM9SF3), E.077312 |
| | (SNRPA), E.081842 (PCDHA6), E.086717 (PPEF1), E.088888 (MAVS), E.088930 |
| | (XRN2), E.089902 (RCOR1), E.090612 (ZNF268), E.092199 (HNRNPC), E.095380 |
| | (NANS), E.099783 (HNRNPM), E.100191 (SLC5A4), E.100216 (TOMM22), |
| | E.100242 (SUN2), E.100284 (TOM1), E.100401 (RANGAP1), E.100412 (ACO2), |
| | E.100836 (PABPN1), E.102054 (RBBP7), E.102103 (PQBP1), E.103599 (IQCH), |
| | E.103978 (TMEM87A), E.104177 (MYEF2), E.104228 (TRIM35), E.105428 |
| | (ZNRF4), E.105518 (TMEM205), E.106603 (C7orf44; COA1), E.108405 (P2RX1), |
| | E.111057 (KRT18), E.111218 (PRMT8), E.112081 (SRSF3), E.112144 (ICK), |
| | E.113013 (HSPA9), E.113368 (LMNB1), E.115221 (ITGB6), E.116096 (SPR), |
| | E.116754 (SRSF11), E.118197 (DDX59), E.118898 (PPL), E.119121 (TRPM6), |
| | E.119711 (ALDH6A1), E.120656 (TAF12), E.121671 (CRY2), E.121774 |
| | (KHDRBS1), E.122126 (OCRL), E.122566 (HNRNPA2B1), E.123901 (GPR83), |
| | E.124562 (SNRPC), E.124788 (ATXN1), E.124795 (DEK), E.125246 (CLYBL), |
| | E.126883 (NUP214), E.127616 (SMARCA4), E.127884 (ECHS1), E.128050 |
| | (PAICS), E.129351 (ILF3), E.129757 (CDKN1C), E.130338 (TULP4), E.130612 |
| | (CYP2G1P), E.131351 (HAUS8), E.131467 (PSME3), E.133315 (MACROD1), |
| | E.134452 (FBXO18), E.134851 (TMEM165), E.135940 (COX5B), E.136169 |
| | (SETDB2), E.136807 (CDK9), E.137727 (ARHGAP20), E.138031 (ADCY3), |
| | E.138050 (THUMPD2), E.138069 (RAB1A), E.138594 (TMOD3), E.138760 |
| | (SCARB2), E.138796 (HADH), E.139613 (SMARCC2), E.139684 (ESD), E.140263 |
| | (SORD), E.140350 (ANP32A), E.140632 (GLYR1), E.142765 (SYTL1), E.143621 |
| | (ILF2), E.143933 (CALM2), E.144410 (CPO), E.147127 (RAB41), E.151304 |
| | (SRFBP1), E.151806 (GUF1), E.152207 (CYSLTR2), E.152234 (ATP5A1), |
| | E.152291 (TGOLN2), E.154723 (ATP5J), E.156467 (UQCRB), E.159387 (IRX6), |
| | E.159761 (C16orf86), E.161813 (LARP4), E.162613 (FUBP1), E.162694 (EXTL2), |
| | E.165264 (NDUFB6), E.167113 (COQ4), E.167513 (CDT1), E.167772 |
| | (ANGPTL4), E.167978 (SRRM2), E.168916 (ZNF608), E.169763 (PRYP3), |
| | E.169789 (PRY), E.169807 (PRY2), E.170017 (ALCAM), E.170144 (HNRNPA3), |
| | E.170310 (STX8), E.170954 (ZNF415), E.170959 (DCDC5), E.171302 (CANT1), |
| | E.171643 (S100Z), E.172283 (PRYP4), E.172590 (MRPL52), E.172867 (KRT2), |
| | E.173366 (TLR9), E.173599 (PC), E.177595 (PIDD), E.178473 (UCN3), E.179981 |
| | (TSHZ1), E.181163 (NPM1), E.182319 (Tyrosine-protein kinase SgK223), |
| | E.182795 (C1orf116), E.182944 (EWSR1), E.183092 (BEGAIN), E.183098 (GPC6), |
| | E.184254 (ALDH1A3), E.185619 (PCGF3), E.186889 (TMEM17), E.187837 |
| | (HIST1H1C), E.188771 (C11orf34), E.189060 (H1F0), E.196419 (XRCC6), |
| | E.196436 (NPIPL2), E.196504 (PRPF40A), E.196796, E.196993, E.197451 |
| | (HNRNPAB), E.197746 (PSAP), E.198131 (ZNF544), E.198156, E.198732 |
| | (SMOC1), E.198793 (MTOR), E.039068 (CDH1), E.173230 (GOLGB1), E.124193 |
| | (SRSF6), E.140497 (SCAMP2), E.168393 (DTYMK), E.184708 (EIF4ENIF1), |
| | E.124164 (VAPB), E.125753 (VASP), E.118260 (CREB1), E.135052 (GOLM1), |
| | E.010244 (ZNF207), E.010278 (CD9), E.047597 (XK), E.049246 (PER3), E.069849 |
| | (ATP1B3), E.072506 (HSD17B10), E.081138 (CDH7), E.099785 (MARCH2), |
| | E.104331 (IMPAD1), E.104812 (GYS1), E.120868 (APAF1), E.123908 (EIF2C2), |
| | E.125492 (BARHL1), E.127328 (RAB3IP), E.127329 (PTPRB), E.129514 |
| | (FOXA1), E.129657 (SEC14L1), E.129990 (SYT5), E.132881 (RSG1), E.136521 |
| | (NDUFB5), E.138347 (MYPN), E.141429 (GALNT1), E.144566 (RAB5A), |
| | E.151715 (TMEM45B), E.152582 (SPEF2), E.154957 (ZNF18), E.162385 |
| | (MAGOH), E.165410 (CFL2), E.168298 (HIST1H1E), E.169418 (NPR1), E.178187 |
| | (ZNF454), E.178741 (COX5A), E.179115 (FARSA), E.182732 (RGS6), E.183431 |
| | (SF3A3), E.185049 (WHSC2), E.196236 (XPNPEP3), E.197217 (ENTPD4), |
| | E.197813, E.203301, E.116833 (NR5A2), E.121057 (AKAP1), E.005471 (ABCB4), |
| | E.071859 (FAM50A), E.084234 (APLP2), E.101222 (SPEF1), E.103175 (WFDC1), |
| | E.103449 (SALL1), E.104805 (NUCB1), E.105514 (RAB3D), E.107816 (LZTS2), |
| | E.108375 (RNF43), E.109790 (KLHL5), E.112039 (FANCE), E.112715 (VEGFA), |
| | E.121690 (DEPDC7), E.125352 (RNF113A), E.134548 (C12orf39), E.136152 |
| | (COG3), E.143816 (WNT9A), E.147130 (ZMYM3), E.148396 (SEC16A), E.151092 |
| | (NGLY1), E.151779 (NBAS), E.155508 (CNOT8), E.163755 (HPS3), E.166526 |
| | (ZNF3), E.172733 (PURG), E.176371 (ZSCAN2), E.177674 (AGTRAP), E.181773 |
| | (GPR3), E.183048 (SLC25A10; MRPL12 SLC25A10), E.186376 (ZNF75D), |
| | E.187323 (DCC), E.198712 (MT-CO2), E.203908 (C6orf221; KHDC3L), E.001497 |
| | (LAS1L), E.009694 (ODZ1), E.080572 (CXorf41; PIH1D3), E.083093 (PALB2), |
| | E.089048 (ESF1), E.100065 (CARD10), E.100739 (BDKRB1), E.102904 |
| | (TSNAXIP1), E.104824 (HNRNPL), E.107404 (DVL1), E.110066 (SUV420H1), |
| | E.120328 (PCDHB12), E.121903 (ZSCAN20), E.122025 (FLT3), E.136930 |
| | (PSMB7), E.142025 (DMRTC2), E.144136 (SLC20A1), E.146535 (GNA12), |
| | E.147140 (NONO), E.153391 (INO80C), E.164919 (COX6C), E.171540 (OTP), |
| | E.177951 (BET1L), E.179796 (LRRC3B), E.197479 (PCDHB11), E.198804 (MT- |
| | CO1), E.086205 (FOLH1), E.100632 (ERH), E.100796 (SMEK1), E.104760 |
| | (FGL1), E.114302 (PRKAR2A), E.130299 (GTPBP3), E.133961 (NUMB), |
| | E.144485 (HES6), E.167085 (PHB), E.167635 (ZNF146), E.177239 (MAN1B1), |
| | E.184481 (FOXO4), E.188171 (ZNF626), E.189221 (MAOA), E.157637 |
| | (SLC38A10), E.100883 (SRP54), E.105618 (PRPF31), E.119421 (NDUFA8), |
| | E.170837 (GPR27), E.168148 (HIST3H3), E.135525 (MAP7), E.174996 (KLC2), |
| | E.018189 (RUFY3), E.183520 (UTP11L), E.173905 (GOLIM4), E.165280 (VCP), |
| | E.022976 (ZNF839), E.059691 (PET112), E.063244 (U2AF2), E.075651 (PLD1), |
| | E.089177 (KIF16B), E.089280 (FUS), E.094755 (GABRP), E.096060 (FKBP5), |
| | E.100023 (PPIL2), E.100359 (SGSM3), E.100612 (DHRS7), E.104131 (EIF3J), |
| | E.104419 (NDRG1), E.105409 (ATP1A3), E.107623 (GDF10), E.111335 (OAS2), |
| | E.113522 (RAD50), E.115053 (NCL), E.120837 (NFYB), E.122733 (KIAA1045), |
| | E.123178 (SPRYD7), E.124181 (PLCG1), E.126858 (RHOT1), E.128609 |
| | (NDUFA5), E.128683 (GAD1), E.130255 (RPL36), E.133874 (RNF122), E.135387 |
| | (CAPRIN1), E.135999 (EPC2), E.136383 (ALPK3), E.139405 (C12orf52), |
| | E.141012 (GALNS), E.143924 (EML4), E.144671 (SLC22A14), E.145741 (BTF3), |
| | E.145907 (G3BP1), E.149311 (ATM), E.153113 (CAST), E.157538 (DSCR3), |
| | E.157992 (KRTCAP3), E.158901 (WFDC8), E.165259 (HDX), E.169410 (PTPN9), |
| | E.170421 (KRT8), E.171155 (C1GALT1C1), E.172831 (CES2), E.173726 |
| | (TOMM20), E.176515, E.177565 (TBL1XR1), E.177628 (GBA), E.179091 (CYC1), |
| | E.189091 (SF3B3), E.197299 (BLM), E.197872 (FAM49A), E.198205 (ZXDA), |
| | E.198455 (ZXDB), E.082212 (ME2), E.109956 (B3GAT1), E.169710 (FASN), |
| | E.011304 (PTBP1), E.057252 (SOAT1), E.059378 (PARP12), E.082258 (CCNT2), |
| | E.087301 (TXNDC16), E.100575 (TIMM9), E.101152 (DNAJC5), E.101812 |
| | (H2BFM), E.102384 (CENPI), E.108641 (B9D1), E.119138 (KLF9), E.119820 |
| | (YIPF4), E.125995 (ROMO1), E.132323 (ILKAP), E.134809 (TIMM10), E.134955 |
| | (SLC37A2), E.135476 (ESPL1), E.136527 (TRA2B), E.137776 (SLTM), E.139211 |
| | (AMIGO2), E.139428 (MMAB), E.139874 (SSTR1), E.143321 (HDGF), E.164244 |
| | (PRRC1), E.164270 (HTR4), E.165119 (HNRNPK), E.165637 (VDAC2), E.165661 |
| | (QSOX2), E.167258 (CDK12), E.167815 (PRDX2), E.168014 (C2CD3), E.168653 |
| | (NDUFS5), E.168769 (TET2), E.169242 (EFNA1), E.175334 (BANF1), E.175416 |
| | (CLTB), E.177156 (TALDO1), E.180035 (ZNF48), E.186591 (UBE2H), E.187097 |
| | (ENTPD5), E.188739 (RBM34), E.196497 (IPO4), E.197323 (TRIM33), E.197857 |
| | (ZNF44), E.197976 (AKAP17A), E.064201 (TSPAN32), E.088992 (TESC), |
| | E.092421 (SEMA6A), E.100601 (ALKBH1), E.101557 (USP14), E.103035 |
| | (PSMD7), E.106128 (GHRHR), E.115541 (HSPE1), E.121390 (PSPC1), E.124216 |
| | (SNAI1), E.130713 (EXOSC2), E.132002 (DNAJB1), E.139697 (SBNO1), |
| | E.140481 (CCDC33), E.143013 (LMO4), E.145020 (AMT), E.145990 (GFOD1), |
| | E.146070 (PLA2G7), E.164924 (YWHAZ), E.165807 (PPP1R36), E.167751 |
| | (KLK2), E.169213 (RAB3B), E.170906 (NDUFA3), E.172725 (CORO1B), |
| | E.174332 (GLIS1), E.181924 (CHCHD8), E.183128 (CALHM3), E.204560 |
| | (DHX16), E.204574 (ABCF1), E.146701 (MDH2), E.198366 (HIST1H3A), |
| | E.081181 (ARG2), E.185896 (LAMP1), E.077514 (POLD3), E.099800 (TIMM13), |
| | E.100299 (ARSA), E.105419 (MEIS3), E.108417 (KRT37), E.113739 (STC2), |
| | E.125868 (DSTN), E.145908 (ZNF300), E.168575 (SLC20A2), E.182271 |
| | (TMIGD1), E.197223 (C1D), E.186834 (HEXIM1), E.001561 (ENPP4), E.011451 |
| | (WIZ), E.053108 (FSTL4), E.064655 (EYA2), E.065308 (TRAM2), E.075131 |
| | (TIPIN), E.081087 (OSTM1), E.092020 (PPP2R3C), E.096384 (HSP90AB1), |
| | E.100348 (TXN2), E.100577 (GSTZ1), E.100802 (C14orf93), E.101365 (IDH3B), |
| | E.101654 (RNMT), E.103067 (ESRP2), E.104064 (GABPB1), E.104823 (ECH1), |
| | E.106565 (TMEM176B), E.108561 (C1QBP), E.115257 (PCSK4), E.116127 |
| | (ALMS1), E.117411 (B4GALT2), E.119335 (SET), E.120337 (TNFSF18), |
| | E.122033 (MTIF3), E.122507 (BBS9), E.122870 (BICC1), E.130177 (CDC16), |
| | E.130193 (C8orf55; THEM6), E.130413 (STK33), E.130770 (ATPIF1), E.133687 |
| | (TMTC1), E.136874 (STX17), E.137409 (MTCH1), E.139626 (ITGB7), E.141744 |
| | (PNMT), E.145888 (GLRA1), E.146067 (FAM193B), E.146433 (TMEM181), |
| | E.149480 (MTA2), E.152377 (SPOCK1), E.152763 (WDR78), E.156976 (EIF4A2), |
| | E.157827 (FMNL2), E.158485 (CD1B), E.158863 (FAM160B2), E.161202 (DVL3), |
| | E.161714 (PLCD3), E.163064 (EN1), E.163468 (CCT3), E.164309 (CMYA5), |
| | E.164916 (FOXK1), E.165215 (CLDN3), E.167658 (EEF2), E.170549 (IRX1), |
| | E.171680 (PLEKHG5), E.178234 (GALNT11), E.179869 (ABCA13), E.179912 |
| | (R3HDM2), E.180869 (C1orf180), E.180979 (LRRC57), E.182872 (RBM10), |
| | E.183207 (RUVBL2), E.184113 (CLDN5), E.185972 (CCIN), E.189144 (ZNF573), |
| | E.197353 (LYPD2), E.197779 (ZNF81), E.198807 (PAX9), E.100442 (FKBP3), |
| | E.111790 (FGFR1OP2), E.136044 (APPL2), E.061794 (MRPS35), E.065427 |
| | (KARS), E.068885 (IFT80), E.104164 (PLDN; BLOC1S6), E.105127 (AKAP8), |
| | E.123066 (MED13L), E.124831 (LRRFIP1), E.125304 (TM9SF2), E.126934 |
| | (MAP2K2), E.130305 (NSUN5), E.135298 (BAI3), E.135900 (MRPL44), E.136371 |
| | (MTHFS), E.136574 (GATA4), E.140326 (CDAN1), E.141378 (PTRH2), E.141543 |
| | (EIF4A3), E.150961 (SEC24D), E.155368 (DBI), E.161649 (CD300LG), E.161692 |
| | (DBF4B), E.162437 (RAVER2), E.163257 (DCAF16), E.163576 (EFHB), E.163781 |
| | (TOPBP1), E.163913 (IFT122), E.164597 (COG5), E.165359 (DDX26B), E.165646 |
| | (SLC18A2), E.169592 (INO80E), E.169957 (ZNF768), E.171492 (LRRC8D), |
| | E.171793 (CTPS; CTPS1), E.171953 (ATPAF2), E.175182 (FAM131A), E.177354 |
| | (C10orf71), E.181610 (MRPS23), E.181873 (IBA57), E.187792 (ZNF70), E.187823 |
| | (ZCCHC16), E.196872 (C2orf55; KIAA1211L), E.198168 (SVIP), E.160633 |
| | (SAFB), E.177697 (CD151), E.181072 (CHRM2), E.012779 (ALOX5), E.065054 |
| | (SLC9A3R2), E.074071 (MRPS34), E.100815 (TRIP11), E.102030 (NAA10), |
| | E.106153 (CHCHD2), E.126814 (TRMT5), E.126952 (NXF5), E.136450 (SRSF1), |
| | E.136710 (CCDC115), E.137124 (ALDH1B1), E.143353 (LYPLAL1), E.162490 |
| | (C1orf187; DRAXIN), E.167799 (NUDT8), E.171490 (RSL1D1), E.173826 |
| | (KCNH6), E.173898 (SPTBN2), E.176900 (OR51T1), E.181513 (ACBD4), |
| | E.185554 (NXF2), E.185945 (NXF2B), E.108848 (LUC7L3), E.029363 (BCLAF1), |
| | E.038002 (AGA), E.108312 (UBTF), E.166341 (DCHS1), E.054118 (THRAP3), |
| | E.135679 (MDM2), E.166860 (ZBTB39), E.183684 (THOC4; ALYREF), E.004838 |
| | (ZMYND10), E.007264 (MATK), E.020922 (MRE11A), E.041353 (RAB27B), |
| | E.052795 (FNIP2), E.075711 (DLG1), E.087087 (SRRT), E.090060 (PAPOLA), |
| | E.095139 (ARCN1), E.099715 (PCDH11Y), E.100271 (TTLL1), E.101057 |
| | (MYBL2), E.101265 (RASSF2), E.101901 (ALG13), E.102290 (PCDH11X), |
| | E.103194 (USP10), E.106554 (CHCHD3), E.107833 (NPM3), E.110063 (DCPS), |
| | E.111540 (RAB5B), E.113448 (PDE4D), E.115339 (GALNT3), E.116254 (CHD5), |
| | E.117425 (PTCH2), E.117614 (SYF2), E.118181 (RPS25), E.118292 (C1orf54), |
| | E.119318 (RAD23B), E.121022 (COPS5), E.121104 (FAM117A), E.123427 |
| | (METTL21B), E.125676 (THOC2), E.132275 (RRP8), E.137513 (NARS2), |
| | E.138028 (CGREF1), E.139517 (LNX2), E.143614 (GATAD2B), E.143889 |
| | (HNRPLL), E.145833 (DDX46), E.147403 (RPL10), E.148158 (SNX30), E.151690 |
| | (MFSD6), E.153904 (DDAH1), E.154781 (C3orf19), E.156650 (KAT6B), E.158669 |
| | (AGPAT6), E.159363 (ATP13A2), E.163530 (DPPA2), E.164749 (HNF4G), |
| | E.165496 (RPL10L), E.165688 (PMPCA), E.165792 (METTL17), E.166598 |
| | (HSP90B1), E.168036 (CTNNB1), E.168746 (C20orf62), E.170381 (SEMA3E), |
| | E.171180 (OR2M4), E.171202 (TMEM126A), E.172594 (SMPDL3A), E.172653 |
| | (C17orf66), E.173540 (GMPPB), E.173585 (CCR9), E.173809 (TDRD12), |
| | E.175166 (PSMD2), E.177694 (NAALADL2), E.178026 (FAM211B; C22orf36), |
| | E.184363 (PKP3), E.187634 (SAMD11), E.203837 (PNLIPRP3), E.169122 |
| | (FAM110B), E.197969 (VPS13A), E.136068 (FLNB), E.075856 (SART3), |
| | E.081721 (DUSP12), E.102158 (MAGT1), E.102174 (PHEX), E.102316 |
| | (MAGED2), E.104723 (TUSC3), E.105939 (ZC3HAV1), E.108883 (EFTUD2), |
| | E.110328 (GALNTL4), E.111785 (RIC8B), E.113163 (COL4A3BP), E.115604 |
| | (IL18R1), E.117362 (APH1A), E.117480 (FAAH), E.124767 (GLO1), E.126267 |
| | (COX6B1), E.130175 (PRKCSH), E.135926 (TMBIM1), E.138674 (SEC31A), |
| | E.140451 (PIF1), E.143797 (MBOAT2), E.149646 (C20orf152), E.157064 |
| | (NMNAT2), E.160294 (MCM3AP), E.165084 (C8orf34), E.166946 (CCNDBP1), |
| | E.170348 (TMED10), E.170703 (TTLL6), E.175198 (PCCA), E.180287 (PLD5), |
| | E.183292 (MIR5096), E.187492 (CDHR4), E.188846 (RPL14), E.015479 |
| | (MATR3), E.100823 (APEX1), E.090615 (GOLGA3), E.086062 (B4GALT1), |
| | E.138385 (SSB), E.140265 (ZSCAN29), E.140932 (CMTM2), E.167969 (ECI1), |
| | E.135486 (HNRNPA1), E.137497 (NUMA1), E.181523 (SGSH), E.099956 |
| | (SMARCB1), E.049883 (PTCD2), E.082556 (OPRK1), E.090674 (MCOLN1), |
| | E.107164 (FUBP3), E.108582 (CPD), E.109758 (HGFAC), E.111605 (CPSF6), |
| | E.115239 (ASB3), E.121892 (PDS5A), E.125844 (RRBP1), E.130826 (DKC1), |
| | E.132481 (TRIM47), E.135390 (ATP5G2), E.136875 (PRPF4), E.138621 (PPCDC), |
| | E.145632 (PLK2), E.150051 (MKX), E.153140 (CETN3), E.154127 (UBASH3B), |
| | E.156194 (PPEF2), E.163825 (RTP3), E.164053 (ATRIP), E.164442 (CITED2), |
| | E.168066 (SF1), E.170430 (MGMT), E.175602 (CCDC85B), E.177752 (YIPF7), |
| | E.182512 (GLRX5), E.188186 (C7orf59), E.198721 (ECI2), E.204389 (HSPA1A), |
| | E.010256 (UQCRC1), E.076043 (REXO2), E.102362 (SYTL4), E.161939 |
| | (C17orf49), E.173039 (RELA), E.014216 (CAPN1), E.054938 (CHRDL2), |
| | E.065526 (SPEN), E.070501 (POLB), E.078808 (SDF4), E.083720 (OXCT1), |
| | E.100084 (HIRA), E.101246 (ARFRP1), E.102241 (HTATSF1), E.103591 |
| | (AAGAB), E.104626 (ERI1), E.105221 (AKT2), E.105402 (NAPA), E.105705 |
| | (SUGP1), E.106346 (USP42), E.108639 (SYNGR2), E.110107 (PRPF19), E.112473 |
| | (SLC39A7), E.113282 (CLINT1), E.115234 (SNX17), E.115561 (CHMP3), |
| | E.119906 (FAM178A), E.120733 (KDM3B), E.125375 (ATP5S), E.125798 |
| | (FOXA2), E.127415 (IDUA), E.129810 (SGOL1), E.132382 (MYBBP1A), |
| | E.133313 (CNDP2), E.134077 (THUMPD3), E.134248 (HBXIP), E.135597 |
| | (REPS1), E.137814 (HAUS2), E.138041 (SMEK2), E.140382 (HMG20A), |
| | E.143578 (CREB3L4), E.144224 (UBXN4), E.144306 (SCRN3), E.144741 |
| | (SLC25A26), E.145919 (BOD1), E.146281 (PM20D2), E.152359 (POC5), E.152409 |
| | (JMY), E.154889 (MPPE1), E.157551 (KCNJ15), E.157764 (BRAF), E.158987 |
| | (RAPGEF6), E.162069 (CCDC64B), E.162910 (MRPL55), E.163749 (CCDC158), |
| | E.164045 (CDC25A), E.164300 (SERINC5), E.165898 (ISCA2), E.167987 |
| | (VPS37C), E.168763 (CNNM3), E.170374 (SP7), E.171488 (LRRC8C), E.178381 |
| | (ZFAND2A), E.180998 (GPR137C), E.182318 (ZSCAN22), E.198040 (ZNF84), |
| | E.198216 (CACNA1E), E.198265 (HELZ), E.198586 (TLK1), E.203795 |
| | (FAM24A), E.204231 (RXRB), E.123992 (DNPEP), E.184634 (MED12), E.181885 |
| | (CLDN7), E.186660 (ZFP91), E.126777 (KTN1), E.080823 (MOK), E.101811 |
| | (CSTF2), E.124570 (SERPINB6), E.148835 (TAF5), E.158715 (SLC45A3), |
| | E.110955 (ATP5B), E.127022 (CANX), E.142208 (AKT1), E.128881 (TTBK2), |
| | E.147231 (CXorf57), E.006210 (CX3CL1), E.009830 (POMT2), E.011114 |
| | (BTBD7), E.065057 (NTHL1), E.068724 (TTC7A), E.073584 (SMARCE1), |
| | E.079785 (DDX1), E.084463 (WBP11), E.091140 (DLD), E.099821 (POLRMT), |
| | E.101126 (ADNP), E.104442 (ARMC1), E.105486 (LIG1), E.110921 (MVK), |
| | E.113441 (LNPEP), E.115758 (ODC1), E.116726 (PRAMEF12), E.119681 |
| | (LTBP2), E.136933 (RABEPK), E.137815 (RTF1), E.138095 (LRPPRC), E.138294 |
| | (MSMB), E.141873 (SLC39A3), E.142698 (C1orf94), E.143390 (RFX5), E.148488 |
| | (ST8SIA6), E.148737 (TCF7L2), E.151491 (EPS8), E.152422 (XRCC4), E.154832 |
| | (CXXC1), E.158321 (AUTS2), E.159147 (DONSON), E.160285 (LSS), E.160862 |
| | (AZGP1), E.160948 (VPS28), E.160972 (PPP1R16A), E.165934 (CPSF2), E.167604 |
| | (NFKBID), E.167766 (ZNF83), E.168803 (ADAL), E.169612 (FAM103A1), |
| | E.171262 (FAM98B), E.172893 (DHCR7), E.173889 (PHC3), E.176971 (FIBIN), |
| | E.177548 (RABEP2), E.179119 (SPTY2D1), E.184378 (ACTRT3), E.184508 |
| | (HDDC3), E.185043 (CIB1), E.186814 (ZSCAN30), E.186868 (MAPT), E.196812 |
| | (ZSCAN16), E.198563 (DDX39B), E.124529 (HIST1H4B), E.141002 (TCF25), |
| | E.174100 (MRPL45), E.109814 (UGDH), E.138756 (BMP2K), E.065457 (ADAT1), |
| | E.105948 (TTC26), E.109184 (DCUN1D4), E.125257 (ABCC4), E.126062 |
| | (TMEM115), E.142515 (KLK3), E.144381 (HSPD1), E.166710 (B2M), E.198824 |
| | (CHAMP1), E.078902 (TOLLIP), E.099331 (MYO9B), E.102710 (FAM48A), |
| | E.107485 (GATA3), E.120948 (TARDBP), E.187764 (SEMA4D), E.103855 |
| | (CD276), E.117751 (PPP1R8), E.173714 (WFIKKN2), E.172115 (CYCS), E.005882 |
| | (PDK2), E.007952 (NOX1), E.008118 (CAMK1G), E.012061 (ERCC1), E.015171 |
| | (ZMYND11), E.036257 (CUL3), E.057608 (GDI2), E.058729 (RIOK2), E.071246 |
| | (VASH1), E.073050 (XRCC1), E.073350 (LLGL2), E.079246 (XRCC5), E.085733 |
| | (CTTN), E.091542 (ALKBH5), E.091732 (ZC3HC1), E.092621 (PHGDH), |
| | E.099899 (TRMT2A), E.099917 (MED15), E.101439 (CST3), E.103479 (RBL2), |
| | E.104611 (SH2D4A), E.105281 (SLC1A5), E.106392 (C1GALT1), E.107104 |
| | (KANK1), E.107798 (LIPA), E.108296 (CWC25), E.109572 (CLCN3), E.112110 |
| | (MRPL18), E.113790 (EHHADH), E.115648 (MLPH), E.117308 (GALE), |
| | E.117335 (CD46), E.118513 (MYB), E.118640 (VAMP8), E.119321 (FKBP15), |
| | E.122705 (CLTA), E.123983 (ACSL3), E.124232 (RBPJL), E.125901 (MRPS26), |
| | E.127399 (LRRC61), E.127554 (GFER), E.128708 (HAT1), E.129355 (CDKN2D), |
| | E.130340 (SNX9), E.130935 (NOL11), E.131771 (PPP1R1B), E.133863 (TEX15), |
| | E.134207 (SYT6), E.136935 (GOLGA1), E.141425 (RPRD1A), E.143374 (TARS2), |
| | E.143771 (CNIH4), E.146966 (DENND2A), E.148672 (GLUD1), E.150593 |
| | (PDCD4), E.153936 (HS2ST1), E.154099 (DNAAF1), E.156006 (NAT2), E.156282 |
| | (CLDN17), E.158545 (ZC3H18), E.158604 (TMED4), E.158813 (EDA), E.159184 |
| | (HOXB13), E.161267 (BDH1), E.163492 (CCDC141), E.163629 (PTPN13), |
| | E.164163 (ABCE1), E.164520 (RAET1E), E.165138 (ANKS6), E.165923 (AGBL2), |
| | E.166484 (MAPK7), E.166747 (AP1G1), E.166971 (AKTIP), E.167744 (NTF4), |
| | E.168071 (CCDC88B), E.169087 (HSPBAP1), E.170396 (ZNF804A), E.170445 |
| | (HARS), E.170632 (ARMC10), E.170743 (SYT9), E.171428 (NAT1), E.172346 |
| | (CSDC2), E.173805 (HAP1), E.175175 (PPM1E), E.175203 (DCTN2), E.177542 |
| | (SLC25A22), E.177679 (SRRM3), E.178828 (RNF186), E.182013 (PNMAL1), |
| | E.182054 (IDH2), E.182890 (GLUD2), E.184156 (KCNQ3), E.184697 (CLDN6), |
| | E.184735 (DDX53), E.184840 (TMED9), E.185219 (ZNF445), E.186198 |
| | (SLC51B), E.186205 (MOSC1; MARC1), E.189143 (CLDN4), E.196700 |
| | (ZNF512B), E.196743 (GM2A), E.198087 (CD2AP), E.198951 (NAGA), E.204406 |
| | (MBD5), E.002330 (BAD), E.105404 (RABAC1), E.114127 (XRN1), E.117713 |
| | (ARID1A), E.123143 (PKN1), E.130764 (LRRC47), E.131773 (KHDRBS3), |
| | E.137806 (NDUFAF1), E.142864 (SERBP1), E.158747 (NBL1), E.175063 |
| | (UBE2C), E.178104 (PDE4DIP), E.186472 (PCLO), E.069956 (MAPK6), E.112941 |
| | (PAPD7), E.116604 (MEF2D), E.142875 (PRKACB), E.147133 (TAF1), E.157510 |
| | (AFAP1L1), E.006625 (GGCT), E.155980 (KIF5A), E.134444 (KIAA1468), |
| | E.107968 (MAP3K8), E.117592 (PRDX6), E.123154 (WDR83), E.135297 (MTO1), |
| | E.135829 (DHX9), E.149548 (CCDC15), E.152086 (TUBA3E), E.167553 |
| | (TUBA1C), E.169826 (CSGALNACT2), E.171121 (KCNMB3), E.198033 |
| | (TUBA3C), E.147724 (FAM135B), E.170854 (MINA), E.006695 (COX10), |
| | E.067369 (TP53BP1), E.089248 (ERP29), E.112096 (SOD2), E.138073 (PREB), |
| | E.146856 (AGBL3), E.159423 (ALDH4A1), E.171345 (KRT19), E.172345 |
| | (STARD5), E.111647 (UHRF1BP1L), E.117877 (CD3EAP), E.155714 (PDZD9), |
| | E.156603 (MED19), E.075886 (TUBA3D), E.167699 (GLOD4), E.121749 |
| | (TBC1D15), E.090861 (AARS), E.093010 (COMT), E.117676 (RPS6KA1), |
| | E.157502 (MUM1L1), E.159921 (GNE), E.169562 (GJB1), E.179776 (CDH5), |
| | E.071626 (DAZAP1), E.085224 (ATRX), E.116478 (HDAC1), E.117298 (ECE1), |
| | E.176171 (BNIP3), E.177425 (PAWR), E.179348 (GATA2), E.187840 (EIF4EBP1), |
| | E.033030 (ZCCHC8), E.049239 (H6PD), E.060688 (SNRNP40), E.075239 |
| | (ACAT1), E.095627 (TDRD1), E.109625 (CPZ), E.113719 (ERGIC1), E.126773 |
| | (C14orf135; PCNXL4), E.149218 (ENDOD1), E.162975 (KCNF1), E.183785 |
| | (TUBA8), E.198589 (LRBA), E.105379 (ETFB), E.011052 (NME2), E.011143 |
| | (MKS1), E.048544 (MRPS10), E.062485 (CS), E.114054 (PCCB), E.138587 |
| | (MNS1), E.155959 (VBP1), E.181222 (POLR2A), E.183723 (CMTM4), E.184661 |
| | (CDCA2), E.204316 (MRPL38), E.140694 (PARN), E.035141 (FAM136A), |
| | E.095485 (CWF19L1), E.115540 (MOB4), E.123595 (RAB9A), E.140678 |
| | (ITGAX), E.141258 (SGSM2), E.158941 (KIAA1967), E.169189 (NSMCE1), |
| | E.198431 (TXNRD1), E.016402 (IL20RA), E.112234 (FBXL4), E.125445 |
| | (MRPS7), E.128342 (LIF), E.164051 (CCDC51), E.175866 (BAIAP2), E.102780 |
| | (DGKH), E.203813 (HIST1H3H), E.198231 (DDX42), E.030582 (GRN), E.106049 |
| | (HIBADH), E.130810 (PPAN), E.132475 (H3F3B), E.158290 (CUL4B), E.166266 |
| | (CUL5), E.026559 (KCNG1), E.059122 (FLYWCH1), E.107897 (ACBD5), |
| | E.121068 (TBX2), E.125944 (HNRNPR), E.134308 (YWHAQ), E.137558 (PI15), |
| | E.137601 (NEK1), E.147548 (WHSC1L1), E.149182 (ARFGAP2), E.159658 |
| | (KIAA0494), E.165699 (TSC1), E.170927 (PKHD1), E.186575 (NF2), E.188021 |
| | (UBQLN2), E.167552 (TUBA1A), E.003756 (RBM5), E.134138 (MEIS2), |
| | E.008196 (TFAP2B), E.079313 (REXO1), E.089127 (OAS1), E.106078 (COBL), |
| | E.113645 (WWC1), E.116288 (PARK7), E.121940 (CLCC1), E.136280 (CCM2), |
| | E.141639 (MAPK4), E.147475 (ERLIN2), E.155660 (PDIA4), E.162298 (SYVN1), |
| | E.176978 (DPP7), E.176994 (SMCR8), E.178175 (ZNF366), E.196591 (HDAC2), |
| | E.127824 (TUBA4A), E.163932 (PRKCD), E.143375 (CGN), E.076864 |
| | (RAP1GAP), E.138772 (ANXA3), E.163041 (H3F3A), E.165813 (C10orf118), |
| | E.166337 (TAF10), E.178078 (STAP2), E.184007 (PTP4A2), E.167004 (PDIA3), |
| | E.039560 (RAI14), E.119636 (C14orf45), E.140374 (ETFA), E.143633 (C1orf131), |
| | E.144935 (TRPC1), E.156735 (BAG4), E.159348 (CYB5R1), E.170275 (CRTAP), |
| | E.172717 (FAM71D), E.172939 (OXSR1), E.176105 (YES1), E.078295 (ADCY2), |
| | E.119888 (EPCAM), E.141522 (ARHGDIA), E.184047 (DIABLO), E.109062 |
| | (SLC9A3R1), E.170037 (CNTROB), E.066557 (LRRC40), E.074964 |
| | (ARHGEF10L), E.078269 (SYNJ2), E.090013 (BLVRB), E.100142 (POLR2F), |
| | E.100399 (CHADL), E.104365 (IKBKB), E.111261 (MANSC1), E.111907 |
| | (TPD52L1), E.112578 (BYSL), E.121957 (GPSM2), E.122884 (P4HA1), E.124693 |
| | (HIST1H3B), E.126653 (NSRP1), E.130402 (ACTN4), E.138757 (G3BP2), |
| | E.150991 (UBC), E.164828 (SUN1), E.175216 (CKAP5), E.176155 (CCDC57), |
| | E.177459 (C8orf47), E.183856 (IQGAP3), E.185122 (HSF1), E.122952 (ZWINT), |
| | E.151093 (OXSM), E.067704 (IARS2), E.088899 (ProSAP-interacting protein 1), |
| | E.091483 (FH), E.114388 (NPRL2), E.114861 (FOXP1), E.135914 (HTR2B), |
| | E.197837 (HIST4H4), E.127720 (C12orf26; METTL25), E.123416 (TUBA1B), |
| | E.047410 (TPR), E.117748 (RPA2), E.133835 (HSD17B4), E.067248 (DHX29), |
| | E.121879 (PIK3CA), E.132589 (FLOT2), E.136750 (GAD2), E.160789 (LMNA), |
| | E.166329, E.170088 (TMEM192), E.175946 (KLHL38), E.178163 (ZNF518B), |
| | E.182217 (HIST2H4B), E.184470 (TXNRD2), E.110321 (EIF4G2), E.171861 |
| | (RNMTL1), E.065978 (YBX1), E.115738 (ID2), E.143294 (PRCC), E.158042 |
| | (MRPL17), E.169093 (ASMTL), E.090565 (RAB11FIP3), E.185591 (SP1), |
| | E.156304 (SCAF4), E.092978 (GPATCH2), E.100056 (DGCR14), E.100583 |
| | (SAMD15), E.105723 (GSK3A), E.107551 (RASSF4), E.107581 (EIF3A), |
| | E.107890 (ANKRD26), E.110104 (CCDC86), E.112584 (FAM120B), E.113580 |
| | (NR3C1), E.114491 (UMPS), E.137312 (FLOT1), E.137955 (RABGGTB), |
| | E.141994 (DUS3L), E.147044 (CASK), E.152818 (UTRN), E.180667 (YOD1), |
| | E.184916 (JAG2), E.196526 (AFAP1), E.198783 (ZNF830), E.108465 |
| | (CDK5RAP3), E.156515 (HK1), E.036448 (MYOM2), E.061918 (GUCY1B3), |
| | E.070785 (EIF2B3), E.116044 (NFE2L2), E.128311 (TST), E.131473 (ACLY), |
| | E.132716 (DCAF8), E.138363 (ATIC), E.166596 (WDR16), E.170027 (YWHAG), |
| | E.174021 (GNG5), E.203879 (GDI1), E.160049 (DFFA), E.010810 (FYN), |
| | E.051596 (THOC3), E.006453 (BAI1-associated protein 2-like 1), E.126945 |
| | (HNRNPH2), E.165695 (AK8), E.069869 (NEDD4), E.111801 (BTN3A3), |
| | E.112232 (KHDRBS2), E.128626 (MRPS12), E.129636 (ITFG1), E.137948 |
| | (BRDT), E.147257 (GPC3), E.155380 (SLC16A1), E.159692 (CTBP1), E.166833 |
| | (NAV2), E.172466 (ZNF24), E.175110 (MRPS22), E.176102 (CSTF3), E.179388 |
| | (EGR3), E.185359 (HGS), E.198001 (IRAK4), E.100603 (SNW1), E.162641 |
| | (AKNAD1), E.069712 (KIAA1107), E.073756 (PTGS2), E.077522 (ACTN2), |
| | E.101639 (CEP192), E.106633 (GCK), E.115241 (PPM1G), E.116649 (SRM), |
| | E.120370 (GORAB), E.124143 (ARHGAP40), E.127948 (POR), E.129315 |
| | (CCNT1), E.132646 (PCNA), E.135740 (SLC9A5), E.151726 (ACSL1), E.154380 |
| | (ENAH), E.157103 (SLC6A1), E.163930 (BAP1), E.164488 (DACT2), E.164754 |
| | (RAD21), E.175220 (ARHGAP1), E.180318 (ALX1), E.181234 (TMEM132C), |
| | E.197081 (IGF2R), E.092871 (RFFL), E.163644 (PPM1K), E.171723 (GPHN), |
| | E.108953 (YWHAE), E.072110 (ACTN1), E.077097 (TOP2B), E.090889 (KIF4A), |
| | E.114331 (ACAP2), E.114867 (EIF4G1), E.117593 (DARS2), E.118523 (CTGF), |
| | E.120915 (EPHX2), E.134759 (ELP2), E.138061 (CYP1B1), E.140743 (CDR2), |
| | E.151247 (EIF4E), E.152942 (RAD17), E.160685 (ZBTB7B), E.163923 (RPL39L), |
| | E.167642 (SPINT2), E.167996 (FTH1), E.185736 (ADARB2), E.198841 (KTI12), |
| | E.185860 (C1orf110), E.160226 (C21orf2), E.070814 (TCOF1), E.124749 |
| | (COL21A1), E.154639 (CXADR), E.065485 (PDIA5), E.023909 (GCLM), |
| | E.100714 (MTHFD1), E.108387 (SEPT4), E.160867 (FGFR4), E.134684 (YARS), |
| | E.123080 (CDKN2C), E.065548 (ZC3H15), E.116455 (WDR77), E.117448 |
| | (AKR1A1), E.100393 (EP300), E.138160 (KIF11), E.166263 (STXBP4), E.173473 |
| | (SMARCC1), E.124942 (AHNAK), E.174842 (GLMN), E.180198 (RCC1), |
| | E.185499 (MUC1), E.143947 (RPS27A), E.170315 (UBB), E.003402 (CFLAR), |
| | E.137055 (PLAA), E.142606 (MMEL1), E.147697 (GSDMC), E.163110 (PDLIM5), |
| | E.135842 (FAM129A), E.160691 (SHC1), E.197157 (SND1), E.029725 (RABEP1), |
| | E.127946 (HIP1), E.001036 (FUCA2), E.109846 (CRYAB), E.183831 (ANKRD45), |
| | E.189283 (FHIT), E.092820 (EZR), E.104067 (TJP1), E.120159 (C9orf82; CAAP1), |
| | E.154864 (PIEZO2), E.196975 (ANXA4), E.105220 (GPI), E.127914 (AKAP9), |
| | E.135870 (RC3H1), E.026508 (CD44), E.089154 (GCN1L1), E.100311 (PDGFB), |
| | E.119383 (PPP2R4), E.075624 (ACTB), E.177409 (SAMD9L), E.177731 (FLII), |
| | E.015676 (NUDCD3), E.146457 (WTAP), E.178950 (GAK), E.167110 (GOLGA2) |
| Prostate vesicle | LAMP2, ACPP, CTNNA1, HEBP2, ISOC2, HNRNPC, HNRNPM, TOMM22, |
| | TOM1, ACO2, KRT18, HSPA9, LMNB1, SPR, PPL, ALDH6A1, HNRNPA2B1, |
| | ATXN1, SMARCA4, ECHS1, PAICS, ILF3, PSME3, COX5B, RAB1A, SCARB2, |
| | HADH, ESD, SORD, ILF2, CALM2, ATP5A1, TGOLN2, ANGPTL4, ALCAM, |
| | KRT2, PC, NPM1, C1orf116, GPC6, ALDH1A3, HIST1H1C, XRCC6, HNRNPAB, |
| | PSAP, CDH1, SCAMP2, VASP, CD9, ATP1B3, HSD17B10, APAF1, EIF2C2, |
| | RAB5A, CFL2, FARSA, XPNPEP3, ENTPD4, APLP2, NUCB1, RAB3D, VEGFA, |
| | HPS3, TSNAXIP1, HNRNPL, PSMB7, GNA12, NONO, FOLH1, PRKAR2A, PHB, |
| | HIST3H3, MAP7, VCP, U2AF2, FUS, FKBP5, NDRG1, ATP1A3, NCL, RPL36, |
| | KRT8, C1GALT1C1, FASN, PTBP1, TXNDC16, DNAJC5, SLC37A2, HNRNPK, |
| | VDAC2, PRDX2, TALDO1, USP14, PSMD7, HSPE1, DNAJB1, YWHAZ, |
| | RAB3B, CORO1B, MDH2, HIST1H3A, LAMP1, STC2, DSTN, SLC20A2, ENPP4, |
| | WIZ, HSP90AB1, IDH3B, ECH1, C1QBP, SET, TNFSF18, ITGB7, SPOCK1, |
| | EIF4A2, CCT3, CLDN3, EEF2, LRRC57, RUVBL2, CLDN5, APPL2, TM9SF2, |
| | EIF4A3, DBI, DBF4B, SVIP, CD151, ALOX5, SLC9A3R2, RAB27B, DLG1, |
| | ARCN1, CHCHD3, RAB5B, RPS25, RPL10, DDAH1, HSP90B1, CTNNB1, |
| | PSMD2, PKP3, FLNB, EFTUD2, GLO1, PRKCSH, TMBIM1, SEC31A, TMED10, |
| | RPL14, MATR3, APEX1, B4GALT1, HNRNPA1, CPD, HSPA1A, CAPN1, |
| | CHRDL2, SPEN, SDF4, NAPA, SYNGR2, CHMP3, CNDP2, CCDC64B, |
| | SERINC5, VPS37C, DNPEP, CLDN7, KTN1, SERPINB6, ATP5B, CANX, AKT1, |
| | TTBK2, DDX1, DLD, LNPEP, LTBP2, LRPPRC, EPS8, AZGP1, VPS28, DHCR7, |
| | CIB1, DDX39B, HIST1H4B, UGDH, HSPD1, B2M, TOLLIP, CD276, CYCS, |
| | CUL3, GDI2, LLGL2, XRCC5, CTTN, PHGDH, CST3, RBL2, SLC1A5, CD46, |
| | VAMP8, CLTA, ACSL3, MRPS26, SNX9, GLUD1, TMED4, PTPN13, AP1G1, |
| | SYT9, DCTN2, IDH2, GLUD2, TMED9, CLDN4, GM2A, CD2AP, MBD5, |
| | SERBP1, NBL1, PRKACB, GGCT, PRDX6, DHX9, TUBA3E, TUBA1C, |
| | TUBA3C, ERP29, SOD2, KRT19, TUBA3D, AARS, COMT, MUM1L1, CDH5, |
| | ECE1, ACAT1, ENDOD1, TUBA8, ETFB, NME2, CS, VBP1, RAB9A, TXNRD1, |
| | LIF, BAIAP2, HIST1H3H, GRN, HIBADH, H3F3B, CUL4B, HNRNPR, YWHAQ, |
| | PKHD1, TUBA1A, PARK7, ERLIN2, PDIA4, TUBA4A, PRKCD, ANXA3, |
| | H3F3A, PTP4A2, PDIA3, ETFA, CYB5R1, CRTAP, OXSR1, YES1, EPCAM, |
| | ARHGDIA, DIABLO, SLC9A3R1, BLVRB, P4HA1, HIST1H3B, ACTN4, UBC, |
| | FH, HIST4H4, TUBA1B, HSD17B4, PIK3CA, FLOT2, LMNA, TMEM192, |
| | HIST2H4B, YBX1, EIF3A, FLOT1, UTRN, HK1, ACLY, ATIC, YWHAG, GNG5, |
| | GDI1, HNRNPH2, NEDD4, BTN3A3, SLC16A1, HGS, ACTN2, SRM, PCNA, |
| | ACSL1, RAD21, ARHGAP1, IGF2R, YWHAE, ACTN1, EIF4G1, EPHX2, EIF4E, |
| | FTH1, CXADR, MTHFD1, AKR1A1, STXBP4, AHNAK, MUC1, RPS27A, UBB, |
| | PDLIM5, FAM129A, SND1, FUCA2, CRYAB, EZR, TJP1, ANXA4, GPI, AKAP9, |
| | CD44, GCN1L1, ACTB, FLII, NUDCD3 |
| Prostate Cancer | EGFR, GLUD2, ANXA3, APLP2, BclG, Cofilin 2/cfL2, DCTN-50/DCTN2, |
| vesicles | DDAH1, ESD, FARSLA, GITRL, PRKCSH, SLC20A2, Synaptogyrin 2/SYNGR2, |
| | TM9SF2, Calnexin, TOMM22, NDRG1, RPL10, RPL14, USP14, VDAC2, LLGL2, |
| | CD63, CD81, uPAR/CD87, ADAM 9, BDKRB2, CCR5, CCT2 (TCP1-beta), |
| | PSMA, PSMA1, HSPB1, VAMP8, Rab1A, B4GALT1, Aspartyl Aminopeptidase/ |
| | Dnpep, ATPase Na+/K+ beta 3/ATP1B3, BDNF, ATPB, beta 2 Microglobulin, |
| | Calmodulin 2/CALM2, CD9, XRCC5/Ku80, SMARCA4, TOM1, Cytochrome C, |
| | Hsp10/HSPE1, COX2/PTGS2, Claudin 4/CLDN4, Cytokeratin 8, |
| | Cortactin/CTTN, DBF4B/DRF1, ECH1, ECHS1, GOLPH2, ETS1, DIP13B/appl2, |
| | EZH2/KMT6, GSTP1, hK2/Kif2a, IQGAP1, KLK13, Lamp-2, GM2A, |
| | Hsp40/DNAJB1, HADH/HADHSC, Hsp90B, Nucleophosmin, p130/RBL2, |
| | PHGDH, RAB3B, ANXA1, PSMD7, PTBP1, Rab5a, SCARB2, Stanniocalcin 2/ |
| | STC2, TGN46/TGOLN2, TSNAXIP1, ANXA2, CD46, KLK14, IL1alpha, hnRNP |
| | C1 + C2, hnRNP A1, hnRNP A2B1, Claudin 5, CORO1B, Integrin beta 7, CD41, |
| | CD49d, CDH2, COX5b, IDH2, ME1, PhIP, ALDOA, EDNRB/EDN3, MTA1, |
| | NKX3-1, TMPRSS2, CD10, CD24, CDH1, ADAM10, B7H3, CD276, CHRDL2, |
| | SPOCK1, VEGFA, BCHE, CD151, CD166/ALCAM, CSE1L, GPC6, CXCR3, |
| | GAL3, GDF15, IGFBP-2, HGF, KLK12, ITGAL, KLK7, KLK9, MMP 2, MMP 25, |
| | MMP10, TNFRI, Notch1, PAP—same as ACPP, PTPN13/PTPL1, seprase/FAP, |
| | TNFR1, TWEAK, VEGFR2, E-Cadherin, Hsp60, CLDN3—Claudin3, KLK6, KLK8, |
| | EDIL3 (del-1), APE1, MMP 1, MMP3, nAnS, PSP94/MSP/IGBF, PSAP, RPL19, |
| | SET, TGFB, TGM2, TIMP-1, TNFRII, MDH2, PKP1, Cystatin C, Trop2/ |
| | TACSTD2, CCR2/CD192, hnRNP M1-M4, CDKN1A, CGA, Cytokeratin 18, |
| | EpoR, GGPS1, FTL (light and heavy), GM-CSF, HSP90AA1, IDH3B, MKI67/Ki67, |
| | LTBP2, KLK1, KLK4, KLK5, LDH-A, Nav1.7/SCN9A, NRP1/CD304, PIP3/ |
| | BPNT1, PKP3, CgA, PRDX2, SRVN, ATPase Na+/K+ alpha 3/ATP1A3, SLC3A2/ |
| | CD98, U2AF2, TLR4 (CD284), TMPRSS1, TNFα, uPA, GloI, ALIX, PKM2, |
| | FABP5, CAV1, TLR9/CD289, ANXA4, PLEKHC1/Kindlin-2, CD71/TRFR, |
| | MBD5, SPEN/RBM15, LGALS8, SLC9A3R2, ENTPD4, ANGPTL4, p97/VCP, |
| | TBX5, PTEN, Prohibitin, LSP1, HOXB13, DDX1, AKT1, ARF6, EZR, H3F3A, |
| | CIB1, Ku70 (XRCC6), KLK11, TMBIM6, SYT9, APAF1, CLDN7, MATR3, |
| | CD90/THY1, Tollip, NOTCH4, 14-3-3 zeta/beta, ATP5A1, DLG1, GRP94, |
| | FKBP5/FKBP51, LAMP1, LGALS3BP, GDI2, HSPA1A, NCL, KLK15, |
| | Cytokeratin basic, EDN-3, AGR2, KLK10, BRG1, FUS, Histone H4, hnRNP L, |
| | Catenin Alpha 1, hnRNP K (F45)*, MMP7*, DBI*, beta catenin, CTH, CTNND2, |
| | Ataxin 1, Proteasome 20S beta 7, ADE2, EZH2, GSTP1, Lamin B1, Coatomer |
| | Subunit Delta, ERAB, Mortalin, PKM2, IGFBP-3, CTNND1/delta 1-catenin/ |
| | p120-catenin, PKA R2, NONO, Sorbitol Dehydrogenase, Aconitase 2, VASP, |
| | Lipoamide Dehydrogenase, AP1G1, GOLPH2, ALDH6A1, AZGP1, Ago2, CNDP2, |
| | Nucleobindin-1, SerpinB6, RUVBL2, Proteasome 19S 10B, SH3PX1, SPR, Destrin, |
| | MDM4, FLNB, FASN, PSME |
| Prostate Cancer | 14-3-3 zeta/beta, Aconitase 2, ADAM 9, ADAM10, ADE2, AFM, Ago2, AGR2, |
| vesicles | AKT1, ALDH1A3, ALDH6A1, ALDOA, ALIX, ANGPTL4, ANXA1, ANXA2, |
| | ANXA3, ANXA3, ANXA4, AP1G1, APAF1, APE1, APLP2, APLP2, ARF6, |
| | Aspartyl Aminopeptidase/Dnpep, Ataxin 1, ATP5A1, ATPase Na+/K+ alpha |
| | 3/ATP1A3, ATPase Na+/K+ beta 3/ATP1B3, ATPase Na+/K+ beta 3/ATP1B3, |
| | ATPB, AZGP1, B4GALT1, B7H3, BCHE, BclG, BDKRB2, BDNF, BDNF, beta 2 |
| | Microglobulin, beta catenin, BRG1, CALM2, Calmodulin 2/CALM2, Calnexin, |
| | Calpain 1, Catenin Alpha 1, CAV1, CCR2/CD192, CCR5, CCT2 (TCP1-beta), |
| | CD10, CD151, CD166/ALCAM, CD24, CD276, CD41, CD46, CD49d, CD63, |
| | CD71/TRFR, CD81, CD9, CD9, CD90/THY1, CDH1, CDH2, CDKN1A, CGA, |
| | CgA, CHRDL2, CIB1, CIB1, Claudin 4/CLDN4, Claudin 5, CLDN3, CLDN3- |
| | Claudin3, CLDN4, CLDN7, CNDP2, Coatomer Subunit Delta, Cofilin 2/cfL2, |
| | CORO1B, Cortactin/CTTN, COX2/PTGS2, COX5b, CSE1L, CTH, CTNND1/ |
| | delta 1-catenin/p120-catenin, CTNND2, CXCR3, CYCS, Cystatin C, Cytochrome |
| | C, Cytokeratin 18, Cytokeratin 8, Cytokeratin basic, DBF4B/DRF1, DBI*, DCTN- |
| | 50/DCTN2, DDAH1, DDAH1, DDX1, Destrin, DIP13B/appl2, DIP13B/appl2, |
| | DLG1, Dnpep, E-Cadherin, ECH1, ECHS1, ECHS1, EDIL3 (del-1), EDN-3, |
| | EDNRB/EDN3, EGFR, EIF4A3, ENTPD4, EpoR, EpoR, ERAB, ESD, ESD, ETS1, |
| | ETS1, ETS-2, EZH2, EZH2/KMT6, EZR, FABP5, FARSLA, FASN, |
| | FKBP5/FKBP51, FLNB, FTL (light and heavy), FUS, GAL3, gamma-catenin, |
| | GDF15, GDI2, GGPS1, GGPS1, GITRL, GloI, GLUD2, GM2A, GM-CSF, |
| | GOLM1/GOLPH2 Mab; clone 3B10, GOLPH2, GOLPH2, GPC6, GRP94, GSTP1, |
| | GSTP1, H3F3A, HADH/HADHSC, HGF, HIST1H3A, Histone H4, hK2/Kif2a, |
| | hnRNP A1, hnRNP A2B1, hnRNP C1 + C2, hnRNP K (F45)*, hnRNP L, hnRNP |
| | M1-M4, HOXB13, Hsp10/HSPE1, Hsp40/DNAJB1, Hsp60, HSP90AA1, Hsp90B, |
| | HSPA1A, HSPB1, IDH2, IDH3B, IDH3B, IGFBP-2, IGFBP-3, IgG1, IgG2A, |
| | IgG2B, IL1alpha, IL1alpha, Integrin beta 7, IQGAP1, ITGAL, KLHL12/C3IP1, |
| | KLK1, KLK10, KLK11, KLK12, KLK13, KLK14, KLK15, KLK4, KLK5, KLK6, |
| | KLK7, KLK8, KLK9, Ku70 (XRCC6), Lamin B1, LAMP1, Lamp-2, LDH-A, |
| | LGALS3BP, LGALS8, Lipoamide Dehydrogenase, LLGL2, LSP1, LSP1, LTBP2, |
| | MATR3, MBD5, MDH2, MDM4, ME1, MKI67/Ki67, MMP 1, MMP 2, MMP 25, |
| | MMP10, MMP-14/MT1-MMP, MMP3, MMP7*, Mortalin, MTA1, nAnS, nAnS, |
| | Nav1.7/SCN9A, NCL, NDRG1, NKX3-1, NONO, Notch1, NOTCH4, NRP1/ |
| | CD304, Nucleobindin-1, Nucleophosmin, p130/RBL2, p97/VCP, PAP—same as |
| | ACPP, PHGDH, PhIP, PIP3/BPNT1, PKA R2, PKM2, PKM2, PKP1, PKP3, |
| | PLEKHC1/Kindlin-2, PRDX2, PRKCSH, Prohibitin, Proteasome 19S 10B, |
| | Proteasome 20S beta 7, PSAP, PSMA, PSMA1, PSMA1, PSMD7, PSMD7, PSME3, |
| | PSP94/MSP/IGBF, PTBP1, PTEN, PTPN13/PTPL1, Rab1A, RAB3B, Rab5a, |
| | Rad51b, RPL10, RPL10, RPL14, RPL14, RPL19, RUVBL2, SCARB2, |
| | seprase/FAP, SerpinB6, SET, SH3PX1, SLC20A2, SLC3A2/CD98, SLC9A3R2, |
| | SMARCA4, Sorbitol Dehydrogenase, SPEN/RBM15, SPOCK1, SPR, SRVN, |
| | Stanniocalcin 2/STC2, STEAP1, Synaptogyrin 2/SYNGR2, Syndecan, SYNGR2, |
| | SYT9, TAF1B/GRHL1, TBX5, TGFB, TGM2, TGN46/TGOLN2, TIMP-1, TLR3, |
| | TLR4 (CD284), TLR9/CD289, TM9SF2, TMBIM6, TMPRSS1, TMPRSS2, |
| | TNFR1, TNFRI, TNFRII, TNFSF18/GITRL, TNFα, TNFα, Tollip, TOM1, |
| | TOMM22, Trop2/TACSTD2, TSNAXIP1, TWEAK, U2AF2, uPA, uPAR/CD87, |
| | USP14, USP14, VAMP8, VASP, VDAC2, VEGFA, VEGFR1/FLT1, VEGFR2, |
| | VPS28, XRCC5/Ku80, XRCC5/Ku80 |
| Prostate Vesicles/ | EpCAM/TROP-1, HSA, Fibrinogen, GAPDH, Cholesterol Oxidase, MMP7, |
| General | Complement Factor D/Adipsin, E-Cadherin, Transferrin Antibody, eNOS, IgM, |
| Vesicles | CD9, Apolipoprotein B (Apo B), Ep-CAM, TBG, Kallekerin 3, IgA, IgG, Annexin |
| | V, IgG, Pyruvate Carboxylase, trypsin, AFP, TNF RI/TNFRSF1A, Aptamer |
| | CAR023, Aptamer CAR024, Aptamer CAR025, Aptamer CAR026 |
| Ribonucleoprotein | GW182, Ago2, miR-let-7a, miR-16, miR-22, miR-148a, miR-451, miR-92a, CD9, |
| complexes & | CD63, CD81 |
| vesicles | |
| Prostate Cancer | PCSA, Muc2, Adam10 |
| vesicles | |
| Prostate Cancer | Alkaline Phosphatase (AP), CD63, MyoD1, Neuron Specific Enolase, MAP1B, |
| vesicles | CNPase, Prohibitin, CD45RO, Heat Shock Protein 27, Collagen II, Laminin B1/b1, |
| | Gai1, CDw75, bcl-XL, Laminin-s, Ferritin, CD21, ADP-ribosylation Factor (ARF-6) |
| Prostate Cancer | CD56/NCAM-1, Heat Shock Protein 27/hsp27, CD45RO, MAP1B, MyoD1, |
| vesicles | CD45/T200/LCA, CD3zeta, Laminin-s, bcl-XL, Rad18, Gai1, Thymidylate |
| | Synthase, Alkaline Phosphatase (AP), CD63, MMP-16/MT3-MMP, Cyclin C, |
| | Neuron Specific Enolase, SIRP a1, Laminin B1/b1, Amyloid Beta (APP), SODD |
| | (Silencer of Death Domain), CDC37, Gab-1, E2F-2, CD6, Mast Cell Chymase, |
| | Gamma Glutamylcysteine Synthetase (GCS) |
| Prostate Cancer | EpCAM, MMP7, PCSA, BCNP, ADAM10, KLK2, SPDEF, CD81, MFGE8, IL-8 |
| vesicles | |
| Prostate Cancer | EpCAM, KLK2, PBP, SPDEF, SSX2, SSX4 |
| vesicles | |
| Prostate Cancer | ADAM-10, BCNP, CD9, EGFR, EpCam, IL1B, KLK2, MMP7, p53, PBP, PCSA, |
| vesicles | SERPINB3, SPDEF, SSX2, SSX4 |
| Androgen | GTF2F1, CTNNB1, PTEN, APPL1, GAPDH, CDC37, PNRC1, AES, UXT, RAN, |
| Receptor (AR) | PA2G4, JUN, BAG1, UBE2I, HDAC1, COX5B, NCOR2, STUB1, HIPK3, PXN, |
| pathway | NCOA4 |
| members in | |
| cMVs | |
| EGFR1 pathway | RALBP1, SH3BGRL, RBBP7, REPS1, SNRPD2, CEBPB, APPL1, MAP3K3, |
| members in | EEF1A1, GRB2, RAC1, SNCA, MAP2K3, CEBPA, CDC42, SH3KBP1, CBL, |
| cMVs | PTPN6, YWHAB, FOXO1, JAK1, KRT8, RALGDS, SMAD2, VAV1, NDUFA13, |
| | PRKCB1, MYC, JUN, RFXANK, HDAC1, HIST3H3, PEBP1, PXN, TNIP1, PKN2 |
| TNF-alpha | BCL3, SMARCE1, RPS11, CDC37, RPL6, RPL8, PAPOLA, PSMC1, CASP3, |
| pathway | AKT2, MAP3K7IP2, POLR2L, TRADD, SMARCA4, HIST3H3, GNB2L1, |
| members in | PSMD1, PEBP1, HSPB1, TNIP1, RPS13, ZFAND5, YWHAQ, COMMD1, COPS3, |
| cMVs | POLR1D, SMARCC2, MAP3K3, BIRC3, UBE2D2, HDAC2, CASP8, MCM7, |
| | PSMD7, YWHAG, NFKBIA, CAST, YWHAB, G3BP2, PSMD13, FBL, RELB, |
| | YWHAZ, SKP1, UBE2D3, PDCD2, HSP90AA1, HDAC1, KPNA2, RPL30, GTF2I, |
| | PFDN2 |
| Colorectal cancer | CD9, EGFR, NGAL, CD81, STEAP, CD24, A33, CD66E, EPHA2, Ferritin, GPR30, |
| | GPR110, MMP9, OPN, p53, TMEM211, TROP2, TGM2, TIMP, EGFR, DR3, |
| | UNC93A, MUC17, EpCAM, MUC1, MUC2, TSG101, CD63, B7H3 |
| Colorectal cancer | DR3, STEAP, epha2, TMEM211, unc93A, A33, CD24, NGAL, EpCam, MUC17, |
| | TROP2, TETS |
| Colorectal cancer | A33, AFP, ALIX, ALX4, ANCA, APC, ASCA, AURKA, AURKB, B7H3, BANK1, |
| | BCNP, BDNF, CA-19-9, CCSA-2, CCSA-3&4, CD10, CD24, CD44, CD63, CD66 |
| | CEA, CD66e CEA, CD81, CD9, CDA, C-Erb2, CRMP-2, CRP, CRTN, CXCL12, |
| | CYFRA21-1, DcR3, DLL4, DR3, EGFR, Epcam, EphA2, FASL, FRT, GAL3, |
| | GDF15, GPCR (GPR110), GPR30, GRO-1, HBD 1, HBD2, HNP1-3, IL-1B, IL8, |
| | IMP3, L1CAM, LAMN, MACC-1, MGC20553, MCP-1, M-CSF, MIC1, MIF, |
| | MMP7, MMP9, MS4A1, MUC1, MUC17, MUC2, Ncam, NGAL, NNMT, OPN, |
| | p53, PCSA, PDGFRB, PRL, PSMA, PSME3, Reg IV, SCRN1, Sept-9, SPARC, |
| | SPON2, SPR, SRVN, TFF3, TGM2, TIMP-1, TMEM211, TNF-alpha, TPA, TPS, |
| | Trail-R2, Trail-R4, TrKB, TROP2, Tsg 101, TWEAK, UNC93A, VEGFA |
| Colorectal cancer | miR 92, miR 21, miR 9, miR 491 |
| Colorectal cancer | miR-127-3p, miR-92a, miR-486-3p, miR-378 |
| Colorectal cancer | TMEM211, MUC1, CD24 and/or GPR110 (GPCR 110) |
| Colorectal cancer | hsa-miR-376c, hsa-miR-215, hsa-miR-652, hsa-miR-582-5p, hsa-miR-324-5p, hsa- |
| | miR-1296, hsa-miR-28-5p, hsa-miR-190, hsa-miR-590-5p, hsa-miR-202, hsa-miR- |
| | 195 |
| Colorectal cancer | A26C1A, A26C1B, A2M, ACAA2, ACE, ACOT7, ACP1, ACTA1, ACTA2, ACTB, |
| vesicle markers | ACTBL2, ACTBL3, ACTC1, ACTG1, ACTG2, ACTN1, ACTN2, ACTN4, |
| | ACTR3, ADAM10, ADSL, AGR2, AGR3, AGRN, AHCY, AHNAK, AKR1B10, |
| | ALB, ALDH16A1, ALDH1A1, ALDOA, ANXA1, ANXA11, ANXA2, ANXA2P2, |
| | ANXA4, ANXA5, ANXA6, AP2A1, AP2A2, APOA1, ARF1, ARF3, ARF4, ARF5, |
| | ARF6, ARHGDIA, ARPC3, ARPC5L, ARRDC1, ARVCF, ASCC3L1, ASNS, |
| | ATP1A1, ATP1A2, ATP1A3, ATP1B1, ATP4A, ATP5A1, ATP5B, ATP5I, ATP5L, |
| | ATP5O, ATP6AP2, B2M, BAIAP2, BAIAP2L1, BRI3BP, BSG, BUB3, C1orf58, |
| | C5orf32, CAD, CALM1, CALM2, CALM3, CAND1, CANX, CAPZA1, CBR1, |
| | CBR3, CCT2, CCT3, CCT4, CCT5, CCT6A, CCT7, CCT8, CD44, CD46, CD55, |
| | CD59, CD63, CD81, CD82, CD9, CDC42, CDH1, CDH17, CEACAM5, CFL1, |
| | CFL2, CHMP1A, CHMP2A, CHMP4B, CKB, CLDN3, CLDN4, CLDN7, CLIC1, |
| | CLIC4, CLSTN1, CLTC, CLTCL1, CLU, COL12A1, COPB1, COPB2, CORO1C, |
| | COX4I1, COX5B, CRYZ, CSPG4, CSRP1, CST3, CTNNA1, CTNNB1, CTNND1, |
| | CTTN, CYFIP1, DCD, DERA, DIP2A, DIP2B, DIP2C, DMBT1, DPEP1, DPP4, |
| | DYNC1H1, EDIL3, EEF1A1, EEF1A2, EEF1AL3, EEF1G, EEF2, EFNB1, EGFR, |
| | EHD1, EHD4, EIF3EIP, EIF3I, EIF4A1, EIF4A2, ENO1, ENO2, ENO3, EPHA2, |
| | EPHA5, EPHB1, EPHB2, EPHB3, EPHB4, EPPK1, ESD, EZR, F11R, F5, F7, |
| | FAM125A, FAM125B, FAM129B, FASLG, FASN, FAT, FCGBP, FER1L3, |
| | FKBP1A, FLNA, FLNB, FLOT1, FLOT2, G6PD, GAPDH, GARS, GCN1L1, |
| | GDI2, GK, GMDS, GNA13, GNAI2, GNAI3, GNAS, GNB1, GNB2, GNB2L1, |
| | GNB3, GNB4, GNG12, GOLGA7, GPA33, GPI, GPRC5A, GSN, GSTP1, H2AFJ, |
| | HADHA, hCG_1757335, HEPH, HIST1H2AB, HIST1H2AE, HIST1H2AJ, |
| | HIST1H2AK, HIST1H4A, HIST1H4B, HIST1H4C, HIST1H4D, HIST1H4E, |
| | HIST1H4F, HIST1H4H, HIST1H4I, HIST1H4J, HIST1H4K, HIST1H4L, |
| | HIST2H2AC, HIST2H4A, HIST2H4B, HIST3H2A, HIST4H4, HLA-A, HLA- |
| | A29.1, HLA-B, HLA-C, HLA-E, HLA-H, HNRNPA2B1, HNRNPH2, HPCAL1, |
| | HRAS, HSD17B4, HSP90AA1, HSP90AA2, HSP90AA4P, HSP90AB1, |
| | HSP90AB2P, HSP90AB3P, HSP90B1, HSPA1A, HSPA1B, HSPA1L, HSPA2, |
| | HSPA4, HSPA5, HSPA6, HSPA7, HSPA8, HSPA9, HSPD1, HSPE1, HSPG2, |
| | HYOU1, IDH1, IFITM1, IFITM2, IFITM3, IGH@, IGHG1, IGHG2, IGHG3, |
| | IGHG4, IGHM, IGHV4-31, IGK@, IGKC, IGKV1-5, IGKV2-24, IGKV3-20, |
| | IGSF3, IGSF8, IQGAP1, IQGAP2, ITGA2, ITGA3, ITGA6, ITGAV, ITGB1, |
| | ITGB4, JUP, KIAA0174, KIAA1199, KPNB1, KRAS, KRT1, KRT10, KRT13, |
| | KRT14, KRT15, KRT16, KRT17, KRT18, KRT19, KRT2, KRT20, KRT24, |
| | KRT25, KRT27, KRT28, KRT3, KRT4, KRT5, KRT6A, KRT6B, KRT6C, KRT7, |
| | KRT75, KRT76, KRT77, KRT79, KRT8, KRT9, LAMA5, LAMP1, LDHA, LDHB, |
| | LFNG, LGALS3, LGALS3BP, LGALS4, LIMA1, LIN7A, LIN7C, LOC100128936, |
| | LOC100130553, LOC100133382, LOC100133739, LOC284889, LOC388524, |
| | LOC388720, LOC442497, LOC653269, LRP4, LRPPRC, LRSAM1, LSR, LYZ, |
| | MAN1A1, MAP4K4, MARCKS, MARCKSL1, METRNL, MFGE8, MICA, MIF, |
| | MINK1, MITD1, MMP7, MOBKL1A, MSN, MTCH2, MUC13, MYADM, |
| | MYH10, MYH11, MYH14, MYH9, MYL6, MYL6B, MYO1C, MYO1D, NARS, |
| | NCALD, NCSTN, NEDD4, NEDD4L, NME1, NME2, NOTCH1, NQO1, NRAS, |
| | P4HB, PCBP1, PCNA, PCSK9, PDCD6, PDCD6IP, PDIA3, PDXK, PEBP1, PFN1, |
| | PGK1, PHB, PHB2, PKM2, PLEC1, PLEKHB2, PLSCR3, PLXNA1, PLXNB2, |
| | PPIA, PPIB, PPP2R1A, PRDX1, PRDX2, PRDX3, PRDX5, PRDX6, PRKAR2A, |
| | PRKDC, PRSS23, PSMA2, PSMC6, PSMD11, PSMD3, PSME3, PTGFRN, PTPRF, |
| | PYGB, QPCT, QSOX1, RAB10, RAB11A, RAB11B, RAB13, RAB14, RAB15, |
| | RAB1A, RAB1B, RAB2A, RAB33B, RAB35, RAB43, RAB4B, RAB5A, RAB5B, |
| | RAB5C, RAB6A, RAB6B, RAB7A, RAB8A, RAB8B, RAC1, RAC3, RALA, |
| | RALB, RAN, RANP1, RAP1A, RAP1B, RAP2A, RAP2B, RAP2C, RDX, REG4, |
| | RHOA, RHOC, RHOG, ROCK2, RP11-631M21.2, RPL10A, RPL12, RPL6, RPL8, |
| | RPLP0, RPLP0-like, RPLP1, RPLP2, RPN1, RPS13, RPS14, RPS15A, RPS16, |
| | RPS18, RPS20, RPS21, RPS27A, RPS3, RPS4X, RPS4Y1, RPS4Y2, RPS7, RPS8, |
| | RPSA, RPSAP15, RRAS, RRAS2, RUVBL1, RUVBL2, S100A10, S100A11, |
| | S100A14, S100A16, S100A6, S100P, SDC1, SDC4, SDCBP, SDCBP2, SERINC1, |
| | SERINC5, SERPINA1, SERPINF1, SETD4, SFN, SLC12A2, SLC12A7, SLC16A1, |
| | SLC1A5, SLC25A4, SLC25A5, SLC25A6, SLC29A1, SLC2A1, SLC3A2, |
| | SLC44A1, SLC7A5, SLC9A3R1, SMPDL3B, SNAP23, SND1, SOD1, SORT1, |
| | SPTAN1, SPTBN1, SSBP1, SSR4, TACSTD1, TAGLN2, TBCA, TCEB1, TCP1, |
| | TF, TFRC, THBS1, TJP2, TKT, TMED2, TNFSF10, TNIK, TNKS1BP1, TNPO3, |
| | TOLLIP, TOMM22, TPI1, TPM1, TRAP1, TSG101, TSPAN1, TSPAN14, |
| | TSPAN15, TSPAN6, TSPAN8, TSTA3, TTYH3, TUBA1A, TUBA1B, TUBA1C, |
| | TUBA3C, TUBA3D, TUBA3E, TUBA4A, TUBA4B, TUBAE, TUBB, TUBB2A, |
| | TUBB2B, TUBB2C, TUBB3, TUBB4, TUBB4Q, TUBB6, TUFM, TXN, UBA1, |
| | UBA52, UBB, UBC, UBE2N, UBE2V2, UGDH, UQCRC2, VAMP1, VAMP3, |
| | VAMP8, VCP, VIL1, VPS25, VPS28, VPS35, VPS36, VPS37B, VPS37C, WDR1, |
| | YWHAB, YWHAE, YWHAG, YWHAH, YWHAQ, YWHAZ |
| Colorectal | hsa-miR-16, hsa-miR-25, hsa-miR-125b, hsa-miR-451, hsa-miR-200c, hsa-miR-140- |
| Cancer | 3p, hsa-miR-658, hsa-miR-370, hsa-miR-1296, hsa-miR-636, hsa-miR-502-5p |
| Breast cancer | miR-21, miR-155, miR-206, miR-122a, miR-210, miR-21, miR-155, miR-206, miR- |
| | 122a, miR-210, let-7, miR-10b, miR-125a, miR-125b, miR-145, miR-143, miR-145, |
| | miR-1b |
| Breast cancer | GAS5 |
| Breast cancer | ER, PR, HER2, MUC1, EGFR, KRAS, B-Raf, CYP2D6, hsp70, MART-1, TRP, |
| | HER2, hsp70, MART-1, TRP, HER2, ER, PR, Class III b-tubulin, VEGFA, ETV6- |
| | NTRK3, BCA-225, hsp70, MART1, ER, VEGFA, Class III b-tubulin, HER2/neu |
| | (e.g., for Her2+ breast cancer), GPR30, ErbB4 (JM) isoform, MPR8, MISIIR, CD9, |
| | EphA2, EGFR, B7H3, PSM, PCSA, CD63, STEAP, CD81, ICAM1, A33, DR3, |
| | CD66e, MFG-E8, TROP-2, Mammaglobin, Hepsin, NPGP/NPFF2, PSCA, 5T4, |
| | NGAL, EpCam, neurokinin receptor-1 (NK-1 or NK-1R), NK-2, Pai-1, CD45, |
| | CD10, HER2/ERBB2, AGTR1, NPY1R, MUC1, ESA, CD133, GPR30, BCA225, |
| | CD24, CA15.3 (MUC1 secreted), CA27.29 (MUC1 secreted), NMDAR1, |
| | NMDAR2, MAGEA, CTAG1B, NY-ESO-1, SPB, SPC, NSE, PGP9.5, progesterone |
| | receptor (PR) or its isoform (PR(A) or PR(B)), P2RX7, NDUFB7, NSE, GAL3, |
| | osteopontin, CHI3L1, IC3b, mesothelin, SPA, AQP5, GPCR, hCEA-CAM, PTP IA- |
| | 2, CABYR, TMEM211, ADAM28, UNC93A, MUC17, MUC2, IL10R-beta, BCMA, |
| | HVEM/TNFRSF14, Trappin-2, Elafin, ST2/IL1 R4, TNFRF14, CEACAM1, TPA1, |
| | LAMP, WF, WH1000, PECAM, BSA, TNFR |
| Breast cancer | CD9, MIS Rii, ER, CD63, MUC1, HER3, STAT3, VEGFA, BCA, CA125, CD24, |
| | EPCAM, ERB B4 |
| Breast cancer | CD10, NPGP/NPFF2, HER2/ERBB2, AGTR1, NPY1R, neurokinin receptor-1 (NK- |
| | 1 or NK-1R), NK-2, MUC1, ESA, CD133, GPR30, BCA225, CD24, CA15.3 |
| | (MUC1 secreted), CA27.29 (MUC1 secreted), NMDAR1, NMDAR2, MAGEA, |
| | CTAG1B, NY-ESO-1 |
| Breast cancer | SPB, SPC, NSE, PGP9.5, CD9, P2RX7, NDUFB7, NSE, GAL3, osteopontin, |
| | CHI3L1, EGFR, B7H3, IC3b, MUC1, mesothelin, SPA, PCSA, CD63, STEAP, |
| | AQP5, CD81, DR3, PSM, GPCR, EphA2, hCEA-CAM, PTP IA-2, CABYR, |
| | TMEM211, ADAM28, UNC93A, A33, CD24, CD10, NGAL, EpCam, MUC17, |
| | TROP-2, MUC2, IL10R-beta, BCMA, HVEM/TNFRSF14, Trappin-2 Elafin, |
| | ST2/IL1 R4, TNFRF14, CEACAM1, TPA1, LAMP, WF, WH1000, PECAM, BSA, |
| | TNFR |
| Breast cancer | BRCA, MUC-1, MUC 16, CD24, ErbB4, ErbB2 (HER2), ErbB3, HSP70, |
| | Mammaglobin, PR, PR(B), VEGFA |
| Breast cancer | CD9, HSP70, Gal3, MIS, EGFR, ER, ICB3, CD63, B7H4, MUC1, DLL4, CD81, |
| | ERB3, VEGF, BCA225, BRCA, CA125, CD174, CD24, ERB2, NGAL, GPR30, |
| | CYFRA21, CD31, cMET, MUC2, ERBB4 |
| Breast cancer | CD9, EphA2, EGFR, B7H3, PSMA, PCSA, CD63, STEAP, CD81, STEAP1, |
| | ICAM1 (CD54), PSMA, A33, DR3, CD66e, MFG-8e, TMEM211, TROP-2, EGFR, |
| | Mammoglobin, Hepsin, NPGP/NPFF2, PSCA, 5T4, NGAL, NK-2, EpCam, NK-1R, |
| | PSMA, 5T4, PAI-1, CD45 |
| Breast cancer | PGP9.5, CD9, HSP70, gal3-b2c10, EGFR, iC3b, PSMA, PCSA, CD63, MUC1, |
| | DLL4, CD81, B7-H3, HER 3 (ErbB3), MART-1, PSA, VEGF A, TIMP-1, GPCR |
| | GPR110, EphA2, MMP9, mmp7, TMEM211, UNC93a, BRCA, CA125 (MUC16), |
| | Mammaglobin, CD174 (Lewis y), CD66e CEA, CD24 c.sn3, C-erbB2, CD10, |
| | NGAL, epcam, CEA (carcinoembryonic Antigen), GPR30, CYFRA21-1, OPN, |
| | MUC17, hVEGFR2, MUC2, NCAM, ASPH, ErbB4, SPB, SPC, CD9, MS4A1, |
| | EphA2, MIS RII, HER2 (ErbB2), ER, PR (B), MRP8, CD63, B7H4, TGM2, CD81, |
| | DR3, STAT 3, MACC-1, TrKB, IL 6 Unc, OPG-13, IL6R, EZH2, SCRN1, |
| | TWEAK, SERPINB3, CDAC1, BCA-225, DR3, A33, NPGP/NPFF2, TIMP1, |
| | BDNF, FRT, Ferritin heavy chain, seprase, p53, LDH, HSP, ost, p53, CXCL12, |
| | HAP, CRP, Gro-alpha, Tsg 101, GDF15 |
| Breast cancer | CD9, HSP70, Gal3, MIS (RII), EGFR, ER, ICB3, CD63, B7H4, MUC1, CD81, |
| | ERB3, MART1, STAT3, VEGF, BCA225, BRCA, CA125, CD174, CD24, ERB2, |
| | NGAL, GPR30, CYFRA21, CD31, cMET, MUC2, ERB4, TMEM211 |
| Breast Cancer | 5T4 (trophoblast), ADAM10, AGER/RAGE, APC, APP (β-amyloid), ASPH (A-10), |
| | B7H3 (CD276), BACE1, BAI3, BRCA1, BDNF, BIRC2, C1GALT1, CA125 |
| | (MUC16), Calmodulin 1, CCL2 (MCP-1), CD9, CD10, CD127 (IL7R), CD174, |
| | CD24, CD44, CD63, CD81, CEA, CRMP-2, CXCR3, CXCR4, CXCR6, CYFRA 21, |
| | derlin 1, DLL4, DPP6, E-CAD, EpCaM, EphA2 (H-77), ER(1) ESR1 α, ER(2) ESR2 |
| | β, Erb B4, Erbb2, erb3 (Erb-B3), PA2G4, FRT (FLT1), Gal3, GPR30 (G-coupled |
| | ER1), HAP1, HER3, HSP-27, HSP70, IC3b, IL8, insig, junction plakoglobin, |
| | Keratin 15, KRAS, Mammaglobin, MART1, MCT2, MFGE8, MMP9, MRP8, Muc1, |
| | MUC17, MUC2, NCAM, NG2 (CSPG4), Ngal, NHE-3, NT5E (CD73), ODC1, |
| | OPG, OPN, p53, PARK7, PCSA, PGP9.5 (PARK5), PR(B), PSA, PSMA, RAGE, |
| | STXBP4, Survivin, TFF3 (secreted), TIMP1, TIMP2, TMEM211, TRAF4 |
| | (scaffolding), TRAIL-R2 (death Receptor 5), TrkB, Tsg 101, UNC93a, VEGF A, |
| | VEGFR2, YB-1, VEGFR1, GCDPF-15 (PIP), BigH3 (TGFb1-induced protein), |
| | 5HT2B (serotonin receptor 2B), BRCA2, BACE 1, CDH1-cadherin |
| Breast Cancer | AK5.2, ATP6V1B1, CRABP1 |
| Breast Cancer | DST.3, GATA3, KRT81 |
| Breast Cancer | AK5.2, ATP6V1B1, CRABP1, DST.3, ELF5, GATA3, KRT81, LALBA, OXTR, |
| | RASL10A, SERHL, TFAP2A.1, TFAP2A.3, TFAP2C, VTCN1 |
| Breast Cancer | TRAP; Renal Cell Carcinoma; Filamin; 14.3.3, Pan; Prohibitin; c-fos; Ang-2; |
| | GSTmu; Ang-1; FHIT; Rad51; Inhibin alpha; Cadherin-P; 14.3.3 gamma; |
| | p18INK4c; P504S; XRCC2; Caspase 5; CREB-Binding Protein; Estrogen Receptor; |
| | IL17; Claudin 2; Keratin 8; GAPDH; CD1; Keratin, LMW; Gamma |
| | Glutamylcysteine Synthetase(GCS)/Glutamate-cysteine Ligase; a-B-Crystallin; Pax- |
| | 5; MMP-19; APC; IL-3; Keratin 8 (phospho-specific Ser73); TGF-beta 2; ITK; Oct- |
| | 2/; DJ-1; B7-H2; Plasma Cell Marker; Rad18; Estriol; Chk1; Prolactin Receptor; |
| | Laminin Receptor; Histone H1; CD45RO; GnRH Receptor; IP10/CRG2; Actin, |
| | Muscle Specific; S100; Dystrophin; Tubulin-a; CD3zeta; CDC37; GABA a Receptor |
| | 1; MMP-7 (Matrilysin); Heregulin; Caspase 3; CD56/NCAM-1; Gastrin 1; SREBP-1 |
| | (Sterol Regulatory Element Binding Protein-1); MLH1; PGP9.5; Factor VIII Related |
| | Antigen; ADP-ribosylation Factor (ARF-6); MHC II (HLA-DR) Ia; Survivin; CD23; |
| | G-CSF; CD2; Calretinin; Neuron Specific Enolase; CD165; Calponin; CD95/Fas; |
| | Urocortin; Heat Shock Protein 27/hsp27; Topo II beta; Insulin Receptor; Keratin 5/8; |
| | sm; Actin, skeletal muscle; CA19-9; GluR1; GRIP1; CD79a mb-1; TdT; HRP; |
| | CD94; CCK-8; Thymidine Phosphorylase; CD57; Alkaline Phosphatase (AP); CD59/ |
| | MACIF/MIRL/Protectin; GLUT-1; alpha-1-antitrypsin; Presenillin; Mucin 3 |
| | (MUC3); pS2; 14-3-3 beta; MMP-13 (Collagenase-3); Fli-1; mGluR5; Mast Cell |
| | Chymase; Laminin B1/b1; Neurofilament (160 kDa); CNPase; Amylin Peptide; Gai1; |
| | CD6; alpha-1-antichymotrypsin; E2F-2; MyoD1 |
| Ductal carcinoma | Laminin B1/b1; E2F-2; TdT; Apolipoprotein D; Granulocyte; Alkaline Phosphatase |
| in situ (DCIS) | (AP); Heat Shock Protein 27/hsp27; CD95/Fas; pS2; Estriol; GLUT-1; Fibronectin; |
| | CD6; CCK-8; sm; Factor VIII Related Antigen; CD57; Plasminogen; CD71/ |
| | Transferrin Receptor; Keratin 5/8; Thymidine Phosphorylase; CD45/T200/LCA; |
| | Epithelial Specific Antigen; Macrophage; CD10; MyoD1; Gai1; bcl-XL; hPL; |
| | Caspase 3; Actin, skeletal muscle; IP10/CRG2; GnRH Receptor; p35nck5a; ADP- |
| | ribosylation Factor (ARF-6); Cdk4; alpha-1-antitrypsin; IL17; Neuron Specific |
| | Enolase; CD56/NCAM-1; Prolactin Receptor; Cdk7; CD79a mb-1; Collagen IV; |
| | CD94; Myeloid Specific Marker; Keratin 10; Pax-5; IgM (m-Heavy Chain); |
| | CD45RO; CA19-9; Mucin 2; Glucagon; Mast Cell Chymase; MLH1; CD1; CNPase; |
| | Parkin; MHC II (HLA-DR) Ia; B7-H2; Chk1; Lambda Light Chain; MHC II (HLA- |
| | DP and DR); Myogenin; MMP-7 (Matrilysin); Topo II beta; CD53; Keratin 19; |
| | Rad18; Ret Oncoprotein; MHC II (HLA-DP); E3-binding protein (ARM1); |
| | Progesterone Receptor; Keratin 8; IgG; IgA; Tubulin; Insulin Receptor Substrate-1; |
| | Keratin 15; DR3; IL-3; Keratin 10/13; Cyclin D3; MHC I (HLA25 and HLA-Aw32); |
| | Calmodulin; Neurofilament (160 kDa) |
| Ductal carcinoma | Macrophage; Fibronectin; Granulocyte; Keratin 19; Cyclin D3; CD45/T200/LCA; |
| in situ (DCIS) v. | EGFR; Thrombospondin; CD81/TAPA-1; Ruv C; Plasminogen; Collagen IV; |
| other Breast | Laminin B1/b1; CD10; TdT; Filamin; bcl-XL; 14.3.3 gamma; 14.3.3, Pan; p170; |
| cancer | Apolipoprotein D; CD71/Transferrin Receptor; FHIT |
| Breast cancer | 5HT2B, 5T4 (trophoblast), ACO2, ACSL3, ACTN4, ADAM10, AGR2, AGR3, |
| | ALCAM, ALDH6A1, ANGPTL4, ANO9, AP1G1, APC, APEX1, APLP2, APP (_- |
| | amyloid), ARCN1, ARHGAP35, ARL3, ASAH1, ASPH (A-10), ATP1B1, ATP1B3, |
| | ATP5I, ATP5O, ATXN1, B7H3, BACE1, BAI3, BAIAP2, BCA-200, BDNF, |
| | BigH3, BIRC2, BLVRB, BRCA, BST2, C1GALT1, C1GALT1C1, C20orf3, CA125, |
| | CACYBP, Calmodulin, CAPN1, CAPNS1, CCDC64B, CCL2 (MCP-1), CCT3, |
| | CD10(BD), CD127 (IL7R), CD174, CD24, CD44, CD80, CD86, CDH1, CDH5, |
| | CEA, CFL2, CHCHD3, CHMP3, CHRDL2, CIB1, CKAP4, COPA, COX5B, |
| | CRABP2, CRIP1, CRISPLD1, CRMP-2, CRTAP, CTLA4, CUL3, CXCR3, |
| | CXCR4, CXCR6, CYB5B, CYB5R1, CYCS, CYFRA 21, DBI, DDX23, DDX39B, |
| | derlin 1, DHCR7, DHX9, DLD, DLL4, DNAJB1, DPP6, DSTN, eCadherin, EEF1D, |
| | EEF2, EFTUD2, EIF4A2, EIF4A3, EpCaM, EphA2, ER(1) ESR1_, ER(2) ESR2_, |
| | Erb B4, Erb2, erb3 (Erb-B3?), ERLIN2, ESD, FARSA, FASN, FEN1, FKBP5, |
| | FLNB, FOXP3, FUS, Gal3, GCDPF-15, GCNT2, GNA12, GNG5, GNPTG, GPC6, |
| | GPD2, GPER (GPR30), GSPT1, H3F3B, H3F3C, HADH, HAP1, HER3, |
| | HIST1H1C, HIST1H2AB, HIST1H3A, HIST1H3C, HIST1H3D, HIST1H3E, |
| | HIST1H3F, HIST1H3G, HIST1H3H, HIST1H3I, HIST1H3J, HIST2H2BF, |
| | HIST2H3A, HIST2H3C, HIST2H3D, HIST3H3, HMGB1, HNRNPA2B1, |
| | HNRNPAB, HNRNPC, HNRNPD, HNRNPH2, HNRNPK, HNRNPL, HNRNPM, |
| | HNRNPU, HPS3, HSP-27, HSP70, HSP90B1, HSPA1A, HSPA2, HSPA9, HSPE1, |
| | IC3b, IDE, IDH3B, IDO1, IFI30, IL1RL2, IL7, IL8, ILF2, ILF3, IQCG, ISOC2, |
| | IST1, ITGA7, ITGB7, junction plakoglobin, Keratin 15, KRAS, KRT19, KRT2, |
| | KRT7, KRT8, KRT9, KTN1, LAMP1, LMNA, LMNB1, LNPEP, LRPPRC, |
| | LRRC57, Mammaglobin, MAN1A1, MAN1A2, MART1, MATR3, MBD5, MCT2, |
| | MDH2, MFGE8, MFGE8, MGP, MMP9, MRP8, MUC1, MUC17, MUC2, MYO5B, |
| | MYOF, NAPA, NCAM, NCL, NG2 (CSPG4), Ngal, NHE-3, NME2, NONO, |
| | NPM1, NQO1, NT5E (CD73), ODC1, OPG, OPN (SC), OS9, p53, PACSIN3, |
| | PAICS, PARK7, PARVA, PC, PCNA, PCSA, PD-1, PD-L1, PD-L2, PGP9.5, PHB, |
| | PHB2, PIK3C2B, PKP3, PPL, PR(B)?, PRDX2, PRKCB, PRKCD, PRKDC, PSA, |
| | PSAP, PSMA, PSMB7, PSMD2, PSME3, PYCARD, RAB1A, RAB3D, RAB7A, |
| | RAGE, RBL2, RNPEP, RPL14, RPL27, RPL36, RPS25, RPS4X, RPS4Y1, |
| | RPS4Y2, RUVBL2, SET, SHMT2, SLAIN1, SLC39A14, SLC9A3R2, SMARCA4, |
| | SNRPD2, SNRPD3, SNX33, SNX9, SPEN, SPR, SQSTM1, SSBP1, ST3GAL1, |
| | STXBP4, SUB1, SUCLG2, Survivin, SYT9, TFF3 (secreted), TGOLN2, THBS1, |
| | TIMP1, TIMP2, TMED10, TMED4, TMED9, TMEM211, TOM1, TRAF4 |
| | (scaffolding), TRAIL-R2, TRAP1, TrkB, Tsg 101, TXNDC16, U2AF2, UEVLD, |
| | UFC1, UNC93a, USP14, VASP, VCP, VDAC1, VEGFA, VEGFR1, VEGFR2, |
| | VPS37C, WIZ, XRCC5, XRCC6, YB-1, YWHAZ |
| Lung cancer | Pgrmc1 (progesterone receptor membrane component 1)/sigma-2 receptor, STEAP, |
| | EZH2 |
| Lung cancer | Prohibitin, CD23, Amylin Peptide, HRP, Rad51, Pax-5, Oct-3/, GLUT-1, PSCA, |
| | Thrombospondin, FHIT, a-B-Crystallin, LewisA, Vacular Endothelial Growth |
| | Factor(VEGF), Hepatocyte Factor Homologue-4, Flt-4, GluR6/7, Prostate Apoptosis |
| | Response Protein-4, GluR1, Fli-1, Urocortin, S100A4, 14-3-3 beta, P504S, HDAC1, |
| | PGP9.5, DJ-1, COX2, MMP-19, Actin, skeletal muscle, Claudin 3, Cadherin-P, |
| | Collagen IX, p27Kip1, Cathepsin D, CD30 (Reed-Sternberg Cell Marker), Ubiquitin, |
| | FSH-b, TrxR2, CCK-8, Cyclin C, CD138, TGF-beta 2, Adrenocorticotrophic |
| | Hormone, PPAR-gamma, Bcl-6, GLUT-3, IGF-I, mRANKL, Fas-ligand, Filamin, |
| | Calretinin, Oct-1, Parathyroid Hormone, Claudin 5, Claudin 4, Raf-1 (Phospho- |
| | specific), CDC14A Phosphatase, Mitochondria, APC, Gastrin 1, Ku (p80), Gai1, |
| | XPA, Maltose Binding Protein, Melanoma (gp100), Phosphotyrosine, Amyloid A, |
| | CXCR4/Fusin, Hepatic Nuclear Factor-3B, Caspase 1, HPV 16-E7, Axonal Growth |
| | Cones, Lck, Ornithine Decarboxylase, Gamma Glutamylcysteine |
| | Synthetase(GCS)/Glutamate-cysteine Ligase, ERCC1, Calmodulin, Caspase 7 (Mch |
| | 3), CD137 (4-1BB), Nitric Oxide Synthase, brain (bNOS), E2F-2, IL-10R, L-Plastin, |
| | CD18, Vimentin, CD50/ICAM-3, Superoxide Dismutase, Adenovirus Type 5 E1A, |
| | PHAS-I, Progesterone Receptor (phospho-specific) - Serine 294, MHC II (HLA- |
| | DQ), XPG, ER Ca+2 ATPase2, Laminin-s, E3-binding protein (ARM1), CD45RO, |
| | CD1, Cdk2, MMP-10 (Stromilysin-2), sm, Surfactant Protein B (Pro), |
| | Apolipoprotein D, CD46, Keratin 8 (phospho-specific Ser73), PCNA, PLAP, CD20, |
| | Syk, LH, Keratin 19, ADP-ribosylation Factor (ARF-6), Int-2 Oncoprotein, |
| | Luciferase, AIF (Apoptosis Inducing Factor), Grb2, bcl-X, CD16, Paxillin, MHC II |
| | (HLA-DP and DR), B-Cell, p21WAF1, MHC II (HLA-DR), Tyrosinase, E2F-1, |
| | Pds1, Calponin, Notch, CD26/DPP IV, SV40 Large T Antigen, Ku (p70/p80), |
| | Perforin, XPF, SIM Ag (SIMA-4D3), Cdk1/p34cdc2, Neuron Specific Enolase, b-2- |
| | Microglobulin, DNA Polymerase Beta, Thyroid Hormone Receptor, Human, |
| | Alkaline Phosphatase (AP), Plasma Cell Marker, Heat Shock Protein 70/hsp70, |
| | TRP75/gp75, SRF (Serum Response Factor), Laminin B1/b1, Mast Cell Chymase, |
| | Caldesmon, CEA/CD66e, CD24, Retinoid X Receptor (hRXR), CD45/T200/LCA, |
| | Rabies Virus, Cytochrome c, DR3, bcl-XL, Fascin, CD71/Transferrin Receptor |
| Lung Cancer | miR-497 |
| Lung Cancer | Pgrmc1 |
| Ovarian Cancer | CA-125, CA 19-9, c-reactive protein, CD95(also called Fas, Fas antigen, Fas |
| | receptor, FasR, TNFRSF6, APT1 or APO-1), FAP-1, miR-200 microRNAs, EGFR, |
| | EGFRvIII, apolipoprotein AI, apolipoprotein CIII, myoglobin, tenascin C, MSH6, |
| | claudin-3, claudin-4, caveolin-1, coagulation factor III, CD9, CD36, CD37, CD53, |
| | CD63, CD81, CD136, CD147, Hsp70, Hsp90, Rab13, Desmocollin-1, EMP-2, CK7, |
| | CK20, GCDF15, CD82, Rab-5b, Annexin V, MFG-E8, HLA-DR. MiR-200 |
| | microRNAs (miR-200a, miR-200b, miR-200c), miR-141, miR-429, JNK, Jun |
| Prostate Cancer v | AQP2, BMP5, C16orf86, CXCL13, DST, ERCC1, GNAO1, KLHL5, MAP4K1, |
| normal | NELL2, PENK, PGF, POU3F1, PRSS21, SCML1, SEMG1, SMARCD3, SNAI2, |
| | TAF1C, TNNT3 |
| Prostate Cancer v | ADRB2, ARG2, C22orf32, CYorf14, EIF1AY, FEV, KLK2, KLK4, LRRC26, |
| Breast Cancer | MAOA, NLGN4Y, PNPLA7, PVRL3, SIM2, SLC30A4, SLC45A3, STX19, |
| | TRIM36, TRPM8 |
| Prostate Cancer v | ADRB2, BAIAP2L2, C19orf33, CDX1, CEACAM6, EEF1A2, ERN2, FAM110B, |
| Colorectal | FOXA2, KLK2, KLK4, LOC389816, LRRC26, MIPOL1, SLC45A3, SPDEF, |
| Cancer | TRIM31, TRIM36, ZNF613 |
| Prostate Cancer v | ASTN2, CAB39L, CRIP1, FAM110B, FEV, GSTP1, KLK2, KLK4, LOC389816, |
| Lung Cancer | LRRC26, MUC1, PNPLA7, SIM2, SLC45A3, SPDEF, TRIM36, TRPV6, ZNF613 |
| Prostate Cancer | miRs-26a + b, miR-15, miR-16, miR-195, miR-497, miR-424, miR-206, miR-342-5p, |
| | miR-186, miR-1271, miR-600, miR-216b, miR-519 family, miR-203 |
| Integrins | ITGA1 (CD49a, VLA1), ITGA2 (CD49b, VLA2), ITGA3 (CD49c, VLA3), ITGA4 |
| | (CD49d, VLA4), ITGA5 (CD49e, VLA5), ITGA6 (CD49f, VLA6), ITGA7 |
| | (FLJ25220), ITGA8, ITGA9 (RLC), ITGA10, ITGA11 (HsT18964), ITGAD |
| | (CD11D, FLJ39841), ITGAE (CD103, HUMINAE), ITGAL (CD11a, LFA1A), |
| | ITGAM (CD11b, MAC-1), ITGAV (CD51, VNRA, MSK8), ITGAW, ITGAX |
| | (CD11c), ITGB1 (CD29, FNRB, MSK12, MDF20), ITGB2 (CD18, LFA-1, MAC-1, |
| | MFI7), ITGB3 (CD61, GP3A, GPIIIa), ITGB4 (CD104), ITGB5 (FLJ26658), |
| | ITGB6, ITGB7, ITGB8 |
| Glycoprotein | GpIa-IIa, GpIIb-IIIa, GpIIIb, GpIb, GpIX |
| Transcription | STAT3, EZH2, p53, MACC1, SPDEF, RUNX2, YB-1 |
| factors | |
| Kinases | AURKA, AURKB |
| Disease Markers | 6Ckine, Adiponectin, Adrenocorticotropic Hormone, Agouti-Related Protein, Aldose |
| | Reductase, Alpha-1-Antichymotrypsin, Alpha-1-Antitrypsin, Alpha-1- |
| | Microglobulin, Alpha-2-Macroglobulin, Alpha-Fetoprotein, Amphiregulin, |
| | Angiogenin, Angiopoietin-2, Angiotensin-Converting Enzyme, Angiotensinogen, |
| | Annexin A1, Apolipoprotein A-I, Apolipoprotein A-II, Apolipoprotein A-IV, |
| | Apolipoprotein B, Apolipoprotein C-I, Apolipoprotein C-III, Apolipoprotein D, |
| | Apolipoprotein E, Apolipoprotein H, Apolipoprotein(a), AXL Receptor Tyrosine |
| | Kinase, B cell-activating Factor, B Lymphocyte Chemoattractant, Bcl-2-like protein |
| | 2, Beta-2-Microglobulin, Betacellulin, Bone Morphogenetic Protein 6, Brain- |
| | Derived Neurotrophic Factor, Calbindin, Calcitonin, Cancer Antigen 125, Cancer |
| | Antigen 15-3, Cancer Antigen 19-9, Cancer Antigen 72-4, Carcinoembryonic |
| | Antigen, Cathepsin D, CD 40 antigen, CD40 Ligand, CD5 Antigen-like, Cellular |
| | Fibronectin, Chemokine CC-4, Chromogranin-A, Ciliary Neurotrophic Factor, |
| | Clusterin, Collagen IV, Complement C3, Complement Factor H, Connective Tissue |
| | Growth Factor, Cortisol, C-Peptide, C-Reactive Protein, Creatine Kinase-MB, |
| | Cystatin-C, Endoglin, Endostatin, Endothelin-1, EN-RAGE, Eotaxin-1, Eotaxin-2, |
| | Eotaxin-3, Epidermal Growth Factor, Epiregulin, Epithelial cell adhesion molecule, |
| | Epithelial-Derived Neutrophil-Activating Protein 78, Erythropoietin, E-Selectin, |
| | Ezrin, Factor VII, Fas Ligand, FASLG Receptor, Fatty Acid-Binding Protein |
| | (adipocyte), Fatty Acid-Binding Protein (heart), Fatty Acid-Binding Protein (liver), |
| | Ferritin, Fetuin-A, Fibrinogen, Fibroblast Growth Factor 4, Fibroblast Growth Factor |
| | basic, Fibulin-1C, Follicle-Stimulating Hormone, Galectin-3, Gelsolin, Glucagon, |
| | Glucagon-like Peptide 1, Glucose-6-phosphate Isomerase, Glutamate-Cysteine |
| | Ligase Regulatory subunit, Glutathione S-Transferase alpha, Glutathione S- |
| | Transferase Mu 1, Granulocyte Colony-Stimulating Factor, Granulocyte- |
| | Macrophage Colony-Stimulating Factor, Growth Hormone, Growth-Regulated alpha |
| | protein, Haptoglobin, HE4, Heat Shock Protein 60, Heparin-Binding EGF-Like |
| | Growth Factor, Hepatocyte Growth Factor, Hepatocyte Growth Factor Receptor, |
| | Hepsin, Human Chorionic Gonadotropin beta, Human Epidermal Growth Factor |
| | Receptor 2, Immunoglobulin A, Immunoglobulin E, Immunoglobulin M, Insulin, |
| | Insulin-like Growth Factor I, Insulin-like Growth Factor-Binding Protein 1, Insulin- |
| | like Growth Factor-Binding Protein 2, Insulin-like Growth Factor-Binding Protein 3, |
| | Insulin-like Growth Factor Binding Protein 4, Insulin-like Growth Factor Binding |
| | Protein 5, Insulin-like Growth Factor Binding Protein 6, Intercellular Adhesion |
| | Molecule 1, Interferon gamma, Interferon gamma Induced Protein 10, Interferon- |
| | inducible T-cell alpha chemoattractant, Interleukin-1 alpha, Interleukin-1 beta, |
| | Interleukin-1 Receptor antagonist, Interleukin-2, Interleukin-2 Receptor alpha, |
| | Interleukin-3, Interleukin-4, Interleukin-5, Interleukin-6, Interleukin-6 Receptor, |
| | Interleukin-6 Receptor subunit beta, Interleukin-7, Interleukin-8, Interleukin-10, |
| | Interleukin-11, Interleukin-12 Subunit p40, Interleukin-12 Subunit p70, Interleukin- |
| | 13, Interleukin-15, Interleukin-16, Interleukin-25, Kallikrein 5, Kallikrein-7, Kidney |
| | Injury Molecule-1, Lactoylglutathione lyase, Latency-Associated Peptide of |
| | Transforming Growth Factor beta 1, Lectin-Like Oxidized LDL Receptor 1, Leptin, |
| | Luteinizing Hormone, Lymphotactin, Macrophage Colony-Stimulating Factor 1, |
| | Macrophage Inflammatory Protein-1 alpha, Macrophage Inflammatory Protein-1 |
| | beta, Macrophage Inflammatory Protein-3 alpha, Macrophage inflammatory protein |
| | 3 beta, Macrophage Migration Inhibitory Factor, Macrophage-Derived Chemokine, |
| | Macrophage-Stimulating Protein, Malondialdehyde-Modified Low-Density |
| | Lipoprotein, Maspin, Matrix Metalloproteinase-1, Matrix Metalloproteinase-2, |
| | Matrix Metalloproteinase-3, Matrix Metalloproteinase-7, Matrix Metalloproteinase- |
| | 9, Matrix Metalloproteinase-9, Matrix Metalloproteinase-10, Mesothelin, MHC class |
| | I chain-related protein A, Monocyte Chemotactic Protein 1, Monocyte Chemotactic |
| | Protein 2, Monocyte Chemotactic Protein 3, Monocyte Chemotactic Protein 4, |
| | Monokine Induced by Gamma Interferon, Myeloid Progenitor Inhibitory Factor 1, |
| | Myeloperoxidase, Myoglobin, Nerve Growth Factor beta, Neuronal Cell Adhesion |
| | Molecule, Neuron-Specific Enolase, Neuropilin-1, Neutrophil Gelatinase-Associated |
| | Lipocalin, NT-proBNP, Nucleoside diphosphate kinase B, Osteopontin, |
| | Osteoprotegerin, Pancreatic Polypeptide, Pepsinogen I, Peptide YY, Peroxiredoxin- |
| | 4, Phosphoserine Aminotransferase, Placenta Growth Factor, Plasminogen Activator |
| | Inhibitor 1, Platelet-Derived Growth Factor BB, Pregnancy-Associated Plasma |
| | Protein A, Progesterone, Proinsulin (inc. Total or Intact), Prolactin, Prostasin, |
| | Prostate-Specific Antigen (inc. Free PSA), Prostatic Acid Phosphatase, Protein S100- |
| | A4, Protein S100-A6, Pulmonary and Activation-Regulated Chemokine, Receptor |
| | for advanced glycosylation end products, Receptor tyrosine-protein kinase erbB-3, |
| | Resistin, S100 calcium-binding protein B, Secretin, Serotransferrin, Serum Amyloid |
| | P-Component, Serum Glutamic Oxaloacetic Transaminase, Sex Hormone-Binding |
| | Globulin, Sortilin, Squamous Cell Carcinoma Antigen-1, Stem Cell Factor, Stromal |
| | cell-derived Factor-1, Superoxide Dismutase 1 (soluble), T Lymphocyte-Secreted |
| | Protein I-309, Tamm-Horsfall Urinary Glycoprotein, T-Cell-Specific Protein |
| | RANTES, Tenascin-C, Testosterone, Tetranectin, Thrombomodulin, |
| | Thrombopoietin, Thrombospondin-1, Thyroglobulin, Thyroid-Stimulating Hormone, |
| | Thyroxine-Binding Globulin, Tissue Factor, Tissue Inhibitor of Metalloproteinases |
| | 1, Tissue type Plasminogen activator, TNF-Related Apoptosis-Inducing Ligand |
| | Receptor 3, Transforming Growth Factor alpha, Transforming Growth Factor beta-3, |
| | Transthyretin, Trefoil Factor 3, Tumor Necrosis Factor alpha, Tumor Necrosis Factor |
| | beta, Tumor Necrosis Factor Receptor I, Tumor necrosis Factor Receptor 2, Tyrosine |
| | kinase with Ig and EGF homology domains 2, Urokinase-type Plasminogen |
| | Activator, Urokinase-type plasminogen activator Receptor, Vascular Cell Adhesion |
| | Molecule-1, Vascular Endothelial Growth Factor, Vascular endothelial growth |
| | Factor B, Vascular Endothelial Growth Factor C, Vascular endothelial growth Factor |
| | D, Vascular Endothelial Growth Factor Receptor 1, Vascular Endothelial Growth |
| | Factor Receptor 2, Vascular endothelial growth Factor Receptor 3, Vitamin K- |
| | Dependent Protein S, Vitronectin, von Willebrand Factor, YKL-40 |
| Disease Markers | Adiponectin, Adrenocorticotropic Hormone, Agouti-Related Protein, Alpha-1- |
| | Antichymotrypsin, Alpha-1-Antitrypsin, Alpha-1-Microglobulin, Alpha-2- |
| | Macroglobulin, Alpha-Fetoprotein, Amphiregulin, Angiopoietin-2, Angiotensin- |
| | Converting Enzyme, Angiotensinogen, Apolipoprotein A-I, Apolipoprotein A-II, |
| | Apolipoprotein A-IV, Apolipoprotein B, Apolipoprotein C-I, Apolipoprotein C-III, |
| | Apolipoprotein D, Apolipoprotein E, Apolipoprotein H, Apolipoprotein(a), AXL |
| | Receptor Tyrosine Kinase, B Lymphocyte Chemoattractant, Beta-2-Microglobulin, |
| | Betacellulin, Bone Morphogenetic Protein 6, Brain-Derived Neurotrophic Factor, |
| | Calbindin, Calcitonin, Cancer Antigen 125, Cancer Antigen 19-9, Carcinoembryonic |
| | Antigen, CD 40 antigen, CD40 Ligand, CD5 Antigen-like, Chemokine CC-4, |
| | Chromogranin-A, Ciliary Neurotrophic Factor, Clusterin, Complement C3, |
| | Complement Factor H, Connective Tissue Growth Factor, Cortisol, C-Peptide, C- |
| | Reactive Protein, Creatine Kinase-MB, Cystatin-C, Endothelin-1, EN-RAGE, |
| | Eotaxin-1, Eotaxin-3, Epidermal Growth Factor, Epiregulin, Epithelial-Derived |
| | Neutrophil-Activating Protein 78, Erythropoietin, E-Selectin, Factor VII, Fas Ligand, |
| | FASLG Receptor, Fatty Acid-Binding Protein (heart), Ferritin, Fetuin-A, Fibrinogen, |
| | Fibroblast Growth Factor 4, Fibroblast Growth Factor basic, Follicle-Stimulating |
| | Hormone, Glucagon, Glucagon-like Peptide 1, Glutathione S-Transferase alpha, |
| | Granulocyte Colony-Stimulating Factor, Granulocyte-Macrophage Colony- |
| | Stimulating Factor, Growth Hormone, Growth-Regulated alpha protein, |
| | Haptoglobin, Heat Shock Protein 60, Heparin-Binding EGF-Like Growth Factor, |
| | Hepatocyte Growth Factor, Immunoglobulin A, Immunoglobulin E, Immunoglobulin |
| | M, Insulin, Insulin-like Growth Factor I, Insulin-like Growth Factor-Binding Protein |
| | 2, Intercellular Adhesion Molecule 1, Interferon gamma, Interferon gamma Induced |
| | Protein 10, Interleukin-1 alpha, Interleukin-1 beta, Interleukin-1 Receptor antagonist, |
| | Interleukin-2, Interleukin-3, Interleukin-4, Interleukin-5, Interleukin-6, Interleukin-6 |
| | Receptor, Interleukin-7, Interleukin-8, Interleukin-10, Interleukin-11, Interleukin-12 |
| | Subunit p40, Interleukin-12 Subunit p70, Interleukin-13, Interleukin-15, Interleukin- |
| | 16, Interleukin-25, Kidney Injury Molecule-1, Lectin-Like Oxidized LDL Receptor |
| | 1, Leptin, Luteinizing Hormone, Lymphotactin, Macrophage Colony-Stimulating |
| | Factor 1, Macrophage Inflammatory Protein-1 alpha, Macrophage Inflammatory |
| | Protein-1 beta, Macrophage Inflammatory Protein-3 alpha, Macrophage Migration |
| | Inhibitory Factor, Macrophage-Derived Chemokine, Malondialdehyde-Modified |
| | Low-Density Lipoprotein, Matrix Metalloproteinase-1, Matrix Metalloproteinase-2, |
| | Matrix Metalloproteinase-3, Matrix Metalloproteinase-7, Matrix Metalloproteinase- |
| | 9, Matrix Metalloproteinase-9, Matrix Metalloproteinase-10, Monocyte Chemotactic |
| | Protein 1, Monocyte Chemotactic Protein 2, Monocyte Chemotactic Protein 3, |
| | Monocyte Chemotactic Protein 4, Monokine Induced by Gamma Interferon, Myeloid |
| | Progenitor Inhibitory Factor 1, Myeloperoxidase, Myoglobin, Nerve Growth Factor |
| | beta, Neuronal Cell Adhesion Molecule, Neutrophil Gelatinase-Associated |
| | Lipocalin, NT-proBNP, Osteopontin, Pancreatic Polypeptide, Peptide YY, Placenta |
| | Growth Factor, Plasminogen Activator Inhibitor 1, Platelet-Derived Growth Factor |
| | BB, Pregnancy-Associated Plasma Protein A, Progesterone, Proinsulin (inc. Intact or |
| | Total), Prolactin, Prostate-Specific Antigen (inc. Free PSA), Prostatic Acid |
| | Phosphatase, Pulmonary and Activation-Regulated Chemokine, Receptor for |
| | advanced glycosylation end products, Resistin, S100 calcium-binding protein B, |
| | Secretin, Serotransferrin, Serum Amyloid P-Component, Serum Glutamic |
| | Oxaloacetic Transaminase, Sex Hormone-Binding Globulin, Sortilin, Stem Cell |
| | Factor, Superoxide Dismutase 1 (soluble), T Lymphocyte-Secreted Protein I-309, |
| | Tamm-Horsfall Urinary Glycoprotein, T-Cell-Specific Protein RANTES, Tenascin- |
| | C, Testosterone, Thrombomodulin, Thrombopoietin, Thrombospondin-1, Thyroid- |
| | Stimulating Hormone, Thyroxine-Binding Globulin, Tissue Factor, Tissue Inhibitor |
| | of Metalloproteinases 1, TNF-Related Apoptosis-Inducing Ligand Receptor 3, |
| | Transforming Growth Factor alpha, Transforming Growth Factor beta-3, |
| | Transthyretin, Trefoil Factor 3, Tumor Necrosis Factor alpha, Tumor Necrosis Factor |
| | beta, Tumor necrosis Factor Receptor 2, Vascular Cell Adhesion Molecule-1, |
| | Vascular Endothelial Growth Factor, Vitamin K-Dependent Protein S, Vitronectin, |
| | von Willebrand Factor |
| Oncology | 6Ckine, Aldose Reductase, Alpha-Fetoprotein, Amphiregulin, Angiogenin, Annexin |
| | A1, B cell-activating Factor, B Lymphocyte Chemoattractant, Bcl-2-like protein 2, |
| | Betacellulin, Cancer Antigen 125, Cancer Antigen 15-3, Cancer Antigen 19-9, |
| | Cancer Antigen 72-4, Carcinoembryonic Antigen, Cathepsin D, Cellular Fibronectin, |
| | Collagen IV, Endoglin, Endostatin, Eotaxin-2, Epidermal Growth Factor, Epiregulin, |
| | Epithelial cell adhesion molecule, Ezrin, Fatty Acid-Binding Protein (adipocyte), |
| | Fatty Acid-Binding Protein (liver), Fibroblast Growth Factor basic, Fibulin-1C, |
| | Galectin-3, Gelsolin, Glucose-6-phosphate Isomerase, Glutamate-Cysteine Ligase |
| | Regulatory subunit, Glutathione S-Transferase Mu 1, HE4, Heparin-Binding EGF- |
| | Like Growth Factor, Hepatocyte Growth Factor, Hepatocyte Growth Factor |
| | Receptor, Hepsin, Human Chorionic Gonadotropin beta, Human Epidermal Growth |
| | Factor Receptor 2, Insulin-like Growth Factor-Binding Protein 1, Insulin-like |
| | Growth Factor-Binding Protein 2, Insulin-like Growth Factor-Binding Protein 3, |
| | Insulin-like Growth Factor Binding Protein 4, Insulin-like Growth Factor Binding |
| | Protein 5, Insulin-like Growth Factor Binding Protein 6, Interferon gamma Induced |
| | Protein 10, Interferon-inducible T-cell alpha chemoattractant, Interleukin-2 Receptor |
| | alpha, Interleukin-6, Interleukin-6 Receptor subunit beta, Kallikrein 5, Kallikrein-7, |
| | Lactoylglutathione lyase, Latency-Associated Peptide of Transforming Growth |
| | Factor beta 1, Leptin, Macrophage inflammatory protein 3 beta, Macrophage |
| | Migration Inhibitory Factor, Macrophage-Stimulating Protein, Maspin, Matrix |
| | Metalloproteinase-2, Mesothelin, MHC class I chain-related protein A, Monocyte |
| | Chemotactic Protein 1, Monokine Induced by Gamma Interferon, Neuron-Specific |
| | Enolase, Neuropilin-1, Neutrophil Gelatinase-Associated Lipocalin, Nucleoside |
| | diphosphate kinase B, Osteopontin, Osteoprotegerin, Pepsinogen I, Peroxiredoxin-4, |
| | Phosphoserine Aminotransferase, Placenta Growth Factor, Platelet-Derived Growth |
| | Factor BB, Prostasin, Protein S100-A4, Protein S100-A6, Receptor tyrosine-protein |
| | kinase erbB-3, Squamous Cell Carcinoma Antigen-1, Stromal cell-derived Factor-1, |
| | Tenascin-C, Tetranectin, Thyroglobulin, Tissue type Plasminogen activator, |
| | Transforming Growth Factor alpha, Tumor Necrosis Factor Receptor I, Tyrosine |
| | kinase with Ig and EGF homology domains 2, Urokinase-type Plasminogen |
| | Activator, Urokinase-type plasminogen activator Receptor, Vascular Endothelial |
| | Growth Factor, Vascular endothelial growth Factor B, Vascular Endothelial Growth |
| | Factor C, Vascular endothelial growth Factor D, Vascular Endothelial Growth Factor |
| | Receptor 1, Vascular Endothelial Growth Factor Receptor 2, Vascular endothelial |
| | growth Factor Receptor 3, YKL-40 |
| Disease | Adiponectin, Alpha-1-Antitrypsin, Alpha-2-Macroglobulin, Alpha-Fetoprotein, |
| | Apolipoprotein A-I, Apolipoprotein C-III, Apolipoprotein H, Apolipoprotein(a), |
| | Beta-2-Microglobulin, Brain-Derived Neurotrophic Factor, Calcitonin, Cancer |
| | Antigen 125, Cancer Antigen 19-9, Carcinoembryonic Antigen, CD 40 antigen, |
| | CD40 Ligand, Complement C3, C-Reactive Protein, Creatine Kinase-MB, |
| | Endothelin-1, EN-RAGE, Eotaxin-1, Epidermal Growth Factor, Epithelial-Derived |
| | Neutrophil-Activating Protein 78, Erythropoietin, Factor VII, Fatty Acid-Binding |
| | Protein (heart), Ferritin, Fibrinogen, Fibroblast Growth Factor basic, Granulocyte |
| | Colony-Stimulating Factor, Granulocyte-Macrophage Colony-Stimulating Factor, |
| | Growth Hormone, Haptoglobin, Immunoglobulin A, Immunoglobulin E, |
| | Immunoglobulin M, Insulin, Insulin-like Growth Factor I, Intercellular Adhesion |
| | Molecule 1, Interferon gamma, Interleukin-1 alpha, Interleukin-1 beta, Interleukin-1 |
| | Receptor antagonist, Interleukin-2, Interleukin-3, Interleukin-4, Interleukin-5, |
| | Interleukin-6, Interleukin-7, Interleukin-8, Interleukin-10, Interleukin-12 Subunit |
| | p40, Interleukin-12 Subunit p70, Interleukin-13, Interleukin-15, Interleukin-16, |
| | Leptin, Lymphotactin, Macrophage Inflammatory Protein-1 alpha, Macrophage |
| | Inflammatory Protein-1 beta, Macrophage-Derived Chemokine, Matrix |
| | Metalloproteinase-2, Matrix Metalloproteinase-3, Matrix Metalloproteinase-9, |
| | Monocyte Chemotactic Protein 1, Myeloperoxidase, Myoglobin, Plasminogen |
| | Activator Inhibitor 1, Pregnancy-Associated Plasma Protein A, Prostate-Specific |
| | Antigen (inc. Free PSA), Prostatic Acid Phosphatase, Serum Amyloid P-Component, |
| | Serum Glutamic Oxaloacetic Transaminase, Sex Hormone-Binding Globulin, Stem |
| | Cell Factor, T-Cell-Specific Protein RANTES, Thrombopoietin, Thyroid-Stimulating |
| | Hormone, Thyroxine-Binding Globulin, Tissue Factor, Tissue Inhibitor of |
| | Metalloproteinases 1, Tumor Necrosis Factor alpha, Tumor Necrosis Factor beta, |
| | Tumor Necrosis Factor Receptor 2, Vascular Cell Adhesion Molecule-1, Vascular |
| | Endothelial Growth Factor, von Willebrand Factor |
| Neurological | Alpha-1-Antitrypsin, Apolipoprotein A-I, Apolipoprotein A-II, Apolipoprotein B, |
| | Apolipoprotein C-I, Apolipoprotein H, Beta-2-Microglobulin, Betacellulin, Brain- |
| | Derived Neurotrophic Factor, Calbindin, Cancer Antigen 125, Carcinoembryonic |
| | Antigen, CD5 Antigen-like, Complement C3, Connective Tissue Growth Factor, |
| | Cortisol, Endothelin-1, Epidermal Growth Factor Receptor, Ferritin, Fetuin-A, |
| | Follicle-Stimulating Hormone, Haptoglobin, Immunoglobulin A, Immunoglobulin |
| | M, Intercellular Adhesion Molecule 1, Interleukin-6 Receptor, Interleukin-7, |
| | Interleukin-10, Interleukin-11, Interleukin-17, Kidney Injury Molecule-1, |
| | Luteinizing Hormone, Macrophage-Derived Chemokine, Macrophage Migration |
| | Inhibitory Factor, Macrophage Inflammatory Protein-1 alpha, Matrix |
| | Metalloproteinase-2, Monocyte Chemotactic Protein 2, Peptide YY, Prolactin, |
| | Prostatic Acid Phosphatase, Serotransferrin, Serum Amyloid P-Component, Sortilin, |
| | Testosterone, Thrombopoietin, Thyroid-Stimulating Hormone, Tissue Inhibitor of |
| | Metalloproteinases 1, TNF-Related Apoptosis-Inducing Ligand Receptor 3, Tumor |
| | necrosis Factor Receptor 2, Vascular Endothelial Growth Factor, Vitronectin |
| Cardiovascular | Adiponectin, Apolipoprotein A-I, Apolipoprotein B, Apolipoprotein C-III, |
| | Apolipoprotein D, Apolipoprotein E, Apolipoprotein H, Apolipoprotein(a), |
| | Clusterin, C-Reactive Protein, Cystatin-C, EN-RAGE, E-Selectin, Fatty Acid- |
| | Binding Protein (heart), Ferritin, Fibrinogen, Haptoglobin, Immunoglobulin M, |
| | Intercellular Adhesion Molecule 1, Interleukin-6, Interleukin-8, Lectin-Like |
| | Oxidized LDL Receptor 1, Leptin, Macrophage Inflammatory Protein-1 alpha, |
| | Macrophage Inflammatory Protein-1 beta, Malondialdehyde-Modified Low-Density |
| | Lipoprotein, Matrix Metalloproteinase-1, Matrix Metalloproteinase-10, Matrix |
| | Metalloproteinase-2, Matrix Metalloproteinase-3, Matrix Metalloproteinase-7, |
| | Matrix Metalloproteinase-9, Monocyte Chemotactic Protein 1, Myeloperoxidase, |
| | Myoglobin, NT-proBNP, Osteopontin, Plasminogen Activator Inhibitor 1, P- |
| | Selectin, Receptor for advanced glycosylation end products, Serum Amyloid P- |
| | Component, Sex Hormone-Binding Globulin, T-Cell-Specific Protein RANTES, |
| | Thrombomodulin, Thyroxine-Binding Globulin, Tissue Inhibitor of |
| | Metalloproteinases 1, Tumor Necrosis Factor alpha, Tumor necrosis Factor Receptor |
| | 2, Vascular Cell Adhesion Molecule-1, von Willebrand Factor |
| Inflammatory | Alpha-1-Antitrypsin, Alpha-2-Macroglobulin, Beta-2-Microglobulin, Brain-Derived |
| | Neurotrophic Factor, Complement C3, C-Reactive Protein, Eotaxin-1, Factor VII, |
| | Ferritin, Fibrinogen, Granulocyte-Macrophage Colony-Stimulating Factor, |
| | Haptoglobin, Intercellular Adhesion Molecule 1, Interferon gamma, Interleukin-1 |
| | alpha, Interleukin-1 beta, Interleukin-1 Receptor antagonist, Interleukin-2, |
| | Interleukin-3, Interleukin-4, Interleukin-5, Interleukin-6, Interleukin-7, Interleukin-8, |
| | Interleukin-10, Interleukin-12 Subunit p40, Interleukin-12 Subunit p70, Interleukin- |
| | 15, Interleukin-17, Interleukin-23, Macrophage Inflammatory Protein-1 alpha, |
| | Macrophage Inflammatory Protein-1 beta, Matrix Metalloproteinase-2, Matrix |
| | Metalloproteinase-3, Matrix Metalloproteinase-9, Monocyte Chemotactic Protein 1, |
| | Stem Cell Factor, T-Cell-Specific Protein RANTES, Tissue Inhibitor of |
| | Metalloproteinases 1, Tumor Necrosis Factor alpha, Tumor Necrosis Factor beta, |
| | Tumor necrosis Factor Receptor 2, Vascular Cell Adhesion Molecule-1, Vascular |
| | Endothelial Growth Factor, Vitamin D-Binding Protein, von Willebrand Factor |
| Metabolic | Adiponectin, Adrenocorticotropic Hormone, Angiotensin-Converting Enzyme, |
| | Angiotensinogen, Complement C3 alpha des arg, Cortisol, Follicle-Stimulating |
| | Hormone, Galanin, Glucagon, Glucagon-like Peptide 1, Insulin, Insulin-like Growth |
| | Factor I, Leptin, Luteinizing Hormone, Pancreatic Polypeptide, Peptide YY, |
| | Progesterone, Prolactin, Resistin, Secretin, Testosterone |
| Kidney | Alpha-1-Microglobulin, Beta-2-Microglobulin, Calbindin, Clusterin, Connective |
| | Tissue Growth Factor, Creatinine, Cystatin-C, Glutathione S-Transferase alpha, |
| | Kidney Injury Molecule-1, Microalbumin, Neutrophil Gelatinase-Associated |
| | Lipocalin, Osteopontin, Tamm-Horsfall Urinary Glycoprotein, Tissue Inhibitor of |
| | Metalloproteinases 1, Trefoil Factor 3, Vascular Endothelial Growth Factor |
| Cytokines | Granulocyte-Macrophage Colony-Stimulating Factor, Interferon gamma, Interleukin- |
| | 2, Interleukin-3, Interleukin-4, Interleukin-5, Interleukin-6, Interleukin-7, |
| | Interleukin-8, Interleukin-10, Macrophage Inflammatory Protein-1 alpha, |
| | Macrophage Inflammatory Protein-1 beta, Matrix Metalloproteinase-2, Monocyte |
| | Chemotactic Protein 1, Tumor Necrosis Factor alpha, Tumor Necrosis Factor beta, |
| | Brain-Derived Neurotrophic Factor, Eotaxin-1, Intercellular Adhesion Molecule 1, |
| | Interleukin-1 alpha, Interleukin-1 beta, Interleukin-1 Receptor antagonist, |
| | Interleukin-12 Subunit p40, Interleukin-12 Subunit p70, Interleukin-15, Interleukin- |
| | 17, Interleukin-23, Matrix Metalloproteinase-3, Stem Cell Factor, Vascular |
| | Endothelial Growth Factor |
| Protein | 14.3.3 gamma, 14.3.3 (Pan), 14-3-3 beta, 6-Histidine, a-B-Crystallin, Acinus, Actin |
| | beta, Actin (Muscle Specific), Actin (Pan), Actin (skeletal muscle), Activin Receptor |
| | Type II, Adenovirus, Adenovirus Fiber, Adenovirus Type 2 E1A, Adenovirus Type 5 |
| | E1A, ADP-ribosylation Factor (ARF-6), Adrenocorticotrophic Hormone, AIF |
| | (Apoptosis Inducing Factor), Alkaline Phosphatase (AP), Alpha Fetoprotein (AFP), |
| | Alpha Lactalbumin, alpha-1-antichymotrypsin, alpha-1-antitrypsin, Amphiregulin, |
| | Amylin Peptide, Amyloid A, Amyloid A4 Protein Precursor, Amyloid Beta (APP), |
| | Androgen Receptor, Ang-1, Ang-2, APC, APC11, APC2, Apolipoprotein D, A-Raf, |
| | ARC, Ask1/MAPKKK5, ATM, Axonal Growth Cones, b Galactosidase, b-2- |
| | Microglobulin, B7-H2, BAG-1, Bak, Bax, B-Cell, B-cell Linker Protein (BLNK), |
| | Bc110/CIPER/CLAP/mE10, bcl-2a, Bcl-6, bcl-X, bcl-XL, Bim (BOD), Biotin, |
| | Bonzo/STRL33/TYMSTR, Bovine Serum Albumin, BRCA2 (aa 1323-1346), |
| | BrdU, Bromodeoxyuridine (BrdU), CA125, CA19-9, c-Abl, Cadherin (Pan), |
| | Cadherin-E, Cadherin-P, Calcitonin, Calcium Pump ATPase, Caldesmon, |
| | Calmodulin, Calponin, Calretinin, Casein, Caspase 1, Caspase 2, Caspase 3, Caspase |
| | 5, Caspase 6 (Mch 2), Caspase 7 (Mch 3), Caspase 8 (FLICE), Caspase 9, Catenin |
| | alpha, Catenin beta, Catenin gamma, Cathepsin D, CCK-8, CD1, CD10, |
| | CD100/Leukocyte Semaphorin, CD105, CD106/VCAM, CD115/c-fms/CSF-1R/M- |
| | CSFR, CD137 (4-1BB), CD138, CD14, CD15, CD155/PVR (Polio Virus Receptor), |
| | CD16, CD165, CD18, CD1a, CD1b, CD2, CD20, CD21, CD23, CD231, CD24, |
| | CD25/IL-2 Receptor a, CD26/DPP IV, CD29, CD30 (Reed-Sternberg Cell Marker), |
| | CD32/Fcg Receptor II, CD35/CR1, CD36GPIIIb/GPIV, CD3zeta, CD4, CD40, |
| | CD42b, CD43, CD45/T200/LCA, CD45RB, CD45RO, CD46, CD5, CD50/ICAM-3, |
| | CD53, CD54/ICAM-1, CD56/NCAM-1, CD57, CD59/MACIF/MIRL/Protectin, |
| | CD6, CD61/Platelet Glycoprotein IIIA, CD63, CD68, CD71/Transferrin Receptor, |
| | CD79a mb-1, CD79b, CD8, CD81/TAPA-1, CD84, CD9, CD94, CD95/Fas, CD98, |
| | CDC14A Phosphatase, CDC25C, CDC34, CDC37, CDC47, CDC6, cdh1, |
| | Cdk1/p34cdc2, Cdk2, Cdk3, Cdk4, Cdk5, Cdk7, Cdk8, CDw17, CDw60, CDw75, |
| | CDw78, CEA/CD66e, c-erbB-2/HER-2/neu Ab-1 (21N), c-erbB-4/HER-4, c-fos, |
| | Chk1, Chorionic Gonadotropin beta (hCG-beta), Chromogranin A, CIDE-A, CIDE- |
| | B, CITED1, c-jun, Clathrin, claudin 11, Claudin 2, Claudin 3, Claudin 4, Claudin 5, |
| | CLAUDIN 7, Claudin-1, CNPase, Collagen II, Collagen IV, Collagen IX, Collagen |
| | VII, Connexin 43, COX2, CREB, CREB-Binding Protein, Cryptococcus |
| | neoformans, c-Src, Cullin-1 (CUL-1), Cullin-2 (CUL-2), Cullin-3 (CUL-3), CXCR4/ |
| | Fusin, Cyclin B1, Cyclin C, Cyclin D1, Cyclin D3, Cyclin E, Cyclin E2, Cystic |
| | Fibrosis Transmembrane Regulator, Cytochrome c, D4-GDI, Daxx, DcR1, DcR2/ |
| | TRAIL-R4/TRUNDD, Desmin, DFF40 (DNA Fragmentation Factor 40)/CAD, |
| | DFF45/ICAD, DJ-1, DNA Ligase I, DNA Polymerase Beta, DNA Polymerase |
| | Gamma, DNA Primase (p49), DNA Primase (p58), DNA-PKcs, DP-2, DR3, DR5, |
| | Dysferlin, Dystrophin, E2F-1, E2F-2, E2F-3, E2F-4, E2F-5, E3-binding protein |
| | (ARM1), EGFR, EMA/CA15-3/MUC-1, Endostatin, Epithelial Membrane Antigen |
| | (EMA/CA15-3/MUC-1), Epithelial Specific Antigen, ER beta, ER Ca+2 |
| | ATPase2, ERCC1, Erk1, ERK2, Estradiol, Estriol, Estrogen Receptor, Exo1, |
| | Ezrin/p81/80K/Cytovillin, F.VIII/VWF, Factor VIII Related Antigen, FADD (FAS- |
| | Associated death domain-containing protein), Fascin, Fas-ligand, Ferritin, FGF-1, |
| | FGF-2, FHIT, Fibrillin-1, Fibronectin, Filaggrin, Filamin, FITC, Fli-1, FLIP, Flk-1/ |
| | KDR/VEGFR2, Flt-1/VEGFR1, Flt-4, Fra2, FSH, FSH-b, Fyn, Ga0, Gab-1, |
| | GABA a Receptor 1, GAD65, Gai1, Gamma Glutamyl Transferase (gGT), Gamma |
| | Glutamylcysteine Synthetase(GCS)/Glutamate-cysteine Ligase, GAPDH, Gastrin 1, |
| | GCDFP-15, G-CSF, GFAP, Glicentin, Glucagon, Glucose-Regulated Protein 94, |
| | GluR 2/3, GluR1, GluR4, GluR6/7, GLUT-1, GLUT-3, Glycogen Synthase Kinase |
| | 3b (GSK3b), Glycophorin A, GM-CSF, GnRH Receptor, Golgi Complex, |
| | Granulocyte, Granzyme B, Grb2, Green Fluorescent Protein (GFP), GRIP1, Growth |
| | Hormone (hGH), GSK-3, GST, GSTmu, H. Pylori, HDAC1, HDJ-2/DNAJ, Heat |
| | Shock Factor 1, Heat Shock Factor 2, Heat Shock Protein 27/hsp27, Heat Shock |
| | Protein 60/hsp60, Heat Shock Protein 70/hsp70, Heat Shock Protein 75/hsp75, Heat |
| | Shock Protein 90a/hsp86, Heat Shock Protein 90b/hsp84, Helicobacter pylori, |
| | Heparan Sulfate Proteoglycan, Hepatic Nuclear Factor-3B, Hepatocyte, Hepatocyte |
| | Factor Homologue-4, Hepatocyte Growth Factor, Heregulin, HIF-1a, Histone H1, |
| | hPL, HPV 16, HPV 16-E7, HRP, Human Sodium Iodide Symporter (hNIS), I-FLICE/ |
| | CASPER, IFN gamma, IgA, IGF-1R, IGF-I, IgG, IgM (m-Heavy Chain), I-Kappa- |
| | B Kinase b (IKKb), IL-1 alpha, IL-1 beta, IL-10, IL-10R, IL17, IL-2, IL-3, IL-30, |
| | IL-4, IL-5, IL-6, IL-8, Inhibin alpha, Insulin, Insulin Receptor, Insulin Receptor |
| | Substrate-1, Int-2 Oncoprotein, Integrin beta5, Interferon-a(II), Interferon-g, |
| | Involucrin, IP10/CRG2, IPO-38 Proliferation Marker, IRAK, ITK, JNK Activating |
| | kinase (JKK1), Kappa Light Chain, Keratin 10, Keratin 10/13, Keratin 14, Keratin |
| | 15, Keratin 16, Keratin 18, Keratin 19, Keratin 20, Keratin 5/6/18, Keratin 5/8, |
| | Keratin 8, Keratin 8 (phospho-specific Ser73), Keratin 8/18, Keratin (LMW), Keratin |
| | (Multi), Keratin (Pan), Ki67, Ku (p70/p80), Ku (p80), L1 Cell Adhesion Molecule, |
| | Lambda Light Chain, Laminin B1/b1, Laminin B2/g1, Laminin Receptor, Laminin-s, |
| | Lck, Lck (p56lck), Leukotriene (C4, D4, E4), LewisA, LewisB, LH, L-Plastin, LRP/ |
| | MVP, Luciferase, Macrophage, MADD, MAGE-1, Maltose Binding Protein, |
| | MAP1B, MAP2a,b, MART-1/Melan-A, Mast Cell Chymase, Mcl-1, MCM2, |
| | MCM5, MDM2, Medroxyprogesterone Acetate (MPA), Mek1, Mek2, Mek6, Mekk- |
| | 1, Melanoma (gp100), mGluR1, mGluR5, MGMT, MHC I (HLA25 and HLA- |
| | Aw32), MHC I (HLA-A), MHC I (HLA-A,B,C), MHC I (HLA-B), MHC II (HLA- |
| | DP and DR), MHC II (HLA-DP), MHC II (HLA-DQ), MHC II (HLA-DR), MHC II |
| | (HLA-DR) Ia, Microphthalmia, Milk Fat Globule Membrane Protein, Mitochondria, |
| | MLH1, MMP-1 (Collagenase-I), MMP-10 (Stromilysin-2), MMP-11 (Stromelysin- |
| | 3), MMP-13 (Collagenase-3), MMP-14/MT1-MMP, MMP-15/MT2-MMP, MMP- |
| | 16/MT3-MMP, MMP-19, MMP-2 (72 kDa Collagenase IV), MMP-23, MMP-7 |
| | (Matrilysin), MMP-9 (92 kDa Collagenase IV), Moesin, mRANKL, Muc-1, Mucin 2, |
| | Mucin 3 (MUC3), Mucin 5AC, MyD88, Myelin/Oligodendrocyte, Myeloid |
| | Specific Marker, Myeloperoxidase, MyoD1, Myogenin, Myoglobin, Myosin Smooth |
| | Muscle Heavy Chain, Nck, Negative Control for Mouse IgG1, Negative Control for |
| | Mouse IgG2a, Negative Control for Mouse IgG3, Negative Control for Mouse IgM, |
| | Negative Control for Rabbit IgG, Neurofilament, Neurofilament (160 kDa), |
| | Neurofilament (200 kDa), Neurofilament (68 kDa), Neuron Specific Enolase, |
| | Neutrophil Elastase, NF kappa B/p50, NF kappa B/p65 (Rel A), NGF-Receptor |
| | (p75NGFR), brain Nitric Oxide Synthase (bNOS), endothelial Nitric Oxide Synthase |
| | (eNOS), nm23, NOS-i, NOS-u, Notch, Nucleophosmin (NPM), NuMA, Oct-1, Oct- |
| | 2/, Oct-3/, Ornithine Decarboxylase, Osteopontin, p130, p130cas, p14ARF, |
| | p15INK4b, p16INK4a, p170, p170/MDR-1, p18INK4c, p19ARF, p19Skp1, |
| | p21WAF1, p27Kip1, p300/CBP, p35nck5a, P504S, p53, p57Kip2 Ab-7, p63 (p53 |
| | Family Member), p73, p73a, p73a/b, p95VAV, Parathyroid Hormone, Parathyroid |
| | Hormone Receptor Type 1, Parkin, PARP, PARP (Poly ADP-Ribose Polymerase), |
| | Pax-5, Paxillin, PCNA, PCTAIRE2, PDGF, PDGFR alpha, PDGFR beta, Pds1, |
| | Perforin, PGP9.5, PHAS-I, PHAS-II, Phospho-Ser/Thr/Tyr, Phosphotyrosine, PLAP, |
| | Plasma Cell Marker, Plasminogen, PLC gamma 1, PMP-22, Pneumocystis jiroveci, |
| | PPAR-gamma, PR3 (Proteinase 3), Presenillin, Progesterone, Progesterone Receptor, |
| | Progesterone Receptor (phospho-specific)—Serine 190, Progesterone Receptor |
| | (phospho-specific)—Serine 294, Prohibitin, Prolactin, Prolactin Receptor, Prostate |
| | Apoptosis Response Protein-4, Prostate Specific Acid Phosphatase, Prostate Specific |
| | Antigen, pS2, PSCA, Rabies Virus, RAD1, Rad51, Raf1, Raf-1 (Phospho-specific), |
| | RAIDD, Ras, Rad18, Renal Cell Carcinoma, Ret Oncoprotein, Retinoblastoma, |
| | Retinoblastoma (Rb) (Phospho-specific Serine608), Retinoic Acid Receptor (b), |
| | Retinoid X Receptor (hRXR), Retinol Binding Protein, Rhodopsin (Opsin), ROC, |
| | RPA/p32, RPA/p70, Ruv A, Ruv B, Ruv C, S100, S100A4, S100A6, SHP-1, SIM |
| | Ag (SIMA-4D3), SIRP a1, sm, SODD (Silencer of Death Domain), Somatostatin |
| | Receptor-I, SRC1 (Steroid Receptor Coactivator-1) Ab-1, SREBP-1 (Sterol |
| | Regulatory Element Binding Protein-1), SRF (Serum Response Factor), Stat-1, Stat3, |
| | Stat5, Stat5a, Stat5b, Stat6, Streptavidin, Superoxide Dismutase, Surfactant Protein |
| | A, Surfactant Protein B, Surfactant Protein B (Pro), Survivin, SV40 Large T |
| | Antigen, Syk, Synaptophysin, Synuclein, Synuclein beta, Synuclein pan, TACE |
| | (TNF-alpha converting enzyme)/ADAM17, TAG-72, tau, TdT, Tenascin, |
| | Testosterone, TGF beta 3, TGF-beta 2, Thomsen-Friedenreich Antigen, |
| | Thrombospondin, Thymidine Phosphorylase, Thymidylate Synthase, Thymine |
| | Glycols, Thyroglobulin, Thyroid Hormone Receptor beta, Thyroid Hormone |
| | Receptor, Thyroid Stimulating Hormone (TSH), TID-1, TIMP-1, TIMP-2, TNF |
| | alpha, TNFa, TNR-R2, Topo II beta, Topoisomerase IIa, Toxoplasma Gondii, TR2, |
| | TRADD, Transforming Growth Factor a, Transglutaminase II, TRAP, Tropomyosin, |
| | TRP75/gp75, TrxR2, TTF-1, Tubulin, Tubulin-a, Tubulin-b, Tyrosinase, Ubiquitin, |
| | UCP3, uPA, Urocortin, Vacular Endothelial Growth Factor(VEGF), Vimentin, |
| | Vinculin, Vitamin D Receptor (VDR), von Hippel-Lindau Protein, Wnt-1, Xanthine |
| | Oxidase, XPA, XPF, XPG, XRCC1, XRCC2, ZAP-70, Zip kinase |
| Known Cancer | ABL1, ABL2, ACSL3, AF15Q14, AF1Q, AF3p21, AF5q31, AKAP9, AKT1, AKT2, |
| Genes | ALDH2, ALK, ALO17, APC, ARHGEF12, ARHH, ARID1A, ARID2, ARNT, |
| | ASPSCR1, ASXL1, ATF1, ATIC, ATM, ATRX, BAP1, BCL10, BCL11A, |
| | BCL11B, BCL2, BCL3, BCL5, BCL6, BCL7A, BCL9, BCOR, BCR, BHD, BIRC3, |
| | BLM, BMPR1A, BRAF, BRCA1, BRCA2, BRD3, BRD4, BRIP1, BTG1, BUB1B, |
| | C12orf9, C15orf21, C15orf55, C16orf75, CANT1, CARD11, CARS, CBFA2T1, |
| | CBFA2T3, CBFB, CBL, CBLB, CBLC, CCNB1IP1, CCND1, CCND2, CCND3, |
| | CCNE1, CD273, CD274, CD74, CD79A, CD79B, CDH1, CDH11, CDK12, CDK4, |
| | CDK6, CDKN2A, CDKN2a(p14), CDKN2C, CDX2, CEBPA, CEP1, CHCHD7, |
| | CHEK2, CHIC2, CHN1, CIC, CIITA, CLTC, CLTCL1, CMKOR1, COL1A1, |
| | COPEB, COX6C, CREB1, CREB3L1, CREB3L2, CREBBP, CRLF2, CRTC3, |
| | CTNNB1, CYLD, D10S170, DAXX, DDB2, DDIT3, DDX10, DDX5, DDX6, DEK, |
| | DICER1, DNMT3A, DUX4, EBF1, EGFR, EIF4A2, ELF4, ELK4, ELKS, ELL, |
| | ELN, EML4, EP300, EPS15, ERBB2, ERCC2, ERCC3, ERCC4, ERCC5, ERG, |
| | ETV1, ETV4, ETV5, ETV6, EVI1, EWSR1, EXT1, EXT2, EZH2, FACL6, |
| | FAM22A, FAM22B, FAM46C, FANCA, FANCC, FANCD2, FANCE, FANCF, |
| | FANCG, FBXO11, FBXW7, FCGR2B, FEV, FGFR1, FGFR1OP, FGFR2, FGFR3, |
| | FH, FHIT, FIP1L1, FLI1, FLJ27352, FLT3, FNBP1, FOXL2, FOXO1A, FOXO3A, |
| | FOXP1, FSTL3, FUBP1, FUS, FVT1, GAS7, GATA1, GATA2, GATA3, GMPS, |
| | GNA11, GNAQ, GNAS, GOLGA5, GOPC, GPC3, GPHN, GRAF, HCMOGT-1, |
| | HEAB, HERPUD1, HEY1, HIP1, HIST1H4I, HLF, HLXB9, HMGA1, HMGA2, |
| | HNRNPA2B1, HOOK3, HOXA11, HOXA13, HOXA9, HOXC11, HOXC13, |
| | HOXD11, HOXD13, HRAS, HRPT2, HSPCA, HSPCB, IDH1, IDH2, IGH@, |
| | IGK@, IGL@, IKZF1, IL2, IL21R, IL6ST, IL7R, IRF4, IRTA1, ITK, JAK1, JAK2, |
| | JAK3, JAZF1, JUN, KDM5A, KDM5C, KDM6A, KDR, KIAA1549, KIT, KLK2, |
| | KRAS, KTN1, LAF4, LASP1, LCK, LCP1, LCX, LHFP, LIFR, LMO1, LMO2, |
| | LPP, LYL1, MADH4, MAF, MAFB, MALT1, MAML2, MAP2K4, MDM2, |
| | MDM4, MDS1, MDS2, MECT1, MED12, MEN1, MET, MITF, MKL1, MLF1, |
| | MLH1, MLL, MLL2, MLL3, MLLT1, MLLT10, MLLT2, MLLT3, MLLT4, |
| | MLLT6, MLLT7, MN1, MPL, MSF, MSH2, MSH6, MSI2, MSN, MTCP1, MUC1, |
| | MUTYH, MYB, MYC, MYCL1, MYCN, MYD88, MYH11, MYH9, MYST4, |
| | NACA, NBS1, NCOA1, NCOA2, NCOA4, NDRG1, NF1, NF2, NFE2L2, NFIB, |
| | NFKB2, NIN, NKX2-1, NONO, NOTCH1, NOTCH2, NPM1, NR4A3, NRAS, |
| | NSD1, NTRK1, NTRK3, NUMA1, NUP214, NUP98, OLIG2, OMD, P2RY8, |
| | PAFAH1B2, PALB2, PAX3, PAX5, PAX7, PAX8, PBRM1, PBX1, PCM1, PCSK7, |
| | PDE4DIP, PDGFB, PDGFRA, PDGFRB, PER1, PHOX2B, PICALM, PIK3CA, |
| | PIK3R1, PIM1, PLAG1, PML, PMS1, PMS2, PMX1, PNUTL1, POU2AF1, |
| | POU5F1, PPARG, PPP2R1A, PRCC, PRDM1, PRDM16, PRF1, PRKAR1A, |
| | PRO1073, PSIP2, PTCH, PTEN, PTPN11, RAB5EP, RAD51L1, RAF1, RALGDS, |
| | RANBP17, RAP1GDS1, RARA, RB1, RBM15, RECQL4, REL, RET, ROS1, |
| | RPL22, RPN1, RUNDC2A, RUNX1, RUNXBP2, SBDS, SDH5, SDHB, SDHC, |
| | SDHD, SEPT6, SET, SETD2, SF3B1, SFPQ, SFRS3, SH3GL1, SIL, SLC45A3, |
| | SMARCA4, SMARCB1, SMO, SOCS1, SOX2, SRGAP3, SRSF2, SS18, SS18L1, |
| | SSH3BP1, SSX1, SSX2, SSX4, STK11, STL, SUFU, SUZ12, SYK, TAF15, TAL1, |
| | TAL2, TCEA1, TCF1, TCF12, TCF3, TCF7L2, TCL1A, TCL6, TET2, TFE3, |
| | TFEB, TFG, TFPT, TFRC, THRAP3, TIF1, TLX1, TLX3, TMPRSS2, TNFAIP3, |
| | TNFRSF14, TNFRSF17, TNFRSF6, TOP1, TP53, TPM3, TPM4, TPR, TRA@, |
| | TRB@, TRD@, TRIM27, TRIM33, TRIP11, TSC1, TSC2, TSHR, TTL, U2AF1, |
| | USP6, VHL, VTI1A, WAS, WHSC1, WHSC1L1, WIF1, WRN, WT1, WTX, XPA, |
| | XPC, XPO1, YWHAE, ZNF145, ZNF198, ZNF278, ZNF331, ZNF384, ZNF521, |
| | ZNF9, ZRSR2 |
| Known Cancer | AR, androgen receptor; ARPC1A, actin-related protein complex 2/3 subunit A; |
| Genes | AURKA, Aurora kinase A; BAG4, BCl-2 associated anthogene 4; BCl2l2, BCl-2 |
| | like 2; BIRC2, Baculovirus IAP repeat containing protein 2; CACNA1E, calcium |
| | channel voltage dependent alpha-1E subunit; CCNE1, cyclin E1; CDK4, cyclin |
| | dependent kinase 4; CHD1L, chromodomain helicase DNA binding domain 1-like; |
| | CKS1B, CDC28 protein kinase 1B; COPS3, COP9 subunit 3; DCUN1D1, DCN1 |
| | domain containing protein 1; DYRK2, dual specificity tyrosine phosphorylation |
| | regulated kinase 2; EEF1A2, eukaryotic elongation transcription factor 1 alpha 2; |
| | EGFR, epidermal growth factor receptor; FADD, Fas-associated via death domain; |
| | FGFR1, fibroblast growth factor receptor 1, GATA6, GATA binding protein 6; |
| | GPC5, glypican 5; GRB7, growth factor receptor bound protein 7; MAP3K5, |
| | mitogen activated protein kinase kinase kinase 5; MED29, mediator complex subunit |
| | 5; MITF, microphthalmia associated transcription factor; MTDH, metadherin; |
| | NCOA3, nuclear receptor coactivator 3; NKX2-1, NK2 homeobox 1; PAK1, |
| | p21/CDC42/RAC1-activated kinase 1; PAX9, paired box gene 9; PIK3CA, |
| | phosphatidylinositol-3 kinase catalytic a; PLA2G10, phopholipase A2, group X; |
| | PPM1D, protein phosphatase magnesium-dependent 1D; PTK6, protein tyrosine |
| | kinase 6; PRKCI, protein kinase C iota; RPS6KB1, ribosomal protein s6 kinase |
| | 70 kDa; SKP2, s-phase kinase associated protein; SMURF1, sMAD specific E3 |
| | ubiquitin protein ligase 1; SHH, sonic hedgehog homologue; STARD3, sTAR- |
| | related lipid transfer domain containing protein 3; YWHAQ, tyrosine 3- |
| | monooxygenase/tryptophan 5-monooxygenase activation protein, zeta isoform; |
| | ZNF217, zinc finger protein 217 |
| Mitotic Related | Aurora kinase A (AURKA); Aurora kinase B (AURKB); Baculoviral IAP repeat- |
| Cancer Genes | containing 5, survivin (BIRC5); Budding uninhibited by benzimidazoles 1 homolog |
| | (BUB1); Budding uninhibited by benzimidazoles 1 homolog beta, BUBR1 |
| | (BUB1B); Budding uninhibited by benzimidazoles 3 homolog (BUB3); CDC28 |
| | protein kinase regulatory subunit 1B (CKS1B); CDC28 protein kinase regulatory |
| | subunit 2 (CKS2); Cell division cycle 2 (CDC2)/CDK1 Cell division cycle 20 |
| | homolog (CDC20); Cell division cycle-associated 8, borealin (CDCA8); Centromere |
| | protein F, mitosin (CENPF); Centrosomal protein 110 kDa (CEP110); Checkpoint |
| | with forkhead and ring finger domains (CHFR); Cyclin B1 (CCNB1); Cyclin B2 |
| | (CCNB2); Cytoskeleton-associated protein 5 (CKAP5/ch-TOG); Microtubule- |
| | associated protein RP/EB family member 1. End-binding protein 1, EB1 |
| | (MAPRE1); Epithelial cell transforming sequence 2 oncogene (ECT2); Extra spindle |
| | poles like 1, separase (ESPL1); Forkhead box M1 (FOXM1); H2A histone family, |
| | member X (H2AFX); Kinesin family member 4A (KIF4A); Kinetochore-associated |
| | 1 (KNTC1/ROD); Kinetochore-associated 2; highly expressed in cancer 1 |
| | (KNTC2/HEC1); Large tumor suppressor, homolog 1 (LATS1); Large tumor |
| | suppressor, homolog 2 (LATS2); Mitotic arrest deficient-like 1; MAD1 (MAD1L1); |
| | Mitotic arrest deficient-like 2; MAD2 (MAD2L1); Mps1 protein kinase (TTK); |
| | Never in mitosis gene a-related kinase 2 (NEK2); Ninein, GSK3b interacting protein |
| | (NIN); Non-SMC condensin I complex, subunit D2 (NCAPD2/CNAP1); Non-SMC |
| | condensin I complex, subunit H (NACPH/CAPH); Nuclear mitotic apparatus protein |
| | 1 (NUMA1); Nucleophosmin (nucleolar phosphoprotein B23, numatrin); (NPM1); |
| | Nucleoporin (NUP98); Pericentriolar material 1 (PCM1); Pituitary tumor- |
| | transforming 1, securin (PTTG1); Polo-like kinase 1 (PLK1); Polo-like kinase 4 |
| | (PLK4/SAK); Protein (peptidylprolyl cis/trans isomerase) NIMA-interacting 1 |
| | (PIN1); Protein regulator of cytokinesis 1 (PRC1); RAD21 homolog (RAD21); Ras |
| | association (RalGDS/AF-6); domain family 1 (RASSF1); Stromal antigen 1 |
| | (STAG1); Synuclein-c, breast cancer-specific protein 1 (SNCG, BCSG1); Targeting |
| | protein for Xklp2 (TPX2); Transforming, acidic coiled-coil containing protein 3 |
| | (TACC3); Ubiquitin-conjugating enzyme E2C (UBE2C); Ubiquitin-conjugating |
| | enzyme E2I (UBE2I/UBC9); ZW10 interactor, (ZWINT); ZW10, kinetochore- |
| | associated homolog (ZW10); Zwilch, kinetochore-associated homolog (ZWILCH) |
| Ribonucleoprotein | Argonaute family member, Ago1, Ago2, Ago3, Ago4, GW182 (TNRC6A), |
| complexes | TNRC6B, TNRC6C, HNRNPA2B1, HNRPAB, ILF2, NCL (Nucleolin), NPM1 |
| | (Nucleophosmin), RPL10A, RPL5, RPLP1, RPS12, RPS19, SNRPG, TROVE2, |
| | apolipoprotein, apolipoprotein A, apo A-I, apo A-II, apo A-IV, apo A-V, |
| | apolipoprotein B, apo B48, apo B100, apolipoprotein C, apo C-I, apo C-II, apo C-III, |
| | apo C-IV, apolipoprotein D (ApoD), apolipoprotein E (ApoE), apolipoprotein H |
| | (ApoH), apolipoprotein L, APOL1, APOL2, APOL3, APOL4, APOL5, APOL6, |
| | APOLD1 |
| Cytokine | 4-1BB, ALCAM, B7-1, BCMA, CD14, CD30, CD40 Ligand, CEACAM-1, DR6, |
| Receptors | Dtk, Endoglin, ErbB3, E-Selectin, Fas, Flt-3L, GITR, HVEM, ICAM-3, IL-1 R4, IL- |
| | 1 RI, IL-10 Rbeta, IL-17R, IL-2Rgamma, IL-21R, LIMPII, Lipocalin-2, L-Selectin, |
| | LYVE-1, MICA, MICB, NRG1-beta1, PDGF Rbeta, PECAM-1, RAGE, TIM-1, |
| | TRAIL R3, Trappin-2, uPAR, VCAM-1, XEDAR |
| Prostate and | ErbB3, RAGE, Trail R3 |
| colorectal cancer | |
| vesicles | |
| Colorectal cancer | IL-1 alpha, CA125, Filamin, Amyloid A |
| vesicles | |
| Colorectal cancer | Involucrin, CD57, Prohibitin, Thrombospondin, Laminin B1/b1, Filamin, 14.3.3 |
| v adenoma | gamma, 14.3.3 Pan |
| vesicles | |
| Colorectal | Involucrin, Prohibitin, Laminin B1/b1, IL-3, Filamin, 14.3.3 gamma, 14.3.3 Pan, |
| adenoma vesicles | MMP-15/MT2-MMP, hPL, Ubiquitin, and mRANKL |
| Brain cancer | Prohibitin, CD57, Filamin, CD18, b-2-Microglobulin, IL-2, IL-3, CD16, p170, |
| vesicles | Keratin 19, Pds1, Glicentin, SRF (Serum Response Factor), E3-binding protein |
| | (ARM1), Collagen II, SRC1 (Steroid Receptor Coactivator-1) Ab-1, Caldesmon, |
| | GFAP, TRP75/gp75, alpha-1-antichymotrypsin, Hepatic Nuclear Factor-3B, PLAP, |
| | Tyrosinase, NF kappa B/p50, Melanoma (gp100), Cyclin E, 6-Histidine, Mucin 3 |
| | (MUC3), TdT, CD21, XPA, Superoxide Dismutase, Glycogen Synthase Kinase 3b |
| | (GSK3b), CD54/ICAM-1, Thrombospondin, Gai1, CD79a mb-1, IL-1 beta, |
| | Cytochrome c, RAD1, bcl-X, CD50/ICAM-3, Neurofilament, Alkaline Phosphatase |
| | (AP), ER Ca+2 ATPase2, PCNA, F.VIII/VWF, SV40 Large T Antigen, Paxillin, |
| | Fascin, CD165, GRIP1, Cdk8, Nucleophosmin (NPM), alpha-1-antitrypsin, |
| | CD32/Fcg Receptor II, Keratin 8 (phospho-specific Ser73), DR5, CD46, TID-1, |
| | MHC II (HLA-DQ), Plasma Cell Marker, DR3, Calmodulin, AIF (Apoptosis |
| | Inducing Factor), DNA Polymerase Beta, Vitamin D Receptor (VDR), Bcl10/ |
| | CIPER/CLAP/mE10, Neuron Specific Enolase, CXCR4/Fusin, Neurofilament |
| | (68 kDa), PDGFR, beta, Growth Hormone (hGH), Mast Cell Chymase, Ret |
| | Oncoprotein, and Phosphotyrosine |
| Melanoma | Caspase 5, Thrombospondin, Filamin, Ferritin, 14.3.3 gamma, 14.3.3 Pan, CD71/ |
| vesicles | Transferrin Receptor, and Prostate Apoptosis Response Protein-4 |
| Head and neck | 14.3.3 Pan, Filamin, 14.3.3 gamma, CD71/Transferrin Receptor, CD30, Cdk5, |
| cancer vesicles | CD138, Thymidine Phosphorylase, Ruv 5, Thrombospondin, CD1, Von Hippel- |
| | Lindau Protein, CD46, Rad51, Ferritin, c-Abl, Actin, Muscle Specific, LewisB |
| Membrane | carbonic anhydrase IX, B7, CCCL19, CCCL21, CSAp, HER-2/neu, BrE3, CD1, |
| proteins | CD1a, CD2, CD3, CD4, CD5, CD8, CD11A, CD14, CD15, CD16, CD18, CD19, |
| | CD20, CD21, CD22, CD23, CD25, CD29, CD30, CD32b, CD33, CD37, CD38, |
| | CD40, CD40L, CD44, CD45, CD46, CD52, CD54, CD55, CD59, CD64, CD67, |
| | CD70, CD74, CD79a, CD80, CD83, CD95, CD126, CD133, CD138, CD147, |
| | CD154, CEACAM5, CEACAM-6, alpha-fetoprotein (AFP), VEGF, ED-B |
| | fibronectin, EGP-1, EGP-2, EGF receptor (ErbB1), ErbB2, ErbB3, Factor H, FHL-1, |
| | Flt-3, folate receptor, Ga 733, GROB, HMGB-1, hypoxia inducible factor (HIF), |
| | HM1.24, HER-2/neu, insulin-like growth factor (ILGF), IFN-γ, IFN-α, IL-β, IL-2R, |
| | IL-4R, IL-6R, IL-13R, IL-15R, IL-17R, IL-18R, IL-2, IL-6, IL-8, IL-12, IL-15, IL- |
| | 17, IL-18, IL-25, IP-10, IGF-1R, Ia, HM1.24, gangliosides, HCG, HLA-DR, CD66a- |
| | d, MAGE, mCRP, MCP-1, MIP-1A, MIP-1B, macrophage migration-inhibitory |
| | factor (MIF), MUC1, MUC2, MUC3, MUC4, MUC5, placental growth factor |
| | (P1GF), PSA (prostate-specific antigen), PSMA, PSMA dimer, PAM4 antigen, |
| | NCA-95, NCA-90, A3, A33, Ep-CAM, KS-1, Le(y), mesothelin, S100, tenascin, |
| | TAC, Tn antigen, Thomas-Friedenreich antigens, tumor necrosis antigens, tumor |
| | angiogenesis antigens, TNF-α, TRAIL receptor (R1 and R2), VEGFR, RANTES, |
| | T101, cancer stem cell antigens, complement factors C3, C3a, C3b, C5a, C5 |
| Cluster of | CD1, CD2, CD3, CD4, CD5, CD6, CD7, CD8, CD9, CD10, CD11a, CD11b, CD11c, |
| Differentiation | CD12w, CD13, CD14, CD15, CD16, CDw17, CD18, CD19, CD20, CD21, CD22, |
| (CD) proteins | CD23, CD24, CD25, CD26, CD27, CD28, CD29, CD30, CD31, CD32, CD33, |
| | CD34, CD35, CD36, CD37, CD38, CD39, CD40, CD41, CD42, CD43, CD44, |
| | CD45, CD46, CD47, CD48, CD49a, CD49b, CD49c, CD49d, CD49e, CD49f, CD53, |
| | CD54, CD55, CD56, CD57, CD58, CD59, CD61, CD62E, CD62L, CD62P, CD63, |
| | CD68, CD69, CD71, CD72, CD73, CD74, CD80, CD81, CD82, CD83, CD86, |
| | CD87, CD88, CD89, CD90, CD91, CD95, CD96, CD100, CD103, CD105, CD106, |
| | CD107, CD107a, CD107b, CD109, CD117, CD120, CD127, CD133, CD134, |
| | CD135, CD138, CD141, CD142, CD143, CD144, CD147, CD151, CD152, CD154, |
| | CD156, CD158, CD163, CD165, CD166, CD168, CD184, CDw186, CD195, |
| | CD197, CD209, CD202a, CD220, CD221, CD235a, CD271, CD303, CD304, |
| | CD309, CD326 |
| Interleukin (IL) | IL-1, IL-2, IL-3, IL-4, IL-5, IL-6, IL-7, IL-8 or CXCL8, IL-9, IL-10, IL-11, IL-12, |
| proteins | IL-13, IL-14, IL-15, IL-16, IL-17, IL-18, IL-19, IL-20, IL-21, IL-22, IL-23, IL-24, |
| | IL-25, IL-26, IL-27, IL-28, IL-29, IL-30, IL-31, IL-32, IL-33, IL-35, IL-36 |
| IL receptors | CD121a/IL1R1, CD121b/IL1R2, CD25/IL2RA, CD122/IL2RB, CD132/IL2RG, |
| | CD123/IL3RA, CD131/IL3RB, CD124/IL4R, CD132/IL2RG, CD125/IL5RA, |
| | CD131/IL3RB, CD126/IL6RA, CD130/IR6RB, CD127/IL7RA, CD132/IL2RG, |
| | CXCR1/IL8RA, CXCR2/IL8RB/CD128, CD129/IL9R, CD210/IL10RA, |
| | CDW210B/IL10RB, IL11RA, CD212/IL12RB1, IR12RB2, IL13R, IL15RA, CD4, |
| | CDw217/IL17RA, IL17RB, CDw218a/IL18R1, IL20R, IL20R, IL21R, IL22R, |
| | IL23R, IL20R, LY6E, IL20R1, IL27RA, IL28R, IL31RA |
| Mucin (MUC) | MUC1, MUC2, MUC3A, MUC3B, MUC4, MUC5AC, MUC5B, MUC6, MUC7, |
| proteins | MUC8, MUC12, MUC13, MUC15, MUC16, MUC17, MUC19, and MUC20 |
| MUC1 isoforms | mucin-1 isoform 2 precursor or mature form (NP_001018016.1), mucin-1 isoform 3 |
| | precursor or mature form (NP_001018017.1), mucin-1 isoform 5 precursor or mature |
| | form (NP_001037855.1), mucin-1 isoform 6 precursor or mature form |
| | (NP_001037856.1), mucin-1 isoform 7 precursor or mature form (NP_001037857.1), |
| | mucin-1 isoform 8 precursor or mature form (NP_001037858.1), mucin-1 isoform 9 |
| | precursor or mature form (NP_001191214.1), mucin-1 isoform 10 precursor or |
| | mature form (NP_001191215.1), mucin-1 isoform 11 precursor or mature form |
| | (NP_001191216.1), mucin-1 isoform 12 precursor or mature form |
| | (NP_001191217.1), mucin-1 isoform 13 precursor or mature form |
| | (NP_001191218.1), mucin-1 isoform 14 precursor or mature form |
| | (NP_001191219.1), mucin-1 isoform 15 precursor or mature form |
| | (NP_001191220.1), mucin-1 isoform 16 precursor or mature form |
| | (NP_001191221.1), mucin-1 isoform 17 precursor or mature form |
| | (NP_001191222.1), mucin-1 isoform 18 precursor or mature form |
| | (NP_001191223.1), mucin-1 isoform 19 precursor or mature form |
| | (NP_001191224.1), mucin-1 isoform 20 precursor or mature form |
| | (NP_001191225.1), mucin-1 isoform 21 precursor or mature form |
| | (NP_001191226.1), mucin-1 isoform 1 precursor or mature form (NP_002447.4), |
| | ENSP00000357380, ENSP00000357377, ENSP00000389098, ENSP00000357374, |
| | ENSP00000357381, ENSP00000339690, ENSP00000342814, ENSP00000357383, |
| | ENSP00000357375, ENSP00000338983, ENSP00000343482, ENSP00000406633, |
| | ENSP00000388172, ENSP00000357378, P15941-1, P15941-2, P15941-3, P15941-4, |
| | P15941-5, P15941-6, P15941-7, P15941-8, P15941-9, P15941-10, secreted isoform, |
| | membrane bound isoform, CA 27.29 (BR 27.29), CA 15-3, PAM4 reactive antigen, |
| | underglycosylated isoform, unglycosylated isoform, CanAg antigen |
| MUC1 | ABL1, SRC, CTNND1, ERBB2, GSK3B, JUP, PRKCD, APC, GALNT1, |
| interacting | GALNT10, GALNT12, JUN, LCK, OSGEP, ZAP70, CTNNB1, EGFR, SOS1, |
| proteins | ERBB3, ERBB4, GRB2, ESR1, GALNT2, GALNT4, LYN, TP53, C1GALT1, |
| | C1GALT1C1, GALNT3, GALNT6, GCNT1, GCNT4, MUC12, MUC13, MUC15, |
| | MUC17, MUC19, MUC2, MUC20, MUC3A, MUC4, MUC5B, MUC6, MUC7, |
| | MUCL1, ST3GAL1, ST3GAL3, ST3GAL4, ST6GALNAC2, B3GNT2, B3GNT3, |
| | B3GNT4, B3GNT5, B3GNT7, B4GALT5, GALNT11, GALNT13, GALNT14, |
| | GALNT5, GALNT8, GALNT9, ST3GAL2, ST6GAL1, ST6GALNAC4, GALNT15, |
| | MYOD1, SIGLEC1, IKBKB, TNFRSF1A, IKBKG, MUC1 |
| Tumor markers | Alphafetoprotein (AFP), Carcinoembryonic antigen (CEA), CA-125, MUC-1, |
| | Epithelial tumor antigen (ETA), Tyrosinase, Melanoma-associated antigen (MAGE), |
| | p53 |
| Tumor markers | Alpha fetoprotein (AFP), CA15-3, CA27-29, CA19-9, CA-125, Calretinin, |
| | Carcinoembryonic antigen, CD34, CD99, CD117, Chromogranin, Cytokeratin |
| | (various types), Desmin, Epithelial membrane protein (EMA), Factor VIII, CD31 |
| | FL1, Glial fibrillary acidic protein (GFAP), Gross cystic disease fluid protein |
| | (GCDFP-15), HMB-45, Human chorionic gonadotropin (hCG), immunoglobulin, |
| | inhibin, keratin (various types), PTPRC (CD45), lymphocyte marker (various types, |
| | MART-1 (Melan-A), Myo D1, muscle-specific actin (MSA), neurofilament, neuron- |
| | specific enolase (NSE), placental alkaline phosphatase (PLAP), prostate-specific |
| | antigen, S100 protein, smooth muscle actin (SMA), synaptophysin, thyroglobulin, |
| | thyroid transcription factor-1, Tumor M2-PK, vimentin |
| Cell adhesion | Immunoglobulin superfamily CAMs (IgSF CAMs), N-CAM (Myelin protein zero), |
| molecule | ICAM (1, 5), VCAM-1, PE-CAM, L1-CAM, Nectin (PVRL1, PVRL2, PVRL3), |
| (CAMs) | Integrins, LFA-1 (CD11a + CD18), Integrin alphaXbeta2 (CD11c + CD18), |
| | Macrophage-1 antigen (CD11b + CD18), VLA-4 (CD49d + CD29), Glycoprotein |
| | IIb/IIIa (ITGA2B + ITGB3), Cadherins, CDH1, CDH2, CDH3, Desmosomal, |
| | Desmoglein (DSG1, DSG2, DSG3, DSG4), Desmocollin (DSC1, DSC2, DSC3), |
| | Protocadherin, PCDH1, T-cadherin, CDH4, CDH5, CDH6, CDH8, CDH11, CDH12, |
| | CDH15, CDH16, CDH17, CDH9, CDH10, Selectins, E-selectin, L-selectin, P- |
| | selectin, Lymphocyte homing receptor: CD44, L-selectin, integrin (VLA-4, LFA-1), |
| | Carcinoembryonic antigen (CEA), CD22, CD24, CD44, CD146, CD164 |
| Annexins | ANXA1; ANXA10; ANXA11; ANXA13; ANXA2; ANXA3; ANXA4; ANXA5; |
| | ANXA6; ANXA7; ANXA8; ANXA8L1; ANXA8L2; ANXA9 |
| Cadherins | CDH1, CDH2, CDH12, CDH3, Deomoglein, DSG1, DSG2, DSG3, DSG4, |
| (“calcium- | Desmocollin, DSC1, DSC2, DSC3, Protocadherins, PCDH1, PCDH10, PCDH11x, |
| dependent | PCDH11y, PCDH12, FAT, FAT2, FAT4, PCDH15, PCDH17, PCDH18, PCDH19; |
| adhesion”) | PCDH20; PCDH7, PCDH8, PCDH9, PCDHA1, PCDHA10, PCDHA11, PCDHA12, |
| | PCDHA13, PCDHA2, PCDHA3, PCDHA4, PCDHA5, PCDHA6, PCDHA7, |
| | PCDHA8, PCDHA9, PCDHAC1, PCDHAC2, PCDHB1, PCDHB10, PCDHB11, |
| | PCDHB12, PCDHB13, PCDHB14, PCDHB15, PCDHB16, PCDHB17, PCDHB18, |
| | PCDHB2, PCDHB3, PCDHB4, PCDHB5, PCDHB6, PCDHB7, PCDHB8, |
| | PCDHB9, PCDHGA1, PCDHGA10, PCDHGA11, PCDHGA12, PCDHGA2; |
| | PCDHGA3, PCDHGA4, PCDHGA5, PCDHGA6, PCDHGA7, PCDHGA8, |
| | PCDHGA9, PCDHGB1, PCDHGB2, PCDHGB3, PCDHGB4, PCDHGB5, |
| | PCDHGB6, PCDHGB7, PCDHGC3, PCDHGC4, PCDHGC5, CDH9 (cadherin 9, |
| | type 2 (T1-cadherin)), CDH10 (cadherin 10, type 2 (T2-cadherin)), CDH5 (VE- |
| | cadherin (vascular endothelial)), CDH6 (K-cadherin (kidney)), CDH7 (cadherin 7, |
| | type 2), CDH8 (cadherin 8, type 2), CDH11 (OB-cadherin (osteoblast)), CDH13 (T- |
| | cadherin-H-cadherin (heart)), CDH15 (M-cadherin (myotubule)), CDH16 (KSP- |
| | cadherin), CDH17 (LI cadherin (liver-intestine)), CDH18 (cadherin 18, type 2), |
| | CDH19 (cadherin 19, type 2), CDH20 (cadherin 20, type 2), CDH23 (cadherin 23, |
| | (neurosensory epithelium)), CDH10, CDH11, CDH13, CDH15, CDH16, CDH17, |
| | CDH18, CDH19, CDH20, CDH22, CDH23, CDH24, CDH26, CDH28, CDH4, |
| | CDH5, CDH6, CDH7, CDH8, CDH9, CELSR1, CELSR2, CELSR3, CLSTN1, |
| | CLSTN2, CLSTN3, DCHS1, DCHS2, LOC389118, PCLKC, RESDA1, RET |
| ECAD (CDH1) | SNAI1/SNAIL, ZFHX1B/SIP1, SNAI2/SLUG, TWIST1, DeltaEF1 |
| downregulators | |
| ECAD | AML1, p300, HNF3 |
| upregulators | |
| ECAD | ACADVL, ACTG1, ACTN1, ACTN4, ACTR3, ADAM10, ADAM9, AJAP1, |
| interacting | ANAPC1, ANAPC11, ANAPC4, ANAPC7, ANK2, ANP32B, APC2, ARHGAP32, |
| proteins | ARPC2, ARVCF, BOC, C1QBP, CA9, CASP3, CASP8, CAV1, CBLL1, CCNB1, |
| | CCND1, CCT6A, CDC16, CDC23, CDC26, CDC27, CDC42, CDH2, CDH3, |
| | CDK5R1, CDON, CDR2, CFTR, CREBBP, CSE1L, CSNK2A1, CTNNA1, |
| | CTNNB1, CTNND1, CTNND2, DNAJA1, DRG1, EGFR, EP300, ERBB2, |
| | ERBB2IP, ERG, EZR, FER, FGFR1, FOXM1, FRMD5, FYN, GBAS, GNA12, |
| | GNA13, GNB2L1, GSK3B, HDAC1, HDAC2, HSP90AA1, HSPA1A, HSPA1B, |
| | HSPD1, IGHA1, IQGAP1, IRS1, ITGAE, ITGB7, JUP, KIFC3, KLRG1, KRT1, |
| | KRT9, LIMA1, LMNA, MAD2L2, MAGI1, MAK, MDM2, MET, MYO6, MYO7A, |
| | NDRG1, NEDD9, NIPSNAP1, NKD2, PHLPP1, PIP5K1C, PKD1, PKP4, |
| | PLEKHA7, POLR2E, PPP1CA, PRKD1, PSEN1, PTPN1, PTPN14, PTPRF, |
| | PTPRM, PTPRQ, PTTG1, PVR, PVRL1, RAB8B, RRM2, SCRIB, SET, SIX1, SKI, |
| | SKP2, SRC, TACC3, TAS2R13, TGM2, TJP1, TK1, TNS3, TTK, UBC, USP9X, |
| | VCL, VEZT, XRCC5, YAP1, YES1, ZC3HC1 |
| Epithelial- | SERPINA3, ACTN1, AGR2, AKAP12, ALCAM, AP1M2, AXL, BSPRY, CCL2, |
| mesenchymal | CDH1, CDH2, CEP170, CLDN3, CLDN4, CNN3, CYP4X1, DNMT3A, DSG3, |
| transition (EMT) | DSP, EFNB2, EHF, ELF3, ELF5, ERBB3, ETV5, FLRT3, FOSB, FOSL1, FOXC1, |
| | FX YD 5, GPDIL, HMGA1, HMGA2, HOPX, IFI16, IGFBP2, IHH, IKBIP, IL-11, |
| | IL-18, IL6, IL8, ITGA5, ITGB3, LAMBl, LCN2, MAP7, MB, MMP7, MMP9, |
| | MPZL2, MSLN, MTA3, MTSS1, OCLN, PCOLCE2, PECAM1, PLAUR, PLXNB1, |
| | PPL, PPP1R9A, RASSF8, SCNN1A, SERPINB2, SERPINE1, SFRP1, SH3YL1, |
| | SLC27A2, SMAD7, SNAIL SNAI2, SPARC, SPDEF, SRPX, STAT5A, TBX2, |
| | TJP3, TMEM125, TMEM45B, TWIST1, VCAN, VIM, VWF, XBP1, YBX1, |
| | ZBTB10, ZEB1, ZEB2 |

[0363] Examples of additional biomarkers that can be incorporated into the methods and compositions of the invention include without limitation those disclosed in International Patent Application Nos. PCT/US2012/042519 (WO 2012/174282), filed Jun. 14, 2012 and PCT/US2012/050030 (WO 2013/022995), filed Aug. 8, 2012.

[0364] In various embodiments of the invention, the biomarkers or biosignature used to detect or assess any of the conditions or diseases disclosed herein can comprise one or more biomarkers in one of several different categories of markers, wherein the categories include without limitation one or more of: 1) disease specific biomarkers; 2) cell- or tissue-specific biomarkers; 3) vesicle-specific markers (e.g., general vesicle biomarkers); 4. angiogenesis-specific biomarkers; and 5) immunomodulatory biomarkers. Examples of all such markers are disclosed herein and known to a person having ordinary skill in the art. Furthermore, a biomarker known in the art that is characterized to have a role in a particular disease or condition can be adapted for use as a target in compositions and methods of the invention. In further embodiments, such biomarkers that are associated with vesicles can be all vesicle surface markers, or a combination of vesicle surface markers and vesicle payload markers (i.e., molecules enclosed by a vesicle). The biomarkers assessed can be from a combination of sources. For example, a disease or disorder may be detected or characterized by assessing a combination of proteins, nucleic acids, vesicles, circulating biomarkers, biomarkers from a tissue sample, and the like. In addition, as noted herein, the biological sample assessed can be any biological fluid, or can comprise individual components present within such biological fluid (e.g., vesicles, nucleic acids, proteins, or complexes thereof).

[0365] EpCAM is a pan-epithelial differentiation antigen that is expressed on many tumor cells. It is intricately linked with the Cadherin-Catenin pathway and hence the fundamental WNT pathway responsible for intracellular signalling and polarity. It has been used as an immunotherapeutic target in the treatment of gastrointestinal, urological and other carcinomas. (Chaudry M A, Sales K, Ruf P, Lindhofer H, Winslet M C (April 2007). Br. J. Cancer 96 (7): 1013-9.). It is expressed in undifferentiated pluripotent stem cells. EpCAM is a member of a family that includes at least two type I membrane proteins and functions as a homotypic calcium-independent cell adhesion molecule. Mutations in this gene result in congenital tufting enteropathy. EpCAM has been observed on the surface of microvesicles derived from cancer cell of various lineages. EpCAM is used as an exemplary surface antigen in various examples herein. One of skill will appreciate that various embodiments and examples using EpCAM can be applied to other microvesicle surface antigens as well.

### Therapeutics

[0366] As used herein “therapeutically effective amount” refers to an amount of a composition that relieves (to some extent, as judged by a skilled medical practitioner) one or more symptoms of the disease or condition in a mammal Additionally, by “therapeutically effective amount” of a composition is meant an amount that returns to normal, either partially or completely, physiological or biochemical parameters associated with or causative of a disease or condition. A clinician skilled in the art can determine the therapeutically effective amount of a composition in order to treat or prevent a particular disease condition, or disorder when it is administered, such as intravenously, subcutaneously, intraperitoneally, orally, or through inhalation. The precise amount of the composition required to be therapeutically effective will depend upon numerous factors, e.g., such as the specific activity of the active agent, the delivery device employed, physical characteristics of the agent, purpose for the administration, in addition to many patient specific considerations. But a determination of a therapeutically effective amount is within the skill of an ordinarily skilled clinician upon the appreciation of the disclosure set forth herein.

[0367] The terms “treating,” “treatment,” “therapy,” and “therapeutic treatment” as used herein refer to curative therapy, prophylactic therapy, or preventative therapy. An example of “preventative therapy” is the prevention or lessening the chance of a targeted disease (e.g., cancer or other proliferative disease) or related condition thereto. Those in need of treatment include those already with the disease or condition as well as those prone to have the disease or condition to be prevented. The terms “treating,” “treatment,” “therapy,” and “therapeutic treatment” as used herein also describe the management and care of a mammal for the purpose of combating a disease, or related condition, and includes the administration of a composition to alleviate the symptoms, side effects, or other complications of the disease, condition. Therapeutic treatment for cancer includes, but is not limited to, surgery, chemotherapy, radiation therapy, gene therapy, and immunotherapy.

[0368] As used herein, the term “agent” or “drug” or “therapeutic agent” refers to a chemical compound, a mixture of chemical compounds, a biological macromolecule, or an extract made from biological materials such as bacteria, plants, fungi, or animal (particularly mammalian) cells or tissues that are suspected of having therapeutic properties. The agent or drug can be purified, substantially purified or partially purified. An “agent” according to the present invention, also includes a radiation therapy agent or a “chemotherapuetic agent.”

[0369] As used herein, the term “diagnostic agent” refers to any chemical used in the imaging of diseased tissue, such as, e.g., a tumor.

[0370] As used herein, the term “chemotherapuetic agent” refers to an agent with activity against cancer, neoplastic, and/or proliferative diseases, or that has ability to kill cancerous cells directly.

[0371] As used herein, “pharmaceutical formulations” include formulations for human and veterinary use with no significant adverse toxicological effect. “Pharmaceutically acceptable formulation” as used herein refers to a composition or formulation that allows for the effective distribution of the nucleic acid molecules of the instant invention in the physical location most suitable for their desired activity.

[0372] As used herein the term “pharmaceutically acceptable carrier” is intended to include any and all solvents, dispersion media, coatings, antibacterial and antifungal agents, isotonic and absorption delaying agents, and the like, compatible with pharmaceutical administration. The use of such media and agents for pharmaceutically active substances is well known in the art. Except insofar as any conventional media or agent is incompatible with the active compound, use thereof in the compositions is contemplated.

[0373] Aptamer-Toxin Conjugates as a Cancer Therapeutic

[0374] Extensive previous work has developed the concept of antibody-toxin conjugates (“immunoconjugates”) as potential therapies for a range of indications, mostly directed at the treatment of cancer with a primary focus on hematological tumors. A variety of different payloads for targeted delivery have been tested in pre-clinical and clinical studies, including protein toxins, high potency small molecule cytotoxics, radioisotopes, and liposome-encapsulated drugs. While these efforts have successfully yielded three FDA-approved therapies for hematological tumors, immunoconjugates as a class (especially for solid tumors) have historically yielded disappointing results that have been attributable to multiple different properties of antibodies, including tendencies to develop neutralizing antibody responses to non-humanized antibodies, limited penetration in solid tumors, loss of target binding affinity as a result of toxin conjugation, and imbalances between antibody half-life and toxin conjugate half-life that limit the overall therapeutic index (reviewed by Reff and Heard, Critical Reviews in Oncology/Hematology, 40 (2001):25-35).

[0375] Aptamers are functionally similar to antibodies, except their absorption, distribution, metabolism, and excretion (“ADME”) properties are intrinsically different and they generally lack many of the immune effector functions generally associated with antibodies (e.g., antibody-dependent cellular cytotoxicity, complement-dependent cytotoxicity). In comparing many of the properties of aptamers and antibodies previously described, several factors suggest that toxin-delivery via aptamers offers several concrete advantages over delivery with antibodies, ultimately affording them better potential as therapeutics. Several examples of the advantages of toxin-delivery via aptamers over antibodies are as follows:

[0376] 1) Aptamer-toxin conjugates are entirely chemically synthesized. Chemical synthesis provides more control over the nature of the conjugate. For example, the stoichiometry (ratio of toxins per aptamer) and site of attachment can be precisely defined. Different linker chemistries can be readily tested. The reversibility of aptamer folding means that loss of activity during conjugation is unlikely and provides more flexibility in adjusting conjugation conditions to maximize yields.

[0377] 2) Smaller size allows better tumor penetration. Poor penetration of antibodies into solid tumors is often cited as a factor limiting the efficacy of conjugate approaches. See Colcher, D., Goel, A., Pavlinkova, G., Beresford, G., Booth, B., Batra, S. K. (1999) “Effects of genetic engineering on the pharmacokinetics of antibodies,” Q. J. Nucl. Med., 43: 132-139. Studies comparing the properties of unPEGylated anti-tenascin C aptamers with corresponding antibodies demonstrate efficient uptake into tumors (as defined by the tumor:blood ratio) and evidence that aptamer localized to the tumor is unexpectedly long-lived (t_{1/2}>12 hours) (Hicke, B. J., Stephens, A. W., “Escort aptamers: a delivery service for diagnosis and therapy”, J. Clin. Invest., 106:923-928 (2000)).

[0378] 3) Tunable PK. Aptamer half-life/metabolism can be easily tuned to match properties of payload, optimizing the ability to deliver toxin to the tumor while minimizing systemic exposure. Appropriate modifications to the aptamer backbone and addition of high molecular weight PEGs should make it possible to match the half-life of the aptamer to the intrinsic half-life of the conjugated toxin/linker, minimizing systemic exposure to non-functional toxin-bearing metabolites (expected if t_{1/2}(aptamer)<<t_{1/2}(toxin)) and reducing the likelihood that persisting unconjugated aptamer will functionally block uptake of conjugated aptamer (expected if t_{1/2}(aptamer)>>t_{1/2} (toxin)).

[0379] 4) Relatively low material requirements. It is likely that dosing levels will be limited by toxicity intrinsic to the cytotoxic payload. As such, a single course of treatment will likely entail relatively small (<100 mg) quantities of aptamer, reducing the likelihood that the cost of oligonucleotide synthesis will be a barrier for aptamer-based therapies.

[0380] 5) Parenteral administration is preferred for this indication. There will be no special need to develop alternative formulations to drive patient/physician acceptance.

[0381] The invention provides a pharmaceutical composition comprising a therapeutically effective amount of an aptamer provided by the invention or a salt thereof, and a pharmaceutically acceptable carrier or diluent. The invention also provides a pharmaceutical composition comprising a therapeutically effective amount of the aptamer or a salt thereof, and a pharmaceutically acceptable carrier or diluent. Relatedly, the invention provides a method of treating or ameliorating a disease or disorder, comprising administering the pharmaceutical composition to a subject in need thereof. Administering a therapeutically effective amount of the composition to the subject may result in: (a) an enhancement of the delivery of the active agent to a disease site relative to delivery of the active agent alone; or (b) an enhancement of microvesicles clearance resulting in a decrease of at least 10%, 20%, 30%, 40%, 50%, 60%, 70%, 80%, or 90% in a blood level of microvesicles targeted by the aptamer; or (c) an decrease in biological activity of microvesicles targeted by the aptamer of at least 10%, 20%, 30%, 40%, 50%, 60%, 70%, 80%, or 90%. In an embodiment, the biological activity of microvesicles comprises immune suppression or transfer of genetic information. The disease or disorder can include without limitation those disclosed herein. For example, the disease or disorder may comprise a neoplastic, proliferative, or inflammatory, metabolic, cardiovascular, or neurological disease or disorder. See, e.g., section “Phenotypes.”

### Aptamer Identification Methods

[0382] Nucleic acid sequences fold into secondary and tertiary motifs particular to their nucleotide sequence. These motifs position the positive and negative charges on the nucleic acid sequences in locations that enable the sequences to bind to specific locations on target molecules, e.g., proteins and other amino acid sequences. These binding sequences are known in the field as aptamers. Due to the trillions of possible unique nucleotide sequences in even a relatively short stretch of nucleotides (e.g., 10, 11, 12, 13, 14, 15, 16, 17, 18, 19, 20, 21, 22, 23, 24, 25, 26, 27, 28, 29, 30, 31, 32, 33, 34, 35, 36, 37, 38, 39 or 40 nucleotides), a large variety of motifs can be generated, resulting in aptamers for almost any desired protein or other target.

[0383] Aptamers are created by randomly generating oligonucleotides of a specific length, typically 20-80 base pairs long, e.g., 20, 21, 22, 23, 24, 25, 26, 27, 28, 29, 30, 31, 32, 33, 34, 35, 36, 37, 38, 39, 40, 41, 42, 43, 44, 45, 46, 47, 48, 49, 50, 51, 52, 53, 54, 55, 56, 57, 58, 59, 60, 61, 62, 63, 64, 65, 66, 67, 68, 69, 70, 71, 72, 73, 74, 75, 76, 77, 78, 79 or 80 base pairs. These random oligonucleotides are then incubated with the protein target of interest. After several wash steps, the oligonucleotides that bind to the target are collected and amplified. The amplified aptamers are then added to the target and the process is repeated, often 15-20 times. A common version of this process known to those of skill in the art as the SELEX method.

[0384] The end result comprises one or more aptamer with high affinity to the target. The invention provides further processing of such resulting aptamers that can be use to provide desirable characteristics: 1) competitive binding assays to identify aptamers to a desired epitope; 2) motif analysis to identify high affinity binding aptamers in silico; and 3) microvesicle-based aptamer selection assays to identify aptamers that can be used to detect a particular disease. The methods are described in more detail below and further in the Examples.

[0385] The invention further contemplates aptamer sequences that are highly homologous to the sequences that are discovered by the methods of the invention. “High homology” typically refers to a homology of 40% or higher, preferably 60% or higher, more preferably 80% or higher, even more preferably 85%, 90%, 91%, 92%, 93%, 94%, 95%, 96%, 97%, 98%, 99% or higher between a polynucleotide sequence and a reference sequence. In an embodiment, the reference sequence comprises the sequence of one or more aptamer provided herein. Percent homologies (also referred to as percent identity) are typically carried out between two optimally aligned sequences. Methods of alignment of sequences for comparison are well-known in the art. Optimal alignment of sequences and comparison can be conducted, e.g., using the algorithm in “Wilbur and Lipman, Proc Natl Acad Sci USA 80: 726-30 (1983)”. Homology calculations can also be performed using BLAST, which can be found on the NCBI server at: www.ncbi.nlm.nih.gov/BLAST/ (Altschul S F, et al, Nucleic Acids Res. 1997; 25(17):3389-402; Altschul S F, et al, J Mol. Biol. 1990; 215(3):403-10). In the case of an isolated polynucleotide which is longer than or equivalent in length to the reference sequence, e.g., a sequence identified by the methods herein, the comparison is made with the full length of the reference sequence. Where the isolated polynucleotide is shorter than the reference sequence, e.g., shorter than a sequence identified by the methods herein, the comparison is made to a segment of the reference sequence of the same length (excluding any loop required by the homology calculation).

[0386] The invention further contemplates aptamer sequences that are functional fragments of the sequences that are discovered by the methods of the invention. In the context of an aptamer sequence, a “functional fragment” of the aptamer sequence may comprise a subsequence that binds to the same target as the full length sequence. In some instances, a candidate aptamer sequence is from a member of a library that contains a 5′ leader sequences and/or a 3′ tail sequence. Such leader sequences or tail sequences may serve to facilitate primer binding for amplification or capture, etc. In these embodiments, the functional fragment of the full length sequence may comprise the subsequence of the candidate aptamer sequence absent the leader and/or tail sequences.

### Competitive Antibody Addition

[0387] Known aptamer production methods may involve eluting all bound aptamers from the target sequence. In some cases, this is not sufficient to identify the desired aptamer sequence. For example, when trying to replace an antibody in an assay, it may be desirable to only collect aptamers that bind to the specific epitope of the antibody being replaced. The invention provides a method comprising addition of an antibody that is to be replaced to the aptamer/target reaction in order to allow for the selective collection of aptamers which bind to the antibody epitope. In an embodiment, the method comprises incubating a reaction mixture comprising randomly generated oligonucleotides with a target of interest, removing unbound aptamers from the reaction mixture that do not bind the target, adding an antibody to the reaction mixture that binds to that epitope of interest, and collecting the aptamers that are displaced by the antibody. The target can be a protein. See, e.g., FIG. 1, which illustrates the method for identifying an aptamer to a specific epitope of EpCam.

### Motif Analysis

[0388] In most aptamer experiments, multiple aptamer sequences are identified that bind to the target. These aptamers will have various binding affinities. It can be time consuming and laborious to generate quantities of these many aptamers sufficient to assess the affinities of each. To identify large numbers of aptamers with the highest affinities without physically screening large subsets, the invention provides a method comprising the analysis of the two dimensional structure of one or more high affinity aptamers to the target of interest. In an embodiment, the method comprises screening the database for aptamers that have similar two-dimensional structures, or motifs, but not necessarily similar primary sequences. In an embodiment, the method comprises identifying a high affinity aptamer using traditional methods such as disclosed herein or known in the art (e.g. surface plasmon resonance binding assay, see FIG. 5), approximating the two-dimensional structure of the high affinity aptamer, and identifying aptamers from a pool of sequences that are predicted to have a similar two-dimensional structure to the high affinity aptamer. The method thereby provides a pool of candidates that also bind the target of interest. The two-dimensional structure of an oligo can be predicting using methods known in the art, e.g., via free energy (ΔG) calculations performed using a commercially available software program such as Vienna or mFold, for example as described in Mathews, D., Sabina, J., Zucker, M. & Turner, H. Expanded sequence dependence of thermodynamic parameters provides robust prediction of RNA secondary structure. J. Mol. Biol. 288, 911-940 (1999); Hofacker et al., Monatshefte f. Chemie 125: 167-188 (1994); and Hofacker, I. L. Vienna RNA secondary structure server. Nucleic Acids Res. 31, 3429-3431 (2003), the contents of which are incorporated herein by reference in their entirety. See FIG. 3. The pool of sequences can be sequenced from a pool of randomly generated aptamer candidates using a high-throughput sequencing platform, such as the Ion Torrent platform from Life Technologies. Identifying aptamers from a pool of sequences that are predicted to have a similar two-dimensional structure to the high affinity aptamer may comprise loading the resulting sequences into the software program of choice to identify members of the pool of sequences with similar two-dimensional structures as the high affinity aptamer. The affinities of the pool of sequences can then be determined in situ, e.g., surface plasmon resonance binding assay or the like.

### Aptamer Subtraction Methods

[0389] In order to develop an assay to detect a disease, for example, cancer, one typically screens a large population of known biomarkers from normal and diseased patients in order to identify markers that correlate with disease. This process only works if discriminating markers are already described. In order to address this problem, the invention provides a method comprising subtracting out non-discriminating aptamers from a large pool of aptamers by incubating them initially with non-target microvesicles or cells. The non-target cells can be normal cells or microvesicles shed therefrom. The aptamers that did not bind to the normal microvesicles or cells are then incubated with diseased microvesicles or cells. The aptamers that bind to the diseased microvesicles or cells but that did not bind to the normal cells are then possible candidates for an assay to detect the disease. This process is independent of knowing the existence of a particular marker in the diseased sample.

[0390] Subtraction methods can be used to identify aptamers that preferentially recognize a desired population of targets. In an embodiment, the subtraction method is used to identify aptamers that preferentially recognize target from a diseased target population over a control (e.g., normal or non-diseased) population. The diseased target population may be a population of vesicles from a diseased individual or individuals, whereas the control population comprises vesicles from a non-diseased individual or individuals. The disease can be a cancer or other disease disclosed herein or known in the art. Accordingly, the method provides aptamers that preferentially identify disease targets versus control targets.

[0391] Circulating microvesicles can be isolated from control samples, e.g., plasma from “normal” individuals that are absent a disease of interest, such as an absence of cancer. Vesicles in the sample are isolated using a method disclosed herein or as known in the art. For example, vesicles can be isolated from the plasma by one of the following methods: filtration, ultrafiltration, nanomembrane ultrafiltration, the ExoQuick reagent (System Biosciences, Inc., Mountain View, Calif.), centrifugation, ultracentrifugation, using a molecular crowding reagent (e.g., TEXIS from Life Technologies), polymer precipitation (e.g., polyethylene glycol (PEG)), affinity isolation, affinity selection, immunoprecipitation, chromatography, size exclusion, or a combination of any of these methods. The microvesicles isolated in each case will be a mixture of vesicle types and will be various sizes although ultracentrifugation methods may have more tendency to produce exosomal-sized vesicles. Randomly generated oligonucleotide libraries (e.g., produced as described in the Examples herein) are incubated with the isolated normal vesicles. The aptamers that do not bind to these vesicles are isolated, e.g., by spinning down the vesicles and collecting the supernatant containing the non-binding aptamers. These non-binding aptamers are then contacted with vesicles isolated from diseased patients (e.g., using the same methods as described above) to allow the aptamers to recognize the disease vesicles. Next, aptamers that are bound to the diseased vesicles are collected. In an embodiment, the vesicles are isolated then lysed using a chaotropic agent (e.g., SDS or a similar detergent), and the aptamers are then captured by running the lysis mixture over an affinity column. The affinity column may comprise streptavidin beads in the case of biotin conjugated aptamer pools. The isolated aptamers are the amplified. The process can then repeated, e.g., 1, 2, 3, 4, 5, 6, 7, 8, 9, 10, 11, 12, 13, 14, 15, 16, 17, 18, 19 or 20 or more times.

[0392] In one aspect of the invention, an aptamer profile is identified that can be used to characterize a biological sample of interest. In an embodiment, a pool of randomly generated oligonucleotides, e.g., at least 10, 10², 10³, 10⁴, 10⁵, 10⁶, 10⁷, 10⁸, 10⁹, 10¹⁰, 10¹¹, 10¹², 10¹³, 10¹⁴, 10¹⁵, 10¹⁶, 10¹⁷, 10¹⁸, 10¹⁹ or at least 10²⁰ oligonucleotides, is contacted with a biological component or target of interest from a control population. The oligonucleotides that do not bind the biological component or target of interest from the control population are isolated and then contacted with a biological component or target of interest from a test population. The oligonucleotides that bind the biological component or target of interest from the test population are retained. The retained oligonucleotides can be used to repeat the process by contacting the retained oligonucleotides with the biological component or target of interest from the control population, isolating the retained oligonucleotides that do not bind the biological component or target of interest from the control population, and again contacting these isolated oligonucleotides with the biological component or target of interest from the test population and isolating the binding oligonucleotides. The “component” or “target” can be anything that is present in sample to which the oligonucleotides are capable of binding (e.g., polypeptides, peptide, nucleic acid molecules, carbodyhrates, lipids, etc.). The process can then repeated, e.g., 1, 2, 3, 4, 5, 6, 7, 8, 9, 10, 11, 12, 13, 14, 15, 16, 17, 18, 19 or 20 or more times. The resulting oligonucleotides comprise aptamers that can differentially detect the test population versus the control. These aptamers provide an aptamer profile, which comprises a biosignature that is determined using one or more aptamer, e.g., a biosignature comprising a presence or level of the component or target which is detected using the one or more aptamer.

[0393] An exemplary process is illustrated in FIG. 4, which demonstrates the method to identify aptamer that preferentially recognize cancer vesicles using vesicles from normal (non-cancer) individuals as a control. In the figure, exosomes are exemplified but one of skill will appreciate that other microvesicles can be used in the same manner. The resulting aptamers can provide a profile that can differentially detect the cancer vesicles from the normal vesicles. One of skill will appreciate that the same steps can be used to derive an aptamer profile to characterize any disease or condition of interest.

[0394] In an embodiment, the invention provides an isolated polynucleotide that encodes a polypeptide, or a fragment thereof, identified by the methods above. The invention further provides an isolated polynucleotide having a nucleotide sequence that is at least 60% identical to the nucleotide sequence identified by the methods above. More preferably, the isolated nucleic acid molecule is at least 65%, 70%, 75%, 80%, 85%, 90%, 91%, 92%, 93%, 94%, 95%, 96%, 97%, 98%, 99% or more, identical to the nucleotide sequence identified by the methods above. In the case of an isolated polynucleotide which is longer than or equivalent in length to the reference sequence, e.g., a sequence identified by the methods above, the comparison is made with the full length of the reference sequence. Where the isolated polynucleotide is shorter than the reference sequence, e.g., shorter than a sequence identified by the methods above, the comparison is made to a segment of the reference sequence of the same length (excluding any loop required by the homology calculation).

[0395] In a related aspect, the invention provides a method of characterizing a biological phenotype using an aptamer profile. The aptamer profile can be determined using the method above. The aptamer profile can be determined for a test sample and compared to a control aptamer profile. The phenotype may be a disease or disorder such as a cancer. Characterizing the phenotype can include without limitation providing a diagnosis, prognosis, or theranosis. Thus, the aptamer profile can provide a diagnostic, prognostic and/or theranostic readout for the subject from whom the test sample is obtained.

[0396] In another embodiment, an aptamer profile is determined for a test sample by contacting a pool of aptamer molecules to the test sample, contacting the same pool of aptamers to a control sample, and identifying one or more aptamer molecules that differentially bind a component or target in the test sample but not in the control sample (or vice versa). A “component” or “target” as used in the context of the biological test sample or control sample can be anything that is present in sample to which the aptamers are capable of binding (e.g., polypeptides, peptide, nucleic acid molecules, carbodyhrates, lipids, etc.). For example, if a sample is a plasma or serum sample, the aptamer molecules may bind a polypeptide biomarker that is solely expressed or differentially expressed (over- or underexpressed) in a disease state as compared to a non-diseased subject. Comparison of the aptamer profile in the test sample as compared to the control sample may be based on qualitative and quantitative measure of aptamer binding (e.g., binding versus no binding, or level of binding in test sample versus different level of binding in the reference control sample).

[0397] In an aspect, the invention provides a method of identifying a target-specific aptamer profile, comprising contacting a biological test sample with a pool of aptamer molecules, contacting the pool to a control biological sample, identifying one or more aptamers that bind to a component in said test sample but not to the control sample, thereby identifying an aptamer profile for said biological test sample. In an embodiment, a pool of aptamers is selected against a disease sample and compared to a reference sample, the aptamers in a subset that bind to a component(s) in the disease sample but not in the reference sample can be sequenced using conventional sequencing techniques to identify the subset that bind, thereby identifying an aptamer profile for the particular disease sample. In this way, the aptamer profile provides an individualized platform for detecting disease in other samples that are screened. Furthermore, by selecting an appropriate reference or control sample, the aptamer profile can provide a diagnostic, prognostic and/or theranostic readout for the subject from whom the test sample is obtained.

[0398] In a related aspect, the invention provides a method of selecting a pool of aptamers, comprising: (a) contacting a biological control sample with a pool of oligonucleotides; (b) isolating a first subset of the pool of oligonucleotides that do not bind the biological control sample; (c) contacting the biological test sample with the first subset of the pool of oligonucleotides; and (d) isolating a second subset of the pool of oligonucleotides that bind the biological test sample, thereby selecting the pool of aptamers. The pool of oligonucleotides may comprise any number of desired sequences, e.g., at least 10, 10², 10³, 10⁴, 10⁵, 10⁶, 10⁷, 10⁸, 10⁹, 10¹⁰, 10¹¹, 10¹², 10¹³, 10¹⁴, 10¹⁵, 10¹⁶, 10¹⁷, 10¹⁸, 10¹⁹ or at least 10²⁰ oligonucleotides may be present in the starting pool. Steps (a)-(d) may be repeated to further hone the pool of aptamers. In an embodiment, these steps are repeated at least 1, 2, 3, 4, 5, 6, 7, 8, 9, 10, 11, 12, 13, 14, 15, 16, 17, 18, 19 or at least 20 times.

[0399] As described herein, the biological test sample and biological control sample may comprise microvesicles. In an embodiment, the biological test sample and optionally biological control sample comprise a bodily fluid. The bodily fluid may comprise without limitation peripheral blood, sera, plasma, ascites, urine, cerebrospinal fluid (CSF), sputum, saliva, bone marrow, synovial fluid, aqueous humor, amniotic fluid, cerumen, breast milk, broncheoalveolar lavage fluid, semen, prostatic fluid, Cowper's fluid, pre-ejaculatory fluid, female ejaculate, sweat, fecal matter, hair, tears, cyst fluid, pleural fluid, peritoneal fluid, malignant fluid, pericardial fluid, lymph, chyme, chyle, bile, interstitial fluid, menses, pus, sebum, vomit, vaginal secretions, mucosal secretion, stool water, pancreatic juice, lavage fluids from sinus cavities, bronchopulmonary aspirates or other lavage fluids. The biological test sample and optionally biological control may also comprise a tumor sample, e.g., cells from a tumor or tumor tissue. In other embodiments, the biological test sample and optionally biological control sample comprise a cell culture medium. In embodiments, the biological test sample comprises a diseased sample and the biological control sample comprises a non-diseased sample. Accordingly, the pool of aptamers may be used to provide a diagnostic, prognostic and/or theranostic readout a disease.

[0400] As noted, the invention can be used to assess microvesicles. Microvesicles are powerful biomarkers because the vesicles provide one biological entity that comprises multiple pieces of information. For example as described, a vesicle can have multiple surface antigens, each of which provides complementary information. Consider a cancer marker and a tissue specific marker. If both markers are individually present in a sample, e.g., both are circulating proteins or nucleic acids, it may not be ascertainable whether the cancer marker and the tissue specific marker are derived from the same anatomical locale. However, if both the cancer marker and the tissue specific marker are surface antigens on a single microvesicle, the vesicle itself links the two markers and provides an indication of a disease (via the cancer marker) and origin of the disease (via the tissue specific marker). Furthermore, the vesicle can have any number of surface antigens and also payload that can be assessed. Accordingly, the invention provides a method for identifying binding agents comprising contacting a plurality of extracellular microvesicles with a randomly generated library of binding agents, identifying a subset of the library of binding agents that have an affinity to one or more components of the extracellular microvesicles. The binding agents may comprise aptamers, antibodies, and/or any other useful type of binding agent disclosed herein or known in the art.

[0401] In a related aspect, the invention provides a method for identifying a plurality of target ligands comprising, (a) contacting a reference microvesicle population with a plurality of ligands that are capable of binding one or more microvesicle surface markers, (b) isolating a plurality of reference ligands, wherein the plurality of reference ligands comprise a subset of the plurality of ligands that do not have an affinity for the reference microvesicle population; (c) contacting one or more test microvesicle with the plurality of reference ligands; and (d) identifying a subset of ligands from the plurality of reference ligands that form complexes with a surface marker on the one or more test microvesicle, thereby identifying the plurality of target ligands. The term “ligand” can refer a molecule, or a molecular group, that binds to another chemical entity to form a larger complex. Accordingly, a binding agent comprises a ligand. The plurality of ligands may comprise aptamers, antibodies and/or other useful binding agents described herein or known in the art.

[0402] The invention further provides kits comprising one or more reagent to carry out the methods above. In an embodiment, the one or more reagent comprises a library of potential binding agents that comprises one or more of an aptamer, antibody, and other useful binding agents described herein or known in the art.

[0403] Negative and Positive Aptamer Selection

[0404] Aptamers can be used in various biological assays, including numerous types of assays which rely on a binding agent. For example, aptamers can be used instead of or along side antibodies in immune-based assays. The invention provides an aptamer screening method that identifies aptamers that do not bind to any surfaces (substrates, tubes, filters, beads, other antigens, etc.) throughout the assay steps and bind specifically to an antigen of interest. The assay relies on negative selection to remove aptamers that bind non-target antigen components of the final assay. The negative selection is followed by positive selection to identify aptamers that bind the desired antigen.

[0405] In an aspect, the invention provides a method of identifying an aptamer specific to a target of interest, comprising (a) contacting a pool of candidate aptamers with one or more assay components, wherein the assay components do not comprise the target of interest; (b) recovering the members of the pool of candidate aptamers that do not bind to the one or more assay components in (a); (c) contacting the members of the pool of candidate aptamers recovered in (b) with the target of interest in the presence of one or more confounding target; and (d) recovering a candidate aptamer that binds to the target of interest in step (c), thereby identifying the aptamer specific to the target of interest. In the method, steps (a) and (b) provide negative selection to remove aptamers that bind non-target entities. Conversely, steps (c) and (d) provide positive selection by identifying aptamers that bind the target of interest but not other confounding targets, e.g., other antigens that may be present in a biological sample which comprises the target of interest. The pool of candidate aptamers may comprise at least 10, 10², 10³, 10⁴, 10⁵, 10⁶, 10⁷, 10⁸, 10⁹, 10¹⁰, 10¹¹, 10¹², 10¹³, 10¹⁴, 10¹⁵, 10¹⁶, 10¹⁷, 10¹⁸, 10¹⁹ or at least 10²⁰ nucleic acid sequences. One illustrative approach for performing the method is provided in Example 7.

[0406] In some embodiments, steps (a)-(b) are optional. In other embodiments, steps (a)-(b) are repeated at least 1, 2, 3, 4, 5, 6, 7, 8, 9, 10, 11, 12, 13, 14, 15, 16, 17, 18, 19 or at least 20 times before positive selection in step (c) is performed. The positive selection can also be performed in multiple rounds. Steps (c)-(d) can be repeated at least 1, 2, 3, 4, 5, 6, 7, 8, 9, 10, 11, 12, 13, 14, 15, 16, 17, 18, 19 or at least 20 times before identifying the aptamer specific to the target of interest. Multiple rounds may provide improved stringency of selection.

[0407] In some embodiments, the one or more assay components contacted with the aptamer pool during negative selection comprise one or more of a substrate, a bead, a planar array, a column, a tube, a well, or a filter. One of skill will appreciate that the assay components can include any substance that may be part of a biological assay.

[0408] The target of interest can be any appropriate entity that can be detected when recognized by an aptamer. In an embodiment, the target of interest comprises a protein or polypeptide. As used herein, “protein,” “polypeptide” and “peptide” are used interchangeably unless stated otherwise. The target of interest can be a nucleic acid, including DNA, RNA, and various subspecies of any thereof as disclosed herein or known in the art. The target of interest can comprise a lipid. The target of interest can comprise a carbohydrate. The target of interest can also be a complex, e.g., a complex comprising protein, nucleic acids, lipids and/or carbohydrates. In some embodiments, the target of interest comprises a microvesicle. In such cases, the aptamer can be a binding agent to a microvesicle surface antigen, e.g., a protein. General microvesicle surface antigens include tetraspanin, CD9, CD63, CD81, CD63, CD9, CD81, CD82, CD37, CD53, Rab-5b, Annexin V, and MFG-E8. Additional general microvesicle surface antigens are provided in Table 3 herein.

[0409] The microvesicle surface antigen can also be a biomarker of a disease or disorder. In such cases, the aptamer may be used to provide a diagnosis, prognosis or theranosis of the disease or disorder. For example, the one or more protein may comprise one or more of PSMA, PCSA, B7H3, EpCam, ADAM-10, BCNP, EGFR, IL1B, KLK2, MMP7, p53, PBP, SERPINB3, SPDEF, SSX2, and SSX4. These markers can be used detect a prostate cancer. Additional microvesicle surface antigens are provided in Tables 3-4 herein.

[0410] The one or more confounding target can be an antigen other than the target of interest. For example, a confounding target can be another entity that may be present in a sample to be assayed. As a non-limiting example, consider that the sample to be assessed is a plasma sample from an individual. The target of interest may be a protein, e.g., a microvesicle surface antigen, which is present in the sample. In this case, a confounding target could be selected from any other antigen that is likely to be present in the plasma sample. Accordingly, the positive selection should provide candidate aptamers that recognize the target of interest but have minimal, if any, interactions with the confounding targets. In some embodiments, the target of interest and the one or more confounding target comprise the same type of biological entity, e.g., all protein, all nucleic acid, all carbohydrate, or all lipids. As a non-limiting example, the target of interest can be a protein selected from the group consisting of SSX4, SSX2, PBP, KLK2, SPDEF, and EpCAM, and the one or more confounding target comprises the other members of this group. In other embodiments, the target of interest and the one or more confounding target comprise different types of biological entities, e.g., any combination of protein, nucleic acid, carbohydrate, and lipids. The one or more confounding targets may also comprise different types of biological entities, e.g., any combination of protein, nucleic acid, carbohydrate, and lipids.

[0411] In an embodiment, the invention provides an isolated polynucleotide, or a fragment thereof, identified by the methods above. The invention further provides an isolated polynucleotide having a nucleotide sequence that is at least 60% identical to the nucleotide sequence identified by the methods above. More preferably, the isolated nucleic acid molecule is at least 65%, 70%, 75%, 80%, 85%, 90%, 91%, 92%, 93%, 94%, 95%, 96%, 97%, 98%, 99% or more, identical to the nucleotide sequence identified by the methods above. In the case of an isolated polynucleotide which is longer than or equivalent in length to the reference sequence, e.g., a sequence identified by the methods above, the comparison is made with the full length of the reference sequence. Where the isolated polynucleotide is shorter than the reference sequence, e.g., shorter than a sequence identified by the methods above, the comparison is made to a segment of the reference sequence of the same length (excluding any loop required by the homology calculation).

[0412] In a related aspect, the invention provides a method of selecting a group of aptamers, comprising: (a) contacting a pool of aptamers to a population of microvesicles from a first sample; (b) enriching a subpool of aptamers that show affinity to the population of microvesicles from the first sample; (c) contacting the subpool to a second population of microvesicles from a second sample; and (d) depleting a second subpool of aptamers that show affinity to the second population of microvesicles from the second sample, thereby selecting the group of aptamers that have preferential affinity for the population of microvesicles from the first sample.

[0413] The first sample and/or second sample may comprise a biological fluid such as disclosed herein. For example, the biological fluid may include without limitation blood, a blood derivative, plasma, serum or urine. The first sample and/or second sample may also be derived from a cell culture.

[0414] In an embodiment, the first sample comprises a cancer sample and the second sample comprises a control sample, such as a non-cancer sample. The first sample and/or and the second sample may each comprise a pooled sample. For example, the first sample and/or second sample can comprise bodily fluid from 2, 3, 4, 5, 6, 7, 8, 9, 10, 11, 12, 13, 14, 15, 16, 17, 18, 19, 20, 25, 30, 40, 50, 60, 70, 80, 90, 100 or more than 100 individuals. In such cases, the members of a pool may be chosen to represent a desired phenotype. In a non-limiting example, the members of the first sample pool may be from patients with a cancer and the members of the second sample pool may be from non-cancer controls.

[0415] Steps (a)-(d) can be repeated a desired number of times in order to further enrich the pool in aptamers that have preferential affinity for the population of microvesicles from the first sample. For example, steps (a)-(d) can be repeated 1, 2, 3, 4, 5, 6, 7, 8, 9, 10, 11, 12, 13, 14, 15, 16, 17, 18, 19, 20 or more than 20 times. The output from step (d) can be used as the input to repeated step (a). In embodiment, the first sample and/or second sample are replaced with a different sample before repeating steps (a)-(d). In a non-limiting example, members of a first sample pool may be from patients with a cancer and members of a second sample pool may be from non-cancer controls. During subsequent repetitions of steps (a)-(d), the first sample pool may comprise samples from different cancer patients than in the prior round/s. Similarly, the second sample pool may comprise samples from different controls than in the prior round/s.

[0416] The method may further comprise identifying the members of the selected group of aptamers, e.g., by DNA sequencing. The sequencing may be performed by Next Generation sequencing as desired.

[0417] The method may also comprise identifying the targets of the selected group of aptamers. Methods to identify aptamer targets are disclosed herein.

[0418] Aptamer Target Identification

[0419] The methods and kits above can be used to identify binding agents that differentiate between two biomarker populations. The invention further provides methods of identifying the targets of the binding agents, as described in this section. For example, the methods may further comprise identifying a surface marker of a target microvesicle that is recognized by the binding agent.

[0420] In an embodiment, the invention provides a method of identifying a target of a binding agent comprising: (a) contacting the binding agent with the target to bind the target with the binding agent, wherein the target comprises a surface antigen of a microvesicle; (b) disrupting the microvesicle under conditions which do not disrupt the binding of the target with the binding agent; (c) isolating the complex between the target and the binding agent; and (d) identifying the target bound by the binding agent. The binding agent can be a binding agent identified by the methods above, e.g., an aptamer, ligand, antibody, or other useful binding agent that can differentiate between two populations of biomarkers.

[0421] An illustrative schematic for carrying on the method is shown in FIG. 9. The figure shows a binding agent 902, here an aptamer for purposes of illustration, tethered to a substrate 901. The binding agent 902 can be covalently attached to substrate 901. The binding agent 902 may also be non-covalently attached. For example, binding agent 902 can comprise a label which can be attracted to the substrate, such as a biotin group which can form a complex with an avidin/streptavidin molecule that is covalently attached to the substrate. This can allow a complex to be formed between the aptamer and the microvesicle while in solution, followed by capture of the aptamer using the biotin label. The binding agent 902 binds to a surface antigen 903 of microvesicle 904. In the step signified by arrow (i), the microvesicle is disrupted while leaving the complex between the binding agent 902 and surface antigen 903 intact. Disrupted microvesicle 905 is removed, e.g., via washing or buffer exchange, in the step signified by arrow (ii). In the step signified by arrow (iii), the surface antigen 903 is released from the binding agent 902. The surface antigen 903 can be analyzed to determine its identity using methods disclosed herein and/or known in the art. The target of the method can be any useful biological entity associated with a microvesicle. For example, the target may comprise a protein, nucleic acid, lipid or carbohydrate, or other biological entity disclosed herein or known in the art.

[0422] In some embodiments of the method, the target is cross-linked to the binding agent prior disrupting the microvesicle. Without being bound by theory, this step may assist in maintaining the complex between the binding agent and the target while the vesicle is disrupted. Any useful method of crosslinking disclosed herein or known in the art can be used. In embodiments, the cross-linking comprises photocrosslinking, an imidoester crosslinker, dimethyl suberimidate, an N-Hydroxysuccinimide-ester crosslinker, bissulfosuccinimidyl suberate (BS3), an aldehyde, acrolein, crotonaldehyde, formaldehyde, a carbodiimide crosslinker, N,N′-dicyclohexylcarbodiimide (DDC), N,N′-diisopropylcarbodiimide (DIC), 1-Ethyl-3-[3-dimethylaminopropyl]carbodiimide hydrochloride (EDC or EDAC), Succinimidyl-4-(N-maleimidomethyl)cyclohexane-1-carboxylate (SMCC), a Sulfosuccinimidyl-4-(N-maleimidomethyl)cyclohexane-1-carboxylate (Sulfo-SMCC), a Sulfo-N-hydroxysuccinimidyl-2-(6-[biotinamido]-2-(p-azido benzamido)-hexanoamido) ethyl-1,3′-dithioproprionate (Sulfo-SBED), 2-[N2-(4-Azido-2,3,5,6-tetrafluorobenzoyl)-N6-(6-biotin-amidocaproyl)-L-lysinyl]ethyl methanethiosulfonate (Mts-Atf-Biotin; available from Thermo Fisher Scientific Inc, Rockford Ill.), 2-{N2-[N6-(4-Azido-2,3,5,6-tetrafluorobenzoyl-6-amino-caproyl)-N6-(6-biotinamidocaproyl)-L-lysinylamido]}ethyl methanethiosultonate (Mts-Atf-LC-Biotin; available from Thermo Fisher Scientific Inc), a photoreactive amino acid (e.g., L-Photo-Leucine and L-Photo-Methionine, see, e.g., Suchanek, M., et al. (2005). Photo-leucine and photo-methionine allow identification of protein-protein interactions. Nat. Methods 2:261-267), an N-Hydroxysuccinimide (NHS) crosslinker, an NHS-Azide reagent (e.g., NHS-Azide, NHS-PEG4-Azide, NHS-PEG12-Azide; each available from Thermo Fisher Scientific, Inc.), an NHS-Phosphine reagent (e.g., NHS-Phosphine, Sulfo-NHS-Phosphine; each available from Thermo Fisher Scientific, Inc.), or any combination or modification thereof.

[0423] A variety of methods can be used to disrupt the microvesicle. For example, the vesicle membrane can be disrupted using mechanical forces, chemical agents, or a combination thereof. In embodiments, disrupting the microvesicle comprises use of one or more of a detergent, a surfactant, a solvent, an enzyme, or any useful combination thereof. The enzyme may comprise one or more of lysozyme, lysostaphin, zymolase, cellulase, mutanolysin, a glycanase, a protease, and mannase. The detergent or surfactant may comprise one or more of a octylthioglucoside (OTG), octyl beta-glucoside (OG), a nonionic detergent, Triton X, Tween 20, a fatty alcohol, a cetyl alcohol, a stearyl alcohol, cetostearyl alcohol, an oleyl alcohol, a polyoxyethylene glycol alkyl ether (Brij), octaethylene glycol monododecyl ether, pentaethylene glycol monododecyl ether, a polyoxypropylene glycol alkyl ether, a glucoside alkyl ether, decyl glucoside, lauryl glucoside, octyl glucoside, a polyoxyethylene glycol octylphenol ethers, a polyoxyethylene glycol alkylphenol ether, nonoxynol-9, a glycerol alkyl ester, glyceryl laurate, a polyoxyethylene glycol sorbitan alkyl esters, polysorbate, a sorbitan alkyl ester, cocamide MEA, cocamide DEA, dodecyldimethylamine oxide, a block copolymers of polyethylene glycol and polypropylene glycol, poloxamers, polyethoxylated tallow amine (POEA), a zwitterionic detergent, 3-[(3-cholamidopropyl)dimethylammonio]-1-propanesulfonate (CHAPS), a linear alkylbenzene sulfonate (LAS), a alkyl phenol ethoxylate (APE), cocamidopropyl hydroxysultaine, a betaine, cocamidopropyl betaine, lecithin, an ionic detergent, sodium dodecyl sulfate (SDS), cetrimonium bromide (CTAB), cetyl trimethylammonium chloride (CTAC), octenidine dihydrochloride, cetylpyridinium chloride (CPC), benzalkonium chloride (BAC), benzethonium chloride (BZT), 5-Bromo-5-nitro-1,3-dioxane, dimethyldioctadecylammonium chloride, dioctadecyldimethylammonium bromide (DODAB), sodium deoxycholate, nonyl phenoxypolyethoxylethanol (Tergitol-type NP-40; NP-40), ammonium lauryl sulfate, sodium laureth sulfate (sodium lauryl ether sulfate (SLES)), sodium myreth sulfate, an alkyl carboxylate, sodium stearate, sodium lauroyl sarcosinate, a carboxylate-based fluorosurfactant, perfluorononanoate, perfluorooctanoate (PFOA or PFO), and a biosurfactant. Mechanical methods of disruption that can be used comprise without limitation mechanical shear, bead milling, homogenation, microfluidization, sonication, French Press, impingement, a colloid mill, decompression, osmotic shock, thermolysis, freeze-thaw, desiccation, or any combination thereof.

[0424] As shown in FIG. 9, the binding agent may be tethered to a substrate. The binding agent can be tethered before or after the complex between the binding agent and target is formed. The substrate can be any useful substrate such as disclosed herein or known in the art. In an embodiment, the substrate comprises a microsphere. In another embodiment, the substrate comprises a planar substrate. The binding agent can also be labeled. Isolating the complex between the target and the binding agent may comprise capturing the binding agent via the label. For example, the label can be a biotin label. In such cases, the binding agent can be attached to the substrate via a biotin-avidin binding event.

[0425] Methods of identifying the target after release from the binding agent will depend on the type of target of interest. For example, when the target comprises a protein, identifying the target may comprise use of mass spectrometry (MS), peptide mass fingerprinting (PMF; protein fingerprinting), sequencing, N-terminal amino acid analysis, C-terminal amino acid analysis, Edman degradation, chromatography, electrophoresis, two-dimensional gel electrophoresis (2D gel), antibody array, and immunoassay. Nucleic acids can be identified by sequencing.

[0426] One of skill will appreciate that the method can be used to identify any appropriate target, including those not associated with a vesicle. For example, with respect to the FIG. 9, all steps except for the step signified by arrow (i) (i.e., disrupting the microvesicle), could be performed for a circulating target such as a protein, nucleic acid, lipid, carbohydrate, or combination thereof.

[0427] Sample Characterization

[0428] The aptamers of the invention can be used to characterize a biological sample. For example, an aptamer can be used to bind a biomarker in the sample. The presence or level of the bound biomarker can indicate a characteristic of the example, such as a diagnosis, prognosis or theranosis of a disease or disorder associated with the sample.

[0429] In an aspect, the invention provides an aptamer comprising a nucleic acid sequence that is at least about 50, 55, 60, 65, 70, 75, 80, 85, 90, 95, 96, 97, 98, 99 or 100 percent homologous of any of: a) SEQ ID NOs. 8-21 or a variable sequence thereof as described in Table 8; b) SEQ ID NOs. 24-43 or a variable sequence thereof as described in Table 11; c) SEQ ID NOs. 44-10527; d) SEQ ID NOs. 10528-10557 or a variable sequence thereof as described in Table 12; or e) a functional fragment of any preceding sequence. In a related aspect, the invention provides a method of characterizing a disease or disorder, comprising: (a) contacting a biological test sample with one or more aptamer of the invention, e.g., any of those in this paragraph or modifications thereof; (b) detecting a presence or level of a complex between the one or more aptamer and the target bound by the one or more aptamer in the biological test sample formed in step (a); (c) contacting a biological control sample with the one or more aptamer; (d) detecting a presence or level of a complex between the one or more aptamer and the target bound by the one or more aptamer in the biological control sample formed in step (c); and (e) comparing the presence or level detected in steps (b) and (d), thereby characterizing the disease or disorder.

[0430] The biological test sample and biological control sample can each comprise a tissue sample, a cell culture, or a biological fluid. In some embodiments, the biological test sample and biological control sample comprise the same sample type, e.g., both are tissue samples or both are fluid samples. In other embodiments, different sample types may be used for the test and control samples. For example, the control sample may comprise an engineered or otherwise artificial sample.

[0431] The biological fluid may comprise a bodily fluid. The bodily fluid may include without limitation one or more of peripheral blood, sera, plasma, ascites, urine, cerebrospinal fluid (CSF), sputum, saliva, bone marrow, synovial fluid, aqueous humor, amniotic fluid, cerumen, breast milk, broncheoalveolar lavage fluid, semen, prostatic fluid, cowper's fluid or pre-ejaculatory fluid, female ejaculate, sweat, fecal matter, hair, tears, cyst fluid, pleural and peritoneal fluid, pericardial fluid, lymph, chyme, chyle, bile, interstitial fluid, menses, pus, sebum, vomit, vaginal secretions, mucosal secretion, stool water, pancreatic juice, lavage fluids from sinus cavities, bronchopulmonary aspirates, blastocyl cavity fluid, or umbilical cord blood. In some embodiments, the bodily fluid comprises blood, serum or plasma.

[0432] The biological fluid may comprise microvesicles. For example, the biological fluid can be a tissue, cell culture, or bodily fluid which comprises microvesicles released from cells in the sample. The microvesicles can be circulating microvesicles.

[0433] The one or more aptamer can bind a target biomarker, e.g., a biomarker useful in characterizing the sample. The biomarker may comprise a polypeptide or fragment thereof, or other useful biomarker described herein or known in the art (lipid, carbohydrate, complex, nucleic acid, etc). In embodiments, the polypeptide or fragment thereof is soluble or membrane bound. Membrane bound polypeptides may comprise a cellular surface antigen or a microvesicle surface antigen. The biomarker can be a biomarker selected from Table 3 or Table 4.

[0434] The characterizing can comprises a diagnosis, prognosis or theranosis of the disease or disorder. Various diseases and disorders can be characterized using the compositions and methods of the invention, including without limitation a cancer, a premalignant condition, an inflammatory disease, an immune disease, an autoimmune disease or disorder, a cardiovascular disease or disorder, a neurological disease or disorder, an infectious disease, and/or pain. See, e.g., section herein “Phenotypes” for further details. In embodiments, the disease or disorder comprises a proliferative or neoplastic disease or disorder. For example, the disease or disorder can be a cancer. In some embodiments, the cancer comprises a breast cancer, ovarian cancer, prostate cancer, lung cancer, colorectal cancer, melanoma, or brain cancer.

[0435] FIG. 16A is a schematic 1600 showing an assay configuration that can be used to detect and/or quantify a target of interest using one or more aptamer of the invention. Capture aptamer 1602 is attached to substrate 1601. The substrate can be a planar substrate, well, microbead, or other useful substrate as disclosed herein or known in the art. Target of interest 1603 is bound by capture aptamer 1602. The target of interest can be any appropriate entity that can be detected when recognized by an aptamer or other binding agent. The target of interest may comprise a protein or polypeptide, a nucleic acid, including DNA, RNA, and various subspecies thereof, a lipid, a carbohydrate, a complex, e.g., a complex comprising protein, nucleic acids, lipids and/or carbohydrates. In some embodiments, the target of interest comprises a microvesicle. The target of interest can be a microvesicle surface antigen. The target of interest may be a biomarker, including a vesicle associated biomarker, in Tables 3 or 4. The microvesicle input can be isolated from a sample using various techniques as described herein, e.g., chromatography, filtration, centrifugation, flow cytometry, affinity capture (e.g., to a planar surface, column or bead), and/or using microfluidics. Detection aptamer 1604 is also bound to target of interest 1603. Detection aptamer 1604 carries label 1605 which can be detected to identify target captured to substrate 1601 via capture aptamer 1602. The label can be a fluorescent, radiolabel, enzyme, or other detectable label as disclosed herein. Either capture aptamer 1602 or detection aptamer 1604 can be substituted with another binding agent, e.g., an antibody. For example, the target may be captured with an antibody and detected with an aptamer, or vice versa. When the target of interest comprises a complex, the capture and detection agents (aptamer, antibody, etc) can recognize the same or different targets. For example, when the target is a microvesicle, the capture agent may recognize one microvesicle surface antigen while the detection agent recognizes another microvesicle surface antigen. Alternately, the capture and detection agents can recognize the same surface antigen.

[0436] The aptamers of the invention may be identified and/or used for various purposes in the form of DNA or RNA. Unless otherwise specified, one of skill in the art will appreciate that an aptamer may generally be synthesized in various forms of nucleic acid. The aptamers may also carry various chemical modifications and remain within the scope of the invention.

[0437] In some embodiments, an aptamer of the invention is modified to comprise at least one chemical modification. The modification may include without limitation a chemical substitution at a sugar position; a chemical substitution at a phosphate position; and a chemical substitution at a base position of the nucleic acid. In some embodiments, the modification is selected from the group consisting of: biotinylation, incorporation of a fluorescent label, incorporation of a modified nucleotide, a 2′-modified pyrimidine, 3′ capping, conjugation to an amine linker, conjugation to a high molecular weight, non-immunogenic compound, conjugation to a lipophilic compound, conjugation to a drug, conjugation to a cytotoxic moiety, and labeling with a radioisotope, or other modification as disclosed herein. The position of the modification can be varied as desired. For example, the biotinylation, fluorescent label, or cytotoxic moiety can be conjugated to the 5′ end of the aptamer. The biotinylation, fluorescent label, or cytotoxic moiety can also be conjugated to the 3′ end of the aptamer.

[0438] In some embodiments, the cytotoxic moiety is encapsulated in a nanoparticle. The nanoparticle can be selected from the group consisting of: liposomes, dendrimers, and comb polymers. In other embodiments, the cytotoxic moiety comprises a small molecule cytotoxic moiety. The small molecule cytotoxic moiety can include without limtation vinblastine hydrazide, calicheamicin, vinca alkaloid, a cryptophycin, a tubulysin, dolastatin-10, dolastatin-15, auristatin E, rhizoxin, epothilone B, epithilone D, taxoids, maytansinoids and any variants and derivatives thereof. In still other embodiments, the cytotoxic moiety comprises a protein toxin. For example, the protein toxin can be selected from the group consisting of diphtheria toxin, ricin, abrin, gelonin, and Pseudomonas exotoxin A. Non-immunogenic, high molecular weight compounds for use with the invention include polyalkylene glycols, e.g., polyethylene glycol. Appropriate radioisotopes include yttrium-90, indium-111, iodine-131, lutetium-177, copper-67, rhenium-186, rhenium-188, bismuth-212, bismuth-213, astatine-211, and actinium-225. The aptamer may be labeled with a gamma-emitting radioisotope.

[0439] In some embodiments of the invention, an active agent is conjugated to the aptamer. For example, the active agent may be a therapeutic agent or a diagnostic agent. The therapeutic agent may be selected from the group consisting of tyrosine kinase inhibitors, kinase inhibitors, biologically active agents, biological molecules, radionuclides, adriamycin, ansamycin antibiotics, asparaginase, bleomycin, busulphan, cisplatin, carboplatin, carmustine, capecotabine, chlorambucil, cytarabine, cyclophosphamide, camptothecin, dacarbazine, dactinomycin, daunorubicin, dexrazoxane, docetaxel, doxorubicin, etoposide, epothilones, floxuridine, fludarabine, fluorouracil, gemcitabine, hydroxyurea, idarubicin, ifosfamide, irinotecan, lomustine, mechlorethamine, mercaptopurine, melphalan, methotrexate, rapamycin (sirolimus), mitomycin, mitotane, mitoxantrone, nitrosurea, paclitaxel, pamidronate, pentostatin, plicamycin, procarbazine, rituximab, streptozocin, teniposide, thioguanine, thiotepa, taxanes, vinblastine, vincristine, vinorelbine, taxol, combretastatins, discodermolides, transplatinum, anti-vascular endothelial growth factor compounds (“anti-VEGFs”), anti-epidermal growth factor receptor compounds (“anti-EGFRs”), 5-fluorouracil and derivatives, radionuclides, polypeptide toxins, apoptosis inducers, therapy sensitizers, enzyme or active fragment thereof, and combinations thereof.

[0440] Oligonucleotide Pools to Characterize a Sample

[0441] The complexity and heterogeneity present in biology challenges the understanding of biological systems and disease. Diversity exists at various levels, e.g., within and between cells, tissues, individuals and disease states. See, e.g., FIG. 13A. FIG. 13B overviews various biological entities that can be assessed to characterize such samples. As shown in the Figure, as one moves from assessing DNA, to RNA, to protein, and finally to protein complexes, the amount of diversity and complexity increases dramatically. The oligonucleotide probe library method of the invention can be used characterize complex biological sources, e.g., tissue samples, cells, circulating tumor cells, microvesicles, and complexes such as protein and proteolipid complexes.

[0442] Current methods to characterize biological samples may not adequately address such complexity and diversity. As shown in FIG. 13C, such current methods often have a trade off between measuring diversity and complexity. As an example, consider high throughput sequencing technology. Next generation approaches may query many 1000s of molecular targets in a single assay. However, such approaches only probe individual DNA and/or RNA molecules, and thus miss out on the great diversity of proteins and biological complexes. On the other hand, flow cytometry can probe biological complexes, but are limited to a small number of pre-defined ligands. For example, a single assay can probe a handful of differentially labeled antibodies to pre-defined targets.

[0443] The oligonucleotide probe library of the invention can overcome the above challenges with current biological detection technologies. The size of the starting library can be adjusted to measure as many different entities as there are library members. In this Example, the initial untrained oligonucleotide library has the potential to measure 10¹² or more biological features. A larger and/or different library can be constructed as desired. The technology is adapted to find differences between samples without assumptions about what “should be different.” For example, the probe library may distinguish based on individual proteins, protein modifications, protein complexes, lipids, nucleic acids, different folds or conformations, or whatever is there that distinguishes a sample of interest. Thus, the method provides an unbiased approach to identify differences in biological samples that can be used to identify different populations of interest.

[0444] In the context of microvesicles whose surface may comprise any number of biomarkers in various configurations and complexes, the use of the oligonucleotide library probe to assess a sample can be referred to as Topological Oligonucleotide Profiling: TOP™. Although as noted the terms aptamer and oligonucleotides are typically used interchangeable herein, some differences between “classic” individual aptamers and TOP probes are as follows. Individual aptamers may comprise individual oligonucleotides selected to bind to a known specific target in an antibody-like “key-in-lock” binding mode. They may be evaluated individually based on specificity and binding affinity to the intended target. However, TOP probes may comprise a library of oligonucleotides intended to produce multi-probe signatures. The TOP probes comprise numerous potential binding modalities (electrostatic, hydrophobic, Watson-Crick, multi-oligo complexes, etc.). The TOP probe signatures have the potential to identify heterogeneous patient subpopulations. For example, a single TOP probe library can be assembled to differentiate multiple disease states, as demonstrated herein. Unlike classic single aptamers, the binding targets may or may not be isolated or identified. It will be understood that screening methods that identify individual aptamers, e.g., SELEX, can also be used to enrich a naive library of oligonucleotides to identify a TOP probe library.

[0445] The general method of the invention is outlined in FIG. 13D. One input to the method comprises a randomized oligonucleotide library with the potential to measure 10¹² or more biological features. As outlined in the figure, the method identifies a desired number (e.g., ˜10⁵-10⁶) that are different between two input sample types. The randomized oligonucleotide library is contacted with a first and a second sample type, and oligonucleotides that bind to each sample are identified. The bound oligonucleotide populations are compared and oligonucleotides that specifically bind to one or the other biological input sample are retained for the oligonucleotide probe library, whereas oligonucleotides that bind both biological input samples are discarded. This trained oligonucleotide probe library can then be contacted with a new test sample and the identities of oligonucleotides that bind the test sample are determined. The test sample is characterized based on the profile of oligonucleotides that bound. See, e.g., FIG. 13H.

[0446] Extracellular vesicles provide an attractive vehicle to profile the biological complexity and diversity driven by many inter-related sources. There can be a great deal of heterogeneity between patient-to-patient microvesicle populations, or even in microvesicle populations from a single patient under different conditions (e.g., stress, diet, exercise, rest, disease, etc). Diversity of molecular phenotypes within microvesicle populations in various disease states, even after microvesicle isolation and sorting by vesicle biomarkers, can present challenges identifying surface binding ligands. This situation is further complicated by vesicle surface-membrane protein complexes. The oligonucleotide probe library can be used to address such challenges and allow for characterization of biological phenotypes. The approach combines the power of diverse oligonucleotide libraries and high throughput (next-generation) sequencing technologies to probe the complexity of extracellular microvesicles. See FIG. 13E.

[0447] TOP™ profiling may provide quantitative measurements of dynamic events in addition to detection of presence/absence of various biomarkers in a sample. For example, the binding probes may detect protein complexes or other post-translation modifications, allowing for differentiation of samples with the same proteins but in different biological configurations. Such configurations are illustrated in FIGS. 13F-G. In FIG. 13F, microvesicles with various surface markers are shown from an example microvesicle sample population: Sample Population A. The indicated Bound Probing Oligonucleotides 1301 are contacted to two surface markers 1302 and 1303 in a given special relationship. Here, probes unique to these functional complexes and spatial relationships may be retained. In contrast, in microvesicle Sample Population B shown in FIG. 13F, the two surface markers 1302 and 1303 are found in disparate spatial relationship. Here, probes 1301 are not bound due to absence of the spatial relationship of the interacting components 1302 and 1303.

[0448] An illustrative approach 1310 for using TOP™ profiling to assess a sample is shown in FIG. 13H. The probing library 1311 is mixed with sample 1312. The sample can be as described herein, e.g., a bodily fluid from a subject having or suspected of having a disease. The probes are allowed to bind the sample 1313 and the microvesicles are pelleted 1315. The supernatant 1314 comprising unbound oligonucleotides is discarded. Oligonucleotide probes bound to the pellet 1315 are eluted 1316 and sequenced 1317. The profile 1318 generated by the bound oligonucleotide probes as determined by the sequencing 1317 is used to characterize the sample 1312. For example, the profile 1318 can be compared to a reference, e.g., to determine if the profile is similar or different from a reference profile indicative of a disease or healthy state, or other phenotypic characterization of interest. The comparison may indicate the presence of a disease, provide a diagnosis, prognosis or theranosis, or otherwise characterize a phenotype associated with the sample 1312. FIG. 13I illustrates another schematic for using TOP™ profiling to characterize a phenotype. A patient sample such as a bodily fluid disclosed herein is collected 1321. The sample is contacted with the TOP™ library pool 1322. Microvesicles (MVs) are isolated from the contacted sample 1323, e.g., using ultracentrifugation, filtration, polymer precipitation or other appropriate technique or combination of techniques disclosed herein. Oligonucleotides that bound the isolated microvesicles are collected and identity is determined 1324. The identity of the bound oligonucleotides can be determined by any useful technique such as sequencing, high throughput sequencing (e.g., NGS), amplification including without limitation qPCR, or hybridization such as to a planar or particle based array. The identity of the bound oligonucleotides is used to characterize the sample, e.g., as containing disease related microvesicles.

[0449] In an aspect, the invention provides a method of characterizing a sample by contacting the sample with a pool of different oligonucleotides (e.g., an aptamer pool), and determining the frequency at which various oligonucleotides in the pool bind the sample. For example, a pool of oligonucleotides is identified that preferentially bind to microvesicles from cancer patients as compared to non-cancer patients. A test sample, e.g., from a patient suspected of having the cancer, is collected and contacted with the pool of oligonucleotides. Oligonucleotides that bind the test sample are eluted from the test sample, collected and identified, and the composition of the bound oligonucleotides is compared to those known to bind cancer samples. Various sequencing, amplification and hybridization techniques can be used to identify the eluted oligonucleotides. For example, when a large pool of oligonucleotides is used, oligonucleotide identification can be performed by high throughput methods such as next generation sequencing or via hybridization. If the test sample is bound by the oligonucleotide pool in a similar manner (e.g., as determined by bioinformatics classification methods) to the microvesicles from cancer patients, then the test sample is indicative of cancer as well. Using this method, a pool of oligonucleotides that bind one or more microvesicle antigen can be used to characterize the sample without necessarily knowing the precise target of each member of the pool of oligonucleotides. Examples 19-20 herein illustrate embodiments of the invention.

[0450] In an aspect, the invention provides a method for characterizing a condition for a test sample comprising: contacting a microvesicle sample with a plurality of oligonucleotide capable of binding one or more target(s) present in said microvesicle sample, identifying a set of oligonucleotides that form a complex with the sample wherein the set is predetermined to characterize a condition for the sample, thereby characterizing a condition for a sample.

[0451] In an related aspect, the invention provides a method for identifying a set of oligonucleotides associated with a test sample, comprising: (a) contacting a microvesicle sample with a plurality of oligonucleotides, isolating a set of oligonucleotides that form a complex with the microvesicle sample, (b) determining sequence and/or copy number for each of the oligonucleotides, thereby identifying a set of oligonucleotides associated with the test sample.

[0452] In still another related aspect, the invention provides a method of diagnosing a sample as cancerous or predisposed to be cancerous, comprising contacting a microvesicle sample with a plurality of oligonucleotides that are predetermined to preferentially form a complex with microvesicles from a cancer sample as compared to microvesicles from a non-cancer sample.

[0453] The oligonucleotides can be identified by sequencing, e.g., by dye termination (Sanger) sequencing or high throughput methods. High throughput methods can comprise techniques to rapidly sequence a large number of nucleic acids, including next generation techniques such as Massively parallel signature sequencing (MPSS; Polony sequencing; 454 pyrosequencing; Illumina (Solexa) sequencing; SOLiD sequencing; Ion Torrent semiconductor sequencing; DNA nanoball sequencing; Heliscope single molecule sequencing; Single molecule real time (SMRT) sequencing, or other methods such as Nanopore DNA sequencing; Tunnelling currents DNA sequencing; Sequencing by hybridization; Sequencing with mass spectrometry; Microfluidic Sanger sequencing; Microscopy-based techniques; RNAP sequencing; In vitro virus high-throughput sequencing. The oligonucleotides may also be identified by hybridization techniques. For example, a microarray having addressable locals to hybridize and thereby detect the various members of the pool can be used.

[0454] The plurality or pool of oligonucleotides can comprise any desired number of oligonucleotides to allow characterization of the sample. In various embodiments, the pool comprises at least 2, 3, 4, 5, 6, 7, 8, 9, 10, 11, 12, 13, 14, 15, 16, 17, 18, 19, 20, 25, 30, 40, 50, 60, 70, 80, 90, 100, 150, 200, 250, 300, 350, 400, 450, 500, 600, 700, 800, 900, 1000, 2000, 3000, 4000, 5000, 6000, 7000, 8000, 9000, or at least 10000 different oligonucleotide members.

[0455] The plurality of oligonucleotides can be pre-selected through one or more steps of positive or negative selection, wherein positive selection comprises selection of oligonucleotides against a sample having substantially similar characteristics compared to the test sample, and wherein negative selection comprises selection of oligonucleotides against a sample having substantially different characteristics compared to the test sample. Substantially similar characteristics mean that the samples used for positive selection are representative of the test sample in one or more characteristic of interest. For example, the samples used for positive selection can be from cancer patients or cell lines and the test sample can be a sample from a patient having or suspected to have a cancer. Substantially different characteristics mean that the samples used for negative selection differ from the test sample in one or more characteristic of interest. For example, the samples used for negative selection can be from individuals or cell lines that do not have cancer (e.g., “normal” or otherwise “control” samples) and the test sample can be a sample from a patient having or suspected to have a cancer. The cancer can be a breast cancer, ovarian cancer, prostate cancer, lung cancer, colorectal cancer, melanoma, brain cancer, or other cancer.

[0456] By selecting samples representative of the desired phenotypes to detect and/or distinguish, the characterizing can comprise a diagnosis, prognosis or theranosis for any number of diseases or disorders. Various diseases and disorders can be characterized using the compositions and methods of the invention, including without limitation a cancer, a premalignant condition, an inflammatory disease, an immune disease, an autoimmune disease or disorder, a cardiovascular disease or disorder, a neurological disease or disorder, an infectious disease, and/or pain. See, e.g., section herein “Phenotypes” for further details. In embodiments, the disease or disorder comprises a proliferative or neoplastic disease or disorder. For example, the disease or disorder can be a cancer. In some embodiments, the cancer comprises a breast cancer, ovarian cancer, prostate cancer, lung cancer, colorectal cancer, melanoma, or brain cancer.

[0457] FIG. 16B is a schematic 1610 showing use of an oligonucleotide pool to characterize a phenotype of a sample, such as those listed above. A pool of oligonucleotides to a target of interest is provided 1611. For example, the pool of oligonucleotides can be enriched to target one or more microvesicle. The members of the pool may bind different targets (e.g., a microvesicle surface antigen) or different epitopes of the same target present on the one or more microvesicle. The pool is contacted with a test sample to be characterized 1612. For example, the test sample may be a biological sample from an individual having or suspected of having a given disease or disorder. The mixture is washed to remove unbound oligonucleotides. The remaining oligonucleotides are eluted or otherwise disassociated from the sample and collected 1613. The collected oligonucleotides are identified, e.g., by sequencing or hybridization 1614. The presence and/or copy number of the identified is used to characterize the phenotype 1615. For example, the pool of oligonucleotides may be chosen as oligonucleotides that preferentially recognize microvesicles shed from cancer cells. The method can be employed to detect whether the sample retains oligonucleotides that bind the cancer-related microvesicles, thereby allowing the sample to be characterized as cancerous or not.

[0458] FIG. 16C is a schematic 1620 showing an implementation of the method in FIG. 16B. A pool of oligonucleotides identified as binding a microvesicle population is provided 1621. The input sample comprises a test sample comprising microvesicles 1622. For example, the test sample may be a biological sample from an individual having or suspected of having a given disease or disorder. The pool is contacted with the isolated microvesicles to be characterized 1623. The microvesicle population can be isolated before or after the contacting 1623 from the sample using various techniques as described herein, e.g., chromatography, filtration, ultrafiltration, centrifugation, ultracentrifugation, flow cytometry, affinity capture (e.g., to a planar surface, column or bead), polymer precipitation, and/or using microfluidics. The mixture is washed to remove unbound oligonucleotides and the remaining oligonucleotides are eluted or otherwise disassociated from the sample and collected 1624. The collected oligonucleotides are identified 1625 and the presence and/or copy number of the retained oligonucleotides is used to characterize the phenotype 1626 as above.

[0459] As noted, in an embodiment of FIG. 16C, the pool of oligonucleotides 1620 is directly contacted with a biological sample that comprises or is expected to comprise microvesicles. Microvesicles are thereafter isolated from the sample and the mixture is washed to remove unbound oligonucleotides and the remaining oligonucleotides are disassociated and collected 1624. The following steps are performed as above. As an example of this alternate configuration, a biological sample, e.g., a blood, serum or plasma sample, is directly contacted with the pool of oligonucleotides. Microvesicles are then isolated by various techniques disclosed herein, including without limitation ultracentrifugation, ultrafiltration, flow cytometry, affinity isolation, polymer precipitation, chromatography, various combinations thereof, or the like. Remaining oligonucleotides are then identified, e.g., by sequencing, hybridization or amplification.

[0460] In a related aspect, the invention provides a composition of matter comprising a plurality of oligonucleotides that can be used to carry out the methods comprising use of an oligonucleotide pool to characterize a phenotype. The plurality of oligonucleotides can comprise any of those described herein.

[0461] In a related aspect, the invention provides a method of performing high-throughput sequencing comprising: performing at least one (i) negative selection or (ii) one positive selection of a plurality of oligonucleotides with a microvesicle sample; obtaining a set of oliognucleotides to provide a negative binder subset or positive binder subset of the plurality of oligonucleotides, wherein the negative binder subset of the plurality of oligonucleotides does not bind the microvesicle sample and wherein the positive binder subset of the plurality of oligonucleotides does bind the microvesicle sample; contacting the negative binder subset or positive binder subset with a test sample; eluting oligonucleotides that bound to the test sample to provide a plurality of eluate oligonucleotides; and performing high-throughput sequencing of the plurality of eluate oligonucleotides to identify sequence and/or copy number of the members of the plurality of eluate oligonucleotides. Negative and positive selection of the plurality of oligonucleotides using microvesicle sample can be performed as disclosed herein. The oligonucleotide profile revealed by the sequence and/or copy number of the members of the plurality of eluate oligonucleotides can be used to characterize a phenotype of the test sample as described herein.

[0462] In a similar aspect, the invention provides a method for identifying oligonucleotides specific for a test sample. The method comprises: (a) enriching a plurality of oligonucleotides for a sample to provide a set of oligonucleotides predetermined to form a complex with a target sample; (b) contacting the plurality in (a) with a test sample to allow formation of complexes of oligonucleotides with test sample; (c) recovering oligonucleotides that formed complexes in (b) to provide a recovered subset of oligonucleotides; and (d) profiling the recovered subset of oligonucleotides by high-throughput sequencing or hybridization, thereby identifying oligonucleotides specific for a test sample. The test sample may comprise a plurality of microvesicles. The oligonucleotides may comprise RNA, DNA or both. In some embodiment, the method further comprises performing informatics analysis to identify a subset of oligonucleotides comprising sequence identity of at least 50%, 55%, 60%, 65%, 70%, 75%, 80%, 85%, 90%, 91%, 92%, 93%, 94%, 95%, 96%, 97%, 98%, or at least 99% to the oligonucleotides predetermined to form a complex with the target sample.

[0463] In an aspect, the invention provides an oligonucleotide at least 50, 55, 60, 65, 70, 75, 80, 85, 90, 95, 96, 97, 98, 99 or 100 percent homologous to SEQ ID NO. 10558. In a related aspect, the invention provides a plurality of oligonucleotides comprising at least 1, 2, 3, 4, 5, 6, 7, 8, 9, 10, 11, 12, 13, 14, 15, 16, 17, 18, 19, 20, 25, 30, 40, 45, 50, 55, 60, 65, 70, 75, 80, 85, 90, 95, 100, 125, 150, 175, 200, 300, 400, 500, 600, 700, 800, 900, 1000, 2000, 3000, 4000, 5000, 6000, 7000, 8000, 9000, 10000, 20000, 30000, 40000, 50000, 60000, 70000, 80000, 90000, 100000, 200000, 300000, 400000, 500000, 10⁶, 10⁷, 10⁸, 10⁹, 10¹⁰, 10¹¹, 10¹², 10¹³, 10¹⁴, 10¹⁵, 10¹⁶, 10¹⁷, or at least 10¹⁸ different oligonucleotide sequences, wherein each of the oligonucleotide sequences or a portion thereof is at least 50, 55, 60, 65, 70, 75, 80, 85, 90, 95, 96, 97, 98, 99 or 100 percent homologous to SEQ ID NO. 10558.

[0464] In another aspect, the invention provides a plurality of oligonucleotides comprising at least 1, 2, 3, 4, 5, 6, 7, 8, 9, 10, 11, 12, 13, 14, 15, 16, 17, 18, 19, 20, 25, 30, 40, 45, 50, 55, 60, 65, 70, 75, 80, 85, 90, 95, 100, 125, 150, 175, 200, 300, 400, 500, 600, 700, 800, 900, 1000, 2000, 3000, 4000, 5000, 6000, 7000, 8000, 9000, 10000, 20000, 30000, 40000, 50000, 60000, 70000, 80000, 90000, 100000, 200000, 300000, 400000, or 500000 different oligonucleotide sequences, wherein each of the oligonucleotide sequences or a portion thereof is at least 50, 55, 60, 65, 70, 75, 80, 85, 90, 95, 96, 97, 98, 99 or 100 percent homologous to a sequence selected from SEQ ID NOs. 10559-510558. In a related aspect, the invention provides an oligonucleotide probe library comprising at least 50%, 60%, 70%, 80%, 90%, 95%, 96%, 97%, 98% or at least 99% of the oligonucleotides listed in SEQ ID NOs. 10559-510558.

[0465] In still another aspect, the invention provides an oligonucleotide comprising a nucleic acid sequence or a portion thereof that is at least 50, 55, 60, 65, 70, 75, 80, 85, 90, 95, 96, 97, 98, 99 or 100 percent homologous to a sequence selected from SEQ ID NOs. 510559-510578. In a related aspect, the invention provides a plurality of oligonucleotides comprising at least 1, 2, 3, 4, 5, 6, 7, 8, 9, 10, 11, 12, 13, 14, 15, 16, 17, 18, 19, 20 different oligonucleotide sequences, wherein each of the oligonucleotide sequences or a portion thereof is at least 50, 55, 60, 65, 70, 75, 80, 85, 90, 95, 96, 97, 98, 99 or 100 percent homologous to SEQ ID NOs. 510559-510578.

[0466] In yet another aspect, the invention provides an oligonucleotide comprising a nucleic acid sequence or a portion thereof that is at least 50, 55, 60, 65, 70, 75, 80, 85, 90, 95, 96, 97, 98, 99 or 100 percent homologous to a sequence selected from SEQ ID NOs. 510579-510598. In a related aspect, the invention provides a plurality of oligonucleotides comprising at least 1, 2, 3, 4, 5, 6, 7, 8, 9, 10, 11, 12, 13, 14, 15, 16, 17, 18, 19, 20 different oligonucleotide sequences, wherein each of the oligonucleotide sequences or a portion thereof is at least 50, 55, 60, 65, 70, 75, 80, 85, 90, 95, 96, 97, 98, 99 or 100 percent homologous to SEQ ID NOs. 510579-510598.

[0467] In an aspect, the invention provides an oligonucleotide comprising a nucleic acid sequence or a portion thereof that is at least 50, 55, 60, 65, 70, 75, 80, 85, 90, 95, 96, 97, 98, 99 or 100 percent homologous to a sequence selected from SEQ ID NOs. 510599-510763. In a related aspect, the invention provides a plurality of oligonucleotides comprising at least 1, 2, 3, 4, 5, 6, 7, 8, 9, 10, 11, 12, 13, 14, 15, 16, 17, 18, 19, 20, 25, 30, 40, 45, 50, 55, 60, 65, 70, 75, 80, 85, 90, 95, 100, 110, 120, 125, 130, 140, 150, 160 or 165 different oligonucleotide sequences, wherein each of the oligonucleotide sequences or a portion thereof is at least 50, 55, 60, 65, 70, 75, 80, 85, 90, 95, 96, 97, 98, 99 or 100 percent homologous to SEQ ID NOs. 510599-510763. In still another related aspect, the invention provides a plurality of oligonucleotides comprising at least 1, 2, 3, 4, 5, 6, 7, 8, 9, 10, 11, 12, 13, 14, 15, 16, 17, 18, 19, 20, 25, 30, 40, 45, 50, 55, 60, 65, 70, 75, 80, 85, 90, 95, 100, 110, 120, 125, 130, 140, 150, 160 or 165 different oligonucleotide sequences, wherein each of the oligonucleotide sequences or a portion thereof is at least 50, 55, 60, 65, 70, 75, 80, 85, 90, 95, 96, 97, 98, 99 or 100 percent homologous to the SEQ ID NOs. in a row in Table 16.

[0468] In an aspect, the invention also provides a method comprising contacting an oligonucleotide or plurality of oligonucleotides with a sample and detecting the presence or level of binding of the oligonucleotide or plurality of oligonucleotides to a target in the sample, wherein the oligonucleotide or plurality of oligonucleotides can be those provided by the invention above. The sample may comprise a biological sample, an organic sample, an inorganic sample, a tissue, a cell culture, a bodily fluid, blood, serum, a cell, a microvesicle, a protein complex, a lipid complex, a carbohydrate, or any combination, fraction or variation thereof. The target may comprise a cell, an organelle, a protein complex, a lipoprotein, a carbohydrate, a microvesicle, a membrane fragment, a small molecule, a heavy metal, a toxin, or a drug.

[0469] In a related aspect, the invention provides a method comprising: a) contacting a biological sample comprising microvesicles with an oligonucleotide probe library, wherein optionally the oligonucleotide probe library comprises an oligonucleotide or plurality of oligonucleotides those provided by the invention above; b) identifying oligonucleotides bound to at least a portion of the microvesicles; and c) characterizing the sample based on a profile of the identified oligonucleotides.

[0470] In another aspect, the invention provides a method comprising: a) contacting a sample with an oligonucleotide probe library comprising at least 10⁶, 10⁷, 10⁸, 10⁹, 10¹⁰, 10¹¹, 10¹², 10¹³, 10¹⁴, 10¹⁵, 10¹⁶, 10¹⁷, or at least 10¹⁸ different oligonucleotide sequences oligonucleotides to form a mixture in solution, wherein the oligonucleotides are capable of binding a plurality of entities in the sample to form complexes, wherein optionally the oligonucleotide probe library comprises an oligonucleotide or plurality of oligonucleotides as provided by the invention above; b) partitioning the complexes formed in step (a) from the mixture; and c) detecting oligonucleotides present in the complexes partitioned in step (b) to identify an oligonucleotide profile for the sample. In an embodiment, the detecting step comprises performing sequencing of all or some of the oligonucleotides in the complexes, amplification of all or some of the oligonucleotides in the complexes, and/or hybridization of all or some of the oligonucleotides in the complexes to an array. The array can be any useful array, such as a planar or particle-based array.

[0471] In still another aspect, the invention provides a method for generating an enriched oligonucleotide probe library comprising: a) contacting a first oligonucleotide library with a biological test sample and a biological control sample, wherein complexes are formed between biological entities present in the biological samples and a plurality of oligonucleotides present in the first oligonucleotide library; b) partitioning the complexes formed in step (a) and isolating the oligonucleotides in the complexes to produce a subset of oligonucleotides for each of the biological test sample and biological control sample; c) contacting the subsets of oligonucleotides in (b) with the biological test sample and biological control sample wherein complexes are formed between biological entities present in the biological samples and a second plurality of oligonucleotides present in the subsets of oligonucleotides to generate a second subset group of oligonucleotides; and d) optionally repeating steps b)-c), one, two, three or more times to produce a respective third, fourth, fifth or more subset group of oligonucleotides, thereby producing the enriched oligonucleotide probe library. In a related aspect, the invention provides a plurality of oligonucleotides comprising at least 2, 3, 4, 5, 6, 7, 8, 9, 10, 11, 12, 13, 14, 15, 16, 17, 18, 19, 20, 25, 30, 40, 45, 50, 55, 60, 65, 70, 75, 80, 85, 90, 95, 100, 125, 150, 175, 200, 300, 400, 500, 600, 700, 800, 900, 1000, 2000, 3000, 4000, 5000, 6000, 7000, 8000, 9000, 10000, 20000, 30000, 40000, 50000, 60000, 70000, 80000, 90000, 100000, 200000, 300000, 400000, or 500000 different oligonucleotide sequences, wherein the plurality results from the method in this paragraph, wherein the library is capable of distinguishing a first phenotype from a second phenotype. In some embodiments, the first phenotype comprises a disease or disorder and the second phenotype comprises a healthy state; or wherein the first phenotype comprises a disease or disorder and the second phenotype comprises a different disease or disorder; or wherein the first phenotype comprises a stage or progression of a disease or disorder and the second phenotype comprises a different stage or progression of the same disease or disorder; or wherein the first phenotype comprises a positive response to a therapy and the second phenotype comprises a negative response to the same therapy.

[0472] In yet another aspect, the invention provides a method of characterizing a disease or disorder, comprising: a) contacting a biological test sample with the oligonucleotide or plurality of oligonucleotides provided by the invention; b) detecting a presence or level of complexes formed in step (a) between the oligonucleotide or plurality of oligonucleotides provided by the invention and a target in the biological test sample; and c) comparing the presence or level detected in step (b) to a reference level from a biological control sample, thereby characterizing the disease or disorder. The step of detecting may comprise performing sequencing of all or some of the oligonucleotides in the complexes, amplification of all or some of the oligonucleotides in the complexes, and/or hybridization of all or some of the oligonucleotides in the complexes to an array. The sequencing may be high-throughput or next generation sequencing.

[0473] In the methods of the invention, the biological test sample and biological control sample may each comprise a tissue sample, a cell culture, or a biological fluid. In some embodiments, the biological fluid comprises a bodily fluid. Useful bodily fluids within the method of the invention comprise peripheral blood, sera, plasma, ascites, urine, cerebrospinal fluid (CSF), sputum, saliva, bone marrow, synovial fluid, aqueous humor, amniotic fluid, cerumen, breast milk, broncheoalveolar lavage fluid, semen, prostatic fluid, cowper's fluid or pre-ejaculatory fluid, female ejaculate, sweat, fecal matter, hair, tears, cyst fluid, pleural and peritoneal fluid, pericardial fluid, lymph, chyme, chyle, bile, interstitial fluid, menses, pus, sebum, vomit, vaginal secretions, mucosal secretion, stool water, pancreatic juice, lavage fluids from sinus cavities, bronchopulmonary aspirates, blastocyl cavity fluid, or umbilical cord blood. In some preferred embodiments, the bodily fluid comprises blood, serum or plasma. The biological fluid may comprise microvesicles. In such case, the complexes may be formed between the oligonucleotide or plurality of oligonucleotides and at least one of the microvesicles.

[0474] The biological test sample and biological control sample may further comprise isolated microvesicles, wherein optionally the microvesicles are isolated using at least one of chromatography, filtration, ultrafiltration, centrifugation, ultracentrifugation, flow cytometry, affinity capture (e.g., to a planar surface, column or bead), polymer precipitation, and using microfluidics. The vesicles can also be isolated after contact with the oligonucleotide or plurality of oligonucleotides.

[0475] In various embodiments of the methods of the invention, the oligonucleotide or plurality of oligonucleotides binds a polypeptide or fragment thereof. The polypeptide or fragment thereof can be soluble or membrane bound, wherein optionally the membrane comprises a microvesicle membrane. The membrane could also be from a cell or a fragment of a cell of vesicle. In some embodiments, the polypeptide or fragment thereof comprises a biomarker in Table 3 or Table 4. For example, the polypeptide or fragment thereof could be a general vesicle marker such as in Table 3 or a tissue-related or disease-related marker such as in Table 4. The oligonucleotide or plurality of oligonucleotides may bind a microvesicle surface antigen in the biological sample. For example, the oligonucleotide or plurality of oligonucleotides can be enriched from a naïve library against microvesicles.

[0476] The disease or disorder detected by the oligonucleotide, plurality of oligonucleotides, or methods provided here may comprise any appropriate disease or disorder of interest, including without limitation Breast Cancer, Alzheimer's disease, bronchial asthma, Transitional cell carcinoma of the bladder, Giant cellular osteoblastoclastoma, Brain Tumor, Colorectal adenocarcinoma, Chronic obstructive pulmonary disease (COPD), Squamous cell carcinoma of the cervix, acute myocardial infarction (AMI)/acute heart failure, Chron's Disease, diabetes mellitus type II, Esophageal carcinoma, Squamous cell carcinoma of the larynx, Acute and chronic leukemia of the bone marrow, Lung carcinoma, Malignant lymphoma, Multiple Sclerosis, Ovarian carcinoma, Parkinson disease, Prostate adenocarcinoma, psoriasis, Rheumatoid Arthritis, Renal cell carcinoma, Squamous cell carcinoma of skin, Adenocarcinoma of the stomach, carcinoma of the thyroid gland, Testicular cancer, ulcerative colitis, or Uterine adenocarcinoma.

[0477] In some embodiments, the disease or disorder comprises a cancer, a premalignant condition, an inflammatory disease, an immune disease, an autoimmune disease or disorder, a cardiovascular disease or disorder, neurological disease or disorder, infectious disease or pain. The cancer can include without limitation one of acute lymphoblastic leukemia; acute myeloid leukemia; adrenocortical carcinoma; AIDS-related cancers; AIDS-related lymphoma; anal cancer; appendix cancer; astrocytomas; atypical teratoid/rhabdoid tumor; basal cell carcinoma; bladder cancer; brain stem glioma; brain tumor (including brain stem glioma, central nervous system atypical teratoid/rhabdoid tumor, central nervous system embryonal tumors, astrocytomas, craniopharyngioma, ependymoblastoma, ependymoma, medulloblastoma, medulloepithelioma, pineal parenchymal tumors of intermediate differentiation, supratentorial primitive neuroectodermal tumors and pineoblastoma); breast cancer; bronchial tumors; Burkitt lymphoma; cancer of unknown primary site; carcinoid tumor; carcinoma of unknown primary site; central nervous system atypical teratoid/rhabdoid tumor; central nervous system embryonal tumors; cervical cancer; childhood cancers; chordoma; chronic lymphocytic leukemia; chronic myelogenous leukemia; chronic myeloproliferative disorders; colon cancer; colorectal cancer; craniopharyngioma; cutaneous T-cell lymphoma; endocrine pancreas islet cell tumors; endometrial cancer; ependymoblastoma; ependymoma; esophageal cancer; esthesioneuroblastoma; Ewing sarcoma; extracranial germ cell tumor; extragonadal germ cell tumor; extrahepatic bile duct cancer; gallbladder cancer; gastric (stomach) cancer; gastrointestinal carcinoid tumor; gastrointestinal stromal cell tumor; gastrointestinal stromal tumor (GIST); gestational trophoblastic tumor; glioma; hairy cell leukemia; head and neck cancer; heart cancer; Hodgkin lymphoma; hypopharyngeal cancer; intraocular melanoma; islet cell tumors; Kaposi sarcoma; kidney cancer; Langerhans cell histiocytosis; laryngeal cancer; lip cancer; liver cancer; lung cancer; malignant fibrous histiocytoma bone cancer; medulloblastoma; medulloepithelioma; melanoma; Merkel cell carcinoma; Merkel cell skin carcinoma; mesothelioma; metastatic squamous neck cancer with occult primary; mouth cancer; multiple endocrine neoplasia syndromes; multiple myeloma; multiple myeloma/plasma cell neoplasm; mycosis fungoides; myelodysplastic syndromes; myeloproliferative neoplasms; nasal cavity cancer; nasopharyngeal cancer; neuroblastoma; Non-Hodgkin lymphoma; nonmelanoma skin cancer; non-small cell lung cancer; oral cancer; oral cavity cancer; oropharyngeal cancer; osteosarcoma; other brain and spinal cord tumors; ovarian cancer; ovarian epithelial cancer; ovarian germ cell tumor; ovarian low malignant potential tumor; pancreatic cancer; papillomatosis; paranasal sinus cancer; parathyroid cancer; pelvic cancer; penile cancer; pharyngeal cancer; pineal parenchymal tumors of intermediate differentiation; pineoblastoma; pituitary tumor; plasma cell neoplasm/multiple myeloma; pleuropulmonary blastoma; primary central nervous system (CNS) lymphoma; primary hepatocellular liver cancer; prostate cancer; rectal cancer; renal cancer; renal cell (kidney) cancer; renal cell cancer; respiratory tract cancer; retinoblastoma; rhabdomyosarcoma; salivary gland cancer; Sezary syndrome; small cell lung cancer; small intestine cancer; soft tissue sarcoma; squamous cell carcinoma; squamous neck cancer; stomach (gastric) cancer; supratentorial primitive neuroectodermal tumors; T-cell lymphoma; testicular cancer; throat cancer; thymic carcinoma; thymoma; thyroid cancer; transitional cell cancer; transitional cell cancer of the renal pelvis and ureter; trophoblastic tumor; ureter cancer; urethral cancer; uterine cancer; uterine sarcoma; vaginal cancer; vulvar cancer; Waldenström macroglobulinemia; or Wilm's tumor. The premalignant condition can include without limitation Barrett's Esophagus. The autoimmune disease can include without limitation one of inflammatory bowel disease (IBD), Crohn's disease (CD), ulcerative colitis (UC), pelvic inflammation, vasculitis, psoriasis, diabetes, autoimmune hepatitis, multiple sclerosis, myasthenia gravis, Type I diabetes, rheumatoid arthritis, psoriasis, systemic lupus erythematosis (SLE), Hashimoto's Thyroiditis, Grave's disease, Ankylosing Spondylitis Sjogrens Disease, CREST syndrome, Scleroderma, Rheumatic Disease, organ rejection, Primary Sclerosing Cholangitis, or sepsis. The cardiovascular disease can include without limitation one of atherosclerosis, congestive heart failure, vulnerable plaque, stroke, ischemia, high blood pressure, stenosis, vessel occlusion or a thrombotic event. The neurological disease can include without limitation one of Multiple Sclerosis (MS), Parkinson's Disease (PD), Alzheimer's Disease (AD), schizophrenia, bipolar disorder, depression, autism, Prion Disease, Pick's disease, dementia, Huntington disease (HD), Down's syndrome, cerebrovascular disease, Rasmussen's encephalitis, viral meningitis, neurospsychiatric systemic lupus erythematosus (NPSLE), amyotrophic lateral sclerosis, Creutzfeldt-Jacob disease, Gerstmann-Straussler-Scheinker disease, transmissible spongiform encephalopathy, ischemic reperfusion damage (e.g. stroke), brain trauma, microbial infection, or chronic fatigue syndrome. The pain can include without limitation one of fibromyalgia, chronic neuropathic pain, or peripheral neuropathic pain. The infectious disease can include without limitation one of a bacterial infection, viral infection, yeast infection, Whipple's Disease, Prion Disease, cirrhosis, methicillin-resistant staphylococcus aureus, HIV, HCV, hepatitis, syphilis, meningitis, malaria, tuberculosis, or influenza. One of skill will appreciate that the oligonucleotide or plurality of oligonucleotides or methods of the invention can be used to assess any number of these or other related diseases and disorders.

[0478] In some embodiments of the invention, the oligonucleotide or plurality of oligonucleotides and methods of use thereof are useful for characterizing certain diseases or disease states. As desired, a pool of oligonucleotides useful for characterizing various diseases is assembled to create a master pool that can be used to probe useful for characterizing the various diseases. For example, the combination of SEQ ID NOs. 510599-510763 provided herein comprise such a pool. One of skill will also appreciate that pools of oligonucleotides useful for characterizing specific diseases or disorders can be created as well. The sequences provided herein can also be modified as desired so long as the functional aspects are still maintained (e.g., binding to various targets or ability to characterize a phenotype). For example, the oligonucleotides may comprise DNA or RNA, incorporate various non-natural nucleotides, incorporate other chemical modifications, or comprise various deletions or insertions. Such modifications may facilitate synthesis, stability, delivery, labeling, etc, or may have little to no effect in practice. In some cases, some nucleotides in an oligonucleotide may be substituted while maintaining functional aspects of the oligonucleotide. Similarly, 5′ and 3′ flanking regions may be substituted. In still other cases, only a portion of an oligonucleotide may be determined to direct its functionality such that other portions can be deleted or substituted. Numerous techniques to synthesize and modify nucleotides and polynucleotides are disclosed herein or are known in the art.

[0479] In an embodiment, the disease or disorder comprises a breast cancer and the oligonucleotide or plurality of oligonucleotides useful for characterization thereof comprises at least 1, 2, 3, 4, 5, 6, 7, 8, 9, 10, 11, 12, 13, 14, 15, 16, 17, 18, 19, 20, 25, 30 or at least 40 of SEQ ID NOs. 510559-510598. The oligonucleotides may incorporate various chemical modifications, additions, deletions, insertions, substitutions or other modifications so long as functional aspects of the oligonucleotides are enhanced or maintained in whole or in part.

[0480] In another embodiment, and the disease or disorder comprises Alzheimer's disease and the oligonucleotide or plurality of oligonucleotides useful for characterization thereof comprises at least 1, 2, 3, 4, 5, 6, 7, 8, 9, 10, 11, 12, 13, 14, 15, 16, 17, 18, 19, 20, 25, 30, 40, 45, 50 or all of SEQ ID NOs. 510600, 510604, 510605, 510608, 510609, 510612, 510614, 510629, 510632, 510633, 510634, 510641, 510642, 510643, 510646, 510648, 510649, 510651, 510652, 510653, 510655, 510661, 510667, 510673, 510675, 510676, 510677, 510678, 510679, 510681, 510683, 510685, 510687, 510688, 510690, 510694, 510696, 510702, 510707, 510709, 510726, 510727, 510728, 510729, 510730, 510731, 510732, 510737, 510740, 510748, 510749, 510751, 510752, 510754, 510756, 510757, 510758, 510761, and 510762. In a related embodiment, the disease or disorder comprises Alzheimer's disease and the oligonucleotide or plurality of oligonucleotides useful for characterization thereof comprises at least 1, 2, 3, 4, 5, 6, 7, 8, 9, 10, 11, 12, 13, 14, 15, 16, 17, 18, 19, 20, 25, 30, 40, 45, 50 or all of SEQ ID NOs. 510599, 510601, 510603, 510606, 510608, 510609, 510611, 510613, 510614, 510615, 510619, 510621, 510625, 510628, 510629, 510630, 510632, 510634, 510635, 510636, 510637, 510644, 510647, 510648, 510651, 510652, 510654, 510657, 510665, 510666, 510667, 510668, 510677, 510678, 510679, 510687, 510692, 510693, 510696, 510698, 510699, 510701, 510702, 510707, 510708, 510710, 510713, 510716, 510725, 510726, 510728, 510731, 510732, 510733, 510734, 510736, 510741, 510748, 510749, 510755, 510757, 510758, 510761, and 510762. The oligonucleotides may incorporate various chemical modifications, additions, deletions, insertions, substitutions or other modifications so long as functional aspects of the oligonucleotides are enhanced or maintained in whole or in part.

[0481] The disease or disorder may comprise bronchial asthma and the oligonucleotide or plurality of oligonucleotides useful for characterization thereof comprises at least 1, 2, 3, 4, 5, 6, 7, 8, 9, 10, 11, 12, 13, 14, 15, 16, 17, 18, 19, 20, 25, 30, 40, 45, 50 or all of SEQ ID NOs. 510601, 510614, 510619, 510623, 510627, 510631, 510633, 510635, 510647, 510655, 510656, 510660, 510672, 510689, 510690, 510693, 510698, 510701, 510702, 510707, 510709, 510710, 510713, 510720, 510723, 510724, 510726, 510728, 510729, 510730, 510731, 510734, 510735, 510738, 510743, 510744, 510745, 510746, 510748, 510749, 510750, 510751, 510752, 510754, 510755, 510757, 510758, 510759, 510760, 510761, and 510762. The disease or disorder may also comprise bronchial asthma and the oligonucleotide or plurality of oligonucleotides useful for characterization thereof comprises at least 1, 2, 3, 4, 5, 6, 7, 8, 9, 10, 11, 12, 13, 14, 15, 16, 17, 18, 19, 20, 25, 30, 40, 45, 50 or all of SEQ ID NOs. 510600, 510608, 510609, 510610, 510611, 510617, 510619, 510622, 510631, 510632, 510634, 510635, 510637, 510642, 510643, 510644, 510652, 510655, 510657, 510658, 510665, 510668, 510673, 510675, 510676, 510677, 510678, 510679, 510683, 510691, 510701, 510703, 510704, 510706, 510708, 510709, 510714, 510725, 510736, 510737, 510740, 510741, 510742, and 510756. The oligonucleotides may incorporate various chemical modifications, additions, deletions, insertions, substitutions or other modifications so long as functional aspects of the oligonucleotides are enhanced or maintained in whole or in part.

[0482] In some embodiments, the disease or disorder comprises a transitional cell carcinoma of the bladder and the oligonucleotide or plurality of oligonucleotides useful for characterization thereof comprises at least 1, 2, 3, 4, 5, 6, 7, 8, 9, 10, 11, 12, 13, 14, 15, 16, 17, 18, 19, 20, 25, 30, 40, 45, 50 or all of SEQ ID NOs. 510607, 510619, 510623, 510631, 510632, 510635, 510641, 510642, 510647, 510656, 510657, 510658, 510659, 510673, 510674, 510683, 510686, 510693, 510695, 510701, 510702, 510707, 510708, 510711, 510716, 510722, 510725, 510726, 510728, 510731, 510734, 510737, 510744, 510748, 510749, 510751, 510752, 510753, 510756, 510757, 510758, 510761, and 510762. The oligonucleotides may incorporate various chemical modifications, additions, deletions, insertions, substitutions or other modifications so long as functional aspects of the oligonucleotides are enhanced or maintained in whole or in part.

[0483] In another embodiment, the disease or disorder comprises a giant cellular osteoblastoclastoma and the oligonucleotide or plurality of oligonucleotides useful for characterization thereof comprises at least 1, 2, 3, 4, 5, 6, 7, 8, 9, 10, 11, 12, 13, 14, 15, 16, 17, 18, 19, 20, 25, 30, 40, 45, 50 or all of SEQ ID NOs. 510612, 510620, 510635, 510637, 510641, 510644, 510648, 510658, 510662, 510663, 510667, 510668, 510670, 510676, 510678, 510679, 510682, 510683, 510685, 510686, 510699, 510708, 510712, 510722, 510737, and 510753. The oligonucleotides may incorporate various chemical modifications, additions, deletions, insertions, substitutions or other modifications so long as functional aspects of the oligonucleotides are enhanced or maintained in whole or in part.

[0484] The disease or disorder may comprise a brain tumor and the oligonucleotide or plurality of oligonucleotides useful for characterization thereof comprises at least 1, 2, 3, 4, 5, 6, 7, 8, 9, 10, 11, 12, 13, 14, 15, 16, 17, 18, 19, 20, 25, 30, 40, 45, 50 or all of SEQ ID NOs. 510607, 510619, 510624, 510628, 510639, 510641, 510645, 510647, 510648, 510655, 510657, 510665, 510668, 510673, 510674, 510689, 510695, 510698, 510699, 510705, 510710, 510711, 510712, 510713, 510716, 510734, 510737, 510738, and 510762. The oligonucleotides may incorporate various chemical modifications, additions, deletions, insertions, substitutions or other modifications so long as functional aspects of the oligonucleotides are enhanced or maintained in whole or in part.

[0485] In another embodiment, the disease or disorder comprises a colorectal adenocarcinoma and the oligonucleotide or plurality of oligonucleotides useful for characterization thereof comprises at least 1, 2, 3, 4, 5, 6, 7, 8, 9, 10, 11, 12, 13, 14, 15, 16, 17, 18, 19, 20, 25, 30, 40, 45, 50 or all of SEQ ID NOs. 510603, 510607, 510611, 510616, 510618, 510619, 510623, 510624, 510641, 510644, 510646, 510647, 510655, 510656, 510672, 510673, 510690, 510693, 510695, 510698, 510701, 510702, 510709, 510711, 510714, 510716, 510719, 510723, 510724, 510725, 510726, 510730, 510731, 510734, 510735, 510737, 510738, 510743, 510744, 510748, 510749, 510751, 510752, 510754, 510755, 510757, 510758, 510760, 510761, 510762, and 510763. The oligonucleotides may incorporate various chemical modifications, additions, deletions, insertions, substitutions or other modifications so long as functional aspects of the oligonucleotides are enhanced or maintained in whole or in part.

[0486] In still another embodiment, the disease or disorder comprises a chronic obstructive pulmonary disease (COPD) and the oligonucleotide or plurality of oligonucleotides useful for characterization thereof comprises at least 1, 2, 3, 4, 5, 6, 7, 8, 9, 10, 11, 12, 13, 14, 15, 16, 17, 18, 19, 20, 25, 30, 40, 45, 50 or all of SEQ ID NOs. 510604, 510608, 510609, 510612, 510614, 510616, 510619, 510620, 510629, 510634, 510637, 510640, 510647, 510649, 510653, 510661, 510666, 510667, 510669, 510673, 510678, 510682, 510689, 510690, 510701, 510707, 510715, 510723, 510727, 510728, 510749, 510754, 510755, 510757, 510758, 510762, and 510763. In a related embodiment, the disease or disorder comprises a chronic obstructive pulmonary disease (COPD) and the oligonucleotide or plurality of oligonucleotides useful for characterization thereof comprises at least 1, 2, 3, 4, 5, 6, 7, 8, 9, 10, 11, 12, 13, 14, 15, 16, 17, 18, 19, 20, 25, 30, 40, 45, 50 or all of SEQ ID NOs. 510601, 510609, 510611, 510613, 510620, 510634, 510637, 510647, 510648, 510654, 510664, 510668, 510679, 510694, 510696, 510698, 510699, 510701, 510705, 510706, 510710, 510718, 510734, and 510741. The oligonucleotides may incorporate various chemical modifications, additions, deletions, insertions, substitutions or other modifications so long as functional aspects of the oligonucleotides are enhanced or maintained in whole or in part.

[0487] The disease or disorder can be a squamous cell carcinoma of the cervix and the oligonucleotide or plurality of oligonucleotides useful for characterization thereof comprises at least 1, 2, 3, 4, 5, 6, 7, 8, 9, 10, 11, 12, 13, 14, 15, 16, 17, 18, 19, 20, 25, 30, 40, 45, 50 or all of SEQ ID NOs. 510615, 510619, 510623, 510626, 510630, 510632, 510633, 510635, 510638, 510639, 510641, 510642, 510644, 510647, 510650, 510655, 510656, 510657, 510661, 510673, 510674, 510677, 510683, 510688, 510693, 510695, 510698, 510711, 510712, 510714, 510716, 510717, 510722, 510725, 510729, 510731, 510734, 510737, 510743, 510745, 510747, 510753, 510755, 510756, 510758, 510759, and 510763. The oligonucleotides may incorporate various chemical modifications, additions, deletions, insertions, substitutions or other modifications so long as functional aspects of the oligonucleotides are enhanced or maintained in whole or in part.

[0488] The disease or disorder may comprise an acute myocardial infarction (AMI) or acute heart failure and the oligonucleotide or plurality of oligonucleotides useful for characterization thereof comprises at least 1, 2, 3, 4, 5, 6, 7, 8, 9, 10, 11, 12, 13, 14, 15, 16, 17, 18, 19, 20, 25, 30, 40, 45, 50 or all of SEQ ID NOs. 510607, 510608, 510613, 510626, 510629, 510631, 510634, 510635, 510638, 510639, 510646, 510648, 510656, 510667, 510669, 510671, 510672, 510675, 510682, 510689, 510698, 510701, 510707, 510710, 510715, 510721, 510723, 510727, 510728, 510730, 510731, 510734, 510735, 510743, 510744, 510748, 510749, 510751, 510752, 510757, 510758, 510760, 510761, and 510762. In a related embodiment, the disease or disorder comprises an acute myocardial infarction (AMI) or acute heart failure and the oligonucleotide or plurality of oligonucleotides useful for characterization thereof comprises at least 1, 2, 3, 4, 5, 6, 7, 8, 9, 10, 11, 12, 13, 14, 15, 16, 17, 18, 19, 20, 25, 30, 40, 45, 50 or all of SEQ ID NOs. 510599, 510601, 510606, 510607, 510608, 510609, 510611, 510614, 510616, 510619, 510622, 510624, 510626, 510635, 510636, 510637, 510640, 510641, 510643, 510644, 510648, 510651, 510665, 510668, 510669, 510672, 510675, 510677, 510678, 510679, 510682, 510692, 510695, 510696, 510698, 510699, 510701, 510703, 510707, 510710, 510725, 510726, 510728, 510729, 510730, 510731, 510733, 510734, 510736, 510743, 510750, 510751, 510752, 510755, 510757, 510758, 510759, 510760, 510761, and 510762. The oligonucleotides may incorporate various chemical modifications, additions, deletions, insertions, substitutions or other modifications so long as functional aspects of the oligonucleotides are enhanced or maintained in whole or in part.

[0489] In some embodiments, the disease or disorder comprises Chron's Disease and the oligonucleotide or plurality of oligonucleotides useful for characterization thereof comprises at least 1, 2, 3, 4, 5, 6, 7, 8, 9, 10, 11, 12, 13, 14, 15, 16, 17, 18, 19, 20, 25, 30, 40, 45, 50 or all of SEQ ID NOs. 510600, 510602, 510608, 510611, 510624, 510644, 510653, 510656, 510659, 510669, 510671, 510676, 510686, 510689, 510690, 510697, 510698, 510700, 510713, 510727, 510728, 510729, 510731, 510734, 510744, 510751, and 510757. In a related embodiment, the disease or disorder comprises Chron's Disease and the oligonucleotide or plurality of oligonucleotides useful for characterization thereof comprises at least 1, 2, 3, 4, 5, 6, 7, 8, 9, 10, 11, 12, 13, 14, 15, 16, 17, 18, 19, 20, 25, 30, 40, 45, 50 or all of SEQ ID NOs. 510600, 510610, 510611, 510615, 510618, 510621, 510623, 510625, 510626, 510628, 510631, 510632, 510635, 510637, 510638, 510643, 510647, 510648, 510649, 510653, 510654, 510655, 510657, 510658, 510666, 510667, 510668, 510672, 510675, 510677, 510678, 510679, 510680, 510682, 510684, 510689, 510691, 510694, 510696, 510698, 510701, 510707, 510708, 510709, 510710, 510713, 510714, 510715, 510719, 510725, 510727, 510728, 510729, 510730, 510731, 510734, 510736, 510738, 510743, 510744, 510748, 510750, 510751, 510755, 510757, 510758, 510759, 510760, 510761, 510762, and 510763. The oligonucleotides may incorporate various chemical modifications, additions, deletions, insertions, substitutions or other modifications so long as functional aspects of the oligonucleotides are enhanced or maintained in whole or in part.

[0490] The disease or disorder may comprise diabetes mellitus type II and the oligonucleotide or plurality of oligonucleotides useful for characterization thereof comprises at least 1, 2, 3, 4, 5, 6, 7, 8, 9, 10, 11, 12, 13, 14, 15, 16, 17, 18, 19, 20, 25, 30, 40, 45, 50 or all of SEQ ID NOs. 510600, 510604, 510608, 510610, 510611, 510614, 510616, 510620, 510624, 510629, 510632, 510634, 510640, 510649, 510667, 510669, 510670, 510671, 510678, 510685, 510700, 510701, 510702, 510707, 510709, 510718, 510721, 510723, 510726, 510727, 510728, 510729, 510730, 510731, 510733, 510735, 510743, 510748, 510749, 510752, 510754, 510755, 510757, 510758, 510760, 510761, 510762, and 510763. Relatedly, the disease or disorder may comprise diabetes mellitus type II and the oligonucleotide or plurality of oligonucleotides useful for characterization thereof comprises at least 1, 2, 3, 4, 5, 6, 7, 8, 9, 10, 11, 12, 13, 14, 15, 16, 17, 18, 19, 20, 25, 30, 40, 45, 50 or all of SEQ ID NOs. 510613, 510632, 510635, 510636, 510641, 510645, 510647, 510648, 510654, 510660, 510664, 510667, 510668, 510670, 510675, 510684, 510691, 510695, 510696, 510706, 510710, 510734, and 510749. The oligonucleotides may incorporate various chemical modifications, additions, deletions, insertions, substitutions or other modifications so long as functional aspects of the oligonucleotides are enhanced or maintained in whole or in part.

[0491] In some embodiments, the disease or disorder comprises an esophageal carcinoma and the oligonucleotide or plurality of oligonucleotides useful for characterization thereof comprises at least 1, 2, 3, 4, 5, 6, 7, 8, 9, 10, 11, 12, 13, 14, 15, 16, 17, 18, 19, 20, 25, 30, 40, 45, 50 or all of SEQ ID NOs. 510602, 510619, 510623, 510632, 510635, 510638, 510641, 510644, 510653, 510656, 510661, 510671, 510682, 510689, 510693, 510698, 510714, 510722, 510725, 510731, 510734, 510738, 510753, and 510761. The oligonucleotides may incorporate various chemical modifications, additions, deletions, insertions, substitutions or other modifications so long as functional aspects of the oligonucleotides are enhanced or maintained in whole or in part.

[0492] In another embodiment, the disease or disorder comprises a squamous cell carcinoma of the larynx and the oligonucleotide or plurality of oligonucleotides useful for characterization thereof comprises at least 1, 2, 3, 4, 5, 6, 7, 8, 9, 10, 11, 12, 13, 14, 15, 16, 17, 18, 19, 20, 25, 30, 40, 45, 50 or all of SEQ ID NOs. 510605, 510607, 510612, 510614, 510619, 510623, 510632, 510635, 510641, 510642, 510655, 510656, 510657, 510659, 510661, 510668, 510673, 510674, 510689, 510690, 510693, 510695, 510698, 510708, 510712, 510732, 510734, 510737, 510738, 510745, 510747, 510753, and 510755. The oligonucleotides may incorporate various chemical modifications, additions, deletions, insertions, substitutions or other modifications so long as functional aspects of the oligonucleotides are enhanced or maintained in whole or in part.

[0493] In still another embodiment, the disease or disorder comprises an acute or chronic leukemia of the bone marrow and the oligonucleotide or plurality of oligonucleotides useful for characterization thereof comprises at least 1, 2, 3, 4, 5, 6, 7, 8, 9, 10, 11, 12, 13, 14, 15, 16, 17, 18, 19, 20, 25, 30, 40, 45, 50 or all of SEQ ID NOs. 510600, 510605, 510607, 510610, 510612, 510628, 510631, 510633, 510641, 510644, 510650, 510664, 510670, 510673, 510674, 510675, 510681, 510684, 510685, 510686, 510701, 510711, 510712, 510717, 510718, 510719, 510720, 510721, 510724, 510729, 510732, 510739, 510740, 510743, 510745, 510746, 510747, 510752, 510754, and 510763. The oligonucleotides may incorporate various chemical modifications, additions, deletions, insertions, substitutions or other modifications so long as functional aspects of the oligonucleotides are enhanced or maintained in whole or in part.

[0494] In yet another embodiment, the disease or disorder comprises a lung carcinoma and the oligonucleotide or plurality of oligonucleotides useful for characterization thereof comprises at least 1, 2, 3, 4, 5, 6, 7, 8, 9, 10, 11, 12, 13, 14, 15, 16, 17, 18, 19, 20, 25, 30, 40, 45, 50 or all of SEQ ID NOs. 510604, 510626, 510628, 510631, 510633, 510635, 510649, 510650, 510654, 510668, 510672, 510674, 510677, 510699, 510701, 510702, 510710, 510712, 510715, 510717, 510719, 510720, 510721, 510723, 510724, 510726, 510727, 510733, 510735, 510738, 510743, 510744, 510745, 510746, 510747, 510750, 510751, 510754, 510755, 510758, 510760, and 510763. The oligonucleotides may incorporate various chemical modifications, additions, deletions, insertions, substitutions or other modifications so long as functional aspects of the oligonucleotides are enhanced or maintained in whole or in part.

[0495] The disease or disorder may comprise a malignant lymphoma and the oligonucleotide or plurality of oligonucleotides useful for characterization thereof comprises at least 1, 2, 3, 4, 5, 6, 7, 8, 9, 10, 11, 12, 13, 14, 15, 16, 17, 18, 19, 20, 25, 30, 40, 45, 50 or all of SEQ ID NOs. 510601, 510611, 510618, 510623, 510624, 510631, 510632, 510636, 510638, 510641, 510644, 510645, 510647, 510656, 510660, 510662, 510672, 510673, 510675, 510690, 510693, 510701, 510702, 510707, 510708, 510713, 510717, 510719, 510721, 510723, 510724, 510725, 510726, 510728, 510729, 510730, 510731, 510734, 510735, 510737, 510743, 510744, 510749, 510751, 510752, 510754, 510755, 510756, 510757, 510758, 510760, 510762, and 510763. The oligonucleotides may incorporate various chemical modifications, additions, deletions, insertions, substitutions or other modifications so long as functional aspects of the oligonucleotides are enhanced or maintained in whole or in part.

[0496] The disease or disorder may also comprise multiple sclerosis and the oligonucleotide or plurality of oligonucleotides useful for characterization thereof comprises at least 1, 2, 3, 4, 5, 6, 7, 8, 9, 10, 11, 12, 13, 14, 15, 16, 17, 18, 19, 20, 25, 30, 40, 45, 50 or all of SEQ ID NOs. 510607, 510612, 510620, 510646, 510653, 510655, 510661, 510663, 510669, 510675, 510682, 510685, 510686, 510690, 510699, 510701, 510710, 510713, 510731, 510738, 510747, 510758, and 510762. Relatedly, the disease or disorder may comprise multiple sclerosis and the oligonucleotide or plurality of oligonucleotides useful for characterization thereof comprises at least 1, 2, 3, 4, 5, 6, 7, 8, 9, 10, 11, 12, 13, 14, 15, 16, 17, 18, 19, 20, 25, 30, 40, 45, 50 or all of SEQ ID NOs. 510599, 510604, 510609, 510610, 510613, 510617, 510618, 510622, 510632, 510635, 510647, 510670, 510675, 510677, 510687, 510690, 510692, 510695, 510701, 510706, 510708, 510731, and 510733. The oligonucleotides may incorporate various chemical modifications, additions, deletions, insertions, substitutions or other modifications so long as functional aspects of the oligonucleotides are enhanced or maintained in whole or in part.

[0497] In an embodiment, the disease or disorder comprises an ovarian carcinoma and the oligonucleotide or plurality of oligonucleotides useful for characterization thereof comprises at least 1, 2, 3, 4, 5, 6, 7, 8, 9, 10, 11, 12, 13, 14, 15, 16, 17, 18, 19, 20, 25, 30, 40, 45, 50 or all of SEQ ID NOs. 510618, 510626, 510628, 510633, 510638, 510641, 510642, 510643, 510645, 510646, 510647, 510650, 510652, 510658, 510665, 510666, 510673, 510674, 510677, 510682, 510683, 510689, 510705, 510707, 510712, 510717, 510722, 510724, 510729, 510732, 510735, 510737, 510745, 510746, 510747, 510753, and 510756. The oligonucleotides may incorporate various chemical modifications, additions, deletions, insertions, substitutions or other modifications so long as functional aspects of the oligonucleotides are enhanced or maintained in whole or in part.

[0498] In another embodiment, the disease or disorder comprises Parkinson disease and the oligonucleotide or plurality of oligonucleotides useful for characterization thereof comprises at least 1, 2, 3, 4, 5, 6, 7, 8, 9, 10, 11, 12, 13, 14, 15, 16, 17, 18, 19, 20, 25, 30, 40, 45, 50 or all of SEQ ID NOs. 510600, 510601, 510604, 510608, 510609, 510612, 510614, 510624, 510631, 510633, 510634, 510640, 510641, 510642, 510649, 510650, 510651, 510653, 510667, 510673, 510675, 510676, 510677, 510683, 510686, 510689, 510694, 510700, 510703, 510704, 510705, 510706, 510707, 510709, 510713, 510715, 510721, 510723, 510724, 510726, 510727, 510729, 510730, 510731, 510732, 510734, 510735, 510736, 510737, 510739, 510740, 510741, 510742, 510744, 510745, 510746, 510747, 510748, 510751, 510752, 510754, 510756, 510757, 510758, 510759, 510760, 510761, and 510762. In a related embodiment, the disease or disorder comprises Parkinson disease and the oligonucleotide or plurality of oligonucleotides useful for characterization thereof comprises at least 1, 2, 3, 4, 5, 6, 7, 8, 9, 10, 11, 12, 13, 14, 15, 16, 17, 18, 19, 20, 25, 30, 40, 45, 50 or all of SEQ ID NOs. 510601, 510606, 510608, 510609, 510610, 510614, 510616, 510632, 510634, 510643, 510644, 510647, 510648, 510654, 510662, 510664, 510665, 510667, 510668, 510670, 510677, 510678, 510679, 510687, 510692, 510696, 510698, 510699, 510701, 510703, 510704, 510706, 510708, 510710, 510722, 510727, 510734, 510736, 510741, 510742, 510753, and 510756. The oligonucleotides may incorporate various chemical modifications, additions, deletions, insertions, substitutions or other modifications so long as functional aspects of the oligonucleotides are enhanced or maintained in whole or in part.

[0499] In still another embodiment, the disease or disorder comprises a prostate adenocarcinoma and the oligonucleotide or plurality of oligonucleotides useful for characterization thereof comprises at least 1, 2, 3, 4, 5, 6, 7, 8, 9, 10, 11, 12, 13, 14, 15, 16, 17, 18, 19, 20, 25, 30, 40, 45, 50 or all of SEQ ID NOs. 510600, 510603, 510607, 510619, 510623, 510624, 510628, 510641, 510642, 510644, 510647, 510650, 510655, 510656, 510657, 510669, 510673, 510674, 510677, 510684, 510688, 510689, 510690, 510695, 510698, 510701, 510709, 510710, 510718, 510726, 510734, 510737, 510738, 510739, 510757, and 510762. The oligonucleotides may incorporate various chemical modifications, additions, deletions, insertions, substitutions or other modifications so long as functional aspects of the oligonucleotides are enhanced or maintained in whole or in part.

[0500] In yet another embodiment, the disease or disorder comprises psoriasis and the oligonucleotide or plurality of oligonucleotides useful for characterization thereof comprises at least 1, 2, 3, 4, 5, 6, 7, 8, 9, 10, 11, 12, 13, 14, 15, 16, 17, 18, 19, 20, 25, 30, 40, 45, 50 or all of SEQ ID NOs. 510600, 510601, 510608, 510609, 510611, 510614, 510620, 510624, 510626, 510631, 510633, 510634, 510635, 510638, 510647, 510649, 510650, 510653, 510656, 510665, 510666, 510667, 510669, 510672, 510674, 510675, 510680, 510685, 510689, 510698, 510702, 510707, 510711, 510712, 510715, 510717, 510719, 510720, 510721, 510723, 510724, 510726, 510727, 510728, 510729, 510730, 510731, 510734, 510735, 510743, 510744, 510745, 510746, 510747, 510748, 510749, 510750, 510751, 510752, 510754, 510755, 510757, 510758, 510759, 510760, 510761, 510762, and 510763. The oligonucleotides may incorporate various chemical modifications, additions, deletions, insertions, substitutions or other modifications so long as functional aspects of the oligonucleotides are enhanced or maintained in whole or in part.

[0501] The disease or disorder can be psoriasis and the oligonucleotide or plurality of oligonucleotides useful for characterization thereof comprises at least 1, 2, 3, 4, 5, 6, 7, 8, 9, 10, 11, 12, 13, 14, 15, 16, 17, 18, 19, 20, 25, 30, 40, 45, 50 or all of SEQ ID NOs. 510600, 510601, 510604, 510613, 510621, 510627, 510637, 510641, 510644, 510648, 510650, 510652, 510663, 510667, 510668, 510676, 510680, 510681, 510699, 510701, 510703, 510705, 510709, 510710, 510722, 510734, 510739, 510750, and 510753. The oligonucleotides may incorporate various chemical modifications, additions, deletions, insertions, substitutions or other modifications so long as functional aspects of the oligonucleotides are enhanced or maintained in whole or in part.

[0502] The disease or disorder can also be rheumatoid arthritis and the oligonucleotide or plurality of oligonucleotides useful for characterization thereof comprises at least 1, 2, 3, 4, 5, 6, 7, 8, 9, 10, 11, 12, 13, 14, 15, 16, 17, 18, 19, 20, 25, 30, 40, 45, 50 or all of SEQ ID NOs. 510599, 510603, 510604, 510607, 510608, 510609, 510614, 510616, 510622, 510625, 510627, 510629, 510630, 510634, 510635, 510636, 510637, 510640, 510642, 510646, 510649, 510650, 510651, 510653, 510656, 510664, 510665, 510667, 510671, 510675, 510677, 510678, 510679, 510682, 510689, 510699, 510707, 510726, 510727, 510728, 510729, 510731, 510733, 510737, 510738, 510748, 510755, 510758, 510761, and 510762. The oligonucleotides may incorporate various chemical modifications, additions, deletions, insertions, substitutions or other modifications so long as functional aspects of the oligonucleotides are enhanced or maintained in whole or in part.

[0503] In some embodiments, the disease or disorder comprises rheumatoid arthritis and the oligonucleotide or plurality of oligonucleotides useful for characterization thereof comprises at least 1, 2, 3, 4, 5, 6, 7, 8, 9, 10, 11, 12, 13, 14, 15, 16, 17, 18, 19, 20, 25, 30, 40, 45, 50 or all of SEQ ID NOs. 510599, 510601, 510603, 510604, 510606, 510607, 510608, 510609, 510610, 510611, 510612, 510613, 510614, 510616, 510617, 510618, 510622, 510623, 510625, 510629, 510630, 510634, 510635, 510636, 510637, 510638, 510639, 510640, 510641, 510643, 510644, 510645, 510646, 510648, 510649, 510651, 510652, 510653, 510654, 510658, 510662, 510663, 510664, 510665, 510666, 510667, 510668, 510669, 510671, 510673, 510677, 510678, 510679, 510682, 510685, 510692, 510696, 510697, 510698, 510699, 510701, 510703, 510710, 510716, 510722, 510725, 510726, 510727, 510730, 510733, 510734, 510738, 510741, 510743, 510753, 510755, and 510757. The oligonucleotides may incorporate various chemical modifications, additions, deletions, insertions, substitutions or other modifications so long as functional aspects of the oligonucleotides are enhanced or maintained in whole or in part.

[0504] In another embodiment, the disease or disorder comprises a renal cell carcinoma and the oligonucleotide or plurality of oligonucleotides useful for characterization thereof comprises at least 1, 2, 3, 4, 5, 6, 7, 8, 9, 10, 11, 12, 13, 14, 15, 16, 17, 18, 19, 20, 25, 30, 40, 45, 50 or all of SEQ ID NOs. 510600, 510603, 510604, 510606, 510608, 510614, 510616, 510622, 510628, 510629, 510630, 510632, 510634, 510635, 510640, 510644, 510645, 510646, 510652, 510653, 510656, 510664, 510665, 510666, 510667, 510671, 510675, 510677, 510683, 510685, 510687, 510690, 510701, 510722, 510726, 510728, 510729, 510730, 510731, 510732, 510733, 510734, 510738, 510748, 510749, 510752, 510753, 510758, 510761, and 510762. The oligonucleotides may incorporate various chemical modifications, additions, deletions, insertions, substitutions or other modifications so long as functional aspects of the oligonucleotides are enhanced or maintained in whole or in part.

[0505] In still another embodiment, the disease or disorder comprises a squamous cell carcinoma of skin and the oligonucleotide or plurality of oligonucleotides useful for characterization thereof comprises at least 1, 2, 3, 4, 5, 6, 7, 8, 9, 10, 11, 12, 13, 14, 15, 16, 17, 18, 19, 20, 25, 30, 40, 45, 50 or all of SEQ ID NOs. 510618, 510622, 510626, 510639, 510641, 510642, 510650, 510658, 510673, 510674, 510683, 510696, 510708, 510712, 510717, 510720, 510722, 510723, 510724, 510727, 510729, 510743, 510745, 510746, 510747, 510752, 510753, 510754, 510755, 510756, 510759, 510761, and 510763. The oligonucleotides may incorporate various chemical modifications, additions, deletions, insertions, substitutions or other modifications so long as functional aspects of the oligonucleotides are enhanced or maintained in whole or in part.

[0506] In various embodiments, the disease or disorder comprises an adenocarcinoma of the stomach and the oligonucleotide or plurality of oligonucleotides useful for characterization thereof comprises at least 1, 2, 3, 4, 5, 6, 7, 8, 9, 10, 11, 12, 13, 14, 15, 16, 17, 18, 19, 20, 25, 30, 40, 45, 50 or all of SEQ ID NOs. 510600, 510604, 510608, 510609, 510612, 510626, 510631, 510632, 510634, 510639, 510653, 510658, 510663, 510667, 510681, 510689, 510692, 510693, 510696, 510698, 510699, 510705, 510711, 510715, 510717, 510719, 510723, 510725, 510729, 510731, 510734, 510735, 510736, 510743, 510746, 510748, 510751, 510754, 510757, 510760, 510762, and 510763. The oligonucleotides may incorporate various chemical modifications, additions, deletions, insertions, substitutions or other modifications so long as functional aspects of the oligonucleotides are enhanced or maintained in whole or in part.

[0507] The disease or disorder may comprise a carcinoma of the thyroid gland and the oligonucleotide or plurality of oligonucleotides useful for characterization thereof comprises at least 1, 2, 3, 4, 5, 6, 7, 8, 9, 10, 11, 12, 13, 14, 15, 16, 17, 18, 19, 20, 25, 30, 40, 45, 50 or all of SEQ ID NOs. 510602, 510603, 510614, 510626, 510638, 510641, 510644, 510646, 510653, 510658, 510659, 510661, 510662, 510674, 510689, 510693, 510695, 510698, 510699, 510701, 510704, 510705, 510708, 510717, 510718, 510722, 510727, 510731, 510734, 510736, 510739, 510740, 510741, 510747, 510753, and 510755. The oligonucleotides may incorporate various chemical modifications, additions, deletions, insertions, substitutions or other modifications so long as functional aspects of the oligonucleotides are enhanced or maintained in whole or in part.

[0508] The disease or disorder may also comprise a testicular cancer and the oligonucleotide or plurality of oligonucleotides useful for characterization thereof comprises at least 1, 2, 3, 4, 5, 6, 7, 8, 9, 10, 11, 12, 13, 14, 15, 16, 17, 18, 19, 20, 25, 30, 40, 45, 50 or all of SEQ ID NOs. 510600, 510603, 510607, 510615, 510616, 510618, 510619, 510621, 510622, 510623, 510624, 510630, 510636, 510637, 510641, 510644, 510645, 510647, 510650, 510654, 510655, 510656, 510657, 510659, 510662, 510665, 510670, 510673, 510674, 510681, 510684, 510685, 510687, 510688, 510689, 510690, 510692, 510693, 510695, 510696, 510698, 510700, 510701, 510704, 510707, 510712, 510713, 510717, 510718, 510726, 510734, 510737, 510738, 510739, 510740, 510742, 510747, 510756, and 510757. The oligonucleotides may incorporate various chemical modifications, additions, deletions, insertions, substitutions or other modifications so long as functional aspects of the oligonucleotides are enhanced or maintained in whole or in part.

[0509] The disease or disorder can be ulcerative colitis and the oligonucleotide or plurality of oligonucleotides useful for characterization thereof comprises at least 1, 2, 3, 4, 5, 6, 7, 8, 9, 10, 11, 12, 13, 14, 15, 16, 17, 18, 19, 20, 25, 30, 40, 45, 50 or all of SEQ ID NOs. 510599, 510607, 510611, 510612, 510616, 510620, 510621, 510622, 510624, 510626, 510632, 510633, 510636, 510646, 510655, 510659, 510672, 510673, 510675, 510676, 510677, 510682, 510684, 510691, 510692, 510702, 510703, 510704, 510705, 510706, 510707, 510709, 510710, 510715, 510721, 510723, 510724, 510728, 510729, 510730, 510731, 510735, 510736, 510737, 510739, 510740, 510741, 510743, 510744, 510748, 510751, 510752, 510754, 510757, 510758, 510759, 510760, 510761, and 510762. In a related embodiment, the disease or disorder comprises ulcerative colitis and the oligonucleotide or plurality of oligonucleotides useful for characterization thereof comprises at least 1, 2, 3, 4, 5, 6, 7, 8, 9, 10, 11, 12, 13, 14, 15, 16, 17, 18, 19, 20, 25, 30, 40, 45, 50 or all of SEQ ID NOs. 510610, 510611, 510612, 510619, 510622, 510623, 510634, 510635, 510641, 510647, 510648, 510654, 510657, 510664, 510668, 510670, 510671, 510676, 510677, 510678, 510679, 510689, 510691, 510696, 510701, 510703, 510704, 510710, 510722, 510734, 510742, and 510753. The oligonucleotides may incorporate various chemical modifications, additions, deletions, insertions, substitutions or other modifications so long as functional aspects of the oligonucleotides are enhanced or maintained in whole or in part.

[0510] The disease or disorder can also be a uterine adenocarcinoma and the oligonucleotide or plurality of oligonucleotides useful for characterization thereof comprises at least 1, 2, 3, 4, 5, 6, 7, 8, 9, 10, 11, 12, 13, 14, 15, 16, 17, 18, 19, 20, 25, 30, 40, 45, 50 or all of SEQ ID NOs. 510601, 510612, 510621, 510626, 510637, 510641, 510644, 510650, 510653, 510669, 510675, 510684, 510686, 510687, 510696, 510714, 510717, 510722, 510739, 510743, 510745, 510746, 510753, 510755, and 510762. The oligonucleotides may incorporate various chemical modifications, additions, deletions, insertions, substitutions or other modifications so long as functional aspects of the oligonucleotides are enhanced or maintained in whole or in part.

[0511] In an aspect, the invention provides a kit comprising a reagent for carrying out the methods of the invention provided herein. In a similar aspect, the invention contemplates use of a reagent for carrying out the methods of the invention provided herein. In embodiments, the reagent comprises an oligonucleotide or plurality of oligonucleotides. The oligonucleotide or plurality of oligonucleotides can be those provided herein. The reagent may comprise various other useful components including without limitation one or more of: a) a reagent configured to isolate a microvesicle, optionally wherein the at least one reagent configured to isolate a microvesicle comprises a binding agent to a microvesicle antigen, a column, a substrate, a filtration unit, a polymer, polyethylene glycol, PEG4000, PEG8000, a particle or a bead; b) at least one oligonucleotide configured to act as a primer or probe in order to amplify, sequence, hybridize or detect the oligonucleotide or plurality of oligonucleotides; and c) a reagent configured to remove one or more abundant protein from a sample, wherein optionally the one or more abundant protein comprises at least one of albumin, immunoglobulin, fibrinogen and fibrin.

[0512] Optimized Oligonucleotide Library Construction

[0513] As described herein, individual aptamers and oligonucleotide probe libraries are generated by screening or enriching an input oligonucleotide library against one or more target of interest. The input library may be referred to as a starting or naïve oligonucleotide library and may comprise at least 1, 2, 3, 4, 5, 6, 7, 8, 9, 10, 11, 12, 13, 14, 15, 16, 17, 18, 19, 20, 25, 30, 40, 45, 50, 55, 60, 65, 70, 75, 80, 85, 90, 95, 100, 125, 150, 175, 200, 300, 400, 500, 600, 700, 800, 900, 1000, 2000, 3000, 4000, 5000, 6000, 7000, 8000, 9000, 10000, 20000, 30000, 40000, 50000, 60000, 70000, 80000, 90000, 100000, 200000, 300000, 400000, 500000, 10⁶, 10⁷, 10⁸, 10⁹, 10¹⁰, 10¹¹, 10¹², 10¹³, 10¹⁴, 10¹⁵, 10¹⁶, 10¹⁷, or at least 10¹⁸ different oligonucleotide sequences. The library typically comprises known sequences on the 5′ and/or 3′ ends to facilitate primer binding, probe binding, hybridization, amplification, sequencing and the like. These flanking regions may surround a section comprising randomly generated sequences that create the library diversity. The invention provides oligonucleotide sequences that enhance both the flanking and variable regions used for library construction. Such constructs may enhance any desired characteristic of the naïve library for use in screening and enrichment applications, including without limitation synthesis, diversity, and sequence determination. The enhanced flanking and variable regions of the invention may be used separately or together. See Examples 19 and 23 herein for illustrative examples.

[0514] In an aspect, the invention provides a composition comprising an input oligonucleotide library for assessing a cellular or extracellular vesicle sample comprising at least two subset oligonucleotide libraries to generate the input oligonucleotide library, wherein at least one of the at least two subset oligonucleotide libraries are manufactured with amounts of nucleotides with a total G and C content that is not equal to 50%. For example, the total G and C content can be less than 50%, or the total G and C content can be more than 50%. In one embodiment, at least one subset library is manufactured with a total G and C content that is more than 50% and another subset library is manufactured with a total G and C content less than 50%. In an embodiment, the at least two subset libraries comprises three subset libraries manufactured with 25%, 50% and 75% G and C content, respectively. The at least two subset libraries can be manufactured with amounts of nucleotides similar or equal to at least two rows in Table 13. The nucleotides can consist of naturally occurring nucleotides or modified naturally occurring nucleotides as desired. The nucleotides can also comprise non-naturally occurring nucleotides. Such input oligonucleotide libraries may be referred to as “GC” libraries herein. The GC libraries may be generated as the variable region in a naïve input library for further screening or enrichment purposes. See Example 19.

[0515] In a related aspect, the invention provides a method of generating an input oligonucleotide library of the invention, comprising contacting the at least two subset oligonucleotide libraries to generate the input oligonucleotide library. The input oligonucleotide library can be screened or enriched to provide various aptamers or oligonucleotide probe libraries using the methods described herein.

[0516] In an aspect, the invention provides an oligonucleotide having a sequence that comprises a 5′ transposon adapter region, an offset region comprising 0 or more nucleotides located 5′ to the transposon adapter region, a variable region located 5′ to the offset region, and a left primer region located 5′ to the variable region. In a related aspect, the invention provides a plurality of oligonucleotides comprising at least 1, 2, 3, 4, 5, 6, 7, 8, 9, 10, 11, 12, 13, 14, 15, 16, 17, 18, 19, 20, 25, 30, 40, 45, 50, 55, 60, 65, 70, 75, 80, 85, 90, 95, 100, 125, 150, 175, 200, 300, 400, 500, 600, 700, 800, 900, 1000, 2000, 3000, 4000, 5000, 6000, 7000, 8000, 9000, 10000, 20000, 30000, 40000, 50000, 60000, 70000, 80000, 90000, 100000, 200000, 300000, 400000, 500000, 10⁶, 10⁷, 10⁸, 10⁹, 10¹⁰, 10¹¹, 10¹², 10¹³, 10¹⁴, 10¹⁵, 10¹⁶, 10¹⁷, or at least 10¹⁸ different oligonucleotide sequences, wherein each of the oligonucleotide sequences comprises a 5′ transposon adapter region, an offset region comprising 0 or more nucleotides located 5′ to the transposon adapter region, a variable region located 5′ to the offset region, and a left primer region located 5′ to the variable region. Such oligonucleotides may be referred to herein as “balanced” oligonucleotides. See Example 23.

[0517] The balanced oligonucleotide or plurality of balanced oligonucleotides of the invention can be such that: a) the transposon adapter region comprises 20-40 nucleotides; b) the offset region comprises 0, 1, 2, 3, 4, 5, 6, 7, 8, 9 or 10 nucleotides; c) the variable region comprises 20-50 nucleotides; and/or d) the left primer region comprises 20-40 nucleotides. In some embodiments, the balanced oligonucleotides are such that: a) the transposon adapter region comprises a nucleic acid sequence that is at least about 50, 55, 60, 65, 70, 75, 80, 85, 90, 95, 96, 97, 98, 99 or 100 percent homologous to the sequence 5′-TCGTCGGCAGCGTCAGATGTGTATAAGAGACAG (SEQ ID NO. 510764); b) the offset region comprises 1, 2, 3, 4, 5, 6, 7, 8, 9 or 10 nucleotides that are at least about 50, 55, 60, 65, 70, 75, 80, 85, 90, 95, 96, 97, 98, 99 or 100 percent homologous to at least one of the following sequences: 5′-T (SEQ ID NO. 510765), 5′-CT (SEQ ID NO. 510766) and 5′-ACT (SEQ ID NO. 510767); c) the variable region comprises 10, 11, 12, 13, 14, 15, 16, 17, 18, 19, 20, 21, 22, 23, 24, 25 26 27, 28, 29, 30, 31, 32, 33, 34, 35, 36, 37, 38, 39, 40, 41, 42, 43, 44, 45, 46, 47, 48, 49, 50, or more than 50 nucleotides; and/or d) the left primer region comprises a nucleic acid sequence that is at least about 50, 55, 60, 65, 70, 75, 80, 85, 90, 95, 96, 97, 98, 99 or 100 percent homologous to a sequence selected from SEQ ID NOs. 510768 and 510769. The variable region may comprise “GC” library sequences as provided herein.

[0518] In an aspect, the invention provides a method of identifying an aptamer, comprising performing a selection or enrichment process using a balanced oligonucleotide or plurality of balanced oligonucleotides as a naïve input library. Such selection or enrichment processes are described or provided herein, including without limitation SELEX and variations thereof. In an embodiment, the selection process comprises at least one round of positive selection against a target of interest and optionally at least one round of negative selection against a target other than the target of interest.

[0519] In another aspect, the invention provides a method comprising contacting a balanced oligonucleotide or plurality of balanced oligonucleotides with a sample and detecting the presence or level of binding of the oligonucleotide or plurality of oligonucleotides to a target in the sample. The sample may comprise a biological sample, such as an organic sample, an inorganic sample, a tissue, a cell culture, a bodily fluid, blood, serum, a cell, a microvesicle, a protein complex, a lipid complex, a carbohydrate, or any combination, fraction or variation thereof. The target can be any useful target, including without limitation a cell, an organelle, a protein complex, a lipoprotein, a carbohydrate, a microvesicle, a membrane fragment, a small molecule, a heavy metal, a toxin, or a drug.

[0520] In a related aspect, the invention provides a method comprising: a) contacting a biological sample comprising microvesicles with an oligonucleotide probe library, wherein the oligonucleotide probe library comprises a balanced oligonucleotide or plurality of balanced oligonucleotides; b) identifying oligonucleotides bound to at least a portion of the microvesicles; and c) characterizing the sample based on a profile of the identified oligonucleotides.

[0521] In another related aspect, the invention provides a method comprising: a) contacting a sample with an oligonucleotide probe library comprising at least 10⁶, 10⁷, 10⁸, 10⁹, 10¹⁰, 10¹¹, 10¹², 10¹³, 10¹⁴, 10¹⁵, 10¹⁶, 10¹⁷, or at least 10¹⁸ different oligonucleotide sequences oligonucleotides to form a mixture in solution, wherein the oligonucleotides are capable of binding a plurality of entities in the sample to form complexes, wherein the oligonucleotide probe library comprises a balanced oligonucleotide or plurality of balanced oligonucleotides; d) partitioning the complexes formed in step (a) from the mixture; and c) detecting oligonucleotides present in the complexes partitioned in step (b) to identify an oligonucleotide profile for the sample. In a related aspect, the invention provides a method of characterizing a disease or disorder, comprising: a) contacting a biological test sample with a balanced oligonucleotide or plurality of balanced oligonucleotides; b) detecting a presence or level of complexes formed in step (a) between the balanced oligonucleotide or plurality of balanced oligonucleotides and a target in the biological test sample; and c) comparing the presence or level detected in step (b) to a reference level from a biological control sample, thereby characterizing the disease or disorder. The step of detecting may comprise performing sequencing of all or some of the oligonucleotides in the complexes, amplification of all or some of the oligonucleotides in the complexes, and/or hybridization of all or some of the oligonucleotides in the complexes to an array. In some embodiments, the sequencing comprises high-throughput sequencing.

[0522] In the methods of the invention comprising use of a balanced oligonucleotide or plurality of balanced oligonucleotides, the biological test sample and biological control sample may each comprise a tissue sample, a cell culture, or a biological fluid. In some embodiments, the biological fluid comprises a bodily fluid. Useful bodily fluids within the method of the invention comprise peripheral blood, sera, plasma, ascites, urine, cerebrospinal fluid (CSF), sputum, saliva, bone marrow, synovial fluid, aqueous humor, amniotic fluid, cerumen, breast milk, broncheoalveolar lavage fluid, semen, prostatic fluid, cowper's fluid or pre-ejaculatory fluid, female ejaculate, sweat, fecal matter, hair, tears, cyst fluid, pleural and peritoneal fluid, pericardial fluid, lymph, chyme, chyle, bile, interstitial fluid, menses, pus, sebum, vomit, vaginal secretions, mucosal secretion, stool water, pancreatic juice, lavage fluids from sinus cavities, bronchopulmonary aspirates, blastocyl cavity fluid, or umbilical cord blood. In some preferred embodiments, the bodily fluid comprises blood, serum or plasma. The biological fluid may comprise microvesicles. In such case, the complexes may be formed between the oligonucleotide or plurality of oligonucleotides and at least one of the microvesicles. The biological test sample and biological control sample may further comprise isolated microvesicles, wherein optionally the microvesicles are isolated using at least one of chromatography, filtration, ultrafiltration, centrifugation, ultracentrifugation, flow cytometry, affinity capture (e.g., to a planar surface, column or bead), polymer precipitation, and using microfluidics. The vesicles can also be isolated after contact with the oligonucleotide or plurality of oligonucleotides.

[0523] In various embodiments of the methods of the invention comprising use of a balanced oligonucleotide or plurality of balanced oligonucleotides, the oligonucleotide or plurality of oligonucleotides binds a polypeptide or fragment thereof. The polypeptide or fragment thereof can be soluble or membrane bound, wherein optionally the membrane comprises a microvesicle membrane. The membrane could also be from a cell or a fragment of a cell of vesicle. In some embodiments, the polypeptide or fragment thereof comprises a biomarker in Table 3 or Table 4. For example, the polypeptide or fragment thereof could be a general vesicle marker such as in Table 3 or a tissue-related or disease-related marker such as in Table 4. The oligonucleotide or plurality of oligonucleotides may bind a microvesicle surface antigen in the biological sample. For example, the oligonucleotide or plurality of oligonucleotides can be enriched from a naïve library against microvesicles.

[0524] The disease or disorder detected by the oligonucleotide, plurality of oligonucleotides, or methods provided herein comprising use of a balanced oligonucleotide or plurality of balanced oligonucleotides may comprise any appropriate disease or disorder of interest. For example, the disease or disorder may comprise a cancer, a premalignant condition, an inflammatory disease, an immune disease, an autoimmune disease or disorder, a cardiovascular disease or disorder, a neurological disease or disorder, an infectious disease, and/or pain. See, e.g., section “Phenotypes” herein. The disease or disorder may include without limitation Breast Cancer, Alzheimer's disease, bronchial asthma, Transitional cell carcinoma of the bladder, Giant cellular osteoblastoclastoma, Brain Tumor, Colorectal adenocarcinoma, Chronic obstructive pulmonary disease (COPD), Squamous cell carcinoma of the cervix, acute myocardial infarction (AMI)/acute heart failure, Chron's Disease, diabetes mellitus type II, Esophageal carcinoma, Squamous cell carcinoma of the larynx, Acute and chronic leukemia of the bone marrow, Lung carcinoma, Malignant lymphoma, Multiple Sclerosis, Ovarian carcinoma, Parkinson disease, Prostate adenocarcinoma, psoriasis, Rheumatoid Arthritis, Renal cell carcinoma, Squamous cell carcinoma of skin, Adenocarcinoma of the stomach, carcinoma of the thyroid gland, Testicular cancer, ulcerative colitis, or Uterine adenocarcinoma.

The invention further provides a kit comprising a reagent for carrying out the methods herein and also use of the reagent for carrying out the methods related to GC libraries or balanced oligonucleotides of the invention. For example, the reagent may comprise one or more oligonucleotide having a sequence derived from a GC libraries and/or a balanced oligonucleotide library. The reagent may further comprise other useful components disclosed herein including without limitation at least one of: a) a reagent configured to isolate a microvesicle, optionally wherein the at least one reagent configured to isolate a microvesicle comprises a binding agent to a microvesicle antigen, a column, a substrate, a filtration unit, a polymer, polyethylene glycol, PEG4000, PEG8000, a particle or a bead; b) at least one oligonucleotide configured to act as a primer or probe in order to amplify, sequence, hybridize or detect the oligonucleotide or plurality of oligonucleotides; and c) a reagent configured to remove one or more abundant protein from a sample, wherein optionally the one or more abundant protein comprises at least one of albumin, immunoglobulin, fibrinogen and fibrin.

### Kits

[0525] The invention also provides a kit comprising one or more reagent to carry out the methods of the invention. For example, the one or more reagent can be the one or more aptamer, a buffer, blocker, enzyme, or combination thereof. The one or more reagent may comprise any useful reagents for carrying out the subject methods, including without limitation aptamer libraries, substrates such as microbeads or planar arrays or wells, reagents for biomarker and/or microvesicle isolation (e.g., via chromatography, filtration, ultrafiltration, centrifugation, ultracentrifugation, flow cytometry, affinity capture (e.g., to a planar surface, column or bead), polymer precipitation, and/or using microfluidics), aptamers directed to specific targets, aptamer pools that facilitate detection of a biomarker/microvesicle population, reagents such as primers for nucleic acid sequencing or amplification, arrays for nucleic acid hybridization, detectable labels, solvents or buffers and the like, various linkers, various assay components, blockers, and the like. The one or more reagent may also comprise various compositions provided by the invention. In an embodiment, the one or more reagent comprises one or more aptamer of the invention. The one or more reagent can comprise a substrate, such as a planar substrate, column or bead. The kit can contain instructions to carry out various assays using the one or more reagent.

[0526] In an embodiment, the kit comprises an aptamer or composition provided herein. The kit can be configured to carry out the methods provided herein. For example, the kit can include an aptamer of the invention, a substrate, or both an aptamer of the invention and a substrate.

[0527] In an embodiment, the kit is configured to carry out an assay. For example, the kit can contain one or more reagent and instructions for detecting the presence or level of a biological entity in a biological sample. In such cases, the kit can include one or more binding agent to a biological entity of interest. The one or more binding agent can be bound to a substrate.

[0528] In an embodiment, the kit comprises a set of aptamers that provide a particular aptamer profile for a biological sample. An aptamer profile can include, without limitation, a profile that can be used to characterize a particular disease or disorder. For example, the disease or disorder can be a proliferative disease or disorder, including without limitation a cancer. The disease or disorder can be selected from a disease or disorder in Table 16.

### EXAMPLES

### Example 1

### Identification of DNA Oligonucleotides that Bind a Target

[0529] The target is affixed to a solid substrate, such as a glass slide or a magnetic bead. For a magnetic bead preparation, beads are incubated with a concentration of target protein ranging from 0.1 to 1 mg/ml. The target protein is conjugated to the beads according to a chemistry provided by the particular bead manufacturer. Typically, this involves coupling via an N-hydroxysuccinimide (NHS) functional group process. Unoccupied NHS groups are rendered inactive following conjugation with the target.

[0530] Randomly generated oligonucleotides (oligos) of a certain length, such as 32 base pairs long, are added to a container holding the stabilized target. Each oligo contains 6 thymine nucleotides (a “thymine tail”) at either the 5 or 3 prime end, along with a single molecule of biotin conjugated to the thymine tail. Additional molecules of biotin could be added. Each oligo is also manufactured with a short stretch of nucleotides on each end (5-10 base pairs long) corresponding to amplification primers for PCR (“primer tails”). The sequences are shown absent the thymine tails or primer tails.

[0531] The oligonucleotides are incubated with the target at a specified temperature and time in phosphate-buffered saline (PBS) at 37 degrees Celsius in 500 microliter reaction volume.

[0532] The target/oligo combination is washed 1-10 times with buffer to remove unbound oligo. The number of washes increases with each repetition of the process (as noted below).

[0533] The oligos bound to the target are eluted using a buffer containing a chaotropic agent such as 7 M urea or 1% SDS and collected using the biotin tag. The oligos are amplified using the polymerase chain reaction using primers specific to 5′ and 3′ sequences added to the randomized region of the oligos. The amplified oligos are added to the target again for another round of selection. This process is repeated as desired to observe binding enrichment.

### Example 2

### Competitive Assay

[0534] The process is performed as in Example 1 above, except that a known ligand to the target, such as an antibody, is used to elute the bound oligo species (as opposed to or in addition to the chaotropic agent). In this case, anti-EpCAM antibody from Santa Cruz Biotechnology, Inc. was used to elute the aptamers from the target EpCAM.

### Example 3

### Screening and Affinity Analysis

[0535] All aptamers generated from the binding assays described above are sequenced using a high-throughput sequencing platform, such as the Ion Torrent from Life Technologies:

[0536] Library Preparation—

[0537] Aptamers were pooled after ligating barcodes and adapter sequences (Life Technologies) according to manufacturer protocols. In brief, equimolar pools of the aptamers were made using the following steps: Analyzed an aliquot of each library with a Bioanalyzer™ instrument and Agilent DNA 1000 Kit or Agilent High Sensitivity Kit, as appropriate for the final library concentration. The molar concentration (nmol/L) of each amplicon library was determined using the commercially available software (Agilent).

[0538] An equimolar pool of the library was prepared at the highest possible concentration.

[0539] The combined concentration of the pooled library stock was calculated.

[0540] The template dilution factor of the library pool was determined using the following equation:

Template Dilution Factor=(Library pool concentration [pM])/26 pM).

[0541] Template Preparation—

[0542] Using a freshly diluted library, the aptamer pool resulting from binding assays provided above were sequenced using conventional sequencing protocols. High throughput (NextGen) sequencing methods can be used as desired.

[0543] Twenty aptamers were selected based on direct or competitive assays assessing binding to EpCAM (as described above).

[0544] Affinity Measurements—

[0545] These twenty aptamers were then tested for binding affinity using an in vitro binding platform. SPR can be used for this step, e.g., a Biacore SPR machine using the T200 control software, as follows:

[0546] Dilute the antigen to a concentration of 32 nM.

[0547] Prepare necessary dilutions for kinetics, starting at 32 nM prepare two-fold dilutions of antigen down to 0.5 nM.

[0548] The Biacore 200 control software is programmed with the following conditions: Solution: HBS-EP+ Buffer; Number of cycles: 3; Contact time: 120s; Flow rate: 30 μl/min; Dissociation time: 300s; Solution: Glycine-HCl pH 2.5; Contact time: 120s; Flow rate: 20 μl/min; Stabilization period: 0s. The binding affinities of these aptamers are then measured using the SPR assay above, or an alternate in vitro assay assessing the aptamer for a desired function.

[0549] FIG. 5 shows the SPR data for aptamer BTX176881 (SEQ ID NO: 3). The figure comprises an association and dissociation graph of 1:1 fitting model of the biotinylated aptamers to EpCAM protein at the indicated concentrations (nM). Table 5 shows the calculated K_{d} values from the SPR measurements that are illustrated in FIG. 5. In addition, Table 5 shows the SPR data and calculated K_{d} values for BTX187269 (SEQ ID NO: 6) and Aptamer 4 (SEQ ID NO. 1).

TABLE 5
Calculated K_{D} values from SPR measurements

| Immobilized | | Conc | Re- | | | |
|---|---|---|---|---|---|---|
| aptamer | Analyte | (nM) | sponse | K_{d} (nM) | Full R² | Full Chi² |
| BTX176881 | EpCAM | 500 | 0.2434 | 8.40 | 0.989322 | 0.179008 |
| (SEQ ID No: | protein | 250 | 0.136 | 8.40 | 0.989322 | 0.179008 |
| 3) | | 100 | 0.0776 | 8.40 | 0.989322 | 0.179008 |
| BTX187269 | EpCAM | 500 | 0.2575 | 7.12 | 0.990323 | 0.215697 |
| (SEQ ID | protein | 250 | 0.1584 | 7.12 | 0.990323 | 0.215697 |
| NO: 6) | | 100 | 0.0551 | 7.12 | 0.990323 | 0.215697 |
| Aptamer 4 | EpCAM | 500 | 0.2742 | 10.10 | 0.986276 | 0.299279 |
| (SEQ ID | protein | 250 | 0.1618 | 10.10 | 0.986276 | 0.299279 |
| NO. 1) | | 100 | 0.0809 | 10.10 | 0.986276 | 0.299279 |

*K_{d}, R² and Chi² values by Global fitting for single reference method.

### Example 4

### Motif Analysis

[0550] The process of Example 3 is followed to identity a high affinity aptamer to a target of interest. Once a high affinity aptamer is identified, its sequence is then analyzed using a software program to estimate its two-dimensional folding structure. Well-known sequence alignment programs and algorithms for motif identification can be used to identify sequence motifs and reduce the dimensionality of even large data sets of sequences. Further, software programs such as Vienna and mfold are well-known to those skilled in the art of aptamer selection and can be used to further group sequences based on secondary structure motifs (shared shapes). See FIG. 3A and FIG. 3B for example structure predictions. Shared secondary structure of course, does not guarantee identical three-dimensional structure. Therefore “wet-lab” validation of aptamers is still useful as no one set of in silico tools has yet been able to fully predict the optimal aptamer among a set of aptamer candidates.

### Example 5

### Microvesicle-Based Aptamer Subtraction Assay

[0551] Circulating microvesicles are isolated from normal plasma (e.g., from individuals without cancer) using one of the following methods: 1) Isolation using the ExoQuick reagent according to manufacturer's protocol; 2) Ultracentrifugation comprising spin at 50,000 to 150,000 g for 1 to 20 hours then resuspending the pellet in PBS; 3) Isolation using the TEXIS reagent from Life Technologies according to manufacturer's protocol; and 4) filtration methodology. The filtration method is described in more detail as follows:

[0552] Place syringe and filter (1.2 μm Acrodisc Syringe Filter Versapor Membrane Non-Pyrogenic Ref: 4190, Pall Life Sciences) on open 7 ml 150K MWCO column (Pierce concentrators, 150K MWCO (molecular weight cut off) 7 ml. Part number: 89922). Fill open end of syringe with 5.2 ml of filtered 1×PBS prepared in sterile molecular grade water.

[0553] Pipette patient plasma (900-1000 μl) into the PBS in the syringe, pipette mix twice

[0554] Filter the plasma into the 7 ml 150K MWCO column.

[0555] Centrifuge 7 ml 150K MWCO columns at 2000×g at 20° C. (16° C. to 24° C.) for 1 hour.

[0556] After 1 hour spin, pour the flow-through into 10% bleach to be discarded.

[0557] Visually inspect sample volume. If plasma concentrate is above the 8.5 ml graduation on the concentrator tube, continue to spin plasma sample at 10 minute increments at 2000×g at 20° C. (16° C. to 24° C.) checking volume after each spin until plasma concentrate is between 8.0 and 8.5 mls.

[0558] Pipette mix slowly on the column a minimum of 6 times and adjust pipette to determine plasma concentrate volume. If volume is between 100 μl and Target Volume, transfer plasma concentrate to previously labeled co-polymer 1.5 ml tube. If volume is still greater than Target Volume, repeat the above centrifugation step.

[0559] Pour ˜45 mls of filtered 1×PBS prepared in sterile molecular grade water into 50 ml conical tube for use in the next step.

[0560] Add the appropriate amount of filtered 1×PBS to reconstitute the sample to the Target Volume.

[0561] The microvesicles produced using any of the isolation methods will comprise a mixture of vesicle types and will be various sizes with the possible exception of the ultracentrifugation methods, which may favor isolating exosome size particles.

[0562] Randomly generated oligonucleotides (produced as described in Example 1 above) are incubated with the isolated normal vesicles in PBS overnight at room temperature or at 4 degrees Celsius.

[0563] The aptamers that do not bind to these vesicles are isolated by spinning down the vesicles at 50,000 to 150,000×g for 1 to 20 hours and collecting the supernatant.

[0564] The aptamer oligonucleotides are collected from the supernatant by running the mixture over a column containing streptavidin-coated beads. These aptamers are then added to vesicles isolated from diseased patients (using the same methods as above) and incubated overnight in PBS at room temperature or 4 degrees Celsius.

[0565] The vesicles are then spun at 50,000 to 150,000×g for 1 to 20 hours and the supernatant is discarded. The vesicles are resuspended in PBS and lysed using SDS or some similar detergent.

[0566] The aptamers are then captured by running the lysis mixture over a column of streptavidin-coated beads. The isolated aptamers are then subjected to a round of PCR to amplify the products.

[0567] The process is then repeated for a set number of times, e.g., 5 times. The remaining aptamer pool has been depleted of aptamers that recognize microvesicles found in “normal” plasma. Accordingly, this method can be used to enrich the pool in aptamers that recognize cancer vesicles. See FIG. 4.

### Example 6

### Detection of Microvesicles Using Anti-EpCAM Aptamers

[0568] Aptamers can be used as binding agents to detect a biomarker. In this Example, aptamers are used as binding agents to detect EpCAM protein associated with microvesicles.

[0569] FIG. 6 illustrates the use of an anti-EpCAM aptamer (Aptamer 4; SEQ ID NO. 1) to detect a microvesicle population in plasma samples. Plasma samples were obtained from three men with prostate cancer and three men without prostate cancer (referred to as controls or normals). Antibodies to the following microvesicle surface protein antigens of interest were conjugated to microbeads (Luminex Corp, Austin, Tex.): FIG. 6A) EGFR (epidermal growth factor receptor); FIG. 6B) PBP (prostatic binding protein; also known as PEBP1 (phosphatidylethanolamine binding protein 1)); FIG. 6C) EpCAM (epithelial cell adhesion molecule); and FIG. 6D) KLK2 (kallikrein-related peptidase 2). Microvesicles in the plasma samples were captured using the bead-conjugated antibodies. Fluorescently labeled Aptamer 4 was used as a detector in the microbead assay. FIG. 6 shows the average median fluorescence values (MFI values) detected for the bead-captured and Aptamer 4 detected microvesicles. Each plot individually shows the three cancer (C1-C3) and three normal samples (N1-N3). These data show that, on average, the prostate cancer samples have higher levels of microvesicles containing the target proteins than the normals.

### Example 7

### Negative and Positive Selection of Aptamers

[0570] Aptamers can be used in various biological assays, including numerous types of assays which rely on a binding agent. For example, aptamers can be used instead of antibodies in immune-based assays. This Example provides an aptamer screening method that identifies aptamers that do not bind to any surfaces (substrates, tubes, filters, beads, other antigens, etc.) throughout the assay steps and bind specifically to an antigen of interest. The assay relies on negative selection to remove aptamers that bind non-target antigen components of the final assay. The negative selection is followed by positive selection to identify aptamers that bind the desired antigen.

[0571] Preliminary experiments were done with five DNA aptamer libraries with 10¹⁵ sequences each and variable lengths (60, 65, 70, 75, 80-mers) were pre-amplified and strand separated so that forward strand (non-biotinylated) serves as an aptamer. Multiple rounds of negative selection and positive selection were performed. Before each round, the recovered aptamer products were PCR amplified and strand separated using standard methodology. Selections were performed as follows:

[0572] Negative Selection

[0573] 1. Prepare bead negative Selection Mix: Incubate 1200 non-magnetic beads with standard blocking agent for 20 min.

[0574] 2. Add 50 μl of aptamer library (5 libraries total) to a PCR strip tube with 4.5 μl of each bead mixture. Incubate for 2 h at 37° C. with agitation at 550 rpm.

[0575] 3. Pre-wet filter plate (1.2 μm, Millipore) with PBS-BN buffer. Add 150 μl PBS-BN.

[0576] 4. Transfer samples from the PCR strip tubes to the filter plate, incubate for 1 h at room temperature with agitation at 550 rpm.

[0577] 5. Collect flow-through from filter plate into a collection (NBS) plate using a vacuum manifold.

[0578] 6. Concentrate and clean samples to remove excess materials as desired.

[0579] The negative selection process is repeated up to 6-7 times.

[0580] Positive Selection

[0581] Before starting, conjugate the protein biomarkers of interest (here, SSX4, SSX2, PBP, KLK2, SPDEF) to desired non-magnetic microbeads using conditions known in the art. The recombinant purified starting material included: SPDEF recombinant protein from Novus Biologicals (Littleton, Colo., USA), catalog number H00025803-P01; KLK2 recombinant protein from Novus, catalog number H00003817-P02; SSX2 recombinant protein from Novus, catalog number H00006757-P01; PBP recombinant protein from Fitzgerald Industries International (Action, MA, USA), catalog number 30R-1382; SSX4 recombinant protein from GenWay Biotech, Inc. (San Diego, Calif., USA), catalog number GWB-E219AC.

[0582] 1. Bead blocking: Incubate a desired number of each bead (8400×number of aptamer libraries (5)×an overage factor of (1.2)) with a starting block for 20 min.

[0583] 2. Mix 50 μl of each aptamer library sample to PCR strip tubes add 2.3 μl of bead sample with particular antigen. Incubate for 2 h at 37° C. with agitation at 550 rpm.

[0584] 3. Pre-wet filter plate (1.2 μm, Millipore) with PBS-BN buffer. Add 150 μl PBS-BN.

[0585] 4. Transfer samples from the PCR strip tubes to the filter plate, incubate for 1 h at room temperature with agitation at 550 rpm.

[0586] 5. Wash 3× with PBS-BN, add 50 μl of PBS and collect samples from the top of the filter to the 1.5 ml tubes.

[0587] The positive selection is repeated up to 16 times. Certain rounds of positive selection have additional steps to treat the recovered RNA (i.e., remaining aptamer candidates) as follows:

[0588] Round 8 of Positive Selection was Modified as Follows:

[0589] 1. After the third wash (PBS-BN) 25 μl of sample were collected from the top of the filter into 1.5 ml tubes.

[0590] 2. The filter plate was incubated at 45° C. for ˜10 min and washed immediately using vacuum. The plate was washed three more times with PBS-BN.

[0591] 3. 50 μl of PBS were added to the plate and step 2 was repeated.

[0592] 4. After the last wash, 25 μl of PBS was added to the wells. The samples were mixed well and collected from the top of the filter into 1.5 ml tubes.

[0593] Round 9 of Positive Selection was Modified as Follows:

[0594] 1. After the final wash in step 5), 5 μg/ml Streptavidin-PE was added to the aptamer mixture and incubated for 30 min at room temperature with agitation at 550 rpm.

[0595] 2. Samples on filter plate were washed 3× with PBS-BN (+ additional 500 mM NaCl).

[0596] 3. One additional wash with regular PBS-BN was performed.

[0597] 4. 50 μl of PBS was added to the samples followed by collection as above into 1.5 ml tubes.

[0598] 5. Samples stored at −20° C.

[0599] Round 14 of Positive Selection was Modified as Follows:

[0600] Before start this round, the antigens of interest (SSX4, SSX2, PBP, KLK2, SPDEF) were conjugated to carboxylated magnetic beads using methods known in the art.

[0601] 1. Bead blocking: take desired number of each non-magnetic bead (3000×number of aptamer libraries (5)×an overage factor of 1.2), add starting block (3:1, blocking per 1200 beads), make 5 mixes of 4 antigens and supplement each with different target antigen conjugated to magnetic beads (see Table 6 below, wherein the antigens are conjugated to non-magnetic beads except as indicated), incubate 20 min.

TABLE 6
Bead blocking mixtures

| Blocking | | Magnetic bead |
|---|---|---|
| Mix | Non-magnetic bead antigens | antigens |
| 1 | SSX4 + PBP + KLK2 + SPDEF | SSX2 |
| 2 | SSX2 + PBP + KLK2 + SPDEF | SSX4 |
| 3 | SSX2 + SSX4 + KLK2 + SPDEF | PBP |
| 4 | SSX2 + SSX4 + PBP + SPDEF | KLK2 |
| 5 | SSX2 + SSX4 + PBP + KLK2 | SPDEF |

[0602] 2. Add 50 μl of aptamer libraries to PCR strip tubes, add bead mixtures with target antigen on magnetic beads to the tubes with pre-selected corresponding aptamer library and incubate for 2 h at 37° C. with agitation at 550 rpm.

[0603] 3. Pre-wet filter plate with PBS-BN buffer, add 150 μl PBS-BN.

[0604] 4. Transfer samples from PCR strip tubes to filter plate, incubate 1 h room temperature with agitation at 550 rpm.

[0605] 5. After last (standard) wash, add 5 μg/ml Streptavidin-PE, incubate for 30 min room temperature with agitation at 550 rpm;

[0606] 6. Wash 3× with PBS-BN (+ additional 500 mM NaCl).

[0607] 7. Perform one additional wash with regular PBS-BN.

[0608] 8. 50 μl of PBS was added to the samples followed by collection as above into 1.5 ml tubes.

[0609] 9. Remove the magnetic beads using a magnetic stand, and replace with fresh PBS buffer.

[0610] 10. Samples stored at −20° C. for subsequent DNA extraction and strand separation.

[0611] Optional steps implemented in the later round of positive selection are intended to increase stringency of aptamer binding (e.g., increased heat or salt concentration).

### Example 8

### Discovery and Characterization of Anti-EpCAM Aptamers

[0612] In this Example, an aptamer to EpCAM identified using the technique in the Example above is characterized. After selection for a pool of EpCAM binding aptamers as described above, the aptamer library was sequenced using the Ion Torrent standard protocol (Life Technologies, Carlsbad, Calif.). Lead candidates were selected as those having (a) high abundant motifs across all read sequences with full expected length product and (b) strong secondary structure (FIG. 7B).

[0613] Aptamers were selected for EPCAM protein conjugated to MicroPlex beads in competition with SSX4, SSX2, PBP, KLK2, and SPDEF recombinant proteins. A portion of the aptamers was selected in initial rounds against EpCAM that was attached to an Fc tag, and after round 8 the selection was switched to EPCAM with a Histidine tag. Another portion of the aptamers was selected in initial rounds against EpCAM that was attached to a Histidine tag, and after round 8 the selection was switched to EPCAM with an Fc tag. Methods of using Fc and histidine tags for protein purification and capture are known to those of skill in the art.

[0614] Aptamer Characterization

[0615] CAR003 is an aptamer candidate identified using the above methodology. As an RNA aptamer, CAR003 with alternate tail sequence has the following RNA sequence (SEQ ID NO. 5):

5′-auccagagug acgcagcagu cuuuucugau ggacacgugg
uggucuagua ucacuaagcc accgugucca-3′

[0616] CAR003 was further characterized. EpCAM aptamer CAR003 is modified as desired by attachment of a biotin moiety on the 5′(CAR003.2_5′-B (SEQ ID NO. 4)) end or 3′ end (CAR003.2_3′-B (SEQ ID NO. 7)). The biotin can be used to bind the aptamer using a streptavidin-biotin system, e.g., for labeling, capture and/or anchoring. FIG. 7B illustrates the optimal secondary structure of CAR003 with a minimum free energy (ΔG) of −30.00 kcal/mol. For purposes of illustration, the aptamer is shown as an RNA aptamer (SEQ ID NO. 5) corresponding to the CAR003 DNA sequence (SEQ ID NOs. 4, 7).

[0617] Synthesis and Purification.

[0618] The selected CAR003 aptamer was re-synthesized using AKTA OligoPilot 100 Synthesizer (GE Healthcare Life Sciences Corp., Piscataway, N.J.) with a 3′Biotin and final detritylation. The product was purified with anion exchange chromatography by FPLC. Several fractions after FPLC were combined as shown as the indicated Pools 1-3 in FIG. 7C. The figure comprises an FPLC chromatogram with all product and fractions assigned in pools after checking quality on gel. FIG. 7D illustrates a SYBR GOLD stained gel with different FPLC fractions of CAR003 aptamer after synthesis. Different fractions were combined in pools based on amount of unfinished chains in order high to low (pool 1-pool 3). The pools 1-3 correspond to those indicated in FIG. 7C.

[0619] CAR003 Aptamer Characterization.

[0620] Purified CAR003 aptamer was tested for binding to recombinant EPCAM protein with a polyhistidine tag (“His tagged”) using the following internally developed assay. Anti-His tag conjugated beads were mixed with EPCAM-His tagged protein. The aptamer to be tested was labeled with streptavidin-phycoerythrin (SA-PE). The EpCAM-beads and SA-PE labeled aptamers were mixed. Binding was determined as median fluorescent value in a bead assay as described herein. MFI values (FIG. 7E-F) increase with increased binding of the SA-PE labeled aptamer to the recombinant EpCAM. FIG. 7E-F illustrate binding of CAR003 to EPCAM protein in 25 mM HEPES with PBS-BN (PBS, 1% BSA, 0.05% Azide, pH 7.4) (FIG. 7E) or in 25 mM HEPES with 1 mM MgCl₂ (FIG. 7F). EPCAM aptamer Aptamer 4 (see above) was used for comparison. As shown in the figures, CAR003 pool 3 more efficiently binds its target in the presence of MgCl₂ (FIG. 7F) than in the presence of BSA (FIG. 7E).

[0621] To understand its performance further, CAR003 binding was tested in the presence of both BSA and MgCl₂ in various buffers. FIG. 7G illustrates CAR003 binding to EpCAM in the indicated salts with and without addition of bovine serum albumin (BSA). Again, CAR003 binding to EpCAM is more efficient when BSA is not present. Additionally, 150 mM NaCl was tested but did not appear to improve CAR003 performance over MgCl₂.

[0622] Another factor which might influence performance of aptamer is denaturing with different salt compositions. FIG. 7H illustrates the effect of denaturing on CAR003 binding to EPCAM protein. As seen from the chart, denaturing of the aptamer has a postive effect on CAR003 binding to EpCAM similar as the effect on CAR003 from MgCl₂. However, denaturing in the presence of MgCl₂ may not synergistically improve binding of CAR003 to EpCAM. Interestingly, CAR003 appeared more stable compared to control Aptamer 4 in the conditions tested.

[0623] CAR003 affinity to EpCAM in the bead assay environment was assessed in the same assay as above with aptamer titrated across a constant input of antigen. FIG. 7I illustrates titration of aptamers against EPCAM recombinant protein (constant input 5 μg). Under the conditions tested, Aptamer 4 had a higher affinity to EPCAM protein compared to CAR003 as suggested from saturation level starting at 5 μg of aptamer input.

[0624] In order to evaluate specificity of CAR003, it was tested using Western Blot against EPCAM recombinant protein, and controls comprising bovine serum albumin (BSA) and human serum albumin (HSA). FIG. 7J illustrates a Western blot with CAR003 aptamer versus EPCAM his-tagged protein, BSA, and HSA (5 μg each). The gel was blocked 0.5% F127 and probed with ˜50 μg/ml CAR003 biotinylated aptamer, fraction 3. The blot was visualized with NeutrAvidin-HRP followed by SuperSignal West Femto Chemiluminescent Substrate. The Western blot probed with CAR003 aptamer showed a clear preference of the aptamer to EPCAM protein over the albumins.

[0625] CAR003 Test with Plasma Samples.

[0626] Plasma samples from five prostate cancer and five normal subjects were tested with CAR003 to detect microvesicles using bead-conjugated proteins to capture the microvesicles and SA-PE labeled aptamer to detect the vesicles. SA-PE labeled Aptamer 4 detector was used as control. Fold changes of Cancer over Normal are shown in Table 7. The fold changes are shown without normalization (“Raw”) or with normalization to a negative control. The vesicles were captured with bead conjugated antibodies to SSX4, PBP, SPDEF, EPCAM, KLK2 and SSX2 as indicated.

TABLE 7
CAR003 to detect microvesicles

| | | SSX4 | PBP | SPDEF | EPCAM | KLK2 | SSX2 |
|---|---|---|---|---|---|---|---|
| Raw | Standard protocol | 0.87 | 0.39 | 0.71 | 0.63 | 0.93 | 0.87 |
| | Incubation in | 0.77 | 0.39 | 0.69 | 0.6 | 0.91 | 0.81 |
| | presence of 1 mM | | | | | | |
| | MgCl2 and absence | | | | | | |
| | of PBS-BN | | | | | | |
| | Aptamer 4 control | 0.78 | 0.67 | 0.81 | 0.72 | 1.19 | 0.79 |
| | (standard protocol) | | | | | | |
| Normalized | Standard protocol | 1.49 | 0.84 | 1.13 | 1.17 | 1.5 | 1.38 |
| to Negative | Incubation in | 1.27 | 0.83 | 1.08 | 1.1 | 1.46 | 1.29 |
| control | presence of 1 mM | | | | | | |
| | MgCl2 and absence | | | | | | |
| | of PBS-BN | | | | | | |
| | Aptamer 4 control | 1.18 | 0.96 | 1.11 | 1.04 | 1.82 | 1.1 |
| | (standard protocol) | | | | | | |

[0627] Under the conditions tested, the samples detected with CAR003 had lower MFI values as compared to detection with Aptamer 4, whereas CAR003 had a better signal-to-noise ratio and showed better separation between cancer and normal samples with SSX4, SPDEF, EPCAM and SSX2 capturing markers.

[0628] Control Aptamer

[0629] The characteristics of the aptamers (size, stability, binding affinity and specificity, etc) can be compared against control aptamers specific to EpCAM or other targets. For example, the aptamers are compared to the anti-VEGF aptamer 5′ biotin-CA ATT GGG CCC GTC CGT ATG GTG GGT (SEQ ID NO. 22) as described in Kaur and Yung, 2012.

### REFERENCES

[0630] 1. Müller, J., et al. “Selection of high affinity DNA-aptamer for activated protein C using capillary electrophoresis.” Research in Pharmaceutical Sciences 7.5 (2012): S987.
[0631] 2. Cerchia, L., and V. de Franciscis. “Nucleic Acid Aptamers Against Protein Kinases.” Current medicinal chemistry 18.27 (2011): 4152-4158.
[0632] 3. Wu, Jie, et al. “Identification. Characterization and Application of a G-Quadruplex Structured DNA Aptamer against Cancer Biomarker Protein Anterior Gradient Homolog 2.” PloS ONE 7.9 (2012): e46393
[0633] 4. Mitkevich, Olga V., et al. “DNA aptamers detecting generic amyloid epitopes.” Prion 6.4 (2012): 400-406.
[0634] 5. Kaur H, Yung L-Y L (2.012) Probing High Affinity Sequences of DNA Aptamer against VEGF₁₆₅. PLoS ONE 7(2): e31196. doi:10.1371/journal.pone.0031196.

### Example 9

### Aptamer Target Identification

[0635] In this Example, aptamers conjugated to microspheres are used to assist in determining the target of two aptamers identified by library screening methods as described above. The general approach is shown in FIG. 9. The approach is used to verify the targets of CAR003, an aptamer identified by library screening to recognize EpCAM. See description above for CAR003. In this approach, the sequence of CAR003 is randomly rearranged before linkage to the microspheres. The microspheres are used as controls to bind to targets that are similar but not identical to the intended target molecule.

[0636] The protocol used is as follows:

[0637] 1) The candidate aptamers (here, CAR003) and negative control aptamers (here, randomly arranged CAR003) are synthesized with modifications to allow capture (here, the aptamers are biotinylated) and crosslinking (here, using the Sulfo-SBED Biotin Label Transfer Reagent and Kit, Catalog Number 33073 from Thermo Fisher Scientific Inc., Rockford, Ill., to allow photocrosslinking).

[0638] 2) Each of the aptamers is individually mixed with microvesicles having the target of interest (here, BrCa cell line microvesicles).

[0639] 3) After incubation to allow the aptamers to bind target, ultraviolet light is applied to the mixtures to trigger crosslinking of the aptamers with the microvesicle targets.

[0640] 4) The microvesicles are lysed, thereby releasing the crosslinked aptamer-target complex into solution.

[0641] 5) The crosslinked aptamer-target complexes are captured from solution using a streptavidin coated substrate.

[0642] 6) The crosslinked aptamer-target complexes for each aptamer are run individually on SDS-PAGE gel electrophoresis. The captured protein targets are visualized with Coomasie Blue staining.

[0643] 7) The crosslinking and binding steps may be promiscuous so that multiple bands including the intended target but also random proteins will appear on each of the gels. The intended target will be found in a band that appears on the gel with the candidate aptamer (here, CAR003) but not the related negative control aptamers (here, randomly arranged CAR003). The bands corresponding to the target are excised from the gel.

[0644] 8) Mass spectrometry (MS) is used to identify the aptamer target from the excised bands.

### Example 10

### Aptamers to Breast Cancer (BrCa) Derived Microvesicles

[0645] In this Example, an aptamer library is screened to identify aptamers that distinguish between microvesicles circulating in the blood of breast cancer patients and microvesicles circulating in the blood of healthy, control individuals (i.e., without breast cancer).

[0646] Microvesicles were isolated from plasma of a pool of 60 breast cancer patients (BrCa+). Microvesicles were also isolated from pool of 60 non-cancer samples (BrCa−). Microvesicles were isolated from the plasma using ultracentrifugation (120,000×g). Microvesicles were in the pellet from the ultracentrifugation. The supernatant from the ultracentrifugation was saved to use as a control. The microvesicles from both sample types were conjugated to MagPlex beads (Luminex Corp, Austin Tex.). Optionally, the isolated microvesicles are incubated with anti-HSA/IgG/Fibrinogen beads to remove these highly abundant blood proteins. However, the conjugation step can be optimized to favor conjugation of the microvesicles such that removal of highly abundant proteins is less of an issue.

[0647] The aptamer library used consisted of a 2′F SUL1 RNA aptamer library. The sequence is 5′-GGGAGGACGAUGCGG-N40-CAGACGACUCGCUGAGGAUCCGAGA-3′ (SEQ ID NO. 23). The aptamer library consists of three sections: Forward primer—15 nucleotides, variable region—40 nucleotides; reverse primer—25 nucleotides. All pyrimidines (C and U) were 2′Fluoro modified.

[0648] The aptamer library was incubated with either the cancer or control microvesicle-conjugated beads. Thirteen rounds of positive selection for aptamers that bind the microvesicles were performed in parallel for both types of samples. See FIG. 11A “Selection A” for selection schemes. See Example 11 below for detailed protocol of the positive selection steps. Negative selection was not performed.

[0649] The aptamers that were retained from the above positive selection were sequenced using Next Generation sequencing technology consisting of Ion Torrent NGS (Life Technologies, Inc., Carlsbad, Calif.). The MiSeq system may be used also (Illumina, Inc., San Diego, Calif.). The sequences are compared to identify aptamers that are found in the cancer samples and not the control samples, and vice versa. Such aptamers provide candidates that can be used to distinguish between BrCa and non-BrCa samples.

[0650] A number of representative sequences obtained from these procedures are shown in Table 8. The sequences in the table were identified in the aptamer pools from selection against BrCa microvesicles but were not in the aptamer pools selected against non-cancer samples. In Table 8, the sequences are shown 5′ to 3′ from left to right, wherein each complete sequence consists of the indicated 5′ leader sequence followed by the indicated Variable Sequence followed by the indicated 3′ tail sequence. Each sequence is derived from a library having a leader and tail (see description above) with a variable sequence between. It is understood that the nucleotide sequences that are disclosed in Table 8 can also be modified to the extent that resulting modifications result in an aptamer having about 50, 55, 60, 65, 70, 75, 80, 85, 90, 95, 96, 97, 98, and 99 percent homology to the disclosed sequence and retain the functionality of binding to microvesicle antigens or functional fragments thereof.

TABLE 8
BrCa microvesicle aptamer candidate sequences

| | SEQ | | | |
|---|---|---|---|---|
| | ID | | | |
| ID | NO. | 5′-Leader | Variable Sequence | Tail-3′ |
| BRCA_APT1_ | 8 | GGGAGGACGAUGCGG | CGCGUCUUCCCCGCAU | CAGACGACUCGCUGAG |
| RNA | | | UGCCGCAAUUGCCAUA | GAUCCGAGA |
| | | | CAUUAAUA | |
| BRCA_APT2_ | 10 | GGGAGGACGAUGCGG | GUCCGGAACGCCUCGA | CAGACGACUCGCUGAG |
| RNA | | | UCCUCGCAUAAUAUGA | GAUCCGAGA |
| | | | UACGUCUG | |
| BRCA_APT3_ | 12 | GGGAGGACGAUGCGG | GUCCAUGGUACGCCUC | CAGACGACUCGCUGAG |
| RNA | | | GAUUCCGCCCAUACAU | GAUCCGAGA |
| | | | GCAUGUAA | |
| BRCA_APT4_ | 14 | GGGAGGACGAUGCGG | CACUAUCCGUUUGUCC | CAGACGACUCGCUGAG |
| RNA | | | GUCCUCUUGUGGUAUU | GAUCCGAGA |
| | | | GCGCAUGC | |
| BRCA_APT5_ | 16 | GGGAGGACGAUGCGG | UCUUCCAUCUGGUCGC | CAGACGACUCGCUGAG |
| RNA | | | GAUACAGAAUACGAUU | GAUCCGAGA |
| | | | AACAUAAA | |
| BRCA_APT6_ | 18 | GGGAGGACGAUGCGG | GAUCACGCUGCCCUUU | CAGACGACUCGCUGAG |
| RNA | | | GUUUAAGGCCUUUAUA | GAUCCGAGA |
| | | | CAAACGCA | |
| BRCA_APT7_ | 20 | GGGAGGACGAUGCGG | UAUUCGCCAGUCACAU | CAGACGACUCGCUGAG |
| RNA | | | CAACUAUGAUGACGCU | GAUCCGAGA |
| | | | UGACUGGA | |

[0651] Each sequence in Table 8 is synthesized in two variants for further investigation: 5′ biotinylated and 3′ biotinylated. This provides aptamer variants that can be captured at the 5′ end or the 3′ end as desired. The aptamers are further synthesized with each pyrimidine (C and U) 2′Fluoro modified.

[0652] The DNA sequence corresponding to each RNA sequence in Table 8 is provided in the sequence listing, where the DNA sequence directly follows its corresponding RNA sequence. For example SEQ ID NO. 9 is the DNA sequence corresponding to RNA sequence SEQ ID NO. 8, etc. The DNA forms of the aptamers are synthesized for further characterization as well.

[0653] The aptamers above were identified using positive selection for aptamers which recognize BrCa and non-BrCa microvesicles conjugated to microspheres.

### Example 11

### Aptamer Library Selection Protocol

[0654] This Example provides the protocol for SUL1 RNA library selection performed in the Example above. The protocol can be followed for other aptamer libraries and sample input as desired.

[0655] Preparation

[0656] The working space is cleaned with 80% EtOH before working.

[0657] Beads are MagPlex beads (Luminex Corp., Austin, Tex.). Other beads can be substituted as desired.

[0658] Buffers/Reagents to Prepare:

[0659] MilliQ water

[0660] 100 mM MgCl₂

[0661] 5× Transcription Buffer (200 mM Tris pH 7.9)

[0662] 1×PBS

[0663] 1×PBS with 3 mM MgCl₂

[0664] 10×PBS

[0665] Selection buffer (lx PBS with 0.1% BSA and 3 mM MgCl₂)

[0666] Before starting with selection, remove the bead storage buffer, and wash beads with 1×PBS w/3 mM MgCl₂ 1 times (200 uL total in all 4 tubes). 200,000 beads per selection are used.

[0667] Binding 2′F SUL1 RNA Pool to Microvesicle Coated Magnetic Beads

[0668] Abbreviations: TK—Transcription; NTC—No template control.

[0669] Steps:
[0670] 1. 1^{st} Round: Mix 1 nmol purified 2′F SUL1 RNA with 20 μl of resuspended beads (conjugated with microvesicle). 10 uL of 10×PBS+1% BSA, 3 μl 100 mM MgCl₂, and 47 uL H₂O. This gives a final concentration of 1×PBS, 0.1% BSA, 3 mM MgCl₂.
   [0671] 1.1 The addition of MgCl₂ in this step gives a concentration of 3 mM MgCl₂. This is the binding concentration for the entire process.
   [0672] 1.2 Following Rounds: Mix 20 μl of transcription product (15 mM MgCl₂ inside) with 20 μl of washed microvesicle coated beads, plus 9 uL 10×PBS with 1% BSA, 51 uL H₂O. No additional MgCl₂ is needed because the MgCl₂ in the diluted transcription product (TK) provides a final concentration of 3 mM MgCl₂.
[0673] 2. Incubate for 30 min at 37° C., shake at 1000 rpm, and pipette mix every 10 minutes.
[0674] 3. Wash the beads:
   [0675] 3.1 One washing cycle comprises:
      [0676] 3.1.1 Remove the beads from the magnet
      [0677] 3.1.2 Resuspend beads in 100 μl 1×PBS+3 mM MgCl₂ off the magnet.
      [0678] 3.1.3 Incubate sample for 30 seconds off of the magnet.
      [0679] 3.1.4 Place the sample back onto the magnet, and wait until the beads are on the side.
      [0680] 3.1.5 Remove and discard the supernatant.
      [0681] 3.1.6 Resuspend in 100 μl 1×PBS+3 mM MgCl₂+0.1% BSA off of the magnet.
      [0682] 3.1.7 Incubate sample for 3 minutes off of the magnet.
      [0683] 3.1.8 Place the sample back onto the magnet, and wait until the beads are on the side.
      [0684] 3.1.9 Remove and discard the supernatant
   [0685] 3.2 1^{st} Round: Place bead mixture on a magnet and remove the supernatant. Wash once with 100 μl 1×PBS+3 mM MgCl₂+0.1% BSA (by pipette mixing the beads), and discard buffer.
   [0686] 3.3 Following Rounds: Increase the washing steps every second round by one more washing step up to 3 washing steps.
[0687] 4. Add 55 μl MilliQ water to the bead sample.
[0688] 5. Elute the RNA by incubating the bead sample for 5 min at 80° C.
   [0689] 5.1 Check if there is 50 μl, if not spin the sample down to spin down the condensed water off the top.
   [0690] 5.2 Transfer the supernatant to a new vial. Work quickly to avoid the strands rebinding the beads.
      [0691] 5.2.1 Use 50 μl eluate for the following RT-PCR and store the rest at −20° C.

[0692] RT-PCR of Recovered Aptamer Candidates

[0693] Tips

[0694] The rest of the RT-PCR sample and the TK-PCR sample is stored at −20° C.

[0695] RNA can be stored at 4° C. for ˜1 h

[0696] RT-PCR product can be stored overnight at 4° C.

[0697] Proceed to the next selection cycle for optimal RNA quality immediately after transcription.

[0698] Avoid vortexing RNA

[0699] Mix on ice

[0700] Use 0.5 ml PCR tubes

[0701] Every RT-PCR should have a no-template control (NTC) with water instead of template

[0702] Do not freeze-thaw DTT more than one time
[0703] 6. Prepare a Master Mix before the first round, check it with 0.5 pmol RNA and store aliquots of 48 μl at −20° C. until usage.

TABLE 9
RT-PCR master mix

| Reagent | Volume (μl)/reaction | Final concentration | |
|---|---|---|---|
| 5x Colorless GoTaq Flexi | 20 | 1x | |
| Buffer Promega cat# | | | |
| M890A | | | |
| 5x first strand buffer | 4 | 0.2x | |
| (Invitrogen) lot# 1300427 | | | |
| 100 mM DTT | 2 | 2 | mM |
| 100 μM SUL1 F primer | 1 | 1 | μM |
| 100 μM SUL1 R primer | 1 | 1 | μM |
| 100 mM MgCl₂ | 1.5 | 1.5 | mM |
| 25 mM (each) dNTPs | 1.2 | 300 | μM |
| MilliQ water | 17.3 | | |
| Total | 48 | | |

[0704] 7. Add 50 μl MilliQ water as negative control (NTC) (pipette this first) or 50 μl selection eluate. Pipet mix.
[0705] 8. Incubate at 65° C. for 5 min.
[0706] 9. After cooling to 4° C., add:
   [0707] 9.1 1 μl Superscript II Reverse Transcriptase (Invitrogen, cat #18064) (200 U/μl)
   [0708] 9.2 1 μl GoTaqFlexi DNA polymerase (5 units/μl) Promega cat # M8305.

[0709] PCR—Program (SARTPCR)

[0710] a) 10 min 54° C.
[0711] (This step is only for reverse transcriptase, should more rounds be needed, do not repeat step A.)

[0712] b) 1 min 95° C.

[0713] c) 1 min 60° C.

[0714] d) 1 min 72° C.
[0715] 10. Cycle steps b-d for
   [0716] 10.1 1^{st} round b-d 4 cycles. Run 5 μL PCR products on a 4% agarose gel.
      [0717] 10.1.1 Subsequent rounds: The amount of RNA is decreased after the first round, leading to an increase in required PCR-cycles. To determine the number of cycles needed each time, check the band intensity from the agarose gel from the previous round of selection. Use that number of cycles to start the next round of RT-PCR. Note: Always check results on an agarose gel.
         [0718] 10.1.1.1 Agarose gel results: product band should be seen at the target length. The band intensity should be about the same as the 50 bp ladder band (if not a little less intense). If the band is not intense enough (barely visible), cycle an appropriate amount more and re-check on an agarose gel.

[0719] Transcription

[0720] All mixing performed on ice. Prepare transcription Master Mix and store aliquots of 85.7 μl at −20° C. until use.
[0721] 11. Verify pH of stock 200 mM Tris pH 7.9 before use. A change in pH over time may cause problems with the transcription.

TABLE 10
Transcription (TK) Master Mix for SUL1 library

| | Volume | | | |
|---|---|---|---|---|
| | (μl) for one | Volume (μl) for | | Final |
| Reagent | reaction | 20 reactions | | concentration |
| 5x Transcription buffer | 20 | 400 | | 1x |
| (200 mMTris, pH 7.9) | | | | |
| 100 mM DTT | 5 | 100 | | 5 mM |
| 100 mM ATP | 1 | 20 | | 1 mM |
| 100 mM GTP | 1 | 20 | | 1 mM |
| 100 mM 2′F-dUTP | 3 | 60 | | 3 mM |
| 100 mM 2′F-dCTP | 3 | 60 | | 3 mM |
| 100 mM MgCl₂ | 15 | 300 | | 15 mM |
| MilliQ water | 37 | 740 | | |
| Total volume | 85 | 1700 | μl | |

[0722] 12. Add 10 μl RT-PCR product to the mastermix.
[0723] 13. Add 1 μl RNasin (40 units/μl)
   [0724] 13.1 Promega Recombinant RNasin Ribonuclease Inhibitor cat # N2515/N2511
[0725] 14. Add 4 μl T7 Y639F mutant polymerase (25 U/μl use: 100 U total per reaction)
[0726] 15. Perform the reaction for 30 min at 37° C.
[0727] 16. Use the transcription-product directly for the next selection round. If the next step is not feasible, freeze transcription product at −20 C.

[0728] Subsequent Rounds

[0729] Repeat the bead incubation, the RT-PCR and transcription as often as needed. Try to have similar band intensity of the RT-PCR product for the sample in all rounds as noted above.

[0730] Binding Assay

[0731] A binding assay is performed after desired rounds of selection to determine to assess non-specific binding of cancer selected aptamers to control beads (conjugated to supernatant from plasma ultracentrifugation, see above) and likewise for non-cancer control samples. Binding assays can also be performed to assess binding of selected aptamers against the intended target microvesicles.

[0732] Cherenkov protocol: Performed using ³²P radioactively labeled aptamer library.

[0733] Final concentration of selection buffer: 1×PBS+3 mM MgCl₂+0.01% BSA pH 7.4

[0734] Wash buffer: 1×PBS+3 mM MgCl₂ pH 7.4
[0735] 1. Remove microvesicle samples from −80° C. freezer and thaw.
[0736] 2. Place beads on magnet (200,000 per sample experiment), remove bead storage buffer.
[0737] 3. Wash 1×200 μL for 1 minute each with 1×PBS, 3 mM MgCl₂ buffer. Pool beads to make 200,000 in one tube.
[0738] 4. Resuspend beads in 70 μL of the selection buffer. (10 μl of 10×PBS, 1% BSA+3 μL 100 mM MgCl₂+57 μL H₂O per sample).
[0739] 5. Add 30 μL radioactively labeled RNA aptamer library to their respective sample.
[0740] 6. Incubate shaking at 1000 rpm at 37° C. for 30 min.
[0741] 7. Place samples on a magnet.
[0742] 8. Remove and save supernatant.
[0743] 9. Wash beads with 200 μL wash buffer 1×PBS 3 mM MgCl₂ pH 7.4, incubating off the magnet for 3 minute.
[0744] 10. Place samples on the magnet, remove and save wash solution.
[0745] 11. Repeat steps 9, 10.
[0746] 12. Add 100 μL water to the sample, pipette mix.
[0747] 13. Heat at 80° C. for 5 minutes.
[0748] 14. Place samples on a magnet, remove supernatant, and save.
[0749] 15. Resuspend beads in 100 μL water.
[0750] 16. Measure radioactivity of every fraction using scintillation counter.
[0751] 17. Analyze amount of background binding present.

[0752] Negative Selection

[0753] As desired, a negative selection step is added prior to incubating the aptamer library with the beads conjugated to the target microvesicles (i.e., procedure “Binding 2′F SUL1 RNA pool to microvesicle coated magnetic beads” above). The negative selection can be performed using beads conjugated to the supernatant or the input samples (e.g., plasma) after microvesicles are filtered or sedimented from the sample (referred to as “no microvesicle coated beads,” “microvesicle depleted samples,” or similar). The steps are:

[0754] 1) Start with aptamer library product from the desired round after transcription as described above. Wash the beads before start: remove storage buffer, wash beads with 200 μL wash buffer, then replace buffer as stated below:

[0755] 2) Negative selection step: Add and pipette mix 20 μl of transcription product (15 mM MgCl₂) with freshly washed ‘no microvesicle’ coated beads with 10 μL 10×PBS with 1% BSA, 70 μL H₂O. No additional MgCl₂ is needed because the MgCl₂ in the diluted transcription product (TK) provides a final concentration of 3 mM MgCl₂.

[0756] 3) Incubate for 30 min at 37° C., shake at 1000 rpm.

[0757] 4) Remove supernatant and add it to the positive selection beads (directly), which are washed microvesicle coated beads.

[0758] Continue with positive selection incubation. See Binding 2′F SUL1 RNA pool to microvesicle coated magnetic beads above, starting at step 2. Additional steps through transcription are as detailed above.

### Example 12

### Additional Aptamers to Breast Cancer (BrCa) Derived Microvesicles

[0759] In this Example, an aptamer library is screened to identify aptamers that distinguish between microvesicles circulating in the blood of breast cancer patients and microvesicles circulating in the blood of healthy, control individuals (i.e., without breast cancer). The procedure used the same samples and aptamer library as in Example 10 above. The procedure in this Example differs in that negative selection was performed before each positive selection starting after the third round of positive selection.

[0760] Negative selection serves to remove aptamers that bind soluble/abundant/non-informative and common proteins for cancer and non-cancer proteins. Negative selection include performing negative selection on the aptamer candidates selected against BrCa+ microvesicles as follows: (i) using microbeads conjugated to the supernatant from the BrCa+ plasma ultracentrifugation step (which should not contain microvesicles); (ii) using microbeads conjugated to the supernatant from the BrCa− plasma ultracentrifugation step (which should not contain microvesicles); (iii) using microbeads conjugated to BrCa− microvesicles. Negative selection can also be performed on the aptamer candidates selected against BrCa− microvesicles as follows: (i) using microbeads conjugated to the supernatant from the BrCa+ plasma ultracentrifugation step (which should not contain microvesicles); (ii) using microbeads conjugated to the supernatant from the BrCa− plasma ultracentrifugation step (which should not contain microvesicles); (iii) using microbeads conjugated to BrCa+ microvesicles. Negative selection rounds are performed between rounds of positive selection as described herein.

[0761] Microvesicles were isolated from plasma of a pool of 60 breast cancer patients (BrCa+). Microvesicles were also isolated from pool of 60 non-cancer samples (BrCa−). Microvesicles were isolated from the plasma using ultracentrifugation (120,000×g). Microvesicles were in the pellet from the ultracentrifugation. The supernatant from the ultracentrifugation was saved to use as a control. The microvesicles from both sample types were conjugated to MagPlex beads (Luminex Corp, Austin Tex.).

[0762] The aptamer library used consisted of a 2′F SUL1 RNA aptamer library. The sequence is 5′-GGGAGGACGAUGCGG-N40-CAGACGACUCGCUGAGGAUCCGAGA-3′ (SEQ ID NO. 23). The aptamer library consists of three sections: Forward primer—15 nucleotides, variable region—40 nucleotides; reverse primer—25 nucleotides. All pyrimidines (C and U) were 2′Fluoro modified.

[0763] The aptamer library was incubated with either the cancer or control microvesicle-conjugated beads. Nine rounds of positive selection for aptamers that bind the microvesicles were performed in parallel for both types of samples. Negative selection against beads conjugated to the input plasma supernatant after ultracentrifugation before positive selection in rounds 4-9. See FIG. 11A “Selection B” and FIGS. 11D-11E for positive/negative selection schemes. See Example 11 above for protocol of the positive selection and negative selection steps.

[0764] The aptamers that were retained from the above positive selection were sequenced using Next Generation sequencing technology consisting of Ion Torrent NGS (Life Technologies, Inc., Carlsbad, Calif.). The MiSeq system may be used also (Illumina, Inc., San Diego, Calif.). The sequences are compared to identify aptamers that are found in the cancer samples and not the control samples, and vice versa. Such aptamers provide candidates that can be used to distinguish between BrCa and non-BrCa samples.

[0765] The sequencing data was analyzed according to the following procedure:

[0766] Step 1:

[0767] Sequences were ranked according to frequencies in entire aptamer pool recovered in round 9 after negative selection against beads conjugated to microvesicle-depleted cancer plasma followed by positive selection against beads conjugated to cancer microvesicles.

[0768] Step 2:

[0769] Fold changes were calculated between noted sample in Step 1 and: (i) same sample after additional negative selection against microvesicle depleted cancer plasma; (ii) same sample after additional negative selection against non-cancer microvesicles; (iii) same sample after additional negative selection against microvesicles depleted non-cancer plasma.

[0770] Step 3:

[0771] Sequences were ranked based on fold changes calculated in Step 2 to identify sequences which are abundant or deficient in aptamer pool selected for breast cancer derived microvesicles.

[0772] Step 4:

[0773] Possible mutant sequences (e.g., due to PCR or other errors) were removed based on results of consolidation analysis.

[0774] Step 5:

[0775] Sequences were identified with fold changes greater than 3 and minimum frequency 50 in all three variants (i, ii and iii in step 2).

[0776] The same selection schemes as in steps 1-5 were performed for aptamers selected against beads conjugated to non-cancer microvesicles.

[0777] A number of representative sequences obtained from these procedures are shown in Table 11. The sequences in the table were identified in the aptamer pools from selection against BrCa microvesicles but were not in the aptamer pools selected against non-cancer samples. In Table 11, the sequences are shown 5′ to 3′ from left to right, wherein each complete sequence consists of the indicated 5′ leader sequence followed by the indicated Variable Sequence followed by the indicated 3′ tail sequence. Each sequence is derived from a library having a leader and tail (see description above) with a variable sequence between. It is understood that the nucleotide sequences that are disclosed in Table 11 can also be modified to the extent that resulting modifications result in an aptamer having about 50, 55, 60, 65, 70, 75, 80, 85, 90, 95, 96, 97, 98, and 99 percent homology to the disclosed sequence and retain the functionality of binding to microvesicle antigens or functional fragments thereof.

TABLE 11
BrCa microvesicle aptamer candidate sequences

| ID | SEQ ID | | | |
|---|---|---|---|---|
| (Figure) | NO. | 5′-Leader | Variable Sequence | Tail-3′ |
| BCE8 | 24 | GGGAGGACGAUGCGG | UACCGCCUCAUCAUCG | CAGACGACUCGCUGAG |
| (FIG. 10Ai) | | | GACACGACGUGUAUCA | GAUCCGAGA |
| | | | GUUGGCUG | |
| BCE9 | 25 | GGGAGGACGAUGCGG | GUUCUCGCCUCUGUCC | CAGACGACUCGCUGAG |
| (FIG. 10Aii) | | | UCAUGGUUCGAACCGG | GAUCCGAGA |
| | | | UAUGCAUG | |
| BCE10 | 26 | GGGAGGACGAUGCGG | GCGGUUUCUUCUCCUG | CAGACGACUCGCUGAG |
| (FIG. 10Aiii) | | | ACUACAUGAGAUUAAU | GAUCCGAGA |
| | | | AAACGCGC | |
| BCE11 | 27 | GGGAGGACGAUGCGG | CCGCCUCGAACACUGA | CAGACGACUCGCUGAG |
| (FIG. 10Aiv) | | | CGUCGUGGAACCUUCG | GAUCCGAGA |
| | | | AUUGCUAG | |
| BCE12 | 28 | GGGAGGACGAUGCGG | AAUCACAGUAAUUCUG | CAGACGACUCGCUGAG |
| (FIG. 10Av) | | | CCCCUCUGAUGAAACC | GAUCCGAGA |
| | | | GGUUACUU | |
| BCE13 | 29 | GGGAGGACGAUGCGG | CUUAGUGAUUUCGCCG | CAGACGACUCGCUGAG |
| (FIG. 10Avi) | | | CCCCUCUGUUUAGUGG | GAUCCGAGA |
| | | | CCAUUGGA | |
| BCE14 | 30 | GGGAGGACGAUGCGG | ACACUAUUCCGGUAAG | CAGACGACUCGCUGAG |
| (FIG. 10Avii) | | | UCAUCGUUUAACCGUU | GAUCCGAGA |
| | | | UGUUGCAA | |
| BCE15 | 31 | GGGAGGACGAUGCGG | UGCGCAACGCCUUGAU | CAGACGACUCGCUGAG |
| (FIG. 10Aviii) | | | UCACUCCUACAGUGUG | GAUCCGAGA |
| | | | UCUAUAGA | |
| BCE16 | 32 | GGGAGGACGAUGCGG | AAUGUUAAGCUUACAU | CAGACGACUCGCUGAG |
| (FIG. 10Aix) | | | ACGCCUGGGUCACUCU | GAUCCGAGA |
| | | | UUGUUCUG | |
| BCE17 | 33 | GGGAGGACGAUGCGG | GUAAAUAUUCACGUUG | CAGACGACUCGCUGAG |
| (FIG. 10Bi) | | | AAUCGCCUUGCUCCUC | GAUCCGAGA |
| | | | UUAGUCUG | |
| BCE18 | 34 | GGGAGGACGAUGCGG | CCGCCUCGGAUCGUUC | CAGACGACUCGCUGAG |
| (FIG. 10Bii) | | | CCAAUGGUGGUACCCC | GAUCCGAGA |
| | | | UAUUAAUG | |
| BCE19 | 35 | GGGAGGACGAUGCGG | UGUAGAUCGUUCUUAU | CAGACGACUCGCUGAG |
| (FIG. 10Biii) | | | CCGCCUCGGUCUUCCC | GAUCCGAGA |
| | | | CAGGUUAA | |
| BCE20 | 36 | GGGAGGACGAUGCGG | AUCGUCGGGCCCCUUU | CAGACGACUCGCUGAG |
| (FIG. 10Biv) | | | UAUGAAACUUACAUGA | GAUCCGAGA |
| | | | AAGCGCAC | |
| BCE21 | 37 | GGGAGGACGAUGCGG | UAAGAGUGCACAGUAC | CAGACGACUCGCUGAG |
| (FIG. 10Bv) | | | UGCCUCGAUCCUCCAU | GAUCCGAGA |
| | | | GGCUUAAG | |
| BCE22 | 38 | GGGAGGACGAUGCGG | GAAUUAGUACUGACGG | CAGACGACUCGCUGAG |
| (FIG. 10Bvi) | | | CCGCCUUGAUCCUCCG | GAUCCGAGA |
| | | | UUAGUCUG | |
| BCE23 | 39 | GGGAGGACGAUGCGG | GCCCGCCUCCGAAGCC | CAGACGACUCGCUGAG |
| (FIG. 10Bvii) | | | CUCCUAAGUGCACUUU | GAUCCGAGA |
| | | | AAACCGCG | |
| BCE24 | 40 | GGGAGGACGAUGCGG | CCGCCUGGGAUCACUC | CAGACGACUCGCUGAG |
| (FIG. 10Bviii) | | | UCUACGCGUAUAAAUG | GAUCCGAGA |
| | | | CUCUGUCA | |
| BCE25 | 41 | GGGAGGACGAUGCGG | AGUCUGACCCUGUUAU | CAGACGACUCGCUGAG |
| (FIG. 10Bix) | | | GGACUACCAUAUCAGA | GAUCCGAGA |
| | | | AAGGUACU | |
| BCE26 | 42 | GGGAGGACGAUGCGG | GGUGAUCCUCCCCCCC | CAGACGACUCGCUGAG |
| (FIG. 10Ci) | | | GCCUCGAAGAUUUGUG | GAUCCGAGA |
| | | | CACAUAUC | |
| BCE27 | 43 | GGGAGGACGAUGCGG | GCUACCAUCGUCUAGU | CAGACGACUCGCUGAG |
| (FIG. 10Cii) | | | GAGUCACCCUUAGUUC | GAUCCGAGA |
| | | | AUCAAGGC | |

[0778] Each sequence in Table 11 is synthesized in two variants for further investigation: 5′ biotinylated and 3′ biotinylated. This provides aptamer variants that can be captured at the 5′ end or the 3′ end as desired. The aptamers are further synthesized with each pyrimidine (C and U) 2′Fluoro modified. The aptamers may also be synthesized as the DNA sequence corresponding to each RNA sequence in Table 11. The aptamer libraries can also be filtered based on predicted secondary sequence, free energy, and other parameters as described herein.

[0779] FIGS. 10A-C show binding of the aptamers in Table 11 against microbeads conjugated to various input samples. The aptamer is indicated above each plot and the plot for each aptamer is indicated in the ID column in Table 11. See Table 11. The input sample is indicated on the X axis from left to right as follows: 1) Cancer Exosome: aptamer binding to microbeads conjugated to microvesicles isolated from plasma samples from breast cancer patients; 2) Cancer Non-exosome: aptamer binding to microbeads conjugated to plasma samples from breast cancer patients after removal of microvesicles by ultracentrifugation; 3) Non-Cancer Exosome: aptamer binding to microbeads conjugated to microvesicles isolated from plasma samples from normal (i.e., non-breast cancer) patients; 4) Non-Cancer Non-Exosome: aptamer binding to microbeads conjugated to plasma samples from breast cancer patients after removal of microvesicles by ultracentrifugation. As shown in FIGS. 10A-C, the aptamers were each able to distinguish between the cancer microvesicle samples versus the supernatant control samples and the non-cancer microvesicles. Further, all sequences in Table 11 were observed as binding more abundantly to cancer derived microvesicles as compared to non-cancer derived microvesicles with the exception of BCE10 and BCE14, which were observed as binding more abundantly to non-cancer derived microvesicles as compared to cancer derived microvesicles.

[0780] SEQ ID NOs. 44-10527 comprise a listing of sequences identified in this Example as binding to microbeads conjugated to microvesicles isolated from plasma samples from breast cancer patients preferentially over other samples described in this Example (e.g., beads conjugated to supernatant controls or non-cancer microvesicles). These sequences comprise the conjunction of sequences selected as in Step 2 described above (i.e., selected against microbeads conjugated to microvesicles from breast cancer patients as well as: (i) same after additional negative selection against microvesicle depleted cancer plasma; (ii) same after additional negative selection against non-cancer microvesicles; (iii) same after additional negative selection against microvesicles depleted non-cancer plasma). SEQ ID NOs. 44-10527 indicate the 40 nucleotide variable region from the starting library with 5′ and 3′ tails as described above (see, e.g., SEQ ID NO. 23 and Table 11). These aptamers can be used to detect microvesicles that are derived from breast cancer cells or from non-breast cancer cells. In various applications as described herein, the aptamers can be used for diagnosis, prognosis or theranosis of a cancer.

[0781] Based on the comparisons performed in this Example, aptamers that bind different starting input are obtained, including: 1) aptamers that preferentially bind cancer-derived microvesicles over non-cancer derived microvesicles; 2) aptamers that preferentially bind non-cancer-derived microvesicles over cancer derived microvesicles; 3) aptamers that bind both non-cancer-derived microvesicles and cancer derived microvesicles (e.g., “universal” binders); and 4) aptamers that bind plasma components that have been depleted of microvesicles.

[0782] The aptamer libraries in this Example are further subjected to four rounds of additional negative and positive selection. See FIG. 11G “SELEX C” for positive/negative selection schemes. The positive selection is performed as described in this Example. The negative selection rounds are performed using the beads conjugated to non-cancer microvesicles as negative selection for aptamers obtained by positive selection against beads conjugated to cancer microvesicles. Similarly, the negative selection rounds are performed using the beads conjugated to cancer microvesicles as negative selection for aptamers obtained by positive selection against beads conjugated to non-cancer microvesicles.

### Example 13

### Disease Diagnosis

[0783] This example illustrates the use of the aptamers of the present invention to diagnose a proliferative disease.

[0784] A suitable quantity of an aptamer that binds a BrCa-derived microvesicle such as identified in Example 10 or Example 12 is synthesized via chemical means known in the art. The aptamers are conjugated to a diagnostic agent suitable for detection, such as a fluorescent moiety, using a conjugation method known in the art.

[0785] The composition is applied to microvesicles isolated from blood samples taken from a test cohort of patients suffering from a proliferative disease associated with the overexpression of microvesicles, e.g. breast cancer. The composition is likewise applied to microvesicles isolated from blood samples taken from a negative control cohort, not suffering from a proliferative disease.

[0786] The use of appropriate detection techniques (e.g., microbead assay or flow cytometry) on the test cohort samples indicates the presence of disease, while the same techniques applied to the control cohort samples indicate the absence of disease.

[0787] The results show that the aptamers of the present invention are useful in diagnosing proliferative diseases.

### Example 14

### Therapeutic Aptamers

[0788] This example illustrates the use of the aptamers of the present invention to treat a proliferative disease in a mouse.

[0789] A suitable quantity of an aptamer that binds a BrCa-derived microvesicle such as identified in Example 10 or Example 12 is synthesized via chemical means known in the art. The aptamers are conjugated to a chemotherapeutic agent, such as Doxil, using a conjugation method known in the art. The conjugate is formulated in an aqueous composition.

[0790] The composition is administered intravenously, in one or more doses, to a test cohort of mice suffering from a proliferative disease associated with the overexpression of the microvesicles, e.g. a breast cancer model. A control cohort, not suffering from a proliferative disease is administered the identical composition intravenously, according to a corresponding dosage regimen.

[0791] Pathological analysis of tumor samples and/or mouse survival indicates that mortality and/or morbidity are improved in the test cohort over the control cohort.

[0792] The results show that the aptamers of the present invention are useful in treating proliferative diseases.

[0793] Useful aptamers can be used to treat breast cancer in other organisms, e.g., a human.

### Example 15

### Oligonucleotide—Sequencing Detection Method

[0794] This example illustrates the use of an oligonucleotide pool to detect microvesicles that are indicative of a phenotype of interest. The method makes use of a pool of oligonucleotides that has been enriched against a target of interest that is indicative of a phenotype of interest. The method in this Example allows efficient use of a library of oligonucleotides to preferentially recognize a target entity.

[0795] For purposes of illustration, the method is described in the Example with a microvesicle target from a bodily fluid sample. One of skill will appreciate that the method can be extended to other types of target entity (e.g., cells, proteins, and various other biological complexes), sample (e.g., tissue, cell culture, biopsy, and other bodily fluids) and other phenotypes (other cancers, other diseases, etc) by enriching an oligonucleotide library against the desired input samples.

[0796] General Workflow:

[0797] 1) Obtain sample (plasma, serum, urine or any other biological sample) of patients with unknown medical etymology and pre-treating them accordingly to ensure availability of the target of interest (see below). Where the target of interest is a microvesicle population, the microvesicles can be isolated and optionally tethered to a solid support such as a microbead.

[0798] 2) Expose pre-treated sample to an oligonucleotide pool carrying certain specificity against target of interest. As described herein, an oligonucleotide pool carrying certain specificity against the target of interest can be enriched using various selection schemes, e.g., using non-cancer microvesicles for negative selection and cancer microvesicles for positive selection as described above. DNA or RNA oligonucleotides can be used as desired.

[0799] 3) Contact oligonucleotide library with the sample.

[0800] 4) Elute any oligonucleotides bound to the target.

[0801] 5) Sequence the eluted oligonucleotides. Next generation sequencing methods can be used.

[0802] 6) Analyze oligonucleotide profile from the sequencing. A profile of oligonucleotides known to bind the target of interest indicates the presence of the target within the input sample. The profile can be used to characterize the sample, e.g., as cancer or non-cancer.

[0803] Protocol Variations:

[0804] Various configurations of the assay can be performed. Below are four examples protocols serving the purpose of oligonucleotide-sequencing assay. Samples can be any biological sample.

[0805] Protocol 1:

[0806] Ultracentrifugation of 1-5 ml bodily fluid samples (e.g., plasma/serum/urine) (120K×g, no sucrose) with two washes of the precipitate to isolate microvesicles.

[0807] Measure total protein concentration of recovered sample containing the isolated microvesicles.

[0808] Conjugate the isolated microvesicles to magnetic beads (for example MagPlex beads (Luminex Corp. Austin Tex.)).

[0809] Incubate conjugated microvesicles with oligonucleotide pool of interest.

[0810] Wash unbound oligonucleotides by retaining beads using magnet.

[0811] Elute oligonucleotides bound to the microvesicles.

[0812] Amplify and purify the eluted oligonucleotides.

[0813] Oligonucleotide sequencing (for example, Next generation methods; Ion Torrent: fusion PCR, emulsion PCR, sequencing).

[0814] Assess oligonucleotide profile.

[0815] Protocol 2:

[0816] This alternate protocol does not include a microvesicle isolation step, microvesicles conjugation to the beads, or separate partitioning step. This may present non-specific binding of the oligonucleotides against the input sample.

[0817] Remove cells/debris from bodily fluid sample and dilute sample with PBS containing MgCl₂ (2 mM).

[0818] Pre-mix sample prepared above with oligonucleotide library.

[0819] Ultracentrifugation of oligonucleotide/sample mixture (120K×g, no sucrose). Wash precipitated microvesicles.

[0820] Recover precipitate and elute oligonucleotides bound to microvesicles.

[0821] Amplify and purify the eluted oligonucleotides.

[0822] Oligonucleotide sequencing (for example, Next generation methods; Ion Torrent: fusion PCR, emulsion PCR, sequencing).

[0823] Assess oligonucleotide profile.

[0824] Protocol 3:

[0825] This protocol uses filtration instead of ultracentrifugation and should require less time and sample volume.

[0826] Remove cells/debris from bodily fluid sample and dilute it with PBS containing MgCl₂ (2 mM).

[0827] Pre-mix sample prepared above with oligonucleotide library.

[0828] Load sample into filter (i.e., 150K or 300K MWCO filter or any other that can eliminate unbound or unwanted oligonucleotides). Centrifuge sample to concentrate. Concentrated sample should contain microvesicles.

[0829] Wash concentrate. Variant 1: Dilute concentrate with buffer specified above to the original volume and repeat centrifugation. Variant 2: Dilute concentrate with buffer specified above to the original volume and transfer concentrate to new filter unit and centrifuge. Repeat twice.

[0830] Recover concentrate and elute oligonucleotides bound to microvesicles.

[0831] Amplify and purify the eluted oligonucleotides.

[0832] Oligonucleotide sequencing (for example, Next generation methods; Ion Torrent: fusion PCR, emulsion PCR, sequencing).

[0833] Assess oligonucleotide profile.

[0834] Protocol 4:

[0835] Ultracentrifugation of 1-5 ml bodily fluid sample (120K×g, no sucrose) with 2 washes of the precipitate to isolate microvesicles.

[0836] Pre-mix microvesicles with oligonucleotide pool.

[0837] Load sample into 300K MWCO filter unite and centrifuge (2000×g). Concentration rate is ˜3×.

[0838] Wash concentrate. Variant 1: Dilute concentrate with buffer specified above to the original volume and centrifuge. Repeat twice. Variant 2: Dilute concentrate with buffer specified above to the original volume and transfer concentrate to new filter unit and centrifuge. Repeat twice

[0839] Recover concentrate and elute oligonucleotides bound to microvesicles.

[0840] Amplify and purify the eluted oligonucleotides.

[0841] Oligonucleotide sequencing (for example, Next generation methods; Ion Torrent: fusion PCR, emulsion PCR, sequencing).

[0842] Assess oligonucleotide profile.

[0843] In alterations of the above protocols, polymer precipitation is used to isolate microvesicles from the patient samples. For example, the oligonucleotides are added to the sample and then PEG4000 or PEG8000 at 4% or 8% concentration is used to precipitate and thereby isolate microvesicles. Elution, recovery and sequence analysis continues as above.

### Example 16

### Detection of Breast Cancer Derived Microvesicle Using Oligonucleotide Sequencing

[0844] The method in Example 15 above is used to detect microvesicles in a bodily fluid sample that are derived from breast cancer cells. The oligonucleotide library comprises a subset of oligonucleotides described in Example 12 above that preferentially bind to microvesicles from breast cancer patients versus non-cancer individuals. The sequences are listed herein as SEQ ID NOs. 24-10527. The method is used to detect the presence or absence of microvesicles that are indicative of breast cancer.

[0845] The test sample comprises plasma samples that are collected from patients scheduled to undergo a breast biopsy. A test sample is a sample to be characterized by the methods of the invention. The method is performed to determine the presence or absence of breast-cancer derived microvesicles.

### Example 17

### Aptamer Selection for Microvesicles

[0846] Classic aptamer selection techniques (i.e., SELEX) are typically performed to enrich aptamers for the particular target in “clean” conditions when interference with non-target molecules (competitors) is minimized. However, various applications for the selected aptamers require that the aptamers work to bind their target in diverse environments, e.g., in a biological sample or tissue culture media with an abundance of potentially interfering molecules. In this case, such interfering molecules which were not present during the selection process may interfere with target recognition by aptamers selected in more ideal conditions. This Example provides an aptamer selection process to screen an aptamer library in order to select aptamers highly specific for the targets and also able to perform in a biological sample comprising the potentially interfering molecules.

[0847] In this Example, the target comprises a microvesicle such that an aptamer library is screened for members that bind cancer-derived microvesicles as compared to normal (non-cancer controls) microvesicles. One of skill will appreciate that the method can be extended to other types of target entity (e.g., cells, proteins, various other biological complexes). The method can employ various sample types (e.g., tissue, cell culture, biopsy, and various bodily fluids) and can be directed to target molecules that can be used to characterize various phenotypes (various cancers, other diseases, etc) by enriching an aptamer library against the desired input samples. In addition, the cancer and normal samples can be switched to screen for aptamers that preferentially bind the normal samples.

[0848] Variant 1:

[0849] Microvesicle based aptamer selection in competition with plasma depleted from microvesicles. Workflow:

[0850] Microvesicles are isolated from cancer and normal plasma samples using ultracentrifugation. The supernatant comprising microvesicle depleted sample is stored as a negative control sample.

[0851] Capture/conjugate the isolated microvesicles to magnetic beads.

[0852] Start the aptamer screening and selection process using microvesicle conjugated beads mixed with supernatant from above (i.e., microvesicle depleted plasma). Supplement supernatant with MgCl₂. Aptamer screening and selection for cancer-derived and normal (non-cancer derived) microvesicles can be done in parallel. Each round consists of negative and positive selections as desired.

[0853] Since the initial aptamer library is exposed simultaneously to microvesicle targets as well as competitors (soluble proteins) from plasma, aptamers recovered from the microvesicles/beads may be more specific for the targets on microvesicle membrane. Such aptamers may perform effectively in biological samples without requiring extensive purification of the target prior to target binding/detection.

[0854] Variant 2:

[0855] Aptamer selection for cancer-derived microvesicles (e.g., shed from cancer cells) in competition with microvesicles isolated from normal samples. Workflow:

[0856] Microvesicles are isolated from cancer and normal plasma samples using ultracentrifugation.

[0857] Capture/conjugate the isolated cancer-derived microvesicles to magnetic beads.

[0858] Start the aptamer screening and selection process using cancer microvesicles conjugated beads mixed with normal microvesicles (non-conjugated) supplemented with MgCl₂. Aptamer screening and selection is performed for the cancer-derived microvesicles only by retaining only the aptamers that are retained with the magnetic beads.

[0859] Since aptamer library will be exposed simultaneously to both types of microvesicles (cancer and normal), the method selects aptamers that preferentially bind cancer-derived microvesicles in the presence of non-cancer microvesicles.

[0860] Variant 3:

[0861] Aptamer selection for cancer-derived microvesicles (e.g., shed from cancer cells) in competition with normal plasma (non microvesicles depleted). Workflow:

[0862] Microvesicles are isolated from cancer plasma samples using ultracentrifugation.

[0863] Capture/conjugate the isolated cancer-derived microvesicles to magnetic beads.

[0864] Start the aptamer screening and selection process using cancer microvesicles conjugated beads mixed with normal plasma (non-conjugated) supplemented with MgCl₂. Aptamer screening and selection is performed for cancer microvesicles only by retaining only the aptamers that are retained with the magnetic beads.

[0865] This approach combines advantages form Variants 1 and 2 above. Each round includes competition with normal plasma. Aptamers should be more selective for target in the presence of interfering plasma proteins and other biological entities.

[0866] Variant 4:

[0867] Parallel Cancer/Normal aptamer selection on mixed beads. Workflow:

[0868] Capture/conjugate cancer-derived microvesicles to magnetic beads

[0869] Capture/conjugate normal (non-cancer) microvesicles to non-magnetic beads

[0870] Mix both bead sets and perform the aptamer screening and selection process with the starting aptamer library

[0871] Separate the magnetic and non-magnetic beads after incubation with aptamer library. Use a magnet to capture the magnetic beads then centrifuge to separate the nonmagnetic beads.

[0872] Wash the separated magnetic and non-magnetic beads separately.

[0873] Elute and re-amplify aptamers from both types of beads separately.

[0874] Round 2: mix amplified aptamer pools from both types of beads and add to the mixed beads

[0875] Repeat from above

[0876] Potential advantages of variant 4 include: (i) using same aliquot of aptamer library to start the aptamer screening and selection process for both cancer and non-cancer microvesicles; (ii) using competition between cancer and non-cancer microvesicles directly in one mixture in each round; (iii) supernatant can be added as additional competitor to increase selection stringency; (iv) parallel enrichment for cancer and non-cancer specific aptamers in competition to result in aptamers identifying only normals or only cancer (since there is a choice to bind either one).

### Example 18

### Identifying Aptamers to Breast Cancer (BrCa) Derived Microvesicles

[0877] In this Example, an aptamer library is screened to identify aptamers that distinguish between microvesicles circulating in the blood of breast cancer patients and microvesicles circulating in the blood of healthy, control individuals (i.e., without breast cancer). The procedure used the similar samples, starting aptamer library, and rounds of positive and negative selection as in Example 12 above. The procedure in this Example differs in the analysis logic and workflow presented below:

[0878] Analysis Logic

[0879] An alternative variant of sequencing data analysis versus that in Example 12 was applied to the data from cancer/non-cancer enriched SUL1 RNA library after 10 rounds of positive and negative selection (R10) probed on Cancer/Non-Cancer exosomes and corresponding microvesicle depleted plasma (see Example 12). Specific modifications so analyze sequencing data used in this Example are as follows:

[0880] Frequency of particular aptamer was used rather than raw read counts which may be impacted by the total recovery and re-amplifications. Normalization of read count of particular aptamer to the total count (all aptamer length with correct primers) takes into account the relative abundance of particular aptamer in entire population which may enhance consistency in all steps between elution from the target and sequencing.

[0881] Enrichment of particular aptamer (frequency of aptamer eluted from the target/frequency of same aptamer in input library) used first time as a criterion for aptamer selection, allows quick estimation of the binding ability for all aptamers disregarding the count. Note, all aptamer selection strategies applied before were considering the highest frequency aptamers only.

[0882] Fold change is used to measure the difference in binding to the target vs non-target. Here fold-changes are applied only to the frequencies of aptamers which have demonstrated enrichment.

[0883] RNA vs DNA: since selection was done with the mixture of dsDNA and RNA. Either form of aptamer may be a binder. To address this, four samples were probed with a dsDNA aptamer library (precursor to round 10 selection) and frequency of particular RNA aptamer was divided by frequency of the same aptamer in DNA version.

[0884] Analysis Workflow

[0885] 1) Calculate frequency of each aptamer with correct primers in total number of reads.

[0886] 2) Overlap sequences recovered from binding to cancer microvesicles with input library as well as with those recovered from binding to other three types of samples (cancer plasma supernatant depleted of microvesicles, non-cancer microvesicles, non-cancer supernatant depleted of microvesicles) as well as those recovered from dsDNA binding.

[0887] 3) Calculate “Enrichment” of particular aptamers in RNA library bound to cancer microvesicles compared to the input library. Consider three threshold classes based difference in aptamer frequency between input and bound populations: 2-5 times, 5-10 times and more than 10 times higher frequency compared to the input.

[0888] 4) Calculate “Fold changes” of particular aptamers in RNA library bound to cancer microvesicles compared to the same sequences in library bound to cancer plasma depleted of microvesicles, non-cancer microvesicles and non-cancer plasma depleted of microvesicles. Consider fold changes equal or greater than 2.

[0889] 5) Calculate the difference in frequencies of particular RNA aptamers on cancer microvesicles compared to enrichment of corresponding DNA aptamers. Aptamers which have RNA/dsDNA frequencies ratios between 0.5 and 1.5 may be binding microvesicles in both versions dsDNA and RNA. Aptamers which have RNA/dsDNA frequencies ratios equal or exceeding 2 may bind more efficiently as RNA aptamers.

[0890] 6) Filter data on “Enrichment” greater than 10, fold changes with three control types of samples (cancer plasma supernatant depleted of microvesicles, non-cancer microvesicles, non-cancer supernatant depleted of microvesicles) are >=2. This provides a first list of aptamers. Repeat filtration on “Enrichment” in the range 5-10 and 2-5 will give the second and third lists of aptamers accordingly.

[0891] 7) Consider the RNA/dsDNA ratio in the final list of aptamers to identify which aptamer version (i.e., DNA or RNA) may have more efficient binding.

[0892] A number of representative sequences obtained from these procedures are shown in Table 12. The sequences in the table were identified using the workflow above to selectively bind microvesicles isolated from BrCa plasma as compared to other plasma components or non-cancer plasma. In Table 12, the sequences are shown 5′ to 3′ from left to right, wherein each complete sequence consists of the indicated 5′ leader sequence followed by the indicated Variable Sequence followed by the indicated 3′ tail sequence. Each sequence is derived from a library having a leader and tail (see description above) with a variable sequence between. It is understood that the nucleotide sequences that are disclosed in Table 12 can also be modified to the extent that resulting modifications result in an aptamer having about 50, 55, 60, 65, 70, 75, 80, 85, 90, 95, 96, 97, 98, and 99 percent homology to the disclosed sequence and retain the functionality of binding to microvesicle antigens or functional fragments thereof.

TABLE 12
BrCa microvesicle aptamer candidate sequences

| ID | SEQ NO ID | 5′-Leader | Variable Sequence | Tail-3′ |
|---|---|---|---|---|
| BCE28_rna | 10528 | GGGAGGACGAUGCGG | GCGGUUUUCUUCUCCU | CAGACGACUCGCUGAG |
| | | | GACUACAUGAGAUUAA | GAUCCGAGA |
| | | | UAAACGCGC | |
| BCE28_dna | 10529 | GGGAGGACGATGCGG | GCGGTTTTCTTCTCCT | CAGACGACTCGCTGAG |
| | | | GACTACATGAGATTAA | GATCCGAGA |
| | | | TAAACGCGC | |
| BCE29_rna | 10530 | GGGAGGACGAUGCGG | CACUAUCCGUUUGUCC | CAGACGACUCGCUGAG |
| | | | CGUCCUCUUGUGGUAU | GAUCCGAGA |
| | | | UGCGCAUGC | |
| BCE29_dna | 10531 | GGGAGGACGATGCGG | CACTATCCGTTTGTCC | CAGACGACTCGCTGAG |
| | | | CGTCCTCTTGTGGTAT | GATCCGAGA |
| | | | TGCGCATGC | |
| BCE30_rna | 10532 | GGGAGGACGAUGCGG | CACUAUCCGUUUUGUC | CAGACGACUCGCUGAG |
| | | | CCGUCCUCUUGUGGUA | GAUCCGAGA |
| | | | UUGCGCAUGC | |
| BCE30_dna | 10533 | GGGAGGACGATGCGG | CACTATCCGTTTTGTC | CAGACGACTCGCTGAG |
| | | | CCGTCCTCTTGTGGTA | GATCCGAGA |
| | | | TTGCGCATGC | |
| BCE31_rna | 10534 | GGGAGGACGAUGCGG | AAACCGGGGCCCGCCU | CAGACGACUCGCUGAG |
| | | | CAAGUCUAGCUACCUC | GAUCCGAGA |
| | | | CAUUGUCGUG | |
| BCE31_dna | 10535 | GGGAGGACGATGCGG | AAACCGGGGCCCGCCT | CAGACGACTCGCTGAG |
| | | | CAAGTCTAGCTACCTC | GATCCGAGA |
| | | | CATTGTCGTG | |
| BCE32_rna | 10536 | GGGAGGACGAUGCGG | AAAACCGGGGGCCCCG | CAGACGACUCGCUGAG |
| | | | CCUCAAAGCUAGCUAC | GAUCCGAGA |
| | | | CUCCAUUGUCUG | |
| BCE32_dna | 10537 | GGGAGGACGATGCGG | AAAACCGGGGGCCCCG | CAGACGACTCGCTGAG |
| | | | CCTCAAAGCTAGCTAC | GATCCGAGA |
| | | | CTCCATTGTCTG | |
| BCE33_rna | 10538 | GGGAGGACGAUGCGG | CGACCUAUCCGUUUGU | CAGACGACUCGCUGAG |
| | | | CCGUCCUCUUGUGGUA | GAUCCGAGA |
| | | | UUGCGCAUGC | |
| BCE33_dna | 10539 | GGGAGGACGATGCGG | CGACCTATCCGTTTGT | CAGACGACTCGCTGAG |
| | | | CCGTCCTCTTGTGGTA | GATCCGAGA |
| | | | TTGCGCATGC | |
| BCE34_rna | 10540 | GGGAGGACGAUGCGG | GUCCAUGGUACGCCUC | CAGACGACUCGCUGAG |
| | | | GAUUUCCGCCCAUCAC | GAUCCGAGA |
| | | | AUGCAUUGUAA | |
| BCE34_dna | 10541 | GGGAGGACGATGCGG | GTCCATGGTACGCCTC | CAGACGACTCGCTGAG |
| | | | GATTTCCGCCCATCAC | GATCCGAGA |
| | | | ATGCATTGTAA | |
| BCE35_rna | 10542 | GGGAGGACGAUGCGG | AAACCGGGCCCGCCUC | CAGACGACUCGCUGAG |
| | | | AAGUCUAGCUACCUCC | GAUCCGAGA |
| | | | AUUGUCGUG | |
| BCE35_dna | 10543 | GGGAGGACGATGCGG | AAACCGGGCCCGCCTC | CAGACGACTCGCTGAG |
| | | | AAGTCTAGCTACCTCC | GATCCGAGA |
| | | | ATTGTCGTG | |
| BCE36_rna | 10544 | GGGAGGACGAUGCGG | AUGGUCCAUGAGUCUU | CAGACGACUCGCUGAG |
| | | | CUCGGCACUAUCCAGU | GAUCCGAGA |
| | | | UGACGCUCA | |
| BCE36_dna | 10545 | GGGAGGACGATGCGG | ATGGTCCATGAGTCTT | CAGACGACTCGCTGAG |
| | | | CTCGGCACTATCCAGT | GATCCGAGA |
| | | | TGACGCTCA | |
| BCE37_rna | 10546 | GGGAGGACGAUGCGG | AAACCGGGGCCCGCCU | CAGACGACUCGCUGAG |
| | | | CAAGCUUAGCUACCUC | GAUCCGAGA |
| | | | CAUUGUCCUG | |
| BCE37_dna | 10547 | GGGAGGACGATGCGG | AAACCGGGGCCCGCCT | CAGACGACTCGCTGAG |
| | | | CAAGCTTAGCTACCTC | GATCCGAGA |
| | | | CATTGTCCTG | |
| BCE38_rna | 10548 | GGGAGGACGAUGCGG | GACGGGUUUCCUUCUC | CAGACGACUCGCUGAG |
| | | | CUGACUACAUGAGAUU | GAUCCGAGA |
| | | | AAUAAACGCGC | |
| BCE38_dna | 10549 | GGGAGGACGATGCGG | GACGGGTTTCCTTCTC | CAGACGACTCGCTGAG |
| | | | CTGACTACATGAGATT | GATCCGAGA |
| | | | AATAAACGCGC | |
| BCE39_rna | 10550 | GGGAGGACGAUGCGG | CACUAUCCGUUUGUCC | CAGACGACUCGCUGAG |
| | | | CGUCCUCUCGUGGUAU | GAUCCGAGA |
| | | | UGCGCAUGC | |
| BCE39_dna | 10551 | GGGAGGACGATGCGG | CACTATCCGTTTGTCC | CAGACGACTCGCTGAG |
| | | | CGTCCTCTCGTGGTAT | GATCCGAGA |
| | | | TGCGCATGC | |
| BCE40_rna | 10552 | GGGAGGACGAUGCGG | CACUAUCCGUUUCGUC | CAGACGACUCGCUGAG |
| | | | CGUCCUCUUGUGGUAU | GAUCCGAGA |
| | | | UGCGCAUGC | |
| BCE40_dna | 10553 | GGGAGGACGATGCGG | CACTATCCGTTTCGTC | CAGACGACTCGCTGAG |
| | | | CGTCCTCTTGTGGTAT | GATCCGAGA |
| | | | TGCGCATGC | |
| BCE41_rna | 10554 | GGGAGGACGAUGCGG | CACUAUCGUUUGUCCG | CAGACGACUCGCUGAG |
| | | | UCCUCUUGUGGUAUUG | GAUCCGAGA |
| | | | CGCAUGC | |
| BCE41_dna | 10555 | GGGAGGACGATGCGG | CACTATCGTTTGTCCG | CAGACGACTCGCTGAG |
| | | | TCCTCTTGTGGTATTG | GATCCGAGA |
| | | | CGCATGC | |
| BCE42_rna | 10556 | GGGAGGACGAUGCGG | UAUGGGGGCUUUUUAA | CAGACGACUCGCUGAG |
| | | | GCACUUCUCGGUAAAC | GAUCCGAGA |
| | | | UUGGGCAGUUAC | |
| BCE42_dna | 10557 | GGGAGGACGATGCGG | TATGGGGGCTTTTTAA | CAGACGACTCGCTGAG |
| | | | GCACTTCTCGGTAAAC | GATCCGAGA |
| | | | TTGGGCAGTTAC | |

[0893] The aptamers in Table 12 were identified as having enrichment compared to the input library of at least 10-fold and at least 5-fold more prevalent in the aptamer pools selected against cancer microvesicles versus non-cancer microvesicles.

[0894] Each sequence in Table 12 is synthesized in two variants for further investigation: 5′ biotinylated and 3′ biotinylated. This provides aptamer variants that can be captured at the 5′ end or the 3′ end as desired. The aptamers are further synthesized with each pyrimidine (C and U) 2′Fluoro modified. The DNA sequence corresponding to each RNA sequence in Table 12 is provided in the table, where the DNA sequence directly follows its corresponding RNA sequence. For example SEQ ID NO. 10529 is the DNA sequence corresponding to RNA sequence SEQ ID NO. 10528, etc. As noted, both forms of the aptamers are synthesized for further characterization.

### Example 19

### Aptamer Library Generation

[0895] In this Example, an aptamer library with high diversity is generated using varying concentrations of nucleotides in lieu of the typical equal molar concentrations. See FIG. 12. In providing such varying nucleotide concentrations, the resulting random sequence library comprises oligonucleotides having different ratio between A/T and G/C depending on particular concentrations of nucleotides input. Furthermore, the resulting library provides greater chemical and structural diversity of oligonucleotide molecules with the benefit of providing more potential binding partners for a plurality of targets that would be present in a complex input sample (e.g., tissue or tissue components, cells or cell components, extracellular vesicles, etc.). Such highly diverse random libraries are used as input to enrich for oligonucleotides having high affinity for desired targets present in an input sample. Unexpectedly, aptamers exhibiting differential binding to disease versus non-disease samples (e.g., cancer versus non-cancer) are discovered that are not available when utilizing standard equa-molar concentrations of nucleotides.

[0896] As described herein, a starting aptamer input library is processed through several rounds of selection to enrich for a subset library that provides a differential readout, such as through sequencing. The starting input library may itself comprise of multiple subset libraries wherein each of the subset libraries is generated using a different concentration of G and C nucleotides, in order to generate nucleic acids with higher or lower final GC content. In this aspect of the invention, varying concentrations of nucleotides beyond 25% each (e.g., 12.5% each A/T and 37.5% each G/C, merely as one example), may include increasing/decreasing concentrations of A/T in relation to G/C nucleotides. For example, one or more random sequence libraries are generated, using a G and/or C nucleotide concentration for a particular library that is anywhere from about 5 to about 95 percent (including any single unit of measurement between the range 5 to 95) of the total nucleotide concentration. Exemplary but non-limiting nucleotide concentrations are shown in Table 13.

TABLE 13
Exemplary nucleotide percentages for aptamer library generation

| A | T | C | G |
|---|---|---|---|
| 5 | 5 | 45 | 45 |
| 10 | 10 | 40 | 40 |
| 15 | 15 | 35 | 35 |
| 20 | 20 | 30 | 30 |
| 25 | 25 | 25 | 25 |
| 30 | 30 | 20 | 20 |
| 35 | 35 | 15 | 15 |
| 40 | 40 | 10 | 10 |
| 45 | 45 | 5 | 5 |
| 5 | 5 | 5 | 85 |
| 10 | 10 | 10 | 70 |
| 15 | 15 | 15 | 55 |
| 20 | 20 | 20 | 40 |
| 25 | 25 | 25 | 25 |
| 30 | 30 | 30 | 10 |
| 5 | 5 | 85 | 5 |
| 10 | 10 | 70 | 10 |
| 15 | 15 | 55 | 15 |
| 20 | 20 | 40 | 20 |
| 25 | 25 | 25 | 25 |
| 30 | 30 | 10 | 30 |
| 5 | 85 | 5 | 5 |
| 10 | 70 | 10 | 10 |
| 15 | 55 | 15 | 15 |
| 20 | 40 | 20 | 20 |
| 25 | 25 | 25 | 25 |
| 30 | 10 | 30 | 30 |
| 85 | 5 | 5 | 5 |
| 70 | 10 | 10 | 10 |
| 55 | 15 | 15 | 15 |
| 40 | 20 | 20 | 20 |
| 25 | 25 | 25 | 25 |
| 10 | 30 | 30 | 30 |

[0897] A starting input library for selection of one or a group of aptamers may be comprised of at least one (e.g., 1, 2, 3, 4, 5, 6, 7, 8, 9, 10 or more) subset libraries having differing nucleotide content. Each subset library may comprise, for example, 10¹² different oligonucleotides (for 1.7 pmols of 80 bases library). In one non-limiting example, an input library is comprised of three subset libraries, each having GC content of 25%, 50% and 75%, respectively. Based on Applicant's teachings herein, it will be apparent to one of ordinary skill in the art that both the number of subset libraries and GC content of each subset library can be varied as disclosed herein to provide different input libraries. A subset library used in an input library can be generated using nucleotides that are less than, equal to or greater than 50% G and/or C.

[0898] Therefore, the invention provides a method of generating a starting oligonucleotide library with high diversity. Such libraries provide advancement in assessing a disease or condition using an aptamer library as the basis for differentiating between two samples/states. This is clearly distinguishable from conventional techniques of identifying aptamer(s) that are specific for a specific known or unknown target. In various embodiments, the nucleotides used may be natural nucleotides, modified nucleotides, use of unnatural nucleotides or combinations thereof. Such species of modified or unnatural nucleotides are known.

### Example 20

### Oligonucleotide Probe Library

[0899] In this Example, the oligonucleotide detection method (see, e.g., Example 15 above) is applied to distinguish breast cancer patient samples from normal (i.e., non-breast cancer as confirmed by negative biopsy) biological samples. The oligonucleotide library used to detect and/or distinguish the samples may be referred to herein as an “oligonucleotide probe library” or “oligonucleotide profiling library.” A randomized oligonucleotide library was trained against microvesicles derived from the blood of breast cancer patients and normal (non-cancer) individuals. The approach described above with respect to FIG. 13D was applied. See FIG. 14A.

[0900] The naïve input oligonucleotide library consisted of a 3′Phosphorylated ssDNA oligonucleotide library with the following sequence: 5′-ATCCAGAGTGACGCAGCA-30n-TGGACACGGTGGCTTAGT-3′ (SEQ ID NO. 10558), where n comprises A, T, C, G, U or other nucleotide. As shown, each oligonucleotide has 18 nucleotide primer regions with a central 30 nucleotide variable region. The only modification is the single 3′ phosphorylated nucleotide. Positive selection was performed wherein plasma samples from the breast cancer patients were contacted with the untrained input library. Microvesicles in the samples were collected by ultracentrifugation and oligos that were retained with the microvesicles were eluted and collected. These steps were repeated using the retained oligos as the input for the next round of selection. The partially trained library was then subjected to negative selection by contacting the library with the non-cancer patient plasma. Microvesicles in the samples were collected by ultracentrifugation and oligos that bound the non-cancer microvesicles were discarded and those found in the ultracentrifugation supernatant (i.e., those that did not bind the non-cancer microvesicles) were retained. Postive selection against microvesicles from cancer patients was performed again with repetition. The trained library was processed to remove PCR and other non-specific artifacts. The remaining oligos comprised the trained oligonucleotide probe library that preferentially recognized cancer-derived microvesicles. This same process was repeated in reverse to identify a trained oligonucleotide probe library that preferentially recognized non-cancer-derived microvesicles (i.e., positive selection against non-cancer samples and negative selection against cancer samples). A conjoint library was created by mixing half of each library by weight. Using this process and determining the library composition via next generation sequencing (Illumina HiSeq platform), an oligonucleotide pool of 1,395,706 unique sequences was created. Of these, 843,729 sequences were detected a single time. The 500,000 most commonly occurring sequences in the oligonucleotide pool ranked in order of most to least occurrence are incorporated herein in SEQ ID NOs. 10559-510558.

[0901] The protocol to test the samples with the oligonucleotide probe library is described below in Example 21. Briefly, plasma samples were contacted with the trained oligonucleotide probe library. Microvesicles were isolated from contacted plasma samples using ultracentrifugation. Oligos that were retained with the microvesicles were eluted and sequenced using next generation sequencing methodology. The frequency of retained oligos that bound the microvesicles was determined

[0902] The oligonucleotide probe library developed using the above approach showed good recovery, signal to noise, and reproducibility. FIG. 14B shows a plot of the number of oligonucleotides that bound to the input sample (i.e., plasma microvesicles). A linear relationship (r²=0.99) was observed between the input sample (labeled “Plasma”) and number of bound oligonucleotides. In contrast, few if any oligonucleotides bound to control samples comprising human serum albumin (labeled “HSA”) or the plasma supernatant without microvesicles (labeled “SN”). FIG. 14C shows that the method was highly reproducible with multiple sequencing runs displaying high linear correlation. In this Figure, microvesicles from a single sample were probed at a 1× and 2× concentration. A linear relationship was observed with twice as many oligos binding the 2× input. This figure is one of many such examples. Similar linear relationship was observed when comparing different sequencing runs on the same sample or different ultracentrifugation preparation of the same plasma sample. In contrast, a large spread was observed when comparing sequencing profiles between different patient samples. Thus, the differences between patient samples were significantly larger than sources of technical variance showing that this method is capable of measuring differences in the underlying biological system. FIG. 14D shows the formation of a standard curve by comparing known actual input versus the measured output. Inclusion of a standard curve with every sample allows for absolute quantification and normalization between samples.

[0903] Importantly, we observed that the variance of the method is a function of the sequencing depth and therefore can be controlled by the number of sequencing runs performed. FIG. 14E illustrates this point. Results were obtained by sequencing of the probe library that bound the input samples. The figure shows the coefficient of variation (CV) plotted against the number of bound oligonucleotides detected. As seen, the greater the number of oligonucleotides sequenced allows detection of sequences with lower CV. Accordingly, the assay is reproducible as the variance can be controlled by increasing the amount or sequencing data collected. FIG. 14F reveals the distribution of high frequency oligonucleotides detected. The aptamers within the box indicate a subset of reproducible oligos (CV<0.2). These oligos have potential use as individual markers.

[0904] Based on the results in FIGS. 14B-14F, the detection of the oligonucleotide probe library trained against breast cancer and normal samples was reproducible with low noise. Individual members of the oligonucleotide probe library were identified that showed the most separation of breast cancer and normal samples. FIG. 14G shows a plot of the sequencing profile (frequency vs. count) of the oligonucleotide probe library ies enriched for breast cancer microvesicles in plasma. Multiple sub-populations of markers were observed in the plot. FIG. 14H shows plots of four individual oligonucleotides that showed differences between breast cancer patients and biopsy negative controls. These oligonucleotides were identified as preferentially binding the cancer samples. Multiple individual oligonucleotides can also be combined. FIG. 14I shows plots of the combination of 20 individual oligonucleotides that preferentially binding the cancer samples. As seen in the plot, complete separation was observed between the breast cancer patients and biopsy negative controls. The sequences of these 20 individual oligonucleotides are shown in Table 14. Similarly, FIG. 14J shows results obtained by four representative individual oligonucleotides that preferentially bound the normal samples, and FIG. 14K shows plots of the combination of 20 individual oligonucleotides that preferentially bound the normals. The sequences of these 20 individual oligonucleotides are shown in Table 14. As in FIG. 14I, complete separation was observed between the breast cancer patients and biopsy negative controls.

TABLE 14
Use of oligonucleotide probe library to detect breast
cancer

| Preferentially | | |
|---|---|---|
| detect | Sequences (5′->3′) | SEQ ID NO. |
| Breast Cancer | CGGGGCTGTTTGTCGGGACCTGGGTCCCTG | 510559 |
| microvesicles | GTCTAGCACGCCCACCTCCAGGCAGGCTGA | 510560 |
| | CAGTGACATGTAAATTCAATGCCCTGCATA | 510561 |
| | TGATAATCGTTTGTTTGTAGCAAAGCGCAG | 510562 |
| | GGGGAACACGCATATTGAGTACAAATGATG | 510563 |
| | TCGTTGTAGGATATCGGCCCGCCGTACACA | 510564 |
| | GCCAATCCGCAGCATCGGAGGGCTAAGGAA | 510565 |
| | CTTGAGCGCTGGTCCCCGGTTCAGCATGAT | 510566 |
| | GGTACGTTTGATTTAACTACGGGTTATACT | 510567 |
| | AGAGTATATTCGGGACCAATAGTACGATGG | 510568 |
| | CGTACATCGGATTGCTCTAGAATGCAGAAT | 510569 |
| | GATTGTAACGCCAACCTTATATCCATTCAG | 510570 |
| | TAAAGCATGCTACAATTCACGCAGTAGTAA | 510571 |
| | TCCGATCGGTTGGTCACCGAGTGATTTCGA | 510572 |
| | GAAACGATCGCCTGTACAATTAGGTTAAGG | 510573 |
| | ATGCAGTTCTATACAATGCCAGTGGGATAG | 510574 |
| | CAAAAATGTCACGAGAAAAGGAAAGGTTGG | 510575 |
| | TAACCAGTGGGGGGATCTAAAAGATAAACG | 510576 |
| | GAATACCCGGCAGGGATGGTTGATACTCAG | 510577 |
| | ATCGGACGGAAGTAGCAGTTCACGCGTAAC | 510578 |
| Non-Breast | TCCTGAATTGCCTCAGTCGAAAGGTCAGTC | 510579 |
| Cancer | AACTTAGCGCGAGTTGAAAAGACGGTTTAC | 510580 |
| microvesicles | AATTGATACGATGAAATTCGGTCGGTTGCA | 510581 |
| | GGCGGGCAAAGGGGGTAATGAGTCCGAAGG | 510582 |
| | TAGCTACGTACGCATAGGATTTGAGCCGGT | 510583 |
| | TAGGGATGTGACCAAGGATTATCCAGGTGG | 510584 |
| | TCCGAAATCTCCTCCGCAATGGACGCGTCG | 510585 |
| | GGGCCTACGCCCTGTGACGATGCTCCCAAG | 510586 |
| | GGAGGGGTGTTAGTTCAGTGTTGAGAGTTT | 510587 |
| | TTGTAATAATGGTCCGCGGTGGAGTTTCGA | 510588 |
| | GGGTCGGTAAACCAGGGTGGTATCTGTAAA | 510589 |
| | GATGTTAAACTACTTCGTAAGAGTTGGTGA | 510590 |
| | AGCATGAGGGAGGATGGGTCGTGGGGGGCC | 510591 |
| | GACAGCTCACAATGAGACAGTATCAGCTAC | 510592 |
| | CATCCTTGAGTGAGATCGTCTGTCCCACTA | 510593 |
| | AGGTTTAGGAGGATGGCGGGAGTAGATTAG | 510594 |
| | AATTACGTGAGAATCCCGGTGACCCTAAGC | 510595 |
| | AACTTGCCTTCCGCAATGACAAATACATGT | 510596 |
| | CATTGTCGAGGCCACGTGCGGATAAATAGT | 510597 |
| | CGGACTCGAGGGGGAGGACATCGGAGGCAA | 510598 |

[0905] The results of any number of individual oligonucleotides can be combined. For example, FIG. 14L shows results obtained by combining 46 individual oligonucleotides that preferentially bound the cancer samples (C1-10) versus normal (NC1-9). These 46 oligonucleotides were selected as showing a fold-change in frequency between cancers and normal of 2.2. As above the observed sensitivity and specificity were both 100% in these samples.

[0906] This Example illustrates the development and use of an oligonucleotide probe library to distinguish plasma samples and cancer or non-cancer. As shown above, the method provided 100% separation between the samples. One of skill will appreciate that the method can be applied to distinguish other types of biological entities (e.g., cells, protein complexes) and phenotypes (e.g., different cancers, different diseases).

### Example 21

### Oligonucleotide Probe Library for Multiple Indications

[0907] In this Example, an oligonucleotide probe library as described above in Example 20 was tested for its ability to distinguish between multiple types of cancers and other diseases versus normal (i.e., non-diseased) samples. For this Example, plasma and serum were used as input samples based on sample availability.

[0908] The general approach to library enrichment is as follows. The starting naïve library was based on SEQ ID NO. 10558 as described above in Example 20. This library comprises ˜10¹² unique representatives (e.g., single-stranded DNA oligonucleotides, ssDNA). Several positive enrichment (binding) as well as counter-enrichment (subtractive) steps were performed. For enrichment of oligonucleotides that bind to microvesicles of a specific sample population (e. g., breast cancer patients in this Example), the starting library was mixed with a pool of plasma obtained from patient samples and incubated. A centrifugation step is performed to isolate the microvesicles in the sample. Ultracentrifugation or polymer precipitation (e.g., PEG4000, PEG8000) with low speed centrifugation have been successfully used. Oligonucleotides with affinity and specificity to the microvesicles remain bound during the centrifugation whereas unspecific binding is suppressed by the addition of competitors (e.g., salmon sperm DNA, tRNA, 51, CM-D, combinations thereof, or the like). Non-binding oligonucleotides and binders to non-exosomal proteins (such as HSA) are removed when the supernatant is discarded. Bound oligonucleotides are recovered (eluted) from the resuspended microvesicle pellet. For depletion of the library from binders to a second sample population (e. g., healthy control such as non-cancer patients), the recovered oligo pool is mixed with a pool of samples from the second sample population and binders to microvesicles in the control samples are removed by discarding the pellet resulting from centrifugation. In a second positive enrichment, the supernatant (which now comprises oligos which bound the first sample population but not the second sample population) is mixed with isolated microvesicles from another aliquot of the first sample population and binders are recovered representing a single-round enriched library. This scheme may be iterated multiple times to further enrich the library and reduce its complexity. In a final step, the library is amplified by PCR and reverted to ssDNA by lambda exonuclease digestion and cleaned up. The same procedure performed to enrich for binders to the second (control) population as opposed to the first (cancer) population. A combination of the two enriched libraries comprises binders to targets characteristic of both sample populations, e. g., binders to both up- and down-regulated cancer markers. The combination of enriched libraries is then used as the oligonucleotide probing library. The course of the enrichment (copy and species numbers contained in a library) is followed by qPCR and high throughput sequencing.

[0909] The enriched oligonucleotide probe library was tested against individual samples as in Example 20. The protocol is described below in Example 22. Briefly, the plasma or serum samples were contacted with the trained oligonucleotide probe library. Microvesicles were isolated from the contacted samples using ultracentrifugation. Oligos that were retained with the microvesicles were eluted and sequenced using next generation sequencing methodology. The frequency of retained oligos that bound the microvesicles was determined. The method was used to distinguish normal serum or plasma from serum or plasma from a variety of indications as indicated in Table 16. Heat maps were created using cluster analysis and are shown for the indications in FIGS. 15A-AN. The oligonucleotides were selected as those having p<0.1 between the conditions and normal samples and also as appearing at least 100 times in all samples (as a quality measure). After this filtering, 165 sequences remained, as shown in Table 15. In the plots in FIGS. 15A-AN, individual oligonucleotides are shown on the Y-axis and samples are shown on the X-axis (normals are indicated as such). The sequences in Table 15 are the variable regions of the input library without flanking sequencing primer regions. Table 16 indicates the sequences from Table 15 that are shown in the corresponding heat maps in FIGS. 15A-AN for the various indications.

TABLE 15
Filtered selection of oligonucleotide probe
library to detect various conditions

| Sequence (5′->3′) | SEQ ID NO. |
|---|---|
| AAAGAATCGCCAACCAACACGACCTGAGAG | 510599 |
| AAAGGCGATTGTATATCCAGGTGCCGCCAA | 510600 |
| AACGTAGATAACCAAAAGAGTGATACAAAG | 510601 |
| ACAACAACGAATACAATGCGTAAGAGTGCA | 510602 |
| ACACACCCGGAAGAGAGAGCGGAAACCGAA | 510603 |
| ACCCAAACAACAACCTTGGAATCCAGCAGA | 510604 |
| ACGACAGTATCTAAGAGAGAACCGAAGTAA | 510605 |
| ACGTCCACCGAAAAAACTCGCCACGGCAGA | 510606 |
| ACTCTAACCAGAGAGATCCAGCCAACCGAA | 510607 |
| AGAAACAATGCCACCCATCCAAACCAATAG | 510608 |
| AGACCACAACTCGACCCTTTCACAGAAGAG | 510609 |
| AGATCCCTAGCAATGAATGAAGTATCCAGG | 510610 |
| AGATCGTTGGTGCGACTTATCAGGGTGAAT | 510611 |
| AGCAAAGGAATCACAGAGTATAGGACCACA | 510612 |
| AGCCTGGCGCCCCGGGGAGGGTGAACCTGT | 510613 |
| AGCGCACCACGAAGACAACCACAATTAGCA | 510614 |
| AGGAAAGAAGAGGAGGTCCGACACACCAGG | 510615 |
| AGGAAGAACCAACAACTGAAACGTCTAGAG | 510616 |
| AGGCGTGAACTACACACAATGAGTGACTAA | 510617 |
| AGGGCACACCAAGATAGCGGTAACGTGAGT | 510618 |
| AGGGCCATCACATACAGCAACGAATTAGAG | 510619 |
| AGGGGCACAGTGAAAAACATGCTAACCAGG | 510620 |
| AGGTGTAGAAGTCAATCTGAGAATCCTAGA | 510621 |
| ATAACCAGAAGACAGGAAGAACGAGACGAG | 510622 |
| ATGCCCAGATAGCAGAGCACAACGGGAGGA | 510623 |
| ATGCCGAGAGACGCCGATCTGCGTGGTTGG | 510624 |
| ATTGAACAGAAACCACATGCCAATCCAGTG | 510625 |
| ATTGTATATCCCTGTTGGCATTACGCCAT | 510626 |
| ATTTAACGCAGTTTATCCGTTCACCTAACT | 510627 |
| CAAAAGGGTAACCAACAGAAATAGAGGACG | 510628 |
| CAAGTAGACCACACTGACACACCAGCAGAG | 510629 |
| CACACCCCAAGATCGATAAACGAGTAGCCA | 510630 |
| CACTAGAACTTCTCAGAGATCGTCGCCCAA | 510631 |
| CAGGGCGTGTATATGATGGTGTTGTATGGT | 510632 |
| CATAACAAGACTTCATTCTTTCGCTCCATT | 510633 |
| CATGCAATACAACCATCCTAACAGAACCAG | 510634 |
| CATTAAGAACAAACACAAGAAAAGAGGGCG | 510635 |
| CCAAAAAACAAGTCGAATATGTCACACAGA | 510636 |
| CCAACAAGACGCAAAAACAAAAGTACCAGA | 510637 |
| CCACACAACGCAACAGAGTGATCTAACGCG | 510638 |
| CCATCACGAAAAATAAGCGCAGAGAAAGCA | 510639 |
| CCATTAACCATTATCAGAGGACCGCGAATC | 510640 |
| CCCCCCTCTGTCTCTTGTTTCTCTTTTCTA | 510641 |
| CCCCTCTCGCTTTCTATTCCTTTGTGCCCT | 510642 |
| CCCGCCTGATCCAAAGTACTGACTCTGTTA | 510643 |
| CCGAAAACAGGAGCCAAAAGGGTAAGAGGA | 510644 |
| CCGAATCCAGACAGGAGCGAGCCCAACAGG | 510645 |
| CCGACACCAGAACTAGGAGCATCGAGCACA | 510646 |
| CCGGACGGAAGATAGGAGGAACAGCTGCAG | 510647 |
| CCGTAAAGGAGGGGGAGGATCCAGCGAATT | 510648 |
| CCTATCGAAAACCCCCCTCATCACA | 510649 |
| CCTTTTGTTGAAAATGAATCCGCTCTTTAT | 510650 |
| CGAACAAATCGATACAATACGGATCAAGGG | 510651 |
| CGACACAAACCAGTGGGAAAGCACTAAGCA | 510652 |
| CGACCAACCTACCACGAACACTCCCCTGGA | 510653 |
| CGAGCCGTCGGAGGGAAAAAGCTAAGGGAG | 510654 |
| CGAGGAAAGATCATGACTCCATACCAGATG | 510655 |
| CGAGGAACAACTCACAGATAGAAAAGGAGG | 510656 |
| CGATCAGCCGAGAAAGAAGGAAGAGTGGCA | 510657 |
| CGCAAGAAGAGGACGCATATAGTACTACCG | 510658 |
| CGCATTGCAAGAGGGAAAATACAGAGTGCC | 510659 |
| CGCCGTCAAAACAGGATGAACGTATAAGAG | 510660 |
| CGCGTTAGACCAGAGGACAAATAGCATGAA | 510661 |
| CGGGACATGCAGAAACCAGAGAGGAACGCG | 510662 |
| CGGGCACACAAGAAGCAAAGAGAGGATGCA | 510663 |
| CGGTAAGGAGGGTCACCGACGTCGCGCCGT | 510664 |
| CGTAATACATCACACCGAAACAAGGCCAGA | 510665 |
| CGTCACCAATCCCAGAACAAGGAAGCCTCG | 510666 |
| CGTCCCACAAAGAACACCTACCTGCCAAGA | 510667 |
| CGTCGGGCAATCGAGGAGGGGGAGTTCGCA | 510668 |
| CGTGCAGTAAATACCAGGAGTACCGCACAC | 510669 |
| CGTGTCAAGGAAGGTAACCAGGGAGACGAA | 510670 |
| CTAGAAAGAACCACCGAAGAGTTACGCGTG | 510671 |
| CTCGCAGTTACCGCCTTGTCATCCAAATCA | 510672 |
| CTCTTCTCTGCCCCCTGTTTTTCTATCTCT | 510673 |
| CTGGAACTATTACTATACTGATCTCTAAAT | 510674 |
| CTGGACAAACAGCGAAATGAAGAGGGATCG | 510675 |
| CTTATTTCTTTTATAAGTCGTTTACTCAGA | 510676 |
| CTTCTCTATCCAGATTGCCCCTTTATTCTT | 510677 |
| GATACTAGACCACCACGTGTCCATCACAAAAGAC | 510678 |
| GATACTAGACCACCACGTGTCCATCAGAAAAGAC | 510679 |
| GCAGAGTAATCGACCGTCTACCTTCCAGCG | 510680 |
| GCCACGAAGAAAGAGGGAATCAAGCAGAGA | 510681 |
| GCCAGAAGCGAACACACAACCAGATATGAG | 510682 |
| GCCCTATTCCCTCGCTTTCTCCCCTTTTGT | 510683 |
| GCCGAGGGATACCGGAAACAAAGGGAAGCA | 510684 |
| GCGGAAAATTTACCAGAGTGAGGATAACAA | 510685 |
| GCGGAACAAGCAGAAACCAGGAGTAGCACC | 510686 |
| GCGTCAATACCAGAGGGCGATAGTCGTTAG | 510687 |
| GGAGCGCCAAAATAAACGAATCCTCCATAG | 510688 |
| GGAGGAGAGGTAAGGAACACAACAGAACCA | 510689 |
| GGATGGCGTCGACAAACCTCAACTCCAGAA | 510690 |
| GGCAACGTCTACCGAAACAGAGGAGCACTA | 510691 |
| GGCACAACAACGAATAACTACGAAGATACG | 510692 |
| GGCATCAATAAACACGATCCCCGCAAGGAG | 510693 |
| GGCCAAAATGAACCAGAAAGCATCGAGCGA | 510694 |
| GGCGAAGGAAGGATAACAAGATTCGGGTGGA | 510695 |
| GGGAACGGGAACAATGAATAGGAAGCTGAG | 510696 |
| GGGAACGGTAGAATAACACTTAAGAACAGA | 510697 |
| GGGTGGGCGCGGGAGGAGGTGGGGGAGGGT | 510698 |
| GTACACCAAACACCGCATATCCGCGCCAGA | 510699 |
| GTAGTCAATGGGAAACAGAGTTACGATCGA | 510700 |
| GTGATGTATTTGCCTGTGTTTATCGCTTTT | 510701 |
| TACGTCTTTTTTCGCTTTTGATCATCTCTG | 510702 |
| TACTTATCCAGGAGGATAAGTCGATTACTA | 510703 |
| TACTTATCCCCTCATGATAAGTCGAGTACT | 510704 |
| TACTTATTCCATTAAATAAGTCGATTACTT | 510705 |
| TACTTATTCTTATAAGTCGAGTACTTCCCA | 510706 |
| TATTGAGTTGTGTATTCTTTTTGGTGCTCC | 510707 |
| TCAACAGAGGATGCAGTAATAAAGCCGCAA | 510708 |
| TCACACACCGGGATTCGGACCTACTACCTT | 510709 |
| TCACGCAAGAGGAGGAGGAGGGACACACGA | 510710 |
| TCATAAGACCGAGCCAGAAGCGTACCCGAG | 510711 |
| TCATATCTGTTGTGTTTTCCTCTTGTGTAT | 510712 |
| TCATTCAAACAGAGGGCATAGCACATTCGA | 510713 |
| TCCGTAAAAGAGAGTAGACGTCCAGACCCA | 510714 |
| TCCTTACACCATACCTATCTACAATTTACT | 510715 |
| TCGACCACCTTCAGAACTAACCGCACTGAG | 510716 |
| TCGATATATGGTCGGGTATTCGATATTT | 510717 |
| TCGGAACGTAATTCAGGACCAGAGCACGCA | 510718 |
| TCTATGCCGCAATGTTTCGAAACGTTGCTT | 510719 |
| TCTCATGAGTGTCTTTCAACCTCTCATTCT | 510720 |
| TCTTATCTGTTGTGTTTTCCTATTGTGTAT | 510721 |
| TCTTATCTGTTGTGTTTTCCTCTTGTGTAG | 510722 |
| TCTTATCTGTTGTGTTTTCCTCTTGTGTAT | 510723 |
| TCTTCACCGTTTATTCTAAGGATTTTTTTC | 510724 |
| TCTTTCGTCTTGTTATGTATTGCTGCGTCACTCT | 510725 |
| TCTTTCTTTTGTGTAGTCCTCTTTTCTTGT | 510726 |
| TGACCCCAACCATACCAACAACATCCATAG | 510727 |
| TGATCTGTTGTGTTTTCCTCTTGTGTAT | 510728 |
| TGATCTGTTGTGTTTTCCTTTGGGTTTTCT | 510729 |
| TGATGTGTAGGTTTACTCCCGTATAAA | 510730 |
| TGATGTGTAGGTTTACTCCTCTACCTTGCG | 510731 |
| TGCGCATAAAATAAGAAAAGAGGGGTGCAC | 510732 |
| TGGACAAGACCACCGAAAAAATAGCAGAGT | 510733 |
| TGGGAGGGTAGTGGTGGCGGTGGGGGAGGG | 510734 |
| TGTGCCTGTTTCCTTATTGTTGTGTTTTCC | 510735 |
| TGTTTTCCTTCTTACCTTTATGCTGCGTCACTCT | 510736 |
| TGTTTTCTCTTTCTACTCTTCCCCCCTCTG | 510737 |
| TTACGATAAGAAAATAAGGAAGATAACAGA | 510738 |
| TTACTTATTACTGAGAATAAGTCGTTTACT | 510739 |
| TTACTTATTCAAGGTATAAGTCGTTTACTG | 510740 |
| TTACTTATTCACCGTAATAAGTCGAGTACT | 510741 |
| TTACTTATTTTGTAATAAGTTGATTACTTG | 510742 |
| TTATGTGTAGGTTCACTCATATATTTCTTT | 510743 |
| TTATGTGTAGGTTTACTCCTCTACCTTGCG | 510744 |
| TTCCACTTTCCCTTCGTTGTATTCTCCTTT | 510745 |
| TTCCCTTGTTTCCTGTTGTGTTGTCCTCCT | 510746 |
| TTCCTTTTGTGTAGTCCTCTTCTCTTTACT | 510747 |
| TTGCGCTTTTGTGTAGGTTTACTCCCTTTT | 510748 |
| TTGTGTAGGTTTACTCCTCTACCTTGCG | 510749 |
| TTGTGTGTTTCTTTGCTGGGTGAATCCCTT | 510750 |
| TTGTTGTGTAGGTTTACTCCCGTATAAA | 510751 |
| TTGTTGTGTAGGTTTACTCCTCTACCTTGCG | 510752 |
| TTGTTGTGTTCTCTTTTTGTGTTTTCCTAG | 510753 |
| TTGTTGTGTTCTCTTTTTGTGTTTTCCTAT | 510754 |
| TTGTTGTGTTCTCTTTTTTTGTTTTCCTAT | 510755 |
| TTTCTATTCCCCCCTGCCCTTTTGTCTCGC | 510756 |
| TTTGTGTAGGTTTACTCCCGTATAAA | 510757 |
| TTTGTGTAGGTTTACTCCTCTACCTTGCG | 510758 |
| TTTGTTGTGTAGGTTCACTCATATATTTCTTT | 510759 |
| TTTGTTGTGTAGGTTTACTCCCGTATAAA | 510760 |
| TTTGTTGTGTAGGTTTACTCCCTTTT | 510761 |
| TTTGTTGTGTAGGTTTACTCCTCTACCTTGCG | 510762 |
| TTTGTTGTGTTCTCTTTTTGTGTTTTCCTAT | 510763 |

TABLE 16
Use of oligonucleotide probe library to detect various conditions

| | Sample | | |
|---|---|---|---|
| Indication | Type | FIG. | SEQ ID NOs. |
| Alzheimer's disease | Plasma | FIG. | 510600, 510604, 510605, 510608, 510609, 510612, 510614, |
| | | 15A | 510629, 510632, 510633, 510634, 510641, 510642, 510643, |
| | | | 510646, 510648, 510649, 510651, 510652, 510653, 510655, |
| | | | 510661, 510667, 510673, 510675, 510676, 510677, 510678, |
| | | | 510679, 510681, 510683, 510685, 510687, 510688, 510690, |
| | | | 510694, 510696, 510702, 510707, 510709, 510726, 510727, |
| | | | 510728, 510729, 510730, 510731, 510732, 510737, 510740, |
| | | | 510748, 510749, 510751, 510752, 510754, 510756, 510757, |
| | | | 510758, 510761, 510762 |
| Alzheimer's disease | Serum | FIG. | 510599, 510601, 510603, 510606, 510608, 510609, 510611, |
| | | 15B | 510613, 510614, 510615, 510619, 510621, 510625, 510628, |
| | | | 510629, 510630, 510632, 510634, 510635, 510636, 510637, |
| | | | 510644, 510647, 510648, 510651, 510652, 510654, 510657, |
| | | | 510665, 510666, 510667, 510668, 510677, 510678, 510679, |
| | | | 510687, 510692, 510693, 510696, 510698, 510699, 510701, |
| | | | 510702, 510707, 510708, 510710, 510713, 510716, 510725, |
| | | | 510726, 510728, 510731, 510732, 510733, 510734, 510736, |
| | | | 510741, 510748, 510749, 510755, 510757, 510758, 510761, |
| | | | 510762 |
| Bronchial asthma | Plasma | FIG. | 510601, 510614, 510619, 510623, 510627, 510631, 510633, |
| | | 15C | 510635, 510647, 510655, 510656, 510660, 510672, 510689, |
| | | | 510690, 510693, 510698, 510701, 510702, 510707, 510709, |
| | | | 510710, 510713, 510720, 510723, 510724, 510726, 510728, |
| | | | 510729, 510730, 510731, 510734, 510735, 510738, 510743, |
| | | | 510744, 510745, 510746, 510748, 510749, 510750, 510751, |
| | | | 510752, 510754, 510755, 510757, 510758, 510759, 510760, |
| | | | 510761, 510762 |
| Bronchial asthma | Serum | FIG. | 510600, 510608, 510609, 510610, 510611, 510617, 510619, |
| | | 15D | 510622, 510631, 510632, 510634, 510635, 510637, 510642, |
| | | | 510643, 510644, 510652, 510655, 510657, 510658, 510665, |
| | | | 510668, 510673, 510675, 510676, 510677, 510678, 510679, |
| | | | 510683, 510691, 510701, 510703, 510704, 510706, 510708, |
| | | | 510709, 510714, 510725, 510736, 510737, 510740, 510741, |
| | | | 510742, 510756 |
| Transitional cell | Plasma | FIG. | 510607, 510619, 510623, 510631, 510632, 510635, 510641, |
| carcinoma of the | | 15E | 510642, 510647, 510656, 510657, 510658, 510659, 510673, |
| bladder | | | 510674, 510683, 510686, 510693, 510695, 510701, 510702, |
| | | | 510707, 510708, 510711, 510716, 510722, 510725, 510726, |
| | | | 510728, 510731, 510734, 510737, 510744, 510748, 510749, |
| | | | 510751, 510752, 510753, 510756, 510757, 510758, 510761, |
| | | | 510762 |
| Giant cellular | Serum | FIG. | 510612, 510620, 510635, 510637, 510641, 510644, 510648, |
| osteoblastoclastoma | | 15F | 510658, 510662, 510663, 510667, 510668, 510670, 510676, |
| | | | 510678, 510679, 510682, 510683, 510685, 510686, 510699, |
| | | | 510708, 510712, 510722, 510737, 510753 |
| Brain Tumor | Plasma | FIG. | 510607, 510619, 510624, 510628, 510639, 510641, 510645, |
| | | 15G | 510647, 510648, 510655, 510657, 510665, 510668, 510673, |
| | | | 510674, 510689, 510695, 510698, 510699, 510705, 510710, |
| | | | 510711, 510712, 510713, 510716, 510734, 510737, 510738, |
| | | | 510762 |
| Colorectal | Plasma | FIG. | 510603, 510607, 510611, 510616, 510618, 510619, 510623, |
| adenocarcinoma | | 15H | 510624, 510641, 510644, 510646, 510647, 510655, 510656, |
| | | | 510672, 510673, 510690, 510693, 510695, 510698, 510701, |
| | | | 510702, 510709, 510711, 510714, 510716, 510719, 510723, |
| | | | 510724, 510725, 510726, 510730, 510731, 510734, 510735, |
| | | | 510737, 510738, 510743, 510744, 510748, 510749, 510751, |
| | | | 510752, 510754, 510755, 510757, 510758, 510760, 510761, |
| | | | 510762, 510763 |
| Chronic obstructive | Plasma | FIG. 15I | 510604, 510608, 510609, 510612, 510614, 510616, 510619, |
| pulmonary disease | | | 510620, 510629, 510634, 510637, 510640, 510647, 510649, |
| (COPD) | | | 510653, 510661, 510666, 510667, 510669, 510673, 510678, |
| | | | 510682, 510689, 510690, 510701, 510707, 510715, 510723, |
| | | | 510727, 510728, 510749, 510754, 510755, 510757, 510758, |
| | | | 510762, 510763 |
| Chronic obstructive | Serum | FIG. 15J | 510601, 510609, 510611, 510613, 510620, 510634, 510637, |
| pulmonary disease | | | 510647, 510648, 510654, 510664, 510668, 510679, 510694, |
| (COPD) | | | 510696, 510698, 510699, 510701, 510705, 510706, 510710, |
| | | | 510718, 510734, 510741 |
| Squamous cell | Plasma | FIG. | 510615, 510619, 510623, 510626, 510630, 510632, 510633, |
| carcinoma of the | | 15K | 510635, 510638, 510639, 510641, 510642, 510644, 510647, |
| cervix | | | 510650, 510655, 510656, 510657, 510661, 510673, 510674, |
| | | | 510677, 510683, 510688, 510693, 510695, 510698, 510711, |
| | | | 510712, 510714, 510716, 510717, 510722, 510725, 510729, |
| | | | 510731, 510734, 510737, 510743, 510745, 510747, 510753, |
| | | | 510755, 510756, 510758, 510759, 510763 |
| Acute myocardial | Plasma | FIG. | 510607, 510608, 510613, 510626, 510629, 510631, 510634, |
| infarction (AMI)/ | | 15L | 510635, 510638, 510639, 510646, 510648, 510656, 510667, |
| acute heart failure | | | 510669, 510671, 510672, 510675, 510682, 510689, 510698, |
| | | | 510701, 510707, 510710, 510715, 510721, 510723, 510727, |
| | | | 510728, 510730, 510731, 510734, 510735, 510743, 510744, |
| | | | 510748, 510749, 510751, 510752, 510757, 510758, 510760, |
| | | | 510761, 510762 |
| Acute myocardial | Serum | FIG. | 510599, 510601, 510606, 510607, 510608, 510609, 510611, |
| infarction (AMI)/ | | 15M | 510614, 510616, 510619, 510622, 510624, 510626, 510635, |
| acute heart failure | | | 510636, 510637, 510640, 510641, 510643, 510644, 510648, |
| | | | 510651, 510665, 510668, 510669, 510672, 510675, 510677, |
| | | | 510678, 510679, 510682, 510692, 510695, 510696, 510698, |
| | | | 510699, 510701, 510703, 510707, 510710, 510725, 510726, |
| | | | 510728, 510729, 510730, 510731, 510733, 510734, 510736, |
| | | | 510743, 510750, 510751, 510752, 510755, 510757, 510758, |
| | | | 510759, 510760, 510761, 510762 |
| Chron's Disease | Plasma | FIG. | 510600, 510602, 510608, 510611, 510624, 510644, 510653, |
| | | 15N | 510656, 510659, 510669, 510671, 510676, 510686, 510689, |
| | | | 510690, 510697, 510698, 510700, 510713, 510727, 510728, |
| | | | 510729, 510731, 510734, 510744, 510751, 510757 |
| Chron's Disease | Serum | FIG. | 510600, 510610, 510611, 510615, 510618, 510621, 510623, |
| | | 15O | 510625, 510626, 510628, 510631, 510632, 510635, 510637, |
| | | | 510638, 510643, 510647, 510648, 510649, 510653, 510654, |
| | | | 510655, 510657, 510658, 510666, 510667, 510668, 510672, |
| | | | 510675, 510677, 510678, 510679, 510680, 510682, 510684, |
| | | | 510689, 510691, 510694, 510696, 510698, 510701, 510707, |
| | | | 510708, 510709, 510710, 510713, 510714, 510715, 510719, |
| | | | 510725, 510727, 510728, 510729, 510730, 510731, 510734, |
| | | | 510736, 510738, 510743, 510744, 510748, 510750, 510751, |
| | | | 510755, 510757, 510758, 510759, 510760, 510761, 510762, |
| | | | 510763 |
| Diabetes mellitus | Plasma | FIG. | 510600, 510604, 510608, 510610, 510611, 510614, 510616, |
| type II | | 15P | 510620, 510624, 510629, 510632, 510634, 510640, 510649, |
| | | | 510667, 510669, 510670, 510671, 510678, 510685, 510700, |
| | | | 510701, 510702, 510707, 510709, 510718, 510721, 510723, |
| | | | 510726, 510727, 510728, 510729, 510730, 510731, 510733, |
| | | | 510735, 510743, 510748, 510749, 510752, 510754, 510755, |
| | | | 510757, 510758, 510760, 510761, 510762, 510763 |
| Diabetes mellitus | Serum | FIG. | 510613, 510632, 510635, 510636, 510641, 510645, 510647, |
| type II | | 15Q | 510648, 510654, 510660, 510664, 510667, 510668, 510670, |
| | | | 510675, 510684, 510691, 510695, 510696, 510706, 510710, |
| | | | 510734, 510749 |
| Esophageal | Plasma | FIG. | 510602, 510619, 510623, 510632, 510635, 510638, 510641, |
| carcinoma | | 15R | 510644, 510653, 510656, 510661, 510671, 510682, 510689, |
| | | | 510693, 510698, 510714, 510722, 510725, 510731, 510734, |
| | | | 510738, 510753, 510761 |
| Squamous cell | Plasma | FIG. | 510605, 510607, 510612, 510614, 510619, 510623, 510632, |
| carcinoma of the | | 15S | 510635, 510641, 510642, 510655, 510656, 510657, 510659, |
| larynx | | | 510661, 510668, 510673, 510674, 510689, 510690, 510693, |
| | | | 510695, 510698, 510708, 510712, 510732, 510734, 510737, |
| | | | 510738, 510745, 510747, 510753, 510755 |
| Acute and chronic | Plasma | FIG. | 510600, 510605, 510607, 510610, 510612, 510628, 510631, |
| leukemia of the bone | | 15T | 510633, 510641, 510644, 510650, 510664, 510670, 510673, |
| marrow | | | 510674, 510675, 510681, 510684, 510685, 510686, 510701, |
| | | | 510711, 510712, 510717, 510718, 510719, 510720, 510721, |
| | | | 510724, 510729, 510732, 510739, 510740, 510743, 510745, |
| | | | 510746, 510747, 510752, 510754, 510763 |
| Lung carcinoma | Plasma | FIG. | 510604, 510626, 510628, 510631, 510633, 510635, 510649, |
| | | 15U | 510650, 510654, 510668, 510672, 510674, 510677, 510699, |
| | | | 510701, 510702, 510710, 510712, 510715, 510717, 510719, |
| | | | 510720, 510721, 510723, 510724, 510726, 510727, 510733, |
| | | | 510735, 510738, 510743, 510744, 510745, 510746, 510747, |
| | | | 510750, 510751, 510754, 510755, 510758, 510760, 510763 |
| Malignant lymphoma | Plasma | FIG. | 510601, 510611, 510618, 510623, 510624, 510631, 510632, |
| | | 15V | 510636, 510638, 510641, 510644, 510645, 510647, 510656, |
| | | | 510660, 510662, 510672, 510673, 510675, 510690, 510693, |
| | | | 510701, 510702, 510707, 510708, 510713, 510717, 510719, |
| | | | 510721, 510723, 510724, 510725, 510726, 510728, 510729, |
| | | | 510730, 510731, 510734, 510735, 510737, 510743, 510744, |
| | | | 510749, 510751, 510752, 510754, 510755, 510756, 510757, |
| | | | 510758, 510760, 510762, 510763 |
| Multiple Sclerosis | Plasma | FIG. | 510607, 510612, 510620, 510646, 510653, 510655, 510661, |
| | | 15W | 510663, 510669, 510675, 510682, 510685, 510686, 510690, |
| | | | 510699, 510701, 510710, 510713, 510731, 510738, 510747, |
| | | | 510758, 510762 |
| Multiple Sclerosis | Serum | FIG. | 510599, 510604, 510609, 510610, 510613, 510617, 510618, |
| | | 15X | 510622, 510632, 510635, 510647, 510670, 510675, 510677, |
| | | | 510687, 510690, 510692, 510695, 510701, 510706, 510708, |
| | | | 510731, 510733 |
| Ovarian carcinoma | Plasma | FIG. | 510618, 510626, 510628, 510633, 510638, 510641, 510642, |
| | | 15Y | 510643, 510645, 510646, 510647, 510650, 510652, 510658, |
| | | | 510665, 510666, 510673, 510674, 510677, 510682, 510683, |
| | | | 510689, 510705, 510707, 510712, 510717, 510722, 510724, |
| | | | 510729, 510732, 510735, 510737, 510745, 510746, 510747, |
| | | | 510753, 510756 |
| Parkinson disease | Plasma | FIG. | 510600, 510601, 510604, 510608, 510609, 510612, 510614, |
| | | 15Z | 510624, 510631, 510633, 510634, 510640, 510641, 510642, |
| | | | 510649, 510650, 510651, 510653, 510667, 510673, 510675, |
| | | | 510676, 510677, 510683, 510686, 510689, 510694, 510700, |
| | | | 510703, 510704, 510705, 510706, 510707, 510709, 510713, |
| | | | 510715, 510721, 510723, 510724, 510726, 510727, 510729, |
| | | | 510730, 510731, 510732, 510734, 510735, 510736, 510737, |
| | | | 510739, 510740, 510741, 510742, 510744, 510745, 510746, |
| | | | 510747, 510748, 510751, 510752, 510754, 510756, 510757, |
| | | | 510758, 510759, 510760, 510761, 510762 |
| Parkinson disease | Serum | FIG. | 510601, 510606, 510608, 510609, 510610, 510614, 510616, |
| | | 15AA | 510632, 510634, 510643, 510644, 510647, 510648, 510654, |
| | | | 510662, 510664, 510665, 510667, 510668, 510670, 510677, |
| | | | 510678, 510679, 510687, 510692, 510696, 510698, 510699, |
| | | | 510701, 510703, 510704, 510706, 510708, 510710, 510722, |
| | | | 510727, 510734, 510736, 510741, 510742, 510753, 510756 |
| Prostate | Plasma | FIG. | 510600, 510603, 510607, 510619, 510623, 510624, 510628, |
| adenocarcinoma | | 15AB | 510641, 510642, 510644, 510647, 510650, 510655, 510656, |
| | | | 510657, 510669, 510673, 510674, 510677, 510684, 510688, |
| | | | 510689, 510690, 510695, 510698, 510701, 510709, 510710, |
| | | | 510718, 510726, 510734, 510737, 510738, 510739, 510757, |
| | | | 510762 |
| Psoriasis | Plasma | FIG. | 510600, 510601, 510608, 510609, 510611, 510614, 510620, |
| | | 15AC | 510624, 510626, 510631, 510633, 510634, 510635, 510638, |
| | | | 510647, 510649, 510650, 510653, 510656, 510665, 510666, |
| | | | 510667, 510669, 510672, 510674, 510675, 510680, 510685, |
| | | | 510689, 510698, 510702, 510707, 510711, 510712, 510715, |
| | | | 510717, 510719, 510720, 510721, 510723, 510724, 510726, |
| | | | 510727, 510728, 510729, 510730, 510731, 510734, 510735, |
| | | | 510743, 510744, 510745, 510746, 510747, 510748, 510749, |
| | | | 510750, 510751, 510752, 510754, 510755, 510757, 510758, |
| | | | 510759, 510760, 510761, 510762, 510763 |
| Psoriasis | Serum | FIG. | 510600, 510601, 510604, 510613, 510621, 510627, 510637, |
| | | 15AD | 510641, 510644, 510648, 510650, 510652, 510663, 510667, |
| | | | 510668, 510676, 510680, 510681, 510699, 510701, 510703, |
| | | | 510705, 510709, 510710, 510722, 510734, 510739, 510750, |
| | | | 510753 |
| Rheumatoid Arthritis | Plasma | FIG. | 510599, 510603, 510604, 510607, 510608, 510609, 510614, |
| | | 15AE | 510616, 510622, 510625, 510627, 510629, 510630, 510634, |
| | | | 510635, 510636, 510637, 510640, 510642, 510646, 510649, |
| | | | 510650, 510651, 510653, 510656, 510664, 510665, 510667, |
| | | | 510671, 510675, 510677, 510678, 510679, 510682, 510689, |
| | | | 510699, 510707, 510726, 510727, 510728, 510729, 510731, |
| | | | 510733, 510737, 510738, 510748, 510755, 510758, 510761, |
| | | | 510762 |
| Rheumatoid Arthritis | Serum | FIG. | 510599, 510601, 510603, 510604, 510606, 510607, 510608, |
| | | 15AF | 510609, 510610, 510611, 510612, 510613, 510614, 510616, |
| | | | 510617, 510618, 510622, 510623, 510625, 510629, 510630, |
| | | | 510634, 510635, 510636, 510637, 510638, 510639, 510640, |
| | | | 510641, 510643, 510644, 510645, 510646, 510648, 510649, |
| | | | 510651, 510652, 510653, 510654, 510658, 510662, 510663, |
| | | | 510664, 510665, 510666, 510667, 510668, 510669, 510671, |
| | | | 510673, 510677, 510678, 510679, 510682, 510685, 510692, |
| | | | 510696, 510697, 510698, 510699, 510701, 510703, 510710, |
| | | | 510716, 510722, 510725, 510726, 510727, 510730, 510733, |
| | | | 510734, 510738, 510741, 510743, 510753, 510755, 510757 |
| Renal cell carcinoma | Plasma | FIG. | 510600, 510603, 510604, 510606, 510608, 510614, 510616, |
| | | 15AG | 510622, 510628, 510629, 510630, 510632, 510634, 510635, |
| | | | 510640, 510644, 510645, 510646, 510652, 510653, 510656, |
| | | | 510664, 510665, 510666, 510667, 510671, 510675, 510677, |
| | | | 510683, 510685, 510687, 510690, 510701, 510722, 510726, |
| | | | 510728, 510729, 510730, 510731, 510732, 510733, 510734, |
| | | | 510738, 510748, 510749, 510752, 510753, 510758, 510761, |
| | | | 510762 |
| Squamous cell | Plasma | FIG. | 510618, 510622, 510626, 510639, 510641, 510642, 510650, |
| carcinoma of skin | | 15AH | 510658, 510673, 510674, 510683, 510696, 510708, 510712, |
| | | | 510717, 510720, 510722, 510723, 510724, 510727, 510729, |
| | | | 510743, 510745, 510746, 510747, 510752, 510753, 510754, |
| | | | 510755, 510756, 510759, 510761, 510763 |
| Adenocarcinoma of | Plasma | FIG. | 510600, 510604, 510608, 510609, 510612, 510626, 510631, |
| the stomach | | 15AI | 510632, 510634, 510639, 510653, 510658, 510663, 510667, |
| | | | 510681, 510689, 510692, 510693, 510696, 510698, 510699, |
| | | | 510705, 510711, 510715, 510717, 510719, 510723, 510725, |
| | | | 510729, 510731, 510734, 510735, 510736, 510743, 510746, |
| | | | 510748, 510751, 510754, 510757, 510760, 510762, 510763 |
| Carcinoma of the | Plasma | FIG. | 510602, 510603, 510614, 510626, 510638, 510641, 510644, |
| thyroid gland | | 15AJ | 510646, 510653, 510658, 510659, 510661, 510662, 510674, |
| | | | 510689, 510693, 510695, 510698, 510699, 510701, 510704, |
| | | | 510705, 510708, 510717, 510718, 510722, 510727, 510731, |
| | | | 510734, 510736, 510739, 510740, 510741, 510747, 510753, |
| | | | 510755 |
| Testicular cancer | Plasma | FIG. | 510600, 510603, 510607, 510615, 510616, 510618, 510619, |
| | | 15AK | 510621, 510622, 510623, 510624, 510630, 510636, 510637, |
| | | | 510641, 510644, 510645, 510647, 510650, 510654, 510655, |
| | | | 510656, 510657, 510659, 510662, 510665, 510670, 510673, |
| | | | 510674, 510681, 510684, 510685, 510687, 510688, 510689, |
| | | | 510690, 510692, 510693, 510695, 510696, 510698, 510700, |
| | | | 510701, 510704, 510707, 510712, 510713, 510717, 510718, |
| | | | 510726, 510734, 510737, 510738, 510739, 510740, 510742, |
| | | | 510747, 510756, 510757 |
| Ulcerative colitis | Plasma | FIG. | 510599, 510607, 510611, 510612, 510616, 510620, 510621, |
| | | 15AL | 510622, 510624, 510626, 510632, 510633, 510636, 510646, |
| | | | 510655, 510659, 510672, 510673, 510675, 510676, 510677, |
| | | | 510682, 510684, 510691, 510692, 510702, 510703, 510704, |
| | | | 510705, 510706, 510707, 510709, 510710, 510715, 510721, |
| | | | 510723, 510724, 510728, 510729, 510730, 510731, 510735, |
| | | | 510736, 510737, 510739, 510740, 510741, 510743, 510744, |
| | | | 510748, 510751, 510752, 510754, 510757, 510758, 510759, |
| | | | 510760, 510761, 510762 |
| Ulcerative colitis | Serum | FIG. | 510610, 510611, 510612, 510619, 510622, 510623, 510634, |
| | | 15AM | 510635, 510641, 510647, 510648, 510654, 510657, 510664, |
| | | | 510668, 510670, 510671, 510676, 510677, 510678, 510679, |
| | | | 510689, 510691, 510696, 510701, 510703, 510704, 510710, |
| | | | 510722, 510734, 510742, 510753 |
| Uterine | Plasma | FIG. | 510601, 510612, 510621, 510626, 510637, 510641, 510644, |
| adenocarcinoma | | 15AN | 510650, 510653, 510669, 510675, 510684, 510686, 510687, |
| | | | 510696, 510714, 510717, 510722, 510739, 510743, 510745, |
| | | | 510746, 510753, 510755, 510762 |

[0910] The data in FIGS. 15A-AN show that the oligonucleotide probe library was able to distinguish between the disease and normal samples. This can be seen by the clustering of the diseased samples in the figures. For example, in FIG. 15A the Alzheimer's samples clustered to the left in the plot whereas the normal samples clustered to the right. Similar results are shown in FIG. 15H for colorectal cancer, FIG. 15L for cardiovascular disease, and FIG. 15X for multiple sclerosis. In FIG. 15E, all but one of the bladder cancer samples was found in a central cluster. FIG. 15K is similar for cervical cancer. One of skill will appreciate the universal nature of the oligonucleotide probe library can be enhanced by training against multiple input samples and combining resulting oligonucleotide pools.

[0911] In this Example, the oligonucleotide probe library trained in the breast cancer setting was used as universal probe to distinguish normal samples against a variety of diseased samples (e.g., cancer, autoimmune, neurological, and cardiovascular). Unexpectedly, the library was efficiently differentiated most of the diseased samples from normal. Without being bound by theory, it is possible that this approach works because the oligonucleotide library was trained against diverse microvesicle populations and still contains a great deal of diversity.

### Example 22

### Bodily Fluid Probing with Oligonucleotide Probe Library

[0912] The following protocol is used to probe a bodily fluid such as a plasma or serum sample using an oligonucleotide probe library, e.g., as in Examples 15 and 20-21 above.

[0913] Input Oligonucleotide Library:

[0914] Use 2 ng input of oligonucleotide library per sample.

[0915] Input oligonucleotide library is a mixture of two libraries, cancer and non-cancer enriched, concentration is 16.3 ng/ul.

[0916] Dilute to 0.2 ng/ul working stock using Aptamer Buffer (3 mM MgCl₂ in 1×PBS)

[0917] Add 10 ul from working stock (equal to 2 ng library) to each optiseal tube

[0918] Materials:

[0919] PBS, Hyclone SH30256.01, LN: AYG165629, bottle #8237, exp. 7/2015

[0920] Round Bottom Centrifuge Tubes, Beckman 326820, LN:P91207

[0921] OptiSeal Centrifuge tubes and plugs, polyallomer Konical, Beckman 361621, lot # Z10804SCA

[0922] Ultracentrifuge rotor: 50.4 TI

[0923] Ultracentrifuge rotor: 50.4 TI, Beckman Caris ID #0478

[0924] Protocol:

[0925] 1 Pre-chill tabletop centrifuge, ultracentrifuge, buckets, and rotor at 4° C.

[0926] 2 Thaw plasma or serum samples

[0927] 3 Dilute 1 ml of samples with 1:2 with Aptamer Buffer (3 mM MgCl₂ in 1×PBS)

[0928] 4 Spin at 2000×g, 30 min, 4° C. to remove debris (tabletop centrifuge)

[0929] 5 Transfer supernatants for all samples to a round bottom conical

[0930] 6 Spin at 12,000×g, 45 min, 4° C. in ultracentrifuge to remove additional debris.

[0931] 7 Transfer supernatant about 1.8 ml for all samples into new OptiSeal bell top tubes (uniquely marked).

[0932] 8 Add 2 ng (in 10 ul) of DNA Probing library to each optiseal tube

[0933] 9 QS to 4.5 ml with Aptamer Buffer

[0934] 10 Fix caps onto the OptiSeal bell top tubes

[0935] 11 Apply Parafilm around caps to prevent leakage

[0936] 12 Incubate plasma and oligonucleotide probe library for 1 hour at room temperature with rotation

[0937] 13 Remove parafilm (but not caps)

[0938] 14 Place correct spacer on top of each plugged tube

[0939] 15 Mark pellet area on the tubes, insure this marking is facing outwards from center.

[0940] 16 Spin tubes at 120,000×g, 2 hr, 4° C. (inner row, 33,400 rpm) to pellet microvesicles.

[0941] 17 Check marking is still pointed away from center.

[0942] 18 Completely remove supernatant from pellet, by collecting liquid from opposite side of pellet marker and using a 10 ml syringe barrel and 21G2 needle

[0943] 19 Discard supernatant in appropriate biohazard waste container

[0944] 20 Add 1 ml of 3 mM MgCl2 diluted with 1×PBS

[0945] 21 Gentle vortex, 1600 rpm for 5 sec and incubate 5 min at RT.

[0946] 22 QS to ˜4.5 mL with 3 mM Mg Cl2 diluted with 1×PBS

[0947] 23 Fix caps onto the OptiSeal bell top tubes.

[0948] 24 Place correct spacer on top of each plugged tube.

[0949] 25 Mark pellet area on the tubes, insure this marking is facing outwards from center.

[0950] 26 Spin tubes at 120,000×g, 70 min, 4° C. (inner row 33,400 rpm) to pellet microvesicles

[0951] 27 Check marking in still pointed away from center.

[0952] 28 Completely remove supernatant from pellet, by collecting liquid from opposite side of pellet marker and using a 10 ml syringe barrel and 21G2 needle

[0953] 29 Discard supernatant in appropriate biohazard waste container

[0954] 30 Add 1 ml of 3 mM MgCl2 diluted with 1×PBS

[0955] 31 Gentle vortex, 1600 rpm for 5 sec and incubate 5 min at RT.

[0956] 32 QS to ˜4.5 mL with 3 mM Mg Cl2 diluted with 1×PBS

[0957] 33 Fix caps onto the OptiSeal bell top tubes.

[0958] 34 Place correct spacer on top of each plugged tube.

[0959] 35 Mark pellet area on the tubes, insure this marking is facing outwards from center.

[0960] 36 Spin tubes at 120,000×g, 70 min, 4° C. (inner row 33,400 rpm) to pellet microvesicles

[0961] 37 Check marking is still pointed away from center.

[0962] 38 Save an aliquot of the supernatant (100 ul into a 1.5 ml tube)

[0963] 39 Completely remove supernatant from pellet, by collecting liquid from opposite side of pellet marker and using a 10 ml syringe barrel and 21G2 needle

[0964] 40 Add 50 ul of Rnase-free water to the side of the pellet

[0965] 41 Leave for 15 min incubation on bench top

[0966] 42 Cut top off tubes using clean scissors.

[0967] 43 Resuspend pellet, pipette up and down on the pellet side

[0968] 44 Measure the volume, make a note on the volume in order to normalize all samples

[0969] 45 Transfer the measured resuspended eluted microvesicles with bound oligonucleotides to a Rnase free 1.5 ml Eppendorf tube

[0970] 46 Normalize all samples to 100 ul to keep it even across samples and between experiments.

[0971] Next Generation Sequencing Sample Preparation:

[0972] I) Use 50 ul of sample from above, resuspended in 100 ul H₂O and containing microvesicle/oligo complexes, as template in Transposon PCR, 14 cycles.

[0973] II) AMPure transposon PCR product, use entire recovery for indexing PCR, 10 cycles.

[0974] III) Check indexing PCR product on gel, proceed with AMPure if band is visible. Add 3 cycles if band is invisible, check on gel. After purification quantify product with QuBit and proceed with denaturing and dilting for loading on HiSeq flow cell (Illumina Inc., San Diego, Calif.).

[0975] IV) 5 samples will be multiplexed per one flow cell. 10 samples per HiSeq.

[0976] Data Analysis (e.g., as in Example 21):

[0977] All sequence reads from the HiSeq analysis that match both primer sequences are compared to each other. The counts for each unique sequence read are calculated and used as signal for binding. The sequence counts are normalized by total number of sequence reads for each sample. The normalized counts for each unique sequence are compared to identify the oligonucleotides that show different level of binding to samples between a disease condition to the normal control from the same sample type, i.e. Serum and plasma. Only sequences with average counts of all samples greater than 100 are considered. The oligonucleotides data from aptamers with differential binding are clustered using hierarchical clustering and the degree if similarity between samples is shown in heat maps and dendrograms.

### Example 23

### Optimized Aptamer Library Design for High Throughput Sequencing

[0978] In classical aptamer library construction, e.g., for selection purposes such as SELEX, each member of the library comprises a variable nucleotide sequence region inserted between two conserved flanking sequences. Among various uses, the conserved regions may be used as priming sites for amplification, such as for PCR amplification between selection rounds, priming sites for sequencing, and for hybridization. The forward and reverse primers may be referred to herein as the left (5′) and right (3′) end primers. As both ends of the aptamer library sequences are identical, the library is considered to be low-diversity for sequencing purposes. This may result in the introduction of bias in amplification or other such biases. In the case of some high throughput sequencing methods, e.g., for Illumina based next generation sequencing (NGS), first sequencing reads establish clusters on the surface of flow cell after clonal amplification. Having regions of identical bases at the beginning of a library member makes it more difficult to distinguish fluorescent signals and, correspondingly, proceed with sequencing. Illumina suggests various solutions for sequencing low-diversity libraries: (i) mix library containing sample with 50% of bacteriophage PhiX genome to introduce diversity; (ii) add control sample to a different lane in the same flow cell; and (iii) stagger the libraries within one sample. Options (i) and (ii) reduce the total sequencing output by half and are thus not optimal. Option (iii) shows variable results: it was used successfully on a MiSeq NGS instrument but not on a HiSeq NGS instrument.

[0979] This Example describes an alternate aptamer library design which allows more efficient sequencing of aptamer libraries by introducing diversity to the library itself. The aptamer library design in this Example addresses the following: 1) sequencing of aptamer libraries on high throughput sequencing instruments without spiking in control sample PhiX; 2) sequencing of aptamer libraries on high throughput sequencing instruments at maximum capacity; and 3) sequencing of aptamer libraries on high throughput sequencing instruments with maximum quality. As an illustration, this method was applied in this Example to facilitate use of a HiSeq instrument at its maximum capacity. Although this Example focuses on the HiSeq platform for illustrative purposes, the approach can be used in any appropriate setting, e.g., where oligonucleotide library diversity may present an issue.

[0980] A naive oligonucleotide library (i.e., aptamer candidate library) was designed so that the sequencing starting point shifted from the conserved outer region (primer) to the variable region. The left primer of the library was replaced with a transposon adapter, which is complementary to the sequencing primer. Inserted between the transposon adapter and the 35 nucleotide variable region are 0, 1, 2, or 3 nucleotides which server to create on offset in the library design. FIG. 17A shows the right arm primer of the aptamer library which follows the variable region (i.e., SEQ ID NO. 510768). In addition to enhancing diversity, a single round of PCR can be used to prepare a sample for NGS with this approach (e.g., adding indexes and adaptor for hybridization to flow cell). This leads to more efficient sample preparation and may decrease the number of potential mutants generated by PCR.

[0981] This change in the library design to incorporate the transposon adapter and offset improved the sequencing quality in the variable region of the sequenced library. Compare FIGS. 17C-D as discussed further below. To further improve the library, the sequence of the left primer was also designed to reduce potential sequence overlaps, e.g., as indicated by the boxes in FIG. 17A, which indicate 14 positions with overlapping nucleotides in the staggered design using the single sequence (SEQ ID NO. 510768) in the figure. The redesigned primer sequence with balanced design contains only five positions where two bases are overlapping. See FIG. 17B (showing SEQ ID NO. 510769).

[0982] FIGS. 17C-17F illustrate sequencing quality reflected in %>Q30 per each HiSeq SBS sequencing cycle. Q30 is equivalent to the probability of an incorrect base call 1 in 1000 times. FIG. 17C presents an example of lower quality sequencing of an oligonucleotide library with the starting design where the sequencing was initiated from the conservative (identical) part of the library. No PhiX DNA was added to the sequencing run. Even though the library has a staggered design, the base calling software had difficultly calling these regions.

[0983] FIG. 17D shows an example of the sequencing quality of a standard library wherein a transposon adapter was incorporated into the library as right arm primer. In this case sequencing is starting directly at the variable region, resulting in greatly improved sequencing quality. However, once sequencing reaches the left arm primer, the quality falls off.

[0984] FIG. 17E shows an example of sequencing quality with library after introducing the staggered design of FIG. 17A. As seen in the figure, sequencing quality is improved compared to the previous, non-staggered design. However, several bases in the middle of the primer region are potentially miscalled.

[0985] For final tuning of the sequencing quality, the sequence of the left arm primer was rebalanced as shown in FIG. 17B. FIG. 17F shows that, for most of the lower Q30 score bases on FIG. 17E, quality was improved bu about 50%. This design improved the base calling of the primer sequence and allowed the most efficient match to the starting aptamer library pattern.

[0986] Comparing the graphs in FIG. 17C (original) and FIG. 17F (optimized design) demonstrates the improvement in the aptamer library design and sequencing quality/output correspondingly.

[0987] Additional advantages of the improved aptamer library design are demonstrated by the efficacy of enrichment of aptamer sequences against biological targets of interest and by the possibility to manage library effectively with current capacity of high throughput sequencing. FIGS. 17G-H shows the classical aptamer library design (“NP1m-30n”; FIG. 17G) compared to new one-step balanced library design (“F-TRin-35n-B”; FIG. 17H) after enrichment against breast cancer plasma exosomes. As shown in these figures, the improved design allows more efficient enrichment as demonstrated by: (i) presence of distinct population with normal distribution of species number across different read counts; (ii) improved separation of species with low counts from the rest of the library, which allows to exclude sequences from the analysis as most likely they got created by PCR bias or during HiSeq SBS steps; (iii) average read count per species in the enriched population is in the range of 2000-3000 copies, which allows increased sequencing throughput; and (iv) minimized technical variability while probing biological speciments.

[0988] The resulting aptamer library can be used to develop individual aptamers or oligonucleotide probe libraries as described herein, e.g., to develop diagnostic assays.

[0989] Although preferred embodiments of the present invention have been shown and described herein, it will be obvious to those skilled in the art that such embodiments are provided by way of example only. Numerous variations, changes, and substitutions will now occur to those skilled in the art without departing from the invention. It should be understood that various alternatives to the embodiments of the invention described herein may be employed in practicing the invention. It is intended that the following claims define the scope of the invention and that methods and structures within the scope of these claims and their equivalents be covered thereby.

1-21. (canceled)

22. A method of characterizing a disease or disorder, comprising:
(a) contacting a biological test sample with a plurality of oligonucleotides, wherein the plurality of oligonucleotides comprises at least 20 different oligonucleotide sequences, and wherein each different member of the plurality of oligonucleotides comprises a sequence that is at least 90 percent homologous to any one of SEQ ID NOs. 510599-510763;
(b) detecting a presence or level of complexes formed in step (a) between the plurality of oligonucleotides of and a target in the biological test sample; and
(c) comparing the presence or level detected in step (b) to a reference level from a biological control sample, thereby characterizing the disease or disorder.

23. The method of claim 22, wherein the detecting in step (b) comprises performing at least one of sequencing, amplification, and hybridization of the members of the plurality of oligonucleotides within the complexes.

24. The method of claim 22, wherein the step of detecting comprises high-throughput sequencing.

25. The method of claim 22, wherein the biological test sample and biological control sample each comprise a tissue sample, a cell culture, or a biological fluid.

26. The method of claim 25, wherein the biological fluid comprises a bodily fluid.

27. The method of claim 26, wherein the bodily fluid comprises peripheral blood, sera, plasma, ascites, urine, cerebrospinal fluid (CSF), sputum, saliva, bone marrow, synovial fluid, aqueous humor, amniotic fluid, cerumen, breast milk, broncheoalveolar lavage fluid, semen, prostatic fluid, cowper's fluid or pre-ejaculatory fluid, female ejaculate, sweat, fecal matter, tears, cyst fluid, pleural fluid, peritoneal fluid, pericardial fluid, lymph, chyme, chyle, bile, interstitial fluid, menses, pus, sebum, vomit, vaginal secretions, mucosal secretion, stool water, pancreatic juice, lavage fluids from sinus cavities, bronchopulmonary aspirates, blastocyl cavity fluid, or umbilical cord blood.

28. The method of claim 26, wherein the bodily fluid comprises blood, serum or plasma.

29. The method of claim 25, wherein the biological fluid comprises a microvesicles population.

30. The method of claim 29, wherein the complexes are formed between the oligonucleotide or plurality of oligonucleotides and the microvesicles population.

31. The method of claim 22, wherein the microvesicle population is isolated using at least one of chromatography, filtration, ultrafiltration, centrifugation, ultracentrifugation, flow cytometry, affinity capture, polymer precipitation, and microfluidics.

32. The method of claim 22, wherein at least some members of the plurality of oligonucleotides binds a polypeptide or fragment thereof.

33. (canceled)

34. (canceled)

35. The method of claim 22, wherein at least some members of the plurality of oligonucleotides binds a microvesicle surface antigen.

36. The method of claim 22, wherein the disease or disorder comprises Breast Cancer, Alzheimer's disease, bronchial asthma, Transitional cell carcinoma of the bladder, Giant cellular osteoblastoclastoma, Brain Tumor, Colorectal adenocarcinoma, Chronic obstructive pulmonary disease (COPD), Squamous cell carcinoma of the cervix, acute myocardial infarction (AMI)/acute heart failure, Chron's Disease, diabetes mellitus type II, Esophageal carcinoma, Squamous cell carcinoma of the larynx, Acute and chronic leukemia of the bone marrow, Lung carcinoma, Malignant lymphoma, Multiple Sclerosis, Ovarian carcinoma, Parkinson disease, Prostate adenocarcinoma, psoriasis, Rheumatoid Arthritis, Renal cell carcinoma, Squamous cell carcinoma of skin, Adenocarcinoma of the stomach, carcinoma of the thyroid gland, Testicular cancer, ulcerative colitis, or Uterine adenocarcinoma.

37. The method of claim 22, wherein the disease or disorder comprises a cancer, a premalignant condition, an inflammatory disease, an immune disease, an autoimmune disease or disorder, a cardiovascular disease or disorder, neurological disease or disorder, infectious disease or pain.

38-85. (canceled)

86. The method of claim 22, wherein at least one member of the plurality of oligonucleotides comprises at least one functional modification.

87. A kit comprising at least one reagent for carrying out the method of claim 22, wherein the at least one reagent comprises the plurality of oligonucleotides.

88. (canceled)

89. (canceled)

90. (canceled)

91. The kit of claim 87, wherein the at least one reagent further comprises at least one of:
a) at least one microvesicle isolation reagent selected from the group consisting of a binding agent to a microvesicle antigen, a column, a substrate, a filtration unit, a polymer, polyethylene glycol, PEG4000, PEG8000, a particle and a bead;
b) at least one oligonucleotide primer for amplifying, sequencing, hybridizing or detecting the plurality of oligonucleotides; and
c) a column or substrate for removing at least one abundant protein from the biological test sample, wherein the at least one abundant protein comprises at least one of albumin, immunoglobulin, fibrinogen and fibrin.

92-199. (canceled)

The application's sequence listing, which the Patent Office published only in electronic form, follows.

SEQUENCE LISTING (510769 sequences)

SEQ ID NO: 1 - DNA, 32 bp, Artificial Sequence
  Synthetic Oligonucleotide
ccccccgaatcacatgacttgggcgggggtcg

SEQ ID NO: 2 - DNA, 32 bp, Artificial Sequence
  Synthetic Oligonucleotide
accggatagcggttggaggcgtgctccactcg

SEQ ID NO: 3 - DNA, 32 bp, Artificial Sequence
  Synthetic Oligonucleotide
cccgattttggtaccgcggggatccgcgtctg

SEQ ID NO: 4 - DNA, 70 bp, Artificial Sequence
  Synthetic Oligonucleotide
atccagagtgacgcagcagtcttttctgatggacacgtggtggtctagtatctggacacggtggcttagt

SEQ ID NO: 5 - RNA, 70 nt, Artificial Sequence
  Synthetic Oligonucleotide
auccagagugacgcagcagucuuuucugauggacacgugguggucuaguaucacuaagccaccgugucca

SEQ ID NO: 6 - DNA, 32 bp, Artificial Sequence
  Synthetic Oligonucleotide
ctgtgaggcgtactgcggtgagcctctcatta

SEQ ID NO: 7 - DNA, 70 bp, Artificial Sequence; identical to SEQ ID NO: 4
  Synthetic Oligonucleotide

SEQ ID NO: 8 - RNA, 80 nt, Artificial Sequence
  Synthetic Oligonucleotide
gggaggacgaugcggcgcgucuuccccgcauugccgcaauugccauacauuaauacagacgacucgcugaggauccgaga

SEQ ID NO: 9 - DNA, 80 bp, Artificial Sequence
  Synthetic Oligonucleotide
gggaggacgatgcggcgcgtcttccccgcattgccgcaattgccatacattaatacagacgactcgctgaggatccgaga

SEQ ID NO: 10 - RNA, 80 nt, Artificial Sequence
  Synthetic Oligonucleotide
gggaggacgaugcggguccggaacgccucgauccucgcauaauaugauacgucugcagacgacucgcugaggauccgaga

SEQ ID NO: 11 - DNA, 80 bp, Artificial Sequence
  Synthetic Oligonucleotide
gggaggacgatgcgggtccggaacgcctcgatcctcgcataatatgatacgtctgcagacgactcgctgaggatccgaga

SEQ ID NO: 12 - RNA, 80 nt, Artificial Sequence
  Synthetic Oligonucleotide
gggaggacgaugcggguccaugguacgccucgauuccgcccauacaugcauguaacagacgacucgcugaggauccgaga

SEQ ID NO: 13 - DNA, 80 bp, Artificial Sequence
  Synthetic Oligonucleotide
gggaggacgatgcgggtccatggtacgcctcgattccgcccatacatgcatgtaacagacgactcgctgaggatccgaga

SEQ ID NO: 14 - RNA, 80 nt, Artificial Sequence
  Synthetic Oligonucleotide
gggaggacgaugcggcacuauccguuuguccguccucuugugguauugcgcaugccagacgacucgcugaggauccgaga

SEQ ID NO: 15 - DNA, 80 bp, Artificial Sequence
  Synthetic Oligonucleotide
gggaggacgatgcggcactatccgtttgtccgtcctcttgtggtattgcgcatgccagacgactcgctgaggatccgaga

SEQ ID NO: 16 - RNA, 80 nt, Artificial Sequence
  Synthetic Oligonucleotide
gggaggacgaugcggucuuccaucuggucgcgauacagaauacgauuaacauaaacagacgacucgcugaggauccgaga

SEQ ID NO: 17 - DNA, 80 bp, Artificial Sequence
  Synthetic Oligonucleotide
gggaggacgatgcggtcttccatctggtcgcgatacagaatacgattaacataaacagacgactcgctgaggatccgaga

SEQ ID NO: 18 - RNA, 80 nt, Artificial Sequence
  Synthetic Oligonucleotide
gggaggacgaugcgggaucacgcugcccuuuguuuaaggccuuuauacaaacgcacagacgacucgcugaggauccgaga

SEQ ID NO: 19 - DNA, 80 bp, Artificial Sequence
  Synthetic Oligonucleotide
gggaggacgatgcgggatcacgctgccctttgtttaaggcctttatacaaacgcacagacgactcgctgaggatccgaga

SEQ ID NO: 20 - RNA, 80 nt, Artificial Sequence
  Synthetic Oligonucleotide
gggaggacgaugcgguauucgccagucacaucaacuaugaugacgcuugacuggacagacgacucgcugaggauccgaga

SEQ ID NO: 21 - DNA, 80 bp, Artificial Sequence
  Synthetic Oligonucleotide
gggaggacgatgcggtattcgccagtcacatcaactatgatgacgcttgactggacagacgactcgctgaggatccgaga

SEQ ID NO: 22 - DNA, 26 bp, Artificial Sequence
  Synthetic Oligonucleotide
caattgggcccgtccgtatggtgggt

SEQ ID NO: 23 - RNA, 80 nt, Artificial Sequence
  Synthetic Oligonucleotide
  misc_feature (16)..(55): n is a, c, g, or u
gggaggacgaugcggnnnnnnnnnnnnnnnnnnnnnnnnnnnnnnnnnnnnnnnncagacgacucgcugaggauccgaga

SEQ ID NO: 24 - RNA, 80 nt, Artificial Sequence
  Synthetic Oligonucleotide
gggaggacgaugcgguaccgccucaucaucggacacgacguguaucaguuggcugcagacgacucgcugaggauccgaga

SEQ ID NO: 25 - RNA, 80 nt, Artificial Sequence
  Synthetic Oligonucleotide
gggaggacgaugcggguucucgccucuguccucaugguucgaaccgguaugcaugcagacgacucgcugaggauccgaga

SEQ ID NO: 26 - RNA, 80 nt, Artificial Sequence
  Synthetic Oligonucleotide
gggaggacgaugcgggcgguuucuucuccugacuacaugagauuaauaaacgcgccagacgacucgcugaggauccgaga

SEQ ID NO: 27 - RNA, 80 nt, Artificial Sequence
  Synthetic Oligonucleotide
gggaggacgaugcggccgccucgaacacugacgucguggaaccuucgauugcuagcagacgacucgcugaggauccgaga

SEQ ID NO: 28 - RNA, 80 nt, Artificial Sequence
  Synthetic Oligonucleotide
gggaggacgaugcggaaucacaguaauucugccccucugaugaaaccgguuacuucagacgacucgcugaggauccgaga

SEQ ID NO: 29 - RNA, 80 nt, Artificial Sequence
  Synthetic Oligonucleotide
gggaggacgaugcggcuuagugauuucgccgccccucuguuuaguggccauuggacagacgacucgcugaggauccgaga

SEQ ID NO: 30 - RNA, 80 nt, Artificial Sequence
  Synthetic Oligonucleotide
gggaggacgaugcggacacuauuccgguaagucaucguuuaaccguuuguugcaacagacgacucgcugaggauccgaga

SEQ ID NO: 31 - RNA, 80 nt, Artificial Sequence
  Synthetic Oligonucleotide
gggaggacgaugcggugcgcaacgccuugauucacuccuacagugugucuauagacagacgacucgcugaggauccgaga

SEQ ID NO: 32 - RNA, 80 nt, Artificial Sequence
  Synthetic Oligonucleotide
gggaggacgaugcggaauguuaagcuuacauacgccugggucacucuuuguucugcagacgacucgcugaggauccgaga

SEQ ID NO: 33 - RNA, 80 nt, Artificial Sequence
  Synthetic Oligonucleotide
gggaggacgaugcggguaaauauucacguugaaucgccuugcuccucuuagucugcagacgacucgcugaggauccgaga

SEQ ID NO: 34 - RNA, 80 nt, Artificial Sequence
  Synthetic Oligonucleotide
gggaggacgaugcggccgccucggaucguucccaauggugguaccccuauuaaugcagacgacucgcugaggauccgaga

SEQ ID NO: 35 - RNA, 80 nt, Artificial Sequence
  Synthetic Oligonucleotide
gggaggacgaugcgguguagaucguucuuauccgccucggucuuccccagguuaacagacgacucgcugaggauccgaga

SEQ ID NO: 36 - RNA, 80 nt, Artificial Sequence
  Synthetic Oligonucleotide
gggaggacgaugcggaucgucgggccccuuuuaugaaacuuacaugaaagcgcaccagacgacucgcugaggauccgaga

SEQ ID NO: 37 - RNA, 80 nt, Artificial Sequence
  Synthetic Oligonucleotide
gggaggacgaugcgguaagagugcacaguacugccucgauccuccauggcuuaagcagacgacucgcugaggauccgaga

SEQ ID NO: 38 - RNA, 80 nt, Artificial Sequence
  Synthetic Oligonucleotide
gggaggacgaugcgggaauuaguacugacggccgccuugauccuccguuagucugcagacgacucgcugaggauccgaga

SEQ ID NO: 39 - RNA, 80 nt, Artificial Sequence
  Synthetic Oligonucleotide
gggaggacgaugcgggcccgccuccgaagcccuccuaagugcacuuuaaaccgcgcagacgacucgcugaggauccgaga

SEQ ID NO: 40 - RNA, 80 nt, Artificial Sequence
  Synthetic Oligonucleotide
gggaggacgaugcggccgccugggaucacucucuacgcguauaaaugcucugucacagacgacucgcugaggauccgaga

SEQ ID NO: 41 - RNA, 80 nt, Artificial Sequence
  Synthetic Oligonucleotide
gggaggacgaugcggagucugacccuguuauggacuaccauaucagaaagguacucagacgacucgcugaggauccgaga

SEQ ID NO: 42 - RNA, 80 nt, Artificial Sequence
  Synthetic Oligonucleotide
gggaggacgaugcggggugauccucccccccgccucgaagauuugugcacauauccagacgacucgcugaggauccgaga

SEQ ID NO: 43 - RNA, 80 nt, Artificial Sequence
  Synthetic Oligonucleotide
gggaggacgaugcgggcuaccaucgucuagugagucacccuuaguucaucaaggccagacgacucgcugaggauccgaga

SEQ ID NO: 44 - DNA, 40 bp, Artificial Sequence
  Synthetic Oligonucleotide
aaaccggggcccgcctcaagctagctacctccattgtctg

SEQ ID NO: 45 - DNA, 40 bp, Artificial Sequence
  Synthetic Oligonucleotide
gtccatggtacgcctcgattccgcccatacatgcatgtaa

SEQ ID NO: 46 - DNA, 40 bp, Artificial Sequence
  Synthetic Oligonucleotide
gtccggaacgcctcgatcctcgcataatatgatacgtctg

SEQ ID NO: 47 - DNA, 40 bp, Artificial Sequence
  Synthetic Oligonucleotide
ctcttatccggcaggacgtctttcgtgcactatcacgatt

SEQ ID NO: 48 - DNA, 40 bp, Artificial Sequence
  Synthetic Oligonucleotide
cactatccgtttgtccgtcctcttgtggtattgcgcatgc

SEQ ID NO: 49 - DNA, 40 bp, Artificial Sequence
  Synthetic Oligonucleotide
tattcgccagtcacatcaactatgatgacgcttgactgga

SEQ ID NO: 50 - DNA, 40 bp, Artificial Sequence
  Synthetic Oligonucleotide
taccgcctcatcatcggacacgacgtgtatcagttggctg

SEQ ID NO: 51 - DNA, 40 bp, Artificial Sequence
  Synthetic Oligonucleotide
tgcgaaacgctattttctgggaagccgcatctcgagcgaa

SEQ ID NO: 52 - DNA, 40 bp, Artificial Sequence
  Synthetic Oligonucleotide
tattcgccagccacatcaactatgatgacgcttgactgga

SEQ ID NO: 53 - DNA, 40 bp, Artificial Sequence
  Synthetic Oligonucleotide
gctaggctttcacgcacgcggattgtacccgaactgggtt

SEQ ID NO: 54 - DNA, 40 bp, Artificial Sequence
  Synthetic Oligonucleotide
gatcacgctgccctttgtttaaggcctttatacaaacgca

SEQ ID NO: 55 - DNA, 40 bp, Artificial Sequence
  Synthetic Oligonucleotide
tcgcacagctcacttcgtctttgatcgaccacgctcataa

SEQ ID NO: 56 - DNA, 40 bp, Artificial Sequence
  Synthetic Oligonucleotide
tatggggctttaagcacttctcggtaacttgggcagttac

SEQ ID NO: 57 - DNA, 40 bp, Artificial Sequence
  Synthetic Oligonucleotide
gttctcgcctctgtcctcatggttcgaaccggtatgcatg

SEQ ID NO: 58 - DNA, 40 bp, Artificial Sequence
  Synthetic Oligonucleotide
cactatccgtttgtccgtcctctcgtggtattgcgcatgc

SEQ ID NO: 59 - DNA, 40 bp, Artificial Sequence
  Synthetic Oligonucleotide
tataagcctgtcttttaatctcggcagagtgctcatgagc

SEQ ID NO: 60 - DNA, 40 bp, Artificial Sequence
  Synthetic Oligonucleotide
gcggtttcttctcctgactacatgagattaataaacgcgc

SEQ ID NO: 61 - DNA, 40 bp, Artificial Sequence
  Synthetic Oligonucleotide
ccgcctcgaacactgacgtcgtggaaccttcgattgctag

SEQ ID NO: 62 - DNA, 40 bp, Artificial Sequence
  Synthetic Oligonucleotide
ccgcaccccgatagtcatcttcactggaccacccgtgtta

SEQ ID NO: 63 - DNA, 40 bp, Artificial Sequence
  Synthetic Oligonucleotide
aatcacagtaattctgcccctctgatgaaaccggttactt

SEQ ID NO: 64 - DNA, 40 bp, Artificial Sequence
  Synthetic Oligonucleotide
tatgggcttttaagcacttctcggtaacttgggcagttac

SEQ ID NO: 65 - DNA, 40 bp, Artificial Sequence
  Synthetic Oligonucleotide
tgtaggtcgcctggtccgcctcgatcctctataccgtctg

SEQ ID NO: 66 - DNA, 40 bp, Artificial Sequence
  Synthetic Oligonucleotide
gagatctcggatctggcgtactacttggacaggttccttc

SEQ ID NO: 67 - DNA, 40 bp, Artificial Sequence
  Synthetic Oligonucleotide
atccatggtacgcctcgattccgcccatacatgcatgtaa

SEQ ID NO: 68 - DNA, 40 bp, Artificial Sequence
  Synthetic Oligonucleotide
tgaagtccgcggtttcactagactactactgatcacgtcg

SEQ ID NO: 69 - DNA, 40 bp, Artificial Sequence
  Synthetic Oligonucleotide
cttagtgatttcgccgcccctctgtttagtggccattgga

SEQ ID NO: 70 - DNA, 40 bp, Artificial Sequence
  Synthetic Oligonucleotide
tcttccatctggtcgcgatacagaatacgattaacataaa

SEQ ID NO: 71 - DNA, 40 bp, Artificial Sequence
  Synthetic Oligonucleotide
atccggaacgcctcgatcctcgcataatatgatacgtctg

SEQ ID NO: 72 - DNA, 40 bp, Artificial Sequence
  Synthetic Oligonucleotide
acactattccggtaagtcatcgtttaaccgtttgttgcaa

SEQ ID NO: 73 - DNA, 40 bp, Artificial Sequence
  Synthetic Oligonucleotide
tgcgcaacgccttgattcactcctacagtgtgtctataga

SEQ ID NO: 74 - DNA, 40 bp, Artificial Sequence
  Synthetic Oligonucleotide
tgcgaaacgctattttctgggaagccgcgtctcgagcgaa

SEQ ID NO: 75 - DNA, 40 bp, Artificial Sequence
  Synthetic Oligonucleotide
tatggggcttttaagcacttctcggtaacttggcagttac

SEQ ID NO: 76 - DNA, 40 bp, Artificial Sequence
  Synthetic Oligonucleotide
gtcgtacttaccaccctgacatcgcggggaactaatggtt

SEQ ID NO: 77 - DNA, 40 bp, Artificial Sequence
  Synthetic Oligonucleotide
gccgcatgggtcggttttggtgggggactacccccttgta

SEQ ID NO: 78 - DNA, 40 bp, Artificial Sequence
  Synthetic Oligonucleotide
cactatccgtagatccgtcactcactacgcgtatggaatc

SEQ ID NO: 79 - DNA, 40 bp, Artificial Sequence
  Synthetic Oligonucleotide
cactatccgtatcgagcgttgtcaacaagcggctaaggcc

SEQ ID NO: 80 - DNA, 40 bp, Artificial Sequence
  Synthetic Oligonucleotide
cgctatccgccatcgagcgaacagtgtgccgttttcggtg

SEQ ID NO: 81 - DNA, 40 bp, Artificial Sequence
  Synthetic Oligonucleotide
cgctatccgaatcgagcttgagtgtctggttaaacaacga

SEQ ID NO: 82 - DNA, 40 bp, Artificial Sequence
  Synthetic Oligonucleotide
aatgttaagcttacatacgcctgggtcactctttgttctg

SEQ ID NO: 83 - DNA, 40 bp, Artificial Sequence
  Synthetic Oligonucleotide
tattcgccagtcacatcaactatgatgacgcttggctgga

SEQ ID NO: 84 - DNA, 40 bp, Artificial Sequence
  Synthetic Oligonucleotide
attaattccagcgacttcggtggtgtcctctccattacca

SEQ ID NO: 85 - DNA, 40 bp, Artificial Sequence
  Synthetic Oligonucleotide
cgctatccgcatcgagcgggttcttcgataatatgcaaca

SEQ ID NO: 86 - DNA, 40 bp, Artificial Sequence
  Synthetic Oligonucleotide
aaaccgggacccgcctcaagctagctacctccattgtctg

SEQ ID NO: 87 - DNA, 40 bp, Artificial Sequence
  Synthetic Oligonucleotide
acactattccggccttcaccgtcctcaatacggacgaatg

SEQ ID NO: 88 - DNA, 40 bp, Artificial Sequence
  Synthetic Oligonucleotide
tagtcgatccgtactttcaggcgctatcctgatcacccga

SEQ ID NO: 89 - DNA, 40 bp, Artificial Sequence
  Synthetic Oligonucleotide
cactatccgacatcgagagagctacgtcatcaagcgctaa

SEQ ID NO: 90 - DNA, 40 bp, Artificial Sequence
  Synthetic Oligonucleotide
ccgcaccccgatagtcatcttcgctggaccacccgcgtta

SEQ ID NO: 91 - DNA, 40 bp, Artificial Sequence
  Synthetic Oligonucleotide
tatggggcttttaagcacttctggtaacttgggcagttac

SEQ ID NO: 92 - DNA, 40 bp, Artificial Sequence
  Synthetic Oligonucleotide
gaaccggggcccgcctcaagctagctacctccattgtctg

SEQ ID NO: 93 - DNA, 40 bp, Artificial Sequence
  Synthetic Oligonucleotide
cactatccgcttgtccgtcctcttgtggtattgcgcatgc

SEQ ID NO: 94 - DNA, 40 bp, Artificial Sequence
  Synthetic Oligonucleotide
ccgtgatcagctagtcgtgctttgtccgctatgacattca

SEQ ID NO: 95 - DNA, 40 bp, Artificial Sequence
  Synthetic Oligonucleotide
gtaaatattcacgttgaatcgccttgctcctcttagtctg

SEQ ID NO: 96 - DNA, 40 bp, Artificial Sequence
  Synthetic Oligonucleotide
caatgcttgatctcctgtcgactctgcggctgagactact

SEQ ID NO: 97 - DNA, 40 bp, Artificial Sequence
  Synthetic Oligonucleotide
tactacccccatcgagcgagtctactctcccatcaacggg

SEQ ID NO: 98 - DNA, 40 bp, Artificial Sequence
  Synthetic Oligonucleotide
acgatccttcctcagcttccgcggtgcaggatttgcacgt

SEQ ID NO: 99 - DNA, 40 bp, Artificial Sequence
  Synthetic Oligonucleotide
ccgcctcggatcgttcccaatggtggtacccctattaatg

SEQ ID NO: 100 - DNA, 40 bp, Artificial Sequence
  Synthetic Oligonucleotide
cactatccccatcgagcgatcgtcgtaatactgcttccaa

SEQ ID NO: 101 - DNA, 40 bp, Artificial Sequence
  Synthetic Oligonucleotide
cactatccgtttgtccgtcctcctgtggtattgcgcatgc

SEQ ID NO: 102 - DNA, 40 bp, Artificial Sequence
  Synthetic Oligonucleotide
tgtagatcgttcttatccgcctcggtcttccccaggttaa

SEQ ID NO: 103 - DNA, 40 bp, Artificial Sequence
  Synthetic Oligonucleotide
atcgtcgggccccttttatgaaacttacatgaaagcgcac

SEQ ID NO: 104 - DNA, 40 bp, Artificial Sequence
  Synthetic Oligonucleotide
acgatccttcctcagcctccgcggtgcaggatttgcacgt

SEQ ID NO: 105 - DNA, 40 bp, Artificial Sequence
  Synthetic Oligonucleotide
aaaccggggtccgcctcaagctagctacctccattgtctg

SEQ ID NO: 106 - DNA, 40 bp, Artificial Sequence
  Synthetic Oligonucleotide
aaaccggggcccgcctcaagctagctacctccactgtctg

SEQ ID NO: 107 - DNA, 40 bp, Artificial Sequence
  Synthetic Oligonucleotide
taagagtgcacagtactgcctcgatcctccatggcttaag

SEQ ID NO: 108 - DNA, 40 bp, Artificial Sequence
  Synthetic Oligonucleotide
acagtgggttccatgctttaggcgcctcttattttgggtc

SEQ ID NO: 109 - DNA, 40 bp, Artificial Sequence
  Synthetic Oligonucleotide
cgcctcgaaattccctatatatgcatatatcagtctaggc

SEQ ID NO: 110 - DNA, 40 bp, Artificial Sequence
  Synthetic Oligonucleotide
aaaccggggcccgcctcaagctagctacctctattgtctg

SEQ ID NO: 111 - DNA, 40 bp, Artificial Sequence
  Synthetic Oligonucleotide
aaaccggggcccgcctcgagctagctacctccattgtctg

SEQ ID NO: 112 - DNA, 40 bp, Artificial Sequence
  Synthetic Oligonucleotide
aaaccggggcccgcctcaagctagctacctccatcgtctg

SEQ ID NO: 113 - DNA, 40 bp, Artificial Sequence
  Synthetic Oligonucleotide
gtccggagcgcctcgatcctcgcataatatgatacgtctg

SEQ ID NO: 114 - DNA, 40 bp, Artificial Sequence
  Synthetic Oligonucleotide
gaattagtactgacggccgccttgatcctccgttagtctg

SEQ ID NO: 115 - DNA, 40 bp, Artificial Sequence
  Synthetic Oligonucleotide
gaactggatcctcgcctccatactacgtggatttagattt

SEQ ID NO: 116 - DNA, 40 bp, Artificial Sequence
  Synthetic Oligonucleotide
ctcttatccggcaggacgtctttcgtgcgctatcacgatt

SEQ ID NO: 117 - DNA, 40 bp, Artificial Sequence
  Synthetic Oligonucleotide
gcccgcctccgaagccctcctaagtgcactttaaaccgcg

SEQ ID NO: 118 - DNA, 40 bp, Artificial Sequence
  Synthetic Oligonucleotide
cttcctcggatcttcaacatattgccgcctcgcatccgac

SEQ ID NO: 119 - DNA, 40 bp, Artificial Sequence
  Synthetic Oligonucleotide
cgctatctgtcatcgagcgagcactttgtgcgatcacaca

SEQ ID NO: 120 - DNA, 40 bp, Artificial Sequence
  Synthetic Oligonucleotide
aaaccggagcccgcctcaagctagctacctccattgtctg

SEQ ID NO: 121 - DNA, 40 bp, Artificial Sequence
  Synthetic Oligonucleotide
aaaccggggcccgcctcaagctagctacctccattgtcta

SEQ ID NO: 122 - DNA, 40 bp, Artificial Sequence
  Synthetic Oligonucleotide
tatggggcttttagcacttctcggtaacttgggcagttac

SEQ ID NO: 123 - DNA, 40 bp, Artificial Sequence
  Synthetic Oligonucleotide
ccgcctgggatcactctctacgcgtataaatgctctgtca

SEQ ID NO: 124 - DNA, 40 bp, Artificial Sequence
  Synthetic Oligonucleotide
tacagaggccctcgtgttggactaccaacttgtagaacgg

SEQ ID NO: 125 - DNA, 40 bp, Artificial Sequence
  Synthetic Oligonucleotide
tatgggctttaagcacttcatcggtaacttgggcagttac

SEQ ID NO: 126 - DNA, 40 bp, Artificial Sequence
  Synthetic Oligonucleotide
taaccggggcccgcctcaagctagctacctccattgtctg

SEQ ID NO: 127 - DNA, 40 bp, Artificial Sequence
  Synthetic Oligonucleotide
tgatgggctttaagcacttctcggtaacttgggcagttac

SEQ ID NO: 128 - DNA, 40 bp, Artificial Sequence
  Synthetic Oligonucleotide
agtctgaccctgttatggactaccatatcagaaaggtact

SEQ ID NO: 129 - DNA, 40 bp, Artificial Sequence
  Synthetic Oligonucleotide
aaaccggggcccgcctcaagctagcaacctccattgtctg

SEQ ID NO: 130 - DNA, 40 bp, Artificial Sequence
  Synthetic Oligonucleotide
ctactccggatgagccacctcgcattcctccgttcgtctg

SEQ ID NO: 131 - DNA, 40 bp, Artificial Sequence
  Synthetic Oligonucleotide
cggctaacgttcatcgagggagcaaaaggtctatagacta

SEQ ID NO: 132 - DNA, 40 bp, Artificial Sequence
  Synthetic Oligonucleotide
gtccatggtacgcctcgattccgcccatgcatgcatgtaa

SEQ ID NO: 133 - DNA, 40 bp, Artificial Sequence
  Synthetic Oligonucleotide
aatctcgagatcactaggcactatcctagcactgtatcaa

SEQ ID NO: 134 - DNA, 40 bp, Artificial Sequence
  Synthetic Oligonucleotide
aaaccggggcccgcctcaagctagctacctccattgcctg

SEQ ID NO: 135 - DNA, 40 bp, Artificial Sequence
  Synthetic Oligonucleotide
aaaccggggcccgcctcaagctagctacctccgttgtctg

SEQ ID NO: 136 - DNA, 40 bp, Artificial Sequence
  Synthetic Oligonucleotide
cggatcccactgttaacagttcctccctcaggtgtgtcaa

SEQ ID NO: 137 - DNA, 40 bp, Artificial Sequence
  Synthetic Oligonucleotide
aaaccggggcccgcctcaagctagctacctccattatctg

SEQ ID NO: 138 - DNA, 40 bp, Artificial Sequence
  Synthetic Oligonucleotide
cctcgtatcttccggtaattaccacgtacgtacatgtctg

SEQ ID NO: 139 - DNA, 40 bp, Artificial Sequence
  Synthetic Oligonucleotide
acgcgtacgccttggttttcctgggtacccccgccgtttg

SEQ ID NO: 140 - DNA, 40 bp, Artificial Sequence
  Synthetic Oligonucleotide
ttgtaccccgggttgcaattgcctcgtaaccagaccgcat

SEQ ID NO: 141 - DNA, 40 bp, Artificial Sequence
  Synthetic Oligonucleotide
tccaagtccccaattcgtcgtccgtacgctattacggttt

SEQ ID NO: 142 - DNA, 40 bp, Artificial Sequence
  Synthetic Oligonucleotide
tatgggctttaagcacttctcggtaacttgggccagttac

SEQ ID NO: 143 - DNA, 40 bp, Artificial Sequence
  Synthetic Oligonucleotide
aaaccggggcccgcctcaagctagctacctccattgtccg

SEQ ID NO: 144 - DNA, 40 bp, Artificial Sequence
  Synthetic Oligonucleotide
aaaccggggcccgcctcaagctagctacccccattgtctg

SEQ ID NO: 145 - DNA, 40 bp, Artificial Sequence
  Synthetic Oligonucleotide
gcccggaacgcctcgatcctcgcataatatgatacgtctg

SEQ ID NO: 146 - DNA, 40 bp, Artificial Sequence
  Synthetic Oligonucleotide
caccggaagtccctcctcgtcttgatgcactatcatctca

SEQ ID NO: 147 - DNA, 40 bp, Artificial Sequence
  Synthetic Oligonucleotide
aatggtccatgagcttctggcactatccagttgacgctca

SEQ ID NO: 148 - DNA, 40 bp, Artificial Sequence
  Synthetic Oligonucleotide
ggtgatcctcccccccgcctcgaagatttgtgcacatatc

SEQ ID NO: 149 - DNA, 40 bp, Artificial Sequence
  Synthetic Oligonucleotide
gctaccatcgtctagtgagtcacccttagttcatcaaggc

SEQ ID NO: 150 - DNA, 40 bp, Artificial Sequence
  Synthetic Oligonucleotide
cgcgtcttccccgcattgccgcaattgccatacattaata

SEQ ID NO: 151 - DNA, 40 bp, Artificial Sequence
  Synthetic Oligonucleotide
ccgccttcaggttcccctaacgcgttagccttccggaatg

SEQ ID NO: 152 - DNA, 40 bp, Artificial Sequence
  Synthetic Oligonucleotide
taggcggttttaagcacttctcggtaacttgggcagttac

SEQ ID NO: 153 - DNA, 40 bp, Artificial Sequence
  Synthetic Oligonucleotide
ctcttatccggcagggcgtctttcgtgcactatcacgatt

SEQ ID NO: 154 - DNA, 40 bp, Artificial Sequence
  Synthetic Oligonucleotide
cgccttgatcctcgctttcggtgcactgactcgctttctg

SEQ ID NO: 155 - DNA, 40 bp, Artificial Sequence
  Synthetic Oligonucleotide
ccttccagggcccaatgccgcattatcatcctatgttctg

SEQ ID NO: 156 - DNA, 40 bp, Artificial Sequence
  Synthetic Oligonucleotide
aagatctcggatctggcgtactacttggacaggttccttc

SEQ ID NO: 157 - DNA, 40 bp, Artificial Sequence
  Synthetic Oligonucleotide
aaaccggggcccgcctcaggctagctacctccattgtctg

SEQ ID NO: 158 - DNA, 40 bp, Artificial Sequence
  Synthetic Oligonucleotide
ttatccctgatgatccgaattctcatcggctggcactatc

SEQ ID NO: 159 - DNA, 40 bp, Artificial Sequence
  Synthetic Oligonucleotide
gtccggaacgcctcgatcctcgcataatatggtacgtctg

SEQ ID NO: 160 - DNA, 40 bp, Artificial Sequence
  Synthetic Oligonucleotide
ctcttatccggcaggacgcctttcgtgcactatcacgatt

SEQ ID NO: 161 - DNA, 40 bp, Artificial Sequence
  Synthetic Oligonucleotide
aaaccggggcccgcctcaagctagctgcctccattgtctg

SEQ ID NO: 162 - DNA, 40 bp, Artificial Sequence
  Synthetic Oligonucleotide
gtccatggtacgcctcgatcccgcccatacatgcatgtaa

SEQ ID NO: 163 - DNA, 40 bp, Artificial Sequence
  Synthetic Oligonucleotide
ctcctatccggcaggacgtctttcgtgcactatcacgatt

SEQ ID NO: 164 - DNA, 40 bp, Artificial Sequence
  Synthetic Oligonucleotide
ccgcctcaggttccccctaacgcgttagccttccggaatg

SEQ ID NO: 165 - DNA, 40 bp, Artificial Sequence
  Synthetic Oligonucleotide
tcatgggctttaagcacttctcggtaacttgggcagttac

SEQ ID NO: 166 - DNA, 40 bp, Artificial Sequence
  Synthetic Oligonucleotide
tatggggcttttaagcacttctcgtaacttgggcagttac

SEQ ID NO: 167 - DNA, 40 bp, Artificial Sequence
  Synthetic Oligonucleotide
tatgggctttaagcacttctcggttaacttgggcagttac

SEQ ID NO: 168 - DNA, 40 bp, Artificial Sequence
  Synthetic Oligonucleotide
gtccggaacgcctcgatcctcgcataatataatacgtctg

SEQ ID NO: 169 - DNA, 40 bp, Artificial Sequence
  Synthetic Oligonucleotide
gtccatggtacgcctcgattccgcccacacatgcatgtaa

SEQ ID NO: 170 - DNA, 40 bp, Artificial Sequence
  Synthetic Oligonucleotide
ccctctatagtcgtcggcgtagcacgctattgcttagaag

SEQ ID NO: 171 - DNA, 40 bp, Artificial Sequence
  Synthetic Oligonucleotide
ggcggccgactcgcctcgatgctccacgtaacgttacgaa

SEQ ID NO: 172 - DNA, 40 bp, Artificial Sequence
  Synthetic Oligonucleotide
ctctcggatcatttgcctcgctcctcctaaagttggatgg

SEQ ID NO: 173 - DNA, 40 bp, Artificial Sequence
  Synthetic Oligonucleotide
agattctagattaaccgcctcggtcagcccagattgtgca

SEQ ID NO: 174 - DNA, 40 bp, Artificial Sequence
  Synthetic Oligonucleotide
tactatccgtttgtccgtcctcttgtggtattgcgcatgc

SEQ ID NO: 175 - DNA, 40 bp, Artificial Sequence
  Synthetic Oligonucleotide
gtccggaacgcctcgatcctcacataatatgatacgtctg

SEQ ID NO: 176 - DNA, 40 bp, Artificial Sequence
  Synthetic Oligonucleotide
gtccatggtacgcctcgattccgcccgtacatgcatgtaa

SEQ ID NO: 177 - DNA, 40 bp, Artificial Sequence
  Synthetic Oligonucleotide
gtccatggtacgcctcgattccgcccatacatgcatgtga

SEQ ID NO: 178 - DNA, 40 bp, Artificial Sequence
  Synthetic Oligonucleotide
ggtccctgtgtcttgttgccacagacgttcagtgcccccg

SEQ ID NO: 179 - DNA, 40 bp, Artificial Sequence
  Synthetic Oligonucleotide
cactatccgtttgtccgtcctcttgtggtattgcgcacgc

SEQ ID NO: 180 - DNA, 40 bp, Artificial Sequence
  Synthetic Oligonucleotide
actgtaggcacctgctctatgtcgtggggagtaacaggtt

SEQ ID NO: 181 - DNA, 40 bp, Artificial Sequence
  Synthetic Oligonucleotide
aagccggggcccgcctcaagctagctacctccattgtctg

SEQ ID NO: 182 - DNA, 40 bp, Artificial Sequence
  Synthetic Oligonucleotide
aaaccggggcccgcctcaagctagctatctccattgtctg

SEQ ID NO: 183 - DNA, 40 bp, Artificial Sequence
  Synthetic Oligonucleotide
aaaccggggcccgcctcaagctagctacttccattgtctg

SEQ ID NO: 184 - DNA, 40 bp, Artificial Sequence
  Synthetic Oligonucleotide
tgtgcgactacgctcttgaacaattctgatccctggattt

SEQ ID NO: 185 - DNA, 40 bp, Artificial Sequence
  Synthetic Oligonucleotide
gtccggaacgcctcgatcctcgcatagtatgatacgtctg

SEQ ID NO: 186 - DNA, 40 bp, Artificial Sequence
  Synthetic Oligonucleotide
gtccggaacgcctcgatcctcgcataatatgatgcgtctg

SEQ ID NO: 187 - DNA, 40 bp, Artificial Sequence
  Synthetic Oligonucleotide
ccgcctcgcgtcgtgtacacgaagacctccggagattttg

SEQ ID NO: 188 - DNA, 40 bp, Artificial Sequence
  Synthetic Oligonucleotide
ccgcctcaggtttcccctaacgcgttagccttccggaatg

SEQ ID NO: 189 - DNA, 40 bp, Artificial Sequence
  Synthetic Oligonucleotide
gtccggaacgcctcgatcctcgcataatatgacacgtctg

SEQ ID NO: 190 - DNA, 40 bp, Artificial Sequence
  Synthetic Oligonucleotide
attctgttttttaagttggcgaggtcctctaacttttggg

SEQ ID NO: 191 - DNA, 40 bp, Artificial Sequence
  Synthetic Oligonucleotide
agaccggggcccgcctcaagctagctacctccattgtctg

SEQ ID NO: 192 - DNA, 40 bp, Artificial Sequence
  Synthetic Oligonucleotide
ccgcctccttcctccatgagcatgcttactcgggatactg

SEQ ID NO: 193 - DNA, 40 bp, Artificial Sequence
  Synthetic Oligonucleotide
ccgcaccccgatagtcgtcttcgctggaccacccgtgtta

SEQ ID NO: 194 - DNA, 40 bp, Artificial Sequence
  Synthetic Oligonucleotide
agtgcctgaccgccttgatccttcttctcggaaacgcgta

SEQ ID NO: 195 - DNA, 40 bp, Artificial Sequence
  Synthetic Oligonucleotide
actaccttcgtccagcggtgcgctggggactttatccctc

SEQ ID NO: 196 - DNA, 40 bp, Artificial Sequence
  Synthetic Oligonucleotide
aaaccggggcccgcctcaagctggctacctccattgtctg

SEQ ID NO: 197 - DNA, 40 bp, Artificial Sequence
  Synthetic Oligonucleotide
tattcgccagtcacatcaactatgatgacgcttgactggg

SEQ ID NO: 198 - DNA, 40 bp, Artificial Sequence
  Synthetic Oligonucleotide
gtccatggcacgcctcgattccgcccatacatgcatgtaa

SEQ ID NO: 199 - DNA, 40 bp, Artificial Sequence
  Synthetic Oligonucleotide
ccgcctcaggttcccctaacgcgtttagccttccggaatg

SEQ ID NO: 200 - DNA, 40 bp, Artificial Sequence
  Synthetic Oligonucleotide
ttactttctcggatcactaattgccgcatcacgcactccc

SEQ ID NO: 201 - DNA, 40 bp, Artificial Sequence
  Synthetic Oligonucleotide
taccggcactggaggcgtccttggtggactaccaccttat

SEQ ID NO: 202 - DNA, 40 bp, Artificial Sequence
  Synthetic Oligonucleotide
cgctatccgtttgtccgtcctcttgtggtattgcgcatgc

SEQ ID NO: 203 - DNA, 40 bp, Artificial Sequence
  Synthetic Oligonucleotide
aaaccggggcccgcctcaagctagccacctccattgtctg

SEQ ID NO: 204 - DNA, 40 bp, Artificial Sequence
  Synthetic Oligonucleotide
aaaccggggcccgccccaagctagctacctccattgtctg

SEQ ID NO: 205 - DNA, 40 bp, Artificial Sequence
  Synthetic Oligonucleotide
aaaccgaggcccgcctcaagctagctacctccattgtctg

SEQ ID NO: 206 - DNA, 40 bp, Artificial Sequence
  Synthetic Oligonucleotide
gtccggaacgcctcgatcctcgcataatgtgatacgtctg

SEQ ID NO: 207 - DNA, 40 bp, Artificial Sequence
  Synthetic Oligonucleotide
cccttatccggcaggacgtctttcgtgcactatcacgatt

SEQ ID NO: 208 - DNA, 40 bp, Artificial Sequence
  Synthetic Oligonucleotide
accctatcttgacgtctcttcggggactaccccgattctg

SEQ ID NO: 209 - DNA, 40 bp, Artificial Sequence
  Synthetic Oligonucleotide
ttcgcgaacgccttagtcacccttctcggataacatgatt

SEQ ID NO: 210 - DNA, 40 bp, Artificial Sequence
  Synthetic Oligonucleotide
gtccggaacgcctcgatcctcgcacaatatgatacgtctg

SEQ ID NO: 211 - DNA, 40 bp, Artificial Sequence
  Synthetic Oligonucleotide
cactatccgcttatgttcgcctctctctcggttgcgcgtt

SEQ ID NO: 212 - DNA, 40 bp, Artificial Sequence
  Synthetic Oligonucleotide
aaaccggggcccgcttcaagctagctacctccattgtctg

SEQ ID NO: 213 - DNA, 40 bp, Artificial Sequence
  Synthetic Oligonucleotide
gtccggaacgccttgatcctcgcataatatgatacgtctg

SEQ ID NO: 214 - DNA, 40 bp, Artificial Sequence
  Synthetic Oligonucleotide
gtccggaacgcctcgatcctcgcataatacgatacgtctg

SEQ ID NO: 215 - DNA, 40 bp, Artificial Sequence
  Synthetic Oligonucleotide
gtccatggtacgcctcgattccgcccatacatgcatgtag

SEQ ID NO: 216 - DNA, 40 bp, Artificial Sequence
  Synthetic Oligonucleotide
gactacccccatcgagcggtttaccggttggcgacaacgc

SEQ ID NO: 217 - DNA, 40 bp, Artificial Sequence
  Synthetic Oligonucleotide
ctgcctctgctctccctctcggatcgcgtacgtggatatg

SEQ ID NO: 218 - DNA, 40 bp, Artificial Sequence
  Synthetic Oligonucleotide
ccgcaccccgatagtcatcttcgctggaccacccgtgtta

SEQ ID NO: 219 - DNA, 40 bp, Artificial Sequence
  Synthetic Oligonucleotide
cactatccgtctgtccgtcctcttgtggtattgcgcatgc

SEQ ID NO: 220 - DNA, 40 bp, Artificial Sequence
  Synthetic Oligonucleotide
tcctctgtgactctcacgctaacccgggggtgtgaccgtc

SEQ ID NO: 221 - DNA, 40 bp, Artificial Sequence
  Synthetic Oligonucleotide
tattcgccagtcacatcaactatgatgacgctcgactgga

SEQ ID NO: 222 - DNA, 40 bp, Artificial Sequence
  Synthetic Oligonucleotide
tatggggcttttaagcacttctcggtaactgggcagttac

SEQ ID NO: 223 - DNA, 40 bp, Artificial Sequence
  Synthetic Oligonucleotide
tatggggcttttaagcactctcggtaacttgggcagttac

SEQ ID NO: 224 - DNA, 40 bp, Artificial Sequence
  Synthetic Oligonucleotide
gtccatggtacgcctcgactccgcccatacatgcatgtaa

SEQ ID NO: 225 - DNA, 40 bp, Artificial Sequence
  Synthetic Oligonucleotide
tatggggcttttaagcacttctcggtacttgggcagttac

SEQ ID NO: 226 - DNA, 40 bp, Artificial Sequence
  Synthetic Oligonucleotide
tatggggcttttaagcacttccggtaacttgggcagttac

SEQ ID NO: 227 - DNA, 40 bp, Artificial Sequence
  Synthetic Oligonucleotide
gtccatggtacgcctcgattccgcctatacatgcatgtaa

SEQ ID NO: 228 - DNA, 40 bp, Artificial Sequence
  Synthetic Oligonucleotide
ccgcctcaggttcccctaacgcgttagcccttccggaatg

SEQ ID NO: 229 - DNA, 40 bp, Artificial Sequence
  Synthetic Oligonucleotide
cactatccgtttgtccgtcctcttgtggtgttgcgcatgc

SEQ ID NO: 230 - DNA, 40 bp, Artificial Sequence
  Synthetic Oligonucleotide
atggtccatgagtcttctggcactatccagttgacgctca

SEQ ID NO: 231 - DNA, 40 bp, Artificial Sequence
  Synthetic Oligonucleotide
tgttcgccagtcacatcaactatgatgacgcttgactgga

SEQ ID NO: 232 - DNA, 40 bp, Artificial Sequence
  Synthetic Oligonucleotide
gcccgctgcctttattcgtctgatgatgtgcacctcgagt

SEQ ID NO: 233 - DNA, 40 bp, Artificial Sequence
  Synthetic Oligonucleotide
atccgcctcgcttgtgcacaactcgcatcccgcgtctgcg

SEQ ID NO: 234 - DNA, 40 bp, Artificial Sequence
  Synthetic Oligonucleotide
aaaccggggcccgcctcaagctagctaccttcattgtctg

SEQ ID NO: 235 - DNA, 40 bp, Artificial Sequence
  Synthetic Oligonucleotide
aaaccggggcccgcctcaagctaactacctccattgtctg

SEQ ID NO: 236 - DNA, 40 bp, Artificial Sequence
  Synthetic Oligonucleotide
aaaccgggcccgcctcaagctagctacctccattgtcctg

SEQ ID NO: 237 - DNA, 40 bp, Artificial Sequence
  Synthetic Oligonucleotide
ttatgacgtcggttcgcctcgggtccatcccaattgtctg

SEQ ID NO: 238 - DNA, 40 bp, Artificial Sequence
  Synthetic Oligonucleotide
tccaatgaccggatcagggtatatcacagactactgtgag

SEQ ID NO: 239 - DNA, 40 bp, Artificial Sequence
  Synthetic Oligonucleotide
tatggggctttacacacttctcggtaacttgggcagttac

SEQ ID NO: 240 - DNA, 40 bp, Artificial Sequence
  Synthetic Oligonucleotide
gtccgggacgcctcgatcctcgcataatatgatacgtctg

SEQ ID NO: 241 - DNA, 40 bp, Artificial Sequence
  Synthetic Oligonucleotide
ctggccgacatgcatgattgcctgggagtccccacaatgt

SEQ ID NO: 242 - DNA, 40 bp, Artificial Sequence
  Synthetic Oligonucleotide
agttttctcggatccaaacgcatatcctcctccgcctcgt

SEQ ID NO: 243 - DNA, 40 bp, Artificial Sequence
  Synthetic Oligonucleotide
tatggggcttttaagcacttctcggtaacttgggcagtac

SEQ ID NO: 244 - DNA, 40 bp, Artificial Sequence
  Synthetic Oligonucleotide
tatggggctttagacacttctcggtaacttgggcagttac

SEQ ID NO: 245 - DNA, 40 bp, Artificial Sequence
  Synthetic Oligonucleotide
gtccggaacgcctcgatcctcgcataacatgatacgtctg

SEQ ID NO: 246 - DNA, 40 bp, Artificial Sequence
  Synthetic Oligonucleotide
gtccatggtgcgcctcgattccgcccatacatgcatgtaa

SEQ ID NO: 247 - DNA, 40 bp, Artificial Sequence
  Synthetic Oligonucleotide
gtccatggtacgcctcggttccgcccatacatgcatgtaa

SEQ ID NO: 248 - DNA, 40 bp, Artificial Sequence
  Synthetic Oligonucleotide
gtccatggtacgcctcgattccgcccatacgtgcatgtaa

SEQ ID NO: 249 - DNA, 40 bp, Artificial Sequence
  Synthetic Oligonucleotide
cattttctaggcctacgccgcctgggctcctccgtatgcg

SEQ ID NO: 250 - DNA, 40 bp, Artificial Sequence
  Synthetic Oligonucleotide
cactatccgtttgtccgtcctcttgtggtattgcgcgtgc

SEQ ID NO: 251 - DNA, 40 bp, Artificial Sequence
  Synthetic Oligonucleotide
cactatccgtttgtccgtcctcttgtggtactgcgcatgc

SEQ ID NO: 252 - DNA, 40 bp, Artificial Sequence
  Synthetic Oligonucleotide
aaaccggggcccgcctcaagctagctacctcctttgtctg

SEQ ID NO: 253 - DNA, 40 bp, Artificial Sequence
  Synthetic Oligonucleotide
aaaccagggcccgcctcaagctagctacctccattgtctg

SEQ ID NO: 254 - DNA, 40 bp, Artificial Sequence
  Synthetic Oligonucleotide
gtccatggtacgccttgattccgcccatacatgcatgtaa

SEQ ID NO: 255 - DNA, 40 bp, Artificial Sequence
  Synthetic Oligonucleotide
gaaaccgggcccgcctcaagctagctacctccattgtctg

SEQ ID NO: 256 - DNA, 40 bp, Artificial Sequence
  Synthetic Oligonucleotide
ctcttatccggcgggacgtctttcgtgcactatcacgatt

SEQ ID NO: 257 - DNA, 40 bp, Artificial Sequence
  Synthetic Oligonucleotide
ctcttatccggcaggacgtctttcgtgcactatcacgatc

SEQ ID NO: 258 - DNA, 40 bp, Artificial Sequence
  Synthetic Oligonucleotide
aaaccggggcccgcctcaagccagctacctccattgtctg

SEQ ID NO: 259 - DNA, 40 bp, Artificial Sequence
  Synthetic Oligonucleotide
aaaccgggcccgccttcaagctagctacctccattgtctg

SEQ ID NO: 260 - DNA, 40 bp, Artificial Sequence
  Synthetic Oligonucleotide
tactcgccagtcacatcaactatgatgacgcttgactgga

SEQ ID NO: 261 - DNA, 40 bp, Artificial Sequence
  Synthetic Oligonucleotide
taccggcactggaggcgtccctggtggactaccaccttat

SEQ ID NO: 262 - DNA, 40 bp, Artificial Sequence
  Synthetic Oligonucleotide
gtcttatccggcaggacgtctttcgtgcactatcacgatt

SEQ ID NO: 263 - DNA, 40 bp, Artificial Sequence
  Synthetic Oligonucleotide
gtccggaacgcctcgatcctcgcgtaatatgatacgtctg

SEQ ID NO: 264 - DNA, 40 bp, Artificial Sequence
  Synthetic Oligonucleotide
gtccatggtacgcctcgattccacccatacatgcatgtaa

SEQ ID NO: 265 - DNA, 40 bp, Artificial Sequence
  Synthetic Oligonucleotide
gtaataaccttccgttactcgcctcgggcaagtgtgcgca

SEQ ID NO: 266 - DNA, 40 bp, Artificial Sequence
  Synthetic Oligonucleotide
ctcttatccggcaggacgtctttcgcgcactatcacgatt

SEQ ID NO: 267 - DNA, 40 bp, Artificial Sequence
  Synthetic Oligonucleotide
ctcttatccgacaggacgtctttcgtgcactatcacgatt

SEQ ID NO: 268 - DNA, 40 bp, Artificial Sequence
  Synthetic Oligonucleotide
ccgcctcaggttcccctaacgcgttacgccttccggaatg

SEQ ID NO: 269 - DNA, 40 bp, Artificial Sequence
  Synthetic Oligonucleotide
catcccggtggttcgtgttcagcaacgctccttaacacga

SEQ ID NO: 270 - DNA, 40 bp, Artificial Sequence
  Synthetic Oligonucleotide
cactatccgcatcgagctttcgtccgggagtgtatagcta

SEQ ID NO: 271 - DNA, 40 bp, Artificial Sequence
  Synthetic Oligonucleotide
aaaccggggcctgcctcaagctagctacctccattgtctg

SEQ ID NO: 272 - DNA, 40 bp, Artificial Sequence
  Synthetic Oligonucleotide
aaaccggggcccgcctcaagctagcgacctccattgtctg

SEQ ID NO: 273 - DNA, 40 bp, Artificial Sequence
  Synthetic Oligonucleotide
ttgaatcctgctttaggcgcctcttaagggatccattttt

SEQ ID NO: 274 - DNA, 40 bp, Artificial Sequence
  Synthetic Oligonucleotide
tatccgccagtcacatcaactatgatgacgcttgactgga

SEQ ID NO: 275 - DNA, 40 bp, Artificial Sequence
  Synthetic Oligonucleotide
gtccggaacgcctcgatcctcgtataatatgatacgtctg

SEQ ID NO: 276 - DNA, 40 bp, Artificial Sequence
  Synthetic Oligonucleotide
ctcttatccggcaggacgtcttccgtgcactatcacgatt

SEQ ID NO: 277 - DNA, 40 bp, Artificial Sequence
  Synthetic Oligonucleotide
ctcttatccggcaggacatctttcgtgcactatcacgatt

SEQ ID NO: 278 - DNA, 40 bp, Artificial Sequence
  Synthetic Oligonucleotide
catctctcggctcccgtgcgcacgcagctgactcgaactg

SEQ ID NO: 279 - DNA, 40 bp, Artificial Sequence
  Synthetic Oligonucleotide
atctccgtctaacacgtgcactatcacggctttagttaga

SEQ ID NO: 280 - DNA, 40 bp, Artificial Sequence
  Synthetic Oligonucleotide
ataggtcctggggtatccgcctcgctaagtttgtgcatgc

SEQ ID NO: 281 - DNA, 40 bp, Artificial Sequence
  Synthetic Oligonucleotide
aaactggggcccgcctcaagctagctacctccattgtctg

SEQ ID NO: 282 - DNA, 40 bp, Artificial Sequence
  Synthetic Oligonucleotide
tctcccaagtttagtcgtctttcgaggactacctcgtttc

SEQ ID NO: 283 - DNA, 40 bp, Artificial Sequence
  Synthetic Oligonucleotide
tccccttcatcggaattgataactcaccccgttgtcttga

SEQ ID NO: 284 - DNA, 40 bp, Artificial Sequence
  Synthetic Oligonucleotide
tataagcctgtcttttaatctcggcggagtgctcatgagc

SEQ ID NO: 285 - DNA, 40 bp, Artificial Sequence
  Synthetic Oligonucleotide
gtccatggtacgcctcgattccgcccatacatgcatgcaa

SEQ ID NO: 286 - DNA, 40 bp, Artificial Sequence
  Synthetic Oligonucleotide
gctaggctttcacgcacgcggactgtacccgaactgggtt

SEQ ID NO: 287 - DNA, 40 bp, Artificial Sequence
  Synthetic Oligonucleotide
gatcacactgccctttgtttaaggcctttatacaaacgca

SEQ ID NO: 288 - DNA, 40 bp, Artificial Sequence
  Synthetic Oligonucleotide
cactatccgtttgtccgtcctcttgtggtattgcgcatac

SEQ ID NO: 289 - DNA, 40 bp, Artificial Sequence
  Synthetic Oligonucleotide
aaataggacctacgcccgcctcagtctgactcatcgtctg

SEQ ID NO: 290 - DNA, 40 bp, Artificial Sequence
  Synthetic Oligonucleotide
aaaccggggctcgcctcaagctagctacctccattgtctg

SEQ ID NO: 291 - DNA, 40 bp, Artificial Sequence
  Synthetic Oligonucleotide
tactatccgtttgtccgtcctctcgtggtattgcgcatgc

SEQ ID NO: 292 - DNA, 40 bp, Artificial Sequence
  Synthetic Oligonucleotide
gtccggaacgcctcgatcctcgcatgatatgatacgtctg

SEQ ID NO: 293 - DNA, 40 bp, Artificial Sequence
  Synthetic Oligonucleotide
gtccggaacgcctcgatcctcgcataatatgatacgcctg

SEQ ID NO: 294 - DNA, 40 bp, Artificial Sequence
  Synthetic Oligonucleotide
gtccatggtacgcctcgattccgcccatacatgcgtgtaa

SEQ ID NO: 295 - DNA, 40 bp, Artificial Sequence
  Synthetic Oligonucleotide
gatggtccatgagcttctggcactatccagttgacgctca

SEQ ID NO: 296 - DNA, 40 bp, Artificial Sequence
  Synthetic Oligonucleotide
ctcttgtccggcaggacgtctttcgtgcactatcacgatt

SEQ ID NO: 297 - DNA, 40 bp, Artificial Sequence
  Synthetic Oligonucleotide
ctcttatccggcaggacgtccttcgtgcactatcacgatt

SEQ ID NO: 298 - DNA, 40 bp, Artificial Sequence
  Synthetic Oligonucleotide
cgccggaagtccctcctcgtcttgatgcactatcatctca

SEQ ID NO: 299 - DNA, 40 bp, Artificial Sequence
  Synthetic Oligonucleotide
ccgccttggtcatcccctacatgtaggcctatgtctggca

SEQ ID NO: 300 - DNA, 40 bp, Artificial Sequence
  Synthetic Oligonucleotide
cactatccgtttgtccgtcctcttgcggtattgcgcatgc

SEQ ID NO: 301 - DNA, 40 bp, Artificial Sequence
  Synthetic Oligonucleotide
cactatccgtttgtccgtcctcttatggtattgcgcatgc

SEQ ID NO: 302 - DNA, 40 bp, Artificial Sequence
  Synthetic Oligonucleotide
cactatccgtttgcccgtcctcttgtggtattgcgcatgc

SEQ ID NO: 303 - DNA, 40 bp, Artificial Sequence
  Synthetic Oligonucleotide
acactattccggtaagtcatcgtttaaccgcttgttgcaa

SEQ ID NO: 304 - DNA, 40 bp, Artificial Sequence
  Synthetic Oligonucleotide
aaaccggggcccgcctcaagctagctacctccattgtttg

SEQ ID NO: 305 - DNA, 40 bp, Artificial Sequence
  Synthetic Oligonucleotide
tgtagatcgttcttatccgcctcggtcttccccgggttaa

SEQ ID NO: 306 - DNA, 40 bp, Artificial Sequence
  Synthetic Oligonucleotide
tatgggctttaagcactttctcggtaacttgggcagttac

SEQ ID NO: 307 - DNA, 40 bp, Artificial Sequence
  Synthetic Oligonucleotide
gtccggaacgcctcgatccccgcataatatgatacgtctg

SEQ ID NO: 308 - DNA, 40 bp, Artificial Sequence
  Synthetic Oligonucleotide
gtccatggtacgcctcgatttccgccatacatgcatgtaa

SEQ ID NO: 309 - DNA, 40 bp, Artificial Sequence
  Synthetic Oligonucleotide
gtccatggtacgcctcgattccgccatacatgcatgtaac

SEQ ID NO: 310 - DNA, 40 bp, Artificial Sequence
  Synthetic Oligonucleotide
ctcttatctggcaggacgtctttcgtgcactatcacgatt

SEQ ID NO: 311 - DNA, 40 bp, Artificial Sequence
  Synthetic Oligonucleotide
cactatccgtcttaacgtgttcccttcggacatccatcaa

SEQ ID NO: 312 - DNA, 40 bp, Artificial Sequence
  Synthetic Oligonucleotide
cacgtacgtgagattgcctcgctactctcttttgcagctg

SEQ ID NO: 313 - DNA, 40 bp, Artificial Sequence
  Synthetic Oligonucleotide
actaccatcgtctagcgagcgaatgaaaatcgtcactgtt

SEQ ID NO: 314 - DNA, 40 bp, Artificial Sequence
  Synthetic Oligonucleotide
acgtcgacaccgcctctgtccgtatgaccggtctcgtctg

SEQ ID NO: 315 - DNA, 40 bp, Artificial Sequence
  Synthetic Oligonucleotide
acccgcttgtgtgcgacacatgtctacgactcctcttcag

SEQ ID NO: 316 - DNA, 40 bp, Artificial Sequence
  Synthetic Oligonucleotide
aaaccggggcccgcctcaagctagctacctccattgtcag

SEQ ID NO: 317 - DNA, 40 bp, Artificial Sequence
  Synthetic Oligonucleotide
aaaccggggcccgcctcaaactagctacctccattgtctg

SEQ ID NO: 318 - DNA, 40 bp, Artificial Sequence
  Synthetic Oligonucleotide
aaaccgggcccgcctcaagctagctaccttccattgtctg

SEQ ID NO: 319 - DNA, 40 bp, Artificial Sequence
  Synthetic Oligonucleotide
tgcgaaacgctattttctgggaagccgcatctcgagcgag

SEQ ID NO: 320 - DNA, 40 bp, Artificial Sequence
  Synthetic Oligonucleotide
tgagccatggatcactgcctcgattcgtccacgtggtggc

SEQ ID NO: 321 - DNA, 40 bp, Artificial Sequence
  Synthetic Oligonucleotide
tatggggctttatacacttctcggtaacttgggcagttac

SEQ ID NO: 322 - DNA, 40 bp, Artificial Sequence
  Synthetic Oligonucleotide
tatggggctttaagcacttctcggtaacttgagcagttac

SEQ ID NO: 323 - DNA, 40 bp, Artificial Sequence
  Synthetic Oligonucleotide
tatgggctttaagctacttctcggtaacttgggcagttac

SEQ ID NO: 324 - DNA, 40 bp, Artificial Sequence
  Synthetic Oligonucleotide
tatgggctttaagcacttctcggtaacttgggcagttacc

SEQ ID NO: 325 - DNA, 40 bp, Artificial Sequence
  Synthetic Oligonucleotide
tatggcgttttaagcacttctcggtaacttgggcagttac

SEQ ID NO: 326 - DNA, 40 bp, Artificial Sequence
  Synthetic Oligonucleotide
taccgcctcatcatcggacacggcgtgtatcagttggctg

SEQ ID NO: 327 - DNA, 40 bp, Artificial Sequence
  Synthetic Oligonucleotide
gtaaatattcacgttgaatcgccttgctcctcctagtctg

SEQ ID NO: 328 - DNA, 40 bp, Artificial Sequence
  Synthetic Oligonucleotide
ggggtatctgatatgctgttatatttttggaacctctctt

SEQ ID NO: 329 - DNA, 40 bp, Artificial Sequence
  Synthetic Oligonucleotide
ctcttacccggcaggacgtctttcgtgcactatcacgatt

SEQ ID NO: 330 - DNA, 40 bp, Artificial Sequence
  Synthetic Oligonucleotide
ctctcatccggcaggacgtctttcgtgcactatcacgatt

SEQ ID NO: 331 - DNA, 40 bp, Artificial Sequence
  Synthetic Oligonucleotide
ccgcctcaggttcccctaacgcgttagccttccggaactg

SEQ ID NO: 332 - DNA, 40 bp, Artificial Sequence
  Synthetic Oligonucleotide
ccgcctcaggttcccctaaccgcgttagccttccggaatg

SEQ ID NO: 333 - DNA, 40 bp, Artificial Sequence
  Synthetic Oligonucleotide
cactatccgtttgtccgtcctcttgtagtattgcgcatgc

SEQ ID NO: 334 - DNA, 40 bp, Artificial Sequence
  Synthetic Oligonucleotide
attacagcgcccagaatgccccgtttcccgtgttcgggat

SEQ ID NO: 335 - DNA, 40 bp, Artificial Sequence
  Synthetic Oligonucleotide
atgactgcaggcatttgcctcgtgtttgtatcacgtgaga

SEQ ID NO: 336 - DNA, 40 bp, Artificial Sequence
  Synthetic Oligonucleotide
acctaggctgcctcgaccctccaaagctcggtccttttga

SEQ ID NO: 337 - DNA, 40 bp, Artificial Sequence
  Synthetic Oligonucleotide
tgcgaaacgctattttctgggaagccgcatctcgagcgga

SEQ ID NO: 338 - DNA, 40 bp, Artificial Sequence
  Synthetic Oligonucleotide
tgcgaaacgctattttctgggaagccgcatcccgagcgaa

SEQ ID NO: 339 - DNA, 40 bp, Artificial Sequence
  Synthetic Oligonucleotide
tatggggcttttaagcacttctcggtaacttgggcagtta

SEQ ID NO: 340 - DNA, 40 bp, Artificial Sequence
  Synthetic Oligonucleotide
taccgcctcatcatcggacacgacgcgtatcagttggctg

SEQ ID NO: 341 - DNA, 40 bp, Artificial Sequence
  Synthetic Oligonucleotide
gtccggaacgcctcgatcctcgcataatatgatacgtcta

SEQ ID NO: 342 - DNA, 40 bp, Artificial Sequence
  Synthetic Oligonucleotide
gtccggaacgcctcgatcctcgcataatatgatacatctg

SEQ ID NO: 343 - DNA, 40 bp, Artificial Sequence
  Synthetic Oligonucleotide
gtccatggtacgcctcgattctgcccatacatgcatgtaa

SEQ ID NO: 344 - DNA, 40 bp, Artificial Sequence
  Synthetic Oligonucleotide
gtccatggtacgccccgattccgcccatacatgcatgtaa

SEQ ID NO: 345 - DNA, 40 bp, Artificial Sequence
  Synthetic Oligonucleotide
gtatgggctttaagcacttctcggtaacttgggcagttac

SEQ ID NO: 346 - DNA, 40 bp, Artificial Sequence
  Synthetic Oligonucleotide
gcgtttgcttctcctgactacatgagattaataaacgcgc

SEQ ID NO: 347 - DNA, 40 bp, Artificial Sequence
  Synthetic Oligonucleotide
ctcttatccggcaggacgtctttcgtgcactatcgcgatt

SEQ ID NO: 348 - DNA, 40 bp, Artificial Sequence
  Synthetic Oligonucleotide
ctcttatccggcaggacgtctttcgtgcactatcacggtt

SEQ ID NO: 349 - DNA, 40 bp, Artificial Sequence
  Synthetic Oligonucleotide
ctccaagacgattgtcgttattgccggactacctgcattt

SEQ ID NO: 350 - DNA, 40 bp, Artificial Sequence
  Synthetic Oligonucleotide
ccgcacccccgatagtcatcttcactggacacccgtgtta

SEQ ID NO: 351 - DNA, 40 bp, Artificial Sequence
  Synthetic Oligonucleotide
ccgcacagctcacttcgtctttgatcgaccacgctcataa

SEQ ID NO: 352 - DNA, 40 bp, Artificial Sequence
  Synthetic Oligonucleotide
acactattccggtaagtcatcgtctaaccgtttgttgcaa

SEQ ID NO: 353 - DNA, 40 bp, Artificial Sequence
  Synthetic Oligonucleotide
aaacgagatctcatgacgcctcgggtccttccttcgactg

SEQ ID NO: 354 - DNA, 40 bp, Artificial Sequence
  Synthetic Oligonucleotide
aaaccggggcccgcctcaagctagctaccaccattgtctg

SEQ ID NO: 355 - DNA, 40 bp, Artificial Sequence
  Synthetic Oligonucleotide
aaaccggggcccacctcaagctagctacctccattgtctg

SEQ ID NO: 356 - DNA, 40 bp, Artificial Sequence
  Synthetic Oligonucleotide
aaaccggggaccgcctcaagctagctacctccattgtctg

SEQ ID NO: 357 - DNA, 40 bp, Artificial Sequence
  Synthetic Oligonucleotide
aaaccgggcccgcctcaagtctagctacctccattgtctg

SEQ ID NO: 358 - DNA, 40 bp, Artificial Sequence
  Synthetic Oligonucleotide
ttcttatccggcaggacgtctttcgtgcactatcacgatt

SEQ ID NO: 359 - DNA, 40 bp, Artificial Sequence
  Synthetic Oligonucleotide
tcgggatacttgaggtcgttgtgcgcttacgaaccctaat

SEQ ID NO: 360 - DNA, 40 bp, Artificial Sequence
  Synthetic Oligonucleotide
tattcgccagccacatcaactatgatgacgcttggctgga

SEQ ID NO: 361 - DNA, 40 bp, Artificial Sequence
  Synthetic Oligonucleotide
tatggggcttttaagcacttcgtgatacttgggcagttac

SEQ ID NO: 362 - DNA, 40 bp, Artificial Sequence
  Synthetic Oligonucleotide
tatgggctttaagctacttctcggtaacttggcgagttac

SEQ ID NO: 363 - DNA, 40 bp, Artificial Sequence
  Synthetic Oligonucleotide
taccgcctcatcatcgggcacgacgtgtatcagttggctg

SEQ ID NO: 364 - DNA, 40 bp, Artificial Sequence
  Synthetic Oligonucleotide
taccgcctcatcaccggacacgacgtgtatcagttggctg

SEQ ID NO: 365 - DNA, 40 bp, Artificial Sequence
  Synthetic Oligonucleotide
gtccatggtacgcctcgattccgcccatacacgcatgtaa

SEQ ID NO: 366 - DNA, 40 bp, Artificial Sequence
  Synthetic Oligonucleotide
gccgtcagtctcgtcttcccatcgtctgcatttgacggac

SEQ ID NO: 367 - DNA, 40 bp, Artificial Sequence
  Synthetic Oligonucleotide
ctgcctcggtctacccctaatgttgcaacataatggtaaa

SEQ ID NO: 368 - DNA, 40 bp, Artificial Sequence
  Synthetic Oligonucleotide
ccgcctcagtccgtggatccactttgcacgtgccatgaca

SEQ ID NO: 369 - DNA, 40 bp, Artificial Sequence
  Synthetic Oligonucleotide
cccgcaagccatgctctagacgcctcaaaaagatgatgct

SEQ ID NO: 370 - DNA, 40 bp, Artificial Sequence
  Synthetic Oligonucleotide
cacgttgaatgttatccgccttgcttccgtccctaagctg

SEQ ID NO: 371 - DNA, 40 bp, Artificial Sequence
  Synthetic Oligonucleotide
attccgtttagagaaatctgttggccactatgccatcaat

SEQ ID NO: 372 - DNA, 40 bp, Artificial Sequence
  Synthetic Oligonucleotide
acgattcttcctcagcttccgcggtgcaggatttgcacgt

SEQ ID NO: 373 - DNA, 40 bp, Artificial Sequence
  Synthetic Oligonucleotide
aaaccgggcccgcctcaagctagcctacctccattgtctg

SEQ ID NO: 374 - DNA, 40 bp, Artificial Sequence
  Synthetic Oligonucleotide
tgcgaaacgctattttctgggaaaccgcatctcgagcgaa

SEQ ID NO: 375 - DNA, 40 bp, Artificial Sequence
  Synthetic Oligonucleotide
tgcgaaacgctatttctgggaatgccgcatctcgagcgaa

SEQ ID NO: 376 - DNA, 40 bp, Artificial Sequence
  Synthetic Oligonucleotide
tgcgaaacactattttctgggaagccgcatctcgagcgaa

SEQ ID NO: 377 - DNA, 40 bp, Artificial Sequence
  Synthetic Oligonucleotide
tcagcgcgcacgccttgtctatccctgggtggccaccata

SEQ ID NO: 378 - DNA, 40 bp, Artificial Sequence
  Synthetic Oligonucleotide
tattcgccagccacatcaactatgatgacgcttgactggg

SEQ ID NO: 379 - DNA, 40 bp, Artificial Sequence
  Synthetic Oligonucleotide
gttctcgcctctgtcctcatggttcgaaccggtatgcata

SEQ ID NO: 380 - DNA, 40 bp, Artificial Sequence
  Synthetic Oligonucleotide
gtccatggtacgcctcgattccgccatacattgcatgtaa

SEQ ID NO: 381 - DNA, 40 bp, Artificial Sequence
  Synthetic Oligonucleotide
gcccatggtacgcctcgattccgcccatacatgcatgtaa

SEQ ID NO: 382 - DNA, 40 bp, Artificial Sequence
  Synthetic Oligonucleotide
gatcgcgctgccctttgtttaaggcctttatacaaacgca

SEQ ID NO: 383 - DNA, 40 bp, Artificial Sequence
  Synthetic Oligonucleotide
gagatctcggatctggcgtactacttggacaggttcctcc

SEQ ID NO: 384 - DNA, 40 bp, Artificial Sequence
  Synthetic Oligonucleotide
ctcttatccggcaggatgtctttcgtgcactatcacgatt

SEQ ID NO: 385 - DNA, 40 bp, Artificial Sequence
  Synthetic Oligonucleotide
ctcttatccggcaggacgtctttcgtgcactaccacgatt

SEQ ID NO: 386 - DNA, 40 bp, Artificial Sequence
  Synthetic Oligonucleotide
ctcttatccagcaggacgtctttcgtgcactatcacgatt

SEQ ID NO: 387 - DNA, 40 bp, Artificial Sequence
  Synthetic Oligonucleotide
cgcgcagcctcggtcctacacagcatggccatgccgttat

SEQ ID NO: 388 - DNA, 40 bp, Artificial Sequence
  Synthetic Oligonucleotide
cattcgccagtcacatcaactatgatgacgcttgactgga

SEQ ID NO: 389 - DNA, 40 bp, Artificial Sequence
  Synthetic Oligonucleotide
cactatccgtttgtccgtcctcttgtggcattgcgcatgc

SEQ ID NO: 390 - DNA, 40 bp, Artificial Sequence
  Synthetic Oligonucleotide
cactatccgtagatccgtctctcactacgcgtatggaatc

SEQ ID NO: 391 - DNA, 40 bp, Artificial Sequence
  Synthetic Oligonucleotide
cactacccgtttgtccgtcctcttgtggtattgcgcatgc

SEQ ID NO: 392 - DNA, 40 bp, Artificial Sequence
  Synthetic Oligonucleotide
cacctgtagtcgtcccgtgcgtgtgggtcgaaatgccgct

SEQ ID NO: 393 - DNA, 40 bp, Artificial Sequence
  Synthetic Oligonucleotide
atctgcgccgggttctcattctcccgactacgtgagatta

SEQ ID NO: 394 - DNA, 40 bp, Artificial Sequence
  Synthetic Oligonucleotide
accacacgtgtgatgcgcctccggtcctcgtttgtctgta

SEQ ID NO: 395 - DNA, 40 bp, Artificial Sequence
  Synthetic Oligonucleotide
aaaccggggcccgcctcaagctagctacctcaattgtctg

SEQ ID NO: 396 - DNA, 40 bp, Artificial Sequence
  Synthetic Oligonucleotide
tgttcgccagccacatcaactatgatgacgcttgactgga

SEQ ID NO: 397 - DNA, 40 bp, Artificial Sequence
  Synthetic Oligonucleotide
tattcgctagtcacatcaactatgatgacgcttgactgga

SEQ ID NO: 398 - DNA, 40 bp, Artificial Sequence
  Synthetic Oligonucleotide
tactcgccagccacatcaactatgatgacgcttgactgga

SEQ ID NO: 399 - DNA, 40 bp, Artificial Sequence
  Synthetic Oligonucleotide
taccggaagtccctcctcgtcttgatgcactatcatctca

SEQ ID NO: 400 - DNA, 40 bp, Artificial Sequence
  Synthetic Oligonucleotide
taccgcctcatcatcggacgcgacgtgtatcagttggctg

SEQ ID NO: 401 - DNA, 40 bp, Artificial Sequence
  Synthetic Oligonucleotide
taccgcctcatcatcggacacgacgtgtatcggttggctg

SEQ ID NO: 402 - DNA, 40 bp, Artificial Sequence
  Synthetic Oligonucleotide
tacacaggtgttaattgcctccggtccttccgtgtgcaca

SEQ ID NO: 403 - DNA, 40 bp, Artificial Sequence
  Synthetic Oligonucleotide
taatctggtacctatcatgcgctatcatgacggctaggac

SEQ ID NO: 404 - DNA, 40 bp, Artificial Sequence
  Synthetic Oligonucleotide
gttctcgcctctgtcctcgtggttcgaaccggtatgcatg

SEQ ID NO: 405 - DNA, 40 bp, Artificial Sequence
  Synthetic Oligonucleotide
gtccggaacgcctcgatccttgcataatatgatacgtctg

SEQ ID NO: 406 - DNA, 40 bp, Artificial Sequence
  Synthetic Oligonucleotide
gtccggaacgccccgatcctcgcataatatgatacgtctg

SEQ ID NO: 407 - DNA, 40 bp, Artificial Sequence
  Synthetic Oligonucleotide
gtccgaacgcctcgatcctcgcattaatatgatacgtctg

SEQ ID NO: 408 - DNA, 40 bp, Artificial Sequence
  Synthetic Oligonucleotide
gtaaatattcacgttgaaccgccttgctcctcttagtctg

SEQ ID NO: 409 - DNA, 40 bp, Artificial Sequence
  Synthetic Oligonucleotide
gctaggcttccacgcacgcggattgtacccgaactgggtt

SEQ ID NO: 410 - DNA, 40 bp, Artificial Sequence
  Synthetic Oligonucleotide
gcaagattcatctttgcttgactacacgcaattccgatga

SEQ ID NO: 411 - DNA, 40 bp, Artificial Sequence
  Synthetic Oligonucleotide
ctggccggattcgccttggtcctaccgtgttgcaacagac

SEQ ID NO: 412 - DNA, 40 bp, Artificial Sequence
  Synthetic Oligonucleotide
ctcttatccggcaggacgtctttcgtgcactatcacgatg

SEQ ID NO: 413 - DNA, 40 bp, Artificial Sequence
  Synthetic Oligonucleotide
ccgcctccaggttcccctaacgcgttagccttccggaatg

SEQ ID NO: 414 - DNA, 40 bp, Artificial Sequence
  Synthetic Oligonucleotide
cccatgatttcctcctacctgggtagccgcgcgttgctag

SEQ ID NO: 415 - DNA, 40 bp, Artificial Sequence
  Synthetic Oligonucleotide
cattgtggacctcctttctcggatccaaacacaattgcac

SEQ ID NO: 416 - DNA, 40 bp, Artificial Sequence
  Synthetic Oligonucleotide
cagtgttatggcgatcggattgccctcaccctgaccgctg

SEQ ID NO: 417 - DNA, 40 bp, Artificial Sequence
  Synthetic Oligonucleotide
cactatccgtttgtccgccctcttgtggtattgcgcatgc

SEQ ID NO: 418 - DNA, 40 bp, Artificial Sequence
  Synthetic Oligonucleotide
atgcgaactgctgttttggcgctatccaaattttaggcta

SEQ ID NO: 419 - DNA, 40 bp, Artificial Sequence
  Synthetic Oligonucleotide
atgaccggtcccgcctcataattcccgctttgctacgtgg

SEQ ID NO: 420 - DNA, 40 bp, Artificial Sequence
  Synthetic Oligonucleotide
agactactccgatggacaatcgtaacttaggagtcgccta

SEQ ID NO: 421 - DNA, 40 bp, Artificial Sequence
  Synthetic Oligonucleotide
acgtcagcctcggttatcttacgcgtacctctcatgcgca

SEQ ID NO: 422 - DNA, 40 bp, Artificial Sequence
  Synthetic Oligonucleotide
acagctgacgcctttgactctccatgttgccggcacggac

SEQ ID NO: 423 - DNA, 40 bp, Artificial Sequence
  Synthetic Oligonucleotide
acaccaacactctgtatacgctggactacccgcgtttcaa

SEQ ID NO: 424 - DNA, 40 bp, Artificial Sequence
  Synthetic Oligonucleotide
aaaccggggcccgtctcaagctagctacctccattgtctg

SEQ ID NO: 425 - DNA, 40 bp, Artificial Sequence
  Synthetic Oligonucleotide
aaaccggggcccgctcaagctagctacctccattgtcctg

SEQ ID NO: 426 - DNA, 40 bp, Artificial Sequence
  Synthetic Oligonucleotide
aaaccggggcccgccttaagctagctacctccattgtctg

SEQ ID NO: 427 - DNA, 40 bp, Artificial Sequence
  Synthetic Oligonucleotide
aaaccggggcccgcctcaagctagctacctccatagtctg

SEQ ID NO: 428 - DNA, 40 bp, Artificial Sequence
  Synthetic Oligonucleotide
aaaccggggcccgcctacagctagctacctccattgtctg

SEQ ID NO: 429 - DNA, 40 bp, Artificial Sequence
  Synthetic Oligonucleotide
ttccggaacgcctcgatcctcgcataatatgatacgtctg

SEQ ID NO: 430 - DNA, 40 bp, Artificial Sequence
  Synthetic Oligonucleotide
tgcgaaacgctattttctgggaagccgcacctcgagcgaa

SEQ ID NO: 431 - DNA, 40 bp, Artificial Sequence
  Synthetic Oligonucleotide
tcgcacagctcacctcgtctttgatcgaccacgctcataa

SEQ ID NO: 432 - DNA, 40 bp, Artificial Sequence
  Synthetic Oligonucleotide
tatggggcttttaagcacttctcggtaacttgggcattac

SEQ ID NO: 433 - DNA, 40 bp, Artificial Sequence
  Synthetic Oligonucleotide
tatgggctttaagcacttctcggtaacttgggcagcttac

SEQ ID NO: 434 - DNA, 40 bp, Artificial Sequence
  Synthetic Oligonucleotide
tatgggcctttaagcacttctcggtaacttgggcagttac

SEQ ID NO: 435 - DNA, 40 bp, Artificial Sequence
  Synthetic Oligonucleotide
taccgcctcatcatcggacacgacgtgtatcagttggccg

SEQ ID NO: 436 - DNA, 40 bp, Artificial Sequence
  Synthetic Oligonucleotide
gtccggaacgcctcgatcctcgcataatatgatacgtccg

SEQ ID NO: 437 - DNA, 40 bp, Artificial Sequence
  Synthetic Oligonucleotide
gtccatggtacgcctcgattccgcccttacatgcatgtaa

SEQ ID NO: 438 - DNA, 40 bp, Artificial Sequence
  Synthetic Oligonucleotide
gtccatggtacgcctcaattccgcccatacatgcatgtaa

SEQ ID NO: 439 - DNA, 40 bp, Artificial Sequence
  Synthetic Oligonucleotide
gctaggctttcgcgcacgcggattgtacccgaactgggtt

SEQ ID NO: 440 - DNA, 40 bp, Artificial Sequence
  Synthetic Oligonucleotide
gcagaataaattcctcccactgctcgcctcgcatgctata

SEQ ID NO: 441 - DNA, 40 bp, Artificial Sequence
  Synthetic Oligonucleotide
gatcacgctgccctttgtttaaggccttaatacaaacgca

SEQ ID NO: 442 - DNA, 40 bp, Artificial Sequence
  Synthetic Oligonucleotide
ctcttatccggcagaacgtctttcgtgcactatcacgatt

SEQ ID NO: 443 - DNA, 40 bp, Artificial Sequence
  Synthetic Oligonucleotide
ccgcctcgaacactgacgtcgtggaacctccgattgctag

SEQ ID NO: 444 - DNA, 40 bp, Artificial Sequence
  Synthetic Oligonucleotide
cactgtccgtttgtccgtcctcttgtggtattgcgcatgc

SEQ ID NO: 445 - DNA, 40 bp, Artificial Sequence
  Synthetic Oligonucleotide
cactatccgttcgtccgtcctcttgtggtattgcgcatgc

SEQ ID NO: 446 - DNA, 40 bp, Artificial Sequence
  Synthetic Oligonucleotide
cactatccgcttgtccgtcctctcgtggtattgcgcatgc

SEQ ID NO: 447 - DNA, 40 bp, Artificial Sequence
  Synthetic Oligonucleotide
cactatccgcatcgacgcgttagtcttgctgtcatgcagc

SEQ ID NO: 448 - DNA, 40 bp, Artificial Sequence
  Synthetic Oligonucleotide
atggtccatgagcttctggcatctatccagttgacgctca

SEQ ID NO: 449 - DNA, 40 bp, Artificial Sequence
  Synthetic Oligonucleotide
atcggtccatgagcttctggcactatccagttgacgctca

SEQ ID NO: 450 - DNA, 40 bp, Artificial Sequence
  Synthetic Oligonucleotide
accgcatgggtcggttttggtgggggactacccccttgta

SEQ ID NO: 451 - DNA, 40 bp, Artificial Sequence
  Synthetic Oligonucleotide
aatcacgctgccctttgtttaaggcctttatacaaacgca

SEQ ID NO: 452 - DNA, 40 bp, Artificial Sequence
  Synthetic Oligonucleotide
ttattcctgatgatccgaattctcatcggctggcactatc

SEQ ID NO: 453 - DNA, 40 bp, Artificial Sequence
  Synthetic Oligonucleotide
tgcgaaacgctattttctgggaagccacatctcgagcgaa

SEQ ID NO: 454 - DNA, 40 bp, Artificial Sequence
  Synthetic Oligonucleotide
tgccgcctcatcatcggacacgacgtgtatcagttggctg

SEQ ID NO: 455 - DNA, 40 bp, Artificial Sequence
  Synthetic Oligonucleotide
tcgcgcagctcacttcgtctttgatcgaccacgctcataa

SEQ ID NO: 456 - DNA, 40 bp, Artificial Sequence
  Synthetic Oligonucleotide
tcagctgctcctgcctgaaatcgtgttccctaacgttaag

SEQ ID NO: 457 - DNA, 40 bp, Artificial Sequence
  Synthetic Oligonucleotide
tattcgccagtcacgtcaactatgatgacgcttgactgga

SEQ ID NO: 458 - DNA, 40 bp, Artificial Sequence
  Synthetic Oligonucleotide
tattcgccagtcacatcaactatggtgacgcttgactgga

SEQ ID NO: 459 - DNA, 40 bp, Artificial Sequence
  Synthetic Oligonucleotide
tattcgccagtcacatcaactatgacgacgcttgactgga

SEQ ID NO: 460 - DNA, 40 bp, Artificial Sequence
  Synthetic Oligonucleotide
tattcgccagccacatcaaccatgatgacgcttgactgga

SEQ ID NO: 461 - DNA, 40 bp, Artificial Sequence
  Synthetic Oligonucleotide
tatggggcttttaagcattctcggtaacttgggcagttac

SEQ ID NO: 462 - DNA, 40 bp, Artificial Sequence
  Synthetic Oligonucleotide
tatggggcttttaagcacttctcggtaattgggcagttac

SEQ ID NO: 463 - DNA, 40 bp, Artificial Sequence
  Synthetic Oligonucleotide
tatggggcttctagcacttctcggtaacttgggcagttac

SEQ ID NO: 464 - DNA, 40 bp, Artificial Sequence
  Synthetic Oligonucleotide
tatgggctttaagcacttctcggtaaccttgggcagttac

SEQ ID NO: 465 - DNA, 40 bp, Artificial Sequence
  Synthetic Oligonucleotide
tatgggctttaaagcactttctgggataccgtggcagtac

SEQ ID NO: 466 - DNA, 40 bp, Artificial Sequence
  Synthetic Oligonucleotide
tatcgcctcatcatcggacacgacgtgtatcagttggctg

SEQ ID NO: 467 - DNA, 40 bp, Artificial Sequence
  Synthetic Oligonucleotide
tataagcctgtcttttaatctcggcagagtgctcatgggc

SEQ ID NO: 468 - DNA, 40 bp, Artificial Sequence
  Synthetic Oligonucleotide
tagcgggttttaagcacttctcggtaacttgggcagttac

SEQ ID NO: 469 - DNA, 40 bp, Artificial Sequence
  Synthetic Oligonucleotide
tacgggcttttaagcacttctcggtaacttgggcagttac

SEQ ID NO: 470 - DNA, 40 bp, Artificial Sequence
  Synthetic Oligonucleotide
taccgcctcatcatcggacacgacgtgtatcagttggcta

SEQ ID NO: 471 - DNA, 40 bp, Artificial Sequence
  Synthetic Oligonucleotide
taccgcctcatcatcgaacacgacgtgtatcagttggctg

SEQ ID NO: 472 - DNA, 40 bp, Artificial Sequence
  Synthetic Oligonucleotide
tacagaggccctcgtgttggactaccaacttgtagagcgg

SEQ ID NO: 473 - DNA, 40 bp, Artificial Sequence
  Synthetic Oligonucleotide
gttctcgcctctgtcctcatggttcgaaccggcatgcatg

SEQ ID NO: 474 - DNA, 40 bp, Artificial Sequence
  Synthetic Oligonucleotide
gttctcgcctctgtcctcatggttcgaaccagtatgcatg

SEQ ID NO: 475 - DNA, 40 bp, Artificial Sequence
  Synthetic Oligonucleotide
gttctcgcctcagtcctcatggttcgaaccggtatgcatg

SEQ ID NO: 476 - DNA, 40 bp, Artificial Sequence
  Synthetic Oligonucleotide
gtcgaatcgcctcgactctcgacataatatgatacgtctg

SEQ ID NO: 477 - DNA, 40 bp, Artificial Sequence
  Synthetic Oligonucleotide
gtccggaacgcctcgatcctcgcataatatgataagtctg

SEQ ID NO: 478 - DNA, 40 bp, Artificial Sequence
  Synthetic Oligonucleotide
gtccggaacgcctcgatcctcgcataaaatgatacgtctg

SEQ ID NO: 479 - DNA, 40 bp, Artificial Sequence
  Synthetic Oligonucleotide
gtccggaacacctcgatcctcgcataatatgatacgtctg

SEQ ID NO: 480 - DNA, 40 bp, Artificial Sequence
  Synthetic Oligonucleotide
gtccatggtacgcctcgattccgcccatacatacatgtaa

SEQ ID NO: 481 - DNA, 40 bp, Artificial Sequence
  Synthetic Oligonucleotide
ggcctcgattcctcaggtctcgtgatccatgcaattgcat

SEQ ID NO: 482 - DNA, 40 bp, Artificial Sequence
  Synthetic Oligonucleotide
gctaccttcgtctagcggcgctctgtggtaagattctact

SEQ ID NO: 483 - DNA, 40 bp, Artificial Sequence
  Synthetic Oligonucleotide
gcatcctcatgacggtctgttgatggctacatcattgttc

SEQ ID NO: 484 - DNA, 40 bp, Artificial Sequence
  Synthetic Oligonucleotide
gagatctcggatctggcgcactacttggacaggttccttc

SEQ ID NO: 485 - DNA, 40 bp, Artificial Sequence
  Synthetic Oligonucleotide
ctgtagtgattcctaaaggctcctagtggctgggactacc

SEQ ID NO: 486 - DNA, 40 bp, Artificial Sequence
  Synthetic Oligonucleotide
ctcttatccggcaggacgtctttcgtgcaccatcacgatt

SEQ ID NO: 487 - DNA, 40 bp, Artificial Sequence
  Synthetic Oligonucleotide
ctcttatccggcaggacgtctctcgtgcactatcacgatt

SEQ ID NO: 488 - DNA, 40 bp, Artificial Sequence
  Synthetic Oligonucleotide
cggcgaccgtccatcgagcggtatcgtgtgtcgcgtatga

SEQ ID NO: 489 - DNA, 40 bp, Artificial Sequence
  Synthetic Oligonucleotide
cgctatccgtatcgagcggtcggtccgtgccctaaaccca

SEQ ID NO: 490 - DNA, 40 bp, Artificial Sequence
  Synthetic Oligonucleotide
ccggcctcaggttcccctaacgcgttagccttccggaatg

SEQ ID NO: 491 - DNA, 40 bp, Artificial Sequence
  Synthetic Oligonucleotide
ccgcctcagtcctggtggtaccacaacgcattgctctttt

SEQ ID NO: 492 - DNA, 40 bp, Artificial Sequence
  Synthetic Oligonucleotide
ccctctatagtcgtcggcgtagcacgctattgctttgaag

SEQ ID NO: 493 - DNA, 40 bp, Artificial Sequence
  Synthetic Oligonucleotide
catctctcggacgtcatttctgcctcgttcctctcgtttg

SEQ ID NO: 494 - DNA, 40 bp, Artificial Sequence
  Synthetic Oligonucleotide
cactatccgtttgtccgtcctcttgtggtaatgcgcatgc

SEQ ID NO: 495 - DNA, 40 bp, Artificial Sequence
  Synthetic Oligonucleotide
cactatccgaaatcgagcgagaactctggtgttggcgcag

SEQ ID NO: 496 - DNA, 40 bp, Artificial Sequence
  Synthetic Oligonucleotide
caaccggggcccgcctcaagctagctacctccattgtctg

SEQ ID NO: 497 - DNA, 40 bp, Artificial Sequence
  Synthetic Oligonucleotide
attgattcttattggtggcacactattgccttgaacttta

SEQ ID NO: 498 - DNA, 40 bp, Artificial Sequence
  Synthetic Oligonucleotide
attctaggtgacgccttggttctaccgcaaacgtttgctg

SEQ ID NO: 499 - DNA, 40 bp, Artificial Sequence
  Synthetic Oligonucleotide
attaactccagcgacttcggtggtgtcctctccattacca

SEQ ID NO: 500 - DNA, 40 bp, Artificial Sequence
  Synthetic Oligonucleotide
atgtccatgacgcttctggcatctatccagttgacgctca

SEQ ID NO: 501 - skipped

SEQ ID NO: 502 - DNA, 40 bp, Artificial Sequence
  Synthetic Oligonucleotide
atccgttctcgtataattcaggatggcttattatctagct

SEQ ID NO: 503 - DNA, 40 bp, Artificial Sequence
  Synthetic Oligonucleotide
acggtttcttctcctgactacatgagattaataaacgcgc

SEQ ID NO: 504 - DNA, 40 bp, Artificial Sequence
  Synthetic Oligonucleotide
acgattcttcctcagcctccgcggtgcaggatttgcacgt

SEQ ID NO: 505 - DNA, 40 bp, Artificial Sequence
  Synthetic Oligonucleotide
acactattccggtaagtcatcgttcaaccgtttgttgcaa

SEQ ID NO: 506 - DNA, 40 bp, Artificial Sequence
  Synthetic Oligonucleotide
aatgggcttttaagcacttctcggtaacttgggcagttac

SEQ ID NO: 507 - DNA, 40 bp, Artificial Sequence
  Synthetic Oligonucleotide
aatcacagtaattccgcccctctgatgaaaccggttactt

SEQ ID NO: 508 - DNA, 40 bp, Artificial Sequence
  Synthetic Oligonucleotide
aaacctgggcccgcctcaagctagctacctccattgtctg

SEQ ID NO: 509 - DNA, 40 bp, Artificial Sequence
  Synthetic Oligonucleotide
aaaccgggcccggcctcaagctagctacctccattgtctg

SEQ ID NO: 510 - DNA, 40 bp, Artificial Sequence
  Synthetic Oligonucleotide
aaaccgggcccgcctcaacgctagctacctccattgtctg

SEQ ID NO: 511 - DNA, 40 bp, Artificial Sequence
  Synthetic Oligonucleotide
aaacccgggcccgcctcaagctagctacctccattgtctg

SEQ ID NO: 512 - DNA, 40 bp, Artificial Sequence
  Synthetic Oligonucleotide
tcgcacggctcacttcgtctttgatcgaccacgctcataa

SEQ ID NO: 513 - DNA, 40 bp, Artificial Sequence
  Synthetic Oligonucleotide
tcgcacagctcacttcgtctttgatcggccacgctcataa

SEQ ID NO: 514 - DNA, 40 bp, Artificial Sequence
  Synthetic Oligonucleotide
tcgcacagctcacttcgtctttgatcgaccacgctcatag

SEQ ID NO: 515 - DNA, 40 bp, Artificial Sequence
  Synthetic Oligonucleotide
tcgcacagcccacttcgtctttgatcgaccacgctcataa

SEQ ID NO: 516 - DNA, 40 bp, Artificial Sequence
  Synthetic Oligonucleotide
tccgaatgcatgcggactgcctcataagtgcacaatctac

SEQ ID NO: 517 - DNA, 40 bp, Artificial Sequence
  Synthetic Oligonucleotide
tattcgccagtcacatcaactatgatgacgcttgaccgga

SEQ ID NO: 518 - DNA, 40 bp, Artificial Sequence
  Synthetic Oligonucleotide
tatggggctttgagcacttctcggtaacttgggcagttac

SEQ ID NO: 519 - DNA, 40 bp, Artificial Sequence
  Synthetic Oligonucleotide
tatgggcgtttaagcacttctcggtaacttgggcagttac

SEQ ID NO: 520 - DNA, 40 bp, Artificial Sequence
  Synthetic Oligonucleotide
tataggcctgtcttttaatctcggcagagtgctcatgagc

SEQ ID NO: 521 - DNA, 40 bp, Artificial Sequence
  Synthetic Oligonucleotide
tagggcgttttaagcacttctcggtaacttgggcagttac

SEQ ID NO: 522 - DNA, 40 bp, Artificial Sequence
  Synthetic Oligonucleotide
taccgcctcatcatcggacacgacgtgtaccagttggctg

SEQ ID NO: 523 - DNA, 40 bp, Artificial Sequence
  Synthetic Oligonucleotide
taccgccccatcatcggacacgacgtgtatcagttggctg

SEQ ID NO: 524 - DNA, 40 bp, Artificial Sequence
  Synthetic Oligonucleotide
tacaagcctgtcttttaatctcggcagagtgctcatgagc

SEQ ID NO: 525 - DNA, 40 bp, Artificial Sequence
  Synthetic Oligonucleotide
taaattgggccctgattacgcctcggtccttgcattaccg

SEQ ID NO: 526 - DNA, 40 bp, Artificial Sequence
  Synthetic Oligonucleotide
gtgagaagcgtgtgagagactactctgtttgtaacgcaat

SEQ ID NO: 527 - DNA, 40 bp, Artificial Sequence
  Synthetic Oligonucleotide
gtccggaacgcttcgatcctcgcataatatgatacgtctg

SEQ ID NO: 528 - DNA, 40 bp, Artificial Sequence
  Synthetic Oligonucleotide
gtccggaacgcctcgatcctcgcatatatcgatacgtctg

SEQ ID NO: 529 - DNA, 40 bp, Artificial Sequence
  Synthetic Oligonucleotide
gtccggaacgcctcgatcctcgcataatatgatacgtcgg

SEQ ID NO: 530 - DNA, 40 bp, Artificial Sequence
  Synthetic Oligonucleotide
gtccggaacgcctcgaccctcgcataatatgatacgtctg

SEQ ID NO: 531 - DNA, 40 bp, Artificial Sequence
  Synthetic Oligonucleotide
gtccggaacgcctcaatcctcgcataatatgatacgtctg

SEQ ID NO: 532 - DNA, 40 bp, Artificial Sequence
  Synthetic Oligonucleotide
gtccacggtacgcctcgattccgcccatacatgcatgtaa

SEQ ID NO: 533 - DNA, 40 bp, Artificial Sequence
  Synthetic Oligonucleotide
gtatctttatcccgcccctctgcatggtgggcctacatcg

SEQ ID NO: 534 - DNA, 40 bp, Artificial Sequence
  Synthetic Oligonucleotide
gctaggctttcacgcacgcggattgtacccgagctgggtt

SEQ ID NO: 535 - DNA, 40 bp, Artificial Sequence
  Synthetic Oligonucleotide
gcggttccttctcctgactacatgagattaataaacgcgc

SEQ ID NO: 536 - DNA, 40 bp, Artificial Sequence
  Synthetic Oligonucleotide
gatcacgcttgcccttgtttaaggcctttatacaaacgca

SEQ ID NO: 537 - DNA, 40 bp, Artificial Sequence
  Synthetic Oligonucleotide
gactacctgcatcgagcggacgaagacgagagatgctcgt

SEQ ID NO: 538 - DNA, 40 bp, Artificial Sequence
  Synthetic Oligonucleotide
ctgactacaccctgcaaatcgccgttccccctgattctcg

SEQ ID NO: 539 - DNA, 40 bp, Artificial Sequence
  Synthetic Oligonucleotide
ctcttatccggtaggacgtctttcgtgcactatcacgatt

SEQ ID NO: 540 - DNA, 40 bp, Artificial Sequence
  Synthetic Oligonucleotide
ctcttatccggcaggacgtcttttgtgcactatcacgatt

SEQ ID NO: 541 - DNA, 40 bp, Artificial Sequence
  Synthetic Oligonucleotide
ctcttatccggcaggacgtctttcgtgcactatcacgact

SEQ ID NO: 542 - DNA, 40 bp, Artificial Sequence
  Synthetic Oligonucleotide
ctccccgacgggattgagcgtatggtggactaccacctct

SEQ ID NO: 543 - DNA, 40 bp, Artificial Sequence
  Synthetic Oligonucleotide
cgctctggctccgaatccacgttcggttctcacatcgccg

SEQ ID NO: 544 - DNA, 40 bp, Artificial Sequence
  Synthetic Oligonucleotide
cgctatccgtttgtccgtcctctcgtggtattgcgcatgc

SEQ ID NO: 545 - DNA, 40 bp, Artificial Sequence
  Synthetic Oligonucleotide
ccgcctctgtttacccgtggaacgttcctttaaccggtta

SEQ ID NO: 546 - DNA, 40 bp, Artificial Sequence
  Synthetic Oligonucleotide
ccgcctcgagtcatcccatggcccgggcataacggaacta

SEQ ID NO: 547 - DNA, 40 bp, Artificial Sequence
  Synthetic Oligonucleotide
cactatccgtttgtccgtcctcttgtggtattgcacatgc

SEQ ID NO: 548 - DNA, 40 bp, Artificial Sequence
  Synthetic Oligonucleotide
cactatccgtttgtccgtcctcttgaggtattgcgcatgc

SEQ ID NO: 549 - DNA, 40 bp, Artificial Sequence
  Synthetic Oligonucleotide
cactatccgtttgtccgtcctctcatggtattgcgcatgc

SEQ ID NO: 550 - DNA, 40 bp, Artificial Sequence
  Synthetic Oligonucleotide
cactatccgtttgtccgtcctctagtggtattgcgcatgc

SEQ ID NO: 551 - DNA, 40 bp, Artificial Sequence
  Synthetic Oligonucleotide
atgtgccattgagcttctggcactatccagttgacgctca

SEQ ID NO: 552 - DNA, 40 bp, Artificial Sequence
  Synthetic Oligonucleotide
atgtccatgagcttctggacactatccagttgacgctcga

SEQ ID NO: 553 - DNA, 40 bp, Artificial Sequence
  Synthetic Oligonucleotide
atgtccatgagctctggacactatccagttgacgtctcga

SEQ ID NO: 554 - DNA, 40 bp, Artificial Sequence
  Synthetic Oligonucleotide
atggtccatgagcttctggcactatccagtttgacgctca

SEQ ID NO: 555 - DNA, 40 bp, Artificial Sequence
  Synthetic Oligonucleotide
atggtccatgagccttctggcactatccagttgacgctca

SEQ ID NO: 556 - DNA, 40 bp, Artificial Sequence
  Synthetic Oligonucleotide
agcggccgattcgccttgatcctactgagctcatgttatg

SEQ ID NO: 557 - DNA, 40 bp, Artificial Sequence
  Synthetic Oligonucleotide
acctgcttgtgtgcgacacatgtctacgactcctcttcag

SEQ ID NO: 558 - DNA, 40 bp, Artificial Sequence
  Synthetic Oligonucleotide
acccgctgagcatgggcaatgctcaccttggactcctcct

SEQ ID NO: 559 - DNA, 40 bp, Artificial Sequence
  Synthetic Oligonucleotide
aatggggctttaagcacttctcggtaacttgggcagttac

SEQ ID NO: 560 - DNA, 40 bp, Artificial Sequence
  Synthetic Oligonucleotide
aatcacagtaattctgcccctctgatggaaccggttactt

SEQ ID NO: 561 - DNA, 40 bp, Artificial Sequence
  Synthetic Oligonucleotide
aaatcggggcccgcctcaagctagctacctccattgtctg

SEQ ID NO: 562 - DNA, 40 bp, Artificial Sequence
  Synthetic Oligonucleotide
aaaccggtgcccgcctcaagctagctacctccattgtctg

SEQ ID NO: 563 - DNA, 40 bp, Artificial Sequence
  Synthetic Oligonucleotide
aaaccggggcccgccttcaagctagctacctccattgctg

SEQ ID NO: 564 - DNA, 40 bp, Artificial Sequence
  Synthetic Oligonucleotide
aaaccggggcccgcctctagctagctacctccattgtctg

SEQ ID NO: 565 - DNA, 40 bp, Artificial Sequence
  Synthetic Oligonucleotide
aaaccggggcccgcctcaagttagctacctccattgtctg

SEQ ID NO: 566 - DNA, 40 bp, Artificial Sequence
  Synthetic Oligonucleotide
aaaccggggcccgcctcaagctagttacctccattgtctg

SEQ ID NO: 567 - DNA, 40 bp, Artificial Sequence
  Synthetic Oligonucleotide
aaaccggggcccgcctcaagctagatacctccattgtctg

SEQ ID NO: 568 - DNA, 40 bp, Artificial Sequence
  Synthetic Oligonucleotide
aaaccgggccgcctcaagtctagctaccgtccattgtctg

SEQ ID NO: 569 - DNA, 40 bp, Artificial Sequence
  Synthetic Oligonucleotide
ttggtgcgcaacaaccgcctttgcgccattaactagttaa

SEQ ID NO: 570 - DNA, 40 bp, Artificial Sequence
  Synthetic Oligonucleotide
tgcgaagcgctattttctgggaagccgcatctcgagcgaa

SEQ ID NO: 571 - DNA, 40 bp, Artificial Sequence
  Synthetic Oligonucleotide
tgcgaaacgctattttctgggaagccgcatctcgggcgaa

SEQ ID NO: 572 - DNA, 40 bp, Artificial Sequence
  Synthetic Oligonucleotide
tcttccatctggtcgcgatacagaatacgattaacataag

SEQ ID NO: 573 - DNA, 40 bp, Artificial Sequence
  Synthetic Oligonucleotide
tccggaacgcctatttcttcccacggtgcacctatgttgt

SEQ ID NO: 574 - DNA, 40 bp, Artificial Sequence
  Synthetic Oligonucleotide
tccctctgcattgtctcgtggactaccacgacaccacaag

SEQ ID NO: 575 - DNA, 40 bp, Artificial Sequence
  Synthetic Oligonucleotide
tattcgccagtcacatcaaccatgatgacgcttgactgga

SEQ ID NO: 576 - DNA, 40 bp, Artificial Sequence
  Synthetic Oligonucleotide
tattcgccagtcacaccaactatgatgacgcttgactgga

SEQ ID NO: 577 - DNA, 40 bp, Artificial Sequence
  Synthetic Oligonucleotide
tattcgccagccacatcaactatgatgacacttgactgga

SEQ ID NO: 578 - DNA, 40 bp, Artificial Sequence
  Synthetic Oligonucleotide
tatggggctttaagcacttctcggtaacttgggcggttac

SEQ ID NO: 579 - DNA, 40 bp, Artificial Sequence
  Synthetic Oligonucleotide
tataagcctgtcttttaatctcggcagggtgctcatgagc

SEQ ID NO: 580 - DNA, 40 bp, Artificial Sequence
  Synthetic Oligonucleotide
tagggtacgatgaagagacccaatcgcccctctgtgcgcg

SEQ ID NO: 581 - DNA, 40 bp, Artificial Sequence
  Synthetic Oligonucleotide
taccgcctcatcgtcggacacgacgtgtatcagttggctg

SEQ ID NO: 582 - DNA, 40 bp, Artificial Sequence
  Synthetic Oligonucleotide
taccgcctcatcatcggacacgacgtgcatcagttggctg

SEQ ID NO: 583 - DNA, 40 bp, Artificial Sequence
  Synthetic Oligonucleotide
gttctcgcctctgtccttatggttcgaaccggtatgcatg

SEQ ID NO: 584 - DNA, 40 bp, Artificial Sequence
  Synthetic Oligonucleotide
gttctcgcctctgtcctcatggttcgaaccggtatgcgtg

SEQ ID NO: 585 - DNA, 40 bp, Artificial Sequence
  Synthetic Oligonucleotide
gttctcgcctctgtcctcacggttcgaaccggtatgcatg

SEQ ID NO: 586 - DNA, 40 bp, Artificial Sequence
  Synthetic Oligonucleotide
gttctcgcctctgtccccatggttcgaaccggtatgcatg

SEQ ID NO: 587 - DNA, 40 bp, Artificial Sequence
  Synthetic Oligonucleotide
gtccggaatgcctcgatcctcgcataatatgatacgtctg

SEQ ID NO: 588 - DNA, 40 bp, Artificial Sequence
  Synthetic Oligonucleotide
gtccggaacgcctcggtcctcgcataatatgatacgtctg

SEQ ID NO: 589 - DNA, 40 bp, Artificial Sequence
  Synthetic Oligonucleotide
gtccggaacgcctcgatcctcgcatcatatgatacgtctg

SEQ ID NO: 590 - DNA, 40 bp, Artificial Sequence
  Synthetic Oligonucleotide
gtccggaacgcctcgatcctcgcataatatgatacgtcag

SEQ ID NO: 591 - DNA, 40 bp, Artificial Sequence
  Synthetic Oligonucleotide
gtccgaacgcctcgatcctcgacataatatgatacgtctg

SEQ ID NO: 592 - DNA, 40 bp, Artificial Sequence
  Synthetic Oligonucleotide
gtccatggtacgcctcgattccgcccctacatgcatgtaa

SEQ ID NO: 593 - DNA, 40 bp, Artificial Sequence
  Synthetic Oligonucleotide
gtccatggtacgcctcgattccgcccatacatgcacgtaa

SEQ ID NO: 594 - DNA, 40 bp, Artificial Sequence
  Synthetic Oligonucleotide
gtccatggtacacctcgattccgcccatacatgcatgtaa

SEQ ID NO: 595 - DNA, 40 bp, Artificial Sequence
  Synthetic Oligonucleotide
gtccatagtacgcctcgattccgcccatacatgcatgtaa

SEQ ID NO: 596 - DNA, 40 bp, Artificial Sequence
  Synthetic Oligonucleotide
gtccagaacgcctcgatcctcgcataatatgatacgtctg

SEQ ID NO: 597 - DNA, 40 bp, Artificial Sequence
  Synthetic Oligonucleotide
gtcaccgctgggtgaggagtcgttgtgcgctatcacatct

SEQ ID NO: 598 - DNA, 40 bp, Artificial Sequence
  Synthetic Oligonucleotide
gcttgtggcactattcacagacttagccttaatctgcggt

SEQ ID NO: 599 - DNA, 40 bp, Artificial Sequence
  Synthetic Oligonucleotide
gccgcctcagtcgctccaggaattccgtagatgctagcag

SEQ ID NO: 600 - DNA, 40 bp, Artificial Sequence
  Synthetic Oligonucleotide
gatctactcatcaggcgctatcctgaacaccgatagtacg

SEQ ID NO: 601 - DNA, 40 bp, Artificial Sequence
  Synthetic Oligonucleotide
gatcggagactactccgttggtctgcaggtgtcaccacga

SEQ ID NO: 602 - DNA, 40 bp, Artificial Sequence
  Synthetic Oligonucleotide
gatcacgctgccctttgtttaaggcccttatacaaacgca

SEQ ID NO: 603 - DNA, 40 bp, Artificial Sequence
  Synthetic Oligonucleotide
gactactcgcatcgagcaagtcttatgaggcctactactt

SEQ ID NO: 604 - DNA, 40 bp, Artificial Sequence
  Synthetic Oligonucleotide
ctgcttatccggcaggactctttcgtgcactatcacgatt

SEQ ID NO: 605 - DNA, 40 bp, Artificial Sequence
  Synthetic Oligonucleotide
ctcttatccggcaggacgtctttcgtgcactatcatgatt

SEQ ID NO: 606 - DNA, 40 bp, Artificial Sequence
  Synthetic Oligonucleotide
ctcttatccggcaggacgtctttcgtgcactatcacaatt

SEQ ID NO: 607 - DNA, 40 bp, Artificial Sequence
  Synthetic Oligonucleotide
cgctatccgtagatccgtcactcactacgcgtatggaatc

SEQ ID NO: 608 - DNA, 40 bp, Artificial Sequence
  Synthetic Oligonucleotide
cgcgccacctcggatctgaccgcaatatcatgatatgtca

SEQ ID NO: 609 - DNA, 40 bp, Artificial Sequence
  Synthetic Oligonucleotide
cctcgtatcctccggtaattaccacgtacgtacatgtctg

SEQ ID NO: 610 - DNA, 40 bp, Artificial Sequence
  Synthetic Oligonucleotide
ccgccttggtccccatcagctagctagatacacgtgtgaa

SEQ ID NO: 611 - DNA, 40 bp, Artificial Sequence
  Synthetic Oligonucleotide
ccgcctcttccggacatgtcctatcccttgcgtgcttctg

SEQ ID NO: 612 - DNA, 40 bp, Artificial Sequence
  Synthetic Oligonucleotide
ccgcctcaggttcccctaacgccgttagccttccggaatg

SEQ ID NO: 613 - DNA, 40 bp, Artificial Sequence
  Synthetic Oligonucleotide
cccgtagtccttctccaaacggagccgaaattcggtacta

SEQ ID NO: 614 - DNA, 40 bp, Artificial Sequence
  Synthetic Oligonucleotide
ccattgtgcgcttatgggagccgggtaccttccagcaagg

SEQ ID NO: 615 - DNA, 40 bp, Artificial Sequence
  Synthetic Oligonucleotide
cacttatccgttgtccgtcctcttgtggtattgcgcatgc

SEQ ID NO: 616 - DNA, 40 bp, Artificial Sequence
  Synthetic Oligonucleotide
cactccgtcagaagatcgttcgtggggcactatccccttc

SEQ ID NO: 617 - DNA, 40 bp, Artificial Sequence
  Synthetic Oligonucleotide
cactatccgtttgtccgtcctcttgtggtattgcgcatgt

SEQ ID NO: 618 - DNA, 40 bp, Artificial Sequence
  Synthetic Oligonucleotide
cactatccgtttgtccgtcctcttgtggtattgagcatgc

SEQ ID NO: 619 - DNA, 40 bp, Artificial Sequence
  Synthetic Oligonucleotide
cactatccgtttgtccgtcctcttgtggtattacgcatgc

SEQ ID NO: 620 - DNA, 40 bp, Artificial Sequence
  Synthetic Oligonucleotide
cactatccgtttgtccgtcctcttgtggtatcgcgcatgc

SEQ ID NO: 621 - DNA, 40 bp, Artificial Sequence
  Synthetic Oligonucleotide
cactatccgttgtccgtcctcttgtggtattgcgcatgtc

SEQ ID NO: 622 - DNA, 40 bp, Artificial Sequence
  Synthetic Oligonucleotide
cacgtgcttccaatatgcatctcggacattcctcctcccg

SEQ ID NO: 623 - DNA, 40 bp, Artificial Sequence
  Synthetic Oligonucleotide
caccgcctcatcatcggacacgacgtgtatcagttggctg

SEQ ID NO: 624 - DNA, 40 bp, Artificial Sequence
  Synthetic Oligonucleotide
atgtgtcatatatctgactacagattttgtcatggcacta

SEQ ID NO: 625 - DNA, 40 bp, Artificial Sequence
  Synthetic Oligonucleotide
atggtccatgagcttctggcactatcccagttgacgctca

SEQ ID NO: 626 - DNA, 40 bp, Artificial Sequence
  Synthetic Oligonucleotide
aattctagaacctgcctcaagccggcaatcacctcttctg

SEQ ID NO: 627 - DNA, 40 bp, Artificial Sequence
  Synthetic Oligonucleotide
aacgtactccatccgcctgggctcctcccagctacgactg

SEQ ID NO: 628 - DNA, 40 bp, Artificial Sequence
  Synthetic Oligonucleotide
aaaccgggggccgcctcaagctagctacctccattgtctg

SEQ ID NO: 629 - DNA, 40 bp, Artificial Sequence
  Synthetic Oligonucleotide
aaaccggggcccgcgtcaagctagctacctccattgtctg

SEQ ID NO: 630 - DNA, 40 bp, Artificial Sequence
  Synthetic Oligonucleotide
aaaccggggcccgccacaagctagctacctccattgtctg

SEQ ID NO: 631 - DNA, 40 bp, Artificial Sequence
  Synthetic Oligonucleotide
aaaccgggcccgcctcaagcctagctacctccattgtctg

SEQ ID NO: 632 - DNA, 40 bp, Artificial Sequence
  Synthetic Oligonucleotide
ttgctcctgcgttacgtctgtgatcgactaccttcataat

SEQ ID NO: 633 - DNA, 40 bp, Artificial Sequence
  Synthetic Oligonucleotide
ttcgcgtatagcctcggttcttccatgcagctgcatatta

SEQ ID NO: 634 - DNA, 40 bp, Artificial Sequence
  Synthetic Oligonucleotide
ttatccctgacgatccgaattctcatcggctggcactatc

SEQ ID NO: 635 - DNA, 40 bp, Artificial Sequence
  Synthetic Oligonucleotide
ttagggctttaagcacttctcggtaacttgggccagttac

SEQ ID NO: 636 - DNA, 40 bp, Artificial Sequence
  Synthetic Oligonucleotide
tgtggggctttaagcacttctcggtaacttgggcagttac

SEQ ID NO: 637 - DNA, 40 bp, Artificial Sequence
  Synthetic Oligonucleotide
tgcggaacgctattttctgggaagccgcatctcgagcgaa

SEQ ID NO: 638 - DNA, 40 bp, Artificial Sequence
  Synthetic Oligonucleotide
tgcgcaacgccttgattcactcctacagtgtgtctatagg

SEQ ID NO: 639 - DNA, 40 bp, Artificial Sequence
  Synthetic Oligonucleotide
tgcgaaacgctattttctggggagccgcatctcgagcgaa

SEQ ID NO: 640 - DNA, 40 bp, Artificial Sequence
  Synthetic Oligonucleotide
tgcgaaacgctattttctgggaggccgcatctcgagcgaa

SEQ ID NO: 641 - DNA, 40 bp, Artificial Sequence
  Synthetic Oligonucleotide
tgcgaaacgctattttctgggaagccgcgtcccgagcgaa

SEQ ID NO: 642 - DNA, 40 bp, Artificial Sequence
  Synthetic Oligonucleotide
tgcgaaacgctatttctgggaagcccgcatctcgagcgaa

SEQ ID NO: 643 - DNA, 40 bp, Artificial Sequence
  Synthetic Oligonucleotide
tgcgaaacgctatttcctgggaagccgcatctcgagcgaa

SEQ ID NO: 644 - DNA, 40 bp, Artificial Sequence
  Synthetic Oligonucleotide
tgccgcctccgatcctccattgggtggccataccattgta

SEQ ID NO: 645 - DNA, 40 bp, Artificial Sequence
  Synthetic Oligonucleotide
tcttgctagcggattcgtctcgatccccccatgcgctgta

SEQ ID NO: 646 - DNA, 40 bp, Artificial Sequence
  Synthetic Oligonucleotide
tcgcacagctcacttcgtctttgatcgactacgctcataa

SEQ ID NO: 647 - DNA, 40 bp, Artificial Sequence
  Synthetic Oligonucleotide
tcctccatctggtcgcgatacagaatacgattaacataaa

SEQ ID NO: 648 - DNA, 40 bp, Artificial Sequence
  Synthetic Oligonucleotide
tcattgattgaccgcccctctgatcgccaaccggttacga

SEQ ID NO: 649 - DNA, 40 bp, Artificial Sequence
  Synthetic Oligonucleotide
tattcgccagtcgcatcaactatgatgacgcttgactgga

SEQ ID NO: 650 - DNA, 40 bp, Artificial Sequence
  Synthetic Oligonucleotide
tattcgccagtcacatcagctatgatgacgcttgactgga

SEQ ID NO: 651 - DNA, 40 bp, Artificial Sequence
  Synthetic Oligonucleotide
tattcgccagtcacatcaactatgatgacgcctgactgga

SEQ ID NO: 652 - DNA, 40 bp, Artificial Sequence
  Synthetic Oligonucleotide
tattcgccagtcacatcaactacgatgacgcttgactgga

SEQ ID NO: 653 - DNA, 40 bp, Artificial Sequence
  Synthetic Oligonucleotide
tattcgccagccacatcgactatgatgacgcttgactgga

SEQ ID NO: 654 - DNA, 40 bp, Artificial Sequence
  Synthetic Oligonucleotide
tattcgccagccacatcagctatgatgacgcttgactgga

SEQ ID NO: 655 - DNA, 40 bp, Artificial Sequence
  Synthetic Oligonucleotide
tatgggctttaaagcactttctcggtaacttggcagttac

SEQ ID NO: 656 - DNA, 40 bp, Artificial Sequence
  Synthetic Oligonucleotide
tacggggctttaagcacttctcggtaacttgggcagttac

SEQ ID NO: 657 - DNA, 40 bp, Artificial Sequence
  Synthetic Oligonucleotide
taccgcctcgtcatcggacacgacgtgtatcagttggctg

SEQ ID NO: 658 - DNA, 40 bp, Artificial Sequence
  Synthetic Oligonucleotide
taccgcctcatcatcggacacgacgtgtattagttggctg

SEQ ID NO: 659 - DNA, 40 bp, Artificial Sequence
  Synthetic Oligonucleotide
taccgcctcatcatcggacacgacgtgtatcgatgtgctg

SEQ ID NO: 660 - DNA, 40 bp, Artificial Sequence
  Synthetic Oligonucleotide
taccgcctcatcatcggacacgacgtgtatcagttgactg

SEQ ID NO: 661 - DNA, 40 bp, Artificial Sequence
  Synthetic Oligonucleotide
taccgcctcatcatcggacacgacgtgtatcagtcggctg

SEQ ID NO: 662 - DNA, 40 bp, Artificial Sequence
  Synthetic Oligonucleotide
taccgcctcatcatcggacacgacgtgtatcagctggctg

SEQ ID NO: 663 - DNA, 40 bp, Artificial Sequence
  Synthetic Oligonucleotide
gttctcgcctctgtcctcatggttcgagccggtatgcatg

SEQ ID NO: 664 - DNA, 40 bp, Artificial Sequence
  Synthetic Oligonucleotide
gtgtaatcgattcgctgcgcctcggtccaaccatgcgttg

SEQ ID NO: 665 - DNA, 40 bp, Artificial Sequence
  Synthetic Oligonucleotide
gtccgtggtacgcctcgattccgcccatacatgcatgtaa

SEQ ID NO: 666 - DNA, 40 bp, Artificial Sequence
  Synthetic Oligonucleotide
ggcccgttgtgggttgatttgcgcgtactagtgccatcga

SEQ ID NO: 667 - DNA, 40 bp, Artificial Sequence
  Synthetic Oligonucleotide
gctaggctttcacgcacgcggattgtacccgaactgggta

SEQ ID NO: 668 - DNA, 40 bp, Artificial Sequence
  Synthetic Oligonucleotide
gctaggctttcacgcacgcggatcgtacccgaactgggtt

SEQ ID NO: 669 - DNA, 40 bp, Artificial Sequence
  Synthetic Oligonucleotide
gctaggctttcacgcacacggattgtacccgaactgggtt

SEQ ID NO: 670 - DNA, 40 bp, Artificial Sequence
  Synthetic Oligonucleotide
gatcacgctgccctttgtttaaggcctttgtacaaacgca

SEQ ID NO: 671 - DNA, 40 bp, Artificial Sequence
  Synthetic Oligonucleotide
gatcacgctgccctttgtttaaggcctttatacaagcgca

SEQ ID NO: 672 - DNA, 40 bp, Artificial Sequence
  Synthetic Oligonucleotide
gatcacgctgccctttgcttaaggcctttatacaaacgca

SEQ ID NO: 673 - DNA, 40 bp, Artificial Sequence
  Synthetic Oligonucleotide
gatcacgctgccctctgtttaaggcctttatacaaacgca

SEQ ID NO: 674 - DNA, 40 bp, Artificial Sequence
  Synthetic Oligonucleotide
gaccatggtacgcctcgattccgcccatacatgcatgtaa

SEQ ID NO: 675 - DNA, 40 bp, Artificial Sequence
  Synthetic Oligonucleotide
cttggacgtccaactgttgcctcgactcctccatcggata

SEQ ID NO: 676 - DNA, 40 bp, Artificial Sequence
  Synthetic Oligonucleotide
ctcttattcggcaggacgtctttcgtgcactatcacgatt

SEQ ID NO: 677 - DNA, 40 bp, Artificial Sequence
  Synthetic Oligonucleotide
ctcttatccggcaggacgtctttcgtgcactgtcacgatt

SEQ ID NO: 678 - DNA, 40 bp, Artificial Sequence
  Synthetic Oligonucleotide
ctcttatccggcaggacgtctttcgtgcactatcacgata

SEQ ID NO: 679 - DNA, 40 bp, Artificial Sequence
  Synthetic Oligonucleotide
ctcttatccggcaggacgactttcgtgcactatcacgatt

SEQ ID NO: 680 - DNA, 40 bp, Artificial Sequence
  Synthetic Oligonucleotide
ctcttatcccgcaggacgtctttcgtgcactatcacgatt

SEQ ID NO: 681 - DNA, 40 bp, Artificial Sequence
  Synthetic Oligonucleotide
ctcttatcaggcaggacgtctttcgtgcactatcacgatt

SEQ ID NO: 682 - DNA, 40 bp, Artificial Sequence
  Synthetic Oligonucleotide
ctccaccgtgcaagtcatttacgcagactactgcgacgct

SEQ ID NO: 683 - DNA, 40 bp, Artificial Sequence
  Synthetic Oligonucleotide
ctcatatccggcaggacgtctttcgtgcactatcacgatt

SEQ ID NO: 684 - DNA, 40 bp, Artificial Sequence
  Synthetic Oligonucleotide
ctacgaactagtggtctttgtgcgtttaagacccgtcgat

SEQ ID NO: 685 - DNA, 40 bp, Artificial Sequence
  Synthetic Oligonucleotide
cgctcttcgctcccacagatctgtattttggctgtctaga

SEQ ID NO: 686 - DNA, 40 bp, Artificial Sequence
  Synthetic Oligonucleotide
cgctatccgccatcgagcgagcagtgtgccgttttcggtg

SEQ ID NO: 687 - DNA, 40 bp, Artificial Sequence
  Synthetic Oligonucleotide
cgcgaaacgctattttctgggaagccgcatctcgagcgaa

SEQ ID NO: 688 - DNA, 40 bp, Artificial Sequence
  Synthetic Oligonucleotide
cgccgcctcagtttatcccgaactaaggttgtatacgaca

SEQ ID NO: 689 - DNA, 40 bp, Artificial Sequence
  Synthetic Oligonucleotide
cctgctattagccactatgctatttcatacagtgccgtac

SEQ ID NO: 690 - DNA, 40 bp, Artificial Sequence
  Synthetic Oligonucleotide
cctcggatacccacccatgggcatgctagcatggcaatta

SEQ ID NO: 691 - DNA, 40 bp, Artificial Sequence
  Synthetic Oligonucleotide
ccgtgatcgtgaggacttgattggctacaatctcgacgtc

SEQ ID NO: 692 - DNA, 40 bp, Artificial Sequence
  Synthetic Oligonucleotide
ccgtacttgtcgcacctcgtacttggcggctgacgctatt

SEQ ID NO: 693 - DNA, 40 bp, Artificial Sequence
  Synthetic Oligonucleotide
ccgcctcgatcgggatacatgtacactctcttaacgcgtt

SEQ ID NO: 694 - DNA, 40 bp, Artificial Sequence
  Synthetic Oligonucleotide
ccgcaccccgatagtcatcttcactgggccacccgtgtta

SEQ ID NO: 695 - DNA, 40 bp, Artificial Sequence
  Synthetic Oligonucleotide
ccctcttcgtcacacgtcggggactaccccgaaagaagtg

SEQ ID NO: 696 - DNA, 40 bp, Artificial Sequence
  Synthetic Oligonucleotide
ccactaaaggtacctagtccccgtgtcgcctcccagtctg

SEQ ID NO: 697 - DNA, 40 bp, Artificial Sequence
  Synthetic Oligonucleotide
cagtcaatgttcatcgagcgagttatattattgcataacg

SEQ ID NO: 698 - DNA, 40 bp, Artificial Sequence
  Synthetic Oligonucleotide
cactatcctcatcgatgctgagttattcgcctacgagggg

SEQ ID NO: 699 - DNA, 40 bp, Artificial Sequence
  Synthetic Oligonucleotide
cactatccgtttgttcgtcctcttgtggtattgcgcatgc

SEQ ID NO: 700 - DNA, 40 bp, Artificial Sequence
  Synthetic Oligonucleotide
cactatccgtttgtccgtcttcttgtggtattgcgcatgc

SEQ ID NO: 701 - DNA, 40 bp, Artificial Sequence
  Synthetic Oligonucleotide
cactatccgtttgtccgtcctcttgtggtattgcgtatgc

SEQ ID NO: 702 - DNA, 40 bp, Artificial Sequence
  Synthetic Oligonucleotide
cactatccgtttgtccgtcctcttgtgatattgcgcatgc

SEQ ID NO: 703 - DNA, 40 bp, Artificial Sequence
  Synthetic Oligonucleotide
cactatccgtttgtccgtccccttgtggtattgcgcatgc

SEQ ID NO: 704 - DNA, 40 bp, Artificial Sequence
  Synthetic Oligonucleotide
cactatccgtttgctcgtcctcttgtggtattgcgcatgc

SEQ ID NO: 705 - DNA, 40 bp, Artificial Sequence
  Synthetic Oligonucleotide
cactatccgtttatccgtcctcttgtggtattgcgcatgc

SEQ ID NO: 706 - DNA, 40 bp, Artificial Sequence
  Synthetic Oligonucleotide
cactatccgttgtccgtccttcttgtggtattgcgcatgc

SEQ ID NO: 707 - DNA, 40 bp, Artificial Sequence
  Synthetic Oligonucleotide
cactatccgcgatcgagcgaatcgcatcataaatcgcatg

SEQ ID NO: 708 - DNA, 40 bp, Artificial Sequence
  Synthetic Oligonucleotide
cactaggttcgcctcgcgcctcctcgtgcacgtttgtctg

SEQ ID NO: 709 - DNA, 40 bp, Artificial Sequence
  Synthetic Oligonucleotide
cacgtgcagcctcgaattggcgccaccactctacactgat

SEQ ID NO: 710 - DNA, 40 bp, Artificial Sequence
  Synthetic Oligonucleotide
caccatccgtttgtccgtcctcttgtggtattgcgcatgc

SEQ ID NO: 711 - DNA, 40 bp, Artificial Sequence
  Synthetic Oligonucleotide
caatgcttgacctcctgtcgactctgcggctgagactact

SEQ ID NO: 712 - DNA, 40 bp, Artificial Sequence
  Synthetic Oligonucleotide
caaattatcagggactaccctgacgcaatattcacacgct

SEQ ID NO: 713 - DNA, 40 bp, Artificial Sequence
  Synthetic Oligonucleotide
atggtccatgagcttctggcactatccgagttgacgctca

SEQ ID NO: 714 - DNA, 40 bp, Artificial Sequence
  Synthetic Oligonucleotide
atggtccatgagcttctggcactatccagttgacgtctca

SEQ ID NO: 715 - DNA, 40 bp, Artificial Sequence
  Synthetic Oligonucleotide
atcgatgggcctttagacacttctcgtacttggcagttac

SEQ ID NO: 716 - DNA, 40 bp, Artificial Sequence
  Synthetic Oligonucleotide
atccggagcgcctcgatcctcgcataatatgatacgtctg

SEQ ID NO: 717 - DNA, 40 bp, Artificial Sequence
  Synthetic Oligonucleotide
atccggaacgcctcgatcctcgcataatatggtacgtctg

SEQ ID NO: 718 - DNA, 40 bp, Artificial Sequence
  Synthetic Oligonucleotide
atatgggctttaagcacttctcggtaacttgggcagttac

SEQ ID NO: 719 - DNA, 40 bp, Artificial Sequence
  Synthetic Oligonucleotide
ataccggggcccgcctcaagctagctacctccattgtctg

SEQ ID NO: 720 - DNA, 40 bp, Artificial Sequence
  Synthetic Oligonucleotide
agctgtcgacatctctacctctgctccttccaagtgtctg

SEQ ID NO: 721 - DNA, 40 bp, Artificial Sequence
  Synthetic Oligonucleotide
agcattgttccagtcttctcccacagcggctggcactatc

SEQ ID NO: 722 - DNA, 40 bp, Artificial Sequence
  Synthetic Oligonucleotide
actctcggatcattgtgcatgcacttttcgcctcgcctac

SEQ ID NO: 723 - DNA, 40 bp, Artificial Sequence
  Synthetic Oligonucleotide
actaggctttcacgcacgcggattgtacccgaactgggtt

SEQ ID NO: 724 - DNA, 40 bp, Artificial Sequence
  Synthetic Oligonucleotide
acgattctccctcagcttccgcggtgcaggatttgcacgt

SEQ ID NO: 725 - DNA, 40 bp, Artificial Sequence
  Synthetic Oligonucleotide
acgattctccctcagcctccgcggtgcaggatttgcacgt

SEQ ID NO: 726 - DNA, 40 bp, Artificial Sequence
  Synthetic Oligonucleotide
accgcctcaggttccctaacgcgttacgccttccggaatg

SEQ ID NO: 727 - DNA, 40 bp, Artificial Sequence
  Synthetic Oligonucleotide
acagatgcctccacaatccgcctcggtcactgatatgtat

SEQ ID NO: 728 - DNA, 40 bp, Artificial Sequence
  Synthetic Oligonucleotide
acactattccggtaagtcatcgtttgaccgtttgttgcaa

SEQ ID NO: 729 - DNA, 40 bp, Artificial Sequence
  Synthetic Oligonucleotide
aattcgccagccacatcaactatgatgacgcttgactgga

SEQ ID NO: 730 - DNA, 40 bp, Artificial Sequence
  Synthetic Oligonucleotide
aactatccgtttgtccgtcctcttgtggtattgcgcatgc

SEQ ID NO: 731 - DNA, 40 bp, Artificial Sequence
  Synthetic Oligonucleotide
aaccggggcccgcctcaagcctagctacctccattgtctg

SEQ ID NO: 732 - DNA, 40 bp, Artificial Sequence
  Synthetic Oligonucleotide
aaccgggcccgctcaagtcctagctacctcacttcgactg

SEQ ID NO: 733 - DNA, 40 bp, Artificial Sequence
  Synthetic Oligonucleotide
aaccgggcccgcctcaagcctagctacctccacttgtctg

SEQ ID NO: 734 - DNA, 40 bp, Artificial Sequence
  Synthetic Oligonucleotide
aaaccggggcccgcctcaagctagctacctcccttgtctg

SEQ ID NO: 735 - DNA, 40 bp, Artificial Sequence
  Synthetic Oligonucleotide
aaaccggggcccgcctcaagctagctacctccattttctg

SEQ ID NO: 736 - DNA, 40 bp, Artificial Sequence
  Synthetic Oligonucleotide
aaaccggggcccgcctcaagctagctacctccattggctg

SEQ ID NO: 737 - DNA, 40 bp, Artificial Sequence
  Synthetic Oligonucleotide
aaaccgggcccgcctcaagctagctaacctccattgtctg

SEQ ID NO: 738 - DNA, 40 bp, Artificial Sequence
  Synthetic Oligonucleotide
ttctagaacgcctcgcacgtacggccgaccatcgtgcatg

SEQ ID NO: 739 - DNA, 40 bp, Artificial Sequence
  Synthetic Oligonucleotide
ttccatggtacgcctcgattccgcccatacatgcatgtaa

SEQ ID NO: 740 - DNA, 40 bp, Artificial Sequence
  Synthetic Oligonucleotide
tgtgtaacgttacagccgtctctaaactgcagtgcaacct

SEQ ID NO: 741 - DNA, 40 bp, Artificial Sequence
  Synthetic Oligonucleotide
tgtaggtcgcctggtccgcctcgatcctccataccgtctg

SEQ ID NO: 742 - DNA, 40 bp, Artificial Sequence
  Synthetic Oligonucleotide
tgcgaaacgctattttctgggaagccgcatctcaagcgaa

SEQ ID NO: 743 - DNA, 40 bp, Artificial Sequence
  Synthetic Oligonucleotide
tgcgaaacgctactttctgggaagccgcatctcgagcgaa

SEQ ID NO: 744 - DNA, 40 bp, Artificial Sequence
  Synthetic Oligonucleotide
tgcatgctccggagtacaccgcctgggtcttcgcgtctga

SEQ ID NO: 745 - DNA, 40 bp, Artificial Sequence
  Synthetic Oligonucleotide
tgatgggcttttaagcacttctcggtaacttggcagttac

SEQ ID NO: 746 - DNA, 40 bp, Artificial Sequence
  Synthetic Oligonucleotide
tgaagtccgcggtttcactaggctactactgatcacgtcg

SEQ ID NO: 747 - DNA, 40 bp, Artificial Sequence
  Synthetic Oligonucleotide
tctaggctttcacgcacgcggattgtacccgaactgggtt

SEQ ID NO: 748 - DNA, 40 bp, Artificial Sequence
  Synthetic Oligonucleotide
tcggtttcttctcctgactacatgagattaataaacgcgc

SEQ ID NO: 749 - DNA, 40 bp, Artificial Sequence
  Synthetic Oligonucleotide
tcgcacagctcactttgtctttgatcgaccacgctcataa

SEQ ID NO: 750 - DNA, 40 bp, Artificial Sequence
  Synthetic Oligonucleotide
tcgcacagctcacttcgtctttggtcgaccacgctcataa

SEQ ID NO: 751 - DNA, 40 bp, Artificial Sequence
  Synthetic Oligonucleotide
tcgcacagctcacttcgtctttgaccgaccacgctcataa

SEQ ID NO: 752 - DNA, 40 bp, Artificial Sequence
  Synthetic Oligonucleotide
tcgcacagctcacttcgtccttgatcgaccacgctcataa

SEQ ID NO: 753 - DNA, 40 bp, Artificial Sequence
  Synthetic Oligonucleotide
tcgcacagctcacttcgcctttgatcgaccacgctcataa

SEQ ID NO: 754 - DNA, 40 bp, Artificial Sequence
  Synthetic Oligonucleotide
tcgaggactacctcgaagtacgagcgtaaacctaatcgga

SEQ ID NO: 755 - DNA, 40 bp, Artificial Sequence
  Synthetic Oligonucleotide
tccgcctctgtcttccagctacggtagcactataggccta

SEQ ID NO: 756 - DNA, 40 bp, Artificial Sequence
  Synthetic Oligonucleotide
tatttgccagtcacatcaactatgatgacgcttgactgga

SEQ ID NO: 757 - DNA, 40 bp, Artificial Sequence
  Synthetic Oligonucleotide
tattcgccagttacatcaactatgatgacgcttgactgga

SEQ ID NO: 758 - DNA, 40 bp, Artificial Sequence
  Synthetic Oligonucleotide
tattcgccagtcacatcaactgtgatgacgcttgactgga

SEQ ID NO: 759 - DNA, 40 bp, Artificial Sequence
  Synthetic Oligonucleotide
tattcgccagccacatcaactgtgatgacgcttgactgga

SEQ ID NO: 760 - DNA, 40 bp, Artificial Sequence
  Synthetic Oligonucleotide
tattcgccagccacatcaactatggtgacgcttgactgga

SEQ ID NO: 761 - DNA, 40 bp, Artificial Sequence
  Synthetic Oligonucleotide
tattcgccagccacatcaactatgatgacgcttgaccgga

SEQ ID NO: 762 - DNA, 40 bp, Artificial Sequence
  Synthetic Oligonucleotide
tattcgccagccacatcaactacgatgacgcttgactgga

SEQ ID NO: 763 - DNA, 40 bp, Artificial Sequence
  Synthetic Oligonucleotide
tatgggggcttttaagcacttcggtaacttgggcagttac

SEQ ID NO: 764 - DNA, 40 bp, Artificial Sequence
  Synthetic Oligonucleotide
tatggggcttttaagcacttctgtgaacttgggcagttac

SEQ ID NO: 765 - DNA, 40 bp, Artificial Sequence
  Synthetic Oligonucleotide
tatggggcttttaagcacttctcggcacttgggcagttac

SEQ ID NO: 766 - DNA, 40 bp, Artificial Sequence
  Synthetic Oligonucleotide
tatggggctttaagtcacttctcggtaacttggcagttac

SEQ ID NO: 767 - DNA, 40 bp, Artificial Sequence
  Synthetic Oligonucleotide
tatggggctttaagcacttctcggtaacttggacagttac

SEQ ID NO: 768 - DNA, 40 bp, Artificial Sequence
  Synthetic Oligonucleotide
tatggggcttatagcacttctcggtaacttgggcagttac

SEQ ID NO: 769 - DNA, 40 bp, Artificial Sequence
  Synthetic Oligonucleotide
tatgggcttttaagcactctcggttaacttgggcagttac

SEQ ID NO: 770 - DNA, 40 bp, Artificial Sequence
  Synthetic Oligonucleotide
tatgggctttaagcacttctcggtaacttgggcagtttac

SEQ ID NO: 771 - DNA, 40 bp, Artificial Sequence
  Synthetic Oligonucleotide
tatgggcttctaagcacttctcggtaacttgggcagttac

SEQ ID NO: 772 - DNA, 40 bp, Artificial Sequence
  Synthetic Oligonucleotide
tatccgccagccacatcaactatgatgacgcttgactgga

SEQ ID NO: 773 - DNA, 40 bp, Artificial Sequence
  Synthetic Oligonucleotide
tatcacgctgccctttgtttaaggcctttatacaaacgca

SEQ ID NO: 774 - DNA, 40 bp, Artificial Sequence
  Synthetic Oligonucleotide
tataagcctgtcacatcaactatgatgacgcttgactgga

SEQ ID NO: 775 - DNA, 40 bp, Artificial Sequence
  Synthetic Oligonucleotide
taggggcttttaagcacttctcggtaacttgggcagttac

SEQ ID NO: 776 - DNA, 40 bp, Artificial Sequence
  Synthetic Oligonucleotide
tacgaaacgctattttctgggaagccgcatctcgagcgaa

SEQ ID NO: 777 - DNA, 40 bp, Artificial Sequence
  Synthetic Oligonucleotide
taccgcttcatcatcggacacgacgtgtatcagttggctg

SEQ ID NO: 778 - DNA, 40 bp, Artificial Sequence
  Synthetic Oligonucleotide
taccgccttatcatcggacacgacgtgtatcagttggctg

SEQ ID NO: 779 - DNA, 40 bp, Artificial Sequence
  Synthetic Oligonucleotide
taccgcctcatcattggacacgacgtgtatcagttggctg

SEQ ID NO: 780 - DNA, 40 bp, Artificial Sequence
  Synthetic Oligonucleotide
taccgcctcatcatcggacacgacgtgtgtcagttggctg

SEQ ID NO: 781 - DNA, 40 bp, Artificial Sequence
  Synthetic Oligonucleotide
taccgcctcatcatcggacacgacgtgtactcatgtgctg

SEQ ID NO: 782 - DNA, 40 bp, Artificial Sequence
  Synthetic Oligonucleotide
taccgcctcatcatcagacacgacgtgtatcagttggctg

SEQ ID NO: 783 - DNA, 40 bp, Artificial Sequence
  Synthetic Oligonucleotide
taccgcctcaccatcggacacgacgtgtatcagttggctg

SEQ ID NO: 784 - DNA, 40 bp, Artificial Sequence
  Synthetic Oligonucleotide
gttctgcgcctctgtcctcatgttcgaaccggtatgcatg

SEQ ID NO: 785 - DNA, 40 bp, Artificial Sequence
  Synthetic Oligonucleotide
gttctcgcctctgtcctcatggttcgaaccggtgtgcatg

SEQ ID NO: 786 - DNA, 40 bp, Artificial Sequence
  Synthetic Oligonucleotide
gttctcgcctctgtcctcatggttcgaaccggtacgcatg

SEQ ID NO: 787 - DNA, 40 bp, Artificial Sequence
  Synthetic Oligonucleotide
gtcggatttctcgggtcttagtgatgtacctcgcgtcccc

SEQ ID NO: 788 - DNA, 40 bp, Artificial Sequence
  Synthetic Oligonucleotide
gtccggaacgcctcgatcctcgcattatatgatacgtctg

SEQ ID NO: 789 - DNA, 40 bp, Artificial Sequence
  Synthetic Oligonucleotide
gtccggaacgcctcgatcctcgcataatatgttacgtctg

SEQ ID NO: 790 - DNA, 40 bp, Artificial Sequence
  Synthetic Oligonucleotide
gtccggaacgcctcgatcctcgcataatatgatatgtctg

SEQ ID NO: 791 - DNA, 40 bp, Artificial Sequence
  Synthetic Oligonucleotide
gtccggaacgcctcgatcctcgcataatatgatacgtttg

SEQ ID NO: 792 - DNA, 40 bp, Artificial Sequence
  Synthetic Oligonucleotide
gtccgaagcgcctcgatcctcgcataatatgatacgtctg

SEQ ID NO: 793 - DNA, 40 bp, Artificial Sequence
  Synthetic Oligonucleotide
gtccgaacgcctcgattcctcgcataatatgatacgtctg

SEQ ID NO: 794 - DNA, 40 bp, Artificial Sequence
  Synthetic Oligonucleotide
gtcccgccttgatcctcagtcttacccaggttgcaactta

SEQ ID NO: 795 - DNA, 40 bp, Artificial Sequence
  Synthetic Oligonucleotide
gtccatggtacgtctcgattccgcccatacatgcatgtaa

SEQ ID NO: 796 - DNA, 40 bp, Artificial Sequence
  Synthetic Oligonucleotide
gtccatggtacgcctcgatttcgcccatacatgcatgtaa

SEQ ID NO: 797 - DNA, 40 bp, Artificial Sequence
  Synthetic Oligonucleotide
gtccatggtacgcctcgattccgctcatacatgcatgtaa

SEQ ID NO: 798 - DNA, 40 bp, Artificial Sequence
  Synthetic Oligonucleotide
gtccatggtacgcctcgattccgcccatacatgcatgtat

SEQ ID NO: 799 - DNA, 40 bp, Artificial Sequence
  Synthetic Oligonucleotide
gtccatggtacgcctcgattccgcccatacatgcatgaaa

SEQ ID NO: 800 - DNA, 40 bp, Artificial Sequence
  Synthetic Oligonucleotide
gtccatggtacgcctcgattccgccaatacatgcatgtaa

SEQ ID NO: 801 - DNA, 40 bp, Artificial Sequence
  Synthetic Oligonucleotide
gtccaaggtacgcctcgattccgcccatacatgcatgtaa

SEQ ID NO: 802 - DNA, 40 bp, Artificial Sequence
  Synthetic Oligonucleotide
gctaggctttcacgcgcgcggattgtacccgaactgggtt

SEQ ID NO: 803 - DNA, 40 bp, Artificial Sequence
  Synthetic Oligonucleotide
gctaggctttcacgcacgcggattgtgcccgaactgggtt

SEQ ID NO: 804 - DNA, 40 bp, Artificial Sequence
  Synthetic Oligonucleotide
gctaggctttcacgcacgcggattgtatccgaactgggtt

SEQ ID NO: 805 - DNA, 40 bp, Artificial Sequence
  Synthetic Oligonucleotide
gctaggctttcacgcacgcggattgtacccggactgggtt

SEQ ID NO: 806 - DNA, 40 bp, Artificial Sequence
  Synthetic Oligonucleotide
gctaggctttcacgcacgcggattgtacccgaactgggtg

SEQ ID NO: 807 - DNA, 40 bp, Artificial Sequence
  Synthetic Oligonucleotide
gcgtcgattcatttcccggactacctggaacgcttggcca

SEQ ID NO: 808 - DNA, 40 bp, Artificial Sequence
  Synthetic Oligonucleotide
gcggtttcttctcctggctacatgagattaataaacgcgc

SEQ ID NO: 809 - DNA, 40 bp, Artificial Sequence
  Synthetic Oligonucleotide
gcggtttcttctcctgactacatgggattaataaacgcgc

SEQ ID NO: 810 - DNA, 40 bp, Artificial Sequence
  Synthetic Oligonucleotide
gcctgcctcgtgcctcttgtgcttcatgaagccgcgtttg

SEQ ID NO: 811 - DNA, 40 bp, Artificial Sequence
  Synthetic Oligonucleotide
gccgcctcaggttcccctaacgcgttagccttccggaatg

SEQ ID NO: 812 - DNA, 40 bp, Artificial Sequence
  Synthetic Oligonucleotide
gcccgcctcttttacctcctgctgcagcacacagacacga

SEQ ID NO: 813 - DNA, 40 bp, Artificial Sequence
  Synthetic Oligonucleotide
gatcacgctgccctttgtttaaggcctttatgcaaacgca

SEQ ID NO: 814 - DNA, 40 bp, Artificial Sequence
  Synthetic Oligonucleotide
gatactcaatccggcccctctgcgataaccggttatgatg

SEQ ID NO: 815 - DNA, 40 bp, Artificial Sequence
  Synthetic Oligonucleotide
gaggtacatgatcgcgtttatagactactgtaattttagc

SEQ ID NO: 816 - DNA, 40 bp, Artificial Sequence
  Synthetic Oligonucleotide
gagatctcggatctggcgtactacttggacaggctccttc

SEQ ID NO: 817 - DNA, 40 bp, Artificial Sequence
  Synthetic Oligonucleotide
gaaccgggacccgcctcaagctagctacctccattgtctg

SEQ ID NO: 818 - DNA, 40 bp, Artificial Sequence
  Synthetic Oligonucleotide
gaaaccggggccgcctcaagctagctacctccattgtctg

SEQ ID NO: 819 - DNA, 40 bp, Artificial Sequence
  Synthetic Oligonucleotide
cttcgtcgttgtgcaataaccttcagtggctggcgctatc

SEQ ID NO: 820 - DNA, 40 bp, Artificial Sequence
  Synthetic Oligonucleotide
cttagtgattttgccgcccctctgtttagtggccattgga

SEQ ID NO: 821 - DNA, 40 bp, Artificial Sequence
  Synthetic Oligonucleotide
ctcttatcgggcaggacgtctttcgtgcactatcacgatt

SEQ ID NO: 822 - DNA, 40 bp, Artificial Sequence
  Synthetic Oligonucleotide
ctcttatccggcaggacgtctttcgtgcattatcacgatt

SEQ ID NO: 823 - DNA, 40 bp, Artificial Sequence
  Synthetic Oligonucleotide
ctcttatccggcaggacgtctttcgtgaactatcacgatt

SEQ ID NO: 824 - DNA, 40 bp, Artificial Sequence
  Synthetic Oligonucleotide
ctcctattgtgagcttctccagccgcctcaactcttgtcc

SEQ ID NO: 825 - DNA, 40 bp, Artificial Sequence
  Synthetic Oligonucleotide
cgctatccgtcatcgagcgagcactttgtgcgatcacaca

SEQ ID NO: 826 - DNA, 40 bp, Artificial Sequence
  Synthetic Oligonucleotide
cgctatccgcatcgagcgggttcttcgataatatgcagca

SEQ ID NO: 827 - DNA, 40 bp, Artificial Sequence
  Synthetic Oligonucleotide
cgctatccgaatcgagcttgagtgtctggttaaacgacga

SEQ ID NO: 828 - DNA, 40 bp, Artificial Sequence
  Synthetic Oligonucleotide
cgctatccgaatcgagcttgagcgtctggttaaacaacga

SEQ ID NO: 829 - DNA, 40 bp, Artificial Sequence
  Synthetic Oligonucleotide
cgcgctcgcctcggatcgcgcgaacttctcccgtattgcg

SEQ ID NO: 830 - DNA, 40 bp, Artificial Sequence
  Synthetic Oligonucleotide
ccgtcctcaggttcccctaacgcgttagccttccggaatg

SEQ ID NO: 831 - DNA, 40 bp, Artificial Sequence
  Synthetic Oligonucleotide
ccgggtctttattgtcgtctttgtaggactacctgcatca

SEQ ID NO: 832 - DNA, 40 bp, Artificial Sequence
  Synthetic Oligonucleotide
ccggctcctcgtcctaacgtatgcataccttctgtggcca

SEQ ID NO: 833 - DNA, 40 bp, Artificial Sequence
  Synthetic Oligonucleotide
ccgccttgtttccctccggatcttgtacaagatggtgttg

SEQ ID NO: 834 - DNA, 40 bp, Artificial Sequence
  Synthetic Oligonucleotide
ccgccttgaacctcgttgcatgcaagaatacgaaagagta

SEQ ID NO: 835 - DNA, 40 bp, Artificial Sequence
  Synthetic Oligonucleotide
ccgcctcggatcgttcccaatggtggtacccccattaatg

SEQ ID NO: 836 - DNA, 40 bp, Artificial Sequence
  Synthetic Oligonucleotide
ccgcctcgaacactgacgtcgtggaaccctcgattgctag

SEQ ID NO: 837 - DNA, 40 bp, Artificial Sequence
  Synthetic Oligonucleotide
ccgcctcagtcttttcccgtgcgccttcctcttctgtgca

SEQ ID NO: 838 - DNA, 40 bp, Artificial Sequence
  Synthetic Oligonucleotide
ccgcctcagtctccacggtaccgggattacgcgatccttc

SEQ ID NO: 839 - DNA, 40 bp, Artificial Sequence
  Synthetic Oligonucleotide
ccgcctcaggtcccccctaacgcgttagccttccggaatg

SEQ ID NO: 840 - DNA, 40 bp, Artificial Sequence
  Synthetic Oligonucleotide
ccgccaccccgatagtcatcttcactggacacccgtgtta

SEQ ID NO: 841 - DNA, 40 bp, Artificial Sequence
  Synthetic Oligonucleotide
ccgcacccctgatagtcatcttcactggacacccgtgtta

SEQ ID NO: 842 - DNA, 40 bp, Artificial Sequence
  Synthetic Oligonucleotide
ccgcaccccgattagtcatcttcactggacacccgtgtta

SEQ ID NO: 843 - DNA, 40 bp, Artificial Sequence
  Synthetic Oligonucleotide
ccgcaccccgatagtcatctttcactggacacccgtgtta

SEQ ID NO: 844 - DNA, 40 bp, Artificial Sequence
  Synthetic Oligonucleotide
ccgcaccccgacagtcatcttcactggaccacccgtgtta

SEQ ID NO: 845 - DNA, 40 bp, Artificial Sequence
  Synthetic Oligonucleotide
cattcgccagccacatcaactatgatgacgcttgactgga

SEQ ID NO: 846 - DNA, 40 bp, Artificial Sequence
  Synthetic Oligonucleotide
cataaacaacatgatggaaatgctagccttctccatgccg

SEQ ID NO: 847 - DNA, 40 bp, Artificial Sequence
  Synthetic Oligonucleotide
cactatccgtttgtccgtcctctcgtggtactgcgcatgc

SEQ ID NO: 848 - DNA, 40 bp, Artificial Sequence
  Synthetic Oligonucleotide
cactatccgttgtccgtcctcttgtcggtattgcgcatgc

SEQ ID NO: 849 - DNA, 40 bp, Artificial Sequence
  Synthetic Oligonucleotide
cactatccgtatcgagcgttgtcaacgagcggctaaggcc

SEQ ID NO: 850 - DNA, 40 bp, Artificial Sequence
  Synthetic Oligonucleotide
cactatccgtatcgagcgtcgtcaacaagcggctaaggcc

SEQ ID NO: 851 - DNA, 40 bp, Artificial Sequence
  Synthetic Oligonucleotide
atttggcgccgaatcacgcctaggttctctcgttacgctg

SEQ ID NO: 852 - DNA, 40 bp, Artificial Sequence
  Synthetic Oligonucleotide
atggggcttttaagcacttctcggtaacttgggcagttac

SEQ ID NO: 853 - DNA, 40 bp, Artificial Sequence
  Synthetic Oligonucleotide
atctggcgcctccacttccctagctagctaccatcgtttg

SEQ ID NO: 854 - DNA, 40 bp, Artificial Sequence
  Synthetic Oligonucleotide
atccggaccgcctcgattactccggtaccgttatgcataa

SEQ ID NO: 855 - DNA, 40 bp, Artificial Sequence
  Synthetic Oligonucleotide
atccggaacgccttgatcctcgcataatatgatacgtctg

SEQ ID NO: 856 - DNA, 40 bp, Artificial Sequence
  Synthetic Oligonucleotide
atccggaacgcctcgatcctcgcataatgtgatacgtctg

SEQ ID NO: 857 - DNA, 40 bp, Artificial Sequence
  Synthetic Oligonucleotide
atatagctggcgtatttgcctcgatcctctattgtctgtg

SEQ ID NO: 858 - DNA, 40 bp, Artificial Sequence
  Synthetic Oligonucleotide
agactattattgtgattcgccttgctccttccgtgtgctg

SEQ ID NO: 859 - DNA, 40 bp, Artificial Sequence
  Synthetic Oligonucleotide
acgccttgtaccacatatagcgctataggatcctacgtaa

SEQ ID NO: 860 - DNA, 40 bp, Artificial Sequence
  Synthetic Oligonucleotide
acactattccggtaagccatcgtttaaccgtttgttgcaa

SEQ ID NO: 861 - DNA, 40 bp, Artificial Sequence
  Synthetic Oligonucleotide
aatccggggcccgcctcaagctagctacctccattgtctg

SEQ ID NO: 862 - DNA, 40 bp, Artificial Sequence
  Synthetic Oligonucleotide
aatccgggccgcctcaagctagctacctccattgtcctga

SEQ ID NO: 863 - DNA, 40 bp, Artificial Sequence
  Synthetic Oligonucleotide
aatcagcagttaatctgccctctgatgaaaccggttactt

SEQ ID NO: 864 - DNA, 40 bp, Artificial Sequence
  Synthetic Oligonucleotide
aatcacagtgattctgcccctctgatgaaaccggttactt

SEQ ID NO: 865 - DNA, 40 bp, Artificial Sequence
  Synthetic Oligonucleotide
aaccgtaccccagtttagtccttcctaaagggccctttga

SEQ ID NO: 866 - DNA, 40 bp, Artificial Sequence
  Synthetic Oligonucleotide
aaccgggcccgcctcaagtctagctacctccattgtcgtg

SEQ ID NO: 867 - DNA, 40 bp, Artificial Sequence
  Synthetic Oligonucleotide
aaatttacccatgggatttctgcctgtgtcttccccaaga

SEQ ID NO: 868 - DNA, 40 bp, Artificial Sequence
  Synthetic Oligonucleotide
aaaccgggtcccgcctcaagctagctacctccattgtctg

SEQ ID NO: 869 - DNA, 40 bp, Artificial Sequence
  Synthetic Oligonucleotide
aaaccggggccgcctcaagctagctacctccacttgtctg

SEQ ID NO: 870 - DNA, 40 bp, Artificial Sequence
  Synthetic Oligonucleotide
aaaccggggccctcctcaagctagctacctccattgtctg

SEQ ID NO: 871 - DNA, 40 bp, Artificial Sequence
  Synthetic Oligonucleotide
aaaccggggcccgcctcatgctagctacctccattgtctg

SEQ ID NO: 872 - DNA, 40 bp, Artificial Sequence
  Synthetic Oligonucleotide
aaaccggggcccgcctcaagctagctaccttccattgctg

SEQ ID NO: 873 - DNA, 40 bp, Artificial Sequence
  Synthetic Oligonucleotide
aaaccggggcccgcctcaagctagctacctccattgtctc

SEQ ID NO: 874 - DNA, 40 bp, Artificial Sequence
  Synthetic Oligonucleotide
aaaccggggcccgcctcaagctagctaactccattgtctg

SEQ ID NO: 875 - DNA, 40 bp, Artificial Sequence
  Synthetic Oligonucleotide
aaaccggggcccgcctcaagcgagctacctccattgtctg

SEQ ID NO: 876 - DNA, 40 bp, Artificial Sequence
  Synthetic Oligonucleotide
aaaccgggcccgctcaagcctagctacctccacttgtctg

SEQ ID NO: 877 - DNA, 40 bp, Artificial Sequence
  Synthetic Oligonucleotide
tttgggaagcggaactggtcgaggcgctatcctcgactta

SEQ ID NO: 878 - DNA, 40 bp, Artificial Sequence
  Synthetic Oligonucleotide
tttaaggcgctaaccagctaatagcatggccccttaactg

SEQ ID NO: 879 - DNA, 40 bp, Artificial Sequence
  Synthetic Oligonucleotide
ttatccctgatgatctgaattctcatcggctggcactatc

SEQ ID NO: 880 - DNA, 40 bp, Artificial Sequence
  Synthetic Oligonucleotide
tgtaggttgcctggtccgcctcgatcctctataccgtctg

SEQ ID NO: 881 - DNA, 40 bp, Artificial Sequence
  Synthetic Oligonucleotide
tgtaggtcgcctggtccgcctcgatcctctataccgcctg

SEQ ID NO: 882 - DNA, 40 bp, Artificial Sequence
  Synthetic Oligonucleotide
tggtaccacgcctcggttcctcaaactttactaggcctag

SEQ ID NO: 883 - DNA, 40 bp, Artificial Sequence
  Synthetic Oligonucleotide
tgggatatgcgtgtttcctccaagcaccgcctcgctaacg

SEQ ID NO: 884 - DNA, 40 bp, Artificial Sequence
  Synthetic Oligonucleotide
tgctggaccggtaacaccgcctcagtcatctctctgccgg

SEQ ID NO: 885 - DNA, 40 bp, Artificial Sequence
  Synthetic Oligonucleotide
tgctatccgcatcgagcgggttcttcgataatatgcaaca

SEQ ID NO: 886 - DNA, 40 bp, Artificial Sequence
  Synthetic Oligonucleotide
tgcgcaacgctattttctgggaagccgcatctcgagcgaa

SEQ ID NO: 887 - DNA, 40 bp, Artificial Sequence
  Synthetic Oligonucleotide
tgcgcaacgccttgattcactcctacggtgtgtctataga

SEQ ID NO: 888 - DNA, 40 bp, Artificial Sequence
  Synthetic Oligonucleotide
tgcgaaacgctattttctggggagccgcgtctcgagcgaa

SEQ ID NO: 889 - DNA, 40 bp, Artificial Sequence
  Synthetic Oligonucleotide
tgcgaaacgctattttctgggaagccgcatttcgagcgaa

SEQ ID NO: 890 - DNA, 40 bp, Artificial Sequence
  Synthetic Oligonucleotide
tgcgaaacgctattttctgggaagccgcatctcgagtgaa

SEQ ID NO: 891 - DNA, 40 bp, Artificial Sequence
  Synthetic Oligonucleotide
tgcgaaacgctattttccgggaagccgcatctcgagcgaa

SEQ ID NO: 892 - DNA, 40 bp, Artificial Sequence
  Synthetic Oligonucleotide
tgcgaaacgccattttctgggaagccgcatctcgagcgaa

SEQ ID NO: 893 - DNA, 40 bp, Artificial Sequence
  Synthetic Oligonucleotide
tgcactcggctgccccgcctctagttctctctcgtttggc

SEQ ID NO: 894 - DNA, 40 bp, Artificial Sequence
  Synthetic Oligonucleotide
tgatggcttttaagcacttctcggtaacttgggcagttac

SEQ ID NO: 895 - DNA, 40 bp, Artificial Sequence
  Synthetic Oligonucleotide
tgaagtccgcggtttcactagactactactgatcacgccg

SEQ ID NO: 896 - DNA, 40 bp, Artificial Sequence
  Synthetic Oligonucleotide
tctttctcggtccatcagtctcgcatgcgctcctcctaca

SEQ ID NO: 897 - DNA, 40 bp, Artificial Sequence
  Synthetic Oligonucleotide
tcttccatctggtcgcgatacagaatacgattaacatgaa

SEQ ID NO: 898 - DNA, 40 bp, Artificial Sequence
  Synthetic Oligonucleotide
tcttccatctggtcgcgatacagaatacaattaacataaa

SEQ ID NO: 899 - DNA, 40 bp, Artificial Sequence
  Synthetic Oligonucleotide
tcggtcgtgtcgtggactaccacagaagaatcgactgtcg

SEQ ID NO: 900 - DNA, 40 bp, Artificial Sequence
  Synthetic Oligonucleotide
tcgcctcgaacactgacgtcgtggaaccttcgattgctag

SEQ ID NO: 901 - DNA, 40 bp, Artificial Sequence
  Synthetic Oligonucleotide
tcgcaccccgatagtcatcttcactggaccacccgtgtta

SEQ ID NO: 902 - DNA, 40 bp, Artificial Sequence
  Synthetic Oligonucleotide
tcgcacagctcacttcgtctttgatcaaccacgctcataa

SEQ ID NO: 903 - DNA, 40 bp, Artificial Sequence
  Synthetic Oligonucleotide
tcgcacagctcacttcgtcttcgatcgaccacgctcataa

SEQ ID NO: 904 - DNA, 40 bp, Artificial Sequence
  Synthetic Oligonucleotide
tcgatgggctttaagcacttctcggtaacttggcagttac

SEQ ID NO: 905 - DNA, 40 bp, Artificial Sequence
  Synthetic Oligonucleotide
tcatgaacgccttgatccacccagatttcgttatggccaa

SEQ ID NO: 906 - DNA, 40 bp, Artificial Sequence
  Synthetic Oligonucleotide
tcaggccgctcttagccgcctctactagcttggagattag

SEQ ID NO: 907 - DNA, 40 bp, Artificial Sequence
  Synthetic Oligonucleotide
tattcgctagccacatcaactatgatgacgcttgactgga

SEQ ID NO: 908 - DNA, 40 bp, Artificial Sequence
  Synthetic Oligonucleotide
tattcgccggtcacatcaactatgatgacgcttgactgga

SEQ ID NO: 909 - DNA, 40 bp, Artificial Sequence
  Synthetic Oligonucleotide
tattcgccggccacatcaactatgatgacgcttgactgga

SEQ ID NO: 910 - DNA, 40 bp, Artificial Sequence
  Synthetic Oligonucleotide
tattcgccagtcacatcaactatggtgacgcttggctgga

SEQ ID NO: 911 - DNA, 40 bp, Artificial Sequence
  Synthetic Oligonucleotide
tattcgccagtcacatcaactatgatgacgcttgactgaa

SEQ ID NO: 912 - DNA, 40 bp, Artificial Sequence
  Synthetic Oligonucleotide
tattcgccagtcacatcaactataatgacgcttgactgga

SEQ ID NO: 913 - DNA, 40 bp, Artificial Sequence
  Synthetic Oligonucleotide
tattcgccagccacgtcaactatgatgacgcttgactgga

SEQ ID NO: 914 - DNA, 40 bp, Artificial Sequence
  Synthetic Oligonucleotide
tattcgccagccacatcaactatgatgacgcttgactaga

SEQ ID NO: 915 - DNA, 40 bp, Artificial Sequence
  Synthetic Oligonucleotide
tattcgccagccacatcaactatgacgacgcttgactgga

SEQ ID NO: 916 - DNA, 40 bp, Artificial Sequence
  Synthetic Oligonucleotide
tattcgccagccacaccaactatgatgacgcttgactgga

SEQ ID NO: 917 - DNA, 40 bp, Artificial Sequence
  Synthetic Oligonucleotide
tattcgccagcacatcaactatgatgacgcttggactgga

SEQ ID NO: 918 - DNA, 40 bp, Artificial Sequence
  Synthetic Oligonucleotide
tattcaccagtcacatcaactatgatgacgcttgactgga

SEQ ID NO: 919 - DNA, 40 bp, Artificial Sequence
  Synthetic Oligonucleotide
tattcaccagccacatcaactatgatgacgcttgactgga

SEQ ID NO: 920 - DNA, 40 bp, Artificial Sequence
  Synthetic Oligonucleotide
tatggggcttttaagcgcttctcgtaacttgggcagttac

SEQ ID NO: 921 - DNA, 40 bp, Artificial Sequence
  Synthetic Oligonucleotide
tatggggcttttaagcactttcggtaacttgggcagttac

SEQ ID NO: 922 - DNA, 40 bp, Artificial Sequence
  Synthetic Oligonucleotide
tatggggcttttaagcacttctcggtaacttgggcgttac

SEQ ID NO: 923 - DNA, 40 bp, Artificial Sequence
  Synthetic Oligonucleotide
tatggggcttttaagcacttctcgatacttgggcagttac

SEQ ID NO: 924 - DNA, 40 bp, Artificial Sequence
  Synthetic Oligonucleotide
tatggggcttttaagcacttcgtcgtacttgggcagttac

SEQ ID NO: 925 - DNA, 40 bp, Artificial Sequence
  Synthetic Oligonucleotide
tatggggctttatagacttctcggtaacttgggcagttac

SEQ ID NO: 926 - DNA, 40 bp, Artificial Sequence
  Synthetic Oligonucleotide
tatggggctttaagcgcttctcggtaacttgggcagttac

SEQ ID NO: 927 - DNA, 40 bp, Artificial Sequence
  Synthetic Oligonucleotide
tatggggctttaagcacttcttggtaacttgggcagttac

SEQ ID NO: 928 - DNA, 40 bp, Artificial Sequence
  Synthetic Oligonucleotide
tatggggctttaagcacttctcggtaacttgggcagtcac

SEQ ID NO: 929 - DNA, 40 bp, Artificial Sequence
  Synthetic Oligonucleotide
tatggggctttaagcacttctcagtaacttgggcagttac

SEQ ID NO: 930 - DNA, 40 bp, Artificial Sequence
  Synthetic Oligonucleotide
tatggggctttaagcacctctcggtaacttgggcagttac

SEQ ID NO: 931 - DNA, 40 bp, Artificial Sequence
  Synthetic Oligonucleotide
tatgggcttttaagcacttctcggtaacttgagcagttac

SEQ ID NO: 932 - DNA, 40 bp, Artificial Sequence
  Synthetic Oligonucleotide
tatgggctttcaagcacttctcggtaacttgggcagttac

SEQ ID NO: 933 - DNA, 40 bp, Artificial Sequence
  Synthetic Oligonucleotide
tatgggctttaagccacttctcggtaacttgggcagttac

SEQ ID NO: 934 - DNA, 40 bp, Artificial Sequence
  Synthetic Oligonucleotide
tatgggctttaagcactttctcggataacttggcagttac

SEQ ID NO: 935 - DNA, 40 bp, Artificial Sequence
  Synthetic Oligonucleotide
tatgggctttaagcacttctcggtaactttgggcagttac

SEQ ID NO: 936 - DNA, 40 bp, Artificial Sequence
  Synthetic Oligonucleotide
tatgggctttaagcacttctcggtaacttgggcaagttac

SEQ ID NO: 937 - DNA, 40 bp, Artificial Sequence
  Synthetic Oligonucleotide
tatgggctttaagcacttctccggtaacttgggcagttac

SEQ ID NO: 938 - DNA, 40 bp, Artificial Sequence
  Synthetic Oligonucleotide
tatgggctttaagcaccttctcggtaaacttggcagttac

SEQ ID NO: 939 - DNA, 40 bp, Artificial Sequence
  Synthetic Oligonucleotide
tatgggctttaaagcactttctcgggtaacttggcagtac

SEQ ID NO: 940 - DNA, 40 bp, Artificial Sequence
  Synthetic Oligonucleotide
tatcttactggggaagttgtatgtcccttttaacgtaacg

SEQ ID NO: 941 - DNA, 40 bp, Artificial Sequence
  Synthetic Oligonucleotide
tatccgccagtcacatcaactatgatgacgcttggctgga

SEQ ID NO: 942 - DNA, 40 bp, Artificial Sequence
  Synthetic Oligonucleotide
tatatgcatgcacacgttccgccttgcgccttccggtctg

SEQ ID NO: 943 - DNA, 40 bp, Artificial Sequence
  Synthetic Oligonucleotide
tatacgccagtcacatcaactatgatgacgcttgactgga

SEQ ID NO: 944 - DNA, 40 bp, Artificial Sequence
  Synthetic Oligonucleotide
tataagcctgtcttttaatctcggcagagtgctcgtgagc

SEQ ID NO: 945 - DNA, 40 bp, Artificial Sequence
  Synthetic Oligonucleotide
tataagcctgtcttttaatctcggcagaatgctcatgagc

SEQ ID NO: 946 - DNA, 40 bp, Artificial Sequence
  Synthetic Oligonucleotide
tataagcccgtcttttaatctcggcagagtgctcatgagc

SEQ ID NO: 947 - DNA, 40 bp, Artificial Sequence
  Synthetic Oligonucleotide
tagtcgccagtcacatcaactatgatgacgcttgactgga

SEQ ID NO: 948 - DNA, 40 bp, Artificial Sequence
  Synthetic Oligonucleotide
tagtcgatccgtactttcaggcgctatcctgatcacccaa

SEQ ID NO: 949 - DNA, 40 bp, Artificial Sequence
  Synthetic Oligonucleotide
tagccgctcatcatcggacacgacgtgtatcagttggctg

SEQ ID NO: 950 - DNA, 40 bp, Artificial Sequence
  Synthetic Oligonucleotide
tactgcctcatcatcggacacgacgtgtatcagttggctg

SEQ ID NO: 951 - DNA, 40 bp, Artificial Sequence
  Synthetic Oligonucleotide
tactcgccagtcacatcaactatgatgacgcttggctgga

SEQ ID NO: 952 - DNA, 40 bp, Artificial Sequence
  Synthetic Oligonucleotide
tactatccgtagatccgtcactcactacgcgtatggaatc

SEQ ID NO: 953 - DNA, 40 bp, Artificial Sequence
  Synthetic Oligonucleotide
taccgccttgatccaacaggcctgtgtaaaccttcggctt

SEQ ID NO: 954 - DNA, 40 bp, Artificial Sequence
  Synthetic Oligonucleotide
taccgcctgggctccttcccgaacagcatgctacatgagt

SEQ ID NO: 955 - DNA, 40 bp, Artificial Sequence
  Synthetic Oligonucleotide
taccgcctcattatcggacacgacgtgtatcagttggctg

SEQ ID NO: 956 - DNA, 40 bp, Artificial Sequence
  Synthetic Oligonucleotide
taccgcctcatcatcggacatcgacgtgtatcagttgctg

SEQ ID NO: 957 - DNA, 40 bp, Artificial Sequence
  Synthetic Oligonucleotide
taccgcctcatcatcggacacgatgtgtatcagttggctg

SEQ ID NO: 958 - DNA, 40 bp, Artificial Sequence
  Synthetic Oligonucleotide
taccgcctcatcatcggacacgacgtgtatcagttgtctg

SEQ ID NO: 959 - DNA, 40 bp, Artificial Sequence
  Synthetic Oligonucleotide
taccgcctcatcatcggacacgacgtgtatcagttggcgg

SEQ ID NO: 960 - DNA, 40 bp, Artificial Sequence
  Synthetic Oligonucleotide
taccgcctcatcatcggacacgacgtgtatcagtaggctg

SEQ ID NO: 961 - DNA, 40 bp, Artificial Sequence
  Synthetic Oligonucleotide
gttctcgcctctgtcctcatggtccgaaccggtatgcatg

SEQ ID NO: 962 - DNA, 40 bp, Artificial Sequence
  Synthetic Oligonucleotide
gttctcgcctctgccctcatggttcgaaccggtatgcatg

SEQ ID NO: 963 - DNA, 40 bp, Artificial Sequence
  Synthetic Oligonucleotide
gttctcgcctctatcctcatggttcgaaccggtatgcatg

SEQ ID NO: 964 - DNA, 40 bp, Artificial Sequence
  Synthetic Oligonucleotide
gttctcgcctccgtcctcatggttcgaaccggtatgcatg

SEQ ID NO: 965 - DNA, 40 bp, Artificial Sequence
  Synthetic Oligonucleotide
gttcggaacgcctcgatcctcgcataatatgatacgtctg

SEQ ID NO: 966 - DNA, 40 bp, Artificial Sequence
  Synthetic Oligonucleotide
gtggtggttttctcggatttcctccctgccacccgtgatg

SEQ ID NO: 967 - DNA, 40 bp, Artificial Sequence
  Synthetic Oligonucleotide
gtctggaacgcctcgatcctcgcataatatgatacgtctg

SEQ ID NO: 968 - DNA, 40 bp, Artificial Sequence
  Synthetic Oligonucleotide
gtcggaacgcctcgatcctcgcataatatcgatacgtctg

SEQ ID NO: 969 - DNA, 40 bp, Artificial Sequence
  Synthetic Oligonucleotide
gtcctcgcctctgtcctcatggttcgaaccggtatgcatg

SEQ ID NO: 970 - DNA, 40 bp, Artificial Sequence
  Synthetic Oligonucleotide
gtccggagcgcctcgatcctcgcataatgtgatacgtctg

SEQ ID NO: 971 - DNA, 40 bp, Artificial Sequence
  Synthetic Oligonucleotide
gtccggaacgtctcgatcctcgcataatatgatacgtctg

SEQ ID NO: 972 - DNA, 40 bp, Artificial Sequence
  Synthetic Oligonucleotide
gtccggaacgcctcgatcctcgcatattatgatacgtctg

SEQ ID NO: 973 - DNA, 40 bp, Artificial Sequence
  Synthetic Oligonucleotide
gtccggaacgcctcgatcctcgcataatattatacgtctg

SEQ ID NO: 974 - DNA, 40 bp, Artificial Sequence
  Synthetic Oligonucleotide
gtccggaacgcctcgatcctcgcataatatgattcgtctg

SEQ ID NO: 975 - DNA, 40 bp, Artificial Sequence
  Synthetic Oligonucleotide
gtccggaacgcctcgatcctcgaataatatgatacgtctg

SEQ ID NO: 976 - DNA, 40 bp, Artificial Sequence
  Synthetic Oligonucleotide
gtccggaacgcctcgatccacgcataatatgatacgtctg

SEQ ID NO: 977 - DNA, 40 bp, Artificial Sequence
  Synthetic Oligonucleotide
gtccgaacgcctcgatcctcgcataatatcgatacgtctg

SEQ ID NO: 978 - DNA, 40 bp, Artificial Sequence
  Synthetic Oligonucleotide
gtccgaaacgcctcgatcctcgcataatatgatacgtctg

SEQ ID NO: 979 - DNA, 40 bp, Artificial Sequence
  Synthetic Oligonucleotide
gtccatggtccgcctcgattccgcccatacatgcatgtaa

SEQ ID NO: 980 - DNA, 40 bp, Artificial Sequence
  Synthetic Oligonucleotide
gtccatggtacgcttcgattccgcccatacatgcatgtaa

SEQ ID NO: 981 - DNA, 40 bp, Artificial Sequence
  Synthetic Oligonucleotide
gtccatggtacgcctcgattcctcccatacatgcatgtaa

SEQ ID NO: 982 - DNA, 40 bp, Artificial Sequence
  Synthetic Oligonucleotide
gtccatggtacgcctcgattccgtccatacatgcatgtaa

SEQ ID NO: 983 - DNA, 40 bp, Artificial Sequence
  Synthetic Oligonucleotide
gtccatggtacgcctcgattccgccatacatgcattgtaa

SEQ ID NO: 984 - DNA, 40 bp, Artificial Sequence
  Synthetic Oligonucleotide
gtccatggtacgcctcgattccgaccatacatgcatgtaa

SEQ ID NO: 985 - DNA, 40 bp, Artificial Sequence
  Synthetic Oligonucleotide
gtccatggtacgcctcgacttccgccatacatgcatgtaa

SEQ ID NO: 986 - DNA, 40 bp, Artificial Sequence
  Synthetic Oligonucleotide
gtatgcctcctcgcgcgctgatgttatgcataacctcgaa

SEQ ID NO: 987 - DNA, 40 bp, Artificial Sequence
  Synthetic Oligonucleotide
gtatctttatccgcccctctgcatggtgggccctacatcg

SEQ ID NO: 988 - DNA, 40 bp, Artificial Sequence
  Synthetic Oligonucleotide
gtatctttatccgccccctctgcatggtgggcctacatcg

SEQ ID NO: 989 - DNA, 40 bp, Artificial Sequence
  Synthetic Oligonucleotide
ggttactggtacgccttgatcttccacgtgcacgtaaatg

SEQ ID NO: 990 - DNA, 40 bp, Artificial Sequence
  Synthetic Oligonucleotide
ggtgatcctcccccccgcctcgaagatttgtgcacacatc

SEQ ID NO: 991 - DNA, 40 bp, Artificial Sequence
  Synthetic Oligonucleotide
ggtctcgggtctgcatttccgcctcgtcgatcccaggata

SEQ ID NO: 992 - DNA, 40 bp, Artificial Sequence
  Synthetic Oligonucleotide
gcgtttcttctccttgactacatgagattaataaacgcgc

SEQ ID NO: 993 - DNA, 40 bp, Artificial Sequence
  Synthetic Oligonucleotide
gcggtttcttctcctgactacatgagattaataaacgtgc

SEQ ID NO: 994 - DNA, 40 bp, Artificial Sequence
  Synthetic Oligonucleotide
gcggtttcttctcctgactacatgagattaataaacacgc

SEQ ID NO: 995 - DNA, 40 bp, Artificial Sequence
  Synthetic Oligonucleotide
gcggtttcttctcctgactacataagattaataaacgcgc

SEQ ID NO: 996 - DNA, 40 bp, Artificial Sequence
  Synthetic Oligonucleotide
gcggattcttctcctgactacatgagattaataaacgcgc

SEQ ID NO: 997 - DNA, 40 bp, Artificial Sequence
  Synthetic Oligonucleotide
gcctcagtctcgtcttccccatcgtctgcatttgacggac

SEQ ID NO: 998 - DNA, 40 bp, Artificial Sequence
  Synthetic Oligonucleotide
gccgtacttaccaccctgacatcgcggggaactaatggtt

SEQ ID NO: 999 - DNA, 40 bp, Artificial Sequence
  Synthetic Oligonucleotide
gcccgctgccttcattcgtctgatgatgtgcacctcgagt

SEQ ID NO: 1000 - DNA, 40 bp, Artificial Sequence
  Synthetic Oligonucleotide
gccatcgcacataaacgtctcggtttggccatccgtggtt

SEQ ID NO: 1001 - DNA, 40 bp, Artificial Sequence
  Synthetic Oligonucleotide
gcagtttcttctcctgactacatgagattaataaacgcgc

SEQ ID NO: 1002 - skipped

SEQ ID NO: 1003 - DNA, 40 bp, Artificial Sequence
  Synthetic Oligonucleotide
gatcacgctgccctttgtttaaggcctttatacagacgca

SEQ ID NO: 1004 - DNA, 40 bp, Artificial Sequence
  Synthetic Oligonucleotide
gatcacgctgccctttgttcaaggcctttatacaaacgca

SEQ ID NO: 1005 - DNA, 40 bp, Artificial Sequence
  Synthetic Oligonucleotide
gatcacgctgccctttgttaaaggcctttatacaaacgca

SEQ ID NO: 1006 - DNA, 40 bp, Artificial Sequence
  Synthetic Oligonucleotide
gatcacgccgccctttgtttaaggcctttatacaaacgca

SEQ ID NO: 1007 - DNA, 40 bp, Artificial Sequence
  Synthetic Oligonucleotide
gagatgtttacagtgatcactttgctacctcgtcccgcta

SEQ ID NO: 1008 - DNA, 40 bp, Artificial Sequence
  Synthetic Oligonucleotide
gagatctcggatctggcgtactacttgggcaggttccttc

SEQ ID NO: 1009 - DNA, 40 bp, Artificial Sequence
  Synthetic Oligonucleotide
gagatctcggatctggcgtactacttggacgggttccttc

SEQ ID NO: 1010 - DNA, 40 bp, Artificial Sequence
  Synthetic Oligonucleotide
gagatctcggacctggcgtactacttggacaggttccttc

SEQ ID NO: 1011 - DNA, 40 bp, Artificial Sequence
  Synthetic Oligonucleotide
gacgcgtaacgccttagtccccgtaaggatcctagttctg

SEQ ID NO: 1012 - DNA, 40 bp, Artificial Sequence
  Synthetic Oligonucleotide
gaccggaacgcctcgatcctcgcataatatgatacgtctg

SEQ ID NO: 1013 - DNA, 40 bp, Artificial Sequence
  Synthetic Oligonucleotide
cttagtgatttcgccgcccctctgtttagtggccactgga

SEQ ID NO: 1014 - DNA, 40 bp, Artificial Sequence
  Synthetic Oligonucleotide
ctgcgctccctgtcattcgggcgctatcccgataatacga

SEQ ID NO: 1015 - DNA, 40 bp, Artificial Sequence
  Synthetic Oligonucleotide
ctcttatccggcgagacgtctttcgtgcactatcacgatt

SEQ ID NO: 1016 - DNA, 40 bp, Artificial Sequence
  Synthetic Oligonucleotide
ctcttatccggcaggacgtctttcatgcactatcacgatt

SEQ ID NO: 1017 - DNA, 40 bp, Artificial Sequence
  Synthetic Oligonucleotide
ctcttatccggcaggacgtcattcgtgcactatcacgatt

SEQ ID NO: 1018 - DNA, 40 bp, Artificial Sequence
  Synthetic Oligonucleotide
ctcttacgtccgaggacgtctttcgtgcactatcacgatt

SEQ ID NO: 1019 - DNA, 40 bp, Artificial Sequence
  Synthetic Oligonucleotide
ctaacccgggagtcgcctcgattgagacctctcctgtgca

SEQ ID NO: 1020 - DNA, 40 bp, Artificial Sequence
  Synthetic Oligonucleotide
cgtttacatgtacccctaccatcgcacctattagcatatg

SEQ ID NO: 1021 - DNA, 40 bp, Artificial Sequence
  Synthetic Oligonucleotide
cggctaacgctcatcgagggagcaaaaggtctatagacta

SEQ ID NO: 1022 - DNA, 40 bp, Artificial Sequence
  Synthetic Oligonucleotide
cgctatccgtatcgaggagtcttcttttctcactagaggc

SEQ ID NO: 1023 - DNA, 40 bp, Artificial Sequence
  Synthetic Oligonucleotide
cgctatccgtatcgagcgttgtcaacaagcggctaaggcc

SEQ ID NO: 1024 - DNA, 40 bp, Artificial Sequence
  Synthetic Oligonucleotide
cgctatccgcttggggcgttcttctctacatttcggtacg

SEQ ID NO: 1025 - DNA, 40 bp, Artificial Sequence
  Synthetic Oligonucleotide
cgctatccgccatcgagcgaacagtatgccgttttcggtg

SEQ ID NO: 1026 - DNA, 40 bp, Artificial Sequence
  Synthetic Oligonucleotide
cgctatccgaatcgagcttgagtgtctggttaagcaacga

SEQ ID NO: 1027 - DNA, 40 bp, Artificial Sequence
  Synthetic Oligonucleotide
cgctatccgaatcgagcttgagtgtctggttaaacaacgg

SEQ ID NO: 1028 - DNA, 40 bp, Artificial Sequence
  Synthetic Oligonucleotide
cgctatccgaatcgagcttgagtgtctggtcaaacaacga

SEQ ID NO: 1029 - DNA, 40 bp, Artificial Sequence
  Synthetic Oligonucleotide
cgcgtccttcccgcattgccgcaattgccatacattaata

SEQ ID NO: 1030 - DNA, 40 bp, Artificial Sequence
  Synthetic Oligonucleotide
cgcgcagcctcggtcctactcagcatggccatgccgttat

SEQ ID NO: 1031 - DNA, 40 bp, Artificial Sequence
  Synthetic Oligonucleotide
cctttccgaccccgtctgttcgtgggctacctcgatcata

SEQ ID NO: 1032 - DNA, 40 bp, Artificial Sequence
  Synthetic Oligonucleotide
cctcgattcctcctagcatgctacagtggcgatcatgacg

SEQ ID NO: 1033 - DNA, 40 bp, Artificial Sequence
  Synthetic Oligonucleotide
ccgcgatcagctagtcgtgctttgtccgctatgacattca

SEQ ID NO: 1034 - DNA, 40 bp, Artificial Sequence
  Synthetic Oligonucleotide
ccgccttgaacctccaatgccgtacggttatgcgcatcta

SEQ ID NO: 1035 - DNA, 40 bp, Artificial Sequence
  Synthetic Oligonucleotide
ccgcctctgtttcatcccgaattttgctcggataagtctg

SEQ ID NO: 1036 - DNA, 40 bp, Artificial Sequence
  Synthetic Oligonucleotide
ccgcctctaaagcgctttaactactcataccgtacggtga

SEQ ID NO: 1037 - DNA, 40 bp, Artificial Sequence
  Synthetic Oligonucleotide
ccgcctcgctgtagctactctggtaccatggtttgcgcgt

SEQ ID NO: 1038 - DNA, 40 bp, Artificial Sequence
  Synthetic Oligonucleotide
ccgcctcgcgtcgtgtacacgaagacctccggagactttg

SEQ ID NO: 1039 - DNA, 40 bp, Artificial Sequence
  Synthetic Oligonucleotide
ccgcctcgagcactgacgtcgtggaaccttcgattgctag

SEQ ID NO: 1040 - DNA, 40 bp, Artificial Sequence
  Synthetic Oligonucleotide
ccgcctcgaacactggcgtcgtggaaccttcgattgctag

SEQ ID NO: 1041 - DNA, 40 bp, Artificial Sequence
  Synthetic Oligonucleotide
ccgcctcgaacactgacgtcgtggaaccttcggttgctag

SEQ ID NO: 1042 - DNA, 40 bp, Artificial Sequence
  Synthetic Oligonucleotide
ccgcctcgaacactgacgtcgtggaaccttcaattgctag

SEQ ID NO: 1043 - DNA, 40 bp, Artificial Sequence
  Synthetic Oligonucleotide
ccgcctcgaacactgacgccgtggaaccttcgattgctag

SEQ ID NO: 1044 - DNA, 40 bp, Artificial Sequence
  Synthetic Oligonucleotide
ccgcctcaatcctaccgtagcgctacttttcacatgctcg

SEQ ID NO: 1045 - DNA, 40 bp, Artificial Sequence
  Synthetic Oligonucleotide
ccgccccgaacactgacgtcgtggaaccttcgattgctag

SEQ ID NO: 1046 - DNA, 40 bp, Artificial Sequence
  Synthetic Oligonucleotide
ccgcatcccgatagtcatcttcactggaccacccgtgtta

SEQ ID NO: 1047 - DNA, 40 bp, Artificial Sequence
  Synthetic Oligonucleotide
ccgcacctcgatagtcatcttcactggaccacccgtgtta

SEQ ID NO: 1048 - DNA, 40 bp, Artificial Sequence
  Synthetic Oligonucleotide
ccgcaccccgatagtcatctccactggaccacccgtgtta

SEQ ID NO: 1049 - DNA, 40 bp, Artificial Sequence
  Synthetic Oligonucleotide
cccgcggacgccttatcctccagcctaggctcgttttctg

SEQ ID NO: 1050 - DNA, 40 bp, Artificial Sequence
  Synthetic Oligonucleotide
ccatgaactcctactcgctattcaagtttgcgcaataaat

SEQ ID NO: 1051 - DNA, 40 bp, Artificial Sequence
  Synthetic Oligonucleotide
cattatccgtttgtccgtcctcttgtggtattgcgcatgc

SEQ ID NO: 1052 - DNA, 40 bp, Artificial Sequence
  Synthetic Oligonucleotide
catcgatacgtccaaacgagccttcgcggctggcgctatc

SEQ ID NO: 1053 - DNA, 40 bp, Artificial Sequence
  Synthetic Oligonucleotide
cagttctccattgtcgcgtgccggcattctcgcatctaaa

SEQ ID NO: 1054 - DNA, 40 bp, Artificial Sequence
  Synthetic Oligonucleotide
cagcgtatcatggtgggatcttagcacctccgacatataa

SEQ ID NO: 1055 - DNA, 40 bp, Artificial Sequence
  Synthetic Oligonucleotide
cagatgcttaagctctttcgccttaggtcctcattgccgg

SEQ ID NO: 1056 - DNA, 40 bp, Artificial Sequence
  Synthetic Oligonucleotide
cacttcaccccgagaagcttcttaagcacgtcgttttgcg

SEQ ID NO: 1057 - DNA, 40 bp, Artificial Sequence
  Synthetic Oligonucleotide
cactattcgtttgtccgtcctcttgtggtattgcgcatgc

SEQ ID NO: 1058 - DNA, 40 bp, Artificial Sequence
  Synthetic Oligonucleotide
cactatccgtttgtctgtcctcttgtggtattgcgcatgc

SEQ ID NO: 1059 - DNA, 40 bp, Artificial Sequence
  Synthetic Oligonucleotide
cactatccgtttgtccgtcctcttgtggtattgtgcatgc

SEQ ID NO: 1060 - DNA, 40 bp, Artificial Sequence
  Synthetic Oligonucleotide
cactatccgtttgtccgtcctcttgtggtattgcgcatga

SEQ ID NO: 1061 - DNA, 40 bp, Artificial Sequence
  Synthetic Oligonucleotide
cactatccgtttgtccgtcctctcgtggtgttgcgcatgc

SEQ ID NO: 1062 - DNA, 40 bp, Artificial Sequence
  Synthetic Oligonucleotide
cactatccgtttgtccgtcctctcgtggtattgcgcacgc

SEQ ID NO: 1063 - DNA, 40 bp, Artificial Sequence
  Synthetic Oligonucleotide
cactatccgtttgtccgtcctctcgcggtattgcgcatgc

SEQ ID NO: 1064 - DNA, 40 bp, Artificial Sequence
  Synthetic Oligonucleotide
cactatccgtttgtccgtcctcgtgtggtattgcgcatgc

SEQ ID NO: 1065 - DNA, 40 bp, Artificial Sequence
  Synthetic Oligonucleotide
cactatccgttctgtccgtcctctgtggtattgcgcatgc

SEQ ID NO: 1066 - DNA, 40 bp, Artificial Sequence
  Synthetic Oligonucleotide
cactatccgtcttgacgtgttcccttcggacatccatcaa

SEQ ID NO: 1067 - DNA, 40 bp, Artificial Sequence
  Synthetic Oligonucleotide
cactatccgtatcgagcgttgtcgacaagcggctaaggcc

SEQ ID NO: 1068 - DNA, 40 bp, Artificial Sequence
  Synthetic Oligonucleotide
cactatccgtatcgagcgctgtcaacaagcggctaaggcc

SEQ ID NO: 1069 - DNA, 40 bp, Artificial Sequence
  Synthetic Oligonucleotide
cactatccgtagacccgtcactcactacgcgtatggaatc

SEQ ID NO: 1070 - DNA, 40 bp, Artificial Sequence
  Synthetic Oligonucleotide
cactatccgcttgatcttgtctctccctctcaggcaaccg

SEQ ID NO: 1071 - DNA, 40 bp, Artificial Sequence
  Synthetic Oligonucleotide
cactatccgcgatcgagcgacgtgttggcgagttagcacg

SEQ ID NO: 1072 - DNA, 40 bp, Artificial Sequence
  Synthetic Oligonucleotide
cactatccccatcgagcgatcgtcgtgatactgcttccaa

SEQ ID NO: 1073 - DNA, 40 bp, Artificial Sequence
  Synthetic Oligonucleotide
cactatccccatcgagcgatcgtcgtagtactgcttccaa

SEQ ID NO: 1074 - DNA, 40 bp, Artificial Sequence
  Synthetic Oligonucleotide
atttgaagccgcaccagctaatagcatggccccttaactg

SEQ ID NO: 1075 - DNA, 40 bp, Artificial Sequence
  Synthetic Oligonucleotide
attcctacgtgatttgatctctcatgggctaccatgtttc

SEQ ID NO: 1076 - DNA, 40 bp, Artificial Sequence
  Synthetic Oligonucleotide
attccgcctcattggttgagctctacccggtttgcgcaaa

SEQ ID NO: 1077 - DNA, 40 bp, Artificial Sequence
  Synthetic Oligonucleotide
attagttccagcgacttcggtggtgtcctctccattacca

SEQ ID NO: 1078 - DNA, 40 bp, Artificial Sequence
  Synthetic Oligonucleotide
attaatcccagcgacttcggtggtgtcctctccattacca

SEQ ID NO: 1079 - DNA, 40 bp, Artificial Sequence
  Synthetic Oligonucleotide
atggttccatgagcttctggcactatccagttgacgctca

SEQ ID NO: 1080 - DNA, 40 bp, Artificial Sequence
  Synthetic Oligonucleotide
atggtccatgtagcttctggcactatccagttgacgctca

SEQ ID NO: 1081 - DNA, 40 bp, Artificial Sequence
  Synthetic Oligonucleotide
atggtccatgagcttctggcactatccaagttgacgctca

SEQ ID NO: 1082 - DNA, 40 bp, Artificial Sequence
  Synthetic Oligonucleotide
atggtccatgagcttctggacactatccagttgacgctca

SEQ ID NO: 1083 - DNA, 40 bp, Artificial Sequence
  Synthetic Oligonucleotide
atggtccatgacgcttctggcactatccagttgacgctca

SEQ ID NO: 1084 - DNA, 40 bp, Artificial Sequence
  Synthetic Oligonucleotide
atggtccactgagcttctggcactatccagttgacgctca

SEQ ID NO: 1085 - DNA, 40 bp, Artificial Sequence
  Synthetic Oligonucleotide
atgcgaaacgctatttctgggaagccgcatctcgagcgaa

SEQ ID NO: 1086 - DNA, 40 bp, Artificial Sequence
  Synthetic Oligonucleotide
atcgtcgggccccttttatgaaacttacataaaagcgcac

SEQ ID NO: 1087 - DNA, 40 bp, Artificial Sequence
  Synthetic Oligonucleotide
atcggtccatgagccttcggcactatccagttgacgctca

SEQ ID NO: 1088 - DNA, 40 bp, Artificial Sequence
  Synthetic Oligonucleotide
atattctgcaggctccgccttgcttctcctggtgtctggc

SEQ ID NO: 1089 - DNA, 40 bp, Artificial Sequence
  Synthetic Oligonucleotide
atattcaggatctattcgccttaggtcagcccggttgcat

SEQ ID NO: 1090 - DNA, 40 bp, Artificial Sequence
  Synthetic Oligonucleotide
atatgagatcggaccgcctcgttcctttgaccgcagtctg

SEQ ID NO: 1091 - DNA, 40 bp, Artificial Sequence
  Synthetic Oligonucleotide
agtaccggtgcccgcctcagtcggaacccgctattgtctg

SEQ ID NO: 1092 - DNA, 40 bp, Artificial Sequence
  Synthetic Oligonucleotide
agatgggagactttgttcgactacgatcattgacgtcact

SEQ ID NO: 1093 - DNA, 40 bp, Artificial Sequence
  Synthetic Oligonucleotide
accgccttgaatctccttctcggtcacgtgacatctgctg

SEQ ID NO: 1094 - DNA, 40 bp, Artificial Sequence
  Synthetic Oligonucleotide
accgcctcaggttcccctaacgcgttagccttccggaatg

SEQ ID NO: 1095 - DNA, 40 bp, Artificial Sequence
  Synthetic Oligonucleotide
acagcactggactctcagcgcgcgacccatctcctcagta

SEQ ID NO: 1096 - DNA, 40 bp, Artificial Sequence
  Synthetic Oligonucleotide
acactattccggtaagtcatcgtttaaccgtttgttgcag

SEQ ID NO: 1097 - DNA, 40 bp, Artificial Sequence
  Synthetic Oligonucleotide
acaccggggcccgcctcaagctagctacctccattgtctg

SEQ ID NO: 1098 - DNA, 40 bp, Artificial Sequence
  Synthetic Oligonucleotide
aatgttaagcttacatacgcctgggtcgctctttgttctg

SEQ ID NO: 1099 - DNA, 40 bp, Artificial Sequence
  Synthetic Oligonucleotide
aatctggagatcactaggcactatcctagcactgtatcaa

SEQ ID NO: 1100 - DNA, 40 bp, Artificial Sequence
  Synthetic Oligonucleotide
aatccgggaccgcctcaagctagctacctccattgtcctg

SEQ ID NO: 1101 - DNA, 40 bp, Artificial Sequence
  Synthetic Oligonucleotide
aatcacggtaattctgcccctctgatgaaaccggttactt

SEQ ID NO: 1102 - DNA, 40 bp, Artificial Sequence
  Synthetic Oligonucleotide
aatcacagtaattctgcccctctgatgaaaccggttgctt

SEQ ID NO: 1103 - DNA, 40 bp, Artificial Sequence
  Synthetic Oligonucleotide
aatcacaataattctgcccctctgatgaaaccggttactt

SEQ ID NO: 1104 - DNA, 40 bp, Artificial Sequence
  Synthetic Oligonucleotide
aaccgcctcatcatcggacacgacgtgtatcagttggctg

SEQ ID NO: 1105 - DNA, 40 bp, Artificial Sequence
  Synthetic Oligonucleotide
aacccggggcccgcctcaagctagctacctccattgtctg

SEQ ID NO: 1106 - DNA, 40 bp, Artificial Sequence
  Synthetic Oligonucleotide
aaatccgggcccgcctcaagctagctacctccattgcctg

SEQ ID NO: 1107 - DNA, 40 bp, Artificial Sequence
  Synthetic Oligonucleotide
aaaccgggggcccgcctcaagctagctacctccatgtctg

SEQ ID NO: 1108 - DNA, 40 bp, Artificial Sequence
  Synthetic Oligonucleotide
aaaccggggccgcctcaagtctagctacctccattgtctg

SEQ ID NO: 1109 - DNA, 40 bp, Artificial Sequence
  Synthetic Oligonucleotide
aaaccggggccgcctcaagctagctacctccattgtcgtg

SEQ ID NO: 1110 - DNA, 40 bp, Artificial Sequence
  Synthetic Oligonucleotide
aaaccggggcccgcctcaatctagctacctccattgtctg

SEQ ID NO: 1111 - DNA, 40 bp, Artificial Sequence
  Synthetic Oligonucleotide
aaaccggggcccgcctcaagcttgctacctccattgtctg

SEQ ID NO: 1112 - DNA, 40 bp, Artificial Sequence
  Synthetic Oligonucleotide
aaaccggggcccgcctcaagctagcttacctccatgtctg

SEQ ID NO: 1113 - DNA, 40 bp, Artificial Sequence
  Synthetic Oligonucleotide
aaaccggggcccgcctcaagctagctagctccattgtctg

SEQ ID NO: 1114 - DNA, 40 bp, Artificial Sequence
  Synthetic Oligonucleotide
aaaccggggcccgcctcaagctagctacctcgattgtctg

SEQ ID NO: 1115 - DNA, 40 bp, Artificial Sequence
  Synthetic Oligonucleotide
aaaccggggcccgcctcaagctagctacctccattgtcgg

SEQ ID NO: 1116 - DNA, 40 bp, Artificial Sequence
  Synthetic Oligonucleotide
aaaccggggcccgcctcaagctagctacctccattgactg

SEQ ID NO: 1117 - DNA, 40 bp, Artificial Sequence
  Synthetic Oligonucleotide
aaaccggggcccgcctcaagctagctacctccaatgtctg

SEQ ID NO: 1118 - DNA, 40 bp, Artificial Sequence
  Synthetic Oligonucleotide
aaaccggggcccgcctcaagctagctacatccattgtctg

SEQ ID NO: 1119 - DNA, 40 bp, Artificial Sequence
  Synthetic Oligonucleotide
aaaccggggcccgcccacagctagctacctccattgtctg

SEQ ID NO: 1120 - DNA, 40 bp, Artificial Sequence
  Synthetic Oligonucleotide
aaaccgggcccgcctcaagctagctacctcccattgtctg

SEQ ID NO: 1121 - DNA, 40 bp, Artificial Sequence
  Synthetic Oligonucleotide
aaaccgggcccgcctcaagctagctacctccattgtctgc

SEQ ID NO: 1122 - DNA, 40 bp, Artificial Sequence
  Synthetic Oligonucleotide
aaaccgggcccgcctcaagctagctacctccattgtctga

SEQ ID NO: 1123 - DNA, 40 bp, Artificial Sequence
  Synthetic Oligonucleotide
aaaaccggggccgcctcaagctagctacctccattgtctg

SEQ ID NO: 1124 - DNA, 40 bp, Artificial Sequence
  Synthetic Oligonucleotide
tttattctcctaaagccgcctcgcggacgtgtacacgaac

SEQ ID NO: 1125 - DNA, 40 bp, Artificial Sequence
  Synthetic Oligonucleotide
tttaaggcgctaccagctaatagcattggccccttaactg

SEQ ID NO: 1126 - DNA, 40 bp, Artificial Sequence
  Synthetic Oligonucleotide
tttaagcgcaccagctaatagcatggcccccccttaactg

SEQ ID NO: 1127 - DNA, 40 bp, Artificial Sequence
  Synthetic Oligonucleotide
tttaagcctgtcttttaatctcggcagagtgctcatgagc

SEQ ID NO: 1128 - DNA, 40 bp, Artificial Sequence
  Synthetic Oligonucleotide
ttgtaccccgggttgcaattgcctcgtgaccagaccgcat

SEQ ID NO: 1129 - DNA, 40 bp, Artificial Sequence
  Synthetic Oligonucleotide
ttgtaccccgggttgcaattgcctcgtaaccaggccgcat

SEQ ID NO: 1130 - DNA, 40 bp, Artificial Sequence
  Synthetic Oligonucleotide
ttgtaccccgggctgcaattgcctcgtaaccagaccgcat

SEQ ID NO: 1131 - DNA, 40 bp, Artificial Sequence
  Synthetic Oligonucleotide
ttgggagctttaagcacttctcggtaacttgggcagttac

SEQ ID NO: 1132 - DNA, 40 bp, Artificial Sequence
  Synthetic Oligonucleotide
ttgcacagctcacttcgtctttgatcgaccacgctcataa

SEQ ID NO: 1133 - DNA, 40 bp, Artificial Sequence
  Synthetic Oligonucleotide
ttgactaccttccgctgcgtgtactcgtcctttttgtctg

SEQ ID NO: 1134 - DNA, 40 bp, Artificial Sequence
  Synthetic Oligonucleotide
ttcgcgaacgcctcagtcacccttctcggataacatgatt

SEQ ID NO: 1135 - DNA, 40 bp, Artificial Sequence
  Synthetic Oligonucleotide
ttcagcatcagctttcgggcgctatcccgatccagctgca

SEQ ID NO: 1136 - DNA, 40 bp, Artificial Sequence
  Synthetic Oligonucleotide
ttatgggctttaagcacttctcggtaacttgggcagttac

SEQ ID NO: 1137 - DNA, 40 bp, Artificial Sequence
  Synthetic Oligonucleotide
tgtgaaacgctattttctgggaagccgcatctcgagcgaa

SEQ ID NO: 1138 - DNA, 40 bp, Artificial Sequence
  Synthetic Oligonucleotide
tgtaggtcgcctggtccgcctcgatcccctataccgtctg

SEQ ID NO: 1139 - DNA, 40 bp, Artificial Sequence
  Synthetic Oligonucleotide
tgtaggtcgcctggcccgcctcgatcctctataccgtctg

SEQ ID NO: 1140 - DNA, 40 bp, Artificial Sequence
  Synthetic Oligonucleotide
tgtagatcgttcttatccgcctcggtcttccccaggttga

SEQ ID NO: 1141 - DNA, 40 bp, Artificial Sequence
  Synthetic Oligonucleotide
tgtagatcgttcttatccgcctcggtcctccccaggttaa

SEQ ID NO: 1142 - DNA, 40 bp, Artificial Sequence
  Synthetic Oligonucleotide
tgtacgcctgggtaccttcctaacggatcctttttgtctg

SEQ ID NO: 1143 - DNA, 40 bp, Artificial Sequence
  Synthetic Oligonucleotide
tgtaagcctgtcttttaatctcggcagagtgctcatgagc

SEQ ID NO: 1144 - DNA, 40 bp, Artificial Sequence
  Synthetic Oligonucleotide
tggcctcataagattcgaccttgctgcactatcagcttta

SEQ ID NO: 1145 - DNA, 40 bp, Artificial Sequence
  Synthetic Oligonucleotide
tggactacccccgggtaagtcgtctttgagacatgtgctg

SEQ ID NO: 1146 - DNA, 40 bp, Artificial Sequence
  Synthetic Oligonucleotide
tgctatccgccatcgagcgaacagtgtgccgttttcggtg

SEQ ID NO: 1147 - DNA, 40 bp, Artificial Sequence
  Synthetic Oligonucleotide
tgcgcaacgccttgattcactcctgcagtgtgtctataga

SEQ ID NO: 1148 - DNA, 40 bp, Artificial Sequence
  Synthetic Oligonucleotide
tgcgcaacgccttgattcactcctacagtgtgtctgtaga

SEQ ID NO: 1149 - DNA, 40 bp, Artificial Sequence
  Synthetic Oligonucleotide
tgcgcaacgccttgattcactcctacagtgtgtctatgga

SEQ ID NO: 1150 - DNA, 40 bp, Artificial Sequence
  Synthetic Oligonucleotide
tgcgcaacgccttgattcactcctacagtgcgtctataga

SEQ ID NO: 1151 - DNA, 40 bp, Artificial Sequence
  Synthetic Oligonucleotide
tgcgaaatgctattttctgggaagccgcatctcgagcgaa

SEQ ID NO: 1152 - DNA, 40 bp, Artificial Sequence
  Synthetic Oligonucleotide
tgcgaaacgctgttttctgggaagccgcatctcgagcgaa

SEQ ID NO: 1153 - DNA, 40 bp, Artificial Sequence
  Synthetic Oligonucleotide
tgcgaaacgctattttctgggaagctgcatctcgagcgaa

SEQ ID NO: 1154 - DNA, 40 bp, Artificial Sequence
  Synthetic Oligonucleotide
tgcgaaacgctattttctgggaagccgtatctcgagcgaa

SEQ ID NO: 1155 - DNA, 40 bp, Artificial Sequence
  Synthetic Oligonucleotide
tgcgaaacgctattttctgggaagccgcatctcggacgaa

SEQ ID NO: 1156 - DNA, 40 bp, Artificial Sequence
  Synthetic Oligonucleotide
tgcgaaacgctattttctgggaagccgcatctcgatcgaa

SEQ ID NO: 1157 - DNA, 40 bp, Artificial Sequence
  Synthetic Oligonucleotide
tgcgaaacgctattttctgggaagccgcatctagagcgaa

SEQ ID NO: 1158 - DNA, 40 bp, Artificial Sequence
  Synthetic Oligonucleotide
tgcgaaacgctattttctgggaagccgcaactcgagcgaa

SEQ ID NO: 1159 - DNA, 40 bp, Artificial Sequence
  Synthetic Oligonucleotide
tgcgaaacgctattttctggaaagccgcatctcgagcgaa

SEQ ID NO: 1160 - DNA, 40 bp, Artificial Sequence
  Synthetic Oligonucleotide
tgcgaaacgctattttctgagaagccgcatctcgagcgaa

SEQ ID NO: 1161 - DNA, 40 bp, Artificial Sequence
  Synthetic Oligonucleotide
tgcgaaacgctatttctgggaagccgcatcctcgagcgaa

SEQ ID NO: 1162 - DNA, 40 bp, Artificial Sequence
  Synthetic Oligonucleotide
tgcgaaacgctattgtctgggaagccgcatctcgagcgaa

SEQ ID NO: 1163 - DNA, 40 bp, Artificial Sequence
  Synthetic Oligonucleotide
tgcgaaacgctatcttctgggaagccgcatctcgagcgaa

SEQ ID NO: 1164 - DNA, 40 bp, Artificial Sequence
  Synthetic Oligonucleotide
tgcgaaacactattttctgggaagccgcgtctcgagcgaa

SEQ ID NO: 1165 - DNA, 40 bp, Artificial Sequence
  Synthetic Oligonucleotide
tgcgaaaacgcctcgatcctcgcataatatgatacgtctg

SEQ ID NO: 1166 - DNA, 40 bp, Artificial Sequence
  Synthetic Oligonucleotide
tgcaggtcgcctggtccgcctcgatcctctataccgtctg

SEQ ID NO: 1167 - DNA, 40 bp, Artificial Sequence
  Synthetic Oligonucleotide
tgcagacctcgcctctcattatctcggaccgtttctgcac

SEQ ID NO: 1168 - DNA, 40 bp, Artificial Sequence
  Synthetic Oligonucleotide
tgactttatccgacggatctcacgtcccccttggttcggg

SEQ ID NO: 1169 - DNA, 40 bp, Artificial Sequence
  Synthetic Oligonucleotide
tgaagtccgcggtttcactagactactactggtcacgtcg

SEQ ID NO: 1170 - DNA, 40 bp, Artificial Sequence
  Synthetic Oligonucleotide
tgaagtccgcggtttcactagactactactgatcgcgtcg

SEQ ID NO: 1171 - DNA, 40 bp, Artificial Sequence
  Synthetic Oligonucleotide
tgaagtccgcggtttcactagactactactgatcacgtca

SEQ ID NO: 1172 - DNA, 40 bp, Artificial Sequence
  Synthetic Oligonucleotide
tgaagtccgcggttcactagatctactactgatcacgtcg

SEQ ID NO: 1173 - DNA, 40 bp, Artificial Sequence
  Synthetic Oligonucleotide
tgaagtccgcggtctcactagactactactgatcacgtcg

SEQ ID NO: 1174 - DNA, 40 bp, Artificial Sequence
  Synthetic Oligonucleotide
tgaagtccgcggcttcactagactactactgatcacgtcg

SEQ ID NO: 1175 - DNA, 40 bp, Artificial Sequence
  Synthetic Oligonucleotide
tgaagtccgcgatttcactagactactactgatcacgtcg

SEQ ID NO: 1176 - DNA, 40 bp, Artificial Sequence
  Synthetic Oligonucleotide
tctttcatctggtcgcgatacagaatacgattaacataaa

SEQ ID NO: 1177 - DNA, 40 bp, Artificial Sequence
  Synthetic Oligonucleotide
tcttcgccagtcacatcaactatgatgacgcttgactgga

SEQ ID NO: 1178 - DNA, 40 bp, Artificial Sequence
  Synthetic Oligonucleotide
tcttccatctggtcgcggtacagaatacgattaacataaa

SEQ ID NO: 1179 - DNA, 40 bp, Artificial Sequence
  Synthetic Oligonucleotide
tcttccatctggtcgcgatacagagtacgattaacataaa

SEQ ID NO: 1180 - DNA, 40 bp, Artificial Sequence
  Synthetic Oligonucleotide
tcttccatctggtcgcgatacagaatacgattgacataaa

SEQ ID NO: 1181 - DNA, 40 bp, Artificial Sequence
  Synthetic Oligonucleotide
tctcggattatcatggtacatcttcttccccgaaacgcgc

SEQ ID NO: 1182 - DNA, 40 bp, Artificial Sequence
  Synthetic Oligonucleotide
tctcacagctcacttcgtctttgatcgaccacgctcataa

SEQ ID NO: 1183 - DNA, 40 bp, Artificial Sequence
  Synthetic Oligonucleotide
tcgggatacttgaggtcgttgagcgcttacgaaccctaat

SEQ ID NO: 1184 - DNA, 40 bp, Artificial Sequence
  Synthetic Oligonucleotide
tcgctcagctcacttcgtctttgatcgaccacgctcataa

SEQ ID NO: 1185 - DNA, 40 bp, Artificial Sequence
  Synthetic Oligonucleotide
tcgcacagctcacttcgtctttgatcgaccgcgctcataa

SEQ ID NO: 1186 - DNA, 40 bp, Artificial Sequence
  Synthetic Oligonucleotide
tcgcacagctcacttcgtctttgatcgaccacgctcatga

SEQ ID NO: 1187 - DNA, 40 bp, Artificial Sequence
  Synthetic Oligonucleotide
tcgcacagctcacttcgtctttgatcgaccacgatcataa

SEQ ID NO: 1188 - DNA, 40 bp, Artificial Sequence
  Synthetic Oligonucleotide
tcgcacagctcacttcgtctttgatcgacaacgctcataa

SEQ ID NO: 1189 - DNA, 40 bp, Artificial Sequence
  Synthetic Oligonucleotide
tcgatgggctttagcacttctcggtaacttgggcagttac

SEQ ID NO: 1190 - DNA, 40 bp, Artificial Sequence
  Synthetic Oligonucleotide
tcgaatgggctttagcacttctcggtaacttggcagttac

SEQ ID NO: 1191 - DNA, 40 bp, Artificial Sequence
  Synthetic Oligonucleotide
tcctctatagtcgtcggcgtagcacgctattgcttagaag

SEQ ID NO: 1192 - DNA, 40 bp, Artificial Sequence
  Synthetic Oligonucleotide
tccctatcttgacgtctcttcggggactaccccgattctg

SEQ ID NO: 1193 - DNA, 40 bp, Artificial Sequence
  Synthetic Oligonucleotide
tcatggggctttaagcacttctcgtaacttgggcagttac

SEQ ID NO: 1194 - DNA, 40 bp, Artificial Sequence
  Synthetic Oligonucleotide
tcatgacgtcggttcgcctcgggtccatcccaattgtctg

SEQ ID NO: 1195 - DNA, 40 bp, Artificial Sequence
  Synthetic Oligonucleotide
tcagcctctgtcctgacatgtcaattggatatactgcaaa

SEQ ID NO: 1196 - DNA, 40 bp, Artificial Sequence
  Synthetic Oligonucleotide
tcagcacacgctaatttcgtactgatcgcccctctgtgca

SEQ ID NO: 1197 - DNA, 40 bp, Artificial Sequence
  Synthetic Oligonucleotide
tcaccgcctcatcatcggacacgacgtgtatcagttgctg

SEQ ID NO: 1198 - DNA, 40 bp, Artificial Sequence
  Synthetic Oligonucleotide
tcaaaatcaggttcacgtgaatggcaaacagctgggtaag

SEQ ID NO: 1199 - DNA, 40 bp, Artificial Sequence
  Synthetic Oligonucleotide
tatttgccagccacatcaactatgatgacgcttgactgga

SEQ ID NO: 1200 - DNA, 40 bp, Artificial Sequence
  Synthetic Oligonucleotide
tattgcgcagtcacatcaactatgatgacgcttgactgga

SEQ ID NO: 1201 - DNA, 40 bp, Artificial Sequence
  Synthetic Oligonucleotide
tattcgtcagtcacatcaactatgatgacgcttgactgga

SEQ ID NO: 1202 - DNA, 40 bp, Artificial Sequence
  Synthetic Oligonucleotide
tattcgccagtcacattaactatgatgacgcttgactgga

SEQ ID NO: 1203 - DNA, 40 bp, Artificial Sequence
  Synthetic Oligonucleotide
tattcgccagtcacatcgactatgatgacgcttgactgga

SEQ ID NO: 1204 - DNA, 40 bp, Artificial Sequence
  Synthetic Oligonucleotide
tattcgccagtcacatcaactatgatgacgtttgactgga

SEQ ID NO: 1205 - DNA, 40 bp, Artificial Sequence
  Synthetic Oligonucleotide
tattcgccagtcacatcaactatgatgacgcttgactaga

SEQ ID NO: 1206 - DNA, 40 bp, Artificial Sequence
  Synthetic Oligonucleotide
tattcgccagtcacatcaactatgatgacgcttgacagga

SEQ ID NO: 1207 - DNA, 40 bp, Artificial Sequence
  Synthetic Oligonucleotide
tattcgccagtcacatcaactatgactgacgcttgactga

SEQ ID NO: 1208 - DNA, 40 bp, Artificial Sequence
  Synthetic Oligonucleotide
tattcgccagccacatcaactatgttgacgcttgactgga

SEQ ID NO: 1209 - DNA, 40 bp, Artificial Sequence
  Synthetic Oligonucleotide
tattcgccagccacatcaactatgatgacgcctgactgga

SEQ ID NO: 1210 - DNA, 40 bp, Artificial Sequence
  Synthetic Oligonucleotide
tattcgccagccacatcaactataatgacgcttgactgga

SEQ ID NO: 1211 - DNA, 40 bp, Artificial Sequence
  Synthetic Oligonucleotide
tattcgccagccacatcaacgatgatgacgcttgactgga

SEQ ID NO: 1212 - DNA, 40 bp, Artificial Sequence
  Synthetic Oligonucleotide
tattcgccagcacatcaactatgactgacgcttgactgga

SEQ ID NO: 1213 - DNA, 40 bp, Artificial Sequence
  Synthetic Oligonucleotide
tattcgacagtcacatcaactatgatgacgcttgactgga

SEQ ID NO: 1214 - DNA, 40 bp, Artificial Sequence
  Synthetic Oligonucleotide
tatgtacgtcctataccgcctcgatcagcgctttcgtcat

SEQ ID NO: 1215 - DNA, 40 bp, Artificial Sequence
  Synthetic Oligonucleotide
tatgggggcttttaagcacttccgtgacttgggcagttac

SEQ ID NO: 1216 - DNA, 40 bp, Artificial Sequence
  Synthetic Oligonucleotide
tatggggcttttaagctactctcgatacttgggcagttac

SEQ ID NO: 1217 - DNA, 40 bp, Artificial Sequence
  Synthetic Oligonucleotide
tatggggcttttaagcacttctggtaacttgagcagttac

SEQ ID NO: 1218 - DNA, 40 bp, Artificial Sequence
  Synthetic Oligonucleotide
tatggggctttagtcacttctcggtaacttgggcagttac

SEQ ID NO: 1219 - DNA, 40 bp, Artificial Sequence
  Synthetic Oligonucleotide
tatggggctttacagacttctcggtaacttgggcagttac

SEQ ID NO: 1220 - DNA, 40 bp, Artificial Sequence
  Synthetic Oligonucleotide
tatggggctttaagcacttctcggtgacttgggcagttac

SEQ ID NO: 1221 - DNA, 40 bp, Artificial Sequence
  Synthetic Oligonucleotide
tatggggctttaagcacttctcggtaacttgggtagttac

SEQ ID NO: 1222 - DNA, 40 bp, Artificial Sequence
  Synthetic Oligonucleotide
tatggggctttaagcacttctcggtaacttgggcagctac

SEQ ID NO: 1223 - DNA, 40 bp, Artificial Sequence
  Synthetic Oligonucleotide
tatggggctttaagcacttctcggtaacttaggcagttac

SEQ ID NO: 1224 - DNA, 40 bp, Artificial Sequence
  Synthetic Oligonucleotide
tatggggctttaagcacttctcggtaactcgggcagttac

SEQ ID NO: 1225 - DNA, 40 bp, Artificial Sequence
  Synthetic Oligonucleotide
tatggggctttaagcacttctcggtaacctgggcagttac

SEQ ID NO: 1226 - DNA, 40 bp, Artificial Sequence
  Synthetic Oligonucleotide
tatggggctttaagcacttctcggcaacttgggcagttac

SEQ ID NO: 1227 - DNA, 40 bp, Artificial Sequence
  Synthetic Oligonucleotide
tatggggcttctaagcacttctggtaacttgggcagttac

SEQ ID NO: 1228 - DNA, 40 bp, Artificial Sequence
  Synthetic Oligonucleotide
tatggggcttcaagcacttctcggtaacttgggcagttac

SEQ ID NO: 1229 - DNA, 40 bp, Artificial Sequence
  Synthetic Oligonucleotide
tatgggcttttgagcacttctcggtaacttgggcagttac

SEQ ID NO: 1230 - DNA, 40 bp, Artificial Sequence
  Synthetic Oligonucleotide
tatgggcttttaagcgacttctcggtaacttggcagttac

SEQ ID NO: 1231 - DNA, 40 bp, Artificial Sequence
  Synthetic Oligonucleotide
tatgggcttttaagcacttctcgttaacttgggcagttac

SEQ ID NO: 1232 - DNA, 40 bp, Artificial Sequence
  Synthetic Oligonucleotide
tatgggcttttaagcacttctcggttacttgggcagttac

SEQ ID NO: 1233 - DNA, 40 bp, Artificial Sequence
  Synthetic Oligonucleotide
tatgggcttttaagcacttctcggcaacttgggcagttac

SEQ ID NO: 1234 - DNA, 40 bp, Artificial Sequence
  Synthetic Oligonucleotide
tatgggctttagagcacttctcggtaacttgggcagttac

SEQ ID NO: 1235 - DNA, 40 bp, Artificial Sequence
  Synthetic Oligonucleotide
tatgggctttaagctacttctcggtaacttggcaagttac

SEQ ID NO: 1236 - DNA, 40 bp, Artificial Sequence
  Synthetic Oligonucleotide
tatgggctttaagcactttctcgggtaacttggcagttac

SEQ ID NO: 1237 - DNA, 40 bp, Artificial Sequence
  Synthetic Oligonucleotide
tatgggctttaagcacttctcgtaacttgggcagttaccc

SEQ ID NO: 1238 - DNA, 40 bp, Artificial Sequence
  Synthetic Oligonucleotide
tatgggctttaagcacttctcggtaacttgggtcagttac

SEQ ID NO: 1239 - DNA, 40 bp, Artificial Sequence
  Synthetic Oligonucleotide
tatgggctttaagcacttctcggtaacttgggcgagttac

SEQ ID NO: 1240 - DNA, 40 bp, Artificial Sequence
  Synthetic Oligonucleotide
tatgggctttaagcacttctcggtaacttgggacagttac

SEQ ID NO: 1241 - DNA, 40 bp, Artificial Sequence
  Synthetic Oligonucleotide
tatgggctttaagcacttctcggtaacttcgggcagttac

SEQ ID NO: 1242 - DNA, 40 bp, Artificial Sequence
  Synthetic Oligonucleotide
tatgggctttaagcacttctcgggtaacattggcagttac

SEQ ID NO: 1243 - DNA, 40 bp, Artificial Sequence
  Synthetic Oligonucleotide
tatgggctttaagcacttcctcggtaacttgggcagttac

SEQ ID NO: 1244 - DNA, 40 bp, Artificial Sequence
  Synthetic Oligonucleotide
tatgggctttaagcaccttctcggtaacttgggcagttac

SEQ ID NO: 1245 - DNA, 40 bp, Artificial Sequence
  Synthetic Oligonucleotide
tatgggctttaacgcacttctcggtacttgggccagttac

SEQ ID NO: 1246 - DNA, 40 bp, Artificial Sequence
  Synthetic Oligonucleotide
tatgggctttaacgcacttctcggtaacttgggcagttac

SEQ ID NO: 1247 - DNA, 40 bp, Artificial Sequence
  Synthetic Oligonucleotide
tatgggctttaaagcactttctcgggtaactggcagttac

SEQ ID NO: 1248 - DNA, 40 bp, Artificial Sequence
  Synthetic Oligonucleotide
tatgggctcttaagcacttctcggtaacttgggcagttac

SEQ ID NO: 1249 - DNA, 40 bp, Artificial Sequence
  Synthetic Oligonucleotide
tatgggcgtttaaagcactttctgggatacctggcagtac

SEQ ID NO: 1250 - DNA, 40 bp, Artificial Sequence
  Synthetic Oligonucleotide
tatgggccttttaagcacttctcggtaacttggcagttac

SEQ ID NO: 1251 - DNA, 40 bp, Artificial Sequence
  Synthetic Oligonucleotide
tatgcttactgggaagttgtatgtcccttttaacgtaacg

SEQ ID NO: 1252 - DNA, 40 bp, Artificial Sequence
  Synthetic Oligonucleotide
tatgaggctttaagcacttctcggtaacttgggcagttac

SEQ ID NO: 1253 - DNA, 40 bp, Artificial Sequence
  Synthetic Oligonucleotide
tatgaagcctgtctttaatctcggcagagtgctcatgagc

SEQ ID NO: 1254 - DNA, 40 bp, Artificial Sequence
  Synthetic Oligonucleotide
tatcttactgggaagttgtatgtccccttttaacgtaacg

SEQ ID NO: 1255 - DNA, 40 bp, Artificial Sequence
  Synthetic Oligonucleotide
tatcgcctagtcacatcaactatgatgacgcttgactgga

SEQ ID NO: 1256 - DNA, 40 bp, Artificial Sequence
  Synthetic Oligonucleotide
tataagcctgtcttttgatctcggcagagtgctcatgagc

SEQ ID NO: 1257 - DNA, 40 bp, Artificial Sequence
  Synthetic Oligonucleotide
tataagcctgtcttttaatctcggcagagtactcatgagc

SEQ ID NO: 1258 - DNA, 40 bp, Artificial Sequence
  Synthetic Oligonucleotide
tataagcctgtcttttaatctcggcagagcgctcatgagc

SEQ ID NO: 1259 - DNA, 40 bp, Artificial Sequence
  Synthetic Oligonucleotide
tataagcctgtcttttaatctcggcaaagtgctcatgagc

SEQ ID NO: 1260 - DNA, 40 bp, Artificial Sequence
  Synthetic Oligonucleotide
tataagcctgtcttttaatcccggcagagtgctcatgagc

SEQ ID NO: 1261 - DNA, 40 bp, Artificial Sequence
  Synthetic Oligonucleotide
tataagcctgtctttaatctcggcagtagtgctcatgagc

SEQ ID NO: 1262 - DNA, 40 bp, Artificial Sequence
  Synthetic Oligonucleotide
tataagcctgtctttaatctcggcagagtcgctcatgagc

SEQ ID NO: 1263 - DNA, 40 bp, Artificial Sequence
  Synthetic Oligonucleotide
tataagccctgtcttttaatctcgcagagtgctcatgagc

SEQ ID NO: 1264 - DNA, 40 bp, Artificial Sequence
  Synthetic Oligonucleotide
tagtcgatccgtactttcgggcgctatcctgatcacccga

SEQ ID NO: 1265 - DNA, 40 bp, Artificial Sequence
  Synthetic Oligonucleotide
tagggtatccatgaaggactaccttcttactggagacttg

SEQ ID NO: 1266 - DNA, 40 bp, Artificial Sequence
  Synthetic Oligonucleotide
taggcgcttttaagcacttctcggtaacttgggcagttac

SEQ ID NO: 1267 - DNA, 40 bp, Artificial Sequence
  Synthetic Oligonucleotide
tactatgatcctccgggccgcgtcgaatcctaatagtctg

SEQ ID NO: 1268 - DNA, 40 bp, Artificial Sequence
  Synthetic Oligonucleotide
tactatccgcttgtccgtcctcttgtggtattgcgcatgc

SEQ ID NO: 1269 - DNA, 40 bp, Artificial Sequence
  Synthetic Oligonucleotide
tacgttgaatgttatccgccttgcttccgtccctaagctg

SEQ ID NO: 1270 - DNA, 40 bp, Artificial Sequence
  Synthetic Oligonucleotide
tacgcgtacgccttgtccccagcctaggctaaatacacgt

SEQ ID NO: 1271 - DNA, 40 bp, Artificial Sequence
  Synthetic Oligonucleotide
tacgaaacgctattttctgggaagccgcgtctcgagcgaa

SEQ ID NO: 1272 - DNA, 40 bp, Artificial Sequence
  Synthetic Oligonucleotide
tacctccaccgcctcgtaagcccgggcacttacctctgta

SEQ ID NO: 1273 - DNA, 40 bp, Artificial Sequence
  Synthetic Oligonucleotide
taccggcactggaggcgtccttggtggactaccaccttgt

SEQ ID NO: 1274 - DNA, 40 bp, Artificial Sequence
  Synthetic Oligonucleotide
taccggcaccggaggcgtccttggtggactaccaccttat

SEQ ID NO: 1275 - DNA, 40 bp, Artificial Sequence
  Synthetic Oligonucleotide
taccgcctcatctatcggacacgacgtgtatcagttgctg

SEQ ID NO: 1276 - DNA, 40 bp, Artificial Sequence
  Synthetic Oligonucleotide
taccgcctcatcatcggtcacgacgtgtatcagttggctg

SEQ ID NO: 1277 - DNA, 40 bp, Artificial Sequence
  Synthetic Oligonucleotide
taccgcctcatcatcggatacgacgtgtatcagttggctg

SEQ ID NO: 1278 - DNA, 40 bp, Artificial Sequence
  Synthetic Oligonucleotide
taccgcctcatcatcggacacgtacgtgtatcagttgctg

SEQ ID NO: 1279 - DNA, 40 bp, Artificial Sequence
  Synthetic Oligonucleotide
taccgcctcatcatcggacacgacgtgtatgagttggctg

SEQ ID NO: 1280 - DNA, 40 bp, Artificial Sequence
  Synthetic Oligonucleotide
taccgcctcatcatcggacacgacgtgtatcagttggcag

SEQ ID NO: 1281 - DNA, 40 bp, Artificial Sequence
  Synthetic Oligonucleotide
taccgcctcatcatcggacacgacgtgtatcagttgcgtg

SEQ ID NO: 1282 - DNA, 40 bp, Artificial Sequence
  Synthetic Oligonucleotide
taccgcctcactcatcggacacgacgtgtatcagttgctg

SEQ ID NO: 1283 - DNA, 40 bp, Artificial Sequence
  Synthetic Oligonucleotide
taccgcctcaacatcggacacgacgtgtatcagttggctg

SEQ ID NO: 1284 - DNA, 40 bp, Artificial Sequence
  Synthetic Oligonucleotide
taccgcctaatcatcggacacgacgtgtatcagttggctg

SEQ ID NO: 1285 - DNA, 40 bp, Artificial Sequence
  Synthetic Oligonucleotide
tacccgcctcgaaagcatgctgttatctcggatgtgtaca

SEQ ID NO: 1286 - DNA, 40 bp, Artificial Sequence
  Synthetic Oligonucleotide
taccacctcatcatcggacacgacgtgtatcagttggctg

SEQ ID NO: 1287 - DNA, 40 bp, Artificial Sequence
  Synthetic Oligonucleotide
taataggccgggtcccgcggactaccgcggttttatgcgt

SEQ ID NO: 1288 - DNA, 40 bp, Artificial Sequence
  Synthetic Oligonucleotide
taagagtgcacggtactgcctcgatcctccatggcttaag

SEQ ID NO: 1289 - DNA, 40 bp, Artificial Sequence
  Synthetic Oligonucleotide
gttgtatgcaaacttacaccccgattgctctgagctcctg

SEQ ID NO: 1290 - DNA, 40 bp, Artificial Sequence
  Synthetic Oligonucleotide
gttctcgcttctgtcctcatggttcgaaccggtatgcatg

SEQ ID NO: 1291 - DNA, 40 bp, Artificial Sequence
  Synthetic Oligonucleotide
gttctcgccttctgtcctcatgttcgaaccggtatgcatg

SEQ ID NO: 1292 - DNA, 40 bp, Artificial Sequence
  Synthetic Oligonucleotide
gttctcgcctctgtcctccatgttcgaaccggtatgcatg

SEQ ID NO: 1293 - DNA, 40 bp, Artificial Sequence
  Synthetic Oligonucleotide
gttctcgcctctgtcctcatggttcgaatcggtatgcatg

SEQ ID NO: 1294 - DNA, 40 bp, Artificial Sequence
  Synthetic Oligonucleotide
gttctcgcctctgtcctcatggttcgaaccgatatgcatg

SEQ ID NO: 1295 - DNA, 40 bp, Artificial Sequence
  Synthetic Oligonucleotide
gttctcgcctctgtcctcatggtgcgaaccggtatgcatg

SEQ ID NO: 1296 - DNA, 40 bp, Artificial Sequence
  Synthetic Oligonucleotide
gttctcgcctctgtcctcatggtacgaaccggtatgcatg

SEQ ID NO: 1297 - DNA, 40 bp, Artificial Sequence
  Synthetic Oligonucleotide
gttcccgcctctgtcctcatggttcgaaccggtatgcatg

SEQ ID NO: 1298 - DNA, 40 bp, Artificial Sequence
  Synthetic Oligonucleotide
gttcatggtacgcctcgattccgcccatacatgcatgtaa

SEQ ID NO: 1299 - DNA, 40 bp, Artificial Sequence
  Synthetic Oligonucleotide
gtggtttcttctcctgactacatgagattaataaacgcgc

SEQ ID NO: 1300 - DNA, 40 bp, Artificial Sequence
  Synthetic Oligonucleotide
gtgatcatataaagccggcttgctcgcctcggtcctccat

SEQ ID NO: 1301 - DNA, 40 bp, Artificial Sequence
  Synthetic Oligonucleotide
gtctcgggtccgttgtttaccgcttcgctccggcccagta

SEQ ID NO: 1302 - DNA, 40 bp, Artificial Sequence
  Synthetic Oligonucleotide
gtcgtacttaccaccctgacatcgcggggaactagtggtt

SEQ ID NO: 1303 - DNA, 40 bp, Artificial Sequence
  Synthetic Oligonucleotide
gtcgcatgggtcggttttggtgggggactacccccttgta

SEQ ID NO: 1304 - DNA, 40 bp, Artificial Sequence
  Synthetic Oligonucleotide
gtcctgaacgcctcgatcctcgcataatatgatacgtctg

SEQ ID NO: 1305 - DNA, 40 bp, Artificial Sequence
  Synthetic Oligonucleotide
gtccgttctcgtataattcaggatggcttattatctagct

SEQ ID NO: 1306 - DNA, 40 bp, Artificial Sequence
  Synthetic Oligonucleotide
gtccggaacgcctcgattcctcgcatatatgatacgtctg

SEQ ID NO: 1307 - DNA, 40 bp, Artificial Sequence
  Synthetic Oligonucleotide
gtccggaacgcctcgatcctcgcataatctgatacgtctg

SEQ ID NO: 1308 - DNA, 40 bp, Artificial Sequence
  Synthetic Oligonucleotide
gtccggaacgcctcgatcctcgcataatatgatacttctg

SEQ ID NO: 1309 - DNA, 40 bp, Artificial Sequence
  Synthetic Oligonucleotide
gtccggaacgcctcgatcctcgcataatatgatacctctg

SEQ ID NO: 1310 - DNA, 40 bp, Artificial Sequence
  Synthetic Oligonucleotide
gtccggaacgcctcgatcctcgcataataagatacgtctg

SEQ ID NO: 1311 - DNA, 40 bp, Artificial Sequence
  Synthetic Oligonucleotide
gtccggaacgcctcgatcctcgcaaaatatgatacgtctg

SEQ ID NO: 1312 - DNA, 40 bp, Artificial Sequence
  Synthetic Oligonucleotide
gtccggaacgcctcgatcctcccataatatgatacgtctg

SEQ ID NO: 1313 - DNA, 40 bp, Artificial Sequence
  Synthetic Oligonucleotide
gtccggaacgcctcgatcctagcataatatgatacgtctg

SEQ ID NO: 1314 - DNA, 40 bp, Artificial Sequence
  Synthetic Oligonucleotide
gtccggaacgccctgatcctcgcataatatgatacgtctg

SEQ ID NO: 1315 - DNA, 40 bp, Artificial Sequence
  Synthetic Oligonucleotide
gtccggaaagcctcgatcctcgcataatatgatacgtctg

SEQ ID NO: 1316 - DNA, 40 bp, Artificial Sequence
  Synthetic Oligonucleotide
gtccgagacgcctcgatcctcgcataatatgatacgtctg

SEQ ID NO: 1317 - DNA, 40 bp, Artificial Sequence
  Synthetic Oligonucleotide
gtccatgtacgcctcgattccgcccatacaatgcatgtaa

SEQ ID NO: 1318 - DNA, 40 bp, Artificial Sequence
  Synthetic Oligonucleotide
gtccatggtacgcctcgattccgcccatagatgcatgtaa

SEQ ID NO: 1319 - DNA, 40 bp, Artificial Sequence
  Synthetic Oligonucleotide
gtccatggtacgcctcgattccgcccatacatgtatgtaa

SEQ ID NO: 1320 - DNA, 40 bp, Artificial Sequence
  Synthetic Oligonucleotide
gtccatggtacgcctcgattccgcccatacatgcatgtac

SEQ ID NO: 1321 - DNA, 40 bp, Artificial Sequence
  Synthetic Oligonucleotide
gtccatggtacgcctcgattccgcccatacatgcatggaa

SEQ ID NO: 1322 - DNA, 40 bp, Artificial Sequence
  Synthetic Oligonucleotide
gtccatggtacgcctcgattccgcccatacatgcatataa

SEQ ID NO: 1323 - DNA, 40 bp, Artificial Sequence
  Synthetic Oligonucleotide
gtccatggtacgcctcgattccgcccacgcatgcatgtaa

SEQ ID NO: 1324 - DNA, 40 bp, Artificial Sequence
  Synthetic Oligonucleotide
gtccatggtacgcctcgattccgcccaaacatgcatgtaa

SEQ ID NO: 1325 - DNA, 40 bp, Artificial Sequence
  Synthetic Oligonucleotide
gtccatggtacgcctcgattccgccatcacatgcatgtaa

SEQ ID NO: 1326 - DNA, 40 bp, Artificial Sequence
  Synthetic Oligonucleotide
gtccatggtacgcctcgattccgccatacatgacatgtaa

SEQ ID NO: 1327 - DNA, 40 bp, Artificial Sequence
  Synthetic Oligonucleotide
gtccatggtacgcctccgattccgccatacatgcatgtaa

SEQ ID NO: 1328 - DNA, 40 bp, Artificial Sequence
  Synthetic Oligonucleotide
gtccatgggacgcctcgattccgcccatacatgcatgtaa

SEQ ID NO: 1329 - DNA, 40 bp, Artificial Sequence
  Synthetic Oligonucleotide
gtccatggaacgcctcgattccgcccatacatgcatgtaa

SEQ ID NO: 1330 - DNA, 40 bp, Artificial Sequence
  Synthetic Oligonucleotide
gtccatgatacgcctcgattccgcccatacatgcatgtaa

SEQ ID NO: 1331 - DNA, 40 bp, Artificial Sequence
  Synthetic Oligonucleotide
gtcaatgtccttcatgcatcacgcatcccctcgcaggatt

SEQ ID NO: 1332 - DNA, 40 bp, Artificial Sequence
  Synthetic Oligonucleotide
gtcaatggtacgcctcgattccgcccatacatgcatgtaa

SEQ ID NO: 1333 - DNA, 40 bp, Artificial Sequence
  Synthetic Oligonucleotide
gtatgggctttaagctacttctcggtaacttggcagttac

SEQ ID NO: 1334 - DNA, 40 bp, Artificial Sequence
  Synthetic Oligonucleotide
gtaggtgcgtaccctctttagccgcctctgaagattgaat

SEQ ID NO: 1335 - DNA, 40 bp, Artificial Sequence
  Synthetic Oligonucleotide
gtaataacctcccgttactcgcctcgggcaagtgtgcgca

SEQ ID NO: 1336 - DNA, 40 bp, Artificial Sequence
  Synthetic Oligonucleotide
ggtgatcctccccccccgctcgaagatttgtgcacatatc

SEQ ID NO: 1337 - DNA, 40 bp, Artificial Sequence
  Synthetic Oligonucleotide
ggtccctgtgtcttattgccacagacgttcagtgcccccg

SEQ ID NO: 1338 - DNA, 40 bp, Artificial Sequence
  Synthetic Oligonucleotide
ggcgaaacgctattttctgggaagccgcatctcgagcgaa

SEQ ID NO: 1339 - DNA, 40 bp, Artificial Sequence
  Synthetic Oligonucleotide
ggccttctttaccttttgagcgctatctcaatctctggta

SEQ ID NO: 1340 - DNA, 40 bp, Artificial Sequence
  Synthetic Oligonucleotide
ggccatggtacgcctcgattccgcccatacatgcatgtaa

SEQ ID NO: 1341 - DNA, 40 bp, Artificial Sequence
  Synthetic Oligonucleotide
ggacatgtgttggtcatccaagactacttggttcacggcc

SEQ ID NO: 1342 - DNA, 40 bp, Artificial Sequence
  Synthetic Oligonucleotide
gctgacgtttcacgcacgcggattgtacccgaactgggtt

SEQ ID NO: 1343 - DNA, 40 bp, Artificial Sequence
  Synthetic Oligonucleotide
gctaggcttttacgcacgcggattgtacccgaactgggtt

SEQ ID NO: 1344 - DNA, 40 bp, Artificial Sequence
  Synthetic Oligonucleotide
gctaggctttcacgcacgcggattgtactcgaactgggtt

SEQ ID NO: 1345 - DNA, 40 bp, Artificial Sequence
  Synthetic Oligonucleotide
gctaggctttcacgcacgcggattgtacccgaactgggct

SEQ ID NO: 1346 - DNA, 40 bp, Artificial Sequence
  Synthetic Oligonucleotide
gctaggctttcacgcacgcggactgtacccgagctgggtt

SEQ ID NO: 1347 - DNA, 40 bp, Artificial Sequence
  Synthetic Oligonucleotide
gctaggccttcacgcacgcggattgtacccgaactgggtt

SEQ ID NO: 1348 - DNA, 40 bp, Artificial Sequence
  Synthetic Oligonucleotide
gctaccttcgtccagcggagtcatccggtggccttaagca

SEQ ID NO: 1349 - DNA, 40 bp, Artificial Sequence
  Synthetic Oligonucleotide
gcgtttcttctcctgactacattgagattaataaacgcgc

SEQ ID NO: 1350 - DNA, 40 bp, Artificial Sequence
  Synthetic Oligonucleotide
gcgtgatcagctagtcgtgctttgtccgctatgacattca

SEQ ID NO: 1351 - DNA, 40 bp, Artificial Sequence
  Synthetic Oligonucleotide
gcggtttcttctcctgactacgtgagattaataaacgcgc

SEQ ID NO: 1352 - DNA, 40 bp, Artificial Sequence
  Synthetic Oligonucleotide
gcggtttcttctcctgactacatgagattgataaacgcgc

SEQ ID NO: 1353 - DNA, 40 bp, Artificial Sequence
  Synthetic Oligonucleotide
gcggtttcttctcctgactacatgagattagtaaacgcgc

SEQ ID NO: 1354 - DNA, 40 bp, Artificial Sequence
  Synthetic Oligonucleotide
gcggtttcttctcctgactacatgagattaataagcgcgc

SEQ ID NO: 1355 - DNA, 40 bp, Artificial Sequence
  Synthetic Oligonucleotide
gcggtttcttctcctgactacatgagattaataaacgcgg

SEQ ID NO: 1356 - DNA, 40 bp, Artificial Sequence
  Synthetic Oligonucleotide
gcggtttcttctcctgactacatgagattaataaacgcac

SEQ ID NO: 1357 - DNA, 40 bp, Artificial Sequence
  Synthetic Oligonucleotide
gcggtttcttctcctgactacatgagattaacaaacgcgc

SEQ ID NO: 1358 - DNA, 40 bp, Artificial Sequence
  Synthetic Oligonucleotide
gcggtttcttctcctgactacatgagactaataaacgcgc

SEQ ID NO: 1359 - DNA, 40 bp, Artificial Sequence
  Synthetic Oligonucleotide
gcggtttcttctcctgactacacgagattaataaacgcgc

SEQ ID NO: 1360 - DNA, 40 bp, Artificial Sequence
  Synthetic Oligonucleotide
gcggtttcttctcctgaccacatgagattaataaacgcgc

SEQ ID NO: 1361 - DNA, 40 bp, Artificial Sequence
  Synthetic Oligonucleotide
gcggtttctcctcctgactacatgagattaataaacgcgc

SEQ ID NO: 1362 - DNA, 40 bp, Artificial Sequence
  Synthetic Oligonucleotide
gcggttcttctcctcgactacatgagattaataaacgcgc

SEQ ID NO: 1363 - DNA, 40 bp, Artificial Sequence
  Synthetic Oligonucleotide
gccgctatgctctgtgtagatcggactcctattaaggatc

SEQ ID NO: 1364 - DNA, 40 bp, Artificial Sequence
  Synthetic Oligonucleotide
gccctatcttgacgtctcttcggggactaccccgattctg

SEQ ID NO: 1365 - DNA, 40 bp, Artificial Sequence
  Synthetic Oligonucleotide
gcccggcctctgtacctctctttgcacgtgcatgttgttg

SEQ ID NO: 1366 - DNA, 40 bp, Artificial Sequence
  Synthetic Oligonucleotide
gcccgctgcctctattcgtctgatgatgtgcacctcgagt

SEQ ID NO: 1367 - DNA, 40 bp, Artificial Sequence
  Synthetic Oligonucleotide
gcccgcctcatcatcggacacgacgtgtatcagttggctg

SEQ ID NO: 1368 - DNA, 40 bp, Artificial Sequence
  Synthetic Oligonucleotide
gcccgcctcagtaatctcctaatggtccagtatgtacata

SEQ ID NO: 1369 - DNA, 40 bp, Artificial Sequence
  Synthetic Oligonucleotide
gccacatgggtcggttttggtgggggactacccccttgta

SEQ ID NO: 1370 - DNA, 40 bp, Artificial Sequence
  Synthetic Oligonucleotide
gcataggcttcacgcacgcggattgtaaccgaactgggtt

SEQ ID NO: 1371 - DNA, 40 bp, Artificial Sequence
  Synthetic Oligonucleotide
gcagaataaattcctcccactgctcgcctcgcatgctgta

SEQ ID NO: 1372 - DNA, 40 bp, Artificial Sequence
  Synthetic Oligonucleotide
gcactattccggccttcaccgtcctcgatacggacgaatg

SEQ ID NO: 1373 - DNA, 40 bp, Artificial Sequence
  Synthetic Oligonucleotide
gcactattccggccttcaccgtcctcaatacggacgaatg

SEQ ID NO: 1374 - DNA, 40 bp, Artificial Sequence
  Synthetic Oligonucleotide
gatcggcgtcgagtaactctatactgcactatcagtttgt

SEQ ID NO: 1375 - DNA, 40 bp, Artificial Sequence
  Synthetic Oligonucleotide
gatcctactgccctccttacaacggttgttaatggacgca

SEQ ID NO: 1376 - DNA, 40 bp, Artificial Sequence
  Synthetic Oligonucleotide
gatccggacgcctcgatcctcgcataatatgatacgtctg

SEQ ID NO: 1377 - DNA, 40 bp, Artificial Sequence
  Synthetic Oligonucleotide
gatccggaacgcctcgatcctcgcatatatgatacgtctg

SEQ ID NO: 1378 - DNA, 40 bp, Artificial Sequence
  Synthetic Oligonucleotide
gatccatggtacgcctcgattccgccatacatgcatgtaa

SEQ ID NO: 1379 - DNA, 40 bp, Artificial Sequence
  Synthetic Oligonucleotide
gatcacgctgcctttcgtttaaggcctttatacaaacgca

SEQ ID NO: 1380 - DNA, 40 bp, Artificial Sequence
  Synthetic Oligonucleotide
gatcacgctgccctttgtttgaggcctttatacaaacgca

SEQ ID NO: 1381 - DNA, 40 bp, Artificial Sequence
  Synthetic Oligonucleotide
gatcacgctgccctttgtttaaggcctttatataaacgca

SEQ ID NO: 1382 - DNA, 40 bp, Artificial Sequence
  Synthetic Oligonucleotide
gatcacgctgccctttgtttaaggcctttatacaaacgcg

SEQ ID NO: 1383 - DNA, 40 bp, Artificial Sequence
  Synthetic Oligonucleotide
gatcacgctgccctttgtttaaggccttgatacaaacgca

SEQ ID NO: 1384 - DNA, 40 bp, Artificial Sequence
  Synthetic Oligonucleotide
gatcacgctgccctttgtttaaggccttcatacaaacgca

SEQ ID NO: 1385 - DNA, 40 bp, Artificial Sequence
  Synthetic Oligonucleotide
gatcacgctgccctttgtttaaggcatttatacaaacgca

SEQ ID NO: 1386 - DNA, 40 bp, Artificial Sequence
  Synthetic Oligonucleotide
gatcacgctgccctttgtttaagacctttatacaaacgca

SEQ ID NO: 1387 - DNA, 40 bp, Artificial Sequence
  Synthetic Oligonucleotide
gatcacgctgccctttgttaaggtcctttatacaaacgca

SEQ ID NO: 1388 - DNA, 40 bp, Artificial Sequence
  Synthetic Oligonucleotide
gatcacgctgccctttgtgtaaggcctttatacaaacgca

SEQ ID NO: 1389 - DNA, 40 bp, Artificial Sequence
  Synthetic Oligonucleotide
gatcacgctgccctttgtctaaggcctttatacgaacgca

SEQ ID NO: 1390 - DNA, 40 bp, Artificial Sequence
  Synthetic Oligonucleotide
gatcacgctgccctttgtctaaggcctttatacaaacgca

SEQ ID NO: 1391 - DNA, 40 bp, Artificial Sequence
  Synthetic Oligonucleotide
gatcacgctgccctttcgttaaggcctttatacaaacgca

SEQ ID NO: 1392 - DNA, 40 bp, Artificial Sequence
  Synthetic Oligonucleotide
gatcacgctgccctttatttaaggcctttatacaaacgca

SEQ ID NO: 1393 - DNA, 40 bp, Artificial Sequence
  Synthetic Oligonucleotide
gatcacgctgcccttcgtttaaggcctttatacaaacgca

SEQ ID NO: 1394 - DNA, 40 bp, Artificial Sequence
  Synthetic Oligonucleotide
gatcacgctgccccttgtttaaggcctttatacaaacgca

SEQ ID NO: 1395 - DNA, 40 bp, Artificial Sequence
  Synthetic Oligonucleotide
gatatctttatccgcccctctgcatggtgggcctacatcg

SEQ ID NO: 1396 - DNA, 40 bp, Artificial Sequence
  Synthetic Oligonucleotide
gagatctcgggtctggcgtactacttggacaggttccttc

SEQ ID NO: 1397 - DNA, 40 bp, Artificial Sequence
  Synthetic Oligonucleotide
gagatctcggatctagcgtactacttggacaggttccttc

SEQ ID NO: 1398 - DNA, 40 bp, Artificial Sequence
  Synthetic Oligonucleotide
gagatcccggatctggcgtactacttggacaggttccttc

SEQ ID NO: 1399 - DNA, 40 bp, Artificial Sequence
  Synthetic Oligonucleotide
gactaggcttcacgcacgcggattgtacccgaactgggtt

SEQ ID NO: 1400 - DNA, 40 bp, Artificial Sequence
  Synthetic Oligonucleotide
gactactcgcatcgagcgttgtcaagctgagtgcaagtta

SEQ ID NO: 1401 - DNA, 40 bp, Artificial Sequence
  Synthetic Oligonucleotide
gaccacgctgccctttgtttaaggcctttatacaaacgca

SEQ ID NO: 1402 - DNA, 40 bp, Artificial Sequence
  Synthetic Oligonucleotide
gacatgtacgccttggtcacttccaacaaacctaggttaa

SEQ ID NO: 1403 - DNA, 40 bp, Artificial Sequence
  Synthetic Oligonucleotide
gaattagtactgacggccgccttgatcctccgctagtctg

SEQ ID NO: 1404 - DNA, 40 bp, Artificial Sequence
  Synthetic Oligonucleotide
gaattagtactgacggccgccctgatcctccgttagtctg

SEQ ID NO: 1405 - DNA, 40 bp, Artificial Sequence
  Synthetic Oligonucleotide
gaactggatcctcgcctccgtactacgtggatttagattt

SEQ ID NO: 1406 - DNA, 40 bp, Artificial Sequence
  Synthetic Oligonucleotide
gaactggatcctcgcctccatactacgtggatttaggttt

SEQ ID NO: 1407 - DNA, 40 bp, Artificial Sequence
  Synthetic Oligonucleotide
gaaccggggcccgcctcaagctagctacctctattgtctg

SEQ ID NO: 1408 - DNA, 40 bp, Artificial Sequence
  Synthetic Oligonucleotide
cttggacgtccaactgctgcctcgactcctccatcggata

SEQ ID NO: 1409 - DNA, 40 bp, Artificial Sequence
  Synthetic Oligonucleotide
cttagttgatttcgccgcccctctgtttagtggccattga

SEQ ID NO: 1410 - DNA, 40 bp, Artificial Sequence
  Synthetic Oligonucleotide
cttagtgatttcgccgcccctctgtttagtggccattaga

SEQ ID NO: 1411 - DNA, 40 bp, Artificial Sequence
  Synthetic Oligonucleotide
ctgcctcggtgatcctcaatcctcctggatatatatcata

SEQ ID NO: 1412 - DNA, 40 bp, Artificial Sequence
  Synthetic Oligonucleotide
ctctttatccggcaggactctttcgtgcactatcacgatt

SEQ ID NO: 1413 - DNA, 40 bp, Artificial Sequence
  Synthetic Oligonucleotide
ctcttctccggcaggacgtctttcgtgcactatcacgatt

SEQ ID NO: 1414 - DNA, 40 bp, Artificial Sequence
  Synthetic Oligonucleotide
ctcttatccggtcaggacgtcttcgtgcactatcacgatt

SEQ ID NO: 1415 - DNA, 40 bp, Artificial Sequence
  Synthetic Oligonucleotide
ctcttatccggtcagacgtctttcgtgcactatcacgatt

SEQ ID NO: 1416 - DNA, 40 bp, Artificial Sequence
  Synthetic Oligonucleotide
ctcttatccgggaggacgtctttcgtgcactatcacgatt

SEQ ID NO: 1417 - DNA, 40 bp, Artificial Sequence
  Synthetic Oligonucleotide
ctcttatccggcatgacgtctttcgtgcactatcacgatt

SEQ ID NO: 1418 - DNA, 40 bp, Artificial Sequence
  Synthetic Oligonucleotide
ctcttatccggcaggcagtctttcgtgcactatcacgatt

SEQ ID NO: 1419 - DNA, 40 bp, Artificial Sequence
  Synthetic Oligonucleotide
ctcttatccggcaggacttctttcgtgcactatcacgatt

SEQ ID NO: 1420 - DNA, 40 bp, Artificial Sequence
  Synthetic Oligonucleotide
ctcttatccggcaggacgtttttcgtgcactatcacgatt

SEQ ID NO: 1421 - DNA, 40 bp, Artificial Sequence
  Synthetic Oligonucleotide
ctcttatccggcaggacgtctttcgtgcactatctcgatt

SEQ ID NO: 1422 - DNA, 40 bp, Artificial Sequence
  Synthetic Oligonucleotide
ctcttatccggcaggacgtctttcgtgcaatatcacgatt

SEQ ID NO: 1423 - DNA, 40 bp, Artificial Sequence
  Synthetic Oligonucleotide
ctcttatccggcaggacgtcttacgtgcactatcacgatt

SEQ ID NO: 1424 - DNA, 40 bp, Artificial Sequence
  Synthetic Oligonucleotide
ctcttatccggcaggacgtctatcgtgcactatcacgatt

SEQ ID NO: 1425 - DNA, 40 bp, Artificial Sequence
  Synthetic Oligonucleotide
ctcttatccggcaagacgtctttcgtgcactatcacgatt

SEQ ID NO: 1426 - DNA, 40 bp, Artificial Sequence
  Synthetic Oligonucleotide
ctcttatccgcaggacgtctttacgtgcactatcacgatt

SEQ ID NO: 1427 - DNA, 40 bp, Artificial Sequence
  Synthetic Oligonucleotide
ctcttacgccgcaggacgtctttcgtgcactatcacgatt

SEQ ID NO: 1428 - DNA, 40 bp, Artificial Sequence
  Synthetic Oligonucleotide
ctcttaccgccgaggacgtctttcgtgcactatcacgatt

SEQ ID NO: 1429 - DNA, 40 bp, Artificial Sequence
  Synthetic Oligonucleotide
ctctatccggcaggacgatctttcgtgcactatcacgatt

SEQ ID NO: 1430 - DNA, 40 bp, Artificial Sequence
  Synthetic Oligonucleotide
ctcgcaagccatgctctagacgcctcaaaaagatgatgct

SEQ ID NO: 1431 - DNA, 40 bp, Artificial Sequence
  Synthetic Oligonucleotide
ctcgagacgcctcagtacttccttgggcccaacaacagtt

SEQ ID NO: 1432 - DNA, 40 bp, Artificial Sequence
  Synthetic Oligonucleotide
ctcctttagtctttcgtctcgatgggcggtttttcgagtc

SEQ ID NO: 1433 - DNA, 40 bp, Artificial Sequence
  Synthetic Oligonucleotide
ctccttatccggcaggacgtctttcgtgcactatcacgat

SEQ ID NO: 1434 - DNA, 40 bp, Artificial Sequence
  Synthetic Oligonucleotide
ctccgtagatgcgcacttatgtgggctgcctgtgtcacac

SEQ ID NO: 1435 - DNA, 40 bp, Artificial Sequence
  Synthetic Oligonucleotide
ctagcttcctcgaagtcttcctctgctgtatccggattgg

SEQ ID NO: 1436 - DNA, 40 bp, Artificial Sequence
  Synthetic Oligonucleotide
ctacgaactagtggtctttgtgcgcttaagacccgtcgat

SEQ ID NO: 1437 - DNA, 40 bp, Artificial Sequence
  Synthetic Oligonucleotide
ctaagcccggtttgcccgcctcagttctcctacggttatt

SEQ ID NO: 1438 - DNA, 40 bp, Artificial Sequence
  Synthetic Oligonucleotide
ctaaaatcttcccgagccgcctcgaagactttgaaatgcg

SEQ ID NO: 1439 - DNA, 40 bp, Artificial Sequence
  Synthetic Oligonucleotide
cgtagatcgttcttatccgcctcggtcttccccaggttaa

SEQ ID NO: 1440 - DNA, 40 bp, Artificial Sequence
  Synthetic Oligonucleotide
cgcttatccggcaggacgtctttcgtgcactatcacgatt

SEQ ID NO: 1441 - DNA, 40 bp, Artificial Sequence
  Synthetic Oligonucleotide
cgctctggctccgaatccacgttcggttctcacatcgctg

SEQ ID NO: 1442 - DNA, 40 bp, Artificial Sequence
  Synthetic Oligonucleotide
cgctatctgtcatcgagcgagcactctgtgcgatcacaca

SEQ ID NO: 1443 - DNA, 40 bp, Artificial Sequence
  Synthetic Oligonucleotide
cgctatccgccatcgagtcgaacagtgtgccgtttcggtg

SEQ ID NO: 1444 - DNA, 40 bp, Artificial Sequence
  Synthetic Oligonucleotide
cgctatccgccatcgagcgaacagtgtgccgtttccggtg

SEQ ID NO: 1445 - DNA, 40 bp, Artificial Sequence
  Synthetic Oligonucleotide
cgctatccgccatcgagcgaacagcgtgccgttttcggtg

SEQ ID NO: 1446 - DNA, 40 bp, Artificial Sequence
  Synthetic Oligonucleotide
cgctatccgcatcgagtcgggttctcgataatatgcaaca

SEQ ID NO: 1447 - DNA, 40 bp, Artificial Sequence
  Synthetic Oligonucleotide
cgctatccgcatcgagcgggttcttcgataatgtgcaaca

SEQ ID NO: 1448 - DNA, 40 bp, Artificial Sequence
  Synthetic Oligonucleotide
cgctatccgcatcgagcgggttcttcgataatatgtaaca

SEQ ID NO: 1449 - DNA, 40 bp, Artificial Sequence
  Synthetic Oligonucleotide
cgctatccgcatcgagcgggttcctcgataatatgcaaca

SEQ ID NO: 1450 - DNA, 40 bp, Artificial Sequence
  Synthetic Oligonucleotide
cgctatccgaatcgagcttgagtgtctggttagacaacga

SEQ ID NO: 1451 - DNA, 40 bp, Artificial Sequence
  Synthetic Oligonucleotide
cgctatccgaatcgagcttgagtgtctggttaaacagcga

SEQ ID NO: 1452 - DNA, 40 bp, Artificial Sequence
  Synthetic Oligonucleotide
cgctatccgaatcgagcttgagtgtctggctaaacaacga

SEQ ID NO: 1453 - DNA, 40 bp, Artificial Sequence
  Synthetic Oligonucleotide
cgctatccgaatcgagcctgagtgtctggttaaacaacga

SEQ ID NO: 1454 - DNA, 40 bp, Artificial Sequence
  Synthetic Oligonucleotide
cgcgtcttccccgcattgccgcaattgccacacattaata

SEQ ID NO: 1455 - DNA, 40 bp, Artificial Sequence
  Synthetic Oligonucleotide
cgccttgatcctcgctttcggtgcactgactcgccttctg

SEQ ID NO: 1456 - DNA, 40 bp, Artificial Sequence
  Synthetic Oligonucleotide
cgcctcacgtcatgacctcgccctctctctcgtatgtgca

SEQ ID NO: 1457 - DNA, 40 bp, Artificial Sequence
  Synthetic Oligonucleotide
cgccgtgatcctcggagtgaactcggattgtctgtgctac

SEQ ID NO: 1458 - DNA, 40 bp, Artificial Sequence
  Synthetic Oligonucleotide
cgccggaagtccctccccgtcttgatgcactatcatctca

SEQ ID NO: 1459 - DNA, 40 bp, Artificial Sequence
  Synthetic Oligonucleotide
cgagaagtttagtgtttgtcacgcaccggccctggcactc

SEQ ID NO: 1460 - DNA, 40 bp, Artificial Sequence
  Synthetic Oligonucleotide
cgaagtccgcggtttcactagactactactgatcacgtcg

SEQ ID NO: 1461 - DNA, 40 bp, Artificial Sequence
  Synthetic Oligonucleotide
ccttccagggcccaatgccgcattatcaccctatgttctg

SEQ ID NO: 1462 - DNA, 40 bp, Artificial Sequence
  Synthetic Oligonucleotide
cctcgatacctcgctttgcatgcaaaaaactacgtatggc

SEQ ID NO: 1463 - DNA, 40 bp, Artificial Sequence
  Synthetic Oligonucleotide
ccgtggtcagctagtcgtgctttgtccgctatgacattca

SEQ ID NO: 1464 - DNA, 40 bp, Artificial Sequence
  Synthetic Oligonucleotide
ccgtgcgattcttaccaaactgccgcccctctgtgtgcac

SEQ ID NO: 1465 - DNA, 40 bp, Artificial Sequence
  Synthetic Oligonucleotide
ccgtgatcagctggtcgtgctttgtccgctatgacattca

SEQ ID NO: 1466 - DNA, 40 bp, Artificial Sequence
  Synthetic Oligonucleotide
ccgtgaccagctagtcgtgctttgtccgctatgacattca

SEQ ID NO: 1467 - DNA, 40 bp, Artificial Sequence
  Synthetic Oligonucleotide
ccgtctcggattctatacatgtataaatctgtcctgccgg

SEQ ID NO: 1468 - DNA, 40 bp, Artificial Sequence
  Synthetic Oligonucleotide
ccgtcgcgtacaaaaatcttgggacttcaatcgctggcta

SEQ ID NO: 1469 - DNA, 40 bp, Artificial Sequence
  Synthetic Oligonucleotide
ccgtcgcgtacaaaaatcttgggacttcaatcgctgacta

SEQ ID NO: 1470 - DNA, 40 bp, Artificial Sequence
  Synthetic Oligonucleotide
ccgtagccagcattcttaacttcctctgcatgatcatgta

SEQ ID NO: 1471 - DNA, 40 bp, Artificial Sequence
  Synthetic Oligonucleotide
ccgggcgttcctccggtaggcctacgtacgtgacggatta

SEQ ID NO: 1472 - DNA, 40 bp, Artificial Sequence
  Synthetic Oligonucleotide
ccgccttgtctccaaataagatgaacctaggtttatataa

SEQ ID NO: 1473 - DNA, 40 bp, Artificial Sequence
  Synthetic Oligonucleotide
ccgccttgctcctggttgacatgtcacatccacgtttggc

SEQ ID NO: 1474 - DNA, 40 bp, Artificial Sequence
  Synthetic Oligonucleotide
ccgccttgacccttcccacttgtgcacaacctcttggaaa

SEQ ID NO: 1475 - DNA, 40 bp, Artificial Sequence
  Synthetic Oligonucleotide
ccgccttgaacactgacgtcgtggaaccttcgattgctag

SEQ ID NO: 1476 - DNA, 40 bp, Artificial Sequence
  Synthetic Oligonucleotide
ccgcctctctaaccggtacggacactccctcgtttggcgc

SEQ ID NO: 1477 - DNA, 40 bp, Artificial Sequence
  Synthetic Oligonucleotide
ccgcctcgggtcgttcccaatggtggtacccctattaatg

SEQ ID NO: 1478 - DNA, 40 bp, Artificial Sequence
  Synthetic Oligonucleotide
ccgcctcggatcgctcccaatggtggtacccctattaatg

SEQ ID NO: 1479 - DNA, 40 bp, Artificial Sequence
  Synthetic Oligonucleotide
ccgcctcggacactgacgtcgtggaaccttcgattgctag

SEQ ID NO: 1480 - DNA, 40 bp, Artificial Sequence
  Synthetic Oligonucleotide
ccgcctcgatctgcagtccccgggtgcaccatgaagtttg

SEQ ID NO: 1481 - DNA, 40 bp, Artificial Sequence
  Synthetic Oligonucleotide
ccgcctcgatccttcgggttaggtacctatgcgtctgcgg

SEQ ID NO: 1482 - DNA, 40 bp, Artificial Sequence
  Synthetic Oligonucleotide
ccgcctcgacggttccctaacgcgttagccttccggaatg

SEQ ID NO: 1483 - DNA, 40 bp, Artificial Sequence
  Synthetic Oligonucleotide
ccgcctcgaacactgacgtcgtggatccttcgattgctag

SEQ ID NO: 1484 - DNA, 40 bp, Artificial Sequence
  Synthetic Oligonucleotide
ccgcctcgaacactgacgtcgtggagccttcgattgctag

SEQ ID NO: 1485 - DNA, 40 bp, Artificial Sequence
  Synthetic Oligonucleotide
ccgcctcgaacactgacgtcgtggaaccttcgattgccag

SEQ ID NO: 1486 - DNA, 40 bp, Artificial Sequence
  Synthetic Oligonucleotide
ccgcctcgaacactgacgtcgtggaaccttcgatcgctag

SEQ ID NO: 1487 - DNA, 40 bp, Artificial Sequence
  Synthetic Oligonucleotide
ccgcctcgaacactaacgtcgtggaaccttcgattgctag

SEQ ID NO: 1488 - DNA, 40 bp, Artificial Sequence
  Synthetic Oligonucleotide
ccgcctcgaacaccgacgtcgtggaaccttcgattgctag

SEQ ID NO: 1489 - DNA, 40 bp, Artificial Sequence
  Synthetic Oligonucleotide
ccgcctcagtccttctcggttcgttcatcccaacgttgtg

SEQ ID NO: 1490 - DNA, 40 bp, Artificial Sequence
  Synthetic Oligonucleotide
ccgcctcaggttcccctaactgcgttagccttccggaatg

SEQ ID NO: 1491 - DNA, 40 bp, Artificial Sequence
  Synthetic Oligonucleotide
ccgcctcaggttcccctaacgcgttgagccttccggaatg

SEQ ID NO: 1492 - DNA, 40 bp, Artificial Sequence
  Synthetic Oligonucleotide
ccgcctcaggttcccctaacgcgttagccttccgggaatg

SEQ ID NO: 1493 - DNA, 40 bp, Artificial Sequence
  Synthetic Oligonucleotide
ccgcctcaggttcccctaacgcgttagccttccggaatcg

SEQ ID NO: 1494 - DNA, 40 bp, Artificial Sequence
  Synthetic Oligonucleotide
ccgcctcaggttccccctaatgcgttagccttccggaatg

SEQ ID NO: 1495 - DNA, 40 bp, Artificial Sequence
  Synthetic Oligonucleotide
ccgccacccgatagtcatcttcactggaccacccgtgtta

SEQ ID NO: 1496 - DNA, 40 bp, Artificial Sequence
  Synthetic Oligonucleotide
ccgcactccgatagtcatcttcgctggaccacccgcgtta

SEQ ID NO: 1497 - DNA, 40 bp, Artificial Sequence
  Synthetic Oligonucleotide
ccgcaccccgatgatcatcttcactggaccacccgtgtta

SEQ ID NO: 1498 - DNA, 40 bp, Artificial Sequence
  Synthetic Oligonucleotide
ccgcaccccgatagtcgtcttcactggaccacccgtgtta

SEQ ID NO: 1499 - DNA, 40 bp, Artificial Sequence
  Synthetic Oligonucleotide
ccgcaccccgatagtcatcttcactggactacccgtgtta

SEQ ID NO: 1500 - DNA, 40 bp, Artificial Sequence
  Synthetic Oligonucleotide
ccgcaccccgatagtcatcttcactggaccacccgtgcta

SEQ ID NO: 1501 - DNA, 40 bp, Artificial Sequence
  Synthetic Oligonucleotide
ccgcaccccgatagtcatcctcactggaccacccgtgtta

SEQ ID NO: 1502 - DNA, 40 bp, Artificial Sequence
  Synthetic Oligonucleotide
ccgcaccccgatagtcaatcttcactggacacccgtgtta

SEQ ID NO: 1503 - skipped

SEQ ID NO: 1504 - DNA, 40 bp, Artificial Sequence
  Synthetic Oligonucleotide
cccgcctttgtctccttgtgcacatgcgcgcagtacatta

SEQ ID NO: 1505 - DNA, 40 bp, Artificial Sequence
  Synthetic Oligonucleotide
cccgcctcgatattcgaatctagattagacttctcgtttg

SEQ ID NO: 1506 - DNA, 40 bp, Artificial Sequence
  Synthetic Oligonucleotide
ccatttaaatggctgcccctctgtgttacggccttaaata

SEQ ID NO: 1507 - DNA, 40 bp, Artificial Sequence
  Synthetic Oligonucleotide
ccagttcattgactactttgatgttatgtgctaagcatac

SEQ ID NO: 1508 - DNA, 40 bp, Artificial Sequence
  Synthetic Oligonucleotide
cattgatactcctgttctcgcgtttgcctccctgtgcgca

SEQ ID NO: 1509 - DNA, 40 bp, Artificial Sequence
  Synthetic Oligonucleotide
cattcaatctcgggtctgtgttcctcccgcatgcacgcgt

SEQ ID NO: 1510 - DNA, 40 bp, Artificial Sequence
  Synthetic Oligonucleotide
catggggcttttaagcacttctggtaacttgggcagttac

SEQ ID NO: 1511 - DNA, 40 bp, Artificial Sequence
  Synthetic Oligonucleotide
catggggctttaagcacttctcggtaacttgggcagttac

SEQ ID NO: 1512 - DNA, 40 bp, Artificial Sequence
  Synthetic Oligonucleotide
catcttccatccggccatggcatattagaatcgtaaggta

SEQ ID NO: 1513 - DNA, 40 bp, Artificial Sequence
  Synthetic Oligonucleotide
catcacagtaattctgcccctctgatgaaaccggttactt

SEQ ID NO: 1514 - DNA, 40 bp, Artificial Sequence
  Synthetic Oligonucleotide
cataagcctgtcttttaatctcggcagagtgctcatgagc

SEQ ID NO: 1515 - DNA, 40 bp, Artificial Sequence
  Synthetic Oligonucleotide
cagtttcatgaatgcggcctcgagagactaaacgactgat

SEQ ID NO: 1516 - DNA, 40 bp, Artificial Sequence
  Synthetic Oligonucleotide
caggttcacaagtgaaaggctactttctcacgccggtgcg

SEQ ID NO: 1517 - DNA, 40 bp, Artificial Sequence
  Synthetic Oligonucleotide
caggtgtgtatatctcccgcctcgctccttaaggaactta

SEQ ID NO: 1518 - DNA, 40 bp, Artificial Sequence
  Synthetic Oligonucleotide
cagactgtctttcgaatcgcgttgcctctgacactgtctg

SEQ ID NO: 1519 - DNA, 40 bp, Artificial Sequence
  Synthetic Oligonucleotide
cacttatccggcaggacgtctttcgtgcactatcacgatt

SEQ ID NO: 1520 - DNA, 40 bp, Artificial Sequence
  Synthetic Oligonucleotide
cactatctgtttgtccgtcctcttgtggtattgcgcatgc

SEQ ID NO: 1521 - DNA, 40 bp, Artificial Sequence
  Synthetic Oligonucleotide
cactatccttttgtccgtcctcttgtggtattgcgcatgc

SEQ ID NO: 1522 - DNA, 40 bp, Artificial Sequence
  Synthetic Oligonucleotide
cactatccgtttgtctgtcctctcgtggtattgcgcatgc

SEQ ID NO: 1523 - DNA, 40 bp, Artificial Sequence
  Synthetic Oligonucleotide
cactatccgtttgtccgttctcttgtggtattgcgcatgc

SEQ ID NO: 1524 - DNA, 40 bp, Artificial Sequence
  Synthetic Oligonucleotide
cactatccgtttgtccgtcctcttttggtattgcgcatgc

SEQ ID NO: 1525 - DNA, 40 bp, Artificial Sequence
  Synthetic Oligonucleotide
cactatccgtttgtccgtcctcttgttgtattgcgcatgc

SEQ ID NO: 1526 - DNA, 40 bp, Artificial Sequence
  Synthetic Oligonucleotide
cactatccgtttgtccgtcctcttgtggtattgcgcttgc

SEQ ID NO: 1527 - DNA, 40 bp, Artificial Sequence
  Synthetic Oligonucleotide
cactatccgtttgtccgtcctcttgtggtattgcgcataa

SEQ ID NO: 1528 - DNA, 40 bp, Artificial Sequence
  Synthetic Oligonucleotide
cactatccgtttgtccgtcctcttgtggtattgcgcaggc

SEQ ID NO: 1529 - DNA, 40 bp, Artificial Sequence
  Synthetic Oligonucleotide
cactatccgtttgtccgtcctcttgtggtattgcgaatgc

SEQ ID NO: 1530 - DNA, 40 bp, Artificial Sequence
  Synthetic Oligonucleotide
cactatccgtttgtccgtcctcttgtggaattgcgcatgc

SEQ ID NO: 1531 - DNA, 40 bp, Artificial Sequence
  Synthetic Oligonucleotide
cactatccgtttgtccgtcctctggtggtattgcgcatgc

SEQ ID NO: 1532 - DNA, 40 bp, Artificial Sequence
  Synthetic Oligonucleotide
cactatccgtttgtccgtcctctcttggtattgcgcatgc

SEQ ID NO: 1533 - DNA, 40 bp, Artificial Sequence
  Synthetic Oligonucleotide
cactatccgtttgtccgtcctctcgtggtattgcgtatgc

SEQ ID NO: 1534 - DNA, 40 bp, Artificial Sequence
  Synthetic Oligonucleotide
cactatccgtttgtccgtcctctcgtggtattgcgcatac

SEQ ID NO: 1535 - DNA, 40 bp, Artificial Sequence
  Synthetic Oligonucleotide
cactatccgtttgtccgtcctctcgtggtatcgcgcatgc

SEQ ID NO: 1536 - DNA, 40 bp, Artificial Sequence
  Synthetic Oligonucleotide
cactatccgtttgtccgtcctctcgtgatattgcgcatgc

SEQ ID NO: 1537 - DNA, 40 bp, Artificial Sequence
  Synthetic Oligonucleotide
cactatccgtttgtccgtcctcccgtggtattgcgcatgc

SEQ ID NO: 1538 - DNA, 40 bp, Artificial Sequence
  Synthetic Oligonucleotide
cactatccgtttgtccgtccacttgtggtattgcgcatgc

SEQ ID NO: 1539 - DNA, 40 bp, Artificial Sequence
  Synthetic Oligonucleotide
cactatccgtttgtccatcctcttgtggtattgcgcatgc

SEQ ID NO: 1540 - DNA, 40 bp, Artificial Sequence
  Synthetic Oligonucleotide
cactatccgtttgcccgtcctctcgtggtattgcgcatgc

SEQ ID NO: 1541 - DNA, 40 bp, Artificial Sequence
  Synthetic Oligonucleotide
cactatccgtttgaccgtcctcttgtggtattgcgcatgc

SEQ ID NO: 1542 - DNA, 40 bp, Artificial Sequence
  Synthetic Oligonucleotide
cactatccgtttctccgtcctcttgtggtattgcgcatgc

SEQ ID NO: 1543 - DNA, 40 bp, Artificial Sequence
  Synthetic Oligonucleotide
cactatccgttgtccgatcctcttgtggtattgcgcatgc

SEQ ID NO: 1544 - DNA, 40 bp, Artificial Sequence
  Synthetic Oligonucleotide
cactatccgtcttaacgtgttcccctcggacatccatcaa

SEQ ID NO: 1545 - DNA, 40 bp, Artificial Sequence
  Synthetic Oligonucleotide
cactatccgtctgtccgtcctctcgtggtattgcgcatgc

SEQ ID NO: 1546 - DNA, 40 bp, Artificial Sequence
  Synthetic Oligonucleotide
cactatccgtatcgagcgttgtcaataagcggctaaggcc

SEQ ID NO: 1547 - DNA, 40 bp, Artificial Sequence
  Synthetic Oligonucleotide
cactatccgtatcgagcgttgtcaacaagcggctgaggcc

SEQ ID NO: 1548 - DNA, 40 bp, Artificial Sequence
  Synthetic Oligonucleotide
cactatccgtatcgagcgttgtcaacaagcggctaaggct

SEQ ID NO: 1549 - DNA, 40 bp, Artificial Sequence
  Synthetic Oligonucleotide
cactatccgtatcgagcgttgtcaacaagcagctaaggcc

SEQ ID NO: 1550 - DNA, 40 bp, Artificial Sequence
  Synthetic Oligonucleotide
cactatccgtatcgagcattgtcaacaagcggctaaggcc

SEQ ID NO: 1551 - DNA, 40 bp, Artificial Sequence
  Synthetic Oligonucleotide
cactatccgtagatccgtcactcactacgcgtatagaatc

SEQ ID NO: 1552 - DNA, 40 bp, Artificial Sequence
  Synthetic Oligonucleotide
cactatccgtagatccgatcactcactacgcgtatggaat

SEQ ID NO: 1553 - DNA, 40 bp, Artificial Sequence
  Synthetic Oligonucleotide
cactatccgcatcgagcgttgtcaacaagcggctaaggcc

SEQ ID NO: 1554 - DNA, 40 bp, Artificial Sequence
  Synthetic Oligonucleotide
cactatccgacatcgagggagctacgtcatcaagcgctaa

SEQ ID NO: 1555 - DNA, 40 bp, Artificial Sequence
  Synthetic Oligonucleotide
cactatccccatcgagcgatcgtcgtaatactgctcccaa

SEQ ID NO: 1556 - DNA, 40 bp, Artificial Sequence
  Synthetic Oligonucleotide
cactatccatttgtccgtcctcttgtggtattgcgcatgc

SEQ ID NO: 1557 - DNA, 40 bp, Artificial Sequence
  Synthetic Oligonucleotide
caccgtgactacacggatttctgcccgaatcgacaattgt

SEQ ID NO: 1558 - DNA, 40 bp, Artificial Sequence
  Synthetic Oligonucleotide
caccatccgtttgtccgtcctctcgtggtattgcgcatgc

SEQ ID NO: 1559 - DNA, 40 bp, Artificial Sequence
  Synthetic Oligonucleotide
cacaatactcccttgagccgcctcttgtcgacaggttgcg

SEQ ID NO: 1560 - DNA, 40 bp, Artificial Sequence
  Synthetic Oligonucleotide
caattctcgagtatgcctcctcgtattctcctattcgctg

SEQ ID NO: 1561 - DNA, 40 bp, Artificial Sequence
  Synthetic Oligonucleotide
caatgcttgatctcctgtcgactctggcgctgagactact

SEQ ID NO: 1562 - DNA, 40 bp, Artificial Sequence
  Synthetic Oligonucleotide
caatgcttgatcccctgtcgactctgcggctgagactact

SEQ ID NO: 1563 - DNA, 40 bp, Artificial Sequence
  Synthetic Oligonucleotide
attccccctgagtgttgagtcggtcaagcactatcttgaa

SEQ ID NO: 1564 - DNA, 40 bp, Artificial Sequence
  Synthetic Oligonucleotide
attaattccagcgacttcggtggtgtcctctccactacca

SEQ ID NO: 1565 - DNA, 40 bp, Artificial Sequence
  Synthetic Oligonucleotide
attaattccagcaacttcggtggtgtcctctccattacca

SEQ ID NO: 1566 - DNA, 40 bp, Artificial Sequence
  Synthetic Oligonucleotide
attaaacggattaaggccgcctctggttctcctggattgt

SEQ ID NO: 1567 - DNA, 40 bp, Artificial Sequence
  Synthetic Oligonucleotide
atgtccatgagtcttctcggcactatccagttgacgctca

SEQ ID NO: 1568 - DNA, 40 bp, Artificial Sequence
  Synthetic Oligonucleotide
atgtccatgaggcttcggcatctatccagttgacgctcta

SEQ ID NO: 1569 - DNA, 40 bp, Artificial Sequence
  Synthetic Oligonucleotide
atgtccatgagcttctggacactatccagttgacgtctca

SEQ ID NO: 1570 - DNA, 40 bp, Artificial Sequence
  Synthetic Oligonucleotide
atgtccactgagctctggacactatcagttgacgtgctca

SEQ ID NO: 1571 - DNA, 40 bp, Artificial Sequence
  Synthetic Oligonucleotide
atggtcccatgagcttctggcactatccagttgacgctca

SEQ ID NO: 1572 - DNA, 40 bp, Artificial Sequence
  Synthetic Oligonucleotide
atggtccatgagcttctggcgactatccagttgacgctca

SEQ ID NO: 1573 - DNA, 40 bp, Artificial Sequence
  Synthetic Oligonucleotide
atggtccatgagcttctggccactatccagttgacgctca

SEQ ID NO: 1574 - DNA, 40 bp, Artificial Sequence
  Synthetic Oligonucleotide
atggtccatgagcttctggcactactccagttgacgctca

SEQ ID NO: 1575 - DNA, 40 bp, Artificial Sequence
  Synthetic Oligonucleotide
atggtccatgagcttcctggcactatccagttgacgctca

SEQ ID NO: 1576 - DNA, 40 bp, Artificial Sequence
  Synthetic Oligonucleotide
atggtccatgagcttactggcactatccagttgacgctca

SEQ ID NO: 1577 - DNA, 40 bp, Artificial Sequence
  Synthetic Oligonucleotide
atggatccatgagcttctggcactatccagttgacgctca

SEQ ID NO: 1578 - DNA, 40 bp, Artificial Sequence
  Synthetic Oligonucleotide
atggaggctttaagcacttctcggtaacttgggcagttac

SEQ ID NO: 1579 - DNA, 40 bp, Artificial Sequence
  Synthetic Oligonucleotide
atgatggctttaagcacttctcggtaacttgggcagttac

SEQ ID NO: 1580 - DNA, 40 bp, Artificial Sequence
  Synthetic Oligonucleotide
atgaactgtgaatcgtttacctctggactacccggggcaa

SEQ ID NO: 1581 - DNA, 40 bp, Artificial Sequence
  Synthetic Oligonucleotide
atcgtcgggccccttttatgaagcttacatgaaagcgcac

SEQ ID NO: 1582 - DNA, 40 bp, Artificial Sequence
  Synthetic Oligonucleotide
atcgtcgggccccttttatgaaatttacatgaaagcgcac

SEQ ID NO: 1583 - DNA, 40 bp, Artificial Sequence
  Synthetic Oligonucleotide
atcggtccactgagcttcggcactatccagttgacgctca

SEQ ID NO: 1584 - DNA, 40 bp, Artificial Sequence
  Synthetic Oligonucleotide
atcgatgggctttaagcacttctcgtaacttggcagttac

SEQ ID NO: 1585 - DNA, 40 bp, Artificial Sequence
  Synthetic Oligonucleotide
atccggaacgcctcgatcctcgcatgatatgatacgtctg

SEQ ID NO: 1586 - DNA, 40 bp, Artificial Sequence
  Synthetic Oligonucleotide
atccggaacgcctcgatcctcgcataatatgatacatctg

SEQ ID NO: 1587 - DNA, 40 bp, Artificial Sequence
  Synthetic Oligonucleotide
atccggaacgcctcgatcctcgcataatatgacacgtctg

SEQ ID NO: 1588 - DNA, 40 bp, Artificial Sequence
  Synthetic Oligonucleotide
atccatggtacgcctcgattctgcccatacatgcatgtaa

SEQ ID NO: 1589 - DNA, 40 bp, Artificial Sequence
  Synthetic Oligonucleotide
atccatggtacgcctcgattccgcccatacgtgcatgtaa

SEQ ID NO: 1590 - DNA, 40 bp, Artificial Sequence
  Synthetic Oligonucleotide
atccatggtacgcctcgattccgcccatacatgcatgtag

SEQ ID NO: 1591 - DNA, 40 bp, Artificial Sequence
  Synthetic Oligonucleotide
atccatggtacgcctcgattccgcccacacatgcatgtaa

SEQ ID NO: 1592 - DNA, 40 bp, Artificial Sequence
  Synthetic Oligonucleotide
atccatggtacgcctcgatcccgcccatacatgcatgtaa

SEQ ID NO: 1593 - DNA, 40 bp, Artificial Sequence
  Synthetic Oligonucleotide
atccatggcacgcctcgattccgcccatacatgcatgtaa

SEQ ID NO: 1594 - DNA, 40 bp, Artificial Sequence
  Synthetic Oligonucleotide
atcaattccagcgacttcggtggtgtcctctccattacca

SEQ ID NO: 1595 - DNA, 40 bp, Artificial Sequence
  Synthetic Oligonucleotide
atatgggctttaagcaccttctcggtaacttggcagttac

SEQ ID NO: 1596 - DNA, 40 bp, Artificial Sequence
  Synthetic Oligonucleotide
ataagggccctatttacgcctcgatggatgtgcagctgta

SEQ ID NO: 1597 - DNA, 40 bp, Artificial Sequence
  Synthetic Oligonucleotide
agtgcctgaccgccttgatccttcctctcggaaacgcgta

SEQ ID NO: 1598 - DNA, 40 bp, Artificial Sequence
  Synthetic Oligonucleotide
agtctgaccctgttatggactaccatatcagaaaggtgct

SEQ ID NO: 1599 - DNA, 40 bp, Artificial Sequence
  Synthetic Oligonucleotide
agtctcggatcatatgtttcgtttccctgcctaggtaaca

SEQ ID NO: 1600 - DNA, 40 bp, Artificial Sequence
  Synthetic Oligonucleotide
agtcattaatccttgttggactaccaccaaaaacgattaa

SEQ ID NO: 1601 - DNA, 40 bp, Artificial Sequence
  Synthetic Oligonucleotide
aggatatctaaccgcctcagttccggcatagtcttctgcg

SEQ ID NO: 1602 - DNA, 40 bp, Artificial Sequence
  Synthetic Oligonucleotide
agcggctcgatttgttctggtcctccttcgcgccgcaacg

SEQ ID NO: 1603 - DNA, 40 bp, Artificial Sequence
  Synthetic Oligonucleotide
agcgctatctccggagatatcgttattactacgcgaaagt

SEQ ID NO: 1604 - DNA, 40 bp, Artificial Sequence
  Synthetic Oligonucleotide
agcgcctgaccgccttgatccttcttctcggaaacgcgta

SEQ ID NO: 1605 - DNA, 40 bp, Artificial Sequence
  Synthetic Oligonucleotide
agattatgatatcactagacctaccgcctcgcagtacgta

SEQ ID NO: 1606 - DNA, 40 bp, Artificial Sequence
  Synthetic Oligonucleotide
agatcttggaacctctcgcctcgttccttccctcgctccg

SEQ ID NO: 1607 - DNA, 40 bp, Artificial Sequence
  Synthetic Oligonucleotide
agagcccgtcgagtcatctttcaaagactactttgaatac

SEQ ID NO: 1608 - DNA, 40 bp, Artificial Sequence
  Synthetic Oligonucleotide
agacccgggttccacctcagtccccaaaatgcgcgcattt

SEQ ID NO: 1609 - DNA, 40 bp, Artificial Sequence
  Synthetic Oligonucleotide
agaagtccgcggtttcactagactactactgatcacgtcg

SEQ ID NO: 1610 - DNA, 40 bp, Artificial Sequence
  Synthetic Oligonucleotide
acttcatcatggtctgtgtagttgactacaacttttagta

SEQ ID NO: 1611 - DNA, 40 bp, Artificial Sequence
  Synthetic Oligonucleotide
actgtaggcacctgctctatgtcgtggagagtaacaggtt

SEQ ID NO: 1612 - DNA, 40 bp, Artificial Sequence
  Synthetic Oligonucleotide
actaccatcgtctagtgagtcacccttagttcatcaaggc

SEQ ID NO: 1613 - DNA, 40 bp, Artificial Sequence
  Synthetic Oligonucleotide
acgtttcttcctcagcttccgcggtgcaggatttgcacgt

SEQ ID NO: 1614 - DNA, 40 bp, Artificial Sequence
  Synthetic Oligonucleotide
acgcaccccgatagtcatcttcactggaccacccgtgtta

SEQ ID NO: 1615 - DNA, 40 bp, Artificial Sequence
  Synthetic Oligonucleotide
acgatccttcctcagcttccgcggtgcgggatttgcacgt

SEQ ID NO: 1616 - DNA, 40 bp, Artificial Sequence
  Synthetic Oligonucleotide
acgagcactggactctcagcgcgcgacccatctctcagta

SEQ ID NO: 1617 - DNA, 40 bp, Artificial Sequence
  Synthetic Oligonucleotide
acgactctccctcagcttccgcggtgcaggatttgcacgt

SEQ ID NO: 1618 - DNA, 40 bp, Artificial Sequence
  Synthetic Oligonucleotide
acgactcctcctcagcttccgcggtgcaggatttgcacgt

SEQ ID NO: 1619 - DNA, 40 bp, Artificial Sequence
  Synthetic Oligonucleotide
acctgatcttgacgtctcttcggggactaccccgattctg

SEQ ID NO: 1620 - DNA, 40 bp, Artificial Sequence
  Synthetic Oligonucleotide
accggcctcaggttccctaacgcgttagccttccggaatg

SEQ ID NO: 1621 - DNA, 40 bp, Artificial Sequence
  Synthetic Oligonucleotide
accgaacctgtggctgtttgcgactacccaattagggcta

SEQ ID NO: 1622 - DNA, 40 bp, Artificial Sequence
  Synthetic Oligonucleotide
acagtgggctccatgctttaggcgcctcttattttgggtc

SEQ ID NO: 1623 - DNA, 40 bp, Artificial Sequence
  Synthetic Oligonucleotide
acagcacttggactctcagcgcgcgacccatctctcagta

SEQ ID NO: 1624 - DNA, 40 bp, Artificial Sequence
  Synthetic Oligonucleotide
acagcactggactctcagcgtcgcgacccatctctcagta

SEQ ID NO: 1625 - DNA, 40 bp, Artificial Sequence
  Synthetic Oligonucleotide
acagcactggactctcagcgcgcgaccccatctctcagta

SEQ ID NO: 1626 - DNA, 40 bp, Artificial Sequence
  Synthetic Oligonucleotide
acactattccggtaggtcatcgtttaaccgtttgttgcaa

SEQ ID NO: 1627 - DNA, 40 bp, Artificial Sequence
  Synthetic Oligonucleotide
acactattccggtaagtcatcgtttaaccgtttgtcgcaa

SEQ ID NO: 1628 - DNA, 40 bp, Artificial Sequence
  Synthetic Oligonucleotide
acactattccggccttcaccgtcctcaatacgggcgaatg

SEQ ID NO: 1629 - DNA, 40 bp, Artificial Sequence
  Synthetic Oligonucleotide
acactactccggtaagtcatcgtttaaccgtttgttgcaa

SEQ ID NO: 1630 - DNA, 40 bp, Artificial Sequence
  Synthetic Oligonucleotide
aatgttaagcttacatacgcctgggtcactccttgttctg

SEQ ID NO: 1631 - DNA, 40 bp, Artificial Sequence
  Synthetic Oligonucleotide
aatgttaagcttacatacgcctgggtcactcattgttctg

SEQ ID NO: 1632 - DNA, 40 bp, Artificial Sequence
  Synthetic Oligonucleotide
aatgttaagcttacatacgcctgggtcaccctttgttctg

SEQ ID NO: 1633 - DNA, 40 bp, Artificial Sequence
  Synthetic Oligonucleotide
aatgttaagcttacacacgcctgggtcactctttgttctg

SEQ ID NO: 1634 - DNA, 40 bp, Artificial Sequence
  Synthetic Oligonucleotide
aatctcgagatcactaggcgctatcctagcactgtatcaa

SEQ ID NO: 1635 - DNA, 40 bp, Artificial Sequence
  Synthetic Oligonucleotide
aatcatagtaattctgcccctctgatgaaaccggttactt

SEQ ID NO: 1636 - DNA, 40 bp, Artificial Sequence
  Synthetic Oligonucleotide
aatcacagtaattctgccctctgaatgaaaccggttactt

SEQ ID NO: 1637 - DNA, 40 bp, Artificial Sequence
  Synthetic Oligonucleotide
aatcacagtaattctgcccctctgatgaaaccggttacct

SEQ ID NO: 1638 - DNA, 40 bp, Artificial Sequence
  Synthetic Oligonucleotide
aatcacagtaattctgcccctctgatgaaaccagttactt

SEQ ID NO: 1639 - DNA, 40 bp, Artificial Sequence
  Synthetic Oligonucleotide
aatcacagtaattctgcccccctgatgaaaccggttactt

SEQ ID NO: 1640 - DNA, 40 bp, Artificial Sequence
  Synthetic Oligonucleotide
aatactggcctcggtacgttcttctccatcgctcttctcg

SEQ ID NO: 1641 - DNA, 40 bp, Artificial Sequence
  Synthetic Oligonucleotide
aatacgccgcctcggatacggtcgtgatcgtagttcctcg

SEQ ID NO: 1642 - DNA, 40 bp, Artificial Sequence
  Synthetic Oligonucleotide
aagcgttttgtatgtgtcgcacgctattgcgaggtaacat

SEQ ID NO: 1643 - DNA, 40 bp, Artificial Sequence
  Synthetic Oligonucleotide
aaccggggcccgcctcaagctagctacctaccattgtctg

SEQ ID NO: 1644 - DNA, 40 bp, Artificial Sequence
  Synthetic Oligonucleotide
aaattagtactgacggccgccttgatcctccgttagtctg

SEQ ID NO: 1645 - DNA, 40 bp, Artificial Sequence
  Synthetic Oligonucleotide
aaatcttacaggcagccacgcctcgttcctcctttttctg

SEQ ID NO: 1646 - DNA, 40 bp, Artificial Sequence
  Synthetic Oligonucleotide
aaatccgggccgcctcaagctagctacctccattgtcctg

SEQ ID NO: 1647 - DNA, 40 bp, Artificial Sequence
  Synthetic Oligonucleotide
aaactggtgttgcaggctactgcatctcaagcattctccg

SEQ ID NO: 1648 - DNA, 40 bp, Artificial Sequence
  Synthetic Oligonucleotide
aaaccgtggcccgcctcaagctagctacctccattgtctg

SEQ ID NO: 1649 - DNA, 40 bp, Artificial Sequence
  Synthetic Oligonucleotide
aaaccggggccgccttcaagctagctacctccattgtctg

SEQ ID NO: 1650 - DNA, 40 bp, Artificial Sequence
  Synthetic Oligonucleotide
aaaccggggccgcctcaagctagctaccttccattgtctg

SEQ ID NO: 1651 - DNA, 40 bp, Artificial Sequence
  Synthetic Oligonucleotide
aaaccggggccgcctcaagctagctacctcccattgtctg

SEQ ID NO: 1652 - DNA, 40 bp, Artificial Sequence
  Synthetic Oligonucleotide
aaaccggggcccgctcaagcctagctacctccattgtctg

SEQ ID NO: 1653 - DNA, 40 bp, Artificial Sequence
  Synthetic Oligonucleotide
aaaccggggcccgcctcaaggtagctacctccattgtctg

SEQ ID NO: 1654 - DNA, 40 bp, Artificial Sequence
  Synthetic Oligonucleotide
aaaccggggcccgcctcaagctagctgcctccgttgtctg

SEQ ID NO: 1655 - DNA, 40 bp, Artificial Sequence
  Synthetic Oligonucleotide
aaaccggggcccgcctcaagctagctacgtccattgtctg

SEQ ID NO: 1656 - DNA, 40 bp, Artificial Sequence
  Synthetic Oligonucleotide
aaaccggggcccgcctcaagctagctacctctactgtctg

SEQ ID NO: 1657 - DNA, 40 bp, Artificial Sequence
  Synthetic Oligonucleotide
aaaccggggcccgcctcaagctagctacctccttatgtcg

SEQ ID NO: 1658 - DNA, 40 bp, Artificial Sequence
  Synthetic Oligonucleotide
aaaccggggcccgcctcaagctagctacctcctattgtcg

SEQ ID NO: 1659 - DNA, 40 bp, Artificial Sequence
  Synthetic Oligonucleotide
aaaccggggcccgcctcaagctagctacctccattgtctt

SEQ ID NO: 1660 - DNA, 40 bp, Artificial Sequence
  Synthetic Oligonucleotide
aaaccggggcccgcctcaagctagctacctccattctctg

SEQ ID NO: 1661 - DNA, 40 bp, Artificial Sequence
  Synthetic Oligonucleotide
aaaccggggcccgcctcaagctagctacctccatggtctg

SEQ ID NO: 1662 - DNA, 40 bp, Artificial Sequence
  Synthetic Oligonucleotide
aaaccggggcccgcctcaagctagctacctccagtgtctg

SEQ ID NO: 1663 - DNA, 40 bp, Artificial Sequence
  Synthetic Oligonucleotide
aaaccggggcccgcctcaagctagctaccgccattgtctg

SEQ ID NO: 1664 - DNA, 40 bp, Artificial Sequence
  Synthetic Oligonucleotide
aaaccggggcccgcctcaagcctagctacctccattgctg

SEQ ID NO: 1665 - DNA, 40 bp, Artificial Sequence
  Synthetic Oligonucleotide
aaaccggggcccgcctcaagcaagctacctccattgtctg

SEQ ID NO: 1666 - DNA, 40 bp, Artificial Sequence
  Synthetic Oligonucleotide
aaaccggggcccgcccacagtcagctacctccattgtctg

SEQ ID NO: 1667 - DNA, 40 bp, Artificial Sequence
  Synthetic Oligonucleotide
aaaccggggcccgcatcaagctagctacctccattgtctg

SEQ ID NO: 1668 - DNA, 40 bp, Artificial Sequence
  Synthetic Oligonucleotide
aaaccgggcccgcctcaagctagctacctccattggtctg

SEQ ID NO: 1669 - DNA, 40 bp, Artificial Sequence
  Synthetic Oligonucleotide
aaaccgggcccgccctcaagctagctacctccattgtctg

SEQ ID NO: 1670 - DNA, 40 bp, Artificial Sequence
  Synthetic Oligonucleotide
aaaccgggagcccgcctcaagctagctactccattgtctg

SEQ ID NO: 1671 - DNA, 40 bp, Artificial Sequence
  Synthetic Oligonucleotide
aaaccgggacccgcctcaagctagctacctccatcgtctg

SEQ ID NO: 1672 - DNA, 40 bp, Artificial Sequence
  Synthetic Oligonucleotide
aaaaccgggcccgcctcaagctagctacctccattgtctg

SEQ ID NO: 1673 - DNA, 40 bp, Artificial Sequence
  Synthetic Oligonucleotide
ttttccaactggtcgcgatacagaatacgattaacataaa

SEQ ID NO: 1674 - DNA, 40 bp, Artificial Sequence
  Synthetic Oligonucleotide
ttttagtctcccgttcgcacgtactttccatcactgcatg

SEQ ID NO: 1675 - DNA, 40 bp, Artificial Sequence
  Synthetic Oligonucleotide
ttttagtctcccgctcgcacgtactttccatcactgcatg

SEQ ID NO: 1676 - DNA, 40 bp, Artificial Sequence
  Synthetic Oligonucleotide
tttgtgttagtaagtgcgaccgcctcattcctccctaata

SEQ ID NO: 1677 - DNA, 40 bp, Artificial Sequence
  Synthetic Oligonucleotide
tttgggcttttaagcacttctcggtaacttgagcagttac

SEQ ID NO: 1678 - DNA, 40 bp, Artificial Sequence
  Synthetic Oligonucleotide
tttggcggctatcgaacgctatttcgagataaggcttgtt

SEQ ID NO: 1679 - DNA, 40 bp, Artificial Sequence
  Synthetic Oligonucleotide
tttctggaaatcgaactgcccttgcgcttaagtgcaaccg

SEQ ID NO: 1680 - DNA, 40 bp, Artificial Sequence
  Synthetic Oligonucleotide
tttctcttttcggccgctatcccgattatgcggaaaaccg

SEQ ID NO: 1681 - DNA, 40 bp, Artificial Sequence
  Synthetic Oligonucleotide
tttctctttcgggcgctatcccgattatgcggaaaaaccg

SEQ ID NO: 1682 - DNA, 40 bp, Artificial Sequence
  Synthetic Oligonucleotide
tttcgcgatagcctcggttcttccatgcagctgcgtatta

SEQ ID NO: 1683 - DNA, 40 bp, Artificial Sequence
  Synthetic Oligonucleotide
tttattctcccaaagccgcctcgcggacgtgtacacgaac

SEQ ID NO: 1684 - DNA, 40 bp, Artificial Sequence
  Synthetic Oligonucleotide
tttattcggcctggttgcgcctcgatcctccagcggcctg

SEQ ID NO: 1685 - DNA, 40 bp, Artificial Sequence
  Synthetic Oligonucleotide
tttacgtaaaatgcctgggtcccctatagattgatttgtg

SEQ ID NO: 1686 - DNA, 40 bp, Artificial Sequence
  Synthetic Oligonucleotide
tttaatgcgcaccagctaatagcatggtccccttaaactg

SEQ ID NO: 1687 - DNA, 40 bp, Artificial Sequence
  Synthetic Oligonucleotide
tttaaggcgctaccagctaattagcatggccccttaactg

SEQ ID NO: 1688 - DNA, 40 bp, Artificial Sequence
  Synthetic Oligonucleotide
tttaagcgctaccagctaatagcatggaccccttaaactg

SEQ ID NO: 1689 - DNA, 40 bp, Artificial Sequence
  Synthetic Oligonucleotide
tttaagcgctaccagcctaatagcagtggccccttaactg

SEQ ID NO: 1690 - DNA, 40 bp, Artificial Sequence
  Synthetic Oligonucleotide
tttaagcgcacccagtctaatagcatggcccctttaactg

SEQ ID NO: 1691 - DNA, 40 bp, Artificial Sequence
  Synthetic Oligonucleotide
tttaagcgcaccagtctaatcagcatggccccttaacttg

SEQ ID NO: 1692 - DNA, 40 bp, Artificial Sequence
  Synthetic Oligonucleotide
tttaagcgcaccaggctaatagtccatggccccttaactg

SEQ ID NO: 1693 - DNA, 40 bp, Artificial Sequence
  Synthetic Oligonucleotide
tttaagcgcaaccagctaattaggcgtggccccttaactg

SEQ ID NO: 1694 - DNA, 40 bp, Artificial Sequence
  Synthetic Oligonucleotide
tttaagcgcaaccagctaattaggcatggccccttaactg

SEQ ID NO: 1695 - DNA, 40 bp, Artificial Sequence
  Synthetic Oligonucleotide
tttaagcgcaaccagctaattaggaccatgcccttaactg

SEQ ID NO: 1696 - DNA, 40 bp, Artificial Sequence
  Synthetic Oligonucleotide
tttaagcgcaaccagctaattaggacatgccccttaactg

SEQ ID NO: 1697 - DNA, 40 bp, Artificial Sequence
  Synthetic Oligonucleotide
tttaagcgcaaccagctaattagccatggccccttaactg

SEQ ID NO: 1698 - DNA, 40 bp, Artificial Sequence
  Synthetic Oligonucleotide
tttaaagcgctaaccagctaatagcatggccccttaactg

SEQ ID NO: 1699 - DNA, 40 bp, Artificial Sequence
  Synthetic Oligonucleotide
ttgtatggccgcctcgcaatatcgatatgtaaaacgtctg

SEQ ID NO: 1700 - DNA, 40 bp, Artificial Sequence
  Synthetic Oligonucleotide
ttgtagttcctccacttcgtccatccctaaggccggctta

SEQ ID NO: 1701 - DNA, 40 bp, Artificial Sequence
  Synthetic Oligonucleotide
ttgtaccccgggttgcaattgcctcgtaacaagaccgcat

SEQ ID NO: 1702 - DNA, 40 bp, Artificial Sequence
  Synthetic Oligonucleotide
ttgtaccccgggttgcaatcgcctcgtaaccagaccgcat

SEQ ID NO: 1703 - DNA, 40 bp, Artificial Sequence
  Synthetic Oligonucleotide
ttgtaccccgggttgcaactgcctcgtaaccagaccgcat

SEQ ID NO: 1704 - DNA, 40 bp, Artificial Sequence
  Synthetic Oligonucleotide
ttgtaccccgggctgcaatcgcctcgtaaccagaccgcat

SEQ ID NO: 1705 - DNA, 40 bp, Artificial Sequence
  Synthetic Oligonucleotide
ttggtgcgcaacaaccgcctttgcgccgttaactagttaa

SEQ ID NO: 1706 - DNA, 40 bp, Artificial Sequence
  Synthetic Oligonucleotide
ttggggcttttaagcacttctcggtaacttgggcagttac

SEQ ID NO: 1707 - DNA, 40 bp, Artificial Sequence
  Synthetic Oligonucleotide
ttgggccaagtttagcctctgtcctgttgcgtacgcactt

SEQ ID NO: 1708 - DNA, 40 bp, Artificial Sequence
  Synthetic Oligonucleotide
ttgggaaagactttaggccgcctcgctcctccgttggccg

SEQ ID NO: 1709 - DNA, 40 bp, Artificial Sequence
  Synthetic Oligonucleotide
ttgggaaagactttaggccgcctcgctcctccgttggcca

SEQ ID NO: 1710 - DNA, 40 bp, Artificial Sequence
  Synthetic Oligonucleotide
ttggaggctttaagcacttctcggtaacttgggcagttac

SEQ ID NO: 1711 - DNA, 40 bp, Artificial Sequence
  Synthetic Oligonucleotide
ttgctcctgcgttacgtctgtgatcgactaccttcgtaat

SEQ ID NO: 1712 - DNA, 40 bp, Artificial Sequence
  Synthetic Oligonucleotide
ttgctcctgcgctacgtctgtgatcgactaccttcataat

SEQ ID NO: 1713 - DNA, 40 bp, Artificial Sequence
  Synthetic Oligonucleotide
ttgagtgtacactaatgtccgcttcttggatgccacatag

SEQ ID NO: 1714 - DNA, 40 bp, Artificial Sequence
  Synthetic Oligonucleotide
ttgactaccttcgctgctgtgtactcgtcctttttgtctg

SEQ ID NO: 1715 - DNA, 40 bp, Artificial Sequence
  Synthetic Oligonucleotide
ttcttcgtaggccctcgcgtttggcgagagccaattggcg

SEQ ID NO: 1716 - DNA, 40 bp, Artificial Sequence
  Synthetic Oligonucleotide
ttcttcgtaggccctcgcgtttggcgagacccaattggcg

SEQ ID NO: 1717 - DNA, 40 bp, Artificial Sequence
  Synthetic Oligonucleotide
ttcttcatggggtttttggggactaccccattggcaacac

SEQ ID NO: 1718 - DNA, 40 bp, Artificial Sequence
  Synthetic Oligonucleotide
ttcttactccggcaggacgtctttcgtgcactatcacgat

SEQ ID NO: 1719 - DNA, 40 bp, Artificial Sequence
  Synthetic Oligonucleotide
ttctatcaggccgggacgtctttcgtgcactatcacgatt

SEQ ID NO: 1720 - DNA, 40 bp, Artificial Sequence
  Synthetic Oligonucleotide
ttcgtgtcttacccggtccgcctcgtttcctcttgttctg

SEQ ID NO: 1721 - DNA, 40 bp, Artificial Sequence
  Synthetic Oligonucleotide
ttcgcgatagcctcggttcttccatgccagctgcatatta

SEQ ID NO: 1722 - DNA, 40 bp, Artificial Sequence
  Synthetic Oligonucleotide
ttcgcgatagcctcggttctcccatgcagctgcatattta

SEQ ID NO: 1723 - DNA, 40 bp, Artificial Sequence
  Synthetic Oligonucleotide
ttcgcgatagccctcggttcttccatgcagctgcatatta

SEQ ID NO: 1724 - DNA, 40 bp, Artificial Sequence
  Synthetic Oligonucleotide
ttcgcgatacgcctcggttcttccatgcagctgcatatta

SEQ ID NO: 1725 - DNA, 40 bp, Artificial Sequence
  Synthetic Oligonucleotide
ttcgcgaacgccttagtcactcttctcggataacatgatt

SEQ ID NO: 1726 - DNA, 40 bp, Artificial Sequence
  Synthetic Oligonucleotide
ttcgcgaacgccttagtcacccttctcggatgacatgatt

SEQ ID NO: 1727 - DNA, 40 bp, Artificial Sequence
  Synthetic Oligonucleotide
ttcgcgaacgccttagtcacccttctcggatagcatgatt

SEQ ID NO: 1728 - DNA, 40 bp, Artificial Sequence
  Synthetic Oligonucleotide
ttcgcgaacgccttagtcacccttctcggataacacgatt

SEQ ID NO: 1729 - DNA, 40 bp, Artificial Sequence
  Synthetic Oligonucleotide
ttcgcgaacgccctagtcacccttctcggataacatgatt

SEQ ID NO: 1730 - DNA, 40 bp, Artificial Sequence
  Synthetic Oligonucleotide
ttcgcacagctcacttcgctttgatcgaccacgctcataa

SEQ ID NO: 1731 - DNA, 40 bp, Artificial Sequence
  Synthetic Oligonucleotide
ttcctgggactcatttgggactacccagagcaagagtatc

SEQ ID NO: 1732 - DNA, 40 bp, Artificial Sequence
  Synthetic Oligonucleotide
ttccgggtacgctcgactacgaccggtacaccctgtacag

SEQ ID NO: 1733 - DNA, 40 bp, Artificial Sequence
  Synthetic Oligonucleotide
ttccggaacgcctcgatcctcgcatagtatgatacgtctg

SEQ ID NO: 1734 - DNA, 40 bp, Artificial Sequence
  Synthetic Oligonucleotide
ttccgcgatagcctcggttcttccatgcagctgcatatta

SEQ ID NO: 1735 - DNA, 40 bp, Artificial Sequence
  Synthetic Oligonucleotide
ttccaagacgattgtcgttattgccggactacctgcattt

SEQ ID NO: 1736 - DNA, 40 bp, Artificial Sequence
  Synthetic Oligonucleotide
ttcaatggcgctaacagctaattagctggccccctaatgc

SEQ ID NO: 1737 - DNA, 40 bp, Artificial Sequence
  Synthetic Oligonucleotide
ttcaagcgcaccaggcctaatagcactggacccttaactg

SEQ ID NO: 1738 - DNA, 40 bp, Artificial Sequence
  Synthetic Oligonucleotide
ttatgacgtcggttcgcctcgggtccatcctaattgtctg

SEQ ID NO: 1739 - DNA, 40 bp, Artificial Sequence
  Synthetic Oligonucleotide
ttatgacgtcggttcgcctcgagtccatcccaattgtctg

SEQ ID NO: 1740 - DNA, 40 bp, Artificial Sequence
  Synthetic Oligonucleotide
ttatgacgtcggttcgcctcaggtccatcccaattgtctg

SEQ ID NO: 1741 - DNA, 40 bp, Artificial Sequence
  Synthetic Oligonucleotide
ttatgacgtcggtccgcctcgggtccatcccaattgtctg

SEQ ID NO: 1742 - DNA, 40 bp, Artificial Sequence
  Synthetic Oligonucleotide
ttatgacatcggttcgcctcgggtccttcccaattgtctg

SEQ ID NO: 1743 - DNA, 40 bp, Artificial Sequence
  Synthetic Oligonucleotide
ttatccctgatggtccgaattctcatcggctggcactatc

SEQ ID NO: 1744 - DNA, 40 bp, Artificial Sequence
  Synthetic Oligonucleotide
ttatccctgatgatccgaattctcatcggccggcactatc

SEQ ID NO: 1745 - DNA, 40 bp, Artificial Sequence
  Synthetic Oligonucleotide
ttatccctgatgacccgaattctcatcggctggcactatc

SEQ ID NO: 1746 - DNA, 40 bp, Artificial Sequence
  Synthetic Oligonucleotide
ttatccctcgatgatccgaattctcatcgctggcactatc

SEQ ID NO: 1747 - DNA, 40 bp, Artificial Sequence
  Synthetic Oligonucleotide
ttatccccgatgatccgaattctcatcggctggcactatc

SEQ ID NO: 1748 - DNA, 40 bp, Artificial Sequence
  Synthetic Oligonucleotide
ttaggggctttaagcacttccggtaacttgggccagttac

SEQ ID NO: 1749 - DNA, 40 bp, Artificial Sequence
  Synthetic Oligonucleotide
ttagggactgtaaaataagacaagggaccacccttgtttt

SEQ ID NO: 1750 - DNA, 40 bp, Artificial Sequence
  Synthetic Oligonucleotide
ttagctagcgcctcgttcctgatacgcgcgttacctatgt

SEQ ID NO: 1751 - DNA, 40 bp, Artificial Sequence
  Synthetic Oligonucleotide
ttagaatgtgtgatagtctcgggcattgctgcctcctcat

SEQ ID NO: 1752 - DNA, 40 bp, Artificial Sequence
  Synthetic Oligonucleotide
ttagaatgtgtgatagtctcgggcattcctgcctcctcat

SEQ ID NO: 1753 - DNA, 40 bp, Artificial Sequence
  Synthetic Oligonucleotide
ttactttctcggatcactaatcgccgcatcacgcactccc

SEQ ID NO: 1754 - DNA, 40 bp, Artificial Sequence
  Synthetic Oligonucleotide
ttactttctcggatcactaactgccgcatcacgcactccc

SEQ ID NO: 1755 - DNA, 40 bp, Artificial Sequence
  Synthetic Oligonucleotide
ttaccttctcggatcactaattgccgcatcacgcactccc

SEQ ID NO: 1756 - DNA, 40 bp, Artificial Sequence
  Synthetic Oligonucleotide
ttaagcggctaccagctattagcactgtccctttgactcg

SEQ ID NO: 1757 - DNA, 40 bp, Artificial Sequence
  Synthetic Oligonucleotide
ttaactttctcggatcactaattgccgcatcacgcactcc

SEQ ID NO: 1758 - DNA, 40 bp, Artificial Sequence
  Synthetic Oligonucleotide
ttaaccgacctatccatgcgcgcaaacggttctcgatctg

SEQ ID NO: 1759 - DNA, 40 bp, Artificial Sequence
  Synthetic Oligonucleotide
tgttgatcgttcttatccgcctcggtcttccccaggttaa

SEQ ID NO: 1760 - DNA, 40 bp, Artificial Sequence
  Synthetic Oligonucleotide
tgttcgccagtcacatcaactatgatgacgcttggctgga

SEQ ID NO: 1761 - DNA, 40 bp, Artificial Sequence
  Synthetic Oligonucleotide
tgttcgccagccacatcaactatgatgacgctcgactgga

SEQ ID NO: 1762 - DNA, 40 bp, Artificial Sequence
  Synthetic Oligonucleotide
tgttacccggttgcaattgcctcgtaacctagaaccgcat

SEQ ID NO: 1763 - DNA, 40 bp, Artificial Sequence
  Synthetic Oligonucleotide
tgtgtaacgttgcagccgtctctaaactgcagtgcaacct

SEQ ID NO: 1764 - DNA, 40 bp, Artificial Sequence
  Synthetic Oligonucleotide
tgtgtaacgttacagccgtccctaaactgcagtgcaacct

SEQ ID NO: 1765 - DNA, 40 bp, Artificial Sequence
  Synthetic Oligonucleotide
tgtgggtcgcctggtccgcctcgatcctctataccgtctg

SEQ ID NO: 1766 - DNA, 40 bp, Artificial Sequence
  Synthetic Oligonucleotide
tgtgggtcgcctgatccgcctcgatcctctataccgtctg

SEQ ID NO: 1767 - DNA, 40 bp, Artificial Sequence
  Synthetic Oligonucleotide
tgtggggcttttaagcacttccggtaacttgggcagttac

SEQ ID NO: 1768 - DNA, 40 bp, Artificial Sequence
  Synthetic Oligonucleotide
tgtggggcttttaagcactctcggtaacttgggcagttac

SEQ ID NO: 1769 - DNA, 40 bp, Artificial Sequence
  Synthetic Oligonucleotide
tgtgggcttttaagcacttctcggtaacttgggcagttac

SEQ ID NO: 1770 - DNA, 40 bp, Artificial Sequence
  Synthetic Oligonucleotide
tgtgggcttttaagcacttctcggtaacttaggcagttac

SEQ ID NO: 1771 - DNA, 40 bp, Artificial Sequence
  Synthetic Oligonucleotide
tgtgggctttaacgcacttctcggtaacttgggcagttac

SEQ ID NO: 1772 - DNA, 40 bp, Artificial Sequence
  Synthetic Oligonucleotide
tgtggacgtcaacgctgccttgttccttcaggtgccaccg

SEQ ID NO: 1773 - DNA, 40 bp, Artificial Sequence
  Synthetic Oligonucleotide
tgtgcgactacgctcttgaacaattctgatccctggatct

SEQ ID NO: 1774 - DNA, 40 bp, Artificial Sequence
  Synthetic Oligonucleotide
tgtgcgactacgctcttgaacaattccgatccctggattt

SEQ ID NO: 1775 - DNA, 40 bp, Artificial Sequence
  Synthetic Oligonucleotide
tgtgaggcgaacaagccatgtacaccgcccctctggctgc

SEQ ID NO: 1776 - DNA, 40 bp, Artificial Sequence
  Synthetic Oligonucleotide
tgtgaggcgaacaaaccatgtacaccgcccctctggctgc

SEQ ID NO: 1777 - DNA, 40 bp, Artificial Sequence
  Synthetic Oligonucleotide
tgtctcgtctgcatactttcggaccgtctcgccctccatg

SEQ ID NO: 1778 - DNA, 40 bp, Artificial Sequence
  Synthetic Oligonucleotide
tgtctaatcggaagtcttctcaggaggttgggcactatcc

SEQ ID NO: 1779 - DNA, 40 bp, Artificial Sequence
  Synthetic Oligonucleotide
tgtcggtattccggaacatggcctctgctcctccacggat

SEQ ID NO: 1780 - DNA, 40 bp, Artificial Sequence
  Synthetic Oligonucleotide
tgtcgcaacgccttgattcaactctacagtgtgtctatga

SEQ ID NO: 1781 - DNA, 40 bp, Artificial Sequence
  Synthetic Oligonucleotide
tgtccgccagtcacatcaactatgatgacgcttgactgga

SEQ ID NO: 1782 - DNA, 40 bp, Artificial Sequence
  Synthetic Oligonucleotide
tgtccctgtgtcttgttgccacagacgttcagtgcccccg

SEQ ID NO: 1783 - DNA, 40 bp, Artificial Sequence
  Synthetic Oligonucleotide
tgtagttcgcctggtccgcctcgatcctccataccgtctg

SEQ ID NO: 1784 - DNA, 40 bp, Artificial Sequence
  Synthetic Oligonucleotide
tgtaggtcgttcttatccgcctcggccttccccaggttaa

SEQ ID NO: 1785 - DNA, 40 bp, Artificial Sequence
  Synthetic Oligonucleotide
tgtaggtcgtctggtccgcctcgatcctcaataccgtctg

SEQ ID NO: 1786 - DNA, 40 bp, Artificial Sequence
  Synthetic Oligonucleotide
tgtaggtcgcctggttcgcctcgatcctctataccgtctg

SEQ ID NO: 1787 - DNA, 40 bp, Artificial Sequence
  Synthetic Oligonucleotide
tgtaggtcgcctggtctgcctcgatcctctataccgtctg

SEQ ID NO: 1788 - DNA, 40 bp, Artificial Sequence
  Synthetic Oligonucleotide
tgtaggtcgcctggtccgcttcgatcctctacaccgtctg

SEQ ID NO: 1789 - DNA, 40 bp, Artificial Sequence
  Synthetic Oligonucleotide
tgtaggtcgcctggtccgcctcggtcctctataccgtctg

SEQ ID NO: 1790 - DNA, 40 bp, Artificial Sequence
  Synthetic Oligonucleotide
tgtaggtcgcctggtccgcctcgatcctttataccgtctg

SEQ ID NO: 1791 - DNA, 40 bp, Artificial Sequence
  Synthetic Oligonucleotide
tgtaggtcgcctggtccgcctcgatcctctgtaccgtctg

SEQ ID NO: 1792 - DNA, 40 bp, Artificial Sequence
  Synthetic Oligonucleotide
tgtaggtcgcctggtccgcctcgatcctctatgccgtctg

SEQ ID NO: 1793 - DNA, 40 bp, Artificial Sequence
  Synthetic Oligonucleotide
tgtaggtcgcctggtccgcctcgatcctctatatcgtctg

SEQ ID NO: 1794 - DNA, 40 bp, Artificial Sequence
  Synthetic Oligonucleotide
tgtaggtcgcctggtccgcctcgatcctctataccgtcta

SEQ ID NO: 1795 - DNA, 40 bp, Artificial Sequence
  Synthetic Oligonucleotide
tgtaggtcgcctggtccgcctcgatcctctataccatctg

SEQ ID NO: 1796 - DNA, 40 bp, Artificial Sequence
  Synthetic Oligonucleotide
tgtaggtcgcctggtccgcctcgatcctctatacagtctg

SEQ ID NO: 1797 - DNA, 40 bp, Artificial Sequence
  Synthetic Oligonucleotide
tgtaggtcgcctggtccgcctcgatcctcaataccgcctg

SEQ ID NO: 1798 - DNA, 40 bp, Artificial Sequence
  Synthetic Oligonucleotide
tgtaggtcgcctggtccgcatcgatcctctataccgtctg

SEQ ID NO: 1799 - DNA, 40 bp, Artificial Sequence
  Synthetic Oligonucleotide
tgtaggtcgcctggtccacctcgatcctctataccgtctg

SEQ ID NO: 1800 - DNA, 40 bp, Artificial Sequence
  Synthetic Oligonucleotide
tgtaggtcgcctgggtcgcctcgatcctctataccgtctg

SEQ ID NO: 1801 - DNA, 40 bp, Artificial Sequence
  Synthetic Oligonucleotide
tgtaggtcgcctggaccgcctcgatcctctataccgtctg

SEQ ID NO: 1802 - DNA, 40 bp, Artificial Sequence
  Synthetic Oligonucleotide
tgtaggtcgcctgatccgcctcgatcctctataccgtctg

SEQ ID NO: 1803 - DNA, 40 bp, Artificial Sequence
  Synthetic Oligonucleotide
tgtaggtcgcctagtccgcctcgatcctctataccgtctg

SEQ ID NO: 1804 - DNA, 40 bp, Artificial Sequence
  Synthetic Oligonucleotide
tgtaggtcgccgggtccgcctcgatcctctatgccgtctg

SEQ ID NO: 1805 - DNA, 40 bp, Artificial Sequence
  Synthetic Oligonucleotide
tgtaggtcgccgggtccgcctcgatcctctataccgtctg

SEQ ID NO: 1806 - DNA, 40 bp, Artificial Sequence
  Synthetic Oligonucleotide
tgtaggtcgcccggtccgcctcgatcctctataccgtctg

SEQ ID NO: 1807 - DNA, 40 bp, Artificial Sequence
  Synthetic Oligonucleotide
tgtaggtagcctggtccgcctcgatcccctataccgtctg

SEQ ID NO: 1808 - DNA, 40 bp, Artificial Sequence
  Synthetic Oligonucleotide
tgtagatcgttcttgtccgcctcggtcttccccaggttaa

SEQ ID NO: 1809 - DNA, 40 bp, Artificial Sequence
  Synthetic Oligonucleotide
tgtagatcgttcttatccgcctcggtcttccctaggttaa

SEQ ID NO: 1810 - DNA, 40 bp, Artificial Sequence
  Synthetic Oligonucleotide
tgtagatcgttcttatccgcctcggtcttccccaggtaca

SEQ ID NO: 1811 - DNA, 40 bp, Artificial Sequence
  Synthetic Oligonucleotide
tgtagatcgttcttatccgcctcggtcttccccagattaa

SEQ ID NO: 1812 - DNA, 40 bp, Artificial Sequence
  Synthetic Oligonucleotide
tgtagatcgttcttatccgcctcggccttccccaggttaa

SEQ ID NO: 1813 - DNA, 40 bp, Artificial Sequence
  Synthetic Oligonucleotide
tgtagatcgttcttatccgcctcgatcttccctaggttaa

SEQ ID NO: 1814 - DNA, 40 bp, Artificial Sequence
  Synthetic Oligonucleotide
tgtagatcgttcctatccgcctcggtcttccccaggttaa

SEQ ID NO: 1815 - DNA, 40 bp, Artificial Sequence
  Synthetic Oligonucleotide
tgtagatcgctcttatccgcctcggtcttccccaggttaa

SEQ ID NO: 1816 - DNA, 40 bp, Artificial Sequence
  Synthetic Oligonucleotide
tgtagatcgcctggtccgcctcgatcctctataccgtcta

SEQ ID NO: 1817 - DNA, 40 bp, Artificial Sequence
  Synthetic Oligonucleotide
tgtacgtcgccgtgtccgcctcgatcctctataccgtctg

SEQ ID NO: 1818 - DNA, 40 bp, Artificial Sequence
  Synthetic Oligonucleotide
tgtacggtcgcctgtccgcctcgatcctctataccgtctg

SEQ ID NO: 1819 - DNA, 40 bp, Artificial Sequence
  Synthetic Oligonucleotide
tgtacgactacgctcttgaacaattctgatccctggattt

SEQ ID NO: 1820 - DNA, 40 bp, Artificial Sequence
  Synthetic Oligonucleotide
tgtacatacgcctcgattgcgcaaggtagctcctgagatg

SEQ ID NO: 1821 - DNA, 40 bp, Artificial Sequence
  Synthetic Oligonucleotide
tgtaagtcgcctggtccgcctcgatcctctataccgtatg

SEQ ID NO: 1822 - DNA, 40 bp, Artificial Sequence
  Synthetic Oligonucleotide
tgtaagtcgcccggtccgcctcgatcctctataccgtctg

SEQ ID NO: 1823 - DNA, 40 bp, Artificial Sequence
  Synthetic Oligonucleotide
tgtaacttctccctacatccgcctcgacaagtggccacca

SEQ ID NO: 1824 - DNA, 40 bp, Artificial Sequence
  Synthetic Oligonucleotide
tggtcgtctcgttccttccttccggatccgtgtactgctg

SEQ ID NO: 1825 - DNA, 40 bp, Artificial Sequence
  Synthetic Oligonucleotide
tggtcgatccgtactttcaggcgctatcctgatcacccga

SEQ ID NO: 1826 - DNA, 40 bp, Artificial Sequence
  Synthetic Oligonucleotide
tggtacctaggatcaccgtctcagtaaccttaagtagcta

SEQ ID NO: 1827 - DNA, 40 bp, Artificial Sequence
  Synthetic Oligonucleotide
tggtaaaccacaaatcgagcgtatcatctggtcttcgtta

SEQ ID NO: 1828 - DNA, 40 bp, Artificial Sequence
  Synthetic Oligonucleotide
tgggctttcttcatggactaccatgttgcaaaaggtcata

SEQ ID NO: 1829 - DNA, 40 bp, Artificial Sequence
  Synthetic Oligonucleotide
tgggctttcctcatggactaccatgttacaaaaggtcata

SEQ ID NO: 1830 - DNA, 40 bp, Artificial Sequence
  Synthetic Oligonucleotide
tgggccatggatcactgcctcgattcgtccacgtggtggc

SEQ ID NO: 1831 - DNA, 40 bp, Artificial Sequence
  Synthetic Oligonucleotide
tgggactctctcggatcgctctgtcctccgatatctgctg

SEQ ID NO: 1832 - DNA, 40 bp, Artificial Sequence
  Synthetic Oligonucleotide
tggctgagctcacaccgcctcgaaaaggctagccacggat

SEQ ID NO: 1833 - DNA, 40 bp, Artificial Sequence
  Synthetic Oligonucleotide
tggccaggcctcgatcacctatcttgcgcaagacatacaa

SEQ ID NO: 1834 - DNA, 40 bp, Artificial Sequence
  Synthetic Oligonucleotide
tggagtccgcggtttcactagactactactgatcacgtcg

SEQ ID NO: 1835 - DNA, 40 bp, Artificial Sequence
  Synthetic Oligonucleotide
tggacccgggcacttgcctcagttctctctacgggcgaat

SEQ ID NO: 1836 - DNA, 40 bp, Artificial Sequence
  Synthetic Oligonucleotide
tggaagtccgcggttcactagactactactgatcacgtcg

SEQ ID NO: 1837 - DNA, 40 bp, Artificial Sequence
  Synthetic Oligonucleotide
tggaaatctcgggtcggtatgcacgtgcttcttctccccg

SEQ ID NO: 1838 - DNA, 40 bp, Artificial Sequence
  Synthetic Oligonucleotide
tgctcttgcaagaaatccacttcgaatccgacctgttctg

SEQ ID NO: 1839 - DNA, 40 bp, Artificial Sequence
  Synthetic Oligonucleotide
tgctatccgaatcgagcttgagtgtctggttaaacaacga

SEQ ID NO: 1840 - DNA, 40 bp, Artificial Sequence
  Synthetic Oligonucleotide
tgctacccccatcgagcgagtctactctcccatcaacggg

SEQ ID NO: 1841 - DNA, 40 bp, Artificial Sequence
  Synthetic Oligonucleotide
tgcgtaaacgctattttctgggaaccgcatctcgagctaa

SEQ ID NO: 1842 - DNA, 40 bp, Artificial Sequence
  Synthetic Oligonucleotide
tgcgtaaacgctattttctggaagccgcatctcgagcgaa

SEQ ID NO: 1843 - DNA, 40 bp, Artificial Sequence
  Synthetic Oligonucleotide
tgcgtaaacgctatttctgggaagccgcatctcgagctaa

SEQ ID NO: 1844 - DNA, 40 bp, Artificial Sequence
  Synthetic Oligonucleotide
tgcgtaaacgctatttctgggaagccgcatctcgagcgaa

SEQ ID NO: 1845 - DNA, 40 bp, Artificial Sequence
  Synthetic Oligonucleotide
tgcgtaaacgctatttctggaatgccgcatctcgagcgaa

SEQ ID NO: 1846 - DNA, 40 bp, Artificial Sequence
  Synthetic Oligonucleotide
tgcgctacctcgtcgtctgtggttttagtgaaaatgagaa

SEQ ID NO: 1847 - DNA, 40 bp, Artificial Sequence
  Synthetic Oligonucleotide
tgcgcgactacgctcttgaacaattctgatccctggattt

SEQ ID NO: 1848 - DNA, 40 bp, Artificial Sequence
  Synthetic Oligonucleotide
tgcgccacgccttgattcactcctacagtgtgtctataga

SEQ ID NO: 1849 - DNA, 40 bp, Artificial Sequence
  Synthetic Oligonucleotide
tgcgcactagcctcgaactataagaatcttcctgggttgt

SEQ ID NO: 1850 - DNA, 40 bp, Artificial Sequence
  Synthetic Oligonucleotide
tgcgcaacgccttgattcgctcctacagtgtgtctataga

SEQ ID NO: 1851 - DNA, 40 bp, Artificial Sequence
  Synthetic Oligonucleotide
tgcgcaacgccttgattcattcctacagtgtgtctataga

SEQ ID NO: 1852 - DNA, 40 bp, Artificial Sequence
  Synthetic Oligonucleotide
tgcgcaacgccttgattcactcttacagtgtgtctataga

SEQ ID NO: 1853 - DNA, 40 bp, Artificial Sequence
  Synthetic Oligonucleotide
tgcgcaacgccttgattcactcctatagtgtgtctataga

SEQ ID NO: 1854 - DNA, 40 bp, Artificial Sequence
  Synthetic Oligonucleotide
tgcgcaacgccttgattcactcctacggtgtgtctatgga

SEQ ID NO: 1855 - DNA, 40 bp, Artificial Sequence
  Synthetic Oligonucleotide
tgcgcaacgccttgattcactcctacagtgtgtgtataga

SEQ ID NO: 1856 - DNA, 40 bp, Artificial Sequence
  Synthetic Oligonucleotide
tgcgcaacgccttgattcactcctacagtgtgtccataga

SEQ ID NO: 1857 - DNA, 40 bp, Artificial Sequence
  Synthetic Oligonucleotide
tgcgcaacgccttgattcactcctacagtgtgcctataga

SEQ ID NO: 1858 - DNA, 40 bp, Artificial Sequence
  Synthetic Oligonucleotide
tgcgcaacgccttgattcactcctacagtatgtctataga

SEQ ID NO: 1859 - DNA, 40 bp, Artificial Sequence
  Synthetic Oligonucleotide
tgcgcaacgccttgattcacgcctacagtgtgtctataga

SEQ ID NO: 1860 - DNA, 40 bp, Artificial Sequence
  Synthetic Oligonucleotide
tgcgcaacgccttgatcacttcctacagtgtgtctataga

SEQ ID NO: 1861 - DNA, 40 bp, Artificial Sequence
  Synthetic Oligonucleotide
tgcgcaacgccttgactctctcctacagtgtgtctataga

SEQ ID NO: 1862 - DNA, 40 bp, Artificial Sequence
  Synthetic Oligonucleotide
tgcgcaacgccttgactcactcctacagtgtgtctataga

SEQ ID NO: 1863 - DNA, 40 bp, Artificial Sequence
  Synthetic Oligonucleotide
tgcgcaacgcctcgatccgtcgcataatatgatacgtctg

SEQ ID NO: 1864 - DNA, 40 bp, Artificial Sequence
  Synthetic Oligonucleotide
tgcgcaacgccctgattcactcctacagtgtgtctataga

SEQ ID NO: 1865 - DNA, 40 bp, Artificial Sequence
  Synthetic Oligonucleotide
tgcgcaaagccttgattcactcctacagtgtgtctataga

SEQ ID NO: 1866 - DNA, 40 bp, Artificial Sequence
  Synthetic Oligonucleotide
tgcgaggcgctattttctgggaagccgcatctcgagcgaa

SEQ ID NO: 1867 - DNA, 40 bp, Artificial Sequence
  Synthetic Oligonucleotide
tgcgagacgctattttctgggaagccgcatctcgagcgaa

SEQ ID NO: 1868 - DNA, 40 bp, Artificial Sequence
  Synthetic Oligonucleotide
tgcgaacgctattttctgggaagccgcatctcgagctgaa

SEQ ID NO: 1869 - DNA, 40 bp, Artificial Sequence
  Synthetic Oligonucleotide
tgcgaacgctatttctgggaatgccgctatctcgagcgaa

SEQ ID NO: 1870 - DNA, 40 bp, Artificial Sequence
  Synthetic Oligonucleotide
tgcgaacgctatttctgggaagccgcatcctcgagctgaa

SEQ ID NO: 1871 - DNA, 40 bp, Artificial Sequence
  Synthetic Oligonucleotide
tgcgaacgctatttctgagaagccgtcaatctcgagcgaa

SEQ ID NO: 1872 - DNA, 40 bp, Artificial Sequence
  Synthetic Oligonucleotide
tgcgaacgctatttcgtggaagccgcatcctcgagctgaa

SEQ ID NO: 1873 - DNA, 40 bp, Artificial Sequence
  Synthetic Oligonucleotide
tgcgaaacgtctattttctgggaaccgcatctcgagcgaa

SEQ ID NO: 1874 - DNA, 40 bp, Artificial Sequence
  Synthetic Oligonucleotide
tgcgaaacgtctatttctgggaagccgcatctcgagtgaa

SEQ ID NO: 1875 - DNA, 40 bp, Artificial Sequence
  Synthetic Oligonucleotide
tgcgaaacgctcattttctgggaaccgcatctcgagcgaa

SEQ ID NO: 1876 - DNA, 40 bp, Artificial Sequence
  Synthetic Oligonucleotide
tgcgaaacgctcatttctgggaagccgcatctcgagcgaa

SEQ ID NO: 1877 - DNA, 40 bp, Artificial Sequence
  Synthetic Oligonucleotide
tgcgaaacgctattttttgggaagccgcatctcgagcgaa

SEQ ID NO: 1878 - DNA, 40 bp, Artificial Sequence
  Synthetic Oligonucleotide
tgcgaaacgctattttctggggagccgcatctcgagcgta

SEQ ID NO: 1879 - DNA, 40 bp, Artificial Sequence
  Synthetic Oligonucleotide
tgcgaaacgctattttctggggagccgcatcccgagcgaa

SEQ ID NO: 1880 - DNA, 40 bp, Artificial Sequence
  Synthetic Oligonucleotide
tgcgaaacgctattttctgggaagtcgcatctcgagcgaa

SEQ ID NO: 1881 - DNA, 40 bp, Artificial Sequence
  Synthetic Oligonucleotide
tgcgaaacgctattttctgggaagctgcgtctcgagcgaa

SEQ ID NO: 1882 - DNA, 40 bp, Artificial Sequence
  Synthetic Oligonucleotide
tgcgaaacgctattttctgggaagccgtatcccgagcgaa

SEQ ID NO: 1883 - DNA, 40 bp, Artificial Sequence
  Synthetic Oligonucleotide
tgcgaaacgctattttctgggaagccgcttctcgagcgaa

SEQ ID NO: 1884 - DNA, 40 bp, Artificial Sequence
  Synthetic Oligonucleotide
tgcgaaacgctattttctgggaagccgcgtctcgagcgta

SEQ ID NO: 1885 - DNA, 40 bp, Artificial Sequence
  Synthetic Oligonucleotide
tgcgaaacgctattttctgggaagccgcgtctcgagcgga

SEQ ID NO: 1886 - DNA, 40 bp, Artificial Sequence
  Synthetic Oligonucleotide
tgcgaaacgctattttctgggaagccgcgtctcgagcgag

SEQ ID NO: 1887 - DNA, 40 bp, Artificial Sequence
  Synthetic Oligonucleotide
tgcgaaacgctattttctgggaagccgcgtctcaagcgaa

SEQ ID NO: 1888 - DNA, 40 bp, Artificial Sequence
  Synthetic Oligonucleotide
tgcgaaacgctattttctgggaagccgcgcctcgagcgaa

SEQ ID NO: 1889 - DNA, 40 bp, Artificial Sequence
  Synthetic Oligonucleotide
tgcgaaacgctattttctgggaagccgcatctctagcgaa

SEQ ID NO: 1890 - DNA, 40 bp, Artificial Sequence
  Synthetic Oligonucleotide
tgcgaaacgctattttctgggaagccgcatctcgtgcgaa

SEQ ID NO: 1891 - DNA, 40 bp, Artificial Sequence
  Synthetic Oligonucleotide
tgcgaaacgctattttctgggaagccgcatctcgagctaa

SEQ ID NO: 1892 - DNA, 40 bp, Artificial Sequence
  Synthetic Oligonucleotide
tgcgaaacgctattttctgggaagccgcatctcgagcgta

SEQ ID NO: 1893 - DNA, 40 bp, Artificial Sequence
  Synthetic Oligonucleotide
tgcgaaacgctattttctgggaagccgcatctcgagcggg

SEQ ID NO: 1894 - DNA, 40 bp, Artificial Sequence
  Synthetic Oligonucleotide
tgcgaaacgctattttctgggaagccgcatctcgaccgtc

SEQ ID NO: 1895 - DNA, 40 bp, Artificial Sequence
  Synthetic Oligonucleotide
tgcgaaacgctattttctgggaagccgcatctcgaacgaa

SEQ ID NO: 1896 - DNA, 40 bp, Artificial Sequence
  Synthetic Oligonucleotide
tgcgaaacgctattttctgggaaccgctgtctcgagcgaa

SEQ ID NO: 1897 - DNA, 40 bp, Artificial Sequence
  Synthetic Oligonucleotide
tgcgaaacgctattttctgggaacccgcatctcgagcgaa

SEQ ID NO: 1898 - DNA, 40 bp, Artificial Sequence
  Synthetic Oligonucleotide
tgcgaaacgctattttccggaggaccgcatctcgagcgaa

SEQ ID NO: 1899 - DNA, 40 bp, Artificial Sequence
  Synthetic Oligonucleotide
tgcgaaacgctattttccgatggaccgcatctcgagcgaa

SEQ ID NO: 1900 - DNA, 40 bp, Artificial Sequence
  Synthetic Oligonucleotide
tgcgaaacgctattttatgggaagccgcatctcgggcgaa

SEQ ID NO: 1901 - DNA, 40 bp, Artificial Sequence
  Synthetic Oligonucleotide
tgcgaaacgctatttctgggaatgccgcgtctcgagcgaa

SEQ ID NO: 1902 - DNA, 40 bp, Artificial Sequence
  Synthetic Oligonucleotide
tgcgaaacgctatttctcgggaagccgcatctcgagcgaa

SEQ ID NO: 1903 - DNA, 40 bp, Artificial Sequence
  Synthetic Oligonucleotide
tgcgaaacgctatttcctgggaagccgcatcccgagcgaa

SEQ ID NO: 1904 - DNA, 40 bp, Artificial Sequence
  Synthetic Oligonucleotide
tgcgaaacgctattctctgggaagccgcatctcgagcgaa

SEQ ID NO: 1905 - DNA, 40 bp, Artificial Sequence
  Synthetic Oligonucleotide
tgcgaaacgctatattctgggaagccgcatctcgagcgaa

SEQ ID NO: 1906 - DNA, 40 bp, Artificial Sequence
  Synthetic Oligonucleotide
tgcgaaacgccttgattcactcctacagtgtgtctataga

SEQ ID NO: 1907 - DNA, 40 bp, Artificial Sequence
  Synthetic Oligonucleotide
tgcgaaaacgctattttctgggaaccgcatctcgagcgaa

SEQ ID NO: 1908 - DNA, 40 bp, Artificial Sequence
  Synthetic Oligonucleotide
tgcctgattccggaacatgcacgtctcgtcttcgtctgcg

SEQ ID NO: 1909 - DNA, 40 bp, Artificial Sequence
  Synthetic Oligonucleotide
tgcctcgttccttcaggtatggccatactatcctctcgtc

SEQ ID NO: 1910 - DNA, 40 bp, Artificial Sequence
  Synthetic Oligonucleotide
tgccggaagtccctcctcgtcttggtgcactatcatctca

SEQ ID NO: 1911 - DNA, 40 bp, Artificial Sequence
  Synthetic Oligonucleotide
tgccggaacgcctcgatcctcgcataatatgatacgtctg

SEQ ID NO: 1912 - DNA, 40 bp, Artificial Sequence
  Synthetic Oligonucleotide
tgccgcctctacatattgcgcaatagttatcttcggtgca

SEQ ID NO: 1913 - DNA, 40 bp, Artificial Sequence
  Synthetic Oligonucleotide
tgccgcctcatcatcggacacgacgtgtatcagtgggctg

SEQ ID NO: 1914 - DNA, 40 bp, Artificial Sequence
  Synthetic Oligonucleotide
tgcattgttccagtcttctcccacagcggctggcactatc

SEQ ID NO: 1915 - DNA, 40 bp, Artificial Sequence
  Synthetic Oligonucleotide
tgcagcacgccttgattcactcctacagtgtgtctataga

SEQ ID NO: 1916 - DNA, 40 bp, Artificial Sequence
  Synthetic Oligonucleotide
tgcacaggtgttaattgcctccggtccttccgtgtgcaca

SEQ ID NO: 1917 - DNA, 40 bp, Artificial Sequence
  Synthetic Oligonucleotide
tgcacagcctcggtcctctcttgggctcacctgcaggcaa

SEQ ID NO: 1918 - DNA, 40 bp, Artificial Sequence
  Synthetic Oligonucleotide
tgatttttacactgcaccctctggccaccggtaccctagt

SEQ ID NO: 1919 - DNA, 40 bp, Artificial Sequence
  Synthetic Oligonucleotide
tgattcttcccggccgctacgcttgcaacgtaaaatgaca

SEQ ID NO: 1920 - DNA, 40 bp, Artificial Sequence
  Synthetic Oligonucleotide
tgattcgccagtcacatcaactatgatgacgcttgactga

SEQ ID NO: 1921 - DNA, 40 bp, Artificial Sequence
  Synthetic Oligonucleotide
tgattcgcagtcacatcaactatgatgacgcttgactgga

SEQ ID NO: 1922 - DNA, 40 bp, Artificial Sequence
  Synthetic Oligonucleotide
tgattccgctgtacgctacatcgactctgcatgactctga

SEQ ID NO: 1923 - DNA, 40 bp, Artificial Sequence
  Synthetic Oligonucleotide
tgattcagtgtgcatccccgcctcagtcactccatgtgca

SEQ ID NO: 1924 - DNA, 40 bp, Artificial Sequence
  Synthetic Oligonucleotide
tgatgtccatgagcttctggcactatccagttgacgctca

SEQ ID NO: 1925 - DNA, 40 bp, Artificial Sequence
  Synthetic Oligonucleotide
tgatgggcttttaagcacttctggtaacttgggcggttac

SEQ ID NO: 1926 - DNA, 40 bp, Artificial Sequence
  Synthetic Oligonucleotide
tgatgggcttttaagcacttctcgtaacttgggtagttac

SEQ ID NO: 1927 - DNA, 40 bp, Artificial Sequence
  Synthetic Oligonucleotide
tgatgggcttttaagcacttctcgtaacttgggcagttac

SEQ ID NO: 1928 - DNA, 40 bp, Artificial Sequence
  Synthetic Oligonucleotide
tgatgggctttaagcactttctcggtaacttggcagttac

SEQ ID NO: 1929 - DNA, 40 bp, Artificial Sequence
  Synthetic Oligonucleotide
tgatgggctttaagcacttcttggtaacttggggagttac

SEQ ID NO: 1930 - DNA, 40 bp, Artificial Sequence
  Synthetic Oligonucleotide
tgatgggctttaagcacttctcggtaactttggcagttac

SEQ ID NO: 1931 - DNA, 40 bp, Artificial Sequence
  Synthetic Oligonucleotide
tgatgggctttaagcacttctcggtaacttgggcagttgc

SEQ ID NO: 1932 - DNA, 40 bp, Artificial Sequence
  Synthetic Oligonucleotide
tgatgggctttaagcacttctcggtaaccttgggcgttac

SEQ ID NO: 1933 - DNA, 40 bp, Artificial Sequence
  Synthetic Oligonucleotide
tgatgggctttaaagcactttctgggatacctggcagtac

SEQ ID NO: 1934 - DNA, 40 bp, Artificial Sequence
  Synthetic Oligonucleotide
tgatgggcctttaagcacttctcggtacttgggcagttac

SEQ ID NO: 1935 - DNA, 40 bp, Artificial Sequence
  Synthetic Oligonucleotide
tgatggcttaaagcactttctcgggatacctggcagtaac

SEQ ID NO: 1936 - DNA, 40 bp, Artificial Sequence
  Synthetic Oligonucleotide
tgatcttactgggaagttgtatgtcccttttaacgtaacg

SEQ ID NO: 1937 - DNA, 40 bp, Artificial Sequence
  Synthetic Oligonucleotide
tgatccctaacgagccattctttcgcgcactatcgcgatt

SEQ ID NO: 1938 - DNA, 40 bp, Artificial Sequence
  Synthetic Oligonucleotide
tgatagaaatttcgcccgccttgcgcctcttacatcgccg

SEQ ID NO: 1939 - DNA, 40 bp, Artificial Sequence
  Synthetic Oligonucleotide
tgagttcccggggctcaccgcctctgtcttatagaatgcg

SEQ ID NO: 1940 - DNA, 40 bp, Artificial Sequence
  Synthetic Oligonucleotide
tgagtccctcctagtctcggatatctttaagcccgcatca

SEQ ID NO: 1941 - DNA, 40 bp, Artificial Sequence
  Synthetic Oligonucleotide
tgagggcttttaagcacttctcggtaacttgggcagttac

SEQ ID NO: 1942 - DNA, 40 bp, Artificial Sequence
  Synthetic Oligonucleotide
tgaggcttaagctactttctcggataccttaggtcagtac

SEQ ID NO: 1943 - DNA, 40 bp, Artificial Sequence
  Synthetic Oligonucleotide
tgaggcgttttaagcacttctcggtaacttgggcagttac

SEQ ID NO: 1944 - DNA, 40 bp, Artificial Sequence
  Synthetic Oligonucleotide
tgagctcccgcctcgtgtctggaacgttctggagactgcg

SEQ ID NO: 1945 - DNA, 40 bp, Artificial Sequence
  Synthetic Oligonucleotide
tgagccatggatcattgcctcgattcgtccacgtggtggc

SEQ ID NO: 1946 - DNA, 40 bp, Artificial Sequence
  Synthetic Oligonucleotide
tgagcaacgccttgattcactcctacagtgtgtctataga

SEQ ID NO: 1947 - DNA, 40 bp, Artificial Sequence
  Synthetic Oligonucleotide
tgagatttccgcctcggtatgccgccttgttctccttgta

SEQ ID NO: 1948 - DNA, 40 bp, Artificial Sequence
  Synthetic Oligonucleotide
tgagagtctcgcggtccgcttcgcgccttctatctcgctg

SEQ ID NO: 1949 - DNA, 40 bp, Artificial Sequence
  Synthetic Oligonucleotide
tgacttactggaagttgtgatgtcccattttaacgtaacg

SEQ ID NO: 1950 - DNA, 40 bp, Artificial Sequence
  Synthetic Oligonucleotide
tgacgaacgcttatttctgggaagccgcatctcgagcgaa

SEQ ID NO: 1951 - DNA, 40 bp, Artificial Sequence
  Synthetic Oligonucleotide
tgaccgcctcatctatcggacacgactgtatcagttgctg

SEQ ID NO: 1952 - DNA, 40 bp, Artificial Sequence
  Synthetic Oligonucleotide
tgaccgcctcatctatcggacacgactcgtatcagtgctg

SEQ ID NO: 1953 - DNA, 40 bp, Artificial Sequence
  Synthetic Oligonucleotide
tgaccgcctcatctatcggacacgacgtgtatcagtgctg

SEQ ID NO: 1954 - DNA, 40 bp, Artificial Sequence
  Synthetic Oligonucleotide
tgaccgcctcatcatcggacacgacgtgtatcgagtgctg

SEQ ID NO: 1955 - DNA, 40 bp, Artificial Sequence
  Synthetic Oligonucleotide
tgaccgcctcatcatcggacacgacgtgtatcagttgctg

SEQ ID NO: 1956 - DNA, 40 bp, Artificial Sequence
  Synthetic Oligonucleotide
tgacattccggatatcagaacgcctcagtcatcccaataa

SEQ ID NO: 1957 - DNA, 40 bp, Artificial Sequence
  Synthetic Oligonucleotide
tgaattctagcttctccgcctcgatctttccaagtcgctg

SEQ ID NO: 1958 - DNA, 40 bp, Artificial Sequence
  Synthetic Oligonucleotide
tgaagtccgtggtttcactagactactactgatcacgtcg

SEQ ID NO: 1959 - DNA, 40 bp, Artificial Sequence
  Synthetic Oligonucleotide
tgaagtccgctggttcactagactactactgatcacgtcg

SEQ ID NO: 1960 - DNA, 40 bp, Artificial Sequence
  Synthetic Oligonucleotide
tgaagtccgcgtattcactagactactactgatcacgtcg

SEQ ID NO: 1961 - DNA, 40 bp, Artificial Sequence
  Synthetic Oligonucleotide
tgaagtccgcggttttactagactactactgatcacgtcg

SEQ ID NO: 1962 - DNA, 40 bp, Artificial Sequence
  Synthetic Oligonucleotide
tgaagtccgcggtttcactagagtactactgatcacgtcg

SEQ ID NO: 1963 - DNA, 40 bp, Artificial Sequence
  Synthetic Oligonucleotide
tgaagtccgcggtttcactagactactactgatcacgtgg

SEQ ID NO: 1964 - DNA, 40 bp, Artificial Sequence
  Synthetic Oligonucleotide
tgaagtccgcggtttcactagactactactgaccacgtcg

SEQ ID NO: 1965 - DNA, 40 bp, Artificial Sequence
  Synthetic Oligonucleotide
tgaagtccgcggtttcactagaccactactgatcacgtcg

SEQ ID NO: 1966 - DNA, 40 bp, Artificial Sequence
  Synthetic Oligonucleotide
tgaagtccgcggttccactagactactactgatcacgtcg

SEQ ID NO: 1967 - DNA, 40 bp, Artificial Sequence
  Synthetic Oligonucleotide
tgaagtccgcggttcactgagactactactgatcacgtcg

SEQ ID NO: 1968 - DNA, 40 bp, Artificial Sequence
  Synthetic Oligonucleotide
tgaagtccgcggttcactagactactacctgatcacgtcg

SEQ ID NO: 1969 - DNA, 40 bp, Artificial Sequence
  Synthetic Oligonucleotide
tgaaggtccgcggttcactagactactactgatcacgtcg

SEQ ID NO: 1970 - DNA, 40 bp, Artificial Sequence
  Synthetic Oligonucleotide
tgaagcccgcggtttcactagactactactgatcacgtcg

SEQ ID NO: 1971 - DNA, 40 bp, Artificial Sequence
  Synthetic Oligonucleotide
tcttgctagcggattcgtctcgacctccccatgcgctgta

SEQ ID NO: 1972 - DNA, 40 bp, Artificial Sequence
  Synthetic Oligonucleotide
tcttctacgccgaggacgtctttcgtgcactatcacgatt

SEQ ID NO: 1973 - DNA, 40 bp, Artificial Sequence
  Synthetic Oligonucleotide
tcttccatctgtcgcgatacagaatacgtattaacataaa

SEQ ID NO: 1974 - DNA, 40 bp, Artificial Sequence
  Synthetic Oligonucleotide
tcttccatctggtcgtgatacagaatacgattaacataaa

SEQ ID NO: 1975 - DNA, 40 bp, Artificial Sequence
  Synthetic Oligonucleotide
tcttccatctggtcgcgatacagaatacggttaacataaa

SEQ ID NO: 1976 - DNA, 40 bp, Artificial Sequence
  Synthetic Oligonucleotide
tcttccatctggtcgcgatacagaatacgattagcataaa

SEQ ID NO: 1977 - DNA, 40 bp, Artificial Sequence
  Synthetic Oligonucleotide
tcttccatctggtcgcgatacagaatacgattaatataaa

SEQ ID NO: 1978 - DNA, 40 bp, Artificial Sequence
  Synthetic Oligonucleotide
tcttccatctggtcgcgatacagaatacgattaacttaaa

SEQ ID NO: 1979 - DNA, 40 bp, Artificial Sequence
  Synthetic Oligonucleotide
tcttccatctggtcgcgatacagaatacgattaacatcaa

SEQ ID NO: 1980 - DNA, 40 bp, Artificial Sequence
  Synthetic Oligonucleotide
tcttccatctggtcgcgatacagaatacgattaacatata

SEQ ID NO: 1981 - DNA, 40 bp, Artificial Sequence
  Synthetic Oligonucleotide
tcttccatctggtcgcgatacagaatacgattaacacaaa

SEQ ID NO: 1982 - DNA, 40 bp, Artificial Sequence
  Synthetic Oligonucleotide
tcttccatctggtcgcgatacagaatacgattaacaaaaa

SEQ ID NO: 1983 - DNA, 40 bp, Artificial Sequence
  Synthetic Oligonucleotide
tcttccatctggtcgcgatacagaatacgatgaacataaa

SEQ ID NO: 1984 - DNA, 40 bp, Artificial Sequence
  Synthetic Oligonucleotide
tcttccatctggtcgcgacacagaatacgattaacataaa

SEQ ID NO: 1985 - DNA, 40 bp, Artificial Sequence
  Synthetic Oligonucleotide
tcttccatctggccgcgatacagaatacgattaacataaa

SEQ ID NO: 1986 - DNA, 40 bp, Artificial Sequence
  Synthetic Oligonucleotide
tcttccatccggtcgcgatacagaatacgattaacataaa

SEQ ID NO: 1987 - DNA, 40 bp, Artificial Sequence
  Synthetic Oligonucleotide
tcttccacctgtcgcgatacatgaatacgattaacataaa

SEQ ID NO: 1988 - DNA, 40 bp, Artificial Sequence
  Synthetic Oligonucleotide
tctgtgatctgttatcgagcactatctcgtcgctacggag

SEQ ID NO: 1989 - DNA, 40 bp, Artificial Sequence
  Synthetic Oligonucleotide
tctgggcttttaagcacttctcggtaacttgggcagttac

SEQ ID NO: 1990 - DNA, 40 bp, Artificial Sequence
  Synthetic Oligonucleotide
tctgctctcggatctaaatgtgctgtacatcctcctcccg

SEQ ID NO: 1991 - DNA, 40 bp, Artificial Sequence
  Synthetic Oligonucleotide
tctctatccggcaggacgtcttcgtgccactatcacgatt

SEQ ID NO: 1992 - DNA, 40 bp, Artificial Sequence
  Synthetic Oligonucleotide
tctcgatctcttctgcccgggctttacttcttcgactgta

SEQ ID NO: 1993 - DNA, 40 bp, Artificial Sequence
  Synthetic Oligonucleotide
tctcctaagtttagtcgtctttcgaggactacctcgtttc

SEQ ID NO: 1994 - DNA, 40 bp, Artificial Sequence
  Synthetic Oligonucleotide
tctcccaagtttagtcgtctttcgagggctacctcgtttc

SEQ ID NO: 1995 - DNA, 40 bp, Artificial Sequence
  Synthetic Oligonucleotide
tctcccaagttcagtcgtctttcgaggactacctcgtttc

SEQ ID NO: 1996 - DNA, 40 bp, Artificial Sequence
  Synthetic Oligonucleotide
tctagtctagacacctctcgtcgttacttagatgtgcgca

SEQ ID NO: 1997 - DNA, 40 bp, Artificial Sequence
  Synthetic Oligonucleotide
tctagtccgctcatctctgactacagggaagattgaggga

SEQ ID NO: 1998 - DNA, 40 bp, Artificial Sequence
  Synthetic Oligonucleotide
tctagggtcctgacgcactcctctaactcgaggcgtccca

SEQ ID NO: 1999 - DNA, 40 bp, Artificial Sequence
  Synthetic Oligonucleotide
tctaggctttcacgcacgcggattgtacccggactgggtt

SEQ ID NO: 2000 - DNA, 40 bp, Artificial Sequence
  Synthetic Oligonucleotide
tctactatcggcaggacgtcttctgctactatcacagatt

SEQ ID NO: 2001 - DNA, 40 bp, Artificial Sequence
  Synthetic Oligonucleotide
tcgtgatcagctagtcgtgctttgtccgctatgacattca

SEQ ID NO: 2002 - DNA, 40 bp, Artificial Sequence
  Synthetic Oligonucleotide
tcgtgatacttgaggtcgttgtgcgcttacgaaccctaat

SEQ ID NO: 2003 - DNA, 40 bp, Artificial Sequence
  Synthetic Oligonucleotide
tcgtacttaccaccctgacatcgcgggggaactaatggtt

SEQ ID NO: 2004 - skipped

SEQ ID NO: 2005 - DNA, 40 bp, Artificial Sequence
  Synthetic Oligonucleotide
tcgggtctcacgtcataccccgattccgagccgtcaattg

SEQ ID NO: 2006 - DNA, 40 bp, Artificial Sequence
  Synthetic Oligonucleotide
tcggatgacttgagtcgttgtgcgcttacggaaccctaat

SEQ ID NO: 2007 - DNA, 40 bp, Artificial Sequence
  Synthetic Oligonucleotide
tcggagatacgaatatttcgcgatcgcccctctgcctggg

SEQ ID NO: 2008 - DNA, 40 bp, Artificial Sequence
  Synthetic Oligonucleotide
tcgctcggctcacttcgtctttgatcgaccacgctcataa

SEQ ID NO: 2009 - DNA, 40 bp, Artificial Sequence
  Synthetic Oligonucleotide
tcgcgcagctcacctcgtctttgatcgaccacgctcataa

SEQ ID NO: 2010 - DNA, 40 bp, Artificial Sequence
  Synthetic Oligonucleotide
tcgcgcaacgcctcgatcctcgcataatatgatacgtctg

SEQ ID NO: 2011 - DNA, 40 bp, Artificial Sequence
  Synthetic Oligonucleotide
tcgcgattacatcagtcccaggatcactaggttatgtcta

SEQ ID NO: 2012 - DNA, 40 bp, Artificial Sequence
  Synthetic Oligonucleotide
tcgcgatcagctagtcgtgctttgtccgctatgacattca

SEQ ID NO: 2013 - DNA, 40 bp, Artificial Sequence
  Synthetic Oligonucleotide
tcgcgaaacgctatttctgggaagccgcatctcgagcgaa

SEQ ID NO: 2014 - DNA, 40 bp, Artificial Sequence
  Synthetic Oligonucleotide
tcgcctcggtctacccctaatgttgcaacataatggtaaa

SEQ ID NO: 2015 - DNA, 40 bp, Artificial Sequence
  Synthetic Oligonucleotide
tcgcctccttcctccatgagcatgcttactcgggatactg

SEQ ID NO: 2016 - DNA, 40 bp, Artificial Sequence
  Synthetic Oligonucleotide
tcgcctcaggttcccctaacgcgttagaccttccggaatg

SEQ ID NO: 2017 - DNA, 40 bp, Artificial Sequence
  Synthetic Oligonucleotide
tcgcctcaggttcccctaacgcgttacgccttccggaatg

SEQ ID NO: 2018 - DNA, 40 bp, Artificial Sequence
  Synthetic Oligonucleotide
tcgcccagctcactttgtctttgatcgaccacgctcataa

SEQ ID NO: 2019 - DNA, 40 bp, Artificial Sequence
  Synthetic Oligonucleotide
tcgccacagctcacttcgctttgatcgaccacgctcataa

SEQ ID NO: 2020 - DNA, 40 bp, Artificial Sequence
  Synthetic Oligonucleotide
tcgcatagctcacttcgtctttgatcgaccacgctcataa

SEQ ID NO: 2021 - DNA, 40 bp, Artificial Sequence
  Synthetic Oligonucleotide
tcgcacaggctcacttcgtcttgatcgaccacgctcataa

SEQ ID NO: 2022 - DNA, 40 bp, Artificial Sequence
  Synthetic Oligonucleotide
tcgcacagctctacttcgtcttgatcgaccacgctcataa

SEQ ID NO: 2023 - DNA, 40 bp, Artificial Sequence
  Synthetic Oligonucleotide
tcgcacagctcatttcgtctttgatcgaccacgctcataa

SEQ ID NO: 2024 - DNA, 40 bp, Artificial Sequence
  Synthetic Oligonucleotide
tcgcacagctcacttcgtctttgattgaccacgctcataa

SEQ ID NO: 2025 - DNA, 40 bp, Artificial Sequence
  Synthetic Oligonucleotide
tcgcacagctcacttcgtctttgatcgtccacgctcataa

SEQ ID NO: 2026 - DNA, 40 bp, Artificial Sequence
  Synthetic Oligonucleotide
tcgcacagctcacttcgtctttgatcgatcacgctcataa

SEQ ID NO: 2027 - DNA, 40 bp, Artificial Sequence
  Synthetic Oligonucleotide
tcgcacagctcacttcgtctttgatcgaccatgctcataa

SEQ ID NO: 2028 - DNA, 40 bp, Artificial Sequence
  Synthetic Oligonucleotide
tcgcacagctcacttcgtctttgatcgaccacgctcacaa

SEQ ID NO: 2029 - DNA, 40 bp, Artificial Sequence
  Synthetic Oligonucleotide
tcgcacagctcacttcgtctttgatcgaccacgcgcataa

SEQ ID NO: 2030 - DNA, 40 bp, Artificial Sequence
  Synthetic Oligonucleotide
tcgcacagctcacttcgtctttgatcgaccacgcccataa

SEQ ID NO: 2031 - DNA, 40 bp, Artificial Sequence
  Synthetic Oligonucleotide
tcgcacagctcacttcgtctttgatcgaccacactcataa

SEQ ID NO: 2032 - DNA, 40 bp, Artificial Sequence
  Synthetic Oligonucleotide
tcgcacagctcacttcgtctttgatcgaacacgctcataa

SEQ ID NO: 2033 - DNA, 40 bp, Artificial Sequence
  Synthetic Oligonucleotide
tcgcacagctcacttcgtctttgatcacccacgctcataa

SEQ ID NO: 2034 - DNA, 40 bp, Artificial Sequence
  Synthetic Oligonucleotide
tcgcacagctcacttcgtctctgatcgaccacgctcataa

SEQ ID NO: 2035 - DNA, 40 bp, Artificial Sequence
  Synthetic Oligonucleotide
tcgcacagctcacttcgcctttgatcgaccacgctcatag

SEQ ID NO: 2036 - DNA, 40 bp, Artificial Sequence
  Synthetic Oligonucleotide
tcgcacagctcactctgtctttgatcgaccacgctcacaa

SEQ ID NO: 2037 - DNA, 40 bp, Artificial Sequence
  Synthetic Oligonucleotide
tcgcacagctcactccgtctttgatcgaccacgctcataa

SEQ ID NO: 2038 - DNA, 40 bp, Artificial Sequence
  Synthetic Oligonucleotide
tcgcacagctaacttcgtctttgatcgaccacgctcataa

SEQ ID NO: 2039 - DNA, 40 bp, Artificial Sequence
  Synthetic Oligonucleotide
tcgcacagcgcacttcgtctttgatcgaccacgctcataa

SEQ ID NO: 2040 - DNA, 40 bp, Artificial Sequence
  Synthetic Oligonucleotide
tcgcacagcccactccgtctttgatcgaccacgctcataa

SEQ ID NO: 2041 - DNA, 40 bp, Artificial Sequence
  Synthetic Oligonucleotide
tcgatgggctttagcacttctccgtaacttgggcagttac

SEQ ID NO: 2042 - DNA, 40 bp, Artificial Sequence
  Synthetic Oligonucleotide
tcgatgggcctttagacacttctccgtacttggcagttac

SEQ ID NO: 2043 - DNA, 40 bp, Artificial Sequence
  Synthetic Oligonucleotide
tcgatcgcccgtcacatcaactatgatgacgcttgctgga

SEQ ID NO: 2044 - DNA, 40 bp, Artificial Sequence
  Synthetic Oligonucleotide
tcgatcgccagcacatcacttatgactgacgcttactaga

SEQ ID NO: 2045 - DNA, 40 bp, Artificial Sequence
  Synthetic Oligonucleotide
tcgatccttcctcagcctccgcggtgcaggatttgcacgt

SEQ ID NO: 2046 - DNA, 40 bp, Artificial Sequence
  Synthetic Oligonucleotide
tcgatcacagctcacttcatcttgatcgacacgctcataa

SEQ ID NO: 2047 - DNA, 40 bp, Artificial Sequence
  Synthetic Oligonucleotide
tcgagtcgcgtatcgccatatgccggcattctcgtacact

SEQ ID NO: 2048 - DNA, 40 bp, Artificial Sequence
  Synthetic Oligonucleotide
tcgagacgttgagcacgttgcagatcgccctctgtacgta

SEQ ID NO: 2049 - DNA, 40 bp, Artificial Sequence
  Synthetic Oligonucleotide
tcgaagtccgcggttcactagactactactgatcacgtcg

SEQ ID NO: 2050 - DNA, 40 bp, Artificial Sequence
  Synthetic Oligonucleotide
tccgcggctgcctcgatcttcccaacattctgtagcgctg

SEQ ID NO: 2051 - DNA, 40 bp, Artificial Sequence
  Synthetic Oligonucleotide
tccgcctctgccttccagctacggtagcactataggccta

SEQ ID NO: 2052 - DNA, 40 bp, Artificial Sequence
  Synthetic Oligonucleotide
tccgcaccccgatagtcatcttcactggaccacccgtgta

SEQ ID NO: 2053 - DNA, 40 bp, Artificial Sequence
  Synthetic Oligonucleotide
tccgaatgcatgcgggctgcctcataagtgcacaatctac

SEQ ID NO: 2054 - DNA, 40 bp, Artificial Sequence
  Synthetic Oligonucleotide
tccgaagtccccaattcgtgtccgtacgctattacggttt

SEQ ID NO: 2055 - DNA, 40 bp, Artificial Sequence
  Synthetic Oligonucleotide
tcccgggtatggcctcgtcttctcgctcggatcgaactac

SEQ ID NO: 2056 - DNA, 40 bp, Artificial Sequence
  Synthetic Oligonucleotide
tcccgcctcatcatcggacacgacgtgtatcagttggctg

SEQ ID NO: 2057 - DNA, 40 bp, Artificial Sequence
  Synthetic Oligonucleotide
tccccttcatcggaattgacaactcaccccgttgtcttga

SEQ ID NO: 2058 - DNA, 40 bp, Artificial Sequence
  Synthetic Oligonucleotide
tcccctccatcggaattgataactcaccccgttgtcttga

SEQ ID NO: 2059 - DNA, 40 bp, Artificial Sequence
  Synthetic Oligonucleotide
tccatgggtacgccttcgattccgccatacatgcatgtaa

SEQ ID NO: 2060 - DNA, 40 bp, Artificial Sequence
  Synthetic Oligonucleotide
tccatggctcggtcgtttgtcaaagactactttgatggtt

SEQ ID NO: 2061 - DNA, 40 bp, Artificial Sequence
  Synthetic Oligonucleotide
tccatcagctgctggatttcctcgatcatcccagtctgta

SEQ ID NO: 2062 - DNA, 40 bp, Artificial Sequence
  Synthetic Oligonucleotide
tccaagtcctcaattcgtcgtccgtacgctattacggttt

SEQ ID NO: 2063 - DNA, 40 bp, Artificial Sequence
  Synthetic Oligonucleotide
tccaagtccccaattcgtcgtccgtacgctattacgtttt

SEQ ID NO: 2064 - DNA, 40 bp, Artificial Sequence
  Synthetic Oligonucleotide
tccaagtccccaattcgtcgtccgcacgctattacggttt

SEQ ID NO: 2065 - DNA, 40 bp, Artificial Sequence
  Synthetic Oligonucleotide
tcatggggcttttaagcacttccgtgacttgggcagttac

SEQ ID NO: 2066 - DNA, 40 bp, Artificial Sequence
  Synthetic Oligonucleotide
tcatggggctttaagctacttctcgtacttgggcagttac

SEQ ID NO: 2067 - DNA, 40 bp, Artificial Sequence
  Synthetic Oligonucleotide
tcatggggctttaagcacttctcggtacttggcagttacc

SEQ ID NO: 2068 - DNA, 40 bp, Artificial Sequence
  Synthetic Oligonucleotide
tcatgggcttttaagcacttctcggtacttgggcagttac

SEQ ID NO: 2069 - DNA, 40 bp, Artificial Sequence
  Synthetic Oligonucleotide
tcatgggcttttaagcactctcggtaacttgggcagctac

SEQ ID NO: 2070 - DNA, 40 bp, Artificial Sequence
  Synthetic Oligonucleotide
tcatgggctttaagctacttctcggtaacttggcagttac

SEQ ID NO: 2071 - DNA, 40 bp, Artificial Sequence
  Synthetic Oligonucleotide
tcatgggctttaagcagcttctcgttacttggcagcttac

SEQ ID NO: 2072 - DNA, 40 bp, Artificial Sequence
  Synthetic Oligonucleotide
tcatgggctttaagcacttctcgtaacttgggcagcttac

SEQ ID NO: 2073 - DNA, 40 bp, Artificial Sequence
  Synthetic Oligonucleotide
tcatgggctttaagcacttctcggtaacttgggcagctta

SEQ ID NO: 2074 - DNA, 40 bp, Artificial Sequence
  Synthetic Oligonucleotide
tcatgggctttaagcacttctcggtaacttgggcagctac

SEQ ID NO: 2075 - DNA, 40 bp, Artificial Sequence
  Synthetic Oligonucleotide
tcatgggctttaagcacttctcggtaacttgagcagttac

SEQ ID NO: 2076 - DNA, 40 bp, Artificial Sequence
  Synthetic Oligonucleotide
tcatgggctttaagcacttcctggtaaccttggcagttac

SEQ ID NO: 2077 - DNA, 40 bp, Artificial Sequence
  Synthetic Oligonucleotide
tcatggctttagcgactcgtcgatacttcggcagcttatc

SEQ ID NO: 2078 - DNA, 40 bp, Artificial Sequence
  Synthetic Oligonucleotide
tcatcgcatccgttgcatccacctctgtgtatgctcatgc

SEQ ID NO: 2079 - DNA, 40 bp, Artificial Sequence
  Synthetic Oligonucleotide
tcatcgattgaccgcccctctgatcgctaaccggttacga

SEQ ID NO: 2080 - DNA, 40 bp, Artificial Sequence
  Synthetic Oligonucleotide
tcatcatggctgcccctctgccttattaggggccctaagg

SEQ ID NO: 2081 - DNA, 40 bp, Artificial Sequence
  Synthetic Oligonucleotide
tcatcatggctgcccctctgccttattaggagccctaagg

SEQ ID NO: 2082 - DNA, 40 bp, Artificial Sequence
  Synthetic Oligonucleotide
tcagtattgctccgccttgcatcttccctctatggaccaa

SEQ ID NO: 2083 - DNA, 40 bp, Artificial Sequence
  Synthetic Oligonucleotide
tcagggctttagctcacttctcggtaacttgggcagttac

SEQ ID NO: 2084 - DNA, 40 bp, Artificial Sequence
  Synthetic Oligonucleotide
tcaggacacgctaatttcgtactgatcgcccctctgtgca

SEQ ID NO: 2085 - DNA, 40 bp, Artificial Sequence
  Synthetic Oligonucleotide
tcagctgctcctgccagaaatcgtgctccctaacgttaag

SEQ ID NO: 2086 - DNA, 40 bp, Artificial Sequence
  Synthetic Oligonucleotide
tcagaaaccagctttcgtgcactatcacgtatcctgctgt

SEQ ID NO: 2087 - DNA, 40 bp, Artificial Sequence
  Synthetic Oligonucleotide
tcactatccgtttgtccgtcctctgtggtattgcgcatgc

SEQ ID NO: 2088 - DNA, 40 bp, Artificial Sequence
  Synthetic Oligonucleotide
tcactatcccatcgagcgatcgtcgtaatactgcttccaa

SEQ ID NO: 2089 - DNA, 40 bp, Artificial Sequence
  Synthetic Oligonucleotide
tcacgtatccgttgtccgtcctctgtcgtattaccgcata

SEQ ID NO: 2090 - DNA, 40 bp, Artificial Sequence
  Synthetic Oligonucleotide
tcacgggctttaagcacttctcggtaacttgggcagttac

SEQ ID NO: 2091 - DNA, 40 bp, Artificial Sequence
  Synthetic Oligonucleotide
tcacgcagctcacttcgtctttgatcgaccacgctcataa

SEQ ID NO: 2092 - DNA, 40 bp, Artificial Sequence
  Synthetic Oligonucleotide
tcaccgctcatcatcggacacgacgtgtattcagttgctg

SEQ ID NO: 2093 - DNA, 40 bp, Artificial Sequence
  Synthetic Oligonucleotide
tcaccgctcactcatcggacacgacgtgtatcagttgctg

SEQ ID NO: 2094 - DNA, 40 bp, Artificial Sequence
  Synthetic Oligonucleotide
tcaccgcctcatcattggacacgacgtgtatcagttgctg

SEQ ID NO: 2095 - DNA, 40 bp, Artificial Sequence
  Synthetic Oligonucleotide
tcaccgccctcatcatcggacacgactgtatcagttgctg

SEQ ID NO: 2096 - DNA, 40 bp, Artificial Sequence
  Synthetic Oligonucleotide
tcacacagctcacttcgtctttgatcgaccacgctcataa

SEQ ID NO: 2097 - DNA, 40 bp, Artificial Sequence
  Synthetic Oligonucleotide
tcaattctcggataatatcgcctcgattcccccatctgtg

SEQ ID NO: 2098 - DNA, 40 bp, Artificial Sequence
  Synthetic Oligonucleotide
tcaattacactttaatggtatgacggcccctctgtgtacg

SEQ ID NO: 2099 - DNA, 40 bp, Artificial Sequence
  Synthetic Oligonucleotide
tcaaccgcctcatcatcggacacgactgtatcagttgctg

SEQ ID NO: 2100 - DNA, 40 bp, Artificial Sequence
  Synthetic Oligonucleotide
tcaaccgcctcatcatcggacacgacgtgatcagttgctg

SEQ ID NO: 2101 - DNA, 40 bp, Artificial Sequence
  Synthetic Oligonucleotide
tcaaagcagtcggaacgctatttccggatttacgcgagac

SEQ ID NO: 2102 - DNA, 40 bp, Artificial Sequence
  Synthetic Oligonucleotide
tatttgccagtcacatcaactacgatgacgcttgactgga

SEQ ID NO: 2103 - DNA, 40 bp, Artificial Sequence
  Synthetic Oligonucleotide
tatttgcagctcacatcaactatgatgacgcttgactgga

SEQ ID NO: 2104 - DNA, 40 bp, Artificial Sequence
  Synthetic Oligonucleotide
tattgtggcatttgggcgccattccccctaagaatctgcg

SEQ ID NO: 2105 - DNA, 40 bp, Artificial Sequence
  Synthetic Oligonucleotide
tattgggctttaagtcgactctcgtaacttggctagttac

SEQ ID NO: 2106 - DNA, 40 bp, Artificial Sequence
  Synthetic Oligonucleotide
tattgcgctagccacatcacttatgatgacgctgactgta

SEQ ID NO: 2107 - DNA, 40 bp, Artificial Sequence
  Synthetic Oligonucleotide
tattgcgctagcacatcaactatgatgacgcttgactgga

SEQ ID NO: 2108 - DNA, 40 bp, Artificial Sequence
  Synthetic Oligonucleotide
tattgcgcagtcacatccaactatgatgcgcttgactgga

SEQ ID NO: 2109 - DNA, 40 bp, Artificial Sequence
  Synthetic Oligonucleotide
tattgccagctcacatcaactatgatgacgcttgactgga

SEQ ID NO: 2110 - DNA, 40 bp, Artificial Sequence
  Synthetic Oligonucleotide
tattcgctagtcacatcaacttatgatgacgcttgactga

SEQ ID NO: 2111 - DNA, 40 bp, Artificial Sequence
  Synthetic Oligonucleotide
tattcgctagtcacatcaactatgatgacgcttggctgga

SEQ ID NO: 2112 - DNA, 40 bp, Artificial Sequence
  Synthetic Oligonucleotide
tattcgcctgtcacatcaactatgatgacgcttggctgga

SEQ ID NO: 2113 - DNA, 40 bp, Artificial Sequence
  Synthetic Oligonucleotide
tattcgcctgtcacatcaactatgatgacgcttgactgga

SEQ ID NO: 2114 - DNA, 40 bp, Artificial Sequence
  Synthetic Oligonucleotide
tattcgcctagtcacatcaactatgatgactgctgactga

SEQ ID NO: 2115 - DNA, 40 bp, Artificial Sequence
  Synthetic Oligonucleotide
tattcgcctagtcacatcaactatgatgacgcttgactga

SEQ ID NO: 2116 - DNA, 40 bp, Artificial Sequence
  Synthetic Oligonucleotide
tattcgcctagtcacatcaactatgatacgcttgactgga

SEQ ID NO: 2117 - DNA, 40 bp, Artificial Sequence
  Synthetic Oligonucleotide
tattcgcctagcacatcaactatgatgacgcttgactgga

SEQ ID NO: 2118 - DNA, 40 bp, Artificial Sequence
  Synthetic Oligonucleotide
tattcgccgtcgacatcaacttatgatgacgctgactgga

SEQ ID NO: 2119 - DNA, 40 bp, Artificial Sequence
  Synthetic Oligonucleotide
tattcgccggtcacatcaactatgatggcgcttgactgga

SEQ ID NO: 2120 - DNA, 40 bp, Artificial Sequence
  Synthetic Oligonucleotide
tattcgcccgtcacatcaactatgatgacgcttgactgga

SEQ ID NO: 2121 - DNA, 40 bp, Artificial Sequence
  Synthetic Oligonucleotide
tattcgcccagtcacatcaactatgatgcgcttgactgga

SEQ ID NO: 2122 - DNA, 40 bp, Artificial Sequence
  Synthetic Oligonucleotide
tattcgcccagtcacatcaactatgatgacgcttgctgga

SEQ ID NO: 2123 - DNA, 40 bp, Artificial Sequence
  Synthetic Oligonucleotide
tattcgcccagcacatcactatgatgacgcttgacctgga

SEQ ID NO: 2124 - DNA, 40 bp, Artificial Sequence
  Synthetic Oligonucleotide
tattcgcccagcacatcaactatgatgacgcttgactgga

SEQ ID NO: 2125 - DNA, 40 bp, Artificial Sequence
  Synthetic Oligonucleotide
tattcgccatccacatcaactatgatgacgcttgactgga

SEQ ID NO: 2126 - DNA, 40 bp, Artificial Sequence
  Synthetic Oligonucleotide
tattcgccatacgagacaacttatgatgacgcttgactga

SEQ ID NO: 2127 - DNA, 40 bp, Artificial Sequence
  Synthetic Oligonucleotide
tattcgccagtctacatcaactatgatgacgcttgactga

SEQ ID NO: 2128 - DNA, 40 bp, Artificial Sequence
  Synthetic Oligonucleotide
tattcgccagtcgacatcaactatgatgacgcttgactga

SEQ ID NO: 2129 - DNA, 40 bp, Artificial Sequence
  Synthetic Oligonucleotide
tattcgccagtccacatcaactatgatgacgcttgactga

SEQ ID NO: 2130 - DNA, 40 bp, Artificial Sequence
  Synthetic Oligonucleotide
tattcgccagtccacatcaactatgatgacgctgactgga

SEQ ID NO: 2131 - DNA, 40 bp, Artificial Sequence
  Synthetic Oligonucleotide
tattcgccagtcacattaactatgatgacgcttgactggc

SEQ ID NO: 2132 - DNA, 40 bp, Artificial Sequence
  Synthetic Oligonucleotide
tattcgccagtcacatgaactatgatgacgcttgactgga

SEQ ID NO: 2133 - DNA, 40 bp, Artificial Sequence
  Synthetic Oligonucleotide
tattcgccagtcacatccactatgatgacgcttggctgga

SEQ ID NO: 2134 - DNA, 40 bp, Artificial Sequence
  Synthetic Oligonucleotide
tattcgccagtcacatcagctatggtgacgcttgactgga

SEQ ID NO: 2135 - DNA, 40 bp, Artificial Sequence
  Synthetic Oligonucleotide
tattcgccagtcacatcagctatgatggcgcttgactgga

SEQ ID NO: 2136 - DNA, 40 bp, Artificial Sequence
  Synthetic Oligonucleotide
tattcgccagtcacatcagctatgatgacgcttggctgga

SEQ ID NO: 2137 - DNA, 40 bp, Artificial Sequence
  Synthetic Oligonucleotide
tattcgccagtcacatcaattatgatgacgcttgactgga

SEQ ID NO: 2138 - DNA, 40 bp, Artificial Sequence
  Synthetic Oligonucleotide
tattcgccagtcacatcaactatgttgacgcttgactgga

SEQ ID NO: 2139 - DNA, 40 bp, Artificial Sequence
  Synthetic Oligonucleotide
tattcgccagtcacatcaactatgatgcgcttggactgga

SEQ ID NO: 2140 - DNA, 40 bp, Artificial Sequence
  Synthetic Oligonucleotide
tattcgccagtcacatcaactatgatgacgctttactgga

SEQ ID NO: 2141 - DNA, 40 bp, Artificial Sequence
  Synthetic Oligonucleotide
tattcgccagtcacatcaactatgatgacgcttgtctgga

SEQ ID NO: 2142 - DNA, 40 bp, Artificial Sequence
  Synthetic Oligonucleotide
tattcgccagtcacatcaactatgatgacgcttgacttga

SEQ ID NO: 2143 - DNA, 40 bp, Artificial Sequence
  Synthetic Oligonucleotide
tattcgccagtcacatcaactatgatgacgcttgactaaa

SEQ ID NO: 2144 - DNA, 40 bp, Artificial Sequence
  Synthetic Oligonucleotide
tattcgccagtcacatcaactatgatgacgcttgacggga

SEQ ID NO: 2145 - DNA, 40 bp, Artificial Sequence
  Synthetic Oligonucleotide
tattcgccagtcacatcaactatgatgacgcttaactgga

SEQ ID NO: 2146 - DNA, 40 bp, Artificial Sequence
  Synthetic Oligonucleotide
tattcgccagtcacatcaactatgatgacgctggactgga

SEQ ID NO: 2147 - DNA, 40 bp, Artificial Sequence
  Synthetic Oligonucleotide
tattcgccagtcacatcaactatgatgacgctagactgga

SEQ ID NO: 2148 - DNA, 40 bp, Artificial Sequence
  Synthetic Oligonucleotide
tattcgccagtcacatcaactatgatgacacttgactgga

SEQ ID NO: 2149 - DNA, 40 bp, Artificial Sequence
  Synthetic Oligonucleotide
tattcgccagtcacatcaactatgatgacactgatctgga

SEQ ID NO: 2150 - DNA, 40 bp, Artificial Sequence
  Synthetic Oligonucleotide
tattcgccagtcacatcaactatgataacgcttgactgga

SEQ ID NO: 2151 - DNA, 40 bp, Artificial Sequence
  Synthetic Oligonucleotide
tattcgccagtcacatcaactatgactgacgcttggctga

SEQ ID NO: 2152 - DNA, 40 bp, Artificial Sequence
  Synthetic Oligonucleotide
tattcgccagtcacaccaactatgatgacgcttggctgga

SEQ ID NO: 2153 - DNA, 40 bp, Artificial Sequence
  Synthetic Oligonucleotide
tattcgccagtaacatcaactatgatgacgcttgactgga

SEQ ID NO: 2154 - DNA, 40 bp, Artificial Sequence
  Synthetic Oligonucleotide
tattcgccagctacatcaactatgatgacgcttgactgga

SEQ ID NO: 2155 - DNA, 40 bp, Artificial Sequence
  Synthetic Oligonucleotide
tattcgccagccgcatcaactatgatgacgcttgactgga

SEQ ID NO: 2156 - DNA, 40 bp, Artificial Sequence
  Synthetic Oligonucleotide
tattcgccagccacattaactatgatgacgcttgactgga

SEQ ID NO: 2157 - DNA, 40 bp, Artificial Sequence
  Synthetic Oligonucleotide
tattcgccagccacatccactatgatgacgcttgactgga

SEQ ID NO: 2158 - DNA, 40 bp, Artificial Sequence
  Synthetic Oligonucleotide
tattcgccagccacatcaagtatgatgacgcttgactgga

SEQ ID NO: 2159 - DNA, 40 bp, Artificial Sequence
  Synthetic Oligonucleotide
tattcgccagccacatcaacttatgatgacgcttgactga

SEQ ID NO: 2160 - DNA, 40 bp, Artificial Sequence
  Synthetic Oligonucleotide
tattcgccagccacatcaactatgatggcgcttgactgga

SEQ ID NO: 2161 - DNA, 40 bp, Artificial Sequence
  Synthetic Oligonucleotide
tattcgccagccacatcaactatgatgcgctttgactgga

SEQ ID NO: 2162 - DNA, 40 bp, Artificial Sequence
  Synthetic Oligonucleotide
tattcgccagccacatcaactatgatgactcttgactgga

SEQ ID NO: 2163 - DNA, 40 bp, Artificial Sequence
  Synthetic Oligonucleotide
tattcgccagccacatcaactatgatgacgcttgtctgga

SEQ ID NO: 2164 - DNA, 40 bp, Artificial Sequence
  Synthetic Oligonucleotide
tattcgccagccacatcaactatgatgacgcttgacttga

SEQ ID NO: 2165 - DNA, 40 bp, Artificial Sequence
  Synthetic Oligonucleotide
tattcgccagccacatcaactatgatgacgcttgactgaa

SEQ ID NO: 2166 - DNA, 40 bp, Artificial Sequence
  Synthetic Oligonucleotide
tattcgccagccacatcaactatgactgacgctgactgga

SEQ ID NO: 2167 - DNA, 40 bp, Artificial Sequence
  Synthetic Oligonucleotide
tattcgccagccacatcaactatgacgacgcttgcctgga

SEQ ID NO: 2168 - DNA, 40 bp, Artificial Sequence
  Synthetic Oligonucleotide
tattcgccagccacatcaactataatgacgcttggctgga

SEQ ID NO: 2169 - DNA, 40 bp, Artificial Sequence
  Synthetic Oligonucleotide
tattcgccagccacatcaacaatgatgacgcttgactgga

SEQ ID NO: 2170 - DNA, 40 bp, Artificial Sequence
  Synthetic Oligonucleotide
tattcgccagccacacaacttatgatgaccgcttgactga

SEQ ID NO: 2171 - DNA, 40 bp, Artificial Sequence
  Synthetic Oligonucleotide
tattcgccagcacattcaactatgatgacgcttgactgga

SEQ ID NO: 2172 - DNA, 40 bp, Artificial Sequence
  Synthetic Oligonucleotide
tattcgccagcacatcaactatgatgacgctttgactgga

SEQ ID NO: 2173 - DNA, 40 bp, Artificial Sequence
  Synthetic Oligonucleotide
tattcgccagcacatcaactatgatgaacgcttgactgga

SEQ ID NO: 2174 - DNA, 40 bp, Artificial Sequence
  Synthetic Oligonucleotide
tattcgccagacacatcaactatgatgacgcttgactgga

SEQ ID NO: 2175 - DNA, 40 bp, Artificial Sequence
  Synthetic Oligonucleotide
tattcgccaatcacatcaactatgatgacgcttggctgga

SEQ ID NO: 2176 - DNA, 40 bp, Artificial Sequence
  Synthetic Oligonucleotide
tattcgccaatcacatcaactatgatgacgcttgactgga

SEQ ID NO: 2177 - DNA, 40 bp, Artificial Sequence
  Synthetic Oligonucleotide
tattcgccaagtcacatcaactatgatgacgcttgctgga

SEQ ID NO: 2178 - DNA, 40 bp, Artificial Sequence
  Synthetic Oligonucleotide
tattcgccaaccacatcaactatgatgacgcttgactgga

SEQ ID NO: 2179 - DNA, 40 bp, Artificial Sequence
  Synthetic Oligonucleotide
tattcgcagtctacatcaactatgtgtgacgcttgctgga

SEQ ID NO: 2180 - DNA, 40 bp, Artificial Sequence
  Synthetic Oligonucleotide
tattcgcagtctacatcaactatgatgacgcttgactgga

SEQ ID NO: 2181 - DNA, 40 bp, Artificial Sequence
  Synthetic Oligonucleotide
tattcgcagtcacatcaacttatgatgacgcttgactgga

SEQ ID NO: 2182 - DNA, 40 bp, Artificial Sequence
  Synthetic Oligonucleotide
tattcgcagtcacatcaactatgattgacgcttgactgga

SEQ ID NO: 2183 - DNA, 40 bp, Artificial Sequence
  Synthetic Oligonucleotide
tattcgcagtcacatcaactatgatgacgctttgactgga

SEQ ID NO: 2184 - DNA, 40 bp, Artificial Sequence
  Synthetic Oligonucleotide
tattcgcagtcacatcaactatgatgacgcttgacctgga

SEQ ID NO: 2185 - DNA, 40 bp, Artificial Sequence
  Synthetic Oligonucleotide
tattcgcagtcacatcaactatgatgaacgcttgactgga

SEQ ID NO: 2186 - DNA, 40 bp, Artificial Sequence
  Synthetic Oligonucleotide
tattcgcacatcacatcaactatgatgacgcttgactgga

SEQ ID NO: 2187 - DNA, 40 bp, Artificial Sequence
  Synthetic Oligonucleotide
tattccgtcgctgatatgttcccggaccatatcatacaag

SEQ ID NO: 2188 - DNA, 40 bp, Artificial Sequence
  Synthetic Oligonucleotide
tattcaccagtcacatcagctatgatgacgcttgactgga

SEQ ID NO: 2189 - DNA, 40 bp, Artificial Sequence
  Synthetic Oligonucleotide
tattcaccagtcacatcaactatgacgacgcttgactgga

SEQ ID NO: 2190 - DNA, 40 bp, Artificial Sequence
  Synthetic Oligonucleotide
tattagccagtcacatcaactatgatgacgcttgactgga

SEQ ID NO: 2191 - DNA, 40 bp, Artificial Sequence
  Synthetic Oligonucleotide
tatgttaagcttacatacgcctgggtcactctttgttctg

SEQ ID NO: 2192 - DNA, 40 bp, Artificial Sequence
  Synthetic Oligonucleotide
tatggtccatgagcttctggcactatccagttgacgctca

SEQ ID NO: 2193 - DNA, 40 bp, Artificial Sequence
  Synthetic Oligonucleotide
tatgggtctttaagcacttctcggtaacttgggcagttac

SEQ ID NO: 2194 - DNA, 40 bp, Artificial Sequence
  Synthetic Oligonucleotide
tatggggttttaagcacttctcggtaacttgggcagttac

SEQ ID NO: 2195 - DNA, 40 bp, Artificial Sequence
  Synthetic Oligonucleotide
tatggggtctttaagcacttctcggtaacttggcagttac

SEQ ID NO: 2196 - DNA, 40 bp, Artificial Sequence
  Synthetic Oligonucleotide
tatgggggcttttagcacttctcggtaacttggcagttac

SEQ ID NO: 2197 - DNA, 40 bp, Artificial Sequence
  Synthetic Oligonucleotide
tatgggggcttttaagcacttctcggtattggacagttac

SEQ ID NO: 2198 - DNA, 40 bp, Artificial Sequence
  Synthetic Oligonucleotide
tatgggggcttttaagcacttcgtgaacttgggcagctac

SEQ ID NO: 2199 - DNA, 40 bp, Artificial Sequence
  Synthetic Oligonucleotide
tatggggcttttgagcacttctggtaacttgagcagttac

SEQ ID NO: 2200 - DNA, 40 bp, Artificial Sequence
  Synthetic Oligonucleotide
tatggggcttttaggcacttctggtaacttgggcagttac

SEQ ID NO: 2201 - DNA, 40 bp, Artificial Sequence
  Synthetic Oligonucleotide
tatggggcttttagcacttctcggtaacttgggcggttac

SEQ ID NO: 2202 - DNA, 40 bp, Artificial Sequence
  Synthetic Oligonucleotide
tatggggcttttagcactctcggtaacttgggccagttac

SEQ ID NO: 2203 - DNA, 40 bp, Artificial Sequence
  Synthetic Oligonucleotide
tatggggcttttagagacttctcggtaacttggcagttac

SEQ ID NO: 2204 - DNA, 40 bp, Artificial Sequence
  Synthetic Oligonucleotide
tatggggcttttagacacttctcggtaacttggcagttac

SEQ ID NO: 2205 - DNA, 40 bp, Artificial Sequence
  Synthetic Oligonucleotide
tatggggcttttaagtactctctgtaacttgggcagttac

SEQ ID NO: 2206 - DNA, 40 bp, Artificial Sequence
  Synthetic Oligonucleotide
tatggggcttttaagctctctgtgatacttgggcagttac

SEQ ID NO: 2207 - DNA, 40 bp, Artificial Sequence
  Synthetic Oligonucleotide
tatggggcttttaagccttctcggtaacttgggcagttac

SEQ ID NO: 2208 - DNA, 40 bp, Artificial Sequence
  Synthetic Oligonucleotide
tatggggcttttaagcacttctggtagcttgggcagttac

SEQ ID NO: 2209 - DNA, 40 bp, Artificial Sequence
  Synthetic Oligonucleotide
tatggggcttttaagcacttctggtaacttgggctgttac

SEQ ID NO: 2210 - DNA, 40 bp, Artificial Sequence
  Synthetic Oligonucleotide
tatggggcttttaagcacttctggtaacttgggcagttat

SEQ ID NO: 2211 - DNA, 40 bp, Artificial Sequence
  Synthetic Oligonucleotide
tatggggcttttaagcacttctggtaacttggagagttac

SEQ ID NO: 2212 - DNA, 40 bp, Artificial Sequence
  Synthetic Oligonucleotide
tatggggcttttaagcacttctggtaacctgggcagttac

SEQ ID NO: 2213 - DNA, 40 bp, Artificial Sequence
  Synthetic Oligonucleotide
tatggggcttttaagcacttctgagaacttgggcagttac

SEQ ID NO: 2214 - DNA, 40 bp, Artificial Sequence
  Synthetic Oligonucleotide
tatggggcttttaagcacttctcgtaacttgggaagttac

SEQ ID NO: 2215 - DNA, 40 bp, Artificial Sequence
  Synthetic Oligonucleotide
tatggggcttttaagcacttctcgtaacttggccagttac

SEQ ID NO: 2216 - DNA, 40 bp, Artificial Sequence
  Synthetic Oligonucleotide
tatggggcttttaagcacttctcgtaacttggacagttac

SEQ ID NO: 2217 - DNA, 40 bp, Artificial Sequence
  Synthetic Oligonucleotide
tatggggcttttaagcacttctcgtaacttgagcagttac

SEQ ID NO: 2218 - DNA, 40 bp, Artificial Sequence
  Synthetic Oligonucleotide
tatggggcttttaagcacttctcgtaacttaggcagttac

SEQ ID NO: 2219 - DNA, 40 bp, Artificial Sequence
  Synthetic Oligonucleotide
tatggggcttttaagcacttctcggtgacttggcagttac

SEQ ID NO: 2220 - DNA, 40 bp, Artificial Sequence
  Synthetic Oligonucleotide
tatggggcttttaagcacttctcggtatcgtggcagttac

SEQ ID NO: 2221 - DNA, 40 bp, Artificial Sequence
  Synthetic Oligonucleotide
tatggggcttttaagcacttctcggtagttgggcagttac

SEQ ID NO: 2222 - DNA, 40 bp, Artificial Sequence
  Synthetic Oligonucleotide
tatggggcttttaagcacttctcggtagcttgggcagtta

SEQ ID NO: 2223 - DNA, 40 bp, Artificial Sequence
  Synthetic Oligonucleotide
tatggggcttttaagcacttctcggtacttaggcagttac

SEQ ID NO: 2224 - DNA, 40 bp, Artificial Sequence
  Synthetic Oligonucleotide
tatggggcttttaagcacttctcggtacattggcagttac

SEQ ID NO: 2225 - DNA, 40 bp, Artificial Sequence
  Synthetic Oligonucleotide
tatggggcttttaagcacttctcggtaacttgggtattac

SEQ ID NO: 2226 - DNA, 40 bp, Artificial Sequence
  Synthetic Oligonucleotide
tatggggcttttaagcacttctcggtaacttgggcagttc

SEQ ID NO: 2227 - DNA, 40 bp, Artificial Sequence
  Synthetic Oligonucleotide
tatggggcttttaagcacttctcggtaactcgggcagtac

SEQ ID NO: 2228 - DNA, 40 bp, Artificial Sequence
  Synthetic Oligonucleotide
tatggggcttttaagcacttctcggtaacctggcagttac

SEQ ID NO: 2229 - DNA, 40 bp, Artificial Sequence
  Synthetic Oligonucleotide
tatggggcttttaagcacttcgtgatacttgggcaattac

SEQ ID NO: 2230 - DNA, 40 bp, Artificial Sequence
  Synthetic Oligonucleotide
tatggggcttttaagcacttcgtcatacttgggcagttac

SEQ ID NO: 2231 - DNA, 40 bp, Artificial Sequence
  Synthetic Oligonucleotide
tatggggcttttaagcacttcctcgtacttgggcagttac

SEQ ID NO: 2232 - DNA, 40 bp, Artificial Sequence
  Synthetic Oligonucleotide
tatggggcttttaagcacttccgtgtacttgggcagttac

SEQ ID NO: 2233 - DNA, 40 bp, Artificial Sequence
  Synthetic Oligonucleotide
tatggggcttttaagcacttccgtgatacttggcagttac

SEQ ID NO: 2234 - DNA, 40 bp, Artificial Sequence
  Synthetic Oligonucleotide
tatggggcttttaagcacttccggtaacttgagcagttac

SEQ ID NO: 2235 - DNA, 40 bp, Artificial Sequence
  Synthetic Oligonucleotide
tatggggcttttaagcacttcccgtaacttgggcagttac

SEQ ID NO: 2236 - DNA, 40 bp, Artificial Sequence
  Synthetic Oligonucleotide
tatggggcttttaagcactctcggtagcttgggcagttac

SEQ ID NO: 2237 - DNA, 40 bp, Artificial Sequence
  Synthetic Oligonucleotide
tatggggcttttaagcactctcggtaacttgggcagttaa

SEQ ID NO: 2238 - DNA, 40 bp, Artificial Sequence
  Synthetic Oligonucleotide
tatggggcttttaagcactcacgtacgttagtcgagttac

SEQ ID NO: 2239 - DNA, 40 bp, Artificial Sequence
  Synthetic Oligonucleotide
tatggggcttttaagcactacgtcgtaacgtggcagttac

SEQ ID NO: 2240 - DNA, 40 bp, Artificial Sequence
  Synthetic Oligonucleotide
tatggggcttttaagcaccttcggtaacttgggcagttac

SEQ ID NO: 2241 - DNA, 40 bp, Artificial Sequence
  Synthetic Oligonucleotide
tatggggcttttaagcacctctggtaacttgggcagttac

SEQ ID NO: 2242 - DNA, 40 bp, Artificial Sequence
  Synthetic Oligonucleotide
tatggggcttttaagcacctctgagaacttgggcagttac

SEQ ID NO: 2243 - DNA, 40 bp, Artificial Sequence
  Synthetic Oligonucleotide
tatggggcttttaagcacctctcggtaactgggcagttac

SEQ ID NO: 2244 - DNA, 40 bp, Artificial Sequence
  Synthetic Oligonucleotide
tatggggcttttaaacacttccggtaacttgggcagttac

SEQ ID NO: 2245 - DNA, 40 bp, Artificial Sequence
  Synthetic Oligonucleotide
tatggggcttttaaacactctctgtgacttgggcagttac

SEQ ID NO: 2246 - DNA, 40 bp, Artificial Sequence
  Synthetic Oligonucleotide
tatggggctttcagcacttctcggtaacttgggcagttac

SEQ ID NO: 2247 - DNA, 40 bp, Artificial Sequence
  Synthetic Oligonucleotide
tatggggctttagcacttctcggtaacttgggcagttacc

SEQ ID NO: 2248 - DNA, 40 bp, Artificial Sequence
  Synthetic Oligonucleotide
tatggggctttagacaccttctcggtaacttggcagttac

SEQ ID NO: 2249 - DNA, 40 bp, Artificial Sequence
  Synthetic Oligonucleotide
tatggggctttacagcacttcgtgatacttgggcagttac

SEQ ID NO: 2250 - DNA, 40 bp, Artificial Sequence
  Synthetic Oligonucleotide
tatggggctttacagacttctcggtaacttgagcagttac

SEQ ID NO: 2251 - DNA, 40 bp, Artificial Sequence
  Synthetic Oligonucleotide
tatggggctttaatcacttctcggtaacttgggcagctac

SEQ ID NO: 2252 - DNA, 40 bp, Artificial Sequence
  Synthetic Oligonucleotide
tatggggctttaagctacttctcggtaacttggcagttac

SEQ ID NO: 2253 - DNA, 40 bp, Artificial Sequence
  Synthetic Oligonucleotide
tatggggctttaagcactttctcggtaacttggcagttac

SEQ ID NO: 2254 - DNA, 40 bp, Artificial Sequence
  Synthetic Oligonucleotide
tatggggctttaagcacttctcgtaacttgggcagcttac

SEQ ID NO: 2255 - DNA, 40 bp, Artificial Sequence
  Synthetic Oligonucleotide
tatggggctttaagcacttctcgtaacttgggacagttac

SEQ ID NO: 2256 - DNA, 40 bp, Artificial Sequence
  Synthetic Oligonucleotide
tatggggctttaagcacttctcggtacattgggcagttac

SEQ ID NO: 2257 - DNA, 40 bp, Artificial Sequence
  Synthetic Oligonucleotide
tatggggctttaagcacttctcggtaacttggtcagttac

SEQ ID NO: 2258 - DNA, 40 bp, Artificial Sequence
  Synthetic Oligonucleotide
tatggggctttaagcacttctcggtaacttgggcagttgc

SEQ ID NO: 2259 - DNA, 40 bp, Artificial Sequence
  Synthetic Oligonucleotide
tatggggctttaagcacttctcggtaacttggcgagttac

SEQ ID NO: 2260 - DNA, 40 bp, Artificial Sequence
  Synthetic Oligonucleotide
tatggggctttaagcacttctcggtaacttggccagttac

SEQ ID NO: 2261 - DNA, 40 bp, Artificial Sequence
  Synthetic Oligonucleotide
tatggggctttaagcacttctcggtaacttggccagatac

SEQ ID NO: 2262 - DNA, 40 bp, Artificial Sequence
  Synthetic Oligonucleotide
tatggggctttaagcacttctcggtaacttggagagttac

SEQ ID NO: 2263 - DNA, 40 bp, Artificial Sequence
  Synthetic Oligonucleotide
tatggggctttaagcacttctcggtaactggggcagttac

SEQ ID NO: 2264 - DNA, 40 bp, Artificial Sequence
  Synthetic Oligonucleotide
tatggggctttaagcacttctcggtaactagggcagttac

SEQ ID NO: 2265 - DNA, 40 bp, Artificial Sequence
  Synthetic Oligonucleotide
tatggggctttaagcacttctcggtaacgttggcagttac

SEQ ID NO: 2266 - DNA, 40 bp, Artificial Sequence
  Synthetic Oligonucleotide
tatggggctttaagcacttctcgataacttgggcagttac

SEQ ID NO: 2267 - DNA, 40 bp, Artificial Sequence
  Synthetic Oligonucleotide
tatggggctttaagcacttctaggtaacttgggcagttac

SEQ ID NO: 2268 - DNA, 40 bp, Artificial Sequence
  Synthetic Oligonucleotide
tatggggctttaagcacttccgtgatacttgggcagttac

SEQ ID NO: 2269 - DNA, 40 bp, Artificial Sequence
  Synthetic Oligonucleotide
tatggggctttaagcacttcccggtaacttgggcagttac

SEQ ID NO: 2270 - DNA, 40 bp, Artificial Sequence
  Synthetic Oligonucleotide
tatggggctttaagcacttcacggtaacttgggcagttac

SEQ ID NO: 2271 - DNA, 40 bp, Artificial Sequence
  Synthetic Oligonucleotide
tatggggctttaagcacttcacggtaacttgggcagctac

SEQ ID NO: 2272 - DNA, 40 bp, Artificial Sequence
  Synthetic Oligonucleotide
tatggggctttaagcactcctcggtaacttgggcagttac

SEQ ID NO: 2273 - DNA, 40 bp, Artificial Sequence
  Synthetic Oligonucleotide
tatggggctttaagcactcctcggtaacttaggcagttac

SEQ ID NO: 2274 - DNA, 40 bp, Artificial Sequence
  Synthetic Oligonucleotide
tatggggctttaagcacctctcggtaacttgggccgttac

SEQ ID NO: 2275 - DNA, 40 bp, Artificial Sequence
  Synthetic Oligonucleotide
tatggggctttaacacacttctcggtaacttggcagttac

SEQ ID NO: 2276 - DNA, 40 bp, Artificial Sequence
  Synthetic Oligonucleotide
tatggggctttaaacacttctcggtaacttgggcagttac

SEQ ID NO: 2277 - DNA, 40 bp, Artificial Sequence
  Synthetic Oligonucleotide
tatggggcttctaagcattctcggtaacttgggcagttac

SEQ ID NO: 2278 - DNA, 40 bp, Artificial Sequence
  Synthetic Oligonucleotide
tatggggcttctaagcacttctcggaacttgggcagttac

SEQ ID NO: 2279 - DNA, 40 bp, Artificial Sequence
  Synthetic Oligonucleotide
tatggggcttatagcacttctcggtaacttgagcagttac

SEQ ID NO: 2280 - DNA, 40 bp, Artificial Sequence
  Synthetic Oligonucleotide
tatggggcttactagcacttctcgtaacttgggcagttac

SEQ ID NO: 2281 - DNA, 40 bp, Artificial Sequence
  Synthetic Oligonucleotide
tatggggcttactagacttctcggtaacttgggcagttac

SEQ ID NO: 2282 - DNA, 40 bp, Artificial Sequence
  Synthetic Oligonucleotide
tatggggcttacagcacttctcggtaacttgggcagttac

SEQ ID NO: 2283 - DNA, 40 bp, Artificial Sequence
  Synthetic Oligonucleotide
tatggggcgtttaagcacttctcggtaacttggcagttac

SEQ ID NO: 2284 - DNA, 40 bp, Artificial Sequence
  Synthetic Oligonucleotide
tatggggcctttaagcacttctggtaacttgggcagttac

SEQ ID NO: 2285 - DNA, 40 bp, Artificial Sequence
  Synthetic Oligonucleotide
tatggggcctttaagcacttctcgtaacttgggcagttac

SEQ ID NO: 2286 - DNA, 40 bp, Artificial Sequence
  Synthetic Oligonucleotide
tatggggcctttaagcacttctcggtaacttgggcattac

SEQ ID NO: 2287 - DNA, 40 bp, Artificial Sequence
  Synthetic Oligonucleotide
tatggggcctttaagcacttctcggtaactgggcagttac

SEQ ID NO: 2288 - DNA, 40 bp, Artificial Sequence
  Synthetic Oligonucleotide
tatggggccttaagcacttctcggtaacttgggcagttac

SEQ ID NO: 2289 - DNA, 40 bp, Artificial Sequence
  Synthetic Oligonucleotide
tatgggcttttgagcactcctcggtaacttgggcagttac

SEQ ID NO: 2290 - DNA, 40 bp, Artificial Sequence
  Synthetic Oligonucleotide
tatgggcttttaagccacttctcggtaacttggcagttac

SEQ ID NO: 2291 - DNA, 40 bp, Artificial Sequence
  Synthetic Oligonucleotide
tatgggcttttaagcacttctggataacttgggcagttac

SEQ ID NO: 2292 - DNA, 40 bp, Artificial Sequence
  Synthetic Oligonucleotide
tatgggcttttaagcacttctcgtaactttgggcagttac

SEQ ID NO: 2293 - DNA, 40 bp, Artificial Sequence
  Synthetic Oligonucleotide
tatgggcttttaagcacttctcgtaacttggggcagttac

SEQ ID NO: 2294 - DNA, 40 bp, Artificial Sequence
  Synthetic Oligonucleotide
tatgggcttttaagcacttctcggtaacttggtcagttac

SEQ ID NO: 2295 - DNA, 40 bp, Artificial Sequence
  Synthetic Oligonucleotide
tatgggcttttaagcacttctcggtaacttgggtagttac

SEQ ID NO: 2296 - DNA, 40 bp, Artificial Sequence
  Synthetic Oligonucleotide
tatgggcttttaagcacttctcggtaacttggggagttac

SEQ ID NO: 2297 - DNA, 40 bp, Artificial Sequence
  Synthetic Oligonucleotide
tatgggcttttaagcacttctcggtaacttgggctattac

SEQ ID NO: 2298 - DNA, 40 bp, Artificial Sequence
  Synthetic Oligonucleotide
tatgggcttttaagcacttctcggtaacttgggcggttac

SEQ ID NO: 2299 - DNA, 40 bp, Artificial Sequence
  Synthetic Oligonucleotide
tatgggcttttaagcacttctcggtaacttgggcagttat

SEQ ID NO: 2300 - DNA, 40 bp, Artificial Sequence
  Synthetic Oligonucleotide
tatgggcttttaagcacttctcggtaacttgggcaattac

SEQ ID NO: 2301 - DNA, 40 bp, Artificial Sequence
  Synthetic Oligonucleotide
tatgggcttttaagcacttctcggtaacttggcgagttac

SEQ ID NO: 2302 - DNA, 40 bp, Artificial Sequence
  Synthetic Oligonucleotide
tatgggcttttaagcacttctcggtaacttggagagttac

SEQ ID NO: 2303 - DNA, 40 bp, Artificial Sequence
  Synthetic Oligonucleotide
tatgggcttttaagcacttctcggtaacttggacagttac

SEQ ID NO: 2304 - DNA, 40 bp, Artificial Sequence
  Synthetic Oligonucleotide
tatgggcttttaagcacttctcggtaacttaggcagttac

SEQ ID NO: 2305 - DNA, 40 bp, Artificial Sequence
  Synthetic Oligonucleotide
tatgggcttttaagcacttctcggtaactgggcagttacc

SEQ ID NO: 2306 - DNA, 40 bp, Artificial Sequence
  Synthetic Oligonucleotide
tatgggcttttaagcacttctcggtaacgttggcagttac

SEQ ID NO: 2307 - DNA, 40 bp, Artificial Sequence
  Synthetic Oligonucleotide
tatgggcttttaagcacttctcggtaacctgggcagttac

SEQ ID NO: 2308 - DNA, 40 bp, Artificial Sequence
  Synthetic Oligonucleotide
tatgggcttttaagcacttctcgataacttgggcagttac

SEQ ID NO: 2309 - DNA, 40 bp, Artificial Sequence
  Synthetic Oligonucleotide
tatgggcttttaagcacttccggtaatcttgggcagttac

SEQ ID NO: 2310 - DNA, 40 bp, Artificial Sequence
  Synthetic Oligonucleotide
tatgggcttttaagcactctcggttgacttgggcagttac

SEQ ID NO: 2311 - DNA, 40 bp, Artificial Sequence
  Synthetic Oligonucleotide
tatgggcttttaagcactctcggtaaccttgggcagttac

SEQ ID NO: 2312 - DNA, 40 bp, Artificial Sequence
  Synthetic Oligonucleotide
tatgggcttttaagacacttctcggtaacttggcagttac

SEQ ID NO: 2313 - DNA, 40 bp, Artificial Sequence
  Synthetic Oligonucleotide
tatgggctttgagcacttctcggttacttgggcagcttac

SEQ ID NO: 2314 - DNA, 40 bp, Artificial Sequence
  Synthetic Oligonucleotide
tatgggctttatcgcactctcggttaacttgggcagttac

SEQ ID NO: 2315 - DNA, 40 bp, Artificial Sequence
  Synthetic Oligonucleotide
tatgggctttaggcacttcatcggtaacttgggcagttac

SEQ ID NO: 2316 - DNA, 40 bp, Artificial Sequence
  Synthetic Oligonucleotide
tatgggctttagctcacttctcggtaacttgggcagttac

SEQ ID NO: 2317 - DNA, 40 bp, Artificial Sequence
  Synthetic Oligonucleotide
tatgggctttagctacttcgtcggtaaccttggcagttac

SEQ ID NO: 2318 - DNA, 40 bp, Artificial Sequence
  Synthetic Oligonucleotide
tatgggctttagcaccttctcggtacttgggcgcagttac

SEQ ID NO: 2319 - DNA, 40 bp, Artificial Sequence
  Synthetic Oligonucleotide
tatgggctttagagcacttctcgttaacttgggcagttac

SEQ ID NO: 2320 - DNA, 40 bp, Artificial Sequence
  Synthetic Oligonucleotide
tatgggctttagacaccttctcggtaacttggcgagttac

SEQ ID NO: 2321 - DNA, 40 bp, Artificial Sequence
  Synthetic Oligonucleotide
tatgggctttacgcacttctcggtaacgttggtcagttac

SEQ ID NO: 2322 - DNA, 40 bp, Artificial Sequence
  Synthetic Oligonucleotide
tatgggctttaagtcacttctcggtaacttggcaagttac

SEQ ID NO: 2323 - DNA, 40 bp, Artificial Sequence
  Synthetic Oligonucleotide
tatgggctttaagctacttctcggtaacttagggcattac

SEQ ID NO: 2324 - DNA, 40 bp, Artificial Sequence
  Synthetic Oligonucleotide
tatgggctttaagctacttctcggtaacctgggcagttac

SEQ ID NO: 2325 - DNA, 40 bp, Artificial Sequence
  Synthetic Oligonucleotide
tatgggctttaagcgctacttctcggtacttggcagttac

SEQ ID NO: 2326 - DNA, 40 bp, Artificial Sequence
  Synthetic Oligonucleotide
tatgggctttaagcactttctggataacttgggcagttac

SEQ ID NO: 2327 - DNA, 40 bp, Artificial Sequence
  Synthetic Oligonucleotide
tatgggctttaagcacttctcgtaacttgggacagcttac

SEQ ID NO: 2328 - DNA, 40 bp, Artificial Sequence
  Synthetic Oligonucleotide
tatgggctttaagcacttctcggttaacttgggcagttgc

SEQ ID NO: 2329 - DNA, 40 bp, Artificial Sequence
  Synthetic Oligonucleotide
tatgggctttaagcacttctcggttaacctgggcagttac

SEQ ID NO: 2330 - DNA, 40 bp, Artificial Sequence
  Synthetic Oligonucleotide
tatgggctttaagcacttctcggtaactttgagcagttac

SEQ ID NO: 2331 - DNA, 40 bp, Artificial Sequence
  Synthetic Oligonucleotide
tatgggctttaagcacttctcggtaacttggtcagttacc

SEQ ID NO: 2332 - DNA, 40 bp, Artificial Sequence
  Synthetic Oligonucleotide
tatgggctttaagcacttctcggtaacttgggctagttac

SEQ ID NO: 2333 - DNA, 40 bp, Artificial Sequence
  Synthetic Oligonucleotide
tatgggctttaagcacttctcggtaacttgggccagttgc

SEQ ID NO: 2334 - DNA, 40 bp, Artificial Sequence
  Synthetic Oligonucleotide
tatgggctttaagcacttctcggtaacttgggcagttaac

SEQ ID NO: 2335 - DNA, 40 bp, Artificial Sequence
  Synthetic Oligonucleotide
tatgggctttaagcacttctcggtaacttggctcagttac

SEQ ID NO: 2336 - DNA, 40 bp, Artificial Sequence
  Synthetic Oligonucleotide
tatgggctttaagcacttctcggtaacttggcagttaccc

SEQ ID NO: 2337 - DNA, 40 bp, Artificial Sequence
  Synthetic Oligonucleotide
tatgggctttaagcacttctcggtaacctgggccagttac

SEQ ID NO: 2338 - DNA, 40 bp, Artificial Sequence
  Synthetic Oligonucleotide
tatgggctttaagcacttctcggtaacattgggcagttac

SEQ ID NO: 2339 - DNA, 40 bp, Artificial Sequence
  Synthetic Oligonucleotide
tatgggctttaagcacttctcgggtaacttgggcagttac

SEQ ID NO: 2340 - DNA, 40 bp, Artificial Sequence
  Synthetic Oligonucleotide
tatgggctttaagcacttctcggataacttggcagttaac

SEQ ID NO: 2341 - DNA, 40 bp, Artificial Sequence
  Synthetic Oligonucleotide
tatgggctttaagcacttctccgtaacttgggcagttacc

SEQ ID NO: 2342 - DNA, 40 bp, Artificial Sequence
  Synthetic Oligonucleotide
tatgggctttaagcacttcatcggtaacttgggctattac

SEQ ID NO: 2343 - DNA, 40 bp, Artificial Sequence
  Synthetic Oligonucleotide
tatgggctttaagcacttcatcggtaactcgggcagttac

SEQ ID NO: 2344 - DNA, 40 bp, Artificial Sequence
  Synthetic Oligonucleotide
tatgggctttaagacgcacttcttcgtaactcggcattac

SEQ ID NO: 2345 - DNA, 40 bp, Artificial Sequence
  Synthetic Oligonucleotide
tatgggctttaagacacttctcggtaacttgggcagttac

SEQ ID NO: 2346 - DNA, 40 bp, Artificial Sequence
  Synthetic Oligonucleotide
tatgggctttaacgcacttctcggtaacttgggccagtta

SEQ ID NO: 2347 - DNA, 40 bp, Artificial Sequence
  Synthetic Oligonucleotide
tatgggctttaacgcacttctcggtaacttgggcagtcac

SEQ ID NO: 2348 - DNA, 40 bp, Artificial Sequence
  Synthetic Oligonucleotide
tatgggctttaacgcacttctcggtaacttaggcagttac

SEQ ID NO: 2349 - DNA, 40 bp, Artificial Sequence
  Synthetic Oligonucleotide
tatgggctttaaagcactttctgggataccgtggcagtaa

SEQ ID NO: 2350 - DNA, 40 bp, Artificial Sequence
  Synthetic Oligonucleotide
tatgggctttaaagcactttctcgggatacttggcagtac

SEQ ID NO: 2351 - DNA, 40 bp, Artificial Sequence
  Synthetic Oligonucleotide
tatgggctttaaagcactttctcggatacttggcagttac

SEQ ID NO: 2352 - DNA, 40 bp, Artificial Sequence
  Synthetic Oligonucleotide
tatgggctttaaacgcactttctgggatactggcagtacc

SEQ ID NO: 2353 - DNA, 40 bp, Artificial Sequence
  Synthetic Oligonucleotide
tatgggcttatacgcacttctcggtaacttgggcagttac

SEQ ID NO: 2354 - DNA, 40 bp, Artificial Sequence
  Synthetic Oligonucleotide
tatgggcttaaagcactttctgggataccgtgggcagtac

SEQ ID NO: 2355 - DNA, 40 bp, Artificial Sequence
  Synthetic Oligonucleotide
tatgggcgttttaagcacttctggtaacttgggcagttac

SEQ ID NO: 2356 - DNA, 40 bp, Artificial Sequence
  Synthetic Oligonucleotide
tatgggcgttttaagcacttctcggtaacttggcagttac

SEQ ID NO: 2357 - DNA, 40 bp, Artificial Sequence
  Synthetic Oligonucleotide
tatgggccttttaagcacttctcgtaacttgggcagttac

SEQ ID NO: 2358 - DNA, 40 bp, Artificial Sequence
  Synthetic Oligonucleotide
tatgggactttaagctacttctcggtaactgggcagttac

SEQ ID NO: 2359 - DNA, 40 bp, Artificial Sequence
  Synthetic Oligonucleotide
tatgggactttaagcacttctcggtaacttgggcagttac

SEQ ID NO: 2360 - DNA, 40 bp, Artificial Sequence
  Synthetic Oligonucleotide
tatggcttttaagcacttctcggttaacttgggcagttac

SEQ ID NO: 2361 - DNA, 40 bp, Artificial Sequence
  Synthetic Oligonucleotide
tatggcgtttaagcacttctcggtgacttgggccagttac

SEQ ID NO: 2362 - DNA, 40 bp, Artificial Sequence
  Synthetic Oligonucleotide
tatggcgtttaagcacttctcggtaacttgggccagttac

SEQ ID NO: 2363 - DNA, 40 bp, Artificial Sequence
  Synthetic Oligonucleotide
tatggcggttttaagcacttctggtaacttgggcagttac

SEQ ID NO: 2364 - DNA, 40 bp, Artificial Sequence
  Synthetic Oligonucleotide
tatggcgctttaagcacttctcggtaacttgggcagttac

SEQ ID NO: 2365 - DNA, 40 bp, Artificial Sequence
  Synthetic Oligonucleotide
tatggcctttagcacttctcgttaacttcggacaacttac

SEQ ID NO: 2366 - DNA, 40 bp, Artificial Sequence
  Synthetic Oligonucleotide
tatggagctttaagcacttctcggtaacttgggcagttac

SEQ ID NO: 2367 - DNA, 40 bp, Artificial Sequence
  Synthetic Oligonucleotide
tatggacttttaagcacttctcggtaacttgggcagttac

SEQ ID NO: 2368 - DNA, 40 bp, Artificial Sequence
  Synthetic Oligonucleotide
tatgcggttttaagcacttctcggtaacttgggcagttac

SEQ ID NO: 2369 - DNA, 40 bp, Artificial Sequence
  Synthetic Oligonucleotide
tatgcgccagtcacatcaactatgatgacgcttgactgga

SEQ ID NO: 2370 - DNA, 40 bp, Artificial Sequence
  Synthetic Oligonucleotide
tatgcgactacgctcttgaacaattctgatccctggattt

SEQ ID NO: 2371 - DNA, 40 bp, Artificial Sequence
  Synthetic Oligonucleotide
tatgcctcgatcctcgcaccgcacgcgatcccaatgtctg

SEQ ID NO: 2372 - DNA, 40 bp, Artificial Sequence
  Synthetic Oligonucleotide
tatgagcttgtctttaatctcggcagaggtgctcatgagc

SEQ ID NO: 2373 - DNA, 40 bp, Artificial Sequence
  Synthetic Oligonucleotide
tatgagctagtctttaatctcggcagagtgctcattgagc

SEQ ID NO: 2374 - DNA, 40 bp, Artificial Sequence
  Synthetic Oligonucleotide
tatcttactggggaagttgtatgtcccttttaacgtaaca

SEQ ID NO: 2375 - DNA, 40 bp, Artificial Sequence
  Synthetic Oligonucleotide
tatcttactgggaagttgatatgtcccttttaacgtaacg

SEQ ID NO: 2376 - DNA, 40 bp, Artificial Sequence
  Synthetic Oligonucleotide
tatcttactgggaagcttgtatgtcccttttaacgtaacg

SEQ ID NO: 2377 - DNA, 40 bp, Artificial Sequence
  Synthetic Oligonucleotide
tatctctcggctcccgtgcgcacgcagctgactcgaactg

SEQ ID NO: 2378 - DNA, 40 bp, Artificial Sequence
  Synthetic Oligonucleotide
tatctcgagatcactaggcactatcctagcactgtatcaa

SEQ ID NO: 2379 - DNA, 40 bp, Artificial Sequence
  Synthetic Oligonucleotide
tatcggcactggaggcgtccttggtggactaccaccttat

SEQ ID NO: 2380 - DNA, 40 bp, Artificial Sequence
  Synthetic Oligonucleotide
tatcgcctctgttctcgcatgctagcaacattaatgggcg

SEQ ID NO: 2381 - DNA, 40 bp, Artificial Sequence
  Synthetic Oligonucleotide
tatcgccagtctacatcaactatgagtgacgctaactgga

SEQ ID NO: 2382 - DNA, 40 bp, Artificial Sequence
  Synthetic Oligonucleotide
tatcgccagtcacatcaactatgatgacgcttggactgga

SEQ ID NO: 2383 - DNA, 40 bp, Artificial Sequence
  Synthetic Oligonucleotide
tatcgccagtcacatcaactatgactgacgcttgactgga

SEQ ID NO: 2384 - DNA, 40 bp, Artificial Sequence
  Synthetic Oligonucleotide
tatcgccagccacatcaactatgatgacgctttgactgga

SEQ ID NO: 2385 - DNA, 40 bp, Artificial Sequence
  Synthetic Oligonucleotide
tatcgccagccacatcaactactgatgacgcttactggaa

SEQ ID NO: 2386 - DNA, 40 bp, Artificial Sequence
  Synthetic Oligonucleotide
tatcgccagcacatcacttatgactgacgcttgactacga

SEQ ID NO: 2387 - DNA, 40 bp, Artificial Sequence
  Synthetic Oligonucleotide
tatcgccacgtcacatcaactatgatgacgctagactgga

SEQ ID NO: 2388 - DNA, 40 bp, Artificial Sequence
  Synthetic Oligonucleotide
tatccggagctgtctcgtcgtccctgggcccaatacgtag

SEQ ID NO: 2389 - DNA, 40 bp, Artificial Sequence
  Synthetic Oligonucleotide
tatccgcctcatcatcggacacgactgtatcagttggctg

SEQ ID NO: 2390 - DNA, 40 bp, Artificial Sequence
  Synthetic Oligonucleotide
tatccgccagccacatcaactatgacgacgcttgactgga

SEQ ID NO: 2391 - DNA, 40 bp, Artificial Sequence
  Synthetic Oligonucleotide
tatcaccagtcacatcaactatgactgacgcttgactgga

SEQ ID NO: 2392 - DNA, 40 bp, Artificial Sequence
  Synthetic Oligonucleotide
tatcacagtaattctgcccctctgatgaaaccggttactt

SEQ ID NO: 2393 - DNA, 40 bp, Artificial Sequence
  Synthetic Oligonucleotide
tatatgttatattacttgccttgctccaaccctggtatac

SEQ ID NO: 2394 - DNA, 40 bp, Artificial Sequence
  Synthetic Oligonucleotide
tataggtcgcctggtccgcctcgatcctctataccgtctg

SEQ ID NO: 2395 - DNA, 40 bp, Artificial Sequence
  Synthetic Oligonucleotide
tatagggcttttaagcacttctggtaacttgggcagttac

SEQ ID NO: 2396 - DNA, 40 bp, Artificial Sequence
  Synthetic Oligonucleotide
tatagggctttaagcacttctcggtaacttgggcagttac

SEQ ID NO: 2397 - DNA, 40 bp, Artificial Sequence
  Synthetic Oligonucleotide
tataggcttttaagcacttctcggtaacttgggcagttac

SEQ ID NO: 2398 - DNA, 40 bp, Artificial Sequence
  Synthetic Oligonucleotide
tatagctataaatcccgccttgatccttccaggctgcagg

SEQ ID NO: 2399 - DNA, 40 bp, Artificial Sequence
  Synthetic Oligonucleotide
tatagcctgtcttttaatctcggcagagtcgctcatgagc

SEQ ID NO: 2400 - DNA, 40 bp, Artificial Sequence
  Synthetic Oligonucleotide
tatagatcgttcttatccgcctcggtcttccccaggttaa

SEQ ID NO: 2401 - DNA, 40 bp, Artificial Sequence
  Synthetic Oligonucleotide
tatacgcctgtacttttcaatctcgcagagtgctcatagc

SEQ ID NO: 2402 - DNA, 40 bp, Artificial Sequence
  Synthetic Oligonucleotide
tatacaggtgttaattgcctccggtccttccgtgtgcaca

SEQ ID NO: 2403 - DNA, 40 bp, Artificial Sequence
  Synthetic Oligonucleotide
tataaggcctgtcttttaatctcggcagatgctcatgagc

SEQ ID NO: 2404 - DNA, 40 bp, Artificial Sequence
  Synthetic Oligonucleotide
tataagcctgtcttttcaatctcgcagagtgctcatgagc

SEQ ID NO: 2405 - DNA, 40 bp, Artificial Sequence
  Synthetic Oligonucleotide
tataagcctgtcttttaatcttggcagagtgctcatgagc

SEQ ID NO: 2406 - DNA, 40 bp, Artificial Sequence
  Synthetic Oligonucleotide
tataagcctgtcttttaatctcggtagagtgctcatgagc

SEQ ID NO: 2407 - DNA, 40 bp, Artificial Sequence
  Synthetic Oligonucleotide
tataagcctgtcttttaatctcggctgagtgctcatgagc

SEQ ID NO: 2408 - DNA, 40 bp, Artificial Sequence
  Synthetic Oligonucleotide
tataagcctgtcttttaatctcggcggagtgcttatgagc

SEQ ID NO: 2409 - DNA, 40 bp, Artificial Sequence
  Synthetic Oligonucleotide
tataagcctgtcttttaatctcggccgagtgctcatgagc

SEQ ID NO: 2410 - DNA, 40 bp, Artificial Sequence
  Synthetic Oligonucleotide
tataagcctgtcttttaatctcggcagagtgttcatgagc

SEQ ID NO: 2411 - DNA, 40 bp, Artificial Sequence
  Synthetic Oligonucleotide
tataagcctgtcttttaatctcggcagagtgcttatgagc

SEQ ID NO: 2412 - DNA, 40 bp, Artificial Sequence
  Synthetic Oligonucleotide
tataagcctgtcttttaatctcggcagagtgctcttgagc

SEQ ID NO: 2413 - DNA, 40 bp, Artificial Sequence
  Synthetic Oligonucleotide
tataagcctgtcttttaatctcggcagagtgctcatgatc

SEQ ID NO: 2414 - DNA, 40 bp, Artificial Sequence
  Synthetic Oligonucleotide
tataagcctgtcttttaatctcggcagagtgctcatgagg

SEQ ID NO: 2415 - DNA, 40 bp, Artificial Sequence
  Synthetic Oligonucleotide
tataagcctgtcttttaatctcggcagagtgctcatgaac

SEQ ID NO: 2416 - DNA, 40 bp, Artificial Sequence
  Synthetic Oligonucleotide
tataagcctgtcttttaatctcggcagagtgctcacgagc

SEQ ID NO: 2417 - DNA, 40 bp, Artificial Sequence
  Synthetic Oligonucleotide
tataagcctgtcttttaatctcggcagagtgcccatgagc

SEQ ID NO: 2418 - DNA, 40 bp, Artificial Sequence
  Synthetic Oligonucleotide
tataagcctgtcttttaatctcggcagagtgcacatgagc

SEQ ID NO: 2419 - DNA, 40 bp, Artificial Sequence
  Synthetic Oligonucleotide
tataagcctgtcttttaatctcggcaagtgtgctctgagc

SEQ ID NO: 2420 - DNA, 40 bp, Artificial Sequence
  Synthetic Oligonucleotide
tataagcctgtcttttaatctcggcaagtagctcatgagc

SEQ ID NO: 2421 - DNA, 40 bp, Artificial Sequence
  Synthetic Oligonucleotide
tataagcctgtcttttaatctcagcagagtgctcatgagc

SEQ ID NO: 2422 - DNA, 40 bp, Artificial Sequence
  Synthetic Oligonucleotide
tataagcctgtctttaatctcggtcagagtgctcatgagc

SEQ ID NO: 2423 - DNA, 40 bp, Artificial Sequence
  Synthetic Oligonucleotide
tataagcctgtctttaatctcggcagagtgctcatgagcc

SEQ ID NO: 2424 - DNA, 40 bp, Artificial Sequence
  Synthetic Oligonucleotide
tataagcctgtcttctaatctcggcagagtgctcatgagc

SEQ ID NO: 2425 - DNA, 40 bp, Artificial Sequence
  Synthetic Oligonucleotide
tataagcctgtctcttaatcttggcagagtgctcatgagc

SEQ ID NO: 2426 - DNA, 40 bp, Artificial Sequence
  Synthetic Oligonucleotide
tataagcctgtctcttaatctcggcagagtgctcatgagc

SEQ ID NO: 2427 - DNA, 40 bp, Artificial Sequence
  Synthetic Oligonucleotide
tataagcctgtattttaatctcggcagagtgctcatgagc

SEQ ID NO: 2428 - DNA, 40 bp, Artificial Sequence
  Synthetic Oligonucleotide
tataagccagccacatcagctatgatgacgcttgactgga

SEQ ID NO: 2429 - DNA, 40 bp, Artificial Sequence
  Synthetic Oligonucleotide
tataagcagcaccatgctaatagcatggcccccttaactg

SEQ ID NO: 2430 - DNA, 40 bp, Artificial Sequence
  Synthetic Oligonucleotide
tataaacctgtcttttaatctcggcagagtgctcatgagc

SEQ ID NO: 2431 - DNA, 40 bp, Artificial Sequence
  Synthetic Oligonucleotide
tagtgttatggcgatcggattgccctcaccctgaccgctg

SEQ ID NO: 2432 - DNA, 40 bp, Artificial Sequence
  Synthetic Oligonucleotide
tagtcgtatccgtactttcaggcgttagcctatcacccga

SEQ ID NO: 2433 - DNA, 40 bp, Artificial Sequence
  Synthetic Oligonucleotide
tagtcgccagtcacatcaactatgatgacgcttggctgga

SEQ ID NO: 2434 - DNA, 40 bp, Artificial Sequence
  Synthetic Oligonucleotide
tagtcgatctgtactttcaggcgctatcctgatcacccga

SEQ ID NO: 2435 - DNA, 40 bp, Artificial Sequence
  Synthetic Oligonucleotide
tagtcgatccgtactttcaggcgctgtcctgatcacccga

SEQ ID NO: 2436 - DNA, 40 bp, Artificial Sequence
  Synthetic Oligonucleotide
tagtcgatccgtactttcaggcgctaccctgatcacccga

SEQ ID NO: 2437 - DNA, 40 bp, Artificial Sequence
  Synthetic Oligonucleotide
tagtcgatccgtactttcaggcgatatcctgatcacccga

SEQ ID NO: 2438 - DNA, 40 bp, Artificial Sequence
  Synthetic Oligonucleotide
tagtcgatccgtacttcaggtcgctatcctgatcacccga

SEQ ID NO: 2439 - DNA, 40 bp, Artificial Sequence
  Synthetic Oligonucleotide
tagtcgatccgtaccttcaggcgctatcctgatcacccga

SEQ ID NO: 2440 - DNA, 40 bp, Artificial Sequence
  Synthetic Oligonucleotide
tagtcgactccgtagcttcagcgctatcctgatcacccga

SEQ ID NO: 2441 - DNA, 40 bp, Artificial Sequence
  Synthetic Oligonucleotide
tagtccgtaactttcaagcactatcttgatcaaatgtgga

SEQ ID NO: 2442 - DNA, 40 bp, Artificial Sequence
  Synthetic Oligonucleotide
tagtccgatccgtactttcaggcgctatctgatcacccga

SEQ ID NO: 2443 - DNA, 40 bp, Artificial Sequence
  Synthetic Oligonucleotide
taggttcctcgaaccgcctcgcctcgtgtacagtactgca

SEQ ID NO: 2444 - DNA, 40 bp, Artificial Sequence
  Synthetic Oligonucleotide
tagggtatccatgaaggactaccttcttattggagacttg

SEQ ID NO: 2445 - DNA, 40 bp, Artificial Sequence
  Synthetic Oligonucleotide
tagggtacgatgaggagacccaatcgcccctctgtgcgcg

SEQ ID NO: 2446 - DNA, 40 bp, Artificial Sequence
  Synthetic Oligonucleotide
taggggcttttaagcacttctcggtaacttgagcagttac

SEQ ID NO: 2447 - DNA, 40 bp, Artificial Sequence
  Synthetic Oligonucleotide
taggcgttttaagctacttctcggtaacttgggcagttac

SEQ ID NO: 2448 - DNA, 40 bp, Artificial Sequence
  Synthetic Oligonucleotide
taggcggttttaagcacttctcggtaacttgggcagtcac

SEQ ID NO: 2449 - DNA, 40 bp, Artificial Sequence
  Synthetic Oligonucleotide
taggatgcgccttgctccgctatacgacgtccagtcgctg

SEQ ID NO: 2450 - DNA, 40 bp, Artificial Sequence
  Synthetic Oligonucleotide
taggaaataactcggccctcctcctgctaccgcttgcagc

SEQ ID NO: 2451 - DNA, 40 bp, Artificial Sequence
  Synthetic Oligonucleotide
tagcttaccccatcgagctagtctacgtctccatcaacgg

SEQ ID NO: 2452 - DNA, 40 bp, Artificial Sequence
  Synthetic Oligonucleotide
tagcttaccccatcgagcgagtctacgtctccatcaacgg

SEQ ID NO: 2453 - DNA, 40 bp, Artificial Sequence
  Synthetic Oligonucleotide
tagctaccccatcgagcgagtctacgtctccatcaacggg

SEQ ID NO: 2454 - DNA, 40 bp, Artificial Sequence
  Synthetic Oligonucleotide
tagcctcgatcctctcatgcgcgcgcatcggttttgggcc

SEQ ID NO: 2455 - DNA, 40 bp, Artificial Sequence
  Synthetic Oligonucleotide
tagccgcttctcatcggacacgacgtgtatcagttggctg

SEQ ID NO: 2456 - DNA, 40 bp, Artificial Sequence
  Synthetic Oligonucleotide
tagccgcttcatcatcggacacgacgtgtatcagtggctg

SEQ ID NO: 2457 - DNA, 40 bp, Artificial Sequence
  Synthetic Oligonucleotide
tagccgcttcatcatcggacacgacgtgtatcagctgctg

SEQ ID NO: 2458 - DNA, 40 bp, Artificial Sequence
  Synthetic Oligonucleotide
tagatctcggatctggcgtactacttggacaggttccttc

SEQ ID NO: 2459 - DNA, 40 bp, Artificial Sequence
  Synthetic Oligonucleotide
tagagttcacgtcgcgattgcagctgatatcctccctacg

SEQ ID NO: 2460 - DNA, 40 bp, Artificial Sequence
  Synthetic Oligonucleotide
tagaacagagattcggtccgccttgcgcctcctgagagta

SEQ ID NO: 2461 - DNA, 40 bp, Artificial Sequence
  Synthetic Oligonucleotide
tactttgcgtaactacagcctctgtcctccaaatgctggc

SEQ ID NO: 2462 - DNA, 40 bp, Artificial Sequence
  Synthetic Oligonucleotide
tacttcgccatctctccactcgcgtcgactcaattcggag

SEQ ID NO: 2463 - DNA, 40 bp, Artificial Sequence
  Synthetic Oligonucleotide
tactgcctccatcatcggacacgacgtgtatcagttgctg

SEQ ID NO: 2464 - DNA, 40 bp, Artificial Sequence
  Synthetic Oligonucleotide
tactgaggccctcgtgttggactaccaacttgtagaacgg

SEQ ID NO: 2465 - DNA, 40 bp, Artificial Sequence
  Synthetic Oligonucleotide
tactcgccagtcacatcaactatgatgacgcttgactaga

SEQ ID NO: 2466 - DNA, 40 bp, Artificial Sequence
  Synthetic Oligonucleotide
tactcgccagtcacatcaactacgatgacgcttgactgga

SEQ ID NO: 2467 - DNA, 40 bp, Artificial Sequence
  Synthetic Oligonucleotide
tactcctcctttttcggatcacgttgttttcccctgtgca

SEQ ID NO: 2468 - DNA, 40 bp, Artificial Sequence
  Synthetic Oligonucleotide
tactatcctcatcgatgctgagttattcgcctacgagggg

SEQ ID NO: 2469 - DNA, 40 bp, Artificial Sequence
  Synthetic Oligonucleotide
tactatccgtttgtccgtcctcctgtggtattgcgcatgc

SEQ ID NO: 2470 - DNA, 40 bp, Artificial Sequence
  Synthetic Oligonucleotide
tactatccgtttggccgtcctcttgtggtattgcgcatgc

SEQ ID NO: 2471 - DNA, 40 bp, Artificial Sequence
  Synthetic Oligonucleotide
tactatccgttcgtccgtcctcttgtggtattgcgcatgc

SEQ ID NO: 2472 - DNA, 40 bp, Artificial Sequence
  Synthetic Oligonucleotide
tactatccgtatcgagcgttgtcaacaagcggttaaggcc

SEQ ID NO: 2473 - DNA, 40 bp, Artificial Sequence
  Synthetic Oligonucleotide
tactatccgtatcgagcgttgtcaacaagcggctaaggcc

SEQ ID NO: 2474 - DNA, 40 bp, Artificial Sequence
  Synthetic Oligonucleotide
tactacccctatcgagcgagtctactctcccatcaacggg

SEQ ID NO: 2475 - DNA, 40 bp, Artificial Sequence
  Synthetic Oligonucleotide
tactacccccatcgagcgggtctactctcccatcaacggg

SEQ ID NO: 2476 - DNA, 40 bp, Artificial Sequence
  Synthetic Oligonucleotide
tactacccccatcgagcgagtctactctcccgtcaacggg

SEQ ID NO: 2477 - DNA, 40 bp, Artificial Sequence
  Synthetic Oligonucleotide
tactacccccatcgagcgagtctactctcccatcagcggg

SEQ ID NO: 2478 - DNA, 40 bp, Artificial Sequence
  Synthetic Oligonucleotide
tactacccccatcgagcgagcctactctcccatcaacggg

SEQ ID NO: 2479 - DNA, 40 bp, Artificial Sequence
  Synthetic Oligonucleotide
tacgttctcggatctttaaatatcggcaaagtcctcctga

SEQ ID NO: 2480 - DNA, 40 bp, Artificial Sequence
  Synthetic Oligonucleotide
tacgtaacgccttggaatgcaacgttgcatattttccccg

SEQ ID NO: 2481 - DNA, 40 bp, Artificial Sequence
  Synthetic Oligonucleotide
tacggggctttaaagcactttctcgggtactggcagttac

SEQ ID NO: 2482 - DNA, 40 bp, Artificial Sequence
  Synthetic Oligonucleotide
tacgcctcattcatcggacacgacgtgtatcagttggctg

SEQ ID NO: 2483 - DNA, 40 bp, Artificial Sequence
  Synthetic Oligonucleotide
tacctctaccgcctcgtaagcccgggcacttacctctgta

SEQ ID NO: 2484 - DNA, 40 bp, Artificial Sequence
  Synthetic Oligonucleotide
tacctagaggctaactccggtagcaaccgatcgtatgaaa

SEQ ID NO: 2485 - DNA, 40 bp, Artificial Sequence
  Synthetic Oligonucleotide
taccgtctcgtcatcggacacgacgtgtatcagttggctg

SEQ ID NO: 2486 - DNA, 40 bp, Artificial Sequence
  Synthetic Oligonucleotide
taccgtctcgaaattaccctcttctcggatatttagtgca

SEQ ID NO: 2487 - DNA, 40 bp, Artificial Sequence
  Synthetic Oligonucleotide
taccgtctcatcatcggacacgacgtgtatcagttggcta

SEQ ID NO: 2488 - DNA, 40 bp, Artificial Sequence
  Synthetic Oligonucleotide
taccggcctcatcatcggcacgacgtgtatcagttggctg

SEQ ID NO: 2489 - DNA, 40 bp, Artificial Sequence
  Synthetic Oligonucleotide
taccggcattggaggcgtccttggtggactaccaccttgt

SEQ ID NO: 2490 - DNA, 40 bp, Artificial Sequence
  Synthetic Oligonucleotide
taccggcattggaggcgtccttggtggactaccaccttat

SEQ ID NO: 2491 - DNA, 40 bp, Artificial Sequence
  Synthetic Oligonucleotide
taccggcactggaggcgtccttggtggattaccaccttat

SEQ ID NO: 2492 - DNA, 40 bp, Artificial Sequence
  Synthetic Oligonucleotide
taccggcactggaggcgtccttggtagactaccaccttat

SEQ ID NO: 2493 - DNA, 40 bp, Artificial Sequence
  Synthetic Oligonucleotide
taccggaacgcctcgatcctcgcataatatgatacgtctg

SEQ ID NO: 2494 - DNA, 40 bp, Artificial Sequence
  Synthetic Oligonucleotide
taccgctcactcatcggacacgacgtgtatcagttgctga

SEQ ID NO: 2495 - DNA, 40 bp, Artificial Sequence
  Synthetic Oligonucleotide
taccgctacatcatcggacacgacgtgtatcagctggctg

SEQ ID NO: 2496 - DNA, 40 bp, Artificial Sequence
  Synthetic Oligonucleotide
taccgcctttggtccagttttacgtgaaaacttttatctg

SEQ ID NO: 2497 - DNA, 40 bp, Artificial Sequence
  Synthetic Oligonucleotide
taccgccttggcatgtaagcttacagattttcttccctga

SEQ ID NO: 2498 - DNA, 40 bp, Artificial Sequence
  Synthetic Oligonucleotide
taccgcctcttcatcggacacgacgtgtatcagttggctg

SEQ ID NO: 2499 - DNA, 40 bp, Artificial Sequence
  Synthetic Oligonucleotide
taccgcctctacatcggacacgacgtgtatcagttggctg

SEQ ID NO: 2500 - DNA, 40 bp, Artificial Sequence
  Synthetic Oligonucleotide
taccgcctcctcatcggacacgacgtgtatcagttggctg

SEQ ID NO: 2501 - DNA, 40 bp, Artificial Sequence
  Synthetic Oligonucleotide
taccgcctcatctatcggacactacgtcgattcagtgctg

SEQ ID NO: 2502 - DNA, 40 bp, Artificial Sequence
  Synthetic Oligonucleotide
taccgcctcatctatcggacacgacgtcgtatcagtgctg

SEQ ID NO: 2503 - DNA, 40 bp, Artificial Sequence
  Synthetic Oligonucleotide
taccgcctcatcatcgtacacgacgtgtatcagttggctg

SEQ ID NO: 2504 - DNA, 40 bp, Artificial Sequence
  Synthetic Oligonucleotide
taccgcctcatcatcggagacgacgtgtatcagttggctg

SEQ ID NO: 2505 - skipped

SEQ ID NO: 2506 - DNA, 40 bp, Artificial Sequence
  Synthetic Oligonucleotide
taccgcctcatcatcggacccgacgtgtatcagttggctg

SEQ ID NO: 2507 - DNA, 40 bp, Artificial Sequence
  Synthetic Oligonucleotide
taccgcctcatcatcggacaggacgtgtatcagttggctg

SEQ ID NO: 2508 - DNA, 40 bp, Artificial Sequence
  Synthetic Oligonucleotide
taccgcctcatcatcggacacgtcgtgtatcagttggctg

SEQ ID NO: 2509 - DNA, 40 bp, Artificial Sequence
  Synthetic Oligonucleotide
taccgcctcatcatcggacacgaggtgtatcagttggctg

SEQ ID NO: 2510 - DNA, 40 bp, Artificial Sequence
  Synthetic Oligonucleotide
taccgcctcatcatcggacacgactgtatcagtgtcgctg

SEQ ID NO: 2511 - DNA, 40 bp, Artificial Sequence
  Synthetic Oligonucleotide
taccgcctcatcatcggacacgacgtgtgtcagtcggctg

SEQ ID NO: 2512 - DNA, 40 bp, Artificial Sequence
  Synthetic Oligonucleotide
taccgcctcatcatcggacacgacgtgtatctgttggctg

SEQ ID NO: 2513 - DNA, 40 bp, Artificial Sequence
  Synthetic Oligonucleotide
taccgcctcatcatcggacacgacgtgtatctgttggccg

SEQ ID NO: 2514 - DNA, 40 bp, Artificial Sequence
  Synthetic Oligonucleotide
taccgcctcatcatcggacacgacgtgtatcatggtgctg

SEQ ID NO: 2515 - DNA, 40 bp, Artificial Sequence
  Synthetic Oligonucleotide
taccgcctcatcatcggacacgacgtgtatcagttggatg

SEQ ID NO: 2516 - DNA, 40 bp, Artificial Sequence
  Synthetic Oligonucleotide
taccgcctcatcatcggacacgacgtgtatcagttgcctg

SEQ ID NO: 2517 - DNA, 40 bp, Artificial Sequence
  Synthetic Oligonucleotide
taccgcctcatcatcggacacgacgtgtatcagttagctg

SEQ ID NO: 2518 - DNA, 40 bp, Artificial Sequence
  Synthetic Oligonucleotide
taccgcctcatcatcggacacgacgtgtatcagttaactg

SEQ ID NO: 2519 - DNA, 40 bp, Artificial Sequence
  Synthetic Oligonucleotide
taccgcctcatcatcggacacgacgtgtatcagtgggctg

SEQ ID NO: 2520 - DNA, 40 bp, Artificial Sequence
  Synthetic Oligonucleotide
taccgcctcatcatcggacacgacgtgtatcagtcggcta

SEQ ID NO: 2521 - DNA, 40 bp, Artificial Sequence
  Synthetic Oligonucleotide
taccgcctcatcatcggacacgacgtgtatcaatgtgctg

SEQ ID NO: 2522 - DNA, 40 bp, Artificial Sequence
  Synthetic Oligonucleotide
taccgcctcatcatcggacacgacgtgtaacagtggtctg

SEQ ID NO: 2523 - DNA, 40 bp, Artificial Sequence
  Synthetic Oligonucleotide
taccgcctcatcatcggacacgacgtatatcagttggctg

SEQ ID NO: 2524 - DNA, 40 bp, Artificial Sequence
  Synthetic Oligonucleotide
taccgcctcatcatcggacacgacgatgtcatgtgtgctg

SEQ ID NO: 2525 - DNA, 40 bp, Artificial Sequence
  Synthetic Oligonucleotide
taccgcctcatcatcggacacgacatgtatcagttggctg

SEQ ID NO: 2526 - DNA, 40 bp, Artificial Sequence
  Synthetic Oligonucleotide
taccgcctcatcatcggacacgaagtgtatcagttggctg

SEQ ID NO: 2527 - DNA, 40 bp, Artificial Sequence
  Synthetic Oligonucleotide
taccgcctcatcataggacatgacgtgtatcagttggctg

SEQ ID NO: 2528 - DNA, 40 bp, Artificial Sequence
  Synthetic Oligonucleotide
taccgcctcatcataggacacgacgtgtatcagttggctg

SEQ ID NO: 2529 - DNA, 40 bp, Artificial Sequence
  Synthetic Oligonucleotide
taccgcctcataatcggacacgacgtgtatcagttggctg

SEQ ID NO: 2530 - DNA, 40 bp, Artificial Sequence
  Synthetic Oligonucleotide
taccgcctcactcatcggacacgacgtgtatcagtgcgtg

SEQ ID NO: 2531 - DNA, 40 bp, Artificial Sequence
  Synthetic Oligonucleotide
taccgcctcacgtcatcggacatcgacgtgatcagtgctg

SEQ ID NO: 2532 - DNA, 40 bp, Artificial Sequence
  Synthetic Oligonucleotide
taccgcctcaccatcggacatcgacgtgtatcagttgctg

SEQ ID NO: 2533 - DNA, 40 bp, Artificial Sequence
  Synthetic Oligonucleotide
taccgcctacatcatcggacacgacgtgtatcagttgctg

SEQ ID NO: 2534 - DNA, 40 bp, Artificial Sequence
  Synthetic Oligonucleotide
taccgccgcatcatcggacacgacgcgtatcagttggctg

SEQ ID NO: 2535 - DNA, 40 bp, Artificial Sequence
  Synthetic Oligonucleotide
taccgccctcatatcggacacgacgtgtatcagttggctg

SEQ ID NO: 2536 - DNA, 40 bp, Artificial Sequence
  Synthetic Oligonucleotide
taccgcccactcatcggacacgacgtgtatcagttggctg

SEQ ID NO: 2537 - DNA, 40 bp, Artificial Sequence
  Synthetic Oligonucleotide
taccgcatcatcatcggacacgacgtgtatcagttggctg

SEQ ID NO: 2538 - DNA, 40 bp, Artificial Sequence
  Synthetic Oligonucleotide
tacccgctcatcatcggacacgacgtgtatcagttggctg

SEQ ID NO: 2539 - DNA, 40 bp, Artificial Sequence
  Synthetic Oligonucleotide
tacccctgatgtcgacgtcacgcttatctaaatcgtcaaa

SEQ ID NO: 2540 - DNA, 40 bp, Artificial Sequence
  Synthetic Oligonucleotide
tacagcctcccttgcgcgcaaaatgttcccctcgtgtggc

SEQ ID NO: 2541 - DNA, 40 bp, Artificial Sequence
  Synthetic Oligonucleotide
tacagcctcatcatcggacacgacgtgtatcagttggctg

SEQ ID NO: 2542 - DNA, 40 bp, Artificial Sequence
  Synthetic Oligonucleotide
tacagaggccctcgtgttggactaccagcttgtagaacgg

SEQ ID NO: 2543 - DNA, 40 bp, Artificial Sequence
  Synthetic Oligonucleotide
tacagaggccctcgtgttggactaccaacttgtagggcgg

SEQ ID NO: 2544 - DNA, 40 bp, Artificial Sequence
  Synthetic Oligonucleotide
tacagaggccctcgtgttggactaccaacttgtaggacgg

SEQ ID NO: 2545 - DNA, 40 bp, Artificial Sequence
  Synthetic Oligonucleotide
tacagaggccctcgtgttggactaccaacttgtagaacga

SEQ ID NO: 2546 - DNA, 40 bp, Artificial Sequence
  Synthetic Oligonucleotide
tacagaggccctcgtgctggactaccaacttgtagaacgg

SEQ ID NO: 2547 - DNA, 40 bp, Artificial Sequence
  Synthetic Oligonucleotide
tacagaagccctcgtgttggactaccaacttgtagaacgg

SEQ ID NO: 2548 - DNA, 40 bp, Artificial Sequence
  Synthetic Oligonucleotide
tacacaggtgttaattgcctccggtccttccgcgtgcaca

SEQ ID NO: 2549 - DNA, 40 bp, Artificial Sequence
  Synthetic Oligonucleotide
tacaagcctgtcttttaacctcggcagagtgctcatgagc

SEQ ID NO: 2550 - DNA, 40 bp, Artificial Sequence
  Synthetic Oligonucleotide
taatttcccgataccgccttgtatctgtgcctgtcgcact

SEQ ID NO: 2551 - DNA, 40 bp, Artificial Sequence
  Synthetic Oligonucleotide
taattcgccagtcacatcaactatgatgacgcttggctga

SEQ ID NO: 2552 - DNA, 40 bp, Artificial Sequence
  Synthetic Oligonucleotide
taatgggcttttaagcacttctcggtaacttggcagttac

SEQ ID NO: 2553 - DNA, 40 bp, Artificial Sequence
  Synthetic Oligonucleotide
taatgggctttaagcacttctcggtaacttgggcagttac

SEQ ID NO: 2554 - DNA, 40 bp, Artificial Sequence
  Synthetic Oligonucleotide
taatgcttgatctcctgtcgactctgcggctgagactact

SEQ ID NO: 2555 - DNA, 40 bp, Artificial Sequence
  Synthetic Oligonucleotide
taatctggtacctatcatgtgctatcatgacggctaggac

SEQ ID NO: 2556 - DNA, 40 bp, Artificial Sequence
  Synthetic Oligonucleotide
taatctggtacctatcatgcgctaccatgacggctaggac

SEQ ID NO: 2557 - DNA, 40 bp, Artificial Sequence
  Synthetic Oligonucleotide
taatcgatccgtactttcaggcgctatcctgatcacccga

SEQ ID NO: 2558 - DNA, 40 bp, Artificial Sequence
  Synthetic Oligonucleotide
taaggggctttaagcacttctcggtaacttgggcagttac

SEQ ID NO: 2559 - DNA, 40 bp, Artificial Sequence
  Synthetic Oligonucleotide
taagcctcgatcctcgcaccgcacgcgatcccaatgtctg

SEQ ID NO: 2560 - DNA, 40 bp, Artificial Sequence
  Synthetic Oligonucleotide
taagccggggcctgcctcaagctagctacctccattgctg

SEQ ID NO: 2561 - DNA, 40 bp, Artificial Sequence
  Synthetic Oligonucleotide
taagagtgcacagtattgcctcgatcctccatggcttaag

SEQ ID NO: 2562 - DNA, 40 bp, Artificial Sequence
  Synthetic Oligonucleotide
taagagtgcacagtactgcctcgatcctgcatggcttaag

SEQ ID NO: 2563 - DNA, 40 bp, Artificial Sequence
  Synthetic Oligonucleotide
taagagtgcacagtactgcctcgatcctccatggcttagg

SEQ ID NO: 2564 - DNA, 40 bp, Artificial Sequence
  Synthetic Oligonucleotide
taagagtgcacagtactgcctcgatcctccatggctcaag

SEQ ID NO: 2565 - DNA, 40 bp, Artificial Sequence
  Synthetic Oligonucleotide
taagagtgcacagtactgcctcgatcctccatagcttaag

SEQ ID NO: 2566 - DNA, 40 bp, Artificial Sequence
  Synthetic Oligonucleotide
taagagtgcacagtactgcctcgatcccccatggcttaag

SEQ ID NO: 2567 - DNA, 40 bp, Artificial Sequence
  Synthetic Oligonucleotide
taagagtgcacagtaccgcctcgatcctccatggcttaag

SEQ ID NO: 2568 - DNA, 40 bp, Artificial Sequence
  Synthetic Oligonucleotide
taacttgcgtgcttaggtacctggtcactcctgcacgggt

SEQ ID NO: 2569 - DNA, 40 bp, Artificial Sequence
  Synthetic Oligonucleotide
taacttgcgtgcttaggtacctggtcactcctgcacgggg

SEQ ID NO: 2570 - DNA, 40 bp, Artificial Sequence
  Synthetic Oligonucleotide
taacgggcccctttatccacctcgcttctccccgactgcg

SEQ ID NO: 2571 - DNA, 40 bp, Artificial Sequence
  Synthetic Oligonucleotide
taaccggggcccgcctcaagctagctacctccattggctg

SEQ ID NO: 2572 - DNA, 40 bp, Artificial Sequence
  Synthetic Oligonucleotide
taaattgggccctgattacgcctcggtccttgcgttaccg

SEQ ID NO: 2573 - DNA, 40 bp, Artificial Sequence
  Synthetic Oligonucleotide
taaattgggccctgattacgcctcggtcctcgcattaccg

SEQ ID NO: 2574 - DNA, 40 bp, Artificial Sequence
  Synthetic Oligonucleotide
taaagtccgcggtttcactagactactactgatcacgtcg

SEQ ID NO: 2575 - DNA, 40 bp, Artificial Sequence
  Synthetic Oligonucleotide
gtttcagaactcgcccctctggagtaataggccgaatttc

SEQ ID NO: 2576 - DNA, 40 bp, Artificial Sequence
  Synthetic Oligonucleotide
gtttactcgggtccattcgcctcggtctccccattaggta

SEQ ID NO: 2577 - DNA, 40 bp, Artificial Sequence
  Synthetic Oligonucleotide
gtttaattgcttccttttggcgctatccattcgatggcag

SEQ ID NO: 2578 - DNA, 40 bp, Artificial Sequence
  Synthetic Oligonucleotide
gtttaagcgctaccagctaattagcatggccccttaactg

SEQ ID NO: 2579 - DNA, 40 bp, Artificial Sequence
  Synthetic Oligonucleotide
gttgggaagcggaactggtcgaggcgctatcctcgactta

SEQ ID NO: 2580 - DNA, 40 bp, Artificial Sequence
  Synthetic Oligonucleotide
gttgacatctgttcgttggttaaccataaccattttagtg

SEQ ID NO: 2581 - DNA, 40 bp, Artificial Sequence
  Synthetic Oligonucleotide
gttctgcgctctgtcctcatggttcgaaccggtatgcatg

SEQ ID NO: 2582 - DNA, 40 bp, Artificial Sequence
  Synthetic Oligonucleotide
gttctcgctctgtcctcatggttcgaaccggtatcgcatg

SEQ ID NO: 2583 - DNA, 40 bp, Artificial Sequence
  Synthetic Oligonucleotide
gttctcgcctttgtcctcatggttcgaaccggtatgcatg

SEQ ID NO: 2584 - DNA, 40 bp, Artificial Sequence
  Synthetic Oligonucleotide
gttctcgcctctgttctcatggttcgaaccggtatgcatg

SEQ ID NO: 2585 - DNA, 40 bp, Artificial Sequence
  Synthetic Oligonucleotide
gttctcgcctctgtcttcatggttcgaaccggtatgcatg

SEQ ID NO: 2586 - DNA, 40 bp, Artificial Sequence
  Synthetic Oligonucleotide
gttctcgcctctgtcctcttggttcgaaccggtatgcatg

SEQ ID NO: 2587 - DNA, 40 bp, Artificial Sequence
  Synthetic Oligonucleotide
gttctcgcctctgtcctcatgtttcgaaccggtatgcatg

SEQ ID NO: 2588 - DNA, 40 bp, Artificial Sequence
  Synthetic Oligonucleotide
gttctcgcctctgtcctcatgttcgaaccggtatcgcatg

SEQ ID NO: 2589 - DNA, 40 bp, Artificial Sequence
  Synthetic Oligonucleotide
gttctcgcctctgtcctcatgttcgaaccggtatccgatg

SEQ ID NO: 2590 - DNA, 40 bp, Artificial Sequence
  Synthetic Oligonucleotide
gttctcgcctctgtcctcatgttcgaaccggtagtgcatg

SEQ ID NO: 2591 - DNA, 40 bp, Artificial Sequence
  Synthetic Oligonucleotide
gttctcgcctctgtcctcatggtttgaaccggtatgcatg

SEQ ID NO: 2592 - DNA, 40 bp, Artificial Sequence
  Synthetic Oligonucleotide
gttctcgcctctgtcctcatggttcggaccggtatgcatg

SEQ ID NO: 2593 - DNA, 40 bp, Artificial Sequence
  Synthetic Oligonucleotide
gttctcgcctctgtcctcatggttcgaaccggtttgcatg

SEQ ID NO: 2594 - DNA, 40 bp, Artificial Sequence
  Synthetic Oligonucleotide
gttctcgcctctgtcctcatggttcgaaccggtatgcacg

SEQ ID NO: 2595 - DNA, 40 bp, Artificial Sequence
  Synthetic Oligonucleotide
gttctcgcctctgtcctcatggttcgaaccggtatgaatg

SEQ ID NO: 2596 - DNA, 40 bp, Artificial Sequence
  Synthetic Oligonucleotide
gttctcgcctctgtcctcatggttcgaaccggtatacatg

SEQ ID NO: 2597 - DNA, 40 bp, Artificial Sequence
  Synthetic Oligonucleotide
gttctcgcctctgtcctcatggttcgaaccgggatgcatg

SEQ ID NO: 2598 - DNA, 40 bp, Artificial Sequence
  Synthetic Oligonucleotide
gttctcgcctctgtcctcatggttcgaacccgtatgcatg

SEQ ID NO: 2599 - DNA, 40 bp, Artificial Sequence
  Synthetic Oligonucleotide
gttctcgcctctgtcctcatggttcgaaccagtatgcaag

SEQ ID NO: 2600 - DNA, 40 bp, Artificial Sequence
  Synthetic Oligonucleotide
gttctcgcctctgtcctcatggttcaaaccggtatgcatg

SEQ ID NO: 2601 - DNA, 40 bp, Artificial Sequence
  Synthetic Oligonucleotide
gttctcgcctctgtcctcatggctcgaaccggtatgcatg

SEQ ID NO: 2602 - DNA, 40 bp, Artificial Sequence
  Synthetic Oligonucleotide
gttctcgcctctgtcctcatgattcgaaccggtatgcatg

SEQ ID NO: 2603 - DNA, 40 bp, Artificial Sequence
  Synthetic Oligonucleotide
gttctcgcctctgtcctcatagttcgaaccggtatgcatg

SEQ ID NO: 2604 - DNA, 40 bp, Artificial Sequence
  Synthetic Oligonucleotide
gttctcgcctctgtcctcacgtcgatccggtaacgtgatg

SEQ ID NO: 2605 - DNA, 40 bp, Artificial Sequence
  Synthetic Oligonucleotide
gttctcgcctctgtccctctggttcgaaccggtatgcatg

SEQ ID NO: 2606 - DNA, 40 bp, Artificial Sequence
  Synthetic Oligonucleotide
gttctcgcctccgtctccatggttcgaaccggtatgcatg

SEQ ID NO: 2607 - DNA, 40 bp, Artificial Sequence
  Synthetic Oligonucleotide
gttctcgcctactgtcctcatgttcgaaccggtatgcatg

SEQ ID NO: 2608 - DNA, 40 bp, Artificial Sequence
  Synthetic Oligonucleotide
gttctcgccgctgtcctcatggttcgaaccggtatgcatg

SEQ ID NO: 2609 - DNA, 40 bp, Artificial Sequence
  Synthetic Oligonucleotide
gttctcgcccctgtcctcatggttcgagccggtatgcatg

SEQ ID NO: 2610 - DNA, 40 bp, Artificial Sequence
  Synthetic Oligonucleotide
gttctcgccactgtcctcatggttcgaaccggtatgcatg

SEQ ID NO: 2611 - DNA, 40 bp, Artificial Sequence
  Synthetic Oligonucleotide
gttctccacacgggattgttcagttatgccaaggtagaac

SEQ ID NO: 2612 - DNA, 40 bp, Artificial Sequence
  Synthetic Oligonucleotide
gttctagcctctgtcctcatggttcgaaccggtatgcatg

SEQ ID NO: 2613 - DNA, 40 bp, Artificial Sequence
  Synthetic Oligonucleotide
gttcgtagttttttgactacaaaaatattacacgaacaga

SEQ ID NO: 2614 - DNA, 40 bp, Artificial Sequence
  Synthetic Oligonucleotide
gttcctcgctctgtcctcatggttcgaaccggtatgcatg

SEQ ID NO: 2615 - DNA, 40 bp, Artificial Sequence
  Synthetic Oligonucleotide
gttcatcgcctctgtcctcatggttcgaaccgtatgcatg

SEQ ID NO: 2616 - DNA, 40 bp, Artificial Sequence
  Synthetic Oligonucleotide
gttcatcgcatcacatcaactatgatgacgcttgactgga

SEQ ID NO: 2617 - DNA, 40 bp, Artificial Sequence
  Synthetic Oligonucleotide
gttcacgctgccctttgtttaaggactttatacaaacgca

SEQ ID NO: 2618 - DNA, 40 bp, Artificial Sequence
  Synthetic Oligonucleotide
gttcacgcctctgtcctccatggttgaaccggtatgcatg

SEQ ID NO: 2619 - DNA, 40 bp, Artificial Sequence
  Synthetic Oligonucleotide
gttatcgcctctgtcctcatggttcgaaccggtatgcatg

SEQ ID NO: 2620 - DNA, 40 bp, Artificial Sequence
  Synthetic Oligonucleotide
gttaggctttcacgcacgcggattgtacccgaactgggtt

SEQ ID NO: 2621 - DNA, 40 bp, Artificial Sequence
  Synthetic Oligonucleotide
gttaggcttcacgcacgcggatttgtacccgaactgggtt

SEQ ID NO: 2622 - DNA, 40 bp, Artificial Sequence
  Synthetic Oligonucleotide
gttaccgctgggtgaggagtcgttgtgcgctatcacatct

SEQ ID NO: 2623 - DNA, 40 bp, Artificial Sequence
  Synthetic Oligonucleotide
gttaacggtacagatgcttccgcctaggttcctcctgtcg

SEQ ID NO: 2624 - DNA, 40 bp, Artificial Sequence
  Synthetic Oligonucleotide
gtgtaatcgattcgctgcgcctcggtccaaccatgcgctg

SEQ ID NO: 2625 - DNA, 40 bp, Artificial Sequence
  Synthetic Oligonucleotide
gtggtggttttctcggattccctccctgccactcgtgatg

SEQ ID NO: 2626 - DNA, 40 bp, Artificial Sequence
  Synthetic Oligonucleotide
gtggtcccatgagcttctggcactatccagttgacgctca

SEQ ID NO: 2627 - DNA, 40 bp, Artificial Sequence
  Synthetic Oligonucleotide
gtggtccatgagtcttctggcactatccagttgacgctca

SEQ ID NO: 2628 - DNA, 40 bp, Artificial Sequence
  Synthetic Oligonucleotide
gtggtccatgagccttctggcactatccagttgacgctca

SEQ ID NO: 2629 - DNA, 40 bp, Artificial Sequence
  Synthetic Oligonucleotide
gtggggcttttaagcacttctcggtaacttgggcagttac

SEQ ID NO: 2630 - DNA, 40 bp, Artificial Sequence
  Synthetic Oligonucleotide
gtggcatcctgttcgcttcggcgctatccgattgaccgaa

SEQ ID NO: 2631 - DNA, 40 bp, Artificial Sequence
  Synthetic Oligonucleotide
gtgcgtgttctgccttctaaagactactttagtgcaaagc

SEQ ID NO: 2632 - DNA, 40 bp, Artificial Sequence
  Synthetic Oligonucleotide
gtgcggaacgcctcgatcctcgcataatatgatacgtctg

SEQ ID NO: 2633 - DNA, 40 bp, Artificial Sequence
  Synthetic Oligonucleotide
gtgcgaacctcctcctacccgccttgaaccgctgttgcaa

SEQ ID NO: 2634 - DNA, 40 bp, Artificial Sequence
  Synthetic Oligonucleotide
gtgatgtagcccactatggctttgttcgatcattgctccg

SEQ ID NO: 2635 - DNA, 40 bp, Artificial Sequence
  Synthetic Oligonucleotide
gtgatgtagcccactatggcctttgttcgatcatgctccg

SEQ ID NO: 2636 - DNA, 40 bp, Artificial Sequence
  Synthetic Oligonucleotide
gtgatggccacgatgcactatcctcgattacggtcatcgc

SEQ ID NO: 2637 - DNA, 40 bp, Artificial Sequence
  Synthetic Oligonucleotide
gtgatcatataaagccggcctgctcgcctcggtcctccat

SEQ ID NO: 2638 - DNA, 40 bp, Artificial Sequence
  Synthetic Oligonucleotide
gtgatatcacgtgcctgggttccaaccattcgagcttaag

SEQ ID NO: 2639 - DNA, 40 bp, Artificial Sequence
  Synthetic Oligonucleotide
gtgagaagcgtgtgagagactactctgtttgtaacgcgat

SEQ ID NO: 2640 - DNA, 40 bp, Artificial Sequence
  Synthetic Oligonucleotide
gtgacccgctcagctatcggcaccgtactcatacgtgctg

SEQ ID NO: 2641 - DNA, 40 bp, Artificial Sequence
  Synthetic Oligonucleotide
gtgacaatcagaccacgacctcgggcagcattatgttttg

SEQ ID NO: 2642 - DNA, 40 bp, Artificial Sequence
  Synthetic Oligonucleotide
gtgaatcacgtgagcactcgcctcgcaatctgcgtcaggc

SEQ ID NO: 2643 - DNA, 40 bp, Artificial Sequence
  Synthetic Oligonucleotide
gtgaagtcgaaccgcctcgatcctcttcgtccacgtcctc

SEQ ID NO: 2644 - DNA, 40 bp, Artificial Sequence
  Synthetic Oligonucleotide
gtgaagtcgaaccgccacgatcctcttcgtccacgtcctc

SEQ ID NO: 2645 - DNA, 40 bp, Artificial Sequence
  Synthetic Oligonucleotide
gtctcttacgcgcaggacgtctttcgtgcactatcacgat

SEQ ID NO: 2646 - DNA, 40 bp, Artificial Sequence
  Synthetic Oligonucleotide
gtctcgggtccgttgtttaccgcttcgcaccggcccagta

SEQ ID NO: 2647 - DNA, 40 bp, Artificial Sequence
  Synthetic Oligonucleotide
gtctattcgccgaggacgtctttcgtgcactatcacgatt

SEQ ID NO: 2648 - DNA, 40 bp, Artificial Sequence
  Synthetic Oligonucleotide
gtctatggtacgcctcgattccgcccatacatgcatgtaa

SEQ ID NO: 2649 - DNA, 40 bp, Artificial Sequence
  Synthetic Oligonucleotide
gtcgttggatatacttgcgcaattacatcagaggggtctg

SEQ ID NO: 2650 - DNA, 40 bp, Artificial Sequence
  Synthetic Oligonucleotide
gtcgtacttaccacctgacatcgcgggggaactaatggtt

SEQ ID NO: 2651 - DNA, 40 bp, Artificial Sequence
  Synthetic Oligonucleotide
gtcgtacttaccaccctggcatcgcggggaactaatggtt

SEQ ID NO: 2652 - DNA, 40 bp, Artificial Sequence
  Synthetic Oligonucleotide
gtcgtacttaccaccctgagcatcgcggggaactaatgtt

SEQ ID NO: 2653 - DNA, 40 bp, Artificial Sequence
  Synthetic Oligonucleotide
gtcgtacttaccaccctgacgtcacggggaactaatggtt

SEQ ID NO: 2654 - DNA, 40 bp, Artificial Sequence
  Synthetic Oligonucleotide
gtcgtacttaccaccctgacctcgcggggaactaatggtt

SEQ ID NO: 2655 - DNA, 40 bp, Artificial Sequence
  Synthetic Oligonucleotide
gtcgtacttaccaccctgacatcgcggggaactgatggtt

SEQ ID NO: 2656 - DNA, 40 bp, Artificial Sequence
  Synthetic Oligonucleotide
gtcgtacttaccaccctgacatcgcggggaactaatggtg

SEQ ID NO: 2657 - DNA, 40 bp, Artificial Sequence
  Synthetic Oligonucleotide
gtcgtacttaccaccctgacatcgcggggaactaatggtc

SEQ ID NO: 2658 - DNA, 40 bp, Artificial Sequence
  Synthetic Oligonucleotide
gtcgtacttaccaccctgacatcgcggggaaccaatggtt

SEQ ID NO: 2659 - DNA, 40 bp, Artificial Sequence
  Synthetic Oligonucleotide
gtcgtacttaccaccctgacatcgcagggaactaatggtt

SEQ ID NO: 2660 - DNA, 40 bp, Artificial Sequence
  Synthetic Oligonucleotide
gtcgtacttaccaccctgacaccgcggggaaccaatggtt

SEQ ID NO: 2661 - DNA, 40 bp, Artificial Sequence
  Synthetic Oligonucleotide
gtcgtacttacaccctgacatcgcggggggactaatggtt

SEQ ID NO: 2662 - DNA, 40 bp, Artificial Sequence
  Synthetic Oligonucleotide
gtcgtactcaccaccctgacatcgcggggaactaatggtt

SEQ ID NO: 2663 - DNA, 40 bp, Artificial Sequence
  Synthetic Oligonucleotide
gtcgtactacctacctgacatcgcggggaactaaatggtt

SEQ ID NO: 2664 - DNA, 40 bp, Artificial Sequence
  Synthetic Oligonucleotide
gtcgtaattaccaccctgacatcgcggggaactaatggtt

SEQ ID NO: 2665 - DNA, 40 bp, Artificial Sequence
  Synthetic Oligonucleotide
gtcggttcttctctgactacatgagattataaacgcgtgc

SEQ ID NO: 2666 - DNA, 40 bp, Artificial Sequence
  Synthetic Oligonucleotide
gtcggttcttctcctgactacatgagattaataaacgcgc

SEQ ID NO: 2667 - DNA, 40 bp, Artificial Sequence
  Synthetic Oligonucleotide
gtcggaacgcctcgatcctcgcataattatgatacgtctg

SEQ ID NO: 2668 - DNA, 40 bp, Artificial Sequence
  Synthetic Oligonucleotide
gtcggaacgcctacgatcctcgcataatatgatacgtctg

SEQ ID NO: 2669 - DNA, 40 bp, Artificial Sequence
  Synthetic Oligonucleotide
gtcgccacctcggatctgaccgcaatatcatgatatgtca

SEQ ID NO: 2670 - DNA, 40 bp, Artificial Sequence
  Synthetic Oligonucleotide
gtcgcacttaccaccctgacatcgcggggaactaatggtt

SEQ ID NO: 2671 - DNA, 40 bp, Artificial Sequence
  Synthetic Oligonucleotide
gtcgcacttaccaccctgacaccgcggggaactaatggtt

SEQ ID NO: 2672 - DNA, 40 bp, Artificial Sequence
  Synthetic Oligonucleotide
gtcgatacttaccacctgacatcgcggggaactaatggtt

SEQ ID NO: 2673 - DNA, 40 bp, Artificial Sequence
  Synthetic Oligonucleotide
gtcgacctgcgttctctcggccacttatcgattgacgctg

SEQ ID NO: 2674 - DNA, 40 bp, Artificial Sequence
  Synthetic Oligonucleotide
gtcgaccgcctcgatcctctggacactatgatacgtgctg

SEQ ID NO: 2675 - DNA, 40 bp, Artificial Sequence
  Synthetic Oligonucleotide
gtcgaatcgcctcgatctcgcataatatgatacgttctgg

SEQ ID NO: 2676 - DNA, 40 bp, Artificial Sequence
  Synthetic Oligonucleotide
gtcgaatcgcctcgactcctcgcataatatgatacgtctg

SEQ ID NO: 2677 - DNA, 40 bp, Artificial Sequence
  Synthetic Oligonucleotide
gtcgaagcgccttcgatctcgcataatatgattacgtctg

SEQ ID NO: 2678 - DNA, 40 bp, Artificial Sequence
  Synthetic Oligonucleotide
gtcgaacgccttcgatcctcgcataatagtgatacgtctg

SEQ ID NO: 2679 - DNA, 40 bp, Artificial Sequence
  Synthetic Oligonucleotide
gtcgaacgcctcgattcctcgcataatatgatacgtcctg

SEQ ID NO: 2680 - DNA, 40 bp, Artificial Sequence
  Synthetic Oligonucleotide
gtcgaacgcctcgatcctcgacataatatgatacgttctg

SEQ ID NO: 2681 - DNA, 40 bp, Artificial Sequence
  Synthetic Oligonucleotide
gtccttggtacgcctcgattccgcccatacatgcatgtaa

SEQ ID NO: 2682 - DNA, 40 bp, Artificial Sequence
  Synthetic Oligonucleotide
gtcctcgcctcagtcctcatggttcgaaccggtatgcatg

SEQ ID NO: 2683 - DNA, 40 bp, Artificial Sequence
  Synthetic Oligonucleotide
gtccgtcgtcccgttttagatgttacgttgaatctcgttc

SEQ ID NO: 2684 - DNA, 40 bp, Artificial Sequence
  Synthetic Oligonucleotide
gtccgtcatgttcccgcctgggttcctcctgataagcatg

SEQ ID NO: 2685 - DNA, 40 bp, Artificial Sequence
  Synthetic Oligonucleotide
gtccggtacgcctcgatcctcgcataatatgatacgtctg

SEQ ID NO: 2686 - DNA, 40 bp, Artificial Sequence
  Synthetic Oligonucleotide
gtccggggcgcctcgatcctcgcataatatgatacgtctg

SEQ ID NO: 2687 - DNA, 40 bp, Artificial Sequence
  Synthetic Oligonucleotide
gtccgggacgcctcggtcctcgcataatatgatacgtctg

SEQ ID NO: 2688 - DNA, 40 bp, Artificial Sequence
  Synthetic Oligonucleotide
gtccgggacgcctcgatcctcgcataatatggtacgtctg

SEQ ID NO: 2689 - DNA, 40 bp, Artificial Sequence
  Synthetic Oligonucleotide
gtccgggacgcctcgatcctcgcataatacgatacgtccg

SEQ ID NO: 2690 - DNA, 40 bp, Artificial Sequence
  Synthetic Oligonucleotide
gtccgggacgcctcgatcctcgcataataagatacgtctg

SEQ ID NO: 2691 - DNA, 40 bp, Artificial Sequence
  Synthetic Oligonucleotide
gtccggatcgcctcgatcctcgcataatatgatacgtctg

SEQ ID NO: 2692 - DNA, 40 bp, Artificial Sequence
  Synthetic Oligonucleotide
gtccggagcgctcgatcctcgcataatatggtacgtcctg

SEQ ID NO: 2693 - DNA, 40 bp, Artificial Sequence
  Synthetic Oligonucleotide
gtccggagcgcctcgatccttgcataatatgatacgtctg

SEQ ID NO: 2694 - DNA, 40 bp, Artificial Sequence
  Synthetic Oligonucleotide
gtccggagcgcctcgatcctcgcatagtatgatacgtctg

SEQ ID NO: 2695 - DNA, 40 bp, Artificial Sequence
  Synthetic Oligonucleotide
gtccggagcgcctcgatcctcgcataatatgacacgtctg

SEQ ID NO: 2696 - DNA, 40 bp, Artificial Sequence
  Synthetic Oligonucleotide
gtccggagcgcctcgatcctcgcataatacgatacgtctg

SEQ ID NO: 2697 - DNA, 40 bp, Artificial Sequence
  Synthetic Oligonucleotide
gtccggagcgcctcgatcctcgcataacatgatacttctg

SEQ ID NO: 2698 - DNA, 40 bp, Artificial Sequence
  Synthetic Oligonucleotide
gtccggagcgcctcgatccccgcataatatgatacgtctg

SEQ ID NO: 2699 - DNA, 40 bp, Artificial Sequence
  Synthetic Oligonucleotide
gtccggagactactccgttggtctgcaggtgtcaccacga

SEQ ID NO: 2700 - DNA, 40 bp, Artificial Sequence
  Synthetic Oligonucleotide
gtccggaccgcctcgatcctcgcataatatgatacgtctg

SEQ ID NO: 2701 - DNA, 40 bp, Artificial Sequence
  Synthetic Oligonucleotide
gtccggaatcgcctcgatctcgcataatatgatacgtctg

SEQ ID NO: 2702 - DNA, 40 bp, Artificial Sequence
  Synthetic Oligonucleotide
gtccggaatcgcctcgatcctcgcatatatgatacgtctg

SEQ ID NO: 2703 - DNA, 40 bp, Artificial Sequence
  Synthetic Oligonucleotide
gtccggaagtccctcctcgtcttgatgcactatcatctca

SEQ ID NO: 2704 - DNA, 40 bp, Artificial Sequence
  Synthetic Oligonucleotide
gtccggaaggccccgatcctcgcattatatgatacgtctg

SEQ ID NO: 2705 - DNA, 40 bp, Artificial Sequence
  Synthetic Oligonucleotide
gtccggaagcgctcgatcctcgcataatatgatacgtctg

SEQ ID NO: 2706 - DNA, 40 bp, Artificial Sequence
  Synthetic Oligonucleotide
gtccggaagcgcctcgatctcgcataatatgatacgtctg

SEQ ID NO: 2707 - DNA, 40 bp, Artificial Sequence
  Synthetic Oligonucleotide
gtccggaacgtctcgatcctcgcataatatgatacgtcgg

SEQ ID NO: 2708 - DNA, 40 bp, Artificial Sequence
  Synthetic Oligonucleotide
gtccggaacgccttgatcctcgtataatatgatacgtctg

SEQ ID NO: 2709 - DNA, 40 bp, Artificial Sequence
  Synthetic Oligonucleotide
gtccggaacgccttgatcctcgcataatatgatacatctg

SEQ ID NO: 2710 - DNA, 40 bp, Artificial Sequence
  Synthetic Oligonucleotide
gtccggaacgcctctatcctcgcataatatgatacgtctg

SEQ ID NO: 2711 - DNA, 40 bp, Artificial Sequence
  Synthetic Oligonucleotide
gtccggaacgcctcgtatcctcgcatatatgatacgtctg

SEQ ID NO: 2712 - DNA, 40 bp, Artificial Sequence
  Synthetic Oligonucleotide
gtccggaacgcctcggtcctcgcataacatgatacgtctg

SEQ ID NO: 2713 - DNA, 40 bp, Artificial Sequence
  Synthetic Oligonucleotide
gtccggaacgcctcggtcctcacataatatgatacgtctg

SEQ ID NO: 2714 - DNA, 40 bp, Artificial Sequence
  Synthetic Oligonucleotide
gtccggaacgcctcgatcttcgcataatatgatacgtctg

SEQ ID NO: 2715 - DNA, 40 bp, Artificial Sequence
  Synthetic Oligonucleotide
gtccggaacgcctcgatcctcgcgtaatatgatgcgtctg

SEQ ID NO: 2716 - DNA, 40 bp, Artificial Sequence
  Synthetic Oligonucleotide
gtccggaacgcctcgatcctcgcgtaatataatacgtctg

SEQ ID NO: 2717 - DNA, 40 bp, Artificial Sequence
  Synthetic Oligonucleotide
gtccggaacgcctcgatcctcgcatgatacgatacgtctg

SEQ ID NO: 2718 - DNA, 40 bp, Artificial Sequence
  Synthetic Oligonucleotide
gtccggaacgcctcgatcctcgcatatatggatacgtctg

SEQ ID NO: 2719 - DNA, 40 bp, Artificial Sequence
  Synthetic Oligonucleotide
gtccggaacgcctcgatcctcgcatatatgattacgtctg

SEQ ID NO: 2720 - DNA, 40 bp, Artificial Sequence
  Synthetic Oligonucleotide
gtccggaacgcctcgatcctcgcatatatgatacgtctgc

SEQ ID NO: 2721 - DNA, 40 bp, Artificial Sequence
  Synthetic Oligonucleotide
gtccggaacgcctcgatcctcgcatatatcgatacgcctg

SEQ ID NO: 2722 - DNA, 40 bp, Artificial Sequence
  Synthetic Oligonucleotide
gtccggaacgcctcgatcctcgcatagtataatacgtctg

SEQ ID NO: 2723 - DNA, 40 bp, Artificial Sequence
  Synthetic Oligonucleotide
gtccggaacgcctcgatcctcgcatagcatgatacgtctg

SEQ ID NO: 2724 - DNA, 40 bp, Artificial Sequence
  Synthetic Oligonucleotide
gtccggaacgcctcgatcctcgcatactgtgatacgtctg

SEQ ID NO: 2725 - DNA, 40 bp, Artificial Sequence
  Synthetic Oligonucleotide
gtccggaacgcctcgatcctcgcatactatgatacgtctg

SEQ ID NO: 2726 - DNA, 40 bp, Artificial Sequence
  Synthetic Oligonucleotide
gtccggaacgcctcgatcctcgcataatttgatacgtctg

SEQ ID NO: 2727 - DNA, 40 bp, Artificial Sequence
  Synthetic Oligonucleotide
gtccggaacgcctcgatcctcgcataatgtgatacgcctg

SEQ ID NO: 2728 - DNA, 40 bp, Artificial Sequence
  Synthetic Oligonucleotide
gtccggaacgcctcgatcctcgcataatgtgacacgtctg

SEQ ID NO: 2729 - DNA, 40 bp, Artificial Sequence
  Synthetic Oligonucleotide
gtccggaacgcctcgatcctcgcataatatggtacgtcta

SEQ ID NO: 2730 - DNA, 40 bp, Artificial Sequence
  Synthetic Oligonucleotide
gtccggaacgcctcgatcctcgcataatatggcacgtctg

SEQ ID NO: 2731 - DNA, 40 bp, Artificial Sequence
  Synthetic Oligonucleotide
gtccggaacgcctcgatcctcgcataatatgatacgtgtg

SEQ ID NO: 2732 - DNA, 40 bp, Artificial Sequence
  Synthetic Oligonucleotide
gtccggaacgcctcgatcctcgcataatatgatacgtctt

SEQ ID NO: 2733 - DNA, 40 bp, Artificial Sequence
  Synthetic Oligonucleotide
gtccggaacgcctcgatcctcgcataatatgatacgtctc

SEQ ID NO: 2734 - DNA, 40 bp, Artificial Sequence
  Synthetic Oligonucleotide
gtccggaacgcctcgatcctcgcataatatgatacgtatg

SEQ ID NO: 2735 - DNA, 40 bp, Artificial Sequence
  Synthetic Oligonucleotide
gtccggaacgcctcgatcctcgcataatatgatacggctg

SEQ ID NO: 2736 - DNA, 40 bp, Artificial Sequence
  Synthetic Oligonucleotide
gtccggaacgcctcgatcctcgcataatatgatacggccg

SEQ ID NO: 2737 - DNA, 40 bp, Artificial Sequence
  Synthetic Oligonucleotide
gtccggaacgcctcgatcctcgcataatatgacacgtttg

SEQ ID NO: 2738 - DNA, 40 bp, Artificial Sequence
  Synthetic Oligonucleotide
gtccggaacgcctcgatcctcgcataatatgaaacgtctg

SEQ ID NO: 2739 - DNA, 40 bp, Artificial Sequence
  Synthetic Oligonucleotide
gtccggaacgcctcgatcctcgcataatatcgatacgctg

SEQ ID NO: 2740 - DNA, 40 bp, Artificial Sequence
  Synthetic Oligonucleotide
gtccggaacgcctcgatcctcgcataatatcatacgtctg

SEQ ID NO: 2741 - DNA, 40 bp, Artificial Sequence
  Synthetic Oligonucleotide
gtccggaacgcctcgatcctcgcataatacgacacgtctg

SEQ ID NO: 2742 - DNA, 40 bp, Artificial Sequence
  Synthetic Oligonucleotide
gtccggaacgcctcgatcctcgcataacaggatacgtctg

SEQ ID NO: 2743 - DNA, 40 bp, Artificial Sequence
  Synthetic Oligonucleotide
gtccggaacgcctcgatcctcgcacaatatgatgcgtctg

SEQ ID NO: 2744 - DNA, 40 bp, Artificial Sequence
  Synthetic Oligonucleotide
gtccggaacgcctcgatcctcgcacaatatgataggtctg

SEQ ID NO: 2745 - DNA, 40 bp, Artificial Sequence
  Synthetic Oligonucleotide
gtccggaacgcctcgatcctcgcaatatatgatacgtctg

SEQ ID NO: 2746 - DNA, 40 bp, Artificial Sequence
  Synthetic Oligonucleotide
gtccggaacgcctcgatcctccgcatatatgatacgtctg

SEQ ID NO: 2747 - DNA, 40 bp, Artificial Sequence
  Synthetic Oligonucleotide
gtccggaacgcctcgatcctcacctaatatgatacgtctg

SEQ ID NO: 2748 - DNA, 40 bp, Artificial Sequence
  Synthetic Oligonucleotide
gtccggaacgcctcgatcctcacatagtatgatacgtctg

SEQ ID NO: 2749 - DNA, 40 bp, Artificial Sequence
  Synthetic Oligonucleotide
gtccggaacgcctcgatcctcacacaatatgatacgtctg

SEQ ID NO: 2750 - DNA, 40 bp, Artificial Sequence
  Synthetic Oligonucleotide
gtccggaacgcctcgatcctagcataatatgatacttctg

SEQ ID NO: 2751 - DNA, 40 bp, Artificial Sequence
  Synthetic Oligonucleotide
gtccggaacgcctcgatccacgcataatatgatatgtctg

SEQ ID NO: 2752 - DNA, 40 bp, Artificial Sequence
  Synthetic Oligonucleotide
gtccggaacgcctcgagcctcgcataatatgatacgtctg

SEQ ID NO: 2753 - DNA, 40 bp, Artificial Sequence
  Synthetic Oligonucleotide
gtccggaacgcctcgactcctcgcatatatgatacgtctg

SEQ ID NO: 2754 - DNA, 40 bp, Artificial Sequence
  Synthetic Oligonucleotide
gtccggaacgcctcagtcctcgcattatatgatacgtctg

SEQ ID NO: 2755 - DNA, 40 bp, Artificial Sequence
  Synthetic Oligonucleotide
gtccggaacgccctcgatcctcgcatatatgatagtgctg

SEQ ID NO: 2756 - DNA, 40 bp, Artificial Sequence
  Synthetic Oligonucleotide
gtccggaacgccccgatcctcgcataatataatacgtctg

SEQ ID NO: 2757 - DNA, 40 bp, Artificial Sequence
  Synthetic Oligonucleotide
gtccggaacgccacgatcctcgcataatatgatacgtctg

SEQ ID NO: 2758 - DNA, 40 bp, Artificial Sequence
  Synthetic Oligonucleotide
gtccggaacgcatcgatcctcgcataatatgatacgtctg

SEQ ID NO: 2759 - DNA, 40 bp, Artificial Sequence
  Synthetic Oligonucleotide
gtccggaaccgctcgatcctcgcataatatgatacgtctg

SEQ ID NO: 2760 - DNA, 40 bp, Artificial Sequence
  Synthetic Oligonucleotide
gtccgcctccgaagccctcctaagtgcactttaaaccgcg

SEQ ID NO: 2761 - DNA, 40 bp, Artificial Sequence
  Synthetic Oligonucleotide
gtccgatgtacgcctcgattccgcccatacatgcatgtaa

SEQ ID NO: 2762 - DNA, 40 bp, Artificial Sequence
  Synthetic Oligonucleotide
gtccgaagcgccttcgatctcgcataatatgatacgtctg

SEQ ID NO: 2763 - DNA, 40 bp, Artificial Sequence
  Synthetic Oligonucleotide
gtccgaagccgctcgatcctcgcataatatgatacgtctg

SEQ ID NO: 2764 - DNA, 40 bp, Artificial Sequence
  Synthetic Oligonucleotide
gtccgaagacgcctcgatcctcgcacatatgatacgtctg

SEQ ID NO: 2765 - DNA, 40 bp, Artificial Sequence
  Synthetic Oligonucleotide
gtccgaacgccttcgatcctcgcataatatgatacgtctg

SEQ ID NO: 2766 - DNA, 40 bp, Artificial Sequence
  Synthetic Oligonucleotide
gtccgaacgcctcgattcctcgcatatatggatacgtctg

SEQ ID NO: 2767 - DNA, 40 bp, Artificial Sequence
  Synthetic Oligonucleotide
gtccgaacgcctcgattcctcgcataatatgatacgtcag

SEQ ID NO: 2768 - DNA, 40 bp, Artificial Sequence
  Synthetic Oligonucleotide
gtccgaacgcctcgatcctcgcatgatatcgatacgtctg

SEQ ID NO: 2769 - DNA, 40 bp, Artificial Sequence
  Synthetic Oligonucleotide
gtccgaacgcctcgatcctcgcataatatgcatacgtctg

SEQ ID NO: 2770 - DNA, 40 bp, Artificial Sequence
  Synthetic Oligonucleotide
gtccgaacgcctcgatcctcgcataatatgatacgtctgg

SEQ ID NO: 2771 - DNA, 40 bp, Artificial Sequence
  Synthetic Oligonucleotide
gtccgaacgcctcgatcctcgcataatatgatacgtcctg

SEQ ID NO: 2772 - DNA, 40 bp, Artificial Sequence
  Synthetic Oligonucleotide
gtccgaacgcctcgatcctcgcataatatcgacacgtctg

SEQ ID NO: 2773 - DNA, 40 bp, Artificial Sequence
  Synthetic Oligonucleotide
gtccgaacgcctcgatcctcgcataatagtgatacgtctg

SEQ ID NO: 2774 - DNA, 40 bp, Artificial Sequence
  Synthetic Oligonucleotide
gtccgaacgcctcgatcctccgcataatatgatacgtctg

SEQ ID NO: 2775 - DNA, 40 bp, Artificial Sequence
  Synthetic Oligonucleotide
gtccgaacgcctcgatcctccgcataatatgacacgtctg

SEQ ID NO: 2776 - DNA, 40 bp, Artificial Sequence
  Synthetic Oligonucleotide
gtccgaacgcctcgacttcctcgcatatatgatacgtctg

SEQ ID NO: 2777 - DNA, 40 bp, Artificial Sequence
  Synthetic Oligonucleotide
gtccgaacgccctcgatcctcgcataatatgatacgtctg

SEQ ID NO: 2778 - DNA, 40 bp, Artificial Sequence
  Synthetic Oligonucleotide
gtccgaaccgcctcgatcctcgcataatatgatacgtctg

SEQ ID NO: 2779 - DNA, 40 bp, Artificial Sequence
  Synthetic Oligonucleotide
gtccatggtgctgcctcgattccgccatacatgcatgtaa

SEQ ID NO: 2780 - DNA, 40 bp, Artificial Sequence
  Synthetic Oligonucleotide
gtccatggtgcgcctcgattccacccatacatgcatgtaa

SEQ ID NO: 2781 - DNA, 40 bp, Artificial Sequence
  Synthetic Oligonucleotide
gtccatggtatgcctcgattccgcccatacatgcatgtaa

SEQ ID NO: 2782 - DNA, 40 bp, Artificial Sequence
  Synthetic Oligonucleotide
gtccatggtagcctcgattccgcccatacatgcatgtaaa

SEQ ID NO: 2783 - DNA, 40 bp, Artificial Sequence
  Synthetic Oligonucleotide
gtccatggtacgtctcgattccgcccgtacatgcatgtaa

SEQ ID NO: 2784 - DNA, 40 bp, Artificial Sequence
  Synthetic Oligonucleotide
gtccatggtacgctccgattccgcccatacatgcatgtaa

SEQ ID NO: 2785 - DNA, 40 bp, Artificial Sequence
  Synthetic Oligonucleotide
gtccatggtacgccttgattccgcccatacatgcatataa

SEQ ID NO: 2786 - DNA, 40 bp, Artificial Sequence
  Synthetic Oligonucleotide
gtccatggtacgccttcgattccgcccatacatgcatgta

SEQ ID NO: 2787 - DNA, 40 bp, Artificial Sequence
  Synthetic Oligonucleotide
gtccatggtacgccttcgattccgccatacgtgcatgtaa

SEQ ID NO: 2788 - DNA, 40 bp, Artificial Sequence
  Synthetic Oligonucleotide
gtccatggtacgccttcgattccgccatacatgcatgtaa

SEQ ID NO: 2789 - DNA, 40 bp, Artificial Sequence
  Synthetic Oligonucleotide
gtccatggtacgcctggattccgcccatacatgcatgtaa

SEQ ID NO: 2790 - DNA, 40 bp, Artificial Sequence
  Synthetic Oligonucleotide
gtccatggtacgcctctattccgcccatacatgcatgtaa

SEQ ID NO: 2791 - DNA, 40 bp, Artificial Sequence
  Synthetic Oligonucleotide
gtccatggtacgcctcgtattccgcccatacatgctgtaa

SEQ ID NO: 2792 - DNA, 40 bp, Artificial Sequence
  Synthetic Oligonucleotide
gtccatggtacgcctcgattcggcccatacatgcatgtaa

SEQ ID NO: 2793 - DNA, 40 bp, Artificial Sequence
  Synthetic Oligonucleotide
gtccatggtacgcctcgattcgccccatacatgcatgtaa

SEQ ID NO: 2794 - DNA, 40 bp, Artificial Sequence
  Synthetic Oligonucleotide
gtccatggtacgcctcgattccggccatacatgcatgtaa

SEQ ID NO: 2795 - DNA, 40 bp, Artificial Sequence
  Synthetic Oligonucleotide
gtccatggtacgcctcgattccgctcatacatgcatgtga

SEQ ID NO: 2796 - DNA, 40 bp, Artificial Sequence
  Synthetic Oligonucleotide
gtccatggtacgcctcgattccgcctatatatgcatgtaa

SEQ ID NO: 2797 - DNA, 40 bp, Artificial Sequence
  Synthetic Oligonucleotide
gtccatggtacgcctcgattccgcctatacatgcgtgtaa

SEQ ID NO: 2798 - DNA, 40 bp, Artificial Sequence
  Synthetic Oligonucleotide
gtccatggtacgcctcgattccgccgatacatgcatgtaa

SEQ ID NO: 2799 - DNA, 40 bp, Artificial Sequence
  Synthetic Oligonucleotide
gtccatggtacgcctcgattccgcccatgcatgcatgtga

SEQ ID NO: 2800 - DNA, 40 bp, Artificial Sequence
  Synthetic Oligonucleotide
gtccatggtacgcctcgattccgcccatgcatgcatgcaa

SEQ ID NO: 2801 - DNA, 40 bp, Artificial Sequence
  Synthetic Oligonucleotide
gtccatggtacgcctcgattccgcccatgcatgcatgaaa

SEQ ID NO: 2802 - DNA, 40 bp, Artificial Sequence
  Synthetic Oligonucleotide
gtccatggtacgcctcgattccgcccatatatgcatgtaa

SEQ ID NO: 2803 - DNA, 40 bp, Artificial Sequence
  Synthetic Oligonucleotide
gtccatggtacgcctcgattccgcccatacttgcatgtaa

SEQ ID NO: 2804 - DNA, 40 bp, Artificial Sequence
  Synthetic Oligonucleotide
gtccatggtacgcctcgattccgcccatacgtgcatgcaa

SEQ ID NO: 2805 - DNA, 40 bp, Artificial Sequence
  Synthetic Oligonucleotide
gtccatggtacgcctcgattccgcccatacgtgcacgtaa

SEQ ID NO: 2806 - DNA, 40 bp, Artificial Sequence
  Synthetic Oligonucleotide
gtccatggtacgcctcgattccgcccatacatggatgtaa

SEQ ID NO: 2807 - DNA, 40 bp, Artificial Sequence
  Synthetic Oligonucleotide
gtccatggtacgcctcgattccgcccatacatgcttgtaa

SEQ ID NO: 2808 - DNA, 40 bp, Artificial Sequence
  Synthetic Oligonucleotide
gtccatggtacgcctcgattccgcccatacatgcatgtta

SEQ ID NO: 2809 - DNA, 40 bp, Artificial Sequence
  Synthetic Oligonucleotide
gtccatggtacgcctcgattccgcccatacatgactgtaa

SEQ ID NO: 2810 - DNA, 40 bp, Artificial Sequence
  Synthetic Oligonucleotide
gtccatggtacgcctcgattccgcccataaatgcatgtaa

SEQ ID NO: 2811 - DNA, 40 bp, Artificial Sequence
  Synthetic Oligonucleotide
gtccatggtacgcctcgattccgcccagacatgcatgtaa

SEQ ID NO: 2812 - DNA, 40 bp, Artificial Sequence
  Synthetic Oligonucleotide
gtccatggtacgcctcgattccgcccacacatgcatgtag

SEQ ID NO: 2813 - DNA, 40 bp, Artificial Sequence
  Synthetic Oligonucleotide
gtccatggtacgcctcgattccgccatacatgcatgtcga

SEQ ID NO: 2814 - DNA, 40 bp, Artificial Sequence
  Synthetic Oligonucleotide
gtccatggtacgcctcgattccgccatacatgcatgtacg

SEQ ID NO: 2815 - DNA, 40 bp, Artificial Sequence
  Synthetic Oligonucleotide
gtccatggtacgcctcgattccgccatacatgcatgtaaa

SEQ ID NO: 2816 - DNA, 40 bp, Artificial Sequence
  Synthetic Oligonucleotide
gtccatggtacgcctcgattccgccatacatgcactgtaa

SEQ ID NO: 2817 - DNA, 40 bp, Artificial Sequence
  Synthetic Oligonucleotide
gtccatggtacgcctcgattccgccataacatgcatgtaa

SEQ ID NO: 2818 - DNA, 40 bp, Artificial Sequence
  Synthetic Oligonucleotide
gtccatggtacgcctcgattccgcacatacatgcatgtaa

SEQ ID NO: 2819 - DNA, 40 bp, Artificial Sequence
  Synthetic Oligonucleotide
gtccatggtacgcctcgattcccgccatacatgcatgtaa

SEQ ID NO: 2820 - DNA, 40 bp, Artificial Sequence
  Synthetic Oligonucleotide
gtccatggtacgcctcgatgccgcccatacatgcatgtaa

SEQ ID NO: 2821 - DNA, 40 bp, Artificial Sequence
  Synthetic Oligonucleotide
gtccatggtacgcctcgatcccgcccatacatgcatgcaa

SEQ ID NO: 2822 - DNA, 40 bp, Artificial Sequence
  Synthetic Oligonucleotide
gtccatggtacgcctcgatcccgcccacacatgcatgtaa

SEQ ID NO: 2823 - DNA, 40 bp, Artificial Sequence
  Synthetic Oligonucleotide
gtccatggtacgcctcgagtccgcccatacatgcatgtaa

SEQ ID NO: 2824 - DNA, 40 bp, Artificial Sequence
  Synthetic Oligonucleotide
gtccatggtacgcctcgactccgcccatacatgcatgtag

SEQ ID NO: 2825 - DNA, 40 bp, Artificial Sequence
  Synthetic Oligonucleotide
gtccatggtacgcctcgaattccgccatacatgcatgtaa

SEQ ID NO: 2826 - DNA, 40 bp, Artificial Sequence
  Synthetic Oligonucleotide
gtccatggtacgcctcaagctagctacctccattgtcgtg

SEQ ID NO: 2827 - DNA, 40 bp, Artificial Sequence
  Synthetic Oligonucleotide
gtccatggtacgcctcaactccgcccatacatgcatgtaa

SEQ ID NO: 2828 - DNA, 40 bp, Artificial Sequence
  Synthetic Oligonucleotide
gtccatggtacgcctagattccgcccatacatgcatgtaa

SEQ ID NO: 2829 - DNA, 40 bp, Artificial Sequence
  Synthetic Oligonucleotide
gtccatggtacgcctacgattccgccatacatgcatgtaa

SEQ ID NO: 2830 - DNA, 40 bp, Artificial Sequence
  Synthetic Oligonucleotide
gtccatggtacgccctcaagctagctacctccattgtctg

SEQ ID NO: 2831 - DNA, 40 bp, Artificial Sequence
  Synthetic Oligonucleotide
gtccatggtacgcccgattccgcccatacatgcatgtaaa

SEQ ID NO: 2832 - DNA, 40 bp, Artificial Sequence
  Synthetic Oligonucleotide
gtccatggtacgccccgattccgcccatacgtgcatgtaa

SEQ ID NO: 2833 - DNA, 40 bp, Artificial Sequence
  Synthetic Oligonucleotide
gtccatggtacgccacgattccgcccatacatgcatgtaa

SEQ ID NO: 2834 - DNA, 40 bp, Artificial Sequence
  Synthetic Oligonucleotide
gtccatggtaccgcctcgattccgccatacatgcatgtaa

SEQ ID NO: 2835 - DNA, 40 bp, Artificial Sequence
  Synthetic Oligonucleotide
gtccatgggtacgcctcgattccgccatacatgcatgtaa

SEQ ID NO: 2836 - DNA, 40 bp, Artificial Sequence
  Synthetic Oligonucleotide
gtccatggcacgcctcgattccgcccatacatacatgtaa

SEQ ID NO: 2837 - DNA, 40 bp, Artificial Sequence
  Synthetic Oligonucleotide
gtccatggaacgcctcgattccgcccatacatgcgtgtaa

SEQ ID NO: 2838 - DNA, 40 bp, Artificial Sequence
  Synthetic Oligonucleotide
gtccatagtacgcctcgattccgctcatacatgcatgtaa

SEQ ID NO: 2839 - DNA, 40 bp, Artificial Sequence
  Synthetic Oligonucleotide
gtccataatacgcctcgattccgcccatacatgcatgtaa

SEQ ID NO: 2840 - DNA, 40 bp, Artificial Sequence
  Synthetic Oligonucleotide
gtccagggtacgcctcgattccgcccatacatgcatgtaa

SEQ ID NO: 2841 - DNA, 40 bp, Artificial Sequence
  Synthetic Oligonucleotide
gtccacggtacgcctcgattccgcccatgcatgcatgtaa

SEQ ID NO: 2842 - DNA, 40 bp, Artificial Sequence
  Synthetic Oligonucleotide
gtccacggtacgcctcgattccgccatacatgacatgtaa

SEQ ID NO: 2843 - DNA, 40 bp, Artificial Sequence
  Synthetic Oligonucleotide
gtccacgctgccctttgtttaaggcctttatacaaacgca

SEQ ID NO: 2844 - DNA, 40 bp, Artificial Sequence
  Synthetic Oligonucleotide
gtccacagtacgcctcgattccgcccatacatgcatgtaa

SEQ ID NO: 2845 - DNA, 40 bp, Artificial Sequence
  Synthetic Oligonucleotide
gtccaatggtacgcctcgattccgccatacatgcatgtaa

SEQ ID NO: 2846 - DNA, 40 bp, Artificial Sequence
  Synthetic Oligonucleotide
gtcatggtacgcctcgattccgccatcacatgcatgtaac

SEQ ID NO: 2847 - DNA, 40 bp, Artificial Sequence
  Synthetic Oligonucleotide
gtcatggggctttagcacttctcgtaacttgggcagttac

SEQ ID NO: 2848 - DNA, 40 bp, Artificial Sequence
  Synthetic Oligonucleotide
gtcatgggctttaagcacttctcgtaacttggacagttac

SEQ ID NO: 2849 - DNA, 40 bp, Artificial Sequence
  Synthetic Oligonucleotide
gtcatgggctttaagcacttctcggtaacttggcagttac

SEQ ID NO: 2850 - DNA, 40 bp, Artificial Sequence
  Synthetic Oligonucleotide
gtcatgatggagaaatgaatcactatattcttgtacgctc

SEQ ID NO: 2851 - DNA, 40 bp, Artificial Sequence
  Synthetic Oligonucleotide
gtcatgacgcctcgactcctcgcataatatgatacgtctg

SEQ ID NO: 2852 - DNA, 40 bp, Artificial Sequence
  Synthetic Oligonucleotide
gtcagtgttcttcgcgctgcgctatcaccgaccagatgaa

SEQ ID NO: 2853 - DNA, 40 bp, Artificial Sequence
  Synthetic Oligonucleotide
gtcagtccttccccgtctcgaactcatgtgcatgcatgcc

SEQ ID NO: 2854 - DNA, 40 bp, Artificial Sequence
  Synthetic Oligonucleotide
gtcagtcctccgtcttgtggatgcgtgtttgattctcgtc

SEQ ID NO: 2855 - DNA, 40 bp, Artificial Sequence
  Synthetic Oligonucleotide
gtcacttctcggatcatgaaaaaatacgtacccgtcatcc

SEQ ID NO: 2856 - DNA, 40 bp, Artificial Sequence
  Synthetic Oligonucleotide
gtcaatggtacgcctcgattccgcccgtacatgcatgtaa

SEQ ID NO: 2857 - DNA, 40 bp, Artificial Sequence
  Synthetic Oligonucleotide
gtcaatggcccattcccgctccgattatcgctagtacgtt

SEQ ID NO: 2858 - DNA, 40 bp, Artificial Sequence
  Synthetic Oligonucleotide
gtcaaatgggccctgattcacgcctacgtcttgcataccg

SEQ ID NO: 2859 - DNA, 40 bp, Artificial Sequence
  Synthetic Oligonucleotide
gtatggggcttttagacacttcgtcgacttgggcagttac

SEQ ID NO: 2860 - DNA, 40 bp, Artificial Sequence
  Synthetic Oligonucleotide
gtatggggctttagcacttctcggtaacttgggcagttac

SEQ ID NO: 2861 - DNA, 40 bp, Artificial Sequence
  Synthetic Oligonucleotide
gtatggggcgtttaagctactctcgtaacttaggcatgac

SEQ ID NO: 2862 - DNA, 40 bp, Artificial Sequence
  Synthetic Oligonucleotide
gtatgggctttaagcgacttctcggtaacttggcagttac

SEQ ID NO: 2863 - DNA, 40 bp, Artificial Sequence
  Synthetic Oligonucleotide
gtatgctttatccgcccctctgcatggtgggcctacatcg

SEQ ID NO: 2864 - DNA, 40 bp, Artificial Sequence
  Synthetic Oligonucleotide
gtatcttttatccgcccctctgcatggtgggcctacatcg

SEQ ID NO: 2865 - DNA, 40 bp, Artificial Sequence
  Synthetic Oligonucleotide
gtatctttatccgcccctctgcattggtgggcctacatcg

SEQ ID NO: 2866 - DNA, 40 bp, Artificial Sequence
  Synthetic Oligonucleotide
gtatctttatccgccccccttgcatggtgggcctacatcg

SEQ ID NO: 2867 - DNA, 40 bp, Artificial Sequence
  Synthetic Oligonucleotide
gtatcgtttatccgcccctctgcatggtgggcctacatcg

SEQ ID NO: 2868 - DNA, 40 bp, Artificial Sequence
  Synthetic Oligonucleotide
gtatcctttatccgcccctctgcatggtgggcctacatcg

SEQ ID NO: 2869 - DNA, 40 bp, Artificial Sequence
  Synthetic Oligonucleotide
gtatagcctgtccttttattacggccattagtcacatgag

SEQ ID NO: 2870 - DNA, 40 bp, Artificial Sequence
  Synthetic Oligonucleotide
gtaggtgcgtaccctctttagccgcctctggagattgaat

SEQ ID NO: 2871 - DNA, 40 bp, Artificial Sequence
  Synthetic Oligonucleotide
gtaggcttaagccttacttttctgggaccttgtcaactac

SEQ ID NO: 2872 - DNA, 40 bp, Artificial Sequence
  Synthetic Oligonucleotide
gtagatattcacgttgaatcgccttgctcctcttagtctg

SEQ ID NO: 2873 - DNA, 40 bp, Artificial Sequence
  Synthetic Oligonucleotide
gtagactcggatcatgtactgcgctcgctccccacgcctg

SEQ ID NO: 2874 - DNA, 40 bp, Artificial Sequence
  Synthetic Oligonucleotide
gtacttccctgctcccgggacgacaagatcggtcgcattt

SEQ ID NO: 2875 - DNA, 40 bp, Artificial Sequence
  Synthetic Oligonucleotide
gtactcggatcacagccaaccaagcccgcctcagtcatac

SEQ ID NO: 2876 - DNA, 40 bp, Artificial Sequence
  Synthetic Oligonucleotide
gtactcgcctctgtcctcatggttcgaaccggtatgcatg

SEQ ID NO: 2877 - DNA, 40 bp, Artificial Sequence
  Synthetic Oligonucleotide
gtacgtttcccgtctcggatctcccttattacccgctgtg

SEQ ID NO: 2878 - DNA, 40 bp, Artificial Sequence
  Synthetic Oligonucleotide
gtacggtaacgcctcgatcctcgcatatatgatacgtctg

SEQ ID NO: 2879 - DNA, 40 bp, Artificial Sequence
  Synthetic Oligonucleotide
gtacgacgtcgtgggcctcggtcctcatctcctgtgtaca

SEQ ID NO: 2880 - DNA, 40 bp, Artificial Sequence
  Synthetic Oligonucleotide
gtacctccggtgttacacgccttatcctccattggtactg

SEQ ID NO: 2881 - DNA, 40 bp, Artificial Sequence
  Synthetic Oligonucleotide
gtaccggcactggagcgtccctggtggactaccaccttat

SEQ ID NO: 2882 - DNA, 40 bp, Artificial Sequence
  Synthetic Oligonucleotide
gtaccgcctcatcatcggacacgacgtgtatcagttgctg

SEQ ID NO: 2883 - DNA, 40 bp, Artificial Sequence
  Synthetic Oligonucleotide
gtaccgcctcagtccgcaggattacgtaatccgctgttaa

SEQ ID NO: 2884 - DNA, 40 bp, Artificial Sequence
  Synthetic Oligonucleotide
gtaatgggcttctaagcacttctcgtaacttggcagttac

SEQ ID NO: 2885 - DNA, 40 bp, Artificial Sequence
  Synthetic Oligonucleotide
gtaataaccttccgttactcgcctcgggtaagtgtgcgca

SEQ ID NO: 2886 - DNA, 40 bp, Artificial Sequence
  Synthetic Oligonucleotide
gtaataaccttccgttactcgcctcgggcaggtgtgcgca

SEQ ID NO: 2887 - DNA, 40 bp, Artificial Sequence
  Synthetic Oligonucleotide
gtaataacctcccgttactcgcctcgggcaagtgcgcgca

SEQ ID NO: 2888 - DNA, 40 bp, Artificial Sequence
  Synthetic Oligonucleotide
gtaagtattcacgttgaatcgccttgctcctctcagtctg

SEQ ID NO: 2889 - DNA, 40 bp, Artificial Sequence
  Synthetic Oligonucleotide
gtaacaaccttccgttactcgcctcgggcaagtgtgcgca

SEQ ID NO: 2890 - DNA, 40 bp, Artificial Sequence
  Synthetic Oligonucleotide
gtaaatattctcgttgaatcgccttgctcctcttagtctg

SEQ ID NO: 2891 - DNA, 40 bp, Artificial Sequence
  Synthetic Oligonucleotide
gtaaatattcatgttgaatcgccttgctcctcttagtctg

SEQ ID NO: 2892 - DNA, 40 bp, Artificial Sequence
  Synthetic Oligonucleotide
gtaaatattcacgttgagtcgccttgctcctcctagtctg

SEQ ID NO: 2893 - DNA, 40 bp, Artificial Sequence
  Synthetic Oligonucleotide
gtaaatattcacgttgactccccttgctcctcttagtctg

SEQ ID NO: 2894 - DNA, 40 bp, Artificial Sequence
  Synthetic Oligonucleotide
gtaaatattcacgttgaatcgccttgctcctcttagtcta

SEQ ID NO: 2895 - DNA, 40 bp, Artificial Sequence
  Synthetic Oligonucleotide
gtaaatattcacgttgaatcgccttgctcctcttagtccg

SEQ ID NO: 2896 - DNA, 40 bp, Artificial Sequence
  Synthetic Oligonucleotide
gtaaatattcacgttgaatcgcctcgctcctcttagtctg

SEQ ID NO: 2897 - DNA, 40 bp, Artificial Sequence
  Synthetic Oligonucleotide
gtaaatattcacgttgaatcgccctgctcctcctagtctg

SEQ ID NO: 2898 - DNA, 40 bp, Artificial Sequence
  Synthetic Oligonucleotide
gtaaatattcacgttgaactcgccttctcctcttagtctg

SEQ ID NO: 2899 - DNA, 40 bp, Artificial Sequence
  Synthetic Oligonucleotide
gtaaatattcacgttgaaccgcctcgctcctcctagtctg

SEQ ID NO: 2900 - DNA, 40 bp, Artificial Sequence
  Synthetic Oligonucleotide
gtaaatattcacgtcgaatcgccttgctcctcttagtctg

SEQ ID NO: 2901 - DNA, 40 bp, Artificial Sequence
  Synthetic Oligonucleotide
gtaaatattcacgctgaatcgccttgctcctcttagtctg

SEQ ID NO: 2902 - DNA, 40 bp, Artificial Sequence
  Synthetic Oligonucleotide
gtaaatatccacgttgaatcgccttgctcctcttagtctg

SEQ ID NO: 2903 - DNA, 40 bp, Artificial Sequence
  Synthetic Oligonucleotide
ggttactggtacgcctcgatcttccacgtgcacgtaaatg

SEQ ID NO: 2904 - DNA, 40 bp, Artificial Sequence
  Synthetic Oligonucleotide
ggtgatcctcccccctgcctcgaagatttgtgcacatatc

SEQ ID NO: 2905 - DNA, 40 bp, Artificial Sequence
  Synthetic Oligonucleotide
ggtgatcctcccccccgcctcgaagatttgtgcacatgtc

SEQ ID NO: 2906 - DNA, 40 bp, Artificial Sequence
  Synthetic Oligonucleotide
ggtgatccctccccccgcctcgaagatttgtgcacatatc

SEQ ID NO: 2907 - DNA, 40 bp, Artificial Sequence
  Synthetic Oligonucleotide
ggtgactcatacgactagggactaccctagcacagcgtag

SEQ ID NO: 2908 - DNA, 40 bp, Artificial Sequence
  Synthetic Oligonucleotide
ggtgaacctcccccccgcctcgaagatttgtgcacatatc

SEQ ID NO: 2909 - DNA, 40 bp, Artificial Sequence
  Synthetic Oligonucleotide
ggtctgaccctgttatggactaccatatcagaaaggtact

SEQ ID NO: 2910 - DNA, 40 bp, Artificial Sequence
  Synthetic Oligonucleotide
ggtcgcgctgccctttgtttaaggcctttatacaaacgca

SEQ ID NO: 2911 - DNA, 40 bp, Artificial Sequence
  Synthetic Oligonucleotide
ggtcctgtgtacttgttgccacagacgttcagtgcccccg

SEQ ID NO: 2912 - DNA, 40 bp, Artificial Sequence
  Synthetic Oligonucleotide
ggtccgaacgcctcgatcctcgcataatatgatacgtctg

SEQ ID NO: 2913 - DNA, 40 bp, Artificial Sequence
  Synthetic Oligonucleotide
ggtccctgtgtcttgttgtcacagacgttcagtgcccccg

SEQ ID NO: 2914 - DNA, 40 bp, Artificial Sequence
  Synthetic Oligonucleotide
ggtccctgtgtcttgttgccacagacgttcagtgccctcg

SEQ ID NO: 2915 - DNA, 40 bp, Artificial Sequence
  Synthetic Oligonucleotide
ggtccctgtgtcttgctgccacagacgttcagtgcccccg

SEQ ID NO: 2916 - DNA, 40 bp, Artificial Sequence
  Synthetic Oligonucleotide
ggtccatggtacgcctcgattccgccatacatgcatgtaa

SEQ ID NO: 2917 - DNA, 40 bp, Artificial Sequence
  Synthetic Oligonucleotide
ggtcacgctgccctttgtttaaggcctttatacaaacgca

SEQ ID NO: 2918 - DNA, 40 bp, Artificial Sequence
  Synthetic Oligonucleotide
ggtatcatggtgactccgcctcgcaaccacgaccgttccg

SEQ ID NO: 2919 - DNA, 40 bp, Artificial Sequence
  Synthetic Oligonucleotide
ggtagatcgaactgtgccgcctcgcgcctctattcgtcgc

SEQ ID NO: 2920 - DNA, 40 bp, Artificial Sequence
  Synthetic Oligonucleotide
ggtaatcctcccccccgcctcgaagatttgtgcacatatc

SEQ ID NO: 2921 - DNA, 40 bp, Artificial Sequence
  Synthetic Oligonucleotide
gggttcgttctcctcgactacatgagattaataaacgcgc

SEQ ID NO: 2922 - DNA, 40 bp, Artificial Sequence
  Synthetic Oligonucleotide
gggtcatctgatatggctgtatattttggtaacctctctt

SEQ ID NO: 2923 - DNA, 40 bp, Artificial Sequence
  Synthetic Oligonucleotide
gggtatctgatatgctgtttatatttttggaacctctctt

SEQ ID NO: 2924 - DNA, 40 bp, Artificial Sequence
  Synthetic Oligonucleotide
gggtatctgatatgctgttatattttttggaacctctctt

SEQ ID NO: 2925 - DNA, 40 bp, Artificial Sequence
  Synthetic Oligonucleotide
gggtatctgatatgccgttgtatattttggaacctctctt

SEQ ID NO: 2926 - DNA, 40 bp, Artificial Sequence
  Synthetic Oligonucleotide
gggtatcctccccccccgctcgaagatttgtgcacatatc

SEQ ID NO: 2927 - DNA, 40 bp, Artificial Sequence
  Synthetic Oligonucleotide
ggggtttcttctcctgactacatgagattaataaacgcgc

SEQ ID NO: 2928 - DNA, 40 bp, Artificial Sequence
  Synthetic Oligonucleotide
ggggggctcggtgatgcgctatcatcaagaacgacgctac

SEQ ID NO: 2929 - DNA, 40 bp, Artificial Sequence
  Synthetic Oligonucleotide
gggccctgcctcagttctcgttatatcgtgtgttgtacaa

SEQ ID NO: 2930 - DNA, 40 bp, Artificial Sequence
  Synthetic Oligonucleotide
gggcactgaacgtctgtggcaacaagacacagggaccccg

SEQ ID NO: 2931 - DNA, 40 bp, Artificial Sequence
  Synthetic Oligonucleotide
gggatctcggatctggcgtactacttggacaggttccttc

SEQ ID NO: 2932 - DNA, 40 bp, Artificial Sequence
  Synthetic Oligonucleotide
ggctacctgcatcgagcggacgaagacgagagatgctcgt

SEQ ID NO: 2933 - DNA, 40 bp, Artificial Sequence
  Synthetic Oligonucleotide
ggctacccccattgagcgagattcgaaaaatttggcgcac

SEQ ID NO: 2934 - DNA, 40 bp, Artificial Sequence
  Synthetic Oligonucleotide
ggcgttcccttggtgccaccgcccgctatatctctgtctg

SEQ ID NO: 2935 - DNA, 40 bp, Artificial Sequence
  Synthetic Oligonucleotide
ggcggccgattcgcctcgatgctccacgtaacgttacgaa

SEQ ID NO: 2936 - DNA, 40 bp, Artificial Sequence
  Synthetic Oligonucleotide
ggcggccgactcgtctcgatgctccacgtaacgttacgaa

SEQ ID NO: 2937 - DNA, 40 bp, Artificial Sequence
  Synthetic Oligonucleotide
ggcggccgactcgcctcgatgctccacgtaacgttacaaa

SEQ ID NO: 2938 - DNA, 40 bp, Artificial Sequence
  Synthetic Oligonucleotide
ggcgccgactcgcctcgatgctccaccgtaacgttacgaa

SEQ ID NO: 2939 - DNA, 40 bp, Artificial Sequence
  Synthetic Oligonucleotide
ggcctcggcacggttcaatttcaaccgctatgttgataca

SEQ ID NO: 2940 - DNA, 40 bp, Artificial Sequence
  Synthetic Oligonucleotide
ggccggagcgcctcgatcctcgcataatatggtacgtctg

SEQ ID NO: 2941 - DNA, 40 bp, Artificial Sequence
  Synthetic Oligonucleotide
ggccggaacgcctcgatcctcgcataatatgatacgtctg

SEQ ID NO: 2942 - DNA, 40 bp, Artificial Sequence
  Synthetic Oligonucleotide
ggcccgtgtggttgagtttgctgcgtactagtgccatcga

SEQ ID NO: 2943 - DNA, 40 bp, Artificial Sequence
  Synthetic Oligonucleotide
ggcccctgtgtcttgttgccacagacgttcagtgcctccg

SEQ ID NO: 2944 - DNA, 40 bp, Artificial Sequence
  Synthetic Oligonucleotide
ggcccccgcctgagatccttgtctatgtgtacaccgtctg

SEQ ID NO: 2945 - DNA, 40 bp, Artificial Sequence
  Synthetic Oligonucleotide
ggccaccccgtatcgagcggctcgtccttgatgtgtttaa

SEQ ID NO: 2946 - DNA, 40 bp, Artificial Sequence
  Synthetic Oligonucleotide
ggcacgcggaaagtcacacgagctatcgtgacgctggctc

SEQ ID NO: 2947 - DNA, 40 bp, Artificial Sequence
  Synthetic Oligonucleotide
ggattctagattaaccgcctcggtcagcccagattgtgca

SEQ ID NO: 2948 - DNA, 40 bp, Artificial Sequence
  Synthetic Oligonucleotide
ggagttgggtaagtccgcctctgttctccataccgcgcgg

SEQ ID NO: 2949 - DNA, 40 bp, Artificial Sequence
  Synthetic Oligonucleotide
ggactggatcctcgcctccatactacgtggatttagattt

SEQ ID NO: 2950 - DNA, 40 bp, Artificial Sequence
  Synthetic Oligonucleotide
ggactactccgatggacaatcgtaacttaggagtcgccta

SEQ ID NO: 2951 - DNA, 40 bp, Artificial Sequence
  Synthetic Oligonucleotide
ggacatgtgttggtcatccaagattacttggttcacggcc

SEQ ID NO: 2952 - DNA, 40 bp, Artificial Sequence
  Synthetic Oligonucleotide
ggacatgtgttggccatccaagactacttggttcacggcc

SEQ ID NO: 2953 - DNA, 40 bp, Artificial Sequence
  Synthetic Oligonucleotide
ggaagaattccgtagctactactgattacatctttccaca

SEQ ID NO: 2954 - DNA, 40 bp, Artificial Sequence
  Synthetic Oligonucleotide
ggaacccgtacagagtatggtgaactatcacctcgacact

SEQ ID NO: 2955 - DNA, 40 bp, Artificial Sequence
  Synthetic Oligonucleotide
ggaaaagctgattcgttcgcctcgttcctccataggctcg

SEQ ID NO: 2956 - DNA, 40 bp, Artificial Sequence
  Synthetic Oligonucleotide
gcttgcgtttcacgcacgcggattgtacccgaactgggtt

SEQ ID NO: 2957 - DNA, 40 bp, Artificial Sequence
  Synthetic Oligonucleotide
gcttctacgccgaggacgtctttcgtgcactatcacgatt

SEQ ID NO: 2958 - DNA, 40 bp, Artificial Sequence
  Synthetic Oligonucleotide
gctgtaggcacctgctctatatcgtggggagtaacaggtt

SEQ ID NO: 2959 - DNA, 40 bp, Artificial Sequence
  Synthetic Oligonucleotide
gctgggctttcacgcacgcggattgtacccgaactgggtt

SEQ ID NO: 2960 - DNA, 40 bp, Artificial Sequence
  Synthetic Oligonucleotide
gctgcgctttcacgcacgcggattgtacccgaactgggtt

SEQ ID NO: 2961 - DNA, 40 bp, Artificial Sequence
  Synthetic Oligonucleotide
gctgacaggtcgtgttccgccttgttcctccgcgagacta

SEQ ID NO: 2962 - DNA, 40 bp, Artificial Sequence
  Synthetic Oligonucleotide
gctcttggaacctcatcaattgcgtccggtttcgacccat

SEQ ID NO: 2963 - DNA, 40 bp, Artificial Sequence
  Synthetic Oligonucleotide
gctcttatccggcggacgtctttcgtgcactatcacgatt

SEQ ID NO: 2964 - DNA, 40 bp, Artificial Sequence
  Synthetic Oligonucleotide
gctcttatccggcaggacgtctttcgtgcactatcacgat

SEQ ID NO: 2965 - DNA, 40 bp, Artificial Sequence
  Synthetic Oligonucleotide
gctcttatccggcaggacatctttcgtgcactatcacgat

SEQ ID NO: 2966 - DNA, 40 bp, Artificial Sequence
  Synthetic Oligonucleotide
gctaggcttttacgcacgcggattgtacccggactgggtt

SEQ ID NO: 2967 - DNA, 40 bp, Artificial Sequence
  Synthetic Oligonucleotide
gctaggctttcacgcactcggattgtacccgaactgggtt

SEQ ID NO: 2968 - DNA, 40 bp, Artificial Sequence
  Synthetic Oligonucleotide
gctaggctttcacgcacgctgattgtacccgaactgggtt

SEQ ID NO: 2969 - DNA, 40 bp, Artificial Sequence
  Synthetic Oligonucleotide
gctaggctttcacgcacgcgggttgtacccgaactgggtt

SEQ ID NO: 2970 - DNA, 40 bp, Artificial Sequence
  Synthetic Oligonucleotide
gctaggctttcacgcacgcggattgtacctgaactgggtt

SEQ ID NO: 2971 - DNA, 40 bp, Artificial Sequence
  Synthetic Oligonucleotide
gctaggctttcacgcacgcggattgtacccgaattgggtt

SEQ ID NO: 2972 - DNA, 40 bp, Artificial Sequence
  Synthetic Oligonucleotide
gctaggctttcacgcacgcggattgtacccgaactgggtc

SEQ ID NO: 2973 - DNA, 40 bp, Artificial Sequence
  Synthetic Oligonucleotide
gctaggctttcacgcacgcggattgtacccgaactggggt

SEQ ID NO: 2974 - DNA, 40 bp, Artificial Sequence
  Synthetic Oligonucleotide
gctaggctttcacgcacgcggattgtacccgaactggatt

SEQ ID NO: 2975 - DNA, 40 bp, Artificial Sequence
  Synthetic Oligonucleotide
gctaggctttcacgcacgcggattgtacccgaaccgggtt

SEQ ID NO: 2976 - DNA, 40 bp, Artificial Sequence
  Synthetic Oligonucleotide
gctaggctttcacgcacgcggattgtacccgaaccgggtg

SEQ ID NO: 2977 - DNA, 40 bp, Artificial Sequence
  Synthetic Oligonucleotide
gctaggctttcacgcacgcggattgtacccgaacagggtt

SEQ ID NO: 2978 - DNA, 40 bp, Artificial Sequence
  Synthetic Oligonucleotide
gctaggctttcacgcacgcggattggacccgaactgggtt

SEQ ID NO: 2979 - DNA, 40 bp, Artificial Sequence
  Synthetic Oligonucleotide
gctaggctttcacgcacgcggattgcacccgaactgggtt

SEQ ID NO: 2980 - DNA, 40 bp, Artificial Sequence
  Synthetic Oligonucleotide
gctaggctttcacgcacgcggatggtacccgaactgggtt

SEQ ID NO: 2981 - DNA, 40 bp, Artificial Sequence
  Synthetic Oligonucleotide
gctaggcttccacgcacgcggattgtgcccgaactgggtt

SEQ ID NO: 2982 - DNA, 40 bp, Artificial Sequence
  Synthetic Oligonucleotide
gctaggcttcacgtccacgcggattgtaccgaactgggtt

SEQ ID NO: 2983 - DNA, 40 bp, Artificial Sequence
  Synthetic Oligonucleotide
gctaggcttcacgtcacgcggattgtacccgaactgggtt

SEQ ID NO: 2984 - DNA, 40 bp, Artificial Sequence
  Synthetic Oligonucleotide
gctaggcttcacgccacgcggattgtacccgaactgggtt

SEQ ID NO: 2985 - DNA, 40 bp, Artificial Sequence
  Synthetic Oligonucleotide
gctaggcttcacgcacgcggattgtacccgaactgggttt

SEQ ID NO: 2986 - DNA, 40 bp, Artificial Sequence
  Synthetic Oligonucleotide
gctaggcttcacgcacgcggattgtacccgaactagggtt

SEQ ID NO: 2987 - DNA, 40 bp, Artificial Sequence
  Synthetic Oligonucleotide
gctaggcttcacgcacgcggattgtaccccgaactgggtt

SEQ ID NO: 2988 - DNA, 40 bp, Artificial Sequence
  Synthetic Oligonucleotide
gctaggcttcacgcaccgcggattgtacccgaactgggtt

SEQ ID NO: 2989 - DNA, 40 bp, Artificial Sequence
  Synthetic Oligonucleotide
gctaggcttacacgcacgcggattgtacccgaactgggtt

SEQ ID NO: 2990 - DNA, 40 bp, Artificial Sequence
  Synthetic Oligonucleotide
gctaggctctcacgcacgcggattgtacccgaactgggtt

SEQ ID NO: 2991 - DNA, 40 bp, Artificial Sequence
  Synthetic Oligonucleotide
gctagctttcacgcacgcggattgtacccgaacgtgggtt

SEQ ID NO: 2992 - DNA, 40 bp, Artificial Sequence
  Synthetic Oligonucleotide
gctagctttcacgcacgcggattgtaacccgaactgggtt

SEQ ID NO: 2993 - DNA, 40 bp, Artificial Sequence
  Synthetic Oligonucleotide
gctacggcttcacgcactgcggattgtacccgaactggtt

SEQ ID NO: 2994 - DNA, 40 bp, Artificial Sequence
  Synthetic Oligonucleotide
gctaccttcgtccagcggtgcgctggggactttatccctc

SEQ ID NO: 2995 - DNA, 40 bp, Artificial Sequence
  Synthetic Oligonucleotide
gctaccattgtcgagcgaaaccgtgtggcgggtttagggc

SEQ ID NO: 2996 - DNA, 40 bp, Artificial Sequence
  Synthetic Oligonucleotide
gctaccatctgtctagcgaggctggttaactactccaagc

SEQ ID NO: 2997 - DNA, 40 bp, Artificial Sequence
  Synthetic Oligonucleotide
gctaccatcgtctagttgagtcacccttagttcatcaagc

SEQ ID NO: 2998 - DNA, 40 bp, Artificial Sequence
  Synthetic Oligonucleotide
gctaccatcgtctagtgagtcatccttagttcatcaaggc

SEQ ID NO: 2999 - DNA, 40 bp, Artificial Sequence
  Synthetic Oligonucleotide
gctaccatcgtctagtgagtcacccttagtttatcaaggc

SEQ ID NO: 3000 - DNA, 40 bp, Artificial Sequence
  Synthetic Oligonucleotide
gctaccatcgtctagtgagtcacccttagttcatcaagga

SEQ ID NO: 3001 - DNA, 40 bp, Artificial Sequence
  Synthetic Oligonucleotide
gctaccatcgtctagtgagtcacccttagttcaccaaggc

SEQ ID NO: 3002 - DNA, 40 bp, Artificial Sequence
  Synthetic Oligonucleotide
gctaccatcgtctagtgacgtcaccttagttcatcaaggc

SEQ ID NO: 3003 - DNA, 40 bp, Artificial Sequence
  Synthetic Oligonucleotide
gctaccatcgtctagctgagtcacccttagttcatcaagc

SEQ ID NO: 3004 - DNA, 40 bp, Artificial Sequence
  Synthetic Oligonucleotide
gctaccatcgtcccagtgagtcacccttagttcatcaagc

SEQ ID NO: 3005 - DNA, 40 bp, Artificial Sequence
  Synthetic Oligonucleotide
gctaccatcgtccagcgagtcacccttagttcatcaaggc

SEQ ID NO: 3006 - skipped

SEQ ID NO: 3007 - DNA, 40 bp, Artificial Sequence
  Synthetic Oligonucleotide
gctaagctttcacgcacgcggattgtacccgaactgggtt

SEQ ID NO: 3008 - DNA, 40 bp, Artificial Sequence
  Synthetic Oligonucleotide
gcgttttctctcctgactacatgagattaataaacgcgtc

SEQ ID NO: 3009 - DNA, 40 bp, Artificial Sequence
  Synthetic Oligonucleotide
gcgtttgcttctcctgactacatgagattaatgaacgcgc

SEQ ID NO: 3010 - DNA, 40 bp, Artificial Sequence
  Synthetic Oligonucleotide
gcgtttcttctcctgactcacatgagattaataaacgcgc

SEQ ID NO: 3011 - DNA, 40 bp, Artificial Sequence
  Synthetic Oligonucleotide
gcgtttcttctccgtgactacatgagattactaaacgcgc

SEQ ID NO: 3012 - DNA, 40 bp, Artificial Sequence
  Synthetic Oligonucleotide
gcgtttctctcctgactacatgagattaataaaccgcatc

SEQ ID NO: 3013 - DNA, 40 bp, Artificial Sequence
  Synthetic Oligonucleotide
gcgttgtggcactattcacagacttagcttaatctgcggt

SEQ ID NO: 3014 - DNA, 40 bp, Artificial Sequence
  Synthetic Oligonucleotide
gcgttgtggcactattcacagacttagccttaatctgcgt

SEQ ID NO: 3015 - DNA, 40 bp, Artificial Sequence
  Synthetic Oligonucleotide
gcgttgtggcactattcacagacttagcctaatctgcggt

SEQ ID NO: 3016 - DNA, 40 bp, Artificial Sequence
  Synthetic Oligonucleotide
gcgttgtggcactatcacagacttagccttaatctgcggt

SEQ ID NO: 3017 - DNA, 40 bp, Artificial Sequence
  Synthetic Oligonucleotide
gcgttcttctccctgactacatgagattaactaaacgcgc

SEQ ID NO: 3018 - DNA, 40 bp, Artificial Sequence
  Synthetic Oligonucleotide
gcgtgttcttcggattctctgtgttctcctacgctcgcaa

SEQ ID NO: 3019 - DNA, 40 bp, Artificial Sequence
  Synthetic Oligonucleotide
gcgtgttcttcggattctctgtgttcccctacgctcgcaa

SEQ ID NO: 3020 - DNA, 40 bp, Artificial Sequence
  Synthetic Oligonucleotide
gcgtgtggcactattcacagacttagccttaatctgcggt

SEQ ID NO: 3021 - DNA, 40 bp, Artificial Sequence
  Synthetic Oligonucleotide
gcgtgtggcactattcacagacttagccctaatctgcggt

SEQ ID NO: 3022 - DNA, 40 bp, Artificial Sequence
  Synthetic Oligonucleotide
gcgtgtgctactatcacagacttagccttaatctgcggtc

SEQ ID NO: 3023 - DNA, 40 bp, Artificial Sequence
  Synthetic Oligonucleotide
gcggtttcttttcctgactacatgagattaataaacgcgc

SEQ ID NO: 3024 - DNA, 40 bp, Artificial Sequence
  Synthetic Oligonucleotide
gcggtttcttcttctgactacatgagattaataaacgcgc

SEQ ID NO: 3025 - DNA, 40 bp, Artificial Sequence
  Synthetic Oligonucleotide
gcggtttcttctcttgactacatgagattagtaaacgcgc

SEQ ID NO: 3026 - DNA, 40 bp, Artificial Sequence
  Synthetic Oligonucleotide
gcggtttcttctcctggctacatgagattaatgaacgcgc

SEQ ID NO: 3027 - DNA, 40 bp, Artificial Sequence
  Synthetic Oligonucleotide
gcggtttcttctcctgactgcatgagattaataaacgcgc

SEQ ID NO: 3028 - DNA, 40 bp, Artificial Sequence
  Synthetic Oligonucleotide
gcggtttcttctcctgactacatgaggttaataaacgcgc

SEQ ID NO: 3029 - DNA, 40 bp, Artificial Sequence
  Synthetic Oligonucleotide
gcggtttcttctcctgactacatgagattaatgaacgcgc

SEQ ID NO: 3030 - DNA, 40 bp, Artificial Sequence
  Synthetic Oligonucleotide
gcggtttcttctcctgactacatgagattaataaacgctc

SEQ ID NO: 3031 - DNA, 40 bp, Artificial Sequence
  Synthetic Oligonucleotide
gcggtttcttctcctgactacatgagattaataaacgcgt

SEQ ID NO: 3032 - DNA, 40 bp, Artificial Sequence
  Synthetic Oligonucleotide
gcggtttcttctcctgactacatgagattaataaacgagc

SEQ ID NO: 3033 - DNA, 40 bp, Artificial Sequence
  Synthetic Oligonucleotide
gcggtttcttctcctgactacatgagataaataaacgcgc

SEQ ID NO: 3034 - DNA, 40 bp, Artificial Sequence
  Synthetic Oligonucleotide
gcggtttcttctcctgaatacatgagattaataaacgcgc

SEQ ID NO: 3035 - DNA, 40 bp, Artificial Sequence
  Synthetic Oligonucleotide
gcggtttcttctcctaactacatgagattaataaacgcgc

SEQ ID NO: 3036 - DNA, 40 bp, Artificial Sequence
  Synthetic Oligonucleotide
gcggtttcttccctcgactacatgagattaataaacgcgc

SEQ ID NO: 3037 - DNA, 40 bp, Artificial Sequence
  Synthetic Oligonucleotide
gcggtttcttcccctgactacatgagattaataaacgcgc

SEQ ID NO: 3038 - DNA, 40 bp, Artificial Sequence
  Synthetic Oligonucleotide
gcggtttctcttcctgactacatgagattaataaacgcgc

SEQ ID NO: 3039 - DNA, 40 bp, Artificial Sequence
  Synthetic Oligonucleotide
gcggtttcctctcctgactacatgagattaataaacgcgc

SEQ ID NO: 3040 - DNA, 40 bp, Artificial Sequence
  Synthetic Oligonucleotide
gcggttcttctcctgactacatgagattaactaaacgcgc

SEQ ID NO: 3041 - DNA, 40 bp, Artificial Sequence
  Synthetic Oligonucleotide
gcgggtttcttctcctgactacatgagattaataacgcgc

SEQ ID NO: 3042 - DNA, 40 bp, Artificial Sequence
  Synthetic Oligonucleotide
gcggcttcttctcctgactacatgagattagtaaacgcgc

SEQ ID NO: 3043 - DNA, 40 bp, Artificial Sequence
  Synthetic Oligonucleotide
gcggattcttctctcgactagatgagattaataaacgcgc

SEQ ID NO: 3044 - DNA, 40 bp, Artificial Sequence
  Synthetic Oligonucleotide
gcggattcttcgctcgactacatgagattaataaacgcgc

SEQ ID NO: 3045 - DNA, 40 bp, Artificial Sequence
  Synthetic Oligonucleotide
gcgctctgtgtttccgttgactacaacggttaccacacag

SEQ ID NO: 3046 - DNA, 40 bp, Artificial Sequence
  Synthetic Oligonucleotide
gcgctattccggcactcatcgtctgtcgaccgtatttgtc

SEQ ID NO: 3047 - DNA, 40 bp, Artificial Sequence
  Synthetic Oligonucleotide
gcgctaggcctcatcgagcgtggtctgacgcacgactgtt

SEQ ID NO: 3048 - DNA, 40 bp, Artificial Sequence
  Synthetic Oligonucleotide
gcgccttcaggttccctaacgcgttagccttccgggaatg

SEQ ID NO: 3049 - DNA, 40 bp, Artificial Sequence
  Synthetic Oligonucleotide
gcgccatcttcgtactcctacaccatggtgcatataatta

SEQ ID NO: 3050 - DNA, 40 bp, Artificial Sequence
  Synthetic Oligonucleotide
gcgccatcctcgtactcctacaccatggtgcatataatta

SEQ ID NO: 3051 - DNA, 40 bp, Artificial Sequence
  Synthetic Oligonucleotide
gcgccacgtctctgtacctcttctcggattcgtcctccaa

SEQ ID NO: 3052 - DNA, 40 bp, Artificial Sequence
  Synthetic Oligonucleotide
gcgcaccccgatagtcatcttcgctggaccacccgcgtta

SEQ ID NO: 3053 - DNA, 40 bp, Artificial Sequence
  Synthetic Oligonucleotide
gcgatttcttctcctgactacatgagattaataaacgcgc

SEQ ID NO: 3054 - DNA, 40 bp, Artificial Sequence
  Synthetic Oligonucleotide
gcgagttcaggtccttcctcgcctgcctcagttctgatat

SEQ ID NO: 3055 - DNA, 40 bp, Artificial Sequence
  Synthetic Oligonucleotide
gcgaagtcgaaccgcctcgatcctcttcgtccacgtcctc

SEQ ID NO: 3056 - DNA, 40 bp, Artificial Sequence
  Synthetic Oligonucleotide
gcctggtcagatccgtgtaagactggttccatgtccgcaa

SEQ ID NO: 3057 - DNA, 40 bp, Artificial Sequence
  Synthetic Oligonucleotide
gcctgccgtgtgttcacctaagactacttagggtaggtaa

SEQ ID NO: 3058 - DNA, 40 bp, Artificial Sequence
  Synthetic Oligonucleotide
gcctagtatgatgtcgactactacccccgcaccgcatctg

SEQ ID NO: 3059 - DNA, 40 bp, Artificial Sequence
  Synthetic Oligonucleotide
gcctaggacatcacgtgggctaccacgacgctgatgctgt

SEQ ID NO: 3060 - DNA, 40 bp, Artificial Sequence
  Synthetic Oligonucleotide
gccgtttgacctcctatcctcccggtgtgcatgcattcac

SEQ ID NO: 3061 - DNA, 40 bp, Artificial Sequence
  Synthetic Oligonucleotide
gccgtgcattgggtcggtttggtggggactaccccttgta

SEQ ID NO: 3062 - DNA, 40 bp, Artificial Sequence
  Synthetic Oligonucleotide
gccgtgcatgggtcggtttggctggggactaccccttgta

SEQ ID NO: 3063 - DNA, 40 bp, Artificial Sequence
  Synthetic Oligonucleotide
gccgtcatagatctcctctcgagctatctcctatgcccgc

SEQ ID NO: 3064 - DNA, 40 bp, Artificial Sequence
  Synthetic Oligonucleotide
gccggtttcttctcctgactacatgagattaataacgcgc

SEQ ID NO: 3065 - DNA, 40 bp, Artificial Sequence
  Synthetic Oligonucleotide
gccggtacgccttacgattgcgcaatcggtaatcttggaa

SEQ ID NO: 3066 - DNA, 40 bp, Artificial Sequence
  Synthetic Oligonucleotide
gccggccgactgcctcggttctcctaattatgccagtctg

SEQ ID NO: 3067 - DNA, 40 bp, Artificial Sequence
  Synthetic Oligonucleotide
gccgcgtgggtcggttttggtgggggactacccccttgta

SEQ ID NO: 3068 - DNA, 40 bp, Artificial Sequence
  Synthetic Oligonucleotide
gccgccttgaatctccttctcggtcacgtgacatctgctg

SEQ ID NO: 3069 - DNA, 40 bp, Artificial Sequence
  Synthetic Oligonucleotide
gccgcctctttgcgatcgtctgatcgttagcccgccccat

SEQ ID NO: 3070 - DNA, 40 bp, Artificial Sequence
  Synthetic Oligonucleotide
gccgcctcaggtccccctaacgcgttagccttccggaatg

SEQ ID NO: 3071 - DNA, 40 bp, Artificial Sequence
  Synthetic Oligonucleotide
gccgcatgggtgggttttggtgggggactacccccttgta

SEQ ID NO: 3072 - DNA, 40 bp, Artificial Sequence
  Synthetic Oligonucleotide
gccgcatgggtcggttttggtggggggctacccccttgta

SEQ ID NO: 3073 - DNA, 40 bp, Artificial Sequence
  Synthetic Oligonucleotide
gccgcatgggtcggttttggtgggggactgcccccttgta

SEQ ID NO: 3074 - DNA, 40 bp, Artificial Sequence
  Synthetic Oligonucleotide
gccgcatgggtcggttttggtgggggactactcccttgta

SEQ ID NO: 3075 - DNA, 40 bp, Artificial Sequence
  Synthetic Oligonucleotide
gccgcatgggtcggttttggtgggggactaccccctttta

SEQ ID NO: 3076 - DNA, 40 bp, Artificial Sequence
  Synthetic Oligonucleotide
gccgcatgggtcggttttggtgggggactacccccttgtg

SEQ ID NO: 3077 - DNA, 40 bp, Artificial Sequence
  Synthetic Oligonucleotide
gccgcatgggtcggttttggtgggggactacccccttgca

SEQ ID NO: 3078 - DNA, 40 bp, Artificial Sequence
  Synthetic Oligonucleotide
gccgcatgggtcggttttggtgggggactacccacttgta

SEQ ID NO: 3079 - DNA, 40 bp, Artificial Sequence
  Synthetic Oligonucleotide
gccgcatgggtcggttttggtgggggaccacccccttgta

SEQ ID NO: 3080 - DNA, 40 bp, Artificial Sequence
  Synthetic Oligonucleotide
gccgcatgggtcggttttggtaggggactacccccttgta

SEQ ID NO: 3081 - DNA, 40 bp, Artificial Sequence
  Synthetic Oligonucleotide
gccgcatgggtcggttttggtaagggactacccccttgta

SEQ ID NO: 3082 - DNA, 40 bp, Artificial Sequence
  Synthetic Oligonucleotide
gccgcatgggacggttttggtgggggactacccccttgta

SEQ ID NO: 3083 - DNA, 40 bp, Artificial Sequence
  Synthetic Oligonucleotide
gccgcatgagtcggttttggtgggggactacccccttgta

SEQ ID NO: 3084 - DNA, 40 bp, Artificial Sequence
  Synthetic Oligonucleotide
gccgcacgggtcggttttggtgggggactacccccttgta

SEQ ID NO: 3085 - DNA, 40 bp, Artificial Sequence
  Synthetic Oligonucleotide
gccgcaccccgatagtcatcttcactggacacccgtgtta

SEQ ID NO: 3086 - DNA, 40 bp, Artificial Sequence
  Synthetic Oligonucleotide
gcccggaacgcctcgatcctcgcgtaatatgatacgtctg

SEQ ID NO: 3087 - DNA, 40 bp, Artificial Sequence
  Synthetic Oligonucleotide
gcccgctgcctttattcgtctgatgatgtgcacctcgaga

SEQ ID NO: 3088 - DNA, 40 bp, Artificial Sequence
  Synthetic Oligonucleotide
gcccgcctctgttctgcctgtgagtgacaccgtatgtctg

SEQ ID NO: 3089 - DNA, 40 bp, Artificial Sequence
  Synthetic Oligonucleotide
gcccgcctctgttctgcctgcgagtgacaccgtatgtctg

SEQ ID NO: 3090 - DNA, 40 bp, Artificial Sequence
  Synthetic Oligonucleotide
gcccgcctctgtcgtacactagtgtgcacgtaatgcgctt

SEQ ID NO: 3091 - DNA, 40 bp, Artificial Sequence
  Synthetic Oligonucleotide
gcccgcctctgaagccctcctaagtgcactttaaaccgcg

SEQ ID NO: 3092 - DNA, 40 bp, Artificial Sequence
  Synthetic Oligonucleotide
gcccgcctccgaagccctcctaggtgcactttaaaccgcg

SEQ ID NO: 3093 - DNA, 40 bp, Artificial Sequence
  Synthetic Oligonucleotide
gcccgcctccgaagccctcctaagtgcactttaaaccgag

SEQ ID NO: 3094 - DNA, 40 bp, Artificial Sequence
  Synthetic Oligonucleotide
gcccgcctccgaagccctcctaagtgcactgtaaaccgcg

SEQ ID NO: 3095 - DNA, 40 bp, Artificial Sequence
  Synthetic Oligonucleotide
gcccgcctccgaagccctcctaagcgcactttaaaccgcg

SEQ ID NO: 3096 - DNA, 40 bp, Artificial Sequence
  Synthetic Oligonucleotide
gcccgcctccgaagcccccctaagtgcactttaaaccgcg

SEQ ID NO: 3097 - DNA, 40 bp, Artificial Sequence
  Synthetic Oligonucleotide
gcccgcctccgaagcccacctaagtgcactttaaaccgcg

SEQ ID NO: 3098 - DNA, 40 bp, Artificial Sequence
  Synthetic Oligonucleotide
gcccgcctccaaagccctcctaagtgcactttaaaccgcg

SEQ ID NO: 3099 - DNA, 40 bp, Artificial Sequence
  Synthetic Oligonucleotide
gcccgcctcagtccgtaccattcgtacgatggtaacacaa

SEQ ID NO: 3100 - DNA, 40 bp, Artificial Sequence
  Synthetic Oligonucleotide
gcccgcctcagtcaccgttccgtgcgcacgaattctctaa

SEQ ID NO: 3101 - DNA, 40 bp, Artificial Sequence
  Synthetic Oligonucleotide
gcccgcctcaaggcctctttacggatccggaaatacacaa

SEQ ID NO: 3102 - DNA, 40 bp, Artificial Sequence
  Synthetic Oligonucleotide
gcccatggtacgcctcgattccgcccatatatgcatgtaa

SEQ ID NO: 3103 - DNA, 40 bp, Artificial Sequence
  Synthetic Oligonucleotide
gcccatggtaagcctcgattccgcccatacatgcatgtaa

SEQ ID NO: 3104 - DNA, 40 bp, Artificial Sequence
  Synthetic Oligonucleotide
gcatggcgttaatcttactctccgttaacttaggtcatgc

SEQ ID NO: 3105 - DNA, 40 bp, Artificial Sequence
  Synthetic Oligonucleotide
gcatcgtacgctgttcccgcctctgttccttatcgctgcg

SEQ ID NO: 3106 - DNA, 40 bp, Artificial Sequence
  Synthetic Oligonucleotide
gcatcctcgtgactgtctgttgatggctacatcattgttc

SEQ ID NO: 3107 - DNA, 40 bp, Artificial Sequence
  Synthetic Oligonucleotide
gcatcctcgtgacggtctgttgatggctacatcattgttc

SEQ ID NO: 3108 - DNA, 40 bp, Artificial Sequence
  Synthetic Oligonucleotide
gcagtgggttccatgctttaggcgcctcttatttcgggtc

SEQ ID NO: 3109 - DNA, 40 bp, Artificial Sequence
  Synthetic Oligonucleotide
gcagcacttggactctcagcgcgcgacccatctctcggta

SEQ ID NO: 3110 - DNA, 40 bp, Artificial Sequence
  Synthetic Oligonucleotide
gcactattccggtaagtcatcgtttaaccgtttgttgcaa

SEQ ID NO: 3111 - DNA, 40 bp, Artificial Sequence
  Synthetic Oligonucleotide
gcactatccgttgtccgtcctcttgtggtattgcgcatgc

SEQ ID NO: 3112 - DNA, 40 bp, Artificial Sequence
  Synthetic Oligonucleotide
gcacgggcactatctccgggctacctgagttggacgtggt

SEQ ID NO: 3113 - DNA, 40 bp, Artificial Sequence
  Synthetic Oligonucleotide
gcacgggcactatctccgggctacctgagttgaacgtggt

SEQ ID NO: 3114 - DNA, 40 bp, Artificial Sequence
  Synthetic Oligonucleotide
gcacactggactctcagcgcgcgaccccatctctgcagta

SEQ ID NO: 3115 - DNA, 40 bp, Artificial Sequence
  Synthetic Oligonucleotide
gcaaggttcatctttgcttgactacacgcaattccgatga

SEQ ID NO: 3116 - DNA, 40 bp, Artificial Sequence
  Synthetic Oligonucleotide
gatttgtttactaactcttgcccattgagcactgttcccg

SEQ ID NO: 3117 - DNA, 40 bp, Artificial Sequence
  Synthetic Oligonucleotide
gattcgccagccacatcaactatgatgacgcttgactgga

SEQ ID NO: 3118 - DNA, 40 bp, Artificial Sequence
  Synthetic Oligonucleotide
gattcacgctgccttgtttaaggcctttataccaaacgca

SEQ ID NO: 3119 - DNA, 40 bp, Artificial Sequence
  Synthetic Oligonucleotide
gattagtactgacggccgccttgatccttccgttagtctg

SEQ ID NO: 3120 - DNA, 40 bp, Artificial Sequence
  Synthetic Oligonucleotide
gattacgctgccctttgtttaaggcctttatacaaacgca

SEQ ID NO: 3121 - DNA, 40 bp, Artificial Sequence
  Synthetic Oligonucleotide
gatgttccactgagctctggacactatccatgacgctcga

SEQ ID NO: 3122 - DNA, 40 bp, Artificial Sequence
  Synthetic Oligonucleotide
gatgttaagcttacatacgcctgggtcactctttgttctg

SEQ ID NO: 3123 - DNA, 40 bp, Artificial Sequence
  Synthetic Oligonucleotide
gatgtcctgacgctctggcactatccagattgaacgctca

SEQ ID NO: 3124 - DNA, 40 bp, Artificial Sequence
  Synthetic Oligonucleotide
gatgtccatgagcttgctggcactatccagttgacgctca

SEQ ID NO: 3125 - DNA, 40 bp, Artificial Sequence
  Synthetic Oligonucleotide
gatgtccatgagcttctggcactattccagttgacgctca

SEQ ID NO: 3126 - DNA, 40 bp, Artificial Sequence
  Synthetic Oligonucleotide
gatgtccatgagccttctggcactatccagttgacgctca

SEQ ID NO: 3127 - DNA, 40 bp, Artificial Sequence
  Synthetic Oligonucleotide
gatgggcttttaagcacttctcggtaacttgggcagttac

SEQ ID NO: 3128 - DNA, 40 bp, Artificial Sequence
  Synthetic Oligonucleotide
gatggatccactgagccttcggcactatccattacgctca

SEQ ID NO: 3129 - DNA, 40 bp, Artificial Sequence
  Synthetic Oligonucleotide
gatgaggccttaagcactttctcggataccttggcagtac

SEQ ID NO: 3130 - DNA, 40 bp, Artificial Sequence
  Synthetic Oligonucleotide
gatcttcgacacaacgtgatcacgtttggctcgctttcat

SEQ ID NO: 3131 - DNA, 40 bp, Artificial Sequence
  Synthetic Oligonucleotide
gatctcgcctctgtcctcatggttcgaaccggtatgcatg

SEQ ID NO: 3132 - DNA, 40 bp, Artificial Sequence
  Synthetic Oligonucleotide
gatcgtcctcgagcttcggcatctatccagttacgctcta

SEQ ID NO: 3133 - DNA, 40 bp, Artificial Sequence
  Synthetic Oligonucleotide
gatcgtacttaccacctgacatcgcggggaactaatggtt

SEQ ID NO: 3134 - DNA, 40 bp, Artificial Sequence
  Synthetic Oligonucleotide
gatcggtccatgagccttcggcactatcagttgacgctca

SEQ ID NO: 3135 - DNA, 40 bp, Artificial Sequence
  Synthetic Oligonucleotide
gatcgggcccatgagccttcggcactatccattacgctca

SEQ ID NO: 3136 - DNA, 40 bp, Artificial Sequence
  Synthetic Oligonucleotide
gatcggatccgcctcgatctcgcatatatcgatacgtctg

SEQ ID NO: 3137 - DNA, 40 bp, Artificial Sequence
  Synthetic Oligonucleotide
gatcggagactactccgttggtctgcgggtgtcaccacga

SEQ ID NO: 3138 - DNA, 40 bp, Artificial Sequence
  Synthetic Oligonucleotide
gatcggagactactccgttggtctgcaggtgtcaacacga

SEQ ID NO: 3139 - DNA, 40 bp, Artificial Sequence
  Synthetic Oligonucleotide
gatcggacctgagtcttctggcactatcgattgacgctca

SEQ ID NO: 3140 - DNA, 40 bp, Artificial Sequence
  Synthetic Oligonucleotide
gatcggaccactgagccttcggcactatcattgacgctca

SEQ ID NO: 3141 - DNA, 40 bp, Artificial Sequence
  Synthetic Oligonucleotide
gatcggaccactgagccttcgcactatcagttgacgctca

SEQ ID NO: 3142 - DNA, 40 bp, Artificial Sequence
  Synthetic Oligonucleotide
gatcgacgctgccttgtttaaggcctttatacaaactgca

SEQ ID NO: 3143 - DNA, 40 bp, Artificial Sequence
  Synthetic Oligonucleotide
gatcgaccgctgccttgtttaaggcctttatacaaacgca

SEQ ID NO: 3144 - DNA, 40 bp, Artificial Sequence
  Synthetic Oligonucleotide
gatcgaccgctgcccttgttaaggcctttatacaaacgca

SEQ ID NO: 3145 - DNA, 40 bp, Artificial Sequence
  Synthetic Oligonucleotide
gatcgacactgcccttgtttaaggcctttatacaaacgca

SEQ ID NO: 3146 - DNA, 40 bp, Artificial Sequence
  Synthetic Oligonucleotide
gatccttgctcgtataattcaggatggcttattatcagct

SEQ ID NO: 3147 - DNA, 40 bp, Artificial Sequence
  Synthetic Oligonucleotide
gatccggggcccgcctcaagctagctacctccgttgtctg

SEQ ID NO: 3148 - DNA, 40 bp, Artificial Sequence
  Synthetic Oligonucleotide
gatccggacgcctcgatcctcgccatatatgatacgtctg

SEQ ID NO: 3149 - DNA, 40 bp, Artificial Sequence
  Synthetic Oligonucleotide
gatcccgctgccctttgtttaaggcctttatacaaacgca

SEQ ID NO: 3150 - DNA, 40 bp, Artificial Sequence
  Synthetic Oligonucleotide
gatccatggtacgcctcgattccgcccatacatgcatgta

SEQ ID NO: 3151 - DNA, 40 bp, Artificial Sequence
  Synthetic Oligonucleotide
gatccatggtacacctcattccgcccatacatgcatgtaa

SEQ ID NO: 3152 - DNA, 40 bp, Artificial Sequence
  Synthetic Oligonucleotide
gatccacgctgccctttgttaaggcctttatacaaacgca

SEQ ID NO: 3153 - DNA, 40 bp, Artificial Sequence
  Synthetic Oligonucleotide
gatcatgctgccctttgtttaaggcctttatacaaacgca

SEQ ID NO: 3154 - DNA, 40 bp, Artificial Sequence
  Synthetic Oligonucleotide
gatcatcgcttgcccttgtttaaggccttatacaaacgca

SEQ ID NO: 3155 - DNA, 40 bp, Artificial Sequence
  Synthetic Oligonucleotide
gatcatcgctgcctttgttaaggccttatacaaactgaca

SEQ ID NO: 3156 - DNA, 40 bp, Artificial Sequence
  Synthetic Oligonucleotide
gatcagcgcttgccttgtttaaggcctttatacaaacgca

SEQ ID NO: 3157 - DNA, 40 bp, Artificial Sequence
  Synthetic Oligonucleotide
gatcacgcttgcccttgtttaaggcctatatacagacgca

SEQ ID NO: 3158 - DNA, 40 bp, Artificial Sequence
  Synthetic Oligonucleotide
gatcacgcttgccctgtttaaggcctttatacaaactgca

SEQ ID NO: 3159 - DNA, 40 bp, Artificial Sequence
  Synthetic Oligonucleotide
gatcacgctggcctttgtttaaggcctttatacaaacgca

SEQ ID NO: 3160 - DNA, 40 bp, Artificial Sequence
  Synthetic Oligonucleotide
gatcacgctgccttttgtttaaggcctttatacaaacgca

SEQ ID NO: 3161 - DNA, 40 bp, Artificial Sequence
  Synthetic Oligonucleotide
gatcacgctgcctttgtttaaggcctttatacaaacgcat

SEQ ID NO: 3162 - DNA, 40 bp, Artificial Sequence
  Synthetic Oligonucleotide
gatcacgctgccctttgtttaaggtctttatacaaacgca

SEQ ID NO: 3163 - DNA, 40 bp, Artificial Sequence
  Synthetic Oligonucleotide
gatcacgctgccctttgtttaaggcttttatacaaacgca

SEQ ID NO: 3164 - DNA, 40 bp, Artificial Sequence
  Synthetic Oligonucleotide
gatcacgctgccctttgtttaaggcctttatagaaacgca

SEQ ID NO: 3165 - DNA, 40 bp, Artificial Sequence
  Synthetic Oligonucleotide
gatcacgctgccctttgtttaaggcctttatacaaacgta

SEQ ID NO: 3166 - DNA, 40 bp, Artificial Sequence
  Synthetic Oligonucleotide
gatcacgctgccctttgtttaaggcctttatacaaacaca

SEQ ID NO: 3167 - DNA, 40 bp, Artificial Sequence
  Synthetic Oligonucleotide
gatcacgctgccctttgtttaaggcctttacacaaacgca

SEQ ID NO: 3168 - DNA, 40 bp, Artificial Sequence
  Synthetic Oligonucleotide
gatcacgctgccctttgtttaaggcctttaaacaaacgca

SEQ ID NO: 3169 - DNA, 40 bp, Artificial Sequence
  Synthetic Oligonucleotide
gatcacgctgccctttgtttaaggccttcataacaacgca

SEQ ID NO: 3170 - DNA, 40 bp, Artificial Sequence
  Synthetic Oligonucleotide
gatcacgctgccctttgtttaaggcctcgatacaaacgca

SEQ ID NO: 3171 - DNA, 40 bp, Artificial Sequence
  Synthetic Oligonucleotide
gatcacgctgccctttgtttaaggcctatatacaaacgca

SEQ ID NO: 3172 - DNA, 40 bp, Artificial Sequence
  Synthetic Oligonucleotide
gatcacgctgccctttgtttaaggccgttatacaaacgca

SEQ ID NO: 3173 - DNA, 40 bp, Artificial Sequence
  Synthetic Oligonucleotide
gatcacgctgccctttgtttaaggccattatacaaacgca

SEQ ID NO: 3174 - DNA, 40 bp, Artificial Sequence
  Synthetic Oligonucleotide
gatcacgctgccctttgtttaaggactttatacaaacgca

SEQ ID NO: 3175 - DNA, 40 bp, Artificial Sequence
  Synthetic Oligonucleotide
gatcacgctgccctttgttcagagcctttatacaaacgca

SEQ ID NO: 3176 - DNA, 40 bp, Artificial Sequence
  Synthetic Oligonucleotide
gatcacgctgccctttatttaaggccttgatacaaacgca

SEQ ID NO: 3177 - DNA, 40 bp, Artificial Sequence
  Synthetic Oligonucleotide
gatcacgctgcccttgtttaaggtcctttatacaaacgca

SEQ ID NO: 3178 - DNA, 40 bp, Artificial Sequence
  Synthetic Oligonucleotide
gatcacgctgcccttgtttaaggcctttatagcaaacgca

SEQ ID NO: 3179 - DNA, 40 bp, Artificial Sequence
  Synthetic Oligonucleotide
gatcacgctgcccttgtttaaggcctttatacaaacgcat

SEQ ID NO: 3180 - DNA, 40 bp, Artificial Sequence
  Synthetic Oligonucleotide
gatcacgctgcccttggtttaaggcctttatacaaacgca

SEQ ID NO: 3181 - DNA, 40 bp, Artificial Sequence
  Synthetic Oligonucleotide
gatcacgctgcccgttgtttaaggcctttatacaaacgca

SEQ ID NO: 3182 - DNA, 40 bp, Artificial Sequence
  Synthetic Oligonucleotide
gatcacgctagccttgtttagggaccttatacaaacgaca

SEQ ID NO: 3183 - DNA, 40 bp, Artificial Sequence
  Synthetic Oligonucleotide
gatcacgccgccctttgtttgaggcctttatacaaacgca

SEQ ID NO: 3184 - DNA, 40 bp, Artificial Sequence
  Synthetic Oligonucleotide
gatcacatgccctttgtttaaggcctttatacaaactgca

SEQ ID NO: 3185 - DNA, 40 bp, Artificial Sequence
  Synthetic Oligonucleotide
gatcacagtaattctgcccctctgatggaaccggttactt

SEQ ID NO: 3186 - DNA, 40 bp, Artificial Sequence
  Synthetic Oligonucleotide
gatcacagtaattctgcccctctgatgaaaccggttactt

SEQ ID NO: 3187 - DNA, 40 bp, Artificial Sequence
  Synthetic Oligonucleotide
gatcacactgccctttgtttaaggccttgatacaaacgca

SEQ ID NO: 3188 - DNA, 40 bp, Artificial Sequence
  Synthetic Oligonucleotide
gatcacactgccctttgtttaaggccttaatacaaacgca

SEQ ID NO: 3189 - DNA, 40 bp, Artificial Sequence
  Synthetic Oligonucleotide
gatcacactgccctttgtctaaggcctttatacaaacgca

SEQ ID NO: 3190 - DNA, 40 bp, Artificial Sequence
  Synthetic Oligonucleotide
gatcacactgccctctgtttaaggcctttatacaaacgca

SEQ ID NO: 3191 - DNA, 40 bp, Artificial Sequence
  Synthetic Oligonucleotide
gatattcaatccggcccctctgcgataaccggttatgatg

SEQ ID NO: 3192 - DNA, 40 bp, Artificial Sequence
  Synthetic Oligonucleotide
gatatctttatccgcccctctgcatggtgggcctacatca

SEQ ID NO: 3193 - DNA, 40 bp, Artificial Sequence
  Synthetic Oligonucleotide
gatagttccctgctctaaccgcctctttaacctcgcactt

SEQ ID NO: 3194 - DNA, 40 bp, Artificial Sequence
  Synthetic Oligonucleotide
gatagcgtttcacgcacgcggattgtacccgaactgggtt

SEQ ID NO: 3195 - DNA, 40 bp, Artificial Sequence
  Synthetic Oligonucleotide
gagttctcggatctggcgtactacttggacaggttccttc

SEQ ID NO: 3196 - DNA, 40 bp, Artificial Sequence
  Synthetic Oligonucleotide
gagtctcgagacgcatcacgatccttaatcctccccactg

SEQ ID NO: 3197 - DNA, 40 bp, Artificial Sequence
  Synthetic Oligonucleotide
gagtacatgactcgcgtttatagactactgataatttagc

SEQ ID NO: 3198 - DNA, 40 bp, Artificial Sequence
  Synthetic Oligonucleotide
gaggtctcggatctggcgtactacttggacaggttccttc

SEQ ID NO: 3199 - DNA, 40 bp, Artificial Sequence
  Synthetic Oligonucleotide
gaggtctcggatccggcgtactacttggacaggttccttc

SEQ ID NO: 3200 - DNA, 40 bp, Artificial Sequence
  Synthetic Oligonucleotide
gaggtacgtgatcgcgtttatagactactgtaattttagc

SEQ ID NO: 3201 - DNA, 40 bp, Artificial Sequence
  Synthetic Oligonucleotide
gaggaaccggttcgccgcctggatcttcccctgtagacta

SEQ ID NO: 3202 - DNA, 40 bp, Artificial Sequence
  Synthetic Oligonucleotide
gagctttccgtctccttttagtacatcacagctccaggtg

SEQ ID NO: 3203 - DNA, 40 bp, Artificial Sequence
  Synthetic Oligonucleotide
gagcctccagaacatgcatgtgacttagactaagacttat

SEQ ID NO: 3204 - DNA, 40 bp, Artificial Sequence
  Synthetic Oligonucleotide
gagcagcgacgaaacccgactcggtcacgtcatccataag

SEQ ID NO: 3205 - DNA, 40 bp, Artificial Sequence
  Synthetic Oligonucleotide
gagatttcggatctggcgtactacttggacaggttccttc

SEQ ID NO: 3206 - DNA, 40 bp, Artificial Sequence
  Synthetic Oligonucleotide
gagatctcggatctggtgtactacttggacaggttccttc

SEQ ID NO: 3207 - DNA, 40 bp, Artificial Sequence
  Synthetic Oligonucleotide
gagatctcggatctggcgtcactacttggacagttccttc

SEQ ID NO: 3208 - DNA, 40 bp, Artificial Sequence
  Synthetic Oligonucleotide
gagatctcggatctggcgtattacttggacaggttccttc

SEQ ID NO: 3209 - DNA, 40 bp, Artificial Sequence
  Synthetic Oligonucleotide
gagatctcggatctggcgtactacttggacaggttccctc

SEQ ID NO: 3210 - DNA, 40 bp, Artificial Sequence
  Synthetic Oligonucleotide
gagatctcggatctggcgtactacttggacaggtcccttc

SEQ ID NO: 3211 - DNA, 40 bp, Artificial Sequence
  Synthetic Oligonucleotide
gagatctcggatctggcgtactacttggacagggtccttc

SEQ ID NO: 3212 - DNA, 40 bp, Artificial Sequence
  Synthetic Oligonucleotide
gagatctcggatctggcgtactacttagacaggttccttc

SEQ ID NO: 3213 - DNA, 40 bp, Artificial Sequence
  Synthetic Oligonucleotide
gagatctcggatctggcgtactactcggacaggttccttc

SEQ ID NO: 3214 - DNA, 40 bp, Artificial Sequence
  Synthetic Oligonucleotide
gagatctcggatctggcgtactacctggacaggttcctcc

SEQ ID NO: 3215 - DNA, 40 bp, Artificial Sequence
  Synthetic Oligonucleotide
gagatctcggatctggcgtaccacttggacaggttccttc

SEQ ID NO: 3216 - DNA, 40 bp, Artificial Sequence
  Synthetic Oligonucleotide
gagatctcggatctgcgtatctacttggacaggttccttc

SEQ ID NO: 3217 - DNA, 40 bp, Artificial Sequence
  Synthetic Oligonucleotide
gagatctcggatctgcggtactacttggacaggttccttc

SEQ ID NO: 3218 - DNA, 40 bp, Artificial Sequence
  Synthetic Oligonucleotide
gagatctcggatcaggcgtactacttggacaggttccttc

SEQ ID NO: 3219 - DNA, 40 bp, Artificial Sequence
  Synthetic Oligonucleotide
gagatctcggacctggcgtactacttggacagggtccttc

SEQ ID NO: 3220 - DNA, 40 bp, Artificial Sequence
  Synthetic Oligonucleotide
gagatctcggaactggcgtactacttggacaggttccttc

SEQ ID NO: 3221 - DNA, 40 bp, Artificial Sequence
  Synthetic Oligonucleotide
gagatctcgaatctggcgcactacttggacaggttccttc

SEQ ID NO: 3222 - DNA, 40 bp, Artificial Sequence
  Synthetic Oligonucleotide
gagatcctcggatctgcgtactacttggacaggttccttc

SEQ ID NO: 3223 - DNA, 40 bp, Artificial Sequence
  Synthetic Oligonucleotide
gagacctcggatctggcgtactacttggacaggttccttc

SEQ ID NO: 3224 - DNA, 40 bp, Artificial Sequence
  Synthetic Oligonucleotide
gactcggatctcatctaactcctgaaccgggccatctaag

SEQ ID NO: 3225 - DNA, 40 bp, Artificial Sequence
  Synthetic Oligonucleotide
gactcgagactgcctctgttcttctgctacagactgtgca

SEQ ID NO: 3226 - DNA, 40 bp, Artificial Sequence
  Synthetic Oligonucleotide
gactcgagactgcctctgtccttctgctacagactgtgca

SEQ ID NO: 3227 - DNA, 40 bp, Artificial Sequence
  Synthetic Oligonucleotide
gactcgagaccgcctctgttcttctgctacagactgtgca

SEQ ID NO: 3228 - DNA, 40 bp, Artificial Sequence
  Synthetic Oligonucleotide
gactatccgtttgtccgtcctcttgtggtattgcgcatgc

SEQ ID NO: 3229 - DNA, 40 bp, Artificial Sequence
  Synthetic Oligonucleotide
gactaggcttcacgcacacggattgtacccgaactgggtt

SEQ ID NO: 3230 - DNA, 40 bp, Artificial Sequence
  Synthetic Oligonucleotide
gactactcgcatcgagcgttgtcaagcggagtgcaagtta

SEQ ID NO: 3231 - DNA, 40 bp, Artificial Sequence
  Synthetic Oligonucleotide
gactactcgcatcgagcgagtcttatgaggcctactactt

SEQ ID NO: 3232 - DNA, 40 bp, Artificial Sequence
  Synthetic Oligonucleotide
gactactcgcatcgagcaagtcttatgaagcctactactt

SEQ ID NO: 3233 - DNA, 40 bp, Artificial Sequence
  Synthetic Oligonucleotide
gactactcgcatcgaagcaagtcttatgagcctactactt

SEQ ID NO: 3234 - DNA, 40 bp, Artificial Sequence
  Synthetic Oligonucleotide
gactacctgcatcgagcggacgaagatgagagatgctcgt

SEQ ID NO: 3235 - DNA, 40 bp, Artificial Sequence
  Synthetic Oligonucleotide
gactacccgtatcgagacgagttcttcgttgggttcagcc

SEQ ID NO: 3236 - DNA, 40 bp, Artificial Sequence
  Synthetic Oligonucleotide
gactaccccccatcgagcggtttaccggtggcgacaacgc

SEQ ID NO: 3237 - DNA, 40 bp, Artificial Sequence
  Synthetic Oligonucleotide
gactacccccatcgagcggtttactggttggcgacaacgc

SEQ ID NO: 3238 - DNA, 40 bp, Artificial Sequence
  Synthetic Oligonucleotide
gactacccccatcgagcggtttacaggttggcgacaacgc

SEQ ID NO: 3239 - DNA, 40 bp, Artificial Sequence
  Synthetic Oligonucleotide
gacgttgtggcactattcacagacttagccttaatctggt

SEQ ID NO: 3240 - DNA, 40 bp, Artificial Sequence
  Synthetic Oligonucleotide
gacgtacttaccaccctgacatcgcggggaactaatggtt

SEQ ID NO: 3241 - DNA, 40 bp, Artificial Sequence
  Synthetic Oligonucleotide
gacggtttctctcctgactacatgagattaataaacgcgc

SEQ ID NO: 3242 - DNA, 40 bp, Artificial Sequence
  Synthetic Oligonucleotide
gacggttcttctcctgactacatgagattaataaacgcgc

SEQ ID NO: 3243 - DNA, 40 bp, Artificial Sequence
  Synthetic Oligonucleotide
gacggtcacgccttgatacctctcaactcttttcgtactg

SEQ ID NO: 3244 - DNA, 40 bp, Artificial Sequence
  Synthetic Oligonucleotide
gacggccttccaatcctccttgtctgcagttcccgccctg

SEQ ID NO: 3245 - DNA, 40 bp, Artificial Sequence
  Synthetic Oligonucleotide
gacgatctcggatctgcgtatctacttggacagttccttc

SEQ ID NO: 3246 - DNA, 40 bp, Artificial Sequence
  Synthetic Oligonucleotide
gacgatctcggatctgcgtactacttggacaggttccttc

SEQ ID NO: 3247 - DNA, 40 bp, Artificial Sequence
  Synthetic Oligonucleotide
gaccgcctcagtccgtaccattcgtacgatggtaacacaa

SEQ ID NO: 3248 - DNA, 40 bp, Artificial Sequence
  Synthetic Oligonucleotide
gacccggggcccgcctcaagctagctacctccattgtctg

SEQ ID NO: 3249 - DNA, 40 bp, Artificial Sequence
  Synthetic Oligonucleotide
gaccacggtacgcctcgattccgcccatacatgcatgtaa

SEQ ID NO: 3250 - DNA, 40 bp, Artificial Sequence
  Synthetic Oligonucleotide
gaccaatgccgaacttctgggactacccagatcaacgtcg

SEQ ID NO: 3251 - DNA, 40 bp, Artificial Sequence
  Synthetic Oligonucleotide
gacattccttggattctctgcccgcttcgcccatgtcccg

SEQ ID NO: 3252 - DNA, 40 bp, Artificial Sequence
  Synthetic Oligonucleotide
gaatttgcccgctcttagccgcctctaacaggtcactgat

SEQ ID NO: 3253 - DNA, 40 bp, Artificial Sequence
  Synthetic Oligonucleotide
gaattagtactgacggccgccttgatcctccgttagtccg

SEQ ID NO: 3254 - DNA, 40 bp, Artificial Sequence
  Synthetic Oligonucleotide
gaattagtactgacggccgccttgatcctccgttagtcag

SEQ ID NO: 3255 - DNA, 40 bp, Artificial Sequence
  Synthetic Oligonucleotide
gaattagtactgacggccgccttgatcctccgttagcctg

SEQ ID NO: 3256 - DNA, 40 bp, Artificial Sequence
  Synthetic Oligonucleotide
gaatgagtactgacggccgccttgatcctccgttagtctg

SEQ ID NO: 3257 - DNA, 40 bp, Artificial Sequence
  Synthetic Oligonucleotide
gaatctacaattgtccatatcctgcaacaaaacctccctg

SEQ ID NO: 3258 - DNA, 40 bp, Artificial Sequence
  Synthetic Oligonucleotide
gaatcgacgctgccttgtttaaggcctttatacaaacgca

SEQ ID NO: 3259 - DNA, 40 bp, Artificial Sequence
  Synthetic Oligonucleotide
gaatcgaccgctgccttgtttaaggcctttatacaacgca

SEQ ID NO: 3260 - DNA, 40 bp, Artificial Sequence
  Synthetic Oligonucleotide
gaatcgaccgctgccttgtttaagcctttatacaaacgca

SEQ ID NO: 3261 - DNA, 40 bp, Artificial Sequence
  Synthetic Oligonucleotide
gaatcgaccgcctgccttgtttaagcctttatacaacgca

SEQ ID NO: 3262 - DNA, 40 bp, Artificial Sequence
  Synthetic Oligonucleotide
gaatcgaccgcctgaccttgttaagcctttatacaacgca

SEQ ID NO: 3263 - DNA, 40 bp, Artificial Sequence
  Synthetic Oligonucleotide
gaatccgggaccgcctcaagctagctacctccattgtctg

SEQ ID NO: 3264 - DNA, 40 bp, Artificial Sequence
  Synthetic Oligonucleotide
gaatcagtactgacggccgccttgatcctccgttagtctg

SEQ ID NO: 3265 - DNA, 40 bp, Artificial Sequence
  Synthetic Oligonucleotide
gaatcacgctgccctttgtttaaggccttatacaaacgca

SEQ ID NO: 3266 - DNA, 40 bp, Artificial Sequence
  Synthetic Oligonucleotide
gaataggacctacgcccgcctcagtctgactcatcgtctg

SEQ ID NO: 3267 - DNA, 40 bp, Artificial Sequence
  Synthetic Oligonucleotide
gaatagatgacgaaatatgtcgctcccgtctcgttccaaa

SEQ ID NO: 3268 - DNA, 40 bp, Artificial Sequence
  Synthetic Oligonucleotide
gaactggattctcgcctcccatactacgtggattagattt

SEQ ID NO: 3269 - DNA, 40 bp, Artificial Sequence
  Synthetic Oligonucleotide
gaactggatcctcgcctccctactacgtggatttagattt

SEQ ID NO: 3270 - DNA, 40 bp, Artificial Sequence
  Synthetic Oligonucleotide
gaactggatcctcgcctccatactacgtggatttagattc

SEQ ID NO: 3271 - DNA, 40 bp, Artificial Sequence
  Synthetic Oligonucleotide
gaactggatcctcgcctccatactacctggatttagattt

SEQ ID NO: 3272 - DNA, 40 bp, Artificial Sequence
  Synthetic Oligonucleotide
gaactggatcctcgccctacatactacgtggattagattt

SEQ ID NO: 3273 - DNA, 40 bp, Artificial Sequence
  Synthetic Oligonucleotide
gaactggatcctcacctccatactacgtggatttagattt

SEQ ID NO: 3274 - DNA, 40 bp, Artificial Sequence
  Synthetic Oligonucleotide
gaactgatcctcgcctccatactacgtggatttagatttt

SEQ ID NO: 3275 - DNA, 40 bp, Artificial Sequence
  Synthetic Oligonucleotide
gaactgatcctcgcctccatactaccgtggatttagattt

SEQ ID NO: 3276 - DNA, 40 bp, Artificial Sequence
  Synthetic Oligonucleotide
gaaccggggcccgcttcaagctagctacctccattgtctg

SEQ ID NO: 3277 - DNA, 40 bp, Artificial Sequence
  Synthetic Oligonucleotide
gaaccggggcccgcctcaagctagctacctccattgtccg

SEQ ID NO: 3278 - DNA, 40 bp, Artificial Sequence
  Synthetic Oligonucleotide
gaaccggggcccgcctcaagctagctacctccattgtcag

SEQ ID NO: 3279 - DNA, 40 bp, Artificial Sequence
  Synthetic Oligonucleotide
gaaccggggcccgcctcaagctagctacatccattgtctg

SEQ ID NO: 3280 - DNA, 40 bp, Artificial Sequence
  Synthetic Oligonucleotide
gaaccggggcccgccccaagctagctacctccattgtctg

SEQ ID NO: 3281 - DNA, 40 bp, Artificial Sequence
  Synthetic Oligonucleotide
gaaccgggcccgcctcaagtctagctacctccattgtctg

SEQ ID NO: 3282 - DNA, 40 bp, Artificial Sequence
  Synthetic Oligonucleotide
gaaccgggcccgcctcaagctagcttacctccattgtctg

SEQ ID NO: 3283 - DNA, 40 bp, Artificial Sequence
  Synthetic Oligonucleotide
gaaccgggcccgcctcaagctagctgacctccattgtctg

SEQ ID NO: 3284 - DNA, 40 bp, Artificial Sequence
  Synthetic Oligonucleotide
gaaccgggcccgcctcaagctagctaccttccattgtctg

SEQ ID NO: 3285 - DNA, 40 bp, Artificial Sequence
  Synthetic Oligonucleotide
gaaccgggcccgcctcaagctagctaacctccattgtctg

SEQ ID NO: 3286 - DNA, 40 bp, Artificial Sequence
  Synthetic Oligonucleotide
gaaccgggcccgcctcaagctagcctacctccattgtctg

SEQ ID NO: 3287 - DNA, 40 bp, Artificial Sequence
  Synthetic Oligonucleotide
gaaccgggcccgcctcaagcctagctaccttccattgctg

SEQ ID NO: 3288 - DNA, 40 bp, Artificial Sequence
  Synthetic Oligonucleotide
gaaccgggaccgcctcaagctagctacctacattagtctg

SEQ ID NO: 3289 - DNA, 40 bp, Artificial Sequence
  Synthetic Oligonucleotide
gaaccgggacccgcctcgagctagctacctccattgtctg

SEQ ID NO: 3290 - DNA, 40 bp, Artificial Sequence
  Synthetic Oligonucleotide
gaaccatggtcggcctcgtaacccttaagatgcatcttaa

SEQ ID NO: 3291 - DNA, 40 bp, Artificial Sequence
  Synthetic Oligonucleotide
gaacacgctgccctttgtttaaggcctttatacaaacgca

SEQ ID NO: 3292 - DNA, 40 bp, Artificial Sequence
  Synthetic Oligonucleotide
gaaatcagtgtaattgtctactgggcgctatcccaggcaa

SEQ ID NO: 3293 - DNA, 40 bp, Artificial Sequence
  Synthetic Oligonucleotide
gaaaccggggcccgcctcaagctagctacctccatgtctg

SEQ ID NO: 3294 - DNA, 40 bp, Artificial Sequence
  Synthetic Oligonucleotide
cttttatccggcaggacgtctttcgtgcactatcacgatt

SEQ ID NO: 3295 - DNA, 40 bp, Artificial Sequence
  Synthetic Oligonucleotide
ctttaattccgtgactacactgattacttattgcgggcat

SEQ ID NO: 3296 - DNA, 40 bp, Artificial Sequence
  Synthetic Oligonucleotide
cttgtccaggactacctggtcagttcaagctagatttgtg

SEQ ID NO: 3297 - DNA, 40 bp, Artificial Sequence
  Synthetic Oligonucleotide
cttggacgtccaactgttgcctcggctcctccatcggata

SEQ ID NO: 3298 - DNA, 40 bp, Artificial Sequence
  Synthetic Oligonucleotide
cttgagctgaatcactccgcctcgctcctccagggctacg

SEQ ID NO: 3299 - DNA, 40 bp, Artificial Sequence
  Synthetic Oligonucleotide
cttgagcacagttcgtcggtccgcgccgctatgcccgtta

SEQ ID NO: 3300 - DNA, 40 bp, Artificial Sequence
  Synthetic Oligonucleotide
cttccttcggatctcaacatattgccgcctcacatccgac

SEQ ID NO: 3301 - DNA, 40 bp, Artificial Sequence
  Synthetic Oligonucleotide
cttcctcggatcttcagcatattgccgcctcgcatccgac

SEQ ID NO: 3302 - DNA, 40 bp, Artificial Sequence
  Synthetic Oligonucleotide
cttcctcggatcttcaacatattgccgcctcgcttccgac

SEQ ID NO: 3303 - DNA, 40 bp, Artificial Sequence
  Synthetic Oligonucleotide
cttcctcggatcttcaacatattgccgcctcgcatccaac

SEQ ID NO: 3304 - DNA, 40 bp, Artificial Sequence
  Synthetic Oligonucleotide
cttccccctgagtgttgagtcggtcaagcactatcttgaa

SEQ ID NO: 3305 - DNA, 40 bp, Artificial Sequence
  Synthetic Oligonucleotide
cttattcctctggcaaaaatcgatatagcccatttgcgcg

SEQ ID NO: 3306 - DNA, 40 bp, Artificial Sequence
  Synthetic Oligonucleotide
cttagtgggcccctagctgcctcgattctaagtgcacaga

SEQ ID NO: 3307 - DNA, 40 bp, Artificial Sequence
  Synthetic Oligonucleotide
cttagtgatttcgcggcccctctgtttagtggccattgga

SEQ ID NO: 3308 - DNA, 40 bp, Artificial Sequence
  Synthetic Oligonucleotide
cttagtgatttcgccgcccctctgtttggtggccattgga

SEQ ID NO: 3309 - DNA, 40 bp, Artificial Sequence
  Synthetic Oligonucleotide
cttagtgatttcgccgcccctctgtttagtggccattggg

SEQ ID NO: 3310 - DNA, 40 bp, Artificial Sequence
  Synthetic Oligonucleotide
cttagtgatttcgccgcccctctgtttagtggccattgaa

SEQ ID NO: 3311 - DNA, 40 bp, Artificial Sequence
  Synthetic Oligonucleotide
cttagtgatttcgccgcccctctgtttactggccattgga

SEQ ID NO: 3312 - DNA, 40 bp, Artificial Sequence
  Synthetic Oligonucleotide
cttagtgatttcgccgcccctctgcttagtggccattgga

SEQ ID NO: 3313 - DNA, 40 bp, Artificial Sequence
  Synthetic Oligonucleotide
cttagtgatttcgccgcccctccgtttagtggccattgga

SEQ ID NO: 3314 - DNA, 40 bp, Artificial Sequence
  Synthetic Oligonucleotide
cttagtgatttcgccgcccccctgtttagtggccattgga

SEQ ID NO: 3315 - DNA, 40 bp, Artificial Sequence
  Synthetic Oligonucleotide
cttagtgatttcgccgaccctctgtttagtggccattgga

SEQ ID NO: 3316 - DNA, 40 bp, Artificial Sequence
  Synthetic Oligonucleotide
cttagtgatttagccgcccctctgtttagtggccattgga

SEQ ID NO: 3317 - DNA, 40 bp, Artificial Sequence
  Synthetic Oligonucleotide
cttagtgacttcgccgcccctctgtttagtggccattgga

SEQ ID NO: 3318 - DNA, 40 bp, Artificial Sequence
  Synthetic Oligonucleotide
cttacgtgatttgccgcccctctgtttagtggccattgga

SEQ ID NO: 3319 - DNA, 40 bp, Artificial Sequence
  Synthetic Oligonucleotide
cttacgtgatttccgccgccctctgttaatggccattgga

SEQ ID NO: 3320 - DNA, 40 bp, Artificial Sequence
  Synthetic Oligonucleotide
ctgttatccggcaggacgtctttcgtgcactatcacgatt

SEQ ID NO: 3321 - DNA, 40 bp, Artificial Sequence
  Synthetic Oligonucleotide
ctgtactaccgcctgtactcctagcgcatcgcttccccgg

SEQ ID NO: 3322 - DNA, 40 bp, Artificial Sequence
  Synthetic Oligonucleotide
ctggccgacatgcatgattgcctgggagtccccacaatag

SEQ ID NO: 3323 - DNA, 40 bp, Artificial Sequence
  Synthetic Oligonucleotide
ctggccgacatgcatgattgcctgggagtccccaacatgt

SEQ ID NO: 3324 - DNA, 40 bp, Artificial Sequence
  Synthetic Oligonucleotide
ctgcttatccggcagacgtctttcgtgcactatcacgatt

SEQ ID NO: 3325 - DNA, 40 bp, Artificial Sequence
  Synthetic Oligonucleotide
ctgcgctccctgtcattcgggcactatcccgataatacga

SEQ ID NO: 3326 - DNA, 40 bp, Artificial Sequence
  Synthetic Oligonucleotide
ctgcctctgctctccctcttggatcgcgtacgtggatatg

SEQ ID NO: 3327 - DNA, 40 bp, Artificial Sequence
  Synthetic Oligonucleotide
ctgcctctgctctccctctcggatcgcgtacgtgtatatg

SEQ ID NO: 3328 - DNA, 40 bp, Artificial Sequence
  Synthetic Oligonucleotide
ctgcctcggtctgcccctaatgttgcaacataatggtaaa

SEQ ID NO: 3329 - DNA, 40 bp, Artificial Sequence
  Synthetic Oligonucleotide
ctgcctcggtctacccctaatgttgcaacataatggtata

SEQ ID NO: 3330 - DNA, 40 bp, Artificial Sequence
  Synthetic Oligonucleotide
ctgcctcagtctacccctaatgttgcaacataatggtaaa

SEQ ID NO: 3331 - DNA, 40 bp, Artificial Sequence
  Synthetic Oligonucleotide
ctgcctaatactacccaatgtcgtgcttcgaagttctgta

SEQ ID NO: 3332 - DNA, 40 bp, Artificial Sequence
  Synthetic Oligonucleotide
ctgccacgccgacgcctatcgttacgcctatatcggtaat

SEQ ID NO: 3333 - DNA, 40 bp, Artificial Sequence
  Synthetic Oligonucleotide
ctgcagcaacacaaacgagaccaccccgtatatagaaacg

SEQ ID NO: 3334 - DNA, 40 bp, Artificial Sequence
  Synthetic Oligonucleotide
ctgcacccgatagtcatctttcactggaccacccgtgtta

SEQ ID NO: 3335 - DNA, 40 bp, Artificial Sequence
  Synthetic Oligonucleotide
ctgaagatattgtgcaggccgcctcgcaattcctcctatt

SEQ ID NO: 3336 - DNA, 40 bp, Artificial Sequence
  Synthetic Oligonucleotide
ctctttatcggcaagacgtctttcgtgcactatcacgatt

SEQ ID NO: 3337 - DNA, 40 bp, Artificial Sequence
  Synthetic Oligonucleotide
ctctttatccggcaagactctttcgtgcactatcacgatt

SEQ ID NO: 3338 - DNA, 40 bp, Artificial Sequence
  Synthetic Oligonucleotide
ctctttatccgcagacgtctttcgttgcactatcacgatt

SEQ ID NO: 3339 - DNA, 40 bp, Artificial Sequence
  Synthetic Oligonucleotide
ctcttgttcggcaggacgcctttcgtgcactatcacgatt

SEQ ID NO: 3340 - DNA, 40 bp, Artificial Sequence
  Synthetic Oligonucleotide
ctcttgtccggcgggacgtctttcgtgcactatcacgatt

SEQ ID NO: 3341 - DNA, 40 bp, Artificial Sequence
  Synthetic Oligonucleotide
ctcttgtccggcaggacgtctttcgtgcactatcacgatc

SEQ ID NO: 3342 - DNA, 40 bp, Artificial Sequence
  Synthetic Oligonucleotide
ctcttccccggcaggacgtctttcgtgcactatcacgatt

SEQ ID NO: 3343 - DNA, 40 bp, Artificial Sequence
  Synthetic Oligonucleotide
ctcttatttggcaggacgtctttcgtgcactatcacgatt

SEQ ID NO: 3344 - DNA, 40 bp, Artificial Sequence
  Synthetic Oligonucleotide
ctcttatgcggcaggacgtctttcgtgcactatcacgatt

SEQ ID NO: 3345 - DNA, 40 bp, Artificial Sequence
  Synthetic Oligonucleotide
ctcttatctggcgggacgtctttcgtgcactatcacgatt

SEQ ID NO: 3346 - DNA, 40 bp, Artificial Sequence
  Synthetic Oligonucleotide
ctcttatctggcaggactctttcgtagcactatcacgatt

SEQ ID NO: 3347 - DNA, 40 bp, Artificial Sequence
  Synthetic Oligonucleotide
ctcttatctagcaggacgtctttcgtgcactatcacgatt

SEQ ID NO: 3348 - DNA, 40 bp, Artificial Sequence
  Synthetic Oligonucleotide
ctcttatccgtcaggacgtctttcgtgcactatcacgatt

SEQ ID NO: 3349 - DNA, 40 bp, Artificial Sequence
  Synthetic Oligonucleotide
ctcttatccgtcaggacgtctttcgtgcactatcacgatg

SEQ ID NO: 3350 - DNA, 40 bp, Artificial Sequence
  Synthetic Oligonucleotide
ctcttatccggtcaggacgtctttctgcactatcacgatc

SEQ ID NO: 3351 - DNA, 40 bp, Artificial Sequence
  Synthetic Oligonucleotide
ctcttatccggtcaggacgtctttcgtgcactatcacgat

SEQ ID NO: 3352 - DNA, 40 bp, Artificial Sequence
  Synthetic Oligonucleotide
ctcttatccggtcagacgtcttcttgcgactatcacgatt

SEQ ID NO: 3353 - DNA, 40 bp, Artificial Sequence
  Synthetic Oligonucleotide
ctcttatccggctggacgtctttcgtgcactatcacgatt

SEQ ID NO: 3354 - DNA, 40 bp, Artificial Sequence
  Synthetic Oligonucleotide
ctcttatccggctaggacggtctttctgccatatcacgat

SEQ ID NO: 3355 - DNA, 40 bp, Artificial Sequence
  Synthetic Oligonucleotide
ctcttatccggcgggacgtctttcgtgcgctatcacgatt

SEQ ID NO: 3356 - DNA, 40 bp, Artificial Sequence
  Synthetic Oligonucleotide
ctcttatccggcgggacgtctttcgtgcactatcacgatc

SEQ ID NO: 3357 - DNA, 40 bp, Artificial Sequence
  Synthetic Oligonucleotide
ctcttatccggcgggacgtctctcgtgcactatcacgatt

SEQ ID NO: 3358 - DNA, 40 bp, Artificial Sequence
  Synthetic Oligonucleotide
ctcttatccggcggagcgtctttcgtgcactatcacgatt

SEQ ID NO: 3359 - DNA, 40 bp, Artificial Sequence
  Synthetic Oligonucleotide
ctcttatccggccggacgtctttcgtgcactatcacgatt

SEQ ID NO: 3360 - DNA, 40 bp, Artificial Sequence
  Synthetic Oligonucleotide
ctcttatccggccaggacgtctttctgcactatcacgatt

SEQ ID NO: 3361 - DNA, 40 bp, Artificial Sequence
  Synthetic Oligonucleotide
ctcttatccggccagacgtctttcgtgcactatcacgatt

SEQ ID NO: 3362 - DNA, 40 bp, Artificial Sequence
  Synthetic Oligonucleotide
ctcttatccggcagggcgtctctcgtgcactatcacgatt

SEQ ID NO: 3363 - DNA, 40 bp, Artificial Sequence
  Synthetic Oligonucleotide
ctcttatccggcagggactctttcgtgcactatcacgatt

SEQ ID NO: 3364 - DNA, 40 bp, Artificial Sequence
  Synthetic Oligonucleotide
ctcttatccggcaggaggtctttcgtgcactatcacgatt

SEQ ID NO: 3365 - DNA, 40 bp, Artificial Sequence
  Synthetic Oligonucleotide
ctcttatccggcaggactctttcgtgcacctatcacgatt

SEQ ID NO: 3366 - DNA, 40 bp, Artificial Sequence
  Synthetic Oligonucleotide
ctcttatccggcaggactctttcgtgcaactatcacgatt

SEQ ID NO: 3367 - DNA, 40 bp, Artificial Sequence
  Synthetic Oligonucleotide
ctcttatccggcaggactcgttcttgcgactatcacgatt

SEQ ID NO: 3368 - DNA, 40 bp, Artificial Sequence
  Synthetic Oligonucleotide
ctcttatccggcaggacgttcttcgtgcactatcacgatt

SEQ ID NO: 3369 - DNA, 40 bp, Artificial Sequence
  Synthetic Oligonucleotide
ctcttatccggcaggacgtgtttcgtgcactatcacgatt

SEQ ID NO: 3370 - DNA, 40 bp, Artificial Sequence
  Synthetic Oligonucleotide
ctcttatccggcaggacgtctttcgtgctctatcacgatt

SEQ ID NO: 3371 - DNA, 40 bp, Artificial Sequence
  Synthetic Oligonucleotide
ctcttatccggcaggacgtctttcgtgcgctatcgcgatt

SEQ ID NO: 3372 - DNA, 40 bp, Artificial Sequence
  Synthetic Oligonucleotide
ctcttatccggcaggacgtctttcgtgcgctatcacgatc

SEQ ID NO: 3373 - DNA, 40 bp, Artificial Sequence
  Synthetic Oligonucleotide
ctcttatccggcaggacgtctttcgtgcgctaccacgatt

SEQ ID NO: 3374 - DNA, 40 bp, Artificial Sequence
  Synthetic Oligonucleotide
ctcttatccggcaggacgtctttcgtgcagtatcacgatt

SEQ ID NO: 3375 - DNA, 40 bp, Artificial Sequence
  Synthetic Oligonucleotide
ctcttatccggcaggacgtctttcgtgcacttatcacgat

SEQ ID NO: 3376 - DNA, 40 bp, Artificial Sequence
  Synthetic Oligonucleotide
ctcttatccggcaggacgtctttcgtgcactatcaggatt

SEQ ID NO: 3377 - DNA, 40 bp, Artificial Sequence
  Synthetic Oligonucleotide
ctcttatccggcaggacgtctttcgtgcactatcactatt

SEQ ID NO: 3378 - DNA, 40 bp, Artificial Sequence
  Synthetic Oligonucleotide
ctcttatccggcaggacgtctttcgtgcactatcacgtct

SEQ ID NO: 3379 - DNA, 40 bp, Artificial Sequence
  Synthetic Oligonucleotide
ctcttatccggcaggacgtctttcgtgcactatcacgtat

SEQ ID NO: 3380 - DNA, 40 bp, Artificial Sequence
  Synthetic Oligonucleotide
ctcttatccggcaggacgtctttcgtgcactatcacgaaa

SEQ ID NO: 3381 - DNA, 40 bp, Artificial Sequence
  Synthetic Oligonucleotide
ctcttatccggcaggacgtctttcgtacactatcacgatt

SEQ ID NO: 3382 - DNA, 40 bp, Artificial Sequence
  Synthetic Oligonucleotide
ctcttatccggcaggacgtctttcgagcactatcacgatt

SEQ ID NO: 3383 - DNA, 40 bp, Artificial Sequence
  Synthetic Oligonucleotide
ctcttatccggcaggacgtctttagtgcactatcacgatt

SEQ ID NO: 3384 - DNA, 40 bp, Artificial Sequence
  Synthetic Oligonucleotide
ctcttatccggcaggacgtcttcgttgcactatcacgatt

SEQ ID NO: 3385 - DNA, 40 bp, Artificial Sequence
  Synthetic Oligonucleotide
ctcttatccggcaggacgtcttcgtgccactatcacgatt

SEQ ID NO: 3386 - DNA, 40 bp, Artificial Sequence
  Synthetic Oligonucleotide
ctcttatccggcaggacgtcttcgtgcactatcatcgatt

SEQ ID NO: 3387 - DNA, 40 bp, Artificial Sequence
  Synthetic Oligonucleotide
ctcttatccggcaggacgtcttcgtagcactatcacgatt

SEQ ID NO: 3388 - DNA, 40 bp, Artificial Sequence
  Synthetic Oligonucleotide
ctcttatccggcaggacgtctcttgtgcactatcacgatt

SEQ ID NO: 3389 - DNA, 40 bp, Artificial Sequence
  Synthetic Oligonucleotide
ctcttatccggcaggacgtcgttcgtgcactatcacgatt

SEQ ID NO: 3390 - DNA, 40 bp, Artificial Sequence
  Synthetic Oligonucleotide
ctcttatccggcaggacgtccttcgtgcaccatcacgatt

SEQ ID NO: 3391 - DNA, 40 bp, Artificial Sequence
  Synthetic Oligonucleotide
ctcttatccggcaggacgtccctcgtgcactatcacgatt

SEQ ID NO: 3392 - DNA, 40 bp, Artificial Sequence
  Synthetic Oligonucleotide
ctcttatccggcaggacgtcattcgcgcactatcacgatt

SEQ ID NO: 3393 - DNA, 40 bp, Artificial Sequence
  Synthetic Oligonucleotide
ctcttatccggcaggacgcctttcgtgcgctatcacgatt

SEQ ID NO: 3394 - DNA, 40 bp, Artificial Sequence
  Synthetic Oligonucleotide
ctcttatccggcaggacgcctttcgtgcactatcacgatc

SEQ ID NO: 3395 - DNA, 40 bp, Artificial Sequence
  Synthetic Oligonucleotide
ctcttatccggcaggacgcctttcgtgcactaccacgatt

SEQ ID NO: 3396 - DNA, 40 bp, Artificial Sequence
  Synthetic Oligonucleotide
ctcttatccggcagacgtctttccgtgcactatcacgatt

SEQ ID NO: 3397 - DNA, 40 bp, Artificial Sequence
  Synthetic Oligonucleotide
ctcttatccggcagacgtcttcggtgcactatcacagatt

SEQ ID NO: 3398 - DNA, 40 bp, Artificial Sequence
  Synthetic Oligonucleotide
ctcttatccggcagaacgtctttcgtgcgctatcacgatt

SEQ ID NO: 3399 - DNA, 40 bp, Artificial Sequence
  Synthetic Oligonucleotide
ctcttatccggaggacgatctttcgtgcactatcacgatt

SEQ ID NO: 3400 - DNA, 40 bp, Artificial Sequence
  Synthetic Oligonucleotide
ctcttatccggaaggacgtctttcgtgcactatcacgatt

SEQ ID NO: 3401 - DNA, 40 bp, Artificial Sequence
  Synthetic Oligonucleotide
ctcttatccgccaggacgtctttcgtgcactatcacgatt

SEQ ID NO: 3402 - DNA, 40 bp, Artificial Sequence
  Synthetic Oligonucleotide
ctcttatccgacagggcgtctttcgtgcactatcacgatt

SEQ ID NO: 3403 - DNA, 40 bp, Artificial Sequence
  Synthetic Oligonucleotide
ctcttatccgacaggacgttcttcgtgcactatcacgatt

SEQ ID NO: 3404 - DNA, 40 bp, Artificial Sequence
  Synthetic Oligonucleotide
ctcttatcccggcaggacgtctttcgtgcactatcacgat

SEQ ID NO: 3405 - DNA, 40 bp, Artificial Sequence
  Synthetic Oligonucleotide
ctcttatcccggcaagacgtcttcgtgcactatcacgatt

SEQ ID NO: 3406 - DNA, 40 bp, Artificial Sequence
  Synthetic Oligonucleotide
ctcttatcccggaggacgtctttcgtgcactatcacgatt

SEQ ID NO: 3407 - DNA, 40 bp, Artificial Sequence
  Synthetic Oligonucleotide
ctcttatccagcaggacgtctttcgtgcaccatcacgatt

SEQ ID NO: 3408 - DNA, 40 bp, Artificial Sequence
  Synthetic Oligonucleotide
ctcttactcggcaggacgtctttcgtgcactatcacgatt

SEQ ID NO: 3409 - DNA, 40 bp, Artificial Sequence
  Synthetic Oligonucleotide
ctcttaacgccgaggacgtctttcgtgcactatcacgatt

SEQ ID NO: 3410 - DNA, 40 bp, Artificial Sequence
  Synthetic Oligonucleotide
ctcttaaccggcaggacgtctttcgtgcactatcacgatt

SEQ ID NO: 3411 - DNA, 40 bp, Artificial Sequence
  Synthetic Oligonucleotide
ctctcggataacgttaatcgatccttctgtacgtacacga

SEQ ID NO: 3412 - DNA, 40 bp, Artificial Sequence
  Synthetic Oligonucleotide
ctctcattcggcaggacgtctttcgtgcactatcacgatt

SEQ ID NO: 3413 - DNA, 40 bp, Artificial Sequence
  Synthetic Oligonucleotide
ctctcatccggcagggcgtctttcgtgcactatcacgact

SEQ ID NO: 3414 - DNA, 40 bp, Artificial Sequence
  Synthetic Oligonucleotide
ctctcatccggcaggacgtcttcgtgcgctatcagcgtat

SEQ ID NO: 3415 - DNA, 40 bp, Artificial Sequence
  Synthetic Oligonucleotide
ctctatccgtttgtccgtcctcttgtggtattgcgcatgc

SEQ ID NO: 3416 - DNA, 40 bp, Artificial Sequence
  Synthetic Oligonucleotide
ctctatccggcaggatcgtctttcgtgcactatcacgatt

SEQ ID NO: 3417 - DNA, 40 bp, Artificial Sequence
  Synthetic Oligonucleotide
ctctatccggcaggacgtctttcgtgcactatcatcgatt

SEQ ID NO: 3418 - DNA, 40 bp, Artificial Sequence
  Synthetic Oligonucleotide
ctctatccgcaggacgatctttcgtgacactatcacgatt

SEQ ID NO: 3419 - DNA, 40 bp, Artificial Sequence
  Synthetic Oligonucleotide
ctctacactcccgattgctgcctcgatggtgcatgcagca

SEQ ID NO: 3420 - DNA, 40 bp, Artificial Sequence
  Synthetic Oligonucleotide
ctctaatccggcaggacgtctttcgtgcactatcacgatt

SEQ ID NO: 3421 - DNA, 40 bp, Artificial Sequence
  Synthetic Oligonucleotide
ctcgggatcgtctgttgcacctcctacagccgcctctata

SEQ ID NO: 3422 - DNA, 40 bp, Artificial Sequence
  Synthetic Oligonucleotide
ctcgggacgcctctggtcctaccggcactatgatacgtat

SEQ ID NO: 3423 - DNA, 40 bp, Artificial Sequence
  Synthetic Oligonucleotide
ctcggatcgcctcggtcctgccatgtatcgatactagcta

SEQ ID NO: 3424 - DNA, 40 bp, Artificial Sequence
  Synthetic Oligonucleotide
ctcgagacgcctcgtatcatgtacaaatgtacctttgtaa

SEQ ID NO: 3425 - DNA, 40 bp, Artificial Sequence
  Synthetic Oligonucleotide
ctccttatccggcaggacgtcttcgtgcactatcacgatt

SEQ ID NO: 3426 - DNA, 40 bp, Artificial Sequence
  Synthetic Oligonucleotide
ctcctattgtgagcctctccagccgcctcaactcttgtcc

SEQ ID NO: 3427 - DNA, 40 bp, Artificial Sequence
  Synthetic Oligonucleotide
ctcctatccggcaggacgtctttcgtgcactatcacaatt

SEQ ID NO: 3428 - DNA, 40 bp, Artificial Sequence
  Synthetic Oligonucleotide
ctccgtagatgcgcgcttatgtgggctgcctgtgtcacac

SEQ ID NO: 3429 - DNA, 40 bp, Artificial Sequence
  Synthetic Oligonucleotide
ctccctcggatcttcaacatattgccgcctcgcatccgac

SEQ ID NO: 3430 - DNA, 40 bp, Artificial Sequence
  Synthetic Oligonucleotide
ctccatggtacgcctcgattccgcccatacacgcatgtaa

SEQ ID NO: 3431 - DNA, 40 bp, Artificial Sequence
  Synthetic Oligonucleotide
ctccaccgcgcaagtcgtttacgcagactactgcgacgct

SEQ ID NO: 3432 - DNA, 40 bp, Artificial Sequence
  Synthetic Oligonucleotide
ctccaaggcgattgtcgttattgccggactacctgcattt

SEQ ID NO: 3433 - DNA, 40 bp, Artificial Sequence
  Synthetic Oligonucleotide
ctattatccggcaggacatctttcgtgcactatcacgatt

SEQ ID NO: 3434 - DNA, 40 bp, Artificial Sequence
  Synthetic Oligonucleotide
ctatcctaggacgaacctaggcaacagaccagcctcctca

SEQ ID NO: 3435 - DNA, 40 bp, Artificial Sequence
  Synthetic Oligonucleotide
ctagcttcctcgaggtcttcctctgctgtatccggattgg

SEQ ID NO: 3436 - DNA, 40 bp, Artificial Sequence
  Synthetic Oligonucleotide
ctagcctcctcgaagtcttcctctgctgtatccggattgg

SEQ ID NO: 3437 - DNA, 40 bp, Artificial Sequence
  Synthetic Oligonucleotide
ctactggtcatgaacggtgactacaccggttgtagtgact

SEQ ID NO: 3438 - DNA, 40 bp, Artificial Sequence
  Synthetic Oligonucleotide
ctactccggatgagtcacctcgcattcctccgttcgtctg

SEQ ID NO: 3439 - DNA, 40 bp, Artificial Sequence
  Synthetic Oligonucleotide
ctactccggatgagctgcctcgcattcctccgttcgtctg

SEQ ID NO: 3440 - DNA, 40 bp, Artificial Sequence
  Synthetic Oligonucleotide
ctactccggatgagccacctcgcattcctcctttcgtctg

SEQ ID NO: 3441 - DNA, 40 bp, Artificial Sequence
  Synthetic Oligonucleotide
ctactccggatgagccacctcgcattcctccgctcgtctg

SEQ ID NO: 3442 - DNA, 40 bp, Artificial Sequence
  Synthetic Oligonucleotide
ctactccggatgagccacctcgcattcctccattcgtctg

SEQ ID NO: 3443 - DNA, 40 bp, Artificial Sequence
  Synthetic Oligonucleotide
ctactccccggtcttgaatcagccgcacaagcccgattga

SEQ ID NO: 3444 - DNA, 40 bp, Artificial Sequence
  Synthetic Oligonucleotide
ctaccccggatgagccacctcgcattcctccgttcgtctg

SEQ ID NO: 3445 - DNA, 40 bp, Artificial Sequence
  Synthetic Oligonucleotide
ctaagcccggtttgcccgcctcagttcccctacggttatt

SEQ ID NO: 3446 - DNA, 40 bp, Artificial Sequence
  Synthetic Oligonucleotide
ctaaatcttcctgaggccgccccatgggcacattctcgta

SEQ ID NO: 3447 - DNA, 40 bp, Artificial Sequence
  Synthetic Oligonucleotide
ctaaaatcttcccgagccgcctcgaaaactttgaaatgcg

SEQ ID NO: 3448 - DNA, 40 bp, Artificial Sequence
  Synthetic Oligonucleotide
cgttttctcggatccaaacgcatatcctcctccgcctcgt

SEQ ID NO: 3449 - DNA, 40 bp, Artificial Sequence
  Synthetic Oligonucleotide
cgtttctcggattactctattataccgcctcactccactg

SEQ ID NO: 3450 - DNA, 40 bp, Artificial Sequence
  Synthetic Oligonucleotide
cgtttctcggattactctactataccgcctcactccactg

SEQ ID NO: 3451 - DNA, 40 bp, Artificial Sequence
  Synthetic Oligonucleotide
cgttgttcttctcctgactacatgagattaataaacgcgc

SEQ ID NO: 3452 - DNA, 40 bp, Artificial Sequence
  Synthetic Oligonucleotide
cgttgtggcactattcacagacttagccttaatctgcggt

SEQ ID NO: 3453 - DNA, 40 bp, Artificial Sequence
  Synthetic Oligonucleotide
cgttggacctccgatacgctgcctcgagtctggaagctca

SEQ ID NO: 3454 - DNA, 40 bp, Artificial Sequence
  Synthetic Oligonucleotide
cgttggaagactactttcattttagctgccagctgttctc

SEQ ID NO: 3455 - DNA, 40 bp, Artificial Sequence
  Synthetic Oligonucleotide
cgtgttgcagtcactgtccgcctcggtcttaccgtctggc

SEQ ID NO: 3456 - DNA, 40 bp, Artificial Sequence
  Synthetic Oligonucleotide
cgtgcagcctcggtcctacacagcatggccatgccgttat

SEQ ID NO: 3457 - DNA, 40 bp, Artificial Sequence
  Synthetic Oligonucleotide
cgtcgtcttcccgcattgccgcaattgccatacattaata

SEQ ID NO: 3458 - DNA, 40 bp, Artificial Sequence
  Synthetic Oligonucleotide
cgtagtgatttcgccgcccctctgtttagtggccattgga

SEQ ID NO: 3459 - DNA, 40 bp, Artificial Sequence
  Synthetic Oligonucleotide
cgtaggtcgcctggtccgcctcgatcctctataccgtctg

SEQ ID NO: 3460 - DNA, 40 bp, Artificial Sequence
  Synthetic Oligonucleotide
cggtgttctcggatcggtcagtttcttccgttcctcaccg

SEQ ID NO: 3461 - DNA, 40 bp, Artificial Sequence
  Synthetic Oligonucleotide
cggtgtcttcgttcgctcaggccgccttgattttcccaaa

SEQ ID NO: 3462 - DNA, 40 bp, Artificial Sequence
  Synthetic Oligonucleotide
cggctaacgttcgtcgagggagcaaaaggtctatagacta

SEQ ID NO: 3463 - DNA, 40 bp, Artificial Sequence
  Synthetic Oligonucleotide
cggctaacgttcatcgagggagcaaagggtctatagactt

SEQ ID NO: 3464 - DNA, 40 bp, Artificial Sequence
  Synthetic Oligonucleotide
cggctaacgttcatcgagggagcaaagagtctatagacta

SEQ ID NO: 3465 - DNA, 40 bp, Artificial Sequence
  Synthetic Oligonucleotide
cggctaacgttcatcgagggagcaaaaggtctgtagacta

SEQ ID NO: 3466 - DNA, 40 bp, Artificial Sequence
  Synthetic Oligonucleotide
cggctaacgttcatcgagggagcaaaaggtctatagacaa

SEQ ID NO: 3467 - DNA, 40 bp, Artificial Sequence
  Synthetic Oligonucleotide
cggctaacgttcatcgagggagcaaaaggtctataaacta

SEQ ID NO: 3468 - DNA, 40 bp, Artificial Sequence
  Synthetic Oligonucleotide
cggctaacgttcatcgagggagcaaaaggtctacagacta

SEQ ID NO: 3469 - DNA, 40 bp, Artificial Sequence
  Synthetic Oligonucleotide
cggctaacgtccatcgagggagcaaaaggtctatagacta

SEQ ID NO: 3470 - DNA, 40 bp, Artificial Sequence
  Synthetic Oligonucleotide
cggccgcctcgaaactcacccttctcgatcgacacctgta

SEQ ID NO: 3471 - DNA, 40 bp, Artificial Sequence
  Synthetic Oligonucleotide
cggccgcctcgaaactacccttctcggatcaacacctgta

SEQ ID NO: 3472 - DNA, 40 bp, Artificial Sequence
  Synthetic Oligonucleotide
cggccgcctcgaaactacccttctcgatcaacacctgtaa

SEQ ID NO: 3473 - DNA, 40 bp, Artificial Sequence
  Synthetic Oligonucleotide
cggccgcctcgaaaactacccttctcgatcaacacctgta

SEQ ID NO: 3474 - DNA, 40 bp, Artificial Sequence
  Synthetic Oligonucleotide
cggccaacgttcatcgagggagcaaaaggtctatagacta

SEQ ID NO: 3475 - DNA, 40 bp, Artificial Sequence
  Synthetic Oligonucleotide
cggatcccactgttagcagttcctccctcaggtgtgtcaa

SEQ ID NO: 3476 - DNA, 40 bp, Artificial Sequence
  Synthetic Oligonucleotide
cggatcccactgttaacagttcctccctcaggcgtgtcaa

SEQ ID NO: 3477 - DNA, 40 bp, Artificial Sequence
  Synthetic Oligonucleotide
cggaacgtcgccttggtcttcccacattaccgtcctccta

SEQ ID NO: 3478 - DNA, 40 bp, Artificial Sequence
  Synthetic Oligonucleotide
cgctgtccgcatcgagcgggttcttcgataatatgcaaca

SEQ ID NO: 3479 - DNA, 40 bp, Artificial Sequence
  Synthetic Oligonucleotide
cgctgcctcgatgactagtcagaacacgcgacacgttatc

SEQ ID NO: 3480 - DNA, 40 bp, Artificial Sequence
  Synthetic Oligonucleotide
cgctcttcgctcccacggatctgtattttggctgtctaga

SEQ ID NO: 3481 - DNA, 40 bp, Artificial Sequence
  Synthetic Oligonucleotide
cgctattcgtagatccgtctctcactacgcgtatggaatc

SEQ ID NO: 3482 - DNA, 40 bp, Artificial Sequence
  Synthetic Oligonucleotide
cgctatctgtcatcgggcgagcactttgtgcgatcacaca

SEQ ID NO: 3483 - DNA, 40 bp, Artificial Sequence
  Synthetic Oligonucleotide
cgctatctgtcatcgatcgagcactttgtgcgatcacaca

SEQ ID NO: 3484 - DNA, 40 bp, Artificial Sequence
  Synthetic Oligonucleotide
cgctatctgtcatcgagcgagcattttgtgcgatcacaca

SEQ ID NO: 3485 - DNA, 40 bp, Artificial Sequence
  Synthetic Oligonucleotide
cgctatctgtcatcgagcgagcactttgtgggatcacaca

SEQ ID NO: 3486 - DNA, 40 bp, Artificial Sequence
  Synthetic Oligonucleotide
cgctatctgtcatcgagcgagcactttgtgcggtcacaca

SEQ ID NO: 3487 - DNA, 40 bp, Artificial Sequence
  Synthetic Oligonucleotide
cgctatctgtcatcgagcgagcactttgtgcgatcactca

SEQ ID NO: 3488 - DNA, 40 bp, Artificial Sequence
  Synthetic Oligonucleotide
cgctatctgtcatcgagcgagcactttgtgcgatcacata

SEQ ID NO: 3489 - DNA, 40 bp, Artificial Sequence
  Synthetic Oligonucleotide
cgctatctgtcatcgagcgagcactttgtgcgatcacacg

SEQ ID NO: 3490 - DNA, 40 bp, Artificial Sequence
  Synthetic Oligonucleotide
cgctatctgtcatcgagcgagcactttgtgagatcacacg

SEQ ID NO: 3491 - DNA, 40 bp, Artificial Sequence
  Synthetic Oligonucleotide
cgctatctgtcatcgagcgagcacgttgtgcgatcacaca

SEQ ID NO: 3492 - DNA, 40 bp, Artificial Sequence
  Synthetic Oligonucleotide
cgctatcgcctatcgagcgaacacgtgttgccgtttcgtg

SEQ ID NO: 3493 - DNA, 40 bp, Artificial Sequence
  Synthetic Oligonucleotide
cgctatcgccatcgagcgaacagtgtgccgttttcggttg

SEQ ID NO: 3494 - DNA, 40 bp, Artificial Sequence
  Synthetic Oligonucleotide
cgctatcctcatcgagcgggttcttcgataatatgcaaca

SEQ ID NO: 3495 - DNA, 40 bp, Artificial Sequence
  Synthetic Oligonucleotide
cgctatccgtttgtccgtcctcttgtggtattgcgcgtgc

SEQ ID NO: 3496 - DNA, 40 bp, Artificial Sequence
  Synthetic Oligonucleotide
cgctatccgtttgtccgtcctcttgtggtatcgcgcatgc

SEQ ID NO: 3497 - DNA, 40 bp, Artificial Sequence
  Synthetic Oligonucleotide
cgctatccgtttgtccgtcctctcgtggtatcgcgcatgc

SEQ ID NO: 3498 - DNA, 40 bp, Artificial Sequence
  Synthetic Oligonucleotide
cgctatccgttgtccgtcctcttgtcggtattgcgcatgc

SEQ ID NO: 3499 - DNA, 40 bp, Artificial Sequence
  Synthetic Oligonucleotide
cgctatccgtcatcgagcgcatgatatgcgtctgcttgtt

SEQ ID NO: 3500 - DNA, 40 bp, Artificial Sequence
  Synthetic Oligonucleotide
cgctatccgtcatcgagcgcatgatatgcgtctgcttatt

SEQ ID NO: 3501 - DNA, 40 bp, Artificial Sequence
  Synthetic Oligonucleotide
cgctatccgtatcgagcgggttcttcgataatatgcaaca

SEQ ID NO: 3502 - DNA, 40 bp, Artificial Sequence
  Synthetic Oligonucleotide
cgctatccgtagatccgtctctcactacgcgtatggaatc

SEQ ID NO: 3503 - DNA, 40 bp, Artificial Sequence
  Synthetic Oligonucleotide
cgctatccgtagatccgtcgctcactacgcgtatggaatc

SEQ ID NO: 3504 - DNA, 40 bp, Artificial Sequence
  Synthetic Oligonucleotide
cgctatccgtagatccgtcactcactacgcgtatggaacc

SEQ ID NO: 3505 - DNA, 40 bp, Artificial Sequence
  Synthetic Oligonucleotide
cgctatccgtagataacgtcctctcctgggctcaatgttt

SEQ ID NO: 3506 - DNA, 40 bp, Artificial Sequence
  Synthetic Oligonucleotide
cgctatccgtagataacgtcctctcctgggcccaatgttt

SEQ ID NO: 3507 - skipped

SEQ ID NO: 3508 - DNA, 40 bp, Artificial Sequence
  Synthetic Oligonucleotide
cgctatccggaagtcgagtcttgagtgtctgtaacacgta

SEQ ID NO: 3509 - DNA, 40 bp, Artificial Sequence
  Synthetic Oligonucleotide
cgctatccgcttgtccgtcctcttgtggtattgcgcatgc

SEQ ID NO: 3510 - DNA, 40 bp, Artificial Sequence
  Synthetic Oligonucleotide
cgctatccgcttggggcgttcttctctacatttcgttacg

SEQ ID NO: 3511 - DNA, 40 bp, Artificial Sequence
  Synthetic Oligonucleotide
cgctatccgcttggggcgttcttctcaacatttcggtacg

SEQ ID NO: 3512 - DNA, 40 bp, Artificial Sequence
  Synthetic Oligonucleotide
cgctatccgcttgagcgtttctcctgctcggttaacctga

SEQ ID NO: 3513 - DNA, 40 bp, Artificial Sequence
  Synthetic Oligonucleotide
cgctatccgccatcgagcgtaacagtgtgccgtttcggtg

SEQ ID NO: 3514 - DNA, 40 bp, Artificial Sequence
  Synthetic Oligonucleotide
cgctatccgccatcgagcggacagtgtgccgttttcggtg

SEQ ID NO: 3515 - DNA, 40 bp, Artificial Sequence
  Synthetic Oligonucleotide
cgctatccgccatcgagcgaagagtgtgccgttttcggtg

SEQ ID NO: 3516 - DNA, 40 bp, Artificial Sequence
  Synthetic Oligonucleotide
cgctatccgccatcgagcgaacggtgtgccgttttcggtg

SEQ ID NO: 3517 - DNA, 40 bp, Artificial Sequence
  Synthetic Oligonucleotide
cgctatccgccatcgagcgaacagtgtgccgtttttggtg

SEQ ID NO: 3518 - DNA, 40 bp, Artificial Sequence
  Synthetic Oligonucleotide
cgctatccgccatcgagcgaacagtgtgccgttttcggtt

SEQ ID NO: 3519 - DNA, 40 bp, Artificial Sequence
  Synthetic Oligonucleotide
cgctatccgccatcgagcgaacagtgtgccgttttcggta

SEQ ID NO: 3520 - DNA, 40 bp, Artificial Sequence
  Synthetic Oligonucleotide
cgctatccgccatcgagcgaacagtgtgccgttttcggcg

SEQ ID NO: 3521 - DNA, 40 bp, Artificial Sequence
  Synthetic Oligonucleotide
cgctatccgccatcgagcgaacagtgtgccgttttcgctg

SEQ ID NO: 3522 - DNA, 40 bp, Artificial Sequence
  Synthetic Oligonucleotide
cgctatccgccatcgagcgaacagtgtgccgtcttcggtg

SEQ ID NO: 3523 - DNA, 40 bp, Artificial Sequence
  Synthetic Oligonucleotide
cgctatccgccatcgagcgaacagtgtgcccgtttcggtg

SEQ ID NO: 3524 - DNA, 40 bp, Artificial Sequence
  Synthetic Oligonucleotide
cgctatccgccatcgagcgaacagtgtgcagttttcggtg

SEQ ID NO: 3525 - DNA, 40 bp, Artificial Sequence
  Synthetic Oligonucleotide
cgctatccgccatcgagcgaacagtgcgccgttttcggtg

SEQ ID NO: 3526 - DNA, 40 bp, Artificial Sequence
  Synthetic Oligonucleotide
cgctatccgccaccgagcgaacagtgtgccgttctcggtg

SEQ ID NO: 3527 - DNA, 40 bp, Artificial Sequence
  Synthetic Oligonucleotide
cgctatccgccaacgagcgaacagtgtgccgttttcggtg

SEQ ID NO: 3528 - DNA, 40 bp, Artificial Sequence
  Synthetic Oligonucleotide
cgctatccgcattgagcgggttcttcgataatatgcaaca

SEQ ID NO: 3529 - DNA, 40 bp, Artificial Sequence
  Synthetic Oligonucleotide
cgctatccgcatcgagcgggtttttcgataatatgcaaca

SEQ ID NO: 3530 - DNA, 40 bp, Artificial Sequence
  Synthetic Oligonucleotide
cgctatccgcatcgagcgggttcttcggtaatatgcaaca

SEQ ID NO: 3531 - DNA, 40 bp, Artificial Sequence
  Synthetic Oligonucleotide
cgctatccgcatcgagcgggttcttcgatgatatgcaaca

SEQ ID NO: 3532 - DNA, 40 bp, Artificial Sequence
  Synthetic Oligonucleotide
cgctatccgcatcgagcgggttcttcgataatatgcaacg

SEQ ID NO: 3533 - DNA, 40 bp, Artificial Sequence
  Synthetic Oligonucleotide
cgctatccgcatcgagcgggttcgtcgataatatgcaaca

SEQ ID NO: 3534 - DNA, 40 bp, Artificial Sequence
  Synthetic Oligonucleotide
cgctatccgcatcgagcgggtccttcgataatatgcaaca

SEQ ID NO: 3535 - DNA, 40 bp, Artificial Sequence
  Synthetic Oligonucleotide
cgctatccgcatcgagcggctcttctcataatatgcaaca

SEQ ID NO: 3536 - DNA, 40 bp, Artificial Sequence
  Synthetic Oligonucleotide
cgctatccgcatcgagcgatcgtcgtaatactgcttccaa

SEQ ID NO: 3537 - DNA, 40 bp, Artificial Sequence
  Synthetic Oligonucleotide
cgctatccgcatcgagcaggttcttcgataatatgcaaca

SEQ ID NO: 3538 - DNA, 40 bp, Artificial Sequence
  Synthetic Oligonucleotide
cgctatccgcatcaagcgggttcttcgataatatgcaaca

SEQ ID NO: 3539 - DNA, 40 bp, Artificial Sequence
  Synthetic Oligonucleotide
cgctatccgcaccgagtgaggtaacacccgtattcgggta

SEQ ID NO: 3540 - DNA, 40 bp, Artificial Sequence
  Synthetic Oligonucleotide
cgctatccgcaccgagcgggttcttcgataatatgcaaca

SEQ ID NO: 3541 - DNA, 40 bp, Artificial Sequence
  Synthetic Oligonucleotide
cgctatccgacatcgagagagctacgtcatcaagcgctaa

SEQ ID NO: 3542 - DNA, 40 bp, Artificial Sequence
  Synthetic Oligonucleotide
cgctatccgaatcgagcttgggtgtctggttaaacaacga

SEQ ID NO: 3543 - DNA, 40 bp, Artificial Sequence
  Synthetic Oligonucleotide
cgctatccgaatcgagcttgagtgtctggttgaacgacga

SEQ ID NO: 3544 - DNA, 40 bp, Artificial Sequence
  Synthetic Oligonucleotide
cgctatccgaatcgagcttgagtgtctggttaatcaacga

SEQ ID NO: 3545 - DNA, 40 bp, Artificial Sequence
  Synthetic Oligonucleotide
cgctatccgaatcgagcttgagtgtctggttaaactacga

SEQ ID NO: 3546 - DNA, 40 bp, Artificial Sequence
  Synthetic Oligonucleotide
cgctatccgaatcgagcttgagtgtctggttaaacaacta

SEQ ID NO: 3547 - DNA, 40 bp, Artificial Sequence
  Synthetic Oligonucleotide
cgctatccgaatcgagcttgagtgtctggttaaacaacgt

SEQ ID NO: 3548 - DNA, 40 bp, Artificial Sequence
  Synthetic Oligonucleotide
cgctatccgaatcgagcttgagtgtctggttaaacaacaa

SEQ ID NO: 3549 - DNA, 40 bp, Artificial Sequence
  Synthetic Oligonucleotide
cgctatccgaatcgagcttgagtgtctggttaaaaacaga

SEQ ID NO: 3550 - DNA, 40 bp, Artificial Sequence
  Synthetic Oligonucleotide
cgctatccgaatcgagcttgagtgtccggttaaacaacga

SEQ ID NO: 3551 - DNA, 40 bp, Artificial Sequence
  Synthetic Oligonucleotide
cgctatccgaatcgagcttgagtgcctggttaaacaacga

SEQ ID NO: 3552 - DNA, 40 bp, Artificial Sequence
  Synthetic Oligonucleotide
cgctatccgaatcgagcttgagtgactggttaaacaacga

SEQ ID NO: 3553 - DNA, 40 bp, Artificial Sequence
  Synthetic Oligonucleotide
cgctatccgaatcgagctcgagtgtctggttaaacaacga

SEQ ID NO: 3554 - DNA, 40 bp, Artificial Sequence
  Synthetic Oligonucleotide
cgctatccgaatcgagcatgagtgtctggttaaacaacga

SEQ ID NO: 3555 - DNA, 40 bp, Artificial Sequence
  Synthetic Oligonucleotide
cgctatccgaaccgagcttgagtgtctggttaaacaacga

SEQ ID NO: 3556 - DNA, 40 bp, Artificial Sequence
  Synthetic Oligonucleotide
cgctatccgaaatcgagcgagaactctggtgttggcgcag

SEQ ID NO: 3557 - DNA, 40 bp, Artificial Sequence
  Synthetic Oligonucleotide
cgctatccccatcgagcgatcgtcgtaatactgcttccaa

SEQ ID NO: 3558 - DNA, 40 bp, Artificial Sequence
  Synthetic Oligonucleotide
cgctatccaaatcgagcttgagtgtctggttaaacaacga

SEQ ID NO: 3559 - DNA, 40 bp, Artificial Sequence
  Synthetic Oligonucleotide
cgctacccgcaccgagcgggttcttcgataatatgcaaca

SEQ ID NO: 3560 - DNA, 40 bp, Artificial Sequence
  Synthetic Oligonucleotide
cgctaatctgcattcgagcgagcacttgtgcgatcacaca

SEQ ID NO: 3561 - DNA, 40 bp, Artificial Sequence
  Synthetic Oligonucleotide
cgcgtttgtaaacgtcaccgccttgttcctacctgcgctg

SEQ ID NO: 3562 - DNA, 40 bp, Artificial Sequence
  Synthetic Oligonucleotide
cgcgtcttcccgcattgccgtcaattgccatacattaata

SEQ ID NO: 3563 - DNA, 40 bp, Artificial Sequence
  Synthetic Oligonucleotide
cgcgtcttcccgcacttgccgcaattgccatacattaata

SEQ ID NO: 3564 - DNA, 40 bp, Artificial Sequence
  Synthetic Oligonucleotide
cgcgtcttccccgcattgccgcaattgccatacgttaata

SEQ ID NO: 3565 - DNA, 40 bp, Artificial Sequence
  Synthetic Oligonucleotide
cgcgtcttccccgcattgccgcaattgccatacattagta

SEQ ID NO: 3566 - DNA, 40 bp, Artificial Sequence
  Synthetic Oligonucleotide
cgcgtcttccccgcattgccgcaattgccatacattaatg

SEQ ID NO: 3567 - DNA, 40 bp, Artificial Sequence
  Synthetic Oligonucleotide
cgcgtcttccccgattgccgcaattgccaatacattaata

SEQ ID NO: 3568 - DNA, 40 bp, Artificial Sequence
  Synthetic Oligonucleotide
cgcgtcttccccccattgccgcaattgccatacattaata

SEQ ID NO: 3569 - DNA, 40 bp, Artificial Sequence
  Synthetic Oligonucleotide
cgcgtctcccctgcattgccgcaattgccatacattaata

SEQ ID NO: 3570 - DNA, 40 bp, Artificial Sequence
  Synthetic Oligonucleotide
cgcgcttgcctcggatcgcgcgaacttctcccgtattgcg

SEQ ID NO: 3571 - DNA, 40 bp, Artificial Sequence
  Synthetic Oligonucleotide
cgcgccacctcttgtcctcgtcaacaaaacgatgcgtacg

SEQ ID NO: 3572 - DNA, 40 bp, Artificial Sequence
  Synthetic Oligonucleotide
cgcgccacctcgatctggaccgcaatatcatgatatgtca

SEQ ID NO: 3573 - DNA, 40 bp, Artificial Sequence
  Synthetic Oligonucleotide
cgcgcagcctcggtcctactcagcatggccatgccattat

SEQ ID NO: 3574 - DNA, 40 bp, Artificial Sequence
  Synthetic Oligonucleotide
cgcgcagcctcggtcctacacagcatggccatgcggttat

SEQ ID NO: 3575 - DNA, 40 bp, Artificial Sequence
  Synthetic Oligonucleotide
cgcgcagcctcggtcctacacagcatggccacgccgttat

SEQ ID NO: 3576 - DNA, 40 bp, Artificial Sequence
  Synthetic Oligonucleotide
cgccttggccctcgctttcggtgcactgactcgctttctg

SEQ ID NO: 3577 - DNA, 40 bp, Artificial Sequence
  Synthetic Oligonucleotide
cgccttgctcctcacaccggtggtactctcgccatgttaa

SEQ ID NO: 3578 - DNA, 40 bp, Artificial Sequence
  Synthetic Oligonucleotide
cgccttgatcctcgctttcggtgcactgactcgctgtctg

SEQ ID NO: 3579 - DNA, 40 bp, Artificial Sequence
  Synthetic Oligonucleotide
cgccttgatccgcctccgtgcacggatagcacttgtgata

SEQ ID NO: 3580 - DNA, 40 bp, Artificial Sequence
  Synthetic Oligonucleotide
cgccttgaaattccctatatatgcatatatcagtctaggc

SEQ ID NO: 3581 - DNA, 40 bp, Artificial Sequence
  Synthetic Oligonucleotide
cgccttcgaacactgacgtcgcggaaccttcgattgctag

SEQ ID NO: 3582 - DNA, 40 bp, Artificial Sequence
  Synthetic Oligonucleotide
cgccttcgaaattcctatatatgcatatatcagtctaggc

SEQ ID NO: 3583 - DNA, 40 bp, Artificial Sequence
  Synthetic Oligonucleotide
cgcctgtagtcgtcccgtgcgtatgggtcgaaatgccgct

SEQ ID NO: 3584 - DNA, 40 bp, Artificial Sequence
  Synthetic Oligonucleotide
cgcctgcctcgatcctccacctatagttcctccctgtgca

SEQ ID NO: 3585 - DNA, 40 bp, Artificial Sequence
  Synthetic Oligonucleotide
cgcctctgtccaccggaaacacacatatgtgcagcgtctg

SEQ ID NO: 3586 - DNA, 40 bp, Artificial Sequence
  Synthetic Oligonucleotide
cgcctcgtttccttactgcagtaagtgttacatgttatgt

SEQ ID NO: 3587 - DNA, 40 bp, Artificial Sequence
  Synthetic Oligonucleotide
cgcctcggttctctaacgtgtccggccgtaaaacaatctg

SEQ ID NO: 3588 - DNA, 40 bp, Artificial Sequence
  Synthetic Oligonucleotide
cgcctcgatcacatactagtaacaatgatcatcgtaacta

SEQ ID NO: 3589 - DNA, 40 bp, Artificial Sequence
  Synthetic Oligonucleotide
cgcctcgatatgcagtcatgttctagaacgcttcccactg

SEQ ID NO: 3590 - DNA, 40 bp, Artificial Sequence
  Synthetic Oligonucleotide
cgcctcgaaattcctatatatgcatatatctagtctaggc

SEQ ID NO: 3591 - DNA, 40 bp, Artificial Sequence
  Synthetic Oligonucleotide
cgcctcgaaattccctatatatgcatatatcagtccaggc

SEQ ID NO: 3592 - DNA, 40 bp, Artificial Sequence
  Synthetic Oligonucleotide
cgcctcgaaattccctatatatgcatataccagtctaggc

SEQ ID NO: 3593 - DNA, 40 bp, Artificial Sequence
  Synthetic Oligonucleotide
cgcctcgaaattccccatatatgcatatatcagtctaggc

SEQ ID NO: 3594 - DNA, 40 bp, Artificial Sequence
  Synthetic Oligonucleotide
cgcctcgaaactccctatatatgcatatatcagtctaggc

SEQ ID NO: 3595 - DNA, 40 bp, Artificial Sequence
  Synthetic Oligonucleotide
cgcctatccgcatcgagcgggtctcgataatatgtcaaca

SEQ ID NO: 3596 - DNA, 40 bp, Artificial Sequence
  Synthetic Oligonucleotide
cgcctacctctcgcatccatacctcctgtgatcacgaaaa

SEQ ID NO: 3597 - DNA, 40 bp, Artificial Sequence
  Synthetic Oligonucleotide
cgccggcctcggtcctgttgaaacgtttcaaggaggcgtg

SEQ ID NO: 3598 - DNA, 40 bp, Artificial Sequence
  Synthetic Oligonucleotide
cgccgccttgctcttctctcgacgtatacgtatacggtga

SEQ ID NO: 3599 - DNA, 40 bp, Artificial Sequence
  Synthetic Oligonucleotide
cgccgccttgctcatcctatcgcaccggtgaatgttataa

SEQ ID NO: 3600 - DNA, 40 bp, Artificial Sequence
  Synthetic Oligonucleotide
cgccgcctcgaatctttcctaatacatatgtacacgcacg

SEQ ID NO: 3601 - DNA, 40 bp, Artificial Sequence
  Synthetic Oligonucleotide
cgccgcctccgatcctccattgggtggccataccattgta

SEQ ID NO: 3602 - DNA, 40 bp, Artificial Sequence
  Synthetic Oligonucleotide
cgccgcctcagtcctgcagtttaattaaacatgatgcatc

SEQ ID NO: 3603 - DNA, 40 bp, Artificial Sequence
  Synthetic Oligonucleotide
cgccccatcgttgcctattgatctcggaatgctagcacca

SEQ ID NO: 3604 - DNA, 40 bp, Artificial Sequence
  Synthetic Oligonucleotide
cgccatccgcttcgagcgactcgtcacttgctttcaaagc

SEQ ID NO: 3605 - DNA, 40 bp, Artificial Sequence
  Synthetic Oligonucleotide
cgccatccgccatcgagcgaacagtgtgccgttttcggtg

SEQ ID NO: 3606 - DNA, 40 bp, Artificial Sequence
  Synthetic Oligonucleotide
cgccatccgcatcgagcgggttcttcgataatatgcaaca

SEQ ID NO: 3607 - DNA, 40 bp, Artificial Sequence
  Synthetic Oligonucleotide
cgccatccgcatcgagcgggttcttcgataacatgcaaca

SEQ ID NO: 3608 - DNA, 40 bp, Artificial Sequence
  Synthetic Oligonucleotide
cgccacctctgtcttccgagcatcccggggtttgctcgtg

SEQ ID NO: 3609 - DNA, 40 bp, Artificial Sequence
  Synthetic Oligonucleotide
cgccacctcagtccttaggttaaccaattacttcgtcgta

SEQ ID NO: 3610 - DNA, 40 bp, Artificial Sequence
  Synthetic Oligonucleotide
cgccacatcggatcgatcctagctacatgtacctacgatt

SEQ ID NO: 3611 - DNA, 40 bp, Artificial Sequence
  Synthetic Oligonucleotide
cgcattctcatccccctttcgatcctcctttctttctggc

SEQ ID NO: 3612 - DNA, 40 bp, Artificial Sequence
  Synthetic Oligonucleotide
cgcacgactaatgcattggttttgtccacctttctctgta

SEQ ID NO: 3613 - DNA, 40 bp, Artificial Sequence
  Synthetic Oligonucleotide
cgcaatatattgtgattgcctctctccccaaatgcgtttg

SEQ ID NO: 3614 - DNA, 40 bp, Artificial Sequence
  Synthetic Oligonucleotide
cgattcggtccggatcacgcctcggtcctgtaatacgccg

SEQ ID NO: 3615 - DNA, 40 bp, Artificial Sequence
  Synthetic Oligonucleotide
cgatgggctttagctcactctcggtaacttgggcagttac

SEQ ID NO: 3616 - DNA, 40 bp, Artificial Sequence
  Synthetic Oligonucleotide
cgatgcttgatctcctgtcgactctgcggctgagactact

SEQ ID NO: 3617 - DNA, 40 bp, Artificial Sequence
  Synthetic Oligonucleotide
cgagtgtatgtccaccgtacgccccagtttgatccatgga

SEQ ID NO: 3618 - DNA, 40 bp, Artificial Sequence
  Synthetic Oligonucleotide
cgagtgcttgatgtatagccgcctcgcgcctctaaggaca

SEQ ID NO: 3619 - DNA, 40 bp, Artificial Sequence
  Synthetic Oligonucleotide
cgagtgcttctcgggtccagtttacgccctttggcctcca

SEQ ID NO: 3620 - DNA, 40 bp, Artificial Sequence
  Synthetic Oligonucleotide
cgagtcggcagaatcgcatcctccttcatcgttctactcc

SEQ ID NO: 3621 - DNA, 40 bp, Artificial Sequence
  Synthetic Oligonucleotide
cgagtcctcgtcttcctaattaccatggtacgctcgcctg

SEQ ID NO: 3622 - DNA, 40 bp, Artificial Sequence
  Synthetic Oligonucleotide
cgagtatggcctgtaaacaatgtttacaccaccgctaccg

SEQ ID NO: 3623 - DNA, 40 bp, Artificial Sequence
  Synthetic Oligonucleotide
cgacttctcggatctactcaggccgcacgccctgagtctg

SEQ ID NO: 3624 - DNA, 40 bp, Artificial Sequence
  Synthetic Oligonucleotide
cgactatcgctgatcgagtgagcgtcacgaaaacaggctt

SEQ ID NO: 3625 - DNA, 40 bp, Artificial Sequence
  Synthetic Oligonucleotide
cgaatttgcgatgattttctgacgctattcagtttccgat

SEQ ID NO: 3626 - DNA, 40 bp, Artificial Sequence
  Synthetic Oligonucleotide
cgaatgcttgatctcctgtcgactctgcgctgagactact

SEQ ID NO: 3627 - DNA, 40 bp, Artificial Sequence
  Synthetic Oligonucleotide
ccttttcgttcacctgtgcacaccgcaaagctggtcgttt

SEQ ID NO: 3628 - DNA, 40 bp, Artificial Sequence
  Synthetic Oligonucleotide
cctttcagggcccaatgccgcattatcatcctatgttctg

SEQ ID NO: 3629 - DNA, 40 bp, Artificial Sequence
  Synthetic Oligonucleotide
ccttgccatggcattcccgtctcgacctatcgactgtgca

SEQ ID NO: 3630 - DNA, 40 bp, Artificial Sequence
  Synthetic Oligonucleotide
ccttctacgtcgcaggacgtctttcgtgcactacacgatt

SEQ ID NO: 3631 - DNA, 40 bp, Artificial Sequence
  Synthetic Oligonucleotide
ccttccagggcccaatgccgcatcatcatcctatgttctg

SEQ ID NO: 3632 - DNA, 40 bp, Artificial Sequence
  Synthetic Oligonucleotide
ccttccagggcccaacgccgcattatcatcctatgttctg

SEQ ID NO: 3633 - DNA, 40 bp, Artificial Sequence
  Synthetic Oligonucleotide
ccttatcgtccgaggacgtctttcgtgcactatcacgatt

SEQ ID NO: 3634 - DNA, 40 bp, Artificial Sequence
  Synthetic Oligonucleotide
cctgtcttcgtccactcttttcggatcctgcatacaggta

SEQ ID NO: 3635 - DNA, 40 bp, Artificial Sequence
  Synthetic Oligonucleotide
cctgataattacttcgggactacccgattacctaattttt

SEQ ID NO: 3636 - DNA, 40 bp, Artificial Sequence
  Synthetic Oligonucleotide
cctcttatccggcaggacgtctttcgtgcactatcacgat

SEQ ID NO: 3637 - DNA, 40 bp, Artificial Sequence
  Synthetic Oligonucleotide
cctctgtccgtcccggtcgcatcacaaagatcttactggc

SEQ ID NO: 3638 - DNA, 40 bp, Artificial Sequence
  Synthetic Oligonucleotide
cctcgtatcttccggtaattaccacatacgtacacgtctg

SEQ ID NO: 3639 - DNA, 40 bp, Artificial Sequence
  Synthetic Oligonucleotide
cctcgtatctcccggtaattaccacgtacgtacatgtctg

SEQ ID NO: 3640 - DNA, 40 bp, Artificial Sequence
  Synthetic Oligonucleotide
cctcgtacctcccggtaattaccacgtacgtacatgtctg

SEQ ID NO: 3641 - DNA, 40 bp, Artificial Sequence
  Synthetic Oligonucleotide
cctcggattcctctatggcgcgcttgccggcttactctcg

SEQ ID NO: 3642 - DNA, 40 bp, Artificial Sequence
  Synthetic Oligonucleotide
cctcggacttctcttctcgttacgtaacacgctatagcag

SEQ ID NO: 3643 - DNA, 40 bp, Artificial Sequence
  Synthetic Oligonucleotide
cctcggaccttctgctagctgatggcatgtcattcgttta

SEQ ID NO: 3644 - DNA, 40 bp, Artificial Sequence
  Synthetic Oligonucleotide
cctcgcctccgttcggatccgtgcatgcacacgatgttag

SEQ ID NO: 3645 - DNA, 40 bp, Artificial Sequence
  Synthetic Oligonucleotide
cctcgcatcttccggtaattaccacgtacgtacatgtctg

SEQ ID NO: 3646 - DNA, 40 bp, Artificial Sequence
  Synthetic Oligonucleotide
cctcgattctctgagctacccgcggtagtaaatcgtatgc

SEQ ID NO: 3647 - DNA, 40 bp, Artificial Sequence
  Synthetic Oligonucleotide
cctcgatccccttttgcgcctaggcctgcattcgaatgca

SEQ ID NO: 3648 - DNA, 40 bp, Artificial Sequence
  Synthetic Oligonucleotide
cctcgatccccttttacgcctaggcctgcattcgaatgca

SEQ ID NO: 3649 - DNA, 40 bp, Artificial Sequence
  Synthetic Oligonucleotide
cctcgatacctcgctttgcatgcaaaaagctacgtatggc

SEQ ID NO: 3650 - DNA, 40 bp, Artificial Sequence
  Synthetic Oligonucleotide
cctcgatacctcgctttgcaatgcaaaaactacgtatggc

SEQ ID NO: 3651 - DNA, 40 bp, Artificial Sequence
  Synthetic Oligonucleotide
cctcgaatcttccggtaattaccacgtacgtacatgtctg

SEQ ID NO: 3652 - DNA, 40 bp, Artificial Sequence
  Synthetic Oligonucleotide
cctcctcgaacactgacgtcgtggaaccttcgattgctag

SEQ ID NO: 3653 - DNA, 40 bp, Artificial Sequence
  Synthetic Oligonucleotide
cctattgcatgcatatgctagacacgtccaacattgctgg

SEQ ID NO: 3654 - DNA, 40 bp, Artificial Sequence
  Synthetic Oligonucleotide
cctagtgatttcgccgcccctctgtttagtggccattgga

SEQ ID NO: 3655 - DNA, 40 bp, Artificial Sequence
  Synthetic Oligonucleotide
cctaggctttcacgcacgcggattgtacccgaactgggtt

SEQ ID NO: 3656 - DNA, 40 bp, Artificial Sequence
  Synthetic Oligonucleotide
cctaggcgccttgagcttccccaggtgtgccaccaatgtt

SEQ ID NO: 3657 - DNA, 40 bp, Artificial Sequence
  Synthetic Oligonucleotide
ccgttcctcgtctccaatgcattgcactgtatacagtaaa

SEQ ID NO: 3658 - DNA, 40 bp, Artificial Sequence
  Synthetic Oligonucleotide
ccgtgtcgtgattttcggatccactcacagaaatttctga

SEQ ID NO: 3659 - DNA, 40 bp, Artificial Sequence
  Synthetic Oligonucleotide
ccgtgattagctagtcgtgctttgtccgctatgacattca

SEQ ID NO: 3660 - DNA, 40 bp, Artificial Sequence
  Synthetic Oligonucleotide
ccgtgatcagctagttgtgctttgtccgctatgacattca

SEQ ID NO: 3661 - DNA, 40 bp, Artificial Sequence
  Synthetic Oligonucleotide
ccgtgatcagctagtcgtgctttgcccgctatgacattca

SEQ ID NO: 3662 - DNA, 40 bp, Artificial Sequence
  Synthetic Oligonucleotide
ccgtgatcagctagtcgtgccttgtccgctatgacattca

SEQ ID NO: 3663 - DNA, 40 bp, Artificial Sequence
  Synthetic Oligonucleotide
ccgtgatcagctagtcgtactttgtccgctatgacattca

SEQ ID NO: 3664 - DNA, 40 bp, Artificial Sequence
  Synthetic Oligonucleotide
ccgtgatagctcagtcgtgctttgtccgctatgacattca

SEQ ID NO: 3665 - DNA, 40 bp, Artificial Sequence
  Synthetic Oligonucleotide
ccgtcttcccgtgtcgacatgtactgtctgggccgcaatc

SEQ ID NO: 3666 - DNA, 40 bp, Artificial Sequence
  Synthetic Oligonucleotide
ccgtctcgtctgcgatcctcaggtgtggcctcactcccaa

SEQ ID NO: 3667 - DNA, 40 bp, Artificial Sequence
  Synthetic Oligonucleotide
ccgtctcggttgtcgtctcttgcaagactacttgcttatg

SEQ ID NO: 3668 - DNA, 40 bp, Artificial Sequence
  Synthetic Oligonucleotide
ccgtctcggattctatacatgtatagatctgtcctgccgg

SEQ ID NO: 3669 - DNA, 40 bp, Artificial Sequence
  Synthetic Oligonucleotide
ccgtcctcgcgtcgtgtacacgaagacctccggagatttg

SEQ ID NO: 3670 - DNA, 40 bp, Artificial Sequence
  Synthetic Oligonucleotide
ccgtcctcaggttccctaacgcgtttagccttccggaata

SEQ ID NO: 3671 - DNA, 40 bp, Artificial Sequence
  Synthetic Oligonucleotide
ccgtcaccccgatagtcatcttcactggacacccgtgtta

SEQ ID NO: 3672 - DNA, 40 bp, Artificial Sequence
  Synthetic Oligonucleotide
ccgtacttgtcgcacctcgtactcagcggctgacgctatt

SEQ ID NO: 3673 - DNA, 40 bp, Artificial Sequence
  Synthetic Oligonucleotide
ccgtacttgtcacacctcgtacttggcggctgacgctatt

SEQ ID NO: 3674 - DNA, 40 bp, Artificial Sequence
  Synthetic Oligonucleotide
ccgtacctgtcgcacctcgtacttggcggctgacgctatt

SEQ ID NO: 3675 - DNA, 40 bp, Artificial Sequence
  Synthetic Oligonucleotide
ccgtacctgtcgcacctcgtactgggcggctgacgctatt

SEQ ID NO: 3676 - DNA, 40 bp, Artificial Sequence
  Synthetic Oligonucleotide
ccgtaccccgatagtcatcttcactggaccacccgtgcta

SEQ ID NO: 3677 - DNA, 40 bp, Artificial Sequence
  Synthetic Oligonucleotide
ccgtaaatcctccatgcgcgcgcacggatcctgtactgca

SEQ ID NO: 3678 - DNA, 40 bp, Artificial Sequence
  Synthetic Oligonucleotide
ccggtttcttctcctgactacatgagattaataaacgcgc

SEQ ID NO: 3679 - DNA, 40 bp, Artificial Sequence
  Synthetic Oligonucleotide
ccggttcgtttcctctgtgttcgcacgttctccgtctgta

SEQ ID NO: 3680 - DNA, 40 bp, Artificial Sequence
  Synthetic Oligonucleotide
ccgggtctttatgtcgtctttgtaaggactacctgcatca

SEQ ID NO: 3681 - DNA, 40 bp, Artificial Sequence
  Synthetic Oligonucleotide
ccggctcgaagattagccgtcccacaagcttgcacttcac

SEQ ID NO: 3682 - DNA, 40 bp, Artificial Sequence
  Synthetic Oligonucleotide
ccggcctcgaacactgacgtcgtggaaccttcgatgctag

SEQ ID NO: 3683 - DNA, 40 bp, Artificial Sequence
  Synthetic Oligonucleotide
ccggcaccccgatagtcatcttcactggaccacccgtgta

SEQ ID NO: 3684 - DNA, 40 bp, Artificial Sequence
  Synthetic Oligonucleotide
ccgcttcttgccttcgagtaggggaattcacttacgtttg

SEQ ID NO: 3685 - DNA, 40 bp, Artificial Sequence
  Synthetic Oligonucleotide
ccgcgccccgatagtcatcttcactggaccacccgtgtta

SEQ ID NO: 3686 - DNA, 40 bp, Artificial Sequence
  Synthetic Oligonucleotide
ccgccttttcctctattcttcgaagaatgccactcggatg

SEQ ID NO: 3687 - DNA, 40 bp, Artificial Sequence
  Synthetic Oligonucleotide
ccgccttttcctctattcttcgaagaatgccactcgaatg

SEQ ID NO: 3688 - DNA, 40 bp, Artificial Sequence
  Synthetic Oligonucleotide
ccgcctttggtccttacgtctagacggggtttgtgtacag

SEQ ID NO: 3689 - DNA, 40 bp, Artificial Sequence
  Synthetic Oligonucleotide
ccgcctttggtcccccattgtttacgcgtaactagtgaaa

SEQ ID NO: 3690 - DNA, 40 bp, Artificial Sequence
  Synthetic Oligonucleotide
ccgccttgtcttcgtgcctgccctctcggacctaatttta

SEQ ID NO: 3691 - DNA, 40 bp, Artificial Sequence
  Synthetic Oligonucleotide
ccgccttggtcctcaggtaacgttatatccgtcacgcatg

SEQ ID NO: 3692 - DNA, 40 bp, Artificial Sequence
  Synthetic Oligonucleotide
ccgccttggtccccattagctagctagatacacgtgtgaa

SEQ ID NO: 3693 - DNA, 40 bp, Artificial Sequence
  Synthetic Oligonucleotide
ccgccttggtccccaccagctagccagatacacgtgtgaa

SEQ ID NO: 3694 - DNA, 40 bp, Artificial Sequence
  Synthetic Oligonucleotide
ccgccttggtcatcccttacatgtaggcctatgtctgaca

SEQ ID NO: 3695 - DNA, 40 bp, Artificial Sequence
  Synthetic Oligonucleotide
ccgccttggtcatcccctacatgtaggcctatgtctggcg

SEQ ID NO: 3696 - DNA, 40 bp, Artificial Sequence
  Synthetic Oligonucleotide
ccgccttggacctcgttgcatgcaagaatacgaaagagta

SEQ ID NO: 3697 - DNA, 40 bp, Artificial Sequence
  Synthetic Oligonucleotide
ccgccttgattttcctgtagctacatatcttccggaatgc

SEQ ID NO: 3698 - DNA, 40 bp, Artificial Sequence
  Synthetic Oligonucleotide
ccgccttgatccttgaagcgcttgtggattctcgctctaa

SEQ ID NO: 3699 - DNA, 40 bp, Artificial Sequence
  Synthetic Oligonucleotide
ccgccttgatcctctaatgtcattgggcatcgtgactggc

SEQ ID NO: 3700 - DNA, 40 bp, Artificial Sequence
  Synthetic Oligonucleotide
ccgccttgatcatccaaataagcttacgagtactactctg

SEQ ID NO: 3701 - DNA, 40 bp, Artificial Sequence
  Synthetic Oligonucleotide
ccgccttcggtccttattgcaatcgcgcggtgatctctga

SEQ ID NO: 3702 - DNA, 40 bp, Artificial Sequence
  Synthetic Oligonucleotide
ccgccttcgcgtcgtgtacacgaagacctccggagatttg

SEQ ID NO: 3703 - DNA, 40 bp, Artificial Sequence
  Synthetic Oligonucleotide
ccgccttcgaggttccctaacgcgttagccttccggaatg

SEQ ID NO: 3704 - DNA, 40 bp, Artificial Sequence
  Synthetic Oligonucleotide
ccgccttcaggttctcctaacgcgttagccttccggaatg

SEQ ID NO: 3705 - DNA, 40 bp, Artificial Sequence
  Synthetic Oligonucleotide
ccgccttcaggtccccctaacgcgttagccttccggaatg

SEQ ID NO: 3706 - DNA, 40 bp, Artificial Sequence
  Synthetic Oligonucleotide
ccgccttcacctctctcttgcgcaggatgtgagcggattg

SEQ ID NO: 3707 - DNA, 40 bp, Artificial Sequence
  Synthetic Oligonucleotide
ccgcctgggatcactctctgcgcgtataaatgctctgtca

SEQ ID NO: 3708 - DNA, 40 bp, Artificial Sequence
  Synthetic Oligonucleotide
ccgcctggatcactctcttacgcgtataaatgctctgtca

SEQ ID NO: 3709 - DNA, 40 bp, Artificial Sequence
  Synthetic Oligonucleotide
ccgcctctttcctcttattggccactgcggtgcaccgcga

SEQ ID NO: 3710 - DNA, 40 bp, Artificial Sequence
  Synthetic Oligonucleotide
ccgcctctttccctctggccaacctcggatcacaacaaac

SEQ ID NO: 3711 - DNA, 40 bp, Artificial Sequence
  Synthetic Oligonucleotide
ccgcctcttgttccctcgatctagatcgcgtcttactagg

SEQ ID NO: 3712 - DNA, 40 bp, Artificial Sequence
  Synthetic Oligonucleotide
ccgcctcttgcctcagcaaagtagcccctatgtgcactaa

SEQ ID NO: 3713 - DNA, 40 bp, Artificial Sequence
  Synthetic Oligonucleotide
ccgcctcttcttgcaccgcgcgcgttttattaatcgtctg

SEQ ID NO: 3714 - DNA, 40 bp, Artificial Sequence
  Synthetic Oligonucleotide
ccgcctctgtcgttctctactaccgccggtaattgtactg

SEQ ID NO: 3715 - DNA, 40 bp, Artificial Sequence
  Synthetic Oligonucleotide
ccgcctctgtcccttgcacgtgcgcgtacacagttctagc

SEQ ID NO: 3716 - DNA, 40 bp, Artificial Sequence
  Synthetic Oligonucleotide
ccgcctctgtcaaagggttaacccatcctgatagtacgat

SEQ ID NO: 3717 - DNA, 40 bp, Artificial Sequence
  Synthetic Oligonucleotide
ccgcctctgcttctccaagaatcttctccctctaccggta

SEQ ID NO: 3718 - DNA, 40 bp, Artificial Sequence
  Synthetic Oligonucleotide
ccgcctctgctctccctctcggatcgcgtacgtggatatg

SEQ ID NO: 3719 - DNA, 40 bp, Artificial Sequence
  Synthetic Oligonucleotide
ccgcctctagcctccttgtaacctctccctaatgcgtctg

SEQ ID NO: 3720 - DNA, 40 bp, Artificial Sequence
  Synthetic Oligonucleotide
ccgcctctagcctccatgtaatctctccctgatgcgtctg

SEQ ID NO: 3721 - DNA, 40 bp, Artificial Sequence
  Synthetic Oligonucleotide
ccgcctcgtgcaccctcctcgcattagcttccacgttctg

SEQ ID NO: 3722 - DNA, 40 bp, Artificial Sequence
  Synthetic Oligonucleotide
ccgcctcggtgtctcttcttcgtccttcgctatagcgtaa

SEQ ID NO: 3723 - DNA, 40 bp, Artificial Sequence
  Synthetic Oligonucleotide
ccgcctcggatcgttcccaatggtggtgcccctattaatg

SEQ ID NO: 3724 - DNA, 40 bp, Artificial Sequence
  Synthetic Oligonucleotide
ccgcctcggatcgttcccaatggtggtgcccccattaatg

SEQ ID NO: 3725 - DNA, 40 bp, Artificial Sequence
  Synthetic Oligonucleotide
ccgcctcggatcgttcccaatggtggtacctctattaatg

SEQ ID NO: 3726 - DNA, 40 bp, Artificial Sequence
  Synthetic Oligonucleotide
ccgcctcggatcgttcccaatggtggtaccctacttaatg

SEQ ID NO: 3727 - DNA, 40 bp, Artificial Sequence
  Synthetic Oligonucleotide
ccgcctcggatcgttcccaatggtggtacccctgttaatg

SEQ ID NO: 3728 - DNA, 40 bp, Artificial Sequence
  Synthetic Oligonucleotide
ccgcctcggatcgttcccaatggtggtacccctattgatg

SEQ ID NO: 3729 - DNA, 40 bp, Artificial Sequence
  Synthetic Oligonucleotide
ccgcctcggatcgttcccaatggtggtacccctattagtg

SEQ ID NO: 3730 - DNA, 40 bp, Artificial Sequence
  Synthetic Oligonucleotide
ccgcctcggatcgttcccaatagtggtacccctattaatg

SEQ ID NO: 3731 - DNA, 40 bp, Artificial Sequence
  Synthetic Oligonucleotide
ccgcctcggatcgttcccaaaggtggtacccctattaatg

SEQ ID NO: 3732 - DNA, 40 bp, Artificial Sequence
  Synthetic Oligonucleotide
ccgcctcggatcattcccaatggtggtacccctattaatg

SEQ ID NO: 3733 - DNA, 40 bp, Artificial Sequence
  Synthetic Oligonucleotide
ccgcctcgcgtcttccgcacgattgttaacatgtgcacga

SEQ ID NO: 3734 - DNA, 40 bp, Artificial Sequence
  Synthetic Oligonucleotide
ccgcctcgcgtcgtgtacacgaagaccttccggagatttg

SEQ ID NO: 3735 - DNA, 40 bp, Artificial Sequence
  Synthetic Oligonucleotide
ccgcctcgcgtcgtgtacacgaagacctccggagatttta

SEQ ID NO: 3736 - DNA, 40 bp, Artificial Sequence
  Synthetic Oligonucleotide
ccgcctcgcgtcgtgtacacgaagacctccggagatttcg

SEQ ID NO: 3737 - DNA, 40 bp, Artificial Sequence
  Synthetic Oligonucleotide
ccgcctcgcgtcgtgtacacgaagacctccggagattctg

SEQ ID NO: 3738 - DNA, 40 bp, Artificial Sequence
  Synthetic Oligonucleotide
ccgcctcgcgccgtgtacacgaagacctccggagattttg

SEQ ID NO: 3739 - DNA, 40 bp, Artificial Sequence
  Synthetic Oligonucleotide
ccgcctcgccttaagttgcaacgttaatatctctcaacta

SEQ ID NO: 3740 - DNA, 40 bp, Artificial Sequence
  Synthetic Oligonucleotide
ccgcctcgcatctgaatgctccctgacattggtacgtacg

SEQ ID NO: 3741 - DNA, 40 bp, Artificial Sequence
  Synthetic Oligonucleotide
ccgcctcgcacacgcacgtgcaccactttccctcgtacga

SEQ ID NO: 3742 - DNA, 40 bp, Artificial Sequence
  Synthetic Oligonucleotide
ccgcctcgatttcttctcaagcagtactgttaaggcgtga

SEQ ID NO: 3743 - DNA, 40 bp, Artificial Sequence
  Synthetic Oligonucleotide
ccgcctcgatcctttataggtccttaccacaacctgtctg

SEQ ID NO: 3744 - DNA, 40 bp, Artificial Sequence
  Synthetic Oligonucleotide
ccgcctcgatccacatacaggctgacctgttcttttcgtc

SEQ ID NO: 3745 - DNA, 40 bp, Artificial Sequence
  Synthetic Oligonucleotide
ccgcctcgagtcctcacatacagatctgattgggccctat

SEQ ID NO: 3746 - DNA, 40 bp, Artificial Sequence
  Synthetic Oligonucleotide
ccgcctcgagtcatcccgtggcccgggcataacggaacta

SEQ ID NO: 3747 - DNA, 40 bp, Artificial Sequence
  Synthetic Oligonucleotide
ccgcctcgaatactgacgtcgtggaaccttcgattgctag

SEQ ID NO: 3748 - DNA, 40 bp, Artificial Sequence
  Synthetic Oligonucleotide
ccgcctcgaacacttgacgtcgtggaaccttcgatgctag

SEQ ID NO: 3749 - DNA, 40 bp, Artificial Sequence
  Synthetic Oligonucleotide
ccgcctcgaacactggcgtcgtggaaccttcaattgctag

SEQ ID NO: 3750 - DNA, 40 bp, Artificial Sequence
  Synthetic Oligonucleotide
ccgcctcgaacactggcgtcgtggaacctccgattgctag

SEQ ID NO: 3751 - DNA, 40 bp, Artificial Sequence
  Synthetic Oligonucleotide
ccgcctcgaacactgacgtggtggaaccttcgattgctag

SEQ ID NO: 3752 - DNA, 40 bp, Artificial Sequence
  Synthetic Oligonucleotide
ccgcctcgaacactgacgtcttggaaccttcgattgctag

SEQ ID NO: 3753 - DNA, 40 bp, Artificial Sequence
  Synthetic Oligonucleotide
ccgcctcgaacactgacgtcgtggtaccttcgattgctag

SEQ ID NO: 3754 - DNA, 40 bp, Artificial Sequence
  Synthetic Oligonucleotide
ccgcctcgaacactgacgtcgtgggacctccgattgctag

SEQ ID NO: 3755 - DNA, 40 bp, Artificial Sequence
  Synthetic Oligonucleotide
ccgcctcgaacactgacgtcgtggaaccttctattgctag

SEQ ID NO: 3756 - DNA, 40 bp, Artificial Sequence
  Synthetic Oligonucleotide
ccgcctcgaacactgacgtcgtggaaccttcgattgctgg

SEQ ID NO: 3757 - DNA, 40 bp, Artificial Sequence
  Synthetic Oligonucleotide
ccgcctcgaacactgacgtcgtggaaccttcgattgctaa

SEQ ID NO: 3758 - DNA, 40 bp, Artificial Sequence
  Synthetic Oligonucleotide
ccgcctcgaacactgacgtcgtggaacctccaattgctag

SEQ ID NO: 3759 - DNA, 40 bp, Artificial Sequence
  Synthetic Oligonucleotide
ccgcctcgaacactgacgtcggggaaccttcgattgctag

SEQ ID NO: 3760 - DNA, 40 bp, Artificial Sequence
  Synthetic Oligonucleotide
ccgcctcgaacactgacgtcgcgggaccttcgattgctag

SEQ ID NO: 3761 - DNA, 40 bp, Artificial Sequence
  Synthetic Oligonucleotide
ccgcctcgaacactgacgtcgcggaaccttcgattgctag

SEQ ID NO: 3762 - DNA, 40 bp, Artificial Sequence
  Synthetic Oligonucleotide
ccgcctcgaacactgacgtcatggaaccttcgattgctag

SEQ ID NO: 3763 - DNA, 40 bp, Artificial Sequence
  Synthetic Oligonucleotide
ccgcctcgaacacggacgtcgtggaaccttcgattgctag

SEQ ID NO: 3764 - DNA, 40 bp, Artificial Sequence
  Synthetic Oligonucleotide
ccgcctcgaacaatgacgtcgtggaacctttgattgctag

SEQ ID NO: 3765 - DNA, 40 bp, Artificial Sequence
  Synthetic Oligonucleotide
ccgcctccttcctccatgagcatgcttacttgggatactg

SEQ ID NO: 3766 - DNA, 40 bp, Artificial Sequence
  Synthetic Oligonucleotide
ccgcctccttcctccatgagcatgcttactcggaatactg

SEQ ID NO: 3767 - DNA, 40 bp, Artificial Sequence
  Synthetic Oligonucleotide
ccgcctccttcctccatgagcatgctcactcgggatactg

SEQ ID NO: 3768 - DNA, 40 bp, Artificial Sequence
  Synthetic Oligonucleotide
ccgcctccgttcgcctttcggatcctggtatgctgcccaa

SEQ ID NO: 3769 - DNA, 40 bp, Artificial Sequence
  Synthetic Oligonucleotide
ccgcctccgtctgatggaaattcgaattctgttacgtctg

SEQ ID NO: 3770 - DNA, 40 bp, Artificial Sequence
  Synthetic Oligonucleotide
ccgcctccgtcctttcaccctagggtaatagaaccggacg

SEQ ID NO: 3771 - DNA, 40 bp, Artificial Sequence
  Synthetic Oligonucleotide
ccgcctccgtcctttcaccctagggtaatagaaccggaca

SEQ ID NO: 3772 - DNA, 40 bp, Artificial Sequence
  Synthetic Oligonucleotide
ccgcctccaggttcccctaacgcgttagccttccggaata

SEQ ID NO: 3773 - DNA, 40 bp, Artificial Sequence
  Synthetic Oligonucleotide
ccgcctcatgtcctcggttgctctcgtccattgctctgta

SEQ ID NO: 3774 - DNA, 40 bp, Artificial Sequence
  Synthetic Oligonucleotide
ccgcctcagttcgcacgatatcgtggacgcatgcatgaca

SEQ ID NO: 3775 - DNA, 40 bp, Artificial Sequence
  Synthetic Oligonucleotide
ccgcctcagtcttttcccgtgcgccttcctcttctgtgcg

SEQ ID NO: 3776 - DNA, 40 bp, Artificial Sequence
  Synthetic Oligonucleotide
ccgcctcagtctataccggtatgtccagagctcatgtgac

SEQ ID NO: 3777 - DNA, 40 bp, Artificial Sequence
  Synthetic Oligonucleotide
ccgcctcagtcctggtggtaccacgacgcattgctctttt

SEQ ID NO: 3778 - DNA, 40 bp, Artificial Sequence
  Synthetic Oligonucleotide
ccgcctcagtcctggtggtaccacaacgcattgctcttct

SEQ ID NO: 3779 - DNA, 40 bp, Artificial Sequence
  Synthetic Oligonucleotide
ccgcctcagtcctggtggtaccacaacgcatcgctctttt

SEQ ID NO: 3780 - DNA, 40 bp, Artificial Sequence
  Synthetic Oligonucleotide
ccgcctcagtccgtggatccactttgcacgtgctatgaca

SEQ ID NO: 3781 - DNA, 40 bp, Artificial Sequence
  Synthetic Oligonucleotide
ccgcctcagtccgtggacccactttgcacgtgccatgaca

SEQ ID NO: 3782 - DNA, 40 bp, Artificial Sequence
  Synthetic Oligonucleotide
ccgcctcagtcaacttgcaaggatcgcccattgcactgta

SEQ ID NO: 3783 - DNA, 40 bp, Artificial Sequence
  Synthetic Oligonucleotide
ccgcctcaggtttcccctaacgcgttagccttccggtatg

SEQ ID NO: 3784 - DNA, 40 bp, Artificial Sequence
  Synthetic Oligonucleotide
ccgcctcaggttcctctaacgcgttagcccttccggaatg

SEQ ID NO: 3785 - DNA, 40 bp, Artificial Sequence
  Synthetic Oligonucleotide
ccgcctcaggttccctaacgcggttagccttccggaattg

SEQ ID NO: 3786 - DNA, 40 bp, Artificial Sequence
  Synthetic Oligonucleotide
ccgcctcaggttcccctaagcgcgttagccttccggaatg

SEQ ID NO: 3787 - DNA, 40 bp, Artificial Sequence
  Synthetic Oligonucleotide
ccgcctcaggttcccctaactgcgtaagccttccggaatg

SEQ ID NO: 3788 - DNA, 40 bp, Artificial Sequence
  Synthetic Oligonucleotide
ccgcctcaggttcccctaacggcgttagccttccggaatg

SEQ ID NO: 3789 - DNA, 40 bp, Artificial Sequence
  Synthetic Oligonucleotide
ccgcctcaggttcccctaacgcgttgacgcttccggaatg

SEQ ID NO: 3790 - DNA, 40 bp, Artificial Sequence
  Synthetic Oligonucleotide
ccgcctcaggttcccctaacgcgttaggccttccggaatg

SEQ ID NO: 3791 - DNA, 40 bp, Artificial Sequence
  Synthetic Oligonucleotide
ccgcctcaggttcccctaacgcgttagccttcgtagaatg

SEQ ID NO: 3792 - DNA, 40 bp, Artificial Sequence
  Synthetic Oligonucleotide
ccgcctcaggttcccctaacgcgttagccttccggaatgc

SEQ ID NO: 3793 - DNA, 40 bp, Artificial Sequence
  Synthetic Oligonucleotide
ccgcctcaggttcccctaacgcgttagccttccggaagtg

SEQ ID NO: 3794 - DNA, 40 bp, Artificial Sequence
  Synthetic Oligonucleotide
ccgcctcaggttcccctaacgcgttagccttccggaaatg

SEQ ID NO: 3795 - DNA, 40 bp, Artificial Sequence
  Synthetic Oligonucleotide
ccgcctcaggttcccctaacgcgttagccttccgaagtga

SEQ ID NO: 3796 - DNA, 40 bp, Artificial Sequence
  Synthetic Oligonucleotide
ccgcctcaggttcccctaacgcgttagccctccggaatgc

SEQ ID NO: 3797 - DNA, 40 bp, Artificial Sequence
  Synthetic Oligonucleotide
ccgcctcaggttcccctaacgcgttagccctccggaatcg

SEQ ID NO: 3798 - DNA, 40 bp, Artificial Sequence
  Synthetic Oligonucleotide
ccgcctcaggttcccctaacgcgttacgccttccgggatg

SEQ ID NO: 3799 - DNA, 40 bp, Artificial Sequence
  Synthetic Oligonucleotide
ccgcctcaggttcccctaacgcgttaagccttccggaatg

SEQ ID NO: 3800 - DNA, 40 bp, Artificial Sequence
  Synthetic Oligonucleotide
ccgcctcaggttcccctaacgcggttagccttccggaatg

SEQ ID NO: 3801 - DNA, 40 bp, Artificial Sequence
  Synthetic Oligonucleotide
ccgcctcaggttcccctaacgacgttagccttccggaatg

SEQ ID NO: 3802 - DNA, 40 bp, Artificial Sequence
  Synthetic Oligonucleotide
ccgcctcaggttcccctaaccgtcgtacgcttccggaatg

SEQ ID NO: 3803 - DNA, 40 bp, Artificial Sequence
  Synthetic Oligonucleotide
ccgcctcaggttcccctaaccgcgttagccttccgaaatg

SEQ ID NO: 3804 - DNA, 40 bp, Artificial Sequence
  Synthetic Oligonucleotide
ccgcctcaggttcccctaaccgcgttagccctccggaatg

SEQ ID NO: 3805 - DNA, 40 bp, Artificial Sequence
  Synthetic Oligonucleotide
ccgcctcaggttcccctaacagtcgatcgcttccggaatg

SEQ ID NO: 3806 - DNA, 40 bp, Artificial Sequence
  Synthetic Oligonucleotide
ccgcctcaggttccccctaacgcgttagccttccgaaatg

SEQ ID NO: 3807 - DNA, 40 bp, Artificial Sequence
  Synthetic Oligonucleotide
ccgcctcaggttccccaaacgcgttagccttccggaactg

SEQ ID NO: 3808 - DNA, 40 bp, Artificial Sequence
  Synthetic Oligonucleotide
ccgcctcaggtcccctaacgcgttacgccttccggaactg

SEQ ID NO: 3809 - DNA, 40 bp, Artificial Sequence
  Synthetic Oligonucleotide
ccgcctcaggattcccctaacgcgttagccttccggaatg

SEQ ID NO: 3810 - DNA, 40 bp, Artificial Sequence
  Synthetic Oligonucleotide
ccgcctcagcttccccctaacgcgttagccttccggaatg

SEQ ID NO: 3811 - DNA, 40 bp, Artificial Sequence
  Synthetic Oligonucleotide
ccgcctcagattccctacccattgcgcgatgagactggta

SEQ ID NO: 3812 - DNA, 40 bp, Artificial Sequence
  Synthetic Oligonucleotide
ccgcctcagacatcttcccgttctgcagaactaggtgaca

SEQ ID NO: 3813 - DNA, 40 bp, Artificial Sequence
  Synthetic Oligonucleotide
ccgcctcacggttcccctaacgcgttagccttccggaatg

SEQ ID NO: 3814 - DNA, 40 bp, Artificial Sequence
  Synthetic Oligonucleotide
ccgcctcacaactctcgggcactgcccatgctagcttgaa

SEQ ID NO: 3815 - DNA, 40 bp, Artificial Sequence
  Synthetic Oligonucleotide
ccgcctcaacccctgtttctcggatcagcacttttaaatg

SEQ ID NO: 3816 - DNA, 40 bp, Artificial Sequence
  Synthetic Oligonucleotide
ccgcctcaaacactgacgtcgtggaaccttcgattgctag

SEQ ID NO: 3817 - DNA, 40 bp, Artificial Sequence
  Synthetic Oligonucleotide
ccgccctcaggttcccctaacgcgttagccttccggaatg

SEQ ID NO: 3818 - DNA, 40 bp, Artificial Sequence
  Synthetic Oligonucleotide
ccgcccgggatcactctctacgcgtataaatgctctgtca

SEQ ID NO: 3819 - DNA, 40 bp, Artificial Sequence
  Synthetic Oligonucleotide
ccgccactcgtaccgtccaacgcgttagccttccggaatg

SEQ ID NO: 3820 - DNA, 40 bp, Artificial Sequence
  Synthetic Oligonucleotide
ccgcacctcgatagtcatcttcgctggaccacccgcgtta

SEQ ID NO: 3821 - DNA, 40 bp, Artificial Sequence
  Synthetic Oligonucleotide
ccgcaccctgatagtcatcttcgctggaccacccgcgtta

SEQ ID NO: 3822 - DNA, 40 bp, Artificial Sequence
  Synthetic Oligonucleotide
ccgcaccctgatagtcatcttcactgggaccaccgtgtta

SEQ ID NO: 3823 - DNA, 40 bp, Artificial Sequence
  Synthetic Oligonucleotide
ccgcaccctgatagtcatcttcactggaccacccgtgtta

SEQ ID NO: 3824 - DNA, 40 bp, Artificial Sequence
  Synthetic Oligonucleotide
ccgcacccgatagtcatctttcactggaccacccgtgtta

SEQ ID NO: 3825 - DNA, 40 bp, Artificial Sequence
  Synthetic Oligonucleotide
ccgcacccctaatagtcatcttcactggaccacccgtgta

SEQ ID NO: 3826 - DNA, 40 bp, Artificial Sequence
  Synthetic Oligonucleotide
ccgcaccccgtatagtcatcttcactggacacccgtgtta

SEQ ID NO: 3827 - DNA, 40 bp, Artificial Sequence
  Synthetic Oligonucleotide
ccgcaccccggtagtcatcttcgctggaccacccgcgtta

SEQ ID NO: 3828 - DNA, 40 bp, Artificial Sequence
  Synthetic Oligonucleotide
ccgcaccccgatcatcatcttcactggaccacccgtgtta

SEQ ID NO: 3829 - DNA, 40 bp, Artificial Sequence
  Synthetic Oligonucleotide
ccgcaccccgatcagctcatcttcactggacaccgtgtta

SEQ ID NO: 3830 - DNA, 40 bp, Artificial Sequence
  Synthetic Oligonucleotide
ccgcaccccgatagttcatcttcactggacacccgtgtta

SEQ ID NO: 3831 - DNA, 40 bp, Artificial Sequence
  Synthetic Oligonucleotide
ccgcaccccgatagtcgtcttcgctggactacccgtgtta

SEQ ID NO: 3832 - DNA, 40 bp, Artificial Sequence
  Synthetic Oligonucleotide
ccgcaccccgatagtcgtcttcgctggaccgcccgtgtta

SEQ ID NO: 3833 - DNA, 40 bp, Artificial Sequence
  Synthetic Oligonucleotide
ccgcaccccgatagtcgatcttcactggacacccgtgtta

SEQ ID NO: 3834 - DNA, 40 bp, Artificial Sequence
  Synthetic Oligonucleotide
ccgcaccccgatagtcatctttcactggacaccagtgtta

SEQ ID NO: 3835 - DNA, 40 bp, Artificial Sequence
  Synthetic Oligonucleotide
ccgcaccccgatagtcatcttgcactggacacccgtgtta

SEQ ID NO: 3836 - DNA, 40 bp, Artificial Sequence
  Synthetic Oligonucleotide
ccgcaccccgatagtcatcttcgctggacacccgtcgtta

SEQ ID NO: 3837 - DNA, 40 bp, Artificial Sequence
  Synthetic Oligonucleotide
ccgcaccccgatagtcatcttcactggaccacgctcataa

SEQ ID NO: 3838 - DNA, 40 bp, Artificial Sequence
  Synthetic Oligonucleotide
ccgcaccccgatagtcatcttcactggaccacccgtgttg

SEQ ID NO: 3839 - DNA, 40 bp, Artificial Sequence
  Synthetic Oligonucleotide
ccgcaccccgatagtcatcttcactggaccacccgtgtca

SEQ ID NO: 3840 - DNA, 40 bp, Artificial Sequence
  Synthetic Oligonucleotide
ccgcaccccgatagtcatcttcactggaccacccgcgtta

SEQ ID NO: 3841 - DNA, 40 bp, Artificial Sequence
  Synthetic Oligonucleotide
ccgcaccccgatagtcatcttcactggaccacccatgtta

SEQ ID NO: 3842 - DNA, 40 bp, Artificial Sequence
  Synthetic Oligonucleotide
ccgcaccccgatagtcatcttcactggaccaccagtgtta

SEQ ID NO: 3843 - DNA, 40 bp, Artificial Sequence
  Synthetic Oligonucleotide
ccgcaccccgatagtcatcttcactggacacccgtgttga

SEQ ID NO: 3844 - DNA, 40 bp, Artificial Sequence
  Synthetic Oligonucleotide
ccgcaccccgatagtcatcttcactgaaccacccgtgtta

SEQ ID NO: 3845 - DNA, 40 bp, Artificial Sequence
  Synthetic Oligonucleotide
ccgcaccccgatagtcatcttcaactggacacccgtgtta

SEQ ID NO: 3846 - DNA, 40 bp, Artificial Sequence
  Synthetic Oligonucleotide
ccgcaccccgatagtcatctccgctggaccacccgcgtta

SEQ ID NO: 3847 - DNA, 40 bp, Artificial Sequence
  Synthetic Oligonucleotide
ccgcaccccgatagtcatccttcactggacacccgtgtta

SEQ ID NO: 3848 - DNA, 40 bp, Artificial Sequence
  Synthetic Oligonucleotide
ccgcaccccgatagtcaccttcactggaccacccgtgtta

SEQ ID NO: 3849 - DNA, 40 bp, Artificial Sequence
  Synthetic Oligonucleotide
ccgcaccccgatagctcatcttcactggaccaccgtgata

SEQ ID NO: 3850 - DNA, 40 bp, Artificial Sequence
  Synthetic Oligonucleotide
ccgcaccccgatagctcatcttcactggacacccgtgtta

SEQ ID NO: 3851 - DNA, 40 bp, Artificial Sequence
  Synthetic Oligonucleotide
ccgcaccccgatagccatcttcactggaccacccgtgtta

SEQ ID NO: 3852 - DNA, 40 bp, Artificial Sequence
  Synthetic Oligonucleotide
ccgcaccccgactagtcatcttcactggacacccgtgtta

SEQ ID NO: 3853 - DNA, 40 bp, Artificial Sequence
  Synthetic Oligonucleotide
ccgcaccccgacagtcatcttcactggaccacccgtgttg

SEQ ID NO: 3854 - DNA, 40 bp, Artificial Sequence
  Synthetic Oligonucleotide
ccgcacccccgatagtcatcttcgctggaccaccgcgtta

SEQ ID NO: 3855 - DNA, 40 bp, Artificial Sequence
  Synthetic Oligonucleotide
ccgcacccccgatagtcatcttcactggaccaccgtgtta

SEQ ID NO: 3856 - DNA, 40 bp, Artificial Sequence
  Synthetic Oligonucleotide
ccgcaccccaatagtcatcttcactggaccacccgtgtta

SEQ ID NO: 3857 - DNA, 40 bp, Artificial Sequence
  Synthetic Oligonucleotide
ccgcacagctcacttcgtctttgatcgactacgctcataa

SEQ ID NO: 3858 - DNA, 40 bp, Artificial Sequence
  Synthetic Oligonucleotide
ccgcacagctcacttcgtctttgatcgaccacgctcatga

SEQ ID NO: 3859 - DNA, 40 bp, Artificial Sequence
  Synthetic Oligonucleotide
ccgcacagctcacctcgtctttgatcgaccacgctcataa

SEQ ID NO: 3860 - DNA, 40 bp, Artificial Sequence
  Synthetic Oligonucleotide
ccgagcacccctgatagtctcttcgctggaccaccgtgta

SEQ ID NO: 3861 - DNA, 40 bp, Artificial Sequence
  Synthetic Oligonucleotide
ccgacctcaggttcccctaacgcgttagccttccggaatg

SEQ ID NO: 3862 - DNA, 40 bp, Artificial Sequence
  Synthetic Oligonucleotide
ccgacctcaggttcccctaacacgttagccttccggaatg

SEQ ID NO: 3863 - DNA, 40 bp, Artificial Sequence
  Synthetic Oligonucleotide
cccttatccggcaggacgcctttcgtgcactatcacgatt

SEQ ID NO: 3864 - DNA, 40 bp, Artificial Sequence
  Synthetic Oligonucleotide
ccctgcaataatcccgggacagtgccgcggaatgtctgcg

SEQ ID NO: 3865 - DNA, 40 bp, Artificial Sequence
  Synthetic Oligonucleotide
ccctctatagttgtcggcgtagcacgctattgcttagaag

SEQ ID NO: 3866 - DNA, 40 bp, Artificial Sequence
  Synthetic Oligonucleotide
ccctctatagtcgtcggcgtagcacgatattgcttagaag

SEQ ID NO: 3867 - DNA, 40 bp, Artificial Sequence
  Synthetic Oligonucleotide
ccctctatagtcgtcggcgtagcacactattgcttagaag

SEQ ID NO: 3868 - DNA, 40 bp, Artificial Sequence
  Synthetic Oligonucleotide
ccctatccccatcgagcgatcgtcgtagtactgcttccaa

SEQ ID NO: 3869 - DNA, 40 bp, Artificial Sequence
  Synthetic Oligonucleotide
cccgtctcgatcctacttttcgaaaggtctattacgctaa

SEQ ID NO: 3870 - DNA, 40 bp, Artificial Sequence
  Synthetic Oligonucleotide
cccgtagtccttctccaaacggagccgaaattcggtacca

SEQ ID NO: 3871 - DNA, 40 bp, Artificial Sequence
  Synthetic Oligonucleotide
cccgtagtccttctccaaacggagccgaaactcggtacta

SEQ ID NO: 3872 - DNA, 40 bp, Artificial Sequence
  Synthetic Oligonucleotide
cccggtcttctcttctcggatcaaaaactgcttaagcata

SEQ ID NO: 3873 - DNA, 40 bp, Artificial Sequence
  Synthetic Oligonucleotide
cccggtcttctcttctcggaccaaaaactgcttaagcata

SEQ ID NO: 3874 - DNA, 40 bp, Artificial Sequence
  Synthetic Oligonucleotide
cccggcgcctcggatctcttacgttccggaactgttgcaa

SEQ ID NO: 3875 - DNA, 40 bp, Artificial Sequence
  Synthetic Oligonucleotide
cccggacatcccgcctcgtaacacctattaccgtttgctg

SEQ ID NO: 3876 - DNA, 40 bp, Artificial Sequence
  Synthetic Oligonucleotide
cccgctatttccctgacctcccgcttgcaatgctggcatt

SEQ ID NO: 3877 - DNA, 40 bp, Artificial Sequence
  Synthetic Oligonucleotide
cccgcgtgcaagtacttggatgttgtagagcgcctcgaca

SEQ ID NO: 3878 - DNA, 40 bp, Artificial Sequence
  Synthetic Oligonucleotide
cccgcctctgttctcttactaacgttagaaagtcttacgt

SEQ ID NO: 3879 - DNA, 40 bp, Artificial Sequence
  Synthetic Oligonucleotide
cccgcctcgatattcgaatctagattggactcctcgtttg

SEQ ID NO: 3880 - DNA, 40 bp, Artificial Sequence
  Synthetic Oligonucleotide
cccgcaggccatgctctagacgcctcaaaaagatgatgct

SEQ ID NO: 3881 - DNA, 40 bp, Artificial Sequence
  Synthetic Oligonucleotide
cccgcacgggtggcccctctgtatgaatggtaccgctata

SEQ ID NO: 3882 - DNA, 40 bp, Artificial Sequence
  Synthetic Oligonucleotide
cccgcaccccgatcagtcatcttcactggacacccgtgta

SEQ ID NO: 3883 - DNA, 40 bp, Artificial Sequence
  Synthetic Oligonucleotide
cccgcaccccgatagtcatcttcactgaccacccgtgtta

SEQ ID NO: 3884 - DNA, 40 bp, Artificial Sequence
  Synthetic Oligonucleotide
ccccgtatcccgcttgtgatatcacacacaattcgtactg

SEQ ID NO: 3885 - DNA, 40 bp, Artificial Sequence
  Synthetic Oligonucleotide
ccccgcaagccatgctctagacgctcaaaaggatgatgct

SEQ ID NO: 3886 - DNA, 40 bp, Artificial Sequence
  Synthetic Oligonucleotide
ccccctatagtcgtcggcgtagcacgctattgcttagaag

SEQ ID NO: 3887 - DNA, 40 bp, Artificial Sequence
  Synthetic Oligonucleotide
ccccaagacgattgtcgttattgccggactacctgcattt

SEQ ID NO: 3888 - DNA, 40 bp, Artificial Sequence
  Synthetic Oligonucleotide
cccatgatttcctcctacctgggtaccgcgcgttgctacg

SEQ ID NO: 3889 - DNA, 40 bp, Artificial Sequence
  Synthetic Oligonucleotide
cccatgatttcctcctacatgggtagccgcgcgttgctag

SEQ ID NO: 3890 - DNA, 40 bp, Artificial Sequence
  Synthetic Oligonucleotide
cccactccgatcctcaagtccgatcctcccttcgtttggc

SEQ ID NO: 3891 - DNA, 40 bp, Artificial Sequence
  Synthetic Oligonucleotide
ccatttaaatggctgcccctctgtgttacggccgtaaata

SEQ ID NO: 3892 - DNA, 40 bp, Artificial Sequence
  Synthetic Oligonucleotide
ccattgtggcgcttatggagccgggtaccttccagcaagg

SEQ ID NO: 3893 - DNA, 40 bp, Artificial Sequence
  Synthetic Oligonucleotide
ccattgtgctgcttatggagccggtaccttccagcaatgg

SEQ ID NO: 3894 - DNA, 40 bp, Artificial Sequence
  Synthetic Oligonucleotide
ccattgtgcgcttcatggagccgggtaccttccagcaagg

SEQ ID NO: 3895 - DNA, 40 bp, Artificial Sequence
  Synthetic Oligonucleotide
ccattgtgcgcttatggagccgggtaccttccagcaatgg

SEQ ID NO: 3896 - DNA, 40 bp, Artificial Sequence
  Synthetic Oligonucleotide
ccattgtgcgcttactggagccgggtaccttccagcaagg

SEQ ID NO: 3897 - DNA, 40 bp, Artificial Sequence
  Synthetic Oligonucleotide
ccatctggaaccccggtcatcgtcggagactactccgttg

SEQ ID NO: 3898 - DNA, 40 bp, Artificial Sequence
  Synthetic Oligonucleotide
ccagttcattgactactttgatgttacgtgctaagcatac

SEQ ID NO: 3899 - DNA, 40 bp, Artificial Sequence
  Synthetic Oligonucleotide
ccacctcggtcctgctgcacgagctagctagtgagaaccg

SEQ ID NO: 3900 - DNA, 40 bp, Artificial Sequence
  Synthetic Oligonucleotide
ccaccattctcggattttctagctagaacgcacctcctca

SEQ ID NO: 3901 - DNA, 40 bp, Artificial Sequence
  Synthetic Oligonucleotide
ccacacccccgatagtcatcttcactggacacccgtgtta

SEQ ID NO: 3902 - DNA, 40 bp, Artificial Sequence
  Synthetic Oligonucleotide
ccaagcgttggtgtataacagccatccttatcccttggcg

SEQ ID NO: 3903 - DNA, 40 bp, Artificial Sequence
  Synthetic Oligonucleotide
ccaaaagttctcggatctcgcattggtgcacgacctccaa

SEQ ID NO: 3904 - DNA, 40 bp, Artificial Sequence
  Synthetic Oligonucleotide
cattttctaggcctacgccgcccgggctcctccgtatgcg

SEQ ID NO: 3905 - DNA, 40 bp, Artificial Sequence
  Synthetic Oligonucleotide
catttggaaacagcgactcgtttataccggttcgcctcca

SEQ ID NO: 3906 - DNA, 40 bp, Artificial Sequence
  Synthetic Oligonucleotide
cattgttcattctcggagaccccccgtgcacgtgctagta

SEQ ID NO: 3907 - DNA, 40 bp, Artificial Sequence
  Synthetic Oligonucleotide
cattgtggacctcctttctcggatccaaacacaattgtac

SEQ ID NO: 3908 - DNA, 40 bp, Artificial Sequence
  Synthetic Oligonucleotide
cattgtggacctcctttctcgatccaaacacaatttgcac

SEQ ID NO: 3909 - DNA, 40 bp, Artificial Sequence
  Synthetic Oligonucleotide
cattgtcgcgcttatcggagccgggtaccttccagcaagg

SEQ ID NO: 3910 - DNA, 40 bp, Artificial Sequence
  Synthetic Oligonucleotide
cattgatactcctgttctcgcgtttacctccctgtgcgca

SEQ ID NO: 3911 - DNA, 40 bp, Artificial Sequence
  Synthetic Oligonucleotide
cattcgccagtcacatcaactatgatgacgcttgactggg

SEQ ID NO: 3912 - DNA, 40 bp, Artificial Sequence
  Synthetic Oligonucleotide
cattatccgtttgtccgtcctctcgtggtattgcgcatgc

SEQ ID NO: 3913 - DNA, 40 bp, Artificial Sequence
  Synthetic Oligonucleotide
cattagctacactccttgcatgcaagactggacgcgcgat

SEQ ID NO: 3914 - DNA, 40 bp, Artificial Sequence
  Synthetic Oligonucleotide
catggttaactcgttcccgcctgggtcctccggatccgca

SEQ ID NO: 3915 - DNA, 40 bp, Artificial Sequence
  Synthetic Oligonucleotide
catggggcttttaagcacttctcggtaacttgggcagtta

SEQ ID NO: 3916 - DNA, 40 bp, Artificial Sequence
  Synthetic Oligonucleotide
catggggcttttaagcacttcccgtaacttgggcagttac

SEQ ID NO: 3917 - DNA, 40 bp, Artificial Sequence
  Synthetic Oligonucleotide
catgcggtttcttctgacgctagcgactttgaccggctcc

SEQ ID NO: 3918 - DNA, 40 bp, Artificial Sequence
  Synthetic Oligonucleotide
catgcgagtatccgccttgctcctctggtcgatgtacgta

SEQ ID NO: 3919 - DNA, 40 bp, Artificial Sequence
  Synthetic Oligonucleotide
catgcaccattggctccaagtgattgatataccaagtctg

SEQ ID NO: 3920 - DNA, 40 bp, Artificial Sequence
  Synthetic Oligonucleotide
catgatatatcacaacgcctcagtcgctactcggtctacc

SEQ ID NO: 3921 - DNA, 40 bp, Artificial Sequence
  Synthetic Oligonucleotide
catcttcctggtacagtaccaatcatcgtcttttcgcgcg

SEQ ID NO: 3922 - DNA, 40 bp, Artificial Sequence
  Synthetic Oligonucleotide
catctggtgatcaccgaaccaacccattctctcggtattg

SEQ ID NO: 3923 - DNA, 40 bp, Artificial Sequence
  Synthetic Oligonucleotide
catctctcggttcccgtgcgcacgcagctgactcgaactg

SEQ ID NO: 3924 - DNA, 40 bp, Artificial Sequence
  Synthetic Oligonucleotide
catctctcgggtcctattgttcgcgcgtcccccctgtata

SEQ ID NO: 3925 - DNA, 40 bp, Artificial Sequence
  Synthetic Oligonucleotide
catctctcggctctcgtgcgcacgcagctgactcgaactg

SEQ ID NO: 3926 - DNA, 40 bp, Artificial Sequence
  Synthetic Oligonucleotide
catctctcggctcccgtgtgcacgcagctgactcgaactg

SEQ ID NO: 3927 - DNA, 40 bp, Artificial Sequence
  Synthetic Oligonucleotide
catctctcggctcccgtgcgcgcgcagctgactcgaactg

SEQ ID NO: 3928 - DNA, 40 bp, Artificial Sequence
  Synthetic Oligonucleotide
catctctcggctcccgtgcgcacgcggctgactcgaactg

SEQ ID NO: 3929 - DNA, 40 bp, Artificial Sequence
  Synthetic Oligonucleotide
catctctcggctcccgtgcgcacacagctgactcgaactg

SEQ ID NO: 3930 - DNA, 40 bp, Artificial Sequence
  Synthetic Oligonucleotide
catctctcggacgtcattcctgcctcgttcctctcgtttg

SEQ ID NO: 3931 - DNA, 40 bp, Artificial Sequence
  Synthetic Oligonucleotide
catctcaaccctccactacatctgttcttgcacgcctgac

SEQ ID NO: 3932 - DNA, 40 bp, Artificial Sequence
  Synthetic Oligonucleotide
catctatccgtttgtcctcctcttgtggtattgcgcatgc

SEQ ID NO: 3933 - DNA, 40 bp, Artificial Sequence
  Synthetic Oligonucleotide
catcggagtctgcctatcatgcgccatcatgttgtcagga

SEQ ID NO: 3934 - DNA, 40 bp, Artificial Sequence
  Synthetic Oligonucleotide
catccggattcgcatctttctttaccatcatctacgtaga

SEQ ID NO: 3935 - DNA, 40 bp, Artificial Sequence
  Synthetic Oligonucleotide
catccgccagtcacatcaactatgatgacgcttgactgga

SEQ ID NO: 3936 - DNA, 40 bp, Artificial Sequence
  Synthetic Oligonucleotide
catcacaagtcgaacgtgctcactctcgatggccatgtca

SEQ ID NO: 3937 - DNA, 40 bp, Artificial Sequence
  Synthetic Oligonucleotide
catatctcccgttgtgatcacgacttatcattcgcgtctg

SEQ ID NO: 3938 - DNA, 40 bp, Artificial Sequence
  Synthetic Oligonucleotide
cataagcaacatgatggaaatgctagccttctccatgccg

SEQ ID NO: 3939 - DNA, 40 bp, Artificial Sequence
  Synthetic Oligonucleotide
cataaacaacatgatggagatgctagccttctccatgccg

SEQ ID NO: 3940 - DNA, 40 bp, Artificial Sequence
  Synthetic Oligonucleotide
cagtttacctctctctcggatcgtaattgcccgcaagata

SEQ ID NO: 3941 - DNA, 40 bp, Artificial Sequence
  Synthetic Oligonucleotide
cagttgtactcgagtgctgtcgcctgggcacctccaggat

SEQ ID NO: 3942 - DNA, 40 bp, Artificial Sequence
  Synthetic Oligonucleotide
cagtgcttgatctcctgtcggctctgcggctgagactact

SEQ ID NO: 3943 - DNA, 40 bp, Artificial Sequence
  Synthetic Oligonucleotide
cagtgcttgatctcctgtcgactctgcggctgagactact

SEQ ID NO: 3944 - DNA, 40 bp, Artificial Sequence
  Synthetic Oligonucleotide
caggtgtgcatatctcccgcctcgctccttaaggaactta

SEQ ID NO: 3945 - DNA, 40 bp, Artificial Sequence
  Synthetic Oligonucleotide
caggatgcgttttctctcgcctctgttctcccggacgctt

SEQ ID NO: 3946 - DNA, 40 bp, Artificial Sequence
  Synthetic Oligonucleotide
cagctgacgtctcgatccatccccgacacgtacgtgaatt

SEQ ID NO: 3947 - DNA, 40 bp, Artificial Sequence
  Synthetic Oligonucleotide
cagcggtcgcagctgcagttgccgccttatcctccgtctg

SEQ ID NO: 3948 - DNA, 40 bp, Artificial Sequence
  Synthetic Oligonucleotide
cagccgcctcatacactccactcggatcacatcgccgcca

SEQ ID NO: 3949 - DNA, 40 bp, Artificial Sequence
  Synthetic Oligonucleotide
cagccgcctaatacactccactcggatcacatcgccgcca

SEQ ID NO: 3950 - DNA, 40 bp, Artificial Sequence
  Synthetic Oligonucleotide
cagccaatgttcatcgagcgagttatattattgcataacg

SEQ ID NO: 3951 - DNA, 40 bp, Artificial Sequence
  Synthetic Oligonucleotide
cagcaccccgatagtcatcttcgctggaccacccgtgtta

SEQ ID NO: 3952 - DNA, 40 bp, Artificial Sequence
  Synthetic Oligonucleotide
cagatctgctcagccttggtccgccttagtacgccggcta

SEQ ID NO: 3953 - DNA, 40 bp, Artificial Sequence
  Synthetic Oligonucleotide
cagatacggattgtcggttgctcgctatagcatcgaacgg

SEQ ID NO: 3954 - DNA, 40 bp, Artificial Sequence
  Synthetic Oligonucleotide
cagatacggattgtcggttgctcactatagcatcgaacgg

SEQ ID NO: 3955 - DNA, 40 bp, Artificial Sequence
  Synthetic Oligonucleotide
cagaacgaagtctcccaagtgtgtcgttcgaattgccgct

SEQ ID NO: 3956 - DNA, 40 bp, Artificial Sequence
  Synthetic Oligonucleotide
cagaaagatctttttgagcctcgaaatgctgatatattag

SEQ ID NO: 3957 - DNA, 40 bp, Artificial Sequence
  Synthetic Oligonucleotide
cactttataaccctgtcgcctcgattgtccccgtcctacc

SEQ ID NO: 3958 - DNA, 40 bp, Artificial Sequence
  Synthetic Oligonucleotide
cacttatccgacaggacgtctttcgtgcactatcacgatt

SEQ ID NO: 3959 - DNA, 40 bp, Artificial Sequence
  Synthetic Oligonucleotide
cactgtccgtttgtccgtcctctcgtggtattgcgcatgc

SEQ ID NO: 3960 - DNA, 40 bp, Artificial Sequence
  Synthetic Oligonucleotide
cactgtccgtttgtccgtcctcctgtggtattgcgcatgc

SEQ ID NO: 3961 - DNA, 40 bp, Artificial Sequence
  Synthetic Oligonucleotide
cactgtccgtagatccgtcactcactacgcgtatggaatc

SEQ ID NO: 3962 - DNA, 40 bp, Artificial Sequence
  Synthetic Oligonucleotide
cactcgccagtcacatcaactatgatgacgcttggctgga

SEQ ID NO: 3963 - DNA, 40 bp, Artificial Sequence
  Synthetic Oligonucleotide
cactccgtcagaagatcgttcgtggggccctatccccttc

SEQ ID NO: 3964 - DNA, 40 bp, Artificial Sequence
  Synthetic Oligonucleotide
cactattaccgtttggagcgctatctccgtcgatacggta

SEQ ID NO: 3965 - DNA, 40 bp, Artificial Sequence
  Synthetic Oligonucleotide
cactatctgtttgtccgtcctctcgtggtattgcgcatgc

SEQ ID NO: 3966 - DNA, 40 bp, Artificial Sequence
  Synthetic Oligonucleotide
cactatctgtcatcgagcgagcactttgtgcgatcacaca

SEQ ID NO: 3967 - DNA, 40 bp, Artificial Sequence
  Synthetic Oligonucleotide
cactatctgtatcgagcgttgtcaacaagcggctaaggcc

SEQ ID NO: 3968 - DNA, 40 bp, Artificial Sequence
  Synthetic Oligonucleotide
cactatctgcatcgagcgtaagtggtaccaaaataaccgt

SEQ ID NO: 3969 - DNA, 40 bp, Artificial Sequence
  Synthetic Oligonucleotide
cactatcctcatcgatgctgagttatacgcctacgagggg

SEQ ID NO: 3970 - DNA, 40 bp, Artificial Sequence
  Synthetic Oligonucleotide
cactatccgtttgtttgtcctcttgtggtattgcgcatgc

SEQ ID NO: 3971 - DNA, 40 bp, Artificial Sequence
  Synthetic Oligonucleotide
cactatccgtttgtctcgtcctcttggtgtatgcgcatcg

SEQ ID NO: 3972 - DNA, 40 bp, Artificial Sequence
  Synthetic Oligonucleotide
cactatccgtttgtccgtgctcttgtggtattgcgcatgc

SEQ ID NO: 3973 - DNA, 40 bp, Artificial Sequence
  Synthetic Oligonucleotide
cactatccgtttgtccgtcttcttgtagcattgcgcatgc

SEQ ID NO: 3974 - DNA, 40 bp, Artificial Sequence
  Synthetic Oligonucleotide
cactatccgtttgtccgtcttctcgtggtgttgcgcatgc

SEQ ID NO: 3975 - DNA, 40 bp, Artificial Sequence
  Synthetic Oligonucleotide
cactatccgtttgtccgtcgtcttgtggtattgcgcatgc

SEQ ID NO: 3976 - DNA, 40 bp, Artificial Sequence
  Synthetic Oligonucleotide
cactatccgtttgtccgtccttttgtggtattgcgcatgc

SEQ ID NO: 3977 - DNA, 40 bp, Artificial Sequence
  Synthetic Oligonucleotide
cactatccgtttgtccgtcctcttgtgttattgcgcatgc

SEQ ID NO: 3978 - DNA, 40 bp, Artificial Sequence
  Synthetic Oligonucleotide
cactatccgtttgtccgtcctcttgtggtgttgcgcgtgc

SEQ ID NO: 3979 - DNA, 40 bp, Artificial Sequence
  Synthetic Oligonucleotide
cactatccgtttgtccgtcctcttgtggtgctgcgcatgc

SEQ ID NO: 3980 - DNA, 40 bp, Artificial Sequence
  Synthetic Oligonucleotide
cactatccgtttgtccgtcctcttgtggtattgggcatgc

SEQ ID NO: 3981 - DNA, 40 bp, Artificial Sequence
  Synthetic Oligonucleotide
cactatccgtttgtccgtcctcttgtggtattgcgtacgc

SEQ ID NO: 3982 - DNA, 40 bp, Artificial Sequence
  Synthetic Oligonucleotide
cactatccgtttgtccgtcctcttgtggtattgcgcatgg

SEQ ID NO: 3983 - DNA, 40 bp, Artificial Sequence
  Synthetic Oligonucleotide
cactatccgtttgtccgtcctcttgtggtattgcgcatcg

SEQ ID NO: 3984 - DNA, 40 bp, Artificial Sequence
  Synthetic Oligonucleotide
cactatccgtttgtccgtcctcttgtggtattgcgcacac

SEQ ID NO: 3985 - DNA, 40 bp, Artificial Sequence
  Synthetic Oligonucleotide
cactatccgtttgtccgtcctcttgtggtattgcgcaagc

SEQ ID NO: 3986 - DNA, 40 bp, Artificial Sequence
  Synthetic Oligonucleotide
cactatccgtttgtccgtcctcttgtggtatgcgcatcgc

SEQ ID NO: 3987 - DNA, 40 bp, Artificial Sequence
  Synthetic Oligonucleotide
cactatccgtttgtccgtcctcttgtggtatagcgcatgc

SEQ ID NO: 3988 - DNA, 40 bp, Artificial Sequence
  Synthetic Oligonucleotide
cactatccgtttgtccgtcctcttgtcgtattgcgcatgc

SEQ ID NO: 3989 - DNA, 40 bp, Artificial Sequence
  Synthetic Oligonucleotide
cactatccgtttgtccgtcctcttgcggtaatgcgcatgc

SEQ ID NO: 3990 - DNA, 40 bp, Artificial Sequence
  Synthetic Oligonucleotide
cactatccgtttgtccgtcctcttgaggcattgcgcatgc

SEQ ID NO: 3991 - DNA, 40 bp, Artificial Sequence
  Synthetic Oligonucleotide
cactatccgtttgtccgtcctcttctggtattgcgcatgc

SEQ ID NO: 3992 - DNA, 40 bp, Artificial Sequence
  Synthetic Oligonucleotide
cactatccgtttgtccgtcctcttcgtggtattgcgctgc

SEQ ID NO: 3993 - DNA, 40 bp, Artificial Sequence
  Synthetic Oligonucleotide
cactatccgtttgtccgtcctctgtggtattgcgtcatgc

SEQ ID NO: 3994 - DNA, 40 bp, Artificial Sequence
  Synthetic Oligonucleotide
cactatccgtttgtccgtcctctgtcggtattgcgcatgc

SEQ ID NO: 3995 - DNA, 40 bp, Artificial Sequence
  Synthetic Oligonucleotide
cactatccgtttgtccgtcctctcgtggtattgtgcatgc

SEQ ID NO: 3996 - DNA, 40 bp, Artificial Sequence
  Synthetic Oligonucleotide
cactatccgtttgtccgtcctctcgtggtattgcgcgtgc

SEQ ID NO: 3997 - DNA, 40 bp, Artificial Sequence
  Synthetic Oligonucleotide
cactatccgtttgtccgtcctctcgtggtattgcgcatgt

SEQ ID NO: 3998 - DNA, 40 bp, Artificial Sequence
  Synthetic Oligonucleotide
cactatccgtttgtccgtcctctcgtggtattgcgcatgg

SEQ ID NO: 3999 - DNA, 40 bp, Artificial Sequence
  Synthetic Oligonucleotide
cactatccgtttgtccgtcctctcgtggtattgcgcaggc

SEQ ID NO: 4000 - DNA, 40 bp, Artificial Sequence
  Synthetic Oligonucleotide
cactatccgtttgtccgtcctctcgtggtattgcgcaagc

SEQ ID NO: 4001 - DNA, 40 bp, Artificial Sequence
  Synthetic Oligonucleotide
cactatccgtttgtccgtcctctcgtggtattgcgcaaac

SEQ ID NO: 4002 - DNA, 40 bp, Artificial Sequence
  Synthetic Oligonucleotide
cactatccgtttgtccgtcctctcgtggtattgcacatgc

SEQ ID NO: 4003 - DNA, 40 bp, Artificial Sequence
  Synthetic Oligonucleotide
cactatccgtttgtccgtcctctcgtggtattacgcatgc

SEQ ID NO: 4004 - DNA, 40 bp, Artificial Sequence
  Synthetic Oligonucleotide
cactatccgtttgtccgtcctctcgtggtaatgcgcatgc

SEQ ID NO: 4005 - DNA, 40 bp, Artificial Sequence
  Synthetic Oligonucleotide
cactatccgtttgtccgtcctctcggggtattgcgcatgc

SEQ ID NO: 4006 - DNA, 40 bp, Artificial Sequence
  Synthetic Oligonucleotide
cactatccgtttgtccgtcctctagtggtgttgcgcatgc

SEQ ID NO: 4007 - DNA, 40 bp, Artificial Sequence
  Synthetic Oligonucleotide
cactatccgtttgtccgtcctctagtggtatcgcgcatgc

SEQ ID NO: 4008 - skipped

SEQ ID NO: 4009 - DNA, 40 bp, Artificial Sequence
  Synthetic Oligonucleotide
cactatccgtttgtccgtcctcctgtggtattgcgcatac

SEQ ID NO: 4010 - DNA, 40 bp, Artificial Sequence
  Synthetic Oligonucleotide
cactatccgtttgtccgtcctcctgtggtattgagcatgc

SEQ ID NO: 4011 - DNA, 40 bp, Artificial Sequence
  Synthetic Oligonucleotide
cactatccgtttgtccgtcctcctgtggtattacgcatgc

SEQ ID NO: 4012 - DNA, 40 bp, Artificial Sequence
  Synthetic Oligonucleotide
cactatccgtttgtccgtcctcatgtggtattgcgcatgc

SEQ ID NO: 4013 - DNA, 40 bp, Artificial Sequence
  Synthetic Oligonucleotide
cactatccgtttgtccgtcctatcgtggtattgcgcatgc

SEQ ID NO: 4014 - DNA, 40 bp, Artificial Sequence
  Synthetic Oligonucleotide
cactatccgtttgtccgtccgcttgtggtattgcgcatgc

SEQ ID NO: 4015 - DNA, 40 bp, Artificial Sequence
  Synthetic Oligonucleotide
cactatccgtttgtccgtcccctcgtggtattgcgcatgc

SEQ ID NO: 4016 - DNA, 40 bp, Artificial Sequence
  Synthetic Oligonucleotide
cactatccgtttgtccgtccactcgtggtattgcgcatgc

SEQ ID NO: 4017 - DNA, 40 bp, Artificial Sequence
  Synthetic Oligonucleotide
cactatccgtttgtccatcctctcgtggtattgcgcatgc

SEQ ID NO: 4018 - DNA, 40 bp, Artificial Sequence
  Synthetic Oligonucleotide
cactatccgtttgtacgtcctctcgtggtattgcgcatgc

SEQ ID NO: 4019 - DNA, 40 bp, Artificial Sequence
  Synthetic Oligonucleotide
cactatccgtttgcccgtcctcttgtggtattgggcatgc

SEQ ID NO: 4020 - DNA, 40 bp, Artificial Sequence
  Synthetic Oligonucleotide
cactatccgtttgcccgtcctcttgtggtattgcgcgtgc

SEQ ID NO: 4021 - DNA, 40 bp, Artificial Sequence
  Synthetic Oligonucleotide
cactatccgtttgcccgtcctcttgtggtattgcgcacgc

SEQ ID NO: 4022 - DNA, 40 bp, Artificial Sequence
  Synthetic Oligonucleotide
cactatccgtttgcccgtcctcctgtggtattgcgcatgc

SEQ ID NO: 4023 - DNA, 40 bp, Artificial Sequence
  Synthetic Oligonucleotide
cactatccgtttgatctcgtctctccctctcaggcaaccg

SEQ ID NO: 4024 - DNA, 40 bp, Artificial Sequence
  Synthetic Oligonucleotide
cactatccgttgtccgtctcttgtggtattgacgcatagc

SEQ ID NO: 4025 - DNA, 40 bp, Artificial Sequence
  Synthetic Oligonucleotide
cactatccgttgtccgtcctcttgtggtacttgcgcatgc

SEQ ID NO: 4026 - DNA, 40 bp, Artificial Sequence
  Synthetic Oligonucleotide
cactatccgttgtccgtcctcttcgtggtattgcgcatgc

SEQ ID NO: 4027 - DNA, 40 bp, Artificial Sequence
  Synthetic Oligonucleotide
cactatccgttgtccgtcctctcgtggtattgcgtcatgc

SEQ ID NO: 4028 - DNA, 40 bp, Artificial Sequence
  Synthetic Oligonucleotide
cactatccgttgtccgatcctcttgtggtatgcgtcacgc

SEQ ID NO: 4029 - DNA, 40 bp, Artificial Sequence
  Synthetic Oligonucleotide
cactatccgttggtccgtcctcttgtggtattgcgcatgc

SEQ ID NO: 4030 - DNA, 40 bp, Artificial Sequence
  Synthetic Oligonucleotide
cactatccgttcgtccgtcctctcgtggtattgcgcatgc

SEQ ID NO: 4031 - DNA, 40 bp, Artificial Sequence
  Synthetic Oligonucleotide
cactatccgttcgtccgtcctcctgtggtattgcgcatgc

SEQ ID NO: 4032 - DNA, 40 bp, Artificial Sequence
  Synthetic Oligonucleotide
cactatccgtgtgtccgtcctcttgtggtattgcgcatgc

SEQ ID NO: 4033 - DNA, 40 bp, Artificial Sequence
  Synthetic Oligonucleotide
cactatccgtggatccgtcactcactacgcgtatggaatc

SEQ ID NO: 4034 - DNA, 40 bp, Artificial Sequence
  Synthetic Oligonucleotide
cactatccgtcttaacgtgttcccttcggacgtccatcaa

SEQ ID NO: 4035 - DNA, 40 bp, Artificial Sequence
  Synthetic Oligonucleotide
cactatccgtcttaacgtgttccctccggacatccatcaa

SEQ ID NO: 4036 - DNA, 40 bp, Artificial Sequence
  Synthetic Oligonucleotide
cactatccgtcttaacgtgtccccttcggacatccatcaa

SEQ ID NO: 4037 - DNA, 40 bp, Artificial Sequence
  Synthetic Oligonucleotide
cactatccgtcttaacgtgctcccttcggacatccatcaa

SEQ ID NO: 4038 - DNA, 40 bp, Artificial Sequence
  Synthetic Oligonucleotide
cactatccgtcttaacgtgctccctccggacatccatcaa

SEQ ID NO: 4039 - DNA, 40 bp, Artificial Sequence
  Synthetic Oligonucleotide
cactatccgtctgtccgtccccttgtggtattgcgcatgc

SEQ ID NO: 4040 - DNA, 40 bp, Artificial Sequence
  Synthetic Oligonucleotide
cactatccgtccgtccgtcctcttgtggtattgcgcatgc

SEQ ID NO: 4041 - DNA, 40 bp, Artificial Sequence
  Synthetic Oligonucleotide
cactatccgtatcgagcgttgtgaacgagcggctaaggcc

SEQ ID NO: 4042 - DNA, 40 bp, Artificial Sequence
  Synthetic Oligonucleotide
cactatccgtatcgagcgttgtcaacgggcggctaaggcc

SEQ ID NO: 4043 - DNA, 40 bp, Artificial Sequence
  Synthetic Oligonucleotide
cactatccgtatcgagcgttgtcaacgagcggctaagacc

SEQ ID NO: 4044 - DNA, 40 bp, Artificial Sequence
  Synthetic Oligonucleotide
cactatccgtatcgagcgttgtcaacaggcggctaaggcc

SEQ ID NO: 4045 - DNA, 40 bp, Artificial Sequence
  Synthetic Oligonucleotide
cactatccgtatcgagcgttgtcaacaagcggctaaggtc

SEQ ID NO: 4046 - DNA, 40 bp, Artificial Sequence
  Synthetic Oligonucleotide
cactatccgtatcgagcgttgtcaacaagcggctaaggca

SEQ ID NO: 4047 - DNA, 40 bp, Artificial Sequence
  Synthetic Oligonucleotide
cactatccgtatcgagcgttgtcaacaagcggctaagacc

SEQ ID NO: 4048 - DNA, 40 bp, Artificial Sequence
  Synthetic Oligonucleotide
cactatccgtatcgagcgttgtcaacaagcggccaaggct

SEQ ID NO: 4049 - DNA, 40 bp, Artificial Sequence
  Synthetic Oligonucleotide
cactatccgtatcgagcgttgtcaacaaacggctaaggcc

SEQ ID NO: 4050 - DNA, 40 bp, Artificial Sequence
  Synthetic Oligonucleotide
cactatccgtatcgagcgttgccaacaagcggctaaggcc

SEQ ID NO: 4051 - DNA, 40 bp, Artificial Sequence
  Synthetic Oligonucleotide
cactatccgtatcgagcgatcgtcgtaagactgcttccaa

SEQ ID NO: 4052 - DNA, 40 bp, Artificial Sequence
  Synthetic Oligonucleotide
cactatccgtagatccgtcgctcactacgcgtatggaatc

SEQ ID NO: 4053 - DNA, 40 bp, Artificial Sequence
  Synthetic Oligonucleotide
cactatccgtagatccgtcactcgctacgcgtatggaatc

SEQ ID NO: 4054 - DNA, 40 bp, Artificial Sequence
  Synthetic Oligonucleotide
cactatccgtagatccgtcactccctacgcgtatggaatc

SEQ ID NO: 4055 - DNA, 40 bp, Artificial Sequence
  Synthetic Oligonucleotide
cactatccgtagatccgtcactcactgcgcgtatggagtc

SEQ ID NO: 4056 - DNA, 40 bp, Artificial Sequence
  Synthetic Oligonucleotide
cactatccgtagatccgtcactcactatgtgtatggaatc

SEQ ID NO: 4057 - DNA, 40 bp, Artificial Sequence
  Synthetic Oligonucleotide
cactatccgtagatccgtcactcactactgcgtatgaatc

SEQ ID NO: 4058 - DNA, 40 bp, Artificial Sequence
  Synthetic Oligonucleotide
cactatccgtagatccgtcactcactacgtgtatggaatc

SEQ ID NO: 4059 - DNA, 40 bp, Artificial Sequence
  Synthetic Oligonucleotide
cactatccgtagatccgtcactcactacgcgtatgtaatc

SEQ ID NO: 4060 - DNA, 40 bp, Artificial Sequence
  Synthetic Oligonucleotide
cactatccgtagatccgtcactcactacgcgtatggagtc

SEQ ID NO: 4061 - DNA, 40 bp, Artificial Sequence
  Synthetic Oligonucleotide
cactatccgtagatccgtcactcactacgagtatggaatc

SEQ ID NO: 4062 - DNA, 40 bp, Artificial Sequence
  Synthetic Oligonucleotide
cactatccgtagatccgtcactcactacacgtatggaatc

SEQ ID NO: 4063 - DNA, 40 bp, Artificial Sequence
  Synthetic Oligonucleotide
cactatccgtagatccgtcactcaccacgcgtatggaatc

SEQ ID NO: 4064 - DNA, 40 bp, Artificial Sequence
  Synthetic Oligonucleotide
cactatccgtagatccgtcacccactacgcgtatggaatc

SEQ ID NO: 4065 - DNA, 40 bp, Artificial Sequence
  Synthetic Oligonucleotide
cactatccgtagacccgtcactcactacgcgtatagaatc

SEQ ID NO: 4066 - DNA, 40 bp, Artificial Sequence
  Synthetic Oligonucleotide
cactatccggttgtccgtcctcttgtggtattgcgcatgc

SEQ ID NO: 4067 - DNA, 40 bp, Artificial Sequence
  Synthetic Oligonucleotide
cactatccggtcaggacgtctttcgtgcactatcacgatt

SEQ ID NO: 4068 - DNA, 40 bp, Artificial Sequence
  Synthetic Oligonucleotide
cactatccgcttgtctgtcctctcgtggtattgcgcatgc

SEQ ID NO: 4069 - DNA, 40 bp, Artificial Sequence
  Synthetic Oligonucleotide
cactatccgcttgtccgtcctcttgtggtgttgcgcgtgc

SEQ ID NO: 4070 - DNA, 40 bp, Artificial Sequence
  Synthetic Oligonucleotide
cactatccgcttgtccgtcctcttgtggtgttgcgcatgc

SEQ ID NO: 4071 - DNA, 40 bp, Artificial Sequence
  Synthetic Oligonucleotide
cactatccgcttgtccgtcctcttgtggtattgcgcatac

SEQ ID NO: 4072 - DNA, 40 bp, Artificial Sequence
  Synthetic Oligonucleotide
cactatccgcttgtccgtcctcttgtggtattgcgcacgc

SEQ ID NO: 4073 - DNA, 40 bp, Artificial Sequence
  Synthetic Oligonucleotide
cactatccgcttgtccgtcctctggtggtattgcgcatgc

SEQ ID NO: 4074 - DNA, 40 bp, Artificial Sequence
  Synthetic Oligonucleotide
cactatccgcttgtccgtcctctcgtggtattgcgcatac

SEQ ID NO: 4075 - DNA, 40 bp, Artificial Sequence
  Synthetic Oligonucleotide
cactatccgcttgtccgtcctcctgtggtattgcgcatgc

SEQ ID NO: 4076 - DNA, 40 bp, Artificial Sequence
  Synthetic Oligonucleotide
cactatccgcttgtccatcctcttgtggtattgcgcatgc

SEQ ID NO: 4077 - DNA, 40 bp, Artificial Sequence
  Synthetic Oligonucleotide
cactatccgcttgcccgtcctcttgtggtattgcgcatgc

SEQ ID NO: 4078 - DNA, 40 bp, Artificial Sequence
  Synthetic Oligonucleotide
cactatccgcttatgttcgcctttctctcggttgcgcgtt

SEQ ID NO: 4079 - DNA, 40 bp, Artificial Sequence
  Synthetic Oligonucleotide
cactatccgcttatgttcgcctccctctcggttgcgcgtt

SEQ ID NO: 4080 - DNA, 40 bp, Artificial Sequence
  Synthetic Oligonucleotide
cactatccgcttatgttcacctctctctcggttgcgcgtt

SEQ ID NO: 4081 - DNA, 40 bp, Artificial Sequence
  Synthetic Oligonucleotide
cactatccgctcgtccgtcctcctgtggtattgcgcatgc

SEQ ID NO: 4082 - DNA, 40 bp, Artificial Sequence
  Synthetic Oligonucleotide
cactatccgcgatcgagcgaatcgcattataaatcgcatg

SEQ ID NO: 4083 - DNA, 40 bp, Artificial Sequence
  Synthetic Oligonucleotide
cactatccgcgatcgagcgaatcgcatcataagtcgcatg

SEQ ID NO: 4084 - DNA, 40 bp, Artificial Sequence
  Synthetic Oligonucleotide
cactatccgcgatcgagcgaatcgcatcataaaccgcatg

SEQ ID NO: 4085 - DNA, 40 bp, Artificial Sequence
  Synthetic Oligonucleotide
cactatccgccatcgagcggacagtgtgccgttttcggtg

SEQ ID NO: 4086 - DNA, 40 bp, Artificial Sequence
  Synthetic Oligonucleotide
cactatccgccatcgagcgaacagtgtgccgttttcggtg

SEQ ID NO: 4087 - DNA, 40 bp, Artificial Sequence
  Synthetic Oligonucleotide
cactatccgcatggagcgggttcttcgataatatgcagca

SEQ ID NO: 4088 - DNA, 40 bp, Artificial Sequence
  Synthetic Oligonucleotide
cactatccgcatcgagctttcgtccgggagtgtgtagcta

SEQ ID NO: 4089 - DNA, 40 bp, Artificial Sequence
  Synthetic Oligonucleotide
cactatccgcatcgagcgggttcttcgataatatgcaaca

SEQ ID NO: 4090 - DNA, 40 bp, Artificial Sequence
  Synthetic Oligonucleotide
cactatccgcatcgacgcgttagtcttgctgtcatgcggc

SEQ ID NO: 4091 - DNA, 40 bp, Artificial Sequence
  Synthetic Oligonucleotide
cactatccgcatcgacgcgttagtctcgctgtcatgcagc

SEQ ID NO: 4092 - DNA, 40 bp, Artificial Sequence
  Synthetic Oligonucleotide
cactatccgcatcgacgcgttagtcctgctgtcatgcagc

SEQ ID NO: 4093 - DNA, 40 bp, Artificial Sequence
  Synthetic Oligonucleotide
cactatccgacgtcgagagagctacgtcatcaagcgctaa

SEQ ID NO: 4094 - DNA, 40 bp, Artificial Sequence
  Synthetic Oligonucleotide
cactatccgacatcgagagggctacgtcatcaagcgctaa

SEQ ID NO: 4095 - DNA, 40 bp, Artificial Sequence
  Synthetic Oligonucleotide
cactatccgacatcgagagagttacgtcatcaagcgctaa

SEQ ID NO: 4096 - DNA, 40 bp, Artificial Sequence
  Synthetic Oligonucleotide
cactatccgacatcgagagagctgcgtcatcaagcgctaa

SEQ ID NO: 4097 - DNA, 40 bp, Artificial Sequence
  Synthetic Oligonucleotide
cactatccgacatcgagagagctccgtcatcaagcgctaa

SEQ ID NO: 4098 - DNA, 40 bp, Artificial Sequence
  Synthetic Oligonucleotide
cactatccgacatcgagagagctacgtcgtcaagcgctaa

SEQ ID NO: 4099 - DNA, 40 bp, Artificial Sequence
  Synthetic Oligonucleotide
cactatccgacatcgagagagctacgtcattaagcgctaa

SEQ ID NO: 4100 - DNA, 40 bp, Artificial Sequence
  Synthetic Oligonucleotide
cactatccgacatcgagagagctacgtcatcaagtgctaa

SEQ ID NO: 4101 - DNA, 40 bp, Artificial Sequence
  Synthetic Oligonucleotide
cactatccgacatcgagagagctacgtcatcaagcgctga

SEQ ID NO: 4102 - DNA, 40 bp, Artificial Sequence
  Synthetic Oligonucleotide
cactatccgacatcgagagagctacgtcatcaagcgctat

SEQ ID NO: 4103 - DNA, 40 bp, Artificial Sequence
  Synthetic Oligonucleotide
cactatccgacatcgagagagctacgtcatcaagcgctag

SEQ ID NO: 4104 - DNA, 40 bp, Artificial Sequence
  Synthetic Oligonucleotide
cactatccgacatcgagagagctacgtcaacaagcgctaa

SEQ ID NO: 4105 - DNA, 40 bp, Artificial Sequence
  Synthetic Oligonucleotide
cactatccgaatcgagcttgagtgtctggttaaacaacga

SEQ ID NO: 4106 - DNA, 40 bp, Artificial Sequence
  Synthetic Oligonucleotide
cactatccccatcgagcggtcgtcgtaacactgcttccaa

SEQ ID NO: 4107 - DNA, 40 bp, Artificial Sequence
  Synthetic Oligonucleotide
cactatccccatcgagcgatcgtcgtaatactgctttcaa

SEQ ID NO: 4108 - DNA, 40 bp, Artificial Sequence
  Synthetic Oligonucleotide
cactatccccatcgagcgatcgtcgtaatactgcttctaa

SEQ ID NO: 4109 - DNA, 40 bp, Artificial Sequence
  Synthetic Oligonucleotide
cactatccccatcgagcgatcgtcgtaatactgcttccag

SEQ ID NO: 4110 - DNA, 40 bp, Artificial Sequence
  Synthetic Oligonucleotide
cactatccccatcgagcgatcatcgtaatactgcttccaa

SEQ ID NO: 4111 - DNA, 40 bp, Artificial Sequence
  Synthetic Oligonucleotide
cactatacgtttgtccgtcctcttgtggtattgcgcatgc

SEQ ID NO: 4112 - DNA, 40 bp, Artificial Sequence
  Synthetic Oligonucleotide
cactatacgtagatccgtcactcactacgcgtatggaatc

SEQ ID NO: 4113 - DNA, 40 bp, Artificial Sequence
  Synthetic Oligonucleotide
cactacccgtttgtccgtcctctcatggtattgcgcatgc

SEQ ID NO: 4114 - DNA, 40 bp, Artificial Sequence
  Synthetic Oligonucleotide
cactaaccgtttgtccgtcctctcgtggtattgcgcatgc

SEQ ID NO: 4115 - DNA, 40 bp, Artificial Sequence
  Synthetic Oligonucleotide
cacgttgaatgttatccgccctgcttccgtccctaagctg

SEQ ID NO: 4116 - DNA, 40 bp, Artificial Sequence
  Synthetic Oligonucleotide
cacgttgaacgttatccgccttgcttccgtccctaagctg

SEQ ID NO: 4117 - DNA, 40 bp, Artificial Sequence
  Synthetic Oligonucleotide
cacgttccacagtcatgactgttctcttgggttggatatc

SEQ ID NO: 4118 - DNA, 40 bp, Artificial Sequence
  Synthetic Oligonucleotide
cacgtcttccccgcattgccgcaattgccatacattaata

SEQ ID NO: 4119 - DNA, 40 bp, Artificial Sequence
  Synthetic Oligonucleotide
cacgtacgtgagattgcctcgctactctcctttgcagctg

SEQ ID NO: 4120 - DNA, 40 bp, Artificial Sequence
  Synthetic Oligonucleotide
cacgtacgtcgagattgcctcgctactctctttgcagctg

SEQ ID NO: 4121 - DNA, 40 bp, Artificial Sequence
  Synthetic Oligonucleotide
cacgtaagggtattgctggtcgccaacttcctagccgcac

SEQ ID NO: 4122 - DNA, 40 bp, Artificial Sequence
  Synthetic Oligonucleotide
cacggattccctccttactgccgcctcaagtattcttgcg

SEQ ID NO: 4123 - DNA, 40 bp, Artificial Sequence
  Synthetic Oligonucleotide
cacgcttctcggattgttccgtcctctcctaatcgcgccg

SEQ ID NO: 4124 - DNA, 40 bp, Artificial Sequence
  Synthetic Oligonucleotide
cacgcttctcggattgttccgtcctctcctaatcgcgcca

SEQ ID NO: 4125 - DNA, 40 bp, Artificial Sequence
  Synthetic Oligonucleotide
cacgcctctatctcggatcagcaacatatgccgctacatc

SEQ ID NO: 4126 - DNA, 40 bp, Artificial Sequence
  Synthetic Oligonucleotide
cacgcctctatctcggatcagcaacaaatgccgctacatc

SEQ ID NO: 4127 - DNA, 40 bp, Artificial Sequence
  Synthetic Oligonucleotide
cacgcccgggactgtcgcgtcgaagacatgcatggcacta

SEQ ID NO: 4128 - DNA, 40 bp, Artificial Sequence
  Synthetic Oligonucleotide
cacgcagcctcggtcctacacagcatggccatgccgttat

SEQ ID NO: 4129 - DNA, 40 bp, Artificial Sequence
  Synthetic Oligonucleotide
cacgagtttcggtcaccctacgcgcaggtgtgcttgttcc

SEQ ID NO: 4130 - DNA, 40 bp, Artificial Sequence
  Synthetic Oligonucleotide
cacctctcggacgtcatttctgcctcgttcctctcgtttg

SEQ ID NO: 4131 - DNA, 40 bp, Artificial Sequence
  Synthetic Oligonucleotide
caccgtgactacacggatttctgcccgaatcggcaattgt

SEQ ID NO: 4132 - DNA, 40 bp, Artificial Sequence
  Synthetic Oligonucleotide
caccggaagttcctcctcgtcttgatgcactatcatctca

SEQ ID NO: 4133 - DNA, 40 bp, Artificial Sequence
  Synthetic Oligonucleotide
caccggaagtccttcctcgtcttgatgcactatcatctca

SEQ ID NO: 4134 - DNA, 40 bp, Artificial Sequence
  Synthetic Oligonucleotide
caccggaacgcctcgatcctcgcataatatgatacgtctg

SEQ ID NO: 4135 - DNA, 40 bp, Artificial Sequence
  Synthetic Oligonucleotide
caccgcggtggatgactctatcggtgactacaccgtaata

SEQ ID NO: 4136 - DNA, 40 bp, Artificial Sequence
  Synthetic Oligonucleotide
caccgcggtggacgactctatcggtgactacaccgtaata

SEQ ID NO: 4137 - DNA, 40 bp, Artificial Sequence
  Synthetic Oligonucleotide
caccatccgtaatcgagcgggtacgtcaaattgcccccca

SEQ ID NO: 4138 - DNA, 40 bp, Artificial Sequence
  Synthetic Oligonucleotide
cacattgaatgttatccgccttgcttccgtccctaagctg

SEQ ID NO: 4139 - DNA, 40 bp, Artificial Sequence
  Synthetic Oligonucleotide
cacaatcggctcgctttcagacgcctctaatacgactgta

SEQ ID NO: 4140 - DNA, 40 bp, Artificial Sequence
  Synthetic Oligonucleotide
cacaactcgagatcccatatcctccttgccgcttcccatg

SEQ ID NO: 4141 - DNA, 40 bp, Artificial Sequence
  Synthetic Oligonucleotide
caatgcttggtctcctgtcgactctgcggctgagactact

SEQ ID NO: 4142 - DNA, 40 bp, Artificial Sequence
  Synthetic Oligonucleotide
caatgcttgatctcctgtcgactctgcggctgaggctact

SEQ ID NO: 4143 - DNA, 40 bp, Artificial Sequence
  Synthetic Oligonucleotide
caatgcttgatctcctgtcgactctgcggctgagaactct

SEQ ID NO: 4144 - DNA, 40 bp, Artificial Sequence
  Synthetic Oligonucleotide
caatgcttgatctcctgtcgactccgcggctgagactact

SEQ ID NO: 4145 - DNA, 40 bp, Artificial Sequence
  Synthetic Oligonucleotide
caatgcttgatctcctgccgactctgcggctgagactacc

SEQ ID NO: 4146 - DNA, 40 bp, Artificial Sequence
  Synthetic Oligonucleotide
caatgcttgatctcctctcgactctgcggctgagactact

SEQ ID NO: 4147 - DNA, 40 bp, Artificial Sequence
  Synthetic Oligonucleotide
caatgcttgatctcctatcgactctgcggctgagactact

SEQ ID NO: 4148 - DNA, 40 bp, Artificial Sequence
  Synthetic Oligonucleotide
caatgcttgatatcctgtcgactctgcggctgagactact

SEQ ID NO: 4149 - DNA, 40 bp, Artificial Sequence
  Synthetic Oligonucleotide
caatgctagatcccctgtcgactctgcggctgagactact

SEQ ID NO: 4150 - DNA, 40 bp, Artificial Sequence
  Synthetic Oligonucleotide
caatcctcacagtcgtttagaattctggttccgttccttc

SEQ ID NO: 4151 - DNA, 40 bp, Artificial Sequence
  Synthetic Oligonucleotide
caagtacgagatgcagctcttctctttccgcctcggttaa

SEQ ID NO: 4152 - DNA, 40 bp, Artificial Sequence
  Synthetic Oligonucleotide
caagatgctgaaactcgtacgacaacagcctcgttcgctg

SEQ ID NO: 4153 - DNA, 40 bp, Artificial Sequence
  Synthetic Oligonucleotide
caacgcttgatctcctgtcgactctgcggctgagactact

SEQ ID NO: 4154 - DNA, 40 bp, Artificial Sequence
  Synthetic Oligonucleotide
caacgactttcccttctcggatatcttattgccgcggcac

SEQ ID NO: 4155 - DNA, 40 bp, Artificial Sequence
  Synthetic Oligonucleotide
caaccggggccctgcctcaagctagctacctccattgctg

SEQ ID NO: 4156 - DNA, 40 bp, Artificial Sequence
  Synthetic Oligonucleotide
caaccggggcccgcctcgagctagctacctccattgtctg

SEQ ID NO: 4157 - DNA, 40 bp, Artificial Sequence
  Synthetic Oligonucleotide
caaccgggacccgcctcaagctggctacctccattgtctg

SEQ ID NO: 4158 - DNA, 40 bp, Artificial Sequence
  Synthetic Oligonucleotide
caacacttccaggtaccttgacactgcgcagtgtagtata

SEQ ID NO: 4159 - DNA, 40 bp, Artificial Sequence
  Synthetic Oligonucleotide
caacaaaaactgtgcactcggatcacaccttcctctctgc

SEQ ID NO: 4160 - DNA, 40 bp, Artificial Sequence
  Synthetic Oligonucleotide
caaatcctccggccgcttcgaaatagtacgatagtctgcg

SEQ ID NO: 4161 - DNA, 40 bp, Artificial Sequence
  Synthetic Oligonucleotide
caaatcctccggccgcctcgaaatagtatgatagtctgcg

SEQ ID NO: 4162 - DNA, 40 bp, Artificial Sequence
  Synthetic Oligonucleotide
atttgggcctcgattcttcccacataggcatgccatgtta

SEQ ID NO: 4163 - DNA, 40 bp, Artificial Sequence
  Synthetic Oligonucleotide
atttgaagcgcaccagctaatagcatggcccccttaactg

SEQ ID NO: 4164 - DNA, 40 bp, Artificial Sequence
  Synthetic Oligonucleotide
atttccgtctaacacgtgcactatcacggctttagttaga

SEQ ID NO: 4165 - DNA, 40 bp, Artificial Sequence
  Synthetic Oligonucleotide
attgttgcctgggctcctctctacgattgcaatcgacaaa

SEQ ID NO: 4166 - DNA, 40 bp, Artificial Sequence
  Synthetic Oligonucleotide
attgtgtacacactagtatgcctcgttcacttaggccgcg

SEQ ID NO: 4167 - DNA, 40 bp, Artificial Sequence
  Synthetic Oligonucleotide
attggtcctggggtatccgcctcgctaagtttgtgcatgc

SEQ ID NO: 4168 - DNA, 40 bp, Artificial Sequence
  Synthetic Oligonucleotide
attgccagctggaattgcgcctcgactgccagtgtccgga

SEQ ID NO: 4169 - DNA, 40 bp, Artificial Sequence
  Synthetic Oligonucleotide
attgattccagcgacttcggtggtgtcctctccattacca

SEQ ID NO: 4170 - DNA, 40 bp, Artificial Sequence
  Synthetic Oligonucleotide
attgagcctcgaggagatccgcctcaagctccagtctggc

SEQ ID NO: 4171 - DNA, 40 bp, Artificial Sequence
  Synthetic Oligonucleotide
attgaattccagcgacttcgtggtgtcctctccattacca

SEQ ID NO: 4172 - DNA, 40 bp, Artificial Sequence
  Synthetic Oligonucleotide
attcttgtttttaagttggcgaggtcctctaacttttggg

SEQ ID NO: 4173 - DNA, 40 bp, Artificial Sequence
  Synthetic Oligonucleotide
attctgttttttaagtttggcgaggtcctctaactttggg

SEQ ID NO: 4174 - DNA, 40 bp, Artificial Sequence
  Synthetic Oligonucleotide
attctgttttttaagttggcggggtcctctaacttttggg

SEQ ID NO: 4175 - DNA, 40 bp, Artificial Sequence
  Synthetic Oligonucleotide
attctgttttttaagttggcgaggtcctctatcttttggg

SEQ ID NO: 4176 - DNA, 40 bp, Artificial Sequence
  Synthetic Oligonucleotide
attctgtttttaagttggcgaggctcctctaacttttggg

SEQ ID NO: 4177 - DNA, 40 bp, Artificial Sequence
  Synthetic Oligonucleotide
attctcgtcgccgttcaatcgactacgcttgatcatgtgg

SEQ ID NO: 4178 - DNA, 40 bp, Artificial Sequence
  Synthetic Oligonucleotide
attctcgcctctgtcctcatggttcgaaccggtgtgcatg

SEQ ID NO: 4179 - DNA, 40 bp, Artificial Sequence
  Synthetic Oligonucleotide
attctcgcctctgtcctcatggttcgaaccggtatgcatg

SEQ ID NO: 4180 - DNA, 40 bp, Artificial Sequence
  Synthetic Oligonucleotide
attctcgcctcctcgtccatggttcgaaccggtatgcatg

SEQ ID NO: 4181 - DNA, 40 bp, Artificial Sequence
  Synthetic Oligonucleotide
attctagactaagcctcttgccccctaaccggtttgcatg

SEQ ID NO: 4182 - DNA, 40 bp, Artificial Sequence
  Synthetic Oligonucleotide
attcgaagcgcaccagctaatagcatggcccccttaactg

SEQ ID NO: 4183 - DNA, 40 bp, Artificial Sequence
  Synthetic Oligonucleotide
attcccctggagtgttgagtcggtcaagcactatcttgaa

SEQ ID NO: 4184 - DNA, 40 bp, Artificial Sequence
  Synthetic Oligonucleotide
attcagctggagcgctatctctggcaaatgggaccgtttc

SEQ ID NO: 4185 - DNA, 40 bp, Artificial Sequence
  Synthetic Oligonucleotide
attatatgggcccagattcgcctccggtccaaccatatcg

SEQ ID NO: 4186 - DNA, 40 bp, Artificial Sequence
  Synthetic Oligonucleotide
attactggaaacgccgcctcgttctatctccggtgcaccg

SEQ ID NO: 4187 - DNA, 40 bp, Artificial Sequence
  Synthetic Oligonucleotide
attacagcgcccaggatgccccgtttcccgtgttcgggat

SEQ ID NO: 4188 - DNA, 40 bp, Artificial Sequence
  Synthetic Oligonucleotide
attacagcgcccagaatgccccgtttcccgcgttcgggat

SEQ ID NO: 4189 - DNA, 40 bp, Artificial Sequence
  Synthetic Oligonucleotide
attacagcgcccagaataccccgtttcccgtgttcgggat

SEQ ID NO: 4190 - DNA, 40 bp, Artificial Sequence
  Synthetic Oligonucleotide
attacagcgccagaatgccccgcttccccgtgttcgggat

SEQ ID NO: 4191 - DNA, 40 bp, Artificial Sequence
  Synthetic Oligonucleotide
attaattccagcgatttcggtggtgtcctctccattacca

SEQ ID NO: 4192 - DNA, 40 bp, Artificial Sequence
  Synthetic Oligonucleotide
attaattccagcgacttcggtggtgtcctctccattgcca

SEQ ID NO: 4193 - DNA, 40 bp, Artificial Sequence
  Synthetic Oligonucleotide
attaattccagcgacttcggtggtgtcctctccattacta

SEQ ID NO: 4194 - DNA, 40 bp, Artificial Sequence
  Synthetic Oligonucleotide
attaattccagcgacttcggtggtgtcctctccatcacca

SEQ ID NO: 4195 - DNA, 40 bp, Artificial Sequence
  Synthetic Oligonucleotide
attaattccagcgacttcggcggtgtcctctccattacca

SEQ ID NO: 4196 - DNA, 40 bp, Artificial Sequence
  Synthetic Oligonucleotide
attaattccagcgacctcggtggtgtcctctccattacca

SEQ ID NO: 4197 - DNA, 40 bp, Artificial Sequence
  Synthetic Oligonucleotide
attaatcccagcgacttcggtggcgtcctctccattacca

SEQ ID NO: 4198 - DNA, 40 bp, Artificial Sequence
  Synthetic Oligonucleotide
attaataccagcgacttcggtggtgtcctctccattacca

SEQ ID NO: 4199 - DNA, 40 bp, Artificial Sequence
  Synthetic Oligonucleotide
attaacttcagcgacttcggtggtgtcctctccattacca

SEQ ID NO: 4200 - DNA, 40 bp, Artificial Sequence
  Synthetic Oligonucleotide
attaactccggcgacttcggtggtgtcctctccattacca

SEQ ID NO: 4201 - DNA, 40 bp, Artificial Sequence
  Synthetic Oligonucleotide
attaactccagcgacttcggcggtgtcctctccattacca

SEQ ID NO: 4202 - DNA, 40 bp, Artificial Sequence
  Synthetic Oligonucleotide
attaacggtacagatgcttccgcctgggttcctcctgtcg

SEQ ID NO: 4203 - DNA, 40 bp, Artificial Sequence
  Synthetic Oligonucleotide
atgttccactgacgctctgacactatcagtgacgtctcga

SEQ ID NO: 4204 - DNA, 40 bp, Artificial Sequence
  Synthetic Oligonucleotide
atgtggcttttaagcacttctcggtaacttgggcagttac

SEQ ID NO: 4205 - DNA, 40 bp, Artificial Sequence
  Synthetic Oligonucleotide
atgtcctgacgcttctggcactatccagttgatcgactca

SEQ ID NO: 4206 - DNA, 40 bp, Artificial Sequence
  Synthetic Oligonucleotide
atgtcccattgacgctctggcactatccagttgacgctca

SEQ ID NO: 4207 - DNA, 40 bp, Artificial Sequence
  Synthetic Oligonucleotide
atgtccattgagcttctggcatctatccagttgacgctca

SEQ ID NO: 4208 - DNA, 40 bp, Artificial Sequence
  Synthetic Oligonucleotide
atgtccattgagctctggcatctagtccagttgacgctca

SEQ ID NO: 4209 - DNA, 40 bp, Artificial Sequence
  Synthetic Oligonucleotide
atgtccatgagtcttctggccactatccagttgacgctca

SEQ ID NO: 4210 - DNA, 40 bp, Artificial Sequence
  Synthetic Oligonucleotide
atgtccatgagtcttctcggcactacccagttgacgctca

SEQ ID NO: 4211 - DNA, 40 bp, Artificial Sequence
  Synthetic Oligonucleotide
atgtccatgagcttctggtcatctatccagttgacgctca

SEQ ID NO: 4212 - DNA, 40 bp, Artificial Sequence
  Synthetic Oligonucleotide
atgtccatgagcttctggcatcttatccagttgacgctca

SEQ ID NO: 4213 - DNA, 40 bp, Artificial Sequence
  Synthetic Oligonucleotide
atgtccatgagcttctggcatctatccagcttgacgctca

SEQ ID NO: 4214 - DNA, 40 bp, Artificial Sequence
  Synthetic Oligonucleotide
atgtccatgagcttctggcactatccagttgacgtctcga

SEQ ID NO: 4215 - DNA, 40 bp, Artificial Sequence
  Synthetic Oligonucleotide
atgtccatgagcttctggcactatccagttgaacgctaca

SEQ ID NO: 4216 - DNA, 40 bp, Artificial Sequence
  Synthetic Oligonucleotide
atgtccatgagcttacctggcactatccagttgacgctca

SEQ ID NO: 4217 - DNA, 40 bp, Artificial Sequence
  Synthetic Oligonucleotide
atgtccatgagccttctggcacgtatccagttgacgctca

SEQ ID NO: 4218 - DNA, 40 bp, Artificial Sequence
  Synthetic Oligonucleotide
atgtccatgacgcttctggcactatccagttgacgtctca

SEQ ID NO: 4219 - DNA, 40 bp, Artificial Sequence
  Synthetic Oligonucleotide
atgtccatgacgcttctggacactatccagttgacgctca

SEQ ID NO: 4220 - DNA, 40 bp, Artificial Sequence
  Synthetic Oligonucleotide
atgtccatgacgctactggacactatccagttgacgctca

SEQ ID NO: 4221 - DNA, 40 bp, Artificial Sequence
  Synthetic Oligonucleotide
atgtccactgagctctggacactatcattgacgtgctcga

SEQ ID NO: 4222 - DNA, 40 bp, Artificial Sequence
  Synthetic Oligonucleotide
atgtcatatgacaactcggataccgcattgtctatgtacg

SEQ ID NO: 4223 - DNA, 40 bp, Artificial Sequence
  Synthetic Oligonucleotide
atgtcagtcgcgctgctcggccactatcccattacgctca

SEQ ID NO: 4224 - DNA, 40 bp, Artificial Sequence
  Synthetic Oligonucleotide
atggttcatgagctattcgtgcatatccagttgacgctca

SEQ ID NO: 4225 - DNA, 40 bp, Artificial Sequence
  Synthetic Oligonucleotide
atggtggcttttaagcacttctcgtaacttgggcagttac

SEQ ID NO: 4226 - DNA, 40 bp, Artificial Sequence
  Synthetic Oligonucleotide
atggtcccatgagctctggcactatcccagttgacgctca

SEQ ID NO: 4227 - DNA, 40 bp, Artificial Sequence
  Synthetic Oligonucleotide
atggtccattgggcttctggcactatccagttgacgctca

SEQ ID NO: 4228 - DNA, 40 bp, Artificial Sequence
  Synthetic Oligonucleotide
atggtccattgagcttctggcgctatccagttgacgctca

SEQ ID NO: 4229 - DNA, 40 bp, Artificial Sequence
  Synthetic Oligonucleotide
atggtccattgagcttctggcactatccagttgacgctcg

SEQ ID NO: 4230 - DNA, 40 bp, Artificial Sequence
  Synthetic Oligonucleotide
atggtccatgagcttcttggcactatccagttgacgctca

SEQ ID NO: 4231 - DNA, 40 bp, Artificial Sequence
  Synthetic Oligonucleotide
atggtccatgagcttctgggcactatccagttgacgctca

SEQ ID NO: 4232 - DNA, 40 bp, Artificial Sequence
  Synthetic Oligonucleotide
atggtccatgagcttctggcgctatcccagttgacgctca

SEQ ID NO: 4233 - DNA, 40 bp, Artificial Sequence
  Synthetic Oligonucleotide
atggtccatgagcttctggcagctatccagttgacgctca

SEQ ID NO: 4234 - DNA, 40 bp, Artificial Sequence
  Synthetic Oligonucleotide
atggtccatgagcttctggcacttatccagttgacgctca

SEQ ID NO: 4235 - DNA, 40 bp, Artificial Sequence
  Synthetic Oligonucleotide
atggtccatgagcttctggcactatcctagttgacgctca

SEQ ID NO: 4236 - DNA, 40 bp, Artificial Sequence
  Synthetic Oligonucleotide
atggtccatgagcttctggcactatccagttgatcgctca

SEQ ID NO: 4237 - DNA, 40 bp, Artificial Sequence
  Synthetic Oligonucleotide
atggtccatgagcttctggcactatccagttgacgcttca

SEQ ID NO: 4238 - DNA, 40 bp, Artificial Sequence
  Synthetic Oligonucleotide
atggtccatgagcttctggcactatccagttgacgctcta

SEQ ID NO: 4239 - DNA, 40 bp, Artificial Sequence
  Synthetic Oligonucleotide
atggtccatgagcttctggcactatccagttgacgctcga

SEQ ID NO: 4240 - DNA, 40 bp, Artificial Sequence
  Synthetic Oligonucleotide
atggtccatgagcttctggcactatccagttgacgctaca

SEQ ID NO: 4241 - DNA, 40 bp, Artificial Sequence
  Synthetic Oligonucleotide
atggtccatgagcttctggcactatccagttgacgcctca

SEQ ID NO: 4242 - DNA, 40 bp, Artificial Sequence
  Synthetic Oligonucleotide
atggtccatgagcttctggcactatccagttgacgcatca

SEQ ID NO: 4243 - DNA, 40 bp, Artificial Sequence
  Synthetic Oligonucleotide
atggtccatgagcttctggcactatccagttgaacgctca

SEQ ID NO: 4244 - DNA, 40 bp, Artificial Sequence
  Synthetic Oligonucleotide
atggtccatgagcttctggcactatccagcttgacgctca

SEQ ID NO: 4245 - DNA, 40 bp, Artificial Sequence
  Synthetic Oligonucleotide
atggtccatgagcttctggcactataccagttgacgctca

SEQ ID NO: 4246 - DNA, 40 bp, Artificial Sequence
  Synthetic Oligonucleotide
atggtccatgagcttctggcactaccactagctgacgcca

SEQ ID NO: 4247 - DNA, 40 bp, Artificial Sequence
  Synthetic Oligonucleotide
atggtccatgagcttctggcacctatccagttgacgctca

SEQ ID NO: 4248 - DNA, 40 bp, Artificial Sequence
  Synthetic Oligonucleotide
atggtccatgagcttctggcaccatccagttgaacgctca

SEQ ID NO: 4249 - DNA, 40 bp, Artificial Sequence
  Synthetic Oligonucleotide
atggtccatgagcttctggcaatatccacgttgacgctca

SEQ ID NO: 4250 - DNA, 40 bp, Artificial Sequence
  Synthetic Oligonucleotide
atggtccatgagcttctggcaactatccagttgacgctca

SEQ ID NO: 4251 - DNA, 40 bp, Artificial Sequence
  Synthetic Oligonucleotide
atggtccatgagcttctgagcactatccagttgacgctca

SEQ ID NO: 4252 - DNA, 40 bp, Artificial Sequence
  Synthetic Oligonucleotide
atggtccatgagctacctggcactatccagttgacgctca

SEQ ID NO: 4253 - DNA, 40 bp, Artificial Sequence
  Synthetic Oligonucleotide
atggtccatgagccttctggcactatccggttgacgctca

SEQ ID NO: 4254 - DNA, 40 bp, Artificial Sequence
  Synthetic Oligonucleotide
atggtccatgagcctctggcactatcccagttgacgctca

SEQ ID NO: 4255 - DNA, 40 bp, Artificial Sequence
  Synthetic Oligonucleotide
atggtccatgagcattctggcactatccagttgacgctca

SEQ ID NO: 4256 - DNA, 40 bp, Artificial Sequence
  Synthetic Oligonucleotide
atggtccatgacgcttctggcactatccggttgacgctca

SEQ ID NO: 4257 - DNA, 40 bp, Artificial Sequence
  Synthetic Oligonucleotide
atggtccatgacgctctggcatctatccagttgacgctca

SEQ ID NO: 4258 - DNA, 40 bp, Artificial Sequence
  Synthetic Oligonucleotide
atggtccatgacgctctggcactatccagttgacgtctca

SEQ ID NO: 4259 - DNA, 40 bp, Artificial Sequence
  Synthetic Oligonucleotide
atggtccatcgagcttctggcactatccagttgacgctca

SEQ ID NO: 4260 - DNA, 40 bp, Artificial Sequence
  Synthetic Oligonucleotide
atggtccactgagcttctggcgctatccagttgacgctca

SEQ ID NO: 4261 - DNA, 40 bp, Artificial Sequence
  Synthetic Oligonucleotide
atggtccactgagcttctggcactatccagttgacgctcg

SEQ ID NO: 4262 - DNA, 40 bp, Artificial Sequence
  Synthetic Oligonucleotide
atggtccactgagcttctggcaccatccagttgacgctca

SEQ ID NO: 4263 - DNA, 40 bp, Artificial Sequence
  Synthetic Oligonucleotide
atggtccactgagctctggccactatccagttgacgctca

SEQ ID NO: 4264 - DNA, 40 bp, Artificial Sequence
  Synthetic Oligonucleotide
atggtccactgagctctgacactatccagtgacgtctcga

SEQ ID NO: 4265 - DNA, 40 bp, Artificial Sequence
  Synthetic Oligonucleotide
atggtccacgagcttctggcactactccagttgacgctca

SEQ ID NO: 4266 - DNA, 40 bp, Artificial Sequence
  Synthetic Oligonucleotide
atgggtgctttaagcacttctcggtaacttgggcagttac

SEQ ID NO: 4267 - DNA, 40 bp, Artificial Sequence
  Synthetic Oligonucleotide
atggggcttttaagcacttctcggtaacttgagcagttac

SEQ ID NO: 4268 - DNA, 40 bp, Artificial Sequence
  Synthetic Oligonucleotide
atgggctttaagctcacttctcggtaacttgggcagttac

SEQ ID NO: 4269 - DNA, 40 bp, Artificial Sequence
  Synthetic Oligonucleotide
atgggagcttttaagcacttctcgtaacttgggcagttac

SEQ ID NO: 4270 - DNA, 40 bp, Artificial Sequence
  Synthetic Oligonucleotide
atgggagctttaagcacttctcggtaacttgggcagttac

SEQ ID NO: 4271 - DNA, 40 bp, Artificial Sequence
  Synthetic Oligonucleotide
atggcgaacgctatttctgggaagccgcatctcgagcgaa

SEQ ID NO: 4272 - DNA, 40 bp, Artificial Sequence
  Synthetic Oligonucleotide
atggattatacagcttcccgcctctgtccctatgcgtctg

SEQ ID NO: 4273 - DNA, 40 bp, Artificial Sequence
  Synthetic Oligonucleotide
atggatccatgagccttcggcactatccagttgacgctca

SEQ ID NO: 4274 - DNA, 40 bp, Artificial Sequence
  Synthetic Oligonucleotide
atggatccatgagccttcggcactatccagttgacgcaca

SEQ ID NO: 4275 - DNA, 40 bp, Artificial Sequence
  Synthetic Oligonucleotide
atggaggcttttaagcacttctcggtaacttggcagttac

SEQ ID NO: 4276 - DNA, 40 bp, Artificial Sequence
  Synthetic Oligonucleotide
atgctccggattttcctgcattacgttcatcccacgtgca

SEQ ID NO: 4277 - DNA, 40 bp, Artificial Sequence
  Synthetic Oligonucleotide
atgcgaagcgctattttctgggaaccgcatctcgagcgaa

SEQ ID NO: 4278 - DNA, 40 bp, Artificial Sequence
  Synthetic Oligonucleotide
atgcgaactgcctgtttggcgctatccaaattttaggcta

SEQ ID NO: 4279 - DNA, 40 bp, Artificial Sequence
  Synthetic Oligonucleotide
atgcccaaccacggtgtcgttgtcactgactacagtgtct

SEQ ID NO: 4280 - DNA, 40 bp, Artificial Sequence
  Synthetic Oligonucleotide
atgcatacattgcccctccacgcctcgtccccaatctgcg

SEQ ID NO: 4281 - DNA, 40 bp, Artificial Sequence
  Synthetic Oligonucleotide
atgatgggctttaagcacttctcggtaacttggcagttac

SEQ ID NO: 4282 - DNA, 40 bp, Artificial Sequence
  Synthetic Oligonucleotide
atgatgggcctttaagcacttctcgtaacttggcagttac

SEQ ID NO: 4283 - DNA, 40 bp, Artificial Sequence
  Synthetic Oligonucleotide
atgatggctttaagcacttcatcgtaacttgggcagttac

SEQ ID NO: 4284 - DNA, 40 bp, Artificial Sequence
  Synthetic Oligonucleotide
atgatccttcctcagcctccgcggtgcaggatttgcacgt

SEQ ID NO: 4285 - DNA, 40 bp, Artificial Sequence
  Synthetic Oligonucleotide
atgataagcacgattcctcctgtcctccttgcgcgcattt

SEQ ID NO: 4286 - DNA, 40 bp, Artificial Sequence
  Synthetic Oligonucleotide
atgagggcctttaagcacttctcgtaacttgggcagttac

SEQ ID NO: 4287 - DNA, 40 bp, Artificial Sequence
  Synthetic Oligonucleotide
atgaggcttttaagcacttctcggtaacttgggcagttac

SEQ ID NO: 4288 - DNA, 40 bp, Artificial Sequence
  Synthetic Oligonucleotide
atgaggccttaagcactttctcggataccttggtcagtac

SEQ ID NO: 4289 - DNA, 40 bp, Artificial Sequence
  Synthetic Oligonucleotide
atgaggccttaagcactttctcggataccttggcagtaac

SEQ ID NO: 4290 - DNA, 40 bp, Artificial Sequence
  Synthetic Oligonucleotide
atgactgcgggcatttgcctcgtgtttgtatcacgtgaga

SEQ ID NO: 4291 - DNA, 40 bp, Artificial Sequence
  Synthetic Oligonucleotide
atgactgcaggcatttgcctcgtgtttgcatcacgtgaga

SEQ ID NO: 4292 - DNA, 40 bp, Artificial Sequence
  Synthetic Oligonucleotide
atgacggccgaatcattccgcctcggctttctaaacgcat

SEQ ID NO: 4293 - DNA, 40 bp, Artificial Sequence
  Synthetic Oligonucleotide
atgacctgtgaatcgtttacctctggactacctggggcaa

SEQ ID NO: 4294 - DNA, 40 bp, Artificial Sequence
  Synthetic Oligonucleotide
atgaccgcctcatcatcggacacgactgtatcagttgctg

SEQ ID NO: 4295 - DNA, 40 bp, Artificial Sequence
  Synthetic Oligonucleotide
atgaccgcctcatcatcggacacgacgtgtatcagtgctg

SEQ ID NO: 4296 - DNA, 40 bp, Artificial Sequence
  Synthetic Oligonucleotide
atgaatactgcgtgagattgcgcctcggacctcccggccg

SEQ ID NO: 4297 - DNA, 40 bp, Artificial Sequence
  Synthetic Oligonucleotide
atgaactgtgaatcgtttacctctgggctacctggggcaa

SEQ ID NO: 4298 - DNA, 40 bp, Artificial Sequence
  Synthetic Oligonucleotide
atgaactgcgaatcgtttacctctggactacctggggcaa

SEQ ID NO: 4299 - DNA, 40 bp, Artificial Sequence
  Synthetic Oligonucleotide
atcttatccggcaggacgtctttcgtgcactatcacgatt

SEQ ID NO: 4300 - DNA, 40 bp, Artificial Sequence
  Synthetic Oligonucleotide
atctgttcgcctctggatcctcctctcggatatggctgcg

SEQ ID NO: 4301 - DNA, 40 bp, Artificial Sequence
  Synthetic Oligonucleotide
atctgcctcgctgtaagcttacttttacgtaaaatgcctc

SEQ ID NO: 4302 - DNA, 40 bp, Artificial Sequence
  Synthetic Oligonucleotide
atctcggggccccttttatgaaacttacatgaaagcgcac

SEQ ID NO: 4303 - DNA, 40 bp, Artificial Sequence
  Synthetic Oligonucleotide
atctccgtctagcacgtgcactatcacggctttagttaga

SEQ ID NO: 4304 - DNA, 40 bp, Artificial Sequence
  Synthetic Oligonucleotide
atctccgtctaacacgtgcgctatcacggctttagttaga

SEQ ID NO: 4305 - DNA, 40 bp, Artificial Sequence
  Synthetic Oligonucleotide
atctccgtctaacacgtgcactatcacggttttagttaga

SEQ ID NO: 4306 - DNA, 40 bp, Artificial Sequence
  Synthetic Oligonucleotide
atctccgtctaacacgtgcactatcacggctttagttgga

SEQ ID NO: 4307 - DNA, 40 bp, Artificial Sequence
  Synthetic Oligonucleotide
atctccgcctaacacgtgcactatcacggctttagttaga

SEQ ID NO: 4308 - DNA, 40 bp, Artificial Sequence
  Synthetic Oligonucleotide
atctactaccactagcgggctgtgatgtaaggccgtaata

SEQ ID NO: 4309 - DNA, 40 bp, Artificial Sequence
  Synthetic Oligonucleotide
atcgtgggctttagcacttctcggtaacttgggcagttac

SEQ ID NO: 4310 - DNA, 40 bp, Artificial Sequence
  Synthetic Oligonucleotide
atcgtcgggccctttacttgaaacttacatgaaagcgcac

SEQ ID NO: 4311 - DNA, 40 bp, Artificial Sequence
  Synthetic Oligonucleotide
atcgtcgggccccttttgtgaaacttacatgaaagcgcac

SEQ ID NO: 4312 - DNA, 40 bp, Artificial Sequence
  Synthetic Oligonucleotide
atcgtcgggccccttttatgaaacttacatgaaggcgcac

SEQ ID NO: 4313 - DNA, 40 bp, Artificial Sequence
  Synthetic Oligonucleotide
atcgtcgggccccttttatgaaaattacatgaaagcgcac

SEQ ID NO: 4314 - DNA, 40 bp, Artificial Sequence
  Synthetic Oligonucleotide
atcgtcgggcccctttcatgaaacttacatgaaagcgcac

SEQ ID NO: 4315 - DNA, 40 bp, Artificial Sequence
  Synthetic Oligonucleotide
atcgtcctgagcttgtggcacctatccagttgacgcttca

SEQ ID NO: 4316 - DNA, 40 bp, Artificial Sequence
  Synthetic Oligonucleotide
atcgtcctagcggattcgtctcgatcccccatgcgctgta

SEQ ID NO: 4317 - DNA, 40 bp, Artificial Sequence
  Synthetic Oligonucleotide
atcgtccatgagcttctgggcactatccagttgacgctca

SEQ ID NO: 4318 - DNA, 40 bp, Artificial Sequence
  Synthetic Oligonucleotide
atcgtccatgagcttcggcatctatccagttgacgctcta

SEQ ID NO: 4319 - DNA, 40 bp, Artificial Sequence
  Synthetic Oligonucleotide
atcgtacttaccaccctgacatcgcggggaactaatggtt

SEQ ID NO: 4320 - DNA, 40 bp, Artificial Sequence
  Synthetic Oligonucleotide
atcggtccgtgagccttcggcactatccagttgacgctca

SEQ ID NO: 4321 - DNA, 40 bp, Artificial Sequence
  Synthetic Oligonucleotide
atcggtccatgagccttcggcactatccagttgacgctcg

SEQ ID NO: 4322 - DNA, 40 bp, Artificial Sequence
  Synthetic Oligonucleotide
atcggatgggcctttagacacttctcgtacttggtagtac

SEQ ID NO: 4323 - DNA, 40 bp, Artificial Sequence
  Synthetic Oligonucleotide
atcgatgggctttaagcacttctcgtacttgagcagttac

SEQ ID NO: 4324 - DNA, 40 bp, Artificial Sequence
  Synthetic Oligonucleotide
atcgatgggccttttagcacttctcgtacttggcagttac

SEQ ID NO: 4325 - DNA, 40 bp, Artificial Sequence
  Synthetic Oligonucleotide
atcgagccttaacgcacttctcggtaccgtggtcagtgac

SEQ ID NO: 4326 - DNA, 40 bp, Artificial Sequence
  Synthetic Oligonucleotide
atcgaatcgcctcgatctctgacataatatgatacgtctg

SEQ ID NO: 4327 - DNA, 40 bp, Artificial Sequence
  Synthetic Oligonucleotide
atcgaagggcacgtgcaaaatcgcctcgttcctaacacag

SEQ ID NO: 4328 - DNA, 40 bp, Artificial Sequence
  Synthetic Oligonucleotide
atcctcacaatgcattgagaatatcttccattcttgaacg

SEQ ID NO: 4329 - DNA, 40 bp, Artificial Sequence
  Synthetic Oligonucleotide
atccgtggtacgcctcgattccgcccatacatgcgtgtaa

SEQ ID NO: 4330 - DNA, 40 bp, Artificial Sequence
  Synthetic Oligonucleotide
atccgtactcgtataattcaggatggcttattatctagct

SEQ ID NO: 4331 - DNA, 40 bp, Artificial Sequence
  Synthetic Oligonucleotide
atccgggacgcctcgatcctcgcataatatgatacgtctg

SEQ ID NO: 4332 - DNA, 40 bp, Artificial Sequence
  Synthetic Oligonucleotide
atccggagcgcctcgatcctcgcatagtatgatacgtctg

SEQ ID NO: 4333 - DNA, 40 bp, Artificial Sequence
  Synthetic Oligonucleotide
atccggaacgccttgatcctcgcataatatgatacgtcag

SEQ ID NO: 4334 - DNA, 40 bp, Artificial Sequence
  Synthetic Oligonucleotide
atccggaacgcctcgattctcgcataatatgatacgtctg

SEQ ID NO: 4335 - DNA, 40 bp, Artificial Sequence
  Synthetic Oligonucleotide
atccggaacgcctcgatcttcgcataatatgatacgtctg

SEQ ID NO: 4336 - DNA, 40 bp, Artificial Sequence
  Synthetic Oligonucleotide
atccggaacgcctcgatcctcgcattatatgatacgtctg

SEQ ID NO: 4337 - DNA, 40 bp, Artificial Sequence
  Synthetic Oligonucleotide
atccggaacgcctcgatcctcgcatataatgatacgtctg

SEQ ID NO: 4338 - DNA, 40 bp, Artificial Sequence
  Synthetic Oligonucleotide
atccggaacgcctcgatcctcgcatagtatgatacgtctg

SEQ ID NO: 4339 - DNA, 40 bp, Artificial Sequence
  Synthetic Oligonucleotide
atccggaacgcctcgatcctcgcataatatggtacgactg

SEQ ID NO: 4340 - DNA, 40 bp, Artificial Sequence
  Synthetic Oligonucleotide
atccggaacgcctcgatcctcgcataatatgattcgtctg

SEQ ID NO: 4341 - DNA, 40 bp, Artificial Sequence
  Synthetic Oligonucleotide
atccggaacgcctcgatcctcgcataatatgatgcgtctg

SEQ ID NO: 4342 - DNA, 40 bp, Artificial Sequence
  Synthetic Oligonucleotide
atccggaacgcctcgatcctcgcataatatgatacgtcgg

SEQ ID NO: 4343 - DNA, 40 bp, Artificial Sequence
  Synthetic Oligonucleotide
atccggaacgcctcgatcctcgcataatatgatacgtccg

SEQ ID NO: 4344 - DNA, 40 bp, Artificial Sequence
  Synthetic Oligonucleotide
atccggaacgcctcgatcctcgcataatatgatacggctg

SEQ ID NO: 4345 - DNA, 40 bp, Artificial Sequence
  Synthetic Oligonucleotide
atccggaacgcctcgatcctcgcataatatgatacgcctg

SEQ ID NO: 4346 - DNA, 40 bp, Artificial Sequence
  Synthetic Oligonucleotide
atccggaacgcctcgatcctcgcataatacgatacgtctg

SEQ ID NO: 4347 - DNA, 40 bp, Artificial Sequence
  Synthetic Oligonucleotide
atccggaacgcctcgatcctcgcataacatgatacgtctg

SEQ ID NO: 4348 - DNA, 40 bp, Artificial Sequence
  Synthetic Oligonucleotide
atccggaacgcctcgatcctcgcataaaatgatacgtctg

SEQ ID NO: 4349 - DNA, 40 bp, Artificial Sequence
  Synthetic Oligonucleotide
atccggaacgcctcgatcctcgcacaatatgatacgtctg

SEQ ID NO: 4350 - DNA, 40 bp, Artificial Sequence
  Synthetic Oligonucleotide
atccggaacgcctcgatcctcacataatatgatacgtctg

SEQ ID NO: 4351 - DNA, 40 bp, Artificial Sequence
  Synthetic Oligonucleotide
atccggaacgccccgatcctcgcataatatgatacgtctg

SEQ ID NO: 4352 - DNA, 40 bp, Artificial Sequence
  Synthetic Oligonucleotide
atccgcgccgggttctcattctcccgactacgtgagatta

SEQ ID NO: 4353 - DNA, 40 bp, Artificial Sequence
  Synthetic Oligonucleotide
atccgccttagatccgtccccttttctcccttgcgcaagg

SEQ ID NO: 4354 - DNA, 40 bp, Artificial Sequence
  Synthetic Oligonucleotide
atccgcctcgcttgtgcacaacttgcatcccgcgtctgcg

SEQ ID NO: 4355 - DNA, 40 bp, Artificial Sequence
  Synthetic Oligonucleotide
atccgcctcgcttgtgcacaactcgtatcccgcgtctgcg

SEQ ID NO: 4356 - DNA, 40 bp, Artificial Sequence
  Synthetic Oligonucleotide
atccgcctcgcttgtgcacaactcgcttcccgcgtctgcg

SEQ ID NO: 4357 - DNA, 40 bp, Artificial Sequence
  Synthetic Oligonucleotide
atccgcctcgcttgtgcacaactcgcatcccacgtctgcg

SEQ ID NO: 4358 - DNA, 40 bp, Artificial Sequence
  Synthetic Oligonucleotide
atccgcctcatcatcggacacgacgtgtatcagttggctg

SEQ ID NO: 4359 - DNA, 40 bp, Artificial Sequence
  Synthetic Oligonucleotide
atccgcctcatatcatcactagtgggcctcccctcgtttg

SEQ ID NO: 4360 - DNA, 40 bp, Artificial Sequence
  Synthetic Oligonucleotide
atccgcctcaaaaagtcctcgttgtccttcaatcgtactg

SEQ ID NO: 4361 - DNA, 40 bp, Artificial Sequence
  Synthetic Oligonucleotide
atccgaacgcctcgatcctcgacataatatgatacgtctg

SEQ ID NO: 4362 - DNA, 40 bp, Artificial Sequence
  Synthetic Oligonucleotide
atcccgtcctcatgatgcgcgcattgtggtactattaggg

SEQ ID NO: 4363 - DNA, 40 bp, Artificial Sequence
  Synthetic Oligonucleotide
atcccgtcagtcccaaaacttggttaaccagtgtgcacac

SEQ ID NO: 4364 - DNA, 40 bp, Artificial Sequence
  Synthetic Oligonucleotide
atccatggtacgcctcgattccgcctatacatgcatgtaa

SEQ ID NO: 4365 - DNA, 40 bp, Artificial Sequence
  Synthetic Oligonucleotide
atccatggtacgcctcgattccgcccatacatgcgtgtaa

SEQ ID NO: 4366 - DNA, 40 bp, Artificial Sequence
  Synthetic Oligonucleotide
atccatggtacgcctcgattccgcccatacatgcatttaa

SEQ ID NO: 4367 - DNA, 40 bp, Artificial Sequence
  Synthetic Oligonucleotide
atccatggtacgcctcgattccgcccatacatgcatgtga

SEQ ID NO: 4368 - DNA, 40 bp, Artificial Sequence
  Synthetic Oligonucleotide
atccatggtacgcctcgattccgcccatacatgcatgtat

SEQ ID NO: 4369 - DNA, 40 bp, Artificial Sequence
  Synthetic Oligonucleotide
atccatggtacgcctcgattccgcccatacacgcatgtaa

SEQ ID NO: 4370 - DNA, 40 bp, Artificial Sequence
  Synthetic Oligonucleotide
atccatggtacgcctcgattccgcccacgcatgcatgtaa

SEQ ID NO: 4371 - DNA, 40 bp, Artificial Sequence
  Synthetic Oligonucleotide
atccatggtacgcctcgattccgccatcacatgcatgtaa

SEQ ID NO: 4372 - DNA, 40 bp, Artificial Sequence
  Synthetic Oligonucleotide
atccatggtacgcctcgattccgccatacatgcatgtaac

SEQ ID NO: 4373 - DNA, 40 bp, Artificial Sequence
  Synthetic Oligonucleotide
atccatggtacgcctcgattccacccatacatgcatgtaa

SEQ ID NO: 4374 - DNA, 40 bp, Artificial Sequence
  Synthetic Oligonucleotide
atccatggtacgcctcgactccgcccatacatgcatgtaa

SEQ ID NO: 4375 - DNA, 40 bp, Artificial Sequence
  Synthetic Oligonucleotide
atccatggtacgcctcgactccgcccatacatgcacgtaa

SEQ ID NO: 4376 - DNA, 40 bp, Artificial Sequence
  Synthetic Oligonucleotide
atccatggtacgccccgattccgcccatacatgcatgtaa

SEQ ID NO: 4377 - DNA, 40 bp, Artificial Sequence
  Synthetic Oligonucleotide
atccatggcgactcgtaagcaccgcacctccagtttcgcg

SEQ ID NO: 4378 - DNA, 40 bp, Artificial Sequence
  Synthetic Oligonucleotide
atccatgatacgcctcgattccgcccatacatgcatgtaa

SEQ ID NO: 4379 - DNA, 40 bp, Artificial Sequence
  Synthetic Oligonucleotide
atccatcctccagcgcattgtcatagccccgagtgcactg

SEQ ID NO: 4380 - DNA, 40 bp, Artificial Sequence
  Synthetic Oligonucleotide
atccagaacgcctcgatcctcgcgtaatatgatacgtctg

SEQ ID NO: 4381 - DNA, 40 bp, Artificial Sequence
  Synthetic Oligonucleotide
atcagtggaacttcctctctgataccgcctcgattgcatg

SEQ ID NO: 4382 - DNA, 40 bp, Artificial Sequence
  Synthetic Oligonucleotide
atcagcagttaatctgccctctgatgaaaccggttacgtt

SEQ ID NO: 4383 - DNA, 40 bp, Artificial Sequence
  Synthetic Oligonucleotide
atcagactgcccgtctacacgctgggctaccaccgtatag

SEQ ID NO: 4384 - DNA, 40 bp, Artificial Sequence
  Synthetic Oligonucleotide
atatggggctttaagcacttctcgtaacttgggcagttac

SEQ ID NO: 4385 - DNA, 40 bp, Artificial Sequence
  Synthetic Oligonucleotide
atatgggctcctaagcacttctcggtaacttggcagttac

SEQ ID NO: 4386 - DNA, 40 bp, Artificial Sequence
  Synthetic Oligonucleotide
atatgacgtcggttcgcctcgggtccatcccaattgtctg

SEQ ID NO: 4387 - DNA, 40 bp, Artificial Sequence
  Synthetic Oligonucleotide
atatctttatccgccccctctgcatggtgggcctacatcg

SEQ ID NO: 4388 - DNA, 40 bp, Artificial Sequence
  Synthetic Oligonucleotide
atatctttatcccgcccctctgcatggtgggcctacatcg

SEQ ID NO: 4389 - DNA, 40 bp, Artificial Sequence
  Synthetic Oligonucleotide
atatcctttatccgcccctctgcatggtgggcctacatcg

SEQ ID NO: 4390 - DNA, 40 bp, Artificial Sequence
  Synthetic Oligonucleotide
atatcctgatcgatcagataggcctgggttctaccctagt

SEQ ID NO: 4391 - DNA, 40 bp, Artificial Sequence
  Synthetic Oligonucleotide
atatagctggcgtatttgcctcgatcctctattgtctgcg

SEQ ID NO: 4392 - DNA, 40 bp, Artificial Sequence
  Synthetic Oligonucleotide
atatagctagcgtatttgcctcgatcctctgttgtctgtg

SEQ ID NO: 4393 - DNA, 40 bp, Artificial Sequence
  Synthetic Oligonucleotide
atatagccggcgtatttgcctcgatcctctattgtctgtg

SEQ ID NO: 4394 - DNA, 40 bp, Artificial Sequence
  Synthetic Oligonucleotide
atataacgcctgtctttaatctcgcagagtgctcatgagc

SEQ ID NO: 4395 - DNA, 40 bp, Artificial Sequence
  Synthetic Oligonucleotide
ataggtcctggggtatccgccttgctaagtttgtgcatgc

SEQ ID NO: 4396 - DNA, 40 bp, Artificial Sequence
  Synthetic Oligonucleotide
ataggtcctggggtatccgcctcgctaagtctgtgcatgc

SEQ ID NO: 4397 - DNA, 40 bp, Artificial Sequence
  Synthetic Oligonucleotide
ataggtcctggggtatccgcctcgctaagcttgtgcatgc

SEQ ID NO: 4398 - DNA, 40 bp, Artificial Sequence
  Synthetic Oligonucleotide
ataggtacctgtactagtaaaaattgctgctcccatgctg

SEQ ID NO: 4399 - DNA, 40 bp, Artificial Sequence
  Synthetic Oligonucleotide
atagcgtacggagccgtctttcagagaccactctggatga

SEQ ID NO: 4400 - DNA, 40 bp, Artificial Sequence
  Synthetic Oligonucleotide
atagacttttgacatccgcccctctgtcagtggccaccgg

SEQ ID NO: 4401 - DNA, 40 bp, Artificial Sequence
  Synthetic Oligonucleotide
atactgtagttggtcgttttcgcaggactacctggagtga

SEQ ID NO: 4402 - DNA, 40 bp, Artificial Sequence
  Synthetic Oligonucleotide
atactattccggccttcaccgtcctcaatacggacgaatg

SEQ ID NO: 4403 - DNA, 40 bp, Artificial Sequence
  Synthetic Oligonucleotide
atactagttacgcctcgattcgttccacgtgtcgggacca

SEQ ID NO: 4404 - DNA, 40 bp, Artificial Sequence
  Synthetic Oligonucleotide
atacgggtgcccacatctcgcctcacgatctcctagtctg

SEQ ID NO: 4405 - DNA, 40 bp, Artificial Sequence
  Synthetic Oligonucleotide
ataatggccatttttacgcctggggtctctcgcacgctag

SEQ ID NO: 4406 - DNA, 40 bp, Artificial Sequence
  Synthetic Oligonucleotide
ataagctgactctcgcctcgctgtctccagaatgtgcgca

SEQ ID NO: 4407 - DNA, 40 bp, Artificial Sequence
  Synthetic Oligonucleotide
ataacccgggcgccttgctcttccctgaaatagtctgctg

SEQ ID NO: 4408 - DNA, 40 bp, Artificial Sequence
  Synthetic Oligonucleotide
ataaatattcacgttgaaccgccttgctcctcttagtctg

SEQ ID NO: 4409 - DNA, 40 bp, Artificial Sequence
  Synthetic Oligonucleotide
ataaagtggcgcgtcacgtttaatcgcctcggttctgctg

SEQ ID NO: 4410 - DNA, 40 bp, Artificial Sequence
  Synthetic Oligonucleotide
agttttctcggatccaaacgcatatcctcctccgcctcct

SEQ ID NO: 4411 - DNA, 40 bp, Artificial Sequence
  Synthetic Oligonucleotide
agttttctcggatccaaacgcatatcctcccccgcctcgt

SEQ ID NO: 4412 - DNA, 40 bp, Artificial Sequence
  Synthetic Oligonucleotide
agttttctcggatccaaacgcatatccccctccgcctcgt

SEQ ID NO: 4413 - DNA, 40 bp, Artificial Sequence
  Synthetic Oligonucleotide
agttcgccagtcacatcaactatgatgacgcttgactgga

SEQ ID NO: 4414 - DNA, 40 bp, Artificial Sequence
  Synthetic Oligonucleotide
agttagatctaacgagtccgctttgatccgtccccggatg

SEQ ID NO: 4415 - DNA, 40 bp, Artificial Sequence
  Synthetic Oligonucleotide
agttactggtacgccttgatcttccacgtgcacgtaaatg

SEQ ID NO: 4416 - DNA, 40 bp, Artificial Sequence
  Synthetic Oligonucleotide
agtgttaagcttacatacgcctgggtcactctttgttctg

SEQ ID NO: 4417 - DNA, 40 bp, Artificial Sequence
  Synthetic Oligonucleotide
agtgtctcggatctgttttttactgcgttgcctcccgaga

SEQ ID NO: 4418 - DNA, 40 bp, Artificial Sequence
  Synthetic Oligonucleotide
agtgtaaattacgttatttacccccacgcatcacgtacgt

SEQ ID NO: 4419 - DNA, 40 bp, Artificial Sequence
  Synthetic Oligonucleotide
agtggcactacgcctggtttccttcccaaagaagttcgtt

SEQ ID NO: 4420 - DNA, 40 bp, Artificial Sequence
  Synthetic Oligonucleotide
agtgccttgaccgccttgatcttcttctcggaacgcgtta

SEQ ID NO: 4421 - DNA, 40 bp, Artificial Sequence
  Synthetic Oligonucleotide
agtgcctgactgccttgatccttcttctcggaaacgcgta

SEQ ID NO: 4422 - DNA, 40 bp, Artificial Sequence
  Synthetic Oligonucleotide
agtgcctgaccgccttgatcctccttctcggaaacgcgta

SEQ ID NO: 4423 - DNA, 40 bp, Artificial Sequence
  Synthetic Oligonucleotide
agtgcacacgcctgggtttcctttccccaaaagagtcttt

SEQ ID NO: 4424 - DNA, 40 bp, Artificial Sequence
  Synthetic Oligonucleotide
agtctggccttgttatggactaccatatcagaaaggtact

SEQ ID NO: 4425 - DNA, 40 bp, Artificial Sequence
  Synthetic Oligonucleotide
agtctgaccctgttatggactaccatgtcagaaaggtact

SEQ ID NO: 4426 - DNA, 40 bp, Artificial Sequence
  Synthetic Oligonucleotide
agtctgaccctgttatggactaccacatcagaaaggtact

SEQ ID NO: 4427 - DNA, 40 bp, Artificial Sequence
  Synthetic Oligonucleotide
agtctgaccctgctatggactaccatatcagaaaggtact

SEQ ID NO: 4428 - DNA, 40 bp, Artificial Sequence
  Synthetic Oligonucleotide
agtccctgtgtcttgttgccacagacgttcagtgcccccg

SEQ ID NO: 4429 - DNA, 40 bp, Artificial Sequence
  Synthetic Oligonucleotide
agtcccgggtccgcctcgatgagtttaggtaccataaaca

SEQ ID NO: 4430 - DNA, 40 bp, Artificial Sequence
  Synthetic Oligonucleotide
agtcattaatccttgttggactaccaccaaaaccgattaa

SEQ ID NO: 4431 - DNA, 40 bp, Artificial Sequence
  Synthetic Oligonucleotide
agtaggtcgcctggtccgcctcgatcctctataccgtcta

SEQ ID NO: 4432 - DNA, 40 bp, Artificial Sequence
  Synthetic Oligonucleotide
agtactacgcctcgaggagctctcacctccctctgtctgg

SEQ ID NO: 4433 - DNA, 40 bp, Artificial Sequence
  Synthetic Oligonucleotide
aggttctcggatcgttgttttccgtatcgcatagtcccat

SEQ ID NO: 4434 - DNA, 40 bp, Artificial Sequence
  Synthetic Oligonucleotide
agggtccatgagcttctcggcactatccagttgacgctca

SEQ ID NO: 4435 - DNA, 40 bp, Artificial Sequence
  Synthetic Oligonucleotide
agggtaccatccgcctcgcaaaccgggatatccgcgtacg

SEQ ID NO: 4436 - DNA, 40 bp, Artificial Sequence
  Synthetic Oligonucleotide
aggcccgggttccgcctcagtccccaaaatgcgcgcattt

SEQ ID NO: 4437 - DNA, 40 bp, Artificial Sequence
  Synthetic Oligonucleotide
agcttgtggtaaccgcccctctgatgtgacgcgctaacac

SEQ ID NO: 4438 - DNA, 40 bp, Artificial Sequence
  Synthetic Oligonucleotide
agctgtcgacatctctacctctgctcctcccaagtgtctg

SEQ ID NO: 4439 - DNA, 40 bp, Artificial Sequence
  Synthetic Oligonucleotide
agctaacccacatcgagcggtttcagatgttaaaatacaa

SEQ ID NO: 4440 - DNA, 40 bp, Artificial Sequence
  Synthetic Oligonucleotide
agcggccgattcgccttgatcctactgagctcatgttctg

SEQ ID NO: 4441 - DNA, 40 bp, Artificial Sequence
  Synthetic Oligonucleotide
agcggccgattcgccttgatcctactgagctcacgttatg

SEQ ID NO: 4442 - DNA, 40 bp, Artificial Sequence
  Synthetic Oligonucleotide
agcgaaacgctattttctgggaagccgcatctcgagcgaa

SEQ ID NO: 4443 - DNA, 40 bp, Artificial Sequence
  Synthetic Oligonucleotide
agcctgaccctgttatggactaccatatcagaaaggtact

SEQ ID NO: 4444 - DNA, 40 bp, Artificial Sequence
  Synthetic Oligonucleotide
agcccgttgtgggttgatttgcgcgtactagtgccatcga

SEQ ID NO: 4445 - DNA, 40 bp, Artificial Sequence
  Synthetic Oligonucleotide
agccccaagtctaatctggacgctatttcagatgtataga

SEQ ID NO: 4446 - DNA, 40 bp, Artificial Sequence
  Synthetic Oligonucleotide
agccatccgtatcgagcgattccggctgagataataccta

SEQ ID NO: 4447 - DNA, 40 bp, Artificial Sequence
  Synthetic Oligonucleotide
agcatcgttccagtcttctcccacagcggctggcactatc

SEQ ID NO: 4448 - DNA, 40 bp, Artificial Sequence
  Synthetic Oligonucleotide
agcacgcggaaagtcacacgagctatcgtgacgctggctt

SEQ ID NO: 4449 - DNA, 40 bp, Artificial Sequence
  Synthetic Oligonucleotide
agattctagattaaccgcctcggtcagcccagattgtgcg

SEQ ID NO: 4450 - DNA, 40 bp, Artificial Sequence
  Synthetic Oligonucleotide
agatctccctatccgcttcgtttgagtactcactcggggc

SEQ ID NO: 4451 - DNA, 40 bp, Artificial Sequence
  Synthetic Oligonucleotide
agataggacctacgcccgcctcagtctgactcatcgtctg

SEQ ID NO: 4452 - DNA, 40 bp, Artificial Sequence
  Synthetic Oligonucleotide
agagctcccgcctcgtgtccggaacgttctggagactgcg

SEQ ID NO: 4453 - DNA, 40 bp, Artificial Sequence
  Synthetic Oligonucleotide
agactacttcgatggttcatcgtcgattccaaccctccta

SEQ ID NO: 4454 - DNA, 40 bp, Artificial Sequence
  Synthetic Oligonucleotide
agactactccgatggacaatcgtaatttaggagtcgccta

SEQ ID NO: 4455 - DNA, 40 bp, Artificial Sequence
  Synthetic Oligonucleotide
agactactccgagtgtctatcggcctttccttcgtcgggc

SEQ ID NO: 4456 - DNA, 40 bp, Artificial Sequence
  Synthetic Oligonucleotide
agaccggggtccgcctcaagctagctacctccattgtctg

SEQ ID NO: 4457 - DNA, 40 bp, Artificial Sequence
  Synthetic Oligonucleotide
agaccggggcctgcctcaagctagctacctccattgtctg

SEQ ID NO: 4458 - DNA, 40 bp, Artificial Sequence
  Synthetic Oligonucleotide
agaccggggcccgcctcgagctagctacctccattgtctg

SEQ ID NO: 4459 - DNA, 40 bp, Artificial Sequence
  Synthetic Oligonucleotide
agaagcacctcaacccgttactaaacccctgcttctccaa

SEQ ID NO: 4460 - DNA, 40 bp, Artificial Sequence
  Synthetic Oligonucleotide
agaacccgtcgagtcatctttcaaagactactttgaatac

SEQ ID NO: 4461 - DNA, 40 bp, Artificial Sequence
  Synthetic Oligonucleotide
agaaattcctccttcgtctgattgaactgcaaggtacccc

SEQ ID NO: 4462 - DNA, 40 bp, Artificial Sequence
  Synthetic Oligonucleotide
acttttgtagccgatccctgggctacccgggaagaacggt

SEQ ID NO: 4463 - DNA, 40 bp, Artificial Sequence
  Synthetic Oligonucleotide
actttgcaatgatccgccttgatcctccagttgcaaccta

SEQ ID NO: 4464 - DNA, 40 bp, Artificial Sequence
  Synthetic Oligonucleotide
actttctcggatcgtatgtcttcgcatcattcaccccagt

SEQ ID NO: 4465 - DNA, 40 bp, Artificial Sequence
  Synthetic Oligonucleotide
acttcatcatcgtctgtgtagttgactacaacttttagta

SEQ ID NO: 4466 - DNA, 40 bp, Artificial Sequence
  Synthetic Oligonucleotide
actgtaggcacctgctctatgtcgtggggagtaactggtt

SEQ ID NO: 4467 - DNA, 40 bp, Artificial Sequence
  Synthetic Oligonucleotide
actgatgcgatttaaccgggtgtgagttccatgcagtact

SEQ ID NO: 4468 - DNA, 40 bp, Artificial Sequence
  Synthetic Oligonucleotide
actctcagcccgagatgcgaagactacttcggttgctcat

SEQ ID NO: 4469 - DNA, 40 bp, Artificial Sequence
  Synthetic Oligonucleotide
actacttgcaaggactccgcctcgcattctcctgttatat

SEQ ID NO: 4470 - DNA, 40 bp, Artificial Sequence
  Synthetic Oligonucleotide
actactcccttgagctcgcgcgcgcgcgctttctcgtttg

SEQ ID NO: 4471 - DNA, 40 bp, Artificial Sequence
  Synthetic Oligonucleotide
actaccttcgtctagtggttcaatagcatgaaacttcgta

SEQ ID NO: 4472 - DNA, 40 bp, Artificial Sequence
  Synthetic Oligonucleotide
actaccttcgtctagcggcgctctgtggtaagattctact

SEQ ID NO: 4473 - DNA, 40 bp, Artificial Sequence
  Synthetic Oligonucleotide
actaccttcgtccagcggtgcgctggggactttacccctc

SEQ ID NO: 4474 - DNA, 40 bp, Artificial Sequence
  Synthetic Oligonucleotide
actaccttcgtccagcggtgcgccggggactttatccctc

SEQ ID NO: 4475 - DNA, 40 bp, Artificial Sequence
  Synthetic Oligonucleotide
actaccatcgtctagcgagcgaatgaaaaccgtcactgtt

SEQ ID NO: 4476 - DNA, 40 bp, Artificial Sequence
  Synthetic Oligonucleotide
actaccatcgtctagcgagcgaacgaaaatcgtcactgtt

SEQ ID NO: 4477 - DNA, 40 bp, Artificial Sequence
  Synthetic Oligonucleotide
actaaagtatgcattgaattggccgcctcgctccagcctg

SEQ ID NO: 4478 - DNA, 40 bp, Artificial Sequence
  Synthetic Oligonucleotide
acgtcgacaccgcctctgtccatatgaccggtctcgtctg

SEQ ID NO: 4479 - DNA, 40 bp, Artificial Sequence
  Synthetic Oligonucleotide
acgtcagcctcggttatcctacgcgtacctctcatgcgca

SEQ ID NO: 4480 - DNA, 40 bp, Artificial Sequence
  Synthetic Oligonucleotide
acgtacgcttcacgcacgcggattgtacccgaactgggtt

SEQ ID NO: 4481 - DNA, 40 bp, Artificial Sequence
  Synthetic Oligonucleotide
acgggctcacggatcttcacctgaaacgcctcccagttcg

SEQ ID NO: 4482 - DNA, 40 bp, Artificial Sequence
  Synthetic Oligonucleotide
acggccgcctcgaaactacccttctcgatcaacacctgta

SEQ ID NO: 4483 - DNA, 40 bp, Artificial Sequence
  Synthetic Oligonucleotide
acgctattccggtaagtcatcgtttaaccgtttgttgcaa

SEQ ID NO: 4484 - DNA, 40 bp, Artificial Sequence
  Synthetic Oligonucleotide
acgctattccggtaagtcatcgttcaaccgtttgttgcaa

SEQ ID NO: 4485 - DNA, 40 bp, Artificial Sequence
  Synthetic Oligonucleotide
acgctattccggccttcaccgtcctcaatacggacgaatg

SEQ ID NO: 4486 - DNA, 40 bp, Artificial Sequence
  Synthetic Oligonucleotide
acgcgtcgctaactcggatccttttgatatcactccccta

SEQ ID NO: 4487 - DNA, 40 bp, Artificial Sequence
  Synthetic Oligonucleotide
acgcgtacgccttggttttcctgggtaccctcgccgtttg

SEQ ID NO: 4488 - DNA, 40 bp, Artificial Sequence
  Synthetic Oligonucleotide
acgcctctgttccccactactgtacagtaacgactgcgcg

SEQ ID NO: 4489 - DNA, 40 bp, Artificial Sequence
  Synthetic Oligonucleotide
acgcctcgaacactgacgtcgtggaaccttcgattgctag

SEQ ID NO: 4490 - DNA, 40 bp, Artificial Sequence
  Synthetic Oligonucleotide
acgccgacgctacctttatggatgccacatactgacgaaa

SEQ ID NO: 4491 - DNA, 40 bp, Artificial Sequence
  Synthetic Oligonucleotide
acgcatacgccttggttttcctgggtacccccgccgtttg

SEQ ID NO: 4492 - DNA, 40 bp, Artificial Sequence
  Synthetic Oligonucleotide
acgcaccccgatagtcatcttcgctggaccacccgcgtta

SEQ ID NO: 4493 - DNA, 40 bp, Artificial Sequence
  Synthetic Oligonucleotide
acgattcttcctcagcctccgcggtgcaggacttgcacgt

SEQ ID NO: 4494 - DNA, 40 bp, Artificial Sequence
  Synthetic Oligonucleotide
acgattcttccccagcttccgcggtgcaggatttgcacgt

SEQ ID NO: 4495 - DNA, 40 bp, Artificial Sequence
  Synthetic Oligonucleotide
acgatcttgataacaaccgcctcgctcctctggttgtccg

SEQ ID NO: 4496 - DNA, 40 bp, Artificial Sequence
  Synthetic Oligonucleotide
acgatccttcctcagcttccgcggtgctggatttgcacgt

SEQ ID NO: 4497 - DNA, 40 bp, Artificial Sequence
  Synthetic Oligonucleotide
acgatccttcctcagcttccgcggtgcaggatttgcatgt

SEQ ID NO: 4498 - DNA, 40 bp, Artificial Sequence
  Synthetic Oligonucleotide
acgatccttcctcagcttccgcggtgcaggatttgcacga

SEQ ID NO: 4499 - DNA, 40 bp, Artificial Sequence
  Synthetic Oligonucleotide
acgatccttcctcagcttccgcggtgcaggattcgcacgt

SEQ ID NO: 4500 - DNA, 40 bp, Artificial Sequence
  Synthetic Oligonucleotide
acgatccttcctcagcttccgcggtgcaggattagcacgt

SEQ ID NO: 4501 - DNA, 40 bp, Artificial Sequence
  Synthetic Oligonucleotide
acgatccttcctcagcttccgcggtgcaggatctgcacgt

SEQ ID NO: 4502 - DNA, 40 bp, Artificial Sequence
  Synthetic Oligonucleotide
acgatccttcctcagcttccgcggtgcaggatatgcacgt

SEQ ID NO: 4503 - DNA, 40 bp, Artificial Sequence
  Synthetic Oligonucleotide
acgatccttcctcagcctccgcggtgcatgatttgcacgt

SEQ ID NO: 4504 - DNA, 40 bp, Artificial Sequence
  Synthetic Oligonucleotide
acgatccttcctcagcctccgcggtgcagtatttgcacgt

SEQ ID NO: 4505 - DNA, 40 bp, Artificial Sequence
  Synthetic Oligonucleotide
acgatccttcctcagcctccgcggtgcaggattcgcacgt

SEQ ID NO: 4506 - DNA, 40 bp, Artificial Sequence
  Synthetic Oligonucleotide
acgatccttcctcagcctccgcggtgcaggacttgcacgt

SEQ ID NO: 4507 - DNA, 40 bp, Artificial Sequence
  Synthetic Oligonucleotide
acgatccttcctcagcctccgcagtgcaggatttgcacgt

SEQ ID NO: 4508 - DNA, 40 bp, Artificial Sequence
  Synthetic Oligonucleotide
acgactcttcctcggcttccgcggtgcaggatttgcacgt

SEQ ID NO: 4509 - skipped

SEQ ID NO: 4510 - DNA, 40 bp, Artificial Sequence
  Synthetic Oligonucleotide
acgacctatccgcttaattacgtccatacctttgggtgta

SEQ ID NO: 4511 - DNA, 40 bp, Artificial Sequence
  Synthetic Oligonucleotide
acgaccgggcccgctcaagctagcctacctccattgtctg

SEQ ID NO: 4512 - DNA, 40 bp, Artificial Sequence
  Synthetic Oligonucleotide
acgacccttcctcagcttccgcggtgcaggatttgcacgt

SEQ ID NO: 4513 - DNA, 40 bp, Artificial Sequence
  Synthetic Oligonucleotide
acctctatagtcgtcggcgtagcacgctattgcttagaag

SEQ ID NO: 4514 - DNA, 40 bp, Artificial Sequence
  Synthetic Oligonucleotide
acctaggctgcctcgaccctccaaagcccggtccttttga

SEQ ID NO: 4515 - DNA, 40 bp, Artificial Sequence
  Synthetic Oligonucleotide
accgtgcattgggtcggtttggtggggactaccccttgta

SEQ ID NO: 4516 - DNA, 40 bp, Artificial Sequence
  Synthetic Oligonucleotide
accgtaggcacctgctctatatcgtggggagtaacaggtt

SEQ ID NO: 4517 - DNA, 40 bp, Artificial Sequence
  Synthetic Oligonucleotide
accggtagcctcgatcccgcgctatggtaccatggtttga

SEQ ID NO: 4518 - DNA, 40 bp, Artificial Sequence
  Synthetic Oligonucleotide
accggcctcagttctactgtattaccgcggatacagttta

SEQ ID NO: 4519 - DNA, 40 bp, Artificial Sequence
  Synthetic Oligonucleotide
accggcctcaggttccctaacgcgttacgcttccggaatg

SEQ ID NO: 4520 - DNA, 40 bp, Artificial Sequence
  Synthetic Oligonucleotide
accggcctcaggtccctaactgcgttcgccttccggaatg

SEQ ID NO: 4521 - DNA, 40 bp, Artificial Sequence
  Synthetic Oligonucleotide
accggccacccgatagtcatcttcactggaccaccgtgta

SEQ ID NO: 4522 - DNA, 40 bp, Artificial Sequence
  Synthetic Oligonucleotide
accggcaccccgatagtcatcttcactggacacccgtgta

SEQ ID NO: 4523 - DNA, 40 bp, Artificial Sequence
  Synthetic Oligonucleotide
accgctttgtgtgcgacacatgtctacgactcctcttcag

SEQ ID NO: 4524 - DNA, 40 bp, Artificial Sequence
  Synthetic Oligonucleotide
accgcctcgcgtcgtgtacacgaagacctccggagatttg

SEQ ID NO: 4525 - DNA, 40 bp, Artificial Sequence
  Synthetic Oligonucleotide
accgcctcgaacactgactcgtggaaccttcgattgctag

SEQ ID NO: 4526 - DNA, 40 bp, Artificial Sequence
  Synthetic Oligonucleotide
accgcctcgaaatgcgcatacccctgggatccatgacatg

SEQ ID NO: 4527 - DNA, 40 bp, Artificial Sequence
  Synthetic Oligonucleotide
accgcctcagttcttagatcgatttaccccaagaatacag

SEQ ID NO: 4528 - DNA, 40 bp, Artificial Sequence
  Synthetic Oligonucleotide
accgcctcagtcttagatcgatttatccccaagaatacag

SEQ ID NO: 4529 - DNA, 40 bp, Artificial Sequence
  Synthetic Oligonucleotide
accgcctcaggttccctaatgcgttacgccttccggaatg

SEQ ID NO: 4530 - DNA, 40 bp, Artificial Sequence
  Synthetic Oligonucleotide
accgcctcaaacatcgctagcgtgaaacttctccggacgt

SEQ ID NO: 4531 - DNA, 40 bp, Artificial Sequence
  Synthetic Oligonucleotide
accgccctgggatccttcccaacgtcttacagtatgcttg

SEQ ID NO: 4532 - DNA, 40 bp, Artificial Sequence
  Synthetic Oligonucleotide
accgcaccccgatagtcatcttcactggaccaccgtgtta

SEQ ID NO: 4533 - DNA, 40 bp, Artificial Sequence
  Synthetic Oligonucleotide
accctcggatcattgtgcatgcacttttcgcctcgcctac

SEQ ID NO: 4534 - DNA, 40 bp, Artificial Sequence
  Synthetic Oligonucleotide
accctattttgacgtctcttcggggactaccccgattctg

SEQ ID NO: 4535 - DNA, 40 bp, Artificial Sequence
  Synthetic Oligonucleotide
accctatcttgacgtctcttcggggactaccccggttctg

SEQ ID NO: 4536 - DNA, 40 bp, Artificial Sequence
  Synthetic Oligonucleotide
accctatcttgacgcctcttcggggactaccccgattctg

SEQ ID NO: 4537 - DNA, 40 bp, Artificial Sequence
  Synthetic Oligonucleotide
accctatcctgacgtctcttcggggactaccccgattctg

SEQ ID NO: 4538 - DNA, 40 bp, Artificial Sequence
  Synthetic Oligonucleotide
accctatcatgacgtctcttcggggactaccccgattctg

SEQ ID NO: 4539 - DNA, 40 bp, Artificial Sequence
  Synthetic Oligonucleotide
acccgcttgtgtgcgacacatgtctacgactcctcttcac

SEQ ID NO: 4540 - DNA, 40 bp, Artificial Sequence
  Synthetic Oligonucleotide
acccgcttgtgtgcgacacatgtctacgactcctcctcag

SEQ ID NO: 4541 - DNA, 40 bp, Artificial Sequence
  Synthetic Oligonucleotide
acccgcttgtgtgcgacacatgtctacgactccccttcag

SEQ ID NO: 4542 - DNA, 40 bp, Artificial Sequence
  Synthetic Oligonucleotide
acccagtagcaaatggaactgcctccgcatcagtaatgcg

SEQ ID NO: 4543 - DNA, 40 bp, Artificial Sequence
  Synthetic Oligonucleotide
accagcgtacgagcttcgccttggtcttgcccgtgagttg

SEQ ID NO: 4544 - DNA, 40 bp, Artificial Sequence
  Synthetic Oligonucleotide
accacacgtgtgatgcgcctccggtcctcgtttgtctata

SEQ ID NO: 4545 - DNA, 40 bp, Artificial Sequence
  Synthetic Oligonucleotide
accacacgtgtgatgcgcccccggtcctcgtttgtctgta

SEQ ID NO: 4546 - DNA, 40 bp, Artificial Sequence
  Synthetic Oligonucleotide
acattattccggtaagtcatcgtttaaccgtttgttgcaa

SEQ ID NO: 4547 - DNA, 40 bp, Artificial Sequence
  Synthetic Oligonucleotide
acattattccggccttcaccgtcctcaatacggacgaatg

SEQ ID NO: 4548 - DNA, 40 bp, Artificial Sequence
  Synthetic Oligonucleotide
acatgtcatgcctcggatgcattcacctcttatatggcca

SEQ ID NO: 4549 - DNA, 40 bp, Artificial Sequence
  Synthetic Oligonucleotide
acatcctcatgacggtctgttgatggctacatcattgttc

SEQ ID NO: 4550 - DNA, 40 bp, Artificial Sequence
  Synthetic Oligonucleotide
acataaccgcactgcggtcctgttccgcctttggtcatcc

SEQ ID NO: 4551 - DNA, 40 bp, Artificial Sequence
  Synthetic Oligonucleotide
acagtgggttccatgctttaggcgcctcttgctttgggtc

SEQ ID NO: 4552 - DNA, 40 bp, Artificial Sequence
  Synthetic Oligonucleotide
acagtgggttccatgctttaggcgcctcttattttgggtt

SEQ ID NO: 4553 - DNA, 40 bp, Artificial Sequence
  Synthetic Oligonucleotide
acagtgggttccatgctttaggcgcctcttattctgggtc

SEQ ID NO: 4554 - DNA, 40 bp, Artificial Sequence
  Synthetic Oligonucleotide
acagtgggttccatgctctaggcgcctcttattttgggtc

SEQ ID NO: 4555 - DNA, 40 bp, Artificial Sequence
  Synthetic Oligonucleotide
acagtgggtcccatgctttaggcgcctcttattttgggtc

SEQ ID NO: 4556 - DNA, 40 bp, Artificial Sequence
  Synthetic Oligonucleotide
acaggagctcatttccgcctcatcttcccaggcaagcctg

SEQ ID NO: 4557 - DNA, 40 bp, Artificial Sequence
  Synthetic Oligonucleotide
acagctattccggccttcaccgtcctcaatacggcgaatg

SEQ ID NO: 4558 - DNA, 40 bp, Artificial Sequence
  Synthetic Oligonucleotide
acagcactggtcctcagcgcgcgacccatctccgtcagta

SEQ ID NO: 4559 - DNA, 40 bp, Artificial Sequence
  Synthetic Oligonucleotide
acagcactggactctcaggcgcgcgacccatctctcagta

SEQ ID NO: 4560 - DNA, 40 bp, Artificial Sequence
  Synthetic Oligonucleotide
acagcactggactctcagcgcgcgacccgtctcgtcagta

SEQ ID NO: 4561 - DNA, 40 bp, Artificial Sequence
  Synthetic Oligonucleotide
acagcactggactctcagcgcgcgacccatctcgtcggta

SEQ ID NO: 4562 - DNA, 40 bp, Artificial Sequence
  Synthetic Oligonucleotide
acagcactggactctcagcgcgcgacccatctcgtcaata

SEQ ID NO: 4563 - DNA, 40 bp, Artificial Sequence
  Synthetic Oligonucleotide
acagcactggactctcagcgcgcgaacccatctctcagta

SEQ ID NO: 4564 - DNA, 40 bp, Artificial Sequence
  Synthetic Oligonucleotide
acagcactggactctcagcgcgcaacccatctcgtcagta

SEQ ID NO: 4565 - DNA, 40 bp, Artificial Sequence
  Synthetic Oligonucleotide
acagcactggactctcagacgcgcgacccatctctcagta

SEQ ID NO: 4566 - DNA, 40 bp, Artificial Sequence
  Synthetic Oligonucleotide
acagcactggactctcaacgcgcgacccatctcgtcagta

SEQ ID NO: 4567 - DNA, 40 bp, Artificial Sequence
  Synthetic Oligonucleotide
acagcactggactcctcagcgcgcacaccatctctcagta

SEQ ID NO: 4568 - DNA, 40 bp, Artificial Sequence
  Synthetic Oligonucleotide
acactgttccggccttcaccgtcctcaatacggacgaatg

SEQ ID NO: 4569 - DNA, 40 bp, Artificial Sequence
  Synthetic Oligonucleotide
acactattctggtaagtcatcgtttaaccgtttgttgcaa

SEQ ID NO: 4570 - DNA, 40 bp, Artificial Sequence
  Synthetic Oligonucleotide
acactattccggtaggtcatcgtctaaccgtttgttgcaa

SEQ ID NO: 4571 - DNA, 40 bp, Artificial Sequence
  Synthetic Oligonucleotide
acactattccggtaagtcgtcgtttaaccgtttgttacaa

SEQ ID NO: 4572 - DNA, 40 bp, Artificial Sequence
  Synthetic Oligonucleotide
acactattccggtaagtcattgtttaaccgtttgttgcaa

SEQ ID NO: 4573 - DNA, 40 bp, Artificial Sequence
  Synthetic Oligonucleotide
acactattccggtaagtcatcgtttaccgtttgttcgcaa

SEQ ID NO: 4574 - DNA, 40 bp, Artificial Sequence
  Synthetic Oligonucleotide
acactattccggtaagtcatcgtttaaccgtttgttgtaa

SEQ ID NO: 4575 - DNA, 40 bp, Artificial Sequence
  Synthetic Oligonucleotide
acactattccggtaagtcatcgtttaaccgttcgttgcaa

SEQ ID NO: 4576 - DNA, 40 bp, Artificial Sequence
  Synthetic Oligonucleotide
acactattccggtaagtcatcgtttaaccgtctgttgcaa

SEQ ID NO: 4577 - DNA, 40 bp, Artificial Sequence
  Synthetic Oligonucleotide
acactattccggtaagtcatcgtttaaccgcctgttgcaa

SEQ ID NO: 4578 - DNA, 40 bp, Artificial Sequence
  Synthetic Oligonucleotide
acactattccggtaagtcatcgtttaaccctttgttgcaa

SEQ ID NO: 4579 - DNA, 40 bp, Artificial Sequence
  Synthetic Oligonucleotide
acactattccggtaagtcatcgtttaaccatttgttgcaa

SEQ ID NO: 4580 - DNA, 40 bp, Artificial Sequence
  Synthetic Oligonucleotide
acactattccggtaagtcatcgttcaaccgcttgttgcaa

SEQ ID NO: 4581 - DNA, 40 bp, Artificial Sequence
  Synthetic Oligonucleotide
acactattccggtaagtcatcgttaaaccgtttgttgcaa

SEQ ID NO: 4582 - DNA, 40 bp, Artificial Sequence
  Synthetic Oligonucleotide
acactattccggtaagtcatcgcttaaccgtttgttgcaa

SEQ ID NO: 4583 - DNA, 40 bp, Artificial Sequence
  Synthetic Oligonucleotide
acactattccggtaagctcttcgattaccgtttgttgcaa

SEQ ID NO: 4584 - DNA, 40 bp, Artificial Sequence
  Synthetic Oligonucleotide
acactattccggccttcaccgtcttcaatacggacgaatg

SEQ ID NO: 4585 - DNA, 40 bp, Artificial Sequence
  Synthetic Oligonucleotide
acactattccggccttcaccgtcctcagtacggacggatg

SEQ ID NO: 4586 - DNA, 40 bp, Artificial Sequence
  Synthetic Oligonucleotide
acactattccggccttcaccgtcctcaatacgggccaatg

SEQ ID NO: 4587 - DNA, 40 bp, Artificial Sequence
  Synthetic Oligonucleotide
acactattccggccttcaccgtcctcaatacggacggatg

SEQ ID NO: 4588 - DNA, 40 bp, Artificial Sequence
  Synthetic Oligonucleotide
acactattccggcctacaccgtcctcaatacggacgaatg

SEQ ID NO: 4589 - DNA, 40 bp, Artificial Sequence
  Synthetic Oligonucleotide
acactattccggcaagtcatcgtttaaccgtctgttgcaa

SEQ ID NO: 4590 - DNA, 40 bp, Artificial Sequence
  Synthetic Oligonucleotide
acactatccgtttgtcgtcctcctgtggtattgcgcatgc

SEQ ID NO: 4591 - DNA, 40 bp, Artificial Sequence
  Synthetic Oligonucleotide
acactatcccggtaagtcatcgtttaaccgtttgttgcaa

SEQ ID NO: 4592 - DNA, 40 bp, Artificial Sequence
  Synthetic Oligonucleotide
acactatcccggccttcaccgtcctcgatacggacgagtg

SEQ ID NO: 4593 - DNA, 40 bp, Artificial Sequence
  Synthetic Oligonucleotide
acactatcccggccttcaccgtcctcaatacggacgaatg

SEQ ID NO: 4594 - DNA, 40 bp, Artificial Sequence
  Synthetic Oligonucleotide
acacgtattccggtaagtctcgtttaaccgtttgttgcaa

SEQ ID NO: 4595 - DNA, 40 bp, Artificial Sequence
  Synthetic Oligonucleotide
acaccgacgctctgtatacgctggactacccgcgtttcaa

SEQ ID NO: 4596 - DNA, 40 bp, Artificial Sequence
  Synthetic Oligonucleotide
acacactggactctcagcgcgcgtacccatctcgtcagta

SEQ ID NO: 4597 - DNA, 40 bp, Artificial Sequence
  Synthetic Oligonucleotide
acaattcgaaattggagcctgggttcttcccacaacacat

SEQ ID NO: 4598 - DNA, 40 bp, Artificial Sequence
  Synthetic Oligonucleotide
acaacccgggaacgcctcgttacagctttatgcataaaga

SEQ ID NO: 4599 - DNA, 40 bp, Artificial Sequence
  Synthetic Oligonucleotide
aattttctcggatccaaacgcatatcctcctccgcctcgt

SEQ ID NO: 4600 - DNA, 40 bp, Artificial Sequence
  Synthetic Oligonucleotide
aattctgtttttaagttggcgaggtcctctaacttttggg

SEQ ID NO: 4601 - DNA, 40 bp, Artificial Sequence
  Synthetic Oligonucleotide
aattctcgggtgctatacgttatcgtcatcctatagcata

SEQ ID NO: 4602 - DNA, 40 bp, Artificial Sequence
  Synthetic Oligonucleotide
aattcgccagtcacatcaactatgatgacgcttgactgga

SEQ ID NO: 4603 - DNA, 40 bp, Artificial Sequence
  Synthetic Oligonucleotide
aatgttgagcttacatacgcctgggtcactctttgttctg

SEQ ID NO: 4604 - DNA, 40 bp, Artificial Sequence
  Synthetic Oligonucleotide
aatgttagcttacatacgccttgggtcactctttgttctg

SEQ ID NO: 4605 - DNA, 40 bp, Artificial Sequence
  Synthetic Oligonucleotide
aatgttagcttacatacgcctgggtcactctttgttctga

SEQ ID NO: 4606 - DNA, 40 bp, Artificial Sequence
  Synthetic Oligonucleotide
aatgttagctacatacgccttgggtcactctttcgttctg

SEQ ID NO: 4607 - DNA, 40 bp, Artificial Sequence
  Synthetic Oligonucleotide
aatgttaagcttacttacgcctgggtcactctttgttctg

SEQ ID NO: 4608 - DNA, 40 bp, Artificial Sequence
  Synthetic Oligonucleotide
aatgttaagcttacctacgcctgggtcactctttgttctg

SEQ ID NO: 4609 - DNA, 40 bp, Artificial Sequence
  Synthetic Oligonucleotide
aatgttaagcttacatcgacgcctggtcactctttgttcg

SEQ ID NO: 4610 - DNA, 40 bp, Artificial Sequence
  Synthetic Oligonucleotide
aatgttaagcttacatcacgcctgggtcactcttgttctg

SEQ ID NO: 4611 - DNA, 40 bp, Artificial Sequence
  Synthetic Oligonucleotide
aatgttaagcttacatatgcctgggtcactctttgttctg

SEQ ID NO: 4612 - DNA, 40 bp, Artificial Sequence
  Synthetic Oligonucleotide
aatgttaagcttacatacgtctgggtcactctttgttctg

SEQ ID NO: 4613 - DNA, 40 bp, Artificial Sequence
  Synthetic Oligonucleotide
aatgttaagcttacatacgcctgggtcattctttgttctg

SEQ ID NO: 4614 - DNA, 40 bp, Artificial Sequence
  Synthetic Oligonucleotide
aatgttaagcttacatacgcctgggtcactttttgttctg

SEQ ID NO: 4615 - DNA, 40 bp, Artificial Sequence
  Synthetic Oligonucleotide
aatgttaagcttacatacgcctgggtcactctttgttctt

SEQ ID NO: 4616 - DNA, 40 bp, Artificial Sequence
  Synthetic Oligonucleotide
aatgttaagcttacatacgcctgggtcactctttgttccg

SEQ ID NO: 4617 - DNA, 40 bp, Artificial Sequence
  Synthetic Oligonucleotide
aatgttaagcttacatacgcctgggtcactctttgtcctg

SEQ ID NO: 4618 - DNA, 40 bp, Artificial Sequence
  Synthetic Oligonucleotide
aatgttaagcttacatacgcctgggtcactcgttgttctg

SEQ ID NO: 4619 - DNA, 40 bp, Artificial Sequence
  Synthetic Oligonucleotide
aatgttaagcttacatacgcctgggccactctttgttctg

SEQ ID NO: 4620 - DNA, 40 bp, Artificial Sequence
  Synthetic Oligonucleotide
aatgttaagcttacatacgcctgcgtcactctttgttctg

SEQ ID NO: 4621 - DNA, 40 bp, Artificial Sequence
  Synthetic Oligonucleotide
aatgttaagctcacatacgcctgggtcactctttgttctg

SEQ ID NO: 4622 - DNA, 40 bp, Artificial Sequence
  Synthetic Oligonucleotide
aatgtactgtcgccttgcatgcaacccgatgcgtactctg

SEQ ID NO: 4623 - DNA, 40 bp, Artificial Sequence
  Synthetic Oligonucleotide
aatggttcgttcgcctcggtacgcctcgatccgaccatgg

SEQ ID NO: 4624 - DNA, 40 bp, Artificial Sequence
  Synthetic Oligonucleotide
aatggttcgttcgccctggtacgcctcgatcagaccatgg

SEQ ID NO: 4625 - DNA, 40 bp, Artificial Sequence
  Synthetic Oligonucleotide
aatggtccatgagcttctggcactacccagttggcgctca

SEQ ID NO: 4626 - DNA, 40 bp, Artificial Sequence
  Synthetic Oligonucleotide
aatgggtctttaagcacttctcggtaacttgggcagttac

SEQ ID NO: 4627 - DNA, 40 bp, Artificial Sequence
  Synthetic Oligonucleotide
aatggggcttttaagcacttctcggtaacttggcagttac

SEQ ID NO: 4628 - DNA, 40 bp, Artificial Sequence
  Synthetic Oligonucleotide
aatggggcttttaagcacttctcggtaactgggcagttac

SEQ ID NO: 4629 - DNA, 40 bp, Artificial Sequence
  Synthetic Oligonucleotide
aatggggctttaagcacttctcggtaacttgggcggttac

SEQ ID NO: 4630 - DNA, 40 bp, Artificial Sequence
  Synthetic Oligonucleotide
aatggggcttcaagcacttctcggtaacttgggcagttac

SEQ ID NO: 4631 - DNA, 40 bp, Artificial Sequence
  Synthetic Oligonucleotide
aatgggctttaagctacttctcggtaacttgggcagttac

SEQ ID NO: 4632 - DNA, 40 bp, Artificial Sequence
  Synthetic Oligonucleotide
aatgctaagcttacatacgcctgggtcactcttcgttctg

SEQ ID NO: 4633 - DNA, 40 bp, Artificial Sequence
  Synthetic Oligonucleotide
aatctcgaggtcactaggcactatcctagcactgtatcaa

SEQ ID NO: 4634 - DNA, 40 bp, Artificial Sequence
  Synthetic Oligonucleotide
aatctcgagatcactaggcattatcctagcactgtatcaa

SEQ ID NO: 4635 - DNA, 40 bp, Artificial Sequence
  Synthetic Oligonucleotide
aatctcgagatcactaggcactatcctggcactgtatcaa

SEQ ID NO: 4636 - DNA, 40 bp, Artificial Sequence
  Synthetic Oligonucleotide
aatctcgagatcactaggcactatcctagcgctgtatcaa

SEQ ID NO: 4637 - DNA, 40 bp, Artificial Sequence
  Synthetic Oligonucleotide
aatctcgagatcactaggcactatcctagcactgtatcga

SEQ ID NO: 4638 - DNA, 40 bp, Artificial Sequence
  Synthetic Oligonucleotide
aatcgtcgagatcactagcactatcctagcactgtatcaa

SEQ ID NO: 4639 - DNA, 40 bp, Artificial Sequence
  Synthetic Oligonucleotide
aatcggggctttaagcacttctcgataacttggcagttac

SEQ ID NO: 4640 - DNA, 40 bp, Artificial Sequence
  Synthetic Oligonucleotide
aatcgggaccgcctccaagctagctgctccattgtcctga

SEQ ID NO: 4641 - DNA, 40 bp, Artificial Sequence
  Synthetic Oligonucleotide
aatcgggaccgcctcaagctagctacctccattgtcctga

SEQ ID NO: 4642 - DNA, 40 bp, Artificial Sequence
  Synthetic Oligonucleotide
aatcgggaccgcctcaagctagctacctccattggcctaa

SEQ ID NO: 4643 - DNA, 40 bp, Artificial Sequence
  Synthetic Oligonucleotide
aatcggccgctcgtacgcctcggtccatcccaattgtctg

SEQ ID NO: 4644 - DNA, 40 bp, Artificial Sequence
  Synthetic Oligonucleotide
aatcgagccccaaattgtgcgctatcacatatactttggg

SEQ ID NO: 4645 - DNA, 40 bp, Artificial Sequence
  Synthetic Oligonucleotide
aatccttagcgctaattaccacttaattcgcatcgagacc

SEQ ID NO: 4646 - DNA, 40 bp, Artificial Sequence
  Synthetic Oligonucleotide
aatcctcctcgcgattctcacccagtggtatagatagtgt

SEQ ID NO: 4647 - DNA, 40 bp, Artificial Sequence
  Synthetic Oligonucleotide
aatccgggccgcctcaagctagctaccatccagttgtccg

SEQ ID NO: 4648 - DNA, 40 bp, Artificial Sequence
  Synthetic Oligonucleotide
aatccgggcccgcctcaagtctactacttccattgtcgtg

SEQ ID NO: 4649 - DNA, 40 bp, Artificial Sequence
  Synthetic Oligonucleotide
aatccgggaccgcctcaagctagctacctccattggcctg

SEQ ID NO: 4650 - DNA, 40 bp, Artificial Sequence
  Synthetic Oligonucleotide
aatccatggtacgcctcgattccgccatatatgcatgtaa

SEQ ID NO: 4651 - DNA, 40 bp, Artificial Sequence
  Synthetic Oligonucleotide
aatcaggctttaagcacttctcggtaacttgggcagttac

SEQ ID NO: 4652 - DNA, 40 bp, Artificial Sequence
  Synthetic Oligonucleotide
aatcagcagtaattctgccctctgatgaaaccggttactt

SEQ ID NO: 4653 - DNA, 40 bp, Artificial Sequence
  Synthetic Oligonucleotide
aatcactgtaattctgcccctctgatgaaaccggttactt

SEQ ID NO: 4654 - DNA, 40 bp, Artificial Sequence
  Synthetic Oligonucleotide
aatcacggtaattctgccctctgattgaaaccggttactt

SEQ ID NO: 4655 - DNA, 40 bp, Artificial Sequence
  Synthetic Oligonucleotide
aatcacagttattctgcccctctgatgaaaccggttactt

SEQ ID NO: 4656 - DNA, 40 bp, Artificial Sequence
  Synthetic Oligonucleotide
aatcacagtgattctgcccctctgatggaaccggttactt

SEQ ID NO: 4657 - DNA, 40 bp, Artificial Sequence
  Synthetic Oligonucleotide
aatcacagtagttctgcccctctgatgaaaccggttactt

SEQ ID NO: 4658 - DNA, 40 bp, Artificial Sequence
  Synthetic Oligonucleotide
aatcacagtaattctgccctctgatgaaaccgggttactt

SEQ ID NO: 4659 - DNA, 40 bp, Artificial Sequence
  Synthetic Oligonucleotide
aatcacagtaattctgcccctctgatgagaccggttactt

SEQ ID NO: 4660 - DNA, 40 bp, Artificial Sequence
  Synthetic Oligonucleotide
aatcacagtaattctgcccctctgatgaagccggttactt

SEQ ID NO: 4661 - DNA, 40 bp, Artificial Sequence
  Synthetic Oligonucleotide
aatcacagtaattctgcccctctgatgaaactggttactt

SEQ ID NO: 4662 - DNA, 40 bp, Artificial Sequence
  Synthetic Oligonucleotide
aatcacagtaattctgcccctctgatgaaaccgtattact

SEQ ID NO: 4663 - DNA, 40 bp, Artificial Sequence
  Synthetic Oligonucleotide
aatcacagtaattctgcccctctgatgaaaccggttattt

SEQ ID NO: 4664 - DNA, 40 bp, Artificial Sequence
  Synthetic Oligonucleotide
aatcacagtaattctgcccctctgatgaaaccggctactg

SEQ ID NO: 4665 - DNA, 40 bp, Artificial Sequence
  Synthetic Oligonucleotide
aatcacagtaattctgcccctctgatgaaaccggatactt

SEQ ID NO: 4666 - DNA, 40 bp, Artificial Sequence
  Synthetic Oligonucleotide
aatcacagtaattctgcccctctgaggaaaccggttactt

SEQ ID NO: 4667 - DNA, 40 bp, Artificial Sequence
  Synthetic Oligonucleotide
aatcacagtaattctgcccctctgaatgaaccggttactt

SEQ ID NO: 4668 - DNA, 40 bp, Artificial Sequence
  Synthetic Oligonucleotide
aatcacagtaattctgccccctcatgaataccggttactt

SEQ ID NO: 4669 - DNA, 40 bp, Artificial Sequence
  Synthetic Oligonucleotide
aatcacagtaattctgccccactgatgaaaccggttactt

SEQ ID NO: 4670 - DNA, 40 bp, Artificial Sequence
  Synthetic Oligonucleotide
aatcacagtaattctccccctctgatgaaaccggttactt

SEQ ID NO: 4671 - DNA, 40 bp, Artificial Sequence
  Synthetic Oligonucleotide
aatcacagtaattccgcccctctgatgaaaccggtcactt

SEQ ID NO: 4672 - DNA, 40 bp, Artificial Sequence
  Synthetic Oligonucleotide
aatcacagtaattcagccccgctgatgaaaccggttactt

SEQ ID NO: 4673 - DNA, 40 bp, Artificial Sequence
  Synthetic Oligonucleotide
aatactggcctcggtacgtgcttctccatcgctcttctcg

SEQ ID NO: 4674 - DNA, 40 bp, Artificial Sequence
  Synthetic Oligonucleotide
aatactggcctcggtacattcttctccatcgctcttctcg

SEQ ID NO: 4675 - DNA, 40 bp, Artificial Sequence
  Synthetic Oligonucleotide
aatactggccacggtacgttcttctccatcgctcttctcg

SEQ ID NO: 4676 - DNA, 40 bp, Artificial Sequence
  Synthetic Oligonucleotide
aatacgccgcctctgatacggtcgtgatcgtagttcctcg

SEQ ID NO: 4677 - DNA, 40 bp, Artificial Sequence
  Synthetic Oligonucleotide
aataagcggtggtttctagagccatatcctctagggttat

SEQ ID NO: 4678 - DNA, 40 bp, Artificial Sequence
  Synthetic Oligonucleotide
aataagcctgtcttttaatctcggcagagtgctcatgagc

SEQ ID NO: 4679 - DNA, 40 bp, Artificial Sequence
  Synthetic Oligonucleotide
aataacagtaattctgcccctctgatgaaaccggttactt

SEQ ID NO: 4680 - DNA, 40 bp, Artificial Sequence
  Synthetic Oligonucleotide
aagttaccgcggtactgaccgcctcgtctccgttctgctg

SEQ ID NO: 4681 - DNA, 40 bp, Artificial Sequence
  Synthetic Oligonucleotide
aagtcgatccgtactttcaggcgctatcctgatcacccga

SEQ ID NO: 4682 - DNA, 40 bp, Artificial Sequence
  Synthetic Oligonucleotide
aagtagtggccgaatttccgcctcggtctatttgtctgat

SEQ ID NO: 4683 - DNA, 40 bp, Artificial Sequence
  Synthetic Oligonucleotide
aaggtgccacacgcctgggtttccttcccaaagagtcgtt

SEQ ID NO: 4684 - DNA, 40 bp, Artificial Sequence
  Synthetic Oligonucleotide
aaggcagctgcctgcgcttggctaccaaccgctagaatgg

SEQ ID NO: 4685 - DNA, 40 bp, Artificial Sequence
  Synthetic Oligonucleotide
aaggatacagcgtgattcttttacggactaccgttaagta

SEQ ID NO: 4686 - DNA, 40 bp, Artificial Sequence
  Synthetic Oligonucleotide
aaggacctccgatccgcctcgtacctcaaaaccttgtctg

SEQ ID NO: 4687 - DNA, 40 bp, Artificial Sequence
  Synthetic Oligonucleotide
aagcttacgcctaggaacctccaaacgcttatgcataaga

SEQ ID NO: 4688 - DNA, 40 bp, Artificial Sequence
  Synthetic Oligonucleotide
aagcgtttgtattgtgtcgcacgctattgcgaggtaacat

SEQ ID NO: 4689 - DNA, 40 bp, Artificial Sequence
  Synthetic Oligonucleotide
aagccggggcccgcctcgagctagctacctccattgtctg

SEQ ID NO: 4690 - DNA, 40 bp, Artificial Sequence
  Synthetic Oligonucleotide
aagccggggcccgcctcaagctagctacctccactgtctg

SEQ ID NO: 4691 - DNA, 40 bp, Artificial Sequence
  Synthetic Oligonucleotide
aagccggggcccgcctcaagctagcaacctccattgtctg

SEQ ID NO: 4692 - DNA, 40 bp, Artificial Sequence
  Synthetic Oligonucleotide
aagccggggcccgcctcaagccagctacctccattgtctg

SEQ ID NO: 4693 - DNA, 40 bp, Artificial Sequence
  Synthetic Oligonucleotide
aagccgggaccgcctcaagctagtctacctccattgtctg

SEQ ID NO: 4694 - DNA, 40 bp, Artificial Sequence
  Synthetic Oligonucleotide
aagccgggacccgcctcaagctagctacctccattgtctg

SEQ ID NO: 4695 - DNA, 40 bp, Artificial Sequence
  Synthetic Oligonucleotide
aagcccgggcccgcctcaagctagctacctccattgtctg

SEQ ID NO: 4696 - DNA, 40 bp, Artificial Sequence
  Synthetic Oligonucleotide
aagatctcggatctggcgtaccacttggacaggttccttc

SEQ ID NO: 4697 - DNA, 40 bp, Artificial Sequence
  Synthetic Oligonucleotide
aagaatgacaacaagactgaaaacgcgtcgataacttctg

SEQ ID NO: 4698 - DNA, 40 bp, Artificial Sequence
  Synthetic Oligonucleotide
aactgttccaccaatttggtaccaacaatcatgttctctg

SEQ ID NO: 4699 - DNA, 40 bp, Artificial Sequence
  Synthetic Oligonucleotide
aactattcgtatcgagcgagcgatacggcgtatccttgac

SEQ ID NO: 4700 - DNA, 40 bp, Artificial Sequence
  Synthetic Oligonucleotide
aactattcgcatcgagcggtcgtttttcgggaatacgggc

SEQ ID NO: 4701 - DNA, 40 bp, Artificial Sequence
  Synthetic Oligonucleotide
aactatccgtttgtccgtcctctcgtggtattgcgcatgc

SEQ ID NO: 4702 - DNA, 40 bp, Artificial Sequence
  Synthetic Oligonucleotide
aactaggttcgcctcgcgcctcctcgtgcacgtttgtctg

SEQ ID NO: 4703 - DNA, 40 bp, Artificial Sequence
  Synthetic Oligonucleotide
aactaagcccccggtccgcctcgctccttagtttgctgta

SEQ ID NO: 4704 - DNA, 40 bp, Artificial Sequence
  Synthetic Oligonucleotide
aacgttaagcttacatacgcctgggtcactctttgttctg

SEQ ID NO: 4705 - DNA, 40 bp, Artificial Sequence
  Synthetic Oligonucleotide
aacgtcctctgcgatcatctttcaaggattactttgatta

SEQ ID NO: 4706 - DNA, 40 bp, Artificial Sequence
  Synthetic Oligonucleotide
aacgtattcgcatcgagcggtcgttttcgggaatacgggc

SEQ ID NO: 4707 - DNA, 40 bp, Artificial Sequence
  Synthetic Oligonucleotide
aacgtattccatccgcctgggctcctcccagctacgactg

SEQ ID NO: 4708 - DNA, 40 bp, Artificial Sequence
  Synthetic Oligonucleotide
aacgtactccgtccgcctgggctcctcccagctacgactg

SEQ ID NO: 4709 - DNA, 40 bp, Artificial Sequence
  Synthetic Oligonucleotide
aacgtactccatccgcctgggctcctcccagctacgacta

SEQ ID NO: 4710 - DNA, 40 bp, Artificial Sequence
  Synthetic Oligonucleotide
aacgggccccgctcaagctagctaccctcccattgtcctg

SEQ ID NO: 4711 - DNA, 40 bp, Artificial Sequence
  Synthetic Oligonucleotide
aacggatccttcctacagcttccgcgtgcagtattgcacg

SEQ ID NO: 4712 - DNA, 40 bp, Artificial Sequence
  Synthetic Oligonucleotide
aacctcggccttttcgtttgctcatgctcgatcctccttg

SEQ ID NO: 4713 - DNA, 40 bp, Artificial Sequence
  Synthetic Oligonucleotide
aacctccaccgcctcgtaagcccgggcacttacctctgta

SEQ ID NO: 4714 - DNA, 40 bp, Artificial Sequence
  Synthetic Oligonucleotide
aaccgtaccccagtttagtccttcctaaagggccctttaa

SEQ ID NO: 4715 - DNA, 40 bp, Artificial Sequence
  Synthetic Oligonucleotide
aaccgtaccccagtttagtccttcctaaagggcccttcga

SEQ ID NO: 4716 - DNA, 40 bp, Artificial Sequence
  Synthetic Oligonucleotide
aaccggggcccgcttcaagctagctacctccattggtctg

SEQ ID NO: 4717 - DNA, 40 bp, Artificial Sequence
  Synthetic Oligonucleotide
aaccggggcccgccttcaagctagctacctccattgtctg

SEQ ID NO: 4718 - DNA, 40 bp, Artificial Sequence
  Synthetic Oligonucleotide
aaccggggcccgcctcaagctagctaccttccattgtctg

SEQ ID NO: 4719 - DNA, 40 bp, Artificial Sequence
  Synthetic Oligonucleotide
aaccggggcccgcctcaagcctactacctccattgtcctg

SEQ ID NO: 4720 - DNA, 40 bp, Artificial Sequence
  Synthetic Oligonucleotide
aaccggggcccccgctcaagctagctacctccattgtctg

SEQ ID NO: 4721 - DNA, 40 bp, Artificial Sequence
  Synthetic Oligonucleotide
aaccgggccgtctcgcaagctagtctacctccattgtctg

SEQ ID NO: 4722 - DNA, 40 bp, Artificial Sequence
  Synthetic Oligonucleotide
aaccgggcccgctcaagtcctagctacctccacttgtctg

SEQ ID NO: 4723 - DNA, 40 bp, Artificial Sequence
  Synthetic Oligonucleotide
aaccgggcccgctcaaggtcctactaccgtcacttgactg

SEQ ID NO: 4724 - DNA, 40 bp, Artificial Sequence
  Synthetic Oligonucleotide
aaccgggcccgctcaaggcctagctaccttccacttgctg

SEQ ID NO: 4725 - DNA, 40 bp, Artificial Sequence
  Synthetic Oligonucleotide
aaccgggcccgctcaagcctagctacctccacttgtactg

SEQ ID NO: 4726 - DNA, 40 bp, Artificial Sequence
  Synthetic Oligonucleotide
aaccgggcccgctcaacgtctagctcacctccattgtgtg

SEQ ID NO: 4727 - DNA, 40 bp, Artificial Sequence
  Synthetic Oligonucleotide
aaccgggcccgcctcaagtctagcctacctccattgtctg

SEQ ID NO: 4728 - DNA, 40 bp, Artificial Sequence
  Synthetic Oligonucleotide
aaccgggcccgcctcaagctagctaccttccattgtctgc

SEQ ID NO: 4729 - DNA, 40 bp, Artificial Sequence
  Synthetic Oligonucleotide
aaccgggcccgcctcaagctagctacctccatttggtctg

SEQ ID NO: 4730 - DNA, 40 bp, Artificial Sequence
  Synthetic Oligonucleotide
aaccgggcccgcctcaagctagctacctccattggtctgc

SEQ ID NO: 4731 - DNA, 40 bp, Artificial Sequence
  Synthetic Oligonucleotide
aaccgggcccgcctcaagcctagctgcctccattcgtctg

SEQ ID NO: 4732 - DNA, 40 bp, Artificial Sequence
  Synthetic Oligonucleotide
aaccgggcccgcctcaagcctagctaccttccattgtctg

SEQ ID NO: 4733 - DNA, 40 bp, Artificial Sequence
  Synthetic Oligonucleotide
aaccgggcccgcctcaacgtctagctacctccattgtctg

SEQ ID NO: 4734 - DNA, 40 bp, Artificial Sequence
  Synthetic Oligonucleotide
aaccgggcccgcctcaacgctagctcacctccattgtctg

SEQ ID NO: 4735 - DNA, 40 bp, Artificial Sequence
  Synthetic Oligonucleotide
aaccgggcccgcctcaacgctagctaacctccattgtctg

SEQ ID NO: 4736 - DNA, 40 bp, Artificial Sequence
  Synthetic Oligonucleotide
aaccgggcccgccctcaagctagctacctccattgtctgc

SEQ ID NO: 4737 - DNA, 40 bp, Artificial Sequence
  Synthetic Oligonucleotide
aaccgggccccgcctcaagctagctacctccattgtactg

SEQ ID NO: 4738 - DNA, 40 bp, Artificial Sequence
  Synthetic Oligonucleotide
aaccgggacccgcctcaagctagctacctccattgtcctg

SEQ ID NO: 4739 - DNA, 40 bp, Artificial Sequence
  Synthetic Oligonucleotide
aaccgggacccgcctcaagcctagctacctccattgtctg

SEQ ID NO: 4740 - DNA, 40 bp, Artificial Sequence
  Synthetic Oligonucleotide
aaccggcactggacgcgtccttggtggactaccaccttat

SEQ ID NO: 4741 - DNA, 40 bp, Artificial Sequence
  Synthetic Oligonucleotide
aaccggagccgcctcaagctagctacctccattgtcctga

SEQ ID NO: 4742 - DNA, 40 bp, Artificial Sequence
  Synthetic Oligonucleotide
aacagtgatgactctcggaacgcgtctttctcccacgcat

SEQ ID NO: 4743 - DNA, 40 bp, Artificial Sequence
  Synthetic Oligonucleotide
aacagtgataactctcggaacgcgtctttctcccatgcat

SEQ ID NO: 4744 - DNA, 40 bp, Artificial Sequence
  Synthetic Oligonucleotide
aacagtgataactctcggaacgcgtctttctcccacgcat

SEQ ID NO: 4745 - DNA, 40 bp, Artificial Sequence
  Synthetic Oligonucleotide
aaattcaaggatcctcgtattgtccgccttgattctccaa

SEQ ID NO: 4746 - DNA, 40 bp, Artificial Sequence
  Synthetic Oligonucleotide
aaatggtacgcttacatacgcctggtcactctttgttctg

SEQ ID NO: 4747 - DNA, 40 bp, Artificial Sequence
  Synthetic Oligonucleotide
aaatcggggcccgcctcaagctggctacctccattgtctg

SEQ ID NO: 4748 - DNA, 40 bp, Artificial Sequence
  Synthetic Oligonucleotide
aaatcgggccgcctcaagctagctacctccattgtcctga

SEQ ID NO: 4749 - DNA, 40 bp, Artificial Sequence
  Synthetic Oligonucleotide
aaatcgggcccgcctcaagctagctacctccattgcctga

SEQ ID NO: 4750 - DNA, 40 bp, Artificial Sequence
  Synthetic Oligonucleotide
aaatccgggccgcctcaagctagctacctccattgtcccg

SEQ ID NO: 4751 - DNA, 40 bp, Artificial Sequence
  Synthetic Oligonucleotide
aaatccgggccgcctcaagctagctacctccattggcctg

SEQ ID NO: 4752 - DNA, 40 bp, Artificial Sequence
  Synthetic Oligonucleotide
aaatccgggccgcctcaagctagctacctccattgcctga

SEQ ID NO: 4753 - DNA, 40 bp, Artificial Sequence
  Synthetic Oligonucleotide
aaatccgggcccgcctcaagctagctacctccattgtctg

SEQ ID NO: 4754 - DNA, 40 bp, Artificial Sequence
  Synthetic Oligonucleotide
aaatccgggcccgcctcaagctagctacctccatcgcctg

SEQ ID NO: 4755 - DNA, 40 bp, Artificial Sequence
  Synthetic Oligonucleotide
aaataggacctacgcccgctccagtctgactcatcgtctg

SEQ ID NO: 4756 - DNA, 40 bp, Artificial Sequence
  Synthetic Oligonucleotide
aaagcgtttgtatgtgtcgcacgctattgcgaggtaacat

SEQ ID NO: 4757 - DNA, 40 bp, Artificial Sequence
  Synthetic Oligonucleotide
aaactggggcccgccttaagctagctacctccattgtctg

SEQ ID NO: 4758 - DNA, 40 bp, Artificial Sequence
  Synthetic Oligonucleotide
aaactggggcccgcctcaagctagctacctcgattgtctg

SEQ ID NO: 4759 - DNA, 40 bp, Artificial Sequence
  Synthetic Oligonucleotide
aaacgtgggcccgcctcaagctagctacctccattgtctg

SEQ ID NO: 4760 - DNA, 40 bp, Artificial Sequence
  Synthetic Oligonucleotide
aaacgggggcccgcctcaagctagctacctccattgtctg

SEQ ID NO: 4761 - DNA, 40 bp, Artificial Sequence
  Synthetic Oligonucleotide
aaacggggcccgctcaagctagctgacctccattagtctg

SEQ ID NO: 4762 - DNA, 40 bp, Artificial Sequence
  Synthetic Oligonucleotide
aaacgggcccggcctcaagctagctacctccattcgtctg

SEQ ID NO: 4763 - DNA, 40 bp, Artificial Sequence
  Synthetic Oligonucleotide
aaacgggcccgcctcaacgcctagctacctccattgtctg

SEQ ID NO: 4764 - DNA, 40 bp, Artificial Sequence
  Synthetic Oligonucleotide
aaacgagatctcatgacgcctcgggtccttccttcgacta

SEQ ID NO: 4765 - DNA, 40 bp, Artificial Sequence
  Synthetic Oligonucleotide
aaacgagatctcatgacgcctcgggtccttccctcgactg

SEQ ID NO: 4766 - DNA, 40 bp, Artificial Sequence
  Synthetic Oligonucleotide
aaacgagatctcataacgcctcgggtccttccttcgactg

SEQ ID NO: 4767 - DNA, 40 bp, Artificial Sequence
  Synthetic Oligonucleotide
aaaccggtgcccgcctcaagctagctacctccattggctg

SEQ ID NO: 4768 - DNA, 40 bp, Artificial Sequence
  Synthetic Oligonucleotide
aaaccgggtccgcctcaagctagctaccttccattgtctg

SEQ ID NO: 4769 - DNA, 40 bp, Artificial Sequence
  Synthetic Oligonucleotide
aaaccggggtccgcctcaggctagctacctccattgtctg

SEQ ID NO: 4770 - DNA, 40 bp, Artificial Sequence
  Synthetic Oligonucleotide
aaaccggggtccgcctcaagctagctgcctccattgtctg

SEQ ID NO: 4771 - DNA, 40 bp, Artificial Sequence
  Synthetic Oligonucleotide
aaaccggggtccgcctcaagctagctacctccattgtcta

SEQ ID NO: 4772 - DNA, 40 bp, Artificial Sequence
  Synthetic Oligonucleotide
aaaccggggtccgcctcaagctagctacctcaattgtctg

SEQ ID NO: 4773 - DNA, 40 bp, Artificial Sequence
  Synthetic Oligonucleotide
aaaccgggggcccgcctcaagctgctacctccattgtctg

SEQ ID NO: 4774 - DNA, 40 bp, Artificial Sequence
  Synthetic Oligonucleotide
aaaccgggggcccgcctcaagctagctactccattgtctg

SEQ ID NO: 4775 - DNA, 40 bp, Artificial Sequence
  Synthetic Oligonucleotide
aaaccgggggcccgcctcaagctagctacctccattgctg

SEQ ID NO: 4776 - DNA, 40 bp, Artificial Sequence
  Synthetic Oligonucleotide
aaaccgggggcccgcctcaagctagctacctcattgtctg

SEQ ID NO: 4777 - DNA, 40 bp, Artificial Sequence
  Synthetic Oligonucleotide
aaaccggggcgcgcctcaagctagctacctccattgtctg

SEQ ID NO: 4778 - DNA, 40 bp, Artificial Sequence
  Synthetic Oligonucleotide
aaaccggggcctgcctcaagctagctacctccattgactg

SEQ ID NO: 4779 - DNA, 40 bp, Artificial Sequence
  Synthetic Oligonucleotide
aaaccggggccgccttcgagctagctacctccattgtctg

SEQ ID NO: 4780 - DNA, 40 bp, Artificial Sequence
  Synthetic Oligonucleotide
aaaccggggccgcctcaagctagctacctccattgtctga

SEQ ID NO: 4781 - DNA, 40 bp, Artificial Sequence
  Synthetic Oligonucleotide
aaaccggggccgcctcaagctagctacctccattgtcctg

SEQ ID NO: 4782 - DNA, 40 bp, Artificial Sequence
  Synthetic Oligonucleotide
aaaccggggccgcctcaagctagctacctccattggtctg

SEQ ID NO: 4783 - DNA, 40 bp, Artificial Sequence
  Synthetic Oligonucleotide
aaaccggggccgcctcaagctagctacctccattcgtctg

SEQ ID NO: 4784 - DNA, 40 bp, Artificial Sequence
  Synthetic Oligonucleotide
aaaccggggccgcctcaagctagctacctaccattgtctg

SEQ ID NO: 4785 - DNA, 40 bp, Artificial Sequence
  Synthetic Oligonucleotide
aaaccggggccgcctcaagctagctaacctccattgtctg

SEQ ID NO: 4786 - DNA, 40 bp, Artificial Sequence
  Synthetic Oligonucleotide
aaaccggggccgcctcaagcctagctacctccattgtctg

SEQ ID NO: 4787 - DNA, 40 bp, Artificial Sequence
  Synthetic Oligonucleotide
aaaccggggccgcctacaagctagctacctccattgtctg

SEQ ID NO: 4788 - DNA, 40 bp, Artificial Sequence
  Synthetic Oligonucleotide
aaaccggggccgccctcaagctagctacctccattgtctg

SEQ ID NO: 4789 - DNA, 40 bp, Artificial Sequence
  Synthetic Oligonucleotide
aaaccggggcccgctcaagctagctacctccattggtctg

SEQ ID NO: 4790 - DNA, 40 bp, Artificial Sequence
  Synthetic Oligonucleotide
aaaccggggcccgctcaagctagctacctccaattgtctg

SEQ ID NO: 4791 - DNA, 40 bp, Artificial Sequence
  Synthetic Oligonucleotide
aaaccggggcccgctcaagctagcctacctccattgtctg

SEQ ID NO: 4792 - DNA, 40 bp, Artificial Sequence
  Synthetic Oligonucleotide
aaaccggggcccgctcaagcctagctgcctccattgtctg

SEQ ID NO: 4793 - DNA, 40 bp, Artificial Sequence
  Synthetic Oligonucleotide
aaaccggggcccgccttcaagctagctacctcccttgctg

SEQ ID NO: 4794 - DNA, 40 bp, Artificial Sequence
  Synthetic Oligonucleotide
aaaccggggcccgccttaagctagctacctcgattgtctg

SEQ ID NO: 4795 - DNA, 40 bp, Artificial Sequence
  Synthetic Oligonucleotide
aaaccggggcccgcctgaagctagctacctccattgtctg

SEQ ID NO: 4796 - DNA, 40 bp, Artificial Sequence
  Synthetic Oligonucleotide
aaaccggggcccgcctcgagctagctacctctattgtctg

SEQ ID NO: 4797 - DNA, 40 bp, Artificial Sequence
  Synthetic Oligonucleotide
aaaccggggcccgcctcgagctagctacctacattgtctg

SEQ ID NO: 4798 - DNA, 40 bp, Artificial Sequence
  Synthetic Oligonucleotide
aaaccggggcccgcctcgagctagccacctccattgtctg

SEQ ID NO: 4799 - DNA, 40 bp, Artificial Sequence
  Synthetic Oligonucleotide
aaaccggggcccgcctcgagccagctacctccattgtctg

SEQ ID NO: 4800 - DNA, 40 bp, Artificial Sequence
  Synthetic Oligonucleotide
aaaccggggcccgcctccagctagctacctccattgtctg

SEQ ID NO: 4801 - DNA, 40 bp, Artificial Sequence
  Synthetic Oligonucleotide
aaaccggggcccgcctcagtctagctacctccattgtctg

SEQ ID NO: 4802 - DNA, 40 bp, Artificial Sequence
  Synthetic Oligonucleotide
aaaccggggcccgcctcaagttagctacctccactgtctg

SEQ ID NO: 4803 - DNA, 40 bp, Artificial Sequence
  Synthetic Oligonucleotide
aaaccggggcccgcctcaagcttgctacctctattgtctg

SEQ ID NO: 4804 - DNA, 40 bp, Artificial Sequence
  Synthetic Oligonucleotide
aaaccggggcccgcctcaagctggccacctccattgtctg

SEQ ID NO: 4805 - DNA, 40 bp, Artificial Sequence
  Synthetic Oligonucleotide
aaaccggggcccgcctcaagctggcaacctccattgtctg

SEQ ID NO: 4806 - DNA, 40 bp, Artificial Sequence
  Synthetic Oligonucleotide
aaaccggggcccgcctcaagctgctaccctccattgtctg

SEQ ID NO: 4807 - DNA, 40 bp, Artificial Sequence
  Synthetic Oligonucleotide
aaaccggggcccgcctcaagctatctacctccattgtctg

SEQ ID NO: 4808 - DNA, 40 bp, Artificial Sequence
  Synthetic Oligonucleotide
aaaccggggcccgcctcaagctagcttcctccattgtctg

SEQ ID NO: 4809 - DNA, 40 bp, Artificial Sequence
  Synthetic Oligonucleotide
aaaccggggcccgcctcaagctagctgactccattgtctg

SEQ ID NO: 4810 - DNA, 40 bp, Artificial Sequence
  Synthetic Oligonucleotide
aaaccggggcccgcctcaagctagctccctccattgtctg

SEQ ID NO: 4811 - DNA, 40 bp, Artificial Sequence
  Synthetic Oligonucleotide
aaaccggggcccgcctcaagctagctatctccattatctg

SEQ ID NO: 4812 - DNA, 40 bp, Artificial Sequence
  Synthetic Oligonucleotide
aaaccggggcccgcctcaagctagctacttccattatctg

SEQ ID NO: 4813 - DNA, 40 bp, Artificial Sequence
  Synthetic Oligonucleotide
aaaccggggcccgcctcaagctagctacttccactgtctg

SEQ ID NO: 4814 - DNA, 40 bp, Artificial Sequence
  Synthetic Oligonucleotide
aaaccggggcccgcctcaagctagctactcccattgtctg

SEQ ID NO: 4815 - DNA, 40 bp, Artificial Sequence
  Synthetic Oligonucleotide
aaaccggggcccgcctcaagctagctacctcctttgtctc

SEQ ID NO: 4816 - DNA, 40 bp, Artificial Sequence
  Synthetic Oligonucleotide
aaaccggggcccgcctcaagctagctacctcctttgcctg

SEQ ID NO: 4817 - DNA, 40 bp, Artificial Sequence
  Synthetic Oligonucleotide
aaaccggggcccgcctcaagctagctacctccttagtctg

SEQ ID NO: 4818 - DNA, 40 bp, Artificial Sequence
  Synthetic Oligonucleotide
aaaccggggcccgcctcaagctagctacctcctatgtctg

SEQ ID NO: 4819 - DNA, 40 bp, Artificial Sequence
  Synthetic Oligonucleotide
aaaccggggcccgcctcaagctagctacctccgttgtccg

SEQ ID NO: 4820 - DNA, 40 bp, Artificial Sequence
  Synthetic Oligonucleotide
aaaccggggcccgcctcaagctagctacctccgtcgtctg

SEQ ID NO: 4821 - DNA, 40 bp, Artificial Sequence
  Synthetic Oligonucleotide
aaaccggggcccgcctcaagctagctacctccatgtctga

SEQ ID NO: 4822 - DNA, 40 bp, Artificial Sequence
  Synthetic Oligonucleotide
aaaccggggcccgcctcaagctagctacctacattgtctg

SEQ ID NO: 4823 - DNA, 40 bp, Artificial Sequence
  Synthetic Oligonucleotide
aaaccggggcccgcctcaagctagctaccctcattgtctg

SEQ ID NO: 4824 - DNA, 40 bp, Artificial Sequence
  Synthetic Oligonucleotide
aaaccggggcccgcctcaagctagctacccctattgtctg

SEQ ID NO: 4825 - DNA, 40 bp, Artificial Sequence
  Synthetic Oligonucleotide
aaaccggggcccgcctcaagctagctaccaccattgtcta

SEQ ID NO: 4826 - DNA, 40 bp, Artificial Sequence
  Synthetic Oligonucleotide
aaaccggggcccgcctcaagctagctaccaccatcgtctg

SEQ ID NO: 4827 - DNA, 40 bp, Artificial Sequence
  Synthetic Oligonucleotide
aaaccggggcccgcctcaagctagctacatccattgtccg

SEQ ID NO: 4828 - DNA, 40 bp, Artificial Sequence
  Synthetic Oligonucleotide
aaaccggggcccgcctcaagctagcctactccattgtctg

SEQ ID NO: 4829 - DNA, 40 bp, Artificial Sequence
  Synthetic Oligonucleotide
aaaccggggcccgcctcaagctagccacctctattgtctg

SEQ ID NO: 4830 - DNA, 40 bp, Artificial Sequence
  Synthetic Oligonucleotide
aaaccggggcccgcctcaagctagcatctctacttgtctg

SEQ ID NO: 4831 - DNA, 40 bp, Artificial Sequence
  Synthetic Oligonucleotide
aaaccggggcccgcctcaagctagcatctccattgtcctg

SEQ ID NO: 4832 - DNA, 40 bp, Artificial Sequence
  Synthetic Oligonucleotide
aaaccggggcccgcctcaagctagcagacctccttgtctg

SEQ ID NO: 4833 - DNA, 40 bp, Artificial Sequence
  Synthetic Oligonucleotide
aaaccggggcccgcctcaagctagcaacctcctttgtctg

SEQ ID NO: 4834 - DNA, 40 bp, Artificial Sequence
  Synthetic Oligonucleotide
aaaccggggcccgcctcaagctacctacctccattgtctg

SEQ ID NO: 4835 - DNA, 40 bp, Artificial Sequence
  Synthetic Oligonucleotide
aaaccggggcccgcctcaagcctagctacctccatgtctg

SEQ ID NO: 4836 - DNA, 40 bp, Artificial Sequence
  Synthetic Oligonucleotide
aaaccggggcccgcctcaagcctagctacctcattgtctg

SEQ ID NO: 4837 - DNA, 40 bp, Artificial Sequence
  Synthetic Oligonucleotide
aaaccggggcccgcctcaagccagctacctccattgtttg

SEQ ID NO: 4838 - DNA, 40 bp, Artificial Sequence
  Synthetic Oligonucleotide
aaaccggggcccgcctcaagcagcttaccgtccattgtca

SEQ ID NO: 4839 - DNA, 40 bp, Artificial Sequence
  Synthetic Oligonucleotide
aaaccggggcccgcctcaagatagctacctccattgtctg

SEQ ID NO: 4840 - DNA, 40 bp, Artificial Sequence
  Synthetic Oligonucleotide
aaaccggggcccgcctcaacgtctctacctccattgtctg

SEQ ID NO: 4841 - DNA, 40 bp, Artificial Sequence
  Synthetic Oligonucleotide
aaaccggggcccgcctcaacgctagctacctccattgctg

SEQ ID NO: 4842 - DNA, 40 bp, Artificial Sequence
  Synthetic Oligonucleotide
aaaccggggcccgcctcaacctagctacctccattgtctg

SEQ ID NO: 4843 - DNA, 40 bp, Artificial Sequence
  Synthetic Oligonucleotide
aaaccggggcccgcctaaagctagctacctccattgtctg

SEQ ID NO: 4844 - DNA, 40 bp, Artificial Sequence
  Synthetic Oligonucleotide
aaaccggggcccgccctacagcagctacctccattgtctg

SEQ ID NO: 4845 - DNA, 40 bp, Artificial Sequence
  Synthetic Oligonucleotide
aaaccggggcccgccccaagctagcaacctccattgtctg

SEQ ID NO: 4846 - DNA, 40 bp, Artificial Sequence
  Synthetic Oligonucleotide
aaaccggggcccgcccagactcagctacctccattgtctg

SEQ ID NO: 4847 - DNA, 40 bp, Artificial Sequence
  Synthetic Oligonucleotide
aaaccggggcccgcccaagctcagctacctccattgtctg

SEQ ID NO: 4848 - DNA, 40 bp, Artificial Sequence
  Synthetic Oligonucleotide
aaaccggggcccgcccaagctagctacctccattgtctga

SEQ ID NO: 4849 - DNA, 40 bp, Artificial Sequence
  Synthetic Oligonucleotide
aaaccggggcccgactcaagctagctacctccattgtctg

SEQ ID NO: 4850 - DNA, 40 bp, Artificial Sequence
  Synthetic Oligonucleotide
aaaccggggccccgctcaagctagctacctccattgtctg

SEQ ID NO: 4851 - DNA, 40 bp, Artificial Sequence
  Synthetic Oligonucleotide
aaaccggggcccacatcaagctagctacctccattgtctg

SEQ ID NO: 4852 - DNA, 40 bp, Artificial Sequence
  Synthetic Oligonucleotide
aaaccggggaccgcctcaagctagctacttccattgtctg

SEQ ID NO: 4853 - DNA, 40 bp, Artificial Sequence
  Synthetic Oligonucleotide
aaaccggggaccgcctcaagctagctacctccactgtctg

SEQ ID NO: 4854 - DNA, 40 bp, Artificial Sequence
  Synthetic Oligonucleotide
aaaccgggcgcgcctcaagctagcctacctccattgtctg

SEQ ID NO: 4855 - DNA, 40 bp, Artificial Sequence
  Synthetic Oligonucleotide
aaaccgggccgcctcaagctagctacctcccattgtcgtg

SEQ ID NO: 4856 - DNA, 40 bp, Artificial Sequence
  Synthetic Oligonucleotide
aaaccgggcccgctcaagctagctacctccattgtcctga

SEQ ID NO: 4857 - DNA, 40 bp, Artificial Sequence
  Synthetic Oligonucleotide
aaaccgggcccgctcaacgctagctacctcccattgtctg

SEQ ID NO: 4858 - DNA, 40 bp, Artificial Sequence
  Synthetic Oligonucleotide
aaaccgggcccgctcaacgctagctaccgtccattgtctg

SEQ ID NO: 4859 - DNA, 40 bp, Artificial Sequence
  Synthetic Oligonucleotide
aaaccgggcccgccttcaagctagctaccttccattgctg

SEQ ID NO: 4860 - DNA, 40 bp, Artificial Sequence
  Synthetic Oligonucleotide
aaaccgggcccgcctcaagttagcctacctccattgtctg

SEQ ID NO: 4861 - DNA, 40 bp, Artificial Sequence
  Synthetic Oligonucleotide
aaaccgggcccgcctcaagctgagctacctccattgtctg

SEQ ID NO: 4862 - DNA, 40 bp, Artificial Sequence
  Synthetic Oligonucleotide
aaaccgggcccgcctcaagctagctaccttctattgtctg

SEQ ID NO: 4863 - DNA, 40 bp, Artificial Sequence
  Synthetic Oligonucleotide
aaaccgggcccgcctcaagctagctaccttccattgctgc

SEQ ID NO: 4864 - DNA, 40 bp, Artificial Sequence
  Synthetic Oligonucleotide
aaaccgggcccgcctcaagctagctaccttccattgactg

SEQ ID NO: 4865 - DNA, 40 bp, Artificial Sequence
  Synthetic Oligonucleotide
aaaccgggcccgcctcaagctagctacctccattgtcgtg

SEQ ID NO: 4866 - DNA, 40 bp, Artificial Sequence
  Synthetic Oligonucleotide
aaaccgggcccgcctcaagctagctacctccattgtactg

SEQ ID NO: 4867 - DNA, 40 bp, Artificial Sequence
  Synthetic Oligonucleotide
aaaccgggcccgcctcaagctagctacctccattgccctg

SEQ ID NO: 4868 - DNA, 40 bp, Artificial Sequence
  Synthetic Oligonucleotide
aaaccgggcccgcctcaagctagctacctccaattgtctg

SEQ ID NO: 4869 - DNA, 40 bp, Artificial Sequence
  Synthetic Oligonucleotide
aaaccgggcccgccctaagctagctacctccattggtctg

SEQ ID NO: 4870 - DNA, 40 bp, Artificial Sequence
  Synthetic Oligonucleotide
aaaccgggccccgctcaagctagctacctcccattgtctg

SEQ ID NO: 4871 - DNA, 40 bp, Artificial Sequence
  Synthetic Oligonucleotide
aaaccgggccccgcctcgaagctagctacctccattgctg

SEQ ID NO: 4872 - DNA, 40 bp, Artificial Sequence
  Synthetic Oligonucleotide
aaaccgggccccgcctcaagctagctacctccattgtctg

SEQ ID NO: 4873 - DNA, 40 bp, Artificial Sequence
  Synthetic Oligonucleotide
aaaccgggcccccgctcaagctagctacctccattgtctg

SEQ ID NO: 4874 - DNA, 40 bp, Artificial Sequence
  Synthetic Oligonucleotide
aaaccgggatccgcctcaagctagctacctccattgtctg

SEQ ID NO: 4875 - DNA, 40 bp, Artificial Sequence
  Synthetic Oligonucleotide
aaaccgggaccgccttcaagctagctacctccattgtctg

SEQ ID NO: 4876 - DNA, 40 bp, Artificial Sequence
  Synthetic Oligonucleotide
aaaccgggaccgcctcaagctagctacctaccattgtctg

SEQ ID NO: 4877 - DNA, 40 bp, Artificial Sequence
  Synthetic Oligonucleotide
aaaccgggacccgcctcgagctagctacctccattgtctg

SEQ ID NO: 4878 - DNA, 40 bp, Artificial Sequence
  Synthetic Oligonucleotide
aaaccgggacccgcctccagctagctacctccattgtctg

SEQ ID NO: 4879 - DNA, 40 bp, Artificial Sequence
  Synthetic Oligonucleotide
aaaccgggacccgcctcaagcttgctacctccattgtctg

SEQ ID NO: 4880 - DNA, 40 bp, Artificial Sequence
  Synthetic Oligonucleotide
aaaccgggacccgcctcaagctggctacctccattgtctg

SEQ ID NO: 4881 - DNA, 40 bp, Artificial Sequence
  Synthetic Oligonucleotide
aaaccgggacccgcctcaagctagctacctctattgtctg

SEQ ID NO: 4882 - DNA, 40 bp, Artificial Sequence
  Synthetic Oligonucleotide
aaaccgggacccgcctcaagctagctacctccgttgtctg

SEQ ID NO: 4883 - DNA, 40 bp, Artificial Sequence
  Synthetic Oligonucleotide
aaaccgggacccgcctcaagctagctacctccattgcctg

SEQ ID NO: 4884 - DNA, 40 bp, Artificial Sequence
  Synthetic Oligonucleotide
aaaccgggacccgcctcaagctagctacctccactgtctg

SEQ ID NO: 4885 - DNA, 40 bp, Artificial Sequence
  Synthetic Oligonucleotide
aaaccgggacccgcctcaagctagcaacctccattgtctg

SEQ ID NO: 4886 - DNA, 40 bp, Artificial Sequence
  Synthetic Oligonucleotide
aaaccggagcctgcctcaagctagctacctccattgtctg

SEQ ID NO: 4887 - DNA, 40 bp, Artificial Sequence
  Synthetic Oligonucleotide
aaaccggagcccgcctcaagctagctacctccatcgtctg

SEQ ID NO: 4888 - DNA, 40 bp, Artificial Sequence
  Synthetic Oligonucleotide
aaacccgggcccgcctcaagctagctatctccattgtctg

SEQ ID NO: 4889 - DNA, 40 bp, Artificial Sequence
  Synthetic Oligonucleotide
aaaccagggtccgcctcaagctagctacctccattgtctg

SEQ ID NO: 4890 - DNA, 40 bp, Artificial Sequence
  Synthetic Oligonucleotide
aaaccagggcccgcctcaagctagctacctccattatctg

SEQ ID NO: 4891 - DNA, 40 bp, Artificial Sequence
  Synthetic Oligonucleotide
aaaccagggcccgcctcaagctagctaccaccattgtctg

SEQ ID NO: 4892 - DNA, 40 bp, Artificial Sequence
  Synthetic Oligonucleotide
aaaccagggcccgcctcaagctagccacctccattgtctg

SEQ ID NO: 4893 - DNA, 40 bp, Artificial Sequence
  Synthetic Oligonucleotide
aaaccaaggcccgcctcaagctagctacctccattgtctg

SEQ ID NO: 4894 - DNA, 40 bp, Artificial Sequence
  Synthetic Oligonucleotide
aaaacgaaggtcgcggtccgcctcgatccgccccggatta

SEQ ID NO: 4895 - DNA, 40 bp, Artificial Sequence
  Synthetic Oligonucleotide
aaaaccggggcccgcctcaagctgctacctccattgtctg

SEQ ID NO: 4896 - DNA, 40 bp, Artificial Sequence
  Synthetic Oligonucleotide
aaaaccggggcccgcctcaagctagctacctccatgtctg

SEQ ID NO: 4897 - DNA, 40 bp, Artificial Sequence
  Synthetic Oligonucleotide
tagcggcttttaagcacttctcggtaacttgggcagttac

SEQ ID NO: 4898 - DNA, 40 bp, Artificial Sequence
  Synthetic Oligonucleotide
gcggtttcttctcctgactacatgagattaataaatgcgc

SEQ ID NO: 4899 - DNA, 40 bp, Artificial Sequence
  Synthetic Oligonucleotide
cactatccgtttgtccgtcctctcgtagtattgcgcatgc

SEQ ID NO: 4900 - DNA, 40 bp, Artificial Sequence
  Synthetic Oligonucleotide
tatggggcttttaagcacttctcggtaacttgggagttac

SEQ ID NO: 4901 - DNA, 40 bp, Artificial Sequence
  Synthetic Oligonucleotide
gcggtttcttctcctgactacatgagattaatagacgcgc

SEQ ID NO: 4902 - DNA, 40 bp, Artificial Sequence
  Synthetic Oligonucleotide
gcggtttcttctcctgactacatgagatcaataaacgcgc

SEQ ID NO: 4903 - DNA, 40 bp, Artificial Sequence
  Synthetic Oligonucleotide
gcggtctcttctcctgactacatgagattaataaacgcgc

SEQ ID NO: 4904 - DNA, 40 bp, Artificial Sequence
  Synthetic Oligonucleotide
cagctatccgttgtccgtcctcttgtggtattgcgcatgc

SEQ ID NO: 4905 - DNA, 40 bp, Artificial Sequence
  Synthetic Oligonucleotide
cactatccgtttgtccgtcttctcgtggtattgcgcatgc

SEQ ID NO: 4906 - DNA, 40 bp, Artificial Sequence
  Synthetic Oligonucleotide
accgtaggcacctgctctatgtcgtggggagtaacaggtt

SEQ ID NO: 4907 - DNA, 40 bp, Artificial Sequence
  Synthetic Oligonucleotide
tatggcggttttaagcacttctcggtaacttggcagttac

SEQ ID NO: 4908 - DNA, 40 bp, Artificial Sequence
  Synthetic Oligonucleotide
cactatccgtttgtccgtcctcttgtggtattgcgcattc

SEQ ID NO: 4909 - DNA, 40 bp, Artificial Sequence
  Synthetic Oligonucleotide
cactatccgttgtccgtcctctcgtggtattgcgcatgtc

SEQ ID NO: 4910 - DNA, 40 bp, Artificial Sequence
  Synthetic Oligonucleotide
cactacccgtttgtccgtcctctcgtggtattgcgcatgc

SEQ ID NO: 4911 - DNA, 40 bp, Artificial Sequence
  Synthetic Oligonucleotide
tttgggcttttaagcacttctcggtaacttgggcagttac

SEQ ID NO: 4912 - DNA, 40 bp, Artificial Sequence
  Synthetic Oligonucleotide
tatcgccagtctacatcaactatgatgacgcttgactgga

SEQ ID NO: 4913 - DNA, 40 bp, Artificial Sequence
  Synthetic Oligonucleotide
gtcgtacttaccaccctgacatcgcggggagctaatggtt

SEQ ID NO: 4914 - DNA, 40 bp, Artificial Sequence
  Synthetic Oligonucleotide
gcggttcttctccttgactacatgagattaataaacgcgc

SEQ ID NO: 4915 - DNA, 40 bp, Artificial Sequence
  Synthetic Oligonucleotide
cactatccgtttgtccgtcctattgtggtattgcgcatgc

SEQ ID NO: 4916 - DNA, 40 bp, Artificial Sequence
  Synthetic Oligonucleotide
cactatccgtttgtccgccctctcgtggtattgcgcatgc

SEQ ID NO: 4917 - DNA, 40 bp, Artificial Sequence
  Synthetic Oligonucleotide
cactatccgttgtccgtcctcttgtggtattgcgtcatgc

SEQ ID NO: 4918 - DNA, 40 bp, Artificial Sequence
  Synthetic Oligonucleotide
cactatccgttgtccgtcctcttgtggtaattgcgcatgc

SEQ ID NO: 4919 - DNA, 40 bp, Artificial Sequence
  Synthetic Oligonucleotide
acactattccggtaagtcatcgtttaaccgtttgttgcga

SEQ ID NO: 4920 - DNA, 40 bp, Artificial Sequence
  Synthetic Oligonucleotide
tgggctttcttcatggactaccatgttacaaaaggtcata

SEQ ID NO: 4921 - DNA, 40 bp, Artificial Sequence
  Synthetic Oligonucleotide
tcttccatctggtcgcgatacagaatacgattaacataga

SEQ ID NO: 4922 - DNA, 40 bp, Artificial Sequence
  Synthetic Oligonucleotide
tatggggctttaagcacttctcggtaacttggcagttacc

SEQ ID NO: 4923 - DNA, 40 bp, Artificial Sequence
  Synthetic Oligonucleotide
tatgggcttttaagcacttctcggtaacttgggcagttgc

SEQ ID NO: 4924 - DNA, 40 bp, Artificial Sequence
  Synthetic Oligonucleotide
tatgggcttttaagcacttctcggtaactcgggcagttac

SEQ ID NO: 4925 - DNA, 40 bp, Artificial Sequence
  Synthetic Oligonucleotide
tatgggctttaagtcgacttctcggtaacttggtcagtac

SEQ ID NO: 4926 - DNA, 40 bp, Artificial Sequence
  Synthetic Oligonucleotide
gttaattccagcgacttcggtggtgtcctctccattacca

SEQ ID NO: 4927 - DNA, 40 bp, Artificial Sequence
  Synthetic Oligonucleotide
gtccatggtaagcctcgattccgcccatacatgcatgtaa

SEQ ID NO: 4928 - DNA, 40 bp, Artificial Sequence
  Synthetic Oligonucleotide
catgggcttttaagcacttctcggtaacttgggcagttac

SEQ ID NO: 4929 - DNA, 40 bp, Artificial Sequence
  Synthetic Oligonucleotide
cacttatccgttgtccgtcctctcgtggtattgcgcatgc

SEQ ID NO: 4930 - DNA, 40 bp, Artificial Sequence
  Synthetic Oligonucleotide
cactatccgtttgtccgttctctcgtggtattgcgcatgc

SEQ ID NO: 4931 - DNA, 40 bp, Artificial Sequence
  Synthetic Oligonucleotide
cactatccgtttgtccgtcctcttgtggtattgcgcctgc

SEQ ID NO: 4932 - DNA, 40 bp, Artificial Sequence
  Synthetic Oligonucleotide
cactatccgtttgtccgtcctcttgtggtagtgcgcatgc

SEQ ID NO: 4933 - DNA, 40 bp, Artificial Sequence
  Synthetic Oligonucleotide
cactatccgtttgtccgtcctcttggggtattgcgcatgc

SEQ ID NO: 4934 - DNA, 40 bp, Artificial Sequence
  Synthetic Oligonucleotide
cactatccgtttgtccgtcctctcgtggcattgcgcatgc

SEQ ID NO: 4935 - DNA, 40 bp, Artificial Sequence
  Synthetic Oligonucleotide
cactatccgttgtccgtccttcttgtgtattgcgcatgtc

SEQ ID NO: 4936 - DNA, 40 bp, Artificial Sequence
  Synthetic Oligonucleotide
cactatccgcttgtccgtcctcttatggtattgcgcatgc

SEQ ID NO: 4937 - DNA, 40 bp, Artificial Sequence
  Synthetic Oligonucleotide
cactatccgcctgtccgtcctcttgtggtattgcgcatgc

SEQ ID NO: 4938 - DNA, 40 bp, Artificial Sequence
  Synthetic Oligonucleotide
cacaatccgtttgtccgtcctcttgtggtattgcgcatgc

SEQ ID NO: 4939 - DNA, 40 bp, Artificial Sequence
  Synthetic Oligonucleotide
aaccgggcccgctcaacgtctagctacctccattgtcgtg

SEQ ID NO: 4940 - DNA, 40 bp, Artificial Sequence
  Synthetic Oligonucleotide
tgaggtccgcggtttcactagactactactgatcacgtcg

SEQ ID NO: 4941 - DNA, 40 bp, Artificial Sequence
  Synthetic Oligonucleotide
tcttccacctggtcgcgatacagaatacgattaacataaa

SEQ ID NO: 4942 - DNA, 40 bp, Artificial Sequence
  Synthetic Oligonucleotide
tattcgccagtcacatcaactatgatggcgcttgactgga

SEQ ID NO: 4943 - DNA, 40 bp, Artificial Sequence
  Synthetic Oligonucleotide
tatggggcttttaagcacttccgtgaacttgggcagttac

SEQ ID NO: 4944 - DNA, 40 bp, Artificial Sequence
  Synthetic Oligonucleotide
tatggggcttttaagcacttcccgtgacttgggcagttac

SEQ ID NO: 4945 - DNA, 40 bp, Artificial Sequence
  Synthetic Oligonucleotide
tatggggctttaatcacttctcggtaacttgggcagttac

SEQ ID NO: 4946 - DNA, 40 bp, Artificial Sequence
  Synthetic Oligonucleotide
tatgggcttttaagcacttcttggtaacttgggcagttac

SEQ ID NO: 4947 - DNA, 40 bp, Artificial Sequence
  Synthetic Oligonucleotide
tatgggctttaagcacttctcggtaacttggggcagttac

SEQ ID NO: 4948 - DNA, 40 bp, Artificial Sequence
  Synthetic Oligonucleotide
tataagcctgtcttttaatctcggcagagtgctcatgagt

SEQ ID NO: 4949 - DNA, 40 bp, Artificial Sequence
  Synthetic Oligonucleotide
tagcggttttaagctacttctcggtaacttgggcagttac

SEQ ID NO: 4950 - DNA, 40 bp, Artificial Sequence
  Synthetic Oligonucleotide
gtcgtacttaccaccctgacgtcgcggggaactaatggtt

SEQ ID NO: 4951 - DNA, 40 bp, Artificial Sequence
  Synthetic Oligonucleotide
gctaggctttcacgcacgcggattgaacccgaactgggtt

SEQ ID NO: 4952 - DNA, 40 bp, Artificial Sequence
  Synthetic Oligonucleotide
gcggcttcttctcctgactacatgagattaataaacgcgc

SEQ ID NO: 4953 - DNA, 40 bp, Artificial Sequence
  Synthetic Oligonucleotide
cgctatccgtttgtccgtcctcttgtggtattgcgcacgc

SEQ ID NO: 4954 - DNA, 40 bp, Artificial Sequence
  Synthetic Oligonucleotide
cactatccgtttgtccttcctcttgtggtattgcgcatgc

SEQ ID NO: 4955 - DNA, 40 bp, Artificial Sequence
  Synthetic Oligonucleotide
cactatccgtttgtccgtcctcttgtggtattgctcatgc

SEQ ID NO: 4956 - DNA, 40 bp, Artificial Sequence
  Synthetic Oligonucleotide
cactatccgtttgtccgtcctcttcgtggtatgcgcatgc

SEQ ID NO: 4957 - DNA, 40 bp, Artificial Sequence
  Synthetic Oligonucleotide
cactatccgtttgtccgacctcttgtggtattgcgcatgc

SEQ ID NO: 4958 - DNA, 40 bp, Artificial Sequence
  Synthetic Oligonucleotide
cactatccgtttgtcagtcctcttgtggtattgcgcatgc

SEQ ID NO: 4959 - DNA, 40 bp, Artificial Sequence
  Synthetic Oligonucleotide
cactatccgttgtccgtcctcttgtggtattgcgcatagc

SEQ ID NO: 4960 - DNA, 40 bp, Artificial Sequence
  Synthetic Oligonucleotide
cactatccgttgtccgtcctctcgtcggtattgcgcatgc

SEQ ID NO: 4961 - DNA, 40 bp, Artificial Sequence
  Synthetic Oligonucleotide
cactatccgtatgtccgtcctcttgtggtattgcgcatgc

SEQ ID NO: 4962 - DNA, 40 bp, Artificial Sequence
  Synthetic Oligonucleotide
caccatccgcttgtccgtcctcttgtggtattgcgcatgc

SEQ ID NO: 4963 - DNA, 40 bp, Artificial Sequence
  Synthetic Oligonucleotide
accgcaccccgatagtcatcttcactggacacccgtgtta

SEQ ID NO: 4964 - DNA, 40 bp, Artificial Sequence
  Synthetic Oligonucleotide
tgcgtaacgctatttctgggaagccgcatcgtcgagcgaa

SEQ ID NO: 4965 - DNA, 40 bp, Artificial Sequence
  Synthetic Oligonucleotide
tgcgaaacgtctatttctgggaagccgcatctcgagcgaa

SEQ ID NO: 4966 - DNA, 40 bp, Artificial Sequence
  Synthetic Oligonucleotide
tgatgggctttgagcacttctcggtaacttgggcagttac

SEQ ID NO: 4967 - DNA, 40 bp, Artificial Sequence
  Synthetic Oligonucleotide
tgatgggctttaagcacttctcggtaacttggccagttac

SEQ ID NO: 4968 - DNA, 40 bp, Artificial Sequence
  Synthetic Oligonucleotide
tgatgggcctttaagcacttctcggtaacttggcagttac

SEQ ID NO: 4969 - DNA, 40 bp, Artificial Sequence
  Synthetic Oligonucleotide
tcttccatctggtcgcgatacagaatacgattaacgtaaa

SEQ ID NO: 4970 - DNA, 40 bp, Artificial Sequence
  Synthetic Oligonucleotide
tcgcacagctcacttcgtctttgatcgaccacgctcgtaa

SEQ ID NO: 4971 - DNA, 40 bp, Artificial Sequence
  Synthetic Oligonucleotide
tcgcacaactcacttcgtctttgatcgaccacgctcataa

SEQ ID NO: 4972 - DNA, 40 bp, Artificial Sequence
  Synthetic Oligonucleotide
tattgggctttaagcacttctcggtaacttgggcagttac

SEQ ID NO: 4973 - DNA, 40 bp, Artificial Sequence
  Synthetic Oligonucleotide
tattgcgctagtcacatcaactatgatgacgcttgactga

SEQ ID NO: 4974 - DNA, 40 bp, Artificial Sequence
  Synthetic Oligonucleotide
tattcgccagtcacatcaactatgatgacgcctggctgga

SEQ ID NO: 4975 - DNA, 40 bp, Artificial Sequence
  Synthetic Oligonucleotide
tattcgccagccacatcaactatgatgacgctcgactgga

SEQ ID NO: 4976 - DNA, 40 bp, Artificial Sequence
  Synthetic Oligonucleotide
tatggggcttttaagctactcgtgatacttgggcagttac

SEQ ID NO: 4977 - DNA, 40 bp, Artificial Sequence
  Synthetic Oligonucleotide
tatggggcttttaagcacttctggtgacttgggcagttac

SEQ ID NO: 4978 - DNA, 40 bp, Artificial Sequence
  Synthetic Oligonucleotide
tatggggctttacagcacttctcggtaactgggcagttac

SEQ ID NO: 4979 - DNA, 40 bp, Artificial Sequence
  Synthetic Oligonucleotide
tatggggctttaagtacttctcggtaacttgggcagttac

SEQ ID NO: 4980 - DNA, 40 bp, Artificial Sequence
  Synthetic Oligonucleotide
tatggggcctttaagcacttctcggtaacttggcagttac

SEQ ID NO: 4981 - DNA, 40 bp, Artificial Sequence
  Synthetic Oligonucleotide
tatgggcttttaagcacttctcggtaacttgggctgttac

SEQ ID NO: 4982 - DNA, 40 bp, Artificial Sequence
  Synthetic Oligonucleotide
tatgggcttttaagcactcctcggtaacttgggcagttac

SEQ ID NO: 4983 - DNA, 40 bp, Artificial Sequence
  Synthetic Oligonucleotide
tatgggcttttaagcacctctcggtaacttgggcagttac

SEQ ID NO: 4984 - DNA, 40 bp, Artificial Sequence
  Synthetic Oligonucleotide
tatgggctttaagctacttctcgtaacttgggcgagttac

SEQ ID NO: 4985 - DNA, 40 bp, Artificial Sequence
  Synthetic Oligonucleotide
tatgggctttaagctacttctcggtaacttgagcagttac

SEQ ID NO: 4986 - DNA, 40 bp, Artificial Sequence
  Synthetic Oligonucleotide
tatgggctttaagctacttcccggtaacttgggcagttac

SEQ ID NO: 4987 - DNA, 40 bp, Artificial Sequence
  Synthetic Oligonucleotide
taggggctttaagctacttctcggtaacttgggcagttac

SEQ ID NO: 4988 - DNA, 40 bp, Artificial Sequence
  Synthetic Oligonucleotide
gtcgtacttaccaccctgacatcgcgggggactaatggtt

SEQ ID NO: 4989 - DNA, 40 bp, Artificial Sequence
  Synthetic Oligonucleotide
gtcgtacttaccaccctgacatcacggggaactaatggtt

SEQ ID NO: 4990 - DNA, 40 bp, Artificial Sequence
  Synthetic Oligonucleotide
gtatggggctttaagcacttctcggtaacttggcagttac

SEQ ID NO: 4991 - DNA, 40 bp, Artificial Sequence
  Synthetic Oligonucleotide
gtagtacttaccaccctgacatcgcggggaactaatggtt

SEQ ID NO: 4992 - DNA, 40 bp, Artificial Sequence
  Synthetic Oligonucleotide
gctaggctttcacgcacgcgaattgtacccgaactgggtt

SEQ ID NO: 4993 - DNA, 40 bp, Artificial Sequence
  Synthetic Oligonucleotide
gctaggcttcacgcacgcggatttgtacccgaactgggtt

SEQ ID NO: 4994 - DNA, 40 bp, Artificial Sequence
  Synthetic Oligonucleotide
gctacggcttcacgcacgcggattgtacccgaactgggtt

SEQ ID NO: 4995 - DNA, 40 bp, Artificial Sequence
  Synthetic Oligonucleotide
gcggtttcttctcccgactacatgagattaataaacgcgc

SEQ ID NO: 4996 - DNA, 40 bp, Artificial Sequence
  Synthetic Oligonucleotide
gccgcatgggtcggctttggtgggggactacccccttgta

SEQ ID NO: 4997 - DNA, 40 bp, Artificial Sequence
  Synthetic Oligonucleotide
gccgagcattgggtcggtttggtggggactaccccttgta

SEQ ID NO: 4998 - DNA, 40 bp, Artificial Sequence
  Synthetic Oligonucleotide
cttccacggcatccatgcgataggtactggactaccacta

SEQ ID NO: 4999 - DNA, 40 bp, Artificial Sequence
  Synthetic Oligonucleotide
ctcttatccggcaggacgtctttcgtgcactattacgatt

SEQ ID NO: 5000 - DNA, 40 bp, Artificial Sequence
  Synthetic Oligonucleotide
cgctatccgtttgtccgtcctcctgtggtattgcgcatgc

SEQ ID NO: 5001 - DNA, 40 bp, Artificial Sequence
  Synthetic Oligonucleotide
cgctatccgaatcgagcttgagtgtctggttgaacaacga

SEQ ID NO: 5002 - DNA, 40 bp, Artificial Sequence
  Synthetic Oligonucleotide
ccggcaccccgatagtcatcttcactggacacccgtgtta

SEQ ID NO: 5003 - DNA, 40 bp, Artificial Sequence
  Synthetic Oligonucleotide
ccgccttcaggttccctaactgcgttagccttccggaatg

SEQ ID NO: 5004 - DNA, 40 bp, Artificial Sequence
  Synthetic Oligonucleotide
ccgcatcccgatagtcatcttcgctggaccacccgcgtta

SEQ ID NO: 5005 - DNA, 40 bp, Artificial Sequence
  Synthetic Oligonucleotide
ccgcacccctgatagtcatcttcgctggaccaccgcgtta

SEQ ID NO: 5006 - DNA, 40 bp, Artificial Sequence
  Synthetic Oligonucleotide
ccgcaccccgatggtcatcttcactggaccacccgtgtta

SEQ ID NO: 5007 - DNA, 40 bp, Artificial Sequence
  Synthetic Oligonucleotide
ccgcaccccgatcagtcatcttcactggacacccgtgtta

SEQ ID NO: 5008 - DNA, 40 bp, Artificial Sequence
  Synthetic Oligonucleotide
ccgcaccccgatagtctcttcagctggaccacccgtgtta

SEQ ID NO: 5009 - DNA, 40 bp, Artificial Sequence
  Synthetic Oligonucleotide
ccattgtgctgcttatggagccgggtaccttccagcaagg

SEQ ID NO: 5010 - skipped

SEQ ID NO: 5011 - DNA, 40 bp, Artificial Sequence
  Synthetic Oligonucleotide
cactatccgtttgtccgtcctcttgtggtgttgcgcatac

SEQ ID NO: 5012 - DNA, 40 bp, Artificial Sequence
  Synthetic Oligonucleotide
cactatccgtttgtccgtcctcttgtggtatttcgcatgc

SEQ ID NO: 5013 - DNA, 40 bp, Artificial Sequence
  Synthetic Oligonucleotide
cactatccgtttgtccgtcctcttgtggtattgcgcatcc

SEQ ID NO: 5014 - DNA, 40 bp, Artificial Sequence
  Synthetic Oligonucleotide
cactatccgtttgtccgtcctcttgtgggattgcgcatgc

SEQ ID NO: 5015 - DNA, 40 bp, Artificial Sequence
  Synthetic Oligonucleotide
cactatccgtttgtccgtcctctcgtggtattgctcatgc

SEQ ID NO: 5016 - DNA, 40 bp, Artificial Sequence
  Synthetic Oligonucleotide
cactatccgtttgtccgtcctctcgaggtattgcgcatgc

SEQ ID NO: 5017 - DNA, 40 bp, Artificial Sequence
  Synthetic Oligonucleotide
cactatccgtttgtccgtcctcctgtggtgttgcgcatgc

SEQ ID NO: 5018 - DNA, 40 bp, Artificial Sequence
  Synthetic Oligonucleotide
cactatccgtttgtccgtcatcttgtggtattgcgcatgc

SEQ ID NO: 5019 - DNA, 40 bp, Artificial Sequence
  Synthetic Oligonucleotide
cactatccgtttgtccgtactcttgtggtattgcgcatgc

SEQ ID NO: 5020 - DNA, 40 bp, Artificial Sequence
  Synthetic Oligonucleotide
cactatccgttgtccgtccttcttgtcgtatgcgcatagc

SEQ ID NO: 5021 - DNA, 40 bp, Artificial Sequence
  Synthetic Oligonucleotide
cactatccgttgtccgtccttctcgtgtattgcgcatgtc

SEQ ID NO: 5022 - DNA, 40 bp, Artificial Sequence
  Synthetic Oligonucleotide
cactatccgttgtccgtcctcttgtggtattgcgcatgcc

SEQ ID NO: 5023 - DNA, 40 bp, Artificial Sequence
  Synthetic Oligonucleotide
cactatccgtctgtccgtcctcctgtggtattgcgcatgc

SEQ ID NO: 5024 - DNA, 40 bp, Artificial Sequence
  Synthetic Oligonucleotide
cactatccccatcgagcgatcgtcgtaatactgcctccaa

SEQ ID NO: 5025 - DNA, 40 bp, Artificial Sequence
  Synthetic Oligonucleotide
cactatcagtttgtccgtcctcttgtggtattgcgcatgc

SEQ ID NO: 5026 - DNA, 40 bp, Artificial Sequence
  Synthetic Oligonucleotide
cactagccgtttgtccgtcctcttgtggtattgcgcatgc

SEQ ID NO: 5027 - DNA, 40 bp, Artificial Sequence
  Synthetic Oligonucleotide
cactacccgcttgtccgtcctcttgtggtattgcgcatgc

SEQ ID NO: 5028 - DNA, 40 bp, Artificial Sequence
  Synthetic Oligonucleotide
attacagcgcccagaatgccccgtttcccgtgttcgggac

SEQ ID NO: 5029 - DNA, 40 bp, Artificial Sequence
  Synthetic Oligonucleotide
atggtggctttaagcacttctcggtaacttgggcagttac

SEQ ID NO: 5030 - DNA, 40 bp, Artificial Sequence
  Synthetic Oligonucleotide
atggatgctttaagcacttctcggtaacttgggcagttac

SEQ ID NO: 5031 - DNA, 40 bp, Artificial Sequence
  Synthetic Oligonucleotide
acactattccggtaagtcgtcgtttaaccgtttgttgcaa

SEQ ID NO: 5032 - DNA, 40 bp, Artificial Sequence
  Synthetic Oligonucleotide
acaagattcatctttgcttgactacacgcaattccgatga

SEQ ID NO: 5033 - DNA, 40 bp, Artificial Sequence
  Synthetic Oligonucleotide
tttgggaagcagaactggtcgaggcgctatcctcgactta

SEQ ID NO: 5034 - DNA, 40 bp, Artificial Sequence
  Synthetic Oligonucleotide
tttctcgcctctgtcctcatggttcgaaccggtatgcatg

SEQ ID NO: 5035 - DNA, 40 bp, Artificial Sequence
  Synthetic Oligonucleotide
tgtggggcttttaagcacttctcggtaacttggcagttac

SEQ ID NO: 5036 - DNA, 40 bp, Artificial Sequence
  Synthetic Oligonucleotide
tgtgcgactacgctcttgaacaattctgatccctggactt

SEQ ID NO: 5037 - DNA, 40 bp, Artificial Sequence
  Synthetic Oligonucleotide
tgatgggcttttaagcacttctcggtaacttgggcagtta

SEQ ID NO: 5038 - DNA, 40 bp, Artificial Sequence
  Synthetic Oligonucleotide
tgatgggctttaagcacttctcggtaacttgagcagttac

SEQ ID NO: 5039 - DNA, 40 bp, Artificial Sequence
  Synthetic Oligonucleotide
tgagaaacgctattttctgggaagccgcatctcgagcgaa

SEQ ID NO: 5040 - DNA, 40 bp, Artificial Sequence
  Synthetic Oligonucleotide
tgaagtccgcggtttcactagactaccactgatcacgtcg

SEQ ID NO: 5041 - DNA, 40 bp, Artificial Sequence
  Synthetic Oligonucleotide
tcttcgccagccacatcaactatgatgacgcttgactgga

SEQ ID NO: 5042 - DNA, 40 bp, Artificial Sequence
  Synthetic Oligonucleotide
tcttccgtctggtcgcgatacagaatacgattaacataaa

SEQ ID NO: 5043 - DNA, 40 bp, Artificial Sequence
  Synthetic Oligonucleotide
tcttccattctggtcgcgatacagaatacgattaacataa

SEQ ID NO: 5044 - DNA, 40 bp, Artificial Sequence
  Synthetic Oligonucleotide
tcttccatctggttgcgatacagaatacgattaacataaa

SEQ ID NO: 5045 - DNA, 40 bp, Artificial Sequence
  Synthetic Oligonucleotide
tcttccatctggtcgcgatatagaatacgattaacataaa

SEQ ID NO: 5046 - DNA, 40 bp, Artificial Sequence
  Synthetic Oligonucleotide
tcttccatctggtcgcgatacagaatacgattaacatagg

SEQ ID NO: 5047 - DNA, 40 bp, Artificial Sequence
  Synthetic Oligonucleotide
tcttccatctggtcgcgatacagaatacgatcaacataaa

SEQ ID NO: 5048 - DNA, 40 bp, Artificial Sequence
  Synthetic Oligonucleotide
tcttccatctggtcgcgatacagaatacgataaacataaa

SEQ ID NO: 5049 - DNA, 40 bp, Artificial Sequence
  Synthetic Oligonucleotide
tcttccatctggtcgcgatacagaatacgactaacataaa

SEQ ID NO: 5050 - DNA, 40 bp, Artificial Sequence
  Synthetic Oligonucleotide
tcttccatctggtcacgatacagaatacgattaacataaa

SEQ ID NO: 5051 - DNA, 40 bp, Artificial Sequence
  Synthetic Oligonucleotide
tctgtaggcacctgctctatgtcgtggggagtaacaggtt

SEQ ID NO: 5052 - DNA, 40 bp, Artificial Sequence
  Synthetic Oligonucleotide
tcgttccatctggtcgcgatacagaatacgattaacataa

SEQ ID NO: 5053 - DNA, 40 bp, Artificial Sequence
  Synthetic Oligonucleotide
tcgcacagcttacttcgtctttgatcgaccacgctcataa

SEQ ID NO: 5054 - DNA, 40 bp, Artificial Sequence
  Synthetic Oligonucleotide
tcgcacagctctcttcgtctttgatcgaccacgctcataa

SEQ ID NO: 5055 - DNA, 40 bp, Artificial Sequence
  Synthetic Oligonucleotide
tcgcacagctcgcttcgtctttgatcgaccacgctcataa

SEQ ID NO: 5056 - DNA, 40 bp, Artificial Sequence
  Synthetic Oligonucleotide
tcgcacagctcacttcgtttttgatcgaccacgctcataa

SEQ ID NO: 5057 - DNA, 40 bp, Artificial Sequence
  Synthetic Oligonucleotide
tcgcacagctcacttcgtctttgatcgaccacgctcctaa

SEQ ID NO: 5058 - DNA, 40 bp, Artificial Sequence
  Synthetic Oligonucleotide
tcgcacagctcacttcgtctttgatcgaccaagctcataa

SEQ ID NO: 5059 - DNA, 40 bp, Artificial Sequence
  Synthetic Oligonucleotide
tcgcacagctcacttcgtctttaatcgaccacgctcataa

SEQ ID NO: 5060 - DNA, 40 bp, Artificial Sequence
  Synthetic Oligonucleotide
tcgcacagctcacttcgtcttgattcgaccacgctcataa

SEQ ID NO: 5061 - DNA, 40 bp, Artificial Sequence
  Synthetic Oligonucleotide
tcatgggctttaagcacttctcggtaacttgggctgttac

SEQ ID NO: 5062 - DNA, 40 bp, Artificial Sequence
  Synthetic Oligonucleotide
tcatccatctggtcgcgatacagaatacgattaacataaa

SEQ ID NO: 5063 - DNA, 40 bp, Artificial Sequence
  Synthetic Oligonucleotide
tattcgccagtcacatcaactatgatgatgcttgactgga

SEQ ID NO: 5064 - DNA, 40 bp, Artificial Sequence
  Synthetic Oligonucleotide
tattcgccaggcacatcaactatgatgacgcttgactgga

SEQ ID NO: 5065 - DNA, 40 bp, Artificial Sequence
  Synthetic Oligonucleotide
tatggggcttttaagcgctctcgtgaacttgggcagttac

SEQ ID NO: 5066 - DNA, 40 bp, Artificial Sequence
  Synthetic Oligonucleotide
tatggggcttttaagcacttctcggtaacttggcagctac

SEQ ID NO: 5067 - DNA, 40 bp, Artificial Sequence
  Synthetic Oligonucleotide
tatggggcttttaagcacttctcggtaacttgagcgttac

SEQ ID NO: 5068 - DNA, 40 bp, Artificial Sequence
  Synthetic Oligonucleotide
tatggggcttttaagcacttctcggtaactcggcagttac

SEQ ID NO: 5069 - DNA, 40 bp, Artificial Sequence
  Synthetic Oligonucleotide
tatggggcttttaagcacttcggtaacttgggcagttacc

SEQ ID NO: 5070 - DNA, 40 bp, Artificial Sequence
  Synthetic Oligonucleotide
tatggggcttttaagcacttccagtaacttgggcagttac

SEQ ID NO: 5071 - DNA, 40 bp, Artificial Sequence
  Synthetic Oligonucleotide
tatggggcttttaagcactcctcggtaacttggcagttac

SEQ ID NO: 5072 - DNA, 40 bp, Artificial Sequence
  Synthetic Oligonucleotide
tatggggctttaggcacttctcggtaacttgggcagttac

SEQ ID NO: 5073 - DNA, 40 bp, Artificial Sequence
  Synthetic Oligonucleotide
tatggggctttacagcactctcggtaacttgggcagttac

SEQ ID NO: 5074 - DNA, 40 bp, Artificial Sequence
  Synthetic Oligonucleotide
tatggggctttaagcacttctggtaacttgggcagttacc

SEQ ID NO: 5075 - DNA, 40 bp, Artificial Sequence
  Synthetic Oligonucleotide
tatggggctttaagcacttctcggtagcttgggcagttac

SEQ ID NO: 5076 - DNA, 40 bp, Artificial Sequence
  Synthetic Oligonucleotide
tatggggctttaagcacttctcggtaacttgggcaattac

SEQ ID NO: 5077 - DNA, 40 bp, Artificial Sequence
  Synthetic Oligonucleotide
tatggggctttaagcacttctcggtaacttggcagcttac

SEQ ID NO: 5078 - DNA, 40 bp, Artificial Sequence
  Synthetic Oligonucleotide
tatggggcttatacgacttctcggtaacttgggcagttac

SEQ ID NO: 5079 - DNA, 40 bp, Artificial Sequence
  Synthetic Oligonucleotide
tatgggcttttaagcacttctcggtagcttgggcagttac

SEQ ID NO: 5080 - DNA, 40 bp, Artificial Sequence
  Synthetic Oligonucleotide
tatgggcttttaagcacttctcggtaacttgtgcagttac

SEQ ID NO: 5081 - DNA, 40 bp, Artificial Sequence
  Synthetic Oligonucleotide
tatgggcttttaagcacttctcgggtaacttggcagttac

SEQ ID NO: 5082 - DNA, 40 bp, Artificial Sequence
  Synthetic Oligonucleotide
tatgggctttacgacacttctcggtaacttgggcagttac

SEQ ID NO: 5083 - DNA, 40 bp, Artificial Sequence
  Synthetic Oligonucleotide
tatgggctttaagctacttctcggtacttggtcgagttac

SEQ ID NO: 5084 - DNA, 40 bp, Artificial Sequence
  Synthetic Oligonucleotide
tatgggctttaagctacttctcggtaacctggcgagttac

SEQ ID NO: 5085 - DNA, 40 bp, Artificial Sequence
  Synthetic Oligonucleotide
tatgggctttaagcacttcttcggtaacttgggcagttac

SEQ ID NO: 5086 - DNA, 40 bp, Artificial Sequence
  Synthetic Oligonucleotide
tatgggctttaagcacttctcggtaacttggagcagttac

SEQ ID NO: 5087 - DNA, 40 bp, Artificial Sequence
  Synthetic Oligonucleotide
tatgggctttaagcacttctcggtaacgttgggcagttac

SEQ ID NO: 5088 - DNA, 40 bp, Artificial Sequence
  Synthetic Oligonucleotide
tatgggctttaagcacttctcggtaaccttggcgagttac

SEQ ID NO: 5089 - DNA, 40 bp, Artificial Sequence
  Synthetic Oligonucleotide
tatgggctttaaagcactttctcgggatactggcagttac

SEQ ID NO: 5090 - DNA, 40 bp, Artificial Sequence
  Synthetic Oligonucleotide
tatgaggcttttaagcacttctggtaacttgggcagttac

SEQ ID NO: 5091 - DNA, 40 bp, Artificial Sequence
  Synthetic Oligonucleotide
tatgagcttttaagcacttctcggtaacttgggcagttac

SEQ ID NO: 5092 - DNA, 40 bp, Artificial Sequence
  Synthetic Oligonucleotide
tataagcctgtcttttaatttcggcagagtgctcatgagc

SEQ ID NO: 5093 - DNA, 40 bp, Artificial Sequence
  Synthetic Oligonucleotide
tataagcctgccttttaatctcggcagagtgctcatgagc

SEQ ID NO: 5094 - DNA, 40 bp, Artificial Sequence
  Synthetic Oligonucleotide
tacgggctttaagctacttctcggtaacttgggcagttac

SEQ ID NO: 5095 - DNA, 40 bp, Artificial Sequence
  Synthetic Oligonucleotide
taaatgtacgtacgttaagcctcgatccttaggtttgcag

SEQ ID NO: 5096 - DNA, 40 bp, Artificial Sequence
  Synthetic Oligonucleotide
gtcgtttcttctcctgactacatgagattaataaacgcgc

SEQ ID NO: 5097 - DNA, 40 bp, Artificial Sequence
  Synthetic Oligonucleotide
gtcgtacttatcaccctgacatcgcggggaactaatggtt

SEQ ID NO: 5098 - DNA, 40 bp, Artificial Sequence
  Synthetic Oligonucleotide
gtcgtacttaccaccctgacaccgcggggaactaatggtt

SEQ ID NO: 5099 - DNA, 40 bp, Artificial Sequence
  Synthetic Oligonucleotide
gtatgggctttaagcacttctcggtaacttggtcagttac

SEQ ID NO: 5100 - DNA, 40 bp, Artificial Sequence
  Synthetic Oligonucleotide
gtaggtgcgtaccctctttagccgcctctgaagattggat

SEQ ID NO: 5101 - DNA, 40 bp, Artificial Sequence
  Synthetic Oligonucleotide
gctgtaggcacctgctctatgtcgtggggagtaacaggtt

SEQ ID NO: 5102 - DNA, 40 bp, Artificial Sequence
  Synthetic Oligonucleotide
gctgagctttcacgcacgcggattgtacccgaactgggtt

SEQ ID NO: 5103 - DNA, 40 bp, Artificial Sequence
  Synthetic Oligonucleotide
gctaggctttcacgtcacgcggactgtaccgaactgggtt

SEQ ID NO: 5104 - DNA, 40 bp, Artificial Sequence
  Synthetic Oligonucleotide
gctaggctttcacgcacgcggattgtacccgaactaggtt

SEQ ID NO: 5105 - DNA, 40 bp, Artificial Sequence
  Synthetic Oligonucleotide
gctaggctttcacgcacgcggattgtacccaaactgggtt

SEQ ID NO: 5106 - DNA, 40 bp, Artificial Sequence
  Synthetic Oligonucleotide
gctaggcttcacgcacgcggattgtacccgaactggggtt

SEQ ID NO: 5107 - DNA, 40 bp, Artificial Sequence
  Synthetic Oligonucleotide
gctaggcttcacgcacgcggattgtacccgaacgtgggtt

SEQ ID NO: 5108 - DNA, 40 bp, Artificial Sequence
  Synthetic Oligonucleotide
gctagactttcacgcacgcggattgtacccgaactgggtt

SEQ ID NO: 5109 - DNA, 40 bp, Artificial Sequence
  Synthetic Oligonucleotide
gctacggctttcacgcactgcggattgacccgaactggtt

SEQ ID NO: 5110 - DNA, 40 bp, Artificial Sequence
  Synthetic Oligonucleotide
gcgtttcttctccgtgactacatgagattaataaacgcgc

SEQ ID NO: 5111 - DNA, 40 bp, Artificial Sequence
  Synthetic Oligonucleotide
gcgttcttcgtcctgactacatgagattaactaaacgcgc

SEQ ID NO: 5112 - DNA, 40 bp, Artificial Sequence
  Synthetic Oligonucleotide
gcggtttcttctcctgattacatgagattaataaacgcgc

SEQ ID NO: 5113 - DNA, 40 bp, Artificial Sequence
  Synthetic Oligonucleotide
gcggtttcttctcctgactacatgagattaataaacgcga

SEQ ID NO: 5114 - DNA, 40 bp, Artificial Sequence
  Synthetic Oligonucleotide
gcggtttcttcctctgactacatgagattaataaacgcgc

SEQ ID NO: 5115 - DNA, 40 bp, Artificial Sequence
  Synthetic Oligonucleotide
gcggattcttctctcgactacatgagattaataaacgcgc

SEQ ID NO: 5116 - DNA, 40 bp, Artificial Sequence
  Synthetic Oligonucleotide
gccgcattgggtcggtttggtgggggactacccccttgta

SEQ ID NO: 5117 - DNA, 40 bp, Artificial Sequence
  Synthetic Oligonucleotide
gccgcatgggttggttttggtgggggactacccccttgta

SEQ ID NO: 5118 - DNA, 40 bp, Artificial Sequence
  Synthetic Oligonucleotide
gccgcatgggtcgattttggtgggggactacccccttgta

SEQ ID NO: 5119 - DNA, 40 bp, Artificial Sequence
  Synthetic Oligonucleotide
gccgcatggatcggttttggtgggggactacccccttgta

SEQ ID NO: 5120 - DNA, 40 bp, Artificial Sequence
  Synthetic Oligonucleotide
gactacccgtatcgagctagtcttatgctactggcaatca

SEQ ID NO: 5121 - DNA, 40 bp, Artificial Sequence
  Synthetic Oligonucleotide
ctcttatccggtcaggacgtctttctgcactatcacgatt

SEQ ID NO: 5122 - DNA, 40 bp, Artificial Sequence
  Synthetic Oligonucleotide
ctcttatccggtcagacgtctttctgcgactatcacgatt

SEQ ID NO: 5123 - DNA, 40 bp, Artificial Sequence
  Synthetic Oligonucleotide
ctcttatccggcaggccgtctttcgtgcactatcacgatt

SEQ ID NO: 5124 - DNA, 40 bp, Artificial Sequence
  Synthetic Oligonucleotide
ctcttatccggcaggacgtatttcgtgcactatcacgatt

SEQ ID NO: 5125 - DNA, 40 bp, Artificial Sequence
  Synthetic Oligonucleotide
cgctatccgtttatccgtcctcttgtggtattgcgcatgc

SEQ ID NO: 5126 - DNA, 40 bp, Artificial Sequence
  Synthetic Oligonucleotide
cgctatccgtctgtccgtcctcttgtggtattgcgcatgc

SEQ ID NO: 5127 - DNA, 40 bp, Artificial Sequence
  Synthetic Oligonucleotide
cgctatccgccatcgagcgaacagtgtgccgttttcgatg

SEQ ID NO: 5128 - DNA, 40 bp, Artificial Sequence
  Synthetic Oligonucleotide
cgctatccgccatcgagcgaacagtgtgccgctttcggtg

SEQ ID NO: 5129 - DNA, 40 bp, Artificial Sequence
  Synthetic Oligonucleotide
cgctatccgcatcgagcgggttcttcgataatacgcaaca

SEQ ID NO: 5130 - DNA, 40 bp, Artificial Sequence
  Synthetic Oligonucleotide
cgctatccgaatcgagcttgagtctctggttaaacaacga

SEQ ID NO: 5131 - DNA, 40 bp, Artificial Sequence
  Synthetic Oligonucleotide
cgccatctgcatcgagcgagatcgtgtgaaatggcaagcg

SEQ ID NO: 5132 - DNA, 40 bp, Artificial Sequence
  Synthetic Oligonucleotide
cgactatccgttgtccgtcctcttgtggtattgcgcatgc

SEQ ID NO: 5133 - DNA, 40 bp, Artificial Sequence
  Synthetic Oligonucleotide
ccttccatctggtcgcgatacagaatacgattaacataaa

SEQ ID NO: 5134 - DNA, 40 bp, Artificial Sequence
  Synthetic Oligonucleotide
ccgtgatcagctagtcgtgctttgtccgccatgacattca

SEQ ID NO: 5135 - DNA, 40 bp, Artificial Sequence
  Synthetic Oligonucleotide
ccgcgccccgatagtcatcttcgctggaccacccgcgtta

SEQ ID NO: 5136 - DNA, 40 bp, Artificial Sequence
  Synthetic Oligonucleotide
ccgccttcagtcctggtggtaccacaacgcattgctcttt

SEQ ID NO: 5137 - DNA, 40 bp, Artificial Sequence
  Synthetic Oligonucleotide
ccgcctgggatcactctctacgcgtataaatgccctgtca

SEQ ID NO: 5138 - DNA, 40 bp, Artificial Sequence
  Synthetic Oligonucleotide
ccgcacctcgatagtcatcttcgctggaccacccgtgtta

SEQ ID NO: 5139 - DNA, 40 bp, Artificial Sequence
  Synthetic Oligonucleotide
ccgcacccgatagtcatcttcacttggaccacccgtgtta

SEQ ID NO: 5140 - DNA, 40 bp, Artificial Sequence
  Synthetic Oligonucleotide
ccgcacccctgatagtcatcttcactggaccaccgtgtta

SEQ ID NO: 5141 - DNA, 40 bp, Artificial Sequence
  Synthetic Oligonucleotide
ccgcaccccggtagtcatcttcactggaccacccgtgtta

SEQ ID NO: 5142 - DNA, 40 bp, Artificial Sequence
  Synthetic Oligonucleotide
ccgcaccccgctagtcatcttcgctggaccacccgtgtta

SEQ ID NO: 5143 - DNA, 40 bp, Artificial Sequence
  Synthetic Oligonucleotide
ccgcaccccgattagtcatcttcgctggaccaccgcgtta

SEQ ID NO: 5144 - DNA, 40 bp, Artificial Sequence
  Synthetic Oligonucleotide
ccgcaccccgatagtcgtcttcgctggaccacccgcgtta

SEQ ID NO: 5145 - DNA, 40 bp, Artificial Sequence
  Synthetic Oligonucleotide
ccgcaccccgatagtcatcttcactggaccacccttgtta

SEQ ID NO: 5146 - DNA, 40 bp, Artificial Sequence
  Synthetic Oligonucleotide
ccgcaccccgatagtcatcttcactggacacccgtgttac

SEQ ID NO: 5147 - DNA, 40 bp, Artificial Sequence
  Synthetic Oligonucleotide
ccgcaccccgatagtcatcttcactggacaccccgtgtta

SEQ ID NO: 5148 - DNA, 40 bp, Artificial Sequence
  Synthetic Oligonucleotide
ccgcaccccgatagtcatcttcaccggaccacccgtgtta

SEQ ID NO: 5149 - DNA, 40 bp, Artificial Sequence
  Synthetic Oligonucleotide
ccgcaccccgatagtcatctacactggaccacccgtgtta

SEQ ID NO: 5150 - DNA, 40 bp, Artificial Sequence
  Synthetic Oligonucleotide
ccgcaccccgatagtcatcgttcactggacacccgtgtta

SEQ ID NO: 5151 - DNA, 40 bp, Artificial Sequence
  Synthetic Oligonucleotide
ccgcaccccgatagtcaccttcgctggaccacccgcgtta

SEQ ID NO: 5152 - DNA, 40 bp, Artificial Sequence
  Synthetic Oligonucleotide
ccgcaccccgatagctcatcttcactggaccaccgtgtta

SEQ ID NO: 5153 - DNA, 40 bp, Artificial Sequence
  Synthetic Oligonucleotide
ccgcaccccgacttagtcatcttcactggacaccgtgtta

SEQ ID NO: 5154 - DNA, 40 bp, Artificial Sequence
  Synthetic Oligonucleotide
ccgacaccccgatagtcatcttcactggacacccgtgtta

SEQ ID NO: 5155 - DNA, 40 bp, Artificial Sequence
  Synthetic Oligonucleotide
cccaagtccccaattcgtcgtccgtacgctattacggttt

SEQ ID NO: 5156 - DNA, 40 bp, Artificial Sequence
  Synthetic Oligonucleotide
ccattgtgcgctttatggagccgggtaccttccagcaagg

SEQ ID NO: 5157 - DNA, 40 bp, Artificial Sequence
  Synthetic Oligonucleotide
ccattgtgcgccttatggagccgggtaccttccagcaagg

SEQ ID NO: 5158 - DNA, 40 bp, Artificial Sequence
  Synthetic Oligonucleotide
ccattggtgcgcttatggagccgggtaccttccagcaagg

SEQ ID NO: 5159 - DNA, 40 bp, Artificial Sequence
  Synthetic Oligonucleotide
catggggcttttaagcacttctcggtaacttggcagttac

SEQ ID NO: 5160 - DNA, 40 bp, Artificial Sequence
  Synthetic Oligonucleotide
cagctatccgttgtccgtcctctcgtggtattgcgcatgc

SEQ ID NO: 5161 - DNA, 40 bp, Artificial Sequence
  Synthetic Oligonucleotide
cactttccgtttgtccgtcctcttgtggtattgcgcatgc

SEQ ID NO: 5162 - DNA, 40 bp, Artificial Sequence
  Synthetic Oligonucleotide
cactatccgtttgtccgtcctcttgtggtattgcgcatat

SEQ ID NO: 5163 - DNA, 40 bp, Artificial Sequence
  Synthetic Oligonucleotide
cactatccgtttgtccgtcctcttgtggcattgcgcacgc

SEQ ID NO: 5164 - DNA, 40 bp, Artificial Sequence
  Synthetic Oligonucleotide
cactatccgtttgtccgtcctcttgtgctattgcgcatgc

SEQ ID NO: 5165 - DNA, 40 bp, Artificial Sequence
  Synthetic Oligonucleotide
cactatccgtttgtccgtcctctcgtggtattgcgcttgc

SEQ ID NO: 5166 - DNA, 40 bp, Artificial Sequence
  Synthetic Oligonucleotide
cactatccgtttgtccgtcctctcgtggtattgcccatgc

SEQ ID NO: 5167 - DNA, 40 bp, Artificial Sequence
  Synthetic Oligonucleotide
cactatccgtttgtccgtcctctcgtggaattgcgcatgc

SEQ ID NO: 5168 - DNA, 40 bp, Artificial Sequence
  Synthetic Oligonucleotide
cactatccgtttgtccgtcctcctgtggtattgcgcacgc

SEQ ID NO: 5169 - DNA, 40 bp, Artificial Sequence
  Synthetic Oligonucleotide
cactatccgtttgtccgtcctcacgtggtattgcgcatgc

SEQ ID NO: 5170 - DNA, 40 bp, Artificial Sequence
  Synthetic Oligonucleotide
cactatccgtttgtccgccctcttgtggtattgcgcacgc

SEQ ID NO: 5171 - DNA, 40 bp, Artificial Sequence
  Synthetic Oligonucleotide
cactatccgtttgtccgccctcctgtggtattgcgcatgc

SEQ ID NO: 5172 - DNA, 40 bp, Artificial Sequence
  Synthetic Oligonucleotide
cactatccgtttggccgtcctcttgtggtattgcgcatgc

SEQ ID NO: 5173 - DNA, 40 bp, Artificial Sequence
  Synthetic Oligonucleotide
cactatccgtttggccgtcctctcgtggtattgcgcatgc

SEQ ID NO: 5174 - DNA, 40 bp, Artificial Sequence
  Synthetic Oligonucleotide
cactatccgttgttccgtcctcttgtggtattgcgcatgc

SEQ ID NO: 5175 - DNA, 40 bp, Artificial Sequence
  Synthetic Oligonucleotide
cactatccgttgtccgtccttcttgtgtacttgcgcatgc

SEQ ID NO: 5176 - DNA, 40 bp, Artificial Sequence
  Synthetic Oligonucleotide
cactatccgttgtccgtccttctgtggtattgcgcatgtc

SEQ ID NO: 5177 - DNA, 40 bp, Artificial Sequence
  Synthetic Oligonucleotide
cactatccgttgtccgtcctccttgtggtattgcgcatgc

SEQ ID NO: 5178 - DNA, 40 bp, Artificial Sequence
  Synthetic Oligonucleotide
cactatccgttagtccgtcctcttgtggtattgcgcatgc

SEQ ID NO: 5179 - DNA, 40 bp, Artificial Sequence
  Synthetic Oligonucleotide
cactatccgtctgtccgtcctcttatggtattgcgcatgc

SEQ ID NO: 5180 - DNA, 40 bp, Artificial Sequence
  Synthetic Oligonucleotide
cactatccgtatcgagcgttgtcagcaagcggctaaggcc

SEQ ID NO: 5181 - DNA, 40 bp, Artificial Sequence
  Synthetic Oligonucleotide
cactatccgtatcgagcgttgtcaactagcggctaaggcc

SEQ ID NO: 5182 - DNA, 40 bp, Artificial Sequence
  Synthetic Oligonucleotide
cactatccgtagatccgtcactcactacgcgtatggaacc

SEQ ID NO: 5183 - DNA, 40 bp, Artificial Sequence
  Synthetic Oligonucleotide
cactatccgcttgtccgtcttcttgtggtattgcgcatgc

SEQ ID NO: 5184 - DNA, 40 bp, Artificial Sequence
  Synthetic Oligonucleotide
cactatccgcttgtccgtcctcttgtggtattgtgcatgc

SEQ ID NO: 5185 - DNA, 40 bp, Artificial Sequence
  Synthetic Oligonucleotide
cactatccgcttgtccgtcctcttgtggtaatgcgcatgc

SEQ ID NO: 5186 - DNA, 40 bp, Artificial Sequence
  Synthetic Oligonucleotide
cactatccgcttgtccgtcctcttgtggcattgcgcatgc

SEQ ID NO: 5187 - DNA, 40 bp, Artificial Sequence
  Synthetic Oligonucleotide
cactatccgctcgtccgtcctcttgtggtattgcgcatgc

SEQ ID NO: 5188 - DNA, 40 bp, Artificial Sequence
  Synthetic Oligonucleotide
cactatccgattgtccgtcctcttgtggtattgcgcatgc

SEQ ID NO: 5189 - DNA, 40 bp, Artificial Sequence
  Synthetic Oligonucleotide
cactaaccgtttgtccgtcctcttgtggtattgcgcatgc

SEQ ID NO: 5190 - DNA, 40 bp, Artificial Sequence
  Synthetic Oligonucleotide
cacgatccgtttgtccgtcctcttgtggtattgcgcatgc

SEQ ID NO: 5191 - DNA, 40 bp, Artificial Sequence
  Synthetic Oligonucleotide
attgtaggcacctgctctatgtcgtggggagtaacaggtt

SEQ ID NO: 5192 - DNA, 40 bp, Artificial Sequence
  Synthetic Oligonucleotide
attaattccggcgacttcggtggtgtcctctccattacca

SEQ ID NO: 5193 - DNA, 40 bp, Artificial Sequence
  Synthetic Oligonucleotide
attaattccagcgacttcggtggtgtcctctcaattacca

SEQ ID NO: 5194 - DNA, 40 bp, Artificial Sequence
  Synthetic Oligonucleotide
attaattccagcgacttcagtggtgtcctctccattacca

SEQ ID NO: 5195 - DNA, 40 bp, Artificial Sequence
  Synthetic Oligonucleotide
atggtgccatgagcttctggcactatccagttgacgctca

SEQ ID NO: 5196 - DNA, 40 bp, Artificial Sequence
  Synthetic Oligonucleotide
atggtccatgagcttctggcactagtccagttgacgctca

SEQ ID NO: 5197 - DNA, 40 bp, Artificial Sequence
  Synthetic Oligonucleotide
atgggtccatgagcttctggcactatccagttgacgctca

SEQ ID NO: 5198 - DNA, 40 bp, Artificial Sequence
  Synthetic Oligonucleotide
atgaccgggcccgcctcaagctagctacctccattgtctg

SEQ ID NO: 5199 - DNA, 40 bp, Artificial Sequence
  Synthetic Oligonucleotide
atccggaacgcctcgatcctcgcataatataatacgtctg

SEQ ID NO: 5200 - DNA, 40 bp, Artificial Sequence
  Synthetic Oligonucleotide
agaggcttttaagcacttctgacggtgttcttattgactc

SEQ ID NO: 5201 - DNA, 40 bp, Artificial Sequence
  Synthetic Oligonucleotide
actcttggaacctcatcaattgcgtccggtttcgacccat

SEQ ID NO: 5202 - DNA, 40 bp, Artificial Sequence
  Synthetic Oligonucleotide
actaattccagcgacttcggtggtgtcctctccattacca

SEQ ID NO: 5203 - DNA, 40 bp, Artificial Sequence
  Synthetic Oligonucleotide
acactgttccggtaagtcatcgtttaaccgtttgttgcaa

SEQ ID NO: 5204 - DNA, 40 bp, Artificial Sequence
  Synthetic Oligonucleotide
acactattccggtaagtcatcgtttagccgtttgttgcaa

SEQ ID NO: 5205 - DNA, 40 bp, Artificial Sequence
  Synthetic Oligonucleotide
acactattccggtaagtcaccgtttaaccgtttgttgcaa

SEQ ID NO: 5206 - DNA, 40 bp, Artificial Sequence
  Synthetic Oligonucleotide
acactattccggcaagtcatcgtttaaccgtttgttgcaa

SEQ ID NO: 5207 - DNA, 40 bp, Artificial Sequence
  Synthetic Oligonucleotide
aatggggcttttaagcacttctggtaacttgggcagttac

SEQ ID NO: 5208 - DNA, 40 bp, Artificial Sequence
  Synthetic Oligonucleotide
aatgggctttaagcacttctcggtaacttgggcagttacc

SEQ ID NO: 5209 - DNA, 40 bp, Artificial Sequence
  Synthetic Oligonucleotide
aaaccggggccggcctcaagctagctacctccattgtctg

SEQ ID NO: 5210 - DNA, 40 bp, Artificial Sequence
  Synthetic Oligonucleotide
aaaccggggccgcctcaagctagctacctccattgtctgc

SEQ ID NO: 5211 - DNA, 40 bp, Artificial Sequence
  Synthetic Oligonucleotide
aaaccggggcccgccgcaagctagctacctccattgtctg

SEQ ID NO: 5212 - DNA, 40 bp, Artificial Sequence
  Synthetic Oligonucleotide
ttttcgccagtcacatcaactatgatgacgcttgactgga

SEQ ID NO: 5213 - DNA, 40 bp, Artificial Sequence
  Synthetic Oligonucleotide
ttttccatctggtcgcgatacagaatacgattaacataaa

SEQ ID NO: 5214 - DNA, 40 bp, Artificial Sequence
  Synthetic Oligonucleotide
tttggggctttaagcacttctcggtaacttgggcagttac

SEQ ID NO: 5215 - DNA, 40 bp, Artificial Sequence
  Synthetic Oligonucleotide
tttgaaggactaccttcttgatacataattgtttctaaca

SEQ ID NO: 5216 - DNA, 40 bp, Artificial Sequence
  Synthetic Oligonucleotide
tttcccatctggtcgcgatacagaatacgattaacataaa

SEQ ID NO: 5217 - DNA, 40 bp, Artificial Sequence
  Synthetic Oligonucleotide
ttgtgacccgggttgcaattgcctcgtaaccagaccgcat

SEQ ID NO: 5218 - DNA, 40 bp, Artificial Sequence
  Synthetic Oligonucleotide
ttgtcgtcgaaccgccttgatccgccgtagctagctagca

SEQ ID NO: 5219 - DNA, 40 bp, Artificial Sequence
  Synthetic Oligonucleotide
ttgtaccccgggttgcaattgcctcgtaatcagaccgcat

SEQ ID NO: 5220 - DNA, 40 bp, Artificial Sequence
  Synthetic Oligonucleotide
ttgtaccccgggttgcaattgcctcgtaaccagaccgcaa

SEQ ID NO: 5221 - DNA, 40 bp, Artificial Sequence
  Synthetic Oligonucleotide
ttgggtgctttaagcacttctcggtaacttgggcagttac

SEQ ID NO: 5222 - DNA, 40 bp, Artificial Sequence
  Synthetic Oligonucleotide
ttgggtcttttaagcacttctcggtaacttgggcagttac

SEQ ID NO: 5223 - DNA, 40 bp, Artificial Sequence
  Synthetic Oligonucleotide
ttggctccggagcaatccgccttttgcctgccttaggata

SEQ ID NO: 5224 - DNA, 40 bp, Artificial Sequence
  Synthetic Oligonucleotide
ttggaatctcggatcgcggatcgttccttctcctccaccg

SEQ ID NO: 5225 - DNA, 40 bp, Artificial Sequence
  Synthetic Oligonucleotide
ttgcaccccgggttgcaattgcctcgtaaccggaccgcat

SEQ ID NO: 5226 - DNA, 40 bp, Artificial Sequence
  Synthetic Oligonucleotide
ttgaatgccttgcttaggcgcctcttaagggatccatttt

SEQ ID NO: 5227 - DNA, 40 bp, Artificial Sequence
  Synthetic Oligonucleotide
ttgaatcctgctctaggcgcctcttaagggatccattttt

SEQ ID NO: 5228 - DNA, 40 bp, Artificial Sequence
  Synthetic Oligonucleotide
ttcttatccggcaggacgtctttcgtgcgctatcacgatt

SEQ ID NO: 5229 - DNA, 40 bp, Artificial Sequence
  Synthetic Oligonucleotide
ttcttatccagcaggacgtctttcgtgcactatcacgatt

SEQ ID NO: 5230 - DNA, 40 bp, Artificial Sequence
  Synthetic Oligonucleotide
ttctatccggctaggacgtctttcgtgcactatcacgatt

SEQ ID NO: 5231 - DNA, 40 bp, Artificial Sequence
  Synthetic Oligonucleotide
ttcggcgggtctgccacgtcccccgaagatgttgtttggt

SEQ ID NO: 5232 - DNA, 40 bp, Artificial Sequence
  Synthetic Oligonucleotide
ttcgcgatagtcctcggttcttccatgcagctgcatatta

SEQ ID NO: 5233 - DNA, 40 bp, Artificial Sequence
  Synthetic Oligonucleotide
ttccggtgaagctaactctttggcccgctatggccataaa

SEQ ID NO: 5234 - DNA, 40 bp, Artificial Sequence
  Synthetic Oligonucleotide
ttccgggtacgctcgactacgaccggtacaccctgtactg

SEQ ID NO: 5235 - DNA, 40 bp, Artificial Sequence
  Synthetic Oligonucleotide
ttcaggtcctcgggccgcatgtattagtgttgcaactcta

SEQ ID NO: 5236 - DNA, 40 bp, Artificial Sequence
  Synthetic Oligonucleotide
ttatgacgttcggttcgcctcgggtccatccaattgtctg

SEQ ID NO: 5237 - DNA, 40 bp, Artificial Sequence
  Synthetic Oligonucleotide
ttatccctgatgatccgaattctcatcggctgcactatcc

SEQ ID NO: 5238 - DNA, 40 bp, Artificial Sequence
  Synthetic Oligonucleotide
ttagcgactacgctatctaacgcatccgtagttctgtcgc

SEQ ID NO: 5239 - DNA, 40 bp, Artificial Sequence
  Synthetic Oligonucleotide
tgtgtaacgttacagtcgtctctaaactgcagtgcaacct

SEQ ID NO: 5240 - DNA, 40 bp, Artificial Sequence
  Synthetic Oligonucleotide
tgtggggcttctagcacttctcggtaacttgggcagttac

SEQ ID NO: 5241 - DNA, 40 bp, Artificial Sequence
  Synthetic Oligonucleotide
tgtgggctttaagctacttctcggtaacttgggcagttgc

SEQ ID NO: 5242 - DNA, 40 bp, Artificial Sequence
  Synthetic Oligonucleotide
tgtgggctttaagcacttctcggtaacttgggcagcttac

SEQ ID NO: 5243 - DNA, 40 bp, Artificial Sequence
  Synthetic Oligonucleotide
tgtggcgttttaagcacttctcggtaacttgggcagttac

SEQ ID NO: 5244 - DNA, 40 bp, Artificial Sequence
  Synthetic Oligonucleotide
tgtgcggttttaagcacttctcggtaacttgggcagttac

SEQ ID NO: 5245 - DNA, 40 bp, Artificial Sequence
  Synthetic Oligonucleotide
tgtgcgactacgtctcttgaacaattctgatcctggattt

SEQ ID NO: 5246 - DNA, 40 bp, Artificial Sequence
  Synthetic Oligonucleotide
tgtgcgactacgctcttgaacaattctggtccctggattt

SEQ ID NO: 5247 - DNA, 40 bp, Artificial Sequence
  Synthetic Oligonucleotide
tgtgcgactacgcccttgaacaattctgatccctggattt

SEQ ID NO: 5248 - DNA, 40 bp, Artificial Sequence
  Synthetic Oligonucleotide
tgtgcgactacactcttgaacaattctgatccctggattt

SEQ ID NO: 5249 - DNA, 40 bp, Artificial Sequence
  Synthetic Oligonucleotide
tgtgccactacgctcttgaacaactctgatccctggattt

SEQ ID NO: 5250 - DNA, 40 bp, Artificial Sequence
  Synthetic Oligonucleotide
tgtcggagccgttatgcactatcataaggaagactccatt

SEQ ID NO: 5251 - DNA, 40 bp, Artificial Sequence
  Synthetic Oligonucleotide
tgtccctcctatctgctttttcagactactgaatgcacgg

SEQ ID NO: 5252 - DNA, 40 bp, Artificial Sequence
  Synthetic Oligonucleotide
tgtccctcctatctgctttttcagactactgaacgcacgg

SEQ ID NO: 5253 - DNA, 40 bp, Artificial Sequence
  Synthetic Oligonucleotide
tgtattctcgggcctttattcttcccaaaacgccgcaccg

SEQ ID NO: 5254 - DNA, 40 bp, Artificial Sequence
  Synthetic Oligonucleotide
tgtagtatcgttcttatccgcctcggtcttcccaggttaa

SEQ ID NO: 5255 - DNA, 40 bp, Artificial Sequence
  Synthetic Oligonucleotide
tgtaggtcgcctggtccgcctcgatcttctataccgtctg

SEQ ID NO: 5256 - DNA, 40 bp, Artificial Sequence
  Synthetic Oligonucleotide
tgtaggtcgcctggtccgcctcgatcctctataccttctg

SEQ ID NO: 5257 - DNA, 40 bp, Artificial Sequence
  Synthetic Oligonucleotide
tgtaggtcgcctggtccgcctcgatcctctataccgtttg

SEQ ID NO: 5258 - DNA, 40 bp, Artificial Sequence
  Synthetic Oligonucleotide
tgtaggtcgcctggtccgcctcgatcctctaaaccgtctg

SEQ ID NO: 5259 - DNA, 40 bp, Artificial Sequence
  Synthetic Oligonucleotide
tgtaggtcgcctggtccgcctcgaccctctataccgtctg

SEQ ID NO: 5260 - DNA, 40 bp, Artificial Sequence
  Synthetic Oligonucleotide
tgtaggtcgcctggtccgccccgatcctctataccgtctg

SEQ ID NO: 5261 - DNA, 40 bp, Artificial Sequence
  Synthetic Oligonucleotide
tgtaggtcacctggtccgcctcgatcctctataccgtctg

SEQ ID NO: 5262 - DNA, 40 bp, Artificial Sequence
  Synthetic Oligonucleotide
tgtagatcgttcttatccacctcggtcttccccgggttaa

SEQ ID NO: 5263 - DNA, 40 bp, Artificial Sequence
  Synthetic Oligonucleotide
tgtagatcgcctggtccgcctcgatcctctataccgtctg

SEQ ID NO: 5264 - DNA, 40 bp, Artificial Sequence
  Synthetic Oligonucleotide
tgtaagtcgcctggtccgcctcgatcctctataccgtctg

SEQ ID NO: 5265 - DNA, 40 bp, Artificial Sequence
  Synthetic Oligonucleotide
tggggtatgcgtgtttcctccaagcaccgcctcgctaacg

SEQ ID NO: 5266 - DNA, 40 bp, Artificial Sequence
  Synthetic Oligonucleotide
tggcgaaacgctatttctgggaagccgcatctcgagcgaa

SEQ ID NO: 5267 - DNA, 40 bp, Artificial Sequence
  Synthetic Oligonucleotide
tggactacccccgggtaagtcgtccttgagacatgtgctg

SEQ ID NO: 5268 - DNA, 40 bp, Artificial Sequence
  Synthetic Oligonucleotide
tgctaaacgctattttctgggaagccgcatctcgagcgaa

SEQ ID NO: 5269 - DNA, 40 bp, Artificial Sequence
  Synthetic Oligonucleotide
tgcgtaaacgctattttctgggagccgcatctcgagcgaa

SEQ ID NO: 5270 - DNA, 40 bp, Artificial Sequence
  Synthetic Oligonucleotide
tgcgtaaacgctatttctgggagccgcatctcgagctgaa

SEQ ID NO: 5271 - DNA, 40 bp, Artificial Sequence
  Synthetic Oligonucleotide
tgcggaacgctattttctgggaagccgcgtctcgagcgaa

SEQ ID NO: 5272 - DNA, 40 bp, Artificial Sequence
  Synthetic Oligonucleotide
tgcgcaacgccttggttcactcctacagtgtgtctataga

SEQ ID NO: 5273 - DNA, 40 bp, Artificial Sequence
  Synthetic Oligonucleotide
tgcgcaacgccttgattctctcctacagtgtgtctataga

SEQ ID NO: 5274 - DNA, 40 bp, Artificial Sequence
  Synthetic Oligonucleotide
tgcgaacgctatttctcgggaagccgcatcgtcgagcgaa

SEQ ID NO: 5275 - DNA, 40 bp, Artificial Sequence
  Synthetic Oligonucleotide
tgcgaacgctatttctcggaagccgctagtctcgagcgaa

SEQ ID NO: 5276 - DNA, 40 bp, Artificial Sequence
  Synthetic Oligonucleotide
tgcgaaccgctattttctgggaagccgcgtctcgagcgaa

SEQ ID NO: 5277 - DNA, 40 bp, Artificial Sequence
  Synthetic Oligonucleotide
tgcgaaacgtctatttctgggaagccgcgtctcgagcgaa

SEQ ID NO: 5278 - DNA, 40 bp, Artificial Sequence
  Synthetic Oligonucleotide
tgcgaaacgctattttttgggaagccacgtctcgagcgaa

SEQ ID NO: 5279 - DNA, 40 bp, Artificial Sequence
  Synthetic Oligonucleotide
tgcgaaacgctattttctgggtagccgcatctcgagcgaa

SEQ ID NO: 5280 - DNA, 40 bp, Artificial Sequence
  Synthetic Oligonucleotide
tgcgaaacgctattttctgggaggccgcgtctcgagcgaa

SEQ ID NO: 5281 - DNA, 40 bp, Artificial Sequence
  Synthetic Oligonucleotide
tgcgaaacgctattttctgggaagcctcatctcgagcgaa

SEQ ID NO: 5282 - DNA, 40 bp, Artificial Sequence
  Synthetic Oligonucleotide
tgcgaaacgctattttctgggaagccgcgtcttgagcgaa

SEQ ID NO: 5283 - DNA, 40 bp, Artificial Sequence
  Synthetic Oligonucleotide
tgcgaaacgctattttctgggaagccgcgtctcgggcgaa

SEQ ID NO: 5284 - DNA, 40 bp, Artificial Sequence
  Synthetic Oligonucleotide
tgcgaaacgctattttctgggaagccgcatcttgagcgaa

SEQ ID NO: 5285 - DNA, 40 bp, Artificial Sequence
  Synthetic Oligonucleotide
tgcgaaacgctattttctgggaagccgcatctcgagcgca

SEQ ID NO: 5286 - DNA, 40 bp, Artificial Sequence
  Synthetic Oligonucleotide
tgcgaaacgctattttctgggaagccgcatctcgagcaaa

SEQ ID NO: 5287 - DNA, 40 bp, Artificial Sequence
  Synthetic Oligonucleotide
tgcgaaacgctattttctgggaagccgcatctcgagagga

SEQ ID NO: 5288 - DNA, 40 bp, Artificial Sequence
  Synthetic Oligonucleotide
tgcgaaacgctattttctgggaagccgcatctcgagagaa

SEQ ID NO: 5289 - DNA, 40 bp, Artificial Sequence
  Synthetic Oligonucleotide
tgcgaaacgctattttctgggaagccgcatcccaagcgaa

SEQ ID NO: 5290 - DNA, 40 bp, Artificial Sequence
  Synthetic Oligonucleotide
tgcgaaacgctattttctgggaagccgcagctcgagcgaa

SEQ ID NO: 5291 - DNA, 40 bp, Artificial Sequence
  Synthetic Oligonucleotide
tgcgaaacgctattttctggaatgccgcatctcgagcgaa

SEQ ID NO: 5292 - DNA, 40 bp, Artificial Sequence
  Synthetic Oligonucleotide
tgcgaaacgctattttctgagaagccgcgtctcgagcgaa

SEQ ID NO: 5293 - DNA, 40 bp, Artificial Sequence
  Synthetic Oligonucleotide
tgcgaaacgctattttctaggaagccgcatctcgagcgaa

SEQ ID NO: 5294 - DNA, 40 bp, Artificial Sequence
  Synthetic Oligonucleotide
tgcgaaacgctattttcgatggagccgcatctcgagcgaa

SEQ ID NO: 5295 - DNA, 40 bp, Artificial Sequence
  Synthetic Oligonucleotide
tgcgaaacgctattttcctgggaaccgctgtctcgagcga

SEQ ID NO: 5296 - DNA, 40 bp, Artificial Sequence
  Synthetic Oligonucleotide
tgcgaaacgctatttctgggaagccggcatctcgagcgaa

SEQ ID NO: 5297 - DNA, 40 bp, Artificial Sequence
  Synthetic Oligonucleotide
tgcgaaacgctatttctgggaagccgcatctcgagccgaa

SEQ ID NO: 5298 - DNA, 40 bp, Artificial Sequence
  Synthetic Oligonucleotide
tgcgaaacgctatttctcgggaagccgcgtctcgagcgaa

SEQ ID NO: 5299 - DNA, 40 bp, Artificial Sequence
  Synthetic Oligonucleotide
tgcgaaacgctatgttctgggaagccgcatctcgagcgaa

SEQ ID NO: 5300 - DNA, 40 bp, Artificial Sequence
  Synthetic Oligonucleotide
tgcgaaacgctagtttctgggaagccgcatctcgagcgaa

SEQ ID NO: 5301 - DNA, 40 bp, Artificial Sequence
  Synthetic Oligonucleotide
tgcgaaacgcgattttctgggaagccgcatctcgagcgaa

SEQ ID NO: 5302 - DNA, 40 bp, Artificial Sequence
  Synthetic Oligonucleotide
tgcgaaacgccttcgatcctcgcataatatgatacgtctg

SEQ ID NO: 5303 - DNA, 40 bp, Artificial Sequence
  Synthetic Oligonucleotide
tgcgaaacgccattttctgggaagccgcatctcgagcgga

SEQ ID NO: 5304 - DNA, 40 bp, Artificial Sequence
  Synthetic Oligonucleotide
tgcgaaacgatattttctgggaagccgcatctcgagcgaa

SEQ ID NO: 5305 - DNA, 40 bp, Artificial Sequence
  Synthetic Oligonucleotide
tgcgaaacactattttctgggaaaccgcatctcgagcgaa

SEQ ID NO: 5306 - DNA, 40 bp, Artificial Sequence
  Synthetic Oligonucleotide
tgcgaaaagctattttctgggaagccgcatctcgagcgaa

SEQ ID NO: 5307 - DNA, 40 bp, Artificial Sequence
  Synthetic Oligonucleotide
tgcagaacgctattttctgggaagccgcatctcgagcgaa

SEQ ID NO: 5308 - DNA, 40 bp, Artificial Sequence
  Synthetic Oligonucleotide
tgattggctttagcacttctcgtaacttggtacaagttac

SEQ ID NO: 5309 - DNA, 40 bp, Artificial Sequence
  Synthetic Oligonucleotide
tgattggctttacgcacttctcgtaactggtacaagtgac

SEQ ID NO: 5310 - DNA, 40 bp, Artificial Sequence
  Synthetic Oligonucleotide
tgattcgccagtcacatcaactatgatacgcttgactgga

SEQ ID NO: 5311 - DNA, 40 bp, Artificial Sequence
  Synthetic Oligonucleotide
tgatggggctttaagcacttctcgtaacttgggcagttac

SEQ ID NO: 5312 - DNA, 40 bp, Artificial Sequence
  Synthetic Oligonucleotide
tgatgggcttttaagcacttctggtgacttgggcagttac

SEQ ID NO: 5313 - DNA, 40 bp, Artificial Sequence
  Synthetic Oligonucleotide
tgatgggcttttaagcacttctggtaacttgggcagttac

SEQ ID NO: 5314 - DNA, 40 bp, Artificial Sequence
  Synthetic Oligonucleotide
tgatgggcttttaagcacttctcggtacttgggcagttac

SEQ ID NO: 5315 - DNA, 40 bp, Artificial Sequence
  Synthetic Oligonucleotide
tgatgggcttttaagcacttctcggtaacttgggcattac

SEQ ID NO: 5316 - DNA, 40 bp, Artificial Sequence
  Synthetic Oligonucleotide
tgatgggcttttaagcactctcggtaacttgggcagttac

SEQ ID NO: 5317 - DNA, 40 bp, Artificial Sequence
  Synthetic Oligonucleotide
tgatgggctttatacacttctcggtaacttgggcagttac

SEQ ID NO: 5318 - DNA, 40 bp, Artificial Sequence
  Synthetic Oligonucleotide
tgatgggctttagcacttctcgtaacttgggacagcttac

SEQ ID NO: 5319 - DNA, 40 bp, Artificial Sequence
  Synthetic Oligonucleotide
tgatgggctttagacacttctcggtaacttgggcagttac

SEQ ID NO: 5320 - DNA, 40 bp, Artificial Sequence
  Synthetic Oligonucleotide
tgatgggctttacacacttctcggtaacttgggcagttac

SEQ ID NO: 5321 - DNA, 40 bp, Artificial Sequence
  Synthetic Oligonucleotide
tgatgggctttaagcgacttctcggtaacttggcagttac

SEQ ID NO: 5322 - DNA, 40 bp, Artificial Sequence
  Synthetic Oligonucleotide
tgatgggctttaagcacttctcgttaacttgggcagttac

SEQ ID NO: 5323 - DNA, 40 bp, Artificial Sequence
  Synthetic Oligonucleotide
tgatgggctttaagcacttctcggtaacttaggcagttac

SEQ ID NO: 5324 - DNA, 40 bp, Artificial Sequence
  Synthetic Oligonucleotide
tgatgggctttaagcactcctcggtaacttgggcagttac

SEQ ID NO: 5325 - DNA, 40 bp, Artificial Sequence
  Synthetic Oligonucleotide
tgatgggctttaagaacttctcggtaacttgggcagttac

SEQ ID NO: 5326 - DNA, 40 bp, Artificial Sequence
  Synthetic Oligonucleotide
tgatgggcgtttaagcacttctcggtaacttggcagttac

SEQ ID NO: 5327 - DNA, 40 bp, Artificial Sequence
  Synthetic Oligonucleotide
tgatggcttttaagcacttctcggtaaccttggcagttac

SEQ ID NO: 5328 - DNA, 40 bp, Artificial Sequence
  Synthetic Oligonucleotide
tgatggctttaagctacttctcggtaacttgggcagttac

SEQ ID NO: 5329 - DNA, 40 bp, Artificial Sequence
  Synthetic Oligonucleotide
tgatggctttaagcacttctcggtaaccgttggcagttac

SEQ ID NO: 5330 - DNA, 40 bp, Artificial Sequence
  Synthetic Oligonucleotide
tgatggctttaacgctacttctcggtacttgggcagttac

SEQ ID NO: 5331 - DNA, 40 bp, Artificial Sequence
  Synthetic Oligonucleotide
tgatggcgtttaaagcactttctgggataccgtggcagta

SEQ ID NO: 5332 - DNA, 40 bp, Artificial Sequence
  Synthetic Oligonucleotide
tgagcgtaaacgctatttccggagccgcgtctcgagcgaa

SEQ ID NO: 5333 - DNA, 40 bp, Artificial Sequence
  Synthetic Oligonucleotide
tgactttatccgacggatctcacgttccccttggttcggg

SEQ ID NO: 5334 - DNA, 40 bp, Artificial Sequence
  Synthetic Oligonucleotide
tgaccgctcatctatcggacacgacgtcgtatcagtgctg

SEQ ID NO: 5335 - DNA, 40 bp, Artificial Sequence
  Synthetic Oligonucleotide
tgaagtccgcgtttacactagactactactgatcacgtcg

SEQ ID NO: 5336 - DNA, 40 bp, Artificial Sequence
  Synthetic Oligonucleotide
tgaagtccgcggtttcactggactactactgatcacgtcg

SEQ ID NO: 5337 - DNA, 40 bp, Artificial Sequence
  Synthetic Oligonucleotide
tgaagtccgcggtttcactagattactactgatcacgtcg

SEQ ID NO: 5338 - DNA, 40 bp, Artificial Sequence
  Synthetic Oligonucleotide
tgaagtccgcggtttcactagactactactgatcatgtcg

SEQ ID NO: 5339 - DNA, 40 bp, Artificial Sequence
  Synthetic Oligonucleotide
tgaagtccgcggtttcactagactactactgatcacgacg

SEQ ID NO: 5340 - DNA, 40 bp, Artificial Sequence
  Synthetic Oligonucleotide
tgaagtccgcggtttcactagactactactgatcacatcg

SEQ ID NO: 5341 - DNA, 40 bp, Artificial Sequence
  Synthetic Oligonucleotide
tgaagtccgcggtttcactagactactactgataacgtcg

SEQ ID NO: 5342 - DNA, 40 bp, Artificial Sequence
  Synthetic Oligonucleotide
tgaagtccgcggtttcactagactactaccgatcacgtcg

SEQ ID NO: 5343 - DNA, 40 bp, Artificial Sequence
  Synthetic Oligonucleotide
tgaagtccgcggtttcactaaactactactgatcacgtcg

SEQ ID NO: 5344 - DNA, 40 bp, Artificial Sequence
  Synthetic Oligonucleotide
tgaagtccgcggtttaactagactactactgatcacgtcg

SEQ ID NO: 5345 - DNA, 40 bp, Artificial Sequence
  Synthetic Oligonucleotide
tgaagtccgcggttctactagactactactgatcacgtcg

SEQ ID NO: 5346 - DNA, 40 bp, Artificial Sequence
  Synthetic Oligonucleotide
tgaagtccgcggttcactaggactactactgatcacgtcg

SEQ ID NO: 5347 - DNA, 40 bp, Artificial Sequence
  Synthetic Oligonucleotide
tcttgctagcggatccgatctcgatcccccatgcgctgta

SEQ ID NO: 5348 - DNA, 40 bp, Artificial Sequence
  Synthetic Oligonucleotide
tcttgcgagtctgttttcgcgcactatcgcgatctaagca

SEQ ID NO: 5349 - DNA, 40 bp, Artificial Sequence
  Synthetic Oligonucleotide
tcttctatctggtcgcgatacagaatacgattaacataaa

SEQ ID NO: 5350 - DNA, 40 bp, Artificial Sequence
  Synthetic Oligonucleotide
tcttctatctggtcgcgatacagaatacgattaacaaaaa

SEQ ID NO: 5351 - DNA, 40 bp, Artificial Sequence
  Synthetic Oligonucleotide
tcttccattctgtcgcgatacagaatacgattaacataaa

SEQ ID NO: 5352 - DNA, 40 bp, Artificial Sequence
  Synthetic Oligonucleotide
tcttccatcttgtcgcgatacagaatacgattaacataaa

SEQ ID NO: 5353 - DNA, 40 bp, Artificial Sequence
  Synthetic Oligonucleotide
tcttccatctgttcgcgatacagaatacgattaacataaa

SEQ ID NO: 5354 - DNA, 40 bp, Artificial Sequence
  Synthetic Oligonucleotide
tcttccatctgtcgccgatacagaatacgattaacataaa

SEQ ID NO: 5355 - DNA, 40 bp, Artificial Sequence
  Synthetic Oligonucleotide
tcttccatctggttgcgatacagaatacaattaacataaa

SEQ ID NO: 5356 - DNA, 40 bp, Artificial Sequence
  Synthetic Oligonucleotide
tcttccatctggttcgcgatacagaatacgattaacataa

SEQ ID NO: 5357 - DNA, 40 bp, Artificial Sequence
  Synthetic Oligonucleotide
tcttccatctggtcgctatacagaatacgattaacataaa

SEQ ID NO: 5358 - DNA, 40 bp, Artificial Sequence
  Synthetic Oligonucleotide
tcttccatctggtcgcgatgcagaatacgattaacataaa

SEQ ID NO: 5359 - DNA, 40 bp, Artificial Sequence
  Synthetic Oligonucleotide
tcttccatctggtcgcgatacggaatacgatcaacataaa

SEQ ID NO: 5360 - DNA, 40 bp, Artificial Sequence
  Synthetic Oligonucleotide
tcttccatctggtcgcgatacaggatacgattaacataaa

SEQ ID NO: 5361 - DNA, 40 bp, Artificial Sequence
  Synthetic Oligonucleotide
tcttccatctggtcgcgatacagaatgcgattaacataaa

SEQ ID NO: 5362 - DNA, 40 bp, Artificial Sequence
  Synthetic Oligonucleotide
tcttccatctggtcgcgatacagaatatgattaacataaa

SEQ ID NO: 5363 - DNA, 40 bp, Artificial Sequence
  Synthetic Oligonucleotide
tcttccatctggtcgcgatacagaatactattaacataaa

SEQ ID NO: 5364 - DNA, 40 bp, Artificial Sequence
  Synthetic Oligonucleotide
tcttccatctggtcgcgatacagaatacgattagcatgaa

SEQ ID NO: 5365 - DNA, 40 bp, Artificial Sequence
  Synthetic Oligonucleotide
tcttccatctggtcgcgatacagaatacgattagcacaaa

SEQ ID NO: 5366 - DNA, 40 bp, Artificial Sequence
  Synthetic Oligonucleotide
tcttccatctggtcgcgatacagaatacgattaagataaa

SEQ ID NO: 5367 - DNA, 40 bp, Artificial Sequence
  Synthetic Oligonucleotide
tcttccatctggtcgcgatacagaatacgattaacataca

SEQ ID NO: 5368 - DNA, 40 bp, Artificial Sequence
  Synthetic Oligonucleotide
tcttccatctggtcgcgatacagaatacgataaacgtaaa

SEQ ID NO: 5369 - DNA, 40 bp, Artificial Sequence
  Synthetic Oligonucleotide
tcttccatctggtcgcgatacagaatacaattaacatgaa

SEQ ID NO: 5370 - DNA, 40 bp, Artificial Sequence
  Synthetic Oligonucleotide
tcttccatctggtcgcgatacagaataagattaacataaa

SEQ ID NO: 5371 - DNA, 40 bp, Artificial Sequence
  Synthetic Oligonucleotide
tcttccatctggtcgcgatacagaacacgattaacataaa

SEQ ID NO: 5372 - DNA, 40 bp, Artificial Sequence
  Synthetic Oligonucleotide
tcttccatctggtcgcgatacaaaatacgattatcataaa

SEQ ID NO: 5373 - DNA, 40 bp, Artificial Sequence
  Synthetic Oligonucleotide
tcttccatctggtcgcgatacaaaatacgattaacataaa

SEQ ID NO: 5374 - DNA, 40 bp, Artificial Sequence
  Synthetic Oligonucleotide
tcttccatctggtcgccgatacagaatacgattaacataa

SEQ ID NO: 5375 - DNA, 40 bp, Artificial Sequence
  Synthetic Oligonucleotide
tcttccatctggtcgagatacagaatacgattaacataaa

SEQ ID NO: 5376 - DNA, 40 bp, Artificial Sequence
  Synthetic Oligonucleotide
tcttccatctggccgcgatacagaatacaattaacgtaag

SEQ ID NO: 5377 - DNA, 40 bp, Artificial Sequence
  Synthetic Oligonucleotide
tcttccatctgatcgcgatacagaatacgattaacataaa

SEQ ID NO: 5378 - DNA, 40 bp, Artificial Sequence
  Synthetic Oligonucleotide
tcttccatctagtcgcgatacagaatacgattaacataaa

SEQ ID NO: 5379 - DNA, 40 bp, Artificial Sequence
  Synthetic Oligonucleotide
tcttccatcgggtcgcgatacagaatacgattaacataaa

SEQ ID NO: 5380 - DNA, 40 bp, Artificial Sequence
  Synthetic Oligonucleotide
tcttccaactggtcgcgatacagaatacgattaacataaa

SEQ ID NO: 5381 - DNA, 40 bp, Artificial Sequence
  Synthetic Oligonucleotide
tctcccatctggtcgcgatacagaatacgattaacataaa

SEQ ID NO: 5382 - DNA, 40 bp, Artificial Sequence
  Synthetic Oligonucleotide
tctcccatctggtcgcgatacagaatacgattaacaaata

SEQ ID NO: 5383 - DNA, 40 bp, Artificial Sequence
  Synthetic Oligonucleotide
tctcccaagtttagtcgcctttcgaggactacctcgtttc

SEQ ID NO: 5384 - DNA, 40 bp, Artificial Sequence
  Synthetic Oligonucleotide
tctccatctgtcgcgatatcagaataccgattaacataaa

SEQ ID NO: 5385 - DNA, 40 bp, Artificial Sequence
  Synthetic Oligonucleotide
tctccatctgtcgcgatatcagaataccgattaacacaaa

SEQ ID NO: 5386 - DNA, 40 bp, Artificial Sequence
  Synthetic Oligonucleotide
tctccatctggttcgcgatacagaatacaattaatacaat

SEQ ID NO: 5387 - DNA, 40 bp, Artificial Sequence
  Synthetic Oligonucleotide
tctccatctggtcgcgatacagtaatacgattaacataaa

SEQ ID NO: 5388 - DNA, 40 bp, Artificial Sequence
  Synthetic Oligonucleotide
tctccatctcggtcgcgatacagaatacgattaacataaa

SEQ ID NO: 5389 - DNA, 40 bp, Artificial Sequence
  Synthetic Oligonucleotide
tctaactgcggtgcgcgtctttcagatactactctgatgt

SEQ ID NO: 5390 - DNA, 40 bp, Artificial Sequence
  Synthetic Oligonucleotide
tcgtacagctcacttcatctttgatcgaccacgctcataa

SEQ ID NO: 5391 - DNA, 40 bp, Artificial Sequence
  Synthetic Oligonucleotide
tcggtcgtatcgtggactaccacagaagaatcgactgtcg

SEQ ID NO: 5392 - DNA, 40 bp, Artificial Sequence
  Synthetic Oligonucleotide
tcgggatacttgaggtcgttgcgcgcttacgaaccctaat

SEQ ID NO: 5393 - DNA, 40 bp, Artificial Sequence
  Synthetic Oligonucleotide
tcggatgacttgagtctgttgtgcgcttacgaacccaatt

SEQ ID NO: 5394 - DNA, 40 bp, Artificial Sequence
  Synthetic Oligonucleotide
tcggatacttgagtcgcttgtgcgcttacgaaaccctaat

SEQ ID NO: 5395 - DNA, 40 bp, Artificial Sequence
  Synthetic Oligonucleotide
tcggaatacttgaggtcgttgtgcgcttacgaaccctaat

SEQ ID NO: 5396 - DNA, 40 bp, Artificial Sequence
  Synthetic Oligonucleotide
tcgcgaaacgctattttctgggaaccgcatctcgagcgaa

SEQ ID NO: 5397 - DNA, 40 bp, Artificial Sequence
  Synthetic Oligonucleotide
tcgcatagctcacttcgtctttgatcgaccacgctcacaa

SEQ ID NO: 5398 - DNA, 40 bp, Artificial Sequence
  Synthetic Oligonucleotide
tcgcactgctcacttcgtctttgatcgaccacgctcataa

SEQ ID NO: 5399 - DNA, 40 bp, Artificial Sequence
  Synthetic Oligonucleotide
tcgcactgctcacttcgtctctgatcgaccacgctcataa

SEQ ID NO: 5400 - DNA, 40 bp, Artificial Sequence
  Synthetic Oligonucleotide
tcgcactagctcacttcgtcttgatcgtacacgctcataa

SEQ ID NO: 5401 - DNA, 40 bp, Artificial Sequence
  Synthetic Oligonucleotide
tcgcactagctcacttcgtcttgatcgaccacgctcataa

SEQ ID NO: 5402 - DNA, 40 bp, Artificial Sequence
  Synthetic Oligonucleotide
tcgcacggctaacttcgtctttgatcgaccacgctcataa

SEQ ID NO: 5403 - DNA, 40 bp, Artificial Sequence
  Synthetic Oligonucleotide
tcgcacagcttcacttcgtctttgatcgacacgctcataa

SEQ ID NO: 5404 - DNA, 40 bp, Artificial Sequence
  Synthetic Oligonucleotide
tcgcacagctcagttcgtctttgatcgaccacgctcataa

SEQ ID NO: 5405 - DNA, 40 bp, Artificial Sequence
  Synthetic Oligonucleotide
tcgcacagctcacttcgtctttgatcgattacgctcataa

SEQ ID NO: 5406 - DNA, 40 bp, Artificial Sequence
  Synthetic Oligonucleotide
tcgcacagctcacttcgtctttgatcgaccactctcataa

SEQ ID NO: 5407 - DNA, 40 bp, Artificial Sequence
  Synthetic Oligonucleotide
tcgcacagctcacttcgtctttgatccaccacgctcataa

SEQ ID NO: 5408 - DNA, 40 bp, Artificial Sequence
  Synthetic Oligonucleotide
tcgcacagctcacttcgtctttgatcaaccacgctcatga

SEQ ID NO: 5409 - DNA, 40 bp, Artificial Sequence
  Synthetic Oligonucleotide
tcgcacagctcacttcgtctatgatcgaccacgctcataa

SEQ ID NO: 5410 - DNA, 40 bp, Artificial Sequence
  Synthetic Oligonucleotide
tcgcacagctcacttcgtcattgatcgaccacgctcataa

SEQ ID NO: 5411 - DNA, 40 bp, Artificial Sequence
  Synthetic Oligonucleotide
tcgcacagctcacttcgtatttgatcgaccacgctcataa

SEQ ID NO: 5412 - DNA, 40 bp, Artificial Sequence
  Synthetic Oligonucleotide
tcgcacagctcacttcggctttgatcgaccacgctcataa

SEQ ID NO: 5413 - DNA, 40 bp, Artificial Sequence
  Synthetic Oligonucleotide
tcgcacagctcacttcatccttgatcgaccacgctcataa

SEQ ID NO: 5414 - DNA, 40 bp, Artificial Sequence
  Synthetic Oligonucleotide
tcgcacagctcactcgtcttttgatcgaccacgctcataa

SEQ ID NO: 5415 - DNA, 40 bp, Artificial Sequence
  Synthetic Oligonucleotide
tcgcacagctcactacgtctttgatcgaccacgctcataa

SEQ ID NO: 5416 - DNA, 40 bp, Artificial Sequence
  Synthetic Oligonucleotide
tcgcacagctcacgtcgtctttgatcgaccacgctcataa

SEQ ID NO: 5417 - DNA, 40 bp, Artificial Sequence
  Synthetic Oligonucleotide
tcgcacagcacacttcgtctttgatcgaccacgctcataa

SEQ ID NO: 5418 - DNA, 40 bp, Artificial Sequence
  Synthetic Oligonucleotide
tcgcaaagctcacttcgtctttgatcgaccacgctcataa

SEQ ID NO: 5419 - DNA, 40 bp, Artificial Sequence
  Synthetic Oligonucleotide
tcctctgtgactctcacactaacccgggggtgtgaccgtc

SEQ ID NO: 5420 - DNA, 40 bp, Artificial Sequence
  Synthetic Oligonucleotide
tcctccatctggtcgcgatacagaatacggttaacataaa

SEQ ID NO: 5421 - DNA, 40 bp, Artificial Sequence
  Synthetic Oligonucleotide
tcctccatctggtcgcgatacagaatacgattgacataaa

SEQ ID NO: 5422 - DNA, 40 bp, Artificial Sequence
  Synthetic Oligonucleotide
tcctccatctggtcgcgatacagaatacgattagcataaa

SEQ ID NO: 5423 - DNA, 40 bp, Artificial Sequence
  Synthetic Oligonucleotide
tcctcaatctggtcgcgatacagaatacgattaacataaa

SEQ ID NO: 5424 - DNA, 40 bp, Artificial Sequence
  Synthetic Oligonucleotide
tccgggtcattgttcactataacattatcgcgccgcgacg

SEQ ID NO: 5425 - DNA, 40 bp, Artificial Sequence
  Synthetic Oligonucleotide
tccgcctcaggttcccctaacgcgttagccttccggaatg

SEQ ID NO: 5426 - DNA, 40 bp, Artificial Sequence
  Synthetic Oligonucleotide
tcccacagctcacttcgtctttgatcgaccacgctcataa

SEQ ID NO: 5427 - DNA, 40 bp, Artificial Sequence
  Synthetic Oligonucleotide
tccatggtacgcctcgatttccgccatacatgcatgtaaa

SEQ ID NO: 5428 - DNA, 40 bp, Artificial Sequence
  Synthetic Oligonucleotide
tccatgggtacgcctcgattccgcccatacatgcatgtaa

SEQ ID NO: 5429 - DNA, 40 bp, Artificial Sequence
  Synthetic Oligonucleotide
tccatggatccactcggaattcaatttctacgattccgac

SEQ ID NO: 5430 - DNA, 40 bp, Artificial Sequence
  Synthetic Oligonucleotide
tccaatgaccggatcagggtatatcacaggctactgtgag

SEQ ID NO: 5431 - DNA, 40 bp, Artificial Sequence
  Synthetic Oligonucleotide
tccaagtccccgattcgtcgtccgtacgctattacggttt

SEQ ID NO: 5432 - DNA, 40 bp, Artificial Sequence
  Synthetic Oligonucleotide
tccaagtccccaactcgtcgtccgtacgctattacggttt

SEQ ID NO: 5433 - DNA, 40 bp, Artificial Sequence
  Synthetic Oligonucleotide
tccaaggtccccaattcgtcgtccgtacgctattacggtt

SEQ ID NO: 5434 - DNA, 40 bp, Artificial Sequence
  Synthetic Oligonucleotide
tcattgtcgcgcttgatggagccggtaccttccagcaatg

SEQ ID NO: 5435 - DNA, 40 bp, Artificial Sequence
  Synthetic Oligonucleotide
tcatgggctttagctcaccttctcgtacttggacagttac

SEQ ID NO: 5436 - DNA, 40 bp, Artificial Sequence
  Synthetic Oligonucleotide
tcatgggctttagcacttctcggtaacttgggcagcttac

SEQ ID NO: 5437 - DNA, 40 bp, Artificial Sequence
  Synthetic Oligonucleotide
tcatgggctttaagctcacttctcgtaacttggcagttac

SEQ ID NO: 5438 - DNA, 40 bp, Artificial Sequence
  Synthetic Oligonucleotide
tcatgggctttaagctacttctcgtaacttgggcagttac

SEQ ID NO: 5439 - DNA, 40 bp, Artificial Sequence
  Synthetic Oligonucleotide
tcatgggctttaagcacttctcggttacttgggcagttac

SEQ ID NO: 5440 - DNA, 40 bp, Artificial Sequence
  Synthetic Oligonucleotide
tcatgggctttaagcacttctcggtaacttggcagcttac

SEQ ID NO: 5441 - DNA, 40 bp, Artificial Sequence
  Synthetic Oligonucleotide
tcatgggctttaagcacttcgtcgatacttgggcagttac

SEQ ID NO: 5442 - DNA, 40 bp, Artificial Sequence
  Synthetic Oligonucleotide
tcatgggctttaagcactctcggtaacttgggcagcttac

SEQ ID NO: 5443 - DNA, 40 bp, Artificial Sequence
  Synthetic Oligonucleotide
tcatcgccagcacttcacttatcgactgacgcttactaga

SEQ ID NO: 5444 - DNA, 40 bp, Artificial Sequence
  Synthetic Oligonucleotide
tcagggctttaagctacttctccgtacttggtcgagttac

SEQ ID NO: 5445 - DNA, 40 bp, Artificial Sequence
  Synthetic Oligonucleotide
tcagaacatgtgtaggtcactatacctagataaactaatt

SEQ ID NO: 5446 - DNA, 40 bp, Artificial Sequence
  Synthetic Oligonucleotide
tcactatccgttgtccgtcctcttgtggtattgcgcatgc

SEQ ID NO: 5447 - DNA, 40 bp, Artificial Sequence
  Synthetic Oligonucleotide
tcactataccggcgcggtcgacctttattactttggtcat

SEQ ID NO: 5448 - DNA, 40 bp, Artificial Sequence
  Synthetic Oligonucleotide
tcacgaaacgctatttctgggaagccgcatctcgagcgaa

SEQ ID NO: 5449 - DNA, 40 bp, Artificial Sequence
  Synthetic Oligonucleotide
tcacacagctcacttcgtccttgatcgaccacgctcataa

SEQ ID NO: 5450 - DNA, 40 bp, Artificial Sequence
  Synthetic Oligonucleotide
tcaaagcggtcggaacgctatttccggatttacgcgagac

SEQ ID NO: 5451 - DNA, 40 bp, Artificial Sequence
  Synthetic Oligonucleotide
tattgggctttagcacttctcgtaacttggtacaagttac

SEQ ID NO: 5452 - DNA, 40 bp, Artificial Sequence
  Synthetic Oligonucleotide
tattgggctttaagcacttctcgtaacttggtacagttac

SEQ ID NO: 5453 - DNA, 40 bp, Artificial Sequence
  Synthetic Oligonucleotide
tattgcgccagccacatcaactatgatgacgcttgactga

SEQ ID NO: 5454 - DNA, 40 bp, Artificial Sequence
  Synthetic Oligonucleotide
tattcgcctgccacatcaactatgatgacgcttgactgga

SEQ ID NO: 5455 - DNA, 40 bp, Artificial Sequence
  Synthetic Oligonucleotide
tattcgccattcacatcaactatgatgacgcttgactgga

SEQ ID NO: 5456 - DNA, 40 bp, Artificial Sequence
  Synthetic Oligonucleotide
tattcgccagtctcatcaactatgatgacgcttggctgga

SEQ ID NO: 5457 - DNA, 40 bp, Artificial Sequence
  Synthetic Oligonucleotide
tattcgccagtctacatcagctatgatgacgcttgactgg

SEQ ID NO: 5458 - DNA, 40 bp, Artificial Sequence
  Synthetic Oligonucleotide
tattcgccagtcgacatcaactatgatgacgcttggctga

SEQ ID NO: 5459 - DNA, 40 bp, Artificial Sequence
  Synthetic Oligonucleotide
tattcgccagtcacatccactatgatgacgcttgactgga

SEQ ID NO: 5460 - DNA, 40 bp, Artificial Sequence
  Synthetic Oligonucleotide
tattcgccagtcacatcagctatgatgacgtttgactgga

SEQ ID NO: 5461 - DNA, 40 bp, Artificial Sequence
  Synthetic Oligonucleotide
tattcgccagtcacatcaactatgatgtcgcttgactgga

SEQ ID NO: 5462 - DNA, 40 bp, Artificial Sequence
  Synthetic Oligonucleotide
tattcgccagtcacatcaactatgatgactcttgactgga

SEQ ID NO: 5463 - DNA, 40 bp, Artificial Sequence
  Synthetic Oligonucleotide
tattcgccagtcacatcaactatgatgacgcttggctggt

SEQ ID NO: 5464 - DNA, 40 bp, Artificial Sequence
  Synthetic Oligonucleotide
tattcgccagtcacatcaactatgatgacgcttggctggg

SEQ ID NO: 5465 - DNA, 40 bp, Artificial Sequence
  Synthetic Oligonucleotide
tattcgccagtcacatcaactatgatgacgcttgattgga

SEQ ID NO: 5466 - DNA, 40 bp, Artificial Sequence
  Synthetic Oligonucleotide
tattcgccagtcacatcaactatgatgacgcttgactggt

SEQ ID NO: 5467 - DNA, 40 bp, Artificial Sequence
  Synthetic Oligonucleotide
tattcgccagtcacatcaactatgatgacgcttgactagg

SEQ ID NO: 5468 - DNA, 40 bp, Artificial Sequence
  Synthetic Oligonucleotide
tattcgccagtcacatcaactatgatgacgcttgaatgga

SEQ ID NO: 5469 - DNA, 40 bp, Artificial Sequence
  Synthetic Oligonucleotide
tattcgccagtcacatcaactatgatgacgctgagctgga

SEQ ID NO: 5470 - DNA, 40 bp, Artificial Sequence
  Synthetic Oligonucleotide
tattcgccagccacatcaactatgatgacgtctgactgga

SEQ ID NO: 5471 - DNA, 40 bp, Artificial Sequence
  Synthetic Oligonucleotide
tattcgccagccacatcaactatgatgacgcttgactgca

SEQ ID NO: 5472 - DNA, 40 bp, Artificial Sequence
  Synthetic Oligonucleotide
tattcgccagccacatcaactatgatgacgcttaactgga

SEQ ID NO: 5473 - DNA, 40 bp, Artificial Sequence
  Synthetic Oligonucleotide
tattcgccagccacatcaactatgataacgcttgactgga

SEQ ID NO: 5474 - DNA, 40 bp, Artificial Sequence
  Synthetic Oligonucleotide
tattcgccagccacatcaactatgagtacgcttgactgga

SEQ ID NO: 5475 - DNA, 40 bp, Artificial Sequence
  Synthetic Oligonucleotide
tattcgccagccacataaactatgatgacgcttgactgga

SEQ ID NO: 5476 - DNA, 40 bp, Artificial Sequence
  Synthetic Oligonucleotide
tattcgccactcacatcaactatgatgacgcttgactgga

SEQ ID NO: 5477 - DNA, 40 bp, Artificial Sequence
  Synthetic Oligonucleotide
tattcgcagccacatcaacttatgatgacgcttgactgga

SEQ ID NO: 5478 - DNA, 40 bp, Artificial Sequence
  Synthetic Oligonucleotide
tattcgcaagccacatcaactatgatgacgcttgactgga

SEQ ID NO: 5479 - DNA, 40 bp, Artificial Sequence
  Synthetic Oligonucleotide
tattccgccagtcgacatcaactatgactacgctgactga

SEQ ID NO: 5480 - DNA, 40 bp, Artificial Sequence
  Synthetic Oligonucleotide
tattccatctggtcgcgatacagaatacgattaacataaa

SEQ ID NO: 5481 - DNA, 40 bp, Artificial Sequence
  Synthetic Oligonucleotide
tattcaccagtcacatcaactatgatgacgcttggctgga

SEQ ID NO: 5482 - DNA, 40 bp, Artificial Sequence
  Synthetic Oligonucleotide
tattagccagccacatcaactatgatgacgcttgactggg

SEQ ID NO: 5483 - DNA, 40 bp, Artificial Sequence
  Synthetic Oligonucleotide
tatgggttactttagcacttctcgtaactttgggcagtac

SEQ ID NO: 5484 - DNA, 40 bp, Artificial Sequence
  Synthetic Oligonucleotide
tatgggtctttaagcacttctcgtaacttggtcgagttac

SEQ ID NO: 5485 - DNA, 40 bp, Artificial Sequence
  Synthetic Oligonucleotide
tatggggctttttagcacttctggtaacttgggcagttac

SEQ ID NO: 5486 - DNA, 40 bp, Artificial Sequence
  Synthetic Oligonucleotide
tatggggctttttaagcacttctcggtaacttggcagtac

SEQ ID NO: 5487 - DNA, 40 bp, Artificial Sequence
  Synthetic Oligonucleotide
tatggggcttttgagcattctcggtaacttgggcagttac

SEQ ID NO: 5488 - DNA, 40 bp, Artificial Sequence
  Synthetic Oligonucleotide
tatggggcttttgagcacttctcggtaacttgggcgttac

SEQ ID NO: 5489 - DNA, 40 bp, Artificial Sequence
  Synthetic Oligonucleotide
tatggggcttttgagcacttccggtgacttgggcagttac

SEQ ID NO: 5490 - DNA, 40 bp, Artificial Sequence
  Synthetic Oligonucleotide
tatggggcttttaggcacttctcggtaacttggcagttac

SEQ ID NO: 5491 - DNA, 40 bp, Artificial Sequence
  Synthetic Oligonucleotide
tatggggcttttaggcacttccggtaacttgggcagttac

SEQ ID NO: 5492 - DNA, 40 bp, Artificial Sequence
  Synthetic Oligonucleotide
tatggggcttttagcgacttctcggtaacttggcagttac

SEQ ID NO: 5493 - DNA, 40 bp, Artificial Sequence
  Synthetic Oligonucleotide
tatggggcttttagcacttcttggtaacttgggcagttac

SEQ ID NO: 5494 - DNA, 40 bp, Artificial Sequence
  Synthetic Oligonucleotide
tatggggcttttagcacttctcggtaacttgggcagttgc

SEQ ID NO: 5495 - DNA, 40 bp, Artificial Sequence
  Synthetic Oligonucleotide
tatggggcttttagcacttctcggcaacttgggcagttac

SEQ ID NO: 5496 - DNA, 40 bp, Artificial Sequence
  Synthetic Oligonucleotide
tatggggcttttagcacttctcgataacttgggcagttac

SEQ ID NO: 5497 - DNA, 40 bp, Artificial Sequence
  Synthetic Oligonucleotide
tatggggcttttagcacttctcgagaacttgggcagttac

SEQ ID NO: 5498 - DNA, 40 bp, Artificial Sequence
  Synthetic Oligonucleotide
tatggggcttttagcacttcacggtaacttgggcagttac

SEQ ID NO: 5499 - DNA, 40 bp, Artificial Sequence
  Synthetic Oligonucleotide
tatggggcttttagcacctctcggtaacttgggcagttac

SEQ ID NO: 5500 - DNA, 40 bp, Artificial Sequence
  Synthetic Oligonucleotide
tatggggcttttaatcacttctcggtaacttggcagttac

SEQ ID NO: 5501 - DNA, 40 bp, Artificial Sequence
  Synthetic Oligonucleotide
tatggggcttttaagtactctctgtgacttgggcagttac

SEQ ID NO: 5502 - DNA, 40 bp, Artificial Sequence
  Synthetic Oligonucleotide
tatggggcttttaagtactctcggtaacttgggcagttac

SEQ ID NO: 5503 - DNA, 40 bp, Artificial Sequence
  Synthetic Oligonucleotide
tatggggcttttaagcgcttctcggtaacttgggcagtta

SEQ ID NO: 5504 - DNA, 40 bp, Artificial Sequence
  Synthetic Oligonucleotide
tatggggcttttaagcgctcttcgtgacttgggcagttac

SEQ ID NO: 5505 - DNA, 40 bp, Artificial Sequence
  Synthetic Oligonucleotide
tatggggcttttaagcgctctcgttgacttgggcagttac

SEQ ID NO: 5506 - DNA, 40 bp, Artificial Sequence
  Synthetic Oligonucleotide
tatggggcttttaagcgctctcgtgagcttgggcagttac

SEQ ID NO: 5507 - DNA, 40 bp, Artificial Sequence
  Synthetic Oligonucleotide
tatggggcttttaagcgacttctcggtacttggcagttac

SEQ ID NO: 5508 - DNA, 40 bp, Artificial Sequence
  Synthetic Oligonucleotide
tatggggcttttaagcctctctgtgaacttgggcagttac

SEQ ID NO: 5509 - DNA, 40 bp, Artificial Sequence
  Synthetic Oligonucleotide
tatggggcttttaagcattctcggtacattgggcagttac

SEQ ID NO: 5510 - DNA, 40 bp, Artificial Sequence
  Synthetic Oligonucleotide
tatggggcttttaagcactttcgtgatacttgggcattac

SEQ ID NO: 5511 - skipped

SEQ ID NO: 5512 - DNA, 40 bp, Artificial Sequence
  Synthetic Oligonucleotide
tatggggcttttaagcacttcttggtaacttgggcagtac

SEQ ID NO: 5513 - DNA, 40 bp, Artificial Sequence
  Synthetic Oligonucleotide
tatggggcttttaagcacttcttggtaacttggcagttac

SEQ ID NO: 5514 - DNA, 40 bp, Artificial Sequence
  Synthetic Oligonucleotide
tatggggcttttaagcacttcttggtaactgggcagttac

SEQ ID NO: 5515 - DNA, 40 bp, Artificial Sequence
  Synthetic Oligonucleotide
tatggggcttttaagcacttctggtgacttggtcagttac

SEQ ID NO: 5516 - DNA, 40 bp, Artificial Sequence
  Synthetic Oligonucleotide
tatggggcttttaagcacttctggtaacttgggcagttag

SEQ ID NO: 5517 - DNA, 40 bp, Artificial Sequence
  Synthetic Oligonucleotide
tatggggcttttaagcacttctggtaacttgggcagctac

SEQ ID NO: 5518 - DNA, 40 bp, Artificial Sequence
  Synthetic Oligonucleotide
tatggggcttttaagcacttctggtaacttgggcaattac

SEQ ID NO: 5519 - DNA, 40 bp, Artificial Sequence
  Synthetic Oligonucleotide
tatggggcttttaagcacttctggtaacttaggcagttac

SEQ ID NO: 5520 - DNA, 40 bp, Artificial Sequence
  Synthetic Oligonucleotide
tatggggcttttaagcacttctggtaactcgggcagttac

SEQ ID NO: 5521 - DNA, 40 bp, Artificial Sequence
  Synthetic Oligonucleotide
tatggggcttttaagcacttctgggtaacttggcagttac

SEQ ID NO: 5522 - DNA, 40 bp, Artificial Sequence
  Synthetic Oligonucleotide
tatggggcttttaagcacttctggcaacttgggcagttac

SEQ ID NO: 5523 - DNA, 40 bp, Artificial Sequence
  Synthetic Oligonucleotide
tatggggcttttaagcacttctgataacttgggcagttac

SEQ ID NO: 5524 - DNA, 40 bp, Artificial Sequence
  Synthetic Oligonucleotide
tatggggcttttaagcacttctctgaacttgggcagttac

SEQ ID NO: 5525 - DNA, 40 bp, Artificial Sequence
  Synthetic Oligonucleotide
tatggggcttttaagcacttctcgtagcttgggcagttac

SEQ ID NO: 5526 - DNA, 40 bp, Artificial Sequence
  Synthetic Oligonucleotide
tatggggcttttaagcacttctcgtaacttgggtagttac

SEQ ID NO: 5527 - DNA, 40 bp, Artificial Sequence
  Synthetic Oligonucleotide
tatggggcttttaagcacttctcgtaacttgggctagtac

SEQ ID NO: 5528 - DNA, 40 bp, Artificial Sequence
  Synthetic Oligonucleotide
tatggggcttttaagcacttctcgtaacttggcgagttac

SEQ ID NO: 5529 - DNA, 40 bp, Artificial Sequence
  Synthetic Oligonucleotide
tatggggcttttaagcacttctcggtacttggcgagttac

SEQ ID NO: 5530 - DNA, 40 bp, Artificial Sequence
  Synthetic Oligonucleotide
tatggggcttttaagcacttctcggtaacttgggcggtta

SEQ ID NO: 5531 - DNA, 40 bp, Artificial Sequence
  Synthetic Oligonucleotide
tatggggcttttaagcacttctcggtaacttgggcggtac

SEQ ID NO: 5532 - DNA, 40 bp, Artificial Sequence
  Synthetic Oligonucleotide
tatggggcttttaagcacttctcggtaacttggctgttac

SEQ ID NO: 5533 - DNA, 40 bp, Artificial Sequence
  Synthetic Oligonucleotide
tatggggcttttaagcacttctcggtaacttggcagtgac

SEQ ID NO: 5534 - DNA, 40 bp, Artificial Sequence
  Synthetic Oligonucleotide
tatggggcttttaagcacttctcggtaacttggacagtta

SEQ ID NO: 5535 - DNA, 40 bp, Artificial Sequence
  Synthetic Oligonucleotide
tatggggcttttaagcacttctcggtaacttgagagttac

SEQ ID NO: 5536 - DNA, 40 bp, Artificial Sequence
  Synthetic Oligonucleotide
tatggggcttttaagcacttctcggtaactgtgcagttac

SEQ ID NO: 5537 - DNA, 40 bp, Artificial Sequence
  Synthetic Oligonucleotide
tatggggcttttaagcacttctcggtaactgggcagttaa

SEQ ID NO: 5538 - DNA, 40 bp, Artificial Sequence
  Synthetic Oligonucleotide
tatggggcttttaagcacttctcggtaactggcgagttac

SEQ ID NO: 5539 - DNA, 40 bp, Artificial Sequence
  Synthetic Oligonucleotide
tatggggcttttaagcacttctcggtaactgagcagttac

SEQ ID NO: 5540 - DNA, 40 bp, Artificial Sequence
  Synthetic Oligonucleotide
tatggggcttttaagcacttctcggtaactcgggcagtta

SEQ ID NO: 5541 - DNA, 40 bp, Artificial Sequence
  Synthetic Oligonucleotide
tatggggcttttaagcacttctcggtaacatggcagttac

SEQ ID NO: 5542 - DNA, 40 bp, Artificial Sequence
  Synthetic Oligonucleotide
tatggggcttttaagcacttctcgggacttgggcagttac

SEQ ID NO: 5543 - DNA, 40 bp, Artificial Sequence
  Synthetic Oligonucleotide
tatggggcttttaagcacttctcggcaacttgggcagtta

SEQ ID NO: 5544 - DNA, 40 bp, Artificial Sequence
  Synthetic Oligonucleotide
tatggggcttttaagcacttctcggaacttgggcagttac

SEQ ID NO: 5545 - DNA, 40 bp, Artificial Sequence
  Synthetic Oligonucleotide
tatggggcttttaagcacttctcagtacttgggcagttac

SEQ ID NO: 5546 - DNA, 40 bp, Artificial Sequence
  Synthetic Oligonucleotide
tatggggcttttaagcacttctcagtaactgggcagttac

SEQ ID NO: 5547 - DNA, 40 bp, Artificial Sequence
  Synthetic Oligonucleotide
tatggggcttttaagcacttctagtaacttgggcagttac

SEQ ID NO: 5548 - DNA, 40 bp, Artificial Sequence
  Synthetic Oligonucleotide
tatggggcttttaagcacttctaggtaacttggcagttac

SEQ ID NO: 5549 - DNA, 40 bp, Artificial Sequence
  Synthetic Oligonucleotide
tatggggcttttaagcacttcgtcgatacttggcagttac

SEQ ID NO: 5550 - DNA, 40 bp, Artificial Sequence
  Synthetic Oligonucleotide
tatggggcttttaagcacttcgtcgacttgggcagcttac

SEQ ID NO: 5551 - DNA, 40 bp, Artificial Sequence
  Synthetic Oligonucleotide
tatggggcttttaagcacttcgtaagacttgggcagttac

SEQ ID NO: 5552 - DNA, 40 bp, Artificial Sequence
  Synthetic Oligonucleotide
tatggggcttttaagcacttcgcggtaacttggcagttac

SEQ ID NO: 5553 - DNA, 40 bp, Artificial Sequence
  Synthetic Oligonucleotide
tatggggcttttaagcacttcgatgtacttgggcagttac

SEQ ID NO: 5554 - DNA, 40 bp, Artificial Sequence
  Synthetic Oligonucleotide
tatggggcttttaagcacttccgtgacattgggcagttac

SEQ ID NO: 5555 - DNA, 40 bp, Artificial Sequence
  Synthetic Oligonucleotide
tatggggcttttaagcacttccgtcgacttgggcagttac

SEQ ID NO: 5556 - DNA, 40 bp, Artificial Sequence
  Synthetic Oligonucleotide
tatggggcttttaagcacttccggtaacttgggtagttac

SEQ ID NO: 5557 - DNA, 40 bp, Artificial Sequence
  Synthetic Oligonucleotide
tatggggcttttaagcacttccggtaactagggcagttac

SEQ ID NO: 5558 - DNA, 40 bp, Artificial Sequence
  Synthetic Oligonucleotide
tatggggcttttaagcacttcccggtaacttggcagttac

SEQ ID NO: 5559 - DNA, 40 bp, Artificial Sequence
  Synthetic Oligonucleotide
tatggggcttttaagcactgtctacgtacgtggcagttac

SEQ ID NO: 5560 - DNA, 40 bp, Artificial Sequence
  Synthetic Oligonucleotide
tatggggcttttaagcactctcgtacgttagtcgagttac

SEQ ID NO: 5561 - DNA, 40 bp, Artificial Sequence
  Synthetic Oligonucleotide
tatggggcttttaagcactctcggtgacttgggcagttac

SEQ ID NO: 5562 - DNA, 40 bp, Artificial Sequence
  Synthetic Oligonucleotide
tatggggcttttaagcactctcggtaacttgagcagttac

SEQ ID NO: 5563 - DNA, 40 bp, Artificial Sequence
  Synthetic Oligonucleotide
tatggggcttttaagcactctcagtaacttgggcagttac

SEQ ID NO: 5564 - DNA, 40 bp, Artificial Sequence
  Synthetic Oligonucleotide
tatggggcttttaagcactcctggtaacttgggcagttac

SEQ ID NO: 5565 - DNA, 40 bp, Artificial Sequence
  Synthetic Oligonucleotide
tatggggcttttaagcactcctcggtaacttgggcagtta

SEQ ID NO: 5566 - DNA, 40 bp, Artificial Sequence
  Synthetic Oligonucleotide
tatggggcttttaagcactactcgtaacgttggcagttac

SEQ ID NO: 5567 - DNA, 40 bp, Artificial Sequence
  Synthetic Oligonucleotide
tatggggcttttaagcacattcggtaacttgggcagttac

SEQ ID NO: 5568 - DNA, 40 bp, Artificial Sequence
  Synthetic Oligonucleotide
tatggggcttttaagaactctcggtaacttgggcagttac

SEQ ID NO: 5569 - DNA, 40 bp, Artificial Sequence
  Synthetic Oligonucleotide
tatggggcttttaaacactctcggtaacttgggcagttac

SEQ ID NO: 5570 - DNA, 40 bp, Artificial Sequence
  Synthetic Oligonucleotide
tatggggctttgagcacttctcggtaacttaggcagttac

SEQ ID NO: 5571 - DNA, 40 bp, Artificial Sequence
  Synthetic Oligonucleotide
tatggggctttgagcacttctaggtaacttgggcagttac

SEQ ID NO: 5572 - DNA, 40 bp, Artificial Sequence
  Synthetic Oligonucleotide
tatggggctttcaagcacttctggtaacttgggcagttac

SEQ ID NO: 5573 - DNA, 40 bp, Artificial Sequence
  Synthetic Oligonucleotide
tatggggctttcaagcacttctcggtaacttggcagttac

SEQ ID NO: 5574 - DNA, 40 bp, Artificial Sequence
  Synthetic Oligonucleotide
tatggggctttagacacttctcggtagcttgggcagttac

SEQ ID NO: 5575 - DNA, 40 bp, Artificial Sequence
  Synthetic Oligonucleotide
tatggggctttagacacttctcggtaacttggtcagttac

SEQ ID NO: 5576 - DNA, 40 bp, Artificial Sequence
  Synthetic Oligonucleotide
tatggggctttagacacttctcggtaacttgggcagctac

SEQ ID NO: 5577 - DNA, 40 bp, Artificial Sequence
  Synthetic Oligonucleotide
tatggggctttagacacttctcggtaacttgagcagttac

SEQ ID NO: 5578 - DNA, 40 bp, Artificial Sequence
  Synthetic Oligonucleotide
tatggggctttagacacttctcggtaacttaggcagttac

SEQ ID NO: 5579 - DNA, 40 bp, Artificial Sequence
  Synthetic Oligonucleotide
tatggggctttactagcacttctcggtaactggcagttac

SEQ ID NO: 5580 - DNA, 40 bp, Artificial Sequence
  Synthetic Oligonucleotide
tatggggctttactagacttctcggtaacttggcagttac

SEQ ID NO: 5581 - DNA, 40 bp, Artificial Sequence
  Synthetic Oligonucleotide
tatggggctttacagcacttctggtaacttgggcagttac

SEQ ID NO: 5582 - DNA, 40 bp, Artificial Sequence
  Synthetic Oligonucleotide
tatggggctttacagcacttctcggtaacttgggcagtac

SEQ ID NO: 5583 - DNA, 40 bp, Artificial Sequence
  Synthetic Oligonucleotide
tatggggctttacagcacttctcggtaacttggcagttac

SEQ ID NO: 5584 - DNA, 40 bp, Artificial Sequence
  Synthetic Oligonucleotide
tatggggctttacagacctctcggtaacttgggcagttac

SEQ ID NO: 5585 - DNA, 40 bp, Artificial Sequence
  Synthetic Oligonucleotide
tatggggctttacacacttctcggtaacttaggcagttac

SEQ ID NO: 5586 - DNA, 40 bp, Artificial Sequence
  Synthetic Oligonucleotide
tatggggctttaatagacttctcggtaactgggcagttac

SEQ ID NO: 5587 - DNA, 40 bp, Artificial Sequence
  Synthetic Oligonucleotide
tatggggctttaagtcacttctcggatacttggcagttac

SEQ ID NO: 5588 - DNA, 40 bp, Artificial Sequence
  Synthetic Oligonucleotide
tatggggctttaagtacttctcggtaacttggacagttac

SEQ ID NO: 5589 - DNA, 40 bp, Artificial Sequence
  Synthetic Oligonucleotide
tatggggctttaagcgctctcgtgatacttgggcagttac

SEQ ID NO: 5590 - DNA, 40 bp, Artificial Sequence
  Synthetic Oligonucleotide
tatggggctttaagcacttttcggtaacttgagcagttac

SEQ ID NO: 5591 - DNA, 40 bp, Artificial Sequence
  Synthetic Oligonucleotide
tatggggctttaagcactttcgtgatacttgggcagttac

SEQ ID NO: 5592 - DNA, 40 bp, Artificial Sequence
  Synthetic Oligonucleotide
tatggggctttaagcacttcttggtaactcgggcagttac

SEQ ID NO: 5593 - DNA, 40 bp, Artificial Sequence
  Synthetic Oligonucleotide
tatggggctttaagcacttcttggcaacttgggcagttac

SEQ ID NO: 5594 - DNA, 40 bp, Artificial Sequence
  Synthetic Oligonucleotide
tatggggctttaagcacttctcgtgaacttggcgagttac

SEQ ID NO: 5595 - DNA, 40 bp, Artificial Sequence
  Synthetic Oligonucleotide
tatggggctttaagcacttctcgtaacttgagcagcttac

SEQ ID NO: 5596 - DNA, 40 bp, Artificial Sequence
  Synthetic Oligonucleotide
tatggggctttaagcacttctcggtgacttgagcagttac

SEQ ID NO: 5597 - DNA, 40 bp, Artificial Sequence
  Synthetic Oligonucleotide
tatggggctttaagcacttctcggtacttggggcagttac

SEQ ID NO: 5598 - DNA, 40 bp, Artificial Sequence
  Synthetic Oligonucleotide
tatggggctttaagcacttctcggtaacttgggctgttac

SEQ ID NO: 5599 - DNA, 40 bp, Artificial Sequence
  Synthetic Oligonucleotide
tatggggctttaagcacttctcggtaacttgggctattac

SEQ ID NO: 5600 - DNA, 40 bp, Artificial Sequence
  Synthetic Oligonucleotide
tatggggctttaagcacttctcggtaacttgggcagttaa

SEQ ID NO: 5601 - DNA, 40 bp, Artificial Sequence
  Synthetic Oligonucleotide
tatggggctttaagcacttctcggtaacttgggcagctta

SEQ ID NO: 5602 - DNA, 40 bp, Artificial Sequence
  Synthetic Oligonucleotide
tatggggctttaagcacttctcggtaacgtgggcagttac

SEQ ID NO: 5603 - DNA, 40 bp, Artificial Sequence
  Synthetic Oligonucleotide
tatggggctttaagcacttctcggtaacatgagcagttac

SEQ ID NO: 5604 - DNA, 40 bp, Artificial Sequence
  Synthetic Oligonucleotide
tatggggctttaagcacttctcggaaacttgggcagttac

SEQ ID NO: 5605 - DNA, 40 bp, Artificial Sequence
  Synthetic Oligonucleotide
tatggggctttaagcacttcgtcgatacttgggcagttac

SEQ ID NO: 5606 - DNA, 40 bp, Artificial Sequence
  Synthetic Oligonucleotide
tatggggctttaagcacttccgtcgtacttgggcagttac

SEQ ID NO: 5607 - DNA, 40 bp, Artificial Sequence
  Synthetic Oligonucleotide
tatggggctttaagcactctcggtaacttgggcagcttac

SEQ ID NO: 5608 - DNA, 40 bp, Artificial Sequence
  Synthetic Oligonucleotide
tatggggctttaagcacctctcggtaacctgggcagttac

SEQ ID NO: 5609 - DNA, 40 bp, Artificial Sequence
  Synthetic Oligonucleotide
tatggggctttaagcacatctcggtaacttgggcagttac

SEQ ID NO: 5610 - DNA, 40 bp, Artificial Sequence
  Synthetic Oligonucleotide
tatggggctttaagcaacttctcggtaactcggcagttac

SEQ ID NO: 5611 - DNA, 40 bp, Artificial Sequence
  Synthetic Oligonucleotide
tatggggctttaacgcacttctcggtaacttggcagttac

SEQ ID NO: 5612 - DNA, 40 bp, Artificial Sequence
  Synthetic Oligonucleotide
tatggggcttctaagcacttctcgtaacttgggcagttac

SEQ ID NO: 5613 - DNA, 40 bp, Artificial Sequence
  Synthetic Oligonucleotide
tatggggcttctaagcacttctcggtaacttgggcgttac

SEQ ID NO: 5614 - DNA, 40 bp, Artificial Sequence
  Synthetic Oligonucleotide
tatggggcttctaagcacttctcggtaacttgggcagtta

SEQ ID NO: 5615 - DNA, 40 bp, Artificial Sequence
  Synthetic Oligonucleotide
tatggggcttctaagcacttccggtaacttgggcagttac

SEQ ID NO: 5616 - DNA, 40 bp, Artificial Sequence
  Synthetic Oligonucleotide
tatggggcttatagcacttctcggtaacttggtcagttac

SEQ ID NO: 5617 - DNA, 40 bp, Artificial Sequence
  Synthetic Oligonucleotide
tatggggcttatagcacttctcggtaacttgggcagtaac

SEQ ID NO: 5618 - DNA, 40 bp, Artificial Sequence
  Synthetic Oligonucleotide
tatggggcttatagcacttctcggtaacttaggcagttac

SEQ ID NO: 5619 - DNA, 40 bp, Artificial Sequence
  Synthetic Oligonucleotide
tatggggcttatacacttctcggtaacttgggcagttacc

SEQ ID NO: 5620 - DNA, 40 bp, Artificial Sequence
  Synthetic Oligonucleotide
tatggggcttactacacttctcggtaacttgggcagttac

SEQ ID NO: 5621 - DNA, 40 bp, Artificial Sequence
  Synthetic Oligonucleotide
tatggggcttaatacacttctcggtaacttgggcagttac

SEQ ID NO: 5622 - DNA, 40 bp, Artificial Sequence
  Synthetic Oligonucleotide
tatggggctcttaagcacttctcggtaacttgggcagtta

SEQ ID NO: 5623 - DNA, 40 bp, Artificial Sequence
  Synthetic Oligonucleotide
tatggggcctttaggcacttctcggtacttgggcagttac

SEQ ID NO: 5624 - DNA, 40 bp, Artificial Sequence
  Synthetic Oligonucleotide
tatggggcctttaagcacttctcggtgacttggcagttac

SEQ ID NO: 5625 - DNA, 40 bp, Artificial Sequence
  Synthetic Oligonucleotide
tatggggcctttaagcacttctcggtaacttgggcagtac

SEQ ID NO: 5626 - DNA, 40 bp, Artificial Sequence
  Synthetic Oligonucleotide
tatggggcctttaagcacttccggtaacttgggcagttac

SEQ ID NO: 5627 - DNA, 40 bp, Artificial Sequence
  Synthetic Oligonucleotide
tatggggccttacacacttctcggtaacttgggcagttac

SEQ ID NO: 5628 - DNA, 40 bp, Artificial Sequence
  Synthetic Oligonucleotide
tatggggcatttaagcactctcggtaacttgggcagttac

SEQ ID NO: 5629 - DNA, 40 bp, Artificial Sequence
  Synthetic Oligonucleotide
tatgggcttttgagcacttctcggtagcttgggcagttac

SEQ ID NO: 5630 - DNA, 40 bp, Artificial Sequence
  Synthetic Oligonucleotide
tatgggcttttaggcacttctcggtaacttgggcagttac

SEQ ID NO: 5631 - DNA, 40 bp, Artificial Sequence
  Synthetic Oligonucleotide
tatgggcttttagcgacttctcggtaacttggcgagttac

SEQ ID NO: 5632 - DNA, 40 bp, Artificial Sequence
  Synthetic Oligonucleotide
tatgggcttttaagtcacttctcggtaacttggcagttac

SEQ ID NO: 5633 - DNA, 40 bp, Artificial Sequence
  Synthetic Oligonucleotide
tatgggcttttaagctacttctcgtaacttggcgagttac

SEQ ID NO: 5634 - DNA, 40 bp, Artificial Sequence
  Synthetic Oligonucleotide
tatgggcttttaagcgctctcgtgatacttgggcagttac

SEQ ID NO: 5635 - DNA, 40 bp, Artificial Sequence
  Synthetic Oligonucleotide
tatgggcttttaagcacttctcgtacgttaggcgagttac

SEQ ID NO: 5636 - DNA, 40 bp, Artificial Sequence
  Synthetic Oligonucleotide
tatgggcttttaagcacttctcgtaacttgagcaagttac

SEQ ID NO: 5637 - DNA, 40 bp, Artificial Sequence
  Synthetic Oligonucleotide
tatgggcttttaagcacttctcggtgacttgggcagttac

SEQ ID NO: 5638 - DNA, 40 bp, Artificial Sequence
  Synthetic Oligonucleotide
tatgggcttttaagcacttctcggtacttgggcaagttac

SEQ ID NO: 5639 - DNA, 40 bp, Artificial Sequence
  Synthetic Oligonucleotide
tatgggcttttaagcacttctcggtacattgggcagttac

SEQ ID NO: 5640 - DNA, 40 bp, Artificial Sequence
  Synthetic Oligonucleotide
tatgggcttttaagcacttctcggtaacttgggccgttac

SEQ ID NO: 5641 - DNA, 40 bp, Artificial Sequence
  Synthetic Oligonucleotide
tatgggcttttaagcacttctcggtaacttgggacattac

SEQ ID NO: 5642 - DNA, 40 bp, Artificial Sequence
  Synthetic Oligonucleotide
tatgggcttttaagcacttctcggtaacttggcaagttac

SEQ ID NO: 5643 - DNA, 40 bp, Artificial Sequence
  Synthetic Oligonucleotide
tatgggcttttaagcacttctcggtaactagggcagttac

SEQ ID NO: 5644 - DNA, 40 bp, Artificial Sequence
  Synthetic Oligonucleotide
tatgggcttttaagcacttctcggtaaccttggcagttac

SEQ ID NO: 5645 - DNA, 40 bp, Artificial Sequence
  Synthetic Oligonucleotide
tatgggcttttaagcacttctaggtaacttgggcagttac

SEQ ID NO: 5646 - DNA, 40 bp, Artificial Sequence
  Synthetic Oligonucleotide
tatgggcttttaagcactctcgtacgttaggtcgagttac

SEQ ID NO: 5647 - DNA, 40 bp, Artificial Sequence
  Synthetic Oligonucleotide
tatgggcttttaagcacctctcggttacttgggcagttac

SEQ ID NO: 5648 - DNA, 40 bp, Artificial Sequence
  Synthetic Oligonucleotide
tatgggctttgagtcacttctcggtaacttgggcagttac

SEQ ID NO: 5649 - DNA, 40 bp, Artificial Sequence
  Synthetic Oligonucleotide
tatgggctttgagccacttctcggtaacttgggcagttac

SEQ ID NO: 5650 - DNA, 40 bp, Artificial Sequence
  Synthetic Oligonucleotide
tatgggctttgagcacttctcggttaacttgggcagttac

SEQ ID NO: 5651 - DNA, 40 bp, Artificial Sequence
  Synthetic Oligonucleotide
tatgggctttgagcacttctcggtaacttgggcagttacc

SEQ ID NO: 5652 - DNA, 40 bp, Artificial Sequence
  Synthetic Oligonucleotide
tatgggctttgagcacttctcggtaacttgggcagcttac

SEQ ID NO: 5653 - DNA, 40 bp, Artificial Sequence
  Synthetic Oligonucleotide
tatgggctttagctacttctcggtaacttgggcgagttac

SEQ ID NO: 5654 - DNA, 40 bp, Artificial Sequence
  Synthetic Oligonucleotide
tatgggctttagcgtacttctcggtaacttgggcagttac

SEQ ID NO: 5655 - DNA, 40 bp, Artificial Sequence
  Synthetic Oligonucleotide
tatgggctttacagcacttctcggtaacttgggcagttac

SEQ ID NO: 5656 - DNA, 40 bp, Artificial Sequence
  Synthetic Oligonucleotide
tatgggctttaagtcacttctcggtaacttgggcagttac

SEQ ID NO: 5657 - DNA, 40 bp, Artificial Sequence
  Synthetic Oligonucleotide
tatgggctttaagctatttctcggtaacttgggcagttac

SEQ ID NO: 5658 - DNA, 40 bp, Artificial Sequence
  Synthetic Oligonucleotide
tatgggctttaagctacttctggtaacttgggcgagttac

SEQ ID NO: 5659 - DNA, 40 bp, Artificial Sequence
  Synthetic Oligonucleotide
tatgggctttaagctacttctcgtaacttaggcgagttac

SEQ ID NO: 5660 - DNA, 40 bp, Artificial Sequence
  Synthetic Oligonucleotide
tatgggctttaagctacttctcggtacttgggcgagttgc

SEQ ID NO: 5661 - DNA, 40 bp, Artificial Sequence
  Synthetic Oligonucleotide
tatgggctttaagctacttctcggtacttgggcgagttac

SEQ ID NO: 5662 - DNA, 40 bp, Artificial Sequence
  Synthetic Oligonucleotide
tatgggctttaagctacttctcggtacttggcgagttacc

SEQ ID NO: 5663 - DNA, 40 bp, Artificial Sequence
  Synthetic Oligonucleotide
tatgggctttaagctacttctcggtacttaggcgagttac

SEQ ID NO: 5664 - DNA, 40 bp, Artificial Sequence
  Synthetic Oligonucleotide
tatgggctttaagctacttctcggtaacttggtgagttac

SEQ ID NO: 5665 - DNA, 40 bp, Artificial Sequence
  Synthetic Oligonucleotide
tatgggctttaagctacttctcggtaacttggtcagttac

SEQ ID NO: 5666 - DNA, 40 bp, Artificial Sequence
  Synthetic Oligonucleotide
tatgggctttaagctacttctcggtaacttggcgaggtac

SEQ ID NO: 5667 - DNA, 40 bp, Artificial Sequence
  Synthetic Oligonucleotide
tatgggctttaagctacttctcggtaacttggcgagctac

SEQ ID NO: 5668 - DNA, 40 bp, Artificial Sequence
  Synthetic Oligonucleotide
tatgggctttaagctacttctcggtaacttggcagttgac

SEQ ID NO: 5669 - DNA, 40 bp, Artificial Sequence
  Synthetic Oligonucleotide
tatgggctttaagctacttctcggtaacgttggcagttac

SEQ ID NO: 5670 - DNA, 40 bp, Artificial Sequence
  Synthetic Oligonucleotide
tatgggctttaagctacttctcggtaaccatggcagttac

SEQ ID NO: 5671 - DNA, 40 bp, Artificial Sequence
  Synthetic Oligonucleotide
tatgggctttaagctacttctcggcaacttgggcagttac

SEQ ID NO: 5672 - DNA, 40 bp, Artificial Sequence
  Synthetic Oligonucleotide
tatgggctttaagctacttctcgataacttgggcagttac

SEQ ID NO: 5673 - DNA, 40 bp, Artificial Sequence
  Synthetic Oligonucleotide
tatgggctttaagctacttcgtcgtaaccttggcagttac

SEQ ID NO: 5674 - DNA, 40 bp, Artificial Sequence
  Synthetic Oligonucleotide
tatgggctttaagctacttcggtcaacttgggcgagttac

SEQ ID NO: 5675 - DNA, 40 bp, Artificial Sequence
  Synthetic Oligonucleotide
tatgggctttaagctactcctcggtaacttggcgagttac

SEQ ID NO: 5676 - DNA, 40 bp, Artificial Sequence
  Synthetic Oligonucleotide
tatgggctttaagctaccttctcggtacttggcgagttac

SEQ ID NO: 5677 - DNA, 40 bp, Artificial Sequence
  Synthetic Oligonucleotide
tatgggctttaagcgtcttctcggtaacttgggcagttac

SEQ ID NO: 5678 - DNA, 40 bp, Artificial Sequence
  Synthetic Oligonucleotide
tatgggctttaagcgtctctccgtcgacttgggcagttac

SEQ ID NO: 5679 - DNA, 40 bp, Artificial Sequence
  Synthetic Oligonucleotide
tatgggctttaagcgacttctcggtaacttggtcagttac

SEQ ID NO: 5680 - DNA, 40 bp, Artificial Sequence
  Synthetic Oligonucleotide
tatgggctttaagcgacttctcggtaacttggcgagttac

SEQ ID NO: 5681 - DNA, 40 bp, Artificial Sequence
  Synthetic Oligonucleotide
tatgggctttaagcactttctcggtaacttgggctgttac

SEQ ID NO: 5682 - DNA, 40 bp, Artificial Sequence
  Synthetic Oligonucleotide
tatgggctttaagcactttctcggtaacctgggcagttac

SEQ ID NO: 5683 - DNA, 40 bp, Artificial Sequence
  Synthetic Oligonucleotide
tatgggctttaagcactttctcgggtaacttggacagtac

SEQ ID NO: 5684 - DNA, 40 bp, Artificial Sequence
  Synthetic Oligonucleotide
tatgggctttaagcactttctcgggtaacctggcagttac

SEQ ID NO: 5685 - DNA, 40 bp, Artificial Sequence
  Synthetic Oligonucleotide
tatgggctttaagcactttcgcggtaacttgggcagttac

SEQ ID NO: 5686 - DNA, 40 bp, Artificial Sequence
  Synthetic Oligonucleotide
tatgggctttaagcacttctcgtaacttgggacaagttac

SEQ ID NO: 5687 - DNA, 40 bp, Artificial Sequence
  Synthetic Oligonucleotide
tatgggctttaagcacttctcggttaacttgggccactac

SEQ ID NO: 5688 - DNA, 40 bp, Artificial Sequence
  Synthetic Oligonucleotide
tatgggctttaagcacttctcggttaacttgggcagctac

SEQ ID NO: 5689 - DNA, 40 bp, Artificial Sequence
  Synthetic Oligonucleotide
tatgggctttaagcacttctcggttaacttggacagttac

SEQ ID NO: 5690 - DNA, 40 bp, Artificial Sequence
  Synthetic Oligonucleotide
tatgggctttaagcacttctcggttaacttgagcagttac

SEQ ID NO: 5691 - DNA, 40 bp, Artificial Sequence
  Synthetic Oligonucleotide
tatgggctttaagcacttctcggttaacttgacgcattac

SEQ ID NO: 5692 - DNA, 40 bp, Artificial Sequence
  Synthetic Oligonucleotide
tatgggctttaagcacttctcggttaactagggcagttac

SEQ ID NO: 5693 - DNA, 40 bp, Artificial Sequence
  Synthetic Oligonucleotide
tatgggctttaagcacttctcggtgagcttgggcagttac

SEQ ID NO: 5694 - DNA, 40 bp, Artificial Sequence
  Synthetic Oligonucleotide
tatgggctttaagcacttctcggtgaacttgggcagttac

SEQ ID NO: 5695 - DNA, 40 bp, Artificial Sequence
  Synthetic Oligonucleotide
tatgggctttaagcacttctcggtacgcttgggcagttac

SEQ ID NO: 5696 - DNA, 40 bp, Artificial Sequence
  Synthetic Oligonucleotide
tatgggctttaagcacttctcggtaacttgggcagttgac

SEQ ID NO: 5697 - DNA, 40 bp, Artificial Sequence
  Synthetic Oligonucleotide
tatgggctttaagcacttctcggtaacttggacaagttac

SEQ ID NO: 5698 - DNA, 40 bp, Artificial Sequence
  Synthetic Oligonucleotide
tatgggctttaagcacttctcggtaacttgagcagcttac

SEQ ID NO: 5699 - DNA, 40 bp, Artificial Sequence
  Synthetic Oligonucleotide
tatgggctttaagcacttctcggtaacttagggcagttac

SEQ ID NO: 5700 - DNA, 40 bp, Artificial Sequence
  Synthetic Oligonucleotide
tatgggctttaagcacttctcggtaacttaggccagttac

SEQ ID NO: 5701 - DNA, 40 bp, Artificial Sequence
  Synthetic Oligonucleotide
tatgggctttaagcacttctcggtaactcgggcagcttac

SEQ ID NO: 5702 - DNA, 40 bp, Artificial Sequence
  Synthetic Oligonucleotide
tatgggctttaagcacttctcggtaaacttgggcagttac

SEQ ID NO: 5703 - DNA, 40 bp, Artificial Sequence
  Synthetic Oligonucleotide
tatgggctttaagcacttctcgggtgacttgggcagttac

SEQ ID NO: 5704 - DNA, 40 bp, Artificial Sequence
  Synthetic Oligonucleotide
tatgggctttaagcacttctcggataacttgggcagttac

SEQ ID NO: 5705 - DNA, 40 bp, Artificial Sequence
  Synthetic Oligonucleotide
tatgggctttaagcacttctccggtaacttgggcagtacc

SEQ ID NO: 5706 - DNA, 40 bp, Artificial Sequence
  Synthetic Oligonucleotide
tatgggctttaagcacttcgtcggtaacttgggcagttac

SEQ ID NO: 5707 - DNA, 40 bp, Artificial Sequence
  Synthetic Oligonucleotide
tatgggctttaagcacttcgtcggatacttgggcagttac

SEQ ID NO: 5708 - DNA, 40 bp, Artificial Sequence
  Synthetic Oligonucleotide
tatgggctttaagcacttcgtcgatacttggagcagttac

SEQ ID NO: 5709 - DNA, 40 bp, Artificial Sequence
  Synthetic Oligonucleotide
tatgggctttaagcacttcatcgataacttgggcagttac

SEQ ID NO: 5710 - DNA, 40 bp, Artificial Sequence
  Synthetic Oligonucleotide
tatgggctttaagcactgtcgtacgtacgtggcagttacc

SEQ ID NO: 5711 - DNA, 40 bp, Artificial Sequence
  Synthetic Oligonucleotide
tatgggctttaagcactctcggtaacttgggcagttaccc

SEQ ID NO: 5712 - DNA, 40 bp, Artificial Sequence
  Synthetic Oligonucleotide
tatgggctttaagcacctcatcggtaacttgggcagttac

SEQ ID NO: 5713 - DNA, 40 bp, Artificial Sequence
  Synthetic Oligonucleotide
tatgggctttaacgcacttctcgggtaacttaggcagtac

SEQ ID NO: 5714 - DNA, 40 bp, Artificial Sequence
  Synthetic Oligonucleotide
tatgggctttaaagcactttctgggatacctggctagtac

SEQ ID NO: 5715 - DNA, 40 bp, Artificial Sequence
  Synthetic Oligonucleotide
tatgggctttaaagcactttctcgggtacttggcagttac

SEQ ID NO: 5716 - DNA, 40 bp, Artificial Sequence
  Synthetic Oligonucleotide
tatgggctttaaagcactttctcgggatacttggcagtaa

SEQ ID NO: 5717 - DNA, 40 bp, Artificial Sequence
  Synthetic Oligonucleotide
tatgggctttaaagcactttctcgggatacctggcagtac

SEQ ID NO: 5718 - DNA, 40 bp, Artificial Sequence
  Synthetic Oligonucleotide
tatgggcttctaagcacttctcggtaacttgggcggttac

SEQ ID NO: 5719 - DNA, 40 bp, Artificial Sequence
  Synthetic Oligonucleotide
tatgggcttactagcacttctcggtaacttgggcagttac

SEQ ID NO: 5720 - DNA, 40 bp, Artificial Sequence
  Synthetic Oligonucleotide
tatgggcttaaagcactttctgggataccgttggcagtac

SEQ ID NO: 5721 - DNA, 40 bp, Artificial Sequence
  Synthetic Oligonucleotide
tatgggctcttaagcactcctcggtaacttgggcagttac

SEQ ID NO: 5722 - DNA, 40 bp, Artificial Sequence
  Synthetic Oligonucleotide
tatgggctctaagcacttcatcagtaacttgggcagttac

SEQ ID NO: 5723 - DNA, 40 bp, Artificial Sequence
  Synthetic Oligonucleotide
tatgggcgttttaagcacttctcgtaacttgggcagttac

SEQ ID NO: 5724 - DNA, 40 bp, Artificial Sequence
  Synthetic Oligonucleotide
tatgggcgttttaagcacttctcggtacttgggcagttac

SEQ ID NO: 5725 - DNA, 40 bp, Artificial Sequence
  Synthetic Oligonucleotide
tatgggcgttttaagcacttctcggtaacttgggcagtta

SEQ ID NO: 5726 - DNA, 40 bp, Artificial Sequence
  Synthetic Oligonucleotide
tatgggcgttttaagcacttctcggtaacttgggagttac

SEQ ID NO: 5727 - DNA, 40 bp, Artificial Sequence
  Synthetic Oligonucleotide
tatgggcgttttaagcactctcggtaacttgggcagttac

SEQ ID NO: 5728 - DNA, 40 bp, Artificial Sequence
  Synthetic Oligonucleotide
tatgggcgttttaagcactctcggtaacttggcgagttac

SEQ ID NO: 5729 - DNA, 40 bp, Artificial Sequence
  Synthetic Oligonucleotide
tatgggcgtttaagcacttctcggtaacttggccagttac

SEQ ID NO: 5730 - DNA, 40 bp, Artificial Sequence
  Synthetic Oligonucleotide
tatgggcgtttaagcactctcggtaacttagggcagttac

SEQ ID NO: 5731 - DNA, 40 bp, Artificial Sequence
  Synthetic Oligonucleotide
tatgggcggttttaagcacttctcggtaacttggcagtta

SEQ ID NO: 5732 - DNA, 40 bp, Artificial Sequence
  Synthetic Oligonucleotide
tatgggcggttttaagcacttcgcgatacttggcagttac

SEQ ID NO: 5733 - DNA, 40 bp, Artificial Sequence
  Synthetic Oligonucleotide
tatgggccttttaagcacttctcggtacttgggcagttac

SEQ ID NO: 5734 - DNA, 40 bp, Artificial Sequence
  Synthetic Oligonucleotide
tatgggccttttaagcacttctcggtaactaggcagttac

SEQ ID NO: 5735 - DNA, 40 bp, Artificial Sequence
  Synthetic Oligonucleotide
tatgggcctttaagcacttcttggtaacttgggcagttac

SEQ ID NO: 5736 - DNA, 40 bp, Artificial Sequence
  Synthetic Oligonucleotide
tatgggcctttaagcacttctcggtaacttaggcagttac

SEQ ID NO: 5737 - DNA, 40 bp, Artificial Sequence
  Synthetic Oligonucleotide
tatgggcctttaagcacttcgcgtaacttggccagttacc

SEQ ID NO: 5738 - DNA, 40 bp, Artificial Sequence
  Synthetic Oligonucleotide
tatgggccttagcaccttatcggtaacattggcagttaac

SEQ ID NO: 5739 - DNA, 40 bp, Artificial Sequence
  Synthetic Oligonucleotide
tatgggccgtttaagcacttctcggtaacttggcagttac

SEQ ID NO: 5740 - DNA, 40 bp, Artificial Sequence
  Synthetic Oligonucleotide
tatgggcactttaagcacttctcggtaacttgggcagtac

SEQ ID NO: 5741 - DNA, 40 bp, Artificial Sequence
  Synthetic Oligonucleotide
tatgggcactttaagcacttcggtaacttgggcagcttac

SEQ ID NO: 5742 - DNA, 40 bp, Artificial Sequence
  Synthetic Oligonucleotide
tatgggacttttaagcacttctcggtaacttggcagttac

SEQ ID NO: 5743 - DNA, 40 bp, Artificial Sequence
  Synthetic Oligonucleotide
tatgggacttttaagcacttctcgggtattgggcagttac

SEQ ID NO: 5744 - DNA, 40 bp, Artificial Sequence
  Synthetic Oligonucleotide
tatgggacttttaagcacttctcggaacttgggcagttac

SEQ ID NO: 5745 - DNA, 40 bp, Artificial Sequence
  Synthetic Oligonucleotide
tatgggactttagctacttctcggtaacttgggcagttac

SEQ ID NO: 5746 - DNA, 40 bp, Artificial Sequence
  Synthetic Oligonucleotide
tatgggactttaagctacttctggtaacttgggcagttac

SEQ ID NO: 5747 - DNA, 40 bp, Artificial Sequence
  Synthetic Oligonucleotide
tatgggactttaagcacttcttggtaacttgggcagttac

SEQ ID NO: 5748 - DNA, 40 bp, Artificial Sequence
  Synthetic Oligonucleotide
tatggctttaacgcacttctcggtacctggctcagcctac

SEQ ID NO: 5749 - DNA, 40 bp, Artificial Sequence
  Synthetic Oligonucleotide
tatggcttaaagcactttctgggataccgtaggctgatac

SEQ ID NO: 5750 - DNA, 40 bp, Artificial Sequence
  Synthetic Oligonucleotide
tatggcgttttaagcacttctcggtaacttgggctagtac

SEQ ID NO: 5751 - DNA, 40 bp, Artificial Sequence
  Synthetic Oligonucleotide
tatggcgttttaagcacttccgtgatacttgggcagttac

SEQ ID NO: 5752 - DNA, 40 bp, Artificial Sequence
  Synthetic Oligonucleotide
tatggcgtttaagctacttctcggtaacttggcgagttac

SEQ ID NO: 5753 - DNA, 40 bp, Artificial Sequence
  Synthetic Oligonucleotide
tatggcgtttaagctacttctcggatacctagtcgagtac

SEQ ID NO: 5754 - DNA, 40 bp, Artificial Sequence
  Synthetic Oligonucleotide
tatggcgtttaagcacttctcggttaacttgggcagttac

SEQ ID NO: 5755 - DNA, 40 bp, Artificial Sequence
  Synthetic Oligonucleotide
tatggcgtttaagcacttctcggtaacttgggcgagttac

SEQ ID NO: 5756 - DNA, 40 bp, Artificial Sequence
  Synthetic Oligonucleotide
tatggcgtttaagcacttctcggtaacttgggcagcttac

SEQ ID NO: 5757 - DNA, 40 bp, Artificial Sequence
  Synthetic Oligonucleotide
tatggcgttaaagcactttctgggataccgtggcagtaac

SEQ ID NO: 5758 - DNA, 40 bp, Artificial Sequence
  Synthetic Oligonucleotide
tatggcgttaaagcactttctcgggatacctggcagtaac

SEQ ID NO: 5759 - DNA, 40 bp, Artificial Sequence
  Synthetic Oligonucleotide
tatggcggttttaagcacttctcggtaacttgggcagtta

SEQ ID NO: 5760 - DNA, 40 bp, Artificial Sequence
  Synthetic Oligonucleotide
tatggcgctttaggtcacttctccggtacttggcagttac

SEQ ID NO: 5761 - DNA, 40 bp, Artificial Sequence
  Synthetic Oligonucleotide
tatggcgctttaagcacttctcggtaacttgggcagctta

SEQ ID NO: 5762 - DNA, 40 bp, Artificial Sequence
  Synthetic Oligonucleotide
tatggagcttttagcacttctcggtaacttgggcagttac

SEQ ID NO: 5763 - DNA, 40 bp, Artificial Sequence
  Synthetic Oligonucleotide
tatggagcttttaagcacttctcggtaacttggcagttac

SEQ ID NO: 5764 - DNA, 40 bp, Artificial Sequence
  Synthetic Oligonucleotide
tatggagcttttaagcacttccggtaacttgggcagttac

SEQ ID NO: 5765 - DNA, 40 bp, Artificial Sequence
  Synthetic Oligonucleotide
tatgcggctttaagcacttctcggtaacttgggcagttac

SEQ ID NO: 5766 - DNA, 40 bp, Artificial Sequence
  Synthetic Oligonucleotide
tatgcgctttaagcacttctcggtaacttgggcagcttac

SEQ ID NO: 5767 - DNA, 40 bp, Artificial Sequence
  Synthetic Oligonucleotide
tatgaggttttaagcacttctcggtaacttgggcagttac

SEQ ID NO: 5768 - DNA, 40 bp, Artificial Sequence
  Synthetic Oligonucleotide
tatgaggcttttaagcacttctcgtaacttgggcagttac

SEQ ID NO: 5769 - DNA, 40 bp, Artificial Sequence
  Synthetic Oligonucleotide
tatgagcttgtctttaatctcggcagtaggtgctcatggc

SEQ ID NO: 5770 - DNA, 40 bp, Artificial Sequence
  Synthetic Oligonucleotide
tatgacgctttaagcacttctcggtaacttgggcagttac

SEQ ID NO: 5771 - DNA, 40 bp, Artificial Sequence
  Synthetic Oligonucleotide
tatctgccagtcacatcaactatgatgacgcttgactgga

SEQ ID NO: 5772 - DNA, 40 bp, Artificial Sequence
  Synthetic Oligonucleotide
tatctcggaccttaaagccgttggtcccacaggattaccg

SEQ ID NO: 5773 - DNA, 40 bp, Artificial Sequence
  Synthetic Oligonucleotide
tatcgccagttcacatcaactatgatgacgcttgactgga

SEQ ID NO: 5774 - DNA, 40 bp, Artificial Sequence
  Synthetic Oligonucleotide
tatcgccagtcacatcaactactgatgacgcttgactgga

SEQ ID NO: 5775 - DNA, 40 bp, Artificial Sequence
  Synthetic Oligonucleotide
tatcgccagccacatcaactattgatgacgcttgactgga

SEQ ID NO: 5776 - DNA, 40 bp, Artificial Sequence
  Synthetic Oligonucleotide
tatcaattttcaagcactatcttgaacagaatgcgtttac

SEQ ID NO: 5777 - DNA, 40 bp, Artificial Sequence
  Synthetic Oligonucleotide
tataggcctgtcctttaatctcggcagagtgctcatgagc

SEQ ID NO: 5778 - DNA, 40 bp, Artificial Sequence
  Synthetic Oligonucleotide
tataagcttgtcttttaatctcggcagagtgctcatgagc

SEQ ID NO: 5779 - DNA, 40 bp, Artificial Sequence
  Synthetic Oligonucleotide
tataagctgtctttctaatctcggcagagtgctcatgagc

SEQ ID NO: 5780 - DNA, 40 bp, Artificial Sequence
  Synthetic Oligonucleotide
tataagcctgtcttttagtctcggcagagtgctcatgagc

SEQ ID NO: 5781 - DNA, 40 bp, Artificial Sequence
  Synthetic Oligonucleotide
tataagcctgtcttttaatctcggcggagtgcacatgagc

SEQ ID NO: 5782 - DNA, 40 bp, Artificial Sequence
  Synthetic Oligonucleotide
tataagcctgtcttttaatctcggccagatgctcatgagc

SEQ ID NO: 5783 - DNA, 40 bp, Artificial Sequence
  Synthetic Oligonucleotide
tataagcctgtcttttaatctcggcagagttcgcatgagc

SEQ ID NO: 5784 - DNA, 40 bp, Artificial Sequence
  Synthetic Oligonucleotide
tataagcctgtcttttaatctcggcagagtgctcatgaga

SEQ ID NO: 5785 - DNA, 40 bp, Artificial Sequence
  Synthetic Oligonucleotide
tataagcctgtcttttaatctcgcagagtgctcatgagcc

SEQ ID NO: 5786 - DNA, 40 bp, Artificial Sequence
  Synthetic Oligonucleotide
tataagcctgtcttttaactctcgcagagtgctcatgagc

SEQ ID NO: 5787 - DNA, 40 bp, Artificial Sequence
  Synthetic Oligonucleotide
tataagcctgtctttgaatctcggcagagtgctcatgagc

SEQ ID NO: 5788 - DNA, 40 bp, Artificial Sequence
  Synthetic Oligonucleotide
tataagcctgtctttaatctcggtacgagtgctcatgagc

SEQ ID NO: 5789 - DNA, 40 bp, Artificial Sequence
  Synthetic Oligonucleotide
tataagcctgtctttaatctcggcagagtgctcattgagc

SEQ ID NO: 5790 - DNA, 40 bp, Artificial Sequence
  Synthetic Oligonucleotide
tataagcctgtctttaatctcggcagagtgctacatgagc

SEQ ID NO: 5791 - DNA, 40 bp, Artificial Sequence
  Synthetic Oligonucleotide
tataagcctgtcctttaatctcggcagagtgctcatgagc

SEQ ID NO: 5792 - DNA, 40 bp, Artificial Sequence
  Synthetic Oligonucleotide
tataagcctgccttttaatctcggcaaagtgctcatgagc

SEQ ID NO: 5793 - DNA, 40 bp, Artificial Sequence
  Synthetic Oligonucleotide
tataacgcctgtctttaatctcggcagagtgctcatgagc

SEQ ID NO: 5794 - DNA, 40 bp, Artificial Sequence
  Synthetic Oligonucleotide
tagtcggtccgtactttcaggcgctatcctgatcacccga

SEQ ID NO: 5795 - DNA, 40 bp, Artificial Sequence
  Synthetic Oligonucleotide
tagtcgctagtcacatcaactatgatgacgcttgactgga

SEQ ID NO: 5796 - DNA, 40 bp, Artificial Sequence
  Synthetic Oligonucleotide
tagtcgatccgtactttcaggcgttatcctgatcacccga

SEQ ID NO: 5797 - DNA, 40 bp, Artificial Sequence
  Synthetic Oligonucleotide
tagtcgatccgtactttcaggcgctatcctgatcgcccga

SEQ ID NO: 5798 - DNA, 40 bp, Artificial Sequence
  Synthetic Oligonucleotide
tagtcgatccgtactttcaggcgctatcctgatcacacga

SEQ ID NO: 5799 - DNA, 40 bp, Artificial Sequence
  Synthetic Oligonucleotide
tagtcgatccgtactttcaggcgctatccctgaccaccga

SEQ ID NO: 5800 - DNA, 40 bp, Artificial Sequence
  Synthetic Oligonucleotide
tagtcgatccgtacttcaggtcgccatcctgatcacccga

SEQ ID NO: 5801 - DNA, 40 bp, Artificial Sequence
  Synthetic Oligonucleotide
tagtcgacccgtactttcaggcgctatcctgatcacccga

SEQ ID NO: 5802 - DNA, 40 bp, Artificial Sequence
  Synthetic Oligonucleotide
tagggtatccatgaaggactaccttcttactggaggcttg

SEQ ID NO: 5803 - DNA, 40 bp, Artificial Sequence
  Synthetic Oligonucleotide
tagggtacgatgaagagacccaatcgcccctctgtgcgca

SEQ ID NO: 5804 - DNA, 40 bp, Artificial Sequence
  Synthetic Oligonucleotide
taggggcttttaagcacttctcggtagcttgggcagttac

SEQ ID NO: 5805 - DNA, 40 bp, Artificial Sequence
  Synthetic Oligonucleotide
taggggctttaagcacttctcggtaaccttgggcagttac

SEQ ID NO: 5806 - DNA, 40 bp, Artificial Sequence
  Synthetic Oligonucleotide
tagggcgttttagacacttctcggtaacttgggcagttac

SEQ ID NO: 5807 - DNA, 40 bp, Artificial Sequence
  Synthetic Oligonucleotide
tagggcgttttaagcacttctcggtaactagggcagttac

SEQ ID NO: 5808 - DNA, 40 bp, Artificial Sequence
  Synthetic Oligonucleotide
taggcggttttaagcacttctcggtaacttggacagttac

SEQ ID NO: 5809 - DNA, 40 bp, Artificial Sequence
  Synthetic Oligonucleotide
taggcggttttaagcacttcccggtaacttgggcagttac

SEQ ID NO: 5810 - DNA, 40 bp, Artificial Sequence
  Synthetic Oligonucleotide
taggcctcgatcctcgcaccgcacacgatcccaatgtctg

SEQ ID NO: 5811 - DNA, 40 bp, Artificial Sequence
  Synthetic Oligonucleotide
tagcttacccatcgagctgagtctacgtctccatcaacgg

SEQ ID NO: 5812 - DNA, 40 bp, Artificial Sequence
  Synthetic Oligonucleotide
tagcgggcttttaagcacttctcggtaactgggcagttac

SEQ ID NO: 5813 - DNA, 40 bp, Artificial Sequence
  Synthetic Oligonucleotide
tagcgggctttaagcacttctcggtaacttgggcagttac

SEQ ID NO: 5814 - DNA, 40 bp, Artificial Sequence
  Synthetic Oligonucleotide
tagcggctttaagcacttctcggttaacttgggcagttac

SEQ ID NO: 5815 - DNA, 40 bp, Artificial Sequence
  Synthetic Oligonucleotide
tagcggctttaagcacttctcggtaacttgggcagcttac

SEQ ID NO: 5816 - DNA, 40 bp, Artificial Sequence
  Synthetic Oligonucleotide
tagcacagctcacttcgtctttgatcgaccacgctcataa

SEQ ID NO: 5817 - DNA, 40 bp, Artificial Sequence
  Synthetic Oligonucleotide
tactcgccagtcacatcaactatgatgaggcttgactgga

SEQ ID NO: 5818 - DNA, 40 bp, Artificial Sequence
  Synthetic Oligonucleotide
tactcgccagtcacatcaaccatgatgacgcttgactgga

SEQ ID NO: 5819 - DNA, 40 bp, Artificial Sequence
  Synthetic Oligonucleotide
tactcactagcctcctgtgttgccgcctcgagacagtttg

SEQ ID NO: 5820 - DNA, 40 bp, Artificial Sequence
  Synthetic Oligonucleotide
tactcaccagccacatcaactatgatgacgcttgactgga

SEQ ID NO: 5821 - DNA, 40 bp, Artificial Sequence
  Synthetic Oligonucleotide
tactatccgtttgtccgtcctcttgtggtattgcgcgtgc

SEQ ID NO: 5822 - DNA, 40 bp, Artificial Sequence
  Synthetic Oligonucleotide
tactatccgtttgtccgtcctcttgtggtattgcgcacgc

SEQ ID NO: 5823 - DNA, 40 bp, Artificial Sequence
  Synthetic Oligonucleotide
tactatccgtttgtccgtcctcctgtggtattgcgcatga

SEQ ID NO: 5824 - DNA, 40 bp, Artificial Sequence
  Synthetic Oligonucleotide
tactatccgttgtccgtcctcttgtggtattgcgcatgtc

SEQ ID NO: 5825 - DNA, 40 bp, Artificial Sequence
  Synthetic Oligonucleotide
tactatccgttgtccgatcctcttgtggtattgcgcatgc

SEQ ID NO: 5826 - DNA, 40 bp, Artificial Sequence
  Synthetic Oligonucleotide
tactatccgttagatccgtcactcactacgcgtatggatc

SEQ ID NO: 5827 - DNA, 40 bp, Artificial Sequence
  Synthetic Oligonucleotide
tactatccgtagatccgtcactcactacgcgtacggaatc

SEQ ID NO: 5828 - DNA, 40 bp, Artificial Sequence
  Synthetic Oligonucleotide
tactatccgcttgtccgtcctctcgtggtattgcgcatgc

SEQ ID NO: 5829 - DNA, 40 bp, Artificial Sequence
  Synthetic Oligonucleotide
tactactcgcatcgagcgttgtcaagctgagtgcaagtta

SEQ ID NO: 5830 - DNA, 40 bp, Artificial Sequence
  Synthetic Oligonucleotide
tactacccccgtcgagcgagtctactctcccatcaacggg

SEQ ID NO: 5831 - DNA, 40 bp, Artificial Sequence
  Synthetic Oligonucleotide
tactacccccaccgagcgagtctactctcccatcaacggg

SEQ ID NO: 5832 - DNA, 40 bp, Artificial Sequence
  Synthetic Oligonucleotide
tacgtcgcagcactatctccgttttaagaccgcaagttca

SEQ ID NO: 5833 - DNA, 40 bp, Artificial Sequence
  Synthetic Oligonucleotide
tacggggcttttaagcacttctggcaacttgggcagttac

SEQ ID NO: 5834 - DNA, 40 bp, Artificial Sequence
  Synthetic Oligonucleotide
tacggggctttgagcacttctcggtaacttgggcagttac

SEQ ID NO: 5835 - DNA, 40 bp, Artificial Sequence
  Synthetic Oligonucleotide
tacgggcttttaagcacttctcggtaacttgggcagttat

SEQ ID NO: 5836 - DNA, 40 bp, Artificial Sequence
  Synthetic Oligonucleotide
tacgggcttttaagcacttctcggtaacttgggcagctac

SEQ ID NO: 5837 - DNA, 40 bp, Artificial Sequence
  Synthetic Oligonucleotide
tacgggctttaagcacttctcggtaacttgggcagttacc

SEQ ID NO: 5838 - DNA, 40 bp, Artificial Sequence
  Synthetic Oligonucleotide
tacggaggccctcgtgttggactaccaacttgtagaacgg

SEQ ID NO: 5839 - DNA, 40 bp, Artificial Sequence
  Synthetic Oligonucleotide
tacctgtagtcgtcccgtgcgtgtgggtcgaaatgccgct

SEQ ID NO: 5840 - DNA, 40 bp, Artificial Sequence
  Synthetic Oligonucleotide
taccgtctcatcatcggacacgacgtgtatcagttggctg

SEQ ID NO: 5841 - DNA, 40 bp, Artificial Sequence
  Synthetic Oligonucleotide
taccgtctcatcatcagacacgacgtgtatcagttggctg

SEQ ID NO: 5842 - DNA, 40 bp, Artificial Sequence
  Synthetic Oligonucleotide
taccgggagtccctcctcgtcttgatgcactatcatctca

SEQ ID NO: 5843 - DNA, 40 bp, Artificial Sequence
  Synthetic Oligonucleotide
taccggcactggaggcgtccttggtggactaccacctttt

SEQ ID NO: 5844 - DNA, 40 bp, Artificial Sequence
  Synthetic Oligonucleotide
taccggcactggaggcgtccctggtggactaccacctcat

SEQ ID NO: 5845 - DNA, 40 bp, Artificial Sequence
  Synthetic Oligonucleotide
taccggaagtccctcctcgtcttgatgcgctatcatctca

SEQ ID NO: 5846 - DNA, 40 bp, Artificial Sequence
  Synthetic Oligonucleotide
taccggaagtccctccccgtcttgatgcgctatcatctca

SEQ ID NO: 5847 - DNA, 40 bp, Artificial Sequence
  Synthetic Oligonucleotide
taccggaagcccctcctcgtcttgatgcactatcatctca

SEQ ID NO: 5848 - DNA, 40 bp, Artificial Sequence
  Synthetic Oligonucleotide
taccgcctcggggcttagtactagactttgcgcatgacgt

SEQ ID NO: 5849 - DNA, 40 bp, Artificial Sequence
  Synthetic Oligonucleotide
taccgcctcattcatcggacacgacgtgtatcagttgctg

SEQ ID NO: 5850 - DNA, 40 bp, Artificial Sequence
  Synthetic Oligonucleotide
taccgcctcatcatcggccacgacgtgtatcagttggctg

SEQ ID NO: 5851 - DNA, 40 bp, Artificial Sequence
  Synthetic Oligonucleotide
taccgcctcatcatcggacgcaacgtgtatcagttggctg

SEQ ID NO: 5852 - DNA, 40 bp, Artificial Sequence
  Synthetic Oligonucleotide
taccgcctcatcatcggacacgacgtgtaatcagttgctg

SEQ ID NO: 5853 - DNA, 40 bp, Artificial Sequence
  Synthetic Oligonucleotide
taccgcctcatcaacggacacgacgtgtatcagttggctg

SEQ ID NO: 5854 - DNA, 40 bp, Artificial Sequence
  Synthetic Oligonucleotide
taccgacactggaggcgtccttggtggactaccaccttgt

SEQ ID NO: 5855 - DNA, 40 bp, Artificial Sequence
  Synthetic Oligonucleotide
tacccgtcttctcgaatcgtcgatctggctcgcctcccta

SEQ ID NO: 5856 - DNA, 40 bp, Artificial Sequence
  Synthetic Oligonucleotide
tacccgccagtcacatcaactatgatgacgcttgactgga

SEQ ID NO: 5857 - DNA, 40 bp, Artificial Sequence
  Synthetic Oligonucleotide
tacatggcaagatccgccttggtcctctaccacccgggtg

SEQ ID NO: 5858 - DNA, 40 bp, Artificial Sequence
  Synthetic Oligonucleotide
tacagtggccctcgtgttggactaccaacttgtagagcgg

SEQ ID NO: 5859 - DNA, 40 bp, Artificial Sequence
  Synthetic Oligonucleotide
tacagaggtcctcgtgttggactaccaacttgtagaacgg

SEQ ID NO: 5860 - DNA, 40 bp, Artificial Sequence
  Synthetic Oligonucleotide
tacagaggccctcgttttggactaccaacttgtagaacgg

SEQ ID NO: 5861 - DNA, 40 bp, Artificial Sequence
  Synthetic Oligonucleotide
tacagaggccctcgtgttggactacctacttgtagaacgg

SEQ ID NO: 5862 - DNA, 40 bp, Artificial Sequence
  Synthetic Oligonucleotide
tacagaggccctcgcgttggactaccaacttgtagagcgg

SEQ ID NO: 5863 - DNA, 40 bp, Artificial Sequence
  Synthetic Oligonucleotide
tacagaggcccctcgtgttggactacaacttgtagaacgg

SEQ ID NO: 5864 - DNA, 40 bp, Artificial Sequence
  Synthetic Oligonucleotide
tacagagccctcgtgttggactaccaacgttgtagagcgg

SEQ ID NO: 5865 - DNA, 40 bp, Artificial Sequence
  Synthetic Oligonucleotide
taatggggctttaagcacttctcggtaacttggcagttac

SEQ ID NO: 5866 - DNA, 40 bp, Artificial Sequence
  Synthetic Oligonucleotide
taatgggctttaagtcacttctcggtaacttggcagttac

SEQ ID NO: 5867 - DNA, 40 bp, Artificial Sequence
  Synthetic Oligonucleotide
taatgggctttaagcacttcgtcggtaacttggcagttac

SEQ ID NO: 5868 - DNA, 40 bp, Artificial Sequence
  Synthetic Oligonucleotide
taatgcttggtctcctgtcgactctgcggctgagactact

SEQ ID NO: 5869 - DNA, 40 bp, Artificial Sequence
  Synthetic Oligonucleotide
taatccggtacttatcatgcgctatcatgacggctaggac

SEQ ID NO: 5870 - DNA, 40 bp, Artificial Sequence
  Synthetic Oligonucleotide
taacttgcgtgcttaggtacccggtcactcctgcacgggt

SEQ ID NO: 5871 - DNA, 40 bp, Artificial Sequence
  Synthetic Oligonucleotide
taacttatataggtttgcgcctgtgttcttcctgtggccg

SEQ ID NO: 5872 - DNA, 40 bp, Artificial Sequence
  Synthetic Oligonucleotide
taaccggggcccgcctcgagctagctacctccattgtctg

SEQ ID NO: 5873 - DNA, 40 bp, Artificial Sequence
  Synthetic Oligonucleotide
taaccggggcccgcctcaagctagcttcctccattgtctg

SEQ ID NO: 5874 - DNA, 40 bp, Artificial Sequence
  Synthetic Oligonucleotide
taaccggggcccgcctcaagctagctacctccactgtctg

SEQ ID NO: 5875 - DNA, 40 bp, Artificial Sequence
  Synthetic Oligonucleotide
taaatctggtcctccttcggtcttagctgctgggaccacc

SEQ ID NO: 5876 - DNA, 40 bp, Artificial Sequence
  Synthetic Oligonucleotide
gttgtttcctcgtcattcacggactaccgcgataaatggc

SEQ ID NO: 5877 - DNA, 40 bp, Artificial Sequence
  Synthetic Oligonucleotide
gttctcgcctctgtcctcatggttcgaaccggtatgcgta

SEQ ID NO: 5878 - DNA, 40 bp, Artificial Sequence
  Synthetic Oligonucleotide
gttctcgcctctgtcctcatggctcgaaccggcatgcatg

SEQ ID NO: 5879 - DNA, 40 bp, Artificial Sequence
  Synthetic Oligonucleotide
gttctcgcccctgtcctcatggttcgaaccggtatgcatg

SEQ ID NO: 5880 - DNA, 40 bp, Artificial Sequence
  Synthetic Oligonucleotide
gttaatcccagcgacttcggtggtgtcctctccattacca

SEQ ID NO: 5881 - DNA, 40 bp, Artificial Sequence
  Synthetic Oligonucleotide
gtgtccttatccgcgtctaccgctcgtcttgccacgtctg

SEQ ID NO: 5882 - DNA, 40 bp, Artificial Sequence
  Synthetic Oligonucleotide
gtggtttcttctcctgactacatgaggttaataaacgcgc

SEQ ID NO: 5883 - DNA, 40 bp, Artificial Sequence
  Synthetic Oligonucleotide
gtggtccatgagcttctggcatctatccagttgacgctca

SEQ ID NO: 5884 - DNA, 40 bp, Artificial Sequence
  Synthetic Oligonucleotide
gtggtccatgagcttctggcactatccagttgacgcctca

SEQ ID NO: 5885 - DNA, 40 bp, Artificial Sequence
  Synthetic Oligonucleotide
gtggaaattctacggcctccgggttgcaacatttcccgtt

SEQ ID NO: 5886 - DNA, 40 bp, Artificial Sequence
  Synthetic Oligonucleotide
gtgatacttaccacctgacatcgcggaagactaatcggtt

SEQ ID NO: 5887 - DNA, 40 bp, Artificial Sequence
  Synthetic Oligonucleotide
gtgagaagcgtgtgagaggctactctgtttgtaacgcaat

SEQ ID NO: 5888 - DNA, 40 bp, Artificial Sequence
  Synthetic Oligonucleotide
gtgaagtcgaaccgcctcgatcctcttcgtctacgtcctc

SEQ ID NO: 5889 - DNA, 40 bp, Artificial Sequence
  Synthetic Oligonucleotide
gtcttatccggcaggacgtctttcgtgcgctatcacgatt

SEQ ID NO: 5890 - DNA, 40 bp, Artificial Sequence
  Synthetic Oligonucleotide
gtcgtgcttaccaccctgacatcgcggggaactaatggtt

SEQ ID NO: 5891 - DNA, 40 bp, Artificial Sequence
  Synthetic Oligonucleotide
gtcgtgacttaccacctgacatcgcggggaactaatggtt

SEQ ID NO: 5892 - DNA, 40 bp, Artificial Sequence
  Synthetic Oligonucleotide
gtcgtacttaccactctgacatcgcggggaactaatggtt

SEQ ID NO: 5893 - DNA, 40 bp, Artificial Sequence
  Synthetic Oligonucleotide
gtcgtacttaccacctgacatcgcgggggaattaatggtt

SEQ ID NO: 5894 - DNA, 40 bp, Artificial Sequence
  Synthetic Oligonucleotide
gtcgtacttaccacctgacatcgcggggaactaatcggtt

SEQ ID NO: 5895 - DNA, 40 bp, Artificial Sequence
  Synthetic Oligonucleotide
gtcgtacttaccacctgacatcgcggggaacctaatggtt

SEQ ID NO: 5896 - DNA, 40 bp, Artificial Sequence
  Synthetic Oligonucleotide
gtcgtacttaccacctgacatcgcggggaaactaatggtt

SEQ ID NO: 5897 - DNA, 40 bp, Artificial Sequence
  Synthetic Oligonucleotide
gtcgtacttaccacccttgacatcgcgggaactaatggtt

SEQ ID NO: 5898 - DNA, 40 bp, Artificial Sequence
  Synthetic Oligonucleotide
gtcgtacttaccaccctgatatcgcggggaactaatggtt

SEQ ID NO: 5899 - DNA, 40 bp, Artificial Sequence
  Synthetic Oligonucleotide
gtcgtacttaccaccctgacatcgtggggaactaatggtt

SEQ ID NO: 5900 - DNA, 40 bp, Artificial Sequence
  Synthetic Oligonucleotide
gtcgtacttaccaccctgacatcgcggggagctaatggct

SEQ ID NO: 5901 - DNA, 40 bp, Artificial Sequence
  Synthetic Oligonucleotide
gtcgtacttaccaccctgacatcgcggggaatatagtcgt

SEQ ID NO: 5902 - DNA, 40 bp, Artificial Sequence
  Synthetic Oligonucleotide
gtcgtacttaccaccctgacatcgcggggaactaatagtt

SEQ ID NO: 5903 - DNA, 40 bp, Artificial Sequence
  Synthetic Oligonucleotide
gtcgtacttaccaccctgacatcgcggggaactaacggtt

SEQ ID NO: 5904 - DNA, 40 bp, Artificial Sequence
  Synthetic Oligonucleotide
gtcgtacttaccaccctgacatcgcgggaatctaatggtt

SEQ ID NO: 5905 - DNA, 40 bp, Artificial Sequence
  Synthetic Oligonucleotide
gtcgtacttaccaccctgacatcgcgggaacttaatggtt

SEQ ID NO: 5906 - DNA, 40 bp, Artificial Sequence
  Synthetic Oligonucleotide
gtcgtacttaccaccctgacaacgcggggaactaatggtt

SEQ ID NO: 5907 - DNA, 40 bp, Artificial Sequence
  Synthetic Oligonucleotide
gtcgtacttaccaccccgacatcgcggggaactaatggtt

SEQ ID NO: 5908 - DNA, 40 bp, Artificial Sequence
  Synthetic Oligonucleotide
gtcgtacttacaccctgacatcgcggggaactaagtggtt

SEQ ID NO: 5909 - DNA, 40 bp, Artificial Sequence
  Synthetic Oligonucleotide
gtcgtacctaccacctgacatcgcgggggaactaatggtt

SEQ ID NO: 5910 - DNA, 40 bp, Artificial Sequence
  Synthetic Oligonucleotide
gtcggtacttaccacctgacatcgcggggaactaatggtt

SEQ ID NO: 5911 - DNA, 40 bp, Artificial Sequence
  Synthetic Oligonucleotide
gtcgcattaccaccctgacatcgcgggggaactaatggtt

SEQ ID NO: 5912 - DNA, 40 bp, Artificial Sequence
  Synthetic Oligonucleotide
gtcgcacttaccaccctgacatcgcggggaactgatggtt

SEQ ID NO: 5913 - DNA, 40 bp, Artificial Sequence
  Synthetic Oligonucleotide
gtcgatgacgcctcgatcctcgcataatatgatacgtctg

SEQ ID NO: 5914 - DNA, 40 bp, Artificial Sequence
  Synthetic Oligonucleotide
gtcgagcattgggtcggtttggtggggactaccccttgta

SEQ ID NO: 5915 - DNA, 40 bp, Artificial Sequence
  Synthetic Oligonucleotide
gtcgaatcgcctcgatctcgatataatatgatacgtctga

SEQ ID NO: 5916 - DNA, 40 bp, Artificial Sequence
  Synthetic Oligonucleotide
gtccgtcgtcccgttttaggtgttacgttgaatctcgttc

SEQ ID NO: 5917 - DNA, 40 bp, Artificial Sequence
  Synthetic Oligonucleotide
gtccgggacgcctcgatcctcgcataatatgatacggctg

SEQ ID NO: 5918 - DNA, 40 bp, Artificial Sequence
  Synthetic Oligonucleotide
gtccgggacgcctcgatcctcgcataatacgatacgtctg

SEQ ID NO: 5919 - DNA, 40 bp, Artificial Sequence
  Synthetic Oligonucleotide
gtccggagcgcctcgatcctcgcataatataatacgtctg

SEQ ID NO: 5920 - DNA, 40 bp, Artificial Sequence
  Synthetic Oligonucleotide
gtccggagcgccccgatcctcgcataatatgatacgtctg

SEQ ID NO: 5921 - DNA, 40 bp, Artificial Sequence
  Synthetic Oligonucleotide
gtccggaatgccttgatcctcgcataatatgatacgtctg

SEQ ID NO: 5922 - DNA, 40 bp, Artificial Sequence
  Synthetic Oligonucleotide
gtccggaacgcctcggatcctcgcatatatgatacgtctg

SEQ ID NO: 5923 - DNA, 40 bp, Artificial Sequence
  Synthetic Oligonucleotide
gtccggaacgcctcgatcctcgccatatatgatacgtctg

SEQ ID NO: 5924 - DNA, 40 bp, Artificial Sequence
  Synthetic Oligonucleotide
gtccggaacgcctcgatcctcgcataatatgctacgtctg

SEQ ID NO: 5925 - DNA, 40 bp, Artificial Sequence
  Synthetic Oligonucleotide
gtccggaacgcctcgagtcctcgcatatatgatacgtctg

SEQ ID NO: 5926 - DNA, 40 bp, Artificial Sequence
  Synthetic Oligonucleotide
gtccggaacgccacgatcctcgcacaatatgatacgtctg

SEQ ID NO: 5927 - DNA, 40 bp, Artificial Sequence
  Synthetic Oligonucleotide
gtccgaagcgcttcgatcctcgcataatatgatacgtctg

SEQ ID NO: 5928 - DNA, 40 bp, Artificial Sequence
  Synthetic Oligonucleotide
gtccctggtacgcctcgattccgcccatacatgcatgtaa

SEQ ID NO: 5929 - DNA, 40 bp, Artificial Sequence
  Synthetic Oligonucleotide
gtccatgtacgcctcgatttccgcccatacatgcatgtaa

SEQ ID NO: 5930 - DNA, 40 bp, Artificial Sequence
  Synthetic Oligonucleotide
gtccatggtacgcctcggttccgccatacatgcatggtaa

SEQ ID NO: 5931 - DNA, 40 bp, Artificial Sequence
  Synthetic Oligonucleotide
gtccatggtacgcctcgattcgcccatacgatgcatgtaa

SEQ ID NO: 5932 - DNA, 40 bp, Artificial Sequence
  Synthetic Oligonucleotide
gtccatggtacgcctcgattccgctcatacgtgcatgtaa

SEQ ID NO: 5933 - DNA, 40 bp, Artificial Sequence
  Synthetic Oligonucleotide
gtccatggtacgcctcgattccgcctatacatgcatgtat

SEQ ID NO: 5934 - DNA, 40 bp, Artificial Sequence
  Synthetic Oligonucleotide
gtccatggtacgcctcgattccgcccgaacatgcatgtaa

SEQ ID NO: 5935 - DNA, 40 bp, Artificial Sequence
  Synthetic Oligonucleotide
gtccatggtacgcctcgattccgcccatgcatgcatgtag

SEQ ID NO: 5936 - DNA, 40 bp, Artificial Sequence
  Synthetic Oligonucleotide
gtccatggtacgcctcgattccgcccatacatgcaagtaa

SEQ ID NO: 5937 - DNA, 40 bp, Artificial Sequence
  Synthetic Oligonucleotide
gtccatggtacgcctcgattccgcccatacatgaatgtaa

SEQ ID NO: 5938 - DNA, 40 bp, Artificial Sequence
  Synthetic Oligonucleotide
gtccatggtacgcctcgattccgcccatacaagcatgtaa

SEQ ID NO: 5939 - DNA, 40 bp, Artificial Sequence
  Synthetic Oligonucleotide
gtccatggtacgcctcgattccgcccataatgacatgtaa

SEQ ID NO: 5940 - DNA, 40 bp, Artificial Sequence
  Synthetic Oligonucleotide
gtccatggtacgcctcgattccgcccaaacatacatgtaa

SEQ ID NO: 5941 - DNA, 40 bp, Artificial Sequence
  Synthetic Oligonucleotide
gtccatggtacgcctcgattccgccatatcatgcatgtaa

SEQ ID NO: 5942 - DNA, 40 bp, Artificial Sequence
  Synthetic Oligonucleotide
gtccatggtacgcctcgatccctcccgtacatgcatgtaa

SEQ ID NO: 5943 - DNA, 40 bp, Artificial Sequence
  Synthetic Oligonucleotide
gtccatggtacgcctcgactccgcccatacatgcagttac

SEQ ID NO: 5944 - DNA, 40 bp, Artificial Sequence
  Synthetic Oligonucleotide
gtccatggtacgcctcgaatccgcccatacatgcatgtaa

SEQ ID NO: 5945 - DNA, 40 bp, Artificial Sequence
  Synthetic Oligonucleotide
gtccatggtacgccccgatcccgcccatacatgcatgtaa

SEQ ID NO: 5946 - DNA, 40 bp, Artificial Sequence
  Synthetic Oligonucleotide
gtccatggtacacctcgattccgcccgtacatgcatgtaa

SEQ ID NO: 5947 - DNA, 40 bp, Artificial Sequence
  Synthetic Oligonucleotide
gtccatggcacgcctcgatcccgcccatacatgcatgtaa

SEQ ID NO: 5948 - DNA, 40 bp, Artificial Sequence
  Synthetic Oligonucleotide
gtccatccgcttgtccgtcctcttgtggtattgcgcatgc

SEQ ID NO: 5949 - DNA, 40 bp, Artificial Sequence
  Synthetic Oligonucleotide
gtccaagacgattgtcgttattgccggactacctgcattt

SEQ ID NO: 5950 - DNA, 40 bp, Artificial Sequence
  Synthetic Oligonucleotide
gtcatgggctttagctcacttctcgtacttgggcagttac

SEQ ID NO: 5951 - DNA, 40 bp, Artificial Sequence
  Synthetic Oligonucleotide
gtcatgggctttagctcacttctcgtacttggacagttac

SEQ ID NO: 5952 - DNA, 40 bp, Artificial Sequence
  Synthetic Oligonucleotide
gtcatgggctttaagcgacttctcgtaacttggcagttac

SEQ ID NO: 5953 - DNA, 40 bp, Artificial Sequence
  Synthetic Oligonucleotide
gtcatctagcattttactagactactcgtaatacacacaa

SEQ ID NO: 5954 - DNA, 40 bp, Artificial Sequence
  Synthetic Oligonucleotide
gtcactataccgctgcgtgtccgtcatctctcgttgctgt

SEQ ID NO: 5955 - DNA, 40 bp, Artificial Sequence
  Synthetic Oligonucleotide
gtcaccgctggtcgaggagtcgttgtgcgctatcacatct

SEQ ID NO: 5956 - DNA, 40 bp, Artificial Sequence
  Synthetic Oligonucleotide
gtatttctgtgcgcacgccccgcctcgatcaccaataaag

SEQ ID NO: 5957 - DNA, 40 bp, Artificial Sequence
  Synthetic Oligonucleotide
gtatggggcttttaagcacttctcgtacttgggcagttac

SEQ ID NO: 5958 - DNA, 40 bp, Artificial Sequence
  Synthetic Oligonucleotide
gtatgggcttttaagcacttcggtaacttgggtcagttac

SEQ ID NO: 5959 - DNA, 40 bp, Artificial Sequence
  Synthetic Oligonucleotide
gtatgggcttttaagcactctcggtaacttgggcagttac

SEQ ID NO: 5960 - DNA, 40 bp, Artificial Sequence
  Synthetic Oligonucleotide
gtatgggctttaagcacttctcgtaacttgggtcagttac

SEQ ID NO: 5961 - DNA, 40 bp, Artificial Sequence
  Synthetic Oligonucleotide
gtatgggctttaagcacttctcggtaacttgggtagttac

SEQ ID NO: 5962 - DNA, 40 bp, Artificial Sequence
  Synthetic Oligonucleotide
gtatgggctttaagcacttctcggtaacttggacagttac

SEQ ID NO: 5963 - DNA, 40 bp, Artificial Sequence
  Synthetic Oligonucleotide
gtatgggcgttttaagcactctcggtaacctggcgagtac

SEQ ID NO: 5964 - DNA, 40 bp, Artificial Sequence
  Synthetic Oligonucleotide
gtatcgccagtcacatcaactatgatgacgcttgactgga

SEQ ID NO: 5965 - DNA, 40 bp, Artificial Sequence
  Synthetic Oligonucleotide
gtatccctgatgatccgaattctcatcggctggcactatc

SEQ ID NO: 5966 - DNA, 40 bp, Artificial Sequence
  Synthetic Oligonucleotide
gtagcgctgacgcgtcttcgctctcaagaccgtgcatgga

SEQ ID NO: 5967 - DNA, 40 bp, Artificial Sequence
  Synthetic Oligonucleotide
gtacatggtacgcctcgattccgcccatacatgcatgtaa

SEQ ID NO: 5968 - DNA, 40 bp, Artificial Sequence
  Synthetic Oligonucleotide
gtaataaccttccgttactcgcctcaggcaagtgtgcgca

SEQ ID NO: 5969 - DNA, 40 bp, Artificial Sequence
  Synthetic Oligonucleotide
gtaaatattcacgttgagtcgccttgctcctcttagtctg

SEQ ID NO: 5970 - DNA, 40 bp, Artificial Sequence
  Synthetic Oligonucleotide
gtaaatattcacgttgaatcgccttactcctcttagtctg

SEQ ID NO: 5971 - DNA, 40 bp, Artificial Sequence
  Synthetic Oligonucleotide
gtaaatattcacgttaaatcgcctcgctcctcttagtctg

SEQ ID NO: 5972 - DNA, 40 bp, Artificial Sequence
  Synthetic Oligonucleotide
gtaaatatcacgttgaatcgcctttgctcctcttagtctg

SEQ ID NO: 5973 - DNA, 40 bp, Artificial Sequence
  Synthetic Oligonucleotide
ggtgatccttcccccgcctcgaagatttgtgcactatatc

SEQ ID NO: 5974 - DNA, 40 bp, Artificial Sequence
  Synthetic Oligonucleotide
ggtgatcctccccccgcctcgaagatttgtgcacatatcc

SEQ ID NO: 5975 - DNA, 40 bp, Artificial Sequence
  Synthetic Oligonucleotide
ggtgatcctcccccccgccttgaagatctgtgcacatatc

SEQ ID NO: 5976 - DNA, 40 bp, Artificial Sequence
  Synthetic Oligonucleotide
ggtgatccctccccccgcctcgaagatttgtgcgcatatc

SEQ ID NO: 5977 - DNA, 40 bp, Artificial Sequence
  Synthetic Oligonucleotide
ggtcttcattgactacaatgatcacgacaaacaatcgagc

SEQ ID NO: 5978 - DNA, 40 bp, Artificial Sequence
  Synthetic Oligonucleotide
ggtccggtatgcgtgcgtttttcttgtgccaccaggatga

SEQ ID NO: 5979 - DNA, 40 bp, Artificial Sequence
  Synthetic Oligonucleotide
ggtatgggctttaagcacttctcggtaacttggcagttac

SEQ ID NO: 5980 - DNA, 40 bp, Artificial Sequence
  Synthetic Oligonucleotide
gggtatctgatatgctgttatatttttgggaacctctctt

SEQ ID NO: 5981 - DNA, 40 bp, Artificial Sequence
  Synthetic Oligonucleotide
gggtatctgatatgctgttatatttttcggaacctctctt

SEQ ID NO: 5982 - DNA, 40 bp, Artificial Sequence
  Synthetic Oligonucleotide
ggcggccgactcgcctcgatgctccacgcaacgttacgaa

SEQ ID NO: 5983 - DNA, 40 bp, Artificial Sequence
  Synthetic Oligonucleotide
ggcctcgattcctcaggtctcgtgatccgtgcaattgcat

SEQ ID NO: 5984 - DNA, 40 bp, Artificial Sequence
  Synthetic Oligonucleotide
ggccgtaacccctctctaggcgcctctattggattcacgt

SEQ ID NO: 5985 - DNA, 40 bp, Artificial Sequence
  Synthetic Oligonucleotide
ggcccgttgttggttgatttgcgcgtactagtgccatcga

SEQ ID NO: 5986 - DNA, 40 bp, Artificial Sequence
  Synthetic Oligonucleotide
ggcccgttgtgggttgatttgcgcgtaccagtgccatcga

SEQ ID NO: 5987 - DNA, 40 bp, Artificial Sequence
  Synthetic Oligonucleotide
ggcacgcggaaagtcacacgagctatcgtgacgctggctt

SEQ ID NO: 5988 - DNA, 40 bp, Artificial Sequence
  Synthetic Oligonucleotide
ggagaatttcgtaggctactactgattacatctttccaca

SEQ ID NO: 5989 - DNA, 40 bp, Artificial Sequence
  Synthetic Oligonucleotide
gctggtaggctacctgctctatgtcgtggggagtaacagt

SEQ ID NO: 5990 - DNA, 40 bp, Artificial Sequence
  Synthetic Oligonucleotide
gctggagttccacgcacgcggattgtacccgaactgggtt

SEQ ID NO: 5991 - DNA, 40 bp, Artificial Sequence
  Synthetic Oligonucleotide
gctgaccttcgtctagcggcgctctgtggtaagattctat

SEQ ID NO: 5992 - DNA, 40 bp, Artificial Sequence
  Synthetic Oligonucleotide
gctgaccattcgtctagtgagtcaccttagttcatcaagc

SEQ ID NO: 5993 - DNA, 40 bp, Artificial Sequence
  Synthetic Oligonucleotide
gctcttatccggcaggactctttcgtgcactatcacgatt

SEQ ID NO: 5994 - DNA, 40 bp, Artificial Sequence
  Synthetic Oligonucleotide
gctattgtgcgcttatggagccgggtaccttccagcaagg

SEQ ID NO: 5995 - DNA, 40 bp, Artificial Sequence
  Synthetic Oligonucleotide
gctagggcttttacgcacgcggattgtaccgaactgggtt

SEQ ID NO: 5996 - DNA, 40 bp, Artificial Sequence
  Synthetic Oligonucleotide
gctaggcttttcacgcacgcggattgtaccgaactgggtt

SEQ ID NO: 5997 - DNA, 40 bp, Artificial Sequence
  Synthetic Oligonucleotide
gctaggcttttaagcacttctcggtaacttgggcagttac

SEQ ID NO: 5998 - DNA, 40 bp, Artificial Sequence
  Synthetic Oligonucleotide
gctaggctttcgcgcacgcggattgtacccgaactgggtc

SEQ ID NO: 5999 - DNA, 40 bp, Artificial Sequence
  Synthetic Oligonucleotide
gctaggctttcacgctcgcggattgtacccgaactgggtt

SEQ ID NO: 6000 - DNA, 40 bp, Artificial Sequence
  Synthetic Oligonucleotide
gctaggctttcacgcccgcggattgtacccgaactgggtt

SEQ ID NO: 6001 - DNA, 40 bp, Artificial Sequence
  Synthetic Oligonucleotide
gctaggctttcacgcatgcggattgtacccgaactgggtt

SEQ ID NO: 6002 - DNA, 40 bp, Artificial Sequence
  Synthetic Oligonucleotide
gctaggctttcacgcacgtggattgtacccgaactgggtt

SEQ ID NO: 6003 - DNA, 40 bp, Artificial Sequence
  Synthetic Oligonucleotide
gctaggctttcacgcacgcgtattgtacccgaactgggtt

SEQ ID NO: 6004 - DNA, 40 bp, Artificial Sequence
  Synthetic Oligonucleotide
gctaggctttcacgcacgcgggattgtaccgaactgggtt

SEQ ID NO: 6005 - DNA, 40 bp, Artificial Sequence
  Synthetic Oligonucleotide
gctaggctttcacgcacgcgggactgtaccgaactgggtc

SEQ ID NO: 6006 - DNA, 40 bp, Artificial Sequence
  Synthetic Oligonucleotide
gctaggctttcacgcacgcggattgtaccggactagggtt

SEQ ID NO: 6007 - DNA, 40 bp, Artificial Sequence
  Synthetic Oligonucleotide
gctaggctttcacgcacgcggattgtaccgaactagggtt

SEQ ID NO: 6008 - DNA, 40 bp, Artificial Sequence
  Synthetic Oligonucleotide
gctaggctttcacgcacgcggattgtacccgatctgggtt

SEQ ID NO: 6009 - DNA, 40 bp, Artificial Sequence
  Synthetic Oligonucleotide
gctaggctttcacgcacgcggattgtacccgaactgggat

SEQ ID NO: 6010 - DNA, 40 bp, Artificial Sequence
  Synthetic Oligonucleotide
gctaggctttcacgcacgcggattgtaaccgaactgggtt

SEQ ID NO: 6011 - DNA, 40 bp, Artificial Sequence
  Synthetic Oligonucleotide
gctaggctttcacgcacgcggattatacccgaactgggtt

SEQ ID NO: 6012 - skipped

SEQ ID NO: 6013 - DNA, 40 bp, Artificial Sequence
  Synthetic Oligonucleotide
gctaggctttcacgcacgcggatagtacccgaactgggtt

SEQ ID NO: 6014 - DNA, 40 bp, Artificial Sequence
  Synthetic Oligonucleotide
gctaggctttcacgcacgcggactatacccgaactgggtt

SEQ ID NO: 6015 - DNA, 40 bp, Artificial Sequence
  Synthetic Oligonucleotide
gctaggctttcacgcacgcggaatgtacccgaactgggtt

SEQ ID NO: 6016 - DNA, 40 bp, Artificial Sequence
  Synthetic Oligonucleotide
gctaggctttcaccgcacgcgggatgtaccgaactgggtt

SEQ ID NO: 6017 - DNA, 40 bp, Artificial Sequence
  Synthetic Oligonucleotide
gctaggcttccgcgcacgcggattgtacccgaactgggtt

SEQ ID NO: 6018 - DNA, 40 bp, Artificial Sequence
  Synthetic Oligonucleotide
gctaggcttccacgcacgcggactgtacccgaactgggtt

SEQ ID NO: 6019 - DNA, 40 bp, Artificial Sequence
  Synthetic Oligonucleotide
gctaggcttcacgcacgcggattgtacccgaactcgggtt

SEQ ID NO: 6020 - DNA, 40 bp, Artificial Sequence
  Synthetic Oligonucleotide
gctaggcattcacgcacgcggattgtacccgaactgggtt

SEQ ID NO: 6021 - DNA, 40 bp, Artificial Sequence
  Synthetic Oligonucleotide
gctagcttcgacgcacgcggattgtacccgaactcgggtt

SEQ ID NO: 6022 - DNA, 40 bp, Artificial Sequence
  Synthetic Oligonucleotide
gctaccttcgtctagcggtgctctgtgataagattctact

SEQ ID NO: 6023 - DNA, 40 bp, Artificial Sequence
  Synthetic Oligonucleotide
gctaccttcgtccagctaatcgtctgatctgcgacgaggg

SEQ ID NO: 6024 - DNA, 40 bp, Artificial Sequence
  Synthetic Oligonucleotide
gctaccatcgtctagtgagtcacccttagttcatcgaggc

SEQ ID NO: 6025 - DNA, 40 bp, Artificial Sequence
  Synthetic Oligonucleotide
gctaccatcgtctagtgagccacccttagttcatcaaggc

SEQ ID NO: 6026 - DNA, 40 bp, Artificial Sequence
  Synthetic Oligonucleotide
gcgttttcttctcctgactacatgagattaataaacgcgc

SEQ ID NO: 6027 - DNA, 40 bp, Artificial Sequence
  Synthetic Oligonucleotide
gcgtttgcttctcctgactacatgagattaataaacacgc

SEQ ID NO: 6028 - DNA, 40 bp, Artificial Sequence
  Synthetic Oligonucleotide
gcgtttcttctcgtgactacatgagaattaataaacgcgc

SEQ ID NO: 6029 - DNA, 40 bp, Artificial Sequence
  Synthetic Oligonucleotide
gcgtttcttctcctgactacatgagattaataaactgcgc

SEQ ID NO: 6030 - DNA, 40 bp, Artificial Sequence
  Synthetic Oligonucleotide
gcgtttcttctcctgactacatgagattaataaacgcgtc

SEQ ID NO: 6031 - DNA, 40 bp, Artificial Sequence
  Synthetic Oligonucleotide
gcgtttcttctcctgactacatgagattaataaacgacgc

SEQ ID NO: 6032 - DNA, 40 bp, Artificial Sequence
  Synthetic Oligonucleotide
gcgtttcttctcctgactacatgagattaactaaacgcgc

SEQ ID NO: 6033 - DNA, 40 bp, Artificial Sequence
  Synthetic Oligonucleotide
gcgtttcttctcctgactacatgagaattaataaacgcgc

SEQ ID NO: 6034 - DNA, 40 bp, Artificial Sequence
  Synthetic Oligonucleotide
gcgtttcgttctcctgactacatgagattaataaacgcgc

SEQ ID NO: 6035 - DNA, 40 bp, Artificial Sequence
  Synthetic Oligonucleotide
gcgtttcgtctcctgactacatgagattaataaacgcgtc

SEQ ID NO: 6036 - DNA, 40 bp, Artificial Sequence
  Synthetic Oligonucleotide
gcgttgtcttctcctgactacatgagattaataaacgcgc

SEQ ID NO: 6037 - DNA, 40 bp, Artificial Sequence
  Synthetic Oligonucleotide
gcgttcttctccttgactcacatgagattaataaacgcgc

SEQ ID NO: 6038 - DNA, 40 bp, Artificial Sequence
  Synthetic Oligonucleotide
gcgttcttctccttgactacatgagattaataaactgcgc

SEQ ID NO: 6039 - DNA, 40 bp, Artificial Sequence
  Synthetic Oligonucleotide
gcgttcttctcctgactacatgagtattaataaactgcgc

SEQ ID NO: 6040 - DNA, 40 bp, Artificial Sequence
  Synthetic Oligonucleotide
gcgtccatgacgcttctggcatctatccagttgacgctca

SEQ ID NO: 6041 - DNA, 40 bp, Artificial Sequence
  Synthetic Oligonucleotide
gcgtaggcttcacgcacgcggattgtacccgaactgggtt

SEQ ID NO: 6042 - DNA, 40 bp, Artificial Sequence
  Synthetic Oligonucleotide
gcgtagctttcacgcacgcggattgtacccgaactgggtt

SEQ ID NO: 6043 - DNA, 40 bp, Artificial Sequence
  Synthetic Oligonucleotide
gcggttttttctcctgactacatgagattaataaacgcgc

SEQ ID NO: 6044 - DNA, 40 bp, Artificial Sequence
  Synthetic Oligonucleotide
gcggttttctctcctgactacatgagattaataaacgcgc

SEQ ID NO: 6045 - DNA, 40 bp, Artificial Sequence
  Synthetic Oligonucleotide
gcggtttcttctcttgactacatgagattaataaacgcgc

SEQ ID NO: 6046 - DNA, 40 bp, Artificial Sequence
  Synthetic Oligonucleotide
gcggtttcttctctcgactacatgagattaataaacgcgc

SEQ ID NO: 6047 - DNA, 40 bp, Artificial Sequence
  Synthetic Oligonucleotide
gcggtttcttctcctgtctacatgagattaataaacgcgc

SEQ ID NO: 6048 - DNA, 40 bp, Artificial Sequence
  Synthetic Oligonucleotide
gcggtttcttctcctgactacatgagattattaaacgcgc

SEQ ID NO: 6049 - DNA, 40 bp, Artificial Sequence
  Synthetic Oligonucleotide
gcggtttcttctcctgactacatgagattaatggacgcgc

SEQ ID NO: 6050 - DNA, 40 bp, Artificial Sequence
  Synthetic Oligonucleotide
gcggtttcttctcctgactacatgagattaatcaacgcgc

SEQ ID NO: 6051 - DNA, 40 bp, Artificial Sequence
  Synthetic Oligonucleotide
gcggtttcttctcctgactacatgagattaataaccgcgc

SEQ ID NO: 6052 - DNA, 40 bp, Artificial Sequence
  Synthetic Oligonucleotide
gcggtttcttctcctgactacataagattaatgaacgcgc

SEQ ID NO: 6053 - DNA, 40 bp, Artificial Sequence
  Synthetic Oligonucleotide
gcggtttcttctcctgactacataagatcaataaacgcgc

SEQ ID NO: 6054 - DNA, 40 bp, Artificial Sequence
  Synthetic Oligonucleotide
gcggtttcttctcctgactacaggagattaataaacgcgc

SEQ ID NO: 6055 - DNA, 40 bp, Artificial Sequence
  Synthetic Oligonucleotide
gcggtttcttctcctgacaacatgagattaataaacgcgc

SEQ ID NO: 6056 - DNA, 40 bp, Artificial Sequence
  Synthetic Oligonucleotide
gcggtttcttctcccgactacatgagattaataaatgcgc

SEQ ID NO: 6057 - DNA, 40 bp, Artificial Sequence
  Synthetic Oligonucleotide
gcggtttcttcccctgactacatgggattaataaacgcgc

SEQ ID NO: 6058 - DNA, 40 bp, Artificial Sequence
  Synthetic Oligonucleotide
gcggtttctgatatgctgttatattttttgaacctctctt

SEQ ID NO: 6059 - DNA, 40 bp, Artificial Sequence
  Synthetic Oligonucleotide
gcggtttctcttcctgactacatgagattagtaaacgcgc

SEQ ID NO: 6060 - DNA, 40 bp, Artificial Sequence
  Synthetic Oligonucleotide
gcggtttctctcctgactacatgagattaataaactgcgc

SEQ ID NO: 6061 - DNA, 40 bp, Artificial Sequence
  Synthetic Oligonucleotide
gcggtttctctcctgactacatgagattaataaacgcgtc

SEQ ID NO: 6062 - DNA, 40 bp, Artificial Sequence
  Synthetic Oligonucleotide
gcggtttctctcctgactacatgagattaataaaccgcgc

SEQ ID NO: 6063 - DNA, 40 bp, Artificial Sequence
  Synthetic Oligonucleotide
gcggtttcatctcctgactacatgagattaataaacgcgc

SEQ ID NO: 6064 - DNA, 40 bp, Artificial Sequence
  Synthetic Oligonucleotide
gcggttcttctccttgactacacgagagttaataacgcgc

SEQ ID NO: 6065 - DNA, 40 bp, Artificial Sequence
  Synthetic Oligonucleotide
gcggttcttctcctgactacattgagattaataaacgcgc

SEQ ID NO: 6066 - DNA, 40 bp, Artificial Sequence
  Synthetic Oligonucleotide
gcggttcttctcctgactacatgagattaataaactgcgc

SEQ ID NO: 6067 - DNA, 40 bp, Artificial Sequence
  Synthetic Oligonucleotide
gcggttcttctcctgactacatgagattaataaaccgcgc

SEQ ID NO: 6068 - DNA, 40 bp, Artificial Sequence
  Synthetic Oligonucleotide
gcggttcttctcctgactacatgagagttaataaacgcgc

SEQ ID NO: 6069 - DNA, 40 bp, Artificial Sequence
  Synthetic Oligonucleotide
gcggttcttctccctgactacatgagattaataaacgcgc

SEQ ID NO: 6070 - DNA, 40 bp, Artificial Sequence
  Synthetic Oligonucleotide
gcggttctcttctctgactacatgagattaataaacgcgc

SEQ ID NO: 6071 - DNA, 40 bp, Artificial Sequence
  Synthetic Oligonucleotide
gcggttctctccttgactcacatgagattaataaacgcgc

SEQ ID NO: 6072 - DNA, 40 bp, Artificial Sequence
  Synthetic Oligonucleotide
gcggttatcttcctctgactactgagattaataaacgcgc

SEQ ID NO: 6073 - DNA, 40 bp, Artificial Sequence
  Synthetic Oligonucleotide
gcggttaagacaaatcgagcgggatagttgaattgtaatt

SEQ ID NO: 6074 - DNA, 40 bp, Artificial Sequence
  Synthetic Oligonucleotide
gcggtctcttctcctgactacatgagattaatgaacgcgc

SEQ ID NO: 6075 - DNA, 40 bp, Artificial Sequence
  Synthetic Oligonucleotide
gcgggttcttctcctgactacatgagattaataaacgcgc

SEQ ID NO: 6076 - DNA, 40 bp, Artificial Sequence
  Synthetic Oligonucleotide
gcgggatacttgaggtcgttgagcgcttacgaaccctaat

SEQ ID NO: 6077 - DNA, 40 bp, Artificial Sequence
  Synthetic Oligonucleotide
gcggcttcttctcctgactacatgagatcaataaacgcgc

SEQ ID NO: 6078 - DNA, 40 bp, Artificial Sequence
  Synthetic Oligonucleotide
gcgctttcttctcctgactacatgagattaataaacgcgc

SEQ ID NO: 6079 - DNA, 40 bp, Artificial Sequence
  Synthetic Oligonucleotide
gcgctatcctgatttctatcgtcgactatggcgtgcgtgg

SEQ ID NO: 6080 - DNA, 40 bp, Artificial Sequence
  Synthetic Oligonucleotide
gcgcgaactgctgttttggcgctatccaaattttaggcta

SEQ ID NO: 6081 - DNA, 40 bp, Artificial Sequence
  Synthetic Oligonucleotide
gcgccggccttgatcctcaacccgcagtgcactaacgaca

SEQ ID NO: 6082 - DNA, 40 bp, Artificial Sequence
  Synthetic Oligonucleotide
gcgatgtcttctcctgactacatgagattaataaacgcgc

SEQ ID NO: 6083 - DNA, 40 bp, Artificial Sequence
  Synthetic Oligonucleotide
gccgtacagccccgacttatcatctcatggacaccgtgta

SEQ ID NO: 6084 - DNA, 40 bp, Artificial Sequence
  Synthetic Oligonucleotide
gccgcatgggtcggttttggtgggggactacctccttgta

SEQ ID NO: 6085 - DNA, 40 bp, Artificial Sequence
  Synthetic Oligonucleotide
gccgcatgggtcggttttggtgggggactaccctcttgta

SEQ ID NO: 6086 - DNA, 40 bp, Artificial Sequence
  Synthetic Oligonucleotide
gccgcatgggtcggttttggtgggggactacccccctgta

SEQ ID NO: 6087 - DNA, 40 bp, Artificial Sequence
  Synthetic Oligonucleotide
gccgcatgggtcggttttggcgggggactacccccttgta

SEQ ID NO: 6088 - DNA, 40 bp, Artificial Sequence
  Synthetic Oligonucleotide
gccgcatgggtcggttttgatgggggactacccccttgta

SEQ ID NO: 6089 - DNA, 40 bp, Artificial Sequence
  Synthetic Oligonucleotide
gccgcatgggtcggtttggtggggacttaccccccttgta

SEQ ID NO: 6090 - DNA, 40 bp, Artificial Sequence
  Synthetic Oligonucleotide
gccgcatgggtcgggtttggtgggggactacccccttgta

SEQ ID NO: 6091 - DNA, 40 bp, Artificial Sequence
  Synthetic Oligonucleotide
gcccggaacgcctcgatcctcgcacaatatgatacgtctg

SEQ ID NO: 6092 - DNA, 40 bp, Artificial Sequence
  Synthetic Oligonucleotide
gcccgctgccttcattcgtctgatgatgtgcaccttgagc

SEQ ID NO: 6093 - DNA, 40 bp, Artificial Sequence
  Synthetic Oligonucleotide
gcccgcctccgaagccctcctaagtgcactttaagccgcg

SEQ ID NO: 6094 - DNA, 40 bp, Artificial Sequence
  Synthetic Oligonucleotide
gcatgattcatctttgcttgactacacgcaattccgatga

SEQ ID NO: 6095 - DNA, 40 bp, Artificial Sequence
  Synthetic Oligonucleotide
gcatcctcatgacggtctgctgatggctacatcattgttc

SEQ ID NO: 6096 - DNA, 40 bp, Artificial Sequence
  Synthetic Oligonucleotide
gcagttcttctccttgactacatgagattaataaacgcgc

SEQ ID NO: 6097 - DNA, 40 bp, Artificial Sequence
  Synthetic Oligonucleotide
gcactatccgtttgtcgtcctctcgtggtattgcgcatgc

SEQ ID NO: 6098 - DNA, 40 bp, Artificial Sequence
  Synthetic Oligonucleotide
gcaaggctttcacgcacgcggattgtacccgaactgggtt

SEQ ID NO: 6099 - DNA, 40 bp, Artificial Sequence
  Synthetic Oligonucleotide
gcaagattcatctttgcttgactacacgcaattccgatgg

SEQ ID NO: 6100 - DNA, 40 bp, Artificial Sequence
  Synthetic Oligonucleotide
gattccgttgaccgattacgctcatattaggtaaatccag

SEQ ID NO: 6101 - DNA, 40 bp, Artificial Sequence
  Synthetic Oligonucleotide
gatggggctttaagcacttctcggtaacttgggcagttac

SEQ ID NO: 6102 - DNA, 40 bp, Artificial Sequence
  Synthetic Oligonucleotide
gatggggcttctaagcacttctggtaacttgggcagttac

SEQ ID NO: 6103 - DNA, 40 bp, Artificial Sequence
  Synthetic Oligonucleotide
gatgggcttttaagcacttcttggtaacttgggcagttac

SEQ ID NO: 6104 - DNA, 40 bp, Artificial Sequence
  Synthetic Oligonucleotide
gatgggcttctaagcacttctcggtaacttgggcagttac

SEQ ID NO: 6105 - DNA, 40 bp, Artificial Sequence
  Synthetic Oligonucleotide
gatgaggcctttaagctacttctcggtacttggcagttac

SEQ ID NO: 6106 - DNA, 40 bp, Artificial Sequence
  Synthetic Oligonucleotide
gatctactcatcaggcgctatcctgagcaccgatagtacg

SEQ ID NO: 6107 - DNA, 40 bp, Artificial Sequence
  Synthetic Oligonucleotide
gatcggagacttctccgttggtctgcaggtgtcaccacga

SEQ ID NO: 6108 - DNA, 40 bp, Artificial Sequence
  Synthetic Oligonucleotide
gatcagcttgccttgtttatggcctttagtacaaactgca

SEQ ID NO: 6109 - DNA, 40 bp, Artificial Sequence
  Synthetic Oligonucleotide
gatcacgctgccctttgtttaaggcctttatacacacgca

SEQ ID NO: 6110 - DNA, 40 bp, Artificial Sequence
  Synthetic Oligonucleotide
gatcacgctgccctttgtttaaggcctctatacaaacgca

SEQ ID NO: 6111 - DNA, 40 bp, Artificial Sequence
  Synthetic Oligonucleotide
gatcacgctgcccattgtttaaggcctttatacaaacgca

SEQ ID NO: 6112 - DNA, 40 bp, Artificial Sequence
  Synthetic Oligonucleotide
gatcaccgctgcctttgtttaaggcctttatacaaacgca

SEQ ID NO: 6113 - DNA, 40 bp, Artificial Sequence
  Synthetic Oligonucleotide
gataagcctgtcttttaatctcggcagagtgctcatgagc

SEQ ID NO: 6114 - DNA, 40 bp, Artificial Sequence
  Synthetic Oligonucleotide
gaggtttcttctcctgactacatgagattaataaacgcgc

SEQ ID NO: 6115 - DNA, 40 bp, Artificial Sequence
  Synthetic Oligonucleotide
gaggactcctctctcacggcctttagtggctgacactatt

SEQ ID NO: 6116 - DNA, 40 bp, Artificial Sequence
  Synthetic Oligonucleotide
gagatgatcataggttcgtcggactaccgacgattttact

SEQ ID NO: 6117 - DNA, 40 bp, Artificial Sequence
  Synthetic Oligonucleotide
gagatctcggatctggcgtactacttggataggttccttc

SEQ ID NO: 6118 - DNA, 40 bp, Artificial Sequence
  Synthetic Oligonucleotide
gactatccgtttgtccgtcctttcgtggtattgcgcatgc

SEQ ID NO: 6119 - DNA, 40 bp, Artificial Sequence
  Synthetic Oligonucleotide
gactatccgtttgtccgtcctcttgtggtattgcgcatac

SEQ ID NO: 6120 - DNA, 40 bp, Artificial Sequence
  Synthetic Oligonucleotide
gactacccgtatcgagctagtcttgtgctactggcaatca

SEQ ID NO: 6121 - DNA, 40 bp, Artificial Sequence
  Synthetic Oligonucleotide
gactacccccatcgagcggtttaccgtttggcgacaacgc

SEQ ID NO: 6122 - DNA, 40 bp, Artificial Sequence
  Synthetic Oligonucleotide
gacggtttcttctcctgactacatgagattataaacgcgc

SEQ ID NO: 6123 - DNA, 40 bp, Artificial Sequence
  Synthetic Oligonucleotide
gacggttccttctcctgactacatgagattaataacgcgc

SEQ ID NO: 6124 - DNA, 40 bp, Artificial Sequence
  Synthetic Oligonucleotide
gacggtgtccttctctgactacatgagattaataacgcgc

SEQ ID NO: 6125 - DNA, 40 bp, Artificial Sequence
  Synthetic Oligonucleotide
gacggcgagaacgacacttgactacacgtgtacaagttct

SEQ ID NO: 6126 - DNA, 40 bp, Artificial Sequence
  Synthetic Oligonucleotide
gaccatggtgcgcctcgattccgcccatacatgcatgtaa

SEQ ID NO: 6127 - DNA, 40 bp, Artificial Sequence
  Synthetic Oligonucleotide
gaccactcgccatcgagctagctcgctctgttcagaacaa

SEQ ID NO: 6128 - DNA, 40 bp, Artificial Sequence
  Synthetic Oligonucleotide
gaccacccgacatcgagcggtcgatcattcgcatctcttg

SEQ ID NO: 6129 - DNA, 40 bp, Artificial Sequence
  Synthetic Oligonucleotide
gaatcagtactgacggccgccttgatcctccgtcagtctg

SEQ ID NO: 6130 - DNA, 40 bp, Artificial Sequence
  Synthetic Oligonucleotide
gaactggggcccgcctcaagctagctacctccattgtctg

SEQ ID NO: 6131 - DNA, 40 bp, Artificial Sequence
  Synthetic Oligonucleotide
gaactggatctcgcctccatactacgtggactttagattt

SEQ ID NO: 6132 - DNA, 40 bp, Artificial Sequence
  Synthetic Oligonucleotide
gaactggatcctcgcctccatactgcgtggatttagattt

SEQ ID NO: 6133 - DNA, 40 bp, Artificial Sequence
  Synthetic Oligonucleotide
gaactggatcctcgcctccatactacgtggattcagattt

SEQ ID NO: 6134 - DNA, 40 bp, Artificial Sequence
  Synthetic Oligonucleotide
gaactggatcctcgcctccatactacgtggatctagattt

SEQ ID NO: 6135 - DNA, 40 bp, Artificial Sequence
  Synthetic Oligonucleotide
gaactggatcctcgcctccatactacgtgaatttagattt

SEQ ID NO: 6136 - DNA, 40 bp, Artificial Sequence
  Synthetic Oligonucleotide
gaactggatcctcgcctccatactacgcggatttagattt

SEQ ID NO: 6137 - DNA, 40 bp, Artificial Sequence
  Synthetic Oligonucleotide
gaactggatcctcgcctccatactaccgtggattagattt

SEQ ID NO: 6138 - DNA, 40 bp, Artificial Sequence
  Synthetic Oligonucleotide
gaaccgggtgccgcctcaatctagcctacctcattgtctg

SEQ ID NO: 6139 - DNA, 40 bp, Artificial Sequence
  Synthetic Oligonucleotide
gaaccggggcccgcctcaagctagctaccttcattgtctg

SEQ ID NO: 6140 - DNA, 40 bp, Artificial Sequence
  Synthetic Oligonucleotide
gaaccggggcccgcctcaagctagctacctccgttgtctg

SEQ ID NO: 6141 - DNA, 40 bp, Artificial Sequence
  Synthetic Oligonucleotide
gaaatctcggatctggcgtactacttggacaggttccttc

SEQ ID NO: 6142 - DNA, 40 bp, Artificial Sequence
  Synthetic Oligonucleotide
ctttttctcggatgccctgccactagccgcctcgttttct

SEQ ID NO: 6143 - DNA, 40 bp, Artificial Sequence
  Synthetic Oligonucleotide
cttttatccggcaggacgtccttcgtgcactatcacgatt

SEQ ID NO: 6144 - DNA, 40 bp, Artificial Sequence
  Synthetic Oligonucleotide
ctttctcggatcttcaacatattgccgcctcgcatccgac

SEQ ID NO: 6145 - DNA, 40 bp, Artificial Sequence
  Synthetic Oligonucleotide
cttgtccaggactacctggtcagttcaagctagatctgtg

SEQ ID NO: 6146 - DNA, 40 bp, Artificial Sequence
  Synthetic Oligonucleotide
cttctacgtccgaggacgtctttcgtgcactatcacgatt

SEQ ID NO: 6147 - DNA, 40 bp, Artificial Sequence
  Synthetic Oligonucleotide
cttcctcggatcttcaacatattgccgcctcgcatccgaa

SEQ ID NO: 6148 - DNA, 40 bp, Artificial Sequence
  Synthetic Oligonucleotide
cttagtaatttcgccgcccctctgtttagtggccattgaa

SEQ ID NO: 6149 - DNA, 40 bp, Artificial Sequence
  Synthetic Oligonucleotide
cttaattccagcgacttcggtggtgtcctctccattacca

SEQ ID NO: 6150 - DNA, 40 bp, Artificial Sequence
  Synthetic Oligonucleotide
ctgtctcggatcaatttacgcctcagttttccctactatg

SEQ ID NO: 6151 - DNA, 40 bp, Artificial Sequence
  Synthetic Oligonucleotide
ctgtcatatatctcacctgcctcgttccttctaatcgctg

SEQ ID NO: 6152 - DNA, 40 bp, Artificial Sequence
  Synthetic Oligonucleotide
ctgtagtgattcctgaaggctcctagtggctgggactagc

SEQ ID NO: 6153 - DNA, 40 bp, Artificial Sequence
  Synthetic Oligonucleotide
ctggccgacatgcatgattgtcctgggagtcccacaatgt

SEQ ID NO: 6154 - DNA, 40 bp, Artificial Sequence
  Synthetic Oligonucleotide
ctgcttatccggcaggacgttttcgtgcactatcacgatt

SEQ ID NO: 6155 - DNA, 40 bp, Artificial Sequence
  Synthetic Oligonucleotide
ctgcgctccctgtcattcgggcgctatcccgataacacga

SEQ ID NO: 6156 - DNA, 40 bp, Artificial Sequence
  Synthetic Oligonucleotide
ctgcgcaccctgtcattcgggcgctatcccgataatacga

SEQ ID NO: 6157 - DNA, 40 bp, Artificial Sequence
  Synthetic Oligonucleotide
ctgcgaactagtggtctttgtgcgcttaagacccgtcgat

SEQ ID NO: 6158 - DNA, 40 bp, Artificial Sequence
  Synthetic Oligonucleotide
ctgcctctgctctccctctcggatcgcgcacgtggatatg

SEQ ID NO: 6159 - DNA, 40 bp, Artificial Sequence
  Synthetic Oligonucleotide
ctgcctcggtcgacccctaatgttgcaacataatggtaaa

SEQ ID NO: 6160 - DNA, 40 bp, Artificial Sequence
  Synthetic Oligonucleotide
ctgcaccccgatagtcgtcttcgctggaccacccgtgtta

SEQ ID NO: 6161 - DNA, 40 bp, Artificial Sequence
  Synthetic Oligonucleotide
ctgatagcaatctgtggtattcatagcgatagtaatgcaa

SEQ ID NO: 6162 - DNA, 40 bp, Artificial Sequence
  Synthetic Oligonucleotide
ctgagctttcacgcacgcggattgtacccgaacgtgggtt

SEQ ID NO: 6163 - DNA, 40 bp, Artificial Sequence
  Synthetic Oligonucleotide
ctcttgtccggcaggacgtctttcgtgcactatcacgtat

SEQ ID NO: 6164 - DNA, 40 bp, Artificial Sequence
  Synthetic Oligonucleotide
ctcttatcctgcaggacgtctttcgtgcactatcacgatt

SEQ ID NO: 6165 - DNA, 40 bp, Artificial Sequence
  Synthetic Oligonucleotide
ctcttatccggtcggacgtctttcgtgcactatcacgatt

SEQ ID NO: 6166 - DNA, 40 bp, Artificial Sequence
  Synthetic Oligonucleotide
ctcttatccggtcaggacgtctttcgtgcacatcacgatt

SEQ ID NO: 6167 - DNA, 40 bp, Artificial Sequence
  Synthetic Oligonucleotide
ctcttatccggtcaggacgtcttcgtgcgactatcacgat

SEQ ID NO: 6168 - DNA, 40 bp, Artificial Sequence
  Synthetic Oligonucleotide
ctcttatccggtcagacgtccttctgcgactatcacgatt

SEQ ID NO: 6169 - DNA, 40 bp, Artificial Sequence
  Synthetic Oligonucleotide
ctcttatccggtcagacgcctttcgtgcgactatcacgat

SEQ ID NO: 6170 - DNA, 40 bp, Artificial Sequence
  Synthetic Oligonucleotide
ctcttatccggcgggacgtctttcgtgcactatcacggtt

SEQ ID NO: 6171 - DNA, 40 bp, Artificial Sequence
  Synthetic Oligonucleotide
ctcttatccggcgggacgcctttcgtgcactatcacgatt

SEQ ID NO: 6172 - DNA, 40 bp, Artificial Sequence
  Synthetic Oligonucleotide
ctcttatccggcgagcagtctttcgtgcactatcacgatt

SEQ ID NO: 6173 - DNA, 40 bp, Artificial Sequence
  Synthetic Oligonucleotide
ctcttatccggcagtacgtctttcgtgcactatcacgatt

SEQ ID NO: 6174 - DNA, 40 bp, Artificial Sequence
  Synthetic Oligonucleotide
ctcttatccggcaggtcgtctttcgtgcactatcacgatt

SEQ ID NO: 6175 - DNA, 40 bp, Artificial Sequence
  Synthetic Oligonucleotide
ctcttatccggcagggcgtttttcgtgcactatcacgatt

SEQ ID NO: 6176 - DNA, 40 bp, Artificial Sequence
  Synthetic Oligonucleotide
ctcttatccggcagggcgtctttcgtgcactatcgcgact

SEQ ID NO: 6177 - DNA, 40 bp, Artificial Sequence
  Synthetic Oligonucleotide
ctcttatccggcagggcgactttcgtgcactatcacgatt

SEQ ID NO: 6178 - DNA, 40 bp, Artificial Sequence
  Synthetic Oligonucleotide
ctcttatccggcaggctgtctttcgtgcactatcacgatt

SEQ ID NO: 6179 - DNA, 40 bp, Artificial Sequence
  Synthetic Oligonucleotide
ctcttatccggcaggatgtctttcgagcactatcacgatt

SEQ ID NO: 6180 - DNA, 40 bp, Artificial Sequence
  Synthetic Oligonucleotide
ctcttatccggcaggatcgtctttcgtgcactatcacgat

SEQ ID NO: 6181 - DNA, 40 bp, Artificial Sequence
  Synthetic Oligonucleotide
ctcttatccggcaggactctttcgtgcactatcacgtatt

SEQ ID NO: 6182 - DNA, 40 bp, Artificial Sequence
  Synthetic Oligonucleotide
ctcttatccggcaggacgtctttcgttcactatcacgatt

SEQ ID NO: 6183 - DNA, 40 bp, Artificial Sequence
  Synthetic Oligonucleotide
ctcttatccggcaggacgtctttcgtgtactatcacgatt

SEQ ID NO: 6184 - DNA, 40 bp, Artificial Sequence
  Synthetic Oligonucleotide
ctcttatccggcaggacgtctttcgtgcgccatcacgatt

SEQ ID NO: 6185 - DNA, 40 bp, Artificial Sequence
  Synthetic Oligonucleotide
ctcttatccggcaggacgtctttcgtgcactatcccgatt

SEQ ID NO: 6186 - DNA, 40 bp, Artificial Sequence
  Synthetic Oligonucleotide
ctcttatccggcaggacgtctttcgtgcactatcacgagt

SEQ ID NO: 6187 - DNA, 40 bp, Artificial Sequence
  Synthetic Oligonucleotide
ctcttatccggcaggacgtctttcgtgcactatcacgaat

SEQ ID NO: 6188 - DNA, 40 bp, Artificial Sequence
  Synthetic Oligonucleotide
ctcttatccggcaggacgtctttcgtgcactataacggtt

SEQ ID NO: 6189 - DNA, 40 bp, Artificial Sequence
  Synthetic Oligonucleotide
ctcttatccggcaggacgtctttcgtgcactataacgatt

SEQ ID NO: 6190 - DNA, 40 bp, Artificial Sequence
  Synthetic Oligonucleotide
ctcttatccggcaggacgtctttcgtgcactaccacgtat

SEQ ID NO: 6191 - DNA, 40 bp, Artificial Sequence
  Synthetic Oligonucleotide
ctcttatccggcaggacgtctttcgtgcacaatcacgatt

SEQ ID NO: 6192 - DNA, 40 bp, Artificial Sequence
  Synthetic Oligonucleotide
ctcttatccggcaggacgtctttcctgcactatcacgatt

SEQ ID NO: 6193 - DNA, 40 bp, Artificial Sequence
  Synthetic Oligonucleotide
ctcttatccggcaggacgtcttcgtgcactatcacgagtc

SEQ ID NO: 6194 - DNA, 40 bp, Artificial Sequence
  Synthetic Oligonucleotide
ctcttatccggcaggacgtcttcggtgcactatcacgatt

SEQ ID NO: 6195 - DNA, 40 bp, Artificial Sequence
  Synthetic Oligonucleotide
ctcttatccggcaggacgtcttccgtgcgctatcacgatt

SEQ ID NO: 6196 - DNA, 40 bp, Artificial Sequence
  Synthetic Oligonucleotide
ctcttatccggcaggacgtcctttcgtgcactatcacgat

SEQ ID NO: 6197 - DNA, 40 bp, Artificial Sequence
  Synthetic Oligonucleotide
ctcttatccggcaggacgtccttcgtgcgctatcacgatt

SEQ ID NO: 6198 - DNA, 40 bp, Artificial Sequence
  Synthetic Oligonucleotide
ctcttatccggcaggacgtccttcgtgcactatcacggtt

SEQ ID NO: 6199 - DNA, 40 bp, Artificial Sequence
  Synthetic Oligonucleotide
ctcttatccggcaggacgcctttcgtgcactatcgcgatt

SEQ ID NO: 6200 - DNA, 40 bp, Artificial Sequence
  Synthetic Oligonucleotide
ctcttatccggcaggacgactttcgtgcactatcacgtat

SEQ ID NO: 6201 - DNA, 40 bp, Artificial Sequence
  Synthetic Oligonucleotide
ctcttatccggcaggaccgtcttcgtgcactatcacgatt

SEQ ID NO: 6202 - DNA, 40 bp, Artificial Sequence
  Synthetic Oligonucleotide
ctcttatccggcaggacatctttcgtgcactataacgatt

SEQ ID NO: 6203 - DNA, 40 bp, Artificial Sequence
  Synthetic Oligonucleotide
ctcttatccggcagacgtctttcgtgcactatcgacgatt

SEQ ID NO: 6204 - DNA, 40 bp, Artificial Sequence
  Synthetic Oligonucleotide
ctcttatccggcagaccgtctttcgtgcgactatcacgat

SEQ ID NO: 6205 - DNA, 40 bp, Artificial Sequence
  Synthetic Oligonucleotide
ctcttatccggcaaggacgtctttcgtgcactatcacgat

SEQ ID NO: 6206 - DNA, 40 bp, Artificial Sequence
  Synthetic Oligonucleotide
ctcttatccggcaagacgtctttcgtgcactatcacaatt

SEQ ID NO: 6207 - DNA, 40 bp, Artificial Sequence
  Synthetic Oligonucleotide
ctcttatccagcagggcgtctttcgtgcactatcacgatt

SEQ ID NO: 6208 - DNA, 40 bp, Artificial Sequence
  Synthetic Oligonucleotide
ctcttatccagcaggacgtctttcgtgctctatcacgatt

SEQ ID NO: 6209 - DNA, 40 bp, Artificial Sequence
  Synthetic Oligonucleotide
ctcttatccagcaggacgtctttcgtgcgctatcacgatt

SEQ ID NO: 6210 - DNA, 40 bp, Artificial Sequence
  Synthetic Oligonucleotide
ctcttatacggcaggacgtctttcgtgcactatcacgatt

SEQ ID NO: 6211 - DNA, 40 bp, Artificial Sequence
  Synthetic Oligonucleotide
ctcttaaccggcaggacgtctttcgtgcactatcacgatc

SEQ ID NO: 6212 - DNA, 40 bp, Artificial Sequence
  Synthetic Oligonucleotide
ctctcggatcatttgcctcgctcctcctagagttggatgg

SEQ ID NO: 6213 - DNA, 40 bp, Artificial Sequence
  Synthetic Oligonucleotide
ctctcatccggcaggacgtctttcgcgcactatcacgatt

SEQ ID NO: 6214 - DNA, 40 bp, Artificial Sequence
  Synthetic Oligonucleotide
ctctcatccggcaggacatctttcgtgcactatcacgatt

SEQ ID NO: 6215 - DNA, 40 bp, Artificial Sequence
  Synthetic Oligonucleotide
ctctcatccggcagaacgtctttcgtgcactatcacgatt

SEQ ID NO: 6216 - DNA, 40 bp, Artificial Sequence
  Synthetic Oligonucleotide
ctctcatccagcaggacgtctttcgtgcactatcacgatt

SEQ ID NO: 6217 - DNA, 40 bp, Artificial Sequence
  Synthetic Oligonucleotide
ctctatccggcaggacgtctttcgtgcacctatcacgatt

SEQ ID NO: 6218 - DNA, 40 bp, Artificial Sequence
  Synthetic Oligonucleotide
ctctatccgcatcgagcgggttcttcgataatatgcaaca

SEQ ID NO: 6219 - DNA, 40 bp, Artificial Sequence
  Synthetic Oligonucleotide
ctctatccgcaggacgatctttcgtgcactatcacgagtt

SEQ ID NO: 6220 - DNA, 40 bp, Artificial Sequence
  Synthetic Oligonucleotide
ctctaatccgagatcgtcttgacgctgcactatcacgaat

SEQ ID NO: 6221 - DNA, 40 bp, Artificial Sequence
  Synthetic Oligonucleotide
ctctaacccggcaggacgtctttcgtgcactatcacgatt

SEQ ID NO: 6222 - DNA, 40 bp, Artificial Sequence
  Synthetic Oligonucleotide
ctcgcgaacgccttagtcacccttctcggataacatgatt

SEQ ID NO: 6223 - DNA, 40 bp, Artificial Sequence
  Synthetic Oligonucleotide
ctcctattcggcaggacgtctttcgtgcactatcacgatt

SEQ ID NO: 6224 - DNA, 40 bp, Artificial Sequence
  Synthetic Oligonucleotide
ctccatcgtgcaagtcatttacgcagactactgcgacgct

SEQ ID NO: 6225 - DNA, 40 bp, Artificial Sequence
  Synthetic Oligonucleotide
ctccaccgtgcaagtcgtttacgcagactactgcgacgct

SEQ ID NO: 6226 - DNA, 40 bp, Artificial Sequence
  Synthetic Oligonucleotide
ctccaccgtgcaagtcatttacgcagactactgcgaggct

SEQ ID NO: 6227 - DNA, 40 bp, Artificial Sequence
  Synthetic Oligonucleotide
ctccaagacgattgtcgttattgccggactacctgcatta

SEQ ID NO: 6228 - DNA, 40 bp, Artificial Sequence
  Synthetic Oligonucleotide
ctcatatccggcaggatgtctttcgtgcactatcacgatt

SEQ ID NO: 6229 - DNA, 40 bp, Artificial Sequence
  Synthetic Oligonucleotide
ctcatatccggcaggacgtccttcgtgcactatcacgatt

SEQ ID NO: 6230 - DNA, 40 bp, Artificial Sequence
  Synthetic Oligonucleotide
ctatccctgatgatccgaattctcatcggctggcactatc

SEQ ID NO: 6231 - DNA, 40 bp, Artificial Sequence
  Synthetic Oligonucleotide
ctagttgtgcgcttatggagccgggtaccttccagcaagg

SEQ ID NO: 6232 - DNA, 40 bp, Artificial Sequence
  Synthetic Oligonucleotide
ctagctttcacgcacgcggattgtacccgtaactcgggtt

SEQ ID NO: 6233 - DNA, 40 bp, Artificial Sequence
  Synthetic Oligonucleotide
ctactccggatgagccacctcgcattcctccgttcgtcag

SEQ ID NO: 6234 - DNA, 40 bp, Artificial Sequence
  Synthetic Oligonucleotide
ctactccggatgagccacctcgaattcctccgttcgtctg

SEQ ID NO: 6235 - DNA, 40 bp, Artificial Sequence
  Synthetic Oligonucleotide
ctacgaattagtggtctttgtgcgcttaagacccgtcgat

SEQ ID NO: 6236 - DNA, 40 bp, Artificial Sequence
  Synthetic Oligonucleotide
ctacgaactagcggtctttgtgcgtttaagacccgtcggt

SEQ ID NO: 6237 - DNA, 40 bp, Artificial Sequence
  Synthetic Oligonucleotide
cgtttacatgtacccctaccatcgcacctgttagcatatg

SEQ ID NO: 6238 - DNA, 40 bp, Artificial Sequence
  Synthetic Oligonucleotide
cgtgatagactactaccttatgtgccgttcatattccaat

SEQ ID NO: 6239 - DNA, 40 bp, Artificial Sequence
  Synthetic Oligonucleotide
cgtgactaattggcggactaccgcctcgatattagatcat

SEQ ID NO: 6240 - DNA, 40 bp, Artificial Sequence
  Synthetic Oligonucleotide
cgtctatccgcatcgagcgggtcttcgataatatgcaaca

SEQ ID NO: 6241 - DNA, 40 bp, Artificial Sequence
  Synthetic Oligonucleotide
cgtcaccccgatagtcaatcttcgctggacacccgcgtta

SEQ ID NO: 6242 - DNA, 40 bp, Artificial Sequence
  Synthetic Oligonucleotide
cggttcttctccttcgactacatgagattaataaacgcgc

SEQ ID NO: 6243 - DNA, 40 bp, Artificial Sequence
  Synthetic Oligonucleotide
cggttcactctctgactacatgagattaactaaaccgcgc

SEQ ID NO: 6244 - DNA, 40 bp, Artificial Sequence
  Synthetic Oligonucleotide
cgggggtgattcttggatcgcgttctcctcaccttctccg

SEQ ID NO: 6245 - DNA, 40 bp, Artificial Sequence
  Synthetic Oligonucleotide
cgggggcttttaagcacttctcggtaacttgggcagttac

SEQ ID NO: 6246 - DNA, 40 bp, Artificial Sequence
  Synthetic Oligonucleotide
cggctaacgttcatcgagggagcaaagggtctatagacta

SEQ ID NO: 6247 - DNA, 40 bp, Artificial Sequence
  Synthetic Oligonucleotide
cggctaacgttcatcgagggagcaaaaggtctatagacga

SEQ ID NO: 6248 - DNA, 40 bp, Artificial Sequence
  Synthetic Oligonucleotide
cggctaacgttcatcgagggagcaaaaggtctatagacca

SEQ ID NO: 6249 - DNA, 40 bp, Artificial Sequence
  Synthetic Oligonucleotide
cggctaacgttcatcgagcgagcaaaaggtctatagacta

SEQ ID NO: 6250 - DNA, 40 bp, Artificial Sequence
  Synthetic Oligonucleotide
cggaccccactgttaacagttcctccctcaggtgtgtcaa

SEQ ID NO: 6251 - DNA, 40 bp, Artificial Sequence
  Synthetic Oligonucleotide
cgcttcacaccaccctctgcagatacgtgtacataaggac

SEQ ID NO: 6252 - DNA, 40 bp, Artificial Sequence
  Synthetic Oligonucleotide
cgcttatccgttgtccgtcctcttgtggtattgcgcatgc

SEQ ID NO: 6253 - DNA, 40 bp, Artificial Sequence
  Synthetic Oligonucleotide
cgctattcgtatcgagcggtcggtctgtgccctaaaccca

SEQ ID NO: 6254 - DNA, 40 bp, Artificial Sequence
  Synthetic Oligonucleotide
cgctatctgtcatcgagcgagtactttgtgcgatcacaca

SEQ ID NO: 6255 - DNA, 40 bp, Artificial Sequence
  Synthetic Oligonucleotide
cgctatctgtcatcgagcgagcactttgtgcgatcccaca

SEQ ID NO: 6256 - DNA, 40 bp, Artificial Sequence
  Synthetic Oligonucleotide
cgctatctgtcatcgagcgagcactttgtgcgatcacgca

SEQ ID NO: 6257 - DNA, 40 bp, Artificial Sequence
  Synthetic Oligonucleotide
cgctatccgtttgtcggtcctcttgtggtattgcgcatgc

SEQ ID NO: 6258 - DNA, 40 bp, Artificial Sequence
  Synthetic Oligonucleotide
cgctatccgtttgtccgtcctcttgtggtattacgcatgc

SEQ ID NO: 6259 - DNA, 40 bp, Artificial Sequence
  Synthetic Oligonucleotide
cgctatccgtttgtccgtcctcttgtgggattgcgcatgc

SEQ ID NO: 6260 - DNA, 40 bp, Artificial Sequence
  Synthetic Oligonucleotide
cgctatccgtttgtccgtcctcttgcggtattgcgcatgc

SEQ ID NO: 6261 - DNA, 40 bp, Artificial Sequence
  Synthetic Oligonucleotide
cgctatccgtttgtccgtcctctcgtggtactgcgcatgc

SEQ ID NO: 6262 - DNA, 40 bp, Artificial Sequence
  Synthetic Oligonucleotide
cgctatccgtttgtccgtcctctcgtggcattgcgcatgc

SEQ ID NO: 6263 - DNA, 40 bp, Artificial Sequence
  Synthetic Oligonucleotide
cgctatccgtttgtccgtccccttgtggtattgcgcatgc

SEQ ID NO: 6264 - DNA, 40 bp, Artificial Sequence
  Synthetic Oligonucleotide
cgctatccgtttgcccgtcctcttgtggtattgcgcatgc

SEQ ID NO: 6265 - DNA, 40 bp, Artificial Sequence
  Synthetic Oligonucleotide
cgctatccgtccatcgagcgaacagtgtgcgtcttcggtg

SEQ ID NO: 6266 - DNA, 40 bp, Artificial Sequence
  Synthetic Oligonucleotide
cgctatccgtccatcgagcgaacagtgtgccgtttcggtg

SEQ ID NO: 6267 - DNA, 40 bp, Artificial Sequence
  Synthetic Oligonucleotide
cgctatccgtatcgaggagtcttcttctctcactagaggc

SEQ ID NO: 6268 - DNA, 40 bp, Artificial Sequence
  Synthetic Oligonucleotide
cgctatccgtaatcgagtcttgagtgtctgttaacaacga

SEQ ID NO: 6269 - DNA, 40 bp, Artificial Sequence
  Synthetic Oligonucleotide
cgctatccgtaatcgagcttgagtgtctggttaacaacga

SEQ ID NO: 6270 - DNA, 40 bp, Artificial Sequence
  Synthetic Oligonucleotide
cgctatccgcttgtccgtcctctcgtggtattgcgcatgc

SEQ ID NO: 6271 - DNA, 40 bp, Artificial Sequence
  Synthetic Oligonucleotide
cgctatccgcttgcccgtcctcttgtggtattgcgcatgc

SEQ ID NO: 6272 - DNA, 40 bp, Artificial Sequence
  Synthetic Oligonucleotide
cgctatccgcgtcgagcgggttcttcgataatatgcaaca

SEQ ID NO: 6273 - DNA, 40 bp, Artificial Sequence
  Synthetic Oligonucleotide
cgctatccgccatcgagcgtacagtgtgccgttttcggtg

SEQ ID NO: 6274 - DNA, 40 bp, Artificial Sequence
  Synthetic Oligonucleotide
cgctatccgccatcgagcgaactgtgtgccgttttcggtg

SEQ ID NO: 6275 - DNA, 40 bp, Artificial Sequence
  Synthetic Oligonucleotide
cgctatccgccatcgagcgaacagtgtgctgttttcggtg

SEQ ID NO: 6276 - DNA, 40 bp, Artificial Sequence
  Synthetic Oligonucleotide
cgctatccgccatcgagcgaacacgtgtgccgtttcggtg

SEQ ID NO: 6277 - DNA, 40 bp, Artificial Sequence
  Synthetic Oligonucleotide
cgctatccgcatcgagcgggttctttgataatatgcaaca

SEQ ID NO: 6278 - DNA, 40 bp, Artificial Sequence
  Synthetic Oligonucleotide
cgctatccgcatcgagcgggttcttcgatgatgtgcaacg

SEQ ID NO: 6279 - DNA, 40 bp, Artificial Sequence
  Synthetic Oligonucleotide
cgctatccgcatcgagcgggttcttcgatagtatgcaaca

SEQ ID NO: 6280 - DNA, 40 bp, Artificial Sequence
  Synthetic Oligonucleotide
cgctatccgcatcgagcgggttcttcgataatatgcaata

SEQ ID NO: 6281 - DNA, 40 bp, Artificial Sequence
  Synthetic Oligonucleotide
cgctatccgcatcgagcgggttcttcgataacgtgcaaca

SEQ ID NO: 6282 - DNA, 40 bp, Artificial Sequence
  Synthetic Oligonucleotide
cgctatccgcatcgagcgggtacttctataatatgcaaca

SEQ ID NO: 6283 - DNA, 40 bp, Artificial Sequence
  Synthetic Oligonucleotide
cgctatccgcatcgagcgggctcttcgataatatgcaaca

SEQ ID NO: 6284 - DNA, 40 bp, Artificial Sequence
  Synthetic Oligonucleotide
cgctatccgcatcgagcgcgttcttcgataatatgcaaca

SEQ ID NO: 6285 - DNA, 40 bp, Artificial Sequence
  Synthetic Oligonucleotide
cgctatccgcatcgagcgagttcttcgataatatgcaaca

SEQ ID NO: 6286 - DNA, 40 bp, Artificial Sequence
  Synthetic Oligonucleotide
cgctatccgcagtcgagtcgggttctcgacatatgcagca

SEQ ID NO: 6287 - DNA, 40 bp, Artificial Sequence
  Synthetic Oligonucleotide
cgctatccgaatcgagcttgagtgtcttgttaaacaacga

SEQ ID NO: 6288 - DNA, 40 bp, Artificial Sequence
  Synthetic Oligonucleotide
cgctatccgaatcgagcttgagtgtctggctaaacaatga

SEQ ID NO: 6289 - DNA, 40 bp, Artificial Sequence
  Synthetic Oligonucleotide
cgctatccgaatcgagctagagtgtctggttaaacaacga

SEQ ID NO: 6290 - DNA, 40 bp, Artificial Sequence
  Synthetic Oligonucleotide
cgctatccgaatcgagcgttgtcaacaagcggctaaggcc

SEQ ID NO: 6291 - DNA, 40 bp, Artificial Sequence
  Synthetic Oligonucleotide
cgctatccgaatcgagcgtgagtgtctggttaaacaacga

SEQ ID NO: 6292 - DNA, 40 bp, Artificial Sequence
  Synthetic Oligonucleotide
cgcgttacttcccggcattgccgcaatcgccatacatata

SEQ ID NO: 6293 - DNA, 40 bp, Artificial Sequence
  Synthetic Oligonucleotide
cgcgtctccctggcattgccgcgattgccatacattaata

SEQ ID NO: 6294 - DNA, 40 bp, Artificial Sequence
  Synthetic Oligonucleotide
cgcgctatctcggtcctgctgtgctgcctcagttcctcca

SEQ ID NO: 6295 - DNA, 40 bp, Artificial Sequence
  Synthetic Oligonucleotide
cgcgcagcctcggtcctgctcagcatggccatgccgttat

SEQ ID NO: 6296 - DNA, 40 bp, Artificial Sequence
  Synthetic Oligonucleotide
cgcgcacgatagggttgtcttgtggcactatccacattta

SEQ ID NO: 6297 - DNA, 40 bp, Artificial Sequence
  Synthetic Oligonucleotide
cgcgaaacgctattttctgggaaaccgcatctcgagcgaa

SEQ ID NO: 6298 - DNA, 40 bp, Artificial Sequence
  Synthetic Oligonucleotide
cgccttgcttgtcccgacgcatgctatgatcgcttgtctg

SEQ ID NO: 6299 - DNA, 40 bp, Artificial Sequence
  Synthetic Oligonucleotide
cgccttgatcctcgctttcggtgcactgacccgctttctg

SEQ ID NO: 6300 - DNA, 40 bp, Artificial Sequence
  Synthetic Oligonucleotide
cgcctcgctcctttagctgggttccggataccagctaata

SEQ ID NO: 6301 - DNA, 40 bp, Artificial Sequence
  Synthetic Oligonucleotide
cgcctcgcaattggtaagctcatcaacactctcgttgcta

SEQ ID NO: 6302 - DNA, 40 bp, Artificial Sequence
  Synthetic Oligonucleotide
cgcctcgaaattctctgtatatgcatatatcagtctaggc

SEQ ID NO: 6303 - DNA, 40 bp, Artificial Sequence
  Synthetic Oligonucleotide
cgcctcgaaattccctatatatgcatatatcagcctaggc

SEQ ID NO: 6304 - DNA, 40 bp, Artificial Sequence
  Synthetic Oligonucleotide
cgccggaggtccctcctcgtcttgatgcactatcatctca

SEQ ID NO: 6305 - DNA, 40 bp, Artificial Sequence
  Synthetic Oligonucleotide
cgccggaagtccctcctcgtcttgatgcgctatcatctca

SEQ ID NO: 6306 - DNA, 40 bp, Artificial Sequence
  Synthetic Oligonucleotide
cgccggaagtccctcctcgtcttgatgcaccatcatctca

SEQ ID NO: 6307 - DNA, 40 bp, Artificial Sequence
  Synthetic Oligonucleotide
cgccggaagtcccccctcgtcttgatgcactatcatctca

SEQ ID NO: 6308 - DNA, 40 bp, Artificial Sequence
  Synthetic Oligonucleotide
cgccggaagtcccacctcgtcttgatgcactatcatctca

SEQ ID NO: 6309 - DNA, 40 bp, Artificial Sequence
  Synthetic Oligonucleotide
cgccatccgtttgtccgtcctcttgtggtattgcgcatgc

SEQ ID NO: 6310 - DNA, 40 bp, Artificial Sequence
  Synthetic Oligonucleotide
cgcaatccgccatcgagcgaacagtgtgccgttttcggtg

SEQ ID NO: 6311 - DNA, 40 bp, Artificial Sequence
  Synthetic Oligonucleotide
cgatgggcttttaagcacttctcggtaacttggcagttac

SEQ ID NO: 6312 - DNA, 40 bp, Artificial Sequence
  Synthetic Oligonucleotide
cgatatatgtagtcggtttgcctcggtcgtccttgcactg

SEQ ID NO: 6313 - DNA, 40 bp, Artificial Sequence
  Synthetic Oligonucleotide
cgagtgtcactcggatcgcgttgatcatccagtcgcacgt

SEQ ID NO: 6314 - DNA, 40 bp, Artificial Sequence
  Synthetic Oligonucleotide
cgagcccgggaacgctgcctcgattcaggggacgtatata

SEQ ID NO: 6315 - DNA, 40 bp, Artificial Sequence
  Synthetic Oligonucleotide
cgagaacctcggatcacattcgcctttcctctaccgtctg

SEQ ID NO: 6316 - DNA, 40 bp, Artificial Sequence
  Synthetic Oligonucleotide
cgactatccgtttgtccgtcctctcgtggtatgcgcatgc

SEQ ID NO: 6317 - DNA, 40 bp, Artificial Sequence
  Synthetic Oligonucleotide
cgactatccgtttgtccgtcccttgtggtattgcgcatgc

SEQ ID NO: 6318 - DNA, 40 bp, Artificial Sequence
  Synthetic Oligonucleotide
cgacgtttcatcccgcgtttcgcgccatgaacccccgctg

SEQ ID NO: 6319 - DNA, 40 bp, Artificial Sequence
  Synthetic Oligonucleotide
ccttccagggccaatgcccgcattatcatcctatgttctg

SEQ ID NO: 6320 - DNA, 40 bp, Artificial Sequence
  Synthetic Oligonucleotide
cctgggcttcctactatttcaacgttgaaaactgtctgta

SEQ ID NO: 6321 - DNA, 40 bp, Artificial Sequence
  Synthetic Oligonucleotide
cctgctattagccactatgctatctcatacagtgccgtac

SEQ ID NO: 6322 - DNA, 40 bp, Artificial Sequence
  Synthetic Oligonucleotide
cctcttatccgcaggacgtctttcgtgcactatcacgatt

SEQ ID NO: 6323 - DNA, 40 bp, Artificial Sequence
  Synthetic Oligonucleotide
cctctacgtccgaggacgtctttcgtgcactatcacgatt

SEQ ID NO: 6324 - DNA, 40 bp, Artificial Sequence
  Synthetic Oligonucleotide
cctcgtatcttccggtgattaccacgtacgtacatgtctg

SEQ ID NO: 6325 - DNA, 40 bp, Artificial Sequence
  Synthetic Oligonucleotide
cctcgtatcttccggtaattgccacgtacgtacatgtctg

SEQ ID NO: 6326 - DNA, 40 bp, Artificial Sequence
  Synthetic Oligonucleotide
cctcgtaccttccggtaattaccacgtacgtacatgtctg

SEQ ID NO: 6327 - DNA, 40 bp, Artificial Sequence
  Synthetic Oligonucleotide
cctcggaccttctgctagctgatgacatgtcattcgttta

SEQ ID NO: 6328 - DNA, 40 bp, Artificial Sequence
  Synthetic Oligonucleotide
ccgtgatcagcttgtcgtgctttgtccgctatgacattca

SEQ ID NO: 6329 - DNA, 40 bp, Artificial Sequence
  Synthetic Oligonucleotide
ccgtgatcagctagtcgtgctttgtccgctatggcattca

SEQ ID NO: 6330 - DNA, 40 bp, Artificial Sequence
  Synthetic Oligonucleotide
ccgtgatcagctagtcgtgctttgtccgctacgacattca

SEQ ID NO: 6331 - DNA, 40 bp, Artificial Sequence
  Synthetic Oligonucleotide
ccgtgatcagctagtcgcgctttgtccgctatgacattca

SEQ ID NO: 6332 - DNA, 40 bp, Artificial Sequence
  Synthetic Oligonucleotide
ccgtgatcaactagtcgtgctttgtccgctatgacattca

SEQ ID NO: 6333 - DNA, 40 bp, Artificial Sequence
  Synthetic Oligonucleotide
ccgtctccactcctagaggaaagtactttacctgcgtctg

SEQ ID NO: 6334 - DNA, 40 bp, Artificial Sequence
  Synthetic Oligonucleotide
ccgtcacctcgactatcatcttcactgtaacaaccgtgta

SEQ ID NO: 6335 - DNA, 40 bp, Artificial Sequence
  Synthetic Oligonucleotide
ccgtcaccctgatagtcatcttcactggacacccgtgtta

SEQ ID NO: 6336 - DNA, 40 bp, Artificial Sequence
  Synthetic Oligonucleotide
ccgtcacccgatagtcatcttcactggaccacccgtgtta

SEQ ID NO: 6337 - DNA, 40 bp, Artificial Sequence
  Synthetic Oligonucleotide
ccgtcacccgatagtcatcttcactggaacaacccgtgta

SEQ ID NO: 6338 - DNA, 40 bp, Artificial Sequence
  Synthetic Oligonucleotide
ccgtcaccccgatagtcatcttcactggaacacccgtgta

SEQ ID NO: 6339 - DNA, 40 bp, Artificial Sequence
  Synthetic Oligonucleotide
ccgggtctctattgtcgtctttgtaggactacctgcatca

SEQ ID NO: 6340 - DNA, 40 bp, Artificial Sequence
  Synthetic Oligonucleotide
ccgggtcattattgtcgtctttgtaggactacctgcatca

SEQ ID NO: 6341 - DNA, 40 bp, Artificial Sequence
  Synthetic Oligonucleotide
ccgggcctttattgtcgtctttgtaggactacctgcatca

SEQ ID NO: 6342 - DNA, 40 bp, Artificial Sequence
  Synthetic Oligonucleotide
ccggaattctccatcccattctcggatgtgatcactcatt

SEQ ID NO: 6343 - DNA, 40 bp, Artificial Sequence
  Synthetic Oligonucleotide
ccgctcggatcgttcccaatggtggtaccccctattaatg

SEQ ID NO: 6344 - DNA, 40 bp, Artificial Sequence
  Synthetic Oligonucleotide
ccgcggccgtctagattctccctgtagctgcatcgcataa

SEQ ID NO: 6345 - DNA, 40 bp, Artificial Sequence
  Synthetic Oligonucleotide
ccgcgccttcgccgatgcgcacggaaatacacttggctta

SEQ ID NO: 6346 - DNA, 40 bp, Artificial Sequence
  Synthetic Oligonucleotide
ccgccttgtttccctccggaccttgtacaagatggtgttg

SEQ ID NO: 6347 - DNA, 40 bp, Artificial Sequence
  Synthetic Oligonucleotide
ccgccttggtcctgtagcgctagaccaacttccggacaca

SEQ ID NO: 6348 - DNA, 40 bp, Artificial Sequence
  Synthetic Oligonucleotide
ccgccttggatcctctacagcctaccaccatggatgttaa

SEQ ID NO: 6349 - DNA, 40 bp, Artificial Sequence
  Synthetic Oligonucleotide
ccgccttgcctgttcacgtggccactgaacacttttctga

SEQ ID NO: 6350 - DNA, 40 bp, Artificial Sequence
  Synthetic Oligonucleotide
ccgccttgactccaaccccggggtatgtaccataattgcg

SEQ ID NO: 6351 - DNA, 40 bp, Artificial Sequence
  Synthetic Oligonucleotide
ccgccttcagtcctggtggtaccacaacgcattgcccttt

SEQ ID NO: 6352 - DNA, 40 bp, Artificial Sequence
  Synthetic Oligonucleotide
ccgccttcaggttcctctaacgcgttagccttccggaatg

SEQ ID NO: 6353 - DNA, 40 bp, Artificial Sequence
  Synthetic Oligonucleotide
ccgccttcaggttccctaacgcgttacgccttccggaatg

SEQ ID NO: 6354 - DNA, 40 bp, Artificial Sequence
  Synthetic Oligonucleotide
ccgccttcagattctcctaacgcgttagccttccggaatg

SEQ ID NO: 6355 - DNA, 40 bp, Artificial Sequence
  Synthetic Oligonucleotide
ccgcctcggtaccgttccaacgcgttagccttccggaatg

SEQ ID NO: 6356 - DNA, 40 bp, Artificial Sequence
  Synthetic Oligonucleotide
ccgcctcggatcgttcccaacggtggtacccctattaatg

SEQ ID NO: 6357 - DNA, 40 bp, Artificial Sequence
  Synthetic Oligonucleotide
ccgcctcgcgtcgctgtacacgaagacctccggagatttg

SEQ ID NO: 6358 - DNA, 40 bp, Artificial Sequence
  Synthetic Oligonucleotide
ccgcctcgagtcccaaattcgacaagaacacccggtggaa

SEQ ID NO: 6359 - DNA, 40 bp, Artificial Sequence
  Synthetic Oligonucleotide
ccgcctcgaattgcacaccttcctccgaacttagccatgg

SEQ ID NO: 6360 - DNA, 40 bp, Artificial Sequence
  Synthetic Oligonucleotide
ccgcctcgaacactgacgtcgtgggaccttcgattgctag

SEQ ID NO: 6361 - DNA, 40 bp, Artificial Sequence
  Synthetic Oligonucleotide
ccgcctcgaacactgacgacgtggaaccttcgattgctag

SEQ ID NO: 6362 - DNA, 40 bp, Artificial Sequence
  Synthetic Oligonucleotide
ccgcctccttcctccatgagcatgcttactcgggatacta

SEQ ID NO: 6363 - DNA, 40 bp, Artificial Sequence
  Synthetic Oligonucleotide
ccgcctccaggttccctaacgcgttacgccttccggaatg

SEQ ID NO: 6364 - DNA, 40 bp, Artificial Sequence
  Synthetic Oligonucleotide
ccgcctcagtccgtggatccactttgcacgcgccatgaca

SEQ ID NO: 6365 - DNA, 40 bp, Artificial Sequence
  Synthetic Oligonucleotide
ccgcctcaggtttccctaacgcgttagccttccggaagtg

SEQ ID NO: 6366 - DNA, 40 bp, Artificial Sequence
  Synthetic Oligonucleotide
ccgcctcaggttccctaactcgcgttagccttccggaatg

SEQ ID NO: 6367 - DNA, 40 bp, Artificial Sequence
  Synthetic Oligonucleotide
ccgcctcaggttccctaaccgcgttagccttccggaatcg

SEQ ID NO: 6368 - DNA, 40 bp, Artificial Sequence
  Synthetic Oligonucleotide
ccgcctcaggttccctaaccgcgttagccctccggaactg

SEQ ID NO: 6369 - DNA, 40 bp, Artificial Sequence
  Synthetic Oligonucleotide
ccgcctcaggttccccttaacgcgttagccttccggaatg

SEQ ID NO: 6370 - DNA, 40 bp, Artificial Sequence
  Synthetic Oligonucleotide
ccgcctcaggttcccctaacgcgttagccttccggaatga

SEQ ID NO: 6371 - DNA, 40 bp, Artificial Sequence
  Synthetic Oligonucleotide
ccgcctcaggttcccctaacgcgattagctttccggaatg

SEQ ID NO: 6372 - DNA, 40 bp, Artificial Sequence
  Synthetic Oligonucleotide
ccgcctcaggttccccataacgcgttagccttccggaatg

SEQ ID NO: 6373 - DNA, 40 bp, Artificial Sequence
  Synthetic Oligonucleotide
ccgcctcacctcaccacaacagctgcgtggttatgtctcc

SEQ ID NO: 6374 - DNA, 40 bp, Artificial Sequence
  Synthetic Oligonucleotide
ccgcctatgtctctcaccgagcatgctcgcgtcaggtttg

SEQ ID NO: 6375 - DNA, 40 bp, Artificial Sequence
  Synthetic Oligonucleotide
ccgccgttcaggttccctaacgcgttagccttccgggatg

SEQ ID NO: 6376 - DNA, 40 bp, Artificial Sequence
  Synthetic Oligonucleotide
ccgccacccgagtagtcatcttcactggacacccgtgtta

SEQ ID NO: 6377 - DNA, 40 bp, Artificial Sequence
  Synthetic Oligonucleotide
ccgcatcctgatagtcatcttcgctggaccacccgcgtta

SEQ ID NO: 6378 - DNA, 40 bp, Artificial Sequence
  Synthetic Oligonucleotide
ccgcagcccgatagtcatcttcgctggaccactcgcgtta

SEQ ID NO: 6379 - DNA, 40 bp, Artificial Sequence
  Synthetic Oligonucleotide
ccgcactccgatagtcatcttcactggaccacccgtgtta

SEQ ID NO: 6380 - DNA, 40 bp, Artificial Sequence
  Synthetic Oligonucleotide
ccgcaccctgatagtcatcttcgctggaccacctgcgtta

SEQ ID NO: 6381 - DNA, 40 bp, Artificial Sequence
  Synthetic Oligonucleotide
ccgcaccctgatagtcatcttcactggaccacctgtgtta

SEQ ID NO: 6382 - DNA, 40 bp, Artificial Sequence
  Synthetic Oligonucleotide
ccgcaccctgactagtcatcttcactggacacccgtgtta

SEQ ID NO: 6383 - DNA, 40 bp, Artificial Sequence
  Synthetic Oligonucleotide
ccgcaccctcgatagtcatcttcactggacacccgtgtta

SEQ ID NO: 6384 - DNA, 40 bp, Artificial Sequence
  Synthetic Oligonucleotide
ccgcacccgatagtcatctttcgctggaccacccgcgtta

SEQ ID NO: 6385 - DNA, 40 bp, Artificial Sequence
  Synthetic Oligonucleotide
ccgcacccgatagtcatcttcactggaccacccgtgttac

SEQ ID NO: 6386 - DNA, 40 bp, Artificial Sequence
  Synthetic Oligonucleotide
ccgcacccgatagtcatcttcactggaccacccgtcgtta

SEQ ID NO: 6387 - DNA, 40 bp, Artificial Sequence
  Synthetic Oligonucleotide
ccgcacccctgatagtcgtcttcgctggaccaccgtgtta

SEQ ID NO: 6388 - DNA, 40 bp, Artificial Sequence
  Synthetic Oligonucleotide
ccgcacccctgatagtcatcttcactggacacccgtgttg

SEQ ID NO: 6389 - DNA, 40 bp, Artificial Sequence
  Synthetic Oligonucleotide
ccgcacccctgatagtcatcttcaccggaccacctgtgta

SEQ ID NO: 6390 - DNA, 40 bp, Artificial Sequence
  Synthetic Oligonucleotide
ccgcacccctgatagtcatctccgctggaccaccgcgtta

SEQ ID NO: 6391 - DNA, 40 bp, Artificial Sequence
  Synthetic Oligonucleotide
ccgcaccccggatagtcatcttcactggacacccgtgtta

SEQ ID NO: 6392 - DNA, 40 bp, Artificial Sequence
  Synthetic Oligonucleotide
ccgcaccccgctagtcatcttcactggaccacccgtgtta

SEQ ID NO: 6393 - DNA, 40 bp, Artificial Sequence
  Synthetic Oligonucleotide
ccgcaccccgattagtcatcttcattggacacccgtgtta

SEQ ID NO: 6394 - DNA, 40 bp, Artificial Sequence
  Synthetic Oligonucleotide
ccgcaccccgattagtcatcttcaatggacacccgtgtta

SEQ ID NO: 6395 - DNA, 40 bp, Artificial Sequence
  Synthetic Oligonucleotide
ccgcaccccgatggtcatcttcgctggaccacccgcgtta

SEQ ID NO: 6396 - DNA, 40 bp, Artificial Sequence
  Synthetic Oligonucleotide
ccgcaccccgatcactcatcttcactggaccaccgtgtta

SEQ ID NO: 6397 - DNA, 40 bp, Artificial Sequence
  Synthetic Oligonucleotide
ccgcaccccgatagtcgtcttcgctggaccacccgtgtca

SEQ ID NO: 6398 - DNA, 40 bp, Artificial Sequence
  Synthetic Oligonucleotide
ccgcaccccgatagtcgtcttccgctggacacccgtgtta

SEQ ID NO: 6399 - DNA, 40 bp, Artificial Sequence
  Synthetic Oligonucleotide
ccgcaccccgatagtcatctttgctggaccacccgcgtta

SEQ ID NO: 6400 - DNA, 40 bp, Artificial Sequence
  Synthetic Oligonucleotide
ccgcaccccgatagtcatctttactggaccacccgtgtta

SEQ ID NO: 6401 - DNA, 40 bp, Artificial Sequence
  Synthetic Oligonucleotide
ccgcaccccgatagtcatcttcgttggaccacccgcgtta

SEQ ID NO: 6402 - DNA, 40 bp, Artificial Sequence
  Synthetic Oligonucleotide
ccgcaccccgatagtcatcttcgctgggccacccgcgtta

SEQ ID NO: 6403 - DNA, 40 bp, Artificial Sequence
  Synthetic Oligonucleotide
ccgcaccccgatagtcatcttcgctggatcacccgcgtta

SEQ ID NO: 6404 - DNA, 40 bp, Artificial Sequence
  Synthetic Oligonucleotide
ccgcaccccgatagtcatcttcgctggactacccgcgtta

SEQ ID NO: 6405 - DNA, 40 bp, Artificial Sequence
  Synthetic Oligonucleotide
ccgcaccccgatagtcatcttcgctggaccgcccgcgtta

SEQ ID NO: 6406 - DNA, 40 bp, Artificial Sequence
  Synthetic Oligonucleotide
ccgcaccccgatagtcatcttcgctggaccactcgcgtta

SEQ ID NO: 6407 - DNA, 40 bp, Artificial Sequence
  Synthetic Oligonucleotide
ccgcaccccgatagtcatcttcgctggaccacctgcgtta

SEQ ID NO: 6408 - DNA, 40 bp, Artificial Sequence
  Synthetic Oligonucleotide
ccgcaccccgatagtcatcttcgctggaccacccgtgcta

SEQ ID NO: 6409 - DNA, 40 bp, Artificial Sequence
  Synthetic Oligonucleotide
ccgcaccccgatagtcatcttcgctggaccacccgcgttg

SEQ ID NO: 6410 - DNA, 40 bp, Artificial Sequence
  Synthetic Oligonucleotide
ccgcaccccgatagtcatcttcgctggaccacccgcgcta

SEQ ID NO: 6411 - DNA, 40 bp, Artificial Sequence
  Synthetic Oligonucleotide
ccgcaccccgatagtcatcttcgctggaccacccgcatta

SEQ ID NO: 6412 - DNA, 40 bp, Artificial Sequence
  Synthetic Oligonucleotide
ccgcaccccgatagtcatcttcgatggaccacccgcgtta

SEQ ID NO: 6413 - DNA, 40 bp, Artificial Sequence
  Synthetic Oligonucleotide
ccgcaccccgatagtcatcttcattggaccacccgtgtta

SEQ ID NO: 6414 - DNA, 40 bp, Artificial Sequence
  Synthetic Oligonucleotide
ccgcaccccgatagtcatcttcagctggacacccgtgtta

SEQ ID NO: 6415 - DNA, 40 bp, Artificial Sequence
  Synthetic Oligonucleotide
ccgcaccccgatagtcatcttcacttgaccacccgtgtta

SEQ ID NO: 6416 - DNA, 40 bp, Artificial Sequence
  Synthetic Oligonucleotide
ccgcaccccgatagtcatcttcactggaccgcccgtgtta

SEQ ID NO: 6417 - DNA, 40 bp, Artificial Sequence
  Synthetic Oligonucleotide
ccgcaccccgatagtcatcttcactggaccatccgtgtta

SEQ ID NO: 6418 - DNA, 40 bp, Artificial Sequence
  Synthetic Oligonucleotide
ccgcaccccgatagtcatcttcactggaccactcgtgtta

SEQ ID NO: 6419 - DNA, 40 bp, Artificial Sequence
  Synthetic Oligonucleotide
ccgcaccccgatagtcatcttcactggaccacccgtgtaa

SEQ ID NO: 6420 - DNA, 40 bp, Artificial Sequence
  Synthetic Oligonucleotide
ccgcaccccgatagtcatcttcactggaccacccgtggta

SEQ ID NO: 6421 - DNA, 40 bp, Artificial Sequence
  Synthetic Oligonucleotide
ccgcaccccgatagtcatcttcactggaccacccgtatta

SEQ ID NO: 6422 - DNA, 40 bp, Artificial Sequence
  Synthetic Oligonucleotide
ccgcaccccgatagtcatcttcactggacacccgtgttaa

SEQ ID NO: 6423 - DNA, 40 bp, Artificial Sequence
  Synthetic Oligonucleotide
ccgcaccccgatagtcatcttcactggacaccacgtgtta

SEQ ID NO: 6424 - DNA, 40 bp, Artificial Sequence
  Synthetic Oligonucleotide
ccgcaccccgatagtcatcttcactggaacacccgtgtta

SEQ ID NO: 6425 - DNA, 40 bp, Artificial Sequence
  Synthetic Oligonucleotide
ccgcaccccgatagtcatcttcactagaccacccgtgtta

SEQ ID NO: 6426 - DNA, 40 bp, Artificial Sequence
  Synthetic Oligonucleotide
ccgcaccccgatagtcatcctcgctggaccacccgcgtta

SEQ ID NO: 6427 - DNA, 40 bp, Artificial Sequence
  Synthetic Oligonucleotide
ccgcaccccgatagtcatcattcactggacacccgtgtta

SEQ ID NO: 6428 - DNA, 40 bp, Artificial Sequence
  Synthetic Oligonucleotide
ccgcaccccgatagctcaccctcactggacacccgtgtta

SEQ ID NO: 6429 - DNA, 40 bp, Artificial Sequence
  Synthetic Oligonucleotide
ccgcaccccgatagccatctttactggaccacccgtgtta

SEQ ID NO: 6430 - DNA, 40 bp, Artificial Sequence
  Synthetic Oligonucleotide
ccgcaccccgacttagtcatcttcactggacacccgtgta

SEQ ID NO: 6431 - DNA, 40 bp, Artificial Sequence
  Synthetic Oligonucleotide
ccgcaccccgactagtcatcttcgctggacacccgcgtta

SEQ ID NO: 6432 - DNA, 40 bp, Artificial Sequence
  Synthetic Oligonucleotide
ccgcaccccgacagtcatcttcgctggaccacccgcgtta

SEQ ID NO: 6433 - DNA, 40 bp, Artificial Sequence
  Synthetic Oligonucleotide
ccgcaccccgacagtcatcttcgctggaccaccccgcgta

SEQ ID NO: 6434 - DNA, 40 bp, Artificial Sequence
  Synthetic Oligonucleotide
ccgcacccccgattagtcatcttcactggacaccgtgtta

SEQ ID NO: 6435 - DNA, 40 bp, Artificial Sequence
  Synthetic Oligonucleotide
ccgcacccccgatagtcatcttcgctggaccacccgcgtt

SEQ ID NO: 6436 - DNA, 40 bp, Artificial Sequence
  Synthetic Oligonucleotide
ccgcacccccgatagtcatcttcactgggcacccgtgtta

SEQ ID NO: 6437 - DNA, 40 bp, Artificial Sequence
  Synthetic Oligonucleotide
ccgcaccccaatagtcatcttcgctggaccacccgtgtta

SEQ ID NO: 6438 - DNA, 40 bp, Artificial Sequence
  Synthetic Oligonucleotide
ccgcaccccaatagtcatcttcgctggaccacccgcgtta

SEQ ID NO: 6439 - DNA, 40 bp, Artificial Sequence
  Synthetic Oligonucleotide
ccgcaacccgatagtcgtcttcgctggaccacccgtgtta

SEQ ID NO: 6440 - DNA, 40 bp, Artificial Sequence
  Synthetic Oligonucleotide
ccgagcaccctgatagtcatcttcactggacaccgtgtta

SEQ ID NO: 6441 - DNA, 40 bp, Artificial Sequence
  Synthetic Oligonucleotide
ccgacacccgattagtcatcttcactggacacccgtgtta

SEQ ID NO: 6442 - DNA, 40 bp, Artificial Sequence
  Synthetic Oligonucleotide
ccgacacccgatagtcatccttcactggacacccgtgtta

SEQ ID NO: 6443 - DNA, 40 bp, Artificial Sequence
  Synthetic Oligonucleotide
cccttatccggcaggacgtctttcgtgcgctatcacgatt

SEQ ID NO: 6444 - DNA, 40 bp, Artificial Sequence
  Synthetic Oligonucleotide
ccctcttcgtcaccacgtcgggactaccccgaaagaagtg

SEQ ID NO: 6445 - DNA, 40 bp, Artificial Sequence
  Synthetic Oligonucleotide
ccctcttcgtcacacgtcggggactaccccgcaagaagtg

SEQ ID NO: 6446 - DNA, 40 bp, Artificial Sequence
  Synthetic Oligonucleotide
ccctctatagtcgttggcgtagcacgctattgcttagaag

SEQ ID NO: 6447 - DNA, 40 bp, Artificial Sequence
  Synthetic Oligonucleotide
ccctctatagtcgtcggcgtagcacgctattgcttaaaag

SEQ ID NO: 6448 - DNA, 40 bp, Artificial Sequence
  Synthetic Oligonucleotide
ccctctatagtcgtcggcgtagaacgctattgcttagaag

SEQ ID NO: 6449 - DNA, 40 bp, Artificial Sequence
  Synthetic Oligonucleotide
ccctatccgtttgtccgtcctcttgtggtattgcgcatgc

SEQ ID NO: 6450 - DNA, 40 bp, Artificial Sequence
  Synthetic Oligonucleotide
ccctacgattgttctcccgttacgtcactccctagtgccg

SEQ ID NO: 6451 - DNA, 40 bp, Artificial Sequence
  Synthetic Oligonucleotide
cccggcgtctcccaaaatgcgcattgatcgatcccgtttg

SEQ ID NO: 6452 - DNA, 40 bp, Artificial Sequence
  Synthetic Oligonucleotide
cccgcctcaggttcccctaacgcgttagccttccggaatg

SEQ ID NO: 6453 - DNA, 40 bp, Artificial Sequence
  Synthetic Oligonucleotide
cccgcacctcgatagtcatcttcactggacacccgtgtta

SEQ ID NO: 6454 - DNA, 40 bp, Artificial Sequence
  Synthetic Oligonucleotide
cccctgaaacgtccacatgggctgcaaccggcattgcgcg

SEQ ID NO: 6455 - DNA, 40 bp, Artificial Sequence
  Synthetic Oligonucleotide
ccccgattcctcctagcatgctacagtggcgatcatgacg

SEQ ID NO: 6456 - DNA, 40 bp, Artificial Sequence
  Synthetic Oligonucleotide
cccaaagacttcaggcgctatcctgatctagtctaacatg

SEQ ID NO: 6457 - DNA, 40 bp, Artificial Sequence
  Synthetic Oligonucleotide
ccattgttcgcttatggtagccgggtaccttccagcaagg

SEQ ID NO: 6458 - DNA, 40 bp, Artificial Sequence
  Synthetic Oligonucleotide
ccattgtgctgcttgtggagccgggtaccttccagcaagg

SEQ ID NO: 6459 - DNA, 40 bp, Artificial Sequence
  Synthetic Oligonucleotide
ccattgtgcgcttatggagtccgggtaccttccagcaagg

SEQ ID NO: 6460 - DNA, 40 bp, Artificial Sequence
  Synthetic Oligonucleotide
ccattgtgcgcttatggaggccgggtaccttccagcaagg

SEQ ID NO: 6461 - DNA, 40 bp, Artificial Sequence
  Synthetic Oligonucleotide
ccattgtgcgcttatggagccgggtaccttccaagcaagg

SEQ ID NO: 6462 - DNA, 40 bp, Artificial Sequence
  Synthetic Oligonucleotide
ccattgtgcgcttatggagccggggtaccttccagcaagg

SEQ ID NO: 6463 - DNA, 40 bp, Artificial Sequence
  Synthetic Oligonucleotide
ccattgtgcgcttatggaagccgggtaccttccagcaagg

SEQ ID NO: 6464 - DNA, 40 bp, Artificial Sequence
  Synthetic Oligonucleotide
ccattgtgccgcttatggagccgggtaccttccagcaagg

SEQ ID NO: 6465 - DNA, 40 bp, Artificial Sequence
  Synthetic Oligonucleotide
ccattctagatagttctctaatccttcgcgtggtgtgata

SEQ ID NO: 6466 - DNA, 40 bp, Artificial Sequence
  Synthetic Oligonucleotide
ccagctagcggggcgttcattggcctagaaattttcttat

SEQ ID NO: 6467 - DNA, 40 bp, Artificial Sequence
  Synthetic Oligonucleotide
ccactatcgttgtccgtctcttgtcggtattgcgtcatgc

SEQ ID NO: 6468 - DNA, 40 bp, Artificial Sequence
  Synthetic Oligonucleotide
ccactaaaggtgcctagtccccgtgtcgcctcccagtcta

SEQ ID NO: 6469 - DNA, 40 bp, Artificial Sequence
  Synthetic Oligonucleotide
ccacaccccgatagtcatcttcgctggaccacccgcgtta

SEQ ID NO: 6470 - DNA, 40 bp, Artificial Sequence
  Synthetic Oligonucleotide
catttgccagtcacatcagctatgatgacgcttgactgga

SEQ ID NO: 6471 - DNA, 40 bp, Artificial Sequence
  Synthetic Oligonucleotide
cattgcgctgcttatggagccgggtaccgttccagcaagg

SEQ ID NO: 6472 - DNA, 40 bp, Artificial Sequence
  Synthetic Oligonucleotide
cattgaaatttctggcgctatccagttgtatatttcagga

SEQ ID NO: 6473 - DNA, 40 bp, Artificial Sequence
  Synthetic Oligonucleotide
cattccggaaaccgcctctatccctgtttggtggccgcta

SEQ ID NO: 6474 - DNA, 40 bp, Artificial Sequence
  Synthetic Oligonucleotide
catggggcttttaagcacttctcggtaactgggcagttac

SEQ ID NO: 6475 - DNA, 40 bp, Artificial Sequence
  Synthetic Oligonucleotide
catggggctttaagcacttctcggtaacttgggcggttac

SEQ ID NO: 6476 - DNA, 40 bp, Artificial Sequence
  Synthetic Oligonucleotide
catgggcttttaagcacttctcggtaacttgggcagttgc

SEQ ID NO: 6477 - DNA, 40 bp, Artificial Sequence
  Synthetic Oligonucleotide
catgggcttttaagcacttctcggtaacttggcgagttac

SEQ ID NO: 6478 - DNA, 40 bp, Artificial Sequence
  Synthetic Oligonucleotide
catgggctttaagctacttctcggtaacttggcgagttac

SEQ ID NO: 6479 - DNA, 40 bp, Artificial Sequence
  Synthetic Oligonucleotide
catgctgcctcggttcgcgaatcgctcccttctcactgcg

SEQ ID NO: 6480 - DNA, 40 bp, Artificial Sequence
  Synthetic Oligonucleotide
catgcgaccggtacatgcttagcctcgcagtatgattaat

SEQ ID NO: 6481 - DNA, 40 bp, Artificial Sequence
  Synthetic Oligonucleotide
catgactcccctgcagctctcggatgtccgttcttcccgt

SEQ ID NO: 6482 - DNA, 40 bp, Artificial Sequence
  Synthetic Oligonucleotide
catgaccggtattggcaggtctttcgggcgtatcccgatg

SEQ ID NO: 6483 - DNA, 40 bp, Artificial Sequence
  Synthetic Oligonucleotide
catctctcggctgccgtgcgcacgcagctgactcgaactg

SEQ ID NO: 6484 - DNA, 40 bp, Artificial Sequence
  Synthetic Oligonucleotide
catctattcgttgtccgtcctcttgtggtattgcgcatgc

SEQ ID NO: 6485 - DNA, 40 bp, Artificial Sequence
  Synthetic Oligonucleotide
catctatccgtttgtccgtcctctcgtgtattgcgcatgc

SEQ ID NO: 6486 - DNA, 40 bp, Artificial Sequence
  Synthetic Oligonucleotide
catctatccgcttgtccgtcctcttgtggattgcgcatgc

SEQ ID NO: 6487 - DNA, 40 bp, Artificial Sequence
  Synthetic Oligonucleotide
catcggagtctgcctatcatgcgcaatcatgttgtcagga

SEQ ID NO: 6488 - DNA, 40 bp, Artificial Sequence
  Synthetic Oligonucleotide
catcggaagtccctcctcgtcttgatgcactatcatctca

SEQ ID NO: 6489 - DNA, 40 bp, Artificial Sequence
  Synthetic Oligonucleotide
catcgatacatccaaacgagccttcgcggctggcgctatc

SEQ ID NO: 6490 - DNA, 40 bp, Artificial Sequence
  Synthetic Oligonucleotide
catcccggtggctcgtgttcagcaacgctccttaacacga

SEQ ID NO: 6491 - DNA, 40 bp, Artificial Sequence
  Synthetic Oligonucleotide
cataagcttgtcttttaatctcggcagagtgctcatgagc

SEQ ID NO: 6492 - DNA, 40 bp, Artificial Sequence
  Synthetic Oligonucleotide
cagtcaatgttcatcgagcgagttatattgttgcataacg

SEQ ID NO: 6493 - DNA, 40 bp, Artificial Sequence
  Synthetic Oligonucleotide
cagcttatccgttgtccgtcctcttgtgtattgcgcatgc

SEQ ID NO: 6494 - DNA, 40 bp, Artificial Sequence
  Synthetic Oligonucleotide
cagcttaccgttgtcgtcctcctgtagtagttgcgcatgc

SEQ ID NO: 6495 - DNA, 40 bp, Artificial Sequence
  Synthetic Oligonucleotide
cagctatccgttgtccgtcctcttgtggtactgcgcatgc

SEQ ID NO: 6496 - DNA, 40 bp, Artificial Sequence
  Synthetic Oligonucleotide
cagctaacgctcatcgagacgggatcgtcgaagtgttttg

SEQ ID NO: 6497 - DNA, 40 bp, Artificial Sequence
  Synthetic Oligonucleotide
cacttatccgtttgtccgtcctcttgtgtattgcgcatgc

SEQ ID NO: 6498 - DNA, 40 bp, Artificial Sequence
  Synthetic Oligonucleotide
cacttatccgttgtccgtcctcctgtgtattgcgcatgtc

SEQ ID NO: 6499 - DNA, 40 bp, Artificial Sequence
  Synthetic Oligonucleotide
cacttatccgttgtccgtcctcctgtggtattgcgcatgc

SEQ ID NO: 6500 - DNA, 40 bp, Artificial Sequence
  Synthetic Oligonucleotide
cacttatccgctgtccgtcctcttgtggtattgcgcatgc

SEQ ID NO: 6501 - DNA, 40 bp, Artificial Sequence
  Synthetic Oligonucleotide
cactgtccgtttgtccgtcctcttgtggtattgcgcatcc

SEQ ID NO: 6502 - DNA, 40 bp, Artificial Sequence
  Synthetic Oligonucleotide
cactgtccgtttgtccgtcctcttgaggtattgcgcatgc

SEQ ID NO: 6503 - DNA, 40 bp, Artificial Sequence
  Synthetic Oligonucleotide
cactgtccgttgtccgtcctctcgtcggtattgcgcatgc

SEQ ID NO: 6504 - DNA, 40 bp, Artificial Sequence
  Synthetic Oligonucleotide
cactggaagtccctcctcgtcttgatgcactatcatctca

SEQ ID NO: 6505 - DNA, 40 bp, Artificial Sequence
  Synthetic Oligonucleotide
cactattcgtttgtccgtcctcttgtggtattgcgcatac

SEQ ID NO: 6506 - DNA, 40 bp, Artificial Sequence
  Synthetic Oligonucleotide
cactattcgtttgtccgtcctcttgtggtattgcgcacgc

SEQ ID NO: 6507 - DNA, 40 bp, Artificial Sequence
  Synthetic Oligonucleotide
cactattcgcttgtccgtcctcttgtggtgttgcgcatgc

SEQ ID NO: 6508 - DNA, 40 bp, Artificial Sequence
  Synthetic Oligonucleotide
cactatctgtttgtccgtcctcttgtggtattgcgcgtgc

SEQ ID NO: 6509 - DNA, 40 bp, Artificial Sequence
  Synthetic Oligonucleotide
cactatctgtttgcccgtcctcttgtggtattgcgcatgc

SEQ ID NO: 6510 - DNA, 40 bp, Artificial Sequence
  Synthetic Oligonucleotide
cactatctgtctgtccgtcctcttgtggtattgcgcatgc

SEQ ID NO: 6511 - DNA, 40 bp, Artificial Sequence
  Synthetic Oligonucleotide
cactatctgtcatcgagcgagcactttgtgcaatcacaca

SEQ ID NO: 6512 - DNA, 40 bp, Artificial Sequence
  Synthetic Oligonucleotide
cactatctgcttgtccgtcctcttgtggtattgcgcatgc

SEQ ID NO: 6513 - skipped

SEQ ID NO: 6514 - DNA, 40 bp, Artificial Sequence
  Synthetic Oligonucleotide
cactatcgttgtcccgtctcttgtggtattgcgcatcgcg

SEQ ID NO: 6515 - DNA, 40 bp, Artificial Sequence
  Synthetic Oligonucleotide
cactatcgtgttgtccgtcctcttgtggtattgcgcatgc

SEQ ID NO: 6516 - DNA, 40 bp, Artificial Sequence
  Synthetic Oligonucleotide
cactatccgtttttccgtcctcttgtggtattgcgcatgc

SEQ ID NO: 6517 - DNA, 40 bp, Artificial Sequence
  Synthetic Oligonucleotide
cactatccgtttttccgtcctctcgtggtattgcgcatgc

SEQ ID NO: 6518 - DNA, 40 bp, Artificial Sequence
  Synthetic Oligonucleotide
cactatccgttttgtccgtcctctgtggtattgcgcatgc

SEQ ID NO: 6519 - DNA, 40 bp, Artificial Sequence
  Synthetic Oligonucleotide
cactatccgtttgtctgtcctcttatggtattgcgcatgc

SEQ ID NO: 6520 - DNA, 40 bp, Artificial Sequence
  Synthetic Oligonucleotide
cactatccgtttgtctgtcctcctgtggtattgcgcatgc

SEQ ID NO: 6521 - DNA, 40 bp, Artificial Sequence
  Synthetic Oligonucleotide
cactatccgtttgtctgtcctcctgaggtattgcgcatgc

SEQ ID NO: 6522 - DNA, 40 bp, Artificial Sequence
  Synthetic Oligonucleotide
cactatccgtttgtcggtcctcttgtggtattgcgcatgc

SEQ ID NO: 6523 - DNA, 40 bp, Artificial Sequence
  Synthetic Oligonucleotide
cactatccgtttgtcggtcctctcgtggtattgcgcatgc

SEQ ID NO: 6524 - DNA, 40 bp, Artificial Sequence
  Synthetic Oligonucleotide
cactatccgtttgtccgttctcttgtggtattgcgcacgc

SEQ ID NO: 6525 - DNA, 40 bp, Artificial Sequence
  Synthetic Oligonucleotide
cactatccgtttgtccgttctctcgcggtattgcgcatgc

SEQ ID NO: 6526 - DNA, 40 bp, Artificial Sequence
  Synthetic Oligonucleotide
cactatccgtttgtccgttctcctgtggtattgcgcatgc

SEQ ID NO: 6527 - DNA, 40 bp, Artificial Sequence
  Synthetic Oligonucleotide
cactatccgtttgtccgttcctctgtggtattgcgcatgc

SEQ ID NO: 6528 - DNA, 40 bp, Artificial Sequence
  Synthetic Oligonucleotide
cactatccgtttgtccgtcttcttgtggtgttgcgcatgc

SEQ ID NO: 6529 - DNA, 40 bp, Artificial Sequence
  Synthetic Oligonucleotide
cactatccgtttgtccgtcttcttgtggtattgcgcacgc

SEQ ID NO: 6530 - DNA, 40 bp, Artificial Sequence
  Synthetic Oligonucleotide
cactatccgtttgtccgtcttctggtggtattgcgcatgc

SEQ ID NO: 6531 - DNA, 40 bp, Artificial Sequence
  Synthetic Oligonucleotide
cactatccgtttgtccgtcttcctgtggtattgcgcatgc

SEQ ID NO: 6532 - DNA, 40 bp, Artificial Sequence
  Synthetic Oligonucleotide
cactatccgtttgtccgtctcttgtgtgatatgcgcatcg

SEQ ID NO: 6533 - DNA, 40 bp, Artificial Sequence
  Synthetic Oligonucleotide
cactatccgtttgtccgtctccttgtggtattgcgcatgc

SEQ ID NO: 6534 - DNA, 40 bp, Artificial Sequence
  Synthetic Oligonucleotide
cactatccgtttgtccgtccttcttgtcgtatgcgcatag

SEQ ID NO: 6535 - DNA, 40 bp, Artificial Sequence
  Synthetic Oligonucleotide
cactatccgtttgtccgtccttctgtggtattgcgcgtgc

SEQ ID NO: 6536 - DNA, 40 bp, Artificial Sequence
  Synthetic Oligonucleotide
cactatccgtttgtccgtccttctgtggtattgcgcatgc

SEQ ID NO: 6537 - DNA, 40 bp, Artificial Sequence
  Synthetic Oligonucleotide
cactatccgtttgtccgtccttctcgtggtatgcgcatag

SEQ ID NO: 6538 - DNA, 40 bp, Artificial Sequence
  Synthetic Oligonucleotide
cactatccgtttgtccgtcctcttgtggttttgcgcatgc

SEQ ID NO: 6539 - DNA, 40 bp, Artificial Sequence
  Synthetic Oligonucleotide
cactatccgtttgtccgtcctcttgtggtgttgcgcacgc

SEQ ID NO: 6540 - DNA, 40 bp, Artificial Sequence
  Synthetic Oligonucleotide
cactatccgtttgtccgtcctcttgtggtattgtgcacgc

SEQ ID NO: 6541 - DNA, 40 bp, Artificial Sequence
  Synthetic Oligonucleotide
cactatccgtttgtccgtcctcttgtggtattgcgcgcgc

SEQ ID NO: 6542 - DNA, 40 bp, Artificial Sequence
  Synthetic Oligonucleotide
cactatccgtttgtccgtcctcttgtggtattgcgcagac

SEQ ID NO: 6543 - DNA, 40 bp, Artificial Sequence
  Synthetic Oligonucleotide
cactatccgtttgtccgtcctcttgtggtattccgcatgc

SEQ ID NO: 6544 - DNA, 40 bp, Artificial Sequence
  Synthetic Oligonucleotide
cactatccgtttgtccgtcctcttgtggtatgcgcacgac

SEQ ID NO: 6545 - DNA, 40 bp, Artificial Sequence
  Synthetic Oligonucleotide
cactatccgtttgtccgtcctcttgtggtactgcgcgtgc

SEQ ID NO: 6546 - DNA, 40 bp, Artificial Sequence
  Synthetic Oligonucleotide
cactatccgtttgtccgtcctcttgtggtactgcgcacgc

SEQ ID NO: 6547 - DNA, 40 bp, Artificial Sequence
  Synthetic Oligonucleotide
cactatccgtttgtccgtcctcttgtggcactgcgcatgc

SEQ ID NO: 6548 - DNA, 40 bp, Artificial Sequence
  Synthetic Oligonucleotide
cactatccgtttgtccgtcctcttgtggaattgcgcgtgc

SEQ ID NO: 6549 - DNA, 40 bp, Artificial Sequence
  Synthetic Oligonucleotide
cactatccgtttgtccgtcctcttgtgatactgcgcatgc

SEQ ID NO: 6550 - DNA, 40 bp, Artificial Sequence
  Synthetic Oligonucleotide
cactatccgtttgtccgtcctcttgtagtattgcgcacgc

SEQ ID NO: 6551 - DNA, 40 bp, Artificial Sequence
  Synthetic Oligonucleotide
cactatccgtttgtccgtcctcttgcggtattgcgtatgc

SEQ ID NO: 6552 - DNA, 40 bp, Artificial Sequence
  Synthetic Oligonucleotide
cactatccgtttgtccgtcctcttgaggtgttgcgcatgc

SEQ ID NO: 6553 - DNA, 40 bp, Artificial Sequence
  Synthetic Oligonucleotide
cactatccgtttgtccgtcctcttgaggtattgcgcatac

SEQ ID NO: 6554 - DNA, 40 bp, Artificial Sequence
  Synthetic Oligonucleotide
cactatccgtttgtccgtcctcttatggtattgcgcaagc

SEQ ID NO: 6555 - DNA, 40 bp, Artificial Sequence
  Synthetic Oligonucleotide
cactatccgtttgtccgtcctcttacggtattgcgcatgc

SEQ ID NO: 6556 - DNA, 40 bp, Artificial Sequence
  Synthetic Oligonucleotide
cactatccgtttgtccgtcctctgtggtattcgcgcatgc

SEQ ID NO: 6557 - DNA, 40 bp, Artificial Sequence
  Synthetic Oligonucleotide
cactatccgtttgtccgtcctctgtggtaattgcgcatgc

SEQ ID NO: 6558 - DNA, 40 bp, Artificial Sequence
  Synthetic Oligonucleotide
cactatccgtttgtccgtcctctcgttgtattgcgcatgc

SEQ ID NO: 6559 - DNA, 40 bp, Artificial Sequence
  Synthetic Oligonucleotide
cactatccgtttgtccgtcctctcgtgttattgcgcatgc

SEQ ID NO: 6560 - DNA, 40 bp, Artificial Sequence
  Synthetic Oligonucleotide
cactatccgtttgtccgtcctctcgtggttttgcgcatgc

SEQ ID NO: 6561 - DNA, 40 bp, Artificial Sequence
  Synthetic Oligonucleotide
cactatccgtttgtccgtcctctcgtggtattgcgtaagc

SEQ ID NO: 6562 - DNA, 40 bp, Artificial Sequence
  Synthetic Oligonucleotide
cactatccgtttgtccgtcctctcgtggtattgcgcctgc

SEQ ID NO: 6563 - DNA, 40 bp, Artificial Sequence
  Synthetic Oligonucleotide
cactatccgtttgtccgtcctctcgtggtattgcgcatcg

SEQ ID NO: 6564 - DNA, 40 bp, Artificial Sequence
  Synthetic Oligonucleotide
cactatccgtttgtccgtcctctcgtggtattgcgcacac

SEQ ID NO: 6565 - DNA, 40 bp, Artificial Sequence
  Synthetic Oligonucleotide
cactatccgtttgtccgtcctctcgtggtattgagcatgc

SEQ ID NO: 6566 - DNA, 40 bp, Artificial Sequence
  Synthetic Oligonucleotide
cactatccgtttgtccgtcctctcgtggtatgtcgcatgc

SEQ ID NO: 6567 - DNA, 40 bp, Artificial Sequence
  Synthetic Oligonucleotide
cactatccgtttgtccgtcctctcgtggtatagcgcatgc

SEQ ID NO: 6568 - DNA, 40 bp, Artificial Sequence
  Synthetic Oligonucleotide
cactatccgtttgtccgtcctctcgtggtagtgcgcatgc

SEQ ID NO: 6569 - DNA, 40 bp, Artificial Sequence
  Synthetic Oligonucleotide
cactatccgtttgtccgtcctctcgtggcgttgcgcatgc

SEQ ID NO: 6570 - DNA, 40 bp, Artificial Sequence
  Synthetic Oligonucleotide
cactatccgtttgtccgtcctctcgtgatatgcgcatcgc

SEQ ID NO: 6571 - DNA, 40 bp, Artificial Sequence
  Synthetic Oligonucleotide
cactatccgtttgtccgtcctctcgtagtattgcgcacgc

SEQ ID NO: 6572 - DNA, 40 bp, Artificial Sequence
  Synthetic Oligonucleotide
cactatccgtttgtccgtcctctcgcggtgttgcgcatgc

SEQ ID NO: 6573 - DNA, 40 bp, Artificial Sequence
  Synthetic Oligonucleotide
cactatccgtttgtccgtcctctcctggtgttgcgcatgc

SEQ ID NO: 6574 - DNA, 40 bp, Artificial Sequence
  Synthetic Oligonucleotide
cactatccgtttgtccgtcctcgcgtggtattgcgcatgc

SEQ ID NO: 6575 - DNA, 40 bp, Artificial Sequence
  Synthetic Oligonucleotide
cactatccgtttgtccgtcctccttgtggtattgcgcatg

SEQ ID NO: 6576 - DNA, 40 bp, Artificial Sequence
  Synthetic Oligonucleotide
cactatccgtttgtccgtcctcctgtgtatgcgcatgccc

SEQ ID NO: 6577 - DNA, 40 bp, Artificial Sequence
  Synthetic Oligonucleotide
cactatccgtttgtccgtcctcctgtggttttgcgcatgc

SEQ ID NO: 6578 - DNA, 40 bp, Artificial Sequence
  Synthetic Oligonucleotide
cactatccgtttgtccgtcctcctgtggtgattgcgcatg

SEQ ID NO: 6579 - DNA, 40 bp, Artificial Sequence
  Synthetic Oligonucleotide
cactatccgtttgtccgtcctcctgtggtattgcgcaggc

SEQ ID NO: 6580 - DNA, 40 bp, Artificial Sequence
  Synthetic Oligonucleotide
cactatccgtttgtccgtcctcctgtggtattgcgcaagc

SEQ ID NO: 6581 - DNA, 40 bp, Artificial Sequence
  Synthetic Oligonucleotide
cactatccgtttgtccgtcctcctgtggtattgcccatgc

SEQ ID NO: 6582 - DNA, 40 bp, Artificial Sequence
  Synthetic Oligonucleotide
cactatccgtttgtccgtcctcctgtggtattgcacatgc

SEQ ID NO: 6583 - DNA, 40 bp, Artificial Sequence
  Synthetic Oligonucleotide
cactatccgtttgtccgtcctcctgtggtatcgcgcatgc

SEQ ID NO: 6584 - DNA, 40 bp, Artificial Sequence
  Synthetic Oligonucleotide
cactatccgtttgtccgtcctcctgtggtactgcgcatgc

SEQ ID NO: 6585 - DNA, 40 bp, Artificial Sequence
  Synthetic Oligonucleotide
cactatccgtttgtccgtcctcctgcggtattgcgcatgc

SEQ ID NO: 6586 - DNA, 40 bp, Artificial Sequence
  Synthetic Oligonucleotide
cactatccgtttgtccgtcctcatgtggtattgcgtatgc

SEQ ID NO: 6587 - DNA, 40 bp, Artificial Sequence
  Synthetic Oligonucleotide
cactatccgtttgtccgtcctcatatggtattgcgcatgc

SEQ ID NO: 6588 - DNA, 40 bp, Artificial Sequence
  Synthetic Oligonucleotide
cactatccgtttgtccgtcccttgtcggtattgcgcacgc

SEQ ID NO: 6589 - DNA, 40 bp, Artificial Sequence
  Synthetic Oligonucleotide
cactatccgtttgtccgtccctctgtggtattgcgcatgc

SEQ ID NO: 6590 - DNA, 40 bp, Artificial Sequence
  Synthetic Oligonucleotide
cactatccgtttgtccgtccctctcgtggtatgcgcatgc

SEQ ID NO: 6591 - DNA, 40 bp, Artificial Sequence
  Synthetic Oligonucleotide
cactatccgtttgtccgtcatctcgtggtattgcgcatgc

SEQ ID NO: 6592 - DNA, 40 bp, Artificial Sequence
  Synthetic Oligonucleotide
cactatccgtttgtccggcctcctgtggtattgcgcatgc

SEQ ID NO: 6593 - DNA, 40 bp, Artificial Sequence
  Synthetic Oligonucleotide
cactatccgtttgtccgccttcttatggtattgcgcatgc

SEQ ID NO: 6594 - DNA, 40 bp, Artificial Sequence
  Synthetic Oligonucleotide
cactatccgtttgtccgccctcttgtggtattgcgcatcg

SEQ ID NO: 6595 - DNA, 40 bp, Artificial Sequence
  Synthetic Oligonucleotide
cactatccgtttgtccgccctctcgtggtgttgcgcatgc

SEQ ID NO: 6596 - DNA, 40 bp, Artificial Sequence
  Synthetic Oligonucleotide
cactatccgtttgtccgacctcttgtgggattgcgcatgc

SEQ ID NO: 6597 - DNA, 40 bp, Artificial Sequence
  Synthetic Oligonucleotide
cactatccgtttgtcccgtctcttgtggtattgcgcatgc

SEQ ID NO: 6598 - DNA, 40 bp, Artificial Sequence
  Synthetic Oligonucleotide
cactatccgtttgtccatcctcttgtggtattgcgcacgc

SEQ ID NO: 6599 - DNA, 40 bp, Artificial Sequence
  Synthetic Oligonucleotide
cactatccgtttgtccatcctcctgtggtattgcgcatgc

SEQ ID NO: 6600 - DNA, 40 bp, Artificial Sequence
  Synthetic Oligonucleotide
cactatccgtttgtcagtcctctcgtggtattgcgcatgc

SEQ ID NO: 6601 - DNA, 40 bp, Artificial Sequence
  Synthetic Oligonucleotide
cactatccgtttgtacgtcctcttgtggtattgcgcatgc

SEQ ID NO: 6602 - DNA, 40 bp, Artificial Sequence
  Synthetic Oligonucleotide
cactatccgtttggctcgtcctcttgtggattgcgcatgc

SEQ ID NO: 6603 - DNA, 40 bp, Artificial Sequence
  Synthetic Oligonucleotide
cactatccgtttgctcgtcctcttgtggtattgcgcatac

SEQ ID NO: 6604 - DNA, 40 bp, Artificial Sequence
  Synthetic Oligonucleotide
cactatccgtttgctcgtcctctcgtggtattgcgcatgc

SEQ ID NO: 6605 - DNA, 40 bp, Artificial Sequence
  Synthetic Oligonucleotide
cactatccgtttgcctcgtcctctgtggtattgcgcatgc

SEQ ID NO: 6606 - DNA, 40 bp, Artificial Sequence
  Synthetic Oligonucleotide
cactatccgtttgcccgtcctcttgtggtgttgcgcatgc

SEQ ID NO: 6607 - DNA, 40 bp, Artificial Sequence
  Synthetic Oligonucleotide
cactatccgtttgcccgtcctcttgcggtattgcgcatgc

SEQ ID NO: 6608 - DNA, 40 bp, Artificial Sequence
  Synthetic Oligonucleotide
cactatccgtttgatcttgtctctccctctcaggcaaccg

SEQ ID NO: 6609 - DNA, 40 bp, Artificial Sequence
  Synthetic Oligonucleotide
cactatccgtttgatccgtcccttgtggtattgcgcatgc

SEQ ID NO: 6610 - DNA, 40 bp, Artificial Sequence
  Synthetic Oligonucleotide
cactatccgtttgactcgtcctctgtggtattgcgcatgc

SEQ ID NO: 6611 - DNA, 40 bp, Artificial Sequence
  Synthetic Oligonucleotide
cactatccgtttgaccgtcctctcgtggtattgcgcatgc

SEQ ID NO: 6612 - DNA, 40 bp, Artificial Sequence
  Synthetic Oligonucleotide
cactatccgtttctccgtcctctcgtggtattgcgcatgc

SEQ ID NO: 6613 - DNA, 40 bp, Artificial Sequence
  Synthetic Oligonucleotide
cactatccgtttcgtccgtcctcttgtggtatgcgcatgc

SEQ ID NO: 6614 - DNA, 40 bp, Artificial Sequence
  Synthetic Oligonucleotide
cactatccgtttcgtccgtcctctgtggtattgcgcatgc

SEQ ID NO: 6615 - DNA, 40 bp, Artificial Sequence
  Synthetic Oligonucleotide
cactatccgtttcgtccgtcctctcgtggtatgcgcatgc

SEQ ID NO: 6616 - DNA, 40 bp, Artificial Sequence
  Synthetic Oligonucleotide
cactatccgtttatccgtcctcttgtggtatcgcgcatgc

SEQ ID NO: 6617 - DNA, 40 bp, Artificial Sequence
  Synthetic Oligonucleotide
cactatccgtttatccgtcctctcgtggtattgcgcatgc

SEQ ID NO: 6618 - DNA, 40 bp, Artificial Sequence
  Synthetic Oligonucleotide
cactatccgttgttccgtcctcttgtgggattgcgcatgc

SEQ ID NO: 6619 - DNA, 40 bp, Artificial Sequence
  Synthetic Oligonucleotide
cactatccgttgtcgtccttcttgtgtacttgcgcatgtc

SEQ ID NO: 6620 - DNA, 40 bp, Artificial Sequence
  Synthetic Oligonucleotide
cactatccgttgtccgtcttcctgtggtattgcgcatgtc

SEQ ID NO: 6621 - DNA, 40 bp, Artificial Sequence
  Synthetic Oligonucleotide
cactatccgttgtccgtctcttgtgtaacatgcgcatagc

SEQ ID NO: 6622 - DNA, 40 bp, Artificial Sequence
  Synthetic Oligonucleotide
cactatccgttgtccgtccttcttgtcgtattgcgcatgc

SEQ ID NO: 6623 - DNA, 40 bp, Artificial Sequence
  Synthetic Oligonucleotide
cactatccgttgtccgtccttcttatggtattgcgcatgc

SEQ ID NO: 6624 - DNA, 40 bp, Artificial Sequence
  Synthetic Oligonucleotide
cactatccgttgtccgtccttctcgtggtattgtgcatgc

SEQ ID NO: 6625 - DNA, 40 bp, Artificial Sequence
  Synthetic Oligonucleotide
cactatccgttgtccgtccttctcgtggtattgcgcatgc

SEQ ID NO: 6626 - DNA, 40 bp, Artificial Sequence
  Synthetic Oligonucleotide
cactatccgttgtccgtcctcttgtgtatgcgtacatggc

SEQ ID NO: 6627 - DNA, 40 bp, Artificial Sequence
  Synthetic Oligonucleotide
cactatccgttgtccgtcctcttgtggtattgcgcattgc

SEQ ID NO: 6628 - DNA, 40 bp, Artificial Sequence
  Synthetic Oligonucleotide
cactatccgttgtccgtcctcttgtggtattgcgcatcga

SEQ ID NO: 6629 - DNA, 40 bp, Artificial Sequence
  Synthetic Oligonucleotide
cactatccgttgtccgtcctcttgtggtattgcgacatgc

SEQ ID NO: 6630 - DNA, 40 bp, Artificial Sequence
  Synthetic Oligonucleotide
cactatccgttgtccgtcctcttgtggtattgccgcatgc

SEQ ID NO: 6631 - DNA, 40 bp, Artificial Sequence
  Synthetic Oligonucleotide
cactatccgttgtccgtcctcttgtggaattgcgcatgtc

SEQ ID NO: 6632 - DNA, 40 bp, Artificial Sequence
  Synthetic Oligonucleotide
cactatccgttgtccgtcctcttcgtggtattgcgcatcg

SEQ ID NO: 6633 - DNA, 40 bp, Artificial Sequence
  Synthetic Oligonucleotide
cactatccgttgtccgtcctctcgtggtattgtcgcatgc

SEQ ID NO: 6634 - DNA, 40 bp, Artificial Sequence
  Synthetic Oligonucleotide
cactatccgttgtccgtcctctcgtggtattgccgcatgc

SEQ ID NO: 6635 - DNA, 40 bp, Artificial Sequence
  Synthetic Oligonucleotide
cactatccgttgtccgtcctcgttgtggtattgcgcatgc

SEQ ID NO: 6636 - DNA, 40 bp, Artificial Sequence
  Synthetic Oligonucleotide
cactatccgttgtccgtcctcctgtcggtattgcgcatgc

SEQ ID NO: 6637 - DNA, 40 bp, Artificial Sequence
  Synthetic Oligonucleotide
cactatccgttgtccgtccgtcttgtggtattgcgcatgc

SEQ ID NO: 6638 - DNA, 40 bp, Artificial Sequence
  Synthetic Oligonucleotide
cactatccgttgtccggtcctcttgtggtattgcgcatgc

SEQ ID NO: 6639 - DNA, 40 bp, Artificial Sequence
  Synthetic Oligonucleotide
cactatccgttgtccgatcctcttgtggtatgcgtcatgc

SEQ ID NO: 6640 - DNA, 40 bp, Artificial Sequence
  Synthetic Oligonucleotide
cactatccgttgtccgatcctctcgtggtactgcgcatgc

SEQ ID NO: 6641 - DNA, 40 bp, Artificial Sequence
  Synthetic Oligonucleotide
cactatccgttgtcccgtcctcttgtggtattgcgcatgc

SEQ ID NO: 6642 - DNA, 40 bp, Artificial Sequence
  Synthetic Oligonucleotide
cactatccgttgtcccgtccctctgtggtattgcgcatgc

SEQ ID NO: 6643 - DNA, 40 bp, Artificial Sequence
  Synthetic Oligonucleotide
cactatccgttgctccgtcctctcgtggtattgcgcatgc

SEQ ID NO: 6644 - DNA, 40 bp, Artificial Sequence
  Synthetic Oligonucleotide
cactatccgttgcctcgtcctcttgtggtattgcgcatgc

SEQ ID NO: 6645 - DNA, 40 bp, Artificial Sequence
  Synthetic Oligonucleotide
cactatccgttgcctcgtcctctcgtggtattgcgcatgc

SEQ ID NO: 6646 - DNA, 40 bp, Artificial Sequence
  Synthetic Oligonucleotide
cactatccgttctgtccgtcctcttgtggtattgcgctgc

SEQ ID NO: 6647 - DNA, 40 bp, Artificial Sequence
  Synthetic Oligonucleotide
cactatccgttctgtccgtcctcttgtggtattgcgcatg

SEQ ID NO: 6648 - DNA, 40 bp, Artificial Sequence
  Synthetic Oligonucleotide
cactatccgttctgtccgtcctcttgtggtatgcgcatgc

SEQ ID NO: 6649 - DNA, 40 bp, Artificial Sequence
  Synthetic Oligonucleotide
cactatccgttctgtccgtcctctgtggtattgcgcacgc

SEQ ID NO: 6650 - DNA, 40 bp, Artificial Sequence
  Synthetic Oligonucleotide
cactatccgttctccgtcctcttgtggtattgcgcatgtc

SEQ ID NO: 6651 - DNA, 40 bp, Artificial Sequence
  Synthetic Oligonucleotide
cactatccgttcgtcgtcctcttgtcggtattgcgcatgc

SEQ ID NO: 6652 - DNA, 40 bp, Artificial Sequence
  Synthetic Oligonucleotide
cactatccgttcgtccgtcctcttgtggcattgcgcatgc

SEQ ID NO: 6653 - DNA, 40 bp, Artificial Sequence
  Synthetic Oligonucleotide
cactatccgttcgtccgtcctcttgaggtattgcgcatgc

SEQ ID NO: 6654 - DNA, 40 bp, Artificial Sequence
  Synthetic Oligonucleotide
cactatccgttagtccgtcctctcgtggtattgcgcatgc

SEQ ID NO: 6655 - DNA, 40 bp, Artificial Sequence
  Synthetic Oligonucleotide
cactatccgtgtgtccgtcctctcgtggtattgcgcatgc

SEQ ID NO: 6656 - DNA, 40 bp, Artificial Sequence
  Synthetic Oligonucleotide
cactatccgtcttgacgtattcccttcggacatccatcaa

SEQ ID NO: 6657 - DNA, 40 bp, Artificial Sequence
  Synthetic Oligonucleotide
cactatccgtcttaacgtgttcccttcggacatccgtcaa

SEQ ID NO: 6658 - DNA, 40 bp, Artificial Sequence
  Synthetic Oligonucleotide
cactatccgtcttaacgtgttcccttcggacatccctcaa

SEQ ID NO: 6659 - DNA, 40 bp, Artificial Sequence
  Synthetic Oligonucleotide
cactatccgtctgtccgtcctcttgtggtattgcgcttgc

SEQ ID NO: 6660 - DNA, 40 bp, Artificial Sequence
  Synthetic Oligonucleotide
cactatccgtctgtccgtcctcttgtggtattgcacatgc

SEQ ID NO: 6661 - DNA, 40 bp, Artificial Sequence
  Synthetic Oligonucleotide
cactatccgtctgtccgtcctcttgtggtaatgcgcatgc

SEQ ID NO: 6662 - DNA, 40 bp, Artificial Sequence
  Synthetic Oligonucleotide
cactatccgtctgtccgtcctctagtggtattgcgcatgc

SEQ ID NO: 6663 - DNA, 40 bp, Artificial Sequence
  Synthetic Oligonucleotide
cactatccgtctgtccgccctcttgtggtattgcgcatgc

SEQ ID NO: 6664 - DNA, 40 bp, Artificial Sequence
  Synthetic Oligonucleotide
cactatccgtctctcgtccttcttgtggtattgcgcatgc

SEQ ID NO: 6665 - DNA, 40 bp, Artificial Sequence
  Synthetic Oligonucleotide
cactatccgtatgtccgtcctctcgtggtattgcgcatgc

SEQ ID NO: 6666 - DNA, 40 bp, Artificial Sequence
  Synthetic Oligonucleotide
cactatccgtatcgagtgttgtcaacaagcggctaaggcc

SEQ ID NO: 6667 - DNA, 40 bp, Artificial Sequence
  Synthetic Oligonucleotide
cactatccgtatcgagcgttgtcaacaagcggttaaggcc

SEQ ID NO: 6668 - DNA, 40 bp, Artificial Sequence
  Synthetic Oligonucleotide
cactatccgtatcgagcgtggtcaacaagcggctaaggcc

SEQ ID NO: 6669 - DNA, 40 bp, Artificial Sequence
  Synthetic Oligonucleotide
cactatccgtatcgagcggtcggtccgtgccctaaaccca

SEQ ID NO: 6670 - DNA, 40 bp, Artificial Sequence
  Synthetic Oligonucleotide
cactatccgtatcgagcgatcgtcgtaatactgcttccaa

SEQ ID NO: 6671 - DNA, 40 bp, Artificial Sequence
  Synthetic Oligonucleotide
cactatccgtagatccgtcatctcactacgcgtatgactc

SEQ ID NO: 6672 - DNA, 40 bp, Artificial Sequence
  Synthetic Oligonucleotide
cactatccgtagatccgtcatctcactacgcgtatagaat

SEQ ID NO: 6673 - DNA, 40 bp, Artificial Sequence
  Synthetic Oligonucleotide
cactatccgtagatccgtcactcactgcgcgtatggaatc

SEQ ID NO: 6674 - DNA, 40 bp, Artificial Sequence
  Synthetic Oligonucleotide
cactatccgtagatccgtcactcactatgcgtatggaatc

SEQ ID NO: 6675 - DNA, 40 bp, Artificial Sequence
  Synthetic Oligonucleotide
cactatccgtagatccgtcactcactacgcgtctggaatc

SEQ ID NO: 6676 - DNA, 40 bp, Artificial Sequence
  Synthetic Oligonucleotide
cactatccgtagatccgtcactcactacgcgcatggaatc

SEQ ID NO: 6677 - DNA, 40 bp, Artificial Sequence
  Synthetic Oligonucleotide
cactatccgtagatccgtcactcactacgcatatggaatc

SEQ ID NO: 6678 - DNA, 40 bp, Artificial Sequence
  Synthetic Oligonucleotide
cactatccgtagatccgccactcactacgcgtatggaatc

SEQ ID NO: 6679 - DNA, 40 bp, Artificial Sequence
  Synthetic Oligonucleotide
cactatccgtagacccgtcactcactacgcgtacggaatc

SEQ ID NO: 6680 - DNA, 40 bp, Artificial Sequence
  Synthetic Oligonucleotide
cactatccggttgtccgtcctcttatggtattgcgcatgc

SEQ ID NO: 6681 - DNA, 40 bp, Artificial Sequence
  Synthetic Oligonucleotide
cactatccggtagatccgtcatctcactacgcgtatgtat

SEQ ID NO: 6682 - DNA, 40 bp, Artificial Sequence
  Synthetic Oligonucleotide
cactatccgcttgttcgtcctcttgtggtattgcgcatgc

SEQ ID NO: 6683 - DNA, 40 bp, Artificial Sequence
  Synthetic Oligonucleotide
cactatccgcttgtccgttctcttgtggtattgcgcatgc

SEQ ID NO: 6684 - DNA, 40 bp, Artificial Sequence
  Synthetic Oligonucleotide
cactatccgcttgtccgtcctcttgtggtattgcgtatgc

SEQ ID NO: 6685 - DNA, 40 bp, Artificial Sequence
  Synthetic Oligonucleotide
cactatccgcttgtccgtcctcttgtggtattgcgcgtgc

SEQ ID NO: 6686 - DNA, 40 bp, Artificial Sequence
  Synthetic Oligonucleotide
cactatccgcttgtccgtcctcttgtggtattgcgcatga

SEQ ID NO: 6687 - DNA, 40 bp, Artificial Sequence
  Synthetic Oligonucleotide
cactatccgcttgtccgtcctcttgtggtattgcgcataa

SEQ ID NO: 6688 - DNA, 40 bp, Artificial Sequence
  Synthetic Oligonucleotide
cactatccgcttgtccgtcctcttgtggtattacgcatgc

SEQ ID NO: 6689 - DNA, 40 bp, Artificial Sequence
  Synthetic Oligonucleotide
cactatccgcttgtccgtcctcttgtggtagtgcgcatgc

SEQ ID NO: 6690 - DNA, 40 bp, Artificial Sequence
  Synthetic Oligonucleotide
cactatccgcttgtccgtcctctcgtggtgttgcgcatgc

SEQ ID NO: 6691 - DNA, 40 bp, Artificial Sequence
  Synthetic Oligonucleotide
cactatccgcttgtccgtcctctcgtggcattgcgcatgc

SEQ ID NO: 6692 - DNA, 40 bp, Artificial Sequence
  Synthetic Oligonucleotide
cactatccgcttgtccgtcctctcgcggtattgcgcatgc

SEQ ID NO: 6693 - DNA, 40 bp, Artificial Sequence
  Synthetic Oligonucleotide
cactatccgcttgtccgtcctcctgtggtactgcgcatgc

SEQ ID NO: 6694 - DNA, 40 bp, Artificial Sequence
  Synthetic Oligonucleotide
cactatccgcttgtccgtccccttgtggtattgcgcatgc

SEQ ID NO: 6695 - DNA, 40 bp, Artificial Sequence
  Synthetic Oligonucleotide
cactatccgcttgtccgccctcttgtggtattgcgcatgc

SEQ ID NO: 6696 - DNA, 40 bp, Artificial Sequence
  Synthetic Oligonucleotide
cactatccgcttgaccgtttatccgatagttgcgaatccg

SEQ ID NO: 6697 - DNA, 40 bp, Artificial Sequence
  Synthetic Oligonucleotide
cactatccgcttgaccgtcctcttgtggtattgcgcatgc

SEQ ID NO: 6698 - DNA, 40 bp, Artificial Sequence
  Synthetic Oligonucleotide
cactatccgcttatgctcgcctctctctcggttgcgcgtt

SEQ ID NO: 6699 - DNA, 40 bp, Artificial Sequence
  Synthetic Oligonucleotide
cactatccgcttacgttcgcctctctctcggttgcgcgtt

SEQ ID NO: 6700 - DNA, 40 bp, Artificial Sequence
  Synthetic Oligonucleotide
cactatccgctcgtccgtcctcttgtggtgttgcgcatgc

SEQ ID NO: 6701 - DNA, 40 bp, Artificial Sequence
  Synthetic Oligonucleotide
cactatccgcgatcgagcgaatcgcatcataaatcgcgtg

SEQ ID NO: 6702 - DNA, 40 bp, Artificial Sequence
  Synthetic Oligonucleotide
cactatccgcatcgagctttcgtccgggagtgcatagcta

SEQ ID NO: 6703 - DNA, 40 bp, Artificial Sequence
  Synthetic Oligonucleotide
cactatccgcatcgacgcgttagtcttgctgccatgcagc

SEQ ID NO: 6704 - DNA, 40 bp, Artificial Sequence
  Synthetic Oligonucleotide
cactatccgcagatccgtcactcactacgcgtatggaatc

SEQ ID NO: 6705 - DNA, 40 bp, Artificial Sequence
  Synthetic Oligonucleotide
cactatccgcaacagacggctctcagatactgtatctttg

SEQ ID NO: 6706 - DNA, 40 bp, Artificial Sequence
  Synthetic Oligonucleotide
cactatccgattgtccgtcctctcgtggtattgcgcatgc

SEQ ID NO: 6707 - DNA, 40 bp, Artificial Sequence
  Synthetic Oligonucleotide
cactatccgacatcgagagagctacgttatcaagcgctaa

SEQ ID NO: 6708 - DNA, 40 bp, Artificial Sequence
  Synthetic Oligonucleotide
cactatccgacatcgagagagctacgtcatctagcgcaaa

SEQ ID NO: 6709 - DNA, 40 bp, Artificial Sequence
  Synthetic Oligonucleotide
cactatccgacatcgagagagctacgtcatcaggcgctaa

SEQ ID NO: 6710 - DNA, 40 bp, Artificial Sequence
  Synthetic Oligonucleotide
cactatccgacatcgagagagatacgtcatcaagcgctaa

SEQ ID NO: 6711 - DNA, 40 bp, Artificial Sequence
  Synthetic Oligonucleotide
cactatccgacatcgaaagagctacgtcatcaagcgctaa

SEQ ID NO: 6712 - DNA, 40 bp, Artificial Sequence
  Synthetic Oligonucleotide
cactatccgaaatcgagcgagaactctggtgttgacgcag

SEQ ID NO: 6713 - DNA, 40 bp, Artificial Sequence
  Synthetic Oligonucleotide
cactatcccgtttgtccgtcctctgtggtattgcgcatgc

SEQ ID NO: 6714 - DNA, 40 bp, Artificial Sequence
  Synthetic Oligonucleotide
cactatcccgttgtccgtcctcttgtggtattgcgcatgc

SEQ ID NO: 6715 - DNA, 40 bp, Artificial Sequence
  Synthetic Oligonucleotide
cactatcccgttgtccgtcctctgtggtattgacgcatgc

SEQ ID NO: 6716 - DNA, 40 bp, Artificial Sequence
  Synthetic Oligonucleotide
cactatccccatcgagcgtgcggtttctgttacactgtta

SEQ ID NO: 6717 - DNA, 40 bp, Artificial Sequence
  Synthetic Oligonucleotide
cactatccccatcgagcgatcgtggtaatactgcttccaa

SEQ ID NO: 6718 - DNA, 40 bp, Artificial Sequence
  Synthetic Oligonucleotide
cactatccccatcgagcgatcgtcgtaatactgctaccaa

SEQ ID NO: 6719 - DNA, 40 bp, Artificial Sequence
  Synthetic Oligonucleotide
cactatccccatcgagcgatcgtcgtaatacagcttccaa

SEQ ID NO: 6720 - DNA, 40 bp, Artificial Sequence
  Synthetic Oligonucleotide
cactatccccatcgagcgatcgtcgtaacactgcttccaa

SEQ ID NO: 6721 - DNA, 40 bp, Artificial Sequence
  Synthetic Oligonucleotide
cactatccccatcgagcgatcgtcgtaaaactgcttccaa

SEQ ID NO: 6722 - DNA, 40 bp, Artificial Sequence
  Synthetic Oligonucleotide
cactatccccatcgagcgatcgccgtaatactgcttccaa

SEQ ID NO: 6723 - DNA, 40 bp, Artificial Sequence
  Synthetic Oligonucleotide
cactatccatttgtccgtcctctcgtggtattgcgcatgc

SEQ ID NO: 6724 - DNA, 40 bp, Artificial Sequence
  Synthetic Oligonucleotide
cactatccatttgtccgtcctcctgtggtattgcgcatgc

SEQ ID NO: 6725 - DNA, 40 bp, Artificial Sequence
  Synthetic Oligonucleotide
cactatccacttaacccgttctcccagagtttggagtgtt

SEQ ID NO: 6726 - DNA, 40 bp, Artificial Sequence
  Synthetic Oligonucleotide
cactatacgtttgtccgtcctctcgtggtattgcgcatgc

SEQ ID NO: 6727 - DNA, 40 bp, Artificial Sequence
  Synthetic Oligonucleotide
cactagtccgttgtccgtcctcttgtggtattgcgcatgc

SEQ ID NO: 6728 - DNA, 40 bp, Artificial Sequence
  Synthetic Oligonucleotide
cactactcgtttgtccgtcctcttgtggtattgcgcatgc

SEQ ID NO: 6729 - DNA, 40 bp, Artificial Sequence
  Synthetic Oligonucleotide
cactactccgttgtccgtcctctgtggtattgcgcatgtc

SEQ ID NO: 6730 - DNA, 40 bp, Artificial Sequence
  Synthetic Oligonucleotide
cactacccgtttgtccgtcctcttgtggtattgcgcaggc

SEQ ID NO: 6731 - DNA, 40 bp, Artificial Sequence
  Synthetic Oligonucleotide
cacgttgaatgttatccgccttgcttccgtccctaggctg

SEQ ID NO: 6732 - DNA, 40 bp, Artificial Sequence
  Synthetic Oligonucleotide
cacgttgaatgttatccgccttgcttccgtccctaagccg

SEQ ID NO: 6733 - DNA, 40 bp, Artificial Sequence
  Synthetic Oligonucleotide
cacgtgcttccaatatgcatctcggacattcctccccccg

SEQ ID NO: 6734 - DNA, 40 bp, Artificial Sequence
  Synthetic Oligonucleotide
cacggttatgtctgactttcgggcgctatcccgatttcgt

SEQ ID NO: 6735 - DNA, 40 bp, Artificial Sequence
  Synthetic Oligonucleotide
caccggaagtccctcctcttcttgatgcactatcatctca

SEQ ID NO: 6736 - DNA, 40 bp, Artificial Sequence
  Synthetic Oligonucleotide
caccggaagtccctcctcgtcttgatacactatcatctca

SEQ ID NO: 6737 - DNA, 40 bp, Artificial Sequence
  Synthetic Oligonucleotide
caccggaagtcccccctcgtcttgatgcactatcatctca

SEQ ID NO: 6738 - DNA, 40 bp, Artificial Sequence
  Synthetic Oligonucleotide
caccatccgtctgtccgtcctcctgtggtattgcgcatgc

SEQ ID NO: 6739 - DNA, 40 bp, Artificial Sequence
  Synthetic Oligonucleotide
cacattggtttgccgccttgtcactccgacgactgtgcca

SEQ ID NO: 6740 - DNA, 40 bp, Artificial Sequence
  Synthetic Oligonucleotide
cacagttaaatacaaccgctttgccgcctctgtatgtctg

SEQ ID NO: 6741 - DNA, 40 bp, Artificial Sequence
  Synthetic Oligonucleotide
cacaatccgtttgtccgtcctctcgtggtattgcgcatgc

SEQ ID NO: 6742 - DNA, 40 bp, Artificial Sequence
  Synthetic Oligonucleotide
cacaatcaagatcctcctaatacgcctcgtcctggtgtcg

SEQ ID NO: 6743 - DNA, 40 bp, Artificial Sequence
  Synthetic Oligonucleotide
cacaagcagtgctggtctgcctcggtccttctcgtttgta

SEQ ID NO: 6744 - DNA, 40 bp, Artificial Sequence
  Synthetic Oligonucleotide
caatgcttgatctcctgtcgactctgcggttgagactacc

SEQ ID NO: 6745 - DNA, 40 bp, Artificial Sequence
  Synthetic Oligonucleotide
caatgcttgatctcctgtcgactctgcggctgagaccact

SEQ ID NO: 6746 - DNA, 40 bp, Artificial Sequence
  Synthetic Oligonucleotide
caatgcttgatctcccgtcgactctgcggctgagactact

SEQ ID NO: 6747 - DNA, 40 bp, Artificial Sequence
  Synthetic Oligonucleotide
caatgctcgatctcctgtcgactctgcggctgagactact

SEQ ID NO: 6748 - DNA, 40 bp, Artificial Sequence
  Synthetic Oligonucleotide
caatatccgtttgtccgtcctcttgtggtattgcgcatgc

SEQ ID NO: 6749 - DNA, 40 bp, Artificial Sequence
  Synthetic Oligonucleotide
caagcacaagattcttccttctgcacgtgcagggctccgg

SEQ ID NO: 6750 - DNA, 40 bp, Artificial Sequence
  Synthetic Oligonucleotide
caaatcctccggccgcttcgaaatagtatgatagtctgcg

SEQ ID NO: 6751 - DNA, 40 bp, Artificial Sequence
  Synthetic Oligonucleotide
attggtccatgagcttctggcactatccagttgacgctca

SEQ ID NO: 6752 - DNA, 40 bp, Artificial Sequence
  Synthetic Oligonucleotide
attgattgcttattggtggcacactattgcctgaacttta

SEQ ID NO: 6753 - DNA, 40 bp, Artificial Sequence
  Synthetic Oligonucleotide
attgattcctattggtggcacactattgccttgaacttta

SEQ ID NO: 6754 - DNA, 40 bp, Artificial Sequence
  Synthetic Oligonucleotide
attctgttttttaggttggcgaggtcctctaacttttggg

SEQ ID NO: 6755 - DNA, 40 bp, Artificial Sequence
  Synthetic Oligonucleotide
attctgttttttaagttggcgaggtcctctagcttttggg

SEQ ID NO: 6756 - DNA, 40 bp, Artificial Sequence
  Synthetic Oligonucleotide
attctgttttttaagttggcgaggtcctctaacttatggg

SEQ ID NO: 6757 - DNA, 40 bp, Artificial Sequence
  Synthetic Oligonucleotide
attctgttctttaagttggcgaggtcctctaacttttggg

SEQ ID NO: 6758 - DNA, 40 bp, Artificial Sequence
  Synthetic Oligonucleotide
attctcgtcgccgttcaatcgactacgcttgatcatgcgg

SEQ ID NO: 6759 - DNA, 40 bp, Artificial Sequence
  Synthetic Oligonucleotide
attccgtttagagaaatctgttggccactatgccatcagt

SEQ ID NO: 6760 - DNA, 40 bp, Artificial Sequence
  Synthetic Oligonucleotide
attccgtttagagaaatctgttggccactatgccaccaat

SEQ ID NO: 6761 - DNA, 40 bp, Artificial Sequence
  Synthetic Oligonucleotide
attcaatccagccgacttggtgtcgttcctctccactaca

SEQ ID NO: 6762 - DNA, 40 bp, Artificial Sequence
  Synthetic Oligonucleotide
attaattgcagcgacttcggtggtgtcctctccattacca

SEQ ID NO: 6763 - DNA, 40 bp, Artificial Sequence
  Synthetic Oligonucleotide
attaattccagtgacttcggtggtgtcctctccattacca

SEQ ID NO: 6764 - DNA, 40 bp, Artificial Sequence
  Synthetic Oligonucleotide
attaattccagcgacttcggtggtgtcttctccattacca

SEQ ID NO: 6765 - DNA, 40 bp, Artificial Sequence
  Synthetic Oligonucleotide
attaattccagcgacttcggtggtgtcctctgcattacca

SEQ ID NO: 6766 - DNA, 40 bp, Artificial Sequence
  Synthetic Oligonucleotide
attaattccagcgacttcggtggtgtcctctccattacaa

SEQ ID NO: 6767 - DNA, 40 bp, Artificial Sequence
  Synthetic Oligonucleotide
attaattccagcgacttcggtggtgtcccctccattacta

SEQ ID NO: 6768 - DNA, 40 bp, Artificial Sequence
  Synthetic Oligonucleotide
attaattccagcgacttcggtggtgccctctccattacca

SEQ ID NO: 6769 - DNA, 40 bp, Artificial Sequence
  Synthetic Oligonucleotide
attaattccagcgacttcggtggcgtcctctccattagca

SEQ ID NO: 6770 - DNA, 40 bp, Artificial Sequence
  Synthetic Oligonucleotide
attaattccagcgacttcggtggcgtcctctccattacca

SEQ ID NO: 6771 - DNA, 40 bp, Artificial Sequence
  Synthetic Oligonucleotide
attaattccagcgacttcgatggtgtcctctccattacca

SEQ ID NO: 6772 - DNA, 40 bp, Artificial Sequence
  Synthetic Oligonucleotide
attaattccagcgactccggtggtgtcctctccattacca

SEQ ID NO: 6773 - DNA, 40 bp, Artificial Sequence
  Synthetic Oligonucleotide
attaatccagcgactttcggtggtgtcctctccattacca

SEQ ID NO: 6774 - DNA, 40 bp, Artificial Sequence
  Synthetic Oligonucleotide
atgtggctttaagcacttctcggtaacttgggcagttacc

SEQ ID NO: 6775 - DNA, 40 bp, Artificial Sequence
  Synthetic Oligonucleotide
atgtgccactgagcttctggcactatccagttgacgctca

SEQ ID NO: 6776 - DNA, 40 bp, Artificial Sequence
  Synthetic Oligonucleotide
atgtccatgagtcttactggcactatccagttgacgctca

SEQ ID NO: 6777 - DNA, 40 bp, Artificial Sequence
  Synthetic Oligonucleotide
atgtccatgagcttctggcatctatccagttgacgctcta

SEQ ID NO: 6778 - DNA, 40 bp, Artificial Sequence
  Synthetic Oligonucleotide
atgtccatgagcttctggcacgtatcccagttgacgctca

SEQ ID NO: 6779 - DNA, 40 bp, Artificial Sequence
  Synthetic Oligonucleotide
atgtccatgacgtctctcggccactatcgattgacgctca

SEQ ID NO: 6780 - DNA, 40 bp, Artificial Sequence
  Synthetic Oligonucleotide
atgtccatgacggctctggcactatccagttgacgctaca

SEQ ID NO: 6781 - DNA, 40 bp, Artificial Sequence
  Synthetic Oligonucleotide
atgtccatgacgcttctggtcactatccagttgacgctca

SEQ ID NO: 6782 - DNA, 40 bp, Artificial Sequence
  Synthetic Oligonucleotide
atgtccatgacgcttctcggcactatccagttgacgctca

SEQ ID NO: 6783 - DNA, 40 bp, Artificial Sequence
  Synthetic Oligonucleotide
atggttccatgagcttctggtactatccagttgacgctca

SEQ ID NO: 6784 - DNA, 40 bp, Artificial Sequence
  Synthetic Oligonucleotide
atggtggcttttagcacttctcggtaacttgggcagttac

SEQ ID NO: 6785 - DNA, 40 bp, Artificial Sequence
  Synthetic Oligonucleotide
atggtggcttttaagcacttctcggtaacttggcagttac

SEQ ID NO: 6786 - DNA, 40 bp, Artificial Sequence
  Synthetic Oligonucleotide
atggtgcttttaagcacttctcggtaacttggacagttac

SEQ ID NO: 6787 - DNA, 40 bp, Artificial Sequence
  Synthetic Oligonucleotide
atggtgctttagctacttctcgtaacttgggtcaagttac

SEQ ID NO: 6788 - DNA, 40 bp, Artificial Sequence
  Synthetic Oligonucleotide
atggtgctttaagcacttctcggtaacttggacgagttac

SEQ ID NO: 6789 - DNA, 40 bp, Artificial Sequence
  Synthetic Oligonucleotide
atggtcttatgagcttctggcactatccagttgacgctca

SEQ ID NO: 6790 - DNA, 40 bp, Artificial Sequence
  Synthetic Oligonucleotide
atggtcccatgagcttcaggcactatccagttgacgctca

SEQ ID NO: 6791 - DNA, 40 bp, Artificial Sequence
  Synthetic Oligonucleotide
atggtccatgagttttctggcactatccagttgacgctca

SEQ ID NO: 6792 - DNA, 40 bp, Artificial Sequence
  Synthetic Oligonucleotide
atggtccatgagtcttctgtcactatccagttgacgctca

SEQ ID NO: 6793 - DNA, 40 bp, Artificial Sequence
  Synthetic Oligonucleotide
atggtccatgagtcttctggcgctatccagttgacgctca

SEQ ID NO: 6794 - DNA, 40 bp, Artificial Sequence
  Synthetic Oligonucleotide
atggtccatgagtcttctggcactatccagttgacgctcg

SEQ ID NO: 6795 - DNA, 40 bp, Artificial Sequence
  Synthetic Oligonucleotide
atggtccatgagtcttctggcactatccagtcgacgctca

SEQ ID NO: 6796 - DNA, 40 bp, Artificial Sequence
  Synthetic Oligonucleotide
atggtccatgagctttctggcactatccagttgacgctca

SEQ ID NO: 6797 - DNA, 40 bp, Artificial Sequence
  Synthetic Oligonucleotide
atggtccatgagcttctggtcactatccagttgacgctca

SEQ ID NO: 6798 - DNA, 40 bp, Artificial Sequence
  Synthetic Oligonucleotide
atggtccatgagcttctggcactatccgtagtgacgctca

SEQ ID NO: 6799 - DNA, 40 bp, Artificial Sequence
  Synthetic Oligonucleotide
atggtccatgagcttctggcactatcccagttgacgctcg

SEQ ID NO: 6800 - DNA, 40 bp, Artificial Sequence
  Synthetic Oligonucleotide
atggtccatgagcttctggcactatccagttggacgctca

SEQ ID NO: 6801 - DNA, 40 bp, Artificial Sequence
  Synthetic Oligonucleotide
atggtccatgagcttctggcactatccagttcgacgctca

SEQ ID NO: 6802 - DNA, 40 bp, Artificial Sequence
  Synthetic Oligonucleotide
atggtccatgagcttctggcacgtatccagttgacgctca

SEQ ID NO: 6803 - DNA, 40 bp, Artificial Sequence
  Synthetic Oligonucleotide
atggtccatgagctctggcatctatcccagttgacgctca

SEQ ID NO: 6804 - DNA, 40 bp, Artificial Sequence
  Synthetic Oligonucleotide
atggtccatgagccttctggcactacccagttgacgctca

SEQ ID NO: 6805 - DNA, 40 bp, Artificial Sequence
  Synthetic Oligonucleotide
atgggtgcttttaagcacttctcggtaacttggcagttac

SEQ ID NO: 6806 - DNA, 40 bp, Artificial Sequence
  Synthetic Oligonucleotide
atggaggctttagacacttctcggtaacttgggcagttac

SEQ ID NO: 6807 - DNA, 40 bp, Artificial Sequence
  Synthetic Oligonucleotide
atggaggctttaagcacttctcggtaacttggtcagttac

SEQ ID NO: 6808 - DNA, 40 bp, Artificial Sequence
  Synthetic Oligonucleotide
atggagcttttaagcacttctcggtaacttgggcagttac

SEQ ID NO: 6809 - DNA, 40 bp, Artificial Sequence
  Synthetic Oligonucleotide
atggagctttaagctacttctcggtaacttgggcagttac

SEQ ID NO: 6810 - DNA, 40 bp, Artificial Sequence
  Synthetic Oligonucleotide
atgcgcaactcatcgtgaagagttcccgtattgcatgcaa

SEQ ID NO: 6811 - DNA, 40 bp, Artificial Sequence
  Synthetic Oligonucleotide
atgcgaacgctattttctgggaagccgcatctcgagcgaa

SEQ ID NO: 6812 - DNA, 40 bp, Artificial Sequence
  Synthetic Oligonucleotide
atgatgggctttaagcacttctcgtaacttgggcagttac

SEQ ID NO: 6813 - DNA, 40 bp, Artificial Sequence
  Synthetic Oligonucleotide
atgatgggcttctaagcacttctcgtaacttgggcagtta

SEQ ID NO: 6814 - DNA, 40 bp, Artificial Sequence
  Synthetic Oligonucleotide
atgatggcttttaagcacttctcggtaacttggcagttac

SEQ ID NO: 6815 - DNA, 40 bp, Artificial Sequence
  Synthetic Oligonucleotide
atgatctcggatctggcgtactacttggacaggttccttc

SEQ ID NO: 6816 - DNA, 40 bp, Artificial Sequence
  Synthetic Oligonucleotide
atgatccatgtagcttctggcactatccagttgacgctca

SEQ ID NO: 6817 - DNA, 40 bp, Artificial Sequence
  Synthetic Oligonucleotide
atgatccatgagcttctggcactatccgagttgacgctca

SEQ ID NO: 6818 - DNA, 40 bp, Artificial Sequence
  Synthetic Oligonucleotide
atgagtccgcggcttcactagactactactgatcacgtcg

SEQ ID NO: 6819 - DNA, 40 bp, Artificial Sequence
  Synthetic Oligonucleotide
atgaggctttaagctacttctcggtaacttgggcagttac

SEQ ID NO: 6820 - DNA, 40 bp, Artificial Sequence
  Synthetic Oligonucleotide
atctccgttctaacacgtgcactatcacggcttagttaga

SEQ ID NO: 6821 - DNA, 40 bp, Artificial Sequence
  Synthetic Oligonucleotide
atctccgtctaactacgtgcactatcacggcttagttggt

SEQ ID NO: 6822 - DNA, 40 bp, Artificial Sequence
  Synthetic Oligonucleotide
atctccgtctaacacgtgcactatcacggccttagttaga

SEQ ID NO: 6823 - DNA, 40 bp, Artificial Sequence
  Synthetic Oligonucleotide
atcgtccatctagtcgcgatacagaatacgactaacataa

SEQ ID NO: 6824 - DNA, 40 bp, Artificial Sequence
  Synthetic Oligonucleotide
atcggtccactgagccttcggcactatcagttgacgctca

SEQ ID NO: 6825 - DNA, 40 bp, Artificial Sequence
  Synthetic Oligonucleotide
atcggccatgagcttctggccactatccagttgacgctca

SEQ ID NO: 6826 - DNA, 40 bp, Artificial Sequence
  Synthetic Oligonucleotide
atcgatgggcctttagcacttctccgtacttggcagttac

SEQ ID NO: 6827 - DNA, 40 bp, Artificial Sequence
  Synthetic Oligonucleotide
atcctttgcgctgcgtacggtttgtcttcctcgttcctct

SEQ ID NO: 6828 - DNA, 40 bp, Artificial Sequence
  Synthetic Oligonucleotide
atccgttctcgtataattcaggatggcttattagctagct

SEQ ID NO: 6829 - DNA, 40 bp, Artificial Sequence
  Synthetic Oligonucleotide
atccgttctcgtataattcaggaaggcttattatctagct

SEQ ID NO: 6830 - DNA, 40 bp, Artificial Sequence
  Synthetic Oligonucleotide
atccgtcctcgtataattcaggatggcttattatctagct

SEQ ID NO: 6831 - DNA, 40 bp, Artificial Sequence
  Synthetic Oligonucleotide
atccggaacgcctcggtcctcgcataatatgatacgtctg

SEQ ID NO: 6832 - DNA, 40 bp, Artificial Sequence
  Synthetic Oligonucleotide
atccggaacgcctcgatcctcgcgtaatatgatacgtctg

SEQ ID NO: 6833 - DNA, 40 bp, Artificial Sequence
  Synthetic Oligonucleotide
atccggaacgcctcgatcctcgcgaaatatgatacgtctg

SEQ ID NO: 6834 - DNA, 40 bp, Artificial Sequence
  Synthetic Oligonucleotide
atccggaacgcctcgatcctcgccatatatgatacgtctg

SEQ ID NO: 6835 - DNA, 40 bp, Artificial Sequence
  Synthetic Oligonucleotide
atccggaacgcctcgatccccgcataatatgatacgtctg

SEQ ID NO: 6836 - DNA, 40 bp, Artificial Sequence
  Synthetic Oligonucleotide
atccgctctcgtataattcaggatggcttattatctagct

SEQ ID NO: 6837 - DNA, 40 bp, Artificial Sequence
  Synthetic Oligonucleotide
atccgcctcgcttgtgcacaacttgtatcccgcgtctgcg

SEQ ID NO: 6838 - DNA, 40 bp, Artificial Sequence
  Synthetic Oligonucleotide
atccgcctcgcttcgtcgcacaactcgcatcgcgtctgcg

SEQ ID NO: 6839 - DNA, 40 bp, Artificial Sequence
  Synthetic Oligonucleotide
atccgcctcgccttgtgcacaactcacatccgcgtctgcg

SEQ ID NO: 6840 - DNA, 40 bp, Artificial Sequence
  Synthetic Oligonucleotide
atccatggtacgcctcgattccgcccgtacatgcatgtaa

SEQ ID NO: 6841 - DNA, 40 bp, Artificial Sequence
  Synthetic Oligonucleotide
atccatggtacgcctcgattccgcccatgcatgcatgtaa

SEQ ID NO: 6842 - DNA, 40 bp, Artificial Sequence
  Synthetic Oligonucleotide
atccatggtacgcctcgattccgcccatacctgcatgtaa

SEQ ID NO: 6843 - DNA, 40 bp, Artificial Sequence
  Synthetic Oligonucleotide
atcatgatggagaaatgaatcactatattcttgtacgctc

SEQ ID NO: 6844 - DNA, 40 bp, Artificial Sequence
  Synthetic Oligonucleotide
atcagttccggcgacttcggtggtgtcctctccattacca

SEQ ID NO: 6845 - DNA, 40 bp, Artificial Sequence
  Synthetic Oligonucleotide
atcagactgcccgtctacacgctgggctaccaccgtattg

SEQ ID NO: 6846 - DNA, 40 bp, Artificial Sequence
  Synthetic Oligonucleotide
atcacagcgcccagaatgccccgtttcccgtgttcgggac

SEQ ID NO: 6847 - DNA, 40 bp, Artificial Sequence
  Synthetic Oligonucleotide
atatgggcttttaagcacttctcggtaacttggcagttac

SEQ ID NO: 6848 - DNA, 40 bp, Artificial Sequence
  Synthetic Oligonucleotide
atatgggctttaagctacttctcggtaacttggcagttac

SEQ ID NO: 6849 - DNA, 40 bp, Artificial Sequence
  Synthetic Oligonucleotide
atatccgcagccacatcaactatgatgacgcttgactgga

SEQ ID NO: 6850 - DNA, 40 bp, Artificial Sequence
  Synthetic Oligonucleotide
ataggtccttgggtatccgcctcgctaagtttgtgcatgc

SEQ ID NO: 6851 - DNA, 40 bp, Artificial Sequence
  Synthetic Oligonucleotide
ataggtcctggggtatccgcctcgctaagtttgtgcgtgc

SEQ ID NO: 6852 - DNA, 40 bp, Artificial Sequence
  Synthetic Oligonucleotide
agttttctcggatccaaacgcatatcctcctccgcctcgc

SEQ ID NO: 6853 - DNA, 40 bp, Artificial Sequence
  Synthetic Oligonucleotide
agttttctcggatccaaacacatatcctcccccgcctcgt

SEQ ID NO: 6854 - DNA, 40 bp, Artificial Sequence
  Synthetic Oligonucleotide
agttctctcggatccaaacgcatatcctcctccgcctcgt

SEQ ID NO: 6855 - DNA, 40 bp, Artificial Sequence
  Synthetic Oligonucleotide
agtactacgcctcgaggagctctcacctccctctgtccgg

SEQ ID NO: 6856 - DNA, 40 bp, Artificial Sequence
  Synthetic Oligonucleotide
agctctttccaggactacctgtgttacaatcgcttcgcca

SEQ ID NO: 6857 - DNA, 40 bp, Artificial Sequence
  Synthetic Oligonucleotide
agcgaaacgctattttctgggaagccgcgtctcgagcgaa

SEQ ID NO: 6858 - DNA, 40 bp, Artificial Sequence
  Synthetic Oligonucleotide
agcattgttccagccttctcccacagcggctggcactatc

SEQ ID NO: 6859 - DNA, 40 bp, Artificial Sequence
  Synthetic Oligonucleotide
agcactatctctggactgaatcgtgcacccgacggttcgc

SEQ ID NO: 6860 - DNA, 40 bp, Artificial Sequence
  Synthetic Oligonucleotide
agcactatctccgtgagtctcgtcaactcccgtacgctag

SEQ ID NO: 6861 - DNA, 40 bp, Artificial Sequence
  Synthetic Oligonucleotide
agatttctcggatccaaacgcatatcctcctccgcctcgt

SEQ ID NO: 6862 - DNA, 40 bp, Artificial Sequence
  Synthetic Oligonucleotide
agattctagattaaccgcctcggtcagcctagattgtgca

SEQ ID NO: 6863 - DNA, 40 bp, Artificial Sequence
  Synthetic Oligonucleotide
agatgggagtacttgttcgactacgatcattgacgtcact

SEQ ID NO: 6864 - DNA, 40 bp, Artificial Sequence
  Synthetic Oligonucleotide
agatgggagactttgctcgactacgatcattgacgtcact

SEQ ID NO: 6865 - DNA, 40 bp, Artificial Sequence
  Synthetic Oligonucleotide
agaccgggccgccttcaagctacgctacctccattgtctg

SEQ ID NO: 6866 - DNA, 40 bp, Artificial Sequence
  Synthetic Oligonucleotide
agaccgggcccgcctcaagctagctacctccaattgtctg

SEQ ID NO: 6867 - DNA, 40 bp, Artificial Sequence
  Synthetic Oligonucleotide
agaccggagcccgcctcaagctagctacctccattgtctg

SEQ ID NO: 6868 - DNA, 40 bp, Artificial Sequence
  Synthetic Oligonucleotide
actgtaggcacctgctctatgtcgtggggagtaacaggtc

SEQ ID NO: 6869 - DNA, 40 bp, Artificial Sequence
  Synthetic Oligonucleotide
actgtaggcacctgctctatatcgtggggagtaacaggtt

SEQ ID NO: 6870 - DNA, 40 bp, Artificial Sequence
  Synthetic Oligonucleotide
actgatgcgatttaaccgggtgtgagttcatcgcagtact

SEQ ID NO: 6871 - DNA, 40 bp, Artificial Sequence
  Synthetic Oligonucleotide
actaccttcgtctagtggttcaatagcatgaaacttcgtg

SEQ ID NO: 6872 - DNA, 40 bp, Artificial Sequence
  Synthetic Oligonucleotide
actaactccagcgacttcggtggtgtcctctccattacca

SEQ ID NO: 6873 - DNA, 40 bp, Artificial Sequence
  Synthetic Oligonucleotide
acgtttgcttctcctgactacatgagattaataaacgcgc

SEQ ID NO: 6874 - DNA, 40 bp, Artificial Sequence
  Synthetic Oligonucleotide
acgttcttctccttgactacatgagattaagtaaacgcgc

SEQ ID NO: 6875 - DNA, 40 bp, Artificial Sequence
  Synthetic Oligonucleotide
acgtgatcagctagtcgtgctttgtccgctatgacattca

SEQ ID NO: 6876 - DNA, 40 bp, Artificial Sequence
  Synthetic Oligonucleotide
acgtccttatcggctaggcggtcttctgcactatcacgat

SEQ ID NO: 6877 - DNA, 40 bp, Artificial Sequence
  Synthetic Oligonucleotide
acgtacccgcctcgctccttgcgaccgcatctgctgtcga

SEQ ID NO: 6878 - DNA, 40 bp, Artificial Sequence
  Synthetic Oligonucleotide
acgtacccgcctcgctccttgcaaccgcatctgctgtcga

SEQ ID NO: 6879 - DNA, 40 bp, Artificial Sequence
  Synthetic Oligonucleotide
acggtttcttcttctgactacatgagattaataaacgcgc

SEQ ID NO: 6880 - DNA, 40 bp, Artificial Sequence
  Synthetic Oligonucleotide
acggtttcttctcctgactacgtgagattaataaacgcgc

SEQ ID NO: 6881 - DNA, 40 bp, Artificial Sequence
  Synthetic Oligonucleotide
acggtttcttctcctgactacatgagattaatagacgcgc

SEQ ID NO: 6882 - DNA, 40 bp, Artificial Sequence
  Synthetic Oligonucleotide
acggtttcttctcctgactacatgagattaataaacgcac

SEQ ID NO: 6883 - DNA, 40 bp, Artificial Sequence
  Synthetic Oligonucleotide
acggttcttctccttgactacatgagattaataaacgcgc

SEQ ID NO: 6884 - DNA, 40 bp, Artificial Sequence
  Synthetic Oligonucleotide
acggtggcttttaagcacttctggtaacttgggcagttac

SEQ ID NO: 6885 - DNA, 40 bp, Artificial Sequence
  Synthetic Oligonucleotide
acggtctcttctcctgactacatgagattaataaacgcgc

SEQ ID NO: 6886 - DNA, 40 bp, Artificial Sequence
  Synthetic Oligonucleotide
acggtctcttcctctgactacatgagattaataaacgcgc

SEQ ID NO: 6887 - DNA, 40 bp, Artificial Sequence
  Synthetic Oligonucleotide
acggcgtctcccgcattgccgcaattgccatacattaata

SEQ ID NO: 6888 - DNA, 40 bp, Artificial Sequence
  Synthetic Oligonucleotide
acgcctatcgctatcgagcggttcttccgataatagcaca

SEQ ID NO: 6889 - DNA, 40 bp, Artificial Sequence
  Synthetic Oligonucleotide
acgatccttcctcagcttccgcggcgcaggatttgcacgt

SEQ ID NO: 6890 - DNA, 40 bp, Artificial Sequence
  Synthetic Oligonucleotide
acgactctccctcagcctccgcggtgcaggatttgcacgt

SEQ ID NO: 6891 - DNA, 40 bp, Artificial Sequence
  Synthetic Oligonucleotide
acgactattccggaagtcatcgtttaaccgtttgttgcaa

SEQ ID NO: 6892 - DNA, 40 bp, Artificial Sequence
  Synthetic Oligonucleotide
acgaattctccttgctatggtcctcctggtacttgctgcg

SEQ ID NO: 6893 - DNA, 40 bp, Artificial Sequence
  Synthetic Oligonucleotide
accggcctcaggttccctaacgccgttagccttccggatg

SEQ ID NO: 6894 - DNA, 40 bp, Artificial Sequence
  Synthetic Oligonucleotide
accggccctcaggttccctaacgcgttagccttcggaatg

SEQ ID NO: 6895 - DNA, 40 bp, Artificial Sequence
  Synthetic Oligonucleotide
accggccaccccgatagtcatcttcactggacaccgtgta

SEQ ID NO: 6896 - DNA, 40 bp, Artificial Sequence
  Synthetic Oligonucleotide
accggcaccccgatagtcatcttcactggaccaccgtgta

SEQ ID NO: 6897 - DNA, 40 bp, Artificial Sequence
  Synthetic Oligonucleotide
accggcaccccgatagtcatcttcactggacaccgtgtta

SEQ ID NO: 6898 - DNA, 40 bp, Artificial Sequence
  Synthetic Oligonucleotide
accgcttgtgtgcgacacagtgtcctacgactcctctcag

SEQ ID NO: 6899 - DNA, 40 bp, Artificial Sequence
  Synthetic Oligonucleotide
accgcatgggtcggttttggtgggggactacccccttgca

SEQ ID NO: 6900 - DNA, 40 bp, Artificial Sequence
  Synthetic Oligonucleotide
accgcatgggtcggttttggtgggggactacccccctgta

SEQ ID NO: 6901 - DNA, 40 bp, Artificial Sequence
  Synthetic Oligonucleotide
accgcatgggtcggtttggttggggacgtaccccttcgta

SEQ ID NO: 6902 - DNA, 40 bp, Artificial Sequence
  Synthetic Oligonucleotide
accgcacgggtcggttttggtgggggactacccccttgta

SEQ ID NO: 6903 - DNA, 40 bp, Artificial Sequence
  Synthetic Oligonucleotide
accctatcttgatgtctcttcggggactaccccgattctg

SEQ ID NO: 6904 - DNA, 40 bp, Artificial Sequence
  Synthetic Oligonucleotide
accctatcttgacgtctcttcggggactaccccgactctg

SEQ ID NO: 6905 - DNA, 40 bp, Artificial Sequence
  Synthetic Oligonucleotide
accctatcttgacgtctcttcgaggactaccccgattctg

SEQ ID NO: 6906 - DNA, 40 bp, Artificial Sequence
  Synthetic Oligonucleotide
accctagaataatctgtatgccagactactggcttgattg

SEQ ID NO: 6907 - DNA, 40 bp, Artificial Sequence
  Synthetic Oligonucleotide
acccggaacgcctcgatcctcgcataatacgatacgtctg

SEQ ID NO: 6908 - DNA, 40 bp, Artificial Sequence
  Synthetic Oligonucleotide
acccgcctccgaagccctcctaagtgcactttaaaccgcg

SEQ ID NO: 6909 - DNA, 40 bp, Artificial Sequence
  Synthetic Oligonucleotide
acatctattccggtaagtcatctttaaccgttgttgcaaa

SEQ ID NO: 6910 - DNA, 40 bp, Artificial Sequence
  Synthetic Oligonucleotide
acatcctcgtgacggtctgttgatggctacatcattgttc

SEQ ID NO: 6911 - DNA, 40 bp, Artificial Sequence
  Synthetic Oligonucleotide
acagtgggttccatgctttaggcgcctcttattttgggcc

SEQ ID NO: 6912 - DNA, 40 bp, Artificial Sequence
  Synthetic Oligonucleotide
acagtaggttccatgctttaggcgcctcttattttgggtc

SEQ ID NO: 6913 - DNA, 40 bp, Artificial Sequence
  Synthetic Oligonucleotide
acaggcttgacgcttactctccgatgtagcctggcatgac

SEQ ID NO: 6914 - DNA, 40 bp, Artificial Sequence
  Synthetic Oligonucleotide
acagctatccggtaagtcatcgtttaaccgtttgttgcaa

SEQ ID NO: 6915 - DNA, 40 bp, Artificial Sequence
  Synthetic Oligonucleotide
acagcactgggctctcatgcgcgcgacccatctctcagta

SEQ ID NO: 6916 - DNA, 40 bp, Artificial Sequence
  Synthetic Oligonucleotide
acagcactggacttctcagcgcgcgacccatctctcagta

SEQ ID NO: 6917 - DNA, 40 bp, Artificial Sequence
  Synthetic Oligonucleotide
acagcactggactctcagcgcgtgacccatctcgtgagta

SEQ ID NO: 6918 - DNA, 40 bp, Artificial Sequence
  Synthetic Oligonucleotide
acagcactggactctcagcgcgcgacccatctcgtcatta

SEQ ID NO: 6919 - DNA, 40 bp, Artificial Sequence
  Synthetic Oligonucleotide
acagcactggactctcagcgcgcgacccatcccgtcagta

SEQ ID NO: 6920 - DNA, 40 bp, Artificial Sequence
  Synthetic Oligonucleotide
acacttattccggtaagtcatcgtttacttcgttgtacaa

SEQ ID NO: 6921 - DNA, 40 bp, Artificial Sequence
  Synthetic Oligonucleotide
acactgttccggtaagtcatcgtttaaccgtttgtcgcaa

SEQ ID NO: 6922 - DNA, 40 bp, Artificial Sequence
  Synthetic Oligonucleotide
acactattccggttagtcatcgtttacccgtttgttgcaa

SEQ ID NO: 6923 - DNA, 40 bp, Artificial Sequence
  Synthetic Oligonucleotide
acactattccggttaagtcatcgtttaaccgttgttgcaa

SEQ ID NO: 6924 - DNA, 40 bp, Artificial Sequence
  Synthetic Oligonucleotide
acactattccggtgagtcatcgtttaaccgtttgttgcaa

SEQ ID NO: 6925 - DNA, 40 bp, Artificial Sequence
  Synthetic Oligonucleotide
acactattccggtaagttatcgtttaaccgtttgttgcaa

SEQ ID NO: 6926 - DNA, 40 bp, Artificial Sequence
  Synthetic Oligonucleotide
acactattccggtaagtctcgttcaacctgtttgttgcaa

SEQ ID NO: 6927 - DNA, 40 bp, Artificial Sequence
  Synthetic Oligonucleotide
acactattccggtaagtcattgtctaaccgtttgttgcaa

SEQ ID NO: 6928 - DNA, 40 bp, Artificial Sequence
  Synthetic Oligonucleotide
acactattccggtaagtcatcgtttgaccgtttgtcgcaa

SEQ ID NO: 6929 - DNA, 40 bp, Artificial Sequence
  Synthetic Oligonucleotide
acactattccggtaagtcatcgtttatccgtttgttgcaa

SEQ ID NO: 6930 - DNA, 40 bp, Artificial Sequence
  Synthetic Oligonucleotide
acactattccggtaagtcatcgtttaaccgtttgttacaa

SEQ ID NO: 6931 - DNA, 40 bp, Artificial Sequence
  Synthetic Oligonucleotide
acactattccggtaagtcatcgtttaaccgtttgctgcaa

SEQ ID NO: 6932 - DNA, 40 bp, Artificial Sequence
  Synthetic Oligonucleotide
acactattccggtaagtcatcgtttaaccgtttattgcaa

SEQ ID NO: 6933 - DNA, 40 bp, Artificial Sequence
  Synthetic Oligonucleotide
acactattccggtaagtcatcgtttaaccggttgttgcaa

SEQ ID NO: 6934 - DNA, 40 bp, Artificial Sequence
  Synthetic Oligonucleotide
acactattccggtaagtcatcgtttaaccgcttgctgcaa

SEQ ID NO: 6935 - DNA, 40 bp, Artificial Sequence
  Synthetic Oligonucleotide
acactattccggtaagtcatcgtttaacagtttgttgcaa

SEQ ID NO: 6936 - DNA, 40 bp, Artificial Sequence
  Synthetic Oligonucleotide
acactattccggtaagtcatcgttgaaccgtttgttgcaa

SEQ ID NO: 6937 - DNA, 40 bp, Artificial Sequence
  Synthetic Oligonucleotide
acactattccggtaagtcatcgtgaaaccgtttgttgcaa

SEQ ID NO: 6938 - DNA, 40 bp, Artificial Sequence
  Synthetic Oligonucleotide
acactattccggtaagtcatcgtctaaccgtctgttgcaa

SEQ ID NO: 6939 - DNA, 40 bp, Artificial Sequence
  Synthetic Oligonucleotide
acactattccggtaagtcatcgtctaaccgcttgttgcaa

SEQ ID NO: 6940 - DNA, 40 bp, Artificial Sequence
  Synthetic Oligonucleotide
acactattccggtaagtcatcgtataaccgtttgttgcaa

SEQ ID NO: 6941 - DNA, 40 bp, Artificial Sequence
  Synthetic Oligonucleotide
acactattccggtaagtcatcatttaaccgtttgttgcaa

SEQ ID NO: 6942 - DNA, 40 bp, Artificial Sequence
  Synthetic Oligonucleotide
acactattccggtaagctcgttcattaccgtttgttgcaa

SEQ ID NO: 6943 - DNA, 40 bp, Artificial Sequence
  Synthetic Oligonucleotide
acactattccggtaagccatcgtttaaccgcttgttgcaa

SEQ ID NO: 6944 - DNA, 40 bp, Artificial Sequence
  Synthetic Oligonucleotide
acactattccggccttcaccgtcctcgatacggacgaatg

SEQ ID NO: 6945 - DNA, 40 bp, Artificial Sequence
  Synthetic Oligonucleotide
acactattccggccttcaccgtcctcaatacggacgaata

SEQ ID NO: 6946 - DNA, 40 bp, Artificial Sequence
  Synthetic Oligonucleotide
acactattccggccttcaccgtcctcaatacggacgaacg

SEQ ID NO: 6947 - DNA, 40 bp, Artificial Sequence
  Synthetic Oligonucleotide
acactattccggcctccaccgtcctcaatacggacgaatg

SEQ ID NO: 6948 - DNA, 40 bp, Artificial Sequence
  Synthetic Oligonucleotide
acactattccggccctcaccgtcctcaatacggacgaatg

SEQ ID NO: 6949 - DNA, 40 bp, Artificial Sequence
  Synthetic Oligonucleotide
acactattccggcaagtcatcgttaccgtttacgttgcaa

SEQ ID NO: 6950 - DNA, 40 bp, Artificial Sequence
  Synthetic Oligonucleotide
acactattccgataagtcatcgtttagccgtttgttgcaa

SEQ ID NO: 6951 - DNA, 40 bp, Artificial Sequence
  Synthetic Oligonucleotide
acactatccgtttgtccgtcctctgtggtattgcgcatgc

SEQ ID NO: 6952 - DNA, 40 bp, Artificial Sequence
  Synthetic Oligonucleotide
acactatccgttgtccgtcctcttgtggtattgcgcatgc

SEQ ID NO: 6953 - DNA, 40 bp, Artificial Sequence
  Synthetic Oligonucleotide
acactataccggtaagtcatcgtttaaccgtttgttgcaa

SEQ ID NO: 6954 - DNA, 40 bp, Artificial Sequence
  Synthetic Oligonucleotide
acactaatccggtaagttcatcggttaaccgttgttgcaa

SEQ ID NO: 6955 - DNA, 40 bp, Artificial Sequence
  Synthetic Oligonucleotide
acaccattccggccttcaccgtccccaatacggacgaatg

SEQ ID NO: 6956 - DNA, 40 bp, Artificial Sequence
  Synthetic Oligonucleotide
acaccaacactctgtatacgctggactacccgcgtttcag

SEQ ID NO: 6957 - DNA, 40 bp, Artificial Sequence
  Synthetic Oligonucleotide
aatttggctagcgttctgcctctgtatttccccgtctgcg

SEQ ID NO: 6958 - DNA, 40 bp, Artificial Sequence
  Synthetic Oligonucleotide
aattcttcgagcctccaagcttgtcaagtcgttttggccc

SEQ ID NO: 6959 - DNA, 40 bp, Artificial Sequence
  Synthetic Oligonucleotide
aattagagacctcctacgcacgcgacctcccctgtagcta

SEQ ID NO: 6960 - DNA, 40 bp, Artificial Sequence
  Synthetic Oligonucleotide
aattacagtaattctgcccctctgatgaaaccggttactt

SEQ ID NO: 6961 - DNA, 40 bp, Artificial Sequence
  Synthetic Oligonucleotide
aatgttaagcctacatacgcctgggtcactctttgttctg

SEQ ID NO: 6962 - DNA, 40 bp, Artificial Sequence
  Synthetic Oligonucleotide
aatggggcttttagcacttctcggtaacttgggcagttac

SEQ ID NO: 6963 - DNA, 40 bp, Artificial Sequence
  Synthetic Oligonucleotide
aatggggcttttaagcacttctcggtaacttgggcagtac

SEQ ID NO: 6964 - DNA, 40 bp, Artificial Sequence
  Synthetic Oligonucleotide
aatgggcttttaagcactcctcggtaacttgggcagttac

SEQ ID NO: 6965 - DNA, 40 bp, Artificial Sequence
  Synthetic Oligonucleotide
aatgggctttaagcacttctcggtaacttgggcgagttac

SEQ ID NO: 6966 - DNA, 40 bp, Artificial Sequence
  Synthetic Oligonucleotide
aatgggctttaagcacttctccggtaacttgggcagttac

SEQ ID NO: 6967 - DNA, 40 bp, Artificial Sequence
  Synthetic Oligonucleotide
aatccgggaccgcctcaagctagctacctccattgtccag

SEQ ID NO: 6968 - DNA, 40 bp, Artificial Sequence
  Synthetic Oligonucleotide
aatatggtacccacggtgcgctatcaccgtttacaggtat

SEQ ID NO: 6969 - DNA, 40 bp, Artificial Sequence
  Synthetic Oligonucleotide
aaggtccgtgacgcttctggcactatccagttgacgctca

SEQ ID NO: 6970 - DNA, 40 bp, Artificial Sequence
  Synthetic Oligonucleotide
aaggctacttcgtgagaagtcgctctcccagcgcatgcgt

SEQ ID NO: 6971 - DNA, 40 bp, Artificial Sequence
  Synthetic Oligonucleotide
aagctgacggctgattatgggactacccatacgtataagc

SEQ ID NO: 6972 - DNA, 40 bp, Artificial Sequence
  Synthetic Oligonucleotide
aagcgttgtattgtcgtcgcacgctattgcgaggtaacat

SEQ ID NO: 6973 - DNA, 40 bp, Artificial Sequence
  Synthetic Oligonucleotide
aagccggggcccgcctctagctagctacctccattgtctg

SEQ ID NO: 6974 - DNA, 40 bp, Artificial Sequence
  Synthetic Oligonucleotide
aagccggggcccgcctcaagctagctacccccattgtctg

SEQ ID NO: 6975 - DNA, 40 bp, Artificial Sequence
  Synthetic Oligonucleotide
aagatctcggatctggcgtgctacttggacaggttccttc

SEQ ID NO: 6976 - DNA, 40 bp, Artificial Sequence
  Synthetic Oligonucleotide
aagatctcggatctggcgtactacttggacaggttcctcc

SEQ ID NO: 6977 - DNA, 40 bp, Artificial Sequence
  Synthetic Oligonucleotide
aagatctcggacctggcgtactacttggacaggttccttc

SEQ ID NO: 6978 - DNA, 40 bp, Artificial Sequence
  Synthetic Oligonucleotide
aactttttcgccggctactgcgaggacgaagctccgccgt

SEQ ID NO: 6979 - DNA, 40 bp, Artificial Sequence
  Synthetic Oligonucleotide
aactattcgcatcgagcggtcgtttttcgggaatatgggc

SEQ ID NO: 6980 - DNA, 40 bp, Artificial Sequence
  Synthetic Oligonucleotide
aactatccgtttgtctgtcctcttgtggtattgcgcatgc

SEQ ID NO: 6981 - DNA, 40 bp, Artificial Sequence
  Synthetic Oligonucleotide
aactatccgtttgtccgtcctcctgtggtattgcgcatgc

SEQ ID NO: 6982 - DNA, 40 bp, Artificial Sequence
  Synthetic Oligonucleotide
aactatccgtatcgagcgttgtcaacaagcggctaaggcc

SEQ ID NO: 6983 - DNA, 40 bp, Artificial Sequence
  Synthetic Oligonucleotide
aacgtcctctgcgatcatctttcaaggattaccttgatta

SEQ ID NO: 6984 - DNA, 40 bp, Artificial Sequence
  Synthetic Oligonucleotide
aaccgggtgccgcctcaagctagctacctccagttgtctg

SEQ ID NO: 6985 - DNA, 40 bp, Artificial Sequence
  Synthetic Oligonucleotide
aaccggggtccccgcctcaagctagctacctcatgtctga

SEQ ID NO: 6986 - DNA, 40 bp, Artificial Sequence
  Synthetic Oligonucleotide
aaccggggacccgcctcaagctagctacctccatcgtctg

SEQ ID NO: 6987 - DNA, 40 bp, Artificial Sequence
  Synthetic Oligonucleotide
aaccgggccgcctcaacgtctagctacctccattgtcgtg

SEQ ID NO: 6988 - DNA, 40 bp, Artificial Sequence
  Synthetic Oligonucleotide
aaccgggccgccctcaagctagctacctccattggtctgc

SEQ ID NO: 6989 - DNA, 40 bp, Artificial Sequence
  Synthetic Oligonucleotide
aaccgggcccggccttcaagctagctacctccattgtctg

SEQ ID NO: 6990 - DNA, 40 bp, Artificial Sequence
  Synthetic Oligonucleotide
aaccgggcccgctcaacgctagctcacctccattgtcgtg

SEQ ID NO: 6991 - DNA, 40 bp, Artificial Sequence
  Synthetic Oligonucleotide
aaccgggcccgctacaacgcctagctacctccattgtctg

SEQ ID NO: 6992 - DNA, 40 bp, Artificial Sequence
  Synthetic Oligonucleotide
aaccgggcccgccttcaagctagctaccgtccattgtctg

SEQ ID NO: 6993 - DNA, 40 bp, Artificial Sequence
  Synthetic Oligonucleotide
aaccgggcccgcctcaagtctagctacctccatcgtcgtg

SEQ ID NO: 6994 - DNA, 40 bp, Artificial Sequence
  Synthetic Oligonucleotide
aaccgggcccgcctcaagtctagctaccctccattgtctg

SEQ ID NO: 6995 - DNA, 40 bp, Artificial Sequence
  Synthetic Oligonucleotide
aaccgggcccgcctcaagctagctacctccattgtctgac

SEQ ID NO: 6996 - DNA, 40 bp, Artificial Sequence
  Synthetic Oligonucleotide
aaccgggcccgcctcaagcctagctacctccattcgtctg

SEQ ID NO: 6997 - DNA, 40 bp, Artificial Sequence
  Synthetic Oligonucleotide
aaccgggcccgcctcaacgctagctacctccattgtcgtg

SEQ ID NO: 6998 - DNA, 40 bp, Artificial Sequence
  Synthetic Oligonucleotide
aaccgggagtccctcctcgtcttgatgcactatcatctca

SEQ ID NO: 6999 - DNA, 40 bp, Artificial Sequence
  Synthetic Oligonucleotide
aaattagtaccgacggccgccttgatcctccgttagtctg

SEQ ID NO: 7000 - DNA, 40 bp, Artificial Sequence
  Synthetic Oligonucleotide
aaatcttacaggcagccacgccttgttcctcctttttctg

SEQ ID NO: 7001 - DNA, 40 bp, Artificial Sequence
  Synthetic Oligonucleotide
aaactgggccccgcctcaagctagctacctccattgtctg

SEQ ID NO: 7002 - DNA, 40 bp, Artificial Sequence
  Synthetic Oligonucleotide
aaacggggcccgcttcaagctagctacctccattggtctg

SEQ ID NO: 7003 - DNA, 40 bp, Artificial Sequence
  Synthetic Oligonucleotide
aaacggggcccgccttcaagctagctacctccattgtctg

SEQ ID NO: 7004 - DNA, 40 bp, Artificial Sequence
  Synthetic Oligonucleotide
aaacggggcccgcctcaagctagctacctccattggtctg

SEQ ID NO: 7005 - DNA, 40 bp, Artificial Sequence
  Synthetic Oligonucleotide
aaaccgtggcccgcctcaagctagctacctccatggtctg

SEQ ID NO: 7006 - DNA, 40 bp, Artificial Sequence
  Synthetic Oligonucleotide
aaaccgggtcccgcctcaagctagctacctccattatctg

SEQ ID NO: 7007 - DNA, 40 bp, Artificial Sequence
  Synthetic Oligonucleotide
aaaccggggtccgcttcaagctagctacctccattgtctg

SEQ ID NO: 7008 - DNA, 40 bp, Artificial Sequence
  Synthetic Oligonucleotide
aaaccggggtccgcctcaagctagctacctccactgtctg

SEQ ID NO: 7009 - DNA, 40 bp, Artificial Sequence
  Synthetic Oligonucleotide
aaaccggggctcgcctcaagctagcaacctccattgtctg

SEQ ID NO: 7010 - DNA, 40 bp, Artificial Sequence
  Synthetic Oligonucleotide
aaaccggggccgccttcaagctagctaccaccattgtctg

SEQ ID NO: 7011 - DNA, 40 bp, Artificial Sequence
  Synthetic Oligonucleotide
aaaccggggccgcctcaaggctagctacctccattgtctg

SEQ ID NO: 7012 - DNA, 40 bp, Artificial Sequence
  Synthetic Oligonucleotide
aaaccggggccgcctcaaagctagctacctccattgtctg

SEQ ID NO: 7013 - DNA, 40 bp, Artificial Sequence
  Synthetic Oligonucleotide
aaaccggggcccgcctcgagctggctacctccattgtctg

SEQ ID NO: 7014 - skipped

SEQ ID NO: 7015 - DNA, 40 bp, Artificial Sequence
  Synthetic Oligonucleotide
aaaccggggcccgcctcaggctagctacctcaattgtctg

SEQ ID NO: 7016 - DNA, 40 bp, Artificial Sequence
  Synthetic Oligonucleotide
aaaccggggcccgcctcaagctgactacctccattgtctg

SEQ ID NO: 7017 - DNA, 40 bp, Artificial Sequence
  Synthetic Oligonucleotide
aaaccggggcccgcctcaagctagctgcctccagtgtctg

SEQ ID NO: 7018 - DNA, 40 bp, Artificial Sequence
  Synthetic Oligonucleotide
aaaccggggcccgcctcaagctagctacctctatcgtctg

SEQ ID NO: 7019 - DNA, 40 bp, Artificial Sequence
  Synthetic Oligonucleotide
aaaccggggcccgcctcaagctagctacctccattgtatg

SEQ ID NO: 7020 - DNA, 40 bp, Artificial Sequence
  Synthetic Oligonucleotide
aaaccggggcccgcctcaagctagctaattccattgtctg

SEQ ID NO: 7021 - DNA, 40 bp, Artificial Sequence
  Synthetic Oligonucleotide
aaaccggggcccgcctcaagctagcaacctccatcgtctg

SEQ ID NO: 7022 - DNA, 40 bp, Artificial Sequence
  Synthetic Oligonucleotide
aaaccggggcccgcctcaaactcagctacctccattgtca

SEQ ID NO: 7023 - DNA, 40 bp, Artificial Sequence
  Synthetic Oligonucleotide
aaaccggggcccgcctcaaactagctacctccgttgtctg

SEQ ID NO: 7024 - DNA, 40 bp, Artificial Sequence
  Synthetic Oligonucleotide
aaaccggggcccgcctaagactagctacctccattgtctg

SEQ ID NO: 7025 - DNA, 40 bp, Artificial Sequence
  Synthetic Oligonucleotide
aaaccggggcccgccccagactagctacctccatcgtctg

SEQ ID NO: 7026 - DNA, 40 bp, Artificial Sequence
  Synthetic Oligonucleotide
aaaccggggcccgcccacactcagctacctccattgtctg

SEQ ID NO: 7027 - DNA, 40 bp, Artificial Sequence
  Synthetic Oligonucleotide
aaaccggggccccgcctcaagctagctacctcattgtctg

SEQ ID NO: 7028 - DNA, 40 bp, Artificial Sequence
  Synthetic Oligonucleotide
aaaccggggcccacctcaagctagcaacctccattgtctg

SEQ ID NO: 7029 - DNA, 40 bp, Artificial Sequence
  Synthetic Oligonucleotide
aaaccgggccggcctcaagctagctacctccattgtcttg

SEQ ID NO: 7030 - DNA, 40 bp, Artificial Sequence
  Synthetic Oligonucleotide
aaaccgggccgccttcaagctagctacctccattggtctg

SEQ ID NO: 7031 - DNA, 40 bp, Artificial Sequence
  Synthetic Oligonucleotide
aaaccgggccgcctcaagtctagctacctccattgtcgtg

SEQ ID NO: 7032 - DNA, 40 bp, Artificial Sequence
  Synthetic Oligonucleotide
aaaccgggccgcctcaagctagctacctccattgtcctga

SEQ ID NO: 7033 - DNA, 40 bp, Artificial Sequence
  Synthetic Oligonucleotide
aaaccgggccgcctcaagctagctacctccattggtctgc

SEQ ID NO: 7034 - DNA, 40 bp, Artificial Sequence
  Synthetic Oligonucleotide
aaaccgggccgcctcaagctagctacctccattggtctga

SEQ ID NO: 7035 - DNA, 40 bp, Artificial Sequence
  Synthetic Oligonucleotide
aaaccgggcccgcctcaagtctagctacctctattgtctg

SEQ ID NO: 7036 - DNA, 40 bp, Artificial Sequence
  Synthetic Oligonucleotide
aaaccgggcccgcctcaagctagctacctccagttgtctg

SEQ ID NO: 7037 - DNA, 40 bp, Artificial Sequence
  Synthetic Oligonucleotide
aaaccgggacccgcctcaggctagctacctccattgtctg

SEQ ID NO: 7038 - DNA, 40 bp, Artificial Sequence
  Synthetic Oligonucleotide
aaaccgggacccgcctcaagctagctacttccattgtctg

SEQ ID NO: 7039 - DNA, 40 bp, Artificial Sequence
  Synthetic Oligonucleotide
aaaccgggacccgcctcaagctagctacctccattgtccg

SEQ ID NO: 7040 - DNA, 40 bp, Artificial Sequence
  Synthetic Oligonucleotide
aaaccgggacccgcctcaagctagctacccccattgtctg

SEQ ID NO: 7041 - DNA, 40 bp, Artificial Sequence
  Synthetic Oligonucleotide
aaaccggagcccgcctcaagctagctacctccattatctg

SEQ ID NO: 7042 - DNA, 40 bp, Artificial Sequence
  Synthetic Oligonucleotide
aaaccggaacccgcctcaagctagctacctccattgtctg

SEQ ID NO: 7043 - DNA, 40 bp, Artificial Sequence
  Synthetic Oligonucleotide
aaaccgaggcccgcctcaagctagccacctccattgtctg

SEQ ID NO: 7044 - DNA, 40 bp, Artificial Sequence
  Synthetic Oligonucleotide
aaaccgagacccgcctcaagctagctacctccattgtctg

SEQ ID NO: 7045 - DNA, 40 bp, Artificial Sequence
  Synthetic Oligonucleotide
aaacccggggcccgcctcaagctagctacctcattgtctg

SEQ ID NO: 7046 - DNA, 40 bp, Artificial Sequence
  Synthetic Oligonucleotide
aaacccgggcccgcctcaagctagctacctccattgtgtg

SEQ ID NO: 7047 - DNA, 40 bp, Artificial Sequence
  Synthetic Oligonucleotide
aaaccatggccgcctcaagctagctacctccattgtcctg

SEQ ID NO: 7048 - DNA, 40 bp, Artificial Sequence
  Synthetic Oligonucleotide
aaaacggggcccgcctcaagctagctacctccattgtctg

SEQ ID NO: 7049 - DNA, 40 bp, Artificial Sequence
  Synthetic Oligonucleotide
gcggttcttctcctgactacatgagtattaataaacgcgc

SEQ ID NO: 7050 - DNA, 40 bp, Artificial Sequence
  Synthetic Oligonucleotide
cactatccgttgtccgatcctctcgtggtattgcgcatgc

SEQ ID NO: 7051 - DNA, 40 bp, Artificial Sequence
  Synthetic Oligonucleotide
ccgcacccccgacagtcatcttcactggacacccgtgtta

SEQ ID NO: 7052 - DNA, 40 bp, Artificial Sequence
  Synthetic Oligonucleotide
ctcttatccggtcaggacgtcttctgcgactatcacgatt

SEQ ID NO: 7053 - DNA, 40 bp, Artificial Sequence
  Synthetic Oligonucleotide
aaaccgggcccgcctcaagctagctaccctccattgtctg

SEQ ID NO: 7054 - DNA, 40 bp, Artificial Sequence
  Synthetic Oligonucleotide
gtccggaacgcctcgattctcgcataatatgatacgtctg

SEQ ID NO: 7055 - DNA, 40 bp, Artificial Sequence
  Synthetic Oligonucleotide
atggtccattgagcttctggcactatccagttgacgctca

SEQ ID NO: 7056 - DNA, 40 bp, Artificial Sequence
  Synthetic Oligonucleotide
atggtccatgagcttctcggcactatccagttgacgctca

SEQ ID NO: 7057 - DNA, 40 bp, Artificial Sequence
  Synthetic Oligonucleotide
aaaccggggcacgcctcaagctagctacctccattgtctg

SEQ ID NO: 7058 - DNA, 40 bp, Artificial Sequence
  Synthetic Oligonucleotide
tattcgccagtccacatcaactatgatgacgcttgctgga

SEQ ID NO: 7059 - DNA, 40 bp, Artificial Sequence
  Synthetic Oligonucleotide
tattcgccagtcacatcaacttatgatgacgcttgactga

SEQ ID NO: 7060 - DNA, 40 bp, Artificial Sequence
  Synthetic Oligonucleotide
taccggcacaggaggcgtccttggtggactaccaccttat

SEQ ID NO: 7061 - DNA, 40 bp, Artificial Sequence
  Synthetic Oligonucleotide
gtccatggtactcctcgattccgcccatacatgcatgtaa

SEQ ID NO: 7062 - DNA, 40 bp, Artificial Sequence
  Synthetic Oligonucleotide
ctctatccgtttgtccgtcctctcgtggtattgcgcatgc

SEQ ID NO: 7063 - DNA, 40 bp, Artificial Sequence
  Synthetic Oligonucleotide
cactatccttttgtccgtcctctcgtggtattgcgcatgc

SEQ ID NO: 7064 - DNA, 40 bp, Artificial Sequence
  Synthetic Oligonucleotide
cactatccgtttgtccgtcctcttgtgatatgcgcatcgc

SEQ ID NO: 7065 - DNA, 40 bp, Artificial Sequence
  Synthetic Oligonucleotide
cactatccgtttgtccctcctcttgtggtattgcgcatgc

SEQ ID NO: 7066 - DNA, 40 bp, Artificial Sequence
  Synthetic Oligonucleotide
cactatccgtagatccgtcactcactacgcgtatggactc

SEQ ID NO: 7067 - DNA, 40 bp, Artificial Sequence
  Synthetic Oligonucleotide
atgtccatgacgtcttctggcactatccagttgacgctca

SEQ ID NO: 7068 - DNA, 40 bp, Artificial Sequence
  Synthetic Oligonucleotide
atggtccatgagctctggcatctatccagttgacgctaca

SEQ ID NO: 7069 - DNA, 40 bp, Artificial Sequence
  Synthetic Oligonucleotide
tgtgaaacgctattttctgggaagccgcgtctcgagcgaa

SEQ ID NO: 7070 - DNA, 40 bp, Artificial Sequence
  Synthetic Oligonucleotide
tgcgaaacgttattttctgggaagccgcatctcgagcgaa

SEQ ID NO: 7071 - DNA, 40 bp, Artificial Sequence
  Synthetic Oligonucleotide
tgaattctagtctctccgcctcgatctttccaagtcgctg

SEQ ID NO: 7072 - DNA, 40 bp, Artificial Sequence
  Synthetic Oligonucleotide
tcggacagctcacttcgtctttgatcgaccacgctcataa

SEQ ID NO: 7073 - DNA, 40 bp, Artificial Sequence
  Synthetic Oligonucleotide
tcgcaccgctcacttcgtctttgatcgaccacgctcataa

SEQ ID NO: 7074 - DNA, 40 bp, Artificial Sequence
  Synthetic Oligonucleotide
tcgcacccccgatagtcatcttcactggacacccgtgtta

SEQ ID NO: 7075 - DNA, 40 bp, Artificial Sequence
  Synthetic Oligonucleotide
tcgcacatctcacttcgtctttgatcgaccacgctcataa

SEQ ID NO: 7076 - DNA, 40 bp, Artificial Sequence
  Synthetic Oligonucleotide
tcgcacagctcacttcgtctttgatcgaccacgttcataa

SEQ ID NO: 7077 - DNA, 40 bp, Artificial Sequence
  Synthetic Oligonucleotide
tccatctcgtcagcctcgctggccacaccgaatacgctga

SEQ ID NO: 7078 - DNA, 40 bp, Artificial Sequence
  Synthetic Oligonucleotide
tattcgtcagccacatcaactatgatgacgcttgactgga

SEQ ID NO: 7079 - DNA, 40 bp, Artificial Sequence
  Synthetic Oligonucleotide
tactatccgttgtccgtcctcttgtcggtattgcgcatgc

SEQ ID NO: 7080 - DNA, 40 bp, Artificial Sequence
  Synthetic Oligonucleotide
taatctggtacttatcatgcgctatcatgacggctaggac

SEQ ID NO: 7081 - DNA, 40 bp, Artificial Sequence
  Synthetic Oligonucleotide
gtccatggtacgcctcgataccgcccatacatgcatgtaa

SEQ ID NO: 7082 - DNA, 40 bp, Artificial Sequence
  Synthetic Oligonucleotide
gcgttcttctccttgactacatgagtattaataaacgcgc

SEQ ID NO: 7083 - DNA, 40 bp, Artificial Sequence
  Synthetic Oligonucleotide
gcggtttcttctcctgactacatgagattataaacgacgc

SEQ ID NO: 7084 - DNA, 40 bp, Artificial Sequence
  Synthetic Oligonucleotide
ctcttatccggccaggacgtctttcgtgcactatcacgat

SEQ ID NO: 7085 - DNA, 40 bp, Artificial Sequence
  Synthetic Oligonucleotide
ctcttatccggcaggacgtctttcgtgcactatcacgttt

SEQ ID NO: 7086 - DNA, 40 bp, Artificial Sequence
  Synthetic Oligonucleotide
ctcttatccggcaggaagtctttcgtgcactatcacgatt

SEQ ID NO: 7087 - DNA, 40 bp, Artificial Sequence
  Synthetic Oligonucleotide
ctccatggtacgcctcgattccgcccatacatgcatgtaa

SEQ ID NO: 7088 - DNA, 40 bp, Artificial Sequence
  Synthetic Oligonucleotide
cgctatccgtttgtccgtcctcttgtggtgttgcgcatgc

SEQ ID NO: 7089 - DNA, 40 bp, Artificial Sequence
  Synthetic Oligonucleotide
ccgcctcaggtttccctaacgccgttagccttccggaatg

SEQ ID NO: 7090 - DNA, 40 bp, Artificial Sequence
  Synthetic Oligonucleotide
ccgcacccgatagtcgatcttcactggaccacccgtgtta

SEQ ID NO: 7091 - DNA, 40 bp, Artificial Sequence
  Synthetic Oligonucleotide
ccgcaccccgatagtcatcttcactggaccacccgtgata

SEQ ID NO: 7092 - DNA, 40 bp, Artificial Sequence
  Synthetic Oligonucleotide
ccgcacccccgatagtcatcttcactggacacccgtgttg

SEQ ID NO: 7093 - DNA, 40 bp, Artificial Sequence
  Synthetic Oligonucleotide
cactattcgtttgtccgtcctctcgtggtattgcgcatgc

SEQ ID NO: 7094 - DNA, 40 bp, Artificial Sequence
  Synthetic Oligonucleotide
cactatccgtttgtcgtccctcttgtggtattgcgcatgc

SEQ ID NO: 7095 - DNA, 40 bp, Artificial Sequence
  Synthetic Oligonucleotide
cactatccgtttgtccgtcctcttgtggtatggcgcatgc

SEQ ID NO: 7096 - DNA, 40 bp, Artificial Sequence
  Synthetic Oligonucleotide
cactatccgtttgtccgtcctctgtggtattgcgcatgcc

SEQ ID NO: 7097 - DNA, 40 bp, Artificial Sequence
  Synthetic Oligonucleotide
cactatccgtttgtccgtcctcctatggtattgcgcatgc

SEQ ID NO: 7098 - DNA, 40 bp, Artificial Sequence
  Synthetic Oligonucleotide
cactatccgtttgtcccgtcctctgtggtattgcgcatgc

SEQ ID NO: 7099 - DNA, 40 bp, Artificial Sequence
  Synthetic Oligonucleotide
cactatccgttgtccgtcctcctgtggtattgcgcatgtc

SEQ ID NO: 7100 - DNA, 40 bp, Artificial Sequence
  Synthetic Oligonucleotide
cactatccgttgtccgtcctacttgtggtattgcgcatgc

SEQ ID NO: 7101 - DNA, 40 bp, Artificial Sequence
  Synthetic Oligonucleotide
cactatccgtagatccgtcctcttgtggtattgcgcatgc

SEQ ID NO: 7102 - DNA, 40 bp, Artificial Sequence
  Synthetic Oligonucleotide
attgaatccagcgacttcggtggtgtcctctccattacca

SEQ ID NO: 7103 - DNA, 40 bp, Artificial Sequence
  Synthetic Oligonucleotide
attaattccagcgacttcggtggtgtcctctccattaccg

SEQ ID NO: 7104 - DNA, 40 bp, Artificial Sequence
  Synthetic Oligonucleotide
aatgttaagcttacatacgcctgggtcactcttcgttctg

SEQ ID NO: 7105 - DNA, 40 bp, Artificial Sequence
  Synthetic Oligonucleotide
aaaccgggccgctcaacgtctagctacctccattgtcgtg

SEQ ID NO: 7106 - DNA, 40 bp, Artificial Sequence
  Synthetic Oligonucleotide
aaaccgggcccgctcaacgtctagctacctccattgtctg

SEQ ID NO: 7107 - DNA, 40 bp, Artificial Sequence
  Synthetic Oligonucleotide
tttgacaccttcagccgccatgctgatgaatggtgtcatg

SEQ ID NO: 7108 - DNA, 40 bp, Artificial Sequence
  Synthetic Oligonucleotide
tgtgcgactacgctcttgagcaattctgatccctggattt

SEQ ID NO: 7109 - DNA, 40 bp, Artificial Sequence
  Synthetic Oligonucleotide
tgtgcgactacgctcttgaacagttctgatccctggattt

SEQ ID NO: 7110 - DNA, 40 bp, Artificial Sequence
  Synthetic Oligonucleotide
tggcacagctcacttcgtctttgatcgaccacgctcataa

SEQ ID NO: 7111 - DNA, 40 bp, Artificial Sequence
  Synthetic Oligonucleotide
tgcgaacgctacttttctgggaagccgcatctcgagcgaa

SEQ ID NO: 7112 - DNA, 40 bp, Artificial Sequence
  Synthetic Oligonucleotide
tgcgaaacgctattttctgggaagccgcgtctcgagtgaa

SEQ ID NO: 7113 - DNA, 40 bp, Artificial Sequence
  Synthetic Oligonucleotide
tgcgaaacgctattttctgggaagccgcatcacgagcgaa

SEQ ID NO: 7114 - DNA, 40 bp, Artificial Sequence
  Synthetic Oligonucleotide
tgcgaaacgctatttctggaatgccgcatctcgagccgaa

SEQ ID NO: 7115 - DNA, 40 bp, Artificial Sequence
  Synthetic Oligonucleotide
tgcgaaaacgctatttctgggaagccgcatctcgagcgaa

SEQ ID NO: 7116 - DNA, 40 bp, Artificial Sequence
  Synthetic Oligonucleotide
tcgcacagctcacttcgtctttgatcgaccacggtcataa

SEQ ID NO: 7117 - DNA, 40 bp, Artificial Sequence
  Synthetic Oligonucleotide
tcgcacagctcacttcatctttgatcgaccacgctcataa

SEQ ID NO: 7118 - DNA, 40 bp, Artificial Sequence
  Synthetic Oligonucleotide
tcgcacacctcacttcgtctttgatcgaccacgctcataa

SEQ ID NO: 7119 - DNA, 40 bp, Artificial Sequence
  Synthetic Oligonucleotide
tattcgccagtcacatcaactatgatgccgcttgactgga

SEQ ID NO: 7120 - DNA, 40 bp, Artificial Sequence
  Synthetic Oligonucleotide
tattcgccagtcacatcaactatgatgacgcttgactggc

SEQ ID NO: 7121 - DNA, 40 bp, Artificial Sequence
  Synthetic Oligonucleotide
tattcgccagtcacatcaactacgatgacgcttggctgga

SEQ ID NO: 7122 - DNA, 40 bp, Artificial Sequence
  Synthetic Oligonucleotide
tattcgccagccacatcaactatgactgacgcttgactga

SEQ ID NO: 7123 - DNA, 40 bp, Artificial Sequence
  Synthetic Oligonucleotide
tattatccgtttgtccgtcctcttgtggtattgcgcatgc

SEQ ID NO: 7124 - DNA, 40 bp, Artificial Sequence
  Synthetic Oligonucleotide
tatgggggcttttaagcacttctcggtaattgggcagtta

SEQ ID NO: 7125 - DNA, 40 bp, Artificial Sequence
  Synthetic Oligonucleotide
tatgggcttttaagcacttctcggttaacttggcagttac

SEQ ID NO: 7126 - DNA, 40 bp, Artificial Sequence
  Synthetic Oligonucleotide
tatgggctttaagctattctcggtaacttgggcgagttac

SEQ ID NO: 7127 - DNA, 40 bp, Artificial Sequence
  Synthetic Oligonucleotide
tatgggctttaagctacctctcggtaacttggcgagttac

SEQ ID NO: 7128 - DNA, 40 bp, Artificial Sequence
  Synthetic Oligonucleotide
tatgggctttaaagcactttctcggataacttggcagtac

SEQ ID NO: 7129 - DNA, 40 bp, Artificial Sequence
  Synthetic Oligonucleotide
tatgggcttctagtcacttctcggtaacttggcgagttac

SEQ ID NO: 7130 - DNA, 40 bp, Artificial Sequence
  Synthetic Oligonucleotide
tatccgccagccacatcagctatgatgacgcttgactgga

SEQ ID NO: 7131 - DNA, 40 bp, Artificial Sequence
  Synthetic Oligonucleotide
tatatgcctgtcttttaatctcggcagagtgctcatgagc

SEQ ID NO: 7132 - DNA, 40 bp, Artificial Sequence
  Synthetic Oligonucleotide
tagtcgatccgtactttcaggcgctatcctggtcacccga

SEQ ID NO: 7133 - DNA, 40 bp, Artificial Sequence
  Synthetic Oligonucleotide
tactatccgtttgttcgtcctcttgtggtattgcgcatgc

SEQ ID NO: 7134 - DNA, 40 bp, Artificial Sequence
  Synthetic Oligonucleotide
tactatccgtttgtccgtcctcttgtggcattgcgcatgc

SEQ ID NO: 7135 - DNA, 40 bp, Artificial Sequence
  Synthetic Oligonucleotide
tactatccgtttgtccgccctcttgtggtattgcgcatgc

SEQ ID NO: 7136 - DNA, 40 bp, Artificial Sequence
  Synthetic Oligonucleotide
tactatccgtctgtccgtcctcttgtggtattgcgcatgc

SEQ ID NO: 7137 - DNA, 40 bp, Artificial Sequence
  Synthetic Oligonucleotide
taatcgccagccacatcaactatgatgacgcttgactgga

SEQ ID NO: 7138 - DNA, 40 bp, Artificial Sequence
  Synthetic Oligonucleotide
gtccggagcgcctcgatcctcgcataatatggtacgtctg

SEQ ID NO: 7139 - DNA, 40 bp, Artificial Sequence
  Synthetic Oligonucleotide
gtccggaacgcctcgatcctcggataatatgatacgtctg

SEQ ID NO: 7140 - DNA, 40 bp, Artificial Sequence
  Synthetic Oligonucleotide
gtccggaacgcctcgatcctcgcataatatgatacgactg

SEQ ID NO: 7141 - DNA, 40 bp, Artificial Sequence
  Synthetic Oligonucleotide
gtccggaacgcctcgatcctcgcataatatgagacgtctg

SEQ ID NO: 7142 - DNA, 40 bp, Artificial Sequence
  Synthetic Oligonucleotide
gtccgatgtacgcctcgattccgccatacatgacatgtaa

SEQ ID NO: 7143 - DNA, 40 bp, Artificial Sequence
  Synthetic Oligonucleotide
gtccgaacgcctcgattcctcgccatatatgatacgtctg

SEQ ID NO: 7144 - DNA, 40 bp, Artificial Sequence
  Synthetic Oligonucleotide
gtccattgtacgcctcgattccgcccatacatgcatgtaa

SEQ ID NO: 7145 - DNA, 40 bp, Artificial Sequence
  Synthetic Oligonucleotide
gtccatgtacgcctcgattccgcccatacattgcatgtaa

SEQ ID NO: 7146 - DNA, 40 bp, Artificial Sequence
  Synthetic Oligonucleotide
gtccatgtacgcctcgattccgcccatacatgacatgtaa

SEQ ID NO: 7147 - DNA, 40 bp, Artificial Sequence
  Synthetic Oligonucleotide
gtccatggtacgcgtcgattccgcccatacatgcatgtaa

SEQ ID NO: 7148 - DNA, 40 bp, Artificial Sequence
  Synthetic Oligonucleotide
gtccatggtacgcctcggttccgccactacatgcatgtaa

SEQ ID NO: 7149 - DNA, 40 bp, Artificial Sequence
  Synthetic Oligonucleotide
gtccatggtacgcctcgatttccgcccatactgcatgtaa

SEQ ID NO: 7150 - DNA, 40 bp, Artificial Sequence
  Synthetic Oligonucleotide
gtccatggtacgcctcgattccgcccatacctgcatgtaa

SEQ ID NO: 7151 - DNA, 40 bp, Artificial Sequence
  Synthetic Oligonucleotide
gtccatggtacgcctcgattccccccatacatgcatgtaa

SEQ ID NO: 7152 - DNA, 40 bp, Artificial Sequence
  Synthetic Oligonucleotide
gtccatggtacgcctcgattcagcccatacatgcatgtaa

SEQ ID NO: 7153 - DNA, 40 bp, Artificial Sequence
  Synthetic Oligonucleotide
gtccatggtacgccctcgattccgccatacatgcatgtaa

SEQ ID NO: 7154 - DNA, 40 bp, Artificial Sequence
  Synthetic Oligonucleotide
gtccatggtacgcatcgattccgcccatacatgcatgtaa

SEQ ID NO: 7155 - DNA, 40 bp, Artificial Sequence
  Synthetic Oligonucleotide
gctaggctttcacgcacgcggattgtacccgaacggggtt

SEQ ID NO: 7156 - DNA, 40 bp, Artificial Sequence
  Synthetic Oligonucleotide
gctaggctttcacgcacgcagattgtacccgaactgggtt

SEQ ID NO: 7157 - DNA, 40 bp, Artificial Sequence
  Synthetic Oligonucleotide
gctaccttcgtcttagcggcgctctgtggtaagattctat

SEQ ID NO: 7158 - DNA, 40 bp, Artificial Sequence
  Synthetic Oligonucleotide
gctaccatcgtctagtgagtcgcccttagttcatcaaggc

SEQ ID NO: 7159 - DNA, 40 bp, Artificial Sequence
  Synthetic Oligonucleotide
gcgttgcttctcctgactacatgagtattaataaacgcgc

SEQ ID NO: 7160 - DNA, 40 bp, Artificial Sequence
  Synthetic Oligonucleotide
gcgttcttctccgtgactacattgagattaataaacgcgc

SEQ ID NO: 7161 - DNA, 40 bp, Artificial Sequence
  Synthetic Oligonucleotide
gcggtttcttctcctgactatatgagattaataaacgcgc

SEQ ID NO: 7162 - DNA, 40 bp, Artificial Sequence
  Synthetic Oligonucleotide
gcggtttcttctcctgactacatgagatttataaacgcgc

SEQ ID NO: 7163 - DNA, 40 bp, Artificial Sequence
  Synthetic Oligonucleotide
gcggtttcttctcctgactacaagagattaataaacgcgc

SEQ ID NO: 7164 - DNA, 40 bp, Artificial Sequence
  Synthetic Oligonucleotide
gcggttgcttctcctgactacatgagattaataaacgcgc

SEQ ID NO: 7165 - DNA, 40 bp, Artificial Sequence
  Synthetic Oligonucleotide
gcggttcttctcctgactacatgagattaataaacgcgcc

SEQ ID NO: 7166 - DNA, 40 bp, Artificial Sequence
  Synthetic Oligonucleotide
gcggttctcttcctcgactacatgagattaataaacgcgc

SEQ ID NO: 7167 - DNA, 40 bp, Artificial Sequence
  Synthetic Oligonucleotide
gcggtatcttctcctgactacatgagattaataaacgcgc

SEQ ID NO: 7168 - DNA, 40 bp, Artificial Sequence
  Synthetic Oligonucleotide
gccgcatgggtcggttttggtgggggactaccccctcgta

SEQ ID NO: 7169 - DNA, 40 bp, Artificial Sequence
  Synthetic Oligonucleotide
gccgcatgggtcggtttggtgggggactaccccccttgta

SEQ ID NO: 7170 - DNA, 40 bp, Artificial Sequence
  Synthetic Oligonucleotide
gcactatcgtttgtccgtcctcttgtggtattgcgcatgc

SEQ ID NO: 7171 - DNA, 40 bp, Artificial Sequence
  Synthetic Oligonucleotide
gagatctcggatctggcatactacttggacaggttccttc

SEQ ID NO: 7172 - DNA, 40 bp, Artificial Sequence
  Synthetic Oligonucleotide
gagatctcggatctgcgtcactacttggacaggttccttc

SEQ ID NO: 7173 - DNA, 40 bp, Artificial Sequence
  Synthetic Oligonucleotide
gactatccgcttgtccgtcctcttgtggtattgcgcatgc

SEQ ID NO: 7174 - DNA, 40 bp, Artificial Sequence
  Synthetic Oligonucleotide
gaaccggggtccgcctcaagctagctacctccattgtctg

SEQ ID NO: 7175 - DNA, 40 bp, Artificial Sequence
  Synthetic Oligonucleotide
gaaccgggcccgctcaacgtctagctacctccattgtctg

SEQ ID NO: 7176 - DNA, 40 bp, Artificial Sequence
  Synthetic Oligonucleotide
cttgagtattagtcagcccgcctcgcatccttccacggac

SEQ ID NO: 7177 - DNA, 40 bp, Artificial Sequence
  Synthetic Oligonucleotide
ctcttatccggcaggacgtctttcgtgcactatcatctca

SEQ ID NO: 7178 - DNA, 40 bp, Artificial Sequence
  Synthetic Oligonucleotide
ctcttagtccgcaggacgtctttcgtgcactatcacgatt

SEQ ID NO: 7179 - DNA, 40 bp, Artificial Sequence
  Synthetic Oligonucleotide
ctctatccggcaggacgatctttcgtgcactatcatcgat

SEQ ID NO: 7180 - DNA, 40 bp, Artificial Sequence
  Synthetic Oligonucleotide
ctcgtatccggcaggacgtctttcgtgcactatcacgatt

SEQ ID NO: 7181 - DNA, 40 bp, Artificial Sequence
  Synthetic Oligonucleotide
ctccggaacgcctcgatcctcgcataatatgatacgtctg

SEQ ID NO: 7182 - DNA, 40 bp, Artificial Sequence
  Synthetic Oligonucleotide
ctcccatccggcaggacgtctttcgtgcactatcacgatt

SEQ ID NO: 7183 - DNA, 40 bp, Artificial Sequence
  Synthetic Oligonucleotide
cgtcaccccgatagtcaatcttcactggacacccgtgtta

SEQ ID NO: 7184 - DNA, 40 bp, Artificial Sequence
  Synthetic Oligonucleotide
cgctatctgtcatcgagcgagcactttgtgcgaccacaca

SEQ ID NO: 7185 - DNA, 40 bp, Artificial Sequence
  Synthetic Oligonucleotide
cgctatctgtcatcgacgtagcactttgtgcgatcacaca

SEQ ID NO: 7186 - DNA, 40 bp, Artificial Sequence
  Synthetic Oligonucleotide
cgctatctgtcatcgacgagcgactttgtgcgatcacaca

SEQ ID NO: 7187 - DNA, 40 bp, Artificial Sequence
  Synthetic Oligonucleotide
cgctatccgtttgtccgtcctcttgtggtattgcgcatac

SEQ ID NO: 7188 - DNA, 40 bp, Artificial Sequence
  Synthetic Oligonucleotide
cgctatccgtttgtccgtcctcttgtggtactgcgcatgc

SEQ ID NO: 7189 - DNA, 40 bp, Artificial Sequence
  Synthetic Oligonucleotide
cgctatccgtttgtccgtcctctggtggtattgcgcatgc

SEQ ID NO: 7190 - DNA, 40 bp, Artificial Sequence
  Synthetic Oligonucleotide
cgctatccgtcatcgagcggttcttcgataatatgcaaca

SEQ ID NO: 7191 - DNA, 40 bp, Artificial Sequence
  Synthetic Oligonucleotide
cgccgggagtccctcctcgtcttgatgcactatcatctca

SEQ ID NO: 7192 - DNA, 40 bp, Artificial Sequence
  Synthetic Oligonucleotide
cgactatccgtttgtccgcctcttgtggtattgcgcatgc

SEQ ID NO: 7193 - DNA, 40 bp, Artificial Sequence
  Synthetic Oligonucleotide
ccgtcaccccgatagtcatcttcactggacaacccgtgta

SEQ ID NO: 7194 - DNA, 40 bp, Artificial Sequence
  Synthetic Oligonucleotide
ccgcgccccgattagtcatcttcactggacacccgtgtta

SEQ ID NO: 7195 - DNA, 40 bp, Artificial Sequence
  Synthetic Oligonucleotide
ccgcctctagcctccatgtaatctctccctaatgcgtctg

SEQ ID NO: 7196 - DNA, 40 bp, Artificial Sequence
  Synthetic Oligonucleotide
ccgcctcgaacactgacgtcgtggaaccttcgattgctac

SEQ ID NO: 7197 - DNA, 40 bp, Artificial Sequence
  Synthetic Oligonucleotide
ccgccacccgatagtcatcttcgctggaccacccgcgtta

SEQ ID NO: 7198 - DNA, 40 bp, Artificial Sequence
  Synthetic Oligonucleotide
ccgcacctccgatagtcatcttcactggacacccgtgtta

SEQ ID NO: 7199 - DNA, 40 bp, Artificial Sequence
  Synthetic Oligonucleotide
ccgcaccccgattagtccatcttcactggacacccgtgta

SEQ ID NO: 7200 - DNA, 40 bp, Artificial Sequence
  Synthetic Oligonucleotide
ccgcaccccgatagtcatcttcgctgggccacccgtgtta

SEQ ID NO: 7201 - DNA, 40 bp, Artificial Sequence
  Synthetic Oligonucleotide
ccgcaccccgatagtcatcttcgctggactacccgtgtta

SEQ ID NO: 7202 - DNA, 40 bp, Artificial Sequence
  Synthetic Oligonucleotide
ccgcaccccgatagtcatcttcactggatcacccgtgtta

SEQ ID NO: 7203 - DNA, 40 bp, Artificial Sequence
  Synthetic Oligonucleotide
ccgcaccccgatagtcatcttcactggacaccctgtgtta

SEQ ID NO: 7204 - DNA, 40 bp, Artificial Sequence
  Synthetic Oligonucleotide
ccgcaccccgactagtcatcttcgctggaccaccgcgtta

SEQ ID NO: 7205 - DNA, 40 bp, Artificial Sequence
  Synthetic Oligonucleotide
ccgcacccccgatagtcgtcttcactggacacccgtgtta

SEQ ID NO: 7206 - DNA, 40 bp, Artificial Sequence
  Synthetic Oligonucleotide
ccgcacccccgatagtcatcttcgctggacacccgtgtta

SEQ ID NO: 7207 - DNA, 40 bp, Artificial Sequence
  Synthetic Oligonucleotide
ccgcaccccccgatagtcatcttcactggacaccgtgtta

SEQ ID NO: 7208 - DNA, 40 bp, Artificial Sequence
  Synthetic Oligonucleotide
ccgcaccccaatagttcatcttcactggacacccgtgtta

SEQ ID NO: 7209 - DNA, 40 bp, Artificial Sequence
  Synthetic Oligonucleotide
ccctatccgtttgtccgtcctctcgtggtattgcgcatgc

SEQ ID NO: 7210 - DNA, 40 bp, Artificial Sequence
  Synthetic Oligonucleotide
cccgcaccccgatagtcatcttcactggacacccgtgtta

SEQ ID NO: 7211 - DNA, 40 bp, Artificial Sequence
  Synthetic Oligonucleotide
cccctgaaacgtccacatgggctgcaaccggtattgcgcg

SEQ ID NO: 7212 - DNA, 40 bp, Artificial Sequence
  Synthetic Oligonucleotide
ccacaccccgatagtcatcttcactggaccacccgtgtta

SEQ ID NO: 7213 - DNA, 40 bp, Artificial Sequence
  Synthetic Oligonucleotide
cattatccgcttgtccgtcctctcgtggtattgcgcatgc

SEQ ID NO: 7214 - DNA, 40 bp, Artificial Sequence
  Synthetic Oligonucleotide
catcgtggacctcctttctcggatccaaacacaattgcac

SEQ ID NO: 7215 - DNA, 40 bp, Artificial Sequence
  Synthetic Oligonucleotide
cagtcgatccgtactttcaggcgctatcctgatcacccga

SEQ ID NO: 7216 - DNA, 40 bp, Artificial Sequence
  Synthetic Oligonucleotide
cactatcgtttcgctcgtcctcttgtggtattgcgcatgc

SEQ ID NO: 7217 - DNA, 40 bp, Artificial Sequence
  Synthetic Oligonucleotide
cactatccgtttgtcgtcctcttgtggtaattgcgcatgc

SEQ ID NO: 7218 - DNA, 40 bp, Artificial Sequence
  Synthetic Oligonucleotide
cactatccgtttgtccgtgctctcgtggtattgcgcatgc

SEQ ID NO: 7219 - DNA, 40 bp, Artificial Sequence
  Synthetic Oligonucleotide
cactatccgtttgtccgtctcttcgtggtattgcgcatgc

SEQ ID NO: 7220 - DNA, 40 bp, Artificial Sequence
  Synthetic Oligonucleotide
cactatccgtttgtccgtcctcttgtggcattacgcatgc

SEQ ID NO: 7221 - DNA, 40 bp, Artificial Sequence
  Synthetic Oligonucleotide
cactatccgtttgtccgtcctcttcagtgtatgcgcatcg

SEQ ID NO: 7222 - DNA, 40 bp, Artificial Sequence
  Synthetic Oligonucleotide
cactatccgtttgtccgtcctcttatggtattgcgcgtgc

SEQ ID NO: 7223 - DNA, 40 bp, Artificial Sequence
  Synthetic Oligonucleotide
cactatccgtttgtccgtcctcttatggtattgcgcatac

SEQ ID NO: 7224 - DNA, 40 bp, Artificial Sequence
  Synthetic Oligonucleotide
cactatccgtttgtccgtcctctgtggtattgcgcactgc

SEQ ID NO: 7225 - DNA, 40 bp, Artificial Sequence
  Synthetic Oligonucleotide
cactatccgtttgtccgtcctctcgtggtattgcgcattc

SEQ ID NO: 7226 - DNA, 40 bp, Artificial Sequence
  Synthetic Oligonucleotide
cactatccgtttgtccgtcctctcgtggtattgcgcatga

SEQ ID NO: 7227 - DNA, 40 bp, Artificial Sequence
  Synthetic Oligonucleotide
cactatccgtttgtccgtcctctcgtgctattgcgcatgc

SEQ ID NO: 7228 - DNA, 40 bp, Artificial Sequence
  Synthetic Oligonucleotide
cactatccgtttgtccgtcctctcctggtattgcgcatgc

SEQ ID NO: 7229 - DNA, 40 bp, Artificial Sequence
  Synthetic Oligonucleotide
cactatccgtttgtccgtcctcctgtggtattgcgcgtgc

SEQ ID NO: 7230 - DNA, 40 bp, Artificial Sequence
  Synthetic Oligonucleotide
cactatccgtttgtccgtcctcctgtggtattgcgcatcg

SEQ ID NO: 7231 - DNA, 40 bp, Artificial Sequence
  Synthetic Oligonucleotide
cactatccgtttgtccggcctcttgtggtattgcgcatgc

SEQ ID NO: 7232 - DNA, 40 bp, Artificial Sequence
  Synthetic Oligonucleotide
cactatccgtttgtccgccctcttatggtattgcgcatgc

SEQ ID NO: 7233 - DNA, 40 bp, Artificial Sequence
  Synthetic Oligonucleotide
cactatccgttgtccgtccttcttgtggtattgcgcatgt

SEQ ID NO: 7234 - DNA, 40 bp, Artificial Sequence
  Synthetic Oligonucleotide
cactatccgttgtccgtccttcttgtgcattgcgcatgtc

SEQ ID NO: 7235 - DNA, 40 bp, Artificial Sequence
  Synthetic Oligonucleotide
cactatccgttgtccgtcctcttgtggtgattgcgcatgc

SEQ ID NO: 7236 - DNA, 40 bp, Artificial Sequence
  Synthetic Oligonucleotide
cactatccgttgtccgtcctcttgtggtattgcgcgtgtc

SEQ ID NO: 7237 - DNA, 40 bp, Artificial Sequence
  Synthetic Oligonucleotide
cactatccgttgtccgtcctcttgtggtattgacgcatgc

SEQ ID NO: 7238 - DNA, 40 bp, Artificial Sequence
  Synthetic Oligonucleotide
cactatccgttgtccgtcctcttgtcggtgttgcgcatgc

SEQ ID NO: 7239 - DNA, 40 bp, Artificial Sequence
  Synthetic Oligonucleotide
cactatccgttctgtccgtcctcttgtggattgcgcatgc

SEQ ID NO: 7240 - DNA, 40 bp, Artificial Sequence
  Synthetic Oligonucleotide
cactatccgttagatccgtcactcactacgcgtatggatc

SEQ ID NO: 7241 - DNA, 40 bp, Artificial Sequence
  Synthetic Oligonucleotide
cactatccgtctgtccgtcctcttgtggtattgcgcgtgc

SEQ ID NO: 7242 - DNA, 40 bp, Artificial Sequence
  Synthetic Oligonucleotide
cactatccgtctgtccgtcctcttgtggtactgcgcatgc

SEQ ID NO: 7243 - DNA, 40 bp, Artificial Sequence
  Synthetic Oligonucleotide
cactatccgtagatccgtcactcactacgcgtgtggaatc

SEQ ID NO: 7244 - DNA, 40 bp, Artificial Sequence
  Synthetic Oligonucleotide
cactatccgcttgtccgtcctcttgcggtattgcgcatgc

SEQ ID NO: 7245 - DNA, 40 bp, Artificial Sequence
  Synthetic Oligonucleotide
cactatccgcttgtccgtcctcttgaggtattgcgcatgc

SEQ ID NO: 7246 - DNA, 40 bp, Artificial Sequence
  Synthetic Oligonucleotide
cactatccgacatcgagagagctacgtcatcaagcgcaaa

SEQ ID NO: 7247 - DNA, 40 bp, Artificial Sequence
  Synthetic Oligonucleotide
cactatccctttgtccgtcctcttgtggtattgcgcatgc

SEQ ID NO: 7248 - DNA, 40 bp, Artificial Sequence
  Synthetic Oligonucleotide
cacctatcgttgtccgtcctcttgtcggtattgcgcatgc

SEQ ID NO: 7249 - DNA, 40 bp, Artificial Sequence
  Synthetic Oligonucleotide
caccatccgtatcgagggttttgtccggtccacgactgac

SEQ ID NO: 7250 - DNA, 40 bp, Artificial Sequence
  Synthetic Oligonucleotide
caatacttgatctcctgtcgactctgcggctgagactact

SEQ ID NO: 7251 - DNA, 40 bp, Artificial Sequence
  Synthetic Oligonucleotide
atgtccatgagtcttctggcactatccgagttgacgctca

SEQ ID NO: 7252 - DNA, 40 bp, Artificial Sequence
  Synthetic Oligonucleotide
atgtccatgacgcttctggcgtctatccagttgacgctca

SEQ ID NO: 7253 - DNA, 40 bp, Artificial Sequence
  Synthetic Oligonucleotide
atgtccatgacgcttctcggcactatcgagttgacgctca

SEQ ID NO: 7254 - DNA, 40 bp, Artificial Sequence
  Synthetic Oligonucleotide
atggtccatgagtcctctggcactatccagttgacgctca

SEQ ID NO: 7255 - DNA, 40 bp, Artificial Sequence
  Synthetic Oligonucleotide
atggtccatgagcttctggcactatccagttgacgctcca

SEQ ID NO: 7256 - DNA, 40 bp, Artificial Sequence
  Synthetic Oligonucleotide
atggtccatgagcttctggcactatccagttgaccgctca

SEQ ID NO: 7257 - DNA, 40 bp, Artificial Sequence
  Synthetic Oligonucleotide
atggtccagtgagcttctggcactatccagttgacgctca

SEQ ID NO: 7258 - DNA, 40 bp, Artificial Sequence
  Synthetic Oligonucleotide
atctgagtgcaccagctagcctcgcgcctcctcaagcttg

SEQ ID NO: 7259 - DNA, 40 bp, Artificial Sequence
  Synthetic Oligonucleotide
atccatggtacgccttgattccgcccatacatgcatgtaa

SEQ ID NO: 7260 - DNA, 40 bp, Artificial Sequence
  Synthetic Oligonucleotide
atccatggtacgcctcaattccgcccatacatgcatgtaa

SEQ ID NO: 7261 - DNA, 40 bp, Artificial Sequence
  Synthetic Oligonucleotide
ataccggtacgccttgtgtcgcccgtgtgttgcaaccaga

SEQ ID NO: 7262 - DNA, 40 bp, Artificial Sequence
  Synthetic Oligonucleotide
agctttctcggatccaaacgcatatcctcctccgcctcgt

SEQ ID NO: 7263 - DNA, 40 bp, Artificial Sequence
  Synthetic Oligonucleotide
agactactccgatggacgatcgtaacttaggagtcgccta

SEQ ID NO: 7264 - DNA, 40 bp, Artificial Sequence
  Synthetic Oligonucleotide
acctgcttgtgtgcgacacatgtctacgactcctcctcag

SEQ ID NO: 7265 - DNA, 40 bp, Artificial Sequence
  Synthetic Oligonucleotide
acctctccgggtgagcgagtttggcacagcactatctctg

SEQ ID NO: 7266 - DNA, 40 bp, Artificial Sequence
  Synthetic Oligonucleotide
acactattccggtaagtcatcgtctaaccgtttgttgcga

SEQ ID NO: 7267 - DNA, 40 bp, Artificial Sequence
  Synthetic Oligonucleotide
acactattccggtaagtcaccgtctaaccgtttgttgcaa

SEQ ID NO: 7268 - DNA, 40 bp, Artificial Sequence
  Synthetic Oligonucleotide
aatgggctttaagcacttctcggtaacttgggcagcttac

SEQ ID NO: 7269 - DNA, 40 bp, Artificial Sequence
  Synthetic Oligonucleotide
aagatctcggatttggcgtactacttggacaggttccttc

SEQ ID NO: 7270 - DNA, 40 bp, Artificial Sequence
  Synthetic Oligonucleotide
aaccggggcccgcctcaagctagctacctccattgtctgc

SEQ ID NO: 7271 - DNA, 40 bp, Artificial Sequence
  Synthetic Oligonucleotide
aaccgggcccgccttcaagctagctacctccattggtctg

SEQ ID NO: 7272 - DNA, 40 bp, Artificial Sequence
  Synthetic Oligonucleotide
aaccgggcccgcctcaagtctagctacctccattgtctgc

SEQ ID NO: 7273 - DNA, 40 bp, Artificial Sequence
  Synthetic Oligonucleotide
aaccgggcccgcctcaagctagctaccttccattgtcctg

SEQ ID NO: 7274 - DNA, 40 bp, Artificial Sequence
  Synthetic Oligonucleotide
aaaccggggcccgcttcaagctagctacctcctttgtctg

SEQ ID NO: 7275 - DNA, 40 bp, Artificial Sequence
  Synthetic Oligonucleotide
aaaccgggccgcctcaacgtctagctacctccattgtctg

SEQ ID NO: 7276 - DNA, 40 bp, Artificial Sequence
  Synthetic Oligonucleotide
aaaccgggcccgctcaagtctagctacctccattgtcgtg

SEQ ID NO: 7277 - DNA, 40 bp, Artificial Sequence
  Synthetic Oligonucleotide
aaaccgggcccgcctccaagctagctacctccattgtctg

SEQ ID NO: 7278 - DNA, 40 bp, Artificial Sequence
  Synthetic Oligonucleotide
ttttagtctcccgttcgcacgtacttcccatcaccgcatg

SEQ ID NO: 7279 - DNA, 40 bp, Artificial Sequence
  Synthetic Oligonucleotide
tttgtctctcgggtccattctcgccgcaccttccccagga

SEQ ID NO: 7280 - DNA, 40 bp, Artificial Sequence
  Synthetic Oligonucleotide
tttggtccatgagcttctggcactatccagttgacgctca

SEQ ID NO: 7281 - DNA, 40 bp, Artificial Sequence
  Synthetic Oligonucleotide
tttgggctttaagcacttctcggtaacttgggcagcttac

SEQ ID NO: 7282 - DNA, 40 bp, Artificial Sequence
  Synthetic Oligonucleotide
tttgggaagcgggactggtcgaggcgctatcctcgactta

SEQ ID NO: 7283 - DNA, 40 bp, Artificial Sequence
  Synthetic Oligonucleotide
tttaaggcgctaaccagctaattagcatggcccctaactg

SEQ ID NO: 7284 - DNA, 40 bp, Artificial Sequence
  Synthetic Oligonucleotide
tttaagcgcacctagctaatgagcatggccccttaactcg

SEQ ID NO: 7285 - DNA, 40 bp, Artificial Sequence
  Synthetic Oligonucleotide
tttaagcgcaccagtctaatacgcattggccccttaactg

SEQ ID NO: 7286 - DNA, 40 bp, Artificial Sequence
  Synthetic Oligonucleotide
tttaagcgcaccagctaatagtcatggccccccttaactg

SEQ ID NO: 7287 - DNA, 40 bp, Artificial Sequence
  Synthetic Oligonucleotide
ttgtccatgagctctgacatctatccagttgacgtctcga

SEQ ID NO: 7288 - DNA, 40 bp, Artificial Sequence
  Synthetic Oligonucleotide
ttgtaccccgggttgcaattgcctcgtaaccggaccgcat

SEQ ID NO: 7289 - DNA, 40 bp, Artificial Sequence
  Synthetic Oligonucleotide
ttgtaccccgggttgcaattgcctcgtaaccagaccgcac

SEQ ID NO: 7290 - DNA, 40 bp, Artificial Sequence
  Synthetic Oligonucleotide
ttgtaccccgggtcgcaattgcctcgtaaccagaccgcat

SEQ ID NO: 7291 - DNA, 40 bp, Artificial Sequence
  Synthetic Oligonucleotide
ttggggctcttaagcacttctcggtaacttgggcagttac

SEQ ID NO: 7292 - DNA, 40 bp, Artificial Sequence
  Synthetic Oligonucleotide
ttgggcgccttacaccgcctttggtccagtcacgcgtacg

SEQ ID NO: 7293 - DNA, 40 bp, Artificial Sequence
  Synthetic Oligonucleotide
ttgcgaaacgctatttctgggaagccgcatctcgagcgaa

SEQ ID NO: 7294 - DNA, 40 bp, Artificial Sequence
  Synthetic Oligonucleotide
ttgatcatataaagccggcttgctcgcctcggtcctccat

SEQ ID NO: 7295 - DNA, 40 bp, Artificial Sequence
  Synthetic Oligonucleotide
ttgagccccgggttgcaattgcctcgtaaccagaccgcat

SEQ ID NO: 7296 - DNA, 40 bp, Artificial Sequence
  Synthetic Oligonucleotide
ttgactaccttccgctgcgtgtactcgtccttttcgtctg

SEQ ID NO: 7297 - DNA, 40 bp, Artificial Sequence
  Synthetic Oligonucleotide
ttgactaccttccgctgcgcgtactcgtcctttttgtctg

SEQ ID NO: 7298 - DNA, 40 bp, Artificial Sequence
  Synthetic Oligonucleotide
ttgaatcctgctttaggcgcctcttaagggttccattttt

SEQ ID NO: 7299 - DNA, 40 bp, Artificial Sequence
  Synthetic Oligonucleotide
ttcttatccggcaggatgtctttcgtgcactatcacgatt

SEQ ID NO: 7300 - DNA, 40 bp, Artificial Sequence
  Synthetic Oligonucleotide
ttcttatccggcaggacgtgtttcgtgcactatcacgatt

SEQ ID NO: 7301 - DNA, 40 bp, Artificial Sequence
  Synthetic Oligonucleotide
ttcttatccggcaagacgtctttcgtgcactatcacgatt

SEQ ID NO: 7302 - DNA, 40 bp, Artificial Sequence
  Synthetic Oligonucleotide
ttctgggtacgctcgactacgaccggtacaccctgtacag

SEQ ID NO: 7303 - DNA, 40 bp, Artificial Sequence
  Synthetic Oligonucleotide
ttctgggcactatcccagccttgagcatctccgtcgggtt

SEQ ID NO: 7304 - DNA, 40 bp, Artificial Sequence
  Synthetic Oligonucleotide
ttcggcatcagctttcgggcgctatcccgatccagctgca

SEQ ID NO: 7305 - DNA, 40 bp, Artificial Sequence
  Synthetic Oligonucleotide
ttcgcgatagtcctcggttcttccatgcagccgcatatta

SEQ ID NO: 7306 - DNA, 40 bp, Artificial Sequence
  Synthetic Oligonucleotide
ttcgcgaacgccttagtcaccctcctcggataacacgatt

SEQ ID NO: 7307 - DNA, 40 bp, Artificial Sequence
  Synthetic Oligonucleotide
ttcgaaacgctattttctgggaagccgcatctcgagcgaa

SEQ ID NO: 7308 - DNA, 40 bp, Artificial Sequence
  Synthetic Oligonucleotide
ttccaagcgctatcttggccagttcagcatttatagtgtc

SEQ ID NO: 7309 - DNA, 40 bp, Artificial Sequence
  Synthetic Oligonucleotide
ttcaggaccgcagatcgcctcgtcttcgcagtatgcccgg

SEQ ID NO: 7310 - DNA, 40 bp, Artificial Sequence
  Synthetic Oligonucleotide
ttcagccttctcttgactacacgagtttcagctgttgcct

SEQ ID NO: 7311 - DNA, 40 bp, Artificial Sequence
  Synthetic Oligonucleotide
ttcagcatgctctggatccctggactacccgggaaatagt

SEQ ID NO: 7312 - DNA, 40 bp, Artificial Sequence
  Synthetic Oligonucleotide
ttcaagcgcacagtctactacgcgtggcccccccttaatg

SEQ ID NO: 7313 - DNA, 40 bp, Artificial Sequence
  Synthetic Oligonucleotide
ttatccctgacgatccgtattctcatcggctggcactatc

SEQ ID NO: 7314 - DNA, 40 bp, Artificial Sequence
  Synthetic Oligonucleotide
ttatccctaatgatccgaattctcatcggctggcactatc

SEQ ID NO: 7315 - DNA, 40 bp, Artificial Sequence
  Synthetic Oligonucleotide
ttatccccgatcgatctgaattctcatcgctggcactatc

SEQ ID NO: 7316 - DNA, 40 bp, Artificial Sequence
  Synthetic Oligonucleotide
ttatacgatcgaatcgcgcacattacgtacactgcgcccg

SEQ ID NO: 7317 - DNA, 40 bp, Artificial Sequence
  Synthetic Oligonucleotide
ttagggccctaacatggcctcggtcccccgtcgtagtgca

SEQ ID NO: 7318 - DNA, 40 bp, Artificial Sequence
  Synthetic Oligonucleotide
ttagactagtccggcatcgcctcagtcctgccatccgcat

SEQ ID NO: 7319 - DNA, 40 bp, Artificial Sequence
  Synthetic Oligonucleotide
ttagaatgtgtgatagtctcgggcattcctgcctccacat

SEQ ID NO: 7320 - DNA, 40 bp, Artificial Sequence
  Synthetic Oligonucleotide
ttactttctcggatcactgattgccgcatcacgcactccc

SEQ ID NO: 7321 - DNA, 40 bp, Artificial Sequence
  Synthetic Oligonucleotide
ttactttctcggatcactaattgccgcctcacgcactccc

SEQ ID NO: 7322 - DNA, 40 bp, Artificial Sequence
  Synthetic Oligonucleotide
ttactttctcggatcactaattgccgcatcacgcaccccc

SEQ ID NO: 7323 - DNA, 40 bp, Artificial Sequence
  Synthetic Oligonucleotide
ttactccggatgagccacctcgcattcctccgttcgtctg

SEQ ID NO: 7324 - DNA, 40 bp, Artificial Sequence
  Synthetic Oligonucleotide
ttaagcgcaccagtctaatcacgcattggccccttaactg

SEQ ID NO: 7325 - DNA, 40 bp, Artificial Sequence
  Synthetic Oligonucleotide
tgttcgcgattgccgcttgtgtttcgctccctggagactt

SEQ ID NO: 7326 - DNA, 40 bp, Artificial Sequence
  Synthetic Oligonucleotide
tgttcgccagtcacgtcaactatgatgacgcttgactgga

SEQ ID NO: 7327 - DNA, 40 bp, Artificial Sequence
  Synthetic Oligonucleotide
tgttcgccagtcacatcaactatgatgacgcttgactgaa

SEQ ID NO: 7328 - DNA, 40 bp, Artificial Sequence
  Synthetic Oligonucleotide
tgttcgccagtcacatcaactataatgacgcttgactgga

SEQ ID NO: 7329 - DNA, 40 bp, Artificial Sequence
  Synthetic Oligonucleotide
tgttcgccagctacatcaactatgatgacgcttgactgga

SEQ ID NO: 7330 - DNA, 40 bp, Artificial Sequence
  Synthetic Oligonucleotide
tgtggggcttttaagcacttctcggtaactgggcagttac

SEQ ID NO: 7331 - DNA, 40 bp, Artificial Sequence
  Synthetic Oligonucleotide
tgtgcgactacgtctcttgaacaattctgatccctggatt

SEQ ID NO: 7332 - DNA, 40 bp, Artificial Sequence
  Synthetic Oligonucleotide
tgtgcgaccacgctcttgaacaattctgatccctggactt

SEQ ID NO: 7333 - DNA, 40 bp, Artificial Sequence
  Synthetic Oligonucleotide
tgtgcaacgccttgattcactcctacagtgtgtctataga

SEQ ID NO: 7334 - DNA, 40 bp, Artificial Sequence
  Synthetic Oligonucleotide
tgtgaacgaccatgctctaggcgcctctaccgggaagctt

SEQ ID NO: 7335 - DNA, 40 bp, Artificial Sequence
  Synthetic Oligonucleotide
tgtctgaccctgttatggactaccatatcagaaaggtact

SEQ ID NO: 7336 - DNA, 40 bp, Artificial Sequence
  Synthetic Oligonucleotide
tgtcgccagcctacatcaactatgatgacgcttgactgga

SEQ ID NO: 7337 - DNA, 40 bp, Artificial Sequence
  Synthetic Oligonucleotide
tgtcgcagtctacatcaactatgagtgacgcttgactgga

SEQ ID NO: 7338 - DNA, 40 bp, Artificial Sequence
  Synthetic Oligonucleotide
tgtcgaaacgctatttctggaagccgcatctcgaagcgaa

SEQ ID NO: 7339 - DNA, 40 bp, Artificial Sequence
  Synthetic Oligonucleotide
tgtccatgacgcttctggcatctatccagttgacgctcta

SEQ ID NO: 7340 - DNA, 40 bp, Artificial Sequence
  Synthetic Oligonucleotide
tgtagtcgcctgtccgccttcgatcctctataccgtctgt

SEQ ID NO: 7341 - DNA, 40 bp, Artificial Sequence
  Synthetic Oligonucleotide
tgtaggtggcctggtccgcctcgatcctctataccgtctg

SEQ ID NO: 7342 - DNA, 40 bp, Artificial Sequence
  Synthetic Oligonucleotide
tgtaggtcgtctggtccgcctcgatcctctataccgtctg

SEQ ID NO: 7343 - DNA, 40 bp, Artificial Sequence
  Synthetic Oligonucleotide
tgtaggtcgcctggtccgtctcgatcctctataccgtctg

SEQ ID NO: 7344 - DNA, 40 bp, Artificial Sequence
  Synthetic Oligonucleotide
tgtaggtcgcctggtccgcctcgctcctctataccgtctg

SEQ ID NO: 7345 - DNA, 40 bp, Artificial Sequence
  Synthetic Oligonucleotide
tgtaggtcgcctggtccgcctcgatcctctacaccgtctg

SEQ ID NO: 7346 - DNA, 40 bp, Artificial Sequence
  Synthetic Oligonucleotide
tgtaggtcgcctggtccgcctcgatccactataccgtctg

SEQ ID NO: 7347 - DNA, 40 bp, Artificial Sequence
  Synthetic Oligonucleotide
tgtaggtcgcctggtccgcctccggtcttccccaggttaa

SEQ ID NO: 7348 - DNA, 40 bp, Artificial Sequence
  Synthetic Oligonucleotide
tgtaggtcgcctggtcccgcctcggtctctataccgtctg

SEQ ID NO: 7349 - DNA, 40 bp, Artificial Sequence
  Synthetic Oligonucleotide
tgtagatcgttcttatccgcctcggtcttccccgagttaa

SEQ ID NO: 7350 - DNA, 40 bp, Artificial Sequence
  Synthetic Oligonucleotide
tggtccatgagcttctggcacgtattccagttgacgctca

SEQ ID NO: 7351 - DNA, 40 bp, Artificial Sequence
  Synthetic Oligonucleotide
tggtccagtgagcttctggcactactccagttgacgctca

SEQ ID NO: 7352 - DNA, 40 bp, Artificial Sequence
  Synthetic Oligonucleotide
tgggctttcttcatggactaccatgttacaaaagatcata

SEQ ID NO: 7353 - DNA, 40 bp, Artificial Sequence
  Synthetic Oligonucleotide
tggccctcgccttgttccttccgttaactactggcgttag

SEQ ID NO: 7354 - DNA, 40 bp, Artificial Sequence
  Synthetic Oligonucleotide
tggagtccgcggtttcactagactactactgatcacgccg

SEQ ID NO: 7355 - DNA, 40 bp, Artificial Sequence
  Synthetic Oligonucleotide
tggacccgggcacttgcctcagttctctctacaggcgaat

SEQ ID NO: 7356 - DNA, 40 bp, Artificial Sequence
  Synthetic Oligonucleotide
tgctatccgtttgtccgtcctcttgtggtattgcgcatgc

SEQ ID NO: 7357 - DNA, 40 bp, Artificial Sequence
  Synthetic Oligonucleotide
tgctatccgccatcgagcgagcagtgtgccgttttcggtg

SEQ ID NO: 7358 - DNA, 40 bp, Artificial Sequence
  Synthetic Oligonucleotide
tgctatccgccatcgagcgaacagtgtgccgttttcagtg

SEQ ID NO: 7359 - DNA, 40 bp, Artificial Sequence
  Synthetic Oligonucleotide
tgctatccgcatcgagcgggctcttcgataatatgcaaca

SEQ ID NO: 7360 - DNA, 40 bp, Artificial Sequence
  Synthetic Oligonucleotide
tgctatccgaatcgagcttgagtgtctggctaaacaacga

SEQ ID NO: 7361 - DNA, 40 bp, Artificial Sequence
  Synthetic Oligonucleotide
tgcgtaaacgctattttctgggaaccgcgtctcgagcgaa

SEQ ID NO: 7362 - DNA, 40 bp, Artificial Sequence
  Synthetic Oligonucleotide
tgcgtaaacgctatttctgggaagccgcatctcgagcgga

SEQ ID NO: 7363 - DNA, 40 bp, Artificial Sequence
  Synthetic Oligonucleotide
tgcgcaacgtctcatttctggaagccgcatctcgagcgaa

SEQ ID NO: 7364 - DNA, 40 bp, Artificial Sequence
  Synthetic Oligonucleotide
tgcgcaacgccttgattcactcctacagtgtgtctataaa

SEQ ID NO: 7365 - DNA, 40 bp, Artificial Sequence
  Synthetic Oligonucleotide
tgcgcaacgccttgattcactcctacagtgtgactataga

SEQ ID NO: 7366 - DNA, 40 bp, Artificial Sequence
  Synthetic Oligonucleotide
tgcgcaacgccttgattcactcctacagtgtatctataga

SEQ ID NO: 7367 - DNA, 40 bp, Artificial Sequence
  Synthetic Oligonucleotide
tgcgcaacgcctcgattcactcctacagtgtgtctataga

SEQ ID NO: 7368 - DNA, 40 bp, Artificial Sequence
  Synthetic Oligonucleotide
tgcgcaaacgctatttctggaagccgcatctcgagccgaa

SEQ ID NO: 7369 - DNA, 40 bp, Artificial Sequence
  Synthetic Oligonucleotide
tgcgagacgctattttctgggaagccgcgtctcgagcgaa

SEQ ID NO: 7370 - DNA, 40 bp, Artificial Sequence
  Synthetic Oligonucleotide
tgcgaacgctattttctgggaagccgtatcgtcgagcgaa

SEQ ID NO: 7371 - DNA, 40 bp, Artificial Sequence
  Synthetic Oligonucleotide
tgcgaacgctattttctgggaagccgcatctcgagccgaa

SEQ ID NO: 7372 - DNA, 40 bp, Artificial Sequence
  Synthetic Oligonucleotide
tgcgaacgctattttctcgggaagccgcatctcgagcgaa

SEQ ID NO: 7373 - DNA, 40 bp, Artificial Sequence
  Synthetic Oligonucleotide
tgcgaaacgctattttctgtgaagccgcatctcgagcgaa

SEQ ID NO: 7374 - DNA, 40 bp, Artificial Sequence
  Synthetic Oligonucleotide
tgcgaaacgctattttctgggtagccgcatctcgagcgga

SEQ ID NO: 7375 - DNA, 40 bp, Artificial Sequence
  Synthetic Oligonucleotide
tgcgaaacgctattttctgggaatccgcatctcgagcgaa

SEQ ID NO: 7376 - DNA, 40 bp, Artificial Sequence
  Synthetic Oligonucleotide
tgcgaaacgctattttctgggaagccgtgtctcgagcgaa

SEQ ID NO: 7377 - DNA, 40 bp, Artificial Sequence
  Synthetic Oligonucleotide
tgcgaaacgctattttctgggaagccggatctcgagcgaa

SEQ ID NO: 7378 - DNA, 40 bp, Artificial Sequence
  Synthetic Oligonucleotide
tgcgaaacgctattttctgggaagccgctactcgagcgaa

SEQ ID NO: 7379 - DNA, 40 bp, Artificial Sequence
  Synthetic Oligonucleotide
tgcgaaacgctattttctgggaagccgcgtcacgagcgaa

SEQ ID NO: 7380 - DNA, 40 bp, Artificial Sequence
  Synthetic Oligonucleotide
tgcgaaacgctattttctgggaagccgcatctcgagcgtg

SEQ ID NO: 7381 - DNA, 40 bp, Artificial Sequence
  Synthetic Oligonucleotide
tgcgaaacgctattttctgggaagccgcatcgtgagcgaa

SEQ ID NO: 7382 - DNA, 40 bp, Artificial Sequence
  Synthetic Oligonucleotide
tgcgaaacgctattttctgggaagccgcatcctcagcgaa

SEQ ID NO: 7383 - DNA, 40 bp, Artificial Sequence
  Synthetic Oligonucleotide
tgcgaaacgctattttctgggaagccgcatcccgagcaaa

SEQ ID NO: 7384 - DNA, 40 bp, Artificial Sequence
  Synthetic Oligonucleotide
tgcgaaacgctattttctgggaagccgcacatcgagcgaa

SEQ ID NO: 7385 - DNA, 40 bp, Artificial Sequence
  Synthetic Oligonucleotide
tgcgaaacgctattttctgggaagccccatctcgagcgaa

SEQ ID NO: 7386 - DNA, 40 bp, Artificial Sequence
  Synthetic Oligonucleotide
tgcgaaacgctattttctgggaagccacatctcgagagaa

SEQ ID NO: 7387 - DNA, 40 bp, Artificial Sequence
  Synthetic Oligonucleotide
tgcgaaacgctattttctgggaagacgcatctcgagcgaa

SEQ ID NO: 7388 - DNA, 40 bp, Artificial Sequence
  Synthetic Oligonucleotide
tgcgaaacgctattttctgggaaaccgcgtctcgagcgaa

SEQ ID NO: 7389 - DNA, 40 bp, Artificial Sequence
  Synthetic Oligonucleotide
tgcgaaacgctattttctggaagccgcatctcgagctgaa

SEQ ID NO: 7390 - DNA, 40 bp, Artificial Sequence
  Synthetic Oligonucleotide
tgcgaaacgctattttctcggaagccgcatctcgagcgaa

SEQ ID NO: 7391 - DNA, 40 bp, Artificial Sequence
  Synthetic Oligonucleotide
tgcgaaacgctattttcagggaagccgcatctcgagcgaa

SEQ ID NO: 7392 - DNA, 40 bp, Artificial Sequence
  Synthetic Oligonucleotide
tgcgaaacgctatttctgtcgaagccgcatctcgagcgaa

SEQ ID NO: 7393 - DNA, 40 bp, Artificial Sequence
  Synthetic Oligonucleotide
tgcgaaacgctatttctgggaatgccgcatctcgagcgat

SEQ ID NO: 7394 - DNA, 40 bp, Artificial Sequence
  Synthetic Oligonucleotide
tgcgaaacgctatttctgggaatgccgcatctcaagcgaa

SEQ ID NO: 7395 - DNA, 40 bp, Artificial Sequence
  Synthetic Oligonucleotide
tgcgaaacgctatttctgggaagccgctatctcgagcgaa

SEQ ID NO: 7396 - DNA, 40 bp, Artificial Sequence
  Synthetic Oligonucleotide
tgcgaaacgctatttctgggaagccgcatctcggagcgaa

SEQ ID NO: 7397 - DNA, 40 bp, Artificial Sequence
  Synthetic Oligonucleotide
tgcgaaacgctatttctgggaagccgcatctcgagctgaa

SEQ ID NO: 7398 - DNA, 40 bp, Artificial Sequence
  Synthetic Oligonucleotide
tgcgaaacgctatttctgggaaatccgcatctcgagcgaa

SEQ ID NO: 7399 - DNA, 40 bp, Artificial Sequence
  Synthetic Oligonucleotide
tgcgaaacgctatttctgggaaagccgcatctcgagcgaa

SEQ ID NO: 7400 - DNA, 40 bp, Artificial Sequence
  Synthetic Oligonucleotide
tgcgaaacgctatttctggaatgccgcagtctcgagcgaa

SEQ ID NO: 7401 - DNA, 40 bp, Artificial Sequence
  Synthetic Oligonucleotide
tgcgaaacgctatttctcgggaaccgctgtctcgagcgaa

SEQ ID NO: 7402 - DNA, 40 bp, Artificial Sequence
  Synthetic Oligonucleotide
tgcgaaacgctatttcctgggaagccgcgtctcgagcgaa

SEQ ID NO: 7403 - DNA, 40 bp, Artificial Sequence
  Synthetic Oligonucleotide
tgcgaaacgctatttactgggaagccgcgtctcgagcgaa

SEQ ID NO: 7404 - DNA, 40 bp, Artificial Sequence
  Synthetic Oligonucleotide
tgcgaaacgctattctctgggaagccgcatctcgagcgag

SEQ ID NO: 7405 - DNA, 40 bp, Artificial Sequence
  Synthetic Oligonucleotide
tgcgaaacgctatattctgggaagccgcgtctcgagcgaa

SEQ ID NO: 7406 - DNA, 40 bp, Artificial Sequence
  Synthetic Oligonucleotide
tgcgaaacgctacttttctggaagccgcatctcgagcgaa

SEQ ID NO: 7407 - DNA, 40 bp, Artificial Sequence
  Synthetic Oligonucleotide
tgcgaaacgcgtatttctgggaagccgcatctcgagcgaa

SEQ ID NO: 7408 - DNA, 40 bp, Artificial Sequence
  Synthetic Oligonucleotide
tgcgaaacgcctatttctgggaagccgcatctcgagcgaa

SEQ ID NO: 7409 - DNA, 40 bp, Artificial Sequence
  Synthetic Oligonucleotide
tgcgaaacgccattttctgggaagccgcgtctcgagcgaa

SEQ ID NO: 7410 - DNA, 40 bp, Artificial Sequence
  Synthetic Oligonucleotide
tgcgaaacgccattttctgggaagccgcatctcgggcgaa

SEQ ID NO: 7411 - DNA, 40 bp, Artificial Sequence
  Synthetic Oligonucleotide
tgcgaaacgccattttctgggaagccgcatctcgagcgat

SEQ ID NO: 7412 - DNA, 40 bp, Artificial Sequence
  Synthetic Oligonucleotide
tgccggaagtccctcctcgtcttgatgcactatcatctca

SEQ ID NO: 7413 - DNA, 40 bp, Artificial Sequence
  Synthetic Oligonucleotide
tgccgcctccgatcctccattgggtggccataccaatgta

SEQ ID NO: 7414 - DNA, 40 bp, Artificial Sequence
  Synthetic Oligonucleotide
tgccgcaacgcctgattcactcctacagtgtgtctataga

SEQ ID NO: 7415 - DNA, 40 bp, Artificial Sequence
  Synthetic Oligonucleotide
tgccgaaacgctattttctggaagccgcatctcgagcgaa

SEQ ID NO: 7416 - DNA, 40 bp, Artificial Sequence
  Synthetic Oligonucleotide
tgcagaggccctcgtgttggactaccaacttgtagaacgg

SEQ ID NO: 7417 - DNA, 40 bp, Artificial Sequence
  Synthetic Oligonucleotide
tgcaaacagctattttctgggaagccgcatctcgagcgaa

SEQ ID NO: 7418 - DNA, 40 bp, Artificial Sequence
  Synthetic Oligonucleotide
tgcaaaacgctattttctgggaagccgcatctcgagcgaa

SEQ ID NO: 7419 - DNA, 40 bp, Artificial Sequence
  Synthetic Oligonucleotide
tgatgggcctttaagcacttctcggtaacttgggcagtac

SEQ ID NO: 7420 - DNA, 40 bp, Artificial Sequence
  Synthetic Oligonucleotide
tgatctggtacctatcatgcgctatcatgacggctaggac

SEQ ID NO: 7421 - DNA, 40 bp, Artificial Sequence
  Synthetic Oligonucleotide
tgatcgccagccacatcaactatgatgacgcttgactgga

SEQ ID NO: 7422 - DNA, 40 bp, Artificial Sequence
  Synthetic Oligonucleotide
tgatcctcttccgtctttcgttcttccgtaggtgcgcgca

SEQ ID NO: 7423 - DNA, 40 bp, Artificial Sequence
  Synthetic Oligonucleotide
tgataacgcctgtctttaatctcgcagagtgctcatgagc

SEQ ID NO: 7424 - DNA, 40 bp, Artificial Sequence
  Synthetic Oligonucleotide
tgagtgtatacccctccgcattatcgccgcatctcgtttg

SEQ ID NO: 7425 - DNA, 40 bp, Artificial Sequence
  Synthetic Oligonucleotide
tgagccatggatcactgcctcgattcgtccacgtgttggc

SEQ ID NO: 7426 - DNA, 40 bp, Artificial Sequence
  Synthetic Oligonucleotide
tgactacatatactacgaattccacccctctacatcgccg

SEQ ID NO: 7427 - DNA, 40 bp, Artificial Sequence
  Synthetic Oligonucleotide
tgactacaccggtggccatcgtcacgcgcacgatcgatct

SEQ ID NO: 7428 - DNA, 40 bp, Artificial Sequence
  Synthetic Oligonucleotide
tgactacaccggtgccatcgtcacgcgcacgatcgatctc

SEQ ID NO: 7429 - DNA, 40 bp, Artificial Sequence
  Synthetic Oligonucleotide
tgactaacattcatcgagcgaacgcctaagtgctagtact

SEQ ID NO: 7430 - DNA, 40 bp, Artificial Sequence
  Synthetic Oligonucleotide
tgacgtccgcggtttcactagactactactgatcacgtcg

SEQ ID NO: 7431 - DNA, 40 bp, Artificial Sequence
  Synthetic Oligonucleotide
tgacgggctttaagcacttctcggtaacttgggcagttac

SEQ ID NO: 7432 - DNA, 40 bp, Artificial Sequence
  Synthetic Oligonucleotide
tgacgaacgtctatttctgggaagccgcatctcgagcgaa

SEQ ID NO: 7433 - DNA, 40 bp, Artificial Sequence
  Synthetic Oligonucleotide
tgacgaacgctatttctgggaagccgcgtctcgaagcgaa

SEQ ID NO: 7434 - DNA, 40 bp, Artificial Sequence
  Synthetic Oligonucleotide
tgaatgtccgcggttcactagactactactgaccacgtcg

SEQ ID NO: 7435 - DNA, 40 bp, Artificial Sequence
  Synthetic Oligonucleotide
tgaatataacccggtagctaccgccttatgtttccgtgta

SEQ ID NO: 7436 - DNA, 40 bp, Artificial Sequence
  Synthetic Oligonucleotide
tgaagttcgcggtttcactagactactactgatcacgtcg

SEQ ID NO: 7437 - DNA, 40 bp, Artificial Sequence
  Synthetic Oligonucleotide
tgaagtccgcgtactcactagactactactgatcacgtcg

SEQ ID NO: 7438 - DNA, 40 bp, Artificial Sequence
  Synthetic Oligonucleotide
tgaagtccgcggtttcactagcctactactgatcacgccg

SEQ ID NO: 7439 - DNA, 40 bp, Artificial Sequence
  Synthetic Oligonucleotide
tgaagtccgcggtttcactagactgctactgatcacgtcg

SEQ ID NO: 7440 - DNA, 40 bp, Artificial Sequence
  Synthetic Oligonucleotide
tgaagtccgcggtttcactagactactactgatcacgtta

SEQ ID NO: 7441 - DNA, 40 bp, Artificial Sequence
  Synthetic Oligonucleotide
tgaagtccgcggttcactagatctactactgatcacatcg

SEQ ID NO: 7442 - DNA, 40 bp, Artificial Sequence
  Synthetic Oligonucleotide
tgaagtccgcggttcactacgactactactgatcacgtcg

SEQ ID NO: 7443 - DNA, 40 bp, Artificial Sequence
  Synthetic Oligonucleotide
tgaagtccgcggtgtcactagactactactgatcacgtcg

SEQ ID NO: 7444 - DNA, 40 bp, Artificial Sequence
  Synthetic Oligonucleotide
tgaagtccgcggcttcactaggctactactgatcacgtcg

SEQ ID NO: 7445 - DNA, 40 bp, Artificial Sequence
  Synthetic Oligonucleotide
tgaagtccgcagtttcactagactactactgatcacgtcg

SEQ ID NO: 7446 - DNA, 40 bp, Artificial Sequence
  Synthetic Oligonucleotide
tcttgctagtcggagtcgtcttcgagccccatgcgcgtat

SEQ ID NO: 7447 - DNA, 40 bp, Artificial Sequence
  Synthetic Oligonucleotide
tctgatctgcaactgttcgagccacttgctcgctctaatc

SEQ ID NO: 7448 - DNA, 40 bp, Artificial Sequence
  Synthetic Oligonucleotide
tctctaatccgcagttcgtcgattctgcactatcgacgat

SEQ ID NO: 7449 - DNA, 40 bp, Artificial Sequence
  Synthetic Oligonucleotide
tctcgtatcttccggtaattaccacgtacgtacatgtctg

SEQ ID NO: 7450 - DNA, 40 bp, Artificial Sequence
  Synthetic Oligonucleotide
tctcccaagtttagtcgtctttcgaggactaccttcgttc

SEQ ID NO: 7451 - DNA, 40 bp, Artificial Sequence
  Synthetic Oligonucleotide
tctcccaagcttagtcgtctttcgaggactacctcgtttc

SEQ ID NO: 7452 - DNA, 40 bp, Artificial Sequence
  Synthetic Oligonucleotide
tctaacgtcccaattcgtcgtccgtacgctattacggttt

SEQ ID NO: 7453 - DNA, 40 bp, Artificial Sequence
  Synthetic Oligonucleotide
tcgtgtccatgagcttctggcactatccagttgacgctca

SEQ ID NO: 7454 - DNA, 40 bp, Artificial Sequence
  Synthetic Oligonucleotide
tcgtggcctttaagcgacttctcggtaccttggcagttac

SEQ ID NO: 7455 - DNA, 40 bp, Artificial Sequence
  Synthetic Oligonucleotide
tcgtcgtgtcgtggactaccatcagaagaatcgactgtcg

SEQ ID NO: 7456 - DNA, 40 bp, Artificial Sequence
  Synthetic Oligonucleotide
tcgtcgatccgtactttcaggcgctatcctgatcacccga

SEQ ID NO: 7457 - DNA, 40 bp, Artificial Sequence
  Synthetic Oligonucleotide
tcgtccttatcggctagacggtcttctgcactatcacgat

SEQ ID NO: 7458 - DNA, 40 bp, Artificial Sequence
  Synthetic Oligonucleotide
tcgtcacagctcacttcgtctttgatcgacacgctcataa

SEQ ID NO: 7459 - DNA, 40 bp, Artificial Sequence
  Synthetic Oligonucleotide
tcgcctcgaacactgacgtcgtggaaccttcgattgccag

SEQ ID NO: 7460 - DNA, 40 bp, Artificial Sequence
  Synthetic Oligonucleotide
tcgcctagtctatttcacgcgccatcgtgatcaaacaact

SEQ ID NO: 7461 - DNA, 40 bp, Artificial Sequence
  Synthetic Oligonucleotide
tcgccatcctgtcttgcgagactactcgctcaacggcaga

SEQ ID NO: 7462 - DNA, 40 bp, Artificial Sequence
  Synthetic Oligonucleotide
tcgcactgcacacttcgtctttgatcgaccacgctcataa

SEQ ID NO: 7463 - DNA, 40 bp, Artificial Sequence
  Synthetic Oligonucleotide
tcgcactagctcactcgtctttgatcgaccacgctcataa

SEQ ID NO: 7464 - DNA, 40 bp, Artificial Sequence
  Synthetic Oligonucleotide
tcgcacggctcacttcgtctttgatcgactacgctcataa

SEQ ID NO: 7465 - DNA, 40 bp, Artificial Sequence
  Synthetic Oligonucleotide
tcgcacggctcacttcgtctttgatcgaccacgttcataa

SEQ ID NO: 7466 - DNA, 40 bp, Artificial Sequence
  Synthetic Oligonucleotide
tcgcaccccgattagtcatcttcactggacacccgtgtta

SEQ ID NO: 7467 - DNA, 40 bp, Artificial Sequence
  Synthetic Oligonucleotide
tcgcaccccgatagtcgtcttcgctggaccacccgtgtta

SEQ ID NO: 7468 - DNA, 40 bp, Artificial Sequence
  Synthetic Oligonucleotide
tcgcaccccgatagtcatcttcgctggaccacccgcgtta

SEQ ID NO: 7469 - DNA, 40 bp, Artificial Sequence
  Synthetic Oligonucleotide
tcgcaccccgatagtcatcttcactggaccacccgtgttt

SEQ ID NO: 7470 - DNA, 40 bp, Artificial Sequence
  Synthetic Oligonucleotide
tcgcaccccgatagctcatcttcactggacacccgtgtta

SEQ ID NO: 7471 - DNA, 40 bp, Artificial Sequence
  Synthetic Oligonucleotide
tcgcacccccgatagtcatcttcgctggaccaccgcgtta

SEQ ID NO: 7472 - DNA, 40 bp, Artificial Sequence
  Synthetic Oligonucleotide
tcgcaccagctcacttgtctttgatcgaccacgctcataa

SEQ ID NO: 7473 - DNA, 40 bp, Artificial Sequence
  Synthetic Oligonucleotide
tcgcacatctcacttcgtctttggtcgaccacgctcataa

SEQ ID NO: 7474 - DNA, 40 bp, Artificial Sequence
  Synthetic Oligonucleotide
tcgcacagttcacttcgtctttgatcgaccacgctcataa

SEQ ID NO: 7475 - DNA, 40 bp, Artificial Sequence
  Synthetic Oligonucleotide
tcgcacagcttacttcgtctttgatcgaccacgcccataa

SEQ ID NO: 7476 - DNA, 40 bp, Artificial Sequence
  Synthetic Oligonucleotide
tcgcacagctcactttgtctttgatcgaccacgctcatga

SEQ ID NO: 7477 - DNA, 40 bp, Artificial Sequence
  Synthetic Oligonucleotide
tcgcacagctcacttcgtctttgttcgaccacgctcataa

SEQ ID NO: 7478 - DNA, 40 bp, Artificial Sequence
  Synthetic Oligonucleotide
tcgcacagctcacttcgtctttggtcgactacgctcataa

SEQ ID NO: 7479 - DNA, 40 bp, Artificial Sequence
  Synthetic Oligonucleotide
tcgcacagctcacttcgtctttggtcaaccacgctcataa

SEQ ID NO: 7480 - DNA, 40 bp, Artificial Sequence
  Synthetic Oligonucleotide
tcgcacagctcacttcgtctttgatctaccacgctcataa

SEQ ID NO: 7481 - DNA, 40 bp, Artificial Sequence
  Synthetic Oligonucleotide
tcgcacagctcacttcgtctttgatcgaccacgcttataa

SEQ ID NO: 7482 - DNA, 40 bp, Artificial Sequence
  Synthetic Oligonucleotide
tcgcacagctcacttcgtctttgatcgaccacgctcatat

SEQ ID NO: 7483 - DNA, 40 bp, Artificial Sequence
  Synthetic Oligonucleotide
tcgcacagctcacttcgtctttgatcgaccacgcccatga

SEQ ID NO: 7484 - DNA, 40 bp, Artificial Sequence
  Synthetic Oligonucleotide
tcgcacagctcacttcgtctttgatcgaccacccgtgtta

SEQ ID NO: 7485 - DNA, 40 bp, Artificial Sequence
  Synthetic Oligonucleotide
tcgcacagctcacttcgtcttgatcgaccacgcatcataa

SEQ ID NO: 7486 - DNA, 40 bp, Artificial Sequence
  Synthetic Oligonucleotide
tcgcacagctcacttcgcctttgatcgaccacgctcatga

SEQ ID NO: 7487 - DNA, 40 bp, Artificial Sequence
  Synthetic Oligonucleotide
tcgcacagctcacttcgatctttgatcgaccacgctcata

SEQ ID NO: 7488 - DNA, 40 bp, Artificial Sequence
  Synthetic Oligonucleotide
tcgcacagctcacttcgactttgatcgaccacgctcataa

SEQ ID NO: 7489 - DNA, 40 bp, Artificial Sequence
  Synthetic Oligonucleotide
tcgcacagctcacctctcttttgatcgaccacgctcataa

SEQ ID NO: 7490 - DNA, 40 bp, Artificial Sequence
  Synthetic Oligonucleotide
tcgcacagctcacctcgtctttgatcgaccacgctcatga

SEQ ID NO: 7491 - DNA, 40 bp, Artificial Sequence
  Synthetic Oligonucleotide
tcgcacagctcacctcgtcttcgatcgaccacgctcataa

SEQ ID NO: 7492 - DNA, 40 bp, Artificial Sequence
  Synthetic Oligonucleotide
tcgcacagcctacttcgtctttgatcgaccacgctcataa

SEQ ID NO: 7493 - DNA, 40 bp, Artificial Sequence
  Synthetic Oligonucleotide
tcgcacagcccatttcgtctttgatcgaccacgctcataa

SEQ ID NO: 7494 - DNA, 40 bp, Artificial Sequence
  Synthetic Oligonucleotide
tcgcacagcccacttcgtctttgatcgactacgctcataa

SEQ ID NO: 7495 - DNA, 40 bp, Artificial Sequence
  Synthetic Oligonucleotide
tcgcacagatcacttcgtctttgatcgaccacgctcataa

SEQ ID NO: 7496 - DNA, 40 bp, Artificial Sequence
  Synthetic Oligonucleotide
tcgatgggcttttaagcacttctcggtaacttggcagtta

SEQ ID NO: 7497 - DNA, 40 bp, Artificial Sequence
  Synthetic Oligonucleotide
tcgatgggcctttaagcacttctcgtaacttggcagttac

SEQ ID NO: 7498 - DNA, 40 bp, Artificial Sequence
  Synthetic Oligonucleotide
tcgatcgccagcacatcaactatgatgacgcttgactgga

SEQ ID NO: 7499 - DNA, 40 bp, Artificial Sequence
  Synthetic Oligonucleotide
tcgaccgggccccgactcaagctacgtctcgccactgtct

SEQ ID NO: 7500 - DNA, 40 bp, Artificial Sequence
  Synthetic Oligonucleotide
tcgacacagctcacttcgtcttgatcgaccacgctcataa

SEQ ID NO: 7501 - DNA, 40 bp, Artificial Sequence
  Synthetic Oligonucleotide
tcgaaatcgtctgcttgaccgcctcaagtcttccgtatat

SEQ ID NO: 7502 - DNA, 40 bp, Artificial Sequence
  Synthetic Oligonucleotide
tcctctgtgtactctcacgctaacccggggtgtgaccgtc

SEQ ID NO: 7503 - DNA, 40 bp, Artificial Sequence
  Synthetic Oligonucleotide
tcctctgtgactctcacgctaacccgggggcgtgaccgtc

SEQ ID NO: 7504 - DNA, 40 bp, Artificial Sequence
  Synthetic Oligonucleotide
tcctctgcgactctcacgctaacccgggggtgtgaccgtc

SEQ ID NO: 7505 - DNA, 40 bp, Artificial Sequence
  Synthetic Oligonucleotide
tccgtctcgcacacccgtgtgcgcacacttggagactagt

SEQ ID NO: 7506 - DNA, 40 bp, Artificial Sequence
  Synthetic Oligonucleotide
tccgccacccgatagtcatcttcactggacacccgtgtta

SEQ ID NO: 7507 - DNA, 40 bp, Artificial Sequence
  Synthetic Oligonucleotide
tccgcaccccgatagtcatcttcactggacacccgtgtta

SEQ ID NO: 7508 - DNA, 40 bp, Artificial Sequence
  Synthetic Oligonucleotide
tccccttcatcggaatcgataactcaccccgttgtcttga

SEQ ID NO: 7509 - DNA, 40 bp, Artificial Sequence
  Synthetic Oligonucleotide
tcccccaagtttagtcgtctttcgaggactacctcgtttc

SEQ ID NO: 7510 - DNA, 40 bp, Artificial Sequence
  Synthetic Oligonucleotide
tccatggtacgcctcgaattccgcccatacatgcatgtaa

SEQ ID NO: 7511 - DNA, 40 bp, Artificial Sequence
  Synthetic Oligonucleotide
tccaggtccccaattcgtcgtccgtacgctattacggttt

SEQ ID NO: 7512 - DNA, 40 bp, Artificial Sequence
  Synthetic Oligonucleotide
tccaagtcccaattcgtccgtccgtacgctattacggttt

SEQ ID NO: 7513 - DNA, 40 bp, Artificial Sequence
  Synthetic Oligonucleotide
tcattcgccagtcacatcaactatgatacgcttgactgga

SEQ ID NO: 7514 - DNA, 40 bp, Artificial Sequence
  Synthetic Oligonucleotide
tcatgggctttgagcacttctcggtaacttgggcagttac

SEQ ID NO: 7515 - skipped

SEQ ID NO: 7516 - DNA, 40 bp, Artificial Sequence
  Synthetic Oligonucleotide
tcatgggctttagcacttctcggtaacttgggacagttac

SEQ ID NO: 7517 - DNA, 40 bp, Artificial Sequence
  Synthetic Oligonucleotide
tcatgggctttaagcacttctcgttaacttgggcagttac

SEQ ID NO: 7518 - DNA, 40 bp, Artificial Sequence
  Synthetic Oligonucleotide
tcatgggctttaagcacttctcggtacttgggcagcttac

SEQ ID NO: 7519 - DNA, 40 bp, Artificial Sequence
  Synthetic Oligonucleotide
tcatgggctttaagcacttctcggtaacttgggcagttat

SEQ ID NO: 7520 - DNA, 40 bp, Artificial Sequence
  Synthetic Oligonucleotide
tcatgggctttaagacacttcggtaacttgggccagttac

SEQ ID NO: 7521 - DNA, 40 bp, Artificial Sequence
  Synthetic Oligonucleotide
tcagggcctttaagctacttctcgtacttgggcagcttac

SEQ ID NO: 7522 - DNA, 40 bp, Artificial Sequence
  Synthetic Oligonucleotide
tcaccgcctcatcatcggacacgacgtgtactcagtgctg

SEQ ID NO: 7523 - DNA, 40 bp, Artificial Sequence
  Synthetic Oligonucleotide
tattgggctttaagcacttctcgtaacttggacaagttac

SEQ ID NO: 7524 - DNA, 40 bp, Artificial Sequence
  Synthetic Oligonucleotide
tattcgccggtcacatcaactatgatgacgcttggctgga

SEQ ID NO: 7525 - DNA, 40 bp, Artificial Sequence
  Synthetic Oligonucleotide
tattcgccggtcacatcaactatgatgacgcctgactgga

SEQ ID NO: 7526 - DNA, 40 bp, Artificial Sequence
  Synthetic Oligonucleotide
tattcgcccgtcacatcagctatgatgacgcttgactgga

SEQ ID NO: 7527 - DNA, 40 bp, Artificial Sequence
  Synthetic Oligonucleotide
tattcgccagtcgacacaacttatgatgacgcttgactga

SEQ ID NO: 7528 - DNA, 40 bp, Artificial Sequence
  Synthetic Oligonucleotide
tattcgccagtcccatcaactatgatgacgcttgactgga

SEQ ID NO: 7529 - DNA, 40 bp, Artificial Sequence
  Synthetic Oligonucleotide
tattcgccagtccacatcaactatgatgacgcttgactgg

SEQ ID NO: 7530 - DNA, 40 bp, Artificial Sequence
  Synthetic Oligonucleotide
tattcgccagtcacatcaactatgctgacgcttggctgga

SEQ ID NO: 7531 - DNA, 40 bp, Artificial Sequence
  Synthetic Oligonucleotide
tattcgccagtcacatcaactatgatggcgcttgtctgga

SEQ ID NO: 7532 - DNA, 40 bp, Artificial Sequence
  Synthetic Oligonucleotide
tattcgccagtcacatcaactatgatgactctgatctgga

SEQ ID NO: 7533 - DNA, 40 bp, Artificial Sequence
  Synthetic Oligonucleotide
tattcgccagtcacatcaactatgatgacgtctgactgga

SEQ ID NO: 7534 - DNA, 40 bp, Artificial Sequence
  Synthetic Oligonucleotide
tattcgccagtcacatcaactatgatgacgcttggcgtga

SEQ ID NO: 7535 - DNA, 40 bp, Artificial Sequence
  Synthetic Oligonucleotide
tattcgccagtcacatcaactatgatgacgcttggccgga

SEQ ID NO: 7536 - DNA, 40 bp, Artificial Sequence
  Synthetic Oligonucleotide
tattcgccagtcacatcaactatgatgacgcttgactgta

SEQ ID NO: 7537 - DNA, 40 bp, Artificial Sequence
  Synthetic Oligonucleotide
tattcgccagtcacatcaactatgatgacgcttgacctga

SEQ ID NO: 7538 - DNA, 40 bp, Artificial Sequence
  Synthetic Oligonucleotide
tattcgccagtcacatcaactatgatgacgctcggctgga

SEQ ID NO: 7539 - DNA, 40 bp, Artificial Sequence
  Synthetic Oligonucleotide
tattcgccagtcacatcaactatgatgacgctcgactggg

SEQ ID NO: 7540 - DNA, 40 bp, Artificial Sequence
  Synthetic Oligonucleotide
tattcgccagtcacatcaactatgactgacgcttgctgga

SEQ ID NO: 7541 - DNA, 40 bp, Artificial Sequence
  Synthetic Oligonucleotide
tattcgccagccatatcaactatgatgacgcttgactgga

SEQ ID NO: 7542 - DNA, 40 bp, Artificial Sequence
  Synthetic Oligonucleotide
tattcgccagccacatcaactatgatgatgcttgactgga

SEQ ID NO: 7543 - DNA, 40 bp, Artificial Sequence
  Synthetic Oligonucleotide
tattcgccagccacatcaactatgatgacgtttgactgga

SEQ ID NO: 7544 - DNA, 40 bp, Artificial Sequence
  Synthetic Oligonucleotide
tattcgccagccacatcaactatgatgacgcttgactggc

SEQ ID NO: 7545 - DNA, 40 bp, Artificial Sequence
  Synthetic Oligonucleotide
tattcgccagccacatcaactatgatgacgcttgacgtga

SEQ ID NO: 7546 - DNA, 40 bp, Artificial Sequence
  Synthetic Oligonucleotide
tattcgccagccacatcaactatgatgacgcttgaatgga

SEQ ID NO: 7547 - DNA, 40 bp, Artificial Sequence
  Synthetic Oligonucleotide
tattcgccagccacatcaactatgactacgcttgactgga

SEQ ID NO: 7548 - DNA, 40 bp, Artificial Sequence
  Synthetic Oligonucleotide
tattcgccagccacatcaactatcatgacgcttgactgga

SEQ ID NO: 7549 - DNA, 40 bp, Artificial Sequence
  Synthetic Oligonucleotide
tattcgccagccacatcaactataatgacgcttaactgga

SEQ ID NO: 7550 - DNA, 40 bp, Artificial Sequence
  Synthetic Oligonucleotide
tattcgccagccacatcaactaggatgacgcttgactgga

SEQ ID NO: 7551 - DNA, 40 bp, Artificial Sequence
  Synthetic Oligonucleotide
tattcgccagccacaccaactatgatgacgcttgactggg

SEQ ID NO: 7552 - DNA, 40 bp, Artificial Sequence
  Synthetic Oligonucleotide
tattcgccagccacaacaactatgatgacgcttgactgga

SEQ ID NO: 7553 - DNA, 40 bp, Artificial Sequence
  Synthetic Oligonucleotide
tattcgcagtccacatcaactatgatgacgcttgactgga

SEQ ID NO: 7554 - DNA, 40 bp, Artificial Sequence
  Synthetic Oligonucleotide
tattcgcagcccacatcaactatgatgacgcttgactgga

SEQ ID NO: 7555 - DNA, 40 bp, Artificial Sequence
  Synthetic Oligonucleotide
tattccgcagtcacatcaactatgatgacgcttgactgga

SEQ ID NO: 7556 - DNA, 40 bp, Artificial Sequence
  Synthetic Oligonucleotide
tatgggggcttttaagcacttctggtagttgggcagttac

SEQ ID NO: 7557 - DNA, 40 bp, Artificial Sequence
  Synthetic Oligonucleotide
tatgggggcttttaagcacttctggtaacgtgggcagtta

SEQ ID NO: 7558 - DNA, 40 bp, Artificial Sequence
  Synthetic Oligonucleotide
tatgggggcttttaagcacttcggtaacctgggcagttac

SEQ ID NO: 7559 - DNA, 40 bp, Artificial Sequence
  Synthetic Oligonucleotide
tatggggcttttgagcactctcggtaacttgggcagttac

SEQ ID NO: 7560 - DNA, 40 bp, Artificial Sequence
  Synthetic Oligonucleotide
tatggggcttttagcgacttctcggtaactgggcagttac

SEQ ID NO: 7561 - DNA, 40 bp, Artificial Sequence
  Synthetic Oligonucleotide
tatggggcttttagcacttctcggtaacttggcgagttac

SEQ ID NO: 7562 - DNA, 40 bp, Artificial Sequence
  Synthetic Oligonucleotide
tatggggcttttaagcgctctctgatacttgggcagttac

SEQ ID NO: 7563 - DNA, 40 bp, Artificial Sequence
  Synthetic Oligonucleotide
tatggggcttttaagcactttcgtgaacttgggcagttac

SEQ ID NO: 7564 - DNA, 40 bp, Artificial Sequence
  Synthetic Oligonucleotide
tatggggcttttaagcacttcttggtaacttgggcagtta

SEQ ID NO: 7565 - DNA, 40 bp, Artificial Sequence
  Synthetic Oligonucleotide
tatggggcttttaagcacttctggtaacttgggcggttac

SEQ ID NO: 7566 - DNA, 40 bp, Artificial Sequence
  Synthetic Oligonucleotide
tatggggcttttaagcacttctcggtaacttgggtagtta

SEQ ID NO: 7567 - DNA, 40 bp, Artificial Sequence
  Synthetic Oligonucleotide
tatggggcttttaagcacttctcggaacttgggcggttac

SEQ ID NO: 7568 - DNA, 40 bp, Artificial Sequence
  Synthetic Oligonucleotide
tatggggcttttaagcacttctcgcaacttgggcagttac

SEQ ID NO: 7569 - DNA, 40 bp, Artificial Sequence
  Synthetic Oligonucleotide
tatggggcttttaagcacttcgtcgtaacttggcagttac

SEQ ID NO: 7570 - DNA, 40 bp, Artificial Sequence
  Synthetic Oligonucleotide
tatggggcttttaagcacttcctgatacttgggcagttac

SEQ ID NO: 7571 - DNA, 40 bp, Artificial Sequence
  Synthetic Oligonucleotide
tatggggcttttaagcacttccggtaacttgggcggttac

SEQ ID NO: 7572 - DNA, 40 bp, Artificial Sequence
  Synthetic Oligonucleotide
tatggggcttttaagcactcgtcgatacttgggcagttac

SEQ ID NO: 7573 - DNA, 40 bp, Artificial Sequence
  Synthetic Oligonucleotide
tatggggcttttaagcactaccggtaacttgggcagttac

SEQ ID NO: 7574 - DNA, 40 bp, Artificial Sequence
  Synthetic Oligonucleotide
tatggggcttttaagcacgtctcgtaacgttggcagttac

SEQ ID NO: 7575 - DNA, 40 bp, Artificial Sequence
  Synthetic Oligonucleotide
tatggggctttagagcactttctcggtaactggcagttac

SEQ ID NO: 7576 - DNA, 40 bp, Artificial Sequence
  Synthetic Oligonucleotide
tatggggctttagacacttctcggtaacttggcgagttac

SEQ ID NO: 7577 - DNA, 40 bp, Artificial Sequence
  Synthetic Oligonucleotide
tatggggctttacagcacttctcgtaacttgggcagttac

SEQ ID NO: 7578 - DNA, 40 bp, Artificial Sequence
  Synthetic Oligonucleotide
tatggggctttacagcacttctcggtaacttgggcattac

SEQ ID NO: 7579 - DNA, 40 bp, Artificial Sequence
  Synthetic Oligonucleotide
tatggggctttaagctcttctcggtaacttggcagttaac

SEQ ID NO: 7580 - DNA, 40 bp, Artificial Sequence
  Synthetic Oligonucleotide
tatggggctttaagcgactctcggtaacttgggcagttac

SEQ ID NO: 7581 - DNA, 40 bp, Artificial Sequence
  Synthetic Oligonucleotide
tatggggctttaagcacttctgggtaacttgggcagttac

SEQ ID NO: 7582 - DNA, 40 bp, Artificial Sequence
  Synthetic Oligonucleotide
tatggggctttaagcacttctcggtatcttgggcagttac

SEQ ID NO: 7583 - DNA, 40 bp, Artificial Sequence
  Synthetic Oligonucleotide
tatggggctttaagcacttctcggtaatttgggcagttac

SEQ ID NO: 7584 - DNA, 40 bp, Artificial Sequence
  Synthetic Oligonucleotide
tatggggctttaagcacttctcggtaacttgggcagttat

SEQ ID NO: 7585 - DNA, 40 bp, Artificial Sequence
  Synthetic Oligonucleotide
tatggggctttaagcacttctcggtaacttgggcagtaac

SEQ ID NO: 7586 - DNA, 40 bp, Artificial Sequence
  Synthetic Oligonucleotide
tatggggctttaagcacttctcggtaacttgatcagttac

SEQ ID NO: 7587 - DNA, 40 bp, Artificial Sequence
  Synthetic Oligonucleotide
tatggggctttaagcacttctccgtaacttgggcagttac

SEQ ID NO: 7588 - DNA, 40 bp, Artificial Sequence
  Synthetic Oligonucleotide
tatggggctttaagcaccttctcggtaacttgggcagtac

SEQ ID NO: 7589 - DNA, 40 bp, Artificial Sequence
  Synthetic Oligonucleotide
tatggggcttctagacttctcggtaacttgggcagttacc

SEQ ID NO: 7590 - DNA, 40 bp, Artificial Sequence
  Synthetic Oligonucleotide
tatggggcttctaagcacttctcggtaacttggcagttac

SEQ ID NO: 7591 - DNA, 40 bp, Artificial Sequence
  Synthetic Oligonucleotide
tatggggcttactagcacttctggtaacttgggcagttac

SEQ ID NO: 7592 - DNA, 40 bp, Artificial Sequence
  Synthetic Oligonucleotide
tatggggcttactagcacttctcggtaacttgggcagtta

SEQ ID NO: 7593 - DNA, 40 bp, Artificial Sequence
  Synthetic Oligonucleotide
tatggggcctttaagcacttctcggtaacttgggcagtta

SEQ ID NO: 7594 - DNA, 40 bp, Artificial Sequence
  Synthetic Oligonucleotide
tatgggcttttaagcgcttctcggtaacttgggcagttac

SEQ ID NO: 7595 - DNA, 40 bp, Artificial Sequence
  Synthetic Oligonucleotide
tatgggcttttaagcacttctcggtaactttggcagttac

SEQ ID NO: 7596 - DNA, 40 bp, Artificial Sequence
  Synthetic Oligonucleotide
tatgggcttttaagcacttctcggtaacttgggcagctac

SEQ ID NO: 7597 - DNA, 40 bp, Artificial Sequence
  Synthetic Oligonucleotide
tatgggcttttaagcacttctcggtaacttggcagttacc

SEQ ID NO: 7598 - DNA, 40 bp, Artificial Sequence
  Synthetic Oligonucleotide
tatgggcttttaagcacttctcggtaacttgagctgttac

SEQ ID NO: 7599 - DNA, 40 bp, Artificial Sequence
  Synthetic Oligonucleotide
tatgggcttttaagcacttctcggtaacttaagcagttac

SEQ ID NO: 7600 - DNA, 40 bp, Artificial Sequence
  Synthetic Oligonucleotide
tatgggcttttaagcacttccgtgatacttgggcagttac

SEQ ID NO: 7601 - DNA, 40 bp, Artificial Sequence
  Synthetic Oligonucleotide
tatgggcttttaagcactctcggtaaccttggcgagttac

SEQ ID NO: 7602 - DNA, 40 bp, Artificial Sequence
  Synthetic Oligonucleotide
tatgggcttttaagcaccttctcggtaacttggcagttac

SEQ ID NO: 7603 - DNA, 40 bp, Artificial Sequence
  Synthetic Oligonucleotide
tatgggctttagactcaagcttcctgtagttgggcactac

SEQ ID NO: 7604 - DNA, 40 bp, Artificial Sequence
  Synthetic Oligonucleotide
tatgggctttactacgcacttctcgtacttgggcagttac

SEQ ID NO: 7605 - DNA, 40 bp, Artificial Sequence
  Synthetic Oligonucleotide
tatgggctttaagtcgacttctcggtaacttggcagttac

SEQ ID NO: 7606 - DNA, 40 bp, Artificial Sequence
  Synthetic Oligonucleotide
tatgggctttaagctattcctcggtacttgggcgagttac

SEQ ID NO: 7607 - DNA, 40 bp, Artificial Sequence
  Synthetic Oligonucleotide
tatgggctttaagctacttctcggcgacttgggcagttac

SEQ ID NO: 7608 - DNA, 40 bp, Artificial Sequence
  Synthetic Oligonucleotide
tatgggctttaagctacttctccgtaacttgggcagttac

SEQ ID NO: 7609 - DNA, 40 bp, Artificial Sequence
  Synthetic Oligonucleotide
tatgggctttaagctacttcctcggtacttggcgagttac

SEQ ID NO: 7610 - DNA, 40 bp, Artificial Sequence
  Synthetic Oligonucleotide
tatgggctttaagcgtattcgtcgtacttgggcgagttac

SEQ ID NO: 7611 - DNA, 40 bp, Artificial Sequence
  Synthetic Oligonucleotide
tatgggctttaagcgacttctcggtaacttgggcagttac

SEQ ID NO: 7612 - DNA, 40 bp, Artificial Sequence
  Synthetic Oligonucleotide
tatgggctttaagccacttctccggtaacttggcagttac

SEQ ID NO: 7613 - DNA, 40 bp, Artificial Sequence
  Synthetic Oligonucleotide
tatgggctttaagcagttctcggttaacttgggcagttac

SEQ ID NO: 7614 - DNA, 40 bp, Artificial Sequence
  Synthetic Oligonucleotide
tatgggctttaagcacttcttggtaacttgggcgagttac

SEQ ID NO: 7615 - DNA, 40 bp, Artificial Sequence
  Synthetic Oligonucleotide
tatgggctttaagcacttctcggtaactttgggcagttgc

SEQ ID NO: 7616 - DNA, 40 bp, Artificial Sequence
  Synthetic Oligonucleotide
tatgggctttaagcacttctcggtaacttgtagcagttac

SEQ ID NO: 7617 - DNA, 40 bp, Artificial Sequence
  Synthetic Oligonucleotide
tatgggctttaagcacttctcggtaacttgggcagttatc

SEQ ID NO: 7618 - DNA, 40 bp, Artificial Sequence
  Synthetic Oligonucleotide
tatgggctttaagcacttctcggtaacttgggacagctta

SEQ ID NO: 7619 - DNA, 40 bp, Artificial Sequence
  Synthetic Oligonucleotide
tatgggctttaagcacttctcggtaaccttggacagttac

SEQ ID NO: 7620 - DNA, 40 bp, Artificial Sequence
  Synthetic Oligonucleotide
tatgggctttaagcacttctcggcaacttgggcagcttac

SEQ ID NO: 7621 - DNA, 40 bp, Artificial Sequence
  Synthetic Oligonucleotide
tatgggctttaagcacttctccggtaactcgggcagttac

SEQ ID NO: 7622 - DNA, 40 bp, Artificial Sequence
  Synthetic Oligonucleotide
tatgggctttaagcacttcatcggtaactttggcagttac

SEQ ID NO: 7623 - DNA, 40 bp, Artificial Sequence
  Synthetic Oligonucleotide
tatgggctttaagcaacttctcggtaacttgggcagttac

SEQ ID NO: 7624 - DNA, 40 bp, Artificial Sequence
  Synthetic Oligonucleotide
tatgggctttaacgcacttctcggtaacttgggctgttac

SEQ ID NO: 7625 - DNA, 40 bp, Artificial Sequence
  Synthetic Oligonucleotide
tatgggctttaacgcactctcggtaacttgggccagttac

SEQ ID NO: 7626 - DNA, 40 bp, Artificial Sequence
  Synthetic Oligonucleotide
tatgggctttaaagcactttctgggatacctggcagtaac

SEQ ID NO: 7627 - DNA, 40 bp, Artificial Sequence
  Synthetic Oligonucleotide
tatgggctttaaagcacttctcggtaacttgggcagttac

SEQ ID NO: 7628 - DNA, 40 bp, Artificial Sequence
  Synthetic Oligonucleotide
tatgggcttataagcacttctcggtaacttgggcagttac

SEQ ID NO: 7629 - DNA, 40 bp, Artificial Sequence
  Synthetic Oligonucleotide
tatgggctcttagcacttctcggtaacttgggcagttgac

SEQ ID NO: 7630 - DNA, 40 bp, Artificial Sequence
  Synthetic Oligonucleotide
tatgggcgttaaagcactttctgggataccgtggcagtac

SEQ ID NO: 7631 - DNA, 40 bp, Artificial Sequence
  Synthetic Oligonucleotide
tatgggcgctttaagcacttctcggtacttgggcagttac

SEQ ID NO: 7632 - DNA, 40 bp, Artificial Sequence
  Synthetic Oligonucleotide
tatgggccttttagcacttctcggtaacttgggcagttac

SEQ ID NO: 7633 - DNA, 40 bp, Artificial Sequence
  Synthetic Oligonucleotide
tatgggcctttagagctacttctcggtacttggcagttac

SEQ ID NO: 7634 - DNA, 40 bp, Artificial Sequence
  Synthetic Oligonucleotide
tatgggcctttaagctacttctcgtaacttggcgagttac

SEQ ID NO: 7635 - DNA, 40 bp, Artificial Sequence
  Synthetic Oligonucleotide
tatgggcctttaagctacttctcggtacttggcgagttac

SEQ ID NO: 7636 - DNA, 40 bp, Artificial Sequence
  Synthetic Oligonucleotide
tatgggcctttaagcacttctcagtaacttgggcagttac

SEQ ID NO: 7637 - DNA, 40 bp, Artificial Sequence
  Synthetic Oligonucleotide
tatgggcactttaagcacttctcgtaacttgggcagctac

SEQ ID NO: 7638 - DNA, 40 bp, Artificial Sequence
  Synthetic Oligonucleotide
tatggctttaagtcgtgcttcctcgtacttggtgagttac

SEQ ID NO: 7639 - DNA, 40 bp, Artificial Sequence
  Synthetic Oligonucleotide
tatggcgttttaagcacttctcggttaacttggcagttac

SEQ ID NO: 7640 - DNA, 40 bp, Artificial Sequence
  Synthetic Oligonucleotide
tatggcgcttttaagcacttctcgtaacttgggcagttac

SEQ ID NO: 7641 - DNA, 40 bp, Artificial Sequence
  Synthetic Oligonucleotide
tatggcgctttaagcacttctcgttaacttgggcagttac

SEQ ID NO: 7642 - DNA, 40 bp, Artificial Sequence
  Synthetic Oligonucleotide
tatggagttttaagcacttctcggtaacttgggcagttac

SEQ ID NO: 7643 - DNA, 40 bp, Artificial Sequence
  Synthetic Oligonucleotide
tatgcgccagccacatcaactatgatgacgcttgactgga

SEQ ID NO: 7644 - DNA, 40 bp, Artificial Sequence
  Synthetic Oligonucleotide
tatcttccatccggccatggcatattagaatcgtaaggta

SEQ ID NO: 7645 - DNA, 40 bp, Artificial Sequence
  Synthetic Oligonucleotide
tatcgcccagcacatcaactatgatgaccgcttgactgga

SEQ ID NO: 7646 - DNA, 40 bp, Artificial Sequence
  Synthetic Oligonucleotide
tatcgccagtcctacatcaactatgatgacgctgactgga

SEQ ID NO: 7647 - DNA, 40 bp, Artificial Sequence
  Synthetic Oligonucleotide
tatcgccagtccacatcaactatgatgacgcttgactgga

SEQ ID NO: 7648 - DNA, 40 bp, Artificial Sequence
  Synthetic Oligonucleotide
tatcgccagtcactcacttatgactgacgcttgactacga

SEQ ID NO: 7649 - DNA, 40 bp, Artificial Sequence
  Synthetic Oligonucleotide
tatcgccagtcacatcacttatgactgacgcttgctacga

SEQ ID NO: 7650 - DNA, 40 bp, Artificial Sequence
  Synthetic Oligonucleotide
tatcgccagcctacatcaactatgatgacgcttgactgga

SEQ ID NO: 7651 - DNA, 40 bp, Artificial Sequence
  Synthetic Oligonucleotide
tatcgccagccacatcaacttatgatgacgcttgactgga

SEQ ID NO: 7652 - DNA, 40 bp, Artificial Sequence
  Synthetic Oligonucleotide
tatcgccagccacatcaactatgatgacgcttgacctgga

SEQ ID NO: 7653 - DNA, 40 bp, Artificial Sequence
  Synthetic Oligonucleotide
tatcgcagtctacatcaactatgagtgacgcttgactgga

SEQ ID NO: 7654 - DNA, 40 bp, Artificial Sequence
  Synthetic Oligonucleotide
tatagggcttttaagcacttctcgtaacttgggcagttac

SEQ ID NO: 7655 - DNA, 40 bp, Artificial Sequence
  Synthetic Oligonucleotide
tataggctttaagcacttcatcggtaacttgggcagttac

SEQ ID NO: 7656 - DNA, 40 bp, Artificial Sequence
  Synthetic Oligonucleotide
tatacgccagccacatcaactatgatgacgcttgactgga

SEQ ID NO: 7657 - DNA, 40 bp, Artificial Sequence
  Synthetic Oligonucleotide
tataagctgtcttttaatctcggcagtagtgctcatgggc

SEQ ID NO: 7658 - DNA, 40 bp, Artificial Sequence
  Synthetic Oligonucleotide
tataagctgtcttttaatctcggcagagtgctcattgagc

SEQ ID NO: 7659 - DNA, 40 bp, Artificial Sequence
  Synthetic Oligonucleotide
tataagcctgttttttaatctcggcagagtgctcatgagc

SEQ ID NO: 7660 - DNA, 40 bp, Artificial Sequence
  Synthetic Oligonucleotide
tataagcctgtcttttgatctcggcagagtgctcataagc

SEQ ID NO: 7661 - DNA, 40 bp, Artificial Sequence
  Synthetic Oligonucleotide
tataagcctgtcttttaatctcggcggagtgctcgtgagc

SEQ ID NO: 7662 - DNA, 40 bp, Artificial Sequence
  Synthetic Oligonucleotide
tataagcctgtcttttaatctcggcagagtgctcatgcac

SEQ ID NO: 7663 - DNA, 40 bp, Artificial Sequence
  Synthetic Oligonucleotide
tataagcctgtcttttaatctcggcaaagtgctcatgggc

SEQ ID NO: 7664 - DNA, 40 bp, Artificial Sequence
  Synthetic Oligonucleotide
tataagcctgtcttttaacctcggcagagtgctcatgagc

SEQ ID NO: 7665 - DNA, 40 bp, Artificial Sequence
  Synthetic Oligonucleotide
tataagcctgtctttaatctcggccagagtgctcatgagc

SEQ ID NO: 7666 - DNA, 40 bp, Artificial Sequence
  Synthetic Oligonucleotide
tataagcctgtctttaatctccgcagagtcgctcatgagc

SEQ ID NO: 7667 - DNA, 40 bp, Artificial Sequence
  Synthetic Oligonucleotide
tataagcctgtctttaatcatcggcagagtgctcatgagc

SEQ ID NO: 7668 - DNA, 40 bp, Artificial Sequence
  Synthetic Oligonucleotide
tataacgctgtctttaatctcggcagagtcgctcatgagc

SEQ ID NO: 7669 - DNA, 40 bp, Artificial Sequence
  Synthetic Oligonucleotide
tataacgcctgtctttcaatctcgcagagtgctcatgagc

SEQ ID NO: 7670 - DNA, 40 bp, Artificial Sequence
  Synthetic Oligonucleotide
tagtcggtccgtactttcaggcgctatcctgatcacccgt

SEQ ID NO: 7671 - DNA, 40 bp, Artificial Sequence
  Synthetic Oligonucleotide
tagtcgccagccacatcaactatgatgacgcttgactgga

SEQ ID NO: 7672 - DNA, 40 bp, Artificial Sequence
  Synthetic Oligonucleotide
tagtcgatccgtactttcaggcgctatcctgatcactcga

SEQ ID NO: 7673 - DNA, 40 bp, Artificial Sequence
  Synthetic Oligonucleotide
tagtcgatccgtactttcaggcgctatcctgatcacccgg

SEQ ID NO: 7674 - DNA, 40 bp, Artificial Sequence
  Synthetic Oligonucleotide
taggggcttttgagcacttctcggtaacttgggcagttac

SEQ ID NO: 7675 - DNA, 40 bp, Artificial Sequence
  Synthetic Oligonucleotide
taggggcctttaagcacttctcggtaacttgggcagttac

SEQ ID NO: 7676 - DNA, 40 bp, Artificial Sequence
  Synthetic Oligonucleotide
tagggctttagctacttctcggtacttggtcgtgagttac

SEQ ID NO: 7677 - DNA, 40 bp, Artificial Sequence
  Synthetic Oligonucleotide
taggcttaaacgctactttctcgggatacctggcagtaac

SEQ ID NO: 7678 - DNA, 40 bp, Artificial Sequence
  Synthetic Oligonucleotide
tagctatccgttgtccgtcctcttgtggtattgcgcatgc

SEQ ID NO: 7679 - DNA, 40 bp, Artificial Sequence
  Synthetic Oligonucleotide
tagcggttttaagcacttctcggtaacttgggcagttacc

SEQ ID NO: 7680 - DNA, 40 bp, Artificial Sequence
  Synthetic Oligonucleotide
tagccgatccgtactttcaggcgctatcctgatcacccga

SEQ ID NO: 7681 - DNA, 40 bp, Artificial Sequence
  Synthetic Oligonucleotide
tactggtgcgcctcggattcctcttcatgcaattgcaaac

SEQ ID NO: 7682 - DNA, 40 bp, Artificial Sequence
  Synthetic Oligonucleotide
tactatctgtttgtccgtcctcttgtggtattgcgcatgc

SEQ ID NO: 7683 - DNA, 40 bp, Artificial Sequence
  Synthetic Oligonucleotide
tactatcgcttgtccgtcctcttgtcggtattgcgcatgc

SEQ ID NO: 7684 - DNA, 40 bp, Artificial Sequence
  Synthetic Oligonucleotide
tactatccttttgtccgtcctcttgtggtattgcgcatgc

SEQ ID NO: 7685 - DNA, 40 bp, Artificial Sequence
  Synthetic Oligonucleotide
tactatccgtttgtccgtcttctcgtggtattgcgcatgc

SEQ ID NO: 7686 - DNA, 40 bp, Artificial Sequence
  Synthetic Oligonucleotide
tactatccgtttgtccgtcctcttgtggtgttgcgcatgc

SEQ ID NO: 7687 - DNA, 40 bp, Artificial Sequence
  Synthetic Oligonucleotide
tactatccgtttgtccgtcctcttgtggtattgtgcatgc

SEQ ID NO: 7688 - DNA, 40 bp, Artificial Sequence
  Synthetic Oligonucleotide
tactatccgtttgtccgtcctcttgtggtattgcgtatgc

SEQ ID NO: 7689 - DNA, 40 bp, Artificial Sequence
  Synthetic Oligonucleotide
tactatccgtttgtccgtcctcttgtggtattgcacatgc

SEQ ID NO: 7690 - DNA, 40 bp, Artificial Sequence
  Synthetic Oligonucleotide
tactatccgtttgtccgtcctcttgtggtactgcgcatgc

SEQ ID NO: 7691 - DNA, 40 bp, Artificial Sequence
  Synthetic Oligonucleotide
tactatccgtttgtccgtcctcttgtagtattgcgcatgc

SEQ ID NO: 7692 - DNA, 40 bp, Artificial Sequence
  Synthetic Oligonucleotide
tactatccgtttgtccgtcctcttatggtattgcgcatgc

SEQ ID NO: 7693 - DNA, 40 bp, Artificial Sequence
  Synthetic Oligonucleotide
tactatccgtttgtccgtcctctcgtggtattgcgaatgc

SEQ ID NO: 7694 - DNA, 40 bp, Artificial Sequence
  Synthetic Oligonucleotide
tactatccgtttgtccgtcctcatgtggtattgcgcatgc

SEQ ID NO: 7695 - DNA, 40 bp, Artificial Sequence
  Synthetic Oligonucleotide
tactatccgtttgtcccgtcctctgtggtattgcgcatgc

SEQ ID NO: 7696 - DNA, 40 bp, Artificial Sequence
  Synthetic Oligonucleotide
tactatccgttcgtccgtcctcttgtggtattgcgcacgc

SEQ ID NO: 7697 - DNA, 40 bp, Artificial Sequence
  Synthetic Oligonucleotide
tactatccgcttgtccgtcctcttgtggtgttgcgcatgc

SEQ ID NO: 7698 - DNA, 40 bp, Artificial Sequence
  Synthetic Oligonucleotide
tactatccgcttgcccgtcctcttgtggtattgcgcatgc

SEQ ID NO: 7699 - DNA, 40 bp, Artificial Sequence
  Synthetic Oligonucleotide
tactatccccatcgagcgatcgtcgtaatactgcttccag

SEQ ID NO: 7700 - DNA, 40 bp, Artificial Sequence
  Synthetic Oligonucleotide
tactatccatttgtccgtcctctcgtggtattgcgcatgc

SEQ ID NO: 7701 - DNA, 40 bp, Artificial Sequence
  Synthetic Oligonucleotide
tactacccgtttgtccgtcctcttgtggtattgcgcatgc

SEQ ID NO: 7702 - DNA, 40 bp, Artificial Sequence
  Synthetic Oligonucleotide
tactacccccatcgagcgagtctactctcccatctacggg

SEQ ID NO: 7703 - DNA, 40 bp, Artificial Sequence
  Synthetic Oligonucleotide
tactacccccatcgagcgagtctactctcccatcgacggg

SEQ ID NO: 7704 - DNA, 40 bp, Artificial Sequence
  Synthetic Oligonucleotide
tactacccccatcgagcgagtctactctcccaccaacggg

SEQ ID NO: 7705 - DNA, 40 bp, Artificial Sequence
  Synthetic Oligonucleotide
tactaccccatcgagcgagtctactctcccaatcaacggg

SEQ ID NO: 7706 - DNA, 40 bp, Artificial Sequence
  Synthetic Oligonucleotide
tactaccccatcgagccgagtctactctcccattaacggg

SEQ ID NO: 7707 - DNA, 40 bp, Artificial Sequence
  Synthetic Oligonucleotide
tactaccccatccgagcgagtctactctcccatcaacggg

SEQ ID NO: 7708 - DNA, 40 bp, Artificial Sequence
  Synthetic Oligonucleotide
tactaccccactcgagcgagtctactcgtccatcaacggg

SEQ ID NO: 7709 - DNA, 40 bp, Artificial Sequence
  Synthetic Oligonucleotide
tacgtgcagcctcgaattggcgccaccgctctacactgat

SEQ ID NO: 7710 - DNA, 40 bp, Artificial Sequence
  Synthetic Oligonucleotide
tacgtcgcagcactatctccgttttaagaccgcaagttta

SEQ ID NO: 7711 - DNA, 40 bp, Artificial Sequence
  Synthetic Oligonucleotide
tacgtaccccatcgagcgagtctactctcccatcaacggg

SEQ ID NO: 7712 - DNA, 40 bp, Artificial Sequence
  Synthetic Oligonucleotide
tacggggctttaagcactctcggtaacttagggcagttac

SEQ ID NO: 7713 - DNA, 40 bp, Artificial Sequence
  Synthetic Oligonucleotide
tacgggctttaggctacttctcggtaacttgggcagttac

SEQ ID NO: 7714 - DNA, 40 bp, Artificial Sequence
  Synthetic Oligonucleotide
tacgctcgcagcactatctccgtttaagaccgcaagttca

SEQ ID NO: 7715 - DNA, 40 bp, Artificial Sequence
  Synthetic Oligonucleotide
taccgggactggaggcgtccttggtggactaccaccttat

SEQ ID NO: 7716 - DNA, 40 bp, Artificial Sequence
  Synthetic Oligonucleotide
taccggcactggaggcgtccttggtgggctaccaccttat

SEQ ID NO: 7717 - DNA, 40 bp, Artificial Sequence
  Synthetic Oligonucleotide
taccggcactggaggcgtccctggtgggctaccaccttat

SEQ ID NO: 7718 - DNA, 40 bp, Artificial Sequence
  Synthetic Oligonucleotide
taccggcactggagcgatccctggtggactaccaccttat

SEQ ID NO: 7719 - DNA, 40 bp, Artificial Sequence
  Synthetic Oligonucleotide
taccggcaccggaggcgtccctggtggactaccaccttat

SEQ ID NO: 7720 - DNA, 40 bp, Artificial Sequence
  Synthetic Oligonucleotide
taccgcctcatcatcggacacgtacgtgtgtcagttgctg

SEQ ID NO: 7721 - DNA, 40 bp, Artificial Sequence
  Synthetic Oligonucleotide
taccgcctcatcatcggacacgacgtgtatcagatggctg

SEQ ID NO: 7722 - DNA, 40 bp, Artificial Sequence
  Synthetic Oligonucleotide
taccgcctcatcatcggacacaacgtgtatcagttggctg

SEQ ID NO: 7723 - DNA, 40 bp, Artificial Sequence
  Synthetic Oligonucleotide
taccgcctcacttcatcggcacgtacgtgtatcagtgctg

SEQ ID NO: 7724 - DNA, 40 bp, Artificial Sequence
  Synthetic Oligonucleotide
taccgcctcaccaccggacacgacgtgtatcagttggctg

SEQ ID NO: 7725 - DNA, 40 bp, Artificial Sequence
  Synthetic Oligonucleotide
taccgacactggaggcgtccctggtggactaccaccttat

SEQ ID NO: 7726 - DNA, 40 bp, Artificial Sequence
  Synthetic Oligonucleotide
taccagtacctccaaaagcattaggccaacccttgaactg

SEQ ID NO: 7727 - DNA, 40 bp, Artificial Sequence
  Synthetic Oligonucleotide
taccacccccatcgagcgagtctactctcccatcaacggg

SEQ ID NO: 7728 - DNA, 40 bp, Artificial Sequence
  Synthetic Oligonucleotide
tacataacgccttggaatgcaacgttacatattttccccg

SEQ ID NO: 7729 - DNA, 40 bp, Artificial Sequence
  Synthetic Oligonucleotide
tacagcggccctcgtgttggactaccaacttgcagagcgg

SEQ ID NO: 7730 - DNA, 40 bp, Artificial Sequence
  Synthetic Oligonucleotide
taatctggtacctatcatgcgctatcatggcggctaggac

SEQ ID NO: 7731 - DNA, 40 bp, Artificial Sequence
  Synthetic Oligonucleotide
taatcgccagtcacatcaactatgatgacgcttgactgga

SEQ ID NO: 7732 - DNA, 40 bp, Artificial Sequence
  Synthetic Oligonucleotide
taaggggctttaagcacttctcggtagcttgggcagttac

SEQ ID NO: 7733 - DNA, 40 bp, Artificial Sequence
  Synthetic Oligonucleotide
taagcctcgatcctcgcaccgcacgcgatcccaatgtttg

SEQ ID NO: 7734 - DNA, 40 bp, Artificial Sequence
  Synthetic Oligonucleotide
taagagtgcacagtactgcctcgatcctccgtggcttaag

SEQ ID NO: 7735 - DNA, 40 bp, Artificial Sequence
  Synthetic Oligonucleotide
taaccggggctcgcctcgagctagctacctccattgtctg

SEQ ID NO: 7736 - DNA, 40 bp, Artificial Sequence
  Synthetic Oligonucleotide
taaccggggcccgcctcaagctagctacctctattgtctg

SEQ ID NO: 7737 - DNA, 40 bp, Artificial Sequence
  Synthetic Oligonucleotide
taaccggggcccgcctcaagctagctacctccgttgtctg

SEQ ID NO: 7738 - DNA, 40 bp, Artificial Sequence
  Synthetic Oligonucleotide
taaccggggcccgcctcaagctagctacctccattttctg

SEQ ID NO: 7739 - DNA, 40 bp, Artificial Sequence
  Synthetic Oligonucleotide
taaccggggcccgcctcaagctagctacctccattgtcta

SEQ ID NO: 7740 - DNA, 40 bp, Artificial Sequence
  Synthetic Oligonucleotide
taaccggggcccgcctcaagctagctacctccattgtccg

SEQ ID NO: 7741 - DNA, 40 bp, Artificial Sequence
  Synthetic Oligonucleotide
taaccggggcccgcctcaagctagctacctccattgtcag

SEQ ID NO: 7742 - DNA, 40 bp, Artificial Sequence
  Synthetic Oligonucleotide
taaccggggcccgcctcaagctagccacctccattgtctg

SEQ ID NO: 7743 - DNA, 40 bp, Artificial Sequence
  Synthetic Oligonucleotide
taaccggggcccgcctcaagctagcaacctccattgtctg

SEQ ID NO: 7744 - DNA, 40 bp, Artificial Sequence
  Synthetic Oligonucleotide
taaccggggcccgccccaagctagctacctccattgtctg

SEQ ID NO: 7745 - DNA, 40 bp, Artificial Sequence
  Synthetic Oligonucleotide
taaccgggccgcctcaaggctagtctacctccattgtctg

SEQ ID NO: 7746 - DNA, 40 bp, Artificial Sequence
  Synthetic Oligonucleotide
taaccgggcccgcctcaagctagctacctccacttgtctg

SEQ ID NO: 7747 - DNA, 40 bp, Artificial Sequence
  Synthetic Oligonucleotide
taaccgggcccgcctcaagctagctaccgtccattgtctg

SEQ ID NO: 7748 - DNA, 40 bp, Artificial Sequence
  Synthetic Oligonucleotide
gtttatggtacgcctcgattccgcccatacatgcatgtaa

SEQ ID NO: 7749 - DNA, 40 bp, Artificial Sequence
  Synthetic Oligonucleotide
gtttaagcgcaccagctaatagcatggaccccttaaactg

SEQ ID NO: 7750 - DNA, 40 bp, Artificial Sequence
  Synthetic Oligonucleotide
gtttaagcgcaccacgctaatacgcatggccccttaactg

SEQ ID NO: 7751 - DNA, 40 bp, Artificial Sequence
  Synthetic Oligonucleotide
gttctcgcctctgtcctcatggttcgaaccggtaagcatg

SEQ ID NO: 7752 - DNA, 40 bp, Artificial Sequence
  Synthetic Oligonucleotide
gttctcgcctctgtcctcatggttcgaaccagtatgcata

SEQ ID NO: 7753 - DNA, 40 bp, Artificial Sequence
  Synthetic Oligonucleotide
gttctcgcctctgtcctcatggtccgaaccggtgtgcatg

SEQ ID NO: 7754 - DNA, 40 bp, Artificial Sequence
  Synthetic Oligonucleotide
gttctcgcctctgtccccatggttcgaaccggtatgcgtg

SEQ ID NO: 7755 - DNA, 40 bp, Artificial Sequence
  Synthetic Oligonucleotide
gttctcgcctccgtcctcatggttcgaaccggtacgcatg

SEQ ID NO: 7756 - DNA, 40 bp, Artificial Sequence
  Synthetic Oligonucleotide
gttcacgcctctgtcctcatggttcgaaccggtatgcatg

SEQ ID NO: 7757 - DNA, 40 bp, Artificial Sequence
  Synthetic Oligonucleotide
gtgtttgtgttaaatccgcctcgcacctcaaacacgaata

SEQ ID NO: 7758 - DNA, 40 bp, Artificial Sequence
  Synthetic Oligonucleotide
gtgtccatgacgtcttctggcactatccagttgacgctca

SEQ ID NO: 7759 - DNA, 40 bp, Artificial Sequence
  Synthetic Oligonucleotide
gtgtccatgacgcttctggcatctatccagttgacgctca

SEQ ID NO: 7760 - DNA, 40 bp, Artificial Sequence
  Synthetic Oligonucleotide
gtgtacctccggtcctccttacccgcttttcgcccgcata

SEQ ID NO: 7761 - DNA, 40 bp, Artificial Sequence
  Synthetic Oligonucleotide
gtggtccatgagcttctggcactactccagttgacgctca

SEQ ID NO: 7762 - DNA, 40 bp, Artificial Sequence
  Synthetic Oligonucleotide
gtggtccatcgagcttctggcactatccagttgacgctca

SEQ ID NO: 7763 - DNA, 40 bp, Artificial Sequence
  Synthetic Oligonucleotide
gtggtagaatctcggttcgctccgtccgcccaaatgcccg

SEQ ID NO: 7764 - DNA, 40 bp, Artificial Sequence
  Synthetic Oligonucleotide
gtgcgaaacgctatttctggaagccgcatctcgagctgaa

SEQ ID NO: 7765 - DNA, 40 bp, Artificial Sequence
  Synthetic Oligonucleotide
gtgatcacataaagccggcttgctcgcctcggtcctccat

SEQ ID NO: 7766 - DNA, 40 bp, Artificial Sequence
  Synthetic Oligonucleotide
gtcttatccggctagacgtctttcgtgcactatcacgatt

SEQ ID NO: 7767 - DNA, 40 bp, Artificial Sequence
  Synthetic Oligonucleotide
gtctccgtctaacacgtgcactatcacggctttagttaga

SEQ ID NO: 7768 - DNA, 40 bp, Artificial Sequence
  Synthetic Oligonucleotide
gtctatggtacgcctcgattctgcccatacatgcatgtaa

SEQ ID NO: 7769 - DNA, 40 bp, Artificial Sequence
  Synthetic Oligonucleotide
gtctatccgtttgtccgtcctcttgtggtattgcgcatgc

SEQ ID NO: 7770 - DNA, 40 bp, Artificial Sequence
  Synthetic Oligonucleotide
gtctatccggcaggacgtctttcgtgcacctatcacgatt

SEQ ID NO: 7771 - DNA, 40 bp, Artificial Sequence
  Synthetic Oligonucleotide
gtctaggcttcacgcacgcggattgccacccgaactgggt

SEQ ID NO: 7772 - DNA, 40 bp, Artificial Sequence
  Synthetic Oligonucleotide
gtcgtgacttaccacctgacatcgcggggaactaagtgtt

SEQ ID NO: 7773 - DNA, 40 bp, Artificial Sequence
  Synthetic Oligonucleotide
gtcgtacttaccaccctgacattgcggggaactaatggtt

SEQ ID NO: 7774 - DNA, 40 bp, Artificial Sequence
  Synthetic Oligonucleotide
gtcgtacttaccaccctgacatcgcggggaactattggtt

SEQ ID NO: 7775 - DNA, 40 bp, Artificial Sequence
  Synthetic Oligonucleotide
gtcgtacttaccaccctgacatcgcggggaacgaatggtt

SEQ ID NO: 7776 - DNA, 40 bp, Artificial Sequence
  Synthetic Oligonucleotide
gtcgtacttaccaccctgacatcccggggaactaatggtt

SEQ ID NO: 7777 - DNA, 40 bp, Artificial Sequence
  Synthetic Oligonucleotide
gtcgtacttacaccctgacatcgcggggaacttaatggtt

SEQ ID NO: 7778 - DNA, 40 bp, Artificial Sequence
  Synthetic Oligonucleotide
gtcggtttcttctctgactacatgagattaataaacgcgc

SEQ ID NO: 7779 - DNA, 40 bp, Artificial Sequence
  Synthetic Oligonucleotide
gtcgggaacgcctcgatcctcgcataatatgatacgtctg

SEQ ID NO: 7780 - DNA, 40 bp, Artificial Sequence
  Synthetic Oligonucleotide
gtcggaacgcctcgattcctcgcataatatgatacgtctg

SEQ ID NO: 7781 - DNA, 40 bp, Artificial Sequence
  Synthetic Oligonucleotide
gtcggaacgcctcgatcctcgacataatatgatacgtctg

SEQ ID NO: 7782 - DNA, 40 bp, Artificial Sequence
  Synthetic Oligonucleotide
gtcgatggtacgcctcgattccgcccatacatgcatgtaa

SEQ ID NO: 7783 - DNA, 40 bp, Artificial Sequence
  Synthetic Oligonucleotide
gtcgaggatagtcgtcccgaactatcgcgaataagactaa

SEQ ID NO: 7784 - DNA, 40 bp, Artificial Sequence
  Synthetic Oligonucleotide
gtcgacggtcactagtgacgcctcgtcctcttttcgtctg

SEQ ID NO: 7785 - DNA, 40 bp, Artificial Sequence
  Synthetic Oligonucleotide
gtcgaatcgcctcgactcactacataatgtgatacgtctg

SEQ ID NO: 7786 - DNA, 40 bp, Artificial Sequence
  Synthetic Oligonucleotide
gtcgaacgcctcgatcctcgacataatatgatacgtctga

SEQ ID NO: 7787 - DNA, 40 bp, Artificial Sequence
  Synthetic Oligonucleotide
gtcgaacgcctcgactcctcgacataatatgatacgtctg

SEQ ID NO: 7788 - DNA, 40 bp, Artificial Sequence
  Synthetic Oligonucleotide
gtcctgaacgcctcggtcctcgcataatatgatacgtctg

SEQ ID NO: 7789 - DNA, 40 bp, Artificial Sequence
  Synthetic Oligonucleotide
gtcctcgcctctgtcctcatggttcgaaccggtatacatg

SEQ ID NO: 7790 - DNA, 40 bp, Artificial Sequence
  Synthetic Oligonucleotide
gtcctcgccgccgtcctcatggttcgaaccggtatgcatg

SEQ ID NO: 7791 - DNA, 40 bp, Artificial Sequence
  Synthetic Oligonucleotide
gtcctcgacctgattttggccgtccgtgcgcacatcggtt

SEQ ID NO: 7792 - DNA, 40 bp, Artificial Sequence
  Synthetic Oligonucleotide
gtcctcatgctgtgctctcggatctaacctcccttgcaga

SEQ ID NO: 7793 - DNA, 40 bp, Artificial Sequence
  Synthetic Oligonucleotide
gtccgtggtacgcctcgattccgcccttacatgcatgtaa

SEQ ID NO: 7794 - DNA, 40 bp, Artificial Sequence
  Synthetic Oligonucleotide
gtccgtcgtcccgttttggatgttacgttgaatctcgttc

SEQ ID NO: 7795 - DNA, 40 bp, Artificial Sequence
  Synthetic Oligonucleotide
gtccgtcctcgtataattcaggatggcttattatctagct

SEQ ID NO: 7796 - DNA, 40 bp, Artificial Sequence
  Synthetic Oligonucleotide
gtccggtacgccccgatcctcgcataatatgatacgtctg

SEQ ID NO: 7797 - DNA, 40 bp, Artificial Sequence
  Synthetic Oligonucleotide
gtccgggacgcctcgattctcgcataatatgatacgtctg

SEQ ID NO: 7798 - DNA, 40 bp, Artificial Sequence
  Synthetic Oligonucleotide
gtccgggacgcctcgatcctcgcaaaatatgatacgtctg

SEQ ID NO: 7799 - DNA, 40 bp, Artificial Sequence
  Synthetic Oligonucleotide
gtccgggaacgcctcgatcctcgcatatatgatacgtctg

SEQ ID NO: 7800 - DNA, 40 bp, Artificial Sequence
  Synthetic Oligonucleotide
gtccggagcgcttcgatcctcgcataatatgatacgtctg

SEQ ID NO: 7801 - DNA, 40 bp, Artificial Sequence
  Synthetic Oligonucleotide
gtccggagcgcctcgatcctcgcataatatgatacgtcgg

SEQ ID NO: 7802 - DNA, 40 bp, Artificial Sequence
  Synthetic Oligonucleotide
gtccggaccgcctcgatcctcgcacaatatgatacgtctg

SEQ ID NO: 7803 - DNA, 40 bp, Artificial Sequence
  Synthetic Oligonucleotide
gtccggaacgtctcgatcctcgcataatataatacgtctg

SEQ ID NO: 7804 - DNA, 40 bp, Artificial Sequence
  Synthetic Oligonucleotide
gtccggaacgccttgatcctcgcataatatgttacgtctg

SEQ ID NO: 7805 - DNA, 40 bp, Artificial Sequence
  Synthetic Oligonucleotide
gtccggaacgccttcgatctcgcataatatgatacgtctg

SEQ ID NO: 7806 - DNA, 40 bp, Artificial Sequence
  Synthetic Oligonucleotide
gtccggaacgccttcgatcctcgcatatatgatacgtctg

SEQ ID NO: 7807 - DNA, 40 bp, Artificial Sequence
  Synthetic Oligonucleotide
gtccggaacgcctcgatcctcgcgtaaaatgatacgtctg

SEQ ID NO: 7808 - DNA, 40 bp, Artificial Sequence
  Synthetic Oligonucleotide
gtccggaacgcctcgatcctcgcatatatgatgacgtctg

SEQ ID NO: 7809 - DNA, 40 bp, Artificial Sequence
  Synthetic Oligonucleotide
gtccggaacgcctcgatcctcgcatatataactacgtctg

SEQ ID NO: 7810 - DNA, 40 bp, Artificial Sequence
  Synthetic Oligonucleotide
gtccggaacgcctcgatcctcgcataatttgatacgtccg

SEQ ID NO: 7811 - DNA, 40 bp, Artificial Sequence
  Synthetic Oligonucleotide
gtccggaacgcctcgatcctcgcataatatggtacggctg

SEQ ID NO: 7812 - DNA, 40 bp, Artificial Sequence
  Synthetic Oligonucleotide
gtccggaacgcctcgatcctcgcataatatggtacgcctg

SEQ ID NO: 7813 - DNA, 40 bp, Artificial Sequence
  Synthetic Oligonucleotide
gtccggaacgcctcgatcctcgcataatataatgcgtctg

SEQ ID NO: 7814 - DNA, 40 bp, Artificial Sequence
  Synthetic Oligonucleotide
gtccggaacgcctcgatcctcgcataataggatacgtctg

SEQ ID NO: 7815 - DNA, 40 bp, Artificial Sequence
  Synthetic Oligonucleotide
gtccggaacgcctcgatcctcgcataataaggtacgtctg

SEQ ID NO: 7816 - DNA, 40 bp, Artificial Sequence
  Synthetic Oligonucleotide
gtccggaacgcctcgatcctcgcacgatatgatacgtctg

SEQ ID NO: 7817 - DNA, 40 bp, Artificial Sequence
  Synthetic Oligonucleotide
gtccggaacgcctcgatcctcgcacaatgtgatacgtctg

SEQ ID NO: 7818 - DNA, 40 bp, Artificial Sequence
  Synthetic Oligonucleotide
gtccggaacgcctcgatcctcgcacaatatgatacgtttg

SEQ ID NO: 7819 - DNA, 40 bp, Artificial Sequence
  Synthetic Oligonucleotide
gtccggaacgcctcgatcctcgcacaacatgatacgtctg

SEQ ID NO: 7820 - DNA, 40 bp, Artificial Sequence
  Synthetic Oligonucleotide
gtccggaacgcctcgatccacgcataatatgataggtctg

SEQ ID NO: 7821 - DNA, 40 bp, Artificial Sequence
  Synthetic Oligonucleotide
gtccggaacgcctcgatccacgcataataagatacgtctg

SEQ ID NO: 7822 - DNA, 40 bp, Artificial Sequence
  Synthetic Oligonucleotide
gtccggaacgcctccatcctcgcataatatgatacgtctg

SEQ ID NO: 7823 - DNA, 40 bp, Artificial Sequence
  Synthetic Oligonucleotide
gtccggaacgcctagatcctcgcataatatgatacgtctg

SEQ ID NO: 7824 - DNA, 40 bp, Artificial Sequence
  Synthetic Oligonucleotide
gtccggaacgccgcgatcctcgcataatatgatacgtctg

SEQ ID NO: 7825 - DNA, 40 bp, Artificial Sequence
  Synthetic Oligonucleotide
gtccggaaagcctcgatcctcgcataatatggtacgtctg

SEQ ID NO: 7826 - DNA, 40 bp, Artificial Sequence
  Synthetic Oligonucleotide
gtccgatacgcctcgatcctcgcataatatgatacgtctg

SEQ ID NO: 7827 - DNA, 40 bp, Artificial Sequence
  Synthetic Oligonucleotide
gtccgaccgcctcgactcctcgcataatatgatacgtctg

SEQ ID NO: 7828 - DNA, 40 bp, Artificial Sequence
  Synthetic Oligonucleotide
gtccgaagcgcctcgatccctcgcacatatgatacgtctg

SEQ ID NO: 7829 - DNA, 40 bp, Artificial Sequence
  Synthetic Oligonucleotide
gtccgaacggcctcgatcctcgcatgatatgatacgtctg

SEQ ID NO: 7830 - DNA, 40 bp, Artificial Sequence
  Synthetic Oligonucleotide
gtccgaacgcctcgtccgtcactatcattaacttagttga

SEQ ID NO: 7831 - DNA, 40 bp, Artificial Sequence
  Synthetic Oligonucleotide
gtccgaacgcctcgattcctcgcataatatggtacgtctg

SEQ ID NO: 7832 - DNA, 40 bp, Artificial Sequence
  Synthetic Oligonucleotide
gtccgaacgcctcgatcctcgccataatatgatacgtctg

SEQ ID NO: 7833 - DNA, 40 bp, Artificial Sequence
  Synthetic Oligonucleotide
gtccgaacgcctcgatcctcgcataactatgatacgtctg

SEQ ID NO: 7834 - DNA, 40 bp, Artificial Sequence
  Synthetic Oligonucleotide
gtccgaacgcctcgactcctcgcatatatgatacgtctgt

SEQ ID NO: 7835 - DNA, 40 bp, Artificial Sequence
  Synthetic Oligonucleotide
gtccgaacgccccgattcctcgcataatatgatacgtctg

SEQ ID NO: 7836 - DNA, 40 bp, Artificial Sequence
  Synthetic Oligonucleotide
gtcccgaacgcctcgatcctcgcataatatgatacgtctg

SEQ ID NO: 7837 - DNA, 40 bp, Artificial Sequence
  Synthetic Oligonucleotide
gtcccatggtacgcctcgattccgccatacatgcatgtaa

SEQ ID NO: 7838 - DNA, 40 bp, Artificial Sequence
  Synthetic Oligonucleotide
gtccattggtacgcctcaagctagctacctccattgtctg

SEQ ID NO: 7839 - DNA, 40 bp, Artificial Sequence
  Synthetic Oligonucleotide
gtccatgtacgcctcgattccgcccatacatgcatgtcga

SEQ ID NO: 7840 - DNA, 40 bp, Artificial Sequence
  Synthetic Oligonucleotide
gtccatgtacgcctcgattccacccatacattgcatgtaa

SEQ ID NO: 7841 - DNA, 40 bp, Artificial Sequence
  Synthetic Oligonucleotide
gtccatgtacgcctcgacttccgccataccatgcatgtaa

SEQ ID NO: 7842 - DNA, 40 bp, Artificial Sequence
  Synthetic Oligonucleotide
gtccatggtgcgcctcgattccgcccgtacatgcatgtaa

SEQ ID NO: 7843 - DNA, 40 bp, Artificial Sequence
  Synthetic Oligonucleotide
gtccatggtatgcctcgattccgccattacatgcatgtaa

SEQ ID NO: 7844 - DNA, 40 bp, Artificial Sequence
  Synthetic Oligonucleotide
gtccatggtacgtctcgattccgtccatacatgcatgtaa

SEQ ID NO: 7845 - DNA, 40 bp, Artificial Sequence
  Synthetic Oligonucleotide
gtccatggtacgccttgattccgcccatacatgcatgtga

SEQ ID NO: 7846 - DNA, 40 bp, Artificial Sequence
  Synthetic Oligonucleotide
gtccatggtacgcctcggttctgcccatacatgcatgtaa

SEQ ID NO: 7847 - DNA, 40 bp, Artificial Sequence
  Synthetic Oligonucleotide
gtccatggtacgcctcggttccgcccatacatgcgtgtaa

SEQ ID NO: 7848 - DNA, 40 bp, Artificial Sequence
  Synthetic Oligonucleotide
gtccatggtacgcctcgatttccgccgtacatgcatgtaa

SEQ ID NO: 7849 - DNA, 40 bp, Artificial Sequence
  Synthetic Oligonucleotide
gtccatggtacgcctcgatttccgccatgcatgcatgtaa

SEQ ID NO: 7850 - DNA, 40 bp, Artificial Sequence
  Synthetic Oligonucleotide
gtccatggtacgcctcgattccgtccatacatgcatgtag

SEQ ID NO: 7851 - DNA, 40 bp, Artificial Sequence
  Synthetic Oligonucleotide
gtccatggtacgcctcgattccgctcacacatgcatgtaa

SEQ ID NO: 7852 - DNA, 40 bp, Artificial Sequence
  Synthetic Oligonucleotide
gtccatggtacgcctcgattccgcgcatacatgcatgtaa

SEQ ID NO: 7853 - DNA, 40 bp, Artificial Sequence
  Synthetic Oligonucleotide
gtccatggtacgcctcgattccgcctatacctgcatgtaa

SEQ ID NO: 7854 - DNA, 40 bp, Artificial Sequence
  Synthetic Oligonucleotide
gtccatggtacgcctcgattccgcctatacatgcatgcaa

SEQ ID NO: 7855 - DNA, 40 bp, Artificial Sequence
  Synthetic Oligonucleotide
gtccatggtacgcctcgattccgcccttacatggatgtaa

SEQ ID NO: 7856 - DNA, 40 bp, Artificial Sequence
  Synthetic Oligonucleotide
gtccatggtacgcctcgattccgcccttacatgcagttac

SEQ ID NO: 7857 - DNA, 40 bp, Artificial Sequence
  Synthetic Oligonucleotide
gtccatggtacgcctcgattccgcccgtacatgcgtgtaa

SEQ ID NO: 7858 - DNA, 40 bp, Artificial Sequence
  Synthetic Oligonucleotide
gtccatggtacgcctcgattccgcccgcacatgcatgtaa

SEQ ID NO: 7859 - DNA, 40 bp, Artificial Sequence
  Synthetic Oligonucleotide
gtccatggtacgcctcgattccgcccatgcatacatgtaa

SEQ ID NO: 7860 - DNA, 40 bp, Artificial Sequence
  Synthetic Oligonucleotide
gtccatggtacgcctcgattccgcccatacatgtatgcaa

SEQ ID NO: 7861 - DNA, 40 bp, Artificial Sequence
  Synthetic Oligonucleotide
gtccatggtacgcctcgattccgcccatacatgcctgtaa

SEQ ID NO: 7862 - DNA, 40 bp, Artificial Sequence
  Synthetic Oligonucleotide
gtccatggtacgcctcgattccgcccatacatgcatatta

SEQ ID NO: 7863 - DNA, 40 bp, Artificial Sequence
  Synthetic Oligonucleotide
gtccatggtacgcctcgattccgcccatacatgcacgtag

SEQ ID NO: 7864 - DNA, 40 bp, Artificial Sequence
  Synthetic Oligonucleotide
gtccatggtacgcctcgattccgcccatacatgcacgcaa

SEQ ID NO: 7865 - DNA, 40 bp, Artificial Sequence
  Synthetic Oligonucleotide
gtccatggtacgcctcgattccgcccacacatgcatgtga

SEQ ID NO: 7866 - DNA, 40 bp, Artificial Sequence
  Synthetic Oligonucleotide
gtccatggtacgcctcgattccgccatacgatgcatgtaa

SEQ ID NO: 7867 - DNA, 40 bp, Artificial Sequence
  Synthetic Oligonucleotide
gtccatggtacgcctcgattccgccatacattgcatgtga

SEQ ID NO: 7868 - DNA, 40 bp, Artificial Sequence
  Synthetic Oligonucleotide
gtccatggtacgcctcgattccgccatacatgccatgtaa

SEQ ID NO: 7869 - DNA, 40 bp, Artificial Sequence
  Synthetic Oligonucleotide
gtccatggtacgcctcgattccgccatacatgcagtgtaa

SEQ ID NO: 7870 - DNA, 40 bp, Artificial Sequence
  Synthetic Oligonucleotide
gtccatggtacgcctcgattccccgcatacatgcatgtaa

SEQ ID NO: 7871 - DNA, 40 bp, Artificial Sequence
  Synthetic Oligonucleotide
gtccatggtacgcctcgattccccccacacatgcatgtaa

SEQ ID NO: 7872 - DNA, 40 bp, Artificial Sequence
  Synthetic Oligonucleotide
gtccatggtacgcctcgattccatccatacatgcatgtaa

SEQ ID NO: 7873 - DNA, 40 bp, Artificial Sequence
  Synthetic Oligonucleotide
gtccatggtacgcctcgattccacccgtacatgcatgtaa

SEQ ID NO: 7874 - DNA, 40 bp, Artificial Sequence
  Synthetic Oligonucleotide
gtccatggtacgcctcgattacgcccatacatgcatgtaa

SEQ ID NO: 7875 - DNA, 40 bp, Artificial Sequence
  Synthetic Oligonucleotide
gtccatggtacgcctcgatcccgcccatacgtgcatgtaa

SEQ ID NO: 7876 - DNA, 40 bp, Artificial Sequence
  Synthetic Oligonucleotide
gtccatggtacgcctcgactccgcccgtacatgcatgtaa

SEQ ID NO: 7877 - DNA, 40 bp, Artificial Sequence
  Synthetic Oligonucleotide
gtccatggtacgcctcgactccgcccatacgtgcatgtaa

SEQ ID NO: 7878 - DNA, 40 bp, Artificial Sequence
  Synthetic Oligonucleotide
gtccatggtacgcctcgactccgcccatacatgcatatta

SEQ ID NO: 7879 - DNA, 40 bp, Artificial Sequence
  Synthetic Oligonucleotide
gtccatggtacgccgcgattccgcccatacatgcatgtaa

SEQ ID NO: 7880 - DNA, 40 bp, Artificial Sequence
  Synthetic Oligonucleotide
gtccatggtacgccccgattccgcccatacatgcatgtga

SEQ ID NO: 7881 - DNA, 40 bp, Artificial Sequence
  Synthetic Oligonucleotide
gtccatggtacagcctcgattccgccatacatgcatgtaa

SEQ ID NO: 7882 - DNA, 40 bp, Artificial Sequence
  Synthetic Oligonucleotide
gtccatggcatgcctcgattccgcccatacatgcatgtaa

SEQ ID NO: 7883 - DNA, 40 bp, Artificial Sequence
  Synthetic Oligonucleotide
gtccatggcacgcctcgattccacccatacatgcatgtaa

SEQ ID NO: 7884 - DNA, 40 bp, Artificial Sequence
  Synthetic Oligonucleotide
gtccatggacgcctcgattcgcctacattgccattggtaa

SEQ ID NO: 7885 - DNA, 40 bp, Artificial Sequence
  Synthetic Oligonucleotide
gtccatagtacgcctcgattccgcccatgcatgcatgtaa

SEQ ID NO: 7886 - DNA, 40 bp, Artificial Sequence
  Synthetic Oligonucleotide
gtccaggtacgcctcgattccgcccacacattgcatgtaa

SEQ ID NO: 7887 - DNA, 40 bp, Artificial Sequence
  Synthetic Oligonucleotide
gtccacggtacgcctcgattccgcccgtacatgcatgtaa

SEQ ID NO: 7888 - DNA, 40 bp, Artificial Sequence
  Synthetic Oligonucleotide
gtccacggtacgcctcgattccgcccatacatgcatgtga

SEQ ID NO: 7889 - DNA, 40 bp, Artificial Sequence
  Synthetic Oligonucleotide
gtccacggtacgcctcgattccgcccacacatgcatgtaa

SEQ ID NO: 7890 - DNA, 40 bp, Artificial Sequence
  Synthetic Oligonucleotide
gtcatggtacgctcgatttcgcccatcacatgcattgtaa

SEQ ID NO: 7891 - DNA, 40 bp, Artificial Sequence
  Synthetic Oligonucleotide
gtcatggggcttttaagcactctcgtaacttggcagttac

SEQ ID NO: 7892 - DNA, 40 bp, Artificial Sequence
  Synthetic Oligonucleotide
gtcatggggctttaagcacttctcggtacttgggcagtac

SEQ ID NO: 7893 - DNA, 40 bp, Artificial Sequence
  Synthetic Oligonucleotide
gtcaggaacgcctcgatcctcgcataatgtgatacgtctg

SEQ ID NO: 7894 - DNA, 40 bp, Artificial Sequence
  Synthetic Oligonucleotide
gtcaggaacgcctcgatcctcgcataatatgatacgtctg

SEQ ID NO: 7895 - DNA, 40 bp, Artificial Sequence
  Synthetic Oligonucleotide
gtatggggcttttaagcacttctcggtacttggcagttac

SEQ ID NO: 7896 - DNA, 40 bp, Artificial Sequence
  Synthetic Oligonucleotide
gtatctttatccgcccctctgccatggtgggcctacatcg

SEQ ID NO: 7897 - DNA, 40 bp, Artificial Sequence
  Synthetic Oligonucleotide
gtatcgccagccacatcaactatgatgacgcttgactgga

SEQ ID NO: 7898 - DNA, 40 bp, Artificial Sequence
  Synthetic Oligonucleotide
gtaggtgcgtaccctctttagccgcctctgaagattgagt

SEQ ID NO: 7899 - DNA, 40 bp, Artificial Sequence
  Synthetic Oligonucleotide
gtactccggatgagccacctcgcatccctccgttcgtctg

SEQ ID NO: 7900 - DNA, 40 bp, Artificial Sequence
  Synthetic Oligonucleotide
gtacaggcatgcagtactcgcctcgacacaactatggcca

SEQ ID NO: 7901 - DNA, 40 bp, Artificial Sequence
  Synthetic Oligonucleotide
gtaataaccttccgttactcgcctcgggctagtgtgcgca

SEQ ID NO: 7902 - DNA, 40 bp, Artificial Sequence
  Synthetic Oligonucleotide
gtaataaccttccgttactcgcctcgggcaagtgtgtgca

SEQ ID NO: 7903 - DNA, 40 bp, Artificial Sequence
  Synthetic Oligonucleotide
gtaataaccttccgttactcgcctcggcaagtgtgcgcaa

SEQ ID NO: 7904 - DNA, 40 bp, Artificial Sequence
  Synthetic Oligonucleotide
gtaataaccttccgttacccgcctcgggcaagtgtgcgca

SEQ ID NO: 7905 - DNA, 40 bp, Artificial Sequence
  Synthetic Oligonucleotide
gtaaccgggccgcccttcacttaagccttactcaatgctg

SEQ ID NO: 7906 - DNA, 40 bp, Artificial Sequence
  Synthetic Oligonucleotide
gtaaatggtacgcctcgattccgcccatacatgcatgtaa

SEQ ID NO: 7907 - DNA, 40 bp, Artificial Sequence
  Synthetic Oligonucleotide
gtaaatattcacgttggatcgccttgctcctcttagtctg

SEQ ID NO: 7908 - DNA, 40 bp, Artificial Sequence
  Synthetic Oligonucleotide
gtaaatattcacgttgaatcgccttgcccctcttagtctg

SEQ ID NO: 7909 - DNA, 40 bp, Artificial Sequence
  Synthetic Oligonucleotide
ggtgcggtattcgaggcgttgtacgctattacattgaagc

SEQ ID NO: 7910 - DNA, 40 bp, Artificial Sequence
  Synthetic Oligonucleotide
ggtgatcctcccccccgcctcgaagatttgtgcacgtatc

SEQ ID NO: 7911 - DNA, 40 bp, Artificial Sequence
  Synthetic Oligonucleotide
ggtccctgtgtcttgatgccacagacgttcagtgcccccg

SEQ ID NO: 7912 - DNA, 40 bp, Artificial Sequence
  Synthetic Oligonucleotide
gggtacctgatatgctgttatattttttggaacctctctt

SEQ ID NO: 7913 - DNA, 40 bp, Artificial Sequence
  Synthetic Oligonucleotide
ggggtttcttctcctgactacatgggattaataaacgcgc

SEQ ID NO: 7914 - DNA, 40 bp, Artificial Sequence
  Synthetic Oligonucleotide
ggctcgttgtgggttgatttgcgcgtactagtgccatcga

SEQ ID NO: 7915 - DNA, 40 bp, Artificial Sequence
  Synthetic Oligonucleotide
ggcggtttcttctcctgactacatagattaataaacgcgc

SEQ ID NO: 7916 - DNA, 40 bp, Artificial Sequence
  Synthetic Oligonucleotide
ggcggccgactcgcctcgatgctccatgtaacgttacgaa

SEQ ID NO: 7917 - DNA, 40 bp, Artificial Sequence
  Synthetic Oligonucleotide
ggcggccgactcgcctcgatcctccacgtaacgttacgaa

SEQ ID NO: 7918 - DNA, 40 bp, Artificial Sequence
  Synthetic Oligonucleotide
ggcccgttgtgagttgatttgcgcgtactagtgccatcga

SEQ ID NO: 7919 - DNA, 40 bp, Artificial Sequence
  Synthetic Oligonucleotide
ggcacgcagaaagtcacacgagctatcgtgacgctggctt

SEQ ID NO: 7920 - DNA, 40 bp, Artificial Sequence
  Synthetic Oligonucleotide
ggatcacgctgcctttgtttaaggcctttatacaaacgca

SEQ ID NO: 7921 - DNA, 40 bp, Artificial Sequence
  Synthetic Oligonucleotide
ggacatggtacgcctcgattccgcccatacatgcatgtaa

SEQ ID NO: 7922 - DNA, 40 bp, Artificial Sequence
  Synthetic Oligonucleotide
gctcttatcggcaggacgtctttcgtgccactatcacgat

SEQ ID NO: 7923 - DNA, 40 bp, Artificial Sequence
  Synthetic Oligonucleotide
gctcttatccggcggacgtctttacgtgcactatcacgat

SEQ ID NO: 7924 - DNA, 40 bp, Artificial Sequence
  Synthetic Oligonucleotide
gctcacgctgccctttgtttaaggcctttatacaaacgca

SEQ ID NO: 7925 - DNA, 40 bp, Artificial Sequence
  Synthetic Oligonucleotide
gctaggctttcacgtacgcggattgtacccgaactgggtt

SEQ ID NO: 7926 - DNA, 40 bp, Artificial Sequence
  Synthetic Oligonucleotide
gctaggctttcacgcacgcggatctgtacccgaactggtt

SEQ ID NO: 7927 - DNA, 40 bp, Artificial Sequence
  Synthetic Oligonucleotide
gctaggcttcacgcacgccggattgtacccgaactgggtt

SEQ ID NO: 7928 - DNA, 40 bp, Artificial Sequence
  Synthetic Oligonucleotide
gctaggccttcacgcacgcggactgtacccgaactgggtt

SEQ ID NO: 7929 - DNA, 40 bp, Artificial Sequence
  Synthetic Oligonucleotide
gctaccttcgtctagcggcgctctgtggtaagactctact

SEQ ID NO: 7930 - DNA, 40 bp, Artificial Sequence
  Synthetic Oligonucleotide
gctaccatcgtctagcgagtcacccttagttcatcaaggc

SEQ ID NO: 7931 - DNA, 40 bp, Artificial Sequence
  Synthetic Oligonucleotide
gcgtttgcttctcctgactacgtgagattaataaacgcgc

SEQ ID NO: 7932 - DNA, 40 bp, Artificial Sequence
  Synthetic Oligonucleotide
gcgtttgcttctcctgactacatgagattgataaacgcgc

SEQ ID NO: 7933 - DNA, 40 bp, Artificial Sequence
  Synthetic Oligonucleotide
gcgtttgcttatcctgactacatgagattaataaacgcgc

SEQ ID NO: 7934 - DNA, 40 bp, Artificial Sequence
  Synthetic Oligonucleotide
gcgtttgctctcctgactaccatgagattaataaacgcgc

SEQ ID NO: 7935 - DNA, 40 bp, Artificial Sequence
  Synthetic Oligonucleotide
gcgtttctttctcctgactacatgagattaataaacgcgc

SEQ ID NO: 7936 - DNA, 40 bp, Artificial Sequence
  Synthetic Oligonucleotide
gcgtttcttctcctgactacattgaggttaataaacgcgc

SEQ ID NO: 7937 - DNA, 40 bp, Artificial Sequence
  Synthetic Oligonucleotide
gcgtttcttctcctgactacatgagattaataacagcgac

SEQ ID NO: 7938 - DNA, 40 bp, Artificial Sequence
  Synthetic Oligonucleotide
gcgtttcttctccctgactacatgagattaataaacgcgc

SEQ ID NO: 7939 - DNA, 40 bp, Artificial Sequence
  Synthetic Oligonucleotide
gcgtttctctcctgactacattgagattaataaaccgcgc

SEQ ID NO: 7940 - DNA, 40 bp, Artificial Sequence
  Synthetic Oligonucleotide
gcgttgtggcactattcacagacttagctactatcgcggt

SEQ ID NO: 7941 - DNA, 40 bp, Artificial Sequence
  Synthetic Oligonucleotide
gcgttgtgcactattcacagacttagccttaatctgcggt

SEQ ID NO: 7942 - DNA, 40 bp, Artificial Sequence
  Synthetic Oligonucleotide
gcgttgtgacactattcacagacttagcttaatctgcggt

SEQ ID NO: 7943 - DNA, 40 bp, Artificial Sequence
  Synthetic Oligonucleotide
gcgttcttctccttgactacatgagattaataaaccgcgc

SEQ ID NO: 7944 - DNA, 40 bp, Artificial Sequence
  Synthetic Oligonucleotide
gcgttcttctccttgactacatgagattaagtaaacgcgc

SEQ ID NO: 7945 - DNA, 40 bp, Artificial Sequence
  Synthetic Oligonucleotide
gcgttcttctcctgactcacatgagattaatagatcgcgc

SEQ ID NO: 7946 - DNA, 40 bp, Artificial Sequence
  Synthetic Oligonucleotide
gcgttcactctctgactacatgagattaataaaccgcgtc

SEQ ID NO: 7947 - DNA, 40 bp, Artificial Sequence
  Synthetic Oligonucleotide
gcgtgttcttctcctgactacatgagattaataaacgcgc

SEQ ID NO: 7948 - DNA, 40 bp, Artificial Sequence
  Synthetic Oligonucleotide
gcgtgatcagctagtcgtgctttgtccactatgacattca

SEQ ID NO: 7949 - DNA, 40 bp, Artificial Sequence
  Synthetic Oligonucleotide
gcgtcttctccttcgactcacatgagattaataaacgcgc

SEQ ID NO: 7950 - DNA, 40 bp, Artificial Sequence
  Synthetic Oligonucleotide
gcggttttcttctcctgactacatgagattaataacgcgc

SEQ ID NO: 7951 - DNA, 40 bp, Artificial Sequence
  Synthetic Oligonucleotide
gcggttttcttctcctgactacatgagattaataaacgcg

SEQ ID NO: 7952 - DNA, 40 bp, Artificial Sequence
  Synthetic Oligonucleotide
gcggttttcttctcctgactacatagattaataaacgcgc

SEQ ID NO: 7953 - DNA, 40 bp, Artificial Sequence
  Synthetic Oligonucleotide
gcggtttgttctcctgactacatgagattaataaacgcgc

SEQ ID NO: 7954 - DNA, 40 bp, Artificial Sequence
  Synthetic Oligonucleotide
gcggtttgcttctctgactgcatgagattaataaacgcgc

SEQ ID NO: 7955 - DNA, 40 bp, Artificial Sequence
  Synthetic Oligonucleotide
gcggtttgcttctcctgactacatgagattataaacgcgc

SEQ ID NO: 7956 - DNA, 40 bp, Artificial Sequence
  Synthetic Oligonucleotide
gcggtttgcttctcctgactacatgagattaataaacgcg

SEQ ID NO: 7957 - DNA, 40 bp, Artificial Sequence
  Synthetic Oligonucleotide
gcggtttcttctccttactacatgagattaataaacgcgc

SEQ ID NO: 7958 - DNA, 40 bp, Artificial Sequence
  Synthetic Oligonucleotide
gcggtttcttctcctgactagatgagattaataaacgcgc

SEQ ID NO: 7959 - DNA, 40 bp, Artificial Sequence
  Synthetic Oligonucleotide
gcggtttcttctcctgactacattagattaataaacgcgc

SEQ ID NO: 7960 - DNA, 40 bp, Artificial Sequence
  Synthetic Oligonucleotide
gcggtttcttctcctgactacatgtgattaataaacgcgc

SEQ ID NO: 7961 - DNA, 40 bp, Artificial Sequence
  Synthetic Oligonucleotide
gcggtttcttctcctgactacatggagattaataacgcgc

SEQ ID NO: 7962 - DNA, 40 bp, Artificial Sequence
  Synthetic Oligonucleotide
gcggtttcttctcctgactacatgagtttaataaacgcgc

SEQ ID NO: 7963 - DNA, 40 bp, Artificial Sequence
  Synthetic Oligonucleotide
gcggtttcttctcctgactacatgagcttaataaacgcgc

SEQ ID NO: 7964 - DNA, 40 bp, Artificial Sequence
  Synthetic Oligonucleotide
gcggtttcttctcctgactacatgagattagtaaatgcgc

SEQ ID NO: 7965 - DNA, 40 bp, Artificial Sequence
  Synthetic Oligonucleotide
gcggtttcttctcctgactacatgagattagcaaacgcgc

SEQ ID NO: 7966 - DNA, 40 bp, Artificial Sequence
  Synthetic Oligonucleotide
gcggtttcttctcctgactacatgagattaatgaacgtgc

SEQ ID NO: 7967 - DNA, 40 bp, Artificial Sequence
  Synthetic Oligonucleotide
gcggtttcttctcctgactacatgagattaataaactcgc

SEQ ID NO: 7968 - DNA, 40 bp, Artificial Sequence
  Synthetic Oligonucleotide
gcggtttcttctcctgactacatgagattaataaacgtgt

SEQ ID NO: 7969 - DNA, 40 bp, Artificial Sequence
  Synthetic Oligonucleotide
gcggtttcttctcctgactacatgaaattaataaacgcgc

SEQ ID NO: 7970 - DNA, 40 bp, Artificial Sequence
  Synthetic Oligonucleotide
gcggtttcttctcctgactacataagattaatagacgcgc

SEQ ID NO: 7971 - DNA, 40 bp, Artificial Sequence
  Synthetic Oligonucleotide
gcggtttcttctcctgaccacatgagattaataagcgcgc

SEQ ID NO: 7972 - DNA, 40 bp, Artificial Sequence
  Synthetic Oligonucleotide
gcggtttcttcacctgactacatgagattaataaacgcgc

SEQ ID NO: 7973 - DNA, 40 bp, Artificial Sequence
  Synthetic Oligonucleotide
gcggtttctctccctgactacatgagattaataaacgcgc

SEQ ID NO: 7974 - DNA, 40 bp, Artificial Sequence
  Synthetic Oligonucleotide
gcggtttctactcctgactacatgagattaataaacgcgc

SEQ ID NO: 7975 - DNA, 40 bp, Artificial Sequence
  Synthetic Oligonucleotide
gcggtttcgtctcctgactacatgagattaataaacgcgc

SEQ ID NO: 7976 - DNA, 40 bp, Artificial Sequence
  Synthetic Oligonucleotide
gcggtttcactctctgactacatgagattaactaaacgcg

SEQ ID NO: 7977 - DNA, 40 bp, Artificial Sequence
  Synthetic Oligonucleotide
gcggtttattctcctgactacatgagattaataaacgcgc

SEQ ID NO: 7978 - DNA, 40 bp, Artificial Sequence
  Synthetic Oligonucleotide
gcggttcttctcctgactatcatgagattaataaacgcgc

SEQ ID NO: 7979 - DNA, 40 bp, Artificial Sequence
  Synthetic Oligonucleotide
gcggttcttctcctactacatgagattaagttaaacgcgc

SEQ ID NO: 7980 - DNA, 40 bp, Artificial Sequence
  Synthetic Oligonucleotide
gcggttcttctacctgactacatgagattaataaacgcgc

SEQ ID NO: 7981 - DNA, 40 bp, Artificial Sequence
  Synthetic Oligonucleotide
gcggttcttactcctgactacatgagattaataaacgcgc

SEQ ID NO: 7982 - DNA, 40 bp, Artificial Sequence
  Synthetic Oligonucleotide
gcggttccttctcctgactacatgagattaataaacgcac

SEQ ID NO: 7983 - DNA, 40 bp, Artificial Sequence
  Synthetic Oligonucleotide
gcggttccttctcctgactacatgagatcaataaacgcgc

SEQ ID NO: 7984 - DNA, 40 bp, Artificial Sequence
  Synthetic Oligonucleotide
gcggttccttctcccgactacatgagattaataaacgcgc

SEQ ID NO: 7985 - DNA, 40 bp, Artificial Sequence
  Synthetic Oligonucleotide
gcggttcactctctgactacatgagattaataaccgcgtc

SEQ ID NO: 7986 - DNA, 40 bp, Artificial Sequence
  Synthetic Oligonucleotide
gcggttacttctcctgactacatgagattaataaacgcgc

SEQ ID NO: 7987 - DNA, 40 bp, Artificial Sequence
  Synthetic Oligonucleotide
gcggtctcttctcctgactacataagattaataaacgcac

SEQ ID NO: 7988 - DNA, 40 bp, Artificial Sequence
  Synthetic Oligonucleotide
gcggtatcttctcctgactacatgaggttaataaacgcgc

SEQ ID NO: 7989 - DNA, 40 bp, Artificial Sequence
  Synthetic Oligonucleotide
gcggcttcttctcctgactacataagattaataaacgcgc

SEQ ID NO: 7990 - DNA, 40 bp, Artificial Sequence
  Synthetic Oligonucleotide
gcggctatcccgacgccatcgccatgcagccgataaatat

SEQ ID NO: 7991 - DNA, 40 bp, Artificial Sequence
  Synthetic Oligonucleotide
gcggattcttctcctcgactacatgagattataaacgcgc

SEQ ID NO: 7992 - DNA, 40 bp, Artificial Sequence
  Synthetic Oligonucleotide
gcggattcttctcctcgactacatgagattaataacgcgc

SEQ ID NO: 7993 - DNA, 40 bp, Artificial Sequence
  Synthetic Oligonucleotide
gcggattctctctctgactacatgagattaataaacgcgc

SEQ ID NO: 7994 - DNA, 40 bp, Artificial Sequence
  Synthetic Oligonucleotide
gcggattcgcttcgctcactacatgaagattataacgcgc

SEQ ID NO: 7995 - DNA, 40 bp, Artificial Sequence
  Synthetic Oligonucleotide
gcgcccgggactgcctcgattcctccgtctggtgtctgta

SEQ ID NO: 7996 - DNA, 40 bp, Artificial Sequence
  Synthetic Oligonucleotide
gcgccacgtctctgtacctctcctcggattcgtcctccaa

SEQ ID NO: 7997 - DNA, 40 bp, Artificial Sequence
  Synthetic Oligonucleotide
gcgcaccccgatagtcgtcttcactggaccacccgtgtta

SEQ ID NO: 7998 - DNA, 40 bp, Artificial Sequence
  Synthetic Oligonucleotide
gcgcaccccgatagtcatcttcactggaccacccgtgtta

SEQ ID NO: 7999 - DNA, 40 bp, Artificial Sequence
  Synthetic Oligonucleotide
gcgcaccccgatagtcatcttcactggaccacccgtatta

SEQ ID NO: 8000 - DNA, 40 bp, Artificial Sequence
  Synthetic Oligonucleotide
gcgcacagctcacttcgtctttgatcgaccacgctcataa

SEQ ID NO: 8001 - DNA, 40 bp, Artificial Sequence
  Synthetic Oligonucleotide
gcgattcttctcctgactacatgagattaactaaacgcgc

SEQ ID NO: 8002 - DNA, 40 bp, Artificial Sequence
  Synthetic Oligonucleotide
gcgatccttcctcagcttccgcggtgcaggatttgcacgt

SEQ ID NO: 8003 - DNA, 40 bp, Artificial Sequence
  Synthetic Oligonucleotide
gcgatccttcctcagcctccgcggtgcaggatttgcacgt

SEQ ID NO: 8004 - DNA, 40 bp, Artificial Sequence
  Synthetic Oligonucleotide
gcctatggtacgcctcgattccgcccatacatgcatgtaa

SEQ ID NO: 8005 - DNA, 40 bp, Artificial Sequence
  Synthetic Oligonucleotide
gccgtttcttctcctgactacatgagattaataaacgcgc

SEQ ID NO: 8006 - DNA, 40 bp, Artificial Sequence
  Synthetic Oligonucleotide
gccgtacgggtcggttttggtgggggactacccccttgta

SEQ ID NO: 8007 - DNA, 40 bp, Artificial Sequence
  Synthetic Oligonucleotide
gccgcattgggtcggttttggtggggactacccccttgta

SEQ ID NO: 8008 - DNA, 40 bp, Artificial Sequence
  Synthetic Oligonucleotide
gccgcatggtcggttttcggtgggggactacccccttgta

SEQ ID NO: 8009 - DNA, 40 bp, Artificial Sequence
  Synthetic Oligonucleotide
gccgcatgggtcggttttggtggggggactaccccttgta

SEQ ID NO: 8010 - DNA, 40 bp, Artificial Sequence
  Synthetic Oligonucleotide
gccgcatgggtcggttttggtgggggacctaccccttgta

SEQ ID NO: 8011 - DNA, 40 bp, Artificial Sequence
  Synthetic Oligonucleotide
gccgcatgggtcggttttggtggggacctacccccttgta

SEQ ID NO: 8012 - DNA, 40 bp, Artificial Sequence
  Synthetic Oligonucleotide
gccgcatgggtcggttttggtgagggactacccccttgta

SEQ ID NO: 8013 - DNA, 40 bp, Artificial Sequence
  Synthetic Oligonucleotide
gccgcatgggtcggttttggtcggggactacccccttgta

SEQ ID NO: 8014 - DNA, 40 bp, Artificial Sequence
  Synthetic Oligonucleotide
gccgcatgggtcggttttggctggggactacccccttgta

SEQ ID NO: 8015 - DNA, 40 bp, Artificial Sequence
  Synthetic Oligonucleotide
gccgcatgggtcggttttggctggggacgtaccccttgta

SEQ ID NO: 8016 - skipped

SEQ ID NO: 8017 - DNA, 40 bp, Artificial Sequence
  Synthetic Oligonucleotide
gccgcatgggtcggtttggtgggggacctacccccttgta

SEQ ID NO: 8018 - DNA, 40 bp, Artificial Sequence
  Synthetic Oligonucleotide
gccgcatgggtcggtttcggtgggggactacccccttgta

SEQ ID NO: 8019 - DNA, 40 bp, Artificial Sequence
  Synthetic Oligonucleotide
gccgcatgggtccggtttggtgggggactacccccttgta

SEQ ID NO: 8020 - DNA, 40 bp, Artificial Sequence
  Synthetic Oligonucleotide
gcccgggacgcctcgatcctcgcataatatgatacgtctg

SEQ ID NO: 8021 - DNA, 40 bp, Artificial Sequence
  Synthetic Oligonucleotide
gcccgctgcctctattcgtctgatgatgtgcacctcgggt

SEQ ID NO: 8022 - DNA, 40 bp, Artificial Sequence
  Synthetic Oligonucleotide
gcccgcctccggagccctcctaagtgcactttaaaccgcg

SEQ ID NO: 8023 - DNA, 40 bp, Artificial Sequence
  Synthetic Oligonucleotide
gcccgcctccgaagccctcctaagtgcactttagaccgcg

SEQ ID NO: 8024 - DNA, 40 bp, Artificial Sequence
  Synthetic Oligonucleotide
gcccgcctcccgaagcctcctaagtgcactttaaaccgcg

SEQ ID NO: 8025 - DNA, 40 bp, Artificial Sequence
  Synthetic Oligonucleotide
gcccatggtacgccccgattccgcccatacatgcatgtaa

SEQ ID NO: 8026 - DNA, 40 bp, Artificial Sequence
  Synthetic Oligonucleotide
gcccatggtacacctcgattccgcccatacatgcatgtaa

SEQ ID NO: 8027 - DNA, 40 bp, Artificial Sequence
  Synthetic Oligonucleotide
gcatcctcctgacggtctgttgatggctacatcattgttc

SEQ ID NO: 8028 - DNA, 40 bp, Artificial Sequence
  Synthetic Oligonucleotide
gcagttttcttctcctgactacatgagattaataatgcgc

SEQ ID NO: 8029 - DNA, 40 bp, Artificial Sequence
  Synthetic Oligonucleotide
gcactattccggtaagtcatcgtttgaccgtttgttgcaa

SEQ ID NO: 8030 - DNA, 40 bp, Artificial Sequence
  Synthetic Oligonucleotide
gcactatcgtttcgtcgtcctcttgtggtattgcgcatgc

SEQ ID NO: 8031 - DNA, 40 bp, Artificial Sequence
  Synthetic Oligonucleotide
gcactatcgtttcgctcgtcctcttgtggtattgcgcatg

SEQ ID NO: 8032 - DNA, 40 bp, Artificial Sequence
  Synthetic Oligonucleotide
gcactatccgtttgtccgtcctcttgtgtattgcgcatgc

SEQ ID NO: 8033 - DNA, 40 bp, Artificial Sequence
  Synthetic Oligonucleotide
gcacgttcactcggatgtcatcctccaagtgctcgcctcg

SEQ ID NO: 8034 - DNA, 40 bp, Artificial Sequence
  Synthetic Oligonucleotide
gcaccggggcccgcctcaagctagctacctccattgtctg

SEQ ID NO: 8035 - DNA, 40 bp, Artificial Sequence
  Synthetic Oligonucleotide
gattcgccagtcacatcaactatgatgacgcttgactgga

SEQ ID NO: 8036 - DNA, 40 bp, Artificial Sequence
  Synthetic Oligonucleotide
gatggtccatgagcctctggcactatccagttgacgctca

SEQ ID NO: 8037 - DNA, 40 bp, Artificial Sequence
  Synthetic Oligonucleotide
gatctactcatcaagcgctatcctgaacaccgatagtacg

SEQ ID NO: 8038 - DNA, 40 bp, Artificial Sequence
  Synthetic Oligonucleotide
gatcggctcgacgttgccgggctaccgccattttttttcg

SEQ ID NO: 8039 - DNA, 40 bp, Artificial Sequence
  Synthetic Oligonucleotide
gatcggcgtcgagtagctctatactgcactatcagtttgt

SEQ ID NO: 8040 - DNA, 40 bp, Artificial Sequence
  Synthetic Oligonucleotide
gatcggcgtcgagtaactctcatactgcactatcagttgt

SEQ ID NO: 8041 - DNA, 40 bp, Artificial Sequence
  Synthetic Oligonucleotide
gatcggagactactccgttggtctgcaggtatcaccacga

SEQ ID NO: 8042 - DNA, 40 bp, Artificial Sequence
  Synthetic Oligonucleotide
gatcgcgctgccctttgtttaaggcctttatacgaacgca

SEQ ID NO: 8043 - DNA, 40 bp, Artificial Sequence
  Synthetic Oligonucleotide
gatcgcactgccctttgtttaaggcctttatacaaacgca

SEQ ID NO: 8044 - DNA, 40 bp, Artificial Sequence
  Synthetic Oligonucleotide
gatcgacgctgccctttgtttaaggcctttatacaacgca

SEQ ID NO: 8045 - DNA, 40 bp, Artificial Sequence
  Synthetic Oligonucleotide
gatccggacgccctcgatcctcgcatatataatacgtctg

SEQ ID NO: 8046 - DNA, 40 bp, Artificial Sequence
  Synthetic Oligonucleotide
gatccgacgcctgcctttgttaagcctttatacaaacgca

SEQ ID NO: 8047 - DNA, 40 bp, Artificial Sequence
  Synthetic Oligonucleotide
gatccatggtacgcctcgattccgcccatacatgctgtaa

SEQ ID NO: 8048 - DNA, 40 bp, Artificial Sequence
  Synthetic Oligonucleotide
gatccatggtacgcctcgatccgcccatacatgcatgtaa

SEQ ID NO: 8049 - DNA, 40 bp, Artificial Sequence
  Synthetic Oligonucleotide
gatcatcgctgccctttgttaaggcctttatacaaacgca

SEQ ID NO: 8050 - DNA, 40 bp, Artificial Sequence
  Synthetic Oligonucleotide
gatcagcgctgcctttcgttaaggcctttatacaaacgca

SEQ ID NO: 8051 - DNA, 40 bp, Artificial Sequence
  Synthetic Oligonucleotide
gatcagcgctgccttgtttaaggcctttatacaaactgca

SEQ ID NO: 8052 - DNA, 40 bp, Artificial Sequence
  Synthetic Oligonucleotide
gatcagcgctgccttgtttaaggcctttagtacaaacgca

SEQ ID NO: 8053 - DNA, 40 bp, Artificial Sequence
  Synthetic Oligonucleotide
gatcacgctgtccttgtttaaggcctttatacaaactgca

SEQ ID NO: 8054 - DNA, 40 bp, Artificial Sequence
  Synthetic Oligonucleotide
gatcacgctgcctttgtttaaggcctttatacaaactgca

SEQ ID NO: 8055 - DNA, 40 bp, Artificial Sequence
  Synthetic Oligonucleotide
gatcacgctgccctttgtttaatgcctttatacaaacgca

SEQ ID NO: 8056 - DNA, 40 bp, Artificial Sequence
  Synthetic Oligonucleotide
gatcacgctgccctttgtttaaggcctttatacaaatgca

SEQ ID NO: 8057 - DNA, 40 bp, Artificial Sequence
  Synthetic Oligonucleotide
gatcacgctgccctttgtttaaggcctttatacaaacgcc

SEQ ID NO: 8058 - DNA, 40 bp, Artificial Sequence
  Synthetic Oligonucleotide
gatcacgctgccctttgtttaaggaccttatacaaacgca

SEQ ID NO: 8059 - DNA, 40 bp, Artificial Sequence
  Synthetic Oligonucleotide
gatcacgctgccctttgttcaagcctttatacaaactgca

SEQ ID NO: 8060 - DNA, 40 bp, Artificial Sequence
  Synthetic Oligonucleotide
gatcacgctgccctttgttaaggcctttattacaaacgca

SEQ ID NO: 8061 - DNA, 40 bp, Artificial Sequence
  Synthetic Oligonucleotide
gatcacactgcctttcgtttaaggcctttatacaaacgca

SEQ ID NO: 8062 - DNA, 40 bp, Artificial Sequence
  Synthetic Oligonucleotide
gatatggtcgctttgccgccttgttcactccgtttggtac

SEQ ID NO: 8063 - DNA, 40 bp, Artificial Sequence
  Synthetic Oligonucleotide
gataagctcgctaatgccgcctcgtctctaacgtcgtgcg

SEQ ID NO: 8064 - DNA, 40 bp, Artificial Sequence
  Synthetic Oligonucleotide
gagtcatttgtaatggtgctaaagacaccacccaagcccc

SEQ ID NO: 8065 - DNA, 40 bp, Artificial Sequence
  Synthetic Oligonucleotide
gagccggggcccgcctcaagctagctacctccattgtctg

SEQ ID NO: 8066 - DNA, 40 bp, Artificial Sequence
  Synthetic Oligonucleotide
gagatctcggattcggcgtactacttggacaggttccttc

SEQ ID NO: 8067 - DNA, 40 bp, Artificial Sequence
  Synthetic Oligonucleotide
gagatctcggatctggcgtactgtcgtgacaggttccttc

SEQ ID NO: 8068 - DNA, 40 bp, Artificial Sequence
  Synthetic Oligonucleotide
gagatctcggatctggcgtactacttggacaagttccttc

SEQ ID NO: 8069 - DNA, 40 bp, Artificial Sequence
  Synthetic Oligonucleotide
gagatctcggatctggcgcactacttggacaggttcctcc

SEQ ID NO: 8070 - DNA, 40 bp, Artificial Sequence
  Synthetic Oligonucleotide
gagatctcggatctgcgtactacttcggacaggttccttc

SEQ ID NO: 8071 - DNA, 40 bp, Artificial Sequence
  Synthetic Oligonucleotide
gagatctcgatctggcgtactacttggaacaggttccttc

SEQ ID NO: 8072 - DNA, 40 bp, Artificial Sequence
  Synthetic Oligonucleotide
gagaactcggatctggcgtactacttggacaggttccttc

SEQ ID NO: 8073 - DNA, 40 bp, Artificial Sequence
  Synthetic Oligonucleotide
gactatccgtagatccgtcactcactacgcgtatggaatc

SEQ ID NO: 8074 - DNA, 40 bp, Artificial Sequence
  Synthetic Oligonucleotide
gactacctgcatcgagcgggcgaagacgagagatgctcgt

SEQ ID NO: 8075 - DNA, 40 bp, Artificial Sequence
  Synthetic Oligonucleotide
gactacccctatcgagcatggcgtcgccacgtaactggag

SEQ ID NO: 8076 - DNA, 40 bp, Artificial Sequence
  Synthetic Oligonucleotide
gacggttccttctcctgactacatgagattaataacacgc

SEQ ID NO: 8077 - DNA, 40 bp, Artificial Sequence
  Synthetic Oligonucleotide
gacgggttcttctcctgactacatgagattaataacgcgc

SEQ ID NO: 8078 - DNA, 40 bp, Artificial Sequence
  Synthetic Oligonucleotide
gacgcatgggtcggttttggtgggggactacccccttgta

SEQ ID NO: 8079 - DNA, 40 bp, Artificial Sequence
  Synthetic Oligonucleotide
gacctactcatcaggcgctatcctgaacaccgatagtacg

SEQ ID NO: 8080 - DNA, 40 bp, Artificial Sequence
  Synthetic Oligonucleotide
gaccatggtacgcctcgattccccccatacatgcatgtaa

SEQ ID NO: 8081 - DNA, 40 bp, Artificial Sequence
  Synthetic Oligonucleotide
gaccaggtgcaccatacggaattccgtaatttgggaactg

SEQ ID NO: 8082 - DNA, 40 bp, Artificial Sequence
  Synthetic Oligonucleotide
gaactggatcctcgtcctccatactacgtggatttagatt

SEQ ID NO: 8083 - DNA, 40 bp, Artificial Sequence
  Synthetic Oligonucleotide
gaactggatcctcgcctccatactatgtggatttagattt

SEQ ID NO: 8084 - DNA, 40 bp, Artificial Sequence
  Synthetic Oligonucleotide
gaactggatcctcgcctccatactacgtggatttagtttt

SEQ ID NO: 8085 - DNA, 40 bp, Artificial Sequence
  Synthetic Oligonucleotide
gaactggatcctcgcctccacactacgtggatttagattt

SEQ ID NO: 8086 - DNA, 40 bp, Artificial Sequence
  Synthetic Oligonucleotide
gaaccggtgaccgcctcaagctagctacctccattgtctg

SEQ ID NO: 8087 - DNA, 40 bp, Artificial Sequence
  Synthetic Oligonucleotide
gaaccggggaccgcctcaagctagctacctacattgtctg

SEQ ID NO: 8088 - DNA, 40 bp, Artificial Sequence
  Synthetic Oligonucleotide
gaaccgggcccgcctcaagtctgctacctccattgtcgtg

SEQ ID NO: 8089 - DNA, 40 bp, Artificial Sequence
  Synthetic Oligonucleotide
gaaccgggcccgcctcaagctagctacctaccattgtctg

SEQ ID NO: 8090 - DNA, 40 bp, Artificial Sequence
  Synthetic Oligonucleotide
gaaccgggcccgcctcaagcctagctacctccattgtctg

SEQ ID NO: 8091 - DNA, 40 bp, Artificial Sequence
  Synthetic Oligonucleotide
gaaccggatcctcgcctccatactacgtggatttagactt

SEQ ID NO: 8092 - DNA, 40 bp, Artificial Sequence
  Synthetic Oligonucleotide
gaaacggggccccgctcaagctagctacctccattgtctg

SEQ ID NO: 8093 - DNA, 40 bp, Artificial Sequence
  Synthetic Oligonucleotide
gaaaccggggtccgcctcaagctagctacctcattgtctg

SEQ ID NO: 8094 - DNA, 40 bp, Artificial Sequence
  Synthetic Oligonucleotide
gaaaccggggcccgctcaagctagctacctccattgtctg

SEQ ID NO: 8095 - DNA, 40 bp, Artificial Sequence
  Synthetic Oligonucleotide
gaaaacgctagactactaccgtgaactttcccgctcatct

SEQ ID NO: 8096 - DNA, 40 bp, Artificial Sequence
  Synthetic Oligonucleotide
gaaaaccgggggccgctcaagctagctacctcattgtctg

SEQ ID NO: 8097 - DNA, 40 bp, Artificial Sequence
  Synthetic Oligonucleotide
cttctcggtcattgactacaatgttaaaggttgtcgcaat

SEQ ID NO: 8098 - DNA, 40 bp, Artificial Sequence
  Synthetic Oligonucleotide
cttcctcggatcttcaatatattgccgcctcgcatccgac

SEQ ID NO: 8099 - DNA, 40 bp, Artificial Sequence
  Synthetic Oligonucleotide
cttcctcggatcttcaacgtattgccgcctcgcatccgac

SEQ ID NO: 8100 - DNA, 40 bp, Artificial Sequence
  Synthetic Oligonucleotide
cttcctcggatcttcaacatattgccacctcgcatccgac

SEQ ID NO: 8101 - DNA, 40 bp, Artificial Sequence
  Synthetic Oligonucleotide
cttcctcggatcttcaacatactgccgcctcgcatccgac

SEQ ID NO: 8102 - DNA, 40 bp, Artificial Sequence
  Synthetic Oligonucleotide
cttcctcggatctgcaacatattgccgcctcgcatccgac

SEQ ID NO: 8103 - DNA, 40 bp, Artificial Sequence
  Synthetic Oligonucleotide
cttcctcggatctccaacatattgccgcctcgcatccgac

SEQ ID NO: 8104 - DNA, 40 bp, Artificial Sequence
  Synthetic Oligonucleotide
cttccgatgctcccaggaacccgactcgttaaagtctgta

SEQ ID NO: 8105 - DNA, 40 bp, Artificial Sequence
  Synthetic Oligonucleotide
cttagtggtttcgccgcccctctgtttagtggccattgga

SEQ ID NO: 8106 - DNA, 40 bp, Artificial Sequence
  Synthetic Oligonucleotide
cttagtgatttcgccgcccctctgtttaatggccattgga

SEQ ID NO: 8107 - DNA, 40 bp, Artificial Sequence
  Synthetic Oligonucleotide
cttagtgatttcgccgcccctctgtctagtggccattgga

SEQ ID NO: 8108 - DNA, 40 bp, Artificial Sequence
  Synthetic Oligonucleotide
cttagtgattacgccgcccctctgtttagtggccattgga

SEQ ID NO: 8109 - DNA, 40 bp, Artificial Sequence
  Synthetic Oligonucleotide
cttagtaatttcgccgcccctctgtttagtggccattgga

SEQ ID NO: 8110 - DNA, 40 bp, Artificial Sequence
  Synthetic Oligonucleotide
cttacgtgatttcgccgcccctctgtctagtggccattga

SEQ ID NO: 8111 - DNA, 40 bp, Artificial Sequence
  Synthetic Oligonucleotide
ctgttttttctcggataactggagccgcctcacctaccaa

SEQ ID NO: 8112 - DNA, 40 bp, Artificial Sequence
  Synthetic Oligonucleotide
ctggtccatgagtcttctggcactatccagttgacgctca

SEQ ID NO: 8113 - DNA, 40 bp, Artificial Sequence
  Synthetic Oligonucleotide
ctggccggattcgccttggtccttccgtgttgcaacagac

SEQ ID NO: 8114 - DNA, 40 bp, Artificial Sequence
  Synthetic Oligonucleotide
ctgctccggatgagccacctcgcattcctccgttcgtctg

SEQ ID NO: 8115 - DNA, 40 bp, Artificial Sequence
  Synthetic Oligonucleotide
ctgctattctcggatctttacttttcgtttcctgtcatcc

SEQ ID NO: 8116 - DNA, 40 bp, Artificial Sequence
  Synthetic Oligonucleotide
ctgcctctgctctccctctcggatcgcgtacgcggatatg

SEQ ID NO: 8117 - DNA, 40 bp, Artificial Sequence
  Synthetic Oligonucleotide
ctgcctctgctctccccctcggatcgcgtacgtggatatg

SEQ ID NO: 8118 - DNA, 40 bp, Artificial Sequence
  Synthetic Oligonucleotide
ctgcctcgatcgtcacgcactgggcccgataatagtattg

SEQ ID NO: 8119 - DNA, 40 bp, Artificial Sequence
  Synthetic Oligonucleotide
ctgcaccccgattagtcatcttcactggacacccgtgtta

SEQ ID NO: 8120 - DNA, 40 bp, Artificial Sequence
  Synthetic Oligonucleotide
ctcttttccggcaggacgtctttcgtgcactatcacgatt

SEQ ID NO: 8121 - DNA, 40 bp, Artificial Sequence
  Synthetic Oligonucleotide
ctcttgtccggcatgacgtctttcgtgcactatcacgatt

SEQ ID NO: 8122 - DNA, 40 bp, Artificial Sequence
  Synthetic Oligonucleotide
ctcttgtccggcaggacgtctttcgtgcactatcacgact

SEQ ID NO: 8123 - DNA, 40 bp, Artificial Sequence
  Synthetic Oligonucleotide
ctcttattcggcaggacgtctttcgtgcgctatcgcgatt

SEQ ID NO: 8124 - DNA, 40 bp, Artificial Sequence
  Synthetic Oligonucleotide
ctcttatcgggcaggacgtctttcgtgcactgtcacgatt

SEQ ID NO: 8125 - DNA, 40 bp, Artificial Sequence
  Synthetic Oligonucleotide
ctcttatccgtcagacggtcttcttgcgactatcacgatt

SEQ ID NO: 8126 - DNA, 40 bp, Artificial Sequence
  Synthetic Oligonucleotide
ctcttatccggtcgggacgtctttcgtgcactatcacgat

SEQ ID NO: 8127 - DNA, 40 bp, Artificial Sequence
  Synthetic Oligonucleotide
ctcttatccggtcaggcgtctttcgtgcactatcacgatt

SEQ ID NO: 8128 - DNA, 40 bp, Artificial Sequence
  Synthetic Oligonucleotide
ctcttatccggtcaggatcgtcttcgtgcactatcacgat

SEQ ID NO: 8129 - DNA, 40 bp, Artificial Sequence
  Synthetic Oligonucleotide
ctcttatccggtcaggacgtctttctgcgactatcacgat

SEQ ID NO: 8130 - DNA, 40 bp, Artificial Sequence
  Synthetic Oligonucleotide
ctcttatccggtcaggacgtctttcgtgcactatcacatt

SEQ ID NO: 8131 - DNA, 40 bp, Artificial Sequence
  Synthetic Oligonucleotide
ctcttatccggtcaggacgtctttcgcgcacatcacgatt

SEQ ID NO: 8132 - DNA, 40 bp, Artificial Sequence
  Synthetic Oligonucleotide
ctcttatccggtcaggacgtctttcatgcactatcacgat

SEQ ID NO: 8133 - DNA, 40 bp, Artificial Sequence
  Synthetic Oligonucleotide
ctcttatccggtcaggacgtctctcgtgcactatcacgat

SEQ ID NO: 8134 - DNA, 40 bp, Artificial Sequence
  Synthetic Oligonucleotide
ctcttatccggtcaggacgcctttcgtgcactatcacgat

SEQ ID NO: 8135 - DNA, 40 bp, Artificial Sequence
  Synthetic Oligonucleotide
ctcttatccggtcagatcgtccttcgtgcactatcacgat

SEQ ID NO: 8136 - DNA, 40 bp, Artificial Sequence
  Synthetic Oligonucleotide
ctcttatccggtcagacgtctttcgtgcgctatcacgatt

SEQ ID NO: 8137 - DNA, 40 bp, Artificial Sequence
  Synthetic Oligonucleotide
ctcttatccggtcagacgtccttcttgcgactatcacgat

SEQ ID NO: 8138 - DNA, 40 bp, Artificial Sequence
  Synthetic Oligonucleotide
ctcttatccggctggacttctttcgtgcactatcacgatt

SEQ ID NO: 8139 - DNA, 40 bp, Artificial Sequence
  Synthetic Oligonucleotide
ctcttatccggctggacgtctttcgtgcactatcacgatc

SEQ ID NO: 8140 - DNA, 40 bp, Artificial Sequence
  Synthetic Oligonucleotide
ctcttatccggcggagagtctttcgtgcactatcacgatt

SEQ ID NO: 8141 - DNA, 40 bp, Artificial Sequence
  Synthetic Oligonucleotide
ctcttatccggcatgacgtctttcgtgcactatcacaatt

SEQ ID NO: 8142 - DNA, 40 bp, Artificial Sequence
  Synthetic Oligonucleotide
ctcttatccggcaggacgtctttcttgcactatcacgatt

SEQ ID NO: 8143 - DNA, 40 bp, Artificial Sequence
  Synthetic Oligonucleotide
ctcttatccggcaggacgtctttctgacactatcacgatt

SEQ ID NO: 8144 - DNA, 40 bp, Artificial Sequence
  Synthetic Oligonucleotide
ctcttatccggcaggacgtctttcgtgcgactatcacgat

SEQ ID NO: 8145 - DNA, 40 bp, Artificial Sequence
  Synthetic Oligonucleotide
ctcttatccggcaggacgtctttcgtgccctatcacgatt

SEQ ID NO: 8146 - DNA, 40 bp, Artificial Sequence
  Synthetic Oligonucleotide
ctcttatccggcaggacgtctttcgtgcactatccacgat

SEQ ID NO: 8147 - DNA, 40 bp, Artificial Sequence
  Synthetic Oligonucleotide
ctcttatccggcaggacgtctttcgtgcactatcaagatt

SEQ ID NO: 8148 - DNA, 40 bp, Artificial Sequence
  Synthetic Oligonucleotide
ctcttatccggcaggacgtctttcgtgcactaccacgatc

SEQ ID NO: 8149 - DNA, 40 bp, Artificial Sequence
  Synthetic Oligonucleotide
ctcttatccggcaggacgtctttcgcgcactatcacggtt

SEQ ID NO: 8150 - DNA, 40 bp, Artificial Sequence
  Synthetic Oligonucleotide
ctcttatccggcaggacgtctttccgtgcactatcacgat

SEQ ID NO: 8151 - DNA, 40 bp, Artificial Sequence
  Synthetic Oligonucleotide
ctcttatccggcaggacgtcttccgtgcactatcgcgatt

SEQ ID NO: 8152 - DNA, 40 bp, Artificial Sequence
  Synthetic Oligonucleotide
ctcttatccggcaggacgtccttcgtgcactatcacgact

SEQ ID NO: 8153 - DNA, 40 bp, Artificial Sequence
  Synthetic Oligonucleotide
ctcttatccggcaggacgcctttcgtgcgccatcacgatt

SEQ ID NO: 8154 - DNA, 40 bp, Artificial Sequence
  Synthetic Oligonucleotide
ctcttatccggcaggacatctttcgtgcactatcacggtt

SEQ ID NO: 8155 - DNA, 40 bp, Artificial Sequence
  Synthetic Oligonucleotide
ctcttatccggcaggacatcgttcgtgcactatcacgatt

SEQ ID NO: 8156 - DNA, 40 bp, Artificial Sequence
  Synthetic Oligonucleotide
ctcttatccggcagagcgtctttcgtgcactatcacgatt

SEQ ID NO: 8157 - DNA, 40 bp, Artificial Sequence
  Synthetic Oligonucleotide
ctcttatccggcagacgtctttcgttgcactatcacgatt

SEQ ID NO: 8158 - DNA, 40 bp, Artificial Sequence
  Synthetic Oligonucleotide
ctcttatccggcagacgcctttcgttgcactatcacgatt

SEQ ID NO: 8159 - DNA, 40 bp, Artificial Sequence
  Synthetic Oligonucleotide
ctcttatccggcagaacgtccttcgtgcactatcacgatt

SEQ ID NO: 8160 - DNA, 40 bp, Artificial Sequence
  Synthetic Oligonucleotide
ctcttatccggcaaggcgtctttcgtgcactatcacgatt

SEQ ID NO: 8161 - DNA, 40 bp, Artificial Sequence
  Synthetic Oligonucleotide
ctcttatccggcaagacgtctttcgtgcactatcgcgatt

SEQ ID NO: 8162 - DNA, 40 bp, Artificial Sequence
  Synthetic Oligonucleotide
ctcttatccggcaagacatctttcgtgcactatcacgatt

SEQ ID NO: 8163 - DNA, 40 bp, Artificial Sequence
  Synthetic Oligonucleotide
ctcttatccgcgagcaggctttcttcgcactatcacgatt

SEQ ID NO: 8164 - DNA, 40 bp, Artificial Sequence
  Synthetic Oligonucleotide
ctcttatccgagcaaggcttccttcgtcactatcacgatt

SEQ ID NO: 8165 - DNA, 40 bp, Artificial Sequence
  Synthetic Oligonucleotide
ctcttatccgacaggacgtctttcgtgcgctatcacgatt

SEQ ID NO: 8166 - DNA, 40 bp, Artificial Sequence
  Synthetic Oligonucleotide
ctcttatccgacaggacgtccttcgtgcactatcacgatt

SEQ ID NO: 8167 - DNA, 40 bp, Artificial Sequence
  Synthetic Oligonucleotide
ctcttatcccggcaggacgtcttcgtgcactatcacgatt

SEQ ID NO: 8168 - DNA, 40 bp, Artificial Sequence
  Synthetic Oligonucleotide
ctcttatccagcaggacgtctttcgtgcattatcacgatt

SEQ ID NO: 8169 - DNA, 40 bp, Artificial Sequence
  Synthetic Oligonucleotide
ctcttatcaggcgggacgtctttcgtgcactatcacgatt

SEQ ID NO: 8170 - DNA, 40 bp, Artificial Sequence
  Synthetic Oligonucleotide
ctcttatcaggcaagacgtctttcgtgcactatcacgatt

SEQ ID NO: 8171 - DNA, 40 bp, Artificial Sequence
  Synthetic Oligonucleotide
ctcttagtccgcagatcgtcttcgtgcactcatcacgatt

SEQ ID NO: 8172 - DNA, 40 bp, Artificial Sequence
  Synthetic Oligonucleotide
ctcttaccgcgcaggacgtctttcgtgcactatcacgatt

SEQ ID NO: 8173 - DNA, 40 bp, Artificial Sequence
  Synthetic Oligonucleotide
ctcttacccggcaggacatctttcgtgcactatcacgatt

SEQ ID NO: 8174 - DNA, 40 bp, Artificial Sequence
  Synthetic Oligonucleotide
ctctgatccggcaggacgtctttcgtgcactatcacgatt

SEQ ID NO: 8175 - DNA, 40 bp, Artificial Sequence
  Synthetic Oligonucleotide
ctctatctgtttgtccgtcctcttgtggtattgcgcatgc

SEQ ID NO: 8176 - DNA, 40 bp, Artificial Sequence
  Synthetic Oligonucleotide
ctctatccgtagatccgtcactcactacgcgtatggaatc

SEQ ID NO: 8177 - DNA, 40 bp, Artificial Sequence
  Synthetic Oligonucleotide
ctctatccggtcaggacgtctttcgtgcactatcacgatt

SEQ ID NO: 8178 - DNA, 40 bp, Artificial Sequence
  Synthetic Oligonucleotide
ctcgttatcccgcagacgtctttcgtgcactatcacgatt

SEQ ID NO: 8179 - DNA, 40 bp, Artificial Sequence
  Synthetic Oligonucleotide
ctcgtatccggcagaacgtctttcgtgcactatcacgatt

SEQ ID NO: 8180 - DNA, 40 bp, Artificial Sequence
  Synthetic Oligonucleotide
ctcgaaacgctattttctgggaagccgcatctcgagcgaa

SEQ ID NO: 8181 - DNA, 40 bp, Artificial Sequence
  Synthetic Oligonucleotide
ctccttatccgtcaggacgtcttcgtgcactatcacgatt

SEQ ID NO: 8182 - DNA, 40 bp, Artificial Sequence
  Synthetic Oligonucleotide
ctcctatccgttgtccgtcctcttgtggtattgcgcatgc

SEQ ID NO: 8183 - DNA, 40 bp, Artificial Sequence
  Synthetic Oligonucleotide
ctcctatccggcaggacgtctttcgtgcgctatcacgatt

SEQ ID NO: 8184 - DNA, 40 bp, Artificial Sequence
  Synthetic Oligonucleotide
ctcctatccggcaggacgtctttcgtgcactgtcacgatt

SEQ ID NO: 8185 - DNA, 40 bp, Artificial Sequence
  Synthetic Oligonucleotide
ctcctatccggcaggacgtctttcgtgcactattacgatt

SEQ ID NO: 8186 - DNA, 40 bp, Artificial Sequence
  Synthetic Oligonucleotide
ctcctatccggcaggacgtctttcgtgcactatcacgatc

SEQ ID NO: 8187 - DNA, 40 bp, Artificial Sequence
  Synthetic Oligonucleotide
ctcctatccggcaggacgtctttcgtgcactatcacgata

SEQ ID NO: 8188 - DNA, 40 bp, Artificial Sequence
  Synthetic Oligonucleotide
ctcctaccgccgaggacgtctttcgtgcactatcacgatt

SEQ ID NO: 8189 - DNA, 40 bp, Artificial Sequence
  Synthetic Oligonucleotide
ctccggagcgcctcgatcctcgcataatatgatacgtctg

SEQ ID NO: 8190 - DNA, 40 bp, Artificial Sequence
  Synthetic Oligonucleotide
ctccggaacgcctcgatcctcgcacaatatgatacatctg

SEQ ID NO: 8191 - DNA, 40 bp, Artificial Sequence
  Synthetic Oligonucleotide
ctcccgaagcctccccgaggtgccgcctttgatacgtttg

SEQ ID NO: 8192 - DNA, 40 bp, Artificial Sequence
  Synthetic Oligonucleotide
ctccaagacgattgtcgttattgccggactacctgcatct

SEQ ID NO: 8193 - DNA, 40 bp, Artificial Sequence
  Synthetic Oligonucleotide
ctccaagacgattgtcgttattgccggactacccgcattt

SEQ ID NO: 8194 - DNA, 40 bp, Artificial Sequence
  Synthetic Oligonucleotide
ctccaagacaattgtcgttattgccggactacctgcattt

SEQ ID NO: 8195 - DNA, 40 bp, Artificial Sequence
  Synthetic Oligonucleotide
ctcactatcggcaggactctttcgtgcacctatcacgatt

SEQ ID NO: 8196 - DNA, 40 bp, Artificial Sequence
  Synthetic Oligonucleotide
ctcaaaacatagccgcccctctgaaacgattggccagctt

SEQ ID NO: 8197 - DNA, 40 bp, Artificial Sequence
  Synthetic Oligonucleotide
ctattatccggcaggacgtctttcgtgcactatcacgatt

SEQ ID NO: 8198 - DNA, 40 bp, Artificial Sequence
  Synthetic Oligonucleotide
ctagtgatttcgcccgcccctctgtttagtggccattgga

SEQ ID NO: 8199 - DNA, 40 bp, Artificial Sequence
  Synthetic Oligonucleotide
ctaggctttcacgcacgcggatttgtacccgaactgggtt

SEQ ID NO: 8200 - DNA, 40 bp, Artificial Sequence
  Synthetic Oligonucleotide
ctaggcccggtttgcccgcctcagttctcctacggttatt

SEQ ID NO: 8201 - DNA, 40 bp, Artificial Sequence
  Synthetic Oligonucleotide
ctactttctcggatcactaattgccgcatcacgcactccc

SEQ ID NO: 8202 - DNA, 40 bp, Artificial Sequence
  Synthetic Oligonucleotide
ctactccggatgagccaccacgcattcctccgttcgtctg

SEQ ID NO: 8203 - DNA, 40 bp, Artificial Sequence
  Synthetic Oligonucleotide
ctactccggataagccacctcgcattcctccgttcgtctg

SEQ ID NO: 8204 - DNA, 40 bp, Artificial Sequence
  Synthetic Oligonucleotide
cgtcttatcggctaggacggtcttctgcactatcacgatt

SEQ ID NO: 8205 - DNA, 40 bp, Artificial Sequence
  Synthetic Oligonucleotide
cgtcttatccggcaggacgtcttcgttgcactatcacgat

SEQ ID NO: 8206 - DNA, 40 bp, Artificial Sequence
  Synthetic Oligonucleotide
cgtctgaccctgttatggactaccatatcagaaaggtact

SEQ ID NO: 8207 - DNA, 40 bp, Artificial Sequence
  Synthetic Oligonucleotide
cgtcattaatccttgttggactaccaccaaaaacgattaa

SEQ ID NO: 8208 - DNA, 40 bp, Artificial Sequence
  Synthetic Oligonucleotide
cgtaggtcgcctggtccgccttgatcctctataccgtctg

SEQ ID NO: 8209 - DNA, 40 bp, Artificial Sequence
  Synthetic Oligonucleotide
cggtttgcttctcctgactacatgagattaataaacgcgc

SEQ ID NO: 8210 - DNA, 40 bp, Artificial Sequence
  Synthetic Oligonucleotide
cggttcttctcctgactacatgagagttaataaaccacgc

SEQ ID NO: 8211 - DNA, 40 bp, Artificial Sequence
  Synthetic Oligonucleotide
cggttcgttcttcctgactacatgagattaataaacgcgc

SEQ ID NO: 8212 - DNA, 40 bp, Artificial Sequence
  Synthetic Oligonucleotide
cggttcactctctgactacatgagattaataaaccgcgtc

SEQ ID NO: 8213 - DNA, 40 bp, Artificial Sequence
  Synthetic Oligonucleotide
cggctaacgttcatcgagggagcaagaggtctatagacta

SEQ ID NO: 8214 - DNA, 40 bp, Artificial Sequence
  Synthetic Oligonucleotide
cggctaacgttcatcgagggagcaaatggtctatagacta

SEQ ID NO: 8215 - DNA, 40 bp, Artificial Sequence
  Synthetic Oligonucleotide
cggctaacgttcatcgagggagcaaaaagtctatagacta

SEQ ID NO: 8216 - DNA, 40 bp, Artificial Sequence
  Synthetic Oligonucleotide
cggattccgcggtcgccgtttgatgcgctatcatcatgtg

SEQ ID NO: 8217 - DNA, 40 bp, Artificial Sequence
  Synthetic Oligonucleotide
cggatcccactgttaacagttcctccctcaggtgcgtcaa

SEQ ID NO: 8218 - DNA, 40 bp, Artificial Sequence
  Synthetic Oligonucleotide
cggatcccactgttaacagctcctccctcaggtgtgtcaa

SEQ ID NO: 8219 - DNA, 40 bp, Artificial Sequence
  Synthetic Oligonucleotide
cgctgtccgaatcgagcttgagtgtctggttaaacaacga

SEQ ID NO: 8220 - DNA, 40 bp, Artificial Sequence
  Synthetic Oligonucleotide
cgctatctgtcgtcgagcgagcactttgtgcgatcacaca

SEQ ID NO: 8221 - DNA, 40 bp, Artificial Sequence
  Synthetic Oligonucleotide
cgctatctgtcatcgagcgggcactttgtgcgatcacaca

SEQ ID NO: 8222 - DNA, 40 bp, Artificial Sequence
  Synthetic Oligonucleotide
cgctatctgtcatcgagcgagtactttgtgcgatcataca

SEQ ID NO: 8223 - DNA, 40 bp, Artificial Sequence
  Synthetic Oligonucleotide
cgctatctgtcatcgagcgagcactttgtgcgataacaca

SEQ ID NO: 8224 - DNA, 40 bp, Artificial Sequence
  Synthetic Oligonucleotide
cgctatctgtcatcgagcgagcactctgtgcgatcccaca

SEQ ID NO: 8225 - DNA, 40 bp, Artificial Sequence
  Synthetic Oligonucleotide
cgctatctgccatcgagcgagcactttgtgcgatcacaca

SEQ ID NO: 8226 - DNA, 40 bp, Artificial Sequence
  Synthetic Oligonucleotide
cgctatccgtttgtccgttctcttgtggtattgcgcatgc

SEQ ID NO: 8227 - DNA, 40 bp, Artificial Sequence
  Synthetic Oligonucleotide
cgctatccgtttgtccgtcctcttgtggtattgcgcataa

SEQ ID NO: 8228 - DNA, 40 bp, Artificial Sequence
  Synthetic Oligonucleotide
cgctatccgtttgtccgtcctcttgtggcattgcgcatgc

SEQ ID NO: 8229 - DNA, 40 bp, Artificial Sequence
  Synthetic Oligonucleotide
cgctatccgtttgtccgtcctcttgtagtattgcgcatgc

SEQ ID NO: 8230 - DNA, 40 bp, Artificial Sequence
  Synthetic Oligonucleotide
cgctatccgtttgtccgtcctcttatggtattgcgcatgc

SEQ ID NO: 8231 - DNA, 40 bp, Artificial Sequence
  Synthetic Oligonucleotide
cgctatccgtttgtccgtcctctcgaggtattgcgcatgc

SEQ ID NO: 8232 - DNA, 40 bp, Artificial Sequence
  Synthetic Oligonucleotide
cgctatccgtttgtccgccctcttgtggtattgcgcatgc

SEQ ID NO: 8233 - DNA, 40 bp, Artificial Sequence
  Synthetic Oligonucleotide
cgctatccgtttgtccatcctctcgtggtattgcgcatgc

SEQ ID NO: 8234 - DNA, 40 bp, Artificial Sequence
  Synthetic Oligonucleotide
cgctatccgtttgaccgtcctcttgtggtattgcgcatgc

SEQ ID NO: 8235 - DNA, 40 bp, Artificial Sequence
  Synthetic Oligonucleotide
cgctatccgttgtccgtccttcttgtgtattgcgcatgtc

SEQ ID NO: 8236 - DNA, 40 bp, Artificial Sequence
  Synthetic Oligonucleotide
cgctatccgttcgtccgtcctcttgtggtattgcgcatgc

SEQ ID NO: 8237 - DNA, 40 bp, Artificial Sequence
  Synthetic Oligonucleotide
cgctatccgtcttaacgtgttcccttcggacatccatcaa

SEQ ID NO: 8238 - DNA, 40 bp, Artificial Sequence
  Synthetic Oligonucleotide
cgctatccgtctgtccgtcctcctgtggtattgcgcatgc

SEQ ID NO: 8239 - DNA, 40 bp, Artificial Sequence
  Synthetic Oligonucleotide
cgctatccgtcatcgagcggttcttcgatattatgcaaca

SEQ ID NO: 8240 - DNA, 40 bp, Artificial Sequence
  Synthetic Oligonucleotide
cgctatccgtatcgaggagtcttcttttctcaccagaggc

SEQ ID NO: 8241 - DNA, 40 bp, Artificial Sequence
  Synthetic Oligonucleotide
cgctatccgtatcgagcgttgtcaacaagcggctaaggct

SEQ ID NO: 8242 - DNA, 40 bp, Artificial Sequence
  Synthetic Oligonucleotide
cgctatccgtatcgagcggtcggtccgtgccctacaccca

SEQ ID NO: 8243 - DNA, 40 bp, Artificial Sequence
  Synthetic Oligonucleotide
cgctatccgtatcgagcggtcggtccgtgccctaaaacca

SEQ ID NO: 8244 - DNA, 40 bp, Artificial Sequence
  Synthetic Oligonucleotide
cgctatccgtaatcgagcttgagtgtctggttaacagcga

SEQ ID NO: 8245 - DNA, 40 bp, Artificial Sequence
  Synthetic Oligonucleotide
cgctatccgtaatcgagcttgagtgcctggttaacaacga

SEQ ID NO: 8246 - DNA, 40 bp, Artificial Sequence
  Synthetic Oligonucleotide
cgctatccgccatcgagcgagcagtgtgccgtttcggtcg

SEQ ID NO: 8247 - DNA, 40 bp, Artificial Sequence
  Synthetic Oligonucleotide
cgctatccgccatcgagcgaacagtgcgccgctttcggtg

SEQ ID NO: 8248 - DNA, 40 bp, Artificial Sequence
  Synthetic Oligonucleotide
cgctatccgccaccgagcgaacagtgtgccgttttcggtg

SEQ ID NO: 8249 - DNA, 40 bp, Artificial Sequence
  Synthetic Oligonucleotide
cgctatccgcatcgagtcggttcttcgataatatgccaca

SEQ ID NO: 8250 - DNA, 40 bp, Artificial Sequence
  Synthetic Oligonucleotide
cgctatccgcatcgagtcggttcgtcgataatatgcaaca

SEQ ID NO: 8251 - DNA, 40 bp, Artificial Sequence
  Synthetic Oligonucleotide
cgctatccgcatcgagcgggttcttcgattatatgcaaca

SEQ ID NO: 8252 - DNA, 40 bp, Artificial Sequence
  Synthetic Oligonucleotide
cgctatccgcatcgagcgggttcttcgatagtatgcgaca

SEQ ID NO: 8253 - DNA, 40 bp, Artificial Sequence
  Synthetic Oligonucleotide
cgctatccgcatcgagcgggttcttcgatagtacgcaaca

SEQ ID NO: 8254 - DNA, 40 bp, Artificial Sequence
  Synthetic Oligonucleotide
cgctatccgcatcgagcgggttcttcgataatgtgcatca

SEQ ID NO: 8255 - DNA, 40 bp, Artificial Sequence
  Synthetic Oligonucleotide
cgctatccgcatcgagcgggttcttcgataatatgcaacc

SEQ ID NO: 8256 - DNA, 40 bp, Artificial Sequence
  Synthetic Oligonucleotide
cgctatccgcatcgagcgggttcttcaataatatgcaaca

SEQ ID NO: 8257 - DNA, 40 bp, Artificial Sequence
  Synthetic Oligonucleotide
cgctatccgacatcgagagggctacgtcatcaagcgctaa

SEQ ID NO: 8258 - DNA, 40 bp, Artificial Sequence
  Synthetic Oligonucleotide
cgctatccgaatcgagcttgtgtgtctggttaaacaacga

SEQ ID NO: 8259 - DNA, 40 bp, Artificial Sequence
  Synthetic Oligonucleotide
cgctatccgaatcgagcttgagtgtctggttaaataacga

SEQ ID NO: 8260 - DNA, 40 bp, Artificial Sequence
  Synthetic Oligonucleotide
cgctatccgaatcgagcttgagtgtctggttaaacatcga

SEQ ID NO: 8261 - DNA, 40 bp, Artificial Sequence
  Synthetic Oligonucleotide
cgctatccgaatcgagcttgagggtctggttaaacaacga

SEQ ID NO: 8262 - DNA, 40 bp, Artificial Sequence
  Synthetic Oligonucleotide
cgctatcccgcatcgagcgggttcttcgataatatcaaca

SEQ ID NO: 8263 - DNA, 40 bp, Artificial Sequence
  Synthetic Oligonucleotide
cgctatccccatcgagcgatcgtcgtaatactgcttccag

SEQ ID NO: 8264 - DNA, 40 bp, Artificial Sequence
  Synthetic Oligonucleotide
cgcgtcttcccggcattaccgcaattgccatacattaata

SEQ ID NO: 8265 - DNA, 40 bp, Artificial Sequence
  Synthetic Oligonucleotide
cgcggttattttataatagcatacgaccctgcgcgctgtt

SEQ ID NO: 8266 - DNA, 40 bp, Artificial Sequence
  Synthetic Oligonucleotide
cgcgcagcctcgatcctacacagcatggccatgccgttat

SEQ ID NO: 8267 - DNA, 40 bp, Artificial Sequence
  Synthetic Oligonucleotide
cgcgatcatcagttttccaaagtatatatactgttgtctg

SEQ ID NO: 8268 - DNA, 40 bp, Artificial Sequence
  Synthetic Oligonucleotide
cgcgaaacgctattttctgggaagccgcgtctcgagcgaa

SEQ ID NO: 8269 - DNA, 40 bp, Artificial Sequence
  Synthetic Oligonucleotide
cgccttgatcctcgccttcggtgcactgactcgctttctg

SEQ ID NO: 8270 - DNA, 40 bp, Artificial Sequence
  Synthetic Oligonucleotide
cgcctcaggttcccccctaacgcgttagccttccggaatg

SEQ ID NO: 8271 - DNA, 40 bp, Artificial Sequence
  Synthetic Oligonucleotide
cgcctatccgccatcgagcgaacagtgtgccgtttcggtg

SEQ ID NO: 8272 - DNA, 40 bp, Artificial Sequence
  Synthetic Oligonucleotide
cgcctatccgaatcgagcttgagtgtctggttaacaacga

SEQ ID NO: 8273 - DNA, 40 bp, Artificial Sequence
  Synthetic Oligonucleotide
cgccggaagtccctcctcgtcttgatgcactaccatctca

SEQ ID NO: 8274 - DNA, 40 bp, Artificial Sequence
  Synthetic Oligonucleotide
cgccggaagtccctccccgtcttgatgcactatcatctcg

SEQ ID NO: 8275 - DNA, 40 bp, Artificial Sequence
  Synthetic Oligonucleotide
cgccggaagtcccctctcgtcttgatgcactatcatctca

SEQ ID NO: 8276 - DNA, 40 bp, Artificial Sequence
  Synthetic Oligonucleotide
cgccggaagaccctcctcgtcttgatgcactatcatctca

SEQ ID NO: 8277 - DNA, 40 bp, Artificial Sequence
  Synthetic Oligonucleotide
cgccgaagtcccgtcctcgtcttgatgcactatcatctca

SEQ ID NO: 8278 - DNA, 40 bp, Artificial Sequence
  Synthetic Oligonucleotide
cgcacccccgatagtcatcttcactggaccacccgtgtta

SEQ ID NO: 8279 - DNA, 40 bp, Artificial Sequence
  Synthetic Oligonucleotide
cgcacccccgatagtcatcttcactggacaccccgtgtta

SEQ ID NO: 8280 - DNA, 40 bp, Artificial Sequence
  Synthetic Oligonucleotide
cgcaccccccgatagtcatcttcactggacacccgtgtta

SEQ ID NO: 8281 - DNA, 40 bp, Artificial Sequence
  Synthetic Oligonucleotide
cgcacaatggattctcagtcctccgccatgctccgcctcg

SEQ ID NO: 8282 - DNA, 40 bp, Artificial Sequence
  Synthetic Oligonucleotide
cgattatagatcctaccccaactgcgccagaattcgtccg

SEQ ID NO: 8283 - DNA, 40 bp, Artificial Sequence
  Synthetic Oligonucleotide
cgagttcctccctgtcgcatcgtattactgttctctgctg

SEQ ID NO: 8284 - DNA, 40 bp, Artificial Sequence
  Synthetic Oligonucleotide
cgagtatggcctgtaaacaatgtctacaccaccgctaccg

SEQ ID NO: 8285 - DNA, 40 bp, Artificial Sequence
  Synthetic Oligonucleotide
cgactcccttcgttctgcgcagatccaccgcattggatcg

SEQ ID NO: 8286 - DNA, 40 bp, Artificial Sequence
  Synthetic Oligonucleotide
cgactatccgtttgtcgtcctcttgtggtattgcgcatgc

SEQ ID NO: 8287 - DNA, 40 bp, Artificial Sequence
  Synthetic Oligonucleotide
cgactatccgtttgtccgtcctctgtggtattgcgcatgc

SEQ ID NO: 8288 - DNA, 40 bp, Artificial Sequence
  Synthetic Oligonucleotide
cgactatccgtttgctcgtcctctgtggtattgcgcatgc

SEQ ID NO: 8289 - DNA, 40 bp, Artificial Sequence
  Synthetic Oligonucleotide
cgaattatcagggactaccctgacgcaatattcacacgtt

SEQ ID NO: 8290 - DNA, 40 bp, Artificial Sequence
  Synthetic Oligonucleotide
cctttccgaccccgtctgttcgcgggctacctcgatcata

SEQ ID NO: 8291 - DNA, 40 bp, Artificial Sequence
  Synthetic Oligonucleotide
ccttctatagtcgtcggcgtagcacgctattgcttagaag

SEQ ID NO: 8292 - DNA, 40 bp, Artificial Sequence
  Synthetic Oligonucleotide
ccttccagggcccgatgccgcattatcatcctatgttctg

SEQ ID NO: 8293 - DNA, 40 bp, Artificial Sequence
  Synthetic Oligonucleotide
ccttccagggccaatgccgcattatcattcctatgttctg

SEQ ID NO: 8294 - DNA, 40 bp, Artificial Sequence
  Synthetic Oligonucleotide
ccttccaggccaatgtccgcattatcatcctatggttctg

SEQ ID NO: 8295 - DNA, 40 bp, Artificial Sequence
  Synthetic Oligonucleotide
ccttattcgccgaggacgtctttcgtgcactatcacgatt

SEQ ID NO: 8296 - DNA, 40 bp, Artificial Sequence
  Synthetic Oligonucleotide
cctgcaccccgatagtcatcttcactggacacccgtgtta

SEQ ID NO: 8297 - DNA, 40 bp, Artificial Sequence
  Synthetic Oligonucleotide
cctcgtgtcttccggtaattaccacgtacgtacatgtctg

SEQ ID NO: 8298 - DNA, 40 bp, Artificial Sequence
  Synthetic Oligonucleotide
cctcgtatcttccggtaattaccacgtacgtacatgtccg

SEQ ID NO: 8299 - DNA, 40 bp, Artificial Sequence
  Synthetic Oligonucleotide
cctcgtatcctccggtaattaccgcgtacgtacatgtctg

SEQ ID NO: 8300 - DNA, 40 bp, Artificial Sequence
  Synthetic Oligonucleotide
cctcggatccttaatttgcaaattaccaccgtgtaacgtt

SEQ ID NO: 8301 - DNA, 40 bp, Artificial Sequence
  Synthetic Oligonucleotide
cctcgatcttccaagtgcacaaccggaccatggatcggac

SEQ ID NO: 8302 - DNA, 40 bp, Artificial Sequence
  Synthetic Oligonucleotide
cctcctcaggttccccctaacgcgttagccttccggaatg

SEQ ID NO: 8303 - DNA, 40 bp, Artificial Sequence
  Synthetic Oligonucleotide
cctcacccccgatagtcatctccactggacacccgtgtta

SEQ ID NO: 8304 - DNA, 40 bp, Artificial Sequence
  Synthetic Oligonucleotide
ccgtggatcagctagtcgtgctttgtccgctatgacatca

SEQ ID NO: 8305 - DNA, 40 bp, Artificial Sequence
  Synthetic Oligonucleotide
ccgtgcaccctagatagtctcttcactggacaccgtgtta

SEQ ID NO: 8306 - DNA, 40 bp, Artificial Sequence
  Synthetic Oligonucleotide
ccgtgatcggctagtcgtgctttgtccgctatgacattca

SEQ ID NO: 8307 - DNA, 40 bp, Artificial Sequence
  Synthetic Oligonucleotide
ccgtgatcagttagtcgtgctttgtccgctatgacattca

SEQ ID NO: 8308 - DNA, 40 bp, Artificial Sequence
  Synthetic Oligonucleotide
ccgtgatcagctagtcgtgttttgtccactatgacattca

SEQ ID NO: 8309 - DNA, 40 bp, Artificial Sequence
  Synthetic Oligonucleotide
ccgtgatcagctagtcgtgctttgtctgctatgacattca

SEQ ID NO: 8310 - DNA, 40 bp, Artificial Sequence
  Synthetic Oligonucleotide
ccgtgatcagctagtcgtgctttgtccgctatgacattta

SEQ ID NO: 8311 - DNA, 40 bp, Artificial Sequence
  Synthetic Oligonucleotide
ccgtgatcagctagtcgtgctttgtccgctatgacattcg

SEQ ID NO: 8312 - DNA, 40 bp, Artificial Sequence
  Synthetic Oligonucleotide
ccgtgatcagctagtcgtgctttgtccgctatgacattaa

SEQ ID NO: 8313 - DNA, 40 bp, Artificial Sequence
  Synthetic Oligonucleotide
ccgtgatcagctagtcgtgctttgtccgctatgacatcca

SEQ ID NO: 8314 - DNA, 40 bp, Artificial Sequence
  Synthetic Oligonucleotide
ccgtgatcagctagtcgtgctttgtccgctatgacataca

SEQ ID NO: 8315 - DNA, 40 bp, Artificial Sequence
  Synthetic Oligonucleotide
ccgtgatcagctagtcgtgctttgtccactatgacattca

SEQ ID NO: 8316 - DNA, 40 bp, Artificial Sequence
  Synthetic Oligonucleotide
ccgtgatcagctagtcgtgctttgaccgctatgacattca

SEQ ID NO: 8317 - DNA, 40 bp, Artificial Sequence
  Synthetic Oligonucleotide
ccgtgatcagctagtcgtgcttcgtccgctatgacattca

SEQ ID NO: 8318 - DNA, 40 bp, Artificial Sequence
  Synthetic Oligonucleotide
ccgtctcggatctcttgtcgcgttccaaccgttctcccta

SEQ ID NO: 8319 - DNA, 40 bp, Artificial Sequence
  Synthetic Oligonucleotide
ccgtcaccctgatagtcatcttcactggacaacccgtgta

SEQ ID NO: 8320 - DNA, 40 bp, Artificial Sequence
  Synthetic Oligonucleotide
ccgtcacccgatagtcatcttcacttggaccaccgtgtta

SEQ ID NO: 8321 - DNA, 40 bp, Artificial Sequence
  Synthetic Oligonucleotide
ccgtcacccgatagtcatcttcactggaacacccgtgtta

SEQ ID NO: 8322 - DNA, 40 bp, Artificial Sequence
  Synthetic Oligonucleotide
ccgtcaccccgatagtcgtcttcgctggacacccgtgtta

SEQ ID NO: 8323 - DNA, 40 bp, Artificial Sequence
  Synthetic Oligonucleotide
ccgtcaccccgatagctcatcttcactggacaccgtgtta

SEQ ID NO: 8324 - DNA, 40 bp, Artificial Sequence
  Synthetic Oligonucleotide
ccgtaccccgatagtcatcttcactggaccacccgtgtta

SEQ ID NO: 8325 - DNA, 40 bp, Artificial Sequence
  Synthetic Oligonucleotide
ccgtaatcagctagtcgtgctttgtccgctatgacattca

SEQ ID NO: 8326 - DNA, 40 bp, Artificial Sequence
  Synthetic Oligonucleotide
ccgtaaatcctccatgcgcgcgcacggatccagtactgca

SEQ ID NO: 8327 - DNA, 40 bp, Artificial Sequence
  Synthetic Oligonucleotide
ccggtctttattgtcgtctttcgtaggactacctgcatca

SEQ ID NO: 8328 - DNA, 40 bp, Artificial Sequence
  Synthetic Oligonucleotide
ccgggtctttattatcgtctttgtaggactacctgcatca

SEQ ID NO: 8329 - DNA, 40 bp, Artificial Sequence
  Synthetic Oligonucleotide
ccggctcctcgtcctaacgtatgcatgccttctgtggcca

SEQ ID NO: 8330 - DNA, 40 bp, Artificial Sequence
  Synthetic Oligonucleotide
ccggcggatcctttcggttcctcttgttccgcggaaactg

SEQ ID NO: 8331 - DNA, 40 bp, Artificial Sequence
  Synthetic Oligonucleotide
ccggcaccccgatcagccatcttcactgacacccgtgtta

SEQ ID NO: 8332 - DNA, 40 bp, Artificial Sequence
  Synthetic Oligonucleotide
ccggcaccccgatagtctcttcgctggaccacccgcgtta

SEQ ID NO: 8333 - DNA, 40 bp, Artificial Sequence
  Synthetic Oligonucleotide
ccgcttcctctcgtaacacatgtgtactgtatactgcagg

SEQ ID NO: 8334 - DNA, 40 bp, Artificial Sequence
  Synthetic Oligonucleotide
ccgctccccgatagtcatcttcactggaccacccgtgtta

SEQ ID NO: 8335 - DNA, 40 bp, Artificial Sequence
  Synthetic Oligonucleotide
ccgcgccccgatggtcatcttcactggaccacccgtgtta

SEQ ID NO: 8336 - DNA, 40 bp, Artificial Sequence
  Synthetic Oligonucleotide
ccgcgccccgatagtcgtcttcactggaccacccgtgtta

SEQ ID NO: 8337 - DNA, 40 bp, Artificial Sequence
  Synthetic Oligonucleotide
ccgcgcccccgatagtcatcttcactggacacccgtgtta

SEQ ID NO: 8338 - DNA, 40 bp, Artificial Sequence
  Synthetic Oligonucleotide
ccgccttgactccaaccccggggtatgtaccataattgca

SEQ ID NO: 8339 - DNA, 40 bp, Artificial Sequence
  Synthetic Oligonucleotide
ccgcctgggatcactctctacgcgtataaatgctccgtca

SEQ ID NO: 8340 - DNA, 40 bp, Artificial Sequence
  Synthetic Oligonucleotide
ccgcctctttcctcttattggcctctgcggtgcaccgcga

SEQ ID NO: 8341 - DNA, 40 bp, Artificial Sequence
  Synthetic Oligonucleotide
ccgcctcttcttgcaccgcgcgcgttttattagtcgtctg

SEQ ID NO: 8342 - DNA, 40 bp, Artificial Sequence
  Synthetic Oligonucleotide
ccgcctcttccggtacatgtcctatccttgcgtgcttctg

SEQ ID NO: 8343 - DNA, 40 bp, Artificial Sequence
  Synthetic Oligonucleotide
ccgcctctgtcctcgtaattacccctcccgtagctgcatg

SEQ ID NO: 8344 - DNA, 40 bp, Artificial Sequence
  Synthetic Oligonucleotide
ccgcctcggtcccgttccaacgcgttagccttccggaatg

SEQ ID NO: 8345 - DNA, 40 bp, Artificial Sequence
  Synthetic Oligonucleotide
ccgcctcggatcgttcccattggtggtacccctattaatg

SEQ ID NO: 8346 - DNA, 40 bp, Artificial Sequence
  Synthetic Oligonucleotide
ccgcctcggatcgttcccaatagtcggtaccctattaatg

SEQ ID NO: 8347 - DNA, 40 bp, Artificial Sequence
  Synthetic Oligonucleotide
ccgcctcgctacactccttggacgatcgaccacccaaata

SEQ ID NO: 8348 - DNA, 40 bp, Artificial Sequence
  Synthetic Oligonucleotide
ccgcctcgcgtcgtgtacacgaagacctccggagcttttg

SEQ ID NO: 8349 - DNA, 40 bp, Artificial Sequence
  Synthetic Oligonucleotide
ccgcctcgcgtcgtgtacacgaagacctccggagagtttg

SEQ ID NO: 8350 - DNA, 40 bp, Artificial Sequence
  Synthetic Oligonucleotide
ccgcctcgatatgcagtcatgttctagaacgcttccactg

SEQ ID NO: 8351 - DNA, 40 bp, Artificial Sequence
  Synthetic Oligonucleotide
ccgcctcgataagtacaacccgggtagagacagcatgctg

SEQ ID NO: 8352 - DNA, 40 bp, Artificial Sequence
  Synthetic Oligonucleotide
ccgcctcgaatactgacgtcgtggaaccttctattgctag

SEQ ID NO: 8353 - DNA, 40 bp, Artificial Sequence
  Synthetic Oligonucleotide
ccgcctcgaactactgacgtcgtggaaccttgattgctag

SEQ ID NO: 8354 - DNA, 40 bp, Artificial Sequence
  Synthetic Oligonucleotide
ccgcctcgaacactgacgtcgtggaaccttcgactgctag

SEQ ID NO: 8355 - DNA, 40 bp, Artificial Sequence
  Synthetic Oligonucleotide
ccgcctcgaaaccctacgcgcgtacgtgcactttctcttc

SEQ ID NO: 8356 - DNA, 40 bp, Artificial Sequence
  Synthetic Oligonucleotide
ccgcctccttcctccttgagcatgcttactcgggatactg

SEQ ID NO: 8357 - DNA, 40 bp, Artificial Sequence
  Synthetic Oligonucleotide
ccgcctccaggttcccctaacgcgttagccttccgggatg

SEQ ID NO: 8358 - DNA, 40 bp, Artificial Sequence
  Synthetic Oligonucleotide
ccgcctccaacactgacgtcgtggaaccttcgattgctag

SEQ ID NO: 8359 - DNA, 40 bp, Artificial Sequence
  Synthetic Oligonucleotide
ccgcctcatcacacgcgcgtgaaacactgcagctgtaata

SEQ ID NO: 8360 - DNA, 40 bp, Artificial Sequence
  Synthetic Oligonucleotide
ccgcctcagtggctcccgggaccacgtggacatgtttgta

SEQ ID NO: 8361 - DNA, 40 bp, Artificial Sequence
  Synthetic Oligonucleotide
ccgcctcagtcctggtggtaccacaacgcgttgctctttt

SEQ ID NO: 8362 - DNA, 40 bp, Artificial Sequence
  Synthetic Oligonucleotide
ccgcctcagtccgtggatccactttgcacgtgcagtgaca

SEQ ID NO: 8363 - DNA, 40 bp, Artificial Sequence
  Synthetic Oligonucleotide
ccgcctcaggtttcccctaacgcgttagccttctggaatg

SEQ ID NO: 8364 - DNA, 40 bp, Artificial Sequence
  Synthetic Oligonucleotide
ccgcctcaggtttcccccaacgcgttagccttccggaatg

SEQ ID NO: 8365 - DNA, 40 bp, Artificial Sequence
  Synthetic Oligonucleotide
ccgcctcaggttccctctaacgcgttagccttccggaatg

SEQ ID NO: 8366 - DNA, 40 bp, Artificial Sequence
  Synthetic Oligonucleotide
ccgcctcaggttccctaacggcgttacgccttccggaatg

SEQ ID NO: 8367 - DNA, 40 bp, Artificial Sequence
  Synthetic Oligonucleotide
ccgcctcaggttccctaacctgcgttagccttccggaatg

SEQ ID NO: 8368 - DNA, 40 bp, Artificial Sequence
  Synthetic Oligonucleotide
ccgcctcaggttcccctagcgcgttagccttccggtaatg

SEQ ID NO: 8369 - DNA, 40 bp, Artificial Sequence
  Synthetic Oligonucleotide
ccgcctcaggttcccctagcgcgttagccttccggaactg

SEQ ID NO: 8370 - DNA, 40 bp, Artificial Sequence
  Synthetic Oligonucleotide
ccgcctcaggttcccctaacgtcgatacgcttccggaatg

SEQ ID NO: 8371 - DNA, 40 bp, Artificial Sequence
  Synthetic Oligonucleotide
ccgcctcaggttcccctaacgcgttgccgcttccggaatg

SEQ ID NO: 8372 - DNA, 40 bp, Artificial Sequence
  Synthetic Oligonucleotide
ccgcctcaggttcccctaacgcgttagccttcgtggaatg

SEQ ID NO: 8373 - DNA, 40 bp, Artificial Sequence
  Synthetic Oligonucleotide
ccgcctcaggttcccctaacgcgttagccttaccggaatg

SEQ ID NO: 8374 - DNA, 40 bp, Artificial Sequence
  Synthetic Oligonucleotide
ccgcctcaggttcccctaacgcgttagcctcccggaatcg

SEQ ID NO: 8375 - DNA, 40 bp, Artificial Sequence
  Synthetic Oligonucleotide
ccgcctcaggttccccctaacgcgttagcctcccggaatg

SEQ ID NO: 8376 - DNA, 40 bp, Artificial Sequence
  Synthetic Oligonucleotide
ccgcctcaggttccccccaacgcgttagccttccggaatg

SEQ ID NO: 8377 - DNA, 40 bp, Artificial Sequence
  Synthetic Oligonucleotide
ccgcctcaggttcccccaaacgcgttagccttccggaatg

SEQ ID NO: 8378 - DNA, 40 bp, Artificial Sequence
  Synthetic Oligonucleotide
ccgcctcaggctccccctaacgcgttagccttccggaatg

SEQ ID NO: 8379 - DNA, 40 bp, Artificial Sequence
  Synthetic Oligonucleotide
ccgcctcacggtctcccatctgtgcacactgtctagacag

SEQ ID NO: 8380 - DNA, 40 bp, Artificial Sequence
  Synthetic Oligonucleotide
ccgcctcacgcttctccgtgcgcacaccttcttacaactg

SEQ ID NO: 8381 - DNA, 40 bp, Artificial Sequence
  Synthetic Oligonucleotide
ccgcctcaatcccatgtacgtacacacgcttcgggtattg

SEQ ID NO: 8382 - DNA, 40 bp, Artificial Sequence
  Synthetic Oligonucleotide
ccgccgctcaggttccctaacgcgttagccttccggaatg

SEQ ID NO: 8383 - DNA, 40 bp, Artificial Sequence
  Synthetic Oligonucleotide
ccgcccagctcacttcgtctttgatcgaccacgctcataa

SEQ ID NO: 8384 - DNA, 40 bp, Artificial Sequence
  Synthetic Oligonucleotide
ccgccactcaggttccctaacgcgttagccttccggaatg

SEQ ID NO: 8385 - DNA, 40 bp, Artificial Sequence
  Synthetic Oligonucleotide
ccgcatgggtcggttttggtggggggactacccccttgta

SEQ ID NO: 8386 - DNA, 40 bp, Artificial Sequence
  Synthetic Oligonucleotide
ccgcagccccgatagtcatcttcactggaccaccgtgtta

SEQ ID NO: 8387 - DNA, 40 bp, Artificial Sequence
  Synthetic Oligonucleotide
ccgcagccccgatagtcatcttcactggacacccgtgtta

SEQ ID NO: 8388 - DNA, 40 bp, Artificial Sequence
  Synthetic Oligonucleotide
ccgcactccgatagtcatcttcgctggaccacccgtgtta

SEQ ID NO: 8389 - DNA, 40 bp, Artificial Sequence
  Synthetic Oligonucleotide
ccgcacctcgatagtcgtcttcactggaccacccgtgtta

SEQ ID NO: 8390 - DNA, 40 bp, Artificial Sequence
  Synthetic Oligonucleotide
ccgcacctcgatagtcatcttcgctggaccactcgcgtta

SEQ ID NO: 8391 - DNA, 40 bp, Artificial Sequence
  Synthetic Oligonucleotide
ccgcacccgttacgttcatcttcactggacacctgtgtta

SEQ ID NO: 8392 - DNA, 40 bp, Artificial Sequence
  Synthetic Oligonucleotide
ccgcacccgatcagctcatcttcgctggaccaccgcgtta

SEQ ID NO: 8393 - DNA, 40 bp, Artificial Sequence
  Synthetic Oligonucleotide
ccgcacccgatagtcgtcttcgctggtaccacccgtgtta

SEQ ID NO: 8394 - DNA, 40 bp, Artificial Sequence
  Synthetic Oligonucleotide
ccgcacccgatagtcgatcttccactggacacccgtgtta

SEQ ID NO: 8395 - DNA, 40 bp, Artificial Sequence
  Synthetic Oligonucleotide
ccgcacccgatagtcatcttcactggaccaccctgtgtta

SEQ ID NO: 8396 - DNA, 40 bp, Artificial Sequence
  Synthetic Oligonucleotide
ccgcacccgagtcagtcatcttcgctcggacacccgcgta

SEQ ID NO: 8397 - DNA, 40 bp, Artificial Sequence
  Synthetic Oligonucleotide
ccgcacccgacttagtcatcttcactggacacccgtgtta

SEQ ID NO: 8398 - DNA, 40 bp, Artificial Sequence
  Synthetic Oligonucleotide
ccgcacccgactagtcatctttcactggacacccgtgtta

SEQ ID NO: 8399 - DNA, 40 bp, Artificial Sequence
  Synthetic Oligonucleotide
ccgcacccgactagtcatcttcgctggaccacccgcgtta

SEQ ID NO: 8400 - DNA, 40 bp, Artificial Sequence
  Synthetic Oligonucleotide
ccgcacccgactagtcatcttcactggaccacccgtgtta

SEQ ID NO: 8401 - DNA, 40 bp, Artificial Sequence
  Synthetic Oligonucleotide
ccgcacccctgattagtcatcttcactggacaccgtgtta

SEQ ID NO: 8402 - DNA, 40 bp, Artificial Sequence
  Synthetic Oligonucleotide
ccgcacccctgatagtcatcttcactgggcacccgtgtta

SEQ ID NO: 8403 - DNA, 40 bp, Artificial Sequence
  Synthetic Oligonucleotide
ccgcacccctgatagtcatcttcactggaccacccgtgta

SEQ ID NO: 8404 - DNA, 40 bp, Artificial Sequence
  Synthetic Oligonucleotide
ccgcacccctatagtcatcttcactggaccacccgtgtta

SEQ ID NO: 8405 - DNA, 40 bp, Artificial Sequence
  Synthetic Oligonucleotide
ccgcacccctaatagtcatcttcactggacacccgtgtta

SEQ ID NO: 8406 - DNA, 40 bp, Artificial Sequence
  Synthetic Oligonucleotide
ccgcaccccgttagtcatcttcactggaccacccgtgtta

SEQ ID NO: 8407 - DNA, 40 bp, Artificial Sequence
  Synthetic Oligonucleotide
ccgcaccccgattagtcgtcttcgctggacaccctgtgta

SEQ ID NO: 8408 - DNA, 40 bp, Artificial Sequence
  Synthetic Oligonucleotide
ccgcaccccgattagtcatcttcactggaccaccgtgtta

SEQ ID NO: 8409 - DNA, 40 bp, Artificial Sequence
  Synthetic Oligonucleotide
ccgcaccccgattagtcatctccactggacacccgtgtta

SEQ ID NO: 8410 - DNA, 40 bp, Artificial Sequence
  Synthetic Oligonucleotide
ccgcaccccgatgtcatcttcagctggaccacccgtgtta

SEQ ID NO: 8411 - DNA, 40 bp, Artificial Sequence
  Synthetic Oligonucleotide
ccgcaccccgatcagtcatcttcactggacacctgtgtta

SEQ ID NO: 8412 - DNA, 40 bp, Artificial Sequence
  Synthetic Oligonucleotide
ccgcaccccgatcagctcatcttcactggacacccgtgta

SEQ ID NO: 8413 - DNA, 40 bp, Artificial Sequence
  Synthetic Oligonucleotide
ccgcaccccgatagttcgtcttcgctggaccaccgtgtta

SEQ ID NO: 8414 - DNA, 40 bp, Artificial Sequence
  Synthetic Oligonucleotide
ccgcaccccgatagttcatcttcaactggaccaccgtgta

SEQ ID NO: 8415 - DNA, 40 bp, Artificial Sequence
  Synthetic Oligonucleotide
ccgcaccccgatagttatcttcgctggaccacccgcgtta

SEQ ID NO: 8416 - DNA, 40 bp, Artificial Sequence
  Synthetic Oligonucleotide
ccgcaccccgatagtcttcttcactggaccacccgtgtta

SEQ ID NO: 8417 - DNA, 40 bp, Artificial Sequence
  Synthetic Oligonucleotide
ccgcaccccgatagtcgtcttcgctgggccacccgtgtta

SEQ ID NO: 8418 - DNA, 40 bp, Artificial Sequence
  Synthetic Oligonucleotide
ccgcaccccgatagtcgtcttcactgggccacccgtgtta

SEQ ID NO: 8419 - DNA, 40 bp, Artificial Sequence
  Synthetic Oligonucleotide
ccgcaccccgatagtcgtccttcactggacacccgtgtta

SEQ ID NO: 8420 - DNA, 40 bp, Artificial Sequence
  Synthetic Oligonucleotide
ccgcaccccgatagtcgccttcgctggaccacccgtgtta

SEQ ID NO: 8421 - DNA, 40 bp, Artificial Sequence
  Synthetic Oligonucleotide
ccgcaccccgatagtcgatcttcactggaccaccgtgtta

SEQ ID NO: 8422 - DNA, 40 bp, Artificial Sequence
  Synthetic Oligonucleotide
ccgcaccccgatagtcgatctcactggaccacccgtgtta

SEQ ID NO: 8423 - DNA, 40 bp, Artificial Sequence
  Synthetic Oligonucleotide
ccgcaccccgatagtccatcttcactggacacccgtgtta

SEQ ID NO: 8424 - DNA, 40 bp, Artificial Sequence
  Synthetic Oligonucleotide
ccgcaccccgatagtcatcttcgctggaccacccttgtta

SEQ ID NO: 8425 - DNA, 40 bp, Artificial Sequence
  Synthetic Oligonucleotide
ccgcaccccgatagtcatcttcgctggaccacccgtgata

SEQ ID NO: 8426 - DNA, 40 bp, Artificial Sequence
  Synthetic Oligonucleotide
ccgcaccccgatagtcatcttcgctggaccacccacgtta

SEQ ID NO: 8427 - DNA, 40 bp, Artificial Sequence
  Synthetic Oligonucleotide
ccgcaccccgatagtcatcttcgccggaccacccgcgtta

SEQ ID NO: 8428 - DNA, 40 bp, Artificial Sequence
  Synthetic Oligonucleotide
ccgcaccccgatagtcatcttccctggaccacccgtgtta

SEQ ID NO: 8429 - DNA, 40 bp, Artificial Sequence
  Synthetic Oligonucleotide
ccgcaccccgatagtcatcttcagctggaccaccgtgtta

SEQ ID NO: 8430 - DNA, 40 bp, Artificial Sequence
  Synthetic Oligonucleotide
ccgcaccccgatagtcatcttcagctggacacccgcgtta

SEQ ID NO: 8431 - DNA, 40 bp, Artificial Sequence
  Synthetic Oligonucleotide
ccgcaccccgatagtcatcttcactggaccacccgtttca

SEQ ID NO: 8432 - DNA, 40 bp, Artificial Sequence
  Synthetic Oligonucleotide
ccgcaccccgatagtcatcttcactggaccacccggtgta

SEQ ID NO: 8433 - DNA, 40 bp, Artificial Sequence
  Synthetic Oligonucleotide
ccgcaccccgatagtcatcttcactggaccacacgtgtta

SEQ ID NO: 8434 - DNA, 40 bp, Artificial Sequence
  Synthetic Oligonucleotide
ccgcaccccgatagtcatcttcactggaccaaccgtgtta

SEQ ID NO: 8435 - DNA, 40 bp, Artificial Sequence
  Synthetic Oligonucleotide
ccgcaccccgatagtcatcttcactggacaacccgtgtta

SEQ ID NO: 8436 - DNA, 40 bp, Artificial Sequence
  Synthetic Oligonucleotide
ccgcaccccgatagtcatcttacactggacacccgtgtta

SEQ ID NO: 8437 - DNA, 40 bp, Artificial Sequence
  Synthetic Oligonucleotide
ccgcaccccgatagtcatccttcactggaccaccgtgcta

SEQ ID NO: 8438 - DNA, 40 bp, Artificial Sequence
  Synthetic Oligonucleotide
ccgcaccccgatagctcattctcactggacacccgtgtta

SEQ ID NO: 8439 - DNA, 40 bp, Artificial Sequence
  Synthetic Oligonucleotide
ccgcaccccgatagctcatcttcgctggaccaccgtgtta

SEQ ID NO: 8440 - DNA, 40 bp, Artificial Sequence
  Synthetic Oligonucleotide
ccgcaccccgatagctcatcttcactgaccacccgtgtta

SEQ ID NO: 8441 - DNA, 40 bp, Artificial Sequence
  Synthetic Oligonucleotide
ccgcaccccgatagccatcttcgctggaccacccgcgtta

SEQ ID NO: 8442 - DNA, 40 bp, Artificial Sequence
  Synthetic Oligonucleotide
ccgcaccccgataatcatcttcactggaccacccgtgtta

SEQ ID NO: 8443 - DNA, 40 bp, Artificial Sequence
  Synthetic Oligonucleotide
ccgcaccccgactagtcatcttcgctggacacccgtgtta

SEQ ID NO: 8444 - DNA, 40 bp, Artificial Sequence
  Synthetic Oligonucleotide
ccgcaccccgacagtcgtcttcgctggaccacccgtgtta

SEQ ID NO: 8445 - DNA, 40 bp, Artificial Sequence
  Synthetic Oligonucleotide
ccgcaccccgacagtcatcttcactggactacccgtgtta

SEQ ID NO: 8446 - DNA, 40 bp, Artificial Sequence
  Synthetic Oligonucleotide
ccgcaccccgacagtcatcttcactggaccgcccgtgtta

SEQ ID NO: 8447 - DNA, 40 bp, Artificial Sequence
  Synthetic Oligonucleotide
ccgcaccccgaaagtcatcttcactggaccacccgtgtta

SEQ ID NO: 8448 - DNA, 40 bp, Artificial Sequence
  Synthetic Oligonucleotide
ccgcacccccgttagtcatcttcactggacacccgtgtta

SEQ ID NO: 8449 - DNA, 40 bp, Artificial Sequence
  Synthetic Oligonucleotide
ccgcacccccggtagtcatcttcactggacacccgtgtta

SEQ ID NO: 8450 - DNA, 40 bp, Artificial Sequence
  Synthetic Oligonucleotide
ccgcacccccgattagtcatcttcactggacacccgtgta

SEQ ID NO: 8451 - DNA, 40 bp, Artificial Sequence
  Synthetic Oligonucleotide
ccgcacccccgatgtcatcttcactggaccacccgtgtta

SEQ ID NO: 8452 - DNA, 40 bp, Artificial Sequence
  Synthetic Oligonucleotide
ccgcacccccgatggtcatcttcactggacacccgtgtta

SEQ ID NO: 8453 - DNA, 40 bp, Artificial Sequence
  Synthetic Oligonucleotide
ccgcacccccgatagtctcttcactggaccacccgtgtta

SEQ ID NO: 8454 - DNA, 40 bp, Artificial Sequence
  Synthetic Oligonucleotide
ccgcacccccgatagtcattttcactggacacccgtgtta

SEQ ID NO: 8455 - DNA, 40 bp, Artificial Sequence
  Synthetic Oligonucleotide
ccgcacccccgatagtcatcttcactggacacctgtgtta

SEQ ID NO: 8456 - DNA, 40 bp, Artificial Sequence
  Synthetic Oligonucleotide
ccgcacccccgatagtcatcttcactggacacccgtgtga

SEQ ID NO: 8457 - DNA, 40 bp, Artificial Sequence
  Synthetic Oligonucleotide
ccgcacccccgatagtcatcttcactggacacccgtgtca

SEQ ID NO: 8458 - DNA, 40 bp, Artificial Sequence
  Synthetic Oligonucleotide
ccgcacccccgatagtcatcttcactggacaccagtgtta

SEQ ID NO: 8459 - DNA, 40 bp, Artificial Sequence
  Synthetic Oligonucleotide
ccgcacccccgatagtcatcttcactagacacccgtgtta

SEQ ID NO: 8460 - DNA, 40 bp, Artificial Sequence
  Synthetic Oligonucleotide
ccgcacccccgatagtcatctcactggaccacccgtgtta

SEQ ID NO: 8461 - DNA, 40 bp, Artificial Sequence
  Synthetic Oligonucleotide
ccgcacccccgatagtcatctagctggaccacccgcgtta

SEQ ID NO: 8462 - DNA, 40 bp, Artificial Sequence
  Synthetic Oligonucleotide
ccgcacccccgatagtcatcctcactggacacccgtgtta

SEQ ID NO: 8463 - DNA, 40 bp, Artificial Sequence
  Synthetic Oligonucleotide
ccgcacccccgaaagtcatcttcactggacacccgtgtta

SEQ ID NO: 8464 - DNA, 40 bp, Artificial Sequence
  Synthetic Oligonucleotide
ccgcaccccagtagtcatcttcactggaccacccgtgtta

SEQ ID NO: 8465 - DNA, 40 bp, Artificial Sequence
  Synthetic Oligonucleotide
ccgcaccccagatagtcgtctcactggaccacccgtgtta

SEQ ID NO: 8466 - DNA, 40 bp, Artificial Sequence
  Synthetic Oligonucleotide
ccgcaccccagatagtcatcttcactggacacccgtgtta

SEQ ID NO: 8467 - DNA, 40 bp, Artificial Sequence
  Synthetic Oligonucleotide
ccgcacccagatagttcatcttcactggacacccgtgtta

SEQ ID NO: 8468 - DNA, 40 bp, Artificial Sequence
  Synthetic Oligonucleotide
ccgcacccagatagttcatcgttcactgacacccgtgtta

SEQ ID NO: 8469 - DNA, 40 bp, Artificial Sequence
  Synthetic Oligonucleotide
ccgcacagctcacttcgtctttgatcgaccacgctcatat

SEQ ID NO: 8470 - DNA, 40 bp, Artificial Sequence
  Synthetic Oligonucleotide
ccgcacagctcacttcgtcttgatcgaccactgctcataa

SEQ ID NO: 8471 - DNA, 40 bp, Artificial Sequence
  Synthetic Oligonucleotide
ccgcacagctcacttcgtcttcgatcgaccacgctcataa

SEQ ID NO: 8472 - DNA, 40 bp, Artificial Sequence
  Synthetic Oligonucleotide
ccgcacagctcacttcgtccttgatcgaccacgctcataa

SEQ ID NO: 8473 - DNA, 40 bp, Artificial Sequence
  Synthetic Oligonucleotide
ccgcacagcccacttcgtctttgatcgaccacgctcataa

SEQ ID NO: 8474 - DNA, 40 bp, Artificial Sequence
  Synthetic Oligonucleotide
ccgcacacctcacttcgtctttgatcgaccacgctcataa

SEQ ID NO: 8475 - DNA, 40 bp, Artificial Sequence
  Synthetic Oligonucleotide
ccgattgtgcgcttatggagccgggtaccttccagcaagg

SEQ ID NO: 8476 - DNA, 40 bp, Artificial Sequence
  Synthetic Oligonucleotide
ccgagcaccctgatagtcatcttcgctggaccaccgcgta

SEQ ID NO: 8477 - DNA, 40 bp, Artificial Sequence
  Synthetic Oligonucleotide
ccgagcacccgatagtcatcttcactggacacccgtgtta

SEQ ID NO: 8478 - DNA, 40 bp, Artificial Sequence
  Synthetic Oligonucleotide
ccgacacccgatcagtcatcttcactggacacccgtgtta

SEQ ID NO: 8479 - DNA, 40 bp, Artificial Sequence
  Synthetic Oligonucleotide
ccgacaccccgatagtcatcttcactggaccaccgtgtta

SEQ ID NO: 8480 - DNA, 40 bp, Artificial Sequence
  Synthetic Oligonucleotide
ccgaaacctcctggtgcaccgtgacttacgttctctttaa

SEQ ID NO: 8481 - DNA, 40 bp, Artificial Sequence
  Synthetic Oligonucleotide
cccttgtccggcaggacgtctttcgtgcactatcacgatt

SEQ ID NO: 8482 - DNA, 40 bp, Artificial Sequence
  Synthetic Oligonucleotide
ccctctatagtcgtcggtgtagcacgctattgcttagaag

SEQ ID NO: 8483 - DNA, 40 bp, Artificial Sequence
  Synthetic Oligonucleotide
ccctctatagccgtcggcgtagcacgctattgcttagaag

SEQ ID NO: 8484 - DNA, 40 bp, Artificial Sequence
  Synthetic Oligonucleotide
ccctctataatcgtcggcgtagcacgctattgcttagaag

SEQ ID NO: 8485 - DNA, 40 bp, Artificial Sequence
  Synthetic Oligonucleotide
ccctatccgtttgtccgtcctcctgtggtattgcgcatgc

SEQ ID NO: 8486 - DNA, 40 bp, Artificial Sequence
  Synthetic Oligonucleotide
ccctatccgcttgtccgtcctcttgtggtattgcgcatgc

SEQ ID NO: 8487 - DNA, 40 bp, Artificial Sequence
  Synthetic Oligonucleotide
cccgtgatttcctcctacctgggtagccgcgcgttgctag

SEQ ID NO: 8488 - DNA, 40 bp, Artificial Sequence
  Synthetic Oligonucleotide
cccgccctcaggttcccctaacgcgttacgcttcggaatg

SEQ ID NO: 8489 - DNA, 40 bp, Artificial Sequence
  Synthetic Oligonucleotide
cccgcaccccgatagtcatcttcactggaccaccgtgtta

SEQ ID NO: 8490 - DNA, 40 bp, Artificial Sequence
  Synthetic Oligonucleotide
cccgcaagccatgctctagacgcctcaataagatgatgct

SEQ ID NO: 8491 - DNA, 40 bp, Artificial Sequence
  Synthetic Oligonucleotide
cccctatcttgacgtctcttcggggactaccccgattccg

SEQ ID NO: 8492 - DNA, 40 bp, Artificial Sequence
  Synthetic Oligonucleotide
cccatgatttccttctacctgggtagccgcgcgttgctag

SEQ ID NO: 8493 - DNA, 40 bp, Artificial Sequence
  Synthetic Oligonucleotide
cccaaagacttcaggcgctatcctgatctagtctaacacg

SEQ ID NO: 8494 - DNA, 40 bp, Artificial Sequence
  Synthetic Oligonucleotide
ccattgtgcgcttatgggagccgggtaccttccagcaacg

SEQ ID NO: 8495 - DNA, 40 bp, Artificial Sequence
  Synthetic Oligonucleotide
ccattgtgcgcttatggagccgggtaccttccgagcaaag

SEQ ID NO: 8496 - DNA, 40 bp, Artificial Sequence
  Synthetic Oligonucleotide
ccattgtgcgcttatggagccgggtacctcccagcaaggc

SEQ ID NO: 8497 - DNA, 40 bp, Artificial Sequence
  Synthetic Oligonucleotide
ccattgtgcgcttactggagtccggtaccttccagcaagg

SEQ ID NO: 8498 - DNA, 40 bp, Artificial Sequence
  Synthetic Oligonucleotide
ccattgtcgcgcttatggagccgggtaccttccagcaagg

SEQ ID NO: 8499 - DNA, 40 bp, Artificial Sequence
  Synthetic Oligonucleotide
ccagcctcaggttcccctaacgcgttagccttccggaatg

SEQ ID NO: 8500 - DNA, 40 bp, Artificial Sequence
  Synthetic Oligonucleotide
ccactattccggtaagtcatcgtttaaccgtttgttgcaa

SEQ ID NO: 8501 - DNA, 40 bp, Artificial Sequence
  Synthetic Oligonucleotide
ccacattcaccttcgttttatgtcctcttgcctcggacaa

SEQ ID NO: 8502 - DNA, 40 bp, Artificial Sequence
  Synthetic Oligonucleotide
ccaacgtcacctttctcggatgcttacgcctccctgtgcg

SEQ ID NO: 8503 - DNA, 40 bp, Artificial Sequence
  Synthetic Oligonucleotide
cattcgccggtcacatcaactatgatgacgcttgactgga

SEQ ID NO: 8504 - DNA, 40 bp, Artificial Sequence
  Synthetic Oligonucleotide
cattcgccagtcacatcaactatgatgacgcttggctgga

SEQ ID NO: 8505 - DNA, 40 bp, Artificial Sequence
  Synthetic Oligonucleotide
cattcaccagtcacatcaactatgatgacgcttgactgga

SEQ ID NO: 8506 - DNA, 40 bp, Artificial Sequence
  Synthetic Oligonucleotide
cattatctcggatccgtaatctcacgcctcgctcatgccc

SEQ ID NO: 8507 - DNA, 40 bp, Artificial Sequence
  Synthetic Oligonucleotide
cattatccgacatcgagagagctacgccatcaagcgctaa

SEQ ID NO: 8508 - DNA, 40 bp, Artificial Sequence
  Synthetic Oligonucleotide
catggggcttttaagcacttctcgtaacttgggcagttac

SEQ ID NO: 8509 - DNA, 40 bp, Artificial Sequence
  Synthetic Oligonucleotide
catgggctttaagcactttctcggtaacttgggcagttac

SEQ ID NO: 8510 - DNA, 40 bp, Artificial Sequence
  Synthetic Oligonucleotide
catcttcgacacaacgtgatcacgtttggctcgctttcat

SEQ ID NO: 8511 - DNA, 40 bp, Artificial Sequence
  Synthetic Oligonucleotide
catctctcggcccccgtgcgcacgcagctgactcgaactg

SEQ ID NO: 8512 - DNA, 40 bp, Artificial Sequence
  Synthetic Oligonucleotide
catctatccgttgtccgtcctcttgtgtacttgcgcatgc

SEQ ID NO: 8513 - DNA, 40 bp, Artificial Sequence
  Synthetic Oligonucleotide
catctatccgttgtccgtcctcttgtggtattgcgcatgc

SEQ ID NO: 8514 - DNA, 40 bp, Artificial Sequence
  Synthetic Oligonucleotide
catctatccgttgtccgtcctctgtggtaattgcgcatgc

SEQ ID NO: 8515 - DNA, 40 bp, Artificial Sequence
  Synthetic Oligonucleotide
catctatccgttgtccgtcctctgtagtaatgcgccatgc

SEQ ID NO: 8516 - DNA, 40 bp, Artificial Sequence
  Synthetic Oligonucleotide
catctatccgttgtccgtcctctcgtggtattgcgcatgc

SEQ ID NO: 8517 - skipped

SEQ ID NO: 8518 - DNA, 40 bp, Artificial Sequence
  Synthetic Oligonucleotide
catcggtgcgtcatttcccccgcctcgcctctttcgtctg

SEQ ID NO: 8519 - DNA, 40 bp, Artificial Sequence
  Synthetic Oligonucleotide
catcggagtctgcctatcatgtgccaccatgttgtcagga

SEQ ID NO: 8520 - DNA, 40 bp, Artificial Sequence
  Synthetic Oligonucleotide
catcgcttatcagcaggactctttgtgcactatcatcgat

SEQ ID NO: 8521 - DNA, 40 bp, Artificial Sequence
  Synthetic Oligonucleotide
catcgctatccgttgtccgacctcttgtgtatgcgcatgc

SEQ ID NO: 8522 - DNA, 40 bp, Artificial Sequence
  Synthetic Oligonucleotide
catcccggtggttcgtgttcagcaacgctccttaacacgg

SEQ ID NO: 8523 - DNA, 40 bp, Artificial Sequence
  Synthetic Oligonucleotide
catcccggtggtccgtgttcagcaacgctccttaacacga

SEQ ID NO: 8524 - DNA, 40 bp, Artificial Sequence
  Synthetic Oligonucleotide
catacaaatgcacttcccctgcacattaccctccccgctg

SEQ ID NO: 8525 - DNA, 40 bp, Artificial Sequence
  Synthetic Oligonucleotide
cagtctctcggatcaatacgctgcagtctccttccgataa

SEQ ID NO: 8526 - DNA, 40 bp, Artificial Sequence
  Synthetic Oligonucleotide
cagtctcccgatatgtacatatcacttgtgaagtcttata

SEQ ID NO: 8527 - DNA, 40 bp, Artificial Sequence
  Synthetic Oligonucleotide
cagtcgctcccaattgcgtcctccaagttgcaccggtgca

SEQ ID NO: 8528 - DNA, 40 bp, Artificial Sequence
  Synthetic Oligonucleotide
cagtatccgtttgtccgtcctcttgtggtattgcgcatgc

SEQ ID NO: 8529 - DNA, 40 bp, Artificial Sequence
  Synthetic Oligonucleotide
cagtatccgtttgtccgtcctctcgtggtattgcgcatgc

SEQ ID NO: 8530 - DNA, 40 bp, Artificial Sequence
  Synthetic Oligonucleotide
caggttcacaagtgaaaggctgctttctcacgccggtgcg

SEQ ID NO: 8531 - DNA, 40 bp, Artificial Sequence
  Synthetic Oligonucleotide
cagcttatccgttgtccgtcctcttgtggtttgcgcatgc

SEQ ID NO: 8532 - DNA, 40 bp, Artificial Sequence
  Synthetic Oligonucleotide
cagctattgctcatcgagcgatcatctgaaagaatatttg

SEQ ID NO: 8533 - DNA, 40 bp, Artificial Sequence
  Synthetic Oligonucleotide
cagcgtaccatggtgggatcttagcacctccgacatataa

SEQ ID NO: 8534 - DNA, 40 bp, Artificial Sequence
  Synthetic Oligonucleotide
cagcctcaaacactgacgtcgtggaaccttcgattgctag

SEQ ID NO: 8535 - DNA, 40 bp, Artificial Sequence
  Synthetic Oligonucleotide
cagatgcttaagctctttcgccctaggtcctcattgccgg

SEQ ID NO: 8536 - DNA, 40 bp, Artificial Sequence
  Synthetic Oligonucleotide
cagatgattggaatcctgaccgcctcgattcgccgaaccg

SEQ ID NO: 8537 - DNA, 40 bp, Artificial Sequence
  Synthetic Oligonucleotide
cactttccgtttgtccgtcctcctgtggtattgcgcatgc

SEQ ID NO: 8538 - DNA, 40 bp, Artificial Sequence
  Synthetic Oligonucleotide
cacttatccgttgtccgtccttcttgtgtattgcgcatgc

SEQ ID NO: 8539 - DNA, 40 bp, Artificial Sequence
  Synthetic Oligonucleotide
cacttatccgttgtccgtcctcttgtggtattgggcatgc

SEQ ID NO: 8540 - DNA, 40 bp, Artificial Sequence
  Synthetic Oligonucleotide
cacttatccggcaggacgtctttcgtgcgctatcacgatt

SEQ ID NO: 8541 - DNA, 40 bp, Artificial Sequence
  Synthetic Oligonucleotide
cacttatccggcaggacgtctttcgtgcactatcacgact

SEQ ID NO: 8542 - DNA, 40 bp, Artificial Sequence
  Synthetic Oligonucleotide
cacttacccggcaggacgtctttcgtgcactatcacgatt

SEQ ID NO: 8543 - DNA, 40 bp, Artificial Sequence
  Synthetic Oligonucleotide
cactgtccgtttgtccgtcctcttgtggtattgcgcatac

SEQ ID NO: 8544 - DNA, 40 bp, Artificial Sequence
  Synthetic Oligonucleotide
cactgtccgtttgtccgtccccttgtggtattgcgcatgc

SEQ ID NO: 8545 - DNA, 40 bp, Artificial Sequence
  Synthetic Oligonucleotide
cactctccgtttgtccgtcctcttgtggtattgcgcatgc

SEQ ID NO: 8546 - DNA, 40 bp, Artificial Sequence
  Synthetic Oligonucleotide
cactccgtcggaagatcgttcgtggggcactatccccttc

SEQ ID NO: 8547 - DNA, 40 bp, Artificial Sequence
  Synthetic Oligonucleotide
cactccgtcagaagatcgttcatggggcactatccccttc

SEQ ID NO: 8548 - DNA, 40 bp, Artificial Sequence
  Synthetic Oligonucleotide
cactatttgtttgtccgtcctcttgtggtattgcgcatgc

SEQ ID NO: 8549 - DNA, 40 bp, Artificial Sequence
  Synthetic Oligonucleotide
cactattcgtagatccgtcattcactacgcgtatggaatc

SEQ ID NO: 8550 - DNA, 40 bp, Artificial Sequence
  Synthetic Oligonucleotide
cactatctgtttgtccgtcctctcgtggtactgcgcatgc

SEQ ID NO: 8551 - DNA, 40 bp, Artificial Sequence
  Synthetic Oligonucleotide
cactatctgacatcgagagagctacgtcatcaagcgctaa

SEQ ID NO: 8552 - DNA, 40 bp, Artificial Sequence
  Synthetic Oligonucleotide
cactatcgtttgtccgtcctcttcgtggtattgcgcatgc

SEQ ID NO: 8553 - DNA, 40 bp, Artificial Sequence
  Synthetic Oligonucleotide
cactatcgttgtccgtcctcttgtcggtattgcgcatcgc

SEQ ID NO: 8554 - DNA, 40 bp, Artificial Sequence
  Synthetic Oligonucleotide
cactatcgttcgtccgtcctacttgtggtattgcgcatgc

SEQ ID NO: 8555 - DNA, 40 bp, Artificial Sequence
  Synthetic Oligonucleotide
cactatcggtttgtccgtcctcttgtggtattgcgcatgc

SEQ ID NO: 8556 - DNA, 40 bp, Artificial Sequence
  Synthetic Oligonucleotide
cactatcctcttgtccgtcctcttgtggtattgcgcatgc

SEQ ID NO: 8557 - DNA, 40 bp, Artificial Sequence
  Synthetic Oligonucleotide
cactatccgttttgtccgtcctcttgtggtatgcgcatgc

SEQ ID NO: 8558 - DNA, 40 bp, Artificial Sequence
  Synthetic Oligonucleotide
cactatccgttttgtccgtcctctcgtggtattgcgcatg

SEQ ID NO: 8559 - DNA, 40 bp, Artificial Sequence
  Synthetic Oligonucleotide
cactatccgttttgtccgcctcttgtggtattgcgcatgc

SEQ ID NO: 8560 - DNA, 40 bp, Artificial Sequence
  Synthetic Oligonucleotide
cactatccgtttgtttgtcctctcgtggtattgcgcatgc

SEQ ID NO: 8561 - DNA, 40 bp, Artificial Sequence
  Synthetic Oligonucleotide
cactatccgtttgttcgtcctcttgtggtgttgcgcatgc

SEQ ID NO: 8562 - DNA, 40 bp, Artificial Sequence
  Synthetic Oligonucleotide
cactatccgtttgttcgtcctcttgcggtattgcgcatgc

SEQ ID NO: 8563 - DNA, 40 bp, Artificial Sequence
  Synthetic Oligonucleotide
cactatccgtttgtctgtcctcttgtggtattgcgcacgc

SEQ ID NO: 8564 - DNA, 40 bp, Artificial Sequence
  Synthetic Oligonucleotide
cactatccgtttgtctcgtcctcttgtggtatgcgcatcg

SEQ ID NO: 8565 - DNA, 40 bp, Artificial Sequence
  Synthetic Oligonucleotide
cactatccgtttgtcgtcctcttgtcggtattgcgcatgc

SEQ ID NO: 8566 - DNA, 40 bp, Artificial Sequence
  Synthetic Oligonucleotide
cactatccgtttgtcctcctcttgtggtcattgcgcatgc

SEQ ID NO: 8567 - DNA, 40 bp, Artificial Sequence
  Synthetic Oligonucleotide
cactatccgtttgtccgttctcttgtggtattgcgcgtgc

SEQ ID NO: 8568 - DNA, 40 bp, Artificial Sequence
  Synthetic Oligonucleotide
cactatccgtttgtccgttctctggtggtattgcgcatgc

SEQ ID NO: 8569 - DNA, 40 bp, Artificial Sequence
  Synthetic Oligonucleotide
cactatccgtttgtccgtcttcttgtggtgttgcgcacgc

SEQ ID NO: 8570 - DNA, 40 bp, Artificial Sequence
  Synthetic Oligonucleotide
cactatccgtttgtccgtctcttacgtggtatgcgcatgc

SEQ ID NO: 8571 - DNA, 40 bp, Artificial Sequence
  Synthetic Oligonucleotide
cactatccgtttgtccgtccttttgtggtattgcgcacgc

SEQ ID NO: 8572 - DNA, 40 bp, Artificial Sequence
  Synthetic Oligonucleotide
cactatccgtttgtccgtcctttcgtggtattgcgcatgc

SEQ ID NO: 8573 - DNA, 40 bp, Artificial Sequence
  Synthetic Oligonucleotide
cactatccgtttgtccgtcctttcgtggtattgcgcacgc

SEQ ID NO: 8574 - DNA, 40 bp, Artificial Sequence
  Synthetic Oligonucleotide
cactatccgtttgtccgtccttcttgtgtatgcgcatagc

SEQ ID NO: 8575 - DNA, 40 bp, Artificial Sequence
  Synthetic Oligonucleotide
cactatccgtttgtccgtccttctcgtgtatgcgcatagc

SEQ ID NO: 8576 - DNA, 40 bp, Artificial Sequence
  Synthetic Oligonucleotide
cactatccgtttgtccgtcctcttttggtattgcgcaggc

SEQ ID NO: 8577 - DNA, 40 bp, Artificial Sequence
  Synthetic Oligonucleotide
cactatccgtttgtccgtcctcttgtgtattgcgcatgtc

SEQ ID NO: 8578 - DNA, 40 bp, Artificial Sequence
  Synthetic Oligonucleotide
cactatccgtttgtccgtcctcttgtggtgttgtgcatgc

SEQ ID NO: 8579 - DNA, 40 bp, Artificial Sequence
  Synthetic Oligonucleotide
cactatccgtttgtccgtcctcttgtggtgttgcgcatgt

SEQ ID NO: 8580 - DNA, 40 bp, Artificial Sequence
  Synthetic Oligonucleotide
cactatccgtttgtccgtcctcttgtggtgttgcgcatgg

SEQ ID NO: 8581 - DNA, 40 bp, Artificial Sequence
  Synthetic Oligonucleotide
cactatccgtttgtccgtcctcttgtggtgtcgcgcatgc

SEQ ID NO: 8582 - DNA, 40 bp, Artificial Sequence
  Synthetic Oligonucleotide
cactatccgtttgtccgtcctcttgtggtcttgcgcatgc

SEQ ID NO: 8583 - DNA, 40 bp, Artificial Sequence
  Synthetic Oligonucleotide
cactatccgtttgtccgtcctcttgtggtcatgcgcatgc

SEQ ID NO: 8584 - DNA, 40 bp, Artificial Sequence
  Synthetic Oligonucleotide
cactatccgtttgtccgtcctcttgtggtattgcgcgggc

SEQ ID NO: 8585 - DNA, 40 bp, Artificial Sequence
  Synthetic Oligonucleotide
cactatccgtttgtccgtcctcttgtggtattgcgcccgc

SEQ ID NO: 8586 - DNA, 40 bp, Artificial Sequence
  Synthetic Oligonucleotide
cactatccgtttgtccgtcctcttgtggtattgcgcatag

SEQ ID NO: 8587 - DNA, 40 bp, Artificial Sequence
  Synthetic Oligonucleotide
cactatccgtttgtccgtcctcttgtggtattgcgcagga

SEQ ID NO: 8588 - DNA, 40 bp, Artificial Sequence
  Synthetic Oligonucleotide
cactatccgtttgtccgtcctcttgtggtattgcgcacgt

SEQ ID NO: 8589 - DNA, 40 bp, Artificial Sequence
  Synthetic Oligonucleotide
cactatccgtttgtccgtcctcttgtggtattgcgcacga

SEQ ID NO: 8590 - DNA, 40 bp, Artificial Sequence
  Synthetic Oligonucleotide
cactatccgtttgtccgtcctcttgtggtattgcccatgc

SEQ ID NO: 8591 - DNA, 40 bp, Artificial Sequence
  Synthetic Oligonucleotide
cactatccgtttgtccgtcctcttgtggtattccgcacgc

SEQ ID NO: 8592 - DNA, 40 bp, Artificial Sequence
  Synthetic Oligonucleotide
cactatccgtttgtccgtcctcttgtggtatagcgcatcg

SEQ ID NO: 8593 - DNA, 40 bp, Artificial Sequence
  Synthetic Oligonucleotide
cactatccgtttgtccgtcctcttgtggtactgcgcatac

SEQ ID NO: 8594 - DNA, 40 bp, Artificial Sequence
  Synthetic Oligonucleotide
cactatccgtttgtccgtcctcttgtggtactacgcatgc

SEQ ID NO: 8595 - DNA, 40 bp, Artificial Sequence
  Synthetic Oligonucleotide
cactatccgtttgtccgtcctcttgtggtaattgcgcatg

SEQ ID NO: 8596 - DNA, 40 bp, Artificial Sequence
  Synthetic Oligonucleotide
cactatccgtttgtccgtcctcttgtggggttgcgcatgc

SEQ ID NO: 8597 - DNA, 40 bp, Artificial Sequence
  Synthetic Oligonucleotide
cactatccgtttgtccgtcctcttgtgggaatgcgcatgc

SEQ ID NO: 8598 - DNA, 40 bp, Artificial Sequence
  Synthetic Oligonucleotide
cactatccgtttgtccgtcctcttgtggcgttgcgcatgc

SEQ ID NO: 8599 - DNA, 40 bp, Artificial Sequence
  Synthetic Oligonucleotide
cactatccgtttgtccgtcctcttgtggcatttcgcatgc

SEQ ID NO: 8600 - DNA, 40 bp, Artificial Sequence
  Synthetic Oligonucleotide
cactatccgtttgtccgtcctcttgtggcattgtgcatgc

SEQ ID NO: 8601 - DNA, 40 bp, Artificial Sequence
  Synthetic Oligonucleotide
cactatccgtttgtccgtcctcttgtggcattgcgcatgt

SEQ ID NO: 8602 - DNA, 40 bp, Artificial Sequence
  Synthetic Oligonucleotide
cactatccgtttgtccgtcctcttgtggcattgcacatgc

SEQ ID NO: 8603 - DNA, 40 bp, Artificial Sequence
  Synthetic Oligonucleotide
cactatccgtttgtccgtcctcttgtgatattgcgcacgc

SEQ ID NO: 8604 - DNA, 40 bp, Artificial Sequence
  Synthetic Oligonucleotide
cactatccgtttgtccgtcctcttgtgatatcgcgcatgc

SEQ ID NO: 8605 - DNA, 40 bp, Artificial Sequence
  Synthetic Oligonucleotide
cactatccgtttgtccgtcctcttgtagttttgcgcatgc

SEQ ID NO: 8606 - DNA, 40 bp, Artificial Sequence
  Synthetic Oligonucleotide
cactatccgtttgtccgtcctcttgtagtgttgcgcatgc

SEQ ID NO: 8607 - DNA, 40 bp, Artificial Sequence
  Synthetic Oligonucleotide
cactatccgtttgtccgtcctcttgtagtattgcgcgtgc

SEQ ID NO: 8608 - DNA, 40 bp, Artificial Sequence
  Synthetic Oligonucleotide
cactatccgtttgtccgtcctcttgtagtattgcgcatac

SEQ ID NO: 8609 - DNA, 40 bp, Artificial Sequence
  Synthetic Oligonucleotide
cactatccgtttgtccgtcctcttgtagtattgcgcaagc

SEQ ID NO: 8610 - DNA, 40 bp, Artificial Sequence
  Synthetic Oligonucleotide
cactatccgtttgtccgtcctcttgtaatattgcgcatgc

SEQ ID NO: 8611 - DNA, 40 bp, Artificial Sequence
  Synthetic Oligonucleotide
cactatccgtttgtccgtcctcttggtggtatgcgcatgc

SEQ ID NO: 8612 - DNA, 40 bp, Artificial Sequence
  Synthetic Oligonucleotide
cactatccgtttgtccgtcctcttgcggtattgcgcatac

SEQ ID NO: 8613 - DNA, 40 bp, Artificial Sequence
  Synthetic Oligonucleotide
cactatccgtttgtccgtcctcttcgtggtattgcgcatg

SEQ ID NO: 8614 - DNA, 40 bp, Artificial Sequence
  Synthetic Oligonucleotide
cactatccgtttgtccgtcctcttcgtggattgcgcatgc

SEQ ID NO: 8615 - DNA, 40 bp, Artificial Sequence
  Synthetic Oligonucleotide
cactatccgtttgtccgtcctcttatggtattgcgcttgc

SEQ ID NO: 8616 - DNA, 40 bp, Artificial Sequence
  Synthetic Oligonucleotide
cactatccgtttgtccgtcctcttatggtattgcgcatcg

SEQ ID NO: 8617 - DNA, 40 bp, Artificial Sequence
  Synthetic Oligonucleotide
cactatccgtttgtccgtcctcttatggtattgcgcacgc

SEQ ID NO: 8618 - DNA, 40 bp, Artificial Sequence
  Synthetic Oligonucleotide
cactatccgtttgtccgtcctctgtggtacttgcgcatgc

SEQ ID NO: 8619 - DNA, 40 bp, Artificial Sequence
  Synthetic Oligonucleotide
cactatccgtttgtccgtcctctggtggtactgcgcatgc

SEQ ID NO: 8620 - DNA, 40 bp, Artificial Sequence
  Synthetic Oligonucleotide
cactatccgtttgtccgtcctctcgttgtactgcgcatgc

SEQ ID NO: 8621 - DNA, 40 bp, Artificial Sequence
  Synthetic Oligonucleotide
cactatccgtttgtccgtcctctcgtggtattgcgcataa

SEQ ID NO: 8622 - DNA, 40 bp, Artificial Sequence
  Synthetic Oligonucleotide
cactatccgtttgtccgtcctctcgtggtattgcgaatgc

SEQ ID NO: 8623 - DNA, 40 bp, Artificial Sequence
  Synthetic Oligonucleotide
cactatccgtttgtccgtcctctcgtggtatgcgcatgcc

SEQ ID NO: 8624 - DNA, 40 bp, Artificial Sequence
  Synthetic Oligonucleotide
cactatccgtttgtccgtcctctcgtggtactgcgcacgc

SEQ ID NO: 8625 - DNA, 40 bp, Artificial Sequence
  Synthetic Oligonucleotide
cactatccgtttgtccgtcctctcgtgggattgcgcatgc

SEQ ID NO: 8626 - DNA, 40 bp, Artificial Sequence
  Synthetic Oligonucleotide
cactatccgtttgtccgtcctctcgtcgtattgcgcatgc

SEQ ID NO: 8627 - DNA, 40 bp, Artificial Sequence
  Synthetic Oligonucleotide
cactatccgtttgtccgtcctctcgtcggtattgcgctgc

SEQ ID NO: 8628 - DNA, 40 bp, Artificial Sequence
  Synthetic Oligonucleotide
cactatccgtttgtccgtcctctcgtcggattgcgcatgc

SEQ ID NO: 8629 - DNA, 40 bp, Artificial Sequence
  Synthetic Oligonucleotide
cactatccgtttgtccgtcctctcgcggtattgcgcgtgc

SEQ ID NO: 8630 - DNA, 40 bp, Artificial Sequence
  Synthetic Oligonucleotide
cactatccgtttgtccgtcctctcgcggtattgcgcatac

SEQ ID NO: 8631 - DNA, 40 bp, Artificial Sequence
  Synthetic Oligonucleotide
cactatccgtttgtccgtcctctcgaggtattgcgcacgc

SEQ ID NO: 8632 - DNA, 40 bp, Artificial Sequence
  Synthetic Oligonucleotide
cactatccgtttgtccgtcctctcagtgttatgcgcatcg

SEQ ID NO: 8633 - DNA, 40 bp, Artificial Sequence
  Synthetic Oligonucleotide
cactatccgtttgtccgtcctctagtggtattgcgcatat

SEQ ID NO: 8634 - DNA, 40 bp, Artificial Sequence
  Synthetic Oligonucleotide
cactatccgtttgtccgtcctctagtggtattgcgaatgc

SEQ ID NO: 8635 - DNA, 40 bp, Artificial Sequence
  Synthetic Oligonucleotide
cactatccgtttgtccgtcctcctttggtattgcgcatgc

SEQ ID NO: 8636 - DNA, 40 bp, Artificial Sequence
  Synthetic Oligonucleotide
cactatccgtttgtccgtcctcctgtgttattgcgcatgc

SEQ ID NO: 8637 - DNA, 40 bp, Artificial Sequence
  Synthetic Oligonucleotide
cactatccgtttgtccgtcctcctgtggtattgtgcatgc

SEQ ID NO: 8638 - DNA, 40 bp, Artificial Sequence
  Synthetic Oligonucleotide
cactatccgtttgtccgtcctcctgtggtattgcgcatga

SEQ ID NO: 8639 - DNA, 40 bp, Artificial Sequence
  Synthetic Oligonucleotide
cactatccgtttgtccgtcctcctgtggtaatgcgcatgc

SEQ ID NO: 8640 - DNA, 40 bp, Artificial Sequence
  Synthetic Oligonucleotide
cactatccgtttgtccgtcctcctgtggaattgcgcatgc

SEQ ID NO: 8641 - DNA, 40 bp, Artificial Sequence
  Synthetic Oligonucleotide
cactatccgtttgtccgtcctcctgtgatattgcgcatgc

SEQ ID NO: 8642 - DNA, 40 bp, Artificial Sequence
  Synthetic Oligonucleotide
cactatccgtttgtccgtcctcctgtagtattgcgcatgc

SEQ ID NO: 8643 - DNA, 40 bp, Artificial Sequence
  Synthetic Oligonucleotide
cactatccgtttgtccgtcctcccttggtattgcgcatgc

SEQ ID NO: 8644 - DNA, 40 bp, Artificial Sequence
  Synthetic Oligonucleotide
cactatccgtttgtccgtcctccagtggtattgcgcatgc

SEQ ID NO: 8645 - DNA, 40 bp, Artificial Sequence
  Synthetic Oligonucleotide
cactatccgtttgtccgtccgtctgtggtattgcgcatgc

SEQ ID NO: 8646 - DNA, 40 bp, Artificial Sequence
  Synthetic Oligonucleotide
cactatccgtttgtccgtccgctcgtggtattgcgcatgc

SEQ ID NO: 8647 - DNA, 40 bp, Artificial Sequence
  Synthetic Oligonucleotide
cactatccgtttgtccgtcccttgtggtattgcgcatgcc

SEQ ID NO: 8648 - DNA, 40 bp, Artificial Sequence
  Synthetic Oligonucleotide
cactatccgtttgtccgtcccttgtcggtattgcgcatgc

SEQ ID NO: 8649 - DNA, 40 bp, Artificial Sequence
  Synthetic Oligonucleotide
cactatccgtttgtccgtccccttgtggtattgcgcatac

SEQ ID NO: 8650 - DNA, 40 bp, Artificial Sequence
  Synthetic Oligonucleotide
cactatccgtttgtccgtccccttgtggtattgcgcacgc

SEQ ID NO: 8651 - DNA, 40 bp, Artificial Sequence
  Synthetic Oligonucleotide
cactatccgtttgtccgtccccctgtggtattgcgcatgc

SEQ ID NO: 8652 - DNA, 40 bp, Artificial Sequence
  Synthetic Oligonucleotide
cactatccgtttgtccgtccacttgtggtattgcgcatac

SEQ ID NO: 8653 - DNA, 40 bp, Artificial Sequence
  Synthetic Oligonucleotide
cactatccgtttgtccgtccacttgaggtattgcgcatgc

SEQ ID NO: 8654 - DNA, 40 bp, Artificial Sequence
  Synthetic Oligonucleotide
cactatccgtttgtccgtcactcttgtgtatgcgcatcgc

SEQ ID NO: 8655 - DNA, 40 bp, Artificial Sequence
  Synthetic Oligonucleotide
cactatccgtttgtccgtactctcgtggtattgcgcatgc

SEQ ID NO: 8656 - DNA, 40 bp, Artificial Sequence
  Synthetic Oligonucleotide
cactatccgtttgtccgcctcttgtcggtattgcgcatgc

SEQ ID NO: 8657 - DNA, 40 bp, Artificial Sequence
  Synthetic Oligonucleotide
cactatccgtttgtccgccctcttgtggtattacgcatgc

SEQ ID NO: 8658 - DNA, 40 bp, Artificial Sequence
  Synthetic Oligonucleotide
cactatccgtttgtccgatcctcttgtggtatgcgcatgc

SEQ ID NO: 8659 - DNA, 40 bp, Artificial Sequence
  Synthetic Oligonucleotide
cactatccgtttgtccgatcctctgtggtattgcgcatgc

SEQ ID NO: 8660 - DNA, 40 bp, Artificial Sequence
  Synthetic Oligonucleotide
cactatccgtttgtccgacctcttgtggtattgcgcatac

SEQ ID NO: 8661 - DNA, 40 bp, Artificial Sequence
  Synthetic Oligonucleotide
cactatccgtttgtcccgtcctcttgtggtattgcgcatg

SEQ ID NO: 8662 - DNA, 40 bp, Artificial Sequence
  Synthetic Oligonucleotide
cactatccgtttgtccatcctcttgtggtattgcgcgtgc

SEQ ID NO: 8663 - DNA, 40 bp, Artificial Sequence
  Synthetic Oligonucleotide
cactatccgtttgtcagtcctcctgtggtattgcgcatgc

SEQ ID NO: 8664 - DNA, 40 bp, Artificial Sequence
  Synthetic Oligonucleotide
cactatccgtttggccgtcctcttgtggcattgcgcatgc

SEQ ID NO: 8665 - DNA, 40 bp, Artificial Sequence
  Synthetic Oligonucleotide
cactatccgtttgctcgtcctcttgtggtattgcgcatcg

SEQ ID NO: 8666 - DNA, 40 bp, Artificial Sequence
  Synthetic Oligonucleotide
cactatccgtttgctccgtcctcttgtggtattgcgcatg

SEQ ID NO: 8667 - DNA, 40 bp, Artificial Sequence
  Synthetic Oligonucleotide
cactatccgtttgctccgtcctctcgtggtatgcgcatgc

SEQ ID NO: 8668 - DNA, 40 bp, Artificial Sequence
  Synthetic Oligonucleotide
cactatccgtttgcctcgtcctctgtggtgttgcgcatgc

SEQ ID NO: 8669 - DNA, 40 bp, Artificial Sequence
  Synthetic Oligonucleotide
cactatccgtttgccgtcctctcgtggtattgcgcatgcc

SEQ ID NO: 8670 - DNA, 40 bp, Artificial Sequence
  Synthetic Oligonucleotide
cactatccgtttgcccgtcctcatgtggtattgcgcatgc

SEQ ID NO: 8671 - DNA, 40 bp, Artificial Sequence
  Synthetic Oligonucleotide
cactatccgtttgcccgccctcttgtggtattgcgcatgc

SEQ ID NO: 8672 - DNA, 40 bp, Artificial Sequence
  Synthetic Oligonucleotide
cactatccgtttgatccgtcctctgtggtattgcgcatgc

SEQ ID NO: 8673 - DNA, 40 bp, Artificial Sequence
  Synthetic Oligonucleotide
cactatccgtttgaccgtcctcctgtggtattgcgcatgc

SEQ ID NO: 8674 - DNA, 40 bp, Artificial Sequence
  Synthetic Oligonucleotide
cactatccgtttcgtcgtcctcttgtggtattgcgcatgc

SEQ ID NO: 8675 - DNA, 40 bp, Artificial Sequence
  Synthetic Oligonucleotide
cactatccgtttatccgtcctcttgtggtatagcgcatgc

SEQ ID NO: 8676 - DNA, 40 bp, Artificial Sequence
  Synthetic Oligonucleotide
cactatccgtttaaccgtcctcttgtggtattgcgcatcg

SEQ ID NO: 8677 - DNA, 40 bp, Artificial Sequence
  Synthetic Oligonucleotide
cactatccgttgtcgtccttcttgtggtattgcgcatgtc

SEQ ID NO: 8678 - DNA, 40 bp, Artificial Sequence
  Synthetic Oligonucleotide
cactatccgttgtcggtcctctttgtggtattgcgcatgt

SEQ ID NO: 8679 - DNA, 40 bp, Artificial Sequence
  Synthetic Oligonucleotide
cactatccgttgtccgttcctcttgtggtattgcgcatgc

SEQ ID NO: 8680 - DNA, 40 bp, Artificial Sequence
  Synthetic Oligonucleotide
cactatccgttgtccgtccttcttgtgtactgcgcatgtc

SEQ ID NO: 8681 - DNA, 40 bp, Artificial Sequence
  Synthetic Oligonucleotide
cactatccgttgtccgtccttcttgtcgtatgcgcatacg

SEQ ID NO: 8682 - DNA, 40 bp, Artificial Sequence
  Synthetic Oligonucleotide
cactatccgttgtccgtccttcttgtcgtactgcgcatgc

SEQ ID NO: 8683 - DNA, 40 bp, Artificial Sequence
  Synthetic Oligonucleotide
cactatccgttgtccgtccttctcgtgtattgcgcatcgc

SEQ ID NO: 8684 - DNA, 40 bp, Artificial Sequence
  Synthetic Oligonucleotide
cactatccgttgtccgtccttcctgtggtattgcgcatgc

SEQ ID NO: 8685 - DNA, 40 bp, Artificial Sequence
  Synthetic Oligonucleotide
cactatccgttgtccgtcctcttgtgtattgacgcatagc

SEQ ID NO: 8686 - DNA, 40 bp, Artificial Sequence
  Synthetic Oligonucleotide
cactatccgttgtccgtcctcttgtggtattgcgcatggc

SEQ ID NO: 8687 - DNA, 40 bp, Artificial Sequence
  Synthetic Oligonucleotide
cactatccgttgtccgtcctcttgtggtattgcgcagtgc

SEQ ID NO: 8688 - DNA, 40 bp, Artificial Sequence
  Synthetic Oligonucleotide
cactatccgttgtccgtcctcttgtggtattgcgcacgtc

SEQ ID NO: 8689 - DNA, 40 bp, Artificial Sequence
  Synthetic Oligonucleotide
cactatccgttgtccgtcctcttgtggtattacgcatgtc

SEQ ID NO: 8690 - DNA, 40 bp, Artificial Sequence
  Synthetic Oligonucleotide
cactatccgttgtccgtcctcttgtggtacttgcgcacgc

SEQ ID NO: 8691 - DNA, 40 bp, Artificial Sequence
  Synthetic Oligonucleotide
cactatccgttgtccgtcctcttgtggtactgcgtcatgc

SEQ ID NO: 8692 - DNA, 40 bp, Artificial Sequence
  Synthetic Oligonucleotide
cactatccgttgtccgtcctcttgtggtaatgcgcatgtc

SEQ ID NO: 8693 - DNA, 40 bp, Artificial Sequence
  Synthetic Oligonucleotide
cactatccgttgtccgtcctcttgtcgtaattgcgcatgc

SEQ ID NO: 8694 - DNA, 40 bp, Artificial Sequence
  Synthetic Oligonucleotide
cactatccgttgtccgtcctcttgtcggtattgcgtatgc

SEQ ID NO: 8695 - DNA, 40 bp, Artificial Sequence
  Synthetic Oligonucleotide
cactatccgttgtccgtcctcttagtggtattgcgcatgc

SEQ ID NO: 8696 - DNA, 40 bp, Artificial Sequence
  Synthetic Oligonucleotide
cactatccgttgtccgtcctctcgtggtattgcgcattgc

SEQ ID NO: 8697 - DNA, 40 bp, Artificial Sequence
  Synthetic Oligonucleotide
cactatccgttgtccgtcctctcgtggtattgcgcatgac

SEQ ID NO: 8698 - DNA, 40 bp, Artificial Sequence
  Synthetic Oligonucleotide
cactatccgttgtccgtcctctcgtggtacttgcgcatgc

SEQ ID NO: 8699 - DNA, 40 bp, Artificial Sequence
  Synthetic Oligonucleotide
cactatccgttgtccgtcctctcgtggtactgcgcatgtc

SEQ ID NO: 8700 - DNA, 40 bp, Artificial Sequence
  Synthetic Oligonucleotide
cactatccgttgtccgtcctctagtggtattgcgcatgtc

SEQ ID NO: 8701 - DNA, 40 bp, Artificial Sequence
  Synthetic Oligonucleotide
cactatccgttgtccgtcctcctgtggtattgcgtcatgc

SEQ ID NO: 8702 - DNA, 40 bp, Artificial Sequence
  Synthetic Oligonucleotide
cactatccgttgtccgtcctcctgtggtattgcgcatcgc

SEQ ID NO: 8703 - DNA, 40 bp, Artificial Sequence
  Synthetic Oligonucleotide
cactatccgttgtccgtccctcttgtggtattgcgcatgc

SEQ ID NO: 8704 - DNA, 40 bp, Artificial Sequence
  Synthetic Oligonucleotide
cactatccgttgtccgccctcttgtggtattgcgcatgtc

SEQ ID NO: 8705 - DNA, 40 bp, Artificial Sequence
  Synthetic Oligonucleotide
cactatccgttgtccgatcctctcgtggtatgcgtcatgc

SEQ ID NO: 8706 - DNA, 40 bp, Artificial Sequence
  Synthetic Oligonucleotide
cactatccgttgtccgatcctcctgtggtactgcgcatgc

SEQ ID NO: 8707 - DNA, 40 bp, Artificial Sequence
  Synthetic Oligonucleotide
cactatccgttgctccgtcctcttgtggtattgcgcatgc

SEQ ID NO: 8708 - DNA, 40 bp, Artificial Sequence
  Synthetic Oligonucleotide
cactatccgttgcccgtcctcttgtggtattgcgcatgtc

SEQ ID NO: 8709 - DNA, 40 bp, Artificial Sequence
  Synthetic Oligonucleotide
cactatccgttctgtcgtcctcttgtggtattgcgcatgc

SEQ ID NO: 8710 - DNA, 40 bp, Artificial Sequence
  Synthetic Oligonucleotide
cactatccgttctgtcgtcctcttgtcggattgcgcatgc

SEQ ID NO: 8711 - DNA, 40 bp, Artificial Sequence
  Synthetic Oligonucleotide
cactatccgttcgtccgtccttctgtgtattgcgcatgtc

SEQ ID NO: 8712 - DNA, 40 bp, Artificial Sequence
  Synthetic Oligonucleotide
cactatccgttcgtccgtcctcttgtggtactgcgcatgc

SEQ ID NO: 8713 - DNA, 40 bp, Artificial Sequence
  Synthetic Oligonucleotide
cactatccgttcgtccgtcctctcgtggtattgcgcaagc

SEQ ID NO: 8714 - DNA, 40 bp, Artificial Sequence
  Synthetic Oligonucleotide
cactatccgttatcgagcgttgtcaacaagcggctaaggc

SEQ ID NO: 8715 - DNA, 40 bp, Artificial Sequence
  Synthetic Oligonucleotide
cactatccgtcttaacgtgttcccttcgggcatccatcaa

SEQ ID NO: 8716 - DNA, 40 bp, Artificial Sequence
  Synthetic Oligonucleotide
cactatccgtctgtccgtcctcttgtggtatcgcgcatgc

SEQ ID NO: 8717 - DNA, 40 bp, Artificial Sequence
  Synthetic Oligonucleotide
cactatccgtctgtccgtcctcttgtgatattgcgcatgc

SEQ ID NO: 8718 - DNA, 40 bp, Artificial Sequence
  Synthetic Oligonucleotide
cactatccgtctgtccgtcctcttgtcgtattgcgcatgc

SEQ ID NO: 8719 - DNA, 40 bp, Artificial Sequence
  Synthetic Oligonucleotide
cactatccgtctgtccgtcctcttgaggtattgcgcatgc

SEQ ID NO: 8720 - DNA, 40 bp, Artificial Sequence
  Synthetic Oligonucleotide
cactatccgtctgtccgtcctctgtcggtattgcgcatgc

SEQ ID NO: 8721 - DNA, 40 bp, Artificial Sequence
  Synthetic Oligonucleotide
cactatccgtctgtccgtcctctcgtggtgttgcgcatgc

SEQ ID NO: 8722 - DNA, 40 bp, Artificial Sequence
  Synthetic Oligonucleotide
cactatccgtctgtccgtcctctcgaggtattgcgcatgc

SEQ ID NO: 8723 - DNA, 40 bp, Artificial Sequence
  Synthetic Oligonucleotide
cactatccgtctgtccgtcctcatgtggtattgcgcatgc

SEQ ID NO: 8724 - DNA, 40 bp, Artificial Sequence
  Synthetic Oligonucleotide
cactatccgtctgtccgtccacttgtggtattgcgcatgc

SEQ ID NO: 8725 - DNA, 40 bp, Artificial Sequence
  Synthetic Oligonucleotide
cactatccgtatcgagcgttgtcaacgagtggctaaggcc

SEQ ID NO: 8726 - DNA, 40 bp, Artificial Sequence
  Synthetic Oligonucleotide
cactatccgtatcgagcgttgtcaacgagcggctcaggcc

SEQ ID NO: 8727 - DNA, 40 bp, Artificial Sequence
  Synthetic Oligonucleotide
cactatccgtatcgagcgttgtcaacaagcggctatggcc

SEQ ID NO: 8728 - DNA, 40 bp, Artificial Sequence
  Synthetic Oligonucleotide
cactatccgtatcgagcgttgtcaacaagcggctaagccc

SEQ ID NO: 8729 - DNA, 40 bp, Artificial Sequence
  Synthetic Oligonucleotide
cactatccgtatcgagcgttgtcaacaagcggctaaagcc

SEQ ID NO: 8730 - DNA, 40 bp, Artificial Sequence
  Synthetic Oligonucleotide
cactatccgtatcgagcgttgtcaacaagcgactaaggcc

SEQ ID NO: 8731 - DNA, 40 bp, Artificial Sequence
  Synthetic Oligonucleotide
cactatccgtatcgagcgttgtcaacaagaggctaaggcc

SEQ ID NO: 8732 - DNA, 40 bp, Artificial Sequence
  Synthetic Oligonucleotide
cactatccgtagatccgtctctcactacgcgtatggagtc

SEQ ID NO: 8733 - DNA, 40 bp, Artificial Sequence
  Synthetic Oligonucleotide
cactatccgtagatccgtcactctctacgcgtatggaatc

SEQ ID NO: 8734 - DNA, 40 bp, Artificial Sequence
  Synthetic Oligonucleotide
cactatccgtagatccgtcactcactacgcgtatgggatc

SEQ ID NO: 8735 - DNA, 40 bp, Artificial Sequence
  Synthetic Oligonucleotide
cactatccgtagatccgtcactcactacgcgtatggaatt

SEQ ID NO: 8736 - DNA, 40 bp, Artificial Sequence
  Synthetic Oligonucleotide
cactatccgtagatccgtcactcactacgcgtatgaaatc

SEQ ID NO: 8737 - DNA, 40 bp, Artificial Sequence
  Synthetic Oligonucleotide
cactatccgtagatccgtcactcactacgcgtagtagact

SEQ ID NO: 8738 - DNA, 40 bp, Artificial Sequence
  Synthetic Oligonucleotide
cactatccgtagacccgtcactcactacgcgtatggagtc

SEQ ID NO: 8739 - DNA, 40 bp, Artificial Sequence
  Synthetic Oligonucleotide
cactatccggtttgtccgtcctctgtggtattgcgcatgc

SEQ ID NO: 8740 - DNA, 40 bp, Artificial Sequence
  Synthetic Oligonucleotide
cactatccgcttgtctgtcctcttgtggtattgcgcatgc

SEQ ID NO: 8741 - DNA, 40 bp, Artificial Sequence
  Synthetic Oligonucleotide
cactatccgcttgtccgtgctcttgtggtattgcgcatgc

SEQ ID NO: 8742 - DNA, 40 bp, Artificial Sequence
  Synthetic Oligonucleotide
cactatccgcttgtccgtcttctcgtggtattgcgcatgc

SEQ ID NO: 8743 - DNA, 40 bp, Artificial Sequence
  Synthetic Oligonucleotide
cactatccgcttgtccgtcctcttgtggtattgctcatgc

SEQ ID NO: 8744 - DNA, 40 bp, Artificial Sequence
  Synthetic Oligonucleotide
cactatccgcttgtccgtcctcttgtggtattgcgcaagc

SEQ ID NO: 8745 - DNA, 40 bp, Artificial Sequence
  Synthetic Oligonucleotide
cactatccgcttgtccgtcctcttgtggtattgcacatgc

SEQ ID NO: 8746 - DNA, 40 bp, Artificial Sequence
  Synthetic Oligonucleotide
cactatccgcttgtccgtcctcttgtggtatcgcgcatgc

SEQ ID NO: 8747 - DNA, 40 bp, Artificial Sequence
  Synthetic Oligonucleotide
cactatccgcttgtccgtcctcttgtggtactgcgcatgc

SEQ ID NO: 8748 - DNA, 40 bp, Artificial Sequence
  Synthetic Oligonucleotide
cactatccgcttgtccgtcctctcgtggtattgcgcatgt

SEQ ID NO: 8749 - DNA, 40 bp, Artificial Sequence
  Synthetic Oligonucleotide
cactatccgcttgtccgtactcttgtggtattgcgcatgc

SEQ ID NO: 8750 - DNA, 40 bp, Artificial Sequence
  Synthetic Oligonucleotide
cactatccgcttgtccgccctctcgtggtattgcgcatgc

SEQ ID NO: 8751 - DNA, 40 bp, Artificial Sequence
  Synthetic Oligonucleotide
cactatccgcttgtcagtcctcttgtggtattgcgcatgc

SEQ ID NO: 8752 - DNA, 40 bp, Artificial Sequence
  Synthetic Oligonucleotide
cactatccgctgtccgtcctcttgtcggtattgcgcatgc

SEQ ID NO: 8753 - DNA, 40 bp, Artificial Sequence
  Synthetic Oligonucleotide
cactatccgcctgtccgtcctctcgtggtattgcgcatgc

SEQ ID NO: 8754 - DNA, 40 bp, Artificial Sequence
  Synthetic Oligonucleotide
cactatccgccatcgagtcgaacagtgcgccgtttcggtg

SEQ ID NO: 8755 - DNA, 40 bp, Artificial Sequence
  Synthetic Oligonucleotide
cactatccgcatcgagcgctgtcaacaagcggctaaggcc

SEQ ID NO: 8756 - DNA, 40 bp, Artificial Sequence
  Synthetic Oligonucleotide
cactatccgagttgtccgttcctctgtgtattgcgcatgc

SEQ ID NO: 8757 - DNA, 40 bp, Artificial Sequence
  Synthetic Oligonucleotide
cactatccgacctcgagagagctacgtcatcaagcgctaa

SEQ ID NO: 8758 - DNA, 40 bp, Artificial Sequence
  Synthetic Oligonucleotide
cactatccctagatccgtcactcactacgcgtatggaatc

SEQ ID NO: 8759 - DNA, 40 bp, Artificial Sequence
  Synthetic Oligonucleotide
cactatcccgtttgtccgtctcttgtggtattgcgcatgc

SEQ ID NO: 8760 - DNA, 40 bp, Artificial Sequence
  Synthetic Oligonucleotide
cactatcccgttgtcgtccctcttgtggtattgcgcatgc

SEQ ID NO: 8761 - DNA, 40 bp, Artificial Sequence
  Synthetic Oligonucleotide
cactatcccgttgtccgtcctcttgtcgtattgcgcatgc

SEQ ID NO: 8762 - DNA, 40 bp, Artificial Sequence
  Synthetic Oligonucleotide
cactatcccgttgtccgtcctctcgtggtattgcgcatgc

SEQ ID NO: 8763 - DNA, 40 bp, Artificial Sequence
  Synthetic Oligonucleotide
cactatccccatcgagcggtcgtcgtaatactgcctccaa

SEQ ID NO: 8764 - DNA, 40 bp, Artificial Sequence
  Synthetic Oligonucleotide
cactatccccatcgagcgatcgtcgtaatactgcatccaa

SEQ ID NO: 8765 - DNA, 40 bp, Artificial Sequence
  Synthetic Oligonucleotide
cactatccccatcgagcgatcgtagtaatactgcttccaa

SEQ ID NO: 8766 - DNA, 40 bp, Artificial Sequence
  Synthetic Oligonucleotide
cactatccccatcgagcgatagtcgtaatactgcttccaa

SEQ ID NO: 8767 - DNA, 40 bp, Artificial Sequence
  Synthetic Oligonucleotide
cactatccccatcaagcgatcgtcgtaatactgcttccaa

SEQ ID NO: 8768 - DNA, 40 bp, Artificial Sequence
  Synthetic Oligonucleotide
cactatccatttgtccctcctcttgtggtattgcgcatgc

SEQ ID NO: 8769 - DNA, 40 bp, Artificial Sequence
  Synthetic Oligonucleotide
cactatccatttgcccgtcctcttgtggtattgcgcatgc

SEQ ID NO: 8770 - DNA, 40 bp, Artificial Sequence
  Synthetic Oligonucleotide
cactatcagtttgtccgtcctctcgtggtattgcgcatgc

SEQ ID NO: 8771 - DNA, 40 bp, Artificial Sequence
  Synthetic Oligonucleotide
cactagccgtttgtccgtcctcttgtggtattgcgcttgc

SEQ ID NO: 8772 - DNA, 40 bp, Artificial Sequence
  Synthetic Oligonucleotide
cactacttcgttcgtccgtcccttgtggtattgcgcatgc

SEQ ID NO: 8773 - DNA, 40 bp, Artificial Sequence
  Synthetic Oligonucleotide
cactactccgtttgtccgtcctctgtggtattgcgcatgc

SEQ ID NO: 8774 - DNA, 40 bp, Artificial Sequence
  Synthetic Oligonucleotide
cactaccgtttgttccgtcctcttgtggtattgcgcatgc

SEQ ID NO: 8775 - DNA, 40 bp, Artificial Sequence
  Synthetic Oligonucleotide
cactaccgtttcgtccgtcctcttgtggtattgcgcatgc

SEQ ID NO: 8776 - DNA, 40 bp, Artificial Sequence
  Synthetic Oligonucleotide
cactacccgtttgtccgtcctcttgtggtattgcgcatga

SEQ ID NO: 8777 - DNA, 40 bp, Artificial Sequence
  Synthetic Oligonucleotide
cactacccgtttgtccgtcctcttgtggtattgcgcacgc

SEQ ID NO: 8778 - DNA, 40 bp, Artificial Sequence
  Synthetic Oligonucleotide
cactacccgtttgtccgtcctctcgtggtactgcgcatgc

SEQ ID NO: 8779 - DNA, 40 bp, Artificial Sequence
  Synthetic Oligonucleotide
cactacccgtttgtccggcctcctgtggtattgcgcatgc

SEQ ID NO: 8780 - DNA, 40 bp, Artificial Sequence
  Synthetic Oligonucleotide
cactacccgtttgtccatcctcttgtggtattgcgcatgc

SEQ ID NO: 8781 - DNA, 40 bp, Artificial Sequence
  Synthetic Oligonucleotide
cactaaccgtttgtccgtcctcttgtggtattgagcatgc

SEQ ID NO: 8782 - DNA, 40 bp, Artificial Sequence
  Synthetic Oligonucleotide
cacgttgaatgttatccgccttgcctccgtccctaagctg

SEQ ID NO: 8783 - DNA, 40 bp, Artificial Sequence
  Synthetic Oligonucleotide
cacgtggtcctactctctcggatattgtgcacgccggctg

SEQ ID NO: 8784 - DNA, 40 bp, Artificial Sequence
  Synthetic Oligonucleotide
cacgtgcctccaatatgcatctcggacattcctcctcccg

SEQ ID NO: 8785 - DNA, 40 bp, Artificial Sequence
  Synthetic Oligonucleotide
cacgtctccccactgatgcatgcttcatggtctctacgta

SEQ ID NO: 8786 - DNA, 40 bp, Artificial Sequence
  Synthetic Oligonucleotide
cacgtccatctagttcgtcagtactgacgtgggtgcacca

SEQ ID NO: 8787 - DNA, 40 bp, Artificial Sequence
  Synthetic Oligonucleotide
cacgtatccgtttgtccgtcctctgtggtattgcgcatgc

SEQ ID NO: 8788 - DNA, 40 bp, Artificial Sequence
  Synthetic Oligonucleotide
cacggttatgtctgacttcgggcgctatcctgattttcgt

SEQ ID NO: 8789 - DNA, 40 bp, Artificial Sequence
  Synthetic Oligonucleotide
cacggacgatcctcaccccatatgccgcctcgactgttaa

SEQ ID NO: 8790 - DNA, 40 bp, Artificial Sequence
  Synthetic Oligonucleotide
cacgccggactacctgcgatgaatgaccgcgactgtgttt

SEQ ID NO: 8791 - DNA, 40 bp, Artificial Sequence
  Synthetic Oligonucleotide
cacgccggactacctgcgatgaatgaccgcaactgtgttt

SEQ ID NO: 8792 - DNA, 40 bp, Artificial Sequence
  Synthetic Oligonucleotide
cacgatccgtttgtccgtcctctcgtggtattgcgcatgc

SEQ ID NO: 8793 - DNA, 40 bp, Artificial Sequence
  Synthetic Oligonucleotide
cacctgtagtcgtcccgtgcgtatgggtcgaaatgccgct

SEQ ID NO: 8794 - DNA, 40 bp, Artificial Sequence
  Synthetic Oligonucleotide
cacctgtagtcgtcccgtcgcgtgtgggtcaaatgccgct

SEQ ID NO: 8795 - DNA, 40 bp, Artificial Sequence
  Synthetic Oligonucleotide
cacctatcgttgtccgtcctcttgtggtacttgcgcatgc

SEQ ID NO: 8796 - DNA, 40 bp, Artificial Sequence
  Synthetic Oligonucleotide
cacctatcgcttgtccgtcctcttgtcgtattgcgcatgc

SEQ ID NO: 8797 - DNA, 40 bp, Artificial Sequence
  Synthetic Oligonucleotide
cacctatccgtttgtccgtcctcttgtggtattgcgctgc

SEQ ID NO: 8798 - DNA, 40 bp, Artificial Sequence
  Synthetic Oligonucleotide
cacctatccgtttgtccgtcctctcgtgtattgcgcatgc

SEQ ID NO: 8799 - DNA, 40 bp, Artificial Sequence
  Synthetic Oligonucleotide
cacctatccgttgtcgtcctcttgtcggtattgcgcatgc

SEQ ID NO: 8800 - DNA, 40 bp, Artificial Sequence
  Synthetic Oligonucleotide
cacctatccgttgtccgtccttcttgtgtattgcgcatgc

SEQ ID NO: 8801 - DNA, 40 bp, Artificial Sequence
  Synthetic Oligonucleotide
cacctatccgttgtccgtcctcttgtggtattgcgcatgc

SEQ ID NO: 8802 - DNA, 40 bp, Artificial Sequence
  Synthetic Oligonucleotide
cacctatccgttgtccgtcctcctgtcgtattgcgcatgc

SEQ ID NO: 8803 - DNA, 40 bp, Artificial Sequence
  Synthetic Oligonucleotide
cacctatccgtctgtccgtcctctgtggtattgcgcatgc

SEQ ID NO: 8804 - DNA, 40 bp, Artificial Sequence
  Synthetic Oligonucleotide
caccgggagtccctcctcgtcttgatgcactatcatctca

SEQ ID NO: 8805 - DNA, 40 bp, Artificial Sequence
  Synthetic Oligonucleotide
caccggaagttcctcctcgtcttgatgcactatcatctcg

SEQ ID NO: 8806 - DNA, 40 bp, Artificial Sequence
  Synthetic Oligonucleotide
caccggaagtccctcctcgtcttgatgcactgtcatctca

SEQ ID NO: 8807 - DNA, 40 bp, Artificial Sequence
  Synthetic Oligonucleotide
caccggaagtccctcctcgtcttgatgcactatcatcaca

SEQ ID NO: 8808 - DNA, 40 bp, Artificial Sequence
  Synthetic Oligonucleotide
caccggaagtccctcctcgccttgatgcactatcatctca

SEQ ID NO: 8809 - DNA, 40 bp, Artificial Sequence
  Synthetic Oligonucleotide
caccggaagtccctccccgtcttgatgcactatcatctca

SEQ ID NO: 8810 - DNA, 40 bp, Artificial Sequence
  Synthetic Oligonucleotide
caccggaaatccctcctcgtcttgatgcactatcatctca

SEQ ID NO: 8811 - DNA, 40 bp, Artificial Sequence
  Synthetic Oligonucleotide
caccgaaggcctctctaaccgcctcatactcgtactcgct

SEQ ID NO: 8812 - DNA, 40 bp, Artificial Sequence
  Synthetic Oligonucleotide
caccatcgttcgttcgtcctccttgtggtattgcgcatgc

SEQ ID NO: 8813 - DNA, 40 bp, Artificial Sequence
  Synthetic Oligonucleotide
caccatccgtttgtccgtcctcttgtggtattgcgcatac

SEQ ID NO: 8814 - DNA, 40 bp, Artificial Sequence
  Synthetic Oligonucleotide
caccatccgtttgtccgtcctcttgtggtattgcgcacgc

SEQ ID NO: 8815 - DNA, 40 bp, Artificial Sequence
  Synthetic Oligonucleotide
caccatccgtttgtccgtcctcttgtggacttgcgcatgc

SEQ ID NO: 8816 - DNA, 40 bp, Artificial Sequence
  Synthetic Oligonucleotide
caccatccgtttgtccgacctcttgtggtattgcgcatgc

SEQ ID NO: 8817 - DNA, 40 bp, Artificial Sequence
  Synthetic Oligonucleotide
caccatccgttgtccgtcctcttgtggtattgcgccatgc

SEQ ID NO: 8818 - DNA, 40 bp, Artificial Sequence
  Synthetic Oligonucleotide
caccatccgcttgtccgtcctcttatggtattgcgcatgc

SEQ ID NO: 8819 - DNA, 40 bp, Artificial Sequence
  Synthetic Oligonucleotide
caccatccgcttgtccgtcctctcgtggtattgcgcatgc

SEQ ID NO: 8820 - DNA, 40 bp, Artificial Sequence
  Synthetic Oligonucleotide
caccatccgattgtccgtcctcttgtggtattgcgcatgc

SEQ ID NO: 8821 - DNA, 40 bp, Artificial Sequence
  Synthetic Oligonucleotide
cacattcttcccgggttgctgccttgattctccctagctg

SEQ ID NO: 8822 - DNA, 40 bp, Artificial Sequence
  Synthetic Oligonucleotide
cacagaggccctcgtgttggactaccaacttgtagaacgg

SEQ ID NO: 8823 - DNA, 40 bp, Artificial Sequence
  Synthetic Oligonucleotide
cacaatccgtttgtccgtcctcctgtggtattgcgcatgc

SEQ ID NO: 8824 - DNA, 40 bp, Artificial Sequence
  Synthetic Oligonucleotide
caatgtcatcctatcttctcggatcactggtcctcctaga

SEQ ID NO: 8825 - DNA, 40 bp, Artificial Sequence
  Synthetic Oligonucleotide
caatggattctcgtgacactcgaagcacttcccagatgca

SEQ ID NO: 8826 - DNA, 40 bp, Artificial Sequence
  Synthetic Oligonucleotide
caatgcttgatctcctgttgactctgcggctgagactact

SEQ ID NO: 8827 - DNA, 40 bp, Artificial Sequence
  Synthetic Oligonucleotide
caatgcttgatctcctgtcgactctgtggctgagactact

SEQ ID NO: 8828 - DNA, 40 bp, Artificial Sequence
  Synthetic Oligonucleotide
caatgcttgatctcctgtcgactctgcggccgagactact

SEQ ID NO: 8829 - DNA, 40 bp, Artificial Sequence
  Synthetic Oligonucleotide
caatgcttgatcacctgtcgactctgcggctgagactact

SEQ ID NO: 8830 - DNA, 40 bp, Artificial Sequence
  Synthetic Oligonucleotide
caatgctcgatctccagtcgactctgcggctgagactact

SEQ ID NO: 8831 - DNA, 40 bp, Artificial Sequence
  Synthetic Oligonucleotide
caagttcctccatgtcgcatcgtattactgttctctgctg

SEQ ID NO: 8832 - DNA, 40 bp, Artificial Sequence
  Synthetic Oligonucleotide
caaggcatgtcgttgcgagcctcgattccaaccacgtctg

SEQ ID NO: 8833 - DNA, 40 bp, Artificial Sequence
  Synthetic Oligonucleotide
caagccgggcctgcctcaagctagctacctccattgcctg

SEQ ID NO: 8834 - DNA, 40 bp, Artificial Sequence
  Synthetic Oligonucleotide
caagccgggcctgcctcaagctagctaccgtccattgctg

SEQ ID NO: 8835 - DNA, 40 bp, Artificial Sequence
  Synthetic Oligonucleotide
caaccggggcctgcctcaagctagctacctccattgtctg

SEQ ID NO: 8836 - DNA, 40 bp, Artificial Sequence
  Synthetic Oligonucleotide
caaccggggcccacctcaagctagctacctccattgtctg

SEQ ID NO: 8837 - DNA, 40 bp, Artificial Sequence
  Synthetic Oligonucleotide
caacatctcggattcagcctacacgcatctccttcgccta

SEQ ID NO: 8838 - DNA, 40 bp, Artificial Sequence
  Synthetic Oligonucleotide
caaattatcagggactaccctgacgcaatatttacacgtt

SEQ ID NO: 8839 - DNA, 40 bp, Artificial Sequence
  Synthetic Oligonucleotide
caaacgggtcctcatactataggctcgttctccacggctg

SEQ ID NO: 8840 - DNA, 40 bp, Artificial Sequence
  Synthetic Oligonucleotide
atttccctataggtcgttttttgtacgccattacaattac

SEQ ID NO: 8841 - DNA, 40 bp, Artificial Sequence
  Synthetic Oligonucleotide
attgtccatgagtcttctggcactatccagttgacgctca

SEQ ID NO: 8842 - DNA, 40 bp, Artificial Sequence
  Synthetic Oligonucleotide
attgatttcagcgacttcggtggtgtcctctccattacca

SEQ ID NO: 8843 - DNA, 40 bp, Artificial Sequence
  Synthetic Oligonucleotide
attgattcttattggtggcacactattgccttgaacttca

SEQ ID NO: 8844 - DNA, 40 bp, Artificial Sequence
  Synthetic Oligonucleotide
attgattccagcgacttcggtgctgtcctctccattacca

SEQ ID NO: 8845 - DNA, 40 bp, Artificial Sequence
  Synthetic Oligonucleotide
attcttagtgtgtattcatttcagggactaccctgcatca

SEQ ID NO: 8846 - DNA, 40 bp, Artificial Sequence
  Synthetic Oligonucleotide
attcggtgtgctgctcgttgtgcgctatcacattaaaggc

SEQ ID NO: 8847 - DNA, 40 bp, Artificial Sequence
  Synthetic Oligonucleotide
attccgttagagaaactctgttggccactatgccatcaat

SEQ ID NO: 8848 - DNA, 40 bp, Artificial Sequence
  Synthetic Oligonucleotide
attcccctgagtgttgcagtcggtcaagcactatcttgaa

SEQ ID NO: 8849 - DNA, 40 bp, Artificial Sequence
  Synthetic Oligonucleotide
attcatggtacgcctcgattccgcccatacatgcatgtaa

SEQ ID NO: 8850 - DNA, 40 bp, Artificial Sequence
  Synthetic Oligonucleotide
attatccgcatcacatcaactatgatgacgcttgactgga

SEQ ID NO: 8851 - DNA, 40 bp, Artificial Sequence
  Synthetic Oligonucleotide
attagtgatttcgccgcccctctgtttagtggccattgga

SEQ ID NO: 8852 - DNA, 40 bp, Artificial Sequence
  Synthetic Oligonucleotide
attaatttcagcgacttcggtggtgtcctctccattacca

SEQ ID NO: 8853 - DNA, 40 bp, Artificial Sequence
  Synthetic Oligonucleotide
attaattccagcggcttcggtggtgtcctctccattacca

SEQ ID NO: 8854 - DNA, 40 bp, Artificial Sequence
  Synthetic Oligonucleotide
attaattccagcgacttcggtggtgtcctctccgttacca

SEQ ID NO: 8855 - DNA, 40 bp, Artificial Sequence
  Synthetic Oligonucleotide
attaattccagcgacttcggtggtgccctccccattacca

SEQ ID NO: 8856 - DNA, 40 bp, Artificial Sequence
  Synthetic Oligonucleotide
attaattccaacgacttcggtggtgtcctctccattacca

SEQ ID NO: 8857 - DNA, 40 bp, Artificial Sequence
  Synthetic Oligonucleotide
atgtgccattgagtttctggcactatccagttgacgctca

SEQ ID NO: 8858 - DNA, 40 bp, Artificial Sequence
  Synthetic Oligonucleotide
atgtcctcggttgggccggtcttggatcactatatccttt

SEQ ID NO: 8859 - DNA, 40 bp, Artificial Sequence
  Synthetic Oligonucleotide
atgtccgtgacgcttctggcatctatccagttgacgctca

SEQ ID NO: 8860 - DNA, 40 bp, Artificial Sequence
  Synthetic Oligonucleotide
atgtccattgacgcttctggcactatccagttgacgctca

SEQ ID NO: 8861 - DNA, 40 bp, Artificial Sequence
  Synthetic Oligonucleotide
atgtccatgtagtctctcggcactatccagttgacgctca

SEQ ID NO: 8862 - DNA, 40 bp, Artificial Sequence
  Synthetic Oligonucleotide
atgtccatgtagcttctcggcactatccagttgacgctca

SEQ ID NO: 8863 - DNA, 40 bp, Artificial Sequence
  Synthetic Oligonucleotide
atgtccatgagcttctggtcactatccagttgacgtctca

SEQ ID NO: 8864 - DNA, 40 bp, Artificial Sequence
  Synthetic Oligonucleotide
atgtccatgagcttctggccacttatccagttgacgctca

SEQ ID NO: 8865 - DNA, 40 bp, Artificial Sequence
  Synthetic Oligonucleotide
atgtccatgacgtcttctggcactatccgattgacgctca

SEQ ID NO: 8866 - DNA, 40 bp, Artificial Sequence
  Synthetic Oligonucleotide
atgtccatgacgtcttctcggcactatcgattgacgctca

SEQ ID NO: 8867 - DNA, 40 bp, Artificial Sequence
  Synthetic Oligonucleotide
atgtccatgacgtctctcggcactatcgagttgacgctca

SEQ ID NO: 8868 - DNA, 40 bp, Artificial Sequence
  Synthetic Oligonucleotide
atgtccatgacgtctctcggcactatccagttgacgctca

SEQ ID NO: 8869 - DNA, 40 bp, Artificial Sequence
  Synthetic Oligonucleotide
atgtccatgacgcttctggcacttatccagttgacgctca

SEQ ID NO: 8870 - DNA, 40 bp, Artificial Sequence
  Synthetic Oligonucleotide
atgtccatgacgcttctggcactatccgagttgacgctca

SEQ ID NO: 8871 - DNA, 40 bp, Artificial Sequence
  Synthetic Oligonucleotide
atgtccatgacgctctggccatctatccagttgacgctca

SEQ ID NO: 8872 - DNA, 40 bp, Artificial Sequence
  Synthetic Oligonucleotide
atgtccatgacgctctggacatctatccagttgacgctca

SEQ ID NO: 8873 - DNA, 40 bp, Artificial Sequence
  Synthetic Oligonucleotide
atgtccatgacgctctggacactatccagttgacgctcga

SEQ ID NO: 8874 - DNA, 40 bp, Artificial Sequence
  Synthetic Oligonucleotide
atgtccacgagctctgacactatccagcttgacgtctcga

SEQ ID NO: 8875 - DNA, 40 bp, Artificial Sequence
  Synthetic Oligonucleotide
atggtttcttctcctgactacatgagattaataaacgcgc

SEQ ID NO: 8876 - DNA, 40 bp, Artificial Sequence
  Synthetic Oligonucleotide
atggttcatgagtcttctggcactatccagttgacgctca

SEQ ID NO: 8877 - DNA, 40 bp, Artificial Sequence
  Synthetic Oligonucleotide
atggttcatgagcttctggcactatcccagttgacgctca

SEQ ID NO: 8878 - DNA, 40 bp, Artificial Sequence
  Synthetic Oligonucleotide
atggtggctttaagcacttctcggtaacttggagagttac

SEQ ID NO: 8879 - DNA, 40 bp, Artificial Sequence
  Synthetic Oligonucleotide
atggtggctttaagcacttcgtcgatacttgggcagttac

SEQ ID NO: 8880 - DNA, 40 bp, Artificial Sequence
  Synthetic Oligonucleotide
atggtgcttttaagcacttctcggtaacttgggcagttac

SEQ ID NO: 8881 - DNA, 40 bp, Artificial Sequence
  Synthetic Oligonucleotide
atggtgcgactacgctcttgaacaattctgatcctggatt

SEQ ID NO: 8882 - DNA, 40 bp, Artificial Sequence
  Synthetic Oligonucleotide
atggtgccattgagcttctggcactatcagttgacgctca

SEQ ID NO: 8883 - DNA, 40 bp, Artificial Sequence
  Synthetic Oligonucleotide
atggtccgtgagcttctggcactactccagttgacgctca

SEQ ID NO: 8884 - DNA, 40 bp, Artificial Sequence
  Synthetic Oligonucleotide
atggtccgtgagccttctggcactatccagttgacgctca

SEQ ID NO: 8885 - DNA, 40 bp, Artificial Sequence
  Synthetic Oligonucleotide
atggtcccgtgagcttctggcactatccagttgacgctca

SEQ ID NO: 8886 - DNA, 40 bp, Artificial Sequence
  Synthetic Oligonucleotide
atggtcccatgggcttctggcactatccagttgacgctca

SEQ ID NO: 8887 - DNA, 40 bp, Artificial Sequence
  Synthetic Oligonucleotide
atggtcccatgagtcttctggcactatcagttgacgctca

SEQ ID NO: 8888 - DNA, 40 bp, Artificial Sequence
  Synthetic Oligonucleotide
atggtcccatgagcttctggcattatccagttgacgctca

SEQ ID NO: 8889 - DNA, 40 bp, Artificial Sequence
  Synthetic Oligonucleotide
atggtcccatgagcctctggcactatccagttgacgctca

SEQ ID NO: 8890 - DNA, 40 bp, Artificial Sequence
  Synthetic Oligonucleotide
atggtccattgagcctctggcactatccagttgacgctca

SEQ ID NO: 8891 - DNA, 40 bp, Artificial Sequence
  Synthetic Oligonucleotide
atggtccatgtagcttctggcactatcaagttgacgctca

SEQ ID NO: 8892 - DNA, 40 bp, Artificial Sequence
  Synthetic Oligonucleotide
atggtccatgtagcttctggcaccatccagttgacgctca

SEQ ID NO: 8893 - DNA, 40 bp, Artificial Sequence
  Synthetic Oligonucleotide
atggtccatgggcttctggcactatcccagttgacgctca

SEQ ID NO: 8894 - DNA, 40 bp, Artificial Sequence
  Synthetic Oligonucleotide
atggtccatgggcttctggcactatccagttgaccgctca

SEQ ID NO: 8895 - DNA, 40 bp, Artificial Sequence
  Synthetic Oligonucleotide
atggtccatgagtcttctggcatctatccattgacgctca

SEQ ID NO: 8896 - DNA, 40 bp, Artificial Sequence
  Synthetic Oligonucleotide
atggtccatgagtcttctggcactatctagttgacgctca

SEQ ID NO: 8897 - DNA, 40 bp, Artificial Sequence
  Synthetic Oligonucleotide
atggtccatgagtcttctggcactatccagttgtcgctca

SEQ ID NO: 8898 - DNA, 40 bp, Artificial Sequence
  Synthetic Oligonucleotide
atggtccatgagtcttctggcactatccagttggcgctca

SEQ ID NO: 8899 - DNA, 40 bp, Artificial Sequence
  Synthetic Oligonucleotide
atggtccatgagtcttctggcactatccagttgactctca

SEQ ID NO: 8900 - DNA, 40 bp, Artificial Sequence
  Synthetic Oligonucleotide
atggtccatgagtcttctggcactatccagttaacgctca

SEQ ID NO: 8901 - DNA, 40 bp, Artificial Sequence
  Synthetic Oligonucleotide
atggtccatgagtctctggccactatccagttgacgctca

SEQ ID NO: 8902 - DNA, 40 bp, Artificial Sequence
  Synthetic Oligonucleotide
atggtccatgagtctcctggcactatccagttgacgctca

SEQ ID NO: 8903 - DNA, 40 bp, Artificial Sequence
  Synthetic Oligonucleotide
atggtccatgagcttctggcactatccgagttgacgctcg

SEQ ID NO: 8904 - DNA, 40 bp, Artificial Sequence
  Synthetic Oligonucleotide
atggtccatgagcttctggcactactccagtcgacgctca

SEQ ID NO: 8905 - DNA, 40 bp, Artificial Sequence
  Synthetic Oligonucleotide
atggtccatgagctctggcactatccagtgacgctacgac

SEQ ID NO: 8906 - DNA, 40 bp, Artificial Sequence
  Synthetic Oligonucleotide
atggtccatgagctctggacactatcagttgacgtctcga

SEQ ID NO: 8907 - DNA, 40 bp, Artificial Sequence
  Synthetic Oligonucleotide
atggtccatgagctcctggacactatccagttgacgctca

SEQ ID NO: 8908 - DNA, 40 bp, Artificial Sequence
  Synthetic Oligonucleotide
atggtccatgacgtcttctggcactatccattgacgctca

SEQ ID NO: 8909 - DNA, 40 bp, Artificial Sequence
  Synthetic Oligonucleotide
atggtccatgacgctctggcactatccgagttgacgctca

SEQ ID NO: 8910 - DNA, 40 bp, Artificial Sequence
  Synthetic Oligonucleotide
atggtccatgaccttctggcactattccagttgacgctca

SEQ ID NO: 8911 - DNA, 40 bp, Artificial Sequence
  Synthetic Oligonucleotide
atggtccactgagcttctggacactatccattgacgctca

SEQ ID NO: 8912 - DNA, 40 bp, Artificial Sequence
  Synthetic Oligonucleotide
atggtccacgagcttctggcactatcccagttgacgctca

SEQ ID NO: 8913 - DNA, 40 bp, Artificial Sequence
  Synthetic Oligonucleotide
atggtaccatgagcttctggcactatccagttgacgctca

SEQ ID NO: 8914 - DNA, 40 bp, Artificial Sequence
  Synthetic Oligonucleotide
atggcccatgagtcttctggcactatccagttgacgctcg

SEQ ID NO: 8915 - DNA, 40 bp, Artificial Sequence
  Synthetic Oligonucleotide
atggcccatgagtcttctggcactatccagttgacgctca

SEQ ID NO: 8916 - DNA, 40 bp, Artificial Sequence
  Synthetic Oligonucleotide
atggagctttaagcacttctcggtaacttggagcagttac

SEQ ID NO: 8917 - DNA, 40 bp, Artificial Sequence
  Synthetic Oligonucleotide
atggacttcgggtcacgcctcgctcctccaaacctatctg

SEQ ID NO: 8918 - DNA, 40 bp, Artificial Sequence
  Synthetic Oligonucleotide
atgcgaactgctgttttggcgctatccaaattttaagcta

SEQ ID NO: 8919 - DNA, 40 bp, Artificial Sequence
  Synthetic Oligonucleotide
atgatggcttttaagcacttctcggtacttgggcagttac

SEQ ID NO: 8920 - DNA, 40 bp, Artificial Sequence
  Synthetic Oligonucleotide
atgatgccatgagcttctggcactatccagttgacgctca

SEQ ID NO: 8921 - DNA, 40 bp, Artificial Sequence
  Synthetic Oligonucleotide
atgatccatgagtcttctggcactatccagttgacgctca

SEQ ID NO: 8922 - DNA, 40 bp, Artificial Sequence
  Synthetic Oligonucleotide
atgagaagcgtgtgagagactactctgtttgtaacgcaat

SEQ ID NO: 8923 - DNA, 40 bp, Artificial Sequence
  Synthetic Oligonucleotide
atgaacttgtgaatcgtttacctctggactacctgggcaa

SEQ ID NO: 8924 - DNA, 40 bp, Artificial Sequence
  Synthetic Oligonucleotide
atctgcgccggttcctcattctcccgactacgtgagatta

SEQ ID NO: 8925 - DNA, 40 bp, Artificial Sequence
  Synthetic Oligonucleotide
atctccgtctaactacgtgcactatcacggcttagttaga

SEQ ID NO: 8926 - DNA, 40 bp, Artificial Sequence
  Synthetic Oligonucleotide
atcgtcgggccccttttatgaaacttacatgagagcgcac

SEQ ID NO: 8927 - DNA, 40 bp, Artificial Sequence
  Synthetic Oligonucleotide
atcgtcgggccccttttatgaaacgtacatgaaagcgcac

SEQ ID NO: 8928 - DNA, 40 bp, Artificial Sequence
  Synthetic Oligonucleotide
atcggtgacagatctgcccctctgcatatggaccatttcg

SEQ ID NO: 8929 - DNA, 40 bp, Artificial Sequence
  Synthetic Oligonucleotide
atcggtccatgagcttctggcactatccagttgatgctca

SEQ ID NO: 8930 - DNA, 40 bp, Artificial Sequence
  Synthetic Oligonucleotide
atcggtccatgagccttctggcactatcagttgacgctca

SEQ ID NO: 8931 - DNA, 40 bp, Artificial Sequence
  Synthetic Oligonucleotide
atcggtccactgagcttctggcactatccactgacgctca

SEQ ID NO: 8932 - DNA, 40 bp, Artificial Sequence
  Synthetic Oligonucleotide
atccgggtaccgctcgactactgaccggtcacctgtacag

SEQ ID NO: 8933 - DNA, 40 bp, Artificial Sequence
  Synthetic Oligonucleotide
atccggaccgcctcgattaccccggtaccgttatgcataa

SEQ ID NO: 8934 - DNA, 40 bp, Artificial Sequence
  Synthetic Oligonucleotide
atccggaagtccctcctcgtcttgatgcactatcatctca

SEQ ID NO: 8935 - DNA, 40 bp, Artificial Sequence
  Synthetic Oligonucleotide
atccggaacgccttgatcctcgcatagtatgatacgtctg

SEQ ID NO: 8936 - DNA, 40 bp, Artificial Sequence
  Synthetic Oligonucleotide
atccggaacgccttgatcctcgcataatatgatacgtcgg

SEQ ID NO: 8937 - DNA, 40 bp, Artificial Sequence
  Synthetic Oligonucleotide
atccggaacgcctcgatccttgcataatatgatacgtctg

SEQ ID NO: 8938 - DNA, 40 bp, Artificial Sequence
  Synthetic Oligonucleotide
atccggaacgcctcgatcctcgtataatatgatacgtctg

SEQ ID NO: 8939 - DNA, 40 bp, Artificial Sequence
  Synthetic Oligonucleotide
atccggaacgcctcgatcctcgcatagtatgctacgtctg

SEQ ID NO: 8940 - DNA, 40 bp, Artificial Sequence
  Synthetic Oligonucleotide
atccggaacgcctcgatcctcgcatactatgatacgtctg

SEQ ID NO: 8941 - DNA, 40 bp, Artificial Sequence
  Synthetic Oligonucleotide
atccggaacgcctcgatcctcgcataatatgatacttctg

SEQ ID NO: 8942 - DNA, 40 bp, Artificial Sequence
  Synthetic Oligonucleotide
atccggaacgcctcgatcctcgcataatatgatacgtcta

SEQ ID NO: 8943 - DNA, 40 bp, Artificial Sequence
  Synthetic Oligonucleotide
atccgcctcgcttgtgcacaactcgcattccgcgtctgcg

SEQ ID NO: 8944 - DNA, 40 bp, Artificial Sequence
  Synthetic Oligonucleotide
atccgcctcgcttgtcgcacaactcgcatccgcgtctgcg

SEQ ID NO: 8945 - DNA, 40 bp, Artificial Sequence
  Synthetic Oligonucleotide
atccgcctcgatatcatcactagtgggctcccctcgtttg

SEQ ID NO: 8946 - DNA, 40 bp, Artificial Sequence
  Synthetic Oligonucleotide
atcccgtttagagaaatctgttggccactatgccatcaat

SEQ ID NO: 8947 - DNA, 40 bp, Artificial Sequence
  Synthetic Oligonucleotide
atccatggtgcgcctcgattccgcccatacatgcatgtaa

SEQ ID NO: 8948 - DNA, 40 bp, Artificial Sequence
  Synthetic Oligonucleotide
atccatggtacgcttcgattccgcccatacatgcatgtaa

SEQ ID NO: 8949 - DNA, 40 bp, Artificial Sequence
  Synthetic Oligonucleotide
atccatggtacgcgtcgattccgcccatacatgcatgtaa

SEQ ID NO: 8950 - DNA, 40 bp, Artificial Sequence
  Synthetic Oligonucleotide
atccatggtacgcctcgtactccgccatacatgcatgtaa

SEQ ID NO: 8951 - DNA, 40 bp, Artificial Sequence
  Synthetic Oligonucleotide
atccatggtacgcctcggttccgcccatacatgcatgtaa

SEQ ID NO: 8952 - DNA, 40 bp, Artificial Sequence
  Synthetic Oligonucleotide
atccatggtacgcctcgatttcgcccatacatgcatgtaa

SEQ ID NO: 8953 - DNA, 40 bp, Artificial Sequence
  Synthetic Oligonucleotide
atccatggtacgcctcgatttccgccatacatgcatgtaa

SEQ ID NO: 8954 - DNA, 40 bp, Artificial Sequence
  Synthetic Oligonucleotide
atccatggtacgcctcgattccgccctacatgcatgtaaa

SEQ ID NO: 8955 - DNA, 40 bp, Artificial Sequence
  Synthetic Oligonucleotide
atccatggtacgcctcgattccgcccatatatgcatgtaa

SEQ ID NO: 8956 - DNA, 40 bp, Artificial Sequence
  Synthetic Oligonucleotide
atccatggtacgcctcgattccgcccatacatgcctgtaa

SEQ ID NO: 8957 - DNA, 40 bp, Artificial Sequence
  Synthetic Oligonucleotide
atccatggtacgcctcgattccgcccatacatgcatgaaa

SEQ ID NO: 8958 - DNA, 40 bp, Artificial Sequence
  Synthetic Oligonucleotide
atccatggtacgcctcgattccgccaatacatgcatgtaa

SEQ ID NO: 8959 - DNA, 40 bp, Artificial Sequence
  Synthetic Oligonucleotide
atccatggtacgcctcgattacgcccatacatgcatgtaa

SEQ ID NO: 8960 - DNA, 40 bp, Artificial Sequence
  Synthetic Oligonucleotide
atccatggtaccgcctcgattccgccatacatgcatgtaa

SEQ ID NO: 8961 - DNA, 40 bp, Artificial Sequence
  Synthetic Oligonucleotide
atccacggtacgcctcgattccgcccatacatgcatgtaa

SEQ ID NO: 8962 - DNA, 40 bp, Artificial Sequence
  Synthetic Oligonucleotide
atcagactgcccgtctacgcgctgggctaccaccgtatag

SEQ ID NO: 8963 - DNA, 40 bp, Artificial Sequence
  Synthetic Oligonucleotide
atcactatccggtaagtcatcgtctaaccgttcgttgcaa

SEQ ID NO: 8964 - DNA, 40 bp, Artificial Sequence
  Synthetic Oligonucleotide
atatgggctttaagcacttctcagtaacttgggcagttac

SEQ ID NO: 8965 - DNA, 40 bp, Artificial Sequence
  Synthetic Oligonucleotide
ataggtcctggggtatccgcctcgctaagttcgtgcatgc

SEQ ID NO: 8966 - DNA, 40 bp, Artificial Sequence
  Synthetic Oligonucleotide
atactatcccggtaagtcatcgtttaaccgtttgttgcaa

SEQ ID NO: 8967 - DNA, 40 bp, Artificial Sequence
  Synthetic Oligonucleotide
atacgttgattctcggaccgcctcaaacatatccgcttcg

SEQ ID NO: 8968 - DNA, 40 bp, Artificial Sequence
  Synthetic Oligonucleotide
ataccggtacgccttgtgtcgccccgtgtgttgcaacaga

SEQ ID NO: 8969 - DNA, 40 bp, Artificial Sequence
  Synthetic Oligonucleotide
ataatcacccctgaacggctacgttctcaaatgattaacg

SEQ ID NO: 8970 - DNA, 40 bp, Artificial Sequence
  Synthetic Oligonucleotide
agttcgtacgctataccgcctcgttctccattagaacccg

SEQ ID NO: 8971 - DNA, 40 bp, Artificial Sequence
  Synthetic Oligonucleotide
agtgtctgaccgccttgatccttcttctcggaaacgcgta

SEQ ID NO: 8972 - DNA, 40 bp, Artificial Sequence
  Synthetic Oligonucleotide
agtggcactgcgcctgggtttccttcccaaagaagtcgtt

SEQ ID NO: 8973 - DNA, 40 bp, Artificial Sequence
  Synthetic Oligonucleotide
agtgcccgaccgccttgatccttcttctcggaaacgcgta

SEQ ID NO: 8974 - DNA, 40 bp, Artificial Sequence
  Synthetic Oligonucleotide
agtctcgagatcactaggcactatcctagcactgtatcaa

SEQ ID NO: 8975 - DNA, 40 bp, Artificial Sequence
  Synthetic Oligonucleotide
agtcggacacgccttgttcctcctctcgggtcattgacat

SEQ ID NO: 8976 - DNA, 40 bp, Artificial Sequence
  Synthetic Oligonucleotide
agtcattaacccttgttggactaccaccaaaaacgattaa

SEQ ID NO: 8977 - DNA, 40 bp, Artificial Sequence
  Synthetic Oligonucleotide
agtaggtcgcctggtccgcctcgatcctctataccgtctg

SEQ ID NO: 8978 - DNA, 40 bp, Artificial Sequence
  Synthetic Oligonucleotide
agtactacgcctcgaggagctctcacctccctctgtccag

SEQ ID NO: 8979 - DNA, 40 bp, Artificial Sequence
  Synthetic Oligonucleotide
agtaaattctcggatcacatctgcaccgcctcggccgacc

SEQ ID NO: 8980 - DNA, 40 bp, Artificial Sequence
  Synthetic Oligonucleotide
aggatctcggatctggcgtactacttggacaggttccttc

SEQ ID NO: 8981 - DNA, 40 bp, Artificial Sequence
  Synthetic Oligonucleotide
agctgtcgacgtctctacctctgctccttccaagtgtctg

SEQ ID NO: 8982 - DNA, 40 bp, Artificial Sequence
  Synthetic Oligonucleotide
agctaacccacatcgagcggtctcagatgttaaaatacaa

SEQ ID NO: 8983 - DNA, 40 bp, Artificial Sequence
  Synthetic Oligonucleotide
agcctcaagtctaatctgaacgctatttcagatgtataga

SEQ ID NO: 8984 - DNA, 40 bp, Artificial Sequence
  Synthetic Oligonucleotide
agcccgggtccgcctcgcaaccgttgcaactgtatcgttc

SEQ ID NO: 8985 - DNA, 40 bp, Artificial Sequence
  Synthetic Oligonucleotide
agagcttactccggcgcgtcatcgaccataccgacggaca

SEQ ID NO: 8986 - DNA, 40 bp, Artificial Sequence
  Synthetic Oligonucleotide
agactactccgatggacaatcgtaacttaggagccgccta

SEQ ID NO: 8987 - DNA, 40 bp, Artificial Sequence
  Synthetic Oligonucleotide
agaccggggcccgccccaagctagctacctccattgtctg

SEQ ID NO: 8988 - DNA, 40 bp, Artificial Sequence
  Synthetic Oligonucleotide
agacccgggttccgcctcagtccccaaaatgcgcgcattt

SEQ ID NO: 8989 - DNA, 40 bp, Artificial Sequence
  Synthetic Oligonucleotide
agaagcacctcaacccgttactaaacctctgcttctccaa

SEQ ID NO: 8990 - DNA, 40 bp, Artificial Sequence
  Synthetic Oligonucleotide
agaagacgtcggactacgcctcgattcctcctgggtagcg

SEQ ID NO: 8991 - DNA, 40 bp, Artificial Sequence
  Synthetic Oligonucleotide
actttgcaatgatccgccttgatcctccagttgcaactta

SEQ ID NO: 8992 - DNA, 40 bp, Artificial Sequence
  Synthetic Oligonucleotide
actgtaggcacctgctctatgttgtggggagtaacaggtt

SEQ ID NO: 8993 - DNA, 40 bp, Artificial Sequence
  Synthetic Oligonucleotide
actcttatccggcaggacgtctttcgtgcactatcacgat

SEQ ID NO: 8994 - DNA, 40 bp, Artificial Sequence
  Synthetic Oligonucleotide
actctgttttttaggttggcgaggtcctctaacttttggg

SEQ ID NO: 8995 - DNA, 40 bp, Artificial Sequence
  Synthetic Oligonucleotide
actaccttcgtctagcggtgcgctggggactttatccctc

SEQ ID NO: 8996 - DNA, 40 bp, Artificial Sequence
  Synthetic Oligonucleotide
actaccttcgtcaagcgtgaatctgtcattatgaccaagg

SEQ ID NO: 8997 - DNA, 40 bp, Artificial Sequence
  Synthetic Oligonucleotide
actacccccagttttagtccttcctaaaagggccctttga

SEQ ID NO: 8998 - DNA, 40 bp, Artificial Sequence
  Synthetic Oligonucleotide
actacccccagtttagtccttcctaaaaggggccctttga

SEQ ID NO: 8999 - DNA, 40 bp, Artificial Sequence
  Synthetic Oligonucleotide
acgtgtcatatatctgactacagattttgtcatggcacta

SEQ ID NO: 9000 - DNA, 40 bp, Artificial Sequence
  Synthetic Oligonucleotide
acggtttcttctcctgactacatgtgattaataaacgcgc

SEQ ID NO: 9001 - DNA, 40 bp, Artificial Sequence
  Synthetic Oligonucleotide
acggtttcttctcctgactacatgaggttaataaacgcgc

SEQ ID NO: 9002 - DNA, 40 bp, Artificial Sequence
  Synthetic Oligonucleotide
acggtttcttctcctgactacatgagattagtaaacgcgc

SEQ ID NO: 9003 - DNA, 40 bp, Artificial Sequence
  Synthetic Oligonucleotide
acggtttcttctcctgactacatgagattaataagcgcgc

SEQ ID NO: 9004 - DNA, 40 bp, Artificial Sequence
  Synthetic Oligonucleotide
acgggattttcgtcctgactttagccgcctctaaggatga

SEQ ID NO: 9005 - DNA, 40 bp, Artificial Sequence
  Synthetic Oligonucleotide
acggcgctctcggatctacatgtctatcgtcctctcggta

SEQ ID NO: 9006 - DNA, 40 bp, Artificial Sequence
  Synthetic Oligonucleotide
acgcgtacgccttggttttcctgggtacccccaccgtttg

SEQ ID NO: 9007 - DNA, 40 bp, Artificial Sequence
  Synthetic Oligonucleotide
acgcacagctcacttcgtctttgatcgaccacgctcataa

SEQ ID NO: 9008 - DNA, 40 bp, Artificial Sequence
  Synthetic Oligonucleotide
acgatccttcctcggcttccgcggtgcaggatttgcacgt

SEQ ID NO: 9009 - DNA, 40 bp, Artificial Sequence
  Synthetic Oligonucleotide
acgatccttcctcggcctccgcggtgcaggatttgcacgt

SEQ ID NO: 9010 - DNA, 40 bp, Artificial Sequence
  Synthetic Oligonucleotide
acgatccttcctcagcttccgcggtgcagggtttgcacgt

SEQ ID NO: 9011 - DNA, 40 bp, Artificial Sequence
  Synthetic Oligonucleotide
acgatccttcctcagcctccgcggttgcaggattgcacgt

SEQ ID NO: 9012 - DNA, 40 bp, Artificial Sequence
  Synthetic Oligonucleotide
acgatccttcctcagcctccgcggtgctggatttgcacgt

SEQ ID NO: 9013 - DNA, 40 bp, Artificial Sequence
  Synthetic Oligonucleotide
acgatccttcctcagcctccgcggtgcagggtttgcacgt

SEQ ID NO: 9014 - DNA, 40 bp, Artificial Sequence
  Synthetic Oligonucleotide
acgatccttcctcagcctccgcggtgcaggatctgcacgt

SEQ ID NO: 9015 - DNA, 40 bp, Artificial Sequence
  Synthetic Oligonucleotide
acgatccttccccagcctccgcggtgcaggatttgcacgt

SEQ ID NO: 9016 - DNA, 40 bp, Artificial Sequence
  Synthetic Oligonucleotide
acgactcttcctcagcttccgcggtgcaggatttgcacgt

SEQ ID NO: 9017 - DNA, 40 bp, Artificial Sequence
  Synthetic Oligonucleotide
acgactattccggtaagtcatcgtttaaccgttgttgcaa

SEQ ID NO: 9018 - skipped

SEQ ID NO: 9019 - DNA, 40 bp, Artificial Sequence
  Synthetic Oligonucleotide
acgacctattccggtaagtcatcgttaccacttgttgtca

SEQ ID NO: 9020 - DNA, 40 bp, Artificial Sequence
  Synthetic Oligonucleotide
acctgcttgtgtgcgacacatgactacgactcctcttcag

SEQ ID NO: 9021 - DNA, 40 bp, Artificial Sequence
  Synthetic Oligonucleotide
acctcggatcttacattagcgctaccttcccagcattctg

SEQ ID NO: 9022 - DNA, 40 bp, Artificial Sequence
  Synthetic Oligonucleotide
acctatcttgacgtctcttcggggactacccccgattctg

SEQ ID NO: 9023 - DNA, 40 bp, Artificial Sequence
  Synthetic Oligonucleotide
accgtactctagctacgtctcttgggacctacccgatctg

SEQ ID NO: 9024 - DNA, 40 bp, Artificial Sequence
  Synthetic Oligonucleotide
accggccctcaggtccctaacgcgttacgccttccggatg

SEQ ID NO: 9025 - DNA, 40 bp, Artificial Sequence
  Synthetic Oligonucleotide
accggcaccccgatagtcatcttcgctggaccaccgcgta

SEQ ID NO: 9026 - DNA, 40 bp, Artificial Sequence
  Synthetic Oligonucleotide
accgccttgacaatagctattaatcacttccgttgcagat

SEQ ID NO: 9027 - DNA, 40 bp, Artificial Sequence
  Synthetic Oligonucleotide
accgccttcagttctactgtattaccgcggatacagttac

SEQ ID NO: 9028 - DNA, 40 bp, Artificial Sequence
  Synthetic Oligonucleotide
accgcctcaggtcccctaacgcgttacgctttccggaatg

SEQ ID NO: 9029 - DNA, 40 bp, Artificial Sequence
  Synthetic Oligonucleotide
accgcctcaggccattgctggctatgccccgatgtacgtg

SEQ ID NO: 9030 - DNA, 40 bp, Artificial Sequence
  Synthetic Oligonucleotide
accgcatgggtcggttttggtggggggctacccccttgta

SEQ ID NO: 9031 - DNA, 40 bp, Artificial Sequence
  Synthetic Oligonucleotide
accgcatgggtcggttttggtgggggactaccctcttgta

SEQ ID NO: 9032 - DNA, 40 bp, Artificial Sequence
  Synthetic Oligonucleotide
accgcatgggtcggtcttggtgggggactacccccttgta

SEQ ID NO: 9033 - DNA, 40 bp, Artificial Sequence
  Synthetic Oligonucleotide
accgcacccgactagtcatccttcactggacaccgtgata

SEQ ID NO: 9034 - DNA, 40 bp, Artificial Sequence
  Synthetic Oligonucleotide
accgatgtcgccgactatgagccggtaccttccagcaagg

SEQ ID NO: 9035 - DNA, 40 bp, Artificial Sequence
  Synthetic Oligonucleotide
accgaacctgtagctgtttgcgactacccaattagggcta

SEQ ID NO: 9036 - DNA, 40 bp, Artificial Sequence
  Synthetic Oligonucleotide
accctatcttgacgtctcttcgggggctaccccgattctg

SEQ ID NO: 9037 - DNA, 40 bp, Artificial Sequence
  Synthetic Oligonucleotide
accctatcttgacgtctcttcggggactgccccgattctg

SEQ ID NO: 9038 - DNA, 40 bp, Artificial Sequence
  Synthetic Oligonucleotide
accctatcttgacgtatcttcggggactaccccgattctg

SEQ ID NO: 9039 - DNA, 40 bp, Artificial Sequence
  Synthetic Oligonucleotide
accctatcttaacgtctcttcggggactaccccgattctg

SEQ ID NO: 9040 - DNA, 40 bp, Artificial Sequence
  Synthetic Oligonucleotide
accctatctcgacgtctcttcggggactaccccgattctg

SEQ ID NO: 9041 - DNA, 40 bp, Artificial Sequence
  Synthetic Oligonucleotide
accctaccttgacgtctcttcggggactaccccgattctg

SEQ ID NO: 9042 - DNA, 40 bp, Artificial Sequence
  Synthetic Oligonucleotide
acccggaacgcctcgatcctcgcataatatgatacgtctg

SEQ ID NO: 9043 - DNA, 40 bp, Artificial Sequence
  Synthetic Oligonucleotide
accccgctgagcatgggcaatgctcaccttggactctcct

SEQ ID NO: 9044 - DNA, 40 bp, Artificial Sequence
  Synthetic Oligonucleotide
accccatcttgacgtctcttcggggactaccccgattctg

SEQ ID NO: 9045 - DNA, 40 bp, Artificial Sequence
  Synthetic Oligonucleotide
acatttcggatcctgtccgctttaggatccctcatgttta

SEQ ID NO: 9046 - DNA, 40 bp, Artificial Sequence
  Synthetic Oligonucleotide
acattacccggtcagcttctcgtctgtaatttgcatgcat

SEQ ID NO: 9047 - DNA, 40 bp, Artificial Sequence
  Synthetic Oligonucleotide
acatcagcctcggttatcttacgcgtacctctcatgcgca

SEQ ID NO: 9048 - DNA, 40 bp, Artificial Sequence
  Synthetic Oligonucleotide
acagtgtgttccatgctttaggcgcctcttattttgggtc

SEQ ID NO: 9049 - DNA, 40 bp, Artificial Sequence
  Synthetic Oligonucleotide
acagtgggttccatgctttagggcgcctcttatttgggtc

SEQ ID NO: 9050 - DNA, 40 bp, Artificial Sequence
  Synthetic Oligonucleotide
acagtgggttccatgcttcaggcgcctcttattttgggtc

SEQ ID NO: 9051 - DNA, 40 bp, Artificial Sequence
  Synthetic Oligonucleotide
acagcttattccggtaagtcatcgttcaccgttgttgcaa

SEQ ID NO: 9052 - DNA, 40 bp, Artificial Sequence
  Synthetic Oligonucleotide
acagctgacacctttgactctccatgttgccggcacggac

SEQ ID NO: 9053 - DNA, 40 bp, Artificial Sequence
  Synthetic Oligonucleotide
acagccactggactctcagcgcgcgacccatctctcagta

SEQ ID NO: 9054 - DNA, 40 bp, Artificial Sequence
  Synthetic Oligonucleotide
acagcactgggctctcagcgcgcgaccccatctctcagta

SEQ ID NO: 9055 - DNA, 40 bp, Artificial Sequence
  Synthetic Oligonucleotide
acagcactggactctcatgcgcgcgacccatctctcagta

SEQ ID NO: 9056 - DNA, 40 bp, Artificial Sequence
  Synthetic Oligonucleotide
acagcactggactctcagtgcgcggacccatctctcagta

SEQ ID NO: 9057 - DNA, 40 bp, Artificial Sequence
  Synthetic Oligonucleotide
acagcactggactctcagcgcgcgacccatctcgtcagta

SEQ ID NO: 9058 - DNA, 40 bp, Artificial Sequence
  Synthetic Oligonucleotide
acagcactggactctcagcgcgcgacccatctcgtcagca

SEQ ID NO: 9059 - DNA, 40 bp, Artificial Sequence
  Synthetic Oligonucleotide
acagcactggactctcagcgccgcgacccatctctcagta

SEQ ID NO: 9060 - DNA, 40 bp, Artificial Sequence
  Synthetic Oligonucleotide
acagcacgggactctcagcgcgcgacccatctcgtcggta

SEQ ID NO: 9061 - DNA, 40 bp, Artificial Sequence
  Synthetic Oligonucleotide
acactgttccggtaagtcatcgtttgaccgtttgttgcaa

SEQ ID NO: 9062 - DNA, 40 bp, Artificial Sequence
  Synthetic Oligonucleotide
acactattccggtgagtcatcgtttaaccgcttgttgcaa

SEQ ID NO: 9063 - DNA, 40 bp, Artificial Sequence
  Synthetic Oligonucleotide
acactattccggtccttaccgtcctcaatacggacgaatg

SEQ ID NO: 9064 - DNA, 40 bp, Artificial Sequence
  Synthetic Oligonucleotide
acactattccggtaggtcatcgtttaaccgcttgttgcaa

SEQ ID NO: 9065 - DNA, 40 bp, Artificial Sequence
  Synthetic Oligonucleotide
acactattccggtaggtcatcgttcaaccgtttgtcgcaa

SEQ ID NO: 9066 - DNA, 40 bp, Artificial Sequence
  Synthetic Oligonucleotide
acactattccggtaagttatcgtttaaccgcttgttgcaa

SEQ ID NO: 9067 - DNA, 40 bp, Artificial Sequence
  Synthetic Oligonucleotide
acactattccggtaagtcgatcgttaaccgcttgttgcaa

SEQ ID NO: 9068 - DNA, 40 bp, Artificial Sequence
  Synthetic Oligonucleotide
acactattccggtaagtcatggtttaaccgtttgttgcaa

SEQ ID NO: 9069 - DNA, 40 bp, Artificial Sequence
  Synthetic Oligonucleotide
acactattccggtaagtcatcgttttaccgtttgttgcaa

SEQ ID NO: 9070 - DNA, 40 bp, Artificial Sequence
  Synthetic Oligonucleotide
acactattccggtaagtcatcgtttgaccgtttgctgcaa

SEQ ID NO: 9071 - DNA, 40 bp, Artificial Sequence
  Synthetic Oligonucleotide
acactattccggtaagtcatcgtttcaccgtttgttgcaa

SEQ ID NO: 9072 - DNA, 40 bp, Artificial Sequence
  Synthetic Oligonucleotide
acactattccggtaagtcatcgtttagccgtttgttgcag

SEQ ID NO: 9073 - DNA, 40 bp, Artificial Sequence
  Synthetic Oligonucleotide
acactattccggtaagtcatcgtttacccgtttgttgcaa

SEQ ID NO: 9074 - DNA, 40 bp, Artificial Sequence
  Synthetic Oligonucleotide
acactattccggtaagtcatcgtttaatcgtttgttgcaa

SEQ ID NO: 9075 - DNA, 40 bp, Artificial Sequence
  Synthetic Oligonucleotide
acactattccggtaagtcatcgtttaactgtttgttgcaa

SEQ ID NO: 9076 - DNA, 40 bp, Artificial Sequence
  Synthetic Oligonucleotide
acactattccggtaagtcatcgtttaaccttttgttgcaa

SEQ ID NO: 9077 - DNA, 40 bp, Artificial Sequence
  Synthetic Oligonucleotide
acactattccggtaagtcatcgtttaaccgttgttgtcaa

SEQ ID NO: 9078 - DNA, 40 bp, Artificial Sequence
  Synthetic Oligonucleotide
acactattccggtaagtcatcgtttaaccgcttgttgcag

SEQ ID NO: 9079 - DNA, 40 bp, Artificial Sequence
  Synthetic Oligonucleotide
acactattccggtaagtcatcgtttaacccgttgttgcaa

SEQ ID NO: 9080 - DNA, 40 bp, Artificial Sequence
  Synthetic Oligonucleotide
acactattccggtaagtcatcgtttaaccattcgttgcaa

SEQ ID NO: 9081 - DNA, 40 bp, Artificial Sequence
  Synthetic Oligonucleotide
acactattccggtaagtcatcgttctaccgtttgttgcaa

SEQ ID NO: 9082 - DNA, 40 bp, Artificial Sequence
  Synthetic Oligonucleotide
acactattccggtaagtcatcgttactacgtttgttgcaa

SEQ ID NO: 9083 - DNA, 40 bp, Artificial Sequence
  Synthetic Oligonucleotide
acactattccggtaagtcatcgttaaccgttttgttgcaa

SEQ ID NO: 9084 - DNA, 40 bp, Artificial Sequence
  Synthetic Oligonucleotide
acactattccggtaagtcatcgttaacccgtttgttgcaa

SEQ ID NO: 9085 - DNA, 40 bp, Artificial Sequence
  Synthetic Oligonucleotide
acactattccggtaagtcatcgtgtaaccgtttgttgcaa

SEQ ID NO: 9086 - DNA, 40 bp, Artificial Sequence
  Synthetic Oligonucleotide
acactattccggtaagtcatcgtctaaccgtttggtgcaa

SEQ ID NO: 9087 - DNA, 40 bp, Artificial Sequence
  Synthetic Oligonucleotide
acactattccggtaagtcatcgcttgaccgtttgttgcaa

SEQ ID NO: 9088 - DNA, 40 bp, Artificial Sequence
  Synthetic Oligonucleotide
acactattccggtaagtcatcgcttagccgtttgttgcaa

SEQ ID NO: 9089 - DNA, 40 bp, Artificial Sequence
  Synthetic Oligonucleotide
acactattccggtaagtaatcgtttaaccgtttgttgcaa

SEQ ID NO: 9090 - DNA, 40 bp, Artificial Sequence
  Synthetic Oligonucleotide
acactattccggtaagccatcgttcaaccgtttgttgcaa

SEQ ID NO: 9091 - DNA, 40 bp, Artificial Sequence
  Synthetic Oligonucleotide
acactattccggtaagccatcgtctaaccgtttgttgcaa

SEQ ID NO: 9092 - DNA, 40 bp, Artificial Sequence
  Synthetic Oligonucleotide
acactattccggtaagcatcgttcataccgtttgttgcaa

SEQ ID NO: 9093 - DNA, 40 bp, Artificial Sequence
  Synthetic Oligonucleotide
acactattccgggaagtcatcgtttaaccgtttgttgcaa

SEQ ID NO: 9094 - DNA, 40 bp, Artificial Sequence
  Synthetic Oligonucleotide
acactattccggccttcaccgtccttaatacggacgaatg

SEQ ID NO: 9095 - DNA, 40 bp, Artificial Sequence
  Synthetic Oligonucleotide
acactattccggccttcaccgtcctcaatccggacgaatg

SEQ ID NO: 9096 - DNA, 40 bp, Artificial Sequence
  Synthetic Oligonucleotide
acactattccggccttcaccgtcctcaatacggacgaatt

SEQ ID NO: 9097 - DNA, 40 bp, Artificial Sequence
  Synthetic Oligonucleotide
acactattccggccttcaccgtcctcaatacggacgaagg

SEQ ID NO: 9098 - DNA, 40 bp, Artificial Sequence
  Synthetic Oligonucleotide
acactattccggccttcaccgtcctcaatacgaacgaatg

SEQ ID NO: 9099 - DNA, 40 bp, Artificial Sequence
  Synthetic Oligonucleotide
acactattccggccttcaccgtcctcaatacagacgaatg

SEQ ID NO: 9100 - DNA, 40 bp, Artificial Sequence
  Synthetic Oligonucleotide
acactattccggcaagtcatcgtttgaccgtttgttgcaa

SEQ ID NO: 9101 - DNA, 40 bp, Artificial Sequence
  Synthetic Oligonucleotide
acactattccggaagtcatcgtttaacccgtttgttgcaa

SEQ ID NO: 9102 - DNA, 40 bp, Artificial Sequence
  Synthetic Oligonucleotide
acactattccagtaagccatcgtttaaccgtttgtcgcaa

SEQ ID NO: 9103 - DNA, 40 bp, Artificial Sequence
  Synthetic Oligonucleotide
acactatccgttgtccgtcctcttgtgtattgcgcatgtc

SEQ ID NO: 9104 - DNA, 40 bp, Artificial Sequence
  Synthetic Oligonucleotide
acaccattccggtaagtcatcgtttaaccgtttgttgcaa

SEQ ID NO: 9105 - DNA, 40 bp, Artificial Sequence
  Synthetic Oligonucleotide
acaccaacgctctgtatacgctggactacccgcgtttcaa

SEQ ID NO: 9106 - DNA, 40 bp, Artificial Sequence
  Synthetic Oligonucleotide
acaatgggttccatgctttaggcgcctcttattttgggtc

SEQ ID NO: 9107 - DNA, 40 bp, Artificial Sequence
  Synthetic Oligonucleotide
aatgttaagcttacgtacgcctgggtcactctttgttctg

SEQ ID NO: 9108 - DNA, 40 bp, Artificial Sequence
  Synthetic Oligonucleotide
aatgttaagcttacatgcgcctgggtcactcttcgttctg

SEQ ID NO: 9109 - DNA, 40 bp, Artificial Sequence
  Synthetic Oligonucleotide
aatgttaagcttacatacgcctgggctgctctttgttctg

SEQ ID NO: 9110 - DNA, 40 bp, Artificial Sequence
  Synthetic Oligonucleotide
aatgtcaagcttacatacgcctgggtcactctttgttctg

SEQ ID NO: 9111 - DNA, 40 bp, Artificial Sequence
  Synthetic Oligonucleotide
aatgtaggcacctgctctatgtcgtggggagtaacaggtt

SEQ ID NO: 9112 - DNA, 40 bp, Artificial Sequence
  Synthetic Oligonucleotide
aatggttacgcttacatacgcctgggtcactcttgttctg

SEQ ID NO: 9113 - DNA, 40 bp, Artificial Sequence
  Synthetic Oligonucleotide
aatgggcttttaagcgacttctcggtaacttggcagttac

SEQ ID NO: 9114 - DNA, 40 bp, Artificial Sequence
  Synthetic Oligonucleotide
aatctcgagatcactaggcgctatcccagcactgtatcaa

SEQ ID NO: 9115 - DNA, 40 bp, Artificial Sequence
  Synthetic Oligonucleotide
aatctcgagatcactaggcactatcctagcaccgtatcaa

SEQ ID NO: 9116 - DNA, 40 bp, Artificial Sequence
  Synthetic Oligonucleotide
aatcgtgctcgagcattccgtctcgatcttttccagtctg

SEQ ID NO: 9117 - DNA, 40 bp, Artificial Sequence
  Synthetic Oligonucleotide
aatcgggaccgcctcaagctagctacctccattggtccta

SEQ ID NO: 9118 - DNA, 40 bp, Artificial Sequence
  Synthetic Oligonucleotide
aatcgggaccgcctcaagctagctacctccattggcctga

SEQ ID NO: 9119 - DNA, 40 bp, Artificial Sequence
  Synthetic Oligonucleotide
aatcgcgctgccctttgtttaaggcctttatacaaacgca

SEQ ID NO: 9120 - DNA, 40 bp, Artificial Sequence
  Synthetic Oligonucleotide
aatccatggtacgcctcgattccgccatacatgcatgtaa

SEQ ID NO: 9121 - DNA, 40 bp, Artificial Sequence
  Synthetic Oligonucleotide
aatcatcagtaattctgcccctctgatgaaacggttactt

SEQ ID NO: 9122 - DNA, 40 bp, Artificial Sequence
  Synthetic Oligonucleotide
aatcacagttaattctgccctctgatgaaaccggttactt

SEQ ID NO: 9123 - DNA, 40 bp, Artificial Sequence
  Synthetic Oligonucleotide
aatcacagtaattctgccctctgatgaaaccggcttactt

SEQ ID NO: 9124 - DNA, 40 bp, Artificial Sequence
  Synthetic Oligonucleotide
aatcacagtaattctgcccctctggtgaaaccggttactt

SEQ ID NO: 9125 - DNA, 40 bp, Artificial Sequence
  Synthetic Oligonucleotide
aagcgtttgtactgtgtcgcacgctattgcgaggtaacat

SEQ ID NO: 9126 - DNA, 40 bp, Artificial Sequence
  Synthetic Oligonucleotide
aagcgctttgtatgtgtcgcacgctattgcgaggtaacat

SEQ ID NO: 9127 - DNA, 40 bp, Artificial Sequence
  Synthetic Oligonucleotide
aagccggggcccgcctcaagctagttacctccattgtctg

SEQ ID NO: 9128 - DNA, 40 bp, Artificial Sequence
  Synthetic Oligonucleotide
aagatctcggatctggcgtactacttggacaggttccctc

SEQ ID NO: 9129 - DNA, 40 bp, Artificial Sequence
  Synthetic Oligonucleotide
aagatctcggatctgcgtactacttcggacaggttcctcc

SEQ ID NO: 9130 - DNA, 40 bp, Artificial Sequence
  Synthetic Oligonucleotide
aactcggatctcatctaactcctgaaccgggccatctaag

SEQ ID NO: 9131 - DNA, 40 bp, Artificial Sequence
  Synthetic Oligonucleotide
aactcgccagtcacatcaactatgatgacgcttgactgga

SEQ ID NO: 9132 - DNA, 40 bp, Artificial Sequence
  Synthetic Oligonucleotide
aactatccgtttgtccgtcctcttgtggtgttgcgcatgc

SEQ ID NO: 9133 - DNA, 40 bp, Artificial Sequence
  Synthetic Oligonucleotide
aactatccgtttgtccgtcctcttgtggtattgcgcgtgc

SEQ ID NO: 9134 - DNA, 40 bp, Artificial Sequence
  Synthetic Oligonucleotide
aacgtactccatccgcctgggctcctcccagttacgactg

SEQ ID NO: 9135 - DNA, 40 bp, Artificial Sequence
  Synthetic Oligonucleotide
aacgtaccccagctttagtccttcctaaagggccctttga

SEQ ID NO: 9136 - DNA, 40 bp, Artificial Sequence
  Synthetic Oligonucleotide
aacgggcccggcctcaagctagctacctccattcgtcctg

SEQ ID NO: 9137 - DNA, 40 bp, Artificial Sequence
  Synthetic Oligonucleotide
aacgggcccgctcaacgtctagctcacctccattgtcgtg

SEQ ID NO: 9138 - DNA, 40 bp, Artificial Sequence
  Synthetic Oligonucleotide
aacggaccggccgcctcaagctagctacctccattgtctg

SEQ ID NO: 9139 - DNA, 40 bp, Artificial Sequence
  Synthetic Oligonucleotide
aaccgtacccccagtttagtcctcctaaagggccctttga

SEQ ID NO: 9140 - DNA, 40 bp, Artificial Sequence
  Synthetic Oligonucleotide
aaccgggtgccgcctcaagtctagctacctccattgtctg

SEQ ID NO: 9141 - DNA, 40 bp, Artificial Sequence
  Synthetic Oligonucleotide
aaccgggtgcccgcctcaagctagctacctccattgtctg

SEQ ID NO: 9142 - DNA, 40 bp, Artificial Sequence
  Synthetic Oligonucleotide
aaccggggtccgcctcaagctagctacctccacttgtctg

SEQ ID NO: 9143 - DNA, 40 bp, Artificial Sequence
  Synthetic Oligonucleotide
aaccgggggcccgcctcaagctagctacctccattgtctg

SEQ ID NO: 9144 - DNA, 40 bp, Artificial Sequence
  Synthetic Oligonucleotide
aaccggggcccgcctcaagctagctaccttccattgctgc

SEQ ID NO: 9145 - DNA, 40 bp, Artificial Sequence
  Synthetic Oligonucleotide
aaccggggcccgcctcaagctagctacctccattgtctga

SEQ ID NO: 9146 - DNA, 40 bp, Artificial Sequence
  Synthetic Oligonucleotide
aaccggggcccgcctcaagctactaccgtccattagtctg

SEQ ID NO: 9147 - DNA, 40 bp, Artificial Sequence
  Synthetic Oligonucleotide
aaccggggacccgcctcaagctagctacctccattgtctg

SEQ ID NO: 9148 - DNA, 40 bp, Artificial Sequence
  Synthetic Oligonucleotide
aaccgggccgcctcaacgtctgctcacctccattgtcgtg

SEQ ID NO: 9149 - DNA, 40 bp, Artificial Sequence
  Synthetic Oligonucleotide
aaccgggcccgctcagctagctcaccgtccagttgttctg

SEQ ID NO: 9150 - DNA, 40 bp, Artificial Sequence
  Synthetic Oligonucleotide
aaccgggcccgctcacgtctagctcacctccattgtcgtg

SEQ ID NO: 9151 - DNA, 40 bp, Artificial Sequence
  Synthetic Oligonucleotide
aaccgggcccgctcaagctagctcacctccattcgtcctg

SEQ ID NO: 9152 - DNA, 40 bp, Artificial Sequence
  Synthetic Oligonucleotide
aaccgggcccgctcaagcctagctgacctccattcgtctg

SEQ ID NO: 9153 - DNA, 40 bp, Artificial Sequence
  Synthetic Oligonucleotide
aaccgggcccgctcaagcctagctacctccacttcgtctg

SEQ ID NO: 9154 - DNA, 40 bp, Artificial Sequence
  Synthetic Oligonucleotide
aaccgggcccgctcaacgtctagctcacctccattgtctg

SEQ ID NO: 9155 - DNA, 40 bp, Artificial Sequence
  Synthetic Oligonucleotide
aaccgggcccgctcaacgtctagctacctccattgtctga

SEQ ID NO: 9156 - DNA, 40 bp, Artificial Sequence
  Synthetic Oligonucleotide
aaccgggcccgctcaacgtcagctcacctccattgtcgtg

SEQ ID NO: 9157 - DNA, 40 bp, Artificial Sequence
  Synthetic Oligonucleotide
aaccgggcccgctcaacgctagcctacctccattgtcgtg

SEQ ID NO: 9158 - DNA, 40 bp, Artificial Sequence
  Synthetic Oligonucleotide
aaccgggcccgcctcaagtcctagctacctccattgtctg

SEQ ID NO: 9159 - DNA, 40 bp, Artificial Sequence
  Synthetic Oligonucleotide
aaccgggcccgcctcaagctagctaccttccattgcctgc

SEQ ID NO: 9160 - DNA, 40 bp, Artificial Sequence
  Synthetic Oligonucleotide
aaccgggcccgcctcaagctagctacctccattgtcctgc

SEQ ID NO: 9161 - DNA, 40 bp, Artificial Sequence
  Synthetic Oligonucleotide
aaccgggcccgcctcaagctactcgacctccattgtcgtg

SEQ ID NO: 9162 - DNA, 40 bp, Artificial Sequence
  Synthetic Oligonucleotide
aaccgggcccgcctcaagcctagctacttccacttgtctg

SEQ ID NO: 9163 - DNA, 40 bp, Artificial Sequence
  Synthetic Oligonucleotide
aaccgggcccgcctcaagcctagctacctccacttgactg

SEQ ID NO: 9164 - DNA, 40 bp, Artificial Sequence
  Synthetic Oligonucleotide
aaccgggcccgcctcaacgctaggctaccttccattgctg

SEQ ID NO: 9165 - DNA, 40 bp, Artificial Sequence
  Synthetic Oligonucleotide
aaccgggcccgcctcaacgctagctcacctccattgtcgg

SEQ ID NO: 9166 - DNA, 40 bp, Artificial Sequence
  Synthetic Oligonucleotide
aaccgggcccgcctcaacgctagctacctccattatcgtg

SEQ ID NO: 9167 - DNA, 40 bp, Artificial Sequence
  Synthetic Oligonucleotide
aaccgggccccgccctcaagctagctacctccattgtctg

SEQ ID NO: 9168 - DNA, 40 bp, Artificial Sequence
  Synthetic Oligonucleotide
aaccgggaccgcctcaagcctagctacctaccattgtctg

SEQ ID NO: 9169 - DNA, 40 bp, Artificial Sequence
  Synthetic Oligonucleotide
aaccgggacccgccttcaagctagctacctccattgtctg

SEQ ID NO: 9170 - DNA, 40 bp, Artificial Sequence
  Synthetic Oligonucleotide
aaccggcccgcctcaagccctactacgtcacttcggactg

SEQ ID NO: 9171 - DNA, 40 bp, Artificial Sequence
  Synthetic Oligonucleotide
aaccggagcccgcctcaagctagctaccttccattgtctg

SEQ ID NO: 9172 - DNA, 40 bp, Artificial Sequence
  Synthetic Oligonucleotide
aaccggaccgcctcaacgtctagctacctccattgtcgtg

SEQ ID NO: 9173 - DNA, 40 bp, Artificial Sequence
  Synthetic Oligonucleotide
aaccggaagtccctcctcgtcttgatgcactatcatctca

SEQ ID NO: 9174 - DNA, 40 bp, Artificial Sequence
  Synthetic Oligonucleotide
aacccgggcccgcctcaacgctagctacctccattgtctg

SEQ ID NO: 9175 - DNA, 40 bp, Artificial Sequence
  Synthetic Oligonucleotide
aacccgggacccgcctcaagctagctacctccattgtctg

SEQ ID NO: 9176 - DNA, 40 bp, Artificial Sequence
  Synthetic Oligonucleotide
aacagtgataactctcagaacgcgtctttcctccacgcat

SEQ ID NO: 9177 - DNA, 40 bp, Artificial Sequence
  Synthetic Oligonucleotide
aacagcactggactctcagcgcgtgacccatctctcagta

SEQ ID NO: 9178 - DNA, 40 bp, Artificial Sequence
  Synthetic Oligonucleotide
aacagaggccctcgtgttggactaccaacttgtagaacgg

SEQ ID NO: 9179 - DNA, 40 bp, Artificial Sequence
  Synthetic Oligonucleotide
aaatcggtacgcctacaatacgcctggtcactcttgttcg

SEQ ID NO: 9180 - DNA, 40 bp, Artificial Sequence
  Synthetic Oligonucleotide
aaatcgggcccgcctcaagcctagctacctccattgtctg

SEQ ID NO: 9181 - DNA, 40 bp, Artificial Sequence
  Synthetic Oligonucleotide
aaactggggcccgcctcaagctagctacctccatcgtctg

SEQ ID NO: 9182 - DNA, 40 bp, Artificial Sequence
  Synthetic Oligonucleotide
aaacggggccgccttcaagctagctacctccattggtctg

SEQ ID NO: 9183 - DNA, 40 bp, Artificial Sequence
  Synthetic Oligonucleotide
aaacggggcccgctcaagctagctgacctccattgtcctg

SEQ ID NO: 9184 - DNA, 40 bp, Artificial Sequence
  Synthetic Oligonucleotide
aaacggggcccgctcaagctagctgacctccattgccctg

SEQ ID NO: 9185 - DNA, 40 bp, Artificial Sequence
  Synthetic Oligonucleotide
aaacggggcccgctcaagctagctgacctccattatcctg

SEQ ID NO: 9186 - DNA, 40 bp, Artificial Sequence
  Synthetic Oligonucleotide
aaacggggcccgcctcaagctagctacctccattgtcctg

SEQ ID NO: 9187 - DNA, 40 bp, Artificial Sequence
  Synthetic Oligonucleotide
aaacggggccccgctacaagctagcttacgtccatgtctg

SEQ ID NO: 9188 - DNA, 40 bp, Artificial Sequence
  Synthetic Oligonucleotide
aaacggggccccgcctcaagctagctacctccattgtctg

SEQ ID NO: 9189 - DNA, 40 bp, Artificial Sequence
  Synthetic Oligonucleotide
aaacggggcccccgctcaagctagctactcccattgtctg

SEQ ID NO: 9190 - DNA, 40 bp, Artificial Sequence
  Synthetic Oligonucleotide
aaacggggcccccgctcaagctagctacctccattgtctg

SEQ ID NO: 9191 - DNA, 40 bp, Artificial Sequence
  Synthetic Oligonucleotide
aaacgggcccggcctcaagctagctacctccattgtcctg

SEQ ID NO: 9192 - DNA, 40 bp, Artificial Sequence
  Synthetic Oligonucleotide
aaacgggcccgcctcaagctagctgacctccattcgtctg

SEQ ID NO: 9193 - DNA, 40 bp, Artificial Sequence
  Synthetic Oligonucleotide
aaacgggcccccgctcaagctagctacctccattgtcctg

SEQ ID NO: 9194 - DNA, 40 bp, Artificial Sequence
  Synthetic Oligonucleotide
aaacgagggcctgcctcaagctagctacctccattgtctg

SEQ ID NO: 9195 - DNA, 40 bp, Artificial Sequence
  Synthetic Oligonucleotide
aaacgagatctcgtgacgcctcgggtccttccttcgactg

SEQ ID NO: 9196 - DNA, 40 bp, Artificial Sequence
  Synthetic Oligonucleotide
aaacgagatctcatgacgcctcgggtccttccttcggctg

SEQ ID NO: 9197 - DNA, 40 bp, Artificial Sequence
  Synthetic Oligonucleotide
aaaccggtggccgcctcaagctagctacctccattgtctg

SEQ ID NO: 9198 - DNA, 40 bp, Artificial Sequence
  Synthetic Oligonucleotide
aaaccgggtccgcctcaagctagctacctccattgtctga

SEQ ID NO: 9199 - DNA, 40 bp, Artificial Sequence
  Synthetic Oligonucleotide
aaaccgggggccgcctcaagctagctacctccattgtccg

SEQ ID NO: 9200 - DNA, 40 bp, Artificial Sequence
  Synthetic Oligonucleotide
aaaccgggggccgcctcaagctagcaacctccattgtctg

SEQ ID NO: 9201 - DNA, 40 bp, Artificial Sequence
  Synthetic Oligonucleotide
aaaccgggggcccgctcaagctagctacctccattgtctg

SEQ ID NO: 9202 - DNA, 40 bp, Artificial Sequence
  Synthetic Oligonucleotide
aaaccgggggcccgcctcaagctagctacctccatgtttg

SEQ ID NO: 9203 - DNA, 40 bp, Artificial Sequence
  Synthetic Oligonucleotide
aaaccggggcttgcctcaagctagctacctccattgtctg

SEQ ID NO: 9204 - DNA, 40 bp, Artificial Sequence
  Synthetic Oligonucleotide
aaaccggggctcgcctcgagctagctacctccattgtctg

SEQ ID NO: 9205 - DNA, 40 bp, Artificial Sequence
  Synthetic Oligonucleotide
aaaccggggcctgcctcaagctagctacctctattgtctg

SEQ ID NO: 9206 - DNA, 40 bp, Artificial Sequence
  Synthetic Oligonucleotide
aaaccggggccgcctcaagctagctacctgccattgtctg

SEQ ID NO: 9207 - DNA, 40 bp, Artificial Sequence
  Synthetic Oligonucleotide
aaaccggggcccgtctcaagctagctacctccattatctg

SEQ ID NO: 9208 - DNA, 40 bp, Artificial Sequence
  Synthetic Oligonucleotide
aaaccggggcccgctcaagctagctgacctccattgtctg

SEQ ID NO: 9209 - DNA, 40 bp, Artificial Sequence
  Synthetic Oligonucleotide
aaaccggggcccgctcaagctagctacctcctttgtcctg

SEQ ID NO: 9210 - DNA, 40 bp, Artificial Sequence
  Synthetic Oligonucleotide
aaaccggggcccgctcaagctagctacctccattgtcgtg

SEQ ID NO: 9211 - DNA, 40 bp, Artificial Sequence
  Synthetic Oligonucleotide
aaaccggggcccgctcaagctagctacctccattcgcctg

SEQ ID NO: 9212 - DNA, 40 bp, Artificial Sequence
  Synthetic Oligonucleotide
aaaccggggcccgctcaagctagctaccctccattgtctg

SEQ ID NO: 9213 - DNA, 40 bp, Artificial Sequence
  Synthetic Oligonucleotide
aaaccggggcccgccttcaagctagctacctccttgtctg

SEQ ID NO: 9214 - DNA, 40 bp, Artificial Sequence
  Synthetic Oligonucleotide
aaaccggggcccgccttagactagctacctccattgtctg

SEQ ID NO: 9215 - DNA, 40 bp, Artificial Sequence
  Synthetic Oligonucleotide
aaaccggggcccgccttaagctagctatctccattgtctg

SEQ ID NO: 9216 - DNA, 40 bp, Artificial Sequence
  Synthetic Oligonucleotide
aaaccggggcccgccttaagctagctacctccattgtcag

SEQ ID NO: 9217 - DNA, 40 bp, Artificial Sequence
  Synthetic Oligonucleotide
aaaccggggcccgcctcaggctagctacccccattgtctg

SEQ ID NO: 9218 - DNA, 40 bp, Artificial Sequence
  Synthetic Oligonucleotide
aaaccggggcccgcctcacgctagctacctccattgtctg

SEQ ID NO: 9219 - DNA, 40 bp, Artificial Sequence
  Synthetic Oligonucleotide
aaaccggggcccgcctcaagtctagctacctccattgctg

SEQ ID NO: 9220 - DNA, 40 bp, Artificial Sequence
  Synthetic Oligonucleotide
aaaccggggcccgcctcaagcttgctacccccattgtctg

SEQ ID NO: 9221 - DNA, 40 bp, Artificial Sequence
  Synthetic Oligonucleotide
aaaccggggcccgcctcaagctggctacctctattgtctg

SEQ ID NO: 9222 - DNA, 40 bp, Artificial Sequence
  Synthetic Oligonucleotide
aaaccggggcccgcctcaagctcgctacctccattgtctg

SEQ ID NO: 9223 - DNA, 40 bp, Artificial Sequence
  Synthetic Oligonucleotide
aaaccggggcccgcctcaagctatctacctccattgtccg

SEQ ID NO: 9224 - DNA, 40 bp, Artificial Sequence
  Synthetic Oligonucleotide
aaaccggggcccgcctcaagctagctactttccattgctg

SEQ ID NO: 9225 - DNA, 40 bp, Artificial Sequence
  Synthetic Oligonucleotide
aaaccggggcccgcctcaagctagctaccttcattgtcta

SEQ ID NO: 9226 - DNA, 40 bp, Artificial Sequence
  Synthetic Oligonucleotide
aaaccggggcccgcctcaagctagctacctctattgtcgg

SEQ ID NO: 9227 - DNA, 40 bp, Artificial Sequence
  Synthetic Oligonucleotide
aaaccggggcccgcctcaagctagctacctctattgtccg

SEQ ID NO: 9228 - DNA, 40 bp, Artificial Sequence
  Synthetic Oligonucleotide
aaaccggggcccgcctcaagctagctacctcctttgcccg

SEQ ID NO: 9229 - DNA, 40 bp, Artificial Sequence
  Synthetic Oligonucleotide
aaaccggggcccgcctcaagctagctacctccattgtgtg

SEQ ID NO: 9230 - DNA, 40 bp, Artificial Sequence
  Synthetic Oligonucleotide
aaaccggggcccgcctcaagctagctacctccattgtcgt

SEQ ID NO: 9231 - DNA, 40 bp, Artificial Sequence
  Synthetic Oligonucleotide
aaaccggggcccgcctcaagctagctacctccatagactg

SEQ ID NO: 9232 - DNA, 40 bp, Artificial Sequence
  Synthetic Oligonucleotide
aaaccggggcccgcctcaagctagccacctcgattgtctg

SEQ ID NO: 9233 - DNA, 40 bp, Artificial Sequence
  Synthetic Oligonucleotide
aaaccggggcccgcctcaagctagcaacctccattgtttg

SEQ ID NO: 9234 - DNA, 40 bp, Artificial Sequence
  Synthetic Oligonucleotide
aaaccggggcccgcctcaagctagcaacctccattgtcta

SEQ ID NO: 9235 - DNA, 40 bp, Artificial Sequence
  Synthetic Oligonucleotide
aaaccggggcccgcctcaagctagcaacctccactgtctg

SEQ ID NO: 9236 - DNA, 40 bp, Artificial Sequence
  Synthetic Oligonucleotide
aaaccggggcccgcctcaagccagctatctccattgtctg

SEQ ID NO: 9237 - DNA, 40 bp, Artificial Sequence
  Synthetic Oligonucleotide
aaaccggggcccgcctcaagccagctacctccatcgtctg

SEQ ID NO: 9238 - DNA, 40 bp, Artificial Sequence
  Synthetic Oligonucleotide
aaaccggggcccgcctcaagcaagctaccaccattgtctg

SEQ ID NO: 9239 - DNA, 40 bp, Artificial Sequence
  Synthetic Oligonucleotide
aaaccggggcccgcctacaagctagctacctccattgctg

SEQ ID NO: 9240 - DNA, 40 bp, Artificial Sequence
  Synthetic Oligonucleotide
aaaccggggcccgccccaagctagctacctccattgtccg

SEQ ID NO: 9241 - DNA, 40 bp, Artificial Sequence
  Synthetic Oligonucleotide
aaaccggggcccgccccaagctagctacctccactgtctg

SEQ ID NO: 9242 - DNA, 40 bp, Artificial Sequence
  Synthetic Oligonucleotide
aaaccggggccccgcctcaagctagctcctccattgtctg

SEQ ID NO: 9243 - DNA, 40 bp, Artificial Sequence
  Synthetic Oligonucleotide
aaaccggggcccacctgaagctagctacctccattgtctg

SEQ ID NO: 9244 - DNA, 40 bp, Artificial Sequence
  Synthetic Oligonucleotide
aaaccggggccagcctcaagctagctacctccattgtctg

SEQ ID NO: 9245 - DNA, 40 bp, Artificial Sequence
  Synthetic Oligonucleotide
aaaccgggccgctcaacgtctggctacctccattgtcgtg

SEQ ID NO: 9246 - DNA, 40 bp, Artificial Sequence
  Synthetic Oligonucleotide
aaaccgggccgcctcaagctagctgcctccattggtctgc

SEQ ID NO: 9247 - DNA, 40 bp, Artificial Sequence
  Synthetic Oligonucleotide
aaaccgggcccgcttacaagctagctacctccattgtctg

SEQ ID NO: 9248 - DNA, 40 bp, Artificial Sequence
  Synthetic Oligonucleotide
aaaccgggcccgctctaagctagctaccttccattgtctg

SEQ ID NO: 9249 - DNA, 40 bp, Artificial Sequence
  Synthetic Oligonucleotide
aaaccgggcccgctcaagctagctaccttccattgtctga

SEQ ID NO: 9250 - DNA, 40 bp, Artificial Sequence
  Synthetic Oligonucleotide
aaaccgggcccgctcaagcctagctacctccattggtctg

SEQ ID NO: 9251 - DNA, 40 bp, Artificial Sequence
  Synthetic Oligonucleotide
aaaccgggcccgctcaacgctagctacctccatttgtctg

SEQ ID NO: 9252 - DNA, 40 bp, Artificial Sequence
  Synthetic Oligonucleotide
aaaccgggcccgctcaacgctagctacctccattgtctga

SEQ ID NO: 9253 - DNA, 40 bp, Artificial Sequence
  Synthetic Oligonucleotide
aaaccgggcccgctcaacgctagctacctccattgtcgtg

SEQ ID NO: 9254 - DNA, 40 bp, Artificial Sequence
  Synthetic Oligonucleotide
aaaccgggcccgctacaacgctagctacctccattgtctg

SEQ ID NO: 9255 - DNA, 40 bp, Artificial Sequence
  Synthetic Oligonucleotide
aaaccgggcccgccttcaagctggctacctccattgtctg

SEQ ID NO: 9256 - DNA, 40 bp, Artificial Sequence
  Synthetic Oligonucleotide
aaaccgggcccgcctcaagtctagctacctcctttgtctg

SEQ ID NO: 9257 - DNA, 40 bp, Artificial Sequence
  Synthetic Oligonucleotide
aaaccgggcccgcctcaagtctagctacctccgttgtctg

SEQ ID NO: 9258 - DNA, 40 bp, Artificial Sequence
  Synthetic Oligonucleotide
aaaccgggcccgcctcaagtctagctacctccattgtcta

SEQ ID NO: 9259 - DNA, 40 bp, Artificial Sequence
  Synthetic Oligonucleotide
aaaccgggcccgcctcaagtctagctacctcattgtcgtg

SEQ ID NO: 9260 - DNA, 40 bp, Artificial Sequence
  Synthetic Oligonucleotide
aaaccgggcccgcctcaagtctagctacccccattgtctg

SEQ ID NO: 9261 - DNA, 40 bp, Artificial Sequence
  Synthetic Oligonucleotide
aaaccgggcccgcctcaagtctagcaacctccattgtctg

SEQ ID NO: 9262 - DNA, 40 bp, Artificial Sequence
  Synthetic Oligonucleotide
aaaccgggcccgcctcaagtctactacctccattgtcgtg

SEQ ID NO: 9263 - DNA, 40 bp, Artificial Sequence
  Synthetic Oligonucleotide
aaaccgggcccgcctcaaggctagctacctccattgtctg

SEQ ID NO: 9264 - DNA, 40 bp, Artificial Sequence
  Synthetic Oligonucleotide
aaaccgggcccgcctcaagctaggctacctccattgtctg

SEQ ID NO: 9265 - DNA, 40 bp, Artificial Sequence
  Synthetic Oligonucleotide
aaaccgggcccgcctcaagctagctcacctccattgtctg

SEQ ID NO: 9266 - DNA, 40 bp, Artificial Sequence
  Synthetic Oligonucleotide
aaaccgggcccgcctcaagctagctacctccattgttgtg

SEQ ID NO: 9267 - DNA, 40 bp, Artificial Sequence
  Synthetic Oligonucleotide
aaaccgggcccgcctcaagctagctacctccattgttctg

SEQ ID NO: 9268 - DNA, 40 bp, Artificial Sequence
  Synthetic Oligonucleotide
aaaccgggcccgcctcaagctagctacctccattgtccta

SEQ ID NO: 9269 - DNA, 40 bp, Artificial Sequence
  Synthetic Oligonucleotide
aaaccgggcccgcctcaagctagctacctccacttgtctg

SEQ ID NO: 9270 - DNA, 40 bp, Artificial Sequence
  Synthetic Oligonucleotide
aaaccgggcccgcctcaagctagctaccccccattgtctg

SEQ ID NO: 9271 - DNA, 40 bp, Artificial Sequence
  Synthetic Oligonucleotide
aaaccgggcccgcctcaagcctagctacctccatcgtctg

SEQ ID NO: 9272 - DNA, 40 bp, Artificial Sequence
  Synthetic Oligonucleotide
aaaccgggcccgcctcaagccagctacctccattagtctg

SEQ ID NO: 9273 - DNA, 40 bp, Artificial Sequence
  Synthetic Oligonucleotide
aaaccgggcccgcctcaacgctagctacctccattatctg

SEQ ID NO: 9274 - DNA, 40 bp, Artificial Sequence
  Synthetic Oligonucleotide
aaaccgggcccgcctcaaagctagctacctccattgtctg

SEQ ID NO: 9275 - DNA, 40 bp, Artificial Sequence
  Synthetic Oligonucleotide
aaaccgggcccgccccaagctagctacctccattgtctgc

SEQ ID NO: 9276 - DNA, 40 bp, Artificial Sequence
  Synthetic Oligonucleotide
aaaccgggagccgcctcaagctagctacctccattgtctg

SEQ ID NO: 9277 - DNA, 40 bp, Artificial Sequence
  Synthetic Oligonucleotide
aaaccgggaccgcctcgagctagctacctccacttgtctg

SEQ ID NO: 9278 - DNA, 40 bp, Artificial Sequence
  Synthetic Oligonucleotide
aaaccgggacccgcttcaagctagctacctccattgtctg

SEQ ID NO: 9279 - DNA, 40 bp, Artificial Sequence
  Synthetic Oligonucleotide
aaaccgggacccgcctcaagctagctaccttcattgtctg

SEQ ID NO: 9280 - DNA, 40 bp, Artificial Sequence
  Synthetic Oligonucleotide
aaaccgggacccgcctcaagctagctacctcctttgtctg

SEQ ID NO: 9281 - DNA, 40 bp, Artificial Sequence
  Synthetic Oligonucleotide
aaaccgggacccgcctcaagctagctacctccattgcccg

SEQ ID NO: 9282 - DNA, 40 bp, Artificial Sequence
  Synthetic Oligonucleotide
aaaccgggacccgcctcaagctagctacctccattatctg

SEQ ID NO: 9283 - DNA, 40 bp, Artificial Sequence
  Synthetic Oligonucleotide
aaaccgggacccgcctcaagctaactacctccattgtctg

SEQ ID NO: 9284 - DNA, 40 bp, Artificial Sequence
  Synthetic Oligonucleotide
aaaccgggacccgcctcaaactagctacctccattgtctg

SEQ ID NO: 9285 - DNA, 40 bp, Artificial Sequence
  Synthetic Oligonucleotide
aaaccgggacccgccgcaagctagctacctccattgcctg

SEQ ID NO: 9286 - DNA, 40 bp, Artificial Sequence
  Synthetic Oligonucleotide
aaaccggaggccgcctcaagctagctacctccattgtctg

SEQ ID NO: 9287 - DNA, 40 bp, Artificial Sequence
  Synthetic Oligonucleotide
aaaccggagcccgcctcgagctagctacctccattgtctg

SEQ ID NO: 9288 - DNA, 40 bp, Artificial Sequence
  Synthetic Oligonucleotide
aaaccggagcccgcctcaagctagctatctccattgtctg

SEQ ID NO: 9289 - DNA, 40 bp, Artificial Sequence
  Synthetic Oligonucleotide
aaaccggagcccgcctcaagctagcgacctccattgtctg

SEQ ID NO: 9290 - DNA, 40 bp, Artificial Sequence
  Synthetic Oligonucleotide
aaaccggaccgcctcaagtctagctacctccattgtcgtg

SEQ ID NO: 9291 - DNA, 40 bp, Artificial Sequence
  Synthetic Oligonucleotide
aaaccgaggccctcctcaagctagctacctccattgtctg

SEQ ID NO: 9292 - DNA, 40 bp, Artificial Sequence
  Synthetic Oligonucleotide
aaaccgaggcccgcctcaagctagctacctccatcgtctg

SEQ ID NO: 9293 - DNA, 40 bp, Artificial Sequence
  Synthetic Oligonucleotide
aaaccgaggcccgcctcaagctaactacctccattgtctg

SEQ ID NO: 9294 - DNA, 40 bp, Artificial Sequence
  Synthetic Oligonucleotide
aaaccgaggccccgcctcaagctagctacctccattgttg

SEQ ID NO: 9295 - DNA, 40 bp, Artificial Sequence
  Synthetic Oligonucleotide
aaacccggggccccgctcaagctagctacctcattgtctg

SEQ ID NO: 9296 - DNA, 40 bp, Artificial Sequence
  Synthetic Oligonucleotide
aaacccgggcccgccccaagctagctacctccattgtctg

SEQ ID NO: 9297 - DNA, 40 bp, Artificial Sequence
  Synthetic Oligonucleotide
aaaccagggcccgcctcgagctagctacctccattgtctg

SEQ ID NO: 9298 - DNA, 40 bp, Artificial Sequence
  Synthetic Oligonucleotide
aaaccagggcccgcctcaagctagctacctccattgcctg

SEQ ID NO: 9299 - DNA, 40 bp, Artificial Sequence
  Synthetic Oligonucleotide
aaaccagggcccgcctcaagctagcaacctccattgtctg

SEQ ID NO: 9300 - DNA, 40 bp, Artificial Sequence
  Synthetic Oligonucleotide
aaaaccgaggcccgcctcaagctagctacctccatctctg

SEQ ID NO: 9301 - DNA, 40 bp, Artificial Sequence
  Synthetic Oligonucleotide
cactatccgtttgtccgtctcttgtggtattgcgcatgcc

SEQ ID NO: 9302 - DNA, 40 bp, Artificial Sequence
  Synthetic Oligonucleotide
cactatccgtttgtcgtcctcttgtggtattgcgcatgcc

SEQ ID NO: 9303 - DNA, 40 bp, Artificial Sequence
  Synthetic Oligonucleotide
cactatccgtttgtccgtccctcttgtggtattgcgcatg

SEQ ID NO: 9304 - DNA, 40 bp, Artificial Sequence
  Synthetic Oligonucleotide
cactatccgtttgtccgtctctcgtggtattgcgcatgcc

SEQ ID NO: 9305 - DNA, 40 bp, Artificial Sequence
  Synthetic Oligonucleotide
aaacggggccccgctcaagctagctacctcccattgtctg

SEQ ID NO: 9306 - DNA, 40 bp, Artificial Sequence
  Synthetic Oligonucleotide
cactatccgtttgctccgtcctctgtggtattgcgcatgc

SEQ ID NO: 9307 - DNA, 40 bp, Artificial Sequence
  Synthetic Oligonucleotide
cgtgtagtgctacctgctttaagctgcatcctgtaaatta

SEQ ID NO: 9308 - DNA, 40 bp, Artificial Sequence
  Synthetic Oligonucleotide
cactatccgtttgtcgtcctctcgtggtattgcgcatgcc

SEQ ID NO: 9309 - DNA, 40 bp, Artificial Sequence
  Synthetic Oligonucleotide
cactatccgtttgtcccgtcctctcgtggtattgcgcatg

SEQ ID NO: 9310 - DNA, 40 bp, Artificial Sequence
  Synthetic Oligonucleotide
cactatcccgtttgtccgtcctcttgtggtattgcgcatg

SEQ ID NO: 9311 - DNA, 40 bp, Artificial Sequence
  Synthetic Oligonucleotide
cactacccgtttgtccgtcctcctgtggtattgcgcatgc

SEQ ID NO: 9312 - DNA, 40 bp, Artificial Sequence
  Synthetic Oligonucleotide
acactattccggtaaatcatcgtttaaccgtttgttgcaa

SEQ ID NO: 9313 - DNA, 40 bp, Artificial Sequence
  Synthetic Oligonucleotide
tattcgccagtcacatcaactatgatgacgcttgacgtga

SEQ ID NO: 9314 - DNA, 40 bp, Artificial Sequence
  Synthetic Oligonucleotide
tatgggctttaagctacttcttcgtaacttgggcagttac

SEQ ID NO: 9315 - DNA, 40 bp, Artificial Sequence
  Synthetic Oligonucleotide
gcggtttcttctcctgactacatgatattaataaacgcgc

SEQ ID NO: 9316 - DNA, 40 bp, Artificial Sequence
  Synthetic Oligonucleotide
gagcttccttagtttttggcgctatccaattggcaactat

SEQ ID NO: 9317 - DNA, 40 bp, Artificial Sequence
  Synthetic Oligonucleotide
ccgcaccccgatagtcattttcgctggaccacccgcgtta

SEQ ID NO: 9318 - DNA, 40 bp, Artificial Sequence
  Synthetic Oligonucleotide
cactatcgtttgtccgtcctcttgtggtattgcgcatgcc

SEQ ID NO: 9319 - DNA, 40 bp, Artificial Sequence
  Synthetic Oligonucleotide
cactatccgtttgtccgtcctcctgtggcattgcgcatgc

SEQ ID NO: 9320 - DNA, 40 bp, Artificial Sequence
  Synthetic Oligonucleotide
attcagctggagcgctatctctggcaaatgggtccgtttc

SEQ ID NO: 9321 - DNA, 40 bp, Artificial Sequence
  Synthetic Oligonucleotide
tgtggggcttttaagcacttctggtaacttgggcagttac

SEQ ID NO: 9322 - DNA, 40 bp, Artificial Sequence
  Synthetic Oligonucleotide
tgcgtaacgctatttctgggaaccgctatctcgagctgaa

SEQ ID NO: 9323 - DNA, 40 bp, Artificial Sequence
  Synthetic Oligonucleotide
tgcgaacgctatttctgggaagccgctatctcgagctgaa

SEQ ID NO: 9324 - DNA, 40 bp, Artificial Sequence
  Synthetic Oligonucleotide
tgcgaacgctatttctcgggaagccgctatctcgagcgaa

SEQ ID NO: 9325 - DNA, 40 bp, Artificial Sequence
  Synthetic Oligonucleotide
tgcgaaacgctattttctgggaagccgcgtctcgagcaaa

SEQ ID NO: 9326 - DNA, 40 bp, Artificial Sequence
  Synthetic Oligonucleotide
tgaagtctgcggtttcactagactactactgatcacgtcg

SEQ ID NO: 9327 - DNA, 40 bp, Artificial Sequence
  Synthetic Oligonucleotide
tcttccatctggtcgcgatacagaatacgattaacacaga

SEQ ID NO: 9328 - DNA, 40 bp, Artificial Sequence
  Synthetic Oligonucleotide
tattggccagccacatcaactatgatgacgcttgactgga

SEQ ID NO: 9329 - DNA, 40 bp, Artificial Sequence
  Synthetic Oligonucleotide
tattcgccagtcacatcaactatgatggcgcttggctgga

SEQ ID NO: 9330 - DNA, 40 bp, Artificial Sequence
  Synthetic Oligonucleotide
tattcgccagtcacatcaactatgatgacgtttggctgga

SEQ ID NO: 9331 - DNA, 40 bp, Artificial Sequence
  Synthetic Oligonucleotide
tattccccagccacatcaactatgatgacgcttgactgga

SEQ ID NO: 9332 - DNA, 40 bp, Artificial Sequence
  Synthetic Oligonucleotide
tatggggcttttaagcacttctcggtaacttgggcagcta

SEQ ID NO: 9333 - DNA, 40 bp, Artificial Sequence
  Synthetic Oligonucleotide
tatggggcttttaagcacttctcggtaacttgagcagtta

SEQ ID NO: 9334 - DNA, 40 bp, Artificial Sequence
  Synthetic Oligonucleotide
tatgggcttttaagctacttctcggtaacttggcagttac

SEQ ID NO: 9335 - DNA, 40 bp, Artificial Sequence
  Synthetic Oligonucleotide
tatgggcttttaagcacttctcggttaacttgggcagtta

SEQ ID NO: 9336 - DNA, 40 bp, Artificial Sequence
  Synthetic Oligonucleotide
tatgggctttagcgcacttctcggtaacttgggcagttac

SEQ ID NO: 9337 - DNA, 40 bp, Artificial Sequence
  Synthetic Oligonucleotide
tatgggctttaagcacttctcggtacacttgggcagttac

SEQ ID NO: 9338 - DNA, 40 bp, Artificial Sequence
  Synthetic Oligonucleotide
tatgggcttctacgcacttctcggtaacttgggcagttac

SEQ ID NO: 9339 - DNA, 40 bp, Artificial Sequence
  Synthetic Oligonucleotide
tactacccccatcgagcgagtctactctcccatcaacgga

SEQ ID NO: 9340 - DNA, 40 bp, Artificial Sequence
  Synthetic Oligonucleotide
gtccgtcttccctaatgtacattacgaatagacatgcgtg

SEQ ID NO: 9341 - DNA, 40 bp, Artificial Sequence
  Synthetic Oligonucleotide
gtccatggtacgactcgattccgcccatacatgcatgtaa

SEQ ID NO: 9342 - DNA, 40 bp, Artificial Sequence
  Synthetic Oligonucleotide
gtcatgggctttaagctacttctcgtacttggcgagttac

SEQ ID NO: 9343 - DNA, 40 bp, Artificial Sequence
  Synthetic Oligonucleotide
gcggtttcttctcctgactacatgagatcaataaactcgc

SEQ ID NO: 9344 - DNA, 40 bp, Artificial Sequence
  Synthetic Oligonucleotide
gccgcatgggtcggttttggtggggactaccccccttgta

SEQ ID NO: 9345 - DNA, 40 bp, Artificial Sequence
  Synthetic Oligonucleotide
gccgcatgggtcagttttggtgggggactacccccttgta

SEQ ID NO: 9346 - DNA, 40 bp, Artificial Sequence
  Synthetic Oligonucleotide
ctcttatccggcacgacgtctttcgtgcactatcacgatt

SEQ ID NO: 9347 - DNA, 40 bp, Artificial Sequence
  Synthetic Oligonucleotide
ctcttatccgcaggcaggacttcgttgcactatcacgatt

SEQ ID NO: 9348 - DNA, 40 bp, Artificial Sequence
  Synthetic Oligonucleotide
cgttggaagactacttccattttagctgccagctgttctc

SEQ ID NO: 9349 - DNA, 40 bp, Artificial Sequence
  Synthetic Oligonucleotide
cgctatccgtttgtccgtcctctcgtggtattgcgcacgc

SEQ ID NO: 9350 - DNA, 40 bp, Artificial Sequence
  Synthetic Oligonucleotide
ccttccagggccaatgtccgcattatcatcctatgttctg

SEQ ID NO: 9351 - DNA, 40 bp, Artificial Sequence
  Synthetic Oligonucleotide
ccgcatccccgatagtcatcttcactggacacccgtgtta

SEQ ID NO: 9352 - DNA, 40 bp, Artificial Sequence
  Synthetic Oligonucleotide
ccgcacccgatagtcatcttcactggaccaccccgtgtta

SEQ ID NO: 9353 - DNA, 40 bp, Artificial Sequence
  Synthetic Oligonucleotide
ccgcaccccgattgtcatcttcgctggaccacccgcgtta

SEQ ID NO: 9354 - DNA, 40 bp, Artificial Sequence
  Synthetic Oligonucleotide
ccgcaccccgatagttgtcttcgctggaccacccgcgtta

SEQ ID NO: 9355 - DNA, 40 bp, Artificial Sequence
  Synthetic Oligonucleotide
ccgcaccccgatagtcattttcactggaccacccgtgtta

SEQ ID NO: 9356 - DNA, 40 bp, Artificial Sequence
  Synthetic Oligonucleotide
ccgcaccccgatagccatcttcatctggacacccgtgtta

SEQ ID NO: 9357 - DNA, 40 bp, Artificial Sequence
  Synthetic Oligonucleotide
ccgcacccccgatagtcatcttcaccggacacccgtgtta

SEQ ID NO: 9358 - DNA, 40 bp, Artificial Sequence
  Synthetic Oligonucleotide
ccgcacccccgatagccatcttcactggacacccgtgtta

SEQ ID NO: 9359 - DNA, 40 bp, Artificial Sequence
  Synthetic Oligonucleotide
cactatcgtttgtccgtctccctgtggtattgcgcatgcc

SEQ ID NO: 9360 - DNA, 40 bp, Artificial Sequence
  Synthetic Oligonucleotide
cactatcgtttgtccgtcctcttgtcggtattgcgcatgc

SEQ ID NO: 9361 - DNA, 40 bp, Artificial Sequence
  Synthetic Oligonucleotide
cactatccgtttgtccgttctcttgtggtattgcgcatac

SEQ ID NO: 9362 - DNA, 40 bp, Artificial Sequence
  Synthetic Oligonucleotide
cactatccgtttgtccgttctctcgtggtattgcgcatac

SEQ ID NO: 9363 - DNA, 40 bp, Artificial Sequence
  Synthetic Oligonucleotide
cactatccgtttgtccgttctctcgtggtattgcgcacgc

SEQ ID NO: 9364 - DNA, 40 bp, Artificial Sequence
  Synthetic Oligonucleotide
cactatccgtttgtccgtcctcttgtggttatgcgcatgc

SEQ ID NO: 9365 - DNA, 40 bp, Artificial Sequence
  Synthetic Oligonucleotide
cactatccgtttgtccgtcctcttgtggtattgcacacgc

SEQ ID NO: 9366 - DNA, 40 bp, Artificial Sequence
  Synthetic Oligonucleotide
cactatccgtttgtccgtcctcttgtggatatgcgcatcg

SEQ ID NO: 9367 - DNA, 40 bp, Artificial Sequence
  Synthetic Oligonucleotide
cactatccgtttgtccgtcctcttgcggtattgcgcgtgc

SEQ ID NO: 9368 - DNA, 40 bp, Artificial Sequence
  Synthetic Oligonucleotide
cactatccgtttgtccgtcctctagtggtattgcgcattc

SEQ ID NO: 9369 - DNA, 40 bp, Artificial Sequence
  Synthetic Oligonucleotide
cactatccgtttgtccgtcctcctgtggtattgcgcttgc

SEQ ID NO: 9370 - DNA, 40 bp, Artificial Sequence
  Synthetic Oligonucleotide
cactatccgtttgtccgccctcttgtggtattgcgcatac

SEQ ID NO: 9371 - DNA, 40 bp, Artificial Sequence
  Synthetic Oligonucleotide
cactatccgtttgtccgccctcttgaggtattgcgcatgc

SEQ ID NO: 9372 - DNA, 40 bp, Artificial Sequence
  Synthetic Oligonucleotide
cactatccgtttgctcgtctcttgtggtattgcgcatgcc

SEQ ID NO: 9373 - DNA, 40 bp, Artificial Sequence
  Synthetic Oligonucleotide
cactatccgtttgctcgtcctcctgtggtattgcgcatgc

SEQ ID NO: 9374 - DNA, 40 bp, Artificial Sequence
  Synthetic Oligonucleotide
cactatccgttgtcgtccttctcgtggtattgcgcatgtc

SEQ ID NO: 9375 - DNA, 40 bp, Artificial Sequence
  Synthetic Oligonucleotide
cactatccgttctgtccgtctcttgtggtattgcgcatgc

SEQ ID NO: 9376 - DNA, 40 bp, Artificial Sequence
  Synthetic Oligonucleotide
cactatccgttcgtccgtcctcttgtggtattgcgcgtgc

SEQ ID NO: 9377 - DNA, 40 bp, Artificial Sequence
  Synthetic Oligonucleotide
cactatccgtctgtccgtcctcttgtggtgttgcgcatgc

SEQ ID NO: 9378 - DNA, 40 bp, Artificial Sequence
  Synthetic Oligonucleotide
cactatccgtctgtccgtcctcttgtggtattgcgcatac

SEQ ID NO: 9379 - DNA, 40 bp, Artificial Sequence
  Synthetic Oligonucleotide
cactatccgtctgcccgtcctctcgtggtattgcgcatgc

SEQ ID NO: 9380 - DNA, 40 bp, Artificial Sequence
  Synthetic Oligonucleotide
cactatccggttgtccgtcctctcgtggtattgcgcatgc

SEQ ID NO: 9381 - DNA, 40 bp, Artificial Sequence
  Synthetic Oligonucleotide
cactatccgcttgtccgtcctcttgtggtattgcgcatgt

SEQ ID NO: 9382 - DNA, 40 bp, Artificial Sequence
  Synthetic Oligonucleotide
cactatccgcttgtccgtcctcttgtgggattgcgcatgc

SEQ ID NO: 9383 - DNA, 40 bp, Artificial Sequence
  Synthetic Oligonucleotide
cactatccgcttgtccgtcctctcgtggtattgcgcacgc

SEQ ID NO: 9384 - DNA, 40 bp, Artificial Sequence
  Synthetic Oligonucleotide
cactatccgcttgctcgtcctcttgtggtattgcgcatgc

SEQ ID NO: 9385 - DNA, 40 bp, Artificial Sequence
  Synthetic Oligonucleotide
cactatccgcttgcccgtcctctcgtggtattgcgcatgc

SEQ ID NO: 9386 - DNA, 40 bp, Artificial Sequence
  Synthetic Oligonucleotide
cactactccgttgtccgtcctcttgtggtattgcgcatgc

SEQ ID NO: 9387 - DNA, 40 bp, Artificial Sequence
  Synthetic Oligonucleotide
attaattctagcgacttcggtggtgtcctctccattacca

SEQ ID NO: 9388 - DNA, 40 bp, Artificial Sequence
  Synthetic Oligonucleotide
attaactccagcgacttcggtggtgtcctctccatcacca

SEQ ID NO: 9389 - DNA, 40 bp, Artificial Sequence
  Synthetic Oligonucleotide
atggtccatgaggcttctggcactatccagttgacgctca

SEQ ID NO: 9390 - DNA, 40 bp, Artificial Sequence
  Synthetic Oligonucleotide
atgcgaactgctgttttggcgccatccaaattttaggcta

SEQ ID NO: 9391 - DNA, 40 bp, Artificial Sequence
  Synthetic Oligonucleotide
atccatggtacgcctcgattccgctcatacatgcatgtaa

SEQ ID NO: 9392 - DNA, 40 bp, Artificial Sequence
  Synthetic Oligonucleotide
agtctgaccctgttatggactaccatatcagaagggtact

SEQ ID NO: 9393 - DNA, 40 bp, Artificial Sequence
  Synthetic Oligonucleotide
acttccatctggtcgcgatacagaatacgattaacataaa

SEQ ID NO: 9394 - DNA, 40 bp, Artificial Sequence
  Synthetic Oligonucleotide
acgctattccggtaagtcatcgtttaaccgcttgttgcaa

SEQ ID NO: 9395 - DNA, 40 bp, Artificial Sequence
  Synthetic Oligonucleotide
acactattcggtaagtcatcgtttaacccgtttgttgcaa

SEQ ID NO: 9396 - DNA, 40 bp, Artificial Sequence
  Synthetic Oligonucleotide
acactattccggtaagtcatcttttaaccgtttgttgcaa

SEQ ID NO: 9397 - DNA, 40 bp, Artificial Sequence
  Synthetic Oligonucleotide
acactattccggtaagtcatcgtttaaccgtgtgttgcaa

SEQ ID NO: 9398 - DNA, 40 bp, Artificial Sequence
  Synthetic Oligonucleotide
acactattccggtaagtcatcgtttaaccgtatgttgcaa

SEQ ID NO: 9399 - DNA, 40 bp, Artificial Sequence
  Synthetic Oligonucleotide
acactattccggtaagtcatcgttcgaccgtttgttgcaa

SEQ ID NO: 9400 - DNA, 40 bp, Artificial Sequence
  Synthetic Oligonucleotide
tttaactctgttgcttcgcgcgctatcgcgaatttagcgc

SEQ ID NO: 9401 - DNA, 40 bp, Artificial Sequence
  Synthetic Oligonucleotide
ttgtaccccgggttgcaattgcctcgtaaccataccgcat

SEQ ID NO: 9402 - DNA, 40 bp, Artificial Sequence
  Synthetic Oligonucleotide
ttgtaccccgggttgcaattgcctcgtaaccagaccgtat

SEQ ID NO: 9403 - DNA, 40 bp, Artificial Sequence
  Synthetic Oligonucleotide
ttggggcttttaagcacttctcggtaacttgagcagttac

SEQ ID NO: 9404 - DNA, 40 bp, Artificial Sequence
  Synthetic Oligonucleotide
ttgggatacttgaggtcgttgagcgcttacgaaccctaat

SEQ ID NO: 9405 - DNA, 40 bp, Artificial Sequence
  Synthetic Oligonucleotide
ttgcacagctctcttcgtctttgatcgaccacgctcataa

SEQ ID NO: 9406 - DNA, 40 bp, Artificial Sequence
  Synthetic Oligonucleotide
ttgaatcctgctttaggcgcctcttaagggatccatttct

SEQ ID NO: 9407 - DNA, 40 bp, Artificial Sequence
  Synthetic Oligonucleotide
ttcttattcggcaggacgtctttcgtgcactatcacgatt

SEQ ID NO: 9408 - DNA, 40 bp, Artificial Sequence
  Synthetic Oligonucleotide
ttcttatccggcaggacgtctttcgcgcactatcacgatt

SEQ ID NO: 9409 - DNA, 40 bp, Artificial Sequence
  Synthetic Oligonucleotide
ttctatccggctagacgtctttcgtgcactatcacgactt

SEQ ID NO: 9410 - DNA, 40 bp, Artificial Sequence
  Synthetic Oligonucleotide
ttcatcgcctagcttatgggactacccgtttgatgcctaa

SEQ ID NO: 9411 - DNA, 40 bp, Artificial Sequence
  Synthetic Oligonucleotide
ttatccctgatgatctgagttctcatcggctggcactatc

SEQ ID NO: 9412 - DNA, 40 bp, Artificial Sequence
  Synthetic Oligonucleotide
ttactttctcggtatcactaattgccgcatcacgcactcc

SEQ ID NO: 9413 - DNA, 40 bp, Artificial Sequence
  Synthetic Oligonucleotide
ttaagatagtgcgttgggccgcctcgtttcctttcgtttg

SEQ ID NO: 9414 - DNA, 40 bp, Artificial Sequence
  Synthetic Oligonucleotide
tgttcgccagtcacaccaactatgatgacgcttgactgga

SEQ ID NO: 9415 - DNA, 40 bp, Artificial Sequence
  Synthetic Oligonucleotide
tgttcgccagccacatcaactatgatgacgcttgactggt

SEQ ID NO: 9416 - DNA, 40 bp, Artificial Sequence
  Synthetic Oligonucleotide
tgtggggctttaagcacttcttggtaacttgggcagttac

SEQ ID NO: 9417 - DNA, 40 bp, Artificial Sequence
  Synthetic Oligonucleotide
tgtgcgactacgctcttgaacaattctgatccccggattt

SEQ ID NO: 9418 - DNA, 40 bp, Artificial Sequence
  Synthetic Oligonucleotide
tgtctcgtctacatactttcggacagtctcgccctccatg

SEQ ID NO: 9419 - DNA, 40 bp, Artificial Sequence
  Synthetic Oligonucleotide
tgtattgatcctctcgccgccgcctcgcacccattgcgcg

SEQ ID NO: 9420 - DNA, 40 bp, Artificial Sequence
  Synthetic Oligonucleotide
tgtagatcgtccttatccgcctcggtcttccccaggttaa

SEQ ID NO: 9421 - DNA, 40 bp, Artificial Sequence
  Synthetic Oligonucleotide
tggccttatatcgtgggggactacccccttgtgtgggtat

SEQ ID NO: 9422 - DNA, 40 bp, Artificial Sequence
  Synthetic Oligonucleotide
tggacttatatcgtgggggactacccccttgtgtgggtat

SEQ ID NO: 9423 - DNA, 40 bp, Artificial Sequence
  Synthetic Oligonucleotide
tgcttatccggcaggacgtctttcgtgcactatcacgatt

SEQ ID NO: 9424 - DNA, 40 bp, Artificial Sequence
  Synthetic Oligonucleotide
tgcggacgtcaacgctgccttgttccttcaggtgccaccg

SEQ ID NO: 9425 - DNA, 40 bp, Artificial Sequence
  Synthetic Oligonucleotide
tgcggaacgctattttctgggaagccgcatcttgagcgaa

SEQ ID NO: 9426 - DNA, 40 bp, Artificial Sequence
  Synthetic Oligonucleotide
tgcgcacgcctctgattcactcctacagtgtgtctataga

SEQ ID NO: 9427 - DNA, 40 bp, Artificial Sequence
  Synthetic Oligonucleotide
tgcgaagcgctattttctgggaagccgcatctcgagccaa

SEQ ID NO: 9428 - DNA, 40 bp, Artificial Sequence
  Synthetic Oligonucleotide
tgcgaacgctattttcgtgggaagccgcatctcgagcgaa

SEQ ID NO: 9429 - DNA, 40 bp, Artificial Sequence
  Synthetic Oligonucleotide
tgcgaacgctatttctggaagccgctatcgtcgagctgaa

SEQ ID NO: 9430 - DNA, 40 bp, Artificial Sequence
  Synthetic Oligonucleotide
tgcgaacgctatttctcgggaaccgctatctcgagctgaa

SEQ ID NO: 9431 - DNA, 40 bp, Artificial Sequence
  Synthetic Oligonucleotide
tgcgaaacgtctgatttctgggaaccgcgtctcgagcgaa

SEQ ID NO: 9432 - DNA, 40 bp, Artificial Sequence
  Synthetic Oligonucleotide
tgcgaaacgctgattttctgggaagccgcatctcgagcga

SEQ ID NO: 9433 - DNA, 40 bp, Artificial Sequence
  Synthetic Oligonucleotide
tgcgaaacgctattttttgggaagccgcatctcgagcgga

SEQ ID NO: 9434 - DNA, 40 bp, Artificial Sequence
  Synthetic Oligonucleotide
tgcgaaacgctattttctggtaagccgcatctcgagcgaa

SEQ ID NO: 9435 - DNA, 40 bp, Artificial Sequence
  Synthetic Oligonucleotide
tgcgaaacgctattttctggggagccgcgcctcgagcgaa

SEQ ID NO: 9436 - DNA, 40 bp, Artificial Sequence
  Synthetic Oligonucleotide
tgcgaaacgctattttctgggatgccgcatctcgagcgaa

SEQ ID NO: 9437 - DNA, 40 bp, Artificial Sequence
  Synthetic Oligonucleotide
tgcgaaacgctattttctgggaagtcgcgtctcgagcgaa

SEQ ID NO: 9438 - DNA, 40 bp, Artificial Sequence
  Synthetic Oligonucleotide
tgcgaaacgctattttctgggaagctgcacctcgagcgaa

SEQ ID NO: 9439 - DNA, 40 bp, Artificial Sequence
  Synthetic Oligonucleotide
tgcgaaacgctattttctgggaagccgcgtctcgagctaa

SEQ ID NO: 9440 - DNA, 40 bp, Artificial Sequence
  Synthetic Oligonucleotide
tgcgaaacgctattttctgggaagccgcgtctagagcgaa

SEQ ID NO: 9441 - DNA, 40 bp, Artificial Sequence
  Synthetic Oligonucleotide
tgcgaaacgctattttctgggaagccgcgtcgcgagcgaa

SEQ ID NO: 9442 - DNA, 40 bp, Artificial Sequence
  Synthetic Oligonucleotide
tgcgaaacgctattttctgggaagccgcatcttgagcgga

SEQ ID NO: 9443 - DNA, 40 bp, Artificial Sequence
  Synthetic Oligonucleotide
tgcgaaacgctattttctgggaagccgcatctccagcgaa

SEQ ID NO: 9444 - DNA, 40 bp, Artificial Sequence
  Synthetic Oligonucleotide
tgcgaaacgctattttctgggaagccgaatctcgagcgaa

SEQ ID NO: 9445 - DNA, 40 bp, Artificial Sequence
  Synthetic Oligonucleotide
tgcgaaacgctattttctgggaagcagcatctcgagcgaa

SEQ ID NO: 9446 - DNA, 40 bp, Artificial Sequence
  Synthetic Oligonucleotide
tgcgaaacgctattttcggggaagccgcatctcgagcgaa

SEQ ID NO: 9447 - DNA, 40 bp, Artificial Sequence
  Synthetic Oligonucleotide
tgcgaaacgctatttgctgggaagccgcatctcgagcgaa

SEQ ID NO: 9448 - DNA, 40 bp, Artificial Sequence
  Synthetic Oligonucleotide
tgcgaaacgctatttctgggaaccgctgtcgtcgagcgaa

SEQ ID NO: 9449 - DNA, 40 bp, Artificial Sequence
  Synthetic Oligonucleotide
tgcgaaacgctatttctcgggaagccgcgtcttgagcgaa

SEQ ID NO: 9450 - DNA, 40 bp, Artificial Sequence
  Synthetic Oligonucleotide
tgcgaaacgctattctctgggaagccgcatctcgagcaaa

SEQ ID NO: 9451 - DNA, 40 bp, Artificial Sequence
  Synthetic Oligonucleotide
tgcgaaacgctactttctgggaagccgcgtctcgagcgaa

SEQ ID NO: 9452 - DNA, 40 bp, Artificial Sequence
  Synthetic Oligonucleotide
tgcgaaacgctactttctgggaagccgcatttcgagcgaa

SEQ ID NO: 9453 - DNA, 40 bp, Artificial Sequence
  Synthetic Oligonucleotide
tgcgaaacgcctatttctgggaagccgcgtctcgagcgaa

SEQ ID NO: 9454 - DNA, 40 bp, Artificial Sequence
  Synthetic Oligonucleotide
tgcctgattccggaacatgcacgtctcgtcttcgtccgcg

SEQ ID NO: 9455 - DNA, 40 bp, Artificial Sequence
  Synthetic Oligonucleotide
tgcagtccgcggtttcactagactactactgatcacgtcg

SEQ ID NO: 9456 - DNA, 40 bp, Artificial Sequence
  Synthetic Oligonucleotide
tgatttcccggggctcaccgcctctgtcttatagaatgcg

SEQ ID NO: 9457 - DNA, 40 bp, Artificial Sequence
  Synthetic Oligonucleotide
tgatgggcttttaagcacttccggtaacttgggcagttac

SEQ ID NO: 9458 - DNA, 40 bp, Artificial Sequence
  Synthetic Oligonucleotide
tgatggcttaaagcactttctgggataccgtggtcagtac

SEQ ID NO: 9459 - DNA, 40 bp, Artificial Sequence
  Synthetic Oligonucleotide
tgactatcgttgtccgtcctcttgtcggtattgcgcatgc

SEQ ID NO: 9460 - DNA, 40 bp, Artificial Sequence
  Synthetic Oligonucleotide
tgacgaaacgctatttctgggaaccgctgtctcgagcgaa

SEQ ID NO: 9461 - DNA, 40 bp, Artificial Sequence
  Synthetic Oligonucleotide
tgaagtccgcggtttcgctagactactactgatcacgtcg

SEQ ID NO: 9462 - DNA, 40 bp, Artificial Sequence
  Synthetic Oligonucleotide
tgaagtccgcggtttcattagactactactgatcacgtcg

SEQ ID NO: 9463 - DNA, 40 bp, Artificial Sequence
  Synthetic Oligonucleotide
tgaagtccgcggtttcactagactattactgatcacgtcg

SEQ ID NO: 9464 - DNA, 40 bp, Artificial Sequence
  Synthetic Oligonucleotide
tgaagtccgcggtttcactagactactgctgatcacgtcg

SEQ ID NO: 9465 - DNA, 40 bp, Artificial Sequence
  Synthetic Oligonucleotide
tgaagtccgcggtttcactagactactattgatcacgtcg

SEQ ID NO: 9466 - DNA, 40 bp, Artificial Sequence
  Synthetic Oligonucleotide
tgaagtccgcggtttcactagactactactgattacgtcg

SEQ ID NO: 9467 - DNA, 40 bp, Artificial Sequence
  Synthetic Oligonucleotide
tgaagtccgcggtttcactagactactactgatcacgttg

SEQ ID NO: 9468 - DNA, 40 bp, Artificial Sequence
  Synthetic Oligonucleotide
tgaagtccgcggtttcactagacaactactgatcacgtcg

SEQ ID NO: 9469 - DNA, 40 bp, Artificial Sequence
  Synthetic Oligonucleotide
tgaagtccgcggttacactagactactactaatcacgtcg

SEQ ID NO: 9470 - DNA, 40 bp, Artificial Sequence
  Synthetic Oligonucleotide
tgaagtccgcggattcactagactactactgatcacgtcg

SEQ ID NO: 9471 - DNA, 40 bp, Artificial Sequence
  Synthetic Oligonucleotide
tgaaatccgcggtttcactagactactactgatcacgtcg

SEQ ID NO: 9472 - DNA, 40 bp, Artificial Sequence
  Synthetic Oligonucleotide
tcttccgtctggtcgcgatacagaatacgattaacataag

SEQ ID NO: 9473 - DNA, 40 bp, Artificial Sequence
  Synthetic Oligonucleotide
tcttccatctggtcgcgatacggaatacgattaacataaa

SEQ ID NO: 9474 - DNA, 40 bp, Artificial Sequence
  Synthetic Oligonucleotide
tcttccatctggtcgcgatacataatacgattaacataaa

SEQ ID NO: 9475 - DNA, 40 bp, Artificial Sequence
  Synthetic Oligonucleotide
tcttccatctggtcgcgatacagaatacgatttacataaa

SEQ ID NO: 9476 - DNA, 40 bp, Artificial Sequence
  Synthetic Oligonucleotide
tcttccatctggtcgcgatacagaatacgattagcataga

SEQ ID NO: 9477 - DNA, 40 bp, Artificial Sequence
  Synthetic Oligonucleotide
tcttccatctggtcgcgatacagaatacgattaacgaaaa

SEQ ID NO: 9478 - DNA, 40 bp, Artificial Sequence
  Synthetic Oligonucleotide
tcttccatctggtcgcgatacagaatacgattaacctaaa

SEQ ID NO: 9479 - DNA, 40 bp, Artificial Sequence
  Synthetic Oligonucleotide
tcttccatctggtcgcgatacagaatacgagtaacataaa

SEQ ID NO: 9480 - DNA, 40 bp, Artificial Sequence
  Synthetic Oligonucleotide
tcttccatcaggtcgcgatacagaatacgattaacataaa

SEQ ID NO: 9481 - DNA, 40 bp, Artificial Sequence
  Synthetic Oligonucleotide
tctctacgtccgaggacgtctttcgtgcactatcacgatt

SEQ ID NO: 9482 - DNA, 40 bp, Artificial Sequence
  Synthetic Oligonucleotide
tctcccaagtttagttgtctttcgaggactacctcgtttc

SEQ ID NO: 9483 - DNA, 40 bp, Artificial Sequence
  Synthetic Oligonucleotide
tctcccaagtttagtcgtctttcgaggactacctcgcttc

SEQ ID NO: 9484 - DNA, 40 bp, Artificial Sequence
  Synthetic Oligonucleotide
tctccatctggtcgcgatatcagaatacgattaacataaa

SEQ ID NO: 9485 - DNA, 40 bp, Artificial Sequence
  Synthetic Oligonucleotide
tcgggatacttgaggtcgttgtgcgcttacgagccctaat

SEQ ID NO: 9486 - DNA, 40 bp, Artificial Sequence
  Synthetic Oligonucleotide
tcggatacttgaggtcgctgcgtcgcttacgaaccctaat

SEQ ID NO: 9487 - DNA, 40 bp, Artificial Sequence
  Synthetic Oligonucleotide
tcgcgcagctcacttcgtctttgatcggccacgctcataa

SEQ ID NO: 9488 - DNA, 40 bp, Artificial Sequence
  Synthetic Oligonucleotide
tcgcctcaggttccccctaacgcgttagccttccggaatg

SEQ ID NO: 9489 - DNA, 40 bp, Artificial Sequence
  Synthetic Oligonucleotide
tcgcactgctcacttcgtctttgatcaaccacgctcataa

SEQ ID NO: 9490 - DNA, 40 bp, Artificial Sequence
  Synthetic Oligonucleotide
tcgcaccccgatagtcatcttcactggaccatccgtgtta

SEQ ID NO: 9491 - DNA, 40 bp, Artificial Sequence
  Synthetic Oligonucleotide
tcgcacagttcacttcgtctttgatcaaccacgctcataa

SEQ ID NO: 9492 - DNA, 40 bp, Artificial Sequence
  Synthetic Oligonucleotide
tcgcacagcttcacttcgtctttgatcgaccacgctctaa

SEQ ID NO: 9493 - DNA, 40 bp, Artificial Sequence
  Synthetic Oligonucleotide
tcgcacagctcgcttcgtctttgatcggccacgctcataa

SEQ ID NO: 9494 - DNA, 40 bp, Artificial Sequence
  Synthetic Oligonucleotide
tcgcacagctcacttcgtctttggtcggccacgctcataa

SEQ ID NO: 9495 - DNA, 40 bp, Artificial Sequence
  Synthetic Oligonucleotide
tcgcacagctcacttcgtctttgatcgaccacgctcatta

SEQ ID NO: 9496 - DNA, 40 bp, Artificial Sequence
  Synthetic Oligonucleotide
tcgcacagctcacttcgtctttgatcgaccacgctcatgg

SEQ ID NO: 9497 - DNA, 40 bp, Artificial Sequence
  Synthetic Oligonucleotide
tcgcacagctcacttcgtctttgatcgaccacgctcatac

SEQ ID NO: 9498 - DNA, 40 bp, Artificial Sequence
  Synthetic Oligonucleotide
tcgcacagctcacttcgtctttgatcgaccacgctcacga

SEQ ID NO: 9499 - DNA, 40 bp, Artificial Sequence
  Synthetic Oligonucleotide
tcgcacagctcacttcgtcttgatcgaccactgctcataa

SEQ ID NO: 9500 - DNA, 40 bp, Artificial Sequence
  Synthetic Oligonucleotide
tcgcacagctcacttcgtcgttgatcgaccacgctcgtaa

SEQ ID NO: 9501 - DNA, 40 bp, Artificial Sequence
  Synthetic Oligonucleotide
tcgcacagctcacttcgatctttgatcgacacgctcataa

SEQ ID NO: 9502 - DNA, 40 bp, Artificial Sequence
  Synthetic Oligonucleotide
tcgcacagcctcacttcgtctttgatcgacacgctcataa

SEQ ID NO: 9503 - DNA, 40 bp, Artificial Sequence
  Synthetic Oligonucleotide
tcgcacagcccacttcgtctttgatcgaccacgctcatga

SEQ ID NO: 9504 - DNA, 40 bp, Artificial Sequence
  Synthetic Oligonucleotide
tcgagctaacgctatttctcggaatcctgtcgtagctgac

SEQ ID NO: 9505 - DNA, 40 bp, Artificial Sequence
  Synthetic Oligonucleotide
tccttcatggggtttttggggactaccccattggcaacac

SEQ ID NO: 9506 - DNA, 40 bp, Artificial Sequence
  Synthetic Oligonucleotide
tccttatccggcaggacgtctttcgtgcactatcacgatt

SEQ ID NO: 9507 - DNA, 40 bp, Artificial Sequence
  Synthetic Oligonucleotide
tcctccatctggtcgcgatacagaatacgattaacaaaaa

SEQ ID NO: 9508 - DNA, 40 bp, Artificial Sequence
  Synthetic Oligonucleotide
tccgtctcgatcctacttttcgaaaaggtctattagctaa

SEQ ID NO: 9509 - DNA, 40 bp, Artificial Sequence
  Synthetic Oligonucleotide
tccgagtccccaattcgtcgtccgtacgctattacggttt

SEQ ID NO: 9510 - DNA, 40 bp, Artificial Sequence
  Synthetic Oligonucleotide
tccagaggccctcgtgttggactaccaacttgtagaacgg

SEQ ID NO: 9511 - DNA, 40 bp, Artificial Sequence
  Synthetic Oligonucleotide
tcatgggctttaagccacttctcgtaacttgggcagttac

SEQ ID NO: 9512 - DNA, 40 bp, Artificial Sequence
  Synthetic Oligonucleotide
tcatgggctttaagcacttctcggtaacttgggcggttac

SEQ ID NO: 9513 - DNA, 40 bp, Artificial Sequence
  Synthetic Oligonucleotide
tcatgggctttaagcacttctcggtaacttgggcagttgc

SEQ ID NO: 9514 - DNA, 40 bp, Artificial Sequence
  Synthetic Oligonucleotide
tcatcgctatccgctctccatcctcttgtgtatgctctgc

SEQ ID NO: 9515 - DNA, 40 bp, Artificial Sequence
  Synthetic Oligonucleotide
tcatcatggctgctcctctgccttattaggagccctaagg

SEQ ID NO: 9516 - DNA, 40 bp, Artificial Sequence
  Synthetic Oligonucleotide
tcagtcgtgtcgtggactaccacagaagaatcgactgtcg

SEQ ID NO: 9517 - DNA, 40 bp, Artificial Sequence
  Synthetic Oligonucleotide
tcagctgctcctccctgaaatcgtgttccctaacgttaag

SEQ ID NO: 9518 - DNA, 40 bp, Artificial Sequence
  Synthetic Oligonucleotide
tcactattccggtaagtcatcgtttaaccgtttgttgcaa

SEQ ID NO: 9519 - skipped

SEQ ID NO: 9520 - DNA, 40 bp, Artificial Sequence
  Synthetic Oligonucleotide
tcaaggcagtcggaacgctatttccggatttacgcgagac

SEQ ID NO: 9521 - DNA, 40 bp, Artificial Sequence
  Synthetic Oligonucleotide
tatttgccagtcacatcaactatgatgacgcttggctgga

SEQ ID NO: 9522 - DNA, 40 bp, Artificial Sequence
  Synthetic Oligonucleotide
tattctccagtcacatcaactatgatgacgcttgactgga

SEQ ID NO: 9523 - DNA, 40 bp, Artificial Sequence
  Synthetic Oligonucleotide
tattcggcagtcacatcaactatgatgacgcttgactgga

SEQ ID NO: 9524 - DNA, 40 bp, Artificial Sequence
  Synthetic Oligonucleotide
tattcgctcagtacatcaactatgatgacgcttgactgga

SEQ ID NO: 9525 - DNA, 40 bp, Artificial Sequence
  Synthetic Oligonucleotide
tattcgcctagtcacatcactatgatgacgcttgactgga

SEQ ID NO: 9526 - DNA, 40 bp, Artificial Sequence
  Synthetic Oligonucleotide
tattcgcctagtcacatcaactatgatgacgcttggctga

SEQ ID NO: 9527 - DNA, 40 bp, Artificial Sequence
  Synthetic Oligonucleotide
tattcgccggtcgcatcaactatgatgacgcttgactgga

SEQ ID NO: 9528 - DNA, 40 bp, Artificial Sequence
  Synthetic Oligonucleotide
tattcgccagtctcatcaactatgatgacgcttgactgga

SEQ ID NO: 9529 - DNA, 40 bp, Artificial Sequence
  Synthetic Oligonucleotide
tattcgccagtcgcatcaactatgatgacgcttggctgga

SEQ ID NO: 9530 - DNA, 40 bp, Artificial Sequence
  Synthetic Oligonucleotide
tattcgccagtcacttcaactatgatgacgcttgactgga

SEQ ID NO: 9531 - DNA, 40 bp, Artificial Sequence
  Synthetic Oligonucleotide
tattcgccagtcacgtcaactatgatgacgcatgactgga

SEQ ID NO: 9532 - DNA, 40 bp, Artificial Sequence
  Synthetic Oligonucleotide
tattcgccagtcacctcaactatgatgacgcttgactgga

SEQ ID NO: 9533 - DNA, 40 bp, Artificial Sequence
  Synthetic Oligonucleotide
tattcgccagtcacatcgaactattgactgactgctctga

SEQ ID NO: 9534 - DNA, 40 bp, Artificial Sequence
  Synthetic Oligonucleotide
tattcgccagtcacatcagctatgatgacgcttgtctgga

SEQ ID NO: 9535 - DNA, 40 bp, Artificial Sequence
  Synthetic Oligonucleotide
tattcgccagtcacatcaactatgtgtacgcttgactgga

SEQ ID NO: 9536 - DNA, 40 bp, Artificial Sequence
  Synthetic Oligonucleotide
tattcgccagtcacatcaactatggcgacgcttgactgga

SEQ ID NO: 9537 - DNA, 40 bp, Artificial Sequence
  Synthetic Oligonucleotide
tattcgccagtcacatcaactatgatgacgcttgagtgga

SEQ ID NO: 9538 - DNA, 40 bp, Artificial Sequence
  Synthetic Oligonucleotide
tattcgccagtcacatcaactatgatgacgctctactgga

SEQ ID NO: 9539 - DNA, 40 bp, Artificial Sequence
  Synthetic Oligonucleotide
tattcgccagtcacatcaactatgatgacgctcgaccgga

SEQ ID NO: 9540 - DNA, 40 bp, Artificial Sequence
  Synthetic Oligonucleotide
tattcgccagtcacatcaactatgacgacgcttggctgga

SEQ ID NO: 9541 - DNA, 40 bp, Artificial Sequence
  Synthetic Oligonucleotide
tattcgccagtcacatcaactatgaagacgcttgactgga

SEQ ID NO: 9542 - DNA, 40 bp, Artificial Sequence
  Synthetic Oligonucleotide
tattcgccagtcacatcaacgatgatgacgcttgactgga

SEQ ID NO: 9543 - DNA, 40 bp, Artificial Sequence
  Synthetic Oligonucleotide
tattcgccagtcacataaactatgatgacgcttggctgga

SEQ ID NO: 9544 - DNA, 40 bp, Artificial Sequence
  Synthetic Oligonucleotide
tattcgccagtcacataaactatgatgacgcttgactgga

SEQ ID NO: 9545 - DNA, 40 bp, Artificial Sequence
  Synthetic Oligonucleotide
tattcgccagccacatgaactatgatgacgcttgactgga

SEQ ID NO: 9546 - DNA, 40 bp, Artificial Sequence
  Synthetic Oligonucleotide
tattcgccagccacatcagctatgatgacgcttgactaga

SEQ ID NO: 9547 - DNA, 40 bp, Artificial Sequence
  Synthetic Oligonucleotide
tattcgccagccacatcaattatgatgacgcttgactgga

SEQ ID NO: 9548 - DNA, 40 bp, Artificial Sequence
  Synthetic Oligonucleotide
tattcgccagccacatcaactatgatgacgctttactgga

SEQ ID NO: 9549 - DNA, 40 bp, Artificial Sequence
  Synthetic Oligonucleotide
tattcgccagccacatcaactatgatgacgcttggactga

SEQ ID NO: 9550 - DNA, 40 bp, Artificial Sequence
  Synthetic Oligonucleotide
tattcgccagccacatcaactatgatgacgcttgcctgga

SEQ ID NO: 9551 - DNA, 40 bp, Artificial Sequence
  Synthetic Oligonucleotide
tattcgccagccacatcaactatgatgacgcttgacggga

SEQ ID NO: 9552 - DNA, 40 bp, Artificial Sequence
  Synthetic Oligonucleotide
tattcgccagccacatcaactatgatgacgctagactgga

SEQ ID NO: 9553 - DNA, 40 bp, Artificial Sequence
  Synthetic Oligonucleotide
tattcgccagccacatcaactatgatgacccttgactgga

SEQ ID NO: 9554 - DNA, 40 bp, Artificial Sequence
  Synthetic Oligonucleotide
tattcgccagcacatcaacctatgatgacgcttgactgga

SEQ ID NO: 9555 - DNA, 40 bp, Artificial Sequence
  Synthetic Oligonucleotide
tattcgccagcacatcaaactatgatgacgcttgactgga

SEQ ID NO: 9556 - DNA, 40 bp, Artificial Sequence
  Synthetic Oligonucleotide
tattcgccagacacatcaactatgatgacgcttgactggg

SEQ ID NO: 9557 - DNA, 40 bp, Artificial Sequence
  Synthetic Oligonucleotide
tattcgccaacacactcaactatgatgacgcttgactgga

SEQ ID NO: 9558 - DNA, 40 bp, Artificial Sequence
  Synthetic Oligonucleotide
tattcgcagcctacatcaactatgatgacgcttgactgga

SEQ ID NO: 9559 - DNA, 40 bp, Artificial Sequence
  Synthetic Oligonucleotide
tattcgcaagtcacatcaactatgatgacgcttgactgga

SEQ ID NO: 9560 - DNA, 40 bp, Artificial Sequence
  Synthetic Oligonucleotide
tattccgccagccacatcaactatgatgacgcttgactga

SEQ ID NO: 9561 - DNA, 40 bp, Artificial Sequence
  Synthetic Oligonucleotide
tatgggggttttaagctactctcgtagcttgggcagttac

SEQ ID NO: 9562 - DNA, 40 bp, Artificial Sequence
  Synthetic Oligonucleotide
tatgggggcttttaagcacttctggtaacttgggcagtta

SEQ ID NO: 9563 - DNA, 40 bp, Artificial Sequence
  Synthetic Oligonucleotide
tatgggggcttttaagcacttcgtgatacttgggcagtac

SEQ ID NO: 9564 - DNA, 40 bp, Artificial Sequence
  Synthetic Oligonucleotide
tatgggggcttataagcacttcggtaacttgagcagttac

SEQ ID NO: 9565 - DNA, 40 bp, Artificial Sequence
  Synthetic Oligonucleotide
tatgggggcttaagcacttctcggtaacttgggcagttac

SEQ ID NO: 9566 - DNA, 40 bp, Artificial Sequence
  Synthetic Oligonucleotide
tatggggctttttaagcactctcgtaacttgggcagttac

SEQ ID NO: 9567 - DNA, 40 bp, Artificial Sequence
  Synthetic Oligonucleotide
tatggggcttttgagcacttccggtaacttgggcagttac

SEQ ID NO: 9568 - DNA, 40 bp, Artificial Sequence
  Synthetic Oligonucleotide
tatggggcttttagcacttctgggtaacttgggcagttac

SEQ ID NO: 9569 - DNA, 40 bp, Artificial Sequence
  Synthetic Oligonucleotide
tatggggcttttagagctctcgtgatacttgggcagttac

SEQ ID NO: 9570 - DNA, 40 bp, Artificial Sequence
  Synthetic Oligonucleotide
tatggggcttttagagacttctcggtaacttgggcattac

SEQ ID NO: 9571 - DNA, 40 bp, Artificial Sequence
  Synthetic Oligonucleotide
tatggggcttttagacacttctcggtaactgggcagttac

SEQ ID NO: 9572 - DNA, 40 bp, Artificial Sequence
  Synthetic Oligonucleotide
tatggggcttttaagctactctggatacttgggcagttac

SEQ ID NO: 9573 - DNA, 40 bp, Artificial Sequence
  Synthetic Oligonucleotide
tatggggcttttaagcgcttctcgtgacttgggcagttac

SEQ ID NO: 9574 - DNA, 40 bp, Artificial Sequence
  Synthetic Oligonucleotide
tatggggcttttaagcgcttctcgtaacttaggcagttac

SEQ ID NO: 9575 - DNA, 40 bp, Artificial Sequence
  Synthetic Oligonucleotide
tatggggcttttaagcacttttcggtaacttgggcagtta

SEQ ID NO: 9576 - DNA, 40 bp, Artificial Sequence
  Synthetic Oligonucleotide
tatggggcttttaagcacttctggtaacttgggcagtcac

SEQ ID NO: 9577 - DNA, 40 bp, Artificial Sequence
  Synthetic Oligonucleotide
tatggggcttttaagcacttctggtaacttggacagttac

SEQ ID NO: 9578 - DNA, 40 bp, Artificial Sequence
  Synthetic Oligonucleotide
tatggggcttttaagcacttctcggtattcgtggagttac

SEQ ID NO: 9579 - DNA, 40 bp, Artificial Sequence
  Synthetic Oligonucleotide
tatggggcttttaagcacttctcggtaacttggtgagtta

SEQ ID NO: 9580 - DNA, 40 bp, Artificial Sequence
  Synthetic Oligonucleotide
tatggggcttttaagcacttctcggtaacttaagcagtta

SEQ ID NO: 9581 - DNA, 40 bp, Artificial Sequence
  Synthetic Oligonucleotide
tatggggcttttaagcacttctcgataacttgggcagtta

SEQ ID NO: 9582 - DNA, 40 bp, Artificial Sequence
  Synthetic Oligonucleotide
tatggggcttttaagcacttcgtgacacttgggcagttac

SEQ ID NO: 9583 - DNA, 40 bp, Artificial Sequence
  Synthetic Oligonucleotide
tatggggcttttaagcacttcgtcacttgggcagttaccc

SEQ ID NO: 9584 - DNA, 40 bp, Artificial Sequence
  Synthetic Oligonucleotide
tatggggcttttaagcacttccggtaactcgggcagttac

SEQ ID NO: 9585 - DNA, 40 bp, Artificial Sequence
  Synthetic Oligonucleotide
tatggggcttttaagcactctcggtaacctgggcagttac

SEQ ID NO: 9586 - DNA, 40 bp, Artificial Sequence
  Synthetic Oligonucleotide
tatggggcttttaagcactcccggtaacttgggcagttac

SEQ ID NO: 9587 - DNA, 40 bp, Artificial Sequence
  Synthetic Oligonucleotide
tatggggcttttaagcactacgtacgtacgtggcagttac

SEQ ID NO: 9588 - DNA, 40 bp, Artificial Sequence
  Synthetic Oligonucleotide
tatggggcttttaagcacctctcggtaacttggcagttac

SEQ ID NO: 9589 - DNA, 40 bp, Artificial Sequence
  Synthetic Oligonucleotide
tatggggctttgagcacttctcggtaacttgggcagttaa

SEQ ID NO: 9590 - DNA, 40 bp, Artificial Sequence
  Synthetic Oligonucleotide
tatggggctttatcacttctcggtaacttgggcgagttac

SEQ ID NO: 9591 - DNA, 40 bp, Artificial Sequence
  Synthetic Oligonucleotide
tatggggctttactagacttctcgtaacttgggcagttac

SEQ ID NO: 9592 - DNA, 40 bp, Artificial Sequence
  Synthetic Oligonucleotide
tatggggctttacagcacttctcggtaattgggcagttac

SEQ ID NO: 9593 - DNA, 40 bp, Artificial Sequence
  Synthetic Oligonucleotide
tatggggctttacacacttctcggtaacttgagcagttac

SEQ ID NO: 9594 - DNA, 40 bp, Artificial Sequence
  Synthetic Oligonucleotide
tatggggctttaagcatttctcggtaacttgggcagttac

SEQ ID NO: 9595 - DNA, 40 bp, Artificial Sequence
  Synthetic Oligonucleotide
tatggggctttaagcactttctcgggtaacttggcagtac

SEQ ID NO: 9596 - DNA, 40 bp, Artificial Sequence
  Synthetic Oligonucleotide
tatggggctttaagcacttctcggtaacttgggcattacc

SEQ ID NO: 9597 - DNA, 40 bp, Artificial Sequence
  Synthetic Oligonucleotide
tatggggctttaagcacttctcggtaacttgggaagttac

SEQ ID NO: 9598 - DNA, 40 bp, Artificial Sequence
  Synthetic Oligonucleotide
tatggggctttaagcacttctcggtaacttgcgcagttac

SEQ ID NO: 9599 - DNA, 40 bp, Artificial Sequence
  Synthetic Oligonucleotide
tatggggctttaagcacttctcggtaacttgagtagttac

SEQ ID NO: 9600 - DNA, 40 bp, Artificial Sequence
  Synthetic Oligonucleotide
tatggggctttaagcacttctcggtaacttgagcagttgc

SEQ ID NO: 9601 - DNA, 40 bp, Artificial Sequence
  Synthetic Oligonucleotide
tatggggctttaagcacttctcggtaactcgagcagttac

SEQ ID NO: 9602 - DNA, 40 bp, Artificial Sequence
  Synthetic Oligonucleotide
tatggggctttaagcactctcggtaacttgggcagttacc

SEQ ID NO: 9603 - DNA, 40 bp, Artificial Sequence
  Synthetic Oligonucleotide
tatggggcttctagcacttcttggtaacttgggcagttac

SEQ ID NO: 9604 - DNA, 40 bp, Artificial Sequence
  Synthetic Oligonucleotide
tatggggcctttagcacttctcggtaacttgggcagttac

SEQ ID NO: 9605 - DNA, 40 bp, Artificial Sequence
  Synthetic Oligonucleotide
tatgggcttttaagctacttctcggtacttggcgagttac

SEQ ID NO: 9606 - DNA, 40 bp, Artificial Sequence
  Synthetic Oligonucleotide
tatgggcttttaagcgagctctcgttacttgggcagttac

SEQ ID NO: 9607 - DNA, 40 bp, Artificial Sequence
  Synthetic Oligonucleotide
tatgggcttttaagcacttctcgtacgttggtcgagttac

SEQ ID NO: 9608 - DNA, 40 bp, Artificial Sequence
  Synthetic Oligonucleotide
tatgggcttttaagcactctcggtaacttgggcagttacc

SEQ ID NO: 9609 - DNA, 40 bp, Artificial Sequence
  Synthetic Oligonucleotide
tatgggctttgagtcactcctcggtaacttggcgagttac

SEQ ID NO: 9610 - DNA, 40 bp, Artificial Sequence
  Synthetic Oligonucleotide
tatgggctttcaagtcacttctcggtacttggcgagttac

SEQ ID NO: 9611 - DNA, 40 bp, Artificial Sequence
  Synthetic Oligonucleotide
tatgggctttcaagcacttccgtcgtacttgggcagttac

SEQ ID NO: 9612 - DNA, 40 bp, Artificial Sequence
  Synthetic Oligonucleotide
tatgggctttacacgcacttctcgtaacttgggcagttac

SEQ ID NO: 9613 - DNA, 40 bp, Artificial Sequence
  Synthetic Oligonucleotide
tatgggctttaatctacttctcggtaacttgggcagttac

SEQ ID NO: 9614 - DNA, 40 bp, Artificial Sequence
  Synthetic Oligonucleotide
tatgggctttaagtcacttctcggtagcttgggcagttac

SEQ ID NO: 9615 - DNA, 40 bp, Artificial Sequence
  Synthetic Oligonucleotide
tatgggctttaagctacttctcgtaacttggtcgagttac

SEQ ID NO: 9616 - DNA, 40 bp, Artificial Sequence
  Synthetic Oligonucleotide
tatgggctttaagctacttctcggtacgttgggcagttac

SEQ ID NO: 9617 - DNA, 40 bp, Artificial Sequence
  Synthetic Oligonucleotide
tatgggctttaagctacttctcggtacgcttggcagttac

SEQ ID NO: 9618 - DNA, 40 bp, Artificial Sequence
  Synthetic Oligonucleotide
tatgggctttaagctacttcctcgtacttggcgagttacc

SEQ ID NO: 9619 - DNA, 40 bp, Artificial Sequence
  Synthetic Oligonucleotide
tatgggctttaagctacttccgtcgtacttgggcagttac

SEQ ID NO: 9620 - DNA, 40 bp, Artificial Sequence
  Synthetic Oligonucleotide
tatgggctttaagcactttctcggtaacttgagcagttac

SEQ ID NO: 9621 - DNA, 40 bp, Artificial Sequence
  Synthetic Oligonucleotide
tatgggctttaagcacttctcggtaacttggtcgagttac

SEQ ID NO: 9622 - DNA, 40 bp, Artificial Sequence
  Synthetic Oligonucleotide
tatgggctttaagcacttctcggtaacttggccagttacc

SEQ ID NO: 9623 - DNA, 40 bp, Artificial Sequence
  Synthetic Oligonucleotide
tatgggctttaagcacttctcggtaacttggacgagttac

SEQ ID NO: 9624 - DNA, 40 bp, Artificial Sequence
  Synthetic Oligonucleotide
tatgggctttaagcacttctcggtaacttgaggcagttac

SEQ ID NO: 9625 - DNA, 40 bp, Artificial Sequence
  Synthetic Oligonucleotide
tatgggctttaagcacttctcggtaacttgagcagttacc

SEQ ID NO: 9626 - DNA, 40 bp, Artificial Sequence
  Synthetic Oligonucleotide
tatgggcttactacgcacttctcgtaacttgggcagttac

SEQ ID NO: 9627 - DNA, 40 bp, Artificial Sequence
  Synthetic Oligonucleotide
tatgggcgttttagcacttctcggtaacttgggcagttac

SEQ ID NO: 9628 - DNA, 40 bp, Artificial Sequence
  Synthetic Oligonucleotide
tatgggcctttaagctacttcggtaacttgggctagttac

SEQ ID NO: 9629 - DNA, 40 bp, Artificial Sequence
  Synthetic Oligonucleotide
tatgggactttaagctacttctcggtaacttggcagttac

SEQ ID NO: 9630 - DNA, 40 bp, Artificial Sequence
  Synthetic Oligonucleotide
tatggcttaaagctatttctcgggatacctggtcagctac

SEQ ID NO: 9631 - DNA, 40 bp, Artificial Sequence
  Synthetic Oligonucleotide
tatggcgttttaagcacttctcggtaacttggacagttac

SEQ ID NO: 9632 - DNA, 40 bp, Artificial Sequence
  Synthetic Oligonucleotide
tatggagcttttaagcactttctcggtaacttggcagtac

SEQ ID NO: 9633 - DNA, 40 bp, Artificial Sequence
  Synthetic Oligonucleotide
tatgagcctgtcttttaatctcggcagagtgctcatgagc

SEQ ID NO: 9634 - DNA, 40 bp, Artificial Sequence
  Synthetic Oligonucleotide
tatcgccagtcacatcacttatgactacgcttgactacga

SEQ ID NO: 9635 - DNA, 40 bp, Artificial Sequence
  Synthetic Oligonucleotide
tatcgccagccacatccaactatgatgacgcttgactgga

SEQ ID NO: 9636 - DNA, 40 bp, Artificial Sequence
  Synthetic Oligonucleotide
tatccgccagttacatcaactatgatgacgcttgactgga

SEQ ID NO: 9637 - DNA, 40 bp, Artificial Sequence
  Synthetic Oligonucleotide
tatccgccagccacatcaactatgatgacgcttgactggg

SEQ ID NO: 9638 - DNA, 40 bp, Artificial Sequence
  Synthetic Oligonucleotide
tataagtgatgcgaggaccatggacttgcgtccctctatg

SEQ ID NO: 9639 - DNA, 40 bp, Artificial Sequence
  Synthetic Oligonucleotide
tataagcctgtcttttaatctcggcagagtgctcatgtgc

SEQ ID NO: 9640 - DNA, 40 bp, Artificial Sequence
  Synthetic Oligonucleotide
tataagcctgtcttttaatctcggcagagtgctcataagc

SEQ ID NO: 9641 - DNA, 40 bp, Artificial Sequence
  Synthetic Oligonucleotide
tataagcctgtcttttaatctcggcagagtgcgcatgagc

SEQ ID NO: 9642 - DNA, 40 bp, Artificial Sequence
  Synthetic Oligonucleotide
tataagcctgtcttttaatctcggcagagagctcatgagc

SEQ ID NO: 9643 - DNA, 40 bp, Artificial Sequence
  Synthetic Oligonucleotide
tataagcctgtcttttaatctcgcagagtgctcatgagtc

SEQ ID NO: 9644 - DNA, 40 bp, Artificial Sequence
  Synthetic Oligonucleotide
tataagcctgtcttttaatctcgacagagtgctcatgagc

SEQ ID NO: 9645 - DNA, 40 bp, Artificial Sequence
  Synthetic Oligonucleotide
tataagcctgtcttttaatatcggcagagtgctcatgagc

SEQ ID NO: 9646 - DNA, 40 bp, Artificial Sequence
  Synthetic Oligonucleotide
tataagcctgtctttaatctcggtcagtagtgctcagagc

SEQ ID NO: 9647 - DNA, 40 bp, Artificial Sequence
  Synthetic Oligonucleotide
tataagcctgtctttaatctcggcagaggtgctcatgagc

SEQ ID NO: 9648 - DNA, 40 bp, Artificial Sequence
  Synthetic Oligonucleotide
tataagcctgtcttgtaatctcggcagagtgctcatgagc

SEQ ID NO: 9649 - DNA, 40 bp, Artificial Sequence
  Synthetic Oligonucleotide
tataagcctgtcatttaatctcggcagagtgctcatgagc

SEQ ID NO: 9650 - DNA, 40 bp, Artificial Sequence
  Synthetic Oligonucleotide
tataagccctgtcttttaatctcggcagagtgctcatgag

SEQ ID NO: 9651 - DNA, 40 bp, Artificial Sequence
  Synthetic Oligonucleotide
tataagccagtcttttaatctcggcagagtgctcatgagc

SEQ ID NO: 9652 - DNA, 40 bp, Artificial Sequence
  Synthetic Oligonucleotide
tagttcgatccgactttcaggcgctatcctgatcacccga

SEQ ID NO: 9653 - DNA, 40 bp, Artificial Sequence
  Synthetic Oligonucleotide
tagtcgatccgtgctttcaggcgctatcctgatcacccga

SEQ ID NO: 9654 - DNA, 40 bp, Artificial Sequence
  Synthetic Oligonucleotide
tagtcgatccgtactttcaggcgctatctgatcaccccga

SEQ ID NO: 9655 - DNA, 40 bp, Artificial Sequence
  Synthetic Oligonucleotide
tagtcgatccgtactttcaggcgctatcctgatcacctga

SEQ ID NO: 9656 - DNA, 40 bp, Artificial Sequence
  Synthetic Oligonucleotide
tagtcgaaccgtactttcaggcgctatcctgatcacccga

SEQ ID NO: 9657 - DNA, 40 bp, Artificial Sequence
  Synthetic Oligonucleotide
tagggctttaagctacttctcggtaacttgggcgagttac

SEQ ID NO: 9658 - DNA, 40 bp, Artificial Sequence
  Synthetic Oligonucleotide
tagggctttaagctacttcctccgtacttggcgagttacc

SEQ ID NO: 9659 - DNA, 40 bp, Artificial Sequence
  Synthetic Oligonucleotide
tagggctttaaagcactttctcgggatacctggcagtaac

SEQ ID NO: 9660 - DNA, 40 bp, Artificial Sequence
  Synthetic Oligonucleotide
taggcggttttaagcacttctcggtaacttgggcggttac

SEQ ID NO: 9661 - DNA, 40 bp, Artificial Sequence
  Synthetic Oligonucleotide
taggcggtttacagcacttctcggtaacttgggcagttac

SEQ ID NO: 9662 - DNA, 40 bp, Artificial Sequence
  Synthetic Oligonucleotide
taggcggtttaagagacttctcggtaacttgggcagttac

SEQ ID NO: 9663 - DNA, 40 bp, Artificial Sequence
  Synthetic Oligonucleotide
tagcggcttttaagcacttctcggtaactcgggcagttac

SEQ ID NO: 9664 - DNA, 40 bp, Artificial Sequence
  Synthetic Oligonucleotide
tactatccgtttgtccgtcctctcatggtattgcgcatgc

SEQ ID NO: 9665 - DNA, 40 bp, Artificial Sequence
  Synthetic Oligonucleotide
tactatccgtttgtccgtccccttgtggtattgcgcatgc

SEQ ID NO: 9666 - DNA, 40 bp, Artificial Sequence
  Synthetic Oligonucleotide
tactatccgtttgtccgtactcctgtggtattgcgcatgc

SEQ ID NO: 9667 - DNA, 40 bp, Artificial Sequence
  Synthetic Oligonucleotide
tactatccgacatcgagagagctacgtcatcaagcgctaa

SEQ ID NO: 9668 - DNA, 40 bp, Artificial Sequence
  Synthetic Oligonucleotide
tactatccccatcgagcgatcgtcgtgatactgcttccaa

SEQ ID NO: 9669 - DNA, 40 bp, Artificial Sequence
  Synthetic Oligonucleotide
tactatccccatcgagcgatcgtcgtaatactgcttccaa

SEQ ID NO: 9670 - DNA, 40 bp, Artificial Sequence
  Synthetic Oligonucleotide
tactacccgtttgtccgtcctctcgtggtattgcgcatgc

SEQ ID NO: 9671 - DNA, 40 bp, Artificial Sequence
  Synthetic Oligonucleotide
tactacccccatcgagcgagtctactcccccatcaacggg

SEQ ID NO: 9672 - DNA, 40 bp, Artificial Sequence
  Synthetic Oligonucleotide
tacgtacgtgagattgcctcgctactctcttttgcagctg

SEQ ID NO: 9673 - DNA, 40 bp, Artificial Sequence
  Synthetic Oligonucleotide
tacggggcttttaagcacttctcggtaactgggcagttac

SEQ ID NO: 9674 - DNA, 40 bp, Artificial Sequence
  Synthetic Oligonucleotide
tacggaagtcccctcctcgtcttgatgcactatcatctca

SEQ ID NO: 9675 - DNA, 40 bp, Artificial Sequence
  Synthetic Oligonucleotide
tacgaaacactattttctgggaagccgcatctcgagcgaa

SEQ ID NO: 9676 - DNA, 40 bp, Artificial Sequence
  Synthetic Oligonucleotide
tacctccaccgcctcgtaagcccgggcactcacctctgta

SEQ ID NO: 9677 - DNA, 40 bp, Artificial Sequence
  Synthetic Oligonucleotide
taccggtactggaggcgtccttggtggactaccacctcat

SEQ ID NO: 9678 - DNA, 40 bp, Artificial Sequence
  Synthetic Oligonucleotide
taccggcactagaggcgtccttggtggactaccaccttat

SEQ ID NO: 9679 - DNA, 40 bp, Artificial Sequence
  Synthetic Oligonucleotide
taccggaagtcccccctcgtcttgatgcactatcatctca

SEQ ID NO: 9680 - DNA, 40 bp, Artificial Sequence
  Synthetic Oligonucleotide
taccgcctcatcatcggacacgacgtgtataagttggctg

SEQ ID NO: 9681 - DNA, 40 bp, Artificial Sequence
  Synthetic Oligonucleotide
taccgcctcatcagcggacacgacgtgtatcagttggctg

SEQ ID NO: 9682 - DNA, 40 bp, Artificial Sequence
  Synthetic Oligonucleotide
taccgccacatcatcggacacgacgtgtatcagttggctg

SEQ ID NO: 9683 - DNA, 40 bp, Artificial Sequence
  Synthetic Oligonucleotide
taccgaaagtccctcctcgtcttgatgcactatcatctca

SEQ ID NO: 9684 - DNA, 40 bp, Artificial Sequence
  Synthetic Oligonucleotide
taccatccgtttgtccgtcctctcgtggtattgcgcatgc

SEQ ID NO: 9685 - DNA, 40 bp, Artificial Sequence
  Synthetic Oligonucleotide
taccacctcatcatcggacacggcgtgtatcagttggctg

SEQ ID NO: 9686 - DNA, 40 bp, Artificial Sequence
  Synthetic Oligonucleotide
tacagtagccctcgtgttggactaccaacttgtagagcgg

SEQ ID NO: 9687 - DNA, 40 bp, Artificial Sequence
  Synthetic Oligonucleotide
tacagaggccctcgtgttgggctaccaacttgtagaacgg

SEQ ID NO: 9688 - DNA, 40 bp, Artificial Sequence
  Synthetic Oligonucleotide
tacagaggccctcgtgttggactaccaacttgtggaacgg

SEQ ID NO: 9689 - DNA, 40 bp, Artificial Sequence
  Synthetic Oligonucleotide
tacagaggccctcgtgttggactaccaacttgtagagtgg

SEQ ID NO: 9690 - DNA, 40 bp, Artificial Sequence
  Synthetic Oligonucleotide
tacagaggccctcgtgttggaccaccaacttgtagaacgg

SEQ ID NO: 9691 - DNA, 40 bp, Artificial Sequence
  Synthetic Oligonucleotide
tacacaggtgttaattgcctccggtccttccatgtgcaca

SEQ ID NO: 9692 - DNA, 40 bp, Artificial Sequence
  Synthetic Oligonucleotide
tacaagcctgtcttttaatctcggcggagtgctcatgagc

SEQ ID NO: 9693 - DNA, 40 bp, Artificial Sequence
  Synthetic Oligonucleotide
taaggggcttttaagcacttctcggtaactggacagttac

SEQ ID NO: 9694 - DNA, 40 bp, Artificial Sequence
  Synthetic Oligonucleotide
taagggctttaagctacttctcggtaacttgggcagttac

SEQ ID NO: 9695 - DNA, 40 bp, Artificial Sequence
  Synthetic Oligonucleotide
taacttgcgcgcttaggtacctggtcactcctgcacgggt

SEQ ID NO: 9696 - DNA, 40 bp, Artificial Sequence
  Synthetic Oligonucleotide
taacggggccccgcctcaagctagctacctccattgtctg

SEQ ID NO: 9697 - DNA, 40 bp, Artificial Sequence
  Synthetic Oligonucleotide
taaccggggcccgcctcaggctagctacctccattgtctg

SEQ ID NO: 9698 - DNA, 40 bp, Artificial Sequence
  Synthetic Oligonucleotide
gttctctcggatcataaactcctgggtcatcgtccatacc

SEQ ID NO: 9699 - DNA, 40 bp, Artificial Sequence
  Synthetic Oligonucleotide
gttctcgcctctgtcctcatgggtcgaaccggtatgcatg

SEQ ID NO: 9700 - DNA, 40 bp, Artificial Sequence
  Synthetic Oligonucleotide
gttctcgcctctgtccacatggttcgaaccggtatgcatg

SEQ ID NO: 9701 - DNA, 40 bp, Artificial Sequence
  Synthetic Oligonucleotide
gttctcgcctctgtccacatggttcgaaccgggatgcatg

SEQ ID NO: 9702 - DNA, 40 bp, Artificial Sequence
  Synthetic Oligonucleotide
gttctcgcctatgtcctcatggttcgaaccggcatgcatg

SEQ ID NO: 9703 - DNA, 40 bp, Artificial Sequence
  Synthetic Oligonucleotide
gttcatggtacgcctcgattccgcccatacatgcatgtga

SEQ ID NO: 9704 - DNA, 40 bp, Artificial Sequence
  Synthetic Oligonucleotide
gttatctctcggatcacacctcctggtcacgcccggtcgt

SEQ ID NO: 9705 - DNA, 40 bp, Artificial Sequence
  Synthetic Oligonucleotide
gtgtgtacagcctgcctcggttccttctgagctacgtaga

SEQ ID NO: 9706 - DNA, 40 bp, Artificial Sequence
  Synthetic Oligonucleotide
gtgtctcggatcgattaatttttcgcatccctcctgcacg

SEQ ID NO: 9707 - DNA, 40 bp, Artificial Sequence
  Synthetic Oligonucleotide
gtgtaatcgattcactgcgcctcggtccaaccatgcgttg

SEQ ID NO: 9708 - DNA, 40 bp, Artificial Sequence
  Synthetic Oligonucleotide
gtgcgaactgctgttttggcgctatccaaattttaggcta

SEQ ID NO: 9709 - DNA, 40 bp, Artificial Sequence
  Synthetic Oligonucleotide
gtgatgggccttttaagcacttctcgtacttggcagttac

SEQ ID NO: 9710 - DNA, 40 bp, Artificial Sequence
  Synthetic Oligonucleotide
gtgatcatgtaaagccggcttgctcgcctcggtcctccat

SEQ ID NO: 9711 - DNA, 40 bp, Artificial Sequence
  Synthetic Oligonucleotide
gtcttatccggcaggacgtctttcgtgcactatcacgatg

SEQ ID NO: 9712 - DNA, 40 bp, Artificial Sequence
  Synthetic Oligonucleotide
gtcttatccggcaggacgtctttcgtgcactatcacgatc

SEQ ID NO: 9713 - DNA, 40 bp, Artificial Sequence
  Synthetic Oligonucleotide
gtcttatccggcagaacgtctttcgtgcactatcacgatt

SEQ ID NO: 9714 - DNA, 40 bp, Artificial Sequence
  Synthetic Oligonucleotide
gtctcggtcgcagcgaaaatactactccgaatcgcactcc

SEQ ID NO: 9715 - DNA, 40 bp, Artificial Sequence
  Synthetic Oligonucleotide
gtcgtacttaccacctgacatcgcggggaagctaatggtt

SEQ ID NO: 9716 - DNA, 40 bp, Artificial Sequence
  Synthetic Oligonucleotide
gtcgtacttaccaccctgacatcgcggggaactaatggct

SEQ ID NO: 9717 - DNA, 40 bp, Artificial Sequence
  Synthetic Oligonucleotide
gtccggaacgccttgatcctcacataatatgatacgtctg

SEQ ID NO: 9718 - DNA, 40 bp, Artificial Sequence
  Synthetic Oligonucleotide
gtccggaacgcctggatcctcgcataatatgatacgtctg

SEQ ID NO: 9719 - DNA, 40 bp, Artificial Sequence
  Synthetic Oligonucleotide
gtccggaacgcctcgatcctcgccatatacgatacgtctg

SEQ ID NO: 9720 - DNA, 40 bp, Artificial Sequence
  Synthetic Oligonucleotide
gtccggaacgcctcgatcctcgcattatatgacacgtctg

SEQ ID NO: 9721 - DNA, 40 bp, Artificial Sequence
  Synthetic Oligonucleotide
gtccggaacgcctcgatcctcgcatgatatgatacgtatg

SEQ ID NO: 9722 - DNA, 40 bp, Artificial Sequence
  Synthetic Oligonucleotide
gtccggaacgcctcgatcctcgcataatacgatacgtatg

SEQ ID NO: 9723 - DNA, 40 bp, Artificial Sequence
  Synthetic Oligonucleotide
gtccggaacgcctcgatcctcgcataacatggtacgtctg

SEQ ID NO: 9724 - DNA, 40 bp, Artificial Sequence
  Synthetic Oligonucleotide
gtccgaagtcgcctcgattccgcccatacatgcatgtaaa

SEQ ID NO: 9725 - DNA, 40 bp, Artificial Sequence
  Synthetic Oligonucleotide
gtcccgccttgatcctcagtcctacccaggttgcaactta

SEQ ID NO: 9726 - DNA, 40 bp, Artificial Sequence
  Synthetic Oligonucleotide
gtccatggttcgcctcgattccgcccatacatgcatgtaa

SEQ ID NO: 9727 - DNA, 40 bp, Artificial Sequence
  Synthetic Oligonucleotide
gtccatggtgcgcctcgattccgcccacacatgcatgtaa

SEQ ID NO: 9728 - DNA, 40 bp, Artificial Sequence
  Synthetic Oligonucleotide
gtccatggtacgcctcgtttccgcccatacatgcatgtaa

SEQ ID NO: 9729 - DNA, 40 bp, Artificial Sequence
  Synthetic Oligonucleotide
gtccatggtacgcctcggttccgcccatacaagcatgtaa

SEQ ID NO: 9730 - DNA, 40 bp, Artificial Sequence
  Synthetic Oligonucleotide
gtccatggtacgcctcgattcgccccatacatgcatgaaa

SEQ ID NO: 9731 - DNA, 40 bp, Artificial Sequence
  Synthetic Oligonucleotide
gtccatggtacgcctcgattccgcttatacatgcatgtaa

SEQ ID NO: 9732 - DNA, 40 bp, Artificial Sequence
  Synthetic Oligonucleotide
gtccatggtacgcctcgattccgcccatagtgtcatgtaa

SEQ ID NO: 9733 - DNA, 40 bp, Artificial Sequence
  Synthetic Oligonucleotide
gtccatggtacgcctcgattccgcccatacatgcatctaa

SEQ ID NO: 9734 - DNA, 40 bp, Artificial Sequence
  Synthetic Oligonucleotide
gtccatggtacgcctcgattccgccataccatgcatgtaa

SEQ ID NO: 9735 - DNA, 40 bp, Artificial Sequence
  Synthetic Oligonucleotide
gtccatggtacgcctcgattccacccatacatgcatgtga

SEQ ID NO: 9736 - DNA, 40 bp, Artificial Sequence
  Synthetic Oligonucleotide
gtccatggtacgcctcgatcccgcccatacatgcatgtta

SEQ ID NO: 9737 - DNA, 40 bp, Artificial Sequence
  Synthetic Oligonucleotide
gtccatggtacgcctcgatcccgcccaaacatgcatgtaa

SEQ ID NO: 9738 - DNA, 40 bp, Artificial Sequence
  Synthetic Oligonucleotide
gtccatggtacgcccccgattcgcccatacatgcatgtaa

SEQ ID NO: 9739 - DNA, 40 bp, Artificial Sequence
  Synthetic Oligonucleotide
gtccatggtacccctcgattccgcccatacatgcatgtaa

SEQ ID NO: 9740 - DNA, 40 bp, Artificial Sequence
  Synthetic Oligonucleotide
gtccacggtacgcctcgattccgcctatacatgcatgtaa

SEQ ID NO: 9741 - DNA, 40 bp, Artificial Sequence
  Synthetic Oligonucleotide
gtcagtccttccccgtcccgaactcatgtgcatgcatgcc

SEQ ID NO: 9742 - DNA, 40 bp, Artificial Sequence
  Synthetic Oligonucleotide
gtattcgcctagtcacatcaactatgatgacgctgctgga

SEQ ID NO: 9743 - DNA, 40 bp, Artificial Sequence
  Synthetic Oligonucleotide
gtatgggcttttaagctacttctcgtacttggcgagttac

SEQ ID NO: 9744 - DNA, 40 bp, Artificial Sequence
  Synthetic Oligonucleotide
gtatgggcttttaagcacttctcgtaacttgggcagttac

SEQ ID NO: 9745 - DNA, 40 bp, Artificial Sequence
  Synthetic Oligonucleotide
gtatgggcttttaagcacttctcggtacttgggcagttac

SEQ ID NO: 9746 - DNA, 40 bp, Artificial Sequence
  Synthetic Oligonucleotide
gtatgggcttctacgtcacttctcgtacttgggcagttac

SEQ ID NO: 9747 - DNA, 40 bp, Artificial Sequence
  Synthetic Oligonucleotide
gtatgggcctttaagctacttctcggtacttggcagttac

SEQ ID NO: 9748 - DNA, 40 bp, Artificial Sequence
  Synthetic Oligonucleotide
gtatctttatccgccccctctgcatggtaggcctacatcg

SEQ ID NO: 9749 - DNA, 40 bp, Artificial Sequence
  Synthetic Oligonucleotide
gtactccggatgagccacctcgcattcctccgttcgtctg

SEQ ID NO: 9750 - DNA, 40 bp, Artificial Sequence
  Synthetic Oligonucleotide
gtacgactcccgttgcgcaccttgtacatacgtatgtccg

SEQ ID NO: 9751 - DNA, 40 bp, Artificial Sequence
  Synthetic Oligonucleotide
gtaccggggcccgcctcaagctagctacctccattgtctg

SEQ ID NO: 9752 - DNA, 40 bp, Artificial Sequence
  Synthetic Oligonucleotide
gtaataaccttccgttactcgcctcgggcaagtgtgcgcg

SEQ ID NO: 9753 - DNA, 40 bp, Artificial Sequence
  Synthetic Oligonucleotide
gtaagtcctctattaggttgccaccctatatctctgtgca

SEQ ID NO: 9754 - DNA, 40 bp, Artificial Sequence
  Synthetic Oligonucleotide
gtaagtattcacgttgaatcgccttgctcctcttagtctg

SEQ ID NO: 9755 - DNA, 40 bp, Artificial Sequence
  Synthetic Oligonucleotide
gtaaatattgacgttgaatcgccttgctcctcttagtctg

SEQ ID NO: 9756 - DNA, 40 bp, Artificial Sequence
  Synthetic Oligonucleotide
gtaaatattcacgttgaatcgccttgctcctcttagtcgg

SEQ ID NO: 9757 - DNA, 40 bp, Artificial Sequence
  Synthetic Oligonucleotide
gtaaatattcacgttgaatcgccttgctcctctcagtctg

SEQ ID NO: 9758 - DNA, 40 bp, Artificial Sequence
  Synthetic Oligonucleotide
gtaaatattcacgttgaaccgccttgctcctcttcgtctg

SEQ ID NO: 9759 - DNA, 40 bp, Artificial Sequence
  Synthetic Oligonucleotide
gtaaaaattcacgttgaatcgccttgctcctcttagtctg

SEQ ID NO: 9760 - DNA, 40 bp, Artificial Sequence
  Synthetic Oligonucleotide
ggggttctttctcctgactacatgagattaataaacgcgc

SEQ ID NO: 9761 - DNA, 40 bp, Artificial Sequence
  Synthetic Oligonucleotide
ggggtgtctgatatgctgttatatttttggaacctctctt

SEQ ID NO: 9762 - DNA, 40 bp, Artificial Sequence
  Synthetic Oligonucleotide
ggggctttcttcatggactaccatgttacaaaaggtcata

SEQ ID NO: 9763 - DNA, 40 bp, Artificial Sequence
  Synthetic Oligonucleotide
ggcgtttcttctcctgactacatgagattaataaacgcgc

SEQ ID NO: 9764 - DNA, 40 bp, Artificial Sequence
  Synthetic Oligonucleotide
ggcggtttcttctctgactacatgagattaataacgcgcc

SEQ ID NO: 9765 - DNA, 40 bp, Artificial Sequence
  Synthetic Oligonucleotide
ggaagtccgcggtttcactagactactactgatcacgtcg

SEQ ID NO: 9766 - DNA, 40 bp, Artificial Sequence
  Synthetic Oligonucleotide
gcttaggctttcacgcacgcggattgtaccgaactgggtt

SEQ ID NO: 9767 - DNA, 40 bp, Artificial Sequence
  Synthetic Oligonucleotide
gctgcatgggtcggttttggtgggggactacccccttgta

SEQ ID NO: 9768 - DNA, 40 bp, Artificial Sequence
  Synthetic Oligonucleotide
gctcttatccggtcagacgcctttcgtgcactatcacgat

SEQ ID NO: 9769 - DNA, 40 bp, Artificial Sequence
  Synthetic Oligonucleotide
gctaggcttttacgcacgcggattgtacccgagctgagtt

SEQ ID NO: 9770 - DNA, 40 bp, Artificial Sequence
  Synthetic Oligonucleotide
gctaggctttcacgtacgcggattgtacccgaattgggtt

SEQ ID NO: 9771 - DNA, 40 bp, Artificial Sequence
  Synthetic Oligonucleotide
gctaggctttcacgcacgcggattgttcccgaactgggtt

SEQ ID NO: 9772 - DNA, 40 bp, Artificial Sequence
  Synthetic Oligonucleotide
gctaggctttcacgcacgcggattgtaccgaactggggtt

SEQ ID NO: 9773 - DNA, 40 bp, Artificial Sequence
  Synthetic Oligonucleotide
gctaggctttcacgcacgcggattgtacccgtactgggtt

SEQ ID NO: 9774 - DNA, 40 bp, Artificial Sequence
  Synthetic Oligonucleotide
gctaggctttcacgcacgcggattgtacccaaactaggtt

SEQ ID NO: 9775 - DNA, 40 bp, Artificial Sequence
  Synthetic Oligonucleotide
gctaggctttcacgcacgcggactgtacccgaactaggtt

SEQ ID NO: 9776 - DNA, 40 bp, Artificial Sequence
  Synthetic Oligonucleotide
gctaggctttcacacacgcggattgtacccgaactgggtt

SEQ ID NO: 9777 - DNA, 40 bp, Artificial Sequence
  Synthetic Oligonucleotide
gctaggatttcacgcacgcggattgtacccgaactgggtt

SEQ ID NO: 9778 - DNA, 40 bp, Artificial Sequence
  Synthetic Oligonucleotide
gctaccatcgtcgatgcgtggcatgttcgtcggaattcga

SEQ ID NO: 9779 - DNA, 40 bp, Artificial Sequence
  Synthetic Oligonucleotide
gctaccatcgtcaagctgtgtcagtttgtcagatcattgc

SEQ ID NO: 9780 - DNA, 40 bp, Artificial Sequence
  Synthetic Oligonucleotide
gcgtttgcttctctgactacatgagagttaataaacgcgc

SEQ ID NO: 9781 - DNA, 40 bp, Artificial Sequence
  Synthetic Oligonucleotide
gcgtttgcttctcctgactacatgggattaataaacgcgc

SEQ ID NO: 9782 - DNA, 40 bp, Artificial Sequence
  Synthetic Oligonucleotide
gcgtttgcttctcctgactacatgagattaataaatgcgc

SEQ ID NO: 9783 - DNA, 40 bp, Artificial Sequence
  Synthetic Oligonucleotide
gcgtttgcttctcctgactacatgagattaataaacgcac

SEQ ID NO: 9784 - DNA, 40 bp, Artificial Sequence
  Synthetic Oligonucleotide
gcgtttcttctcctgactacatgagtattaataaacgcgc

SEQ ID NO: 9785 - DNA, 40 bp, Artificial Sequence
  Synthetic Oligonucleotide
gcgtttcttctcctgactacatgagattaattaaacgcgc

SEQ ID NO: 9786 - DNA, 40 bp, Artificial Sequence
  Synthetic Oligonucleotide
gcgtttcttctcctgactacatgagattaataaacgcgcc

SEQ ID NO: 9787 - DNA, 40 bp, Artificial Sequence
  Synthetic Oligonucleotide
gcgtttcgctctcctgactacatgagattaataaacgcgc

SEQ ID NO: 9788 - DNA, 40 bp, Artificial Sequence
  Synthetic Oligonucleotide
gcgttgcttctcctgactacatgagtagttaataaacgcg

SEQ ID NO: 9789 - DNA, 40 bp, Artificial Sequence
  Synthetic Oligonucleotide
gcgttgcttctcctgactacatgagagttaataaacgcgc

SEQ ID NO: 9790 - DNA, 40 bp, Artificial Sequence
  Synthetic Oligonucleotide
gcgttcttctccttgactcacatgagtattaataacgcgc

SEQ ID NO: 9791 - DNA, 40 bp, Artificial Sequence
  Synthetic Oligonucleotide
gcgttcttctccttgactcacatgagattagtaaacgcgc

SEQ ID NO: 9792 - DNA, 40 bp, Artificial Sequence
  Synthetic Oligonucleotide
gcgttcttctcctgactacatgagattaacctaaacgcgc

SEQ ID NO: 9793 - DNA, 40 bp, Artificial Sequence
  Synthetic Oligonucleotide
gcggtttgcttctcctgactacatgagataataaacgcgc

SEQ ID NO: 9794 - DNA, 40 bp, Artificial Sequence
  Synthetic Oligonucleotide
gcggtttctttctctgactacatgagattaataaacgcgc

SEQ ID NO: 9795 - DNA, 40 bp, Artificial Sequence
  Synthetic Oligonucleotide
gcggtttcttctcctggctacatgagattactaaacgcgc

SEQ ID NO: 9796 - DNA, 40 bp, Artificial Sequence
  Synthetic Oligonucleotide
gcggtttcttctcctggctacatgagattaataagcgcgc

SEQ ID NO: 9797 - DNA, 40 bp, Artificial Sequence
  Synthetic Oligonucleotide
gcggtttcttctcctggctacatgagattaataaacgtgc

SEQ ID NO: 9798 - DNA, 40 bp, Artificial Sequence
  Synthetic Oligonucleotide
gcggtttcttctcctggctacatgagattaataaacgcgt

SEQ ID NO: 9799 - DNA, 40 bp, Artificial Sequence
  Synthetic Oligonucleotide
gcggtttcttctcctgactacctgagattaataaacgcgc

SEQ ID NO: 9800 - DNA, 40 bp, Artificial Sequence
  Synthetic Oligonucleotide
gcggtttcttctcctgactacatgggatcaataaacgcgc

SEQ ID NO: 9801 - DNA, 40 bp, Artificial Sequence
  Synthetic Oligonucleotide
gcggtttcttctcctgactacatgaggttaataaacacgc

SEQ ID NO: 9802 - DNA, 40 bp, Artificial Sequence
  Synthetic Oligonucleotide
gcggtttcttctcctgactacatgaggtcaataaacgtgc

SEQ ID NO: 9803 - DNA, 40 bp, Artificial Sequence
  Synthetic Oligonucleotide
gcggtttcttctcctgactacatgagattagtgaacgcgc

SEQ ID NO: 9804 - DNA, 40 bp, Artificial Sequence
  Synthetic Oligonucleotide
gcggtttcttctcctgactacatgagattagtagacgcgc

SEQ ID NO: 9805 - DNA, 40 bp, Artificial Sequence
  Synthetic Oligonucleotide
gcggtttcttctcctgactacatgagattactaaacgcgc

SEQ ID NO: 9806 - DNA, 40 bp, Artificial Sequence
  Synthetic Oligonucleotide
gcggtttcttctcctgactacatgagattaataacagcgc

SEQ ID NO: 9807 - DNA, 40 bp, Artificial Sequence
  Synthetic Oligonucleotide
gcggtttcttctcctgactacatgagattaataaacgggc

SEQ ID NO: 9808 - DNA, 40 bp, Artificial Sequence
  Synthetic Oligonucleotide
gcggtttcttctcctgactacatgagattaacaaacgcac

SEQ ID NO: 9809 - DNA, 40 bp, Artificial Sequence
  Synthetic Oligonucleotide
gcggtttcttctcctgactacatgagattaaataacgcgc

SEQ ID NO: 9810 - DNA, 40 bp, Artificial Sequence
  Synthetic Oligonucleotide
gcggtttcttctcctgactacatgagatgaataaacgcgc

SEQ ID NO: 9811 - DNA, 40 bp, Artificial Sequence
  Synthetic Oligonucleotide
gcggtttcttctcctgactacatgagataaataaacgtgc

SEQ ID NO: 9812 - DNA, 40 bp, Artificial Sequence
  Synthetic Oligonucleotide
gcggtttcttctcctgaccacatgggattaataaacgcgc

SEQ ID NO: 9813 - DNA, 40 bp, Artificial Sequence
  Synthetic Oligonucleotide
gcggtttcttctccctgactacatgagattaataaacgcg

SEQ ID NO: 9814 - DNA, 40 bp, Artificial Sequence
  Synthetic Oligonucleotide
gcggtttcttctccctactacatgagattaataaacgcgc

SEQ ID NO: 9815 - DNA, 40 bp, Artificial Sequence
  Synthetic Oligonucleotide
gcggtttcttctcccgactacataagatcaataaacgcgc

SEQ ID NO: 9816 - DNA, 40 bp, Artificial Sequence
  Synthetic Oligonucleotide
gcggtttcttctactgactacatgagattaataaacgcgc

SEQ ID NO: 9817 - DNA, 40 bp, Artificial Sequence
  Synthetic Oligonucleotide
gcggtttcttcgcctgactacatgagattaataaacgcgc

SEQ ID NO: 9818 - DNA, 40 bp, Artificial Sequence
  Synthetic Oligonucleotide
gcggtttcttcctcgtactacatgagattaataaacgcgc

SEQ ID NO: 9819 - DNA, 40 bp, Artificial Sequence
  Synthetic Oligonucleotide
gcggtttcttcccctgactacatgtgattaataaacgcgc

SEQ ID NO: 9820 - DNA, 40 bp, Artificial Sequence
  Synthetic Oligonucleotide
gcggtttctctcctggctacatgagattaatcaaacgcgc

SEQ ID NO: 9821 - DNA, 40 bp, Artificial Sequence
  Synthetic Oligonucleotide
gcggtttctctcctgcctacatgagattaataaaccgcgc

SEQ ID NO: 9822 - DNA, 40 bp, Artificial Sequence
  Synthetic Oligonucleotide
gcggtttcctctcctgactacatgagattaataagcgcgc

SEQ ID NO: 9823 - DNA, 40 bp, Artificial Sequence
  Synthetic Oligonucleotide
gcggtttcctctcctgactacatgagattaacaaacgcgc

SEQ ID NO: 9824 - DNA, 40 bp, Artificial Sequence
  Synthetic Oligonucleotide
gcggttcttctcctcgaccacatgagattaataaacgcgc

SEQ ID NO: 9825 - DNA, 40 bp, Artificial Sequence
  Synthetic Oligonucleotide
gcggttctctcctgactacattgagattaataaaccgcgc

SEQ ID NO: 9826 - DNA, 40 bp, Artificial Sequence
  Synthetic Oligonucleotide
gcggttccttctcctgactacatgagattaacaaacgcgc

SEQ ID NO: 9827 - DNA, 40 bp, Artificial Sequence
  Synthetic Oligonucleotide
gcggtcttcttctctgactacatgagattaacaaacgcgc

SEQ ID NO: 9828 - DNA, 40 bp, Artificial Sequence
  Synthetic Oligonucleotide
gcgggtctttattgtcgtctttgtaggactacctgcatca

SEQ ID NO: 9829 - DNA, 40 bp, Artificial Sequence
  Synthetic Oligonucleotide
gcgggtcttaattgtcgtctttgtaggactacctgcatca

SEQ ID NO: 9830 - DNA, 40 bp, Artificial Sequence
  Synthetic Oligonucleotide
gcggcttctcctcctgactacatgagattaataaacgcgc

SEQ ID NO: 9831 - DNA, 40 bp, Artificial Sequence
  Synthetic Oligonucleotide
gcgcgtacgccttggttttcctgggtacccccgccgtttg

SEQ ID NO: 9832 - DNA, 40 bp, Artificial Sequence
  Synthetic Oligonucleotide
gcgcctcgttcctacgcgttgatcaacctaccttcggctg

SEQ ID NO: 9833 - DNA, 40 bp, Artificial Sequence
  Synthetic Oligonucleotide
gcgcctcgaacactgacgtcgtggaaccttcgattgctag

SEQ ID NO: 9834 - DNA, 40 bp, Artificial Sequence
  Synthetic Oligonucleotide
gcgattcttctccttgactacatgagattaataaacgcgc

SEQ ID NO: 9835 - DNA, 40 bp, Artificial Sequence
  Synthetic Oligonucleotide
gccgtcagtctcgtcttcccatcgtctgcacttgacggac

SEQ ID NO: 9836 - DNA, 40 bp, Artificial Sequence
  Synthetic Oligonucleotide
gccgcatgggtcggtttttggtgggggactaccccttgta

SEQ ID NO: 9837 - DNA, 40 bp, Artificial Sequence
  Synthetic Oligonucleotide
gccgcataggtcggttttggtgggggactacccccttgta

SEQ ID NO: 9838 - DNA, 40 bp, Artificial Sequence
  Synthetic Oligonucleotide
gccgaacctgtggctgtttgcgactacccaattagggcta

SEQ ID NO: 9839 - DNA, 40 bp, Artificial Sequence
  Synthetic Oligonucleotide
gcccgttgattgtctccattcggtcttaaggtacgaccgt

SEQ ID NO: 9840 - DNA, 40 bp, Artificial Sequence
  Synthetic Oligonucleotide
gcccggaacgcctcgatcctcgcatagtatgatacgtctg

SEQ ID NO: 9841 - DNA, 40 bp, Artificial Sequence
  Synthetic Oligonucleotide
gccagtccttcctctcggatctaactgtacggctccgcac

SEQ ID NO: 9842 - DNA, 40 bp, Artificial Sequence
  Synthetic Oligonucleotide
gccaggctttcacgcacgcggattgtacccgaactgggtt

SEQ ID NO: 9843 - DNA, 40 bp, Artificial Sequence
  Synthetic Oligonucleotide
gcatcctccttaagtcgggcccatgtatatactatcgcac

SEQ ID NO: 9844 - DNA, 40 bp, Artificial Sequence
  Synthetic Oligonucleotide
gcagtttcttctcctgactgcatgagattaataaacgcgc

SEQ ID NO: 9845 - DNA, 40 bp, Artificial Sequence
  Synthetic Oligonucleotide
gcagattcgtttgttgcccgcctcgcaagcgcgttaggtt

SEQ ID NO: 9846 - DNA, 40 bp, Artificial Sequence
  Synthetic Oligonucleotide
gcagaataaattcctcccactgctcgcctcgcatgctatg

SEQ ID NO: 9847 - DNA, 40 bp, Artificial Sequence
  Synthetic Oligonucleotide
gcactattccggtaagtcatcgtttaaccatttgttgcaa

SEQ ID NO: 9848 - DNA, 40 bp, Artificial Sequence
  Synthetic Oligonucleotide
gcactattccggtaagtcatcgtctaaccgtttgttgcaa

SEQ ID NO: 9849 - DNA, 40 bp, Artificial Sequence
  Synthetic Oligonucleotide
gcactatcgtttcgtcgtcctacttgtggtattgcgcatg

SEQ ID NO: 9850 - DNA, 40 bp, Artificial Sequence
  Synthetic Oligonucleotide
gcactatccgtttgtcgtcctcttgtggtattgcgcatgc

SEQ ID NO: 9851 - DNA, 40 bp, Artificial Sequence
  Synthetic Oligonucleotide
gcactatccgtttgtccgtcctcttgtggtattgcgcatg

SEQ ID NO: 9852 - DNA, 40 bp, Artificial Sequence
  Synthetic Oligonucleotide
gcactatccgtttgtccgtcctcttgtggtatgcgcatgc

SEQ ID NO: 9853 - DNA, 40 bp, Artificial Sequence
  Synthetic Oligonucleotide
gcactatccgtttgtccgtcctctgtggtattgcgcatgc

SEQ ID NO: 9854 - DNA, 40 bp, Artificial Sequence
  Synthetic Oligonucleotide
gcacctatccgttgtccgtcctctcgtgtattgcgcatgc

SEQ ID NO: 9855 - DNA, 40 bp, Artificial Sequence
  Synthetic Oligonucleotide
gcaatttcttctcctgactacatgagattaataaacgcgc

SEQ ID NO: 9856 - DNA, 40 bp, Artificial Sequence
  Synthetic Oligonucleotide
gcaagattcatctttgcttgactacacacaattccgatga

SEQ ID NO: 9857 - DNA, 40 bp, Artificial Sequence
  Synthetic Oligonucleotide
gatttgttttactaactcttgcccattgaacacgttcccg

SEQ ID NO: 9858 - DNA, 40 bp, Artificial Sequence
  Synthetic Oligonucleotide
gatgtccatgagcttctggcacttatccagttgacgctca

SEQ ID NO: 9859 - DNA, 40 bp, Artificial Sequence
  Synthetic Oligonucleotide
gatctcgagatcactaggcactatcctagcactgtatcaa

SEQ ID NO: 9860 - DNA, 40 bp, Artificial Sequence
  Synthetic Oligonucleotide
gatcggcgccgagtaactctatactgcactatcagtttgt

SEQ ID NO: 9861 - DNA, 40 bp, Artificial Sequence
  Synthetic Oligonucleotide
gatcccgccttacgtaatcccttacgtttaacgccggcta

SEQ ID NO: 9862 - DNA, 40 bp, Artificial Sequence
  Synthetic Oligonucleotide
gatcacgctgccctttgtttagggcctttatacaaacgca

SEQ ID NO: 9863 - DNA, 40 bp, Artificial Sequence
  Synthetic Oligonucleotide
gatcacgctgccctttgtttaaggtccttatacaaacgca

SEQ ID NO: 9864 - DNA, 40 bp, Artificial Sequence
  Synthetic Oligonucleotide
gatcacgctgccctttgattaaggcctttatacaaacgca

SEQ ID NO: 9865 - DNA, 40 bp, Artificial Sequence
  Synthetic Oligonucleotide
gatcacgccgccctttgtttagggcctttatacaaacgca

SEQ ID NO: 9866 - DNA, 40 bp, Artificial Sequence
  Synthetic Oligonucleotide
gaggtacatgatcgcgtttacagactactgtaattttagc

SEQ ID NO: 9867 - DNA, 40 bp, Artificial Sequence
  Synthetic Oligonucleotide
gagatctcggatctggcgtgctacttggacaggttccttc

SEQ ID NO: 9868 - DNA, 40 bp, Artificial Sequence
  Synthetic Oligonucleotide
gactacccgtttgtccgtcctcttgtggtattgcgcatgc

SEQ ID NO: 9869 - DNA, 40 bp, Artificial Sequence
  Synthetic Oligonucleotide
gacgtacttaccaccctggcatcgcggggaactaatggtt

SEQ ID NO: 9870 - DNA, 40 bp, Artificial Sequence
  Synthetic Oligonucleotide
gacggtcttctctctgactacacgagattaataaacgcgc

SEQ ID NO: 9871 - DNA, 40 bp, Artificial Sequence
  Synthetic Oligonucleotide
gacggccttccaatcctccttgtctgcagttcctgccctg

SEQ ID NO: 9872 - DNA, 40 bp, Artificial Sequence
  Synthetic Oligonucleotide
gaactggatcctcgcctccatgctacgtggatttagattt

SEQ ID NO: 9873 - DNA, 40 bp, Artificial Sequence
  Synthetic Oligonucleotide
gaactggatcctcgcctccatactacgtggattttgattt

SEQ ID NO: 9874 - DNA, 40 bp, Artificial Sequence
  Synthetic Oligonucleotide
gaactggatcctcgcctccatactacgtagatttagattt

SEQ ID NO: 9875 - DNA, 40 bp, Artificial Sequence
  Synthetic Oligonucleotide
gaactggactcctcgcctccatactacgtggatttagatt

SEQ ID NO: 9876 - DNA, 40 bp, Artificial Sequence
  Synthetic Oligonucleotide
gaaccggggcccgcctcaagctagctacctccattgtcta

SEQ ID NO: 9877 - DNA, 40 bp, Artificial Sequence
  Synthetic Oligonucleotide
gaaccggggccccgctcaagctagctacctccattgtctg

SEQ ID NO: 9878 - DNA, 40 bp, Artificial Sequence
  Synthetic Oligonucleotide
gaaccggatcctcgcctccatactacgtggatttagattt

SEQ ID NO: 9879 - DNA, 40 bp, Artificial Sequence
  Synthetic Oligonucleotide
gaaaccggggcccgcctcaagctagctactccattgtctg

SEQ ID NO: 9880 - DNA, 40 bp, Artificial Sequence
  Synthetic Oligonucleotide
gaaaccggggcccgcctcaagctagctacctccttgtctg

SEQ ID NO: 9881 - DNA, 40 bp, Artificial Sequence
  Synthetic Oligonucleotide
cttgggaagcggaactggtcgaggcgctatcctcgactta

SEQ ID NO: 9882 - DNA, 40 bp, Artificial Sequence
  Synthetic Oligonucleotide
cttcgtcgtcgtgcaataaccttcagtggctggcgctatc

SEQ ID NO: 9883 - DNA, 40 bp, Artificial Sequence
  Synthetic Oligonucleotide
cttcctcggatcttcaacatattgccgccgcgcatccgac

SEQ ID NO: 9884 - DNA, 40 bp, Artificial Sequence
  Synthetic Oligonucleotide
ctgtagtgattcctagaggctcctagtggctgggactacc

SEQ ID NO: 9885 - DNA, 40 bp, Artificial Sequence
  Synthetic Oligonucleotide
ctgcctctgctctccctctcggatcacgtacgtggatatg

SEQ ID NO: 9886 - DNA, 40 bp, Artificial Sequence
  Synthetic Oligonucleotide
ctgcctccaactccagggaacatgtcaccccgtttgtctg

SEQ ID NO: 9887 - DNA, 40 bp, Artificial Sequence
  Synthetic Oligonucleotide
ctgcccctgctctccctctcggatcgcgtacgtggatatg

SEQ ID NO: 9888 - DNA, 40 bp, Artificial Sequence
  Synthetic Oligonucleotide
ctgcaccccgatagtcatcttcactggaccacccgtgata

SEQ ID NO: 9889 - DNA, 40 bp, Artificial Sequence
  Synthetic Oligonucleotide
ctcttgtcgggcaggacgtctttcgtgcactatcacgatt

SEQ ID NO: 9890 - DNA, 40 bp, Artificial Sequence
  Synthetic Oligonucleotide
ctcttgtccggcaggacgtctttcgtgcgctatcacgatt

SEQ ID NO: 9891 - DNA, 40 bp, Artificial Sequence
  Synthetic Oligonucleotide
ctcttgtccggcaggacgtctttcgtacactatcacgatt

SEQ ID NO: 9892 - DNA, 40 bp, Artificial Sequence
  Synthetic Oligonucleotide
ctcttattcggcaggacgtcattcgtgcactatcacgatt

SEQ ID NO: 9893 - DNA, 40 bp, Artificial Sequence
  Synthetic Oligonucleotide
ctcttatctggcaggacgtctttcgtgcgctatcacgatt

SEQ ID NO: 9894 - DNA, 40 bp, Artificial Sequence
  Synthetic Oligonucleotide
ctcttatcggacaggacgtctttcgtgcactatcacgatt

SEQ ID NO: 9895 - DNA, 40 bp, Artificial Sequence
  Synthetic Oligonucleotide
ctcttatcgaggcaggactctttcgtgcactatcacgatt

SEQ ID NO: 9896 - DNA, 40 bp, Artificial Sequence
  Synthetic Oligonucleotide
ctcttatccgtcaggacgtttttcgtgcactatcacgatt

SEQ ID NO: 9897 - DNA, 40 bp, Artificial Sequence
  Synthetic Oligonucleotide
ctcttatccgtcaggacgcctttcgtgcattatcacgatt

SEQ ID NO: 9898 - DNA, 40 bp, Artificial Sequence
  Synthetic Oligonucleotide
ctcttatccggtcagtcgtccttcttgcgattacgcatgt

SEQ ID NO: 9899 - DNA, 40 bp, Artificial Sequence
  Synthetic Oligonucleotide
ctcttatccggtcaggacgtctttcgttgcatatcacgat

SEQ ID NO: 9900 - DNA, 40 bp, Artificial Sequence
  Synthetic Oligonucleotide
ctcttatccggtcagacgtccttcgtgcactatcacgatt

SEQ ID NO: 9901 - DNA, 40 bp, Artificial Sequence
  Synthetic Oligonucleotide
ctcttatccggtagggcgtctttcgtgcactatcacgatt

SEQ ID NO: 9902 - DNA, 40 bp, Artificial Sequence
  Synthetic Oligonucleotide
ctcttatccggtaggacgtcttttgtgcactatcacgatt

SEQ ID NO: 9903 - DNA, 40 bp, Artificial Sequence
  Synthetic Oligonucleotide
ctcttatccgggaggacgcctttcgtgcactatcacgatt

SEQ ID NO: 9904 - DNA, 40 bp, Artificial Sequence
  Synthetic Oligonucleotide
ctcttatccggcgggacgtctttcgtgctctatcacgatt

SEQ ID NO: 9905 - DNA, 40 bp, Artificial Sequence
  Synthetic Oligonucleotide
ctcttatccggcgggacgtctttcgcgcgctatcacgatt

SEQ ID NO: 9906 - DNA, 40 bp, Artificial Sequence
  Synthetic Oligonucleotide
ctcttatccggcagggtgtctttcgtgcactatcacgatt

SEQ ID NO: 9907 - DNA, 40 bp, Artificial Sequence
  Synthetic Oligonucleotide
ctcttatccggcagggcgtgtttcgtgcactatcacgatt

SEQ ID NO: 9908 - DNA, 40 bp, Artificial Sequence
  Synthetic Oligonucleotide
ctcttatccggcaggatgtctttcgtgcactatcacgatc

SEQ ID NO: 9909 - DNA, 40 bp, Artificial Sequence
  Synthetic Oligonucleotide
ctcttatccggcaggacgtttctcgtgcactatcacgatt

SEQ ID NO: 9910 - DNA, 40 bp, Artificial Sequence
  Synthetic Oligonucleotide
ctcttatccggcaggacgtctttcgtgcgttatcacgatt

SEQ ID NO: 9911 - DNA, 40 bp, Artificial Sequence
  Synthetic Oligonucleotide
ctcttatccggcaggacgtctttcgtgcgctatcacgata

SEQ ID NO: 9912 - DNA, 40 bp, Artificial Sequence
  Synthetic Oligonucleotide
ctcttatccggcaggacgtctttcgtgcactatcatggtt

SEQ ID NO: 9913 - DNA, 40 bp, Artificial Sequence
  Synthetic Oligonucleotide
ctcttatccggcaggacgtctttcgggcactatcacgatt

SEQ ID NO: 9914 - DNA, 40 bp, Artificial Sequence
  Synthetic Oligonucleotide
ctcttatccggcaggacgtcttcgtcgcactatcacgatt

SEQ ID NO: 9915 - DNA, 40 bp, Artificial Sequence
  Synthetic Oligonucleotide
ctcttatccggcaggacgtctctcgcgcactatcacgatt

SEQ ID NO: 9916 - DNA, 40 bp, Artificial Sequence
  Synthetic Oligonucleotide
ctcttatccggcaggacgcctttcgtgcactgtcacgatt

SEQ ID NO: 9917 - DNA, 40 bp, Artificial Sequence
  Synthetic Oligonucleotide
ctcttatccggcaggacatctttcgtgcgctatcacgatt

SEQ ID NO: 9918 - DNA, 40 bp, Artificial Sequence
  Synthetic Oligonucleotide
ctcttatccggcagcaggacgttcttgcactatcacgatt

SEQ ID NO: 9919 - DNA, 40 bp, Artificial Sequence
  Synthetic Oligonucleotide
ctcttatccggcagcacgtctttcgtgcactatcacgatt

SEQ ID NO: 9920 - DNA, 40 bp, Artificial Sequence
  Synthetic Oligonucleotide
ctcttatccggcagacggtcttcgttgcactatcacgatt

SEQ ID NO: 9921 - DNA, 40 bp, Artificial Sequence
  Synthetic Oligonucleotide
ctcttatccgagcaggacttcttcgtgcactatcacgatt

SEQ ID NO: 9922 - DNA, 40 bp, Artificial Sequence
  Synthetic Oligonucleotide
ctcttatccgacggggcgtctttcgtgcactatcacaatt

SEQ ID NO: 9923 - DNA, 40 bp, Artificial Sequence
  Synthetic Oligonucleotide
ctcttatccgacaggacgtcttttgtgcactatcacgatt

SEQ ID NO: 9924 - DNA, 40 bp, Artificial Sequence
  Synthetic Oligonucleotide
ctcttatccgacaggacgtctttcgtgcactatcatgatt

SEQ ID NO: 9925 - DNA, 40 bp, Artificial Sequence
  Synthetic Oligonucleotide
ctcttatccgacaggacgtctttcgtgcactaccacgatt

SEQ ID NO: 9926 - DNA, 40 bp, Artificial Sequence
  Synthetic Oligonucleotide
ctcttatccagcaggacgtctttcgtgcactatcacgatc

SEQ ID NO: 9927 - DNA, 40 bp, Artificial Sequence
  Synthetic Oligonucleotide
ctcttatccagcaggacgtctttcgtgcactatcacaatt

SEQ ID NO: 9928 - DNA, 40 bp, Artificial Sequence
  Synthetic Oligonucleotide
ctcttatccagcaggacgtctttcgtgcactaacacgatt

SEQ ID NO: 9929 - DNA, 40 bp, Artificial Sequence
  Synthetic Oligonucleotide
ctcttatcaggcaggacgtcttccgtgcactatcacgatt

SEQ ID NO: 9930 - DNA, 40 bp, Artificial Sequence
  Synthetic Oligonucleotide
ctcttatacggcaggacatctttcgtgcactatcacgatt

SEQ ID NO: 9931 - DNA, 40 bp, Artificial Sequence
  Synthetic Oligonucleotide
ctcttacgtcgcaggacgtctttcgtgcactatcacgatt

SEQ ID NO: 9932 - DNA, 40 bp, Artificial Sequence
  Synthetic Oligonucleotide
ctcttacgtccgaggacgcctttcgtgcactatcacgatt

SEQ ID NO: 9933 - DNA, 40 bp, Artificial Sequence
  Synthetic Oligonucleotide
ctcttacccggccggacgtctttcgtgcactatcacgatt

SEQ ID NO: 9934 - DNA, 40 bp, Artificial Sequence
  Synthetic Oligonucleotide
ctcttacccggcaggacgtctttcgtgcgctatcacgatt

SEQ ID NO: 9935 - DNA, 40 bp, Artificial Sequence
  Synthetic Oligonucleotide
ctcttacccggcaggacgtctttcgtgcactatcacgatc

SEQ ID NO: 9936 - DNA, 40 bp, Artificial Sequence
  Synthetic Oligonucleotide
ctctcggatcatttgcctcgcacctcctaaagttggatgg

SEQ ID NO: 9937 - DNA, 40 bp, Artificial Sequence
  Synthetic Oligonucleotide
ctctcatccggcagggcgtctttcgtgcactatcacgatt

SEQ ID NO: 9938 - DNA, 40 bp, Artificial Sequence
  Synthetic Oligonucleotide
ctctcatccggcaggacgtctttcgtgcgctatcacgatt

SEQ ID NO: 9939 - DNA, 40 bp, Artificial Sequence
  Synthetic Oligonucleotide
ctctcatccggcaggacgtctttcgtgcactatcacgatc

SEQ ID NO: 9940 - DNA, 40 bp, Artificial Sequence
  Synthetic Oligonucleotide
ctctatccgggcaggacgtctttcgtgcactatcacgatt

SEQ ID NO: 9941 - DNA, 40 bp, Artificial Sequence
  Synthetic Oligonucleotide
ctccttatccggcaggactctttcgtgcactatcacgatt

SEQ ID NO: 9942 - DNA, 40 bp, Artificial Sequence
  Synthetic Oligonucleotide
ctcctacccggcaggacgtctttcgtgcactatcacgatt

SEQ ID NO: 9943 - DNA, 40 bp, Artificial Sequence
  Synthetic Oligonucleotide
ctccgtagatgcgcacttatgggggctgcctgtgtcacac

SEQ ID NO: 9944 - DNA, 40 bp, Artificial Sequence
  Synthetic Oligonucleotide
ctaccttcgtctagcgattcgcggtttctgttactaagta

SEQ ID NO: 9945 - DNA, 40 bp, Artificial Sequence
  Synthetic Oligonucleotide
ctaaaatcttcccgggccgcctcgaagactttgaaatgcg

SEQ ID NO: 9946 - DNA, 40 bp, Artificial Sequence
  Synthetic Oligonucleotide
cgttggaagactactttcattttagctgccagctgtcctc

SEQ ID NO: 9947 - DNA, 40 bp, Artificial Sequence
  Synthetic Oligonucleotide
cgttggaagactactttcattttagccgccagctgctctc

SEQ ID NO: 9948 - DNA, 40 bp, Artificial Sequence
  Synthetic Oligonucleotide
cgttatccgtttgtccgtcctcttgtggtattgcgcatgc

SEQ ID NO: 9949 - DNA, 40 bp, Artificial Sequence
  Synthetic Oligonucleotide
cggtttcttctccttgactacatgagattaataaacgcgc

SEQ ID NO: 9950 - DNA, 40 bp, Artificial Sequence
  Synthetic Oligonucleotide
cggttcttctcctgactacatgagattaataaacgcgccc

SEQ ID NO: 9951 - DNA, 40 bp, Artificial Sequence
  Synthetic Oligonucleotide
cggttcgtttctcctgactacatgagattaatagacgcgc

SEQ ID NO: 9952 - DNA, 40 bp, Artificial Sequence
  Synthetic Oligonucleotide
cggctaacgttcatcgagggagcgaaaggtctatagacta

SEQ ID NO: 9953 - DNA, 40 bp, Artificial Sequence
  Synthetic Oligonucleotide
cgctttgatcctcttatgcagtcctccctggcctcgttcg

SEQ ID NO: 9954 - DNA, 40 bp, Artificial Sequence
  Synthetic Oligonucleotide
cgcttgtacaattactcctcgacttccctggtataccacg

SEQ ID NO: 9955 - DNA, 40 bp, Artificial Sequence
  Synthetic Oligonucleotide
cgctatctgtttgtccgtcctcttgtggtattgcgcatgc

SEQ ID NO: 9956 - DNA, 40 bp, Artificial Sequence
  Synthetic Oligonucleotide
cgctatctgtcatcgagcgagcactttgtgtgatcacaca

SEQ ID NO: 9957 - DNA, 40 bp, Artificial Sequence
  Synthetic Oligonucleotide
cgctatctgtcatcgagcgagcactttgtgcgttcacaca

SEQ ID NO: 9958 - DNA, 40 bp, Artificial Sequence
  Synthetic Oligonucleotide
cgctatctgtcatcgagcgagcactttgcgcgatcacaca

SEQ ID NO: 9959 - DNA, 40 bp, Artificial Sequence
  Synthetic Oligonucleotide
cgctatctgacatcgagcgagcactttgtgcgatcacaca

SEQ ID NO: 9960 - DNA, 40 bp, Artificial Sequence
  Synthetic Oligonucleotide
cgctatccgtttgtccgtctcttgtggtattgcgcatgcc

SEQ ID NO: 9961 - DNA, 40 bp, Artificial Sequence
  Synthetic Oligonucleotide
cgctatccgtttgtccgtctctcgtggtattgcgcatgcc

SEQ ID NO: 9962 - DNA, 40 bp, Artificial Sequence
  Synthetic Oligonucleotide
cgctatccgtttgtccgtccttttgtggtattgcgcatgc

SEQ ID NO: 9963 - DNA, 40 bp, Artificial Sequence
  Synthetic Oligonucleotide
cgctatccgtttgtccgtcctcttgtggtattgcgcatgt

SEQ ID NO: 9964 - DNA, 40 bp, Artificial Sequence
  Synthetic Oligonucleotide
cgctatccgtttgtccgtcctcttgtggtattgcgcatga

SEQ ID NO: 9965 - DNA, 40 bp, Artificial Sequence
  Synthetic Oligonucleotide
cgctatccgtttgtccgtcctcttgtggtattgcgcaggc

SEQ ID NO: 9966 - DNA, 40 bp, Artificial Sequence
  Synthetic Oligonucleotide
cgctatccgtttgtccgtcctcttgaggtattgcgcatgc

SEQ ID NO: 9967 - DNA, 40 bp, Artificial Sequence
  Synthetic Oligonucleotide
cgctatccgtttgtccgtcctctcgtggtattgcgcaagc

SEQ ID NO: 9968 - DNA, 40 bp, Artificial Sequence
  Synthetic Oligonucleotide
cgctatccgttgtccgtcctcttgtggtattgcgcatgtc

SEQ ID NO: 9969 - DNA, 40 bp, Artificial Sequence
  Synthetic Oligonucleotide
cgctatccgtcatcgagcggttcttcgatgatatgcaaca

SEQ ID NO: 9970 - DNA, 40 bp, Artificial Sequence
  Synthetic Oligonucleotide
cgctatccgcttgagcgtttctcctgctcggttatcctga

SEQ ID NO: 9971 - DNA, 40 bp, Artificial Sequence
  Synthetic Oligonucleotide
cgctatccgcgtcgagcgggttcttcgataatatgcaacg

SEQ ID NO: 9972 - DNA, 40 bp, Artificial Sequence
  Synthetic Oligonucleotide
cgctatccgcccatcgagcgaacagtgtgcgctttcggtg

SEQ ID NO: 9973 - DNA, 40 bp, Artificial Sequence
  Synthetic Oligonucleotide
cgctatccgccatcgagcgagcactttgtgcgatcacaca

SEQ ID NO: 9974 - DNA, 40 bp, Artificial Sequence
  Synthetic Oligonucleotide
cgctatccgccatcgagcgaacagtgtgctgttttcggcg

SEQ ID NO: 9975 - DNA, 40 bp, Artificial Sequence
  Synthetic Oligonucleotide
cgctatccgccatcgagcgaacagtgtgccgttctcggtg

SEQ ID NO: 9976 - DNA, 40 bp, Artificial Sequence
  Synthetic Oligonucleotide
cgctatccgacatcgagggagctacgtcatcaagcgctaa

SEQ ID NO: 9977 - DNA, 40 bp, Artificial Sequence
  Synthetic Oligonucleotide
cgctatccacatcgagcgggttcttcgataatatgcaaca

SEQ ID NO: 9978 - DNA, 40 bp, Artificial Sequence
  Synthetic Oligonucleotide
cgctacccgtttgtccgtcctctcgtggtattacgcatgc

SEQ ID NO: 9979 - DNA, 40 bp, Artificial Sequence
  Synthetic Oligonucleotide
cgctacccgaatcgagcttgagtgcctggttaaacaacga

SEQ ID NO: 9980 - DNA, 40 bp, Artificial Sequence
  Synthetic Oligonucleotide
cgccggaagtccctcctcgtcttggtgcactatcatctca

SEQ ID NO: 9981 - DNA, 40 bp, Artificial Sequence
  Synthetic Oligonucleotide
cgccggaagtccctcctcgtcttgatgcactatcatccca

SEQ ID NO: 9982 - DNA, 40 bp, Artificial Sequence
  Synthetic Oligonucleotide
cgccggaagtccctcctcgtcttgatgcactatcacctca

SEQ ID NO: 9983 - DNA, 40 bp, Artificial Sequence
  Synthetic Oligonucleotide
cgcacccccgatagtcatcttcgctggacaccccgcgtta

SEQ ID NO: 9984 - DNA, 40 bp, Artificial Sequence
  Synthetic Oligonucleotide
cgcaccccccgatagtcatcttcgctggaccaccgcgtta

SEQ ID NO: 9985 - DNA, 40 bp, Artificial Sequence
  Synthetic Oligonucleotide
cgagcaaaaacaccctccctggttgcaaccgcctcgtctg

SEQ ID NO: 9986 - DNA, 40 bp, Artificial Sequence
  Synthetic Oligonucleotide
cgactatccgtttgtccgcctctcgtggtattgcgcatgc

SEQ ID NO: 9987 - DNA, 40 bp, Artificial Sequence
  Synthetic Oligonucleotide
cgaattatcagggactaccctgacgcaatattcacacgct

SEQ ID NO: 9988 - DNA, 40 bp, Artificial Sequence
  Synthetic Oligonucleotide
ccttccagggcccaatgccgcattaccatcctatgttctg

SEQ ID NO: 9989 - DNA, 40 bp, Artificial Sequence
  Synthetic Oligonucleotide
cctcgtatcttccggtgaataccacgtacgtacatgtctg

SEQ ID NO: 9990 - DNA, 40 bp, Artificial Sequence
  Synthetic Oligonucleotide
cctcgtatcttccggtaattaccacgtacgtacacgtctg

SEQ ID NO: 9991 - DNA, 40 bp, Artificial Sequence
  Synthetic Oligonucleotide
ccgtacttgtcgcaccttgtacttggcggctgacgctatt

SEQ ID NO: 9992 - DNA, 40 bp, Artificial Sequence
  Synthetic Oligonucleotide
ccgtaccccgatagtcgtcttcgctggaccacccgtgtta

SEQ ID NO: 9993 - DNA, 40 bp, Artificial Sequence
  Synthetic Oligonucleotide
ccgggtcttattgtcgtcatttgtaggactacctgcatca

SEQ ID NO: 9994 - DNA, 40 bp, Artificial Sequence
  Synthetic Oligonucleotide
ccgggtcattattgtcgtctttgtaggactacctgcgtca

SEQ ID NO: 9995 - DNA, 40 bp, Artificial Sequence
  Synthetic Oligonucleotide
ccggcctcaggttccctaactgcgttagccttccggaatg

SEQ ID NO: 9996 - DNA, 40 bp, Artificial Sequence
  Synthetic Oligonucleotide
ccgccttagttgctctctctcggatcaagtgttaaccatg

SEQ ID NO: 9997 - DNA, 40 bp, Artificial Sequence
  Synthetic Oligonucleotide
ccgcctctttcttctctccggacggtaccaagtgtagcta

SEQ ID NO: 9998 - DNA, 40 bp, Artificial Sequence
  Synthetic Oligonucleotide
ccgcctctgttcacccgtggaacgttcctttaaccggtta

SEQ ID NO: 9999 - DNA, 40 bp, Artificial Sequence
  Synthetic Oligonucleotide
ccgcctctcggatcagtaacgtctcgatcctcccactggc

SEQ ID NO: 10000 - DNA, 40 bp, Artificial Sequence
  Synthetic Oligonucleotide
ccgcctcgtacgttccctaacgcgttagccttccggaatg

SEQ ID NO: 10001 - DNA, 40 bp, Artificial Sequence
  Synthetic Oligonucleotide
ccgcctcggtttacttccaggacgcgtccgactagtctgg

SEQ ID NO: 10002 - DNA, 40 bp, Artificial Sequence
  Synthetic Oligonucleotide
ccgcctcgaacactgacgtcgtggaatcttcgattgctag

SEQ ID NO: 10003 - DNA, 40 bp, Artificial Sequence
  Synthetic Oligonucleotide
ccgcctcgaacactgacgtcgtggaaccttggattgctag

SEQ ID NO: 10004 - DNA, 40 bp, Artificial Sequence
  Synthetic Oligonucleotide
ccgcctcgaacactgacgtcgtggaaccttcgattgttag

SEQ ID NO: 10005 - DNA, 40 bp, Artificial Sequence
  Synthetic Oligonucleotide
ccgcctcgaacactgacgtcgtggaaccttcgattactag

SEQ ID NO: 10006 - DNA, 40 bp, Artificial Sequence
  Synthetic Oligonucleotide
ccgcctcgaaaactgacgtcgtggaaccttcgattgctag

SEQ ID NO: 10007 - DNA, 40 bp, Artificial Sequence
  Synthetic Oligonucleotide
ccgcctccaggtactgcagaccagagctctcagtactgcg

SEQ ID NO: 10008 - DNA, 40 bp, Artificial Sequence
  Synthetic Oligonucleotide
ccgcctcagtttccccctaacgcgttagccttccggaatg

SEQ ID NO: 10009 - DNA, 40 bp, Artificial Sequence
  Synthetic Oligonucleotide
ccgcctcaggttcccctaacgcgttagccattccggaatg

SEQ ID NO: 10010 - DNA, 40 bp, Artificial Sequence
  Synthetic Oligonucleotide
ccgcctcaggttccccctaacgcgctagccttccggaatg

SEQ ID NO: 10011 - DNA, 40 bp, Artificial Sequence
  Synthetic Oligonucleotide
ccgcctcagcattcccctaacgcgttagccttccggaatg

SEQ ID NO: 10012 - DNA, 40 bp, Artificial Sequence
  Synthetic Oligonucleotide
ccgcctcaagttccctaagtattacacgtgcacgtgactg

SEQ ID NO: 10013 - DNA, 40 bp, Artificial Sequence
  Synthetic Oligonucleotide
ccgccgccccgatagtcatcttcactggacacccgtgtta

SEQ ID NO: 10014 - DNA, 40 bp, Artificial Sequence
  Synthetic Oligonucleotide
ccgccccccgatagtcatcttcactggaccacccgtgtta

SEQ ID NO: 10015 - DNA, 40 bp, Artificial Sequence
  Synthetic Oligonucleotide
ccgccaccccgatagtcatcttcactggacacccgtgttg

SEQ ID NO: 10016 - DNA, 40 bp, Artificial Sequence
  Synthetic Oligonucleotide
ccgcatcccgatagtccatcttcactggacacccgtgtta

SEQ ID NO: 10017 - DNA, 40 bp, Artificial Sequence
  Synthetic Oligonucleotide
ccgcatcccgatagtcatcttcgctggaccacccgtgtta

SEQ ID NO: 10018 - DNA, 40 bp, Artificial Sequence
  Synthetic Oligonucleotide
ccgcactccgatagtcatcttcactggaccacccgtgtca

SEQ ID NO: 10019 - DNA, 40 bp, Artificial Sequence
  Synthetic Oligonucleotide
ccgcacctcgattagtcatcttcactggacacccgtgtta

SEQ ID NO: 10020 - skipped

SEQ ID NO: 10021 - DNA, 40 bp, Artificial Sequence
  Synthetic Oligonucleotide
ccgcacctcgatggtcatcttcgctggaccacccgcgtta

SEQ ID NO: 10022 - DNA, 40 bp, Artificial Sequence
  Synthetic Oligonucleotide
ccgcaccctgattagtcatcttcactggacacccgtgtta

SEQ ID NO: 10023 - DNA, 40 bp, Artificial Sequence
  Synthetic Oligonucleotide
ccgcaccctgatagtcatcttcgctggaccacccgtgtta

SEQ ID NO: 10024 - DNA, 40 bp, Artificial Sequence
  Synthetic Oligonucleotide
ccgcaccctgatagtcatcttacgctggaccaccgcgtta

SEQ ID NO: 10025 - DNA, 40 bp, Artificial Sequence
  Synthetic Oligonucleotide
ccgcaccctgacagtcatcttcactggaccacccgtgtta

SEQ ID NO: 10026 - DNA, 40 bp, Artificial Sequence
  Synthetic Oligonucleotide
ccgcacccgattagtcatcttcgctggaccacctgcgtta

SEQ ID NO: 10027 - DNA, 40 bp, Artificial Sequence
  Synthetic Oligonucleotide
ccgcacccgatagttcatcttcactggaccacccgtgtta

SEQ ID NO: 10028 - DNA, 40 bp, Artificial Sequence
  Synthetic Oligonucleotide
ccgcacccgatagtcatcttcgctggaccaccccgcgtta

SEQ ID NO: 10029 - DNA, 40 bp, Artificial Sequence
  Synthetic Oligonucleotide
ccgcacccgacttagtccatcttcactggacaccgtgtta

SEQ ID NO: 10030 - DNA, 40 bp, Artificial Sequence
  Synthetic Oligonucleotide
ccgcacccgacttagtcatcttcactggacacctgtgtta

SEQ ID NO: 10031 - DNA, 40 bp, Artificial Sequence
  Synthetic Oligonucleotide
ccgcacccctgactagccatcttcgctggaccaccgcgta

SEQ ID NO: 10032 - DNA, 40 bp, Artificial Sequence
  Synthetic Oligonucleotide
ccgcaccccgttagtcatcttcgctggaccacccgcgtta

SEQ ID NO: 10033 - DNA, 40 bp, Artificial Sequence
  Synthetic Oligonucleotide
ccgcaccccggtagtcgtcttcgctggaccacccgtgtta

SEQ ID NO: 10034 - DNA, 40 bp, Artificial Sequence
  Synthetic Oligonucleotide
ccgcaccccgatagtcgtcttcactggtccacccgtgtta

SEQ ID NO: 10035 - DNA, 40 bp, Artificial Sequence
  Synthetic Oligonucleotide
ccgcaccccgatagtcatctttcactggaccaccgtgtta

SEQ ID NO: 10036 - DNA, 40 bp, Artificial Sequence
  Synthetic Oligonucleotide
ccgcaccccgatagtcatcttcgctggaccacccgcgata

SEQ ID NO: 10037 - DNA, 40 bp, Artificial Sequence
  Synthetic Oligonucleotide
ccgcaccccgatagtcatcttcgcgggaccacccgcgtta

SEQ ID NO: 10038 - DNA, 40 bp, Artificial Sequence
  Synthetic Oligonucleotide
ccgcaccccgatagtcatcttccctggaccacccgcgtta

SEQ ID NO: 10039 - DNA, 40 bp, Artificial Sequence
  Synthetic Oligonucleotide
ccgcaccccgatagtcatcttcactgtaccacccgtgtta

SEQ ID NO: 10040 - DNA, 40 bp, Artificial Sequence
  Synthetic Oligonucleotide
ccgcaccccgatagtcatcttcactgggccacccgcgtta

SEQ ID NO: 10041 - DNA, 40 bp, Artificial Sequence
  Synthetic Oligonucleotide
ccgcaccccgatagtcatcttcactggaccgccgccgtgt

SEQ ID NO: 10042 - DNA, 40 bp, Artificial Sequence
  Synthetic Oligonucleotide
ccgcaccccgatagtcatcttcactggaccacccgggtta

SEQ ID NO: 10043 - DNA, 40 bp, Artificial Sequence
  Synthetic Oligonucleotide
ccgcaccccgatagtcatcttcacgggaccacccgtgtta

SEQ ID NO: 10044 - DNA, 40 bp, Artificial Sequence
  Synthetic Oligonucleotide
ccgcaccccgatagtcaacttcactggaccacccgtgtta

SEQ ID NO: 10045 - DNA, 40 bp, Artificial Sequence
  Synthetic Oligonucleotide
ccgcacccccgatagttatcttcactggacacccgtgtta

SEQ ID NO: 10046 - DNA, 40 bp, Artificial Sequence
  Synthetic Oligonucleotide
ccgcacccccgatagtcattctcactggacacccgtgtta

SEQ ID NO: 10047 - DNA, 40 bp, Artificial Sequence
  Synthetic Oligonucleotide
ccgcacccccgatagtcatcttcgctggacacccgcgtta

SEQ ID NO: 10048 - DNA, 40 bp, Artificial Sequence
  Synthetic Oligonucleotide
ccgcacccccgatagtcatcttcactggaccacccgtgta

SEQ ID NO: 10049 - DNA, 40 bp, Artificial Sequence
  Synthetic Oligonucleotide
ccgcacccccgatagtcatcttcactgaacacccgtgtta

SEQ ID NO: 10050 - DNA, 40 bp, Artificial Sequence
  Synthetic Oligonucleotide
ccgcacccccgatagtcaccttcactggacacccgtgtta

SEQ ID NO: 10051 - DNA, 40 bp, Artificial Sequence
  Synthetic Oligonucleotide
ccgcacccccgataatcatcttcactggacacccgtgtta

SEQ ID NO: 10052 - DNA, 40 bp, Artificial Sequence
  Synthetic Oligonucleotide
ccgcaccccccgacagtcatcttcactggacaccgtgtta

SEQ ID NO: 10053 - DNA, 40 bp, Artificial Sequence
  Synthetic Oligonucleotide
ccgcacccccaatagtcatcttcactggacacccgtgtta

SEQ ID NO: 10054 - DNA, 40 bp, Artificial Sequence
  Synthetic Oligonucleotide
ccgcaccccaatagtcgtcttcgctggaccacccgtgtta

SEQ ID NO: 10055 - DNA, 40 bp, Artificial Sequence
  Synthetic Oligonucleotide
cccttatccggcaggacgtctttcgtgcactatcacggtt

SEQ ID NO: 10056 - DNA, 40 bp, Artificial Sequence
  Synthetic Oligonucleotide
cccttatccggcaggacgtctttcgtgcactatcacgatc

SEQ ID NO: 10057 - DNA, 40 bp, Artificial Sequence
  Synthetic Oligonucleotide
cccttatccggcaagacgtctttcgagcactatcacgatt

SEQ ID NO: 10058 - DNA, 40 bp, Artificial Sequence
  Synthetic Oligonucleotide
ccctctatcgtcgtcggcgtagcacgctattgcttagaag

SEQ ID NO: 10059 - DNA, 40 bp, Artificial Sequence
  Synthetic Oligonucleotide
ccctctatagtcgtcggcgtagcacgctattgcctagaag

SEQ ID NO: 10060 - DNA, 40 bp, Artificial Sequence
  Synthetic Oligonucleotide
cccgtctcgatcctacttttcgaaaaggtctattagctaa

SEQ ID NO: 10061 - DNA, 40 bp, Artificial Sequence
  Synthetic Oligonucleotide
cccgtctcgatcctacctttcgaaaaggcctattagctaa

SEQ ID NO: 10062 - DNA, 40 bp, Artificial Sequence
  Synthetic Oligonucleotide
cccgtagtccttctccgaacggagccgaaattcggtacta

SEQ ID NO: 10063 - DNA, 40 bp, Artificial Sequence
  Synthetic Oligonucleotide
cccgcctctgttctcttactaacgttaggaagttttacgt

SEQ ID NO: 10064 - DNA, 40 bp, Artificial Sequence
  Synthetic Oligonucleotide
cccattgtgcgcttatggagccgggtaccttccagcaagg

SEQ ID NO: 10065 - DNA, 40 bp, Artificial Sequence
  Synthetic Oligonucleotide
cccaagctttctcggactacctggataacagcttaggcgg

SEQ ID NO: 10066 - DNA, 40 bp, Artificial Sequence
  Synthetic Oligonucleotide
ccattgtgcgcttatggagccgggtaccttcctagcaagg

SEQ ID NO: 10067 - DNA, 40 bp, Artificial Sequence
  Synthetic Oligonucleotide
ccattgtgcgcttatggagccgggtaccttcccagcaagg

SEQ ID NO: 10068 - DNA, 40 bp, Artificial Sequence
  Synthetic Oligonucleotide
ccattgtgcgcttatggagccgggtaccttccagcaaaca

SEQ ID NO: 10069 - DNA, 40 bp, Artificial Sequence
  Synthetic Oligonucleotide
ccacagatcctgagaccatctcacaaagtgcacttgttta

SEQ ID NO: 10070 - DNA, 40 bp, Artificial Sequence
  Synthetic Oligonucleotide
cattgtggacctcctttctcggatccaaacataattgcac

SEQ ID NO: 10071 - DNA, 40 bp, Artificial Sequence
  Synthetic Oligonucleotide
cattcgccagtcacatcaactatgatgacgcctgactgga

SEQ ID NO: 10072 - DNA, 40 bp, Artificial Sequence
  Synthetic Oligonucleotide
cattcgccagtaacatcaactatgatgacgcttgactgga

SEQ ID NO: 10073 - DNA, 40 bp, Artificial Sequence
  Synthetic Oligonucleotide
cattcgccagccacatcaactatgatgacgcttgtctgga

SEQ ID NO: 10074 - DNA, 40 bp, Artificial Sequence
  Synthetic Oligonucleotide
cattatccgtttgtccgccctcttgtggtattgcgcatgc

SEQ ID NO: 10075 - DNA, 40 bp, Artificial Sequence
  Synthetic Oligonucleotide
cattatccgcttgtccgtcctcttgtggtattgcgcatgc

SEQ ID NO: 10076 - DNA, 40 bp, Artificial Sequence
  Synthetic Oligonucleotide
cattatccgcttgtccgtcctcctgtggtattgcgcatgc

SEQ ID NO: 10077 - DNA, 40 bp, Artificial Sequence
  Synthetic Oligonucleotide
cattatccgctcgtccgtcctcttgtggtattgcgcatgc

SEQ ID NO: 10078 - DNA, 40 bp, Artificial Sequence
  Synthetic Oligonucleotide
cattactgggtttctccgatcctttcgtacctccctgccg

SEQ ID NO: 10079 - DNA, 40 bp, Artificial Sequence
  Synthetic Oligonucleotide
catgggctttaagctacttctcggtaacttgggcagttac

SEQ ID NO: 10080 - DNA, 40 bp, Artificial Sequence
  Synthetic Oligonucleotide
catgggctttaagcacttcgtcggtaacttgggcagttac

SEQ ID NO: 10081 - DNA, 40 bp, Artificial Sequence
  Synthetic Oligonucleotide
catgcgagtatccgccttgctccttcggtcgatgtacgta

SEQ ID NO: 10082 - DNA, 40 bp, Artificial Sequence
  Synthetic Oligonucleotide
catctatccgtttgtccgtcctctctggtattgcgcatgc

SEQ ID NO: 10083 - DNA, 40 bp, Artificial Sequence
  Synthetic Oligonucleotide
catcgctatccgttgtccacctcttgtgtatgctcatggc

SEQ ID NO: 10084 - DNA, 40 bp, Artificial Sequence
  Synthetic Oligonucleotide
catcaatctcctcaatgcgcgccttgtaaatgaaagcaga

SEQ ID NO: 10085 - DNA, 40 bp, Artificial Sequence
  Synthetic Oligonucleotide
catacctctcggattgtcccccagtatgaccgcgctacac

SEQ ID NO: 10086 - DNA, 40 bp, Artificial Sequence
  Synthetic Oligonucleotide
caggttcacgagtgaaaggctactttctcacgccggtgcg

SEQ ID NO: 10087 - DNA, 40 bp, Artificial Sequence
  Synthetic Oligonucleotide
caggttcacaaatgaaaggctactttctcacgccggtgcg

SEQ ID NO: 10088 - DNA, 40 bp, Artificial Sequence
  Synthetic Oligonucleotide
cagctattgctcatcgggcgatcatctgaaagaatatttg

SEQ ID NO: 10089 - DNA, 40 bp, Artificial Sequence
  Synthetic Oligonucleotide
cagctattccggtaagtcatcgtttaaccgtttgttgcaa

SEQ ID NO: 10090 - DNA, 40 bp, Artificial Sequence
  Synthetic Oligonucleotide
cagctaacgttcatcgagggagcaaaaggtctataggcta

SEQ ID NO: 10091 - DNA, 40 bp, Artificial Sequence
  Synthetic Oligonucleotide
cagcgtatcgtggtgggatcttagcacctccgacatataa

SEQ ID NO: 10092 - DNA, 40 bp, Artificial Sequence
  Synthetic Oligonucleotide
cagcgtatcatggtggggtcttagcacctccgacatataa

SEQ ID NO: 10093 - DNA, 40 bp, Artificial Sequence
  Synthetic Oligonucleotide
cacttgtccgtttgtccgtcctcttgtggtattgcgcagg

SEQ ID NO: 10094 - DNA, 40 bp, Artificial Sequence
  Synthetic Oligonucleotide
cacttatccgttgtccgtcctcttggtgtattgcgcatgc

SEQ ID NO: 10095 - DNA, 40 bp, Artificial Sequence
  Synthetic Oligonucleotide
cacttatccggcaggatgtctttcgtgcactatcacgatt

SEQ ID NO: 10096 - DNA, 40 bp, Artificial Sequence
  Synthetic Oligonucleotide
cactgtccgtttgtccgtcctcttgtggtattgcgcacgc

SEQ ID NO: 10097 - DNA, 40 bp, Artificial Sequence
  Synthetic Oligonucleotide
cactgtccgcttgtccgtcttcttgtggtattgcgcatgc

SEQ ID NO: 10098 - DNA, 40 bp, Artificial Sequence
  Synthetic Oligonucleotide
cactgtccgcttgtccgtcctcttgtggtattgcgcatgc

SEQ ID NO: 10099 - DNA, 40 bp, Artificial Sequence
  Synthetic Oligonucleotide
cactattcgttttgtccgtcctcttgtggtattgcgctgc

SEQ ID NO: 10100 - DNA, 40 bp, Artificial Sequence
  Synthetic Oligonucleotide
cactattcgtttgtccgtcctcttgtggcattgcgcatgc

SEQ ID NO: 10101 - DNA, 40 bp, Artificial Sequence
  Synthetic Oligonucleotide
cactattcgcttgtccgtcctcttgtggtattgcgcatgc

SEQ ID NO: 10102 - DNA, 40 bp, Artificial Sequence
  Synthetic Oligonucleotide
cactatcttgttcgtccgtcctcttgtgtatgcgcatcgc

SEQ ID NO: 10103 - DNA, 40 bp, Artificial Sequence
  Synthetic Oligonucleotide
cactatctgtttgtccgtcctcttgtggttttgcgcatgc

SEQ ID NO: 10104 - DNA, 40 bp, Artificial Sequence
  Synthetic Oligonucleotide
cactatctgtttgtccgtcctcctgtggtattgcgcatgc

SEQ ID NO: 10105 - DNA, 40 bp, Artificial Sequence
  Synthetic Oligonucleotide
cactatctgcttgtccgtcctcttgtggtattgcgcgtgc

SEQ ID NO: 10106 - DNA, 40 bp, Artificial Sequence
  Synthetic Oligonucleotide
cactatcgtttgtccgtctcttcgtggtattgcgcatgcc

SEQ ID NO: 10107 - DNA, 40 bp, Artificial Sequence
  Synthetic Oligonucleotide
cactatcgtttgtccgtcctcttgtggtcattgcgcatgc

SEQ ID NO: 10108 - DNA, 40 bp, Artificial Sequence
  Synthetic Oligonucleotide
cactatcgtttgtccgtcctcttgtggtattgcgtcatgc

SEQ ID NO: 10109 - DNA, 40 bp, Artificial Sequence
  Synthetic Oligonucleotide
cactatcgtttgtccgtcctctcgtggtattgcgcatgcc

SEQ ID NO: 10110 - DNA, 40 bp, Artificial Sequence
  Synthetic Oligonucleotide
cactatcgttgttcgtccgtctcttggtgtatgcgcatcg

SEQ ID NO: 10111 - DNA, 40 bp, Artificial Sequence
  Synthetic Oligonucleotide
cactatcgttgtccgtcctcttcgtcggtattgcgcatgc

SEQ ID NO: 10112 - DNA, 40 bp, Artificial Sequence
  Synthetic Oligonucleotide
cactatcctttgtccgtcctcttgtggtaattgcgcatgc

SEQ ID NO: 10113 - DNA, 40 bp, Artificial Sequence
  Synthetic Oligonucleotide
cactatcctcatcgagcgatcgtcgtaatactgcttccaa

SEQ ID NO: 10114 - DNA, 40 bp, Artificial Sequence
  Synthetic Oligonucleotide
cactatcctattcgtccgtcctcttgtgttatgcgcatcg

SEQ ID NO: 10115 - DNA, 40 bp, Artificial Sequence
  Synthetic Oligonucleotide
cactatccgttttgtccgtcctcttgtggtattgcgcata

SEQ ID NO: 10116 - DNA, 40 bp, Artificial Sequence
  Synthetic Oligonucleotide
cactatccgttttgatctctctctccctctcaggcaaccg

SEQ ID NO: 10117 - DNA, 40 bp, Artificial Sequence
  Synthetic Oligonucleotide
cactatccgtttgttcgtcctcttgtggcattgcgcatgc

SEQ ID NO: 10118 - DNA, 40 bp, Artificial Sequence
  Synthetic Oligonucleotide
cactatccgtttgttccgtcctctgtggtattgcgcatgc

SEQ ID NO: 10119 - DNA, 40 bp, Artificial Sequence
  Synthetic Oligonucleotide
cactatccgtttgtgtgtcctcttgtggtattgcgcatgc

SEQ ID NO: 10120 - DNA, 40 bp, Artificial Sequence
  Synthetic Oligonucleotide
cactatccgtttgtgcgtcctcttgtggtattgcgcatgc

SEQ ID NO: 10121 - DNA, 40 bp, Artificial Sequence
  Synthetic Oligonucleotide
cactatccgtttgtctgtcctcttgtggtgttgcgcatgc

SEQ ID NO: 10122 - DNA, 40 bp, Artificial Sequence
  Synthetic Oligonucleotide
cactatccgtttgtctgtcctcttgtggtattgcgcatgt

SEQ ID NO: 10123 - DNA, 40 bp, Artificial Sequence
  Synthetic Oligonucleotide
cactatccgtttgtctgtcctctcgtggtattgtgcatgc

SEQ ID NO: 10124 - DNA, 40 bp, Artificial Sequence
  Synthetic Oligonucleotide
cactatccgtttgtcgtctcttgtggtattgcgcatcgcc

SEQ ID NO: 10125 - DNA, 40 bp, Artificial Sequence
  Synthetic Oligonucleotide
cactatccgtttgtcgtcctcttcgtggtattgcgcatgc

SEQ ID NO: 10126 - DNA, 40 bp, Artificial Sequence
  Synthetic Oligonucleotide
cactatccgtttgtcctcctcttgtggtaattgcgcatgc

SEQ ID NO: 10127 - DNA, 40 bp, Artificial Sequence
  Synthetic Oligonucleotide
cactatccgtttgtccgttttcttgtggtattgcgcatgc

SEQ ID NO: 10128 - DNA, 40 bp, Artificial Sequence
  Synthetic Oligonucleotide
cactatccgtttgtccgttctcccgtggtattgcgcatgc

SEQ ID NO: 10129 - DNA, 40 bp, Artificial Sequence
  Synthetic Oligonucleotide
cactatccgtttgtccgtcttctgtcggtattgcgcatgc

SEQ ID NO: 10130 - DNA, 40 bp, Artificial Sequence
  Synthetic Oligonucleotide
cactatccgtttgtccgtcttctagtggtattgcgcatgc

SEQ ID NO: 10131 - DNA, 40 bp, Artificial Sequence
  Synthetic Oligonucleotide
cactatccgtttgtccgtctcttgtggtattgcgcgtgcc

SEQ ID NO: 10132 - DNA, 40 bp, Artificial Sequence
  Synthetic Oligonucleotide
cactatccgtttgtccgtctcttgtggtattgcgcattgc

SEQ ID NO: 10133 - DNA, 40 bp, Artificial Sequence
  Synthetic Oligonucleotide
cactatccgtttgtccgtctcttgtggtattcgcgcatgc

SEQ ID NO: 10134 - DNA, 40 bp, Artificial Sequence
  Synthetic Oligonucleotide
cactatccgtttgtccgtctcttgtggtaattgcgcatgc

SEQ ID NO: 10135 - DNA, 40 bp, Artificial Sequence
  Synthetic Oligonucleotide
cactatccgtttgtccgtcgtctcgtggtattgcgcatgc

SEQ ID NO: 10136 - DNA, 40 bp, Artificial Sequence
  Synthetic Oligonucleotide
cactatccgtttgtccgtccttttgtggtattgcgcatac

SEQ ID NO: 10137 - DNA, 40 bp, Artificial Sequence
  Synthetic Oligonucleotide
cactatccgtttgtccgtcctttcgtggtgttgcgcatgc

SEQ ID NO: 10138 - DNA, 40 bp, Artificial Sequence
  Synthetic Oligonucleotide
cactatccgtttgtccgtccttcttgtggtattgcgcatg

SEQ ID NO: 10139 - DNA, 40 bp, Artificial Sequence
  Synthetic Oligonucleotide
cactatccgtttgtccgtccttctcgtgacttgcgcatgc

SEQ ID NO: 10140 - DNA, 40 bp, Artificial Sequence
  Synthetic Oligonucleotide
cactatccgtttgtccgtcctgttgtggtattgcgcatgc

SEQ ID NO: 10141 - DNA, 40 bp, Artificial Sequence
  Synthetic Oligonucleotide
cactatccgtttgtccgtcctcttttggtattgcgcatac

SEQ ID NO: 10142 - DNA, 40 bp, Artificial Sequence
  Synthetic Oligonucleotide
cactatccgtttgtccgtcctcttgtggtgttgcacatgc

SEQ ID NO: 10143 - DNA, 40 bp, Artificial Sequence
  Synthetic Oligonucleotide
cactatccgtttgtccgtcctcttgtggtattgtgcgtgc

SEQ ID NO: 10144 - DNA, 40 bp, Artificial Sequence
  Synthetic Oligonucleotide
cactatccgtttgtccgtcctcttgtggtattgtcgcatg

SEQ ID NO: 10145 - DNA, 40 bp, Artificial Sequence
  Synthetic Oligonucleotide
cactatccgtttgtccgtcctcttgtggtattgcgcgtac

SEQ ID NO: 10146 - DNA, 40 bp, Artificial Sequence
  Synthetic Oligonucleotide
cactatccgtttgtccgtcctcttgtggtattgcgcaaac

SEQ ID NO: 10147 - DNA, 40 bp, Artificial Sequence
  Synthetic Oligonucleotide
cactatccgtttgtccgtcctcttgtggtattgcacgtgc

SEQ ID NO: 10148 - DNA, 40 bp, Artificial Sequence
  Synthetic Oligonucleotide
cactatccgtttgtccgtcctcttgtggtatctcgcatgc

SEQ ID NO: 10149 - DNA, 40 bp, Artificial Sequence
  Synthetic Oligonucleotide
cactatccgtttgtccgtcctcttgtggtactgcgcatat

SEQ ID NO: 10150 - DNA, 40 bp, Artificial Sequence
  Synthetic Oligonucleotide
cactatccgtttgtccgtcctcttgtggtaccgcgcatgc

SEQ ID NO: 10151 - DNA, 40 bp, Artificial Sequence
  Synthetic Oligonucleotide
cactatccgtttgtccgtcctcttgtggtaatgcgcttgc

SEQ ID NO: 10152 - DNA, 40 bp, Artificial Sequence
  Synthetic Oligonucleotide
cactatccgtttgtccgtcctcttgtggcatcgcgcatgc

SEQ ID NO: 10153 - DNA, 40 bp, Artificial Sequence
  Synthetic Oligonucleotide
cactatccgtttgtccgtcctcttgtggatatacgcatgc

SEQ ID NO: 10154 - DNA, 40 bp, Artificial Sequence
  Synthetic Oligonucleotide
cactatccgtttgtccgtcctcttgtgattttgcgcatgc

SEQ ID NO: 10155 - DNA, 40 bp, Artificial Sequence
  Synthetic Oligonucleotide
cactatccgtttgtccgtcctcttgtgatattgcgtatgc

SEQ ID NO: 10156 - DNA, 40 bp, Artificial Sequence
  Synthetic Oligonucleotide
cactatccgtttgtccgtcctcttgtagcattgcgcatgc

SEQ ID NO: 10157 - DNA, 40 bp, Artificial Sequence
  Synthetic Oligonucleotide
cactatccgtttgtccgtcctcttgtagaattgcgcatgc

SEQ ID NO: 10158 - DNA, 40 bp, Artificial Sequence
  Synthetic Oligonucleotide
cactatccgtttgtccgtcctcttgtaatactgcgcatgc

SEQ ID NO: 10159 - DNA, 40 bp, Artificial Sequence
  Synthetic Oligonucleotide
cactatccgtttgtccgtcctcttggggtattgcgcgtgc

SEQ ID NO: 10160 - DNA, 40 bp, Artificial Sequence
  Synthetic Oligonucleotide
cactatccgtttgtccgtcctcttgcggtgttgcgcatgc

SEQ ID NO: 10161 - DNA, 40 bp, Artificial Sequence
  Synthetic Oligonucleotide
cactatccgtttgtccgtcctcttgcggtattgtgcatgc

SEQ ID NO: 10162 - DNA, 40 bp, Artificial Sequence
  Synthetic Oligonucleotide
cactatccgtttgtccgtcctcttgcggtattgcgcacgc

SEQ ID NO: 10163 - DNA, 40 bp, Artificial Sequence
  Synthetic Oligonucleotide
cactatccgtttgtccgtcctcttgcagtattgcgcatgc

SEQ ID NO: 10164 - DNA, 40 bp, Artificial Sequence
  Synthetic Oligonucleotide
cactatccgtttgtccgtcctcttgaggtcttgcgcatgc

SEQ ID NO: 10165 - DNA, 40 bp, Artificial Sequence
  Synthetic Oligonucleotide
cactatccgtttgtccgtcctcttgaggtatcgcgcatgc

SEQ ID NO: 10166 - DNA, 40 bp, Artificial Sequence
  Synthetic Oligonucleotide
cactatccgtttgtccgtcctcttgaggcattgcgcatac

SEQ ID NO: 10167 - DNA, 40 bp, Artificial Sequence
  Synthetic Oligonucleotide
cactatccgtttgtccgtcctcttatggtattgtgcatgc

SEQ ID NO: 10168 - DNA, 40 bp, Artificial Sequence
  Synthetic Oligonucleotide
cactatccgtttgtccgtcctcttatggtatcgcgcatgc

SEQ ID NO: 10169 - DNA, 40 bp, Artificial Sequence
  Synthetic Oligonucleotide
cactatccgtttgtccgtcctctgtggtcattgcgcatgc

SEQ ID NO: 10170 - DNA, 40 bp, Artificial Sequence
  Synthetic Oligonucleotide
cactatccgtttgtccgtcctctgtggtattgcgcagtgc

SEQ ID NO: 10171 - DNA, 40 bp, Artificial Sequence
  Synthetic Oligonucleotide
cactatccgtttgtccgtcctctggaggtattgcgcatgc

SEQ ID NO: 10172 - DNA, 40 bp, Artificial Sequence
  Synthetic Oligonucleotide
cactatccgtttgtccgtcctctcgtgtattgtcgcatgc

SEQ ID NO: 10173 - DNA, 40 bp, Artificial Sequence
  Synthetic Oligonucleotide
cactatccgtttgtccgtcctctcgtggtttgctgcatgc

SEQ ID NO: 10174 - DNA, 40 bp, Artificial Sequence
  Synthetic Oligonucleotide
cactatccgtttgtccgtcctctcgtggtattgcggatgc

SEQ ID NO: 10175 - DNA, 40 bp, Artificial Sequence
  Synthetic Oligonucleotide
cactatccgtttgtccgtcctctcgtggtattgcgcatcc

SEQ ID NO: 10176 - DNA, 40 bp, Artificial Sequence
  Synthetic Oligonucleotide
cactatccgtttgtccgtcctctcgtggtatggcgcatgc

SEQ ID NO: 10177 - DNA, 40 bp, Artificial Sequence
  Synthetic Oligonucleotide
cactatccgtttgtccgtcctctcgtggtactgcgcatac

SEQ ID NO: 10178 - DNA, 40 bp, Artificial Sequence
  Synthetic Oligonucleotide
cactatccgtttgtccgtcctctcgtggcattgcgcgtgc

SEQ ID NO: 10179 - DNA, 40 bp, Artificial Sequence
  Synthetic Oligonucleotide
cactatccgtttgtccgtcctctcgtggcattgcgcatac

SEQ ID NO: 10180 - DNA, 40 bp, Artificial Sequence
  Synthetic Oligonucleotide
cactatccgtttgtccgtcctctcgtgatactgcgcatgc

SEQ ID NO: 10181 - DNA, 40 bp, Artificial Sequence
  Synthetic Oligonucleotide
cactatccgtttgtccgtcctctcgtaatgttgcgcatgc

SEQ ID NO: 10182 - DNA, 40 bp, Artificial Sequence
  Synthetic Oligonucleotide
cactatccgtttgtccgtcctctcagtgtatgcgcatcgc

SEQ ID NO: 10183 - DNA, 40 bp, Artificial Sequence
  Synthetic Oligonucleotide
cactatccgtttgtccgtcctctagcggtattgcgcatgc

SEQ ID NO: 10184 - DNA, 40 bp, Artificial Sequence
  Synthetic Oligonucleotide
cactatccgtttgtccgtcctcgtatggtattgcgcatgc

SEQ ID NO: 10185 - DNA, 40 bp, Artificial Sequence
  Synthetic Oligonucleotide
cactatccgtttgtccgtcctcctgttgtattgcgcatgc

SEQ ID NO: 10186 - DNA, 40 bp, Artificial Sequence
  Synthetic Oligonucleotide
cactatccgtttgtccgtcctcctgtgtatatgcgcatcg

SEQ ID NO: 10187 - DNA, 40 bp, Artificial Sequence
  Synthetic Oligonucleotide
cactatccgtttgtccgtcctcctgtggtatttcgcatgc

SEQ ID NO: 10188 - DNA, 40 bp, Artificial Sequence
  Synthetic Oligonucleotide
cactatccgtttgtccgtcctcctgtggtattgcgtatgc

SEQ ID NO: 10189 - DNA, 40 bp, Artificial Sequence
  Synthetic Oligonucleotide
cactatccgtttgtccgtcctcctgtggtattgcggatgc

SEQ ID NO: 10190 - DNA, 40 bp, Artificial Sequence
  Synthetic Oligonucleotide
cactatccgtttgtccgtcctcctgtggtattgcgcattc

SEQ ID NO: 10191 - DNA, 40 bp, Artificial Sequence
  Synthetic Oligonucleotide
cactatccgtttgtccgtcctcctgtgggattgcgcatgc

SEQ ID NO: 10192 - DNA, 40 bp, Artificial Sequence
  Synthetic Oligonucleotide
cactatccgtttgtccgtcctcctctggtattgcgcatgc

SEQ ID NO: 10193 - DNA, 40 bp, Artificial Sequence
  Synthetic Oligonucleotide
cactatccgtttgtccgtcctcccgtggtgttgcgcatgc

SEQ ID NO: 10194 - DNA, 40 bp, Artificial Sequence
  Synthetic Oligonucleotide
cactatccgtttgtccgtcctcacgtagtattgcgcatgc

SEQ ID NO: 10195 - DNA, 40 bp, Artificial Sequence
  Synthetic Oligonucleotide
cactatccgtttgtccgtccctcttgtggtattgcgctgc

SEQ ID NO: 10196 - DNA, 40 bp, Artificial Sequence
  Synthetic Oligonucleotide
cactatccgtttgtccgtccccttgtggtgttgcgcatgc

SEQ ID NO: 10197 - DNA, 40 bp, Artificial Sequence
  Synthetic Oligonucleotide
cactatccgtttgtccgtccccttgtggtatttcgcatgc

SEQ ID NO: 10198 - DNA, 40 bp, Artificial Sequence
  Synthetic Oligonucleotide
cactatccgtttgtccgtccccttgtggcattgcgcatgc

SEQ ID NO: 10199 - DNA, 40 bp, Artificial Sequence
  Synthetic Oligonucleotide
cactatccgtttgtccgtccccttgcggtattgcgcatgc

SEQ ID NO: 10200 - DNA, 40 bp, Artificial Sequence
  Synthetic Oligonucleotide
cactatccgtttgtccgtcccctcgtggtattgcgcaagc

SEQ ID NO: 10201 - DNA, 40 bp, Artificial Sequence
  Synthetic Oligonucleotide
cactatccgtttgtccgtccccccgtggtattgcgcatgc

SEQ ID NO: 10202 - DNA, 40 bp, Artificial Sequence
  Synthetic Oligonucleotide
cactatccgtttgtccgtccacttatggtattgcgcatgc

SEQ ID NO: 10203 - DNA, 40 bp, Artificial Sequence
  Synthetic Oligonucleotide
cactatccgtttgtccgtccacctgtggtattgcgcatgc

SEQ ID NO: 10204 - DNA, 40 bp, Artificial Sequence
  Synthetic Oligonucleotide
cactatccgtttgtccgcccccttgtggtattgcgcatgc

SEQ ID NO: 10205 - DNA, 40 bp, Artificial Sequence
  Synthetic Oligonucleotide
cactatccgtttgtccgacctctcgtggtattgcgcatgc

SEQ ID NO: 10206 - DNA, 40 bp, Artificial Sequence
  Synthetic Oligonucleotide
cactatccgtttgtcccgtcctcttatggtattgcgcatg

SEQ ID NO: 10207 - DNA, 40 bp, Artificial Sequence
  Synthetic Oligonucleotide
cactatccgtttgtccatcctcttgtggtattgcgtatgc

SEQ ID NO: 10208 - DNA, 40 bp, Artificial Sequence
  Synthetic Oligonucleotide
cactatccgtttgctcgtcctcttgtggtactgcgcatgc

SEQ ID NO: 10209 - DNA, 40 bp, Artificial Sequence
  Synthetic Oligonucleotide
cactatccgtttgcctgtcctcttgtggtattgcgcatgc

SEQ ID NO: 10210 - DNA, 40 bp, Artificial Sequence
  Synthetic Oligonucleotide
cactatccgtttgcccgtgctcttgtggtattgcgcatgc

SEQ ID NO: 10211 - DNA, 40 bp, Artificial Sequence
  Synthetic Oligonucleotide
cactatccgtttgcccgtcttcttgtggtattgcgcatgc

SEQ ID NO: 10212 - DNA, 40 bp, Artificial Sequence
  Synthetic Oligonucleotide
cactatccgtttgcccgtcctcttgtggtattgcacatgc

SEQ ID NO: 10213 - DNA, 40 bp, Artificial Sequence
  Synthetic Oligonucleotide
cactatccgtttgcccgtcctcttgtggtatggcgcatgc

SEQ ID NO: 10214 - DNA, 40 bp, Artificial Sequence
  Synthetic Oligonucleotide
cactatccgtttgcccgtcctcttgtggtatcgcgcatgc

SEQ ID NO: 10215 - DNA, 40 bp, Artificial Sequence
  Synthetic Oligonucleotide
cactatccgtttgcccgtcctctcgtggtattgcccatgc

SEQ ID NO: 10216 - DNA, 40 bp, Artificial Sequence
  Synthetic Oligonucleotide
cactatccgtttgcccgtcctcacgtggtattgcgcatgc

SEQ ID NO: 10217 - DNA, 40 bp, Artificial Sequence
  Synthetic Oligonucleotide
cactatccgtttgcccatcctctcgtggtattgcgcatgc

SEQ ID NO: 10218 - DNA, 40 bp, Artificial Sequence
  Synthetic Oligonucleotide
cactatccgtttcgtccgtctcttgtggtattgcgcatgc

SEQ ID NO: 10219 - DNA, 40 bp, Artificial Sequence
  Synthetic Oligonucleotide
cactatccgtttcgtccgtcccttgtggtattgcgcatgc

SEQ ID NO: 10220 - DNA, 40 bp, Artificial Sequence
  Synthetic Oligonucleotide
cactatccgtttatccgtcctcttgtggtgttgcgcatgc

SEQ ID NO: 10221 - DNA, 40 bp, Artificial Sequence
  Synthetic Oligonucleotide
cactatccgtttatccgtcctcttgtggtattgcgcacgc

SEQ ID NO: 10222 - DNA, 40 bp, Artificial Sequence
  Synthetic Oligonucleotide
cactatccgttgtcgtcctcttgtcggtattgcgcatgcc

SEQ ID NO: 10223 - DNA, 40 bp, Artificial Sequence
  Synthetic Oligonucleotide
cactatccgttgtccgtccttctcgtcgtatgcgcatacg

SEQ ID NO: 10224 - DNA, 40 bp, Artificial Sequence
  Synthetic Oligonucleotide
cactatccgttgtccgtccttcctgtgtattgcgcatgtc

SEQ ID NO: 10225 - DNA, 40 bp, Artificial Sequence
  Synthetic Oligonucleotide
cactatccgttgtccgtcctcttgtgtacttgcgcatgtc

SEQ ID NO: 10226 - DNA, 40 bp, Artificial Sequence
  Synthetic Oligonucleotide
cactatccgttgtccgtcctcttgtggtattgtcgcatgc

SEQ ID NO: 10227 - DNA, 40 bp, Artificial Sequence
  Synthetic Oligonucleotide
cactatccgttgtccgtcctcttgtggtattgcgcatggt

SEQ ID NO: 10228 - DNA, 40 bp, Artificial Sequence
  Synthetic Oligonucleotide
cactatccgttgtccgtcctcttgtggtattgcgcactgc

SEQ ID NO: 10229 - DNA, 40 bp, Artificial Sequence
  Synthetic Oligonucleotide
cactatccgttgtccgtcctcttgtggtattcgcgcatgc

SEQ ID NO: 10230 - DNA, 40 bp, Artificial Sequence
  Synthetic Oligonucleotide
cactatccgttgtccgtcctcttgtcgtacttgcgcatgc

SEQ ID NO: 10231 - DNA, 40 bp, Artificial Sequence
  Synthetic Oligonucleotide
cactatccgttgtccgtcctcttgtcggtattgcgcatcg

SEQ ID NO: 10232 - DNA, 40 bp, Artificial Sequence
  Synthetic Oligonucleotide
cactatccgttgtccgtcctcttgtcggtattgcgcacgc

SEQ ID NO: 10233 - DNA, 40 bp, Artificial Sequence
  Synthetic Oligonucleotide
cactatccgttgctccgtcctctgtcgtactgcgcatcgc

SEQ ID NO: 10234 - DNA, 40 bp, Artificial Sequence
  Synthetic Oligonucleotide
cactatccgttctatccgtcctctgtggtattgcgcatgc

SEQ ID NO: 10235 - DNA, 40 bp, Artificial Sequence
  Synthetic Oligonucleotide
cactatccgttcgtccgtcctttcgtggtattgcgcatgc

SEQ ID NO: 10236 - DNA, 40 bp, Artificial Sequence
  Synthetic Oligonucleotide
cactatccgttcgtccgtcctcttgtggtgttgcgcatgc

SEQ ID NO: 10237 - DNA, 40 bp, Artificial Sequence
  Synthetic Oligonucleotide
cactatccgttcgcccgtcctctcgtggtattgcgcatgc

SEQ ID NO: 10238 - DNA, 40 bp, Artificial Sequence
  Synthetic Oligonucleotide
cactatccgttatcgagcgttgtcgacagcggctaaggcc

SEQ ID NO: 10239 - DNA, 40 bp, Artificial Sequence
  Synthetic Oligonucleotide
cactatccgttagtccgttctcttgtggtattgcgcatgc

SEQ ID NO: 10240 - DNA, 40 bp, Artificial Sequence
  Synthetic Oligonucleotide
cactatccgttagatccgtcactcacgtactgcgtagtag

SEQ ID NO: 10241 - DNA, 40 bp, Artificial Sequence
  Synthetic Oligonucleotide
cactatccgtcttgtccgtcctctgtggtattgcgcatgc

SEQ ID NO: 10242 - DNA, 40 bp, Artificial Sequence
  Synthetic Oligonucleotide
cactatccgtcttgtccgtcctctgtggtattgcgcacgc

SEQ ID NO: 10243 - DNA, 40 bp, Artificial Sequence
  Synthetic Oligonucleotide
cactatccgtcttctcgtcctcttgtggtattgcgcatgc

SEQ ID NO: 10244 - DNA, 40 bp, Artificial Sequence
  Synthetic Oligonucleotide
cactatccgtcttagcgtgttcccttcggacatccatcaa

SEQ ID NO: 10245 - DNA, 40 bp, Artificial Sequence
  Synthetic Oligonucleotide
cactatccgtcttaacgtgttccctcggacatccatcaaa

SEQ ID NO: 10246 - DNA, 40 bp, Artificial Sequence
  Synthetic Oligonucleotide
cactatccgtctgtcgtcctcttgtggtattgcgcatacg

SEQ ID NO: 10247 - DNA, 40 bp, Artificial Sequence
  Synthetic Oligonucleotide
cactatccgtctgtccgtcctcttgtggtattgcgaatgc

SEQ ID NO: 10248 - DNA, 40 bp, Artificial Sequence
  Synthetic Oligonucleotide
cactatccgtctgtccgtcctcttgtggtatcgcgcgtgc

SEQ ID NO: 10249 - DNA, 40 bp, Artificial Sequence
  Synthetic Oligonucleotide
cactatccgtctgtccgtcctctcgtggtattgcgcatcg

SEQ ID NO: 10250 - DNA, 40 bp, Artificial Sequence
  Synthetic Oligonucleotide
cactatccgtctgtccatcctcttgtggtattgcgcatgc

SEQ ID NO: 10251 - DNA, 40 bp, Artificial Sequence
  Synthetic Oligonucleotide
cactatccgtctgctcgtcctcttgtggtattgcgcatgc

SEQ ID NO: 10252 - DNA, 40 bp, Artificial Sequence
  Synthetic Oligonucleotide
cactatccgtatcgagcgttatcaacaagcggctaaggcc

SEQ ID NO: 10253 - DNA, 40 bp, Artificial Sequence
  Synthetic Oligonucleotide
cactatccgtagatccgtcactcattacgcgtatggaatc

SEQ ID NO: 10254 - DNA, 40 bp, Artificial Sequence
  Synthetic Oligonucleotide
cactatccggttgtccgtcctcttgtggtgttgcgcatgc

SEQ ID NO: 10255 - DNA, 40 bp, Artificial Sequence
  Synthetic Oligonucleotide
cactatccggttgtccgtcctcttgtggtactgcgcatgc

SEQ ID NO: 10256 - DNA, 40 bp, Artificial Sequence
  Synthetic Oligonucleotide
cactatccggcaggacgtcttttcgtgcactatcacgatt

SEQ ID NO: 10257 - DNA, 40 bp, Artificial Sequence
  Synthetic Oligonucleotide
cactatccgcttgtccttcctcctgtggtattgcgcatgc

SEQ ID NO: 10258 - DNA, 40 bp, Artificial Sequence
  Synthetic Oligonucleotide
cactatccgcttgtccgtcttcctgtggtattgcgcatgc

SEQ ID NO: 10259 - DNA, 40 bp, Artificial Sequence
  Synthetic Oligonucleotide
cactatccgcttgtccgtcctcttgttgtattgcgcatgc

SEQ ID NO: 10260 - DNA, 40 bp, Artificial Sequence
  Synthetic Oligonucleotide
cactatccgcttgtccgtcctcttgtggtattgggcatgc

SEQ ID NO: 10261 - DNA, 40 bp, Artificial Sequence
  Synthetic Oligonucleotide
cactatccgcttgtccgtcctcttgtggtattgcgcaggc

SEQ ID NO: 10262 - DNA, 40 bp, Artificial Sequence
  Synthetic Oligonucleotide
cactatccgcttgtccgtcctcttgtgggattgcgcacgc

SEQ ID NO: 10263 - DNA, 40 bp, Artificial Sequence
  Synthetic Oligonucleotide
cactatccgcttgtccgtcctcttgtggaattgcgcatgc

SEQ ID NO: 10264 - DNA, 40 bp, Artificial Sequence
  Synthetic Oligonucleotide
cactatccgcttgtccgtcctcttgtagtattgcgcatgc

SEQ ID NO: 10265 - DNA, 40 bp, Artificial Sequence
  Synthetic Oligonucleotide
cactatccgcttgtccgtcctctcgtggtattgcacatgc

SEQ ID NO: 10266 - DNA, 40 bp, Artificial Sequence
  Synthetic Oligonucleotide
cactatccgcttgtccgtcctctcgaggtattgcgcatgc

SEQ ID NO: 10267 - DNA, 40 bp, Artificial Sequence
  Synthetic Oligonucleotide
cactatccgcttgtccgtcctcatgtggtattgcgcatgc

SEQ ID NO: 10268 - DNA, 40 bp, Artificial Sequence
  Synthetic Oligonucleotide
cactatccgcttgtccgtccccctgtggtattgcgcatgc

SEQ ID NO: 10269 - DNA, 40 bp, Artificial Sequence
  Synthetic Oligonucleotide
cactatccgcttgtccatcctctcgtggtattgcgcatgc

SEQ ID NO: 10270 - DNA, 40 bp, Artificial Sequence
  Synthetic Oligonucleotide
cactatccgcttctccgtcctcttgtggtattgcgcatgc

SEQ ID NO: 10271 - DNA, 40 bp, Artificial Sequence
  Synthetic Oligonucleotide
cactatccgcttatgttcgcctctctctcggttacgcgtt

SEQ ID NO: 10272 - DNA, 40 bp, Artificial Sequence
  Synthetic Oligonucleotide
cactatccgcttatgttcgcctctctcccggttgcgcgtt

SEQ ID NO: 10273 - DNA, 40 bp, Artificial Sequence
  Synthetic Oligonucleotide
cactatccgcttatccgtcctcttgtggtattgcgcatgc

SEQ ID NO: 10274 - DNA, 40 bp, Artificial Sequence
  Synthetic Oligonucleotide
cactatccgcttatccgtcctctcgtggtattgcgcatgc

SEQ ID NO: 10275 - DNA, 40 bp, Artificial Sequence
  Synthetic Oligonucleotide
cactatccgcctgctcgtcctcttgtggtattgcgcatgc

SEQ ID NO: 10276 - DNA, 40 bp, Artificial Sequence
  Synthetic Oligonucleotide
cactatccgcatcgagctttcgtccgggagtgtatagctg

SEQ ID NO: 10277 - DNA, 40 bp, Artificial Sequence
  Synthetic Oligonucleotide
cactatccgacatcgagagcgctacgtcatcaagcgctaa

SEQ ID NO: 10278 - DNA, 40 bp, Artificial Sequence
  Synthetic Oligonucleotide
cactatccgacatcgagagagctacgtcatcaagcgctta

SEQ ID NO: 10279 - DNA, 40 bp, Artificial Sequence
  Synthetic Oligonucleotide
cactatcccgtttgtccgtcctctgtggtattgcgcttgc

SEQ ID NO: 10280 - DNA, 40 bp, Artificial Sequence
  Synthetic Oligonucleotide
cactatcccgtttgtcccgtcctctgtggtattgcgcatg

SEQ ID NO: 10281 - DNA, 40 bp, Artificial Sequence
  Synthetic Oligonucleotide
cactatcccgtagatccgtcatctcactacgcgtatgact

SEQ ID NO: 10282 - DNA, 40 bp, Artificial Sequence
  Synthetic Oligonucleotide
cactatccccatcgagcggtcgtcgtaatactgcttccaa

SEQ ID NO: 10283 - DNA, 40 bp, Artificial Sequence
  Synthetic Oligonucleotide
cactatccccatcgagcgatcgtcgtaatgctgcttccaa

SEQ ID NO: 10284 - DNA, 40 bp, Artificial Sequence
  Synthetic Oligonucleotide
cactatccatttgtccgtcctcttgtggtactgcgcatgc

SEQ ID NO: 10285 - DNA, 40 bp, Artificial Sequence
  Synthetic Oligonucleotide
cactatccatttgtccgtcctctcgtagtattgcgcatgc

SEQ ID NO: 10286 - DNA, 40 bp, Artificial Sequence
  Synthetic Oligonucleotide
cactatccaacatcgagagagctacgtcatcaagcgctaa

SEQ ID NO: 10287 - DNA, 40 bp, Artificial Sequence
  Synthetic Oligonucleotide
cactaggttcgcctcgcgcctcctagtgcacgtttgtctg

SEQ ID NO: 10288 - DNA, 40 bp, Artificial Sequence
  Synthetic Oligonucleotide
cactacttcgttgaccgtcctcttgtggtattgcgcatgc

SEQ ID NO: 10289 - DNA, 40 bp, Artificial Sequence
  Synthetic Oligonucleotide
cactactccgttgtccgtcctcctgtggtattgcgcatgc

SEQ ID NO: 10290 - DNA, 40 bp, Artificial Sequence
  Synthetic Oligonucleotide
cactacccgtttgtccgtcctcttgtggtattgcgcatac

SEQ ID NO: 10291 - DNA, 40 bp, Artificial Sequence
  Synthetic Oligonucleotide
cactacccgtttgtccgtcctcttgtggtaatgcgcatgc

SEQ ID NO: 10292 - DNA, 40 bp, Artificial Sequence
  Synthetic Oligonucleotide
cactacccgtttgtccgtcctctcgtggtgttgcgcatgc

SEQ ID NO: 10293 - DNA, 40 bp, Artificial Sequence
  Synthetic Oligonucleotide
cactacccgtttgtccgtcctctcgtggtattgcgcttgc

SEQ ID NO: 10294 - DNA, 40 bp, Artificial Sequence
  Synthetic Oligonucleotide
cactacccgtttatccgtcctcttgtggtattgcgcatgc

SEQ ID NO: 10295 - DNA, 40 bp, Artificial Sequence
  Synthetic Oligonucleotide
cactacccgttcgtccgtcctcttgtggtattgcgcatgc

SEQ ID NO: 10296 - DNA, 40 bp, Artificial Sequence
  Synthetic Oligonucleotide
cactacccgtagatccgtcactcaccacgcgtatggaatc

SEQ ID NO: 10297 - DNA, 40 bp, Artificial Sequence
  Synthetic Oligonucleotide
cactacccgcttgtccgtcctctcgtggtattgcgcatgc

SEQ ID NO: 10298 - DNA, 40 bp, Artificial Sequence
  Synthetic Oligonucleotide
cactacccgacatcgagagagctacgtcatcaagcgctaa

SEQ ID NO: 10299 - DNA, 40 bp, Artificial Sequence
  Synthetic Oligonucleotide
cactaaccgtttgtccgtcctcttgtggtattgcgcatac

SEQ ID NO: 10300 - DNA, 40 bp, Artificial Sequence
  Synthetic Oligonucleotide
cacggttatgtctgactttcaggcgctatcctgatttcgt

SEQ ID NO: 10301 - DNA, 40 bp, Artificial Sequence
  Synthetic Oligonucleotide
cacctatccgtttgtccgtcctcttgtggtattgcgcatg

SEQ ID NO: 10302 - DNA, 40 bp, Artificial Sequence
  Synthetic Oligonucleotide
cacctatccgtagatccgtcactcactacgcgtatgaatc

SEQ ID NO: 10303 - DNA, 40 bp, Artificial Sequence
  Synthetic Oligonucleotide
caccggaagtccctcctcgtcttgatgcgctatcatctca

SEQ ID NO: 10304 - DNA, 40 bp, Artificial Sequence
  Synthetic Oligonucleotide
caccggaagtccctcctcgtcttgatgcactatcatccca

SEQ ID NO: 10305 - DNA, 40 bp, Artificial Sequence
  Synthetic Oligonucleotide
caccggaagtccctcctcgtcttaatgcactatcatctca

SEQ ID NO: 10306 - DNA, 40 bp, Artificial Sequence
  Synthetic Oligonucleotide
caccggaagtccctcctcgtcgtgatgcactatcatctca

SEQ ID NO: 10307 - DNA, 40 bp, Artificial Sequence
  Synthetic Oligonucleotide
caccatccgtttgtccgtcctcttgtggtgttgcgcatgc

SEQ ID NO: 10308 - DNA, 40 bp, Artificial Sequence
  Synthetic Oligonucleotide
caccatccgtttgtccgtcctcttgtggtgttgcgcacgc

SEQ ID NO: 10309 - DNA, 40 bp, Artificial Sequence
  Synthetic Oligonucleotide
caccatccgtttgtccgtcctcttgtggtattgcgcgtgc

SEQ ID NO: 10310 - DNA, 40 bp, Artificial Sequence
  Synthetic Oligonucleotide
caccatccgtttgtccgtcctcttgtagtattgcgcatgc

SEQ ID NO: 10311 - DNA, 40 bp, Artificial Sequence
  Synthetic Oligonucleotide
caccatccgtttgtccgtcctctcgtggtattgcgcacgc

SEQ ID NO: 10312 - DNA, 40 bp, Artificial Sequence
  Synthetic Oligonucleotide
caccatccgtttgtccgtcctctcgtggtattacgcgtgc

SEQ ID NO: 10313 - DNA, 40 bp, Artificial Sequence
  Synthetic Oligonucleotide
caccatccgtttgtccgtcctcctgtggtattgcgcatgc

SEQ ID NO: 10314 - DNA, 40 bp, Artificial Sequence
  Synthetic Oligonucleotide
caccatccgtttgtccgtccccttgtggtgttgcgcatgc

SEQ ID NO: 10315 - DNA, 40 bp, Artificial Sequence
  Synthetic Oligonucleotide
caccatccgtttgcccgtcctctcgtggtattgcgcatgc

SEQ ID NO: 10316 - DNA, 40 bp, Artificial Sequence
  Synthetic Oligonucleotide
caccatccgtatgtccgtcctcttgtggtattgcgcatgc

SEQ ID NO: 10317 - DNA, 40 bp, Artificial Sequence
  Synthetic Oligonucleotide
caccatccgtagatccgtcactcactacgcgtatggaatc

SEQ ID NO: 10318 - DNA, 40 bp, Artificial Sequence
  Synthetic Oligonucleotide
cacacttacttccatcacgcctcgattctccctatcgctg

SEQ ID NO: 10319 - DNA, 40 bp, Artificial Sequence
  Synthetic Oligonucleotide
cacaatccgtttatccgtcctcttgtggtattgcgcatgc

SEQ ID NO: 10320 - DNA, 40 bp, Artificial Sequence
  Synthetic Oligonucleotide
caatggatgtctatttcagagcgctatactctgatcaaaa

SEQ ID NO: 10321 - DNA, 40 bp, Artificial Sequence
  Synthetic Oligonucleotide
caatgcttgatctcctgtcgactctgcagctgagactact

SEQ ID NO: 10322 - DNA, 40 bp, Artificial Sequence
  Synthetic Oligonucleotide
caatgctagatctcctgtcgactctgcggctgagactact

SEQ ID NO: 10323 - DNA, 40 bp, Artificial Sequence
  Synthetic Oligonucleotide
caataatgtcctgtgtgcacagtgtaccttacgtttgctg

SEQ ID NO: 10324 - DNA, 40 bp, Artificial Sequence
  Synthetic Oligonucleotide
caaggcatgtcgttgcaagcctcgattccaaccacgtctg

SEQ ID NO: 10325 - DNA, 40 bp, Artificial Sequence
  Synthetic Oligonucleotide
atttttggccactcgatccgcctcgttttcttcgtctgcg

SEQ ID NO: 10326 - DNA, 40 bp, Artificial Sequence
  Synthetic Oligonucleotide
attgattcatattggtggcacactattgccttgaacttta

SEQ ID NO: 10327 - DNA, 40 bp, Artificial Sequence
  Synthetic Oligonucleotide
attgatccttattggtggcacactattgccttgaacttta

SEQ ID NO: 10328 - DNA, 40 bp, Artificial Sequence
  Synthetic Oligonucleotide
attctgtttttttaagttggcgaggtccctatactttggg

SEQ ID NO: 10329 - DNA, 40 bp, Artificial Sequence
  Synthetic Oligonucleotide
attctgttttttaagttggcgaggtcctctaacttttgag

SEQ ID NO: 10330 - DNA, 40 bp, Artificial Sequence
  Synthetic Oligonucleotide
attctgttttttaagttggcgaggtcccctaacttttggg

SEQ ID NO: 10331 - DNA, 40 bp, Artificial Sequence
  Synthetic Oligonucleotide
attccgtttagaagaatctgttggccactatgccatcaat

SEQ ID NO: 10332 - DNA, 40 bp, Artificial Sequence
  Synthetic Oligonucleotide
attccgcttagagaaatctgttggccactatgccatcaat

SEQ ID NO: 10333 - DNA, 40 bp, Artificial Sequence
  Synthetic Oligonucleotide
attcattccagcgacttcggtggtgtcctctccattacca

SEQ ID NO: 10334 - DNA, 40 bp, Artificial Sequence
  Synthetic Oligonucleotide
attaattccagcgactttcggtggtgtcctctcattacca

SEQ ID NO: 10335 - DNA, 40 bp, Artificial Sequence
  Synthetic Oligonucleotide
attaattccagcgacttctgtggtgtcctctccattacca

SEQ ID NO: 10336 - DNA, 40 bp, Artificial Sequence
  Synthetic Oligonucleotide
attaattccagcgacttcggtggtgtcctctctattacca

SEQ ID NO: 10337 - DNA, 40 bp, Artificial Sequence
  Synthetic Oligonucleotide
attaattccagcgacttcggtggtgtcctctccattatca

SEQ ID NO: 10338 - DNA, 40 bp, Artificial Sequence
  Synthetic Oligonucleotide
attaattccagcgacttcggtggtgtcctctccattaccc

SEQ ID NO: 10339 - DNA, 40 bp, Artificial Sequence
  Synthetic Oligonucleotide
attaattccagcgacttcgctggtgtcctctccattaccg

SEQ ID NO: 10340 - DNA, 40 bp, Artificial Sequence
  Synthetic Oligonucleotide
attaattccagcgacttaggtggtgtcctctccattacca

SEQ ID NO: 10341 - DNA, 40 bp, Artificial Sequence
  Synthetic Oligonucleotide
attaattcagcgacttcggtggtgtccctctcattaccca

SEQ ID NO: 10342 - DNA, 40 bp, Artificial Sequence
  Synthetic Oligonucleotide
attaatcccagcgacttcggcggtgtcctctccattacca

SEQ ID NO: 10343 - DNA, 40 bp, Artificial Sequence
  Synthetic Oligonucleotide
attaactccagtcgacttcggtggtgtcctctcattacca

SEQ ID NO: 10344 - DNA, 40 bp, Artificial Sequence
  Synthetic Oligonucleotide
atgttccagctgacgctctgacactatcatgacgtctcga

SEQ ID NO: 10345 - DNA, 40 bp, Artificial Sequence
  Synthetic Oligonucleotide
atgttccactgacgctctgacactatcatgacgtgctcga

SEQ ID NO: 10346 - DNA, 40 bp, Artificial Sequence
  Synthetic Oligonucleotide
atgtgtcatatatctgactgcagattttgtcatggcacta

SEQ ID NO: 10347 - DNA, 40 bp, Artificial Sequence
  Synthetic Oligonucleotide
atgtgtcatatatctgactacagattttgtcatggcactg

SEQ ID NO: 10348 - DNA, 40 bp, Artificial Sequence
  Synthetic Oligonucleotide
atgtgtcatatatctgactacaaattttgtcatggcacta

SEQ ID NO: 10349 - DNA, 40 bp, Artificial Sequence
  Synthetic Oligonucleotide
atgtccatgagtctctcggccactatccagttgacgctca

SEQ ID NO: 10350 - DNA, 40 bp, Artificial Sequence
  Synthetic Oligonucleotide
atgtatgaggtcctttgctgaactatcaccatttctggac

SEQ ID NO: 10351 - DNA, 40 bp, Artificial Sequence
  Synthetic Oligonucleotide
atggtttcttctcctgactacatgagattaataagcgcgc

SEQ ID NO: 10352 - DNA, 40 bp, Artificial Sequence
  Synthetic Oligonucleotide
atggttccatgagcttctggcactatccagctgacgctca

SEQ ID NO: 10353 - DNA, 40 bp, Artificial Sequence
  Synthetic Oligonucleotide
atggttcatgagcttctggcactatcccagttggcgctca

SEQ ID NO: 10354 - DNA, 40 bp, Artificial Sequence
  Synthetic Oligonucleotide
atggtggcttttaagcacttcttggtaacttggcagttac

SEQ ID NO: 10355 - DNA, 40 bp, Artificial Sequence
  Synthetic Oligonucleotide
atggtctatgctagctcgtgcactatccagttgacgctca

SEQ ID NO: 10356 - DNA, 40 bp, Artificial Sequence
  Synthetic Oligonucleotide
atggtccgtgagtcttctggcactatccagttgacgctca

SEQ ID NO: 10357 - DNA, 40 bp, Artificial Sequence
  Synthetic Oligonucleotide
atggtccgtgagcttctggcactatcccagttgacgctca

SEQ ID NO: 10358 - DNA, 40 bp, Artificial Sequence
  Synthetic Oligonucleotide
atggtcccatgagcttggcactatccccagttgacgctca

SEQ ID NO: 10359 - DNA, 40 bp, Artificial Sequence
  Synthetic Oligonucleotide
atggtcccatgagcttctggcactatccagctgacgctca

SEQ ID NO: 10360 - DNA, 40 bp, Artificial Sequence
  Synthetic Oligonucleotide
atggtccatgggcttctggcactattccagttgacgctca

SEQ ID NO: 10361 - DNA, 40 bp, Artificial Sequence
  Synthetic Oligonucleotide
atggtccatgggcttctggcaactatccagttgacgctca

SEQ ID NO: 10362 - DNA, 40 bp, Artificial Sequence
  Synthetic Oligonucleotide
atggtccatgagtcttctggcactgtccagttgacgctca

SEQ ID NO: 10363 - DNA, 40 bp, Artificial Sequence
  Synthetic Oligonucleotide
atggtccatgagtcttctggcactatccagttgacgccca

SEQ ID NO: 10364 - DNA, 40 bp, Artificial Sequence
  Synthetic Oligonucleotide
atggtccatgagtcttctggcactatccaattgacgctca

SEQ ID NO: 10365 - DNA, 40 bp, Artificial Sequence
  Synthetic Oligonucleotide
atggtccatgagtcttctggcactacccagttgacgctca

SEQ ID NO: 10366 - DNA, 40 bp, Artificial Sequence
  Synthetic Oligonucleotide
atggtccatgagtcttctggaactatccagttgacgctca

SEQ ID NO: 10367 - DNA, 40 bp, Artificial Sequence
  Synthetic Oligonucleotide
atggtccatgagtcttctcggcactatcagttgacgctca

SEQ ID NO: 10368 - DNA, 40 bp, Artificial Sequence
  Synthetic Oligonucleotide
atggtccatgaggtcttctggcactatcagttgacgctcg

SEQ ID NO: 10369 - DNA, 40 bp, Artificial Sequence
  Synthetic Oligonucleotide
atggtccatgagcttcttggcatctatccagttgacgcta

SEQ ID NO: 10370 - DNA, 40 bp, Artificial Sequence
  Synthetic Oligonucleotide
atggtccatgagcttctggcatctatccagctgacgctca

SEQ ID NO: 10371 - DNA, 40 bp, Artificial Sequence
  Synthetic Oligonucleotide
atggtccatgagcttctggcactatccaggttgacgctca

SEQ ID NO: 10372 - DNA, 40 bp, Artificial Sequence
  Synthetic Oligonucleotide
atggtccatgagcttctggcactactcctagtgacgctca

SEQ ID NO: 10373 - DNA, 40 bp, Artificial Sequence
  Synthetic Oligonucleotide
atggtccatgagcttctcggcactatccagtcgacgctca

SEQ ID NO: 10374 - DNA, 40 bp, Artificial Sequence
  Synthetic Oligonucleotide
atggtccatgagctactggcactatcccagttgacgctca

SEQ ID NO: 10375 - DNA, 40 bp, Artificial Sequence
  Synthetic Oligonucleotide
atggcccatgggcttctggcactatccagttggacgctca

SEQ ID NO: 10376 - DNA, 40 bp, Artificial Sequence
  Synthetic Oligonucleotide
atgcgaaacgctattttctgggaaccgcgtctcgagcgaa

SEQ ID NO: 10377 - DNA, 40 bp, Artificial Sequence
  Synthetic Oligonucleotide
atgcaaactgccgttttggcgctatccaaattttaggcta

SEQ ID NO: 10378 - DNA, 40 bp, Artificial Sequence
  Synthetic Oligonucleotide
atgactgcaggcatttgcctcgtgtttgtatcacgtggga

SEQ ID NO: 10379 - DNA, 40 bp, Artificial Sequence
  Synthetic Oligonucleotide
atgacctaccccatcgagcgagtctactctccatcaacgg

SEQ ID NO: 10380 - DNA, 40 bp, Artificial Sequence
  Synthetic Oligonucleotide
atgaactgtggatcgtttacctctggactacccggggcaa

SEQ ID NO: 10381 - DNA, 40 bp, Artificial Sequence
  Synthetic Oligonucleotide
atcttatccggctaggacgtctttcgtgcactatcacgat

SEQ ID NO: 10382 - DNA, 40 bp, Artificial Sequence
  Synthetic Oligonucleotide
atctccgtctaacacgtgcgctatcacggctttggttaga

SEQ ID NO: 10383 - DNA, 40 bp, Artificial Sequence
  Synthetic Oligonucleotide
atctccgtctaacacgtgcactatcacggctttagttagg

SEQ ID NO: 10384 - DNA, 40 bp, Artificial Sequence
  Synthetic Oligonucleotide
atcgtcgggccccttttgtgaaacttacatgaaagcgtac

SEQ ID NO: 10385 - DNA, 40 bp, Artificial Sequence
  Synthetic Oligonucleotide
atccgttctcgtataattcaggatggcttactatctagct

SEQ ID NO: 10386 - DNA, 40 bp, Artificial Sequence
  Synthetic Oligonucleotide
atccgtggtacgcctcgattccgcccatacatgcatgtaa

SEQ ID NO: 10387 - DNA, 40 bp, Artificial Sequence
  Synthetic Oligonucleotide
atccggaacgcctcgatcctcgcataatacgatacatctg

SEQ ID NO: 10388 - DNA, 40 bp, Artificial Sequence
  Synthetic Oligonucleotide
atccggaacgcctcaatcctcgcataatatgatacgtctg

SEQ ID NO: 10389 - DNA, 40 bp, Artificial Sequence
  Synthetic Oligonucleotide
atccgcctcgcttgtgcacaacacgcatcccgcgtctgcg

SEQ ID NO: 10390 - DNA, 40 bp, Artificial Sequence
  Synthetic Oligonucleotide
atccatggtacgcctcgattccgcccatacaagcatgtaa

SEQ ID NO: 10391 - DNA, 40 bp, Artificial Sequence
  Synthetic Oligonucleotide
atccatggtacgcctcgattccgaccatacatgcatgtaa

SEQ ID NO: 10392 - DNA, 40 bp, Artificial Sequence
  Synthetic Oligonucleotide
atccaaggtacgcctcgattccgcccatacatgcatgtaa

SEQ ID NO: 10393 - DNA, 40 bp, Artificial Sequence
  Synthetic Oligonucleotide
atcaccgctgggtgaggagtcgttgtgcgctatcacatct

SEQ ID NO: 10394 - DNA, 40 bp, Artificial Sequence
  Synthetic Oligonucleotide
atatggggctttaagcacttctcggtaactcggcagttac

SEQ ID NO: 10395 - DNA, 40 bp, Artificial Sequence
  Synthetic Oligonucleotide
atactgtagttggtcgttttcgcaggactacctggagtgg

SEQ ID NO: 10396 - DNA, 40 bp, Artificial Sequence
  Synthetic Oligonucleotide
agttttctcggatccaagcgcatatcctcctccgcctcgt

SEQ ID NO: 10397 - DNA, 40 bp, Artificial Sequence
  Synthetic Oligonucleotide
agttttctcggatccaaacgcatatccttctccgcctcgt

SEQ ID NO: 10398 - DNA, 40 bp, Artificial Sequence
  Synthetic Oligonucleotide
agttttctcggatccaaacgcatatcctccgccgcctcgt

SEQ ID NO: 10399 - DNA, 40 bp, Artificial Sequence
  Synthetic Oligonucleotide
agttttctcggatccaaacgcacatcctcctccgcctcgt

SEQ ID NO: 10400 - DNA, 40 bp, Artificial Sequence
  Synthetic Oligonucleotide
agtttcctcggatccaaacgcatatcctcctccgcctcgt

SEQ ID NO: 10401 - DNA, 40 bp, Artificial Sequence
  Synthetic Oligonucleotide
agttctagaacctgcctcaagccggcaatcacctcttctg

SEQ ID NO: 10402 - DNA, 40 bp, Artificial Sequence
  Synthetic Oligonucleotide
agtcgtttcttctctgactacatgagattaataaacgcgc

SEQ ID NO: 10403 - DNA, 40 bp, Artificial Sequence
  Synthetic Oligonucleotide
agtcattaatccttgttggactaccaccaaaaacgattag

SEQ ID NO: 10404 - DNA, 40 bp, Artificial Sequence
  Synthetic Oligonucleotide
agccgactcatcagggactaccctgtattcgagcaggcaa

SEQ ID NO: 10405 - DNA, 40 bp, Artificial Sequence
  Synthetic Oligonucleotide
agattctagattaaccgcctcggtcagctcagattgtgca

SEQ ID NO: 10406 - DNA, 40 bp, Artificial Sequence
  Synthetic Oligonucleotide
agatgggactacttgctcgactacgatcattgacgtcact

SEQ ID NO: 10407 - DNA, 40 bp, Artificial Sequence
  Synthetic Oligonucleotide
agactactccgatgggcaatcgtaacttaggagtcgccta

SEQ ID NO: 10408 - DNA, 40 bp, Artificial Sequence
  Synthetic Oligonucleotide
agaccggggcccgcctcaagctagctaccttcattgtctg

SEQ ID NO: 10409 - DNA, 40 bp, Artificial Sequence
  Synthetic Oligonucleotide
agaccggggcccgcctcaagctagctacctctattgtctg

SEQ ID NO: 10410 - DNA, 40 bp, Artificial Sequence
  Synthetic Oligonucleotide
agaccggggcccgcctcaagctagctacctccaatgtctg

SEQ ID NO: 10411 - DNA, 40 bp, Artificial Sequence
  Synthetic Oligonucleotide
agaccgggccccgctcaagctagtctactccacttgtctg

SEQ ID NO: 10412 - DNA, 40 bp, Artificial Sequence
  Synthetic Oligonucleotide
actctattccggtaagtcatcgtttaaccgtttgttgcaa

SEQ ID NO: 10413 - DNA, 40 bp, Artificial Sequence
  Synthetic Oligonucleotide
actctattccggtaagtcatcgtctaaccgtttgttgcaa

SEQ ID NO: 10414 - DNA, 40 bp, Artificial Sequence
  Synthetic Oligonucleotide
actaccttcgtccagcggtgcgctggggactttatccttc

SEQ ID NO: 10415 - DNA, 40 bp, Artificial Sequence
  Synthetic Oligonucleotide
actaccttcgtccagcggtgcgctgggaactttatccctc

SEQ ID NO: 10416 - DNA, 40 bp, Artificial Sequence
  Synthetic Oligonucleotide
actacccccccagtttagtccttcctaaagggccctttga

SEQ ID NO: 10417 - DNA, 40 bp, Artificial Sequence
  Synthetic Oligonucleotide
actaccccccagtttagtccttcctaaaaggggcctttga

SEQ ID NO: 10418 - DNA, 40 bp, Artificial Sequence
  Synthetic Oligonucleotide
actacagctttttcgtgttctccggaccacctgagatgac

SEQ ID NO: 10419 - DNA, 40 bp, Artificial Sequence
  Synthetic Oligonucleotide
acgtaccccgatagtcatcttcgctggaccacccgcgtta

SEQ ID NO: 10420 - DNA, 40 bp, Artificial Sequence
  Synthetic Oligonucleotide
acggtttcttctcctgactacatgagattaatgaacgcgc

SEQ ID NO: 10421 - DNA, 40 bp, Artificial Sequence
  Synthetic Oligonucleotide
acggtttcttctcctgactacatgagattaacaaacgcgc

SEQ ID NO: 10422 - DNA, 40 bp, Artificial Sequence
  Synthetic Oligonucleotide
acggtttcttctcctgactacataagattaataaacgcgc

SEQ ID NO: 10423 - DNA, 40 bp, Artificial Sequence
  Synthetic Oligonucleotide
acggttctcttcctcgactacatgagattaataaacgcgc

SEQ ID NO: 10424 - DNA, 40 bp, Artificial Sequence
  Synthetic Oligonucleotide
acggtaggcacctgctctatgtcgtggggagtaacaggtt

SEQ ID NO: 10425 - DNA, 40 bp, Artificial Sequence
  Synthetic Oligonucleotide
acgctttctcggatctatctcgtgcgcacatcctcataaa

SEQ ID NO: 10426 - DNA, 40 bp, Artificial Sequence
  Synthetic Oligonucleotide
acgctattccggtaagtcatcgtctaaccgtttgttgcaa

SEQ ID NO: 10427 - DNA, 40 bp, Artificial Sequence
  Synthetic Oligonucleotide
acctatcttgacgtctcttcggggactacccctgattctg

SEQ ID NO: 10428 - DNA, 40 bp, Artificial Sequence
  Synthetic Oligonucleotide
accgtcttgtgtgcgacacatgtctacgactcctcttcag

SEQ ID NO: 10429 - DNA, 40 bp, Artificial Sequence
  Synthetic Oligonucleotide
accggccacccgatagtcatcttcactggacaccgtgtta

SEQ ID NO: 10430 - DNA, 40 bp, Artificial Sequence
  Synthetic Oligonucleotide
accggcacccgatagtcatcttcacaggaccaccgtgtta

SEQ ID NO: 10431 - DNA, 40 bp, Artificial Sequence
  Synthetic Oligonucleotide
accgcgtgggtcggttttggtgggggactatccccttgta

SEQ ID NO: 10432 - DNA, 40 bp, Artificial Sequence
  Synthetic Oligonucleotide
accctatcttgacgtctcttcggggactaccccgattccg

SEQ ID NO: 10433 - DNA, 40 bp, Artificial Sequence
  Synthetic Oligonucleotide
accctatcttgacgtctcttcggggactaccccgatcctg

SEQ ID NO: 10434 - DNA, 40 bp, Artificial Sequence
  Synthetic Oligonucleotide
accctatcttgacgtctctccggggactaccccgattctg

SEQ ID NO: 10435 - DNA, 40 bp, Artificial Sequence
  Synthetic Oligonucleotide
acccggagcgcctcgatcctcgcataatatgatacgtctg

SEQ ID NO: 10436 - DNA, 40 bp, Artificial Sequence
  Synthetic Oligonucleotide
acagtgggttccatgctttaggcgccccttattttgggtc

SEQ ID NO: 10437 - DNA, 40 bp, Artificial Sequence
  Synthetic Oligonucleotide
acagcactggactctcagcgcgcgacccatctcgtcagtg

SEQ ID NO: 10438 - DNA, 40 bp, Artificial Sequence
  Synthetic Oligonucleotide
acagcactggaccctcagcgcgcgacccatctcgtcagta

SEQ ID NO: 10439 - DNA, 40 bp, Artificial Sequence
  Synthetic Oligonucleotide
acactattcggtaagtcatcgttcaacccgtttgttgcaa

SEQ ID NO: 10440 - DNA, 40 bp, Artificial Sequence
  Synthetic Oligonucleotide
acactattccggtgagtcatcgtctaaccgtttgttgcaa

SEQ ID NO: 10441 - DNA, 40 bp, Artificial Sequence
  Synthetic Oligonucleotide
acactattccggtaagtctcgttaaccgtttttgttgcaa

SEQ ID NO: 10442 - DNA, 40 bp, Artificial Sequence
  Synthetic Oligonucleotide
acactattccggtaagtcgtcgttcaaccgtttgttgcaa

SEQ ID NO: 10443 - DNA, 40 bp, Artificial Sequence
  Synthetic Oligonucleotide
acactattccggtaagtccatcgtttaccgtttgttgcaa

SEQ ID NO: 10444 - DNA, 40 bp, Artificial Sequence
  Synthetic Oligonucleotide
acactattccggtaagtcatcgtttgaccgtttgttgcag

SEQ ID NO: 10445 - DNA, 40 bp, Artificial Sequence
  Synthetic Oligonucleotide
acactattccggtaagtcatcgtttagccgcttgttgcaa

SEQ ID NO: 10446 - DNA, 40 bp, Artificial Sequence
  Synthetic Oligonucleotide
acactattccggtaagtcatcgtttaacggtttgttgcaa

SEQ ID NO: 10447 - DNA, 40 bp, Artificial Sequence
  Synthetic Oligonucleotide
acactattccggtaagtcatcgtttaaccgtttgttgcat

SEQ ID NO: 10448 - DNA, 40 bp, Artificial Sequence
  Synthetic Oligonucleotide
acactattccggtaagtcatcgtttaaccgtttgttgcac

SEQ ID NO: 10449 - DNA, 40 bp, Artificial Sequence
  Synthetic Oligonucleotide
acactattccggtaagtcatcgtttaaccgtttgtggcaa

SEQ ID NO: 10450 - DNA, 40 bp, Artificial Sequence
  Synthetic Oligonucleotide
acactattccggtaagtcatcgtttaaccgtttgatgcaa

SEQ ID NO: 10451 - DNA, 40 bp, Artificial Sequence
  Synthetic Oligonucleotide
acactattccggtaagtcatcgtttaaccgtctgtcgcaa

SEQ ID NO: 10452 - DNA, 40 bp, Artificial Sequence
  Synthetic Oligonucleotide
acactattccggtaagtcatcgtttaaccgcttgttggaa

SEQ ID NO: 10453 - DNA, 40 bp, Artificial Sequence
  Synthetic Oligonucleotide
acactattccggtaagtcatcgtttaaccgcttgttacaa

SEQ ID NO: 10454 - DNA, 40 bp, Artificial Sequence
  Synthetic Oligonucleotide
acactattccggtaagtcatcgtttaaccgctcgttgcaa

SEQ ID NO: 10455 - DNA, 40 bp, Artificial Sequence
  Synthetic Oligonucleotide
acactattccggtaagtcatcgttcacctgtttgtgacaa

SEQ ID NO: 10456 - DNA, 40 bp, Artificial Sequence
  Synthetic Oligonucleotide
acactattccggtaagtcatcgttcaaccgtttgttgtaa

SEQ ID NO: 10457 - DNA, 40 bp, Artificial Sequence
  Synthetic Oligonucleotide
acactattccggtaagtcatcgttaccgttacgtttgtca

SEQ ID NO: 10458 - DNA, 40 bp, Artificial Sequence
  Synthetic Oligonucleotide
acactattccggtaagtcatcgttaaccgttcgttgtcag

SEQ ID NO: 10459 - DNA, 40 bp, Artificial Sequence
  Synthetic Oligonucleotide
acactattccggtaagtcatcgtctgaccgtttgttgcaa

SEQ ID NO: 10460 - DNA, 40 bp, Artificial Sequence
  Synthetic Oligonucleotide
acactattccggtaagtcatcgtctaaccgcttgtcgcaa

SEQ ID NO: 10461 - DNA, 40 bp, Artificial Sequence
  Synthetic Oligonucleotide
acactattccggtaagtcatcggttaaccgtttgttgcaa

SEQ ID NO: 10462 - DNA, 40 bp, Artificial Sequence
  Synthetic Oligonucleotide
acactattccggtaagtcatcgcttaaccttttgttgcaa

SEQ ID NO: 10463 - DNA, 40 bp, Artificial Sequence
  Synthetic Oligonucleotide
acactattccggtaagtcatcgcctaaccgtttgttgcaa

SEQ ID NO: 10464 - DNA, 40 bp, Artificial Sequence
  Synthetic Oligonucleotide
acactattccggtaagtcatcctctaaccgtttgttgcaa

SEQ ID NO: 10465 - DNA, 40 bp, Artificial Sequence
  Synthetic Oligonucleotide
acactattccggtaagctcgttattacccgtttgttgcaa

SEQ ID NO: 10466 - DNA, 40 bp, Artificial Sequence
  Synthetic Oligonucleotide
acactattccggccttcaccgtcctcaatgcggacgaatg

SEQ ID NO: 10467 - DNA, 40 bp, Artificial Sequence
  Synthetic Oligonucleotide
acactattccggccttcaccgtcctcaatacggtcgaatg

SEQ ID NO: 10468 - DNA, 40 bp, Artificial Sequence
  Synthetic Oligonucleotide
acactattccggccttcaccgtcctcaatacggacgagtg

SEQ ID NO: 10469 - DNA, 40 bp, Artificial Sequence
  Synthetic Oligonucleotide
acactattccggccttcaccgacctcaatacggacgaatg

SEQ ID NO: 10470 - DNA, 40 bp, Artificial Sequence
  Synthetic Oligonucleotide
acactattccggccttcaccatcctcaatacggacgaatg

SEQ ID NO: 10471 - DNA, 40 bp, Artificial Sequence
  Synthetic Oligonucleotide
acactattccgataagtcatcgtttaaccgtttgttgcaa

SEQ ID NO: 10472 - DNA, 40 bp, Artificial Sequence
  Synthetic Oligonucleotide
acactattccgaccttcaccgtcctcaatacggacgaatg

SEQ ID NO: 10473 - DNA, 40 bp, Artificial Sequence
  Synthetic Oligonucleotide
acactattacggtaagtcatcgtttaaccgtttgttgcaa

SEQ ID NO: 10474 - DNA, 40 bp, Artificial Sequence
  Synthetic Oligonucleotide
acactatgccggtaagtcatcgtttaaccgtttgttgcaa

SEQ ID NO: 10475 - DNA, 40 bp, Artificial Sequence
  Synthetic Oligonucleotide
acactatccggtaagtcatcgtctaaccgtttcgttgcaa

SEQ ID NO: 10476 - DNA, 40 bp, Artificial Sequence
  Synthetic Oligonucleotide
acactatcccggcaagtcatcgtttaaccgtttgttgcaa

SEQ ID NO: 10477 - DNA, 40 bp, Artificial Sequence
  Synthetic Oligonucleotide
acaccaacactctgtgtacgctggactacccgcgtttcaa

SEQ ID NO: 10478 - DNA, 40 bp, Artificial Sequence
  Synthetic Oligonucleotide
aattcgccagtcacatcaactatgatgacgcttggctgga

SEQ ID NO: 10479 - DNA, 40 bp, Artificial Sequence
  Synthetic Oligonucleotide
aatggtccatgggcttctggcactatccagttgacgctca

SEQ ID NO: 10480 - DNA, 40 bp, Artificial Sequence
  Synthetic Oligonucleotide
aatggggcttttaagcacttctcggtacttgggcagttac

SEQ ID NO: 10481 - DNA, 40 bp, Artificial Sequence
  Synthetic Oligonucleotide
aatgcgccagccacatcaactatgatgacgcttgactgga

SEQ ID NO: 10482 - DNA, 40 bp, Artificial Sequence
  Synthetic Oligonucleotide
aatctgaccctgttatggactaccatatcagaaaggtact

SEQ ID NO: 10483 - DNA, 40 bp, Artificial Sequence
  Synthetic Oligonucleotide
aagcgtttgtatgtgtcgcaccgctattgcgaggtaacat

SEQ ID NO: 10484 - DNA, 40 bp, Artificial Sequence
  Synthetic Oligonucleotide
aagccggggcccgcctcaagctagctatctccattgtctg

SEQ ID NO: 10485 - DNA, 40 bp, Artificial Sequence
  Synthetic Oligonucleotide
aagatctcggatctggcgtactacttgaacaggttccttc

SEQ ID NO: 10486 - DNA, 40 bp, Artificial Sequence
  Synthetic Oligonucleotide
aagacctcggatctggcgtactacttggacaggttccttc

SEQ ID NO: 10487 - DNA, 40 bp, Artificial Sequence
  Synthetic Oligonucleotide
aactatccgtttgtccgtcctcttgtggtatcgcgcatgc

SEQ ID NO: 10488 - DNA, 40 bp, Artificial Sequence
  Synthetic Oligonucleotide
aactatccgtttgtccgtcctctagtggtattgcgcatgc

SEQ ID NO: 10489 - DNA, 40 bp, Artificial Sequence
  Synthetic Oligonucleotide
aaccggggccgcctcaagctagctacctccatttgtcctg

SEQ ID NO: 10490 - DNA, 40 bp, Artificial Sequence
  Synthetic Oligonucleotide
aaccggggcccgcctcaagtctagctacctccattgtctg

SEQ ID NO: 10491 - DNA, 40 bp, Artificial Sequence
  Synthetic Oligonucleotide
aaccgggccgctcaacgtctagctcacctccattgtcgtg

SEQ ID NO: 10492 - DNA, 40 bp, Artificial Sequence
  Synthetic Oligonucleotide
aaccgggccgcctcaacgctagctcacctccattgtcgtg

SEQ ID NO: 10493 - DNA, 40 bp, Artificial Sequence
  Synthetic Oligonucleotide
aaccgggcccgcctcaagtctagctacttccattgtcgtg

SEQ ID NO: 10494 - DNA, 40 bp, Artificial Sequence
  Synthetic Oligonucleotide
aaccgggccccgctcaacgctagctcacctccattgtctg

SEQ ID NO: 10495 - DNA, 40 bp, Artificial Sequence
  Synthetic Oligonucleotide
aacccgggggccgcctcaagctagctacctccattgtctg

SEQ ID NO: 10496 - DNA, 40 bp, Artificial Sequence
  Synthetic Oligonucleotide
aaccatccacatcgagcgaatcgtgggtacaagtggatta

SEQ ID NO: 10497 - DNA, 40 bp, Artificial Sequence
  Synthetic Oligonucleotide
aaatccgccttcgttcttccacgcaacgttgcagtctgcg

SEQ ID NO: 10498 - DNA, 40 bp, Artificial Sequence
  Synthetic Oligonucleotide
aaacggggccccgcttcaagctagctacctccattgtctg

SEQ ID NO: 10499 - DNA, 40 bp, Artificial Sequence
  Synthetic Oligonucleotide
aaacgggcccggcctcaacgctagctactccattcgtctg

SEQ ID NO: 10500 - DNA, 40 bp, Artificial Sequence
  Synthetic Oligonucleotide
aaacgagatctcatggcgcctcgggtccttccttcgactg

SEQ ID NO: 10501 - DNA, 40 bp, Artificial Sequence
  Synthetic Oligonucleotide
aaaccggtacgccttgtgtcgcccgtgtgttgcaaccaga

SEQ ID NO: 10502 - DNA, 40 bp, Artificial Sequence
  Synthetic Oligonucleotide
aaaccggggtcccgcctcaagctagctacctccatgtctg

SEQ ID NO: 10503 - DNA, 40 bp, Artificial Sequence
  Synthetic Oligonucleotide
aaaccgggggcccgcctcaagctagctacctccattgtcg

SEQ ID NO: 10504 - DNA, 40 bp, Artificial Sequence
  Synthetic Oligonucleotide
aaaccgggggcccgcctcaagctagctacctccatctctg

SEQ ID NO: 10505 - DNA, 40 bp, Artificial Sequence
  Synthetic Oligonucleotide
aaaccggggctcgcctcaagctagctacttccattgtctg

SEQ ID NO: 10506 - DNA, 40 bp, Artificial Sequence
  Synthetic Oligonucleotide
aaaccggggcctgcctcaagctagctacctccattatctg

SEQ ID NO: 10507 - DNA, 40 bp, Artificial Sequence
  Synthetic Oligonucleotide
aaaccggggccgcctcaagctagctacctccagttgtctg

SEQ ID NO: 10508 - DNA, 40 bp, Artificial Sequence
  Synthetic Oligonucleotide
aaaccggggcccgctcaacgctagctacctccattgtctg

SEQ ID NO: 10509 - DNA, 40 bp, Artificial Sequence
  Synthetic Oligonucleotide
aaaccggggcccgcctcgagttagctacctccattgtctg

SEQ ID NO: 10510 - DNA, 40 bp, Artificial Sequence
  Synthetic Oligonucleotide
aaaccggggcccgcctcaagctaggtacctccattgtctg

SEQ ID NO: 10511 - DNA, 40 bp, Artificial Sequence
  Synthetic Oligonucleotide
aaaccggggcccgcctcaagctagctatctccatcgtctg

SEQ ID NO: 10512 - DNA, 40 bp, Artificial Sequence
  Synthetic Oligonucleotide
aaaccggggcccgcctcaagctagctatatccattgtctg

SEQ ID NO: 10513 - DNA, 40 bp, Artificial Sequence
  Synthetic Oligonucleotide
aaaccggggcccgcctcaagctagctactcctattgtctg

SEQ ID NO: 10514 - DNA, 40 bp, Artificial Sequence
  Synthetic Oligonucleotide
aaaccggggcccgcctcaagctagctacctcctttgtccg

SEQ ID NO: 10515 - DNA, 40 bp, Artificial Sequence
  Synthetic Oligonucleotide
aaaccggggcccgcctcaagctagctacctcctattctcg

SEQ ID NO: 10516 - DNA, 40 bp, Artificial Sequence
  Synthetic Oligonucleotide
aaaccggggcccgcctcaagctagctacctccgttgtcta

SEQ ID NO: 10517 - DNA, 40 bp, Artificial Sequence
  Synthetic Oligonucleotide
aaaccggggcccgcctcaagctagctacctccatcatctg

SEQ ID NO: 10518 - DNA, 40 bp, Artificial Sequence
  Synthetic Oligonucleotide
aaaccggggcccgcctcaagctagcaacccccattgtctg

SEQ ID NO: 10519 - DNA, 40 bp, Artificial Sequence
  Synthetic Oligonucleotide
aaaccggggccccgcctcaagctagctactccactgtctg

SEQ ID NO: 10520 - DNA, 40 bp, Artificial Sequence
  Synthetic Oligonucleotide
aaaccgggcccgcctcaagtctagctacctccattgtcgg

SEQ ID NO: 10521 - skipped

SEQ ID NO: 10522 - DNA, 40 bp, Artificial Sequence
  Synthetic Oligonucleotide
aaaccgggcccgcctcaagccagcttacctccattctctg

SEQ ID NO: 10523 - DNA, 40 bp, Artificial Sequence
  Synthetic Oligonucleotide
aaaccgggacccgcctctagctagctacctccattgtctg

SEQ ID NO: 10524 - DNA, 40 bp, Artificial Sequence
  Synthetic Oligonucleotide
aaaccgggacccgcctcaagctagctacctccattgtttg

SEQ ID NO: 10525 - DNA, 40 bp, Artificial Sequence
  Synthetic Oligonucleotide
aaaccggagcccgcctcaagctagctacttccattgtctg

SEQ ID NO: 10526 - DNA, 40 bp, Artificial Sequence
  Synthetic Oligonucleotide
aaacccgggcccgcctcaagctagcaacctccattgtctg

SEQ ID NO: 10527 - DNA, 40 bp, Artificial Sequence
  Synthetic Oligonucleotide
aaaaccggggcccgcctcaagctactacctccattgtctg

SEQ ID NO: 10528 - RNA, 81 nt, Artificial Sequence
  Synthetic Oligonucleotide
gggaggacgaugcgggcgguuuucuucuccugacuacaugagauuaauaaacgcgccagacgacucgcugaggauccgaga

SEQ ID NO: 10529 - DNA, 81 bp, Artificial Sequence
  Synthetic Oligonucleotide
gggaggacgatgcgggcggttttcttctcctgactacatgagattaataaacgcgccagacgactcgctgaggatccgaga

SEQ ID NO: 10530 - RNA, 81 nt, Artificial Sequence
  Synthetic Oligonucleotide
gggaggacgaugcggcacuauccguuugucccguccucuugugguauugcgcaugccagacgacucgcugaggauccgaga

SEQ ID NO: 10531 - DNA, 81 bp, Artificial Sequence
  Synthetic Oligonucleotide
gggaggacgatgcggcactatccgtttgtcccgtcctcttgtggtattgcgcatgccagacgactcgctgaggatccgaga

SEQ ID NO: 10532 - RNA, 82 nt, Artificial Sequence
  Synthetic Oligonucleotide
gggaggacgaugcggcacuauccguuuugucccguccucuugugguauugcgcaugccagacgacucgcugaggauccgaga

SEQ ID NO: 10533 - DNA, 82 bp, Artificial Sequence
  Synthetic Oligonucleotide
gggaggacgatgcggcactatccgttttgtcccgtcctcttgtggtattgcgcatgccagacgactcgctgaggatccgaga

SEQ ID NO: 10534 - RNA, 82 nt, Artificial Sequence
  Synthetic Oligonucleotide
gggaggacgaugcggaaaccggggcccgccucaagucuagcuaccuccauugucgugcagacgacucgcugaggauccgaga

SEQ ID NO: 10535 - DNA, 82 bp, Artificial Sequence
  Synthetic Oligonucleotide
gggaggacgatgcggaaaccggggcccgcctcaagtctagctacctccattgtcgtgcagacgactcgctgaggatccgaga

SEQ ID NO: 10536 - RNA, 84 nt, Artificial Sequence
  Synthetic Oligonucleotide
gggaggacgaugcggaaaaccgggggccccgccucaaagcuagcuaccuccauugucugcagacgacucgcugaggauccgaga

SEQ ID NO: 10537 - DNA, 84 bp, Artificial Sequence
  Synthetic Oligonucleotide
gggaggacgatgcggaaaaccgggggccccgcctcaaagctagctacctccattgtctgcagacgactcgctgaggatccgaga

SEQ ID NO: 10538 - RNA, 82 nt, Artificial Sequence
  Synthetic Oligonucleotide
gggaggacgaugcggcgaccuauccguuuguccguccucuugugguauugcgcaugccagacgacucgcugaggauccgaga

SEQ ID NO: 10539 - DNA, 82 bp, Artificial Sequence
  Synthetic Oligonucleotide
gggaggacgatgcggcgacctatccgtttgtccgtcctcttgtggtattgcgcatgccagacgactcgctgaggatccgaga

SEQ ID NO: 10540 - RNA, 83 nt, Artificial Sequence
  Synthetic Oligonucleotide
gggaggacgaugcggguccaugguacgccucgauuuccgcccaucacaugcauuguaacagacgacucgcugaggauccgaga

SEQ ID NO: 10541 - DNA, 83 bp, Artificial Sequence
  Synthetic Oligonucleotide
gggaggacgatgcgggtccatggtacgcctcgatttccgcccatcacatgcattgtaacagacgactcgctgaggatccgaga

SEQ ID NO: 10542 - RNA, 81 nt, Artificial Sequence
  Synthetic Oligonucleotide
gggaggacgaugcggaaaccgggcccgccucaagucuagcuaccuccauugucgugcagacgacucgcugaggauccgaga

SEQ ID NO: 10543 - DNA, 81 bp, Artificial Sequence
  Synthetic Oligonucleotide
gggaggacgatgcggaaaccgggcccgcctcaagtctagctacctccattgtcgtgcagacgactcgctgaggatccgaga

SEQ ID NO: 10544 - RNA, 81 nt, Artificial Sequence
  Synthetic Oligonucleotide
gggaggacgaugcggaugguccaugagucuucucggcacuauccaguugacgcucacagacgacucgcugaggauccgaga

SEQ ID NO: 10545 - DNA, 81 bp, Artificial Sequence
  Synthetic Oligonucleotide
gggaggacgatgcggatggtccatgagtcttctcggcactatccagttgacgctcacagacgactcgctgaggatccgaga

SEQ ID NO: 10546 - RNA, 82 nt, Artificial Sequence
  Synthetic Oligonucleotide
gggaggacgaugcggaaaccggggcccgccucaagcuuagcuaccuccauuguccugcagacgacucgcugaggauccgaga

SEQ ID NO: 10547 - DNA, 82 bp, Artificial Sequence
  Synthetic Oligonucleotide
gggaggacgatgcggaaaccggggcccgcctcaagcttagctacctccattgtcctgcagacgactcgctgaggatccgaga

SEQ ID NO: 10548 - RNA, 83 nt, Artificial Sequence
  Synthetic Oligonucleotide
gggaggacgaugcgggacggguuuccuucuccugacuacaugagauuaauaaacgcgccagacgacucgcugaggauccgaga

SEQ ID NO: 10549 - DNA, 83 bp, Artificial Sequence
  Synthetic Oligonucleotide
gggaggacgatgcgggacgggtttccttctcctgactacatgagattaataaacgcgccagacgactcgctgaggatccgaga

SEQ ID NO: 10550 - RNA, 81 nt, Artificial Sequence
  Synthetic Oligonucleotide
gggaggacgaugcggcacuauccguuugucccguccucucgugguauugcgcaugccagacgacucgcugaggauccgaga

SEQ ID NO: 10551 - DNA, 81 bp, Artificial Sequence
  Synthetic Oligonucleotide
gggaggacgatgcggcactatccgtttgtcccgtcctctcgtggtattgcgcatgccagacgactcgctgaggatccgaga

SEQ ID NO: 10552 - RNA, 81 nt, Artificial Sequence
  Synthetic Oligonucleotide
gggaggacgaugcggcacuauccguuucguccguccucuugugguauugcgcaugccagacgacucgcugaggauccgaga

SEQ ID NO: 10553 - DNA, 81 bp, Artificial Sequence
  Synthetic Oligonucleotide
gggaggacgatgcggcactatccgtttcgtccgtcctcttgtggtattgcgcatgccagacgactcgctgaggatccgaga

SEQ ID NO: 10554 - RNA, 79 nt, Artificial Sequence
  Synthetic Oligonucleotide
gggaggacgaugcggcacuaucguuuguccguccucuugugguauugcgcaugccagacgacucgcugaggauccgaga

SEQ ID NO: 10555 - DNA, 79 bp, Artificial Sequence
  Synthetic Oligonucleotide
gggaggacgatgcggcactatcgtttgtccgtcctcttgtggtattgcgcatgccagacgactcgctgaggatccgaga

SEQ ID NO: 10556 - RNA, 84 nt, Artificial Sequence
  Synthetic Oligonucleotide
gggaggacgaugcgguaugggggcuuuuuaagcacuucucgguaaacuugggcaguuaccagacgacucgcugaggauccgaga

SEQ ID NO: 10557 - DNA, 84 bp, Artificial Sequence
  Synthetic Oligonucleotide
gggaggacgatgcggtatgggggctttttaagcacttctcggtaaacttgggcagttaccagacgactcgctgaggatccgaga

SEQ ID NO: 10558 - DNA, 66 bp, Artificial Sequence
  Synthetic Oligonucleotide
  misc_feature (19)..(48): n is a, c, g, or t
atccagagtgacgcagcannnnnnnnnnnnnnnnnnnnnnnnnnnnnntggacacggtggcttagt

SEQ ID NO: 10559 - DNA, 40 bp, Artificial Sequence
  Synthetic oligonucleotide
aagataatacattcatggtatggtcggggatcggggggga

SEQ ID NO: 10560 - DNA, 30 bp, Artificial Sequence
  Synthetic oligonucleotide
ttgttgtgttctctttttgtgttttcctat

SEQ ID NO: 10561 - DNA, 30 bp, Artificial Sequence
  Synthetic oligonucleotide
tcttatctgttgtgttttcctcttgtgtat

SEQ ID NO: 10562 - DNA, 34 bp, Artificial Sequence
  Synthetic oligonucleotide
gatactagaccaccacgtgtccatcagaaaagac

SEQ ID NO: 10563 - DNA, 29 bp, Artificial Sequence
  Synthetic oligonucleotide
tttgttgtgtaggtttactcccgtataaa

SEQ ID NO: 10564 - DNA, 30 bp, Artificial Sequence
  Synthetic oligonucleotide
cccctctcgctttctattcctttgtgccct

SEQ ID NO: 10565 - DNA, 30 bp, Artificial Sequence
  Synthetic oligonucleotide
ttccactttcccttcgttgtattctccttt

SEQ ID NO: 10566 - DNA, 40 bp, Artificial Sequence
  Synthetic oligonucleotide
cggtaaggagggtcaccgacgtcgcgccgttgctgcgtca

SEQ ID NO: 10567 - DNA, 30 bp, Artificial Sequence
  Synthetic oligonucleotide
tgatgtgtaggtttactcctctaccttgcg

SEQ ID NO: 10568 - DNA, 32 bp, Artificial Sequence
  Synthetic oligonucleotide
tttgttgtgtaggtttactcctctaccttgcg

SEQ ID NO: 10569 - DNA, 30 bp, Artificial Sequence
  Synthetic oligonucleotide
gccctattccctcgctttctccccttttgt

SEQ ID NO: 10570 - DNA, 30 bp, Artificial Sequence
  Synthetic oligonucleotide
cggtaaggagggtcaccgacgtcgcgccgt

SEQ ID NO: 10571 - DNA, 30 bp, Artificial Sequence
  Synthetic oligonucleotide
cccccctctgtctcttgtttctcttttcta

SEQ ID NO: 10572 - DNA, 40 bp, Artificial Sequence
  Synthetic oligonucleotide
gcattggtaggccggggggtcccgccccggttctggtgcg

SEQ ID NO: 10573 - DNA, 30 bp, Artificial Sequence
  Synthetic oligonucleotide
ctcgcagttaccgccttgtcatccaaatca

SEQ ID NO: 10574 - DNA, 28 bp, Artificial Sequence
  Synthetic oligonucleotide
ttgttgtgtaggtttactcccgtataaa

SEQ ID NO: 10575 - DNA, 40 bp, Artificial Sequence
  Synthetic oligonucleotide
aagataatacattcatggtatggtcggggatcggggagga

SEQ ID NO: 10576 - DNA, 30 bp, Artificial Sequence
  Synthetic oligonucleotide
atttaacgcagtttatccgttcacctaact

SEQ ID NO: 10577 - DNA, 40 bp, Artificial Sequence
  Synthetic oligonucleotide
gagccgcaggagttccgcaaagatagaagtgtgtgccgca

SEQ ID NO: 10578 - DNA, 40 bp, Artificial Sequence
  Synthetic oligonucleotide
aagataatacattcatggtatggtcggggatcggagggga

SEQ ID NO: 10579 - DNA, 40 bp, Artificial Sequence
  Synthetic oligonucleotide
aagataatacattcatggtatggtcggggatcgggaggga

SEQ ID NO: 10580 - DNA, 34 bp, Artificial Sequence
  Synthetic oligonucleotide
gatactagaccaccacgtgtccatcacaaaagac

SEQ ID NO: 10581 - DNA, 31 bp, Artificial Sequence
  Synthetic oligonucleotide
tttgttgtgttctctttttgtgttttcctat

SEQ ID NO: 10582 - DNA, 30 bp, Artificial Sequence
  Synthetic oligonucleotide
tattgagttgtgtattctttttggtgctcc

SEQ ID NO: 10583 - DNA, 30 bp, Artificial Sequence
  Synthetic oligonucleotide
ttatgtgtaggttcactcatatatttcttt

SEQ ID NO: 10584 - DNA, 35 bp, Artificial Sequence
  Synthetic oligonucleotide
aactacccaagtaactagcagtaggcgggtggtgg

SEQ ID NO: 10585 - DNA, 37 bp, Artificial Sequence
  Synthetic oligonucleotide
ttgttgtgttctctttttgtgttttcctcttgtgtat

SEQ ID NO: 10586 - DNA, 30 bp, Artificial Sequence
  Synthetic oligonucleotide
cccgcctgatccaaagtactgactctgtta

SEQ ID NO: 10587 - DNA, 29 bp, Artificial Sequence
  Synthetic oligonucleotide
tttgtgtaggtttactcctctaccttgcg

SEQ ID NO: 10588 - DNA, 40 bp, Artificial Sequence
  Synthetic oligonucleotide
aagataatacattcatggtatggtcggggatcgaggggga

SEQ ID NO: 10589 - DNA, 34 bp, Artificial Sequence
  Synthetic oligonucleotide
tgttttccttcttacctttatgctgcgtcactct

SEQ ID NO: 10590 - DNA, 25 bp, Artificial Sequence
  Synthetic oligonucleotide
cctatcgaaaacccccctcatcaca

SEQ ID NO: 10591 - DNA, 30 bp, Artificial Sequence
  Synthetic oligonucleotide
tgttttctctttctactcttcccccctctg

SEQ ID NO: 10592 - DNA, 30 bp, Artificial Sequence
  Synthetic oligonucleotide
tgatctgttgtgttttcctttgggttttct

SEQ ID NO: 10593 - DNA, 35 bp, Artificial Sequence
  Synthetic oligonucleotide
tgattaccaccaccgcgtccaaatacaaattcatc

SEQ ID NO: 10594 - DNA, 31 bp, Artificial Sequence
  Synthetic oligonucleotide
ttgttgtgtaggtttactcctctaccttgcg

SEQ ID NO: 10595 - DNA, 30 bp, Artificial Sequence
  Synthetic oligonucleotide
ctcttctctgccccctgtttttctatctct

SEQ ID NO: 10596 - DNA, 35 bp, Artificial Sequence
  Synthetic oligonucleotide
gatgttaggtcgaaattgccaagcccccggtccaa

SEQ ID NO: 10597 - DNA, 39 bp, Artificial Sequence
  Synthetic oligonucleotide
aagataatacattcatggtatggtcggggatcgggggga

SEQ ID NO: 10598 - DNA, 30 bp, Artificial Sequence
  Synthetic oligonucleotide
ttcccttgtttcctgttgtgttgtcctcct

SEQ ID NO: 10599 - DNA, 34 bp, Artificial Sequence
  Synthetic oligonucleotide
tctttcgtcttgttatgtattgctgcgtcactct

SEQ ID NO: 10600 - DNA, 40 bp, Artificial Sequence
  Synthetic oligonucleotide
aagataataaattcatggtatggtcggggatcggggggga

SEQ ID NO: 10601 - DNA, 35 bp, Artificial Sequence
  Synthetic oligonucleotide
accagaaagtcgcaccagactcagaatgccgcatg

SEQ ID NO: 10602 - DNA, 32 bp, Artificial Sequence
  Synthetic oligonucleotide
tttgttgtgtaggttcactcatatatttcttt

SEQ ID NO: 10603 - DNA, 30 bp, Artificial Sequence
  Synthetic oligonucleotide
gtgatgtatttgcctgtgtttatcgctttt

SEQ ID NO: 10604 - DNA, 30 bp, Artificial Sequence
  Synthetic oligonucleotide
tttctattcccccctgcccttttgtctcgc

SEQ ID NO: 10605 - DNA, 31 bp, Artificial Sequence
  Synthetic oligonucleotide
ggcgaaggaaggataacaagattcgggtgga

SEQ ID NO: 10606 - DNA, 40 bp, Artificial Sequence
  Synthetic oligonucleotide
aagataatacattcatggtatggtaggggatcggggggga

SEQ ID NO: 10607 - DNA, 30 bp, Artificial Sequence
  Synthetic oligonucleotide
tgtgcctgtttccttattgttgtgttttcc

SEQ ID NO: 10608 - DNA, 34 bp, Artificial Sequence
  Synthetic oligonucleotide
gatactagaccaccacgtgtccatgagaaaagac

SEQ ID NO: 10609 - DNA, 35 bp, Artificial Sequence
  Synthetic oligonucleotide
tatagtagcaggcagtgatgggtggttgcgggtta

SEQ ID NO: 10610 - DNA, 40 bp, Artificial Sequence
  Synthetic oligonucleotide
aagataatacattcatggtatggtcggggatcgggggtga

SEQ ID NO: 10611 - DNA, 39 bp, Artificial Sequence
  Synthetic oligonucleotide
agataatacattcatggtatggtcggggatcggggggga

SEQ ID NO: 10612 - DNA, 40 bp, Artificial Sequence
  Synthetic oligonucleotide
aagataatacattaatggtatggtcggggatcggggggga

SEQ ID NO: 10613 - DNA, 40 bp, Artificial Sequence
  Synthetic oligonucleotide
aagataatacattcatggtatggtcggggataggggggga

SEQ ID NO: 10614 - DNA, 30 bp, Artificial Sequence
  Synthetic oligonucleotide
tcttatctgttgtgttttcctcttatgtat

SEQ ID NO: 10615 - DNA, 30 bp, Artificial Sequence
  Synthetic oligonucleotide
ttgcgcttttgtgtaggtttactccctttt

SEQ ID NO: 10616 - DNA, 34 bp, Artificial Sequence
  Synthetic oligonucleotide
gatactacaccaccacgtgtccatcagaaaagac

SEQ ID NO: 10617 - DNA, 40 bp, Artificial Sequence
  Synthetic oligonucleotide
cgttagacgaggtcaaaagcgtagcgtagagtgaattgaa

SEQ ID NO: 10618 - DNA, 40 bp, Artificial Sequence
  Synthetic oligonucleotide
aagataatacattcattgtatggtcggggatcggggggga

SEQ ID NO: 10619 - DNA, 30 bp, Artificial Sequence
  Synthetic oligonucleotide
tgggagggtagtggtggcggtgggggaggg

SEQ ID NO: 10620 - DNA, 34 bp, Artificial Sequence
  Synthetic oligonucleotide
gatactagaccaccacgtgtccatcaaaaaagac

SEQ ID NO: 10621 - DNA, 31 bp, Artificial Sequence
  Synthetic oligonucleotide
acgatgcaggaaaaataagcatagagagtag

SEQ ID NO: 10622 - DNA, 30 bp, Artificial Sequence
  Synthetic oligonucleotide
tcttatctgttgtgttttcctcttgtatat

SEQ ID NO: 10623 - DNA, 30 bp, Artificial Sequence
  Synthetic oligonucleotide
tctttcttttgtgtagtcctcttttcttgt

SEQ ID NO: 10624 - DNA, 30 bp, Artificial Sequence
  Synthetic oligonucleotide
aggagaaggaagaagatcggcaagtgaaca

SEQ ID NO: 10625 - DNA, 30 bp, Artificial Sequence
  Synthetic oligonucleotide
cgatcagccgagaaagaaggaagagtggca

SEQ ID NO: 10626 - DNA, 30 bp, Artificial Sequence
  Synthetic oligonucleotide
cgaggaacaactcacagatagaaaaggagg

SEQ ID NO: 10627 - DNA, 30 bp, Artificial Sequence
  Synthetic oligonucleotide
acacacccggaagagagagcggaaaccgaa

SEQ ID NO: 10628 - DNA, 30 bp, Artificial Sequence
  Synthetic oligonucleotide
aggaaagaagaggaggtccgacacaccagg

SEQ ID NO: 10629 - DNA, 30 bp, Artificial Sequence
  Synthetic oligonucleotide
cgaaataaggaagaatcgagcaaggggtaa

SEQ ID NO: 10630 - DNA, 40 bp, Artificial Sequence
  Synthetic oligonucleotide
aagataatccattcatggtatggtcggggatcggggggga

SEQ ID NO: 10631 - DNA, 34 bp, Artificial Sequence
  Synthetic oligonucleotide
gatactagaccaccacgtgtccattagaaaagac

SEQ ID NO: 10632 - DNA, 30 bp, Artificial Sequence
  Synthetic oligonucleotide
gtgcgaggagagagagaagaaaggagggtg

SEQ ID NO: 10633 - DNA, 30 bp, Artificial Sequence
  Synthetic oligonucleotide
tcatatctgttgtgttttcctcttgtgtat

SEQ ID NO: 10634 - DNA, 30 bp, Artificial Sequence
  Synthetic oligonucleotide
tacttatcccctcatgataagtcgagtact

SEQ ID NO: 10635 - DNA, 30 bp, Artificial Sequence
  Synthetic oligonucleotide
cttctctatccagattgcccctttattctt

SEQ ID NO: 10636 - DNA, 40 bp, Artificial Sequence
  Synthetic oligonucleotide
aagataatacattcatggtatggtcgggtatcggggggga

SEQ ID NO: 10637 - DNA, 30 bp, Artificial Sequence
  Synthetic oligonucleotide
aggtgtagaagtcaatctgagaatcctaga

SEQ ID NO: 10638 - DNA, 30 bp, Artificial Sequence
  Synthetic oligonucleotide
cgagagaagtgaagtcgcattacggctaga

SEQ ID NO: 10639 - DNA, 30 bp, Artificial Sequence
  Synthetic oligonucleotide
caccgtgaagaaagggaacagaagaaagcg

SEQ ID NO: 10640 - DNA, 40 bp, Artificial Sequence
  Synthetic oligonucleotide
cggtaaggagggtcaccgacgtcgcgccgtttctgcgtca

SEQ ID NO: 10641 - DNA, 40 bp, Artificial Sequence
  Synthetic oligonucleotide
aagataatacattcatagtatggtcggggatcggggggga

SEQ ID NO: 10642 - DNA, 30 bp, Artificial Sequence
  Synthetic oligonucleotide
ggacgagaaggccagtaggagaagatcagg

SEQ ID NO: 10643 - DNA, 34 bp, Artificial Sequence
  Synthetic oligonucleotide
gatactagaccaccacgtggccatcagaaaagac

SEQ ID NO: 10644 - DNA, 35 bp, Artificial Sequence
  Synthetic oligonucleotide
caacaagctgggcgggcgagaaggcaaagagacag

SEQ ID NO: 10645 - DNA, 30 bp, Artificial Sequence
  Synthetic oligonucleotide
cgaggaggagaggtatacaaaattgaatag

SEQ ID NO: 10646 - DNA, 30 bp, Artificial Sequence
  Synthetic oligonucleotide
agatcgttggtgcgacttatcagggtgaat

SEQ ID NO: 10647 - DNA, 30 bp, Artificial Sequence
  Synthetic oligonucleotide
acagacgacaaggagaaagacgttcaagga

SEQ ID NO: 10648 - DNA, 30 bp, Artificial Sequence
  Synthetic oligonucleotide
gctggaaggaagggaagagaacacgcgaag

SEQ ID NO: 10649 - DNA, 30 bp, Artificial Sequence
  Synthetic oligonucleotide
cgggaagccaagaaaggaaagaacaatcgg

SEQ ID NO: 10650 - DNA, 30 bp, Artificial Sequence
  Synthetic oligonucleotide
cgtgtcaaggaaggtaaccagggagacgaa

SEQ ID NO: 10651 - DNA, 30 bp, Artificial Sequence
  Synthetic oligonucleotide
cgggcacacaagaagcaaagagaggatgca

SEQ ID NO: 10652 - DNA, 30 bp, Artificial Sequence
  Synthetic oligonucleotide
cgagaaaatagcaacaaggagaatctcgga

SEQ ID NO: 10653 - DNA, 39 bp, Artificial Sequence
  Synthetic oligonucleotide
aagaaatacattcatggtatggtcggggatcggggggga

SEQ ID NO: 10654 - DNA, 40 bp, Artificial Sequence
  Synthetic oligonucleotide
aagataatacattcatgttatggtcggggatcggggggga

SEQ ID NO: 10655 - DNA, 30 bp, Artificial Sequence
  Synthetic oligonucleotide
cgagaatctgaaaaacgaatcgcgaaacag

SEQ ID NO: 10656 - DNA, 30 bp, Artificial Sequence
  Synthetic oligonucleotide
tcacacaccgggattcggacctactacctt

SEQ ID NO: 10657 - DNA, 30 bp, Artificial Sequence
  Synthetic oligonucleotide
cgagaacttgcggccgatgaaacaaaagca

SEQ ID NO: 10658 - DNA, 40 bp, Artificial Sequence
  Synthetic oligonucleotide
cggtaaggagggtcaccgacgtcgcgcagttgctgcgtca

SEQ ID NO: 10659 - DNA, 40 bp, Artificial Sequence
  Synthetic oligonucleotide
aagataatacattcatggtatggtcggggatcgtggggga

SEQ ID NO: 10660 - DNA, 30 bp, Artificial Sequence
  Synthetic oligonucleotide
cggaaatagacagaacccgacaagaaagcg

SEQ ID NO: 10661 - DNA, 34 bp, Artificial Sequence
  Synthetic oligonucleotide
gatactagaccaccacgtgtccatccgaaaagac

SEQ ID NO: 10662 - DNA, 30 bp, Artificial Sequence
  Synthetic oligonucleotide
agacgaggcgaagctgggacgtgccgactg

SEQ ID NO: 10663 - DNA, 40 bp, Artificial Sequence
  Synthetic oligonucleotide
tggtaaggagggtcaccgacgtcgcgccgttgctgcgtca

SEQ ID NO: 10664 - DNA, 30 bp, Artificial Sequence
  Synthetic oligonucleotide
gacgaaagatcaactacggaatgcgacaga

SEQ ID NO: 10665 - DNA, 30 bp, Artificial Sequence
  Synthetic oligonucleotide
cgacgtaaggtggaagaaagaagcgaggat

SEQ ID NO: 10666 - DNA, 30 bp, Artificial Sequence
  Synthetic oligonucleotide
tcggaacgtaattcaggaccagagcacgca

SEQ ID NO: 10667 - DNA, 30 bp, Artificial Sequence
  Synthetic oligonucleotide
gggaacggtagaataacacttaagaacaga

SEQ ID NO: 10668 - DNA, 30 bp, Artificial Sequence
  Synthetic oligonucleotide
ctggacaaacagcgaaatgaagagggatcg

SEQ ID NO: 10669 - DNA, 30 bp, Artificial Sequence
  Synthetic oligonucleotide
cgacatacaagggagtgtaaggtagcgagt

SEQ ID NO: 10670 - DNA, 30 bp, Artificial Sequence
  Synthetic oligonucleotide
cgaggacagaaatcacaatcctcccaatcg

SEQ ID NO: 10671 - DNA, 30 bp, Artificial Sequence
  Synthetic oligonucleotide
caggcaaaaaccaggcggaggcgaaactcg

SEQ ID NO: 10672 - DNA, 39 bp, Artificial Sequence
  Synthetic oligonucleotide
aagataatacattctggtatggtcggggatcggggggga

SEQ ID NO: 10673 - DNA, 30 bp, Artificial Sequence
  Synthetic oligonucleotide
cgaagcaagcaaagaggggcaaggaagctc

SEQ ID NO: 10674 - DNA, 30 bp, Artificial Sequence
  Synthetic oligonucleotide
cgagatgaacaacaggaggatatcggcgag

SEQ ID NO: 10675 - DNA, 30 bp, Artificial Sequence
  Synthetic oligonucleotide
cgtaactagggcggagaaaagggtagcaaa

SEQ ID NO: 10676 - DNA, 30 bp, Artificial Sequence
  Synthetic oligonucleotide
aggcgtgaactacacacaatgagtgactaa

SEQ ID NO: 10677 - DNA, 30 bp, Artificial Sequence
  Synthetic oligonucleotide
agcgcaccacgaagacaaccacaattagca

SEQ ID NO: 10678 - DNA, 30 bp, Artificial Sequence
  Synthetic oligonucleotide
gaacgagcccaaaaggtacacccgaaaaga

SEQ ID NO: 10679 - DNA, 30 bp, Artificial Sequence
  Synthetic oligonucleotide
ataaccagaagacaggaagaacgagacgag

SEQ ID NO: 10680 - DNA, 30 bp, Artificial Sequence
  Synthetic oligonucleotide
tcgaggagcgaagtaagacgaaaaagggtg

SEQ ID NO: 10681 - DNA, 30 bp, Artificial Sequence
  Synthetic oligonucleotide
acgaccaggcgaggaaaaaaaaagctaggg

SEQ ID NO: 10682 - DNA, 30 bp, Artificial Sequence
  Synthetic oligonucleotide
cgagtagacaaggaagggatggcccacaag

SEQ ID NO: 10683 - DNA, 30 bp, Artificial Sequence
  Synthetic oligonucleotide
cggagcgagaatgggcccacgaactaacag

SEQ ID NO: 10684 - DNA, 30 bp, Artificial Sequence
  Synthetic oligonucleotide
cgagactaggcaaaatgggagacgtgagag

SEQ ID NO: 10685 - DNA, 30 bp, Artificial Sequence
  Synthetic oligonucleotide
cgaggtcaagaaggggcatagataagagcg

SEQ ID NO: 10686 - DNA, 30 bp, Artificial Sequence
  Synthetic oligonucleotide
ccgaaaacaggagccaaaagggtaagagga

SEQ ID NO: 10687 - DNA, 40 bp, Artificial Sequence
  Synthetic oligonucleotide
aagataagacattcatggtatggtcggggatcggggggga

SEQ ID NO: 10688 - DNA, 30 bp, Artificial Sequence
  Synthetic oligonucleotide
agactcgacattaggacgggaagcgaggag

SEQ ID NO: 10689 - DNA, 30 bp, Artificial Sequence
  Synthetic oligonucleotide
aggcaagaactaacaaggaacagatcatgg

SEQ ID NO: 10690 - DNA, 30 bp, Artificial Sequence
  Synthetic oligonucleotide
atgccgagagacgccgatctgcgtggttgg

SEQ ID NO: 10691 - DNA, 30 bp, Artificial Sequence
  Synthetic oligonucleotide
tacttattcttataagtcgagtacttccca

SEQ ID NO: 10692 - DNA, 30 bp, Artificial Sequence
  Synthetic oligonucleotide
cgacacaaaccagtgggaaagcactaagca

SEQ ID NO: 10693 - DNA, 30 bp, Artificial Sequence
  Synthetic oligonucleotide
cgaggcggggaatggagagagcaataccag

SEQ ID NO: 10694 - DNA, 30 bp, Artificial Sequence
  Synthetic oligonucleotide
acgagagaaacgaaacaggaaaggatgtct

SEQ ID NO: 10695 - DNA, 30 bp, Artificial Sequence
  Synthetic oligonucleotide
ggatggcgtcgacaaacctcaactccagaa

SEQ ID NO: 10696 - DNA, 30 bp, Artificial Sequence
  Synthetic oligonucleotide
ttacgataagaaaataaggaagataacaga

SEQ ID NO: 10697 - DNA, 30 bp, Artificial Sequence
  Synthetic oligonucleotide
acgtgaaaaaggacaaaatactgcgctaga

SEQ ID NO: 10698 - DNA, 30 bp, Artificial Sequence
  Synthetic oligonucleotide
cggagaaaggccgaagattagtgagcgatc

SEQ ID NO: 10699 - DNA, 30 bp, Artificial Sequence
  Synthetic oligonucleotide
cgggacatgcagaaaccagagaggaacgcg

SEQ ID NO: 10700 - DNA, 30 bp, Artificial Sequence
  Synthetic oligonucleotide
aaggtaggcgacccaaagaacacaagcagg

SEQ ID NO: 10701 - DNA, 30 bp, Artificial Sequence
  Synthetic oligonucleotide
tcgaagatgcgtagcgagggcaaggcgaat

SEQ ID NO: 10702 - DNA, 34 bp, Artificial Sequence
  Synthetic oligonucleotide
tattgagttgtgtattctttttgtgttttcctat

SEQ ID NO: 10703 - DNA, 30 bp, Artificial Sequence
  Synthetic oligonucleotide
cgacacatgatgataaggaaagtatggtaa

SEQ ID NO: 10704 - DNA, 30 bp, Artificial Sequence
  Synthetic oligonucleotide
aggaaagcaagtagaaggtaccgccgtcga

SEQ ID NO: 10705 - DNA, 30 bp, Artificial Sequence
  Synthetic oligonucleotide
ggagcgccaaaataaacgaatcctccatag

SEQ ID NO: 10706 - DNA, 30 bp, Artificial Sequence
  Synthetic oligonucleotide
acgaataggaacagaaaccgcatagggtag

SEQ ID NO: 10707 - DNA, 27 bp, Artificial Sequence
  Synthetic oligonucleotide
tgatgtgtaggtttactcccgtataaa

SEQ ID NO: 10708 - DNA, 30 bp, Artificial Sequence
  Synthetic oligonucleotide
ccgacaccagaactaggagcatcgagcaca

SEQ ID NO: 10709 - DNA, 30 bp, Artificial Sequence
  Synthetic oligonucleotide
acggactagagaagagaggtgtaacaatac

SEQ ID NO: 10710 - DNA, 30 bp, Artificial Sequence
  Synthetic oligonucleotide
cgggaaggcaaaaatgctaaggaaataacg

SEQ ID NO: 10711 - DNA, 30 bp, Artificial Sequence
  Synthetic oligonucleotide
agggaggggagggcagggaactacatggtg

SEQ ID NO: 10712 - DNA, 30 bp, Artificial Sequence
  Synthetic oligonucleotide
gggtgggcgcgggaggaggtgggggagggt

SEQ ID NO: 10713 - DNA, 30 bp, Artificial Sequence
  Synthetic oligonucleotide
tcggaagcccaggaaacagccaactaagca

SEQ ID NO: 10714 - DNA, 30 bp, Artificial Sequence
  Synthetic oligonucleotide
cgacagaagggaccattagcacccaacaga

SEQ ID NO: 10715 - DNA, 30 bp, Artificial Sequence
  Synthetic oligonucleotide
cgtaatacatcacaccgaaacaaggccaga

SEQ ID NO: 10716 - DNA, 40 bp, Artificial Sequence
  Synthetic oligonucleotide
aagataatacattcatggtatggtcggggatcggtgggga

SEQ ID NO: 10717 - DNA, 30 bp, Artificial Sequence
  Synthetic oligonucleotide
acgtacacgctaaaaacaaccgacttcgta

SEQ ID NO: 10718 - DNA, 30 bp, Artificial Sequence
  Synthetic oligonucleotide
aggcagtagccagaagagaatacgctcaag

SEQ ID NO: 10719 - DNA, 30 bp, Artificial Sequence
  Synthetic oligonucleotide
acgcaattaaacgagagaagtaagataggg

SEQ ID NO: 10720 - DNA, 30 bp, Artificial Sequence
  Synthetic oligonucleotide
cacggacagacaacgtaaaaaaaagcattg

SEQ ID NO: 10721 - DNA, 36 bp, Artificial Sequence
  Synthetic oligonucleotide
tcttatctgttgtgttctctttttgtgttttcctat

SEQ ID NO: 10722 - DNA, 30 bp, Artificial Sequence
  Synthetic oligonucleotide
acggacgcaagaggataataacagcatcgt

SEQ ID NO: 10723 - DNA, 30 bp, Artificial Sequence
  Synthetic oligonucleotide
ggagccaaggcgacatagagtaggtcaaca

SEQ ID NO: 10724 - DNA, 30 bp, Artificial Sequence
  Synthetic oligonucleotide
agatgtaccaagactagcaaaggagcgaga

SEQ ID NO: 10725 - DNA, 30 bp, Artificial Sequence
  Synthetic oligonucleotide
agggcaaacgagtaggaaaaaaggaggtgc

SEQ ID NO: 10726 - DNA, 30 bp, Artificial Sequence
  Synthetic oligonucleotide
gcgtggcagggatggcgagcgagaaaagtc

SEQ ID NO: 10727 - DNA, 30 bp, Artificial Sequence
  Synthetic oligonucleotide
agcagaagggcacgagatcgaagtcaacag

SEQ ID NO: 10728 - DNA, 30 bp, Artificial Sequence
  Synthetic oligonucleotide
aggaagaaccaacaactgaaacgtctagag

SEQ ID NO: 10729 - DNA, 30 bp, Artificial Sequence
  Synthetic oligonucleotide
aacgaggcagaaacaaaccaggccagcatg

SEQ ID NO: 10730 - DNA, 30 bp, Artificial Sequence
  Synthetic oligonucleotide
cgagagaggatagagacaggctagacagct

SEQ ID NO: 10731 - DNA, 30 bp, Artificial Sequence
  Synthetic oligonucleotide
agcctggcgccccggggagggtgaacctgt

SEQ ID NO: 10732 - DNA, 30 bp, Artificial Sequence
  Synthetic oligonucleotide
cggagaaggaaggggagtgtccattgccaa

SEQ ID NO: 10733 - DNA, 30 bp, Artificial Sequence
  Synthetic oligonucleotide
tggaaggcacggaaagaaagagggaagaca

SEQ ID NO: 10734 - DNA, 30 bp, Artificial Sequence
  Synthetic oligonucleotide
gacgtaaggaattgacagaagaggtgtgca

SEQ ID NO: 10735 - DNA, 34 bp, Artificial Sequence
  Synthetic oligonucleotide
gatactagaccaccacgtgtccatcagaaaggac

SEQ ID NO: 10736 - DNA, 30 bp, Artificial Sequence
  Synthetic oligonucleotide
agcgaaaaggggggaagttgatgaggaaag

SEQ ID NO: 10737 - DNA, 30 bp, Artificial Sequence
  Synthetic oligonucleotide
cgagaccagatagacagaagaattgcagcg

SEQ ID NO: 10738 - DNA, 28 bp, Artificial Sequence
  Synthetic oligonucleotide
ggagggagcgaaagaataaacgtggtgg

SEQ ID NO: 10739 - DNA, 30 bp, Artificial Sequence
  Synthetic oligonucleotide
gcggaaattagacagaagtagagaaggaaa

SEQ ID NO: 10740 - DNA, 30 bp, Artificial Sequence
  Synthetic oligonucleotide
tcgagtgcggaaaaggaaataaccaagtaa

SEQ ID NO: 10741 - DNA, 31 bp, Artificial Sequence
  Synthetic oligonucleotide
cgagagcgagcttatgggccgagaaacaaga

SEQ ID NO: 10742 - DNA, 30 bp, Artificial Sequence
  Synthetic oligonucleotide
cacggtcgaggaacagaggtcgaacgtcga

SEQ ID NO: 10743 - DNA, 30 bp, Artificial Sequence
  Synthetic oligonucleotide
agcatcgacaaggcgaaggaacatacgaag

SEQ ID NO: 10744 - DNA, 30 bp, Artificial Sequence
  Synthetic oligonucleotide
gtcaagcgagagtcgaagcagggggaaggg

SEQ ID NO: 10745 - DNA, 30 bp, Artificial Sequence
  Synthetic oligonucleotide
gcgaacggcgaccaccgaacccataacgtg

SEQ ID NO: 10746 - DNA, 30 bp, Artificial Sequence
  Synthetic oligonucleotide
aggcacagaggtagcaagagcaagttcaat

SEQ ID NO: 10747 - DNA, 30 bp, Artificial Sequence
  Synthetic oligonucleotide
cgacagaggatggcggtaaacagaatggca

SEQ ID NO: 10748 - DNA, 30 bp, Artificial Sequence
  Synthetic oligonucleotide
cacaacagagcgaacatgaggcaccgccga

SEQ ID NO: 10749 - DNA, 40 bp, Artificial Sequence
  Synthetic oligonucleotide
aagataatacattcatggtatggtcggggatcggggtgga

SEQ ID NO: 10750 - DNA, 30 bp, Artificial Sequence
  Synthetic oligonucleotide
cggaacaatacaggaaaatgacctacacta

SEQ ID NO: 10751 - DNA, 34 bp, Artificial Sequence
  Synthetic oligonucleotide
gatactagaccaccacgtgtccatcagaagagac

SEQ ID NO: 10752 - DNA, 30 bp, Artificial Sequence
  Synthetic oligonucleotide
agcagacgaaaagggaagacccaccgaaag

SEQ ID NO: 10753 - DNA, 30 bp, Artificial Sequence
  Synthetic oligonucleotide
tcgtacagagtagaaagaaggcagaacaag

SEQ ID NO: 10754 - DNA, 30 bp, Artificial Sequence
  Synthetic oligonucleotide
cctgaagaacagaaccgataatacacaacg

SEQ ID NO: 10755 - DNA, 30 bp, Artificial Sequence
  Synthetic oligonucleotide
cgaggaaagatcatgactccataccagatg

SEQ ID NO: 10756 - DNA, 31 bp, Artificial Sequence
  Synthetic oligonucleotide
tgcggagcggaggaaccaaggaagcacacat

SEQ ID NO: 10757 - DNA, 30 bp, Artificial Sequence
  Synthetic oligonucleotide
cggaactaacggaaactagaacatgcgcat

SEQ ID NO: 10758 - DNA, 30 bp, Artificial Sequence
  Synthetic oligonucleotide
aggatacgcgtggaagaagcacgagggaaa

SEQ ID NO: 10759 - DNA, 30 bp, Artificial Sequence
  Synthetic oligonucleotide
acgagaggaggtgcaaatgaagggacttaa

SEQ ID NO: 10760 - DNA, 31 bp, Artificial Sequence
  Synthetic oligonucleotide
acgacgtgaaagtcaggaaggaaggtcacca

SEQ ID NO: 10761 - DNA, 30 bp, Artificial Sequence
  Synthetic oligonucleotide
caagaggcgaacgaggtagaatgccccaga

SEQ ID NO: 10762 - DNA, 30 bp, Artificial Sequence
  Synthetic oligonucleotide
acgaccaagggaaggagagcggtagagccc

SEQ ID NO: 10763 - DNA, 30 bp, Artificial Sequence
  Synthetic oligonucleotide
aacgtagataaccaaaagagtgatacaaag

SEQ ID NO: 10764 - DNA, 30 bp, Artificial Sequence
  Synthetic oligonucleotide
gggagaacgtcgagggtgagtaacggcgag

SEQ ID NO: 10765 - DNA, 30 bp, Artificial Sequence
  Synthetic oligonucleotide
cgtggcggcaagagtagaagcgaaggaagg

SEQ ID NO: 10766 - DNA, 30 bp, Artificial Sequence
  Synthetic oligonucleotide
cgagaagaggacaaggagcacattacgaat

SEQ ID NO: 10767 - DNA, 30 bp, Artificial Sequence
  Synthetic oligonucleotide
cggcgagacaagcgaaatacacaaacagtt

SEQ ID NO: 10768 - DNA, 30 bp, Artificial Sequence
  Synthetic oligonucleotide
acgacagtatctaagagagaaccgaagtaa

SEQ ID NO: 10769 - DNA, 30 bp, Artificial Sequence
  Synthetic oligonucleotide
acggcgagaagtatgaagtcacatgaaaca

SEQ ID NO: 10770 - DNA, 30 bp, Artificial Sequence
  Synthetic oligonucleotide
cggtcaggcagaggaaacacacgaaatcca

SEQ ID NO: 10771 - DNA, 30 bp, Artificial Sequence
  Synthetic oligonucleotide
acgaagtatgtaaaaatgattcaagcacga

SEQ ID NO: 10772 - DNA, 30 bp, Artificial Sequence
  Synthetic oligonucleotide
cgaccaacctaccacgaacactcccctgga

SEQ ID NO: 10773 - DNA, 30 bp, Artificial Sequence
  Synthetic oligonucleotide
tagggataaagcgatcacgtcaaacagcag

SEQ ID NO: 10774 - DNA, 30 bp, Artificial Sequence
  Synthetic oligonucleotide
aggccgaggggaaagtcacgacaccattcg

SEQ ID NO: 10775 - DNA, 30 bp, Artificial Sequence
  Synthetic oligonucleotide
aggcgtaggcggacaaggtaagcgaaagtg

SEQ ID NO: 10776 - DNA, 30 bp, Artificial Sequence
  Synthetic oligonucleotide
cgaacaacgggtaacgaactccaccgagtg

SEQ ID NO: 10777 - DNA, 30 bp, Artificial Sequence
  Synthetic oligonucleotide
gggccaaggaaaaacacagaagagcaacaa

SEQ ID NO: 10778 - DNA, 30 bp, Artificial Sequence
  Synthetic oligonucleotide
ggaggagaggtaaggaacacaacagaacca

SEQ ID NO: 10779 - DNA, 40 bp, Artificial Sequence
  Synthetic oligonucleotide
aagataatacattcatggtatggtcggtgatcggggggga

SEQ ID NO: 10780 - DNA, 30 bp, Artificial Sequence
  Synthetic oligonucleotide
catcgacgtaaaatcagaaaggcgagagta

SEQ ID NO: 10781 - DNA, 30 bp, Artificial Sequence
  Synthetic oligonucleotide
cgaacaaatcgatacaatacggatcaaggg

SEQ ID NO: 10782 - DNA, 30 bp, Artificial Sequence
  Synthetic oligonucleotide
gcgcgaagaaacgaacgagataaaatcatg

SEQ ID NO: 10783 - DNA, 30 bp, Artificial Sequence
  Synthetic oligonucleotide
cgcaacagtggagaagacaacagaggacct

SEQ ID NO: 10784 - DNA, 30 bp, Artificial Sequence
  Synthetic oligonucleotide
gaacgaagaggaaggacaagatgctaaaaa

SEQ ID NO: 10785 - DNA, 30 bp, Artificial Sequence
  Synthetic oligonucleotide
gggcgagtgagtaagaaaggaaagcgtaca

SEQ ID NO: 10786 - DNA, 30 bp, Artificial Sequence
  Synthetic oligonucleotide
acgggaagcaaaaagccatcaccatcagta

SEQ ID NO: 10787 - DNA, 30 bp, Artificial Sequence
  Synthetic oligonucleotide
cgcatcaaggcgaagcaataagaagggacc

SEQ ID NO: 10788 - DNA, 30 bp, Artificial Sequence
  Synthetic oligonucleotide
cggacagcagagaaatgcgagtgagtctag

SEQ ID NO: 10789 - DNA, 30 bp, Artificial Sequence
  Synthetic oligonucleotide
cgacgacgaaaaaagtgatgacggattacg

SEQ ID NO: 10790 - DNA, 28 bp, Artificial Sequence
  Synthetic oligonucleotide
tgatctgttgtgttttcctcttgtgtat

SEQ ID NO: 10791 - DNA, 30 bp, Artificial Sequence
  Synthetic oligonucleotide
acaaggcatgaagatgtgacctaagagaaa

SEQ ID NO: 10792 - DNA, 30 bp, Artificial Sequence
  Synthetic oligonucleotide
aggagacctaccgaagtgtgagtatggcaa

SEQ ID NO: 10793 - DNA, 30 bp, Artificial Sequence
  Synthetic oligonucleotide
caacgaagagaatagcgaattgatacgaga

SEQ ID NO: 10794 - DNA, 30 bp, Artificial Sequence
  Synthetic oligonucleotide
agcgaaagggcgagccgaggagaaaggaga

SEQ ID NO: 10795 - DNA, 30 bp, Artificial Sequence
  Synthetic oligonucleotide
caacaggacacaaaagaatcgggatgcggc

SEQ ID NO: 10796 - DNA, 30 bp, Artificial Sequence
  Synthetic oligonucleotide
ggggaatgaaggtcaaggaacagcaacgag

SEQ ID NO: 10797 - DNA, 30 bp, Artificial Sequence
  Synthetic oligonucleotide
ccagagaagtcccggtgaaagaaggacgag

SEQ ID NO: 10798 - DNA, 30 bp, Artificial Sequence
  Synthetic oligonucleotide
cgagaactgcctgaaacgccaaacaccgag

SEQ ID NO: 10799 - DNA, 30 bp, Artificial Sequence
  Synthetic oligonucleotide
actagccgagccacaaaaaaaggcatagcg

SEQ ID NO: 10800 - DNA, 39 bp, Artificial Sequence
  Synthetic oligonucleotide
aatgaagtagggatatataaagattagctaagcgggtcg

SEQ ID NO: 10801 - DNA, 30 bp, Artificial Sequence
  Synthetic oligonucleotide
cgatacaggcacaaacgtgaaagctcagtg

SEQ ID NO: 10802 - DNA, 30 bp, Artificial Sequence
  Synthetic oligonucleotide
tcttatctgttgtgttttcctattgtgtat

SEQ ID NO: 10803 - DNA, 30 bp, Artificial Sequence
  Synthetic oligonucleotide
cggtaccgtacaaaggaataaggaagcatt

SEQ ID NO: 10804 - DNA, 30 bp, Artificial Sequence
  Synthetic oligonucleotide
gcacggcaacgtgagtatatcggcgcacaa

SEQ ID NO: 10805 - DNA, 30 bp, Artificial Sequence
  Synthetic oligonucleotide
gaggcgacaccacagggaggaacgtaagca

SEQ ID NO: 10806 - DNA, 40 bp, Artificial Sequence
  Synthetic oligonucleotide
aagataatacatgcatggtatggtcggggatcggggggga

SEQ ID NO: 10807 - DNA, 30 bp, Artificial Sequence
  Synthetic oligonucleotide
agtgaacatagagaggagatcgaagaagta

SEQ ID NO: 10808 - DNA, 30 bp, Artificial Sequence
  Synthetic oligonucleotide
aacggaaagatgagaggaacgcctaaatta

SEQ ID NO: 10809 - DNA, 30 bp, Artificial Sequence
  Synthetic oligonucleotide
ggagaggtgcccgtaagaaaagcgcgaaac

SEQ ID NO: 10810 - DNA, 30 bp, Artificial Sequence
  Synthetic oligonucleotide
cgaatcagagagaacaataaagtcaacgac

SEQ ID NO: 10811 - DNA, 30 bp, Artificial Sequence
  Synthetic oligonucleotide
cgcgggcgatgaaaagaaaagcgaaaggac

SEQ ID NO: 10812 - DNA, 30 bp, Artificial Sequence
  Synthetic oligonucleotide
aggtgagggaggaagaaacagagcgcctcc

SEQ ID NO: 10813 - DNA, 30 bp, Artificial Sequence
  Synthetic oligonucleotide
tagagcaggaaatgtagaagcgagggaaag

SEQ ID NO: 10814 - DNA, 30 bp, Artificial Sequence
  Synthetic oligonucleotide
aaaggcggtcacgaacaagcgagtaacgag

SEQ ID NO: 10815 - DNA, 30 bp, Artificial Sequence
  Synthetic oligonucleotide
acagaacaagtaacgtgccggagaaaggag

SEQ ID NO: 10816 - DNA, 30 bp, Artificial Sequence
  Synthetic oligonucleotide
acgaacaaggctggaaccgtgagcgaatag

SEQ ID NO: 10817 - DNA, 30 bp, Artificial Sequence
  Synthetic oligonucleotide
ggagaacgtacagcaaaagcaagaacaccg

SEQ ID NO: 10818 - DNA, 30 bp, Artificial Sequence
  Synthetic oligonucleotide
atcgagcgggagaatgaaataagatcgtcg

SEQ ID NO: 10819 - DNA, 30 bp, Artificial Sequence
  Synthetic oligonucleotide
gaccaacgacaggtgctacaaggaaaagtg

SEQ ID NO: 10820 - DNA, 30 bp, Artificial Sequence
  Synthetic oligonucleotide
agggagaagagtagagaagcaattgatcat

SEQ ID NO: 10821 - DNA, 30 bp, Artificial Sequence
  Synthetic oligonucleotide
acgtaaggcggacaaccaggatacgggaaa

SEQ ID NO: 10822 - DNA, 40 bp, Artificial Sequence
  Synthetic oligonucleotide
aagataatacattcatggtatggtctgggatcggggggga

SEQ ID NO: 10823 - DNA, 30 bp, Artificial Sequence
  Synthetic oligonucleotide
acgactcatgagagcgaggaaaaatgggga

SEQ ID NO: 10824 - DNA, 30 bp, Artificial Sequence
  Synthetic oligonucleotide
cgacgagagaacatggaggagccaagcata

SEQ ID NO: 10825 - DNA, 30 bp, Artificial Sequence
  Synthetic oligonucleotide
ccacggaaaaaagatcgagaacacaaacag

SEQ ID NO: 10826 - DNA, 30 bp, Artificial Sequence
  Synthetic oligonucleotide
acgtgaagtatcgtaaaaaggcggtgagag

SEQ ID NO: 10827 - DNA, 30 bp, Artificial Sequence
  Synthetic oligonucleotide
acgagtaggtcacacgaatcaagaagcccg

SEQ ID NO: 10828 - DNA, 30 bp, Artificial Sequence
  Synthetic oligonucleotide
aggggcacagtgaaaaacatgctaaccagg

SEQ ID NO: 10829 - DNA, 30 bp, Artificial Sequence
  Synthetic oligonucleotide
acggaggcaagaacaacctgcgtaacagtg

SEQ ID NO: 10830 - DNA, 30 bp, Artificial Sequence
  Synthetic oligonucleotide
acggaaccgaagaaaagtgaaccaaaggtg

SEQ ID NO: 10831 - DNA, 30 bp, Artificial Sequence
  Synthetic oligonucleotide
agcacgggaaaagataactgcgagaaccat

SEQ ID NO: 10832 - DNA, 30 bp, Artificial Sequence
  Synthetic oligonucleotide
acgaggcaggagaaccacacgtgaaccaaa

SEQ ID NO: 10833 - DNA, 30 bp, Artificial Sequence
  Synthetic oligonucleotide
cgtaaaaaaaacggcaaaatgacaagacaa

SEQ ID NO: 10834 - DNA, 30 bp, Artificial Sequence
  Synthetic oligonucleotide
gccgagggataccggaaacaaagggaagca

SEQ ID NO: 10835 - DNA, 30 bp, Artificial Sequence
  Synthetic oligonucleotide
agccaaaacagacaggaggatatagctgca

SEQ ID NO: 10836 - DNA, 30 bp, Artificial Sequence
  Synthetic oligonucleotide
aaaggcggaacaatagaaagaagaagcata

SEQ ID NO: 10837 - DNA, 30 bp, Artificial Sequence
  Synthetic oligonucleotide
aggcagaagggaataccgctgagtgagata

SEQ ID NO: 10838 - DNA, 31 bp, Artificial Sequence
  Synthetic oligonucleotide
ccacggaagacaaaaaaacgagtcaatacta

SEQ ID NO: 10839 - DNA, 30 bp, Artificial Sequence
  Synthetic oligonucleotide
tgaggcaaggtgacatcccgagaccacgta

SEQ ID NO: 10840 - DNA, 30 bp, Artificial Sequence
  Synthetic oligonucleotide
cgagaggatgacggccataaaacgaagaag

SEQ ID NO: 10841 - DNA, 30 bp, Artificial Sequence
  Synthetic oligonucleotide
cgtgtaacagggaagatcaaacacatgaag

SEQ ID NO: 10842 - DNA, 30 bp, Artificial Sequence
  Synthetic oligonucleotide
caaaagggtaaccaacagaaatagaggacg

SEQ ID NO: 10843 - DNA, 30 bp, Artificial Sequence
  Synthetic oligonucleotide
aacgacaaaagggcttaaagcgaaacctgg

SEQ ID NO: 10844 - DNA, 30 bp, Artificial Sequence
  Synthetic oligonucleotide
aggcaacgaaaagcctgaaaccaaggaaat

SEQ ID NO: 10845 - DNA, 30 bp, Artificial Sequence
  Synthetic oligonucleotide
atgctgaaagaagagcgagcagacagatgt

SEQ ID NO: 10846 - DNA, 30 bp, Artificial Sequence
  Synthetic oligonucleotide
cgcgccaaaataaaataaaaagtgatcaaa

SEQ ID NO: 10847 - DNA, 30 bp, Artificial Sequence
  Synthetic oligonucleotide
aggcgcgagagcccaaataactacgaaaca

SEQ ID NO: 10848 - DNA, 30 bp, Artificial Sequence
  Synthetic oligonucleotide
cgcgtaagcaaagttagaagaagagagcca

SEQ ID NO: 10849 - DNA, 30 bp, Artificial Sequence
  Synthetic oligonucleotide
cgaaaatggggaaagcattgcaaggtcaga

SEQ ID NO: 10850 - DNA, 30 bp, Artificial Sequence
  Synthetic oligonucleotide
ggccaaaatgaaccagaaagcatcgagcga

SEQ ID NO: 10851 - DNA, 30 bp, Artificial Sequence
  Synthetic oligonucleotide
tggacaagaaagagcaagggcaatggagga

SEQ ID NO: 10852 - DNA, 30 bp, Artificial Sequence
  Synthetic oligonucleotide
acgggcgcaaagaggcgaggcagaaagcta

SEQ ID NO: 10853 - DNA, 30 bp, Artificial Sequence
  Synthetic oligonucleotide
tcgacaaaagcaagagagagacaggcagcc

SEQ ID NO: 10854 - DNA, 30 bp, Artificial Sequence
  Synthetic oligonucleotide
gacgaaggataggcacgtgtcaaatcgaag

SEQ ID NO: 10855 - DNA, 30 bp, Artificial Sequence
  Synthetic oligonucleotide
agggaaccaacggacggaacccaatcgccg

SEQ ID NO: 10856 - DNA, 30 bp, Artificial Sequence
  Synthetic oligonucleotide
ccgcaatagggaaataggaaacacacaagg

SEQ ID NO: 10857 - DNA, 30 bp, Artificial Sequence
  Synthetic oligonucleotide
gggagagtaaggcgacttggaaaaagcagg

SEQ ID NO: 10858 - DNA, 30 bp, Artificial Sequence
  Synthetic oligonucleotide
agggaaagcggaatgaggcaagtagcagaa

SEQ ID NO: 10859 - DNA, 30 bp, Artificial Sequence
  Synthetic oligonucleotide
cgtggaaaccagcaaataagcgaggaggaa

SEQ ID NO: 10860 - DNA, 30 bp, Artificial Sequence
  Synthetic oligonucleotide
agaggactgggctggaataacgcgtcgaca

SEQ ID NO: 10861 - DNA, 30 bp, Artificial Sequence
  Synthetic oligonucleotide
caggacaggaaacggagtaacaagcaggca

SEQ ID NO: 10862 - DNA, 30 bp, Artificial Sequence
  Synthetic oligonucleotide
cgaaaggggacggcaggcaaatagctcaga

SEQ ID NO: 10863 - DNA, 30 bp, Artificial Sequence
  Synthetic oligonucleotide
acggagttagaaacgaaacaatgagtcgga

SEQ ID NO: 10864 - DNA, 30 bp, Artificial Sequence
  Synthetic oligonucleotide
aaggcaacaaaaggcatgagttcaagagta

SEQ ID NO: 10865 - DNA, 30 bp, Artificial Sequence
  Synthetic oligonucleotide
aggaaatgagagctgtcgataaaggaacag

SEQ ID NO: 10866 - DNA, 30 bp, Artificial Sequence
  Synthetic oligonucleotide
cgagccgtcggagggaaaaagctaagggag

SEQ ID NO: 10867 - DNA, 30 bp, Artificial Sequence
  Synthetic oligonucleotide
aaggagcaaaggttgtaacgaccccagacg

SEQ ID NO: 10868 - DNA, 30 bp, Artificial Sequence
  Synthetic oligonucleotide
gcgatcgtgaggcgaggaaaacacaacccg

SEQ ID NO: 10869 - DNA, 30 bp, Artificial Sequence
  Synthetic oligonucleotide
agcgagggagtcatggagaaagcatagatg

SEQ ID NO: 10870 - DNA, 30 bp, Artificial Sequence
  Synthetic oligonucleotide
cgataaaatagagaccaaacaacttgacat

SEQ ID NO: 10871 - DNA, 30 bp, Artificial Sequence
  Synthetic oligonucleotide
acgaaagcaaggcgctagggagccgaacaa

SEQ ID NO: 10872 - DNA, 30 bp, Artificial Sequence
  Synthetic oligonucleotide
ggcaaatccaagagaaagtgtgggcgacaa

SEQ ID NO: 10873 - DNA, 30 bp, Artificial Sequence
  Synthetic oligonucleotide
acgtgcaaatgtaccgagataggcgaggaa

SEQ ID NO: 10874 - DNA, 30 bp, Artificial Sequence
  Synthetic oligonucleotide
gacggtaactagaggcaacgaaacggcaca

SEQ ID NO: 10875 - DNA, 30 bp, Artificial Sequence
  Synthetic oligonucleotide
tcgggcacaagagatcgacaaggtgcgaca

SEQ ID NO: 10876 - DNA, 30 bp, Artificial Sequence
  Synthetic oligonucleotide
cgactaaagggaaatcgggagtaaaggaca

SEQ ID NO: 10877 - DNA, 30 bp, Artificial Sequence
  Synthetic oligonucleotide
aaggaacaggaaaccgaaaaaccaaagcca

SEQ ID NO: 10878 - DNA, 30 bp, Artificial Sequence
  Synthetic oligonucleotide
acgaatataatccatcacaaaggcaaggca

SEQ ID NO: 10879 - DNA, 30 bp, Artificial Sequence
  Synthetic oligonucleotide
aagcgagtcaggataaaaccagccgaaaga

SEQ ID NO: 10880 - DNA, 30 bp, Artificial Sequence
  Synthetic oligonucleotide
ccaaaaaacaagtcgaatatgtcacacaga

SEQ ID NO: 10881 - DNA, 30 bp, Artificial Sequence
  Synthetic oligonucleotide
gcgggagagaaagttacggactggaggaga

SEQ ID NO: 10882 - DNA, 30 bp, Artificial Sequence
  Synthetic oligonucleotide
cgaaaccacaaaggtcatcccggaagccga

SEQ ID NO: 10883 - DNA, 30 bp, Artificial Sequence
  Synthetic oligonucleotide
acgagaaaagtagcagcctcataacaggga

SEQ ID NO: 10884 - DNA, 30 bp, Artificial Sequence
  Synthetic oligonucleotide
acggagcgaaacacagtggaaagaagatta

SEQ ID NO: 10885 - DNA, 38 bp, Artificial Sequence
  Synthetic oligonucleotide
acatacacgcgacgacacgaggacaacgacatatgaac

SEQ ID NO: 10886 - DNA, 30 bp, Artificial Sequence
  Synthetic oligonucleotide
atgccgtaaaaaaacaaaaataaactcagc

SEQ ID NO: 10887 - DNA, 30 bp, Artificial Sequence
  Synthetic oligonucleotide
acgcgagggaacaactgagataataagtgc

SEQ ID NO: 10888 - DNA, 30 bp, Artificial Sequence
  Synthetic oligonucleotide
gcgaaagccgaccgaacgatgaaacaacag

SEQ ID NO: 10889 - DNA, 30 bp, Artificial Sequence
  Synthetic oligonucleotide
agcagggccagaagctaagacacaaggatg

SEQ ID NO: 10890 - DNA, 30 bp, Artificial Sequence
  Synthetic oligonucleotide
acggtaagttactgaaagtgaggggcgagt

SEQ ID NO: 10891 - DNA, 30 bp, Artificial Sequence
  Synthetic oligonucleotide
ccgatccgaaaacagactagcgcgcaaaaa

SEQ ID NO: 10892 - DNA, 30 bp, Artificial Sequence
  Synthetic oligonucleotide
acgagacactcaccactagaccatgcaaaa

SEQ ID NO: 10893 - DNA, 30 bp, Artificial Sequence
  Synthetic oligonucleotide
cgaggcgaagcaaagttaaatgtcttcaaa

SEQ ID NO: 10894 - DNA, 30 bp, Artificial Sequence
  Synthetic oligonucleotide
cggaaaccacgacgagaaaatataccgaaa

SEQ ID NO: 10895 - DNA, 30 bp, Artificial Sequence
  Synthetic oligonucleotide
ggacgagggagatagcaaaagcgcatgtaa

SEQ ID NO: 10896 - DNA, 30 bp, Artificial Sequence
  Synthetic oligonucleotide
acgagaccgacaagccacagggctaagcca

SEQ ID NO: 10897 - DNA, 30 bp, Artificial Sequence
  Synthetic oligonucleotide
acaacaacgaatacaatgcgtaagagtgca

SEQ ID NO: 10898 - DNA, 30 bp, Artificial Sequence
  Synthetic oligonucleotide
gctcaagtaggcgactattaaagacagaga

SEQ ID NO: 10899 - DNA, 30 bp, Artificial Sequence
  Synthetic oligonucleotide
cgatagctacgaggacgaccgaaagagaga

SEQ ID NO: 10900 - DNA, 30 bp, Artificial Sequence
  Synthetic oligonucleotide
accgagcgcaggggaagaaggagggtgaga

SEQ ID NO: 10901 - DNA, 30 bp, Artificial Sequence
  Synthetic oligonucleotide
aggtggtaggacaaaaagtagtatacacga

SEQ ID NO: 10902 - DNA, 30 bp, Artificial Sequence
  Synthetic oligonucleotide
aggtataagaagcgagcagtgagagatcga

SEQ ID NO: 10903 - DNA, 30 bp, Artificial Sequence
  Synthetic oligonucleotide
gtgagggggttaggagaaagatgaacagga

SEQ ID NO: 10904 - DNA, 40 bp, Artificial Sequence
  Synthetic oligonucleotide
aagataatacattcatggtatggtcggggatctgggggga

SEQ ID NO: 10905 - DNA, 30 bp, Artificial Sequence
  Synthetic oligonucleotide
caaggcaggaaatcagaaagaacaacgtga

SEQ ID NO: 10906 - DNA, 30 bp, Artificial Sequence
  Synthetic oligonucleotide
cgagacacagaagatgtaaagatatggtga

SEQ ID NO: 10907 - DNA, 31 bp, Artificial Sequence
  Synthetic oligonucleotide
acataggtaaagacaagttaaggatcgagta

SEQ ID NO: 10908 - DNA, 30 bp, Artificial Sequence
  Synthetic oligonucleotide
cggacgaataagggagcacgggagatctac

SEQ ID NO: 10909 - DNA, 30 bp, Artificial Sequence
  Synthetic oligonucleotide
cgagaaagggcacagatcaggacttaaggc

SEQ ID NO: 10910 - DNA, 30 bp, Artificial Sequence
  Synthetic oligonucleotide
gtaacgtagagagggaacagggagtcaaag

SEQ ID NO: 10911 - DNA, 30 bp, Artificial Sequence
  Synthetic oligonucleotide
tcgtaggggccaaagaggtaaagtaacgag

SEQ ID NO: 10912 - DNA, 30 bp, Artificial Sequence
  Synthetic oligonucleotide
gagaccgacgagagggcagaataccaatag

SEQ ID NO: 10913 - DNA, 30 bp, Artificial Sequence
  Synthetic oligonucleotide
caggcatgacaagagggcgagtccactacg

SEQ ID NO: 10914 - DNA, 30 bp, Artificial Sequence
  Synthetic oligonucleotide
caagcaacaaggaaataaatagaagaggcg

SEQ ID NO: 10915 - DNA, 30 bp, Artificial Sequence
  Synthetic oligonucleotide
cgagctacaacgtaacctcataaataggcg

SEQ ID NO: 10916 - DNA, 30 bp, Artificial Sequence
  Synthetic oligonucleotide
agcgaggagaatgcaaatatggagatatcg

SEQ ID NO: 10917 - DNA, 30 bp, Artificial Sequence
  Synthetic oligonucleotide
gggaagcgataacgcaaaaaggtagaatgg

SEQ ID NO: 10918 - DNA, 30 bp, Artificial Sequence
  Synthetic oligonucleotide
acgatgggcctaaagtcaaagtagaagatg

SEQ ID NO: 10919 - DNA, 30 bp, Artificial Sequence
  Synthetic oligonucleotide
cgaggagtaggacaagtcaaaagctcaaat

SEQ ID NO: 10920 - DNA, 30 bp, Artificial Sequence
  Synthetic oligonucleotide
acgagaaacaacactcaacttatcaagcat

SEQ ID NO: 10921 - DNA, 30 bp, Artificial Sequence
  Synthetic oligonucleotide
cggtccgaaacccagagagcagtccaacgt

SEQ ID NO: 10922 - DNA, 30 bp, Artificial Sequence
  Synthetic oligonucleotide
ccaggagggcacagctccgacaccacaaca

SEQ ID NO: 10923 - DNA, 30 bp, Artificial Sequence
  Synthetic oligonucleotide
caacgactaagaaagactcggacacaatca

SEQ ID NO: 10924 - DNA, 30 bp, Artificial Sequence
  Synthetic oligonucleotide
cgaagaaaataagttcaggtgataagaaga

SEQ ID NO: 10925 - DNA, 30 bp, Artificial Sequence
  Synthetic oligonucleotide
agaggagagcaaatcaacggggtgagcaga

SEQ ID NO: 10926 - DNA, 30 bp, Artificial Sequence
  Synthetic oligonucleotide
acgaggagggcgaacggaccatattgagta

SEQ ID NO: 10927 - DNA, 30 bp, Artificial Sequence
  Synthetic oligonucleotide
gaagacaaacaacaagagaacaatgcaaac

SEQ ID NO: 10928 - DNA, 34 bp, Artificial Sequence
  Synthetic oligonucleotide
gatactagaccaccaagtgtccatcagaaaagac

SEQ ID NO: 10929 - DNA, 31 bp, Artificial Sequence
  Synthetic oligonucleotide
acgggagtcaagtagcaaaaggcaatgaagc

SEQ ID NO: 10930 - DNA, 30 bp, Artificial Sequence
  Synthetic oligonucleotide
tggacacagacaacgaacgatacgcccaag

SEQ ID NO: 10931 - DNA, 30 bp, Artificial Sequence
  Synthetic oligonucleotide
gacgggaaaactcaatagacaatacggaag

SEQ ID NO: 10932 - DNA, 30 bp, Artificial Sequence
  Synthetic oligonucleotide
gaacagcgtgaaaacagaggaggccaacag

SEQ ID NO: 10933 - DNA, 30 bp, Artificial Sequence
  Synthetic oligonucleotide
acgaggggtgtacaaaaagaatgtatggag

SEQ ID NO: 10934 - DNA, 30 bp, Artificial Sequence
  Synthetic oligonucleotide
gccagaagcgaacacacaaccagatatgag

SEQ ID NO: 10935 - DNA, 30 bp, Artificial Sequence
  Synthetic oligonucleotide
acaactcacgggaggagaacaaacagaacg

SEQ ID NO: 10936 - DNA, 30 bp, Artificial Sequence
  Synthetic oligonucleotide
tgaaagagaaataagccgagcacgacggcg

SEQ ID NO: 10937 - DNA, 30 bp, Artificial Sequence
  Synthetic oligonucleotide
aagggtgctcgccgagaacaagaaggaagg

SEQ ID NO: 10938 - DNA, 30 bp, Artificial Sequence
  Synthetic oligonucleotide
aatcgggggagccaaggaacgaagaacagg

SEQ ID NO: 10939 - DNA, 30 bp, Artificial Sequence
  Synthetic oligonucleotide
cgagaggttgcgaagaatagggatgctcgg

SEQ ID NO: 10940 - DNA, 30 bp, Artificial Sequence
  Synthetic oligonucleotide
cgcgaggaaagataaagctcaagctcgggg

SEQ ID NO: 10941 - DNA, 30 bp, Artificial Sequence
  Synthetic oligonucleotide
agggagagtagaagcgaagagtccggattg

SEQ ID NO: 10942 - DNA, 30 bp, Artificial Sequence
  Synthetic oligonucleotide
acgagtagaaagggaggaatacggtacaat

SEQ ID NO: 10943 - DNA, 30 bp, Artificial Sequence
  Synthetic oligonucleotide
cgaggtctcgaaaataagagcaaacatggt

SEQ ID NO: 10944 - DNA, 30 bp, Artificial Sequence
  Synthetic oligonucleotide
agagactaaccgacaacatgaacaacaaaa

SEQ ID NO: 10945 - DNA, 30 bp, Artificial Sequence
  Synthetic oligonucleotide
aggacaaacagaacatagtgcgaggcgaaa

SEQ ID NO: 10946 - DNA, 30 bp, Artificial Sequence
  Synthetic oligonucleotide
tcaacagaggatgcagtaataaagccgcaa

SEQ ID NO: 10947 - DNA, 30 bp, Artificial Sequence
  Synthetic oligonucleotide
cttagggacaaaggcgaacagggagtacca

SEQ ID NO: 10948 - DNA, 30 bp, Artificial Sequence
  Synthetic oligonucleotide
cgcagtgggagaatggggaacaggcaagca

SEQ ID NO: 10949 - DNA, 30 bp, Artificial Sequence
  Synthetic oligonucleotide
aaggagaacgagtagatgagattcaatcga

SEQ ID NO: 10950 - DNA, 30 bp, Artificial Sequence
  Synthetic oligonucleotide
aggaaacaagactagtgaattaagcccgga

SEQ ID NO: 10951 - DNA, 30 bp, Artificial Sequence
  Synthetic oligonucleotide
aggcaagccgagcgaaacgaaagcggccta

SEQ ID NO: 10952 - DNA, 30 bp, Artificial Sequence
  Synthetic oligonucleotide
ccgacggaaggaaagcgcaaacacaagaac

SEQ ID NO: 10953 - DNA, 30 bp, Artificial Sequence
  Synthetic oligonucleotide
tgcgcataaaataagaaaagaggggtgcac

SEQ ID NO: 10954 - DNA, 34 bp, Artificial Sequence
  Synthetic oligonucleotide
gatactagaccaccacgtgtccatcagagaagac

SEQ ID NO: 10955 - DNA, 30 bp, Artificial Sequence
  Synthetic oligonucleotide
ggcaacgagaaaggaaggaagaatcgatcc

SEQ ID NO: 10956 - DNA, 30 bp, Artificial Sequence
  Synthetic oligonucleotide
ggccaagtaacgtctcgagagtgataagag

SEQ ID NO: 10957 - DNA, 30 bp, Artificial Sequence
  Synthetic oligonucleotide
cgaagacagagacaactccgaacgccggcg

SEQ ID NO: 10958 - DNA, 30 bp, Artificial Sequence
  Synthetic oligonucleotide
agggagagagagtgaagggtcagattgcgg

SEQ ID NO: 10959 - DNA, 30 bp, Artificial Sequence
  Synthetic oligonucleotide
agcgctatcaaaagatcaaaaacagaaggg

SEQ ID NO: 10960 - DNA, 30 bp, Artificial Sequence
  Synthetic oligonucleotide
caagggcataccgagtcgtaatactagatg

SEQ ID NO: 10961 - DNA, 30 bp, Artificial Sequence
  Synthetic oligonucleotide
gggactaggctagagtgtgctgaacgagtg

SEQ ID NO: 10962 - DNA, 30 bp, Artificial Sequence
  Synthetic oligonucleotide
cagcgaaggggcgtcacagacaaggaagat

SEQ ID NO: 10963 - DNA, 30 bp, Artificial Sequence
  Synthetic oligonucleotide
tcacaactaccaggaggtgagaggggaaaa

SEQ ID NO: 10964 - DNA, 30 bp, Artificial Sequence
  Synthetic oligonucleotide
cgatagggggacaaggagtgaagctacgaa

SEQ ID NO: 10965 - DNA, 30 bp, Artificial Sequence
  Synthetic oligonucleotide
caagagcgatcaatttacaaaaaagccgaa

SEQ ID NO: 10966 - DNA, 30 bp, Artificial Sequence
  Synthetic oligonucleotide
ggtccgagtcaggaagaaaagcaagcgaca

SEQ ID NO: 10967 - DNA, 30 bp, Artificial Sequence
  Synthetic oligonucleotide
caggcaagaaaaggatgtacaaaatcgcca

SEQ ID NO: 10968 - DNA, 30 bp, Artificial Sequence
  Synthetic oligonucleotide
cgtggtaaaggaacgcgaaaaaagtgggca

SEQ ID NO: 10969 - DNA, 30 bp, Artificial Sequence
  Synthetic oligonucleotide
gcgtgcagaaacctgagtgatgtggaaaga

SEQ ID NO: 10970 - DNA, 30 bp, Artificial Sequence
  Synthetic oligonucleotide
tcaaagaggaaccatttacagaggataaga

SEQ ID NO: 10971 - DNA, 30 bp, Artificial Sequence
  Synthetic oligonucleotide
ggaggataggtgtaagaagaccgttccaga

SEQ ID NO: 10972 - DNA, 30 bp, Artificial Sequence
  Synthetic oligonucleotide
acgcaaccggggaatgtggtatggaagaga

SEQ ID NO: 10973 - DNA, 30 bp, Artificial Sequence
  Synthetic oligonucleotide
tcagaatggagaaggcacggaactgagaga

SEQ ID NO: 10974 - DNA, 30 bp, Artificial Sequence
  Synthetic oligonucleotide
ccacgaatacacaagatagaggactgtcga

SEQ ID NO: 10975 - DNA, 30 bp, Artificial Sequence
  Synthetic oligonucleotide
gggagctcagagtcacgtgaaagtcaagga

SEQ ID NO: 10976 - DNA, 40 bp, Artificial Sequence
  Synthetic oligonucleotide
aatataatacattcatggtatggtcggggatcggggggga

SEQ ID NO: 10977 - DNA, 30 bp, Artificial Sequence
  Synthetic oligonucleotide
acgacaaacaggggtgaacgaccatgaaac

SEQ ID NO: 10978 - DNA, 30 bp, Artificial Sequence
  Synthetic oligonucleotide
gagaacaaaagaagacatgggaacgaatac

SEQ ID NO: 10979 - DNA, 30 bp, Artificial Sequence
  Synthetic oligonucleotide
cgaaaaaaccccaagagagtagcgatgctc

SEQ ID NO: 10980 - DNA, 30 bp, Artificial Sequence
  Synthetic oligonucleotide
caagcgtatcgagcagaggcgaattaacag

SEQ ID NO: 10981 - DNA, 30 bp, Artificial Sequence
  Synthetic oligonucleotide
cgaaaggcgtgtacaacgactaccagacag

SEQ ID NO: 10982 - DNA, 30 bp, Artificial Sequence
  Synthetic oligonucleotide
agcgaaagacgagcggaaagaatggcatag

SEQ ID NO: 10983 - DNA, 30 bp, Artificial Sequence
  Synthetic oligonucleotide
acgataaacaagaccgattgccctccgtcg

SEQ ID NO: 10984 - DNA, 30 bp, Artificial Sequence
  Synthetic oligonucleotide
agggagaaaaacaataagaattgccaactg

SEQ ID NO: 10985 - DNA, 30 bp, Artificial Sequence
  Synthetic oligonucleotide
cacgggatagaaagaaaggagcgccgtctg

SEQ ID NO: 10986 - DNA, 35 bp, Artificial Sequence
  Synthetic oligonucleotide
cgatgaaagttcgcctcagagcagggtggtgtaat

SEQ ID NO: 10987 - DNA, 30 bp, Artificial Sequence
  Synthetic oligonucleotide
tggacaagaccaccgaaaaaatagcagagt

SEQ ID NO: 10988 - DNA, 30 bp, Artificial Sequence
  Synthetic oligonucleotide
acaacaaggaagacaaaatggataaggagt

SEQ ID NO: 10989 - DNA, 30 bp, Artificial Sequence
  Synthetic oligonucleotide
acggaacggtaccacagatgatgatccaaa

SEQ ID NO: 10990 - DNA, 30 bp, Artificial Sequence
  Synthetic oligonucleotide
agggagagacggcataagattcggccacaa

SEQ ID NO: 10991 - DNA, 30 bp, Artificial Sequence
  Synthetic oligonucleotide
aaggagccggaagctgcgaaagcccaggaa

SEQ ID NO: 10992 - DNA, 30 bp, Artificial Sequence
  Synthetic oligonucleotide
ggaagcaaaggtcgaaagggatagaggtaa

SEQ ID NO: 10993 - DNA, 30 bp, Artificial Sequence
  Synthetic oligonucleotide
agcaaaggaatcacagagtataggaccaca

SEQ ID NO: 10994 - DNA, 30 bp, Artificial Sequence
  Synthetic oligonucleotide
agcgaactaagcacacacgccccgatcaca

SEQ ID NO: 10995 - DNA, 30 bp, Artificial Sequence
  Synthetic oligonucleotide
aaaggcggaggaaccaaaaagctcaggaca

SEQ ID NO: 10996 - DNA, 30 bp, Artificial Sequence
  Synthetic oligonucleotide
ggaagggcaataggaaaacacatggcagca

SEQ ID NO: 10997 - DNA, 30 bp, Artificial Sequence
  Synthetic oligonucleotide
acgagaagtgcaataggataactcgaaaga

SEQ ID NO: 10998 - DNA, 30 bp, Artificial Sequence
  Synthetic oligonucleotide
cgagcaaggaagcgcgactccgtggtaaga

SEQ ID NO: 10999 - DNA, 30 bp, Artificial Sequence
  Synthetic oligonucleotide
aaaggtggagagaaagcaggtggcgacaga

SEQ ID NO: 11000 - DNA, 30 bp, Artificial Sequence
  Synthetic oligonucleotide
ccaacaagacgcaaaaacaaaagtaccaga

SEQ ID NO: 11001 - DNA, 30 bp, Artificial Sequence
  Synthetic oligonucleotide
gcgggagaagaataaatcgcgagtctcaga

SEQ ID NO: 11002 - DNA, 30 bp, Artificial Sequence
  Synthetic oligonucleotide
tcacgcaagaggaggaggagggacacacga

SEQ ID NO: 11003 - DNA, 30 bp, Artificial Sequence
  Synthetic oligonucleotide
tgaaacgaagtcgtggcgggagtgtaagga

SEQ ID NO: 11004 - DNA, 30 bp, Artificial Sequence
  Synthetic oligonucleotide
ctcacaggagcgaagggagcgaagatcgga

SEQ ID NO: 11005 - DNA, 30 bp, Artificial Sequence
  Synthetic oligonucleotide
tggaaaacgcgtataaggcgacaaacggga

SEQ ID NO: 11006 - DNA, 39 bp, Artificial Sequence
  Synthetic oligonucleotide
aagataatacatcatggtatggtcggggatcggggggga

SEQ ID NO: 11007 - DNA, 30 bp, Artificial Sequence
  Synthetic oligonucleotide
tacttatccaggaggataagtcgattacta

SEQ ID NO: 11008 - DNA, 30 bp, Artificial Sequence
  Synthetic oligonucleotide
cacggaggggcgagcaaactaagtgataac

SEQ ID NO: 11009 - DNA, 30 bp, Artificial Sequence
  Synthetic oligonucleotide
cgagatcaaaagtatcaagaaagggagcac

SEQ ID NO: 11010 - DNA, 34 bp, Artificial Sequence
  Synthetic oligonucleotide
gatactagaccaacacgtgtccatcagaaaagac

SEQ ID NO: 11011 - DNA, 30 bp, Artificial Sequence
  Synthetic oligonucleotide
acgaagtaaggatccccaaaggcaagtgac

SEQ ID NO: 11012 - DNA, 30 bp, Artificial Sequence
  Synthetic oligonucleotide
acgaaggaaacataaagggtcgtagcctac

SEQ ID NO: 11013 - DNA, 30 bp, Artificial Sequence
  Synthetic oligonucleotide
cagacgtcatcgacggtaagaatagagtgc

SEQ ID NO: 11014 - DNA, 30 bp, Artificial Sequence
  Synthetic oligonucleotide
agaggattcataccgaaacatcaacgacag

SEQ ID NO: 11015 - DNA, 30 bp, Artificial Sequence
  Synthetic oligonucleotide
agaacggatcaacatggaacagggtaagag

SEQ ID NO: 11016 - DNA, 30 bp, Artificial Sequence
  Synthetic oligonucleotide
ggcacaatgagacgtccacaaacgagggag

SEQ ID NO: 11017 - DNA, 30 bp, Artificial Sequence
  Synthetic oligonucleotide
cctcggcaaaagacaccgaatgaaggatag

SEQ ID NO: 11018 - DNA, 30 bp, Artificial Sequence
  Synthetic oligonucleotide
ggcacaacaacgaataactacgaagatacg

SEQ ID NO: 11019 - DNA, 30 bp, Artificial Sequence
  Synthetic oligonucleotide
cgggaaccaagaataacttacagggaagcg

SEQ ID NO: 11020 - DNA, 30 bp, Artificial Sequence
  Synthetic oligonucleotide
tcagctgatgaaaggaaaaaatatctagcg

SEQ ID NO: 11021 - DNA, 30 bp, Artificial Sequence
  Synthetic oligonucleotide
ttatgtgtaggtttactcctctaccttgcg

SEQ ID NO: 11022 - DNA, 30 bp, Artificial Sequence
  Synthetic oligonucleotide
agatcagcaaacaggaggaattaggaatcg

SEQ ID NO: 11023 - DNA, 30 bp, Artificial Sequence
  Synthetic oligonucleotide
acggacaaacgtgtcgcagggaaagtacgg

SEQ ID NO: 11024 - DNA, 30 bp, Artificial Sequence
  Synthetic oligonucleotide
cgattaaccagaaagcaaaacactgcgggg

SEQ ID NO: 11025 - DNA, 30 bp, Artificial Sequence
  Synthetic oligonucleotide
acgtgagccagatagggtacaaagtcgatg

SEQ ID NO: 11026 - DNA, 30 bp, Artificial Sequence
  Synthetic oligonucleotide
acggggtaggaggaacgactaatcgtactg

SEQ ID NO: 11027 - DNA, 30 bp, Artificial Sequence
  Synthetic oligonucleotide
gggaaaacaaacgaatcacggcaacaaggt

SEQ ID NO: 11028 - DNA, 30 bp, Artificial Sequence
  Synthetic oligonucleotide
gggtaaaagacacctaaatagtccgacaaa

SEQ ID NO: 11029 - DNA, 30 bp, Artificial Sequence
  Synthetic oligonucleotide
tcggagacaccggaccagcgagtacaccaa

SEQ ID NO: 11030 - DNA, 30 bp, Artificial Sequence
  Synthetic oligonucleotide
taacgagcacgaggtgatgcaacggaggaa

SEQ ID NO: 11031 - DNA, 30 bp, Artificial Sequence
  Synthetic oligonucleotide
gttacacgaagagaatcgcaaaatgtggaa

SEQ ID NO: 11032 - DNA, 30 bp, Artificial Sequence
  Synthetic oligonucleotide
tcggaggcctaaggcagaaagggaatgtaa

SEQ ID NO: 11033 - DNA, 30 bp, Artificial Sequence
  Synthetic oligonucleotide
aggtaaagagggcaaatgcgggtcacagca

SEQ ID NO: 11034 - DNA, 30 bp, Artificial Sequence
  Synthetic oligonucleotide
cgtcgggcaatcgaggagggggagttcgca

SEQ ID NO: 11035 - DNA, 30 bp, Artificial Sequence
  Synthetic oligonucleotide
ataagaagaaaagaatggcatactaagaga

SEQ ID NO: 11036 - DNA, 30 bp, Artificial Sequence
  Synthetic oligonucleotide
cgttcggaacatagctagatagagaggaga

SEQ ID NO: 11037 - DNA, 30 bp, Artificial Sequence
  Synthetic oligonucleotide
gggaatagggcgttatcgaaagaacaagga

SEQ ID NO: 11038 - DNA, 30 bp, Artificial Sequence
  Synthetic oligonucleotide
aacgtgtgcggaggaaactaagcccgagga

SEQ ID NO: 11039 - DNA, 30 bp, Artificial Sequence
  Synthetic oligonucleotide
atgagctgtagacgaaccaaggagggggga

SEQ ID NO: 11040 - DNA, 30 bp, Artificial Sequence
  Synthetic oligonucleotide
gtaacacgaaccggagagaagagcatggga

SEQ ID NO: 11041 - DNA, 30 bp, Artificial Sequence
  Synthetic oligonucleotide
agaaggatagaaatacaaaaggtgagtgga

SEQ ID NO: 11042 - DNA, 30 bp, Artificial Sequence
  Synthetic oligonucleotide
caacaacagagaggagagataaggggccta

SEQ ID NO: 11043 - DNA, 30 bp, Artificial Sequence
  Synthetic oligonucleotide
acacaaaacagtgcaaatcaacgtgaggta

SEQ ID NO: 11044 - DNA, 30 bp, Artificial Sequence
  Synthetic oligonucleotide
cgtgcagtaaataccaggagtaccgcacac

SEQ ID NO: 11045 - DNA, 30 bp, Artificial Sequence
  Synthetic oligonucleotide
gcggaacaagcagaaaccaggagtagcacc

SEQ ID NO: 11046 - DNA, 30 bp, Artificial Sequence
  Synthetic oligonucleotide
agagccgaatcatgaggacaaaagggcagc

SEQ ID NO: 11047 - DNA, 30 bp, Artificial Sequence
  Synthetic oligonucleotide
tgaagacaaaggtattaacgcgagaacaag

SEQ ID NO: 11048 - DNA, 30 bp, Artificial Sequence
  Synthetic oligonucleotide
gaacgagggggagatgacgtctaggcacag

SEQ ID NO: 11049 - DNA, 30 bp, Artificial Sequence
  Synthetic oligonucleotide
accgaacgaaacgacccgaatgagttggag

SEQ ID NO: 11050 - DNA, 30 bp, Artificial Sequence
  Synthetic oligonucleotide
ggcgaaaagatgacggacagcgaagttgag

SEQ ID NO: 11051 - DNA, 30 bp, Artificial Sequence
  Synthetic oligonucleotide
agcgaagaccaccaatatacatcgccgacg

SEQ ID NO: 11052 - DNA, 30 bp, Artificial Sequence
  Synthetic oligonucleotide
cgcgacaagaatctcataaggcttcaaagg

SEQ ID NO: 11053 - DNA, 30 bp, Artificial Sequence
  Synthetic oligonucleotide
cagggaaggcggataaagcctaaaataagg

SEQ ID NO: 11054 - DNA, 30 bp, Artificial Sequence
  Synthetic oligonucleotide
cgagatacacaaagtagcatacataatcgg

SEQ ID NO: 11055 - DNA, 30 bp, Artificial Sequence
  Synthetic oligonucleotide
accgaacgaacgaaacaccgatagcggatg

SEQ ID NO: 11056 - DNA, 30 bp, Artificial Sequence
  Synthetic oligonucleotide
gcggtagaagaaccgaagtaacatcaattg

SEQ ID NO: 11057 - DNA, 30 bp, Artificial Sequence
  Synthetic oligonucleotide
tcaagatcgaagcgaggaaaagcagaattg

SEQ ID NO: 11058 - DNA, 30 bp, Artificial Sequence
  Synthetic oligonucleotide
taaaaacgagagcgaagagtggcaaacaat

SEQ ID NO: 11059 - DNA, 30 bp, Artificial Sequence
  Synthetic oligonucleotide
cgaggagagaatcgaagccaagggagttat

SEQ ID NO: 11060 - DNA, 30 bp, Artificial Sequence
  Synthetic oligonucleotide
gtcaacagaaagggacgaccacgaagaact

SEQ ID NO: 11061 - DNA, 30 bp, Artificial Sequence
  Synthetic oligonucleotide
acgagacaagtgcaataggcatccgaggtt

SEQ ID NO: 11062 - DNA, 30 bp, Artificial Sequence
  Synthetic oligonucleotide
aggcaagataaagactagcgctgaatacaa

SEQ ID NO: 11063 - DNA, 30 bp, Artificial Sequence
  Synthetic oligonucleotide
tacggacagacggaacgtacagaaacagaa

SEQ ID NO: 11064 - DNA, 30 bp, Artificial Sequence
  Synthetic oligonucleotide
ccatcacgaaaaataagcgcagagaaagca

SEQ ID NO: 11065 - DNA, 30 bp, Artificial Sequence
  Synthetic oligonucleotide
agaacacgtgaaaaagtgggtacagtagca

SEQ ID NO: 11066 - DNA, 30 bp, Artificial Sequence
  Synthetic oligonucleotide
tagcgtcaagcgaacacgtgaggaggaaga

SEQ ID NO: 11067 - DNA, 30 bp, Artificial Sequence
  Synthetic oligonucleotide
cgaaccaaatattgcaacgaattcagcaga

SEQ ID NO: 11068 - DNA, 30 bp, Artificial Sequence
  Synthetic oligonucleotide
aaggacggaacctcgaaccatcagcagaga

SEQ ID NO: 11069 - DNA, 30 bp, Artificial Sequence
  Synthetic oligonucleotide
ggtgataaaaaggagggccagacccaagga

SEQ ID NO: 11070 - DNA, 30 bp, Artificial Sequence
  Synthetic oligonucleotide
gggcaggtactaaaaagaaaatgaaaggga

SEQ ID NO: 11071 - DNA, 40 bp, Artificial Sequence
  Synthetic oligonucleotide
aagagaatacattcatggtatggtcggggatcggggggga

SEQ ID NO: 11072 - DNA, 40 bp, Artificial Sequence
  Synthetic oligonucleotide
aagataatacattcatggtattgtcggggatcggggggga

SEQ ID NO: 11073 - DNA, 30 bp, Artificial Sequence
  Synthetic oligonucleotide
cgtggcgagatcgagtatgaggataagata

SEQ ID NO: 11074 - DNA, 30 bp, Artificial Sequence
  Synthetic oligonucleotide
acggtaacgcatgagtaaaaagggaccgta

SEQ ID NO: 11075 - DNA, 30 bp, Artificial Sequence
  Synthetic oligonucleotide
caataccaagggaggcaaagagggacgaac

SEQ ID NO: 11076 - DNA, 30 bp, Artificial Sequence
  Synthetic oligonucleotide
ggggagcgagggagagtcaaaaagccacac

SEQ ID NO: 11077 - DNA, 30 bp, Artificial Sequence
  Synthetic oligonucleotide
agccgaaaagacaacgagttacggatccac

SEQ ID NO: 11078 - DNA, 30 bp, Artificial Sequence
  Synthetic oligonucleotide
gcgacagcgagccgtacacaaatcagcacc

SEQ ID NO: 11079 - DNA, 30 bp, Artificial Sequence
  Synthetic oligonucleotide
atgcgtaacaaagaaacgatctgggcaagc

SEQ ID NO: 11080 - DNA, 30 bp, Artificial Sequence
  Synthetic oligonucleotide
cggagggaaggacagataagtgataacagc

SEQ ID NO: 11081 - DNA, 40 bp, Artificial Sequence
  Synthetic oligonucleotide
gagtgagagtgacggaaaataaggtagaaagcacgttggc

SEQ ID NO: 11082 - DNA, 30 bp, Artificial Sequence
  Synthetic oligonucleotide
acgaatatgagagcataagtcgctcgacag

SEQ ID NO: 11083 - DNA, 30 bp, Artificial Sequence
  Synthetic oligonucleotide
aggagaattgaagtagtagtaaggagccag

SEQ ID NO: 11084 - DNA, 30 bp, Artificial Sequence
  Synthetic oligonucleotide
cagaggaggaaagaggtccagcgaatcgag

SEQ ID NO: 11085 - DNA, 30 bp, Artificial Sequence
  Synthetic oligonucleotide
cggagagtacaagaataccaaactgaaacg

SEQ ID NO: 11086 - DNA, 30 bp, Artificial Sequence
  Synthetic oligonucleotide
aggaaagacctgacacaacttcaagcaacg

SEQ ID NO: 11087 - DNA, 30 bp, Artificial Sequence
  Synthetic oligonucleotide
acagggggagaatggggtcacaaaagtacg

SEQ ID NO: 11088 - DNA, 30 bp, Artificial Sequence
  Synthetic oligonucleotide
acgggagtgaaggaaagtacatgcgacccg

SEQ ID NO: 11089 - DNA, 30 bp, Artificial Sequence
  Synthetic oligonucleotide
cgtaagagagcatacgaacgagggcaatcg

SEQ ID NO: 11090 - DNA, 30 bp, Artificial Sequence
  Synthetic oligonucleotide
acggttgacaaaaaagaatggccgccaagg

SEQ ID NO: 11091 - DNA, 30 bp, Artificial Sequence
  Synthetic oligonucleotide
agacaggaactagacgggatgatacagagg

SEQ ID NO: 11092 - DNA, 30 bp, Artificial Sequence
  Synthetic oligonucleotide
cgaggactgcctgaacggtaataagcgagg

SEQ ID NO: 11093 - DNA, 30 bp, Artificial Sequence
  Synthetic oligonucleotide
ccagcggaggacgaagaagattaccagcgg

SEQ ID NO: 11094 - DNA, 30 bp, Artificial Sequence
  Synthetic oligonucleotide
tcggggggagagaaaggtccgaaaccaatg

SEQ ID NO: 11095 - DNA, 30 bp, Artificial Sequence
  Synthetic oligonucleotide
tgaggaaggatcaccaaagaaggctagctg

SEQ ID NO: 11096 - DNA, 30 bp, Artificial Sequence
  Synthetic oligonucleotide
agaggaacaaaatacagagtcagccagaat

SEQ ID NO: 11097 - DNA, 30 bp, Artificial Sequence
  Synthetic oligonucleotide
acgaggatgaaggctgaacagataaaacat

SEQ ID NO: 11098 - DNA, 30 bp, Artificial Sequence
  Synthetic oligonucleotide
agggcgaataaacaaaattcagagggaagt

SEQ ID NO: 11099 - DNA, 30 bp, Artificial Sequence
  Synthetic oligonucleotide
cgataaaggcagggggaagcacaattcagt

SEQ ID NO: 11100 - DNA, 30 bp, Artificial Sequence
  Synthetic oligonucleotide
cagggcgtgtatatgatggtgttgtatggt

SEQ ID NO: 11101 - DNA, 30 bp, Artificial Sequence
  Synthetic oligonucleotide
acgagtgaaagtgagtggtgtgcgtacaaa

SEQ ID NO: 11102 - DNA, 30 bp, Artificial Sequence
  Synthetic oligonucleotide
acaaggaaggggcagagaagtcgacctaaa

SEQ ID NO: 11103 - DNA, 30 bp, Artificial Sequence
  Synthetic oligonucleotide
cgtaagagttagagcagagggatgtgacaa

SEQ ID NO: 11104 - DNA, 30 bp, Artificial Sequence
  Synthetic oligonucleotide
cacgaagaaggcgaaattagtcaaccgcaa

SEQ ID NO: 11105 - DNA, 30 bp, Artificial Sequence
  Synthetic oligonucleotide
gaagggacattacatagaagacaaaggcaa

SEQ ID NO: 11106 - DNA, 30 bp, Artificial Sequence
  Synthetic oligonucleotide
acgagaaacttagagtcggtgaaaggcgaa

SEQ ID NO: 11107 - DNA, 30 bp, Artificial Sequence
  Synthetic oligonucleotide
gtaaaacatgcgtaaggggcgagcgaggaa

SEQ ID NO: 11108 - DNA, 30 bp, Artificial Sequence
  Synthetic oligonucleotide
acggaaacgggtactctgaagccaacgtaa

SEQ ID NO: 11109 - DNA, 30 bp, Artificial Sequence
  Synthetic oligonucleotide
tacacggatacagagcgactgaaggaaaca

SEQ ID NO: 11110 - DNA, 30 bp, Artificial Sequence
  Synthetic oligonucleotide
gaacggaacggaaataatatcgcattaaca

SEQ ID NO: 11111 - DNA, 30 bp, Artificial Sequence
  Synthetic oligonucleotide
cgagaattctaaggcagaagaagagaacca

SEQ ID NO: 11112 - DNA, 30 bp, Artificial Sequence
  Synthetic oligonucleotide
acgacataaggcacccgaacgataagcgca

SEQ ID NO: 11113 - DNA, 30 bp, Artificial Sequence
  Synthetic oligonucleotide
cgaggagagggtgctgcaaaaaataaggca

SEQ ID NO: 11114 - DNA, 30 bp, Artificial Sequence
  Synthetic oligonucleotide
aggaacttgggccgaaagacgggtaaaaga

SEQ ID NO: 11115 - DNA, 30 bp, Artificial Sequence
  Synthetic oligonucleotide
agcgacatgagaaaactggttagcacgaga

SEQ ID NO: 11116 - DNA, 30 bp, Artificial Sequence
  Synthetic oligonucleotide
cgaaggataacaataaggactgtcagtcga

SEQ ID NO: 11117 - DNA, 30 bp, Artificial Sequence
  Synthetic oligonucleotide
aggccgaagggaaacagcacatcgtctcta

SEQ ID NO: 11118 - DNA, 30 bp, Artificial Sequence
  Synthetic oligonucleotide
ctagagaaatcagataaggagtgatgaaac

SEQ ID NO: 11119 - DNA, 34 bp, Artificial Sequence
  Synthetic oligonucleotide
gatactagaccaccacgggtccatcagaaaagac

SEQ ID NO: 11120 - DNA, 30 bp, Artificial Sequence
  Synthetic oligonucleotide
ccgtaaaagacaaaataaaagcctacagac

SEQ ID NO: 11121 - DNA, 30 bp, Artificial Sequence
  Synthetic oligonucleotide
acaataggagcacaactcagaggacaggtc

SEQ ID NO: 11122 - DNA, 30 bp, Artificial Sequence
  Synthetic oligonucleotide
caagggcggagcgcaagataaaaggacaag

SEQ ID NO: 11123 - DNA, 30 bp, Artificial Sequence
  Synthetic oligonucleotide
aggcagcaatgagtgatgtcgagctggaag

SEQ ID NO: 11124 - DNA, 30 bp, Artificial Sequence
  Synthetic oligonucleotide
tgaagaggcaaactcgaatacaagtgtaag

SEQ ID NO: 11125 - DNA, 30 bp, Artificial Sequence
  Synthetic oligonucleotide
cctacggagagaacatccaggaatgaacag

SEQ ID NO: 11126 - DNA, 30 bp, Artificial Sequence
  Synthetic oligonucleotide
acgaacgggaagagatatggcccatggcag

SEQ ID NO: 11127 - DNA, 30 bp, Artificial Sequence
  Synthetic oligonucleotide
acgggttcgagacccaaagcgaatggcgag

SEQ ID NO: 11128 - DNA, 30 bp, Artificial Sequence
  Synthetic oligonucleotide
tcagatgtagaaaactcaagtcagagggag

SEQ ID NO: 11129 - DNA, 30 bp, Artificial Sequence
  Synthetic oligonucleotide
aaggaaccgaacagttgagctatcaaatag

SEQ ID NO: 11130 - DNA, 30 bp, Artificial Sequence
  Synthetic oligonucleotide
aagggaataaacgaacagacctaaccctag

SEQ ID NO: 11131 - DNA, 30 bp, Artificial Sequence
  Synthetic oligonucleotide
cacaaggccggcccgcgaaggaaagattag

SEQ ID NO: 11132 - DNA, 30 bp, Artificial Sequence
  Synthetic oligonucleotide
aacgaggaaaggtaaaaaatgtataaaacg

SEQ ID NO: 11133 - DNA, 30 bp, Artificial Sequence
  Synthetic oligonucleotide
agggcgatggaaaaaggcaacatcgtgacg

SEQ ID NO: 11134 - DNA, 30 bp, Artificial Sequence
  Synthetic oligonucleotide
tggagtcacaaaaagatacacgaagcgggg

SEQ ID NO: 11135 - DNA, 30 bp, Artificial Sequence
  Synthetic oligonucleotide
acgaaaatcataggtccgagtaatcacatg

SEQ ID NO: 11136 - DNA, 30 bp, Artificial Sequence
  Synthetic oligonucleotide
tcatcagaaaagggagatggcatgaaagtg

SEQ ID NO: 11137 - DNA, 30 bp, Artificial Sequence
  Synthetic oligonucleotide
ggggagaaacaccagggagataacgtcgtg

SEQ ID NO: 11138 - DNA, 30 bp, Artificial Sequence
  Synthetic oligonucleotide
aggcgacaacaaagttgcgagtgccaggtg

SEQ ID NO: 11139 - DNA, 30 bp, Artificial Sequence
  Synthetic oligonucleotide
tgaggggcacgtaaacaagagcaaaagaat

SEQ ID NO: 11140 - DNA, 30 bp, Artificial Sequence
  Synthetic oligonucleotide
taagacgcggagaagttcgacataaaggat

SEQ ID NO: 11141 - DNA, 30 bp, Artificial Sequence
  Synthetic oligonucleotide
agggacgaagggcactaaatagcatgggat

SEQ ID NO: 11142 - DNA, 30 bp, Artificial Sequence
  Synthetic oligonucleotide
cgtgaagactatggagaagaacatgtggat

SEQ ID NO: 11143 - DNA, 30 bp, Artificial Sequence
  Synthetic oligonucleotide
tcacgcgaaaaagaaggataaaacacgtat

SEQ ID NO: 11144 - DNA, 30 bp, Artificial Sequence
  Synthetic oligonucleotide
acgacgagcaggattaggcaaaaggcacgt

SEQ ID NO: 11145 - DNA, 30 bp, Artificial Sequence
  Synthetic oligonucleotide
acaggaacaaatgcaataaggaggaaagtt

SEQ ID NO: 11146 - DNA, 30 bp, Artificial Sequence
  Synthetic oligonucleotide
acgaacccagcctagagtcaacggcaacaa

SEQ ID NO: 11147 - DNA, 30 bp, Artificial Sequence
  Synthetic oligonucleotide
gaagggagaggtgactgctgaccgttagaa

SEQ ID NO: 11148 - DNA, 30 bp, Artificial Sequence
  Synthetic oligonucleotide
agcgagaagaaaggcaatgggggacctgaa

SEQ ID NO: 11149 - DNA, 30 bp, Artificial Sequence
  Synthetic oligonucleotide
cgaataagaggaacgtcatgtatgtatgca

SEQ ID NO: 11150 - DNA, 30 bp, Artificial Sequence
  Synthetic oligonucleotide
gaagaccaactagcataaccccgaaagaga

SEQ ID NO: 11151 - DNA, 40 bp, Artificial Sequence
  Synthetic oligonucleotide
aagataatacagtcatggtatggtcggggatcggggggga

SEQ ID NO: 11152 - DNA, 30 bp, Artificial Sequence
  Synthetic oligonucleotide
agatcgaacccacaagagtatagaagtgga

SEQ ID NO: 11153 - DNA, 30 bp, Artificial Sequence
  Synthetic oligonucleotide
tcgaaacaagaaaaacactaccgctcatta

SEQ ID NO: 11154 - DNA, 30 bp, Artificial Sequence
  Synthetic oligonucleotide
aggggaaagcctcacagggtagatgccgac

SEQ ID NO: 11155 - DNA, 30 bp, Artificial Sequence
  Synthetic oligonucleotide
tgtacagaggggatgcgatgaaggcaaaag

SEQ ID NO: 11156 - DNA, 30 bp, Artificial Sequence
  Synthetic oligonucleotide
ggcagggtagcgacggaccaagaagcaaag

SEQ ID NO: 11157 - DNA, 30 bp, Artificial Sequence
  Synthetic oligonucleotide
ggaacgcaacggataccaaatcgacacaag

SEQ ID NO: 11158 - DNA, 30 bp, Artificial Sequence
  Synthetic oligonucleotide
cgacataacaaggtcaaaactcgatggcag

SEQ ID NO: 11159 - DNA, 30 bp, Artificial Sequence
  Synthetic oligonucleotide
acaagctagagcaggcaccggagaagggag

SEQ ID NO: 11160 - DNA, 30 bp, Artificial Sequence
  Synthetic oligonucleotide
ccgagaagaagctaagtaccccagactgag

SEQ ID NO: 11161 - DNA, 30 bp, Artificial Sequence
  Synthetic oligonucleotide
cgtaaaggagattcgaggtacatggctgag

SEQ ID NO: 11162 - DNA, 31 bp, Artificial Sequence
  Synthetic oligonucleotide
acgaccaagtacctaataagcgccaacatag

SEQ ID NO: 11163 - DNA, 30 bp, Artificial Sequence
  Synthetic oligonucleotide
aacacaaggaacaatcggagtggatcgtag

SEQ ID NO: 11164 - DNA, 30 bp, Artificial Sequence
  Synthetic oligonucleotide
cgaagggaagatatacgatcagtaagttag

SEQ ID NO: 11165 - DNA, 30 bp, Artificial Sequence
  Synthetic oligonucleotide
tgcaacgaaaataggagtcgtaaacaaacg

SEQ ID NO: 11166 - DNA, 30 bp, Artificial Sequence
  Synthetic oligonucleotide
acaggccaggctcgaggtacaaagaaagcg

SEQ ID NO: 11167 - DNA, 30 bp, Artificial Sequence
  Synthetic oligonucleotide
gatccacaaaacaaaaaaaggaacggcagg

SEQ ID NO: 11168 - DNA, 30 bp, Artificial Sequence
  Synthetic oligonucleotide
gaagacagaggagggggaagagatacgcgg

SEQ ID NO: 11169 - DNA, 30 bp, Artificial Sequence
  Synthetic oligonucleotide
aggagagtaaggaacaccaagtcggctcgg

SEQ ID NO: 11170 - DNA, 30 bp, Artificial Sequence
  Synthetic oligonucleotide
tcgcgaagagcgtaacgtaggggtgggatg

SEQ ID NO: 11171 - DNA, 30 bp, Artificial Sequence
  Synthetic oligonucleotide
cgacggtaagcaaaacatgtacagcgagtg

SEQ ID NO: 11172 - DNA, 30 bp, Artificial Sequence
  Synthetic oligonucleotide
gtggagcctaggacaaccgagagtaaagat

SEQ ID NO: 11173 - DNA, 30 bp, Artificial Sequence
  Synthetic oligonucleotide
gcggacaaggtaaagcattgaacaactcgt

SEQ ID NO: 11174 - DNA, 28 bp, Artificial Sequence
  Synthetic oligonucleotide
tcgatatatggtcgggtattcgatattt

SEQ ID NO: 11175 - DNA, 30 bp, Artificial Sequence
  Synthetic oligonucleotide
actgcaaggacagaaagaaaccgcacaaaa

SEQ ID NO: 11176 - DNA, 30 bp, Artificial Sequence
  Synthetic oligonucleotide
agaaggagtgaaggtactagtcgggagcaa

SEQ ID NO: 11177 - DNA, 30 bp, Artificial Sequence
  Synthetic oligonucleotide
ccggaagaagaagaaataaaatcgaaagaa

SEQ ID NO: 11178 - DNA, 30 bp, Artificial Sequence
  Synthetic oligonucleotide
cgataacgggagcaggggatctaggtaaca

SEQ ID NO: 11179 - DNA, 30 bp, Artificial Sequence
  Synthetic oligonucleotide
actaagaagcgtctgaaaaaggagaccaca

SEQ ID NO: 11180 - DNA, 30 bp, Artificial Sequence
  Synthetic oligonucleotide
aacgggaataacaccaaggggcacgataca

SEQ ID NO: 11181 - DNA, 30 bp, Artificial Sequence
  Synthetic oligonucleotide
gcgtaaccgaagggtagggctagagaagca

SEQ ID NO: 11182 - DNA, 30 bp, Artificial Sequence
  Synthetic oligonucleotide
cgagaacgtaaggcgtcggaaagaggggca

SEQ ID NO: 11183 - DNA, 30 bp, Artificial Sequence
  Synthetic oligonucleotide
acgtcgcggagcaaatagcgtgagtgggca

SEQ ID NO: 11184 - DNA, 30 bp, Artificial Sequence
  Synthetic oligonucleotide
tcaggaaaaaaaacgagagcggcctagtca

SEQ ID NO: 11185 - DNA, 30 bp, Artificial Sequence
  Synthetic oligonucleotide
ggagcagaagaagacgaccgccgaccaaga

SEQ ID NO: 11186 - DNA, 30 bp, Artificial Sequence
  Synthetic oligonucleotide
cgaatgacccgttaataatagaaagcgaga

SEQ ID NO: 11187 - DNA, 30 bp, Artificial Sequence
  Synthetic oligonucleotide
cggcaacgactgaaaaagggtacataacga

SEQ ID NO: 11188 - DNA, 30 bp, Artificial Sequence
  Synthetic oligonucleotide
aggcaaaaagatgcgaaagtcatggctcga

SEQ ID NO: 11189 - DNA, 30 bp, Artificial Sequence
  Synthetic oligonucleotide
gcggggagtaaacatctgacatgaaaagga

SEQ ID NO: 11190 - DNA, 40 bp, Artificial Sequence
  Synthetic oligonucleotide
aagataatacattcatggtatagtcggggatcggggggga

SEQ ID NO: 11191 - DNA, 30 bp, Artificial Sequence
  Synthetic oligonucleotide
gcgaggcccaagacggaagtgaaagagata

SEQ ID NO: 11192 - DNA, 30 bp, Artificial Sequence
  Synthetic oligonucleotide
cgtaggcgaaagatcgtagggataagggta

SEQ ID NO: 11193 - DNA, 30 bp, Artificial Sequence
  Synthetic oligonucleotide
catacacaagctagcgaaagaagccgacac

SEQ ID NO: 11194 - DNA, 34 bp, Artificial Sequence
  Synthetic oligonucleotide
gatactagaccaccccgtgtccatcagaaaagac

SEQ ID NO: 11195 - DNA, 30 bp, Artificial Sequence
  Synthetic oligonucleotide
cggagagatatactacaggagatgatcgac

SEQ ID NO: 11196 - DNA, 30 bp, Artificial Sequence
  Synthetic oligonucleotide
gaaaggcaattggaataagagagagcgagc

SEQ ID NO: 11197 - DNA, 30 bp, Artificial Sequence
  Synthetic oligonucleotide
atggaaaagaggtgtagagcgaagatgcgc

SEQ ID NO: 11198 - DNA, 30 bp, Artificial Sequence
  Synthetic oligonucleotide
ctgacaggcaaacgaaaattgagcaccggc

SEQ ID NO: 11199 - DNA, 30 bp, Artificial Sequence
  Synthetic oligonucleotide
agaagatttagggcaaggaggaagaataag

SEQ ID NO: 11200 - DNA, 30 bp, Artificial Sequence
  Synthetic oligonucleotide
acgaaaggcggagggacccacaattaagag

SEQ ID NO: 11201 - DNA, 30 bp, Artificial Sequence
  Synthetic oligonucleotide
aacggcaacagaatgcggcgatgaatagag

SEQ ID NO: 11202 - DNA, 30 bp, Artificial Sequence
  Synthetic oligonucleotide
agtgtagcataacaccataaaaccagcgag

SEQ ID NO: 11203 - DNA, 30 bp, Artificial Sequence
  Synthetic oligonucleotide
aggaaccgatgatctaaggccgatagtgag

SEQ ID NO: 11204 - DNA, 31 bp, Artificial Sequence
  Synthetic oligonucleotide
caaaacgctaggcgaactccaagtaaagtag

SEQ ID NO: 11205 - DNA, 30 bp, Artificial Sequence
  Synthetic oligonucleotide
tccaggaagacaggcaaagtaaggcattag

SEQ ID NO: 11206 - DNA, 30 bp, Artificial Sequence
  Synthetic oligonucleotide
ggcgaaaattccaaagcaaaccgcattacg

SEQ ID NO: 11207 - DNA, 30 bp, Artificial Sequence
  Synthetic oligonucleotide
tcgaacagagcggaagttaaatgagttacg

SEQ ID NO: 11208 - DNA, 28 bp, Artificial Sequence
  Synthetic oligonucleotide
ttgtgtaggtttactcctctaccttgcg

SEQ ID NO: 11209 - DNA, 30 bp, Artificial Sequence
  Synthetic oligonucleotide
agaacgcgatccagctccaaaaacaaatcg

SEQ ID NO: 11210 - DNA, 30 bp, Artificial Sequence
  Synthetic oligonucleotide
cgtcaccaatcccagaacaaggaagcctcg

SEQ ID NO: 11211 - DNA, 30 bp, Artificial Sequence
  Synthetic oligonucleotide
aagcgctacatcacagaatcgagtccaagg

SEQ ID NO: 11212 - DNA, 30 bp, Artificial Sequence
  Synthetic oligonucleotide
taggacgagattcagaacgagatcagaggg

SEQ ID NO: 11213 - DNA, 30 bp, Artificial Sequence
  Synthetic oligonucleotide
atcgaagcgtaagcaacgagaaaagccggg

SEQ ID NO: 11214 - DNA, 30 bp, Artificial Sequence
  Synthetic oligonucleotide
acggatgagaagaattaacaatatcatggg

SEQ ID NO: 11215 - DNA, 30 bp, Artificial Sequence
  Synthetic oligonucleotide
ccaacgaagagaacacttaacaatagaatg

SEQ ID NO: 11216 - DNA, 30 bp, Artificial Sequence
  Synthetic oligonucleotide
cgtgagacgaggaagagtttgggattcatg

SEQ ID NO: 11217 - DNA, 30 bp, Artificial Sequence
  Synthetic oligonucleotide
cgaggcaccgagtggagaaggcaatagctg

SEQ ID NO: 11218 - DNA, 30 bp, Artificial Sequence
  Synthetic oligonucleotide
gagcgtgcgaagtggcaaagaaatcacgat

SEQ ID NO: 11219 - DNA, 30 bp, Artificial Sequence
  Synthetic oligonucleotide
ggaacgagggaaaaagataaaccgtgcagt

SEQ ID NO: 11220 - DNA, 31 bp, Artificial Sequence
  Synthetic oligonucleotide
aatacggaaagcaccgagaaaggagggcgtt

SEQ ID NO: 11221 - DNA, 26 bp, Artificial Sequence
  Synthetic oligonucleotide
tttgttgtgtaggtttactccctttt

SEQ ID NO: 11222 - DNA, 30 bp, Artificial Sequence
  Synthetic oligonucleotide
ggggactaaacagaaaaggcactcaggaaa

SEQ ID NO: 11223 - DNA, 30 bp, Artificial Sequence
  Synthetic oligonucleotide
agaaccaacataaacgtagagcggctgaaa

SEQ ID NO: 11224 - DNA, 30 bp, Artificial Sequence
  Synthetic oligonucleotide
agggaagtgaaataacgggatactactaaa

SEQ ID NO: 11225 - DNA, 30 bp, Artificial Sequence
  Synthetic oligonucleotide
ggaggcactaagagcacaaacgactagcaa

SEQ ID NO: 11226 - DNA, 30 bp, Artificial Sequence
  Synthetic oligonucleotide
atggaaggataccggaacaggcgtgcgcaa

SEQ ID NO: 11227 - DNA, 30 bp, Artificial Sequence
  Synthetic oligonucleotide
ctaggctgcacaagggaaccgagtcaagaa

SEQ ID NO: 11228 - DNA, 30 bp, Artificial Sequence
  Synthetic oligonucleotide
gggggagtaagaaacacggtagaaggtaca

SEQ ID NO: 11229 - DNA, 30 bp, Artificial Sequence
  Synthetic oligonucleotide
gcggaaactaagcagccgacttgaggacca

SEQ ID NO: 11230 - DNA, 30 bp, Artificial Sequence
  Synthetic oligonucleotide
aagccagaggacggacatacttagatagca

SEQ ID NO: 11231 - DNA, 30 bp, Artificial Sequence
  Synthetic oligonucleotide
caacacaatgaacgggtaaaataaacggca

SEQ ID NO: 11232 - DNA, 30 bp, Artificial Sequence
  Synthetic oligonucleotide
acggtgaagggacacagaaactcacgctca

SEQ ID NO: 11233 - DNA, 30 bp, Artificial Sequence
  Synthetic oligonucleotide
cgacactcgtattgggagcaagaaaagaga

SEQ ID NO: 11234 - DNA, 28 bp, Artificial Sequence
  Synthetic oligonucleotide
ggaggacaaaagccagatagagaataga

SEQ ID NO: 11235 - DNA, 30 bp, Artificial Sequence
  Synthetic oligonucleotide
cgtaaaggccagaggagaggtcgttaccga

SEQ ID NO: 11236 - DNA, 30 bp, Artificial Sequence
  Synthetic oligonucleotide
acgagagacatcggtgataaggtacggcga

SEQ ID NO: 11237 - DNA, 30 bp, Artificial Sequence
  Synthetic oligonucleotide
taggcccgaagtaagatgacaagcacagga

SEQ ID NO: 11238 - DNA, 30 bp, Artificial Sequence
  Synthetic oligonucleotide
taggcaggataggcggaaaaaagcgattga

SEQ ID NO: 11239 - DNA, 30 bp, Artificial Sequence
  Synthetic oligonucleotide
acggggtcagacaaacaaggtcatggcata

SEQ ID NO: 11240 - DNA, 30 bp, Artificial Sequence
  Synthetic oligonucleotide
ggcaacgtctaccgaaacagaggagcacta

SEQ ID NO: 11241 - DNA, 30 bp, Artificial Sequence
  Synthetic oligonucleotide
cgagggaggcacggcaattcgtcataagta

SEQ ID NO: 11242 - DNA, 30 bp, Artificial Sequence
  Synthetic oligonucleotide
aagggacaagaaccggaccgacatcacgta

SEQ ID NO: 11243 - DNA, 30 bp, Artificial Sequence
  Synthetic oligonucleotide
tgaagagaacgggagaagagggagactcac

SEQ ID NO: 11244 - DNA, 30 bp, Artificial Sequence
  Synthetic oligonucleotide
agggggcgatgagcaaggaaacaacctgcc

SEQ ID NO: 11245 - DNA, 31 bp, Artificial Sequence
  Synthetic oligonucleotide
cagcgcgaggagcagagcgagataacgtaag

SEQ ID NO: 11246 - DNA, 30 bp, Artificial Sequence
  Synthetic oligonucleotide
cacaaaaagcgaaagattaccatgcaccag

SEQ ID NO: 11247 - DNA, 30 bp, Artificial Sequence
  Synthetic oligonucleotide
cggagagagtggaactgaggcgagttgcag

SEQ ID NO: 11248 - DNA, 30 bp, Artificial Sequence
  Synthetic oligonucleotide
cgaaaggcaaaagcggtagatcatcttcag

SEQ ID NO: 11249 - DNA, 30 bp, Artificial Sequence
  Synthetic oligonucleotide
tcataagaccgagccagaagcgtacccgag

SEQ ID NO: 11250 - DNA, 30 bp, Artificial Sequence
  Synthetic oligonucleotide
acagcatgggaggagaggagatcataggag

SEQ ID NO: 11251 - DNA, 31 bp, Artificial Sequence
  Synthetic oligonucleotide
actaagcaaacgtatgcggtcgaattaggag

SEQ ID NO: 11252 - DNA, 30 bp, Artificial Sequence
  Synthetic oligonucleotide
ggcatagcatgacgtcatgggagctcggag

SEQ ID NO: 11253 - DNA, 30 bp, Artificial Sequence
  Synthetic oligonucleotide
cagggcaacagacctggaataagaaaatag

SEQ ID NO: 11254 - DNA, 30 bp, Artificial Sequence
  Synthetic oligonucleotide
acgagcgaacgcggtaggtcatgggtgtag

SEQ ID NO: 11255 - DNA, 30 bp, Artificial Sequence
  Synthetic oligonucleotide
cggacaatcagaaaaccgataacgttcacg

SEQ ID NO: 11256 - DNA, 30 bp, Artificial Sequence
  Synthetic oligonucleotide
cgatgaagcgtgggcgaacgacacatcgcg

SEQ ID NO: 11257 - DNA, 30 bp, Artificial Sequence
  Synthetic oligonucleotide
tggtgggagacgacaacgaaccgatatagg

SEQ ID NO: 11258 - DNA, 30 bp, Artificial Sequence
  Synthetic oligonucleotide
gaaggggaacggcaaaagcgagactatggg

SEQ ID NO: 11259 - DNA, 30 bp, Artificial Sequence
  Synthetic oligonucleotide
acgacacacggactgcgtaaagaatggatg

SEQ ID NO: 11260 - DNA, 30 bp, Artificial Sequence
  Synthetic oligonucleotide
agggaaaaccgaatacgatgggacaccttg

SEQ ID NO: 11261 - DNA, 30 bp, Artificial Sequence
  Synthetic oligonucleotide
acactgcgaacaaatctagagtacccacat

SEQ ID NO: 11262 - DNA, 30 bp, Artificial Sequence
  Synthetic oligonucleotide
tggcggagagaagcaaggaaatctggggat

SEQ ID NO: 11263 - DNA, 30 bp, Artificial Sequence
  Synthetic oligonucleotide
agacgaagggaataatgtgaataaggcact

SEQ ID NO: 11264 - DNA, 30 bp, Artificial Sequence
  Synthetic oligonucleotide
tagtacacgacaaggcgagagggacaacgt

SEQ ID NO: 11265 - DNA, 30 bp, Artificial Sequence
  Synthetic oligonucleotide
ctacggggcagaacggataagagcgataaa

SEQ ID NO: 11266 - DNA, 30 bp, Artificial Sequence
  Synthetic oligonucleotide
aaggtgtgaccgaatggagtcggcaagtaa

SEQ ID NO: 11267 - DNA, 30 bp, Artificial Sequence
  Synthetic oligonucleotide
taacaggaaaataatacaccgagagtaaca

SEQ ID NO: 11268 - DNA, 30 bp, Artificial Sequence
  Synthetic oligonucleotide
atgaacgagtggcccggggaaagcgaacca

SEQ ID NO: 11269 - DNA, 30 bp, Artificial Sequence
  Synthetic oligonucleotide
cgcgaatcaaatccgttaaacaagagccca

SEQ ID NO: 11270 - DNA, 30 bp, Artificial Sequence
  Synthetic oligonucleotide
cacaccccaagatcgataaacgagtagcca

SEQ ID NO: 11271 - DNA, 30 bp, Artificial Sequence
  Synthetic oligonucleotide
acggaacattcggagatcgaaggacaagca

SEQ ID NO: 11272 - DNA, 30 bp, Artificial Sequence
  Synthetic oligonucleotide
acgggcgaccgcactaagcgaatcggagca

SEQ ID NO: 11273 - DNA, 30 bp, Artificial Sequence
  Synthetic oligonucleotide
cgtgcaaacccagaaacaggagactgctca

SEQ ID NO: 11274 - DNA, 30 bp, Artificial Sequence
  Synthetic oligonucleotide
cgacgaaacagtgggatgctaactcgaaga

SEQ ID NO: 11275 - DNA, 30 bp, Artificial Sequence
  Synthetic oligonucleotide
cgaccaggttgcgtagaaataagccccaga

SEQ ID NO: 11276 - DNA, 30 bp, Artificial Sequence
  Synthetic oligonucleotide
ggagaaagcaagacatgagggccgtaacga

SEQ ID NO: 11277 - DNA, 31 bp, Artificial Sequence
  Synthetic oligonucleotide
atagcgaacaactcctactgcgagaacacga

SEQ ID NO: 11278 - DNA, 30 bp, Artificial Sequence
  Synthetic oligonucleotide
agggagtcctatcccaaccagagattacga

SEQ ID NO: 11279 - DNA, 30 bp, Artificial Sequence
  Synthetic oligonucleotide
aaggacacagatgacaacaaaactgaccga

SEQ ID NO: 11280 - DNA, 30 bp, Artificial Sequence
  Synthetic oligonucleotide
cgcaagacagaaacagtaagcggcattgga

SEQ ID NO: 11281 - DNA, 30 bp, Artificial Sequence
  Synthetic oligonucleotide
acgtagtaagaatagacaggtgcaaaatga

SEQ ID NO: 11282 - DNA, 30 bp, Artificial Sequence
  Synthetic oligonucleotide
cgccaaagtgcaatcgatgtaagggaatga

SEQ ID NO: 11283 - DNA, 30 bp, Artificial Sequence
  Synthetic oligonucleotide
agacgagaagggtggcaaagacaacagtga

SEQ ID NO: 11284 - DNA, 30 bp, Artificial Sequence
  Synthetic oligonucleotide
ggaggtggcgacacgaaaagtaggatccta

SEQ ID NO: 11285 - DNA, 30 bp, Artificial Sequence
  Synthetic oligonucleotide
caggctacacaggaaccgcaagaggacgta

SEQ ID NO: 11286 - DNA, 30 bp, Artificial Sequence
  Synthetic oligonucleotide
acgagccagttcaagggacatcaaagcgta

SEQ ID NO: 11287 - DNA, 30 bp, Artificial Sequence
  Synthetic oligonucleotide
cacgatgcgagaatcgaggagagatcgaac

SEQ ID NO: 11288 - DNA, 34 bp, Artificial Sequence
  Synthetic oligonucleotide
gatactagaccaccacgtgtccatcaggaaagac

SEQ ID NO: 11289 - DNA, 30 bp, Artificial Sequence
  Synthetic oligonucleotide
gcgacggaacctaatgagcggaccccagac

SEQ ID NO: 11290 - DNA, 30 bp, Artificial Sequence
  Synthetic oligonucleotide
ggaagacgaagagagcaggacaacgggagc

SEQ ID NO: 11291 - DNA, 30 bp, Artificial Sequence
  Synthetic oligonucleotide
acagaaccgaattgcgagagtaacagcatc

SEQ ID NO: 11292 - DNA, 30 bp, Artificial Sequence
  Synthetic oligonucleotide
acgagggctgaagattaacgtgacatcatc

SEQ ID NO: 11293 - DNA, 30 bp, Artificial Sequence
  Synthetic oligonucleotide
gcgaaatcgacgatatactgcggaaagaag

SEQ ID NO: 11294 - DNA, 30 bp, Artificial Sequence
  Synthetic oligonucleotide
caagcgtggagcaagcgaaacaaagcgaag

SEQ ID NO: 11295 - DNA, 30 bp, Artificial Sequence
  Synthetic oligonucleotide
caacggccaaagcaaactcaaaagctacag

SEQ ID NO: 11296 - DNA, 30 bp, Artificial Sequence
  Synthetic oligonucleotide
ccggacggaagataggaggaacagctgcag

SEQ ID NO: 11297 - DNA, 30 bp, Artificial Sequence
  Synthetic oligonucleotide
cgaagctgagagcgctaatattagaacgag

SEQ ID NO: 11298 - DNA, 30 bp, Artificial Sequence
  Synthetic oligonucleotide
tgcgagcgcaacaaagggcaagccgacgag

SEQ ID NO: 11299 - DNA, 30 bp, Artificial Sequence
  Synthetic oligonucleotide
tcgagtagcggaacagctgggtagaaggag

SEQ ID NO: 11300 - DNA, 30 bp, Artificial Sequence
  Synthetic oligonucleotide
aagaggtgatgagaggaaggataacaggag

SEQ ID NO: 11301 - DNA, 30 bp, Artificial Sequence
  Synthetic oligonucleotide
cgagcaaactagggcttagagggtcgtgag

SEQ ID NO: 11302 - DNA, 30 bp, Artificial Sequence
  Synthetic oligonucleotide
acgaggccaacgctgcggagtgtagcatag

SEQ ID NO: 11303 - DNA, 30 bp, Artificial Sequence
  Synthetic oligonucleotide
tgggacaaaacatatgagagaactggatag

SEQ ID NO: 11304 - DNA, 30 bp, Artificial Sequence
  Synthetic oligonucleotide
gccaaggtgatcaaaggaggaagatgaacg

SEQ ID NO: 11305 - DNA, 30 bp, Artificial Sequence
  Synthetic oligonucleotide
cgggaaaaacacacacacgggaactgagcg

SEQ ID NO: 11306 - DNA, 30 bp, Artificial Sequence
  Synthetic oligonucleotide
acgaagaccgtaaggggctcgaagcgggcg

SEQ ID NO: 11307 - DNA, 30 bp, Artificial Sequence
  Synthetic oligonucleotide
cgaaaaagaccgattagataaacgccatcg

SEQ ID NO: 11308 - DNA, 30 bp, Artificial Sequence
  Synthetic oligonucleotide
tagagcaaaactcgaacttcaagccagtcg

SEQ ID NO: 11309 - DNA, 30 bp, Artificial Sequence
  Synthetic oligonucleotide
acgagcaagagtaccggatcgagcaggtcg

SEQ ID NO: 11310 - DNA, 30 bp, Artificial Sequence
  Synthetic oligonucleotide
cgagggccaaaaagcgaatgatcatcttcg

SEQ ID NO: 11311 - DNA, 30 bp, Artificial Sequence
  Synthetic oligonucleotide
ccgaatccagacaggagcgagcccaacagg

SEQ ID NO: 11312 - DNA, 30 bp, Artificial Sequence
  Synthetic oligonucleotide
cgaagagtgaaggtgacagacaaagtgcgg

SEQ ID NO: 11313 - DNA, 30 bp, Artificial Sequence
  Synthetic oligonucleotide
aacgacaagcgagtacaggtatcacaaggg

SEQ ID NO: 11314 - DNA, 30 bp, Artificial Sequence
  Synthetic oligonucleotide
tgagttcgcaactaaaagaggaaagcactg

SEQ ID NO: 11315 - DNA, 30 bp, Artificial Sequence
  Synthetic oligonucleotide
aggataaaaggggattcagtaaacaatctg

SEQ ID NO: 11316 - DNA, 30 bp, Artificial Sequence
  Synthetic oligonucleotide
aggaaacgaggacatagactatataaagtg

SEQ ID NO: 11317 - DNA, 30 bp, Artificial Sequence
  Synthetic oligonucleotide
tgcggtatgggaacaaaacaacatcaacat

SEQ ID NO: 11318 - DNA, 30 bp, Artificial Sequence
  Synthetic oligonucleotide
cagagaggaaagcactgcaaaagataaact

SEQ ID NO: 11319 - DNA, 30 bp, Artificial Sequence
  Synthetic oligonucleotide
ttccttttgtgtagtcctcttctctttact

SEQ ID NO: 11320 - DNA, 30 bp, Artificial Sequence
  Synthetic oligonucleotide
cgagacaaactagcttctagggcaaccagt

SEQ ID NO: 11321 - DNA, 30 bp, Artificial Sequence
  Synthetic oligonucleotide
tggtaaggagggtcaccgacgtcgcgccgt

SEQ ID NO: 11322 - DNA, 30 bp, Artificial Sequence
  Synthetic oligonucleotide
cgggagtgagctatgaaaagaggaccctgt

SEQ ID NO: 11323 - DNA, 30 bp, Artificial Sequence
  Synthetic oligonucleotide
agagccacagggtaagaggataacaagtgt

SEQ ID NO: 11324 - DNA, 30 bp, Artificial Sequence
  Synthetic oligonucleotide
cataacaagacttcattctttcgctccatt

SEQ ID NO: 11325 - DNA, 30 bp, Artificial Sequence
  Synthetic oligonucleotide
acgagaaccagggttactgcaagcaccaaa

SEQ ID NO: 11326 - DNA, 30 bp, Artificial Sequence
  Synthetic oligonucleotide
tgacacaagctgcacgaatcggatgggaaa

SEQ ID NO: 11327 - DNA, 30 bp, Artificial Sequence
  Synthetic oligonucleotide
cctcgggcagagggaagaaggaaagcacaa

SEQ ID NO: 11328 - DNA, 30 bp, Artificial Sequence
  Synthetic oligonucleotide
cgaataaacggataattacgaaaccggcaa

SEQ ID NO: 11329 - DNA, 30 bp, Artificial Sequence
  Synthetic oligonucleotide
acggacggaacggttagttaacgccaagaa

SEQ ID NO: 11330 - DNA, 30 bp, Artificial Sequence
  Synthetic oligonucleotide
agggaatgtcaagcactccgagcggcagaa

SEQ ID NO: 11331 - DNA, 30 bp, Artificial Sequence
  Synthetic oligonucleotide
cgtcctataaagctgagagcggaaggcgaa

SEQ ID NO: 11332 - DNA, 30 bp, Artificial Sequence
  Synthetic oligonucleotide
cggggagaaaaaacgcggtcacagcgtgaa

SEQ ID NO: 11333 - DNA, 30 bp, Artificial Sequence
  Synthetic oligonucleotide
cggtaaaagaccgaactataacatcattaa

SEQ ID NO: 11334 - DNA, 30 bp, Artificial Sequence
  Synthetic oligonucleotide
gcgagaccgactaagtcaacctagtaacca

SEQ ID NO: 11335 - DNA, 30 bp, Artificial Sequence
  Synthetic oligonucleotide
acgaggggctagaagggcacatttgatcca

SEQ ID NO: 11336 - DNA, 30 bp, Artificial Sequence
  Synthetic oligonucleotide
cgatagaggtagagggatggaggccctgca

SEQ ID NO: 11337 - DNA, 30 bp, Artificial Sequence
  Synthetic oligonucleotide
aggagactcaaatcgagtaatagctagtca

SEQ ID NO: 11338 - DNA, 30 bp, Artificial Sequence
  Synthetic oligonucleotide
ccggtagcggaaggaggagattagcacaga

SEQ ID NO: 11339 - DNA, 30 bp, Artificial Sequence
  Synthetic oligonucleotide
gcataggaagaaacatcgccggcacagaga

SEQ ID NO: 11340 - DNA, 30 bp, Artificial Sequence
  Synthetic oligonucleotide
tcgaagggcgaaacagatcagtatgggaga

SEQ ID NO: 11341 - DNA, 30 bp, Artificial Sequence
  Synthetic oligonucleotide
cgaaaatgagcaaataggtagcacacagga

SEQ ID NO: 11342 - DNA, 30 bp, Artificial Sequence
  Synthetic oligonucleotide
caggcagggaaaatgctgtcttatcgagga

SEQ ID NO: 11343 - DNA, 30 bp, Artificial Sequence
  Synthetic oligonucleotide
aggggagggagttagaaattcaacgtcgga

SEQ ID NO: 11344 - DNA, 30 bp, Artificial Sequence
  Synthetic oligonucleotide
cgcaaagtctaaggagccggaaagaaggga

SEQ ID NO: 11345 - DNA, 30 bp, Artificial Sequence
  Synthetic oligonucleotide
cacaaggccaaatgtgaactagcgacaata

SEQ ID NO: 11346 - DNA, 30 bp, Artificial Sequence
  Synthetic oligonucleotide
tagcggagaggaaaggataatgagtagata

SEQ ID NO: 11347 - DNA, 30 bp, Artificial Sequence
  Synthetic oligonucleotide
acggacgcgaggctgtgaaatagcgctata

SEQ ID NO: 11348 - DNA, 30 bp, Artificial Sequence
  Synthetic oligonucleotide
cgaaggaaaagcgtaaacgtgaggggtgta

SEQ ID NO: 11349 - DNA, 30 bp, Artificial Sequence
  Synthetic oligonucleotide
cgagctgcgagtagggtaagagggatatta

SEQ ID NO: 11350 - DNA, 30 bp, Artificial Sequence
  Synthetic oligonucleotide
cagactgcgcgaagaacaatgcgtacaaac

SEQ ID NO: 11351 - DNA, 30 bp, Artificial Sequence
  Synthetic oligonucleotide
agatcaggaacaaaatacactcggaaccac

SEQ ID NO: 11352 - DNA, 30 bp, Artificial Sequence
  Synthetic oligonucleotide
caacaaaattctaaaggaagggaccaatgc

SEQ ID NO: 11353 - DNA, 30 bp, Artificial Sequence
  Synthetic oligonucleotide
ttcggagggacggaggaaaatagcatatgc

SEQ ID NO: 11354 - DNA, 30 bp, Artificial Sequence
  Synthetic oligonucleotide
cctgtaaacaaagagaatgagtgcccctgc

SEQ ID NO: 11355 - DNA, 30 bp, Artificial Sequence
  Synthetic oligonucleotide
ccgtcaaggggcaagagacatagggaaatc

SEQ ID NO: 11356 - DNA, 30 bp, Artificial Sequence
  Synthetic oligonucleotide
ccaggtgggaagatataggtgaatcgagtc

SEQ ID NO: 11357 - DNA, 30 bp, Artificial Sequence
  Synthetic oligonucleotide
aggaacaaaggtgtaaatgaaatcgtggtc

SEQ ID NO: 11358 - DNA, 30 bp, Artificial Sequence
  Synthetic oligonucleotide
ataaggcatacgaacaatacagcggacaag

SEQ ID NO: 11359 - DNA, 30 bp, Artificial Sequence
  Synthetic oligonucleotide
tcgaaatcgaatgatggtagcgtgcagaag

SEQ ID NO: 11360 - DNA, 30 bp, Artificial Sequence
  Synthetic oligonucleotide
agccaacgagaagcctgcgtaagaccgaag

SEQ ID NO: 11361 - DNA, 30 bp, Artificial Sequence
  Synthetic oligonucleotide
acgtgaaggtatgcaacggatggttcgaag

SEQ ID NO: 11362 - DNA, 30 bp, Artificial Sequence
  Synthetic oligonucleotide
aaaggacgagcgggaacgaatgatattaag

SEQ ID NO: 11363 - DNA, 30 bp, Artificial Sequence
  Synthetic oligonucleotide
cgcacgtgacacccaaggcataaacaacag

SEQ ID NO: 11364 - DNA, 30 bp, Artificial Sequence
  Synthetic oligonucleotide
gggcaataatgtacatataggacagaggag

SEQ ID NO: 11365 - DNA, 30 bp, Artificial Sequence
  Synthetic oligonucleotide
gcgtcaataccagagggcgatagtcgttag

SEQ ID NO: 11366 - DNA, 30 bp, Artificial Sequence
  Synthetic oligonucleotide
tgagaaaggcggcgaaacttaaccactacg

SEQ ID NO: 11367 - DNA, 30 bp, Artificial Sequence
  Synthetic oligonucleotide
cgcaagaagaggacgcatatagtactaccg

SEQ ID NO: 11368 - DNA, 30 bp, Artificial Sequence
  Synthetic oligonucleotide
caacaagtatgcgagaacggaaaaaaagcg

SEQ ID NO: 11369 - DNA, 30 bp, Artificial Sequence
  Synthetic oligonucleotide
agagaagaagaaggagggcccagaaggagg

SEQ ID NO: 11370 - DNA, 30 bp, Artificial Sequence
  Synthetic oligonucleotide
cgagaactcgggtacaacactacagaaggg

SEQ ID NO: 11371 - DNA, 30 bp, Artificial Sequence
  Synthetic oligonucleotide
acgacgagctatgaaatcataagaagtggg

SEQ ID NO: 11372 - DNA, 30 bp, Artificial Sequence
  Synthetic oligonucleotide
agcaagaataccggactaggagaacagatg

SEQ ID NO: 11373 - DNA, 30 bp, Artificial Sequence
  Synthetic oligonucleotide
atagggcaaacgtacagggggaaggagatg

SEQ ID NO: 11374 - DNA, 30 bp, Artificial Sequence
  Synthetic oligonucleotide
ggtgaaacgatgaggagcgagggcgtgctg

SEQ ID NO: 11375 - DNA, 30 bp, Artificial Sequence
  Synthetic oligonucleotide
ggacgaggcccgaggaaaagcaatgttgtg

SEQ ID NO: 11376 - DNA, 30 bp, Artificial Sequence
  Synthetic oligonucleotide
aacggataaggggaatggccaattgcagat

SEQ ID NO: 11377 - DNA, 30 bp, Artificial Sequence
  Synthetic oligonucleotide
cacaaggaggaaatagtgaggaaacgatct

SEQ ID NO: 11378 - DNA, 30 bp, Artificial Sequence
  Synthetic oligonucleotide
cgaagaaactaaggggtggtccgtatgatt

SEQ ID NO: 11379 - DNA, 30 bp, Artificial Sequence
  Synthetic oligonucleotide
tacgagagaacctaacgaaacgaggagaaa

SEQ ID NO: 11380 - DNA, 31 bp, Artificial Sequence
  Synthetic oligonucleotide
aggcaccgagaaagagattgcgtggaggaaa

SEQ ID NO: 11381 - DNA, 30 bp, Artificial Sequence
  Synthetic oligonucleotide
caaggaagatcaaaaatccggaaacaacaa

SEQ ID NO: 11382 - DNA, 30 bp, Artificial Sequence
  Synthetic oligonucleotide
acgagtatgcacagatccgtaaaaggccaa

SEQ ID NO: 11383 - DNA, 30 bp, Artificial Sequence
  Synthetic oligonucleotide
aggcgacggacagccgaccaccttaagcaa

SEQ ID NO: 11384 - DNA, 30 bp, Artificial Sequence
  Synthetic oligonucleotide
cgcgcaccaaggacaatacgaaggaaggaa

SEQ ID NO: 11385 - DNA, 30 bp, Artificial Sequence
  Synthetic oligonucleotide
cgtaagtaaagagttaagagagtggctgaa

SEQ ID NO: 11386 - DNA, 30 bp, Artificial Sequence
  Synthetic oligonucleotide
aggaatagagtgctgcaaagatgtacataa

SEQ ID NO: 11387 - DNA, 30 bp, Artificial Sequence
  Synthetic oligonucleotide
cgcatcaggaatccataacagagtagctaa

SEQ ID NO: 11388 - DNA, 30 bp, Artificial Sequence
  Synthetic oligonucleotide
cgataaggagaggatagtagtcttagcaca

SEQ ID NO: 11389 - DNA, 30 bp, Artificial Sequence
  Synthetic oligonucleotide
caggaagaagataacggaacaacccggaca

SEQ ID NO: 11390 - DNA, 30 bp, Artificial Sequence
  Synthetic oligonucleotide
aatcgagaagagggccaggcatagactaca

SEQ ID NO: 11391 - DNA, 30 bp, Artificial Sequence
  Synthetic oligonucleotide
agggacaaagagattgaaccagagcttaca

SEQ ID NO: 11392 - DNA, 30 bp, Artificial Sequence
  Synthetic oligonucleotide
tcattgtagacgggatcgaaagaacaagca

SEQ ID NO: 11393 - DNA, 30 bp, Artificial Sequence
  Synthetic oligonucleotide
tcgacgaaccagagtctataatgcatggca

SEQ ID NO: 11394 - DNA, 30 bp, Artificial Sequence
  Synthetic oligonucleotide
tcatcaaggggcaaaggtgagcatgattca

SEQ ID NO: 11395 - DNA, 30 bp, Artificial Sequence
  Synthetic oligonucleotide
agctgcgcggtagaaacataggaggccaga

SEQ ID NO: 11396 - DNA, 30 bp, Artificial Sequence
  Synthetic oligonucleotide
tgggcagcaagccaagcgcggaaatccaga

SEQ ID NO: 11397 - DNA, 30 bp, Artificial Sequence
  Synthetic oligonucleotide
cgaaatgcgccaatgagtacaagaaagaga

SEQ ID NO: 11398 - DNA, 30 bp, Artificial Sequence
  Synthetic oligonucleotide
taaggggtcgcgaaagaaccaggcaagaga

SEQ ID NO: 11399 - DNA, 29 bp, Artificial Sequence
  Synthetic oligonucleotide
acgacaatgagttggggtgaagggggaga

SEQ ID NO: 11400 - DNA, 30 bp, Artificial Sequence
  Synthetic oligonucleotide
cgggtagtgcctgaggacaagaagtggaga

SEQ ID NO: 11401 - DNA, 30 bp, Artificial Sequence
  Synthetic oligonucleotide
acggacgggagcgaacggatccgtactaga

SEQ ID NO: 11402 - DNA, 30 bp, Artificial Sequence
  Synthetic oligonucleotide
aggcatggaccgacaattgtgtaaccacga

SEQ ID NO: 11403 - DNA, 30 bp, Artificial Sequence
  Synthetic oligonucleotide
atgcccagatagcagagcacaacgggagga

SEQ ID NO: 11404 - DNA, 30 bp, Artificial Sequence
  Synthetic oligonucleotide
aacggtaagacttcgaaaggtaatgaggga

SEQ ID NO: 11405 - DNA, 30 bp, Artificial Sequence
  Synthetic oligonucleotide
caccagaggatacgctgaatggaaagggga

SEQ ID NO: 11406 - DNA, 30 bp, Artificial Sequence
  Synthetic oligonucleotide
ggcgaaggaaggataacaagattcggggga

SEQ ID NO: 11407 - DNA, 40 bp, Artificial Sequence
  Synthetic oligonucleotide
aagataatacattcatggtatgttcggggatcggggggga

SEQ ID NO: 11408 - DNA, 30 bp, Artificial Sequence
  Synthetic oligonucleotide
gcgaaggctacagaataggatgcgtactga

SEQ ID NO: 11409 - DNA, 31 bp, Artificial Sequence
  Synthetic oligonucleotide
cgttaaggaagagagaacagatagatggtga

SEQ ID NO: 11410 - DNA, 30 bp, Artificial Sequence
  Synthetic oligonucleotide
accacaagaaaagagagtgaggggtgaata

SEQ ID NO: 11411 - DNA, 31 bp, Artificial Sequence
  Synthetic oligonucleotide
ccgagacagataaagttacagcagtgatata

SEQ ID NO: 11412 - DNA, 30 bp, Artificial Sequence
  Synthetic oligonucleotide
cggaaccagagtatcggtacaaacatagta

SEQ ID NO: 11413 - DNA, 30 bp, Artificial Sequence
  Synthetic oligonucleotide
caggacagcgcagggtgaatcgagtgctac

SEQ ID NO: 11414 - DNA, 30 bp, Artificial Sequence
  Synthetic oligonucleotide
tactacgaaaacaaacgaaaagacatcgcc

SEQ ID NO: 11415 - DNA, 30 bp, Artificial Sequence
  Synthetic oligonucleotide
gggcaaccagcaaaatagaagtcgtaaggc

SEQ ID NO: 11416 - DNA, 30 bp, Artificial Sequence
  Synthetic oligonucleotide
gacgaacaggggcaagatatctgaaggaag

SEQ ID NO: 11417 - DNA, 30 bp, Artificial Sequence
  Synthetic oligonucleotide
cgtaaagacacaaagtcagcatgacataag

SEQ ID NO: 11418 - DNA, 30 bp, Artificial Sequence
  Synthetic oligonucleotide
caaggccagaaaaaaggagtccgcatccag

SEQ ID NO: 11419 - DNA, 30 bp, Artificial Sequence
  Synthetic oligonucleotide
gacgagaatgcaaatagtgggggaaagcag

SEQ ID NO: 11420 - DNA, 30 bp, Artificial Sequence
  Synthetic oligonucleotide
cggttaagcaggatgaaaaagactcggcag

SEQ ID NO: 11421 - DNA, 30 bp, Artificial Sequence
  Synthetic oligonucleotide
ccgagcgagatagaaagacaagtacgagag

SEQ ID NO: 11422 - DNA, 30 bp, Artificial Sequence
  Synthetic oligonucleotide
tcaagagtacgacaaaggacaagggtcgag

SEQ ID NO: 11423 - DNA, 30 bp, Artificial Sequence
  Synthetic oligonucleotide
gggaacgggaacaatgaataggaagctgag

SEQ ID NO: 11424 - DNA, 30 bp, Artificial Sequence
  Synthetic oligonucleotide
aggcggacctacagatagagagttcaaacg

SEQ ID NO: 11425 - DNA, 30 bp, Artificial Sequence
  Synthetic oligonucleotide
gcgaataaagccagaaaacagtgttacacg

SEQ ID NO: 11426 - DNA, 30 bp, Artificial Sequence
  Synthetic oligonucleotide
acataacacaagggaatggggaaaagaccg

SEQ ID NO: 11427 - DNA, 30 bp, Artificial Sequence
  Synthetic oligonucleotide
cgaggatgatagcgggcataactaacttcg

SEQ ID NO: 11428 - DNA, 30 bp, Artificial Sequence
  Synthetic oligonucleotide
gcgaagcggttggaaagaatcggcgacagg

SEQ ID NO: 11429 - DNA, 31 bp, Artificial Sequence
  Synthetic oligonucleotide
cggtaggaagcgtaaccacaatcgtaaccgg

SEQ ID NO: 11430 - DNA, 30 bp, Artificial Sequence
  Synthetic oligonucleotide
gataaagattacgaacaacgagacaagggg

SEQ ID NO: 11431 - DNA, 30 bp, Artificial Sequence
  Synthetic oligonucleotide
catcagacaaaatctaaagcaaagcgaatg

SEQ ID NO: 11432 - DNA, 30 bp, Artificial Sequence
  Synthetic oligonucleotide
ggcgtcgagagaacgaggggataaacactg

SEQ ID NO: 11433 - DNA, 30 bp, Artificial Sequence
  Synthetic oligonucleotide
gcatgacaataatggataagatagtcagtg

SEQ ID NO: 11434 - DNA, 30 bp, Artificial Sequence
  Synthetic oligonucleotide
cacgggtagggaccaaaattcgacagagtg

SEQ ID NO: 11435 - DNA, 30 bp, Artificial Sequence
  Synthetic oligonucleotide
aacggagggtacagtacggaaagctgaaat

SEQ ID NO: 11436 - DNA, 30 bp, Artificial Sequence
  Synthetic oligonucleotide
tacgaagtacagaatgacgagaacggcaat

SEQ ID NO: 11437 - DNA, 30 bp, Artificial Sequence
  Synthetic oligonucleotide
cgatacatctagcaaactataaaggcgaat

SEQ ID NO: 11438 - DNA, 30 bp, Artificial Sequence
  Synthetic oligonucleotide
cgagaaggatacgtagataagcgaaaatat

SEQ ID NO: 11439 - DNA, 30 bp, Artificial Sequence
  Synthetic oligonucleotide
cgtaacaaacagggaactagtatagaagct

SEQ ID NO: 11440 - DNA, 30 bp, Artificial Sequence
  Synthetic oligonucleotide
cacgtagggaaggaggaggtcgagaagtct

SEQ ID NO: 11441 - DNA, 30 bp, Artificial Sequence
  Synthetic oligonucleotide
gaagcaaggagaagcgatgggccgagaagt

SEQ ID NO: 11442 - DNA, 30 bp, Artificial Sequence
  Synthetic oligonucleotide
ggaggagccgaaagccagaataaaccagtt

SEQ ID NO: 11443 - DNA, 30 bp, Artificial Sequence
  Synthetic oligonucleotide
acgtgaggaaaccatagagaggacaaggtt

SEQ ID NO: 11444 - DNA, 30 bp, Artificial Sequence
  Synthetic oligonucleotide
acgatgccggtgaaggtgggggccgtgaaa

SEQ ID NO: 11445 - DNA, 30 bp, Artificial Sequence
  Synthetic oligonucleotide
agagggtaaggcttgagacaaactaaacaa

SEQ ID NO: 11446 - DNA, 30 bp, Artificial Sequence
  Synthetic oligonucleotide
ccaaagcagagagaccctgtcataagacaa

SEQ ID NO: 11447 - DNA, 30 bp, Artificial Sequence
  Synthetic oligonucleotide
aggaggctaccatacaacaacgaaatgcaa

SEQ ID NO: 11448 - DNA, 30 bp, Artificial Sequence
  Synthetic oligonucleotide
acgggagcgcaagttagggaagaagaggaa

SEQ ID NO: 11449 - DNA, 30 bp, Artificial Sequence
  Synthetic oligonucleotide
acgcccagaacaggaattagcggctaggaa

SEQ ID NO: 11450 - DNA, 30 bp, Artificial Sequence
  Synthetic oligonucleotide
acatagaaacgaaaagactgacatccataa

SEQ ID NO: 11451 - DNA, 30 bp, Artificial Sequence
  Synthetic oligonucleotide
cctcgaacttcaaagcgaagaacagcgtaa

SEQ ID NO: 11452 - DNA, 30 bp, Artificial Sequence
  Synthetic oligonucleotide
atgagggctaagcgaatgggaagattaaca

SEQ ID NO: 11453 - DNA, 30 bp, Artificial Sequence
  Synthetic oligonucleotide
aggaaatggagtggaacaacgatggcacca

SEQ ID NO: 11454 - DNA, 30 bp, Artificial Sequence
  Synthetic oligonucleotide
cggatagtacctgaaaaagacttagaagca

SEQ ID NO: 11455 - DNA, 30 bp, Artificial Sequence
  Synthetic oligonucleotide
cttaaagaagatgcgagaaaacaatcagca

SEQ ID NO: 11456 - DNA, 30 bp, Artificial Sequence
  Synthetic oligonucleotide
ggaagacaccagaagacggcttgagtagca

SEQ ID NO: 11457 - DNA, 30 bp, Artificial Sequence
  Synthetic oligonucleotide
taaacactaataaggaaaatgccgacgtca

SEQ ID NO: 11458 - DNA, 39 bp, Artificial Sequence
  Synthetic oligonucleotide
tttgttgtgtaggtttactcccgtataaatgctgcgtca

SEQ ID NO: 11459 - DNA, 30 bp, Artificial Sequence
  Synthetic oligonucleotide
gtaaaaacgaaaaatcgtaataacgtcaga

SEQ ID NO: 11460 - DNA, 30 bp, Artificial Sequence
  Synthetic oligonucleotide
acggttcgaccagagaacacgagcaataga

SEQ ID NO: 11461 - DNA, 31 bp, Artificial Sequence
  Synthetic oligonucleotide
cgccggggagagtaaacgttagaagtgcgga

SEQ ID NO: 11462 - DNA, 40 bp, Artificial Sequence
  Synthetic oligonucleotide
aagataatacattcatggtatggtcagggatcggggggga

SEQ ID NO: 11463 - DNA, 30 bp, Artificial Sequence
  Synthetic oligonucleotide
agtaaacgggaccgaaaagtagacatggga

SEQ ID NO: 11464 - DNA, 30 bp, Artificial Sequence
  Synthetic oligonucleotide
ggatggaagctaagagaagtcagccactga

SEQ ID NO: 11465 - DNA, 30 bp, Artificial Sequence
  Synthetic oligonucleotide
aggcaacgcaaaactaaggactaaggttga

SEQ ID NO: 11466 - DNA, 30 bp, Artificial Sequence
  Synthetic oligonucleotide
caaggaggtggaccgcgaaacagctaccta

SEQ ID NO: 11467 - DNA, 30 bp, Artificial Sequence
  Synthetic oligonucleotide
agacgagaggagtcgtttaggcaaagcgta

SEQ ID NO: 11468 - DNA, 30 bp, Artificial Sequence
  Synthetic oligonucleotide
cacgaaaagtgaggatgaggcgccggaaac

SEQ ID NO: 11469 - DNA, 30 bp, Artificial Sequence
  Synthetic oligonucleotide
agagaagagcggggtggcaatcaggcgaac

SEQ ID NO: 11470 - DNA, 31 bp, Artificial Sequence
  Synthetic oligonucleotide
acagaacaatgaggacaaccgacgaatacac

SEQ ID NO: 11471 - DNA, 34 bp, Artificial Sequence
  Synthetic oligonucleotide
gatactagaccaccacgtgtccctcagaaaagac

SEQ ID NO: 11472 - DNA, 30 bp, Artificial Sequence
  Synthetic oligonucleotide
cgcattgcaagagggaaaatacagagtgcc

SEQ ID NO: 11473 - DNA, 30 bp, Artificial Sequence
  Synthetic oligonucleotide
cgtaacgagagaagagtataactttcaaag

SEQ ID NO: 11474 - DNA, 30 bp, Artificial Sequence
  Synthetic oligonucleotide
tcaggtgtcaagcgagaaatactcgagaag

SEQ ID NO: 11475 - DNA, 30 bp, Artificial Sequence
  Synthetic oligonucleotide
gacgagcagaaagtatagcgtctcgaagag

SEQ ID NO: 11476 - DNA, 30 bp, Artificial Sequence
  Synthetic oligonucleotide
cgtaagcctcggtaatacagacagctggag

SEQ ID NO: 11477 - DNA, 30 bp, Artificial Sequence
  Synthetic oligonucleotide
cgtaaagtcggggaaaaacctattgcgtag

SEQ ID NO: 11478 - DNA, 30 bp, Artificial Sequence
  Synthetic oligonucleotide
ggaggtacggtaaaaaccaaattctcaacg

SEQ ID NO: 11479 - DNA, 30 bp, Artificial Sequence
  Synthetic oligonucleotide
ccggaccgaaagtgcaaagacatgggaacg

SEQ ID NO: 11480 - DNA, 30 bp, Artificial Sequence
  Synthetic oligonucleotide
cgtgaaccgaatcgagtgcaaatcaatacg

SEQ ID NO: 11481 - DNA, 30 bp, Artificial Sequence
  Synthetic oligonucleotide
cggcagacaaaggaccgaaaggatagaccg

SEQ ID NO: 11482 - DNA, 30 bp, Artificial Sequence
  Synthetic oligonucleotide
gcgcaaggcccggaaaacacaaaatcgccg

SEQ ID NO: 11483 - DNA, 30 bp, Artificial Sequence
  Synthetic oligonucleotide
cgaaggtgaaaatagtggcaaacatggccg

SEQ ID NO: 11484 - DNA, 30 bp, Artificial Sequence
  Synthetic oligonucleotide
acgcaaacagaattcaacctaatgccggcg

SEQ ID NO: 11485 - DNA, 30 bp, Artificial Sequence
  Synthetic oligonucleotide
cattaagaacaaacacaagaaaagagggcg

SEQ ID NO: 11486 - DNA, 31 bp, Artificial Sequence
  Synthetic oligonucleotide
acaacgggaaacctagaaacaaagatacagg

SEQ ID NO: 11487 - DNA, 30 bp, Artificial Sequence
  Synthetic oligonucleotide
aggttcaaagatactcaacgagaaatcagg

SEQ ID NO: 11488 - DNA, 30 bp, Artificial Sequence
  Synthetic oligonucleotide
acgaaaatgtagcctgcagacgtaagtcgg

SEQ ID NO: 11489 - DNA, 30 bp, Artificial Sequence
  Synthetic oligonucleotide
aagagcgagaagtgtcatcgccacagaggg

SEQ ID NO: 11490 - DNA, 30 bp, Artificial Sequence
  Synthetic oligonucleotide
cgtggaaccgaatgagtgatgtcctactgg

SEQ ID NO: 11491 - DNA, 30 bp, Artificial Sequence
  Synthetic oligonucleotide
agatgtcgtatgcggaaagaaagcgaaatg

SEQ ID NO: 11492 - DNA, 30 bp, Artificial Sequence
  Synthetic oligonucleotide
acgcgataagaagggcctaaaagcaacatg

SEQ ID NO: 11493 - DNA, 30 bp, Artificial Sequence
  Synthetic oligonucleotide
cgaaccggaaatgaggttgataagagagtg

SEQ ID NO: 11494 - DNA, 30 bp, Artificial Sequence
  Synthetic oligonucleotide
cgagaggaaccacggcctgaaaaaatcaat

SEQ ID NO: 11495 - DNA, 30 bp, Artificial Sequence
  Synthetic oligonucleotide
acggaatatttcgcaaaggggagagcagat

SEQ ID NO: 11496 - DNA, 30 bp, Artificial Sequence
  Synthetic oligonucleotide
gcgcgacgtccagggaagagggaggacact

SEQ ID NO: 11497 - DNA, 30 bp, Artificial Sequence
  Synthetic oligonucleotide
tcgaagaagaacaggaggtccgaaaggcct

SEQ ID NO: 11498 - DNA, 30 bp, Artificial Sequence
  Synthetic oligonucleotide
cgaaggagcgggaacaaaggcgaattgcgt

SEQ ID NO: 11499 - DNA, 30 bp, Artificial Sequence
  Synthetic oligonucleotide
caaaagagagtagcaaagcgggggaggtgt

SEQ ID NO: 11500 - DNA, 30 bp, Artificial Sequence
  Synthetic oligonucleotide
cgggacaaactacagataaacacgcgaatt

SEQ ID NO: 11501 - DNA, 30 bp, Artificial Sequence
  Synthetic oligonucleotide
cgaaactattaacgcaaggggaagcgggtt

SEQ ID NO: 11502 - DNA, 30 bp, Artificial Sequence
  Synthetic oligonucleotide
cgaacagaaaaatgtcatagtgcgacaaaa

SEQ ID NO: 11503 - DNA, 30 bp, Artificial Sequence
  Synthetic oligonucleotide
caatcggaatcacaacaaaaggggaacaaa

SEQ ID NO: 11504 - DNA, 30 bp, Artificial Sequence
  Synthetic oligonucleotide
ccgcacaagaagtgacccgagctgacgaaa

SEQ ID NO: 11505 - DNA, 30 bp, Artificial Sequence
  Synthetic oligonucleotide
tcagtgcaaaacgaaagcacagcgcggaaa

SEQ ID NO: 11506 - DNA, 30 bp, Artificial Sequence
  Synthetic oligonucleotide
gccaggcataaagagtcaacggcgaaagaa

SEQ ID NO: 11507 - DNA, 30 bp, Artificial Sequence
  Synthetic oligonucleotide
gacgggtgagaaacgagatatatccacgaa

SEQ ID NO: 11508 - DNA, 30 bp, Artificial Sequence
  Synthetic oligonucleotide
gtggagagaagaaatccaatagatagcgaa

SEQ ID NO: 11509 - DNA, 30 bp, Artificial Sequence
  Synthetic oligonucleotide
gcacaagaagcataaagtaacacgatcgaa

SEQ ID NO: 11510 - DNA, 30 bp, Artificial Sequence
  Synthetic oligonucleotide
acgaagttgtagaaaaggcctggagcggaa

SEQ ID NO: 11511 - DNA, 30 bp, Artificial Sequence
  Synthetic oligonucleotide
cggatccggccttgaaagagaagagagaca

SEQ ID NO: 11512 - DNA, 30 bp, Artificial Sequence
  Synthetic oligonucleotide
acgcgaaaaacagcaaaacatgggaaccca

SEQ ID NO: 11513 - DNA, 30 bp, Artificial Sequence
  Synthetic oligonucleotide
aggatgtacctgaataaaaaacgatgccca

SEQ ID NO: 11514 - DNA, 30 bp, Artificial Sequence
  Synthetic oligonucleotide
cggagcgtaaggggataagtggtataagca

SEQ ID NO: 11515 - DNA, 40 bp, Artificial Sequence
  Synthetic oligonucleotide
cggtaaggagggtcaccgacgtcgcgacgttgctgcgtca

SEQ ID NO: 11516 - DNA, 30 bp, Artificial Sequence
  Synthetic oligonucleotide
ccacgcttactaaaggcaacaaaaaggtca

SEQ ID NO: 11517 - DNA, 30 bp, Artificial Sequence
  Synthetic oligonucleotide
tcggcgacgtcgaaaacagactggctaaga

SEQ ID NO: 11518 - DNA, 30 bp, Artificial Sequence
  Synthetic oligonucleotide
agaaggagtgtggacaagcgtgacaccaga

SEQ ID NO: 11519 - DNA, 30 bp, Artificial Sequence
  Synthetic oligonucleotide
agagaggaacacgggatggcgaacgcgaga

SEQ ID NO: 11520 - DNA, 30 bp, Artificial Sequence
  Synthetic oligonucleotide
aggaactatgacaccaaagctgacactaga

SEQ ID NO: 11521 - DNA, 30 bp, Artificial Sequence
  Synthetic oligonucleotide
caaggggaggcaacaatagcgatcatacga

SEQ ID NO: 11522 - DNA, 30 bp, Artificial Sequence
  Synthetic oligonucleotide
gcgatggaacactctagggaccaagctcga

SEQ ID NO: 11523 - DNA, 30 bp, Artificial Sequence
  Synthetic oligonucleotide
cacaggggagagcacatagtagggaaagga

SEQ ID NO: 11524 - DNA, 30 bp, Artificial Sequence
  Synthetic oligonucleotide
cgtaaggacagagaaaaatactatcgagga

SEQ ID NO: 11525 - DNA, 39 bp, Artificial Sequence
  Synthetic oligonucleotide
aagataaacattcatggtatggtcggggatcggggggga

SEQ ID NO: 11526 - DNA, 30 bp, Artificial Sequence
  Synthetic oligonucleotide
accgtgcaaggacatgggaaaaaaagtgga

SEQ ID NO: 11527 - DNA, 30 bp, Artificial Sequence
  Synthetic oligonucleotide
gcctcgagactagggaagaccaccgaaata

SEQ ID NO: 11528 - DNA, 30 bp, Artificial Sequence
  Synthetic oligonucleotide
acacagacagggtcgaaggcaggaagaata

SEQ ID NO: 11529 - DNA, 30 bp, Artificial Sequence
  Synthetic oligonucleotide
cggctaggccgcgaaaaagtgaagtgcata

SEQ ID NO: 11530 - DNA, 30 bp, Artificial Sequence
  Synthetic oligonucleotide
accgccaaacagggggacaaaggtcagata

SEQ ID NO: 11531 - DNA, 30 bp, Artificial Sequence
  Synthetic oligonucleotide
cacgagaacagtgcgaacatgattaaacta

SEQ ID NO: 11532 - DNA, 30 bp, Artificial Sequence
  Synthetic oligonucleotide
cacgcagtaggcgggagtgagaagcgagta

SEQ ID NO: 11533 - DNA, 30 bp, Artificial Sequence
  Synthetic oligonucleotide
cgaggaaggggactgagaacattctatgta

SEQ ID NO: 11534 - DNA, 40 bp, Artificial Sequence
  Synthetic oligonucleotide
ttcgaggagtgcgtgcggaaatgaaggtagcggcaagtta

SEQ ID NO: 11535 - DNA, 30 bp, Artificial Sequence
  Synthetic oligonucleotide
agggaaccaatatgtacactatgagagaac

SEQ ID NO: 11536 - DNA, 30 bp, Artificial Sequence
  Synthetic oligonucleotide
acgccgggaagagtgattacgcggtgagac

SEQ ID NO: 11537 - DNA, 30 bp, Artificial Sequence
  Synthetic oligonucleotide
cggagaggctcgcgaagaaagtacagggac

SEQ ID NO: 11538 - DNA, 30 bp, Artificial Sequence
  Synthetic oligonucleotide
acgtgaagatcgagtgtggacaattgggac

SEQ ID NO: 11539 - DNA, 30 bp, Artificial Sequence
  Synthetic oligonucleotide
catcgaacgagaaccatagcggtaggcccc

SEQ ID NO: 11540 - DNA, 30 bp, Artificial Sequence
  Synthetic oligonucleotide
cgagtaacaagctatctgagagaacggccc

SEQ ID NO: 11541 - DNA, 30 bp, Artificial Sequence
  Synthetic oligonucleotide
agggtaaagaactcgaacgaaaggcagtgc

SEQ ID NO: 11542 - DNA, 30 bp, Artificial Sequence
  Synthetic oligonucleotide
cgaccgaacaagaataaatgctgtcatgtc

SEQ ID NO: 11543 - DNA, 30 bp, Artificial Sequence
  Synthetic oligonucleotide
atggggagaccacgacaatcacgcctcaag

SEQ ID NO: 11544 - DNA, 30 bp, Artificial Sequence
  Synthetic oligonucleotide
aggggaacgagagtaagtaaaatgaagaag

SEQ ID NO: 11545 - DNA, 30 bp, Artificial Sequence
  Synthetic oligonucleotide
aggtgagaggacactacaaagggtacgaag

SEQ ID NO: 11546 - DNA, 30 bp, Artificial Sequence
  Synthetic oligonucleotide
cgaagcgaaatggtgctcgatattgtgaag

SEQ ID NO: 11547 - DNA, 30 bp, Artificial Sequence
  Synthetic oligonucleotide
caataaccaaagctaagaacgcactgtaag

SEQ ID NO: 11548 - DNA, 30 bp, Artificial Sequence
  Synthetic oligonucleotide
aggccgaaatacataacgatgggcacacag

SEQ ID NO: 11549 - DNA, 30 bp, Artificial Sequence
  Synthetic oligonucleotide
cgagcgcgatgtaaatcaagacttgatcag

SEQ ID NO: 11550 - DNA, 30 bp, Artificial Sequence
  Synthetic oligonucleotide
cgccgagaggcggacgaaagatgagctcag

SEQ ID NO: 11551 - DNA, 30 bp, Artificial Sequence
  Synthetic oligonucleotide
cctcgaggaggctgataatgaggagacgag

SEQ ID NO: 11552 - DNA, 30 bp, Artificial Sequence
  Synthetic oligonucleotide
ccgtactgcgaaacagcgaggaggctcgag

SEQ ID NO: 11553 - DNA, 30 bp, Artificial Sequence
  Synthetic oligonucleotide
acaacgaaataacacgggacgagtgtcgag

SEQ ID NO: 11554 - DNA, 30 bp, Artificial Sequence
  Synthetic oligonucleotide
ggcatcaataaacacgatccccgcaaggag

SEQ ID NO: 11555 - DNA, 30 bp, Artificial Sequence
  Synthetic oligonucleotide
agagggtggacgacgaaatagacgtgggag

SEQ ID NO: 11556 - DNA, 30 bp, Artificial Sequence
  Synthetic oligonucleotide
taacgggtaaagcaagtcaagctcaatgag

SEQ ID NO: 11557 - DNA, 30 bp, Artificial Sequence
  Synthetic oligonucleotide
ctgaacgcgagtcagagttggtaacatgag

SEQ ID NO: 11558 - DNA, 30 bp, Artificial Sequence
  Synthetic oligonucleotide
ataaggcggcaaccgagggtagagcaatag

SEQ ID NO: 11559 - DNA, 30 bp, Artificial Sequence
  Synthetic oligonucleotide
aggggggatattgaaacggcaacacaaacg

SEQ ID NO: 11560 - DNA, 30 bp, Artificial Sequence
  Synthetic oligonucleotide
gcgtccagcgaagaagggtgaggtactacg

SEQ ID NO: 11561 - DNA, 30 bp, Artificial Sequence
  Synthetic oligonucleotide
cgcttatgaaccaaaagtagagcaaagccg

SEQ ID NO: 11562 - DNA, 30 bp, Artificial Sequence
  Synthetic oligonucleotide
agggagaggaaatcagaaaggcagtcgccg

SEQ ID NO: 11563 - DNA, 31 bp, Artificial Sequence
  Synthetic oligonucleotide
aggaactgaacgacggtaaaagcgtggaagg

SEQ ID NO: 11564 - DNA, 30 bp, Artificial Sequence
  Synthetic oligonucleotide
tcgcgagcccgagaagatgggcgaaaaggg

SEQ ID NO: 11565 - DNA, 30 bp, Artificial Sequence
  Synthetic oligonucleotide
ccaaagaggaagagcgtagtccacagctgg

SEQ ID NO: 11566 - DNA, 30 bp, Artificial Sequence
  Synthetic oligonucleotide
ccgacgaatgcggaacacagtaagtagatg

SEQ ID NO: 11567 - DNA, 30 bp, Artificial Sequence
  Synthetic oligonucleotide
cggcagaaagcatgtcgtcgggtaagagtg

SEQ ID NO: 11568 - DNA, 30 bp, Artificial Sequence
  Synthetic oligonucleotide
gcggggaagggaagcaagatttaatagttg

SEQ ID NO: 11569 - DNA, 30 bp, Artificial Sequence
  Synthetic oligonucleotide
ttgttgtgttctctttttttgttttcctat

SEQ ID NO: 11570 - DNA, 30 bp, Artificial Sequence
  Synthetic oligonucleotide
gtagggaaaaccagaaggatggcgaattat

SEQ ID NO: 11571 - DNA, 30 bp, Artificial Sequence
  Synthetic oligonucleotide
agaacaggccaggacactgtaagaaatagt

SEQ ID NO: 11572 - DNA, 30 bp, Artificial Sequence
  Synthetic oligonucleotide
aagggcgtggtgaaaaagccgaggaaacgt

SEQ ID NO: 11573 - DNA, 30 bp, Artificial Sequence
  Synthetic oligonucleotide
cacgacagcggagaaaagatggaggaacgt

SEQ ID NO: 11574 - DNA, 30 bp, Artificial Sequence
  Synthetic oligonucleotide
ttgtgtgtttctttgctgggtgaatccctt

SEQ ID NO: 11575 - DNA, 30 bp, Artificial Sequence
  Synthetic oligonucleotide
ggagagtaaagagaagctaagccaagaaaa

SEQ ID NO: 11576 - DNA, 30 bp, Artificial Sequence
  Synthetic oligonucleotide
atgcgcgaaggcgtgaagaaggactgaaaa

SEQ ID NO: 11577 - DNA, 30 bp, Artificial Sequence
  Synthetic oligonucleotide
gcgagaacaataatgtggagagctgtcaaa

SEQ ID NO: 11578 - DNA, 30 bp, Artificial Sequence
  Synthetic oligonucleotide
caaaccgtgggagaaagacagataacagaa

SEQ ID NO: 11579 - DNA, 30 bp, Artificial Sequence
  Synthetic oligonucleotide
acgggacaggacagattatcggtaacagaa

SEQ ID NO: 11580 - DNA, 30 bp, Artificial Sequence
  Synthetic oligonucleotide
ccgtagggagggtagcgcaaagatcgcgaa

SEQ ID NO: 11581 - DNA, 30 bp, Artificial Sequence
  Synthetic oligonucleotide
aacgaaaagcaatacttatggaggactgaa

SEQ ID NO: 11582 - DNA, 30 bp, Artificial Sequence
  Synthetic oligonucleotide
cgagatgtaaaacaaatgcatcggcgtgaa

SEQ ID NO: 11583 - DNA, 30 bp, Artificial Sequence
  Synthetic oligonucleotide
agggataccactcggcaaagaagacaataa

SEQ ID NO: 11584 - DNA, 30 bp, Artificial Sequence
  Synthetic oligonucleotide
ggcagaacacaggaaacaacgtggctaaca

SEQ ID NO: 11585 - DNA, 30 bp, Artificial Sequence
  Synthetic oligonucleotide
aaggaaaggggaaagattaaatggtgtaca

SEQ ID NO: 11586 - DNA, 30 bp, Artificial Sequence
  Synthetic oligonucleotide
gcggacgtagacaccataaaaaaaggccca

SEQ ID NO: 11587 - DNA, 30 bp, Artificial Sequence
  Synthetic oligonucleotide
agggttccaaccgaaatgcatacaagcaga

SEQ ID NO: 11588 - DNA, 30 bp, Artificial Sequence
  Synthetic oligonucleotide
acgagaagtgcataacacctagcgtgcaga

SEQ ID NO: 11589 - DNA, 30 bp, Artificial Sequence
  Synthetic oligonucleotide
gaagggcatacgagcaacagaagactcaga

SEQ ID NO: 11590 - DNA, 30 bp, Artificial Sequence
  Synthetic oligonucleotide
ccacgacgtatcgcggtacagagggaagga

SEQ ID NO: 11591 - DNA, 30 bp, Artificial Sequence
  Synthetic oligonucleotide
aggaacaaacgaagttacgtgataccagga

SEQ ID NO: 11592 - DNA, 30 bp, Artificial Sequence
  Synthetic oligonucleotide
agcgcgatcgggtacaaagtgactggagga

SEQ ID NO: 11593 - DNA, 30 bp, Artificial Sequence
  Synthetic oligonucleotide
agacaagcaaaatatacgggacggctcgga

SEQ ID NO: 11594 - DNA, 30 bp, Artificial Sequence
  Synthetic oligonucleotide
acgtcgggtacacgaagatagcgtctcgga

SEQ ID NO: 11595 - DNA, 30 bp, Artificial Sequence
  Synthetic oligonucleotide
acgggaagtctgctagtaacccgagaggga

SEQ ID NO: 11596 - DNA, 30 bp, Artificial Sequence
  Synthetic oligonucleotide
gtgcatgcgaccaagaagaataagaagtga

SEQ ID NO: 11597 - DNA, 30 bp, Artificial Sequence
  Synthetic oligonucleotide
gtcacacgacgaatggagaacaggccaata

SEQ ID NO: 11598 - DNA, 30 bp, Artificial Sequence
  Synthetic oligonucleotide
aaggggggctgcaaaacataaaagggaata

SEQ ID NO: 11599 - DNA, 30 bp, Artificial Sequence
  Synthetic oligonucleotide
atgctaacagagagtagagcatgtggaata

SEQ ID NO: 11600 - DNA, 30 bp, Artificial Sequence
  Synthetic oligonucleotide
ccgtgagggaaagagtactccagcgtggta

SEQ ID NO: 11601 - DNA, 30 bp, Artificial Sequence
  Synthetic oligonucleotide
atagcgccaaaagaacaaagcggtgcatac

SEQ ID NO: 11602 - DNA, 30 bp, Artificial Sequence
  Synthetic oligonucleotide
cgcaatggatacggatacggaatgccgacc

SEQ ID NO: 11603 - DNA, 30 bp, Artificial Sequence
  Synthetic oligonucleotide
aacggatggaacaacatacatgagcagtcc

SEQ ID NO: 11604 - DNA, 30 bp, Artificial Sequence
  Synthetic oligonucleotide
acgtgtatagaaaactagcctacactaagc

SEQ ID NO: 11605 - DNA, 30 bp, Artificial Sequence
  Synthetic oligonucleotide
aataggaggatgagaagagtgagcacgagc

SEQ ID NO: 11606 - DNA, 30 bp, Artificial Sequence
  Synthetic oligonucleotide
gcgagtcagaagaacatagtaggataaaag

SEQ ID NO: 11607 - DNA, 30 bp, Artificial Sequence
  Synthetic oligonucleotide
ccgcaagaggaacaatccttcgctacaaag

SEQ ID NO: 11608 - DNA, 30 bp, Artificial Sequence
  Synthetic oligonucleotide
agtcacaaagagaaacggtatacgctaaag

SEQ ID NO: 11609 - DNA, 31 bp, Artificial Sequence
  Synthetic oligonucleotide
cctaggggtaagctgcaaaaggcagagcaag

SEQ ID NO: 11610 - DNA, 30 bp, Artificial Sequence
  Synthetic oligonucleotide
gaaagccgaaatcaatgaataaagtgcaag

SEQ ID NO: 11611 - DNA, 30 bp, Artificial Sequence
  Synthetic oligonucleotide
caatacgacgacatctaacaacgcaagaag

SEQ ID NO: 11612 - DNA, 30 bp, Artificial Sequence
  Synthetic oligonucleotide
catgcggattcgagggagggcaaacagaag

SEQ ID NO: 11613 - DNA, 30 bp, Artificial Sequence
  Synthetic oligonucleotide
acgatgggacaagcaagacgatacgataag

SEQ ID NO: 11614 - DNA, 30 bp, Artificial Sequence
  Synthetic oligonucleotide
agtcgcagatggcaggagataccaaaacag

SEQ ID NO: 11615 - DNA, 30 bp, Artificial Sequence
  Synthetic oligonucleotide
acagcaaatgaacagtaaggaaacgaacag

SEQ ID NO: 11616 - DNA, 30 bp, Artificial Sequence
  Synthetic oligonucleotide
aatcgaacagtgcaagaacagccaacacag

SEQ ID NO: 11617 - DNA, 30 bp, Artificial Sequence
  Synthetic oligonucleotide
aacggagagacaaaaggaacaccaatacag

SEQ ID NO: 11618 - DNA, 30 bp, Artificial Sequence
  Synthetic oligonucleotide
agggtacaacgaacctgagtaccggtacag

SEQ ID NO: 11619 - DNA, 30 bp, Artificial Sequence
  Synthetic oligonucleotide
ggtcagactcaaccagaacatcacgagcag

SEQ ID NO: 11620 - DNA, 30 bp, Artificial Sequence
  Synthetic oligonucleotide
aggtaatagacggaaacaggtcgagaagag

SEQ ID NO: 11621 - DNA, 30 bp, Artificial Sequence
  Synthetic oligonucleotide
gcgatataacgactaagaataacgccatag

SEQ ID NO: 11622 - DNA, 30 bp, Artificial Sequence
  Synthetic oligonucleotide
cggtaagagcggaactgtgcgggatagtag

SEQ ID NO: 11623 - DNA, 30 bp, Artificial Sequence
  Synthetic oligonucleotide
accgtaaaaacatgtgaaatcaacacaacg

SEQ ID NO: 11624 - DNA, 30 bp, Artificial Sequence
  Synthetic oligonucleotide
cgagtataagcaaacgaaacaacgcatacg

SEQ ID NO: 11625 - DNA, 30 bp, Artificial Sequence
  Synthetic oligonucleotide
tgagggtaagaaaccaaatgcgcaagaccg

SEQ ID NO: 11626 - DNA, 30 bp, Artificial Sequence
  Synthetic oligonucleotide
agggcgtagaaataaactaagatatggccg

SEQ ID NO: 11627 - DNA, 30 bp, Artificial Sequence
  Synthetic oligonucleotide
tgcgaatagcaaaagagcgcaatagtatcg

SEQ ID NO: 11628 - DNA, 30 bp, Artificial Sequence
  Synthetic oligonucleotide
cgaagagtaagtaagtggcgatccatctcg

SEQ ID NO: 11629 - DNA, 30 bp, Artificial Sequence
  Synthetic oligonucleotide
caggagccaacgacatctcaaatgctctcg

SEQ ID NO: 11630 - DNA, 30 bp, Artificial Sequence
  Synthetic oligonucleotide
agtgcgacaacaagggaactaattgagggg

SEQ ID NO: 11631 - DNA, 30 bp, Artificial Sequence
  Synthetic oligonucleotide
accataaacaagtgggatcagagagtggtg

SEQ ID NO: 11632 - DNA, 30 bp, Artificial Sequence
  Synthetic oligonucleotide
agccacagatagagcatagcaagtcgggat

SEQ ID NO: 11633 - DNA, 30 bp, Artificial Sequence
  Synthetic oligonucleotide
ccaggcgaggatatgaaaaaatgacatcgt

SEQ ID NO: 11634 - DNA, 30 bp, Artificial Sequence
  Synthetic oligonucleotide
aagggggtgcagtacgagacaaatagagtt

SEQ ID NO: 11635 - DNA, 30 bp, Artificial Sequence
  Synthetic oligonucleotide
agggtacctcgagactaaaggagctcaaaa

SEQ ID NO: 11636 - DNA, 30 bp, Artificial Sequence
  Synthetic oligonucleotide
agggaagaaaaaaaaattgctctccggaaa

SEQ ID NO: 11637 - DNA, 30 bp, Artificial Sequence
  Synthetic oligonucleotide
acgcgccaagatatacggcttacaccagaa

SEQ ID NO: 11638 - DNA, 30 bp, Artificial Sequence
  Synthetic oligonucleotide
agcgggcggagagaggcccacaaaagagaa

SEQ ID NO: 11639 - DNA, 30 bp, Artificial Sequence
  Synthetic oligonucleotide
cggaaactaacattacggtagagagaggaa

SEQ ID NO: 11640 - DNA, 30 bp, Artificial Sequence
  Synthetic oligonucleotide
caccgtgcaatgacagaggaaccaacgtaa

SEQ ID NO: 11641 - DNA, 30 bp, Artificial Sequence
  Synthetic oligonucleotide
ccgagacagggaagactcttgtgcgcgtaa

SEQ ID NO: 11642 - DNA, 30 bp, Artificial Sequence
  Synthetic oligonucleotide
accaaaaagtccagagtgggtgtgaaaaca

SEQ ID NO: 11643 - DNA, 30 bp, Artificial Sequence
  Synthetic oligonucleotide
aaggcggggtccgaaggtcagcatgaaaca

SEQ ID NO: 11644 - DNA, 30 bp, Artificial Sequence
  Synthetic oligonucleotide
cgaaagaaaatcaaagagaaacggttaaca

SEQ ID NO: 11645 - DNA, 30 bp, Artificial Sequence
  Synthetic oligonucleotide
tcgtgatcgtggacagaaacaccaagcaca

SEQ ID NO: 11646 - DNA, 30 bp, Artificial Sequence
  Synthetic oligonucleotide
agcataaaaacaggagtgatcactagccca

SEQ ID NO: 11647 - DNA, 30 bp, Artificial Sequence
  Synthetic oligonucleotide
ctggaggttggaagagcgagaagcacatca

SEQ ID NO: 11648 - DNA, 30 bp, Artificial Sequence
  Synthetic oligonucleotide
tcaaggggggaacgactttgcgcacagaga

SEQ ID NO: 11649 - DNA, 30 bp, Artificial Sequence
  Synthetic oligonucleotide
cactaaggaggtaagaaatcacgggagaga

SEQ ID NO: 11650 - DNA, 30 bp, Artificial Sequence
  Synthetic oligonucleotide
cggaacccaaggttaacgtcgtccaggaga

SEQ ID NO: 11651 - DNA, 30 bp, Artificial Sequence
  Synthetic oligonucleotide
gttaaggacaaaggtaagagatgagggaga

SEQ ID NO: 11652 - DNA, 30 bp, Artificial Sequence
  Synthetic oligonucleotide
agcgagagctactgacaataaatcgggaga

SEQ ID NO: 11653 - DNA, 30 bp, Artificial Sequence
  Synthetic oligonucleotide
aacggaagaactagggagggatgatttaga

SEQ ID NO: 11654 - DNA, 30 bp, Artificial Sequence
  Synthetic oligonucleotide
cgcaaaacagaatggatgaccagttgacga

SEQ ID NO: 11655 - DNA, 30 bp, Artificial Sequence
  Synthetic oligonucleotide
acgatcaatcaaggagacacataggggcga

SEQ ID NO: 11656 - DNA, 40 bp, Artificial Sequence
  Synthetic oligonucleotide
aagataatacattcatggtatggtcgtggatcggggggga

SEQ ID NO: 11657 - DNA, 30 bp, Artificial Sequence
  Synthetic oligonucleotide
gtgcccgcgaataaaggtgagagtgcgata

SEQ ID NO: 11658 - DNA, 30 bp, Artificial Sequence
  Synthetic oligonucleotide
aacaaaagcaacacaacgaccagaacacta

SEQ ID NO: 11659 - DNA, 30 bp, Artificial Sequence
  Synthetic oligonucleotide
tcacgaaacggaaatcgagcatgcccacta

SEQ ID NO: 11660 - DNA, 30 bp, Artificial Sequence
  Synthetic oligonucleotide
gggaagcctacgagaagatatagaagtcta

SEQ ID NO: 11661 - DNA, 30 bp, Artificial Sequence
  Synthetic oligonucleotide
cctgaaggaagaggggtagatacgggagta

SEQ ID NO: 11662 - DNA, 30 bp, Artificial Sequence
  Synthetic oligonucleotide
gcaaggtgcgtgacaaaggaagtagatgta

SEQ ID NO: 11663 - DNA, 30 bp, Artificial Sequence
  Synthetic oligonucleotide
gcgggagggacggttcacacacaacaatta

SEQ ID NO: 11664 - DNA, 30 bp, Artificial Sequence
  Synthetic oligonucleotide
aaaggatgccgggtagaacgaaacgaatta

SEQ ID NO: 11665 - DNA, 30 bp, Artificial Sequence
  Synthetic oligonucleotide
acgaaagctaaaagcaaaaagcgagcaaac

SEQ ID NO: 11666 - DNA, 30 bp, Artificial Sequence
  Synthetic oligonucleotide
cgatctaaaggaggacatgcgcaagcacac

SEQ ID NO: 11667 - DNA, 30 bp, Artificial Sequence
  Synthetic oligonucleotide
acggcaggtgaattgtgaagtcggcaagac

SEQ ID NO: 11668 - DNA, 30 bp, Artificial Sequence
  Synthetic oligonucleotide
cagccgcaagagtgggaaaatgggcgatac

SEQ ID NO: 11669 - DNA, 30 bp, Artificial Sequence
  Synthetic oligonucleotide
agccaactgcaagagggagagactgacacc

SEQ ID NO: 11670 - DNA, 30 bp, Artificial Sequence
  Synthetic oligonucleotide
cggaggcaagaaaacaactgaagattcacc

SEQ ID NO: 11671 - DNA, 30 bp, Artificial Sequence
  Synthetic oligonucleotide
aaggagtgaggaacgtactcaagagtgagc

SEQ ID NO: 11672 - DNA, 30 bp, Artificial Sequence
  Synthetic oligonucleotide
agccagcctgaaccagagagtagagccgtc

SEQ ID NO: 11673 - DNA, 30 bp, Artificial Sequence
  Synthetic oligonucleotide
atcgggatagtgggaaagtaggaacaaaag

SEQ ID NO: 11674 - DNA, 30 bp, Artificial Sequence
  Synthetic oligonucleotide
catgaaagacataccaaacccctgcaaaag

SEQ ID NO: 11675 - DNA, 30 bp, Artificial Sequence
  Synthetic oligonucleotide
gcaaggcgatgaagaatatctaagctcaag

SEQ ID NO: 11676 - DNA, 30 bp, Artificial Sequence
  Synthetic oligonucleotide
acagacagagcaacaatggagcaatcgaag

SEQ ID NO: 11677 - DNA, 30 bp, Artificial Sequence
  Synthetic oligonucleotide
ggacagtgggcaacgaagacgagcaataag

SEQ ID NO: 11678 - DNA, 30 bp, Artificial Sequence
  Synthetic oligonucleotide
acgatgccgagacaaatgaatgatagacag

SEQ ID NO: 11679 - DNA, 30 bp, Artificial Sequence
  Synthetic oligonucleotide
ccgagcaaccaacgtctaagacatcgacag

SEQ ID NO: 11680 - DNA, 30 bp, Artificial Sequence
  Synthetic oligonucleotide
aaggagaaacaagaatcaaggcatatccag

SEQ ID NO: 11681 - DNA, 30 bp, Artificial Sequence
  Synthetic oligonucleotide
aggggaaacgattaataaccatcacatcag

SEQ ID NO: 11682 - DNA, 30 bp, Artificial Sequence
  Synthetic oligonucleotide
agggggtgttgggatcaagaaacgagagag

SEQ ID NO: 11683 - DNA, 30 bp, Artificial Sequence
  Synthetic oligonucleotide
agggccatcacatacagcaacgaattagag

SEQ ID NO: 11684 - DNA, 30 bp, Artificial Sequence
  Synthetic oligonucleotide
gcttgagcaaagggatagccccagaccgag

SEQ ID NO: 11685 - DNA, 30 bp, Artificial Sequence
  Synthetic oligonucleotide
tcagaaaagaacttgagcaggcaacccgag

SEQ ID NO: 11686 - DNA, 30 bp, Artificial Sequence
  Synthetic oligonucleotide
ccggatcagaaaaacacgtgccggagggag

SEQ ID NO: 11687 - DNA, 30 bp, Artificial Sequence
  Synthetic oligonucleotide
acgtcaaaagacaggagcatggctattgag

SEQ ID NO: 11688 - DNA, 30 bp, Artificial Sequence
  Synthetic oligonucleotide
tgaccccaaccataccaacaacatccatag

SEQ ID NO: 11689 - DNA, 30 bp, Artificial Sequence
  Synthetic oligonucleotide
gtcggcgggcagacagaaatgaccagatag

SEQ ID NO: 11690 - DNA, 30 bp, Artificial Sequence
  Synthetic oligonucleotide
cgaaccagaagcgggtagagcgttaacacg

SEQ ID NO: 11691 - DNA, 30 bp, Artificial Sequence
  Synthetic oligonucleotide
atgggtgggtaaaagatagccgagaccacg

SEQ ID NO: 11692 - DNA, 30 bp, Artificial Sequence
  Synthetic oligonucleotide
tcaggcaacattacaactcgtaagccatcg

SEQ ID NO: 11693 - DNA, 30 bp, Artificial Sequence
  Synthetic oligonucleotide
taggtcgtaaacgaacatgagcatccatcg

SEQ ID NO: 11694 - DNA, 30 bp, Artificial Sequence
  Synthetic oligonucleotide
cggagagaccaagtttctccagaaagatcg

SEQ ID NO: 11695 - DNA, 30 bp, Artificial Sequence
  Synthetic oligonucleotide
tatgaacaaaaaaagaggatgggcatgtcg

SEQ ID NO: 11696 - DNA, 30 bp, Artificial Sequence
  Synthetic oligonucleotide
acgcgttagcaaagatacgagttagtaagg

SEQ ID NO: 11697 - DNA, 30 bp, Artificial Sequence
  Synthetic oligonucleotide
ggtcaacaggaagggaaaatctacaccagg

SEQ ID NO: 11698 - DNA, 30 bp, Artificial Sequence
  Synthetic oligonucleotide
caaggtaatgcaggagaaacgaccatcagg

SEQ ID NO: 11699 - DNA, 30 bp, Artificial Sequence
  Synthetic oligonucleotide
agacgaacggaagcggaaaaacgtacgcgg

SEQ ID NO: 11700 - DNA, 30 bp, Artificial Sequence
  Synthetic oligonucleotide
ttgagcacatagataaactaaggaaggcgg

SEQ ID NO: 11701 - DNA, 30 bp, Artificial Sequence
  Synthetic oligonucleotide
aggaggacgactgattcaggagataacggg

SEQ ID NO: 11702 - DNA, 30 bp, Artificial Sequence
  Synthetic oligonucleotide
tggacctacgtaagaaagaggtaaaggggg

SEQ ID NO: 11703 - DNA, 30 bp, Artificial Sequence
  Synthetic oligonucleotide
agacaaaggctcataacgaagagaagttgg

SEQ ID NO: 11704 - DNA, 30 bp, Artificial Sequence
  Synthetic oligonucleotide
gcgtaaggactggacagtgaacctgacatg

SEQ ID NO: 11705 - DNA, 30 bp, Artificial Sequence
  Synthetic oligonucleotide
ggcacggaagcaagtgaaagagtcaacctg

SEQ ID NO: 11706 - DNA, 30 bp, Artificial Sequence
  Synthetic oligonucleotide
attgaacagaaaccacatgccaatccagtg

SEQ ID NO: 11707 - DNA, 30 bp, Artificial Sequence
  Synthetic oligonucleotide
agagtatacgagacaaaatctagagccgtg

SEQ ID NO: 11708 - DNA, 30 bp, Artificial Sequence
  Synthetic oligonucleotide
gccgtcacgaggaaagagagagtgccggtg

SEQ ID NO: 11709 - DNA, 30 bp, Artificial Sequence
  Synthetic oligonucleotide
caatcgtagaaaatggcctagggaaatgtg

SEQ ID NO: 11710 - DNA, 32 bp, Artificial Sequence
  Synthetic oligonucleotide
cggtaaggagggtcaccgacgtcgcgccgttg

SEQ ID NO: 11711 - DNA, 30 bp, Artificial Sequence
  Synthetic oligonucleotide
aggtggagactaccatagttgaaagggcat

SEQ ID NO: 11712 - DNA, 30 bp, Artificial Sequence
  Synthetic oligonucleotide
gcggggagggagtataaaacaaacatagat

SEQ ID NO: 11713 - DNA, 30 bp, Artificial Sequence
  Synthetic oligonucleotide
cgagagcaaggggccagaaatgtcgagtat

SEQ ID NO: 11714 - DNA, 30 bp, Artificial Sequence
  Synthetic oligonucleotide
atggtgcgcgcgaaaacgaagggagtgtat

SEQ ID NO: 11715 - DNA, 30 bp, Artificial Sequence
  Synthetic oligonucleotide
taagccgtgcaggtagggaggagagcatgt

SEQ ID NO: 11716 - DNA, 30 bp, Artificial Sequence
  Synthetic oligonucleotide
acgaaagaagaccatgtagggaaccactgt

SEQ ID NO: 11717 - DNA, 30 bp, Artificial Sequence
  Synthetic oligonucleotide
gacgacgacgatgataaggtgagagtggtt

SEQ ID NO: 11718 - DNA, 30 bp, Artificial Sequence
  Synthetic oligonucleotide
ccgacagaaaacgggcccaccatgcaaaaa

SEQ ID NO: 11719 - DNA, 30 bp, Artificial Sequence
  Synthetic oligonucleotide
cgcgaaataaaatcaaacaaggcgaacaaa

SEQ ID NO: 11720 - DNA, 30 bp, Artificial Sequence
  Synthetic oligonucleotide
ccgaaagtggccaaccagctagatcacaaa

SEQ ID NO: 11721 - DNA, 30 bp, Artificial Sequence
  Synthetic oligonucleotide
tcggacaggaatcgtacagctaagagcaaa

SEQ ID NO: 11722 - DNA, 30 bp, Artificial Sequence
  Synthetic oligonucleotide
tggggaaacaaaacggaagaaaagcaacaa

SEQ ID NO: 11723 - DNA, 30 bp, Artificial Sequence
  Synthetic oligonucleotide
aggcggtgtgcgagagctgcgacaagacaa

SEQ ID NO: 11724 - DNA, 30 bp, Artificial Sequence
  Synthetic oligonucleotide
acaccagagaaagtgaggttagtgcaccaa

SEQ ID NO: 11725 - DNA, 30 bp, Artificial Sequence
  Synthetic oligonucleotide
gtgggaaagataagtagatatcggcaagaa

SEQ ID NO: 11726 - DNA, 30 bp, Artificial Sequence
  Synthetic oligonucleotide
cggaatcactacagaggagaacacagagaa

SEQ ID NO: 11727 - DNA, 30 bp, Artificial Sequence
  Synthetic oligonucleotide
ccatcaataaaggagaggtgtgagaaggaa

SEQ ID NO: 11728 - DNA, 30 bp, Artificial Sequence
  Synthetic oligonucleotide
ccaggcaggtaaagcgagtacaagccaaca

SEQ ID NO: 11729 - DNA, 30 bp, Artificial Sequence
  Synthetic oligonucleotide
acgaagtagcagactttagagatgagaaca

SEQ ID NO: 11730 - DNA, 30 bp, Artificial Sequence
  Synthetic oligonucleotide
tcacgatctcgactcgatccaggcgacaca

SEQ ID NO: 11731 - DNA, 30 bp, Artificial Sequence
  Synthetic oligonucleotide
acagagaggaaggatcacaatatggccaca

SEQ ID NO: 11732 - DNA, 30 bp, Artificial Sequence
  Synthetic oligonucleotide
caggacatcccaacgaccaacctaacgaca

SEQ ID NO: 11733 - DNA, 30 bp, Artificial Sequence
  Synthetic oligonucleotide
cggggaagcacagcctacagtagcgcgaca

SEQ ID NO: 11734 - DNA, 30 bp, Artificial Sequence
  Synthetic oligonucleotide
cgtccacgaaaacatcatcgcgtccaacca

SEQ ID NO: 11735 - DNA, 30 bp, Artificial Sequence
  Synthetic oligonucleotide
acgaggttaataagatcaatagaacggcca

SEQ ID NO: 11736 - DNA, 30 bp, Artificial Sequence
  Synthetic oligonucleotide
ggcacggatacgcaaaggcggacaacagca

SEQ ID NO: 11737 - DNA, 30 bp, Artificial Sequence
  Synthetic oligonucleotide
atgggacccatacaaaataaccgagcagca

SEQ ID NO: 11738 - DNA, 30 bp, Artificial Sequence
  Synthetic oligonucleotide
cggaaaaaaggcgcgttcgaatcaggagca

SEQ ID NO: 11739 - DNA, 30 bp, Artificial Sequence
  Synthetic oligonucleotide
agcaacccgaagaatgagaggcgaaacgca

SEQ ID NO: 11740 - DNA, 30 bp, Artificial Sequence
  Synthetic oligonucleotide
gacggccatttacgaattagagggaaggca

SEQ ID NO: 11741 - DNA, 30 bp, Artificial Sequence
  Synthetic oligonucleotide
ggaacgagggaaagcaaattaaacgtaaga

SEQ ID NO: 11742 - DNA, 30 bp, Artificial Sequence
  Synthetic oligonucleotide
tctaaaacaccgtcgaaagcggagcccaga

SEQ ID NO: 11743 - DNA, 30 bp, Artificial Sequence
  Synthetic oligonucleotide
aacgggcaaagcaaaaatttatcggccaga

SEQ ID NO: 11744 - DNA, 30 bp, Artificial Sequence
  Synthetic oligonucleotide
tcgtgcgagagaaacaccaggccgagcaga

SEQ ID NO: 11745 - DNA, 30 bp, Artificial Sequence
  Synthetic oligonucleotide
tcgaacataacggaaagcgaggcgcgtcga

SEQ ID NO: 11746 - DNA, 30 bp, Artificial Sequence
  Synthetic oligonucleotide
aaggagggacccagttgatcgggatgtcga

SEQ ID NO: 11747 - DNA, 30 bp, Artificial Sequence
  Synthetic oligonucleotide
gatagaaagggcgtgggagattagcaagga

SEQ ID NO: 11748 - DNA, 30 bp, Artificial Sequence
  Synthetic oligonucleotide
gagggcgatcaaacagaacagaacgaagga

SEQ ID NO: 11749 - DNA, 30 bp, Artificial Sequence
  Synthetic oligonucleotide
cgaaaaatggtgcaacccgtaaaagcagga

SEQ ID NO: 11750 - DNA, 30 bp, Artificial Sequence
  Synthetic oligonucleotide
acgaggcctcagtcagcagacaagatagga

SEQ ID NO: 11751 - DNA, 30 bp, Artificial Sequence
  Synthetic oligonucleotide
agggagttacgaacggagtacaacgaggga

SEQ ID NO: 11752 - DNA, 30 bp, Artificial Sequence
  Synthetic oligonucleotide
cgaaggaggcgatagcgtcgtgcgcacata

SEQ ID NO: 11753 - DNA, 30 bp, Artificial Sequence
  Synthetic oligonucleotide
gaggaacggcggaacacgatcggaagcata

SEQ ID NO: 11754 - DNA, 30 bp, Artificial Sequence
  Synthetic oligonucleotide
tcgacgggagaagactagggggcctgacta

SEQ ID NO: 11755 - DNA, 30 bp, Artificial Sequence
  Synthetic oligonucleotide
aaggagacagtgcgcttagggacatcagta

SEQ ID NO: 11756 - DNA, 30 bp, Artificial Sequence
  Synthetic oligonucleotide
ggcacgattaggaatagacagttgagagta

SEQ ID NO: 11757 - DNA, 30 bp, Artificial Sequence
  Synthetic oligonucleotide
cgaataggggaggaagtgcacatagccaac

SEQ ID NO: 11758 - DNA, 30 bp, Artificial Sequence
  Synthetic oligonucleotide
aggggacaatagttcaagaggggaaagaac

SEQ ID NO: 11759 - DNA, 30 bp, Artificial Sequence
  Synthetic oligonucleotide
caggaatgcaaacgagtaccattcgaacac

SEQ ID NO: 11760 - DNA, 30 bp, Artificial Sequence
  Synthetic oligonucleotide
tgacaggtaaggtgccaatggtaagaagac

SEQ ID NO: 11761 - DNA, 30 bp, Artificial Sequence
  Synthetic oligonucleotide
tcaatcgtagggatgatgagaggacaagcc

SEQ ID NO: 11762 - DNA, 30 bp, Artificial Sequence
  Synthetic oligonucleotide
cacggaggggcgaataaaagaaccaccagc

SEQ ID NO: 11763 - DNA, 30 bp, Artificial Sequence
  Synthetic oligonucleotide
agggatacacggtaaacagtgcgacttagc

SEQ ID NO: 11764 - DNA, 30 bp, Artificial Sequence
  Synthetic oligonucleotide
gggaaaactcccaggtcagaaggaggaaag

SEQ ID NO: 11765 - DNA, 30 bp, Artificial Sequence
  Synthetic oligonucleotide
cgcgtatcagtgaacgaagtggatgggaag

SEQ ID NO: 11766 - DNA, 30 bp, Artificial Sequence
  Synthetic oligonucleotide
aacgggagtagaaccaatagggttgctaag

SEQ ID NO: 11767 - DNA, 30 bp, Artificial Sequence
  Synthetic oligonucleotide
acgaaaaagagggtttctaacgcacgacag

SEQ ID NO: 11768 - DNA, 30 bp, Artificial Sequence
  Synthetic oligonucleotide
acgagatattgaaagtaatagccataagag

SEQ ID NO: 11769 - DNA, 31 bp, Artificial Sequence
  Synthetic oligonucleotide
aagacgaattcaggtaaggcaggtgcgagag

SEQ ID NO: 11770 - DNA, 30 bp, Artificial Sequence
  Synthetic oligonucleotide
agggacaaatcgaggaggattcacatagag

SEQ ID NO: 11771 - DNA, 30 bp, Artificial Sequence
  Synthetic oligonucleotide
aggccatacagaataggatgattgtacgag

SEQ ID NO: 11772 - DNA, 30 bp, Artificial Sequence
  Synthetic oligonucleotide
acagggtcaatatcacatagcctaagcgag

SEQ ID NO: 11773 - DNA, 30 bp, Artificial Sequence
  Synthetic oligonucleotide
cggaagagacgccgtaatacaaggcatgag

SEQ ID NO: 11774 - DNA, 30 bp, Artificial Sequence
  Synthetic oligonucleotide
acaacacacaagaggaatatggggcatgag

SEQ ID NO: 11775 - DNA, 30 bp, Artificial Sequence
  Synthetic oligonucleotide
agcggaccaagaaataggaacagatatgag

SEQ ID NO: 11776 - DNA, 30 bp, Artificial Sequence
  Synthetic oligonucleotide
cgtgtatatcgagcaaaagtgcagaaatag

SEQ ID NO: 11777 - DNA, 30 bp, Artificial Sequence
  Synthetic oligonucleotide
ggcgtgggagtacattaggaaaacgtctag

SEQ ID NO: 11778 - DNA, 30 bp, Artificial Sequence
  Synthetic oligonucleotide
taccagcaagtcaaactagatcccgaaacg

SEQ ID NO: 11779 - DNA, 30 bp, Artificial Sequence
  Synthetic oligonucleotide
cgtcagggaatcgggcgagagtatagaacg

SEQ ID NO: 11780 - DNA, 30 bp, Artificial Sequence
  Synthetic oligonucleotide
caaacaaagccaaggtggaagttggtaacg

SEQ ID NO: 11781 - DNA, 30 bp, Artificial Sequence
  Synthetic oligonucleotide
caatgagatccctaacaagaagagagaccg

SEQ ID NO: 11782 - DNA, 30 bp, Artificial Sequence
  Synthetic oligonucleotide
cgagagcagcgtaagaatgcacaagtaccg

SEQ ID NO: 11783 - DNA, 30 bp, Artificial Sequence
  Synthetic oligonucleotide
gtaacgagaaagtggcagagcaatacgccg

SEQ ID NO: 11784 - DNA, 30 bp, Artificial Sequence
  Synthetic oligonucleotide
acggtgagaagactatacgagggacaagcg

SEQ ID NO: 11785 - DNA, 30 bp, Artificial Sequence
  Synthetic oligonucleotide
ccgacggtgctaggaaaaagaaatttagcg

SEQ ID NO: 11786 - DNA, 30 bp, Artificial Sequence
  Synthetic oligonucleotide
ggaaaaaccgagtagaagaatggattggcg

SEQ ID NO: 11787 - DNA, 30 bp, Artificial Sequence
  Synthetic oligonucleotide
ctggacaaggcgaacgtcaaacgaactgcg

SEQ ID NO: 11788 - DNA, 30 bp, Artificial Sequence
  Synthetic oligonucleotide
catgaataatcgtgaacataagaacactcg

SEQ ID NO: 11789 - DNA, 30 bp, Artificial Sequence
  Synthetic oligonucleotide
gcgcgagcaggagtggggattacgaagtcg

SEQ ID NO: 11790 - DNA, 30 bp, Artificial Sequence
  Synthetic oligonucleotide
atgagaactgcaaagggatgctaagagagg

SEQ ID NO: 11791 - DNA, 30 bp, Artificial Sequence
  Synthetic oligonucleotide
ccttatggaccacagtaacgaaggaaaggg

SEQ ID NO: 11792 - DNA, 30 bp, Artificial Sequence
  Synthetic oligonucleotide
tagaagtcgagagaatgtagccgaccaggg

SEQ ID NO: 11793 - DNA, 30 bp, Artificial Sequence
  Synthetic oligonucleotide
gcagacggttgaagtgaatcgagtagaggg

SEQ ID NO: 11794 - DNA, 30 bp, Artificial Sequence
  Synthetic oligonucleotide
cgcgtgaaaacggaaattacacaggccggg

SEQ ID NO: 11795 - DNA, 30 bp, Artificial Sequence
  Synthetic oligonucleotide
gtcagagcagagaagcagaggtgaaatggg

SEQ ID NO: 11796 - DNA, 30 bp, Artificial Sequence
  Synthetic oligonucleotide
gtaggggcatcaaatgaacaaagcgactgg

SEQ ID NO: 11797 - DNA, 30 bp, Artificial Sequence
  Synthetic oligonucleotide
agtaacagttaggaaacaagggccagaatg

SEQ ID NO: 11798 - DNA, 30 bp, Artificial Sequence
  Synthetic oligonucleotide
aggcgagggtgggaataaatagtccgactg

SEQ ID NO: 11799 - DNA, 30 bp, Artificial Sequence
  Synthetic oligonucleotide
aagtgcgaaacagtgcggaagagaggtgtg

SEQ ID NO: 11800 - DNA, 30 bp, Artificial Sequence
  Synthetic oligonucleotide
cgtgacaggaaggagaggttcatagttgtg

SEQ ID NO: 11801 - DNA, 30 bp, Artificial Sequence
  Synthetic oligonucleotide
tagagaagcagaaaggaaaatggacgattg

SEQ ID NO: 11802 - DNA, 30 bp, Artificial Sequence
  Synthetic oligonucleotide
cgtaggaacatgcacgagggcgtaaggaat

SEQ ID NO: 11803 - DNA, 30 bp, Artificial Sequence
  Synthetic oligonucleotide
acgcgcgatcagagtagaagtgtcgaacat

SEQ ID NO: 11804 - DNA, 30 bp, Artificial Sequence
  Synthetic oligonucleotide
tcgacaccgaaaacgctagtacaaccacat

SEQ ID NO: 11805 - DNA, 30 bp, Artificial Sequence
  Synthetic oligonucleotide
gacataagagtggtcaagggacaagtacat

SEQ ID NO: 11806 - DNA, 30 bp, Artificial Sequence
  Synthetic oligonucleotide
cacgagtagcaaatgacatctttgagggat

SEQ ID NO: 11807 - DNA, 30 bp, Artificial Sequence
  Synthetic oligonucleotide
gggtcacaagaagatctcagagaagatgat

SEQ ID NO: 11808 - DNA, 30 bp, Artificial Sequence
  Synthetic oligonucleotide
aggaggagtgaggggaatcagaagtatact

SEQ ID NO: 11809 - DNA, 30 bp, Artificial Sequence
  Synthetic oligonucleotide
agggcacaccaagatagcggtaacgtgagt

SEQ ID NO: 11810 - DNA, 30 bp, Artificial Sequence
  Synthetic oligonucleotide
agaagagtgtaaaagccatgaaagtaaggt

SEQ ID NO: 11811 - DNA, 30 bp, Artificial Sequence
  Synthetic oligonucleotide
aggtaaaaggtagtgaggaggaagaattgt

SEQ ID NO: 11812 - DNA, 30 bp, Artificial Sequence
  Synthetic oligonucleotide
tctatgccgcaatgtttcgaaacgttgctt

SEQ ID NO: 11813 - DNA, 31 bp, Artificial Sequence
  Synthetic oligonucleotide
aggaaaactgatagacttaggggctgcgaaa

SEQ ID NO: 11814 - DNA, 34 bp, Artificial Sequence
  Synthetic oligonucleotide
tcttatctgttgtgtaggtttactcccgtataaa

SEQ ID NO: 11815 - DNA, 30 bp, Artificial Sequence
  Synthetic oligonucleotide
cgaagccgaagcggaaggactagaagtaaa

SEQ ID NO: 11816 - DNA, 30 bp, Artificial Sequence
  Synthetic oligonucleotide
caggaatagaccatgagaaaaagtacgcaa

SEQ ID NO: 11817 - DNA, 30 bp, Artificial Sequence
  Synthetic oligonucleotide
aaggcatacgtgacaatagccgatcaagaa

SEQ ID NO: 11818 - DNA, 30 bp, Artificial Sequence
  Synthetic oligonucleotide
ggtggaaacgattagaggttcgaggaagaa

SEQ ID NO: 11819 - DNA, 30 bp, Artificial Sequence
  Synthetic oligonucleotide
agagaatgaccatctcatagtcagccagaa

SEQ ID NO: 11820 - DNA, 30 bp, Artificial Sequence
  Synthetic oligonucleotide
gcagagagccatcgaattcagaaagcagaa

SEQ ID NO: 11821 - DNA, 30 bp, Artificial Sequence
  Synthetic oligonucleotide
gggaagtataaccaacatagcctgagagaa

SEQ ID NO: 11822 - DNA, 30 bp, Artificial Sequence
  Synthetic oligonucleotide
cagcccgtagaagatagagtaaagcaggaa

SEQ ID NO: 11823 - DNA, 30 bp, Artificial Sequence
  Synthetic oligonucleotide
cgtgactgaggacgacagtcagtctcggaa

SEQ ID NO: 11824 - DNA, 30 bp, Artificial Sequence
  Synthetic oligonucleotide
aggaggcgtaaaaggagtaagaaatatgaa

SEQ ID NO: 11825 - DNA, 30 bp, Artificial Sequence
  Synthetic oligonucleotide
agaggtagtggcgtgcgcacgaaacgaaca

SEQ ID NO: 11826 - DNA, 30 bp, Artificial Sequence
  Synthetic oligonucleotide
tacacagagtaaaactgcaggagatagaca

SEQ ID NO: 11827 - DNA, 30 bp, Artificial Sequence
  Synthetic oligonucleotide
cgtgcgagaagactaattgcggtggcgaca

SEQ ID NO: 11828 - DNA, 30 bp, Artificial Sequence
  Synthetic oligonucleotide
aaggacataatacagagtgtcaggatgcca

SEQ ID NO: 11829 - DNA, 30 bp, Artificial Sequence
  Synthetic oligonucleotide
gcaagaaagaagcatcaatcaaaagttcca

SEQ ID NO: 11830 - DNA, 30 bp, Artificial Sequence
  Synthetic oligonucleotide
agcttgtcaagaatggtgcgaacaaaagca

SEQ ID NO: 11831 - DNA, 30 bp, Artificial Sequence
  Synthetic oligonucleotide
tggcgaaaagaaagcgcggactgctgggca

SEQ ID NO: 11832 - DNA, 30 bp, Artificial Sequence
  Synthetic oligonucleotide
agggccggtatacaaaaaacgaaatcatca

SEQ ID NO: 11833 - DNA, 30 bp, Artificial Sequence
  Synthetic oligonucleotide
ggcacgaactaaggacgggaaaccaaaaga

SEQ ID NO: 11834 - DNA, 30 bp, Artificial Sequence
  Synthetic oligonucleotide
acggactgattctcgggtaccgaacccaga

SEQ ID NO: 11835 - DNA, 30 bp, Artificial Sequence
  Synthetic oligonucleotide
agggtgtgggacgaataacccctgcgcaga

SEQ ID NO: 11836 - DNA, 30 bp, Artificial Sequence
  Synthetic oligonucleotide
acgcatggtcgccagtcgataccagagaga

SEQ ID NO: 11837 - DNA, 30 bp, Artificial Sequence
  Synthetic oligonucleotide
tcgcggaacgatgtagaatacacaaggaga

SEQ ID NO: 11838 - DNA, 30 bp, Artificial Sequence
  Synthetic oligonucleotide
gggcgtcatacctaggagggacaatcgcga

SEQ ID NO: 11839 - DNA, 30 bp, Artificial Sequence
  Synthetic oligonucleotide
tcattcaaacagagggcatagcacattcga

SEQ ID NO: 11840 - DNA, 30 bp, Artificial Sequence
  Synthetic oligonucleotide
agtgtatgcaaaacggagagtacgcaagga

SEQ ID NO: 11841 - DNA, 30 bp, Artificial Sequence
  Synthetic oligonucleotide
acaggcgaaagaaaagagagtaggctagga

SEQ ID NO: 11842 - DNA, 30 bp, Artificial Sequence
  Synthetic oligonucleotide
cgaggtcggagtgatcacctactatccgga

SEQ ID NO: 11843 - DNA, 30 bp, Artificial Sequence
  Synthetic oligonucleotide
acgatggggagtgcgtagttgtagaaatga

SEQ ID NO: 11844 - DNA, 30 bp, Artificial Sequence
  Synthetic oligonucleotide
gaagcgaggagtgggcacaaatggatatga

SEQ ID NO: 11845 - DNA, 30 bp, Artificial Sequence
  Synthetic oligonucleotide
cacagagaaataaccatgcaagaagcgata

SEQ ID NO: 11846 - DNA, 30 bp, Artificial Sequence
  Synthetic oligonucleotide
cgtgaagtgaatccaggagatgagtcgata

SEQ ID NO: 11847 - DNA, 30 bp, Artificial Sequence
  Synthetic oligonucleotide
aggataccgaagggtgttaaggcaaagcta

SEQ ID NO: 11848 - DNA, 30 bp, Artificial Sequence
  Synthetic oligonucleotide
ccgccaaggaccacaagccaacggggagta

SEQ ID NO: 11849 - DNA, 30 bp, Artificial Sequence
  Synthetic oligonucleotide
acgttgatgccgagtagagaaggcggggta

SEQ ID NO: 11850 - DNA, 30 bp, Artificial Sequence
  Synthetic oligonucleotide
tggccacagggacacaagcttcgagataac

SEQ ID NO: 11851 - DNA, 30 bp, Artificial Sequence
  Synthetic oligonucleotide
cgaatgattgggcaaccagaagtgaaccac

SEQ ID NO: 11852 - DNA, 30 bp, Artificial Sequence
  Synthetic oligonucleotide
aaagcggagaaaagtgaaccggaacaaagc

SEQ ID NO: 11853 - DNA, 30 bp, Artificial Sequence
  Synthetic oligonucleotide
agggcagaggcgacctgaatctaaacaagc

SEQ ID NO: 11854 - DNA, 30 bp, Artificial Sequence
  Synthetic oligonucleotide
cggagaagtaagtgagagagcgtaggtggc

SEQ ID NO: 11855 - DNA, 30 bp, Artificial Sequence
  Synthetic oligonucleotide
tacggaatagcggatgaagcgtgtgcagtc

SEQ ID NO: 11856 - DNA, 31 bp, Artificial Sequence
  Synthetic oligonucleotide
gtacgtaaaaagagtggacactagcacggtc

SEQ ID NO: 11857 - DNA, 30 bp, Artificial Sequence
  Synthetic oligonucleotide
tcggagacccggaatagtccataagtcaag

SEQ ID NO: 11858 - DNA, 30 bp, Artificial Sequence
  Synthetic oligonucleotide
tcgtggacataacctcaggaaccaaagaag

SEQ ID NO: 11859 - DNA, 30 bp, Artificial Sequence
  Synthetic oligonucleotide
tcgaacaatccggacgatatggggaaacag

SEQ ID NO: 11860 - DNA, 30 bp, Artificial Sequence
  Synthetic oligonucleotide
cgacgggaagtatacataccctgagaccag

SEQ ID NO: 11861 - DNA, 30 bp, Artificial Sequence
  Synthetic oligonucleotide
cgtgagactgggaattggaactacgggcag

SEQ ID NO: 11862 - DNA, 30 bp, Artificial Sequence
  Synthetic oligonucleotide
tacagcacaagatggagggcaggagaagag

SEQ ID NO: 11863 - DNA, 30 bp, Artificial Sequence
  Synthetic oligonucleotide
acgacttacgtaggagctagacctcgagag

SEQ ID NO: 11864 - DNA, 30 bp, Artificial Sequence
  Synthetic oligonucleotide
ttagggagaaacgactcgatacataacgag

SEQ ID NO: 11865 - DNA, 30 bp, Artificial Sequence
  Synthetic oligonucleotide
cgggacggacgacttgaatatcggcgcgag

SEQ ID NO: 11866 - DNA, 30 bp, Artificial Sequence
  Synthetic oligonucleotide
tacgggatggaaaaagtatacgaatcggag

SEQ ID NO: 11867 - DNA, 30 bp, Artificial Sequence
  Synthetic oligonucleotide
atggactgaccgaaacacataaagatggag

SEQ ID NO: 11868 - DNA, 30 bp, Artificial Sequence
  Synthetic oligonucleotide
acgaattaggaaacatgcgaagagcgttag

SEQ ID NO: 11869 - DNA, 30 bp, Artificial Sequence
  Synthetic oligonucleotide
acaagggcacaaaccataggcgaattggcg

SEQ ID NO: 11870 - DNA, 30 bp, Artificial Sequence
  Synthetic oligonucleotide
ggacacgtactaaaaaaaagttggtcgtcg

SEQ ID NO: 11871 - DNA, 31 bp, Artificial Sequence
  Synthetic oligonucleotide
cgatgaaataactatcagtgtgcaggaaagg

SEQ ID NO: 11872 - DNA, 30 bp, Artificial Sequence
  Synthetic oligonucleotide
acaggcaatcgtgaaggaccggactccagg

SEQ ID NO: 11873 - DNA, 30 bp, Artificial Sequence
  Synthetic oligonucleotide
acgagaagagtcactaccaacacccctagg

SEQ ID NO: 11874 - DNA, 30 bp, Artificial Sequence
  Synthetic oligonucleotide
ggcgaagagtgcaaggatccaaaggtacgg

SEQ ID NO: 11875 - DNA, 30 bp, Artificial Sequence
  Synthetic oligonucleotide
ggcaacacaaggagtctgataagcaaaggg

SEQ ID NO: 11876 - DNA, 30 bp, Artificial Sequence
  Synthetic oligonucleotide
taacagcggttaagagagacgagaaatggg

SEQ ID NO: 11877 - DNA, 30 bp, Artificial Sequence
  Synthetic oligonucleotide
cgggacatcctcaaagatcgatcacgtggg

SEQ ID NO: 11878 - DNA, 30 bp, Artificial Sequence
  Synthetic oligonucleotide
ccggaagcagtgaatgtcagcgagaactgg

SEQ ID NO: 11879 - DNA, 30 bp, Artificial Sequence
  Synthetic oligonucleotide
ccgtaaggcagaaaagcatgagggaaaatg

SEQ ID NO: 11880 - DNA, 30 bp, Artificial Sequence
  Synthetic oligonucleotide
taacggtaacacatccacaacacgacaatg

SEQ ID NO: 11881 - DNA, 30 bp, Artificial Sequence
  Synthetic oligonucleotide
cgtaaatgataacgagggagaaatacgatg

SEQ ID NO: 11882 - DNA, 30 bp, Artificial Sequence
  Synthetic oligonucleotide
gtgggggaataacgtaacagggtgccgatg

SEQ ID NO: 11883 - DNA, 30 bp, Artificial Sequence
  Synthetic oligonucleotide
ctaaagcagaggagataggcatcaggactg

SEQ ID NO: 11884 - DNA, 30 bp, Artificial Sequence
  Synthetic oligonucleotide
acaacaagactcgaaggtgtataagaagtg

SEQ ID NO: 11885 - DNA, 30 bp, Artificial Sequence
  Synthetic oligonucleotide
aggggaattagcgaagcgtaacagtaagtg

SEQ ID NO: 11886 - DNA, 30 bp, Artificial Sequence
  Synthetic oligonucleotide
tatgcttgaaaaatatagaaatgctcagtg

SEQ ID NO: 11887 - DNA, 30 bp, Artificial Sequence
  Synthetic oligonucleotide
ccgcggaaacgaaatagtcctcccatagtg

SEQ ID NO: 11888 - DNA, 30 bp, Artificial Sequence
  Synthetic oligonucleotide
catgaggcgatcaagttcaaaaagtgggtg

SEQ ID NO: 11889 - DNA, 30 bp, Artificial Sequence
  Synthetic oligonucleotide
ggcgtgaagcaatgtaatcgaaaagatgtg

SEQ ID NO: 11890 - DNA, 30 bp, Artificial Sequence
  Synthetic oligonucleotide
tgaccagagtagccaacagagagcggaaat

SEQ ID NO: 11891 - DNA, 30 bp, Artificial Sequence
  Synthetic oligonucleotide
gtacggtgaagtgagtgtacaaaagcgcat

SEQ ID NO: 11892 - DNA, 30 bp, Artificial Sequence
  Synthetic oligonucleotide
cggtacgtcaggcgaagctccgtgaaagat

SEQ ID NO: 11893 - DNA, 30 bp, Artificial Sequence
  Synthetic oligonucleotide
cgggtacagtaaggaagccagatgtaagat

SEQ ID NO: 11894 - DNA, 30 bp, Artificial Sequence
  Synthetic oligonucleotide
gtcaaccaaaataaagaaaagcatgattat

SEQ ID NO: 11895 - DNA, 30 bp, Artificial Sequence
  Synthetic oligonucleotide
cgataaggccaccccacaaccgaagtgact

SEQ ID NO: 11896 - DNA, 30 bp, Artificial Sequence
  Synthetic oligonucleotide
gcgaccgaaaggggcagagtcgagcaaagt

SEQ ID NO: 11897 - DNA, 30 bp, Artificial Sequence
  Synthetic oligonucleotide
tgagaggggaggacacaaccagagtcaagt

SEQ ID NO: 11898 - DNA, 30 bp, Artificial Sequence
  Synthetic oligonucleotide
gcccgaagtaaaagagtgccaagagccagt

SEQ ID NO: 11899 - DNA, 30 bp, Artificial Sequence
  Synthetic oligonucleotide
cgaacaaacgaactttcttgcatgaagagt

SEQ ID NO: 11900 - DNA, 30 bp, Artificial Sequence
  Synthetic oligonucleotide
cgagatggtaagagcttaaaaacaacatgt

SEQ ID NO: 11901 - DNA, 30 bp, Artificial Sequence
  Synthetic oligonucleotide
ccgtaaaggagggggaggatccagcgaatt

SEQ ID NO: 11902 - DNA, 30 bp, Artificial Sequence
  Synthetic oligonucleotide
acgagcacggagggacggaactttcgtatt

SEQ ID NO: 11903 - DNA, 30 bp, Artificial Sequence
  Synthetic oligonucleotide
ggaagtggacagagaacaaccgatcgactt

SEQ ID NO: 11904 - DNA, 30 bp, Artificial Sequence
  Synthetic oligonucleotide
caacgtaagtagatcaagtcactcgcgctt

SEQ ID NO: 11905 - DNA, 30 bp, Artificial Sequence
  Synthetic oligonucleotide
tacgacatggtgggagagcgccgagaaaaa

SEQ ID NO: 11906 - DNA, 30 bp, Artificial Sequence
  Synthetic oligonucleotide
acaacaaatcaaagttcaaagccccacaaa

SEQ ID NO: 11907 - DNA, 30 bp, Artificial Sequence
  Synthetic oligonucleotide
aaaaccgaagaccgaaagaggagggacaaa

SEQ ID NO: 11908 - DNA, 30 bp, Artificial Sequence
  Synthetic oligonucleotide
acggaagctgaaactcagagaagtcataaa

SEQ ID NO: 11909 - DNA, 30 bp, Artificial Sequence
  Synthetic oligonucleotide
ggacgtgctgccatgaaataaaccagacaa

SEQ ID NO: 11910 - DNA, 30 bp, Artificial Sequence
  Synthetic oligonucleotide
accggagaccaaagagtgccacgtcatcaa

SEQ ID NO: 11911 - DNA, 30 bp, Artificial Sequence
  Synthetic oligonucleotide
tgcttgaagaaaagaaatgagtgctaagaa

SEQ ID NO: 11912 - DNA, 30 bp, Artificial Sequence
  Synthetic oligonucleotide
gacgccgacggatagaacggccactcagaa

SEQ ID NO: 11913 - DNA, 30 bp, Artificial Sequence
  Synthetic oligonucleotide
agagacggccatggaaaggtaatgtgagaa

SEQ ID NO: 11914 - DNA, 30 bp, Artificial Sequence
  Synthetic oligonucleotide
agggacagaaagttacttggacgagaggaa

SEQ ID NO: 11915 - DNA, 30 bp, Artificial Sequence
  Synthetic oligonucleotide
cgacgtaaacaagagttcggcctagtgtaa

SEQ ID NO: 11916 - DNA, 30 bp, Artificial Sequence
  Synthetic oligonucleotide
aggcgcgaaacagtagacagagtgtccaca

SEQ ID NO: 11917 - DNA, 30 bp, Artificial Sequence
  Synthetic oligonucleotide
cgacaaacacgggcaaaacacgaaagcaca

SEQ ID NO: 11918 - DNA, 30 bp, Artificial Sequence
  Synthetic oligonucleotide
ggacgacgacggtcacgagctaagcgtaca

SEQ ID NO: 11919 - DNA, 30 bp, Artificial Sequence
  Synthetic oligonucleotide
cgcataccgaaacgatgaaaaccgaggcca

SEQ ID NO: 11920 - DNA, 30 bp, Artificial Sequence
  Synthetic oligonucleotide
acgacccaattagaaggaagattgtaagca

SEQ ID NO: 11921 - DNA, 30 bp, Artificial Sequence
  Synthetic oligonucleotide
ggtcgaaaaagggagaacatgatttaagca

SEQ ID NO: 11922 - DNA, 30 bp, Artificial Sequence
  Synthetic oligonucleotide
tggatcagcgaacaaccgagtatcgcagca

SEQ ID NO: 11923 - DNA, 30 bp, Artificial Sequence
  Synthetic oligonucleotide
gaggcaacaagggacctgccaaatagcgca

SEQ ID NO: 11924 - DNA, 30 bp, Artificial Sequence
  Synthetic oligonucleotide
caccatgaagactatccccagcgtgtcgca

SEQ ID NO: 11925 - DNA, 30 bp, Artificial Sequence
  Synthetic oligonucleotide
gcgagaaaagtgtcgacccgtgactaggca

SEQ ID NO: 11926 - DNA, 30 bp, Artificial Sequence
  Synthetic oligonucleotide
aaggcacaagaaagcagccaaatacgggca

SEQ ID NO: 11927 - DNA, 30 bp, Artificial Sequence
  Synthetic oligonucleotide
cgaaaaaacgtctcaggaggcgataatgca

SEQ ID NO: 11928 - DNA, 30 bp, Artificial Sequence
  Synthetic oligonucleotide
tcttaaccgaaggtcggatggcaagaaaga

SEQ ID NO: 11929 - DNA, 30 bp, Artificial Sequence
  Synthetic oligonucleotide
agctcggaggcagagagtgtacttaacaga

SEQ ID NO: 11930 - DNA, 30 bp, Artificial Sequence
  Synthetic oligonucleotide
ggtcagccgagaagccagagccagtaacga

SEQ ID NO: 11931 - DNA, 30 bp, Artificial Sequence
  Synthetic oligonucleotide
gatagaagaatagaagcacaagaaagccga

SEQ ID NO: 11932 - DNA, 30 bp, Artificial Sequence
  Synthetic oligonucleotide
tgccgccaagttcaaaaaaaaggcagccga

SEQ ID NO: 11933 - DNA, 30 bp, Artificial Sequence
  Synthetic oligonucleotide
agacaggttagatgagattaagaggagcga

SEQ ID NO: 11934 - DNA, 30 bp, Artificial Sequence
  Synthetic oligonucleotide
gatgtgggaaagagggtaagacagccagga

SEQ ID NO: 11935 - DNA, 30 bp, Artificial Sequence
  Synthetic oligonucleotide
aggacaaacactttgaaaccaatagtatga

SEQ ID NO: 11936 - DNA, 30 bp, Artificial Sequence
  Synthetic oligonucleotide
cctgaggaaactaattgagagtgaaagata

SEQ ID NO: 11937 - DNA, 30 bp, Artificial Sequence
  Synthetic oligonucleotide
tgaggcacaaaatacccagaatgcgaacta

SEQ ID NO: 11938 - DNA, 30 bp, Artificial Sequence
  Synthetic oligonucleotide
tagggcacccaaatagagggagagagctta

SEQ ID NO: 11939 - DNA, 30 bp, Artificial Sequence
  Synthetic oligonucleotide
cgaaggaaagaccgaacggcggggtcgaac

SEQ ID NO: 11940 - DNA, 30 bp, Artificial Sequence
  Synthetic oligonucleotide
cggcgtagacattcacgaactaaggagcac

SEQ ID NO: 11941 - DNA, 30 bp, Artificial Sequence
  Synthetic oligonucleotide
acgaggggactagttagcacagaagtgcac

SEQ ID NO: 11942 - DNA, 30 bp, Artificial Sequence
  Synthetic oligonucleotide
ggcgataatcgagtaaagcgaatcagagac

SEQ ID NO: 11943 - DNA, 30 bp, Artificial Sequence
  Synthetic oligonucleotide
gcgaggaaggcagttgagaagttaagtgac

SEQ ID NO: 11944 - DNA, 30 bp, Artificial Sequence
  Synthetic oligonucleotide
acggcaaggctccccgtcgagaaccgtgac

SEQ ID NO: 11945 - DNA, 30 bp, Artificial Sequence
  Synthetic oligonucleotide
atgaggaatcaagaaaatgcaagtgcatac

SEQ ID NO: 11946 - DNA, 30 bp, Artificial Sequence
  Synthetic oligonucleotide
cgggaaggaggcaagattgtgtcgtcaacc

SEQ ID NO: 11947 - DNA, 30 bp, Artificial Sequence
  Synthetic oligonucleotide
ataaacaaggaccgaaacgaccaaaagacc

SEQ ID NO: 11948 - DNA, 30 bp, Artificial Sequence
  Synthetic oligonucleotide
tcacaccagcgagaagaaaaaagtggtccc

SEQ ID NO: 11949 - DNA, 30 bp, Artificial Sequence
  Synthetic oligonucleotide
actaaggaagtcatggaatagagaaacagc

SEQ ID NO: 11950 - DNA, 30 bp, Artificial Sequence
  Synthetic oligonucleotide
gtaaacgggataagaaaacacaaacagctc

SEQ ID NO: 11951 - DNA, 30 bp, Artificial Sequence
  Synthetic oligonucleotide
taaagcgctacagcgtgaaagagggtcgtc

SEQ ID NO: 11952 - DNA, 30 bp, Artificial Sequence
  Synthetic oligonucleotide
ccaacaacgtggtcatgaggacatgcaaag

SEQ ID NO: 11953 - DNA, 30 bp, Artificial Sequence
  Synthetic oligonucleotide
gcggtaaggccaggtaccacaccctcaaag

SEQ ID NO: 11954 - DNA, 30 bp, Artificial Sequence
  Synthetic oligonucleotide
cgaggactgaataggccaattactgtcaag

SEQ ID NO: 11955 - DNA, 30 bp, Artificial Sequence
  Synthetic oligonucleotide
tgaagccaccataaatcggcacggcaacag

SEQ ID NO: 11956 - DNA, 30 bp, Artificial Sequence
  Synthetic oligonucleotide
tcgtatcagaaacgagtcaaaccagcacag

SEQ ID NO: 11957 - DNA, 30 bp, Artificial Sequence
  Synthetic oligonucleotide
gcacgaagacacaaaatgcatacactacag

SEQ ID NO: 11958 - DNA, 30 bp, Artificial Sequence
  Synthetic oligonucleotide
caatccgaaggatgcaaggcgcaagagcag

SEQ ID NO: 11959 - DNA, 30 bp, Artificial Sequence
  Synthetic oligonucleotide
acgacttaagggaaatctcgtggcgtgcag

SEQ ID NO: 11960 - DNA, 30 bp, Artificial Sequence
  Synthetic oligonucleotide
cgagagagagcgtccccagtgagtagtcag

SEQ ID NO: 11961 - DNA, 30 bp, Artificial Sequence
  Synthetic oligonucleotide
agagaaatggagaacatggggggactcgag

SEQ ID NO: 11962 - DNA, 30 bp, Artificial Sequence
  Synthetic oligonucleotide
acaataagatagccatgcgtagagcgtgag

SEQ ID NO: 11963 - DNA, 30 bp, Artificial Sequence
  Synthetic oligonucleotide
taagcgtgtagaggaaagagcgaaggtgag

SEQ ID NO: 11964 - DNA, 30 bp, Artificial Sequence
  Synthetic oligonucleotide
cgacaaagtattattaaggaaagcccgacg

SEQ ID NO: 11965 - DNA, 30 bp, Artificial Sequence
  Synthetic oligonucleotide
cctaccgaaacccgaaaaagctccgatacg

SEQ ID NO: 11966 - DNA, 30 bp, Artificial Sequence
  Synthetic oligonucleotide
aggagaaatgcacacaaatcgcgatctacg

SEQ ID NO: 11967 - DNA, 30 bp, Artificial Sequence
  Synthetic oligonucleotide
cgcgatagggcgattaagagagtgagtccg

SEQ ID NO: 11968 - DNA, 30 bp, Artificial Sequence
  Synthetic oligonucleotide
ccaacactcaaggaacgaatacaggaagcg

SEQ ID NO: 11969 - DNA, 30 bp, Artificial Sequence
  Synthetic oligonucleotide
acggtaaaatgaaatgaaccaaggtgcgcg

SEQ ID NO: 11970 - DNA, 30 bp, Artificial Sequence
  Synthetic oligonucleotide
acaagaggatccagctgcaccgacaatgcg

SEQ ID NO: 11971 - DNA, 30 bp, Artificial Sequence
  Synthetic oligonucleotide
ggacgaaagtcgaataccataacaacatcg

SEQ ID NO: 11972 - DNA, 30 bp, Artificial Sequence
  Synthetic oligonucleotide
cgccacaaagaagcacctcccaccagatcg

SEQ ID NO: 11973 - DNA, 30 bp, Artificial Sequence
  Synthetic oligonucleotide
cgtcacggcacgtaaagtgaggagagatcg

SEQ ID NO: 11974 - DNA, 30 bp, Artificial Sequence
  Synthetic oligonucleotide
tgggatccgaaagaacagctagcatgatcg

SEQ ID NO: 11975 - DNA, 30 bp, Artificial Sequence
  Synthetic oligonucleotide
aagggataaaaacaacgagaaaagcggtcg

SEQ ID NO: 11976 - DNA, 30 bp, Artificial Sequence
  Synthetic oligonucleotide
tcgggagggcaatagcgtcagaaatccagg

SEQ ID NO: 11977 - DNA, 30 bp, Artificial Sequence
  Synthetic oligonucleotide
aacgagaaggaggccgacgaagacgcgagg

SEQ ID NO: 11978 - DNA, 30 bp, Artificial Sequence
  Synthetic oligonucleotide
cgtaggcagagagaggggctagccaaccgg

SEQ ID NO: 11979 - DNA, 30 bp, Artificial Sequence
  Synthetic oligonucleotide
gagaagaatagaagagggtcaataaggcgg

SEQ ID NO: 11980 - DNA, 30 bp, Artificial Sequence
  Synthetic oligonucleotide
ttgagaaggggccaagaatgacctaaaggg

SEQ ID NO: 11981 - DNA, 30 bp, Artificial Sequence
  Synthetic oligonucleotide
cacagagaataagacagctcaggacaaggg

SEQ ID NO: 11982 - DNA, 30 bp, Artificial Sequence
  Synthetic oligonucleotide
tggcgaagaaaaagtcaatgtcaaactggg

SEQ ID NO: 11983 - DNA, 30 bp, Artificial Sequence
  Synthetic oligonucleotide
agaaaaccgccggaaacaaagtcaagatgg

SEQ ID NO: 11984 - DNA, 30 bp, Artificial Sequence
  Synthetic oligonucleotide
aagggcaaacaacgagatgaataattttgg

SEQ ID NO: 11985 - DNA, 30 bp, Artificial Sequence
  Synthetic oligonucleotide
ccatcgagcgtcaccaaggaagagggcatg

SEQ ID NO: 11986 - DNA, 30 bp, Artificial Sequence
  Synthetic oligonucleotide
ggcctaagcatgaagaggaacgctcagatg

SEQ ID NO: 11987 - DNA, 31 bp, Artificial Sequence
  Synthetic oligonucleotide
cgtacgacaactgcaaggaaaataggcgatg

SEQ ID NO: 11988 - DNA, 30 bp, Artificial Sequence
  Synthetic oligonucleotide
gcagggtcagaccaggagtgtaagtcgatg

SEQ ID NO: 11989 - DNA, 30 bp, Artificial Sequence
  Synthetic oligonucleotide
aggcacaaaaagacctggcgtgagagactg

SEQ ID NO: 11990 - DNA, 30 bp, Artificial Sequence
  Synthetic oligonucleotide
acgggatagaaacagcagggtagccaagtg

SEQ ID NO: 11991 - DNA, 30 bp, Artificial Sequence
  Synthetic oligonucleotide
cgagcacgtatacgctccaaagccacagtg

SEQ ID NO: 11992 - DNA, 30 bp, Artificial Sequence
  Synthetic oligonucleotide
acaaggaaaaccacggcaaattatggagtg

SEQ ID NO: 11993 - DNA, 30 bp, Artificial Sequence
  Synthetic oligonucleotide
cgaaccaaatagtcataagatgaaaacttg

SEQ ID NO: 11994 - DNA, 30 bp, Artificial Sequence
  Synthetic oligonucleotide
caatagggcaaatagcgaacagccgacaat

SEQ ID NO: 11995 - DNA, 30 bp, Artificial Sequence
  Synthetic oligonucleotide
aagggaagtcgaaaggtggcaaatctgaat

SEQ ID NO: 11996 - DNA, 30 bp, Artificial Sequence
  Synthetic oligonucleotide
ggaaaggtgcccaacaacatggagtgacat

SEQ ID NO: 11997 - DNA, 30 bp, Artificial Sequence
  Synthetic oligonucleotide
cataagagtgaggtacggatgcaaagagat

SEQ ID NO: 11998 - DNA, 30 bp, Artificial Sequence
  Synthetic oligonucleotide
agcgtggaatcgataagcgtaagaggaagt

SEQ ID NO: 11999 - DNA, 30 bp, Artificial Sequence
  Synthetic oligonucleotide
ggaggacgtacgacgaggaagtcagcatgt

SEQ ID NO: 12000 - DNA, 30 bp, Artificial Sequence
  Synthetic oligonucleotide
aacgtaacgcgaataggttgtgagggatgt

SEQ ID NO: 12001 - DNA, 30 bp, Artificial Sequence
  Synthetic oligonucleotide
tcggcacacaaaagataacgcgattaagtt

SEQ ID NO: 12002 - DNA, 30 bp, Artificial Sequence
  Synthetic oligonucleotide
caatagcaacttaaaatcgaaacgcgaaaa

SEQ ID NO: 12003 - DNA, 30 bp, Artificial Sequence
  Synthetic oligonucleotide
aaacaggactgaaacagaggaaagtgcaaa

SEQ ID NO: 12004 - DNA, 30 bp, Artificial Sequence
  Synthetic oligonucleotide
acagggagaacagccatatttcggccgaaa

SEQ ID NO: 12005 - DNA, 30 bp, Artificial Sequence
  Synthetic oligonucleotide
acaccaagactgaagatactaactgcgaaa

SEQ ID NO: 12006 - DNA, 30 bp, Artificial Sequence
  Synthetic oligonucleotide
ccaggacaatgggaagattggaaaaaacaa

SEQ ID NO: 12007 - DNA, 30 bp, Artificial Sequence
  Synthetic oligonucleotide
acagatgaaaccgaataacagtcatcccaa

SEQ ID NO: 12008 - DNA, 30 bp, Artificial Sequence
  Synthetic oligonucleotide
cgatcgtacactaactagaatagcggccaa

SEQ ID NO: 12009 - DNA, 30 bp, Artificial Sequence
  Synthetic oligonucleotide
actcaaaaacagccagcgaacagagtgcaa

SEQ ID NO: 12010 - DNA, 30 bp, Artificial Sequence
  Synthetic oligonucleotide
ggtacgagctgtgaaaaaagtagagtgcaa

SEQ ID NO: 12011 - DNA, 30 bp, Artificial Sequence
  Synthetic oligonucleotide
acagacgggggagtgtaagccatcgtgcaa

SEQ ID NO: 12012 - DNA, 30 bp, Artificial Sequence
  Synthetic oligonucleotide
acgtggggcagaactagagggaaggtgcaa

SEQ ID NO: 12013 - DNA, 30 bp, Artificial Sequence
  Synthetic oligonucleotide
aggcaatcatgaaaggcgagctgggacgaa

SEQ ID NO: 12014 - DNA, 30 bp, Artificial Sequence
  Synthetic oligonucleotide
cggactaaagcgtctagataagccaaggaa

SEQ ID NO: 12015 - DNA, 30 bp, Artificial Sequence
  Synthetic oligonucleotide
cgggaagcgcaagacctgaatcgtaaggaa

SEQ ID NO: 12016 - DNA, 30 bp, Artificial Sequence
  Synthetic oligonucleotide
aggaccaaaacaagttgatagacagaggaa

SEQ ID NO: 12017 - DNA, 30 bp, Artificial Sequence
  Synthetic oligonucleotide
cgcgttagaccagaggacaaatagcatgaa

SEQ ID NO: 12018 - DNA, 30 bp, Artificial Sequence
  Synthetic oligonucleotide
agggaacaggacaaggagccacgttattaa

SEQ ID NO: 12019 - DNA, 30 bp, Artificial Sequence
  Synthetic oligonucleotide
atccgtaggaagagagaggcaagccccaca

SEQ ID NO: 12020 - DNA, 30 bp, Artificial Sequence
  Synthetic oligonucleotide
ccgcaattcgcgccacaacgagatagcaca

SEQ ID NO: 12021 - DNA, 30 bp, Artificial Sequence
  Synthetic oligonucleotide
cggcacgaatgtaagagtaacgcaatgaca

SEQ ID NO: 12022 - DNA, 30 bp, Artificial Sequence
  Synthetic oligonucleotide
agaataacccagaatgaccgattataagca

SEQ ID NO: 12023 - DNA, 31 bp, Artificial Sequence
  Synthetic oligonucleotide
tacgagcaactatagggacaggacatgagca

SEQ ID NO: 12024 - DNA, 30 bp, Artificial Sequence
  Synthetic oligonucleotide
acatgcaatccgaaagcaagtgtcgcatca

SEQ ID NO: 12025 - DNA, 30 bp, Artificial Sequence
  Synthetic oligonucleotide
gcggcaagcaagtaaccactttacagaaga

SEQ ID NO: 12026 - DNA, 30 bp, Artificial Sequence
  Synthetic oligonucleotide
acacctgaggacatattctacaaagccaga

SEQ ID NO: 12027 - DNA, 30 bp, Artificial Sequence
  Synthetic oligonucleotide
caggcgcccaccaaggagtgcggaatcaga

SEQ ID NO: 12028 - DNA, 30 bp, Artificial Sequence
  Synthetic oligonucleotide
aaaggcgataatcgtcgatgaacaaggaga

SEQ ID NO: 12029 - DNA, 30 bp, Artificial Sequence
  Synthetic oligonucleotide
acggagtagtcaaacactataaaccaagga

SEQ ID NO: 12030 - DNA, 30 bp, Artificial Sequence
  Synthetic oligonucleotide
caaaggaaaggtgccctgcgaacgtccgga

SEQ ID NO: 12031 - DNA, 30 bp, Artificial Sequence
  Synthetic oligonucleotide
aagacaggagtggccacaaagatggcatga

SEQ ID NO: 12032 - DNA, 30 bp, Artificial Sequence
  Synthetic oligonucleotide
aggtgcaagaaagctactcaacagtgaata

SEQ ID NO: 12033 - DNA, 30 bp, Artificial Sequence
  Synthetic oligonucleotide
aggagtcgagatggcgaaatccccgaacta

SEQ ID NO: 12034 - DNA, 30 bp, Artificial Sequence
  Synthetic oligonucleotide
acgagggcgcggtcgtactatcatgaacta

SEQ ID NO: 12035 - DNA, 30 bp, Artificial Sequence
  Synthetic oligonucleotide
cggcacgagttaaaggagcagaagacagta

SEQ ID NO: 12036 - DNA, 30 bp, Artificial Sequence
  Synthetic oligonucleotide
cgtgtagatccgaaagaagtattgctagta

SEQ ID NO: 12037 - DNA, 30 bp, Artificial Sequence
  Synthetic oligonucleotide
ggtcaaacggtcaaaaagataagaagcgta

SEQ ID NO: 12038 - DNA, 30 bp, Artificial Sequence
  Synthetic oligonucleotide
catgcgaaaacagataagatgaaatgcgta

SEQ ID NO: 12039 - DNA, 30 bp, Artificial Sequence
  Synthetic oligonucleotide
ttcgacgagggagaccaaagacgtgatgta

SEQ ID NO: 12040 - DNA, 30 bp, Artificial Sequence
  Synthetic oligonucleotide
agaaacgtcgggaacggcgagagagtgtta

SEQ ID NO: 12041 - DNA, 30 bp, Artificial Sequence
  Synthetic oligonucleotide
atgagaagagataagagtgctcgcgtcaac

SEQ ID NO: 12042 - DNA, 30 bp, Artificial Sequence
  Synthetic oligonucleotide
gctaaacaagcaaatgagtagtgaaagaac

SEQ ID NO: 12043 - DNA, 30 bp, Artificial Sequence
  Synthetic oligonucleotide
cctgaggagaaactaaagggagtaaagcac

SEQ ID NO: 12044 - DNA, 30 bp, Artificial Sequence
  Synthetic oligonucleotide
aagataacgggtgcaacaaaacgacaagac

SEQ ID NO: 12045 - DNA, 30 bp, Artificial Sequence
  Synthetic oligonucleotide
gctgggcaaaattatacacatcgatccgac

SEQ ID NO: 12046 - DNA, 30 bp, Artificial Sequence
  Synthetic oligonucleotide
cgggaagaaaacacggcggggagagtctac

SEQ ID NO: 12047 - DNA, 30 bp, Artificial Sequence
  Synthetic oligonucleotide
cgccgcaatcaacagaggacggtaaagtac

SEQ ID NO: 12048 - DNA, 30 bp, Artificial Sequence
  Synthetic oligonucleotide
ccgggaggacaagttgtgagctggcggtac

SEQ ID NO: 12049 - DNA, 30 bp, Artificial Sequence
  Synthetic oligonucleotide
acgagggcgtaaaacaacattatgtaatcc

SEQ ID NO: 12050 - DNA, 30 bp, Artificial Sequence
  Synthetic oligonucleotide
gcagagaaacctgcaccgaaacgatagagc

SEQ ID NO: 12051 - DNA, 30 bp, Artificial Sequence
  Synthetic oligonucleotide
cgaaaagagtcataacttaccaggatgagc

SEQ ID NO: 12052 - DNA, 30 bp, Artificial Sequence
  Synthetic oligonucleotide
cggaagatcgagctagaccaatcaaacatc

SEQ ID NO: 12053 - DNA, 30 bp, Artificial Sequence
  Synthetic oligonucleotide
agagaagggaggcaatggagatccacgatc

SEQ ID NO: 12054 - DNA, 30 bp, Artificial Sequence
  Synthetic oligonucleotide
cgagtacgttatagggacgaaaggaggatc

SEQ ID NO: 12055 - DNA, 30 bp, Artificial Sequence
  Synthetic oligonucleotide
aggcaataagggcagaaaacgtgataactc

SEQ ID NO: 12056 - DNA, 30 bp, Artificial Sequence
  Synthetic oligonucleotide
cgaggcggtgtagggtgcgaaatcgtaaag

SEQ ID NO: 12057 - DNA, 30 bp, Artificial Sequence
  Synthetic oligonucleotide
ggcatcaaaaagccgtgagcccaaactaag

SEQ ID NO: 12058 - DNA, 30 bp, Artificial Sequence
  Synthetic oligonucleotide
aaggtacacccaatacaattagaagaacag

SEQ ID NO: 12059 - DNA, 30 bp, Artificial Sequence
  Synthetic oligonucleotide
caacccgagagaaacccagcaaagtaccag

SEQ ID NO: 12060 - DNA, 30 bp, Artificial Sequence
  Synthetic oligonucleotide
ggcgaggagggagcgacaagttccagccag

SEQ ID NO: 12061 - DNA, 30 bp, Artificial Sequence
  Synthetic oligonucleotide
cgggaagctgaagttaaaaggtgggttcag

SEQ ID NO: 12062 - DNA, 30 bp, Artificial Sequence
  Synthetic oligonucleotide
ccaaacgaagagacagaaggtccggaagag

SEQ ID NO: 12063 - DNA, 30 bp, Artificial Sequence
  Synthetic oligonucleotide
cacgaagggaattaatgcagtcggctagag

SEQ ID NO: 12064 - DNA, 30 bp, Artificial Sequence
  Synthetic oligonucleotide
cgattcacatgagcaaagaaaggggacgag

SEQ ID NO: 12065 - DNA, 30 bp, Artificial Sequence
  Synthetic oligonucleotide
catgcagcgaatgaacaaaacgtaagcgag

SEQ ID NO: 12066 - DNA, 30 bp, Artificial Sequence
  Synthetic oligonucleotide
cggaggagtggaattttccgagacaatgag

SEQ ID NO: 12067 - DNA, 31 bp, Artificial Sequence
  Synthetic oligonucleotide
aacaaacggcagggaaacataagctggtgag

SEQ ID NO: 12068 - DNA, 30 bp, Artificial Sequence
  Synthetic oligonucleotide
tctcactgaacaacgaagataactcaatag

SEQ ID NO: 12069 - DNA, 30 bp, Artificial Sequence
  Synthetic oligonucleotide
cgccggaaatgaggagagtgtgccatctag

SEQ ID NO: 12070 - DNA, 30 bp, Artificial Sequence
  Synthetic oligonucleotide
gagcaggaggacttataaaatcgaagaacg

SEQ ID NO: 12071 - DNA, 30 bp, Artificial Sequence
  Synthetic oligonucleotide
agacacaagtggtgccaaaataccagaacg

SEQ ID NO: 12072 - DNA, 30 bp, Artificial Sequence
  Synthetic oligonucleotide
atgagcgagttcgtgcgggatagtccagcg

SEQ ID NO: 12073 - DNA, 30 bp, Artificial Sequence
  Synthetic oligonucleotide
cactcagcagaggacgagcgagaacgcgcg

SEQ ID NO: 12074 - DNA, 30 bp, Artificial Sequence
  Synthetic oligonucleotide
acgaacaatggaaatcgagttattagtgcg

SEQ ID NO: 12075 - DNA, 30 bp, Artificial Sequence
  Synthetic oligonucleotide
aggtcaagtcgatatgaaaaacgctaatcg

SEQ ID NO: 12076 - DNA, 30 bp, Artificial Sequence
  Synthetic oligonucleotide
cgaccaacatgtgtggaacaggaatgatcg

SEQ ID NO: 12077 - DNA, 30 bp, Artificial Sequence
  Synthetic oligonucleotide
tggggcaaggatccatcaaactgaacctcg

SEQ ID NO: 12078 - DNA, 30 bp, Artificial Sequence
  Synthetic oligonucleotide
catcgattgggaccgaagactgaaacgtcg

SEQ ID NO: 12079 - DNA, 30 bp, Artificial Sequence
  Synthetic oligonucleotide
acaggcgggcgaggctgaaatatgcgttcg

SEQ ID NO: 12080 - DNA, 30 bp, Artificial Sequence
  Synthetic oligonucleotide
aaggaaagagggacggaatcaagtcgttcg

SEQ ID NO: 12081 - DNA, 30 bp, Artificial Sequence
  Synthetic oligonucleotide
ccgggaagaatacgagcctagatagacagg

SEQ ID NO: 12082 - DNA, 30 bp, Artificial Sequence
  Synthetic oligonucleotide
agatccctagcaatgaatgaagtatccagg

SEQ ID NO: 12083 - DNA, 30 bp, Artificial Sequence
  Synthetic oligonucleotide
cagaggaaagcgtgataagcatgcgggagg

SEQ ID NO: 12084 - DNA, 30 bp, Artificial Sequence
  Synthetic oligonucleotide
ggaatgaaaatggagaaacaaaggcatagg

SEQ ID NO: 12085 - DNA, 30 bp, Artificial Sequence
  Synthetic oligonucleotide
caggtatcaacgagaacagaacacgatagg

SEQ ID NO: 12086 - DNA, 30 bp, Artificial Sequence
  Synthetic oligonucleotide
gtcacagggggaacacaagaatacgaacgg

SEQ ID NO: 12087 - DNA, 30 bp, Artificial Sequence
  Synthetic oligonucleotide
cggagaacggacgtgaaggtcaacgtaggg

SEQ ID NO: 12088 - DNA, 30 bp, Artificial Sequence
  Synthetic oligonucleotide
atgagaaggaccgacgatgataggctaatg

SEQ ID NO: 12089 - DNA, 30 bp, Artificial Sequence
  Synthetic oligonucleotide
gcgcccaggacaataccatagaagcacatg

SEQ ID NO: 12090 - DNA, 30 bp, Artificial Sequence
  Synthetic oligonucleotide
ataccaggaaggtgagggaggctagagatg

SEQ ID NO: 12091 - DNA, 30 bp, Artificial Sequence
  Synthetic oligonucleotide
tcaggcaggatgagcgaatgtcaggggatg

SEQ ID NO: 12092 - DNA, 30 bp, Artificial Sequence
  Synthetic oligonucleotide
cggaaagcatgtaagactgggtaggggatg

SEQ ID NO: 12093 - DNA, 30 bp, Artificial Sequence
  Synthetic oligonucleotide
acgattcgacgtcaggagagtgtgcgtatg

SEQ ID NO: 12094 - DNA, 30 bp, Artificial Sequence
  Synthetic oligonucleotide
caagaatagaaaaaaaacggaccggccctg

SEQ ID NO: 12095 - DNA, 30 bp, Artificial Sequence
  Synthetic oligonucleotide
ctagaaagaaccaccgaagagttacgcgtg

SEQ ID NO: 12096 - DNA, 30 bp, Artificial Sequence
  Synthetic oligonucleotide
agggaaggaacctagagacaatgataggtg

SEQ ID NO: 12097 - DNA, 30 bp, Artificial Sequence
  Synthetic oligonucleotide
aggaagaataaacaacggattgtaagattg

SEQ ID NO: 12098 - DNA, 30 bp, Artificial Sequence
  Synthetic oligonucleotide
aggtcgaaaaaactatcaatcggcatgcat

SEQ ID NO: 12099 - DNA, 30 bp, Artificial Sequence
  Synthetic oligonucleotide
tccacgaagggagggacagtgagtgaggat

SEQ ID NO: 12100 - DNA, 30 bp, Artificial Sequence
  Synthetic oligonucleotide
cgagggattaggatcaaagcatacgtaact

SEQ ID NO: 12101 - DNA, 30 bp, Artificial Sequence
  Synthetic oligonucleotide
cgaaggatgccagaacagccgagtacgtct

SEQ ID NO: 12102 - DNA, 31 bp, Artificial Sequence
  Synthetic oligonucleotide
cggacgagacagatgcacgaaagtcaaaagt

SEQ ID NO: 12103 - DNA, 30 bp, Artificial Sequence
  Synthetic oligonucleotide
acgaacgccgtcaccaagcgataaggaagt

SEQ ID NO: 12104 - DNA, 30 bp, Artificial Sequence
  Synthetic oligonucleotide
acgggatacggaggccagaacaacataagt

SEQ ID NO: 12105 - DNA, 30 bp, Artificial Sequence
  Synthetic oligonucleotide
gttaggcggaagaaaggaggtacaaacagt

SEQ ID NO: 12106 - DNA, 30 bp, Artificial Sequence
  Synthetic oligonucleotide
gcagggaataccgaaagcaagagaaatagt

SEQ ID NO: 12107 - DNA, 30 bp, Artificial Sequence
  Synthetic oligonucleotide
ggagagaaatgctgaaaaccaaggcaacgt

SEQ ID NO: 12108 - DNA, 30 bp, Artificial Sequence
  Synthetic oligonucleotide
tcatcagacagtgggacgataagaggaggt

SEQ ID NO: 12109 - DNA, 30 bp, Artificial Sequence
  Synthetic oligonucleotide
gaagataaaaacagtaagcgacaagagggt

SEQ ID NO: 12110 - DNA, 31 bp, Artificial Sequence
  Synthetic oligonucleotide
aagggggcgagtgttgaaagcgtcagaatgt

SEQ ID NO: 12111 - DNA, 30 bp, Artificial Sequence
  Synthetic oligonucleotide
ggaaagggaagtcacatgagtcagaacaaa

SEQ ID NO: 12112 - DNA, 30 bp, Artificial Sequence
  Synthetic oligonucleotide
gcggtaagggtggaggaatcgagctagaaa

SEQ ID NO: 12113 - DNA, 30 bp, Artificial Sequence
  Synthetic oligonucleotide
gaggcgagaagaagtggggagcgtaaacaa

SEQ ID NO: 12114 - DNA, 30 bp, Artificial Sequence
  Synthetic oligonucleotide
cacgaaaactcagtgggaataagggggcaa

SEQ ID NO: 12115 - DNA, 30 bp, Artificial Sequence
  Synthetic oligonucleotide
cagggcagacagagaatgcttaagcaagaa

SEQ ID NO: 12116 - DNA, 30 bp, Artificial Sequence
  Synthetic oligonucleotide
cgagggggatgactttgggaagaatcagaa

SEQ ID NO: 12117 - DNA, 30 bp, Artificial Sequence
  Synthetic oligonucleotide
tgaccgaaggggaaccggaatagagaggaa

SEQ ID NO: 12118 - DNA, 30 bp, Artificial Sequence
  Synthetic oligonucleotide
catatgcacagggccaagtcaaggagggaa

SEQ ID NO: 12119 - DNA, 30 bp, Artificial Sequence
  Synthetic oligonucleotide
tggatgtaagaaaaaagaagcaaagcataa

SEQ ID NO: 12120 - DNA, 30 bp, Artificial Sequence
  Synthetic oligonucleotide
accgggcaggaccgaacaccgacgagataa

SEQ ID NO: 12121 - DNA, 30 bp, Artificial Sequence
  Synthetic oligonucleotide
cgtcgaagactagagaggtccaacctataa

SEQ ID NO: 12122 - DNA, 30 bp, Artificial Sequence
  Synthetic oligonucleotide
gaacggaagaggctggatacgatgatctaa

SEQ ID NO: 12123 - DNA, 30 bp, Artificial Sequence
  Synthetic oligonucleotide
ggcgagctagacgaggaaggtcgaaaaaca

SEQ ID NO: 12124 - DNA, 30 bp, Artificial Sequence
  Synthetic oligonucleotide
taagatcggggcgaagatgtgatgcaaaca

SEQ ID NO: 12125 - DNA, 30 bp, Artificial Sequence
  Synthetic oligonucleotide
gggatgaatcagctcgagccagaaataaca

SEQ ID NO: 12126 - DNA, 30 bp, Artificial Sequence
  Synthetic oligonucleotide
cctagagggacatagccgcgaagaaacaca

SEQ ID NO: 12127 - DNA, 30 bp, Artificial Sequence
  Synthetic oligonucleotide
aggccagcaacgacgaaaaagaagatgaca

SEQ ID NO: 12128 - DNA, 30 bp, Artificial Sequence
  Synthetic oligonucleotide
caaccgaaagtgagaagagctaaagataca

SEQ ID NO: 12129 - DNA, 30 bp, Artificial Sequence
  Synthetic oligonucleotide
acagaccggccagaatcgtagaccatgcca

SEQ ID NO: 12130 - DNA, 30 bp, Artificial Sequence
  Synthetic oligonucleotide
cgggacaaatgtgagtcaactcgcgctcca

SEQ ID NO: 12131 - DNA, 30 bp, Artificial Sequence
  Synthetic oligonucleotide
atgagaccaccgtaggcccaatggaaagca

SEQ ID NO: 12132 - DNA, 30 bp, Artificial Sequence
  Synthetic oligonucleotide
gtaacaaatggaaggagggtgaaccaagca

SEQ ID NO: 12133 - DNA, 30 bp, Artificial Sequence
  Synthetic oligonucleotide
cgggaacgaattgggcgaagagtcgtagca

SEQ ID NO: 12134 - DNA, 30 bp, Artificial Sequence
  Synthetic oligonucleotide
ggagaatgggaagaagaaactccacgtgca

SEQ ID NO: 12135 - DNA, 30 bp, Artificial Sequence
  Synthetic oligonucleotide
taaagaagtatagaaaaaagaatcgtgtca

SEQ ID NO: 12136 - DNA, 30 bp, Artificial Sequence
  Synthetic oligonucleotide
catgaacaaagtatgctccagggagaaaga

SEQ ID NO: 12137 - DNA, 30 bp, Artificial Sequence
  Synthetic oligonucleotide
atgacaggaagtacgtcggtccggaacaga

SEQ ID NO: 12138 - DNA, 30 bp, Artificial Sequence
  Synthetic oligonucleotide
ggatgatacaggagagacggtagtaacaga

SEQ ID NO: 12139 - DNA, 30 bp, Artificial Sequence
  Synthetic oligonucleotide
cacgaaaaacgccgagggtgaacaaagaga

SEQ ID NO: 12140 - DNA, 30 bp, Artificial Sequence
  Synthetic oligonucleotide
cgagcctgccaagtatgaaatgtggagaga

SEQ ID NO: 12141 - DNA, 30 bp, Artificial Sequence
  Synthetic oligonucleotide
agccaaagtagcgtctggtttacggcgaga

SEQ ID NO: 12142 - DNA, 30 bp, Artificial Sequence
  Synthetic oligonucleotide
cgagatttgacggaaggaggccagagtaga

SEQ ID NO: 12143 - DNA, 30 bp, Artificial Sequence
  Synthetic oligonucleotide
ccagtacaccctcagagcgaaccgattaga

SEQ ID NO: 12144 - DNA, 30 bp, Artificial Sequence
  Synthetic oligonucleotide
cggagacaaggcctgtgatcagcaaaacga

SEQ ID NO: 12145 - DNA, 30 bp, Artificial Sequence
  Synthetic oligonucleotide
acgaagatgaaattgtactataagccacga

SEQ ID NO: 12146 - DNA, 30 bp, Artificial Sequence
  Synthetic oligonucleotide
caaggacataaagacggaagcaaaaagcga

SEQ ID NO: 12147 - DNA, 30 bp, Artificial Sequence
  Synthetic oligonucleotide
cgaggaacaaatgctcaatgtcagaatcga

SEQ ID NO: 12148 - DNA, 30 bp, Artificial Sequence
  Synthetic oligonucleotide
tgcgaagtaacattagatgaaacgacagga

SEQ ID NO: 12149 - DNA, 30 bp, Artificial Sequence
  Synthetic oligonucleotide
agccaaagcaaagaactccttcaacgagga

SEQ ID NO: 12150 - DNA, 30 bp, Artificial Sequence
  Synthetic oligonucleotide
gggtaacaagaacgtgaaaccatggaggga

SEQ ID NO: 12151 - DNA, 40 bp, Artificial Sequence
  Synthetic oligonucleotide
aagataatacattcagggtatggtcggggatcggggggga

SEQ ID NO: 12152 - DNA, 40 bp, Artificial Sequence
  Synthetic oligonucleotide
aagataatacattcatggtatggtcggggatcgggtggga

SEQ ID NO: 12153 - DNA, 30 bp, Artificial Sequence
  Synthetic oligonucleotide
acacaaaacgagtatttagcggcgagtgga

SEQ ID NO: 12154 - DNA, 31 bp, Artificial Sequence
  Synthetic oligonucleotide
cgggatgaatgaatcgataaatagcaggtga

SEQ ID NO: 12155 - DNA, 30 bp, Artificial Sequence
  Synthetic oligonucleotide
cgagcgcacgtgaaaaacggcctaatgtga

SEQ ID NO: 12156 - DNA, 30 bp, Artificial Sequence
  Synthetic oligonucleotide
ttagggcagacaaacgaaaagaatggtata

SEQ ID NO: 12157 - DNA, 30 bp, Artificial Sequence
  Synthetic oligonucleotide
gcggagaccaagagctgagggatcgaacta

SEQ ID NO: 12158 - DNA, 30 bp, Artificial Sequence
  Synthetic oligonucleotide
caaccgagggaagaagagcaaatataagta

SEQ ID NO: 12159 - DNA, 30 bp, Artificial Sequence
  Synthetic oligonucleotide
aggcccagaaaatacaagctgacatgagta

SEQ ID NO: 12160 - DNA, 30 bp, Artificial Sequence
  Synthetic oligonucleotide
cgtcaacaaacccttcacgagcacaggaac

SEQ ID NO: 12161 - DNA, 30 bp, Artificial Sequence
  Synthetic oligonucleotide
ccgagatgtaaagagtgactgttccggaac

SEQ ID NO: 12162 - DNA, 30 bp, Artificial Sequence
  Synthetic oligonucleotide
cgacctgaagaagctgagctaggcgggaac

SEQ ID NO: 12163 - DNA, 30 bp, Artificial Sequence
  Synthetic oligonucleotide
acgccgtaggagaggactacaaggatgaac

SEQ ID NO: 12164 - DNA, 31 bp, Artificial Sequence
  Synthetic oligonucleotide
caagttcagctcaaggcagagagggatggac

SEQ ID NO: 12165 - DNA, 30 bp, Artificial Sequence
  Synthetic oligonucleotide
tctcagaaagaagagggactagtgcatgac

SEQ ID NO: 12166 - DNA, 30 bp, Artificial Sequence
  Synthetic oligonucleotide
cgagcgggatcggaccaggacacccaaagc

SEQ ID NO: 12167 - DNA, 30 bp, Artificial Sequence
  Synthetic oligonucleotide
tgtacactcgacagaatcacagagtcaggc

SEQ ID NO: 12168 - DNA, 30 bp, Artificial Sequence
  Synthetic oligonucleotide
cgcaaacgagaacatgcaaggaaatagctc

SEQ ID NO: 12169 - DNA, 30 bp, Artificial Sequence
  Synthetic oligonucleotide
aggacagatgagaattaggtagagtagttc

SEQ ID NO: 12170 - DNA, 30 bp, Artificial Sequence
  Synthetic oligonucleotide
aggaggatacaattaaaaacggtctagaag

SEQ ID NO: 12171 - DNA, 30 bp, Artificial Sequence
  Synthetic oligonucleotide
ggatagcagaacaaaatggatgacaggaag

SEQ ID NO: 12172 - DNA, 30 bp, Artificial Sequence
  Synthetic oligonucleotide
aacgagtagtggccgtcagagggtgggaag

SEQ ID NO: 12173 - DNA, 30 bp, Artificial Sequence
  Synthetic oligonucleotide
gaacggactaactcaaccgaccgagtgaag

SEQ ID NO: 12174 - DNA, 30 bp, Artificial Sequence
  Synthetic oligonucleotide
agagataacgcctgagagtccaccgtgaag

SEQ ID NO: 12175 - DNA, 30 bp, Artificial Sequence
  Synthetic oligonucleotide
ggcatgaacaaaaagattatcactcgtaag

SEQ ID NO: 12176 - DNA, 30 bp, Artificial Sequence
  Synthetic oligonucleotide
actaaggggcaatgtgacagatgaaaacag

SEQ ID NO: 12177 - DNA, 30 bp, Artificial Sequence
  Synthetic oligonucleotide
catgcaatacaaccatcctaacagaaccag

SEQ ID NO: 12178 - DNA, 30 bp, Artificial Sequence
  Synthetic oligonucleotide
agcggaggagtaaactaagctgcaacgcag

SEQ ID NO: 12179 - DNA, 30 bp, Artificial Sequence
  Synthetic oligonucleotide
aggcgacgaaagatcagaaggttaagagag

SEQ ID NO: 12180 - DNA, 30 bp, Artificial Sequence
  Synthetic oligonucleotide
agaaaaatggaaggaaacagctaacgcgag

SEQ ID NO: 12181 - DNA, 30 bp, Artificial Sequence
  Synthetic oligonucleotide
cgagcccgggtaactcagtaaggaacatag

SEQ ID NO: 12182 - DNA, 30 bp, Artificial Sequence
  Synthetic oligonucleotide
cggtaagggatgtaaatctccgacacatag

SEQ ID NO: 12183 - DNA, 30 bp, Artificial Sequence
  Synthetic oligonucleotide
cgacacagagactgcaacatgggaagatag

SEQ ID NO: 12184 - DNA, 30 bp, Artificial Sequence
  Synthetic oligonucleotide
cggggacgaatacggccaaatcccatgtag

SEQ ID NO: 12185 - DNA, 30 bp, Artificial Sequence
  Synthetic oligonucleotide
atagccgaagaaggcgggaaacccagttag

SEQ ID NO: 12186 - DNA, 30 bp, Artificial Sequence
  Synthetic oligonucleotide
acacgaaacacacacttgagaatcggaacg

SEQ ID NO: 12187 - DNA, 30 bp, Artificial Sequence
  Synthetic oligonucleotide
acaatgaataatcaagcaagcccacgtacg

SEQ ID NO: 12188 - DNA, 30 bp, Artificial Sequence
  Synthetic oligonucleotide
acgcaagaattagaatagagcaactttacg

SEQ ID NO: 12189 - DNA, 30 bp, Artificial Sequence
  Synthetic oligonucleotide
cggcgaagggagaacagcgatctttaaccg

SEQ ID NO: 12190 - DNA, 30 bp, Artificial Sequence
  Synthetic oligonucleotide
ggcgaagacgtcacgaacctgaattacccg

SEQ ID NO: 12191 - DNA, 31 bp, Artificial Sequence
  Synthetic oligonucleotide
acgagaacgaggtcctcacagctaacgcccg

SEQ ID NO: 12192 - DNA, 30 bp, Artificial Sequence
  Synthetic oligonucleotide
ggagtgagtaagtgagatctcgtcctgccg

SEQ ID NO: 12193 - DNA, 30 bp, Artificial Sequence
  Synthetic oligonucleotide
tacggcagaaactagtcagcgagggaagcg

SEQ ID NO: 12194 - DNA, 30 bp, Artificial Sequence
  Synthetic oligonucleotide
ctgggatagaaacgcaagaggaagggagcg

SEQ ID NO: 12195 - DNA, 30 bp, Artificial Sequence
  Synthetic oligonucleotide
acgacatgtaaaggaacaacgggaagaagg

SEQ ID NO: 12196 - DNA, 30 bp, Artificial Sequence
  Synthetic oligonucleotide
cgcaaatcacgataggcgagaatagctagg

SEQ ID NO: 12197 - DNA, 30 bp, Artificial Sequence
  Synthetic oligonucleotide
cgtcaaccggagaatgtaagcggagcgcgg

SEQ ID NO: 12198 - DNA, 30 bp, Artificial Sequence
  Synthetic oligonucleotide
agaaagagctgctgtcatcgaacggaaggg

SEQ ID NO: 12199 - DNA, 30 bp, Artificial Sequence
  Synthetic oligonucleotide
aacggataaactgcatgttggaacccaggg

SEQ ID NO: 12200 - DNA, 30 bp, Artificial Sequence
  Synthetic oligonucleotide
tcgtaaagtcagactgcaaaatggattggg

SEQ ID NO: 12201 - DNA, 30 bp, Artificial Sequence
  Synthetic oligonucleotide
tcggacagtcgcaaccgacagggcaaatgg

SEQ ID NO: 12202 - DNA, 30 bp, Artificial Sequence
  Synthetic oligonucleotide
cctaatgaatgggaatcgaataacatctgg

SEQ ID NO: 12203 - DNA, 30 bp, Artificial Sequence
  Synthetic oligonucleotide
agaatgggctcgagcgaaagagtaaagatg

SEQ ID NO: 12204 - DNA, 30 bp, Artificial Sequence
  Synthetic oligonucleotide
ggagcatgtcgaaggtagatcggccggatg

SEQ ID NO: 12205 - DNA, 30 bp, Artificial Sequence
  Synthetic oligonucleotide
aggaaggaattgcgagtactagatagtatg

SEQ ID NO: 12206 - DNA, 30 bp, Artificial Sequence
  Synthetic oligonucleotide
acggtcagtgcgatcgtgatgggacttatg

SEQ ID NO: 12207 - DNA, 30 bp, Artificial Sequence
  Synthetic oligonucleotide
cgagataaccgaaataattacggcgtagtg

SEQ ID NO: 12208 - DNA, 30 bp, Artificial Sequence
  Synthetic oligonucleotide
agacaaaagacattcaaacgtcacgatgtg

SEQ ID NO: 12209 - DNA, 30 bp, Artificial Sequence
  Synthetic oligonucleotide
aggatcgacgaaaaccgcaaagtgtctgtg

SEQ ID NO: 12210 - DNA, 30 bp, Artificial Sequence
  Synthetic oligonucleotide
acgacagtacgctgtccgatcgaatgtgtg

SEQ ID NO: 12211 - DNA, 30 bp, Artificial Sequence
  Synthetic oligonucleotide
cggagaaacctatagtcaagagtacgaaat

SEQ ID NO: 12212 - DNA, 30 bp, Artificial Sequence
  Synthetic oligonucleotide
cgaagttaatgggacaagattacaacgaat

SEQ ID NO: 12213 - DNA, 30 bp, Artificial Sequence
  Synthetic oligonucleotide
ggcactaggaggagagctgagataacgaat

SEQ ID NO: 12214 - DNA, 30 bp, Artificial Sequence
  Synthetic oligonucleotide
acgaacagagtaatgtcaggcacagggaat

SEQ ID NO: 12215 - DNA, 31 bp, Artificial Sequence
  Synthetic oligonucleotide
acggaaagcggagagatgtacttgtcgacat

SEQ ID NO: 12216 - DNA, 30 bp, Artificial Sequence
  Synthetic oligonucleotide
cggatagtaacagagaaatacgcttcagat

SEQ ID NO: 12217 - DNA, 30 bp, Artificial Sequence
  Synthetic oligonucleotide
agaccagtgtgtccagcagagagactagat

SEQ ID NO: 12218 - DNA, 30 bp, Artificial Sequence
  Synthetic oligonucleotide
agggggctcaggtggatacgaaaatacgat

SEQ ID NO: 12219 - DNA, 30 bp, Artificial Sequence
  Synthetic oligonucleotide
atagcggcgaggcggaagagaattggcgat

SEQ ID NO: 12220 - DNA, 30 bp, Artificial Sequence
  Synthetic oligonucleotide
aggagtgcaatagcttgagggatagtcgat

SEQ ID NO: 12221 - DNA, 30 bp, Artificial Sequence
  Synthetic oligonucleotide
acgaaagctggaaaagttgaaggcatagct

SEQ ID NO: 12222 - DNA, 30 bp, Artificial Sequence
  Synthetic oligonucleotide
gcggaatgtaggcctaaaccgagaggaagt

SEQ ID NO: 12223 - DNA, 30 bp, Artificial Sequence
  Synthetic oligonucleotide
gcgcacaaaagcccaagagtaaattcgagt

SEQ ID NO: 12224 - DNA, 30 bp, Artificial Sequence
  Synthetic oligonucleotide
agcgtgtgcagcggaacaccagattgacgt

SEQ ID NO: 12225 - DNA, 30 bp, Artificial Sequence
  Synthetic oligonucleotide
cgagagagatttcgtaaaagcataatgcgt

SEQ ID NO: 12226 - DNA, 30 bp, Artificial Sequence
  Synthetic oligonucleotide
acggcatgggaaaatcatcctaacactcgt

SEQ ID NO: 12227 - DNA, 30 bp, Artificial Sequence
  Synthetic oligonucleotide
aaggacgaaaggggatatgaaactcaatgt

SEQ ID NO: 12228 - DNA, 30 bp, Artificial Sequence
  Synthetic oligonucleotide
caacgggggaaggaaggcaagattgtatgt

SEQ ID NO: 12229 - DNA, 30 bp, Artificial Sequence
  Synthetic oligonucleotide
gtgagcaaaagagtgcaatacaaccgcgtt

SEQ ID NO: 12230 - DNA, 30 bp, Artificial Sequence
  Synthetic oligonucleotide
atgtaaaaagaaataccagagccaggaaaa

SEQ ID NO: 12231 - DNA, 30 bp, Artificial Sequence
  Synthetic oligonucleotide
ccgactaaatctgacgtgccacgaggaaaa

SEQ ID NO: 12232 - DNA, 30 bp, Artificial Sequence
  Synthetic oligonucleotide
acacatagggacgaaatcgactgaatcaaa

SEQ ID NO: 12233 - DNA, 30 bp, Artificial Sequence
  Synthetic oligonucleotide
ccgtgcgaaaaggcgggaaactggcagaaa

SEQ ID NO: 12234 - DNA, 30 bp, Artificial Sequence
  Synthetic oligonucleotide
aaagagaaagagcgcacaagctggcggaaa

SEQ ID NO: 12235 - DNA, 30 bp, Artificial Sequence
  Synthetic oligonucleotide
agaaaagggaatgggtatcccgcgatgaaa

SEQ ID NO: 12236 - DNA, 30 bp, Artificial Sequence
  Synthetic oligonucleotide
cgaagggattcgcgaccagacagccgacaa

SEQ ID NO: 12237 - DNA, 30 bp, Artificial Sequence
  Synthetic oligonucleotide
ggacgagagtagttaagagcctaaatccaa

SEQ ID NO: 12238 - DNA, 30 bp, Artificial Sequence
  Synthetic oligonucleotide
aggacattagctagatgggaaagtaggcaa

SEQ ID NO: 12239 - DNA, 30 bp, Artificial Sequence
  Synthetic oligonucleotide
ggcactgaagacgataaggagaaaggtcaa

SEQ ID NO: 12240 - DNA, 30 bp, Artificial Sequence
  Synthetic oligonucleotide
aacgacacgcctactaaattaggggaagaa

SEQ ID NO: 12241 - DNA, 30 bp, Artificial Sequence
  Synthetic oligonucleotide
gaaggtggtgtacgaacaacaagagcagaa

SEQ ID NO: 12242 - DNA, 30 bp, Artificial Sequence
  Synthetic oligonucleotide
acgttagggggggaggcgataagttgagaa

SEQ ID NO: 12243 - DNA, 30 bp, Artificial Sequence
  Synthetic oligonucleotide
agccgatcgaaaaaaaagtctttaagcgaa

SEQ ID NO: 12244 - DNA, 30 bp, Artificial Sequence
  Synthetic oligonucleotide
cctgagaaaacagggagtggaaagcggtaa

SEQ ID NO: 12245 - DNA, 30 bp, Artificial Sequence
  Synthetic oligonucleotide
agaaggcaccggactgaaacaagagattaa

SEQ ID NO: 12246 - DNA, 30 bp, Artificial Sequence
  Synthetic oligonucleotide
tggaaaaggcgaagggcagattgcgtgcca

SEQ ID NO: 12247 - DNA, 30 bp, Artificial Sequence
  Synthetic oligonucleotide
atgtcgaggacaaagtacttaacgtaagca

SEQ ID NO: 12248 - DNA, 30 bp, Artificial Sequence
  Synthetic oligonucleotide
taggggcacacaagcaaagagatctgagca

SEQ ID NO: 12249 - DNA, 30 bp, Artificial Sequence
  Synthetic oligonucleotide
agggccgaaattatttagagtgcgtgtgca

SEQ ID NO: 12250 - DNA, 30 bp, Artificial Sequence
  Synthetic oligonucleotide
ggccgacgtgtacccgaattaagtgcgtca

SEQ ID NO: 12251 - DNA, 30 bp, Artificial Sequence
  Synthetic oligonucleotide
gtaaagcgaagctagaaccaatccggcaga

SEQ ID NO: 12252 - DNA, 30 bp, Artificial Sequence
  Synthetic oligonucleotide
agcaaaagagttacaacagctgtacggaga

SEQ ID NO: 12253 - DNA, 30 bp, Artificial Sequence
  Synthetic oligonucleotide
cagagaagacatcgaaagtggcgactgaga

SEQ ID NO: 12254 - DNA, 30 bp, Artificial Sequence
  Synthetic oligonucleotide
accgagaaccaagccccaccagtagaacga

SEQ ID NO: 12255 - DNA, 30 bp, Artificial Sequence
  Synthetic oligonucleotide
acagtgaaaaaaaacgtgaggaaagagcga

SEQ ID NO: 12256 - DNA, 30 bp, Artificial Sequence
  Synthetic oligonucleotide
catgagagagagtgaatcggccaactgcga

SEQ ID NO: 12257 - DNA, 30 bp, Artificial Sequence
  Synthetic oligonucleotide
ccgagtaggacacgactataagcgcatcga

SEQ ID NO: 12258 - DNA, 30 bp, Artificial Sequence
  Synthetic oligonucleotide
caagcgcgacagaggaaggtccaagctcga

SEQ ID NO: 12259 - DNA, 30 bp, Artificial Sequence
  Synthetic oligonucleotide
gcgtaaggtaaagcgtgacaagatgacgga

SEQ ID NO: 12260 - DNA, 30 bp, Artificial Sequence
  Synthetic oligonucleotide
cgaccgggaagccaacagcatcgcgaggga

SEQ ID NO: 12261 - DNA, 30 bp, Artificial Sequence
  Synthetic oligonucleotide
acggtatcaacatatcaacaaggaacggga

SEQ ID NO: 12262 - DNA, 30 bp, Artificial Sequence
  Synthetic oligonucleotide
ccatcaaaaggggcgaggggacatcttgga

SEQ ID NO: 12263 - DNA, 30 bp, Artificial Sequence
  Synthetic oligonucleotide
aagtggcggaagaaaagcaggcaagaatga

SEQ ID NO: 12264 - DNA, 30 bp, Artificial Sequence
  Synthetic oligonucleotide
agcgcgaacccaacctgaacagaagcatga

SEQ ID NO: 12265 - DNA, 30 bp, Artificial Sequence
  Synthetic oligonucleotide
tggggctggggaacatgattaagcgaaata

SEQ ID NO: 12266 - DNA, 30 bp, Artificial Sequence
  Synthetic oligonucleotide
cgagagttaccacgagtagccagatagata

SEQ ID NO: 12267 - DNA, 30 bp, Artificial Sequence
  Synthetic oligonucleotide
ccgcaaggacaaggaaacaaacaaacgata

SEQ ID NO: 12268 - DNA, 30 bp, Artificial Sequence
  Synthetic oligonucleotide
acgtaacagaaacgagctgataggacacta

SEQ ID NO: 12269 - DNA, 30 bp, Artificial Sequence
  Synthetic oligonucleotide
accaggtggggaacgaaaaaggcgatccta

SEQ ID NO: 12270 - DNA, 30 bp, Artificial Sequence
  Synthetic oligonucleotide
ctaaggatccagaacagaggcgagtaagta

SEQ ID NO: 12271 - DNA, 30 bp, Artificial Sequence
  Synthetic oligonucleotide
aagggacattgcgaccacgaatccacagta

SEQ ID NO: 12272 - DNA, 30 bp, Artificial Sequence
  Synthetic oligonucleotide
cgagggccatcagaacatacaatactcgta

SEQ ID NO: 12273 - DNA, 30 bp, Artificial Sequence
  Synthetic oligonucleotide
cgaaggggctcataacacagtactgcaaac

SEQ ID NO: 12274 - DNA, 30 bp, Artificial Sequence
  Synthetic oligonucleotide
tcgatgaggcaaggggaaagagatcgtaac

SEQ ID NO: 12275 - DNA, 30 bp, Artificial Sequence
  Synthetic oligonucleotide
aacgaggcaggcggctcagcaccaggacac

SEQ ID NO: 12276 - DNA, 30 bp, Artificial Sequence
  Synthetic oligonucleotide
ccgagcaaatcgaaacaacgcgtcccccac

SEQ ID NO: 12277 - DNA, 30 bp, Artificial Sequence
  Synthetic oligonucleotide
cgatgactcggggtgccaagagagccgcac

SEQ ID NO: 12278 - DNA, 34 bp, Artificial Sequence
  Synthetic oligonucleotide
gatactagatcaccacgtgtccatcagaaaagac

SEQ ID NO: 12279 - DNA, 30 bp, Artificial Sequence
  Synthetic oligonucleotide
aacggaagagcaccagaggaactgtaggac

SEQ ID NO: 12280 - DNA, 30 bp, Artificial Sequence
  Synthetic oligonucleotide
aggcaacacgccgaaaaaaagtaagtaacc

SEQ ID NO: 12281 - DNA, 30 bp, Artificial Sequence
  Synthetic oligonucleotide
acgaacgaacaaggcgtggacaatttgacc

SEQ ID NO: 12282 - DNA, 30 bp, Artificial Sequence
  Synthetic oligonucleotide
aaggaggagctgtaggagaggggaaccgcc

SEQ ID NO: 12283 - DNA, 30 bp, Artificial Sequence
  Synthetic oligonucleotide
gttagggggtgcaagacaaccaggggaagc

SEQ ID NO: 12284 - DNA, 30 bp, Artificial Sequence
  Synthetic oligonucleotide
gggaggaaggttgaaatgatttagccgagc

SEQ ID NO: 12285 - DNA, 30 bp, Artificial Sequence
  Synthetic oligonucleotide
cgacgaacgtctgagtagcgaggagcgcgc

SEQ ID NO: 12286 - DNA, 30 bp, Artificial Sequence
  Synthetic oligonucleotide
taaggagaaggagtgtcgtaatcaagtcgc

SEQ ID NO: 12287 - DNA, 30 bp, Artificial Sequence
  Synthetic oligonucleotide
gtgagactaaggtcaaagagtacaattcgc

SEQ ID NO: 12288 - DNA, 30 bp, Artificial Sequence
  Synthetic oligonucleotide
acgaccctacacaagaaatccaatagtggc

SEQ ID NO: 12289 - DNA, 30 bp, Artificial Sequence
  Synthetic oligonucleotide
cgaaacatctttaagcaccgtgaaaacgtc

SEQ ID NO: 12290 - DNA, 30 bp, Artificial Sequence
  Synthetic oligonucleotide
aggaccacgaataatcgagcaaaccacgtc

SEQ ID NO: 12291 - DNA, 30 bp, Artificial Sequence
  Synthetic oligonucleotide
aggtccgcgcaatagaaaggtgtacagaag

SEQ ID NO: 12292 - DNA, 30 bp, Artificial Sequence
  Synthetic oligonucleotide
agcgacaggaaggatataggggctacgaag

SEQ ID NO: 12293 - DNA, 30 bp, Artificial Sequence
  Synthetic oligonucleotide
agaagacgaggtcgttagggaggaaaacag

SEQ ID NO: 12294 - DNA, 30 bp, Artificial Sequence
  Synthetic oligonucleotide
cgagactcacatgacaactcagacgaacag

SEQ ID NO: 12295 - DNA, 30 bp, Artificial Sequence
  Synthetic oligonucleotide
gcagggcagctgagtcgaatcagtacacag

SEQ ID NO: 12296 - DNA, 30 bp, Artificial Sequence
  Synthetic oligonucleotide
acgtgagatattttaaaagaaagcggacag

SEQ ID NO: 12297 - DNA, 30 bp, Artificial Sequence
  Synthetic oligonucleotide
acggggacttagcgggatgaaaatagccag

SEQ ID NO: 12298 - DNA, 30 bp, Artificial Sequence
  Synthetic oligonucleotide
aggcacaaaaggcgtgctaacgtggagcag

SEQ ID NO: 12299 - DNA, 30 bp, Artificial Sequence
  Synthetic oligonucleotide
aaggagacagtgggattcaaaagacgtcag

SEQ ID NO: 12300 - DNA, 30 bp, Artificial Sequence
  Synthetic oligonucleotide
acgcgaggaagggtactaagccaataagag

SEQ ID NO: 12301 - DNA, 30 bp, Artificial Sequence
  Synthetic oligonucleotide
aggcgaaaacgtagccaaacaacgacagag

SEQ ID NO: 12302 - DNA, 30 bp, Artificial Sequence
  Synthetic oligonucleotide
agaagtaagcattgcgtaggctgaggagag

SEQ ID NO: 12303 - DNA, 30 bp, Artificial Sequence
  Synthetic oligonucleotide
agcgggaaaagttagcaagggaagaccgag

SEQ ID NO: 12304 - DNA, 30 bp, Artificial Sequence
  Synthetic oligonucleotide
caaggagcataagtgtacgtgggaccggag

SEQ ID NO: 12305 - DNA, 30 bp, Artificial Sequence
  Synthetic oligonucleotide
cacgttcagacaacaagcattagtagggag

SEQ ID NO: 12306 - DNA, 30 bp, Artificial Sequence
  Synthetic oligonucleotide
ctgataggaaaagtgtatagaacaagtgag

SEQ ID NO: 12307 - DNA, 30 bp, Artificial Sequence
  Synthetic oligonucleotide
acaatctaaaccaccgaaagcaaggttgag

SEQ ID NO: 12308 - DNA, 30 bp, Artificial Sequence
  Synthetic oligonucleotide
cgactctaaggaaagaaaacgagtgattag

SEQ ID NO: 12309 - DNA, 30 bp, Artificial Sequence
  Synthetic oligonucleotide
cgaggctagctcggataagacacacaaacg

SEQ ID NO: 12310 - DNA, 30 bp, Artificial Sequence
  Synthetic oligonucleotide
acgcggatggaaagacaagccgcccaaacg

SEQ ID NO: 12311 - DNA, 30 bp, Artificial Sequence
  Synthetic oligonucleotide
aggagcgcgaggcgagaaggaccagaaacg

SEQ ID NO: 12312 - DNA, 30 bp, Artificial Sequence
  Synthetic oligonucleotide
taacaaaaacagaaacaggtaaaattagcg

SEQ ID NO: 12313 - DNA, 30 bp, Artificial Sequence
  Synthetic oligonucleotide
catcgtggcactaaaggaacacgaatcgcg

SEQ ID NO: 12314 - DNA, 30 bp, Artificial Sequence
  Synthetic oligonucleotide
caaatgaccggaaactagaagcggaaggcg

SEQ ID NO: 12315 - DNA, 30 bp, Artificial Sequence
  Synthetic oligonucleotide
acggcaatggaatagtgaaacaggtgtgcg

SEQ ID NO: 12316 - DNA, 30 bp, Artificial Sequence
  Synthetic oligonucleotide
tcatatgaccgaaggcgaacagcgatatcg

SEQ ID NO: 12317 - DNA, 39 bp, Artificial Sequence
  Synthetic oligonucleotide
aatgaagtatataaagattagcaatgattaagcgggtcg

SEQ ID NO: 12318 - DNA, 30 bp, Artificial Sequence
  Synthetic oligonucleotide
tcgtgagacataaaggatgaacgaccttcg

SEQ ID NO: 12319 - DNA, 30 bp, Artificial Sequence
  Synthetic oligonucleotide
gaggaactatacagtaaagtcgtaaaaagg

SEQ ID NO: 12320 - DNA, 30 bp, Artificial Sequence
  Synthetic oligonucleotide
acgcgaggggataactaacgtccacagagg

SEQ ID NO: 12321 - DNA, 30 bp, Artificial Sequence
  Synthetic oligonucleotide
aggctactcagctcgtcggaagagtggagg

SEQ ID NO: 12322 - DNA, 30 bp, Artificial Sequence
  Synthetic oligonucleotide
cgcaggagaatacaaggatccgctaaaggg

SEQ ID NO: 12323 - DNA, 30 bp, Artificial Sequence
  Synthetic oligonucleotide
ggaccaagagcgagagacaatcgagaaggg

SEQ ID NO: 12324 - DNA, 30 bp, Artificial Sequence
  Synthetic oligonucleotide
cacacgggagagcaactgcaaaatgaaggg

SEQ ID NO: 12325 - DNA, 30 bp, Artificial Sequence
  Synthetic oligonucleotide
caatcgcaggcgaaaggaaatgcgtaaggg

SEQ ID NO: 12326 - DNA, 30 bp, Artificial Sequence
  Synthetic oligonucleotide
ccgaagaaagcatccggagactccacaggg

SEQ ID NO: 12327 - DNA, 30 bp, Artificial Sequence
  Synthetic oligonucleotide
aaagatcagagttatgcagaaacgggaggg

SEQ ID NO: 12328 - DNA, 30 bp, Artificial Sequence
  Synthetic oligonucleotide
cgaggagaaaaagacccacggtaggactgg

SEQ ID NO: 12329 - DNA, 30 bp, Artificial Sequence
  Synthetic oligonucleotide
acggtcaaaggaaataattagaatcgcatg

SEQ ID NO: 12330 - DNA, 30 bp, Artificial Sequence
  Synthetic oligonucleotide
cgagtagagtacacgcatgggcaacagatg

SEQ ID NO: 12331 - DNA, 30 bp, Artificial Sequence
  Synthetic oligonucleotide
cgtagaacaacgtacaagggtgataagctg

SEQ ID NO: 12332 - DNA, 30 bp, Artificial Sequence
  Synthetic oligonucleotide
tcggtagacgtgtgggaatatggcgatctg

SEQ ID NO: 12333 - DNA, 30 bp, Artificial Sequence
  Synthetic oligonucleotide
cagggagagggatgcaaagctgaagaggtg

SEQ ID NO: 12334 - DNA, 30 bp, Artificial Sequence
  Synthetic oligonucleotide
ggaagacgagagatcagtgtgagccgtgtg

SEQ ID NO: 12335 - DNA, 30 bp, Artificial Sequence
  Synthetic oligonucleotide
caaggacgcgagtagcaaacacgttaattg

SEQ ID NO: 12336 - DNA, 30 bp, Artificial Sequence
  Synthetic oligonucleotide
ctgccactgcaaaagagcgagactaagttg

SEQ ID NO: 12337 - DNA, 30 bp, Artificial Sequence
  Synthetic oligonucleotide
ccgcctcaaagcgcaagaatagtcggaaat

SEQ ID NO: 12338 - DNA, 30 bp, Artificial Sequence
  Synthetic oligonucleotide
gtagtgaaggaggcatcggaagtaaggaat

SEQ ID NO: 12339 - DNA, 30 bp, Artificial Sequence
  Synthetic oligonucleotide
gctgagcgaggacatagcagggcgagacat

SEQ ID NO: 12340 - DNA, 30 bp, Artificial Sequence
  Synthetic oligonucleotide
gaacgccggctcagaaggatatcaccagat

SEQ ID NO: 12341 - DNA, 30 bp, Artificial Sequence
  Synthetic oligonucleotide
cgagaagacaaactcagccaacacctagat

SEQ ID NO: 12342 - DNA, 30 bp, Artificial Sequence
  Synthetic oligonucleotide
cgataagagcgacggacattgaacgaggat

SEQ ID NO: 12343 - DNA, 30 bp, Artificial Sequence
  Synthetic oligonucleotide
agaggggacgaggcggtccgaccatctgat

SEQ ID NO: 12344 - DNA, 30 bp, Artificial Sequence
  Synthetic oligonucleotide
acagaccaaatgcaaatggaaaaacagact

SEQ ID NO: 12345 - DNA, 30 bp, Artificial Sequence
  Synthetic oligonucleotide
acgatgaaacaatccagtcaatggcagact

SEQ ID NO: 12346 - DNA, 30 bp, Artificial Sequence
  Synthetic oligonucleotide
ttgagaacataggcttaaaagcgagcaagt

SEQ ID NO: 12347 - DNA, 30 bp, Artificial Sequence
  Synthetic oligonucleotide
aggacggggagagagcatgcgaacggaagt

SEQ ID NO: 12348 - DNA, 30 bp, Artificial Sequence
  Synthetic oligonucleotide
gggagaagtagggacgaaattaagaacaaa

SEQ ID NO: 12349 - DNA, 30 bp, Artificial Sequence
  Synthetic oligonucleotide
tgctaaaatcaaacacaagaccgagagaaa

SEQ ID NO: 12350 - DNA, 30 bp, Artificial Sequence
  Synthetic oligonucleotide
cgaacatcacgaggacctgaggctgagaaa

SEQ ID NO: 12351 - DNA, 30 bp, Artificial Sequence
  Synthetic oligonucleotide
gggagacgaatgagagccgtgaacaggaaa

SEQ ID NO: 12352 - DNA, 30 bp, Artificial Sequence
  Synthetic oligonucleotide
gcagagagcgtcagctaggatcgatggaaa

SEQ ID NO: 12353 - DNA, 30 bp, Artificial Sequence
  Synthetic oligonucleotide
aggcaattataagaaatgagtgaatgtaaa

SEQ ID NO: 12354 - DNA, 30 bp, Artificial Sequence
  Synthetic oligonucleotide
agacatcgcgaacaacggaataggccacaa

SEQ ID NO: 12355 - DNA, 30 bp, Artificial Sequence
  Synthetic oligonucleotide
ggcgcaagccctagcgaataacatctccaa

SEQ ID NO: 12356 - DNA, 30 bp, Artificial Sequence
  Synthetic oligonucleotide
ctagcaaggtaaaaaggcagccagcgtcaa

SEQ ID NO: 12357 - DNA, 30 bp, Artificial Sequence
  Synthetic oligonucleotide
actagaatcaggaccgatgagtgtaagtaa

SEQ ID NO: 12358 - DNA, 30 bp, Artificial Sequence
  Synthetic oligonucleotide
cacgctattagtggcaagggcatcgagtaa

SEQ ID NO: 12359 - DNA, 30 bp, Artificial Sequence
  Synthetic oligonucleotide
agtaaggacaacaacaccaatagatgttaa

SEQ ID NO: 12360 - DNA, 30 bp, Artificial Sequence
  Synthetic oligonucleotide
cagctgccggaaaagtcgaggaaatcaaca

SEQ ID NO: 12361 - DNA, 30 bp, Artificial Sequence
  Synthetic oligonucleotide
tacggaaatcaagggcgtgacaccaggaca

SEQ ID NO: 12362 - DNA, 30 bp, Artificial Sequence
  Synthetic oligonucleotide
gggcaataagaggactaaagtagggttaca

SEQ ID NO: 12363 - DNA, 30 bp, Artificial Sequence
  Synthetic oligonucleotide
cgggagctacaaaaaaaaggctagtcgcca

SEQ ID NO: 12364 - DNA, 30 bp, Artificial Sequence
  Synthetic oligonucleotide
cggagacatacaaaagtgtcaaatcatcca

SEQ ID NO: 12365 - DNA, 30 bp, Artificial Sequence
  Synthetic oligonucleotide
tcttagaaggacgaggtagaacatgcagca

SEQ ID NO: 12366 - DNA, 30 bp, Artificial Sequence
  Synthetic oligonucleotide
gtcgaataaagtacaaataaaagagaatca

SEQ ID NO: 12367 - DNA, 30 bp, Artificial Sequence
  Synthetic oligonucleotide
atgacactggaaaggtgaataacgatatca

SEQ ID NO: 12368 - DNA, 30 bp, Artificial Sequence
  Synthetic oligonucleotide
agcgacggaacaaccgcaaaaagccgctca

SEQ ID NO: 12369 - DNA, 30 bp, Artificial Sequence
  Synthetic oligonucleotide
cgagcacaacttaggagagaggggcagtca

SEQ ID NO: 12370 - DNA, 30 bp, Artificial Sequence
  Synthetic oligonucleotide
agacccattatcccatcagaagcacgaaga

SEQ ID NO: 12371 - DNA, 30 bp, Artificial Sequence
  Synthetic oligonucleotide
cgaaggtcaggaagaggacgatcagtaaga

SEQ ID NO: 12372 - DNA, 30 bp, Artificial Sequence
  Synthetic oligonucleotide
tgggtaaagcgaaagaatcacaggagcaga

SEQ ID NO: 12373 - DNA, 30 bp, Artificial Sequence
  Synthetic oligonucleotide
gaaaaacgagcggaacgatatgagtgcaga

SEQ ID NO: 12374 - DNA, 30 bp, Artificial Sequence
  Synthetic oligonucleotide
aataacgggtacggtaaatcgacgatcaga

SEQ ID NO: 12375 - DNA, 30 bp, Artificial Sequence
  Synthetic oligonucleotide
gccacgaagaaagagggaatcaagcagaga

SEQ ID NO: 12376 - DNA, 30 bp, Artificial Sequence
  Synthetic oligonucleotide
tcgaggttgcagtagaagggggaatggaga

SEQ ID NO: 12377 - DNA, 30 bp, Artificial Sequence
  Synthetic oligonucleotide
acggaaatgtgccgaacaaacgccgctaga

SEQ ID NO: 12378 - DNA, 30 bp, Artificial Sequence
  Synthetic oligonucleotide
aaaggacgggataacggatatacgagtaga

SEQ ID NO: 12379 - DNA, 30 bp, Artificial Sequence
  Synthetic oligonucleotide
tgaacgacttcgaaagataagacaggtaga

SEQ ID NO: 12380 - DNA, 30 bp, Artificial Sequence
  Synthetic oligonucleotide
cggaggcgaatactaaaactactaggtaga

SEQ ID NO: 12381 - DNA, 30 bp, Artificial Sequence
  Synthetic oligonucleotide
cgataaagttgggtgggaccgtaagcacga

SEQ ID NO: 12382 - DNA, 30 bp, Artificial Sequence
  Synthetic oligonucleotide
tgcagggaggagcaggaccacaatcagcga

SEQ ID NO: 12383 - DNA, 30 bp, Artificial Sequence
  Synthetic oligonucleotide
gtaccaaaaaatgtagatagataagcgcga

SEQ ID NO: 12384 - DNA, 30 bp, Artificial Sequence
  Synthetic oligonucleotide
cacgataaaaagaaagaggattatatgcga

SEQ ID NO: 12385 - DNA, 30 bp, Artificial Sequence
  Synthetic oligonucleotide
acgggagtgctgtgagtactagcgtcagga

SEQ ID NO: 12386 - DNA, 30 bp, Artificial Sequence
  Synthetic oligonucleotide
aggatattgagccggaggaccgagagagga

SEQ ID NO: 12387 - DNA, 30 bp, Artificial Sequence
  Synthetic oligonucleotide
aggcgagaaggcacgttcgtcgtacaggga

SEQ ID NO: 12388 - DNA, 30 bp, Artificial Sequence
  Synthetic oligonucleotide
agatcaaaacagtcgcggtatgaagaggga

SEQ ID NO: 12389 - DNA, 30 bp, Artificial Sequence
  Synthetic oligonucleotide
cgagaagaaactccagttcagagagaggga

SEQ ID NO: 12390 - DNA, 40 bp, Artificial Sequence
  Synthetic oligonucleotide
aaggtaatacattcatggtatggtcggggatcggggggga

SEQ ID NO: 12391 - DNA, 30 bp, Artificial Sequence
  Synthetic oligonucleotide
ctggataagagggaagaacacctaagctga

SEQ ID NO: 12392 - DNA, 30 bp, Artificial Sequence
  Synthetic oligonucleotide
acgatacccacagagaagggatcgagttga

SEQ ID NO: 12393 - DNA, 30 bp, Artificial Sequence
  Synthetic oligonucleotide
aacgcggatgtggacgatgagcccgaaata

SEQ ID NO: 12394 - DNA, 30 bp, Artificial Sequence
  Synthetic oligonucleotide
cggaagaatttgcgaagaaatacatcgata

SEQ ID NO: 12395 - DNA, 30 bp, Artificial Sequence
  Synthetic oligonucleotide
aaatggaagaagggggagagtgcacatata

SEQ ID NO: 12396 - DNA, 30 bp, Artificial Sequence
  Synthetic oligonucleotide
acagcggggtagtaagtaacgtgaacagta

SEQ ID NO: 12397 - DNA, 30 bp, Artificial Sequence
  Synthetic oligonucleotide
aatgcggaggtgtaacagtgcgagcgagta

SEQ ID NO: 12398 - DNA, 30 bp, Artificial Sequence
  Synthetic oligonucleotide
gcgggcacagcgtaaagtgagacttgagta

SEQ ID NO: 12399 - DNA, 30 bp, Artificial Sequence
  Synthetic oligonucleotide
cgagcagagatccaggaggcaggcgacgta

SEQ ID NO: 12400 - DNA, 30 bp, Artificial Sequence
  Synthetic oligonucleotide
aggaggatgtcagtaggcccgtaaagcgta

SEQ ID NO: 12401 - DNA, 30 bp, Artificial Sequence
  Synthetic oligonucleotide
cgactaccaggggagaggtaacgtgaggta

SEQ ID NO: 12402 - DNA, 30 bp, Artificial Sequence
  Synthetic oligonucleotide
acgcatagacgaaaagtggtgctaagtgta

SEQ ID NO: 12403 - DNA, 30 bp, Artificial Sequence
  Synthetic oligonucleotide
ccgagacagtgcgcaaatggcatcaccaac

SEQ ID NO: 12404 - DNA, 30 bp, Artificial Sequence
  Synthetic oligonucleotide
cggaacccccaaccgagaacagtgatcaac

SEQ ID NO: 12405 - DNA, 30 bp, Artificial Sequence
  Synthetic oligonucleotide
acgtaaagccaaccatctatcagctcgaac

SEQ ID NO: 12406 - DNA, 30 bp, Artificial Sequence
  Synthetic oligonucleotide
agaggcacaaaagaagaataactacttaac

SEQ ID NO: 12407 - DNA, 30 bp, Artificial Sequence
  Synthetic oligonucleotide
gcggaaatgaaccgacagatatctaaacac

SEQ ID NO: 12408 - DNA, 30 bp, Artificial Sequence
  Synthetic oligonucleotide
caaacgccagaggagtttacagagagacac

SEQ ID NO: 12409 - DNA, 30 bp, Artificial Sequence
  Synthetic oligonucleotide
gcgagaggaccatcgaatagagctcgtcac

SEQ ID NO: 12410 - DNA, 30 bp, Artificial Sequence
  Synthetic oligonucleotide
cctcaacacaaccaggggatcaaacaagac

SEQ ID NO: 12411 - DNA, 30 bp, Artificial Sequence
  Synthetic oligonucleotide
aggatagggaatgtaccgaattggacagac

SEQ ID NO: 12412 - DNA, 30 bp, Artificial Sequence
  Synthetic oligonucleotide
acgaagaagacacgtttaggaggtcaggac

SEQ ID NO: 12413 - DNA, 30 bp, Artificial Sequence
  Synthetic oligonucleotide
acgccaaaacatcgtatgatcctggaggac

SEQ ID NO: 12414 - DNA, 30 bp, Artificial Sequence
  Synthetic oligonucleotide
acgaaaaataagtagtagagacagggttac

SEQ ID NO: 12415 - DNA, 30 bp, Artificial Sequence
  Synthetic oligonucleotide
tgggcaaggggataaagaagctggcaatcc

SEQ ID NO: 12416 - DNA, 30 bp, Artificial Sequence
  Synthetic oligonucleotide
tcgagacacatcgggtacgggcaaatcagc

SEQ ID NO: 12417 - DNA, 30 bp, Artificial Sequence
  Synthetic oligonucleotide
agatcaatcaggaaaagcatgagaaggagc

SEQ ID NO: 12418 - DNA, 30 bp, Artificial Sequence
  Synthetic oligonucleotide
cgaggctcaacgaaagcacgttactggagc

SEQ ID NO: 12419 - DNA, 30 bp, Artificial Sequence
  Synthetic oligonucleotide
cgcgtgaaataaagccaagaggacagtagc

SEQ ID NO: 12420 - DNA, 30 bp, Artificial Sequence
  Synthetic oligonucleotide
acaacatcatggaaaggatctcgaggtagc

SEQ ID NO: 12421 - DNA, 30 bp, Artificial Sequence
  Synthetic oligonucleotide
ccagcccggcaaacaggaagataaccacgc

SEQ ID NO: 12422 - DNA, 30 bp, Artificial Sequence
  Synthetic oligonucleotide
taccaatgccgaacacgagaaaggcatcgc

SEQ ID NO: 12423 - DNA, 30 bp, Artificial Sequence
  Synthetic oligonucleotide
tgaaggatagatgtatgcaaggatgccggc

SEQ ID NO: 12424 - DNA, 30 bp, Artificial Sequence
  Synthetic oligonucleotide
aggcacataaacggaactcggaagcatggc

SEQ ID NO: 12425 - DNA, 30 bp, Artificial Sequence
  Synthetic oligonucleotide
cgaaatggcgaataacgatctgcgcatggc

SEQ ID NO: 12426 - DNA, 30 bp, Artificial Sequence
  Synthetic oligonucleotide
aaggcaaggtactaaagagatcgtgaatgc

SEQ ID NO: 12427 - DNA, 30 bp, Artificial Sequence
  Synthetic oligonucleotide
acaatgatcgaacatcataaaaacgagatc

SEQ ID NO: 12428 - DNA, 30 bp, Artificial Sequence
  Synthetic oligonucleotide
gcacaaagcgataagagggacgaccaactc

SEQ ID NO: 12429 - DNA, 30 bp, Artificial Sequence
  Synthetic oligonucleotide
cacgaaaaaaccggtccaaagggaaaagtc

SEQ ID NO: 12430 - DNA, 30 bp, Artificial Sequence
  Synthetic oligonucleotide
ggacacctaagaaaccaaactatcgccgtc

SEQ ID NO: 12431 - DNA, 30 bp, Artificial Sequence
  Synthetic oligonucleotide
cggatgcaagccattaaggggtacagaaag

SEQ ID NO: 12432 - DNA, 30 bp, Artificial Sequence
  Synthetic oligonucleotide
acgacctacgagacaggcatttataacaag

SEQ ID NO: 12433 - DNA, 30 bp, Artificial Sequence
  Synthetic oligonucleotide
cgcaatgattacgaatccggaagcgaacag

SEQ ID NO: 12434 - DNA, 30 bp, Artificial Sequence
  Synthetic oligonucleotide
cgacggaaagagaacgcactagtaaaccag

SEQ ID NO: 12435 - DNA, 30 bp, Artificial Sequence
  Synthetic oligonucleotide
ccagaggtgataacgaagtgcgccaaccag

SEQ ID NO: 12436 - DNA, 30 bp, Artificial Sequence
  Synthetic oligonucleotide
gaaggacattgtaggatcaggagaaatcag

SEQ ID NO: 12437 - DNA, 30 bp, Artificial Sequence
  Synthetic oligonucleotide
acgaacaaccaggggtccagtcttaaagag

SEQ ID NO: 12438 - DNA, 30 bp, Artificial Sequence
  Synthetic oligonucleotide
agactggaaatcgaagatgtgtcgcccgag

SEQ ID NO: 12439 - DNA, 30 bp, Artificial Sequence
  Synthetic oligonucleotide
cgcggattaaagtgaagaaatgaaagcgag

SEQ ID NO: 12440 - DNA, 30 bp, Artificial Sequence
  Synthetic oligonucleotide
agtaaacacgagaaattaataatgggcgag

SEQ ID NO: 12441 - DNA, 30 bp, Artificial Sequence
  Synthetic oligonucleotide
aaggggcaaaataaaggagacgtgctcgag

SEQ ID NO: 12442 - DNA, 30 bp, Artificial Sequence
  Synthetic oligonucleotide
ggctcgtgtacacaagcagtcggggaggag

SEQ ID NO: 12443 - DNA, 30 bp, Artificial Sequence
  Synthetic oligonucleotide
aaggaggaccgattctacaaaataccggag

SEQ ID NO: 12444 - DNA, 30 bp, Artificial Sequence
  Synthetic oligonucleotide
gggggactcaaacgactacacgaaagatag

SEQ ID NO: 12445 - DNA, 30 bp, Artificial Sequence
  Synthetic oligonucleotide
ccgaagatccttgaagcgaacccgcgctag

SEQ ID NO: 12446 - DNA, 30 bp, Artificial Sequence
  Synthetic oligonucleotide
gtgcagccagaagttgaaagtaggccgtag

SEQ ID NO: 12447 - DNA, 31 bp, Artificial Sequence
  Synthetic oligonucleotide
taacaaaccgaacatggcgaatcgcaattag

SEQ ID NO: 12448 - DNA, 30 bp, Artificial Sequence
  Synthetic oligonucleotide
cagagcctaatgagcgagtacaacgtaacg

SEQ ID NO: 12449 - DNA, 30 bp, Artificial Sequence
  Synthetic oligonucleotide
ctgaggatggggagcggttgaaagaatacg

SEQ ID NO: 12450 - DNA, 30 bp, Artificial Sequence
  Synthetic oligonucleotide
acaaggcacattaaggaaagaataagtacg

SEQ ID NO: 12451 - DNA, 30 bp, Artificial Sequence
  Synthetic oligonucleotide
acgatagtagtgaggagggcactcgagccg

SEQ ID NO: 12452 - DNA, 30 bp, Artificial Sequence
  Synthetic oligonucleotide
gggcataggcgagatcagaagatactagcg

SEQ ID NO: 12453 - DNA, 30 bp, Artificial Sequence
  Synthetic oligonucleotide
ctacagaggggaaaaaaaagttagctagcg

SEQ ID NO: 12454 - DNA, 30 bp, Artificial Sequence
  Synthetic oligonucleotide
aaaacacgagcaaaaaggaatcggtctgcg

SEQ ID NO: 12455 - DNA, 30 bp, Artificial Sequence
  Synthetic oligonucleotide
ccagaggatcaatcgcgtaccaggcgtgcg

SEQ ID NO: 12456 - DNA, 30 bp, Artificial Sequence
  Synthetic oligonucleotide
aaacgggacggtgaaattatgccgaaatcg

SEQ ID NO: 12457 - DNA, 30 bp, Artificial Sequence
  Synthetic oligonucleotide
ggtgaaaggcgtggagaattaaaaacatcg

SEQ ID NO: 12458 - DNA, 30 bp, Artificial Sequence
  Synthetic oligonucleotide
tcgggaaacgggactaaaaatagcaagtcg

SEQ ID NO: 12459 - DNA, 30 bp, Artificial Sequence
  Synthetic oligonucleotide
tgcggggaggaaacgtatatactactgtcg

SEQ ID NO: 12460 - DNA, 30 bp, Artificial Sequence
  Synthetic oligonucleotide
ttacggaaacacgggaccaaaggcaacagg

SEQ ID NO: 12461 - DNA, 30 bp, Artificial Sequence
  Synthetic oligonucleotide
cgggatacaggtagcgataatatcaacagg

SEQ ID NO: 12462 - DNA, 30 bp, Artificial Sequence
  Synthetic oligonucleotide
aggggtaaccgacacattcatcatgccagg

SEQ ID NO: 12463 - DNA, 30 bp, Artificial Sequence
  Synthetic oligonucleotide
gcggaatccaatcagcacaggaggatcagg

SEQ ID NO: 12464 - DNA, 30 bp, Artificial Sequence
  Synthetic oligonucleotide
agtcaataggagaagaagcgacgagtgagg

SEQ ID NO: 12465 - DNA, 30 bp, Artificial Sequence
  Synthetic oligonucleotide
acaaacagcaggttaaaagcaaacattcgg

SEQ ID NO: 12466 - DNA, 30 bp, Artificial Sequence
  Synthetic oligonucleotide
gcggagggcataaaacaacacgctatctgg

SEQ ID NO: 12467 - DNA, 30 bp, Artificial Sequence
  Synthetic oligonucleotide
agaaagccagaataagataaaagaccgtgg

SEQ ID NO: 12468 - DNA, 30 bp, Artificial Sequence
  Synthetic oligonucleotide
aaggagaatatgcgaatggtaaccgatatg

SEQ ID NO: 12469 - DNA, 30 bp, Artificial Sequence
  Synthetic oligonucleotide
taacgaggaccgagtgactcgaaacaactg

SEQ ID NO: 12470 - DNA, 30 bp, Artificial Sequence
  Synthetic oligonucleotide
cgatagtgtgatacagatcgaagtagactg

SEQ ID NO: 12471 - DNA, 30 bp, Artificial Sequence
  Synthetic oligonucleotide
acgtggagatagccattcatcaatcgtctg

SEQ ID NO: 12472 - DNA, 30 bp, Artificial Sequence
  Synthetic oligonucleotide
agaacggccgcgctaacgagacagccagtg

SEQ ID NO: 12473 - DNA, 30 bp, Artificial Sequence
  Synthetic oligonucleotide
gggcaggagaaccgaagtcaaccaccggtg

SEQ ID NO: 12474 - DNA, 30 bp, Artificial Sequence
  Synthetic oligonucleotide
cggctagggacaacggtaaaacagtaattg

SEQ ID NO: 12475 - DNA, 30 bp, Artificial Sequence
  Synthetic oligonucleotide
aggcagaaaaaacgtctaaagatgatattg

SEQ ID NO: 12476 - DNA, 30 bp, Artificial Sequence
  Synthetic oligonucleotide
cacggaacagcaagtatcgaatcacgcttg

SEQ ID NO: 12477 - DNA, 30 bp, Artificial Sequence
  Synthetic oligonucleotide
cgtagcgacatcaaatcaaacgagcgtaat

SEQ ID NO: 12478 - DNA, 30 bp, Artificial Sequence
  Synthetic oligonucleotide
acgggagattagaattagtcaaccagagat

SEQ ID NO: 12479 - DNA, 31 bp, Artificial Sequence
  Synthetic oligonucleotide
agagccggagggaccaggaaacgccgagact

SEQ ID NO: 12480 - DNA, 30 bp, Artificial Sequence
  Synthetic oligonucleotide
acgatctagtcttaacagagagcagagcct

SEQ ID NO: 12481 - DNA, 30 bp, Artificial Sequence
  Synthetic oligonucleotide
gggacgagggtggaatcgttaacagaagct

SEQ ID NO: 12482 - DNA, 30 bp, Artificial Sequence
  Synthetic oligonucleotide
tcgtgagaattaacaacggcaagcctgagt

SEQ ID NO: 12483 - DNA, 30 bp, Artificial Sequence
  Synthetic oligonucleotide
gcgagcggatccaaaacactaacaagccgt

SEQ ID NO: 12484 - DNA, 30 bp, Artificial Sequence
  Synthetic oligonucleotide
acaaccagtcgtgtaaaaagagatacgctt

SEQ ID NO: 12485 - DNA, 30 bp, Artificial Sequence
  Synthetic oligonucleotide
gtacgagtcagaagggatgcggactgtgtt

SEQ ID NO: 12486 - DNA, 30 bp, Artificial Sequence
  Synthetic oligonucleotide
tgcgagggagacgaatatgaccgcctgaaa

SEQ ID NO: 12487 - DNA, 30 bp, Artificial Sequence
  Synthetic oligonucleotide
cagggaacgtggcaacatcgactccaccaa

SEQ ID NO: 12488 - DNA, 30 bp, Artificial Sequence
  Synthetic oligonucleotide
taacagaaggggtagatataacacacagaa

SEQ ID NO: 12489 - DNA, 30 bp, Artificial Sequence
  Synthetic oligonucleotide
agaactgagggcggcacggtaagcacagaa

SEQ ID NO: 12490 - DNA, 30 bp, Artificial Sequence
  Synthetic oligonucleotide
ggatgattcaagcgaaatggtaggagagaa

SEQ ID NO: 12491 - DNA, 30 bp, Artificial Sequence
  Synthetic oligonucleotide
ggatagcccgaatcgccgacaatacgagaa

SEQ ID NO: 12492 - DNA, 30 bp, Artificial Sequence
  Synthetic oligonucleotide
agggaactccggtacaagacgtaaggagaa

SEQ ID NO: 12493 - DNA, 30 bp, Artificial Sequence
  Synthetic oligonucleotide
caagcagtgtcgcgaaaacacaagaacgaa

SEQ ID NO: 12494 - DNA, 30 bp, Artificial Sequence
  Synthetic oligonucleotide
tgggaaacctcaggaaacacacaacgcgaa

SEQ ID NO: 12495 - DNA, 30 bp, Artificial Sequence
  Synthetic oligonucleotide
cgtagagatcgaatcagtccagaggatgaa

SEQ ID NO: 12496 - DNA, 30 bp, Artificial Sequence
  Synthetic oligonucleotide
cggaacttgaggagtgaacacatgaattaa

SEQ ID NO: 12497 - DNA, 30 bp, Artificial Sequence
  Synthetic oligonucleotide
cacaaacaaacgagctggatcatggcaaca

SEQ ID NO: 12498 - DNA, 30 bp, Artificial Sequence
  Synthetic oligonucleotide
tgaggaaactaacaagacaggtaaaccaca

SEQ ID NO: 12499 - DNA, 30 bp, Artificial Sequence
  Synthetic oligonucleotide
caggaaagaccgaggagcgtctcaaggaca

SEQ ID NO: 12500 - DNA, 30 bp, Artificial Sequence
  Synthetic oligonucleotide
gtgacctgcgaagagagagtgcgaatgaca

SEQ ID NO: 12501 - DNA, 30 bp, Artificial Sequence
  Synthetic oligonucleotide
cacgcgagagtcgaagctgataagagtaca

SEQ ID NO: 12502 - DNA, 30 bp, Artificial Sequence
  Synthetic oligonucleotide
aggggggccagtcgaatacaagtgtcacca

SEQ ID NO: 12503 - DNA, 30 bp, Artificial Sequence
  Synthetic oligonucleotide
ggcacaactgacgagactcccacaatccca

SEQ ID NO: 12504 - DNA, 30 bp, Artificial Sequence
  Synthetic oligonucleotide
cagggcgaggaaggatatatgtaaagagca

SEQ ID NO: 12505 - DNA, 30 bp, Artificial Sequence
  Synthetic oligonucleotide
caagacagacctaatcgaatgtgcccggca

SEQ ID NO: 12506 - DNA, 30 bp, Artificial Sequence
  Synthetic oligonucleotide
gaacggaagtggactaaaagctgactatca

SEQ ID NO: 12507 - DNA, 30 bp, Artificial Sequence
  Synthetic oligonucleotide
actgacaaggaaggaatacaaccgcactca

SEQ ID NO: 12508 - DNA, 30 bp, Artificial Sequence
  Synthetic oligonucleotide
cgaaaaaaatgaaagttcgcgtgcccgtca

SEQ ID NO: 12509 - DNA, 30 bp, Artificial Sequence
  Synthetic oligonucleotide
catagcgcctcgagcaagatcacgtaaaga

SEQ ID NO: 12510 - DNA, 31 bp, Artificial Sequence
  Synthetic oligonucleotide
agggaacgtgcaagatcagtttctaggaaga

SEQ ID NO: 12511 - DNA, 30 bp, Artificial Sequence
  Synthetic oligonucleotide
tgctatagtgggagaaaataagcgataaga

SEQ ID NO: 12512 - DNA, 30 bp, Artificial Sequence
  Synthetic oligonucleotide
gcaggtaccaaagggggatgagacatcaga

SEQ ID NO: 12513 - DNA, 30 bp, Artificial Sequence
  Synthetic oligonucleotide
cgacatacagctgagaaaatggcaaagaga

SEQ ID NO: 12514 - DNA, 30 bp, Artificial Sequence
  Synthetic oligonucleotide
cggtcgaaacttttagcgaaatcaacgaga

SEQ ID NO: 12515 - DNA, 30 bp, Artificial Sequence
  Synthetic oligonucleotide
acctcgaaacaatcaatagactcgaataga

SEQ ID NO: 12516 - DNA, 30 bp, Artificial Sequence
  Synthetic oligonucleotide
ctagcaaagcgcccaacaagtactgaacga

SEQ ID NO: 12517 - DNA, 30 bp, Artificial Sequence
  Synthetic oligonucleotide
ctggcaccatacacactaaagagcacacga

SEQ ID NO: 12518 - DNA, 30 bp, Artificial Sequence
  Synthetic oligonucleotide
acggaaggagaacgagccgcagaagtacga

SEQ ID NO: 12519 - DNA, 30 bp, Artificial Sequence
  Synthetic oligonucleotide
cggggcgtaaagccttaaaagagagtacga

SEQ ID NO: 12520 - DNA, 30 bp, Artificial Sequence
  Synthetic oligonucleotide
acgtaactgggctataggaaaggagaccga

SEQ ID NO: 12521 - DNA, 30 bp, Artificial Sequence
  Synthetic oligonucleotide
aaggacaagaggttgagctgcaggatgcga

SEQ ID NO: 12522 - DNA, 30 bp, Artificial Sequence
  Synthetic oligonucleotide
cgccaaaagggtatgtaatgaataaaagga

SEQ ID NO: 12523 - DNA, 30 bp, Artificial Sequence
  Synthetic oligonucleotide
cgacgatctacttggcgtgcgggaagagga

SEQ ID NO: 12524 - DNA, 30 bp, Artificial Sequence
  Synthetic oligonucleotide
taacacaacggacaagcaataaggcgagga

SEQ ID NO: 12525 - DNA, 30 bp, Artificial Sequence
  Synthetic oligonucleotide
acagaacccatgcaggagggtaatagcgga

SEQ ID NO: 12526 - DNA, 30 bp, Artificial Sequence
  Synthetic oligonucleotide
aacgatggacaacgggtacgaataatcgga

SEQ ID NO: 12527 - DNA, 30 bp, Artificial Sequence
  Synthetic oligonucleotide
cgacactcgagacattacggcaaagttgga

SEQ ID NO: 12528 - DNA, 30 bp, Artificial Sequence
  Synthetic oligonucleotide
cgacggcgcggtgtaaagactaagcactga

SEQ ID NO: 12529 - DNA, 30 bp, Artificial Sequence
  Synthetic oligonucleotide
catggagtgaaagaagcccggtcatcgtga

SEQ ID NO: 12530 - DNA, 30 bp, Artificial Sequence
  Synthetic oligonucleotide
gcgaagaataagcgaaaagtgtcaccttga

SEQ ID NO: 12531 - DNA, 30 bp, Artificial Sequence
  Synthetic oligonucleotide
caagcacgtgatatagaaagacatccagta

SEQ ID NO: 12532 - DNA, 30 bp, Artificial Sequence
  Synthetic oligonucleotide
tatggagagtagagatgaggggcgatagta

SEQ ID NO: 12533 - DNA, 30 bp, Artificial Sequence
  Synthetic oligonucleotide
gcgtccactaataaatggaggagaagcgta

SEQ ID NO: 12534 - DNA, 30 bp, Artificial Sequence
  Synthetic oligonucleotide
actcgccgagagagggacagattaatcgta

SEQ ID NO: 12535 - DNA, 30 bp, Artificial Sequence
  Synthetic oligonucleotide
acgaaacgcgatagtatgttagtgaaggta

SEQ ID NO: 12536 - DNA, 30 bp, Artificial Sequence
  Synthetic oligonucleotide
cgtgagacgagggaggactcaatcgccaac

SEQ ID NO: 12537 - DNA, 30 bp, Artificial Sequence
  Synthetic oligonucleotide
catcgcatcgaccacacaatcaagcggaac

SEQ ID NO: 12538 - DNA, 30 bp, Artificial Sequence
  Synthetic oligonucleotide
agaaaagactcaagggtgcgaggcagtaac

SEQ ID NO: 12539 - DNA, 34 bp, Artificial Sequence
  Synthetic oligonucleotide
gctactagaccaccacgtgtccatcagaaaagac

SEQ ID NO: 12540 - DNA, 30 bp, Artificial Sequence
  Synthetic oligonucleotide
ggggaaatgtgcggaggtaagacgttagac

SEQ ID NO: 12541 - DNA, 30 bp, Artificial Sequence
  Synthetic oligonucleotide
agaaacgacaaggaccacatacaagatgac

SEQ ID NO: 12542 - DNA, 30 bp, Artificial Sequence
  Synthetic oligonucleotide
cgacgccatcggaatggcagagcaagtgac

SEQ ID NO: 12543 - DNA, 30 bp, Artificial Sequence
  Synthetic oligonucleotide
ccagggacagaaagaatgacgatcagggcc

SEQ ID NO: 12544 - DNA, 30 bp, Artificial Sequence
  Synthetic oligonucleotide
ccagacaacagaatgaaagcacagcaaagc

SEQ ID NO: 12545 - DNA, 30 bp, Artificial Sequence
  Synthetic oligonucleotide
gtgcgcaaatagcgataaattaaagcaagc

SEQ ID NO: 12546 - DNA, 30 bp, Artificial Sequence
  Synthetic oligonucleotide
tgagcacgcgcgaaataccgaggccgaagc

SEQ ID NO: 12547 - DNA, 30 bp, Artificial Sequence
  Synthetic oligonucleotide
cgtggcgaatgaggtgccaccacaaacagc

SEQ ID NO: 12548 - DNA, 30 bp, Artificial Sequence
  Synthetic oligonucleotide
cacataagaacccagggcgtcgcgagcagc

SEQ ID NO: 12549 - DNA, 30 bp, Artificial Sequence
  Synthetic oligonucleotide
gacggggagcgcacacaaacattaaagagc

SEQ ID NO: 12550 - DNA, 30 bp, Artificial Sequence
  Synthetic oligonucleotide
cggtcccgataagaattggcaaaacaacgc

SEQ ID NO: 12551 - DNA, 30 bp, Artificial Sequence
  Synthetic oligonucleotide
agtgaataaaagagtacaacaaggagccgc

SEQ ID NO: 12552 - DNA, 30 bp, Artificial Sequence
  Synthetic oligonucleotide
cgtgaaaacggtaaattgcagagatgaggc

SEQ ID NO: 12553 - DNA, 30 bp, Artificial Sequence
  Synthetic oligonucleotide
aacgggacgagaaagcgggataagataggc

SEQ ID NO: 12554 - DNA, 30 bp, Artificial Sequence
  Synthetic oligonucleotide
tctcgaagagaatgagaacaggaccaatgc

SEQ ID NO: 12555 - DNA, 30 bp, Artificial Sequence
  Synthetic oligonucleotide
cggtaagagacaagcgtgaacccgccatgc

SEQ ID NO: 12556 - DNA, 30 bp, Artificial Sequence
  Synthetic oligonucleotide
tagagagggggtgcgaaggatcacaggtgc

SEQ ID NO: 12557 - DNA, 30 bp, Artificial Sequence
  Synthetic oligonucleotide
ctaggacgagtgcgaagggaatgctagatc

SEQ ID NO: 12558 - DNA, 30 bp, Artificial Sequence
  Synthetic oligonucleotide
cgggagggatgtcgattagaaacgtgactc

SEQ ID NO: 12559 - DNA, 30 bp, Artificial Sequence
  Synthetic oligonucleotide
ctggaaagtactaggcgaaacgtcgtcctc

SEQ ID NO: 12560 - DNA, 30 bp, Artificial Sequence
  Synthetic oligonucleotide
aaggcgtaaggtacactcgggaaccaagtc

SEQ ID NO: 12561 - DNA, 30 bp, Artificial Sequence
  Synthetic oligonucleotide
tccggaagagaacatggatacatcgcaaag

SEQ ID NO: 12562 - DNA, 30 bp, Artificial Sequence
  Synthetic oligonucleotide
aggcagtaccaatacagcgatgggggaaag

SEQ ID NO: 12563 - DNA, 30 bp, Artificial Sequence
  Synthetic oligonucleotide
accagaatgccagtccaaaaatacatgaag

SEQ ID NO: 12564 - DNA, 30 bp, Artificial Sequence
  Synthetic oligonucleotide
ctcgaacggcagaagcgcgaaggcaataag

SEQ ID NO: 12565 - DNA, 30 bp, Artificial Sequence
  Synthetic oligonucleotide
agggggaaggaccaataagacacccataag

SEQ ID NO: 12566 - DNA, 30 bp, Artificial Sequence
  Synthetic oligonucleotide
aggcagatagcgagccaggtatggtataag

SEQ ID NO: 12567 - DNA, 30 bp, Artificial Sequence
  Synthetic oligonucleotide
ctggaaaagacgaaaagtcgagtggctaag

SEQ ID NO: 12568 - DNA, 30 bp, Artificial Sequence
  Synthetic oligonucleotide
agtgatcggaccgaactcatgactaaacag

SEQ ID NO: 12569 - DNA, 30 bp, Artificial Sequence
  Synthetic oligonucleotide
gtcgggagtaaggcgggcatgaccacacag

SEQ ID NO: 12570 - DNA, 30 bp, Artificial Sequence
  Synthetic oligonucleotide
cagaacggatagcaaggtgtaagcagacag

SEQ ID NO: 12571 - DNA, 30 bp, Artificial Sequence
  Synthetic oligonucleotide
cctgaacaggaaactcacagaattgcccag

SEQ ID NO: 12572 - DNA, 30 bp, Artificial Sequence
  Synthetic oligonucleotide
acacccgcgagccacctagatccaaagcag

SEQ ID NO: 12573 - DNA, 30 bp, Artificial Sequence
  Synthetic oligonucleotide
aaggaaacgacgtagtgtagaccgaagcag

SEQ ID NO: 12574 - DNA, 30 bp, Artificial Sequence
  Synthetic oligonucleotide
cgtagccagaaacgagtcgtaaaacatcag

SEQ ID NO: 12575 - DNA, 30 bp, Artificial Sequence
  Synthetic oligonucleotide
atcgataacgcgagtcgccaaacagctcag

SEQ ID NO: 12576 - DNA, 30 bp, Artificial Sequence
  Synthetic oligonucleotide
gcgagggatagtcccgcgaataatggagag

SEQ ID NO: 12577 - DNA, 30 bp, Artificial Sequence
  Synthetic oligonucleotide
agtgtgtgacagagggggtcccgattagag

SEQ ID NO: 12578 - DNA, 30 bp, Artificial Sequence
  Synthetic oligonucleotide
aagaccaactaaagcggattcatcgacgag

SEQ ID NO: 12579 - DNA, 30 bp, Artificial Sequence
  Synthetic oligonucleotide
taaagggaaatgacataagttcgagccgag

SEQ ID NO: 12580 - DNA, 30 bp, Artificial Sequence
  Synthetic oligonucleotide
gcgtcagaccgaaaggtaatggccagcgag

SEQ ID NO: 12581 - DNA, 30 bp, Artificial Sequence
  Synthetic oligonucleotide
atcactaccatgaccggaaagaagggcgag

SEQ ID NO: 12582 - DNA, 30 bp, Artificial Sequence
  Synthetic oligonucleotide
gaacgagcctaaggcaagaagcggacctag

SEQ ID NO: 12583 - DNA, 30 bp, Artificial Sequence
  Synthetic oligonucleotide
aacatacggatttgaagagaagaacagtag

SEQ ID NO: 12584 - DNA, 30 bp, Artificial Sequence
  Synthetic oligonucleotide
agaagcacaacataccgtaaaccatcgtag

SEQ ID NO: 12585 - DNA, 30 bp, Artificial Sequence
  Synthetic oligonucleotide
gaaggaataatacgataacagacaaattag

SEQ ID NO: 12586 - DNA, 30 bp, Artificial Sequence
  Synthetic oligonucleotide
cgtgatacagagagtaggtaagagcgttag

SEQ ID NO: 12587 - DNA, 30 bp, Artificial Sequence
  Synthetic oligonucleotide
gctggaagagattcgagaagcagggcaacg

SEQ ID NO: 12588 - DNA, 30 bp, Artificial Sequence
  Synthetic oligonucleotide
aacacgaacagaaagagcggatgagtcacg

SEQ ID NO: 12589 - DNA, 30 bp, Artificial Sequence
  Synthetic oligonucleotide
cataaacagcgaacgaaggcacataagccg

SEQ ID NO: 12590 - DNA, 30 bp, Artificial Sequence
  Synthetic oligonucleotide
ggagaagaacgaactgggcagattgagccg

SEQ ID NO: 12591 - DNA, 30 bp, Artificial Sequence
  Synthetic oligonucleotide
ggggcagtcgaatgacaacaccgctcgccg

SEQ ID NO: 12592 - DNA, 30 bp, Artificial Sequence
  Synthetic oligonucleotide
ggaacacgaagggaacgaggactactgccg

SEQ ID NO: 12593 - DNA, 30 bp, Artificial Sequence
  Synthetic oligonucleotide
tgatgatggaggaggcgagggacagatccg

SEQ ID NO: 12594 - DNA, 30 bp, Artificial Sequence
  Synthetic oligonucleotide
caagggccctactaatgcaacaaaaaagcg

SEQ ID NO: 12595 - DNA, 30 bp, Artificial Sequence
  Synthetic oligonucleotide
tctgcgcgagggaatgggtacaaaaaagcg

SEQ ID NO: 12596 - DNA, 30 bp, Artificial Sequence
  Synthetic oligonucleotide
agtatggggaacgtctcgtaaaaaacagcg

SEQ ID NO: 12597 - DNA, 30 bp, Artificial Sequence
  Synthetic oligonucleotide
caccgaaaggtgacacgaacatcaccagcg

SEQ ID NO: 12598 - DNA, 30 bp, Artificial Sequence
  Synthetic oligonucleotide
tgcatagaggtgtgtgaagagggaagagcg

SEQ ID NO: 12599 - DNA, 30 bp, Artificial Sequence
  Synthetic oligonucleotide
agatccagcctacctaagagagctcgagcg

SEQ ID NO: 12600 - DNA, 30 bp, Artificial Sequence
  Synthetic oligonucleotide
cctcaagcatacaaggggatcggattagcg

SEQ ID NO: 12601 - DNA, 30 bp, Artificial Sequence
  Synthetic oligonucleotide
gcggaaggtacaaggaaagtgataggtgcg

SEQ ID NO: 12602 - DNA, 30 bp, Artificial Sequence
  Synthetic oligonucleotide
aggcgtaaacagtaaaggcctcacctatcg

SEQ ID NO: 12603 - DNA, 30 bp, Artificial Sequence
  Synthetic oligonucleotide
acgacgatagactactatcttaatgcctcg

SEQ ID NO: 12604 - DNA, 30 bp, Artificial Sequence
  Synthetic oligonucleotide
cgtgaagtgaggtatattcaacagatgtcg

SEQ ID NO: 12605 - DNA, 30 bp, Artificial Sequence
  Synthetic oligonucleotide
caagggcgaagcgtcagcgtaactcgaagg

SEQ ID NO: 12606 - DNA, 30 bp, Artificial Sequence
  Synthetic oligonucleotide
cgagagtaccaggattaggcccaaaccagg

SEQ ID NO: 12607 - DNA, 30 bp, Artificial Sequence
  Synthetic oligonucleotide
tgggcaaacacggaaaatcgatagcccagg

SEQ ID NO: 12608 - DNA, 30 bp, Artificial Sequence
  Synthetic oligonucleotide
acgtgcacataggtcgggaatgctatcagg

SEQ ID NO: 12609 - DNA, 30 bp, Artificial Sequence
  Synthetic oligonucleotide
aacaggcgaacgaaagagtatggccgtagg

SEQ ID NO: 12610 - DNA, 29 bp, Artificial Sequence
  Synthetic oligonucleotide
tcgactcaatcacttcattttaccgtcgg

SEQ ID NO: 12611 - DNA, 30 bp, Artificial Sequence
  Synthetic oligonucleotide
aggaaggagggtcgtgcaacattgtttcgg

SEQ ID NO: 12612 - DNA, 30 bp, Artificial Sequence
  Synthetic oligonucleotide
ggaacaagataagcgattggatgttaaggg

SEQ ID NO: 12613 - DNA, 30 bp, Artificial Sequence
  Synthetic oligonucleotide
tctggacgtcagtaatcaggtacagcaggg

SEQ ID NO: 12614 - DNA, 30 bp, Artificial Sequence
  Synthetic oligonucleotide
acaaggagcaaatcggcaatgatatcaggg

SEQ ID NO: 12615 - DNA, 30 bp, Artificial Sequence
  Synthetic oligonucleotide
ggagtagaaggatacggtagcaaaagaggg

SEQ ID NO: 12616 - DNA, 30 bp, Artificial Sequence
  Synthetic oligonucleotide
cgataaagacgtctgccaataacgctcggg

SEQ ID NO: 12617 - DNA, 30 bp, Artificial Sequence
  Synthetic oligonucleotide
gcggccgaaaatccgagttgacagaggggg

SEQ ID NO: 12618 - DNA, 30 bp, Artificial Sequence
  Synthetic oligonucleotide
cggatgaaaatgaatcgaggacacacgtgg

SEQ ID NO: 12619 - DNA, 30 bp, Artificial Sequence
  Synthetic oligonucleotide
aagggtagaacagagcagcgtggaaattgg

SEQ ID NO: 12620 - DNA, 30 bp, Artificial Sequence
  Synthetic oligonucleotide
gtacgagacattgcgaaacacccaagaatg

SEQ ID NO: 12621 - DNA, 30 bp, Artificial Sequence
  Synthetic oligonucleotide
taaagagggtgcggtgcggaatcgagaatg

SEQ ID NO: 12622 - DNA, 30 bp, Artificial Sequence
  Synthetic oligonucleotide
tcggagacttgcgcagctgcgaaaaagatg

SEQ ID NO: 12623 - DNA, 30 bp, Artificial Sequence
  Synthetic oligonucleotide
ggaggcacggatacctgcaacgattcgatg

SEQ ID NO: 12624 - DNA, 30 bp, Artificial Sequence
  Synthetic oligonucleotide
ggacaggcaaaggggagaaaagaagtgatg

SEQ ID NO: 12625 - DNA, 30 bp, Artificial Sequence
  Synthetic oligonucleotide
ccgacataggcatgaaacgataacgatatg

SEQ ID NO: 12626 - DNA, 30 bp, Artificial Sequence
  Synthetic oligonucleotide
acgaaagttgcgaacagggtacagtctatg

SEQ ID NO: 12627 - DNA, 30 bp, Artificial Sequence
  Synthetic oligonucleotide
cgggtcagggtaggtaaaaagtagcgtatg

SEQ ID NO: 12628 - DNA, 30 bp, Artificial Sequence
  Synthetic oligonucleotide
agccgggatgtcgggcgagaatagaaactg

SEQ ID NO: 12629 - DNA, 30 bp, Artificial Sequence
  Synthetic oligonucleotide
tgagatgagagagtgagagcaaaagaactg

SEQ ID NO: 12630 - DNA, 30 bp, Artificial Sequence
  Synthetic oligonucleotide
tgacgaacagaagtaccggcgacagaactg

SEQ ID NO: 12631 - DNA, 30 bp, Artificial Sequence
  Synthetic oligonucleotide
tcgatcagaggatgtcagtatagactagtg

SEQ ID NO: 12632 - DNA, 30 bp, Artificial Sequence
  Synthetic oligonucleotide
acgaggtatgatactaaaaaacatgtattg

SEQ ID NO: 12633 - DNA, 30 bp, Artificial Sequence
  Synthetic oligonucleotide
ccactagcgaaagagagcgggagagggttg

SEQ ID NO: 12634 - DNA, 30 bp, Artificial Sequence
  Synthetic oligonucleotide
aacacggaaaaactatcgggaaaagcgaat

SEQ ID NO: 12635 - DNA, 30 bp, Artificial Sequence
  Synthetic oligonucleotide
tcgaggaccgcgacgggagagctgagtaat

SEQ ID NO: 12636 - DNA, 30 bp, Artificial Sequence
  Synthetic oligonucleotide
cgaaacacgggaaacactaggcatgaccat

SEQ ID NO: 12637 - DNA, 30 bp, Artificial Sequence
  Synthetic oligonucleotide
ccgagggagagcatggccatatgtccagat

SEQ ID NO: 12638 - DNA, 30 bp, Artificial Sequence
  Synthetic oligonucleotide
agcgtacgaaaaagtagcgcgtagggggat

SEQ ID NO: 12639 - DNA, 30 bp, Artificial Sequence
  Synthetic oligonucleotide
gggaaaagaacagtgattcaggctaaggct

SEQ ID NO: 12640 - DNA, 30 bp, Artificial Sequence
  Synthetic oligonucleotide
ggagaaatgaaggttaagtaaagaacgagt

SEQ ID NO: 12641 - DNA, 30 bp, Artificial Sequence
  Synthetic oligonucleotide
gcgtagaaatgtcaaacaaacttatcgagt

SEQ ID NO: 12642 - DNA, 30 bp, Artificial Sequence
  Synthetic oligonucleotide
acaagcagaagaaggaccaataacgatagt

SEQ ID NO: 12643 - DNA, 30 bp, Artificial Sequence
  Synthetic oligonucleotide
cggacatagcgcctaaagaacagaactcgt

SEQ ID NO: 12644 - DNA, 30 bp, Artificial Sequence
  Synthetic oligonucleotide
ggtaaacaggaaggcaaaaaagcaaattgt

SEQ ID NO: 12645 - DNA, 30 bp, Artificial Sequence
  Synthetic oligonucleotide
acgacatacggtcacagaaaccaggaaaaa

SEQ ID NO: 12646 - DNA, 30 bp, Artificial Sequence
  Synthetic oligonucleotide
aacgacgagcaggagtggggaatcgcaaaa

SEQ ID NO: 12647 - DNA, 30 bp, Artificial Sequence
  Synthetic oligonucleotide
catgaaaaaaaagcatcaacagattacaaa

SEQ ID NO: 12648 - DNA, 30 bp, Artificial Sequence
  Synthetic oligonucleotide
gcgaaacctgatagataaaggaaaccgaaa

SEQ ID NO: 12649 - DNA, 30 bp, Artificial Sequence
  Synthetic oligonucleotide
cactgaaaatcagccaggcgagacgggaaa

SEQ ID NO: 12650 - DNA, 30 bp, Artificial Sequence
  Synthetic oligonucleotide
tccacgggattgcgttgaactggggaacaa

SEQ ID NO: 12651 - DNA, 30 bp, Artificial Sequence
  Synthetic oligonucleotide
agatgagagaagcgtccgagaacaacccaa

SEQ ID NO: 12652 - DNA, 30 bp, Artificial Sequence
  Synthetic oligonucleotide
aaggcgtgaacgtccccagaagaccagcaa

SEQ ID NO: 12653 - DNA, 30 bp, Artificial Sequence
  Synthetic oligonucleotide
caatgtgaggaggcaaacgtgggggcgcaa

SEQ ID NO: 12654 - DNA, 30 bp, Artificial Sequence
  Synthetic oligonucleotide
tcgttcgaagagagaagtgacttagtgcaa

SEQ ID NO: 12655 - DNA, 30 bp, Artificial Sequence
  Synthetic oligonucleotide
ccgaatatgactaaagtagcaggccatcaa

SEQ ID NO: 12656 - DNA, 30 bp, Artificial Sequence
  Synthetic oligonucleotide
ccaattacacggcaaatcagagcggaagaa

SEQ ID NO: 12657 - DNA, 30 bp, Artificial Sequence
  Synthetic oligonucleotide
ccaatgggagagtgcatagaacgtatagaa

SEQ ID NO: 12658 - DNA, 30 bp, Artificial Sequence
  Synthetic oligonucleotide
cgtcacggcgaaacaatcggagttagcgaa

SEQ ID NO: 12659 - DNA, 30 bp, Artificial Sequence
  Synthetic oligonucleotide
tcaataagacaatcagtgaggtaatgcgaa

SEQ ID NO: 12660 - DNA, 30 bp, Artificial Sequence
  Synthetic oligonucleotide
agggagacaaggataaggaagacaaggtaa

SEQ ID NO: 12661 - DNA, 30 bp, Artificial Sequence
  Synthetic oligonucleotide
cgtggaaagcagaggggcactgtggtgtaa

SEQ ID NO: 12662 - DNA, 30 bp, Artificial Sequence
  Synthetic oligonucleotide
caagcgcaaaagccatctcaaagcagttaa

SEQ ID NO: 12663 - DNA, 30 bp, Artificial Sequence
  Synthetic oligonucleotide
cttcagaggagaggaatgggtgtacacaca

SEQ ID NO: 12664 - DNA, 30 bp, Artificial Sequence
  Synthetic oligonucleotide
agaaccatatcgtaaaaaaatgagtgcaca

SEQ ID NO: 12665 - DNA, 30 bp, Artificial Sequence
  Synthetic oligonucleotide
cggggtgaacgatagaaagacctgacgaca

SEQ ID NO: 12666 - DNA, 30 bp, Artificial Sequence
  Synthetic oligonucleotide
agggatgggctagaagccgaaactatgaca

SEQ ID NO: 12667 - DNA, 30 bp, Artificial Sequence
  Synthetic oligonucleotide
cataaagaaagtgggcgaggcaatgtgcca

SEQ ID NO: 12668 - DNA, 29 bp, Artificial Sequence
  Synthetic oligonucleotide
aacgcgacattacgagaatataagaagca

SEQ ID NO: 12669 - DNA, 30 bp, Artificial Sequence
  Synthetic oligonucleotide
cgagtgtcatataatgaaaaaccaacagca

SEQ ID NO: 12670 - DNA, 30 bp, Artificial Sequence
  Synthetic oligonucleotide
cgggtacgccgagaaaattcaactggagca

SEQ ID NO: 12671 - DNA, 30 bp, Artificial Sequence
  Synthetic oligonucleotide
gaagagaataagtgataaagaatagtagca

SEQ ID NO: 12672 - DNA, 30 bp, Artificial Sequence
  Synthetic oligonucleotide
acgagcgcgaggaacgagtcgatggccgca

SEQ ID NO: 12673 - DNA, 30 bp, Artificial Sequence
  Synthetic oligonucleotide
gacgagacagaacttgggagtgagaaggca

SEQ ID NO: 12674 - DNA, 30 bp, Artificial Sequence
  Synthetic oligonucleotide
cgtcgagtggacgggctgacatttgaggca

SEQ ID NO: 12675 - DNA, 30 bp, Artificial Sequence
  Synthetic oligonucleotide
acggtcaaaatgcaaggcaccaaaaatgca

SEQ ID NO: 12676 - DNA, 30 bp, Artificial Sequence
  Synthetic oligonucleotide
cacgaacacacgaggcacgatgagacctca

SEQ ID NO: 12677 - DNA, 30 bp, Artificial Sequence
  Synthetic oligonucleotide
cgagtacagcggccaagaattacaacgtca

SEQ ID NO: 12678 - DNA, 30 bp, Artificial Sequence
  Synthetic oligonucleotide
cgggtcgtaagctcaggatccaaggacaga

SEQ ID NO: 12679 - DNA, 30 bp, Artificial Sequence
  Synthetic oligonucleotide
atgctgtacacgaggaaaaggttgcagaga

SEQ ID NO: 12680 - DNA, 30 bp, Artificial Sequence
  Synthetic oligonucleotide
acgggagatcagcaggggggtaaatagaga

SEQ ID NO: 12681 - DNA, 30 bp, Artificial Sequence
  Synthetic oligonucleotide
tgaacagagcaaattatcgaagggtagaga

SEQ ID NO: 12682 - DNA, 30 bp, Artificial Sequence
  Synthetic oligonucleotide
atagggtaggaaaagaaaccgtgaccgaga

SEQ ID NO: 12683 - DNA, 30 bp, Artificial Sequence
  Synthetic oligonucleotide
tactcaagaccagaaaactgccatcggaga

SEQ ID NO: 12684 - DNA, 30 bp, Artificial Sequence
  Synthetic oligonucleotide
cgacgacggctacgaaacaaaacgcaacga

SEQ ID NO: 12685 - DNA, 30 bp, Artificial Sequence
  Synthetic oligonucleotide
aaggccctcagtaggagcgaggaaagacga

SEQ ID NO: 12686 - DNA, 30 bp, Artificial Sequence
  Synthetic oligonucleotide
acaggggaacgtcgcatgtgggcgagacga

SEQ ID NO: 12687 - DNA, 30 bp, Artificial Sequence
  Synthetic oligonucleotide
ccgaaaggtgaccaatggatctaagcgcga

SEQ ID NO: 12688 - DNA, 30 bp, Artificial Sequence
  Synthetic oligonucleotide
gtagtcaatgggaaacagagttacgatcga

SEQ ID NO: 12689 - DNA, 30 bp, Artificial Sequence
  Synthetic oligonucleotide
ccaggcgagagccattaccaagaatcagga

SEQ ID NO: 12690 - DNA, 30 bp, Artificial Sequence
  Synthetic oligonucleotide
cgagtcgggaccagtgaggcgatgtcagga

SEQ ID NO: 12691 - DNA, 30 bp, Artificial Sequence
  Synthetic oligonucleotide
tgggcgaaagtttatcaagtgtggcgagga

SEQ ID NO: 12692 - DNA, 30 bp, Artificial Sequence
  Synthetic oligonucleotide
tcgtggtgagagatataatgcgatcaggga

SEQ ID NO: 12693 - DNA, 30 bp, Artificial Sequence
  Synthetic oligonucleotide
gcggaagaccgataacaaaatacagaggga

SEQ ID NO: 12694 - DNA, 30 bp, Artificial Sequence
  Synthetic oligonucleotide
accaagaagggtaaagcacataaggattga

SEQ ID NO: 12695 - DNA, 30 bp, Artificial Sequence
  Synthetic oligonucleotide
gcgagtggagatggaataaattgggcaata

SEQ ID NO: 12696 - DNA, 30 bp, Artificial Sequence
  Synthetic oligonucleotide
cggtacaagaaggcgaggtactgctgaata

SEQ ID NO: 12697 - DNA, 30 bp, Artificial Sequence
  Synthetic oligonucleotide
gaaggctaggaagtaacttagcagaacata

SEQ ID NO: 12698 - DNA, 30 bp, Artificial Sequence
  Synthetic oligonucleotide
gaggggaggcccgatgacaaacttgaacta

SEQ ID NO: 12699 - DNA, 30 bp, Artificial Sequence
  Synthetic oligonucleotide
tgactgaggaacatgcacaaactgcgacta

SEQ ID NO: 12700 - DNA, 30 bp, Artificial Sequence
  Synthetic oligonucleotide
cgggaggaagattcgaccgatcagcaggta

SEQ ID NO: 12701 - DNA, 30 bp, Artificial Sequence
  Synthetic oligonucleotide
aaggagaggtaggtagtgaagcgggaggta

SEQ ID NO: 12702 - DNA, 30 bp, Artificial Sequence
  Synthetic oligonucleotide
ataagagtaggctgcacaggcacaacggac

SEQ ID NO: 12703 - DNA, 30 bp, Artificial Sequence
  Synthetic oligonucleotide
tcgaaacggaaagatctcctctcgaatagc

SEQ ID NO: 12704 - DNA, 30 bp, Artificial Sequence
  Synthetic oligonucleotide
caagggaaacaaccggacaagtccaatcgc

SEQ ID NO: 12705 - DNA, 30 bp, Artificial Sequence
  Synthetic oligonucleotide
aagggtatcacgggaaacacgacatcaggc

SEQ ID NO: 12706 - DNA, 30 bp, Artificial Sequence
  Synthetic oligonucleotide
caagaacaaacaaataaaatgaacgaaatc

SEQ ID NO: 12707 - DNA, 30 bp, Artificial Sequence
  Synthetic oligonucleotide
agtacgaggggagaggagggaacaatgatc

SEQ ID NO: 12708 - DNA, 30 bp, Artificial Sequence
  Synthetic oligonucleotide
cgctagatttcacaacagaaccgagtagtc

SEQ ID NO: 12709 - DNA, 30 bp, Artificial Sequence
  Synthetic oligonucleotide
aaggacgtgcaaccagggaagcggagtgtc

SEQ ID NO: 12710 - DNA, 30 bp, Artificial Sequence
  Synthetic oligonucleotide
cgtgagataaacgatggataagttgaaaag

SEQ ID NO: 12711 - DNA, 30 bp, Artificial Sequence
  Synthetic oligonucleotide
cggccagcaagactaggtgagtgcgtaaag

SEQ ID NO: 12712 - DNA, 30 bp, Artificial Sequence
  Synthetic oligonucleotide
cggttagacgattaaggaagaaaattcaag

SEQ ID NO: 12713 - DNA, 30 bp, Artificial Sequence
  Synthetic oligonucleotide
atgggcacgctcgtacaggaagggcagaag

SEQ ID NO: 12714 - DNA, 30 bp, Artificial Sequence
  Synthetic oligonucleotide
cacgggcatagcaacgatggcaatcagaag

SEQ ID NO: 12715 - DNA, 30 bp, Artificial Sequence
  Synthetic oligonucleotide
tacgcaaagcgtcgagcggattgtgggaag

SEQ ID NO: 12716 - DNA, 30 bp, Artificial Sequence
  Synthetic oligonucleotide
agtacgtacgaaacacggtaggagactaag

SEQ ID NO: 12717 - DNA, 30 bp, Artificial Sequence
  Synthetic oligonucleotide
cctcgcaccataacgaaaaaaggcacacag

SEQ ID NO: 12718 - DNA, 30 bp, Artificial Sequence
  Synthetic oligonucleotide
aagaaatacgggaaaggaatgacgatacag

SEQ ID NO: 12719 - DNA, 30 bp, Artificial Sequence
  Synthetic oligonucleotide
cgacgtcgtccgaggcggggcggaaaccag

SEQ ID NO: 12720 - DNA, 30 bp, Artificial Sequence
  Synthetic oligonucleotide
cgggtgcgcaaagacacgacaacgaaccag

SEQ ID NO: 12721 - DNA, 30 bp, Artificial Sequence
  Synthetic oligonucleotide
acaacagcacagatacgagggtgaacgcag

SEQ ID NO: 12722 - DNA, 30 bp, Artificial Sequence
  Synthetic oligonucleotide
aagcaacggaacccggaaagttagaatcag

SEQ ID NO: 12723 - DNA, 30 bp, Artificial Sequence
  Synthetic oligonucleotide
tgggcagacaggataaaattcaaaggtcag

SEQ ID NO: 12724 - DNA, 30 bp, Artificial Sequence
  Synthetic oligonucleotide
atgggaaaccgggagcgaagacgagaagag

SEQ ID NO: 12725 - DNA, 30 bp, Artificial Sequence
  Synthetic oligonucleotide
ggcgcaacaacaatttcagcggggggcgag

SEQ ID NO: 12726 - DNA, 30 bp, Artificial Sequence
  Synthetic oligonucleotide
acagggacaagagcacggtgcaagaaggag

SEQ ID NO: 12727 - DNA, 30 bp, Artificial Sequence
  Synthetic oligonucleotide
acgggcaagataaagtactttaaaagggag

SEQ ID NO: 12728 - DNA, 30 bp, Artificial Sequence
  Synthetic oligonucleotide
gagcagggagacgttagtaagatgttggag

SEQ ID NO: 12729 - DNA, 30 bp, Artificial Sequence
  Synthetic oligonucleotide
cgacaagagacgtggtaatcctggaatgag

SEQ ID NO: 12730 - DNA, 30 bp, Artificial Sequence
  Synthetic oligonucleotide
atgtacttgcacaaaagagagcgccatgag

SEQ ID NO: 12731 - DNA, 30 bp, Artificial Sequence
  Synthetic oligonucleotide
aaggaggccagattcacttgtgcaagtgag

SEQ ID NO: 12732 - DNA, 30 bp, Artificial Sequence
  Synthetic oligonucleotide
caacgcggactcaagggatacgtgagatag

SEQ ID NO: 12733 - DNA, 30 bp, Artificial Sequence
  Synthetic oligonucleotide
gacgacgtattaacaaagggcagaggctag

SEQ ID NO: 12734 - DNA, 30 bp, Artificial Sequence
  Synthetic oligonucleotide
cgagctccataaatcaggaatcgggagtag

SEQ ID NO: 12735 - DNA, 30 bp, Artificial Sequence
  Synthetic oligonucleotide
cataaagaacgagagcagaagtcagggtag

SEQ ID NO: 12736 - DNA, 29 bp, Artificial Sequence
  Synthetic oligonucleotide
cggtacaaaaatcaggtagcaggaattag

SEQ ID NO: 12737 - DNA, 30 bp, Artificial Sequence
  Synthetic oligonucleotide
gacacaccaaagagtatagttaagccaacg

SEQ ID NO: 12738 - DNA, 30 bp, Artificial Sequence
  Synthetic oligonucleotide
cgctagactatgcgggaacaaatacgaacg

SEQ ID NO: 12739 - DNA, 30 bp, Artificial Sequence
  Synthetic oligonucleotide
acggtgaggaatgcagatcacatgggaacg

SEQ ID NO: 12740 - DNA, 30 bp, Artificial Sequence
  Synthetic oligonucleotide
gctcacatcgtaaaaagaaacctaacaccg

SEQ ID NO: 12741 - DNA, 30 bp, Artificial Sequence
  Synthetic oligonucleotide
acacgaagtgcaggatataggaaactcccg

SEQ ID NO: 12742 - DNA, 30 bp, Artificial Sequence
  Synthetic oligonucleotide
tccgtggagtagaaccaaaagcgagtcccg

SEQ ID NO: 12743 - DNA, 30 bp, Artificial Sequence
  Synthetic oligonucleotide
cagaggagattgaagagtaacggggagccg

SEQ ID NO: 12744 - DNA, 30 bp, Artificial Sequence
  Synthetic oligonucleotide
acaggtccggaataaggattcaagcgagcg

SEQ ID NO: 12745 - DNA, 30 bp, Artificial Sequence
  Synthetic oligonucleotide
cggaagagaagcgatgggatcgaaacggcg

SEQ ID NO: 12746 - DNA, 30 bp, Artificial Sequence
  Synthetic oligonucleotide
atgggaacaaatggcgaacagcgacttgcg

SEQ ID NO: 12747 - DNA, 30 bp, Artificial Sequence
  Synthetic oligonucleotide
tgagacaaggtgaaacctatgcccaaatcg

SEQ ID NO: 12748 - DNA, 30 bp, Artificial Sequence
  Synthetic oligonucleotide
acgagtaacgggaatgaagacatctgatcg

SEQ ID NO: 12749 - DNA, 30 bp, Artificial Sequence
  Synthetic oligonucleotide
gacatgaactgcaattgatgtatccagtcg

SEQ ID NO: 12750 - DNA, 30 bp, Artificial Sequence
  Synthetic oligonucleotide
aggggctacaatacaagtccgtgcgaaagg

SEQ ID NO: 12751 - DNA, 30 bp, Artificial Sequence
  Synthetic oligonucleotide
agacatcagacgacaacttcaattcacagg

SEQ ID NO: 12752 - DNA, 30 bp, Artificial Sequence
  Synthetic oligonucleotide
ggttggcaatgaccataaagacagtacagg

SEQ ID NO: 12753 - DNA, 30 bp, Artificial Sequence
  Synthetic oligonucleotide
gggaatgcacccaaacaagagggagcgagg

SEQ ID NO: 12754 - DNA, 30 bp, Artificial Sequence
  Synthetic oligonucleotide
agagagcaggggaccagctgttatgttagg

SEQ ID NO: 12755 - DNA, 30 bp, Artificial Sequence
  Synthetic oligonucleotide
ccatacagaaaacgacacgtgagggaacgg

SEQ ID NO: 12756 - DNA, 30 bp, Artificial Sequence
  Synthetic oligonucleotide
agaggggattcagcgcgagtcaagctacgg

SEQ ID NO: 12757 - DNA, 30 bp, Artificial Sequence
  Synthetic oligonucleotide
acatcagcagacttgaagagcggtacgcgg

SEQ ID NO: 12758 - DNA, 30 bp, Artificial Sequence
  Synthetic oligonucleotide
ggcaagggggtgcagagagaagtcaaaggg

SEQ ID NO: 12759 - DNA, 30 bp, Artificial Sequence
  Synthetic oligonucleotide
cgagagcatataaaagcaaggtcgaaaggg

SEQ ID NO: 12760 - DNA, 30 bp, Artificial Sequence
  Synthetic oligonucleotide
gatcgtctacagaaataatgagcacaaggg

SEQ ID NO: 12761 - DNA, 30 bp, Artificial Sequence
  Synthetic oligonucleotide
ttaacgaagaggtaataggtatcgcgaggg

SEQ ID NO: 12762 - DNA, 30 bp, Artificial Sequence
  Synthetic oligonucleotide
cgagtcgtaagcggagaacgatacaggtgg

SEQ ID NO: 12763 - DNA, 30 bp, Artificial Sequence
  Synthetic oligonucleotide
cgtgaagggagattgaacatggggtaaatg

SEQ ID NO: 12764 - DNA, 30 bp, Artificial Sequence
  Synthetic oligonucleotide
taccgaaatcgaagacacaccagtaagatg

SEQ ID NO: 12765 - DNA, 30 bp, Artificial Sequence
  Synthetic oligonucleotide
gcgcgaacagtcaccagagaacgagagatg

SEQ ID NO: 12766 - DNA, 30 bp, Artificial Sequence
  Synthetic oligonucleotide
gaaggtacaagacgtcaagtcccgactatg

SEQ ID NO: 12767 - DNA, 31 bp, Artificial Sequence
  Synthetic oligonucleotide
caggcgacgaaattgctgagaacagacagtg

SEQ ID NO: 12768 - DNA, 30 bp, Artificial Sequence
  Synthetic oligonucleotide
cacacactcaggagagcaatagaaccagtg

SEQ ID NO: 12769 - DNA, 30 bp, Artificial Sequence
  Synthetic oligonucleotide
acggacaaaggccaaaggcatagtctagtg

SEQ ID NO: 12770 - DNA, 30 bp, Artificial Sequence
  Synthetic oligonucleotide
tacggtcaaatgaacagcaagcaaaaggtg

SEQ ID NO: 12771 - DNA, 30 bp, Artificial Sequence
  Synthetic oligonucleotide
cacaggaatacacgcgtagtcgaaaaggtg

SEQ ID NO: 12772 - DNA, 30 bp, Artificial Sequence
  Synthetic oligonucleotide
acggcgaaaattgggtagtgaatcgacttg

SEQ ID NO: 12773 - DNA, 30 bp, Artificial Sequence
  Synthetic oligonucleotide
tgggcgaaaagtacgtggagcgatggacat

SEQ ID NO: 12774 - DNA, 30 bp, Artificial Sequence
  Synthetic oligonucleotide
cgtggcaaggaagaggattcactagagcat

SEQ ID NO: 12775 - DNA, 30 bp, Artificial Sequence
  Synthetic oligonucleotide
ccgggaaacacccatcaagagcacctagat

SEQ ID NO: 12776 - DNA, 30 bp, Artificial Sequence
  Synthetic oligonucleotide
agacagctggggatgtcgaggcgtgtaagt

SEQ ID NO: 12777 - DNA, 30 bp, Artificial Sequence
  Synthetic oligonucleotide
acgaggggaggaagtgcatgattcgtccgt

SEQ ID NO: 12778 - DNA, 30 bp, Artificial Sequence
  Synthetic oligonucleotide
cgacgatccatggaaaatcaagcaaatggt

SEQ ID NO: 12779 - DNA, 39 bp, Artificial Sequence
  Synthetic oligonucleotide
cgatgaaagttcgcctcagagcagggtggtgtaagtggt

SEQ ID NO: 12780 - DNA, 30 bp, Artificial Sequence
  Synthetic oligonucleotide
gcacgacgacgaggcagagggaactggtgt

SEQ ID NO: 12781 - DNA, 30 bp, Artificial Sequence
  Synthetic oligonucleotide
acgaaatcaatcaaagaactaaagaacatt

SEQ ID NO: 12782 - DNA, 30 bp, Artificial Sequence
  Synthetic oligonucleotide
acgagggaaacagtgaagcaaatcacgctt

SEQ ID NO: 12783 - DNA, 30 bp, Artificial Sequence
  Synthetic oligonucleotide
cggaggagctccgatgttagtggcataaaa

SEQ ID NO: 12784 - DNA, 30 bp, Artificial Sequence
  Synthetic oligonucleotide
ggacgtaaagtaagaaggacgaaaatcaaa

SEQ ID NO: 12785 - DNA, 30 bp, Artificial Sequence
  Synthetic oligonucleotide
gggaggaaagcgaatcggcaagcctagaaa

SEQ ID NO: 12786 - DNA, 30 bp, Artificial Sequence
  Synthetic oligonucleotide
gcaccaaaggggtaaggtgggtgtgataaa

SEQ ID NO: 12787 - DNA, 30 bp, Artificial Sequence
  Synthetic oligonucleotide
cgttagtaaccaatgcaagtaaaaggacaa

SEQ ID NO: 12788 - DNA, 30 bp, Artificial Sequence
  Synthetic oligonucleotide
cgaatgtggggataggtgagggtactacaa

SEQ ID NO: 12789 - DNA, 30 bp, Artificial Sequence
  Synthetic oligonucleotide
cgaccaaagacagttaaaatcgctcggcaa

SEQ ID NO: 12790 - DNA, 30 bp, Artificial Sequence
  Synthetic oligonucleotide
tcgggaacacgaagaatgataggttggcaa

SEQ ID NO: 12791 - DNA, 30 bp, Artificial Sequence
  Synthetic oligonucleotide
aggaatccacaataacaggcaactaatcaa

SEQ ID NO: 12792 - DNA, 30 bp, Artificial Sequence
  Synthetic oligonucleotide
gaacgtattcggcagactaagggaccagaa

SEQ ID NO: 12793 - DNA, 30 bp, Artificial Sequence
  Synthetic oligonucleotide
gtgccaataccaagagcgagccgatgagaa

SEQ ID NO: 12794 - DNA, 30 bp, Artificial Sequence
  Synthetic oligonucleotide
aggagatacgagcaaacttagtccatcgaa

SEQ ID NO: 12795 - DNA, 30 bp, Artificial Sequence
  Synthetic oligonucleotide
acgttgaatcagatagtgaacaccaaggaa

SEQ ID NO: 12796 - DNA, 30 bp, Artificial Sequence
  Synthetic oligonucleotide
tgcacacgacagaagacttgccgataggaa

SEQ ID NO: 12797 - DNA, 30 bp, Artificial Sequence
  Synthetic oligonucleotide
acacaaaggtaccaagcatcggcgtcggaa

SEQ ID NO: 12798 - DNA, 30 bp, Artificial Sequence
  Synthetic oligonucleotide
ggcgaggaaaatactagaccgtcgtcggaa

SEQ ID NO: 12799 - DNA, 30 bp, Artificial Sequence
  Synthetic oligonucleotide
acgtacgggaacaacttctaaaagggataa

SEQ ID NO: 12800 - DNA, 30 bp, Artificial Sequence
  Synthetic oligonucleotide
ccgaaatcagcgccggaaaacgactcgtaa

SEQ ID NO: 12801 - DNA, 30 bp, Artificial Sequence
  Synthetic oligonucleotide
cttaaaagcacacgaaataacgagaattaa

SEQ ID NO: 12802 - DNA, 30 bp, Artificial Sequence
  Synthetic oligonucleotide
acggagatggggtgacgtcgatgtgattaa

SEQ ID NO: 12803 - DNA, 30 bp, Artificial Sequence
  Synthetic oligonucleotide
acgaaactatgtatggtgagtacgagaaca

SEQ ID NO: 12804 - DNA, 30 bp, Artificial Sequence
  Synthetic oligonucleotide
agcacacgggatgtggaacagattgcgaca

SEQ ID NO: 12805 - DNA, 30 bp, Artificial Sequence
  Synthetic oligonucleotide
cgataaggaataccccgaggtcaaaataca

SEQ ID NO: 12806 - DNA, 30 bp, Artificial Sequence
  Synthetic oligonucleotide
ttacggaaacaaaatactccgcgaaaacca

SEQ ID NO: 12807 - DNA, 30 bp, Artificial Sequence
  Synthetic oligonucleotide
cgagccagtaaggcggtcacacagaaacca

SEQ ID NO: 12808 - DNA, 30 bp, Artificial Sequence
  Synthetic oligonucleotide
aggggaacgtgtcgccgccatctacgacca

SEQ ID NO: 12809 - DNA, 30 bp, Artificial Sequence
  Synthetic oligonucleotide
cgtaaaggtaaatagcgagaaatccgccca

SEQ ID NO: 12810 - DNA, 30 bp, Artificial Sequence
  Synthetic oligonucleotide
cgataggaatgataatcagcacatcgccca

SEQ ID NO: 12811 - DNA, 30 bp, Artificial Sequence
  Synthetic oligonucleotide
ccggaagtaaaggtagaaatcatttaagca

SEQ ID NO: 12812 - DNA, 30 bp, Artificial Sequence
  Synthetic oligonucleotide
tcgtgagcgaagggaaaggtaattctagca

SEQ ID NO: 12813 - DNA, 30 bp, Artificial Sequence
  Synthetic oligonucleotide
agaggacatggaccacactgactcgtgtca

SEQ ID NO: 12814 - DNA, 30 bp, Artificial Sequence
  Synthetic oligonucleotide
aacacgatcatacgccaaatgcgaggaaga

SEQ ID NO: 12815 - DNA, 30 bp, Artificial Sequence
  Synthetic oligonucleotide
tcgatagtgaagcgcgggaagcaagtaaga

SEQ ID NO: 12816 - DNA, 30 bp, Artificial Sequence
  Synthetic oligonucleotide
cacggagtacgaggatcgcttggtcagaga

SEQ ID NO: 12817 - DNA, 30 bp, Artificial Sequence
  Synthetic oligonucleotide
gcaaaaagacaaagtaacttactagcgaga

SEQ ID NO: 12818 - DNA, 30 bp, Artificial Sequence
  Synthetic oligonucleotide
acagcggagctgaaaaactataatgggaga

SEQ ID NO: 12819 - DNA, 30 bp, Artificial Sequence
  Synthetic oligonucleotide
tacgagaagttgaataacccagaagataga

SEQ ID NO: 12820 - DNA, 30 bp, Artificial Sequence
  Synthetic oligonucleotide
acgcgaagagcgcactgcggtatcattaga

SEQ ID NO: 12821 - DNA, 30 bp, Artificial Sequence
  Synthetic oligonucleotide
cgtgagagatcgacattcagccgtgaacga

SEQ ID NO: 12822 - DNA, 30 bp, Artificial Sequence
  Synthetic oligonucleotide
taatgcaagaaaaatgtaagcgttgagcga

SEQ ID NO: 12823 - DNA, 30 bp, Artificial Sequence
  Synthetic oligonucleotide
agcgcaagccatggggcaccaaaagctcga

SEQ ID NO: 12824 - DNA, 30 bp, Artificial Sequence
  Synthetic oligonucleotide
caaggtaggaggcaccggaataaagttcga

SEQ ID NO: 12825 - DNA, 30 bp, Artificial Sequence
  Synthetic oligonucleotide
cacggacccaagaatagacattcagaggga

SEQ ID NO: 12826 - DNA, 30 bp, Artificial Sequence
  Synthetic oligonucleotide
acgggggaaaggtccaacagcatcgcggga

SEQ ID NO: 12827 - DNA, 30 bp, Artificial Sequence
  Synthetic oligonucleotide
ctgtcatgcagaagatcgagggaaagtgga

SEQ ID NO: 12828 - DNA, 30 bp, Artificial Sequence
  Synthetic oligonucleotide
cgacacacgaggttcgagaaggaaaactga

SEQ ID NO: 12829 - DNA, 30 bp, Artificial Sequence
  Synthetic oligonucleotide
agtcgaagaatacgagagacagaaaggtga

SEQ ID NO: 12830 - DNA, 30 bp, Artificial Sequence
  Synthetic oligonucleotide
cacgtaaagagtaacagcaaagggttgtga

SEQ ID NO: 12831 - DNA, 30 bp, Artificial Sequence
  Synthetic oligonucleotide
ccagggagcagcgaaaaaagatatggacta

SEQ ID NO: 12832 - DNA, 30 bp, Artificial Sequence
  Synthetic oligonucleotide
gaggcaggaccacaaacaacaacctaagta

SEQ ID NO: 12833 - DNA, 30 bp, Artificial Sequence
  Synthetic oligonucleotide
atgaggagttagtcagcagagaccacagta

SEQ ID NO: 12834 - DNA, 30 bp, Artificial Sequence
  Synthetic oligonucleotide
caacggtgtgggcgggaaagagatatagta

SEQ ID NO: 12835 - DNA, 30 bp, Artificial Sequence
  Synthetic oligonucleotide
cacgcgaaagtaagaaatagtctacgggta

SEQ ID NO: 12836 - DNA, 30 bp, Artificial Sequence
  Synthetic oligonucleotide
caacgtaacagataacagaaccaagcctta

SEQ ID NO: 12837 - DNA, 30 bp, Artificial Sequence
  Synthetic oligonucleotide
aaggacataccaaaggaaataagagccaac

SEQ ID NO: 12838 - DNA, 30 bp, Artificial Sequence
  Synthetic oligonucleotide
agagcgattacagtcaacaacaagagcaac

SEQ ID NO: 12839 - DNA, 30 bp, Artificial Sequence
  Synthetic oligonucleotide
aggacgacaatacagcgggagccagttaac

SEQ ID NO: 12840 - DNA, 34 bp, Artificial Sequence
  Synthetic oligonucleotide
gatactagaccaccacgtgtccatcagaaaacac

SEQ ID NO: 12841 - DNA, 30 bp, Artificial Sequence
  Synthetic oligonucleotide
acgttgaacgaaggacaccaatgaaaccac

SEQ ID NO: 12842 - DNA, 30 bp, Artificial Sequence
  Synthetic oligonucleotide
tggcgaagaacatgccgtggagatggccac

SEQ ID NO: 12843 - DNA, 30 bp, Artificial Sequence
  Synthetic oligonucleotide
tctacgaacatacagaaagtgaaggcagac

SEQ ID NO: 12844 - DNA, 30 bp, Artificial Sequence
  Synthetic oligonucleotide
ccgaggaacacataactcacgtgcgagccc

SEQ ID NO: 12845 - DNA, 30 bp, Artificial Sequence
  Synthetic oligonucleotide
acagagaaaccggaggaaaacagacgagcc

SEQ ID NO: 12846 - DNA, 30 bp, Artificial Sequence
  Synthetic oligonucleotide
aggggcaacgtataagattacatgccaagc

SEQ ID NO: 12847 - DNA, 30 bp, Artificial Sequence
  Synthetic oligonucleotide
gccatgaaagaaaagatcattgcagcgagc

SEQ ID NO: 12848 - DNA, 30 bp, Artificial Sequence
  Synthetic oligonucleotide
cgacgggtcctaaaaaaaacagggaaacgc

SEQ ID NO: 12849 - DNA, 30 bp, Artificial Sequence
  Synthetic oligonucleotide
ggccggactacaaagaaagcgcacaaccgc

SEQ ID NO: 12850 - DNA, 30 bp, Artificial Sequence
  Synthetic oligonucleotide
ccgagaggtaggtttggatccgaaatgcgc

SEQ ID NO: 12851 - DNA, 30 bp, Artificial Sequence
  Synthetic oligonucleotide
gcgagggatgatcatatacaatagcgcggc

SEQ ID NO: 12852 - DNA, 30 bp, Artificial Sequence
  Synthetic oligonucleotide
cgaaaaggaaaagcacttaaagagcggggc

SEQ ID NO: 12853 - DNA, 30 bp, Artificial Sequence
  Synthetic oligonucleotide
caagcgtgggaaaagacgagaccgtcaatc

SEQ ID NO: 12854 - DNA, 30 bp, Artificial Sequence
  Synthetic oligonucleotide
ggcagaagcttaacagccaccgcaaaaaag

SEQ ID NO: 12855 - DNA, 30 bp, Artificial Sequence
  Synthetic oligonucleotide
catagcgcacggctagaacgagcaacaaag

SEQ ID NO: 12856 - DNA, 30 bp, Artificial Sequence
  Synthetic oligonucleotide
ctaagagacaaaaccatgtcgacaggaaag

SEQ ID NO: 12857 - DNA, 30 bp, Artificial Sequence
  Synthetic oligonucleotide
accacgagcagaataaccaaatgccacaag

SEQ ID NO: 12858 - DNA, 30 bp, Artificial Sequence
  Synthetic oligonucleotide
tgggaggcactaaaagtagaaacaacgaag

SEQ ID NO: 12859 - DNA, 30 bp, Artificial Sequence
  Synthetic oligonucleotide
aacctaacaggagcggatgaatcgaggaag

SEQ ID NO: 12860 - DNA, 30 bp, Artificial Sequence
  Synthetic oligonucleotide
atgggcagatcacaggcgagatctagacag

SEQ ID NO: 12861 - DNA, 30 bp, Artificial Sequence
  Synthetic oligonucleotide
cgaagcggaaggaagtcttcccaacaccag

SEQ ID NO: 12862 - DNA, 30 bp, Artificial Sequence
  Synthetic oligonucleotide
gcgaactgaacaatcgcccgaattcggcag

SEQ ID NO: 12863 - DNA, 30 bp, Artificial Sequence
  Synthetic oligonucleotide
gggaagtgtcagaacagcgcacccgatcag

SEQ ID NO: 12864 - DNA, 30 bp, Artificial Sequence
  Synthetic oligonucleotide
acgaaaaccacgcttcgaggatcgaccgag

SEQ ID NO: 12865 - DNA, 30 bp, Artificial Sequence
  Synthetic oligonucleotide
tgaatagggggataggaacgtcaggccgag

SEQ ID NO: 12866 - DNA, 30 bp, Artificial Sequence
  Synthetic oligonucleotide
cgatcttcgaaaggcaccaaaggttaggag

SEQ ID NO: 12867 - DNA, 30 bp, Artificial Sequence
  Synthetic oligonucleotide
ggcacgtcaaagaatgaattgcgcggtgag

SEQ ID NO: 12868 - DNA, 30 bp, Artificial Sequence
  Synthetic oligonucleotide
tctaagagcgggctgccgcgaaacagatag

SEQ ID NO: 12869 - DNA, 30 bp, Artificial Sequence
  Synthetic oligonucleotide
cgcggaagaggtgcgagaatgcggagatag

SEQ ID NO: 12870 - DNA, 30 bp, Artificial Sequence
  Synthetic oligonucleotide
cggcaatcagttaggaaaggaaacgactag

SEQ ID NO: 12871 - DNA, 30 bp, Artificial Sequence
  Synthetic oligonucleotide
aggttcatgagccaaggaaaagggatctag

SEQ ID NO: 12872 - DNA, 30 bp, Artificial Sequence
  Synthetic oligonucleotide
gtgagacaccgtaaagagggccaatagtag

SEQ ID NO: 12873 - DNA, 30 bp, Artificial Sequence
  Synthetic oligonucleotide
acgcaatgatgcaaggatgaaataaattag

SEQ ID NO: 12874 - DNA, 30 bp, Artificial Sequence
  Synthetic oligonucleotide
acgcggagcccagaataacaatggcattag

SEQ ID NO: 12875 - DNA, 30 bp, Artificial Sequence
  Synthetic oligonucleotide
ccgggtacaaacacctgaggagaagaaacg

SEQ ID NO: 12876 - DNA, 30 bp, Artificial Sequence
  Synthetic oligonucleotide
tcaaggggcaccgttaaaggcgagcacacg

SEQ ID NO: 12877 - DNA, 30 bp, Artificial Sequence
  Synthetic oligonucleotide
acgtcagtagggcgagggggattgtacacg

SEQ ID NO: 12878 - DNA, 30 bp, Artificial Sequence
  Synthetic oligonucleotide
taccaccaccaaagatggagagaagatacg

SEQ ID NO: 12879 - DNA, 30 bp, Artificial Sequence
  Synthetic oligonucleotide
cggaaagaagtcttaacgtcatacactacg

SEQ ID NO: 12880 - DNA, 30 bp, Artificial Sequence
  Synthetic oligonucleotide
cgagctacgagacgacataagactgtaccg

SEQ ID NO: 12881 - DNA, 30 bp, Artificial Sequence
  Synthetic oligonucleotide
aggctacaaagaaagcaattatccgcggcg

SEQ ID NO: 12882 - DNA, 30 bp, Artificial Sequence
  Synthetic oligonucleotide
cataaacgtattacgaagtagaagcatgcg

SEQ ID NO: 12883 - DNA, 30 bp, Artificial Sequence
  Synthetic oligonucleotide
acggaccacacatctcagacactaacatcg

SEQ ID NO: 12884 - DNA, 30 bp, Artificial Sequence
  Synthetic oligonucleotide
ccaggaggtgtgggaccaggctaacgatcg

SEQ ID NO: 12885 - DNA, 30 bp, Artificial Sequence
  Synthetic oligonucleotide
catggggaaggggagatgttacaacaaagg

SEQ ID NO: 12886 - DNA, 30 bp, Artificial Sequence
  Synthetic oligonucleotide
cgtaggactaggaaaacacaggggataagg

SEQ ID NO: 12887 - DNA, 30 bp, Artificial Sequence
  Synthetic oligonucleotide
aaaagatgccctcgtgaaacaaaatacagg

SEQ ID NO: 12888 - DNA, 30 bp, Artificial Sequence
  Synthetic oligonucleotide
gtagaaggacgaagcaagaaaggacagagg

SEQ ID NO: 12889 - DNA, 30 bp, Artificial Sequence
  Synthetic oligonucleotide
agcacgacaagtagaatggtacataggagg

SEQ ID NO: 12890 - DNA, 30 bp, Artificial Sequence
  Synthetic oligonucleotide
tgaaaggatgaggtaacagcgaagattagg

SEQ ID NO: 12891 - DNA, 30 bp, Artificial Sequence
  Synthetic oligonucleotide
acgtaatgccgcgtataactctcggaaggg

SEQ ID NO: 12892 - DNA, 30 bp, Artificial Sequence
  Synthetic oligonucleotide
tgaggaagagtcgagacgggaaccgaatgg

SEQ ID NO: 12893 - DNA, 30 bp, Artificial Sequence
  Synthetic oligonucleotide
acagcgtcattaggcacagagggcgtgtgg

SEQ ID NO: 12894 - DNA, 30 bp, Artificial Sequence
  Synthetic oligonucleotide
ggacgtcaagacaaacgggatagtctaatg

SEQ ID NO: 12895 - DNA, 30 bp, Artificial Sequence
  Synthetic oligonucleotide
gggcaaaacaagcgggggcagtgtcgcatg

SEQ ID NO: 12896 - DNA, 30 bp, Artificial Sequence
  Synthetic oligonucleotide
gtcgcaatatgtgacaatcggcaaaggatg

SEQ ID NO: 12897 - DNA, 30 bp, Artificial Sequence
  Synthetic oligonucleotide
gggcagaaattgattatagtgcaacggatg

SEQ ID NO: 12898 - DNA, 30 bp, Artificial Sequence
  Synthetic oligonucleotide
tacgtcttttttcgcttttgatcatctctg

SEQ ID NO: 12899 - DNA, 30 bp, Artificial Sequence
  Synthetic oligonucleotide
gcggagacagcgctatctgagcccaaagtg

SEQ ID NO: 12900 - DNA, 30 bp, Artificial Sequence
  Synthetic oligonucleotide
tgggcaacgacagaggcgacagtgcgcttg

SEQ ID NO: 12901 - DNA, 30 bp, Artificial Sequence
  Synthetic oligonucleotide
tcggtacgagcaagaaatgtagccggcttg

SEQ ID NO: 12902 - DNA, 30 bp, Artificial Sequence
  Synthetic oligonucleotide
cgaagcaggcgctggatccgaaatacgttg

SEQ ID NO: 12903 - DNA, 30 bp, Artificial Sequence
  Synthetic oligonucleotide
ccaagcaacaaaagtagggagtgggggttg

SEQ ID NO: 12904 - DNA, 30 bp, Artificial Sequence
  Synthetic oligonucleotide
gacacaagaagaagtgaacaacgcccacat

SEQ ID NO: 12905 - DNA, 30 bp, Artificial Sequence
  Synthetic oligonucleotide
cgcgaagggaggactacagcgcggtcgcat

SEQ ID NO: 12906 - DNA, 30 bp, Artificial Sequence
  Synthetic oligonucleotide
aaacgtaccgcgactagagagcgaagtcat

SEQ ID NO: 12907 - DNA, 30 bp, Artificial Sequence
  Synthetic oligonucleotide
cgttacaaagaaaagtggccaatgtgtcat

SEQ ID NO: 12908 - DNA, 30 bp, Artificial Sequence
  Synthetic oligonucleotide
cgtgcatgaagagtagcgcagtgcacagat

SEQ ID NO: 12909 - DNA, 30 bp, Artificial Sequence
  Synthetic oligonucleotide
cgaatcgtcctgagggatgtccgacaaact

SEQ ID NO: 12910 - DNA, 30 bp, Artificial Sequence
  Synthetic oligonucleotide
acgggggaagatcctcaggtccagatcact

SEQ ID NO: 12911 - DNA, 30 bp, Artificial Sequence
  Synthetic oligonucleotide
cgcgcagaatcgacgataatgtgtaagcct

SEQ ID NO: 12912 - DNA, 30 bp, Artificial Sequence
  Synthetic oligonucleotide
aagggaatcagtctaaacatacgagaagct

SEQ ID NO: 12913 - DNA, 30 bp, Artificial Sequence
  Synthetic oligonucleotide
ggaggggagatggataagatgcgcactgct

SEQ ID NO: 12914 - DNA, 30 bp, Artificial Sequence
  Synthetic oligonucleotide
aggcacaatcgagtccgaacagataagtct

SEQ ID NO: 12915 - DNA, 30 bp, Artificial Sequence
  Synthetic oligonucleotide
tctcatgagtgtctttcaacctctcattct

SEQ ID NO: 12916 - DNA, 30 bp, Artificial Sequence
  Synthetic oligonucleotide
gacggggggcgcagatgaaaagcgtgaagt

SEQ ID NO: 12917 - DNA, 30 bp, Artificial Sequence
  Synthetic oligonucleotide
tgaggagacaagcatgcaagaccagtaagt

SEQ ID NO: 12918 - DNA, 30 bp, Artificial Sequence
  Synthetic oligonucleotide
acgataagctagataacaggaatcagcagt

SEQ ID NO: 12919 - DNA, 30 bp, Artificial Sequence
  Synthetic oligonucleotide
tacgagaaaggactaagctcaaaacgaggt

SEQ ID NO: 12920 - DNA, 30 bp, Artificial Sequence
  Synthetic oligonucleotide
cgatgaacagatcaaggaaaagcaatgggt

SEQ ID NO: 12921 - DNA, 30 bp, Artificial Sequence
  Synthetic oligonucleotide
aaggcgccaagaggacatacgaaaaactgt

SEQ ID NO: 12922 - DNA, 30 bp, Artificial Sequence
  Synthetic oligonucleotide
gtgtgccgttttttctgtgcctgtcgcttt

SEQ ID NO: 12923 - DNA, 30 bp, Artificial Sequence
  Synthetic oligonucleotide
acaccgcaaggaatgggatagcggtaaaaa

SEQ ID NO: 12924 - DNA, 30 bp, Artificial Sequence
  Synthetic oligonucleotide
gtagaaataagggaaggacaaacccacaaa

SEQ ID NO: 12925 - DNA, 30 bp, Artificial Sequence
  Synthetic oligonucleotide
tgtgaagagggtcagagaaggtacgtcaaa

SEQ ID NO: 12926 - DNA, 30 bp, Artificial Sequence
  Synthetic oligonucleotide
cgtggtgattaggaataataagagccgaaa

SEQ ID NO: 12927 - DNA, 30 bp, Artificial Sequence
  Synthetic oligonucleotide
caagggagttcgcgaaaggatggcgggaaa

SEQ ID NO: 12928 - DNA, 30 bp, Artificial Sequence
  Synthetic oligonucleotide
cgacagtagtgaagggatgagcggtggaaa

SEQ ID NO: 12929 - DNA, 30 bp, Artificial Sequence
  Synthetic oligonucleotide
cggtaaagtcggtgtgccgggcgagtgaaa

SEQ ID NO: 12930 - DNA, 30 bp, Artificial Sequence
  Synthetic oligonucleotide
agagaatgaatcgggtcgaggaccattaaa

SEQ ID NO: 12931 - DNA, 30 bp, Artificial Sequence
  Synthetic oligonucleotide
acagcaagcacagcataaaaggtggaacaa

SEQ ID NO: 12932 - DNA, 30 bp, Artificial Sequence
  Synthetic oligonucleotide
cgtgtaacagggggcaacgacgcgtaacaa

SEQ ID NO: 12933 - DNA, 30 bp, Artificial Sequence
  Synthetic oligonucleotide
cgcccgtaagtgaagcgccaacagtgacaa

SEQ ID NO: 12934 - DNA, 30 bp, Artificial Sequence
  Synthetic oligonucleotide
aaaggcgattgtatatccaggtgccgccaa

SEQ ID NO: 12935 - DNA, 30 bp, Artificial Sequence
  Synthetic oligonucleotide
cgaagaatcggagcgcatattaagtagcaa

SEQ ID NO: 12936 - DNA, 30 bp, Artificial Sequence
  Synthetic oligonucleotide
acatacatggggcatggaaacacaaggcaa

SEQ ID NO: 12937 - DNA, 30 bp, Artificial Sequence
  Synthetic oligonucleotide
ccaagcgaagcacgtgggctaactcaagaa

SEQ ID NO: 12938 - DNA, 30 bp, Artificial Sequence
  Synthetic oligonucleotide
aggggcggaatgtgaggtacattattcgaa

SEQ ID NO: 12939 - DNA, 30 bp, Artificial Sequence
  Synthetic oligonucleotide
ggtaaaatgggggagagcgacgacgaggaa

SEQ ID NO: 12940 - DNA, 30 bp, Artificial Sequence
  Synthetic oligonucleotide
aggtaccagggggacacgttctgtacggaa

SEQ ID NO: 12941 - DNA, 30 bp, Artificial Sequence
  Synthetic oligonucleotide
cgtaaagttcaggggatatgtatggtggaa

SEQ ID NO: 12942 - DNA, 30 bp, Artificial Sequence
  Synthetic oligonucleotide
aacgagagctgaaataatgcttggaatgaa

SEQ ID NO: 12943 - DNA, 30 bp, Artificial Sequence
  Synthetic oligonucleotide
tactgcacctgagacaatgagtgaggtgaa

SEQ ID NO: 12944 - DNA, 30 bp, Artificial Sequence
  Synthetic oligonucleotide
gaccagagaacaagtacaagcctgagataa

SEQ ID NO: 12945 - DNA, 30 bp, Artificial Sequence
  Synthetic oligonucleotide
taaggaaaggtccaaacgatctaacgataa

SEQ ID NO: 12946 - DNA, 30 bp, Artificial Sequence
  Synthetic oligonucleotide
agagcatgcgaaagagcagggtatacctaa

SEQ ID NO: 12947 - DNA, 30 bp, Artificial Sequence
  Synthetic oligonucleotide
cggagatccagatagaccaggtgcgattaa

SEQ ID NO: 12948 - DNA, 31 bp, Artificial Sequence
  Synthetic oligonucleotide
aacacgcaagaatgacagacaacctaaaaca

SEQ ID NO: 12949 - DNA, 30 bp, Artificial Sequence
  Synthetic oligonucleotide
agacaaggagtaaaatgatttagtgacaca

SEQ ID NO: 12950 - DNA, 30 bp, Artificial Sequence
  Synthetic oligonucleotide
cgcaaaaccaaaccatccaccagtctcaca

SEQ ID NO: 12951 - DNA, 30 bp, Artificial Sequence
  Synthetic oligonucleotide
tcggcgcgaggcccccacagaggatgtaca

SEQ ID NO: 12952 - DNA, 30 bp, Artificial Sequence
  Synthetic oligonucleotide
cgaaaggatgcgtagctgagcataaaacca

SEQ ID NO: 12953 - DNA, 30 bp, Artificial Sequence
  Synthetic oligonucleotide
cataggaacaagggacgaaacagataacca

SEQ ID NO: 12954 - DNA, 30 bp, Artificial Sequence
  Synthetic oligonucleotide
ccatagacgataaggacaagaaaaccgcca

SEQ ID NO: 12955 - DNA, 30 bp, Artificial Sequence
  Synthetic oligonucleotide
gaggaaagctaaaagagtgtgtcatcgcca

SEQ ID NO: 12956 - DNA, 30 bp, Artificial Sequence
  Synthetic oligonucleotide
aggaggggggcctagacatacgaaagtcca

SEQ ID NO: 12957 - DNA, 30 bp, Artificial Sequence
  Synthetic oligonucleotide
acacagaggcacagagatgtgatgccagca

SEQ ID NO: 12958 - DNA, 30 bp, Artificial Sequence
  Synthetic oligonucleotide
gtagaccaagaccaacaaacgaaaggagca

SEQ ID NO: 12959 - DNA, 30 bp, Artificial Sequence
  Synthetic oligonucleotide
cggccaaggatgaatcactgtgcaagcgca

SEQ ID NO: 12960 - DNA, 30 bp, Artificial Sequence
  Synthetic oligonucleotide
ccaggagtccgaatagatgccgaaatggca

SEQ ID NO: 12961 - DNA, 30 bp, Artificial Sequence
  Synthetic oligonucleotide
tggagggcacacaatgccgaaggaagctca

SEQ ID NO: 12962 - DNA, 30 bp, Artificial Sequence
  Synthetic oligonucleotide
ccagagacagcaaaccgagagagtaaaaga

SEQ ID NO: 12963 - DNA, 30 bp, Artificial Sequence
  Synthetic oligonucleotide
cgtcccacaaagaacacctacctgccaaga

SEQ ID NO: 12964 - DNA, 30 bp, Artificial Sequence
  Synthetic oligonucleotide
tctcagagcgtgaaagtcgtaggaagaaga

SEQ ID NO: 12965 - DNA, 30 bp, Artificial Sequence
  Synthetic oligonucleotide
cggagggtagctaagccggtacgtcgaaga

SEQ ID NO: 12966 - DNA, 30 bp, Artificial Sequence
  Synthetic oligonucleotide
gtacaccaaacaccgcatatccgcgccaga

SEQ ID NO: 12967 - DNA, 30 bp, Artificial Sequence
  Synthetic oligonucleotide
tcgtcaggggcaaagaaactatcagtcaga

SEQ ID NO: 12968 - DNA, 30 bp, Artificial Sequence
  Synthetic oligonucleotide
caagaagtattggccggaaaaagatagaga

SEQ ID NO: 12969 - DNA, 30 bp, Artificial Sequence
  Synthetic oligonucleotide
cgacgaaaaaggcgaacatagtgatagaga

SEQ ID NO: 12970 - DNA, 29 bp, Artificial Sequence
  Synthetic oligonucleotide
cacgaggtcgaaaggtaaacacatcgaga

SEQ ID NO: 12971 - DNA, 30 bp, Artificial Sequence
  Synthetic oligonucleotide
tgtgagcaggggaaagtgggtccatcgaga

SEQ ID NO: 12972 - DNA, 30 bp, Artificial Sequence
  Synthetic oligonucleotide
ccaaacatggcatacgccaacaaacaagga

SEQ ID NO: 12973 - DNA, 30 bp, Artificial Sequence
  Synthetic oligonucleotide
ggtaggcgaaaccaggcgaacggagtagga

SEQ ID NO: 12974 - DNA, 30 bp, Artificial Sequence
  Synthetic oligonucleotide
ggacagggggagatctagcagctgcacgga

SEQ ID NO: 12975 - DNA, 30 bp, Artificial Sequence
  Synthetic oligonucleotide
cctgaaagccaagagggttgagccgatgga

SEQ ID NO: 12976 - DNA, 30 bp, Artificial Sequence
  Synthetic oligonucleotide
cgaggagaaggtctatctgaaacttaaata

SEQ ID NO: 12977 - DNA, 30 bp, Artificial Sequence
  Synthetic oligonucleotide
ggaggcgcaacacgggcaagctgcagaata

SEQ ID NO: 12978 - DNA, 30 bp, Artificial Sequence
  Synthetic oligonucleotide
gtcacaagatcaggacatgaagagcgaata

SEQ ID NO: 12979 - DNA, 30 bp, Artificial Sequence
  Synthetic oligonucleotide
caaagagcctcccaagaccaagatcgacta

SEQ ID NO: 12980 - DNA, 30 bp, Artificial Sequence
  Synthetic oligonucleotide
gtgcgaatgagtgtgcgtgtgactggcgta

SEQ ID NO: 12981 - DNA, 30 bp, Artificial Sequence
  Synthetic oligonucleotide
gcgtcagaaagtaagtccatcaccagggta

SEQ ID NO: 12982 - DNA, 30 bp, Artificial Sequence
  Synthetic oligonucleotide
gtaggggtagcgaggggctgacaaaactta

SEQ ID NO: 12983 - DNA, 30 bp, Artificial Sequence
  Synthetic oligonucleotide
aggggcgagcatggaaacacttcgaaacac

SEQ ID NO: 12984 - DNA, 30 bp, Artificial Sequence
  Synthetic oligonucleotide
cgtgtgactgtacgaacaatgagtgaacac

SEQ ID NO: 12985 - DNA, 30 bp, Artificial Sequence
  Synthetic oligonucleotide
agagggatagggaccgaagaaggtacgcac

SEQ ID NO: 12986 - DNA, 30 bp, Artificial Sequence
  Synthetic oligonucleotide
cagagtagacgaaggaggaacgatgcgcac

SEQ ID NO: 12987 - DNA, 30 bp, Artificial Sequence
  Synthetic oligonucleotide
tgagcgtgtaaggtgaattgtggctggcac

SEQ ID NO: 12988 - DNA, 34 bp, Artificial Sequence
  Synthetic oligonucleotide
catactagaccaccacgtgtccatcagaaaagac

SEQ ID NO: 12989 - DNA, 30 bp, Artificial Sequence
  Synthetic oligonucleotide
agtgcgaacgtccacaacggagagccagac

SEQ ID NO: 12990 - DNA, 30 bp, Artificial Sequence
  Synthetic oligonucleotide
caagagggtgcgctatgtcattaagccgac

SEQ ID NO: 12991 - DNA, 30 bp, Artificial Sequence
  Synthetic oligonucleotide
taggcaaacagcgatgtgggagcgggcgac

SEQ ID NO: 12992 - DNA, 30 bp, Artificial Sequence
  Synthetic oligonucleotide
agatccaagaactaaaacaagaacatggac

SEQ ID NO: 12993 - DNA, 30 bp, Artificial Sequence
  Synthetic oligonucleotide
gacgagaccgatatggaagttggtgatgac

SEQ ID NO: 12994 - DNA, 30 bp, Artificial Sequence
  Synthetic oligonucleotide
cttaggaaggaacaagagatcaaggcatac

SEQ ID NO: 12995 - DNA, 30 bp, Artificial Sequence
  Synthetic oligonucleotide
aacgagaaggatggtaggttcacgaattac

SEQ ID NO: 12996 - DNA, 30 bp, Artificial Sequence
  Synthetic oligonucleotide
ccgtcagtacgggcagatgggatgcagacc

SEQ ID NO: 12997 - DNA, 30 bp, Artificial Sequence
  Synthetic oligonucleotide
ggaggtcggagtgccagagaagagggtacc

SEQ ID NO: 12998 - DNA, 30 bp, Artificial Sequence
  Synthetic oligonucleotide
acgggagacgtcgtgtcaatgggagccgcc

SEQ ID NO: 12999 - DNA, 30 bp, Artificial Sequence
  Synthetic oligonucleotide
ccaaaagatacattaatatgagcgcgaagc

SEQ ID NO: 13000 - DNA, 30 bp, Artificial Sequence
  Synthetic oligonucleotide
agatcaaatcggaggcatgtgaagggaagc

SEQ ID NO: 13001 - DNA, 30 bp, Artificial Sequence
  Synthetic oligonucleotide
aagacaacgtcgtaacccgagcagatcagc

SEQ ID NO: 13002 - DNA, 30 bp, Artificial Sequence
  Synthetic oligonucleotide
tacggaaaacaggtggagcggtcaagtagc

SEQ ID NO: 13003 - DNA, 30 bp, Artificial Sequence
  Synthetic oligonucleotide
cgaaaagaggctacgagagacgggggtagc

SEQ ID NO: 13004 - DNA, 30 bp, Artificial Sequence
  Synthetic oligonucleotide
gaggaggctaaaaataagccatccactcgc

SEQ ID NO: 13005 - DNA, 30 bp, Artificial Sequence
  Synthetic oligonucleotide
gggattaccaataggcaagagagactaggc

SEQ ID NO: 13006 - DNA, 30 bp, Artificial Sequence
  Synthetic oligonucleotide
ggaacccagagcaagtgaccaaggttaggc

SEQ ID NO: 13007 - DNA, 30 bp, Artificial Sequence
  Synthetic oligonucleotide
cgtctggcgataaccgaaaaccctgcgctc

SEQ ID NO: 13008 - DNA, 30 bp, Artificial Sequence
  Synthetic oligonucleotide
cgatcaacggaaaaaagaacccacgcggtc

SEQ ID NO: 13009 - DNA, 30 bp, Artificial Sequence
  Synthetic oligonucleotide
cagcaaaggttagtggaaatgaacgaaaag

SEQ ID NO: 13010 - DNA, 30 bp, Artificial Sequence
  Synthetic oligonucleotide
agcaaagacattaaacatcgtagcccaaag

SEQ ID NO: 13011 - DNA, 30 bp, Artificial Sequence
  Synthetic oligonucleotide
tccacagaaacaatgcgagaaacatgaaag

SEQ ID NO: 13012 - DNA, 30 bp, Artificial Sequence
  Synthetic oligonucleotide
ataggaggctaaggactaagtaggacgaag

SEQ ID NO: 13013 - DNA, 30 bp, Artificial Sequence
  Synthetic oligonucleotide
cgatacttcaacatgtcgaacccaaggaag

SEQ ID NO: 13014 - DNA, 30 bp, Artificial Sequence
  Synthetic oligonucleotide
agggggctaagacgaattcacagggggaag

SEQ ID NO: 13015 - DNA, 30 bp, Artificial Sequence
  Synthetic oligonucleotide
gacgaatcgcgtaatgacataaagctgaag

SEQ ID NO: 13016 - DNA, 30 bp, Artificial Sequence
  Synthetic oligonucleotide
aggaggtataaacgagaataaggcgtgaag

SEQ ID NO: 13017 - DNA, 30 bp, Artificial Sequence
  Synthetic oligonucleotide
tcgatgcacaggcaaaggtggatcttgaag

SEQ ID NO: 13018 - DNA, 30 bp, Artificial Sequence
  Synthetic oligonucleotide
atgagagcagacggcttggcaagcgataag

SEQ ID NO: 13019 - DNA, 30 bp, Artificial Sequence
  Synthetic oligonucleotide
acacgaaacgaccagacacagggtaaacag

SEQ ID NO: 13020 - DNA, 30 bp, Artificial Sequence
  Synthetic oligonucleotide
tgaagtcaagaggaactcaaccgacgacag

SEQ ID NO: 13021 - DNA, 30 bp, Artificial Sequence
  Synthetic oligonucleotide
cgaggaatattgaggcatgggagtttacag

SEQ ID NO: 13022 - DNA, 30 bp, Artificial Sequence
  Synthetic oligonucleotide
caagggaagctggcagaaatatcgtcgcag

SEQ ID NO: 13023 - DNA, 30 bp, Artificial Sequence
  Synthetic oligonucleotide
tgaaacacgaccgaaaaagtatggtatcag

SEQ ID NO: 13024 - DNA, 30 bp, Artificial Sequence
  Synthetic oligonucleotide
gggcgaggattaccatggagtcagagagag

SEQ ID NO: 13025 - DNA, 30 bp, Artificial Sequence
  Synthetic oligonucleotide
ctcaacgcgaggggggagcgacggagagag

SEQ ID NO: 13026 - DNA, 30 bp, Artificial Sequence
  Synthetic oligonucleotide
aggatacgcgagtaatgaatcactttagag

SEQ ID NO: 13027 - DNA, 30 bp, Artificial Sequence
  Synthetic oligonucleotide
agagaaatgtaggtttctagccagagcgag

SEQ ID NO: 13028 - DNA, 30 bp, Artificial Sequence
  Synthetic oligonucleotide
agaacaatcgggattaacgtaggaaaggag

SEQ ID NO: 13029 - DNA, 30 bp, Artificial Sequence
  Synthetic oligonucleotide
aggttcccagggatctgacgaccgaaggag

SEQ ID NO: 13030 - DNA, 30 bp, Artificial Sequence
  Synthetic oligonucleotide
agaggagtttcagccaatactaacgaggag

SEQ ID NO: 13031 - DNA, 30 bp, Artificial Sequence
  Synthetic oligonucleotide
acggatcagacgaccgcaatatcgggggag

SEQ ID NO: 13032 - DNA, 30 bp, Artificial Sequence
  Synthetic oligonucleotide
ggaagggcattaagagagatccccgtggag

SEQ ID NO: 13033 - DNA, 30 bp, Artificial Sequence
  Synthetic oligonucleotide
cctcgaggcagacagaaccggcaccatgag

SEQ ID NO: 13034 - DNA, 30 bp, Artificial Sequence
  Synthetic oligonucleotide
cacgtagcagcgactgtagggccaagtgag

SEQ ID NO: 13035 - DNA, 30 bp, Artificial Sequence
  Synthetic oligonucleotide
tcgagccgccccgataggaacaagcttgag

SEQ ID NO: 13036 - DNA, 31 bp, Artificial Sequence
  Synthetic oligonucleotide
gcagggaaaccaacttaacattaacaaatag

SEQ ID NO: 13037 - DNA, 30 bp, Artificial Sequence
  Synthetic oligonucleotide
cgggggaattgggataaaatccgacagtag

SEQ ID NO: 13038 - DNA, 30 bp, Artificial Sequence
  Synthetic oligonucleotide
caggaaactaggtgatcagctacgaggtag

SEQ ID NO: 13039 - DNA, 30 bp, Artificial Sequence
  Synthetic oligonucleotide
accatagaatgggagggtgaaccgatgtag

SEQ ID NO: 13040 - DNA, 31 bp, Artificial Sequence
  Synthetic oligonucleotide
cgcgtaatcccgaggaacagcgaaatattag

SEQ ID NO: 13041 - DNA, 30 bp, Artificial Sequence
  Synthetic oligonucleotide
tgcaaaggacagccaatatatagccaaacg

SEQ ID NO: 13042 - DNA, 30 bp, Artificial Sequence
  Synthetic oligonucleotide
gtcggtcgcaaacaggaccaatcagaaacg

SEQ ID NO: 13043 - DNA, 30 bp, Artificial Sequence
  Synthetic oligonucleotide
ggagagcaaaagtaccaggccacggaaacg

SEQ ID NO: 13044 - DNA, 30 bp, Artificial Sequence
  Synthetic oligonucleotide
tgaggcgtaagagaggttaaccgataaacg

SEQ ID NO: 13045 - DNA, 30 bp, Artificial Sequence
  Synthetic oligonucleotide
aggactcagagaaaacaactttaggcaacg

SEQ ID NO: 13046 - DNA, 30 bp, Artificial Sequence
  Synthetic oligonucleotide
aggataagtggcgaagaattagtcgagacg

SEQ ID NO: 13047 - DNA, 30 bp, Artificial Sequence
  Synthetic oligonucleotide
aggcgtgatagccaaggaattaccacaccg

SEQ ID NO: 13048 - DNA, 30 bp, Artificial Sequence
  Synthetic oligonucleotide
cgacatgcggccacataaggagtatagccg

SEQ ID NO: 13049 - DNA, 30 bp, Artificial Sequence
  Synthetic oligonucleotide
cgacccatgtaacatcaagacaaatggccg

SEQ ID NO: 13050 - DNA, 30 bp, Artificial Sequence
  Synthetic oligonucleotide
ccgagtgcaaatactgaacagcaaggtccg

SEQ ID NO: 13051 - DNA, 30 bp, Artificial Sequence
  Synthetic oligonucleotide
ggacatacagaaagtgaggtcgaactcgcg

SEQ ID NO: 13052 - DNA, 30 bp, Artificial Sequence
  Synthetic oligonucleotide
cctcgaggcgaaatcggttagaagcttgcg

SEQ ID NO: 13053 - DNA, 30 bp, Artificial Sequence
  Synthetic oligonucleotide
agaggagagtgggtgtgggaaaagaaatcg

SEQ ID NO: 13054 - DNA, 30 bp, Artificial Sequence
  Synthetic oligonucleotide
gaaggaggattaggtaacacaaatcactcg

SEQ ID NO: 13055 - DNA, 30 bp, Artificial Sequence
  Synthetic oligonucleotide
ttcgggggcagacatggtggggagaagtcg

SEQ ID NO: 13056 - DNA, 30 bp, Artificial Sequence
  Synthetic oligonucleotide
ggcagtaggcctcgttaaggaaaagcgtcg

SEQ ID NO: 13057 - DNA, 30 bp, Artificial Sequence
  Synthetic oligonucleotide
cctcgatcgccaagaaagtcaaaaaggtcg

SEQ ID NO: 13058 - DNA, 30 bp, Artificial Sequence
  Synthetic oligonucleotide
aaggacggtcgggcactgatgaacaaaagg

SEQ ID NO: 13059 - DNA, 30 bp, Artificial Sequence
  Synthetic oligonucleotide
caaaaaagagacagcggaatctccgcaagg

SEQ ID NO: 13060 - DNA, 30 bp, Artificial Sequence
  Synthetic oligonucleotide
ggaagcacgcaaggggacagacagggaagg

SEQ ID NO: 13061 - DNA, 30 bp, Artificial Sequence
  Synthetic oligonucleotide
catggtagaggattccaagattgatacagg

SEQ ID NO: 13062 - DNA, 30 bp, Artificial Sequence
  Synthetic oligonucleotide
taggacagcgtgtaaggaaaaagaggcagg

SEQ ID NO: 13063 - DNA, 30 bp, Artificial Sequence
  Synthetic oligonucleotide
acacgtccacacagcctggtcgcacagagg

SEQ ID NO: 13064 - DNA, 30 bp, Artificial Sequence
  Synthetic oligonucleotide
caaagggggtgcggcaaagaatagtcgcgg

SEQ ID NO: 13065 - DNA, 30 bp, Artificial Sequence
  Synthetic oligonucleotide
gtaacggggtgaacctaggcaaatcgtcgg

SEQ ID NO: 13066 - DNA, 30 bp, Artificial Sequence
  Synthetic oligonucleotide
tagaagagggagagatctatgaataaaggg

SEQ ID NO: 13067 - DNA, 31 bp, Artificial Sequence
  Synthetic oligonucleotide
tcggattataggagtgcactcaggaacaggg

SEQ ID NO: 13068 - DNA, 30 bp, Artificial Sequence
  Synthetic oligonucleotide
actacagacgaaaacgaaagagtccgaggg

SEQ ID NO: 13069 - DNA, 30 bp, Artificial Sequence
  Synthetic oligonucleotide
aggccgaggggcaataaactattgataggg

SEQ ID NO: 13070 - DNA, 30 bp, Artificial Sequence
  Synthetic oligonucleotide
tcgattggaggtgggaattcgtctgctggg

SEQ ID NO: 13071 - DNA, 30 bp, Artificial Sequence
  Synthetic oligonucleotide
tgagcgaggttgaaaatcggatgatttggg

SEQ ID NO: 13072 - DNA, 30 bp, Artificial Sequence
  Synthetic oligonucleotide
acacaaaagagacatagtgatgggacatgg

SEQ ID NO: 13073 - DNA, 30 bp, Artificial Sequence
  Synthetic oligonucleotide
ccaacggaagatacagctaggcaaagatgg

SEQ ID NO: 13074 - DNA, 30 bp, Artificial Sequence
  Synthetic oligonucleotide
aaggatacatgaacaggcgaggactactgg

SEQ ID NO: 13075 - DNA, 30 bp, Artificial Sequence
  Synthetic oligonucleotide
ctaaacactaaaaagcgtcaaagcaagtgg

SEQ ID NO: 13076 - DNA, 30 bp, Artificial Sequence
  Synthetic oligonucleotide
gagggtggaatgagtgcgcaagaaatgtgg

SEQ ID NO: 13077 - DNA, 30 bp, Artificial Sequence
  Synthetic oligonucleotide
accgatacactgaaaggcaagcgtcaaatg

SEQ ID NO: 13078 - DNA, 30 bp, Artificial Sequence
  Synthetic oligonucleotide
gctggagcgagaggtcgcgaagcaagcatg

SEQ ID NO: 13079 - DNA, 30 bp, Artificial Sequence
  Synthetic oligonucleotide
gtgggaactgggcgaggtaagtgatagatg

SEQ ID NO: 13080 - DNA, 30 bp, Artificial Sequence
  Synthetic oligonucleotide
gcagaaggacaaaactgaggggatcatatg

SEQ ID NO: 13081 - DNA, 30 bp, Artificial Sequence
  Synthetic oligonucleotide
tcaaaactcggtaacgtccaaaacacagtg

SEQ ID NO: 13082 - DNA, 30 bp, Artificial Sequence
  Synthetic oligonucleotide
caaatcagaggagaacgtagatacctagtg

SEQ ID NO: 13083 - DNA, 30 bp, Artificial Sequence
  Synthetic oligonucleotide
accgtaaaggaccggacaccaataagcgtg

SEQ ID NO: 13084 - DNA, 30 bp, Artificial Sequence
  Synthetic oligonucleotide
tggcttggccgataacgaaacgcgagggtg

SEQ ID NO: 13085 - DNA, 30 bp, Artificial Sequence
  Synthetic oligonucleotide
aaaggagagtgaataatatggatggtcttg

SEQ ID NO: 13086 - DNA, 31 bp, Artificial Sequence
  Synthetic oligonucleotide
gcaaagaaagcccaacgatgaaggaacaaat

SEQ ID NO: 13087 - DNA, 30 bp, Artificial Sequence
  Synthetic oligonucleotide
tgaggggcgccgaagagattcgtgaacaat

SEQ ID NO: 13088 - DNA, 30 bp, Artificial Sequence
  Synthetic oligonucleotide
taccgggaccagacgagggaagtagccaat

SEQ ID NO: 13089 - DNA, 30 bp, Artificial Sequence
  Synthetic oligonucleotide
tgaagaacagatgtgggcgggtcggagaat

SEQ ID NO: 13090 - DNA, 30 bp, Artificial Sequence
  Synthetic oligonucleotide
acatcggtcgataaagtaggaaggctgaat

SEQ ID NO: 13091 - DNA, 30 bp, Artificial Sequence
  Synthetic oligonucleotide
cggagagaggccggaattacatgctaccat

SEQ ID NO: 13092 - DNA, 30 bp, Artificial Sequence
  Synthetic oligonucleotide
gaacgctggacatggacgtgaggagacgat

SEQ ID NO: 13093 - DNA, 30 bp, Artificial Sequence
  Synthetic oligonucleotide
cggaggaagaagtaaccggtgatgagggat

SEQ ID NO: 13094 - DNA, 30 bp, Artificial Sequence
  Synthetic oligonucleotide
ggcaacagcatcaatggcaagacagagtat

SEQ ID NO: 13095 - DNA, 30 bp, Artificial Sequence
  Synthetic oligonucleotide
cgaggctcatacaggagtaagaagctaact

SEQ ID NO: 13096 - DNA, 30 bp, Artificial Sequence
  Synthetic oligonucleotide
ggcacataagaggtaaaaagtcacactact

SEQ ID NO: 13097 - DNA, 30 bp, Artificial Sequence
  Synthetic oligonucleotide
cgatcgaaagatactgtgcgcggaagtact

SEQ ID NO: 13098 - DNA, 30 bp, Artificial Sequence
  Synthetic oligonucleotide
acgtacaacggatagtaatggtggccacct

SEQ ID NO: 13099 - DNA, 31 bp, Artificial Sequence
  Synthetic oligonucleotide
ggaggcgagcgcaattcatgcaacgctaagt

SEQ ID NO: 13100 - DNA, 30 bp, Artificial Sequence
  Synthetic oligonucleotide
aggcgggatccaatcgatagagctagcagt

SEQ ID NO: 13101 - DNA, 30 bp, Artificial Sequence
  Synthetic oligonucleotide
aggggcactaggagttagaacactgggagt

SEQ ID NO: 13102 - DNA, 30 bp, Artificial Sequence
  Synthetic oligonucleotide
ggtgagacttagagggacaaatgaaaccgt

SEQ ID NO: 13103 - DNA, 30 bp, Artificial Sequence
  Synthetic oligonucleotide
gcaggagcgagagcagcgagaaaagttcgt

SEQ ID NO: 13104 - DNA, 30 bp, Artificial Sequence
  Synthetic oligonucleotide
catgaagagcataaagtgatgaggggcggt

SEQ ID NO: 13105 - DNA, 30 bp, Artificial Sequence
  Synthetic oligonucleotide
cacggcgaccccaaggaaaggaacgttggt

SEQ ID NO: 13106 - DNA, 30 bp, Artificial Sequence
  Synthetic oligonucleotide
aggatggaaggaagtgatggaatactgtgt

SEQ ID NO: 13107 - DNA, 30 bp, Artificial Sequence
  Synthetic oligonucleotide
gcacgagccgaaacgagggaacttcacatt

SEQ ID NO: 13108 - DNA, 30 bp, Artificial Sequence
  Synthetic oligonucleotide
tcaaacacggaaaagggtcaggctaagatt

SEQ ID NO: 13109 - DNA, 30 bp, Artificial Sequence
  Synthetic oligonucleotide
ggaggaggcgtagtagagtccaggcgagtt

SEQ ID NO: 13110 - DNA, 30 bp, Artificial Sequence
  Synthetic oligonucleotide
acacgacgtgagcgaaaagtggacgagttt

SEQ ID NO: 13111 - DNA, 30 bp, Artificial Sequence
  Synthetic oligonucleotide
cggcacgtacacaccatagagcatgcaaaa

SEQ ID NO: 13112 - DNA, 30 bp, Artificial Sequence
  Synthetic oligonucleotide
gtggagacaacctcagccccgagtggaaaa

SEQ ID NO: 13113 - DNA, 30 bp, Artificial Sequence
  Synthetic oligonucleotide
cgcgggaaggcaatcccaagcttgtgaaaa

SEQ ID NO: 13114 - DNA, 30 bp, Artificial Sequence
  Synthetic oligonucleotide
taacagactggcgaggtgagggacgtaaaa

SEQ ID NO: 13115 - DNA, 30 bp, Artificial Sequence
  Synthetic oligonucleotide
caaatgaaagagataagcacatcacacaaa

SEQ ID NO: 13116 - DNA, 30 bp, Artificial Sequence
  Synthetic oligonucleotide
gaggcgaataagcaaaccctacagctcaaa

SEQ ID NO: 13117 - DNA, 30 bp, Artificial Sequence
  Synthetic oligonucleotide
tcgagaaaaggacagagagtatcaaataaa

SEQ ID NO: 13118 - DNA, 30 bp, Artificial Sequence
  Synthetic oligonucleotide
aacgggcaaaggtagtcggaacgccataaa

SEQ ID NO: 13119 - DNA, 30 bp, Artificial Sequence
  Synthetic oligonucleotide
acggcaaaagctatcgacacacgtcataaa

SEQ ID NO: 13120 - DNA, 30 bp, Artificial Sequence
  Synthetic oligonucleotide
agataaaggtggaacacgtgcatggataaa

SEQ ID NO: 13121 - DNA, 30 bp, Artificial Sequence
  Synthetic oligonucleotide
agagcgaagatgataagctacggagaacaa

SEQ ID NO: 13122 - DNA, 30 bp, Artificial Sequence
  Synthetic oligonucleotide
cggtcaacatatcaaactcacagagcacaa

SEQ ID NO: 13123 - DNA, 30 bp, Artificial Sequence
  Synthetic oligonucleotide
ccgccaatgcgaaaagtaataactgcacaa

SEQ ID NO: 13124 - DNA, 30 bp, Artificial Sequence
  Synthetic oligonucleotide
gcaggtaagacgatgggcacgattgcacaa

SEQ ID NO: 13125 - DNA, 30 bp, Artificial Sequence
  Synthetic oligonucleotide
gttagggacagtgagaagtcaaagctacaa

SEQ ID NO: 13126 - DNA, 30 bp, Artificial Sequence
  Synthetic oligonucleotide
actggagagccaaagacaaccgagaaccaa

SEQ ID NO: 13127 - DNA, 31 bp, Artificial Sequence
  Synthetic oligonucleotide
gtaggcgataacttacaaagggaggaaccaa

SEQ ID NO: 13128 - DNA, 30 bp, Artificial Sequence
  Synthetic oligonucleotide
ggcgaaatgcaaaatcataaaattacccaa

SEQ ID NO: 13129 - DNA, 30 bp, Artificial Sequence
  Synthetic oligonucleotide
ccagggcggggtcccaaattgagagcgcaa

SEQ ID NO: 13130 - DNA, 30 bp, Artificial Sequence
  Synthetic oligonucleotide
acggatctgagtatgccaaactaaaggcaa

SEQ ID NO: 13131 - DNA, 30 bp, Artificial Sequence
  Synthetic oligonucleotide
cggtaaatagcagaataagctgtgcatcaa

SEQ ID NO: 13132 - DNA, 30 bp, Artificial Sequence
  Synthetic oligonucleotide
gatcgctaaagtcgggaggtggaggttcaa

SEQ ID NO: 13133 - DNA, 30 bp, Artificial Sequence
  Synthetic oligonucleotide
ggtcgcacgaaagatgatagtacacgagaa

SEQ ID NO: 13134 - DNA, 30 bp, Artificial Sequence
  Synthetic oligonucleotide
ggcgatatgaggagggaggatgaatacgaa

SEQ ID NO: 13135 - DNA, 30 bp, Artificial Sequence
  Synthetic oligonucleotide
tcgacaactaagacaactgatcgctccgaa

SEQ ID NO: 13136 - DNA, 30 bp, Artificial Sequence
  Synthetic oligonucleotide
acgattagggcgtcgaaagtagaaaaggaa

SEQ ID NO: 13137 - DNA, 30 bp, Artificial Sequence
  Synthetic oligonucleotide
tgggattgaaagaggtaaggtcgaactgaa

SEQ ID NO: 13138 - DNA, 30 bp, Artificial Sequence
  Synthetic oligonucleotide
ctacggagtgaggatacaaccttaagctaa

SEQ ID NO: 13139 - DNA, 30 bp, Artificial Sequence
  Synthetic oligonucleotide
cacgtaacagatccagggacaatgccttaa

SEQ ID NO: 13140 - DNA, 30 bp, Artificial Sequence
  Synthetic oligonucleotide
gacgaaagggtgtgggggagactagaaaca

SEQ ID NO: 13141 - DNA, 30 bp, Artificial Sequence
  Synthetic oligonucleotide
cgggcccaagattcacagagagcagcaaca

SEQ ID NO: 13142 - DNA, 30 bp, Artificial Sequence
  Synthetic oligonucleotide
aagatcagtaaagttagacatcaccagaca

SEQ ID NO: 13143 - DNA, 30 bp, Artificial Sequence
  Synthetic oligonucleotide
catacgtgaggctaattaggagatccgaca

SEQ ID NO: 13144 - DNA, 30 bp, Artificial Sequence
  Synthetic oligonucleotide
gcggaggtcgcacccgagtcatcaaagcca

SEQ ID NO: 13145 - DNA, 30 bp, Artificial Sequence
  Synthetic oligonucleotide
aggttggacgcgattcatcggatgaaagca

SEQ ID NO: 13146 - DNA, 30 bp, Artificial Sequence
  Synthetic oligonucleotide
ggcagggctgtgaaacggaatcaaagagca

SEQ ID NO: 13147 - DNA, 30 bp, Artificial Sequence
  Synthetic oligonucleotide
aggcggggatgttcgaaaagaagtctagca

SEQ ID NO: 13148 - DNA, 30 bp, Artificial Sequence
  Synthetic oligonucleotide
acactcggagggacagtgagtataacggca

SEQ ID NO: 13149 - DNA, 30 bp, Artificial Sequence
  Synthetic oligonucleotide
cggagtggtgcgagtgatagtgttggctca

SEQ ID NO: 13150 - DNA, 30 bp, Artificial Sequence
  Synthetic oligonucleotide
cgcaaaaaagggaaatccgccgaggggtca

SEQ ID NO: 13151 - DNA, 31 bp, Artificial Sequence
  Synthetic oligonucleotide
gcgagtgtcgaacgccaatgcggactccaga

SEQ ID NO: 13152 - DNA, 30 bp, Artificial Sequence
  Synthetic oligonucleotide
tgggaactgcccaaaggagggcgagtcaga

SEQ ID NO: 13153 - DNA, 30 bp, Artificial Sequence
  Synthetic oligonucleotide
cggggagggccaaaagcatccgcggtcaga

SEQ ID NO: 13154 - DNA, 30 bp, Artificial Sequence
  Synthetic oligonucleotide
gacgacacgtaaactattgaacaactgaga

SEQ ID NO: 13155 - DNA, 30 bp, Artificial Sequence
  Synthetic oligonucleotide
acagggtaggaaataagaactcaactgaga

SEQ ID NO: 13156 - DNA, 30 bp, Artificial Sequence
  Synthetic oligonucleotide
gaggcgtcataagtaagagtgagcttgaga

SEQ ID NO: 13157 - DNA, 30 bp, Artificial Sequence
  Synthetic oligonucleotide
atcgcacgccgattgggaataaaacgtaga

SEQ ID NO: 13158 - DNA, 30 bp, Artificial Sequence
  Synthetic oligonucleotide
gcgaggactcaaaccgtgccaaagtaacga

SEQ ID NO: 13159 - DNA, 30 bp, Artificial Sequence
  Synthetic oligonucleotide
ctgggcgtgcaataagaaacagcgtgtcga

SEQ ID NO: 13160 - DNA, 30 bp, Artificial Sequence
  Synthetic oligonucleotide
cgagactgtcatcggggacgagcgattcga

SEQ ID NO: 13161 - DNA, 30 bp, Artificial Sequence
  Synthetic oligonucleotide
cacgacaagtcaacgttagtcaacccagga

SEQ ID NO: 13162 - DNA, 30 bp, Artificial Sequence
  Synthetic oligonucleotide
agacaggatagcatagtcaaggagggagga

SEQ ID NO: 13163 - DNA, 30 bp, Artificial Sequence
  Synthetic oligonucleotide
gcgaacagcggtctgataggaattgtagga

SEQ ID NO: 13164 - DNA, 30 bp, Artificial Sequence
  Synthetic oligonucleotide
cttgggatcaaagctaaaaaaaaaaccgga

SEQ ID NO: 13165 - DNA, 30 bp, Artificial Sequence
  Synthetic oligonucleotide
acagcgaaaataaacacttaaaggaaggga

SEQ ID NO: 13166 - DNA, 30 bp, Artificial Sequence
  Synthetic oligonucleotide
ggcactcgaaagatgaggagggcagctgga

SEQ ID NO: 13167 - DNA, 30 bp, Artificial Sequence
  Synthetic oligonucleotide
ataaaagagggaggcgggagcgacgttgga

SEQ ID NO: 13168 - DNA, 30 bp, Artificial Sequence
  Synthetic oligonucleotide
acgtggcagatgtgattataactaggatga

SEQ ID NO: 13169 - DNA, 30 bp, Artificial Sequence
  Synthetic oligonucleotide
aacgtcccaagggccatcgggtatgagtga

SEQ ID NO: 13170 - DNA, 30 bp, Artificial Sequence
  Synthetic oligonucleotide
tcgtaccaccaagagtaccgagtgacttga

SEQ ID NO: 13171 - DNA, 30 bp, Artificial Sequence
  Synthetic oligonucleotide
atcgataagaaaggtgtggaaggggagata

SEQ ID NO: 13172 - DNA, 30 bp, Artificial Sequence
  Synthetic oligonucleotide
atcgccagaggaagacgaattgtgtggata

SEQ ID NO: 13173 - DNA, 30 bp, Artificial Sequence
  Synthetic oligonucleotide
cggcacggcaggcaacaagaaggacatata

SEQ ID NO: 13174 - DNA, 30 bp, Artificial Sequence
  Synthetic oligonucleotide
taggacggaaccacctaacaatacagacta

SEQ ID NO: 13175 - DNA, 30 bp, Artificial Sequence
  Synthetic oligonucleotide
caacgaggggttcgaacttctgacagagta

SEQ ID NO: 13176 - DNA, 30 bp, Artificial Sequence
  Synthetic oligonucleotide
ccgtgtagtctgattagagtagcgagagta

SEQ ID NO: 13177 - DNA, 30 bp, Artificial Sequence
  Synthetic oligonucleotide
agcagacgatcgtgacaaaataacagggta

SEQ ID NO: 13178 - DNA, 30 bp, Artificial Sequence
  Synthetic oligonucleotide
tggaacaccgactgctgaacccaaccgaac

SEQ ID NO: 13179 - DNA, 30 bp, Artificial Sequence
  Synthetic oligonucleotide
agataggaagggaccacagattaatgtaac

SEQ ID NO: 13180 - DNA, 30 bp, Artificial Sequence
  Synthetic oligonucleotide
cgaacaacacgggtaaaactggtagtacac

SEQ ID NO: 13181 - DNA, 30 bp, Artificial Sequence
  Synthetic oligonucleotide
gccaacaagcgacagaagagggtaagccac

SEQ ID NO: 13182 - DNA, 30 bp, Artificial Sequence
  Synthetic oligonucleotide
cgccgaagagtgaggactagggcatagcac

SEQ ID NO: 13183 - DNA, 30 bp, Artificial Sequence
  Synthetic oligonucleotide
cacacaagagggaatactgaggaatatcac

SEQ ID NO: 13184 - DNA, 30 bp, Artificial Sequence
  Synthetic oligonucleotide
acacgtaacaaggcctcggtcagcttcgac

SEQ ID NO: 13185 - DNA, 31 bp, Artificial Sequence
  Synthetic oligonucleotide
aaccaacgcatggtaaacagggagagcggac

SEQ ID NO: 13186 - DNA, 30 bp, Artificial Sequence
  Synthetic oligonucleotide
acggggagctaacaagctacagctgcggac

SEQ ID NO: 13187 - DNA, 30 bp, Artificial Sequence
  Synthetic oligonucleotide
ttacgggcgggtcgaagaaaacaagcttac

SEQ ID NO: 13188 - DNA, 30 bp, Artificial Sequence
  Synthetic oligonucleotide
agagacagggaggagaaaagtccaggttac

SEQ ID NO: 13189 - DNA, 30 bp, Artificial Sequence
  Synthetic oligonucleotide
gggatccgaagtagaataaggtgagaaacc

SEQ ID NO: 13190 - DNA, 30 bp, Artificial Sequence
  Synthetic oligonucleotide
tggaagtgggtaaaaggaacagcacacacc

SEQ ID NO: 13191 - DNA, 30 bp, Artificial Sequence
  Synthetic oligonucleotide
agatagtgcggggaaagaatagaggacacc

SEQ ID NO: 13192 - DNA, 30 bp, Artificial Sequence
  Synthetic oligonucleotide
tgaaccaccgagagtagactagaatgcacc

SEQ ID NO: 13193 - DNA, 30 bp, Artificial Sequence
  Synthetic oligonucleotide
ccagagatgtccacgaggatagcagagccc

SEQ ID NO: 13194 - DNA, 30 bp, Artificial Sequence
  Synthetic oligonucleotide
acacgccaatccggaaagaggagtgtctcc

SEQ ID NO: 13195 - DNA, 30 bp, Artificial Sequence
  Synthetic oligonucleotide
gggaaaaacagaacgcgaatggaaacaagc

SEQ ID NO: 13196 - DNA, 30 bp, Artificial Sequence
  Synthetic oligonucleotide
acgccgacaaatcccagcggtaacataagc

SEQ ID NO: 13197 - DNA, 30 bp, Artificial Sequence
  Synthetic oligonucleotide
agaagtgtcaacgggacatgatagaagcgc

SEQ ID NO: 13198 - DNA, 30 bp, Artificial Sequence
  Synthetic oligonucleotide
gaatgaaaaggaataatcctcgataccggc

SEQ ID NO: 13199 - DNA, 30 bp, Artificial Sequence
  Synthetic oligonucleotide
cggtaggaaaccggtaacgaacttgtcggc

SEQ ID NO: 13200 - DNA, 30 bp, Artificial Sequence
  Synthetic oligonucleotide
aggaaagaagttcgcaaacccaacccctgc

SEQ ID NO: 13201 - DNA, 30 bp, Artificial Sequence
  Synthetic oligonucleotide
gaaccggtcgaagtgaacgacaaagtgtgc

SEQ ID NO: 13202 - DNA, 30 bp, Artificial Sequence
  Synthetic oligonucleotide
acggttcgagggaagggaagctagtgttgc

SEQ ID NO: 13203 - DNA, 30 bp, Artificial Sequence
  Synthetic oligonucleotide
aggtaaacaaaaggatgtcaatagcaaatc

SEQ ID NO: 13204 - DNA, 30 bp, Artificial Sequence
  Synthetic oligonucleotide
tgagcgtagaagccaaagcaagggtggatc

SEQ ID NO: 13205 - DNA, 30 bp, Artificial Sequence
  Synthetic oligonucleotide
gcgaacccgagagataataccaaaaagctc

SEQ ID NO: 13206 - DNA, 30 bp, Artificial Sequence
  Synthetic oligonucleotide
cagggaataagggatctcaaacggtagctc

SEQ ID NO: 13207 - DNA, 30 bp, Artificial Sequence
  Synthetic oligonucleotide
cgatgattacgatgggagggatcagcgctc

SEQ ID NO: 13208 - DNA, 30 bp, Artificial Sequence
  Synthetic oligonucleotide
aggaggctcgacaacaagaccaccgcgctc

SEQ ID NO: 13209 - DNA, 30 bp, Artificial Sequence
  Synthetic oligonucleotide
actaacaagtgcggagggggcatgcgtctc

SEQ ID NO: 13210 - DNA, 30 bp, Artificial Sequence
  Synthetic oligonucleotide
cgtcacgagcggaaagctgggggtagagtc

SEQ ID NO: 13211 - DNA, 30 bp, Artificial Sequence
  Synthetic oligonucleotide
aaggaggcgatcaatccagtgcaatgagtc

SEQ ID NO: 13212 - DNA, 30 bp, Artificial Sequence
  Synthetic oligonucleotide
ataggataggaagggtgaacgcatatcgtc

SEQ ID NO: 13213 - DNA, 30 bp, Artificial Sequence
  Synthetic oligonucleotide
cggggacagagaatgaatccgggtgtcgtc

SEQ ID NO: 13214 - DNA, 30 bp, Artificial Sequence
  Synthetic oligonucleotide
caaagaaaccaaggtcaggagaggaatgtc

SEQ ID NO: 13215 - DNA, 30 bp, Artificial Sequence
  Synthetic oligonucleotide
tcttcaccgtttattctaaggatttttttc

SEQ ID NO: 13216 - DNA, 30 bp, Artificial Sequence
  Synthetic oligonucleotide
tggcgaagaaaacgttctatcggcaaaaag

SEQ ID NO: 13217 - DNA, 30 bp, Artificial Sequence
  Synthetic oligonucleotide
aggatgcgggagccacgccagaggcaaaag

SEQ ID NO: 13218 - DNA, 30 bp, Artificial Sequence
  Synthetic oligonucleotide
acgaaagaaacgcccagcaaaggttgaaag

SEQ ID NO: 13219 - DNA, 30 bp, Artificial Sequence
  Synthetic oligonucleotide
gatcggtcaagatcaaagtcagtcaacaag

SEQ ID NO: 13220 - DNA, 30 bp, Artificial Sequence
  Synthetic oligonucleotide
tcgactagagccgaccaagctgggtccaag

SEQ ID NO: 13221 - DNA, 30 bp, Artificial Sequence
  Synthetic oligonucleotide
cgagatagcgtccccccagaagtgggcaag

SEQ ID NO: 13222 - DNA, 30 bp, Artificial Sequence
  Synthetic oligonucleotide
gtcaatatacacgatgaaagaaccatcaag

SEQ ID NO: 13223 - DNA, 30 bp, Artificial Sequence
  Synthetic oligonucleotide
ggacggtgaactcaccggtacgctcagaag

SEQ ID NO: 13224 - DNA, 30 bp, Artificial Sequence
  Synthetic oligonucleotide
cgctgtctctaaagggtcgagtaaaggaag

SEQ ID NO: 13225 - DNA, 30 bp, Artificial Sequence
  Synthetic oligonucleotide
tgaacgtccgggctcgaggagggagataag

SEQ ID NO: 13226 - DNA, 30 bp, Artificial Sequence
  Synthetic oligonucleotide
cgccgaggcagtaaagggcattacgataag

SEQ ID NO: 13227 - DNA, 30 bp, Artificial Sequence
  Synthetic oligonucleotide
cagacaacgaaagaaccaggtggacctaag

SEQ ID NO: 13228 - DNA, 30 bp, Artificial Sequence
  Synthetic oligonucleotide
cggtcagacggggaacaaactgatcctaag

SEQ ID NO: 13229 - DNA, 30 bp, Artificial Sequence
  Synthetic oligonucleotide
cgtacggagtgcgcctaactaatcggtaag

SEQ ID NO: 13230 - DNA, 30 bp, Artificial Sequence
  Synthetic oligonucleotide
cgccaaacattggacataaagtcaacacag

SEQ ID NO: 13231 - DNA, 30 bp, Artificial Sequence
  Synthetic oligonucleotide
cgatcacaaacgtaacgggagacagtgcag

SEQ ID NO: 13232 - DNA, 30 bp, Artificial Sequence
  Synthetic oligonucleotide
gaggaagcatgtccgacaatacggcgagag

SEQ ID NO: 13233 - DNA, 30 bp, Artificial Sequence
  Synthetic oligonucleotide
agatccgtgcgaactatgcccacaggagag

SEQ ID NO: 13234 - DNA, 30 bp, Artificial Sequence
  Synthetic oligonucleotide
gtatgcccaggaaaatgaaggttcgccgag

SEQ ID NO: 13235 - DNA, 30 bp, Artificial Sequence
  Synthetic oligonucleotide
agcaaacaagataagcgtatgtagtgcgag

SEQ ID NO: 13236 - DNA, 30 bp, Artificial Sequence
  Synthetic oligonucleotide
acaatgcgaattagccacaccgcatcggag

SEQ ID NO: 13237 - DNA, 30 bp, Artificial Sequence
  Synthetic oligonucleotide
ggcatgaaagatcggactcagtagtatgag

SEQ ID NO: 13238 - DNA, 30 bp, Artificial Sequence
  Synthetic oligonucleotide
aggtatcagcagtgcaacatcaaccctgag

SEQ ID NO: 13239 - DNA, 30 bp, Artificial Sequence
  Synthetic oligonucleotide
tactaaccttcacaggcagggaaccgtgag

SEQ ID NO: 13240 - DNA, 30 bp, Artificial Sequence
  Synthetic oligonucleotide
cgaggggtattcaaaggaatccagtaatag

SEQ ID NO: 13241 - DNA, 30 bp, Artificial Sequence
  Synthetic oligonucleotide
tgcaggatggctcgagtaagaatcgcatag

SEQ ID NO: 13242 - DNA, 30 bp, Artificial Sequence
  Synthetic oligonucleotide
ggcatcgagaccaagacttccctaaagtag

SEQ ID NO: 13243 - DNA, 30 bp, Artificial Sequence
  Synthetic oligonucleotide
agcgagaagggctgcccggtaaataggtag

SEQ ID NO: 13244 - DNA, 30 bp, Artificial Sequence
  Synthetic oligonucleotide
acgggagtgcggggcaaggaagcctattag

SEQ ID NO: 13245 - DNA, 30 bp, Artificial Sequence
  Synthetic oligonucleotide
tgaccacctcgccgtcgaaaatacccttag

SEQ ID NO: 13246 - DNA, 30 bp, Artificial Sequence
  Synthetic oligonucleotide
atagacaggtcctacgtcaagaggaaaacg

SEQ ID NO: 13247 - DNA, 30 bp, Artificial Sequence
  Synthetic oligonucleotide
tgatacagctaaaaccctaaagaggaaacg

SEQ ID NO: 13248 - DNA, 30 bp, Artificial Sequence
  Synthetic oligonucleotide
catcggggggtaaaaaagtacgagcacacg

SEQ ID NO: 13249 - DNA, 30 bp, Artificial Sequence
  Synthetic oligonucleotide
cgaaacgaaagccaaggcacgcatgacacg

SEQ ID NO: 13250 - DNA, 30 bp, Artificial Sequence
  Synthetic oligonucleotide
gcgaggaagaacatcacccacagaccgacg

SEQ ID NO: 13251 - DNA, 30 bp, Artificial Sequence
  Synthetic oligonucleotide
gcaaggagactggcgggatgtaaccatacg

SEQ ID NO: 13252 - DNA, 30 bp, Artificial Sequence
  Synthetic oligonucleotide
ggaagcattacagtcgagcatgagaaggcg

SEQ ID NO: 13253 - DNA, 30 bp, Artificial Sequence
  Synthetic oligonucleotide
catgagaatatcaaggccaggtcgcctgcg

SEQ ID NO: 13254 - DNA, 30 bp, Artificial Sequence
  Synthetic oligonucleotide
ccgagagatgggcagcaaagagatcgtgcg

SEQ ID NO: 13255 - DNA, 30 bp, Artificial Sequence
  Synthetic oligonucleotide
aaggagagcgaataaaagtctaaatcatcg

SEQ ID NO: 13256 - DNA, 30 bp, Artificial Sequence
  Synthetic oligonucleotide
cggaccatgctcaactgaatacagaactcg

SEQ ID NO: 13257 - DNA, 30 bp, Artificial Sequence
  Synthetic oligonucleotide
gggagcaagaaagttccggccacattgtcg

SEQ ID NO: 13258 - DNA, 30 bp, Artificial Sequence
  Synthetic oligonucleotide
tcttcccaaagaatcgaaacaataaattcg

SEQ ID NO: 13259 - DNA, 30 bp, Artificial Sequence
  Synthetic oligonucleotide
aggggccaagagatctcaatcaggggttcg

SEQ ID NO: 13260 - DNA, 30 bp, Artificial Sequence
  Synthetic oligonucleotide
ttatcgagggacaaagggggaggaatttcg

SEQ ID NO: 13261 - DNA, 30 bp, Artificial Sequence
  Synthetic oligonucleotide
agcctcacaaagaagaggatggctaaaagg

SEQ ID NO: 13262 - DNA, 30 bp, Artificial Sequence
  Synthetic oligonucleotide
tcaacgaagggtactgaatcgacttacagg

SEQ ID NO: 13263 - DNA, 30 bp, Artificial Sequence
  Synthetic oligonucleotide
cacaatgggcaaataggcatatctaccagg

SEQ ID NO: 13264 - DNA, 30 bp, Artificial Sequence
  Synthetic oligonucleotide
caagaggcttgtaataaagataatctcagg

SEQ ID NO: 13265 - DNA, 30 bp, Artificial Sequence
  Synthetic oligonucleotide
ggaaaaacggttcaaacacgaaggaagagg

SEQ ID NO: 13266 - DNA, 30 bp, Artificial Sequence
  Synthetic oligonucleotide
tgaggctgagtgggcctaacatcaaggagg

SEQ ID NO: 13267 - DNA, 30 bp, Artificial Sequence
  Synthetic oligonucleotide
aagaggtcgaagggcttcagcaagactagg

SEQ ID NO: 13268 - DNA, 30 bp, Artificial Sequence
  Synthetic oligonucleotide
cggaggaagggaaaagcgagaggagcccgg

SEQ ID NO: 13269 - DNA, 30 bp, Artificial Sequence
  Synthetic oligonucleotide
gtaaagagaaaatagctcgagtagtagcgg

SEQ ID NO: 13270 - DNA, 30 bp, Artificial Sequence
  Synthetic oligonucleotide
ctgtgcgaacaaaagccgaagtaagatcgg

SEQ ID NO: 13271 - DNA, 30 bp, Artificial Sequence
  Synthetic oligonucleotide
acggagacgaggtagaagttcgttctcggg

SEQ ID NO: 13272 - DNA, 30 bp, Artificial Sequence
  Synthetic oligonucleotide
agtagaaaatcggggccaaggtcgaaatgg

SEQ ID NO: 13273 - DNA, 30 bp, Artificial Sequence
  Synthetic oligonucleotide
aggaagactggctgcgtacaaaagacatgg

SEQ ID NO: 13274 - DNA, 30 bp, Artificial Sequence
  Synthetic oligonucleotide
taaggtgccaaacaataaacgatatactgg

SEQ ID NO: 13275 - DNA, 30 bp, Artificial Sequence
  Synthetic oligonucleotide
aggtagaaattgagagacatggggctgtgg

SEQ ID NO: 13276 - DNA, 30 bp, Artificial Sequence
  Synthetic oligonucleotide
acacggggagggaatcctcagccttaaatg

SEQ ID NO: 13277 - DNA, 30 bp, Artificial Sequence
  Synthetic oligonucleotide
ggtcagatgcctagagaagagagctacatg

SEQ ID NO: 13278 - DNA, 30 bp, Artificial Sequence
  Synthetic oligonucleotide
acgcgcgtgacctaatacggaatcgagatg

SEQ ID NO: 13279 - DNA, 30 bp, Artificial Sequence
  Synthetic oligonucleotide
cagaagatcatggaaaggcggctatcgatg

SEQ ID NO: 13280 - DNA, 30 bp, Artificial Sequence
  Synthetic oligonucleotide
acgtagagagcaccgtactcgtcataagtg

SEQ ID NO: 13281 - DNA, 30 bp, Artificial Sequence
  Synthetic oligonucleotide
tcaccaggaatcgccaaaaatttaacagtg

SEQ ID NO: 13282 - DNA, 30 bp, Artificial Sequence
  Synthetic oligonucleotide
cctgaaagttcaaaaaagaaagagtcagtg

SEQ ID NO: 13283 - DNA, 30 bp, Artificial Sequence
  Synthetic oligonucleotide
acgttattaggagaggaaagtgaataggtg

SEQ ID NO: 13284 - DNA, 30 bp, Artificial Sequence
  Synthetic oligonucleotide
ctagtgcgccataatggcgatccagagttg

SEQ ID NO: 13285 - DNA, 30 bp, Artificial Sequence
  Synthetic oligonucleotide
acacgcctgatggcgagagaatgaaagaat

SEQ ID NO: 13286 - DNA, 30 bp, Artificial Sequence
  Synthetic oligonucleotide
aacggagcacgcagggcaagaaacacgaat

SEQ ID NO: 13287 - DNA, 30 bp, Artificial Sequence
  Synthetic oligonucleotide
ccacacagtgcaaaccagagctaggcccat

SEQ ID NO: 13288 - DNA, 30 bp, Artificial Sequence
  Synthetic oligonucleotide
catggtgaagtaaagagtgtaagtagccat

SEQ ID NO: 13289 - DNA, 30 bp, Artificial Sequence
  Synthetic oligonucleotide
cgtctaaaacagtcaaggtggaaacgagat

SEQ ID NO: 13290 - DNA, 30 bp, Artificial Sequence
  Synthetic oligonucleotide
acgggagcgactcggaaccgcgacacatat

SEQ ID NO: 13291 - DNA, 30 bp, Artificial Sequence
  Synthetic oligonucleotide
tgggagcgagaaatgcgtgagaatacaact

SEQ ID NO: 13292 - DNA, 30 bp, Artificial Sequence
  Synthetic oligonucleotide
acgggatggacgtgggttactaagacgact

SEQ ID NO: 13293 - DNA, 30 bp, Artificial Sequence
  Synthetic oligonucleotide
cgagatgtgacctggaagacggtgggacct

SEQ ID NO: 13294 - DNA, 30 bp, Artificial Sequence
  Synthetic oligonucleotide
agggcggagccgtaaaaacgatcatatgct

SEQ ID NO: 13295 - DNA, 30 bp, Artificial Sequence
  Synthetic oligonucleotide
gtcgaaggggcaaaaacattaaaacagagt

SEQ ID NO: 13296 - DNA, 30 bp, Artificial Sequence
  Synthetic oligonucleotide
aagataaaccagagttacaccaacggtagt

SEQ ID NO: 13297 - DNA, 30 bp, Artificial Sequence
  Synthetic oligonucleotide
agaggggtaacggaaagaatagcgccaggt

SEQ ID NO: 13298 - DNA, 31 bp, Artificial Sequence
  Synthetic oligonucleotide
cggagagtatcagctagataacagggactgt

SEQ ID NO: 13299 - DNA, 30 bp, Artificial Sequence
  Synthetic oligonucleotide
cgacgacaaggggcaggcaggagcattctt

SEQ ID NO: 13300 - DNA, 30 bp, Artificial Sequence
  Synthetic oligonucleotide
taccggcaaggtggtatgcgaaaaggagtt

SEQ ID NO: 13301 - DNA, 30 bp, Artificial Sequence
  Synthetic oligonucleotide
cggaaatacaccagaaggagtgaactagtt

SEQ ID NO: 13302 - DNA, 30 bp, Artificial Sequence
  Synthetic oligonucleotide
agtaagagagtgataaattaacatgccgtt

SEQ ID NO: 13303 - DNA, 30 bp, Artificial Sequence
  Synthetic oligonucleotide
caacgagacgaggtccgagaaaggaatgtt

SEQ ID NO: 13304 - DNA, 30 bp, Artificial Sequence
  Synthetic oligonucleotide
acgatgacaggtaaagatgggatagatgtt

SEQ ID NO: 13305 - DNA, 30 bp, Artificial Sequence
  Synthetic oligonucleotide
acagaaagtcgaagtgggaataggtaaaaa

SEQ ID NO: 13306 - DNA, 30 bp, Artificial Sequence
  Synthetic oligonucleotide
gtgacatccgtcgaaagcaggcaggcaaaa

SEQ ID NO: 13307 - DNA, 30 bp, Artificial Sequence
  Synthetic oligonucleotide
ctgggatggcgaagacgagatccggtaaaa

SEQ ID NO: 13308 - DNA, 30 bp, Artificial Sequence
  Synthetic oligonucleotide
gggggaatgtccgaaaccgtcgtgcgcaaa

SEQ ID NO: 13309 - DNA, 30 bp, Artificial Sequence
  Synthetic oligonucleotide
cttgctgaacgatagaacaaagagtggaaa

SEQ ID NO: 13310 - DNA, 30 bp, Artificial Sequence
  Synthetic oligonucleotide
gcgaaattgcgaaggctagcagtggtgaaa

SEQ ID NO: 13311 - DNA, 30 bp, Artificial Sequence
  Synthetic oligonucleotide
gacaaaaggaagggacacgcatctaataaa

SEQ ID NO: 13312 - DNA, 30 bp, Artificial Sequence
  Synthetic oligonucleotide
cgagcaaactgctgagaccctgaaggtaaa

SEQ ID NO: 13313 - DNA, 30 bp, Artificial Sequence
  Synthetic oligonucleotide
tcttctcttgaaaaacataaaaagcaacaa

SEQ ID NO: 13314 - DNA, 30 bp, Artificial Sequence
  Synthetic oligonucleotide
gggaagagggacgtactcaggtatagccaa

SEQ ID NO: 13315 - DNA, 30 bp, Artificial Sequence
  Synthetic oligonucleotide
cgacagaagccgtaaaagtgatagctccaa

SEQ ID NO: 13316 - DNA, 30 bp, Artificial Sequence
  Synthetic oligonucleotide
agaggaggtatgaatcaagctcgacagcaa

SEQ ID NO: 13317 - DNA, 30 bp, Artificial Sequence
  Synthetic oligonucleotide
acggcggaagcctaagtcagaccaaggcaa

SEQ ID NO: 13318 - DNA, 30 bp, Artificial Sequence
  Synthetic oligonucleotide
agagagcgaacgagagggacaaggattcaa

SEQ ID NO: 13319 - DNA, 30 bp, Artificial Sequence
  Synthetic oligonucleotide
agtcgacaaaattgatgtgagccagaagaa

SEQ ID NO: 13320 - DNA, 30 bp, Artificial Sequence
  Synthetic oligonucleotide
acaaatcaggtgcacaaagcaatggaagaa

SEQ ID NO: 13321 - DNA, 30 bp, Artificial Sequence
  Synthetic oligonucleotide
ggcgtagccggcagtatgaaacttccagaa

SEQ ID NO: 13322 - DNA, 30 bp, Artificial Sequence
  Synthetic oligonucleotide
ggctcagcagacataggggtcaaagcagaa

SEQ ID NO: 13323 - DNA, 30 bp, Artificial Sequence
  Synthetic oligonucleotide
acagagggagggacatgtgactgctcagaa

SEQ ID NO: 13324 - DNA, 30 bp, Artificial Sequence
  Synthetic oligonucleotide
tactaccaaccaagctaaaaggcaagcgaa

SEQ ID NO: 13325 - DNA, 30 bp, Artificial Sequence
  Synthetic oligonucleotide
gaacacacggggcaaagagtagaaaaggaa

SEQ ID NO: 13326 - DNA, 30 bp, Artificial Sequence
  Synthetic oligonucleotide
tcaaggggtaaatctgagacaaaaccggaa

SEQ ID NO: 13327 - DNA, 30 bp, Artificial Sequence
  Synthetic oligonucleotide
tcagaaagacaaaagtcacacggaattgaa

SEQ ID NO: 13328 - DNA, 30 bp, Artificial Sequence
  Synthetic oligonucleotide
tgagggcagaacaggcaccaatatagataa

SEQ ID NO: 13329 - DNA, 30 bp, Artificial Sequence
  Synthetic oligonucleotide
cgaacacgaagcagctaacgagagttctaa

SEQ ID NO: 13330 - DNA, 30 bp, Artificial Sequence
  Synthetic oligonucleotide
gaccgaagtacctagccaagaagtgcgtaa

SEQ ID NO: 13331 - DNA, 30 bp, Artificial Sequence
  Synthetic oligonucleotide
cagacaagacgacatatcagtaacaggtaa

SEQ ID NO: 13332 - DNA, 30 bp, Artificial Sequence
  Synthetic oligonucleotide
cgagggggtaggatctaagagcaccgtaca

SEQ ID NO: 13333 - DNA, 30 bp, Artificial Sequence
  Synthetic oligonucleotide
tccgtaaaagagagtagacgtccagaccca

SEQ ID NO: 13334 - DNA, 30 bp, Artificial Sequence
  Synthetic oligonucleotide
ggctacgagatacggaagacacgatatcca

SEQ ID NO: 13335 - DNA, 30 bp, Artificial Sequence
  Synthetic oligonucleotide
tcgaaagtgaagtggccagagggtggtcca

SEQ ID NO: 13336 - DNA, 30 bp, Artificial Sequence
  Synthetic oligonucleotide
caaggaataagtggcaaggacgatccagca

SEQ ID NO: 13337 - DNA, 30 bp, Artificial Sequence
  Synthetic oligonucleotide
tcacgtagtaaaagtcggcaatagagagca

SEQ ID NO: 13338 - DNA, 30 bp, Artificial Sequence
  Synthetic oligonucleotide
taccaatacagcaaagaaatagatctagca

SEQ ID NO: 13339 - DNA, 30 bp, Artificial Sequence
  Synthetic oligonucleotide
atggtgaaagctaaacactaagacagctca

SEQ ID NO: 13340 - DNA, 30 bp, Artificial Sequence
  Synthetic oligonucleotide
caataatcagaatcaaaagaggaggtgtca

SEQ ID NO: 13341 - DNA, 30 bp, Artificial Sequence
  Synthetic oligonucleotide
tagcccgaaacgatacggaaaaaaggttca

SEQ ID NO: 13342 - DNA, 30 bp, Artificial Sequence
  Synthetic oligonucleotide
ggacgaaccgtatcacaaagctgaaaaaga

SEQ ID NO: 13343 - DNA, 30 bp, Artificial Sequence
  Synthetic oligonucleotide
aaggatccaaaagcctgagcgcatacaaga

SEQ ID NO: 13344 - DNA, 30 bp, Artificial Sequence
  Synthetic oligonucleotide
atgcgcgttaagcgtcggcaaagaggaaga

SEQ ID NO: 13345 - DNA, 30 bp, Artificial Sequence
  Synthetic oligonucleotide
aagagcatggtctggaggaacggcaacaga

SEQ ID NO: 13346 - DNA, 30 bp, Artificial Sequence
  Synthetic oligonucleotide
ggaggacaataccgtcttccaacgatcaga

SEQ ID NO: 13347 - DNA, 30 bp, Artificial Sequence
  Synthetic oligonucleotide
tgatgggaagatgaaggtaggctgaagaga

SEQ ID NO: 13348 - DNA, 30 bp, Artificial Sequence
  Synthetic oligonucleotide
acacattgaaagttcgagctaggctagaga

SEQ ID NO: 13349 - DNA, 30 bp, Artificial Sequence
  Synthetic oligonucleotide
atggtaacggattgcggcctgagcgcgaga

SEQ ID NO: 13350 - DNA, 30 bp, Artificial Sequence
  Synthetic oligonucleotide
agaggcaaggcgcaattagcagggcataga

SEQ ID NO: 13351 - DNA, 30 bp, Artificial Sequence
  Synthetic oligonucleotide
acaggatagcaggcagaggtaagtcataga

SEQ ID NO: 13352 - DNA, 30 bp, Artificial Sequence
  Synthetic oligonucleotide
aggagaaagacccttagtcacagataacga

SEQ ID NO: 13353 - DNA, 30 bp, Artificial Sequence
  Synthetic oligonucleotide
aaagaagaggaatgaaatcggagttggcga

SEQ ID NO: 13354 - DNA, 30 bp, Artificial Sequence
  Synthetic oligonucleotide
agtcataacaagaatgaaagactcgcagga

SEQ ID NO: 13355 - DNA, 30 bp, Artificial Sequence
  Synthetic oligonucleotide
tcgtgaatggtcaaaccaaatggcagggga

SEQ ID NO: 13356 - DNA, 40 bp, Artificial Sequence
  Synthetic oligonucleotide
aagataatacattcatggtatggtcggagatcggggggga

SEQ ID NO: 13357 - DNA, 30 bp, Artificial Sequence
  Synthetic oligonucleotide
gtgagggaccaagtagcacttgagacgtga

SEQ ID NO: 13358 - DNA, 30 bp, Artificial Sequence
  Synthetic oligonucleotide
cgacggcaactggccgagggggaactgtga

SEQ ID NO: 13359 - DNA, 30 bp, Artificial Sequence
  Synthetic oligonucleotide
caaagctccaaacactaaaagcacagaata

SEQ ID NO: 13360 - DNA, 30 bp, Artificial Sequence
  Synthetic oligonucleotide
cacgaagacggaaaggaataaagggacata

SEQ ID NO: 13361 - DNA, 30 bp, Artificial Sequence
  Synthetic oligonucleotide
gatcaaagcacctgaggacaagcaaagata

SEQ ID NO: 13362 - DNA, 30 bp, Artificial Sequence
  Synthetic oligonucleotide
cgggaggcaataatacacccatgagcgata

SEQ ID NO: 13363 - DNA, 30 bp, Artificial Sequence
  Synthetic oligonucleotide
tgacgaccaagcaacgagaacgatgtgata

SEQ ID NO: 13364 - DNA, 30 bp, Artificial Sequence
  Synthetic oligonucleotide
ggtgggtgaagagcgaatccagcggcacta

SEQ ID NO: 13365 - DNA, 30 bp, Artificial Sequence
  Synthetic oligonucleotide
ctgaggctcacaaagaaacccagacagcta

SEQ ID NO: 13366 - DNA, 30 bp, Artificial Sequence
  Synthetic oligonucleotide
gcgagggtagcgaacgggtgataatagcta

SEQ ID NO: 13367 - DNA, 30 bp, Artificial Sequence
  Synthetic oligonucleotide
atcagaggaaacaggaggataaggacagta

SEQ ID NO: 13368 - DNA, 30 bp, Artificial Sequence
  Synthetic oligonucleotide
gctcaaagaaggcgaaggatccgagtagta

SEQ ID NO: 13369 - DNA, 30 bp, Artificial Sequence
  Synthetic oligonucleotide
cggcaaaatccgagactagagtaattcgta

SEQ ID NO: 13370 - DNA, 30 bp, Artificial Sequence
  Synthetic oligonucleotide
atacagaaaaatgaagaaaaaagagctgta

SEQ ID NO: 13371 - DNA, 30 bp, Artificial Sequence
  Synthetic oligonucleotide
cgaggaaaatagacagtagcacacacatta

SEQ ID NO: 13372 - DNA, 30 bp, Artificial Sequence
  Synthetic oligonucleotide
cgcggaaatcaacgggagcgagtactctta

SEQ ID NO: 13373 - DNA, 30 bp, Artificial Sequence
  Synthetic oligonucleotide
cggcaatcgtcacaagaggactgttagaac

SEQ ID NO: 13374 - DNA, 30 bp, Artificial Sequence
  Synthetic oligonucleotide
aaggtccagaagggaagactcgaaagtaac

SEQ ID NO: 13375 - DNA, 30 bp, Artificial Sequence
  Synthetic oligonucleotide
acgacgaaattggacggcacaacccaacac

SEQ ID NO: 13376 - DNA, 30 bp, Artificial Sequence
  Synthetic oligonucleotide
agcgaaaatcgaaaggcacggcaatcacac

SEQ ID NO: 13377 - DNA, 30 bp, Artificial Sequence
  Synthetic oligonucleotide
atgggcattcgagaaagagtgtcaccgcac

SEQ ID NO: 13378 - DNA, 30 bp, Artificial Sequence
  Synthetic oligonucleotide
ggcgagggagcccagcaatcaaagtaagac

SEQ ID NO: 13379 - DNA, 31 bp, Artificial Sequence
  Synthetic oligonucleotide
taacgccgtaaacagagacagacgatcagac

SEQ ID NO: 13380 - DNA, 30 bp, Artificial Sequence
  Synthetic oligonucleotide
tggatttgtcaggaagagtgatggggagac

SEQ ID NO: 13381 - DNA, 30 bp, Artificial Sequence
  Synthetic oligonucleotide
ggaagagaggagatacgaagctaactagac

SEQ ID NO: 13382 - DNA, 30 bp, Artificial Sequence
  Synthetic oligonucleotide
acgtgaatgagaaacgaaaaacaatctgac

SEQ ID NO: 13383 - DNA, 30 bp, Artificial Sequence
  Synthetic oligonucleotide
ccacgggaggacaacgaatacacgtgatac

SEQ ID NO: 13384 - DNA, 30 bp, Artificial Sequence
  Synthetic oligonucleotide
cgtgatgacaagggtgacccaaagctagcc

SEQ ID NO: 13385 - DNA, 30 bp, Artificial Sequence
  Synthetic oligonucleotide
taactgcatagcagaaaacgtgaacaggcc

SEQ ID NO: 13386 - DNA, 30 bp, Artificial Sequence
  Synthetic oligonucleotide
tcatccgcccgcgaaaaaagggacgaggcc

SEQ ID NO: 13387 - DNA, 30 bp, Artificial Sequence
  Synthetic oligonucleotide
agaaaccacagacaacaagctcgtaatgcc

SEQ ID NO: 13388 - DNA, 30 bp, Artificial Sequence
  Synthetic oligonucleotide
tgagaaaatctggaaagcgaaataacgagc

SEQ ID NO: 13389 - DNA, 30 bp, Artificial Sequence
  Synthetic oligonucleotide
cagattagaagatgggaatgagggagtagc

SEQ ID NO: 13390 - DNA, 30 bp, Artificial Sequence
  Synthetic oligonucleotide
ctaggacaaactgagctcaagcatggtagc

SEQ ID NO: 13391 - DNA, 30 bp, Artificial Sequence
  Synthetic oligonucleotide
aggtaaccgaacttaggacgacatcctcgc

SEQ ID NO: 13392 - DNA, 30 bp, Artificial Sequence
  Synthetic oligonucleotide
ggcgaataggtatagatccaaagatgtcgc

SEQ ID NO: 13393 - DNA, 30 bp, Artificial Sequence
  Synthetic oligonucleotide
ggacaagggaagagtaaacttatgtccggc

SEQ ID NO: 13394 - DNA, 30 bp, Artificial Sequence
  Synthetic oligonucleotide
ccaagaggaattgaaacaagatgagagggc

SEQ ID NO: 13395 - DNA, 30 bp, Artificial Sequence
  Synthetic oligonucleotide
agcgaaggaatgcaccggaggagttgatgc

SEQ ID NO: 13396 - DNA, 30 bp, Artificial Sequence
  Synthetic oligonucleotide
ggcacgggcgaaaaatctcagccttcctgc

SEQ ID NO: 13397 - DNA, 30 bp, Artificial Sequence
  Synthetic oligonucleotide
cgagagaccaatataaacggggtaaggtgc

SEQ ID NO: 13398 - DNA, 30 bp, Artificial Sequence
  Synthetic oligonucleotide
ggaagtctacacattaaagaggaacacatc

SEQ ID NO: 13399 - DNA, 30 bp, Artificial Sequence
  Synthetic oligonucleotide
cggccgaaaggtgacgagaaattatcgatc

SEQ ID NO: 13400 - DNA, 31 bp, Artificial Sequence
  Synthetic oligonucleotide
gggtaggaggacaagaaatatgaatactatc

SEQ ID NO: 13401 - DNA, 30 bp, Artificial Sequence
  Synthetic oligonucleotide
tgaagagctacaaacggtagttaggaaaag

SEQ ID NO: 13402 - DNA, 30 bp, Artificial Sequence
  Synthetic oligonucleotide
cggtgtaagcgaacccgacgaaaccgaaag

SEQ ID NO: 13403 - DNA, 30 bp, Artificial Sequence
  Synthetic oligonucleotide
tcgaccgtcgagggttgcgggccgctaaag

SEQ ID NO: 13404 - DNA, 30 bp, Artificial Sequence
  Synthetic oligonucleotide
tactaagacaaacaaactcgtgaaaacaag

SEQ ID NO: 13405 - DNA, 30 bp, Artificial Sequence
  Synthetic oligonucleotide
agaggtaagagggcgcgcaggtcctgcaag

SEQ ID NO: 13406 - DNA, 30 bp, Artificial Sequence
  Synthetic oligonucleotide
ggccaacctcaaagatgaacaaacctcaag

SEQ ID NO: 13407 - DNA, 30 bp, Artificial Sequence
  Synthetic oligonucleotide
cggaatgcctagccaggttgaaaaaagaag

SEQ ID NO: 13408 - DNA, 30 bp, Artificial Sequence
  Synthetic oligonucleotide
ttacgaggcataagggaggacaaacagaag

SEQ ID NO: 13409 - DNA, 30 bp, Artificial Sequence
  Synthetic oligonucleotide
gcccgagaggaacggaaattacgccagaag

SEQ ID NO: 13410 - DNA, 30 bp, Artificial Sequence
  Synthetic oligonucleotide
caatcggaagggatcacatagaattagaag

SEQ ID NO: 13411 - DNA, 30 bp, Artificial Sequence
  Synthetic oligonucleotide
aagcgaaggacattggggacattggtgaag

SEQ ID NO: 13412 - DNA, 30 bp, Artificial Sequence
  Synthetic oligonucleotide
cgacagccatgtaaggagggcagtaataag

SEQ ID NO: 13413 - DNA, 30 bp, Artificial Sequence
  Synthetic oligonucleotide
ggggacaaaggacacaaacccacccataag

SEQ ID NO: 13414 - DNA, 30 bp, Artificial Sequence
  Synthetic oligonucleotide
ggcgaagtgagcataggcatactagttaag

SEQ ID NO: 13415 - DNA, 30 bp, Artificial Sequence
  Synthetic oligonucleotide
acgactgcgcggaagaaagaatagtttaag

SEQ ID NO: 13416 - DNA, 30 bp, Artificial Sequence
  Synthetic oligonucleotide
agggttgaggaacgcaaccgatatcaacag

SEQ ID NO: 13417 - DNA, 30 bp, Artificial Sequence
  Synthetic oligonucleotide
taaaagagagaacggatgaccttaacccag

SEQ ID NO: 13418 - DNA, 30 bp, Artificial Sequence
  Synthetic oligonucleotide
cacgtcaatgaaagagaagccaaatcccag

SEQ ID NO: 13419 - DNA, 30 bp, Artificial Sequence
  Synthetic oligonucleotide
ccctagaggaacagaggaggtgaccgtcag

SEQ ID NO: 13420 - DNA, 30 bp, Artificial Sequence
  Synthetic oligonucleotide
cgcgagaaataccgcgagtacaggggagag

SEQ ID NO: 13421 - DNA, 30 bp, Artificial Sequence
  Synthetic oligonucleotide
aggaaacaatcttggtgggaagagctagag

SEQ ID NO: 13422 - DNA, 30 bp, Artificial Sequence
  Synthetic oligonucleotide
caacgacgtaacatagtgctcatgaaggag

SEQ ID NO: 13423 - DNA, 30 bp, Artificial Sequence
  Synthetic oligonucleotide
tcacatggacataggaataacgcgacggag

SEQ ID NO: 13424 - DNA, 30 bp, Artificial Sequence
  Synthetic oligonucleotide
ggtaccggcgaatgaaatgcatctacggag

SEQ ID NO: 13425 - DNA, 30 bp, Artificial Sequence
  Synthetic oligonucleotide
gaagcggccatcgcaatccaaacaagggag

SEQ ID NO: 13426 - DNA, 30 bp, Artificial Sequence
  Synthetic oligonucleotide
agagattgatgtgcggggagcgcaagggag

SEQ ID NO: 13427 - DNA, 30 bp, Artificial Sequence
  Synthetic oligonucleotide
ggcgtcccagagagcgggaagcgaagggag

SEQ ID NO: 13428 - DNA, 30 bp, Artificial Sequence
  Synthetic oligonucleotide
taggaagactcacgtgagacaggaactgag

SEQ ID NO: 13429 - DNA, 30 bp, Artificial Sequence
  Synthetic oligonucleotide
agataaggaaggtgccaagagtttgcatag

SEQ ID NO: 13430 - DNA, 30 bp, Artificial Sequence
  Synthetic oligonucleotide
ccaagagctaatgcgggaatgcaacgatag

SEQ ID NO: 13431 - DNA, 30 bp, Artificial Sequence
  Synthetic oligonucleotide
actgacgttaataccagagggtcagactag

SEQ ID NO: 13432 - DNA, 30 bp, Artificial Sequence
  Synthetic oligonucleotide
aactggaacacaagttgccgaagacagtag

SEQ ID NO: 13433 - DNA, 30 bp, Artificial Sequence
  Synthetic oligonucleotide
caccaggacagatttaagagcacactgtag

SEQ ID NO: 13434 - DNA, 30 bp, Artificial Sequence
  Synthetic oligonucleotide
ttggatgcggaagaaaagcaacattgttag

SEQ ID NO: 13435 - DNA, 30 bp, Artificial Sequence
  Synthetic oligonucleotide
tgcgtgacatgaaaacaagaacacataacg

SEQ ID NO: 13436 - DNA, 30 bp, Artificial Sequence
  Synthetic oligonucleotide
ctaagtggaataaacagcgcggacaacacg

SEQ ID NO: 13437 - DNA, 30 bp, Artificial Sequence
  Synthetic oligonucleotide
cacgcttacatgaaacgaaaatgaaccacg

SEQ ID NO: 13438 - DNA, 30 bp, Artificial Sequence
  Synthetic oligonucleotide
catcagggagggactaaggcgtaccccacg

SEQ ID NO: 13439 - DNA, 30 bp, Artificial Sequence
  Synthetic oligonucleotide
agcacacatatgtacgaatcccaaagcacg

SEQ ID NO: 13440 - DNA, 30 bp, Artificial Sequence
  Synthetic oligonucleotide
tcgaatacgttgggagtgagagataaaccg

SEQ ID NO: 13441 - DNA, 30 bp, Artificial Sequence
  Synthetic oligonucleotide
cgaagcgagtaaggcatcaccataccagcg

SEQ ID NO: 13442 - DNA, 30 bp, Artificial Sequence
  Synthetic oligonucleotide
caaaatcgagttcacgaagagtaggaggcg

SEQ ID NO: 13443 - DNA, 30 bp, Artificial Sequence
  Synthetic oligonucleotide
ggagaaagctaatcaagcaaggcgatggcg

SEQ ID NO: 13444 - DNA, 30 bp, Artificial Sequence
  Synthetic oligonucleotide
ccaaaacgaacaagtcaatttcacgaatcg

SEQ ID NO: 13445 - DNA, 30 bp, Artificial Sequence
  Synthetic oligonucleotide
cgtaagatcgcgtggatatgaagacagtcg

SEQ ID NO: 13446 - DNA, 30 bp, Artificial Sequence
  Synthetic oligonucleotide
aggagataggaacggcatgctccgtcttcg

SEQ ID NO: 13447 - DNA, 30 bp, Artificial Sequence
  Synthetic oligonucleotide
cggataatagggaacaaacatgcaaaaagg

SEQ ID NO: 13448 - DNA, 30 bp, Artificial Sequence
  Synthetic oligonucleotide
agggctgagtgtgctgatcaatcctaaagg

SEQ ID NO: 13449 - DNA, 30 bp, Artificial Sequence
  Synthetic oligonucleotide
caggccagaccgtcgcacaaaaccacaagg

SEQ ID NO: 13450 - DNA, 30 bp, Artificial Sequence
  Synthetic oligonucleotide
catggttagagtaaacgccgaccgacaagg

SEQ ID NO: 13451 - DNA, 30 bp, Artificial Sequence
  Synthetic oligonucleotide
taagcaagcctcggaaaagacggatgaagg

SEQ ID NO: 13452 - DNA, 31 bp, Artificial Sequence
  Synthetic oligonucleotide
gaccagaacgaagtcggtaaccgtcgccagg

SEQ ID NO: 13453 - DNA, 30 bp, Artificial Sequence
  Synthetic oligonucleotide
atgtcacgtattacgaatctccgatccagg

SEQ ID NO: 13454 - DNA, 30 bp, Artificial Sequence
  Synthetic oligonucleotide
caagccggccaggggctacaactgaagagg

SEQ ID NO: 13455 - DNA, 30 bp, Artificial Sequence
  Synthetic oligonucleotide
tgataagtagtaggaaaagtataaagtagg

SEQ ID NO: 13456 - DNA, 30 bp, Artificial Sequence
  Synthetic oligonucleotide
agacagggattacgagaataccgaaaacgg

SEQ ID NO: 13457 - DNA, 30 bp, Artificial Sequence
  Synthetic oligonucleotide
agagaacgaatctgcatcatgaccctacgg

SEQ ID NO: 13458 - DNA, 30 bp, Artificial Sequence
  Synthetic oligonucleotide
agaaaaaagggggtgacaaaggaacgtcgg

SEQ ID NO: 13459 - DNA, 30 bp, Artificial Sequence
  Synthetic oligonucleotide
ttataggcgaaatatcgtaaccaaaaaggg

SEQ ID NO: 13460 - DNA, 30 bp, Artificial Sequence
  Synthetic oligonucleotide
agtggacggactaaaatattcagaagaggg

SEQ ID NO: 13461 - DNA, 30 bp, Artificial Sequence
  Synthetic oligonucleotide
acaagacaccacgagattgctagcggaggg

SEQ ID NO: 13462 - DNA, 30 bp, Artificial Sequence
  Synthetic oligonucleotide
cgaagaagcgaggcgtccaatttcaacggg

SEQ ID NO: 13463 - DNA, 30 bp, Artificial Sequence
  Synthetic oligonucleotide
caaaagcaaaaacttccgatacgtaagggg

SEQ ID NO: 13464 - DNA, 30 bp, Artificial Sequence
  Synthetic oligonucleotide
ccaatcaagcacaagacaggcagggagggg

SEQ ID NO: 13465 - DNA, 30 bp, Artificial Sequence
  Synthetic oligonucleotide
ggcaagtagtgttccgttagcaaaaatggg

SEQ ID NO: 13466 - DNA, 30 bp, Artificial Sequence
  Synthetic oligonucleotide
aagagggggcgaccgcgtatgcggagatgg

SEQ ID NO: 13467 - DNA, 30 bp, Artificial Sequence
  Synthetic oligonucleotide
tcgaagggagttgtcacgaaaagggtatgg

SEQ ID NO: 13468 - DNA, 30 bp, Artificial Sequence
  Synthetic oligonucleotide
cacacaagataagtcaacgtgccagtgtgg

SEQ ID NO: 13469 - DNA, 30 bp, Artificial Sequence
  Synthetic oligonucleotide
aaggagaaacgagagtgttctcaggtgtgg

SEQ ID NO: 13470 - DNA, 30 bp, Artificial Sequence
  Synthetic oligonucleotide
cacgaacaaatgctagcgcacctccacatg

SEQ ID NO: 13471 - DNA, 30 bp, Artificial Sequence
  Synthetic oligonucleotide
gaaaggacagggtagagaggcactgcgatg

SEQ ID NO: 13472 - DNA, 30 bp, Artificial Sequence
  Synthetic oligonucleotide
ccgaacattaagtagataagtaatcggatg

SEQ ID NO: 13473 - DNA, 30 bp, Artificial Sequence
  Synthetic oligonucleotide
ggcgtatacaacatcgattgcgaataactg

SEQ ID NO: 13474 - DNA, 30 bp, Artificial Sequence
  Synthetic oligonucleotide
acgaatcacctcagaggacgttaatagctg

SEQ ID NO: 13475 - DNA, 30 bp, Artificial Sequence
  Synthetic oligonucleotide
caatggccaacatatgactcgagaaaagtg

SEQ ID NO: 13476 - DNA, 30 bp, Artificial Sequence
  Synthetic oligonucleotide
cagaggagtcaatgcgggccaaaggaagtg

SEQ ID NO: 13477 - DNA, 30 bp, Artificial Sequence
  Synthetic oligonucleotide
gcctcgagcaacaagttcgggcaatcagtg

SEQ ID NO: 13478 - DNA, 30 bp, Artificial Sequence
  Synthetic oligonucleotide
tcgaagaagacggttggcaaaaattcagtg

SEQ ID NO: 13479 - DNA, 30 bp, Artificial Sequence
  Synthetic oligonucleotide
ggcacgaggaggaaaccaatgagcgcggtg

SEQ ID NO: 13480 - DNA, 30 bp, Artificial Sequence
  Synthetic oligonucleotide
aagactgatggaaaagacagagatcatgtg

SEQ ID NO: 13481 - DNA, 30 bp, Artificial Sequence
  Synthetic oligonucleotide
aggatcgaaaaagggatgggagataaattg

SEQ ID NO: 13482 - DNA, 30 bp, Artificial Sequence
  Synthetic oligonucleotide
acacggagttgtgtaaaaggaaagtcattg

SEQ ID NO: 13483 - DNA, 31 bp, Artificial Sequence
  Synthetic oligonucleotide
gcacgcgggctgacgagaaatggagtacttg

SEQ ID NO: 13484 - DNA, 30 bp, Artificial Sequence
  Synthetic oligonucleotide
cctaggacactagaacagagacagctcaat

SEQ ID NO: 13485 - DNA, 30 bp, Artificial Sequence
  Synthetic oligonucleotide
gggaccaacagtagggatggaaagaagaat

SEQ ID NO: 13486 - DNA, 30 bp, Artificial Sequence
  Synthetic oligonucleotide
agatggaccatcaacaagagcgaacaacat

SEQ ID NO: 13487 - DNA, 30 bp, Artificial Sequence
  Synthetic oligonucleotide
acggcctcaagcgagaaagcaatctaacat

SEQ ID NO: 13488 - DNA, 30 bp, Artificial Sequence
  Synthetic oligonucleotide
tctcactgggagcgaagagagaggtaacat

SEQ ID NO: 13489 - DNA, 30 bp, Artificial Sequence
  Synthetic oligonucleotide
gagcgagagaggctgaataaggttgcgcat

SEQ ID NO: 13490 - DNA, 30 bp, Artificial Sequence
  Synthetic oligonucleotide
agggggaaatgtgaaactagcagttggcat

SEQ ID NO: 13491 - DNA, 30 bp, Artificial Sequence
  Synthetic oligonucleotide
catgagggacgttaactaaaggggcaagat

SEQ ID NO: 13492 - DNA, 30 bp, Artificial Sequence
  Synthetic oligonucleotide
tggcatgcaaagaagattaagtgaacggat

SEQ ID NO: 13493 - DNA, 30 bp, Artificial Sequence
  Synthetic oligonucleotide
ggaggtgaaccaactgtgcgctgaagtgat

SEQ ID NO: 13494 - DNA, 30 bp, Artificial Sequence
  Synthetic oligonucleotide
ccacagaaagaggtagcgagtaactgatat

SEQ ID NO: 13495 - DNA, 30 bp, Artificial Sequence
  Synthetic oligonucleotide
taggcagagcggaaaagggtaaagcccact

SEQ ID NO: 13496 - DNA, 30 bp, Artificial Sequence
  Synthetic oligonucleotide
agaacagaagaaggcagggcggacagacct

SEQ ID NO: 13497 - DNA, 30 bp, Artificial Sequence
  Synthetic oligonucleotide
tggcaatgagtagaacagcgggggtaggct

SEQ ID NO: 13498 - DNA, 30 bp, Artificial Sequence
  Synthetic oligonucleotide
tcgcccaaacgaatacgtaacctgagtgct

SEQ ID NO: 13499 - DNA, 30 bp, Artificial Sequence
  Synthetic oligonucleotide
cggaacgagatagaagaatggacaaaaagt

SEQ ID NO: 13500 - DNA, 30 bp, Artificial Sequence
  Synthetic oligonucleotide
cgtaaaaaggagtagacaggctagtaaagt

SEQ ID NO: 13501 - DNA, 30 bp, Artificial Sequence
  Synthetic oligonucleotide
cgagtgagaagaggttatggcagcccgagt

SEQ ID NO: 13502 - DNA, 30 bp, Artificial Sequence
  Synthetic oligonucleotide
gtcagagagaatatgagtgcgccgccgagt

SEQ ID NO: 13503 - DNA, 30 bp, Artificial Sequence
  Synthetic oligonucleotide
aggaacacgcgtaaagggcgcactgctagt

SEQ ID NO: 13504 - DNA, 30 bp, Artificial Sequence
  Synthetic oligonucleotide
cgggggtggaacaactaatcgtaaaaacgt

SEQ ID NO: 13505 - DNA, 30 bp, Artificial Sequence
  Synthetic oligonucleotide
gcgagataaaccagtgactgaagccggggt

SEQ ID NO: 13506 - DNA, 30 bp, Artificial Sequence
  Synthetic oligonucleotide
actgagaacacgagaagataagcaaatggt

SEQ ID NO: 13507 - DNA, 30 bp, Artificial Sequence
  Synthetic oligonucleotide
aggggaggggcgcctctccgtaatgagtgt

SEQ ID NO: 13508 - DNA, 30 bp, Artificial Sequence
  Synthetic oligonucleotide
tggaaagcggccaaacacaaagctagactt

SEQ ID NO: 13509 - DNA, 30 bp, Artificial Sequence
  Synthetic oligonucleotide
agggaccgaggatcaacacacagacgtctt

SEQ ID NO: 13510 - DNA, 30 bp, Artificial Sequence
  Synthetic oligonucleotide
acgtaagggcacgattctatggtgtcaaaa

SEQ ID NO: 13511 - DNA, 30 bp, Artificial Sequence
  Synthetic oligonucleotide
cgcaatcggcgtaagcaaggctgaaacaaa

SEQ ID NO: 13512 - DNA, 30 bp, Artificial Sequence
  Synthetic oligonucleotide
gctaagtcaaactaatatacaaagcgcaaa

SEQ ID NO: 13513 - DNA, 30 bp, Artificial Sequence
  Synthetic oligonucleotide
ggcggaacgtctggatacattgcaggcaaa

SEQ ID NO: 13514 - DNA, 30 bp, Artificial Sequence
  Synthetic oligonucleotide
ggtgggaatcaacataagaccgtaaagaaa

SEQ ID NO: 13515 - DNA, 30 bp, Artificial Sequence
  Synthetic oligonucleotide
acggggcagatatcgagggagaagaagaaa

SEQ ID NO: 13516 - DNA, 30 bp, Artificial Sequence
  Synthetic oligonucleotide
ctgacagactggatggaaagggaatagaaa

SEQ ID NO: 13517 - DNA, 30 bp, Artificial Sequence
  Synthetic oligonucleotide
gacggaaacaaggccatggggcactagaaa

SEQ ID NO: 13518 - DNA, 30 bp, Artificial Sequence
  Synthetic oligonucleotide
ccaagatcggatagaaaaccaaggtagaaa

SEQ ID NO: 13519 - DNA, 30 bp, Artificial Sequence
  Synthetic oligonucleotide
agaagtaggtgaaatcgtgcgggtgcgaaa

SEQ ID NO: 13520 - DNA, 30 bp, Artificial Sequence
  Synthetic oligonucleotide
gaagggcagggactcccgtagcacatgaaa

SEQ ID NO: 13521 - DNA, 30 bp, Artificial Sequence
  Synthetic oligonucleotide
ataagactggaaggatagatccccgaacaa

SEQ ID NO: 13522 - DNA, 30 bp, Artificial Sequence
  Synthetic oligonucleotide
gtgaggagagtcaacatcataaccggacaa

SEQ ID NO: 13523 - DNA, 30 bp, Artificial Sequence
  Synthetic oligonucleotide
cacggatcactcagcgataaagagacccaa

SEQ ID NO: 13524 - DNA, 30 bp, Artificial Sequence
  Synthetic oligonucleotide
cgaagcaggggacaatagttagcgagccaa

SEQ ID NO: 13525 - DNA, 30 bp, Artificial Sequence
  Synthetic oligonucleotide
taggagggataagcaattgcgcgagtccaa

SEQ ID NO: 13526 - DNA, 30 bp, Artificial Sequence
  Synthetic oligonucleotide
acactgatccagtaaggtaaacggaagcaa

SEQ ID NO: 13527 - DNA, 30 bp, Artificial Sequence
  Synthetic oligonucleotide
tcggagaccacggaattcaggagcaatcaa

SEQ ID NO: 13528 - DNA, 30 bp, Artificial Sequence
  Synthetic oligonucleotide
ggtaataaaacggaccaaaagggcacagaa

SEQ ID NO: 13529 - DNA, 30 bp, Artificial Sequence
  Synthetic oligonucleotide
taggagggctggaaagcggtagatcgagaa

SEQ ID NO: 13530 - DNA, 30 bp, Artificial Sequence
  Synthetic oligonucleotide
cgaacggcgaataataaggatgtacgcgaa

SEQ ID NO: 13531 - DNA, 30 bp, Artificial Sequence
  Synthetic oligonucleotide
cgggatggaactgtcacactgatgatcgaa

SEQ ID NO: 13532 - DNA, 30 bp, Artificial Sequence
  Synthetic oligonucleotide
atgaggggaagaactcgacgattcaatgaa

SEQ ID NO: 13533 - DNA, 30 bp, Artificial Sequence
  Synthetic oligonucleotide
aacgggatcggacaccacgaattgagtgaa

SEQ ID NO: 13534 - DNA, 30 bp, Artificial Sequence
  Synthetic oligonucleotide
tgcaaggcaagggtgaaaatcaagtaataa

SEQ ID NO: 13535 - DNA, 30 bp, Artificial Sequence
  Synthetic oligonucleotide
caggagtgagggcgaatcaaccggtgataa

SEQ ID NO: 13536 - DNA, 30 bp, Artificial Sequence
  Synthetic oligonucleotide
tcgaaacacaaattaagttaggcaataaca

SEQ ID NO: 13537 - DNA, 30 bp, Artificial Sequence
  Synthetic oligonucleotide
aacgggtaaaactaagggcaaagcgtaaca

SEQ ID NO: 13538 - DNA, 30 bp, Artificial Sequence
  Synthetic oligonucleotide
aagggcgcaagaacagcaaagttccataca

SEQ ID NO: 13539 - DNA, 30 bp, Artificial Sequence
  Synthetic oligonucleotide
cagtaaggcccgaaacaaataaacagccca

SEQ ID NO: 13540 - DNA, 30 bp, Artificial Sequence
  Synthetic oligonucleotide
gagattgtgcaagaacgaagagtgcgccca

SEQ ID NO: 13541 - DNA, 30 bp, Artificial Sequence
  Synthetic oligonucleotide
agggagggttgaagtgaagctagaatccca

SEQ ID NO: 13542 - DNA, 30 bp, Artificial Sequence
  Synthetic oligonucleotide
acgtaaacccgacgaggtaactctgtgcca

SEQ ID NO: 13543 - DNA, 30 bp, Artificial Sequence
  Synthetic oligonucleotide
aggtacaccgaacggttgcgacacacagca

SEQ ID NO: 13544 - DNA, 30 bp, Artificial Sequence
  Synthetic oligonucleotide
tgtaaggagcgagacaccaccagcgtagca

SEQ ID NO: 13545 - DNA, 30 bp, Artificial Sequence
  Synthetic oligonucleotide
caggcgtagctccacagtgaagagagctca

SEQ ID NO: 13546 - DNA, 30 bp, Artificial Sequence
  Synthetic oligonucleotide
acggcagatccatacggaaaacaattgtca

SEQ ID NO: 13547 - DNA, 30 bp, Artificial Sequence
  Synthetic oligonucleotide
agacacacttccccgacaatgaaagaaaga

SEQ ID NO: 13548 - DNA, 30 bp, Artificial Sequence
  Synthetic oligonucleotide
tgcggcagagggggcccatgaactacaaga

SEQ ID NO: 13549 - DNA, 30 bp, Artificial Sequence
  Synthetic oligonucleotide
accgaagatgtgacgaatttggaggcaaga

SEQ ID NO: 13550 - DNA, 30 bp, Artificial Sequence
  Synthetic oligonucleotide
ggcgatgatttacaagggcataaaaccaga

SEQ ID NO: 13551 - DNA, 30 bp, Artificial Sequence
  Synthetic oligonucleotide
accttgctaaaaggagaaggatccgccaga

SEQ ID NO: 13552 - DNA, 30 bp, Artificial Sequence
  Synthetic oligonucleotide
acgtccaccgaaaaaactcgccacggcaga

SEQ ID NO: 13553 - DNA, 30 bp, Artificial Sequence
  Synthetic oligonucleotide
gtgggcgtgaaggaaaataaatgactcaga

SEQ ID NO: 13554 - DNA, 30 bp, Artificial Sequence
  Synthetic oligonucleotide
atgggtgggggcggaccgaatgtcctcaga

SEQ ID NO: 13555 - DNA, 30 bp, Artificial Sequence
  Synthetic oligonucleotide
gctgcgtaggggatctaggagggtgagaga

SEQ ID NO: 13556 - DNA, 30 bp, Artificial Sequence
  Synthetic oligonucleotide
cgaagagcaagaaggggcacttggtagaga

SEQ ID NO: 13557 - DNA, 30 bp, Artificial Sequence
  Synthetic oligonucleotide
agacagagtgcaaactagcgccgtactaga

SEQ ID NO: 13558 - DNA, 30 bp, Artificial Sequence
  Synthetic oligonucleotide
agcgagatacgatcctagagtcacacccga

SEQ ID NO: 13559 - DNA, 30 bp, Artificial Sequence
  Synthetic oligonucleotide
cggaattgtcgactaccgtaagaggaagga

SEQ ID NO: 13560 - DNA, 30 bp, Artificial Sequence
  Synthetic oligonucleotide
gaaggagagcgcaattaaacgacatcagga

SEQ ID NO: 13561 - DNA, 30 bp, Artificial Sequence
  Synthetic oligonucleotide
tacacatccccaggtaaagcaagagccgga

SEQ ID NO: 13562 - DNA, 30 bp, Artificial Sequence
  Synthetic oligonucleotide
cgaagtgagcagcacagtgtgctagaggga

SEQ ID NO: 13563 - DNA, 30 bp, Artificial Sequence
  Synthetic oligonucleotide
agcaagcacagaaatatgatgggcacggga

SEQ ID NO: 13564 - DNA, 31 bp, Artificial Sequence
  Synthetic oligonucleotide
cgaagctcaagcagcttgcgtacgggcggga

SEQ ID NO: 13565 - DNA, 30 bp, Artificial Sequence
  Synthetic oligonucleotide
cgatcacgagatccgtagagctgcagggga

SEQ ID NO: 13566 - DNA, 40 bp, Artificial Sequence
  Synthetic oligonucleotide
aagataatacattcatggtatggtcggggagcggggggga

SEQ ID NO: 13567 - DNA, 30 bp, Artificial Sequence
  Synthetic oligonucleotide
tgtagaccaccgactaagaagcgtcatgga

SEQ ID NO: 13568 - DNA, 30 bp, Artificial Sequence
  Synthetic oligonucleotide
ggtgcgagctcaataaacacgtaacaatga

SEQ ID NO: 13569 - DNA, 30 bp, Artificial Sequence
  Synthetic oligonucleotide
gtagaaagggagagcaacagtgtgacgtga

SEQ ID NO: 13570 - DNA, 30 bp, Artificial Sequence
  Synthetic oligonucleotide
tcaagagcgattagctgggtgcgcggaata

SEQ ID NO: 13571 - DNA, 30 bp, Artificial Sequence
  Synthetic oligonucleotide
ggaggtcggaataacctaagtgagcacata

SEQ ID NO: 13572 - DNA, 30 bp, Artificial Sequence
  Synthetic oligonucleotide
acgattagggaataggaagagtgtcacata

SEQ ID NO: 13573 - DNA, 30 bp, Artificial Sequence
  Synthetic oligonucleotide
cgagggatgccgttatctctggtgaagata

SEQ ID NO: 13574 - DNA, 30 bp, Artificial Sequence
  Synthetic oligonucleotide
taagggcaagaatcatggaaaagcgagata

SEQ ID NO: 13575 - DNA, 30 bp, Artificial Sequence
  Synthetic oligonucleotide
cgggcgagcagagtgtgaaaattgtgtata

SEQ ID NO: 13576 - DNA, 30 bp, Artificial Sequence
  Synthetic oligonucleotide
gtcgatatccggaaactacctccgaaagta

SEQ ID NO: 13577 - DNA, 30 bp, Artificial Sequence
  Synthetic oligonucleotide
ccgatcgaaatgagagaaagaggatcagta

SEQ ID NO: 13578 - DNA, 30 bp, Artificial Sequence
  Synthetic oligonucleotide
agcggccgtggaaggaggtccagagtagta

SEQ ID NO: 13579 - DNA, 30 bp, Artificial Sequence
  Synthetic oligonucleotide
accgagctgaaactaagagtatacatcgta

SEQ ID NO: 13580 - DNA, 30 bp, Artificial Sequence
  Synthetic oligonucleotide
acggctgaaattgagaatctagtagtcgta

SEQ ID NO: 13581 - DNA, 30 bp, Artificial Sequence
  Synthetic oligonucleotide
acaagcagagggattaagccatagaaggta

SEQ ID NO: 13582 - DNA, 30 bp, Artificial Sequence
  Synthetic oligonucleotide
agcagacagggtacgtggagaacgagggta

SEQ ID NO: 13583 - DNA, 40 bp, Artificial Sequence
  Synthetic oligonucleotide
aagataatacattcatggtatggtcggggatcggggggta

SEQ ID NO: 13584 - DNA, 30 bp, Artificial Sequence
  Synthetic oligonucleotide
tcgagatcgcaacagagggcagtctcgtta

SEQ ID NO: 13585 - DNA, 30 bp, Artificial Sequence
  Synthetic oligonucleotide
cgggggaatgacagaaggataatggaaaac

SEQ ID NO: 13586 - DNA, 30 bp, Artificial Sequence
  Synthetic oligonucleotide
gcgaacggggcatgcggtgtgaattcaaac

SEQ ID NO: 13587 - DNA, 30 bp, Artificial Sequence
  Synthetic oligonucleotide
catacgccatgagatacacgacctagaaac

SEQ ID NO: 13588 - DNA, 30 bp, Artificial Sequence
  Synthetic oligonucleotide
acacgtgctaagggggcaagatcggtaaac

SEQ ID NO: 13589 - DNA, 30 bp, Artificial Sequence
  Synthetic oligonucleotide
agcgaacaaggcgacctgagcagaacacac

SEQ ID NO: 13590 - DNA, 30 bp, Artificial Sequence
  Synthetic oligonucleotide
acgatgcaacgagagaatacaggatcccac

SEQ ID NO: 13591 - DNA, 30 bp, Artificial Sequence
  Synthetic oligonucleotide
actcggaagagaacgacacaaggattgcac

SEQ ID NO: 13592 - DNA, 30 bp, Artificial Sequence
  Synthetic oligonucleotide
tcaaggcacgatcagtgtatcagaccagac

SEQ ID NO: 13593 - DNA, 30 bp, Artificial Sequence
  Synthetic oligonucleotide
tcagacgatcataacaaaccgactagagac

SEQ ID NO: 13594 - DNA, 30 bp, Artificial Sequence
  Synthetic oligonucleotide
gcgagaagtaacgtacaacaatgggtagac

SEQ ID NO: 13595 - DNA, 30 bp, Artificial Sequence
  Synthetic oligonucleotide
caggttcgagccagcgataaacggaaggac

SEQ ID NO: 13596 - DNA, 30 bp, Artificial Sequence
  Synthetic oligonucleotide
cgcggtcaggcgaaacaaatcctgcaatac

SEQ ID NO: 13597 - DNA, 30 bp, Artificial Sequence
  Synthetic oligonucleotide
gcgaggagataatggagggcggaaaaaacc

SEQ ID NO: 13598 - DNA, 30 bp, Artificial Sequence
  Synthetic oligonucleotide
cgatagatagctcggaattttagagagacc

SEQ ID NO: 13599 - DNA, 30 bp, Artificial Sequence
  Synthetic oligonucleotide
aggtggtgaggggggaatgcaaacatgacc

SEQ ID NO: 13600 - DNA, 30 bp, Artificial Sequence
  Synthetic oligonucleotide
acggggcgagctgagaatgaagtagcaccc

SEQ ID NO: 13601 - DNA, 40 bp, Artificial Sequence
  Synthetic oligonucleotide
ttggtaccgcctacagctaggggtaagagcagtgagcgcc

SEQ ID NO: 13602 - DNA, 30 bp, Artificial Sequence
  Synthetic oligonucleotide
aagtcaaaccaaaataaaactcgtattgcc

SEQ ID NO: 13603 - DNA, 30 bp, Artificial Sequence
  Synthetic oligonucleotide
cggcaacccacagtacagcacgtcgtcagc

SEQ ID NO: 13604 - DNA, 30 bp, Artificial Sequence
  Synthetic oligonucleotide
ggcgagtaatgacacctcatgacagagagc

SEQ ID NO: 13605 - DNA, 30 bp, Artificial Sequence
  Synthetic oligonucleotide
cgcacccaaaggccaggagaataaacgagc

SEQ ID NO: 13606 - DNA, 30 bp, Artificial Sequence
  Synthetic oligonucleotide
cctcctgaaggaaccatggagtaagccggc

SEQ ID NO: 13607 - DNA, 30 bp, Artificial Sequence
  Synthetic oligonucleotide
agaggagtgagtcatagcgtggtgctcggc

SEQ ID NO: 13608 - DNA, 30 bp, Artificial Sequence
  Synthetic oligonucleotide
tcaaacaggaagaattaagcaaccgcatgc

SEQ ID NO: 13609 - DNA, 30 bp, Artificial Sequence
  Synthetic oligonucleotide
tcgaagggctaaggacgattgcaccagtgc

SEQ ID NO: 13610 - DNA, 30 bp, Artificial Sequence
  Synthetic oligonucleotide
agacaatgagaactcgatgtcagggagtgc

SEQ ID NO: 13611 - DNA, 30 bp, Artificial Sequence
  Synthetic oligonucleotide
cacgaatgcgaggaccgtcgacacccaatc

SEQ ID NO: 13612 - DNA, 30 bp, Artificial Sequence
  Synthetic oligonucleotide
tcacaacgggatgagcgaatttagagcgtc

SEQ ID NO: 13613 - DNA, 30 bp, Artificial Sequence
  Synthetic oligonucleotide
ggtgacacccgaaccgaggaagcgtgcgtc

SEQ ID NO: 13614 - DNA, 30 bp, Artificial Sequence
  Synthetic oligonucleotide
aggtatacctgaagcgccaaaaaacgaaag

SEQ ID NO: 13615 - DNA, 30 bp, Artificial Sequence
  Synthetic oligonucleotide
tcgatagggcacagggagcacaccggaaag

SEQ ID NO: 13616 - DNA, 30 bp, Artificial Sequence
  Synthetic oligonucleotide
cgaggcgcatccattcaaatagactgaaag

SEQ ID NO: 13617 - DNA, 30 bp, Artificial Sequence
  Synthetic oligonucleotide
cgggggcaaaaactactcacactagccaag

SEQ ID NO: 13618 - DNA, 30 bp, Artificial Sequence
  Synthetic oligonucleotide
tcggaacgatgaagctcgtctcgggtcaag

SEQ ID NO: 13619 - DNA, 30 bp, Artificial Sequence
  Synthetic oligonucleotide
cctaattgagaagacttagtgggagagaag

SEQ ID NO: 13620 - DNA, 30 bp, Artificial Sequence
  Synthetic oligonucleotide
gcaagagagtggcaacaagagtaggcgaag

SEQ ID NO: 13621 - DNA, 30 bp, Artificial Sequence
  Synthetic oligonucleotide
cgtaaacaacatagtccggatacacggaag

SEQ ID NO: 13622 - DNA, 30 bp, Artificial Sequence
  Synthetic oligonucleotide
gggttaaaccgagactcagtgggatggaag

SEQ ID NO: 13623 - DNA, 30 bp, Artificial Sequence
  Synthetic oligonucleotide
gcgggaacgtacccaccgagcagggtgaag

SEQ ID NO: 13624 - DNA, 30 bp, Artificial Sequence
  Synthetic oligonucleotide
acagatcgattggaagagcggcgcaataag

SEQ ID NO: 13625 - DNA, 30 bp, Artificial Sequence
  Synthetic oligonucleotide
cgaccaaagctccaggatgtgtcggataag

SEQ ID NO: 13626 - DNA, 30 bp, Artificial Sequence
  Synthetic oligonucleotide
acgagatgagttgggggacggattagtaag

SEQ ID NO: 13627 - DNA, 30 bp, Artificial Sequence
  Synthetic oligonucleotide
aggggaggtgtatcccacaaatgagttaag

SEQ ID NO: 13628 - DNA, 30 bp, Artificial Sequence
  Synthetic oligonucleotide
actcagacagtaagaagccaagcaaaacag

SEQ ID NO: 13629 - DNA, 30 bp, Artificial Sequence
  Synthetic oligonucleotide
ctaagggatcatcaaacgaaggataaacag

SEQ ID NO: 13630 - DNA, 30 bp, Artificial Sequence
  Synthetic oligonucleotide
ccatgactaccaaagtgcaccccacaacag

SEQ ID NO: 13631 - DNA, 30 bp, Artificial Sequence
  Synthetic oligonucleotide
gcgaagtaaacatgggtgtaccctccacag

SEQ ID NO: 13632 - DNA, 30 bp, Artificial Sequence
  Synthetic oligonucleotide
gggcgacagacggaaagaccgcgacgacag

SEQ ID NO: 13633 - DNA, 30 bp, Artificial Sequence
  Synthetic oligonucleotide
agaacgagtagaagtgtgcagaaaccccag

SEQ ID NO: 13634 - DNA, 30 bp, Artificial Sequence
  Synthetic oligonucleotide
cagctgaaaccgggactacactcaatgcag

SEQ ID NO: 13635 - DNA, 30 bp, Artificial Sequence
  Synthetic oligonucleotide
cgcgactgcgatgggatttcaaaaaatcag

SEQ ID NO: 13636 - DNA, 30 bp, Artificial Sequence
  Synthetic oligonucleotide
ccgaagaaagaagacgtcccaattcttcag

SEQ ID NO: 13637 - DNA, 30 bp, Artificial Sequence
  Synthetic oligonucleotide
acaggtgaattataccgcgagtcagaagag

SEQ ID NO: 13638 - DNA, 30 bp, Artificial Sequence
  Synthetic oligonucleotide
cacggccaaggaagataattgcaatacgag

SEQ ID NO: 13639 - DNA, 30 bp, Artificial Sequence
  Synthetic oligonucleotide
gtccaaaaaggcaagacctcggaacgcgag

SEQ ID NO: 13640 - DNA, 30 bp, Artificial Sequence
  Synthetic oligonucleotide
gctccgttaagaatcacacaatgaggcgag

SEQ ID NO: 13641 - DNA, 30 bp, Artificial Sequence
  Synthetic oligonucleotide
cggatggcaacaagaactagatgccaggag

SEQ ID NO: 13642 - DNA, 30 bp, Artificial Sequence
  Synthetic oligonucleotide
ctcaatgaacgtcagggatgaacagaggag

SEQ ID NO: 13643 - DNA, 30 bp, Artificial Sequence
  Synthetic oligonucleotide
acgaagtccgacatatagcgcatctgggag

SEQ ID NO: 13644 - DNA, 30 bp, Artificial Sequence
  Synthetic oligonucleotide
taacgcatggcacgtgaagaatgcgctgag

SEQ ID NO: 13645 - DNA, 30 bp, Artificial Sequence
  Synthetic oligonucleotide
gggggaccgagttgactacaactcattgag

SEQ ID NO: 13646 - DNA, 30 bp, Artificial Sequence
  Synthetic oligonucleotide
aggtaggcacctattgaaatatgcgaatag

SEQ ID NO: 13647 - DNA, 30 bp, Artificial Sequence
  Synthetic oligonucleotide
ccgaaagtggatagcatacctaaggcatag

SEQ ID NO: 13648 - DNA, 30 bp, Artificial Sequence
  Synthetic oligonucleotide
gcgacaggcgtacaggacagactcagatag

SEQ ID NO: 13649 - DNA, 30 bp, Artificial Sequence
  Synthetic oligonucleotide
tcagagagactgacgataagacagcgatag

SEQ ID NO: 13650 - DNA, 30 bp, Artificial Sequence
  Synthetic oligonucleotide
cgatcgagcaaacacgagctatacatgtag

SEQ ID NO: 13651 - DNA, 30 bp, Artificial Sequence
  Synthetic oligonucleotide
ggattgaaagacgagaaagcgaggggttag

SEQ ID NO: 13652 - DNA, 30 bp, Artificial Sequence
  Synthetic oligonucleotide
gatgaacgggtcaaaaaccgacaggaaacg

SEQ ID NO: 13653 - DNA, 30 bp, Artificial Sequence
  Synthetic oligonucleotide
aggggacgatatgcgccatgtggtgcaacg

SEQ ID NO: 13654 - DNA, 30 bp, Artificial Sequence
  Synthetic oligonucleotide
aacgaaacgtttgaggggacaaaagtaacg

SEQ ID NO: 13655 - DNA, 30 bp, Artificial Sequence
  Synthetic oligonucleotide
acacgagaccaacggcaactagataaaccg

SEQ ID NO: 13656 - DNA, 31 bp, Artificial Sequence
  Synthetic oligonucleotide
gggtggagaaagaatcatatcgcgaacgccg

SEQ ID NO: 13657 - DNA, 30 bp, Artificial Sequence
  Synthetic oligonucleotide
aggcaagcgcacatccgaaagtgaccgccg

SEQ ID NO: 13658 - DNA, 30 bp, Artificial Sequence
  Synthetic oligonucleotide
attgcgaacagggataggcgagttaaagcg

SEQ ID NO: 13659 - DNA, 30 bp, Artificial Sequence
  Synthetic oligonucleotide
ccacacaacgcaacagagtgatctaacgcg

SEQ ID NO: 13660 - DNA, 30 bp, Artificial Sequence
  Synthetic oligonucleotide
ccagatgacagatccaattaaacacgatcg

SEQ ID NO: 13661 - DNA, 30 bp, Artificial Sequence
  Synthetic oligonucleotide
atggtccgagaatgagaattgagcacgtcg

SEQ ID NO: 13662 - DNA, 30 bp, Artificial Sequence
  Synthetic oligonucleotide
tgggccataccaatgtgagaagcgaattcg

SEQ ID NO: 13663 - DNA, 30 bp, Artificial Sequence
  Synthetic oligonucleotide
gaagcaagagtggggagacagtcgagttcg

SEQ ID NO: 13664 - DNA, 30 bp, Artificial Sequence
  Synthetic oligonucleotide
tgaccagcgagaaagatcactggggcaagg

SEQ ID NO: 13665 - DNA, 30 bp, Artificial Sequence
  Synthetic oligonucleotide
aaagcgtccaatagatgaaggacatccagg

SEQ ID NO: 13666 - DNA, 30 bp, Artificial Sequence
  Synthetic oligonucleotide
ggaaacagaaacgttgaaataaactagagg

SEQ ID NO: 13667 - DNA, 30 bp, Artificial Sequence
  Synthetic oligonucleotide
ggaggacgttatcacaagggaaccaggagg

SEQ ID NO: 13668 - DNA, 30 bp, Artificial Sequence
  Synthetic oligonucleotide
tgaacgaaaaagaaaaaaggcgcacaacgg

SEQ ID NO: 13669 - DNA, 29 bp, Artificial Sequence
  Synthetic oligonucleotide
aacggaaatgaaagccccagcgagcccgg

SEQ ID NO: 13670 - DNA, 30 bp, Artificial Sequence
  Synthetic oligonucleotide
aaggcaaaagggtactgagatcaaacgcgg

SEQ ID NO: 13671 - DNA, 31 bp, Artificial Sequence
  Synthetic oligonucleotide
agacaaagacctcagactaggggaaaaaggg

SEQ ID NO: 13672 - DNA, 31 bp, Artificial Sequence
  Synthetic oligonucleotide
ttgaatcgaagacatcatcttaggagaaggg

SEQ ID NO: 13673 - DNA, 30 bp, Artificial Sequence
  Synthetic oligonucleotide
gacagagagtccaagcattgtacgggaggg

SEQ ID NO: 13674 - DNA, 30 bp, Artificial Sequence
  Synthetic oligonucleotide
agtcccaaccaaaagagctgcgaattaggg

SEQ ID NO: 13675 - DNA, 30 bp, Artificial Sequence
  Synthetic oligonucleotide
ggcgcaaagtggactaggcatagaaaatgg

SEQ ID NO: 13676 - DNA, 30 bp, Artificial Sequence
  Synthetic oligonucleotide
ggcaaaaaggcgacaagaatgatggactgg

SEQ ID NO: 13677 - DNA, 30 bp, Artificial Sequence
  Synthetic oligonucleotide
actgtacgaaaatcaaagcaaaaaagctgg

SEQ ID NO: 13678 - DNA, 30 bp, Artificial Sequence
  Synthetic oligonucleotide
cgactcttataagtacgaacgaaagagtgg

SEQ ID NO: 13679 - DNA, 30 bp, Artificial Sequence
  Synthetic oligonucleotide
agcaacatcacacgacaatctgagccaatg

SEQ ID NO: 13680 - DNA, 30 bp, Artificial Sequence
  Synthetic oligonucleotide
aggaaccctgcaggaaccagtaaggtaatg

SEQ ID NO: 13681 - DNA, 30 bp, Artificial Sequence
  Synthetic oligonucleotide
agagtagtcaacaaaaaacgttataagatg

SEQ ID NO: 13682 - DNA, 30 bp, Artificial Sequence
  Synthetic oligonucleotide
ggaaaaaaaggagtgtatactgctaagatg

SEQ ID NO: 13683 - DNA, 30 bp, Artificial Sequence
  Synthetic oligonucleotide
acaatgccagctaacgagtccaactagatg

SEQ ID NO: 13684 - DNA, 30 bp, Artificial Sequence
  Synthetic oligonucleotide
gggcgcggatacgtgaagagtgtcaaactg

SEQ ID NO: 13685 - DNA, 30 bp, Artificial Sequence
  Synthetic oligonucleotide
gggacatgtccgaacggccaattcagactg

SEQ ID NO: 13686 - DNA, 30 bp, Artificial Sequence
  Synthetic oligonucleotide
ggccaagcccacacatctcaccaagccctg

SEQ ID NO: 13687 - DNA, 30 bp, Artificial Sequence
  Synthetic oligonucleotide
actacgcacgagcaaatgaaggagagtctg

SEQ ID NO: 13688 - DNA, 30 bp, Artificial Sequence
  Synthetic oligonucleotide
cgggcaggggtaagcctcgattcttaagtg

SEQ ID NO: 13689 - DNA, 30 bp, Artificial Sequence
  Synthetic oligonucleotide
gacgaaaatcaacgcgagaccggttcagtg

SEQ ID NO: 13690 - DNA, 30 bp, Artificial Sequence
  Synthetic oligonucleotide
tgcggatctacgacgagggtaagaatagtg

SEQ ID NO: 13691 - DNA, 30 bp, Artificial Sequence
  Synthetic oligonucleotide
aggtaaacgactacgataacaatattagtg

SEQ ID NO: 13692 - DNA, 30 bp, Artificial Sequence
  Synthetic oligonucleotide
gctaggaagaaagtgatcaaagacagggtg

SEQ ID NO: 13693 - DNA, 30 bp, Artificial Sequence
  Synthetic oligonucleotide
cggtagggctcatagacaacgataactgtg

SEQ ID NO: 13694 - DNA, 30 bp, Artificial Sequence
  Synthetic oligonucleotide
aggggaacattggcaagttgaaagattgtg

SEQ ID NO: 13695 - DNA, 30 bp, Artificial Sequence
  Synthetic oligonucleotide
cgaggaaaggcgtgcatgattagcatattg

SEQ ID NO: 13696 - DNA, 30 bp, Artificial Sequence
  Synthetic oligonucleotide
gcgggagctaagcaaaacaaattggtattg

SEQ ID NO: 13697 - DNA, 30 bp, Artificial Sequence
  Synthetic oligonucleotide
aggaaaaaaagaatacatgagtaccccttg

SEQ ID NO: 13698 - DNA, 30 bp, Artificial Sequence
  Synthetic oligonucleotide
cggcacgagacaaggcaggttcagatcttg

SEQ ID NO: 13699 - DNA, 30 bp, Artificial Sequence
  Synthetic oligonucleotide
aggactcgtccgtaggcggaaaatgcgttg

SEQ ID NO: 13700 - DNA, 30 bp, Artificial Sequence
  Synthetic oligonucleotide
tgaagtgacgaaatacaacgaggttcgaat

SEQ ID NO: 13701 - DNA, 30 bp, Artificial Sequence
  Synthetic oligonucleotide
cgatacaatgagcaaggatatcagggacat

SEQ ID NO: 13702 - DNA, 30 bp, Artificial Sequence
  Synthetic oligonucleotide
aagtgccaaagacgaattcgccggatacat

SEQ ID NO: 13703 - DNA, 30 bp, Artificial Sequence
  Synthetic oligonucleotide
ggcacactacagacgaggtgagagcaccat

SEQ ID NO: 13704 - DNA, 30 bp, Artificial Sequence
  Synthetic oligonucleotide
agccaaaacctaatcgagaaacccgcccat

SEQ ID NO: 13705 - DNA, 30 bp, Artificial Sequence
  Synthetic oligonucleotide
tgtcgagcgaaacgctaagggaatgggcat

SEQ ID NO: 13706 - DNA, 30 bp, Artificial Sequence
  Synthetic oligonucleotide
tcatgcatcctaagatagataagagcagat

SEQ ID NO: 13707 - DNA, 30 bp, Artificial Sequence
  Synthetic oligonucleotide
cgtggccaaggaataaatcattggatagat

SEQ ID NO: 13708 - DNA, 30 bp, Artificial Sequence
  Synthetic oligonucleotide
tcgacatccgacgagggaggccaggacgat

SEQ ID NO: 13709 - DNA, 30 bp, Artificial Sequence
  Synthetic oligonucleotide
agagacagatctgatacggtagaggacgat

SEQ ID NO: 13710 - DNA, 30 bp, Artificial Sequence
  Synthetic oligonucleotide
caagagacaaggcacgaatgataagctgat

SEQ ID NO: 13711 - DNA, 30 bp, Artificial Sequence
  Synthetic oligonucleotide
taggcggtaacgtaggcgaaaagtgactat

SEQ ID NO: 13712 - DNA, 30 bp, Artificial Sequence
  Synthetic oligonucleotide
ccgtaaaccagcagaagagaaagggtaact

SEQ ID NO: 13713 - DNA, 30 bp, Artificial Sequence
  Synthetic oligonucleotide
cacgactgaaggctgaaggctagacatact

SEQ ID NO: 13714 - DNA, 30 bp, Artificial Sequence
  Synthetic oligonucleotide
tcagagagagcggagggaataaacgcacct

SEQ ID NO: 13715 - DNA, 30 bp, Artificial Sequence
  Synthetic oligonucleotide
ccgagtagaatagacaacagattaggggct

SEQ ID NO: 13716 - DNA, 30 bp, Artificial Sequence
  Synthetic oligonucleotide
gctgaagtggaaagcgagagtacgatggct

SEQ ID NO: 13717 - DNA, 30 bp, Artificial Sequence
  Synthetic oligonucleotide
agtagaggacagcggagaacatcacaaagt

SEQ ID NO: 13718 - DNA, 30 bp, Artificial Sequence
  Synthetic oligonucleotide
cggctaaaaagcagcggccaaatcacaagt

SEQ ID NO: 13719 - DNA, 30 bp, Artificial Sequence
  Synthetic oligonucleotide
cgacagagataaggtataaaaataaacagt

SEQ ID NO: 13720 - DNA, 30 bp, Artificial Sequence
  Synthetic oligonucleotide
cgaagacgcaaaaatcactacagccacagt

SEQ ID NO: 13721 - DNA, 30 bp, Artificial Sequence
  Synthetic oligonucleotide
agcgaagagaaggaagcgaaaaaagagagt

SEQ ID NO: 13722 - DNA, 30 bp, Artificial Sequence
  Synthetic oligonucleotide
cactacgacaggacggtcgatggtgagagt

SEQ ID NO: 13723 - DNA, 30 bp, Artificial Sequence
  Synthetic oligonucleotide
gctagcaaatggtgtacgaaaggatagagt

SEQ ID NO: 13724 - DNA, 30 bp, Artificial Sequence
  Synthetic oligonucleotide
aggaaaggacacataaaagcaccatcgagt

SEQ ID NO: 13725 - DNA, 30 bp, Artificial Sequence
  Synthetic oligonucleotide
agcacgtgaaggcgaaaggatacagggagt

SEQ ID NO: 13726 - DNA, 30 bp, Artificial Sequence
  Synthetic oligonucleotide
tcgtgaaagatgtagtaaatggataggcgt

SEQ ID NO: 13727 - DNA, 30 bp, Artificial Sequence
  Synthetic oligonucleotide
acgtggctgggcaggagacaatttcgtcgt

SEQ ID NO: 13728 - DNA, 30 bp, Artificial Sequence
  Synthetic oligonucleotide
agagggatcgacgatacgtaaacgataggt

SEQ ID NO: 13729 - DNA, 30 bp, Artificial Sequence
  Synthetic oligonucleotide
agggaggataaacagacggatgctaagctt

SEQ ID NO: 13730 - DNA, 30 bp, Artificial Sequence
  Synthetic oligonucleotide
cgaagtgctaagaggacgagttggcaggtt

SEQ ID NO: 13731 - DNA, 30 bp, Artificial Sequence
  Synthetic oligonucleotide
tgagcaaatgcagaataagacagttcaaaa

SEQ ID NO: 13732 - DNA, 30 bp, Artificial Sequence
  Synthetic oligonucleotide
acaaggactaggagagggtggcacagaaaa

SEQ ID NO: 13733 - DNA, 30 bp, Artificial Sequence
  Synthetic oligonucleotide
acgacgccgaaggcacgcattggctgaaaa

SEQ ID NO: 13734 - DNA, 30 bp, Artificial Sequence
  Synthetic oligonucleotide
cgagagggggatgtgagggccccacagaaa

SEQ ID NO: 13735 - DNA, 30 bp, Artificial Sequence
  Synthetic oligonucleotide
agcggaacgacctcaatcccacgtgagaaa

SEQ ID NO: 13736 - DNA, 30 bp, Artificial Sequence
  Synthetic oligonucleotide
ggtagaggggaaacgaaaattgcagcgaaa

SEQ ID NO: 13737 - DNA, 30 bp, Artificial Sequence
  Synthetic oligonucleotide
ggaaatgccgaagggggcgaaagtaggaaa

SEQ ID NO: 13738 - DNA, 30 bp, Artificial Sequence
  Synthetic oligonucleotide
cgaggagacagtctaatggccggcacacaa

SEQ ID NO: 13739 - DNA, 30 bp, Artificial Sequence
  Synthetic oligonucleotide
ggacgggcggaataaaaggaaggcatccaa

SEQ ID NO: 13740 - DNA, 30 bp, Artificial Sequence
  Synthetic oligonucleotide
gtgtaaagtgaccgaggtaacaccgagcaa

SEQ ID NO: 13741 - DNA, 30 bp, Artificial Sequence
  Synthetic oligonucleotide
tggtaacacctaagagaagcggcctagcaa

SEQ ID NO: 13742 - DNA, 30 bp, Artificial Sequence
  Synthetic oligonucleotide
tcgtgatcacacccgaagtgcgctatgcaa

SEQ ID NO: 13743 - DNA, 30 bp, Artificial Sequence
  Synthetic oligonucleotide
tagggaaggaagaaccgaacagcagatcaa

SEQ ID NO: 13744 - DNA, 30 bp, Artificial Sequence
  Synthetic oligonucleotide
aacgtagggtgagagagttcaagcaaagaa

SEQ ID NO: 13745 - DNA, 30 bp, Artificial Sequence
  Synthetic oligonucleotide
gaggacatagggtaacgggtaatataagaa

SEQ ID NO: 13746 - DNA, 30 bp, Artificial Sequence
  Synthetic oligonucleotide
gcaagaccggaagctgaaagtaatacagaa

SEQ ID NO: 13747 - DNA, 30 bp, Artificial Sequence
  Synthetic oligonucleotide
aaccgcaaagggtcacagagtggattagaa

SEQ ID NO: 13748 - DNA, 30 bp, Artificial Sequence
  Synthetic oligonucleotide
tcaggtgtacgtacgaaagagtcaaacgaa

SEQ ID NO: 13749 - DNA, 30 bp, Artificial Sequence
  Synthetic oligonucleotide
gcgagatgggggtaacgagagagatacgaa

SEQ ID NO: 13750 - DNA, 30 bp, Artificial Sequence
  Synthetic oligonucleotide
ctggcaatacgagtggaatgcaaatgcgaa

SEQ ID NO: 13751 - DNA, 30 bp, Artificial Sequence
  Synthetic oligonucleotide
gcgaagcgcgtaaaccggagaatgtgcgaa

SEQ ID NO: 13752 - DNA, 30 bp, Artificial Sequence
  Synthetic oligonucleotide
ggtcaggtaagagatgatcggagggtcgaa

SEQ ID NO: 13753 - DNA, 30 bp, Artificial Sequence
  Synthetic oligonucleotide
ccgaggctcgccctcctaacggaaaaggaa

SEQ ID NO: 13754 - DNA, 30 bp, Artificial Sequence
  Synthetic oligonucleotide
gacagcagagaaaggtcacagtggcaggaa

SEQ ID NO: 13755 - DNA, 30 bp, Artificial Sequence
  Synthetic oligonucleotide
agtcaaaaaagagtgtggtcaggttaggaa

SEQ ID NO: 13756 - DNA, 30 bp, Artificial Sequence
  Synthetic oligonucleotide
gggacagttaaaagaagtactagagcggaa

SEQ ID NO: 13757 - DNA, 30 bp, Artificial Sequence
  Synthetic oligonucleotide
acgggggaggaccagccgttgaattgggaa

SEQ ID NO: 13758 - DNA, 30 bp, Artificial Sequence
  Synthetic oligonucleotide
cggggacatgaagatcactctctggatgaa

SEQ ID NO: 13759 - DNA, 30 bp, Artificial Sequence
  Synthetic oligonucleotide
agctgccgagaatgtgacagcggacgtgaa

SEQ ID NO: 13760 - DNA, 30 bp, Artificial Sequence
  Synthetic oligonucleotide
ccgagctaaggaaaaagcacggcatagtaa

SEQ ID NO: 13761 - DNA, 30 bp, Artificial Sequence
  Synthetic oligonucleotide
aggggaacaggtggacaaacaaatcattaa

SEQ ID NO: 13762 - DNA, 30 bp, Artificial Sequence
  Synthetic oligonucleotide
aaacgtgagaggcgtaccagtggaacaaca

SEQ ID NO: 13763 - DNA, 30 bp, Artificial Sequence
  Synthetic oligonucleotide
aagcgcgaattaacgaatcaatgaataaca

SEQ ID NO: 13764 - DNA, 30 bp, Artificial Sequence
  Synthetic oligonucleotide
gtggagaagggaacacataggcaggtaaca

SEQ ID NO: 13765 - DNA, 30 bp, Artificial Sequence
  Synthetic oligonucleotide
ggacacaacggcagaaccgtcactcacaca

SEQ ID NO: 13766 - DNA, 30 bp, Artificial Sequence
  Synthetic oligonucleotide
tcctggacgagaaacacccacgggacgaca

SEQ ID NO: 13767 - DNA, 30 bp, Artificial Sequence
  Synthetic oligonucleotide
taacgtgagggagagaaggccgaagttaca

SEQ ID NO: 13768 - DNA, 30 bp, Artificial Sequence
  Synthetic oligonucleotide
gtagcggacggacgacataaatcgaaagca

SEQ ID NO: 13769 - DNA, 30 bp, Artificial Sequence
  Synthetic oligonucleotide
agggcagtaccgagatagcggcctagcgca

SEQ ID NO: 13770 - DNA, 30 bp, Artificial Sequence
  Synthetic oligonucleotide
tcagaagatgccatcaaccaatactgcgca

SEQ ID NO: 13771 - DNA, 30 bp, Artificial Sequence
  Synthetic oligonucleotide
agaacgcgagaggtgagaggtggtcaggca

SEQ ID NO: 13772 - DNA, 31 bp, Artificial Sequence
  Synthetic oligonucleotide
caatacatgtaggtatatacagagtacggca

SEQ ID NO: 13773 - DNA, 30 bp, Artificial Sequence
  Synthetic oligonucleotide
caggacatgcgacaatagtagggatatgca

SEQ ID NO: 13774 - DNA, 30 bp, Artificial Sequence
  Synthetic oligonucleotide
ggatcagccaatgtaaagtgagcaaaatca

SEQ ID NO: 13775 - DNA, 30 bp, Artificial Sequence
  Synthetic oligonucleotide
cacgagcgtaagcgtacaaagccaacctca

SEQ ID NO: 13776 - DNA, 30 bp, Artificial Sequence
  Synthetic oligonucleotide
aagacggcgaggcgcaatgcgaattagtca

SEQ ID NO: 13777 - DNA, 30 bp, Artificial Sequence
  Synthetic oligonucleotide
ggtaacgactggtcatcaacagtgccgtca

SEQ ID NO: 13778 - DNA, 30 bp, Artificial Sequence
  Synthetic oligonucleotide
gcgccaggagtagccgtgtgtaagaaaaga

SEQ ID NO: 13779 - DNA, 30 bp, Artificial Sequence
  Synthetic oligonucleotide
cgctaaaagaaaggcggatcgtatgcaaga

SEQ ID NO: 13780 - DNA, 30 bp, Artificial Sequence
  Synthetic oligonucleotide
ggtgaagccacgtaccccgaatgatcaaga

SEQ ID NO: 13781 - DNA, 30 bp, Artificial Sequence
  Synthetic oligonucleotide
acggggcgtgcacgagcacagcaatgaaga

SEQ ID NO: 13782 - DNA, 30 bp, Artificial Sequence
  Synthetic oligonucleotide
gccgaagtatggcaagagacgatgtgaaga

SEQ ID NO: 13783 - DNA, 30 bp, Artificial Sequence
  Synthetic oligonucleotide
gggtcacagtgcaggatgagcgccaccaga

SEQ ID NO: 13784 - DNA, 30 bp, Artificial Sequence
  Synthetic oligonucleotide
cggaggggcaccccgtggcgaacaagcaga

SEQ ID NO: 13785 - DNA, 30 bp, Artificial Sequence
  Synthetic oligonucleotide
gaagcatagggtagggacaccagtatcaga

SEQ ID NO: 13786 - DNA, 30 bp, Artificial Sequence
  Synthetic oligonucleotide
agaagtgaaaaaatttgaatatcaaggaga

SEQ ID NO: 13787 - DNA, 30 bp, Artificial Sequence
  Synthetic oligonucleotide
tgaaacaacagcaggcttgccaagaggaga

SEQ ID NO: 13788 - DNA, 31 bp, Artificial Sequence
  Synthetic oligonucleotide
cgagcaggcttagtaacaaggccttgtgaga

SEQ ID NO: 13789 - DNA, 30 bp, Artificial Sequence
  Synthetic oligonucleotide
cgaccaagaactccagtgtacaggcaacga

SEQ ID NO: 13790 - DNA, 30 bp, Artificial Sequence
  Synthetic oligonucleotide
atgggggcacatctggccgaacaacaccga

SEQ ID NO: 13791 - DNA, 30 bp, Artificial Sequence
  Synthetic oligonucleotide
cggctagcaagctaagcaagaagagcccga

SEQ ID NO: 13792 - DNA, 30 bp, Artificial Sequence
  Synthetic oligonucleotide
gcttaaggcccggagaagtgaagcgagcga

SEQ ID NO: 13793 - DNA, 30 bp, Artificial Sequence
  Synthetic oligonucleotide
taagtgactagcaaaggaaatggatagcga

SEQ ID NO: 13794 - DNA, 30 bp, Artificial Sequence
  Synthetic oligonucleotide
ggggagatcggtgaaactattagctagcga

SEQ ID NO: 13795 - DNA, 30 bp, Artificial Sequence
  Synthetic oligonucleotide
caccgagcaagcgtgaatacagtatgtcga

SEQ ID NO: 13796 - DNA, 30 bp, Artificial Sequence
  Synthetic oligonucleotide
ggcggggtcgaccgcaccagagtacaggga

SEQ ID NO: 13797 - DNA, 30 bp, Artificial Sequence
  Synthetic oligonucleotide
cgaggtggccagacagataggatgtcggga

SEQ ID NO: 13798 - DNA, 39 bp, Artificial Sequence
  Synthetic oligonucleotide
aagataatacattcatggtatggtcggggacggggggga

SEQ ID NO: 13799 - DNA, 30 bp, Artificial Sequence
  Synthetic oligonucleotide
acaggaggcgacaaattggattcccgtgga

SEQ ID NO: 13800 - DNA, 30 bp, Artificial Sequence
  Synthetic oligonucleotide
atcgtgacgggaggcaagggcgcaaactga

SEQ ID NO: 13801 - DNA, 30 bp, Artificial Sequence
  Synthetic oligonucleotide
tgagccaaactaagacgacaaacgccctga

SEQ ID NO: 13802 - DNA, 30 bp, Artificial Sequence
  Synthetic oligonucleotide
tctaatgaagatccagagtccatgagctga

SEQ ID NO: 13803 - DNA, 30 bp, Artificial Sequence
  Synthetic oligonucleotide
cggagccggagaagttatcgaattacgtga

SEQ ID NO: 13804 - DNA, 30 bp, Artificial Sequence
  Synthetic oligonucleotide
cgacgagttgggcctaaaagctccaggtga

SEQ ID NO: 13805 - DNA, 30 bp, Artificial Sequence
  Synthetic oligonucleotide
gtgcaatgagagatatacggaggagggtga

SEQ ID NO: 13806 - DNA, 31 bp, Artificial Sequence
  Synthetic oligonucleotide
gcggagtggaagacgtaacaaggccagttga

SEQ ID NO: 13807 - DNA, 30 bp, Artificial Sequence
  Synthetic oligonucleotide
acagcgtacatcatagcaaccgacaaaata

SEQ ID NO: 13808 - DNA, 30 bp, Artificial Sequence
  Synthetic oligonucleotide
caaaggcaaggagagaacgacgtgcacata

SEQ ID NO: 13809 - DNA, 30 bp, Artificial Sequence
  Synthetic oligonucleotide
acggaatgggtaataagacttgcacaccta

SEQ ID NO: 13810 - DNA, 30 bp, Artificial Sequence
  Synthetic oligonucleotide
ctagaagcggcactggacggtgaaagagta

SEQ ID NO: 13811 - DNA, 30 bp, Artificial Sequence
  Synthetic oligonucleotide
aacggcataggtaaataacaagtaaacgta

SEQ ID NO: 13812 - DNA, 30 bp, Artificial Sequence
  Synthetic oligonucleotide
agttggaaggatcgccaagaacagcagaac

SEQ ID NO: 13813 - DNA, 30 bp, Artificial Sequence
  Synthetic oligonucleotide
cgatcaggcacaacaattcgagcccataac

SEQ ID NO: 13814 - DNA, 30 bp, Artificial Sequence
  Synthetic oligonucleotide
acgcggaggaagaaaagagaggattcgcac

SEQ ID NO: 13815 - DNA, 30 bp, Artificial Sequence
  Synthetic oligonucleotide
agggaaggagcaatgcgtattgcgtaagac

SEQ ID NO: 13816 - DNA, 30 bp, Artificial Sequence
  Synthetic oligonucleotide
tactaggacgagccaacgacaagagatgac

SEQ ID NO: 13817 - DNA, 30 bp, Artificial Sequence
  Synthetic oligonucleotide
cggagatgaaatgtgaatagtccagcgtac

SEQ ID NO: 13818 - DNA, 30 bp, Artificial Sequence
  Synthetic oligonucleotide
cgagtgggctaagggagtgaacatggttac

SEQ ID NO: 13819 - DNA, 30 bp, Artificial Sequence
  Synthetic oligonucleotide
tgggaaccgaaaataaaaacatagggaagc

SEQ ID NO: 13820 - DNA, 30 bp, Artificial Sequence
  Synthetic oligonucleotide
actacagggtggacaaaagattcagtaagc

SEQ ID NO: 13821 - DNA, 30 bp, Artificial Sequence
  Synthetic oligonucleotide
aggaacgaacggagcttgggatagaacagc

SEQ ID NO: 13822 - DNA, 30 bp, Artificial Sequence
  Synthetic oligonucleotide
gacaaacagacccaagactgagcgagcagc

SEQ ID NO: 13823 - DNA, 30 bp, Artificial Sequence
  Synthetic oligonucleotide
ccgagatcagcgaaaatgcaggggctcagc

SEQ ID NO: 13824 - DNA, 30 bp, Artificial Sequence
  Synthetic oligonucleotide
gaaggataaaactacaggcctaaccagagc

SEQ ID NO: 13825 - DNA, 30 bp, Artificial Sequence
  Synthetic oligonucleotide
cagagggtcagggtgccaaaaaccacgagc

SEQ ID NO: 13826 - DNA, 29 bp, Artificial Sequence
  Synthetic oligonucleotide
ggtagtgagacgatagtggagtagcgagc

SEQ ID NO: 13827 - DNA, 31 bp, Artificial Sequence
  Synthetic oligonucleotide
ggaagtaaacactaaacagcttgcatcgagc

SEQ ID NO: 13828 - DNA, 30 bp, Artificial Sequence
  Synthetic oligonucleotide
ggacggggggaatatgagcaaacacggagc

SEQ ID NO: 13829 - DNA, 30 bp, Artificial Sequence
  Synthetic oligonucleotide
ccgagacgagtgttaccaggcatcaatagc

SEQ ID NO: 13830 - DNA, 30 bp, Artificial Sequence
  Synthetic oligonucleotide
ccgaacaggactagaagagcaacgtttagc

SEQ ID NO: 13831 - DNA, 30 bp, Artificial Sequence
  Synthetic oligonucleotide
aagtgtacaaagagagccaaggaaatgcgc

SEQ ID NO: 13832 - DNA, 30 bp, Artificial Sequence
  Synthetic oligonucleotide
cgaggcgtcgactgacgaatggagagcggc

SEQ ID NO: 13833 - DNA, 30 bp, Artificial Sequence
  Synthetic oligonucleotide
ggaccatgatatctgttcaaacaagagggc

SEQ ID NO: 13834 - DNA, 30 bp, Artificial Sequence
  Synthetic oligonucleotide
aaaggtaaaagcacatctagagaagtgggc

SEQ ID NO: 13835 - DNA, 30 bp, Artificial Sequence
  Synthetic oligonucleotide
ctaaacgaggagataggccctagaggatgc

SEQ ID NO: 13836 - DNA, 30 bp, Artificial Sequence
  Synthetic oligonucleotide
cgtgtaggaaggatgagcggatgctattgc

SEQ ID NO: 13837 - DNA, 30 bp, Artificial Sequence
  Synthetic oligonucleotide
cgaaagtacgagaaagtaagtatggaaatc

SEQ ID NO: 13838 - DNA, 30 bp, Artificial Sequence
  Synthetic oligonucleotide
ggacaaatgagatctccagagcagtgaatc

SEQ ID NO: 13839 - DNA, 30 bp, Artificial Sequence
  Synthetic oligonucleotide
gcgagtgcgaggacggtggggaagcacatc

SEQ ID NO: 13840 - DNA, 30 bp, Artificial Sequence
  Synthetic oligonucleotide
tcacatcacagcgaaaccgtgaccttgatc

SEQ ID NO: 13841 - DNA, 30 bp, Artificial Sequence
  Synthetic oligonucleotide
aagtagaacggtaagtaagagtcagccgtc

SEQ ID NO: 13842 - DNA, 30 bp, Artificial Sequence
  Synthetic oligonucleotide
atgggcacccgaagacttgaaatagctgtc

SEQ ID NO: 13843 - DNA, 30 bp, Artificial Sequence
  Synthetic oligonucleotide
ggcaacagcgagcgtgaagagggccaattc

SEQ ID NO: 13844 - DNA, 30 bp, Artificial Sequence
  Synthetic oligonucleotide
ctcgcaaccagatcactcgttgagaaaaag

SEQ ID NO: 13845 - DNA, 30 bp, Artificial Sequence
  Synthetic oligonucleotide
tcgttagggctcggcagacatctcagaaag

SEQ ID NO: 13846 - DNA, 30 bp, Artificial Sequence
  Synthetic oligonucleotide
cacgagctgagcgtctagcctacaggaaag

SEQ ID NO: 13847 - DNA, 30 bp, Artificial Sequence
  Synthetic oligonucleotide
gaaagagggtagactcagtgagacggaaag

SEQ ID NO: 13848 - DNA, 30 bp, Artificial Sequence
  Synthetic oligonucleotide
tgatgggcaggccaaaaaatgcagataaag

SEQ ID NO: 13849 - DNA, 30 bp, Artificial Sequence
  Synthetic oligonucleotide
acgtaatcgaggatcacccagtggcccaag

SEQ ID NO: 13850 - DNA, 30 bp, Artificial Sequence
  Synthetic oligonucleotide
gcgaggaggccttaggcaacgactggcaag

SEQ ID NO: 13851 - DNA, 30 bp, Artificial Sequence
  Synthetic oligonucleotide
acgggcagttgtacgattgacagtaagaag

SEQ ID NO: 13852 - DNA, 30 bp, Artificial Sequence
  Synthetic oligonucleotide
acaggcgcgctgataagcaaggtgtagaag

SEQ ID NO: 13853 - DNA, 30 bp, Artificial Sequence
  Synthetic oligonucleotide
cctcacttaagtaaggccaataaggcgaag

SEQ ID NO: 13854 - DNA, 30 bp, Artificial Sequence
  Synthetic oligonucleotide
tcgactaattccagagcgtaagtagttaag

SEQ ID NO: 13855 - DNA, 30 bp, Artificial Sequence
  Synthetic oligonucleotide
aaagccgaagcgcggagtaagagcacacag

SEQ ID NO: 13856 - DNA, 30 bp, Artificial Sequence
  Synthetic oligonucleotide
aggcggccaattggacatagcaaatgacag

SEQ ID NO: 13857 - DNA, 30 bp, Artificial Sequence
  Synthetic oligonucleotide
caaacgtgaaccatgtgctagccagaccag

SEQ ID NO: 13858 - DNA, 30 bp, Artificial Sequence
  Synthetic oligonucleotide
gggggcgagataacagtccgtcatacccag

SEQ ID NO: 13859 - DNA, 30 bp, Artificial Sequence
  Synthetic oligonucleotide
ctgtgttgaagatacaaaagaacaggccag

SEQ ID NO: 13860 - DNA, 30 bp, Artificial Sequence
  Synthetic oligonucleotide
tctgggaggaaatgggaccgatcattccag

SEQ ID NO: 13861 - DNA, 30 bp, Artificial Sequence
  Synthetic oligonucleotide
aggcgtaaggataagatcgcataacgtcag

SEQ ID NO: 13862 - DNA, 30 bp, Artificial Sequence
  Synthetic oligonucleotide
cgagggggcagtaaggtcgtcccaaaagag

SEQ ID NO: 13863 - DNA, 30 bp, Artificial Sequence
  Synthetic oligonucleotide
gaggaggcgaagatcaggaccatatcagag

SEQ ID NO: 13864 - DNA, 30 bp, Artificial Sequence
  Synthetic oligonucleotide
ccggaccaataaaggtataagcacctagag

SEQ ID NO: 13865 - DNA, 30 bp, Artificial Sequence
  Synthetic oligonucleotide
gaagtcagattcacggaggaggaagacgag

SEQ ID NO: 13866 - DNA, 30 bp, Artificial Sequence
  Synthetic oligonucleotide
ccaggcacgcacagataatggtcggccgag

SEQ ID NO: 13867 - DNA, 30 bp, Artificial Sequence
  Synthetic oligonucleotide
taaggggacattgattagtaaagatccgag

SEQ ID NO: 13868 - DNA, 30 bp, Artificial Sequence
  Synthetic oligonucleotide
cacaggcaagagtaacggactggcaaggag

SEQ ID NO: 13869 - DNA, 30 bp, Artificial Sequence
  Synthetic oligonucleotide
cgacggcgtatcccaacgaaacaaccggag

SEQ ID NO: 13870 - DNA, 30 bp, Artificial Sequence
  Synthetic oligonucleotide
cctacgcaaagaaggacgacgctaccggag

SEQ ID NO: 13871 - DNA, 30 bp, Artificial Sequence
  Synthetic oligonucleotide
cgagcgatcaagcaactaggccaatcggag

SEQ ID NO: 13872 - DNA, 30 bp, Artificial Sequence
  Synthetic oligonucleotide
agtcgaaaatatgggagacggaatgatgag

SEQ ID NO: 13873 - DNA, 30 bp, Artificial Sequence
  Synthetic oligonucleotide
ccatgcataggagtagcaaaggtttgtgag

SEQ ID NO: 13874 - DNA, 30 bp, Artificial Sequence
  Synthetic oligonucleotide
gacagggtacggatcaggatacgaaaatag

SEQ ID NO: 13875 - DNA, 30 bp, Artificial Sequence
  Synthetic oligonucleotide
caacggggaatcacagaatgatcggcatag

SEQ ID NO: 13876 - DNA, 30 bp, Artificial Sequence
  Synthetic oligonucleotide
cagactaagggcgccatagacagaagatag

SEQ ID NO: 13877 - DNA, 30 bp, Artificial Sequence
  Synthetic oligonucleotide
cgaaggaaagagtataacccccgtatatag

SEQ ID NO: 13878 - DNA, 30 bp, Artificial Sequence
  Synthetic oligonucleotide
aggggggcatcactctcaaggcggaactag

SEQ ID NO: 13879 - DNA, 30 bp, Artificial Sequence
  Synthetic oligonucleotide
ggacagacatgcgacgttaaatctgactag

SEQ ID NO: 13880 - DNA, 30 bp, Artificial Sequence
  Synthetic oligonucleotide
gaggcccgagggacagtatatcaatagtag

SEQ ID NO: 13881 - DNA, 30 bp, Artificial Sequence
  Synthetic oligonucleotide
tagcgccaacagaagagttgactagcttag

SEQ ID NO: 13882 - DNA, 30 bp, Artificial Sequence
  Synthetic oligonucleotide
cactggagaggcgtgcaaatgtgatcaacg

SEQ ID NO: 13883 - DNA, 30 bp, Artificial Sequence
  Synthetic oligonucleotide
atgcaacaaggcatagacacacgcggaacg

SEQ ID NO: 13884 - DNA, 30 bp, Artificial Sequence
  Synthetic oligonucleotide
ggaatgagacggcgaatagaggtggtaacg

SEQ ID NO: 13885 - DNA, 30 bp, Artificial Sequence
  Synthetic oligonucleotide
cagaccggaaccgcgagaaacttgcgcacg

SEQ ID NO: 13886 - DNA, 30 bp, Artificial Sequence
  Synthetic oligonucleotide
cgtgactgaggcctgtaatgtgcgaagacg

SEQ ID NO: 13887 - DNA, 30 bp, Artificial Sequence
  Synthetic oligonucleotide
ggtgggggaaaagtcagaatccacagtacg

SEQ ID NO: 13888 - DNA, 30 bp, Artificial Sequence
  Synthetic oligonucleotide
gggaggcctagagcaacgcacgattgaccg

SEQ ID NO: 13889 - DNA, 30 bp, Artificial Sequence
  Synthetic oligonucleotide
aggattagggtccagcacatacacatcccg

SEQ ID NO: 13890 - DNA, 30 bp, Artificial Sequence
  Synthetic oligonucleotide
agtaaagatacacgaccgagatagtaagcg

SEQ ID NO: 13891 - DNA, 30 bp, Artificial Sequence
  Synthetic oligonucleotide
gcagagtaatcgaccgtctaccttccagcg

SEQ ID NO: 13892 - DNA, 30 bp, Artificial Sequence
  Synthetic oligonucleotide
aactggggaccaaggacagagtagaaggcg

SEQ ID NO: 13893 - DNA, 30 bp, Artificial Sequence
  Synthetic oligonucleotide
agcgagcaaaaaggaaaaaaggtgaaggcg

SEQ ID NO: 13894 - DNA, 30 bp, Artificial Sequence
  Synthetic oligonucleotide
agggtgaaaatcgttaatgaacaccatgcg

SEQ ID NO: 13895 - DNA, 30 bp, Artificial Sequence
  Synthetic oligonucleotide
tatcaggaggcaaggaagactaatgctgcg

SEQ ID NO: 13896 - DNA, 30 bp, Artificial Sequence
  Synthetic oligonucleotide
gttcggatcagcgatagaaaggcgagtgcg

SEQ ID NO: 13897 - DNA, 30 bp, Artificial Sequence
  Synthetic oligonucleotide
cgagatagatggtaccgtactgcataatcg

SEQ ID NO: 13898 - DNA, 30 bp, Artificial Sequence
  Synthetic oligonucleotide
tgcacagagtgtccagaaacatacagatcg

SEQ ID NO: 13899 - DNA, 30 bp, Artificial Sequence
  Synthetic oligonucleotide
agcgcaataccagcagttcaaagcatctcg

SEQ ID NO: 13900 - DNA, 30 bp, Artificial Sequence
  Synthetic oligonucleotide
ccagagcaagggtgcgaaagcaaagagtcg

SEQ ID NO: 13901 - DNA, 30 bp, Artificial Sequence
  Synthetic oligonucleotide
cgtaagttagggcaggatcgtcggaattcg

SEQ ID NO: 13902 - DNA, 30 bp, Artificial Sequence
  Synthetic oligonucleotide
cagaaaactaagcgattgaggcccgattcg

SEQ ID NO: 13903 - DNA, 30 bp, Artificial Sequence
  Synthetic oligonucleotide
acaacgaaggcataaatgtcgtaacaaagg

SEQ ID NO: 13904 - DNA, 30 bp, Artificial Sequence
  Synthetic oligonucleotide
aggactgtaatgaaagaaggttggttaagg

SEQ ID NO: 13905 - DNA, 30 bp, Artificial Sequence
  Synthetic oligonucleotide
catccacgaaaaatccagaaccttgccagg

SEQ ID NO: 13906 - DNA, 30 bp, Artificial Sequence
  Synthetic oligonucleotide
aggcccaacagctggctaacggggaagagg

SEQ ID NO: 13907 - DNA, 30 bp, Artificial Sequence
  Synthetic oligonucleotide
tgggacaagaggtcatctgagcaaacgagg

SEQ ID NO: 13908 - DNA, 30 bp, Artificial Sequence
  Synthetic oligonucleotide
aggcggagtttacaacgagacagaatgagg

SEQ ID NO: 13909 - DNA, 30 bp, Artificial Sequence
  Synthetic oligonucleotide
actggaacatagggtaagagagacgggcgg

SEQ ID NO: 13910 - DNA, 30 bp, Artificial Sequence
  Synthetic oligonucleotide
agtcagatacgttttcagcataaggaaggg

SEQ ID NO: 13911 - DNA, 30 bp, Artificial Sequence
  Synthetic oligonucleotide
gcataaacatgcgcatactatcgggcaggg

SEQ ID NO: 13912 - DNA, 30 bp, Artificial Sequence
  Synthetic oligonucleotide
gggaatagtcgcatcgtggacaaacgaggg

SEQ ID NO: 13913 - DNA, 30 bp, Artificial Sequence
  Synthetic oligonucleotide
actggcagctaggatacaaaacacgtaggg

SEQ ID NO: 13914 - DNA, 30 bp, Artificial Sequence
  Synthetic oligonucleotide
aagaaaaggagtgtcatcttcgcgaacggg

SEQ ID NO: 13915 - DNA, 30 bp, Artificial Sequence
  Synthetic oligonucleotide
acagagggcattcaagtctcggaaatcggg

SEQ ID NO: 13916 - DNA, 30 bp, Artificial Sequence
  Synthetic oligonucleotide
gcgtcggttggaataaaacacgaaactggg

SEQ ID NO: 13917 - DNA, 30 bp, Artificial Sequence
  Synthetic oligonucleotide
acggaccaaaaaaagtgaacatggactggg

SEQ ID NO: 13918 - DNA, 30 bp, Artificial Sequence
  Synthetic oligonucleotide
aggaaccgtacgtaccacaaaagataatgg

SEQ ID NO: 13919 - DNA, 30 bp, Artificial Sequence
  Synthetic oligonucleotide
acgagaaaaagaggggacggcgtaggctgg

SEQ ID NO: 13920 - DNA, 30 bp, Artificial Sequence
  Synthetic oligonucleotide
ctggaccgagagaaggcacatgaaccgtgg

SEQ ID NO: 13921 - DNA, 30 bp, Artificial Sequence
  Synthetic oligonucleotide
acgtctgatgcaaaagaatggcgatgttgg

SEQ ID NO: 13922 - DNA, 30 bp, Artificial Sequence
  Synthetic oligonucleotide
gctggagggtgagcggacataaattgaatg

SEQ ID NO: 13923 - DNA, 30 bp, Artificial Sequence
  Synthetic oligonucleotide
taagacatacaatggaatggacacaccatg

SEQ ID NO: 13924 - DNA, 30 bp, Artificial Sequence
  Synthetic oligonucleotide
ccggcccaataagataactagcgaaggatg

SEQ ID NO: 13925 - DNA, 30 bp, Artificial Sequence
  Synthetic oligonucleotide
aacgaattcagagtcagggcacaagggctg

SEQ ID NO: 13926 - DNA, 30 bp, Artificial Sequence
  Synthetic oligonucleotide
tgagcgaactaaataaagcgccggaacgtg

SEQ ID NO: 13927 - DNA, 30 bp, Artificial Sequence
  Synthetic oligonucleotide
agggaaaagtaatgggtaaagaaaaccgtg

SEQ ID NO: 13928 - DNA, 30 bp, Artificial Sequence
  Synthetic oligonucleotide
accgacgcgaggaggagtaatcaagaggtg

SEQ ID NO: 13929 - DNA, 30 bp, Artificial Sequence
  Synthetic oligonucleotide
ggagcacagagtgcaaccgttaaaggggtg

SEQ ID NO: 13930 - DNA, 30 bp, Artificial Sequence
  Synthetic oligonucleotide
ccgtcaaaagggtaacgtgagtccagattg

SEQ ID NO: 13931 - DNA, 30 bp, Artificial Sequence
  Synthetic oligonucleotide
aggaacgaggaaagatcttcgttaggcttg

SEQ ID NO: 13932 - DNA, 30 bp, Artificial Sequence
  Synthetic oligonucleotide
cctcgacgacaagtaggaatagtagatttg

SEQ ID NO: 13933 - DNA, 30 bp, Artificial Sequence
  Synthetic oligonucleotide
agaccaggagggtgaataacatgcacaaat

SEQ ID NO: 13934 - DNA, 30 bp, Artificial Sequence
  Synthetic oligonucleotide
tcaggagacaccaagtagtagtaaggaaat

SEQ ID NO: 13935 - DNA, 30 bp, Artificial Sequence
  Synthetic oligonucleotide
aacgtgagagatactgaagtaaggtgaaat

SEQ ID NO: 13936 - DNA, 30 bp, Artificial Sequence
  Synthetic oligonucleotide
tagggagcggggagtacaacggaaataaat

SEQ ID NO: 13937 - DNA, 30 bp, Artificial Sequence
  Synthetic oligonucleotide
aaagaagcagggaactagaaagcatacaat

SEQ ID NO: 13938 - DNA, 30 bp, Artificial Sequence
  Synthetic oligonucleotide
cggaggtgagaacgtgtcaagcggacgaat

SEQ ID NO: 13939 - DNA, 30 bp, Artificial Sequence
  Synthetic oligonucleotide
acggagtggctgcgtagcacagcttggaat

SEQ ID NO: 13940 - DNA, 30 bp, Artificial Sequence
  Synthetic oligonucleotide
cagtaagagagggtaccagaacagacacat

SEQ ID NO: 13941 - DNA, 30 bp, Artificial Sequence
  Synthetic oligonucleotide
cagtgccagataaaacagtagatatagcat

SEQ ID NO: 13942 - DNA, 30 bp, Artificial Sequence
  Synthetic oligonucleotide
agctcagaggctgaaaggggtgcatggcat

SEQ ID NO: 13943 - DNA, 30 bp, Artificial Sequence
  Synthetic oligonucleotide
cggtccggagaagacgatttcacatttcat

SEQ ID NO: 13944 - DNA, 30 bp, Artificial Sequence
  Synthetic oligonucleotide
cgtgcgtgttagaacggtaatagtccagat

SEQ ID NO: 13945 - DNA, 30 bp, Artificial Sequence
  Synthetic oligonucleotide
tctacaccgtagagaaccagagggctagat

SEQ ID NO: 13946 - DNA, 30 bp, Artificial Sequence
  Synthetic oligonucleotide
aggagtcagtgcgaatgtacggcgtaggat

SEQ ID NO: 13947 - DNA, 30 bp, Artificial Sequence
  Synthetic oligonucleotide
caggagaacgaagataaacagagaggttat

SEQ ID NO: 13948 - DNA, 30 bp, Artificial Sequence
  Synthetic oligonucleotide
cagggagggtcacgatggatagtgcgtact

SEQ ID NO: 13949 - DNA, 30 bp, Artificial Sequence
  Synthetic oligonucleotide
cggaggaaagtagccagacagacatgagct

SEQ ID NO: 13950 - DNA, 30 bp, Artificial Sequence
  Synthetic oligonucleotide
tcacacacgacgataagattaagggtagct

SEQ ID NO: 13951 - DNA, 30 bp, Artificial Sequence
  Synthetic oligonucleotide
ccacgaccataaacaccaggcgactccgct

SEQ ID NO: 13952 - DNA, 30 bp, Artificial Sequence
  Synthetic oligonucleotide
cgggacaagtgcaaatagggctagagtgct

SEQ ID NO: 13953 - DNA, 30 bp, Artificial Sequence
  Synthetic oligonucleotide
tggccaaggataaacaaattcgctgcgagt

SEQ ID NO: 13954 - DNA, 30 bp, Artificial Sequence
  Synthetic oligonucleotide
cctcattacagcaaaagttaaaagaggagt

SEQ ID NO: 13955 - DNA, 30 bp, Artificial Sequence
  Synthetic oligonucleotide
agaggaaaagttaaatataaaggagctagt

SEQ ID NO: 13956 - DNA, 30 bp, Artificial Sequence
  Synthetic oligonucleotide
aacataacacactagaagcaatggagtagt

SEQ ID NO: 13957 - DNA, 30 bp, Artificial Sequence
  Synthetic oligonucleotide
aaacatcaggcatgagtcacagagcaacgt

SEQ ID NO: 13958 - DNA, 30 bp, Artificial Sequence
  Synthetic oligonucleotide
tagtcggaagtctgcaagacaaagtagcgt

SEQ ID NO: 13959 - DNA, 30 bp, Artificial Sequence
  Synthetic oligonucleotide
cggtacagtactaaagggagttcacaaggt

SEQ ID NO: 13960 - DNA, 30 bp, Artificial Sequence
  Synthetic oligonucleotide
gaagaagcgggggcctacaaagcaggaggt

SEQ ID NO: 13961 - DNA, 30 bp, Artificial Sequence
  Synthetic oligonucleotide
aggaccaaacaaatgccaatgtgaaacggt

SEQ ID NO: 13962 - DNA, 30 bp, Artificial Sequence
  Synthetic oligonucleotide
acgcgaatctaaggaacagaagcgtgcggt

SEQ ID NO: 13963 - DNA, 30 bp, Artificial Sequence
  Synthetic oligonucleotide
agaagagatgtgactcccaacaacgtcggt

SEQ ID NO: 13964 - DNA, 30 bp, Artificial Sequence
  Synthetic oligonucleotide
acgggaggcactcgtcgaaaaaacaatggt

SEQ ID NO: 13965 - DNA, 30 bp, Artificial Sequence
  Synthetic oligonucleotide
aggtgacagtgagggacaaaagtctatggt

SEQ ID NO: 13966 - DNA, 30 bp, Artificial Sequence
  Synthetic oligonucleotide
aggagagggaaaaaccagcccggcacgatt

SEQ ID NO: 13967 - DNA, 30 bp, Artificial Sequence
  Synthetic oligonucleotide
tccgacgagccgacggtgacgaatgcgatt

SEQ ID NO: 13968 - DNA, 30 bp, Artificial Sequence
  Synthetic oligonucleotide
agacaagataccattggcattaagcgagtt

SEQ ID NO: 13969 - DNA, 30 bp, Artificial Sequence
  Synthetic oligonucleotide
cgtaaaccaagggtggagtgttagtaggtt

SEQ ID NO: 13970 - DNA, 30 bp, Artificial Sequence
  Synthetic oligonucleotide
ttggggggaagcgaaggtcatgaaagcaaa

SEQ ID NO: 13971 - DNA, 30 bp, Artificial Sequence
  Synthetic oligonucleotide
cgccaagggaaaataagaacggaactgaaa

SEQ ID NO: 13972 - DNA, 30 bp, Artificial Sequence
  Synthetic oligonucleotide
agcgcacgagggtaagtgatattgttgaaa

SEQ ID NO: 13973 - DNA, 30 bp, Artificial Sequence
  Synthetic oligonucleotide
gcaagggtctggagggacaaccagcgtaaa

SEQ ID NO: 13974 - DNA, 30 bp, Artificial Sequence
  Synthetic oligonucleotide
aagggtaaggaatcgagcaatgctaaacaa

SEQ ID NO: 13975 - DNA, 30 bp, Artificial Sequence
  Synthetic oligonucleotide
ataaggggaaggcgaagatccagtgagcaa

SEQ ID NO: 13976 - DNA, 30 bp, Artificial Sequence
  Synthetic oligonucleotide
cagtaatgggaagaaggagataaatatcaa

SEQ ID NO: 13977 - DNA, 31 bp, Artificial Sequence
  Synthetic oligonucleotide
aagggcgtcgtctaggggaacaagctatcaa

SEQ ID NO: 13978 - DNA, 30 bp, Artificial Sequence
  Synthetic oligonucleotide
gcacgtcagtgagagacggggggcgaagaa

SEQ ID NO: 13979 - DNA, 30 bp, Artificial Sequence
  Synthetic oligonucleotide
agaaagcaagtgcgtggttaggcaccagaa

SEQ ID NO: 13980 - DNA, 30 bp, Artificial Sequence
  Synthetic oligonucleotide
tcatgactaaggctgcccgaggaatcagaa

SEQ ID NO: 13981 - DNA, 30 bp, Artificial Sequence
  Synthetic oligonucleotide
caatggaaatataagacgaagtggagagaa

SEQ ID NO: 13982 - DNA, 30 bp, Artificial Sequence
  Synthetic oligonucleotide
gggagcagcctggcgaaagactttggagaa

SEQ ID NO: 13983 - DNA, 30 bp, Artificial Sequence
  Synthetic oligonucleotide
gcaggacgacaaatgtaaggagcgatagaa

SEQ ID NO: 13984 - DNA, 30 bp, Artificial Sequence
  Synthetic oligonucleotide
gctcatgtggcaacgtaaattgggatagaa

SEQ ID NO: 13985 - DNA, 30 bp, Artificial Sequence
  Synthetic oligonucleotide
acgggaacttacaagcggcataagttagaa

SEQ ID NO: 13986 - DNA, 30 bp, Artificial Sequence
  Synthetic oligonucleotide
ttaccacgaaaggaaagtgagtcatccgaa

SEQ ID NO: 13987 - DNA, 30 bp, Artificial Sequence
  Synthetic oligonucleotide
ggaaggggctaaactgagatactccgcgaa

SEQ ID NO: 13988 - DNA, 30 bp, Artificial Sequence
  Synthetic oligonucleotide
ggcacgagaaatcgtaacactacctgcgaa

SEQ ID NO: 13989 - DNA, 30 bp, Artificial Sequence
  Synthetic oligonucleotide
caaggtctgcaagaaaaataagaactcgaa

SEQ ID NO: 13990 - DNA, 30 bp, Artificial Sequence
  Synthetic oligonucleotide
ccgcaaaggcacaacatattgaaacaggaa

SEQ ID NO: 13991 - DNA, 30 bp, Artificial Sequence
  Synthetic oligonucleotide
atcagcgaagcatcggggcgaggagaggaa

SEQ ID NO: 13992 - DNA, 30 bp, Artificial Sequence
  Synthetic oligonucleotide
cgctaccggaatcgcagaaggaacgaggaa

SEQ ID NO: 13993 - DNA, 30 bp, Artificial Sequence
  Synthetic oligonucleotide
cgaccggaaaaaatctcacagggcgaggaa

SEQ ID NO: 13994 - DNA, 30 bp, Artificial Sequence
  Synthetic oligonucleotide
agtgaatgcgtgagctgaacaacatgggaa

SEQ ID NO: 13995 - DNA, 30 bp, Artificial Sequence
  Synthetic oligonucleotide
cataggaagaaaaaaagaggaaatggataa

SEQ ID NO: 13996 - DNA, 30 bp, Artificial Sequence
  Synthetic oligonucleotide
cgtctaccaaatggtgcgcggtgtggataa

SEQ ID NO: 13997 - DNA, 30 bp, Artificial Sequence
  Synthetic oligonucleotide
cgttgacgaggggtagcagaagcgaactaa

SEQ ID NO: 13998 - DNA, 30 bp, Artificial Sequence
  Synthetic oligonucleotide
tagacagggactaggaacacagggcacaca

SEQ ID NO: 13999 - DNA, 30 bp, Artificial Sequence
  Synthetic oligonucleotide
acactcagaatacctaagcgcgataccaca

SEQ ID NO: 14000 - DNA, 30 bp, Artificial Sequence
  Synthetic oligonucleotide
caaccacggaaggacagtacactaagcaca

SEQ ID NO: 14001 - DNA, 30 bp, Artificial Sequence
  Synthetic oligonucleotide
aactgaaaaaggcaacccaggcacggcaca

SEQ ID NO: 14002 - DNA, 30 bp, Artificial Sequence
  Synthetic oligonucleotide
agtctaatctaggagaagagaaagtgcaca

SEQ ID NO: 14003 - DNA, 30 bp, Artificial Sequence
  Synthetic oligonucleotide
actaggtatcagaggaagaggacatataca

SEQ ID NO: 14004 - DNA, 30 bp, Artificial Sequence
  Synthetic oligonucleotide
acggatcgcatgcgagtcgcctgaagtaca

SEQ ID NO: 14005 - DNA, 30 bp, Artificial Sequence
  Synthetic oligonucleotide
aggaatggtggcgagcacaagatcgttaca

SEQ ID NO: 14006 - DNA, 30 bp, Artificial Sequence
  Synthetic oligonucleotide
aaacaaccacaaaacgacatcgctaaacca

SEQ ID NO: 14007 - DNA, 30 bp, Artificial Sequence
  Synthetic oligonucleotide
tcgacaaataaaaccataatccgcatacca

SEQ ID NO: 14008 - DNA, 30 bp, Artificial Sequence
  Synthetic oligonucleotide
tcgagtgcgcccaccaaataactacggcca

SEQ ID NO: 14009 - DNA, 30 bp, Artificial Sequence
  Synthetic oligonucleotide
gcgtatctacgaatataatagatcaaagca

SEQ ID NO: 14010 - DNA, 30 bp, Artificial Sequence
  Synthetic oligonucleotide
acaattggcactaacgagtcaaagacagca

SEQ ID NO: 14011 - DNA, 30 bp, Artificial Sequence
  Synthetic oligonucleotide
cgtacgacaaggcttgattcacaaccagca

SEQ ID NO: 14012 - DNA, 30 bp, Artificial Sequence
  Synthetic oligonucleotide
cgtcgacacatatgaggtaatactcgagca

SEQ ID NO: 14013 - DNA, 30 bp, Artificial Sequence
  Synthetic oligonucleotide
ctgaggaagacacatggaagaaggtgagca

SEQ ID NO: 14014 - DNA, 30 bp, Artificial Sequence
  Synthetic oligonucleotide
catgtaacgaattcatcgcgcagggaggca

SEQ ID NO: 14015 - DNA, 30 bp, Artificial Sequence
  Synthetic oligonucleotide
acagaagcatactagtagagtgtcatatca

SEQ ID NO: 14016 - DNA, 30 bp, Artificial Sequence
  Synthetic oligonucleotide
cgaggggcgcggatctgtcacgaaaattca

SEQ ID NO: 14017 - DNA, 30 bp, Artificial Sequence
  Synthetic oligonucleotide
ctaaaggagaggcgaggttcaaacgtaaga

SEQ ID NO: 14018 - DNA, 30 bp, Artificial Sequence
  Synthetic oligonucleotide
cagagttcgaaagttagggggaaccacaga

SEQ ID NO: 14019 - DNA, 30 bp, Artificial Sequence
  Synthetic oligonucleotide
gacgatcaggggaggggtatgtctgacaga

SEQ ID NO: 14020 - DNA, 29 bp, Artificial Sequence
  Synthetic oligonucleotide
tacggtgaggtccaatgaagatgtacaga

SEQ ID NO: 14021 - DNA, 30 bp, Artificial Sequence
  Synthetic oligonucleotide
cgggtcagaatataatggttcaaccagaga

SEQ ID NO: 14022 - DNA, 30 bp, Artificial Sequence
  Synthetic oligonucleotide
ggggggagtagaagaaaattgctagcgaga

SEQ ID NO: 14023 - DNA, 30 bp, Artificial Sequence
  Synthetic oligonucleotide
agagaatgtaagaaatcggttgaaaggaga

SEQ ID NO: 14024 - DNA, 30 bp, Artificial Sequence
  Synthetic oligonucleotide
aaacatagaaaccacagcgcgagcaggaga

SEQ ID NO: 14025 - DNA, 30 bp, Artificial Sequence
  Synthetic oligonucleotide
cgacagtgggagtccgaccgtatcgctaga

SEQ ID NO: 14026 - DNA, 30 bp, Artificial Sequence
  Synthetic oligonucleotide
gcagacgaacagtcaggccgacaccaacga

SEQ ID NO: 14027 - DNA, 30 bp, Artificial Sequence
  Synthetic oligonucleotide
aacacaagccacaaactaaggttcgagcga

SEQ ID NO: 14028 - DNA, 30 bp, Artificial Sequence
  Synthetic oligonucleotide
ccgcgacaaaattcgagcccatctgagcga

SEQ ID NO: 14029 - DNA, 30 bp, Artificial Sequence
  Synthetic oligonucleotide
acacgtcatgttggggcagggtaaacgcga

SEQ ID NO: 14030 - DNA, 30 bp, Artificial Sequence
  Synthetic oligonucleotide
cagtaagtcgaacaacaggggcccaggcga

SEQ ID NO: 14031 - DNA, 30 bp, Artificial Sequence
  Synthetic oligonucleotide
tcgtagcaggtggcggcttggataatgcga

SEQ ID NO: 14032 - DNA, 30 bp, Artificial Sequence
  Synthetic oligonucleotide
ttaggggcgtaagagactagcaccgatcga

SEQ ID NO: 14033 - DNA, 30 bp, Artificial Sequence
  Synthetic oligonucleotide
gatcgaccgccgtaacagaggggataagga

SEQ ID NO: 14034 - DNA, 30 bp, Artificial Sequence
  Synthetic oligonucleotide
ccgaaggcacgtgaacgggttagtccagga

SEQ ID NO: 14035 - DNA, 30 bp, Artificial Sequence
  Synthetic oligonucleotide
cagcgtaaggcgaggcttactgccagagga

SEQ ID NO: 14036 - DNA, 30 bp, Artificial Sequence
  Synthetic oligonucleotide
gtaagagggtacgccgaaatcgatttagga

SEQ ID NO: 14037 - DNA, 30 bp, Artificial Sequence
  Synthetic oligonucleotide
ctagagagggctataagaaaacggtgcgga

SEQ ID NO: 14038 - DNA, 30 bp, Artificial Sequence
  Synthetic oligonucleotide
aggatggtcgtgtcaacagagtggttcgga

SEQ ID NO: 14039 - DNA, 30 bp, Artificial Sequence
  Synthetic oligonucleotide
gtgaaaaaagggatagggaaattgaaggga

SEQ ID NO: 14040 - DNA, 30 bp, Artificial Sequence
  Synthetic oligonucleotide
cggaagtgggaactgcaacgatgcccggga

SEQ ID NO: 14041 - DNA, 30 bp, Artificial Sequence
  Synthetic oligonucleotide
acgtggtgccaataccgctaaaaagatgga

SEQ ID NO: 14042 - DNA, 30 bp, Artificial Sequence
  Synthetic oligonucleotide
acgggggtgacatatggaagcacatatgga

SEQ ID NO: 14043 - DNA, 30 bp, Artificial Sequence
  Synthetic oligonucleotide
tccaggcagctgagaaaaaccagagaatga

SEQ ID NO: 14044 - DNA, 30 bp, Artificial Sequence
  Synthetic oligonucleotide
cacggaaaacgactacgccattaggaatga

SEQ ID NO: 14045 - DNA, 30 bp, Artificial Sequence
  Synthetic oligonucleotide
cggataaagggagtaggtagacattgatga

SEQ ID NO: 14046 - DNA, 30 bp, Artificial Sequence
  Synthetic oligonucleotide
cgatgacgagttaacccaaaatcatgctga

SEQ ID NO: 14047 - DNA, 30 bp, Artificial Sequence
  Synthetic oligonucleotide
tcgcacaaagagacggtaagggtgtggtga

SEQ ID NO: 14048 - DNA, 30 bp, Artificial Sequence
  Synthetic oligonucleotide
gggaaaaactatagcaaggcaaacgggata

SEQ ID NO: 14049 - DNA, 30 bp, Artificial Sequence
  Synthetic oligonucleotide
ccgtcaaatcggcaaaagtgtcgtcaacta

SEQ ID NO: 14050 - DNA, 30 bp, Artificial Sequence
  Synthetic oligonucleotide
aatggaggagatgggccaagagaatcagta

SEQ ID NO: 14051 - DNA, 30 bp, Artificial Sequence
  Synthetic oligonucleotide
agggcaaatggcgtcgagcttggccgagta

SEQ ID NO: 14052 - DNA, 30 bp, Artificial Sequence
  Synthetic oligonucleotide
cgtacagcaatggataaccgagcacggaac

SEQ ID NO: 14053 - DNA, 30 bp, Artificial Sequence
  Synthetic oligonucleotide
accacgaaaggaatataaaagcgggctaac

SEQ ID NO: 14054 - DNA, 30 bp, Artificial Sequence
  Synthetic oligonucleotide
acgagactcgaaggggccggtcaactacac

SEQ ID NO: 14055 - DNA, 30 bp, Artificial Sequence
  Synthetic oligonucleotide
gtcaagagtaatcaaaagaggacgaagcac

SEQ ID NO: 14056 - DNA, 30 bp, Artificial Sequence
  Synthetic oligonucleotide
aggatgtacctgtaaatataagaggagcac

SEQ ID NO: 14057 - DNA, 30 bp, Artificial Sequence
  Synthetic oligonucleotide
cctagactggggcctcgaaacaaagcgcac

SEQ ID NO: 14058 - DNA, 30 bp, Artificial Sequence
  Synthetic oligonucleotide
gcaaaataactcgagcgaggaagggatcac

SEQ ID NO: 14059 - DNA, 30 bp, Artificial Sequence
  Synthetic oligonucleotide
acgggaggttagttgcgccacgagggcgac

SEQ ID NO: 14060 - DNA, 30 bp, Artificial Sequence
  Synthetic oligonucleotide
cagcggaggcaataatgtaggcaatgcgac

SEQ ID NO: 14061 - DNA, 30 bp, Artificial Sequence
  Synthetic oligonucleotide
ggcaaaaacggatgcgcgaactacgtcgac

SEQ ID NO: 14062 - DNA, 30 bp, Artificial Sequence
  Synthetic oligonucleotide
agggataaatgggtagacagaggggcaacc

SEQ ID NO: 14063 - DNA, 30 bp, Artificial Sequence
  Synthetic oligonucleotide
aagacgtataaaagcctaaaagaaaccacc

SEQ ID NO: 14064 - DNA, 30 bp, Artificial Sequence
  Synthetic oligonucleotide
ctagaacatggagggaaaacagccggcacc

SEQ ID NO: 14065 - DNA, 30 bp, Artificial Sequence
  Synthetic oligonucleotide
aggatgttagagccggaaacgaataggacc

SEQ ID NO: 14066 - DNA, 35 bp, Artificial Sequence
  Synthetic oligonucleotide
agttaataacaaataataagaaagggcacggcccc

SEQ ID NO: 14067 - DNA, 30 bp, Artificial Sequence
  Synthetic oligonucleotide
agaagtgtactaatgaagagggacatgccc

SEQ ID NO: 14068 - DNA, 30 bp, Artificial Sequence
  Synthetic oligonucleotide
ccaaggcagggtggggaagacgttgtgccc

SEQ ID NO: 14069 - DNA, 30 bp, Artificial Sequence
  Synthetic oligonucleotide
ggatcagaggaaagaaaaagtgcgccagcc

SEQ ID NO: 14070 - DNA, 30 bp, Artificial Sequence
  Synthetic oligonucleotide
ctaactaaggaagaaaaaaaactagtggcc

SEQ ID NO: 14071 - DNA, 30 bp, Artificial Sequence
  Synthetic oligonucleotide
acaaagatacgaggctagctagagtgatcc

SEQ ID NO: 14072 - DNA, 30 bp, Artificial Sequence
  Synthetic oligonucleotide
cacgaacaaatagataatgtgtgtgagtcc

SEQ ID NO: 14073 - DNA, 30 bp, Artificial Sequence
  Synthetic oligonucleotide
agacgatcgtcacaatcggcggtaaaaagc

SEQ ID NO: 14074 - DNA, 30 bp, Artificial Sequence
  Synthetic oligonucleotide
aggcgtcgtgacgtgaaaatagatcaaagc

SEQ ID NO: 14075 - DNA, 30 bp, Artificial Sequence
  Synthetic oligonucleotide
aggcaatgagaaaggacaatgatagaaagc

SEQ ID NO: 14076 - DNA, 30 bp, Artificial Sequence
  Synthetic oligonucleotide
gggaacagggggaacaacaccgcttgaagc

SEQ ID NO: 14077 - DNA, 30 bp, Artificial Sequence
  Synthetic oligonucleotide
agctaagccgagcatgcagggatgaacagc

SEQ ID NO: 14078 - DNA, 30 bp, Artificial Sequence
  Synthetic oligonucleotide
tgcgaggaaaacaagtcgaataggccgagc

SEQ ID NO: 14079 - DNA, 30 bp, Artificial Sequence
  Synthetic oligonucleotide
caaagtgggagaaaacgacttcgtagtagc

SEQ ID NO: 14080 - DNA, 31 bp, Artificial Sequence
  Synthetic oligonucleotide
acgagcaaggtcacgagaagttggcgacggc

SEQ ID NO: 14081 - DNA, 30 bp, Artificial Sequence
  Synthetic oligonucleotide
aggacgacaacattgtctgtagaagtgggc

SEQ ID NO: 14082 - DNA, 30 bp, Artificial Sequence
  Synthetic oligonucleotide
gacggacaacactataattcaaagcactgc

SEQ ID NO: 14083 - DNA, 30 bp, Artificial Sequence
  Synthetic oligonucleotide
taggaacaggagtataaaagtccaaagtgc

SEQ ID NO: 14084 - DNA, 30 bp, Artificial Sequence
  Synthetic oligonucleotide
cgagccgcgtgtgtgtaacccagatggtgc

SEQ ID NO: 14085 - DNA, 30 bp, Artificial Sequence
  Synthetic oligonucleotide
aggtgcgtaggataagtcactacgaattgc

SEQ ID NO: 14086 - DNA, 30 bp, Artificial Sequence
  Synthetic oligonucleotide
cagccgagcgaaatagagccaataagttgc

SEQ ID NO: 14087 - DNA, 30 bp, Artificial Sequence
  Synthetic oligonucleotide
cgagtcgatacctggaactaaggggcgatc

SEQ ID NO: 14088 - DNA, 30 bp, Artificial Sequence
  Synthetic oligonucleotide
gatgtaggggacacaagagaaacgtcgatc

SEQ ID NO: 14089 - DNA, 30 bp, Artificial Sequence
  Synthetic oligonucleotide
cacgggcaaagggtaagtaatcaccgtatc

SEQ ID NO: 14090 - DNA, 30 bp, Artificial Sequence
  Synthetic oligonucleotide
cgagggccagaggattagtcagcctgcctc

SEQ ID NO: 14091 - DNA, 30 bp, Artificial Sequence
  Synthetic oligonucleotide
aggagacagtacaggcgaaatcatgcggtc

SEQ ID NO: 14092 - DNA, 30 bp, Artificial Sequence
  Synthetic oligonucleotide
acgacaagcgaaaagagtagatagtccttc

SEQ ID NO: 14093 - DNA, 30 bp, Artificial Sequence
  Synthetic oligonucleotide
cgacgggctaaataaaatttgggacaaaag

SEQ ID NO: 14094 - DNA, 30 bp, Artificial Sequence
  Synthetic oligonucleotide
cgaaagtgacatacatgtgaaaagcaaaag

SEQ ID NO: 14095 - DNA, 30 bp, Artificial Sequence
  Synthetic oligonucleotide
acataggattgcgatagcgccaatcgaaag

SEQ ID NO: 14096 - DNA, 30 bp, Artificial Sequence
  Synthetic oligonucleotide
acaggaatacggcgtaggccgcaagacaag

SEQ ID NO: 14097 - DNA, 30 bp, Artificial Sequence
  Synthetic oligonucleotide
ccgcaaacgtcaaaaggaaagcgtcccaag

SEQ ID NO: 14098 - DNA, 30 bp, Artificial Sequence
  Synthetic oligonucleotide
aggaaaaaaagttagcgaatagggaagaag

SEQ ID NO: 14099 - DNA, 30 bp, Artificial Sequence
  Synthetic oligonucleotide
gatcgcgaagacaccggacggtataagaag

SEQ ID NO: 14100 - DNA, 30 bp, Artificial Sequence
  Synthetic oligonucleotide
agcgaagcatcaagccgtgtgagtacgaag

SEQ ID NO: 14101 - DNA, 30 bp, Artificial Sequence
  Synthetic oligonucleotide
tgacaggcgaaataacggctaaactggaag

SEQ ID NO: 14102 - DNA, 30 bp, Artificial Sequence
  Synthetic oligonucleotide
cgtcaacggaggctagtgggcaaatataag

SEQ ID NO: 14103 - DNA, 30 bp, Artificial Sequence
  Synthetic oligonucleotide
gggacgttcaaataggacaacagatgtaag

SEQ ID NO: 14104 - DNA, 30 bp, Artificial Sequence
  Synthetic oligonucleotide
agacaaaatatcacaagtgtgatctgtaag

SEQ ID NO: 14105 - DNA, 30 bp, Artificial Sequence
  Synthetic oligonucleotide
caaggcataaactgggcgcatctaaaacag

SEQ ID NO: 14106 - DNA, 30 bp, Artificial Sequence
  Synthetic oligonucleotide
caaaggcaccagaaccgctcaaataaacag

SEQ ID NO: 14107 - DNA, 30 bp, Artificial Sequence
  Synthetic oligonucleotide
tagaagctaaccataacgaataaccaacag

SEQ ID NO: 14108 - DNA, 30 bp, Artificial Sequence
  Synthetic oligonucleotide
ctgaaccgagcaaaagtaggccacagacag

SEQ ID NO: 14109 - DNA, 30 bp, Artificial Sequence
  Synthetic oligonucleotide
cggggcagaaaggaacgtaccctatgacag

SEQ ID NO: 14110 - DNA, 30 bp, Artificial Sequence
  Synthetic oligonucleotide
aggaagtcaacgtcgaaaatcccggcgcag

SEQ ID NO: 14111 - DNA, 30 bp, Artificial Sequence
  Synthetic oligonucleotide
agggacatatcttaactgaagcgggggcag

SEQ ID NO: 14112 - DNA, 30 bp, Artificial Sequence
  Synthetic oligonucleotide
aggacaataagcgagacgtatcgccgtcag

SEQ ID NO: 14113 - DNA, 30 bp, Artificial Sequence
  Synthetic oligonucleotide
ggaggaaatggtatatccaggaaacttcag

SEQ ID NO: 14114 - DNA, 30 bp, Artificial Sequence
  Synthetic oligonucleotide
cattgcgaataggtatcgagaacaagagag

SEQ ID NO: 14115 - DNA, 30 bp, Artificial Sequence
  Synthetic oligonucleotide
tccggatgcaggggaacgaagacaagagag

SEQ ID NO: 14116 - DNA, 30 bp, Artificial Sequence
  Synthetic oligonucleotide
agaggcaaagaataactttaactaagagag

SEQ ID NO: 14117 - DNA, 30 bp, Artificial Sequence
  Synthetic oligonucleotide
acgttatggtcggggaggaaatccagagag

SEQ ID NO: 14118 - DNA, 30 bp, Artificial Sequence
  Synthetic oligonucleotide
agacgatcacattactggtatccgatagag

SEQ ID NO: 14119 - DNA, 30 bp, Artificial Sequence
  Synthetic oligonucleotide
cctgcatcgtcagatgattacagcgtagag

SEQ ID NO: 14120 - DNA, 30 bp, Artificial Sequence
  Synthetic oligonucleotide
ccgaggaaatggcaatggcgaagaaacgag

SEQ ID NO: 14121 - DNA, 30 bp, Artificial Sequence
  Synthetic oligonucleotide
ctaaaagtgacaaaccagcatacaaccgag

SEQ ID NO: 14122 - DNA, 30 bp, Artificial Sequence
  Synthetic oligonucleotide
cgtcgcgaggagcgcgaattagctcccgag

SEQ ID NO: 14123 - DNA, 30 bp, Artificial Sequence
  Synthetic oligonucleotide
caagctctggaggtgatacgtacaagcgag

SEQ ID NO: 14124 - DNA, 30 bp, Artificial Sequence
  Synthetic oligonucleotide
aaggtgaaatagctaggggagtagagcgag

SEQ ID NO: 14125 - DNA, 30 bp, Artificial Sequence
  Synthetic oligonucleotide
agacgttacgaggactgaggtaggtgcgag

SEQ ID NO: 14126 - DNA, 30 bp, Artificial Sequence
  Synthetic oligonucleotide
gcacgctaaatgcaatagccaatccaggag

SEQ ID NO: 14127 - DNA, 30 bp, Artificial Sequence
  Synthetic oligonucleotide
tggccatccaggaggcgaatcaacagggag

SEQ ID NO: 14128 - DNA, 30 bp, Artificial Sequence
  Synthetic oligonucleotide
aacggcaacgtctacacgtacgtccatgag

SEQ ID NO: 14129 - DNA, 30 bp, Artificial Sequence
  Synthetic oligonucleotide
ggcatgcatgggaacaggattaaaactgag

SEQ ID NO: 14130 - DNA, 30 bp, Artificial Sequence
  Synthetic oligonucleotide
ggctatggcacccgaaaatgacaccgtgag

SEQ ID NO: 14131 - DNA, 30 bp, Artificial Sequence
  Synthetic oligonucleotide
aggagacatcctacgcgagcggagcttgag

SEQ ID NO: 14132 - DNA, 30 bp, Artificial Sequence
  Synthetic oligonucleotide
cgaggaacacctccgcaggctcgagttgag

SEQ ID NO: 14133 - DNA, 30 bp, Artificial Sequence
  Synthetic oligonucleotide
tacagaacgtaagcgagctcatcgacatag

SEQ ID NO: 14134 - DNA, 30 bp, Artificial Sequence
  Synthetic oligonucleotide
taggttcaagcaacagagcctaagcagtag

SEQ ID NO: 14135 - DNA, 30 bp, Artificial Sequence
  Synthetic oligonucleotide
agacgaaaaagattagtttgaaacacgtag

SEQ ID NO: 14136 - DNA, 30 bp, Artificial Sequence
  Synthetic oligonucleotide
tcgatagtaaaccctgacttcaacaattag

SEQ ID NO: 14137 - DNA, 30 bp, Artificial Sequence
  Synthetic oligonucleotide
caaatataaataccgaatcaacaacgttag

SEQ ID NO: 14138 - DNA, 30 bp, Artificial Sequence
  Synthetic oligonucleotide
aagggggacgaacaggtgaaccagctttag

SEQ ID NO: 14139 - DNA, 30 bp, Artificial Sequence
  Synthetic oligonucleotide
aacgtatgagaagcctgagaatccgaaacg

SEQ ID NO: 14140 - DNA, 30 bp, Artificial Sequence
  Synthetic oligonucleotide
aggtgtagccggactaagatgtagcacacg

SEQ ID NO: 14141 - DNA, 30 bp, Artificial Sequence
  Synthetic oligonucleotide
acggaccgcaaatggtaagaggattgcacg

SEQ ID NO: 14142 - DNA, 30 bp, Artificial Sequence
  Synthetic oligonucleotide
caaggctataaagcgcaaggttgaatcacg

SEQ ID NO: 14143 - DNA, 30 bp, Artificial Sequence
  Synthetic oligonucleotide
cgtgctgaacaaaaatagagtcaggctacg

SEQ ID NO: 14144 - DNA, 30 bp, Artificial Sequence
  Synthetic oligonucleotide
taccgaattcgatgcgtaaagagaggaccg

SEQ ID NO: 14145 - DNA, 30 bp, Artificial Sequence
  Synthetic oligonucleotide
cataaacataacaccatttccgaaggcccg

SEQ ID NO: 14146 - DNA, 30 bp, Artificial Sequence
  Synthetic oligonucleotide
cagtcatgagcgcgaggcgacaataatccg

SEQ ID NO: 14147 - DNA, 30 bp, Artificial Sequence
  Synthetic oligonucleotide
gggcaatcaaacagtatcgtcaaaactccg

SEQ ID NO: 14148 - DNA, 30 bp, Artificial Sequence
  Synthetic oligonucleotide
cggttctagctcagaaacgtgtatccagcg

SEQ ID NO: 14149 - DNA, 30 bp, Artificial Sequence
  Synthetic oligonucleotide
agtggagacagagtggtagacaagagggcg

SEQ ID NO: 14150 - DNA, 30 bp, Artificial Sequence
  Synthetic oligonucleotide
acaagacgggggaagtaagcatttctggcg

SEQ ID NO: 14151 - DNA, 30 bp, Artificial Sequence
  Synthetic oligonucleotide
ccaggagcgggaagagggccaatcaaatcg

SEQ ID NO: 14152 - DNA, 30 bp, Artificial Sequence
  Synthetic oligonucleotide
ctacgggcatccactcgtaaaacaacatcg

SEQ ID NO: 14153 - DNA, 30 bp, Artificial Sequence
  Synthetic oligonucleotide
actcacaagatacgacaaggttgaacctcg

SEQ ID NO: 14154 - DNA, 30 bp, Artificial Sequence
  Synthetic oligonucleotide
aggatcggagaatgaaaatagatttgctcg

SEQ ID NO: 14155 - DNA, 30 bp, Artificial Sequence
  Synthetic oligonucleotide
taacatcaaagaacaggatagaacaattcg

SEQ ID NO: 14156 - DNA, 30 bp, Artificial Sequence
  Synthetic oligonucleotide
atgaaaaaggcgagcaggaacataacttcg

SEQ ID NO: 14157 - DNA, 30 bp, Artificial Sequence
  Synthetic oligonucleotide
tcggtgatggagaaaagcaatatgatttcg

SEQ ID NO: 14158 - DNA, 30 bp, Artificial Sequence
  Synthetic oligonucleotide
ggaagcccaggaataggagacggaagaagg

SEQ ID NO: 14159 - DNA, 30 bp, Artificial Sequence
  Synthetic oligonucleotide
ggataacaaaccatgatctgattaagaagg

SEQ ID NO: 14160 - DNA, 30 bp, Artificial Sequence
  Synthetic oligonucleotide
cggagcagttgcaataagtagaaggtaagg

SEQ ID NO: 14161 - DNA, 30 bp, Artificial Sequence
  Synthetic oligonucleotide
ggtaaaagactgtaacaacaatgcttaagg

SEQ ID NO: 14162 - DNA, 31 bp, Artificial Sequence
  Synthetic oligonucleotide
ttgcagttaaggcaaaaacagtgggcccagg

SEQ ID NO: 14163 - DNA, 30 bp, Artificial Sequence
  Synthetic oligonucleotide
agtgggcggaaaatttacgtgagtaagagg

SEQ ID NO: 14164 - DNA, 30 bp, Artificial Sequence
  Synthetic oligonucleotide
cgttccagtaaaataccgatgcgatagagg

SEQ ID NO: 14165 - DNA, 30 bp, Artificial Sequence
  Synthetic oligonucleotide
gccgatagaagggagagagaaggtaatagg

SEQ ID NO: 14166 - DNA, 30 bp, Artificial Sequence
  Synthetic oligonucleotide
cagagaggtagggactgcgaagctagacgg

SEQ ID NO: 14167 - DNA, 30 bp, Artificial Sequence
  Synthetic oligonucleotide
agaaaaaacaaattataggagagtacgcgg

SEQ ID NO: 14168 - DNA, 31 bp, Artificial Sequence
  Synthetic oligonucleotide
agagccatgtaaaaccgccgaccatcgtggg

SEQ ID NO: 14169 - DNA, 30 bp, Artificial Sequence
  Synthetic oligonucleotide
atgcataacgtggaaacaatgggatgtggg

SEQ ID NO: 14170 - DNA, 30 bp, Artificial Sequence
  Synthetic oligonucleotide
caagcagggtacaaaggtataataagctgg

SEQ ID NO: 14171 - DNA, 30 bp, Artificial Sequence
  Synthetic oligonucleotide
aggaaaaaacgcaaaaatctaacattctgg

SEQ ID NO: 14172 - DNA, 30 bp, Artificial Sequence
  Synthetic oligonucleotide
tgggggcaaactcgtcgtggaataccgtgg

SEQ ID NO: 14173 - DNA, 30 bp, Artificial Sequence
  Synthetic oligonucleotide
agatcgaccaaaacagtaactaggccgtgg

SEQ ID NO: 14174 - DNA, 30 bp, Artificial Sequence
  Synthetic oligonucleotide
tgggcgaaaggaaatttagtaacgtcgtgg

SEQ ID NO: 14175 - DNA, 30 bp, Artificial Sequence
  Synthetic oligonucleotide
aagggaggagagcggcagtcgataaattgg

SEQ ID NO: 14176 - DNA, 30 bp, Artificial Sequence
  Synthetic oligonucleotide
agggaagctcttgtaaatgaatggcgaatg

SEQ ID NO: 14177 - DNA, 30 bp, Artificial Sequence
  Synthetic oligonucleotide
gctaaagggggcagatacgagactaacatg

SEQ ID NO: 14178 - DNA, 30 bp, Artificial Sequence
  Synthetic oligonucleotide
ggcaacaaagtgcattcgaggcgatacatg

SEQ ID NO: 14179 - DNA, 30 bp, Artificial Sequence
  Synthetic oligonucleotide
atcgtgctcgagagggtatgcctgaagatg

SEQ ID NO: 14180 - DNA, 30 bp, Artificial Sequence
  Synthetic oligonucleotide
aggatacgtcaaacactagagcagtagatg

SEQ ID NO: 14181 - DNA, 30 bp, Artificial Sequence
  Synthetic oligonucleotide
ccacttgaagaagaggccaataaagggatg

SEQ ID NO: 14182 - DNA, 30 bp, Artificial Sequence
  Synthetic oligonucleotide
gcgaggtatgcaaagctgggcaatgtgatg

SEQ ID NO: 14183 - DNA, 30 bp, Artificial Sequence
  Synthetic oligonucleotide
gcgaatcgagggggatcaccgagggtactg

SEQ ID NO: 14184 - DNA, 30 bp, Artificial Sequence
  Synthetic oligonucleotide
cgcggattgcgggagcagcaaaaacaagtg

SEQ ID NO: 14185 - DNA, 30 bp, Artificial Sequence
  Synthetic oligonucleotide
gcggagagtagtactgaatcccaggaagtg

SEQ ID NO: 14186 - DNA, 30 bp, Artificial Sequence
  Synthetic oligonucleotide
tggaaggaacaaccacagcaaacgtcagtg

SEQ ID NO: 14187 - DNA, 30 bp, Artificial Sequence
  Synthetic oligonucleotide
cagcccaatatacacattaatcaaggagtg

SEQ ID NO: 14188 - DNA, 30 bp, Artificial Sequence
  Synthetic oligonucleotide
ggggcaccaaggtgttggaaaatgtgagtg

SEQ ID NO: 14189 - DNA, 30 bp, Artificial Sequence
  Synthetic oligonucleotide
cggtatctgaggtgagcaagatcaaacgtg

SEQ ID NO: 14190 - DNA, 30 bp, Artificial Sequence
  Synthetic oligonucleotide
cacatcacaaaaatgcagtaacgtcgcgtg

SEQ ID NO: 14191 - DNA, 30 bp, Artificial Sequence
  Synthetic oligonucleotide
ccaggcaacgaccaagagagcgaccatgtg

SEQ ID NO: 14192 - DNA, 30 bp, Artificial Sequence
  Synthetic oligonucleotide
acggccggaaagaacaaactgcgagctgtg

SEQ ID NO: 14193 - DNA, 30 bp, Artificial Sequence
  Synthetic oligonucleotide
cgagagcacttaggcctgaccacgagattg

SEQ ID NO: 14194 - DNA, 30 bp, Artificial Sequence
  Synthetic oligonucleotide
acgtaggcgggattgtggatacagtgattg

SEQ ID NO: 14195 - DNA, 30 bp, Artificial Sequence
  Synthetic oligonucleotide
tcttaccgaacaacaaacaatgctacgttg

SEQ ID NO: 14196 - DNA, 30 bp, Artificial Sequence
  Synthetic oligonucleotide
cggttgcaagctaagcgaaacactgtaaat

SEQ ID NO: 14197 - DNA, 30 bp, Artificial Sequence
  Synthetic oligonucleotide
gggcgatacactcggaaggaaatgcctaat

SEQ ID NO: 14198 - DNA, 30 bp, Artificial Sequence
  Synthetic oligonucleotide
ccgaaataggacccgagtagactaaaacat

SEQ ID NO: 14199 - DNA, 30 bp, Artificial Sequence
  Synthetic oligonucleotide
aggccagatatcctaggaaagggcgagcat

SEQ ID NO: 14200 - DNA, 30 bp, Artificial Sequence
  Synthetic oligonucleotide
cgggaaaagagtacgacggctcgtaggcat

SEQ ID NO: 14201 - DNA, 30 bp, Artificial Sequence
  Synthetic oligonucleotide
tcggaaactaaaagaaattgaagcgggcat

SEQ ID NO: 14202 - DNA, 30 bp, Artificial Sequence
  Synthetic oligonucleotide
catcaaaggaagaaaagacagttaactcat

SEQ ID NO: 14203 - DNA, 30 bp, Artificial Sequence
  Synthetic oligonucleotide
agggtgcatgccacagaaataagcactcat

SEQ ID NO: 14204 - DNA, 30 bp, Artificial Sequence
  Synthetic oligonucleotide
aggcacgaacctcattggagatatcgagat

SEQ ID NO: 14205 - DNA, 30 bp, Artificial Sequence
  Synthetic oligonucleotide
gtgccaacacgagagatggttcgtatggat

SEQ ID NO: 14206 - DNA, 31 bp, Artificial Sequence
  Synthetic oligonucleotide
tcgacgaaggagggagagcgatacagtcact

SEQ ID NO: 14207 - DNA, 30 bp, Artificial Sequence
  Synthetic oligonucleotide
atcatccaagaaatgaggaggactgcgact

SEQ ID NO: 14208 - DNA, 30 bp, Artificial Sequence
  Synthetic oligonucleotide
ccatcgcgaagcacggaattataggtgact

SEQ ID NO: 14209 - DNA, 30 bp, Artificial Sequence
  Synthetic oligonucleotide
aaggagcggaagaatacgtaagcccaacct

SEQ ID NO: 14210 - DNA, 30 bp, Artificial Sequence
  Synthetic oligonucleotide
cgataagtgcgcgagtgattcagctcggct

SEQ ID NO: 14211 - DNA, 30 bp, Artificial Sequence
  Synthetic oligonucleotide
gaaggagggacagattcagcacaccaaagt

SEQ ID NO: 14212 - DNA, 30 bp, Artificial Sequence
  Synthetic oligonucleotide
gccgtgaatggggaaatgaaagcaggaagt

SEQ ID NO: 14213 - DNA, 30 bp, Artificial Sequence
  Synthetic oligonucleotide
ccgggcagacaaagagagagtacgtagagt

SEQ ID NO: 14214 - DNA, 30 bp, Artificial Sequence
  Synthetic oligonucleotide
gtggcgacgaagagggagaataattcgagt

SEQ ID NO: 14215 - DNA, 30 bp, Artificial Sequence
  Synthetic oligonucleotide
cgaggaagtcagtgcaggtgaaagctgagt

SEQ ID NO: 14216 - DNA, 30 bp, Artificial Sequence
  Synthetic oligonucleotide
tctcagagagagcactaacactgcaatagt

SEQ ID NO: 14217 - DNA, 30 bp, Artificial Sequence
  Synthetic oligonucleotide
tgaaaccgaggtggaggagattgataacgt

SEQ ID NO: 14218 - DNA, 30 bp, Artificial Sequence
  Synthetic oligonucleotide
atgaggaattgagacgagatgacgtatcgt

SEQ ID NO: 14219 - DNA, 30 bp, Artificial Sequence
  Synthetic oligonucleotide
cgttagggggacaggcgcgaacaaacaggt

SEQ ID NO: 14220 - DNA, 30 bp, Artificial Sequence
  Synthetic oligonucleotide
tcgtgtgatatgaaacagaattagcagtgt

SEQ ID NO: 14221 - DNA, 30 bp, Artificial Sequence
  Synthetic oligonucleotide
ggtcagtcaggcgatccaagagttgcgctt

SEQ ID NO: 14222 - DNA, 30 bp, Artificial Sequence
  Synthetic oligonucleotide
tgaacagatggtagaaagttaacgacagtt

SEQ ID NO: 14223 - DNA, 30 bp, Artificial Sequence
  Synthetic oligonucleotide
agaaagccttacaaagagagagcgccaaaa

SEQ ID NO: 14224 - DNA, 30 bp, Artificial Sequence
  Synthetic oligonucleotide
ccctaaaccggagagtaaccgtgatgaaaa

SEQ ID NO: 14225 - DNA, 30 bp, Artificial Sequence
  Synthetic oligonucleotide
aaaggaaaacacgaagagaaggcactaaaa

SEQ ID NO: 14226 - DNA, 30 bp, Artificial Sequence
  Synthetic oligonucleotide
agatggctactgcgaagggaagcagacaaa

SEQ ID NO: 14227 - DNA, 30 bp, Artificial Sequence
  Synthetic oligonucleotide
atggagaaatagtagaggacgaatcgcaaa

SEQ ID NO: 14228 - DNA, 30 bp, Artificial Sequence
  Synthetic oligonucleotide
cggtcccagacagcgaatgcccgatgcaaa

SEQ ID NO: 14229 - DNA, 30 bp, Artificial Sequence
  Synthetic oligonucleotide
catgatggaccaaagccaatggaaccgaaa

SEQ ID NO: 14230 - DNA, 30 bp, Artificial Sequence
  Synthetic oligonucleotide
agagtaaggcgagttcaaggggatcggaaa

SEQ ID NO: 14231 - DNA, 30 bp, Artificial Sequence
  Synthetic oligonucleotide
cgggcaggaaaataggcgaactccctgaaa

SEQ ID NO: 14232 - DNA, 30 bp, Artificial Sequence
  Synthetic oligonucleotide
aaagatcgactaaggcgggtgtaggctaaa

SEQ ID NO: 14233 - DNA, 30 bp, Artificial Sequence
  Synthetic oligonucleotide
cggaccaggtttatgcgaagcgcgcaacaa

SEQ ID NO: 14234 - DNA, 30 bp, Artificial Sequence
  Synthetic oligonucleotide
atcaaaaacagagggcaatcaggcgcccaa

SEQ ID NO: 14235 - DNA, 30 bp, Artificial Sequence
  Synthetic oligonucleotide
gcaacatggacatacgataacattgagcaa

SEQ ID NO: 14236 - DNA, 30 bp, Artificial Sequence
  Synthetic oligonucleotide
agggccgatgcgcccacaaaaacaccgcaa

SEQ ID NO: 14237 - DNA, 30 bp, Artificial Sequence
  Synthetic oligonucleotide
cgtaacgaagagtgtgtcaagacccatcaa

SEQ ID NO: 14238 - DNA, 30 bp, Artificial Sequence
  Synthetic oligonucleotide
gggggctgggcgaatcggtgtagttctcaa

SEQ ID NO: 14239 - DNA, 30 bp, Artificial Sequence
  Synthetic oligonucleotide
actaaaaaaaacacctcaacaggtcgtcaa

SEQ ID NO: 14240 - DNA, 30 bp, Artificial Sequence
  Synthetic oligonucleotide
ctcgttaaaagggaaaaaatgcgaaaagaa

SEQ ID NO: 14241 - DNA, 30 bp, Artificial Sequence
  Synthetic oligonucleotide
acgaataccagccaggcgtgcggtacagaa

SEQ ID NO: 14242 - DNA, 30 bp, Artificial Sequence
  Synthetic oligonucleotide
aagctaaaccagacaacggagaaaaccgaa

SEQ ID NO: 14243 - DNA, 30 bp, Artificial Sequence
  Synthetic oligonucleotide
aagcaagattaaggggaaacacttcgcgaa

SEQ ID NO: 14244 - DNA, 30 bp, Artificial Sequence
  Synthetic oligonucleotide
agaagacgggctgcaaagagagcagtcgaa

SEQ ID NO: 14245 - DNA, 29 bp, Artificial Sequence
  Synthetic oligonucleotide
acgctcacgtagaaagggtgcgccaggaa

SEQ ID NO: 14246 - DNA, 30 bp, Artificial Sequence
  Synthetic oligonucleotide
caacgaaactcacaaatctcgaatacggaa

SEQ ID NO: 14247 - DNA, 30 bp, Artificial Sequence
  Synthetic oligonucleotide
cctgccccagaaaaatgtgatgtgagggaa

SEQ ID NO: 14248 - DNA, 30 bp, Artificial Sequence
  Synthetic oligonucleotide
cgaaagggggaatacatttagaatattgaa

SEQ ID NO: 14249 - DNA, 30 bp, Artificial Sequence
  Synthetic oligonucleotide
cctagaggaatagcagcggagacaggataa

SEQ ID NO: 14250 - DNA, 30 bp, Artificial Sequence
  Synthetic oligonucleotide
agtgagcatcacttaaacaagaatcactaa

SEQ ID NO: 14251 - DNA, 30 bp, Artificial Sequence
  Synthetic oligonucleotide
ccatcagagtacgaaaccgaatgttattaa

SEQ ID NO: 14252 - DNA, 30 bp, Artificial Sequence
  Synthetic oligonucleotide
agggaggagatttggcactaccgtcaaaca

SEQ ID NO: 14253 - DNA, 30 bp, Artificial Sequence
  Synthetic oligonucleotide
ggggtgaacgagtacacaacttacgaaaca

SEQ ID NO: 14254 - DNA, 30 bp, Artificial Sequence
  Synthetic oligonucleotide
gcgtgctggaagatggtttggaaggtaaca

SEQ ID NO: 14255 - DNA, 30 bp, Artificial Sequence
  Synthetic oligonucleotide
tgggcaaaaacgcgcgatgtccaaagcaca

SEQ ID NO: 14256 - DNA, 30 bp, Artificial Sequence
  Synthetic oligonucleotide
gcacagattgaaaacagagtgcaacgcaca

SEQ ID NO: 14257 - DNA, 30 bp, Artificial Sequence
  Synthetic oligonucleotide
cggaagcacgaacgtcaagccagacagaca

SEQ ID NO: 14258 - DNA, 30 bp, Artificial Sequence
  Synthetic oligonucleotide
tcatgggtgattactagaacaaaagggaca

SEQ ID NO: 14259 - DNA, 30 bp, Artificial Sequence
  Synthetic oligonucleotide
tctggaggcccgaacagtagcagccataca

SEQ ID NO: 14260 - DNA, 30 bp, Artificial Sequence
  Synthetic oligonucleotide
accgtgaagaacagtgcgatatgatttaca

SEQ ID NO: 14261 - DNA, 30 bp, Artificial Sequence
  Synthetic oligonucleotide
tggtacgggccgccgaaatcgaataaacca

SEQ ID NO: 14262 - DNA, 30 bp, Artificial Sequence
  Synthetic oligonucleotide
aggcgcgccaagggataacggaaatgacca

SEQ ID NO: 14263 - DNA, 30 bp, Artificial Sequence
  Synthetic oligonucleotide
acgaggaaggtagtaacggatctcgtacca

SEQ ID NO: 14264 - DNA, 30 bp, Artificial Sequence
  Synthetic oligonucleotide
caaaaagtgtcaggggagagagcgtatcca

SEQ ID NO: 14265 - DNA, 30 bp, Artificial Sequence
  Synthetic oligonucleotide
gtagtgaggaatcgaaaaagtccaagtcca

SEQ ID NO: 14266 - DNA, 30 bp, Artificial Sequence
  Synthetic oligonucleotide
ggtgtgggaccagcgagacgactcatagca

SEQ ID NO: 14267 - DNA, 30 bp, Artificial Sequence
  Synthetic oligonucleotide
acacaaaacataggagcactgccacgcgca

SEQ ID NO: 14268 - DNA, 30 bp, Artificial Sequence
  Synthetic oligonucleotide
gggcccagattacgaaacagaaaactcgca

SEQ ID NO: 14269 - DNA, 30 bp, Artificial Sequence
  Synthetic oligonucleotide
ccgacttaggtgaagaagtgtgccgctgca

SEQ ID NO: 14270 - DNA, 30 bp, Artificial Sequence
  Synthetic oligonucleotide
gggagacaggaaagccagtcagaatgatca

SEQ ID NO: 14271 - DNA, 30 bp, Artificial Sequence
  Synthetic oligonucleotide
tctcagggagaagactacaaacgcgtgtca

SEQ ID NO: 14272 - DNA, 30 bp, Artificial Sequence
  Synthetic oligonucleotide
acgagagggcaaatctaacttcgtcattca

SEQ ID NO: 14273 - DNA, 30 bp, Artificial Sequence
  Synthetic oligonucleotide
agggagcgtatgtcacaaaaggacagttca

SEQ ID NO: 14274 - DNA, 30 bp, Artificial Sequence
  Synthetic oligonucleotide
acgcacctgcgtaacagggtcgagaaaaga

SEQ ID NO: 14275 - DNA, 30 bp, Artificial Sequence
  Synthetic oligonucleotide
cacataagtggagcacaaggatgataaaga

SEQ ID NO: 14276 - DNA, 30 bp, Artificial Sequence
  Synthetic oligonucleotide
cgtaacgggtaggcaaccccatgttcaaga

SEQ ID NO: 14277 - DNA, 30 bp, Artificial Sequence
  Synthetic oligonucleotide
aatcgacacgtggtaaaggactgaggaaga

SEQ ID NO: 14278 - DNA, 30 bp, Artificial Sequence
  Synthetic oligonucleotide
ctcgttatgcttcggcgaggagggggaaga

SEQ ID NO: 14279 - DNA, 31 bp, Artificial Sequence
  Synthetic oligonucleotide
cgagcggggtttggtaaagaacatgctaaga

SEQ ID NO: 14280 - DNA, 30 bp, Artificial Sequence
  Synthetic oligonucleotide
ctaagtcagcaaaaagccactagcgtaaga

SEQ ID NO: 14281 - DNA, 30 bp, Artificial Sequence
  Synthetic oligonucleotide
ggcgcaacaggattatgtgtaaggaacaga

SEQ ID NO: 14282 - DNA, 29 bp, Artificial Sequence
  Synthetic oligonucleotide
cacaatccgattaccacctagatcacaga

SEQ ID NO: 14283 - DNA, 30 bp, Artificial Sequence
  Synthetic oligonucleotide
cgaaggcgtaagataagtttaagcatcaga

SEQ ID NO: 14284 - DNA, 30 bp, Artificial Sequence
  Synthetic oligonucleotide
actgccagaaaccacgacttatcactcaga

SEQ ID NO: 14285 - DNA, 30 bp, Artificial Sequence
  Synthetic oligonucleotide
ccgaggggccgcggaataagcgtgaagaga

SEQ ID NO: 14286 - DNA, 30 bp, Artificial Sequence
  Synthetic oligonucleotide
tgaccaaatggcaggagcacgtaatggaga

SEQ ID NO: 14287 - DNA, 30 bp, Artificial Sequence
  Synthetic oligonucleotide
cagaccaatcagaggtaccaaggaattaga

SEQ ID NO: 14288 - DNA, 30 bp, Artificial Sequence
  Synthetic oligonucleotide
ggcctgagacataagcaccccagacgacga

SEQ ID NO: 14289 - DNA, 30 bp, Artificial Sequence
  Synthetic oligonucleotide
ctggcaagacactaaagattagcgctccga

SEQ ID NO: 14290 - DNA, 30 bp, Artificial Sequence
  Synthetic oligonucleotide
gggcaaatgcgagagcagggagaggctcga

SEQ ID NO: 14291 - DNA, 30 bp, Artificial Sequence
  Synthetic oligonucleotide
ggagcccataagccgagggtaactgcagga

SEQ ID NO: 14292 - DNA, 30 bp, Artificial Sequence
  Synthetic oligonucleotide
tgggcagaactatcctgagagatgcgagga

SEQ ID NO: 14293 - DNA, 30 bp, Artificial Sequence
  Synthetic oligonucleotide
agggaccaacccactcagcacacaggagga

SEQ ID NO: 14294 - DNA, 30 bp, Artificial Sequence
  Synthetic oligonucleotide
caactacagggtaacagaatacggatagga

SEQ ID NO: 14295 - DNA, 30 bp, Artificial Sequence
  Synthetic oligonucleotide
aggtaatgaaggtatctagtccgaaccgga

SEQ ID NO: 14296 - DNA, 30 bp, Artificial Sequence
  Synthetic oligonucleotide
gagactttcaactgtatcccgagtgccgga

SEQ ID NO: 14297 - DNA, 30 bp, Artificial Sequence
  Synthetic oligonucleotide
cgtaagaaggcactagattataagatcgga

SEQ ID NO: 14298 - DNA, 30 bp, Artificial Sequence
  Synthetic oligonucleotide
ggagcccgaaatgacgaagagtagctcgga

SEQ ID NO: 14299 - DNA, 30 bp, Artificial Sequence
  Synthetic oligonucleotide
gcgaccaagaaagatggcaagaatgcggga

SEQ ID NO: 14300 - DNA, 30 bp, Artificial Sequence
  Synthetic oligonucleotide
cagcccgaagaacagcttggccaggatgga

SEQ ID NO: 14301 - DNA, 30 bp, Artificial Sequence
  Synthetic oligonucleotide
gtgagaatcgagagataaaacgtcccgtga

SEQ ID NO: 14302 - DNA, 30 bp, Artificial Sequence
  Synthetic oligonucleotide
cgagctcctcatgacaaaaaggggacaata

SEQ ID NO: 14303 - DNA, 30 bp, Artificial Sequence
  Synthetic oligonucleotide
agcaccgcacgggataagggataagtacta

SEQ ID NO: 14304 - DNA, 30 bp, Artificial Sequence
  Synthetic oligonucleotide
taggcacgacaactcggacaacccaaagta

SEQ ID NO: 14305 - DNA, 30 bp, Artificial Sequence
  Synthetic oligonucleotide
cgtcaacaaaagacgcgttaagaaggagta

SEQ ID NO: 14306 - DNA, 30 bp, Artificial Sequence
  Synthetic oligonucleotide
cgaaaggaggggagtccgcgctgtgatgta

SEQ ID NO: 14307 - DNA, 30 bp, Artificial Sequence
  Synthetic oligonucleotide
cgactacaaaaatcacaagtgacacgtgta

SEQ ID NO: 14308 - DNA, 30 bp, Artificial Sequence
  Synthetic oligonucleotide
cgaactgtggaaagaaactgagtgcgtgta

SEQ ID NO: 14309 - DNA, 30 bp, Artificial Sequence
  Synthetic oligonucleotide
gatcgtgcgaagggcgaaaatcacgtatta

SEQ ID NO: 14310 - DNA, 30 bp, Artificial Sequence
  Synthetic oligonucleotide
gcgaagaatgcaattagggatcagctaaac

SEQ ID NO: 14311 - DNA, 30 bp, Artificial Sequence
  Synthetic oligonucleotide
acaggcaaaaacaaggattacagggacaac

SEQ ID NO: 14312 - DNA, 30 bp, Artificial Sequence
  Synthetic oligonucleotide
tgggaagccggtaataacaggggcgccaac

SEQ ID NO: 14313 - DNA, 30 bp, Artificial Sequence
  Synthetic oligonucleotide
cgaccaggacagccaagatagtcagcgaac

SEQ ID NO: 14314 - DNA, 30 bp, Artificial Sequence
  Synthetic oligonucleotide
ccgtcaaccatgacagagctacagcataac

SEQ ID NO: 14315 - DNA, 30 bp, Artificial Sequence
  Synthetic oligonucleotide
cgaaggggcgattgtaggacacgaagtaac

SEQ ID NO: 14316 - DNA, 30 bp, Artificial Sequence
  Synthetic oligonucleotide
accgaagaaaagagtgcaggagacagacac

SEQ ID NO: 14317 - DNA, 30 bp, Artificial Sequence
  Synthetic oligonucleotide
ctacgcatctgactaagagaatagtgacac

SEQ ID NO: 14318 - DNA, 30 bp, Artificial Sequence
  Synthetic oligonucleotide
gatataggcaacagagcaacgagggaccac

SEQ ID NO: 14319 - DNA, 30 bp, Artificial Sequence
  Synthetic oligonucleotide
gaggagagatgcgcacatagggataccgac

SEQ ID NO: 14320 - DNA, 30 bp, Artificial Sequence
  Synthetic oligonucleotide
aaggcaaaatggccaaaattctggcaggac

SEQ ID NO: 14321 - DNA, 30 bp, Artificial Sequence
  Synthetic oligonucleotide
gggatgtagggaaccgtgccgagagatgac

SEQ ID NO: 14322 - DNA, 30 bp, Artificial Sequence
  Synthetic oligonucleotide
ggggaatcacacccagatgccgacaagccc

SEQ ID NO: 14323 - DNA, 30 bp, Artificial Sequence
  Synthetic oligonucleotide
ggaggcgtaaacgaatttcactctgccagc

SEQ ID NO: 14324 - DNA, 30 bp, Artificial Sequence
  Synthetic oligonucleotide
agcgaatgcgtactacatcttatacagagc

SEQ ID NO: 14325 - DNA, 30 bp, Artificial Sequence
  Synthetic oligonucleotide
gggagatggcgaataaataatgcatcccgc

SEQ ID NO: 14326 - DNA, 30 bp, Artificial Sequence
  Synthetic oligonucleotide
ggaaaaccaacggtccaaccgcgaatgcgc

SEQ ID NO: 14327 - DNA, 30 bp, Artificial Sequence
  Synthetic oligonucleotide
cagtgaacacacgccagactgacaaatcgc

SEQ ID NO: 14328 - DNA, 30 bp, Artificial Sequence
  Synthetic oligonucleotide
ctaggaaaagagcaatagaatgaacgtcgc

SEQ ID NO: 14329 - DNA, 30 bp, Artificial Sequence
  Synthetic oligonucleotide
cataggcggaagaaagcagagtgttgtcgc

SEQ ID NO: 14330 - DNA, 30 bp, Artificial Sequence
  Synthetic oligonucleotide
catcaaagcacaacgaatacacatgtaggc

SEQ ID NO: 14331 - DNA, 30 bp, Artificial Sequence
  Synthetic oligonucleotide
taaggacaaagataacatcctaccaaatgc

SEQ ID NO: 14332 - DNA, 30 bp, Artificial Sequence
  Synthetic oligonucleotide
agactaggcgaaataatagagtattaatgc

SEQ ID NO: 14333 - DNA, 30 bp, Artificial Sequence
  Synthetic oligonucleotide
gacgagacgactggggaaacgaggggatgc

SEQ ID NO: 14334 - DNA, 30 bp, Artificial Sequence
  Synthetic oligonucleotide
ccggggagcgacatcggcgaaagatattgc

SEQ ID NO: 14335 - DNA, 30 bp, Artificial Sequence
  Synthetic oligonucleotide
cgaggcgtgtcagaagagggtactggttgc

SEQ ID NO: 14336 - DNA, 30 bp, Artificial Sequence
  Synthetic oligonucleotide
ccattaaccattatcagaggaccgcgaatc

SEQ ID NO: 14337 - DNA, 30 bp, Artificial Sequence
  Synthetic oligonucleotide
atgataaagggagtaaagaggtagcgtatc

SEQ ID NO: 14338 - DNA, 30 bp, Artificial Sequence
  Synthetic oligonucleotide
caggaggcgaggaaaggtagaaagcgtctc

SEQ ID NO: 14339 - DNA, 30 bp, Artificial Sequence
  Synthetic oligonucleotide
cactcaggaacacgaccgagtcagccagtc

SEQ ID NO: 14340 - DNA, 30 bp, Artificial Sequence
  Synthetic oligonucleotide
cgtggtcagggaagatcccacgttggcgtc

SEQ ID NO: 14341 - DNA, 30 bp, Artificial Sequence
  Synthetic oligonucleotide
cgtggagggattaaatgctgagagatggtc

SEQ ID NO: 14342 - DNA, 30 bp, Artificial Sequence
  Synthetic oligonucleotide
gggcagtaaggcgtaaaagaggaaaaaaag

SEQ ID NO: 14343 - DNA, 30 bp, Artificial Sequence
  Synthetic oligonucleotide
gggggatgatgatttccggcgacgaaaaag

SEQ ID NO: 14344 - DNA, 30 bp, Artificial Sequence
  Synthetic oligonucleotide
tcgcgtgagataggataacacttagaaaag

SEQ ID NO: 14345 - DNA, 30 bp, Artificial Sequence
  Synthetic oligonucleotide
caacgcctgctgaataagagtggcccaaag

SEQ ID NO: 14346 - DNA, 30 bp, Artificial Sequence
  Synthetic oligonucleotide
attggggcaacggggactccagtaagaaag

SEQ ID NO: 14347 - DNA, 30 bp, Artificial Sequence
  Synthetic oligonucleotide
tacacgccctaagagacaccgcagggaaag

SEQ ID NO: 14348 - DNA, 30 bp, Artificial Sequence
  Synthetic oligonucleotide
acagccggatgacaataaccctccgtaaag

SEQ ID NO: 14349 - DNA, 30 bp, Artificial Sequence
  Synthetic oligonucleotide
gcgagtgctagttaacgtgatctacacaag

SEQ ID NO: 14350 - DNA, 30 bp, Artificial Sequence
  Synthetic oligonucleotide
cgagcctaaaaacctggcagtattcacaag

SEQ ID NO: 14351 - DNA, 30 bp, Artificial Sequence
  Synthetic oligonucleotide
cggtacgaacggtgtactagccggaccaag

SEQ ID NO: 14352 - DNA, 30 bp, Artificial Sequence
  Synthetic oligonucleotide
ggggtcaacagggagagtcggacaaagaag

SEQ ID NO: 14353 - DNA, 30 bp, Artificial Sequence
  Synthetic oligonucleotide
aagggaaactcatggccggcttgtaagaag

SEQ ID NO: 14354 - DNA, 30 bp, Artificial Sequence
  Synthetic oligonucleotide
tgcacaaacattagccaacgtatcccgaag

SEQ ID NO: 14355 - DNA, 30 bp, Artificial Sequence
  Synthetic oligonucleotide
gggcagagttgtcccccacttagagcgaag

SEQ ID NO: 14356 - DNA, 30 bp, Artificial Sequence
  Synthetic oligonucleotide
agacaaaactttactgatagagaagataag

SEQ ID NO: 14357 - DNA, 30 bp, Artificial Sequence
  Synthetic oligonucleotide
tcaggagcgagtgtacaatgagcaattaag

SEQ ID NO: 14358 - DNA, 30 bp, Artificial Sequence
  Synthetic oligonucleotide
aaggtgcaggtgcgcggtaatcgagttaag

SEQ ID NO: 14359 - DNA, 30 bp, Artificial Sequence
  Synthetic oligonucleotide
agatatgagctcaaaagaatgccaacacag

SEQ ID NO: 14360 - DNA, 30 bp, Artificial Sequence
  Synthetic oligonucleotide
aaaaacggctaaaaccaataacgaggacag

SEQ ID NO: 14361 - DNA, 30 bp, Artificial Sequence
  Synthetic oligonucleotide
accggatacgtcaacctcagcgaaatgcag

SEQ ID NO: 14362 - DNA, 40 bp, Artificial Sequence
  Synthetic oligonucleotide
accggatgatactagaggaatgcccctcctagtgcctcag

SEQ ID NO: 14363 - DNA, 30 bp, Artificial Sequence
  Synthetic oligonucleotide
atcacacagagtaatagagcaaggtgtcag

SEQ ID NO: 14364 - DNA, 30 bp, Artificial Sequence
  Synthetic oligonucleotide
ccaggcaaatgtgttgcgcctagaaaagag

SEQ ID NO: 14365 - DNA, 30 bp, Artificial Sequence
  Synthetic oligonucleotide
ggatagtaggcgcggtcgacatacagagag

SEQ ID NO: 14366 - DNA, 30 bp, Artificial Sequence
  Synthetic oligonucleotide
gcaaacataccaagtatacgtctacgagag

SEQ ID NO: 14367 - DNA, 30 bp, Artificial Sequence
  Synthetic oligonucleotide
gcggcacatcgttaacagacatcccgagag

SEQ ID NO: 14368 - DNA, 30 bp, Artificial Sequence
  Synthetic oligonucleotide
aaagaatcgccaaccaacacgacctgagag

SEQ ID NO: 14369 - DNA, 30 bp, Artificial Sequence
  Synthetic oligonucleotide
agtgcattgcaaacatggagattgtacgag

SEQ ID NO: 14370 - DNA, 30 bp, Artificial Sequence
  Synthetic oligonucleotide
cgtaagtgcgcactatgcctaataaccgag

SEQ ID NO: 14371 - DNA, 30 bp, Artificial Sequence
  Synthetic oligonucleotide
tgggtcaacgagcgagaatccgagggcgag

SEQ ID NO: 14372 - DNA, 30 bp, Artificial Sequence
  Synthetic oligonucleotide
tacctggcacagatacagggagcgatcgag

SEQ ID NO: 14373 - DNA, 30 bp, Artificial Sequence
  Synthetic oligonucleotide
cacaaccactccaagcaaatcagtgaggag

SEQ ID NO: 14374 - DNA, 30 bp, Artificial Sequence
  Synthetic oligonucleotide
tgaacacgaaaaacgatattgatccgggag

SEQ ID NO: 14375 - DNA, 30 bp, Artificial Sequence
  Synthetic oligonucleotide
acgatacccggccagaaaccggggctggag

SEQ ID NO: 14376 - DNA, 30 bp, Artificial Sequence
  Synthetic oligonucleotide
gagggcaaataatatttgaacgcggtggag

SEQ ID NO: 14377 - DNA, 30 bp, Artificial Sequence
  Synthetic oligonucleotide
cgcagaaggtaaccccggtctcactatgag

SEQ ID NO: 14378 - DNA, 30 bp, Artificial Sequence
  Synthetic oligonucleotide
ccaatgaacaagtggacctagatagctgag

SEQ ID NO: 14379 - DNA, 30 bp, Artificial Sequence
  Synthetic oligonucleotide
gctaggtgcaatgatgttacaaaccgtgag

SEQ ID NO: 14380 - DNA, 30 bp, Artificial Sequence
  Synthetic oligonucleotide
agacctgaaccaagcatggggtctggtgag

SEQ ID NO: 14381 - DNA, 30 bp, Artificial Sequence
  Synthetic oligonucleotide
ggctaaggagataaactgacaaatgcatag

SEQ ID NO: 14382 - DNA, 30 bp, Artificial Sequence
  Synthetic oligonucleotide
agaggagaaaggcacgtgcgggaagactag

SEQ ID NO: 14383 - DNA, 30 bp, Artificial Sequence
  Synthetic oligonucleotide
acagttcgaggcaatcgagtggtcacctag

SEQ ID NO: 14384 - DNA, 30 bp, Artificial Sequence
  Synthetic oligonucleotide
ccgagagcatcattaaggagattcggctag

SEQ ID NO: 14385 - DNA, 30 bp, Artificial Sequence
  Synthetic oligonucleotide
agggtgatgggagctagagttggctagtag

SEQ ID NO: 14386 - DNA, 30 bp, Artificial Sequence
  Synthetic oligonucleotide
acggtcggaaccacgtgcgagtgtgcgtag

SEQ ID NO: 14387 - DNA, 30 bp, Artificial Sequence
  Synthetic oligonucleotide
ggacagagaaggagcgaagcttggtcgtag

SEQ ID NO: 14388 - DNA, 30 bp, Artificial Sequence
  Synthetic oligonucleotide
ctggaagcacggcgagggccgtaaagttag

SEQ ID NO: 14389 - DNA, 30 bp, Artificial Sequence
  Synthetic oligonucleotide
aggtggtccggatatgagaaccggcaaacg

SEQ ID NO: 14390 - DNA, 30 bp, Artificial Sequence
  Synthetic oligonucleotide
cgagatgaatatcagtgtattgcataaacg

SEQ ID NO: 14391 - DNA, 30 bp, Artificial Sequence
  Synthetic oligonucleotide
cgtcgacgatacatctaccgaccctaaacg

SEQ ID NO: 14392 - DNA, 30 bp, Artificial Sequence
  Synthetic oligonucleotide
gctacgaacaggaaggactatgtcagaacg

SEQ ID NO: 14393 - DNA, 30 bp, Artificial Sequence
  Synthetic oligonucleotide
tcctaaagtgcaagccagaccacaggaacg

SEQ ID NO: 14394 - DNA, 30 bp, Artificial Sequence
  Synthetic oligonucleotide
cagaagaaccctggatacaaccgacatacg

SEQ ID NO: 14395 - DNA, 30 bp, Artificial Sequence
  Synthetic oligonucleotide
aaaggaagagaagtacaggtaattcgaccg

SEQ ID NO: 14396 - DNA, 30 bp, Artificial Sequence
  Synthetic oligonucleotide
aggaacgagtttgcactaaaacggtgaccg

SEQ ID NO: 14397 - DNA, 30 bp, Artificial Sequence
  Synthetic oligonucleotide
cgaggcgaatcgcgcacattactttgaccg

SEQ ID NO: 14398 - DNA, 30 bp, Artificial Sequence
  Synthetic oligonucleotide
cgtgagtgcttcaaaatggggacggtaccg

SEQ ID NO: 14399 - DNA, 30 bp, Artificial Sequence
  Synthetic oligonucleotide
caagcccgaggctgctagagggtaaggccg

SEQ ID NO: 14400 - DNA, 30 bp, Artificial Sequence
  Synthetic oligonucleotide
atcgagtaaataacggatagccggaaagcg

SEQ ID NO: 14401 - DNA, 30 bp, Artificial Sequence
  Synthetic oligonucleotide
attgagggacaaatcgtgcgggaaacagcg

SEQ ID NO: 14402 - DNA, 30 bp, Artificial Sequence
  Synthetic oligonucleotide
cgtcatagagagccaagtcggcacaccgcg

SEQ ID NO: 14403 - DNA, 30 bp, Artificial Sequence
  Synthetic oligonucleotide
cgtagaataaggcgtagatcgtgagtcgcg

SEQ ID NO: 14404 - DNA, 30 bp, Artificial Sequence
  Synthetic oligonucleotide
aggagtggtgcaaagacaggtagtgcggcg

SEQ ID NO: 14405 - DNA, 30 bp, Artificial Sequence
  Synthetic oligonucleotide
cggacacacaagatctggcacacattggcg

SEQ ID NO: 14406 - DNA, 30 bp, Artificial Sequence
  Synthetic oligonucleotide
tgatgtgtaggtttactcctctaccatgcg

SEQ ID NO: 14407 - DNA, 30 bp, Artificial Sequence
  Synthetic oligonucleotide
cgaatcatcgccggtgccaaaccagaatcg

SEQ ID NO: 14408 - DNA, 30 bp, Artificial Sequence
  Synthetic oligonucleotide
tgatatcggcccaaacttcagagaacatcg

SEQ ID NO: 14409 - DNA, 30 bp, Artificial Sequence
  Synthetic oligonucleotide
taacaagcgccggccaggcaaaaaagatcg

SEQ ID NO: 14410 - DNA, 30 bp, Artificial Sequence
  Synthetic oligonucleotide
taggaagccccatctccacacaaacactcg

SEQ ID NO: 14411 - DNA, 30 bp, Artificial Sequence
  Synthetic oligonucleotide
tccatgaaggccaggggaccgcgatcgtcg

SEQ ID NO: 14412 - DNA, 30 bp, Artificial Sequence
  Synthetic oligonucleotide
ataggacgagaagataatcgcgcggtttcg

SEQ ID NO: 14413 - DNA, 30 bp, Artificial Sequence
  Synthetic oligonucleotide
cgttatatgagaatcaaactgaaagcaagg

SEQ ID NO: 14414 - DNA, 30 bp, Artificial Sequence
  Synthetic oligonucleotide
cggtagaattacgggacccacataggaagg

SEQ ID NO: 14415 - DNA, 30 bp, Artificial Sequence
  Synthetic oligonucleotide
cggactttaaaggcgaacagagcaataagg

SEQ ID NO: 14416 - DNA, 30 bp, Artificial Sequence
  Synthetic oligonucleotide
gcggggccagttaaaatcagaacgctaagg

SEQ ID NO: 14417 - DNA, 30 bp, Artificial Sequence
  Synthetic oligonucleotide
acaaggggacgttcccggagcgagaagagg

SEQ ID NO: 14418 - DNA, 30 bp, Artificial Sequence
  Synthetic oligonucleotide
ggtgaagtcaaaataataaccgccacgagg

SEQ ID NO: 14419 - DNA, 30 bp, Artificial Sequence
  Synthetic oligonucleotide
atcgaaaaagaacatcagtgatgactgagg

SEQ ID NO: 14420 - DNA, 30 bp, Artificial Sequence
  Synthetic oligonucleotide
agtagacaaagcgtgattgtgaaggtgcgg

SEQ ID NO: 14421 - DNA, 30 bp, Artificial Sequence
  Synthetic oligonucleotide
ctgaaaagcgacaaaggtgcaacacttcgg

SEQ ID NO: 14422 - DNA, 31 bp, Artificial Sequence
  Synthetic oligonucleotide
accagcggggtactcaaccgtgcatcaaggg

SEQ ID NO: 14423 - DNA, 30 bp, Artificial Sequence
  Synthetic oligonucleotide
agtaataggtcatacaaagaacatgaaggg

SEQ ID NO: 14424 - DNA, 30 bp, Artificial Sequence
  Synthetic oligonucleotide
aaaaggccaaataaagcccgataataaggg

SEQ ID NO: 14425 - DNA, 30 bp, Artificial Sequence
  Synthetic oligonucleotide
accgatcacccgatgggaaagttgacaggg

SEQ ID NO: 14426 - DNA, 30 bp, Artificial Sequence
  Synthetic oligonucleotide
gacgagcagcgccataagaagggaagtggg

SEQ ID NO: 14427 - DNA, 30 bp, Artificial Sequence
  Synthetic oligonucleotide
ggtgaacgggctagaaacgcaaaaggtggg

SEQ ID NO: 14428 - DNA, 30 bp, Artificial Sequence
  Synthetic oligonucleotide
cgaacgaggcgttgggaataagcgaagtgg

SEQ ID NO: 14429 - DNA, 30 bp, Artificial Sequence
  Synthetic oligonucleotide
gggagtcgtaacaatcgagcagccgagtgg

SEQ ID NO: 14430 - DNA, 30 bp, Artificial Sequence
  Synthetic oligonucleotide
cgctagtcaggaaagaggtgtacgtagtgg

SEQ ID NO: 14431 - DNA, 30 bp, Artificial Sequence
  Synthetic oligonucleotide
gcgatttgaagggaaaggcaaactacgtgg

SEQ ID NO: 14432 - DNA, 30 bp, Artificial Sequence
  Synthetic oligonucleotide
acgaagtagcgagaggaatttagaacttgg

SEQ ID NO: 14433 - DNA, 30 bp, Artificial Sequence
  Synthetic oligonucleotide
gcgcaacgcacccttcgagccgaccaaatg

SEQ ID NO: 14434 - DNA, 30 bp, Artificial Sequence
  Synthetic oligonucleotide
ggacgagcgtgaggagggcaaaacgccatg

SEQ ID NO: 14435 - DNA, 30 bp, Artificial Sequence
  Synthetic oligonucleotide
ataaaagagcgaggacaattccgaaagatg

SEQ ID NO: 14436 - DNA, 30 bp, Artificial Sequence
  Synthetic oligonucleotide
aacgaaaaactgaggaagctactaaagatg

SEQ ID NO: 14437 - DNA, 30 bp, Artificial Sequence
  Synthetic oligonucleotide
catgagtcgaaggcatttgtaccgaggatg

SEQ ID NO: 14438 - DNA, 30 bp, Artificial Sequence
  Synthetic oligonucleotide
gcagaagagtgaaaacccaatgtacttatg

SEQ ID NO: 14439 - DNA, 31 bp, Artificial Sequence
  Synthetic oligonucleotide
atgtgtgagaagcggaagaaccagcagactg

SEQ ID NO: 14440 - DNA, 30 bp, Artificial Sequence
  Synthetic oligonucleotide
cgtgggtcaaataggataagatagatactg

SEQ ID NO: 14441 - DNA, 30 bp, Artificial Sequence
  Synthetic oligonucleotide
accgataaaaagaggaaagccgcctagctg

SEQ ID NO: 14442 - DNA, 30 bp, Artificial Sequence
  Synthetic oligonucleotide
cagagagaatgctgacatcgaatcatgctg

SEQ ID NO: 14443 - DNA, 30 bp, Artificial Sequence
  Synthetic oligonucleotide
tgggcaataaagctgagagtcaagtcagtg

SEQ ID NO: 14444 - DNA, 30 bp, Artificial Sequence
  Synthetic oligonucleotide
gagcatgcgaggaaatgtatcatcagagtg

SEQ ID NO: 14445 - DNA, 30 bp, Artificial Sequence
  Synthetic oligonucleotide
ccaagaggtgaggggtggaacaaagtagtg

SEQ ID NO: 14446 - DNA, 30 bp, Artificial Sequence
  Synthetic oligonucleotide
cacgaagaggggcaggtgacatcgaacgtg

SEQ ID NO: 14447 - DNA, 30 bp, Artificial Sequence
  Synthetic oligonucleotide
acgtcagagctaggggatcatcaggacgtg

SEQ ID NO: 14448 - DNA, 30 bp, Artificial Sequence
  Synthetic oligonucleotide
acgcggtaggcgattaaaatactaaaggtg

SEQ ID NO: 14449 - DNA, 30 bp, Artificial Sequence
  Synthetic oligonucleotide
gaggcaaacagccgaagtaatcacagggtg

SEQ ID NO: 14450 - DNA, 30 bp, Artificial Sequence
  Synthetic oligonucleotide
gcgaggaagtggaggcaaataggagatgtg

SEQ ID NO: 14451 - DNA, 30 bp, Artificial Sequence
  Synthetic oligonucleotide
ccgaagaggtttcacgccaccgagccattg

SEQ ID NO: 14452 - DNA, 30 bp, Artificial Sequence
  Synthetic oligonucleotide
acgtgaagaacgaatggttagagacatttg

SEQ ID NO: 14453 - DNA, 30 bp, Artificial Sequence
  Synthetic oligonucleotide
tcaggggaaaggataaaaggaacgtaaaat

SEQ ID NO: 14454 - DNA, 30 bp, Artificial Sequence
  Synthetic oligonucleotide
tggaaaaagaggcacgaaaagagctccaat

SEQ ID NO: 14455 - DNA, 30 bp, Artificial Sequence
  Synthetic oligonucleotide
aggcacgttcaccagaagggctggaagaat

SEQ ID NO: 14456 - DNA, 30 bp, Artificial Sequence
  Synthetic oligonucleotide
ccggtcaaaggcgaatctaccaacacccat

SEQ ID NO: 14457 - DNA, 30 bp, Artificial Sequence
  Synthetic oligonucleotide
gcgcgagatccaaaaaagatgtgagtccat

SEQ ID NO: 14458 - DNA, 30 bp, Artificial Sequence
  Synthetic oligonucleotide
tcgaggattgaagcggagtgaaacgcgcat

SEQ ID NO: 14459 - DNA, 30 bp, Artificial Sequence
  Synthetic oligonucleotide
aaggaacggaggtattaaacacagcgagat

SEQ ID NO: 14460 - DNA, 30 bp, Artificial Sequence
  Synthetic oligonucleotide
atgggtgccctaactgcagaggatcgcgat

SEQ ID NO: 14461 - DNA, 30 bp, Artificial Sequence
  Synthetic oligonucleotide
agggagagtgtagctagcacaacgactgat

SEQ ID NO: 14462 - DNA, 30 bp, Artificial Sequence
  Synthetic oligonucleotide
cgcgagagcgaaagcagcagtgacgaatat

SEQ ID NO: 14463 - DNA, 30 bp, Artificial Sequence
  Synthetic oligonucleotide
cagtgagggaacacggggataactgaatat

SEQ ID NO: 14464 - DNA, 30 bp, Artificial Sequence
  Synthetic oligonucleotide
cgtacactgaagtgtaggcgggagtgaact

SEQ ID NO: 14465 - DNA, 30 bp, Artificial Sequence
  Synthetic oligonucleotide
cgtactaccaagagatcggccgaggagact

SEQ ID NO: 14466 - DNA, 30 bp, Artificial Sequence
  Synthetic oligonucleotide
gggagaacagtcattgttgggaaaaaagct

SEQ ID NO: 14467 - DNA, 30 bp, Artificial Sequence
  Synthetic oligonucleotide
gaaggcgagtcaggaaaaattgttaaagct

SEQ ID NO: 14468 - DNA, 30 bp, Artificial Sequence
  Synthetic oligonucleotide
gcccaagagatcagagaatgtcagcacgct

SEQ ID NO: 14469 - DNA, 30 bp, Artificial Sequence
  Synthetic oligonucleotide
aggcacggaacatgcgcgaaacgcttggct

SEQ ID NO: 14470 - DNA, 30 bp, Artificial Sequence
  Synthetic oligonucleotide
ggggccgtctaccaagagatgagtgagtct

SEQ ID NO: 14471 - DNA, 30 bp, Artificial Sequence
  Synthetic oligonucleotide
agggaactatgtcgtaagagcgaagtaagt

SEQ ID NO: 14472 - DNA, 30 bp, Artificial Sequence
  Synthetic oligonucleotide
acgcagtttcgaaaatcggtcaagcacagt

SEQ ID NO: 14473 - DNA, 30 bp, Artificial Sequence
  Synthetic oligonucleotide
cgaaccatcgataacgagtaggcgtccagt

SEQ ID NO: 14474 - DNA, 30 bp, Artificial Sequence
  Synthetic oligonucleotide
aacggggtgccggaaactcagtgacaacgt

SEQ ID NO: 14475 - DNA, 30 bp, Artificial Sequence
  Synthetic oligonucleotide
tacgacaagataggagccacaaagaaccgt

SEQ ID NO: 14476 - DNA, 30 bp, Artificial Sequence
  Synthetic oligonucleotide
ccaagaaaagtcgcaagggtgaagcatcgt

SEQ ID NO: 14477 - DNA, 30 bp, Artificial Sequence
  Synthetic oligonucleotide
gcgcaaaccacagcacaccatacatctcgt

SEQ ID NO: 14478 - DNA, 30 bp, Artificial Sequence
  Synthetic oligonucleotide
agtcacgaaggggataaacggcgaattcgt

SEQ ID NO: 14479 - DNA, 30 bp, Artificial Sequence
  Synthetic oligonucleotide
tcggcagagggatggaatgcgagtgttcgt

SEQ ID NO: 14480 - DNA, 30 bp, Artificial Sequence
  Synthetic oligonucleotide
acgttcagggggacggatcgtttaagaggt

SEQ ID NO: 14481 - DNA, 30 bp, Artificial Sequence
  Synthetic oligonucleotide
gtatgaaaggtaagagggggactgagaggt

SEQ ID NO: 14482 - DNA, 30 bp, Artificial Sequence
  Synthetic oligonucleotide
taaggagcagggagagtgatccagatcctt

SEQ ID NO: 14483 - DNA, 30 bp, Artificial Sequence
  Synthetic oligonucleotide
caaggcgcaactagggagaaatcaaacgtt

SEQ ID NO: 14484 - DNA, 30 bp, Artificial Sequence
  Synthetic oligonucleotide
ccgaggaaaagggcacgctaacattcggtt

SEQ ID NO: 14485 - DNA, 30 bp, Artificial Sequence
  Synthetic oligonucleotide
tggtcgcaatcagtgggcacagctacaaaa

SEQ ID NO: 14486 - DNA, 30 bp, Artificial Sequence
  Synthetic oligonucleotide
cggcaacggattagatcaccgccgcgaaaa

SEQ ID NO: 14487 - DNA, 30 bp, Artificial Sequence
  Synthetic oligonucleotide
tcgaaccaagacagtaacagatctggaaaa

SEQ ID NO: 14488 - DNA, 30 bp, Artificial Sequence
  Synthetic oligonucleotide
atacaaatagcagaggtaaaaggctacaaa

SEQ ID NO: 14489 - DNA, 30 bp, Artificial Sequence
  Synthetic oligonucleotide
gcgaagaataccctccgaacacttaccaaa

SEQ ID NO: 14490 - DNA, 30 bp, Artificial Sequence
  Synthetic oligonucleotide
ccagagaatacagtctgccccgaaggcaaa

SEQ ID NO: 14491 - DNA, 30 bp, Artificial Sequence
  Synthetic oligonucleotide
aggtgaaggacgtgtcgtcgtagtttgaaa

SEQ ID NO: 14492 - DNA, 30 bp, Artificial Sequence
  Synthetic oligonucleotide
agttaccgagcaggcacggatacaggtaaa

SEQ ID NO: 14493 - DNA, 30 bp, Artificial Sequence
  Synthetic oligonucleotide
caggggggaggatagtgaacacataaacaa

SEQ ID NO: 14494 - DNA, 30 bp, Artificial Sequence
  Synthetic oligonucleotide
cgacgcgtaatggggcgcacagttaaacaa

SEQ ID NO: 14495 - DNA, 30 bp, Artificial Sequence
  Synthetic oligonucleotide
gcggaaaatttaccagagtgaggataacaa

SEQ ID NO: 14496 - DNA, 30 bp, Artificial Sequence
  Synthetic oligonucleotide
tggcatcacccgaagggacgagcaatacaa

SEQ ID NO: 14497 - DNA, 30 bp, Artificial Sequence
  Synthetic oligonucleotide
aggaggtgttggcagtgaagcaactagcaa

SEQ ID NO: 14498 - DNA, 30 bp, Artificial Sequence
  Synthetic oligonucleotide
cgaacgggcgaaacaaatgcgcatctgcaa

SEQ ID NO: 14499 - DNA, 30 bp, Artificial Sequence
  Synthetic oligonucleotide
agttatgaagagcgagcaataagcactcaa

SEQ ID NO: 14500 - DNA, 30 bp, Artificial Sequence
  Synthetic oligonucleotide
tcgggtaaagcacaacaaaatgcaggtcaa

SEQ ID NO: 14501 - DNA, 30 bp, Artificial Sequence
  Synthetic oligonucleotide
caccgaatcgcgagcacgaaggacaaagaa

SEQ ID NO: 14502 - DNA, 30 bp, Artificial Sequence
  Synthetic oligonucleotide
caggggcctacagtggtcgggataacagaa

SEQ ID NO: 14503 - DNA, 30 bp, Artificial Sequence
  Synthetic oligonucleotide
ggaacacacatgtaagcatgatccggagaa

SEQ ID NO: 14504 - DNA, 30 bp, Artificial Sequence
  Synthetic oligonucleotide
cggttaaagactgaaaggagatattacgaa

SEQ ID NO: 14505 - DNA, 30 bp, Artificial Sequence
  Synthetic oligonucleotide
cgaaacactaagaccaactcgtctcgcgaa

SEQ ID NO: 14506 - DNA, 30 bp, Artificial Sequence
  Synthetic oligonucleotide
agcggaaagacgaatcgcgcagttgtcgaa

SEQ ID NO: 14507 - DNA, 30 bp, Artificial Sequence
  Synthetic oligonucleotide
gcgtgcacgtggtatgtacaggtataggaa

SEQ ID NO: 14508 - DNA, 30 bp, Artificial Sequence
  Synthetic oligonucleotide
cgtttcatggcaataaaagtagagccggaa

SEQ ID NO: 14509 - DNA, 30 bp, Artificial Sequence
  Synthetic oligonucleotide
tagcaagctcgggcatataaagcggcggaa

SEQ ID NO: 14510 - DNA, 30 bp, Artificial Sequence
  Synthetic oligonucleotide
acgggtagcggtgaaggttcgatgtctgaa

SEQ ID NO: 14511 - DNA, 30 bp, Artificial Sequence
  Synthetic oligonucleotide
agctggcaaactaaagagcagacccgtgaa

SEQ ID NO: 14512 - DNA, 30 bp, Artificial Sequence
  Synthetic oligonucleotide
agtagaccaggcaaagtaaatgcgccataa

SEQ ID NO: 14513 - DNA, 30 bp, Artificial Sequence
  Synthetic oligonucleotide
cggaagaccatgacgacccaaccgttataa

SEQ ID NO: 14514 - DNA, 30 bp, Artificial Sequence
  Synthetic oligonucleotide
cggagacaactgctcatgaagctaaagtaa

SEQ ID NO: 14515 - DNA, 30 bp, Artificial Sequence
  Synthetic oligonucleotide
agatcggaacaatcgaagtggaacgcgtaa

SEQ ID NO: 14516 - DNA, 30 bp, Artificial Sequence
  Synthetic oligonucleotide
agaagaggagtctaagaagattgccggtaa

SEQ ID NO: 14517 - DNA, 30 bp, Artificial Sequence
  Synthetic oligonucleotide
ctgcgacggggggaaaaggcgtaagtgtaa

SEQ ID NO: 14518 - DNA, 30 bp, Artificial Sequence
  Synthetic oligonucleotide
agaaccaggtggcctaagcgaaaaaaaaca

SEQ ID NO: 14519 - DNA, 30 bp, Artificial Sequence
  Synthetic oligonucleotide
cgtcgaaaacatggatcatccaggcaaaca

SEQ ID NO: 14520 - DNA, 30 bp, Artificial Sequence
  Synthetic oligonucleotide
cgtcaaccgggcgtgaaccagcgataaaca

SEQ ID NO: 14521 - DNA, 30 bp, Artificial Sequence
  Synthetic oligonucleotide
atagtccggaaataaacaaagccaacaaca

SEQ ID NO: 14522 - DNA, 30 bp, Artificial Sequence
  Synthetic oligonucleotide
agggactggagccgactgtgcgacacaaca

SEQ ID NO: 14523 - DNA, 30 bp, Artificial Sequence
  Synthetic oligonucleotide
agagatgagaaaacaagtaaggttaccaca

SEQ ID NO: 14524 - DNA, 30 bp, Artificial Sequence
  Synthetic oligonucleotide
aacagaaggcaacacgtggtcatcaagaca

SEQ ID NO: 14525 - DNA, 30 bp, Artificial Sequence
  Synthetic oligonucleotide
gtcggggagatcaacgaaaataataagaca

SEQ ID NO: 14526 - DNA, 30 bp, Artificial Sequence
  Synthetic oligonucleotide
cgtaccattaagaagcaccagaacgttaca

SEQ ID NO: 14527 - DNA, 30 bp, Artificial Sequence
  Synthetic oligonucleotide
tagagaaatagcgaacatccgagccaccca

SEQ ID NO: 14528 - DNA, 30 bp, Artificial Sequence
  Synthetic oligonucleotide
caacgagacaaaggacgactataggcgcca

SEQ ID NO: 14529 - DNA, 30 bp, Artificial Sequence
  Synthetic oligonucleotide
ggctcacatcgcataagaaaccaacggcca

SEQ ID NO: 14530 - DNA, 30 bp, Artificial Sequence
  Synthetic oligonucleotide
ggtgaagcccgagtgacaagagaagatcca

SEQ ID NO: 14531 - DNA, 30 bp, Artificial Sequence
  Synthetic oligonucleotide
gggggaaaggcgattcatagaagcactcca

SEQ ID NO: 14532 - DNA, 30 bp, Artificial Sequence
  Synthetic oligonucleotide
aggagtggtgtgcaacgactacgtcaagca

SEQ ID NO: 14533 - DNA, 30 bp, Artificial Sequence
  Synthetic oligonucleotide
tcaagctgacagtcttccaacaaagcagca

SEQ ID NO: 14534 - DNA, 30 bp, Artificial Sequence
  Synthetic oligonucleotide
ccggaactggggatccctgaagcgagagca

SEQ ID NO: 14535 - DNA, 30 bp, Artificial Sequence
  Synthetic oligonucleotide
aggagtctagggggaatagctaggggagca

SEQ ID NO: 14536 - DNA, 30 bp, Artificial Sequence
  Synthetic oligonucleotide
atgaatatagagccaagattaataagcgca

SEQ ID NO: 14537 - DNA, 30 bp, Artificial Sequence
  Synthetic oligonucleotide
ccataagacaatccgacacaaacgagcgca

SEQ ID NO: 14538 - DNA, 30 bp, Artificial Sequence
  Synthetic oligonucleotide
agaataacgcgaggtccaatcgcatgcgca

SEQ ID NO: 14539 - DNA, 30 bp, Artificial Sequence
  Synthetic oligonucleotide
aacgtggctgacaagaatgccaattgcgca

SEQ ID NO: 14540 - DNA, 30 bp, Artificial Sequence
  Synthetic oligonucleotide
ggtgatcagagaataggtaagcaagtcgca

SEQ ID NO: 14541 - DNA, 30 bp, Artificial Sequence
  Synthetic oligonucleotide
gcacaacaacgggttgagtagaggaaggca

SEQ ID NO: 14542 - DNA, 30 bp, Artificial Sequence
  Synthetic oligonucleotide
agggagagacgaataacgatcgtgctatca

SEQ ID NO: 14543 - DNA, 30 bp, Artificial Sequence
  Synthetic oligonucleotide
ggatgaacaggtggatgacaacgcgcgtca

SEQ ID NO: 14544 - DNA, 30 bp, Artificial Sequence
  Synthetic oligonucleotide
gccttagaaagatacaagagaaggcaaaga

SEQ ID NO: 14545 - DNA, 30 bp, Artificial Sequence
  Synthetic oligonucleotide
ttaaggacagacatatggagatgagaaaga

SEQ ID NO: 14546 - DNA, 30 bp, Artificial Sequence
  Synthetic oligonucleotide
cggaacagggcaaggtgatatagggaaaga

SEQ ID NO: 14547 - DNA, 30 bp, Artificial Sequence
  Synthetic oligonucleotide
atcgtagtggtacgaattctgggaggaaga

SEQ ID NO: 14548 - DNA, 30 bp, Artificial Sequence
  Synthetic oligonucleotide
acataagatcaacatagccgaacatgaaga

SEQ ID NO: 14549 - DNA, 30 bp, Artificial Sequence
  Synthetic oligonucleotide
gggacacattaggaatatataacatgaaga

SEQ ID NO: 14550 - DNA, 30 bp, Artificial Sequence
  Synthetic oligonucleotide
tggcgccaaggagttaggaagaagataaga

SEQ ID NO: 14551 - DNA, 30 bp, Artificial Sequence
  Synthetic oligonucleotide
gcggtgagcaaataaggctcgggattaaga

SEQ ID NO: 14552 - DNA, 30 bp, Artificial Sequence
  Synthetic oligonucleotide
agagtgagatggactcaatgattgcacaga

SEQ ID NO: 14553 - DNA, 30 bp, Artificial Sequence
  Synthetic oligonucleotide
acggaaagcgattactagcgtaagcccaga

SEQ ID NO: 14554 - DNA, 30 bp, Artificial Sequence
  Synthetic oligonucleotide
cggactctacgacctaaatagtaaagcaga

SEQ ID NO: 14555 - DNA, 30 bp, Artificial Sequence
  Synthetic oligonucleotide
ccttatgcgcgaagaaaaggatgcaagaga

SEQ ID NO: 14556 - DNA, 30 bp, Artificial Sequence
  Synthetic oligonucleotide
aggggacgtccgacccgaaattggcataga

SEQ ID NO: 14557 - DNA, 30 bp, Artificial Sequence
  Synthetic oligonucleotide
aaggactagtcatcctacgcaaacgataga

SEQ ID NO: 14558 - DNA, 30 bp, Artificial Sequence
  Synthetic oligonucleotide
atggcacggaagcaacaatttacggaacga

SEQ ID NO: 14559 - DNA, 30 bp, Artificial Sequence
  Synthetic oligonucleotide
ggaaaaaggagagaaagatccggccaccga

SEQ ID NO: 14560 - DNA, 30 bp, Artificial Sequence
  Synthetic oligonucleotide
acttcgaactagccgaaacccaacagccga

SEQ ID NO: 14561 - DNA, 30 bp, Artificial Sequence
  Synthetic oligonucleotide
gtagagtaaagtatcataggaaaggagcga

SEQ ID NO: 14562 - DNA, 30 bp, Artificial Sequence
  Synthetic oligonucleotide
tacggggacaggcaggccaagtttcatcga

SEQ ID NO: 14563 - DNA, 30 bp, Artificial Sequence
  Synthetic oligonucleotide
cgccacccgaatctaactagcacggaagga

SEQ ID NO: 14564 - DNA, 30 bp, Artificial Sequence
  Synthetic oligonucleotide
gtagcccgagaagaagcgtcccaagcagga

SEQ ID NO: 14565 - DNA, 30 bp, Artificial Sequence
  Synthetic oligonucleotide
gcgaagaaaaaaaggatacccaaatcagga

SEQ ID NO: 14566 - DNA, 30 bp, Artificial Sequence
  Synthetic oligonucleotide
cgtcggagagaacattaggcggtcagagga

SEQ ID NO: 14567 - DNA, 30 bp, Artificial Sequence
  Synthetic oligonucleotide
cggcagataatctccagctacggcctagga

SEQ ID NO: 14568 - DNA, 38 bp, Artificial Sequence
  Synthetic oligonucleotide
aagataatacattcatggtatggtcggatcggggggga

SEQ ID NO: 14569 - DNA, 40 bp, Artificial Sequence
  Synthetic oligonucleotide
aagataatacattcatggtatggtcggggattggggggga

SEQ ID NO: 14570 - DNA, 30 bp, Artificial Sequence
  Synthetic oligonucleotide
cgcacggcctagaaagcgtaagagtgggga

SEQ ID NO: 14571 - DNA, 30 bp, Artificial Sequence
  Synthetic oligonucleotide
gcacgaaagaaactgtcaataagcctatga

SEQ ID NO: 14572 - DNA, 30 bp, Artificial Sequence
  Synthetic oligonucleotide
gccaaacaggacgttaagttgcaagagtga

SEQ ID NO: 14573 - DNA, 30 bp, Artificial Sequence
  Synthetic oligonucleotide
aggggaaacaacgtggaggagaaatcaata

SEQ ID NO: 14574 - DNA, 30 bp, Artificial Sequence
  Synthetic oligonucleotide
cagtccgatgaagaggagtccggcataata

SEQ ID NO: 14575 - DNA, 30 bp, Artificial Sequence
  Synthetic oligonucleotide
tggaccgaatgagtaaaagccataagcata

SEQ ID NO: 14576 - DNA, 30 bp, Artificial Sequence
  Synthetic oligonucleotide
acgctgtaactggacaaactggcgatcata

SEQ ID NO: 14577 - DNA, 30 bp, Artificial Sequence
  Synthetic oligonucleotide
acaggggtgtctcgaaggggaagtgtcata

SEQ ID NO: 14578 - DNA, 31 bp, Artificial Sequence
  Synthetic oligonucleotide
cgtactgaagaagccaacaggagaagagata

SEQ ID NO: 14579 - DNA, 30 bp, Artificial Sequence
  Synthetic oligonucleotide
cgacagagggccagtcagcatgggcatata

SEQ ID NO: 14580 - DNA, 30 bp, Artificial Sequence
  Synthetic oligonucleotide
cgacaacaggcgcataactcagatagccta

SEQ ID NO: 14581 - DNA, 30 bp, Artificial Sequence
  Synthetic oligonucleotide
cgtatgcacatctccaaagtccaaagagta

SEQ ID NO: 14582 - DNA, 30 bp, Artificial Sequence
  Synthetic oligonucleotide
cggcttgcaggactaaacttagacagagta

SEQ ID NO: 14583 - DNA, 30 bp, Artificial Sequence
  Synthetic oligonucleotide
acggcatggagatggcgcgtaacgtgagta

SEQ ID NO: 14584 - DNA, 30 bp, Artificial Sequence
  Synthetic oligonucleotide
cgaaagtgaactaccaactatccgaacgta

SEQ ID NO: 14585 - DNA, 30 bp, Artificial Sequence
  Synthetic oligonucleotide
cacgcactgaaggccgacctagtgatggta

SEQ ID NO: 14586 - DNA, 30 bp, Artificial Sequence
  Synthetic oligonucleotide
cacgtgtggagtgaaagtaaccgcgatgta

SEQ ID NO: 14587 - DNA, 30 bp, Artificial Sequence
  Synthetic oligonucleotide
caaggatatggtcgaaggaagtatgagtta

SEQ ID NO: 14588 - DNA, 30 bp, Artificial Sequence
  Synthetic oligonucleotide
cctagatataaggaggggatcggcgattta

SEQ ID NO: 14589 - DNA, 30 bp, Artificial Sequence
  Synthetic oligonucleotide
ggtcaggccccgaaaagcatagtaggaaac

SEQ ID NO: 14590 - DNA, 30 bp, Artificial Sequence
  Synthetic oligonucleotide
cgaagcggccggaagaccgagaaacacaac

SEQ ID NO: 14591 - DNA, 30 bp, Artificial Sequence
  Synthetic oligonucleotide
ccagggcacgattagaggttcggagacaac

SEQ ID NO: 14592 - DNA, 30 bp, Artificial Sequence
  Synthetic oligonucleotide
aagcttacatcacaacaagaggggcagaac

SEQ ID NO: 14593 - DNA, 30 bp, Artificial Sequence
  Synthetic oligonucleotide
cgaacacggacataagacgccaatccgaac

SEQ ID NO: 14594 - DNA, 30 bp, Artificial Sequence
  Synthetic oligonucleotide
atgtgaagacatgaatccgagtaagctaac

SEQ ID NO: 14595 - DNA, 30 bp, Artificial Sequence
  Synthetic oligonucleotide
cgaggacgaactaacagagtctcctgccac

SEQ ID NO: 14596 - DNA, 30 bp, Artificial Sequence
  Synthetic oligonucleotide
ggaagggggcatgacgaaagctaaaggcac

SEQ ID NO: 14597 - DNA, 30 bp, Artificial Sequence
  Synthetic oligonucleotide
acgaattgtagcagcttccacagcccagac

SEQ ID NO: 14598 - DNA, 30 bp, Artificial Sequence
  Synthetic oligonucleotide
ggcgtagccatatgcgaaactatcccagac

SEQ ID NO: 14599 - DNA, 30 bp, Artificial Sequence
  Synthetic oligonucleotide
atgaagagtgagcactctcactgaggagac

SEQ ID NO: 14600 - DNA, 30 bp, Artificial Sequence
  Synthetic oligonucleotide
agataagaatgcgaacaggggctactagac

SEQ ID NO: 14601 - DNA, 30 bp, Artificial Sequence
  Synthetic oligonucleotide
atacggcacacggacgtggatcaatgcgac

SEQ ID NO: 14602 - DNA, 30 bp, Artificial Sequence
  Synthetic oligonucleotide
tgggctgtacgaatcgaagcgcaactcgac

SEQ ID NO: 14603 - DNA, 30 bp, Artificial Sequence
  Synthetic oligonucleotide
cgtaagaatccaaatcgtgcgcacgaggac

SEQ ID NO: 14604 - DNA, 30 bp, Artificial Sequence
  Synthetic oligonucleotide
acggacaatggaattagtcgtcggagggac

SEQ ID NO: 14605 - DNA, 30 bp, Artificial Sequence
  Synthetic oligonucleotide
agaaaagtgaaccctgaggaaaaggatgac

SEQ ID NO: 14606 - DNA, 30 bp, Artificial Sequence
  Synthetic oligonucleotide
tgcgggagtggagacagttacgagggtgac

SEQ ID NO: 14607 - DNA, 30 bp, Artificial Sequence
  Synthetic oligonucleotide
cacaagcgagtaagagctcaacgccaatac

SEQ ID NO: 14608 - DNA, 30 bp, Artificial Sequence
  Synthetic oligonucleotide
aggaaacgagccaagatgagttacggatac

SEQ ID NO: 14609 - DNA, 30 bp, Artificial Sequence
  Synthetic oligonucleotide
agtgaaacaagaaagaacgggacgcggtac

SEQ ID NO: 14610 - DNA, 30 bp, Artificial Sequence
  Synthetic oligonucleotide
acacatagcaatgcacgagagtgtcggtac

SEQ ID NO: 14611 - DNA, 30 bp, Artificial Sequence
  Synthetic oligonucleotide
aagcgccataactaaagaccaccgagcacc

SEQ ID NO: 14612 - DNA, 30 bp, Artificial Sequence
  Synthetic oligonucleotide
atggggcccgagcgagactacgtgtaagcc

SEQ ID NO: 14613 - DNA, 30 bp, Artificial Sequence
  Synthetic oligonucleotide
cacacacatgctataagggtgaacgtcgcc

SEQ ID NO: 14614 - DNA, 30 bp, Artificial Sequence
  Synthetic oligonucleotide
agaacaaagagggaggggaacaggttcgcc

SEQ ID NO: 14615 - DNA, 30 bp, Artificial Sequence
  Synthetic oligonucleotide
gcgtaagagcgtgagagtagacatgaatcc

SEQ ID NO: 14616 - DNA, 30 bp, Artificial Sequence
  Synthetic oligonucleotide
acatggatacaaggcggaaagagtggctcc

SEQ ID NO: 14617 - DNA, 30 bp, Artificial Sequence
  Synthetic oligonucleotide
tgttagacaaacatcgagaatatcaccagc

SEQ ID NO: 14618 - DNA, 30 bp, Artificial Sequence
  Synthetic oligonucleotide
agggggccggcatggagaaagatactgagc

SEQ ID NO: 14619 - DNA, 30 bp, Artificial Sequence
  Synthetic oligonucleotide
cgataagaatcactaacaagacggtatagc

SEQ ID NO: 14620 - DNA, 30 bp, Artificial Sequence
  Synthetic oligonucleotide
cgtaagaggttcgaaatatgcaatgccggc

SEQ ID NO: 14621 - DNA, 30 bp, Artificial Sequence
  Synthetic oligonucleotide
tcaagtacaaattgaatcagggggcggggc

SEQ ID NO: 14622 - DNA, 30 bp, Artificial Sequence
  Synthetic oligonucleotide
agggaggtgtcacactccaggccaaaatgc

SEQ ID NO: 14623 - DNA, 30 bp, Artificial Sequence
  Synthetic oligonucleotide
acatataaaggtagacccagaagacgatgc

SEQ ID NO: 14624 - DNA, 30 bp, Artificial Sequence
  Synthetic oligonucleotide
aacgaaggaaactggtaacctccgaaaaag

SEQ ID NO: 14625 - DNA, 30 bp, Artificial Sequence
  Synthetic oligonucleotide
aaatcaagaagagagccataggggacaaag

SEQ ID NO: 14626 - DNA, 30 bp, Artificial Sequence
  Synthetic oligonucleotide
atgctgtgtaggagggaagtacatcgaaag

SEQ ID NO: 14627 - DNA, 30 bp, Artificial Sequence
  Synthetic oligonucleotide
gctgcggaaaacgtaacctggcaaataaag

SEQ ID NO: 14628 - DNA, 30 bp, Artificial Sequence
  Synthetic oligonucleotide
agtcaggtcagaggagcagtgcaactaaag

SEQ ID NO: 14629 - DNA, 30 bp, Artificial Sequence
  Synthetic oligonucleotide
acatcgaattgaggtataaagatcgtaaag

SEQ ID NO: 14630 - DNA, 30 bp, Artificial Sequence
  Synthetic oligonucleotide
tccatactacgtactgaacagatgaacaag

SEQ ID NO: 14631 - DNA, 30 bp, Artificial Sequence
  Synthetic oligonucleotide
taggtagctaagaggaatcgggtccacaag

SEQ ID NO: 14632 - DNA, 30 bp, Artificial Sequence
  Synthetic oligonucleotide
gggggagtgtgtgaatctcgacatgacaag

SEQ ID NO: 14633 - DNA, 30 bp, Artificial Sequence
  Synthetic oligonucleotide
ggggaggagcggcgtatagatacctacaag

SEQ ID NO: 14634 - DNA, 30 bp, Artificial Sequence
  Synthetic oligonucleotide
tcgtaaataagggcaatttaagacttcaag

SEQ ID NO: 14635 - DNA, 30 bp, Artificial Sequence
  Synthetic oligonucleotide
cagtgtccaccccaaagcgaggggaagaag

SEQ ID NO: 14636 - DNA, 30 bp, Artificial Sequence
  Synthetic oligonucleotide
agtaagcgagcaaaagtgttcgtgcagaag

SEQ ID NO: 14637 - DNA, 30 bp, Artificial Sequence
  Synthetic oligonucleotide
atcaggaaagagaagatcaagtcatcgaag

SEQ ID NO: 14638 - DNA, 30 bp, Artificial Sequence
  Synthetic oligonucleotide
ggtggacaacgaagtagggaactagcacag

SEQ ID NO: 14639 - DNA, 30 bp, Artificial Sequence
  Synthetic oligonucleotide
acaacggtacggaaatccagctcaagacag

SEQ ID NO: 14640 - DNA, 30 bp, Artificial Sequence
  Synthetic oligonucleotide
aactagagagcacgaactagcgggcaccag

SEQ ID NO: 14641 - DNA, 30 bp, Artificial Sequence
  Synthetic oligonucleotide
agaacaacgtgtagatatagtgagtgccag

SEQ ID NO: 14642 - DNA, 30 bp, Artificial Sequence
  Synthetic oligonucleotide
accggaatgataacacaagattgttgccag

SEQ ID NO: 14643 - DNA, 30 bp, Artificial Sequence
  Synthetic oligonucleotide
gcgtggagaatgccgtattcaggaaagcag

SEQ ID NO: 14644 - DNA, 30 bp, Artificial Sequence
  Synthetic oligonucleotide
gggagatacaataactcaagacggcatcag

SEQ ID NO: 14645 - DNA, 30 bp, Artificial Sequence
  Synthetic oligonucleotide
tctcgcagagcgttcacaaggcgaaaagag

SEQ ID NO: 14646 - DNA, 30 bp, Artificial Sequence
  Synthetic oligonucleotide
cactgtcggaacataggtagacgtaaagag

SEQ ID NO: 14647 - DNA, 30 bp, Artificial Sequence
  Synthetic oligonucleotide
tcgtgggggacgggtctttgccgacaagag

SEQ ID NO: 14648 - DNA, 30 bp, Artificial Sequence
  Synthetic oligonucleotide
agcaaagagaatagacgtctataatcagag

SEQ ID NO: 14649 - DNA, 30 bp, Artificial Sequence
  Synthetic oligonucleotide
agactacccggtcacacgataagaagagag

SEQ ID NO: 14650 - DNA, 30 bp, Artificial Sequence
  Synthetic oligonucleotide
agggccacgacatctgtaatcagcggagag

SEQ ID NO: 14651 - DNA, 30 bp, Artificial Sequence
  Synthetic oligonucleotide
atggggaccgaagtatcataccgtggagag

SEQ ID NO: 14652 - DNA, 30 bp, Artificial Sequence
  Synthetic oligonucleotide
gtgtaaacgtaaagtagtagtggcaacgag

SEQ ID NO: 14653 - DNA, 30 bp, Artificial Sequence
  Synthetic oligonucleotide
tcgaaatgatgggcaatgggaggatacgag

SEQ ID NO: 14654 - DNA, 30 bp, Artificial Sequence
  Synthetic oligonucleotide
caagggaaagactaaaggggaggaaccgag

SEQ ID NO: 14655 - DNA, 30 bp, Artificial Sequence
  Synthetic oligonucleotide
ggggacttcaaacaggggtaaaataccgag

SEQ ID NO: 14656 - DNA, 30 bp, Artificial Sequence
  Synthetic oligonucleotide
taccgcgcaaatatgggtttagtatccgag

SEQ ID NO: 14657 - DNA, 30 bp, Artificial Sequence
  Synthetic oligonucleotide
cacaggcggtcataaaagagcgttatcgag

SEQ ID NO: 14658 - DNA, 30 bp, Artificial Sequence
  Synthetic oligonucleotide
tggactgggaagattcagaaaaaggaggag

SEQ ID NO: 14659 - DNA, 30 bp, Artificial Sequence
  Synthetic oligonucleotide
gctgatgagcgtgaagaataaattgcggag

SEQ ID NO: 14660 - DNA, 30 bp, Artificial Sequence
  Synthetic oligonucleotide
tcggtaacatgtagtcaaggaatcagggag

SEQ ID NO: 14661 - DNA, 30 bp, Artificial Sequence
  Synthetic oligonucleotide
actcacgaattacaacagcacaagagggag

SEQ ID NO: 14662 - DNA, 30 bp, Artificial Sequence
  Synthetic oligonucleotide
cgagttggctgcaagctcaaaccaatggag

SEQ ID NO: 14663 - DNA, 30 bp, Artificial Sequence
  Synthetic oligonucleotide
cgtaatacataaccggtaacaaacttggag

SEQ ID NO: 14664 - DNA, 30 bp, Artificial Sequence
  Synthetic oligonucleotide
atgagagatttgataccaacaacaactgag

SEQ ID NO: 14665 - DNA, 30 bp, Artificial Sequence
  Synthetic oligonucleotide
tcgaccaccttcagaactaaccgcactgag

SEQ ID NO: 14666 - DNA, 30 bp, Artificial Sequence
  Synthetic oligonucleotide
aaaaatcgaggaaggcaacgcacccctgag

SEQ ID NO: 14667 - DNA, 30 bp, Artificial Sequence
  Synthetic oligonucleotide
aggcgcatgacgttgaaatggatagaatag

SEQ ID NO: 14668 - DNA, 30 bp, Artificial Sequence
  Synthetic oligonucleotide
ccagcgcgcaaataaggcatagacacatag

SEQ ID NO: 14669 - DNA, 30 bp, Artificial Sequence
  Synthetic oligonucleotide
cgagatagcgtaggaaactcgtgcccatag

SEQ ID NO: 14670 - DNA, 30 bp, Artificial Sequence
  Synthetic oligonucleotide
cgccagagtaaagtcgaaccgatcgcatag

SEQ ID NO: 14671 - DNA, 30 bp, Artificial Sequence
  Synthetic oligonucleotide
agccgttagaaggcggacttgcgaaactag

SEQ ID NO: 14672 - DNA, 30 bp, Artificial Sequence
  Synthetic oligonucleotide
gggatgagctgaagggcaacacgaaagtag

SEQ ID NO: 14673 - DNA, 30 bp, Artificial Sequence
  Synthetic oligonucleotide
acgtagttagagcgggatcagacgaagtag

SEQ ID NO: 14674 - DNA, 30 bp, Artificial Sequence
  Synthetic oligonucleotide
taaacgccaagatcgccaccagcgtagtag

SEQ ID NO: 14675 - DNA, 30 bp, Artificial Sequence
  Synthetic oligonucleotide
cctacgaagtcacaagtagcgtcaacgtag

SEQ ID NO: 14676 - DNA, 30 bp, Artificial Sequence
  Synthetic oligonucleotide
cacgtcggcgaagaaaaatgaaatgcgtag

SEQ ID NO: 14677 - DNA, 30 bp, Artificial Sequence
  Synthetic oligonucleotide
tggacgcggggatctgactataaatcgtag

SEQ ID NO: 14678 - DNA, 30 bp, Artificial Sequence
  Synthetic oligonucleotide
cgctggaaggggaagaacttcacaaattag

SEQ ID NO: 14679 - DNA, 30 bp, Artificial Sequence
  Synthetic oligonucleotide
gtggcgatcgaacggggaatcgaacattag

SEQ ID NO: 14680 - DNA, 30 bp, Artificial Sequence
  Synthetic oligonucleotide
ggaagcgtggctgaaacaaacaccaaaacg

SEQ ID NO: 14681 - DNA, 30 bp, Artificial Sequence
  Synthetic oligonucleotide
taacagctatgaaagaggacgtcgcaaacg

SEQ ID NO: 14682 - DNA, 30 bp, Artificial Sequence
  Synthetic oligonucleotide
ggaccgcgataagattcggaggcataaacg

SEQ ID NO: 14683 - DNA, 30 bp, Artificial Sequence
  Synthetic oligonucleotide
agataatagccataaccggtcggaataacg

SEQ ID NO: 14684 - DNA, 30 bp, Artificial Sequence
  Synthetic oligonucleotide
aaggcctaccaggaacagtgaatgctaacg

SEQ ID NO: 14685 - DNA, 30 bp, Artificial Sequence
  Synthetic oligonucleotide
agagtcgacatcgatattgacaaagtaacg

SEQ ID NO: 14686 - DNA, 30 bp, Artificial Sequence
  Synthetic oligonucleotide
ctagatcaccaggaaagcaaaatcaagacg

SEQ ID NO: 14687 - DNA, 30 bp, Artificial Sequence
  Synthetic oligonucleotide
agggaaacgactagtggagcagtcgagacg

SEQ ID NO: 14688 - DNA, 30 bp, Artificial Sequence
  Synthetic oligonucleotide
tcgaagggatcagggagccgactcgctacg

SEQ ID NO: 14689 - DNA, 30 bp, Artificial Sequence
  Synthetic oligonucleotide
gaggtgaaactagaaagaagggccctgccg

SEQ ID NO: 14690 - DNA, 30 bp, Artificial Sequence
  Synthetic oligonucleotide
cgtcgacgaactaaagccgagcgccctccg

SEQ ID NO: 14691 - DNA, 30 bp, Artificial Sequence
  Synthetic oligonucleotide
ccaatcaccgaccgcatacaaaaagcagcg

SEQ ID NO: 14692 - DNA, 30 bp, Artificial Sequence
  Synthetic oligonucleotide
tgtaggccagtacaaggtaaaacgtgagcg

SEQ ID NO: 14693 - DNA, 30 bp, Artificial Sequence
  Synthetic oligonucleotide
ggagcgtaaaagttggtcacagtagtagcg

SEQ ID NO: 14694 - DNA, 30 bp, Artificial Sequence
  Synthetic oligonucleotide
taacgagttacgtaacaaggagtatccgcg

SEQ ID NO: 14695 - DNA, 30 bp, Artificial Sequence
  Synthetic oligonucleotide
tcggcgacaactcaaataggtacgggtgcg

SEQ ID NO: 14696 - DNA, 30 bp, Artificial Sequence
  Synthetic oligonucleotide
ggcgaaataaaataagcgcggtcgaaatcg

SEQ ID NO: 14697 - DNA, 30 bp, Artificial Sequence
  Synthetic oligonucleotide
cccgaggaaaatgctcaagagtggcaatcg

SEQ ID NO: 14698 - DNA, 30 bp, Artificial Sequence
  Synthetic oligonucleotide
cgtcaaacagatctctagaagcgtcaatcg

SEQ ID NO: 14699 - DNA, 30 bp, Artificial Sequence
  Synthetic oligonucleotide
tgacagaggaaggctaaggggtatagatcg

SEQ ID NO: 14700 - DNA, 30 bp, Artificial Sequence
  Synthetic oligonucleotide
cacgagcgaataagcttcaacggagtatcg

SEQ ID NO: 14701 - DNA, 30 bp, Artificial Sequence
  Synthetic oligonucleotide
aacgcgaaatggacagctacaactagctcg

SEQ ID NO: 14702 - DNA, 30 bp, Artificial Sequence
  Synthetic oligonucleotide
gctaaagctaaggatgacacaaacaagtcg

SEQ ID NO: 14703 - DNA, 30 bp, Artificial Sequence
  Synthetic oligonucleotide
atacacatcagtagcaccagggtggagtcg

SEQ ID NO: 14704 - DNA, 30 bp, Artificial Sequence
  Synthetic oligonucleotide
gcaatgcgccagacaaaggattgaacgtcg

SEQ ID NO: 14705 - DNA, 30 bp, Artificial Sequence
  Synthetic oligonucleotide
acatagaacacattggggaacgcgaggtcg

SEQ ID NO: 14706 - DNA, 30 bp, Artificial Sequence
  Synthetic oligonucleotide
cagggtaaggtaggagggcgaatagggtcg

SEQ ID NO: 14707 - DNA, 30 bp, Artificial Sequence
  Synthetic oligonucleotide
agacaggcccaagccaaagagtaaatgtcg

SEQ ID NO: 14708 - DNA, 30 bp, Artificial Sequence
  Synthetic oligonucleotide
cacaatactgcggaggtggagagcaaaagg

SEQ ID NO: 14709 - DNA, 30 bp, Artificial Sequence
  Synthetic oligonucleotide
ggtgtcgaaggatgcaaacgcgtgagaagg

SEQ ID NO: 14710 - DNA, 30 bp, Artificial Sequence
  Synthetic oligonucleotide
acgttatacgaagctcgagctcgcaacagg

SEQ ID NO: 14711 - DNA, 30 bp, Artificial Sequence
  Synthetic oligonucleotide
ctgagacgatatatctttggaaagtagagg

SEQ ID NO: 14712 - DNA, 30 bp, Artificial Sequence
  Synthetic oligonucleotide
cgaacagaagaagggcaggtctaaaagcgg

SEQ ID NO: 14713 - DNA, 30 bp, Artificial Sequence
  Synthetic oligonucleotide
cagggacgtaccggatgtaatcagagaggg

SEQ ID NO: 14714 - DNA, 30 bp, Artificial Sequence
  Synthetic oligonucleotide
atggtggtttccaggatctgagaacgaggg

SEQ ID NO: 14715 - DNA, 30 bp, Artificial Sequence
  Synthetic oligonucleotide
gtcaaaacatgtaagtagtcgaagaacggg

SEQ ID NO: 14716 - DNA, 30 bp, Artificial Sequence
  Synthetic oligonucleotide
cggctaaggactaaggaatagaaagacggg

SEQ ID NO: 14717 - DNA, 30 bp, Artificial Sequence
  Synthetic oligonucleotide
cacggcaacaatacaagcgaagcaaatggg

SEQ ID NO: 14718 - DNA, 30 bp, Artificial Sequence
  Synthetic oligonucleotide
cgctaacaaggacatagccgaggacatggg

SEQ ID NO: 14719 - DNA, 30 bp, Artificial Sequence
  Synthetic oligonucleotide
caagcaacgactccaagaatattacatggg

SEQ ID NO: 14720 - DNA, 30 bp, Artificial Sequence
  Synthetic oligonucleotide
aacggtcgagcataagtagagctgacatgg

SEQ ID NO: 14721 - DNA, 30 bp, Artificial Sequence
  Synthetic oligonucleotide
ccgaagccgagatccccaccgtcgtcatgg

SEQ ID NO: 14722 - DNA, 30 bp, Artificial Sequence
  Synthetic oligonucleotide
caggtggagtccgagctgcaacaacagtgg

SEQ ID NO: 14723 - DNA, 30 bp, Artificial Sequence
  Synthetic oligonucleotide
cgaacgggtgagagttattgccaatattgg

SEQ ID NO: 14724 - DNA, 30 bp, Artificial Sequence
  Synthetic oligonucleotide
acgagcgtggaaacgtgaaataaatgttgg

SEQ ID NO: 14725 - DNA, 30 bp, Artificial Sequence
  Synthetic oligonucleotide
agaaacggacagtcggaaattgggaaaatg

SEQ ID NO: 14726 - DNA, 30 bp, Artificial Sequence
  Synthetic oligonucleotide
caagtatgcgaagccgagtaggtacgaatg

SEQ ID NO: 14727 - DNA, 30 bp, Artificial Sequence
  Synthetic oligonucleotide
cggtcaacaatgccaacaagccgagacatg

SEQ ID NO: 14728 - DNA, 30 bp, Artificial Sequence
  Synthetic oligonucleotide
acgggcaggagaccagcggacgtgctcatg

SEQ ID NO: 14729 - DNA, 30 bp, Artificial Sequence
  Synthetic oligonucleotide
caaaaagggacaccaaggagcaacaagatg

SEQ ID NO: 14730 - DNA, 30 bp, Artificial Sequence
  Synthetic oligonucleotide
tgccgcaatgacattggggaaatgaagatg

SEQ ID NO: 14731 - DNA, 30 bp, Artificial Sequence
  Synthetic oligonucleotide
tcctaacgaaagcgtaagatatgagagatg

SEQ ID NO: 14732 - DNA, 30 bp, Artificial Sequence
  Synthetic oligonucleotide
aatcggctgcccagaaaaataacaacgatg

SEQ ID NO: 14733 - DNA, 30 bp, Artificial Sequence
  Synthetic oligonucleotide
tcgcaacgaggtccagatgtgattacgatg

SEQ ID NO: 14734 - DNA, 30 bp, Artificial Sequence
  Synthetic oligonucleotide
tcacgtcagtgaaacacgtcaaagatgatg

SEQ ID NO: 14735 - DNA, 30 bp, Artificial Sequence
  Synthetic oligonucleotide
gggagcagttatgcgaaaaaagacaaactg

SEQ ID NO: 14736 - DNA, 30 bp, Artificial Sequence
  Synthetic oligonucleotide
gcgtaatcaggaagtatagggagataactg

SEQ ID NO: 14737 - DNA, 30 bp, Artificial Sequence
  Synthetic oligonucleotide
gggaccgagacaggctgagcaaatggactg

SEQ ID NO: 14738 - DNA, 30 bp, Artificial Sequence
  Synthetic oligonucleotide
gacatgagaaagtagatacggcgaggagtg

SEQ ID NO: 14739 - DNA, 30 bp, Artificial Sequence
  Synthetic oligonucleotide
atgatcgcgggtccaaactagaggaaggtg

SEQ ID NO: 14740 - DNA, 30 bp, Artificial Sequence
  Synthetic oligonucleotide
ggagacaagatcagtgcggcaaagcgggtg

SEQ ID NO: 14741 - DNA, 30 bp, Artificial Sequence
  Synthetic oligonucleotide
cgagaaaatttcggaaataggggcactgtg

SEQ ID NO: 14742 - DNA, 30 bp, Artificial Sequence
  Synthetic oligonucleotide
ggatccctgaaaggacaaggggaagctgtg

SEQ ID NO: 14743 - DNA, 30 bp, Artificial Sequence
  Synthetic oligonucleotide
actacggacgcgaaactaaggggaattgtg

SEQ ID NO: 14744 - DNA, 30 bp, Artificial Sequence
  Synthetic oligonucleotide
ggtacgtatgccgacctagctgcgaaattg

SEQ ID NO: 14745 - DNA, 30 bp, Artificial Sequence
  Synthetic oligonucleotide
acggaaccatgcgtagcaaacgtaaatttg

SEQ ID NO: 14746 - DNA, 30 bp, Artificial Sequence
  Synthetic oligonucleotide
caagactgccgagaaaggattacaccaaat

SEQ ID NO: 14747 - DNA, 30 bp, Artificial Sequence
  Synthetic oligonucleotide
gaacaagcgagaaggaaatgcactctaaat

SEQ ID NO: 14748 - DNA, 30 bp, Artificial Sequence
  Synthetic oligonucleotide
atggtaaaggggacaagatgatcgaccaat

SEQ ID NO: 14749 - DNA, 30 bp, Artificial Sequence
  Synthetic oligonucleotide
catgaagagtggtaccgtgtgagagaacat

SEQ ID NO: 14750 - DNA, 30 bp, Artificial Sequence
  Synthetic oligonucleotide
taatgggacaggagggagaatagtgaacat

SEQ ID NO: 14751 - DNA, 30 bp, Artificial Sequence
  Synthetic oligonucleotide
tccaaaagtcaggacacataacaatcacat

SEQ ID NO: 14752 - DNA, 30 bp, Artificial Sequence
  Synthetic oligonucleotide
atggaggccgtcgtgagctaggaagaccat

SEQ ID NO: 14753 - DNA, 30 bp, Artificial Sequence
  Synthetic oligonucleotide
gaactaccaaaaggaaaaaactcaatccat

SEQ ID NO: 14754 - DNA, 30 bp, Artificial Sequence
  Synthetic oligonucleotide
aagagacccccagctaaagaagagcggcat

SEQ ID NO: 14755 - DNA, 30 bp, Artificial Sequence
  Synthetic oligonucleotide
tcgtgggaacaaaactgggaaaatggcgat

SEQ ID NO: 14756 - DNA, 30 bp, Artificial Sequence
  Synthetic oligonucleotide
accagaacagcgtgtgactaacgtgaggat

SEQ ID NO: 14757 - DNA, 30 bp, Artificial Sequence
  Synthetic oligonucleotide
gcgatctgagtaacgagtaaacaagcggat

SEQ ID NO: 14758 - DNA, 30 bp, Artificial Sequence
  Synthetic oligonucleotide
aggcggatgatgaaagtgcgattacgggat

SEQ ID NO: 14759 - DNA, 30 bp, Artificial Sequence
  Synthetic oligonucleotide
aggcatggagaagagagtggaaatttggat

SEQ ID NO: 14760 - DNA, 30 bp, Artificial Sequence
  Synthetic oligonucleotide
agggacggatagagatgaaaccaaagctat

SEQ ID NO: 14761 - DNA, 31 bp, Artificial Sequence
  Synthetic oligonucleotide
cgtaataggactatcacgaaggggcgtgtat

SEQ ID NO: 14762 - DNA, 31 bp, Artificial Sequence
  Synthetic oligonucleotide
cacagacgtatatgtacgaaacaataagact

SEQ ID NO: 14763 - DNA, 30 bp, Artificial Sequence
  Synthetic oligonucleotide
tgagaaacattagaagaatcggcagctact

SEQ ID NO: 14764 - DNA, 31 bp, Artificial Sequence
  Synthetic oligonucleotide
gtgacatggcaggcaccccgacaactaagct

SEQ ID NO: 14765 - DNA, 30 bp, Artificial Sequence
  Synthetic oligonucleotide
gtggcgacatgagcgaaaagcgcgacagct

SEQ ID NO: 14766 - DNA, 30 bp, Artificial Sequence
  Synthetic oligonucleotide
gtcacggaagaagggaacgaacgtgcggct

SEQ ID NO: 14767 - DNA, 30 bp, Artificial Sequence
  Synthetic oligonucleotide
tagacccaacccaggagggcacgtgaatct

SEQ ID NO: 14768 - DNA, 30 bp, Artificial Sequence
  Synthetic oligonucleotide
ggcagggtgatcgcacagattaaatacagt

SEQ ID NO: 14769 - DNA, 30 bp, Artificial Sequence
  Synthetic oligonucleotide
gaacgaatacgagagagattaaaggtcagt

SEQ ID NO: 14770 - DNA, 30 bp, Artificial Sequence
  Synthetic oligonucleotide
tcgaaagataacgagctaagtattaggagt

SEQ ID NO: 14771 - DNA, 30 bp, Artificial Sequence
  Synthetic oligonucleotide
ggcaaaacgtccttgaggggaagactgagt

SEQ ID NO: 14772 - DNA, 30 bp, Artificial Sequence
  Synthetic oligonucleotide
atgcacatctaagtgcgtcgaagagtgagt

SEQ ID NO: 14773 - DNA, 30 bp, Artificial Sequence
  Synthetic oligonucleotide
ggagccgaatgaaaaaagagatcatcacgt

SEQ ID NO: 14774 - DNA, 30 bp, Artificial Sequence
  Synthetic oligonucleotide
cgaacaaacaacttcgcgccgcccaaaggt

SEQ ID NO: 14775 - DNA, 30 bp, Artificial Sequence
  Synthetic oligonucleotide
ccgagaaaggatccgcaagggcgtcgaggt

SEQ ID NO: 14776 - DNA, 30 bp, Artificial Sequence
  Synthetic oligonucleotide
cgaagactcgggaataaggaagcgagcggt

SEQ ID NO: 14777 - DNA, 30 bp, Artificial Sequence
  Synthetic oligonucleotide
cgaatagagtgtaccgtggcggcaaggggt

SEQ ID NO: 14778 - DNA, 30 bp, Artificial Sequence
  Synthetic oligonucleotide
cgaggcacagtatcaaatcacacgatgggt

SEQ ID NO: 14779 - DNA, 30 bp, Artificial Sequence
  Synthetic oligonucleotide
cgaaacaagaacattaaagcaaccgcatgt

SEQ ID NO: 14780 - DNA, 30 bp, Artificial Sequence
  Synthetic oligonucleotide
caggcaaagcgggtttcgaaacggatgtgt

SEQ ID NO: 14781 - DNA, 30 bp, Artificial Sequence
  Synthetic oligonucleotide
aggagcgtaagggcagtagaagcatgttgt

SEQ ID NO: 14782 - DNA, 30 bp, Artificial Sequence
  Synthetic oligonucleotide
ccgaccagaacggtagaaccaaaggcaatt

SEQ ID NO: 14783 - DNA, 30 bp, Artificial Sequence
  Synthetic oligonucleotide
aggactaagtcgaatgtcaagcaccgaatt

SEQ ID NO: 14784 - DNA, 30 bp, Artificial Sequence
  Synthetic oligonucleotide
aggtaccacaaaatagcgaaaggcttgctt

SEQ ID NO: 14785 - DNA, 30 bp, Artificial Sequence
  Synthetic oligonucleotide
tcgaatcacatgagtggcaattgagcagtt

SEQ ID NO: 14786 - DNA, 30 bp, Artificial Sequence
  Synthetic oligonucleotide
acggacgtgggaaagcgaaacagctagttt

SEQ ID NO: 14787 - DNA, 30 bp, Artificial Sequence
  Synthetic oligonucleotide
gggcgtgagccagtagaatcgcaaacaaaa

SEQ ID NO: 14788 - DNA, 30 bp, Artificial Sequence
  Synthetic oligonucleotide
caataaccaacgttcacagaaactggaaaa

SEQ ID NO: 14789 - DNA, 30 bp, Artificial Sequence
  Synthetic oligonucleotide
ggggcgtgaggacagactaagaatgtaaaa

SEQ ID NO: 14790 - DNA, 30 bp, Artificial Sequence
  Synthetic oligonucleotide
cagacggcgagatcctatcgggccaccaaa

SEQ ID NO: 14791 - DNA, 30 bp, Artificial Sequence
  Synthetic oligonucleotide
accttgcaagtggatggggtgaggagcaaa

SEQ ID NO: 14792 - DNA, 30 bp, Artificial Sequence
  Synthetic oligonucleotide
gacgtatatgaaaaatgtgaaagtggcaaa

SEQ ID NO: 14793 - DNA, 30 bp, Artificial Sequence
  Synthetic oligonucleotide
agggcgctagagatggaacgtcaccagaaa

SEQ ID NO: 14794 - DNA, 30 bp, Artificial Sequence
  Synthetic oligonucleotide
tgcgaagtggtaagaggaggcaagcagaaa

SEQ ID NO: 14795 - DNA, 30 bp, Artificial Sequence
  Synthetic oligonucleotide
cggaaaagcacctgcgggaaacggccgaaa

SEQ ID NO: 14796 - DNA, 30 bp, Artificial Sequence
  Synthetic oligonucleotide
cagggatcactgagacacgattaagcgaaa

SEQ ID NO: 14797 - DNA, 30 bp, Artificial Sequence
  Synthetic oligonucleotide
tctcgagggccgacaagatggagatggaaa

SEQ ID NO: 14798 - DNA, 30 bp, Artificial Sequence
  Synthetic oligonucleotide
cacgtgaaagccagccgacggccaatgaaa

SEQ ID NO: 14799 - DNA, 30 bp, Artificial Sequence
  Synthetic oligonucleotide
acgtgccagagaagactaacatattctaaa

SEQ ID NO: 14800 - DNA, 30 bp, Artificial Sequence
  Synthetic oligonucleotide
tcaaaaacggaatgaaggatcgcatgtaaa

SEQ ID NO: 14801 - DNA, 30 bp, Artificial Sequence
  Synthetic oligonucleotide
ggacgtgcggaagaccgggtgcctcaacaa

SEQ ID NO: 14802 - DNA, 30 bp, Artificial Sequence
  Synthetic oligonucleotide
caataaggtgcgcgtaataccacatgacaa

SEQ ID NO: 14803 - DNA, 30 bp, Artificial Sequence
  Synthetic oligonucleotide
aagaggactggctaactggaaaacatacaa

SEQ ID NO: 14804 - DNA, 30 bp, Artificial Sequence
  Synthetic oligonucleotide
cgataagatctgatgtgcaatatcgcccaa

SEQ ID NO: 14805 - DNA, 30 bp, Artificial Sequence
  Synthetic oligonucleotide
agtgaagggctaccgtagtccggagagcaa

SEQ ID NO: 14806 - DNA, 30 bp, Artificial Sequence
  Synthetic oligonucleotide
acggttgcgtcaagtagtccatcctagcaa

SEQ ID NO: 14807 - DNA, 30 bp, Artificial Sequence
  Synthetic oligonucleotide
aggtatcaggaaacacttaggagagtgcaa

SEQ ID NO: 14808 - DNA, 30 bp, Artificial Sequence
  Synthetic oligonucleotide
aggagggatggtaaatcgtgagccggtcaa

SEQ ID NO: 14809 - DNA, 30 bp, Artificial Sequence
  Synthetic oligonucleotide
tgaaagtggaaatcccggtaagaaacagaa

SEQ ID NO: 14810 - DNA, 30 bp, Artificial Sequence
  Synthetic oligonucleotide
ggcccagggagcacgtcaacaaggtcagaa

SEQ ID NO: 14811 - DNA, 31 bp, Artificial Sequence
  Synthetic oligonucleotide
aaggtctaagtgggtcgaaacgacttcagaa

SEQ ID NO: 14812 - DNA, 29 bp, Artificial Sequence
  Synthetic oligonucleotide
cgtcgagccaaccgaatacaagggtagaa

SEQ ID NO: 14813 - DNA, 30 bp, Artificial Sequence
  Synthetic oligonucleotide
aggaccgctcactcaaaaccatctgccgaa

SEQ ID NO: 14814 - DNA, 30 bp, Artificial Sequence
  Synthetic oligonucleotide
aacagacaaagcgacagagagagggcggaa

SEQ ID NO: 14815 - DNA, 30 bp, Artificial Sequence
  Synthetic oligonucleotide
gcagagggtgccatcaggtccgagggggaa

SEQ ID NO: 14816 - DNA, 30 bp, Artificial Sequence
  Synthetic oligonucleotide
caataccgaatgagctcactgtcgagtgaa

SEQ ID NO: 14817 - DNA, 30 bp, Artificial Sequence
  Synthetic oligonucleotide
caatcacaggtataggaaaatgagcgtgaa

SEQ ID NO: 14818 - DNA, 30 bp, Artificial Sequence
  Synthetic oligonucleotide
tacgggggtcaggagaaataaagcattgaa

SEQ ID NO: 14819 - DNA, 30 bp, Artificial Sequence
  Synthetic oligonucleotide
cgaactgatggccagcgtgaccgtagataa

SEQ ID NO: 14820 - DNA, 30 bp, Artificial Sequence
  Synthetic oligonucleotide
tggaagccgcgaggcaaaaccagccgataa

SEQ ID NO: 14821 - DNA, 30 bp, Artificial Sequence
  Synthetic oligonucleotide
cgttcgctagagcaaaataaacgctgataa

SEQ ID NO: 14822 - DNA, 30 bp, Artificial Sequence
  Synthetic oligonucleotide
aggcgaaatcctttcatgtcaccgatataa

SEQ ID NO: 14823 - DNA, 30 bp, Artificial Sequence
  Synthetic oligonucleotide
ccgaacaagcaacaggaagacccatactaa

SEQ ID NO: 14824 - DNA, 30 bp, Artificial Sequence
  Synthetic oligonucleotide
acgaatcgatgtgtgtaacacttgcagtaa

SEQ ID NO: 14825 - DNA, 30 bp, Artificial Sequence
  Synthetic oligonucleotide
taacaagaaataggaataaaagtgacttaa

SEQ ID NO: 14826 - DNA, 30 bp, Artificial Sequence
  Synthetic oligonucleotide
cggacagcctcgaaatccaacccgcaaaca

SEQ ID NO: 14827 - DNA, 30 bp, Artificial Sequence
  Synthetic oligonucleotide
cgatccggaataaacgaacagggcgaaaca

SEQ ID NO: 14828 - DNA, 30 bp, Artificial Sequence
  Synthetic oligonucleotide
tcgagctgacacctaaaaaagtcggcaaca

SEQ ID NO: 14829 - DNA, 30 bp, Artificial Sequence
  Synthetic oligonucleotide
ggagtcgaagtacggggagcgcgaataaca

SEQ ID NO: 14830 - DNA, 30 bp, Artificial Sequence
  Synthetic oligonucleotide
ggaggcagtccagaggaattacgtgacaca

SEQ ID NO: 14831 - DNA, 30 bp, Artificial Sequence
  Synthetic oligonucleotide
ccataacgacgaagtgccatactaagcaca

SEQ ID NO: 14832 - DNA, 30 bp, Artificial Sequence
  Synthetic oligonucleotide
attcgcaagagtgggaaggggccaatcaca

SEQ ID NO: 14833 - DNA, 30 bp, Artificial Sequence
  Synthetic oligonucleotide
tgaacaatgaaagtggcgaagactgtcaca

SEQ ID NO: 14834 - DNA, 30 bp, Artificial Sequence
  Synthetic oligonucleotide
gagaagggtcatcgacggggacaagcgaca

SEQ ID NO: 14835 - DNA, 30 bp, Artificial Sequence
  Synthetic oligonucleotide
gcgaggctgaaaagagtcccatgtatgaca

SEQ ID NO: 14836 - DNA, 30 bp, Artificial Sequence
  Synthetic oligonucleotide
cagaaacgagaaacgtcaagatgatgtaca

SEQ ID NO: 14837 - DNA, 30 bp, Artificial Sequence
  Synthetic oligonucleotide
gaagaaacggcatacagagcactaaaacca

SEQ ID NO: 14838 - DNA, 30 bp, Artificial Sequence
  Synthetic oligonucleotide
acggcgggaggtaagtgaatattgaaccca

SEQ ID NO: 14839 - DNA, 30 bp, Artificial Sequence
  Synthetic oligonucleotide
agagactaacaagcagctgataggaagcca

SEQ ID NO: 14840 - DNA, 30 bp, Artificial Sequence
  Synthetic oligonucleotide
cccataagcaggaaaaataaacttgagcca

SEQ ID NO: 14841 - DNA, 30 bp, Artificial Sequence
  Synthetic oligonucleotide
gaggacaaatgcgatctacgaatacggcca

SEQ ID NO: 14842 - DNA, 30 bp, Artificial Sequence
  Synthetic oligonucleotide
gcggaaatcgaggcatcgaccagttaagca

SEQ ID NO: 14843 - DNA, 30 bp, Artificial Sequence
  Synthetic oligonucleotide
ggacagtagaactgaagagagttttgcgca

SEQ ID NO: 14844 - DNA, 30 bp, Artificial Sequence
  Synthetic oligonucleotide
ccggaaggtagtctaaaaccgtgagtcgca

SEQ ID NO: 14845 - DNA, 30 bp, Artificial Sequence
  Synthetic oligonucleotide
caggggtgtggggaatcgttaacacaggca

SEQ ID NO: 14846 - DNA, 30 bp, Artificial Sequence
  Synthetic oligonucleotide
cgatagatacgaatggatatacagtaggca

SEQ ID NO: 14847 - DNA, 30 bp, Artificial Sequence
  Synthetic oligonucleotide
aagcatcgaacgtgagaacagagtccggca

SEQ ID NO: 14848 - DNA, 30 bp, Artificial Sequence
  Synthetic oligonucleotide
acgttatgcagtgtagaggatagcagggca

SEQ ID NO: 14849 - DNA, 30 bp, Artificial Sequence
  Synthetic oligonucleotide
gtggcgaagcagggaaaattaatacgtgca

SEQ ID NO: 14850 - DNA, 30 bp, Artificial Sequence
  Synthetic oligonucleotide
aaaggatgcggtaaggcgatgatccgtgca

SEQ ID NO: 14851 - DNA, 30 bp, Artificial Sequence
  Synthetic oligonucleotide
gactaaggggcggggaaaatcaactcatca

SEQ ID NO: 14852 - DNA, 30 bp, Artificial Sequence
  Synthetic oligonucleotide
gggaaacaacacattgaccataaggcctca

SEQ ID NO: 14853 - DNA, 30 bp, Artificial Sequence
  Synthetic oligonucleotide
gtgtgtggctaggaaacgaagataacgtca

SEQ ID NO: 14854 - DNA, 30 bp, Artificial Sequence
  Synthetic oligonucleotide
ccgacagtaaaaagggtaatcgatgcttca

SEQ ID NO: 14855 - DNA, 30 bp, Artificial Sequence
  Synthetic oligonucleotide
gggagggcacaagtaatgtcttacaaaaga

SEQ ID NO: 14856 - DNA, 30 bp, Artificial Sequence
  Synthetic oligonucleotide
gagggcaacgaaatagcgctgggcaaaaga

SEQ ID NO: 14857 - DNA, 30 bp, Artificial Sequence
  Synthetic oligonucleotide
cgataccgtatgagcgtaccctaccaaaga

SEQ ID NO: 14858 - DNA, 30 bp, Artificial Sequence
  Synthetic oligonucleotide
tagtaaagggagtgtcagagcaaagaaaga

SEQ ID NO: 14859 - DNA, 30 bp, Artificial Sequence
  Synthetic oligonucleotide
gcgaggtcaagcccagtaacggttccaaga

SEQ ID NO: 14860 - DNA, 30 bp, Artificial Sequence
  Synthetic oligonucleotide
gcgtagacaaaatgatatacactatcaaga

SEQ ID NO: 14861 - DNA, 30 bp, Artificial Sequence
  Synthetic oligonucleotide
actaacagagtcggggaagtattgtcaaga

SEQ ID NO: 14862 - DNA, 30 bp, Artificial Sequence
  Synthetic oligonucleotide
tcacgtagaacgaagacggatgcaagaaga

SEQ ID NO: 14863 - DNA, 30 bp, Artificial Sequence
  Synthetic oligonucleotide
atcacgaaagcgggcgatctggccggaaga

SEQ ID NO: 14864 - DNA, 30 bp, Artificial Sequence
  Synthetic oligonucleotide
tgcggtgaaacaagttcgagcccattaaga

SEQ ID NO: 14865 - DNA, 30 bp, Artificial Sequence
  Synthetic oligonucleotide
accgaggtgagtaatgagacctataacaga

SEQ ID NO: 14866 - DNA, 30 bp, Artificial Sequence
  Synthetic oligonucleotide
acggggctaaaagttcaaagaatccgcaga

SEQ ID NO: 14867 - DNA, 30 bp, Artificial Sequence
  Synthetic oligonucleotide
gatcacgaggcaaaaggatagatactcaga

SEQ ID NO: 14868 - DNA, 30 bp, Artificial Sequence
  Synthetic oligonucleotide
gctttgaaggagcggcaaatacggcagaga

SEQ ID NO: 14869 - DNA, 30 bp, Artificial Sequence
  Synthetic oligonucleotide
aacgaataaacagtatatcatcatacgaga

SEQ ID NO: 14870 - DNA, 30 bp, Artificial Sequence
  Synthetic oligonucleotide
caagggaatccacccgaggatacgccgaga

SEQ ID NO: 14871 - DNA, 30 bp, Artificial Sequence
  Synthetic oligonucleotide
cccacggactgaacatagggattagcgaga

SEQ ID NO: 14872 - DNA, 30 bp, Artificial Sequence
  Synthetic oligonucleotide
taatgcgattgggcacaagacaagcggaga

SEQ ID NO: 14873 - DNA, 30 bp, Artificial Sequence
  Synthetic oligonucleotide
gtgatggtaagcgagtcggacggcgggaga

SEQ ID NO: 14874 - DNA, 30 bp, Artificial Sequence
  Synthetic oligonucleotide
cacgattaacactcggactgcccaactaga

SEQ ID NO: 14875 - DNA, 30 bp, Artificial Sequence
  Synthetic oligonucleotide
cattagcaatgtcggaaggtcacagaacga

SEQ ID NO: 14876 - DNA, 30 bp, Artificial Sequence
  Synthetic oligonucleotide
ggctttagtacgagagtaggcggcgaacga

SEQ ID NO: 14877 - DNA, 30 bp, Artificial Sequence
  Synthetic oligonucleotide
tggatacgggcagtcacagagtggagacga

SEQ ID NO: 14878 - DNA, 30 bp, Artificial Sequence
  Synthetic oligonucleotide
aggaataacaatcgagcaaacggtgaccga

SEQ ID NO: 14879 - DNA, 30 bp, Artificial Sequence
  Synthetic oligonucleotide
agacgatgcgcacagatgttggcagcccga

SEQ ID NO: 14880 - DNA, 30 bp, Artificial Sequence
  Synthetic oligonucleotide
atcagagttgaacctaagaaactacagcga

SEQ ID NO: 14881 - DNA, 30 bp, Artificial Sequence
  Synthetic oligonucleotide
ggcagaagtattaattaaagaaatgtgcga

SEQ ID NO: 14882 - DNA, 30 bp, Artificial Sequence
  Synthetic oligonucleotide
tggggacgctggtggtgagaagtagatcga

SEQ ID NO: 14883 - DNA, 30 bp, Artificial Sequence
  Synthetic oligonucleotide
ggtccaggggaggaaacgatgaacagtcga

SEQ ID NO: 14884 - DNA, 30 bp, Artificial Sequence
  Synthetic oligonucleotide
aggaagtgaccccagtaagaaagtacagga

SEQ ID NO: 14885 - DNA, 30 bp, Artificial Sequence
  Synthetic oligonucleotide
gaagagtacataaggcattactaacgagga

SEQ ID NO: 14886 - DNA, 30 bp, Artificial Sequence
  Synthetic oligonucleotide
tgaaggtggacgtaaggaaggatatacgga

SEQ ID NO: 14887 - DNA, 30 bp, Artificial Sequence
  Synthetic oligonucleotide
agcgaaagacggcgccgagaggtggtcgga

SEQ ID NO: 14888 - DNA, 30 bp, Artificial Sequence
  Synthetic oligonucleotide
cgaccccaaaggagtgtaagggaaatggga

SEQ ID NO: 14889 - DNA, 30 bp, Artificial Sequence
  Synthetic oligonucleotide
ggcaggatattcggcaaaagtgaggtatga

SEQ ID NO: 14890 - DNA, 31 bp, Artificial Sequence
  Synthetic oligonucleotide
aggagcgagactgggtcgccggaggaactga

SEQ ID NO: 14891 - DNA, 30 bp, Artificial Sequence
  Synthetic oligonucleotide
agggaggtgaggccgtgatgtcctaggtga

SEQ ID NO: 14892 - DNA, 30 bp, Artificial Sequence
  Synthetic oligonucleotide
aacggggtgaagggaagaggttgactcata

SEQ ID NO: 14893 - DNA, 30 bp, Artificial Sequence
  Synthetic oligonucleotide
ccgtagagccgaagcgcacagtccaagata

SEQ ID NO: 14894 - DNA, 30 bp, Artificial Sequence
  Synthetic oligonucleotide
ggccacgaggacagatagaatgtagggata

SEQ ID NO: 14895 - DNA, 30 bp, Artificial Sequence
  Synthetic oligonucleotide
atacgaatggagtcagtaggaaagaaacta

SEQ ID NO: 14896 - DNA, 30 bp, Artificial Sequence
  Synthetic oligonucleotide
ccgaaaaacacaacattcaatatgacacta

SEQ ID NO: 14897 - DNA, 30 bp, Artificial Sequence
  Synthetic oligonucleotide
tgggacaaaataggtcgcgaaaagagtcta

SEQ ID NO: 14898 - DNA, 30 bp, Artificial Sequence
  Synthetic oligonucleotide
acagctcaacaatcccctacgaaatgagta

SEQ ID NO: 14899 - DNA, 30 bp, Artificial Sequence
  Synthetic oligonucleotide
cgactggtggaacaggcagactgctgagta

SEQ ID NO: 14900 - DNA, 30 bp, Artificial Sequence
  Synthetic oligonucleotide
agacacagaagtgaccggtctagcaacgta

SEQ ID NO: 14901 - DNA, 30 bp, Artificial Sequence
  Synthetic oligonucleotide
accgaggctgggtgcgtgagcctgcgcgta

SEQ ID NO: 14902 - DNA, 30 bp, Artificial Sequence
  Synthetic oligonucleotide
cgtggccccgtacaacaacaggatcgtgta

SEQ ID NO: 14903 - DNA, 30 bp, Artificial Sequence
  Synthetic oligonucleotide
agggacggttcaagttgagatccgatatta

SEQ ID NO: 14904 - DNA, 30 bp, Artificial Sequence
  Synthetic oligonucleotide
cacaggctgctagaaaacaaagatcgctta

SEQ ID NO: 14905 - DNA, 30 bp, Artificial Sequence
  Synthetic oligonucleotide
ggggggcattaacaaaacataagcggcaac

SEQ ID NO: 14906 - DNA, 30 bp, Artificial Sequence
  Synthetic oligonucleotide
taagggatggggtcaccaagaaaactcaac

SEQ ID NO: 14907 - DNA, 30 bp, Artificial Sequence
  Synthetic oligonucleotide
tcttgaaaaaaacgcgatccaaagccgaac

SEQ ID NO: 14908 - DNA, 30 bp, Artificial Sequence
  Synthetic oligonucleotide
ccacatacaccgagaaacaaacccactaac

SEQ ID NO: 14909 - DNA, 30 bp, Artificial Sequence
  Synthetic oligonucleotide
cacgaaaccgtaggacaacgaaacgttaac

SEQ ID NO: 14910 - DNA, 30 bp, Artificial Sequence
  Synthetic oligonucleotide
agggggggtgaggccgaccatctgtgcgac

SEQ ID NO: 14911 - DNA, 30 bp, Artificial Sequence
  Synthetic oligonucleotide
cacccgaagactgaagagaggaaggctgac

SEQ ID NO: 14912 - DNA, 30 bp, Artificial Sequence
  Synthetic oligonucleotide
ggggagaaaccaaagattactggaagtgac

SEQ ID NO: 14913 - DNA, 30 bp, Artificial Sequence
  Synthetic oligonucleotide
aggggagatcatcaattacggaccagatac

SEQ ID NO: 14914 - DNA, 30 bp, Artificial Sequence
  Synthetic oligonucleotide
gcacagaggctaagggaagtcgaccgaacc

SEQ ID NO: 14915 - DNA, 30 bp, Artificial Sequence
  Synthetic oligonucleotide
atgcaagggcggggtgaaacaataaacacc

SEQ ID NO: 14916 - DNA, 30 bp, Artificial Sequence
  Synthetic oligonucleotide
caaggacagaacgatggtaaaagacacacc

SEQ ID NO: 14917 - DNA, 30 bp, Artificial Sequence
  Synthetic oligonucleotide
atcggcgggaaaaagatcgaatgccagacc

SEQ ID NO: 14918 - DNA, 30 bp, Artificial Sequence
  Synthetic oligonucleotide
gcggagaatgcgtacacccctgagtgaccc

SEQ ID NO: 14919 - DNA, 30 bp, Artificial Sequence
  Synthetic oligonucleotide
aacgatcaacacggaagaacaagatatccc

SEQ ID NO: 14920 - DNA, 31 bp, Artificial Sequence
  Synthetic oligonucleotide
agggacaaaatcagtgttaccacagggcgcc

SEQ ID NO: 14921 - DNA, 30 bp, Artificial Sequence
  Synthetic oligonucleotide
ggcaagaggacacgtaatacatctaatgcc

SEQ ID NO: 14922 - DNA, 30 bp, Artificial Sequence
  Synthetic oligonucleotide
acggtacatacgggggaacaactcgatgcc

SEQ ID NO: 14923 - DNA, 30 bp, Artificial Sequence
  Synthetic oligonucleotide
cagagaggaaacccgaatcacgtgcaatcc

SEQ ID NO: 14924 - DNA, 30 bp, Artificial Sequence
  Synthetic oligonucleotide
cgtaggattacagcgagtaaccgaaacagc

SEQ ID NO: 14925 - DNA, 30 bp, Artificial Sequence
  Synthetic oligonucleotide
ttaacacatcacgatcacacgtatacgagc

SEQ ID NO: 14926 - DNA, 30 bp, Artificial Sequence
  Synthetic oligonucleotide
gaaggatacaggaagaggtgtgagacacgc

SEQ ID NO: 14927 - DNA, 30 bp, Artificial Sequence
  Synthetic oligonucleotide
tcctgacgagaatttaaggaatcagagggc

SEQ ID NO: 14928 - DNA, 30 bp, Artificial Sequence
  Synthetic oligonucleotide
aggaagcgacaaggtcgtccagtcaactgc

SEQ ID NO: 14929 - DNA, 30 bp, Artificial Sequence
  Synthetic oligonucleotide
gaacgtaaatgcgaaacggcccccaagtgc

SEQ ID NO: 14930 - DNA, 30 bp, Artificial Sequence
  Synthetic oligonucleotide
tcgctctgaacaaaaatcaaacataagtgc

SEQ ID NO: 14931 - DNA, 30 bp, Artificial Sequence
  Synthetic oligonucleotide
acaaggaggtcatggaacgagtacgcgtgc

SEQ ID NO: 14932 - DNA, 30 bp, Artificial Sequence
  Synthetic oligonucleotide
cctgcagagcgagggagtgagaacttgtgc

SEQ ID NO: 14933 - DNA, 30 bp, Artificial Sequence
  Synthetic oligonucleotide
aaggacacaaaaccattgcacgtcaacatc

SEQ ID NO: 14934 - DNA, 30 bp, Artificial Sequence
  Synthetic oligonucleotide
ggagaccacacacgtcatatccaagcgatc

SEQ ID NO: 14935 - DNA, 30 bp, Artificial Sequence
  Synthetic oligonucleotide
catgaccacaaacatagaccaacctaactc

SEQ ID NO: 14936 - DNA, 30 bp, Artificial Sequence
  Synthetic oligonucleotide
gtggaaaaatgggacacacacccaacactc

SEQ ID NO: 14937 - DNA, 30 bp, Artificial Sequence
  Synthetic oligonucleotide
ccaggaccaaccacgagggaacgacgactc

SEQ ID NO: 14938 - DNA, 30 bp, Artificial Sequence
  Synthetic oligonucleotide
gtaggcacaagcaaagaattgagcaaagtc

SEQ ID NO: 14939 - DNA, 30 bp, Artificial Sequence
  Synthetic oligonucleotide
tcgggatcatagccggtatagaagggagtc

SEQ ID NO: 14940 - DNA, 30 bp, Artificial Sequence
  Synthetic oligonucleotide
acgggggctaggacttcgttaactcgcgtc

SEQ ID NO: 14941 - DNA, 30 bp, Artificial Sequence
  Synthetic oligonucleotide
tgagactggcccccagaagtgaacgaggtc

SEQ ID NO: 14942 - DNA, 30 bp, Artificial Sequence
  Synthetic oligonucleotide
tccgaacggaggaatagcgaatctcatgtc

SEQ ID NO: 14943 - DNA, 31 bp, Artificial Sequence
  Synthetic oligonucleotide
taacgaaaggaggattataaataagactgtc

SEQ ID NO: 14944 - DNA, 30 bp, Artificial Sequence
  Synthetic oligonucleotide
cggaccggcgcgaaaacgagctgaagattc

SEQ ID NO: 14945 - DNA, 30 bp, Artificial Sequence
  Synthetic oligonucleotide
agcaggttgagaaataggtacagcagaaag

SEQ ID NO: 14946 - DNA, 30 bp, Artificial Sequence
  Synthetic oligonucleotide
agactacgacggtaatcagtaacggacaag

SEQ ID NO: 14947 - DNA, 30 bp, Artificial Sequence
  Synthetic oligonucleotide
aagaaacttcagacccgagtaaggaccaag

SEQ ID NO: 14948 - DNA, 30 bp, Artificial Sequence
  Synthetic oligonucleotide
gaagaagggtggatacgcgcgtgagccaag

SEQ ID NO: 14949 - DNA, 30 bp, Artificial Sequence
  Synthetic oligonucleotide
actgttagagcccaacacgtaaaaagcaag

SEQ ID NO: 14950 - DNA, 30 bp, Artificial Sequence
  Synthetic oligonucleotide
cggcgaaaagatcaaagaatacactgcaag

SEQ ID NO: 14951 - DNA, 30 bp, Artificial Sequence
  Synthetic oligonucleotide
agtaggatatggaccaagaaggctgagaag

SEQ ID NO: 14952 - DNA, 30 bp, Artificial Sequence
  Synthetic oligonucleotide
ctagactagcgccagcaaatgggaacgaag

SEQ ID NO: 14953 - DNA, 30 bp, Artificial Sequence
  Synthetic oligonucleotide
agaactcagggaagatgggaggctgcgaag

SEQ ID NO: 14954 - DNA, 30 bp, Artificial Sequence
  Synthetic oligonucleotide
cgtatggaagacccaaaatatgctgggaag

SEQ ID NO: 14955 - DNA, 30 bp, Artificial Sequence
  Synthetic oligonucleotide
ctagcataacaaagcaataaatcggctaag

SEQ ID NO: 14956 - DNA, 30 bp, Artificial Sequence
  Synthetic oligonucleotide
ataacagaggagggcggaaccgaggcacag

SEQ ID NO: 14957 - DNA, 30 bp, Artificial Sequence
  Synthetic oligonucleotide
tgagaggtcgggaccgacttaccttcacag

SEQ ID NO: 14958 - DNA, 30 bp, Artificial Sequence
  Synthetic oligonucleotide
caagggaagcaatatgtccggacttaccag

SEQ ID NO: 14959 - DNA, 30 bp, Artificial Sequence
  Synthetic oligonucleotide
ctcgcgaaaaactggcgtaagcgaaatcag

SEQ ID NO: 14960 - DNA, 30 bp, Artificial Sequence
  Synthetic oligonucleotide
aggagggagagaaacgagccgcattctcag

SEQ ID NO: 14961 - DNA, 30 bp, Artificial Sequence
  Synthetic oligonucleotide
tcaaggaatgagatacgtggagcgcgtcag

SEQ ID NO: 14962 - DNA, 30 bp, Artificial Sequence
  Synthetic oligonucleotide
agcatgacattgggaaaccgaggtaaagag

SEQ ID NO: 14963 - DNA, 30 bp, Artificial Sequence
  Synthetic oligonucleotide
gcgacggagggggaatcggaaaacgaagag

SEQ ID NO: 14964 - DNA, 30 bp, Artificial Sequence
  Synthetic oligonucleotide
cgcacgtaggtgagagtcgatggggaagag

SEQ ID NO: 14965 - DNA, 30 bp, Artificial Sequence
  Synthetic oligonucleotide
tcagtgatcaatagcaaactgggaagagag

SEQ ID NO: 14966 - DNA, 30 bp, Artificial Sequence
  Synthetic oligonucleotide
ggacgttagtcgacagtaacacgtcacgag

SEQ ID NO: 14967 - DNA, 30 bp, Artificial Sequence
  Synthetic oligonucleotide
agcgtctccaggcgaataaaagaggacgag

SEQ ID NO: 14968 - DNA, 30 bp, Artificial Sequence
  Synthetic oligonucleotide
gaactaaatcgatccaccacgagggccgag

SEQ ID NO: 14969 - DNA, 31 bp, Artificial Sequence
  Synthetic oligonucleotide
atgagctgcgtgaagtgttaacggggccgag

SEQ ID NO: 14970 - DNA, 30 bp, Artificial Sequence
  Synthetic oligonucleotide
aatcgtgagggttcgtatgtcagatccgag

SEQ ID NO: 14971 - DNA, 30 bp, Artificial Sequence
  Synthetic oligonucleotide
gatgtagacgatggtacgaaaacagtcgag

SEQ ID NO: 14972 - DNA, 30 bp, Artificial Sequence
  Synthetic oligonucleotide
ggaggatgctaagcgaaacatagcgtcgag

SEQ ID NO: 14973 - DNA, 30 bp, Artificial Sequence
  Synthetic oligonucleotide
caacagtaagtatgttgcggtagattcgag

SEQ ID NO: 14974 - DNA, 30 bp, Artificial Sequence
  Synthetic oligonucleotide
cagaggcgatgttgggcggccgtcttcgag

SEQ ID NO: 14975 - DNA, 30 bp, Artificial Sequence
  Synthetic oligonucleotide
ccgatactccgtcacgggagaggctaggag

SEQ ID NO: 14976 - DNA, 31 bp, Artificial Sequence
  Synthetic oligonucleotide
ggctgaacagcaagaatatttgcgagcggag

SEQ ID NO: 14977 - DNA, 30 bp, Artificial Sequence
  Synthetic oligonucleotide
tgacgccgaataaggaggaaaggcgcggag

SEQ ID NO: 14978 - DNA, 30 bp, Artificial Sequence
  Synthetic oligonucleotide
ccgctcagagcgagactgtgataaagggag

SEQ ID NO: 14979 - DNA, 30 bp, Artificial Sequence
  Synthetic oligonucleotide
tgccgaggggctaaactacatctaggggag

SEQ ID NO: 14980 - DNA, 30 bp, Artificial Sequence
  Synthetic oligonucleotide
cactgggaaagaccagaagtaacatgggag

SEQ ID NO: 14981 - DNA, 30 bp, Artificial Sequence
  Synthetic oligonucleotide
agtgaggagaagtcgtacatggggaatgag

SEQ ID NO: 14982 - DNA, 30 bp, Artificial Sequence
  Synthetic oligonucleotide
aggctaacatacgcggagaagttccatgag

SEQ ID NO: 14983 - DNA, 30 bp, Artificial Sequence
  Synthetic oligonucleotide
agatgtggggaacggcgccggagagatgag

SEQ ID NO: 14984 - DNA, 30 bp, Artificial Sequence
  Synthetic oligonucleotide
cggtcgcgggcgaagaggcgagctgatgag

SEQ ID NO: 14985 - DNA, 30 bp, Artificial Sequence
  Synthetic oligonucleotide
tcaggacgagataacgagttcacgagtgag

SEQ ID NO: 14986 - DNA, 30 bp, Artificial Sequence
  Synthetic oligonucleotide
cgtaacgtaagcgaagcgctaaaacgtgag

SEQ ID NO: 14987 - DNA, 30 bp, Artificial Sequence
  Synthetic oligonucleotide
tcgagtgcggacaggacagaggacattgag

SEQ ID NO: 14988 - DNA, 30 bp, Artificial Sequence
  Synthetic oligonucleotide
ggcgtaataaggggcagaaggccgtttgag

SEQ ID NO: 14989 - DNA, 30 bp, Artificial Sequence
  Synthetic oligonucleotide
tccagcgggcgagcgaacaacgtacaatag

SEQ ID NO: 14990 - DNA, 30 bp, Artificial Sequence
  Synthetic oligonucleotide
acgagtaaggctataataacggctcgatag

SEQ ID NO: 14991 - DNA, 30 bp, Artificial Sequence
  Synthetic oligonucleotide
aggaagcacgaacgaggagccccgcgctag

SEQ ID NO: 14992 - DNA, 30 bp, Artificial Sequence
  Synthetic oligonucleotide
tgatcaagaattaatgtatgcaagaagtag

SEQ ID NO: 14993 - DNA, 30 bp, Artificial Sequence
  Synthetic oligonucleotide
tgggaaacagatacgtcgcaagagacttag

SEQ ID NO: 14994 - DNA, 30 bp, Artificial Sequence
  Synthetic oligonucleotide
acggcacgaggacaacaccaggtgtgttag

SEQ ID NO: 14995 - DNA, 30 bp, Artificial Sequence
  Synthetic oligonucleotide
ccatcatctagaagccctcgaacagaaacg

SEQ ID NO: 14996 - DNA, 30 bp, Artificial Sequence
  Synthetic oligonucleotide
acagctaatgcaagccaatgtcgtgaaacg

SEQ ID NO: 14997 - DNA, 30 bp, Artificial Sequence
  Synthetic oligonucleotide
tagcgaaaggacttaggcgggcaataaacg

SEQ ID NO: 14998 - DNA, 30 bp, Artificial Sequence
  Synthetic oligonucleotide
cgcctcgggagctggcagagttcgacaacg

SEQ ID NO: 14999 - DNA, 30 bp, Artificial Sequence
  Synthetic oligonucleotide
gtgcatgggggaagcgagttcagatcaacg

SEQ ID NO: 15000 - DNA, 30 bp, Artificial Sequence
  Synthetic oligonucleotide
aaggatccgtccgaatgcaacagccgaacg

SEQ ID NO: 15001 - DNA, 30 bp, Artificial Sequence
  Synthetic oligonucleotide
ccggagaacgacccaaattcgctgataacg

SEQ ID NO: 15002 - DNA, 30 bp, Artificial Sequence
  Synthetic oligonucleotide
accgaataacgttgggcgggagagttaacg

SEQ ID NO: 15003 - DNA, 30 bp, Artificial Sequence
  Synthetic oligonucleotide
tacgagggcaagagtgataaagcgttaacg

SEQ ID NO: 15004 - DNA, 30 bp, Artificial Sequence
  Synthetic oligonucleotide
cgtgatcggagagaaagtactcatgccacg

SEQ ID NO: 15005 - DNA, 30 bp, Artificial Sequence
  Synthetic oligonucleotide
agaccgaaagcgaattcgggaatagggacg

SEQ ID NO: 15006 - DNA, 30 bp, Artificial Sequence
  Synthetic oligonucleotide
gaccaaagaacacgaatgtcccgtagtacg

SEQ ID NO: 15007 - DNA, 30 bp, Artificial Sequence
  Synthetic oligonucleotide
agaggatgggagactgacatggaccttacg

SEQ ID NO: 15008 - DNA, 30 bp, Artificial Sequence
  Synthetic oligonucleotide
aaggtaaacatcgagaataaagtgcgaccg

SEQ ID NO: 15009 - DNA, 30 bp, Artificial Sequence
  Synthetic oligonucleotide
acaaagacaacgcaaagtgaagattgcccg

SEQ ID NO: 15010 - DNA, 30 bp, Artificial Sequence
  Synthetic oligonucleotide
ccagcgacaggagataaagggaagatgccg

SEQ ID NO: 15011 - DNA, 30 bp, Artificial Sequence
  Synthetic oligonucleotide
ctactaaagagaagaatatcgaatctgccg

SEQ ID NO: 15012 - DNA, 30 bp, Artificial Sequence
  Synthetic oligonucleotide
tgaatggaaggtcctataaacggagtgccg

SEQ ID NO: 15013 - DNA, 30 bp, Artificial Sequence
  Synthetic oligonucleotide
cacgaattaaggcgccgaaaaagaccagcg

SEQ ID NO: 15014 - DNA, 30 bp, Artificial Sequence
  Synthetic oligonucleotide
aggaaggtaaccgttgaagagttcggcgcg

SEQ ID NO: 15015 - DNA, 30 bp, Artificial Sequence
  Synthetic oligonucleotide
gcgggaccatgtaaaatcgatagcagtgcg

SEQ ID NO: 15016 - DNA, 30 bp, Artificial Sequence
  Synthetic oligonucleotide
cgtcaactgatgtgcgacaatactcttgcg

SEQ ID NO: 15017 - DNA, 30 bp, Artificial Sequence
  Synthetic oligonucleotide
atgaagtgaggaagtaaatatcatccatcg

SEQ ID NO: 15018 - DNA, 30 bp, Artificial Sequence
  Synthetic oligonucleotide
acataaataatcactcataagagggcatcg

SEQ ID NO: 15019 - DNA, 30 bp, Artificial Sequence
  Synthetic oligonucleotide
gcctaataagatcaaccagggagaggatcg

SEQ ID NO: 15020 - DNA, 30 bp, Artificial Sequence
  Synthetic oligonucleotide
ggtaacgacgaggtgtaaaatcataactcg

SEQ ID NO: 15021 - DNA, 30 bp, Artificial Sequence
  Synthetic oligonucleotide
caggtctgacaagagaattcaataagctcg

SEQ ID NO: 15022 - DNA, 30 bp, Artificial Sequence
  Synthetic oligonucleotide
gtgtgccgtcgagaaggaatacgggattcg

SEQ ID NO: 15023 - DNA, 30 bp, Artificial Sequence
  Synthetic oligonucleotide
catgcggtacgcaaaacggaggactaaagg

SEQ ID NO: 15024 - DNA, 30 bp, Artificial Sequence
  Synthetic oligonucleotide
tggggagggatgcaacaacgtttatcaagg

SEQ ID NO: 15025 - DNA, 30 bp, Artificial Sequence
  Synthetic oligonucleotide
acgagagttgaactggtgacattaggaagg

SEQ ID NO: 15026 - DNA, 30 bp, Artificial Sequence
  Synthetic oligonucleotide
aacgggaagattgcaaaggggttagtaagg

SEQ ID NO: 15027 - DNA, 30 bp, Artificial Sequence
  Synthetic oligonucleotide
gaggaactgcgtgacaggcacgataccagg

SEQ ID NO: 15028 - DNA, 30 bp, Artificial Sequence
  Synthetic oligonucleotide
tcaatagatgcacataatcgagaagccagg

SEQ ID NO: 15029 - DNA, 30 bp, Artificial Sequence
  Synthetic oligonucleotide
aaagaggagtaacagagagaagtcagcagg

SEQ ID NO: 15030 - DNA, 30 bp, Artificial Sequence
  Synthetic oligonucleotide
ggcaaatcaatgaaaggaattttaatcagg

SEQ ID NO: 15031 - DNA, 30 bp, Artificial Sequence
  Synthetic oligonucleotide
tagggcttgtcaagagaaaggactaagagg

SEQ ID NO: 15032 - DNA, 30 bp, Artificial Sequence
  Synthetic oligonucleotide
tgtcaaccaactcaggagtactggcagagg

SEQ ID NO: 15033 - DNA, 30 bp, Artificial Sequence
  Synthetic oligonucleotide
cacaggaacaaatagaaagggcacctccgg

SEQ ID NO: 15034 - DNA, 30 bp, Artificial Sequence
  Synthetic oligonucleotide
acgggggagatgattgaaatctcaaagcgg

SEQ ID NO: 15035 - DNA, 30 bp, Artificial Sequence
  Synthetic oligonucleotide
cgaaacggcaagagtcatgtcggcccgcgg

SEQ ID NO: 15036 - DNA, 30 bp, Artificial Sequence
  Synthetic oligonucleotide
tgggactggaaaagcgcatagagctcgcgg

SEQ ID NO: 15037 - DNA, 30 bp, Artificial Sequence
  Synthetic oligonucleotide
agataggcaaacgagatctactatcggcgg

SEQ ID NO: 15038 - DNA, 30 bp, Artificial Sequence
  Synthetic oligonucleotide
aaggaggggaactggtacaacgtgagtcgg

SEQ ID NO: 15039 - DNA, 30 bp, Artificial Sequence
  Synthetic oligonucleotide
gcggtgctcaagtgaatgactagaagaggg

SEQ ID NO: 15040 - DNA, 30 bp, Artificial Sequence
  Synthetic oligonucleotide
acgaccaagcgcattacacatgtcaacggg

SEQ ID NO: 15041 - DNA, 30 bp, Artificial Sequence
  Synthetic oligonucleotide
ctgagcgcgaatcggactagatcaatcggg

SEQ ID NO: 15042 - DNA, 30 bp, Artificial Sequence
  Synthetic oligonucleotide
ggcaaatggcgacctgtaacgtatgcgggg

SEQ ID NO: 15043 - DNA, 30 bp, Artificial Sequence
  Synthetic oligonucleotide
gaggtaaaggcgagttgctaaaaagggggg

SEQ ID NO: 15044 - DNA, 30 bp, Artificial Sequence
  Synthetic oligonucleotide
ggagcgaagcataaagagcacatgctgggg

SEQ ID NO: 15045 - DNA, 30 bp, Artificial Sequence
  Synthetic oligonucleotide
acggccacggaacgaaacaagccccgatgg

SEQ ID NO: 15046 - DNA, 30 bp, Artificial Sequence
  Synthetic oligonucleotide
agaaagattgcggactaaaaacaagactgg

SEQ ID NO: 15047 - DNA, 30 bp, Artificial Sequence
  Synthetic oligonucleotide
gcgtcgatagctgcagatttcagagtgtgg

SEQ ID NO: 15048 - DNA, 30 bp, Artificial Sequence
  Synthetic oligonucleotide
gacgcgagaggtcgccttgaatcaaaaatg

SEQ ID NO: 15049 - DNA, 30 bp, Artificial Sequence
  Synthetic oligonucleotide
aggagactacaatttgagaaatagacaatg

SEQ ID NO: 15050 - DNA, 30 bp, Artificial Sequence
  Synthetic oligonucleotide
tacacgcgtagaaaccaaatacataacatg

SEQ ID NO: 15051 - DNA, 30 bp, Artificial Sequence
  Synthetic oligonucleotide
cacaagtcacgagtagtggagaaatacatg

SEQ ID NO: 15052 - DNA, 30 bp, Artificial Sequence
  Synthetic oligonucleotide
aggcgggagggtctatgcgttgtgtccatg

SEQ ID NO: 15053 - DNA, 30 bp, Artificial Sequence
  Synthetic oligonucleotide
ggaggtcctacgcataagacatggcagatg

SEQ ID NO: 15054 - DNA, 30 bp, Artificial Sequence
  Synthetic oligonucleotide
atgccagcgcggatacgatgacctgagatg

SEQ ID NO: 15055 - DNA, 30 bp, Artificial Sequence
  Synthetic oligonucleotide
cgataggcggacgtacgtgaacaaacgatg

SEQ ID NO: 15056 - DNA, 30 bp, Artificial Sequence
  Synthetic oligonucleotide
cgttgtgcaagaatgacctcctcgaaactg

SEQ ID NO: 15057 - DNA, 30 bp, Artificial Sequence
  Synthetic oligonucleotide
cgtctggagagtaatagagcgagctaactg

SEQ ID NO: 15058 - DNA, 30 bp, Artificial Sequence
  Synthetic oligonucleotide
tggggcggggcagtagaacgccatacactg

SEQ ID NO: 15059 - DNA, 30 bp, Artificial Sequence
  Synthetic oligonucleotide
cagagaaggtggttcgagttagtgaaagtg

SEQ ID NO: 15060 - DNA, 30 bp, Artificial Sequence
  Synthetic oligonucleotide
cgcggggtgagcaagaataatcaacaagtg

SEQ ID NO: 15061 - DNA, 30 bp, Artificial Sequence
  Synthetic oligonucleotide
tgctgagagaccatctaacatgagacagtg

SEQ ID NO: 15062 - DNA, 30 bp, Artificial Sequence
  Synthetic oligonucleotide
tacggaaagcccgaatcatgcgatcgagtg

SEQ ID NO: 15063 - DNA, 30 bp, Artificial Sequence
  Synthetic oligonucleotide
tgcgtagcgagtatcgaagtgtagccggtg

SEQ ID NO: 15064 - DNA, 30 bp, Artificial Sequence
  Synthetic oligonucleotide
gacgaatcggatcaaagccaatgcaatgtg

SEQ ID NO: 15065 - DNA, 30 bp, Artificial Sequence
  Synthetic oligonucleotide
acgggagtacggtacacactatccgatgtg

SEQ ID NO: 15066 - DNA, 30 bp, Artificial Sequence
  Synthetic oligonucleotide
cgaagaagcgcgaattagctttgcgtgttg

SEQ ID NO: 15067 - DNA, 30 bp, Artificial Sequence
  Synthetic oligonucleotide
acggaagatcgctggcccgaaaaaggtttg

SEQ ID NO: 15068 - DNA, 30 bp, Artificial Sequence
  Synthetic oligonucleotide
ctacgattaagctaggcgaggaggacaaat

SEQ ID NO: 15069 - DNA, 30 bp, Artificial Sequence
  Synthetic oligonucleotide
ctggaactattactatactgatctctaaat

SEQ ID NO: 15070 - DNA, 30 bp, Artificial Sequence
  Synthetic oligonucleotide
gcatgatcgaactagagccataataacaat

SEQ ID NO: 15071 - DNA, 30 bp, Artificial Sequence
  Synthetic oligonucleotide
ggggagagggagaaggccaattgacacaat

SEQ ID NO: 15072 - DNA, 30 bp, Artificial Sequence
  Synthetic oligonucleotide
acaggcaacgagatgttaaggccaagcaat

SEQ ID NO: 15073 - DNA, 30 bp, Artificial Sequence
  Synthetic oligonucleotide
cgtcaggtataaagtgcggagagaatgaat

SEQ ID NO: 15074 - DNA, 30 bp, Artificial Sequence
  Synthetic oligonucleotide
aggaaaggcagagcggcactcctgatacat

SEQ ID NO: 15075 - DNA, 30 bp, Artificial Sequence
  Synthetic oligonucleotide
cgtacatacttaaatcgtcaacggcaagat

SEQ ID NO: 15076 - DNA, 30 bp, Artificial Sequence
  Synthetic oligonucleotide
acgtagagcataaatgagcaagacagcgat

SEQ ID NO: 15077 - DNA, 30 bp, Artificial Sequence
  Synthetic oligonucleotide
cgaaagatagtacgtcccacagatagcgat

SEQ ID NO: 15078 - DNA, 30 bp, Artificial Sequence
  Synthetic oligonucleotide
cttatgccaaacagagtacagattaaggat

SEQ ID NO: 15079 - DNA, 30 bp, Artificial Sequence
  Synthetic oligonucleotide
atgagtggacctgggagctaagcaagggat

SEQ ID NO: 15080 - DNA, 30 bp, Artificial Sequence
  Synthetic oligonucleotide
accgtaatacggagcgaagaaagtgcgtat

SEQ ID NO: 15081 - DNA, 30 bp, Artificial Sequence
  Synthetic oligonucleotide
ccacgaggcagggagtcggcgcacagttat

SEQ ID NO: 15082 - DNA, 30 bp, Artificial Sequence
  Synthetic oligonucleotide
accaggggaaagaggggggatcgccgaact

SEQ ID NO: 15083 - DNA, 30 bp, Artificial Sequence
  Synthetic oligonucleotide
cggaccacctcgtagaacaggataccgact

SEQ ID NO: 15084 - DNA, 30 bp, Artificial Sequence
  Synthetic oligonucleotide
aggtcagaccggagaaggtggaacttgact

SEQ ID NO: 15085 - DNA, 30 bp, Artificial Sequence
  Synthetic oligonucleotide
acgtgtactaaaccagagtccaaggctcct

SEQ ID NO: 15086 - DNA, 30 bp, Artificial Sequence
  Synthetic oligonucleotide
aagggggggcaaatctacatgaatcaagct

SEQ ID NO: 15087 - DNA, 30 bp, Artificial Sequence
  Synthetic oligonucleotide
aaggaagttgtcgatacacaaaggtaagct

SEQ ID NO: 15088 - DNA, 30 bp, Artificial Sequence
  Synthetic oligonucleotide
acaaagaaagagaagatagaatttagagct

SEQ ID NO: 15089 - DNA, 30 bp, Artificial Sequence
  Synthetic oligonucleotide
ccacgacccaacgtatgagcgaggaccgct

SEQ ID NO: 15090 - DNA, 30 bp, Artificial Sequence
  Synthetic oligonucleotide
tctgggtggagaggttaacataatccgtct

SEQ ID NO: 15091 - DNA, 30 bp, Artificial Sequence
  Synthetic oligonucleotide
ctaggagaaagaagcaagtctggggaaagt

SEQ ID NO: 15092 - DNA, 30 bp, Artificial Sequence
  Synthetic oligonucleotide
aggtgcgctctcaaaagtgcgaatgaaagt

SEQ ID NO: 15093 - DNA, 30 bp, Artificial Sequence
  Synthetic oligonucleotide
gggcaatgcgagtcggatgaaacgttaagt

SEQ ID NO: 15094 - DNA, 30 bp, Artificial Sequence
  Synthetic oligonucleotide
tggatggcgggaccgctgagagtcgtgagt

SEQ ID NO: 15095 - DNA, 30 bp, Artificial Sequence
  Synthetic oligonucleotide
gacgagggatgaaggcgatatgtcacacgt

SEQ ID NO: 15096 - DNA, 30 bp, Artificial Sequence
  Synthetic oligonucleotide
cgactaatggaaagctgaagatagagcggt

SEQ ID NO: 15097 - DNA, 30 bp, Artificial Sequence
  Synthetic oligonucleotide
acgggccagaatagaaagtcggttaagggt

SEQ ID NO: 15098 - DNA, 30 bp, Artificial Sequence
  Synthetic oligonucleotide
aaggggagtgacaagttgagaatgagtggt

SEQ ID NO: 15099 - DNA, 30 bp, Artificial Sequence
  Synthetic oligonucleotide
agtgaagtgttagcggaggggatgcgctgt

SEQ ID NO: 15100 - DNA, 30 bp, Artificial Sequence
  Synthetic oligonucleotide
aacggaggtcgtgacaaaacgaatcagtgt

SEQ ID NO: 15101 - DNA, 30 bp, Artificial Sequence
  Synthetic oligonucleotide
agtcacgcgaagctgaagggggcaatgtgt

SEQ ID NO: 15102 - DNA, 30 bp, Artificial Sequence
  Synthetic oligonucleotide
cgaagaaagcaagctacaagcttactgtgt

SEQ ID NO: 15103 - DNA, 30 bp, Artificial Sequence
  Synthetic oligonucleotide
aggtactcgaagagaggtcgatagcaaatt

SEQ ID NO: 15104 - DNA, 30 bp, Artificial Sequence
  Synthetic oligonucleotide
tgaacaaaagatgagggatagacaacgatt

SEQ ID NO: 15105 - DNA, 30 bp, Artificial Sequence
  Synthetic oligonucleotide
agaggaacgtggcaagtccagaatgcgatt

SEQ ID NO: 15106 - DNA, 30 bp, Artificial Sequence
  Synthetic oligonucleotide
caaggtgcctacaaaccagggtatgcgatt

SEQ ID NO: 15107 - DNA, 30 bp, Artificial Sequence
  Synthetic oligonucleotide
tgatcactcaaaattaacgggaccaacaaa

SEQ ID NO: 15108 - DNA, 30 bp, Artificial Sequence
  Synthetic oligonucleotide
gcgaacgaggtgaatcagtactgccacaaa

SEQ ID NO: 15109 - DNA, 30 bp, Artificial Sequence
  Synthetic oligonucleotide
gaaggctgaagagacgtgatacgtaccaaa

SEQ ID NO: 15110 - DNA, 30 bp, Artificial Sequence
  Synthetic oligonucleotide
ccgagacatcgtgcttaggtgcgagccaaa

SEQ ID NO: 15111 - DNA, 30 bp, Artificial Sequence
  Synthetic oligonucleotide
acagagagccggacgtaatgaataagcaaa

SEQ ID NO: 15112 - DNA, 30 bp, Artificial Sequence
  Synthetic oligonucleotide
ccaacggagaacaacttgcatagacagaaa

SEQ ID NO: 15113 - DNA, 30 bp, Artificial Sequence
  Synthetic oligonucleotide
cgtgactccagaatacttaagtagaggaaa

SEQ ID NO: 15114 - DNA, 30 bp, Artificial Sequence
  Synthetic oligonucleotide
aacgtctcacgtgggcaggcgaggtggaaa

SEQ ID NO: 15115 - DNA, 30 bp, Artificial Sequence
  Synthetic oligonucleotide
agagcgtgaatcgagcagcgatattggaaa

SEQ ID NO: 15116 - DNA, 30 bp, Artificial Sequence
  Synthetic oligonucleotide
acaggacgagattgtcagattacagttaaa

SEQ ID NO: 15117 - DNA, 39 bp, Artificial Sequence
  Synthetic oligonucleotide
aaacgatgctgacctttagagaaattaatcggaaagcaa

SEQ ID NO: 15118 - DNA, 30 bp, Artificial Sequence
  Synthetic oligonucleotide
ccaaagatgaaagggccgagaaagaagcaa

SEQ ID NO: 15119 - DNA, 30 bp, Artificial Sequence
  Synthetic oligonucleotide
gcgattaacaagtaagagaaaaaagcgcaa

SEQ ID NO: 15120 - DNA, 30 bp, Artificial Sequence
  Synthetic oligonucleotide
ctaggaaaagtgttgggtgaaaggagtcaa

SEQ ID NO: 15121 - DNA, 30 bp, Artificial Sequence
  Synthetic oligonucleotide
cacgcattaacaacggagggggaacaagaa

SEQ ID NO: 15122 - DNA, 30 bp, Artificial Sequence
  Synthetic oligonucleotide
aggtggaggggccagatgacatggtaagaa

SEQ ID NO: 15123 - DNA, 30 bp, Artificial Sequence
  Synthetic oligonucleotide
gcacgagatggctgagacgaccatgacgaa

SEQ ID NO: 15124 - DNA, 30 bp, Artificial Sequence
  Synthetic oligonucleotide
cgatcagtggtgatcgccatgcatgacgaa

SEQ ID NO: 15125 - DNA, 30 bp, Artificial Sequence
  Synthetic oligonucleotide
cgggagcgttaaaaagcgagctggttcgaa

SEQ ID NO: 15126 - DNA, 30 bp, Artificial Sequence
  Synthetic oligonucleotide
cgagtcaaagttagaaggccatccaaggaa

SEQ ID NO: 15127 - DNA, 30 bp, Artificial Sequence
  Synthetic oligonucleotide
gtacctgggagagaccatgatagtgaggaa

SEQ ID NO: 15128 - DNA, 30 bp, Artificial Sequence
  Synthetic oligonucleotide
cgattatgggcgagcaggcgacactaggaa

SEQ ID NO: 15129 - DNA, 30 bp, Artificial Sequence
  Synthetic oligonucleotide
caatgatagagaagccaagcgagtccggaa

SEQ ID NO: 15130 - DNA, 30 bp, Artificial Sequence
  Synthetic oligonucleotide
cactgggggtaccaggatagcgaatcggaa

SEQ ID NO: 15131 - DNA, 30 bp, Artificial Sequence
  Synthetic oligonucleotide
agatgtcgagggaagtgatcgttaagggaa

SEQ ID NO: 15132 - DNA, 30 bp, Artificial Sequence
  Synthetic oligonucleotide
tcgaggacaggagaggttcaaaactatgaa

SEQ ID NO: 15133 - DNA, 30 bp, Artificial Sequence
  Synthetic oligonucleotide
caagggttacgggggggtgtgccatcataa

SEQ ID NO: 15134 - DNA, 30 bp, Artificial Sequence
  Synthetic oligonucleotide
ggggttagcaggagcgagcaaatggcctaa

SEQ ID NO: 15135 - DNA, 30 bp, Artificial Sequence
  Synthetic oligonucleotide
acgagtaaaaggcgttagccagaacgctaa

SEQ ID NO: 15136 - DNA, 30 bp, Artificial Sequence
  Synthetic oligonucleotide
atgaggccgtcgactgaacctcacatctaa

SEQ ID NO: 15137 - DNA, 30 bp, Artificial Sequence
  Synthetic oligonucleotide
agatcacttggacaggaagtacgaccgtaa

SEQ ID NO: 15138 - DNA, 30 bp, Artificial Sequence
  Synthetic oligonucleotide
cgaagagggacttaacaatacggctcgtaa

SEQ ID NO: 15139 - DNA, 30 bp, Artificial Sequence
  Synthetic oligonucleotide
cacaagaggataagcgaggtgacggtaaca

SEQ ID NO: 15140 - DNA, 30 bp, Artificial Sequence
  Synthetic oligonucleotide
cgactagcgcgaccggccaagccaaacaca

SEQ ID NO: 15141 - DNA, 30 bp, Artificial Sequence
  Synthetic oligonucleotide
agagacctacaagtaagacaggcgaccaca

SEQ ID NO: 15142 - DNA, 30 bp, Artificial Sequence
  Synthetic oligonucleotide
cagtagtaaaggcagtgaagtaagggcaca

SEQ ID NO: 15143 - DNA, 30 bp, Artificial Sequence
  Synthetic oligonucleotide
acgtacccgatcactaatgaagcgacgaca

SEQ ID NO: 15144 - DNA, 30 bp, Artificial Sequence
  Synthetic oligonucleotide
gcgtaatcggaaaagaatgtaaagtggaca

SEQ ID NO: 15145 - DNA, 30 bp, Artificial Sequence
  Synthetic oligonucleotide
agggtactaaacagcgtcagggtggataca

SEQ ID NO: 15146 - DNA, 30 bp, Artificial Sequence
  Synthetic oligonucleotide
tggagctgagagataggagggtgacctaca

SEQ ID NO: 15147 - DNA, 30 bp, Artificial Sequence
  Synthetic oligonucleotide
ttgcacatcaagagcgcccgaacgaaacca

SEQ ID NO: 15148 - DNA, 30 bp, Artificial Sequence
  Synthetic oligonucleotide
aacaaaggctcaacgagtattgacgtacca

SEQ ID NO: 15149 - DNA, 30 bp, Artificial Sequence
  Synthetic oligonucleotide
cagtcaacctgaactagcgaacaacggcca

SEQ ID NO: 15150 - DNA, 30 bp, Artificial Sequence
  Synthetic oligonucleotide
agaggaataggcagaccagaatcggggcca

SEQ ID NO: 15151 - DNA, 30 bp, Artificial Sequence
  Synthetic oligonucleotide
cgttaacattgaaacaaaatcagcttgcca

SEQ ID NO: 15152 - DNA, 30 bp, Artificial Sequence
  Synthetic oligonucleotide
gaggacagtgtcacagccaggaatcaagca

SEQ ID NO: 15153 - DNA, 30 bp, Artificial Sequence
  Synthetic oligonucleotide
tgcgccacgcaatataagaggatataagca

SEQ ID NO: 15154 - DNA, 30 bp, Artificial Sequence
  Synthetic oligonucleotide
gctgacggcaacctgatataaacgtgcgca

SEQ ID NO: 15155 - DNA, 30 bp, Artificial Sequence
  Synthetic oligonucleotide
gcggagtcacccgtaccaccaagggaggca

SEQ ID NO: 15156 - DNA, 30 bp, Artificial Sequence
  Synthetic oligonucleotide
tacgagtgggcagtatatggcaactaggca

SEQ ID NO: 15157 - DNA, 30 bp, Artificial Sequence
  Synthetic oligonucleotide
cacaagaaagatccgggctcacgctcggca

SEQ ID NO: 15158 - DNA, 30 bp, Artificial Sequence
  Synthetic oligonucleotide
agacacagagtacggatctgcgttagggca

SEQ ID NO: 15159 - DNA, 30 bp, Artificial Sequence
  Synthetic oligonucleotide
cggacaagtggaaagctgaaatttggggca

SEQ ID NO: 15160 - DNA, 30 bp, Artificial Sequence
  Synthetic oligonucleotide
acggctgaggagaaccacgggcaatatgca

SEQ ID NO: 15161 - DNA, 30 bp, Artificial Sequence
  Synthetic oligonucleotide
agtgggatacaagaacaacactgcaaatca

SEQ ID NO: 15162 - DNA, 30 bp, Artificial Sequence
  Synthetic oligonucleotide
cgtaaacatacacgagatatagtccaatca

SEQ ID NO: 15163 - DNA, 30 bp, Artificial Sequence
  Synthetic oligonucleotide
agggacaatcagactgcgagcatatcatca

SEQ ID NO: 15164 - DNA, 30 bp, Artificial Sequence
  Synthetic oligonucleotide
cgggggtgggagcctaatatcctgtcatca

SEQ ID NO: 15165 - DNA, 30 bp, Artificial Sequence
  Synthetic oligonucleotide
aacctagcaaagaacaaaggtgacaagtca

SEQ ID NO: 15166 - DNA, 30 bp, Artificial Sequence
  Synthetic oligonucleotide
acacgtagtggccgctaaacatgccaaaga

SEQ ID NO: 15167 - DNA, 30 bp, Artificial Sequence
  Synthetic oligonucleotide
ggatgataaaaggtctaatagatgacaaga

SEQ ID NO: 15168 - DNA, 30 bp, Artificial Sequence
  Synthetic oligonucleotide
acgggcagacaaacggactcatacgcaaga

SEQ ID NO: 15169 - DNA, 30 bp, Artificial Sequence
  Synthetic oligonucleotide
acggcgaaaggcagtaaaatcatctcaaga

SEQ ID NO: 15170 - DNA, 30 bp, Artificial Sequence
  Synthetic oligonucleotide
acggacaagggaacgtctgggttcagaaga

SEQ ID NO: 15171 - DNA, 30 bp, Artificial Sequence
  Synthetic oligonucleotide
ctgcctaacacacttagaaaatatgacaga

SEQ ID NO: 15172 - DNA, 30 bp, Artificial Sequence
  Synthetic oligonucleotide
tgcaaatgagtccggccgcgaaagtacaga

SEQ ID NO: 15173 - DNA, 30 bp, Artificial Sequence
  Synthetic oligonucleotide
caccgcagataccccaggggcacaagcaga

SEQ ID NO: 15174 - DNA, 30 bp, Artificial Sequence
  Synthetic oligonucleotide
gtagggcggtagggccccacgagcatcaga

SEQ ID NO: 15175 - DNA, 30 bp, Artificial Sequence
  Synthetic oligonucleotide
cagaaggacttacgggtaatgtacaagaga

SEQ ID NO: 15176 - DNA, 30 bp, Artificial Sequence
  Synthetic oligonucleotide
cggataagataatcgggtcgaatatagaga

SEQ ID NO: 15177 - DNA, 30 bp, Artificial Sequence
  Synthetic oligonucleotide
ccatcaagcaggaagacgagaatgtcgaga

SEQ ID NO: 15178 - DNA, 30 bp, Artificial Sequence
  Synthetic oligonucleotide
agagaagttcgacattagcagggaaataga

SEQ ID NO: 15179 - DNA, 30 bp, Artificial Sequence
  Synthetic oligonucleotide
aggggattgagtaatccagtgggacataga

SEQ ID NO: 15180 - DNA, 30 bp, Artificial Sequence
  Synthetic oligonucleotide
ggtaaagagctcagggggccgcgaactaga

SEQ ID NO: 15181 - DNA, 30 bp, Artificial Sequence
  Synthetic oligonucleotide
ggaagcaatacgtaggaggtgaccagtaga

SEQ ID NO: 15182 - DNA, 30 bp, Artificial Sequence
  Synthetic oligonucleotide
cgaggtgaatcatggagcggccacagacga

SEQ ID NO: 15183 - DNA, 30 bp, Artificial Sequence
  Synthetic oligonucleotide
agatccagcgggcaaaaatgcggactacga

SEQ ID NO: 15184 - DNA, 30 bp, Artificial Sequence
  Synthetic oligonucleotide
acgattgggtaaaaccattaaggcaaccga

SEQ ID NO: 15185 - DNA, 30 bp, Artificial Sequence
  Synthetic oligonucleotide
ggggagaggagttagactggtggcaaccga

SEQ ID NO: 15186 - DNA, 30 bp, Artificial Sequence
  Synthetic oligonucleotide
gcgcgggcgagtatccagacaagaaggcga

SEQ ID NO: 15187 - DNA, 30 bp, Artificial Sequence
  Synthetic oligonucleotide
cagcaggactggggtaagtataactggcga

SEQ ID NO: 15188 - DNA, 30 bp, Artificial Sequence
  Synthetic oligonucleotide
gggcatgagaacagaataggagcgtggcga

SEQ ID NO: 15189 - DNA, 30 bp, Artificial Sequence
  Synthetic oligonucleotide
atagagaagtcagtgagcaatgccaaagga

SEQ ID NO: 15190 - DNA, 30 bp, Artificial Sequence
  Synthetic oligonucleotide
aggcggggagaaagtctagatcctaaagga

SEQ ID NO: 15191 - DNA, 30 bp, Artificial Sequence
  Synthetic oligonucleotide
agcggaaagaaaatgcagtggctaacagga

SEQ ID NO: 15192 - DNA, 30 bp, Artificial Sequence
  Synthetic oligonucleotide
aggaacaacataggagcataacattcagga

SEQ ID NO: 15193 - DNA, 30 bp, Artificial Sequence
  Synthetic oligonucleotide
cgttccaagtgctaagagtgaggacgagga

SEQ ID NO: 15194 - DNA, 30 bp, Artificial Sequence
  Synthetic oligonucleotide
acgggttagggcaattaagtctcctgcgga

SEQ ID NO: 15195 - DNA, 30 bp, Artificial Sequence
  Synthetic oligonucleotide
caggcccaaactagaccggaaaagcgggga

SEQ ID NO: 15196 - DNA, 30 bp, Artificial Sequence
  Synthetic oligonucleotide
ggtgacaagttaatagaaagcgagagtgga

SEQ ID NO: 15197 - DNA, 30 bp, Artificial Sequence
  Synthetic oligonucleotide
cctacagcagaggctgagaagagacaatga

SEQ ID NO: 15198 - DNA, 30 bp, Artificial Sequence
  Synthetic oligonucleotide
cagggaccgaatatgaaggagtccacatga

SEQ ID NO: 15199 - DNA, 30 bp, Artificial Sequence
  Synthetic oligonucleotide
aagcgtgaggaggaaattggatgagcatga

SEQ ID NO: 15200 - DNA, 30 bp, Artificial Sequence
  Synthetic oligonucleotide
cgcaactactacagcgagggcggcagctga

SEQ ID NO: 15201 - DNA, 30 bp, Artificial Sequence
  Synthetic oligonucleotide
cggggagaagttaacatccacacccagtga

SEQ ID NO: 15202 - DNA, 30 bp, Artificial Sequence
  Synthetic oligonucleotide
acgaattaagttaaaacgaactgtcagtga

SEQ ID NO: 15203 - DNA, 30 bp, Artificial Sequence
  Synthetic oligonucleotide
acaccaaccacctatgcaactcgagagtga

SEQ ID NO: 15204 - DNA, 30 bp, Artificial Sequence
  Synthetic oligonucleotide
tcgccagtatggatgagccaaatgaggtga

SEQ ID NO: 15205 - DNA, 30 bp, Artificial Sequence
  Synthetic oligonucleotide
agtcagggcatgagagggatgtctaggtga

SEQ ID NO: 15206 - DNA, 30 bp, Artificial Sequence
  Synthetic oligonucleotide
ggattacatcgaacgaatacgaaagggtga

SEQ ID NO: 15207 - DNA, 30 bp, Artificial Sequence
  Synthetic oligonucleotide
agagctatggaaagaaatacgtgacattga

SEQ ID NO: 15208 - DNA, 30 bp, Artificial Sequence
  Synthetic oligonucleotide
acagagcggaggaggatgttgaagaaaata

SEQ ID NO: 15209 - DNA, 30 bp, Artificial Sequence
  Synthetic oligonucleotide
aaatggacaaagcccagtaaaaggtggata

SEQ ID NO: 15210 - DNA, 30 bp, Artificial Sequence
  Synthetic oligonucleotide
cagacaaggaaaacattcacgacacctata

SEQ ID NO: 15211 - DNA, 30 bp, Artificial Sequence
  Synthetic oligonucleotide
acacagaatgtctgatgttgagtgccagta

SEQ ID NO: 15212 - DNA, 30 bp, Artificial Sequence
  Synthetic oligonucleotide
gcatgagaatggtagtggcgaagaaacgta

SEQ ID NO: 15213 - DNA, 30 bp, Artificial Sequence
  Synthetic oligonucleotide
gctcgatgagtgggaggcaagaaatgggta

SEQ ID NO: 15214 - DNA, 30 bp, Artificial Sequence
  Synthetic oligonucleotide
acaggctagtaatagatcagcgggaatgta

SEQ ID NO: 15215 - DNA, 30 bp, Artificial Sequence
  Synthetic oligonucleotide
cgaaccaagacatgaactcacgagattgta

SEQ ID NO: 15216 - DNA, 30 bp, Artificial Sequence
  Synthetic oligonucleotide
agcacacactgagaaggtgaaacatgatta

SEQ ID NO: 15217 - DNA, 30 bp, Artificial Sequence
  Synthetic oligonucleotide
gacagggcgacacatagagaccataacaac

SEQ ID NO: 15218 - DNA, 30 bp, Artificial Sequence
  Synthetic oligonucleotide
tagacatcgcaactaatcggaaagacgaac

SEQ ID NO: 15219 - DNA, 30 bp, Artificial Sequence
  Synthetic oligonucleotide
gctgtggaagggagtaaatagacatcgaac

SEQ ID NO: 15220 - DNA, 30 bp, Artificial Sequence
  Synthetic oligonucleotide
cgaggtccagcaacctcatagtgagtgaac

SEQ ID NO: 15221 - DNA, 30 bp, Artificial Sequence
  Synthetic oligonucleotide
atgagcgatgcgccttgagagtgtgctaac

SEQ ID NO: 15222 - DNA, 30 bp, Artificial Sequence
  Synthetic oligonucleotide
aacaaggctcagggacgagtataagtacac

SEQ ID NO: 15223 - DNA, 30 bp, Artificial Sequence
  Synthetic oligonucleotide
acaacagaccgaacctgaaactcaccccac

SEQ ID NO: 15224 - DNA, 30 bp, Artificial Sequence
  Synthetic oligonucleotide
agactggcgaggagattgcaagagattcac

SEQ ID NO: 15225 - DNA, 34 bp, Artificial Sequence
  Synthetic oligonucleotide
catactagaccaccacgtgtccatccgaaaagac

SEQ ID NO: 15226 - DNA, 30 bp, Artificial Sequence
  Synthetic oligonucleotide
agagaacaccaacacaacataccttaagac

SEQ ID NO: 15227 - DNA, 30 bp, Artificial Sequence
  Synthetic oligonucleotide
aaggcgggcacacgtgtgcagatgggcgac

SEQ ID NO: 15228 - DNA, 30 bp, Artificial Sequence
  Synthetic oligonucleotide
tgtaatggtactgtaacccagagaacggac

SEQ ID NO: 15229 - DNA, 30 bp, Artificial Sequence
  Synthetic oligonucleotide
tcaacaacgatgaccaaagaaagaattgac

SEQ ID NO: 15230 - DNA, 30 bp, Artificial Sequence
  Synthetic oligonucleotide
gggcccaaagggtaaccacaggattagtac

SEQ ID NO: 15231 - DNA, 30 bp, Artificial Sequence
  Synthetic oligonucleotide
cgacaactagcccggtaaatagtaaggtac

SEQ ID NO: 15232 - DNA, 30 bp, Artificial Sequence
  Synthetic oligonucleotide
agagaataaggtaaactagcgcgaatgtac

SEQ ID NO: 15233 - DNA, 30 bp, Artificial Sequence
  Synthetic oligonucleotide
gcgcctcacaagcgcaagcacataagcacc

SEQ ID NO: 15234 - DNA, 30 bp, Artificial Sequence
  Synthetic oligonucleotide
ttgataagaacccaacacaataatagcacc

SEQ ID NO: 15235 - DNA, 30 bp, Artificial Sequence
  Synthetic oligonucleotide
tacgacacagtaaaactgatgagaggaccc

SEQ ID NO: 15236 - DNA, 30 bp, Artificial Sequence
  Synthetic oligonucleotide
agggcctaacaggtgcgacaaatgataccc

SEQ ID NO: 15237 - DNA, 30 bp, Artificial Sequence
  Synthetic oligonucleotide
ggacatgggtagagagtactgaatagggcc

SEQ ID NO: 15238 - DNA, 30 bp, Artificial Sequence
  Synthetic oligonucleotide
aggcgagtggtacctgaatcgtaatgggcc

SEQ ID NO: 15239 - DNA, 30 bp, Artificial Sequence
  Synthetic oligonucleotide
cgaggggacaaacattacggtaaggaatcc

SEQ ID NO: 15240 - DNA, 30 bp, Artificial Sequence
  Synthetic oligonucleotide
gccgagtaggcccagaggttaacaagaagc

SEQ ID NO: 15241 - DNA, 30 bp, Artificial Sequence
  Synthetic oligonucleotide
ctcgaaagaataaacgaggatagcgtaagc

SEQ ID NO: 15242 - DNA, 30 bp, Artificial Sequence
  Synthetic oligonucleotide
acgacggcaaatctataggatggcaacagc

SEQ ID NO: 15243 - DNA, 30 bp, Artificial Sequence
  Synthetic oligonucleotide
caagtttggacggtacacagagatcgcagc

SEQ ID NO: 15244 - DNA, 30 bp, Artificial Sequence
  Synthetic oligonucleotide
acagatgagccagatgggatcgactagagc

SEQ ID NO: 15245 - DNA, 30 bp, Artificial Sequence
  Synthetic oligonucleotide
gggagaccatcaacgcatatggagtagagc

SEQ ID NO: 15246 - DNA, 30 bp, Artificial Sequence
  Synthetic oligonucleotide
tgctcaagtgagtaagagtgcatcaggagc

SEQ ID NO: 15247 - DNA, 30 bp, Artificial Sequence
  Synthetic oligonucleotide
gatgacaacaaataagcggagggcgggagc

SEQ ID NO: 15248 - DNA, 30 bp, Artificial Sequence
  Synthetic oligonucleotide
caacaagggcgacgggactgaaatcagcgc

SEQ ID NO: 15249 - DNA, 30 bp, Artificial Sequence
  Synthetic oligonucleotide
cgatccctcgaaacgaaacaaaaccccggc

SEQ ID NO: 15250 - DNA, 30 bp, Artificial Sequence
  Synthetic oligonucleotide
accaaactaacatcgcatggataagtcggc

SEQ ID NO: 15251 - DNA, 30 bp, Artificial Sequence
  Synthetic oligonucleotide
acccagggtaaccaaaaccgagaagctggc

SEQ ID NO: 15252 - DNA, 30 bp, Artificial Sequence
  Synthetic oligonucleotide
ggggtaccgaacattaacaagaaaccctgc

SEQ ID NO: 15253 - DNA, 30 bp, Artificial Sequence
  Synthetic oligonucleotide
ttaaggacagagcgcaattatgccgtctgc

SEQ ID NO: 15254 - DNA, 30 bp, Artificial Sequence
  Synthetic oligonucleotide
ataaaaagagtgggcaaggataatcgttgc

SEQ ID NO: 15255 - DNA, 30 bp, Artificial Sequence
  Synthetic oligonucleotide
acgtggcggaaactgcatgcatggaagatc

SEQ ID NO: 15256 - DNA, 30 bp, Artificial Sequence
  Synthetic oligonucleotide
gaggatataggaaaagaacacaatcagatc

SEQ ID NO: 15257 - DNA, 30 bp, Artificial Sequence
  Synthetic oligonucleotide
tcggaagagagggaaaaggtcgtatgtatc

SEQ ID NO: 15258 - DNA, 30 bp, Artificial Sequence
  Synthetic oligonucleotide
acgggaagggggatgactttagccattatc

SEQ ID NO: 15259 - DNA, 30 bp, Artificial Sequence
  Synthetic oligonucleotide
cgtaaaaacactgagccaaactgtctgctc

SEQ ID NO: 15260 - DNA, 30 bp, Artificial Sequence
  Synthetic oligonucleotide
tcaggcgaaaccaagctcgtagtagtgctc

SEQ ID NO: 15261 - DNA, 30 bp, Artificial Sequence
  Synthetic oligonucleotide
tcggaaccgacaaaggaagactaccgtctc

SEQ ID NO: 15262 - DNA, 30 bp, Artificial Sequence
  Synthetic oligonucleotide
taacagctatcgaaagaaaaacgtccagtc

SEQ ID NO: 15263 - DNA, 30 bp, Artificial Sequence
  Synthetic oligonucleotide
tcaccattggaagccaagtagaagctcgtc

SEQ ID NO: 15264 - DNA, 30 bp, Artificial Sequence
  Synthetic oligonucleotide
cctgaggaatcccaaggataagacgtcgtc

SEQ ID NO: 15265 - DNA, 30 bp, Artificial Sequence
  Synthetic oligonucleotide
aggacaaattaatggggacagtgaacggtc

SEQ ID NO: 15266 - DNA, 30 bp, Artificial Sequence
  Synthetic oligonucleotide
gcgtaagcacatgtgtgaagaggagctgtc

SEQ ID NO: 15267 - DNA, 30 bp, Artificial Sequence
  Synthetic oligonucleotide
gtaggcaacgtcacagtttcggaataaaag

SEQ ID NO: 15268 - DNA, 30 bp, Artificial Sequence
  Synthetic oligonucleotide
gcctaaaggagagattgaaacgagtcaaag

SEQ ID NO: 15269 - DNA, 30 bp, Artificial Sequence
  Synthetic oligonucleotide
ctaacgagctggaaacagatgatcagcaag

SEQ ID NO: 15270 - DNA, 30 bp, Artificial Sequence
  Synthetic oligonucleotide
caatgcaaatctgccaaaggacaacgcaag

SEQ ID NO: 15271 - DNA, 30 bp, Artificial Sequence
  Synthetic oligonucleotide
gcgtgaatatgatcgatgccgatgtagaag

SEQ ID NO: 15272 - DNA, 30 bp, Artificial Sequence
  Synthetic oligonucleotide
agcggcgaaaacgaaagagacgtggcgaag

SEQ ID NO: 15273 - DNA, 31 bp, Artificial Sequence
  Synthetic oligonucleotide
caaacctctaagccgtgacaaaaaagggaag

SEQ ID NO: 15274 - DNA, 30 bp, Artificial Sequence
  Synthetic oligonucleotide
catgggggcacaggagaaagccgcgggaag

SEQ ID NO: 15275 - DNA, 30 bp, Artificial Sequence
  Synthetic oligonucleotide
cagggaaacccccaaggaacgcgtatgaag

SEQ ID NO: 15276 - DNA, 30 bp, Artificial Sequence
  Synthetic oligonucleotide
ggcgtatgtacaagacattgacagttgaag

SEQ ID NO: 15277 - DNA, 30 bp, Artificial Sequence
  Synthetic oligonucleotide
cgatgtagatcacaacccaagttatctaag

SEQ ID NO: 15278 - DNA, 30 bp, Artificial Sequence
  Synthetic oligonucleotide
cagggagagaattcttgtgagaacagtaag

SEQ ID NO: 15279 - DNA, 30 bp, Artificial Sequence
  Synthetic oligonucleotide
aaggacagcaggaatagagaacatggtaag

SEQ ID NO: 15280 - DNA, 30 bp, Artificial Sequence
  Synthetic oligonucleotide
gccaatagagtacggcacagagagattaag

SEQ ID NO: 15281 - DNA, 30 bp, Artificial Sequence
  Synthetic oligonucleotide
aaggtagtgaatagcagttgggaataacag

SEQ ID NO: 15282 - DNA, 30 bp, Artificial Sequence
  Synthetic oligonucleotide
caatcaaaccatgagagaccgaggctacag

SEQ ID NO: 15283 - DNA, 31 bp, Artificial Sequence
  Synthetic oligonucleotide
tgagcgcggcgaatacgagcaaagaggccag

SEQ ID NO: 15284 - DNA, 30 bp, Artificial Sequence
  Synthetic oligonucleotide
agtgtctgcccgagaaaggaagagaagcag

SEQ ID NO: 15285 - DNA, 30 bp, Artificial Sequence
  Synthetic oligonucleotide
cgtccacagccagaacaatagggcagtcag

SEQ ID NO: 15286 - DNA, 30 bp, Artificial Sequence
  Synthetic oligonucleotide
aggcgagcacccgtttaacagtgacaagag

SEQ ID NO: 15287 - DNA, 30 bp, Artificial Sequence
  Synthetic oligonucleotide
gatatcgaaggcatggaaacaaatcaagag

SEQ ID NO: 15288 - DNA, 30 bp, Artificial Sequence
  Synthetic oligonucleotide
cgtaccagccatgcattagagtgagaagag

SEQ ID NO: 15289 - DNA, 30 bp, Artificial Sequence
  Synthetic oligonucleotide
aacgagccgtgatgcgagcgaataatagag

SEQ ID NO: 15290 - DNA, 30 bp, Artificial Sequence
  Synthetic oligonucleotide
cgtggtgcacgcagaggtagtcagttagag

SEQ ID NO: 15291 - DNA, 30 bp, Artificial Sequence
  Synthetic oligonucleotide
tcagctcaaaggtagtacagtaagcacgag

SEQ ID NO: 15292 - DNA, 30 bp, Artificial Sequence
  Synthetic oligonucleotide
gctaaaaggctagtagcgaattcagacgag

SEQ ID NO: 15293 - DNA, 30 bp, Artificial Sequence
  Synthetic oligonucleotide
cgcaatgatatgcaaagtaccggccaggag

SEQ ID NO: 15294 - DNA, 30 bp, Artificial Sequence
  Synthetic oligonucleotide
gcacagaaaatgtcccaaatgactgaggag

SEQ ID NO: 15295 - DNA, 30 bp, Artificial Sequence
  Synthetic oligonucleotide
ggagacaccgtaagggagtaatagacggag

SEQ ID NO: 15296 - DNA, 30 bp, Artificial Sequence
  Synthetic oligonucleotide
gtagacttgggaaatcaattgatgccggag

SEQ ID NO: 15297 - DNA, 30 bp, Artificial Sequence
  Synthetic oligonucleotide
ccgtatgcctgtacatgctgaattccggag

SEQ ID NO: 15298 - DNA, 30 bp, Artificial Sequence
  Synthetic oligonucleotide
gacagggggatctcaaaaaagggcgcggag

SEQ ID NO: 15299 - DNA, 30 bp, Artificial Sequence
  Synthetic oligonucleotide
aagaaggcgtggtgaaacgaatggtgggag

SEQ ID NO: 15300 - DNA, 30 bp, Artificial Sequence
  Synthetic oligonucleotide
taagaggggcgaacatatgtgggacttgag

SEQ ID NO: 15301 - DNA, 30 bp, Artificial Sequence
  Synthetic oligonucleotide
caaggggaaatgctttgaggagccaaatag

SEQ ID NO: 15302 - DNA, 30 bp, Artificial Sequence
  Synthetic oligonucleotide
gcgaacaaatgtaggactgaggcttaatag

SEQ ID NO: 15303 - DNA, 30 bp, Artificial Sequence
  Synthetic oligonucleotide
ggcaatcacacaggctagggacttacatag

SEQ ID NO: 15304 - DNA, 30 bp, Artificial Sequence
  Synthetic oligonucleotide
agaggatcactaggaatttccgctcgatag

SEQ ID NO: 15305 - DNA, 30 bp, Artificial Sequence
  Synthetic oligonucleotide
agagggagatattagattgtcgaagtatag

SEQ ID NO: 15306 - DNA, 30 bp, Artificial Sequence
  Synthetic oligonucleotide
cgttatgaataaaagtggatgtaaaactag

SEQ ID NO: 15307 - DNA, 30 bp, Artificial Sequence
  Synthetic oligonucleotide
gacacgcgaaattacagtaaacaatcgtag

SEQ ID NO: 15308 - DNA, 30 bp, Artificial Sequence
  Synthetic oligonucleotide
cggaagcgcaaagccatggcgatcagttag

SEQ ID NO: 15309 - DNA, 30 bp, Artificial Sequence
  Synthetic oligonucleotide
taatggagaacacaaattacgagtagcacg

SEQ ID NO: 15310 - DNA, 30 bp, Artificial Sequence
  Synthetic oligonucleotide
gcaaaaagaaacatgtttggtacagatacg

SEQ ID NO: 15311 - DNA, 30 bp, Artificial Sequence
  Synthetic oligonucleotide
taggcaaggcaaacctgccccctgaaaccg

SEQ ID NO: 15312 - DNA, 30 bp, Artificial Sequence
  Synthetic oligonucleotide
ggggtcgaaggaaagttccagtaaaagccg

SEQ ID NO: 15313 - DNA, 30 bp, Artificial Sequence
  Synthetic oligonucleotide
gttaacaaaacggaaaaaactagcacagcg

SEQ ID NO: 15314 - DNA, 30 bp, Artificial Sequence
  Synthetic oligonucleotide
agagtcaggcgaccaccattgtttccagcg

SEQ ID NO: 15315 - DNA, 30 bp, Artificial Sequence
  Synthetic oligonucleotide
gggcgaaactaagtgtgagtactacccgcg

SEQ ID NO: 15316 - DNA, 30 bp, Artificial Sequence
  Synthetic oligonucleotide
agcgacagttagggtaagattgggagcgcg

SEQ ID NO: 15317 - DNA, 30 bp, Artificial Sequence
  Synthetic oligonucleotide
ggcatgcgatgagacaacgataagctcgcg

SEQ ID NO: 15318 - DNA, 30 bp, Artificial Sequence
  Synthetic oligonucleotide
gaggacacaactcattcagaccgaaaggcg

SEQ ID NO: 15319 - DNA, 30 bp, Artificial Sequence
  Synthetic oligonucleotide
taaatcaaagacagccagaggaaagatgcg

SEQ ID NO: 15320 - DNA, 30 bp, Artificial Sequence
  Synthetic oligonucleotide
ccgtaacgggggagattgtagggaccatcg

SEQ ID NO: 15321 - DNA, 31 bp, Artificial Sequence
  Synthetic oligonucleotide
cacgggtaatgggatgtcgaggtatccatcg

SEQ ID NO: 15322 - DNA, 30 bp, Artificial Sequence
  Synthetic oligonucleotide
caagggcgcgactcatcagtgacaggatcg

SEQ ID NO: 15323 - DNA, 30 bp, Artificial Sequence
  Synthetic oligonucleotide
cgagcgaatagctgggcgaaggtcggatcg

SEQ ID NO: 15324 - DNA, 30 bp, Artificial Sequence
  Synthetic oligonucleotide
ggggcgtatagggctggtcaccaaacgtcg

SEQ ID NO: 15325 - DNA, 30 bp, Artificial Sequence
  Synthetic oligonucleotide
acggggggcagatcaacgcacttagggtcg

SEQ ID NO: 15326 - DNA, 30 bp, Artificial Sequence
  Synthetic oligonucleotide
gcgagcatcagtgtgataactgtccattcg

SEQ ID NO: 15327 - DNA, 30 bp, Artificial Sequence
  Synthetic oligonucleotide
gtacaaaccagaatgaaaagcggcaaaagg

SEQ ID NO: 15328 - DNA, 30 bp, Artificial Sequence
  Synthetic oligonucleotide
caagtggatagcataagcgataagcaaagg

SEQ ID NO: 15329 - DNA, 30 bp, Artificial Sequence
  Synthetic oligonucleotide
tagtatagcaaagtcaacgtatgaggaagg

SEQ ID NO: 15330 - DNA, 30 bp, Artificial Sequence
  Synthetic oligonucleotide
acgtatggaaatagccgttcgacgggaagg

SEQ ID NO: 15331 - DNA, 30 bp, Artificial Sequence
  Synthetic oligonucleotide
ctacacaaacaagacacttcaatagtaagg

SEQ ID NO: 15332 - DNA, 30 bp, Artificial Sequence
  Synthetic oligonucleotide
ggtgcagggggtcagactagtcaaaacagg

SEQ ID NO: 15333 - DNA, 30 bp, Artificial Sequence
  Synthetic oligonucleotide
aaaacagcgatggcaataatcgtgcacagg

SEQ ID NO: 15334 - DNA, 30 bp, Artificial Sequence
  Synthetic oligonucleotide
tgtgagatcgaacaaggcgattcctacagg

SEQ ID NO: 15335 - DNA, 30 bp, Artificial Sequence
  Synthetic oligonucleotide
tggaaggtgagtaagacttagctgtcgagg

SEQ ID NO: 15336 - DNA, 30 bp, Artificial Sequence
  Synthetic oligonucleotide
cacgaggatgcgcgggtcgatgagagtagg

SEQ ID NO: 15337 - DNA, 30 bp, Artificial Sequence
  Synthetic oligonucleotide
ccataaagcgaatgtgagtaaacataacgg

SEQ ID NO: 15338 - DNA, 30 bp, Artificial Sequence
  Synthetic oligonucleotide
cgaagagccgatacaaaggccgctactcgg

SEQ ID NO: 15339 - DNA, 30 bp, Artificial Sequence
  Synthetic oligonucleotide
aggggcaacgagccacaaaagatgattcgg

SEQ ID NO: 15340 - DNA, 30 bp, Artificial Sequence
  Synthetic oligonucleotide
acagacaaaaacagcagatgtcatgttcgg

SEQ ID NO: 15341 - DNA, 30 bp, Artificial Sequence
  Synthetic oligonucleotide
ggcgagactagaaagtataaggccaaaggg

SEQ ID NO: 15342 - DNA, 30 bp, Artificial Sequence
  Synthetic oligonucleotide
gcaaggattgtccaaaaaagcgagccaggg

SEQ ID NO: 15343 - DNA, 30 bp, Artificial Sequence
  Synthetic oligonucleotide
gctaagcaaagagatttcaaaggtagaggg

SEQ ID NO: 15344 - DNA, 30 bp, Artificial Sequence
  Synthetic oligonucleotide
tcgtaacggcgtaaataatgttcacgaggg

SEQ ID NO: 15345 - DNA, 30 bp, Artificial Sequence
  Synthetic oligonucleotide
cggaatacctacgacacgtgataccgaggg

SEQ ID NO: 15346 - DNA, 30 bp, Artificial Sequence
  Synthetic oligonucleotide
ggagaaggaatggcaattggaaggctaggg

SEQ ID NO: 15347 - DNA, 30 bp, Artificial Sequence
  Synthetic oligonucleotide
acctcgcacgattgtggaaaatagatcggg

SEQ ID NO: 15348 - DNA, 30 bp, Artificial Sequence
  Synthetic oligonucleotide
ggcacaggataagcagtatgtaacccgggg

SEQ ID NO: 15349 - DNA, 30 bp, Artificial Sequence
  Synthetic oligonucleotide
gggcgtctaaaagcaatcgacaataggggg

SEQ ID NO: 15350 - DNA, 30 bp, Artificial Sequence
  Synthetic oligonucleotide
tgatgggcattggaatcagaaagaaaatgg

SEQ ID NO: 15351 - DNA, 30 bp, Artificial Sequence
  Synthetic oligonucleotide
tcgaagtggacaatatgtggtcccaaatgg

SEQ ID NO: 15352 - DNA, 30 bp, Artificial Sequence
  Synthetic oligonucleotide
cggtaatgaacgatagcagagatgacatgg

SEQ ID NO: 15353 - DNA, 31 bp, Artificial Sequence
  Synthetic oligonucleotide
agtagggaatgaagaccaacctccgtcatgg

SEQ ID NO: 15354 - DNA, 30 bp, Artificial Sequence
  Synthetic oligonucleotide
accgaaaagcaaaaaaagtgcgggagatgg

SEQ ID NO: 15355 - DNA, 30 bp, Artificial Sequence
  Synthetic oligonucleotide
cggagtggtaagacagaaaaacatttatgg

SEQ ID NO: 15356 - DNA, 30 bp, Artificial Sequence
  Synthetic oligonucleotide
ctaagcaaaccactgtcgaagatgggctgg

SEQ ID NO: 15357 - DNA, 30 bp, Artificial Sequence
  Synthetic oligonucleotide
tcacgggaacgataacggtgagtatagtgg

SEQ ID NO: 15358 - DNA, 30 bp, Artificial Sequence
  Synthetic oligonucleotide
catgcaggctggatggtgtatgagaattgg

SEQ ID NO: 15359 - DNA, 30 bp, Artificial Sequence
  Synthetic oligonucleotide
agggctcagaagacgggagtgacagtttgg

SEQ ID NO: 15360 - DNA, 30 bp, Artificial Sequence
  Synthetic oligonucleotide
ttacgcaggttcgaaatggaatcacaaatg

SEQ ID NO: 15361 - DNA, 30 bp, Artificial Sequence
  Synthetic oligonucleotide
cgagtggtaagaatgtgacggtaataaatg

SEQ ID NO: 15362 - DNA, 30 bp, Artificial Sequence
  Synthetic oligonucleotide
gcgacagatagaatatgatcggcgacaatg

SEQ ID NO: 15363 - DNA, 30 bp, Artificial Sequence
  Synthetic oligonucleotide
actgaggaagtaaagtcctagtgggcaatg

SEQ ID NO: 15364 - DNA, 30 bp, Artificial Sequence
  Synthetic oligonucleotide
aggaggagtgccaatcacttgattgcaatg

SEQ ID NO: 15365 - DNA, 30 bp, Artificial Sequence
  Synthetic oligonucleotide
cgaataggcccggctgtagttgcgtcaatg

SEQ ID NO: 15366 - DNA, 30 bp, Artificial Sequence
  Synthetic oligonucleotide
gagtcacctcaagagggagggatcggaatg

SEQ ID NO: 15367 - DNA, 30 bp, Artificial Sequence
  Synthetic oligonucleotide
tcacgtagctgcagaaggcaaatgataatg

SEQ ID NO: 15368 - DNA, 30 bp, Artificial Sequence
  Synthetic oligonucleotide
taggcgccaggagaaagacagacactaatg

SEQ ID NO: 15369 - DNA, 30 bp, Artificial Sequence
  Synthetic oligonucleotide
gcctaccgacgaacataaatgcgactaatg

SEQ ID NO: 15370 - DNA, 30 bp, Artificial Sequence
  Synthetic oligonucleotide
agagcacgtaagccaataatacacttcatg

SEQ ID NO: 15371 - DNA, 30 bp, Artificial Sequence
  Synthetic oligonucleotide
tcagacatcaaaatatcgttcagagagatg

SEQ ID NO: 15372 - DNA, 30 bp, Artificial Sequence
  Synthetic oligonucleotide
tcacaggaaagcatagtcaagtgacgtatg

SEQ ID NO: 15373 - DNA, 30 bp, Artificial Sequence
  Synthetic oligonucleotide
catacacaaaacagggaaacgccgacactg

SEQ ID NO: 15374 - DNA, 30 bp, Artificial Sequence
  Synthetic oligonucleotide
ggaagatcaaagtcgcgagatagcgagctg

SEQ ID NO: 15375 - DNA, 30 bp, Artificial Sequence
  Synthetic oligonucleotide
ttgcgaagcgagtgaacgttagccgggctg

SEQ ID NO: 15376 - DNA, 30 bp, Artificial Sequence
  Synthetic oligonucleotide
aagaccgtgaagatcagcggaagatggctg

SEQ ID NO: 15377 - DNA, 30 bp, Artificial Sequence
  Synthetic oligonucleotide
cacgacaggagaaggtggaacatctggctg

SEQ ID NO: 15378 - DNA, 30 bp, Artificial Sequence
  Synthetic oligonucleotide
cggttcgaagacaaccaaagcacgtatctg

SEQ ID NO: 15379 - DNA, 30 bp, Artificial Sequence
  Synthetic oligonucleotide
gacaaaacatcatcggcgaaaaagggtctg

SEQ ID NO: 15380 - DNA, 30 bp, Artificial Sequence
  Synthetic oligonucleotide
acctacgaggcggacggcgaaatagaagtg

SEQ ID NO: 15381 - DNA, 30 bp, Artificial Sequence
  Synthetic oligonucleotide
cgtgagtgaacaagaacgcgtttgtaagtg

SEQ ID NO: 15382 - DNA, 30 bp, Artificial Sequence
  Synthetic oligonucleotide
tcacggtctaagtcgacaaacccttaagtg

SEQ ID NO: 15383 - DNA, 30 bp, Artificial Sequence
  Synthetic oligonucleotide
agtaccatgacaacgggttcgtccacagtg

SEQ ID NO: 15384 - DNA, 30 bp, Artificial Sequence
  Synthetic oligonucleotide
acaggagcccagtacggaaagtgctcagtg

SEQ ID NO: 15385 - DNA, 30 bp, Artificial Sequence
  Synthetic oligonucleotide
attcgggcaagtaagtcagatagaagagtg

SEQ ID NO: 15386 - DNA, 30 bp, Artificial Sequence
  Synthetic oligonucleotide
taagaagactcattaaggttacacagagtg

SEQ ID NO: 15387 - DNA, 30 bp, Artificial Sequence
  Synthetic oligonucleotide
cggccatggctgatacttcagaaacgagtg

SEQ ID NO: 15388 - DNA, 30 bp, Artificial Sequence
  Synthetic oligonucleotide
agccagaggtggatctcctaaaagaacgtg

SEQ ID NO: 15389 - DNA, 30 bp, Artificial Sequence
  Synthetic oligonucleotide
tcaacgcggatggaacagattcaatgcgtg

SEQ ID NO: 15390 - DNA, 30 bp, Artificial Sequence
  Synthetic oligonucleotide
aacagacgtagtgaggaatagcaagaggtg

SEQ ID NO: 15391 - DNA, 30 bp, Artificial Sequence
  Synthetic oligonucleotide
cggagaaagaccatgagcacatcggtattg

SEQ ID NO: 15392 - DNA, 30 bp, Artificial Sequence
  Synthetic oligonucleotide
cggaggggcgatatgtgtgaacatggcttg

SEQ ID NO: 15393 - DNA, 30 bp, Artificial Sequence
  Synthetic oligonucleotide
ccggaaacatggactattcgagagaggttg

SEQ ID NO: 15394 - DNA, 30 bp, Artificial Sequence
  Synthetic oligonucleotide
gcgagtaagtcgaggtaccaagcggtaaat

SEQ ID NO: 15395 - DNA, 30 bp, Artificial Sequence
  Synthetic oligonucleotide
tcaacgaggaaaacatggactatacgcaat

SEQ ID NO: 15396 - DNA, 30 bp, Artificial Sequence
  Synthetic oligonucleotide
ccaacgaagcggtgagggctgagccagaat

SEQ ID NO: 15397 - DNA, 30 bp, Artificial Sequence
  Synthetic oligonucleotide
cggattcgctgtgaaggcacgaggcggaat

SEQ ID NO: 15398 - DNA, 30 bp, Artificial Sequence
  Synthetic oligonucleotide
tgaaagatcgaaataggatcccgtctgaat

SEQ ID NO: 15399 - DNA, 30 bp, Artificial Sequence
  Synthetic oligonucleotide
cgaacaaaggtcctaagggcagggaataat

SEQ ID NO: 15400 - DNA, 30 bp, Artificial Sequence
  Synthetic oligonucleotide
agacgccaaagaagatgttagggaggccat

SEQ ID NO: 15401 - DNA, 30 bp, Artificial Sequence
  Synthetic oligonucleotide
agaacgcggggagtgaatgcaagtctgcat

SEQ ID NO: 15402 - DNA, 30 bp, Artificial Sequence
  Synthetic oligonucleotide
acgactagggcgatcagtgtggtgttgcat

SEQ ID NO: 15403 - DNA, 30 bp, Artificial Sequence
  Synthetic oligonucleotide
tggcgtaggcggaagaagagaaggtctcat

SEQ ID NO: 15404 - DNA, 30 bp, Artificial Sequence
  Synthetic oligonucleotide
ggcaaggcaacgaagcaagaagtaagcgat

SEQ ID NO: 15405 - DNA, 30 bp, Artificial Sequence
  Synthetic oligonucleotide
gttggtgtcaagagtgagagaaatttcgat

SEQ ID NO: 15406 - DNA, 30 bp, Artificial Sequence
  Synthetic oligonucleotide
ctgcgaagaacaataagggtaacaggggat

SEQ ID NO: 15407 - DNA, 30 bp, Artificial Sequence
  Synthetic oligonucleotide
tggtgaaaggaggcctagaaccaatgatat

SEQ ID NO: 15408 - DNA, 30 bp, Artificial Sequence
  Synthetic oligonucleotide
caagaaagcagaggaatagaccgttgatat

SEQ ID NO: 15409 - DNA, 30 bp, Artificial Sequence
  Synthetic oligonucleotide
cgatcacgagtggaatcagtgcacccgtat

SEQ ID NO: 15410 - DNA, 30 bp, Artificial Sequence
  Synthetic oligonucleotide
acggatcagcggacccgaaacattgaacct

SEQ ID NO: 15411 - DNA, 30 bp, Artificial Sequence
  Synthetic oligonucleotide
agacgagagcccactaacggagatggacct

SEQ ID NO: 15412 - DNA, 30 bp, Artificial Sequence
  Synthetic oligonucleotide
cgcaagggaattgtataccaggagtgagct

SEQ ID NO: 15413 - DNA, 30 bp, Artificial Sequence
  Synthetic oligonucleotide
ccggagatatcagacaagaataagagggct

SEQ ID NO: 15414 - DNA, 30 bp, Artificial Sequence
  Synthetic oligonucleotide
tagacacgaaagaagagatgactgcatgct

SEQ ID NO: 15415 - DNA, 30 bp, Artificial Sequence
  Synthetic oligonucleotide
agggcaagatgaatgaacacgtcgactgct

SEQ ID NO: 15416 - DNA, 30 bp, Artificial Sequence
  Synthetic oligonucleotide
agaggtaaatacccaaaagtcggatcgtct

SEQ ID NO: 15417 - DNA, 30 bp, Artificial Sequence
  Synthetic oligonucleotide
acgagtcgggatctgcagatagaaggaagt

SEQ ID NO: 15418 - DNA, 30 bp, Artificial Sequence
  Synthetic oligonucleotide
tacgaatgagtcagtagcacactaataagt

SEQ ID NO: 15419 - DNA, 30 bp, Artificial Sequence
  Synthetic oligonucleotide
acggaaaatagcccccgtctcacgataagt

SEQ ID NO: 15420 - DNA, 30 bp, Artificial Sequence
  Synthetic oligonucleotide
cggcagccgaatttcaagcaaggagtcagt

SEQ ID NO: 15421 - DNA, 30 bp, Artificial Sequence
  Synthetic oligonucleotide
gggggtgaaggtaaaccgtcgaatgtcagt

SEQ ID NO: 15422 - DNA, 30 bp, Artificial Sequence
  Synthetic oligonucleotide
tcgtatgcaaagtgtaaatagtgtctgagt

SEQ ID NO: 15423 - DNA, 30 bp, Artificial Sequence
  Synthetic oligonucleotide
cagcatgtaaaaaacagcggtaatgtgagt

SEQ ID NO: 15424 - DNA, 30 bp, Artificial Sequence
  Synthetic oligonucleotide
agtggcggagaaagtgaagtgagcgaccgt

SEQ ID NO: 15425 - DNA, 30 bp, Artificial Sequence
  Synthetic oligonucleotide
cagggacaggttcgaagaagtcaaagcggt

SEQ ID NO: 15426 - DNA, 30 bp, Artificial Sequence
  Synthetic oligonucleotide
cactcaaatcaccagaagcgagacatgggt

SEQ ID NO: 15427 - DNA, 30 bp, Artificial Sequence
  Synthetic oligonucleotide
gacgaaaaggcgtatggccggaacgaatgt

SEQ ID NO: 15428 - DNA, 30 bp, Artificial Sequence
  Synthetic oligonucleotide
acagagttacgatatagcggaagctaatgt

SEQ ID NO: 15429 - DNA, 30 bp, Artificial Sequence
  Synthetic oligonucleotide
atgaaaaaagacagcagtagtggtcgatgt

SEQ ID NO: 15430 - DNA, 30 bp, Artificial Sequence
  Synthetic oligonucleotide
cgagagcggatagaatatgaaaacgcctgt

SEQ ID NO: 15431 - DNA, 30 bp, Artificial Sequence
  Synthetic oligonucleotide
cgaacagcacggcatcagaggagcagttgt

SEQ ID NO: 15432 - DNA, 30 bp, Artificial Sequence
  Synthetic oligonucleotide
gtggggacatagtgagcgaccgaataaatt

SEQ ID NO: 15433 - DNA, 30 bp, Artificial Sequence
  Synthetic oligonucleotide
gcaaggaggtgtggcagttacgaagacatt

SEQ ID NO: 15434 - DNA, 30 bp, Artificial Sequence
  Synthetic oligonucleotide
acgcgaccacgattatccgatagagcagtt

SEQ ID NO: 15435 - DNA, 30 bp, Artificial Sequence
  Synthetic oligonucleotide
acggagtggacatagcccaaatgttcggtt

SEQ ID NO: 15436 - DNA, 30 bp, Artificial Sequence
  Synthetic oligonucleotide
gcgagaacggaagcgacatgaaaccatttt

SEQ ID NO: 15437 - DNA, 30 bp, Artificial Sequence
  Synthetic oligonucleotide
ccgaacaacgaaggaggctgtacacgaaaa

SEQ ID NO: 15438 - DNA, 30 bp, Artificial Sequence
  Synthetic oligonucleotide
cgcgagtatgaatctaaaagatgccgaaaa

SEQ ID NO: 15439 - DNA, 30 bp, Artificial Sequence
  Synthetic oligonucleotide
tgaccggagtggtggaggcgtgagataaaa

SEQ ID NO: 15440 - DNA, 30 bp, Artificial Sequence
  Synthetic oligonucleotide
atggcagtgacgaccaaggattgcgtaaaa

SEQ ID NO: 15441 - DNA, 30 bp, Artificial Sequence
  Synthetic oligonucleotide
agggtgcgctcggtagaagacatcctcaaa

SEQ ID NO: 15442 - DNA, 30 bp, Artificial Sequence
  Synthetic oligonucleotide
gcaggaggacaaaccagagttaagaataaa

SEQ ID NO: 15443 - DNA, 30 bp, Artificial Sequence
  Synthetic oligonucleotide
gacggccgacaccaaacataacttgctaaa

SEQ ID NO: 15444 - DNA, 30 bp, Artificial Sequence
  Synthetic oligonucleotide
catggataatcacggaagagagatccacaa

SEQ ID NO: 15445 - DNA, 30 bp, Artificial Sequence
  Synthetic oligonucleotide
catgaaaagagtctgtagagagaggcacaa

SEQ ID NO: 15446 - DNA, 30 bp, Artificial Sequence
  Synthetic oligonucleotide
cgcggaaaagtaaaatggtataggggccaa

SEQ ID NO: 15447 - DNA, 30 bp, Artificial Sequence
  Synthetic oligonucleotide
gtcagaacgaactactccatcctcctgcaa

SEQ ID NO: 15448 - DNA, 30 bp, Artificial Sequence
  Synthetic oligonucleotide
gcaagtgcggaggtggcagggacaaatcaa

SEQ ID NO: 15449 - DNA, 30 bp, Artificial Sequence
  Synthetic oligonucleotide
ccacagagtagggtgacatcaggtactcaa

SEQ ID NO: 15450 - DNA, 30 bp, Artificial Sequence
  Synthetic oligonucleotide
ccggaataagcgagccagtgaaagagtcaa

SEQ ID NO: 15451 - DNA, 30 bp, Artificial Sequence
  Synthetic oligonucleotide
gcaacggggtgtgagggcatatctaaagaa

SEQ ID NO: 15452 - DNA, 30 bp, Artificial Sequence
  Synthetic oligonucleotide
accgcgggtgactgggcagatggataagaa

SEQ ID NO: 15453 - DNA, 30 bp, Artificial Sequence
  Synthetic oligonucleotide
gctggcgggaggccgttagtcaagtaagaa

SEQ ID NO: 15454 - DNA, 30 bp, Artificial Sequence
  Synthetic oligonucleotide
gcggtgcaagcgagtcagccggtcaacgaa

SEQ ID NO: 15455 - DNA, 30 bp, Artificial Sequence
  Synthetic oligonucleotide
acgagaagggaacaatagtgggcgaacgaa

SEQ ID NO: 15456 - DNA, 30 bp, Artificial Sequence
  Synthetic oligonucleotide
atggcaaaatccggactgcgagttatcgaa

SEQ ID NO: 15457 - DNA, 31 bp, Artificial Sequence
  Synthetic oligonucleotide
cgaaaataatataatgggtgggctgaaggaa

SEQ ID NO: 15458 - DNA, 30 bp, Artificial Sequence
  Synthetic oligonucleotide
gcgtgaacctcaaacaggtactcccaggaa

SEQ ID NO: 15459 - DNA, 30 bp, Artificial Sequence
  Synthetic oligonucleotide
tagcaagggacaggtaaaagatagcaggaa

SEQ ID NO: 15460 - DNA, 30 bp, Artificial Sequence
  Synthetic oligonucleotide
cgaaatctggaacctggctccgaatcggaa

SEQ ID NO: 15461 - DNA, 30 bp, Artificial Sequence
  Synthetic oligonucleotide
acacgcaagtcagcacggagcgggtgggaa

SEQ ID NO: 15462 - DNA, 30 bp, Artificial Sequence
  Synthetic oligonucleotide
tcgatgacggcgatcaggggatcaatggaa

SEQ ID NO: 15463 - DNA, 30 bp, Artificial Sequence
  Synthetic oligonucleotide
catcacaagccacctgcgcccaaacatgaa

SEQ ID NO: 15464 - DNA, 30 bp, Artificial Sequence
  Synthetic oligonucleotide
aacgtgcatcggtacaggagaacggaataa

SEQ ID NO: 15465 - DNA, 30 bp, Artificial Sequence
  Synthetic oligonucleotide
cggacaagacgaagagagactcggcgttaa

SEQ ID NO: 15466 - DNA, 30 bp, Artificial Sequence
  Synthetic oligonucleotide
actgattgagaataagaggaagaccaaaca

SEQ ID NO: 15467 - DNA, 30 bp, Artificial Sequence
  Synthetic oligonucleotide
acaagcagagccctggaaggatgtacaaca

SEQ ID NO: 15468 - DNA, 30 bp, Artificial Sequence
  Synthetic oligonucleotide
taagcaacaaaaagctgactggacagaaca

SEQ ID NO: 15469 - DNA, 30 bp, Artificial Sequence
  Synthetic oligonucleotide
cctagaggtgacagagcaagaaccaacaca

SEQ ID NO: 15470 - DNA, 30 bp, Artificial Sequence
  Synthetic oligonucleotide
gcgataaacaggcgactcacagcacacaca

SEQ ID NO: 15471 - DNA, 30 bp, Artificial Sequence
  Synthetic oligonucleotide
actacgtaaaagagcgggtacataacgaca

SEQ ID NO: 15472 - DNA, 30 bp, Artificial Sequence
  Synthetic oligonucleotide
ggacagtacggatagcgtgagagcactaca

SEQ ID NO: 15473 - DNA, 30 bp, Artificial Sequence
  Synthetic oligonucleotide
gtaggaattggagagggtatgcacattaca

SEQ ID NO: 15474 - DNA, 30 bp, Artificial Sequence
  Synthetic oligonucleotide
agctaacgtggcagtcagcgacgagaacca

SEQ ID NO: 15475 - DNA, 30 bp, Artificial Sequence
  Synthetic oligonucleotide
cacattgcagaaccaaaacacgatcagcca

SEQ ID NO: 15476 - DNA, 30 bp, Artificial Sequence
  Synthetic oligonucleotide
tcgagaatgtcatctaagcgtcctcagcca

SEQ ID NO: 15477 - DNA, 30 bp, Artificial Sequence
  Synthetic oligonucleotide
tagatgtcgagcataaaggaagggccagca

SEQ ID NO: 15478 - DNA, 30 bp, Artificial Sequence
  Synthetic oligonucleotide
cgggccaagtacgcaaaagcggtgcgagca

SEQ ID NO: 15479 - DNA, 30 bp, Artificial Sequence
  Synthetic oligonucleotide
ccggagtaggcgaatgtaaacaatcgagca

SEQ ID NO: 15480 - DNA, 30 bp, Artificial Sequence
  Synthetic oligonucleotide
cacgtctgctaggtcaaaaacaaggtagca

SEQ ID NO: 15481 - DNA, 31 bp, Artificial Sequence
  Synthetic oligonucleotide
ggccgggaatataagaaaataaattgtagca

SEQ ID NO: 15482 - DNA, 30 bp, Artificial Sequence
  Synthetic oligonucleotide
cgacgtatagtagatgattgaagcttagca

SEQ ID NO: 15483 - DNA, 30 bp, Artificial Sequence
  Synthetic oligonucleotide
aggttgtccgaaggcgagtccaggagcgca

SEQ ID NO: 15484 - DNA, 30 bp, Artificial Sequence
  Synthetic oligonucleotide
acgcgccagcgcacctaagagtggctcgca

SEQ ID NO: 15485 - DNA, 30 bp, Artificial Sequence
  Synthetic oligonucleotide
ccgaaacaagcaactatataaaggggggca

SEQ ID NO: 15486 - DNA, 30 bp, Artificial Sequence
  Synthetic oligonucleotide
acaaagcgcgaaagtgctgggggaatggca

SEQ ID NO: 15487 - DNA, 30 bp, Artificial Sequence
  Synthetic oligonucleotide
gagcccaacacctgagggagatcgatggca

SEQ ID NO: 15488 - DNA, 30 bp, Artificial Sequence
  Synthetic oligonucleotide
acgatggatggaaatatacgtgcgcgtgca

SEQ ID NO: 15489 - DNA, 30 bp, Artificial Sequence
  Synthetic oligonucleotide
gtaaggaaccagtgaacataccaaacatca

SEQ ID NO: 15490 - DNA, 30 bp, Artificial Sequence
  Synthetic oligonucleotide
tcaaggacaatgggggaaaaggtgacatca

SEQ ID NO: 15491 - DNA, 30 bp, Artificial Sequence
  Synthetic oligonucleotide
ggtgaaccagataaggtagagtgggtatca

SEQ ID NO: 15492 - DNA, 30 bp, Artificial Sequence
  Synthetic oligonucleotide
tcgaaacggatggtcgtggaacaagcctca

SEQ ID NO: 15493 - DNA, 30 bp, Artificial Sequence
  Synthetic oligonucleotide
cgctcaacgtagcgaaaaccccatccaaga

SEQ ID NO: 15494 - DNA, 30 bp, Artificial Sequence
  Synthetic oligonucleotide
ccgtcgaaggtgtgatcagcgtactcaaga

SEQ ID NO: 15495 - DNA, 30 bp, Artificial Sequence
  Synthetic oligonucleotide
ccacagtcgcatagaagaaaggtgggaaga

SEQ ID NO: 15496 - DNA, 30 bp, Artificial Sequence
  Synthetic oligonucleotide
aggattcatcatcagaacaggaggataaga

SEQ ID NO: 15497 - DNA, 30 bp, Artificial Sequence
  Synthetic oligonucleotide
gatgccgtaacggcaaaacacagcctaaga

SEQ ID NO: 15498 - DNA, 30 bp, Artificial Sequence
  Synthetic oligonucleotide
ttacgtgaccgaacacacacagcgaacaga

SEQ ID NO: 15499 - DNA, 30 bp, Artificial Sequence
  Synthetic oligonucleotide
gcgtatgagatatcaggtgcgcggaacaga

SEQ ID NO: 15500 - DNA, 30 bp, Artificial Sequence
  Synthetic oligonucleotide
cgacatacactaacgtagagcgacgacaga

SEQ ID NO: 15501 - DNA, 30 bp, Artificial Sequence
  Synthetic oligonucleotide
gcaaggcgcggaataaactcggtgaccaga

SEQ ID NO: 15502 - DNA, 30 bp, Artificial Sequence
  Synthetic oligonucleotide
actggtcagggaataagattacggcccaga

SEQ ID NO: 15503 - DNA, 30 bp, Artificial Sequence
  Synthetic oligonucleotide
caacatcgactaaggcgggaacatgtcaga

SEQ ID NO: 15504 - DNA, 30 bp, Artificial Sequence
  Synthetic oligonucleotide
gatgctggaaaacgagggggtattgtcaga

SEQ ID NO: 15505 - DNA, 30 bp, Artificial Sequence
  Synthetic oligonucleotide
gcacaagcatcggacgagtaacgaaagaga

SEQ ID NO: 15506 - DNA, 30 bp, Artificial Sequence
  Synthetic oligonucleotide
agacccaaccgcaccaaattagtacagaga

SEQ ID NO: 15507 - DNA, 30 bp, Artificial Sequence
  Synthetic oligonucleotide
tggtgggtaggacatatttcaaagcagaga

SEQ ID NO: 15508 - DNA, 30 bp, Artificial Sequence
  Synthetic oligonucleotide
atgcaactgagccgtgtcaacccaaggaga

SEQ ID NO: 15509 - DNA, 30 bp, Artificial Sequence
  Synthetic oligonucleotide
tgcgggagtgatagatcaaccagagggaga

SEQ ID NO: 15510 - DNA, 30 bp, Artificial Sequence
  Synthetic oligonucleotide
cgatcagggtgcatgagttgagcaaataga

SEQ ID NO: 15511 - DNA, 30 bp, Artificial Sequence
  Synthetic oligonucleotide
gctagacaggggaacatattgcgtagtaga

SEQ ID NO: 15512 - DNA, 30 bp, Artificial Sequence
  Synthetic oligonucleotide
agggtaggaaaaactactagcattgtacga

SEQ ID NO: 15513 - DNA, 30 bp, Artificial Sequence
  Synthetic oligonucleotide
cgagggggcatagactaattttcgagccga

SEQ ID NO: 15514 - DNA, 30 bp, Artificial Sequence
  Synthetic oligonucleotide
cccaggcaataagggaaaacagtgctgcga

SEQ ID NO: 15515 - DNA, 31 bp, Artificial Sequence
  Synthetic oligonucleotide
gctgggggagaattcaaatattggagtgcga

SEQ ID NO: 15516 - DNA, 30 bp, Artificial Sequence
  Synthetic oligonucleotide
tagataggatcaaggcaagaaggtgatcga

SEQ ID NO: 15517 - DNA, 30 bp, Artificial Sequence
  Synthetic oligonucleotide
tcgaccgaacaaagccagcgtaaatatcga

SEQ ID NO: 15518 - DNA, 30 bp, Artificial Sequence
  Synthetic oligonucleotide
agagggcgtcgattgcgcaaggtaactcga

SEQ ID NO: 15519 - DNA, 30 bp, Artificial Sequence
  Synthetic oligonucleotide
agtaatcataacagagtgctagagtctcga

SEQ ID NO: 15520 - DNA, 30 bp, Artificial Sequence
  Synthetic oligonucleotide
acaaggaagccgtcgggcaaaattggtcga

SEQ ID NO: 15521 - DNA, 30 bp, Artificial Sequence
  Synthetic oligonucleotide
agcgtatggcggcgaagtacttagtaagga

SEQ ID NO: 15522 - DNA, 30 bp, Artificial Sequence
  Synthetic oligonucleotide
cgtgcactaatcaaaacgtatgatatagga

SEQ ID NO: 15523 - DNA, 30 bp, Artificial Sequence
  Synthetic oligonucleotide
atcgtacaagacaagccccaacctaccgga

SEQ ID NO: 15524 - DNA, 30 bp, Artificial Sequence
  Synthetic oligonucleotide
gcatagactcggaacatagggagtagcgga

SEQ ID NO: 15525 - DNA, 30 bp, Artificial Sequence
  Synthetic oligonucleotide
acggagggtctcaagttataacggctcgga

SEQ ID NO: 15526 - DNA, 30 bp, Artificial Sequence
  Synthetic oligonucleotide
gtgagcaaagtcaactctaaacggttcgga

SEQ ID NO: 15527 - DNA, 30 bp, Artificial Sequence
  Synthetic oligonucleotide
aatcgaagaatagattgagtcgcaaaggga

SEQ ID NO: 15528 - DNA, 30 bp, Artificial Sequence
  Synthetic oligonucleotide
caaacgacgatacggaggtgggacaaggga

SEQ ID NO: 15529 - DNA, 30 bp, Artificial Sequence
  Synthetic oligonucleotide
cggactacatgatgtatacagtgagcggga

SEQ ID NO: 15530 - DNA, 40 bp, Artificial Sequence
  Synthetic oligonucleotide
aagataatacattcatggtatggtcggggatcagggggga

SEQ ID NO: 15531 - DNA, 30 bp, Artificial Sequence
  Synthetic oligonucleotide
agtcacggaagcaacgatagggtgactgga

SEQ ID NO: 15532 - DNA, 30 bp, Artificial Sequence
  Synthetic oligonucleotide
tgcacagttaagcaggaagataagggtgga

SEQ ID NO: 15533 - DNA, 30 bp, Artificial Sequence
  Synthetic oligonucleotide
gcgaacggtgagttgtaaagcgaataatga

SEQ ID NO: 15534 - DNA, 30 bp, Artificial Sequence
  Synthetic oligonucleotide
agggacatccgaactgcaataacatggtga

SEQ ID NO: 15535 - DNA, 30 bp, Artificial Sequence
  Synthetic oligonucleotide
tcgaaaaagctgtcagtggaacggaattga

SEQ ID NO: 15536 - DNA, 30 bp, Artificial Sequence
  Synthetic oligonucleotide
acaacctgcagatattgggaaatcaagata

SEQ ID NO: 15537 - DNA, 30 bp, Artificial Sequence
  Synthetic oligonucleotide
acatgtgcaccacggaatagcggacagata

SEQ ID NO: 15538 - DNA, 30 bp, Artificial Sequence
  Synthetic oligonucleotide
cactagtgagcagggggggtagcaatgata

SEQ ID NO: 15539 - DNA, 30 bp, Artificial Sequence
  Synthetic oligonucleotide
gagcttggagataaagtagtaatgggacta

SEQ ID NO: 15540 - DNA, 30 bp, Artificial Sequence
  Synthetic oligonucleotide
ggacaaaacaaccaacgagcatctcaccta

SEQ ID NO: 15541 - DNA, 30 bp, Artificial Sequence
  Synthetic oligonucleotide
gcgagactctgaaaccgataacgactccta

SEQ ID NO: 15542 - DNA, 31 bp, Artificial Sequence
  Synthetic oligonucleotide
caacgactcggggaccgtaggaaatacgcta

SEQ ID NO: 15543 - DNA, 30 bp, Artificial Sequence
  Synthetic oligonucleotide
aggaatatacagagtgtaataagcagtcta

SEQ ID NO: 15544 - DNA, 30 bp, Artificial Sequence
  Synthetic oligonucleotide
ttagcgcccaacgtagaggtagaaagagta

SEQ ID NO: 15545 - DNA, 30 bp, Artificial Sequence
  Synthetic oligonucleotide
cgtgcccacgggactcgcgttcatggagta

SEQ ID NO: 15546 - DNA, 30 bp, Artificial Sequence
  Synthetic oligonucleotide
caggtaacgagaggggacgggtacaacgta

SEQ ID NO: 15547 - DNA, 30 bp, Artificial Sequence
  Synthetic oligonucleotide
ggagcgcgaattcaccatctaaagaacgta

SEQ ID NO: 15548 - DNA, 30 bp, Artificial Sequence
  Synthetic oligonucleotide
caacgcgacagagctagggttacggacgta

SEQ ID NO: 15549 - DNA, 30 bp, Artificial Sequence
  Synthetic oligonucleotide
cgcacgggccaacaatgtacatttagcgta

SEQ ID NO: 15550 - DNA, 30 bp, Artificial Sequence
  Synthetic oligonucleotide
tagacagcggaggtgaggactcgcaaggta

SEQ ID NO: 15551 - DNA, 30 bp, Artificial Sequence
  Synthetic oligonucleotide
aggacacctgcgagaaagatcatattggta

SEQ ID NO: 15552 - DNA, 30 bp, Artificial Sequence
  Synthetic oligonucleotide
caggggccgcacgaaactggatcatatgta

SEQ ID NO: 15553 - DNA, 30 bp, Artificial Sequence
  Synthetic oligonucleotide
gatcggggagatcatggagtgcgagctgta

SEQ ID NO: 15554 - DNA, 30 bp, Artificial Sequence
  Synthetic oligonucleotide
acgctacggcgaagacaaaccgtacttgta

SEQ ID NO: 15555 - DNA, 30 bp, Artificial Sequence
  Synthetic oligonucleotide
tggaacaggagaacgtgaccgggataatta

SEQ ID NO: 15556 - DNA, 30 bp, Artificial Sequence
  Synthetic oligonucleotide
tgaagaccaggtgacgtgggatcggtgtta

SEQ ID NO: 15557 - DNA, 30 bp, Artificial Sequence
  Synthetic oligonucleotide
acgggaggacatcgaccacggaaccattta

SEQ ID NO: 15558 - DNA, 30 bp, Artificial Sequence
  Synthetic oligonucleotide
gacacaggatgcaatgagatacacacaaac

SEQ ID NO: 15559 - DNA, 30 bp, Artificial Sequence
  Synthetic oligonucleotide
caagggaagtgggaagcagaggggacaaac

SEQ ID NO: 15560 - DNA, 30 bp, Artificial Sequence
  Synthetic oligonucleotide
ggacaagaacgtagccaatcaagtccaaac

SEQ ID NO: 15561 - DNA, 30 bp, Artificial Sequence
  Synthetic oligonucleotide
gtgatcgtaaaaaacagaacagatgtaaac

SEQ ID NO: 15562 - DNA, 30 bp, Artificial Sequence
  Synthetic oligonucleotide
cgaaatctggggacgtaatggcaactcaac

SEQ ID NO: 15563 - DNA, 30 bp, Artificial Sequence
  Synthetic oligonucleotide
agcttggccaagggaacgaactcgactaac

SEQ ID NO: 15564 - DNA, 30 bp, Artificial Sequence
  Synthetic oligonucleotide
aggcgggggaccataaactattcaagacac

SEQ ID NO: 15565 - DNA, 30 bp, Artificial Sequence
  Synthetic oligonucleotide
catcgagacagtaggtttcaaaagtagcac

SEQ ID NO: 15566 - DNA, 29 bp, Artificial Sequence
  Synthetic oligonucleotide
tggacaagacggatatatgagtcaggcac

SEQ ID NO: 15567 - DNA, 34 bp, Artificial Sequence
  Synthetic oligonucleotide
gatactagaccaccacgtgtccatgacaaaagac

SEQ ID NO: 15568 - DNA, 30 bp, Artificial Sequence
  Synthetic oligonucleotide
cgccacgaatagccttaaacgggaccagac

SEQ ID NO: 15569 - DNA, 31 bp, Artificial Sequence
  Synthetic oligonucleotide
aacggtatcgctgaataggaagctgcgagac

SEQ ID NO: 15570 - DNA, 30 bp, Artificial Sequence
  Synthetic oligonucleotide
caaggctaggcttagaccttaagagcggac

SEQ ID NO: 15571 - DNA, 30 bp, Artificial Sequence
  Synthetic oligonucleotide
gggggtcagaaagacaaaccgtgaaatgac

SEQ ID NO: 15572 - DNA, 30 bp, Artificial Sequence
  Synthetic oligonucleotide
ggaggcggcccaagaactgcggcagatgac

SEQ ID NO: 15573 - DNA, 30 bp, Artificial Sequence
  Synthetic oligonucleotide
gacaacagaaacaaattgattacatctgac

SEQ ID NO: 15574 - DNA, 30 bp, Artificial Sequence
  Synthetic oligonucleotide
gtacgtagaaaagctgggcagggaacatac

SEQ ID NO: 15575 - DNA, 30 bp, Artificial Sequence
  Synthetic oligonucleotide
cacgagaacggttcatcgagttgacgatac

SEQ ID NO: 15576 - DNA, 30 bp, Artificial Sequence
  Synthetic oligonucleotide
acgagtcacggatacccagatcgccactac

SEQ ID NO: 15577 - DNA, 30 bp, Artificial Sequence
  Synthetic oligonucleotide
ggtcaagcatacgaagtgaagtgagtgtac

SEQ ID NO: 15578 - DNA, 30 bp, Artificial Sequence
  Synthetic oligonucleotide
acaccggggaccaaactgaagtgaacaacc

SEQ ID NO: 15579 - DNA, 30 bp, Artificial Sequence
  Synthetic oligonucleotide
agggcgaagaacaacatgaaagtgtgcacc

SEQ ID NO: 15580 - DNA, 30 bp, Artificial Sequence
  Synthetic oligonucleotide
ccgaggagggcaacccaaaccacgaggacc

SEQ ID NO: 15581 - DNA, 30 bp, Artificial Sequence
  Synthetic oligonucleotide
ggcgaacgagttgaatacgaagaactgacc

SEQ ID NO: 15582 - DNA, 30 bp, Artificial Sequence
  Synthetic oligonucleotide
gaggcgagagtgaaacaccaaccagagccc

SEQ ID NO: 15583 - DNA, 30 bp, Artificial Sequence
  Synthetic oligonucleotide
agggagaggatggggctccacagctgtgcc

SEQ ID NO: 15584 - DNA, 30 bp, Artificial Sequence
  Synthetic oligonucleotide
cgatccacagattagagagccagacaatcc

SEQ ID NO: 15585 - DNA, 30 bp, Artificial Sequence
  Synthetic oligonucleotide
aggaaacgtcataaaagaacacgcgcctcc

SEQ ID NO: 15586 - DNA, 30 bp, Artificial Sequence
  Synthetic oligonucleotide
acagggcggaggcgatcaagataggcgtcc

SEQ ID NO: 15587 - DNA, 30 bp, Artificial Sequence
  Synthetic oligonucleotide
ggtaggccgaattaagaggacagaatgtcc

SEQ ID NO: 15588 - DNA, 30 bp, Artificial Sequence
  Synthetic oligonucleotide
ggcgaacaatcccccccgagtaacgaaagc

SEQ ID NO: 15589 - DNA, 30 bp, Artificial Sequence
  Synthetic oligonucleotide
gggaagatgatgtgatacgagtagacaagc

SEQ ID NO: 15590 - DNA, 30 bp, Artificial Sequence
  Synthetic oligonucleotide
aggaccgggaattaagcatcaaaatgcagc

SEQ ID NO: 15591 - DNA, 30 bp, Artificial Sequence
  Synthetic oligonucleotide
ggagaacaaagaaacatcaaacggaagagc

SEQ ID NO: 15592 - DNA, 30 bp, Artificial Sequence
  Synthetic oligonucleotide
caaggccaagtaaaaacgagaagatggagc

SEQ ID NO: 15593 - DNA, 30 bp, Artificial Sequence
  Synthetic oligonucleotide
cataacacgaacagatctgcccgaggtagc

SEQ ID NO: 15594 - DNA, 30 bp, Artificial Sequence
  Synthetic oligonucleotide
gcccaaacagccaagataagagagtgtagc

SEQ ID NO: 15595 - DNA, 30 bp, Artificial Sequence
  Synthetic oligonucleotide
cggaatagaaagcgaatgtatgaaatacgc

SEQ ID NO: 15596 - DNA, 30 bp, Artificial Sequence
  Synthetic oligonucleotide
cgtcaagataccgaggaaggagcaggccgc

SEQ ID NO: 15597 - DNA, 30 bp, Artificial Sequence
  Synthetic oligonucleotide
ttgtgatggagacaatagattgaatcgcgc

SEQ ID NO: 15598 - DNA, 30 bp, Artificial Sequence
  Synthetic oligonucleotide
tgaagacatcgcatcgtgacgccccaaggc

SEQ ID NO: 15599 - DNA, 30 bp, Artificial Sequence
  Synthetic oligonucleotide
agtgccaactagaagtgtgagggcacaggc

SEQ ID NO: 15600 - DNA, 30 bp, Artificial Sequence
  Synthetic oligonucleotide
caatatcaggggaggcgatgagaccgaggc

SEQ ID NO: 15601 - DNA, 30 bp, Artificial Sequence
  Synthetic oligonucleotide
tcggacaatagtaaagtgggccttaccggc

SEQ ID NO: 15602 - DNA, 30 bp, Artificial Sequence
  Synthetic oligonucleotide
caacagagattaggcgcagaatcgtgcggc

SEQ ID NO: 15603 - DNA, 30 bp, Artificial Sequence
  Synthetic oligonucleotide
ccgcaagaaaaatgtacaagaattccgggc

SEQ ID NO: 15604 - DNA, 30 bp, Artificial Sequence
  Synthetic oligonucleotide
gaaggaaggataaattgcaaaacgcgtggc

SEQ ID NO: 15605 - DNA, 30 bp, Artificial Sequence
  Synthetic oligonucleotide
tacgtaaacgaaattgaagccgatcttggc

SEQ ID NO: 15606 - DNA, 30 bp, Artificial Sequence
  Synthetic oligonucleotide
aaggagatacgatgttgcgactgagttggc

SEQ ID NO: 15607 - DNA, 30 bp, Artificial Sequence
  Synthetic oligonucleotide
tcgtgcaatagggaaagacgaactgactgc

SEQ ID NO: 15608 - DNA, 30 bp, Artificial Sequence
  Synthetic oligonucleotide
gcgataagcaagtcagatcgagggcagtgc

SEQ ID NO: 15609 - DNA, 30 bp, Artificial Sequence
  Synthetic oligonucleotide
cccgtcaaggaaggggtgatgtgagagtgc

SEQ ID NO: 15610 - DNA, 30 bp, Artificial Sequence
  Synthetic oligonucleotide
cgatggcaatcaaaaaggacgaaccattgc

SEQ ID NO: 15611 - DNA, 30 bp, Artificial Sequence
  Synthetic oligonucleotide
gcaccacgtggggacaagatgaatagcatc

SEQ ID NO: 15612 - DNA, 30 bp, Artificial Sequence
  Synthetic oligonucleotide
cgaagaatataccgagggtgctagaggctc

SEQ ID NO: 15613 - DNA, 30 bp, Artificial Sequence
  Synthetic oligonucleotide
ccaatccacaggaagcataacaagaaagtc

SEQ ID NO: 15614 - DNA, 30 bp, Artificial Sequence
  Synthetic oligonucleotide
acagagatgtaaatgccgtagacaagagtc

SEQ ID NO: 15615 - DNA, 30 bp, Artificial Sequence
  Synthetic oligonucleotide
tgaacgaaagatgaaagagcactcgacgtc

SEQ ID NO: 15616 - DNA, 30 bp, Artificial Sequence
  Synthetic oligonucleotide
tgcggggacagaagacaaagcacgtatgtc

SEQ ID NO: 15617 - DNA, 30 bp, Artificial Sequence
  Synthetic oligonucleotide
cacgaacgagttctacaaaatgggcgattc

SEQ ID NO: 15618 - DNA, 30 bp, Artificial Sequence
  Synthetic oligonucleotide
cagaaagctaactacaaaccaagctcgttc

SEQ ID NO: 15619 - DNA, 30 bp, Artificial Sequence
  Synthetic oligonucleotide
acagatggaggggcaatgggttcgcaaaag

SEQ ID NO: 15620 - DNA, 30 bp, Artificial Sequence
  Synthetic oligonucleotide
agaatgtgagccacaaaaaggccataaaag

SEQ ID NO: 15621 - DNA, 30 bp, Artificial Sequence
  Synthetic oligonucleotide
caaggacgaattcgtgcatctaaaccaaag

SEQ ID NO: 15622 - DNA, 30 bp, Artificial Sequence
  Synthetic oligonucleotide
agcgtagggggaacagaattaatcccaaag

SEQ ID NO: 15623 - DNA, 30 bp, Artificial Sequence
  Synthetic oligonucleotide
gatcggaacgtgggtgggatatagcgaaag

SEQ ID NO: 15624 - DNA, 30 bp, Artificial Sequence
  Synthetic oligonucleotide
ggagaagtcgcaattatagcgatggccaag

SEQ ID NO: 15625 - DNA, 30 bp, Artificial Sequence
  Synthetic oligonucleotide
gcgtaaggtaataggtcggccacaagcaag

SEQ ID NO: 15626 - DNA, 30 bp, Artificial Sequence
  Synthetic oligonucleotide
ggctgcgaaggagggctggccaagtgcaag

SEQ ID NO: 15627 - DNA, 30 bp, Artificial Sequence
  Synthetic oligonucleotide
taccgaaaagagtaagtcagtgattgcaag

SEQ ID NO: 15628 - DNA, 30 bp, Artificial Sequence
  Synthetic oligonucleotide
agaggtggaacgacaagacccgtcatcaag

SEQ ID NO: 15629 - DNA, 30 bp, Artificial Sequence
  Synthetic oligonucleotide
agtgtaaggagtccaaaagatgggatcaag

SEQ ID NO: 15630 - DNA, 30 bp, Artificial Sequence
  Synthetic oligonucleotide
taggaacgaaccgagggcaaacctatcaag

SEQ ID NO: 15631 - DNA, 30 bp, Artificial Sequence
  Synthetic oligonucleotide
taggcagaggtgggtgtgagaatcctcaag

SEQ ID NO: 15632 - DNA, 30 bp, Artificial Sequence
  Synthetic oligonucleotide
cgatgcgaccgcacccactaacgacagaag

SEQ ID NO: 15633 - DNA, 30 bp, Artificial Sequence
  Synthetic oligonucleotide
aacgccgcagattaaaacgcgggaacgaag

SEQ ID NO: 15634 - DNA, 30 bp, Artificial Sequence
  Synthetic oligonucleotide
tgccggaggagaataccagcaaccccgaag

SEQ ID NO: 15635 - DNA, 29 bp, Artificial Sequence
  Synthetic oligonucleotide
taagatcacgggaggcccactaggcgaag

SEQ ID NO: 15636 - DNA, 30 bp, Artificial Sequence
  Synthetic oligonucleotide
aggggcggccagaataacagcgagcggaag

SEQ ID NO: 15637 - DNA, 30 bp, Artificial Sequence
  Synthetic oligonucleotide
ttaaccacaaccatgcgaagccgagataag

SEQ ID NO: 15638 - DNA, 30 bp, Artificial Sequence
  Synthetic oligonucleotide
gtcgatcagaaagagaaaacattcactaag

SEQ ID NO: 15639 - DNA, 30 bp, Artificial Sequence
  Synthetic oligonucleotide
acacgtcatgtgctagaatagaggggtaag

SEQ ID NO: 15640 - DNA, 30 bp, Artificial Sequence
  Synthetic oligonucleotide
cgtagttcagcaggggagagctcgtgtaag

SEQ ID NO: 15641 - DNA, 30 bp, Artificial Sequence
  Synthetic oligonucleotide
tacgagaggctagcgacatagtgaattaag

SEQ ID NO: 15642 - DNA, 30 bp, Artificial Sequence
  Synthetic oligonucleotide
acgcaacttgggtaggcaaatttgaaacag

SEQ ID NO: 15643 - DNA, 30 bp, Artificial Sequence
  Synthetic oligonucleotide
aaacaacagtagagagccgatacacgacag

SEQ ID NO: 15644 - DNA, 30 bp, Artificial Sequence
  Synthetic oligonucleotide
tgggggaagacacaagaacggatattacag

SEQ ID NO: 15645 - DNA, 30 bp, Artificial Sequence
  Synthetic oligonucleotide
catcgggactatcgtgggaaaaagcaccag

SEQ ID NO: 15646 - DNA, 30 bp, Artificial Sequence
  Synthetic oligonucleotide
acgtggctcagacccgtacacacgtcccag

SEQ ID NO: 15647 - DNA, 30 bp, Artificial Sequence
  Synthetic oligonucleotide
aaggacgagggttaaaacgtggtgctccag

SEQ ID NO: 15648 - DNA, 30 bp, Artificial Sequence
  Synthetic oligonucleotide
gggaatcgacaatatctagaccaatcgcag

SEQ ID NO: 15649 - DNA, 30 bp, Artificial Sequence
  Synthetic oligonucleotide
cgacggcaggattcaggaggtgaaaggcag

SEQ ID NO: 15650 - DNA, 30 bp, Artificial Sequence
  Synthetic oligonucleotide
caagacaagagatctctctagccccctcag

SEQ ID NO: 15651 - DNA, 30 bp, Artificial Sequence
  Synthetic oligonucleotide
cgcccaagagcacacggtaccagtcaagag

SEQ ID NO: 15652 - DNA, 30 bp, Artificial Sequence
  Synthetic oligonucleotide
cagctgtagaggtcccgagggcagtaagag

SEQ ID NO: 15653 - DNA, 30 bp, Artificial Sequence
  Synthetic oligonucleotide
ggcgagacggagattagttacagagcagag

SEQ ID NO: 15654 - DNA, 30 bp, Artificial Sequence
  Synthetic oligonucleotide
gtgagcaccagacatgtcataaccggagag

SEQ ID NO: 15655 - DNA, 30 bp, Artificial Sequence
  Synthetic oligonucleotide
cgcgcaggttacctaagcaaagtccacgag

SEQ ID NO: 15656 - DNA, 30 bp, Artificial Sequence
  Synthetic oligonucleotide
atggactaaaacaatcattggggcgacgag

SEQ ID NO: 15657 - DNA, 30 bp, Artificial Sequence
  Synthetic oligonucleotide
caagaaggattacgggcgaaacactgcgag

SEQ ID NO: 15658 - DNA, 30 bp, Artificial Sequence
  Synthetic oligonucleotide
ggcgcgacaaataactggaaagttcaggag

SEQ ID NO: 15659 - DNA, 30 bp, Artificial Sequence
  Synthetic oligonucleotide
gcagggcgaacggatcctggtaagtcggag

SEQ ID NO: 15660 - DNA, 30 bp, Artificial Sequence
  Synthetic oligonucleotide
gaaggctagcgaccaagagatctttcggag

SEQ ID NO: 15661 - DNA, 30 bp, Artificial Sequence
  Synthetic oligonucleotide
gctgaggtgatgagtaaatgccggagggag

SEQ ID NO: 15662 - DNA, 30 bp, Artificial Sequence
  Synthetic oligonucleotide
taacacaaattcaaaagacagtcgcatgag

SEQ ID NO: 15663 - DNA, 30 bp, Artificial Sequence
  Synthetic oligonucleotide
ggacgtgggacgacttgtcagggtgctgag

SEQ ID NO: 15664 - DNA, 30 bp, Artificial Sequence
  Synthetic oligonucleotide
ctggagaggacaccggatctgagcgaatag

SEQ ID NO: 15665 - DNA, 30 bp, Artificial Sequence
  Synthetic oligonucleotide
tagggccaagtgggtggtatactcgaatag

SEQ ID NO: 15666 - DNA, 31 bp, Artificial Sequence
  Synthetic oligonucleotide
actaagcagcgacaatcacaggataacatag

SEQ ID NO: 15667 - DNA, 30 bp, Artificial Sequence
  Synthetic oligonucleotide
aaggtcgaggcgccagataagcggtcatag

SEQ ID NO: 15668 - DNA, 30 bp, Artificial Sequence
  Synthetic oligonucleotide
ggccgaagtagatacgataagtagagctag

SEQ ID NO: 15669 - DNA, 30 bp, Artificial Sequence
  Synthetic oligonucleotide
agggccgaaaactgaacttatgggaagtag

SEQ ID NO: 15670 - DNA, 30 bp, Artificial Sequence
  Synthetic oligonucleotide
ggggaaatggcataagttttcaaacagtag

SEQ ID NO: 15671 - DNA, 30 bp, Artificial Sequence
  Synthetic oligonucleotide
tacaaccgccgacaaccggccaagcagtag

SEQ ID NO: 15672 - DNA, 30 bp, Artificial Sequence
  Synthetic oligonucleotide
agagactgtacaggctaagtatcctagtag

SEQ ID NO: 15673 - DNA, 30 bp, Artificial Sequence
  Synthetic oligonucleotide
aaacgaaggaatcggcggctaaggcattag

SEQ ID NO: 15674 - DNA, 30 bp, Artificial Sequence
  Synthetic oligonucleotide
gagggcagtaaaaaaatttcacaagcttag

SEQ ID NO: 15675 - DNA, 30 bp, Artificial Sequence
  Synthetic oligonucleotide
tgaaagagttatatagaagagaacgcttag

SEQ ID NO: 15676 - DNA, 30 bp, Artificial Sequence
  Synthetic oligonucleotide
cgataaggacaaaatactcagtggagttag

SEQ ID NO: 15677 - DNA, 30 bp, Artificial Sequence
  Synthetic oligonucleotide
gaggatcctaatccggcgaacgaggaaacg

SEQ ID NO: 15678 - DNA, 30 bp, Artificial Sequence
  Synthetic oligonucleotide
ggaagaatcactcaggggcagaattaaacg

SEQ ID NO: 15679 - DNA, 30 bp, Artificial Sequence
  Synthetic oligonucleotide
ggaaaggcttcatggagcgaaaagggaacg

SEQ ID NO: 15680 - DNA, 30 bp, Artificial Sequence
  Synthetic oligonucleotide
cagaggatcacaaaagcctaaattggaacg

SEQ ID NO: 15681 - DNA, 30 bp, Artificial Sequence
  Synthetic oligonucleotide
agccaggcggccgaaagaagcccatgaacg

SEQ ID NO: 15682 - DNA, 30 bp, Artificial Sequence
  Synthetic oligonucleotide
taggacatagggaaggcatttaccaacacg

SEQ ID NO: 15683 - DNA, 30 bp, Artificial Sequence
  Synthetic oligonucleotide
cgctaggggcaatgaaacagggattacacg

SEQ ID NO: 15684 - DNA, 30 bp, Artificial Sequence
  Synthetic oligonucleotide
aggtggaaggaggaacagctaagatcgacg

SEQ ID NO: 15685 - DNA, 30 bp, Artificial Sequence
  Synthetic oligonucleotide
acgcggaagtaagaacctgcaggaaatacg

SEQ ID NO: 15686 - DNA, 30 bp, Artificial Sequence
  Synthetic oligonucleotide
cgcgctgattagtccatccgaaagaaaccg

SEQ ID NO: 15687 - DNA, 30 bp, Artificial Sequence
  Synthetic oligonucleotide
gggatggcactccaaaagttgaaagatccg

SEQ ID NO: 15688 - DNA, 30 bp, Artificial Sequence
  Synthetic oligonucleotide
tgggagagagtgtacactatgcaagctccg

SEQ ID NO: 15689 - DNA, 30 bp, Artificial Sequence
  Synthetic oligonucleotide
acgagatgttgggagcgatcttgtgttccg

SEQ ID NO: 15690 - DNA, 30 bp, Artificial Sequence
  Synthetic oligonucleotide
aaaaaccaaactacgggacaggtaagagcg

SEQ ID NO: 15691 - DNA, 30 bp, Artificial Sequence
  Synthetic oligonucleotide
gatcgacaataccaatcaatgaacatagcg

SEQ ID NO: 15692 - DNA, 30 bp, Artificial Sequence
  Synthetic oligonucleotide
gtgggacattaggcaaaaatagagcacgcg

SEQ ID NO: 15693 - DNA, 30 bp, Artificial Sequence
  Synthetic oligonucleotide
agactcaaataaacaggaccgataagggcg

SEQ ID NO: 15694 - DNA, 30 bp, Artificial Sequence
  Synthetic oligonucleotide
gaggataaaggaagttgaggggccaatgcg

SEQ ID NO: 15695 - DNA, 30 bp, Artificial Sequence
  Synthetic oligonucleotide
tggctaacagacaaaaacgtatactctgcg

SEQ ID NO: 15696 - DNA, 30 bp, Artificial Sequence
  Synthetic oligonucleotide
cgtgtaggatgagtgtacgttacctctgcg

SEQ ID NO: 15697 - DNA, 30 bp, Artificial Sequence
  Synthetic oligonucleotide
agtactcgaaggaatacgcaaaggaaatcg

SEQ ID NO: 15698 - DNA, 30 bp, Artificial Sequence
  Synthetic oligonucleotide
cggaatgtggagggtgttgaaatatcatcg

SEQ ID NO: 15699 - DNA, 30 bp, Artificial Sequence
  Synthetic oligonucleotide
tcgcaatacaggggacaatacgtgatatcg

SEQ ID NO: 15700 - DNA, 30 bp, Artificial Sequence
  Synthetic oligonucleotide
cggccgtcactgaatgcgacctagaactcg

SEQ ID NO: 15701 - DNA, 30 bp, Artificial Sequence
  Synthetic oligonucleotide
cgtaaaccccagagatcagtcaaacactcg

SEQ ID NO: 15702 - DNA, 30 bp, Artificial Sequence
  Synthetic oligonucleotide
taaatacgtagaagcaaaattgagcactcg

SEQ ID NO: 15703 - DNA, 30 bp, Artificial Sequence
  Synthetic oligonucleotide
tcgatgaccaaaacgattaagaaaggctcg

SEQ ID NO: 15704 - DNA, 30 bp, Artificial Sequence
  Synthetic oligonucleotide
ccggacagacgggtatattaactaaagtcg

SEQ ID NO: 15705 - DNA, 30 bp, Artificial Sequence
  Synthetic oligonucleotide
cgaacatgcgctctggaaccaggtcagtcg

SEQ ID NO: 15706 - DNA, 30 bp, Artificial Sequence
  Synthetic oligonucleotide
gaaccaagcaacaagggaaccaagcattcg

SEQ ID NO: 15707 - DNA, 30 bp, Artificial Sequence
  Synthetic oligonucleotide
taggtagaataaagatcaagagtaggttcg

SEQ ID NO: 15708 - DNA, 30 bp, Artificial Sequence
  Synthetic oligonucleotide
acgaaacaattcaataggactcacgcaagg

SEQ ID NO: 15709 - DNA, 30 bp, Artificial Sequence
  Synthetic oligonucleotide
tactcgaatgggactgtaaggcgaagaagg

SEQ ID NO: 15710 - DNA, 30 bp, Artificial Sequence
  Synthetic oligonucleotide
caatagagaagacgggataggaggagaagg

SEQ ID NO: 15711 - DNA, 30 bp, Artificial Sequence
  Synthetic oligonucleotide
accaatgaaaaggaagatcaacgaataagg

SEQ ID NO: 15712 - DNA, 30 bp, Artificial Sequence
  Synthetic oligonucleotide
tgcgacgaggcgaatgtatcgcgattaagg

SEQ ID NO: 15713 - DNA, 30 bp, Artificial Sequence
  Synthetic oligonucleotide
taaggttacccccgaccacacataaacagg

SEQ ID NO: 15714 - DNA, 30 bp, Artificial Sequence
  Synthetic oligonucleotide
ttcgcaaagcgaacacaattaactaacagg

SEQ ID NO: 15715 - DNA, 30 bp, Artificial Sequence
  Synthetic oligonucleotide
agcggaaaaggatctgacatgcgcgacagg

SEQ ID NO: 15716 - DNA, 30 bp, Artificial Sequence
  Synthetic oligonucleotide
caacgtccacgggccacagacaataccagg

SEQ ID NO: 15717 - DNA, 30 bp, Artificial Sequence
  Synthetic oligonucleotide
cgtataggaaagcctggaagcgaaagcagg

SEQ ID NO: 15718 - DNA, 30 bp, Artificial Sequence
  Synthetic oligonucleotide
tcggcacactcgaaatctaacgggggcagg

SEQ ID NO: 15719 - DNA, 30 bp, Artificial Sequence
  Synthetic oligonucleotide
aggacagcggaatctagccgtatgtagagg

SEQ ID NO: 15720 - DNA, 30 bp, Artificial Sequence
  Synthetic oligonucleotide
acctatctcaaagcaaaggagcagacgagg

SEQ ID NO: 15721 - DNA, 30 bp, Artificial Sequence
  Synthetic oligonucleotide
acagtaaagctacgttgcagcgggaggagg

SEQ ID NO: 15722 - DNA, 30 bp, Artificial Sequence
  Synthetic oligonucleotide
ttggaagacgggcgtacgatacagtatagg

SEQ ID NO: 15723 - DNA, 30 bp, Artificial Sequence
  Synthetic oligonucleotide
tcaggcaagacgactcgatagtgaattagg

SEQ ID NO: 15724 - DNA, 30 bp, Artificial Sequence
  Synthetic oligonucleotide
tacggtccaggaagccgtggaaaagctcgg

SEQ ID NO: 15725 - DNA, 30 bp, Artificial Sequence
  Synthetic oligonucleotide
gggaataggactatagcctagataattcgg

SEQ ID NO: 15726 - DNA, 30 bp, Artificial Sequence
  Synthetic oligonucleotide
agggcaataggcagcttgccgcaaaaaggg

SEQ ID NO: 15727 - DNA, 30 bp, Artificial Sequence
  Synthetic oligonucleotide
cgttaggcgaggcttgaccatgagaaaggg

SEQ ID NO: 15728 - DNA, 30 bp, Artificial Sequence
  Synthetic oligonucleotide
tacgtgccagaaatgtgttagccaacaggg

SEQ ID NO: 15729 - DNA, 30 bp, Artificial Sequence
  Synthetic oligonucleotide
acagataggcgactggacgaagatacaggg

SEQ ID NO: 15730 - DNA, 30 bp, Artificial Sequence
  Synthetic oligonucleotide
atgatagggaatggctataactcacgaggg

SEQ ID NO: 15731 - DNA, 30 bp, Artificial Sequence
  Synthetic oligonucleotide
aggtagaagccgtgagtacacgtccgaggg

SEQ ID NO: 15732 - DNA, 30 bp, Artificial Sequence
  Synthetic oligonucleotide
caaccgagaaaaagacttagatcggagggg

SEQ ID NO: 15733 - DNA, 30 bp, Artificial Sequence
  Synthetic oligonucleotide
cacaatggaccgaaaaaggagtcgcttggg

SEQ ID NO: 15734 - DNA, 30 bp, Artificial Sequence
  Synthetic oligonucleotide
aaggcggtaagtaaagggggcttaacatgg

SEQ ID NO: 15735 - DNA, 30 bp, Artificial Sequence
  Synthetic oligonucleotide
atgccaatgtcacaaggaaaataaatatgg

SEQ ID NO: 15736 - DNA, 30 bp, Artificial Sequence
  Synthetic oligonucleotide
agcaggaaacgataaattgcgaaagcctgg

SEQ ID NO: 15737 - DNA, 30 bp, Artificial Sequence
  Synthetic oligonucleotide
cacgtaacatattaagcatgattggtctgg

SEQ ID NO: 15738 - DNA, 30 bp, Artificial Sequence
  Synthetic oligonucleotide
aggctaacaagggccactcgcgaaaagtgg

SEQ ID NO: 15739 - DNA, 30 bp, Artificial Sequence
  Synthetic oligonucleotide
aaggtaaaagcacagagctatatcccgtgg

SEQ ID NO: 15740 - DNA, 30 bp, Artificial Sequence
  Synthetic oligonucleotide
tgggtagggaaaaactcaaagcatagttgg

SEQ ID NO: 15741 - DNA, 30 bp, Artificial Sequence
  Synthetic oligonucleotide
ctaaagtaaactgatcagtcaaacgaaatg

SEQ ID NO: 15742 - DNA, 30 bp, Artificial Sequence
  Synthetic oligonucleotide
agacctaaccgcaccagcgtaacctaaatg

SEQ ID NO: 15743 - DNA, 30 bp, Artificial Sequence
  Synthetic oligonucleotide
agtcgaaatcaaaggggtgcaccactaatg

SEQ ID NO: 15744 - DNA, 30 bp, Artificial Sequence
  Synthetic oligonucleotide
gaaagggaatcatacacggtaaagcacatg

SEQ ID NO: 15745 - DNA, 30 bp, Artificial Sequence
  Synthetic oligonucleotide
gccagtggggagggcacaaatagaagcatg

SEQ ID NO: 15746 - DNA, 30 bp, Artificial Sequence
  Synthetic oligonucleotide
aagacaacgaggacgtacctctatcagatg

SEQ ID NO: 15747 - DNA, 30 bp, Artificial Sequence
  Synthetic oligonucleotide
aggtcgctatgaatagatcgcgttcagatg

SEQ ID NO: 15748 - DNA, 30 bp, Artificial Sequence
  Synthetic oligonucleotide
gtacgagacaagagcaagacagttaggatg

SEQ ID NO: 15749 - DNA, 30 bp, Artificial Sequence
  Synthetic oligonucleotide
ccggggccagatgaacatgaacgtgggatg

SEQ ID NO: 15750 - DNA, 30 bp, Artificial Sequence
  Synthetic oligonucleotide
gggaaaggtaaaagcgtgaccgtttggatg

SEQ ID NO: 15751 - DNA, 30 bp, Artificial Sequence
  Synthetic oligonucleotide
ccataggatggccagggtcgaaagatgatg

SEQ ID NO: 15752 - DNA, 30 bp, Artificial Sequence
  Synthetic oligonucleotide
agtaggaacgtgagatattgagggatgatg

SEQ ID NO: 15753 - DNA, 30 bp, Artificial Sequence
  Synthetic oligonucleotide
acgtatggaatctctgcgtacaccgatatg

SEQ ID NO: 15754 - DNA, 30 bp, Artificial Sequence
  Synthetic oligonucleotide
gcaacatgaacggcacgatgggaaggtatg

SEQ ID NO: 15755 - DNA, 30 bp, Artificial Sequence
  Synthetic oligonucleotide
cactgtaaaagggcgacaataccaggtatg

SEQ ID NO: 15756 - DNA, 30 bp, Artificial Sequence
  Synthetic oligonucleotide
agggagggaaatgagcgaagggtcagactg

SEQ ID NO: 15757 - DNA, 30 bp, Artificial Sequence
  Synthetic oligonucleotide
catggtaataaagaacacgggcaagacctg

SEQ ID NO: 15758 - DNA, 30 bp, Artificial Sequence
  Synthetic oligonucleotide
aacgaagtaagctggaaacagtacaccctg

SEQ ID NO: 15759 - DNA, 30 bp, Artificial Sequence
  Synthetic oligonucleotide
tcgagatggaagggcagttagtcagaagtg

SEQ ID NO: 15760 - DNA, 30 bp, Artificial Sequence
  Synthetic oligonucleotide
tgtaggacaagatagcaaattcacgaagtg

SEQ ID NO: 15761 - DNA, 30 bp, Artificial Sequence
  Synthetic oligonucleotide
ccgacaggcatagacgggaccatgacagtg

SEQ ID NO: 15762 - DNA, 30 bp, Artificial Sequence
  Synthetic oligonucleotide
gggaggcgttttagaggagagattagagtg

SEQ ID NO: 15763 - DNA, 30 bp, Artificial Sequence
  Synthetic oligonucleotide
gatacaacgatactgggagccgaacgagtg

SEQ ID NO: 15764 - DNA, 30 bp, Artificial Sequence
  Synthetic oligonucleotide
cggaaaggccgactcaaatagttggtagtg

SEQ ID NO: 15765 - DNA, 30 bp, Artificial Sequence
  Synthetic oligonucleotide
tggcggaaagagagtcggcgaagtgacgtg

SEQ ID NO: 15766 - DNA, 30 bp, Artificial Sequence
  Synthetic oligonucleotide
aaggataactccactttcgtatgaaccgtg

SEQ ID NO: 15767 - DNA, 30 bp, Artificial Sequence
  Synthetic oligonucleotide
cgagagaagttaggaacatggcgacctgtg

SEQ ID NO: 15768 - DNA, 30 bp, Artificial Sequence
  Synthetic oligonucleotide
tcacagcgtgagaagggagtaagtgttgtg

SEQ ID NO: 15769 - DNA, 30 bp, Artificial Sequence
  Synthetic oligonucleotide
ccggaggggaatgtcgtcgaagagtaattg

SEQ ID NO: 15770 - DNA, 29 bp, Artificial Sequence
  Synthetic oligonucleotide
gacaggagagcaaggcataatgaacattg

SEQ ID NO: 15771 - DNA, 30 bp, Artificial Sequence
  Synthetic oligonucleotide
tcgctagaaaggctagagtgaggaaagttg

SEQ ID NO: 15772 - DNA, 30 bp, Artificial Sequence
  Synthetic oligonucleotide
cgaagcaaagaccgggggaagccatatttg

SEQ ID NO: 15773 - DNA, 30 bp, Artificial Sequence
  Synthetic oligonucleotide
cgtgttgactcgaagagagtgcgatatttg

SEQ ID NO: 15774 - DNA, 30 bp, Artificial Sequence
  Synthetic oligonucleotide
atcaagggcacacaggaagagtgaggtttg

SEQ ID NO: 15775 - DNA, 30 bp, Artificial Sequence
  Synthetic oligonucleotide
ggaacaactggactataacagtgcgtgaat

SEQ ID NO: 15776 - DNA, 30 bp, Artificial Sequence
  Synthetic oligonucleotide
ccgacactagcgtagagataaagacgacat

SEQ ID NO: 15777 - DNA, 30 bp, Artificial Sequence
  Synthetic oligonucleotide
tggccatactacggtccgaagagttgacat

SEQ ID NO: 15778 - DNA, 30 bp, Artificial Sequence
  Synthetic oligonucleotide
gggttacactagagaagaagtaatcagcat

SEQ ID NO: 15779 - DNA, 30 bp, Artificial Sequence
  Synthetic oligonucleotide
cgccgagtagcgagcgtgatgaggtcgcat

SEQ ID NO: 15780 - DNA, 30 bp, Artificial Sequence
  Synthetic oligonucleotide
agggaaacgaatgttgaattcaccgatcat

SEQ ID NO: 15781 - DNA, 30 bp, Artificial Sequence
  Synthetic oligonucleotide
ggctcgcgattacagctaaagagtggtcat

SEQ ID NO: 15782 - DNA, 30 bp, Artificial Sequence
  Synthetic oligonucleotide
cgacactacggacgtctaagaaatgaagat

SEQ ID NO: 15783 - DNA, 30 bp, Artificial Sequence
  Synthetic oligonucleotide
agggaggaccgatccatgtatagtgaagat

SEQ ID NO: 15784 - DNA, 30 bp, Artificial Sequence
  Synthetic oligonucleotide
cgacagagtaacaggaatcgtcccggagat

SEQ ID NO: 15785 - DNA, 30 bp, Artificial Sequence
  Synthetic oligonucleotide
agatggaaaggtgccagcaagtagcaggat

SEQ ID NO: 15786 - DNA, 30 bp, Artificial Sequence
  Synthetic oligonucleotide
acacagggagagatagtggaaaaagttgat

SEQ ID NO: 15787 - DNA, 30 bp, Artificial Sequence
  Synthetic oligonucleotide
gcaagaagaagctagagggcaaggtcaact

SEQ ID NO: 15788 - DNA, 30 bp, Artificial Sequence
  Synthetic oligonucleotide
aagtggaaagaaagagtgtgcatccgaact

SEQ ID NO: 15789 - DNA, 30 bp, Artificial Sequence
  Synthetic oligonucleotide
ggggaactggaaagagggtgttcgaagact

SEQ ID NO: 15790 - DNA, 30 bp, Artificial Sequence
  Synthetic oligonucleotide
cgaaacgacaaaatgagctaacttctacct

SEQ ID NO: 15791 - DNA, 30 bp, Artificial Sequence
  Synthetic oligonucleotide
tcatgaatcgaaatcagagggtccggccct

SEQ ID NO: 15792 - DNA, 30 bp, Artificial Sequence
  Synthetic oligonucleotide
cgagtcgaagatggcatgtggatcaaagct

SEQ ID NO: 15793 - DNA, 30 bp, Artificial Sequence
  Synthetic oligonucleotide
agggtgggagaatgaggtcaaaaattcgct

SEQ ID NO: 15794 - DNA, 30 bp, Artificial Sequence
  Synthetic oligonucleotide
atggtggcgggacgaatagatataaaggct

SEQ ID NO: 15795 - DNA, 30 bp, Artificial Sequence
  Synthetic oligonucleotide
cagagtatcgctaacagacatctggcgtct

SEQ ID NO: 15796 - DNA, 30 bp, Artificial Sequence
  Synthetic oligonucleotide
ggggtcccagacgtgggtcgagcgataagt

SEQ ID NO: 15797 - DNA, 30 bp, Artificial Sequence
  Synthetic oligonucleotide
agtaaaggctgagactacccgagctgcagt

SEQ ID NO: 15798 - DNA, 30 bp, Artificial Sequence
  Synthetic oligonucleotide
gtaacgtgggaggagtatagttcgagtagt

SEQ ID NO: 15799 - DNA, 30 bp, Artificial Sequence
  Synthetic oligonucleotide
tcgtaaaccggggaatgagtgagtaaacgt

SEQ ID NO: 15800 - DNA, 30 bp, Artificial Sequence
  Synthetic oligonucleotide
gggctgatgaataagaaagcacaactccgt

SEQ ID NO: 15801 - DNA, 30 bp, Artificial Sequence
  Synthetic oligonucleotide
tctgggcttatccaccgcgtgacgcctcgt

SEQ ID NO: 15802 - DNA, 30 bp, Artificial Sequence
  Synthetic oligonucleotide
cggaaagtattaattcggtcaaaccagggt

SEQ ID NO: 15803 - DNA, 30 bp, Artificial Sequence
  Synthetic oligonucleotide
tgacgacgaacaattacggggatccagggt

SEQ ID NO: 15804 - DNA, 30 bp, Artificial Sequence
  Synthetic oligonucleotide
gcaaaaaagaaagcgaatgtactgaactgt

SEQ ID NO: 15805 - DNA, 30 bp, Artificial Sequence
  Synthetic oligonucleotide
aggcgatggacaggagatagcccaacttgt

SEQ ID NO: 15806 - DNA, 30 bp, Artificial Sequence
  Synthetic oligonucleotide
ggctggcgaataagctccaatacacacatt

SEQ ID NO: 15807 - DNA, 30 bp, Artificial Sequence
  Synthetic oligonucleotide
gtgagtgacatgagggcgagatgagagatt

SEQ ID NO: 15808 - DNA, 30 bp, Artificial Sequence
  Synthetic oligonucleotide
acacgggcgggagcatatgcaagaggactt

SEQ ID NO: 15809 - DNA, 30 bp, Artificial Sequence
  Synthetic oligonucleotide
cgacaacacgatcaagtcagatttaggctt

SEQ ID NO: 15810 - DNA, 30 bp, Artificial Sequence
  Synthetic oligonucleotide
ggtacaaaagaaaagattagcagcttagtt

SEQ ID NO: 15811 - DNA, 30 bp, Artificial Sequence
  Synthetic oligonucleotide
acgagcatcaaggcaacctctccccaattt

SEQ ID NO: 15812 - DNA, 30 bp, Artificial Sequence
  Synthetic oligonucleotide
ccgaagaacgagcagcacacgctataaaaa

SEQ ID NO: 15813 - DNA, 30 bp, Artificial Sequence
  Synthetic oligonucleotide
cggtccgagcttgcagaaggatcaccaaaa

SEQ ID NO: 15814 - DNA, 30 bp, Artificial Sequence
  Synthetic oligonucleotide
aatggagtatagaaaaacggggcgagaaaa

SEQ ID NO: 15815 - DNA, 30 bp, Artificial Sequence
  Synthetic oligonucleotide
ccggaatagagccctaatagaatcggaaaa

SEQ ID NO: 15816 - DNA, 30 bp, Artificial Sequence
  Synthetic oligonucleotide
ccacacggaagttaacgcgaaacaaacaaa

SEQ ID NO: 15817 - DNA, 30 bp, Artificial Sequence
  Synthetic oligonucleotide
gtctagctgaatacgggagaaatacacaaa

SEQ ID NO: 15818 - DNA, 30 bp, Artificial Sequence
  Synthetic oligonucleotide
acatcgttacactagatattccgcgagaaa

SEQ ID NO: 15819 - DNA, 30 bp, Artificial Sequence
  Synthetic oligonucleotide
acgttcgaagcgcaagtgaaaggtgagaaa

SEQ ID NO: 15820 - DNA, 30 bp, Artificial Sequence
  Synthetic oligonucleotide
gtccacaaaatgagtaagtgggaaacgaaa

SEQ ID NO: 15821 - DNA, 30 bp, Artificial Sequence
  Synthetic oligonucleotide
acaggatcaatggaatatccaccaccgaaa

SEQ ID NO: 15822 - DNA, 30 bp, Artificial Sequence
  Synthetic oligonucleotide
ccgtgaaaatacacgggaaatccagggaaa

SEQ ID NO: 15823 - DNA, 30 bp, Artificial Sequence
  Synthetic oligonucleotide
cacaggtgaagaattctgtgcgaaagtaaa

SEQ ID NO: 15824 - DNA, 30 bp, Artificial Sequence
  Synthetic oligonucleotide
ggaaccgactaagaacacgaagttcaacaa

SEQ ID NO: 15825 - DNA, 30 bp, Artificial Sequence
  Synthetic oligonucleotide
gacaccgagatcatggctagcgaagaacaa

SEQ ID NO: 15826 - DNA, 30 bp, Artificial Sequence
  Synthetic oligonucleotide
gtgggagcaaaacacgggcacctagaacaa

SEQ ID NO: 15827 - DNA, 30 bp, Artificial Sequence
  Synthetic oligonucleotide
cctgcagagcggcaataatatcggtaacaa

SEQ ID NO: 15828 - DNA, 30 bp, Artificial Sequence
  Synthetic oligonucleotide
ttcgaaagaaatctcgaacgccgaacacaa

SEQ ID NO: 15829 - DNA, 30 bp, Artificial Sequence
  Synthetic oligonucleotide
caggtaacaggccgaaattcgtgtacacaa

SEQ ID NO: 15830 - DNA, 30 bp, Artificial Sequence
  Synthetic oligonucleotide
aaggggacgtggaaaacaaataattcacaa

SEQ ID NO: 15831 - DNA, 30 bp, Artificial Sequence
  Synthetic oligonucleotide
cgagatcacgtgagaattcggttgagccaa

SEQ ID NO: 15832 - DNA, 30 bp, Artificial Sequence
  Synthetic oligonucleotide
acagacaaaatgaaatgaatgaatagccaa

SEQ ID NO: 15833 - DNA, 30 bp, Artificial Sequence
  Synthetic oligonucleotide
cgaagacctggttagaatcgatgcctccaa

SEQ ID NO: 15834 - DNA, 30 bp, Artificial Sequence
  Synthetic oligonucleotide
aacgccccacgagaactgagatatgcgcaa

SEQ ID NO: 15835 - DNA, 30 bp, Artificial Sequence
  Synthetic oligonucleotide
aggacatgtcaaatggggaaataggggcaa

SEQ ID NO: 15836 - DNA, 30 bp, Artificial Sequence
  Synthetic oligonucleotide
tcggcatgggctaagaaaaaaaccctgcaa

SEQ ID NO: 15837 - DNA, 30 bp, Artificial Sequence
  Synthetic oligonucleotide
acgcgagggaaattcactgttttgagtcaa

SEQ ID NO: 15838 - DNA, 30 bp, Artificial Sequence
  Synthetic oligonucleotide
tccgcgaagaggtgtaggctgagagaagaa

SEQ ID NO: 15839 - DNA, 30 bp, Artificial Sequence
  Synthetic oligonucleotide
agagcagcagggaaggaccctagcgaagaa

SEQ ID NO: 15840 - DNA, 30 bp, Artificial Sequence
  Synthetic oligonucleotide
tcgaacagggggcattagacaacaccagaa

SEQ ID NO: 15841 - DNA, 30 bp, Artificial Sequence
  Synthetic oligonucleotide
taagggccatagcggatggtagcgagagaa

SEQ ID NO: 15842 - DNA, 30 bp, Artificial Sequence
  Synthetic oligonucleotide
tccgatcaacgtggctagtgaaaaggagaa

SEQ ID NO: 15843 - DNA, 30 bp, Artificial Sequence
  Synthetic oligonucleotide
tgaaaaaggagaagcggcaagaaaggagaa

SEQ ID NO: 15844 - DNA, 30 bp, Artificial Sequence
  Synthetic oligonucleotide
gcggaagcaccgttcaagattaaaggagaa

SEQ ID NO: 15845 - DNA, 30 bp, Artificial Sequence
  Synthetic oligonucleotide
acacgtcgcaatcaagatcatcctgccgaa

SEQ ID NO: 15846 - DNA, 31 bp, Artificial Sequence
  Synthetic oligonucleotide
catacggtctcgggcagaaaagcctagcgaa

SEQ ID NO: 15847 - DNA, 30 bp, Artificial Sequence
  Synthetic oligonucleotide
agagtcgaagacactggaataggctgcgaa

SEQ ID NO: 15848 - DNA, 30 bp, Artificial Sequence
  Synthetic oligonucleotide
agaagggattggaagtagccaggttgcgaa

SEQ ID NO: 15849 - DNA, 30 bp, Artificial Sequence
  Synthetic oligonucleotide
aaggtcacgtgatattgccgtcgtgaggaa

SEQ ID NO: 15850 - DNA, 30 bp, Artificial Sequence
  Synthetic oligonucleotide
cggtctcattaaagcagtatcagataggaa

SEQ ID NO: 15851 - DNA, 30 bp, Artificial Sequence
  Synthetic oligonucleotide
cgaaacaatagcgccattttgacatcggaa

SEQ ID NO: 15852 - DNA, 30 bp, Artificial Sequence
  Synthetic oligonucleotide
taagcgagaaggaagaagctgggcgtggaa

SEQ ID NO: 15853 - DNA, 30 bp, Artificial Sequence
  Synthetic oligonucleotide
agcacgtggagaaaacttgcagcttatgaa

SEQ ID NO: 15854 - DNA, 30 bp, Artificial Sequence
  Synthetic oligonucleotide
acgaatggatctcaataaactcgcatataa

SEQ ID NO: 15855 - DNA, 30 bp, Artificial Sequence
  Synthetic oligonucleotide
cgataagatcgacttgaaccgcaaaggtaa

SEQ ID NO: 15856 - DNA, 30 bp, Artificial Sequence
  Synthetic oligonucleotide
gtcagagacgggagaaaagagagttggtaa

SEQ ID NO: 15857 - DNA, 30 bp, Artificial Sequence
  Synthetic oligonucleotide
cgtgggacgaactaactactgcaattgtaa

SEQ ID NO: 15858 - DNA, 30 bp, Artificial Sequence
  Synthetic oligonucleotide
gcgagtgtaggaagaaactagtctcaaaca

SEQ ID NO: 15859 - DNA, 30 bp, Artificial Sequence
  Synthetic oligonucleotide
cgtctgcggcgctcgaagcgaaatgaaaca

SEQ ID NO: 15860 - DNA, 30 bp, Artificial Sequence
  Synthetic oligonucleotide
atcgtatcgcgtcacaagtagagtgaaaca

SEQ ID NO: 15861 - DNA, 31 bp, Artificial Sequence
  Synthetic oligonucleotide
gtatcaacgaggaactagacgtaaaggaaca

SEQ ID NO: 15862 - DNA, 30 bp, Artificial Sequence
  Synthetic oligonucleotide
tcatggaggtgtcatacaaactgaggaaca

SEQ ID NO: 15863 - DNA, 30 bp, Artificial Sequence
  Synthetic oligonucleotide
acgcacagatgactggattgtggcgtaaca

SEQ ID NO: 15864 - DNA, 31 bp, Artificial Sequence
  Synthetic oligonucleotide
cgatcaattcgagcagaactacggcctgaca

SEQ ID NO: 15865 - DNA, 30 bp, Artificial Sequence
  Synthetic oligonucleotide
acgaacgtgccactatgaaaagctactaca

SEQ ID NO: 15866 - DNA, 30 bp, Artificial Sequence
  Synthetic oligonucleotide
ggagaggaccccttaatctggacaagacca

SEQ ID NO: 15867 - DNA, 30 bp, Artificial Sequence
  Synthetic oligonucleotide
gcgagagagtgctggttactaatgagacca

SEQ ID NO: 15868 - DNA, 30 bp, Artificial Sequence
  Synthetic oligonucleotide
ggctcaaaggaatcaaaaaatcgtgcccca

SEQ ID NO: 15869 - DNA, 30 bp, Artificial Sequence
  Synthetic oligonucleotide
agagaccgacaggggaagactgcgaagcca

SEQ ID NO: 15870 - DNA, 30 bp, Artificial Sequence
  Synthetic oligonucleotide
ggacatcgtcgatcgaggaagatagcgcca

SEQ ID NO: 15871 - DNA, 30 bp, Artificial Sequence
  Synthetic oligonucleotide
caaccgagggtaaagcatcgtagggatcca

SEQ ID NO: 15872 - DNA, 30 bp, Artificial Sequence
  Synthetic oligonucleotide
taaggcgaacatacgaataggcgaaaagca

SEQ ID NO: 15873 - DNA, 30 bp, Artificial Sequence
  Synthetic oligonucleotide
ggtccgagaaacttagggagagttgaagca

SEQ ID NO: 15874 - DNA, 30 bp, Artificial Sequence
  Synthetic oligonucleotide
atgagtacgacaccaccggaatgaagagca

SEQ ID NO: 15875 - DNA, 30 bp, Artificial Sequence
  Synthetic oligonucleotide
agagtgggaggatatacgattgagtgagca

SEQ ID NO: 15876 - DNA, 30 bp, Artificial Sequence
  Synthetic oligonucleotide
gaaggtcggacggtagtcggtacaatagca

SEQ ID NO: 15877 - DNA, 30 bp, Artificial Sequence
  Synthetic oligonucleotide
tccgagcgaagagaaacagtgttattagca

SEQ ID NO: 15878 - DNA, 30 bp, Artificial Sequence
  Synthetic oligonucleotide
ggaaaaggggctccgaaagacgtgttagca

SEQ ID NO: 15879 - DNA, 30 bp, Artificial Sequence
  Synthetic oligonucleotide
tagaaaacagagggcattccaggcgacgca

SEQ ID NO: 15880 - DNA, 30 bp, Artificial Sequence
  Synthetic oligonucleotide
tagatcggagggatcaaagtatgccgcgca

SEQ ID NO: 15881 - DNA, 30 bp, Artificial Sequence
  Synthetic oligonucleotide
taccatgaggcgggagctaaaggaggcgca

SEQ ID NO: 15882 - DNA, 30 bp, Artificial Sequence
  Synthetic oligonucleotide
cgaaaagaacaacgaatcgagcttgcggca

SEQ ID NO: 15883 - DNA, 30 bp, Artificial Sequence
  Synthetic oligonucleotide
ataacgtcaagcgggagtgtgaggatggca

SEQ ID NO: 15884 - DNA, 30 bp, Artificial Sequence
  Synthetic oligonucleotide
agaatcaaccagagcagttagaagttggca

SEQ ID NO: 15885 - DNA, 30 bp, Artificial Sequence
  Synthetic oligonucleotide
ccacaagctacgtaatccaccgctcctgca

SEQ ID NO: 15886 - DNA, 30 bp, Artificial Sequence
  Synthetic oligonucleotide
cggcccagtaatagcatcctaacgaaatca

SEQ ID NO: 15887 - DNA, 30 bp, Artificial Sequence
  Synthetic oligonucleotide
ggtcgaggtagaacagaaaagacttaatca

SEQ ID NO: 15888 - DNA, 30 bp, Artificial Sequence
  Synthetic oligonucleotide
cagagctaaagggcaaccggactgtcatca

SEQ ID NO: 15889 - DNA, 30 bp, Artificial Sequence
  Synthetic oligonucleotide
ctagaccagtcctatagagcgatccagtca

SEQ ID NO: 15890 - DNA, 30 bp, Artificial Sequence
  Synthetic oligonucleotide
cgacggtgatagcaagtaagatatgagtca

SEQ ID NO: 15891 - DNA, 30 bp, Artificial Sequence
  Synthetic oligonucleotide
gcagaaaaaaagaatggacagtcactgtca

SEQ ID NO: 15892 - DNA, 40 bp, Artificial Sequence
  Synthetic oligonucleotide
cggtaaggagggtcaccgacgtcgcgccgttgctgcttca

SEQ ID NO: 15893 - DNA, 30 bp, Artificial Sequence
  Synthetic oligonucleotide
agcagacagtacatcaagacaaaacaaaga

SEQ ID NO: 15894 - DNA, 30 bp, Artificial Sequence
  Synthetic oligonucleotide
ccgaccttcgtcagaagaaacacacaaaga

SEQ ID NO: 15895 - DNA, 30 bp, Artificial Sequence
  Synthetic oligonucleotide
cggtagtaaaagaagaagccagcccaaaga

SEQ ID NO: 15896 - DNA, 30 bp, Artificial Sequence
  Synthetic oligonucleotide
agccggtcgagggagcagtgcgcataaaga

SEQ ID NO: 15897 - DNA, 30 bp, Artificial Sequence
  Synthetic oligonucleotide
gggagggtatatacgaccgagagagcaaga

SEQ ID NO: 15898 - DNA, 30 bp, Artificial Sequence
  Synthetic oligonucleotide
caaacaaataagcgaactggcacgggaaga

SEQ ID NO: 15899 - DNA, 30 bp, Artificial Sequence
  Synthetic oligonucleotide
agcaggcaacggacgaatcaataatgaaga

SEQ ID NO: 15900 - DNA, 30 bp, Artificial Sequence
  Synthetic oligonucleotide
ggtatcgagcgagatggtttaacaaacaga

SEQ ID NO: 15901 - DNA, 30 bp, Artificial Sequence
  Synthetic oligonucleotide
ccgcttaaagtgcaagaggtgccgaacaga

SEQ ID NO: 15902 - DNA, 30 bp, Artificial Sequence
  Synthetic oligonucleotide
ggctagactatgtcaggactggaagacaga

SEQ ID NO: 15903 - DNA, 30 bp, Artificial Sequence
  Synthetic oligonucleotide
gggtcaagaggtatgcaaccagtgaccaga

SEQ ID NO: 15904 - DNA, 30 bp, Artificial Sequence
  Synthetic oligonucleotide
agcaaaaacgtcacgctaatgtctcccaga

SEQ ID NO: 15905 - DNA, 30 bp, Artificial Sequence
  Synthetic oligonucleotide
acgattgagggtgctaatcattatgccaga

SEQ ID NO: 15906 - DNA, 30 bp, Artificial Sequence
  Synthetic oligonucleotide
ggggggatgtagcgatgaagagggagcaga

SEQ ID NO: 15907 - DNA, 30 bp, Artificial Sequence
  Synthetic oligonucleotide
cgatagatcaaaagaaaacccagggtcaga

SEQ ID NO: 15908 - DNA, 30 bp, Artificial Sequence
  Synthetic oligonucleotide
gcaagtgcaagtgagaccaacaataagaga

SEQ ID NO: 15909 - DNA, 30 bp, Artificial Sequence
  Synthetic oligonucleotide
accacgggggcaagggtcaatagcgagaga

SEQ ID NO: 15910 - DNA, 30 bp, Artificial Sequence
  Synthetic oligonucleotide
catgagccaccatgacagacggaatagaga

SEQ ID NO: 15911 - DNA, 30 bp, Artificial Sequence
  Synthetic oligonucleotide
ggcaccgcccggggagagaccttatagaga

SEQ ID NO: 15912 - DNA, 30 bp, Artificial Sequence
  Synthetic oligonucleotide
ggttgagctagaggatgcgagtcgtggaga

SEQ ID NO: 15913 - DNA, 30 bp, Artificial Sequence
  Synthetic oligonucleotide
cctatcaaagagtaaagggggacttggaga

SEQ ID NO: 15914 - DNA, 30 bp, Artificial Sequence
  Synthetic oligonucleotide
cagacacacgcgggaaacttttgagtgaga

SEQ ID NO: 15915 - DNA, 30 bp, Artificial Sequence
  Synthetic oligonucleotide
aaagagatgccaaggtaaaagcgaaataga

SEQ ID NO: 15916 - DNA, 30 bp, Artificial Sequence
  Synthetic oligonucleotide
cgagtaccaccgcgaagttatgtacataga

SEQ ID NO: 15917 - DNA, 30 bp, Artificial Sequence
  Synthetic oligonucleotide
gaaggaagacgaggtgaaggtacgtataga

SEQ ID NO: 15918 - DNA, 30 bp, Artificial Sequence
  Synthetic oligonucleotide
acgtaggtagatgaggtgtgagtgactaga

SEQ ID NO: 15919 - DNA, 30 bp, Artificial Sequence
  Synthetic oligonucleotide
acgagagcgtaaccccataacataggtaga

SEQ ID NO: 15920 - DNA, 30 bp, Artificial Sequence
  Synthetic oligonucleotide
cgaggatccagtaatctacatcagtaacga

SEQ ID NO: 15921 - DNA, 30 bp, Artificial Sequence
  Synthetic oligonucleotide
aggaatttagagccagaatgagtaacacga

SEQ ID NO: 15922 - DNA, 30 bp, Artificial Sequence
  Synthetic oligonucleotide
ggggggcagggaatctgacagcgagcacga

SEQ ID NO: 15923 - DNA, 30 bp, Artificial Sequence
  Synthetic oligonucleotide
aagctgagacacgaatcacaagctgtacga

SEQ ID NO: 15924 - DNA, 30 bp, Artificial Sequence
  Synthetic oligonucleotide
gaggcaattactaaatagaccgagttacga

SEQ ID NO: 15925 - DNA, 30 bp, Artificial Sequence
  Synthetic oligonucleotide
ggctagcccggacaaagaaggaccacccga

SEQ ID NO: 15926 - DNA, 30 bp, Artificial Sequence
  Synthetic oligonucleotide
tagagagaaataaaaacgtaagatcggcga

SEQ ID NO: 15927 - DNA, 30 bp, Artificial Sequence
  Synthetic oligonucleotide
tggtgaaggatgtatttggaacaagctcga

SEQ ID NO: 15928 - DNA, 30 bp, Artificial Sequence
  Synthetic oligonucleotide
acggatcaagctcggtgcgggcatattcga

SEQ ID NO: 15929 - DNA, 30 bp, Artificial Sequence
  Synthetic oligonucleotide
cataataataccgctgcggccaagaaagga

SEQ ID NO: 15930 - DNA, 30 bp, Artificial Sequence
  Synthetic oligonucleotide
gccgagggtgtcaatagggagccgcaagga

SEQ ID NO: 15931 - DNA, 30 bp, Artificial Sequence
  Synthetic oligonucleotide
ctgtgcgagaacaggaggggaaacacagga

SEQ ID NO: 15932 - DNA, 30 bp, Artificial Sequence
  Synthetic oligonucleotide
acgaatgcgtttcaatacaaaccagcagga

SEQ ID NO: 15933 - DNA, 30 bp, Artificial Sequence
  Synthetic oligonucleotide
tcgggacactgcaacgaatgcttgatagga

SEQ ID NO: 15934 - DNA, 30 bp, Artificial Sequence
  Synthetic oligonucleotide
gactgggctaaggatacgaatgaattagga

SEQ ID NO: 15935 - DNA, 30 bp, Artificial Sequence
  Synthetic oligonucleotide
tctatgtaaatcaagggtaagctcggcgga

SEQ ID NO: 15936 - DNA, 30 bp, Artificial Sequence
  Synthetic oligonucleotide
ggtgaaactggagttaccagataggaggga

SEQ ID NO: 15937 - DNA, 30 bp, Artificial Sequence
  Synthetic oligonucleotide
ccttatcagaggaagcgaagtttgagggga

SEQ ID NO: 15938 - DNA, 40 bp, Artificial Sequence
  Synthetic oligonucleotide
aagataatacattcatgatatggtcggggatcggggggga

SEQ ID NO: 15939 - DNA, 30 bp, Artificial Sequence
  Synthetic oligonucleotide
taggaggagtagtatacggcatgagtggga

SEQ ID NO: 15940 - DNA, 30 bp, Artificial Sequence
  Synthetic oligonucleotide
ttggcaaggatgaaaccaaatgcgcatgga

SEQ ID NO: 15941 - DNA, 30 bp, Artificial Sequence
  Synthetic oligonucleotide
actagaggaggaatggagatatagcctgga

SEQ ID NO: 15942 - DNA, 30 bp, Artificial Sequence
  Synthetic oligonucleotide
cgttgtaggaggagctaaaaataccaatga

SEQ ID NO: 15943 - DNA, 30 bp, Artificial Sequence
  Synthetic oligonucleotide
aggagatatggaacccaacccgagtaatga

SEQ ID NO: 15944 - DNA, 30 bp, Artificial Sequence
  Synthetic oligonucleotide
cggctagaataggcgtaggacgtcacctga

SEQ ID NO: 15945 - DNA, 30 bp, Artificial Sequence
  Synthetic oligonucleotide
atgagcgggatgggcaacgtgctaaaaata

SEQ ID NO: 15946 - DNA, 30 bp, Artificial Sequence
  Synthetic oligonucleotide
ggtgcaaacggcacaagccaccacgcaata

SEQ ID NO: 15947 - DNA, 30 bp, Artificial Sequence
  Synthetic oligonucleotide
gtgggggagccaggaaagctaagtgcaata

SEQ ID NO: 15948 - DNA, 30 bp, Artificial Sequence
  Synthetic oligonucleotide
cgtacaagggccactaaaatacctggaata

SEQ ID NO: 15949 - DNA, 30 bp, Artificial Sequence
  Synthetic oligonucleotide
cagcatagccaacaggagtgcacatgaata

SEQ ID NO: 15950 - DNA, 30 bp, Artificial Sequence
  Synthetic oligonucleotide
cagtgcacgcgatggcaaaaatgaaacata

SEQ ID NO: 15951 - DNA, 30 bp, Artificial Sequence
  Synthetic oligonucleotide
aggcgaaaacgcatacaattagggcccata

SEQ ID NO: 15952 - DNA, 30 bp, Artificial Sequence
  Synthetic oligonucleotide
gctcatggaagccgaaccagaaagcagata

SEQ ID NO: 15953 - DNA, 30 bp, Artificial Sequence
  Synthetic oligonucleotide
gcgcgggcagctggtagaagggggacgata

SEQ ID NO: 15954 - DNA, 30 bp, Artificial Sequence
  Synthetic oligonucleotide
caggaggaacacccttagaaccttatgata

SEQ ID NO: 15955 - DNA, 30 bp, Artificial Sequence
  Synthetic oligonucleotide
cgggaacgagtttgtgcgaaaggggtgata

SEQ ID NO: 15956 - DNA, 30 bp, Artificial Sequence
  Synthetic oligonucleotide
ggatacataccaacggcaacactgcagcta

SEQ ID NO: 15957 - DNA, 30 bp, Artificial Sequence
  Synthetic oligonucleotide
cggacctaaaggataagcaaggatgagcta

SEQ ID NO: 15958 - DNA, 30 bp, Artificial Sequence
  Synthetic oligonucleotide
ttacaagaggagcaagtactcgggaaagta

SEQ ID NO: 15959 - DNA, 30 bp, Artificial Sequence
  Synthetic oligonucleotide
tcggagtcggagagctgtagcagagaagta

SEQ ID NO: 15960 - DNA, 30 bp, Artificial Sequence
  Synthetic oligonucleotide
cgagcggcatgtatctataggaaaacagta

SEQ ID NO: 15961 - DNA, 30 bp, Artificial Sequence
  Synthetic oligonucleotide
cacgaagggtggaaaacgttttcaccagta

SEQ ID NO: 15962 - DNA, 30 bp, Artificial Sequence
  Synthetic oligonucleotide
tcagaggccaaacgtgaaggaagacgagta

SEQ ID NO: 15963 - DNA, 30 bp, Artificial Sequence
  Synthetic oligonucleotide
aaggacgagagtgctagtgaagtgcgagta

SEQ ID NO: 15964 - DNA, 30 bp, Artificial Sequence
  Synthetic oligonucleotide
ggtcgggaagtcaatgtggagtgaaacgta

SEQ ID NO: 15965 - DNA, 30 bp, Artificial Sequence
  Synthetic oligonucleotide
ggggaacgcgggaagagccaagagaccgta

SEQ ID NO: 15966 - DNA, 30 bp, Artificial Sequence
  Synthetic oligonucleotide
caagcgtgaccccaaagacgagacgaggta

SEQ ID NO: 15967 - DNA, 30 bp, Artificial Sequence
  Synthetic oligonucleotide
caaggcccacaaatactatagcagaatgta

SEQ ID NO: 15968 - DNA, 30 bp, Artificial Sequence
  Synthetic oligonucleotide
caacgaccaaaacagcggtaaatagatgta

SEQ ID NO: 15969 - DNA, 30 bp, Artificial Sequence
  Synthetic oligonucleotide
gtgggctgtctcagagcaactccgcagtta

SEQ ID NO: 15970 - DNA, 30 bp, Artificial Sequence
  Synthetic oligonucleotide
gggccaacaaggcattggggagaagagtta

SEQ ID NO: 15971 - DNA, 30 bp, Artificial Sequence
  Synthetic oligonucleotide
cgagcccggaaacaaactacttactcgtta

SEQ ID NO: 15972 - DNA, 30 bp, Artificial Sequence
  Synthetic oligonucleotide
ccgaacagccatgaatggtcgaaaacaaac

SEQ ID NO: 15973 - DNA, 30 bp, Artificial Sequence
  Synthetic oligonucleotide
cacacgaaagcggatacgattagccccaac

SEQ ID NO: 15974 - DNA, 30 bp, Artificial Sequence
  Synthetic oligonucleotide
gccttgaaactaagggtggaagacagcaac

SEQ ID NO: 15975 - DNA, 30 bp, Artificial Sequence
  Synthetic oligonucleotide
cgccaagaggtcacgtaaagagtatataac

SEQ ID NO: 15976 - DNA, 30 bp, Artificial Sequence
  Synthetic oligonucleotide
tcgaggaagcgtacacgaggatgtgctaac

SEQ ID NO: 15977 - DNA, 30 bp, Artificial Sequence
  Synthetic oligonucleotide
agagtccaccctcgtaataaaagcgcacac

SEQ ID NO: 15978 - DNA, 30 bp, Artificial Sequence
  Synthetic oligonucleotide
aagaaggtaagataatataaaaacgtacac

SEQ ID NO: 15979 - DNA, 30 bp, Artificial Sequence
  Synthetic oligonucleotide
cggaatagacaaatgaaccataacagccac

SEQ ID NO: 15980 - DNA, 30 bp, Artificial Sequence
  Synthetic oligonucleotide
gacgcaaggttggaccgaaacaaatgccac

SEQ ID NO: 15981 - DNA, 30 bp, Artificial Sequence
  Synthetic oligonucleotide
aggcgcgcttcaccaattccggagtgccac

SEQ ID NO: 15982 - DNA, 30 bp, Artificial Sequence
  Synthetic oligonucleotide
tgaaggacaaagcgaacctcatgtaagcac

SEQ ID NO: 15983 - DNA, 30 bp, Artificial Sequence
  Synthetic oligonucleotide
tgaggtgggctaatgaataagactgggcac

SEQ ID NO: 15984 - DNA, 30 bp, Artificial Sequence
  Synthetic oligonucleotide
acgacatcgactaccacacaccagactcac

SEQ ID NO: 15985 - DNA, 30 bp, Artificial Sequence
  Synthetic oligonucleotide
acacgagactcaaatggaaaagagggtcac

SEQ ID NO: 15986 - DNA, 33 bp, Artificial Sequence
  Synthetic oligonucleotide
gatactagaccaccacgtgtccatcagaaagac

SEQ ID NO: 15987 - DNA, 30 bp, Artificial Sequence
  Synthetic oligonucleotide
ggtaagaatcaatatgtcagtccacgagac

SEQ ID NO: 15988 - DNA, 30 bp, Artificial Sequence
  Synthetic oligonucleotide
tcgagactgccgaatttgcaacgtggggac

SEQ ID NO: 15989 - DNA, 30 bp, Artificial Sequence
  Synthetic oligonucleotide
cgggcgacgggtccgtagtaatgaatggac

SEQ ID NO: 15990 - DNA, 30 bp, Artificial Sequence
  Synthetic oligonucleotide
acgaacttgaaacgccagtgggggatggac

SEQ ID NO: 15991 - DNA, 30 bp, Artificial Sequence
  Synthetic oligonucleotide
caaggggttcgactggatagatgtgcgtac

SEQ ID NO: 15992 - DNA, 30 bp, Artificial Sequence
  Synthetic oligonucleotide
tgacaacggggagattagtcaaacgtgtac

SEQ ID NO: 15993 - DNA, 30 bp, Artificial Sequence
  Synthetic oligonucleotide
gtgcggatgcgagtgcacgtagacaattac

SEQ ID NO: 15994 - DNA, 30 bp, Artificial Sequence
  Synthetic oligonucleotide
ggcgcaagccggcttaagtgagcatcaacc

SEQ ID NO: 15995 - DNA, 30 bp, Artificial Sequence
  Synthetic oligonucleotide
agcgcataaaatacatcatcagacagcacc

SEQ ID NO: 15996 - DNA, 30 bp, Artificial Sequence
  Synthetic oligonucleotide
ggcgtagacacaacactgtgaggagggacc

SEQ ID NO: 15997 - DNA, 30 bp, Artificial Sequence
  Synthetic oligonucleotide
cacgtccaccggaggatagagagtgaaccc

SEQ ID NO: 15998 - DNA, 30 bp, Artificial Sequence
  Synthetic oligonucleotide
aggaccaggcggataatagtagaacgagcc

SEQ ID NO: 15999 - DNA, 30 bp, Artificial Sequence
  Synthetic oligonucleotide
cgagtcgcgcatatcagagagacacacgcc

SEQ ID NO: 16000 - DNA, 30 bp, Artificial Sequence
  Synthetic oligonucleotide
aaggcgattagacaaggagtgtggaaggcc

SEQ ID NO: 16001 - DNA, 30 bp, Artificial Sequence
  Synthetic oligonucleotide
cggcaccgcctaaaccaagagggaatggcc

SEQ ID NO: 16002 - DNA, 30 bp, Artificial Sequence
  Synthetic oligonucleotide
gtcgaggcaaagctgtgacgtccatcatcc

SEQ ID NO: 16003 - DNA, 30 bp, Artificial Sequence
  Synthetic oligonucleotide
tcgaaagaaaattactgcaccgagcagtcc

SEQ ID NO: 16004 - DNA, 30 bp, Artificial Sequence
  Synthetic oligonucleotide
tgtcgtgaaagaaagaatagaagtgcgtcc

SEQ ID NO: 16005 - DNA, 30 bp, Artificial Sequence
  Synthetic oligonucleotide
acacgcacatttatgaaccaaacgtcgtcc

SEQ ID NO: 16006 - DNA, 30 bp, Artificial Sequence
  Synthetic oligonucleotide
ccagagcagaggatgcacaaccaagggtcc

SEQ ID NO: 16007 - DNA, 30 bp, Artificial Sequence
  Synthetic oligonucleotide
agggactggctgccgaatcaacaatcttcc

SEQ ID NO: 16008 - DNA, 30 bp, Artificial Sequence
  Synthetic oligonucleotide
cgaggattcttaagggtagggcccacaagc

SEQ ID NO: 16009 - DNA, 30 bp, Artificial Sequence
  Synthetic oligonucleotide
aactaggcaattgcgcgaggagaatagagc

SEQ ID NO: 16010 - DNA, 30 bp, Artificial Sequence
  Synthetic oligonucleotide
tggtacccgaaccacgataagcaagtgagc

SEQ ID NO: 16011 - DNA, 30 bp, Artificial Sequence
  Synthetic oligonucleotide
agctgccgggtaatagacagggtagatcgc

SEQ ID NO: 16012 - DNA, 30 bp, Artificial Sequence
  Synthetic oligonucleotide
agacgatgggaatggtaaactttagcaggc

SEQ ID NO: 16013 - DNA, 30 bp, Artificial Sequence
  Synthetic oligonucleotide
gggccaaatacaatcatagcatcgataggc

SEQ ID NO: 16014 - DNA, 30 bp, Artificial Sequence
  Synthetic oligonucleotide
tcgggagtagatcaaacgagataaagcggc

SEQ ID NO: 16015 - DNA, 30 bp, Artificial Sequence
  Synthetic oligonucleotide
cgagaagaatttaatagtatcgatagcggc

SEQ ID NO: 16016 - DNA, 30 bp, Artificial Sequence
  Synthetic oligonucleotide
cgtgcggttataaggaggagtaaaggcggc

SEQ ID NO: 16017 - DNA, 30 bp, Artificial Sequence
  Synthetic oligonucleotide
cacgtgaagaccatgagtagacgattcggc

SEQ ID NO: 16018 - DNA, 30 bp, Artificial Sequence
  Synthetic oligonucleotide
agtgtcaaaagggaataaaactgaaaatgc

SEQ ID NO: 16019 - DNA, 30 bp, Artificial Sequence
  Synthetic oligonucleotide
agacaagatgaggatcccaatgactactgc

SEQ ID NO: 16020 - DNA, 30 bp, Artificial Sequence
  Synthetic oligonucleotide
gggccggactacagatagcaacagccctgc

SEQ ID NO: 16021 - DNA, 30 bp, Artificial Sequence
  Synthetic oligonucleotide
agaagaatacagcgtagatgagcgatgtgc

SEQ ID NO: 16022 - DNA, 30 bp, Artificial Sequence
  Synthetic oligonucleotide
agaacgtgaacaaaaaaagcgtacgcaatc

SEQ ID NO: 16023 - DNA, 30 bp, Artificial Sequence
  Synthetic oligonucleotide
caccgaagtgttaaggacagaggaaatatc

SEQ ID NO: 16024 - DNA, 30 bp, Artificial Sequence
  Synthetic oligonucleotide
caagcaatataggtcggaagatgatcactc

SEQ ID NO: 16025 - DNA, 30 bp, Artificial Sequence
  Synthetic oligonucleotide
cgacccacaaccctaataaaacttggcctc

SEQ ID NO: 16026 - DNA, 30 bp, Artificial Sequence
  Synthetic oligonucleotide
tggccaaaagaacaaaaaaaacgcagtctc

SEQ ID NO: 16027 - DNA, 30 bp, Artificial Sequence
  Synthetic oligonucleotide
tcagactacgaagaagatataaagaacgtc

SEQ ID NO: 16028 - DNA, 30 bp, Artificial Sequence
  Synthetic oligonucleotide
ggggcctaagattagagtgcacggtacgtc

SEQ ID NO: 16029 - DNA, 30 bp, Artificial Sequence
  Synthetic oligonucleotide
acgaaaaacaatgaccgaaagaacacggtc

SEQ ID NO: 16030 - DNA, 30 bp, Artificial Sequence
  Synthetic oligonucleotide
tcagtgtaagggtccgaaataagcgagttc

SEQ ID NO: 16031 - DNA, 30 bp, Artificial Sequence
  Synthetic oligonucleotide
ggccgcggaagagccgctcgaaccacaaag

SEQ ID NO: 16032 - DNA, 30 bp, Artificial Sequence
  Synthetic oligonucleotide
ctgcgaaggctcaaatggctaactccaaag

SEQ ID NO: 16033 - DNA, 30 bp, Artificial Sequence
  Synthetic oligonucleotide
aggcgtagatgtcgcgaagttgtgctaaag

SEQ ID NO: 16034 - DNA, 30 bp, Artificial Sequence
  Synthetic oligonucleotide
agccgcaatgcaagaccagaattgaccaag

SEQ ID NO: 16035 - DNA, 30 bp, Artificial Sequence
  Synthetic oligonucleotide
cgaggttcatggatggatagaagagccaag

SEQ ID NO: 16036 - DNA, 30 bp, Artificial Sequence
  Synthetic oligonucleotide
tggaatctcacgtggaaagcaagggccaag

SEQ ID NO: 16037 - DNA, 30 bp, Artificial Sequence
  Synthetic oligonucleotide
gccagagcggagcgcacgagattctgcaag

SEQ ID NO: 16038 - DNA, 30 bp, Artificial Sequence
  Synthetic oligonucleotide
taaaataagggagggcaaatcggttgcaag

SEQ ID NO: 16039 - DNA, 30 bp, Artificial Sequence
  Synthetic oligonucleotide
ccggctcaggcagagcaacgaaagctcaag

SEQ ID NO: 16040 - DNA, 30 bp, Artificial Sequence
  Synthetic oligonucleotide
cgcgggtcgaccaaatcacatagtccgaag

SEQ ID NO: 16041 - DNA, 30 bp, Artificial Sequence
  Synthetic oligonucleotide
ctcatgattgtaaaggagcgaaacgcgaag

SEQ ID NO: 16042 - DNA, 30 bp, Artificial Sequence
  Synthetic oligonucleotide
tcgaatatctgcgagaaaagcccaaggaag

SEQ ID NO: 16043 - DNA, 30 bp, Artificial Sequence
  Synthetic oligonucleotide
ggcaatcgaatcgctcaaaatagcgggaag

SEQ ID NO: 16044 - DNA, 30 bp, Artificial Sequence
  Synthetic oligonucleotide
gaccaaattgaacatagagtgcgagtgaag

SEQ ID NO: 16045 - DNA, 30 bp, Artificial Sequence
  Synthetic oligonucleotide
caatacacatcctaaactcatcccgtgaag

SEQ ID NO: 16046 - DNA, 30 bp, Artificial Sequence
  Synthetic oligonucleotide
ggaaagcccggcaaaaagcgtaataataag

SEQ ID NO: 16047 - DNA, 30 bp, Artificial Sequence
  Synthetic oligonucleotide
taagcgaagtggaaaatcatatgaactaag

SEQ ID NO: 16048 - DNA, 30 bp, Artificial Sequence
  Synthetic oligonucleotide
gcggaacaacccgattggcaagcttctaag

SEQ ID NO: 16049 - DNA, 30 bp, Artificial Sequence
  Synthetic oligonucleotide
atcgaagtcgagccgatgtggtgtagtaag

SEQ ID NO: 16050 - DNA, 30 bp, Artificial Sequence
  Synthetic oligonucleotide
aggctcaaagactcgtcatcatacaaacag

SEQ ID NO: 16051 - DNA, 30 bp, Artificial Sequence
  Synthetic oligonucleotide
aaggcacgaatcatcgaaaatctaccacag

SEQ ID NO: 16052 - DNA, 30 bp, Artificial Sequence
  Synthetic oligonucleotide
tacacgaaaaagattcggaaacacggacag

SEQ ID NO: 16053 - DNA, 30 bp, Artificial Sequence
  Synthetic oligonucleotide
gggaccgtaatcgcgatactagactgacag

SEQ ID NO: 16054 - DNA, 30 bp, Artificial Sequence
  Synthetic oligonucleotide
acgttgtggcgaagactgagtgaaatacag

SEQ ID NO: 16055 - DNA, 30 bp, Artificial Sequence
  Synthetic oligonucleotide
acgggcaggctgtaagggagaatagtacag

SEQ ID NO: 16056 - DNA, 30 bp, Artificial Sequence
  Synthetic oligonucleotide
acgaccaggaggaatccaattaaggtacag

SEQ ID NO: 16057 - DNA, 30 bp, Artificial Sequence
  Synthetic oligonucleotide
ggaagatagtacaagccgttagggaaccag

SEQ ID NO: 16058 - DNA, 30 bp, Artificial Sequence
  Synthetic oligonucleotide
acggcggcaattacgaaggagtggaaccag

SEQ ID NO: 16059 - DNA, 30 bp, Artificial Sequence
  Synthetic oligonucleotide
gggcacggaaagagtcatgtgcgaagccag

SEQ ID NO: 16060 - DNA, 30 bp, Artificial Sequence
  Synthetic oligonucleotide
aggttgaggcacgctaaaaggtgtgagcag

SEQ ID NO: 16061 - DNA, 30 bp, Artificial Sequence
  Synthetic oligonucleotide
acggaaaagcgagtcgaccatttcacgcag

SEQ ID NO: 16062 - DNA, 30 bp, Artificial Sequence
  Synthetic oligonucleotide
tcagtccacagctcagaatcgcgagtgcag

SEQ ID NO: 16063 - DNA, 30 bp, Artificial Sequence
  Synthetic oligonucleotide
ggacacataactccacagaaaactgctcag

SEQ ID NO: 16064 - DNA, 30 bp, Artificial Sequence
  Synthetic oligonucleotide
atgggagagcaagagctttggaatcgtcag

SEQ ID NO: 16065 - DNA, 30 bp, Artificial Sequence
  Synthetic oligonucleotide
ggctaaagtaatcaggcagagaaatgtcag

SEQ ID NO: 16066 - DNA, 30 bp, Artificial Sequence
  Synthetic oligonucleotide
cgaggctcaaagccgttgattcgatgtcag

SEQ ID NO: 16067 - DNA, 30 bp, Artificial Sequence
  Synthetic oligonucleotide
aagaggcgacggtcatgtgaaattgttcag

SEQ ID NO: 16068 - DNA, 30 bp, Artificial Sequence
  Synthetic oligonucleotide
tggaacgcccaaccactaacagtataagag

SEQ ID NO: 16069 - DNA, 30 bp, Artificial Sequence
  Synthetic oligonucleotide
tcgctagaaggtaacagaagacaaacagag

SEQ ID NO: 16070 - DNA, 30 bp, Artificial Sequence
  Synthetic oligonucleotide
cgacacgataaaggagcaacagcggcagag

SEQ ID NO: 16071 - DNA, 30 bp, Artificial Sequence
  Synthetic oligonucleotide
ggtgtcaaaagggaacgtcgcgttggagag

SEQ ID NO: 16072 - DNA, 30 bp, Artificial Sequence
  Synthetic oligonucleotide
cgtacgaccatgcatgaatgcaggctagag

SEQ ID NO: 16073 - DNA, 30 bp, Artificial Sequence
  Synthetic oligonucleotide
atcatgcgaagagaaggatcggatctagag

SEQ ID NO: 16074 - DNA, 30 bp, Artificial Sequence
  Synthetic oligonucleotide
cgctaaatcggcagactggaccagttagag

SEQ ID NO: 16075 - DNA, 30 bp, Artificial Sequence
  Synthetic oligonucleotide
cagtcagacacgtgaatatctgcgaccgag

SEQ ID NO: 16076 - DNA, 30 bp, Artificial Sequence
  Synthetic oligonucleotide
tgacgaagacagcgatcgtcagatcccgag

SEQ ID NO: 16077 - DNA, 30 bp, Artificial Sequence
  Synthetic oligonucleotide
tcgtatcgcgactggtaagtgcttcccgag

SEQ ID NO: 16078 - DNA, 30 bp, Artificial Sequence
  Synthetic oligonucleotide
cgcattatttactatcctgagcgagccgag

SEQ ID NO: 16079 - DNA, 30 bp, Artificial Sequence
  Synthetic oligonucleotide
gtcgaggtaaggagatcagagtaatccgag

SEQ ID NO: 16080 - DNA, 30 bp, Artificial Sequence
  Synthetic oligonucleotide
agaacgtctacacgaaccggggcaagcgag

SEQ ID NO: 16081 - DNA, 30 bp, Artificial Sequence
  Synthetic oligonucleotide
gcggagctccaaaccggctcaccgtgcgag

SEQ ID NO: 16082 - DNA, 30 bp, Artificial Sequence
  Synthetic oligonucleotide
tgagaccaacgaaatcccgattcttgcgag

SEQ ID NO: 16083 - DNA, 30 bp, Artificial Sequence
  Synthetic oligonucleotide
gcggtaaggctcgtaggaagaagttgcgag

SEQ ID NO: 16084 - DNA, 30 bp, Artificial Sequence
  Synthetic oligonucleotide
ccagcaaatcattaaaggatcgagcaggag

SEQ ID NO: 16085 - DNA, 30 bp, Artificial Sequence
  Synthetic oligonucleotide
ttacataccgcaatcataggttaagaggag

SEQ ID NO: 16086 - DNA, 30 bp, Artificial Sequence
  Synthetic oligonucleotide
tgaacggccgatttccgacgagcgtaggag

SEQ ID NO: 16087 - DNA, 30 bp, Artificial Sequence
  Synthetic oligonucleotide
tcgagcctgggggattgtagaaagacggag

SEQ ID NO: 16088 - DNA, 30 bp, Artificial Sequence
  Synthetic oligonucleotide
cgcaagtgcaaaaaaagaaaacgtccggag

SEQ ID NO: 16089 - DNA, 30 bp, Artificial Sequence
  Synthetic oligonucleotide
cggaaggtccaaccttacagtctcgcggag

SEQ ID NO: 16090 - DNA, 30 bp, Artificial Sequence
  Synthetic oligonucleotide
cgcattgtctgtgaacgaagtcggtcggag

SEQ ID NO: 16091 - DNA, 30 bp, Artificial Sequence
  Synthetic oligonucleotide
tatcgcggcaagacgtcaatataacgggag

SEQ ID NO: 16092 - DNA, 30 bp, Artificial Sequence
  Synthetic oligonucleotide
acacccgtataatgcgataaggcgcgggag

SEQ ID NO: 16093 - DNA, 30 bp, Artificial Sequence
  Synthetic oligonucleotide
ttgagggtacagcgagcttgcaaaaatgag

SEQ ID NO: 16094 - DNA, 30 bp, Artificial Sequence
  Synthetic oligonucleotide
gtcgatgaggttgaggagcgtgaccatgag

SEQ ID NO: 16095 - DNA, 30 bp, Artificial Sequence
  Synthetic oligonucleotide
gtgtggtagaaaattcagaagcatgatgag

SEQ ID NO: 16096 - DNA, 30 bp, Artificial Sequence
  Synthetic oligonucleotide
agaacggctggcacccagcaggcagaatag

SEQ ID NO: 16097 - DNA, 30 bp, Artificial Sequence
  Synthetic oligonucleotide
aacggaggcggacagaggccaccgtaatag

SEQ ID NO: 16098 - DNA, 30 bp, Artificial Sequence
  Synthetic oligonucleotide
cggtaatgaacaaagaagagacattaatag

SEQ ID NO: 16099 - DNA, 30 bp, Artificial Sequence
  Synthetic oligonucleotide
ggtcagcccatatacgtaagtcgatgatag

SEQ ID NO: 16100 - DNA, 30 bp, Artificial Sequence
  Synthetic oligonucleotide
agactgaatgaaagaacgttggcgaactag

SEQ ID NO: 16101 - DNA, 30 bp, Artificial Sequence
  Synthetic oligonucleotide
cgacgggcggcatttccaaacggaacctag

SEQ ID NO: 16102 - DNA, 30 bp, Artificial Sequence
  Synthetic oligonucleotide
agaaagttcacgagggaaccaatacgctag

SEQ ID NO: 16103 - DNA, 30 bp, Artificial Sequence
  Synthetic oligonucleotide
aggaaggaagaaagcgtctaaccgatctag

SEQ ID NO: 16104 - DNA, 30 bp, Artificial Sequence
  Synthetic oligonucleotide
caagaaaatggcacatccggacaagagtag

SEQ ID NO: 16105 - DNA, 30 bp, Artificial Sequence
  Synthetic oligonucleotide
cgggggtaaggttcacggacagaagagtag

SEQ ID NO: 16106 - DNA, 30 bp, Artificial Sequence
  Synthetic oligonucleotide
tcgtcaagtaaatgcatgtcaaggtagtag

SEQ ID NO: 16107 - DNA, 30 bp, Artificial Sequence
  Synthetic oligonucleotide
ttgcgagcagagaattatgaggaaaggtag

SEQ ID NO: 16108 - DNA, 30 bp, Artificial Sequence
  Synthetic oligonucleotide
agaagctaggaagctgtaatgcccaggtag

SEQ ID NO: 16109 - DNA, 30 bp, Artificial Sequence
  Synthetic oligonucleotide
acggctagtaagtcgtagacatcgaggtag

SEQ ID NO: 16110 - DNA, 30 bp, Artificial Sequence
  Synthetic oligonucleotide
cgtatccccaaaaatcctacgtgagggtag

SEQ ID NO: 16111 - DNA, 30 bp, Artificial Sequence
  Synthetic oligonucleotide
acggaaggcgcatgcaacgcaatcatgtag

SEQ ID NO: 16112 - DNA, 30 bp, Artificial Sequence
  Synthetic oligonucleotide
tggagaagcaagtctcccgtgtaagtgtag

SEQ ID NO: 16113 - DNA, 30 bp, Artificial Sequence
  Synthetic oligonucleotide
cgagccgtaggaggcccagatccagattag

SEQ ID NO: 16114 - DNA, 30 bp, Artificial Sequence
  Synthetic oligonucleotide
cgacgtctgcgcgtgagaatctacagttag

SEQ ID NO: 16115 - DNA, 30 bp, Artificial Sequence
  Synthetic oligonucleotide
tcacacccaaccagcctaggtgcgagttag

SEQ ID NO: 16116 - DNA, 30 bp, Artificial Sequence
  Synthetic oligonucleotide
gaggataagacaagaatctacctccgaacg

SEQ ID NO: 16117 - DNA, 30 bp, Artificial Sequence
  Synthetic oligonucleotide
acaaataacaaaatgcactcggatggaacg

SEQ ID NO: 16118 - DNA, 30 bp, Artificial Sequence
  Synthetic oligonucleotide
tgcatggtcgtgaggatatgcgagtgaacg

SEQ ID NO: 16119 - DNA, 30 bp, Artificial Sequence
  Synthetic oligonucleotide
gtaaaacaaccgcgcagccaaggctcgacg

SEQ ID NO: 16120 - DNA, 30 bp, Artificial Sequence
  Synthetic oligonucleotide
tgaccgtcagcagagcgaaacaatgggacg

SEQ ID NO: 16121 - DNA, 30 bp, Artificial Sequence
  Synthetic oligonucleotide
cgattaagcgccaaagcgtctggagatacg

SEQ ID NO: 16122 - DNA, 30 bp, Artificial Sequence
  Synthetic oligonucleotide
aggtagccaaacggcaagaaaaattttacg

SEQ ID NO: 16123 - DNA, 30 bp, Artificial Sequence
  Synthetic oligonucleotide
taacggagtagaggagcattgcactgaccg

SEQ ID NO: 16124 - DNA, 30 bp, Artificial Sequence
  Synthetic oligonucleotide
gcaaggaagtggcgggaacatacagagccg

SEQ ID NO: 16125 - DNA, 30 bp, Artificial Sequence
  Synthetic oligonucleotide
tgtcaacgaggggaccaaacacgcgagccg

SEQ ID NO: 16126 - DNA, 30 bp, Artificial Sequence
  Synthetic oligonucleotide
tcattacaccgcgaaaactaaggcattccg

SEQ ID NO: 16127 - DNA, 30 bp, Artificial Sequence
  Synthetic oligonucleotide
gccaaaagtaaagcatacatgaaagaagcg

SEQ ID NO: 16128 - DNA, 30 bp, Artificial Sequence
  Synthetic oligonucleotide
acgaaaaggattatagtcacgatagaagcg

SEQ ID NO: 16129 - DNA, 30 bp, Artificial Sequence
  Synthetic oligonucleotide
cacgtagctaaaaagtacggctatgaagcg

SEQ ID NO: 16130 - DNA, 30 bp, Artificial Sequence
  Synthetic oligonucleotide
cgagagtgttaaagtacagcttcacgagcg

SEQ ID NO: 16131 - DNA, 30 bp, Artificial Sequence
  Synthetic oligonucleotide
acagagcatcaagtatggttaggcacggcg

SEQ ID NO: 16132 - DNA, 30 bp, Artificial Sequence
  Synthetic oligonucleotide
ggtggagttagggacgactcgattccggcg

SEQ ID NO: 16133 - DNA, 30 bp, Artificial Sequence
  Synthetic oligonucleotide
acggccgagaatagaaggtaatagagggcg

SEQ ID NO: 16134 - DNA, 30 bp, Artificial Sequence
  Synthetic oligonucleotide
cgagggctaaaatatgacaatatactggcg

SEQ ID NO: 16135 - DNA, 30 bp, Artificial Sequence
  Synthetic oligonucleotide
caagtctgaagacggagaaagggtgatgcg

SEQ ID NO: 16136 - DNA, 30 bp, Artificial Sequence
  Synthetic oligonucleotide
accaacagactatctgcatacaggagtgcg

SEQ ID NO: 16137 - DNA, 30 bp, Artificial Sequence
  Synthetic oligonucleotide
cgtcaataagaagaaatgaaactaattgcg

SEQ ID NO: 16138 - DNA, 30 bp, Artificial Sequence
  Synthetic oligonucleotide
gctcttgcgctacatatctatcatccatcg

SEQ ID NO: 16139 - DNA, 30 bp, Artificial Sequence
  Synthetic oligonucleotide
agctagtgagaagagggacgtgttatatcg

SEQ ID NO: 16140 - DNA, 30 bp, Artificial Sequence
  Synthetic oligonucleotide
cgatcgtgtactaagtgtcgccgcccgtcg

SEQ ID NO: 16141 - DNA, 30 bp, Artificial Sequence
  Synthetic oligonucleotide
cctgattaaaaggaaaagcgagacatgtcg

SEQ ID NO: 16142 - DNA, 30 bp, Artificial Sequence
  Synthetic oligonucleotide
aaccaaactgaacccaatacactactgtcg

SEQ ID NO: 16143 - DNA, 30 bp, Artificial Sequence
  Synthetic oligonucleotide
caagcaactagtgtagataagtaaaattcg

SEQ ID NO: 16144 - DNA, 30 bp, Artificial Sequence
  Synthetic oligonucleotide
aacgtaatcactagggctcggaagaaaagg

SEQ ID NO: 16145 - DNA, 30 bp, Artificial Sequence
  Synthetic oligonucleotide
aggacggtcagagcgaagaagttctcaagg

SEQ ID NO: 16146 - DNA, 30 bp, Artificial Sequence
  Synthetic oligonucleotide
atcaacgagtaagacataccctggcgaagg

SEQ ID NO: 16147 - DNA, 30 bp, Artificial Sequence
  Synthetic oligonucleotide
tacgatagccgagatagttcgggcggaagg

SEQ ID NO: 16148 - DNA, 30 bp, Artificial Sequence
  Synthetic oligonucleotide
aatggtagccgattggaagcaaggaacagg

SEQ ID NO: 16149 - DNA, 30 bp, Artificial Sequence
  Synthetic oligonucleotide
ggatggagggggactgcaatgataaccagg

SEQ ID NO: 16150 - DNA, 30 bp, Artificial Sequence
  Synthetic oligonucleotide
atggcgtaaggctgccagaagagcaccagg

SEQ ID NO: 16151 - DNA, 30 bp, Artificial Sequence
  Synthetic oligonucleotide
ctggagctcggctcgtgaatgaaaagcagg

SEQ ID NO: 16152 - DNA, 30 bp, Artificial Sequence
  Synthetic oligonucleotide
cacgatacgtggtagcaaacggcaagcagg

SEQ ID NO: 16153 - DNA, 30 bp, Artificial Sequence
  Synthetic oligonucleotide
gacaaaggtatgcatcaggaattgatcagg

SEQ ID NO: 16154 - DNA, 30 bp, Artificial Sequence
  Synthetic oligonucleotide
gggcgcgtagtatggtagcaaatgaagagg

SEQ ID NO: 16155 - DNA, 30 bp, Artificial Sequence
  Synthetic oligonucleotide
ccgaactgcgagagcggatttttccagagg

SEQ ID NO: 16156 - DNA, 30 bp, Artificial Sequence
  Synthetic oligonucleotide
acggaagaaagattacctccacgtgatagg

SEQ ID NO: 16157 - DNA, 30 bp, Artificial Sequence
  Synthetic oligonucleotide
agaaaactgagaagtgggcatgtccctagg

SEQ ID NO: 16158 - DNA, 30 bp, Artificial Sequence
  Synthetic oligonucleotide
caacccaaaaactgaagcgtccgagtgcgg

SEQ ID NO: 16159 - DNA, 30 bp, Artificial Sequence
  Synthetic oligonucleotide
tcacaccaagactacctgaagagtgctcgg

SEQ ID NO: 16160 - DNA, 30 bp, Artificial Sequence
  Synthetic oligonucleotide
ctgcagattgagcatagaaatgcctaaggg

SEQ ID NO: 16161 - DNA, 30 bp, Artificial Sequence
  Synthetic oligonucleotide
cgcaacgcatcaatcaatattcatacaggg

SEQ ID NO: 16162 - DNA, 30 bp, Artificial Sequence
  Synthetic oligonucleotide
gggacagccacacttaatgataaggcaggg

SEQ ID NO: 16163 - DNA, 30 bp, Artificial Sequence
  Synthetic oligonucleotide
cgaaaaagagggtaaccttaagggtacggg

SEQ ID NO: 16164 - DNA, 30 bp, Artificial Sequence
  Synthetic oligonucleotide
ctgagcaatgcaaaatttaaggagaccggg

SEQ ID NO: 16165 - DNA, 30 bp, Artificial Sequence
  Synthetic oligonucleotide
gcagggacataacctgaagtcagatccggg

SEQ ID NO: 16166 - DNA, 30 bp, Artificial Sequence
  Synthetic oligonucleotide
ccacgtggccaattcgaaagggatcagggg

SEQ ID NO: 16167 - DNA, 30 bp, Artificial Sequence
  Synthetic oligonucleotide
cggacggaaatcgacgaattattcccgggg

SEQ ID NO: 16168 - DNA, 30 bp, Artificial Sequence
  Synthetic oligonucleotide
gtggacaataacaatttcagaaagaggggg

SEQ ID NO: 16169 - DNA, 30 bp, Artificial Sequence
  Synthetic oligonucleotide
tgtgataacagggagacacgtcacgggggg

SEQ ID NO: 16170 - DNA, 30 bp, Artificial Sequence
  Synthetic oligonucleotide
gaggtactatacaattaacaaaaacatggg

SEQ ID NO: 16171 - DNA, 30 bp, Artificial Sequence
  Synthetic oligonucleotide
tcgtgcatatgcatgccgtcaaaccatggg

SEQ ID NO: 16172 - DNA, 30 bp, Artificial Sequence
  Synthetic oligonucleotide
cgtgctacgtaatttgaaagaggtggtggg

SEQ ID NO: 16173 - DNA, 30 bp, Artificial Sequence
  Synthetic oligonucleotide
cgaaacaaacggcctaacagcgtgtcatgg

SEQ ID NO: 16174 - DNA, 30 bp, Artificial Sequence
  Synthetic oligonucleotide
cgatgccaaaaggagaaataaaatatatgg

SEQ ID NO: 16175 - DNA, 30 bp, Artificial Sequence
  Synthetic oligonucleotide
atgcgcaagtgcacaaattaagaaagctgg

SEQ ID NO: 16176 - DNA, 30 bp, Artificial Sequence
  Synthetic oligonucleotide
aagaagggctcaggaagtcaagagatctgg

SEQ ID NO: 16177 - DNA, 30 bp, Artificial Sequence
  Synthetic oligonucleotide
cgtgggaatagaagatgtgtaatacagtgg

SEQ ID NO: 16178 - DNA, 30 bp, Artificial Sequence
  Synthetic oligonucleotide
acgacagcgagagtctggaaacacgagtgg

SEQ ID NO: 16179 - DNA, 31 bp, Artificial Sequence
  Synthetic oligonucleotide
acgcgcattaagtacgatcggagaaaggtgg

SEQ ID NO: 16180 - DNA, 30 bp, Artificial Sequence
  Synthetic oligonucleotide
gccgcaccaaagagagcacgcaacgaaatg

SEQ ID NO: 16181 - DNA, 30 bp, Artificial Sequence
  Synthetic oligonucleotide
cataatccgaaataccctggaaaggaaatg

SEQ ID NO: 16182 - DNA, 30 bp, Artificial Sequence
  Synthetic oligonucleotide
caggtacgatcacggtcatggaaataaatg

SEQ ID NO: 16183 - DNA, 30 bp, Artificial Sequence
  Synthetic oligonucleotide
agaccgacctaggtaaggcgaggtggaatg

SEQ ID NO: 16184 - DNA, 30 bp, Artificial Sequence
  Synthetic oligonucleotide
aggaaaatctcaaatcaataaaccctaatg

SEQ ID NO: 16185 - DNA, 29 bp, Artificial Sequence
  Synthetic oligonucleotide
tgaaggtgggccgtcaaacaaagctaatg

SEQ ID NO: 16186 - DNA, 30 bp, Artificial Sequence
  Synthetic oligonucleotide
aaaggcaagaaaaagagtccatcggtaatg

SEQ ID NO: 16187 - DNA, 30 bp, Artificial Sequence
  Synthetic oligonucleotide
cgacgtacaagacggggtcgcgtattaatg

SEQ ID NO: 16188 - DNA, 30 bp, Artificial Sequence
  Synthetic oligonucleotide
cggtcaaacgaatagaggggaactgacatg

SEQ ID NO: 16189 - DNA, 30 bp, Artificial Sequence
  Synthetic oligonucleotide
tcagtctggaagtacctgaggggaagcatg

SEQ ID NO: 16190 - DNA, 30 bp, Artificial Sequence
  Synthetic oligonucleotide
ggcgacccaaacagagcgagggagcgcatg

SEQ ID NO: 16191 - DNA, 30 bp, Artificial Sequence
  Synthetic oligonucleotide
cgatagaccgatcatctacaggaagtcatg

SEQ ID NO: 16192 - DNA, 30 bp, Artificial Sequence
  Synthetic oligonucleotide
catcggaggactcgagtacataatgagatg

SEQ ID NO: 16193 - DNA, 30 bp, Artificial Sequence
  Synthetic oligonucleotide
aaggcgatttgtcagcagtacggcgggatg

SEQ ID NO: 16194 - DNA, 30 bp, Artificial Sequence
  Synthetic oligonucleotide
atggcggaccgagtgaaattaaaggggatg

SEQ ID NO: 16195 - DNA, 30 bp, Artificial Sequence
  Synthetic oligonucleotide
acacaatagaagggcatcggtgcatggatg

SEQ ID NO: 16196 - DNA, 30 bp, Artificial Sequence
  Synthetic oligonucleotide
tcgaccagcgggaacagttccaaccatatg

SEQ ID NO: 16197 - DNA, 30 bp, Artificial Sequence
  Synthetic oligonucleotide
actgggaatcagcggaaactggaagatatg

SEQ ID NO: 16198 - DNA, 30 bp, Artificial Sequence
  Synthetic oligonucleotide
aagcgtgcaaacgagactcatcatgatatg

SEQ ID NO: 16199 - DNA, 30 bp, Artificial Sequence
  Synthetic oligonucleotide
tggcgaattgagggatctcggaacagtatg

SEQ ID NO: 16200 - DNA, 30 bp, Artificial Sequence
  Synthetic oligonucleotide
cgtggcctcgaccggcaagaaatagaactg

SEQ ID NO: 16201 - DNA, 30 bp, Artificial Sequence
  Synthetic oligonucleotide
tcgaaggacggactgaggactataacactg

SEQ ID NO: 16202 - DNA, 30 bp, Artificial Sequence
  Synthetic oligonucleotide
agaggaacagtgtaaagtcggactggactg

SEQ ID NO: 16203 - DNA, 30 bp, Artificial Sequence
  Synthetic oligonucleotide
ggtgagggatctaaataacgataactactg

SEQ ID NO: 16204 - DNA, 30 bp, Artificial Sequence
  Synthetic oligonucleotide
atgggagggcatgcggattcaagattactg

SEQ ID NO: 16205 - DNA, 30 bp, Artificial Sequence
  Synthetic oligonucleotide
ttacttattcaaggtataagtcgtttactg

SEQ ID NO: 16206 - DNA, 30 bp, Artificial Sequence
  Synthetic oligonucleotide
agcatgtaggtaacagtggcaagagacctg

SEQ ID NO: 16207 - DNA, 30 bp, Artificial Sequence
  Synthetic oligonucleotide
cataacagaagataaatgcgtaagatcctg

SEQ ID NO: 16208 - DNA, 30 bp, Artificial Sequence
  Synthetic oligonucleotide
acgagtaagacaacaaaaagcgagatcctg

SEQ ID NO: 16209 - DNA, 30 bp, Artificial Sequence
  Synthetic oligonucleotide
ggaaggcggaaccaacatcgttgtcatctg

SEQ ID NO: 16210 - DNA, 30 bp, Artificial Sequence
  Synthetic oligonucleotide
tacgtattatcgggagccagaatgaaagtg

SEQ ID NO: 16211 - DNA, 30 bp, Artificial Sequence
  Synthetic oligonucleotide
caacgcgagacgatagagtgcaattcagtg

SEQ ID NO: 16212 - DNA, 30 bp, Artificial Sequence
  Synthetic oligonucleotide
caccatacctcaagactcgtaaaaggagtg

SEQ ID NO: 16213 - DNA, 30 bp, Artificial Sequence
  Synthetic oligonucleotide
gtgaagaatcgggacccaaatgtgtgcgtg

SEQ ID NO: 16214 - DNA, 31 bp, Artificial Sequence
  Synthetic oligonucleotide
gggaggggtggtcagatagtcttattgcgtg

SEQ ID NO: 16215 - DNA, 30 bp, Artificial Sequence
  Synthetic oligonucleotide
ctgtaacgctggatgtgggaggaagaattg

SEQ ID NO: 16216 - DNA, 30 bp, Artificial Sequence
  Synthetic oligonucleotide
cgttgccggtctaatggtaataccgaattg

SEQ ID NO: 16217 - DNA, 30 bp, Artificial Sequence
  Synthetic oligonucleotide
gaggtcaaaaagcagtgctgacaaagattg

SEQ ID NO: 16218 - DNA, 30 bp, Artificial Sequence
  Synthetic oligonucleotide
caagacgtcgaacggatagcaatgagattg

SEQ ID NO: 16219 - DNA, 30 bp, Artificial Sequence
  Synthetic oligonucleotide
ttaagacacgacagaagggtaataggattg

SEQ ID NO: 16220 - DNA, 30 bp, Artificial Sequence
  Synthetic oligonucleotide
tgggtagcgagtatggaacaataaagcttg

SEQ ID NO: 16221 - DNA, 30 bp, Artificial Sequence
  Synthetic oligonucleotide
acgaagtaggcacagatgttgcgattcttg

SEQ ID NO: 16222 - DNA, 30 bp, Artificial Sequence
  Synthetic oligonucleotide
taggagtggtaggagggccatgtctcgttg

SEQ ID NO: 16223 - DNA, 30 bp, Artificial Sequence
  Synthetic oligonucleotide
gcggaaaatgcatcgatacagaaacggttg

SEQ ID NO: 16224 - DNA, 30 bp, Artificial Sequence
  Synthetic oligonucleotide
agggtcgaaattaatgaggataagcggttg

SEQ ID NO: 16225 - DNA, 30 bp, Artificial Sequence
  Synthetic oligonucleotide
accggcacgagagaatgcgcgggaaaaaat

SEQ ID NO: 16226 - DNA, 30 bp, Artificial Sequence
  Synthetic oligonucleotide
aggggcaggaaccctgaagcgggacacaat

SEQ ID NO: 16227 - DNA, 30 bp, Artificial Sequence
  Synthetic oligonucleotide
cgctcaggcggaacgaggactcaatacaat

SEQ ID NO: 16228 - DNA, 30 bp, Artificial Sequence
  Synthetic oligonucleotide
cgagatacgggagggattagcgcaggcaat

SEQ ID NO: 16229 - DNA, 30 bp, Artificial Sequence
  Synthetic oligonucleotide
cggaggagtggtaaaatgtgatcaggacat

SEQ ID NO: 16230 - DNA, 30 bp, Artificial Sequence
  Synthetic oligonucleotide
cacgatacgcatcagcgtgatataaagcat

SEQ ID NO: 16231 - DNA, 30 bp, Artificial Sequence
  Synthetic oligonucleotide
tggtcagggggaacacaacccgcgcatcat

SEQ ID NO: 16232 - DNA, 30 bp, Artificial Sequence
  Synthetic oligonucleotide
gataggccagacgaatacgaacactccgat

SEQ ID NO: 16233 - DNA, 30 bp, Artificial Sequence
  Synthetic oligonucleotide
tcggtgagcgggatatcagtaaggtatgat

SEQ ID NO: 16234 - DNA, 30 bp, Artificial Sequence
  Synthetic oligonucleotide
ttgttgtgttcgctttttgtgttttcctat

SEQ ID NO: 16235 - DNA, 30 bp, Artificial Sequence
  Synthetic oligonucleotide
cggaaatggaaagtcacataaaactgctat

SEQ ID NO: 16236 - DNA, 30 bp, Artificial Sequence
  Synthetic oligonucleotide
cgcgtacaggctagagagtgaatcgtaact

SEQ ID NO: 16237 - DNA, 30 bp, Artificial Sequence
  Synthetic oligonucleotide
agataaggatgcggtcacatagtgagcact

SEQ ID NO: 16238 - DNA, 30 bp, Artificial Sequence
  Synthetic oligonucleotide
aagtgcgacgagagaccaaactacgagact

SEQ ID NO: 16239 - DNA, 30 bp, Artificial Sequence
  Synthetic oligonucleotide
cgggctacgaagaagtggagcaacatgact

SEQ ID NO: 16240 - DNA, 30 bp, Artificial Sequence
  Synthetic oligonucleotide
ggcaacacgaacaaactggaggacactact

SEQ ID NO: 16241 - DNA, 30 bp, Artificial Sequence
  Synthetic oligonucleotide
acggggaactgtattaatcgagctgggtct

SEQ ID NO: 16242 - DNA, 30 bp, Artificial Sequence
  Synthetic oligonucleotide
acgagaaaagcgtgggctccgagctcaagt

SEQ ID NO: 16243 - DNA, 30 bp, Artificial Sequence
  Synthetic oligonucleotide
actcaaactccagttgcgggaagacagagt

SEQ ID NO: 16244 - DNA, 30 bp, Artificial Sequence
  Synthetic oligonucleotide
ccgcggtgagtacgaagtgggtacgagagt

SEQ ID NO: 16245 - DNA, 30 bp, Artificial Sequence
  Synthetic oligonucleotide
gaaggtacaataaaagctgcgtgaacgagt

SEQ ID NO: 16246 - DNA, 30 bp, Artificial Sequence
  Synthetic oligonucleotide
acagggagatccgactatcgtgatgcgagt

SEQ ID NO: 16247 - DNA, 30 bp, Artificial Sequence
  Synthetic oligonucleotide
ggaagggtgatcaatggtgaagctgcgagt

SEQ ID NO: 16248 - DNA, 30 bp, Artificial Sequence
  Synthetic oligonucleotide
cagtacaaatgtggaacggaataatcgagt

SEQ ID NO: 16249 - DNA, 30 bp, Artificial Sequence
  Synthetic oligonucleotide
ggaaatagcatgagtataccagagatacgt

SEQ ID NO: 16250 - DNA, 30 bp, Artificial Sequence
  Synthetic oligonucleotide
tgacatcggagaggaagctataaactacgt

SEQ ID NO: 16251 - DNA, 30 bp, Artificial Sequence
  Synthetic oligonucleotide
cgccatggtaaaaagaacaacgcgcctcgt

SEQ ID NO: 16252 - DNA, 30 bp, Artificial Sequence
  Synthetic oligonucleotide
gtgatggaataagagtgaagagtaaaaggt

SEQ ID NO: 16253 - DNA, 30 bp, Artificial Sequence
  Synthetic oligonucleotide
gcctgtagcggaaagcgagggacataaggt

SEQ ID NO: 16254 - DNA, 30 bp, Artificial Sequence
  Synthetic oligonucleotide
agaaggggcgcatctctaaggcaacgaggt

SEQ ID NO: 16255 - DNA, 30 bp, Artificial Sequence
  Synthetic oligonucleotide
aggagcaggagtgagttgcagatcttcggt

SEQ ID NO: 16256 - DNA, 30 bp, Artificial Sequence
  Synthetic oligonucleotide
tcggacagccaacactgataccgtaagggt

SEQ ID NO: 16257 - DNA, 30 bp, Artificial Sequence
  Synthetic oligonucleotide
cgtgcatcgcgaaatcgataaagggcgggt

SEQ ID NO: 16258 - DNA, 30 bp, Artificial Sequence
  Synthetic oligonucleotide
acgcgaagtggaaagggagagagaaggtgt

SEQ ID NO: 16259 - DNA, 30 bp, Artificial Sequence
  Synthetic oligonucleotide
gggaggcaaaccaaagggacgtaaccaatt

SEQ ID NO: 16260 - DNA, 30 bp, Artificial Sequence
  Synthetic oligonucleotide
tcgtaacaaagatggaatatacagccgatt

SEQ ID NO: 16261 - DNA, 30 bp, Artificial Sequence
  Synthetic oligonucleotide
agggaagagaacgcaataaacagaaaactt

SEQ ID NO: 16262 - DNA, 30 bp, Artificial Sequence
  Synthetic oligonucleotide
cgagattaagagcaccacacctcagcactt

SEQ ID NO: 16263 - DNA, 30 bp, Artificial Sequence
  Synthetic oligonucleotide
ggaacgaggtggaagcgtaagagtctactt

SEQ ID NO: 16264 - DNA, 30 bp, Artificial Sequence
  Synthetic oligonucleotide
ggacgtgtacgacgaatggagagtcaagtt

SEQ ID NO: 16265 - DNA, 30 bp, Artificial Sequence
  Synthetic oligonucleotide
acgtgaaataaacctaacaaccagccagtt

SEQ ID NO: 16266 - DNA, 30 bp, Artificial Sequence
  Synthetic oligonucleotide
ttgaggcaggcgggattgctaaagtgagtt

SEQ ID NO: 16267 - DNA, 30 bp, Artificial Sequence
  Synthetic oligonucleotide
cgaacaacctcgaaaagaagtggttacgtt

SEQ ID NO: 16268 - DNA, 30 bp, Artificial Sequence
  Synthetic oligonucleotide
gtcggaggggggatgaatgaagtaagtgtt

SEQ ID NO: 16269 - DNA, 30 bp, Artificial Sequence
  Synthetic oligonucleotide
cgatgaatagttactacacatagcgaaaaa

SEQ ID NO: 16270 - DNA, 30 bp, Artificial Sequence
  Synthetic oligonucleotide
acgtagagcgtggtcacataccgtgaaaaa

SEQ ID NO: 16271 - DNA, 30 bp, Artificial Sequence
  Synthetic oligonucleotide
gtaatgggaaccgatgcaaaagcgcgaaaa

SEQ ID NO: 16272 - DNA, 30 bp, Artificial Sequence
  Synthetic oligonucleotide
ggtaacgggagaagtgtgtgtaatgtaaaa

SEQ ID NO: 16273 - DNA, 30 bp, Artificial Sequence
  Synthetic oligonucleotide
ccaagcaaggaaaggacatttaataacaaa

SEQ ID NO: 16274 - DNA, 30 bp, Artificial Sequence
  Synthetic oligonucleotide
gggacagaaaaggggaagtccgagaccaaa

SEQ ID NO: 16275 - DNA, 30 bp, Artificial Sequence
  Synthetic oligonucleotide
aacgatattgcgagagagctaacaagcaaa

SEQ ID NO: 16276 - DNA, 30 bp, Artificial Sequence
  Synthetic oligonucleotide
cacagaacaattagagaaatagtagtcaaa

SEQ ID NO: 16277 - DNA, 30 bp, Artificial Sequence
  Synthetic oligonucleotide
ggcgccaggactgtggaagaacccgtcaaa

SEQ ID NO: 16278 - DNA, 30 bp, Artificial Sequence
  Synthetic oligonucleotide
gctcagagcgtcaaaaaaagtcagttcaaa

SEQ ID NO: 16279 - DNA, 30 bp, Artificial Sequence
  Synthetic oligonucleotide
ccaacagctggagatttaatatgggagaaa

SEQ ID NO: 16280 - DNA, 30 bp, Artificial Sequence
  Synthetic oligonucleotide
agaaaaagaaggcgctagtaaagatagaaa

SEQ ID NO: 16281 - DNA, 30 bp, Artificial Sequence
  Synthetic oligonucleotide
taccgaaatcagcaagcatggcttgggaaa

SEQ ID NO: 16282 - DNA, 30 bp, Artificial Sequence
  Synthetic oligonucleotide
caggtaaggaagaagtatatgaacgataaa

SEQ ID NO: 16283 - DNA, 30 bp, Artificial Sequence
  Synthetic oligonucleotide
gggagagttcgcgttaatgactgggataaa

SEQ ID NO: 16284 - DNA, 30 bp, Artificial Sequence
  Synthetic oligonucleotide
cggcaaacaggggtataccaaactgataaa

SEQ ID NO: 16285 - DNA, 30 bp, Artificial Sequence
  Synthetic oligonucleotide
agatgatcaacacaccatagcttgtgacaa

SEQ ID NO: 16286 - DNA, 30 bp, Artificial Sequence
  Synthetic oligonucleotide
ggacactaggcgagatgcattaactaccaa

SEQ ID NO: 16287 - DNA, 30 bp, Artificial Sequence
  Synthetic oligonucleotide
ccatagtgaaactaacggactcgaagccaa

SEQ ID NO: 16288 - DNA, 30 bp, Artificial Sequence
  Synthetic oligonucleotide
tcgagcgaacggaatcacaatttggtccaa

SEQ ID NO: 16289 - DNA, 30 bp, Artificial Sequence
  Synthetic oligonucleotide
ggcgcatgccaaaatgcggggaccaagcaa

SEQ ID NO: 16290 - DNA, 30 bp, Artificial Sequence
  Synthetic oligonucleotide
gaccaaagcggaacagaacgcggtgggcaa

SEQ ID NO: 16291 - DNA, 30 bp, Artificial Sequence
  Synthetic oligonucleotide
acgttagatgtgcctgaggagcagaatcaa

SEQ ID NO: 16292 - DNA, 30 bp, Artificial Sequence
  Synthetic oligonucleotide
ggccaagctggatagtagtgttaagatcaa

SEQ ID NO: 16293 - DNA, 30 bp, Artificial Sequence
  Synthetic oligonucleotide
aggtgtaaactgcataagggtacgagtcaa

SEQ ID NO: 16294 - DNA, 30 bp, Artificial Sequence
  Synthetic oligonucleotide
cgcaggagtagcgcttagtaggggtaagaa

SEQ ID NO: 16295 - DNA, 30 bp, Artificial Sequence
  Synthetic oligonucleotide
gcgcggcgcgtatcgaaagggaatccagaa

SEQ ID NO: 16296 - DNA, 30 bp, Artificial Sequence
  Synthetic oligonucleotide
gcgaagccagtgccggtaagccattcagaa

SEQ ID NO: 16297 - DNA, 30 bp, Artificial Sequence
  Synthetic oligonucleotide
cgtcgtggtaacttggtaaatgctagagaa

SEQ ID NO: 16298 - DNA, 30 bp, Artificial Sequence
  Synthetic oligonucleotide
actctaaccagagagatccagccaaccgaa

SEQ ID NO: 16299 - DNA, 30 bp, Artificial Sequence
  Synthetic oligonucleotide
caagcgggacagggcactcatcgagtcgaa

SEQ ID NO: 16300 - DNA, 30 bp, Artificial Sequence
  Synthetic oligonucleotide
ctatgacaaggtcgaggagaaagcgtcgaa

SEQ ID NO: 16301 - DNA, 30 bp, Artificial Sequence
  Synthetic oligonucleotide
cgcgtgaacaggtagtgtcggcaggtcgaa

SEQ ID NO: 16302 - DNA, 30 bp, Artificial Sequence
  Synthetic oligonucleotide
ctaggacaatcaagcagttcgagacaggaa

SEQ ID NO: 16303 - DNA, 30 bp, Artificial Sequence
  Synthetic oligonucleotide
atgttaaacgaggaatactagccaacggaa

SEQ ID NO: 16304 - DNA, 30 bp, Artificial Sequence
  Synthetic oligonucleotide
cgacgcggtagaatgtataatagttgggaa

SEQ ID NO: 16305 - DNA, 31 bp, Artificial Sequence
  Synthetic oligonucleotide
cgagggcgatccgcacaataggaaggctgaa

SEQ ID NO: 16306 - DNA, 30 bp, Artificial Sequence
  Synthetic oligonucleotide
agacgaatactgaggtaggataagggtgaa

SEQ ID NO: 16307 - DNA, 30 bp, Artificial Sequence
  Synthetic oligonucleotide
ggcaggacacgtaagggggtaagctgtgaa

SEQ ID NO: 16308 - DNA, 30 bp, Artificial Sequence
  Synthetic oligonucleotide
gcacactggtagtgaagaggggagtcataa

SEQ ID NO: 16309 - DNA, 30 bp, Artificial Sequence
  Synthetic oligonucleotide
atcaagatgtagggaaggaaaatacgataa

SEQ ID NO: 16310 - DNA, 30 bp, Artificial Sequence
  Synthetic oligonucleotide
cggaaaaaccatgagtgtgctacgatctaa

SEQ ID NO: 16311 - DNA, 30 bp, Artificial Sequence
  Synthetic oligonucleotide
tgctagagcagacccaaaatggcaaagtaa

SEQ ID NO: 16312 - DNA, 30 bp, Artificial Sequence
  Synthetic oligonucleotide
cagtaagtaccaacgaggactaccccgtaa

SEQ ID NO: 16313 - DNA, 30 bp, Artificial Sequence
  Synthetic oligonucleotide
cgtaccgtggcataggagagtgagtggtaa

SEQ ID NO: 16314 - DNA, 30 bp, Artificial Sequence
  Synthetic oligonucleotide
ggacgcaaggagctgccaccagggatgtaa

SEQ ID NO: 16315 - DNA, 30 bp, Artificial Sequence
  Synthetic oligonucleotide
gacatgggcaagcgggaagctaaactgtaa

SEQ ID NO: 16316 - DNA, 30 bp, Artificial Sequence
  Synthetic oligonucleotide
agagtaggtgagtgaggaccgccgagttaa

SEQ ID NO: 16317 - DNA, 30 bp, Artificial Sequence
  Synthetic oligonucleotide
cggcgcgtaagaaggacacaatgttccaca

SEQ ID NO: 16318 - DNA, 30 bp, Artificial Sequence
  Synthetic oligonucleotide
gaaacgtcaccaagataacgcgaaagcaca

SEQ ID NO: 16319 - DNA, 30 bp, Artificial Sequence
  Synthetic oligonucleotide
gggcccaatcccatctcatgaaagcgcaca

SEQ ID NO: 16320 - DNA, 30 bp, Artificial Sequence
  Synthetic oligonucleotide
atagaaggggcagactgaaggaaaggcaca

SEQ ID NO: 16321 - DNA, 30 bp, Artificial Sequence
  Synthetic oligonucleotide
acaggcaagcgcagattacggacagtcaca

SEQ ID NO: 16322 - DNA, 30 bp, Artificial Sequence
  Synthetic oligonucleotide
caagcacaaggcccacgccagagagtcaca

SEQ ID NO: 16323 - DNA, 30 bp, Artificial Sequence
  Synthetic oligonucleotide
tcgcctaacatacccgaacagaccgtcaca

SEQ ID NO: 16324 - DNA, 30 bp, Artificial Sequence
  Synthetic oligonucleotide
acggaacgaaacgccaatgcccaggtcaca

SEQ ID NO: 16325 - DNA, 30 bp, Artificial Sequence
  Synthetic oligonucleotide
aagcgcatcgctgtgaaagtggaagagaca

SEQ ID NO: 16326 - DNA, 30 bp, Artificial Sequence
  Synthetic oligonucleotide
agtcaagtgcgacattcgaaacaggagaca

SEQ ID NO: 16327 - DNA, 30 bp, Artificial Sequence
  Synthetic oligonucleotide
tcgtccgagacaaatgtaggtggtacgaca

SEQ ID NO: 16328 - DNA, 30 bp, Artificial Sequence
  Synthetic oligonucleotide
ataggcacgacactatcagggctagcgaca

SEQ ID NO: 16329 - DNA, 30 bp, Artificial Sequence
  Synthetic oligonucleotide
catagggggatcgaggctaagcgggtgaca

SEQ ID NO: 16330 - DNA, 30 bp, Artificial Sequence
  Synthetic oligonucleotide
ccatcgacatgataggccgaaaagagacca

SEQ ID NO: 16331 - DNA, 30 bp, Artificial Sequence
  Synthetic oligonucleotide
atgtaatgcagaacgtgatgacatggacca

SEQ ID NO: 16332 - DNA, 30 bp, Artificial Sequence
  Synthetic oligonucleotide
cgaacaggcattaggagccggaccgtacca

SEQ ID NO: 16333 - DNA, 30 bp, Artificial Sequence
  Synthetic oligonucleotide
cgggggcatcaccataaagagtccgaccca

SEQ ID NO: 16334 - DNA, 30 bp, Artificial Sequence
  Synthetic oligonucleotide
cggataaaggacaagacagtgatgaagcca

SEQ ID NO: 16335 - DNA, 30 bp, Artificial Sequence
  Synthetic oligonucleotide
gtgggaccacaacgacgagggaaggcgcca

SEQ ID NO: 16336 - DNA, 30 bp, Artificial Sequence
  Synthetic oligonucleotide
gaagcagtgctagcacacagagcgaggcca

SEQ ID NO: 16337 - DNA, 30 bp, Artificial Sequence
  Synthetic oligonucleotide
gctaaaaaaggtactaaaaagcataggcca

SEQ ID NO: 16338 - DNA, 30 bp, Artificial Sequence
  Synthetic oligonucleotide
cgggcggagctgatatgtagaaaagggcca

SEQ ID NO: 16339 - DNA, 30 bp, Artificial Sequence
  Synthetic oligonucleotide
tcgtaggaccaggacatagcccaccatcca

SEQ ID NO: 16340 - DNA, 30 bp, Artificial Sequence
  Synthetic oligonucleotide
ggggaaaaacgaatatcgtgcgtggaagca

SEQ ID NO: 16341 - DNA, 30 bp, Artificial Sequence
  Synthetic oligonucleotide
tggaaatagtgcgaagtatgcacaagagca

SEQ ID NO: 16342 - DNA, 30 bp, Artificial Sequence
  Synthetic oligonucleotide
cgaaggctttgaagggaagtagatctagca

SEQ ID NO: 16343 - DNA, 30 bp, Artificial Sequence
  Synthetic oligonucleotide
cggagtacgtaaactggtaggaaggtagca

SEQ ID NO: 16344 - DNA, 30 bp, Artificial Sequence
  Synthetic oligonucleotide
tcacggcctgtcaagagtgcgaatacggca

SEQ ID NO: 16345 - DNA, 30 bp, Artificial Sequence
  Synthetic oligonucleotide
gcgaggaactaggtgtacaacatctgggca

SEQ ID NO: 16346 - DNA, 30 bp, Artificial Sequence
  Synthetic oligonucleotide
taatcaacataagcaaagaaataacgtgca

SEQ ID NO: 16347 - DNA, 30 bp, Artificial Sequence
  Synthetic oligonucleotide
caaggctatatgggcctaaaacagtgtgca

SEQ ID NO: 16348 - DNA, 30 bp, Artificial Sequence
  Synthetic oligonucleotide
gggcaacaggagagtaataatcataaatca

SEQ ID NO: 16349 - DNA, 30 bp, Artificial Sequence
  Synthetic oligonucleotide
gatgagcagtaaccagaaaaggggcaatca

SEQ ID NO: 16350 - DNA, 30 bp, Artificial Sequence
  Synthetic oligonucleotide
aacggcgaccaacgcatttcgggggcatca

SEQ ID NO: 16351 - DNA, 30 bp, Artificial Sequence
  Synthetic oligonucleotide
ggtcggctaactagatgtaataaacgatca

SEQ ID NO: 16352 - DNA, 30 bp, Artificial Sequence
  Synthetic oligonucleotide
aatgccacaacaggggggattagcggatca

SEQ ID NO: 16353 - DNA, 30 bp, Artificial Sequence
  Synthetic oligonucleotide
agagtggattcgagcctaagcgtaaggtca

SEQ ID NO: 16354 - DNA, 30 bp, Artificial Sequence
  Synthetic oligonucleotide
acggtcaacaagtatgggcatcgaacttca

SEQ ID NO: 16355 - DNA, 30 bp, Artificial Sequence
  Synthetic oligonucleotide
gaccaaaccgcaaaatagtatgtagaaaga

SEQ ID NO: 16356 - DNA, 30 bp, Artificial Sequence
  Synthetic oligonucleotide
ccagggcaagcaaggtgtctcctcacaaga

SEQ ID NO: 16357 - DNA, 30 bp, Artificial Sequence
  Synthetic oligonucleotide
ccgaaggagcgtaaagacggcatgagaaga

SEQ ID NO: 16358 - DNA, 30 bp, Artificial Sequence
  Synthetic oligonucleotide
tcacacggggtatacgccgaaacgcacaga

SEQ ID NO: 16359 - DNA, 30 bp, Artificial Sequence
  Synthetic oligonucleotide
gaacgataattccgacgatacacagacaga

SEQ ID NO: 16360 - DNA, 30 bp, Artificial Sequence
  Synthetic oligonucleotide
gtacagagataaggcgttacaactgacaga

SEQ ID NO: 16361 - DNA, 30 bp, Artificial Sequence
  Synthetic oligonucleotide
cgttccgaactttatcgaggtaactccaga

SEQ ID NO: 16362 - DNA, 30 bp, Artificial Sequence
  Synthetic oligonucleotide
acccaaacaacaaccttggaatccagcaga

SEQ ID NO: 16363 - DNA, 30 bp, Artificial Sequence
  Synthetic oligonucleotide
cacaaagacaagacggcaatatggggcaga

SEQ ID NO: 16364 - DNA, 30 bp, Artificial Sequence
  Synthetic oligonucleotide
ccgaggcagagtggaaaggtaagtgagaga

SEQ ID NO: 16365 - DNA, 30 bp, Artificial Sequence
  Synthetic oligonucleotide
cgaaacaacgggcgttagcacacatagaga

SEQ ID NO: 16366 - DNA, 30 bp, Artificial Sequence
  Synthetic oligonucleotide
tgtaaagaactgccgagctgcgccgcgaga

SEQ ID NO: 16367 - DNA, 30 bp, Artificial Sequence
  Synthetic oligonucleotide
ctgggaagataccttaaataaatttcgaga

SEQ ID NO: 16368 - DNA, 30 bp, Artificial Sequence
  Synthetic oligonucleotide
tcaggcgcttgccaaagcataatccggaga

SEQ ID NO: 16369 - DNA, 30 bp, Artificial Sequence
  Synthetic oligonucleotide
cggtgaagaaattgatcagaattagggaga

SEQ ID NO: 16370 - DNA, 30 bp, Artificial Sequence
  Synthetic oligonucleotide
ggggcgaaccggtactgtgagaaaatgaga

SEQ ID NO: 16371 - DNA, 30 bp, Artificial Sequence
  Synthetic oligonucleotide
cgcctgggggcataacgatcgcgagtgaga

SEQ ID NO: 16372 - DNA, 30 bp, Artificial Sequence
  Synthetic oligonucleotide
caagaggaggggaggagatcataattgaga

SEQ ID NO: 16373 - DNA, 30 bp, Artificial Sequence
  Synthetic oligonucleotide
aaggcaatctccctcgggcatgagaataga

SEQ ID NO: 16374 - DNA, 30 bp, Artificial Sequence
  Synthetic oligonucleotide
cggaattgagttgccaaagcgtgggataga

SEQ ID NO: 16375 - DNA, 30 bp, Artificial Sequence
  Synthetic oligonucleotide
ggtatcaaagtcgagaagggccggaaacga

SEQ ID NO: 16376 - DNA, 30 bp, Artificial Sequence
  Synthetic oligonucleotide
caaaagagtaaagccgcgttaaataaacga

SEQ ID NO: 16377 - DNA, 30 bp, Artificial Sequence
  Synthetic oligonucleotide
gcggccgggacacgaagtggggataaacga

SEQ ID NO: 16378 - DNA, 30 bp, Artificial Sequence
  Synthetic oligonucleotide
gtcacaaagatgtgtagacaaaggtaacga

SEQ ID NO: 16379 - DNA, 30 bp, Artificial Sequence
  Synthetic oligonucleotide
gggggcccgtgagggttaaagctagcacga

SEQ ID NO: 16380 - DNA, 30 bp, Artificial Sequence
  Synthetic oligonucleotide
aagctgaaccgcgagtggatacgtctacga

SEQ ID NO: 16381 - DNA, 30 bp, Artificial Sequence
  Synthetic oligonucleotide
taaggcatggaatgaattagggagccccga

SEQ ID NO: 16382 - DNA, 30 bp, Artificial Sequence
  Synthetic oligonucleotide
caggcaggtcaaatacaagcaacatgccga

SEQ ID NO: 16383 - DNA, 30 bp, Artificial Sequence
  Synthetic oligonucleotide
tgatagagaccatagtgacgtgcttgccga

SEQ ID NO: 16384 - DNA, 30 bp, Artificial Sequence
  Synthetic oligonucleotide
aagcaacatgtggcacgagcggattagcga

SEQ ID NO: 16385 - DNA, 30 bp, Artificial Sequence
  Synthetic oligonucleotide
cgctggtacagaatataggataaggatcga

SEQ ID NO: 16386 - DNA, 30 bp, Artificial Sequence
  Synthetic oligonucleotide
atgactaaaggcacctagaggacaagtcga

SEQ ID NO: 16387 - DNA, 30 bp, Artificial Sequence
  Synthetic oligonucleotide
gacggaaggaaaacgagctccgaaggtcga

SEQ ID NO: 16388 - DNA, 30 bp, Artificial Sequence
  Synthetic oligonucleotide
cgtggacaacacatatgctacacgggtcga

SEQ ID NO: 16389 - DNA, 30 bp, Artificial Sequence
  Synthetic oligonucleotide
caggggattgcgctcaatagggaagcagga

SEQ ID NO: 16390 - DNA, 30 bp, Artificial Sequence
  Synthetic oligonucleotide
gcttgtgtactagcgaaaagaaacagagga

SEQ ID NO: 16391 - DNA, 30 bp, Artificial Sequence
  Synthetic oligonucleotide
ccgagtgactgcggagaaagggccagagga

SEQ ID NO: 16392 - DNA, 30 bp, Artificial Sequence
  Synthetic oligonucleotide
cacggaatccacttgagagaaaattacgga

SEQ ID NO: 16393 - DNA, 30 bp, Artificial Sequence
  Synthetic oligonucleotide
gctcgtaagaacaagtgagcacagatcgga

SEQ ID NO: 16394 - DNA, 30 bp, Artificial Sequence
  Synthetic oligonucleotide
atgcgttagccagaatgaggactgttcgga

SEQ ID NO: 16395 - DNA, 30 bp, Artificial Sequence
  Synthetic oligonucleotide
acactacaggagggtcggtcaagcaaggga

SEQ ID NO: 16396 - DNA, 40 bp, Artificial Sequence
  Synthetic oligonucleotide
aagataatacattcgtggtatggtcggggatcggggggga

SEQ ID NO: 16397 - DNA, 30 bp, Artificial Sequence
  Synthetic oligonucleotide
acaagctagctgccaagagtaggttgggga

SEQ ID NO: 16398 - DNA, 30 bp, Artificial Sequence
  Synthetic oligonucleotide
aatgcgtcgaacgtgataacagatgatgga

SEQ ID NO: 16399 - DNA, 30 bp, Artificial Sequence
  Synthetic oligonucleotide
gggaggataactgtcttcaagcaccaatga

SEQ ID NO: 16400 - DNA, 30 bp, Artificial Sequence
  Synthetic oligonucleotide
taatcgggggaggtgagaattaggcaatga

SEQ ID NO: 16401 - DNA, 30 bp, Artificial Sequence
  Synthetic oligonucleotide
atacgggcaggtggaaagacgggaacatga

SEQ ID NO: 16402 - DNA, 30 bp, Artificial Sequence
  Synthetic oligonucleotide
agggcagaggaagggacatgcaggagatga

SEQ ID NO: 16403 - DNA, 30 bp, Artificial Sequence
  Synthetic oligonucleotide
ttggataagaccagatgacactaaggatga

SEQ ID NO: 16404 - DNA, 30 bp, Artificial Sequence
  Synthetic oligonucleotide
gtaagtagcggcgaggggataagtggatga

SEQ ID NO: 16405 - DNA, 30 bp, Artificial Sequence
  Synthetic oligonucleotide
atggggggaacggcataatatacgtgctga

SEQ ID NO: 16406 - DNA, 30 bp, Artificial Sequence
  Synthetic oligonucleotide
ggctacaacaccatcagtaatccgaagtga

SEQ ID NO: 16407 - DNA, 30 bp, Artificial Sequence
  Synthetic oligonucleotide
aagtgagtttcaacgcaaagatgtgagtga

SEQ ID NO: 16408 - DNA, 30 bp, Artificial Sequence
  Synthetic oligonucleotide
aggcaccgaccgcccaggaatagaacgtga

SEQ ID NO: 16409 - DNA, 30 bp, Artificial Sequence
  Synthetic oligonucleotide
ttggaagggatagcgaagaccgacaattga

SEQ ID NO: 16410 - DNA, 30 bp, Artificial Sequence
  Synthetic oligonucleotide
gcaaaaaagaagcatataaaccatccttga

SEQ ID NO: 16411 - DNA, 30 bp, Artificial Sequence
  Synthetic oligonucleotide
aggataaacgaacatgggcccgtaaaaata

SEQ ID NO: 16412 - DNA, 30 bp, Artificial Sequence
  Synthetic oligonucleotide
gcgtagcggtaggtgcgggacaaacaaata

SEQ ID NO: 16413 - DNA, 30 bp, Artificial Sequence
  Synthetic oligonucleotide
aacgcagttaagaaacgggtattgagaata

SEQ ID NO: 16414 - DNA, 30 bp, Artificial Sequence
  Synthetic oligonucleotide
tcgatcgatgggggtactgacacgtgaata

SEQ ID NO: 16415 - DNA, 30 bp, Artificial Sequence
  Synthetic oligonucleotide
tcaacgagtcagcagagctaaaaacgcata

SEQ ID NO: 16416 - DNA, 30 bp, Artificial Sequence
  Synthetic oligonucleotide
gaaaggctaaacaaaaaaggagcgttcata

SEQ ID NO: 16417 - DNA, 30 bp, Artificial Sequence
  Synthetic oligonucleotide
ggagcggcaataagacccgaactacagata

SEQ ID NO: 16418 - DNA, 30 bp, Artificial Sequence
  Synthetic oligonucleotide
ggagatgagcttggataggagagaggtata

SEQ ID NO: 16419 - DNA, 30 bp, Artificial Sequence
  Synthetic oligonucleotide
tgggaggtggaagaaagaatgctcattata

SEQ ID NO: 16420 - DNA, 30 bp, Artificial Sequence
  Synthetic oligonucleotide
tacaccgaggggaaggcggcgcgctgacta

SEQ ID NO: 16421 - DNA, 30 bp, Artificial Sequence
  Synthetic oligonucleotide
tgaagcggtgcggcgaaaaactcggtacta

SEQ ID NO: 16422 - DNA, 30 bp, Artificial Sequence
  Synthetic oligonucleotide
atgacaaagggtaatggaacaacaaagcta

SEQ ID NO: 16423 - DNA, 30 bp, Artificial Sequence
  Synthetic oligonucleotide
cacagacaacccaagtagaatcgtaggcta

SEQ ID NO: 16424 - DNA, 30 bp, Artificial Sequence
  Synthetic oligonucleotide
ggccgaagaggacaaaccagccttgtgcta

SEQ ID NO: 16425 - DNA, 30 bp, Artificial Sequence
  Synthetic oligonucleotide
acaaacatcctagcttccgaggagaaagta

SEQ ID NO: 16426 - DNA, 30 bp, Artificial Sequence
  Synthetic oligonucleotide
ttacaagagtgaggagagaagtagcaagta

SEQ ID NO: 16427 - DNA, 30 bp, Artificial Sequence
  Synthetic oligonucleotide
ccaaggcaaaagggaattccacgtttagta

SEQ ID NO: 16428 - DNA, 30 bp, Artificial Sequence
  Synthetic oligonucleotide
ccaccggcaatctgagactaacgtaacgta

SEQ ID NO: 16429 - DNA, 30 bp, Artificial Sequence
  Synthetic oligonucleotide
tgcccaacaacccacctacagtaagccgta

SEQ ID NO: 16430 - DNA, 31 bp, Artificial Sequence
  Synthetic oligonucleotide
caggacgagatgccagtactttgccagcgta

SEQ ID NO: 16431 - DNA, 31 bp, Artificial Sequence
  Synthetic oligonucleotide
ggaaaatacactcactgcagtagctagcgta

SEQ ID NO: 16432 - DNA, 30 bp, Artificial Sequence
  Synthetic oligonucleotide
gtgtaacgaaccgtagggtggtcaggcgta

SEQ ID NO: 16433 - DNA, 30 bp, Artificial Sequence
  Synthetic oligonucleotide
gtggaactgaaccggcggaggaagatcgta

SEQ ID NO: 16434 - DNA, 30 bp, Artificial Sequence
  Synthetic oligonucleotide
aaggtcaagaggagtaatcgccccagggta

SEQ ID NO: 16435 - DNA, 30 bp, Artificial Sequence
  Synthetic oligonucleotide
aggaagagggattgaatctggtgactggta

SEQ ID NO: 16436 - DNA, 30 bp, Artificial Sequence
  Synthetic oligonucleotide
acacgaaacaagatcattggggccctggta

SEQ ID NO: 16437 - DNA, 30 bp, Artificial Sequence
  Synthetic oligonucleotide
gaacggaagatatgacagaataggagatta

SEQ ID NO: 16438 - DNA, 30 bp, Artificial Sequence
  Synthetic oligonucleotide
cgatacactagaaaccaggaatgacactta

SEQ ID NO: 16439 - DNA, 30 bp, Artificial Sequence
  Synthetic oligonucleotide
ggtggaagcgagaaatgcgcacacatgtta

SEQ ID NO: 16440 - DNA, 30 bp, Artificial Sequence
  Synthetic oligonucleotide
gtaggacaacgaaaacaagtcagtacttta

SEQ ID NO: 16441 - DNA, 30 bp, Artificial Sequence
  Synthetic oligonucleotide
gtgcaagagtgtgcagaaggcacgcaaaac

SEQ ID NO: 16442 - DNA, 30 bp, Artificial Sequence
  Synthetic oligonucleotide
acggaccttagtaatcagtgagcaccaaac

SEQ ID NO: 16443 - DNA, 30 bp, Artificial Sequence
  Synthetic oligonucleotide
gcgagagcataacacatctccactctcaac

SEQ ID NO: 16444 - DNA, 30 bp, Artificial Sequence
  Synthetic oligonucleotide
aggaagaactaagcctgggttaatgggaac

SEQ ID NO: 16445 - DNA, 30 bp, Artificial Sequence
  Synthetic oligonucleotide
gtgaggctacgagccaagacaaccactaac

SEQ ID NO: 16446 - DNA, 30 bp, Artificial Sequence
  Synthetic oligonucleotide
tgtaagaggtgctaacaggtgatcgtacac

SEQ ID NO: 16447 - DNA, 30 bp, Artificial Sequence
  Synthetic oligonucleotide
agagcccaagagtgcgggagaaagagccac

SEQ ID NO: 16448 - DNA, 30 bp, Artificial Sequence
  Synthetic oligonucleotide
cgtcagaacaggataatgtaatcaggccac

SEQ ID NO: 16449 - DNA, 30 bp, Artificial Sequence
  Synthetic oligonucleotide
ggctcgaatgcgaaatcaggtacatgccac

SEQ ID NO: 16450 - DNA, 30 bp, Artificial Sequence
  Synthetic oligonucleotide
cgacgccggaatcgtatgaactgcctccac

SEQ ID NO: 16451 - DNA, 30 bp, Artificial Sequence
  Synthetic oligonucleotide
acagcaacaccaacaaaggaaagcgggcac

SEQ ID NO: 16452 - DNA, 30 bp, Artificial Sequence
  Synthetic oligonucleotide
caaggtagagaggacctcactagtgtgcac

SEQ ID NO: 16453 - DNA, 30 bp, Artificial Sequence
  Synthetic oligonucleotide
ggcacgcaaaccgcaccaaaaggacatcac

SEQ ID NO: 16454 - DNA, 30 bp, Artificial Sequence
  Synthetic oligonucleotide
ggggactgcgggggatgaaacactactcac

SEQ ID NO: 16455 - DNA, 30 bp, Artificial Sequence
  Synthetic oligonucleotide
ccatacaggctagaatcactgaatcgtcac

SEQ ID NO: 16456 - DNA, 30 bp, Artificial Sequence
  Synthetic oligonucleotide
agccagagggatctaagttacacacttcac

SEQ ID NO: 16457 - DNA, 30 bp, Artificial Sequence
  Synthetic oligonucleotide
cgaaaagcgagcaggctggtggagtttcac

SEQ ID NO: 16458 - DNA, 30 bp, Artificial Sequence
  Synthetic oligonucleotide
ctggcacgggagcccactggatcaacagac

SEQ ID NO: 16459 - DNA, 30 bp, Artificial Sequence
  Synthetic oligonucleotide
agggagtatggacgacgaggattcatagac

SEQ ID NO: 16460 - DNA, 30 bp, Artificial Sequence
  Synthetic oligonucleotide
agccaagtgcgatgcgtaagaccacccgac

SEQ ID NO: 16461 - DNA, 30 bp, Artificial Sequence
  Synthetic oligonucleotide
acgcgggcatggaaatgagggcctcccgac

SEQ ID NO: 16462 - DNA, 30 bp, Artificial Sequence
  Synthetic oligonucleotide
cggacgaacacgatgggtccaaacctcgac

SEQ ID NO: 16463 - DNA, 30 bp, Artificial Sequence
  Synthetic oligonucleotide
agccataaggaaatagacgaagagtgatac

SEQ ID NO: 16464 - DNA, 30 bp, Artificial Sequence
  Synthetic oligonucleotide
agatgcgagcaaaaccgaacccatcactac

SEQ ID NO: 16465 - DNA, 30 bp, Artificial Sequence
  Synthetic oligonucleotide
acgacggtagaggcctaagacattgactac

SEQ ID NO: 16466 - DNA, 30 bp, Artificial Sequence
  Synthetic oligonucleotide
acgttcgaaaaataccagaggccatactac

SEQ ID NO: 16467 - DNA, 30 bp, Artificial Sequence
  Synthetic oligonucleotide
cggaaagagggcggcgtgataccagtttac

SEQ ID NO: 16468 - DNA, 30 bp, Artificial Sequence
  Synthetic oligonucleotide
aacgaaacaacaagagagtggggggatacc

SEQ ID NO: 16469 - DNA, 30 bp, Artificial Sequence
  Synthetic oligonucleotide
caataactaaggcgagaaaattaggttacc

SEQ ID NO: 16470 - DNA, 30 bp, Artificial Sequence
  Synthetic oligonucleotide
ggaggaagaatgaatcccctatagaaagcc

SEQ ID NO: 16471 - DNA, 30 bp, Artificial Sequence
  Synthetic oligonucleotide
acgggtgaaaatcagagaaataacagagcc

SEQ ID NO: 16472 - DNA, 30 bp, Artificial Sequence
  Synthetic oligonucleotide
tcgtcaaaataatccagacatagagttgcc

SEQ ID NO: 16473 - DNA, 30 bp, Artificial Sequence
  Synthetic oligonucleotide
gggcaaaaaataaacgatagcccgacctcc

SEQ ID NO: 16474 - DNA, 30 bp, Artificial Sequence
  Synthetic oligonucleotide
tagaacagagtacaggggacagccacgtcc

SEQ ID NO: 16475 - DNA, 30 bp, Artificial Sequence
  Synthetic oligonucleotide
aagtgggtcggatcaaagggaaaaacaagc

SEQ ID NO: 16476 - DNA, 30 bp, Artificial Sequence
  Synthetic oligonucleotide
taggaaaggtggaagctaatataggagagc

SEQ ID NO: 16477 - DNA, 30 bp, Artificial Sequence
  Synthetic oligonucleotide
tgtaaccggagtggacaccagaagcatagc

SEQ ID NO: 16478 - DNA, 30 bp, Artificial Sequence
  Synthetic oligonucleotide
acttagtcgaaggcgaggtcaagccaccgc

SEQ ID NO: 16479 - DNA, 30 bp, Artificial Sequence
  Synthetic oligonucleotide
gcgtcgactgtcgtcaaaaccagcgcaggc

SEQ ID NO: 16480 - DNA, 30 bp, Artificial Sequence
  Synthetic oligonucleotide
agagaaccaggcgggctaaacgagctcggc

SEQ ID NO: 16481 - DNA, 30 bp, Artificial Sequence
  Synthetic oligonucleotide
cgacaaagcttgttagcgcaacgagggggc

SEQ ID NO: 16482 - DNA, 30 bp, Artificial Sequence
  Synthetic oligonucleotide
agcgaatcccagtgtgttgggcaagatggc

SEQ ID NO: 16483 - DNA, 30 bp, Artificial Sequence
  Synthetic oligonucleotide
gcggcatcaagaccaaacagacagtatggc

SEQ ID NO: 16484 - DNA, 30 bp, Artificial Sequence
  Synthetic oligonucleotide
catcaggaatgtaacgaaaacacgcaatgc

SEQ ID NO: 16485 - DNA, 31 bp, Artificial Sequence
  Synthetic oligonucleotide
acgataacttaaaaccaaagaatgaggatgc

SEQ ID NO: 16486 - DNA, 30 bp, Artificial Sequence
  Synthetic oligonucleotide
cgagcgcaagaagactccgacctaagctgc

SEQ ID NO: 16487 - DNA, 30 bp, Artificial Sequence
  Synthetic oligonucleotide
cgagaagcaatgaacagtgcacaatagatc

SEQ ID NO: 16488 - DNA, 30 bp, Artificial Sequence
  Synthetic oligonucleotide
gcgtgaacacatctaaaacctcagatgatc

SEQ ID NO: 16489 - DNA, 30 bp, Artificial Sequence
  Synthetic oligonucleotide
gcaaggcaatatgcttgcaaggagagactc

SEQ ID NO: 16490 - DNA, 30 bp, Artificial Sequence
  Synthetic oligonucleotide
gaaggcaagaattgcaaaggcgagtaagtc

SEQ ID NO: 16491 - DNA, 30 bp, Artificial Sequence
  Synthetic oligonucleotide
tgacgggcgaaaaacgggggtgttacagtc

SEQ ID NO: 16492 - DNA, 30 bp, Artificial Sequence
  Synthetic oligonucleotide
gcggtaggctagcaagagagtacacgagtc

SEQ ID NO: 16493 - DNA, 30 bp, Artificial Sequence
  Synthetic oligonucleotide
aggtgctggcagtggatgaagaaagtagtc

SEQ ID NO: 16494 - DNA, 30 bp, Artificial Sequence
  Synthetic oligonucleotide
acgggcaaagatatcgtaacatgtagtgtc

SEQ ID NO: 16495 - DNA, 30 bp, Artificial Sequence
  Synthetic oligonucleotide
cgaaagacgaaaacaagtacgctgtgtttc

SEQ ID NO: 16496 - DNA, 30 bp, Artificial Sequence
  Synthetic oligonucleotide
acagcatacccaaagtcaggtctaacaaag

SEQ ID NO: 16497 - DNA, 30 bp, Artificial Sequence
  Synthetic oligonucleotide
cagcgagaaccatataccggataaccaaag

SEQ ID NO: 16498 - DNA, 30 bp, Artificial Sequence
  Synthetic oligonucleotide
tagtcagtcacctccgagcaactcgcaaag

SEQ ID NO: 16499 - DNA, 30 bp, Artificial Sequence
  Synthetic oligonucleotide
atacggcacggactgagaggactcgcaaag

SEQ ID NO: 16500 - DNA, 30 bp, Artificial Sequence
  Synthetic oligonucleotide
cgaggaccgtgactaccaggtgtcagaaag

SEQ ID NO: 16501 - DNA, 30 bp, Artificial Sequence
  Synthetic oligonucleotide
agcgcatccgcaaggaaatcttcgaacaag

SEQ ID NO: 16502 - DNA, 30 bp, Artificial Sequence
  Synthetic oligonucleotide
agagcgtacaccagcgcacgggaaaccaag

SEQ ID NO: 16503 - DNA, 30 bp, Artificial Sequence
  Synthetic oligonucleotide
cgaacatgagccaataaacgctcagccaag

SEQ ID NO: 16504 - DNA, 30 bp, Artificial Sequence
  Synthetic oligonucleotide
cgactgtaaaacgagaggcaagactccaag

SEQ ID NO: 16505 - DNA, 30 bp, Artificial Sequence
  Synthetic oligonucleotide
ggcgtaagacgatagttgcgccccagcaag

SEQ ID NO: 16506 - DNA, 30 bp, Artificial Sequence
  Synthetic oligonucleotide
aggatacggaagggagtcatttacatcaag

SEQ ID NO: 16507 - DNA, 30 bp, Artificial Sequence
  Synthetic oligonucleotide
aggagcgaataacggagattggcactcaag

SEQ ID NO: 16508 - DNA, 30 bp, Artificial Sequence
  Synthetic oligonucleotide
cgagtacgcgaggctatatgcggagagaag

SEQ ID NO: 16509 - DNA, 30 bp, Artificial Sequence
  Synthetic oligonucleotide
gctagacggaaaagagtatgttactagaag

SEQ ID NO: 16510 - DNA, 30 bp, Artificial Sequence
  Synthetic oligonucleotide
ggcaaaccaaagagcagtcgggagaggaag

SEQ ID NO: 16511 - DNA, 30 bp, Artificial Sequence
  Synthetic oligonucleotide
cggtgtacgaccgtaaggccggaaaataag

SEQ ID NO: 16512 - DNA, 30 bp, Artificial Sequence
  Synthetic oligonucleotide
ggtcaggttggagcttccagacgaaataag

SEQ ID NO: 16513 - DNA, 30 bp, Artificial Sequence
  Synthetic oligonucleotide
catcgcagtaggtgagttaggtggaataag

SEQ ID NO: 16514 - DNA, 30 bp, Artificial Sequence
  Synthetic oligonucleotide
taatacagtaactgcgcgaaaagtgataag

SEQ ID NO: 16515 - DNA, 30 bp, Artificial Sequence
  Synthetic oligonucleotide
aggcccacaaactgcgggattgccactaag

SEQ ID NO: 16516 - DNA, 30 bp, Artificial Sequence
  Synthetic oligonucleotide
acatcgaataaactccgatttgcgactaag

SEQ ID NO: 16517 - DNA, 30 bp, Artificial Sequence
  Synthetic oligonucleotide
ctcagaggacaataaccatgctaggctaag

SEQ ID NO: 16518 - DNA, 30 bp, Artificial Sequence
  Synthetic oligonucleotide
cacaaccgggtgcaaaaaaccgccagtaag

SEQ ID NO: 16519 - DNA, 30 bp, Artificial Sequence
  Synthetic oligonucleotide
gtgctatcagaaggagcggagaagagtaag

SEQ ID NO: 16520 - DNA, 30 bp, Artificial Sequence
  Synthetic oligonucleotide
agtagatcaaatagtttataggactgtaag

SEQ ID NO: 16521 - DNA, 30 bp, Artificial Sequence
  Synthetic oligonucleotide
caagcgaaagaaggagtatgaacaattaag

SEQ ID NO: 16522 - DNA, 30 bp, Artificial Sequence
  Synthetic oligonucleotide
atcaagaacggtgcgaactagaggattaag

SEQ ID NO: 16523 - DNA, 30 bp, Artificial Sequence
  Synthetic oligonucleotide
gtgctagcgatcgggaatacaccagttaag

SEQ ID NO: 16524 - DNA, 30 bp, Artificial Sequence
  Synthetic oligonucleotide
cgaccgaacaggccgatgcgccagaaacag

SEQ ID NO: 16525 - DNA, 30 bp, Artificial Sequence
  Synthetic oligonucleotide
atgcgagggacggaaggttagtttaaacag

SEQ ID NO: 16526 - DNA, 30 bp, Artificial Sequence
  Synthetic oligonucleotide
aggtataagaatggtagctgcaaacaacag

SEQ ID NO: 16527 - DNA, 30 bp, Artificial Sequence
  Synthetic oligonucleotide
caccgagtaagtatcgcacgataacaacag

SEQ ID NO: 16528 - DNA, 30 bp, Artificial Sequence
  Synthetic oligonucleotide
gtgggaaggggctgaggcatgatcgaacag

SEQ ID NO: 16529 - DNA, 30 bp, Artificial Sequence
  Synthetic oligonucleotide
ccgagcacctatgcacatcatatctaacag

SEQ ID NO: 16530 - DNA, 30 bp, Artificial Sequence
  Synthetic oligonucleotide
cagaaaccggtcaggtcgtcataaatacag

SEQ ID NO: 16531 - DNA, 30 bp, Artificial Sequence
  Synthetic oligonucleotide
cgcagggggatccgaagtgcacagatacag

SEQ ID NO: 16532 - DNA, 30 bp, Artificial Sequence
  Synthetic oligonucleotide
taccgtcgtcgagaagataagcgcgaccag

SEQ ID NO: 16533 - DNA, 30 bp, Artificial Sequence
  Synthetic oligonucleotide
agggacagaaagtcatgtgatcaccagcag

SEQ ID NO: 16534 - DNA, 30 bp, Artificial Sequence
  Synthetic oligonucleotide
gtcgaggggggccaaataggctaactgcag

SEQ ID NO: 16535 - DNA, 30 bp, Artificial Sequence
  Synthetic oligonucleotide
caatcgaaaagcaaaaatgccatgaatcag

SEQ ID NO: 16536 - DNA, 30 bp, Artificial Sequence
  Synthetic oligonucleotide
cgtgcctcgcggagaaggaagacgactcag

SEQ ID NO: 16537 - DNA, 30 bp, Artificial Sequence
  Synthetic oligonucleotide
taagtaaagtgcgcctgaaaaaaaggtcag

SEQ ID NO: 16538 - DNA, 30 bp, Artificial Sequence
  Synthetic oligonucleotide
atgcgagagtcgcgttggaatgatgttcag

SEQ ID NO: 16539 - DNA, 30 bp, Artificial Sequence
  Synthetic oligonucleotide
ccaggataccgtcatgtcgagggtcaagag

SEQ ID NO: 16540 - DNA, 30 bp, Artificial Sequence
  Synthetic oligonucleotide
tcgaggcgggcaacttcgtggcaagaagag

SEQ ID NO: 16541 - DNA, 30 bp, Artificial Sequence
  Synthetic oligonucleotide
ggacctgataagtaagtagtaggcgaagag

SEQ ID NO: 16542 - DNA, 30 bp, Artificial Sequence
  Synthetic oligonucleotide
atgagctaacgtcagagaccgggcgaagag

SEQ ID NO: 16543 - DNA, 30 bp, Artificial Sequence
  Synthetic oligonucleotide
gtaagcaacagtgtgtaactgtaccgagag

SEQ ID NO: 16544 - DNA, 32 bp, Artificial Sequence
  Synthetic oligonucleotide
cgacacgtgccactgaaaaggcgcaaggagag

SEQ ID NO: 16545 - DNA, 30 bp, Artificial Sequence
  Synthetic oligonucleotide
aaaagagcgatgcgataatgaggggtagag

SEQ ID NO: 16546 - DNA, 30 bp, Artificial Sequence
  Synthetic oligonucleotide
gggtcgtcatgcgaggaggcggtcgacgag

SEQ ID NO: 16547 - DNA, 30 bp, Artificial Sequence
  Synthetic oligonucleotide
tgcagaaggtaagcccactgcagggacgag

SEQ ID NO: 16548 - DNA, 30 bp, Artificial Sequence
  Synthetic oligonucleotide
acttagctaactgtatggaagatgcccgag

SEQ ID NO: 16549 - DNA, 30 bp, Artificial Sequence
  Synthetic oligonucleotide
ggtaacagtccaatggccgcaccaagcgag

SEQ ID NO: 16550 - DNA, 30 bp, Artificial Sequence
  Synthetic oligonucleotide
cagataaatgtaagatcattggaacgcgag

SEQ ID NO: 16551 - DNA, 30 bp, Artificial Sequence
  Synthetic oligonucleotide
aaccataactgggacgaccaacggatcgag

SEQ ID NO: 16552 - DNA, 30 bp, Artificial Sequence
  Synthetic oligonucleotide
ggaagaacgcctgtacttgaacatatcgag

SEQ ID NO: 16553 - DNA, 30 bp, Artificial Sequence
  Synthetic oligonucleotide
ccaaatccagggtgagaaatgagcttcgag

SEQ ID NO: 16554 - DNA, 30 bp, Artificial Sequence
  Synthetic oligonucleotide
ccacagactagtcgagggggatcgagggag

SEQ ID NO: 16555 - DNA, 31 bp, Artificial Sequence
  Synthetic oligonucleotide
gttcgcgcataatgaacaaccagtaggggag

SEQ ID NO: 16556 - DNA, 30 bp, Artificial Sequence
  Synthetic oligonucleotide
cgttccgagaaagttagcctatgttgggag

SEQ ID NO: 16557 - DNA, 30 bp, Artificial Sequence
  Synthetic oligonucleotide
cagtagaaggagatagattggcaattggag

SEQ ID NO: 16558 - DNA, 30 bp, Artificial Sequence
  Synthetic oligonucleotide
ggacagcgaagaccacacgtaacgcatgag

SEQ ID NO: 16559 - DNA, 30 bp, Artificial Sequence
  Synthetic oligonucleotide
cccaagcacatgagctagcatcgccgtgag

SEQ ID NO: 16560 - DNA, 30 bp, Artificial Sequence
  Synthetic oligonucleotide
atgatcagggcgaccgaactgctccgtgag

SEQ ID NO: 16561 - DNA, 30 bp, Artificial Sequence
  Synthetic oligonucleotide
acataagcagcagtatgagatcttcgtgag

SEQ ID NO: 16562 - DNA, 30 bp, Artificial Sequence
  Synthetic oligonucleotide
ggggatgccctaaatcagctgatggttgag

SEQ ID NO: 16563 - DNA, 30 bp, Artificial Sequence
  Synthetic oligonucleotide
gcgggcaagctttgctcggggaagaaatag

SEQ ID NO: 16564 - DNA, 30 bp, Artificial Sequence
  Synthetic oligonucleotide
ggacatagaacgggtctaaaagcacaatag

SEQ ID NO: 16565 - DNA, 30 bp, Artificial Sequence
  Synthetic oligonucleotide
agaaacaatgccacccatccaaaccaatag

SEQ ID NO: 16566 - DNA, 30 bp, Artificial Sequence
  Synthetic oligonucleotide
agatagaggcctgaaaaaatttcagaatag

SEQ ID NO: 16567 - DNA, 31 bp, Artificial Sequence
  Synthetic oligonucleotide
ataggaatagcacatatttcaccacccatag

SEQ ID NO: 16568 - DNA, 30 bp, Artificial Sequence
  Synthetic oligonucleotide
cctcaaaaggacacatatctggatccatag

SEQ ID NO: 16569 - DNA, 30 bp, Artificial Sequence
  Synthetic oligonucleotide
cgtaatggtaaggattaggcaggtccatag

SEQ ID NO: 16570 - DNA, 30 bp, Artificial Sequence
  Synthetic oligonucleotide
agcgtgaaaaattgccgcgacccgaactag

SEQ ID NO: 16571 - DNA, 30 bp, Artificial Sequence
  Synthetic oligonucleotide
aggttcagaaacaatgcacatacgtactag

SEQ ID NO: 16572 - DNA, 30 bp, Artificial Sequence
  Synthetic oligonucleotide
aacaaacgtcaaggacagaagcttggctag

SEQ ID NO: 16573 - DNA, 30 bp, Artificial Sequence
  Synthetic oligonucleotide
gtgggactgtaaaaagcagttaataagtag

SEQ ID NO: 16574 - DNA, 30 bp, Artificial Sequence
  Synthetic oligonucleotide
gtgcgaccagatgaatcgggttgagagtag

SEQ ID NO: 16575 - DNA, 30 bp, Artificial Sequence
  Synthetic oligonucleotide
tgatggagacgaactgacgaacccctgtag

SEQ ID NO: 16576 - DNA, 30 bp, Artificial Sequence
  Synthetic oligonucleotide
ataggacgagtcgggaagtctagagattag

SEQ ID NO: 16577 - DNA, 30 bp, Artificial Sequence
  Synthetic oligonucleotide
cacggataagtaccaatcaaataggcttag

SEQ ID NO: 16578 - DNA, 30 bp, Artificial Sequence
  Synthetic oligonucleotide
cggccaaaaaaaatgatatacaccggaacg

SEQ ID NO: 16579 - DNA, 30 bp, Artificial Sequence
  Synthetic oligonucleotide
agtaaggtcagggtcatggtgagaataacg

SEQ ID NO: 16580 - DNA, 30 bp, Artificial Sequence
  Synthetic oligonucleotide
acggtgagatagagtgggtatggaaccacg

SEQ ID NO: 16581 - DNA, 30 bp, Artificial Sequence
  Synthetic oligonucleotide
aggacggtcacacacatacattacgccacg

SEQ ID NO: 16582 - DNA, 30 bp, Artificial Sequence
  Synthetic oligonucleotide
tggactgcgaattcgccgataagaatcacg

SEQ ID NO: 16583 - DNA, 30 bp, Artificial Sequence
  Synthetic oligonucleotide
ttgaggccgtcgaagaagagcggcaggacg

SEQ ID NO: 16584 - DNA, 30 bp, Artificial Sequence
  Synthetic oligonucleotide
aggagaacatgacattgatatatgcctacg

SEQ ID NO: 16585 - DNA, 30 bp, Artificial Sequence
  Synthetic oligonucleotide
acgtgaaaaccgacttcgtagcccgctacg

SEQ ID NO: 16586 - DNA, 30 bp, Artificial Sequence
  Synthetic oligonucleotide
aacgtcgaggatttggctagaaaacaaccg

SEQ ID NO: 16587 - DNA, 30 bp, Artificial Sequence
  Synthetic oligonucleotide
caacgaattcacaaggcgaacatctcaccg

SEQ ID NO: 16588 - DNA, 30 bp, Artificial Sequence
  Synthetic oligonucleotide
cctgcagaagaccaaaaagattgaggaccg

SEQ ID NO: 16589 - DNA, 30 bp, Artificial Sequence
  Synthetic oligonucleotide
cgggaccagtactacgagcgagtgataccg

SEQ ID NO: 16590 - DNA, 30 bp, Artificial Sequence
  Synthetic oligonucleotide
cgcgacaaggccacatgctgatagaacccg

SEQ ID NO: 16591 - DNA, 30 bp, Artificial Sequence
  Synthetic oligonucleotide
gggaatacgtactacctaacatcgaacccg

SEQ ID NO: 16592 - DNA, 30 bp, Artificial Sequence
  Synthetic oligonucleotide
gatacggctggaaaaatcgagacacctccg

SEQ ID NO: 16593 - DNA, 30 bp, Artificial Sequence
  Synthetic oligonucleotide
gttcaaggtgggcgagacatcaagaaagcg

SEQ ID NO: 16594 - DNA, 30 bp, Artificial Sequence
  Synthetic oligonucleotide
agagatcgcgggccgtaagagacagaagcg

SEQ ID NO: 16595 - DNA, 30 bp, Artificial Sequence
  Synthetic oligonucleotide
aataaaacaacgacaccttaagatcgagcg

SEQ ID NO: 16596 - DNA, 30 bp, Artificial Sequence
  Synthetic oligonucleotide
cgaccagaagttataaggctgtgatgagcg

SEQ ID NO: 16597 - DNA, 30 bp, Artificial Sequence
  Synthetic oligonucleotide
ctagtggatcccgaagctaggaggatagcg

SEQ ID NO: 16598 - DNA, 30 bp, Artificial Sequence
  Synthetic oligonucleotide
aagccgaggtgaggcacggtaaagagcgcg

SEQ ID NO: 16599 - DNA, 30 bp, Artificial Sequence
  Synthetic oligonucleotide
accgtatgaggaatcgattacgggcaggcg

SEQ ID NO: 16600 - DNA, 30 bp, Artificial Sequence
  Synthetic oligonucleotide
tcagccagaatgacttctagcgaaatggcg

SEQ ID NO: 16601 - DNA, 30 bp, Artificial Sequence
  Synthetic oligonucleotide
tcaggacaatcttgcgtcaagagagatgcg

SEQ ID NO: 16602 - DNA, 30 bp, Artificial Sequence
  Synthetic oligonucleotide
gaaaagagacagtcgacatgaagagctgcg

SEQ ID NO: 16603 - DNA, 30 bp, Artificial Sequence
  Synthetic oligonucleotide
cgagtgaaagacgattcaaagagtgctgcg

SEQ ID NO: 16604 - DNA, 30 bp, Artificial Sequence
  Synthetic oligonucleotide
tccgcaaaactagggccaatacgacgatcg

SEQ ID NO: 16605 - DNA, 30 bp, Artificial Sequence
  Synthetic oligonucleotide
gcgtgaaaagagataagatgggttaactcg

SEQ ID NO: 16606 - DNA, 30 bp, Artificial Sequence
  Synthetic oligonucleotide
tgcagattagctgaaaatcgggcggactcg

SEQ ID NO: 16607 - DNA, 30 bp, Artificial Sequence
  Synthetic oligonucleotide
agggtggtcatcaagcaaagcacaccgtcg

SEQ ID NO: 16608 - DNA, 30 bp, Artificial Sequence
  Synthetic oligonucleotide
aggaatagacccattccattcaagccaagg

SEQ ID NO: 16609 - DNA, 30 bp, Artificial Sequence
  Synthetic oligonucleotide
aaacgtcagccgtaaccggagagagcaagg

SEQ ID NO: 16610 - DNA, 30 bp, Artificial Sequence
  Synthetic oligonucleotide
ggagcacagggttgtgagatctgcgtaagg

SEQ ID NO: 16611 - DNA, 30 bp, Artificial Sequence
  Synthetic oligonucleotide
tgcaggaagaaaaccgcaatcgcgaccagg

SEQ ID NO: 16612 - DNA, 30 bp, Artificial Sequence
  Synthetic oligonucleotide
aacaatggagcatagagcaagggtaccagg

SEQ ID NO: 16613 - DNA, 30 bp, Artificial Sequence
  Synthetic oligonucleotide
cggtacacagtatgtaatagcgaaagcagg

SEQ ID NO: 16614 - DNA, 30 bp, Artificial Sequence
  Synthetic oligonucleotide
tcttgcgggaaatgtgaacgaggttagagg

SEQ ID NO: 16615 - DNA, 30 bp, Artificial Sequence
  Synthetic oligonucleotide
acacgcaagatcatggtatgagttaggagg

SEQ ID NO: 16616 - DNA, 30 bp, Artificial Sequence
  Synthetic oligonucleotide
ggcaatcattacagagtagacaggtggagg

SEQ ID NO: 16617 - DNA, 30 bp, Artificial Sequence
  Synthetic oligonucleotide
gggaaggtaggagcgtgacgaccattgagg

SEQ ID NO: 16618 - DNA, 30 bp, Artificial Sequence
  Synthetic oligonucleotide
tggatataaggtaaacaactacgtcatagg

SEQ ID NO: 16619 - DNA, 30 bp, Artificial Sequence
  Synthetic oligonucleotide
ccacattagaaccgcagaggaagcagtagg

SEQ ID NO: 16620 - DNA, 30 bp, Artificial Sequence
  Synthetic oligonucleotide
ataagtgcgagaggactgggactatgtagg

SEQ ID NO: 16621 - DNA, 30 bp, Artificial Sequence
  Synthetic oligonucleotide
tgccggggccaaggcgtcacaacatttagg

SEQ ID NO: 16622 - DNA, 30 bp, Artificial Sequence
  Synthetic oligonucleotide
acgtccagggaacacgaaagtaggtgacgg

SEQ ID NO: 16623 - DNA, 30 bp, Artificial Sequence
  Synthetic oligonucleotide
acgtcagttgcaggcgacaagttcaaccgg

SEQ ID NO: 16624 - DNA, 30 bp, Artificial Sequence
  Synthetic oligonucleotide
cggagtcagcaaatcatagcccggaaccgg

SEQ ID NO: 16625 - DNA, 31 bp, Artificial Sequence
  Synthetic oligonucleotide
catgttacaagaaatacacgtgagcgagcgg

SEQ ID NO: 16626 - DNA, 30 bp, Artificial Sequence
  Synthetic oligonucleotide
gcagggcagctaaatggaaaagtatcgcgg

SEQ ID NO: 16627 - DNA, 30 bp, Artificial Sequence
  Synthetic oligonucleotide
acgcccgaaacgtaagactagcggaaaggg

SEQ ID NO: 16628 - DNA, 30 bp, Artificial Sequence
  Synthetic oligonucleotide
cttgggccaaaaaagtcgtagctagaaggg

SEQ ID NO: 16629 - DNA, 30 bp, Artificial Sequence
  Synthetic oligonucleotide
cgaatgcttccaaggctacaaaccgaaggg

SEQ ID NO: 16630 - DNA, 30 bp, Artificial Sequence
  Synthetic oligonucleotide
acgcgacattgcgggacgagtggggaaggg

SEQ ID NO: 16631 - DNA, 30 bp, Artificial Sequence
  Synthetic oligonucleotide
acataggacgtatcaactttgaacagaggg

SEQ ID NO: 16632 - DNA, 30 bp, Artificial Sequence
  Synthetic oligonucleotide
catggaagagggtgagaagccgcacgaggg

SEQ ID NO: 16633 - DNA, 29 bp, Artificial Sequence
  Synthetic oligonucleotide
acgggagctgggtgaatagaagcataggg

SEQ ID NO: 16634 - DNA, 30 bp, Artificial Sequence
  Synthetic oligonucleotide
accatgtggagaacagaaacaaagataggg

SEQ ID NO: 16635 - DNA, 30 bp, Artificial Sequence
  Synthetic oligonucleotide
ctcggtatgaacaccaaaacacaaaacggg

SEQ ID NO: 16636 - DNA, 30 bp, Artificial Sequence
  Synthetic oligonucleotide
acgcgagtgggaagttcaagctatcacggg

SEQ ID NO: 16637 - DNA, 30 bp, Artificial Sequence
  Synthetic oligonucleotide
cgatgaataagggcccgttgaccgatgggg

SEQ ID NO: 16638 - DNA, 30 bp, Artificial Sequence
  Synthetic oligonucleotide
agaaacagatgccaactccaaccgaatggg

SEQ ID NO: 16639 - DNA, 30 bp, Artificial Sequence
  Synthetic oligonucleotide
cgatacggaagtgaaggcagtatgcaatgg

SEQ ID NO: 16640 - DNA, 30 bp, Artificial Sequence
  Synthetic oligonucleotide
gacaacggcgtgtaagaatagcaaacatgg

SEQ ID NO: 16641 - DNA, 30 bp, Artificial Sequence
  Synthetic oligonucleotide
agccgagactaatacaatacttatacatgg

SEQ ID NO: 16642 - DNA, 30 bp, Artificial Sequence
  Synthetic oligonucleotide
caagcaaaacgtaaggaaagatgagcatgg

SEQ ID NO: 16643 - DNA, 30 bp, Artificial Sequence
  Synthetic oligonucleotide
agcatggtgatcaggaacttagaacgatgg

SEQ ID NO: 16644 - DNA, 30 bp, Artificial Sequence
  Synthetic oligonucleotide
acactcacaagggaatgaggagtatactgg

SEQ ID NO: 16645 - DNA, 30 bp, Artificial Sequence
  Synthetic oligonucleotide
cgcggaaagaatctagggagtggtcgctgg

SEQ ID NO: 16646 - DNA, 30 bp, Artificial Sequence
  Synthetic oligonucleotide
acagaaatcatacatagccccaggacaatg

SEQ ID NO: 16647 - DNA, 30 bp, Artificial Sequence
  Synthetic oligonucleotide
gcaaacggcaggccaggagaaaagcgcatg

SEQ ID NO: 16648 - DNA, 30 bp, Artificial Sequence
  Synthetic oligonucleotide
cgaaaaataagatagagatgaaagggcatg

SEQ ID NO: 16649 - DNA, 30 bp, Artificial Sequence
  Synthetic oligonucleotide
ggtaatcacaaaaaggatatccgctagatg

SEQ ID NO: 16650 - DNA, 30 bp, Artificial Sequence
  Synthetic oligonucleotide
agccggattagacccgtggagatgccgatg

SEQ ID NO: 16651 - DNA, 30 bp, Artificial Sequence
  Synthetic oligonucleotide
cagtagccgaatgtgaaacgtggcaggatg

SEQ ID NO: 16652 - DNA, 30 bp, Artificial Sequence
  Synthetic oligonucleotide
cgagaggaggacattgccaggatagatatg

SEQ ID NO: 16653 - DNA, 30 bp, Artificial Sequence
  Synthetic oligonucleotide
tgacgggaccgatgagtcttaacctatatg

SEQ ID NO: 16654 - DNA, 30 bp, Artificial Sequence
  Synthetic oligonucleotide
ccgtaaccaccatatggtcgagaaggtatg

SEQ ID NO: 16655 - DNA, 30 bp, Artificial Sequence
  Synthetic oligonucleotide
cgataaactgggtcggagtatacgtaactg

SEQ ID NO: 16656 - DNA, 30 bp, Artificial Sequence
  Synthetic oligonucleotide
atggacatagtaccgaatcttcaccgactg

SEQ ID NO: 16657 - DNA, 30 bp, Artificial Sequence
  Synthetic oligonucleotide
acatagggtggcagaggctgaaacgcgctg

SEQ ID NO: 16658 - DNA, 30 bp, Artificial Sequence
  Synthetic oligonucleotide
cgaaacggcggtaatctacgtggaaaagtg

SEQ ID NO: 16659 - DNA, 30 bp, Artificial Sequence
  Synthetic oligonucleotide
cattaaggcgcatttagggagaagcaagtg

SEQ ID NO: 16660 - DNA, 30 bp, Artificial Sequence
  Synthetic oligonucleotide
gagcaaacgatcaagatcggttcaacagtg

SEQ ID NO: 16661 - DNA, 30 bp, Artificial Sequence
  Synthetic oligonucleotide
ccgcgtcgtacaatagtacaaatcccagtg

SEQ ID NO: 16662 - DNA, 30 bp, Artificial Sequence
  Synthetic oligonucleotide
agtcgcgcgaactgatttcctactccagtg

SEQ ID NO: 16663 - DNA, 30 bp, Artificial Sequence
  Synthetic oligonucleotide
acggatgaccatgtgcgttaacattcagtg

SEQ ID NO: 16664 - DNA, 30 bp, Artificial Sequence
  Synthetic oligonucleotide
cggcgatggattcagcgagcgcaaagagtg

SEQ ID NO: 16665 - DNA, 30 bp, Artificial Sequence
  Synthetic oligonucleotide
caagcaagggtgacaggaggtaggttagtg

SEQ ID NO: 16666 - DNA, 31 bp, Artificial Sequence
  Synthetic oligonucleotide
ggggcacaaaatcgtaagcatcaaagccgtg

SEQ ID NO: 16667 - DNA, 30 bp, Artificial Sequence
  Synthetic oligonucleotide
cgggagcgtatgagaagacatagatccgtg

SEQ ID NO: 16668 - DNA, 30 bp, Artificial Sequence
  Synthetic oligonucleotide
aacgtggtagagatgtagccatgcgtggtg

SEQ ID NO: 16669 - DNA, 30 bp, Artificial Sequence
  Synthetic oligonucleotide
taggagctgagggagttcggggtgaaattg

SEQ ID NO: 16670 - DNA, 30 bp, Artificial Sequence
  Synthetic oligonucleotide
agggacagacatatcagtatgatggcattg

SEQ ID NO: 16671 - DNA, 30 bp, Artificial Sequence
  Synthetic oligonucleotide
tcgtaaaattagacaggtgaacaacgattg

SEQ ID NO: 16672 - DNA, 30 bp, Artificial Sequence
  Synthetic oligonucleotide
taagggagctcgacggaacgagcctgattg

SEQ ID NO: 16673 - DNA, 30 bp, Artificial Sequence
  Synthetic oligonucleotide
gtcgaagagcgtaatcggataataaccttg

SEQ ID NO: 16674 - DNA, 30 bp, Artificial Sequence
  Synthetic oligonucleotide
ggaaataacacacaaagaaacgaggggttg

SEQ ID NO: 16675 - DNA, 30 bp, Artificial Sequence
  Synthetic oligonucleotide
gtgccgagagtagtaagaaacactgggttg

SEQ ID NO: 16676 - DNA, 30 bp, Artificial Sequence
  Synthetic oligonucleotide
caagagataggggacaggtacaaggtgttg

SEQ ID NO: 16677 - DNA, 30 bp, Artificial Sequence
  Synthetic oligonucleotide
ccgacgcggtagggtcaggaaagatcaaat

SEQ ID NO: 16678 - DNA, 30 bp, Artificial Sequence
  Synthetic oligonucleotide
agataaggctggccaaaataccgaggcaat

SEQ ID NO: 16679 - DNA, 30 bp, Artificial Sequence
  Synthetic oligonucleotide
ctaatcagcaagagggaaggtgtgtgcaat

SEQ ID NO: 16680 - DNA, 30 bp, Artificial Sequence
  Synthetic oligonucleotide
gcgcggaagaaacacacagtaatagagaat

SEQ ID NO: 16681 - DNA, 30 bp, Artificial Sequence
  Synthetic oligonucleotide
cgacagagggcgaatggcggattaacgaat

SEQ ID NO: 16682 - DNA, 30 bp, Artificial Sequence
  Synthetic oligonucleotide
gcgtagaacgtccaggaaatcagagggaat

SEQ ID NO: 16683 - DNA, 30 bp, Artificial Sequence
  Synthetic oligonucleotide
ggtcggggagacatagtagtcagcgtgaat

SEQ ID NO: 16684 - DNA, 30 bp, Artificial Sequence
  Synthetic oligonucleotide
ctacgtaagcggagggggtaccgagataat

SEQ ID NO: 16685 - DNA, 30 bp, Artificial Sequence
  Synthetic oligonucleotide
cgcataacgatggggtcagagtccggtaat

SEQ ID NO: 16686 - DNA, 30 bp, Artificial Sequence
  Synthetic oligonucleotide
cgagaaaccctataaatagcaaggcaacat

SEQ ID NO: 16687 - DNA, 30 bp, Artificial Sequence
  Synthetic oligonucleotide
gacgatagcgataagcgcaatgcagaccat

SEQ ID NO: 16688 - DNA, 30 bp, Artificial Sequence
  Synthetic oligonucleotide
gtacgagatgttcaagaggtccggtagcat

SEQ ID NO: 16689 - DNA, 30 bp, Artificial Sequence
  Synthetic oligonucleotide
tcggcggcagtgaggagaaaggtgaatcat

SEQ ID NO: 16690 - DNA, 30 bp, Artificial Sequence
  Synthetic oligonucleotide
cgagacggctacgggatgttgctcgaagat

SEQ ID NO: 16691 - DNA, 30 bp, Artificial Sequence
  Synthetic oligonucleotide
taatgccaattacgaaatacggcaacagat

SEQ ID NO: 16692 - DNA, 30 bp, Artificial Sequence
  Synthetic oligonucleotide
acggagcagcgagagtcgattatgcgagat

SEQ ID NO: 16693 - DNA, 30 bp, Artificial Sequence
  Synthetic oligonucleotide
cagtcacgaggagaacgagatagtatagat

SEQ ID NO: 16694 - DNA, 30 bp, Artificial Sequence
  Synthetic oligonucleotide
atacgaacgaggctcagaggagctacggat

SEQ ID NO: 16695 - DNA, 30 bp, Artificial Sequence
  Synthetic oligonucleotide
tccacgacacaaacggattaaagtgcggat

SEQ ID NO: 16696 - DNA, 30 bp, Artificial Sequence
  Synthetic oligonucleotide
cgagacgctgagagacttaagccgccatat

SEQ ID NO: 16697 - DNA, 30 bp, Artificial Sequence
  Synthetic oligonucleotide
agcacgtggtagtaagtgtgagaacagtat

SEQ ID NO: 16698 - DNA, 30 bp, Artificial Sequence
  Synthetic oligonucleotide
gcgtaggtgaggaaatgtaagcttacgtat

SEQ ID NO: 16699 - DNA, 30 bp, Artificial Sequence
  Synthetic oligonucleotide
tcgaccaagcgaggagcggagctgcagact

SEQ ID NO: 16700 - DNA, 30 bp, Artificial Sequence
  Synthetic oligonucleotide
cgagacatgaaacttatattcctagagact

SEQ ID NO: 16701 - DNA, 30 bp, Artificial Sequence
  Synthetic oligonucleotide
cgtactcgaaaaactctgtaatctccgact

SEQ ID NO: 16702 - DNA, 30 bp, Artificial Sequence
  Synthetic oligonucleotide
cgatcatgtggcgaagaggcgttccgacct

SEQ ID NO: 16703 - DNA, 30 bp, Artificial Sequence
  Synthetic oligonucleotide
acgatccgatatcgaaaaacaatggtacct

SEQ ID NO: 16704 - DNA, 30 bp, Artificial Sequence
  Synthetic oligonucleotide
cgagggttcatgggtaggagagaaatgcct

SEQ ID NO: 16705 - DNA, 30 bp, Artificial Sequence
  Synthetic oligonucleotide
ggggggggaatccagagagctacactgcct

SEQ ID NO: 16706 - DNA, 30 bp, Artificial Sequence
  Synthetic oligonucleotide
tgccacgaaggacggaaagtggggaaagct

SEQ ID NO: 16707 - DNA, 30 bp, Artificial Sequence
  Synthetic oligonucleotide
atggggtaaaaacccgaaagcgaggaggct

SEQ ID NO: 16708 - DNA, 30 bp, Artificial Sequence
  Synthetic oligonucleotide
cagaggccacaagggggcagaggagatgct

SEQ ID NO: 16709 - DNA, 30 bp, Artificial Sequence
  Synthetic oligonucleotide
tgggaacaacgtgactgaccgaaggaatct

SEQ ID NO: 16710 - DNA, 30 bp, Artificial Sequence
  Synthetic oligonucleotide
catgcatggggtaacgggaatccctcgtct

SEQ ID NO: 16711 - DNA, 30 bp, Artificial Sequence
  Synthetic oligonucleotide
tggacattctagaagcctaggagggcaagt

SEQ ID NO: 16712 - DNA, 30 bp, Artificial Sequence
  Synthetic oligonucleotide
aggagtgtctaaataggagtgcctctcagt

SEQ ID NO: 16713 - DNA, 30 bp, Artificial Sequence
  Synthetic oligonucleotide
tagttatgcgggaataaaacgactgagagt

SEQ ID NO: 16714 - DNA, 30 bp, Artificial Sequence
  Synthetic oligonucleotide
cagacgaaatgcatgggcgcaacggcgagt

SEQ ID NO: 16715 - DNA, 30 bp, Artificial Sequence
  Synthetic oligonucleotide
aacgcaattaaatatcagcgacaattgagt

SEQ ID NO: 16716 - DNA, 30 bp, Artificial Sequence
  Synthetic oligonucleotide
tcaaaaaacacatcactgcaatggtatagt

SEQ ID NO: 16717 - DNA, 31 bp, Artificial Sequence
  Synthetic oligonucleotide
aggggaggccaatcactgatgttcgtgccgt

SEQ ID NO: 16718 - DNA, 30 bp, Artificial Sequence
  Synthetic oligonucleotide
cgcaatgaagagacatacacaactaaaggt

SEQ ID NO: 16719 - DNA, 30 bp, Artificial Sequence
  Synthetic oligonucleotide
cgttcagtgataacagaggattacgcaggt

SEQ ID NO: 16720 - DNA, 30 bp, Artificial Sequence
  Synthetic oligonucleotide
aaacgtcgaggtgggaatacagagtcaggt

SEQ ID NO: 16721 - DNA, 30 bp, Artificial Sequence
  Synthetic oligonucleotide
tcagcaggatgcgaatgaacaaacataggt

SEQ ID NO: 16722 - DNA, 30 bp, Artificial Sequence
  Synthetic oligonucleotide
ggagatcgattgtaagaaaaggcggcgggt

SEQ ID NO: 16723 - DNA, 30 bp, Artificial Sequence
  Synthetic oligonucleotide
tgtggtgagcgatgagacaggaatgcatgt

SEQ ID NO: 16724 - DNA, 30 bp, Artificial Sequence
  Synthetic oligonucleotide
aacaaacgggagcgagaattgaaacgctgt

SEQ ID NO: 16725 - DNA, 30 bp, Artificial Sequence
  Synthetic oligonucleotide
accaaggaatagtcaaaggaggacggctgt

SEQ ID NO: 16726 - DNA, 30 bp, Artificial Sequence
  Synthetic oligonucleotide
cggcagacgaagtccaggacatcgaagtgt

SEQ ID NO: 16727 - DNA, 30 bp, Artificial Sequence
  Synthetic oligonucleotide
agaaacgctaggaattagggggacagaatt

SEQ ID NO: 16728 - DNA, 30 bp, Artificial Sequence
  Synthetic oligonucleotide
tagagacgatgtcgtcagaaggggcgaatt

SEQ ID NO: 16729 - DNA, 30 bp, Artificial Sequence
  Synthetic oligonucleotide
gtggacggggcgcgatgtatgtgaaggatt

SEQ ID NO: 16730 - DNA, 36 bp, Artificial Sequence
  Synthetic oligonucleotide
catgcagatataactaaatcggggagggtcaatctt

SEQ ID NO: 16731 - DNA, 30 bp, Artificial Sequence
  Synthetic oligonucleotide
taacagggggtgagcagaaatcacgaagtt

SEQ ID NO: 16732 - DNA, 30 bp, Artificial Sequence
  Synthetic oligonucleotide
aaggagaaagaaccagggcgaagcacagtt

SEQ ID NO: 16733 - DNA, 30 bp, Artificial Sequence
  Synthetic oligonucleotide
agacgcgggcggtcacacagaggagaggtt

SEQ ID NO: 16734 - DNA, 30 bp, Artificial Sequence
  Synthetic oligonucleotide
acgaaaggaagtcaaggccttaagccggtt

SEQ ID NO: 16735 - DNA, 30 bp, Artificial Sequence
  Synthetic oligonucleotide
acagcacacgagtagcatgaagcggaattt

SEQ ID NO: 16736 - DNA, 30 bp, Artificial Sequence
  Synthetic oligonucleotide
acgcggatgagacctcacaacctcgagttt

SEQ ID NO: 16737 - DNA, 30 bp, Artificial Sequence
  Synthetic oligonucleotide
agcatagcggaagaggtgggggagtagttt

SEQ ID NO: 16738 - DNA, 30 bp, Artificial Sequence
  Synthetic oligonucleotide
acgaagggattgaaactgagcctatcaaaa

SEQ ID NO: 16739 - DNA, 30 bp, Artificial Sequence
  Synthetic oligonucleotide
cgtccccatgtgcccaagagcgagggaaaa

SEQ ID NO: 16740 - DNA, 30 bp, Artificial Sequence
  Synthetic oligonucleotide
gcgccgtatgtgggaccagctgacctaaaa

SEQ ID NO: 16741 - DNA, 30 bp, Artificial Sequence
  Synthetic oligonucleotide
ctaggtaagcggcaagatgatcgaaacaaa

SEQ ID NO: 16742 - DNA, 30 bp, Artificial Sequence
  Synthetic oligonucleotide
tcgaaatacagtcagtttagaaccaacaaa

SEQ ID NO: 16743 - DNA, 30 bp, Artificial Sequence
  Synthetic oligonucleotide
ggtcagaaacgaagtgtatggtgcgacaaa

SEQ ID NO: 16744 - DNA, 30 bp, Artificial Sequence
  Synthetic oligonucleotide
ccaacgtgatgctgcacgtcaccaggcaaa

SEQ ID NO: 16745 - DNA, 30 bp, Artificial Sequence
  Synthetic oligonucleotide
caggggatacgagtacgcggccgaatcaaa

SEQ ID NO: 16746 - DNA, 30 bp, Artificial Sequence
  Synthetic oligonucleotide
ctggacatgggacaaggagcgcgcaagaaa

SEQ ID NO: 16747 - DNA, 30 bp, Artificial Sequence
  Synthetic oligonucleotide
cagtaaggagggtagtcccatcgggagaaa

SEQ ID NO: 16748 - DNA, 30 bp, Artificial Sequence
  Synthetic oligonucleotide
catcgaactagaacgatcggctatgagaaa

SEQ ID NO: 16749 - DNA, 30 bp, Artificial Sequence
  Synthetic oligonucleotide
tcaaacgtccagggtacagcactatagaaa

SEQ ID NO: 16750 - DNA, 30 bp, Artificial Sequence
  Synthetic oligonucleotide
ccataaggactcggggatgtaagttagaaa

SEQ ID NO: 16751 - DNA, 30 bp, Artificial Sequence
  Synthetic oligonucleotide
tgggcgcagtggggacccgaagccgcgaaa

SEQ ID NO: 16752 - DNA, 30 bp, Artificial Sequence
  Synthetic oligonucleotide
tgactacgggattacataacatgctcgaaa

SEQ ID NO: 16753 - DNA, 30 bp, Artificial Sequence
  Synthetic oligonucleotide
ttgacatggaagacaataatctcgtcgaaa

SEQ ID NO: 16754 - DNA, 30 bp, Artificial Sequence
  Synthetic oligonucleotide
ccaagcctcaaaatatgaatcacgaggaaa

SEQ ID NO: 16755 - DNA, 30 bp, Artificial Sequence
  Synthetic oligonucleotide
tcaagagggagcgcaatggtgagggggaaa

SEQ ID NO: 16756 - DNA, 30 bp, Artificial Sequence
  Synthetic oligonucleotide
ttagggagagcaacacgtgaggctgtgaaa

SEQ ID NO: 16757 - DNA, 30 bp, Artificial Sequence
  Synthetic oligonucleotide
cgtaagcaagtctaccggaccaacactaaa

SEQ ID NO: 16758 - DNA, 30 bp, Artificial Sequence
  Synthetic oligonucleotide
cacgaggaaactataaagcacaaacctaaa

SEQ ID NO: 16759 - DNA, 30 bp, Artificial Sequence
  Synthetic oligonucleotide
aggcatcgcgaatgaaagaagatggctaaa

SEQ ID NO: 16760 - DNA, 30 bp, Artificial Sequence
  Synthetic oligonucleotide
cgaccctcaaaggggtggtgtgtgagtaaa

SEQ ID NO: 16761 - DNA, 30 bp, Artificial Sequence
  Synthetic oligonucleotide
accgaaaaaaagtacatgtggattgaacaa

SEQ ID NO: 16762 - DNA, 30 bp, Artificial Sequence
  Synthetic oligonucleotide
caagccaacaccctaatcactgccacacaa

SEQ ID NO: 16763 - DNA, 30 bp, Artificial Sequence
  Synthetic oligonucleotide
ggaatccaacatcaaactgggtcaagacaa

SEQ ID NO: 16764 - DNA, 30 bp, Artificial Sequence
  Synthetic oligonucleotide
ttgtgccagatacgaaccgagaaagtacaa

SEQ ID NO: 16765 - DNA, 30 bp, Artificial Sequence
  Synthetic oligonucleotide
acgaaccgtattacagaaggatatgaccaa

SEQ ID NO: 16766 - DNA, 30 bp, Artificial Sequence
  Synthetic oligonucleotide
aaggcgggctactaacgagctaaaaagcaa

SEQ ID NO: 16767 - DNA, 30 bp, Artificial Sequence
  Synthetic oligonucleotide
tcaagagtgtcaggaaaatcctctaagcaa

SEQ ID NO: 16768 - DNA, 30 bp, Artificial Sequence
  Synthetic oligonucleotide
gcgacaattgggaaggagggggtaacgcaa

SEQ ID NO: 16769 - DNA, 30 bp, Artificial Sequence
  Synthetic oligonucleotide
tgagttaagaacttcgagggacataggcaa

SEQ ID NO: 16770 - DNA, 30 bp, Artificial Sequence
  Synthetic oligonucleotide
tgaggcggaaatggagtaagagttgttcaa

SEQ ID NO: 16771 - DNA, 30 bp, Artificial Sequence
  Synthetic oligonucleotide
gtaaatgggggactggtgggaataaaagaa

SEQ ID NO: 16772 - DNA, 30 bp, Artificial Sequence
  Synthetic oligonucleotide
acgaatgctgtggccctaaatcctaaagaa

SEQ ID NO: 16773 - DNA, 30 bp, Artificial Sequence
  Synthetic oligonucleotide
cagaggaatctaattcacgatagtaaagaa

SEQ ID NO: 16774 - DNA, 30 bp, Artificial Sequence
  Synthetic oligonucleotide
cgaaatatgaggaccgatagcctagaagaa

SEQ ID NO: 16775 - DNA, 30 bp, Artificial Sequence
  Synthetic oligonucleotide
gtgtgtgcgggagcaaggataaacgaagaa

SEQ ID NO: 16776 - DNA, 30 bp, Artificial Sequence
  Synthetic oligonucleotide
taggggacacaggaacgcaagaggacagaa

SEQ ID NO: 16777 - DNA, 30 bp, Artificial Sequence
  Synthetic oligonucleotide
caagatattaccagacagtaggccgtagaa

SEQ ID NO: 16778 - DNA, 30 bp, Artificial Sequence
  Synthetic oligonucleotide
tcatgttagcctagagatccccgaaacgaa

SEQ ID NO: 16779 - DNA, 30 bp, Artificial Sequence
  Synthetic oligonucleotide
actgacggggggggtgaacctcagaacgaa

SEQ ID NO: 16780 - DNA, 30 bp, Artificial Sequence
  Synthetic oligonucleotide
cggttcgtaacgagagagtctcagaacgaa

SEQ ID NO: 16781 - DNA, 30 bp, Artificial Sequence
  Synthetic oligonucleotide
aaggagatagccagattaactatcgacgaa

SEQ ID NO: 16782 - DNA, 30 bp, Artificial Sequence
  Synthetic oligonucleotide
aaccatgccggaaaacaagcgacgtacgaa

SEQ ID NO: 16783 - DNA, 30 bp, Artificial Sequence
  Synthetic oligonucleotide
gcgttgagaaggcgataaatcttcagcgaa

SEQ ID NO: 16784 - DNA, 30 bp, Artificial Sequence
  Synthetic oligonucleotide
cgtcgtagtgggtgcgtttgccgaatcgaa

SEQ ID NO: 16785 - DNA, 30 bp, Artificial Sequence
  Synthetic oligonucleotide
gggaaggaccatgcgaaaaaggcaaaggaa

SEQ ID NO: 16786 - DNA, 30 bp, Artificial Sequence
  Synthetic oligonucleotide
acataggcaaatataaggggaatcaaggaa

SEQ ID NO: 16787 - DNA, 30 bp, Artificial Sequence
  Synthetic oligonucleotide
acgaattaaatccgaggaaggcatcgggaa

SEQ ID NO: 16788 - DNA, 30 bp, Artificial Sequence
  Synthetic oligonucleotide
cgtatgacaagtcgatctcaacaggctgaa

SEQ ID NO: 16789 - DNA, 30 bp, Artificial Sequence
  Synthetic oligonucleotide
atgcggcacggcacaagtcagggaattgaa

SEQ ID NO: 16790 - DNA, 30 bp, Artificial Sequence
  Synthetic oligonucleotide
aggagacctctacaattagcaagctaataa

SEQ ID NO: 16791 - DNA, 30 bp, Artificial Sequence
  Synthetic oligonucleotide
gagcgagggccaggatagaccagcggataa

SEQ ID NO: 16792 - DNA, 30 bp, Artificial Sequence
  Synthetic oligonucleotide
ggagaccgtgaaggaagaccgcgaacctaa

SEQ ID NO: 16793 - DNA, 30 bp, Artificial Sequence
  Synthetic oligonucleotide
aggcctcaaaggtacagaaagtccacgtaa

SEQ ID NO: 16794 - DNA, 30 bp, Artificial Sequence
  Synthetic oligonucleotide
agaaaccggaaataacgtcaatgtatgtaa

SEQ ID NO: 16795 - DNA, 30 bp, Artificial Sequence
  Synthetic oligonucleotide
tagcgcgtggcaggcaaatacataacaaca

SEQ ID NO: 16796 - DNA, 30 bp, Artificial Sequence
  Synthetic oligonucleotide
aggcatcgacgagtaattccggtaacaaca

SEQ ID NO: 16797 - DNA, 30 bp, Artificial Sequence
  Synthetic oligonucleotide
gcgcaaggagggatgaaataaaacgcaaca

SEQ ID NO: 16798 - DNA, 30 bp, Artificial Sequence
  Synthetic oligonucleotide
aacgccgaagatacacgtgtgcatgcaaca

SEQ ID NO: 16799 - DNA, 30 bp, Artificial Sequence
  Synthetic oligonucleotide
caatactcagggtagcggggacctgcaaca

SEQ ID NO: 16800 - DNA, 30 bp, Artificial Sequence
  Synthetic oligonucleotide
tacgaataaaggcaaccccgctacggaaca

SEQ ID NO: 16801 - DNA, 30 bp, Artificial Sequence
  Synthetic oligonucleotide
tccgcatgagtactaggaccgaatggaaca

SEQ ID NO: 16802 - DNA, 30 bp, Artificial Sequence
  Synthetic oligonucleotide
ccgagggtcaaataggggtgtgctagcaca

SEQ ID NO: 16803 - DNA, 30 bp, Artificial Sequence
  Synthetic oligonucleotide
agtccagagacgcaggaccaacagcgcaca

SEQ ID NO: 16804 - DNA, 30 bp, Artificial Sequence
  Synthetic oligonucleotide
taccgctcagaacgcgaaaaaagtcgcaca

SEQ ID NO: 16805 - DNA, 30 bp, Artificial Sequence
  Synthetic oligonucleotide
acggatgttagcggttacaaacagcagaca

SEQ ID NO: 16806 - DNA, 30 bp, Artificial Sequence
  Synthetic oligonucleotide
tgtgcctaaacaacgggggtagaagagaca

SEQ ID NO: 16807 - DNA, 30 bp, Artificial Sequence
  Synthetic oligonucleotide
catcagacttaccgagcagcctagccgaca

SEQ ID NO: 16808 - DNA, 30 bp, Artificial Sequence
  Synthetic oligonucleotide
aacgagttaggtgataacgaacgggcgaca

SEQ ID NO: 16809 - DNA, 30 bp, Artificial Sequence
  Synthetic oligonucleotide
gagcagggcataggtgagttaaccgggaca

SEQ ID NO: 16810 - DNA, 30 bp, Artificial Sequence
  Synthetic oligonucleotide
tcaatgcgtattaaataggaggcatggaca

SEQ ID NO: 16811 - DNA, 30 bp, Artificial Sequence
  Synthetic oligonucleotide
acacaagtaggggtgaacgcgtagcgacca

SEQ ID NO: 16812 - DNA, 30 bp, Artificial Sequence
  Synthetic oligonucleotide
cggacccgcgccccaaataaagaagtacca

SEQ ID NO: 16813 - DNA, 30 bp, Artificial Sequence
  Synthetic oligonucleotide
gggagccaagatacatgcaaagtcgcccca

SEQ ID NO: 16814 - DNA, 30 bp, Artificial Sequence
  Synthetic oligonucleotide
agagggagcgtaagataacggcaatgccca

SEQ ID NO: 16815 - DNA, 30 bp, Artificial Sequence
  Synthetic oligonucleotide
agcgaaatacaaaaattagtgccggggcca

SEQ ID NO: 16816 - DNA, 30 bp, Artificial Sequence
  Synthetic oligonucleotide
ctggtacagggagaagacttgatagaagca

SEQ ID NO: 16817 - DNA, 30 bp, Artificial Sequence
  Synthetic oligonucleotide
ccaggcgacacatacgatgggtgaacagca

SEQ ID NO: 16818 - DNA, 30 bp, Artificial Sequence
  Synthetic oligonucleotide
ggcctggggatgtatcaaaacaagcgagca

SEQ ID NO: 16819 - DNA, 30 bp, Artificial Sequence
  Synthetic oligonucleotide
acgctacgagtgccaacggttgagtgagca

SEQ ID NO: 16820 - DNA, 30 bp, Artificial Sequence
  Synthetic oligonucleotide
acgcctgtggcagtcataaactagtgagca

SEQ ID NO: 16821 - DNA, 30 bp, Artificial Sequence
  Synthetic oligonucleotide
acaaggtggaagtgagtattaggattagca

SEQ ID NO: 16822 - DNA, 30 bp, Artificial Sequence
  Synthetic oligonucleotide
ctccggctcggacccacgaagagaaacgca

SEQ ID NO: 16823 - DNA, 30 bp, Artificial Sequence
  Synthetic oligonucleotide
tggagtagacgggggagaacacattacgca

SEQ ID NO: 16824 - DNA, 30 bp, Artificial Sequence
  Synthetic oligonucleotide
gtggactacaaggacaatagccgaagcgca

SEQ ID NO: 16825 - DNA, 30 bp, Artificial Sequence
  Synthetic oligonucleotide
acgagtaacaaacactcctgtcagagcgca

SEQ ID NO: 16826 - DNA, 30 bp, Artificial Sequence
  Synthetic oligonucleotide
agatccaccggtctgagaaggagaggcgca

SEQ ID NO: 16827 - DNA, 30 bp, Artificial Sequence
  Synthetic oligonucleotide
gagcgcaaaaaggaagtaaggttacaggca

SEQ ID NO: 16828 - DNA, 31 bp, Artificial Sequence
  Synthetic oligonucleotide
caggcgtaggagtgcacttacgcgagcggca

SEQ ID NO: 16829 - DNA, 30 bp, Artificial Sequence
  Synthetic oligonucleotide
gggaggcatcaacagacagagctcggggca

SEQ ID NO: 16830 - DNA, 30 bp, Artificial Sequence
  Synthetic oligonucleotide
ggggggaaagtagcatactctgagcatgca

SEQ ID NO: 16831 - DNA, 30 bp, Artificial Sequence
  Synthetic oligonucleotide
aagctgggagcatcaggagtcgagtatgca

SEQ ID NO: 16832 - DNA, 30 bp, Artificial Sequence
  Synthetic oligonucleotide
tcgggaacccaacaattatcgtagcctgca

SEQ ID NO: 16833 - DNA, 30 bp, Artificial Sequence
  Synthetic oligonucleotide
gtgcaactgcattgggcgcgggaaagatca

SEQ ID NO: 16834 - DNA, 30 bp, Artificial Sequence
  Synthetic oligonucleotide
agtggctaagggtatactaacagaggatca

SEQ ID NO: 16835 - DNA, 30 bp, Artificial Sequence
  Synthetic oligonucleotide
tcattggatgcggagagatgcgaatactca

SEQ ID NO: 16836 - DNA, 30 bp, Artificial Sequence
  Synthetic oligonucleotide
taaggtacggacaactggatagagtactca

SEQ ID NO: 16837 - DNA, 30 bp, Artificial Sequence
  Synthetic oligonucleotide
gaacgtaccgagttgaaagtgagcccgtca

SEQ ID NO: 16838 - DNA, 30 bp, Artificial Sequence
  Synthetic oligonucleotide
acgagtgtctaaagcaaaatttagcggtca

SEQ ID NO: 16839 - DNA, 30 bp, Artificial Sequence
  Synthetic oligonucleotide
gtcaaagttgggaataaacgataaggttca

SEQ ID NO: 16840 - DNA, 30 bp, Artificial Sequence
  Synthetic oligonucleotide
gcgagagtgtagagggtccctggtgaaaga

SEQ ID NO: 16841 - DNA, 30 bp, Artificial Sequence
  Synthetic oligonucleotide
tagggggtcggaaaacatcccgagtaaaga

SEQ ID NO: 16842 - DNA, 30 bp, Artificial Sequence
  Synthetic oligonucleotide
acatgaaaaggactgtgtgccacgacaaga

SEQ ID NO: 16843 - DNA, 30 bp, Artificial Sequence
  Synthetic oligonucleotide
tcggtgtgaagaggggattgtgttacaaga

SEQ ID NO: 16844 - DNA, 30 bp, Artificial Sequence
  Synthetic oligonucleotide
acgaaagaatatcgtatgccaacttcaaga

SEQ ID NO: 16845 - DNA, 30 bp, Artificial Sequence
  Synthetic oligonucleotide
agataaggatgggaaggtggcgaaagaaga

SEQ ID NO: 16846 - DNA, 30 bp, Artificial Sequence
  Synthetic oligonucleotide
tcgacataagcctgaccaaagatgcgaaga

SEQ ID NO: 16847 - DNA, 30 bp, Artificial Sequence
  Synthetic oligonucleotide
catggagtagtgggaggcacgacgtgaaga

SEQ ID NO: 16848 - DNA, 30 bp, Artificial Sequence
  Synthetic oligonucleotide
ctcagccagtgaaaggaggagcagttaaga

SEQ ID NO: 16849 - DNA, 30 bp, Artificial Sequence
  Synthetic oligonucleotide
ggataggagcggaggacatacttgcccaga

SEQ ID NO: 16850 - DNA, 30 bp, Artificial Sequence
  Synthetic oligonucleotide
ggtaggaggacagaagtaggttcggtcaga

SEQ ID NO: 16851 - DNA, 30 bp, Artificial Sequence
  Synthetic oligonucleotide
tcactaagaagtcgacacacggcgaagaga

SEQ ID NO: 16852 - DNA, 30 bp, Artificial Sequence
  Synthetic oligonucleotide
gctagtcaaacaactcacattctaccgaga

SEQ ID NO: 16853 - DNA, 30 bp, Artificial Sequence
  Synthetic oligonucleotide
aggtaccgagggcaacattgagttaggaga

SEQ ID NO: 16854 - DNA, 30 bp, Artificial Sequence
  Synthetic oligonucleotide
tcgaaggagaagagtgtttcacgaatgaga

SEQ ID NO: 16855 - DNA, 30 bp, Artificial Sequence
  Synthetic oligonucleotide
aaccaagccgaggatacaagtccgatgaga

SEQ ID NO: 16856 - DNA, 30 bp, Artificial Sequence
  Synthetic oligonucleotide
aggctggcgaatttcaagcaatcctctaga

SEQ ID NO: 16857 - DNA, 30 bp, Artificial Sequence
  Synthetic oligonucleotide
gggggattaagatgcgatccactcgaacga

SEQ ID NO: 16858 - DNA, 30 bp, Artificial Sequence
  Synthetic oligonucleotide
tgctgaactacgagggaaagaagaccacga

SEQ ID NO: 16859 - DNA, 30 bp, Artificial Sequence
  Synthetic oligonucleotide
acggaaggtagtctgcaagcacgactccga

SEQ ID NO: 16860 - DNA, 30 bp, Artificial Sequence
  Synthetic oligonucleotide
ggctgctcacaggaaaggtctaaagcgcga

SEQ ID NO: 16861 - DNA, 30 bp, Artificial Sequence
  Synthetic oligonucleotide
taagagcaaatcaatggaaatgcctggcga

SEQ ID NO: 16862 - DNA, 30 bp, Artificial Sequence
  Synthetic oligonucleotide
cgtaaaaagtggtcatagagcttcgctcga

SEQ ID NO: 16863 - DNA, 30 bp, Artificial Sequence
  Synthetic oligonucleotide
cgtacacgaccgcccgaatatagccaagga

SEQ ID NO: 16864 - DNA, 30 bp, Artificial Sequence
  Synthetic oligonucleotide
aacgaccagtatggcagttcggatcaagga

SEQ ID NO: 16865 - DNA, 30 bp, Artificial Sequence
  Synthetic oligonucleotide
agaacagttccgaaagtcagagcggcagga

SEQ ID NO: 16866 - DNA, 30 bp, Artificial Sequence
  Synthetic oligonucleotide
ccaaggcgatacgctcacgtaatgtcagga

SEQ ID NO: 16867 - DNA, 30 bp, Artificial Sequence
  Synthetic oligonucleotide
cgaaaagcggtgtccgagatgtacgtagga

SEQ ID NO: 16868 - DNA, 30 bp, Artificial Sequence
  Synthetic oligonucleotide
gcaggtgctgatgatgaacccaaaaacgga

SEQ ID NO: 16869 - DNA, 30 bp, Artificial Sequence
  Synthetic oligonucleotide
ggagatacttagcgagtcaaacaaagcgga

SEQ ID NO: 16870 - DNA, 30 bp, Artificial Sequence
  Synthetic oligonucleotide
cggccagaagaatcaacggtttaatgcgga

SEQ ID NO: 16871 - DNA, 30 bp, Artificial Sequence
  Synthetic oligonucleotide
acgggtgattatttggccaccgaacaggga

SEQ ID NO: 16872 - DNA, 30 bp, Artificial Sequence
  Synthetic oligonucleotide
aaggcgagacatgttatcttagcagaggga

SEQ ID NO: 16873 - DNA, 30 bp, Artificial Sequence
  Synthetic oligonucleotide
acaatccagcacagcgatgtaagggaggga

SEQ ID NO: 16874 - DNA, 30 bp, Artificial Sequence
  Synthetic oligonucleotide
aaggcaagagggtagattacgatggaggga

SEQ ID NO: 16875 - DNA, 30 bp, Artificial Sequence
  Synthetic oligonucleotide
cgaacagatcaacggttcatcagctaggga

SEQ ID NO: 16876 - DNA, 30 bp, Artificial Sequence
  Synthetic oligonucleotide
gacggtgttagcgccacaacttcagcggga

SEQ ID NO: 16877 - DNA, 30 bp, Artificial Sequence
  Synthetic oligonucleotide
aacagtgggcgaagaagcaccacaagggga

SEQ ID NO: 16878 - DNA, 30 bp, Artificial Sequence
  Synthetic oligonucleotide
gcgataaaacacctctagaggtccagggga

SEQ ID NO: 16879 - DNA, 40 bp, Artificial Sequence
  Synthetic oligonucleotide
aagataatacattcatggtatggtcggggttcggggggga

SEQ ID NO: 16880 - DNA, 30 bp, Artificial Sequence
  Synthetic oligonucleotide
acgataggttacgaaaagatagtactggga

SEQ ID NO: 16881 - DNA, 30 bp, Artificial Sequence
  Synthetic oligonucleotide
tgcagggctcgaacaacaaatgacattgga

SEQ ID NO: 16882 - DNA, 30 bp, Artificial Sequence
  Synthetic oligonucleotide
agaaaacagtaaatcaggtgtgagcaatga

SEQ ID NO: 16883 - DNA, 30 bp, Artificial Sequence
  Synthetic oligonucleotide
cacgggggagtgaggattagcaaagtgtga

SEQ ID NO: 16884 - DNA, 30 bp, Artificial Sequence
  Synthetic oligonucleotide
gttaagaagtgaagaaaaagtgagccttga

SEQ ID NO: 16885 - DNA, 30 bp, Artificial Sequence
  Synthetic oligonucleotide
atggccaagtgaagacttgtcaagcgaata

SEQ ID NO: 16886 - DNA, 30 bp, Artificial Sequence
  Synthetic oligonucleotide
aagacacgcataagcgtacacaatcgaata

SEQ ID NO: 16887 - DNA, 30 bp, Artificial Sequence
  Synthetic oligonucleotide
tgatgcgagaagtggaagtgaacgataata

SEQ ID NO: 16888 - DNA, 30 bp, Artificial Sequence
  Synthetic oligonucleotide
ggcagggagggaaaatcggataaggacata

SEQ ID NO: 16889 - DNA, 30 bp, Artificial Sequence
  Synthetic oligonucleotide
gcgcaaccagatatggggaaagctgtcata

SEQ ID NO: 16890 - DNA, 30 bp, Artificial Sequence
  Synthetic oligonucleotide
cagaaagtagaattaaatgttagcgagata

SEQ ID NO: 16891 - DNA, 30 bp, Artificial Sequence
  Synthetic oligonucleotide
cagcagagagagcgaggaaggacggagata

SEQ ID NO: 16892 - DNA, 30 bp, Artificial Sequence
  Synthetic oligonucleotide
aagcggggcagaaattatgaatagccgata

SEQ ID NO: 16893 - DNA, 30 bp, Artificial Sequence
  Synthetic oligonucleotide
cggggagtcggacaagcctcgtattggata

SEQ ID NO: 16894 - DNA, 30 bp, Artificial Sequence
  Synthetic oligonucleotide
agacacaacaagagacaacggagccatata

SEQ ID NO: 16895 - DNA, 30 bp, Artificial Sequence
  Synthetic oligonucleotide
aagagcagggagggttaataaatggcacta

SEQ ID NO: 16896 - DNA, 30 bp, Artificial Sequence
  Synthetic oligonucleotide
cgtgagtcatcgagggggaccaaaaagcta

SEQ ID NO: 16897 - DNA, 30 bp, Artificial Sequence
  Synthetic oligonucleotide
cgttaaacgccacgtgagggtcgcgggcta

SEQ ID NO: 16898 - DNA, 30 bp, Artificial Sequence
  Synthetic oligonucleotide
aggctgcatgtcaaggtggcaccaggtcta

SEQ ID NO: 16899 - DNA, 30 bp, Artificial Sequence
  Synthetic oligonucleotide
cgaatcgtatattgtagagaaagaggtcta

SEQ ID NO: 16900 - DNA, 30 bp, Artificial Sequence
  Synthetic oligonucleotide
tagcgactaacgagcgagggcgccagagta

SEQ ID NO: 16901 - DNA, 30 bp, Artificial Sequence
  Synthetic oligonucleotide
tcggggcccaaggccatcagtatcagagta

SEQ ID NO: 16902 - DNA, 30 bp, Artificial Sequence
  Synthetic oligonucleotide
aaggacgaacaagtgatctcgaactgagta

SEQ ID NO: 16903 - DNA, 30 bp, Artificial Sequence
  Synthetic oligonucleotide
ggataccaggaaacgagcagatagctagta

SEQ ID NO: 16904 - DNA, 30 bp, Artificial Sequence
  Synthetic oligonucleotide
actggcagagatgaaacaggacttaccgta

SEQ ID NO: 16905 - DNA, 30 bp, Artificial Sequence
  Synthetic oligonucleotide
gcgtatggcccaaatagacaaaaaagcgta

SEQ ID NO: 16906 - DNA, 30 bp, Artificial Sequence
  Synthetic oligonucleotide
cgaggcctatccatggtaagaaagatcgta

SEQ ID NO: 16907 - DNA, 30 bp, Artificial Sequence
  Synthetic oligonucleotide
aaggggctagttcattacccgaaactcgta

SEQ ID NO: 16908 - DNA, 30 bp, Artificial Sequence
  Synthetic oligonucleotide
tcgcgagacaactcacatgctaacaaggta

SEQ ID NO: 16909 - DNA, 30 bp, Artificial Sequence
  Synthetic oligonucleotide
agtgattggtcccagaaaagcgagcatgta

SEQ ID NO: 16910 - DNA, 30 bp, Artificial Sequence
  Synthetic oligonucleotide
acaacggtaggcataataaactccattgta

SEQ ID NO: 16911 - DNA, 30 bp, Artificial Sequence
  Synthetic oligonucleotide
acggacacaatgatggggacgacataaaac

SEQ ID NO: 16912 - DNA, 30 bp, Artificial Sequence
  Synthetic oligonucleotide
acaggagcatacgcgtataggatcacaaac

SEQ ID NO: 16913 - DNA, 30 bp, Artificial Sequence
  Synthetic oligonucleotide
caagcaagatcaactcatggactgacaaac

SEQ ID NO: 16914 - DNA, 30 bp, Artificial Sequence
  Synthetic oligonucleotide
cggacactaattaagaaaacatggtcaaac

SEQ ID NO: 16915 - DNA, 30 bp, Artificial Sequence
  Synthetic oligonucleotide
agaatgccatcgttcaaagctcgtcacaac

SEQ ID NO: 16916 - DNA, 30 bp, Artificial Sequence
  Synthetic oligonucleotide
atatcgcgaaagaatagactacaggccaac

SEQ ID NO: 16917 - DNA, 30 bp, Artificial Sequence
  Synthetic oligonucleotide
tcaagtagatccaagcaaggccactagaac

SEQ ID NO: 16918 - DNA, 30 bp, Artificial Sequence
  Synthetic oligonucleotide
cggtcgaatctcgttaaccttcacaggaac

SEQ ID NO: 16919 - DNA, 30 bp, Artificial Sequence
  Synthetic oligonucleotide
agcaggggaccgcgaaataggagttggaac

SEQ ID NO: 16920 - DNA, 30 bp, Artificial Sequence
  Synthetic oligonucleotide
tactcacgcaaatcaagaaggccaatgaac

SEQ ID NO: 16921 - DNA, 30 bp, Artificial Sequence
  Synthetic oligonucleotide
acagagcctacaacgaaacgagcctctaac

SEQ ID NO: 16922 - DNA, 30 bp, Artificial Sequence
  Synthetic oligonucleotide
ctggtaggagaagaaagtaacagcggtaac

SEQ ID NO: 16923 - DNA, 30 bp, Artificial Sequence
  Synthetic oligonucleotide
cccacgcaacgtcataaagatcaggaacac

SEQ ID NO: 16924 - DNA, 30 bp, Artificial Sequence
  Synthetic oligonucleotide
tcagcctggatgcctcacaacgaacgacac

SEQ ID NO: 16925 - DNA, 30 bp, Artificial Sequence
  Synthetic oligonucleotide
cataagatatgaagtggccaaaccgcccac

SEQ ID NO: 16926 - DNA, 30 bp, Artificial Sequence
  Synthetic oligonucleotide
gaacgacaaacatacataaacggttagcac

SEQ ID NO: 16927 - DNA, 30 bp, Artificial Sequence
  Synthetic oligonucleotide
ccatcgcaaacaaggatgtcgcgaagtcac

SEQ ID NO: 16928 - DNA, 30 bp, Artificial Sequence
  Synthetic oligonucleotide
cagggcgggagtattacaattagcggtcac

SEQ ID NO: 16929 - DNA, 30 bp, Artificial Sequence
  Synthetic oligonucleotide
cgaaacgtgccctagggtaacgagccagac

SEQ ID NO: 16930 - DNA, 30 bp, Artificial Sequence
  Synthetic oligonucleotide
atcgaaggcatacatgacaaaacgtgagac

SEQ ID NO: 16931 - DNA, 30 bp, Artificial Sequence
  Synthetic oligonucleotide
actacgtgaaaatcgggagagtagctagac

SEQ ID NO: 16932 - DNA, 30 bp, Artificial Sequence
  Synthetic oligonucleotide
aaggtcaatcagcatcaaggaccagccgac

SEQ ID NO: 16933 - DNA, 30 bp, Artificial Sequence
  Synthetic oligonucleotide
gctgagaaacaatatgagccctagtgcgac

SEQ ID NO: 16934 - DNA, 30 bp, Artificial Sequence
  Synthetic oligonucleotide
tcgaggaccgaaggcgaggaggttttcgac

SEQ ID NO: 16935 - DNA, 30 bp, Artificial Sequence
  Synthetic oligonucleotide
cgaggactagtctgaaagaagcggattgac

SEQ ID NO: 16936 - DNA, 30 bp, Artificial Sequence
  Synthetic oligonucleotide
tgagggtaacagcgatagggctaggaatac

SEQ ID NO: 16937 - DNA, 29 bp, Artificial Sequence
  Synthetic oligonucleotide
cggtcagaagaagtatagccggtgtatac

SEQ ID NO: 16938 - DNA, 30 bp, Artificial Sequence
  Synthetic oligonucleotide
acgtaagatccatggattcaccagaactac

SEQ ID NO: 16939 - DNA, 31 bp, Artificial Sequence
  Synthetic oligonucleotide
tcgcactatggtaataaaaagtatgctctac

SEQ ID NO: 16940 - DNA, 30 bp, Artificial Sequence
  Synthetic oligonucleotide
cgaaatcgacatgagccaacaagacagtac

SEQ ID NO: 16941 - DNA, 30 bp, Artificial Sequence
  Synthetic oligonucleotide
cgacacgggagggaactaatcgcagtgtac

SEQ ID NO: 16942 - DNA, 30 bp, Artificial Sequence
  Synthetic oligonucleotide
caacagggcagggacaaatagcggggttac

SEQ ID NO: 16943 - DNA, 30 bp, Artificial Sequence
  Synthetic oligonucleotide
ggcgagtcgcgcccgaaatgagagaaaacc

SEQ ID NO: 16944 - DNA, 30 bp, Artificial Sequence
  Synthetic oligonucleotide
taaagaggaaagcaagtatgataggacacc

SEQ ID NO: 16945 - DNA, 30 bp, Artificial Sequence
  Synthetic oligonucleotide
tagggaagtcaataggtaccgaggaccacc

SEQ ID NO: 16946 - DNA, 30 bp, Artificial Sequence
  Synthetic oligonucleotide
cgcaactgaaaggaaaaagcggttaggacc

SEQ ID NO: 16947 - DNA, 30 bp, Artificial Sequence
  Synthetic oligonucleotide
gcgcgaacaatagacctcgataagtgcccc

SEQ ID NO: 16948 - DNA, 30 bp, Artificial Sequence
  Synthetic oligonucleotide
tatcaaggtttccgaaaaaaagagcgagcc

SEQ ID NO: 16949 - DNA, 30 bp, Artificial Sequence
  Synthetic oligonucleotide
taccgaggggcgtaatacgagcgagtcgcc

SEQ ID NO: 16950 - DNA, 30 bp, Artificial Sequence
  Synthetic oligonucleotide
ccaaagcaccataaccgacatcaccactcc

SEQ ID NO: 16951 - DNA, 30 bp, Artificial Sequence
  Synthetic oligonucleotide
tcacagagcctaggactagaccgcccaagc

SEQ ID NO: 16952 - DNA, 30 bp, Artificial Sequence
  Synthetic oligonucleotide
agacccacaaaaagatgaagctccgcaagc

SEQ ID NO: 16953 - DNA, 30 bp, Artificial Sequence
  Synthetic oligonucleotide
acacaaaaagaggaatcgagaatctgaagc

SEQ ID NO: 16954 - DNA, 30 bp, Artificial Sequence
  Synthetic oligonucleotide
agaggaggttgaaagttcagagaacgcagc

SEQ ID NO: 16955 - DNA, 30 bp, Artificial Sequence
  Synthetic oligonucleotide
acgcgaagacaggggtgctcagaaaggagc

SEQ ID NO: 16956 - DNA, 30 bp, Artificial Sequence
  Synthetic oligonucleotide
gtgggacaagatggaataagccaagatagc

SEQ ID NO: 16957 - DNA, 30 bp, Artificial Sequence
  Synthetic oligonucleotide
gcgaccaaatcgactacatatgagagtagc

SEQ ID NO: 16958 - DNA, 30 bp, Artificial Sequence
  Synthetic oligonucleotide
ggctaaaagagtaggagaaacggaggacgc

SEQ ID NO: 16959 - DNA, 30 bp, Artificial Sequence
  Synthetic oligonucleotide
cacgatgagaactagaaccatcggatccgc

SEQ ID NO: 16960 - DNA, 30 bp, Artificial Sequence
  Synthetic oligonucleotide
cgtgtaaaccacgcatcaatagaatatcgc

SEQ ID NO: 16961 - DNA, 30 bp, Artificial Sequence
  Synthetic oligonucleotide
catgataagtcgatagggtcagaggttcgc

SEQ ID NO: 16962 - DNA, 30 bp, Artificial Sequence
  Synthetic oligonucleotide
ggtgaaaggaattggggcgaaactgttcgc

SEQ ID NO: 16963 - DNA, 30 bp, Artificial Sequence
  Synthetic oligonucleotide
caggcgaatagtacgtggcacgaaaaaggc

SEQ ID NO: 16964 - DNA, 30 bp, Artificial Sequence
  Synthetic oligonucleotide
tcaccggtaatactatccaggagcagaggc

SEQ ID NO: 16965 - DNA, 30 bp, Artificial Sequence
  Synthetic oligonucleotide
aggattacatccgaggagggacagaccggc

SEQ ID NO: 16966 - DNA, 30 bp, Artificial Sequence
  Synthetic oligonucleotide
aggagagaacggctataattagaaggcggc

SEQ ID NO: 16967 - DNA, 30 bp, Artificial Sequence
  Synthetic oligonucleotide
gtaattagagataagcgaaccaagtgcggc

SEQ ID NO: 16968 - DNA, 30 bp, Artificial Sequence
  Synthetic oligonucleotide
cgaggaagaaccctcagggactgtcagggc

SEQ ID NO: 16969 - DNA, 30 bp, Artificial Sequence
  Synthetic oligonucleotide
atgcagggtagataagaaaccggagatggc

SEQ ID NO: 16970 - DNA, 30 bp, Artificial Sequence
  Synthetic oligonucleotide
cggaagtgaacagctcagtgcggtattggc

SEQ ID NO: 16971 - DNA, 31 bp, Artificial Sequence
  Synthetic oligonucleotide
cgataacccgaaaacgcttgtcgtgcaatgc

SEQ ID NO: 16972 - DNA, 30 bp, Artificial Sequence
  Synthetic oligonucleotide
ggtgggagggacacatgcaaggtgagatgc

SEQ ID NO: 16973 - DNA, 30 bp, Artificial Sequence
  Synthetic oligonucleotide
agaggaggtctgaagagcgtaacctactgc

SEQ ID NO: 16974 - DNA, 30 bp, Artificial Sequence
  Synthetic oligonucleotide
agaagagctcgtcgccgtattgagtgctgc

SEQ ID NO: 16975 - DNA, 30 bp, Artificial Sequence
  Synthetic oligonucleotide
gctaaaagtatcgatcggaaaaataggtgc

SEQ ID NO: 16976 - DNA, 30 bp, Artificial Sequence
  Synthetic oligonucleotide
tacacgcggtggagcaagagaagtgtgtgc

SEQ ID NO: 16977 - DNA, 30 bp, Artificial Sequence
  Synthetic oligonucleotide
cagaatgtgaatagcgtgagaccaacaatc

SEQ ID NO: 16978 - DNA, 30 bp, Artificial Sequence
  Synthetic oligonucleotide
cgagtaatccctccaaacgtgaagaagatc

SEQ ID NO: 16979 - DNA, 30 bp, Artificial Sequence
  Synthetic oligonucleotide
aaggaacaacggaaagaaagttagcggctc

SEQ ID NO: 16980 - DNA, 30 bp, Artificial Sequence
  Synthetic oligonucleotide
agggaggagtcacaataaagacgagaagtc

SEQ ID NO: 16981 - DNA, 30 bp, Artificial Sequence
  Synthetic oligonucleotide
cgctaggaccacagaataggaactacagtc

SEQ ID NO: 16982 - DNA, 30 bp, Artificial Sequence
  Synthetic oligonucleotide
cgaggggatgattaacaaatatggatagtc

SEQ ID NO: 16983 - DNA, 30 bp, Artificial Sequence
  Synthetic oligonucleotide
cagaggcgggtcataaatcgtgggaacgtc

SEQ ID NO: 16984 - DNA, 31 bp, Artificial Sequence
  Synthetic oligonucleotide
acggaaccggtaagaggaaaacagcgccgtc

SEQ ID NO: 16985 - DNA, 30 bp, Artificial Sequence
  Synthetic oligonucleotide
cggcaagtaacaggttattatcagggcgtc

SEQ ID NO: 16986 - DNA, 30 bp, Artificial Sequence
  Synthetic oligonucleotide
tgagctgtaaaatcgtctaagggagtcgtc

SEQ ID NO: 16987 - DNA, 30 bp, Artificial Sequence
  Synthetic oligonucleotide
gcggtgaagagagccgaatggacagaattc

SEQ ID NO: 16988 - DNA, 30 bp, Artificial Sequence
  Synthetic oligonucleotide
acgtgggaagccacgacgagaagacgtttc

SEQ ID NO: 16989 - DNA, 30 bp, Artificial Sequence
  Synthetic oligonucleotide
caggctaaggcgattggggcagaaacaaag

SEQ ID NO: 16990 - DNA, 30 bp, Artificial Sequence
  Synthetic oligonucleotide
cacataccggtgatataagtccagagaaag

SEQ ID NO: 16991 - DNA, 30 bp, Artificial Sequence
  Synthetic oligonucleotide
ctcgtaactagaggatagtccaggcgaaag

SEQ ID NO: 16992 - DNA, 30 bp, Artificial Sequence
  Synthetic oligonucleotide
tcattggccgggaacgatggctacataaag

SEQ ID NO: 16993 - DNA, 30 bp, Artificial Sequence
  Synthetic oligonucleotide
aaaaagtacggaacgggaacgagagtaaag

SEQ ID NO: 16994 - DNA, 30 bp, Artificial Sequence
  Synthetic oligonucleotide
gacagggagggtccgtagataaggaacaag

SEQ ID NO: 16995 - DNA, 30 bp, Artificial Sequence
  Synthetic oligonucleotide
tcatgcgaattgggagaacagccgagcaag

SEQ ID NO: 16996 - DNA, 30 bp, Artificial Sequence
  Synthetic oligonucleotide
tgatggccaaacaaacgaagcgcgagcaag

SEQ ID NO: 16997 - DNA, 30 bp, Artificial Sequence
  Synthetic oligonucleotide
aggtcccaataaggctaaaaacaaggcaag

SEQ ID NO: 16998 - DNA, 30 bp, Artificial Sequence
  Synthetic oligonucleotide
tgagcgtggggggctacgatttagatcaag

SEQ ID NO: 16999 - DNA, 30 bp, Artificial Sequence
  Synthetic oligonucleotide
tcaacgatgtcgttagcaaaaaacaagaag

SEQ ID NO: 17000 - DNA, 30 bp, Artificial Sequence
  Synthetic oligonucleotide
cttaggacggtagacataccaccagagaag

SEQ ID NO: 17001 - DNA, 30 bp, Artificial Sequence
  Synthetic oligonucleotide
cgacgtacagatgaacatcgtctttagaag

SEQ ID NO: 17002 - DNA, 30 bp, Artificial Sequence
  Synthetic oligonucleotide
gacaaaaccacaattcaagaatatacgaag

SEQ ID NO: 17003 - DNA, 30 bp, Artificial Sequence
  Synthetic oligonucleotide
gacgcattaatgggacaaggaacaaataag

SEQ ID NO: 17004 - DNA, 30 bp, Artificial Sequence
  Synthetic oligonucleotide
cgggcggaagctaccattggacatcataag

SEQ ID NO: 17005 - DNA, 30 bp, Artificial Sequence
  Synthetic oligonucleotide
cggtcaaaggggcaaacgttgactgataag

SEQ ID NO: 17006 - DNA, 30 bp, Artificial Sequence
  Synthetic oligonucleotide
ggagcgacaaatgtgcaagcaggtactaag

SEQ ID NO: 17007 - DNA, 30 bp, Artificial Sequence
  Synthetic oligonucleotide
atcggcgacatggaatggaatacgcttaag

SEQ ID NO: 17008 - DNA, 30 bp, Artificial Sequence
  Synthetic oligonucleotide
gcgaaaggcatgtacccacttacaacccag

SEQ ID NO: 17009 - DNA, 30 bp, Artificial Sequence
  Synthetic oligonucleotide
gtacgagaggaccaaaccgaccgggcccag

SEQ ID NO: 17010 - DNA, 30 bp, Artificial Sequence
  Synthetic oligonucleotide
cacaggaaattccaggatatgagaagccag

SEQ ID NO: 17011 - DNA, 30 bp, Artificial Sequence
  Synthetic oligonucleotide
agagaaaaggacgtcgattaagcgggccag

SEQ ID NO: 17012 - DNA, 30 bp, Artificial Sequence
  Synthetic oligonucleotide
gtacgataagcggaaggatcaactggccag

SEQ ID NO: 17013 - DNA, 30 bp, Artificial Sequence
  Synthetic oligonucleotide
acgttgaacacgtccttgataagagagcag

SEQ ID NO: 17014 - DNA, 30 bp, Artificial Sequence
  Synthetic oligonucleotide
cgccgaatttggtagcaagagtaaacgcag

SEQ ID NO: 17015 - DNA, 30 bp, Artificial Sequence
  Synthetic oligonucleotide
aaggtaactagacacagggaagatatgcag

SEQ ID NO: 17016 - DNA, 30 bp, Artificial Sequence
  Synthetic oligonucleotide
tcaaagatgagaaaagactgcggacatcag

SEQ ID NO: 17017 - DNA, 30 bp, Artificial Sequence
  Synthetic oligonucleotide
cgaggcggtacgggccgaacatcatatcag

SEQ ID NO: 17018 - DNA, 30 bp, Artificial Sequence
  Synthetic oligonucleotide
gggcggaaagtgaaatgcgttacttgtcag

SEQ ID NO: 17019 - DNA, 30 bp, Artificial Sequence
  Synthetic oligonucleotide
ggtggagtggaggtactgcgtcgagaagag

SEQ ID NO: 17020 - DNA, 30 bp, Artificial Sequence
  Synthetic oligonucleotide
gccatcaaactacaaataaagttaagagag

SEQ ID NO: 17021 - DNA, 30 bp, Artificial Sequence
  Synthetic oligonucleotide
gccagaaaagaaaataaaatgtctagagag

SEQ ID NO: 17022 - DNA, 30 bp, Artificial Sequence
  Synthetic oligonucleotide
cgatcccgggccgcataagccgaccgagag

SEQ ID NO: 17023 - DNA, 30 bp, Artificial Sequence
  Synthetic oligonucleotide
acagccaaggctatagtgagcacgcgagag

SEQ ID NO: 17024 - DNA, 30 bp, Artificial Sequence
  Synthetic oligonucleotide
aacgtcggtgaaatgaactgggccatagag

SEQ ID NO: 17025 - DNA, 30 bp, Artificial Sequence
  Synthetic oligonucleotide
gggatcaataggcgactgacaaggatagag

SEQ ID NO: 17026 - DNA, 30 bp, Artificial Sequence
  Synthetic oligonucleotide
cgaatggctacaacctaaggatggctagag

SEQ ID NO: 17027 - DNA, 31 bp, Artificial Sequence
  Synthetic oligonucleotide
acgccgggcaaggtttcggcagaccaacgag

SEQ ID NO: 17028 - DNA, 30 bp, Artificial Sequence
  Synthetic oligonucleotide
gcgtaattggtaacccctgggatccacgag

SEQ ID NO: 17029 - DNA, 30 bp, Artificial Sequence
  Synthetic oligonucleotide
gcagtaatagacaggggagaaagacccgag

SEQ ID NO: 17030 - DNA, 30 bp, Artificial Sequence
  Synthetic oligonucleotide
cgaaaagatagtgagtggtccccaagcgag

SEQ ID NO: 17031 - DNA, 30 bp, Artificial Sequence
  Synthetic oligonucleotide
ggacttgtgcaaccatcggactcgagcgag

SEQ ID NO: 17032 - DNA, 30 bp, Artificial Sequence
  Synthetic oligonucleotide
gggaaagtttagatgctagaggtacgcgag

SEQ ID NO: 17033 - DNA, 30 bp, Artificial Sequence
  Synthetic oligonucleotide
accgaacctgcagggcagggattaatcgag

SEQ ID NO: 17034 - DNA, 30 bp, Artificial Sequence
  Synthetic oligonucleotide
tggctgagaaaaaggtttagtccgatcgag

SEQ ID NO: 17035 - DNA, 31 bp, Artificial Sequence
  Synthetic oligonucleotide
agactgtattaaggtggaccgagcggaggag

SEQ ID NO: 17036 - DNA, 30 bp, Artificial Sequence
  Synthetic oligonucleotide
cacaggtaacatgtagtcacagagtaggag

SEQ ID NO: 17037 - DNA, 30 bp, Artificial Sequence
  Synthetic oligonucleotide
ggaagcaacacttagggatgtaaggcggag

SEQ ID NO: 17038 - DNA, 30 bp, Artificial Sequence
  Synthetic oligonucleotide
caacgagccgttatcatgagcgaacgggag

SEQ ID NO: 17039 - DNA, 30 bp, Artificial Sequence
  Synthetic oligonucleotide
gagatgatgaaatactaagtatagggggag

SEQ ID NO: 17040 - DNA, 30 bp, Artificial Sequence
  Synthetic oligonucleotide
ccgacacaacgatgtgcaagggtgggggag

SEQ ID NO: 17041 - DNA, 30 bp, Artificial Sequence
  Synthetic oligonucleotide
ggccgaagagtcttacggtcatatctggag

SEQ ID NO: 17042 - DNA, 30 bp, Artificial Sequence
  Synthetic oligonucleotide
aggacaagggaagggactcaatagcgtgag

SEQ ID NO: 17043 - DNA, 30 bp, Artificial Sequence
  Synthetic oligonucleotide
actcgaacgctacgtaagatgaggtgtgag

SEQ ID NO: 17044 - DNA, 30 bp, Artificial Sequence
  Synthetic oligonucleotide
acggagataggattgtctaacccaaaatag

SEQ ID NO: 17045 - DNA, 30 bp, Artificial Sequence
  Synthetic oligonucleotide
gtactggtgagcgaagggttgtcgaaatag

SEQ ID NO: 17046 - DNA, 30 bp, Artificial Sequence
  Synthetic oligonucleotide
gggggcggccacctacgatgatctgaatag

SEQ ID NO: 17047 - DNA, 30 bp, Artificial Sequence
  Synthetic oligonucleotide
cgtgcatgcgcagggaaagcagtctcatag

SEQ ID NO: 17048 - DNA, 30 bp, Artificial Sequence
  Synthetic oligonucleotide
taagtgtgggaacacatgggatgggtatag

SEQ ID NO: 17049 - DNA, 30 bp, Artificial Sequence
  Synthetic oligonucleotide
atgaatgcacagaatgggccaatatgctag

SEQ ID NO: 17050 - DNA, 30 bp, Artificial Sequence
  Synthetic oligonucleotide
aaccgtccgaagagcaaagaactcgtctag

SEQ ID NO: 17051 - DNA, 30 bp, Artificial Sequence
  Synthetic oligonucleotide
tcgatatacatcggctgcgtaccccagtag

SEQ ID NO: 17052 - DNA, 29 bp, Artificial Sequence
  Synthetic oligonucleotide
ggaggcgtttgaacaaaatggagtagtag

SEQ ID NO: 17053 - DNA, 30 bp, Artificial Sequence
  Synthetic oligonucleotide
catgaaagtgtggtgcagttatgaacgtag

SEQ ID NO: 17054 - DNA, 30 bp, Artificial Sequence
  Synthetic oligonucleotide
ggccgtatagtcatcatcatcggtgcgtag

SEQ ID NO: 17055 - DNA, 30 bp, Artificial Sequence
  Synthetic oligonucleotide
gaatcaaggtaagctgtaggaaaaaggtag

SEQ ID NO: 17056 - DNA, 30 bp, Artificial Sequence
  Synthetic oligonucleotide
cgagtgatatgcaaggattgtacaaggtag

SEQ ID NO: 17057 - DNA, 30 bp, Artificial Sequence
  Synthetic oligonucleotide
acgggacaggagatatttcctccaaggtag

SEQ ID NO: 17058 - DNA, 30 bp, Artificial Sequence
  Synthetic oligonucleotide
caacgcaagatggccgtgctccgattgtag

SEQ ID NO: 17059 - DNA, 30 bp, Artificial Sequence
  Synthetic oligonucleotide
gggaaaagacatgtttatgggccgaattag

SEQ ID NO: 17060 - DNA, 30 bp, Artificial Sequence
  Synthetic oligonucleotide
caagaagcatcgggtaaacctgacgattag

SEQ ID NO: 17061 - DNA, 30 bp, Artificial Sequence
  Synthetic oligonucleotide
cgtaaaatggacaattaaatggatagttag

SEQ ID NO: 17062 - DNA, 30 bp, Artificial Sequence
  Synthetic oligonucleotide
tccacgcaacaaagagcgactcgatgttag

SEQ ID NO: 17063 - DNA, 30 bp, Artificial Sequence
  Synthetic oligonucleotide
cactaaaccaatcggtaagcaactaaaacg

SEQ ID NO: 17064 - DNA, 30 bp, Artificial Sequence
  Synthetic oligonucleotide
tcgacaagacgatttaaggtccgtcaaacg

SEQ ID NO: 17065 - DNA, 30 bp, Artificial Sequence
  Synthetic oligonucleotide
taccggcggaatgtgtggaaacaataaacg

SEQ ID NO: 17066 - DNA, 30 bp, Artificial Sequence
  Synthetic oligonucleotide
ccgcagctagagaagcaggcaaggtaaacg

SEQ ID NO: 17067 - DNA, 30 bp, Artificial Sequence
  Synthetic oligonucleotide
caggacatcgaacatgaattgaccacaacg

SEQ ID NO: 17068 - DNA, 30 bp, Artificial Sequence
  Synthetic oligonucleotide
acgctacgaaataaactctcagggccaacg

SEQ ID NO: 17069 - DNA, 30 bp, Artificial Sequence
  Synthetic oligonucleotide
atggatggatacatcgtaaaactgcgaacg

SEQ ID NO: 17070 - DNA, 30 bp, Artificial Sequence
  Synthetic oligonucleotide
cagctccaaaggtagcgacaaattgtaacg

SEQ ID NO: 17071 - DNA, 30 bp, Artificial Sequence
  Synthetic oligonucleotide
ctaaactggaaagcattatgaaagcacacg

SEQ ID NO: 17072 - DNA, 30 bp, Artificial Sequence
  Synthetic oligonucleotide
cggaaaatgctaaaatggggatatggcacg

SEQ ID NO: 17073 - DNA, 30 bp, Artificial Sequence
  Synthetic oligonucleotide
tcgcctgacaagctccaaggagtagggacg

SEQ ID NO: 17074 - DNA, 30 bp, Artificial Sequence
  Synthetic oligonucleotide
caggtacaggtctacataaacaacggtacg

SEQ ID NO: 17075 - DNA, 30 bp, Artificial Sequence
  Synthetic oligonucleotide
tagacagatggaacacattatacgaaaccg

SEQ ID NO: 17076 - DNA, 30 bp, Artificial Sequence
  Synthetic oligonucleotide
ctgtaaggccaatgggagtaaggacaaccg

SEQ ID NO: 17077 - DNA, 30 bp, Artificial Sequence
  Synthetic oligonucleotide
tcgactcctataaaaagtggcaaggaaccg

SEQ ID NO: 17078 - DNA, 30 bp, Artificial Sequence
  Synthetic oligonucleotide
cgggtaaccaagattcagggctagataccg

SEQ ID NO: 17079 - DNA, 30 bp, Artificial Sequence
  Synthetic oligonucleotide
ggatggctcgaagtatgaaaatccaccccg

SEQ ID NO: 17080 - DNA, 30 bp, Artificial Sequence
  Synthetic oligonucleotide
tcagaaagatcaaaagtgggagttcgcccg

SEQ ID NO: 17081 - DNA, 30 bp, Artificial Sequence
  Synthetic oligonucleotide
atggccacaaaaagcgtgaactgggagccg

SEQ ID NO: 17082 - DNA, 30 bp, Artificial Sequence
  Synthetic oligonucleotide
tcgcggaagtctgaattgaaggataggccg

SEQ ID NO: 17083 - DNA, 30 bp, Artificial Sequence
  Synthetic oligonucleotide
tcgggccgaaaagatcgtacacaatttccg

SEQ ID NO: 17084 - DNA, 30 bp, Artificial Sequence
  Synthetic oligonucleotide
tgactcggaaatcgtaaggaggccccagcg

SEQ ID NO: 17085 - DNA, 30 bp, Artificial Sequence
  Synthetic oligonucleotide
tcctcgaatatagagaaacccgagccagcg

SEQ ID NO: 17086 - DNA, 30 bp, Artificial Sequence
  Synthetic oligonucleotide
gacatccatacacggcaaaacgttccagcg

SEQ ID NO: 17087 - DNA, 30 bp, Artificial Sequence
  Synthetic oligonucleotide
tcgaggataggtgcacaatgtgccagagcg

SEQ ID NO: 17088 - DNA, 30 bp, Artificial Sequence
  Synthetic oligonucleotide
aagcggagagggcacattaatgttctagcg

SEQ ID NO: 17089 - DNA, 30 bp, Artificial Sequence
  Synthetic oligonucleotide
cggagggaatggcgaatgagtgaaaacgcg

SEQ ID NO: 17090 - DNA, 30 bp, Artificial Sequence
  Synthetic oligonucleotide
tcggaacgacaagggtaagttgttcccgcg

SEQ ID NO: 17091 - DNA, 30 bp, Artificial Sequence
  Synthetic oligonucleotide
aacgtgggtaacagtgggacagacagcgcg

SEQ ID NO: 17092 - DNA, 30 bp, Artificial Sequence
  Synthetic oligonucleotide
cgacgtgccgggcgaacaaaagaggtcgcg

SEQ ID NO: 17093 - DNA, 30 bp, Artificial Sequence
  Synthetic oligonucleotide
cggattacaacagctcaggcaatataggcg

SEQ ID NO: 17094 - DNA, 30 bp, Artificial Sequence
  Synthetic oligonucleotide
acgtatgattcaggcaacatatgtcatgcg

SEQ ID NO: 17095 - DNA, 30 bp, Artificial Sequence
  Synthetic oligonucleotide
taaaggaccagggaggacctaacgtctgcg

SEQ ID NO: 17096 - DNA, 30 bp, Artificial Sequence
  Synthetic oligonucleotide
aacggcagaatcggccggacagagattgcg

SEQ ID NO: 17097 - DNA, 30 bp, Artificial Sequence
  Synthetic oligonucleotide
ggcagtaccgaggctggagggacgtaatcg

SEQ ID NO: 17098 - DNA, 30 bp, Artificial Sequence
  Synthetic oligonucleotide
cgtgagtgcgtatgagcgtaatgaacatcg

SEQ ID NO: 17099 - DNA, 30 bp, Artificial Sequence
  Synthetic oligonucleotide
gcctaggaccggaagaatctccaaagctcg

SEQ ID NO: 17100 - DNA, 30 bp, Artificial Sequence
  Synthetic oligonucleotide
tgaagaagataacatgacccatccggctcg

SEQ ID NO: 17101 - DNA, 30 bp, Artificial Sequence
  Synthetic oligonucleotide
aggctaactatgcgtctagaggctccgtcg

SEQ ID NO: 17102 - DNA, 30 bp, Artificial Sequence
  Synthetic oligonucleotide
cgacatgaaatacgggcctgcgctaggtcg

SEQ ID NO: 17103 - DNA, 30 bp, Artificial Sequence
  Synthetic oligonucleotide
gcgaagtaacacagagaatcaagtttgtcg

SEQ ID NO: 17104 - DNA, 30 bp, Artificial Sequence
  Synthetic oligonucleotide
aggctacctcgatactaaaagctaacttcg

SEQ ID NO: 17105 - DNA, 30 bp, Artificial Sequence
  Synthetic oligonucleotide
gtcagggcaaagttgactacattagcaagg

SEQ ID NO: 17106 - DNA, 30 bp, Artificial Sequence
  Synthetic oligonucleotide
cgagtaaaggaagtagacattaagcccagg

SEQ ID NO: 17107 - DNA, 30 bp, Artificial Sequence
  Synthetic oligonucleotide
ttaggacagtcgaagtaatgccaagccagg

SEQ ID NO: 17108 - DNA, 30 bp, Artificial Sequence
  Synthetic oligonucleotide
gcgtcagatatcgaacgaggcatagtcagg

SEQ ID NO: 17109 - DNA, 31 bp, Artificial Sequence
  Synthetic oligonucleotide
tagacaaataatgatacaggtttgcaagagg

SEQ ID NO: 17110 - DNA, 30 bp, Artificial Sequence
  Synthetic oligonucleotide
acggcgagcctaaggggtgttaacgagagg

SEQ ID NO: 17111 - DNA, 30 bp, Artificial Sequence
  Synthetic oligonucleotide
aagcagagatcgagttaacggtggacgagg

SEQ ID NO: 17112 - DNA, 30 bp, Artificial Sequence
  Synthetic oligonucleotide
cggtgcggaatgactataaagataccgagg

SEQ ID NO: 17113 - DNA, 30 bp, Artificial Sequence
  Synthetic oligonucleotide
ctcgggaaaaagagaaagatcctctcgagg

SEQ ID NO: 17114 - DNA, 30 bp, Artificial Sequence
  Synthetic oligonucleotide
acgtagtatataagagcgaggcgtaggagg

SEQ ID NO: 17115 - DNA, 30 bp, Artificial Sequence
  Synthetic oligonucleotide
ctacatacaacttaacaaagacacatgagg

SEQ ID NO: 17116 - DNA, 30 bp, Artificial Sequence
  Synthetic oligonucleotide
gcttcgaggagcaaacgaacatcccgtagg

SEQ ID NO: 17117 - DNA, 30 bp, Artificial Sequence
  Synthetic oligonucleotide
ggtcaaagcgacacttgtatccaaattagg

SEQ ID NO: 17118 - DNA, 30 bp, Artificial Sequence
  Synthetic oligonucleotide
ttaacgatgaaacagtagcacgagaaacgg

SEQ ID NO: 17119 - DNA, 30 bp, Artificial Sequence
  Synthetic oligonucleotide
cgaatatctatcaaacgtaacaaggtccgg

SEQ ID NO: 17120 - DNA, 30 bp, Artificial Sequence
  Synthetic oligonucleotide
acgacagaattgaccgaatgaagttagcgg

SEQ ID NO: 17121 - DNA, 30 bp, Artificial Sequence
  Synthetic oligonucleotide
gtgaagaagcaaagtcagactgggattcgg

SEQ ID NO: 17122 - DNA, 30 bp, Artificial Sequence
  Synthetic oligonucleotide
agggttaaaaaaatatagtcagaataaggg

SEQ ID NO: 17123 - DNA, 30 bp, Artificial Sequence
  Synthetic oligonucleotide
cgaacgtataagatttaagcgccataaggg

SEQ ID NO: 17124 - DNA, 30 bp, Artificial Sequence
  Synthetic oligonucleotide
cctgagactaaaggagtgttctgtagaggg

SEQ ID NO: 17125 - DNA, 30 bp, Artificial Sequence
  Synthetic oligonucleotide
ggcggatgttgaaagttgaacaggcgaggg

SEQ ID NO: 17126 - DNA, 30 bp, Artificial Sequence
  Synthetic oligonucleotide
acggttcaagtagagatctcactaataggg

SEQ ID NO: 17127 - DNA, 30 bp, Artificial Sequence
  Synthetic oligonucleotide
cgcaaatatccatcatctaccgacataggg

SEQ ID NO: 17128 - DNA, 30 bp, Artificial Sequence
  Synthetic oligonucleotide
agtacgaaaccattccatacagattcgggg

SEQ ID NO: 17129 - DNA, 30 bp, Artificial Sequence
  Synthetic oligonucleotide
agacaccggttataaaagaacaaaactggg

SEQ ID NO: 17130 - DNA, 30 bp, Artificial Sequence
  Synthetic oligonucleotide
ggttggtagagctaggaacttacagaatgg

SEQ ID NO: 17131 - DNA, 30 bp, Artificial Sequence
  Synthetic oligonucleotide
tgtcgaagggggagctcggtggtctgatgg

SEQ ID NO: 17132 - DNA, 30 bp, Artificial Sequence
  Synthetic oligonucleotide
aacgtgactgtaaggtgggtagagatatgg

SEQ ID NO: 17133 - DNA, 30 bp, Artificial Sequence
  Synthetic oligonucleotide
acggtaagatatcgtgaagtatagctatgg

SEQ ID NO: 17134 - DNA, 30 bp, Artificial Sequence
  Synthetic oligonucleotide
cagaatcacgaagagatccgggcaaagtgg

SEQ ID NO: 17135 - DNA, 30 bp, Artificial Sequence
  Synthetic oligonucleotide
tggatcacaaaaacatcaagacagcagtgg

SEQ ID NO: 17136 - DNA, 30 bp, Artificial Sequence
  Synthetic oligonucleotide
gtgagactcgacaacagtaacacaacaatg

SEQ ID NO: 17137 - DNA, 30 bp, Artificial Sequence
  Synthetic oligonucleotide
gtcatccgataaaggggcgacaccacaatg

SEQ ID NO: 17138 - DNA, 30 bp, Artificial Sequence
  Synthetic oligonucleotide
atggaagattggggtcacccctaagcaatg

SEQ ID NO: 17139 - DNA, 30 bp, Artificial Sequence
  Synthetic oligonucleotide
caggagcataacgcgaataacgggcacatg

SEQ ID NO: 17140 - DNA, 30 bp, Artificial Sequence
  Synthetic oligonucleotide
tccggcgcgatataaagagaatgaatgatg

SEQ ID NO: 17141 - DNA, 30 bp, Artificial Sequence
  Synthetic oligonucleotide
tcagcaaggacagtacgaatttgaatgatg

SEQ ID NO: 17142 - DNA, 30 bp, Artificial Sequence
  Synthetic oligonucleotide
ggactaggtagtgaggtcgaatagggtatg

SEQ ID NO: 17143 - DNA, 30 bp, Artificial Sequence
  Synthetic oligonucleotide
caggactactggtaactaaaagattaactg

SEQ ID NO: 17144 - DNA, 30 bp, Artificial Sequence
  Synthetic oligonucleotide
gtgagtcgggcaaactggagaatgaacctg

SEQ ID NO: 17145 - DNA, 30 bp, Artificial Sequence
  Synthetic oligonucleotide
cgaaagggcaatatgatgtgccgaaccctg

SEQ ID NO: 17146 - DNA, 30 bp, Artificial Sequence
  Synthetic oligonucleotide
aatcgcaagagaaggtacaaaggtatcctg

SEQ ID NO: 17147 - DNA, 30 bp, Artificial Sequence
  Synthetic oligonucleotide
tcgaaaagcgtggtagcgaaaaccttgctg

SEQ ID NO: 17148 - DNA, 30 bp, Artificial Sequence
  Synthetic oligonucleotide
gtaacagagtcatgtgaacgagtcccagtg

SEQ ID NO: 17149 - DNA, 30 bp, Artificial Sequence
  Synthetic oligonucleotide
tggtacataatggtaatcggaggccgagtg

SEQ ID NO: 17150 - DNA, 30 bp, Artificial Sequence
  Synthetic oligonucleotide
cgggacgccccattatcgaaattgtgagtg

SEQ ID NO: 17151 - DNA, 30 bp, Artificial Sequence
  Synthetic oligonucleotide
catcaggagtgatgagagcctaacatggtg

SEQ ID NO: 17152 - DNA, 30 bp, Artificial Sequence
  Synthetic oligonucleotide
cgacagaatacggtggatcagagaagtgtg

SEQ ID NO: 17153 - DNA, 30 bp, Artificial Sequence
  Synthetic oligonucleotide
ccgtacagaggaaggaaaaagtcgtgtgtg

SEQ ID NO: 17154 - DNA, 30 bp, Artificial Sequence
  Synthetic oligonucleotide
agtcaggagaaagcgtactgactcgaattg

SEQ ID NO: 17155 - DNA, 30 bp, Artificial Sequence
  Synthetic oligonucleotide
atgccaaagctagaactaacagcggaattg

SEQ ID NO: 17156 - DNA, 30 bp, Artificial Sequence
  Synthetic oligonucleotide
aggtaaggctagcgattaaaccgggaattg

SEQ ID NO: 17157 - DNA, 30 bp, Artificial Sequence
  Synthetic oligonucleotide
agaaagatataagaagttgtacaagcattg

SEQ ID NO: 17158 - DNA, 30 bp, Artificial Sequence
  Synthetic oligonucleotide
aggttaccaaaaattagaaagaaagccttg

SEQ ID NO: 17159 - DNA, 30 bp, Artificial Sequence
  Synthetic oligonucleotide
cgtaaaattgcggaatgaaataaaatcttg

SEQ ID NO: 17160 - DNA, 30 bp, Artificial Sequence
  Synthetic oligonucleotide
agcacgccagaatagggcgggtagaagttg

SEQ ID NO: 17161 - DNA, 30 bp, Artificial Sequence
  Synthetic oligonucleotide
cgtgaacaaaaatcttacactaggatgttg

SEQ ID NO: 17162 - DNA, 30 bp, Artificial Sequence
  Synthetic oligonucleotide
acacgcgctggatcgacaattgagggaaat

SEQ ID NO: 17163 - DNA, 30 bp, Artificial Sequence
  Synthetic oligonucleotide
cgtcgacagtaagtatgggacgacatcaat

SEQ ID NO: 17164 - DNA, 30 bp, Artificial Sequence
  Synthetic oligonucleotide
aacgcgacaaggggtttggatccgaaacat

SEQ ID NO: 17165 - DNA, 30 bp, Artificial Sequence
  Synthetic oligonucleotide
agctgatgatctgaaacgtaagggggacat

SEQ ID NO: 17166 - DNA, 30 bp, Artificial Sequence
  Synthetic oligonucleotide
ctgccagtaggggatacgagaacgacccat

SEQ ID NO: 17167 - DNA, 30 bp, Artificial Sequence
  Synthetic oligonucleotide
aaggacggtgtgaaagagcacttaggccat

SEQ ID NO: 17168 - DNA, 30 bp, Artificial Sequence
  Synthetic oligonucleotide
tcttgaaatataaacagtcgggaaaagcat

SEQ ID NO: 17169 - DNA, 30 bp, Artificial Sequence
  Synthetic oligonucleotide
gagaaggaggaactcaagggaattaggcat

SEQ ID NO: 17170 - DNA, 30 bp, Artificial Sequence
  Synthetic oligonucleotide
ggcaagagagtgtgctgggtaatggatcat

SEQ ID NO: 17171 - DNA, 30 bp, Artificial Sequence
  Synthetic oligonucleotide
tctacgacagagatccagatacgccaagat

SEQ ID NO: 17172 - DNA, 30 bp, Artificial Sequence
  Synthetic oligonucleotide
ggaacataatggatgagccaagcaccagat

SEQ ID NO: 17173 - DNA, 30 bp, Artificial Sequence
  Synthetic oligonucleotide
cgtctataaaattgacaaataaggcgagat

SEQ ID NO: 17174 - DNA, 30 bp, Artificial Sequence
  Synthetic oligonucleotide
ggggcagagggtggaaaagtactatgagat

SEQ ID NO: 17175 - DNA, 30 bp, Artificial Sequence
  Synthetic oligonucleotide
acggcttacccgattaccaactagtgagat

SEQ ID NO: 17176 - DNA, 30 bp, Artificial Sequence
  Synthetic oligonucleotide
cagagcgagcacacgaaccatacgactgat

SEQ ID NO: 17177 - DNA, 30 bp, Artificial Sequence
  Synthetic oligonucleotide
cgactacatgtcgaacgattaagacaatat

SEQ ID NO: 17178 - DNA, 30 bp, Artificial Sequence
  Synthetic oligonucleotide
aaggacagggtgacaagagcgcgaaactat

SEQ ID NO: 17179 - DNA, 30 bp, Artificial Sequence
  Synthetic oligonucleotide
ggtcggacaagatgatcacagtgacactat

SEQ ID NO: 17180 - DNA, 30 bp, Artificial Sequence
  Synthetic oligonucleotide
atacactgacagggaggcggccgcgacact

SEQ ID NO: 17181 - DNA, 30 bp, Artificial Sequence
  Synthetic oligonucleotide
tcgaataggaactctcgggggcgtgggact

SEQ ID NO: 17182 - DNA, 30 bp, Artificial Sequence
  Synthetic oligonucleotide
gatcgcgggtaaacacggaatcgagtgact

SEQ ID NO: 17183 - DNA, 30 bp, Artificial Sequence
  Synthetic oligonucleotide
gcggaaaaggacaatggcaatgccgtgact

SEQ ID NO: 17184 - DNA, 30 bp, Artificial Sequence
  Synthetic oligonucleotide
atacacccagtgtgccaacgagcgaatact

SEQ ID NO: 17185 - DNA, 30 bp, Artificial Sequence
  Synthetic oligonucleotide
cggacgaaaattgagcggataaaccctact

SEQ ID NO: 17186 - DNA, 30 bp, Artificial Sequence
  Synthetic oligonucleotide
cgcggtacgcgaaaagcgaaacactcccct

SEQ ID NO: 17187 - DNA, 30 bp, Artificial Sequence
  Synthetic oligonucleotide
tgctgaaactgaattcgagagctagcagct

SEQ ID NO: 17188 - DNA, 30 bp, Artificial Sequence
  Synthetic oligonucleotide
ataggatataaaacggaaaagagtgcagct

SEQ ID NO: 17189 - DNA, 30 bp, Artificial Sequence
  Synthetic oligonucleotide
cctgccaactaagagtgtacaaagaatgct

SEQ ID NO: 17190 - DNA, 30 bp, Artificial Sequence
  Synthetic oligonucleotide
atggaacagggcagagatcgataacgtgct

SEQ ID NO: 17191 - DNA, 30 bp, Artificial Sequence
  Synthetic oligonucleotide
cgcgtgagattatgaaaatgggaaggtgct

SEQ ID NO: 17192 - DNA, 30 bp, Artificial Sequence
  Synthetic oligonucleotide
ccgctgaagagagacagtgggaccattgct

SEQ ID NO: 17193 - DNA, 30 bp, Artificial Sequence
  Synthetic oligonucleotide
agactgaagcgaggcaggatggggcaaagt

SEQ ID NO: 17194 - DNA, 30 bp, Artificial Sequence
  Synthetic oligonucleotide
cgagggacgattgggtggtatcgctaaagt

SEQ ID NO: 17195 - DNA, 30 bp, Artificial Sequence
  Synthetic oligonucleotide
aggaagatacgtctaagtgagtcaaccagt

SEQ ID NO: 17196 - DNA, 30 bp, Artificial Sequence
  Synthetic oligonucleotide
gcgaaagcagaaagcaaagtaaggcgcagt

SEQ ID NO: 17197 - DNA, 30 bp, Artificial Sequence
  Synthetic oligonucleotide
agcccggaaatcgaaagtgggacagtcagt

SEQ ID NO: 17198 - DNA, 30 bp, Artificial Sequence
  Synthetic oligonucleotide
acacagtgggtacttggaagagggagtagt

SEQ ID NO: 17199 - DNA, 30 bp, Artificial Sequence
  Synthetic oligonucleotide
acgatacgtagtatcttcgcgcgaattagt

SEQ ID NO: 17200 - DNA, 30 bp, Artificial Sequence
  Synthetic oligonucleotide
cctaagggtcgaagtgcaagacgacaacgt

SEQ ID NO: 17201 - DNA, 30 bp, Artificial Sequence
  Synthetic oligonucleotide
aaggatggacaagacgtaaggacatagcgt

SEQ ID NO: 17202 - DNA, 30 bp, Artificial Sequence
  Synthetic oligonucleotide
tagggagaaggtgagcccagaaactcgcgt

SEQ ID NO: 17203 - DNA, 30 bp, Artificial Sequence
  Synthetic oligonucleotide
acggcgtgtcacaacaatgtgatggctcgt

SEQ ID NO: 17204 - DNA, 30 bp, Artificial Sequence
  Synthetic oligonucleotide
aacgagcgtgtataatgggcaaaagcaggt

SEQ ID NO: 17205 - DNA, 30 bp, Artificial Sequence
  Synthetic oligonucleotide
cgcacaaggaaaaaactcgattgaagaggt

SEQ ID NO: 17206 - DNA, 30 bp, Artificial Sequence
  Synthetic oligonucleotide
gcacgagagtagcgtcataaggattgaggt

SEQ ID NO: 17207 - DNA, 30 bp, Artificial Sequence
  Synthetic oligonucleotide
acttgctaaagcgaaaaaagcggcaacggt

SEQ ID NO: 17208 - DNA, 30 bp, Artificial Sequence
  Synthetic oligonucleotide
tgcaaaagtaaaagtaggaaccacgttggt

SEQ ID NO: 17209 - DNA, 30 bp, Artificial Sequence
  Synthetic oligonucleotide
gaaggaggacaccattaatgtaaaagatgt

SEQ ID NO: 17210 - DNA, 30 bp, Artificial Sequence
  Synthetic oligonucleotide
agtaatctaaagggagcagagagtcgctgt

SEQ ID NO: 17211 - DNA, 30 bp, Artificial Sequence
  Synthetic oligonucleotide
gaagaagaagataacctatacccacagtgt

SEQ ID NO: 17212 - DNA, 30 bp, Artificial Sequence
  Synthetic oligonucleotide
gatggtggagggcggtaacaaacacgaatt

SEQ ID NO: 17213 - DNA, 30 bp, Artificial Sequence
  Synthetic oligonucleotide
acgaatgtggtaagcatggaaccggtaatt

SEQ ID NO: 17214 - DNA, 30 bp, Artificial Sequence
  Synthetic oligonucleotide
cgggaagaggtggaggccaaatagaacatt

SEQ ID NO: 17215 - DNA, 30 bp, Artificial Sequence
  Synthetic oligonucleotide
cacggggagtaaaaagtgtggaagtcgatt

SEQ ID NO: 17216 - DNA, 30 bp, Artificial Sequence
  Synthetic oligonucleotide
ggagatgagagacatgcggagtgcaaagtt

SEQ ID NO: 17217 - DNA, 30 bp, Artificial Sequence
  Synthetic oligonucleotide
gcgtagataagagtggcggacattaaagtt

SEQ ID NO: 17218 - DNA, 30 bp, Artificial Sequence
  Synthetic oligonucleotide
cgatgttgagcaagcaggaaatgggccgtt

SEQ ID NO: 17219 - DNA, 30 bp, Artificial Sequence
  Synthetic oligonucleotide
acgtgtatcgtccgaaacagggaacaggtt

SEQ ID NO: 17220 - DNA, 30 bp, Artificial Sequence
  Synthetic oligonucleotide
tcagggcatggaactcaaagcagcgaggtt

SEQ ID NO: 17221 - DNA, 30 bp, Artificial Sequence
  Synthetic oligonucleotide
cacgaatgaaaaagactacctgtagcaaaa

SEQ ID NO: 17222 - DNA, 30 bp, Artificial Sequence
  Synthetic oligonucleotide
gcccgtgaagactaggacaatcaggcaaaa

SEQ ID NO: 17223 - DNA, 30 bp, Artificial Sequence
  Synthetic oligonucleotide
cagtataaaacgagcagaacaccggcaaaa

SEQ ID NO: 17224 - DNA, 30 bp, Artificial Sequence
  Synthetic oligonucleotide
cgagactgaataattgagcacggggcaaaa

SEQ ID NO: 17225 - DNA, 30 bp, Artificial Sequence
  Synthetic oligonucleotide
cggaaacgaccattctatggtgcacgaaaa

SEQ ID NO: 17226 - DNA, 30 bp, Artificial Sequence
  Synthetic oligonucleotide
ccgaacgaaaacctagtaagcaggcgaaaa

SEQ ID NO: 17227 - DNA, 30 bp, Artificial Sequence
  Synthetic oligonucleotide
tactcgtagagtcggcccgaatgaggaaaa

SEQ ID NO: 17228 - DNA, 30 bp, Artificial Sequence
  Synthetic oligonucleotide
aagagacacacacggagaagtgacctaaaa

SEQ ID NO: 17229 - DNA, 30 bp, Artificial Sequence
  Synthetic oligonucleotide
caaacgaaggtaacgagcccatggtacaaa

SEQ ID NO: 17230 - DNA, 30 bp, Artificial Sequence
  Synthetic oligonucleotide
gtggcgggaccaagtacgaaagtgtccaaa

SEQ ID NO: 17231 - DNA, 30 bp, Artificial Sequence
  Synthetic oligonucleotide
cgccacgaaatgggacaatcggtcagcaaa

SEQ ID NO: 17232 - DNA, 30 bp, Artificial Sequence
  Synthetic oligonucleotide
cgagacggtacgactttcaaaggtagcaaa

SEQ ID NO: 17233 - DNA, 30 bp, Artificial Sequence
  Synthetic oligonucleotide
agccgatcgtaggcaaaaggtatcaagaaa

SEQ ID NO: 17234 - DNA, 30 bp, Artificial Sequence
  Synthetic oligonucleotide
gttgccgaaaacaaatcagaattcgagaaa

SEQ ID NO: 17235 - DNA, 30 bp, Artificial Sequence
  Synthetic oligonucleotide
accgaacaagctcaaatctggctaatgaaa

SEQ ID NO: 17236 - DNA, 30 bp, Artificial Sequence
  Synthetic oligonucleotide
aagggtggagccacgacgaacacattgaaa

SEQ ID NO: 17237 - DNA, 30 bp, Artificial Sequence
  Synthetic oligonucleotide
gaagaggtaactggaatcgatcaatctaaa

SEQ ID NO: 17238 - DNA, 30 bp, Artificial Sequence
  Synthetic oligonucleotide
cgccggggacacaccgtgatcaagagtaaa

SEQ ID NO: 17239 - DNA, 30 bp, Artificial Sequence
  Synthetic oligonucleotide
agagggatcgcataatgattcaggagtaaa

SEQ ID NO: 17240 - DNA, 30 bp, Artificial Sequence
  Synthetic oligonucleotide
gcgggaacctcgcgcaatcaagggtgtaaa

SEQ ID NO: 17241 - DNA, 30 bp, Artificial Sequence
  Synthetic oligonucleotide
cgggccgtatcaccgagggcaaggaaacaa

SEQ ID NO: 17242 - DNA, 30 bp, Artificial Sequence
  Synthetic oligonucleotide
cgttcggatcacccaatgcaagctcaacaa

SEQ ID NO: 17243 - DNA, 30 bp, Artificial Sequence
  Synthetic oligonucleotide
aagcagaggaggtactccagctagccacaa

SEQ ID NO: 17244 - DNA, 30 bp, Artificial Sequence
  Synthetic oligonucleotide
aaaggtaacaagctcaaatacgttggacaa

SEQ ID NO: 17245 - DNA, 30 bp, Artificial Sequence
  Synthetic oligonucleotide
acgggggtggatacttgaaaccgggtacaa

SEQ ID NO: 17246 - DNA, 30 bp, Artificial Sequence
  Synthetic oligonucleotide
ggactaggcgtcgagtcaaaggccaaccaa

SEQ ID NO: 17247 - DNA, 30 bp, Artificial Sequence
  Synthetic oligonucleotide
cactagaacttctcagagatcgtcgcccaa

SEQ ID NO: 17248 - DNA, 30 bp, Artificial Sequence
  Synthetic oligonucleotide
tacggcccgaatctcaaaagagagaagcaa

SEQ ID NO: 17249 - DNA, 30 bp, Artificial Sequence
  Synthetic oligonucleotide
gacggaacgcgatatgaccgattacagcaa

SEQ ID NO: 17250 - DNA, 30 bp, Artificial Sequence
  Synthetic oligonucleotide
gtgggcgtcgtgtagggaaccgatgcgcaa

SEQ ID NO: 17251 - DNA, 30 bp, Artificial Sequence
  Synthetic oligonucleotide
acagggcgcgaggggtaaatgtggtcgcaa

SEQ ID NO: 17252 - DNA, 30 bp, Artificial Sequence
  Synthetic oligonucleotide
agaagacaatccctagcataaaaaggtcaa

SEQ ID NO: 17253 - DNA, 30 bp, Artificial Sequence
  Synthetic oligonucleotide
ctaacggtacgagggtctggagtgattcaa

SEQ ID NO: 17254 - DNA, 30 bp, Artificial Sequence
  Synthetic oligonucleotide
cgactgtctcggggatgatgagataaagaa

SEQ ID NO: 17255 - DNA, 30 bp, Artificial Sequence
  Synthetic oligonucleotide
ctgtgagaaaaacttcacatttcacaagaa

SEQ ID NO: 17256 - DNA, 30 bp, Artificial Sequence
  Synthetic oligonucleotide
tgacggtggacccaaaaaaaggctgcagaa

SEQ ID NO: 17257 - DNA, 30 bp, Artificial Sequence
  Synthetic oligonucleotide
ctagaggtaggcgtgagcagaacggtagaa

SEQ ID NO: 17258 - DNA, 30 bp, Artificial Sequence
  Synthetic oligonucleotide
gccgcgcccaaataacagtccagaaacgaa

SEQ ID NO: 17259 - DNA, 30 bp, Artificial Sequence
  Synthetic oligonucleotide
ggatggcaaagtgtaaaggtctcgtacgaa

SEQ ID NO: 17260 - DNA, 30 bp, Artificial Sequence
  Synthetic oligonucleotide
atcgaaaggtctgagatcggtcgagccgaa

SEQ ID NO: 17261 - DNA, 30 bp, Artificial Sequence
  Synthetic oligonucleotide
caaaggaagcgtaacgagtaagtgctcgaa

SEQ ID NO: 17262 - DNA, 30 bp, Artificial Sequence
  Synthetic oligonucleotide
gttgggacagcaaaagcgagaagaaaggaa

SEQ ID NO: 17263 - DNA, 30 bp, Artificial Sequence
  Synthetic oligonucleotide
cggtaagcaatgctgccgtaacaatgtgaa

SEQ ID NO: 17264 - DNA, 30 bp, Artificial Sequence
  Synthetic oligonucleotide
agagagtggacttagaatgataacgaataa

SEQ ID NO: 17265 - DNA, 30 bp, Artificial Sequence
  Synthetic oligonucleotide
cggagccacacagaccatgtccccgaataa

SEQ ID NO: 17266 - DNA, 30 bp, Artificial Sequence
  Synthetic oligonucleotide
cggcgtcacaatacaaatgttggaacataa

SEQ ID NO: 17267 - DNA, 30 bp, Artificial Sequence
  Synthetic oligonucleotide
ggagaaagaatcgcaaaaaatatgatctaa

SEQ ID NO: 17268 - DNA, 30 bp, Artificial Sequence
  Synthetic oligonucleotide
cgagctaccacaaatcataatcggtcgtaa

SEQ ID NO: 17269 - DNA, 30 bp, Artificial Sequence
  Synthetic oligonucleotide
atcatccgtgaaagggacagccaccggtaa

SEQ ID NO: 17270 - DNA, 30 bp, Artificial Sequence
  Synthetic oligonucleotide
ggctcggaggcaacagtatgacagaaaaca

SEQ ID NO: 17271 - DNA, 30 bp, Artificial Sequence
  Synthetic oligonucleotide
aacgagtaggtgtcagtgcgggcacgaaca

SEQ ID NO: 17272 - DNA, 30 bp, Artificial Sequence
  Synthetic oligonucleotide
acaaataatgaaagcgagactggcaacaca

SEQ ID NO: 17273 - DNA, 30 bp, Artificial Sequence
  Synthetic oligonucleotide
cgacgggagggaatgccagttatgagcaca

SEQ ID NO: 17274 - DNA, 30 bp, Artificial Sequence
  Synthetic oligonucleotide
agaacgaactggacaagggcggggcgcaca

SEQ ID NO: 17275 - DNA, 30 bp, Artificial Sequence
  Synthetic oligonucleotide
ggagctacggcgaacccgggtgtctgcaca

SEQ ID NO: 17276 - DNA, 30 bp, Artificial Sequence
  Synthetic oligonucleotide
tccgacaaacatcacaacggcaaagtcaca

SEQ ID NO: 17277 - DNA, 30 bp, Artificial Sequence
  Synthetic oligonucleotide
agttgcacaggtgaatcggaagttaagaca

SEQ ID NO: 17278 - DNA, 31 bp, Artificial Sequence
  Synthetic oligonucleotide
gtgcagaaggcaaggagcagcgctgcagaca

SEQ ID NO: 17279 - DNA, 30 bp, Artificial Sequence
  Synthetic oligonucleotide
acgagtagcctaaggcaacacataacgaca

SEQ ID NO: 17280 - DNA, 30 bp, Artificial Sequence
  Synthetic oligonucleotide
agacaaagacggaggattggtgttgggaca

SEQ ID NO: 17281 - DNA, 30 bp, Artificial Sequence
  Synthetic oligonucleotide
caacagtagggaacatcaatttagacacca

SEQ ID NO: 17282 - DNA, 30 bp, Artificial Sequence
  Synthetic oligonucleotide
cagaggataaatagaggacaattagcacca

SEQ ID NO: 17283 - DNA, 30 bp, Artificial Sequence
  Synthetic oligonucleotide
aacgcctgaactaaaatcaaaggatcacca

SEQ ID NO: 17284 - DNA, 30 bp, Artificial Sequence
  Synthetic oligonucleotide
cgaacactaaatgcagaccgaggctcacca

SEQ ID NO: 17285 - DNA, 30 bp, Artificial Sequence
  Synthetic oligonucleotide
ctacgtaagtcaatcgtcaaaggaaaccca

SEQ ID NO: 17286 - DNA, 30 bp, Artificial Sequence
  Synthetic oligonucleotide
taccgtcaaggcataaccagaggcaaccca

SEQ ID NO: 17287 - DNA, 30 bp, Artificial Sequence
  Synthetic oligonucleotide
cgacattactaaatagaattaaaccaccca

SEQ ID NO: 17288 - DNA, 30 bp, Artificial Sequence
  Synthetic oligonucleotide
aggcaccaggtgcaaacggcgcgcacccca

SEQ ID NO: 17289 - DNA, 30 bp, Artificial Sequence
  Synthetic oligonucleotide
cgtacggaccgagcgaaccattacgtgcca

SEQ ID NO: 17290 - DNA, 30 bp, Artificial Sequence
  Synthetic oligonucleotide
cgagatcggccgagcaaacctggggtgcca

SEQ ID NO: 17291 - DNA, 30 bp, Artificial Sequence
  Synthetic oligonucleotide
agcacgacggacacatttacgttaaaagca

SEQ ID NO: 17292 - DNA, 30 bp, Artificial Sequence
  Synthetic oligonucleotide
cggcgacatgcggagcagaggttggaagca

SEQ ID NO: 17293 - DNA, 30 bp, Artificial Sequence
  Synthetic oligonucleotide
aatgaccgtcaacgttaagccatggcagca

SEQ ID NO: 17294 - DNA, 30 bp, Artificial Sequence
  Synthetic oligonucleotide
tcacgttcgtcgggcaaacgaaaccgagca

SEQ ID NO: 17295 - DNA, 30 bp, Artificial Sequence
  Synthetic oligonucleotide
atatggcccaagaaagtagtcgagttagca

SEQ ID NO: 17296 - DNA, 30 bp, Artificial Sequence
  Synthetic oligonucleotide
taatctgcctgcaagaaaggagagcacgca

SEQ ID NO: 17297 - DNA, 30 bp, Artificial Sequence
  Synthetic oligonucleotide
aaggagctggtgtaccaggaatgaatcgca

SEQ ID NO: 17298 - DNA, 30 bp, Artificial Sequence
  Synthetic oligonucleotide
gcatagttacgagtaggagtaccgaaggca

SEQ ID NO: 17299 - DNA, 30 bp, Artificial Sequence
  Synthetic oligonucleotide
ccgagaagaacaagctacagtgatcaggca

SEQ ID NO: 17300 - DNA, 30 bp, Artificial Sequence
  Synthetic oligonucleotide
cgaagatgggaatccgagcagatggaggca

SEQ ID NO: 17301 - DNA, 30 bp, Artificial Sequence
  Synthetic oligonucleotide
tcctaccgtcgaacgaagaaaatagcggca

SEQ ID NO: 17302 - DNA, 30 bp, Artificial Sequence
  Synthetic oligonucleotide
ctgactgcaataaaatatcaccgtgcggca

SEQ ID NO: 17303 - DNA, 30 bp, Artificial Sequence
  Synthetic oligonucleotide
agaagtgtgtgcacgatcgggataggggca

SEQ ID NO: 17304 - DNA, 30 bp, Artificial Sequence
  Synthetic oligonucleotide
agttggcccgaaacagagaaagtctgggca

SEQ ID NO: 17305 - DNA, 30 bp, Artificial Sequence
  Synthetic oligonucleotide
agctggaaggggaacacaatttaaatggca

SEQ ID NO: 17306 - DNA, 30 bp, Artificial Sequence
  Synthetic oligonucleotide
gggggcctagcgcagaagaagatttgtgca

SEQ ID NO: 17307 - DNA, 30 bp, Artificial Sequence
  Synthetic oligonucleotide
tagggaagctgaaatgaaaagccaagatca

SEQ ID NO: 17308 - DNA, 30 bp, Artificial Sequence
  Synthetic oligonucleotide
acgtgtattgtatacatatcgagtgcctca

SEQ ID NO: 17309 - DNA, 30 bp, Artificial Sequence
  Synthetic oligonucleotide
cagggaggtaacgagagagtgggcggctca

SEQ ID NO: 17310 - DNA, 30 bp, Artificial Sequence
  Synthetic oligonucleotide
ggctcacaaaagatgtgtcgccgaatctca

SEQ ID NO: 17311 - DNA, 30 bp, Artificial Sequence
  Synthetic oligonucleotide
cgaaattcacccggaaaatcactaccgtca

SEQ ID NO: 17312 - DNA, 30 bp, Artificial Sequence
  Synthetic oligonucleotide
tagcgcgtacagaagcggtgggacaggtca

SEQ ID NO: 17313 - DNA, 30 bp, Artificial Sequence
  Synthetic oligonucleotide
gcggaatcagcgggacggatgaccatgtca

SEQ ID NO: 17314 - DNA, 30 bp, Artificial Sequence
  Synthetic oligonucleotide
tggtgtacacaatggaataaggcagtgtca

SEQ ID NO: 17315 - DNA, 30 bp, Artificial Sequence
  Synthetic oligonucleotide
atgggaagggaaaggatagacgacatttca

SEQ ID NO: 17316 - DNA, 30 bp, Artificial Sequence
  Synthetic oligonucleotide
gcaaacaggaatttcggggtagggcaaaga

SEQ ID NO: 17317 - DNA, 30 bp, Artificial Sequence
  Synthetic oligonucleotide
ctgagcggtagaggttacagaagcgaaaga

SEQ ID NO: 17318 - DNA, 30 bp, Artificial Sequence
  Synthetic oligonucleotide
gaaggtcaggaatggttagtaaggtcaaga

SEQ ID NO: 17319 - DNA, 30 bp, Artificial Sequence
  Synthetic oligonucleotide
cgatagtgggaacgtcttgctaatagaaga

SEQ ID NO: 17320 - DNA, 30 bp, Artificial Sequence
  Synthetic oligonucleotide
ggaaacaaagagctatgatctaaccgaaga

SEQ ID NO: 17321 - DNA, 30 bp, Artificial Sequence
  Synthetic oligonucleotide
acctgactcattacaaaaagaatggtaaga

SEQ ID NO: 17322 - DNA, 30 bp, Artificial Sequence
  Synthetic oligonucleotide
aagagtaacccataaggaaggaagttaaga

SEQ ID NO: 17323 - DNA, 30 bp, Artificial Sequence
  Synthetic oligonucleotide
ggtaaactgggtcatcaaacctaaaacaga

SEQ ID NO: 17324 - DNA, 30 bp, Artificial Sequence
  Synthetic oligonucleotide
cgcgcaattgagctaagcattgtgaacaga

SEQ ID NO: 17325 - DNA, 30 bp, Artificial Sequence
  Synthetic oligonucleotide
cggaccgtattcgaataagaggtccacaga

SEQ ID NO: 17326 - DNA, 30 bp, Artificial Sequence
  Synthetic oligonucleotide
catggatgggaatggtcgtagaagcacaga

SEQ ID NO: 17327 - DNA, 30 bp, Artificial Sequence
  Synthetic oligonucleotide
aggtctgcaagcctgcatgaagctcacaga

SEQ ID NO: 17328 - DNA, 30 bp, Artificial Sequence
  Synthetic oligonucleotide
tggaggcaaacgtggcgtgttacagacaga

SEQ ID NO: 17329 - DNA, 30 bp, Artificial Sequence
  Synthetic oligonucleotide
gtagtcaaggttcaaaaaagcgacaccaga

SEQ ID NO: 17330 - DNA, 30 bp, Artificial Sequence
  Synthetic oligonucleotide
cggatatccaacatacaaaggaataccaga

SEQ ID NO: 17331 - DNA, 30 bp, Artificial Sequence
  Synthetic oligonucleotide
aggtcacgaattggtcaccggaacggcaga

SEQ ID NO: 17332 - DNA, 30 bp, Artificial Sequence
  Synthetic oligonucleotide
taacatcgcgaagttacggggggcggcaga

SEQ ID NO: 17333 - DNA, 30 bp, Artificial Sequence
  Synthetic oligonucleotide
agaacccacgtgagcgagagagggggcaga

SEQ ID NO: 17334 - DNA, 30 bp, Artificial Sequence
  Synthetic oligonucleotide
aacagcagacgcatgtccttagcccagaga

SEQ ID NO: 17335 - DNA, 30 bp, Artificial Sequence
  Synthetic oligonucleotide
gacatcccaagaagggaatcggccgagaga

SEQ ID NO: 17336 - DNA, 30 bp, Artificial Sequence
  Synthetic oligonucleotide
ttggataggaggctagtaagcgaaacgaga

SEQ ID NO: 17337 - DNA, 30 bp, Artificial Sequence
  Synthetic oligonucleotide
atggactcacaataccgaatgaaagggaga

SEQ ID NO: 17338 - DNA, 30 bp, Artificial Sequence
  Synthetic oligonucleotide
acgatagaacgggacggggatacggctaga

SEQ ID NO: 17339 - DNA, 30 bp, Artificial Sequence
  Synthetic oligonucleotide
atcggactaggtaacccggaccgcgaacga

SEQ ID NO: 17340 - DNA, 30 bp, Artificial Sequence
  Synthetic oligonucleotide
taagaactgagccgacgtaaagttgaacga

SEQ ID NO: 17341 - DNA, 30 bp, Artificial Sequence
  Synthetic oligonucleotide
ccgggtacacgccaaatagaagggtcacga

SEQ ID NO: 17342 - DNA, 31 bp, Artificial Sequence
  Synthetic oligonucleotide
gccgaatgcgagacatgccagaacccgacga

SEQ ID NO: 17343 - DNA, 30 bp, Artificial Sequence
  Synthetic oligonucleotide
acacacgtagaatagaagtgggctcgccga

SEQ ID NO: 17344 - DNA, 30 bp, Artificial Sequence
  Synthetic oligonucleotide
agaggccaactataataaagcttgaagcga

SEQ ID NO: 17345 - DNA, 30 bp, Artificial Sequence
  Synthetic oligonucleotide
taaggctgggtagacaaggtccactagcga

SEQ ID NO: 17346 - DNA, 30 bp, Artificial Sequence
  Synthetic oligonucleotide
aactcgaacttagactaagagcgaaggcga

SEQ ID NO: 17347 - DNA, 30 bp, Artificial Sequence
  Synthetic oligonucleotide
aggcggaggtgacatgggattttcgtgcga

SEQ ID NO: 17348 - DNA, 30 bp, Artificial Sequence
  Synthetic oligonucleotide
gttggcgcggtacatgaaaaatagaatcga

SEQ ID NO: 17349 - DNA, 30 bp, Artificial Sequence
  Synthetic oligonucleotide
cgtcacaataggggtgtacagtgcactcga

SEQ ID NO: 17350 - DNA, 30 bp, Artificial Sequence
  Synthetic oligonucleotide
aagccccacccagacaccaaaggagctcga

SEQ ID NO: 17351 - DNA, 30 bp, Artificial Sequence
  Synthetic oligonucleotide
cgcacacaacggttggggagagtcgctcga

SEQ ID NO: 17352 - DNA, 30 bp, Artificial Sequence
  Synthetic oligonucleotide
tggttcagaccggaaacaagggagtgtcga

SEQ ID NO: 17353 - DNA, 30 bp, Artificial Sequence
  Synthetic oligonucleotide
cacaaatgagaaattcgttctactaaagga

SEQ ID NO: 17354 - DNA, 30 bp, Artificial Sequence
  Synthetic oligonucleotide
cataatgaagtagaaaggtaggaagaagga

SEQ ID NO: 17355 - DNA, 30 bp, Artificial Sequence
  Synthetic oligonucleotide
agaagggcctaagggggcgccccgtaagga

SEQ ID NO: 17356 - DNA, 30 bp, Artificial Sequence
  Synthetic oligonucleotide
ttcaggtacgggagagtatgcagtagagga

SEQ ID NO: 17357 - DNA, 30 bp, Artificial Sequence
  Synthetic oligonucleotide
agcagggcgaaggtgctattctgcttagga

SEQ ID NO: 17358 - DNA, 30 bp, Artificial Sequence
  Synthetic oligonucleotide
cgcaaaatagggcggcatacggtctacgga

SEQ ID NO: 17359 - DNA, 30 bp, Artificial Sequence
  Synthetic oligonucleotide
cataataaagaagaatgtggaatgaaggga

SEQ ID NO: 17360 - DNA, 30 bp, Artificial Sequence
  Synthetic oligonucleotide
cagagactgtgacaaaattcgtctgcggga

SEQ ID NO: 17361 - DNA, 30 bp, Artificial Sequence
  Synthetic oligonucleotide
attgaagacaccagagcgcctgaccatgga

SEQ ID NO: 17362 - DNA, 30 bp, Artificial Sequence
  Synthetic oligonucleotide
agtacgaccccatgataggtgggaactgga

SEQ ID NO: 17363 - DNA, 30 bp, Artificial Sequence
  Synthetic oligonucleotide
tcgtatcgaagtgatcatgaagcgggtgga

SEQ ID NO: 17364 - DNA, 30 bp, Artificial Sequence
  Synthetic oligonucleotide
ggaggcgataatcgaaagatctgacaatga

SEQ ID NO: 17365 - DNA, 30 bp, Artificial Sequence
  Synthetic oligonucleotide
acacacacaattacatggcaggccgaatga

SEQ ID NO: 17366 - DNA, 30 bp, Artificial Sequence
  Synthetic oligonucleotide
aacacgagtcgcagaagtcccaactgatga

SEQ ID NO: 17367 - DNA, 30 bp, Artificial Sequence
  Synthetic oligonucleotide
aacaaaccaataaacaagcctacgtgctga

SEQ ID NO: 17368 - DNA, 30 bp, Artificial Sequence
  Synthetic oligonucleotide
acgaggccacgcatagagataatggtgtga

SEQ ID NO: 17369 - DNA, 30 bp, Artificial Sequence
  Synthetic oligonucleotide
gctacaagaacaatctagaacgagacaata

SEQ ID NO: 17370 - DNA, 30 bp, Artificial Sequence
  Synthetic oligonucleotide
acgagacataagatctacggagctggaata

SEQ ID NO: 17371 - DNA, 30 bp, Artificial Sequence
  Synthetic oligonucleotide
agagatcagggtggtggtaaccggaacata

SEQ ID NO: 17372 - DNA, 30 bp, Artificial Sequence
  Synthetic oligonucleotide
tggtgaggcgatccaccggcaaaagtcata

SEQ ID NO: 17373 - DNA, 30 bp, Artificial Sequence
  Synthetic oligonucleotide
gcgtttgcgaaggctaagaggaaagcgata

SEQ ID NO: 17374 - DNA, 31 bp, Artificial Sequence
  Synthetic oligonucleotide
caccaacgggaagagtgcatatggagtgata

SEQ ID NO: 17375 - DNA, 30 bp, Artificial Sequence
  Synthetic oligonucleotide
ggggacttagacggctgtggaagcaaacta

SEQ ID NO: 17376 - DNA, 30 bp, Artificial Sequence
  Synthetic oligonucleotide
agtaccgagccagaatagggggaacaacta

SEQ ID NO: 17377 - DNA, 30 bp, Artificial Sequence
  Synthetic oligonucleotide
ggggcaaaatgaccacaggaaagggaacta

SEQ ID NO: 17378 - DNA, 30 bp, Artificial Sequence
  Synthetic oligonucleotide
gttaaagtaataccacgacagaggacacta

SEQ ID NO: 17379 - DNA, 30 bp, Artificial Sequence
  Synthetic oligonucleotide
ggagggtcgaagacgtcctaaacaggacta

SEQ ID NO: 17380 - DNA, 30 bp, Artificial Sequence
  Synthetic oligonucleotide
aggtatacagagaccgcgggagagagccta

SEQ ID NO: 17381 - DNA, 30 bp, Artificial Sequence
  Synthetic oligonucleotide
aggcgtcgaaatgcgacaatcagtcatcta

SEQ ID NO: 17382 - DNA, 30 bp, Artificial Sequence
  Synthetic oligonucleotide
cccatcatcagcaagagagcgcagtaagta

SEQ ID NO: 17383 - DNA, 30 bp, Artificial Sequence
  Synthetic oligonucleotide
tctgcgtacgaaagaagatatatgccagta

SEQ ID NO: 17384 - DNA, 30 bp, Artificial Sequence
  Synthetic oligonucleotide
cttaatgggggatgagagtaaaagagagta

SEQ ID NO: 17385 - DNA, 30 bp, Artificial Sequence
  Synthetic oligonucleotide
tgagcgttaaaaggcaatgtcccacgagta

SEQ ID NO: 17386 - DNA, 30 bp, Artificial Sequence
  Synthetic oligonucleotide
taagtaaaagcgtgactaggcgaattagta

SEQ ID NO: 17387 - DNA, 30 bp, Artificial Sequence
  Synthetic oligonucleotide
aagggcagacataaagatgaacgatacgta

SEQ ID NO: 17388 - DNA, 30 bp, Artificial Sequence
  Synthetic oligonucleotide
aatgagggtgaaaacacagagaacaccgta

SEQ ID NO: 17389 - DNA, 30 bp, Artificial Sequence
  Synthetic oligonucleotide
acgatatgggacaaattggtaaggaccgta

SEQ ID NO: 17390 - DNA, 30 bp, Artificial Sequence
  Synthetic oligonucleotide
tgagagcaacgattcgcatggtaggccgta

SEQ ID NO: 17391 - DNA, 30 bp, Artificial Sequence
  Synthetic oligonucleotide
cgaacgactacatcgagtaagacaggcgta

SEQ ID NO: 17392 - DNA, 30 bp, Artificial Sequence
  Synthetic oligonucleotide
tgagcgggggcgactatgcacgtgggtgta

SEQ ID NO: 17393 - DNA, 30 bp, Artificial Sequence
  Synthetic oligonucleotide
aggtcgccgtcgggaaggtcgtactcatta

SEQ ID NO: 17394 - DNA, 30 bp, Artificial Sequence
  Synthetic oligonucleotide
gcgtgcgcaccaaatgaaagcaggagatta

SEQ ID NO: 17395 - DNA, 30 bp, Artificial Sequence
  Synthetic oligonucleotide
gctaagacagaaagcagaagaatggtatta

SEQ ID NO: 17396 - DNA, 30 bp, Artificial Sequence
  Synthetic oligonucleotide
gcgccacgatacagtgatgaaggtaagtta

SEQ ID NO: 17397 - DNA, 30 bp, Artificial Sequence
  Synthetic oligonucleotide
cgtgcaaggaggcgataagttctcaggtta

SEQ ID NO: 17398 - DNA, 30 bp, Artificial Sequence
  Synthetic oligonucleotide
agcgaagctgggcgccctaaagcgaattta

SEQ ID NO: 17399 - DNA, 30 bp, Artificial Sequence
  Synthetic oligonucleotide
cgagtcgcgtgtctgtagcaagggacaaac

SEQ ID NO: 17400 - DNA, 30 bp, Artificial Sequence
  Synthetic oligonucleotide
cgtcgaggtgggggatctataatggcaaac

SEQ ID NO: 17401 - DNA, 30 bp, Artificial Sequence
  Synthetic oligonucleotide
agccagctgggaaaaaatcgcacctgaaac

SEQ ID NO: 17402 - DNA, 30 bp, Artificial Sequence
  Synthetic oligonucleotide
gcaccaagccaccacgaagaaaactacaac

SEQ ID NO: 17403 - DNA, 30 bp, Artificial Sequence
  Synthetic oligonucleotide
gaagatgtggattaggcggtaatgatcaac

SEQ ID NO: 17404 - DNA, 30 bp, Artificial Sequence
  Synthetic oligonucleotide
cggtcggcgaacgaagctaaacacccgaac

SEQ ID NO: 17405 - DNA, 30 bp, Artificial Sequence
  Synthetic oligonucleotide
aatcgaccacgtagagggcgggaagggaac

SEQ ID NO: 17406 - DNA, 30 bp, Artificial Sequence
  Synthetic oligonucleotide
acggatacccgacacgaatatgccagtaac

SEQ ID NO: 17407 - DNA, 30 bp, Artificial Sequence
  Synthetic oligonucleotide
tcctagtcgaagaaaggaacaataggacac

SEQ ID NO: 17408 - DNA, 30 bp, Artificial Sequence
  Synthetic oligonucleotide
gtgcagacaagggttgattggagtaagcac

SEQ ID NO: 17409 - DNA, 30 bp, Artificial Sequence
  Synthetic oligonucleotide
ggccacaagagagcgactatacggcggcac

SEQ ID NO: 17410 - DNA, 30 bp, Artificial Sequence
  Synthetic oligonucleotide
taagggcaaacttcaaaagagtactaagac

SEQ ID NO: 17411 - DNA, 30 bp, Artificial Sequence
  Synthetic oligonucleotide
gtgtgtgagaaaatgacagggggcccagac

SEQ ID NO: 17412 - DNA, 30 bp, Artificial Sequence
  Synthetic oligonucleotide
tgccaccacgactaaaggctagcgagagac

SEQ ID NO: 17413 - DNA, 30 bp, Artificial Sequence
  Synthetic oligonucleotide
ataacgaagtacgggaaatgtaacatagac

SEQ ID NO: 17414 - DNA, 30 bp, Artificial Sequence
  Synthetic oligonucleotide
ggggagcggacgagtatcaatgcattagac

SEQ ID NO: 17415 - DNA, 30 bp, Artificial Sequence
  Synthetic oligonucleotide
gaccgaagcactgggagacgggaatacgac

SEQ ID NO: 17416 - DNA, 30 bp, Artificial Sequence
  Synthetic oligonucleotide
agagagataagcgtgcccaccatcgtcgac

SEQ ID NO: 17417 - DNA, 30 bp, Artificial Sequence
  Synthetic oligonucleotide
accggactatatggaactagaccaacggac

SEQ ID NO: 17418 - DNA, 30 bp, Artificial Sequence
  Synthetic oligonucleotide
gccgaggtcaaataattcctaaaagcggac

SEQ ID NO: 17419 - DNA, 30 bp, Artificial Sequence
  Synthetic oligonucleotide
gggatgttagcggaaggtcaaacgttggac

SEQ ID NO: 17420 - DNA, 30 bp, Artificial Sequence
  Synthetic oligonucleotide
agagcgagcgcgtaactagggttagatgac

SEQ ID NO: 17421 - DNA, 30 bp, Artificial Sequence
  Synthetic oligonucleotide
tggcacgaaggacccagtcccgccagtgac

SEQ ID NO: 17422 - DNA, 30 bp, Artificial Sequence
  Synthetic oligonucleotide
ggaccctcaagagccgaacttcaccgtgac

SEQ ID NO: 17423 - DNA, 30 bp, Artificial Sequence
  Synthetic oligonucleotide
cgagagggactgtgagctagtcactaatac

SEQ ID NO: 17424 - DNA, 30 bp, Artificial Sequence
  Synthetic oligonucleotide
caccgacttgcacgaaaccaacatcgatac

SEQ ID NO: 17425 - DNA, 30 bp, Artificial Sequence
  Synthetic oligonucleotide
aggggagccaacaatgtccaaccgttctac

SEQ ID NO: 17426 - DNA, 30 bp, Artificial Sequence
  Synthetic oligonucleotide
gtcgtgtatgaagagtgcatgaatgcgtac

SEQ ID NO: 17427 - DNA, 30 bp, Artificial Sequence
  Synthetic oligonucleotide
gcggcgagaagagaagtcagcatgatgtac

SEQ ID NO: 17428 - DNA, 30 bp, Artificial Sequence
  Synthetic oligonucleotide
aggcaatataaagccaaagcgcggcagacc

SEQ ID NO: 17429 - DNA, 30 bp, Artificial Sequence
  Synthetic oligonucleotide
ggtaggaacaaagggaaagagcgagttacc

SEQ ID NO: 17430 - DNA, 30 bp, Artificial Sequence
  Synthetic oligonucleotide
agggctaacgagaactaaaaaatggttacc

SEQ ID NO: 17431 - DNA, 30 bp, Artificial Sequence
  Synthetic oligonucleotide
acgaagtgatgtgagtcagaccagtaaccc

SEQ ID NO: 17432 - DNA, 30 bp, Artificial Sequence
  Synthetic oligonucleotide
tacacacgggaaagaacgcgagttgtgccc

SEQ ID NO: 17433 - DNA, 30 bp, Artificial Sequence
  Synthetic oligonucleotide
aggcacatccaagaattagtggtagctccc

SEQ ID NO: 17434 - DNA, 30 bp, Artificial Sequence
  Synthetic oligonucleotide
cagatagagtcgccctggcaaaaacacgcc

SEQ ID NO: 17435 - DNA, 30 bp, Artificial Sequence
  Synthetic oligonucleotide
tcgacgatacaaatgagtgtgactagggcc

SEQ ID NO: 17436 - DNA, 30 bp, Artificial Sequence
  Synthetic oligonucleotide
agacacaacgaagtgtgagtcccgctgtcc

SEQ ID NO: 17437 - DNA, 30 bp, Artificial Sequence
  Synthetic oligonucleotide
ccaagaagggtacagcaaacacacgcaagc

SEQ ID NO: 17438 - DNA, 30 bp, Artificial Sequence
  Synthetic oligonucleotide
agtagggattggggcccagagaggtgaagc

SEQ ID NO: 17439 - DNA, 30 bp, Artificial Sequence
  Synthetic oligonucleotide
tatgcagattgagaggtaaaaagagagagc

SEQ ID NO: 17440 - DNA, 30 bp, Artificial Sequence
  Synthetic oligonucleotide
taagagagggtagtacaactgtaaatgagc

SEQ ID NO: 17441 - DNA, 30 bp, Artificial Sequence
  Synthetic oligonucleotide
aacggggtcgtgagttatagagggttgagc

SEQ ID NO: 17442 - DNA, 30 bp, Artificial Sequence
  Synthetic oligonucleotide
agacccggacacaacgctgtaaggagtagc

SEQ ID NO: 17443 - DNA, 30 bp, Artificial Sequence
  Synthetic oligonucleotide
caacaaattcaactaaaggtagggactcgc

SEQ ID NO: 17444 - DNA, 30 bp, Artificial Sequence
  Synthetic oligonucleotide
aggaggtaacgatatcggcggggggctcgc

SEQ ID NO: 17445 - DNA, 30 bp, Artificial Sequence
  Synthetic oligonucleotide
agggaaaagcaataagaagcatagggaggc

SEQ ID NO: 17446 - DNA, 30 bp, Artificial Sequence
  Synthetic oligonucleotide
cacaggcgggattgccgatgagcactaggc

SEQ ID NO: 17447 - DNA, 30 bp, Artificial Sequence
  Synthetic oligonucleotide
ctgggaaatacgacacgaaattaagtcggc

SEQ ID NO: 17448 - DNA, 30 bp, Artificial Sequence
  Synthetic oligonucleotide
gatgagcgtatcgaggaaaagacaaagggc

SEQ ID NO: 17449 - DNA, 30 bp, Artificial Sequence
  Synthetic oligonucleotide
gaggaaataaaacaagcttgccagctgggc

SEQ ID NO: 17450 - DNA, 30 bp, Artificial Sequence
  Synthetic oligonucleotide
aacgaaggtggaaattcagctgccttgggc

SEQ ID NO: 17451 - DNA, 30 bp, Artificial Sequence
  Synthetic oligonucleotide
taaaggcaagggaagaattactcgaaatgc

SEQ ID NO: 17452 - DNA, 30 bp, Artificial Sequence
  Synthetic oligonucleotide
gtcgtgaaatgagaaaaggaatcagaatgc

SEQ ID NO: 17453 - DNA, 30 bp, Artificial Sequence
  Synthetic oligonucleotide
catcatgcgagcgagaacagaagggtatgc

SEQ ID NO: 17454 - DNA, 30 bp, Artificial Sequence
  Synthetic oligonucleotide
aaggctagaactaggataaaagaaaattgc

SEQ ID NO: 17455 - DNA, 30 bp, Artificial Sequence
  Synthetic oligonucleotide
cctcacgttacacttgaatcgaagagttgc

SEQ ID NO: 17456 - DNA, 30 bp, Artificial Sequence
  Synthetic oligonucleotide
aagggcgagaacgtcagacaacgggcgatc

SEQ ID NO: 17457 - DNA, 30 bp, Artificial Sequence
  Synthetic oligonucleotide
catcaaagaatggcagaacaagaacaactc

SEQ ID NO: 17458 - DNA, 30 bp, Artificial Sequence
  Synthetic oligonucleotide
ccacgaggcttcgataagacaacataactc

SEQ ID NO: 17459 - DNA, 30 bp, Artificial Sequence
  Synthetic oligonucleotide
ccatacaggctctcaaggagaagatagctc

SEQ ID NO: 17460 - DNA, 30 bp, Artificial Sequence
  Synthetic oligonucleotide
ggctcgagtgctaacgtcccgaattggctc

SEQ ID NO: 17461 - DNA, 30 bp, Artificial Sequence
  Synthetic oligonucleotide
gcgaagcctgcagaggtcctgagtaaagtc

SEQ ID NO: 17462 - DNA, 30 bp, Artificial Sequence
  Synthetic oligonucleotide
ctacgcaagcacagatagaagaccgaagtc

SEQ ID NO: 17463 - DNA, 30 bp, Artificial Sequence
  Synthetic oligonucleotide
cgtcactcaacgggaaatattcggtaagtc

SEQ ID NO: 17464 - DNA, 30 bp, Artificial Sequence
  Synthetic oligonucleotide
acgaggacagaggagttccacccattagtc

SEQ ID NO: 17465 - DNA, 30 bp, Artificial Sequence
  Synthetic oligonucleotide
agactaacggtacaaggctgggtacccgtc

SEQ ID NO: 17466 - DNA, 30 bp, Artificial Sequence
  Synthetic oligonucleotide
aaccggagggcacgcaaagctatctgcgtc

SEQ ID NO: 17467 - DNA, 30 bp, Artificial Sequence
  Synthetic oligonucleotide
caagaggtaagaaccattcgatcgtaaaag

SEQ ID NO: 17468 - DNA, 30 bp, Artificial Sequence
  Synthetic oligonucleotide
atcgagcggtcagaggaaatgtaaacaaag

SEQ ID NO: 17469 - DNA, 30 bp, Artificial Sequence
  Synthetic oligonucleotide
acgttgggagttcggcgccaagaaccaaag

SEQ ID NO: 17470 - DNA, 30 bp, Artificial Sequence
  Synthetic oligonucleotide
tgagccgagaagctgcaagatctcgcaaag

SEQ ID NO: 17471 - DNA, 30 bp, Artificial Sequence
  Synthetic oligonucleotide
tacaaggagcaagtgcggtatgtgtcaaag

SEQ ID NO: 17472 - DNA, 30 bp, Artificial Sequence
  Synthetic oligonucleotide
cgaatcacctgtatacaaaggaaaagaaag

SEQ ID NO: 17473 - DNA, 30 bp, Artificial Sequence
  Synthetic oligonucleotide
cgcgtcactccagacgaggttgggcgaaag

SEQ ID NO: 17474 - DNA, 30 bp, Artificial Sequence
  Synthetic oligonucleotide
acggcgattcacctttggattgaagtaaag

SEQ ID NO: 17475 - DNA, 30 bp, Artificial Sequence
  Synthetic oligonucleotide
cctcgaatgaacccaggaataagtcacaag

SEQ ID NO: 17476 - DNA, 30 bp, Artificial Sequence
  Synthetic oligonucleotide
accaaactcgcacagaatgttaccgccaag

SEQ ID NO: 17477 - DNA, 30 bp, Artificial Sequence
  Synthetic oligonucleotide
ttacgtaaggggggccgaatggcaacgaag

SEQ ID NO: 17478 - DNA, 30 bp, Artificial Sequence
  Synthetic oligonucleotide
gtgataactaacaggatgtgccaaccgaag

SEQ ID NO: 17479 - DNA, 30 bp, Artificial Sequence
  Synthetic oligonucleotide
aggcatcaacaaaaggaagcggagccgaag

SEQ ID NO: 17480 - DNA, 30 bp, Artificial Sequence
  Synthetic oligonucleotide
aggccgtcctcgggatgataaccgtcgaag

SEQ ID NO: 17481 - DNA, 30 bp, Artificial Sequence
  Synthetic oligonucleotide
aggctacatactgctacctattgagggaag

SEQ ID NO: 17482 - DNA, 30 bp, Artificial Sequence
  Synthetic oligonucleotide
cgatgtgagagccaaccatgggcatggaag

SEQ ID NO: 17483 - DNA, 30 bp, Artificial Sequence
  Synthetic oligonucleotide
agcgagagaatgcataattaagcttggaag

SEQ ID NO: 17484 - DNA, 30 bp, Artificial Sequence
  Synthetic oligonucleotide
ggccagttaggaaataggaacgcaaataag

SEQ ID NO: 17485 - DNA, 30 bp, Artificial Sequence
  Synthetic oligonucleotide
gcttacgaccataggaataagcgtaataag

SEQ ID NO: 17486 - DNA, 30 bp, Artificial Sequence
  Synthetic oligonucleotide
agtaacaacgtaaatagccagacaactaag

SEQ ID NO: 17487 - DNA, 30 bp, Artificial Sequence
  Synthetic oligonucleotide
agacaccgggcaaacaaggtccgtcctaag

SEQ ID NO: 17488 - DNA, 29 bp, Artificial Sequence
  Synthetic oligonucleotide
tgaacagggttggagcagaaaaatctaag

SEQ ID NO: 17489 - DNA, 30 bp, Artificial Sequence
  Synthetic oligonucleotide
tgatccaagtcaaatgggccaagagaacag

SEQ ID NO: 17490 - DNA, 31 bp, Artificial Sequence
  Synthetic oligonucleotide
cagagggaaatgacattacgtgagggaacag

SEQ ID NO: 17491 - DNA, 30 bp, Artificial Sequence
  Synthetic oligonucleotide
acagcatggtccaaacgggtcaagtaacag

SEQ ID NO: 17492 - DNA, 30 bp, Artificial Sequence
  Synthetic oligonucleotide
aacgggaaaataggaccttgaggacgacag

SEQ ID NO: 17493 - DNA, 30 bp, Artificial Sequence
  Synthetic oligonucleotide
tacggggttaaagccgatagactaggacag

SEQ ID NO: 17494 - DNA, 30 bp, Artificial Sequence
  Synthetic oligonucleotide
ggggctgcgagcagtataattaacggacag

SEQ ID NO: 17495 - DNA, 30 bp, Artificial Sequence
  Synthetic oligonucleotide
gcagggatgacgccaaataagatcatacag

SEQ ID NO: 17496 - DNA, 30 bp, Artificial Sequence
  Synthetic oligonucleotide
aagggcaactgggtcaagtatgatctacag

SEQ ID NO: 17497 - DNA, 30 bp, Artificial Sequence
  Synthetic oligonucleotide
cgtgaagataagataaactgctcgccccag

SEQ ID NO: 17498 - DNA, 30 bp, Artificial Sequence
  Synthetic oligonucleotide
gtaaacatgtaaaaatatcgtcaatgccag

SEQ ID NO: 17499 - DNA, 30 bp, Artificial Sequence
  Synthetic oligonucleotide
tgtgcgaggcgactaattgatgtgaagcag

SEQ ID NO: 17500 - DNA, 30 bp, Artificial Sequence
  Synthetic oligonucleotide
agggatgacggcggacatcggactaagcag

SEQ ID NO: 17501 - DNA, 30 bp, Artificial Sequence
  Synthetic oligonucleotide
cactgacaccagagaaacgttcaaacgcag

SEQ ID NO: 17502 - DNA, 30 bp, Artificial Sequence
  Synthetic oligonucleotide
gcgatcccgtgtaaaaaggatgctcggcag

SEQ ID NO: 17503 - DNA, 30 bp, Artificial Sequence
  Synthetic oligonucleotide
gaaagcagtgaaggaaacacgagcgtgcag

SEQ ID NO: 17504 - DNA, 30 bp, Artificial Sequence
  Synthetic oligonucleotide
tggtgagcgaaacagttatctccacctcag

SEQ ID NO: 17505 - DNA, 30 bp, Artificial Sequence
  Synthetic oligonucleotide
aggctaagggtaacgtactgaacatgtcag

SEQ ID NO: 17506 - DNA, 30 bp, Artificial Sequence
  Synthetic oligonucleotide
gaggcaagtggatcaatgtcaagcattcag

SEQ ID NO: 17507 - DNA, 30 bp, Artificial Sequence
  Synthetic oligonucleotide
acgggcagaacaatcgaagctgcataagag

SEQ ID NO: 17508 - DNA, 30 bp, Artificial Sequence
  Synthetic oligonucleotide
aacgacacatacctaccaccccgcacagag

SEQ ID NO: 17509 - DNA, 30 bp, Artificial Sequence
  Synthetic oligonucleotide
tggaggttcaacgcccgccaaagccgagag

SEQ ID NO: 17510 - DNA, 30 bp, Artificial Sequence
  Synthetic oligonucleotide
accgttcgctccagcgcagatgcaatagag

SEQ ID NO: 17511 - DNA, 30 bp, Artificial Sequence
  Synthetic oligonucleotide
acatggtgtattcatgcgaggtaacacgag

SEQ ID NO: 17512 - DNA, 30 bp, Artificial Sequence
  Synthetic oligonucleotide
agtgcttcaaaataaagcgatatcaccgag

SEQ ID NO: 17513 - DNA, 30 bp, Artificial Sequence
  Synthetic oligonucleotide
cactggatcgaaccagggtacccacccgag

SEQ ID NO: 17514 - DNA, 30 bp, Artificial Sequence
  Synthetic oligonucleotide
agggtacgattgtgaaagcagaggcccgag

SEQ ID NO: 17515 - DNA, 30 bp, Artificial Sequence
  Synthetic oligonucleotide
agtcaaaaggaactgcgcgtactagccgag

SEQ ID NO: 17516 - DNA, 30 bp, Artificial Sequence
  Synthetic oligonucleotide
cgctacatacattgcgtaccacgaagcgag

SEQ ID NO: 17517 - DNA, 30 bp, Artificial Sequence
  Synthetic oligonucleotide
tgcgtcagcggacaaagtgaattgcgcgag

SEQ ID NO: 17518 - DNA, 30 bp, Artificial Sequence
  Synthetic oligonucleotide
tggtgccatagggcgataggtagaggcgag

SEQ ID NO: 17519 - DNA, 30 bp, Artificial Sequence
  Synthetic oligonucleotide
aacggcataaatcgaataccttggggcgag

SEQ ID NO: 17520 - DNA, 30 bp, Artificial Sequence
  Synthetic oligonucleotide
caacagcgctaacaaagagcatatggcgag

SEQ ID NO: 17521 - DNA, 30 bp, Artificial Sequence
  Synthetic oligonucleotide
gcatccacacaggtgaatgtgcgaatcgag

SEQ ID NO: 17522 - DNA, 30 bp, Artificial Sequence
  Synthetic oligonucleotide
caatcaccaaagcggggagactgaatcgag

SEQ ID NO: 17523 - DNA, 30 bp, Artificial Sequence
  Synthetic oligonucleotide
tgtacagcagaaaattacactatcaaggag

SEQ ID NO: 17524 - DNA, 30 bp, Artificial Sequence
  Synthetic oligonucleotide
gtatgaagttcgatgccgatccaacaggag

SEQ ID NO: 17525 - DNA, 30 bp, Artificial Sequence
  Synthetic oligonucleotide
agggccttgtgtgctatatgaggcgaggag

SEQ ID NO: 17526 - DNA, 30 bp, Artificial Sequence
  Synthetic oligonucleotide
cgctaaattttgcggagaaatggtacggag

SEQ ID NO: 17527 - DNA, 30 bp, Artificial Sequence
  Synthetic oligonucleotide
caaggcacgcagttccaaatactcgcggag

SEQ ID NO: 17528 - DNA, 30 bp, Artificial Sequence
  Synthetic oligonucleotide
gtcatgctgtagataaactggaggtcggag

SEQ ID NO: 17529 - DNA, 30 bp, Artificial Sequence
  Synthetic oligonucleotide
catcacagcgtacagaaaggaggtcatgag

SEQ ID NO: 17530 - DNA, 30 bp, Artificial Sequence
  Synthetic oligonucleotide
agaccatgtcaacgaggcaggccatatgag

SEQ ID NO: 17531 - DNA, 30 bp, Artificial Sequence
  Synthetic oligonucleotide
agtgcaggacacgtgtagataagataatag

SEQ ID NO: 17532 - DNA, 30 bp, Artificial Sequence
  Synthetic oligonucleotide
acagtgaacaataaagccctcaacagatag

SEQ ID NO: 17533 - DNA, 30 bp, Artificial Sequence
  Synthetic oligonucleotide
taaccgcggggtaagtaggagaacggatag

SEQ ID NO: 17534 - DNA, 30 bp, Artificial Sequence
  Synthetic oligonucleotide
acaccgtcaacactactaaaatcggtatag

SEQ ID NO: 17535 - DNA, 30 bp, Artificial Sequence
  Synthetic oligonucleotide
cggtattacccatgtggaaaggaccactag

SEQ ID NO: 17536 - DNA, 30 bp, Artificial Sequence
  Synthetic oligonucleotide
tggtagggtatggtccatcttctgcgctag

SEQ ID NO: 17537 - DNA, 30 bp, Artificial Sequence
  Synthetic oligonucleotide
ttaaaaagagaaaaaccaacctaaccgtag

SEQ ID NO: 17538 - DNA, 30 bp, Artificial Sequence
  Synthetic oligonucleotide
accgtgaatccgacatgagcgtgggattag

SEQ ID NO: 17539 - DNA, 30 bp, Artificial Sequence
  Synthetic oligonucleotide
tgcgaaggaagtcaggcaggtgatcgttag

SEQ ID NO: 17540 - DNA, 30 bp, Artificial Sequence
  Synthetic oligonucleotide
gagaaaaggtgatacaagatactaaaaacg

SEQ ID NO: 17541 - DNA, 30 bp, Artificial Sequence
  Synthetic oligonucleotide
ccggaccgcctacgaattcaaggagcaacg

SEQ ID NO: 17542 - DNA, 30 bp, Artificial Sequence
  Synthetic oligonucleotide
taatgaggcgaggatattgcgccgagaacg

SEQ ID NO: 17543 - DNA, 30 bp, Artificial Sequence
  Synthetic oligonucleotide
tggcagtctaggcacgagacacaacgaacg

SEQ ID NO: 17544 - DNA, 30 bp, Artificial Sequence
  Synthetic oligonucleotide
cgctcaacccgcctagactgggaaaacacg

SEQ ID NO: 17545 - DNA, 30 bp, Artificial Sequence
  Synthetic oligonucleotide
cgttggaggtgaaattgccccaagcagacg

SEQ ID NO: 17546 - DNA, 30 bp, Artificial Sequence
  Synthetic oligonucleotide
aagcgacagagaaataaacccgcaattacg

SEQ ID NO: 17547 - DNA, 30 bp, Artificial Sequence
  Synthetic oligonucleotide
acaacacgacaccagtcagacgagaaaccg

SEQ ID NO: 17548 - DNA, 30 bp, Artificial Sequence
  Synthetic oligonucleotide
caaaaataaccatacgatagcgtcccaccg

SEQ ID NO: 17549 - DNA, 30 bp, Artificial Sequence
  Synthetic oligonucleotide
aggggcgtcggcttcgacatgatatcaccg

SEQ ID NO: 17550 - DNA, 30 bp, Artificial Sequence
  Synthetic oligonucleotide
aatgacgaacagtgcgaacagcaaataccg

SEQ ID NO: 17551 - DNA, 30 bp, Artificial Sequence
  Synthetic oligonucleotide
agaccacgcctacgggcgacataaaatccg

SEQ ID NO: 17552 - DNA, 30 bp, Artificial Sequence
  Synthetic oligonucleotide
atcagggcacgttcgacagatccacatccg

SEQ ID NO: 17553 - DNA, 30 bp, Artificial Sequence
  Synthetic oligonucleotide
tgagcgcatagattggcaagctcgtatccg

SEQ ID NO: 17554 - DNA, 30 bp, Artificial Sequence
  Synthetic oligonucleotide
cacgcaataaatacagacaattgtccagcg

SEQ ID NO: 17555 - DNA, 30 bp, Artificial Sequence
  Synthetic oligonucleotide
agagaatgtacggatcaagaagtccgagcg

SEQ ID NO: 17556 - DNA, 30 bp, Artificial Sequence
  Synthetic oligonucleotide
caccactcacaagaaaaatataagaacgcg

SEQ ID NO: 17557 - DNA, 30 bp, Artificial Sequence
  Synthetic oligonucleotide
agacaattagctccgtaaggttagaaggcg

SEQ ID NO: 17558 - DNA, 30 bp, Artificial Sequence
  Synthetic oligonucleotide
cggacgactagcttcatcttaaaccaggcg

SEQ ID NO: 17559 - DNA, 30 bp, Artificial Sequence
  Synthetic oligonucleotide
atcgaactaaggtgagaaatagccaaatcg

SEQ ID NO: 17560 - DNA, 30 bp, Artificial Sequence
  Synthetic oligonucleotide
gtaagagggttaagaaggcacgttaaatcg

SEQ ID NO: 17561 - DNA, 30 bp, Artificial Sequence
  Synthetic oligonucleotide
tgtggagcgtggtcactgcccgaagaatcg

SEQ ID NO: 17562 - DNA, 30 bp, Artificial Sequence
  Synthetic oligonucleotide
ccggctgcaattgaagggtacggcgaatcg

SEQ ID NO: 17563 - DNA, 30 bp, Artificial Sequence
  Synthetic oligonucleotide
cggtagaaagcgctggcgacggccacatcg

SEQ ID NO: 17564 - DNA, 30 bp, Artificial Sequence
  Synthetic oligonucleotide
aagagcaagccccgtgaattaaaggcatcg

SEQ ID NO: 17565 - DNA, 30 bp, Artificial Sequence
  Synthetic oligonucleotide
cgcgtctatcgagcagggaagcaagtatcg

SEQ ID NO: 17566 - DNA, 30 bp, Artificial Sequence
  Synthetic oligonucleotide
caagcggaagtaggcgtgatcctagtatcg

SEQ ID NO: 17567 - DNA, 30 bp, Artificial Sequence
  Synthetic oligonucleotide
cagagtagggtcacgaaaacattgaactcg

SEQ ID NO: 17568 - DNA, 30 bp, Artificial Sequence
  Synthetic oligonucleotide
agcgagacgagaggaatcttgagggactcg

SEQ ID NO: 17569 - DNA, 30 bp, Artificial Sequence
  Synthetic oligonucleotide
taaggccaggcccgcgtaataccaacctcg

SEQ ID NO: 17570 - DNA, 30 bp, Artificial Sequence
  Synthetic oligonucleotide
acatgagaatggaacgctaccctccagtcg

SEQ ID NO: 17571 - DNA, 30 bp, Artificial Sequence
  Synthetic oligonucleotide
tcacggtaggcaggccatatccattagtcg

SEQ ID NO: 17572 - DNA, 30 bp, Artificial Sequence
  Synthetic oligonucleotide
ccgagcggagcgccaattagttgagtgtcg

SEQ ID NO: 17573 - DNA, 30 bp, Artificial Sequence
  Synthetic oligonucleotide
taatgaggcgtagaatatgtgagggtgtcg

SEQ ID NO: 17574 - DNA, 30 bp, Artificial Sequence
  Synthetic oligonucleotide
ttcacggagcataaaaaagtacatccttcg

SEQ ID NO: 17575 - DNA, 30 bp, Artificial Sequence
  Synthetic oligonucleotide
taagacacatagactgattaaatgtcttcg

SEQ ID NO: 17576 - DNA, 30 bp, Artificial Sequence
  Synthetic oligonucleotide
cgtcaactcagatacagggttggaagttcg

SEQ ID NO: 17577 - DNA, 30 bp, Artificial Sequence
  Synthetic oligonucleotide
aggtcatataccgagacaaccagacgttcg

SEQ ID NO: 17578 - DNA, 30 bp, Artificial Sequence
  Synthetic oligonucleotide
cggcaagggttaaggagcagtccaggttcg

SEQ ID NO: 17579 - DNA, 30 bp, Artificial Sequence
  Synthetic oligonucleotide
acgagagcgagtccgaggattccgatttcg

SEQ ID NO: 17580 - DNA, 30 bp, Artificial Sequence
  Synthetic oligonucleotide
atgacgaactgctaattggacctcaaaagg

SEQ ID NO: 17581 - DNA, 30 bp, Artificial Sequence
  Synthetic oligonucleotide
agaccactacaagttgacaagtgacccagg

SEQ ID NO: 17582 - DNA, 30 bp, Artificial Sequence
  Synthetic oligonucleotide
gtgagcactcatacttcatattgatccagg

SEQ ID NO: 17583 - DNA, 30 bp, Artificial Sequence
  Synthetic oligonucleotide
atactcccatgcacagatagagagtccagg

SEQ ID NO: 17584 - DNA, 30 bp, Artificial Sequence
  Synthetic oligonucleotide
cggaatcaagaaaaaccttaagggacgagg

SEQ ID NO: 17585 - DNA, 30 bp, Artificial Sequence
  Synthetic oligonucleotide
gtaggaaggaatcgagtgagcaatgggagg

SEQ ID NO: 17586 - DNA, 30 bp, Artificial Sequence
  Synthetic oligonucleotide
aagccaaacagtcgcgaacttatgatgagg

SEQ ID NO: 17587 - DNA, 31 bp, Artificial Sequence
  Synthetic oligonucleotide
atgaagcgaaacggccattagatacaatagg

SEQ ID NO: 17588 - DNA, 30 bp, Artificial Sequence
  Synthetic oligonucleotide
acaatggcaagtaacctcgaccacgatagg

SEQ ID NO: 17589 - DNA, 30 bp, Artificial Sequence
  Synthetic oligonucleotide
agaagcgaaacacaaaggttgcaagaacgg

SEQ ID NO: 17590 - DNA, 30 bp, Artificial Sequence
  Synthetic oligonucleotide
atggcgtgacaggaataaaattaaatacgg

SEQ ID NO: 17591 - DNA, 30 bp, Artificial Sequence
  Synthetic oligonucleotide
gaggtggaaaggtcgaatgaagtgcaccgg

SEQ ID NO: 17592 - DNA, 30 bp, Artificial Sequence
  Synthetic oligonucleotide
acgacatggttagggagaagctactaccgg

SEQ ID NO: 17593 - DNA, 30 bp, Artificial Sequence
  Synthetic oligonucleotide
attaaacaacatcagggcaaggataagcgg

SEQ ID NO: 17594 - DNA, 30 bp, Artificial Sequence
  Synthetic oligonucleotide
acagagtagcaaagaaggtgtaccaggcgg

SEQ ID NO: 17595 - DNA, 30 bp, Artificial Sequence
  Synthetic oligonucleotide
acggggagcatccagaaaggtaagcggcgg

SEQ ID NO: 17596 - DNA, 30 bp, Artificial Sequence
  Synthetic oligonucleotide
caaggagcaaaggcgtggaagatcatgcgg

SEQ ID NO: 17597 - DNA, 30 bp, Artificial Sequence
  Synthetic oligonucleotide
tcgaaagggtcaaatacggtaatatatcgg

SEQ ID NO: 17598 - DNA, 30 bp, Artificial Sequence
  Synthetic oligonucleotide
tagtaggctagtggcaaagcaacaaaaggg

SEQ ID NO: 17599 - DNA, 30 bp, Artificial Sequence
  Synthetic oligonucleotide
tacaaagcaatcatgtgtaggatctcaggg

SEQ ID NO: 17600 - DNA, 30 bp, Artificial Sequence
  Synthetic oligonucleotide
gagacgcgtaaaagataatgggtacgaggg

SEQ ID NO: 17601 - DNA, 30 bp, Artificial Sequence
  Synthetic oligonucleotide
ccgagcgcacaaatcaatccaggtggaggg

SEQ ID NO: 17602 - DNA, 30 bp, Artificial Sequence
  Synthetic oligonucleotide
gggaaaatagcagccacaggtcagctaggg

SEQ ID NO: 17603 - DNA, 30 bp, Artificial Sequence
  Synthetic oligonucleotide
ctgctcagcgcgatggtaaggcgaatcggg

SEQ ID NO: 17604 - DNA, 30 bp, Artificial Sequence
  Synthetic oligonucleotide
aagcgtgtgtcctaggatagaaaatcgggg

SEQ ID NO: 17605 - DNA, 30 bp, Artificial Sequence
  Synthetic oligonucleotide
cagaattgaatacgtaacagaatcgggggg

SEQ ID NO: 17606 - DNA, 30 bp, Artificial Sequence
  Synthetic oligonucleotide
caacgacacaaacaagtgaaaagatggggg

SEQ ID NO: 17607 - DNA, 30 bp, Artificial Sequence
  Synthetic oligonucleotide
atagagaatgaaaagcgtagttcaactggg

SEQ ID NO: 17608 - DNA, 30 bp, Artificial Sequence
  Synthetic oligonucleotide
tcaaacatgggcaaaatcgactcgaaatgg

SEQ ID NO: 17609 - DNA, 30 bp, Artificial Sequence
  Synthetic oligonucleotide
cgacaactccacgggagctaggggaaatgg

SEQ ID NO: 17610 - DNA, 30 bp, Artificial Sequence
  Synthetic oligonucleotide
agtacaggagaataatccgtgtggaaatgg

SEQ ID NO: 17611 - DNA, 30 bp, Artificial Sequence
  Synthetic oligonucleotide
cttaatcaaaaggggacagcggaaacatgg

SEQ ID NO: 17612 - DNA, 30 bp, Artificial Sequence
  Synthetic oligonucleotide
cgcggacaagaaaaaattgaacgggcatgg

SEQ ID NO: 17613 - DNA, 30 bp, Artificial Sequence
  Synthetic oligonucleotide
ctagagaatccagaaaaaaaagtggcctgg

SEQ ID NO: 17614 - DNA, 30 bp, Artificial Sequence
  Synthetic oligonucleotide
ggtgtaaaacaggcaggatctaaagagtgg

SEQ ID NO: 17615 - DNA, 30 bp, Artificial Sequence
  Synthetic oligonucleotide
aggctgtctaaaaagagcgcgtgttcgtgg

SEQ ID NO: 17616 - DNA, 30 bp, Artificial Sequence
  Synthetic oligonucleotide
acttagaacaaaccccgaaacaagagttgg

SEQ ID NO: 17617 - DNA, 30 bp, Artificial Sequence
  Synthetic oligonucleotide
agacagcccggtagcgtaaaacaggaaatg

SEQ ID NO: 17618 - DNA, 30 bp, Artificial Sequence
  Synthetic oligonucleotide
ctagaagacctggcgtgagggaatgaaatg

SEQ ID NO: 17619 - DNA, 30 bp, Artificial Sequence
  Synthetic oligonucleotide
tatggtgcagtgaaaaaagatggcacaatg

SEQ ID NO: 17620 - DNA, 30 bp, Artificial Sequence
  Synthetic oligonucleotide
tgaaggccgataagctaaacaagtacaatg

SEQ ID NO: 17621 - DNA, 30 bp, Artificial Sequence
  Synthetic oligonucleotide
tcccttagacgagaaaggagttaggcaatg

SEQ ID NO: 17622 - DNA, 30 bp, Artificial Sequence
  Synthetic oligonucleotide
acagagaccgatcatgcactcaatgcaatg

SEQ ID NO: 17623 - DNA, 30 bp, Artificial Sequence
  Synthetic oligonucleotide
cagtcaagtgagggacgtacaaaaataatg

SEQ ID NO: 17624 - DNA, 30 bp, Artificial Sequence
  Synthetic oligonucleotide
caatagcgagaaagcgggggtagcataatg

SEQ ID NO: 17625 - DNA, 30 bp, Artificial Sequence
  Synthetic oligonucleotide
agacatactggacagagggagatcataatg

SEQ ID NO: 17626 - DNA, 30 bp, Artificial Sequence
  Synthetic oligonucleotide
ttaaggcgagttgggactaacgtaaacatg

SEQ ID NO: 17627 - DNA, 30 bp, Artificial Sequence
  Synthetic oligonucleotide
taggccagaattgagttaaggtaatacatg

SEQ ID NO: 17628 - DNA, 30 bp, Artificial Sequence
  Synthetic oligonucleotide
cggaaactctccgacatattaggcgagatg

SEQ ID NO: 17629 - DNA, 30 bp, Artificial Sequence
  Synthetic oligonucleotide
gaggcgatcgaagaatgagccattccgatg

SEQ ID NO: 17630 - DNA, 30 bp, Artificial Sequence
  Synthetic oligonucleotide
ctagattgcgtgaaaccatagaacaggatg

SEQ ID NO: 17631 - DNA, 30 bp, Artificial Sequence
  Synthetic oligonucleotide
gggagttagagcatatcagaagtagggatg

SEQ ID NO: 17632 - DNA, 30 bp, Artificial Sequence
  Synthetic oligonucleotide
catgattgcgaaagttggggcgtcaatatg

SEQ ID NO: 17633 - DNA, 31 bp, Artificial Sequence
  Synthetic oligonucleotide
cgtgaaccaagtcaaggataagttatctatg

SEQ ID NO: 17634 - DNA, 30 bp, Artificial Sequence
  Synthetic oligonucleotide
cagatgcctaagagcgagcaatagagtatg

SEQ ID NO: 17635 - DNA, 30 bp, Artificial Sequence
  Synthetic oligonucleotide
gaccgtgcgactaatcgagtgcgcaaactg

SEQ ID NO: 17636 - DNA, 30 bp, Artificial Sequence
  Synthetic oligonucleotide
ggtacgaatctgagcaagtaagcgtcactg

SEQ ID NO: 17637 - DNA, 30 bp, Artificial Sequence
  Synthetic oligonucleotide
cgaaagatgccctgggtccacacgagactg

SEQ ID NO: 17638 - DNA, 30 bp, Artificial Sequence
  Synthetic oligonucleotide
gacgagtaagtgtggacgagggaacctctg

SEQ ID NO: 17639 - DNA, 30 bp, Artificial Sequence
  Synthetic oligonucleotide
cgtaagattgtcgtgagattaaaaaaagtg

SEQ ID NO: 17640 - DNA, 30 bp, Artificial Sequence
  Synthetic oligonucleotide
cgtacccgagtaagcggactggtggaagtg

SEQ ID NO: 17641 - DNA, 30 bp, Artificial Sequence
  Synthetic oligonucleotide
gagggaattgaacccgagacgtgaacagtg

SEQ ID NO: 17642 - DNA, 30 bp, Artificial Sequence
  Synthetic oligonucleotide
gctcggatgaagtgaagcgcgagactagtg

SEQ ID NO: 17643 - DNA, 30 bp, Artificial Sequence
  Synthetic oligonucleotide
agggtcggggctatcagctgtgtcaccgtg

SEQ ID NO: 17644 - DNA, 30 bp, Artificial Sequence
  Synthetic oligonucleotide
cgtgaagtaactcaggcattagatatcgtg

SEQ ID NO: 17645 - DNA, 30 bp, Artificial Sequence
  Synthetic oligonucleotide
gtggaaagcaactaagagaaatgccaggtg

SEQ ID NO: 17646 - DNA, 30 bp, Artificial Sequence
  Synthetic oligonucleotide
aacgaacgcgggccgaagatgagtgtggtg

SEQ ID NO: 17647 - DNA, 30 bp, Artificial Sequence
  Synthetic oligonucleotide
accgtgccagagagatctaaaggtagtgtg

SEQ ID NO: 17648 - DNA, 30 bp, Artificial Sequence
  Synthetic oligonucleotide
cgatgggacaaggaaagcgttaatattgtg

SEQ ID NO: 17649 - DNA, 30 bp, Artificial Sequence
  Synthetic oligonucleotide
aggcgtgtcgcccaaatggaatcgtaattg

SEQ ID NO: 17650 - DNA, 30 bp, Artificial Sequence
  Synthetic oligonucleotide
cgtgcgccgatcactgggggtaggtacttg

SEQ ID NO: 17651 - DNA, 30 bp, Artificial Sequence
  Synthetic oligonucleotide
ataggaggcgagaaacggtaaatggtcttg

SEQ ID NO: 17652 - DNA, 30 bp, Artificial Sequence
  Synthetic oligonucleotide
ggctgaaagtggcggaaagtgtgatttttg

SEQ ID NO: 17653 - DNA, 30 bp, Artificial Sequence
  Synthetic oligonucleotide
tgggcggaggtgaccacagagtaaccaaat

SEQ ID NO: 17654 - DNA, 30 bp, Artificial Sequence
  Synthetic oligonucleotide
agaaaatgacacagagtgaatgggaacaat

SEQ ID NO: 17655 - DNA, 30 bp, Artificial Sequence
  Synthetic oligonucleotide
acgaatgcacttcaccatgtggccgacaat

SEQ ID NO: 17656 - DNA, 30 bp, Artificial Sequence
  Synthetic oligonucleotide
cgaaggccagatgctcgacgactcaccaat

SEQ ID NO: 17657 - DNA, 30 bp, Artificial Sequence
  Synthetic oligonucleotide
gctaacactaggagagcactgttggagaat

SEQ ID NO: 17658 - DNA, 30 bp, Artificial Sequence
  Synthetic oligonucleotide
atatgagaggaaggaacaggctacacgaat

SEQ ID NO: 17659 - DNA, 30 bp, Artificial Sequence
  Synthetic oligonucleotide
tcgtcgagagctggcgtagaatccatgaat

SEQ ID NO: 17660 - DNA, 30 bp, Artificial Sequence
  Synthetic oligonucleotide
ggcgttggcgaccgatcagagaacactaat

SEQ ID NO: 17661 - DNA, 30 bp, Artificial Sequence
  Synthetic oligonucleotide
ggtagaacatgacataaagaaactagtaat

SEQ ID NO: 17662 - DNA, 30 bp, Artificial Sequence
  Synthetic oligonucleotide
aaaggcacgggaagctagtagcagtttaat

SEQ ID NO: 17663 - DNA, 30 bp, Artificial Sequence
  Synthetic oligonucleotide
tcaggcatgggacactagggccgcgaacat

SEQ ID NO: 17664 - DNA, 30 bp, Artificial Sequence
  Synthetic oligonucleotide
caggtgatagtgtagggaccatgaacacat

SEQ ID NO: 17665 - DNA, 30 bp, Artificial Sequence
  Synthetic oligonucleotide
gcggggcaaggcaggatagccaactcacat

SEQ ID NO: 17666 - DNA, 30 bp, Artificial Sequence
  Synthetic oligonucleotide
cataaacaaaagtatgaatgaaagtagcat

SEQ ID NO: 17667 - DNA, 30 bp, Artificial Sequence
  Synthetic oligonucleotide
acaggggagtgaatacaacaacccgcgcat

SEQ ID NO: 17668 - DNA, 30 bp, Artificial Sequence
  Synthetic oligonucleotide
gcgtgcaagtcagggccaggagtgcatcat

SEQ ID NO: 17669 - DNA, 30 bp, Artificial Sequence
  Synthetic oligonucleotide
cgcgcgcaagcataggagataaacccagat

SEQ ID NO: 17670 - DNA, 30 bp, Artificial Sequence
  Synthetic oligonucleotide
acatacgagaagttaaggctgcgaatagat

SEQ ID NO: 17671 - DNA, 30 bp, Artificial Sequence
  Synthetic oligonucleotide
ggtacataaaggtccaggaagcatgtagat

SEQ ID NO: 17672 - DNA, 30 bp, Artificial Sequence
  Synthetic oligonucleotide
ccaattacacgaagaggggcgaggatatat

SEQ ID NO: 17673 - DNA, 30 bp, Artificial Sequence
  Synthetic oligonucleotide
gcgtaagggggggaagctaaaatatgctat

SEQ ID NO: 17674 - DNA, 30 bp, Artificial Sequence
  Synthetic oligonucleotide
tcgcgggacggccaaacatgtaagaagtat

SEQ ID NO: 17675 - DNA, 30 bp, Artificial Sequence
  Synthetic oligonucleotide
cgatagtcgaatttatggggtgcgatgtat

SEQ ID NO: 17676 - DNA, 30 bp, Artificial Sequence
  Synthetic oligonucleotide
gtgagagacagatcaccgtcatacgaaact

SEQ ID NO: 17677 - DNA, 30 bp, Artificial Sequence
  Synthetic oligonucleotide
cgactagggatacgtcacaccaccagacct

SEQ ID NO: 17678 - DNA, 30 bp, Artificial Sequence
  Synthetic oligonucleotide
agacggcggacaaaaggcagaacctgagct

SEQ ID NO: 17679 - DNA, 30 bp, Artificial Sequence
  Synthetic oligonucleotide
ttgaggaggtactaaatgagtgcatatgct

SEQ ID NO: 17680 - DNA, 30 bp, Artificial Sequence
  Synthetic oligonucleotide
caggcactagaatatggagagaatgactct

SEQ ID NO: 17681 - DNA, 30 bp, Artificial Sequence
  Synthetic oligonucleotide
tcgtgcgaggtgtgaaatcagaagccgtct

SEQ ID NO: 17682 - DNA, 30 bp, Artificial Sequence
  Synthetic oligonucleotide
catcgaaagcacagcgtggacagtccgtct

SEQ ID NO: 17683 - DNA, 30 bp, Artificial Sequence
  Synthetic oligonucleotide
gcagtcaaaaagtagcaagaaatcacaagt

SEQ ID NO: 17684 - DNA, 30 bp, Artificial Sequence
  Synthetic oligonucleotide
agtgcgggggaaataaaaagacactcaagt

SEQ ID NO: 17685 - DNA, 30 bp, Artificial Sequence
  Synthetic oligonucleotide
cactaagagaatcattgaaagctaagaagt

SEQ ID NO: 17686 - DNA, 30 bp, Artificial Sequence
  Synthetic oligonucleotide
cggccgtcgtagagcagtctgacgaacagt

SEQ ID NO: 17687 - DNA, 30 bp, Artificial Sequence
  Synthetic oligonucleotide
cggagttagtaataatacagaggtagcagt

SEQ ID NO: 17688 - DNA, 30 bp, Artificial Sequence
  Synthetic oligonucleotide
cggagcgcaataatctaaagccagaagagt

SEQ ID NO: 17689 - DNA, 30 bp, Artificial Sequence
  Synthetic oligonucleotide
actttgacgaggaccacaggcgagaagagt

SEQ ID NO: 17690 - DNA, 30 bp, Artificial Sequence
  Synthetic oligonucleotide
gggaaatacgacccagacccgaactagagt

SEQ ID NO: 17691 - DNA, 30 bp, Artificial Sequence
  Synthetic oligonucleotide
agcggtgacagacatacagcggagtcgagt

SEQ ID NO: 17692 - DNA, 30 bp, Artificial Sequence
  Synthetic oligonucleotide
taccggtgaagagcaagttagaccatgagt

SEQ ID NO: 17693 - DNA, 30 bp, Artificial Sequence
  Synthetic oligonucleotide
ttgaatacgggaagggccgtcagagagcgt

SEQ ID NO: 17694 - DNA, 30 bp, Artificial Sequence
  Synthetic oligonucleotide
tgtgagaggagaaaatgattccaaacgcgt

SEQ ID NO: 17695 - DNA, 30 bp, Artificial Sequence
  Synthetic oligonucleotide
acgcaggcgtgaagagaagtggatgcgcgt

SEQ ID NO: 17696 - DNA, 30 bp, Artificial Sequence
  Synthetic oligonucleotide
ggaacaaacagatgtccaggtgtgtcgcgt

SEQ ID NO: 17697 - DNA, 30 bp, Artificial Sequence
  Synthetic oligonucleotide
cgagaagaaggcattctatcaccgctaggt

SEQ ID NO: 17698 - DNA, 30 bp, Artificial Sequence
  Synthetic oligonucleotide
actagaggaatacaaagaagtgaaatgggt

SEQ ID NO: 17699 - DNA, 30 bp, Artificial Sequence
  Synthetic oligonucleotide
gagacctggcgggaggaatacaggagatgt

SEQ ID NO: 17700 - DNA, 30 bp, Artificial Sequence
  Synthetic oligonucleotide
gtaagtggaagttttacgtgggagggatgt

SEQ ID NO: 17701 - DNA, 30 bp, Artificial Sequence
  Synthetic oligonucleotide
agcgaacgggcgataaacgggaatgactgt

SEQ ID NO: 17702 - DNA, 30 bp, Artificial Sequence
  Synthetic oligonucleotide
agcacggaagagaaggatggaggcaacatt

SEQ ID NO: 17703 - DNA, 30 bp, Artificial Sequence
  Synthetic oligonucleotide
cgatccagtacacacgaggctaaggggctt

SEQ ID NO: 17704 - DNA, 30 bp, Artificial Sequence
  Synthetic oligonucleotide
agatacatgggctggtacaacgggtgagtt

SEQ ID NO: 17705 - DNA, 30 bp, Artificial Sequence
  Synthetic oligonucleotide
ccgagatactacaatgtagaggacccattt

SEQ ID NO: 17706 - DNA, 30 bp, Artificial Sequence
  Synthetic oligonucleotide
aagcgcagggggcagaacgcaaatggattt

SEQ ID NO: 17707 - DNA, 30 bp, Artificial Sequence
  Synthetic oligonucleotide
tgactgaaggggacaagagggcgaaatttt

SEQ ID NO: 17708 - DNA, 30 bp, Artificial Sequence
  Synthetic oligonucleotide
ggcagtaggacagcccagtgatagagaaaa

SEQ ID NO: 17709 - DNA, 30 bp, Artificial Sequence
  Synthetic oligonucleotide
gccgagggaaagcgaatgagatattgaaaa

SEQ ID NO: 17710 - DNA, 30 bp, Artificial Sequence
  Synthetic oligonucleotide
acaatggggcaagacaacctaggcgtaaaa

SEQ ID NO: 17711 - DNA, 30 bp, Artificial Sequence
  Synthetic oligonucleotide
gagatacatctcaaaggcatgggtagcaaa

SEQ ID NO: 17712 - DNA, 30 bp, Artificial Sequence
  Synthetic oligonucleotide
aggtagaagagctcgagctaggtcatcaaa

SEQ ID NO: 17713 - DNA, 30 bp, Artificial Sequence
  Synthetic oligonucleotide
tagacaaaggtcatcgaacaaaacctcaaa

SEQ ID NO: 17714 - DNA, 30 bp, Artificial Sequence
  Synthetic oligonucleotide
gacaggaggcaatctacgtaacaaccgaaa

SEQ ID NO: 17715 - DNA, 30 bp, Artificial Sequence
  Synthetic oligonucleotide
cgagagaagtggaagtttaagacacggaaa

SEQ ID NO: 17716 - DNA, 30 bp, Artificial Sequence
  Synthetic oligonucleotide
gagcaggggcgatgcaaagttcgggtgaaa

SEQ ID NO: 17717 - DNA, 31 bp, Artificial Sequence
  Synthetic oligonucleotide
agccgtgaaggagcggcgtggagtatataaa

SEQ ID NO: 17718 - DNA, 30 bp, Artificial Sequence
  Synthetic oligonucleotide
cgggcaacaacgtcgatggtatcgagtaaa

SEQ ID NO: 17719 - DNA, 30 bp, Artificial Sequence
  Synthetic oligonucleotide
gtaaatagaaagccaacagaatcacgtaaa

SEQ ID NO: 17720 - DNA, 30 bp, Artificial Sequence
  Synthetic oligonucleotide
tggtcaaaagagagaagcatgatctgtaaa

SEQ ID NO: 17721 - DNA, 30 bp, Artificial Sequence
  Synthetic oligonucleotide
gagcatgagcatcggtgacgaatcaaacaa

SEQ ID NO: 17722 - DNA, 30 bp, Artificial Sequence
  Synthetic oligonucleotide
tcgggtgaaaacagaagccgttcgaaacaa

SEQ ID NO: 17723 - DNA, 30 bp, Artificial Sequence
  Synthetic oligonucleotide
acgaagtgcggtgtatagaaaacctaacaa

SEQ ID NO: 17724 - DNA, 30 bp, Artificial Sequence
  Synthetic oligonucleotide
gcgacctagatggccagagcggcaggacaa

SEQ ID NO: 17725 - DNA, 30 bp, Artificial Sequence
  Synthetic oligonucleotide
gtgcgccagtgtgagggatctatcggacaa

SEQ ID NO: 17726 - DNA, 30 bp, Artificial Sequence
  Synthetic oligonucleotide
agccgcggcggagcggacagaccaaaccaa

SEQ ID NO: 17727 - DNA, 30 bp, Artificial Sequence
  Synthetic oligonucleotide
catgaaggtgggtagagacgttacagccaa

SEQ ID NO: 17728 - DNA, 30 bp, Artificial Sequence
  Synthetic oligonucleotide
acatctaataaagttaacccgataaagcaa

SEQ ID NO: 17729 - DNA, 30 bp, Artificial Sequence
  Synthetic oligonucleotide
agtgtcagcgaaatagcagaggtcaagcaa

SEQ ID NO: 17730 - DNA, 30 bp, Artificial Sequence
  Synthetic oligonucleotide
tccaacaggcgagatccataagatcagcaa

SEQ ID NO: 17731 - DNA, 30 bp, Artificial Sequence
  Synthetic oligonucleotide
agtgacgtaattaggcgagttaaagagcaa

SEQ ID NO: 17732 - DNA, 30 bp, Artificial Sequence
  Synthetic oligonucleotide
cgggagaggggcgaaatagacattacgcaa

SEQ ID NO: 17733 - DNA, 30 bp, Artificial Sequence
  Synthetic oligonucleotide
tcgactgacaaactggggggatagccgcaa

SEQ ID NO: 17734 - DNA, 30 bp, Artificial Sequence
  Synthetic oligonucleotide
accacgccaaaaacaaccaggcggcggcaa

SEQ ID NO: 17735 - DNA, 30 bp, Artificial Sequence
  Synthetic oligonucleotide
acgtgatggcgccaaagtggggggtggcaa

SEQ ID NO: 17736 - DNA, 30 bp, Artificial Sequence
  Synthetic oligonucleotide
ctcaagcacggcgtagaagcacctgatcaa

SEQ ID NO: 17737 - DNA, 30 bp, Artificial Sequence
  Synthetic oligonucleotide
gaaggagactggtccgtgtcgtggagtcaa

SEQ ID NO: 17738 - DNA, 30 bp, Artificial Sequence
  Synthetic oligonucleotide
tgtcggatggggtaatcggtaagcacagaa

SEQ ID NO: 17739 - DNA, 30 bp, Artificial Sequence
  Synthetic oligonucleotide
tagactccaacaagtcaagggaatacagaa

SEQ ID NO: 17740 - DNA, 30 bp, Artificial Sequence
  Synthetic oligonucleotide
cgggataagttagctgtggcttggagagaa

SEQ ID NO: 17741 - DNA, 30 bp, Artificial Sequence
  Synthetic oligonucleotide
agtcacgcgcaaatgggtgagaatagagaa

SEQ ID NO: 17742 - DNA, 30 bp, Artificial Sequence
  Synthetic oligonucleotide
acaaacatggtaagccaccaacaattagaa

SEQ ID NO: 17743 - DNA, 30 bp, Artificial Sequence
  Synthetic oligonucleotide
tggcttgacaggggacaatcgaatgacgaa

SEQ ID NO: 17744 - DNA, 30 bp, Artificial Sequence
  Synthetic oligonucleotide
agcgagagcggaagggggtacacgagcgaa

SEQ ID NO: 17745 - DNA, 30 bp, Artificial Sequence
  Synthetic oligonucleotide
tatgcatgtgggaaacaaacatgtggcgaa

SEQ ID NO: 17746 - DNA, 30 bp, Artificial Sequence
  Synthetic oligonucleotide
gtgcgtcaagactaataaacgacttgcgaa

SEQ ID NO: 17747 - DNA, 30 bp, Artificial Sequence
  Synthetic oligonucleotide
cgtccgccgtgtcaggagtcaacagaggaa

SEQ ID NO: 17748 - DNA, 30 bp, Artificial Sequence
  Synthetic oligonucleotide
acgtgtggtaattaagcaggggatgaggaa

SEQ ID NO: 17749 - DNA, 30 bp, Artificial Sequence
  Synthetic oligonucleotide
ctaacaggactcataaaaagctgaatggaa

SEQ ID NO: 17750 - DNA, 31 bp, Artificial Sequence
  Synthetic oligonucleotide
gggaggtgggtagacacaaattactcctgaa

SEQ ID NO: 17751 - DNA, 30 bp, Artificial Sequence
  Synthetic oligonucleotide
gtggaaacagtaccgagctgcacgggataa

SEQ ID NO: 17752 - DNA, 30 bp, Artificial Sequence
  Synthetic oligonucleotide
tcgtagtaacaaggaaagagcaaaacctaa

SEQ ID NO: 17753 - DNA, 30 bp, Artificial Sequence
  Synthetic oligonucleotide
acgagccagagtcagcgaaacgatctttaa

SEQ ID NO: 17754 - DNA, 30 bp, Artificial Sequence
  Synthetic oligonucleotide
gaaggcagcgagagcagacagtgtcaaaca

SEQ ID NO: 17755 - DNA, 30 bp, Artificial Sequence
  Synthetic oligonucleotide
cgatgatgactcgtgattcaaagctgaaca

SEQ ID NO: 17756 - DNA, 30 bp, Artificial Sequence
  Synthetic oligonucleotide
tgagcaatcgaaaaggcggctacgtgaaca

SEQ ID NO: 17757 - DNA, 30 bp, Artificial Sequence
  Synthetic oligonucleotide
agagtggattaaagggtgaaagtacccaca

SEQ ID NO: 17758 - DNA, 30 bp, Artificial Sequence
  Synthetic oligonucleotide
gaccatcaacaaatgtagaaacccagcaca

SEQ ID NO: 17759 - DNA, 30 bp, Artificial Sequence
  Synthetic oligonucleotide
aacccgaagagatgaccaccgatcaagaca

SEQ ID NO: 17760 - DNA, 30 bp, Artificial Sequence
  Synthetic oligonucleotide
gggagggaaggacttacagactggtagaca

SEQ ID NO: 17761 - DNA, 30 bp, Artificial Sequence
  Synthetic oligonucleotide
cgaggttacggcgatctatgcgggccgaca

SEQ ID NO: 17762 - DNA, 30 bp, Artificial Sequence
  Synthetic oligonucleotide
caagaacggtgaggcggtgatcgcgcgaca

SEQ ID NO: 17763 - DNA, 30 bp, Artificial Sequence
  Synthetic oligonucleotide
tgaagggcggtcgaccaacctagcaataca

SEQ ID NO: 17764 - DNA, 30 bp, Artificial Sequence
  Synthetic oligonucleotide
agccgaaactttaacgagtgggctacacca

SEQ ID NO: 17765 - DNA, 30 bp, Artificial Sequence
  Synthetic oligonucleotide
cgcataggagtgccatagtgaggtggacca

SEQ ID NO: 17766 - DNA, 30 bp, Artificial Sequence
  Synthetic oligonucleotide
aggcaagcgctaggaaagcggacatgacca

SEQ ID NO: 17767 - DNA, 30 bp, Artificial Sequence
  Synthetic oligonucleotide
cgagagccgtgagtgttcggaagatgacca

SEQ ID NO: 17768 - DNA, 31 bp, Artificial Sequence
  Synthetic oligonucleotide
agggaacgtggtttctagtccgagaagccca

SEQ ID NO: 17769 - DNA, 30 bp, Artificial Sequence
  Synthetic oligonucleotide
agtaaacaatccgaaaccgagatcacgcca

SEQ ID NO: 17770 - DNA, 30 bp, Artificial Sequence
  Synthetic oligonucleotide
cggacagcgactgacatcacgtgggatcca

SEQ ID NO: 17771 - DNA, 30 bp, Artificial Sequence
  Synthetic oligonucleotide
caagcgcgtacaccccgagcccagaaagca

SEQ ID NO: 17772 - DNA, 30 bp, Artificial Sequence
  Synthetic oligonucleotide
gaggttaatgagaagagaatactgcaagca

SEQ ID NO: 17773 - DNA, 30 bp, Artificial Sequence
  Synthetic oligonucleotide
gggacaacgtgatccaatggtacagaagca

SEQ ID NO: 17774 - DNA, 30 bp, Artificial Sequence
  Synthetic oligonucleotide
gagaaacccgaagatcagagtggtgaagca

SEQ ID NO: 17775 - DNA, 30 bp, Artificial Sequence
  Synthetic oligonucleotide
cgagtggggtgagacaccgacacctcagca

SEQ ID NO: 17776 - DNA, 30 bp, Artificial Sequence
  Synthetic oligonucleotide
gcacatgggcaagagaatcccagcatagca

SEQ ID NO: 17777 - DNA, 30 bp, Artificial Sequence
  Synthetic oligonucleotide
ggtaaaaacgagtagcatgaatgaaacgca

SEQ ID NO: 17778 - DNA, 30 bp, Artificial Sequence
  Synthetic oligonucleotide
aggaaaagcaggcaacgacgtaaggcggca

SEQ ID NO: 17779 - DNA, 30 bp, Artificial Sequence
  Synthetic oligonucleotide
gtactcaaaacagggcgatagcaaagggca

SEQ ID NO: 17780 - DNA, 30 bp, Artificial Sequence
  Synthetic oligonucleotide
aggtgcgctaagaaaaggagcgttgtggca

SEQ ID NO: 17781 - DNA, 30 bp, Artificial Sequence
  Synthetic oligonucleotide
agtaacagaatgttaccaaccaagagtgca

SEQ ID NO: 17782 - DNA, 30 bp, Artificial Sequence
  Synthetic oligonucleotide
gggtgtgatccagtgtgaagcggacttgca

SEQ ID NO: 17783 - DNA, 30 bp, Artificial Sequence
  Synthetic oligonucleotide
tgggggagaagacacgcacaaggggaatca

SEQ ID NO: 17784 - DNA, 30 bp, Artificial Sequence
  Synthetic oligonucleotide
gctgcgcagaacaattacaaactcgcatca

SEQ ID NO: 17785 - DNA, 30 bp, Artificial Sequence
  Synthetic oligonucleotide
acgggggtaaaatgaaagcaactaacctca

SEQ ID NO: 17786 - DNA, 30 bp, Artificial Sequence
  Synthetic oligonucleotide
cgcgactcagagagaccgtacctcacctca

SEQ ID NO: 17787 - DNA, 30 bp, Artificial Sequence
  Synthetic oligonucleotide
ctggagacaaaaagaagctatagcgcctca

SEQ ID NO: 17788 - DNA, 30 bp, Artificial Sequence
  Synthetic oligonucleotide
ggagagcccagaagagaagatctaaggtca

SEQ ID NO: 17789 - DNA, 30 bp, Artificial Sequence
  Synthetic oligonucleotide
acactaaaggaagtgcttgggcgaagaaga

SEQ ID NO: 17790 - DNA, 30 bp, Artificial Sequence
  Synthetic oligonucleotide
tgggcagtgaaatgaaacgatggtataaga

SEQ ID NO: 17791 - DNA, 30 bp, Artificial Sequence
  Synthetic oligonucleotide
aaggggtgaccgctacgatgaaaggtaaga

SEQ ID NO: 17792 - DNA, 30 bp, Artificial Sequence
  Synthetic oligonucleotide
ttcagggggaacagtgcgaaggatgtaaga

SEQ ID NO: 17793 - DNA, 30 bp, Artificial Sequence
  Synthetic oligonucleotide
agcaaaagacctcccacagtgttcaacaga

SEQ ID NO: 17794 - DNA, 30 bp, Artificial Sequence
  Synthetic oligonucleotide
tacagaatctaaacaatgaatgtccacaga

SEQ ID NO: 17795 - DNA, 30 bp, Artificial Sequence
  Synthetic oligonucleotide
atcgggttgcgaccaaacagtaaatacaga

SEQ ID NO: 17796 - DNA, 30 bp, Artificial Sequence
  Synthetic oligonucleotide
cgcgcgtagtgccagagagataatggcaga

SEQ ID NO: 17797 - DNA, 30 bp, Artificial Sequence
  Synthetic oligonucleotide
acagaatacgtcaaagaaggcattggcaga

SEQ ID NO: 17798 - DNA, 30 bp, Artificial Sequence
  Synthetic oligonucleotide
aggggcctgggttttacgtcacctatcaga

SEQ ID NO: 17799 - DNA, 30 bp, Artificial Sequence
  Synthetic oligonucleotide
gtcaaatcggattacgatcgactgctcaga

SEQ ID NO: 17800 - DNA, 30 bp, Artificial Sequence
  Synthetic oligonucleotide
cggtcgagaagataataggatgggttcaga

SEQ ID NO: 17801 - DNA, 30 bp, Artificial Sequence
  Synthetic oligonucleotide
gtacgatcgagaacccagcaaaccaagaga

SEQ ID NO: 17802 - DNA, 30 bp, Artificial Sequence
  Synthetic oligonucleotide
ggtctatcacaggtagcaaagagccagaga

SEQ ID NO: 17803 - DNA, 30 bp, Artificial Sequence
  Synthetic oligonucleotide
cagggtatcgtccagaactaataaaggaga

SEQ ID NO: 17804 - DNA, 30 bp, Artificial Sequence
  Synthetic oligonucleotide
acaaaaaataggcaaggaagtccagggaga

SEQ ID NO: 17805 - DNA, 30 bp, Artificial Sequence
  Synthetic oligonucleotide
acatgggcctatcagagcgatcgaatgaga

SEQ ID NO: 17806 - DNA, 30 bp, Artificial Sequence
  Synthetic oligonucleotide
atggcaggcccgaggactacgtgatctaga

SEQ ID NO: 17807 - DNA, 30 bp, Artificial Sequence
  Synthetic oligonucleotide
ccaaaaacgaagactcttgacacacttaga

SEQ ID NO: 17808 - DNA, 30 bp, Artificial Sequence
  Synthetic oligonucleotide
ggaaagtacgaatcccatacgaagtaacga

SEQ ID NO: 17809 - DNA, 30 bp, Artificial Sequence
  Synthetic oligonucleotide
cggttgacgggaaaaaacagcgaggcacga

SEQ ID NO: 17810 - DNA, 30 bp, Artificial Sequence
  Synthetic oligonucleotide
tccacgagaatgaccggtataacgggacga

SEQ ID NO: 17811 - DNA, 30 bp, Artificial Sequence
  Synthetic oligonucleotide
caaaccgagaggaggaggacactgatacga

SEQ ID NO: 17812 - DNA, 30 bp, Artificial Sequence
  Synthetic oligonucleotide
gctgtaagcgcacatgatgaactggaccga

SEQ ID NO: 17813 - DNA, 30 bp, Artificial Sequence
  Synthetic oligonucleotide
cgtggtcaagactgggccaagaacagccga

SEQ ID NO: 17814 - DNA, 30 bp, Artificial Sequence
  Synthetic oligonucleotide
atgtaggacagtcagaaagaggtggtccga

SEQ ID NO: 17815 - DNA, 30 bp, Artificial Sequence
  Synthetic oligonucleotide
cgaatgcttacaaagagtggacttgcgcga

SEQ ID NO: 17816 - DNA, 30 bp, Artificial Sequence
  Synthetic oligonucleotide
tcagagtacgagtaacggtaagtatcgcga

SEQ ID NO: 17817 - DNA, 30 bp, Artificial Sequence
  Synthetic oligonucleotide
gggccgagagacaatgctgacatctggcga

SEQ ID NO: 17818 - DNA, 30 bp, Artificial Sequence
  Synthetic oligonucleotide
aagcacagagaagagctaccgttaatgcga

SEQ ID NO: 17819 - DNA, 30 bp, Artificial Sequence
  Synthetic oligonucleotide
cgaattggcacaaacaggcggggggctcga

SEQ ID NO: 17820 - DNA, 30 bp, Artificial Sequence
  Synthetic oligonucleotide
cgacgggaagtacccgccaggagaagtcga

SEQ ID NO: 17821 - DNA, 30 bp, Artificial Sequence
  Synthetic oligonucleotide
ctagacaattccaaatatgtgcacagtcga

SEQ ID NO: 17822 - DNA, 30 bp, Artificial Sequence
  Synthetic oligonucleotide
ccggaaaatcggggatacaagactggtcga

SEQ ID NO: 17823 - DNA, 30 bp, Artificial Sequence
  Synthetic oligonucleotide
cggaagctctaggcgaaatgggcaaaagga

SEQ ID NO: 17824 - DNA, 30 bp, Artificial Sequence
  Synthetic oligonucleotide
cgaccacaagtcggcaaacggagctcagga

SEQ ID NO: 17825 - DNA, 30 bp, Artificial Sequence
  Synthetic oligonucleotide
cactaaaaggaatgacgagcgttccgagga

SEQ ID NO: 17826 - DNA, 30 bp, Artificial Sequence
  Synthetic oligonucleotide
gcgatcatgatcataagcacgaaattagga

SEQ ID NO: 17827 - DNA, 30 bp, Artificial Sequence
  Synthetic oligonucleotide
ggcacaaacatcgataaaaccgtatacgga

SEQ ID NO: 17828 - DNA, 30 bp, Artificial Sequence
  Synthetic oligonucleotide
acggttcagagcaatagccagcgctacgga

SEQ ID NO: 17829 - DNA, 30 bp, Artificial Sequence
  Synthetic oligonucleotide
tagggaacacaaagatatgctctaatcgga

SEQ ID NO: 17830 - DNA, 30 bp, Artificial Sequence
  Synthetic oligonucleotide
cgataatatatgagcatagcaccgaaggga

SEQ ID NO: 17831 - DNA, 30 bp, Artificial Sequence
  Synthetic oligonucleotide
cgcggaggcaacagcttatcaccctaggga

SEQ ID NO: 17832 - DNA, 30 bp, Artificial Sequence
  Synthetic oligonucleotide
cgctagctcttcggcggcaaacaaggggga

SEQ ID NO: 17833 - DNA, 30 bp, Artificial Sequence
  Synthetic oligonucleotide
tcagacaattggaaaaacaggggcatggga

SEQ ID NO: 17834 - DNA, 30 bp, Artificial Sequence
  Synthetic oligonucleotide
agggatgcgaagaagcgtgttcatatggga

SEQ ID NO: 17835 - DNA, 30 bp, Artificial Sequence
  Synthetic oligonucleotide
agaaggagagtcagtataagagacaatgga

SEQ ID NO: 17836 - DNA, 31 bp, Artificial Sequence
  Synthetic oligonucleotide
caggcaaaaggcaattagatcaacaggtgga

SEQ ID NO: 17837 - DNA, 30 bp, Artificial Sequence
  Synthetic oligonucleotide
ggcgagcatgtgaaaaggggaacggaatga

SEQ ID NO: 17838 - DNA, 30 bp, Artificial Sequence
  Synthetic oligonucleotide
ccaaacacggaagtgcgcaagtatcgatga

SEQ ID NO: 17839 - DNA, 30 bp, Artificial Sequence
  Synthetic oligonucleotide
tcccaacaaatcgacacggaaaaggactga

SEQ ID NO: 17840 - DNA, 30 bp, Artificial Sequence
  Synthetic oligonucleotide
tcacgtaccagggcgaggggctattgctga

SEQ ID NO: 17841 - DNA, 30 bp, Artificial Sequence
  Synthetic oligonucleotide
cgacacagcttagtagccggatcagtctga

SEQ ID NO: 17842 - DNA, 30 bp, Artificial Sequence
  Synthetic oligonucleotide
gggcagaaacgatcagtacacaatcagtga

SEQ ID NO: 17843 - DNA, 30 bp, Artificial Sequence
  Synthetic oligonucleotide
ctggacaaagacaaaccggccagcacgtga

SEQ ID NO: 17844 - DNA, 30 bp, Artificial Sequence
  Synthetic oligonucleotide
tgacgagaggtccgagactaaactaggtga

SEQ ID NO: 17845 - DNA, 30 bp, Artificial Sequence
  Synthetic oligonucleotide
ctagcgcacacaacatggaagggacggtga

SEQ ID NO: 17846 - DNA, 30 bp, Artificial Sequence
  Synthetic oligonucleotide
ggcaggcaactcggaccgactgaagtgtga

SEQ ID NO: 17847 - DNA, 30 bp, Artificial Sequence
  Synthetic oligonucleotide
ggacaggaacagcgaacatagaactgaata

SEQ ID NO: 17848 - DNA, 30 bp, Artificial Sequence
  Synthetic oligonucleotide
gaccaagtggaaggaaagcccagaaacata

SEQ ID NO: 17849 - DNA, 30 bp, Artificial Sequence
  Synthetic oligonucleotide
acatagggtaccgatcgactaaaagacata

SEQ ID NO: 17850 - DNA, 30 bp, Artificial Sequence
  Synthetic oligonucleotide
acggcagacaaggagatcctagaaaccata

SEQ ID NO: 17851 - DNA, 30 bp, Artificial Sequence
  Synthetic oligonucleotide
acgaatgaagggccgggacgaaatcccata

SEQ ID NO: 17852 - DNA, 30 bp, Artificial Sequence
  Synthetic oligonucleotide
agacgatacacccagtccggagtggagata

SEQ ID NO: 17853 - DNA, 30 bp, Artificial Sequence
  Synthetic oligonucleotide
acgacttacagattctcgaacaatgcgata

SEQ ID NO: 17854 - DNA, 30 bp, Artificial Sequence
  Synthetic oligonucleotide
tgaggtgaaggatgagaagtatgggaacta

SEQ ID NO: 17855 - DNA, 30 bp, Artificial Sequence
  Synthetic oligonucleotide
gattggcggagaagtccagaaccagcacta

SEQ ID NO: 17856 - DNA, 30 bp, Artificial Sequence
  Synthetic oligonucleotide
caagaagcgtggcaggacagagtagtacta

SEQ ID NO: 17857 - DNA, 30 bp, Artificial Sequence
  Synthetic oligonucleotide
gcgtgcacgaccatgaaggaaatgttacta

SEQ ID NO: 17858 - DNA, 30 bp, Artificial Sequence
  Synthetic oligonucleotide
ggacgtggagacccaaaggaggtcaaccta

SEQ ID NO: 17859 - DNA, 30 bp, Artificial Sequence
  Synthetic oligonucleotide
catcatttgactaaaaggaagaaacgccta

SEQ ID NO: 17860 - DNA, 30 bp, Artificial Sequence
  Synthetic oligonucleotide
aggcaatcgacacacgaaaaattgatccta

SEQ ID NO: 17861 - DNA, 30 bp, Artificial Sequence
  Synthetic oligonucleotide
actatgcgaacgaaaatggagccagaagta

SEQ ID NO: 17862 - DNA, 30 bp, Artificial Sequence
  Synthetic oligonucleotide
tagcgggtccagggaagagattcaggagta

SEQ ID NO: 17863 - DNA, 30 bp, Artificial Sequence
  Synthetic oligonucleotide
acacgcaccgtaggaaggcgtcgactagta

SEQ ID NO: 17864 - DNA, 30 bp, Artificial Sequence
  Synthetic oligonucleotide
gacacgatataatagcaggatccacccgta

SEQ ID NO: 17865 - DNA, 30 bp, Artificial Sequence
  Synthetic oligonucleotide
caagaacgaaatacggaaacccgaagcgta

SEQ ID NO: 17866 - DNA, 30 bp, Artificial Sequence
  Synthetic oligonucleotide
tggcacggggaaatagatcagggtatcgta

SEQ ID NO: 17867 - DNA, 30 bp, Artificial Sequence
  Synthetic oligonucleotide
ggtacagtacagagtgagtggggggaggta

SEQ ID NO: 17868 - DNA, 30 bp, Artificial Sequence
  Synthetic oligonucleotide
cgatgaggggcaagcagcagttaataggta

SEQ ID NO: 17869 - DNA, 30 bp, Artificial Sequence
  Synthetic oligonucleotide
aggaagactaaagtaccacgcgcggtggta

SEQ ID NO: 17870 - DNA, 30 bp, Artificial Sequence
  Synthetic oligonucleotide
agggacgtcttcgacacataaccgatatta

SEQ ID NO: 17871 - DNA, 30 bp, Artificial Sequence
  Synthetic oligonucleotide
taaagaaaggcggtagaaatgtagcagtta

SEQ ID NO: 17872 - DNA, 30 bp, Artificial Sequence
  Synthetic oligonucleotide
cgccaccgactaaaaaaccagcgctagtta

SEQ ID NO: 17873 - DNA, 30 bp, Artificial Sequence
  Synthetic oligonucleotide
taactgcgagtgaaagcaaaggctcaaaac

SEQ ID NO: 17874 - DNA, 30 bp, Artificial Sequence
  Synthetic oligonucleotide
tgaggggaataaagggtgtaatgagaaaac

SEQ ID NO: 17875 - DNA, 30 bp, Artificial Sequence
  Synthetic oligonucleotide
taggaaagcacctgagaacgggacgaaaac

SEQ ID NO: 17876 - DNA, 30 bp, Artificial Sequence
  Synthetic oligonucleotide
cactaagcggacagtcgtgaataggcaaac

SEQ ID NO: 17877 - DNA, 30 bp, Artificial Sequence
  Synthetic oligonucleotide
tcacaatcgaaacgaagaagctagcgaaac

SEQ ID NO: 17878 - DNA, 30 bp, Artificial Sequence
  Synthetic oligonucleotide
agctgagtggaaactgcgccaccgagcaac

SEQ ID NO: 17879 - DNA, 30 bp, Artificial Sequence
  Synthetic oligonucleotide
tcggatcagagacaggggactccaccgaac

SEQ ID NO: 17880 - DNA, 30 bp, Artificial Sequence
  Synthetic oligonucleotide
aacgttgcgacgacccaaagggaatggaac

SEQ ID NO: 17881 - DNA, 30 bp, Artificial Sequence
  Synthetic oligonucleotide
aggaggatgtgcctatcggggaggtataac

SEQ ID NO: 17882 - DNA, 31 bp, Artificial Sequence
  Synthetic oligonucleotide
agagcgggagagaacatgcggtacctctaac

SEQ ID NO: 17883 - DNA, 30 bp, Artificial Sequence
  Synthetic oligonucleotide
ccaaccaaagcggaattaaggcggtcacac

SEQ ID NO: 17884 - DNA, 30 bp, Artificial Sequence
  Synthetic oligonucleotide
aaacgtcaaagctcgagccgagtagcgcac

SEQ ID NO: 17885 - DNA, 30 bp, Artificial Sequence
  Synthetic oligonucleotide
tgcgtcaggaaaagcctaggaacaacagac

SEQ ID NO: 17886 - DNA, 30 bp, Artificial Sequence
  Synthetic oligonucleotide
acggaagtgtacacgctcctacaaccagac

SEQ ID NO: 17887 - DNA, 29 bp, Artificial Sequence
  Synthetic oligonucleotide
cacagtacggcgagcaaacggggccagac

SEQ ID NO: 17888 - DNA, 30 bp, Artificial Sequence
  Synthetic oligonucleotide
aacggccaaacaagggggaaccaacgagac

SEQ ID NO: 17889 - DNA, 30 bp, Artificial Sequence
  Synthetic oligonucleotide
actatggcaatggagggaccaacactagac

SEQ ID NO: 17890 - DNA, 30 bp, Artificial Sequence
  Synthetic oligonucleotide
ccgatacaccgatcgagccaaggaaacgac

SEQ ID NO: 17891 - DNA, 30 bp, Artificial Sequence
  Synthetic oligonucleotide
tggagcccgaaggcaagttggaggcacgac

SEQ ID NO: 17892 - DNA, 30 bp, Artificial Sequence
  Synthetic oligonucleotide
ctgggaaggtccatagagatgacccgcgac

SEQ ID NO: 17893 - DNA, 30 bp, Artificial Sequence
  Synthetic oligonucleotide
cactagagggaaaaaggggtgacagcggac

SEQ ID NO: 17894 - DNA, 30 bp, Artificial Sequence
  Synthetic oligonucleotide
acaacatagcgcggaggggtgcaagtggac

SEQ ID NO: 17895 - DNA, 30 bp, Artificial Sequence
  Synthetic oligonucleotide
gcaaggtagcagtgaactataccaggtgac

SEQ ID NO: 17896 - DNA, 30 bp, Artificial Sequence
  Synthetic oligonucleotide
gaggagaagagcgaaaccgcacctaattac

SEQ ID NO: 17897 - DNA, 30 bp, Artificial Sequence
  Synthetic oligonucleotide
gcgggaacggggggccgactgctcgaaacc

SEQ ID NO: 17898 - DNA, 30 bp, Artificial Sequence
  Synthetic oligonucleotide
agaagagtgagatcgagggtgagaccaacc

SEQ ID NO: 17899 - DNA, 30 bp, Artificial Sequence
  Synthetic oligonucleotide
ggcgaacggatgaatagctcgcacagcacc

SEQ ID NO: 17900 - DNA, 30 bp, Artificial Sequence
  Synthetic oligonucleotide
gatcagaaggacttgaaagaaggaatcacc

SEQ ID NO: 17901 - DNA, 30 bp, Artificial Sequence
  Synthetic oligonucleotide
tcttagaacaggacacattagatcgtcacc

SEQ ID NO: 17902 - DNA, 30 bp, Artificial Sequence
  Synthetic oligonucleotide
cgtcatcgtgccgagggatgggatgtcacc

SEQ ID NO: 17903 - DNA, 30 bp, Artificial Sequence
  Synthetic oligonucleotide
acagcatgaatcatgcaaagacaacgtacc

SEQ ID NO: 17904 - DNA, 30 bp, Artificial Sequence
  Synthetic oligonucleotide
acgtagcgcaaacagaacgtcgcttagccc

SEQ ID NO: 17905 - DNA, 30 bp, Artificial Sequence
  Synthetic oligonucleotide
aagggagcaataccggaggtcgacgtggcc

SEQ ID NO: 17906 - DNA, 30 bp, Artificial Sequence
  Synthetic oligonucleotide
caagcgcaaggcaaatgggacgaggctgcc

SEQ ID NO: 17907 - DNA, 30 bp, Artificial Sequence
  Synthetic oligonucleotide
acggaaagggaccctgatagtgacagatcc

SEQ ID NO: 17908 - DNA, 30 bp, Artificial Sequence
  Synthetic oligonucleotide
aggagaacgggacatacatagaaggtatcc

SEQ ID NO: 17909 - DNA, 30 bp, Artificial Sequence
  Synthetic oligonucleotide
ccgatgcgcggggggaaaagacgtgagtcc

SEQ ID NO: 17910 - DNA, 30 bp, Artificial Sequence
  Synthetic oligonucleotide
atgggaggggaacgatcatagcagcattcc

SEQ ID NO: 17911 - DNA, 30 bp, Artificial Sequence
  Synthetic oligonucleotide
taacgcgaatccgtcacgccaaagacaagc

SEQ ID NO: 17912 - DNA, 30 bp, Artificial Sequence
  Synthetic oligonucleotide
ggcgagggcgcgtctcaaaggaatgcaagc

SEQ ID NO: 17913 - DNA, 30 bp, Artificial Sequence
  Synthetic oligonucleotide
ttaggaaacaggccaaaattgagattaagc

SEQ ID NO: 17914 - DNA, 30 bp, Artificial Sequence
  Synthetic oligonucleotide
tggattagagtggaggatacgacgaacagc

SEQ ID NO: 17915 - DNA, 30 bp, Artificial Sequence
  Synthetic oligonucleotide
accgaggtagggagcgtccgtagcagcagc

SEQ ID NO: 17916 - DNA, 30 bp, Artificial Sequence
  Synthetic oligonucleotide
caagaagtcgtacagatggggatggtcagc

SEQ ID NO: 17917 - DNA, 30 bp, Artificial Sequence
  Synthetic oligonucleotide
agcaggaatgattatagaacaacccagagc

SEQ ID NO: 17918 - DNA, 30 bp, Artificial Sequence
  Synthetic oligonucleotide
acgaaagtcgccagagcccagtaatcgagc

SEQ ID NO: 17919 - DNA, 30 bp, Artificial Sequence
  Synthetic oligonucleotide
gtgaaggcacaaccgggggataagaatagc

SEQ ID NO: 17920 - DNA, 30 bp, Artificial Sequence
  Synthetic oligonucleotide
cagataaagggtaccggtccagaaacgcgc

SEQ ID NO: 17921 - DNA, 30 bp, Artificial Sequence
  Synthetic oligonucleotide
gcgagggagaagctaggatgagcaattcgc

SEQ ID NO: 17922 - DNA, 30 bp, Artificial Sequence
  Synthetic oligonucleotide
tgagcgggtagcggctaccgatcaacaggc

SEQ ID NO: 17923 - DNA, 30 bp, Artificial Sequence
  Synthetic oligonucleotide
cgaacaacaggtaagcaaccgagactaggc

SEQ ID NO: 17924 - DNA, 30 bp, Artificial Sequence
  Synthetic oligonucleotide
tgattagaacaagctcacgaggggaacggc

SEQ ID NO: 17925 - DNA, 30 bp, Artificial Sequence
  Synthetic oligonucleotide
aacagaagtgagatgtaggggaaaaatggc

SEQ ID NO: 17926 - DNA, 30 bp, Artificial Sequence
  Synthetic oligonucleotide
taacgagggatgagaacctaccgccttggc

SEQ ID NO: 17927 - DNA, 30 bp, Artificial Sequence
  Synthetic oligonucleotide
cgagggtgcgggtagcttaaagtcgttggc

SEQ ID NO: 17928 - DNA, 30 bp, Artificial Sequence
  Synthetic oligonucleotide
gaagggatatggcgataactgtctcaatgc

SEQ ID NO: 17929 - DNA, 30 bp, Artificial Sequence
  Synthetic oligonucleotide
cacaaaggtaagctgaaaaactatgaatgc

SEQ ID NO: 17930 - DNA, 30 bp, Artificial Sequence
  Synthetic oligonucleotide
acggatataaggtgcttgcaaaaggcatgc

SEQ ID NO: 17931 - DNA, 31 bp, Artificial Sequence
  Synthetic oligonucleotide
ccgcatagaaggcctcaaatatgagggatgc

SEQ ID NO: 17932 - DNA, 30 bp, Artificial Sequence
  Synthetic oligonucleotide
gatgaggatccaaacggatggtgaaactgc

SEQ ID NO: 17933 - DNA, 30 bp, Artificial Sequence
  Synthetic oligonucleotide
tcgcaaaaatcgtcaactgaatcgtgctgc

SEQ ID NO: 17934 - DNA, 30 bp, Artificial Sequence
  Synthetic oligonucleotide
tcatgaacatcatagagggcatacgtctgc

SEQ ID NO: 17935 - DNA, 30 bp, Artificial Sequence
  Synthetic oligonucleotide
acgtggatgtaatacactaatgaaatgtgc

SEQ ID NO: 17936 - DNA, 30 bp, Artificial Sequence
  Synthetic oligonucleotide
tcggcgtgcgagagagagaagtcccattgc

SEQ ID NO: 17937 - DNA, 30 bp, Artificial Sequence
  Synthetic oligonucleotide
cacaacaaaaggaggtcccacgggcattgc

SEQ ID NO: 17938 - DNA, 30 bp, Artificial Sequence
  Synthetic oligonucleotide
agggacctgtgaactgaagccgaatgttgc

SEQ ID NO: 17939 - DNA, 30 bp, Artificial Sequence
  Synthetic oligonucleotide
agaagataccataggggaacagggtgcctc

SEQ ID NO: 17940 - DNA, 30 bp, Artificial Sequence
  Synthetic oligonucleotide
tcagctccgatgggagaaagaataaagctc

SEQ ID NO: 17941 - DNA, 30 bp, Artificial Sequence
  Synthetic oligonucleotide
acaccaacggaccaccagtgggatcagctc

SEQ ID NO: 17942 - DNA, 30 bp, Artificial Sequence
  Synthetic oligonucleotide
aggtcagtgaaagaacaagacggcaaagtc

SEQ ID NO: 17943 - DNA, 30 bp, Artificial Sequence
  Synthetic oligonucleotide
ctggagccagtgaagagacacacagacgtc

SEQ ID NO: 17944 - DNA, 30 bp, Artificial Sequence
  Synthetic oligonucleotide
gggagaagtatagccgcaacccgtgacgtc

SEQ ID NO: 17945 - DNA, 30 bp, Artificial Sequence
  Synthetic oligonucleotide
tcgggcggggtgaaaagaacagttgtgttc

SEQ ID NO: 17946 - DNA, 30 bp, Artificial Sequence
  Synthetic oligonucleotide
cacgtgggcaggatactctgttccgaaaag

SEQ ID NO: 17947 - DNA, 30 bp, Artificial Sequence
  Synthetic oligonucleotide
cattcagatgagcaagcgaacagcgaaaag

SEQ ID NO: 17948 - DNA, 30 bp, Artificial Sequence
  Synthetic oligonucleotide
gtcgaaacatgtcaaaggtatcatacaaag

SEQ ID NO: 17949 - DNA, 30 bp, Artificial Sequence
  Synthetic oligonucleotide
agcgggatctgtgaagaggatgctacaaag

SEQ ID NO: 17950 - DNA, 30 bp, Artificial Sequence
  Synthetic oligonucleotide
cggtctaaatatacaggtaatacgagaaag

SEQ ID NO: 17951 - DNA, 30 bp, Artificial Sequence
  Synthetic oligonucleotide
acgtaaatattgaagatccgtaacgtaaag

SEQ ID NO: 17952 - DNA, 30 bp, Artificial Sequence
  Synthetic oligonucleotide
ctaaagaacggagagcgcatctgcttaaag

SEQ ID NO: 17953 - DNA, 30 bp, Artificial Sequence
  Synthetic oligonucleotide
cgcaaaaaaacacgacacccgaaaaacaag

SEQ ID NO: 17954 - DNA, 30 bp, Artificial Sequence
  Synthetic oligonucleotide
tcctggaaactcactaggacttaagacaag

SEQ ID NO: 17955 - DNA, 30 bp, Artificial Sequence
  Synthetic oligonucleotide
caatcggggagtgaggtaaatggttacaag

SEQ ID NO: 17956 - DNA, 30 bp, Artificial Sequence
  Synthetic oligonucleotide
gggcgagccaatgaacggtattggaccaag

SEQ ID NO: 17957 - DNA, 30 bp, Artificial Sequence
  Synthetic oligonucleotide
agcgtatccaaggggagtgtaccgagcaag

SEQ ID NO: 17958 - DNA, 30 bp, Artificial Sequence
  Synthetic oligonucleotide
cgctccgagacgtggtcagcgagtagcaag

SEQ ID NO: 17959 - DNA, 30 bp, Artificial Sequence
  Synthetic oligonucleotide
cgataagtggaactcgtggttaaaggcaag

SEQ ID NO: 17960 - DNA, 30 bp, Artificial Sequence
  Synthetic oligonucleotide
cgccggaaagcgatgcggatagggggcaag

SEQ ID NO: 17961 - DNA, 30 bp, Artificial Sequence
  Synthetic oligonucleotide
acggctgaatggtaagcggggttgtgcaag

SEQ ID NO: 17962 - DNA, 30 bp, Artificial Sequence
  Synthetic oligonucleotide
agacaggttgtatgaacaacaccaatcaag

SEQ ID NO: 17963 - DNA, 30 bp, Artificial Sequence
  Synthetic oligonucleotide
tggcctaaatgggaccatcttgaagagaag

SEQ ID NO: 17964 - DNA, 30 bp, Artificial Sequence
  Synthetic oligonucleotide
gaagccaggggggagaggtactgctcgaag

SEQ ID NO: 17965 - DNA, 30 bp, Artificial Sequence
  Synthetic oligonucleotide
ggatgtaatccatctagcgagaaaaggaag

SEQ ID NO: 17966 - DNA, 30 bp, Artificial Sequence
  Synthetic oligonucleotide
tacagataacgcaactggggtataaggaag

SEQ ID NO: 17967 - DNA, 30 bp, Artificial Sequence
  Synthetic oligonucleotide
gggagcaacaatcggacaggtatgaggaag

SEQ ID NO: 17968 - DNA, 30 bp, Artificial Sequence
  Synthetic oligonucleotide
ccgtaggaaggtggtcgtcccacggggaag

SEQ ID NO: 17969 - DNA, 30 bp, Artificial Sequence
  Synthetic oligonucleotide
ctcacagctgtaaggtagataacgatgaag

SEQ ID NO: 17970 - DNA, 30 bp, Artificial Sequence
  Synthetic oligonucleotide
ctacgcctcgcggagcaaaagatcaataag

SEQ ID NO: 17971 - DNA, 30 bp, Artificial Sequence
  Synthetic oligonucleotide
ctatgcagagatcaggccgagatgaataag

SEQ ID NO: 17972 - DNA, 30 bp, Artificial Sequence
  Synthetic oligonucleotide
gggaacaacccgaaaaaggctcgtcataag

SEQ ID NO: 17973 - DNA, 30 bp, Artificial Sequence
  Synthetic oligonucleotide
cgtgaatggaatcgaagctctggtcataag

SEQ ID NO: 17974 - DNA, 30 bp, Artificial Sequence
  Synthetic oligonucleotide
atcacacagggtaatgagtgactcactaag

SEQ ID NO: 17975 - DNA, 30 bp, Artificial Sequence
  Synthetic oligonucleotide
tcgtttacataagagagcataaaccgtaag

SEQ ID NO: 17976 - DNA, 30 bp, Artificial Sequence
  Synthetic oligonucleotide
aaggacaaagcgacacggtacgcatgtaag

SEQ ID NO: 17977 - DNA, 30 bp, Artificial Sequence
  Synthetic oligonucleotide
catgaggaaaacaggatctaatacgttaag

SEQ ID NO: 17978 - DNA, 30 bp, Artificial Sequence
  Synthetic oligonucleotide
taagccaatcaccaaaagaccgagtttaag

SEQ ID NO: 17979 - DNA, 30 bp, Artificial Sequence
  Synthetic oligonucleotide
caaagaatacggaagtggatccgaaaacag

SEQ ID NO: 17980 - DNA, 30 bp, Artificial Sequence
  Synthetic oligonucleotide
acgacgaagcaatataacgagatccaacag

SEQ ID NO: 17981 - DNA, 30 bp, Artificial Sequence
  Synthetic oligonucleotide
tctagtcgttcagaagaagtagaagaacag

SEQ ID NO: 17982 - DNA, 30 bp, Artificial Sequence
  Synthetic oligonucleotide
tcataccttcacgacggcaagggagaacag

SEQ ID NO: 17983 - DNA, 30 bp, Artificial Sequence
  Synthetic oligonucleotide
gcaacgacactataaaaacttcaagcacag

SEQ ID NO: 17984 - DNA, 31 bp, Artificial Sequence
  Synthetic oligonucleotide
gaagaaagctccaacttatcgattaagacag

SEQ ID NO: 17985 - DNA, 30 bp, Artificial Sequence
  Synthetic oligonucleotide
gttgagcgcgatctatgaagtgacagacag

SEQ ID NO: 17986 - DNA, 30 bp, Artificial Sequence
  Synthetic oligonucleotide
ggagcatcatagggagcagggattcgacag

SEQ ID NO: 17987 - DNA, 30 bp, Artificial Sequence
  Synthetic oligonucleotide
agacgtgttaggaaagacgtaatgtgacag

SEQ ID NO: 17988 - DNA, 30 bp, Artificial Sequence
  Synthetic oligonucleotide
acgattcgaggatcgtagtcagccgtacag

SEQ ID NO: 17989 - DNA, 30 bp, Artificial Sequence
  Synthetic oligonucleotide
ctagagaaacgctattgacagagagaccag

SEQ ID NO: 17990 - DNA, 30 bp, Artificial Sequence
  Synthetic oligonucleotide
cacgagaaagctgaggacccacaaacccag

SEQ ID NO: 17991 - DNA, 30 bp, Artificial Sequence
  Synthetic oligonucleotide
caacgtaagggtggagcagacccgccccag

SEQ ID NO: 17992 - DNA, 30 bp, Artificial Sequence
  Synthetic oligonucleotide
aggaaccacgaggaggcggggggagcccag

SEQ ID NO: 17993 - DNA, 30 bp, Artificial Sequence
  Synthetic oligonucleotide
tacggataaccgagagcgacctaacgccag

SEQ ID NO: 17994 - DNA, 30 bp, Artificial Sequence
  Synthetic oligonucleotide
ttcagaaggcaggtagctcgattgcgccag

SEQ ID NO: 17995 - DNA, 30 bp, Artificial Sequence
  Synthetic oligonucleotide
taagatagtatgagcgagaatggcatccag

SEQ ID NO: 17996 - DNA, 30 bp, Artificial Sequence
  Synthetic oligonucleotide
taaacggaatcttatccgatcacgatccag

SEQ ID NO: 17997 - DNA, 30 bp, Artificial Sequence
  Synthetic oligonucleotide
ggcatgccgggtcgccaacgagatcagcag

SEQ ID NO: 17998 - DNA, 30 bp, Artificial Sequence
  Synthetic oligonucleotide
gcgtgactttaccgaaagagtgcaacgcag

SEQ ID NO: 17999 - DNA, 30 bp, Artificial Sequence
  Synthetic oligonucleotide
ccgagcatatcagcctaaagtgagctgcag

SEQ ID NO: 18000 - DNA, 30 bp, Artificial Sequence
  Synthetic oligonucleotide
caccgagatacaacgaacctccgtcgtcag

SEQ ID NO: 18001 - DNA, 30 bp, Artificial Sequence
  Synthetic oligonucleotide
accgtgaggcaaggatataagctcggtcag

SEQ ID NO: 18002 - DNA, 30 bp, Artificial Sequence
  Synthetic oligonucleotide
gagcgtaagtaaaaactgagccacaaagag

SEQ ID NO: 18003 - DNA, 30 bp, Artificial Sequence
  Synthetic oligonucleotide
gcaggtggagagtgcgacggagttaaagag

SEQ ID NO: 18004 - DNA, 30 bp, Artificial Sequence
  Synthetic oligonucleotide
agtcggatgataacgaaacaacagcaagag

SEQ ID NO: 18005 - DNA, 30 bp, Artificial Sequence
  Synthetic oligonucleotide
cctaaaatgtgatggcgagtaagagaagag

SEQ ID NO: 18006 - DNA, 30 bp, Artificial Sequence
  Synthetic oligonucleotide
acgagacaattttcattcatcgacagagag

SEQ ID NO: 18007 - DNA, 30 bp, Artificial Sequence
  Synthetic oligonucleotide
actgagggatagttgagtagaaatcgagag

SEQ ID NO: 18008 - DNA, 30 bp, Artificial Sequence
  Synthetic oligonucleotide
gagacaaagggaagtcaatcatatatagag

SEQ ID NO: 18009 - DNA, 30 bp, Artificial Sequence
  Synthetic oligonucleotide
ggataacgtttaaacaaaagccgattagag

SEQ ID NO: 18010 - DNA, 30 bp, Artificial Sequence
  Synthetic oligonucleotide
aagagagcaatgtggatccagccgttagag

SEQ ID NO: 18011 - DNA, 30 bp, Artificial Sequence
  Synthetic oligonucleotide
tcgtaccgatcggaaaaagagttggccgag

SEQ ID NO: 18012 - DNA, 30 bp, Artificial Sequence
  Synthetic oligonucleotide
cgattgtgcggagttacaatcctatccgag

SEQ ID NO: 18013 - DNA, 30 bp, Artificial Sequence
  Synthetic oligonucleotide
aggtccgttatctgttgagagctaagcgag

SEQ ID NO: 18014 - DNA, 30 bp, Artificial Sequence
  Synthetic oligonucleotide
tcatggatataaaagacagatcctagcgag

SEQ ID NO: 18015 - DNA, 30 bp, Artificial Sequence
  Synthetic oligonucleotide
cgtcaccagtatagtggaaaagctggcgag

SEQ ID NO: 18016 - DNA, 30 bp, Artificial Sequence
  Synthetic oligonucleotide
atgtccacactggatctcaagaatctcgag

SEQ ID NO: 18017 - DNA, 30 bp, Artificial Sequence
  Synthetic oligonucleotide
atgagggagaggatataatcccacgtcgag

SEQ ID NO: 18018 - DNA, 30 bp, Artificial Sequence
  Synthetic oligonucleotide
ctccgcgaaccgacgatgtacaagaaggag

SEQ ID NO: 18019 - DNA, 30 bp, Artificial Sequence
  Synthetic oligonucleotide
caggatcctgaataacgcaatgtccaggag

SEQ ID NO: 18020 - DNA, 30 bp, Artificial Sequence
  Synthetic oligonucleotide
tgcgactaagtcgatgaaactttggaggag

SEQ ID NO: 18021 - DNA, 30 bp, Artificial Sequence
  Synthetic oligonucleotide
cgcagtggtgcaagtattgatgcataggag

SEQ ID NO: 18022 - DNA, 30 bp, Artificial Sequence
  Synthetic oligonucleotide
caagacgatctttgactacaagggtaggag

SEQ ID NO: 18023 - DNA, 30 bp, Artificial Sequence
  Synthetic oligonucleotide
tcgacaattggggatcgcgtatagtcggag

SEQ ID NO: 18024 - DNA, 30 bp, Artificial Sequence
  Synthetic oligonucleotide
aaggccgtgagggcgagttgaacaagggag

SEQ ID NO: 18025 - DNA, 30 bp, Artificial Sequence
  Synthetic oligonucleotide
cgcacgagatcaggatagcccccgggggag

SEQ ID NO: 18026 - DNA, 30 bp, Artificial Sequence
  Synthetic oligonucleotide
cgacgcgcttagtccacactagattgggag

SEQ ID NO: 18027 - DNA, 30 bp, Artificial Sequence
  Synthetic oligonucleotide
tgagtagtaggaccaatggacagtcctgag

SEQ ID NO: 18028 - DNA, 30 bp, Artificial Sequence
  Synthetic oligonucleotide
gcgataatctgggcccgtgaaagaggtgag

SEQ ID NO: 18029 - DNA, 30 bp, Artificial Sequence
  Synthetic oligonucleotide
ccgtaagaagtgtcaccgcgctgggttgag

SEQ ID NO: 18030 - DNA, 30 bp, Artificial Sequence
  Synthetic oligonucleotide
ccgcaactggcacatgtaaacgaatttgag

SEQ ID NO: 18031 - DNA, 30 bp, Artificial Sequence
  Synthetic oligonucleotide
acaagaagccaggggagagagacctttgag

SEQ ID NO: 18032 - DNA, 30 bp, Artificial Sequence
  Synthetic oligonucleotide
agctggaacctgtggcaacaaggccaatag

SEQ ID NO: 18033 - DNA, 30 bp, Artificial Sequence
  Synthetic oligonucleotide
ataccgaacgaaagcggtgatacgccatag

SEQ ID NO: 18034 - DNA, 30 bp, Artificial Sequence
  Synthetic oligonucleotide
gcggcaggctctgaggaaattactccatag

SEQ ID NO: 18035 - DNA, 30 bp, Artificial Sequence
  Synthetic oligonucleotide
gttcgtaaaggacaacctgagtaccgatag

SEQ ID NO: 18036 - DNA, 30 bp, Artificial Sequence
  Synthetic oligonucleotide
ccacgaaaggaacgtggtataatacactag

SEQ ID NO: 18037 - DNA, 30 bp, Artificial Sequence
  Synthetic oligonucleotide
atgggggtgaaggaagagcccgtccactag

SEQ ID NO: 18038 - DNA, 30 bp, Artificial Sequence
  Synthetic oligonucleotide
ttgttgtgttctctttttgtgttttcctag

SEQ ID NO: 18039 - DNA, 30 bp, Artificial Sequence
  Synthetic oligonucleotide
cgcagaaacgtcgtgtcgcgaggagagtag

SEQ ID NO: 18040 - DNA, 30 bp, Artificial Sequence
  Synthetic oligonucleotide
gtggatcgtagataagtagaagatcaaacg

SEQ ID NO: 18041 - DNA, 30 bp, Artificial Sequence
  Synthetic oligonucleotide
gatgaggacatcgggcgacataaggaaacg

SEQ ID NO: 18042 - DNA, 30 bp, Artificial Sequence
  Synthetic oligonucleotide
ggtatcctggtaacaaataagcaagtaacg

SEQ ID NO: 18043 - DNA, 30 bp, Artificial Sequence
  Synthetic oligonucleotide
ggccaatcaggtacaacgcgaaaatacacg

SEQ ID NO: 18044 - DNA, 30 bp, Artificial Sequence
  Synthetic oligonucleotide
tcgactaaggggaggaccagctagatcacg

SEQ ID NO: 18045 - DNA, 30 bp, Artificial Sequence
  Synthetic oligonucleotide
acataggaggatcgtatgaattcactcacg

SEQ ID NO: 18046 - DNA, 30 bp, Artificial Sequence
  Synthetic oligonucleotide
acgtagactcaggtgcaaaaggctctcacg

SEQ ID NO: 18047 - DNA, 30 bp, Artificial Sequence
  Synthetic oligonucleotide
ggctgtagagatcaagcaacataagtcacg

SEQ ID NO: 18048 - DNA, 30 bp, Artificial Sequence
  Synthetic oligonucleotide
aggaaagcgcgaaccgagaatgaccagacg

SEQ ID NO: 18049 - DNA, 30 bp, Artificial Sequence
  Synthetic oligonucleotide
taggacatatgggcgcctgaaaactagacg

SEQ ID NO: 18050 - DNA, 30 bp, Artificial Sequence
  Synthetic oligonucleotide
acggaagatgttgttgatccatgcgcgacg

SEQ ID NO: 18051 - DNA, 30 bp, Artificial Sequence
  Synthetic oligonucleotide
agctaactgacatgtcaaaagagatggacg

SEQ ID NO: 18052 - DNA, 30 bp, Artificial Sequence
  Synthetic oligonucleotide
ggcgaatattgagaataaaatacgagtacg

SEQ ID NO: 18053 - DNA, 30 bp, Artificial Sequence
  Synthetic oligonucleotide
cggaatatagcccagtctgagaaaggtacg

SEQ ID NO: 18054 - DNA, 30 bp, Artificial Sequence
  Synthetic oligonucleotide
ttgagaatgtgcccgacacagaaagaaccg

SEQ ID NO: 18055 - DNA, 30 bp, Artificial Sequence
  Synthetic oligonucleotide
tagcaaatcccaagtgtcgagtgcacaccg

SEQ ID NO: 18056 - DNA, 30 bp, Artificial Sequence
  Synthetic oligonucleotide
tcggtcataaggcatggggtgcgagtaccg

SEQ ID NO: 18057 - DNA, 30 bp, Artificial Sequence
  Synthetic oligonucleotide
acgagcattcgtaatcaaaaggcgatcccg

SEQ ID NO: 18058 - DNA, 30 bp, Artificial Sequence
  Synthetic oligonucleotide
acacccgtcgaagaacaccaatgtcagccg

SEQ ID NO: 18059 - DNA, 30 bp, Artificial Sequence
  Synthetic oligonucleotide
aagggcagtggcactctgtcatagtcgccg

SEQ ID NO: 18060 - DNA, 30 bp, Artificial Sequence
  Synthetic oligonucleotide
cagggtgagataaaagaaagaagtatgccg

SEQ ID NO: 18061 - DNA, 30 bp, Artificial Sequence
  Synthetic oligonucleotide
tgagacaaaaaatcgggctgaaaagtgccg

SEQ ID NO: 18062 - DNA, 30 bp, Artificial Sequence
  Synthetic oligonucleotide
tgagggcaaagggcgagctcggaattgccg

SEQ ID NO: 18063 - DNA, 30 bp, Artificial Sequence
  Synthetic oligonucleotide
aaggagtaggaaagtacgaggaccttgccg

SEQ ID NO: 18064 - DNA, 30 bp, Artificial Sequence
  Synthetic oligonucleotide
agggctgagaagcagggcatgacatatccg

SEQ ID NO: 18065 - DNA, 30 bp, Artificial Sequence
  Synthetic oligonucleotide
caacgccgaaagaggcctatgcaggaagcg

SEQ ID NO: 18066 - DNA, 30 bp, Artificial Sequence
  Synthetic oligonucleotide
aacgaacataagataaaaccccggtaagcg

SEQ ID NO: 18067 - DNA, 30 bp, Artificial Sequence
  Synthetic oligonucleotide
ggtggaaagtcataattagagggatgagcg

SEQ ID NO: 18068 - DNA, 30 bp, Artificial Sequence
  Synthetic oligonucleotide
taacaaaaggtgacaagagaaacccacgcg

SEQ ID NO: 18069 - DNA, 30 bp, Artificial Sequence
  Synthetic oligonucleotide
acttcacaaacaaaatggaaaataatcgcg

SEQ ID NO: 18070 - DNA, 30 bp, Artificial Sequence
  Synthetic oligonucleotide
cgtttaatgagagttacaagagaagtcgcg

SEQ ID NO: 18071 - DNA, 30 bp, Artificial Sequence
  Synthetic oligonucleotide
ctgggagggcgaccatatgcaaaccaggcg

SEQ ID NO: 18072 - DNA, 30 bp, Artificial Sequence
  Synthetic oligonucleotide
ctgaaggaaggagcgcataaattatcggcg

SEQ ID NO: 18073 - DNA, 30 bp, Artificial Sequence
  Synthetic oligonucleotide
cggcaaaatgttattggcgaagctgtggcg

SEQ ID NO: 18074 - DNA, 30 bp, Artificial Sequence
  Synthetic oligonucleotide
agggaagcagtccgaaccgcccaaactgcg

SEQ ID NO: 18075 - DNA, 30 bp, Artificial Sequence
  Synthetic oligonucleotide
acgcgtgaacatattgatagtaccactgcg

SEQ ID NO: 18076 - DNA, 30 bp, Artificial Sequence
  Synthetic oligonucleotide
acgtccaacacaagtataccggacattgcg

SEQ ID NO: 18077 - DNA, 30 bp, Artificial Sequence
  Synthetic oligonucleotide
tcagataacgagtaaaggatacatgttgcg

SEQ ID NO: 18078 - DNA, 30 bp, Artificial Sequence
  Synthetic oligonucleotide
tactaccaagcgatggacaaacaataatcg

SEQ ID NO: 18079 - DNA, 30 bp, Artificial Sequence
  Synthetic oligonucleotide
cagtctgaagtcgagaagggaaaagactcg

SEQ ID NO: 18080 - DNA, 30 bp, Artificial Sequence
  Synthetic oligonucleotide
ccgacacaggctacttcctacaacgagtcg

SEQ ID NO: 18081 - DNA, 30 bp, Artificial Sequence
  Synthetic oligonucleotide
gtaagctaatcaggaagttggggcacgtcg

SEQ ID NO: 18082 - DNA, 30 bp, Artificial Sequence
  Synthetic oligonucleotide
ggcagttgaaaaatgggtaaagtagggtcg

SEQ ID NO: 18083 - DNA, 30 bp, Artificial Sequence
  Synthetic oligonucleotide
ttaggagaacgtttcagaaaaaagcattcg

SEQ ID NO: 18084 - DNA, 30 bp, Artificial Sequence
  Synthetic oligonucleotide
agtagtgtgcggagctgggacatcacttcg

SEQ ID NO: 18085 - DNA, 30 bp, Artificial Sequence
  Synthetic oligonucleotide
tcgatacgggaatgttcgatccatacttcg

SEQ ID NO: 18086 - DNA, 30 bp, Artificial Sequence
  Synthetic oligonucleotide
tctagcacgccatgactgccgaacaaaagg

SEQ ID NO: 18087 - DNA, 30 bp, Artificial Sequence
  Synthetic oligonucleotide
taacgcatagaagtcgtcttatacacaagg

SEQ ID NO: 18088 - DNA, 30 bp, Artificial Sequence
  Synthetic oligonucleotide
agagaaaacgatgacagacagtgctacagg

SEQ ID NO: 18089 - DNA, 30 bp, Artificial Sequence
  Synthetic oligonucleotide
aaggtaagtgcgccgaaaggcgtaaccagg

SEQ ID NO: 18090 - DNA, 30 bp, Artificial Sequence
  Synthetic oligonucleotide
cggtagtaaagaatctgcctacgcaccagg

SEQ ID NO: 18091 - DNA, 30 bp, Artificial Sequence
  Synthetic oligonucleotide
cgcggcttgaaaccctgatattagtccagg

SEQ ID NO: 18092 - DNA, 30 bp, Artificial Sequence
  Synthetic oligonucleotide
cgtggggtgtacggacctagacaatgcagg

SEQ ID NO: 18093 - DNA, 30 bp, Artificial Sequence
  Synthetic oligonucleotide
gccagacgaggcgcgccgaaagattgcagg

SEQ ID NO: 18094 - DNA, 30 bp, Artificial Sequence
  Synthetic oligonucleotide
catcgtaaggtaagtgacagagggcagagg

SEQ ID NO: 18095 - DNA, 30 bp, Artificial Sequence
  Synthetic oligonucleotide
acaaggacagaaaggtcagtccctatgagg

SEQ ID NO: 18096 - DNA, 30 bp, Artificial Sequence
  Synthetic oligonucleotide
acacggcgtgtcgaaaaggctgagaatagg

SEQ ID NO: 18097 - DNA, 30 bp, Artificial Sequence
  Synthetic oligonucleotide
gtcgacagagatgtaaaggaaagcgctagg

SEQ ID NO: 18098 - DNA, 30 bp, Artificial Sequence
  Synthetic oligonucleotide
agacagtgatacctggaacaggcaagtagg

SEQ ID NO: 18099 - DNA, 30 bp, Artificial Sequence
  Synthetic oligonucleotide
tgacagacatcatcacgacggccgagtagg

SEQ ID NO: 18100 - DNA, 30 bp, Artificial Sequence
  Synthetic oligonucleotide
cgacgataaaagcgactgtcgccgtgtagg

SEQ ID NO: 18101 - DNA, 30 bp, Artificial Sequence
  Synthetic oligonucleotide
gggcagagccggaggtctagatgaattagg

SEQ ID NO: 18102 - DNA, 30 bp, Artificial Sequence
  Synthetic oligonucleotide
cgaggagaccaatgccgccagaaaaaacgg

SEQ ID NO: 18103 - DNA, 30 bp, Artificial Sequence
  Synthetic oligonucleotide
caatgaactaaaacggactagatccaacgg

SEQ ID NO: 18104 - DNA, 30 bp, Artificial Sequence
  Synthetic oligonucleotide
cgtgcgtcgggatgggggcatactgtacgg

SEQ ID NO: 18105 - DNA, 30 bp, Artificial Sequence
  Synthetic oligonucleotide
caatcgtatcgacatctccaagcactccgg

SEQ ID NO: 18106 - DNA, 30 bp, Artificial Sequence
  Synthetic oligonucleotide
cggcatgtatacacgggaaaaatacagcgg

SEQ ID NO: 18107 - DNA, 30 bp, Artificial Sequence
  Synthetic oligonucleotide
aaaagaaaggaggagaatatcacatcgcgg

SEQ ID NO: 18108 - DNA, 30 bp, Artificial Sequence
  Synthetic oligonucleotide
acggaagtaaaaaacttctcgattcggcgg

SEQ ID NO: 18109 - DNA, 30 bp, Artificial Sequence
  Synthetic oligonucleotide
agcgagagcacgtctatggagggctggcgg

SEQ ID NO: 18110 - DNA, 30 bp, Artificial Sequence
  Synthetic oligonucleotide
agggcatcgcacaaatggattgtatctcgg

SEQ ID NO: 18111 - DNA, 30 bp, Artificial Sequence
  Synthetic oligonucleotide
gtgctaaagagcccagtatagcgcgaaggg

SEQ ID NO: 18112 - DNA, 30 bp, Artificial Sequence
  Synthetic oligonucleotide
tcgccacagtataataatagaaagcgaggg

SEQ ID NO: 18113 - DNA, 30 bp, Artificial Sequence
  Synthetic oligonucleotide
aggactcctaatgaaaacagcatcggaggg

SEQ ID NO: 18114 - DNA, 30 bp, Artificial Sequence
  Synthetic oligonucleotide
agacacactctcgccacgaataccgtaggg

SEQ ID NO: 18115 - DNA, 30 bp, Artificial Sequence
  Synthetic oligonucleotide
gcaaagagagacatctcatccaccttaggg

SEQ ID NO: 18116 - DNA, 30 bp, Artificial Sequence
  Synthetic oligonucleotide
cggtaagtaaccataggaggcggggagggg

SEQ ID NO: 18117 - DNA, 30 bp, Artificial Sequence
  Synthetic oligonucleotide
aggatagagaaaaagttggtgacctagggg

SEQ ID NO: 18118 - DNA, 30 bp, Artificial Sequence
  Synthetic oligonucleotide
tggctgcaagaccagtaggagacatcgggg

SEQ ID NO: 18119 - DNA, 30 bp, Artificial Sequence
  Synthetic oligonucleotide
cgggaagaaatacatagagcgtgcactggg

SEQ ID NO: 18120 - DNA, 30 bp, Artificial Sequence
  Synthetic oligonucleotide
cgtcgtagtgacgaggagatgtatcgtggg

SEQ ID NO: 18121 - DNA, 30 bp, Artificial Sequence
  Synthetic oligonucleotide
gcggtaagcatgtggctgatcaggcttggg

SEQ ID NO: 18122 - DNA, 30 bp, Artificial Sequence
  Synthetic oligonucleotide
acaagaatgaatacggaaatggcggttggg

SEQ ID NO: 18123 - DNA, 30 bp, Artificial Sequence
  Synthetic oligonucleotide
gcgaaagaagataacacgactcgtgttggg

SEQ ID NO: 18124 - DNA, 30 bp, Artificial Sequence
  Synthetic oligonucleotide
ggtaggagttgctcaggcaaaagtaaatgg

SEQ ID NO: 18125 - DNA, 30 bp, Artificial Sequence
  Synthetic oligonucleotide
tacgcatacaaaggcgtgagtgtgcaatgg

SEQ ID NO: 18126 - DNA, 30 bp, Artificial Sequence
  Synthetic oligonucleotide
ggtgtcaacgccagtaagagtggataatgg

SEQ ID NO: 18127 - DNA, 30 bp, Artificial Sequence
  Synthetic oligonucleotide
cgagagtcaacgaagtgcatggcttaatgg

SEQ ID NO: 18128 - DNA, 30 bp, Artificial Sequence
  Synthetic oligonucleotide
cgagtaggcgaaatccgatgcatttaatgg

SEQ ID NO: 18129 - DNA, 30 bp, Artificial Sequence
  Synthetic oligonucleotide
tgagatcgaaccgtcccacgtcatagatgg

SEQ ID NO: 18130 - DNA, 30 bp, Artificial Sequence
  Synthetic oligonucleotide
ggcgagtagtgagagtaacatgtgatatgg

SEQ ID NO: 18131 - DNA, 30 bp, Artificial Sequence
  Synthetic oligonucleotide
aggattgcacaggaacacccaaccaactgg

SEQ ID NO: 18132 - DNA, 30 bp, Artificial Sequence
  Synthetic oligonucleotide
aagcggacccaactcccaaaacagacctgg

SEQ ID NO: 18133 - DNA, 30 bp, Artificial Sequence
  Synthetic oligonucleotide
gaagaagaccgtgagtcgaaatgtacttgg

SEQ ID NO: 18134 - DNA, 30 bp, Artificial Sequence
  Synthetic oligonucleotide
aaggggaaagtccgttagcattgggcttgg

SEQ ID NO: 18135 - DNA, 30 bp, Artificial Sequence
  Synthetic oligonucleotide
gcggagtcgggaaagagaacgtgcagttgg

SEQ ID NO: 18136 - DNA, 30 bp, Artificial Sequence
  Synthetic oligonucleotide
agcggatggcccccctgtcgcaaaaaaatg

SEQ ID NO: 18137 - DNA, 30 bp, Artificial Sequence
  Synthetic oligonucleotide
gcttccgaggctgaatggcaagtaaaaatg

SEQ ID NO: 18138 - DNA, 30 bp, Artificial Sequence
  Synthetic oligonucleotide
accggacgcaagaattaagggatagcaatg

SEQ ID NO: 18139 - DNA, 30 bp, Artificial Sequence
  Synthetic oligonucleotide
tctacccatgccgaggtaagttatcgaatg

SEQ ID NO: 18140 - DNA, 30 bp, Artificial Sequence
  Synthetic oligonucleotide
tgggcagagcgaacgttacagaagataatg

SEQ ID NO: 18141 - DNA, 30 bp, Artificial Sequence
  Synthetic oligonucleotide
aggaggaaaatcgtatattattgctacatg

SEQ ID NO: 18142 - DNA, 28 bp, Artificial Sequence
  Synthetic oligonucleotide
ggcacaggaagcaagtgagacgaccatg

SEQ ID NO: 18143 - DNA, 30 bp, Artificial Sequence
  Synthetic oligonucleotide
actaaatgcgcgtaagtagcaaataagatg

SEQ ID NO: 18144 - DNA, 30 bp, Artificial Sequence
  Synthetic oligonucleotide
taaacaggagtactcacaacaactaagatg

SEQ ID NO: 18145 - DNA, 30 bp, Artificial Sequence
  Synthetic oligonucleotide
aagggcatcggcagggaaaacgttacgatg

SEQ ID NO: 18146 - DNA, 30 bp, Artificial Sequence
  Synthetic oligonucleotide
gggctgaagttatcactaacgatatcgatg

SEQ ID NO: 18147 - DNA, 30 bp, Artificial Sequence
  Synthetic oligonucleotide
cacgggcgtcgactagtgtatgctcggatg

SEQ ID NO: 18148 - DNA, 30 bp, Artificial Sequence
  Synthetic oligonucleotide
tgatcaagcagggagggattagaagggatg

SEQ ID NO: 18149 - DNA, 30 bp, Artificial Sequence
  Synthetic oligonucleotide
cgtgcaaaaacggtccatgtgcgccatatg

SEQ ID NO: 18150 - DNA, 30 bp, Artificial Sequence
  Synthetic oligonucleotide
gcgggtaaatagcggttcatgggagatatg

SEQ ID NO: 18151 - DNA, 30 bp, Artificial Sequence
  Synthetic oligonucleotide
gggactcaagaacggtgaaaggtatgtatg

SEQ ID NO: 18152 - DNA, 30 bp, Artificial Sequence
  Synthetic oligonucleotide
ggtgaggtacgaaacaattcttgaaaactg

SEQ ID NO: 18153 - DNA, 30 bp, Artificial Sequence
  Synthetic oligonucleotide
ctgggacagacaaattcagtatcataactg

SEQ ID NO: 18154 - DNA, 30 bp, Artificial Sequence
  Synthetic oligonucleotide
cacggcgatgacgagacggcattaacactg

SEQ ID NO: 18155 - DNA, 30 bp, Artificial Sequence
  Synthetic oligonucleotide
tctggggcaggggaataaagataatcactg

SEQ ID NO: 18156 - DNA, 30 bp, Artificial Sequence
  Synthetic oligonucleotide
agatgagcaaacaatgacagacggcgactg

SEQ ID NO: 18157 - DNA, 30 bp, Artificial Sequence
  Synthetic oligonucleotide
acggtagcggcacctaatacaacttacctg

SEQ ID NO: 18158 - DNA, 30 bp, Artificial Sequence
  Synthetic oligonucleotide
ggcggaggagtatgctcattcaagaccctg

SEQ ID NO: 18159 - DNA, 30 bp, Artificial Sequence
  Synthetic oligonucleotide
ccgacgggctgcgagttgcatagagtcctg

SEQ ID NO: 18160 - DNA, 30 bp, Artificial Sequence
  Synthetic oligonucleotide
gagcaggaaggtaagcaaatgacaatgctg

SEQ ID NO: 18161 - DNA, 30 bp, Artificial Sequence
  Synthetic oligonucleotide
cagtagggtagagagggcttaaatatgctg

SEQ ID NO: 18162 - DNA, 30 bp, Artificial Sequence
  Synthetic oligonucleotide
ggggcgtatatgcgttaaagtgagctgctg

SEQ ID NO: 18163 - DNA, 30 bp, Artificial Sequence
  Synthetic oligonucleotide
ggcaaagttagtgagcagagggtcgtgctg

SEQ ID NO: 18164 - DNA, 30 bp, Artificial Sequence
  Synthetic oligonucleotide
gtcacaaagaaacgtaattggccggaagtg

SEQ ID NO: 18165 - DNA, 30 bp, Artificial Sequence
  Synthetic oligonucleotide
tcgagcggaatttatcgctgagcataagtg

SEQ ID NO: 18166 - DNA, 30 bp, Artificial Sequence
  Synthetic oligonucleotide
aggggtaaacaggtcgtacatagataagtg

SEQ ID NO: 18167 - DNA, 30 bp, Artificial Sequence
  Synthetic oligonucleotide
tctccacgaggtcagaaatgtacaacagtg

SEQ ID NO: 18168 - DNA, 30 bp, Artificial Sequence
  Synthetic oligonucleotide
tgccccgcggaaaaagtggtaactacagtg

SEQ ID NO: 18169 - DNA, 30 bp, Artificial Sequence
  Synthetic oligonucleotide
cgaggtggtcccgaagaagtgtctacagtg

SEQ ID NO: 18170 - DNA, 30 bp, Artificial Sequence
  Synthetic oligonucleotide
gcgaacgtccaactctatggaaagtcagtg

SEQ ID NO: 18171 - DNA, 30 bp, Artificial Sequence
  Synthetic oligonucleotide
gacatactagataccatgaaatcaagagtg

SEQ ID NO: 18172 - DNA, 30 bp, Artificial Sequence
  Synthetic oligonucleotide
gtacaacataaacttgcacgtagaagagtg

SEQ ID NO: 18173 - DNA, 30 bp, Artificial Sequence
  Synthetic oligonucleotide
cgaaaaaactgtgcccccggatatagagtg

SEQ ID NO: 18174 - DNA, 30 bp, Artificial Sequence
  Synthetic oligonucleotide
gtgagggtattattaatgagtgaaggagtg

SEQ ID NO: 18175 - DNA, 30 bp, Artificial Sequence
  Synthetic oligonucleotide
tcaaggagatctatcaatcatagaggagtg

SEQ ID NO: 18176 - DNA, 30 bp, Artificial Sequence
  Synthetic oligonucleotide
ggatgcgcgaaagaaaccgtgataggagtg

SEQ ID NO: 18177 - DNA, 30 bp, Artificial Sequence
  Synthetic oligonucleotide
cgtgaggttaaagtatctaggagggtagtg

SEQ ID NO: 18178 - DNA, 30 bp, Artificial Sequence
  Synthetic oligonucleotide
acgaacaccatctgaaatgtccgtgtagtg

SEQ ID NO: 18179 - DNA, 30 bp, Artificial Sequence
  Synthetic oligonucleotide
cagcaaaattaagatgaagaagtatacgtg

SEQ ID NO: 18180 - DNA, 30 bp, Artificial Sequence
  Synthetic oligonucleotide
tgctcggagaggagacgtgtacattacgtg

SEQ ID NO: 18181 - DNA, 30 bp, Artificial Sequence
  Synthetic oligonucleotide
agggggaccaactagctgtaagaggccgtg

SEQ ID NO: 18182 - DNA, 30 bp, Artificial Sequence
  Synthetic oligonucleotide
ctggggaggacatcaagtgcgcgatccgtg

SEQ ID NO: 18183 - DNA, 30 bp, Artificial Sequence
  Synthetic oligonucleotide
cgatgaaaaggcgcgtcttcagcttgcgtg

SEQ ID NO: 18184 - DNA, 30 bp, Artificial Sequence
  Synthetic oligonucleotide
gcagggttcgagacgtcctacgaaaaggtg

SEQ ID NO: 18185 - DNA, 30 bp, Artificial Sequence
  Synthetic oligonucleotide
ccacaaactgacgagcgtaatcccagggtg

SEQ ID NO: 18186 - DNA, 30 bp, Artificial Sequence
  Synthetic oligonucleotide
tggtaatgactgcacggtaacgtgagggtg

SEQ ID NO: 18187 - DNA, 30 bp, Artificial Sequence
  Synthetic oligonucleotide
tcatcatacatggagatcggtgcgctggtg

SEQ ID NO: 18188 - DNA, 30 bp, Artificial Sequence
  Synthetic oligonucleotide
aggcaggatcagctcaacaagcgtaatgtg

SEQ ID NO: 18189 - DNA, 30 bp, Artificial Sequence
  Synthetic oligonucleotide
ggcgaaggaaattccaccgtcatgcatgtg

SEQ ID NO: 18190 - DNA, 30 bp, Artificial Sequence
  Synthetic oligonucleotide
aagggaagaaatccaatacacccatctgtg

SEQ ID NO: 18191 - DNA, 30 bp, Artificial Sequence
  Synthetic oligonucleotide
accaaccgccaggcgagaaatgccagtgtg

SEQ ID NO: 18192 - DNA, 30 bp, Artificial Sequence
  Synthetic oligonucleotide
acacggcgatgtctagagcatagcagtgtg

SEQ ID NO: 18193 - DNA, 30 bp, Artificial Sequence
  Synthetic oligonucleotide
cgagatgctcactaatgtgcgaattgtgtg

SEQ ID NO: 18194 - DNA, 30 bp, Artificial Sequence
  Synthetic oligonucleotide
aggcgggcagatgattacaatcgcgcattg

SEQ ID NO: 18195 - DNA, 30 bp, Artificial Sequence
  Synthetic oligonucleotide
cgatgcgatttcggcatgcaaggaatattg

SEQ ID NO: 18196 - DNA, 30 bp, Artificial Sequence
  Synthetic oligonucleotide
cggctacccgtacagaccaacaacaacttg

SEQ ID NO: 18197 - DNA, 30 bp, Artificial Sequence
  Synthetic oligonucleotide
aaggatgtggggagattcgattgcatcttg

SEQ ID NO: 18198 - DNA, 30 bp, Artificial Sequence
  Synthetic oligonucleotide
aggtccagatgagagttgggatatcagttg

SEQ ID NO: 18199 - DNA, 30 bp, Artificial Sequence
  Synthetic oligonucleotide
acgggacagggtgaaaatgtgacctctttg

SEQ ID NO: 18200 - DNA, 30 bp, Artificial Sequence
  Synthetic oligonucleotide
acaggacaggactctgagaagggcagaaat

SEQ ID NO: 18201 - DNA, 30 bp, Artificial Sequence
  Synthetic oligonucleotide
acggtatgcactagactgagaaccggaaat

SEQ ID NO: 18202 - DNA, 30 bp, Artificial Sequence
  Synthetic oligonucleotide
cgttgactaagtcgtaacgatagggacaat

SEQ ID NO: 18203 - DNA, 30 bp, Artificial Sequence
  Synthetic oligonucleotide
aggagagaaacagcctcagtgtgtgacaat

SEQ ID NO: 18204 - DNA, 30 bp, Artificial Sequence
  Synthetic oligonucleotide
cgaaggccaggcgtaatccaggcaatcaat

SEQ ID NO: 18205 - DNA, 30 bp, Artificial Sequence
  Synthetic oligonucleotide
ggacatggctctaaaaaacatgtagagaat

SEQ ID NO: 18206 - DNA, 30 bp, Artificial Sequence
  Synthetic oligonucleotide
aaggagtaaacggacgaaatcatgacgaat

SEQ ID NO: 18207 - DNA, 30 bp, Artificial Sequence
  Synthetic oligonucleotide
agcggagaagcatattctagcggcaataat

SEQ ID NO: 18208 - DNA, 30 bp, Artificial Sequence
  Synthetic oligonucleotide
cggtgcgagaaggcggattccaaatgtaat

SEQ ID NO: 18209 - DNA, 30 bp, Artificial Sequence
  Synthetic oligonucleotide
tccagaagatggtacaagggcggggcacat

SEQ ID NO: 18210 - DNA, 30 bp, Artificial Sequence
  Synthetic oligonucleotide
aacaagacaacctaggccatgcaaggacat

SEQ ID NO: 18211 - DNA, 30 bp, Artificial Sequence
  Synthetic oligonucleotide
gtcggcgcaaaaacgggatacggcatacat

SEQ ID NO: 18212 - DNA, 30 bp, Artificial Sequence
  Synthetic oligonucleotide
agcctcaatcaccaccaaaaacatctacat

SEQ ID NO: 18213 - DNA, 30 bp, Artificial Sequence
  Synthetic oligonucleotide
cagagcagaaaggctacactcagggtacat

SEQ ID NO: 18214 - DNA, 30 bp, Artificial Sequence
  Synthetic oligonucleotide
ggccaaggggtaaagcatcacacatagcat

SEQ ID NO: 18215 - DNA, 30 bp, Artificial Sequence
  Synthetic oligonucleotide
acacgacttgaagcggagagcccatagcat

SEQ ID NO: 18216 - DNA, 30 bp, Artificial Sequence
  Synthetic oligonucleotide
aggacagtataaccaagacgaaccacgcat

SEQ ID NO: 18217 - DNA, 30 bp, Artificial Sequence
  Synthetic oligonucleotide
aacgaggctataatcgagccatgcgcgcat

SEQ ID NO: 18218 - DNA, 30 bp, Artificial Sequence
  Synthetic oligonucleotide
ccataacataaaggtaggatcgactaagat

SEQ ID NO: 18219 - DNA, 30 bp, Artificial Sequence
  Synthetic oligonucleotide
gcgcagtacaggtgatctcatagcccagat

SEQ ID NO: 18220 - DNA, 30 bp, Artificial Sequence
  Synthetic oligonucleotide
cgtgcccggcagagtcgtcgagatagagat

SEQ ID NO: 18221 - DNA, 30 bp, Artificial Sequence
  Synthetic oligonucleotide
cgaaaaggggcaaggggaaatgggtacgat

SEQ ID NO: 18222 - DNA, 30 bp, Artificial Sequence
  Synthetic oligonucleotide
tcaggaacacaatagcccgatcatcccgat

SEQ ID NO: 18223 - DNA, 30 bp, Artificial Sequence
  Synthetic oligonucleotide
gccgagaatcataacaggatcaaagcatat

SEQ ID NO: 18224 - DNA, 30 bp, Artificial Sequence
  Synthetic oligonucleotide
acaccaagacacaatagatagtaatcgtat

SEQ ID NO: 18225 - DNA, 30 bp, Artificial Sequence
  Synthetic oligonucleotide
gcacgtcgtaaaccggaacaccaaataact

SEQ ID NO: 18226 - DNA, 30 bp, Artificial Sequence
  Synthetic oligonucleotide
cctagagcgggagcatgatagagtcgcact

SEQ ID NO: 18227 - DNA, 30 bp, Artificial Sequence
  Synthetic oligonucleotide
agacacagagtagtaggcatattgggcact

SEQ ID NO: 18228 - DNA, 30 bp, Artificial Sequence
  Synthetic oligonucleotide
caccgagaagagcatttgcatagcgcgact

SEQ ID NO: 18229 - DNA, 30 bp, Artificial Sequence
  Synthetic oligonucleotide
gcacggatatcagccaaacgaattgcgact

SEQ ID NO: 18230 - DNA, 30 bp, Artificial Sequence
  Synthetic oligonucleotide
acgctcttaaccgcgtgaggagggatgact

SEQ ID NO: 18231 - DNA, 30 bp, Artificial Sequence
  Synthetic oligonucleotide
ctccatcaaacaaggaggaccgaaaaacct

SEQ ID NO: 18232 - DNA, 30 bp, Artificial Sequence
  Synthetic oligonucleotide
cgagattgcagccaaagagttaaacagcct

SEQ ID NO: 18233 - DNA, 30 bp, Artificial Sequence
  Synthetic oligonucleotide
gcgccgaacctgctggcatagggacaagct

SEQ ID NO: 18234 - DNA, 30 bp, Artificial Sequence
  Synthetic oligonucleotide
ccgtaaggtcacagtcccgacaactaagct

SEQ ID NO: 18235 - DNA, 30 bp, Artificial Sequence
  Synthetic oligonucleotide
acaggagaatcaatgaacgagcgacgagct

SEQ ID NO: 18236 - DNA, 30 bp, Artificial Sequence
  Synthetic oligonucleotide
atgtacacgtaaccaaaagggacattagct

SEQ ID NO: 18237 - DNA, 30 bp, Artificial Sequence
  Synthetic oligonucleotide
tgaggtgagacaggcgtacgaactcatgct

SEQ ID NO: 18238 - DNA, 30 bp, Artificial Sequence
  Synthetic oligonucleotide
acggtaacgagaaccgagaatgtgtgtgct

SEQ ID NO: 18239 - DNA, 30 bp, Artificial Sequence
  Synthetic oligonucleotide
tacgaaggtagagcgatcctaaacgcaagt

SEQ ID NO: 18240 - DNA, 30 bp, Artificial Sequence
  Synthetic oligonucleotide
aaggacgcggggaagggtagtctgtcaagt

SEQ ID NO: 18241 - DNA, 30 bp, Artificial Sequence
  Synthetic oligonucleotide
gcatgggtcggacggcctcaccatcgaagt

SEQ ID NO: 18242 - DNA, 30 bp, Artificial Sequence
  Synthetic oligonucleotide
ccgtgaatgaagtcacacgaaggaggaagt

SEQ ID NO: 18243 - DNA, 30 bp, Artificial Sequence
  Synthetic oligonucleotide
agaacacgagagtaaagaaacaggggaagt

SEQ ID NO: 18244 - DNA, 30 bp, Artificial Sequence
  Synthetic oligonucleotide
cacttaaggggaaaataggagtagagcagt

SEQ ID NO: 18245 - DNA, 30 bp, Artificial Sequence
  Synthetic oligonucleotide
cggcaatataattgaacagtgataaagagt

SEQ ID NO: 18246 - DNA, 30 bp, Artificial Sequence
  Synthetic oligonucleotide
aggtggcagggtatgtataagaaggggagt

SEQ ID NO: 18247 - DNA, 30 bp, Artificial Sequence
  Synthetic oligonucleotide
cagaggtgaaagccgtaccagaggtggagt

SEQ ID NO: 18248 - DNA, 30 bp, Artificial Sequence
  Synthetic oligonucleotide
cgagaccacaagagagtgctacaggttagt

SEQ ID NO: 18249 - DNA, 30 bp, Artificial Sequence
  Synthetic oligonucleotide
actggcaaggaagaacgggctgaaccacgt

SEQ ID NO: 18250 - DNA, 30 bp, Artificial Sequence
  Synthetic oligonucleotide
agtgtgacgaaaaaaacagtgaataatcgt

SEQ ID NO: 18251 - DNA, 30 bp, Artificial Sequence
  Synthetic oligonucleotide
caggacgatgtgagcttgattgagagtcgt

SEQ ID NO: 18252 - DNA, 30 bp, Artificial Sequence
  Synthetic oligonucleotide
cggcaatacgaaacctagaggaacgaaggt

SEQ ID NO: 18253 - DNA, 30 bp, Artificial Sequence
  Synthetic oligonucleotide
gagcagaaaaaggtgcgcatattagcaggt

SEQ ID NO: 18254 - DNA, 31 bp, Artificial Sequence
  Synthetic oligonucleotide
cgtaccaagcgactgtgacaatgagaacggt

SEQ ID NO: 18255 - DNA, 30 bp, Artificial Sequence
  Synthetic oligonucleotide
aggcagagaaatagtcttggaagggagggt

SEQ ID NO: 18256 - DNA, 30 bp, Artificial Sequence
  Synthetic oligonucleotide
aggggcatggagagaattcaaacccaatgt

SEQ ID NO: 18257 - DNA, 30 bp, Artificial Sequence
  Synthetic oligonucleotide
aatgcaagggaaagagcatggggaacatgt

SEQ ID NO: 18258 - DNA, 30 bp, Artificial Sequence
  Synthetic oligonucleotide
tcattaacttaacagaagcagaggagatgt

SEQ ID NO: 18259 - DNA, 30 bp, Artificial Sequence
  Synthetic oligonucleotide
cgagactgttaatcagtaagtaggtgctgt

SEQ ID NO: 18260 - DNA, 30 bp, Artificial Sequence
  Synthetic oligonucleotide
acccaaggcagtcgagaacaaggtagaatt

SEQ ID NO: 18261 - DNA, 30 bp, Artificial Sequence
  Synthetic oligonucleotide
catagccaaaaagaggaaacgcaacacatt

SEQ ID NO: 18262 - DNA, 30 bp, Artificial Sequence
  Synthetic oligonucleotide
acgccccacacagaacgggacggcaccatt

SEQ ID NO: 18263 - DNA, 30 bp, Artificial Sequence
  Synthetic oligonucleotide
cagcgaaggggaaaaacatctttcagcatt

SEQ ID NO: 18264 - DNA, 30 bp, Artificial Sequence
  Synthetic oligonucleotide
aggggcagaacgaattatcagacccgtatt

SEQ ID NO: 18265 - DNA, 30 bp, Artificial Sequence
  Synthetic oligonucleotide
gggagagattagtgacccggaaacaaactt

SEQ ID NO: 18266 - DNA, 30 bp, Artificial Sequence
  Synthetic oligonucleotide
cactgaacgaaagccccacacaacatcctt

SEQ ID NO: 18267 - DNA, 30 bp, Artificial Sequence
  Synthetic oligonucleotide
acgactctaaggcctcagagtgtaaagctt

SEQ ID NO: 18268 - DNA, 31 bp, Artificial Sequence
  Synthetic oligonucleotide
atcaccgtggagaactaaaatcagtccagtt

SEQ ID NO: 18269 - DNA, 30 bp, Artificial Sequence
  Synthetic oligonucleotide
cgagtactgcggaataagtcgaacagagtt

SEQ ID NO: 18270 - DNA, 30 bp, Artificial Sequence
  Synthetic oligonucleotide
ccgacaaggatggactaagcagttgtggtt

SEQ ID NO: 18271 - DNA, 30 bp, Artificial Sequence
  Synthetic oligonucleotide
caatgcgcggaaagacacgtgtgataattt

SEQ ID NO: 18272 - DNA, 30 bp, Artificial Sequence
  Synthetic oligonucleotide
acggtaatctggaccaaagatggcacattt

SEQ ID NO: 18273 - DNA, 30 bp, Artificial Sequence
  Synthetic oligonucleotide
cggaacaaagacgcattggtcgagtaaaaa

SEQ ID NO: 18274 - DNA, 30 bp, Artificial Sequence
  Synthetic oligonucleotide
ttacgaagtactagagcgggatcgtaaaaa

SEQ ID NO: 18275 - DNA, 30 bp, Artificial Sequence
  Synthetic oligonucleotide
cgagggcttattcgaaaagagaatggaaaa

SEQ ID NO: 18276 - DNA, 30 bp, Artificial Sequence
  Synthetic oligonucleotide
acatgccgagtgcaacgacagccgttaaaa

SEQ ID NO: 18277 - DNA, 30 bp, Artificial Sequence
  Synthetic oligonucleotide
acgtccctgtgcataagaccctggaacaaa

SEQ ID NO: 18278 - DNA, 30 bp, Artificial Sequence
  Synthetic oligonucleotide
gtcggccgacaagagtgtgcgacacccaaa

SEQ ID NO: 18279 - DNA, 30 bp, Artificial Sequence
  Synthetic oligonucleotide
cactgggattggaagcaataatgagccaaa

SEQ ID NO: 18280 - DNA, 30 bp, Artificial Sequence
  Synthetic oligonucleotide
gtatgcaggacccaattatcagtgcgcaaa

SEQ ID NO: 18281 - DNA, 30 bp, Artificial Sequence
  Synthetic oligonucleotide
tcgtgatcatgcgtgggaggaataggcaaa

SEQ ID NO: 18282 - DNA, 30 bp, Artificial Sequence
  Synthetic oligonucleotide
gaagcgcgggtccgaagctaacagatcaaa

SEQ ID NO: 18283 - DNA, 30 bp, Artificial Sequence
  Synthetic oligonucleotide
aggttccgtagggggatcaggaggaagaaa

SEQ ID NO: 18284 - DNA, 30 bp, Artificial Sequence
  Synthetic oligonucleotide
ggtgaagaatgtcggacagttaaaacgaaa

SEQ ID NO: 18285 - DNA, 30 bp, Artificial Sequence
  Synthetic oligonucleotide
aagaagcggtcaaaagccaatcggacgaaa

SEQ ID NO: 18286 - DNA, 30 bp, Artificial Sequence
  Synthetic oligonucleotide
atgccctggggacacgatagagttacgaaa

SEQ ID NO: 18287 - DNA, 30 bp, Artificial Sequence
  Synthetic oligonucleotide
aggaggcacagggtcatagctcgtaggaaa

SEQ ID NO: 18288 - DNA, 30 bp, Artificial Sequence
  Synthetic oligonucleotide
ggtgcaggccgcgaccaagagcagatgaaa

SEQ ID NO: 18289 - DNA, 30 bp, Artificial Sequence
  Synthetic oligonucleotide
agaaaggccaaggaatcagaccctatgaaa

SEQ ID NO: 18290 - DNA, 30 bp, Artificial Sequence
  Synthetic oligonucleotide
cggttgaatcacagaggagcgcaacctaaa

SEQ ID NO: 18291 - DNA, 30 bp, Artificial Sequence
  Synthetic oligonucleotide
caccgcatgaaaccacaggagccacgtaaa

SEQ ID NO: 18292 - DNA, 30 bp, Artificial Sequence
  Synthetic oligonucleotide
gttaaaaacggataagccaaagcaggtaaa

SEQ ID NO: 18293 - DNA, 30 bp, Artificial Sequence
  Synthetic oligonucleotide
gcgtaaatcaagaaagtggatgtacaacaa

SEQ ID NO: 18294 - DNA, 30 bp, Artificial Sequence
  Synthetic oligonucleotide
taactagggcaagactattcacagcgacaa

SEQ ID NO: 18295 - DNA, 30 bp, Artificial Sequence
  Synthetic oligonucleotide
aggaccaaggaagcaacgaatatgtaccaa

SEQ ID NO: 18296 - DNA, 30 bp, Artificial Sequence
  Synthetic oligonucleotide
ggggacaatggtgtagcacgcgtagtccaa

SEQ ID NO: 18297 - DNA, 30 bp, Artificial Sequence
  Synthetic oligonucleotide
ctctgcgctggcaccccagaaaggaagcaa

SEQ ID NO: 18298 - DNA, 30 bp, Artificial Sequence
  Synthetic oligonucleotide
atacaaaggtagcatgcaacacagaatcaa

SEQ ID NO: 18299 - DNA, 30 bp, Artificial Sequence
  Synthetic oligonucleotide
cgggtgaaactcgaataaagttcggatcaa

SEQ ID NO: 18300 - DNA, 30 bp, Artificial Sequence
  Synthetic oligonucleotide
tgcctggccgaagaccaaagagatagtcaa

SEQ ID NO: 18301 - DNA, 30 bp, Artificial Sequence
  Synthetic oligonucleotide
gggggatcaagaatgagaatggctcttcaa

SEQ ID NO: 18302 - DNA, 30 bp, Artificial Sequence
  Synthetic oligonucleotide
gggagaaggccctaggtgctaagaccagaa

SEQ ID NO: 18303 - DNA, 30 bp, Artificial Sequence
  Synthetic oligonucleotide
gcgagagagagaaattgccgcaaatcagaa

SEQ ID NO: 18304 - DNA, 30 bp, Artificial Sequence
  Synthetic oligonucleotide
tacgcttaaggactaagaaagtgcaacgaa

SEQ ID NO: 18305 - DNA, 30 bp, Artificial Sequence
  Synthetic oligonucleotide
cggtccgagaagattgtgttggaagacgaa

SEQ ID NO: 18306 - DNA, 30 bp, Artificial Sequence
  Synthetic oligonucleotide
caaacaggtagaaatcgatcccaatacgaa

SEQ ID NO: 18307 - DNA, 30 bp, Artificial Sequence
  Synthetic oligonucleotide
aaacaggaatcatagtgcgcaggctacgaa

SEQ ID NO: 18308 - DNA, 30 bp, Artificial Sequence
  Synthetic oligonucleotide
agttgcaacagagatacgacacttcgcgaa

SEQ ID NO: 18309 - DNA, 30 bp, Artificial Sequence
  Synthetic oligonucleotide
gacaatgtaacaggcaacataaggggcgaa

SEQ ID NO: 18310 - DNA, 30 bp, Artificial Sequence
  Synthetic oligonucleotide
ctcgggaaaaaacaaggccaaactacggaa

SEQ ID NO: 18311 - DNA, 30 bp, Artificial Sequence
  Synthetic oligonucleotide
tcggcttcgaaaatcaataatagcccggaa

SEQ ID NO: 18312 - DNA, 30 bp, Artificial Sequence
  Synthetic oligonucleotide
agggatcaacgtggtgaactagaggcggaa

SEQ ID NO: 18313 - DNA, 30 bp, Artificial Sequence
  Synthetic oligonucleotide
cggcaagtcaaaggaactcaaagcagggaa

SEQ ID NO: 18314 - DNA, 30 bp, Artificial Sequence
  Synthetic oligonucleotide
cgaggaacccacgacctaggtggtattgaa

SEQ ID NO: 18315 - DNA, 30 bp, Artificial Sequence
  Synthetic oligonucleotide
tcgaagtatcgaatctcgaccgaacttgaa

SEQ ID NO: 18316 - DNA, 30 bp, Artificial Sequence
  Synthetic oligonucleotide
aggagagaggggacacgtgcaagatttgaa

SEQ ID NO: 18317 - DNA, 30 bp, Artificial Sequence
  Synthetic oligonucleotide
aacgaaagtggggaaggtctcccttaataa

SEQ ID NO: 18318 - DNA, 30 bp, Artificial Sequence
  Synthetic oligonucleotide
acccgcaaaaggagagtcgtgtgcacataa

SEQ ID NO: 18319 - DNA, 30 bp, Artificial Sequence
  Synthetic oligonucleotide
cgaggagctggcgggtgcttgatagcataa

SEQ ID NO: 18320 - DNA, 30 bp, Artificial Sequence
  Synthetic oligonucleotide
ttacacagtggaaccaggggcacgaactaa

SEQ ID NO: 18321 - DNA, 30 bp, Artificial Sequence
  Synthetic oligonucleotide
ttcagggagtgagacatgggcagagactaa

SEQ ID NO: 18322 - DNA, 30 bp, Artificial Sequence
  Synthetic oligonucleotide
tgtaacaactaattcaggtagcaggactaa

SEQ ID NO: 18323 - DNA, 30 bp, Artificial Sequence
  Synthetic oligonucleotide
ccaaatgtgcgcaggagacatgtgcgctaa

SEQ ID NO: 18324 - DNA, 30 bp, Artificial Sequence
  Synthetic oligonucleotide
acagcaggttgcacggagagcgatgtctaa

SEQ ID NO: 18325 - DNA, 30 bp, Artificial Sequence
  Synthetic oligonucleotide
catgcgttgactagagtaagcagggagtaa

SEQ ID NO: 18326 - DNA, 30 bp, Artificial Sequence
  Synthetic oligonucleotide
caagggcaagggtgaacggttctaacgtaa

SEQ ID NO: 18327 - DNA, 30 bp, Artificial Sequence
  Synthetic oligonucleotide
ggaacgggctgagcatgcaggacgtcgtaa

SEQ ID NO: 18328 - DNA, 30 bp, Artificial Sequence
  Synthetic oligonucleotide
gctgagaagttggagcacaccgaaatgtaa

SEQ ID NO: 18329 - DNA, 30 bp, Artificial Sequence
  Synthetic oligonucleotide
cgaatgggccagtaggaaaccgccgattaa

SEQ ID NO: 18330 - DNA, 30 bp, Artificial Sequence
  Synthetic oligonucleotide
tagagaacacaagagggtgccaccagttaa

SEQ ID NO: 18331 - DNA, 30 bp, Artificial Sequence
  Synthetic oligonucleotide
tacaagcaaagggggaagtgcgcacgttaa

SEQ ID NO: 18332 - DNA, 30 bp, Artificial Sequence
  Synthetic oligonucleotide
caacagaaccctgaataagggcgcaaaaca

SEQ ID NO: 18333 - DNA, 30 bp, Artificial Sequence
  Synthetic oligonucleotide
cgagaaggacctcagcccggggtgcaaaca

SEQ ID NO: 18334 - DNA, 30 bp, Artificial Sequence
  Synthetic oligonucleotide
gaagaagggaaaactatcacaccaccaaca

SEQ ID NO: 18335 - DNA, 30 bp, Artificial Sequence
  Synthetic oligonucleotide
gtaagagaagaagacaattgcacggcaaca

SEQ ID NO: 18336 - DNA, 30 bp, Artificial Sequence
  Synthetic oligonucleotide
tgtaagggtcaccaaaagaccacgagaaca

SEQ ID NO: 18337 - DNA, 30 bp, Artificial Sequence
  Synthetic oligonucleotide
agaggtgcgaggcattgtgtaaaacgaaca

SEQ ID NO: 18338 - DNA, 30 bp, Artificial Sequence
  Synthetic oligonucleotide
cgaaggcgaggccctcgtagtcaacgaaca

SEQ ID NO: 18339 - DNA, 30 bp, Artificial Sequence
  Synthetic oligonucleotide
ggaaaacacgggagtagcagccatataaca

SEQ ID NO: 18340 - DNA, 30 bp, Artificial Sequence
  Synthetic oligonucleotide
ggggtagggggacattaacggctagacaca

SEQ ID NO: 18341 - DNA, 30 bp, Artificial Sequence
  Synthetic oligonucleotide
gacacacaagtcaaaccgaagtgactcaca

SEQ ID NO: 18342 - DNA, 30 bp, Artificial Sequence
  Synthetic oligonucleotide
aacaaaccaacgaaaagagtaactctcaca

SEQ ID NO: 18343 - DNA, 30 bp, Artificial Sequence
  Synthetic oligonucleotide
ctacggaaataaagggggtatcgtaagaca

SEQ ID NO: 18344 - DNA, 30 bp, Artificial Sequence
  Synthetic oligonucleotide
aggacaatggcgcatgactaatacgagaca

SEQ ID NO: 18345 - DNA, 30 bp, Artificial Sequence
  Synthetic oligonucleotide
cacatggtataagccccagaatgtacgaca

SEQ ID NO: 18346 - DNA, 30 bp, Artificial Sequence
  Synthetic oligonucleotide
aacggatcaagttacgaggtatggtcgaca

SEQ ID NO: 18347 - DNA, 30 bp, Artificial Sequence
  Synthetic oligonucleotide
tcatcaggcaagtgtgcgtagtacaggaca

SEQ ID NO: 18348 - DNA, 30 bp, Artificial Sequence
  Synthetic oligonucleotide
aggtaacactcaaaatttggacgggggaca

SEQ ID NO: 18349 - DNA, 31 bp, Artificial Sequence
  Synthetic oligonucleotide
gggagcgacgatggaaaacaaggtgctgaca

SEQ ID NO: 18350 - DNA, 30 bp, Artificial Sequence
  Synthetic oligonucleotide
gtggacaaagaaaagcgagttagacttaca

SEQ ID NO: 18351 - DNA, 30 bp, Artificial Sequence
  Synthetic oligonucleotide
gcgaggcaggggtcaatgctacgggaacca

SEQ ID NO: 18352 - DNA, 30 bp, Artificial Sequence
  Synthetic oligonucleotide
gtaggacctaccatagtagcagaaacacca

SEQ ID NO: 18353 - DNA, 30 bp, Artificial Sequence
  Synthetic oligonucleotide
agagcctgcgcctaatacgtgcgagagcca

SEQ ID NO: 18354 - DNA, 30 bp, Artificial Sequence
  Synthetic oligonucleotide
aggagcgagtgacagtaaccgagcccgcca

SEQ ID NO: 18355 - DNA, 30 bp, Artificial Sequence
  Synthetic oligonucleotide
aagggccaggcgacctaaccctgagctcca

SEQ ID NO: 18356 - DNA, 30 bp, Artificial Sequence
  Synthetic oligonucleotide
ggcaaggaaataaaaatgtcggagggtcca

SEQ ID NO: 18357 - DNA, 30 bp, Artificial Sequence
  Synthetic oligonucleotide
cggagtgctaaaggagaaatccgcattcca

SEQ ID NO: 18358 - DNA, 30 bp, Artificial Sequence
  Synthetic oligonucleotide
tatcgctacggaatcgataaggtgaaagca

SEQ ID NO: 18359 - DNA, 30 bp, Artificial Sequence
  Synthetic oligonucleotide
tcttgagcacaaggtaacaagtcccccgca

SEQ ID NO: 18360 - DNA, 30 bp, Artificial Sequence
  Synthetic oligonucleotide
cgatatctacaagaaagcctaacgcgcgca

SEQ ID NO: 18361 - DNA, 30 bp, Artificial Sequence
  Synthetic oligonucleotide
cggatagggcggactcatcatttgcgcgca

SEQ ID NO: 18362 - DNA, 30 bp, Artificial Sequence
  Synthetic oligonucleotide
gtcgtcggactggggacaatgctattcgca

SEQ ID NO: 18363 - DNA, 30 bp, Artificial Sequence
  Synthetic oligonucleotide
caatagacgttttggaaaggagacaaggca

SEQ ID NO: 18364 - DNA, 30 bp, Artificial Sequence
  Synthetic oligonucleotide
ggaccagcagggcgaagactattggcggca

SEQ ID NO: 18365 - DNA, 30 bp, Artificial Sequence
  Synthetic oligonucleotide
ggttacaccagtaatggatcgaaacgggca

SEQ ID NO: 18366 - DNA, 30 bp, Artificial Sequence
  Synthetic oligonucleotide
ggaagaagggggaacattgaactgcatgca

SEQ ID NO: 18367 - DNA, 30 bp, Artificial Sequence
  Synthetic oligonucleotide
caatgatttgccagggcatagaggactgca

SEQ ID NO: 18368 - DNA, 30 bp, Artificial Sequence
  Synthetic oligonucleotide
tgtagtatggggaaaccaaaacgatgtgca

SEQ ID NO: 18369 - DNA, 30 bp, Artificial Sequence
  Synthetic oligonucleotide
tgaaaggagaaatttggtacaagcgaatca

SEQ ID NO: 18370 - DNA, 30 bp, Artificial Sequence
  Synthetic oligonucleotide
aagaacgcgacgaaagttggccgacgatca

SEQ ID NO: 18371 - DNA, 30 bp, Artificial Sequence
  Synthetic oligonucleotide
taccgtatcgaagaaagacttgggcgatca

SEQ ID NO: 18372 - DNA, 30 bp, Artificial Sequence
  Synthetic oligonucleotide
atgcgcagggcacctaaagagcgaggatca

SEQ ID NO: 18373 - DNA, 30 bp, Artificial Sequence
  Synthetic oligonucleotide
gacaggtgaaattagaatcaacgagcctca

SEQ ID NO: 18374 - DNA, 30 bp, Artificial Sequence
  Synthetic oligonucleotide
gcttcagagaagcaaaggcacacccgctca

SEQ ID NO: 18375 - DNA, 30 bp, Artificial Sequence
  Synthetic oligonucleotide
agatgccctcagaatcatatgaaaaagtca

SEQ ID NO: 18376 - DNA, 30 bp, Artificial Sequence
  Synthetic oligonucleotide
taacagcagggcgtcaacgtacccaagtca

SEQ ID NO: 18377 - DNA, 40 bp, Artificial Sequence
  Synthetic oligonucleotide
cgggcggttggggcaccgggtagagaaatttgctgcgtca

SEQ ID NO: 18378 - DNA, 30 bp, Artificial Sequence
  Synthetic oligonucleotide
ccatacaacgggcgggtaagaaacatgtca

SEQ ID NO: 18379 - DNA, 30 bp, Artificial Sequence
  Synthetic oligonucleotide
gaggcaaacaacaggtggccgagtgattca

SEQ ID NO: 18380 - DNA, 30 bp, Artificial Sequence
  Synthetic oligonucleotide
caccgacaaagagtgccataaagagcttca

SEQ ID NO: 18381 - DNA, 30 bp, Artificial Sequence
  Synthetic oligonucleotide
atcaccacgcaacggggagtggaaaaaaga

SEQ ID NO: 18382 - DNA, 30 bp, Artificial Sequence
  Synthetic oligonucleotide
cgctaccagaggaccggcttggagcaaaga

SEQ ID NO: 18383 - DNA, 30 bp, Artificial Sequence
  Synthetic oligonucleotide
ctactagcatcagggaaggaggtgcaaaga

SEQ ID NO: 18384 - DNA, 30 bp, Artificial Sequence
  Synthetic oligonucleotide
ctaacgaagacgaaggctatagttagaaga

SEQ ID NO: 18385 - DNA, 30 bp, Artificial Sequence
  Synthetic oligonucleotide
ggtgtgaacgggatagtggcgagaggaaga

SEQ ID NO: 18386 - DNA, 30 bp, Artificial Sequence
  Synthetic oligonucleotide
gtatgaagcgatagccataacgacaacaga

SEQ ID NO: 18387 - DNA, 30 bp, Artificial Sequence
  Synthetic oligonucleotide
ggtcataatgggagcgtgaggatcaacaga

SEQ ID NO: 18388 - DNA, 30 bp, Artificial Sequence
  Synthetic oligonucleotide
cgaagtcaaggctgcgtccaagtccacaga

SEQ ID NO: 18389 - DNA, 30 bp, Artificial Sequence
  Synthetic oligonucleotide
aagtcagaagctgaaacatcaaaaaccaga

SEQ ID NO: 18390 - DNA, 30 bp, Artificial Sequence
  Synthetic oligonucleotide
cagcgagacaaggttacttaatctgccaga

SEQ ID NO: 18391 - DNA, 30 bp, Artificial Sequence
  Synthetic oligonucleotide
tcgtgttagcaaacatgtacatcaagcaga

SEQ ID NO: 18392 - DNA, 30 bp, Artificial Sequence
  Synthetic oligonucleotide
agtaccaaaggacagtatgcgcgactcaga

SEQ ID NO: 18393 - DNA, 30 bp, Artificial Sequence
  Synthetic oligonucleotide
accagccagacatgtgtgggaattcagaga

SEQ ID NO: 18394 - DNA, 30 bp, Artificial Sequence
  Synthetic oligonucleotide
aacagatcataaacgtcaattctggagaga

SEQ ID NO: 18395 - DNA, 30 bp, Artificial Sequence
  Synthetic oligonucleotide
cagtgacatacgggactgcgaaaagcgaga

SEQ ID NO: 18396 - DNA, 30 bp, Artificial Sequence
  Synthetic oligonucleotide
aatgcatggggtgcatacaggtcggggaga

SEQ ID NO: 18397 - DNA, 30 bp, Artificial Sequence
  Synthetic oligonucleotide
aaggagctgcaagtcgatcacaataataga

SEQ ID NO: 18398 - DNA, 30 bp, Artificial Sequence
  Synthetic oligonucleotide
cggatagtgatttaaacggagagcaaacga

SEQ ID NO: 18399 - DNA, 30 bp, Artificial Sequence
  Synthetic oligonucleotide
tcattgtaggtgagaatagtgaggatacga

SEQ ID NO: 18400 - DNA, 30 bp, Artificial Sequence
  Synthetic oligonucleotide
ccaaggtgtcctaaaactacaaaaagccga

SEQ ID NO: 18401 - DNA, 30 bp, Artificial Sequence
  Synthetic oligonucleotide
gaaagatcaggcaacaggataacaaagcga

SEQ ID NO: 18402 - DNA, 30 bp, Artificial Sequence
  Synthetic oligonucleotide
cacgaaatcctaagatgaggaagggatcga

SEQ ID NO: 18403 - DNA, 30 bp, Artificial Sequence
  Synthetic oligonucleotide
ctgacgagataggggtgggagcttcgtcga

SEQ ID NO: 18404 - DNA, 30 bp, Artificial Sequence
  Synthetic oligonucleotide
cacgagtatctctagaattgccagcaagga

SEQ ID NO: 18405 - DNA, 30 bp, Artificial Sequence
  Synthetic oligonucleotide
acgtcgacactagcatcgaccaaagaagga

SEQ ID NO: 18406 - DNA, 30 bp, Artificial Sequence
  Synthetic oligonucleotide
gagcgtagacccagaaaaatgtaatcagga

SEQ ID NO: 18407 - DNA, 30 bp, Artificial Sequence
  Synthetic oligonucleotide
agaggaggagcctatcgacggaggcacgga

SEQ ID NO: 18408 - DNA, 30 bp, Artificial Sequence
  Synthetic oligonucleotide
ggtcgaattgtcaagccataatccaccgga

SEQ ID NO: 18409 - DNA, 30 bp, Artificial Sequence
  Synthetic oligonucleotide
tcgtcaaggagagacacaacgctacccgga

SEQ ID NO: 18410 - DNA, 30 bp, Artificial Sequence
  Synthetic oligonucleotide
aggctgatttgagagcagagacactccgga

SEQ ID NO: 18411 - DNA, 30 bp, Artificial Sequence
  Synthetic oligonucleotide
acgcgagaggggcggcatacttgtagcgga

SEQ ID NO: 18412 - DNA, 30 bp, Artificial Sequence
  Synthetic oligonucleotide
acactcggtaagcaacagcagaccatcgga

SEQ ID NO: 18413 - DNA, 30 bp, Artificial Sequence
  Synthetic oligonucleotide
agtggtcagcgctgtacacggaaagaggga

SEQ ID NO: 18414 - DNA, 31 bp, Artificial Sequence
  Synthetic oligonucleotide
ataggatccatctgcaaaagagcaaacggga

SEQ ID NO: 18415 - DNA, 30 bp, Artificial Sequence
  Synthetic oligonucleotide
caaggcgcggagggtacgatcacactggga

SEQ ID NO: 18416 - DNA, 30 bp, Artificial Sequence
  Synthetic oligonucleotide
tcgagtcctggcgtcaatagaatggatgga

SEQ ID NO: 18417 - DNA, 30 bp, Artificial Sequence
  Synthetic oligonucleotide
atggacagaaggcggaagcgtgccgctgga

SEQ ID NO: 18418 - DNA, 30 bp, Artificial Sequence
  Synthetic oligonucleotide
gtatgggaagaatcgggaagcggcaactga

SEQ ID NO: 18419 - DNA, 30 bp, Artificial Sequence
  Synthetic oligonucleotide
tcactacggtagagaaatccgtgcgcgtga

SEQ ID NO: 18420 - DNA, 31 bp, Artificial Sequence
  Synthetic oligonucleotide
agtgtagaccggacgaagtaaggggatgtga

SEQ ID NO: 18421 - DNA, 30 bp, Artificial Sequence
  Synthetic oligonucleotide
cggttcgtagcgagggtaggtgatatgtga

SEQ ID NO: 18422 - DNA, 30 bp, Artificial Sequence
  Synthetic oligonucleotide
agggaaagaaacgttaaaaatctcagaata

SEQ ID NO: 18423 - DNA, 30 bp, Artificial Sequence
  Synthetic oligonucleotide
cacgatcggccgtaggagtgatgtagaata

SEQ ID NO: 18424 - DNA, 30 bp, Artificial Sequence
  Synthetic oligonucleotide
gcgggggacggctagaaaaccctaggaata

SEQ ID NO: 18425 - DNA, 29 bp, Artificial Sequence
  Synthetic oligonucleotide
acgggagctagtcaatcaccagtggaata

SEQ ID NO: 18426 - DNA, 30 bp, Artificial Sequence
  Synthetic oligonucleotide
gtgcggtggacgtcacgagcaaacgtcata

SEQ ID NO: 18427 - DNA, 29 bp, Artificial Sequence
  Synthetic oligonucleotide
caaaacgtaatgataaggaaggccagata

SEQ ID NO: 18428 - DNA, 29 bp, Artificial Sequence
  Synthetic oligonucleotide
ggccgaaaacggacagcgtagagtggata

SEQ ID NO: 18429 - DNA, 30 bp, Artificial Sequence
  Synthetic oligonucleotide
aggacgcacaagaaaggacatagactgata

SEQ ID NO: 18430 - DNA, 30 bp, Artificial Sequence
  Synthetic oligonucleotide
gcggcaggtatccgacctaagagcgaacta

SEQ ID NO: 18431 - DNA, 30 bp, Artificial Sequence
  Synthetic oligonucleotide
cggtacagttagaaggtggctagagcacta

SEQ ID NO: 18432 - DNA, 30 bp, Artificial Sequence
  Synthetic oligonucleotide
tagtcaactagactcaccaaaagcagacta

SEQ ID NO: 18433 - DNA, 30 bp, Artificial Sequence
  Synthetic oligonucleotide
cgggatgccagcgaaactacagtgccgcta

SEQ ID NO: 18434 - DNA, 30 bp, Artificial Sequence
  Synthetic oligonucleotide
cgtacacgaatccagattacactgctgcta

SEQ ID NO: 18435 - DNA, 30 bp, Artificial Sequence
  Synthetic oligonucleotide
gtgcccgatcaatcaaaataaaacaaagta

SEQ ID NO: 18436 - DNA, 30 bp, Artificial Sequence
  Synthetic oligonucleotide
gggaaggttgagacactctcatgacaagta

SEQ ID NO: 18437 - DNA, 30 bp, Artificial Sequence
  Synthetic oligonucleotide
aagggcagcctaggaaagcgctctgcagta

SEQ ID NO: 18438 - DNA, 30 bp, Artificial Sequence
  Synthetic oligonucleotide
gcacgatcccaataagcgccagtaagagta

SEQ ID NO: 18439 - DNA, 30 bp, Artificial Sequence
  Synthetic oligonucleotide
atgacaagagaagggggtccgtgacgagta

SEQ ID NO: 18440 - DNA, 30 bp, Artificial Sequence
  Synthetic oligonucleotide
gagacaggcacaaggactccaacgcgagta

SEQ ID NO: 18441 - DNA, 30 bp, Artificial Sequence
  Synthetic oligonucleotide
gagctacaggaacacaagataaaatacgta

SEQ ID NO: 18442 - DNA, 30 bp, Artificial Sequence
  Synthetic oligonucleotide
cggataaacagatagttgtcctgcaaggta

SEQ ID NO: 18443 - DNA, 30 bp, Artificial Sequence
  Synthetic oligonucleotide
accagaggtaggatcattcagggtgaggta

SEQ ID NO: 18444 - DNA, 30 bp, Artificial Sequence
  Synthetic oligonucleotide
aacataggcgtcaaagataaaacatcggta

SEQ ID NO: 18445 - DNA, 30 bp, Artificial Sequence
  Synthetic oligonucleotide
ggaacaggcgaggacgtaaaaatatcggta

SEQ ID NO: 18446 - DNA, 30 bp, Artificial Sequence
  Synthetic oligonucleotide
tctaacgataatggataatagcagtatgta

SEQ ID NO: 18447 - DNA, 30 bp, Artificial Sequence
  Synthetic oligonucleotide
agtagaaacaagaaaagctattccagtgta

SEQ ID NO: 18448 - DNA, 30 bp, Artificial Sequence
  Synthetic oligonucleotide
tcagccaccaggtggaggaaggaagttgta

SEQ ID NO: 18449 - DNA, 31 bp, Artificial Sequence
  Synthetic oligonucleotide
aagatacaagccatccaagcggcgaaaatta

SEQ ID NO: 18450 - DNA, 30 bp, Artificial Sequence
  Synthetic oligonucleotide
tagtgggaggcatcggcgagagcaccatta

SEQ ID NO: 18451 - DNA, 30 bp, Artificial Sequence
  Synthetic oligonucleotide
aaggagccaggaggacaccaattccgctta

SEQ ID NO: 18452 - DNA, 30 bp, Artificial Sequence
  Synthetic oligonucleotide
ggaacgcgatcactaacaaaacaatgctta

SEQ ID NO: 18453 - DNA, 30 bp, Artificial Sequence
  Synthetic oligonucleotide
ggcaggtgtgaagaccagacccgtaagtta

SEQ ID NO: 18454 - DNA, 31 bp, Artificial Sequence
  Synthetic oligonucleotide
aaggccgcgtgaatagaagaagtctacgtta

SEQ ID NO: 18455 - DNA, 30 bp, Artificial Sequence
  Synthetic oligonucleotide
acaagaaggacataaagttaagacctgtta

SEQ ID NO: 18456 - DNA, 30 bp, Artificial Sequence
  Synthetic oligonucleotide
gcaaagcgatagacacagatatgggaaaac

SEQ ID NO: 18457 - DNA, 30 bp, Artificial Sequence
  Synthetic oligonucleotide
cggttcagataggcgcgaaaatagataaac

SEQ ID NO: 18458 - DNA, 30 bp, Artificial Sequence
  Synthetic oligonucleotide
taaggtacgtacacacggaagagctccaac

SEQ ID NO: 18459 - DNA, 30 bp, Artificial Sequence
  Synthetic oligonucleotide
cgagaattttggcatctaactcgcgagaac

SEQ ID NO: 18460 - DNA, 30 bp, Artificial Sequence
  Synthetic oligonucleotide
caacacacgctgaaggatggaagtgagaac

SEQ ID NO: 18461 - DNA, 30 bp, Artificial Sequence
  Synthetic oligonucleotide
aaagaaagggcgaaatctacttcagcgaac

SEQ ID NO: 18462 - DNA, 30 bp, Artificial Sequence
  Synthetic oligonucleotide
gggggaaccgatgagtagcatgctgcgaac

SEQ ID NO: 18463 - DNA, 30 bp, Artificial Sequence
  Synthetic oligonucleotide
catagctacgatagagatagcgcaaggaac

SEQ ID NO: 18464 - DNA, 30 bp, Artificial Sequence
  Synthetic oligonucleotide
cgactagacattggggatagatgtatgaac

SEQ ID NO: 18465 - DNA, 30 bp, Artificial Sequence
  Synthetic oligonucleotide
aggtataaaaaaccaaagatagtagataac

SEQ ID NO: 18466 - DNA, 30 bp, Artificial Sequence
  Synthetic oligonucleotide
ggacaggaagtgactgtatgcattgctaac

SEQ ID NO: 18467 - DNA, 30 bp, Artificial Sequence
  Synthetic oligonucleotide
acaggaaatcagggtacgttaccgagtaac

SEQ ID NO: 18468 - DNA, 30 bp, Artificial Sequence
  Synthetic oligonucleotide
acgaacctcaaacctactcaacataaacac

SEQ ID NO: 18469 - DNA, 30 bp, Artificial Sequence
  Synthetic oligonucleotide
tttaggcaaaaccaaaaagcgcagagacac

SEQ ID NO: 18470 - DNA, 30 bp, Artificial Sequence
  Synthetic oligonucleotide
cggatagggtgaaagtcaaggcgtcgacac

SEQ ID NO: 18471 - DNA, 30 bp, Artificial Sequence
  Synthetic oligonucleotide
tcgcggacaaaagatacaagacaacaccac

SEQ ID NO: 18472 - DNA, 30 bp, Artificial Sequence
  Synthetic oligonucleotide
cacgaatgggaacgcgaatgaagattccac

SEQ ID NO: 18473 - DNA, 30 bp, Artificial Sequence
  Synthetic oligonucleotide
ttggccggggaaggtttatcgagagagcac

SEQ ID NO: 18474 - DNA, 30 bp, Artificial Sequence
  Synthetic oligonucleotide
gcgccgaatataaaacagagacggacgcac

SEQ ID NO: 18475 - DNA, 30 bp, Artificial Sequence
  Synthetic oligonucleotide
gggtacagtacggacatcacacgagggcac

SEQ ID NO: 18476 - DNA, 30 bp, Artificial Sequence
  Synthetic oligonucleotide
cgaatagctagtcaggggtccagggggcac

SEQ ID NO: 18477 - DNA, 34 bp, Artificial Sequence
  Synthetic oligonucleotide
gatactagaacaccacgtgtccatcacaaaagac

SEQ ID NO: 18478 - DNA, 30 bp, Artificial Sequence
  Synthetic oligonucleotide
acgggttagtgaacctcgtattatccagac

SEQ ID NO: 18479 - DNA, 30 bp, Artificial Sequence
  Synthetic oligonucleotide
catggctgagagttatactggagtagagac

SEQ ID NO: 18480 - DNA, 30 bp, Artificial Sequence
  Synthetic oligonucleotide
ggaattccggaacccaacactaagcgagac

SEQ ID NO: 18481 - DNA, 30 bp, Artificial Sequence
  Synthetic oligonucleotide
cagaggtcacgatgggtaggaaggtgagac

SEQ ID NO: 18482 - DNA, 30 bp, Artificial Sequence
  Synthetic oligonucleotide
atgggtgagaggataatgtacatcggcgac

SEQ ID NO: 18483 - DNA, 30 bp, Artificial Sequence
  Synthetic oligonucleotide
tcgggggttgaatacacgaagaataaggac

SEQ ID NO: 18484 - DNA, 30 bp, Artificial Sequence
  Synthetic oligonucleotide
gactgagacatcaggagccacacgagggac

SEQ ID NO: 18485 - DNA, 30 bp, Artificial Sequence
  Synthetic oligonucleotide
aaagggaacagtaagcgaatattatgggac

SEQ ID NO: 18486 - DNA, 30 bp, Artificial Sequence
  Synthetic oligonucleotide
ggggcaaaagtaggactaaaaagagatgac

SEQ ID NO: 18487 - DNA, 30 bp, Artificial Sequence
  Synthetic oligonucleotide
ggcaacaatacgtgatgcctaagcaactac

SEQ ID NO: 18488 - DNA, 30 bp, Artificial Sequence
  Synthetic oligonucleotide
acaggatgaagttgccgagggcgtcactac

SEQ ID NO: 18489 - DNA, 30 bp, Artificial Sequence
  Synthetic oligonucleotide
acacggtattgaggcaatcagagcgactac

SEQ ID NO: 18490 - DNA, 30 bp, Artificial Sequence
  Synthetic oligonucleotide
tcggacgacataccatagatctcgcgctac

SEQ ID NO: 18491 - DNA, 30 bp, Artificial Sequence
  Synthetic oligonucleotide
acctaaagtaacgaacgatcgccctgctac

SEQ ID NO: 18492 - DNA, 30 bp, Artificial Sequence
  Synthetic oligonucleotide
agcacgtcttaaaagcactcgacaacgtac

SEQ ID NO: 18493 - DNA, 30 bp, Artificial Sequence
  Synthetic oligonucleotide
gcgggaggagaaagtggggtagcccaaacc

SEQ ID NO: 18494 - DNA, 30 bp, Artificial Sequence
  Synthetic oligonucleotide
ccgtgagaacaaggaaacccagataagacc

SEQ ID NO: 18495 - DNA, 30 bp, Artificial Sequence
  Synthetic oligonucleotide
cgaggctatggcatggggaattccgagacc

SEQ ID NO: 18496 - DNA, 30 bp, Artificial Sequence
  Synthetic oligonucleotide
ggcgtggtgcctaagcgagtgaatatgacc

SEQ ID NO: 18497 - DNA, 30 bp, Artificial Sequence
  Synthetic oligonucleotide
aaggggagcataaaaatgcacaagttgacc

SEQ ID NO: 18498 - DNA, 30 bp, Artificial Sequence
  Synthetic oligonucleotide
gttaacacaaggaaaggaatgcaagctacc

SEQ ID NO: 18499 - DNA, 30 bp, Artificial Sequence
  Synthetic oligonucleotide
cgatccgcaggagaaaacccacgcgagccc

SEQ ID NO: 18500 - DNA, 30 bp, Artificial Sequence
  Synthetic oligonucleotide
gtcactagaatagagcataattaagcgccc

SEQ ID NO: 18501 - DNA, 30 bp, Artificial Sequence
  Synthetic oligonucleotide
cgagcttaccgtacaagaaggtgcatgccc

SEQ ID NO: 18502 - DNA, 30 bp, Artificial Sequence
  Synthetic oligonucleotide
cctaagcgacaacgaaataagcgatatccc

SEQ ID NO: 18503 - DNA, 30 bp, Artificial Sequence
  Synthetic oligonucleotide
cagggcacaatgtgatcgcatgagatggcc

SEQ ID NO: 18504 - DNA, 30 bp, Artificial Sequence
  Synthetic oligonucleotide
atatggagtaggatatgggagaatgctgcc

SEQ ID NO: 18505 - DNA, 30 bp, Artificial Sequence
  Synthetic oligonucleotide
aggtctaaaagtggaacatgccagcagtcc

SEQ ID NO: 18506 - DNA, 30 bp, Artificial Sequence
  Synthetic oligonucleotide
gttccgaaagcaaacaaactaccgccgtcc

SEQ ID NO: 18507 - DNA, 30 bp, Artificial Sequence
  Synthetic oligonucleotide
cacaacaacagttaaaacgtacgtatgtcc

SEQ ID NO: 18508 - DNA, 30 bp, Artificial Sequence
  Synthetic oligonucleotide
agccacataaccagagtcgcaagcttgtcc

SEQ ID NO: 18509 - DNA, 30 bp, Artificial Sequence
  Synthetic oligonucleotide
acaataagccaatgtgtgcgcatgaaaagc

SEQ ID NO: 18510 - DNA, 30 bp, Artificial Sequence
  Synthetic oligonucleotide
tatcgtaggtgagactaacgaggaagaagc

SEQ ID NO: 18511 - DNA, 30 bp, Artificial Sequence
  Synthetic oligonucleotide
ggcaatcacgaactacaaacatctagaagc

SEQ ID NO: 18512 - DNA, 29 bp, Artificial Sequence
  Synthetic oligonucleotide
caatggcggaccacatagacgatcgaagc

SEQ ID NO: 18513 - DNA, 30 bp, Artificial Sequence
  Synthetic oligonucleotide
tcggtactcgatcttcgatgggaccagagc

SEQ ID NO: 18514 - DNA, 30 bp, Artificial Sequence
  Synthetic oligonucleotide
tcgaccgaccgttaaccagggagcaatagc

SEQ ID NO: 18515 - DNA, 30 bp, Artificial Sequence
  Synthetic oligonucleotide
gagcaggtagtgtacagcgaacgagatagc

SEQ ID NO: 18516 - DNA, 30 bp, Artificial Sequence
  Synthetic oligonucleotide
gcgaggtgaataggcgctcactggagtagc

SEQ ID NO: 18517 - DNA, 30 bp, Artificial Sequence
  Synthetic oligonucleotide
agcgatccagagaagatcgtataaccacgc

SEQ ID NO: 18518 - DNA, 30 bp, Artificial Sequence
  Synthetic oligonucleotide
agggagagggggctcaaaccgcgatagcgc

SEQ ID NO: 18519 - DNA, 30 bp, Artificial Sequence
  Synthetic oligonucleotide
ccatacgtcaggacgtgcgagcgagaaggc

SEQ ID NO: 18520 - DNA, 30 bp, Artificial Sequence
  Synthetic oligonucleotide
gtgagaataacaccatcgaaagctcgaggc

SEQ ID NO: 18521 - DNA, 30 bp, Artificial Sequence
  Synthetic oligonucleotide
agccaacctgcactgtaaaagatgggaggc

SEQ ID NO: 18522 - DNA, 30 bp, Artificial Sequence
  Synthetic oligonucleotide
gaaagggatcaccagactaacgagtacggc

SEQ ID NO: 18523 - DNA, 30 bp, Artificial Sequence
  Synthetic oligonucleotide
agggtttaagaatgtgttagcaaagagggc

SEQ ID NO: 18524 - DNA, 30 bp, Artificial Sequence
  Synthetic oligonucleotide
acaccaagtcaattgcagtcgataacgggc

SEQ ID NO: 18525 - DNA, 30 bp, Artificial Sequence
  Synthetic oligonucleotide
tacacaaagtatcgaaattgaagcctgggc

SEQ ID NO: 18526 - DNA, 30 bp, Artificial Sequence
  Synthetic oligonucleotide
aggacgtcgagactaaatgagagaaatggc

SEQ ID NO: 18527 - DNA, 30 bp, Artificial Sequence
  Synthetic oligonucleotide
ccgttgtgagggccggtacaaagggaatgc

SEQ ID NO: 18528 - DNA, 30 bp, Artificial Sequence
  Synthetic oligonucleotide
ctaggcaaccggaaggacgtgacctactgc

SEQ ID NO: 18529 - DNA, 30 bp, Artificial Sequence
  Synthetic oligonucleotide
acggtatccgcaatgaaacgtggaacctgc

SEQ ID NO: 18530 - DNA, 30 bp, Artificial Sequence
  Synthetic oligonucleotide
tcagccaatatcaaaaaaatcgagaagtgc

SEQ ID NO: 18531 - DNA, 30 bp, Artificial Sequence
  Synthetic oligonucleotide
ttggtaaggtaaaagagggatgaaacgtgc

SEQ ID NO: 18532 - DNA, 30 bp, Artificial Sequence
  Synthetic oligonucleotide
tcagggctaggcgccatgaagaaagcgtgc

SEQ ID NO: 18533 - DNA, 30 bp, Artificial Sequence
  Synthetic oligonucleotide
aaagaatgcagaatgggatcggggtggtgc

SEQ ID NO: 18534 - DNA, 30 bp, Artificial Sequence
  Synthetic oligonucleotide
ggccgcgtgataagtatcctgggagtgtgc

SEQ ID NO: 18535 - DNA, 31 bp, Artificial Sequence
  Synthetic oligonucleotide
gggaggggagggaaacgcgatgtacgtgtgc

SEQ ID NO: 18536 - DNA, 30 bp, Artificial Sequence
  Synthetic oligonucleotide
aacaggattcaaagacagaagaggcccatc

SEQ ID NO: 18537 - DNA, 30 bp, Artificial Sequence
  Synthetic oligonucleotide
acggagtgtaaggtgtcaaaaacgtgtatc

SEQ ID NO: 18538 - DNA, 30 bp, Artificial Sequence
  Synthetic oligonucleotide
aggacccaccacaaatagataccgtgtatc

SEQ ID NO: 18539 - DNA, 30 bp, Artificial Sequence
  Synthetic oligonucleotide
cggcaacgtcacccacgaggataccaactc

SEQ ID NO: 18540 - DNA, 30 bp, Artificial Sequence
  Synthetic oligonucleotide
accggccaggttaagcaaaacgatcaactc

SEQ ID NO: 18541 - DNA, 30 bp, Artificial Sequence
  Synthetic oligonucleotide
cgaaaacgaccgatcacatagaagtgactc

SEQ ID NO: 18542 - DNA, 30 bp, Artificial Sequence
  Synthetic oligonucleotide
cgatatgtaacacaatctcgaagggccctc

SEQ ID NO: 18543 - DNA, 30 bp, Artificial Sequence
  Synthetic oligonucleotide
acgccaaggggtggaacgaatagggctctc

SEQ ID NO: 18544 - DNA, 30 bp, Artificial Sequence
  Synthetic oligonucleotide
acgaatgttcgatcagaatatgccgaagtc

SEQ ID NO: 18545 - DNA, 30 bp, Artificial Sequence
  Synthetic oligonucleotide
atgtcgagaccatatataccataacacgtc

SEQ ID NO: 18546 - DNA, 30 bp, Artificial Sequence
  Synthetic oligonucleotide
ccattcaagaacttaagccattcagccgtc

SEQ ID NO: 18547 - DNA, 30 bp, Artificial Sequence
  Synthetic oligonucleotide
tctagacccgacattaacagaatacgcgtc

SEQ ID NO: 18548 - DNA, 30 bp, Artificial Sequence
  Synthetic oligonucleotide
acgacagtgagatacgacgatttctgggtc

SEQ ID NO: 18549 - DNA, 30 bp, Artificial Sequence
  Synthetic oligonucleotide
agagggtacaacgtaagctcgaatatggtc

SEQ ID NO: 18550 - DNA, 30 bp, Artificial Sequence
  Synthetic oligonucleotide
cgtcacagtacacctaaggatggctatgtc

SEQ ID NO: 18551 - DNA, 30 bp, Artificial Sequence
  Synthetic oligonucleotide
acgccaaaagagcatctacccacgtcattc

SEQ ID NO: 18552 - DNA, 30 bp, Artificial Sequence
  Synthetic oligonucleotide
ctggaaaggggagacgaaaagacttatttc

SEQ ID NO: 18553 - DNA, 30 bp, Artificial Sequence
  Synthetic oligonucleotide
aagccaggtgtaaacgaaaactcataaaag

SEQ ID NO: 18554 - DNA, 30 bp, Artificial Sequence
  Synthetic oligonucleotide
agtgagcaaattatcaggccgcgataaaag

SEQ ID NO: 18555 - DNA, 30 bp, Artificial Sequence
  Synthetic oligonucleotide
tcagggccctagcaggaagatgcgtaaaag

SEQ ID NO: 18556 - DNA, 30 bp, Artificial Sequence
  Synthetic oligonucleotide
cggttcggtgaatacgctacgacaacaaag

SEQ ID NO: 18557 - DNA, 30 bp, Artificial Sequence
  Synthetic oligonucleotide
ggtatgctaaatagaaatcttgccacaaag

SEQ ID NO: 18558 - DNA, 30 bp, Artificial Sequence
  Synthetic oligonucleotide
tcacatcaagaatataaaaagtctacaaag

SEQ ID NO: 18559 - DNA, 30 bp, Artificial Sequence
  Synthetic oligonucleotide
gcaagaaaaaccgaccagaactgggcaaag

SEQ ID NO: 18560 - DNA, 30 bp, Artificial Sequence
  Synthetic oligonucleotide
ggcgccgtaacccagttgagcgtgcgaaag

SEQ ID NO: 18561 - DNA, 30 bp, Artificial Sequence
  Synthetic oligonucleotide
atatgggtcgggatagcaactaaaggaaag

SEQ ID NO: 18562 - DNA, 30 bp, Artificial Sequence
  Synthetic oligonucleotide
cagcggaggagacaagcatcggtgtgaaag

SEQ ID NO: 18563 - DNA, 30 bp, Artificial Sequence
  Synthetic oligonucleotide
aacaccaaaatggataaatgtggcataaag

SEQ ID NO: 18564 - DNA, 30 bp, Artificial Sequence
  Synthetic oligonucleotide
cacgtaacttgcggcaaaagcggcctaaag

SEQ ID NO: 18565 - DNA, 30 bp, Artificial Sequence
  Synthetic oligonucleotide
tcatcaaatcatcaccagacaggaaccaag

SEQ ID NO: 18566 - DNA, 30 bp, Artificial Sequence
  Synthetic oligonucleotide
tcacggagagtagaggagccaacacccaag

SEQ ID NO: 18567 - DNA, 30 bp, Artificial Sequence
  Synthetic oligonucleotide
aaggccagggcacaaccatcccttcgcaag

SEQ ID NO: 18568 - DNA, 30 bp, Artificial Sequence
  Synthetic oligonucleotide
agacaaaagccgcaagatggtcaagtcaag

SEQ ID NO: 18569 - DNA, 30 bp, Artificial Sequence
  Synthetic oligonucleotide
acagagtgcaccctagaatgctacaagaag

SEQ ID NO: 18570 - DNA, 30 bp, Artificial Sequence
  Synthetic oligonucleotide
cggataggaagggagaattcgcgatagaag

SEQ ID NO: 18571 - DNA, 30 bp, Artificial Sequence
  Synthetic oligonucleotide
atccttacgggacacaagagagtaacgaag

SEQ ID NO: 18572 - DNA, 30 bp, Artificial Sequence
  Synthetic oligonucleotide
cgaattcgagttcgcgaaaatatgacgaag

SEQ ID NO: 18573 - DNA, 30 bp, Artificial Sequence
  Synthetic oligonucleotide
aggaagttatagatggatagagccaggaag

SEQ ID NO: 18574 - DNA, 30 bp, Artificial Sequence
  Synthetic oligonucleotide
cgtgctgacattgagattaaatgggggaag

SEQ ID NO: 18575 - DNA, 30 bp, Artificial Sequence
  Synthetic oligonucleotide
cacagagtacaacccgataggcggtggaag

SEQ ID NO: 18576 - DNA, 30 bp, Artificial Sequence
  Synthetic oligonucleotide
ggtacgagataagtgcgtaattgtcataag

SEQ ID NO: 18577 - DNA, 30 bp, Artificial Sequence
  Synthetic oligonucleotide
cggttgagaagtgaacgatagatgactaag

SEQ ID NO: 18578 - DNA, 30 bp, Artificial Sequence
  Synthetic oligonucleotide
gggcgaactttgtagaaacccgtacgtaag

SEQ ID NO: 18579 - DNA, 30 bp, Artificial Sequence
  Synthetic oligonucleotide
tgcggctctgagggaagagcgatacaacag

SEQ ID NO: 18580 - DNA, 30 bp, Artificial Sequence
  Synthetic oligonucleotide
cggaaaaaacttcgtacagtgcaccaacag

SEQ ID NO: 18581 - DNA, 30 bp, Artificial Sequence
  Synthetic oligonucleotide
caactgcggagcaccaccaggcaggaacag

SEQ ID NO: 18582 - DNA, 30 bp, Artificial Sequence
  Synthetic oligonucleotide
tcaggtgcggacgtgtcaattacgtaacag

SEQ ID NO: 18583 - DNA, 30 bp, Artificial Sequence
  Synthetic oligonucleotide
acaagacacgaacgtaacatctcctcacag

SEQ ID NO: 18584 - DNA, 30 bp, Artificial Sequence
  Synthetic oligonucleotide
acagatagtccagaataggggctaagacag

SEQ ID NO: 18585 - DNA, 30 bp, Artificial Sequence
  Synthetic oligonucleotide
cacgcttgaggaaaaaccactaagggacag

SEQ ID NO: 18586 - DNA, 30 bp, Artificial Sequence
  Synthetic oligonucleotide
gcctaagaggttggaaccgagatgatacag

SEQ ID NO: 18587 - DNA, 30 bp, Artificial Sequence
  Synthetic oligonucleotide
acggcattcacctagccgagttcgaaccag

SEQ ID NO: 18588 - DNA, 30 bp, Artificial Sequence
  Synthetic oligonucleotide
gccaagagcaaatccgttagtcacgaccag

SEQ ID NO: 18589 - DNA, 30 bp, Artificial Sequence
  Synthetic oligonucleotide
tacggtgcgctgctaggaacgaagacccag

SEQ ID NO: 18590 - DNA, 30 bp, Artificial Sequence
  Synthetic oligonucleotide
gcgtgcctgcccaaaacctccgatacccag

SEQ ID NO: 18591 - DNA, 30 bp, Artificial Sequence
  Synthetic oligonucleotide
gcgagtcatttggtaaaagaatgaggccag

SEQ ID NO: 18592 - DNA, 30 bp, Artificial Sequence
  Synthetic oligonucleotide
tgggggaacacatccgtcgggaactgccag

SEQ ID NO: 18593 - DNA, 30 bp, Artificial Sequence
  Synthetic oligonucleotide
cgataagtagctccagggaggccgtgccag

SEQ ID NO: 18594 - DNA, 30 bp, Artificial Sequence
  Synthetic oligonucleotide
aaccgaggggaccggtcacacatcaagcag

SEQ ID NO: 18595 - DNA, 30 bp, Artificial Sequence
  Synthetic oligonucleotide
aagacagttatagaaattacaggggagcag

SEQ ID NO: 18596 - DNA, 30 bp, Artificial Sequence
  Synthetic oligonucleotide
cacgtccagcttactacataggaatagcag

SEQ ID NO: 18597 - DNA, 30 bp, Artificial Sequence
  Synthetic oligonucleotide
acacatggactatagcgtgaaaccaggcag

SEQ ID NO: 18598 - DNA, 30 bp, Artificial Sequence
  Synthetic oligonucleotide
atctgaaccaaacaggggagcgaggggcag

SEQ ID NO: 18599 - DNA, 30 bp, Artificial Sequence
  Synthetic oligonucleotide
tcgaggcgattgtatggacccacatggcag

SEQ ID NO: 18600 - DNA, 30 bp, Artificial Sequence
  Synthetic oligonucleotide
caggggtaaactatggacgaatatgtgcag

SEQ ID NO: 18601 - DNA, 30 bp, Artificial Sequence
  Synthetic oligonucleotide
tgggcccacgatgagcaaaaaactgtgcag

SEQ ID NO: 18602 - DNA, 31 bp, Artificial Sequence
  Synthetic oligonucleotide
tgtggaatgaggcaaacagcagcttgatcag

SEQ ID NO: 18603 - DNA, 30 bp, Artificial Sequence
  Synthetic oligonucleotide
cttcgccaaaactagtagatacaagctcag

SEQ ID NO: 18604 - DNA, 30 bp, Artificial Sequence
  Synthetic oligonucleotide
gtagtagcaaagcgggaagtagtacgtcag

SEQ ID NO: 18605 - DNA, 30 bp, Artificial Sequence
  Synthetic oligonucleotide
aggatcaataagcggcgatgtatgcttcag

SEQ ID NO: 18606 - DNA, 30 bp, Artificial Sequence
  Synthetic oligonucleotide
ggtaaaccagagtagactacgaccaaagag

SEQ ID NO: 18607 - DNA, 30 bp, Artificial Sequence
  Synthetic oligonucleotide
ggacatatcgacgacgaaaaagcgaaagag

SEQ ID NO: 18608 - DNA, 30 bp, Artificial Sequence
  Synthetic oligonucleotide
tagtcatctaaataatcggtacagagagag

SEQ ID NO: 18609 - DNA, 30 bp, Artificial Sequence
  Synthetic oligonucleotide
tacgaatcccatcaagcgtgccggtgagag

SEQ ID NO: 18610 - DNA, 30 bp, Artificial Sequence
  Synthetic oligonucleotide
tgcgagtcgacgaggtattgcgcaaacgag

SEQ ID NO: 18611 - DNA, 30 bp, Artificial Sequence
  Synthetic oligonucleotide
gcaggatggtctcccacgccaaatgacgag

SEQ ID NO: 18612 - DNA, 30 bp, Artificial Sequence
  Synthetic oligonucleotide
gagaaataacgggacttggctcgaaccgag

SEQ ID NO: 18613 - DNA, 30 bp, Artificial Sequence
  Synthetic oligonucleotide
aacggggcagaaccgaagaacagcaccgag

SEQ ID NO: 18614 - DNA, 30 bp, Artificial Sequence
  Synthetic oligonucleotide
caggggactaggagcagacacaataccgag

SEQ ID NO: 18615 - DNA, 30 bp, Artificial Sequence
  Synthetic oligonucleotide
agcagggcaccaggtagaatggagagcgag

SEQ ID NO: 18616 - DNA, 30 bp, Artificial Sequence
  Synthetic oligonucleotide
agtcatgagcagggctgagatgagagcgag

SEQ ID NO: 18617 - DNA, 30 bp, Artificial Sequence
  Synthetic oligonucleotide
gggcaacacgaatatatcctgtgccgcgag

SEQ ID NO: 18618 - DNA, 30 bp, Artificial Sequence
  Synthetic oligonucleotide
catcgctcaagaataaccttgtgccgcgag

SEQ ID NO: 18619 - DNA, 30 bp, Artificial Sequence
  Synthetic oligonucleotide
tagagatgacaaaatggaaaaaggcgcgag

SEQ ID NO: 18620 - DNA, 30 bp, Artificial Sequence
  Synthetic oligonucleotide
gggcgtgagaacaccagtggttcatgcgag

SEQ ID NO: 18621 - DNA, 30 bp, Artificial Sequence
  Synthetic oligonucleotide
aacgatgacaatgtataccgtacgctcgag

SEQ ID NO: 18622 - DNA, 30 bp, Artificial Sequence
  Synthetic oligonucleotide
gcttaaaaaatgggccgttgaaggctcgag

SEQ ID NO: 18623 - DNA, 30 bp, Artificial Sequence
  Synthetic oligonucleotide
acgctataagaaacacatgctcatctcgag

SEQ ID NO: 18624 - DNA, 30 bp, Artificial Sequence
  Synthetic oligonucleotide
gtagcgagggcggcatagtagaacaaggag

SEQ ID NO: 18625 - DNA, 30 bp, Artificial Sequence
  Synthetic oligonucleotide
gggcggtgtagattataacaatcgaaggag

SEQ ID NO: 18626 - DNA, 30 bp, Artificial Sequence
  Synthetic oligonucleotide
gcgagtcctactggaaagggtcccacggag

SEQ ID NO: 18627 - DNA, 30 bp, Artificial Sequence
  Synthetic oligonucleotide
cttcgaactagaccgtcttttgccacggag

SEQ ID NO: 18628 - DNA, 30 bp, Artificial Sequence
  Synthetic oligonucleotide
acctcaacgacttgagatcacagtccggag

SEQ ID NO: 18629 - DNA, 30 bp, Artificial Sequence
  Synthetic oligonucleotide
gcgatgtgagtggaaaatagatacagggag

SEQ ID NO: 18630 - DNA, 30 bp, Artificial Sequence
  Synthetic oligonucleotide
ccgcaaacgattatagacccgactagggag

SEQ ID NO: 18631 - DNA, 30 bp, Artificial Sequence
  Synthetic oligonucleotide
cggctatacgatcgatgaaactatggggag

SEQ ID NO: 18632 - DNA, 30 bp, Artificial Sequence
  Synthetic oligonucleotide
agagacgatcgccatatcgcagaagtggag

SEQ ID NO: 18633 - DNA, 30 bp, Artificial Sequence
  Synthetic oligonucleotide
acgcccgtcgcgtgcaacctgaagaatgag

SEQ ID NO: 18634 - DNA, 30 bp, Artificial Sequence
  Synthetic oligonucleotide
acacctcaaagtttttacgaggcgaatgag

SEQ ID NO: 18635 - DNA, 30 bp, Artificial Sequence
  Synthetic oligonucleotide
tagacacatgataaaaaggtcctgcatgag

SEQ ID NO: 18636 - DNA, 30 bp, Artificial Sequence
  Synthetic oligonucleotide
atagaagtaaagcatcagatcaacgatgag

SEQ ID NO: 18637 - DNA, 30 bp, Artificial Sequence
  Synthetic oligonucleotide
gctgggtacaagggccaagagatgtctgag

SEQ ID NO: 18638 - DNA, 30 bp, Artificial Sequence
  Synthetic oligonucleotide
catgtggtgtgaaggcaaacggaccgtgag

SEQ ID NO: 18639 - DNA, 30 bp, Artificial Sequence
  Synthetic oligonucleotide
cgatcgtaagatccacatctgaagggtgag

SEQ ID NO: 18640 - DNA, 30 bp, Artificial Sequence
  Synthetic oligonucleotide
aggggcgatcagaccaaggagcaaattgag

SEQ ID NO: 18641 - DNA, 30 bp, Artificial Sequence
  Synthetic oligonucleotide
tactaacaggaagcgcaatgagccattgag

SEQ ID NO: 18642 - DNA, 30 bp, Artificial Sequence
  Synthetic oligonucleotide
ggcggcctggacattggagtcagaaaatag

SEQ ID NO: 18643 - DNA, 30 bp, Artificial Sequence
  Synthetic oligonucleotide
gaggactttcaccaggtaaaagcgcaatag

SEQ ID NO: 18644 - DNA, 30 bp, Artificial Sequence
  Synthetic oligonucleotide
agacgacatacaggcctaagcttgccatag

SEQ ID NO: 18645 - DNA, 30 bp, Artificial Sequence
  Synthetic oligonucleotide
gcagcaggtgatgacaatgagatgagatag

SEQ ID NO: 18646 - DNA, 30 bp, Artificial Sequence
  Synthetic oligonucleotide
atgatagggagttggaagagtgaaaactag

SEQ ID NO: 18647 - DNA, 30 bp, Artificial Sequence
  Synthetic oligonucleotide
cgagtctcgaaccggtcgggcagatcctag

SEQ ID NO: 18648 - DNA, 30 bp, Artificial Sequence
  Synthetic oligonucleotide
actgctcgaagggcaccgaaggctatctag

SEQ ID NO: 18649 - DNA, 30 bp, Artificial Sequence
  Synthetic oligonucleotide
aaaacacgcattcgagagcaattagagtag

SEQ ID NO: 18650 - DNA, 30 bp, Artificial Sequence
  Synthetic oligonucleotide
ttacggaagacaccttcgtaacaggagtag

SEQ ID NO: 18651 - DNA, 30 bp, Artificial Sequence
  Synthetic oligonucleotide
ggaggatggaccaccatgtatactgagtag

SEQ ID NO: 18652 - DNA, 30 bp, Artificial Sequence
  Synthetic oligonucleotide
aggtcaaacagggtggccactactgagtag

SEQ ID NO: 18653 - DNA, 30 bp, Artificial Sequence
  Synthetic oligonucleotide
taggatagggcaatgtgtgcgtaacggtag

SEQ ID NO: 18654 - DNA, 30 bp, Artificial Sequence
  Synthetic oligonucleotide
tagatcacagagtcagaggcgtgcggttag

SEQ ID NO: 18655 - DNA, 30 bp, Artificial Sequence
  Synthetic oligonucleotide
ggagcggcttaaagggacaccagtacaacg

SEQ ID NO: 18656 - DNA, 30 bp, Artificial Sequence
  Synthetic oligonucleotide
cgggaatggagagcaattgatgtaccaacg

SEQ ID NO: 18657 - DNA, 30 bp, Artificial Sequence
  Synthetic oligonucleotide
ggaaagcgagacatatagtagaagtgaacg

SEQ ID NO: 18658 - DNA, 30 bp, Artificial Sequence
  Synthetic oligonucleotide
tctatgccggcaagaatccccgtaataacg

SEQ ID NO: 18659 - DNA, 30 bp, Artificial Sequence
  Synthetic oligonucleotide
ctcaaatcatataccacaacctaaaacacg

SEQ ID NO: 18660 - DNA, 30 bp, Artificial Sequence
  Synthetic oligonucleotide
ataacggaaacagggaaaattgtagacacg

SEQ ID NO: 18661 - DNA, 31 bp, Artificial Sequence
  Synthetic oligonucleotide
accaggagaccgagcgaacgcgcagctcacg

SEQ ID NO: 18662 - DNA, 30 bp, Artificial Sequence
  Synthetic oligonucleotide
tcgtaaggtgaaaagggatcattgaagacg

SEQ ID NO: 18663 - DNA, 30 bp, Artificial Sequence
  Synthetic oligonucleotide
cctccacccgaacgagtgagacccgagacg

SEQ ID NO: 18664 - DNA, 30 bp, Artificial Sequence
  Synthetic oligonucleotide
cgacaggagaaggtaaagtacaaatagacg

SEQ ID NO: 18665 - DNA, 30 bp, Artificial Sequence
  Synthetic oligonucleotide
tagcaagatacgaggattcgagagtggacg

SEQ ID NO: 18666 - DNA, 30 bp, Artificial Sequence
  Synthetic oligonucleotide
caaaatcaatcgaggaccgttgcgaatacg

SEQ ID NO: 18667 - DNA, 30 bp, Artificial Sequence
  Synthetic oligonucleotide
ctggaaaggcagagctcataagatgctacg

SEQ ID NO: 18668 - DNA, 30 bp, Artificial Sequence
  Synthetic oligonucleotide
gggggccgtggggaagagcgtattaaaccg

SEQ ID NO: 18669 - DNA, 30 bp, Artificial Sequence
  Synthetic oligonucleotide
taacacactagtgtaaattaggcaccaccg

SEQ ID NO: 18670 - DNA, 30 bp, Artificial Sequence
  Synthetic oligonucleotide
atcttcactaaacacaaaggcagagtaccg

SEQ ID NO: 18671 - DNA, 30 bp, Artificial Sequence
  Synthetic oligonucleotide
caataagaccggacggggagaaccgacccg

SEQ ID NO: 18672 - DNA, 30 bp, Artificial Sequence
  Synthetic oligonucleotide
acaccgtagatcgagagagtcaactgcccg

SEQ ID NO: 18673 - DNA, 30 bp, Artificial Sequence
  Synthetic oligonucleotide
ggtggatacagcgaaaagactaaacagccg

SEQ ID NO: 18674 - DNA, 30 bp, Artificial Sequence
  Synthetic oligonucleotide
tgagggtcaatataggggcgagatgagccg

SEQ ID NO: 18675 - DNA, 30 bp, Artificial Sequence
  Synthetic oligonucleotide
catgcaacaagtcggataagagaagtgccg

SEQ ID NO: 18676 - DNA, 30 bp, Artificial Sequence
  Synthetic oligonucleotide
tgatagacagggttagggaaagtaaatccg

SEQ ID NO: 18677 - DNA, 30 bp, Artificial Sequence
  Synthetic oligonucleotide
cgtggaaacggcaatgggtaggaaactccg

SEQ ID NO: 18678 - DNA, 30 bp, Artificial Sequence
  Synthetic oligonucleotide
agggagaagtgcaccgacccgatcactccg

SEQ ID NO: 18679 - DNA, 30 bp, Artificial Sequence
  Synthetic oligonucleotide
gcagacaaagtagtgcaaattagcagtccg

SEQ ID NO: 18680 - DNA, 30 bp, Artificial Sequence
  Synthetic oligonucleotide
ggtggagcccgtaatgtcggccgatgtccg

SEQ ID NO: 18681 - DNA, 30 bp, Artificial Sequence
  Synthetic oligonucleotide
cctagcgagtccgtcgaacaaagacttccg

SEQ ID NO: 18682 - DNA, 30 bp, Artificial Sequence
  Synthetic oligonucleotide
agaaacacaacgcatggtaaaaaggttccg

SEQ ID NO: 18683 - DNA, 30 bp, Artificial Sequence
  Synthetic oligonucleotide
tctgaatgtgatacaccgacagagaaagcg

SEQ ID NO: 18684 - DNA, 30 bp, Artificial Sequence
  Synthetic oligonucleotide
gagcccagcaagtggatacaacacacagcg

SEQ ID NO: 18685 - DNA, 30 bp, Artificial Sequence
  Synthetic oligonucleotide
cagggtcgtacagtgaatttaataccagcg

SEQ ID NO: 18686 - DNA, 30 bp, Artificial Sequence
  Synthetic oligonucleotide
acgagctgagaaactagaaatctgaccgcg

SEQ ID NO: 18687 - DNA, 30 bp, Artificial Sequence
  Synthetic oligonucleotide
acacgtagatctccggaacttagaaaggcg

SEQ ID NO: 18688 - DNA, 30 bp, Artificial Sequence
  Synthetic oligonucleotide
cccagaagtcaaaagggcctagagaaggcg

SEQ ID NO: 18689 - DNA, 30 bp, Artificial Sequence
  Synthetic oligonucleotide
tgagccggaacgtgcggggatggagaggcg

SEQ ID NO: 18690 - DNA, 30 bp, Artificial Sequence
  Synthetic oligonucleotide
cgaaaccctcggcatataggaaggtaggcg

SEQ ID NO: 18691 - DNA, 30 bp, Artificial Sequence
  Synthetic oligonucleotide
tcagctaaagattagagttgacaaagggcg

SEQ ID NO: 18692 - DNA, 30 bp, Artificial Sequence
  Synthetic oligonucleotide
aggcacgaggctgaaatcggaaaccatgcg

SEQ ID NO: 18693 - DNA, 30 bp, Artificial Sequence
  Synthetic oligonucleotide
acggaagagtgattaagaagcccatatgcg

SEQ ID NO: 18694 - DNA, 30 bp, Artificial Sequence
  Synthetic oligonucleotide
tcgactcgattgtgggcaaggtgcactgcg

SEQ ID NO: 18695 - DNA, 30 bp, Artificial Sequence
  Synthetic oligonucleotide
aggtctgtgaaatgggcccacgtgagtgcg

SEQ ID NO: 18696 - DNA, 30 bp, Artificial Sequence
  Synthetic oligonucleotide
gttcggcgggtaagtcgctgaaaaggtgcg

SEQ ID NO: 18697 - DNA, 30 bp, Artificial Sequence
  Synthetic oligonucleotide
gcacagtagagtgtctcgatccgatgtgcg

SEQ ID NO: 18698 - DNA, 30 bp, Artificial Sequence
  Synthetic oligonucleotide
cgcccagatgacaagagtcgatcgattgcg

SEQ ID NO: 18699 - DNA, 30 bp, Artificial Sequence
  Synthetic oligonucleotide
tggaagagtcaagatcacgacgggcttgcg

SEQ ID NO: 18700 - DNA, 30 bp, Artificial Sequence
  Synthetic oligonucleotide
ccgaggctagagcataaggttgggaaatcg

SEQ ID NO: 18701 - DNA, 30 bp, Artificial Sequence
  Synthetic oligonucleotide
acgttcgagtcgcgagaaatgcataaatcg

SEQ ID NO: 18702 - DNA, 30 bp, Artificial Sequence
  Synthetic oligonucleotide
cgaggacgcgagtgcgttctgaccgaatcg

SEQ ID NO: 18703 - DNA, 30 bp, Artificial Sequence
  Synthetic oligonucleotide
gggatgataatggcacacaacaaaagatcg

SEQ ID NO: 18704 - DNA, 30 bp, Artificial Sequence
  Synthetic oligonucleotide
ccctagggcaaaaggtgttgaacccgatcg

SEQ ID NO: 18705 - DNA, 30 bp, Artificial Sequence
  Synthetic oligonucleotide
acgaacgagggaccccaagcggtaggatcg

SEQ ID NO: 18706 - DNA, 30 bp, Artificial Sequence
  Synthetic oligonucleotide
tgggacctcgtgggaaatcaatactgatcg

SEQ ID NO: 18707 - DNA, 30 bp, Artificial Sequence
  Synthetic oligonucleotide
acgaacccaatccgaattcgcgttcactcg

SEQ ID NO: 18708 - DNA, 30 bp, Artificial Sequence
  Synthetic oligonucleotide
tgaaaaaaacaccttataaacttacgctcg

SEQ ID NO: 18709 - DNA, 30 bp, Artificial Sequence
  Synthetic oligonucleotide
gcgagcagttaggtacatccagtatagtcg

SEQ ID NO: 18710 - DNA, 30 bp, Artificial Sequence
  Synthetic oligonucleotide
tgcgggggatagaaggccggtgagtagtcg

SEQ ID NO: 18711 - DNA, 30 bp, Artificial Sequence
  Synthetic oligonucleotide
cgaaatagcaagtcgaggcgggatacgtcg

SEQ ID NO: 18712 - DNA, 30 bp, Artificial Sequence
  Synthetic oligonucleotide
acgaaaagagcaaggacgaaggaatggtcg

SEQ ID NO: 18713 - DNA, 30 bp, Artificial Sequence
  Synthetic oligonucleotide
aggaacaaggcgggtcaaacctcaatttcg

SEQ ID NO: 18714 - DNA, 30 bp, Artificial Sequence
  Synthetic oligonucleotide
gaaccgtcgccaacgggagggccataaagg

SEQ ID NO: 18715 - DNA, 30 bp, Artificial Sequence
  Synthetic oligonucleotide
gtgatggaaaaaatcggggagtaagcaagg

SEQ ID NO: 18716 - DNA, 30 bp, Artificial Sequence
  Synthetic oligonucleotide
ctagcgctcaaagaatctgggcccagaagg

SEQ ID NO: 18717 - DNA, 30 bp, Artificial Sequence
  Synthetic oligonucleotide
acagcactaagataagtaacctcaataagg

SEQ ID NO: 18718 - DNA, 30 bp, Artificial Sequence
  Synthetic oligonucleotide
ggatgaacgacagaattaaacaaggtaagg

SEQ ID NO: 18719 - DNA, 30 bp, Artificial Sequence
  Synthetic oligonucleotide
ggtgtacaccaaaaggagctcgcggtaagg

SEQ ID NO: 18720 - DNA, 30 bp, Artificial Sequence
  Synthetic oligonucleotide
aagggaacttgcacaccaacaggccacagg

SEQ ID NO: 18721 - DNA, 30 bp, Artificial Sequence
  Synthetic oligonucleotide
tcaactcgaaaaacgctaaataacgccagg

SEQ ID NO: 18722 - DNA, 30 bp, Artificial Sequence
  Synthetic oligonucleotide
atctacaacaaatgcgagtatcataagagg

SEQ ID NO: 18723 - DNA, 30 bp, Artificial Sequence
  Synthetic oligonucleotide
atagatctaatcagcaaggaactcccgagg

SEQ ID NO: 18724 - DNA, 30 bp, Artificial Sequence
  Synthetic oligonucleotide
cgatacagcttgtagtgtaaaaaagcgagg

SEQ ID NO: 18725 - DNA, 30 bp, Artificial Sequence
  Synthetic oligonucleotide
gaggaaacataaagggctaccgtgatgagg

SEQ ID NO: 18726 - DNA, 30 bp, Artificial Sequence
  Synthetic oligonucleotide
tgatcccgggtcatcccaagcgaaaatagg

SEQ ID NO: 18727 - DNA, 30 bp, Artificial Sequence
  Synthetic oligonucleotide
aggaggcaagaattgttccacagggatagg

SEQ ID NO: 18728 - DNA, 30 bp, Artificial Sequence
  Synthetic oligonucleotide
cgccgtatagtagagcagagggtgagtagg

SEQ ID NO: 18729 - DNA, 30 bp, Artificial Sequence
  Synthetic oligonucleotide
aagctgatgtgtagggcatggaaaattagg

SEQ ID NO: 18730 - DNA, 30 bp, Artificial Sequence
  Synthetic oligonucleotide
cggctgtaagaaagcgatattgcgatacgg

SEQ ID NO: 18731 - DNA, 30 bp, Artificial Sequence
  Synthetic oligonucleotide
cgttaaaggtgaacgacacaatacacccgg

SEQ ID NO: 18732 - DNA, 30 bp, Artificial Sequence
  Synthetic oligonucleotide
ggagaaacagggaccgaccatatgacccgg

SEQ ID NO: 18733 - DNA, 30 bp, Artificial Sequence
  Synthetic oligonucleotide
agtacaaccgtgagagagcacaacatgcgg

SEQ ID NO: 18734 - DNA, 30 bp, Artificial Sequence
  Synthetic oligonucleotide
tgcggagcggtatcaagtcaatgcgtgcgg

SEQ ID NO: 18735 - DNA, 30 bp, Artificial Sequence
  Synthetic oligonucleotide
atagaggaaagcaaacacggcaggaatcgg

SEQ ID NO: 18736 - DNA, 30 bp, Artificial Sequence
  Synthetic oligonucleotide
tatcgcgagggcgaactaactacgcttcgg

SEQ ID NO: 18737 - DNA, 30 bp, Artificial Sequence
  Synthetic oligonucleotide
cgagagcctttctgcgtcggatcataaggg

SEQ ID NO: 18738 - DNA, 30 bp, Artificial Sequence
  Synthetic oligonucleotide
aagggtcaaaagctccaggaagtataaggg

SEQ ID NO: 18739 - DNA, 30 bp, Artificial Sequence
  Synthetic oligonucleotide
gcaacgcgaattatgaacgaggcctaaggg

SEQ ID NO: 18740 - DNA, 30 bp, Artificial Sequence
  Synthetic oligonucleotide
gcaatcaggtgaataatgaccccaacaggg

SEQ ID NO: 18741 - DNA, 30 bp, Artificial Sequence
  Synthetic oligonucleotide
gacgtgggtaaaggaaaggttaaactaggg

SEQ ID NO: 18742 - DNA, 30 bp, Artificial Sequence
  Synthetic oligonucleotide
accacaacaaccttgaaggagaaattaggg

SEQ ID NO: 18743 - DNA, 30 bp, Artificial Sequence
  Synthetic oligonucleotide
aggagcagaaacaagttggtatcatccggg

SEQ ID NO: 18744 - DNA, 30 bp, Artificial Sequence
  Synthetic oligonucleotide
cagattagtctcaaggcgtcgtatgtcggg

SEQ ID NO: 18745 - DNA, 30 bp, Artificial Sequence
  Synthetic oligonucleotide
aacggcaaaggagttgtacgaagattcggg

SEQ ID NO: 18746 - DNA, 30 bp, Artificial Sequence
  Synthetic oligonucleotide
acgtagtaggttgagccttttgggaagggg

SEQ ID NO: 18747 - DNA, 30 bp, Artificial Sequence
  Synthetic oligonucleotide
tatgaaagaaggtgccgatagggcgcgggg

SEQ ID NO: 18748 - DNA, 30 bp, Artificial Sequence
  Synthetic oligonucleotide
gctgaaatagatggcgaaagattgtcgggg

SEQ ID NO: 18749 - DNA, 30 bp, Artificial Sequence
  Synthetic oligonucleotide
tcgctcgaaaacttagcacaagggtctggg

SEQ ID NO: 18750 - DNA, 30 bp, Artificial Sequence
  Synthetic oligonucleotide
gatgaacgatcatacaacacaacgagtggg

SEQ ID NO: 18751 - DNA, 30 bp, Artificial Sequence
  Synthetic oligonucleotide
cgtcaatgcgtacctataccgatatgtggg

SEQ ID NO: 18752 - DNA, 30 bp, Artificial Sequence
  Synthetic oligonucleotide
acgaggaatcaaacccaactagcacttggg

SEQ ID NO: 18753 - DNA, 30 bp, Artificial Sequence
  Synthetic oligonucleotide
ccgacgaagaacaggagggggatggttggg

SEQ ID NO: 18754 - DNA, 30 bp, Artificial Sequence
  Synthetic oligonucleotide
gctgaacaggagcagtcggtgcataaatgg

SEQ ID NO: 18755 - DNA, 30 bp, Artificial Sequence
  Synthetic oligonucleotide
cgtggcacgagtgcgtgaagtaaaagatgg

SEQ ID NO: 18756 - DNA, 30 bp, Artificial Sequence
  Synthetic oligonucleotide
agggattaggcggatctgtaggaacgatgg

SEQ ID NO: 18757 - DNA, 30 bp, Artificial Sequence
  Synthetic oligonucleotide
cagtcgggacagagaaaacgagccggatgg

SEQ ID NO: 18758 - DNA, 30 bp, Artificial Sequence
  Synthetic oligonucleotide
tcacaaatgcgaaatacacatgccgactgg

SEQ ID NO: 18759 - DNA, 30 bp, Artificial Sequence
  Synthetic oligonucleotide
cgaacactgttagaaaatgattccgtctgg

SEQ ID NO: 18760 - DNA, 30 bp, Artificial Sequence
  Synthetic oligonucleotide
ttcggaagactcaactcaaatagccagtgg

SEQ ID NO: 18761 - DNA, 30 bp, Artificial Sequence
  Synthetic oligonucleotide
gggatggggagattgctcgtaagaacgtgg

SEQ ID NO: 18762 - DNA, 30 bp, Artificial Sequence
  Synthetic oligonucleotide
gttgggagacgatcggatcaaagagaaatg

SEQ ID NO: 18763 - DNA, 30 bp, Artificial Sequence
  Synthetic oligonucleotide
gcggcgccagaacgggctaacacataaatg

SEQ ID NO: 18764 - DNA, 30 bp, Artificial Sequence
  Synthetic oligonucleotide
agtggacgggatgtgatcctcgaaccaatg

SEQ ID NO: 18765 - DNA, 30 bp, Artificial Sequence
  Synthetic oligonucleotide
cacttggcgggagcaagcaaagaccgaatg

SEQ ID NO: 18766 - DNA, 30 bp, Artificial Sequence
  Synthetic oligonucleotide
tcagggccggaacctatgcgcgtaggaatg

SEQ ID NO: 18767 - DNA, 30 bp, Artificial Sequence
  Synthetic oligonucleotide
agtagctggaacgatctagtggcgggaatg

SEQ ID NO: 18768 - DNA, 31 bp, Artificial Sequence
  Synthetic oligonucleotide
cgaatgtaagcagaaggagaggacctgaatg

SEQ ID NO: 18769 - DNA, 30 bp, Artificial Sequence
  Synthetic oligonucleotide
gcggcggtaaagacggtaagaaattgaatg

SEQ ID NO: 18770 - DNA, 30 bp, Artificial Sequence
  Synthetic oligonucleotide
aggctatcaagcatcagatcctcaagcatg

SEQ ID NO: 18771 - DNA, 30 bp, Artificial Sequence
  Synthetic oligonucleotide
cgagccaatgctcagatgctcagtaagatg

SEQ ID NO: 18772 - DNA, 30 bp, Artificial Sequence
  Synthetic oligonucleotide
atagcgaatcacatgctccaacaacagatg

SEQ ID NO: 18773 - DNA, 30 bp, Artificial Sequence
  Synthetic oligonucleotide
accaaagtcagggtgtgggaggatatgatg

SEQ ID NO: 18774 - DNA, 30 bp, Artificial Sequence
  Synthetic oligonucleotide
aggtataatagcccgaccgacagggtgatg

SEQ ID NO: 18775 - DNA, 30 bp, Artificial Sequence
  Synthetic oligonucleotide
tgggcacggagtagcgttactgagattatg

SEQ ID NO: 18776 - DNA, 30 bp, Artificial Sequence
  Synthetic oligonucleotide
acgatgctggaagcacaatgaacagaactg

SEQ ID NO: 18777 - DNA, 30 bp, Artificial Sequence
  Synthetic oligonucleotide
cgacaacgttacgaaaaatccggtcacctg

SEQ ID NO: 18778 - DNA, 30 bp, Artificial Sequence
  Synthetic oligonucleotide
agcacgtctcgaaaccatcaccaccggctg

SEQ ID NO: 18779 - DNA, 30 bp, Artificial Sequence
  Synthetic oligonucleotide
tgaagggcgaaactaaaactaggtgctctg

SEQ ID NO: 18780 - DNA, 30 bp, Artificial Sequence
  Synthetic oligonucleotide
cgatacgggacaacgctagggatacttctg

SEQ ID NO: 18781 - DNA, 30 bp, Artificial Sequence
  Synthetic oligonucleotide
tatgaaatatgctagaagatcaggaaagtg

SEQ ID NO: 18782 - DNA, 30 bp, Artificial Sequence
  Synthetic oligonucleotide
ccgtaaggtcgtaacgaaataacgtaagtg

SEQ ID NO: 18783 - DNA, 30 bp, Artificial Sequence
  Synthetic oligonucleotide
aactgtctagggtcaatgaaacatccagtg

SEQ ID NO: 18784 - DNA, 30 bp, Artificial Sequence
  Synthetic oligonucleotide
agggtaaatggagttgttataaggtcagtg

SEQ ID NO: 18785 - DNA, 30 bp, Artificial Sequence
  Synthetic oligonucleotide
acaaagggcgtcccgcaaaaaaagggagtg

SEQ ID NO: 18786 - DNA, 30 bp, Artificial Sequence
  Synthetic oligonucleotide
agcgcgattaccgtggatacgtctctagtg

SEQ ID NO: 18787 - DNA, 30 bp, Artificial Sequence
  Synthetic oligonucleotide
gcaagagaacggtgggacaatcaaaacgtg

SEQ ID NO: 18788 - DNA, 30 bp, Artificial Sequence
  Synthetic oligonucleotide
acgtgaaggaacgtcaaccattaatccgtg

SEQ ID NO: 18789 - DNA, 30 bp, Artificial Sequence
  Synthetic oligonucleotide
ccgaaacctgcgaggcgataaggatgcgtg

SEQ ID NO: 18790 - DNA, 30 bp, Artificial Sequence
  Synthetic oligonucleotide
atgctcaacaatgcaataggcgaagaggtg

SEQ ID NO: 18791 - DNA, 30 bp, Artificial Sequence
  Synthetic oligonucleotide
tcgacccaacaaggtactcgcatgtaggtg

SEQ ID NO: 18792 - DNA, 30 bp, Artificial Sequence
  Synthetic oligonucleotide
cggaaacgaccgaggaaaggaacttaggtg

SEQ ID NO: 18793 - DNA, 30 bp, Artificial Sequence
  Synthetic oligonucleotide
gcggatctaacaagcataagggatggggtg

SEQ ID NO: 18794 - DNA, 30 bp, Artificial Sequence
  Synthetic oligonucleotide
gatcgacgggaagtcctggccgagaatgtg

SEQ ID NO: 18795 - DNA, 30 bp, Artificial Sequence
  Synthetic oligonucleotide
cgtcaaaacgcggacaaaaagctccctgtg

SEQ ID NO: 18796 - DNA, 30 bp, Artificial Sequence
  Synthetic oligonucleotide
gcaaatcgccagagtccaacctgcagtgtg

SEQ ID NO: 18797 - DNA, 30 bp, Artificial Sequence
  Synthetic oligonucleotide
cagacaacatcgtccaagaggctcagtgtg

SEQ ID NO: 18798 - DNA, 30 bp, Artificial Sequence
  Synthetic oligonucleotide
ctgagagacaaggatggtagcttcggtgtg

SEQ ID NO: 18799 - DNA, 30 bp, Artificial Sequence
  Synthetic oligonucleotide
cgtaatgtgcgaaacgtaaagaaataattg

SEQ ID NO: 18800 - DNA, 30 bp, Artificial Sequence
  Synthetic oligonucleotide
cgacacgatcacagtggcgggccaacattg

SEQ ID NO: 18801 - DNA, 30 bp, Artificial Sequence
  Synthetic oligonucleotide
acagtagtaggggcaacggcctgctcattg

SEQ ID NO: 18802 - DNA, 30 bp, Artificial Sequence
  Synthetic oligonucleotide
agagtggcccctggtcgaagaggaatattg

SEQ ID NO: 18803 - DNA, 30 bp, Artificial Sequence
  Synthetic oligonucleotide
ttacttattttgtaataagttgattacttg

SEQ ID NO: 18804 - DNA, 30 bp, Artificial Sequence
  Synthetic oligonucleotide
tagacggatggtacctcagaatacaccttg

SEQ ID NO: 18805 - DNA, 30 bp, Artificial Sequence
  Synthetic oligonucleotide
cggcgacgagttcacggccaaatgaggttg

SEQ ID NO: 18806 - DNA, 30 bp, Artificial Sequence
  Synthetic oligonucleotide
ggggtcccgaatgaaggtacaagctggttg

SEQ ID NO: 18807 - DNA, 30 bp, Artificial Sequence
  Synthetic oligonucleotide
gcggggtcgaacatgccgtctaattctttg

SEQ ID NO: 18808 - DNA, 31 bp, Artificial Sequence
  Synthetic oligonucleotide
acatagcaggagtagaccgagacaataaaat

SEQ ID NO: 18809 - DNA, 30 bp, Artificial Sequence
  Synthetic oligonucleotide
agcggcttacgacatccgaactaatacaat

SEQ ID NO: 18810 - DNA, 30 bp, Artificial Sequence
  Synthetic oligonucleotide
cataagagacgggccagataccaaggcaat

SEQ ID NO: 18811 - DNA, 30 bp, Artificial Sequence
  Synthetic oligonucleotide
acaagtgatcagtcagggggagtgaagaat

SEQ ID NO: 18812 - DNA, 30 bp, Artificial Sequence
  Synthetic oligonucleotide
cgatgggttacacaagcaaaggtacagaat

SEQ ID NO: 18813 - DNA, 30 bp, Artificial Sequence
  Synthetic oligonucleotide
gaagaagaacactaggcgagtcatacgaat

SEQ ID NO: 18814 - DNA, 30 bp, Artificial Sequence
  Synthetic oligonucleotide
taacagtacatctcagcctacagagcgaat

SEQ ID NO: 18815 - DNA, 30 bp, Artificial Sequence
  Synthetic oligonucleotide
cgaggtggtcattacaaagggtaacggaat

SEQ ID NO: 18816 - DNA, 30 bp, Artificial Sequence
  Synthetic oligonucleotide
tcggacggtcctgagtatcgcgtacggaat

SEQ ID NO: 18817 - DNA, 30 bp, Artificial Sequence
  Synthetic oligonucleotide
aggtgacatagtggaagcgtaccatggaat

SEQ ID NO: 18818 - DNA, 30 bp, Artificial Sequence
  Synthetic oligonucleotide
agggaggcaataaactaccacgtgatgaat

SEQ ID NO: 18819 - DNA, 30 bp, Artificial Sequence
  Synthetic oligonucleotide
aggagggggatcacgttgagggcgagtaat

SEQ ID NO: 18820 - DNA, 30 bp, Artificial Sequence
  Synthetic oligonucleotide
acatagcagccaagggtagcagggagtaat

SEQ ID NO: 18821 - DNA, 30 bp, Artificial Sequence
  Synthetic oligonucleotide
gtagagttgcatatggagggataacggcat

SEQ ID NO: 18822 - DNA, 30 bp, Artificial Sequence
  Synthetic oligonucleotide
aggaggagttgtgtggtaaaggacctgcat

SEQ ID NO: 18823 - DNA, 30 bp, Artificial Sequence
  Synthetic oligonucleotide
cagaaccgccggagaattaggaagttgcat

SEQ ID NO: 18824 - DNA, 30 bp, Artificial Sequence
  Synthetic oligonucleotide
gtgggatcggaggttccacaatgcagtcat

SEQ ID NO: 18825 - DNA, 30 bp, Artificial Sequence
  Synthetic oligonucleotide
acatcctccaaggtgacagggttcagtcat

SEQ ID NO: 18826 - DNA, 30 bp, Artificial Sequence
  Synthetic oligonucleotide
acagcgagccgatgtgtcaaccataaagat

SEQ ID NO: 18827 - DNA, 30 bp, Artificial Sequence
  Synthetic oligonucleotide
ggagaaagaacagattctgggcagcaagat

SEQ ID NO: 18828 - DNA, 30 bp, Artificial Sequence
  Synthetic oligonucleotide
gattgaaggccaagggggaaaagaatagat

SEQ ID NO: 18829 - DNA, 30 bp, Artificial Sequence
  Synthetic oligonucleotide
cgaaagatcacggtcccagaaatagacgat

SEQ ID NO: 18830 - DNA, 30 bp, Artificial Sequence
  Synthetic oligonucleotide
atggaaaaagtgtagcaaatgggccccgat

SEQ ID NO: 18831 - DNA, 30 bp, Artificial Sequence
  Synthetic oligonucleotide
gacgggtcgtctaaggaggagctaaaggat

SEQ ID NO: 18832 - DNA, 30 bp, Artificial Sequence
  Synthetic oligonucleotide
gcctcgagcatcggggacagacagaaggat

SEQ ID NO: 18833 - DNA, 30 bp, Artificial Sequence
  Synthetic oligonucleotide
aagtggtgaaaaacatagagctaacaggat

SEQ ID NO: 18834 - DNA, 30 bp, Artificial Sequence
  Synthetic oligonucleotide
aggggagtaacttggcgataacaccaggat

SEQ ID NO: 18835 - DNA, 30 bp, Artificial Sequence
  Synthetic oligonucleotide
cgatcgagtgcaccagcaggtgggcaggat

SEQ ID NO: 18836 - DNA, 30 bp, Artificial Sequence
  Synthetic oligonucleotide
agtgggcagtggaaagagttatcagaggat

SEQ ID NO: 18837 - DNA, 30 bp, Artificial Sequence
  Synthetic oligonucleotide
ggggcgggtgacaatacatagcctgcggat

SEQ ID NO: 18838 - DNA, 30 bp, Artificial Sequence
  Synthetic oligonucleotide
agggagtatgtgaaatggatcgaactggat

SEQ ID NO: 18839 - DNA, 30 bp, Artificial Sequence
  Synthetic oligonucleotide
gcgccaaaacgcatgcgaactaccgaatat

SEQ ID NO: 18840 - DNA, 30 bp, Artificial Sequence
  Synthetic oligonucleotide
gggtggttgaagagagaaacatagacatat

SEQ ID NO: 18841 - DNA, 30 bp, Artificial Sequence
  Synthetic oligonucleotide
aggaatgtcccggtccatgagaagcgatat

SEQ ID NO: 18842 - DNA, 30 bp, Artificial Sequence
  Synthetic oligonucleotide
gccgaacgaaacacggaagaagagtgatat

SEQ ID NO: 18843 - DNA, 30 bp, Artificial Sequence
  Synthetic oligonucleotide
cacaggtgttcgaaaagagtgaacaattat

SEQ ID NO: 18844 - DNA, 30 bp, Artificial Sequence
  Synthetic oligonucleotide
agacagggatttaaaatgaaggtacagact

SEQ ID NO: 18845 - DNA, 30 bp, Artificial Sequence
  Synthetic oligonucleotide
cgcgacggattacgacagtagcgagcgact

SEQ ID NO: 18846 - DNA, 30 bp, Artificial Sequence
  Synthetic oligonucleotide
aagcgcgaatatgcaagtgtgcggctgact

SEQ ID NO: 18847 - DNA, 31 bp, Artificial Sequence
  Synthetic oligonucleotide
aagagaagccaacacaagacaatggctgact

SEQ ID NO: 18848 - DNA, 30 bp, Artificial Sequence
  Synthetic oligonucleotide
ggacaaaattaacaaacacctaacagtact

SEQ ID NO: 18849 - DNA, 30 bp, Artificial Sequence
  Synthetic oligonucleotide
ggaaaaacgaaccgccggcgacctagacct

SEQ ID NO: 18850 - DNA, 30 bp, Artificial Sequence
  Synthetic oligonucleotide
agggtaatctaacagagggttcagcaagct

SEQ ID NO: 18851 - DNA, 30 bp, Artificial Sequence
  Synthetic oligonucleotide
tacgctgattcaaggagggtagcgcaagct

SEQ ID NO: 18852 - DNA, 30 bp, Artificial Sequence
  Synthetic oligonucleotide
tgagaatgtaacagcaatggattaacagct

SEQ ID NO: 18853 - DNA, 30 bp, Artificial Sequence
  Synthetic oligonucleotide
aaccgacaaacaccggaatgcgcatcagct

SEQ ID NO: 18854 - DNA, 30 bp, Artificial Sequence
  Synthetic oligonucleotide
catgctcgcccattacagagcggagtagct

SEQ ID NO: 18855 - DNA, 30 bp, Artificial Sequence
  Synthetic oligonucleotide
gtcgcaagggtcaatcagaagtagcgtgct

SEQ ID NO: 18856 - DNA, 30 bp, Artificial Sequence
  Synthetic oligonucleotide
taggcctaacagggccagaagtcgcgtgct

SEQ ID NO: 18857 - DNA, 30 bp, Artificial Sequence
  Synthetic oligonucleotide
accgccaacaactaatctacgaacaggtct

SEQ ID NO: 18858 - DNA, 30 bp, Artificial Sequence
  Synthetic oligonucleotide
gatcgaagagtataagcgagtccataaagt

SEQ ID NO: 18859 - DNA, 30 bp, Artificial Sequence
  Synthetic oligonucleotide
ttgagtgcctaagagggcgacaagttaagt

SEQ ID NO: 18860 - DNA, 30 bp, Artificial Sequence
  Synthetic oligonucleotide
cccaacgcgatgaggatgccttgagggagt

SEQ ID NO: 18861 - DNA, 30 bp, Artificial Sequence
  Synthetic oligonucleotide
tcgaggccgagtaagtggaatgtgttgagt

SEQ ID NO: 18862 - DNA, 30 bp, Artificial Sequence
  Synthetic oligonucleotide
cgataaataagaatcgcgcagtctcaacgt

SEQ ID NO: 18863 - DNA, 30 bp, Artificial Sequence
  Synthetic oligonucleotide
acgatagggaagaacatagaattggcacgt

SEQ ID NO: 18864 - DNA, 30 bp, Artificial Sequence
  Synthetic oligonucleotide
aggcaccacataaacaagcgtgaaccccgt

SEQ ID NO: 18865 - DNA, 30 bp, Artificial Sequence
  Synthetic oligonucleotide
tcggcagacgtaaagggtaacggagtgcgt

SEQ ID NO: 18866 - DNA, 31 bp, Artificial Sequence
  Synthetic oligonucleotide
tgggagtcctaaagctgcagatccgcatcgt

SEQ ID NO: 18867 - DNA, 30 bp, Artificial Sequence
  Synthetic oligonucleotide
ggtggaaagcaatgcgctacatacgatcgt

SEQ ID NO: 18868 - DNA, 30 bp, Artificial Sequence
  Synthetic oligonucleotide
gcatggaacacgagaagtaaagggcctcgt

SEQ ID NO: 18869 - DNA, 30 bp, Artificial Sequence
  Synthetic oligonucleotide
tggtataaggtacgtctgaagaaggaaggt

SEQ ID NO: 18870 - DNA, 30 bp, Artificial Sequence
  Synthetic oligonucleotide
tcaaaatgccgggagtcgtgcgcgcgaggt

SEQ ID NO: 18871 - DNA, 30 bp, Artificial Sequence
  Synthetic oligonucleotide
ggtcagataaagcgtaattccctagcgggt

SEQ ID NO: 18872 - DNA, 30 bp, Artificial Sequence
  Synthetic oligonucleotide
cgcatagggcgaaacagaagatcggggggt

SEQ ID NO: 18873 - DNA, 30 bp, Artificial Sequence
  Synthetic oligonucleotide
acgaagccgcattaccaaagaaccagtggt

SEQ ID NO: 18874 - DNA, 30 bp, Artificial Sequence
  Synthetic oligonucleotide
cgcacgatactagtgcaaaatgagtgtggt

SEQ ID NO: 18875 - DNA, 30 bp, Artificial Sequence
  Synthetic oligonucleotide
gcgtggctaggggaacgtcggctcgagtgt

SEQ ID NO: 18876 - DNA, 30 bp, Artificial Sequence
  Synthetic oligonucleotide
cgaacagttggacaacagaggcacgaaatt

SEQ ID NO: 18877 - DNA, 30 bp, Artificial Sequence
  Synthetic oligonucleotide
tcgagagcatgagtacagatgagcaccatt

SEQ ID NO: 18878 - DNA, 30 bp, Artificial Sequence
  Synthetic oligonucleotide
ccgtactaagcaggtccagggaaaagcatt

SEQ ID NO: 18879 - DNA, 30 bp, Artificial Sequence
  Synthetic oligonucleotide
cggtacagaataaaactggcacccctcatt

SEQ ID NO: 18880 - DNA, 30 bp, Artificial Sequence
  Synthetic oligonucleotide
ccgcgtagtcgaatgtcgaaagtgccgatt

SEQ ID NO: 18881 - DNA, 30 bp, Artificial Sequence
  Synthetic oligonucleotide
gggcgatcgggctgacagaaaaaggcgatt

SEQ ID NO: 18882 - DNA, 30 bp, Artificial Sequence
  Synthetic oligonucleotide
aggcttaacacctcgaaactgagagctctt

SEQ ID NO: 18883 - DNA, 30 bp, Artificial Sequence
  Synthetic oligonucleotide
cgggcagtggactacagcgagagccgtctt

SEQ ID NO: 18884 - DNA, 30 bp, Artificial Sequence
  Synthetic oligonucleotide
caaaacaagccctgacaccaccgagcagtt

SEQ ID NO: 18885 - DNA, 30 bp, Artificial Sequence
  Synthetic oligonucleotide
tagacaacaaaacgaggcaaggagtgcgtt

SEQ ID NO: 18886 - DNA, 30 bp, Artificial Sequence
  Synthetic oligonucleotide
atccgcgtaacgcctaacagagccgaaaaa

SEQ ID NO: 18887 - DNA, 30 bp, Artificial Sequence
  Synthetic oligonucleotide
agggtcgtagtagcctgagtcgagccaaaa

SEQ ID NO: 18888 - DNA, 30 bp, Artificial Sequence
  Synthetic oligonucleotide
cgcccaaacggacgtaagtgaaccagaaaa

SEQ ID NO: 18889 - DNA, 30 bp, Artificial Sequence
  Synthetic oligonucleotide
cactgccccgaaatgagggcgagccgaaaa

SEQ ID NO: 18890 - DNA, 30 bp, Artificial Sequence
  Synthetic oligonucleotide
agggaatgagcgctcgagtgagacataaaa

SEQ ID NO: 18891 - DNA, 30 bp, Artificial Sequence
  Synthetic oligonucleotide
cgcaaggatacaagaggttcgcgcgtaaaa

SEQ ID NO: 18892 - DNA, 30 bp, Artificial Sequence
  Synthetic oligonucleotide
gtggcgattaaatgaaactccatcgtaaaa

SEQ ID NO: 18893 - DNA, 30 bp, Artificial Sequence
  Synthetic oligonucleotide
aagggatgtaattaaccagtaactcacaaa

SEQ ID NO: 18894 - DNA, 30 bp, Artificial Sequence
  Synthetic oligonucleotide
gttcgaatccaggtagcacgaagtcacaaa

SEQ ID NO: 18895 - DNA, 30 bp, Artificial Sequence
  Synthetic oligonucleotide
aggttcagaaccgtgcacgtgtagggcaaa

SEQ ID NO: 18896 - DNA, 30 bp, Artificial Sequence
  Synthetic oligonucleotide
acggaaggagatcaagggcggttgttcaaa

SEQ ID NO: 18897 - DNA, 30 bp, Artificial Sequence
  Synthetic oligonucleotide
ggacacatgggggagcgagaccatttcaaa

SEQ ID NO: 18898 - DNA, 30 bp, Artificial Sequence
  Synthetic oligonucleotide
cggtagggttgtacctggggctgagagaaa

SEQ ID NO: 18899 - DNA, 30 bp, Artificial Sequence
  Synthetic oligonucleotide
cagtacggaatgtcaacgtgctgcccgaaa

SEQ ID NO: 18900 - DNA, 30 bp, Artificial Sequence
  Synthetic oligonucleotide
tgaagagcgcggtcgcacatggaggggaaa

SEQ ID NO: 18901 - DNA, 30 bp, Artificial Sequence
  Synthetic oligonucleotide
gcttacaacggctgagatccgacaatgaaa

SEQ ID NO: 18902 - DNA, 30 bp, Artificial Sequence
  Synthetic oligonucleotide
aggacgatagagaaaataagtacactgaaa

SEQ ID NO: 18903 - DNA, 36 bp, Artificial Sequence
  Synthetic oligonucleotide
ttaagtttccgttgtgtaggtttactcccgtataaa

SEQ ID NO: 18904 - DNA, 30 bp, Artificial Sequence
  Synthetic oligonucleotide
tacgtcaggatggggtgaagttaaactaaa

SEQ ID NO: 18905 - DNA, 30 bp, Artificial Sequence
  Synthetic oligonucleotide
agggtgtgaaggccgacaagggaagctaaa

SEQ ID NO: 18906 - DNA, 30 bp, Artificial Sequence
  Synthetic oligonucleotide
ccacggatgagtaccagcgtcagatctaaa

SEQ ID NO: 18907 - DNA, 30 bp, Artificial Sequence
  Synthetic oligonucleotide
agcgtgaatcgatccaaacaatgaggtaaa

SEQ ID NO: 18908 - DNA, 30 bp, Artificial Sequence
  Synthetic oligonucleotide
aggcagctaagatagtaaggcgttggtaaa

SEQ ID NO: 18909 - DNA, 30 bp, Artificial Sequence
  Synthetic oligonucleotide
agacacgaagtaagcaaagggttgtttaaa

SEQ ID NO: 18910 - DNA, 30 bp, Artificial Sequence
  Synthetic oligonucleotide
acgggttcagggggctatcactgtgaacaa

SEQ ID NO: 18911 - DNA, 30 bp, Artificial Sequence
  Synthetic oligonucleotide
tcacatgctaatacggcgacaagaccacaa

SEQ ID NO: 18912 - DNA, 30 bp, Artificial Sequence
  Synthetic oligonucleotide
agtgcaaggacggtcccacgttgaccacaa

SEQ ID NO: 18913 - DNA, 30 bp, Artificial Sequence
  Synthetic oligonucleotide
ccaaacctacgagggatcccgacagcacaa

SEQ ID NO: 18914 - DNA, 30 bp, Artificial Sequence
  Synthetic oligonucleotide
acaggatagattcatgcacagtgcgcacaa

SEQ ID NO: 18915 - DNA, 30 bp, Artificial Sequence
  Synthetic oligonucleotide
acgcaacgtgcagttacgagtgggtcacaa

SEQ ID NO: 18916 - DNA, 30 bp, Artificial Sequence
  Synthetic oligonucleotide
tggcagccggacacaagctcggtaagacaa

SEQ ID NO: 18917 - DNA, 30 bp, Artificial Sequence
  Synthetic oligonucleotide
cgggagggaatgccgtcattgagacgacaa

SEQ ID NO: 18918 - DNA, 30 bp, Artificial Sequence
  Synthetic oligonucleotide
tcgcgagcaccaagcttactaacccgacaa

SEQ ID NO: 18919 - DNA, 30 bp, Artificial Sequence
  Synthetic oligonucleotide
accagggaggcttcgagggtatatctacaa

SEQ ID NO: 18920 - DNA, 30 bp, Artificial Sequence
  Synthetic oligonucleotide
ctcagaaacacaaaacaaaaaccgttacaa

SEQ ID NO: 18921 - DNA, 30 bp, Artificial Sequence
  Synthetic oligonucleotide
gaacaccggttcacaggagtcagggaccaa

SEQ ID NO: 18922 - DNA, 30 bp, Artificial Sequence
  Synthetic oligonucleotide
acgcgcacgaacatacatcaaggcgcccaa

SEQ ID NO: 18923 - DNA, 31 bp, Artificial Sequence
  Synthetic oligonucleotide
acatcgcagggatgaagggaaggaggggcaa

SEQ ID NO: 18924 - DNA, 30 bp, Artificial Sequence
  Synthetic oligonucleotide
cgtgtgacgggaagaaggcaaacaaatcaa

SEQ ID NO: 18925 - DNA, 30 bp, Artificial Sequence
  Synthetic oligonucleotide
ccttgtggatacaactgtgtaaggaatcaa

SEQ ID NO: 18926 - DNA, 30 bp, Artificial Sequence
  Synthetic oligonucleotide
agaaggaggctaagaagtctgacacgtcaa

SEQ ID NO: 18927 - DNA, 30 bp, Artificial Sequence
  Synthetic oligonucleotide
acgaaaatagtatctcgcgtatcccgtcaa

SEQ ID NO: 18928 - DNA, 30 bp, Artificial Sequence
  Synthetic oligonucleotide
agaggggtggacactcacgtgaactgtcaa

SEQ ID NO: 18929 - DNA, 30 bp, Artificial Sequence
  Synthetic oligonucleotide
aatgacaagtacagggcagtaacggaagaa

SEQ ID NO: 18930 - DNA, 30 bp, Artificial Sequence
  Synthetic oligonucleotide
tggagtgtgttgaaataaattagcacagaa

SEQ ID NO: 18931 - DNA, 30 bp, Artificial Sequence
  Synthetic oligonucleotide
ggtaaccagaatcgttagcaattcacagaa

SEQ ID NO: 18932 - DNA, 30 bp, Artificial Sequence
  Synthetic oligonucleotide
ttagccaaacgtaatcagaagacggtagaa

SEQ ID NO: 18933 - DNA, 30 bp, Artificial Sequence
  Synthetic oligonucleotide
caaggaaactctatgtcaagcataaacgaa

SEQ ID NO: 18934 - DNA, 30 bp, Artificial Sequence
  Synthetic oligonucleotide
caacgcactagtgggggacactttaccgaa

SEQ ID NO: 18935 - DNA, 30 bp, Artificial Sequence
  Synthetic oligonucleotide
cggacgtcaggcgtagtaatcatccgcgaa

SEQ ID NO: 18936 - DNA, 30 bp, Artificial Sequence
  Synthetic oligonucleotide
actggggagagggattcctccaggtgcgaa

SEQ ID NO: 18937 - DNA, 30 bp, Artificial Sequence
  Synthetic oligonucleotide
tcggtaaacgaccgtctaagaaagcaggaa

SEQ ID NO: 18938 - DNA, 30 bp, Artificial Sequence
  Synthetic oligonucleotide
gcaaaaggagaacaacctgattagcaggaa

SEQ ID NO: 18939 - DNA, 30 bp, Artificial Sequence
  Synthetic oligonucleotide
aagagcgtggaccgaaccgcccaaacggaa

SEQ ID NO: 18940 - DNA, 30 bp, Artificial Sequence
  Synthetic oligonucleotide
cggagtcctccagacaaaagtcaagcggaa

SEQ ID NO: 18941 - DNA, 30 bp, Artificial Sequence
  Synthetic oligonucleotide
atgctaaaccagagctatcgaggatcggaa

SEQ ID NO: 18942 - DNA, 30 bp, Artificial Sequence
  Synthetic oligonucleotide
gggaacgggcagagctgaaaaaattgggaa

SEQ ID NO: 18943 - DNA, 30 bp, Artificial Sequence
  Synthetic oligonucleotide
aggtttagaagactaatggagtcgcatgaa

SEQ ID NO: 18944 - DNA, 30 bp, Artificial Sequence
  Synthetic oligonucleotide
ggaaaaaacaacgttaagctaccagatgaa

SEQ ID NO: 18945 - DNA, 30 bp, Artificial Sequence
  Synthetic oligonucleotide
acggcacttaatcggttaactacaactgaa

SEQ ID NO: 18946 - DNA, 30 bp, Artificial Sequence
  Synthetic oligonucleotide
cgtagtaaaggagagccgtgccgaactgaa

SEQ ID NO: 18947 - DNA, 30 bp, Artificial Sequence
  Synthetic oligonucleotide
cgaggtctccccaactctaaggggcgtgaa

SEQ ID NO: 18948 - DNA, 30 bp, Artificial Sequence
  Synthetic oligonucleotide
acagcaatggattcttagcaagctcgtgaa

SEQ ID NO: 18949 - DNA, 30 bp, Artificial Sequence
  Synthetic oligonucleotide
cgaagtcatgagaattaataaatgcaataa

SEQ ID NO: 18950 - DNA, 30 bp, Artificial Sequence
  Synthetic oligonucleotide
cgaacaacgggcacagcttgcaggtaataa

SEQ ID NO: 18951 - DNA, 30 bp, Artificial Sequence
  Synthetic oligonucleotide
gcatgccatgagacgtggagggaacgataa

SEQ ID NO: 18952 - DNA, 30 bp, Artificial Sequence
  Synthetic oligonucleotide
gaaggtgtcgatcgacagataaccaggtaa

SEQ ID NO: 18953 - DNA, 30 bp, Artificial Sequence
  Synthetic oligonucleotide
gtagatattgccagatacaaggaggggtaa

SEQ ID NO: 18954 - DNA, 30 bp, Artificial Sequence
  Synthetic oligonucleotide
cgatgagaaggggacatcctcaagtggtaa

SEQ ID NO: 18955 - DNA, 30 bp, Artificial Sequence
  Synthetic oligonucleotide
tcgttgggaaggtaaccatcgacacattaa

SEQ ID NO: 18956 - DNA, 30 bp, Artificial Sequence
  Synthetic oligonucleotide
gcgggtgtcaggtgacaaagaactggttaa

SEQ ID NO: 18957 - DNA, 30 bp, Artificial Sequence
  Synthetic oligonucleotide
cagtagcaccaaaatatcgagaactgttaa

SEQ ID NO: 18958 - DNA, 30 bp, Artificial Sequence
  Synthetic oligonucleotide
ttctcacagggctcggggaaatgcgaaaca

SEQ ID NO: 18959 - DNA, 30 bp, Artificial Sequence
  Synthetic oligonucleotide
tagtgtggggggaagtccaacgtggaaaca

SEQ ID NO: 18960 - DNA, 30 bp, Artificial Sequence
  Synthetic oligonucleotide
ggcataaagggaaatgcgctagaatgaaca

SEQ ID NO: 18961 - DNA, 30 bp, Artificial Sequence
  Synthetic oligonucleotide
ggagcggaacagttccaggctaccgtaaca

SEQ ID NO: 18962 - DNA, 30 bp, Artificial Sequence
  Synthetic oligonucleotide
ggggaaaccaagtcgctaactagcttaaca

SEQ ID NO: 18963 - DNA, 30 bp, Artificial Sequence
  Synthetic oligonucleotide
aaataccgaagagctagaacaagaaacaca

SEQ ID NO: 18964 - DNA, 30 bp, Artificial Sequence
  Synthetic oligonucleotide
gcacggcatcattagataatagatcacaca

SEQ ID NO: 18965 - DNA, 30 bp, Artificial Sequence
  Synthetic oligonucleotide
agatagggctagcgaatcggatacaccaca

SEQ ID NO: 18966 - DNA, 30 bp, Artificial Sequence
  Synthetic oligonucleotide
gtaaccagaggagtcccaacgtcacccaca

SEQ ID NO: 18967 - DNA, 31 bp, Artificial Sequence
  Synthetic oligonucleotide
taagcctacggcaggaatgaaaagagagaca

SEQ ID NO: 18968 - DNA, 30 bp, Artificial Sequence
  Synthetic oligonucleotide
ggcattgttagagcagagaaaaacacgaca

SEQ ID NO: 18969 - DNA, 30 bp, Artificial Sequence
  Synthetic oligonucleotide
cacatgaagggtaagacggacaatgcgaca

SEQ ID NO: 18970 - DNA, 30 bp, Artificial Sequence
  Synthetic oligonucleotide
cggacctcgagaaaaggcacatggcggaca

SEQ ID NO: 18971 - DNA, 30 bp, Artificial Sequence
  Synthetic oligonucleotide
taatccaaaaagaagaattacataaaacca

SEQ ID NO: 18972 - DNA, 30 bp, Artificial Sequence
  Synthetic oligonucleotide
tggggggtacggcgagattacaacgaacca

SEQ ID NO: 18973 - DNA, 30 bp, Artificial Sequence
  Synthetic oligonucleotide
cacgtattcgagtccgatagggaggaacca

SEQ ID NO: 18974 - DNA, 30 bp, Artificial Sequence
  Synthetic oligonucleotide
tcaaagaagggcgcgacctcaacatgacca

SEQ ID NO: 18975 - DNA, 30 bp, Artificial Sequence
  Synthetic oligonucleotide
cgagatgtgttgaaaagcagacgatgccca

SEQ ID NO: 18976 - DNA, 30 bp, Artificial Sequence
  Synthetic oligonucleotide
aggagaagcgtaaagtacctagaaatccca

SEQ ID NO: 18977 - DNA, 30 bp, Artificial Sequence
  Synthetic oligonucleotide
tcagagggcaccaggaaaggataaaagcca

SEQ ID NO: 18978 - DNA, 30 bp, Artificial Sequence
  Synthetic oligonucleotide
ctaagatcaaaaggaggaatacaacggcca

SEQ ID NO: 18979 - DNA, 30 bp, Artificial Sequence
  Synthetic oligonucleotide
gaagaagaaccgacgaagacacggcaagca

SEQ ID NO: 18980 - DNA, 30 bp, Artificial Sequence
  Synthetic oligonucleotide
ggcagtgcacgagaaaaggttagtgaagca

SEQ ID NO: 18981 - DNA, 30 bp, Artificial Sequence
  Synthetic oligonucleotide
acgtatggcccggtcctaaatggataagca

SEQ ID NO: 18982 - DNA, 30 bp, Artificial Sequence
  Synthetic oligonucleotide
ggcgggttctctaaaccgagtgcaccagca

SEQ ID NO: 18983 - DNA, 30 bp, Artificial Sequence
  Synthetic oligonucleotide
taaagactgaacaataaagagaggccagca

SEQ ID NO: 18984 - DNA, 30 bp, Artificial Sequence
  Synthetic oligonucleotide
tggaacagaagtgagctgtgctgggcagca

SEQ ID NO: 18985 - DNA, 30 bp, Artificial Sequence
  Synthetic oligonucleotide
cgagaataggacagtttagccgttggagca

SEQ ID NO: 18986 - DNA, 30 bp, Artificial Sequence
  Synthetic oligonucleotide
catcaacagaaggagcggcgtggcgtagca

SEQ ID NO: 18987 - DNA, 30 bp, Artificial Sequence
  Synthetic oligonucleotide
agacggatgagcacaccaaaagttaacgca

SEQ ID NO: 18988 - DNA, 30 bp, Artificial Sequence
  Synthetic oligonucleotide
catcggaacacaggcaagtcggaaaccgca

SEQ ID NO: 18989 - DNA, 30 bp, Artificial Sequence
  Synthetic oligonucleotide
accaaggtgcgaggtcactacagtagggca

SEQ ID NO: 18990 - DNA, 30 bp, Artificial Sequence
  Synthetic oligonucleotide
agaagaagatcaactggggctaaaggggca

SEQ ID NO: 18991 - DNA, 30 bp, Artificial Sequence
  Synthetic oligonucleotide
cggtaaaatatcgagtacagctcttgggca

SEQ ID NO: 18992 - DNA, 30 bp, Artificial Sequence
  Synthetic oligonucleotide
tcatcagtcacgggaatgagagcattggca

SEQ ID NO: 18993 - DNA, 30 bp, Artificial Sequence
  Synthetic oligonucleotide
actacgaagatgcggggggataacgctgca

SEQ ID NO: 18994 - DNA, 30 bp, Artificial Sequence
  Synthetic oligonucleotide
cataccgagcgggcgggtcgaacggctgca

SEQ ID NO: 18995 - DNA, 30 bp, Artificial Sequence
  Synthetic oligonucleotide
cgcaggcgatggcagtgaaccaggtgtgca

SEQ ID NO: 18996 - DNA, 30 bp, Artificial Sequence
  Synthetic oligonucleotide
acgacgcggagggctgtcggtctgtaatca

SEQ ID NO: 18997 - DNA, 30 bp, Artificial Sequence
  Synthetic oligonucleotide
accggcgaagacgggtcgagggtaatatca

SEQ ID NO: 18998 - DNA, 30 bp, Artificial Sequence
  Synthetic oligonucleotide
tacgaggtaacataggaactgagggactca

SEQ ID NO: 18999 - DNA, 30 bp, Artificial Sequence
  Synthetic oligonucleotide
agagatctaccagagggaggccacacctca

SEQ ID NO: 19000 - DNA, 30 bp, Artificial Sequence
  Synthetic oligonucleotide
aaggcgaaagtgaaaggtaatggcacctca

SEQ ID NO: 19001 - DNA, 30 bp, Artificial Sequence
  Synthetic oligonucleotide
aggaccactacaaagatacatattacctca

SEQ ID NO: 19002 - DNA, 30 bp, Artificial Sequence
  Synthetic oligonucleotide
gcggtacgaaagagagtagagtaatcctca

SEQ ID NO: 19003 - DNA, 31 bp, Artificial Sequence
  Synthetic oligonucleotide
ggacgagtacaaagaggctagatcatcctca

SEQ ID NO: 19004 - DNA, 30 bp, Artificial Sequence
  Synthetic oligonucleotide
tctggaactgtggggagagggttaagctca

SEQ ID NO: 19005 - DNA, 30 bp, Artificial Sequence
  Synthetic oligonucleotide
cataaagagtagatccctagtgtgagctca

SEQ ID NO: 19006 - DNA, 30 bp, Artificial Sequence
  Synthetic oligonucleotide
cggtccacattgtcgaacgaagggacgtca

SEQ ID NO: 19007 - DNA, 30 bp, Artificial Sequence
  Synthetic oligonucleotide
cacgttacggaagtgctcgtgggatcgtca

SEQ ID NO: 19008 - DNA, 30 bp, Artificial Sequence
  Synthetic oligonucleotide
catcggactatccatcaaggggcaaggtca

SEQ ID NO: 19009 - DNA, 30 bp, Artificial Sequence
  Synthetic oligonucleotide
cgtcgcatcgatcagaggagcaggtattca

SEQ ID NO: 19010 - DNA, 30 bp, Artificial Sequence
  Synthetic oligonucleotide
cctgtgccacaaggggagtggtgccgttca

SEQ ID NO: 19011 - DNA, 30 bp, Artificial Sequence
  Synthetic oligonucleotide
tcacgagggctactagataacgctaaaaga

SEQ ID NO: 19012 - DNA, 30 bp, Artificial Sequence
  Synthetic oligonucleotide
acagggacgtcagaaggatgcatgcaaaga

SEQ ID NO: 19013 - DNA, 30 bp, Artificial Sequence
  Synthetic oligonucleotide
cgtgtaagtgggagcgcgagttatcaaaga

SEQ ID NO: 19014 - DNA, 30 bp, Artificial Sequence
  Synthetic oligonucleotide
ggcacaaagtgctaagtgaaagctcaaaga

SEQ ID NO: 19015 - DNA, 30 bp, Artificial Sequence
  Synthetic oligonucleotide
cgtcaatgatgaggacaaggctcaacaaga

SEQ ID NO: 19016 - DNA, 30 bp, Artificial Sequence
  Synthetic oligonucleotide
gaacagcaggtgtgatagagccaaccaaga

SEQ ID NO: 19017 - DNA, 30 bp, Artificial Sequence
  Synthetic oligonucleotide
atggaatgaaccgttcgaatcgtagcaaga

SEQ ID NO: 19018 - DNA, 31 bp, Artificial Sequence
  Synthetic oligonucleotide
tattcggacgaagggcgaggggtactcaaga

SEQ ID NO: 19019 - DNA, 30 bp, Artificial Sequence
  Synthetic oligonucleotide
agtgcccccacgaaaatggaattgcgaaga

SEQ ID NO: 19020 - DNA, 30 bp, Artificial Sequence
  Synthetic oligonucleotide
ctgaggcatgaggtgttagagatggtaaga

SEQ ID NO: 19021 - DNA, 30 bp, Artificial Sequence
  Synthetic oligonucleotide
actgcaaagagaagactggggacgttaaga

SEQ ID NO: 19022 - DNA, 30 bp, Artificial Sequence
  Synthetic oligonucleotide
cgacacattggcgcgaaagcaaagaacaga

SEQ ID NO: 19023 - DNA, 30 bp, Artificial Sequence
  Synthetic oligonucleotide
aagaaaaggggaggggttaaagcgttcaga

SEQ ID NO: 19024 - DNA, 30 bp, Artificial Sequence
  Synthetic oligonucleotide
ctaggcccaagctaaaagcgtggaaagaga

SEQ ID NO: 19025 - DNA, 30 bp, Artificial Sequence
  Synthetic oligonucleotide
atcggagtggcccagggcagtaataagaga

SEQ ID NO: 19026 - DNA, 30 bp, Artificial Sequence
  Synthetic oligonucleotide
ttgacgggaacgtcaacgtgtttacagaga

SEQ ID NO: 19027 - DNA, 30 bp, Artificial Sequence
  Synthetic oligonucleotide
ggtgaacacaactgtagaggcctcgagaga

SEQ ID NO: 19028 - DNA, 30 bp, Artificial Sequence
  Synthetic oligonucleotide
agtgccgggctgacctgctggagtgagaga

SEQ ID NO: 19029 - DNA, 30 bp, Artificial Sequence
  Synthetic oligonucleotide
aataaccgggaagcgggtactgagccgaga

SEQ ID NO: 19030 - DNA, 30 bp, Artificial Sequence
  Synthetic oligonucleotide
tgagtaatgcgtaaaaacgggtgatcgaga

SEQ ID NO: 19031 - DNA, 30 bp, Artificial Sequence
  Synthetic oligonucleotide
cgatggtccgccgtgtgaaatcagatgaga

SEQ ID NO: 19032 - DNA, 30 bp, Artificial Sequence
  Synthetic oligonucleotide
ccatgcaatgaaggaaccacgggtgtgaga

SEQ ID NO: 19033 - DNA, 30 bp, Artificial Sequence
  Synthetic oligonucleotide
tcgactgacagggtatccaatacaaataga

SEQ ID NO: 19034 - DNA, 30 bp, Artificial Sequence
  Synthetic oligonucleotide
tgggcgagccgtactatcaaagctcataga

SEQ ID NO: 19035 - DNA, 30 bp, Artificial Sequence
  Synthetic oligonucleotide
agcgggggggaagtaagtgaagaggctaga

SEQ ID NO: 19036 - DNA, 30 bp, Artificial Sequence
  Synthetic oligonucleotide
ccatgaggacacagagcacttaagcgtaga

SEQ ID NO: 19037 - DNA, 40 bp, Artificial Sequence
  Synthetic oligonucleotide
tagtgcttgtaagtatcgtggtcaatgcgttgggggtaga

SEQ ID NO: 19038 - DNA, 30 bp, Artificial Sequence
  Synthetic oligonucleotide
aaccggccaatcaacgcgtaagggcaacga

SEQ ID NO: 19039 - DNA, 30 bp, Artificial Sequence
  Synthetic oligonucleotide
ttacagactgagtgtcagggtacggaacga

SEQ ID NO: 19040 - DNA, 30 bp, Artificial Sequence
  Synthetic oligonucleotide
gcaaataggagggtagggcctgcataacga

SEQ ID NO: 19041 - DNA, 30 bp, Artificial Sequence
  Synthetic oligonucleotide
taggcggcagacatgataaaagcaccacga

SEQ ID NO: 19042 - DNA, 30 bp, Artificial Sequence
  Synthetic oligonucleotide
ccgagtacgttggagtaagaccggccacga

SEQ ID NO: 19043 - DNA, 30 bp, Artificial Sequence
  Synthetic oligonucleotide
ccaaaaacaggaaggggtagggcctcacga

SEQ ID NO: 19044 - DNA, 30 bp, Artificial Sequence
  Synthetic oligonucleotide
cacgataaatgcacaggtcagtcgatacga

SEQ ID NO: 19045 - DNA, 30 bp, Artificial Sequence
  Synthetic oligonucleotide
cacgggggtcgaccaacaaggacggtacga

SEQ ID NO: 19046 - DNA, 30 bp, Artificial Sequence
  Synthetic oligonucleotide
aaaggagcgtgcacgataaaacgggtacga

SEQ ID NO: 19047 - DNA, 30 bp, Artificial Sequence
  Synthetic oligonucleotide
cgtaaaaccagactttttaagaggagccga

SEQ ID NO: 19048 - DNA, 30 bp, Artificial Sequence
  Synthetic oligonucleotide
caggggcgatatagtggatggcactgccga

SEQ ID NO: 19049 - DNA, 30 bp, Artificial Sequence
  Synthetic oligonucleotide
ggtgaaaaacatcccagatcaaccgtccga

SEQ ID NO: 19050 - DNA, 31 bp, Artificial Sequence
  Synthetic oligonucleotide
gtgagcgcaatctgaccagcgacaattccga

SEQ ID NO: 19051 - DNA, 30 bp, Artificial Sequence
  Synthetic oligonucleotide
ataggaacactcaagaaaataagcttccga

SEQ ID NO: 19052 - DNA, 30 bp, Artificial Sequence
  Synthetic oligonucleotide
ggaaaggatccaacatccagactgaggcga

SEQ ID NO: 19053 - DNA, 30 bp, Artificial Sequence
  Synthetic oligonucleotide
acttggctctagcgggcgaggaagatgcga

SEQ ID NO: 19054 - DNA, 30 bp, Artificial Sequence
  Synthetic oligonucleotide
agtggcggtaacgggtataacgaccatcga

SEQ ID NO: 19055 - DNA, 30 bp, Artificial Sequence
  Synthetic oligonucleotide
cggccgtcagtgaaggatacaagagatcga

SEQ ID NO: 19056 - DNA, 30 bp, Artificial Sequence
  Synthetic oligonucleotide
atgatatacgtaaatcaactaacgactcga

SEQ ID NO: 19057 - DNA, 30 bp, Artificial Sequence
  Synthetic oligonucleotide
atgacgacagtaagaatgagggggcgtcga

SEQ ID NO: 19058 - DNA, 30 bp, Artificial Sequence
  Synthetic oligonucleotide
acatccggaaaggtggtaaccgaaattcga

SEQ ID NO: 19059 - DNA, 30 bp, Artificial Sequence
  Synthetic oligonucleotide
tagcgagggcaattaaccatgaataaagga

SEQ ID NO: 19060 - DNA, 30 bp, Artificial Sequence
  Synthetic oligonucleotide
atagtgaatagtcaagatagcgaaacagga

SEQ ID NO: 19061 - DNA, 30 bp, Artificial Sequence
  Synthetic oligonucleotide
cacagaacaactgactacggtcggacagga

SEQ ID NO: 19062 - DNA, 30 bp, Artificial Sequence
  Synthetic oligonucleotide
gcccgagaacggacaaagacccaatgagga

SEQ ID NO: 19063 - DNA, 30 bp, Artificial Sequence
  Synthetic oligonucleotide
aggaatctcgcggacatatcacccgtagga

SEQ ID NO: 19064 - DNA, 30 bp, Artificial Sequence
  Synthetic oligonucleotide
agaccaagtaggtggaatttcgcatgcgga

SEQ ID NO: 19065 - DNA, 31 bp, Artificial Sequence
  Synthetic oligonucleotide
agctaaactgagggtggtaaacgcaaaggga

SEQ ID NO: 19066 - DNA, 30 bp, Artificial Sequence
  Synthetic oligonucleotide
cggacgcggaagtcgatagatagagcggga

SEQ ID NO: 19067 - DNA, 39 bp, Artificial Sequence
  Synthetic oligonucleotide
aagataatcattcatggtatggtcggggatcggggggga

SEQ ID NO: 19068 - DNA, 30 bp, Artificial Sequence
  Synthetic oligonucleotide
caagaataacaatctgcaacacaggtggga

SEQ ID NO: 19069 - DNA, 30 bp, Artificial Sequence
  Synthetic oligonucleotide
tcgtgcccgagatacgtgataaatgtggga

SEQ ID NO: 19070 - DNA, 30 bp, Artificial Sequence
  Synthetic oligonucleotide
cgagtaagggatgacccgctagagcatgga

SEQ ID NO: 19071 - DNA, 30 bp, Artificial Sequence
  Synthetic oligonucleotide
aacggccagatcatctgcaaggcgagtgga

SEQ ID NO: 19072 - DNA, 30 bp, Artificial Sequence
  Synthetic oligonucleotide
actgtaaggagtatgacagccaagggtgga

SEQ ID NO: 19073 - DNA, 30 bp, Artificial Sequence
  Synthetic oligonucleotide
aggcagaagagcgggtcgcacatgattgga

SEQ ID NO: 19074 - DNA, 30 bp, Artificial Sequence
  Synthetic oligonucleotide
ctagtagaagtacacaggagaaacacatga

SEQ ID NO: 19075 - DNA, 30 bp, Artificial Sequence
  Synthetic oligonucleotide
ccaacaaactgagatgagataagtccatga

SEQ ID NO: 19076 - DNA, 30 bp, Artificial Sequence
  Synthetic oligonucleotide
aggccgaagcttagaagtaagggcggctga

SEQ ID NO: 19077 - DNA, 30 bp, Artificial Sequence
  Synthetic oligonucleotide
cataaggaggtgctaaaccgaatgaagtga

SEQ ID NO: 19078 - DNA, 30 bp, Artificial Sequence
  Synthetic oligonucleotide
cacgtataagaggaataaataggccagtga

SEQ ID NO: 19079 - DNA, 30 bp, Artificial Sequence
  Synthetic oligonucleotide
tacggcgtccaacaacagtgtcactagtga

SEQ ID NO: 19080 - DNA, 30 bp, Artificial Sequence
  Synthetic oligonucleotide
cgaagtccgggattggtgagtcctgggtga

SEQ ID NO: 19081 - DNA, 30 bp, Artificial Sequence
  Synthetic oligonucleotide
agtgcaaccgtcggtgcaggcgaagaaata

SEQ ID NO: 19082 - DNA, 30 bp, Artificial Sequence
  Synthetic oligonucleotide
ggcgaaagagacaacactgcgaactaaata

SEQ ID NO: 19083 - DNA, 30 bp, Artificial Sequence
  Synthetic oligonucleotide
ccacgctataactaacacccgaccccaata

SEQ ID NO: 19084 - DNA, 30 bp, Artificial Sequence
  Synthetic oligonucleotide
cgggagtctacaggaatcggccaacgaata

SEQ ID NO: 19085 - DNA, 30 bp, Artificial Sequence
  Synthetic oligonucleotide
atgtacaaggaaaaataacatgctctaata

SEQ ID NO: 19086 - DNA, 30 bp, Artificial Sequence
  Synthetic oligonucleotide
atgaaaacaacgatggccatcagaaacata

SEQ ID NO: 19087 - DNA, 30 bp, Artificial Sequence
  Synthetic oligonucleotide
gtgcgcgaacactgaggaccccgatacata

SEQ ID NO: 19088 - DNA, 30 bp, Artificial Sequence
  Synthetic oligonucleotide
tacgcataagtagggcaaacctaagcgata

SEQ ID NO: 19089 - DNA, 30 bp, Artificial Sequence
  Synthetic oligonucleotide
tcttatgatacaaggggcaagcgaaggata

SEQ ID NO: 19090 - DNA, 30 bp, Artificial Sequence
  Synthetic oligonucleotide
tgaggacggtagcaagagcagatacaacta

SEQ ID NO: 19091 - DNA, 30 bp, Artificial Sequence
  Synthetic oligonucleotide
cgcgcgatacactcccagatagctcaacta

SEQ ID NO: 19092 - DNA, 30 bp, Artificial Sequence
  Synthetic oligonucleotide
cgacacgagatacgggcctcgtaccgacta

SEQ ID NO: 19093 - DNA, 30 bp, Artificial Sequence
  Synthetic oligonucleotide
gtcaagtgcaagccgactggaatcaagcta

SEQ ID NO: 19094 - DNA, 30 bp, Artificial Sequence
  Synthetic oligonucleotide
gctgagagggatagattgaagatagcgcta

SEQ ID NO: 19095 - DNA, 30 bp, Artificial Sequence
  Synthetic oligonucleotide
gcgagatcggtataggatggggaaatgcta

SEQ ID NO: 19096 - DNA, 30 bp, Artificial Sequence
  Synthetic oligonucleotide
tcggggtaaggggacagatagtgacaagta

SEQ ID NO: 19097 - DNA, 30 bp, Artificial Sequence
  Synthetic oligonucleotide
cgctaaggtgtgggggaaaggcatagagta

SEQ ID NO: 19098 - DNA, 30 bp, Artificial Sequence
  Synthetic oligonucleotide
cgaaggtgcgaactattagggctttgagta

SEQ ID NO: 19099 - DNA, 30 bp, Artificial Sequence
  Synthetic oligonucleotide
cggcactagggacgattcaatgcccgcgta

SEQ ID NO: 19100 - DNA, 30 bp, Artificial Sequence
  Synthetic oligonucleotide
cgataatccgagcatcttgaaagtcgcgta

SEQ ID NO: 19101 - DNA, 30 bp, Artificial Sequence
  Synthetic oligonucleotide
agatcgcccggcctggctccagcttgcgta

SEQ ID NO: 19102 - DNA, 30 bp, Artificial Sequence
  Synthetic oligonucleotide
gcgcgcgagcctgcgtcaaactcaatcgta

SEQ ID NO: 19103 - DNA, 30 bp, Artificial Sequence
  Synthetic oligonucleotide
aggcagtggacatgggttaagattctcgta

SEQ ID NO: 19104 - DNA, 30 bp, Artificial Sequence
  Synthetic oligonucleotide
gaacataagtgacaatgcggtgaaaaggta

SEQ ID NO: 19105 - DNA, 30 bp, Artificial Sequence
  Synthetic oligonucleotide
cgctatgacatgaattcaaaaggacaggta

SEQ ID NO: 19106 - DNA, 30 bp, Artificial Sequence
  Synthetic oligonucleotide
tcggaggggaacatatgcgtaaaagaggta

SEQ ID NO: 19107 - DNA, 30 bp, Artificial Sequence
  Synthetic oligonucleotide
acacaaacaaccatctgatgtcgaactgta

SEQ ID NO: 19108 - DNA, 30 bp, Artificial Sequence
  Synthetic oligonucleotide
taggaagggttcgaggaaacatcgtctgta

SEQ ID NO: 19109 - DNA, 30 bp, Artificial Sequence
  Synthetic oligonucleotide
accacgacaccgacaacagaagtgacatta

SEQ ID NO: 19110 - DNA, 30 bp, Artificial Sequence
  Synthetic oligonucleotide
cacttagattgcggagaggaaaaggcgtta

SEQ ID NO: 19111 - DNA, 30 bp, Artificial Sequence
  Synthetic oligonucleotide
gctgaaaaatgactcgagaaagcggtgtta

SEQ ID NO: 19112 - DNA, 30 bp, Artificial Sequence
  Synthetic oligonucleotide
ccgaacatcgacaagaccattgaggattta

SEQ ID NO: 19113 - DNA, 30 bp, Artificial Sequence
  Synthetic oligonucleotide
gcgggcgaatacttggtaggggaagaaaac

SEQ ID NO: 19114 - DNA, 30 bp, Artificial Sequence
  Synthetic oligonucleotide
atggattggaggaaataacgggtaacaaac

SEQ ID NO: 19115 - DNA, 30 bp, Artificial Sequence
  Synthetic oligonucleotide
tggttacaggctactagaacaagtcgaaac

SEQ ID NO: 19116 - DNA, 30 bp, Artificial Sequence
  Synthetic oligonucleotide
gaaatgcgatgaaaagagcagacaagcaac

SEQ ID NO: 19117 - DNA, 30 bp, Artificial Sequence
  Synthetic oligonucleotide
caatgtctgaagaaaaaaacatgtaagaac

SEQ ID NO: 19118 - DNA, 30 bp, Artificial Sequence
  Synthetic oligonucleotide
tcaacagttcgctaaatcgtgacacagaac

SEQ ID NO: 19119 - DNA, 30 bp, Artificial Sequence
  Synthetic oligonucleotide
agcgtgtgagcacggatgccttgacagaac

SEQ ID NO: 19120 - DNA, 30 bp, Artificial Sequence
  Synthetic oligonucleotide
ggtatacggatcagagtgggacgatagaac

SEQ ID NO: 19121 - DNA, 30 bp, Artificial Sequence
  Synthetic oligonucleotide
taaggccgaaggggaatcaggccaccgaac

SEQ ID NO: 19122 - DNA, 30 bp, Artificial Sequence
  Synthetic oligonucleotide
tagggcctaaaacgggctgagctgtggaac

SEQ ID NO: 19123 - DNA, 30 bp, Artificial Sequence
  Synthetic oligonucleotide
cacggagaaaggggacattcaatccctaac

SEQ ID NO: 19124 - DNA, 30 bp, Artificial Sequence
  Synthetic oligonucleotide
cgacacgaatgccccaaccgggaacgtaac

SEQ ID NO: 19125 - DNA, 30 bp, Artificial Sequence
  Synthetic oligonucleotide
gagacagggatcaagacgatgacctgtaac

SEQ ID NO: 19126 - DNA, 30 bp, Artificial Sequence
  Synthetic oligonucleotide
agatggggacgtgggtcatggtgcgaacac

SEQ ID NO: 19127 - DNA, 30 bp, Artificial Sequence
  Synthetic oligonucleotide
tacgaacgatataagagagtatcaggacac

SEQ ID NO: 19128 - DNA, 30 bp, Artificial Sequence
  Synthetic oligonucleotide
ccattcacgagtaagaacgatacgagccac

SEQ ID NO: 19129 - DNA, 30 bp, Artificial Sequence
  Synthetic oligonucleotide
tcaggatagcaatcgtagagaactcgccac

SEQ ID NO: 19130 - DNA, 31 bp, Artificial Sequence
  Synthetic oligonucleotide
caggacagcgttactgtaacagagggtccac

SEQ ID NO: 19131 - DNA, 30 bp, Artificial Sequence
  Synthetic oligonucleotide
cgacggtaccatccggcagaccgaaagcac

SEQ ID NO: 19132 - DNA, 30 bp, Artificial Sequence
  Synthetic oligonucleotide
cggctaggacatttcggggaaagacagcac

SEQ ID NO: 19133 - DNA, 30 bp, Artificial Sequence
  Synthetic oligonucleotide
caacaccctgcgagagcaatttcggcgcac

SEQ ID NO: 19134 - DNA, 30 bp, Artificial Sequence
  Synthetic oligonucleotide
acacggagaaagaggatctggtaacggcac

SEQ ID NO: 19135 - DNA, 30 bp, Artificial Sequence
  Synthetic oligonucleotide
gacgatggtaaagggcgcgtgaacatgcac

SEQ ID NO: 19136 - DNA, 30 bp, Artificial Sequence
  Synthetic oligonucleotide
agcaacgaaaactaaggaccgtaattgcac

SEQ ID NO: 19137 - DNA, 30 bp, Artificial Sequence
  Synthetic oligonucleotide
gaacaaagagatgacaacaaagtgtatcac

SEQ ID NO: 19138 - DNA, 30 bp, Artificial Sequence
  Synthetic oligonucleotide
gcaaggtaaagtctggcgcgtacggctcac

SEQ ID NO: 19139 - DNA, 30 bp, Artificial Sequence
  Synthetic oligonucleotide
taggtggatcggcacagaaagctcagtcac

SEQ ID NO: 19140 - DNA, 30 bp, Artificial Sequence
  Synthetic oligonucleotide
agagtaaacgatcaaagggataccggtcac

SEQ ID NO: 19141 - DNA, 30 bp, Artificial Sequence
  Synthetic oligonucleotide
aaacaaaccaaagacaaacggaagtgtcac

SEQ ID NO: 19142 - DNA, 30 bp, Artificial Sequence
  Synthetic oligonucleotide
ccaacaactgtaataaacagaaagaaagac

SEQ ID NO: 19143 - DNA, 30 bp, Artificial Sequence
  Synthetic oligonucleotide
tgagaccaaaaaaactatagctgtcaagac

SEQ ID NO: 19144 - DNA, 30 bp, Artificial Sequence
  Synthetic oligonucleotide
caacggataaatggcgttccgggtgaagac

SEQ ID NO: 19145 - DNA, 30 bp, Artificial Sequence
  Synthetic oligonucleotide
agatataagatcaggaatggtaccccagac

SEQ ID NO: 19146 - DNA, 30 bp, Artificial Sequence
  Synthetic oligonucleotide
tctcgaggaaaggtgatgttcagcaacgac

SEQ ID NO: 19147 - DNA, 30 bp, Artificial Sequence
  Synthetic oligonucleotide
ggaaactgaccatgactagaaagatgcgac

SEQ ID NO: 19148 - DNA, 30 bp, Artificial Sequence
  Synthetic oligonucleotide
aatggagaccggcgaacaaaagccatcgac

SEQ ID NO: 19149 - DNA, 30 bp, Artificial Sequence
  Synthetic oligonucleotide
gccaaggaaacaggattaatcaaatatgac

SEQ ID NO: 19150 - DNA, 30 bp, Artificial Sequence
  Synthetic oligonucleotide
ggcactcgcattttttcttaccctcgtgac

SEQ ID NO: 19151 - DNA, 30 bp, Artificial Sequence
  Synthetic oligonucleotide
agcgagatcattagcggcataaaccttgac

SEQ ID NO: 19152 - DNA, 30 bp, Artificial Sequence
  Synthetic oligonucleotide
cggcaccaggagacagtaagtgttggatac

SEQ ID NO: 19153 - DNA, 30 bp, Artificial Sequence
  Synthetic oligonucleotide
acaaaaaagcaagccagattacgcgtatac

SEQ ID NO: 19154 - DNA, 30 bp, Artificial Sequence
  Synthetic oligonucleotide
agaagaaataaggagacaaccaatgactac

SEQ ID NO: 19155 - DNA, 30 bp, Artificial Sequence
  Synthetic oligonucleotide
cgtgaagctatgatgaacagtgcaagctac

SEQ ID NO: 19156 - DNA, 30 bp, Artificial Sequence
  Synthetic oligonucleotide
catgggcacaaaggaatgtaggtctagtac

SEQ ID NO: 19157 - DNA, 30 bp, Artificial Sequence
  Synthetic oligonucleotide
agaccgggagactaagggggcatgtcgtac

SEQ ID NO: 19158 - DNA, 30 bp, Artificial Sequence
  Synthetic oligonucleotide
cacgatgggattacaagaggtaggtggtac

SEQ ID NO: 19159 - DNA, 30 bp, Artificial Sequence
  Synthetic oligonucleotide
acacgcgcgcggaaccattgagggacttac

SEQ ID NO: 19160 - DNA, 30 bp, Artificial Sequence
  Synthetic oligonucleotide
cgggagtagggggtccgtaagacatgttac

SEQ ID NO: 19161 - DNA, 30 bp, Artificial Sequence
  Synthetic oligonucleotide
acgagaaagatcaagatgatacggataacc

SEQ ID NO: 19162 - DNA, 30 bp, Artificial Sequence
  Synthetic oligonucleotide
ttgaccgaaacacaagagacgatcgtaacc

SEQ ID NO: 19163 - DNA, 30 bp, Artificial Sequence
  Synthetic oligonucleotide
gttgggagcgaagaggccaaaagcaacacc

SEQ ID NO: 19164 - DNA, 30 bp, Artificial Sequence
  Synthetic oligonucleotide
cgcgaggccgaattaaggtatagccacacc

SEQ ID NO: 19165 - DNA, 30 bp, Artificial Sequence
  Synthetic oligonucleotide
gcacatcttggaaagagtagagctcacacc

SEQ ID NO: 19166 - DNA, 30 bp, Artificial Sequence
  Synthetic oligonucleotide
tggcggggaacgtacgtatgcaaggagacc

SEQ ID NO: 19167 - DNA, 30 bp, Artificial Sequence
  Synthetic oligonucleotide
gggcaattaaagcgaactcacaagaatacc

SEQ ID NO: 19168 - DNA, 30 bp, Artificial Sequence
  Synthetic oligonucleotide
taggacaatatcagggaaacatttagtacc

SEQ ID NO: 19169 - DNA, 30 bp, Artificial Sequence
  Synthetic oligonucleotide
agtacaaacacgaccaaggagcgcgccccc

SEQ ID NO: 19170 - DNA, 30 bp, Artificial Sequence
  Synthetic oligonucleotide
tgagcaatgacgtgatcgaaaacatccccc

SEQ ID NO: 19171 - DNA, 30 bp, Artificial Sequence
  Synthetic oligonucleotide
ggactggaaacggaagaccaccatgtgccc

SEQ ID NO: 19172 - DNA, 30 bp, Artificial Sequence
  Synthetic oligonucleotide
atacgaaggacattcaaagcaccctaagcc

SEQ ID NO: 19173 - DNA, 30 bp, Artificial Sequence
  Synthetic oligonucleotide
cgagggccacagattaaccgagatatcgcc

SEQ ID NO: 19174 - DNA, 30 bp, Artificial Sequence
  Synthetic oligonucleotide
cttagtaagataaaaaaaaagctcttcgcc

SEQ ID NO: 19175 - DNA, 30 bp, Artificial Sequence
  Synthetic oligonucleotide
gggtaacatattagggagagaaagacggcc

SEQ ID NO: 19176 - DNA, 30 bp, Artificial Sequence
  Synthetic oligonucleotide
taaagaccaaacggatcaaacgcactggcc

SEQ ID NO: 19177 - DNA, 30 bp, Artificial Sequence
  Synthetic oligonucleotide
aggttggtaggggatatcgactaaaatgcc

SEQ ID NO: 19178 - DNA, 30 bp, Artificial Sequence
  Synthetic oligonucleotide
aggctagtaaaacgacaactgccaggatcc

SEQ ID NO: 19179 - DNA, 30 bp, Artificial Sequence
  Synthetic oligonucleotide
actggcataagtacacaaaacaatagctcc

SEQ ID NO: 19180 - DNA, 30 bp, Artificial Sequence
  Synthetic oligonucleotide
cgacaaaagtaagaggcacggcataagtcc

SEQ ID NO: 19181 - DNA, 30 bp, Artificial Sequence
  Synthetic oligonucleotide
ccaccaacgacgaaagccacggcagcaagc

SEQ ID NO: 19182 - DNA, 30 bp, Artificial Sequence
  Synthetic oligonucleotide
ctgggatagggtaatgttgatcagataagc

SEQ ID NO: 19183 - DNA, 30 bp, Artificial Sequence
  Synthetic oligonucleotide
ccaaggaatagacctacgttcgtcaacagc

SEQ ID NO: 19184 - DNA, 30 bp, Artificial Sequence
  Synthetic oligonucleotide
cgtgggagggagaaatcagctacgtacagc

SEQ ID NO: 19185 - DNA, 30 bp, Artificial Sequence
  Synthetic oligonucleotide
gacggtggtaataaagagacaaaaggcagc

SEQ ID NO: 19186 - DNA, 30 bp, Artificial Sequence
  Synthetic oligonucleotide
cacgtgtaacaacttaaaccgaggggcagc

SEQ ID NO: 19187 - DNA, 30 bp, Artificial Sequence
  Synthetic oligonucleotide
aggaagaggtagatcccgatgggaatcagc

SEQ ID NO: 19188 - DNA, 30 bp, Artificial Sequence
  Synthetic oligonucleotide
cacgagttgatagagttgagggataagagc

SEQ ID NO: 19189 - DNA, 30 bp, Artificial Sequence
  Synthetic oligonucleotide
actccggcctacgagaaacgtgagcagagc

SEQ ID NO: 19190 - DNA, 30 bp, Artificial Sequence
  Synthetic oligonucleotide
atcgtcaccattggaaagagcgtggagagc

SEQ ID NO: 19191 - DNA, 30 bp, Artificial Sequence
  Synthetic oligonucleotide
accgcggagattgcgaaaatgtagtcgagc

SEQ ID NO: 19192 - DNA, 30 bp, Artificial Sequence
  Synthetic oligonucleotide
tgggacccaggactaacacagattcatagc

SEQ ID NO: 19193 - DNA, 30 bp, Artificial Sequence
  Synthetic oligonucleotide
tgaaggagagttagtgtgcgaccggatagc

SEQ ID NO: 19194 - DNA, 30 bp, Artificial Sequence
  Synthetic oligonucleotide
acaacggccaaaagaggtataaaagtacgc

SEQ ID NO: 19195 - DNA, 30 bp, Artificial Sequence
  Synthetic oligonucleotide
agcagggacgtggcaaaactggacaaccgc

SEQ ID NO: 19196 - DNA, 30 bp, Artificial Sequence
  Synthetic oligonucleotide
ggcagagtcacgagagcatctatctaccgc

SEQ ID NO: 19197 - DNA, 30 bp, Artificial Sequence
  Synthetic oligonucleotide
cactgaacatggggaaacgacatgtcccgc

SEQ ID NO: 19198 - DNA, 30 bp, Artificial Sequence
  Synthetic oligonucleotide
cgtgcgcaagtccgcatgaggctaagtcgc

SEQ ID NO: 19199 - DNA, 30 bp, Artificial Sequence
  Synthetic oligonucleotide
acactaacaggcaataagggaccaacaggc

SEQ ID NO: 19200 - DNA, 30 bp, Artificial Sequence
  Synthetic oligonucleotide
aagaaaagagtagtaacaggcatggcaggc

SEQ ID NO: 19201 - DNA, 30 bp, Artificial Sequence
  Synthetic oligonucleotide
cagggggaatatgaaacactgtcggtaggc

SEQ ID NO: 19202 - DNA, 30 bp, Artificial Sequence
  Synthetic oligonucleotide
acgtcccacgaggaaaacatacgtagcggc

SEQ ID NO: 19203 - DNA, 30 bp, Artificial Sequence
  Synthetic oligonucleotide
ggttgaggcacgatagagaagtgtggcggc

SEQ ID NO: 19204 - DNA, 30 bp, Artificial Sequence
  Synthetic oligonucleotide
actaagaggctagcggaagcatgtatcggc

SEQ ID NO: 19205 - DNA, 30 bp, Artificial Sequence
  Synthetic oligonucleotide
aacagtagcagagggaagcaaggttatggc

SEQ ID NO: 19206 - DNA, 30 bp, Artificial Sequence
  Synthetic oligonucleotide
gcgtagttctaaaagtaacaacagggatgc

SEQ ID NO: 19207 - DNA, 30 bp, Artificial Sequence
  Synthetic oligonucleotide
gggaggatatagcgtggacattcgtgatgc

SEQ ID NO: 19208 - DNA, 30 bp, Artificial Sequence
  Synthetic oligonucleotide
tcataaagaacgtagtggacatccaactgc

SEQ ID NO: 19209 - DNA, 30 bp, Artificial Sequence
  Synthetic oligonucleotide
atgggatcagtggctaacaagtaggactgc

SEQ ID NO: 19210 - DNA, 30 bp, Artificial Sequence
  Synthetic oligonucleotide
acatacactaaagagggaaatcgatactgc

SEQ ID NO: 19211 - DNA, 30 bp, Artificial Sequence
  Synthetic oligonucleotide
tgagtggcataggtcatcgaacaacagtgc

SEQ ID NO: 19212 - DNA, 30 bp, Artificial Sequence
  Synthetic oligonucleotide
agacgggaggatcagatggtgcatgattgc

SEQ ID NO: 19213 - DNA, 30 bp, Artificial Sequence
  Synthetic oligonucleotide
cgatacaagaagcctaatactacaagttgc

SEQ ID NO: 19214 - DNA, 30 bp, Artificial Sequence
  Synthetic oligonucleotide
cggaaaggtgacaaagctttcggtaacatc

SEQ ID NO: 19215 - DNA, 30 bp, Artificial Sequence
  Synthetic oligonucleotide
atcgcataaaagacgaagagggacgacatc

SEQ ID NO: 19216 - DNA, 30 bp, Artificial Sequence
  Synthetic oligonucleotide
aagaaggttagactgccgacacgtgacatc

SEQ ID NO: 19217 - DNA, 30 bp, Artificial Sequence
  Synthetic oligonucleotide
aacagacaaggaacagggtccaaaagcatc

SEQ ID NO: 19218 - DNA, 30 bp, Artificial Sequence
  Synthetic oligonucleotide
ggcgtcaagcgcggacgcgaaacatgcatc

SEQ ID NO: 19219 - DNA, 30 bp, Artificial Sequence
  Synthetic oligonucleotide
ggtacgcaaaaaaacattcgcagcacgctc

SEQ ID NO: 19220 - DNA, 30 bp, Artificial Sequence
  Synthetic oligonucleotide
tatcgaggagaaggacaggacgtcccagtc

SEQ ID NO: 19221 - DNA, 30 bp, Artificial Sequence
  Synthetic oligonucleotide
agaaacctgggtagaacgaccatagcagtc

SEQ ID NO: 19222 - DNA, 30 bp, Artificial Sequence
  Synthetic oligonucleotide
acatcgcacagggcaaaattctgcgtagtc

SEQ ID NO: 19223 - DNA, 30 bp, Artificial Sequence
  Synthetic oligonucleotide
actcgtaacgagaaaaaggaggatgtagtc

SEQ ID NO: 19224 - DNA, 30 bp, Artificial Sequence
  Synthetic oligonucleotide
gggcctgggcaaaaaagtctcacatacgtc

SEQ ID NO: 19225 - DNA, 30 bp, Artificial Sequence
  Synthetic oligonucleotide
cgggaggattatcacgcgttgtccaccgtc

SEQ ID NO: 19226 - DNA, 30 bp, Artificial Sequence
  Synthetic oligonucleotide
acgcgatatcatcctaactgtcagaccgtc

SEQ ID NO: 19227 - DNA, 30 bp, Artificial Sequence
  Synthetic oligonucleotide
tcgaagtgtgtgtagtgaaataaccgcgtc

SEQ ID NO: 19228 - DNA, 30 bp, Artificial Sequence
  Synthetic oligonucleotide
tcgatattgagtgacacatttcgctctgtc

SEQ ID NO: 19229 - DNA, 30 bp, Artificial Sequence
  Synthetic oligonucleotide
acatgtagagggatatgtaaagtgcgattc

SEQ ID NO: 19230 - DNA, 30 bp, Artificial Sequence
  Synthetic oligonucleotide
gacgtcaagcgtggtcttaaaggcgtcttc

SEQ ID NO: 19231 - DNA, 30 bp, Artificial Sequence
  Synthetic oligonucleotide
acgtggacgatagacagaccaagaaaaaag

SEQ ID NO: 19232 - DNA, 30 bp, Artificial Sequence
  Synthetic oligonucleotide
cgaaccatggggagctggtcgagagaaaag

SEQ ID NO: 19233 - DNA, 30 bp, Artificial Sequence
  Synthetic oligonucleotide
tatgaggccagctaagcaaaggaggaaaag

SEQ ID NO: 19234 - DNA, 30 bp, Artificial Sequence
  Synthetic oligonucleotide
catcgatacagctggtccccatagccaaag

SEQ ID NO: 19235 - DNA, 30 bp, Artificial Sequence
  Synthetic oligonucleotide
tcagggtgtcgaagagttcactggtcaaag

SEQ ID NO: 19236 - DNA, 30 bp, Artificial Sequence
  Synthetic oligonucleotide
aaggcgggttattcgagggctgaaagaaag

SEQ ID NO: 19237 - DNA, 30 bp, Artificial Sequence
  Synthetic oligonucleotide
acatatctaaatccgcttagaggaagaaag

SEQ ID NO: 19238 - DNA, 30 bp, Artificial Sequence
  Synthetic oligonucleotide
acgaccccgtgataaagtgaccccggaaag

SEQ ID NO: 19239 - DNA, 30 bp, Artificial Sequence
  Synthetic oligonucleotide
cgcaacggtctgagcggcgtacagtgaaag

SEQ ID NO: 19240 - DNA, 30 bp, Artificial Sequence
  Synthetic oligonucleotide
cacgaagcgtacactcgagtatgtgtaaag

SEQ ID NO: 19241 - DNA, 30 bp, Artificial Sequence
  Synthetic oligonucleotide
tcaggagtactaccgcacgcgatagacaag

SEQ ID NO: 19242 - DNA, 30 bp, Artificial Sequence
  Synthetic oligonucleotide
cacaagcggtctcgggtaaccgggtacaag

SEQ ID NO: 19243 - DNA, 30 bp, Artificial Sequence
  Synthetic oligonucleotide
tactggggtagggaaccaagggaagccaag

SEQ ID NO: 19244 - DNA, 30 bp, Artificial Sequence
  Synthetic oligonucleotide
cgtacaacggaaactctcttccatgccaag

SEQ ID NO: 19245 - DNA, 30 bp, Artificial Sequence
  Synthetic oligonucleotide
cagagggaactctggattggccattgcaag

SEQ ID NO: 19246 - DNA, 30 bp, Artificial Sequence
  Synthetic oligonucleotide
cataggatcgggcgaagaagtagtatcaag

SEQ ID NO: 19247 - DNA, 30 bp, Artificial Sequence
  Synthetic oligonucleotide
cgtcaggttaaacaggttaagcgagtcaag

SEQ ID NO: 19248 - DNA, 30 bp, Artificial Sequence
  Synthetic oligonucleotide
cacattcaatttagtgaccccgactcgaag

SEQ ID NO: 19249 - DNA, 30 bp, Artificial Sequence
  Synthetic oligonucleotide
gaacaggatgatggagcgtacaaaaggaag

SEQ ID NO: 19250 - DNA, 30 bp, Artificial Sequence
  Synthetic oligonucleotide
aggtgcctgcagttagaggtcctaaggaag

SEQ ID NO: 19251 - DNA, 30 bp, Artificial Sequence
  Synthetic oligonucleotide
tgcgtgccaactgtgtataccggtcggaag

SEQ ID NO: 19252 - DNA, 30 bp, Artificial Sequence
  Synthetic oligonucleotide
caaagacatatcgggataacatgcctgaag

SEQ ID NO: 19253 - DNA, 30 bp, Artificial Sequence
  Synthetic oligonucleotide
cgtctaggcctaatgagcaaacgtaataag

SEQ ID NO: 19254 - DNA, 30 bp, Artificial Sequence
  Synthetic oligonucleotide
atgggcatcctaagagtaaaccgtaataag

SEQ ID NO: 19255 - DNA, 30 bp, Artificial Sequence
  Synthetic oligonucleotide
cacatctatataagagcaagccaggataag

SEQ ID NO: 19256 - DNA, 30 bp, Artificial Sequence
  Synthetic oligonucleotide
ggaacccatgtcacaatcggccgtgctaag

SEQ ID NO: 19257 - DNA, 30 bp, Artificial Sequence
  Synthetic oligonucleotide
acggctcatggcgataaccaattaagtaag

SEQ ID NO: 19258 - DNA, 30 bp, Artificial Sequence
  Synthetic oligonucleotide
taaaggtgtgcacaacagggtacccaacag

SEQ ID NO: 19259 - DNA, 30 bp, Artificial Sequence
  Synthetic oligonucleotide
tagtgctggagacagtactaagatgaacag

SEQ ID NO: 19260 - DNA, 30 bp, Artificial Sequence
  Synthetic oligonucleotide
agcgagtaaacatagcgtatacaataacag

SEQ ID NO: 19261 - DNA, 30 bp, Artificial Sequence
  Synthetic oligonucleotide
cgtcaacattagcaaattgtggaataacag

SEQ ID NO: 19262 - DNA, 30 bp, Artificial Sequence
  Synthetic oligonucleotide
atcagcaccctgcaagatggggaacgacag

SEQ ID NO: 19263 - DNA, 30 bp, Artificial Sequence
  Synthetic oligonucleotide
tcgatcggataagaagggaaaattcgacag

SEQ ID NO: 19264 - DNA, 30 bp, Artificial Sequence
  Synthetic oligonucleotide
cagggttaggccacatatataccactacag

SEQ ID NO: 19265 - DNA, 30 bp, Artificial Sequence
  Synthetic oligonucleotide
gaagacagccagcaaggcagatcaaaccag

SEQ ID NO: 19266 - DNA, 30 bp, Artificial Sequence
  Synthetic oligonucleotide
ttcaccagaaagggcaagcggagataccag

SEQ ID NO: 19267 - DNA, 30 bp, Artificial Sequence
  Synthetic oligonucleotide
ggatagagtgaaccagggtccccaggccag

SEQ ID NO: 19268 - DNA, 30 bp, Artificial Sequence
  Synthetic oligonucleotide
cgctcccccgcgggatagggaacaatccag

SEQ ID NO: 19269 - DNA, 30 bp, Artificial Sequence
  Synthetic oligonucleotide
ccagaggagaacgggttgtactagctccag

SEQ ID NO: 19270 - DNA, 30 bp, Artificial Sequence
  Synthetic oligonucleotide
agccataatgaaaaggtgtcaactaagcag

SEQ ID NO: 19271 - DNA, 30 bp, Artificial Sequence
  Synthetic oligonucleotide
gaatagggcaaaaaaaatcgcgtcgagcag

SEQ ID NO: 19272 - DNA, 30 bp, Artificial Sequence
  Synthetic oligonucleotide
cgtaagagctgaacacaagcgaatgcgcag

SEQ ID NO: 19273 - DNA, 30 bp, Artificial Sequence
  Synthetic oligonucleotide
acgaacgcgggggtacaaagaaaaaggcag

SEQ ID NO: 19274 - DNA, 30 bp, Artificial Sequence
  Synthetic oligonucleotide
gaacgtcaacgtaccgagaatgaatggcag

SEQ ID NO: 19275 - DNA, 30 bp, Artificial Sequence
  Synthetic oligonucleotide
ctgaagtaaaaacagctaaaggccatgcag

SEQ ID NO: 19276 - DNA, 30 bp, Artificial Sequence
  Synthetic oligonucleotide
cgtacaccgaaaccgaatatgattgtgcag

SEQ ID NO: 19277 - DNA, 30 bp, Artificial Sequence
  Synthetic oligonucleotide
ccaagccaatgcgaatatcgcaccttgcag

SEQ ID NO: 19278 - DNA, 30 bp, Artificial Sequence
  Synthetic oligonucleotide
cgtggcgcaaatattatgtgcagaaatcag

SEQ ID NO: 19279 - DNA, 30 bp, Artificial Sequence
  Synthetic oligonucleotide
gtgcccacccatcatatagcacggcatcag

SEQ ID NO: 19280 - DNA, 30 bp, Artificial Sequence
  Synthetic oligonucleotide
cgatatagcgtagtgagcggcgaatatcag

SEQ ID NO: 19281 - DNA, 30 bp, Artificial Sequence
  Synthetic oligonucleotide
gcgtcgatcgcaatgacttgcacccaagag

SEQ ID NO: 19282 - DNA, 30 bp, Artificial Sequence
  Synthetic oligonucleotide
cacgcagctagattgaggtaccagcaagag

SEQ ID NO: 19283 - DNA, 30 bp, Artificial Sequence
  Synthetic oligonucleotide
ccagaaggtcaatatcggagagggcaagag

SEQ ID NO: 19284 - DNA, 30 bp, Artificial Sequence
  Synthetic oligonucleotide
atcgtagtgtgtggacaagtcgaagaagag

SEQ ID NO: 19285 - DNA, 30 bp, Artificial Sequence
  Synthetic oligonucleotide
cgccgtcaaaacaggatgaacgtataagag

SEQ ID NO: 19286 - DNA, 30 bp, Artificial Sequence
  Synthetic oligonucleotide
cgactatgccaccgacctgggtactaagag

SEQ ID NO: 19287 - DNA, 30 bp, Artificial Sequence
  Synthetic oligonucleotide
gtgcgcgagatccaataataaccagcagag

SEQ ID NO: 19288 - DNA, 30 bp, Artificial Sequence
  Synthetic oligonucleotide
atcaacaaggcctagagggacggtagagag

SEQ ID NO: 19289 - DNA, 30 bp, Artificial Sequence
  Synthetic oligonucleotide
caagttcgaacctggtttactgaacgagag

SEQ ID NO: 19290 - DNA, 30 bp, Artificial Sequence
  Synthetic oligonucleotide
tctgctaaagtacatgtccgatcgcgagag

SEQ ID NO: 19291 - DNA, 30 bp, Artificial Sequence
  Synthetic oligonucleotide
actgtgcgccacgaaatcggaagtcgagag

SEQ ID NO: 19292 - DNA, 30 bp, Artificial Sequence
  Synthetic oligonucleotide
gaggtaaacatgttgaggataagtcgagag

SEQ ID NO: 19293 - DNA, 30 bp, Artificial Sequence
  Synthetic oligonucleotide
agaccttgacccgtcacagagactggagag

SEQ ID NO: 19294 - DNA, 31 bp, Artificial Sequence
  Synthetic oligonucleotide
gggcggagtaaacggcctaaacagttgagag

SEQ ID NO: 19295 - DNA, 30 bp, Artificial Sequence
  Synthetic oligonucleotide
cgagactgatttttccttacgcgaatagag

SEQ ID NO: 19296 - DNA, 30 bp, Artificial Sequence
  Synthetic oligonucleotide
aaggtggtgtacgatgtgtgcgagctagag

SEQ ID NO: 19297 - DNA, 30 bp, Artificial Sequence
  Synthetic oligonucleotide
ccgaaggaggggtccctaagcgaagtagag

SEQ ID NO: 19298 - DNA, 30 bp, Artificial Sequence
  Synthetic oligonucleotide
gatgggtgaccacgtgccaagctggtagag

SEQ ID NO: 19299 - DNA, 30 bp, Artificial Sequence
  Synthetic oligonucleotide
gtcgtaagactattggactacgccaacgag

SEQ ID NO: 19300 - DNA, 30 bp, Artificial Sequence
  Synthetic oligonucleotide
ccggatatagagcaacgtagatatcacgag

SEQ ID NO: 19301 - DNA, 30 bp, Artificial Sequence
  Synthetic oligonucleotide
ccgggctgtaaacgaatcaggtctgccgag

SEQ ID NO: 19302 - DNA, 30 bp, Artificial Sequence
  Synthetic oligonucleotide
tcttcagaactcaaccatcccaagcgcgag

SEQ ID NO: 19303 - DNA, 30 bp, Artificial Sequence
  Synthetic oligonucleotide
taagggtaactactctaatctccaatcgag

SEQ ID NO: 19304 - DNA, 30 bp, Artificial Sequence
  Synthetic oligonucleotide
caacgacaagaatcagatacgttaatcgag

SEQ ID NO: 19305 - DNA, 30 bp, Artificial Sequence
  Synthetic oligonucleotide
agaagacttatagccccacttgtcatcgag

SEQ ID NO: 19306 - DNA, 30 bp, Artificial Sequence
  Synthetic oligonucleotide
atgatctagcgggaaggcatcattatcgag

SEQ ID NO: 19307 - DNA, 30 bp, Artificial Sequence
  Synthetic oligonucleotide
gccggtagtccgaactaggagtgcgtcgag

SEQ ID NO: 19308 - DNA, 30 bp, Artificial Sequence
  Synthetic oligonucleotide
gcacagagttcgagatatgaaataaaggag

SEQ ID NO: 19309 - DNA, 30 bp, Artificial Sequence
  Synthetic oligonucleotide
cgaagacatgcacggatctaagagaaggag

SEQ ID NO: 19310 - DNA, 30 bp, Artificial Sequence
  Synthetic oligonucleotide
cgacgtcagtcaagggcaaactcgaaggag

SEQ ID NO: 19311 - DNA, 30 bp, Artificial Sequence
  Synthetic oligonucleotide
ccagtaaacaaattcccaagaatgcaggag

SEQ ID NO: 19312 - DNA, 30 bp, Artificial Sequence
  Synthetic oligonucleotide
ggttgagtgatctgggtgagaatagaggag

SEQ ID NO: 19313 - DNA, 30 bp, Artificial Sequence
  Synthetic oligonucleotide
tgacgagaagcgcggccagtttgggaggag

SEQ ID NO: 19314 - DNA, 30 bp, Artificial Sequence
  Synthetic oligonucleotide
cctcgagatactgcaatagaagtataggag

SEQ ID NO: 19315 - DNA, 30 bp, Artificial Sequence
  Synthetic oligonucleotide
acaagtgcgagtgccccgtgggatgcggag

SEQ ID NO: 19316 - DNA, 30 bp, Artificial Sequence
  Synthetic oligonucleotide
taaccagctagagcatgagttaacggggag

SEQ ID NO: 19317 - DNA, 30 bp, Artificial Sequence
  Synthetic oligonucleotide
caagggaaaatggatgttacggaatgggag

SEQ ID NO: 19318 - DNA, 30 bp, Artificial Sequence
  Synthetic oligonucleotide
atacaacgagaatctactcataaaatggag

SEQ ID NO: 19319 - DNA, 30 bp, Artificial Sequence
  Synthetic oligonucleotide
acacaccgggacgtggacggaataatggag

SEQ ID NO: 19320 - DNA, 30 bp, Artificial Sequence
  Synthetic oligonucleotide
ccaatcaaaggggaaatgattaggcatgag

SEQ ID NO: 19321 - DNA, 30 bp, Artificial Sequence
  Synthetic oligonucleotide
acgttgtgaagacggctcgatgcgactgag

SEQ ID NO: 19322 - DNA, 30 bp, Artificial Sequence
  Synthetic oligonucleotide
cggtaccatgtgctagggggaaagagtgag

SEQ ID NO: 19323 - DNA, 30 bp, Artificial Sequence
  Synthetic oligonucleotide
tgtagaaaatggtccgagtagtcacgtgag

SEQ ID NO: 19324 - DNA, 30 bp, Artificial Sequence
  Synthetic oligonucleotide
ggggagctccacacggtgcgatcgaaatag

SEQ ID NO: 19325 - DNA, 31 bp, Artificial Sequence
  Synthetic oligonucleotide
ggatcggacgggtagaaaatgcaataaatag

SEQ ID NO: 19326 - DNA, 30 bp, Artificial Sequence
  Synthetic oligonucleotide
aaagaagtgacaaacgtggtgaaagaatag

SEQ ID NO: 19327 - DNA, 30 bp, Artificial Sequence
  Synthetic oligonucleotide
ctgacaacataggatatctgggacgaatag

SEQ ID NO: 19328 - DNA, 30 bp, Artificial Sequence
  Synthetic oligonucleotide
aaggggtgtaaggggaatcggcctgaatag

SEQ ID NO: 19329 - DNA, 30 bp, Artificial Sequence
  Synthetic oligonucleotide
tcgaatcaaaaagccaagagcaaaacatag

SEQ ID NO: 19330 - DNA, 30 bp, Artificial Sequence
  Synthetic oligonucleotide
aagccatcaagatgagggaacagaacatag

SEQ ID NO: 19331 - DNA, 30 bp, Artificial Sequence
  Synthetic oligonucleotide
aacagaccatagcatgaatatagcccatag

SEQ ID NO: 19332 - DNA, 30 bp, Artificial Sequence
  Synthetic oligonucleotide
cagcgcgaggagatgcaagtatgcgcatag

SEQ ID NO: 19333 - DNA, 30 bp, Artificial Sequence
  Synthetic oligonucleotide
ataacagtcggaggatccgcgaaaagatag

SEQ ID NO: 19334 - DNA, 30 bp, Artificial Sequence
  Synthetic oligonucleotide
agagaggctacggggcgtaacatcagatag

SEQ ID NO: 19335 - DNA, 30 bp, Artificial Sequence
  Synthetic oligonucleotide
catactccgaaaaggtaaagtgccatatag

SEQ ID NO: 19336 - DNA, 30 bp, Artificial Sequence
  Synthetic oligonucleotide
agggcgatagattgacaacgtcgcatatag

SEQ ID NO: 19337 - DNA, 30 bp, Artificial Sequence
  Synthetic oligonucleotide
acacggcaggacatccctcagtatcactag

SEQ ID NO: 19338 - DNA, 30 bp, Artificial Sequence
  Synthetic oligonucleotide
ccaggacaagttatactacgatattcctag

SEQ ID NO: 19339 - DNA, 30 bp, Artificial Sequence
  Synthetic oligonucleotide
cacgtcagcaaaagttcaaaagaaagctag

SEQ ID NO: 19340 - DNA, 30 bp, Artificial Sequence
  Synthetic oligonucleotide
gcggagcaaccatgacggcttggaagctag

SEQ ID NO: 19341 - DNA, 30 bp, Artificial Sequence
  Synthetic oligonucleotide
cggacagtatgagcaccgagtaaacgctag

SEQ ID NO: 19342 - DNA, 30 bp, Artificial Sequence
  Synthetic oligonucleotide
caacaggtttgggttgagggctaagagtag

SEQ ID NO: 19343 - DNA, 30 bp, Artificial Sequence
  Synthetic oligonucleotide
acaatactggtaaattgcgaactggagtag

SEQ ID NO: 19344 - DNA, 30 bp, Artificial Sequence
  Synthetic oligonucleotide
accgtgcagaagaattagtaattaacgtag

SEQ ID NO: 19345 - DNA, 30 bp, Artificial Sequence
  Synthetic oligonucleotide
tgtggtgcggcatcgaaagaaagagcgtag

SEQ ID NO: 19346 - DNA, 30 bp, Artificial Sequence
  Synthetic oligonucleotide
tcgcacagggggacaagggtatgcgcgtag

SEQ ID NO: 19347 - DNA, 30 bp, Artificial Sequence
  Synthetic oligonucleotide
ccaagtcagacagatacacataaaaggtag

SEQ ID NO: 19348 - DNA, 30 bp, Artificial Sequence
  Synthetic oligonucleotide
acgggtggatagttggacgacccatggtag

SEQ ID NO: 19349 - DNA, 31 bp, Artificial Sequence
  Synthetic oligonucleotide
atgcataaacttaggatcgaatacaatgtag

SEQ ID NO: 19350 - DNA, 30 bp, Artificial Sequence
  Synthetic oligonucleotide
cgtatcgagcggaagacttcaatactgtag

SEQ ID NO: 19351 - DNA, 31 bp, Artificial Sequence
  Synthetic oligonucleotide
ctgttgagatctgccaaagaagggcgattag

SEQ ID NO: 19352 - DNA, 30 bp, Artificial Sequence
  Synthetic oligonucleotide
agtgcgggcgtgacggaataggatcgttag

SEQ ID NO: 19353 - DNA, 30 bp, Artificial Sequence
  Synthetic oligonucleotide
accaaaaggacccagctgggtgcgaaaacg

SEQ ID NO: 19354 - DNA, 30 bp, Artificial Sequence
  Synthetic oligonucleotide
tgaacagcaccatgaaggcaggggaaaacg

SEQ ID NO: 19355 - DNA, 30 bp, Artificial Sequence
  Synthetic oligonucleotide
agtagcttgggagaagggacacagacaacg

SEQ ID NO: 19356 - DNA, 30 bp, Artificial Sequence
  Synthetic oligonucleotide
aagcatacttgcgagagtaaacacccaacg

SEQ ID NO: 19357 - DNA, 30 bp, Artificial Sequence
  Synthetic oligonucleotide
cctaaatataaccgacaccaagctccaacg

SEQ ID NO: 19358 - DNA, 30 bp, Artificial Sequence
  Synthetic oligonucleotide
agcgagggaagacgcaataacctgagaacg

SEQ ID NO: 19359 - DNA, 30 bp, Artificial Sequence
  Synthetic oligonucleotide
agggtcgataagcaattctgaaacgtaacg

SEQ ID NO: 19360 - DNA, 30 bp, Artificial Sequence
  Synthetic oligonucleotide
agagggaggggcataagactgcacaccacg

SEQ ID NO: 19361 - DNA, 30 bp, Artificial Sequence
  Synthetic oligonucleotide
gcaggcggccgattaatagatcaccccacg

SEQ ID NO: 19362 - DNA, 30 bp, Artificial Sequence
  Synthetic oligonucleotide
tctgatccgacaaatcaatcaaggaagacg

SEQ ID NO: 19363 - DNA, 30 bp, Artificial Sequence
  Synthetic oligonucleotide
tacgtccaagagtaagcacaggtttcgacg

SEQ ID NO: 19364 - DNA, 30 bp, Artificial Sequence
  Synthetic oligonucleotide
aataaagtgacttgcgagaacagaaatacg

SEQ ID NO: 19365 - DNA, 30 bp, Artificial Sequence
  Synthetic oligonucleotide
ggaaaaaaggttaaataagcaatggatacg

SEQ ID NO: 19366 - DNA, 30 bp, Artificial Sequence
  Synthetic oligonucleotide
gaacgaaaaactcaaaaacgttacgctacg

SEQ ID NO: 19367 - DNA, 30 bp, Artificial Sequence
  Synthetic oligonucleotide
ccatagaaccatgattgagagttcacaccg

SEQ ID NO: 19368 - DNA, 30 bp, Artificial Sequence
  Synthetic oligonucleotide
aagaaaaaggcaagtagtacgtctccaccg

SEQ ID NO: 19369 - DNA, 30 bp, Artificial Sequence
  Synthetic oligonucleotide
acaatgtggagaaagaagctcgtcggaccg

SEQ ID NO: 19370 - DNA, 30 bp, Artificial Sequence
  Synthetic oligonucleotide
gacacagagtgcccaataacagcgctaccg

SEQ ID NO: 19371 - DNA, 30 bp, Artificial Sequence
  Synthetic oligonucleotide
cagggcgacatgagacttcacgtggtaccg

SEQ ID NO: 19372 - DNA, 30 bp, Artificial Sequence
  Synthetic oligonucleotide
aaggtcactggaaacgagtccattccgccg

SEQ ID NO: 19373 - DNA, 30 bp, Artificial Sequence
  Synthetic oligonucleotide
acggtaatgtatcgatccgaatgatggccg

SEQ ID NO: 19374 - DNA, 30 bp, Artificial Sequence
  Synthetic oligonucleotide
gtaaagcaacattgggcacactacactccg

SEQ ID NO: 19375 - DNA, 30 bp, Artificial Sequence
  Synthetic oligonucleotide
cttccaaagccagagaacacgtgacctccg

SEQ ID NO: 19376 - DNA, 30 bp, Artificial Sequence
  Synthetic oligonucleotide
tgaaaactatacccgaaaacattaagtccg

SEQ ID NO: 19377 - DNA, 30 bp, Artificial Sequence
  Synthetic oligonucleotide
caataagtaaacaaagagatacagcgagcg

SEQ ID NO: 19378 - DNA, 30 bp, Artificial Sequence
  Synthetic oligonucleotide
tcggaaagcagtgatccgaaagggctagcg

SEQ ID NO: 19379 - DNA, 30 bp, Artificial Sequence
  Synthetic oligonucleotide
tctgcaaccaccacaccaacactgttagcg

SEQ ID NO: 19380 - DNA, 30 bp, Artificial Sequence
  Synthetic oligonucleotide
ccagggcgtacgacaaatgtaatacccgcg

SEQ ID NO: 19381 - DNA, 30 bp, Artificial Sequence
  Synthetic oligonucleotide
tcgccgagaaggcggagctatgggagcgcg

SEQ ID NO: 19382 - DNA, 30 bp, Artificial Sequence
  Synthetic oligonucleotide
cggggataatacacgaaagctacgcgcgcg

SEQ ID NO: 19383 - DNA, 30 bp, Artificial Sequence
  Synthetic oligonucleotide
gatggggcaagtgggcaatgacagttcgcg

SEQ ID NO: 19384 - DNA, 30 bp, Artificial Sequence
  Synthetic oligonucleotide
ctgtggaaagagtaagatgcgaacacggcg

SEQ ID NO: 19385 - DNA, 30 bp, Artificial Sequence
  Synthetic oligonucleotide
cggaagggaatatggctaggaaggccggcg

SEQ ID NO: 19386 - DNA, 30 bp, Artificial Sequence
  Synthetic oligonucleotide
aggactcaatgcataaaggaccttcgggcg

SEQ ID NO: 19387 - DNA, 30 bp, Artificial Sequence
  Synthetic oligonucleotide
aacacgaagttggagcaaacagacatggcg

SEQ ID NO: 19388 - DNA, 30 bp, Artificial Sequence
  Synthetic oligonucleotide
tgagacatacctaggcgtcaaaataatgcg

SEQ ID NO: 19389 - DNA, 30 bp, Artificial Sequence
  Synthetic oligonucleotide
tcggctcgttgagaggagtgtcgacatgcg

SEQ ID NO: 19390 - DNA, 30 bp, Artificial Sequence
  Synthetic oligonucleotide
cgaagtggtccgacgaccaaaaactatgcg

SEQ ID NO: 19391 - DNA, 30 bp, Artificial Sequence
  Synthetic oligonucleotide
aaggctataacaggccgaagtactgaatcg

SEQ ID NO: 19392 - DNA, 30 bp, Artificial Sequence
  Synthetic oligonucleotide
tcgaccggagaaacttacagttctggatcg

SEQ ID NO: 19393 - DNA, 30 bp, Artificial Sequence
  Synthetic oligonucleotide
agaggggaatccgacgtcaataaatgatcg

SEQ ID NO: 19394 - DNA, 30 bp, Artificial Sequence
  Synthetic oligonucleotide
tgaacgagaagtgcgcttagggacgactcg

SEQ ID NO: 19395 - DNA, 30 bp, Artificial Sequence
  Synthetic oligonucleotide
aggcggataggccgggaataagccaagtcg

SEQ ID NO: 19396 - DNA, 30 bp, Artificial Sequence
  Synthetic oligonucleotide
cgggcgaagtggaaacctgctttgcagtcg

SEQ ID NO: 19397 - DNA, 30 bp, Artificial Sequence
  Synthetic oligonucleotide
cggattaggcgcttgaggaaaaagatgtcg

SEQ ID NO: 19398 - DNA, 31 bp, Artificial Sequence
  Synthetic oligonucleotide
caatagagggataaccccgcttgagatgtcg

SEQ ID NO: 19399 - DNA, 30 bp, Artificial Sequence
  Synthetic oligonucleotide
aggcagtgttagtccgcgataaggatgtcg

SEQ ID NO: 19400 - DNA, 30 bp, Artificial Sequence
  Synthetic oligonucleotide
tccaagagagaaggaggcctgggcagttcg

SEQ ID NO: 19401 - DNA, 30 bp, Artificial Sequence
  Synthetic oligonucleotide
agatcgaagagtagcagcgtcgctagttcg

SEQ ID NO: 19402 - DNA, 30 bp, Artificial Sequence
  Synthetic oligonucleotide
aggggaaggattcaggggacctgtagttcg

SEQ ID NO: 19403 - DNA, 30 bp, Artificial Sequence
  Synthetic oligonucleotide
tacgaggaggcgagattctttcactgttcg

SEQ ID NO: 19404 - DNA, 30 bp, Artificial Sequence
  Synthetic oligonucleotide
gcgcaatcgaggacgtgatatacctgttcg

SEQ ID NO: 19405 - DNA, 30 bp, Artificial Sequence
  Synthetic oligonucleotide
cgaccaacgtgtaccgtcggatgggaaagg

SEQ ID NO: 19406 - DNA, 30 bp, Artificial Sequence
  Synthetic oligonucleotide
tttgtcgaccgatgaaacaagagaataagg

SEQ ID NO: 19407 - DNA, 30 bp, Artificial Sequence
  Synthetic oligonucleotide
cgaatagttaatcggccaaccccagtaagg

SEQ ID NO: 19408 - DNA, 30 bp, Artificial Sequence
  Synthetic oligonucleotide
cgtagataaggaacattagcatatgtaagg

SEQ ID NO: 19409 - DNA, 30 bp, Artificial Sequence
  Synthetic oligonucleotide
gaccagatgtagccgtaagtaggatccagg

SEQ ID NO: 19410 - DNA, 30 bp, Artificial Sequence
  Synthetic oligonucleotide
acgtctaagcaaagatgtcagattatcagg

SEQ ID NO: 19411 - DNA, 30 bp, Artificial Sequence
  Synthetic oligonucleotide
acgcgtaggtaattcgcatgaacattcagg

SEQ ID NO: 19412 - DNA, 30 bp, Artificial Sequence
  Synthetic oligonucleotide
ccagttaacgtaaaagagcgaactttcagg

SEQ ID NO: 19413 - DNA, 30 bp, Artificial Sequence
  Synthetic oligonucleotide
aaggcggttggaattgacaagctaaagagg

SEQ ID NO: 19414 - DNA, 30 bp, Artificial Sequence
  Synthetic oligonucleotide
acaacgcgataataagcatcatagaagagg

SEQ ID NO: 19415 - DNA, 30 bp, Artificial Sequence
  Synthetic oligonucleotide
gcgctcactcaacaaagcaaggtacagagg

SEQ ID NO: 19416 - DNA, 30 bp, Artificial Sequence
  Synthetic oligonucleotide
tgggaagcggatagtgttacgtaaccgagg

SEQ ID NO: 19417 - DNA, 30 bp, Artificial Sequence
  Synthetic oligonucleotide
cgacgacacagaaggactcaagggggtagg

SEQ ID NO: 19418 - DNA, 30 bp, Artificial Sequence
  Synthetic oligonucleotide
gcgaggagtgactacgatttatgatcccgg

SEQ ID NO: 19419 - DNA, 30 bp, Artificial Sequence
  Synthetic oligonucleotide
acggcaggcccacaagagagtggaaggcgg

SEQ ID NO: 19420 - DNA, 30 bp, Artificial Sequence
  Synthetic oligonucleotide
ggcagaactagaaagctagtgacatctcgg

SEQ ID NO: 19421 - DNA, 30 bp, Artificial Sequence
  Synthetic oligonucleotide
tatgcagactcggaataatgcgcaaaaggg

SEQ ID NO: 19422 - DNA, 30 bp, Artificial Sequence
  Synthetic oligonucleotide
actggcagctgcgcgtgaatgaactaaggg

SEQ ID NO: 19423 - DNA, 30 bp, Artificial Sequence
  Synthetic oligonucleotide
atccgaaaaagagaattaatagtaacaggg

SEQ ID NO: 19424 - DNA, 30 bp, Artificial Sequence
  Synthetic oligonucleotide
tggtgacgatccaaaaggttagtagcaggg

SEQ ID NO: 19425 - DNA, 30 bp, Artificial Sequence
  Synthetic oligonucleotide
acgatcgtggaccataatgttcactcaggg

SEQ ID NO: 19426 - DNA, 30 bp, Artificial Sequence
  Synthetic oligonucleotide
gggataaggaaaataagcaactagtcaggg

SEQ ID NO: 19427 - DNA, 30 bp, Artificial Sequence
  Synthetic oligonucleotide
agataagttaactcccccattgaacgaggg

SEQ ID NO: 19428 - DNA, 30 bp, Artificial Sequence
  Synthetic oligonucleotide
tgacgaggtatgtaaggcatattaggaggg

SEQ ID NO: 19429 - DNA, 30 bp, Artificial Sequence
  Synthetic oligonucleotide
acgatcatcacgctataatggatactaggg

SEQ ID NO: 19430 - DNA, 31 bp, Artificial Sequence
  Synthetic oligonucleotide
atgtcatggaacggcataatgtcgtctaggg

SEQ ID NO: 19431 - DNA, 30 bp, Artificial Sequence
  Synthetic oligonucleotide
tggtcccctcatgagcaagaaagcttaggg

SEQ ID NO: 19432 - DNA, 31 bp, Artificial Sequence
  Synthetic oligonucleotide
acgtggctaattatagtggacgaaaaacggg

SEQ ID NO: 19433 - DNA, 30 bp, Artificial Sequence
  Synthetic oligonucleotide
agggtggacaactgcatctaacactgcggg

SEQ ID NO: 19434 - DNA, 30 bp, Artificial Sequence
  Synthetic oligonucleotide
gcgtgcgatgtgggttgaaaacgtctgggg

SEQ ID NO: 19435 - DNA, 30 bp, Artificial Sequence
  Synthetic oligonucleotide
cgagagtgaggaaaagaaaaatttcctggg

SEQ ID NO: 19436 - DNA, 30 bp, Artificial Sequence
  Synthetic oligonucleotide
acgaattcgaactaattggggcttggtggg

SEQ ID NO: 19437 - DNA, 30 bp, Artificial Sequence
  Synthetic oligonucleotide
gcgtgtctggtgaactcgagagcaaaatgg

SEQ ID NO: 19438 - DNA, 30 bp, Artificial Sequence
  Synthetic oligonucleotide
cagatcatacgaaaaacagtcaacacatgg

SEQ ID NO: 19439 - DNA, 30 bp, Artificial Sequence
  Synthetic oligonucleotide
atggtgtatctgagaagagagaggacatgg

SEQ ID NO: 19440 - DNA, 30 bp, Artificial Sequence
  Synthetic oligonucleotide
cgaggaagtatcagctcatacggaagatgg

SEQ ID NO: 19441 - DNA, 30 bp, Artificial Sequence
  Synthetic oligonucleotide
acgtctattgcaggcgaaggcatgagatgg

SEQ ID NO: 19442 - DNA, 30 bp, Artificial Sequence
  Synthetic oligonucleotide
gagggggaggtctatactctgtcgatatgg

SEQ ID NO: 19443 - DNA, 30 bp, Artificial Sequence
  Synthetic oligonucleotide
ggcgagttggcgatttgggtcaaagactgg

SEQ ID NO: 19444 - DNA, 30 bp, Artificial Sequence
  Synthetic oligonucleotide
gtgctagacaactagaacgggggaacctgg

SEQ ID NO: 19445 - DNA, 30 bp, Artificial Sequence
  Synthetic oligonucleotide
gtgaggcaagatgtggcggggaaactctgg

SEQ ID NO: 19446 - DNA, 30 bp, Artificial Sequence
  Synthetic oligonucleotide
aggtaaacgacgggtggatccgtactgtgg

SEQ ID NO: 19447 - DNA, 30 bp, Artificial Sequence
  Synthetic oligonucleotide
tggaagttacgaatcgagagactaggttgg

SEQ ID NO: 19448 - DNA, 30 bp, Artificial Sequence
  Synthetic oligonucleotide
acagggccgaaggcgtcacaccgatgttgg

SEQ ID NO: 19449 - DNA, 30 bp, Artificial Sequence
  Synthetic oligonucleotide
aggaaacataaaatacacactcaataaatg

SEQ ID NO: 19450 - DNA, 30 bp, Artificial Sequence
  Synthetic oligonucleotide
cctatgtaaaaggggtgtaagctaacaatg

SEQ ID NO: 19451 - DNA, 30 bp, Artificial Sequence
  Synthetic oligonucleotide
cgaggttaaacgttaaggcttgtcccaatg

SEQ ID NO: 19452 - DNA, 30 bp, Artificial Sequence
  Synthetic oligonucleotide
tgaaacaagcgcaaaggagagtgagcaatg

SEQ ID NO: 19453 - DNA, 30 bp, Artificial Sequence
  Synthetic oligonucleotide
gcgtcaaacggatcgttagcaaccataatg

SEQ ID NO: 19454 - DNA, 31 bp, Artificial Sequence
  Synthetic oligonucleotide
cgagttaactagtgggccaataccattaatg

SEQ ID NO: 19455 - DNA, 30 bp, Artificial Sequence
  Synthetic oligonucleotide
gagagcaggattagtaaaacacgggccatg

SEQ ID NO: 19456 - DNA, 30 bp, Artificial Sequence
  Synthetic oligonucleotide
aagggcgggacaaatgagtccgaccgcatg

SEQ ID NO: 19457 - DNA, 30 bp, Artificial Sequence
  Synthetic oligonucleotide
cgctcgggtacaacaacggtagcgatcatg

SEQ ID NO: 19458 - DNA, 30 bp, Artificial Sequence
  Synthetic oligonucleotide
cgacactcagatgggagcaatattctcatg

SEQ ID NO: 19459 - DNA, 30 bp, Artificial Sequence
  Synthetic oligonucleotide
tgaggaaggccatatgtgtcgctagagatg

SEQ ID NO: 19460 - DNA, 30 bp, Artificial Sequence
  Synthetic oligonucleotide
tgagccgtgagcggaacagtagccgagatg

SEQ ID NO: 19461 - DNA, 30 bp, Artificial Sequence
  Synthetic oligonucleotide
tatggggtggatacgagcaagggtgagatg

SEQ ID NO: 19462 - DNA, 30 bp, Artificial Sequence
  Synthetic oligonucleotide
ttatgataccgaggaaagcgtccttagatg

SEQ ID NO: 19463 - DNA, 30 bp, Artificial Sequence
  Synthetic oligonucleotide
gcgagggcatgctcgggatattgcgcgatg

SEQ ID NO: 19464 - DNA, 30 bp, Artificial Sequence
  Synthetic oligonucleotide
acgattgagcataacagtacctgagggatg

SEQ ID NO: 19465 - DNA, 30 bp, Artificial Sequence
  Synthetic oligonucleotide
caggtaggcagtagtaggtccaggatgatg

SEQ ID NO: 19466 - DNA, 30 bp, Artificial Sequence
  Synthetic oligonucleotide
tgctcgaggttcgagaacaatcaggtgatg

SEQ ID NO: 19467 - DNA, 30 bp, Artificial Sequence
  Synthetic oligonucleotide
gaggcgacacaacgaccaaacatattgatg

SEQ ID NO: 19468 - DNA, 30 bp, Artificial Sequence
  Synthetic oligonucleotide
cctgaaggcttgaaaaacctctatcatatg

SEQ ID NO: 19469 - DNA, 30 bp, Artificial Sequence
  Synthetic oligonucleotide
tgaagaccagggctaactgattgcgatatg

SEQ ID NO: 19470 - DNA, 30 bp, Artificial Sequence
  Synthetic oligonucleotide
gtagagatagaactagagatagctactatg

SEQ ID NO: 19471 - DNA, 30 bp, Artificial Sequence
  Synthetic oligonucleotide
aggtaccgaagcgataaagacaaggctatg

SEQ ID NO: 19472 - DNA, 30 bp, Artificial Sequence
  Synthetic oligonucleotide
ggggcgatggaggagtctggtttgagtatg

SEQ ID NO: 19473 - DNA, 30 bp, Artificial Sequence
  Synthetic oligonucleotide
cgttaaaagttggcgaatagtagatgtatg

SEQ ID NO: 19474 - DNA, 30 bp, Artificial Sequence
  Synthetic oligonucleotide
acggcattcgacggcttcaccacgattatg

SEQ ID NO: 19475 - DNA, 30 bp, Artificial Sequence
  Synthetic oligonucleotide
gaggcaaaaattcagactacagtgaaactg

SEQ ID NO: 19476 - DNA, 30 bp, Artificial Sequence
  Synthetic oligonucleotide
agctattcggcagaagaataacatcaactg

SEQ ID NO: 19477 - DNA, 30 bp, Artificial Sequence
  Synthetic oligonucleotide
cggggtatatctcgtaccgacaaggaactg

SEQ ID NO: 19478 - DNA, 30 bp, Artificial Sequence
  Synthetic oligonucleotide
ggtggagaggaggtacttgttccctaactg

SEQ ID NO: 19479 - DNA, 30 bp, Artificial Sequence
  Synthetic oligonucleotide
ctaagtgtggatacgataggatcgcgactg

SEQ ID NO: 19480 - DNA, 30 bp, Artificial Sequence
  Synthetic oligonucleotide
tcaacgtgcagggttggtaagatcaatctg

SEQ ID NO: 19481 - DNA, 30 bp, Artificial Sequence
  Synthetic oligonucleotide
cgagagggggtcctcaggtagcaatctctg

SEQ ID NO: 19482 - DNA, 30 bp, Artificial Sequence
  Synthetic oligonucleotide
ggtaagcaaatccccatatgaaaacgtctg

SEQ ID NO: 19483 - DNA, 30 bp, Artificial Sequence
  Synthetic oligonucleotide
acgaagaccggactcggtcaagggaaagtg

SEQ ID NO: 19484 - DNA, 30 bp, Artificial Sequence
  Synthetic oligonucleotide
taggcctggtgaaccaagtttgcacaagtg

SEQ ID NO: 19485 - DNA, 30 bp, Artificial Sequence
  Synthetic oligonucleotide
gacatccgtgagaacgcgtcaaggcaagtg

SEQ ID NO: 19486 - DNA, 30 bp, Artificial Sequence
  Synthetic oligonucleotide
tcatagcgagacagggtaactagtcaagtg

SEQ ID NO: 19487 - DNA, 30 bp, Artificial Sequence
  Synthetic oligonucleotide
agtcggagtggggtctatgggatgtaagtg

SEQ ID NO: 19488 - DNA, 30 bp, Artificial Sequence
  Synthetic oligonucleotide
aaggcgagggatcaattgccaacaacagtg

SEQ ID NO: 19489 - DNA, 30 bp, Artificial Sequence
  Synthetic oligonucleotide
cgagccattagtgcctggaataatcgagtg

SEQ ID NO: 19490 - DNA, 30 bp, Artificial Sequence
  Synthetic oligonucleotide
ttatcgaaaaaggaccgaattaaagtagtg

SEQ ID NO: 19491 - DNA, 30 bp, Artificial Sequence
  Synthetic oligonucleotide
cgacgagtgataatattaattacatacgtg

SEQ ID NO: 19492 - DNA, 30 bp, Artificial Sequence
  Synthetic oligonucleotide
agggtaggtatatatgaccgtattgtcgtg

SEQ ID NO: 19493 - DNA, 30 bp, Artificial Sequence
  Synthetic oligonucleotide
atgtgaacctgaacaaatcacgggaatgtg

SEQ ID NO: 19494 - DNA, 30 bp, Artificial Sequence
  Synthetic oligonucleotide
ctcagtaacgaggaccaatggcaagatgtg

SEQ ID NO: 19495 - DNA, 30 bp, Artificial Sequence
  Synthetic oligonucleotide
cggtaggaaagctccgaaagaaagcctgtg

SEQ ID NO: 19496 - DNA, 30 bp, Artificial Sequence
  Synthetic oligonucleotide
tgaggcgccgatccgcggaagattagtgtg

SEQ ID NO: 19497 - DNA, 30 bp, Artificial Sequence
  Synthetic oligonucleotide
aaagaggcacaggtgcgaatataaggtgtg

SEQ ID NO: 19498 - DNA, 30 bp, Artificial Sequence
  Synthetic oligonucleotide
atacacaaagggacttcgtaacgataattg

SEQ ID NO: 19499 - DNA, 30 bp, Artificial Sequence
  Synthetic oligonucleotide
ccgaaaccgctgaaattaagggcaggattg

SEQ ID NO: 19500 - DNA, 30 bp, Artificial Sequence
  Synthetic oligonucleotide
caacgtcgcaagacaagtgcagctatattg

SEQ ID NO: 19501 - DNA, 30 bp, Artificial Sequence
  Synthetic oligonucleotide
ctagaagccaaaaaagggtgggtcgacttg

SEQ ID NO: 19502 - DNA, 30 bp, Artificial Sequence
  Synthetic oligonucleotide
aaacgagaggatggggtgtcagcccgcttg

SEQ ID NO: 19503 - DNA, 30 bp, Artificial Sequence
  Synthetic oligonucleotide
acggaatgaaaagtatattactgcgggttg

SEQ ID NO: 19504 - DNA, 30 bp, Artificial Sequence
  Synthetic oligonucleotide
ccgaaggaggtcctgtgcgaacatatgttg

SEQ ID NO: 19505 - DNA, 30 bp, Artificial Sequence
  Synthetic oligonucleotide
agtggacccgaagataataactcgtcaaat

SEQ ID NO: 19506 - DNA, 30 bp, Artificial Sequence
  Synthetic oligonucleotide
gcacacaaggtgaaaggcatcggaagaaat

SEQ ID NO: 19507 - DNA, 30 bp, Artificial Sequence
  Synthetic oligonucleotide
ccgacgaccagcgacaacgttaggcgaaat

SEQ ID NO: 19508 - DNA, 30 bp, Artificial Sequence
  Synthetic oligonucleotide
actagacatggtggaggggaagcgcccaat

SEQ ID NO: 19509 - DNA, 30 bp, Artificial Sequence
  Synthetic oligonucleotide
tcacgggaagaggtaaactatgggcccaat

SEQ ID NO: 19510 - DNA, 30 bp, Artificial Sequence
  Synthetic oligonucleotide
gcgatcaaaggaggttggagacacgtcaat

SEQ ID NO: 19511 - DNA, 30 bp, Artificial Sequence
  Synthetic oligonucleotide
agtggtggaacaaacaggtgagaacagaat

SEQ ID NO: 19512 - DNA, 30 bp, Artificial Sequence
  Synthetic oligonucleotide
ctggcaaggagtgcgtcagaatgagagaat

SEQ ID NO: 19513 - DNA, 31 bp, Artificial Sequence
  Synthetic oligonucleotide
acgcgacgaaagaacatcgcatggctagaat

SEQ ID NO: 19514 - DNA, 30 bp, Artificial Sequence
  Synthetic oligonucleotide
aggatgcgaaaaggaagctaacaagcgaat

SEQ ID NO: 19515 - DNA, 30 bp, Artificial Sequence
  Synthetic oligonucleotide
actcgtagataaaggcaagagggtgggaat

SEQ ID NO: 19516 - DNA, 30 bp, Artificial Sequence
  Synthetic oligonucleotide
tcacggaaagcgcagtgtgggaggctgaat

SEQ ID NO: 19517 - DNA, 30 bp, Artificial Sequence
  Synthetic oligonucleotide
cgaatggcgggggaggcaagaactgctaat

SEQ ID NO: 19518 - DNA, 30 bp, Artificial Sequence
  Synthetic oligonucleotide
gcgaggggacggcaccaccccactgcacat

SEQ ID NO: 19519 - DNA, 30 bp, Artificial Sequence
  Synthetic oligonucleotide
tgtaaaagggtgataaggtcgagtagacat

SEQ ID NO: 19520 - DNA, 30 bp, Artificial Sequence
  Synthetic oligonucleotide
cggtaagaatcgcgcgtcgtatctggacat

SEQ ID NO: 19521 - DNA, 30 bp, Artificial Sequence
  Synthetic oligonucleotide
gcctcacaggctgacaagaaaataatacat

SEQ ID NO: 19522 - DNA, 30 bp, Artificial Sequence
  Synthetic oligonucleotide
tgcaaggtaaagtatgaatacagtgagcat

SEQ ID NO: 19523 - DNA, 30 bp, Artificial Sequence
  Synthetic oligonucleotide
gcagacactgaagcgatgtggatatagcat

SEQ ID NO: 19524 - DNA, 30 bp, Artificial Sequence
  Synthetic oligonucleotide
ctcgggtaccaacaaggaaccaggtagcat

SEQ ID NO: 19525 - DNA, 30 bp, Artificial Sequence
  Synthetic oligonucleotide
tcgtaagggagacgggcatgtccgcaagat

SEQ ID NO: 19526 - DNA, 30 bp, Artificial Sequence
  Synthetic oligonucleotide
ccgtaggcacgccagggaatgcagccagat

SEQ ID NO: 19527 - DNA, 30 bp, Artificial Sequence
  Synthetic oligonucleotide
acgggtatgggctgaaccacttgtgcagat

SEQ ID NO: 19528 - DNA, 30 bp, Artificial Sequence
  Synthetic oligonucleotide
ggaaaggacaacagttctaacgcctcagat

SEQ ID NO: 19529 - DNA, 30 bp, Artificial Sequence
  Synthetic oligonucleotide
gacccgaggatactggggaaaacgtcagat

SEQ ID NO: 19530 - DNA, 30 bp, Artificial Sequence
  Synthetic oligonucleotide
acatcctgaaaatgcaaacacatgcgagat

SEQ ID NO: 19531 - DNA, 30 bp, Artificial Sequence
  Synthetic oligonucleotide
cgggaccaatagcggtcaatgagcctagat

SEQ ID NO: 19532 - DNA, 30 bp, Artificial Sequence
  Synthetic oligonucleotide
gccgagaactaacaagggagtagggtagat

SEQ ID NO: 19533 - DNA, 30 bp, Artificial Sequence
  Synthetic oligonucleotide
accgagtcaggagcataactcggaaacgat

SEQ ID NO: 19534 - DNA, 30 bp, Artificial Sequence
  Synthetic oligonucleotide
gtaggggagcgagaatcaagtcataccgat

SEQ ID NO: 19535 - DNA, 30 bp, Artificial Sequence
  Synthetic oligonucleotide
tagccatgattggacacacgagtagcggat

SEQ ID NO: 19536 - DNA, 30 bp, Artificial Sequence
  Synthetic oligonucleotide
aacgaacaagcgtcggagatcggcggtgat

SEQ ID NO: 19537 - DNA, 30 bp, Artificial Sequence
  Synthetic oligonucleotide
acgggtgcctgaaaagggcgattgcaatat

SEQ ID NO: 19538 - DNA, 30 bp, Artificial Sequence
  Synthetic oligonucleotide
ccgaggcccgatggaagagaattcgtatat

SEQ ID NO: 19539 - DNA, 30 bp, Artificial Sequence
  Synthetic oligonucleotide
cggagaaagattgacccgctaacaacgtat

SEQ ID NO: 19540 - DNA, 30 bp, Artificial Sequence
  Synthetic oligonucleotide
cagcgagggaacgaaaacaatagtaattat

SEQ ID NO: 19541 - DNA, 30 bp, Artificial Sequence
  Synthetic oligonucleotide
aggtcataagcaaaaggatgggtgtattat

SEQ ID NO: 19542 - DNA, 30 bp, Artificial Sequence
  Synthetic oligonucleotide
agcaccacggttgcataggtagagggaact

SEQ ID NO: 19543 - DNA, 30 bp, Artificial Sequence
  Synthetic oligonucleotide
cgtcaactcgtatgagcgtgacccaccact

SEQ ID NO: 19544 - DNA, 30 bp, Artificial Sequence
  Synthetic oligonucleotide
ggtcgtgataacaatataagtggggtcact

SEQ ID NO: 19545 - DNA, 30 bp, Artificial Sequence
  Synthetic oligonucleotide
aaggaacgaacagtgcgtataggatgtact

SEQ ID NO: 19546 - DNA, 30 bp, Artificial Sequence
  Synthetic oligonucleotide
acgaggggaatgcaatgctctgactgtact

SEQ ID NO: 19547 - DNA, 30 bp, Artificial Sequence
  Synthetic oligonucleotide
ccgaacacggacagaagttgagtgattact

SEQ ID NO: 19548 - DNA, 30 bp, Artificial Sequence
  Synthetic oligonucleotide
gggcaaacagcagtagcagtcgtcaaacct

SEQ ID NO: 19549 - DNA, 30 bp, Artificial Sequence
  Synthetic oligonucleotide
cgaggctatggcacgaaccaaggtaaagct

SEQ ID NO: 19550 - DNA, 30 bp, Artificial Sequence
  Synthetic oligonucleotide
ctcgatagcaaggaatgcgtgaggtaagct

SEQ ID NO: 19551 - DNA, 30 bp, Artificial Sequence
  Synthetic oligonucleotide
tatggtgagccggttgtaggtagccacgct

SEQ ID NO: 19552 - DNA, 30 bp, Artificial Sequence
  Synthetic oligonucleotide
gtgaacgccccaacgacagtgacaaaggct

SEQ ID NO: 19553 - DNA, 30 bp, Artificial Sequence
  Synthetic oligonucleotide
tcaacgggaccagggatgaggctgtaatct

SEQ ID NO: 19554 - DNA, 30 bp, Artificial Sequence
  Synthetic oligonucleotide
gaggagcgggtggaggtaaagcacgactct

SEQ ID NO: 19555 - DNA, 30 bp, Artificial Sequence
  Synthetic oligonucleotide
ggagatcggagccgaacgggggacgaaagt

SEQ ID NO: 19556 - DNA, 30 bp, Artificial Sequence
  Synthetic oligonucleotide
tcgaggtctcgacacgcgaggaagataagt

SEQ ID NO: 19557 - DNA, 30 bp, Artificial Sequence
  Synthetic oligonucleotide
tcgaataaggaaggaccaggatgtataagt

SEQ ID NO: 19558 - DNA, 30 bp, Artificial Sequence
  Synthetic oligonucleotide
gataggcaatgcaccaaggagcagaacagt

SEQ ID NO: 19559 - DNA, 30 bp, Artificial Sequence
  Synthetic oligonucleotide
acggacaattccagcgccacaggccacagt

SEQ ID NO: 19560 - DNA, 30 bp, Artificial Sequence
  Synthetic oligonucleotide
tctggaacggaaagttgcgagaaagagagt

SEQ ID NO: 19561 - DNA, 30 bp, Artificial Sequence
  Synthetic oligonucleotide
caaagcaggaaccaatggtaaacggagagt

SEQ ID NO: 19562 - DNA, 30 bp, Artificial Sequence
  Synthetic oligonucleotide
cccggatcgaccgaccatagagctaggagt

SEQ ID NO: 19563 - DNA, 30 bp, Artificial Sequence
  Synthetic oligonucleotide
atagtaaggagggggcgtaccgcaaatagt

SEQ ID NO: 19564 - DNA, 30 bp, Artificial Sequence
  Synthetic oligonucleotide
gccgaaacgcggaaaatgagtatgaatagt

SEQ ID NO: 19565 - DNA, 30 bp, Artificial Sequence
  Synthetic oligonucleotide
ccacgtagatcaaagttagaagaggatagt

SEQ ID NO: 19566 - DNA, 30 bp, Artificial Sequence
  Synthetic oligonucleotide
gggtaattcaccaaagcagaataagctagt

SEQ ID NO: 19567 - DNA, 30 bp, Artificial Sequence
  Synthetic oligonucleotide
gtggcaatagcaggaacgaagtgcagtagt

SEQ ID NO: 19568 - DNA, 30 bp, Artificial Sequence
  Synthetic oligonucleotide
ggtagaaagagggaacatgacgagagtagt

SEQ ID NO: 19569 - DNA, 30 bp, Artificial Sequence
  Synthetic oligonucleotide
aacgcgaatgttgctagtctagagtgtagt

SEQ ID NO: 19570 - DNA, 30 bp, Artificial Sequence
  Synthetic oligonucleotide
ggcgagagcaatagattcgagattgaccgt

SEQ ID NO: 19571 - DNA, 30 bp, Artificial Sequence
  Synthetic oligonucleotide
ggaaagacgacaatcacaagtgaggagcgt

SEQ ID NO: 19572 - DNA, 30 bp, Artificial Sequence
  Synthetic oligonucleotide
cgatgtatagtcggtacagggagaaaaggt

SEQ ID NO: 19573 - DNA, 30 bp, Artificial Sequence
  Synthetic oligonucleotide
cggaggaaaagtgcgacatcattaacgggt

SEQ ID NO: 19574 - DNA, 30 bp, Artificial Sequence
  Synthetic oligonucleotide
agcgaggtcgacgaaacaatagtgacgggt

SEQ ID NO: 19575 - DNA, 30 bp, Artificial Sequence
  Synthetic oligonucleotide
agtacgacacgacaataagaagatggtggt

SEQ ID NO: 19576 - DNA, 30 bp, Artificial Sequence
  Synthetic oligonucleotide
agccaatagcagagtcggcctgaggtatgt

SEQ ID NO: 19577 - DNA, 30 bp, Artificial Sequence
  Synthetic oligonucleotide
catgggactgaataataagaatagaggtgt

SEQ ID NO: 19578 - DNA, 30 bp, Artificial Sequence
  Synthetic oligonucleotide
cgcagaggtaacggcaactaacggaggtgt

SEQ ID NO: 19579 - DNA, 30 bp, Artificial Sequence
  Synthetic oligonucleotide
tgtcggaagtggcacagagcgcaaaattgt

SEQ ID NO: 19580 - DNA, 30 bp, Artificial Sequence
  Synthetic oligonucleotide
caggcaagaaccgtaaagtgtaaagtttgt

SEQ ID NO: 19581 - DNA, 30 bp, Artificial Sequence
  Synthetic oligonucleotide
tgagagcgagaatatcaggctggtgaaatt

SEQ ID NO: 19582 - DNA, 30 bp, Artificial Sequence
  Synthetic oligonucleotide
aacgcgtgaaaagggacacagaaatcaatt

SEQ ID NO: 19583 - DNA, 30 bp, Artificial Sequence
  Synthetic oligonucleotide
aggcctcaagactgagagagtcgagacatt

SEQ ID NO: 19584 - DNA, 30 bp, Artificial Sequence
  Synthetic oligonucleotide
atgaggccgtcgcgacctacaccagagatt

SEQ ID NO: 19585 - DNA, 30 bp, Artificial Sequence
  Synthetic oligonucleotide
acggagggcaagcaccagcatcacccgatt

SEQ ID NO: 19586 - DNA, 30 bp, Artificial Sequence
  Synthetic oligonucleotide
gcttataaaacaactaaatgcaatccgatt

SEQ ID NO: 19587 - DNA, 30 bp, Artificial Sequence
  Synthetic oligonucleotide
cgcaggcggcggggggatacgaactcgatt

SEQ ID NO: 19588 - DNA, 30 bp, Artificial Sequence
  Synthetic oligonucleotide
aagagatgattgctgagggaggaggggatt

SEQ ID NO: 19589 - DNA, 30 bp, Artificial Sequence
  Synthetic oligonucleotide
agacaaaaaggaatggaagaaagttatatt

SEQ ID NO: 19590 - DNA, 30 bp, Artificial Sequence
  Synthetic oligonucleotide
caggagggcaaacgaatacagatcattatt

SEQ ID NO: 19591 - DNA, 30 bp, Artificial Sequence
  Synthetic oligonucleotide
gctggaaccttatgcatgaggagttacgtt

SEQ ID NO: 19592 - DNA, 30 bp, Artificial Sequence
  Synthetic oligonucleotide
cgggatggtgacaagtacgggaatcaattt

SEQ ID NO: 19593 - DNA, 30 bp, Artificial Sequence
  Synthetic oligonucleotide
cagtatcgctgagggaaggagtgctagttt

SEQ ID NO: 19594 - DNA, 30 bp, Artificial Sequence
  Synthetic oligonucleotide
gggagcgaggacaatgttttcgctgaaaaa

SEQ ID NO: 19595 - DNA, 30 bp, Artificial Sequence
  Synthetic oligonucleotide
ggcggacaaggcgcgaggagatagccaaaa

SEQ ID NO: 19596 - DNA, 30 bp, Artificial Sequence
  Synthetic oligonucleotide
ggacacatatacaatagacctcaagtaaaa

SEQ ID NO: 19597 - DNA, 30 bp, Artificial Sequence
  Synthetic oligonucleotide
ttaggcgttaactcaatccaagcagacaaa

SEQ ID NO: 19598 - DNA, 30 bp, Artificial Sequence
  Synthetic oligonucleotide
caaagatcaataaaaaagtcgtggaccaaa

SEQ ID NO: 19599 - DNA, 30 bp, Artificial Sequence
  Synthetic oligonucleotide
atggggagctccctagcccaaggatccaaa

SEQ ID NO: 19600 - DNA, 31 bp, Artificial Sequence
  Synthetic oligonucleotide
agggcgttacgagtggataggggtgatgaaa

SEQ ID NO: 19601 - DNA, 30 bp, Artificial Sequence
  Synthetic oligonucleotide
gggcgagaatatccacaatgcaccaataaa

SEQ ID NO: 19602 - DNA, 30 bp, Artificial Sequence
  Synthetic oligonucleotide
cgaaactagaactgcctccagagcaataaa

SEQ ID NO: 19603 - DNA, 30 bp, Artificial Sequence
  Synthetic oligonucleotide
ggcggtacgttgcagaaaaggatcggtaaa

SEQ ID NO: 19604 - DNA, 30 bp, Artificial Sequence
  Synthetic oligonucleotide
agttacaacacgtaatcgagactacaacaa

SEQ ID NO: 19605 - DNA, 30 bp, Artificial Sequence
  Synthetic oligonucleotide
gcgtaaagcgacaagttctcttcctcacaa

SEQ ID NO: 19606 - DNA, 30 bp, Artificial Sequence
  Synthetic oligonucleotide
acggatagagatcacacttacgtaggacaa

SEQ ID NO: 19607 - DNA, 30 bp, Artificial Sequence
  Synthetic oligonucleotide
ctcataaggcgaccgtatacaacaatacaa

SEQ ID NO: 19608 - DNA, 30 bp, Artificial Sequence
  Synthetic oligonucleotide
gaatgggagccgagcgtcgtcagattacaa

SEQ ID NO: 19609 - DNA, 30 bp, Artificial Sequence
  Synthetic oligonucleotide
gcggagcgcatgaagaaaagggttcaccaa

SEQ ID NO: 19610 - DNA, 30 bp, Artificial Sequence
  Synthetic oligonucleotide
atggtagttggtaaagaagctaagtgccaa

SEQ ID NO: 19611 - DNA, 30 bp, Artificial Sequence
  Synthetic oligonucleotide
cgagctcgatagtccctctgcgaaatccaa

SEQ ID NO: 19612 - DNA, 30 bp, Artificial Sequence
  Synthetic oligonucleotide
ctaagactgcggagtgcatatagagagcaa

SEQ ID NO: 19613 - DNA, 30 bp, Artificial Sequence
  Synthetic oligonucleotide
gacgtgttctgggaatgtaaataagcgcaa

SEQ ID NO: 19614 - DNA, 30 bp, Artificial Sequence
  Synthetic oligonucleotide
ggaggtaactgagggactcagaaactgcaa

SEQ ID NO: 19615 - DNA, 30 bp, Artificial Sequence
  Synthetic oligonucleotide
acaacagcaggtgaagggaatgtgttgcaa

SEQ ID NO: 19616 - DNA, 30 bp, Artificial Sequence
  Synthetic oligonucleotide
atgcgggagcgacgagcgatgtggaaagaa

SEQ ID NO: 19617 - DNA, 30 bp, Artificial Sequence
  Synthetic oligonucleotide
agaattaagatcatcagatcgcaccaagaa

SEQ ID NO: 19618 - DNA, 30 bp, Artificial Sequence
  Synthetic oligonucleotide
cgtagcaagaatataatcgtcgtggaagaa

SEQ ID NO: 19619 - DNA, 30 bp, Artificial Sequence
  Synthetic oligonucleotide
tcaggtcaagagggcgaatgaagatcagaa

SEQ ID NO: 19620 - DNA, 30 bp, Artificial Sequence
  Synthetic oligonucleotide
gatgtgcttaggaggattagcgggagagaa

SEQ ID NO: 19621 - DNA, 30 bp, Artificial Sequence
  Synthetic oligonucleotide
gcgtcaacgcacccatggtaaaagcgagaa

SEQ ID NO: 19622 - DNA, 30 bp, Artificial Sequence
  Synthetic oligonucleotide
gggagaatctaggggctaaaataaggagaa

SEQ ID NO: 19623 - DNA, 30 bp, Artificial Sequence
  Synthetic oligonucleotide
atactggaagatcaaaaaccgagcggagaa

SEQ ID NO: 19624 - DNA, 30 bp, Artificial Sequence
  Synthetic oligonucleotide
ggacctagagagaagagcataggtggagaa

SEQ ID NO: 19625 - DNA, 30 bp, Artificial Sequence
  Synthetic oligonucleotide
accgtacatcaggaagagattgagatagaa

SEQ ID NO: 19626 - DNA, 30 bp, Artificial Sequence
  Synthetic oligonucleotide
cggtcaacgagtaatgtcgggtacagcgaa

SEQ ID NO: 19627 - DNA, 30 bp, Artificial Sequence
  Synthetic oligonucleotide
gcagaggttagacaatgatccgatagcgaa

SEQ ID NO: 19628 - DNA, 30 bp, Artificial Sequence
  Synthetic oligonucleotide
taataaaggacacataaaaagtgcctcgaa

SEQ ID NO: 19629 - DNA, 30 bp, Artificial Sequence
  Synthetic oligonucleotide
caggacatctaccatggtcaaaggctcgaa

SEQ ID NO: 19630 - DNA, 30 bp, Artificial Sequence
  Synthetic oligonucleotide
gggaaattatccctacaacgaaatgtcgaa

SEQ ID NO: 19631 - DNA, 30 bp, Artificial Sequence
  Synthetic oligonucleotide
ccagttaaacaattggatcacgaattcgaa

SEQ ID NO: 19632 - DNA, 30 bp, Artificial Sequence
  Synthetic oligonucleotide
ccgaaatgaccgatagatttcgatgaggaa

SEQ ID NO: 19633 - DNA, 30 bp, Artificial Sequence
  Synthetic oligonucleotide
agcggcggcggacggcaagagcaccgggaa

SEQ ID NO: 19634 - DNA, 30 bp, Artificial Sequence
  Synthetic oligonucleotide
tcagagtaagccttggacgagatgcgggaa

SEQ ID NO: 19635 - DNA, 30 bp, Artificial Sequence
  Synthetic oligonucleotide
ggcgtgccgcgaggagagagcatcttggaa

SEQ ID NO: 19636 - DNA, 30 bp, Artificial Sequence
  Synthetic oligonucleotide
cagtcacaaggttacaacaggcgcactgaa

SEQ ID NO: 19637 - DNA, 30 bp, Artificial Sequence
  Synthetic oligonucleotide
aggcgaactccagccgggacatgtcctgaa

SEQ ID NO: 19638 - DNA, 30 bp, Artificial Sequence
  Synthetic oligonucleotide
ccaaggcactagaaaaacggcaaagaataa

SEQ ID NO: 19639 - DNA, 30 bp, Artificial Sequence
  Synthetic oligonucleotide
caagggaaatggaggggtagcgtgtaataa

SEQ ID NO: 19640 - DNA, 30 bp, Artificial Sequence
  Synthetic oligonucleotide
aggtcagcaggtaaagtgtccaggagataa

SEQ ID NO: 19641 - DNA, 30 bp, Artificial Sequence
  Synthetic oligonucleotide
gcaaaaaaggaggggcatcgaaggctataa

SEQ ID NO: 19642 - DNA, 30 bp, Artificial Sequence
  Synthetic oligonucleotide
acgtgtgcgtggacgtctgggcacgactaa

SEQ ID NO: 19643 - DNA, 30 bp, Artificial Sequence
  Synthetic oligonucleotide
cgagataaaggtcacaacatgagctcctaa

SEQ ID NO: 19644 - DNA, 30 bp, Artificial Sequence
  Synthetic oligonucleotide
cgggagtgttgcatgaattaaagtagctaa

SEQ ID NO: 19645 - DNA, 30 bp, Artificial Sequence
  Synthetic oligonucleotide
cctgaaaacgatagtggaatccatcagtaa

SEQ ID NO: 19646 - DNA, 30 bp, Artificial Sequence
  Synthetic oligonucleotide
agggacttgtgggttgcagaacttatgtaa

SEQ ID NO: 19647 - DNA, 30 bp, Artificial Sequence
  Synthetic oligonucleotide
acacgcagtgtggatagagtacggaattaa

SEQ ID NO: 19648 - DNA, 30 bp, Artificial Sequence
  Synthetic oligonucleotide
aaatccaaacagagagaccgtattgaaaca

SEQ ID NO: 19649 - DNA, 30 bp, Artificial Sequence
  Synthetic oligonucleotide
acgtaggcaagaggacatagcgtcacaaca

SEQ ID NO: 19650 - DNA, 30 bp, Artificial Sequence
  Synthetic oligonucleotide
agggtaggtgaacacgcaagaccatcaaca

SEQ ID NO: 19651 - DNA, 30 bp, Artificial Sequence
  Synthetic oligonucleotide
ccacgagtaaggatagcaccccagagaaca

SEQ ID NO: 19652 - DNA, 30 bp, Artificial Sequence
  Synthetic oligonucleotide
acgaaagtgtaagatcgtatggcaggaaca

SEQ ID NO: 19653 - DNA, 30 bp, Artificial Sequence
  Synthetic oligonucleotide
tggaaacaagggcgatcggaccgacacaca

SEQ ID NO: 19654 - DNA, 30 bp, Artificial Sequence
  Synthetic oligonucleotide
agcaacgaacagcaacatacgtcccacaca

SEQ ID NO: 19655 - DNA, 30 bp, Artificial Sequence
  Synthetic oligonucleotide
ggttgagctaagaggaatgacactcacaca

SEQ ID NO: 19656 - DNA, 30 bp, Artificial Sequence
  Synthetic oligonucleotide
actcgagggtaaacacagagttcaagcaca

SEQ ID NO: 19657 - DNA, 30 bp, Artificial Sequence
  Synthetic oligonucleotide
aatgaggtggggcaaaagagggtatgcaca

SEQ ID NO: 19658 - DNA, 30 bp, Artificial Sequence
  Synthetic oligonucleotide
accagacaggatggcaatgcgagagtcaca

SEQ ID NO: 19659 - DNA, 30 bp, Artificial Sequence
  Synthetic oligonucleotide
cgcctcatacggaagctccgagccaataca

SEQ ID NO: 19660 - DNA, 30 bp, Artificial Sequence
  Synthetic oligonucleotide
cgtggggagcccgtttagtatgccggtaca

SEQ ID NO: 19661 - DNA, 30 bp, Artificial Sequence
  Synthetic oligonucleotide
cggataggaaggctgatgataagcggtaca

SEQ ID NO: 19662 - DNA, 30 bp, Artificial Sequence
  Synthetic oligonucleotide
tacaggagaaccaacaaagacaaatgtaca

SEQ ID NO: 19663 - DNA, 30 bp, Artificial Sequence
  Synthetic oligonucleotide
taagagtacatcgaactagatccaccacca

SEQ ID NO: 19664 - DNA, 30 bp, Artificial Sequence
  Synthetic oligonucleotide
tttagaggacaacagcggacaacagcacca

SEQ ID NO: 19665 - DNA, 30 bp, Artificial Sequence
  Synthetic oligonucleotide
cactagcagatcatatcagcgtgccgacca

SEQ ID NO: 19666 - DNA, 30 bp, Artificial Sequence
  Synthetic oligonucleotide
ccgaagggaacaacgaggacgtctcgacca

SEQ ID NO: 19667 - DNA, 30 bp, Artificial Sequence
  Synthetic oligonucleotide
tcgcaagaaggacaagaccttactatacca

SEQ ID NO: 19668 - DNA, 30 bp, Artificial Sequence
  Synthetic oligonucleotide
taggcacaccaggatagagagaagacccca

SEQ ID NO: 19669 - DNA, 30 bp, Artificial Sequence
  Synthetic oligonucleotide
ggtgcgagggcaaagaatgcagggtcccca

SEQ ID NO: 19670 - DNA, 30 bp, Artificial Sequence
  Synthetic oligonucleotide
cgagcgagtagccacaatcaaaaaatccca

SEQ ID NO: 19671 - DNA, 30 bp, Artificial Sequence
  Synthetic oligonucleotide
gaagacgaatattaaggtaaactgcagcca

SEQ ID NO: 19672 - DNA, 30 bp, Artificial Sequence
  Synthetic oligonucleotide
ggacgtaactgaccggtcgtgtgcacgcca

SEQ ID NO: 19673 - DNA, 30 bp, Artificial Sequence
  Synthetic oligonucleotide
gagacaagagcgagtccatgaggggggcca

SEQ ID NO: 19674 - DNA, 31 bp, Artificial Sequence
  Synthetic oligonucleotide
tgagaaagtttacagagtacagactgggcca

SEQ ID NO: 19675 - DNA, 30 bp, Artificial Sequence
  Synthetic oligonucleotide
aaggtaagacaaagaggaatacagtggcca

SEQ ID NO: 19676 - DNA, 30 bp, Artificial Sequence
  Synthetic oligonucleotide
tgtaacccgaagccaagagtagatatgcca

SEQ ID NO: 19677 - DNA, 30 bp, Artificial Sequence
  Synthetic oligonucleotide
atagtagaggttaagcggaataccaaagca

SEQ ID NO: 19678 - DNA, 30 bp, Artificial Sequence
  Synthetic oligonucleotide
ggaaggagtactcatgataatgcgaaagca

SEQ ID NO: 19679 - DNA, 30 bp, Artificial Sequence
  Synthetic oligonucleotide
tcaacgaacagatatgttcaagtataagca

SEQ ID NO: 19680 - DNA, 30 bp, Artificial Sequence
  Synthetic oligonucleotide
gaggttcgggtagcaaattaacgagcagca

SEQ ID NO: 19681 - DNA, 29 bp, Artificial Sequence
  Synthetic oligonucleotide
gctacagtgcgacagcaaccatccgagca

SEQ ID NO: 19682 - DNA, 30 bp, Artificial Sequence
  Synthetic oligonucleotide
gcgaattcgaaaaatattcccaagcgagca

SEQ ID NO: 19683 - DNA, 30 bp, Artificial Sequence
  Synthetic oligonucleotide
cctgttaggacacaaagaaaaatcggagca

SEQ ID NO: 19684 - DNA, 30 bp, Artificial Sequence
  Synthetic oligonucleotide
agaacaagggttgtattgtgtaagtgagca

SEQ ID NO: 19685 - DNA, 30 bp, Artificial Sequence
  Synthetic oligonucleotide
caaggggaagtggcattacttcaattagca

SEQ ID NO: 19686 - DNA, 30 bp, Artificial Sequence
  Synthetic oligonucleotide
taaggaacaaataggcaccaattacccgca

SEQ ID NO: 19687 - DNA, 30 bp, Artificial Sequence
  Synthetic oligonucleotide
tagagcaagcaggatcaaattaaagtcgca

SEQ ID NO: 19688 - DNA, 30 bp, Artificial Sequence
  Synthetic oligonucleotide
caacagacgtgtacatagatgtaaaaggca

SEQ ID NO: 19689 - DNA, 30 bp, Artificial Sequence
  Synthetic oligonucleotide
atgcaaatggcgaactggctcaacaaggca

SEQ ID NO: 19690 - DNA, 30 bp, Artificial Sequence
  Synthetic oligonucleotide
tagaaacgagagattttcaactacaaggca

SEQ ID NO: 19691 - DNA, 30 bp, Artificial Sequence
  Synthetic oligonucleotide
cagcctcgcaaagaagggggccgcaaggca

SEQ ID NO: 19692 - DNA, 30 bp, Artificial Sequence
  Synthetic oligonucleotide
tctggggacataacgaccgaccagaaggca

SEQ ID NO: 19693 - DNA, 30 bp, Artificial Sequence
  Synthetic oligonucleotide
ggtggcggggacagcacataaagtgaggca

SEQ ID NO: 19694 - DNA, 30 bp, Artificial Sequence
  Synthetic oligonucleotide
cgaaagctctagatcgacagactgacggca

SEQ ID NO: 19695 - DNA, 31 bp, Artificial Sequence
  Synthetic oligonucleotide
tcgagtggtcgaagattcgaggttcatggca

SEQ ID NO: 19696 - DNA, 30 bp, Artificial Sequence
  Synthetic oligonucleotide
tcggaaccaagagtacgatggtcatctgca

SEQ ID NO: 19697 - DNA, 30 bp, Artificial Sequence
  Synthetic oligonucleotide
gggaagagtcaaagttagcgcatttctgca

SEQ ID NO: 19698 - DNA, 30 bp, Artificial Sequence
  Synthetic oligonucleotide
acaatagctgaaaagggcaggttacaatca

SEQ ID NO: 19699 - DNA, 30 bp, Artificial Sequence
  Synthetic oligonucleotide
gcttaggtgacagggtgtaagatagcatca

SEQ ID NO: 19700 - DNA, 30 bp, Artificial Sequence
  Synthetic oligonucleotide
gcgattaagggtggtgaacagctggcatca

SEQ ID NO: 19701 - DNA, 30 bp, Artificial Sequence
  Synthetic oligonucleotide
cgaggagggaccccgtcaaacaatagatca

SEQ ID NO: 19702 - DNA, 30 bp, Artificial Sequence
  Synthetic oligonucleotide
ggcgcatacagtcgacaacaagaacactca

SEQ ID NO: 19703 - DNA, 30 bp, Artificial Sequence
  Synthetic oligonucleotide
aacacgtaggcccaactacaatatcgctca

SEQ ID NO: 19704 - DNA, 30 bp, Artificial Sequence
  Synthetic oligonucleotide
aggcaacggaagcgactatctagtcagtca

SEQ ID NO: 19705 - DNA, 30 bp, Artificial Sequence
  Synthetic oligonucleotide
gtcaattgctagaggggagggcacaattca

SEQ ID NO: 19706 - DNA, 30 bp, Artificial Sequence
  Synthetic oligonucleotide
gcaacaagcacacgtcagagtccgcattca

SEQ ID NO: 19707 - DNA, 30 bp, Artificial Sequence
  Synthetic oligonucleotide
cacaacaaggatagttaacaggaagaaaga

SEQ ID NO: 19708 - DNA, 30 bp, Artificial Sequence
  Synthetic oligonucleotide
gagcacacgcaagaggatgactaagcaaga

SEQ ID NO: 19709 - DNA, 30 bp, Artificial Sequence
  Synthetic oligonucleotide
tcgaaagatcggtaagcacagcatgcaaga

SEQ ID NO: 19710 - DNA, 30 bp, Artificial Sequence
  Synthetic oligonucleotide
tacgatgctccaatgcgttaaggaagaaga

SEQ ID NO: 19711 - DNA, 30 bp, Artificial Sequence
  Synthetic oligonucleotide
tcgtaaattaggcttacaggctggggaaga

SEQ ID NO: 19712 - DNA, 30 bp, Artificial Sequence
  Synthetic oligonucleotide
agcaaccgagcacatcacctcctggtaaga

SEQ ID NO: 19713 - DNA, 30 bp, Artificial Sequence
  Synthetic oligonucleotide
ataagcgagggccagcagtgtctgttaaga

SEQ ID NO: 19714 - DNA, 30 bp, Artificial Sequence
  Synthetic oligonucleotide
gggctaagcagtgggaagtaggaagacaga

SEQ ID NO: 19715 - DNA, 30 bp, Artificial Sequence
  Synthetic oligonucleotide
tcattaagggggaagtagtgcgttaccaga

SEQ ID NO: 19716 - DNA, 30 bp, Artificial Sequence
  Synthetic oligonucleotide
gccgtagccagttaaagtggacaagccaga

SEQ ID NO: 19717 - DNA, 30 bp, Artificial Sequence
  Synthetic oligonucleotide
ttactaaccccacgcatactacaagccaga

SEQ ID NO: 19718 - DNA, 30 bp, Artificial Sequence
  Synthetic oligonucleotide
gtgggtaaagaaaaaagaaggtcctccaga

SEQ ID NO: 19719 - DNA, 30 bp, Artificial Sequence
  Synthetic oligonucleotide
ggaaggccgatgcatgtaaacatgtccaga

SEQ ID NO: 19720 - DNA, 30 bp, Artificial Sequence
  Synthetic oligonucleotide
gctgacacgtaaagtggggggcacatcaga

SEQ ID NO: 19721 - DNA, 30 bp, Artificial Sequence
  Synthetic oligonucleotide
cggcgatcgtggaaagaatcgaggctcaga

SEQ ID NO: 19722 - DNA, 30 bp, Artificial Sequence
  Synthetic oligonucleotide
agaagacatgagggtgtatggtccaagaga

SEQ ID NO: 19723 - DNA, 30 bp, Artificial Sequence
  Synthetic oligonucleotide
atcgtctcggaaggatcacaccgcaagaga

SEQ ID NO: 19724 - DNA, 30 bp, Artificial Sequence
  Synthetic oligonucleotide
tccgattaaacaacagattcgtcgaagaga

SEQ ID NO: 19725 - DNA, 30 bp, Artificial Sequence
  Synthetic oligonucleotide
ctgaaaacatccaggtgatatatgcagaga

SEQ ID NO: 19726 - DNA, 30 bp, Artificial Sequence
  Synthetic oligonucleotide
tcgcacagtgaacaatattagaaatagaga

SEQ ID NO: 19727 - DNA, 30 bp, Artificial Sequence
  Synthetic oligonucleotide
tcacagcggaacacgtggggtaagccgaga

SEQ ID NO: 19728 - DNA, 30 bp, Artificial Sequence
  Synthetic oligonucleotide
aggcaggaaatagaaatttcagacaggaga

SEQ ID NO: 19729 - DNA, 30 bp, Artificial Sequence
  Synthetic oligonucleotide
agacggtaggacaggattgtttccaggaga

SEQ ID NO: 19730 - DNA, 31 bp, Artificial Sequence
  Synthetic oligonucleotide
tcgagacttggatacagtcaagacgaggaga

SEQ ID NO: 19731 - DNA, 30 bp, Artificial Sequence
  Synthetic oligonucleotide
ggagtggatacgcgctcgatattgatgaga

SEQ ID NO: 19732 - DNA, 30 bp, Artificial Sequence
  Synthetic oligonucleotide
gaggagatcaatatgcgaggtacagataga

SEQ ID NO: 19733 - DNA, 30 bp, Artificial Sequence
  Synthetic oligonucleotide
tcgggaggataccagacggtgatagataga

SEQ ID NO: 19734 - DNA, 30 bp, Artificial Sequence
  Synthetic oligonucleotide
agcgcacgtatcggggagtaataggataga

SEQ ID NO: 19735 - DNA, 30 bp, Artificial Sequence
  Synthetic oligonucleotide
acgcaaacaccaggaatggaaaagtataga

SEQ ID NO: 19736 - DNA, 30 bp, Artificial Sequence
  Synthetic oligonucleotide
tgacgagagagacacattgtacatactaga

SEQ ID NO: 19737 - DNA, 30 bp, Artificial Sequence
  Synthetic oligonucleotide
acaggccagaacgtatcagacggacgtaga

SEQ ID NO: 19738 - DNA, 30 bp, Artificial Sequence
  Synthetic oligonucleotide
gctacgtgagaatagctcgggcaagaacga

SEQ ID NO: 19739 - DNA, 30 bp, Artificial Sequence
  Synthetic oligonucleotide
acggcatagaaacgggaggggtttcgacga

SEQ ID NO: 19740 - DNA, 30 bp, Artificial Sequence
  Synthetic oligonucleotide
aggagttggtcggaagcgtgagtgcaccga

SEQ ID NO: 19741 - DNA, 30 bp, Artificial Sequence
  Synthetic oligonucleotide
ttggtacgagagtaatacagtgcgccccga

SEQ ID NO: 19742 - DNA, 30 bp, Artificial Sequence
  Synthetic oligonucleotide
taacggaacaagagaacgtatgagctccga

SEQ ID NO: 19743 - DNA, 30 bp, Artificial Sequence
  Synthetic oligonucleotide
cgaaaggtaccgagtaataccgtgttccga

SEQ ID NO: 19744 - DNA, 30 bp, Artificial Sequence
  Synthetic oligonucleotide
tcggcgaggtacacgtcgtagggccagcga

SEQ ID NO: 19745 - DNA, 30 bp, Artificial Sequence
  Synthetic oligonucleotide
cgtgtaaggtcgagaattggtatcccgcga

SEQ ID NO: 19746 - DNA, 30 bp, Artificial Sequence
  Synthetic oligonucleotide
acagaggggaggacaagattgtaatcgcga

SEQ ID NO: 19747 - DNA, 30 bp, Artificial Sequence
  Synthetic oligonucleotide
ggtggcagaacacgagacctactttggcga

SEQ ID NO: 19748 - DNA, 30 bp, Artificial Sequence
  Synthetic oligonucleotide
cgcacagggtgcgggatttgagaaatgcga

SEQ ID NO: 19749 - DNA, 30 bp, Artificial Sequence
  Synthetic oligonucleotide
cagggggatacaagttaaatcaagtgtcga

SEQ ID NO: 19750 - DNA, 30 bp, Artificial Sequence
  Synthetic oligonucleotide
agacgtgggaaagatatatatgagtgtcga

SEQ ID NO: 19751 - DNA, 30 bp, Artificial Sequence
  Synthetic oligonucleotide
actcaatccgaaatactccattcgtgtcga

SEQ ID NO: 19752 - DNA, 30 bp, Artificial Sequence
  Synthetic oligonucleotide
aaatgaaggcagattgccgtaagcgttcga

SEQ ID NO: 19753 - DNA, 30 bp, Artificial Sequence
  Synthetic oligonucleotide
gccgtgaactgagccggataaacacaagga

SEQ ID NO: 19754 - DNA, 30 bp, Artificial Sequence
  Synthetic oligonucleotide
ggaagaagggtaagtgtagagttagaagga

SEQ ID NO: 19755 - DNA, 30 bp, Artificial Sequence
  Synthetic oligonucleotide
tcgataccaccctggtaacatatggaagga

SEQ ID NO: 19756 - DNA, 30 bp, Artificial Sequence
  Synthetic oligonucleotide
tcacgaccaggcgcgaaagtaatttaagga

SEQ ID NO: 19757 - DNA, 30 bp, Artificial Sequence
  Synthetic oligonucleotide
aagtggacttggactcgacgagagagagga

SEQ ID NO: 19758 - DNA, 30 bp, Artificial Sequence
  Synthetic oligonucleotide
tagagagttacaaacggttacctgagagga

SEQ ID NO: 19759 - DNA, 30 bp, Artificial Sequence
  Synthetic oligonucleotide
accgcagaaaaaacataaaagacaatagga

SEQ ID NO: 19760 - DNA, 30 bp, Artificial Sequence
  Synthetic oligonucleotide
acggataaacaacctacagcgaggctagga

SEQ ID NO: 19761 - DNA, 30 bp, Artificial Sequence
  Synthetic oligonucleotide
cggtgagaacctacgaccgaatctgtagga

SEQ ID NO: 19762 - DNA, 30 bp, Artificial Sequence
  Synthetic oligonucleotide
cgagctgctagatgaactttaacctccgga

SEQ ID NO: 19763 - DNA, 30 bp, Artificial Sequence
  Synthetic oligonucleotide
cgctagggagaagtcatatagtccagcgga

SEQ ID NO: 19764 - DNA, 30 bp, Artificial Sequence
  Synthetic oligonucleotide
tctaggggaaaagtaacggaagtgatcgga

SEQ ID NO: 19765 - DNA, 30 bp, Artificial Sequence
  Synthetic oligonucleotide
taccgagtaatccgaccaatcagacaggga

SEQ ID NO: 19766 - DNA, 30 bp, Artificial Sequence
  Synthetic oligonucleotide
aggaggtgtacactgatcattacctcggga

SEQ ID NO: 19767 - DNA, 30 bp, Artificial Sequence
  Synthetic oligonucleotide
cctagaccaaaggtgcaatgagtccgggga

SEQ ID NO: 19768 - DNA, 40 bp, Artificial Sequence
  Synthetic oligonucleotide
aagataatacattcatggtatggtcgggaatcggggggga

SEQ ID NO: 19769 - DNA, 39 bp, Artificial Sequence
  Synthetic oligonucleotide
aagataatacattcatggtatgtcggggatcggggggga

SEQ ID NO: 19770 - DNA, 30 bp, Artificial Sequence
  Synthetic oligonucleotide
accagggccgaagtcgcagaacaacgtgga

SEQ ID NO: 19771 - DNA, 30 bp, Artificial Sequence
  Synthetic oligonucleotide
gtcgagcaagaacagggggatgtgtaatga

SEQ ID NO: 19772 - DNA, 30 bp, Artificial Sequence
  Synthetic oligonucleotide
caaggaatcgggaagaatagtatatcatga

SEQ ID NO: 19773 - DNA, 30 bp, Artificial Sequence
  Synthetic oligonucleotide
gccccgggaatggacaaaagggtaagatga

SEQ ID NO: 19774 - DNA, 30 bp, Artificial Sequence
  Synthetic oligonucleotide
aaggctaagattagcatggctcgcgtctga

SEQ ID NO: 19775 - DNA, 30 bp, Artificial Sequence
  Synthetic oligonucleotide
aactagcgggacggattgaaaggaaagtga

SEQ ID NO: 19776 - DNA, 30 bp, Artificial Sequence
  Synthetic oligonucleotide
caaccgcagaaagcgtgagcacgtcagtga

SEQ ID NO: 19777 - DNA, 30 bp, Artificial Sequence
  Synthetic oligonucleotide
gctacgaaacaaaagaaaatctacgagtga

SEQ ID NO: 19778 - DNA, 30 bp, Artificial Sequence
  Synthetic oligonucleotide
cagaggaggggtcttgacaatgaatagtga

SEQ ID NO: 19779 - DNA, 30 bp, Artificial Sequence
  Synthetic oligonucleotide
gtaagggaggcaaagctgacagattagtga

SEQ ID NO: 19780 - DNA, 30 bp, Artificial Sequence
  Synthetic oligonucleotide
tcggcagtgtgcgtagacggtacaacgtga

SEQ ID NO: 19781 - DNA, 30 bp, Artificial Sequence
  Synthetic oligonucleotide
cctaagacttcaccaaacgggaaaaggtga

SEQ ID NO: 19782 - DNA, 30 bp, Artificial Sequence
  Synthetic oligonucleotide
tcggatacgggagtgtaataagttcggtga

SEQ ID NO: 19783 - DNA, 30 bp, Artificial Sequence
  Synthetic oligonucleotide
cgagcccgcggaatatctgggataggttga

SEQ ID NO: 19784 - DNA, 30 bp, Artificial Sequence
  Synthetic oligonucleotide
cacaagatttgatgggagtggtaagaaata

SEQ ID NO: 19785 - DNA, 30 bp, Artificial Sequence
  Synthetic oligonucleotide
cggtagaggacgtgaacattccctggaata

SEQ ID NO: 19786 - DNA, 30 bp, Artificial Sequence
  Synthetic oligonucleotide
aagagcagtgacgagttaacggacatcata

SEQ ID NO: 19787 - DNA, 30 bp, Artificial Sequence
  Synthetic oligonucleotide
acaagcgtaaaaggtggtactcacgagata

SEQ ID NO: 19788 - DNA, 30 bp, Artificial Sequence
  Synthetic oligonucleotide
gggcaaaaagtaaagagacctacggagata

SEQ ID NO: 19789 - DNA, 30 bp, Artificial Sequence
  Synthetic oligonucleotide
taggcggatcgactaagagaagtctggata

SEQ ID NO: 19790 - DNA, 30 bp, Artificial Sequence
  Synthetic oligonucleotide
ccggtaaactagacctgaaaccataatata

SEQ ID NO: 19791 - DNA, 31 bp, Artificial Sequence
  Synthetic oligonucleotide
ggagacattacgaaggttacagcacgatata

SEQ ID NO: 19792 - DNA, 30 bp, Artificial Sequence
  Synthetic oligonucleotide
caaatacaagtgaagcaacgaagtcctata

SEQ ID NO: 19793 - DNA, 30 bp, Artificial Sequence
  Synthetic oligonucleotide
tcgcaatcagaacagatcaagtaggctata

SEQ ID NO: 19794 - DNA, 30 bp, Artificial Sequence
  Synthetic oligonucleotide
cacatcatagagaccggggtgaggggtata

SEQ ID NO: 19795 - DNA, 30 bp, Artificial Sequence
  Synthetic oligonucleotide
ggcacggctgcctacaaacagcaggaacta

SEQ ID NO: 19796 - DNA, 30 bp, Artificial Sequence
  Synthetic oligonucleotide
gcatcatgcaggatgggagggacagcacta

SEQ ID NO: 19797 - DNA, 30 bp, Artificial Sequence
  Synthetic oligonucleotide
gaggtaaccgacgagagatccccagtacta

SEQ ID NO: 19798 - DNA, 30 bp, Artificial Sequence
  Synthetic oligonucleotide
cgaaacgacatgaacatacgatgtacccta

SEQ ID NO: 19799 - DNA, 30 bp, Artificial Sequence
  Synthetic oligonucleotide
aggttgtgaggagtgggaaatagcgcccta

SEQ ID NO: 19800 - DNA, 30 bp, Artificial Sequence
  Synthetic oligonucleotide
ctacgactgaggaattaccaggaaccgcta

SEQ ID NO: 19801 - DNA, 30 bp, Artificial Sequence
  Synthetic oligonucleotide
taccggagtacagaggatagcatgaggcta

SEQ ID NO: 19802 - DNA, 30 bp, Artificial Sequence
  Synthetic oligonucleotide
acgggggtaagctcatacgagtctaaagta

SEQ ID NO: 19803 - DNA, 30 bp, Artificial Sequence
  Synthetic oligonucleotide
tcgaaggaggactccgcgtattgataagta

SEQ ID NO: 19804 - DNA, 30 bp, Artificial Sequence
  Synthetic oligonucleotide
aggaataatggatacgttagtacgacagta

SEQ ID NO: 19805 - DNA, 30 bp, Artificial Sequence
  Synthetic oligonucleotide
cgtcgcggtgaggcaaagatcttaagagta

SEQ ID NO: 19806 - DNA, 30 bp, Artificial Sequence
  Synthetic oligonucleotide
tgcgccgtaacgtccaaaagttagcgagta

SEQ ID NO: 19807 - DNA, 30 bp, Artificial Sequence
  Synthetic oligonucleotide
acaaccaaaggtcagagaaatccgctagta

SEQ ID NO: 19808 - DNA, 30 bp, Artificial Sequence
  Synthetic oligonucleotide
acgtgtagtatctcggacaattaattagta

SEQ ID NO: 19809 - DNA, 30 bp, Artificial Sequence
  Synthetic oligonucleotide
gtacgtaatagtggtaagtagctctgcgta

SEQ ID NO: 19810 - DNA, 30 bp, Artificial Sequence
  Synthetic oligonucleotide
cgtgacatggtagacgtctcagtgttcgta

SEQ ID NO: 19811 - DNA, 30 bp, Artificial Sequence
  Synthetic oligonucleotide
tccagggaaaccgtcaacgaacatatggta

SEQ ID NO: 19812 - DNA, 30 bp, Artificial Sequence
  Synthetic oligonucleotide
cggaagggtgcctgcaaaaaagatatggta

SEQ ID NO: 19813 - DNA, 30 bp, Artificial Sequence
  Synthetic oligonucleotide
cgttgagatcaagaggtgggcaaaaatgta

SEQ ID NO: 19814 - DNA, 30 bp, Artificial Sequence
  Synthetic oligonucleotide
acgaaaggttataaagattgaggaattgta

SEQ ID NO: 19815 - DNA, 30 bp, Artificial Sequence
  Synthetic oligonucleotide
caaagctcagggcgaggagagtggtttgta

SEQ ID NO: 19816 - DNA, 30 bp, Artificial Sequence
  Synthetic oligonucleotide
cactgctcggataaacacaagacagaatta

SEQ ID NO: 19817 - DNA, 30 bp, Artificial Sequence
  Synthetic oligonucleotide
agtcacgagaggcgaggacatccgacatta

SEQ ID NO: 19818 - DNA, 30 bp, Artificial Sequence
  Synthetic oligonucleotide
ggaaaaaacacatacggtggaagggactta

SEQ ID NO: 19819 - DNA, 30 bp, Artificial Sequence
  Synthetic oligonucleotide
agcatgtatgcacaaaacacctacagctta

SEQ ID NO: 19820 - DNA, 30 bp, Artificial Sequence
  Synthetic oligonucleotide
cggtgaaacggcgaaataggcccgatttta

SEQ ID NO: 19821 - DNA, 30 bp, Artificial Sequence
  Synthetic oligonucleotide
cgatactgcttaaggacaccacagacaaac

SEQ ID NO: 19822 - DNA, 30 bp, Artificial Sequence
  Synthetic oligonucleotide
ggaaacctaacaaggtgcacgtgaccaaac

SEQ ID NO: 19823 - DNA, 30 bp, Artificial Sequence
  Synthetic oligonucleotide
caggaagcggcgtaaacaacgcgcagaaac

SEQ ID NO: 19824 - DNA, 30 bp, Artificial Sequence
  Synthetic oligonucleotide
atgatagtggtggtagacaagagtggaaac

SEQ ID NO: 19825 - DNA, 30 bp, Artificial Sequence
  Synthetic oligonucleotide
caaacgtaagggtgggaagaacttataaac

SEQ ID NO: 19826 - DNA, 30 bp, Artificial Sequence
  Synthetic oligonucleotide
gactacaccaaacaagaactgaatctaaac

SEQ ID NO: 19827 - DNA, 30 bp, Artificial Sequence
  Synthetic oligonucleotide
agccagagcgcgggggcacacgtccacaac

SEQ ID NO: 19828 - DNA, 31 bp, Artificial Sequence
  Synthetic oligonucleotide
tggctcggaagagtaaagccagtcatacaac

SEQ ID NO: 19829 - DNA, 30 bp, Artificial Sequence
  Synthetic oligonucleotide
gggctaaagagcgagtttgcagagaccaac

SEQ ID NO: 19830 - DNA, 30 bp, Artificial Sequence
  Synthetic oligonucleotide
tcagaatccaccagcgaggcgaatatcaac

SEQ ID NO: 19831 - DNA, 30 bp, Artificial Sequence
  Synthetic oligonucleotide
cagagggcgccaaagcgctatgatcagaac

SEQ ID NO: 19832 - DNA, 30 bp, Artificial Sequence
  Synthetic oligonucleotide
gggtatgacaggagagagtcagccgggaac

SEQ ID NO: 19833 - DNA, 30 bp, Artificial Sequence
  Synthetic oligonucleotide
gggagatagacaccccgacttggagataac

SEQ ID NO: 19834 - DNA, 30 bp, Artificial Sequence
  Synthetic oligonucleotide
ggggaacgtcgaactgaggggaggtgtaac

SEQ ID NO: 19835 - DNA, 30 bp, Artificial Sequence
  Synthetic oligonucleotide
tgatatcctagggagaacggattaacacac

SEQ ID NO: 19836 - DNA, 30 bp, Artificial Sequence
  Synthetic oligonucleotide
aaatgaactaaaaaaaatagaagtagacac

SEQ ID NO: 19837 - DNA, 30 bp, Artificial Sequence
  Synthetic oligonucleotide
agaatagcgaatgcctttgtgtaaagccac

SEQ ID NO: 19838 - DNA, 30 bp, Artificial Sequence
  Synthetic oligonucleotide
tatcgaaaccaaaggaaccacctaccgcac

SEQ ID NO: 19839 - DNA, 30 bp, Artificial Sequence
  Synthetic oligonucleotide
acgatccatcattatacccataagcggcac

SEQ ID NO: 19840 - DNA, 30 bp, Artificial Sequence
  Synthetic oligonucleotide
catacctaagatacccaaaagaaggtgcac

SEQ ID NO: 19841 - DNA, 30 bp, Artificial Sequence
  Synthetic oligonucleotide
caaatgcgcctaaggggaggtacaaatcac

SEQ ID NO: 19842 - DNA, 34 bp, Artificial Sequence
  Synthetic oligonucleotide
gatactagaccacaacgtgtccatcagaaaagac

SEQ ID NO: 19843 - DNA, 30 bp, Artificial Sequence
  Synthetic oligonucleotide
gcgtgcgctaaaaggaaaagttgtcaagac

SEQ ID NO: 19844 - DNA, 30 bp, Artificial Sequence
  Synthetic oligonucleotide
gtgcatcagagtgcaatatagctctaagac

SEQ ID NO: 19845 - DNA, 30 bp, Artificial Sequence
  Synthetic oligonucleotide
cggtagaacaactaactcattgtctcagac

SEQ ID NO: 19846 - DNA, 30 bp, Artificial Sequence
  Synthetic oligonucleotide
aggttaggatagtgcgcaagtgagtgagac

SEQ ID NO: 19847 - DNA, 30 bp, Artificial Sequence
  Synthetic oligonucleotide
gtaagtgctgggcgggcacacaattccgac

SEQ ID NO: 19848 - DNA, 30 bp, Artificial Sequence
  Synthetic oligonucleotide
acaactagggaaatcataggagaggaggac

SEQ ID NO: 19849 - DNA, 30 bp, Artificial Sequence
  Synthetic oligonucleotide
ccgtgtgctcagacctgggtggggagggac

SEQ ID NO: 19850 - DNA, 30 bp, Artificial Sequence
  Synthetic oligonucleotide
actgcaaggaggcgtaagtgacagcttgac

SEQ ID NO: 19851 - DNA, 30 bp, Artificial Sequence
  Synthetic oligonucleotide
acgtgggagagagatcgtcgtgcagcatac

SEQ ID NO: 19852 - DNA, 30 bp, Artificial Sequence
  Synthetic oligonucleotide
acgagtgccagcgcgtggatgagctcctac

SEQ ID NO: 19853 - DNA, 30 bp, Artificial Sequence
  Synthetic oligonucleotide
cgacaataccggttaatgaaggataagtac

SEQ ID NO: 19854 - DNA, 30 bp, Artificial Sequence
  Synthetic oligonucleotide
cgaagtcagatgaatctaggcatatagtac

SEQ ID NO: 19855 - DNA, 30 bp, Artificial Sequence
  Synthetic oligonucleotide
actcacccagacagaggggccgggtagtac

SEQ ID NO: 19856 - DNA, 30 bp, Artificial Sequence
  Synthetic oligonucleotide
tcgtacatgggcacatgggacggttagtac

SEQ ID NO: 19857 - DNA, 30 bp, Artificial Sequence
  Synthetic oligonucleotide
tctggggacgaactcgagtagcgagcttac

SEQ ID NO: 19858 - DNA, 30 bp, Artificial Sequence
  Synthetic oligonucleotide
acgcggggtccgtagagcaccgatcaaacc

SEQ ID NO: 19859 - DNA, 30 bp, Artificial Sequence
  Synthetic oligonucleotide
taatcgacagggcggagaaacgcgagaacc

SEQ ID NO: 19860 - DNA, 30 bp, Artificial Sequence
  Synthetic oligonucleotide
tagaacgactctgagtgatccatagcgacc

SEQ ID NO: 19861 - DNA, 30 bp, Artificial Sequence
  Synthetic oligonucleotide
cgagaacctaatgagtaattccagtctacc

SEQ ID NO: 19862 - DNA, 30 bp, Artificial Sequence
  Synthetic oligonucleotide
cgcgaacaaccaatcgggaaagagagtacc

SEQ ID NO: 19863 - DNA, 30 bp, Artificial Sequence
  Synthetic oligonucleotide
tcatccgtagaaaactaaatacaaggtacc

SEQ ID NO: 19864 - DNA, 30 bp, Artificial Sequence
  Synthetic oligonucleotide
atgagctgaaaacctaggaggggaaggccc

SEQ ID NO: 19865 - DNA, 30 bp, Artificial Sequence
  Synthetic oligonucleotide
aaggaatacgtgagggtgtcgatgatagcc

SEQ ID NO: 19866 - DNA, 30 bp, Artificial Sequence
  Synthetic oligonucleotide
ggggtaagggaataagataagcacagggcc

SEQ ID NO: 19867 - DNA, 30 bp, Artificial Sequence
  Synthetic oligonucleotide
aaagggcgtgacatgaatgtgagagcttcc

SEQ ID NO: 19868 - DNA, 30 bp, Artificial Sequence
  Synthetic oligonucleotide
ggagaactagggatgctcgtcaagcaaagc

SEQ ID NO: 19869 - DNA, 30 bp, Artificial Sequence
  Synthetic oligonucleotide
cctacgtctaaggcagggtgccgtcaaagc

SEQ ID NO: 19870 - DNA, 30 bp, Artificial Sequence
  Synthetic oligonucleotide
atccacagtagaaatcgggtcaaaacgagc

SEQ ID NO: 19871 - DNA, 30 bp, Artificial Sequence
  Synthetic oligonucleotide
acagcagtaaagtcgacatcagccacgagc

SEQ ID NO: 19872 - DNA, 30 bp, Artificial Sequence
  Synthetic oligonucleotide
ttccataactaagtaaactacgaaaggagc

SEQ ID NO: 19873 - DNA, 30 bp, Artificial Sequence
  Synthetic oligonucleotide
ctccatccccccgagaacacgagattgagc

SEQ ID NO: 19874 - DNA, 30 bp, Artificial Sequence
  Synthetic oligonucleotide
cactatgcgcaaggatacgatgaagatagc

SEQ ID NO: 19875 - DNA, 30 bp, Artificial Sequence
  Synthetic oligonucleotide
gatgagcttaagggcggggagttaagtagc

SEQ ID NO: 19876 - DNA, 30 bp, Artificial Sequence
  Synthetic oligonucleotide
caagaagacaatcgcaaagaattccgtagc

SEQ ID NO: 19877 - DNA, 30 bp, Artificial Sequence
  Synthetic oligonucleotide
atgggcaagtctaagtaatgggggcgtagc

SEQ ID NO: 19878 - DNA, 30 bp, Artificial Sequence
  Synthetic oligonucleotide
ccggggtgcgacgaacccacagagtttagc

SEQ ID NO: 19879 - DNA, 30 bp, Artificial Sequence
  Synthetic oligonucleotide
gtcaaatcggaggaggaggcgagtacacgc

SEQ ID NO: 19880 - DNA, 30 bp, Artificial Sequence
  Synthetic oligonucleotide
caagcaggacatagggattccacaccacgc

SEQ ID NO: 19881 - DNA, 30 bp, Artificial Sequence
  Synthetic oligonucleotide
gttccaacgcaacgatgacagaaagaccgc

SEQ ID NO: 19882 - DNA, 31 bp, Artificial Sequence
  Synthetic oligonucleotide
cagcatgaaggcaaaataaagtatgtaccgc

SEQ ID NO: 19883 - DNA, 30 bp, Artificial Sequence
  Synthetic oligonucleotide
agccaatgagtgaatgttcaagcgacccgc

SEQ ID NO: 19884 - DNA, 30 bp, Artificial Sequence
  Synthetic oligonucleotide
aggcatgcataatgagtatcggaaccccgc

SEQ ID NO: 19885 - DNA, 30 bp, Artificial Sequence
  Synthetic oligonucleotide
tagggcaacaagaggatcgtagcttagcgc

SEQ ID NO: 19886 - DNA, 30 bp, Artificial Sequence
  Synthetic oligonucleotide
cggcccaaaacaccagcgaacgacgggcgc

SEQ ID NO: 19887 - DNA, 30 bp, Artificial Sequence
  Synthetic oligonucleotide
cacgataatcatcaggacaaggcaatgcgc

SEQ ID NO: 19888 - DNA, 30 bp, Artificial Sequence
  Synthetic oligonucleotide
caaaaaaggcgacggtataatatagatcgc

SEQ ID NO: 19889 - DNA, 30 bp, Artificial Sequence
  Synthetic oligonucleotide
acaaaccgaacctaaactacaattactcgc

SEQ ID NO: 19890 - DNA, 30 bp, Artificial Sequence
  Synthetic oligonucleotide
caaggggctcgaggttgccggaacattcgc

SEQ ID NO: 19891 - DNA, 30 bp, Artificial Sequence
  Synthetic oligonucleotide
acaagagagtgatagaaagtcatgtcaggc

SEQ ID NO: 19892 - DNA, 30 bp, Artificial Sequence
  Synthetic oligonucleotide
actcggaagcactaaatcagttagctcggc

SEQ ID NO: 19893 - DNA, 30 bp, Artificial Sequence
  Synthetic oligonucleotide
tcggagataagttgcaaattaacagtcggc

SEQ ID NO: 19894 - DNA, 30 bp, Artificial Sequence
  Synthetic oligonucleotide
tgctaatgagttaggaaacggatgacgggc

SEQ ID NO: 19895 - DNA, 30 bp, Artificial Sequence
  Synthetic oligonucleotide
cgaggtccaattctcgagatcaaggtatgc

SEQ ID NO: 19896 - DNA, 30 bp, Artificial Sequence
  Synthetic oligonucleotide
ataggaaaaaacgaatctggacaaacctgc

SEQ ID NO: 19897 - DNA, 30 bp, Artificial Sequence
  Synthetic oligonucleotide
aaggaaatcacagtaaacaggtggcgctgc

SEQ ID NO: 19898 - DNA, 30 bp, Artificial Sequence
  Synthetic oligonucleotide
cggaaggaaacatgacacggcacacagtgc

SEQ ID NO: 19899 - DNA, 31 bp, Artificial Sequence
  Synthetic oligonucleotide
atgccggggaatgtcagataagtaaccgtgc

SEQ ID NO: 19900 - DNA, 30 bp, Artificial Sequence
  Synthetic oligonucleotide
aaaccgagtaactaaataacgtagctgtgc

SEQ ID NO: 19901 - DNA, 30 bp, Artificial Sequence
  Synthetic oligonucleotide
cgagcagaggggactagtccgcgaggttgc

SEQ ID NO: 19902 - DNA, 30 bp, Artificial Sequence
  Synthetic oligonucleotide
ccacaaccgaggcaataatgtcggtaaatc

SEQ ID NO: 19903 - DNA, 30 bp, Artificial Sequence
  Synthetic oligonucleotide
gaagggtaatagataaacaccgatacaatc

SEQ ID NO: 19904 - DNA, 30 bp, Artificial Sequence
  Synthetic oligonucleotide
aggcatggctcaaatatagagcaatacatc

SEQ ID NO: 19905 - DNA, 30 bp, Artificial Sequence
  Synthetic oligonucleotide
gagacaggggaaagaagtgtacggtacatc

SEQ ID NO: 19906 - DNA, 30 bp, Artificial Sequence
  Synthetic oligonucleotide
gcacaactggaacattaagagggatggatc

SEQ ID NO: 19907 - DNA, 30 bp, Artificial Sequence
  Synthetic oligonucleotide
tggagtgcaataaggtgaccgatgaatatc

SEQ ID NO: 19908 - DNA, 30 bp, Artificial Sequence
  Synthetic oligonucleotide
acgatagggtgaccataagaaagctagctc

SEQ ID NO: 19909 - DNA, 30 bp, Artificial Sequence
  Synthetic oligonucleotide
acgaaggggttccaaaagaatttagtgctc

SEQ ID NO: 19910 - DNA, 30 bp, Artificial Sequence
  Synthetic oligonucleotide
cggtcgatatagaaaaactgactacatctc

SEQ ID NO: 19911 - DNA, 30 bp, Artificial Sequence
  Synthetic oligonucleotide
ccgacatggtgacgtcaattgggtgcagtc

SEQ ID NO: 19912 - DNA, 30 bp, Artificial Sequence
  Synthetic oligonucleotide
ctagagggcaatttgatagtaaaaggagtc

SEQ ID NO: 19913 - DNA, 30 bp, Artificial Sequence
  Synthetic oligonucleotide
actgaaagaactaaatgccacagcctagtc

SEQ ID NO: 19914 - DNA, 30 bp, Artificial Sequence
  Synthetic oligonucleotide
gaaggccacagtatctgacgagggaccgtc

SEQ ID NO: 19915 - DNA, 30 bp, Artificial Sequence
  Synthetic oligonucleotide
cgaggatctgtaagggcgtcgattcatgtc

SEQ ID NO: 19916 - DNA, 30 bp, Artificial Sequence
  Synthetic oligonucleotide
aaggaggcaaagtgcgatagctccagtgtc

SEQ ID NO: 19917 - DNA, 30 bp, Artificial Sequence
  Synthetic oligonucleotide
acgtgggtgcacaagctgcgagagagtgtc

SEQ ID NO: 19918 - DNA, 30 bp, Artificial Sequence
  Synthetic oligonucleotide
atgaatgagacatgatgtgggagcgcattc

SEQ ID NO: 19919 - DNA, 30 bp, Artificial Sequence
  Synthetic oligonucleotide
tgggcggagggtggcggaataatggcgttc

SEQ ID NO: 19920 - DNA, 30 bp, Artificial Sequence
  Synthetic oligonucleotide
gtgagaaacccccgaacaaatgtccaaaag

SEQ ID NO: 19921 - DNA, 30 bp, Artificial Sequence
  Synthetic oligonucleotide
ctgttaaccagcagtgcgtgcggagaaaag

SEQ ID NO: 19922 - DNA, 30 bp, Artificial Sequence
  Synthetic oligonucleotide
tgcactactactacaaaaactcgcgaaaag

SEQ ID NO: 19923 - DNA, 30 bp, Artificial Sequence
  Synthetic oligonucleotide
ccactacgaaagccggtacatcaataaaag

SEQ ID NO: 19924 - DNA, 30 bp, Artificial Sequence
  Synthetic oligonucleotide
attacgaggataacgatagaatccacaaag

SEQ ID NO: 19925 - DNA, 30 bp, Artificial Sequence
  Synthetic oligonucleotide
gcttagtatacgacatggagtagatcaaag

SEQ ID NO: 19926 - DNA, 30 bp, Artificial Sequence
  Synthetic oligonucleotide
taagcatggacgagttagaaatgctcaaag

SEQ ID NO: 19927 - DNA, 30 bp, Artificial Sequence
  Synthetic oligonucleotide
gacaaggagtaaaactaggtcacacgaaag

SEQ ID NO: 19928 - DNA, 30 bp, Artificial Sequence
  Synthetic oligonucleotide
gaacggcaacttgttatctacaagggaaag

SEQ ID NO: 19929 - DNA, 30 bp, Artificial Sequence
  Synthetic oligonucleotide
aggaggaacatgaaaaggatgcagggaaag

SEQ ID NO: 19930 - DNA, 30 bp, Artificial Sequence
  Synthetic oligonucleotide
tggccgtgaattcagtcggtcgagggaaag

SEQ ID NO: 19931 - DNA, 30 bp, Artificial Sequence
  Synthetic oligonucleotide
ggaggttcatcaaagtcggcaggaataaag

SEQ ID NO: 19932 - DNA, 30 bp, Artificial Sequence
  Synthetic oligonucleotide
acacagaaaaatagaaaacaatgtgtaaag

SEQ ID NO: 19933 - DNA, 30 bp, Artificial Sequence
  Synthetic oligonucleotide
tgcctgcactaacaaagaatcggcgacaag

SEQ ID NO: 19934 - DNA, 30 bp, Artificial Sequence
  Synthetic oligonucleotide
ggacggaggaggcactgctggccatacaag

SEQ ID NO: 19935 - DNA, 30 bp, Artificial Sequence
  Synthetic oligonucleotide
ctgcgaagcgtagtatgcgagattcccaag

SEQ ID NO: 19936 - DNA, 30 bp, Artificial Sequence
  Synthetic oligonucleotide
tgtacaacgtaaaaaactcgcggggccaag

SEQ ID NO: 19937 - DNA, 30 bp, Artificial Sequence
  Synthetic oligonucleotide
cgacaacgtatagctcgtggtaacagcaag

SEQ ID NO: 19938 - DNA, 30 bp, Artificial Sequence
  Synthetic oligonucleotide
caaagcggttaatgccgtagaaattgcaag

SEQ ID NO: 19939 - DNA, 30 bp, Artificial Sequence
  Synthetic oligonucleotide
cgttgagggatggtaactcgtcattgcaag

SEQ ID NO: 19940 - DNA, 30 bp, Artificial Sequence
  Synthetic oligonucleotide
tacgacaacaggatgcatgaccgtatcaag

SEQ ID NO: 19941 - DNA, 30 bp, Artificial Sequence
  Synthetic oligonucleotide
cgtgagcgaaatttatccagctaactcaag

SEQ ID NO: 19942 - DNA, 30 bp, Artificial Sequence
  Synthetic oligonucleotide
atgcgaaggcttacgatcggacaagtcaag

SEQ ID NO: 19943 - DNA, 30 bp, Artificial Sequence
  Synthetic oligonucleotide
aagtgcaggtggagaagggaaatacagaag

SEQ ID NO: 19944 - DNA, 30 bp, Artificial Sequence
  Synthetic oligonucleotide
ccggcgaaaggctcatatgcaaagcagaag

SEQ ID NO: 19945 - DNA, 30 bp, Artificial Sequence
  Synthetic oligonucleotide
gagagcggggcaatagcctaagtgcagaag

SEQ ID NO: 19946 - DNA, 30 bp, Artificial Sequence
  Synthetic oligonucleotide
gcggtctgagcagataacttgggatagaag

SEQ ID NO: 19947 - DNA, 30 bp, Artificial Sequence
  Synthetic oligonucleotide
aagatgcagaatgataactgcagcccgaag

SEQ ID NO: 19948 - DNA, 30 bp, Artificial Sequence
  Synthetic oligonucleotide
cgataccacattgcgccatggatggggaag

SEQ ID NO: 19949 - DNA, 30 bp, Artificial Sequence
  Synthetic oligonucleotide
acggcgtacgaacatgtctgtggaatgaag

SEQ ID NO: 19950 - DNA, 30 bp, Artificial Sequence
  Synthetic oligonucleotide
cgtatccgaagttcgggggcgaggctgaag

SEQ ID NO: 19951 - DNA, 30 bp, Artificial Sequence
  Synthetic oligonucleotide
cgaaatcaaagcgaaaagcataagttgaag

SEQ ID NO: 19952 - DNA, 30 bp, Artificial Sequence
  Synthetic oligonucleotide
gcggtaacttagcgggaaagagtgcataag

SEQ ID NO: 19953 - DNA, 30 bp, Artificial Sequence
  Synthetic oligonucleotide
cagttaggtaagacacagggacaggataag

SEQ ID NO: 19954 - DNA, 30 bp, Artificial Sequence
  Synthetic oligonucleotide
tgggctaagaagcgacctgcggaaagtaag

SEQ ID NO: 19955 - DNA, 30 bp, Artificial Sequence
  Synthetic oligonucleotide
ggcaaagtcgggggcgcgaacaggtgtaag

SEQ ID NO: 19956 - DNA, 30 bp, Artificial Sequence
  Synthetic oligonucleotide
tacatcagacaagggaagaacccgtcacag

SEQ ID NO: 19957 - DNA, 30 bp, Artificial Sequence
  Synthetic oligonucleotide
agataggggcgaacgtgtgagagacgacag

SEQ ID NO: 19958 - DNA, 30 bp, Artificial Sequence
  Synthetic oligonucleotide
agcttcgaacattcaaactatccaaaccag

SEQ ID NO: 19959 - DNA, 31 bp, Artificial Sequence
  Synthetic oligonucleotide
cgcggggaaggtaattctgcttcagaaccag

SEQ ID NO: 19960 - DNA, 30 bp, Artificial Sequence
  Synthetic oligonucleotide
ccgcgtagagtatataatgagcttgaccag

SEQ ID NO: 19961 - DNA, 30 bp, Artificial Sequence
  Synthetic oligonucleotide
agtaggggaaccaccgcttcgccaagccag

SEQ ID NO: 19962 - DNA, 30 bp, Artificial Sequence
  Synthetic oligonucleotide
cgtgacagtagaagcgtatatcagggccag

SEQ ID NO: 19963 - DNA, 30 bp, Artificial Sequence
  Synthetic oligonucleotide
cgagttgcgcgaacgcgtaagagatgccag

SEQ ID NO: 19964 - DNA, 30 bp, Artificial Sequence
  Synthetic oligonucleotide
gtaggactctgacagggtttagcacagcag

SEQ ID NO: 19965 - DNA, 30 bp, Artificial Sequence
  Synthetic oligonucleotide
cacggccatgagaattgtttgtaagagcag

SEQ ID NO: 19966 - DNA, 30 bp, Artificial Sequence
  Synthetic oligonucleotide
cgcacagtataaacgcaatagtcagagcag

SEQ ID NO: 19967 - DNA, 30 bp, Artificial Sequence
  Synthetic oligonucleotide
cgttggggcgggagaaggcattaatagcag

SEQ ID NO: 19968 - DNA, 30 bp, Artificial Sequence
  Synthetic oligonucleotide
aggcggatagaggaacgattgggttagcag

SEQ ID NO: 19969 - DNA, 30 bp, Artificial Sequence
  Synthetic oligonucleotide
ctcaaaaagaaggattcatccaacgcgcag

SEQ ID NO: 19970 - DNA, 30 bp, Artificial Sequence
  Synthetic oligonucleotide
gcggcaagaggcagttaggttaaatggcag

SEQ ID NO: 19971 - DNA, 30 bp, Artificial Sequence
  Synthetic oligonucleotide
gaggcaatagaaaagctaatggaagtgcag

SEQ ID NO: 19972 - DNA, 30 bp, Artificial Sequence
  Synthetic oligonucleotide
agggggtaggcggcgtatctatatcatcag

SEQ ID NO: 19973 - DNA, 30 bp, Artificial Sequence
  Synthetic oligonucleotide
tggatcgactttaacgggagtgcgcctcag

SEQ ID NO: 19974 - DNA, 30 bp, Artificial Sequence
  Synthetic oligonucleotide
cacaagccaaagctaacctcacactgtcag

SEQ ID NO: 19975 - DNA, 30 bp, Artificial Sequence
  Synthetic oligonucleotide
agtgagcaatataataatgataacgttcag

SEQ ID NO: 19976 - DNA, 30 bp, Artificial Sequence
  Synthetic oligonucleotide
aaatccggaacgaaaacaaatgaccaagag

SEQ ID NO: 19977 - DNA, 30 bp, Artificial Sequence
  Synthetic oligonucleotide
gatgcaggtaggagaaacgagcctgaagag

SEQ ID NO: 19978 - DNA, 30 bp, Artificial Sequence
  Synthetic oligonucleotide
gtctagagaacgatatagagagagtaagag

SEQ ID NO: 19979 - DNA, 30 bp, Artificial Sequence
  Synthetic oligonucleotide
tcggcggactaacaatagaaagagacagag

SEQ ID NO: 19980 - DNA, 30 bp, Artificial Sequence
  Synthetic oligonucleotide
aagagtaatgcaagagcaggaacgtcagag

SEQ ID NO: 19981 - DNA, 30 bp, Artificial Sequence
  Synthetic oligonucleotide
ccgtgcacatagccgtgcgtgaggagagag

SEQ ID NO: 19982 - DNA, 30 bp, Artificial Sequence
  Synthetic oligonucleotide
ataggcaagggaacctgatctacccgagag

SEQ ID NO: 19983 - DNA, 30 bp, Artificial Sequence
  Synthetic oligonucleotide
gaggggtggagccgcctaaccgatcgagag

SEQ ID NO: 19984 - DNA, 30 bp, Artificial Sequence
  Synthetic oligonucleotide
ccttgtccggggtacgttctggcgggagag

SEQ ID NO: 19985 - DNA, 30 bp, Artificial Sequence
  Synthetic oligonucleotide
tcgagtgccgagccatataacgcggtagag

SEQ ID NO: 19986 - DNA, 30 bp, Artificial Sequence
  Synthetic oligonucleotide
ggacatgtgaaatacgtggatatccacgag

SEQ ID NO: 19987 - DNA, 30 bp, Artificial Sequence
  Synthetic oligonucleotide
tctcggaataaaaaccatctgcccgacgag

SEQ ID NO: 19988 - DNA, 30 bp, Artificial Sequence
  Synthetic oligonucleotide
ctacccatggtacagggcacacagtacgag

SEQ ID NO: 19989 - DNA, 30 bp, Artificial Sequence
  Synthetic oligonucleotide
taccacgaaaaaaaattaaggacgtacgag

SEQ ID NO: 19990 - DNA, 30 bp, Artificial Sequence
  Synthetic oligonucleotide
caggtcatccacttaaacgcatggtacgag

SEQ ID NO: 19991 - DNA, 30 bp, Artificial Sequence
  Synthetic oligonucleotide
gcgtagcgagattaattcaacgcttacgag

SEQ ID NO: 19992 - DNA, 30 bp, Artificial Sequence
  Synthetic oligonucleotide
cggagtgaaagaaatatctgttcaaccgag

SEQ ID NO: 19993 - DNA, 30 bp, Artificial Sequence
  Synthetic oligonucleotide
tatcgcagtgattgttccgaatgacccgag

SEQ ID NO: 19994 - DNA, 30 bp, Artificial Sequence
  Synthetic oligonucleotide
gcgttcccgagcgatcgatacctggccgag

SEQ ID NO: 19995 - DNA, 30 bp, Artificial Sequence
  Synthetic oligonucleotide
agacaaggttgagtttaggacactagcgag

SEQ ID NO: 19996 - DNA, 30 bp, Artificial Sequence
  Synthetic oligonucleotide
tacttaaaccgaagcttgcaaacacgcgag

SEQ ID NO: 19997 - DNA, 30 bp, Artificial Sequence
  Synthetic oligonucleotide
acagggtacagtcaaacgagctcacgcgag

SEQ ID NO: 19998 - DNA, 30 bp, Artificial Sequence
  Synthetic oligonucleotide
atgcgtaagcaatgaaatgctcgtcgcgag

SEQ ID NO: 19999 - DNA, 30 bp, Artificial Sequence
  Synthetic oligonucleotide
cgaaggtttaatccggcaaaaaaaggcgag

SEQ ID NO: 20000 - DNA, 30 bp, Artificial Sequence
  Synthetic oligonucleotide
cattaaagcgcaaatacccctccgggcgag

SEQ ID NO: 20001 - DNA, 30 bp, Artificial Sequence
  Synthetic oligonucleotide
gatacacaataagtacaattaacctgcgag

SEQ ID NO: 20002 - DNA, 30 bp, Artificial Sequence
  Synthetic oligonucleotide
cggcgagggcaagctggagatagcatcgag

SEQ ID NO: 20003 - DNA, 30 bp, Artificial Sequence
  Synthetic oligonucleotide
aacgcgcgccagcgtcaggaagtactcgag

SEQ ID NO: 20004 - DNA, 30 bp, Artificial Sequence
  Synthetic oligonucleotide
tgcgtagacaaccgaagtgtgcgggtcgag

SEQ ID NO: 20005 - DNA, 30 bp, Artificial Sequence
  Synthetic oligonucleotide
gcgggttctaagggataatgtcgcaaggag

SEQ ID NO: 20006 - DNA, 30 bp, Artificial Sequence
  Synthetic oligonucleotide
aaggatcgatgagaaccgagtgtcaaggag

SEQ ID NO: 20007 - DNA, 30 bp, Artificial Sequence
  Synthetic oligonucleotide
ccagactgatagccagaattgaataaggag

SEQ ID NO: 20008 - DNA, 30 bp, Artificial Sequence
  Synthetic oligonucleotide
tcttcctgctatcgaacataacgcgaggag

SEQ ID NO: 20009 - DNA, 30 bp, Artificial Sequence
  Synthetic oligonucleotide
ggccaggcataggaacataaaatacgggag

SEQ ID NO: 20010 - DNA, 30 bp, Artificial Sequence
  Synthetic oligonucleotide
cggaattggtgaggaagactacaaatggag

SEQ ID NO: 20011 - DNA, 30 bp, Artificial Sequence
  Synthetic oligonucleotide
cacatgtggagaatctaagattgtatggag

SEQ ID NO: 20012 - DNA, 30 bp, Artificial Sequence
  Synthetic oligonucleotide
cagccatgatatggagccaaggacgtggag

SEQ ID NO: 20013 - DNA, 30 bp, Artificial Sequence
  Synthetic oligonucleotide
gaggtattatccaaattgcagggcgtggag

SEQ ID NO: 20014 - DNA, 30 bp, Artificial Sequence
  Synthetic oligonucleotide
cactaaacatactgcgtgcatcaacatgag

SEQ ID NO: 20015 - DNA, 30 bp, Artificial Sequence
  Synthetic oligonucleotide
tgatggcgtgatctatccaaagggcatgag

SEQ ID NO: 20016 - DNA, 30 bp, Artificial Sequence
  Synthetic oligonucleotide
aggtggaccgacttcaggaggcatcatgag

SEQ ID NO: 20017 - DNA, 30 bp, Artificial Sequence
  Synthetic oligonucleotide
gacatagctgaagtgttacgtggtcatgag

SEQ ID NO: 20018 - DNA, 30 bp, Artificial Sequence
  Synthetic oligonucleotide
cgtgatgagtggtatgcctgtggagatgag

SEQ ID NO: 20019 - DNA, 30 bp, Artificial Sequence
  Synthetic oligonucleotide
gcgcgaaatacagtttaatgtcaatatgag

SEQ ID NO: 20020 - DNA, 30 bp, Artificial Sequence
  Synthetic oligonucleotide
aggtctcgatatcgggaacaggttactgag

SEQ ID NO: 20021 - DNA, 30 bp, Artificial Sequence
  Synthetic oligonucleotide
gaggcgaaagtggtaactcaatttactgag

SEQ ID NO: 20022 - DNA, 30 bp, Artificial Sequence
  Synthetic oligonucleotide
agagcggctcgcaatcattgctgacctgag

SEQ ID NO: 20023 - DNA, 30 bp, Artificial Sequence
  Synthetic oligonucleotide
gggggcgacaaagaatgtcttcgttctgag

SEQ ID NO: 20024 - DNA, 30 bp, Artificial Sequence
  Synthetic oligonucleotide
tgtagacgtaaacaaggcggattttctgag

SEQ ID NO: 20025 - DNA, 30 bp, Artificial Sequence
  Synthetic oligonucleotide
tggggtggtgaaaaggccgcaatacgtgag

SEQ ID NO: 20026 - DNA, 30 bp, Artificial Sequence
  Synthetic oligonucleotide
acggaggaagggtacctagaacgtcgtgag

SEQ ID NO: 20027 - DNA, 30 bp, Artificial Sequence
  Synthetic oligonucleotide
ctgcggctccgatatcctaagaccgttgag

SEQ ID NO: 20028 - DNA, 30 bp, Artificial Sequence
  Synthetic oligonucleotide
ttggtgaaaaagtaaggatactgcgttgag

SEQ ID NO: 20029 - DNA, 30 bp, Artificial Sequence
  Synthetic oligonucleotide
gtaaaggagggccggttcgacctaaaatag

SEQ ID NO: 20030 - DNA, 30 bp, Artificial Sequence
  Synthetic oligonucleotide
aaaggacgggacaagaagttgatccaatag

SEQ ID NO: 20031 - DNA, 30 bp, Artificial Sequence
  Synthetic oligonucleotide
tggagatataggaacataccatgggaatag

SEQ ID NO: 20032 - DNA, 30 bp, Artificial Sequence
  Synthetic oligonucleotide
gccgtgcaacagaggtggggcccaacatag

SEQ ID NO: 20033 - DNA, 30 bp, Artificial Sequence
  Synthetic oligonucleotide
gtcgaagcagatgcggggcgggactcatag

SEQ ID NO: 20034 - DNA, 30 bp, Artificial Sequence
  Synthetic oligonucleotide
ctggacgagggatcaggatatgagagatag

SEQ ID NO: 20035 - DNA, 30 bp, Artificial Sequence
  Synthetic oligonucleotide
tatggtaaatgcaacgtgataaggagatag

SEQ ID NO: 20036 - DNA, 30 bp, Artificial Sequence
  Synthetic oligonucleotide
cgtgagtgcatgatcatagcatgttgatag

SEQ ID NO: 20037 - DNA, 30 bp, Artificial Sequence
  Synthetic oligonucleotide
cgacaaatccactaactaaggaatctatag

SEQ ID NO: 20038 - DNA, 30 bp, Artificial Sequence
  Synthetic oligonucleotide
ggagcggtagtgtactaaccaacagtatag

SEQ ID NO: 20039 - DNA, 30 bp, Artificial Sequence
  Synthetic oligonucleotide
cgattatgaacaaaggtacaatgcgtatag

SEQ ID NO: 20040 - DNA, 30 bp, Artificial Sequence
  Synthetic oligonucleotide
tgtgagtaaatgcacaggcggacaaactag

SEQ ID NO: 20041 - DNA, 30 bp, Artificial Sequence
  Synthetic oligonucleotide
cgggcaggaaagtattaggataaaatctag

SEQ ID NO: 20042 - DNA, 30 bp, Artificial Sequence
  Synthetic oligonucleotide
tggcggacgagggaataggtgatgaagtag

SEQ ID NO: 20043 - DNA, 30 bp, Artificial Sequence
  Synthetic oligonucleotide
acggagttgagagcatctgcaccacagtag

SEQ ID NO: 20044 - DNA, 30 bp, Artificial Sequence
  Synthetic oligonucleotide
tagcggagttcgaggagtcgacgacagtag

SEQ ID NO: 20045 - DNA, 30 bp, Artificial Sequence
  Synthetic oligonucleotide
aggaagatcccaaaccgtagtggggagtag

SEQ ID NO: 20046 - DNA, 30 bp, Artificial Sequence
  Synthetic oligonucleotide
aggaaccacaggaaatcgatattttagtag

SEQ ID NO: 20047 - DNA, 30 bp, Artificial Sequence
  Synthetic oligonucleotide
ccgaaaagcaatctcatgtgacagacgtag

SEQ ID NO: 20048 - DNA, 29 bp, Artificial Sequence
  Synthetic oligonucleotide
acctaacaagatgctcaaaatccaggtag

SEQ ID NO: 20049 - DNA, 30 bp, Artificial Sequence
  Synthetic oligonucleotide
acgataagtcaagtgtaatcgtcaatgtag

SEQ ID NO: 20050 - DNA, 30 bp, Artificial Sequence
  Synthetic oligonucleotide
caggtggacgggaagctcggtgacgattag

SEQ ID NO: 20051 - DNA, 30 bp, Artificial Sequence
  Synthetic oligonucleotide
aggaggaaggatattgaccggtacgattag

SEQ ID NO: 20052 - DNA, 30 bp, Artificial Sequence
  Synthetic oligonucleotide
cgagtgagtcgaaaatatccaggtggttag

SEQ ID NO: 20053 - DNA, 30 bp, Artificial Sequence
  Synthetic oligonucleotide
agctgaactccggttagcgggtacaaaacg

SEQ ID NO: 20054 - DNA, 30 bp, Artificial Sequence
  Synthetic oligonucleotide
ggcagtgttgcgacttcgcgaaatcaaacg

SEQ ID NO: 20055 - DNA, 30 bp, Artificial Sequence
  Synthetic oligonucleotide
agggactatcggtaagctcaacgctaaacg

SEQ ID NO: 20056 - DNA, 30 bp, Artificial Sequence
  Synthetic oligonucleotide
tcgaactgaggatcgacacggaaaccaacg

SEQ ID NO: 20057 - DNA, 30 bp, Artificial Sequence
  Synthetic oligonucleotide
cacgagagattctaaaggtcataatcaacg

SEQ ID NO: 20058 - DNA, 30 bp, Artificial Sequence
  Synthetic oligonucleotide
ggcgagtcacttcacaatagcaaaataacg

SEQ ID NO: 20059 - DNA, 30 bp, Artificial Sequence
  Synthetic oligonucleotide
gaaaggacccaggaaattgcgaacttaacg

SEQ ID NO: 20060 - DNA, 30 bp, Artificial Sequence
  Synthetic oligonucleotide
aacgtggtttcagcaagcgggagcaacacg

SEQ ID NO: 20061 - DNA, 30 bp, Artificial Sequence
  Synthetic oligonucleotide
catcgacagagcgaggcctaactagacacg

SEQ ID NO: 20062 - DNA, 30 bp, Artificial Sequence
  Synthetic oligonucleotide
cgaaggacaaaggttcgcgtttcatacacg

SEQ ID NO: 20063 - DNA, 30 bp, Artificial Sequence
  Synthetic oligonucleotide
cagggcgatactcaggttaagcgagccacg

SEQ ID NO: 20064 - DNA, 30 bp, Artificial Sequence
  Synthetic oligonucleotide
aggcactaggttggagtatgagtgagcacg

SEQ ID NO: 20065 - DNA, 30 bp, Artificial Sequence
  Synthetic oligonucleotide
gcggaagccaacgtaggaaagaatcagacg

SEQ ID NO: 20066 - DNA, 35 bp, Artificial Sequence
  Synthetic oligonucleotide
aagcgtgccgggtgaacgatagtgcccgccggacg

SEQ ID NO: 20067 - DNA, 30 bp, Artificial Sequence
  Synthetic oligonucleotide
tgcagagaaagctgagaattgagaggtacg

SEQ ID NO: 20068 - DNA, 31 bp, Artificial Sequence
  Synthetic oligonucleotide
accaagagtatccccaataaggtgcaaaccg

SEQ ID NO: 20069 - DNA, 30 bp, Artificial Sequence
  Synthetic oligonucleotide
gtgcatagactaggaaagtgttaaagaccg

SEQ ID NO: 20070 - DNA, 30 bp, Artificial Sequence
  Synthetic oligonucleotide
ggatactcaactacgagagctctcagaccg

SEQ ID NO: 20071 - DNA, 30 bp, Artificial Sequence
  Synthetic oligonucleotide
gctggctgggtaaggatctgccgacgaccg

SEQ ID NO: 20072 - DNA, 30 bp, Artificial Sequence
  Synthetic oligonucleotide
aggaaactttagtagtaagggtcaaacccg

SEQ ID NO: 20073 - DNA, 30 bp, Artificial Sequence
  Synthetic oligonucleotide
aggaatcctcttttaagaaccagagtgccg

SEQ ID NO: 20074 - DNA, 30 bp, Artificial Sequence
  Synthetic oligonucleotide
tagctagaacgagtacccaaaacccatccg

SEQ ID NO: 20075 - DNA, 30 bp, Artificial Sequence
  Synthetic oligonucleotide
gagaacaggaaaagagaagcgtgtcatccg

SEQ ID NO: 20076 - DNA, 30 bp, Artificial Sequence
  Synthetic oligonucleotide
tacaaaccagcatcccagaaggtgactccg

SEQ ID NO: 20077 - DNA, 30 bp, Artificial Sequence
  Synthetic oligonucleotide
caaggtaagggactgagattaagtgctccg

SEQ ID NO: 20078 - DNA, 30 bp, Artificial Sequence
  Synthetic oligonucleotide
ttaaggcatgccactaaaccagacagtccg

SEQ ID NO: 20079 - DNA, 30 bp, Artificial Sequence
  Synthetic oligonucleotide
cgtgacgacacctaaggccaaggagaagcg

SEQ ID NO: 20080 - DNA, 30 bp, Artificial Sequence
  Synthetic oligonucleotide
ggtcaagggagccaaacactacagctagcg

SEQ ID NO: 20081 - DNA, 30 bp, Artificial Sequence
  Synthetic oligonucleotide
ccgccgaaatggactcgagatctaagcgcg

SEQ ID NO: 20082 - DNA, 30 bp, Artificial Sequence
  Synthetic oligonucleotide
gctcaagctcaacataaagggtgactcgcg

SEQ ID NO: 20083 - DNA, 30 bp, Artificial Sequence
  Synthetic oligonucleotide
tgatgtaggagtcgacccgagaaacaggcg

SEQ ID NO: 20084 - DNA, 30 bp, Artificial Sequence
  Synthetic oligonucleotide
tcgaacgatgcaacggaacctacctaggcg

SEQ ID NO: 20085 - DNA, 30 bp, Artificial Sequence
  Synthetic oligonucleotide
aagggccgaatcggcgtcaagtgatcggcg

SEQ ID NO: 20086 - DNA, 30 bp, Artificial Sequence
  Synthetic oligonucleotide
gatgaggagtaagagtgggagtctactgcg

SEQ ID NO: 20087 - DNA, 30 bp, Artificial Sequence
  Synthetic oligonucleotide
agctagagcgaagggataggacgccgtgcg

SEQ ID NO: 20088 - DNA, 30 bp, Artificial Sequence
  Synthetic oligonucleotide
gacggggatgtgtcatcggaaacaattgcg

SEQ ID NO: 20089 - DNA, 30 bp, Artificial Sequence
  Synthetic oligonucleotide
tcgaacaaaaattgccagccttgaattgcg

SEQ ID NO: 20090 - DNA, 30 bp, Artificial Sequence
  Synthetic oligonucleotide
cggataaaattagtaaagtaggatcaatcg

SEQ ID NO: 20091 - DNA, 30 bp, Artificial Sequence
  Synthetic oligonucleotide
ggagggtgtaattacatgggaataggatcg

SEQ ID NO: 20092 - DNA, 30 bp, Artificial Sequence
  Synthetic oligonucleotide
agtgggggaggtaaccacctaggattatcg

SEQ ID NO: 20093 - DNA, 30 bp, Artificial Sequence
  Synthetic oligonucleotide
gggggaaaggcaaagtgattatcgttatcg

SEQ ID NO: 20094 - DNA, 30 bp, Artificial Sequence
  Synthetic oligonucleotide
ggtcagaaacgttagacagcaaaaccctcg

SEQ ID NO: 20095 - DNA, 30 bp, Artificial Sequence
  Synthetic oligonucleotide
aggggaacagtcccttgcggcccaagctcg

SEQ ID NO: 20096 - DNA, 30 bp, Artificial Sequence
  Synthetic oligonucleotide
taacgaaacatataacgggattgtagctcg

SEQ ID NO: 20097 - DNA, 30 bp, Artificial Sequence
  Synthetic oligonucleotide
ggggcagtgtgcgattgaatgctcggctcg

SEQ ID NO: 20098 - DNA, 30 bp, Artificial Sequence
  Synthetic oligonucleotide
tcaggtccaaggcactagagtacggtctcg

SEQ ID NO: 20099 - DNA, 30 bp, Artificial Sequence
  Synthetic oligonucleotide
gtgtaaataaattcggtcaaacataagtcg

SEQ ID NO: 20100 - DNA, 30 bp, Artificial Sequence
  Synthetic oligonucleotide
ttacagtctcagtagatctcaatgccgtcg

SEQ ID NO: 20101 - DNA, 30 bp, Artificial Sequence
  Synthetic oligonucleotide
acgaacaaacagttctttaacttatcgtcg

SEQ ID NO: 20102 - DNA, 30 bp, Artificial Sequence
  Synthetic oligonucleotide
agtcgaatatcacagcatcgaggctcgtcg

SEQ ID NO: 20103 - DNA, 30 bp, Artificial Sequence
  Synthetic oligonucleotide
tggacaacgaagcgactctatgaatggtcg

SEQ ID NO: 20104 - DNA, 31 bp, Artificial Sequence
  Synthetic oligonucleotide
tccatacacggggtaaatataggcaacttcg

SEQ ID NO: 20105 - DNA, 30 bp, Artificial Sequence
  Synthetic oligonucleotide
gcgacaaaaaatggtgtggggggaagttcg

SEQ ID NO: 20106 - DNA, 30 bp, Artificial Sequence
  Synthetic oligonucleotide
gtaacataggaaagaaaaaatggaaaaagg

SEQ ID NO: 20107 - DNA, 30 bp, Artificial Sequence
  Synthetic oligonucleotide
agcgatggaccacaacaaggcagtgaaagg

SEQ ID NO: 20108 - DNA, 30 bp, Artificial Sequence
  Synthetic oligonucleotide
actggcgaaaagcgaggtgggtcatcaagg

SEQ ID NO: 20109 - DNA, 30 bp, Artificial Sequence
  Synthetic oligonucleotide
cataagaggtaagtcatgttcgtactaagg

SEQ ID NO: 20110 - DNA, 30 bp, Artificial Sequence
  Synthetic oligonucleotide
caaagaggaaacagtctgccctcagtaagg

SEQ ID NO: 20111 - DNA, 30 bp, Artificial Sequence
  Synthetic oligonucleotide
gtaacgcgaatcgcggggggaatgcacagg

SEQ ID NO: 20112 - DNA, 30 bp, Artificial Sequence
  Synthetic oligonucleotide
ctgggagtagtagacaataagagcggcagg

SEQ ID NO: 20113 - DNA, 30 bp, Artificial Sequence
  Synthetic oligonucleotide
ctgagtcgtcgagacataattcagtagagg

SEQ ID NO: 20114 - DNA, 30 bp, Artificial Sequence
  Synthetic oligonucleotide
tcagacgggaaacgatgcatggggacgagg

SEQ ID NO: 20115 - DNA, 30 bp, Artificial Sequence
  Synthetic oligonucleotide
aagttctagtacgaagaacggtgaaggagg

SEQ ID NO: 20116 - DNA, 30 bp, Artificial Sequence
  Synthetic oligonucleotide
ctaggatgaagataaagatctctaaggagg

SEQ ID NO: 20117 - DNA, 30 bp, Artificial Sequence
  Synthetic oligonucleotide
agatgtaaatgcaactcaagcgaagggagg

SEQ ID NO: 20118 - DNA, 30 bp, Artificial Sequence
  Synthetic oligonucleotide
cggtcccatgacagggtgacgagaatgagg

SEQ ID NO: 20119 - DNA, 30 bp, Artificial Sequence
  Synthetic oligonucleotide
tgatcgaccatgccagacagacgaatgagg

SEQ ID NO: 20120 - DNA, 30 bp, Artificial Sequence
  Synthetic oligonucleotide
agattgtgcaaggagtcgagaaggagtagg

SEQ ID NO: 20121 - DNA, 31 bp, Artificial Sequence
  Synthetic oligonucleotide
agtgttaagaacaagggcaaatacgggtagg

SEQ ID NO: 20122 - DNA, 30 bp, Artificial Sequence
  Synthetic oligonucleotide
acagtatcggaataacaaccaaccagacgg

SEQ ID NO: 20123 - DNA, 30 bp, Artificial Sequence
  Synthetic oligonucleotide
acgaaggaattggtgtagatgagctcccgg

SEQ ID NO: 20124 - DNA, 30 bp, Artificial Sequence
  Synthetic oligonucleotide
cgagtacgagaatcgtcgaactagcagcgg

SEQ ID NO: 20125 - DNA, 30 bp, Artificial Sequence
  Synthetic oligonucleotide
gatcgcgaggtaggtaacacatccggtcgg

SEQ ID NO: 20126 - DNA, 30 bp, Artificial Sequence
  Synthetic oligonucleotide
ggactacagccgtaattatctccaaaaggg

SEQ ID NO: 20127 - DNA, 30 bp, Artificial Sequence
  Synthetic oligonucleotide
ccggcgttaagaataccgagagagaaaggg

SEQ ID NO: 20128 - DNA, 30 bp, Artificial Sequence
  Synthetic oligonucleotide
gacgaggaactacaacagtactgtaaaggg

SEQ ID NO: 20129 - DNA, 30 bp, Artificial Sequence
  Synthetic oligonucleotide
cctaggaacctagacggttaaccacaaggg

SEQ ID NO: 20130 - DNA, 31 bp, Artificial Sequence
  Synthetic oligonucleotide
cctcgtagcggtagaatagtcggcctaaggg

SEQ ID NO: 20131 - DNA, 30 bp, Artificial Sequence
  Synthetic oligonucleotide
tggaagcctaatattccgtttaagacaggg

SEQ ID NO: 20132 - DNA, 30 bp, Artificial Sequence
  Synthetic oligonucleotide
caggtagccacaatttatgaggggagaggg

SEQ ID NO: 20133 - DNA, 30 bp, Artificial Sequence
  Synthetic oligonucleotide
cgggttgtaggtgcacagacgattcgaggg

SEQ ID NO: 20134 - DNA, 30 bp, Artificial Sequence
  Synthetic oligonucleotide
aagagtaaatgagagtacattatgttaggg

SEQ ID NO: 20135 - DNA, 30 bp, Artificial Sequence
  Synthetic oligonucleotide
ggccaaggaaactcgcatgtcagaaacggg

SEQ ID NO: 20136 - DNA, 30 bp, Artificial Sequence
  Synthetic oligonucleotide
ctaagccgagagctcccagacaaccagggg

SEQ ID NO: 20137 - DNA, 30 bp, Artificial Sequence
  Synthetic oligonucleotide
taggaaagcataagtcacaggcattagggg

SEQ ID NO: 20138 - DNA, 30 bp, Artificial Sequence
  Synthetic oligonucleotide
cggagatagctacagagttcagcttagggg

SEQ ID NO: 20139 - DNA, 30 bp, Artificial Sequence
  Synthetic oligonucleotide
gtgcgacatgtggcataaatagagaggggg

SEQ ID NO: 20140 - DNA, 30 bp, Artificial Sequence
  Synthetic oligonucleotide
acagacggaacggtaaatttccacctgggg

SEQ ID NO: 20141 - DNA, 30 bp, Artificial Sequence
  Synthetic oligonucleotide
tgcactgtgcgaggacagaaaacacatggg

SEQ ID NO: 20142 - DNA, 30 bp, Artificial Sequence
  Synthetic oligonucleotide
cgaggcaaccaacgagttaacgtggctggg

SEQ ID NO: 20143 - DNA, 30 bp, Artificial Sequence
  Synthetic oligonucleotide
acggacaaaggatacaatctcgtcagtggg

SEQ ID NO: 20144 - DNA, 30 bp, Artificial Sequence
  Synthetic oligonucleotide
ataaaggagtcgcactgcaacgagagtggg

SEQ ID NO: 20145 - DNA, 30 bp, Artificial Sequence
  Synthetic oligonucleotide
cctgactcagtgaagtaagaaccgagtggg

SEQ ID NO: 20146 - DNA, 30 bp, Artificial Sequence
  Synthetic oligonucleotide
aggcgaaagagattgatacctcccatatgg

SEQ ID NO: 20147 - DNA, 30 bp, Artificial Sequence
  Synthetic oligonucleotide
cagactggaataccaaaagttaagaactgg

SEQ ID NO: 20148 - DNA, 30 bp, Artificial Sequence
  Synthetic oligonucleotide
gtgtggggggagataaactagtagcactgg

SEQ ID NO: 20149 - DNA, 30 bp, Artificial Sequence
  Synthetic oligonucleotide
aggagtaaaaaagtaagtcggacatgctgg

SEQ ID NO: 20150 - DNA, 30 bp, Artificial Sequence
  Synthetic oligonucleotide
aggcttcaagaaaaaacgtggtgtaagtgg

SEQ ID NO: 20151 - DNA, 30 bp, Artificial Sequence
  Synthetic oligonucleotide
ggctgttaactgagcacaatagaggagtgg

SEQ ID NO: 20152 - DNA, 30 bp, Artificial Sequence
  Synthetic oligonucleotide
acctgagagaagacgaggtcgacttcgtgg

SEQ ID NO: 20153 - DNA, 30 bp, Artificial Sequence
  Synthetic oligonucleotide
ggcggcgaccgaaagagtgaaaaaggttgg

SEQ ID NO: 20154 - DNA, 30 bp, Artificial Sequence
  Synthetic oligonucleotide
tcgataagccgagacactcagataggttgg

SEQ ID NO: 20155 - DNA, 30 bp, Artificial Sequence
  Synthetic oligonucleotide
ccatgtgggaagagtactgccattaaaatg

SEQ ID NO: 20156 - DNA, 30 bp, Artificial Sequence
  Synthetic oligonucleotide
acgaatataaaaatgaccggggaagaaatg

SEQ ID NO: 20157 - DNA, 30 bp, Artificial Sequence
  Synthetic oligonucleotide
gaggggtaagagatgcgtcaagattaaatg

SEQ ID NO: 20158 - DNA, 30 bp, Artificial Sequence
  Synthetic oligonucleotide
cgaatctgtggaggaaaggaaaaaccaatg

SEQ ID NO: 20159 - DNA, 30 bp, Artificial Sequence
  Synthetic oligonucleotide
aggtccacgaagagggattgttccggaatg

SEQ ID NO: 20160 - DNA, 30 bp, Artificial Sequence
  Synthetic oligonucleotide
cggggacgtagtgcgcgactcgatctaatg

SEQ ID NO: 20161 - DNA, 30 bp, Artificial Sequence
  Synthetic oligonucleotide
atgagcgtactgcgtggacccaaaaacatg

SEQ ID NO: 20162 - DNA, 30 bp, Artificial Sequence
  Synthetic oligonucleotide
cgacaacaatccacttagctccaaaacatg

SEQ ID NO: 20163 - DNA, 31 bp, Artificial Sequence
  Synthetic oligonucleotide
tggatacgcgcaagagaagccctatgacatg

SEQ ID NO: 20164 - DNA, 30 bp, Artificial Sequence
  Synthetic oligonucleotide
catctaaaacgagagggatgaaggagcatg

SEQ ID NO: 20165 - DNA, 30 bp, Artificial Sequence
  Synthetic oligonucleotide
cgcacataatccagagcaagttagcagatg

SEQ ID NO: 20166 - DNA, 30 bp, Artificial Sequence
  Synthetic oligonucleotide
agagcgaacaaggagagggcgcgggagatg

SEQ ID NO: 20167 - DNA, 30 bp, Artificial Sequence
  Synthetic oligonucleotide
ggcggtagtaaagaatggggcaccgcgatg

SEQ ID NO: 20168 - DNA, 30 bp, Artificial Sequence
  Synthetic oligonucleotide
caaccgaaccgaaatccagatacaaggatg

SEQ ID NO: 20169 - DNA, 30 bp, Artificial Sequence
  Synthetic oligonucleotide
aactggggtgtaagattgttggcgaggatg

SEQ ID NO: 20170 - DNA, 30 bp, Artificial Sequence
  Synthetic oligonucleotide
gggcaggatctcccagatcaagggaatatg

SEQ ID NO: 20171 - DNA, 30 bp, Artificial Sequence
  Synthetic oligonucleotide
cgactgggcaggaagcatccctggcatatg

SEQ ID NO: 20172 - DNA, 30 bp, Artificial Sequence
  Synthetic oligonucleotide
gaggaaatgtaaattatcgtccaagatatg

SEQ ID NO: 20173 - DNA, 30 bp, Artificial Sequence
  Synthetic oligonucleotide
cgtagaagcgattttcgacacaaggatatg

SEQ ID NO: 20174 - DNA, 30 bp, Artificial Sequence
  Synthetic oligonucleotide
cgaagggacgagtctatacattgcaaactg

SEQ ID NO: 20175 - DNA, 30 bp, Artificial Sequence
  Synthetic oligonucleotide
tagagacgtaagtaaaagaaatggcgactg

SEQ ID NO: 20176 - DNA, 30 bp, Artificial Sequence
  Synthetic oligonucleotide
taacggcatgacgtggatcacgaactactg

SEQ ID NO: 20177 - DNA, 30 bp, Artificial Sequence
  Synthetic oligonucleotide
cgggccacataagaaggggcggttaacctg

SEQ ID NO: 20178 - DNA, 30 bp, Artificial Sequence
  Synthetic oligonucleotide
taaatagcagaggacggtaatatcagcctg

SEQ ID NO: 20179 - DNA, 30 bp, Artificial Sequence
  Synthetic oligonucleotide
cctgggagcgaggcggcgtgaaccaagctg

SEQ ID NO: 20180 - DNA, 30 bp, Artificial Sequence
  Synthetic oligonucleotide
cacagattagatactgcaaactaagagctg

SEQ ID NO: 20181 - DNA, 30 bp, Artificial Sequence
  Synthetic oligonucleotide
acgggatgagacaatgcaaaggcctagctg

SEQ ID NO: 20182 - DNA, 30 bp, Artificial Sequence
  Synthetic oligonucleotide
ccaaaatctctgaaaaatgcgcgaacgctg

SEQ ID NO: 20183 - DNA, 30 bp, Artificial Sequence
  Synthetic oligonucleotide
ggtaatactggcgggtaaagaaacaaagtg

SEQ ID NO: 20184 - DNA, 30 bp, Artificial Sequence
  Synthetic oligonucleotide
ttaatggggtccgtagatcagaaggaagtg

SEQ ID NO: 20185 - DNA, 30 bp, Artificial Sequence
  Synthetic oligonucleotide
tcggggtaaagccccgacaattgtgaagtg

SEQ ID NO: 20186 - DNA, 30 bp, Artificial Sequence
  Synthetic oligonucleotide
cgtgaagataaattatacgttaattaagtg

SEQ ID NO: 20187 - DNA, 30 bp, Artificial Sequence
  Synthetic oligonucleotide
gacgttagtttcgagcttgatcctagagtg

SEQ ID NO: 20188 - DNA, 30 bp, Artificial Sequence
  Synthetic oligonucleotide
acgaaggaaagtgccacacacttgatagtg

SEQ ID NO: 20189 - DNA, 30 bp, Artificial Sequence
  Synthetic oligonucleotide
tgacaaggagtgcagaacttccagcccgtg

SEQ ID NO: 20190 - DNA, 30 bp, Artificial Sequence
  Synthetic oligonucleotide
cgagcgggcacatccaggtaagcttccgtg

SEQ ID NO: 20191 - DNA, 30 bp, Artificial Sequence
  Synthetic oligonucleotide
cgcagtgactgaaagatagaataaggcgtg

SEQ ID NO: 20192 - DNA, 30 bp, Artificial Sequence
  Synthetic oligonucleotide
cgtgacgtggggtcgggacgagtaggcgtg

SEQ ID NO: 20193 - DNA, 30 bp, Artificial Sequence
  Synthetic oligonucleotide
caacacgcccagagatcagcggcgatcgtg

SEQ ID NO: 20194 - DNA, 30 bp, Artificial Sequence
  Synthetic oligonucleotide
tggaatgcatcagcaagcgtacggatcgtg

SEQ ID NO: 20195 - DNA, 30 bp, Artificial Sequence
  Synthetic oligonucleotide
accacggaaacacatagagcgtcgaaggtg

SEQ ID NO: 20196 - DNA, 30 bp, Artificial Sequence
  Synthetic oligonucleotide
actgatacgggaactcgagccaacgtggtg

SEQ ID NO: 20197 - DNA, 30 bp, Artificial Sequence
  Synthetic oligonucleotide
atgatactgaacaagaaacccccttatgtg

SEQ ID NO: 20198 - DNA, 30 bp, Artificial Sequence
  Synthetic oligonucleotide
ctgacaattgaagacaaatgagaaggtgtg

SEQ ID NO: 20199 - DNA, 30 bp, Artificial Sequence
  Synthetic oligonucleotide
agtaaggaaaggaaagcgccgcgttgtgtg

SEQ ID NO: 20200 - DNA, 31 bp, Artificial Sequence
  Synthetic oligonucleotide
ggcggagctagttcaaggcaaaccaggattg

SEQ ID NO: 20201 - DNA, 30 bp, Artificial Sequence
  Synthetic oligonucleotide
gccacgcaacggacacctaatgtaaacttg

SEQ ID NO: 20202 - DNA, 30 bp, Artificial Sequence
  Synthetic oligonucleotide
cgtccgaaaggaaaagcaaaggtagtcttg

SEQ ID NO: 20203 - DNA, 30 bp, Artificial Sequence
  Synthetic oligonucleotide
ccgataaaaaaaacgtacccgcgagagttg

SEQ ID NO: 20204 - DNA, 30 bp, Artificial Sequence
  Synthetic oligonucleotide
cgcgcagtgggcaggatcgatgtcgcgttg

SEQ ID NO: 20205 - DNA, 30 bp, Artificial Sequence
  Synthetic oligonucleotide
aatggcgaccaaccgaatagaaggactttg

SEQ ID NO: 20206 - DNA, 30 bp, Artificial Sequence
  Synthetic oligonucleotide
gaaggtaagcatcgaaaatgtcatcgtttg

SEQ ID NO: 20207 - DNA, 30 bp, Artificial Sequence
  Synthetic oligonucleotide
accgaaacgataaatcgcgctcaccgaaat

SEQ ID NO: 20208 - DNA, 30 bp, Artificial Sequence
  Synthetic oligonucleotide
cacccggagaagaagacaaacgaccgaaat

SEQ ID NO: 20209 - DNA, 30 bp, Artificial Sequence
  Synthetic oligonucleotide
gcgacgtcgatcgaaggcgtgtcaggaaat

SEQ ID NO: 20210 - DNA, 30 bp, Artificial Sequence
  Synthetic oligonucleotide
cagcggaaggcgactgaatcagaatgcaat

SEQ ID NO: 20211 - DNA, 30 bp, Artificial Sequence
  Synthetic oligonucleotide
ggagcgtaaactagttaagaacattgcaat

SEQ ID NO: 20212 - DNA, 30 bp, Artificial Sequence
  Synthetic oligonucleotide
acggcaagagaagagacaccatgtatcaat

SEQ ID NO: 20213 - DNA, 30 bp, Artificial Sequence
  Synthetic oligonucleotide
cagagcgacgttataatggaagagaagaat

SEQ ID NO: 20214 - DNA, 30 bp, Artificial Sequence
  Synthetic oligonucleotide
atcaaaggagtagcagtatgaccgccgaat

SEQ ID NO: 20215 - DNA, 30 bp, Artificial Sequence
  Synthetic oligonucleotide
acataagaacgagggtgctccacaactaat

SEQ ID NO: 20216 - DNA, 30 bp, Artificial Sequence
  Synthetic oligonucleotide
cgacatgccgtccactccgcgttgagtaat

SEQ ID NO: 20217 - DNA, 30 bp, Artificial Sequence
  Synthetic oligonucleotide
cctaaaagcagtgacacccgcccgacacat

SEQ ID NO: 20218 - DNA, 31 bp, Artificial Sequence
  Synthetic oligonucleotide
gcgggggtgtgatagatcagatacgtcacat

SEQ ID NO: 20219 - DNA, 30 bp, Artificial Sequence
  Synthetic oligonucleotide
caggtgcaaggggtgatgataaggctacat

SEQ ID NO: 20220 - DNA, 30 bp, Artificial Sequence
  Synthetic oligonucleotide
tcgtaattgcctagaaccggaatggtacat

SEQ ID NO: 20221 - DNA, 30 bp, Artificial Sequence
  Synthetic oligonucleotide
aggaatatggcggaacatatcccgaagcat

SEQ ID NO: 20222 - DNA, 30 bp, Artificial Sequence
  Synthetic oligonucleotide
cggtcacggggataggcacaaagtgcgcat

SEQ ID NO: 20223 - DNA, 30 bp, Artificial Sequence
  Synthetic oligonucleotide
aacgacagtgtagaatatgacgaaaatcat

SEQ ID NO: 20224 - DNA, 30 bp, Artificial Sequence
  Synthetic oligonucleotide
gcccgaaggagatgcaaacacaagattcat

SEQ ID NO: 20225 - DNA, 30 bp, Artificial Sequence
  Synthetic oligonucleotide
tagagggacagtcgcaagtaaccagttcat

SEQ ID NO: 20226 - DNA, 30 bp, Artificial Sequence
  Synthetic oligonucleotide
aagaaatatgagaatgatacaacaaaagat

SEQ ID NO: 20227 - DNA, 30 bp, Artificial Sequence
  Synthetic oligonucleotide
ttacacgggagtagaatttaacagccagat

SEQ ID NO: 20228 - DNA, 30 bp, Artificial Sequence
  Synthetic oligonucleotide
tggtaggcaaacgcaaggtacaattcagat

SEQ ID NO: 20229 - DNA, 30 bp, Artificial Sequence
  Synthetic oligonucleotide
atcgagctggtaatcgatgaactaagagat

SEQ ID NO: 20230 - DNA, 30 bp, Artificial Sequence
  Synthetic oligonucleotide
aggaggaaacggttgataggaggcatagat

SEQ ID NO: 20231 - DNA, 30 bp, Artificial Sequence
  Synthetic oligonucleotide
ttggtcgaatgaaggcacggccagtacgat

SEQ ID NO: 20232 - DNA, 30 bp, Artificial Sequence
  Synthetic oligonucleotide
aggaaggcgaagaccaggagtccgtgcgat

SEQ ID NO: 20233 - DNA, 30 bp, Artificial Sequence
  Synthetic oligonucleotide
aacatcacacaatcaaaaccaataaaggat

SEQ ID NO: 20234 - DNA, 30 bp, Artificial Sequence
  Synthetic oligonucleotide
cgtaatgcggcctaagaaagcctaaaggat

SEQ ID NO: 20235 - DNA, 30 bp, Artificial Sequence
  Synthetic oligonucleotide
gacgggcacagcgttaagagtgacaaggat

SEQ ID NO: 20236 - DNA, 30 bp, Artificial Sequence
  Synthetic oligonucleotide
acaggagcgatggtgtcgttgtcgaaggat

SEQ ID NO: 20237 - DNA, 30 bp, Artificial Sequence
  Synthetic oligonucleotide
aggggtaaggatagataaagtcagccggat

SEQ ID NO: 20238 - DNA, 30 bp, Artificial Sequence
  Synthetic oligonucleotide
catcaaacaaataatgatggatacatggat

SEQ ID NO: 20239 - DNA, 30 bp, Artificial Sequence
  Synthetic oligonucleotide
tcaatgggaacgagtaaaatgaatactgat

SEQ ID NO: 20240 - DNA, 30 bp, Artificial Sequence
  Synthetic oligonucleotide
cgcgtgagaagctatagaatgaacacatat

SEQ ID NO: 20241 - DNA, 30 bp, Artificial Sequence
  Synthetic oligonucleotide
cgtaacataggttcacgaaaacaacagtat

SEQ ID NO: 20242 - DNA, 30 bp, Artificial Sequence
  Synthetic oligonucleotide
gggacatcgcaggcgtgagatcaacagtat

SEQ ID NO: 20243 - DNA, 30 bp, Artificial Sequence
  Synthetic oligonucleotide
ccctcctcgacagtatcagtagaagcgtat

SEQ ID NO: 20244 - DNA, 30 bp, Artificial Sequence
  Synthetic oligonucleotide
cgccagtgaaaaagcaatagtaaatcgtat

SEQ ID NO: 20245 - DNA, 30 bp, Artificial Sequence
  Synthetic oligonucleotide
aggccaatggcaccacaatgaagttcgtat

SEQ ID NO: 20246 - DNA, 30 bp, Artificial Sequence
  Synthetic oligonucleotide
atacgtattggaacgagtcaagccaggtat

SEQ ID NO: 20247 - DNA, 30 bp, Artificial Sequence
  Synthetic oligonucleotide
cggataacgggacatatgctacagcccact

SEQ ID NO: 20248 - DNA, 30 bp, Artificial Sequence
  Synthetic oligonucleotide
tcgaacgggacactgagccaaccgagcact

SEQ ID NO: 20249 - DNA, 30 bp, Artificial Sequence
  Synthetic oligonucleotide
gttaagagtgcactaacgaacacaaggact

SEQ ID NO: 20250 - DNA, 30 bp, Artificial Sequence
  Synthetic oligonucleotide
ctacgagtgggcaggaactcaggcagtact

SEQ ID NO: 20251 - DNA, 30 bp, Artificial Sequence
  Synthetic oligonucleotide
cgagagaactggcaaaaagagtaacgacct

SEQ ID NO: 20252 - DNA, 30 bp, Artificial Sequence
  Synthetic oligonucleotide
cgggaaggaatagcggtgatgatccgacct

SEQ ID NO: 20253 - DNA, 30 bp, Artificial Sequence
  Synthetic oligonucleotide
ggaagacagaaacacgtacagagaatacct

SEQ ID NO: 20254 - DNA, 30 bp, Artificial Sequence
  Synthetic oligonucleotide
ggaggcgaagcccgagaactcgagcaccct

SEQ ID NO: 20255 - DNA, 30 bp, Artificial Sequence
  Synthetic oligonucleotide
tcggcatatagtaaacgacaaatcatccct

SEQ ID NO: 20256 - DNA, 30 bp, Artificial Sequence
  Synthetic oligonucleotide
tcgagaggaggcggaacgttcggtgtccct

SEQ ID NO: 20257 - DNA, 30 bp, Artificial Sequence
  Synthetic oligonucleotide
cgggtaaggctactaggcaaaaagaatcct

SEQ ID NO: 20258 - DNA, 30 bp, Artificial Sequence
  Synthetic oligonucleotide
aaggggaaaaacacgccacccgcgcaagct

SEQ ID NO: 20259 - DNA, 30 bp, Artificial Sequence
  Synthetic oligonucleotide
cgacaatgatggtatagagtcggaagagct

SEQ ID NO: 20260 - DNA, 30 bp, Artificial Sequence
  Synthetic oligonucleotide
taacacatacggaaggcactggagagagct

SEQ ID NO: 20261 - DNA, 30 bp, Artificial Sequence
  Synthetic oligonucleotide
agagaagcgaaatgagacgaggtgggagct

SEQ ID NO: 20262 - DNA, 30 bp, Artificial Sequence
  Synthetic oligonucleotide
gacggactcgtgcgaggaaaaaaagccgct

SEQ ID NO: 20263 - DNA, 30 bp, Artificial Sequence
  Synthetic oligonucleotide
acggcaacaaaggtcgggacagcgtgcgct

SEQ ID NO: 20264 - DNA, 30 bp, Artificial Sequence
  Synthetic oligonucleotide
ctcagaggaccaagcaggagagctcaggct

SEQ ID NO: 20265 - DNA, 30 bp, Artificial Sequence
  Synthetic oligonucleotide
accgtcaaactagcgaccaaattgcgtgct

SEQ ID NO: 20266 - DNA, 30 bp, Artificial Sequence
  Synthetic oligonucleotide
tgaacgagacagccgttaaaaccaggtgct

SEQ ID NO: 20267 - DNA, 30 bp, Artificial Sequence
  Synthetic oligonucleotide
ccacgtagagggcgtatgatacaacaatct

SEQ ID NO: 20268 - DNA, 30 bp, Artificial Sequence
  Synthetic oligonucleotide
cgatactcagcgaaaccaaagtcaccctct

SEQ ID NO: 20269 - DNA, 30 bp, Artificial Sequence
  Synthetic oligonucleotide
atggaaacatagaccgttaagaatgagtct

SEQ ID NO: 20270 - DNA, 30 bp, Artificial Sequence
  Synthetic oligonucleotide
tcaggtccggtaacgtaatcagaagcgtct

SEQ ID NO: 20271 - DNA, 30 bp, Artificial Sequence
  Synthetic oligonucleotide
cggaaaaacagctcgacatgcgcccattct

SEQ ID NO: 20272 - DNA, 30 bp, Artificial Sequence
  Synthetic oligonucleotide
tgcgatacgagagaacgtgcagtgtaaagt

SEQ ID NO: 20273 - DNA, 30 bp, Artificial Sequence
  Synthetic oligonucleotide
atgcgatggagggacatcggactaccaagt

SEQ ID NO: 20274 - DNA, 30 bp, Artificial Sequence
  Synthetic oligonucleotide
agtgacgacaggcagacaggaaaaagaagt

SEQ ID NO: 20275 - DNA, 30 bp, Artificial Sequence
  Synthetic oligonucleotide
caacgcaaaggggcaaattcaacacgaagt

SEQ ID NO: 20276 - DNA, 30 bp, Artificial Sequence
  Synthetic oligonucleotide
cggggtgaatgttcagttagcatgcgaagt

SEQ ID NO: 20277 - DNA, 30 bp, Artificial Sequence
  Synthetic oligonucleotide
cgatatgggtggaatgataagatgagcagt

SEQ ID NO: 20278 - DNA, 30 bp, Artificial Sequence
  Synthetic oligonucleotide
tgccacataaaatagaagcacacgatcagt

SEQ ID NO: 20279 - DNA, 30 bp, Artificial Sequence
  Synthetic oligonucleotide
cggaatacgtactaagcatgggagctcagt

SEQ ID NO: 20280 - DNA, 30 bp, Artificial Sequence
  Synthetic oligonucleotide
ctgtccagctgaggaggggattgaaagagt

SEQ ID NO: 20281 - DNA, 30 bp, Artificial Sequence
  Synthetic oligonucleotide
acacctgggagtaggaaaagatgacagagt

SEQ ID NO: 20282 - DNA, 30 bp, Artificial Sequence
  Synthetic oligonucleotide
gcggacagtcgagaaaatggattgcagagt

SEQ ID NO: 20283 - DNA, 30 bp, Artificial Sequence
  Synthetic oligonucleotide
cgaaatagcgattgctggcggactcagagt

SEQ ID NO: 20284 - DNA, 30 bp, Artificial Sequence
  Synthetic oligonucleotide
catgacaggggtgagttactatcggagagt

SEQ ID NO: 20285 - DNA, 30 bp, Artificial Sequence
  Synthetic oligonucleotide
atgtatgcgaagaccataaaagggtcgagt

SEQ ID NO: 20286 - DNA, 30 bp, Artificial Sequence
  Synthetic oligonucleotide
cgaatcctgtgcgtggcggcaggagtgagt

SEQ ID NO: 20287 - DNA, 30 bp, Artificial Sequence
  Synthetic oligonucleotide
ttaacagagtgccacgagtacgcctatagt

SEQ ID NO: 20288 - DNA, 30 bp, Artificial Sequence
  Synthetic oligonucleotide
tattggaaagggctaagggataaaagtagt

SEQ ID NO: 20289 - DNA, 30 bp, Artificial Sequence
  Synthetic oligonucleotide
cgagaaagctattaatgtgattgcggtagt

SEQ ID NO: 20290 - DNA, 30 bp, Artificial Sequence
  Synthetic oligonucleotide
gggggctacacactcaacgagaacgttagt

SEQ ID NO: 20291 - DNA, 30 bp, Artificial Sequence
  Synthetic oligonucleotide
cgagaaggagcatggtcataaacgcgccgt

SEQ ID NO: 20292 - DNA, 30 bp, Artificial Sequence
  Synthetic oligonucleotide
gaccaaacaaacagggcaaggcgatagcgt

SEQ ID NO: 20293 - DNA, 30 bp, Artificial Sequence
  Synthetic oligonucleotide
ggcaatccgtgcaatcacgtggagtagcgt

SEQ ID NO: 20294 - DNA, 30 bp, Artificial Sequence
  Synthetic oligonucleotide
agcagataatgacaaagtagagtaaggcgt

SEQ ID NO: 20295 - DNA, 30 bp, Artificial Sequence
  Synthetic oligonucleotide
cgtgatcgatcttagtgcgtgagggttcgt

SEQ ID NO: 20296 - DNA, 30 bp, Artificial Sequence
  Synthetic oligonucleotide
caaagcagccagcgcgcactcatacaaggt

SEQ ID NO: 20297 - DNA, 31 bp, Artificial Sequence
  Synthetic oligonucleotide
tgggatgaaaatctaaagcgaactcgaaggt

SEQ ID NO: 20298 - DNA, 30 bp, Artificial Sequence
  Synthetic oligonucleotide
tccgcaagaggtcaatgaagcggggaaggt

SEQ ID NO: 20299 - DNA, 30 bp, Artificial Sequence
  Synthetic oligonucleotide
tcagtagcagggtcacgtatacaagcaggt

SEQ ID NO: 20300 - DNA, 30 bp, Artificial Sequence
  Synthetic oligonucleotide
cagaagcgtaagcgacatcgaagatacggt

SEQ ID NO: 20301 - DNA, 30 bp, Artificial Sequence
  Synthetic oligonucleotide
agaagcgatgaaacgcaaggggatagcggt

SEQ ID NO: 20302 - DNA, 30 bp, Artificial Sequence
  Synthetic oligonucleotide
ataaggatataggtgcatgagccagagggt

SEQ ID NO: 20303 - DNA, 30 bp, Artificial Sequence
  Synthetic oligonucleotide
aaaaggaaagcaaaattagctgggaatggt

SEQ ID NO: 20304 - DNA, 30 bp, Artificial Sequence
  Synthetic oligonucleotide
aagagaacgcgcaggggaagaaagtttggt

SEQ ID NO: 20305 - DNA, 30 bp, Artificial Sequence
  Synthetic oligonucleotide
atcgaagaatagaccaacggtcgggactgt

SEQ ID NO: 20306 - DNA, 30 bp, Artificial Sequence
  Synthetic oligonucleotide
gggccgaagttggacataccagagatgtgt

SEQ ID NO: 20307 - DNA, 30 bp, Artificial Sequence
  Synthetic oligonucleotide
cgagagtcgaaatgaatgactacagtgtgt

SEQ ID NO: 20308 - DNA, 30 bp, Artificial Sequence
  Synthetic oligonucleotide
cgaatagagaggatcacgaaatcccaaatt

SEQ ID NO: 20309 - DNA, 30 bp, Artificial Sequence
  Synthetic oligonucleotide
cgaatatgctataacaggagaataagaatt

SEQ ID NO: 20310 - DNA, 30 bp, Artificial Sequence
  Synthetic oligonucleotide
agcaagactgagataaggaggtgggtcatt

SEQ ID NO: 20311 - DNA, 30 bp, Artificial Sequence
  Synthetic oligonucleotide
gcgtgttatgaaaagaaaggaatagcgatt

SEQ ID NO: 20312 - DNA, 30 bp, Artificial Sequence
  Synthetic oligonucleotide
agccggacgatgagaaggacgattattatt

SEQ ID NO: 20313 - DNA, 30 bp, Artificial Sequence
  Synthetic oligonucleotide
tacacaggatcgaaacgaacattaatgctt

SEQ ID NO: 20314 - DNA, 30 bp, Artificial Sequence
  Synthetic oligonucleotide
aagacaagagcaacagaacgggcaaatctt

SEQ ID NO: 20315 - DNA, 30 bp, Artificial Sequence
  Synthetic oligonucleotide
acgggtggcgtgagatcggcgggatgtctt

SEQ ID NO: 20316 - DNA, 30 bp, Artificial Sequence
  Synthetic oligonucleotide
ggcaatccatgccgactagttgaacaagtt

SEQ ID NO: 20317 - DNA, 30 bp, Artificial Sequence
  Synthetic oligonucleotide
aacgataacggagtagaactcgagcaagtt

SEQ ID NO: 20318 - DNA, 30 bp, Artificial Sequence
  Synthetic oligonucleotide
ccctggcaaggggaggcaatcaatgaagtt

SEQ ID NO: 20319 - DNA, 30 bp, Artificial Sequence
  Synthetic oligonucleotide
aggtgagtgtaaccagtctgtcactaagtt

SEQ ID NO: 20320 - DNA, 30 bp, Artificial Sequence
  Synthetic oligonucleotide
cagggcggtacacaggacaatcgcgtagtt

SEQ ID NO: 20321 - DNA, 30 bp, Artificial Sequence
  Synthetic oligonucleotide
gtaaggaggcgatatgtaaggagacaggtt

SEQ ID NO: 20322 - DNA, 30 bp, Artificial Sequence
  Synthetic oligonucleotide
cagggcgcaaaagtaccaaaagtgccggtt

SEQ ID NO: 20323 - DNA, 30 bp, Artificial Sequence
  Synthetic oligonucleotide
atggaatgtgaagggcacatcagaagggtt

SEQ ID NO: 20324 - DNA, 30 bp, Artificial Sequence
  Synthetic oligonucleotide
tcgagacaccaagactcgcggagtgatgtt

SEQ ID NO: 20325 - DNA, 30 bp, Artificial Sequence
  Synthetic oligonucleotide
tcagtccagatgcttaaggcgaagagtgtt

SEQ ID NO: 20326 - DNA, 30 bp, Artificial Sequence
  Synthetic oligonucleotide
gcaggtaggagagggagaactgcgttattt

SEQ ID NO: 20327 - DNA, 30 bp, Artificial Sequence
  Synthetic oligonucleotide
cgtcgaagcggccggaacatgaaagagttt

SEQ ID NO: 20328 - DNA, 30 bp, Artificial Sequence
  Synthetic oligonucleotide
ctagaccaagacccgtatggcggtaaaaaa

SEQ ID NO: 20329 - DNA, 30 bp, Artificial Sequence
  Synthetic oligonucleotide
agagcaagagagtacaggagaacggaaaaa

SEQ ID NO: 20330 - DNA, 30 bp, Artificial Sequence
  Synthetic oligonucleotide
tcaagtaaggaggggggtcatggggaaaaa

SEQ ID NO: 20331 - DNA, 30 bp, Artificial Sequence
  Synthetic oligonucleotide
gcgcgtagtctacaagcggacatcacaaaa

SEQ ID NO: 20332 - DNA, 30 bp, Artificial Sequence
  Synthetic oligonucleotide
attcgagccactagggcaatatcagtaaaa

SEQ ID NO: 20333 - DNA, 30 bp, Artificial Sequence
  Synthetic oligonucleotide
atgcggagcagcaagcatacagaaaacaaa

SEQ ID NO: 20334 - DNA, 30 bp, Artificial Sequence
  Synthetic oligonucleotide
cgagcagcggcctaaaagcagttccacaaa

SEQ ID NO: 20335 - DNA, 30 bp, Artificial Sequence
  Synthetic oligonucleotide
acggcccgagcgagaggttaagttgacaaa

SEQ ID NO: 20336 - DNA, 30 bp, Artificial Sequence
  Synthetic oligonucleotide
aggacgaatcagtggttgaagccggccaaa

SEQ ID NO: 20337 - DNA, 30 bp, Artificial Sequence
  Synthetic oligonucleotide
acgggactcgagcagatcagattatccaaa

SEQ ID NO: 20338 - DNA, 30 bp, Artificial Sequence
  Synthetic oligonucleotide
cgggtcaggggggtgcgagtactactcaaa

SEQ ID NO: 20339 - DNA, 30 bp, Artificial Sequence
  Synthetic oligonucleotide
acaccaaatgcaatacgccaagacaagaaa

SEQ ID NO: 20340 - DNA, 30 bp, Artificial Sequence
  Synthetic oligonucleotide
ccgaacaaaagggtcagacgaaaccagaaa

SEQ ID NO: 20341 - DNA, 30 bp, Artificial Sequence
  Synthetic oligonucleotide
caatcggcgaggctcaggcacgaccagaaa

SEQ ID NO: 20342 - DNA, 30 bp, Artificial Sequence
  Synthetic oligonucleotide
ggcaagctaggaaaagcccccaaatggaaa

SEQ ID NO: 20343 - DNA, 30 bp, Artificial Sequence
  Synthetic oligonucleotide
cgagtaaggagctcccactctcttctgaaa

SEQ ID NO: 20344 - DNA, 30 bp, Artificial Sequence
  Synthetic oligonucleotide
ttggggaaacggtccaagcagggtactaaa

SEQ ID NO: 20345 - DNA, 30 bp, Artificial Sequence
  Synthetic oligonucleotide
tcaattggaaagagctctaggaaaggtaaa

SEQ ID NO: 20346 - DNA, 30 bp, Artificial Sequence
  Synthetic oligonucleotide
ccttaaagcaacgacaggtggcacaaacaa

SEQ ID NO: 20347 - DNA, 30 bp, Artificial Sequence
  Synthetic oligonucleotide
cgggacgtattgtagacaggttcatcacaa

SEQ ID NO: 20348 - DNA, 30 bp, Artificial Sequence
  Synthetic oligonucleotide
caatacatagacacggaatctgcaagacaa

SEQ ID NO: 20349 - DNA, 30 bp, Artificial Sequence
  Synthetic oligonucleotide
atcaaagagtgggaaagcggggtgatacaa

SEQ ID NO: 20350 - DNA, 30 bp, Artificial Sequence
  Synthetic oligonucleotide
gatcaccaggatcaaactagtcatctacaa

SEQ ID NO: 20351 - DNA, 30 bp, Artificial Sequence
  Synthetic oligonucleotide
agactcactaagcgacaatctacgagccaa

SEQ ID NO: 20352 - DNA, 30 bp, Artificial Sequence
  Synthetic oligonucleotide
acctgcggaggtgaacggcaaaatagccaa

SEQ ID NO: 20353 - DNA, 30 bp, Artificial Sequence
  Synthetic oligonucleotide
cggtgaacgccggccatggtaataaagcaa

SEQ ID NO: 20354 - DNA, 30 bp, Artificial Sequence
  Synthetic oligonucleotide
cgaggtaagaacgtgtaggcaaaagcgcaa

SEQ ID NO: 20355 - DNA, 30 bp, Artificial Sequence
  Synthetic oligonucleotide
ggcaagactgaggtgcgagaaacgtggcaa

SEQ ID NO: 20356 - DNA, 31 bp, Artificial Sequence
  Synthetic oligonucleotide
ccggctagtgctaaaacgaagagacatgcaa

SEQ ID NO: 20357 - DNA, 30 bp, Artificial Sequence
  Synthetic oligonucleotide
cgtatcgaagatccatgtagttgagtgcaa

SEQ ID NO: 20358 - DNA, 30 bp, Artificial Sequence
  Synthetic oligonucleotide
agtgggtgacttgtggtgaaagaagatcaa

SEQ ID NO: 20359 - DNA, 30 bp, Artificial Sequence
  Synthetic oligonucleotide
gctacggtaccgcaatcaagcacagatcaa

SEQ ID NO: 20360 - DNA, 30 bp, Artificial Sequence
  Synthetic oligonucleotide
caccgctcaaaggagaatgggcgttatcaa

SEQ ID NO: 20361 - DNA, 30 bp, Artificial Sequence
  Synthetic oligonucleotide
attacaaatgggggaccagtacgggaagaa

SEQ ID NO: 20362 - DNA, 30 bp, Artificial Sequence
  Synthetic oligonucleotide
aagggacacagggggagatagaatgaagaa

SEQ ID NO: 20363 - DNA, 30 bp, Artificial Sequence
  Synthetic oligonucleotide
tgagaatggtggaacaagttgagagcagaa

SEQ ID NO: 20364 - DNA, 30 bp, Artificial Sequence
  Synthetic oligonucleotide
tatcacagaaaggttgtagaccaatcagaa

SEQ ID NO: 20365 - DNA, 30 bp, Artificial Sequence
  Synthetic oligonucleotide
cggggcagataagccggcaaaccgcgagaa

SEQ ID NO: 20366 - DNA, 30 bp, Artificial Sequence
  Synthetic oligonucleotide
aggactcggcaaccaaaccgacggcgagaa

SEQ ID NO: 20367 - DNA, 30 bp, Artificial Sequence
  Synthetic oligonucleotide
gtcactgataggacagcctaaggaggagaa

SEQ ID NO: 20368 - DNA, 30 bp, Artificial Sequence
  Synthetic oligonucleotide
gcacgccgtgggggaaaagtagttggagaa

SEQ ID NO: 20369 - DNA, 30 bp, Artificial Sequence
  Synthetic oligonucleotide
ggtaaccggctcaagtaagacatgtgagaa

SEQ ID NO: 20370 - DNA, 30 bp, Artificial Sequence
  Synthetic oligonucleotide
acacaatatgaatcgactgaaggacacgaa

SEQ ID NO: 20371 - DNA, 30 bp, Artificial Sequence
  Synthetic oligonucleotide
cacaggaggcgtcgacgcataaattacgaa

SEQ ID NO: 20372 - DNA, 30 bp, Artificial Sequence
  Synthetic oligonucleotide
tcacaactgacaagagtagggacttccgaa

SEQ ID NO: 20373 - DNA, 31 bp, Artificial Sequence
  Synthetic oligonucleotide
agggtaaggactcatgacaatttagggcgaa

SEQ ID NO: 20374 - DNA, 30 bp, Artificial Sequence
  Synthetic oligonucleotide
ttgtatggaacaaagacaccaacgatcgaa

SEQ ID NO: 20375 - DNA, 30 bp, Artificial Sequence
  Synthetic oligonucleotide
cggtgcagagtagtacgtaaaggactcgaa

SEQ ID NO: 20376 - DNA, 30 bp, Artificial Sequence
  Synthetic oligonucleotide
gccgaaatcacatgcaaccggcccgtcgaa

SEQ ID NO: 20377 - DNA, 30 bp, Artificial Sequence
  Synthetic oligonucleotide
catagggtgtgcgagcgaggcacgaaggaa

SEQ ID NO: 20378 - DNA, 30 bp, Artificial Sequence
  Synthetic oligonucleotide
cgcccacagctggcaacggcaatgccggaa

SEQ ID NO: 20379 - DNA, 30 bp, Artificial Sequence
  Synthetic oligonucleotide
ccgtgtggccgaggaaaacttgggtcggaa

SEQ ID NO: 20380 - DNA, 30 bp, Artificial Sequence
  Synthetic oligonucleotide
gatggtaaaccatgggcccaaaaacgggaa

SEQ ID NO: 20381 - DNA, 30 bp, Artificial Sequence
  Synthetic oligonucleotide
atgagaccgtatacatgtgatccaggggaa

SEQ ID NO: 20382 - DNA, 30 bp, Artificial Sequence
  Synthetic oligonucleotide
atcggagggggagtgtaaattggagtggaa

SEQ ID NO: 20383 - DNA, 30 bp, Artificial Sequence
  Synthetic oligonucleotide
ctaacacaaagttatagagaaaaggatgaa

SEQ ID NO: 20384 - DNA, 30 bp, Artificial Sequence
  Synthetic oligonucleotide
aaacacaaggtaggtgaagggagtgctgaa

SEQ ID NO: 20385 - DNA, 30 bp, Artificial Sequence
  Synthetic oligonucleotide
acggataaggtactgaagaacaaacgtgaa

SEQ ID NO: 20386 - DNA, 30 bp, Artificial Sequence
  Synthetic oligonucleotide
taaaggggggcagacctgtaattgggtgaa

SEQ ID NO: 20387 - DNA, 30 bp, Artificial Sequence
  Synthetic oligonucleotide
ggaaggggggcgtcaaagaattcgtttgaa

SEQ ID NO: 20388 - DNA, 30 bp, Artificial Sequence
  Synthetic oligonucleotide
caggtgaataatcacaaaggcaggacataa

SEQ ID NO: 20389 - DNA, 30 bp, Artificial Sequence
  Synthetic oligonucleotide
taggcgtcaacagtgccaaagtagctataa

SEQ ID NO: 20390 - DNA, 30 bp, Artificial Sequence
  Synthetic oligonucleotide
cgaaagcaccgggtccaaacgtaagactaa

SEQ ID NO: 20391 - DNA, 30 bp, Artificial Sequence
  Synthetic oligonucleotide
cttgggagggctagaaaacaggtggactaa

SEQ ID NO: 20392 - DNA, 30 bp, Artificial Sequence
  Synthetic oligonucleotide
ggatgccgaatgtaggaaacgtacagctaa

SEQ ID NO: 20393 - DNA, 30 bp, Artificial Sequence
  Synthetic oligonucleotide
ctaagaccaactaaatacataagtgcgtaa

SEQ ID NO: 20394 - DNA, 29 bp, Artificial Sequence
  Synthetic oligonucleotide
tgcttggacaccacaaacgaaaatcgtaa

SEQ ID NO: 20395 - DNA, 30 bp, Artificial Sequence
  Synthetic oligonucleotide
agattggacctagctgaagggtggaggtaa

SEQ ID NO: 20396 - DNA, 30 bp, Artificial Sequence
  Synthetic oligonucleotide
ccgcaaaggtagtcgtaggagtcatggtaa

SEQ ID NO: 20397 - DNA, 30 bp, Artificial Sequence
  Synthetic oligonucleotide
tcggtgcacgaaaactcaacgccggattaa

SEQ ID NO: 20398 - DNA, 30 bp, Artificial Sequence
  Synthetic oligonucleotide
gggaaagaaaagaatgaccatagccgttaa

SEQ ID NO: 20399 - DNA, 31 bp, Artificial Sequence
  Synthetic oligonucleotide
gctaggaggacgtggttgcaaaaagaaaaca

SEQ ID NO: 20400 - DNA, 30 bp, Artificial Sequence
  Synthetic oligonucleotide
atcctagaaccggtccaactcagagaaaca

SEQ ID NO: 20401 - DNA, 30 bp, Artificial Sequence
  Synthetic oligonucleotide
ctactacaaggcaaatgaagtacgtcaaca

SEQ ID NO: 20402 - DNA, 30 bp, Artificial Sequence
  Synthetic oligonucleotide
gatcggtcgccgacacccaatgcgtgaaca

SEQ ID NO: 20403 - DNA, 30 bp, Artificial Sequence
  Synthetic oligonucleotide
gcaggcggcagtcacgacgagagattaaca

SEQ ID NO: 20404 - DNA, 30 bp, Artificial Sequence
  Synthetic oligonucleotide
cggtacaaagtgcttgtagagagtcacaca

SEQ ID NO: 20405 - DNA, 30 bp, Artificial Sequence
  Synthetic oligonucleotide
gatcgacagaggggcttggcaaaagacaca

SEQ ID NO: 20406 - DNA, 30 bp, Artificial Sequence
  Synthetic oligonucleotide
acgtaaagtggctacgggctcaaagacaca

SEQ ID NO: 20407 - DNA, 30 bp, Artificial Sequence
  Synthetic oligonucleotide
acaaggatctcatagataatagaaaccaca

SEQ ID NO: 20408 - DNA, 30 bp, Artificial Sequence
  Synthetic oligonucleotide
ggtacaatgaattgagtgagccctcccaca

SEQ ID NO: 20409 - DNA, 30 bp, Artificial Sequence
  Synthetic oligonucleotide
agggtgggcttacagtagtgaggtcccaca

SEQ ID NO: 20410 - DNA, 30 bp, Artificial Sequence
  Synthetic oligonucleotide
gctcaacaaacatcaacggtaggcgtcaca

SEQ ID NO: 20411 - DNA, 30 bp, Artificial Sequence
  Synthetic oligonucleotide
ggtcaagttgcgataacataagtgaagaca

SEQ ID NO: 20412 - DNA, 30 bp, Artificial Sequence
  Synthetic oligonucleotide
atcgggctaagtgtgtgcgaggactagaca

SEQ ID NO: 20413 - DNA, 30 bp, Artificial Sequence
  Synthetic oligonucleotide
cctcataagacgggtagggagccaacgaca

SEQ ID NO: 20414 - DNA, 30 bp, Artificial Sequence
  Synthetic oligonucleotide
tccatagttcagagataatgagcatggaca

SEQ ID NO: 20415 - DNA, 30 bp, Artificial Sequence
  Synthetic oligonucleotide
aggaaggttagcaacattctagattggaca

SEQ ID NO: 20416 - DNA, 30 bp, Artificial Sequence
  Synthetic oligonucleotide
acgcaacggaccgaatcagaggcactgaca

SEQ ID NO: 20417 - DNA, 30 bp, Artificial Sequence
  Synthetic oligonucleotide
caacaagccgtaacacggaaaccgcctaca

SEQ ID NO: 20418 - DNA, 30 bp, Artificial Sequence
  Synthetic oligonucleotide
tcacagcggcatcacataatgcatggtaca

SEQ ID NO: 20419 - DNA, 30 bp, Artificial Sequence
  Synthetic oligonucleotide
cggtaacggttgcacacataatgaaaacca

SEQ ID NO: 20420 - DNA, 30 bp, Artificial Sequence
  Synthetic oligonucleotide
tcgttccagtctaagagtgagcgggaacca

SEQ ID NO: 20421 - DNA, 30 bp, Artificial Sequence
  Synthetic oligonucleotide
ggaaactaggggatacaaacgacaacacca

SEQ ID NO: 20422 - DNA, 30 bp, Artificial Sequence
  Synthetic oligonucleotide
gcgattcaacagatgagcatataccgacca

SEQ ID NO: 20423 - DNA, 30 bp, Artificial Sequence
  Synthetic oligonucleotide
tgcggaagcgggatcctcacagtctgacca

SEQ ID NO: 20424 - DNA, 30 bp, Artificial Sequence
  Synthetic oligonucleotide
aggtaagttcagaagttaatgtgggaccca

SEQ ID NO: 20425 - DNA, 30 bp, Artificial Sequence
  Synthetic oligonucleotide
agcggaaggttccgagggtagcgagtccca

SEQ ID NO: 20426 - DNA, 30 bp, Artificial Sequence
  Synthetic oligonucleotide
cgtacagtttagcagtcagattaagcgcca

SEQ ID NO: 20427 - DNA, 30 bp, Artificial Sequence
  Synthetic oligonucleotide
acgtatcagacgaaagcctcctcagcgcca

SEQ ID NO: 20428 - DNA, 30 bp, Artificial Sequence
  Synthetic oligonucleotide
ccaggaacaatggtactgatcccgccagca

SEQ ID NO: 20429 - DNA, 30 bp, Artificial Sequence
  Synthetic oligonucleotide
tgagacagtggaaaggagtcacactcagca

SEQ ID NO: 20430 - DNA, 30 bp, Artificial Sequence
  Synthetic oligonucleotide
aggcagcctcatcattgagtaaacagagca

SEQ ID NO: 20431 - DNA, 30 bp, Artificial Sequence
  Synthetic oligonucleotide
acgtgccataaattaatttaagtgtgagca

SEQ ID NO: 20432 - DNA, 30 bp, Artificial Sequence
  Synthetic oligonucleotide
tatcagggcgaaggtgtggttaagtgcgca

SEQ ID NO: 20433 - DNA, 30 bp, Artificial Sequence
  Synthetic oligonucleotide
gggcgacaaaggtcccttcagatgctcgca

SEQ ID NO: 20434 - DNA, 30 bp, Artificial Sequence
  Synthetic oligonucleotide
acagaaagaaatcgcatcgcctgcgtcgca

SEQ ID NO: 20435 - DNA, 30 bp, Artificial Sequence
  Synthetic oligonucleotide
atcagtgggggtacgagagaatacaaggca

SEQ ID NO: 20436 - DNA, 30 bp, Artificial Sequence
  Synthetic oligonucleotide
tacggaactgggtgatgtcagagcaaggca

SEQ ID NO: 20437 - DNA, 30 bp, Artificial Sequence
  Synthetic oligonucleotide
tggagctgatgtgcagaaggagaacaggca

SEQ ID NO: 20438 - DNA, 30 bp, Artificial Sequence
  Synthetic oligonucleotide
cgcgccggaagggtattgtagccgaatgca

SEQ ID NO: 20439 - DNA, 30 bp, Artificial Sequence
  Synthetic oligonucleotide
acggcaaaattcccatataacttaggtgca

SEQ ID NO: 20440 - DNA, 30 bp, Artificial Sequence
  Synthetic oligonucleotide
aggcatagcggaactccgaagtagcaatca

SEQ ID NO: 20441 - DNA, 30 bp, Artificial Sequence
  Synthetic oligonucleotide
cgggaaaagtacttaccggagcagccatca

SEQ ID NO: 20442 - DNA, 30 bp, Artificial Sequence
  Synthetic oligonucleotide
agcgaatccctcgtaccagtagaaagatca

SEQ ID NO: 20443 - DNA, 30 bp, Artificial Sequence
  Synthetic oligonucleotide
caatctagggcaaacataacagtaagatca

SEQ ID NO: 20444 - DNA, 30 bp, Artificial Sequence
  Synthetic oligonucleotide
agggaacatgcgtattgaatctaagtatca

SEQ ID NO: 20445 - DNA, 30 bp, Artificial Sequence
  Synthetic oligonucleotide
aagatgggtgcggtactcgagcgggactca

SEQ ID NO: 20446 - DNA, 30 bp, Artificial Sequence
  Synthetic oligonucleotide
gcggaatgccagaggtgggcactgtcctca

SEQ ID NO: 20447 - DNA, 30 bp, Artificial Sequence
  Synthetic oligonucleotide
atgcaggggcgaatatcggtcatgacgtca

SEQ ID NO: 20448 - DNA, 30 bp, Artificial Sequence
  Synthetic oligonucleotide
accgaccagcaagggaatttggggccgtca

SEQ ID NO: 20449 - DNA, 30 bp, Artificial Sequence
  Synthetic oligonucleotide
cggtcgaaacgtcgctgcgatctgcggtca

SEQ ID NO: 20450 - DNA, 30 bp, Artificial Sequence
  Synthetic oligonucleotide
gaatgaggaaggttaaatcactcgtggtca

SEQ ID NO: 20451 - DNA, 30 bp, Artificial Sequence
  Synthetic oligonucleotide
aacgtgaggggtgacgagaggttggtgtca

SEQ ID NO: 20452 - DNA, 30 bp, Artificial Sequence
  Synthetic oligonucleotide
catcgaggaagacattatggcagtgtgtca

SEQ ID NO: 20453 - DNA, 30 bp, Artificial Sequence
  Synthetic oligonucleotide
cgaaagatgcgatacggtaatggcaattca

SEQ ID NO: 20454 - DNA, 30 bp, Artificial Sequence
  Synthetic oligonucleotide
gaggtgttccagagagaagtgaccacttca

SEQ ID NO: 20455 - DNA, 30 bp, Artificial Sequence
  Synthetic oligonucleotide
agggtcgggtgaacccactcaaccaaaaga

SEQ ID NO: 20456 - DNA, 30 bp, Artificial Sequence
  Synthetic oligonucleotide
catggtcgccagttctctaacgtgaaaaga

SEQ ID NO: 20457 - DNA, 30 bp, Artificial Sequence
  Synthetic oligonucleotide
agcggatggggaatagagcatatataaaga

SEQ ID NO: 20458 - DNA, 30 bp, Artificial Sequence
  Synthetic oligonucleotide
ggcacagtgcgggtgcgtgttaggtaaaga

SEQ ID NO: 20459 - DNA, 30 bp, Artificial Sequence
  Synthetic oligonucleotide
cgcaccgtaccccgagatactaaaacaaga

SEQ ID NO: 20460 - DNA, 30 bp, Artificial Sequence
  Synthetic oligonucleotide
ggacgaaggggcaccctaaactggacaaga

SEQ ID NO: 20461 - DNA, 30 bp, Artificial Sequence
  Synthetic oligonucleotide
acgagggcggtccaatgatcaactacaaga

SEQ ID NO: 20462 - DNA, 30 bp, Artificial Sequence
  Synthetic oligonucleotide
ttaggactaaaggaaaaaccgagaccaaga

SEQ ID NO: 20463 - DNA, 30 bp, Artificial Sequence
  Synthetic oligonucleotide
tgtaggaagtggcactcgagcacagcaaga

SEQ ID NO: 20464 - DNA, 30 bp, Artificial Sequence
  Synthetic oligonucleotide
acatcagacccatttccaacagaatcaaga

SEQ ID NO: 20465 - DNA, 30 bp, Artificial Sequence
  Synthetic oligonucleotide
gcagaagcggggggattagcttacggaaga

SEQ ID NO: 20466 - DNA, 30 bp, Artificial Sequence
  Synthetic oligonucleotide
accgccaaactggagcggcggatgtgaaga

SEQ ID NO: 20467 - DNA, 30 bp, Artificial Sequence
  Synthetic oligonucleotide
ctccgaggcgtatgggccaaccacctaaga

SEQ ID NO: 20468 - DNA, 30 bp, Artificial Sequence
  Synthetic oligonucleotide
actgcaaaagggtacattaagagcaacaga

SEQ ID NO: 20469 - DNA, 30 bp, Artificial Sequence
  Synthetic oligonucleotide
tacaggaataacgtaccgacggataacaga

SEQ ID NO: 20470 - DNA, 30 bp, Artificial Sequence
  Synthetic oligonucleotide
ggtgctcaggtaagtcacgaggcccacaga

SEQ ID NO: 20471 - DNA, 30 bp, Artificial Sequence
  Synthetic oligonucleotide
cgtaaccattgtcgaccgggacaatacaga

SEQ ID NO: 20472 - DNA, 30 bp, Artificial Sequence
  Synthetic oligonucleotide
ccacggtattaaacgccaggccacgccaga

SEQ ID NO: 20473 - DNA, 30 bp, Artificial Sequence
  Synthetic oligonucleotide
acggttggcattattgctagcaaggccaga

SEQ ID NO: 20474 - DNA, 30 bp, Artificial Sequence
  Synthetic oligonucleotide
gtaagtcactagggtgcacagggggccaga

SEQ ID NO: 20475 - DNA, 31 bp, Artificial Sequence
  Synthetic oligonucleotide
cggcctaacaaaattaattatctgatccaga

SEQ ID NO: 20476 - DNA, 30 bp, Artificial Sequence
  Synthetic oligonucleotide
gaaaaaagagtcgtcgtgagcacctccaga

SEQ ID NO: 20477 - DNA, 31 bp, Artificial Sequence
  Synthetic oligonucleotide
tggcaacggtacgagttactgtacgtccaga

SEQ ID NO: 20478 - DNA, 30 bp, Artificial Sequence
  Synthetic oligonucleotide
tcgtggtctcaaaataggggctgagtcaga

SEQ ID NO: 20479 - DNA, 30 bp, Artificial Sequence
  Synthetic oligonucleotide
acgggagagttcagttggagattgaagaga

SEQ ID NO: 20480 - DNA, 30 bp, Artificial Sequence
  Synthetic oligonucleotide
gaagcgggctgagcgtcagcgatacagaga

SEQ ID NO: 20481 - DNA, 30 bp, Artificial Sequence
  Synthetic oligonucleotide
gactaggagggagttgaaggagaaacgaga

SEQ ID NO: 20482 - DNA, 30 bp, Artificial Sequence
  Synthetic oligonucleotide
atctggaccgagagaacactaggcacgaga

SEQ ID NO: 20483 - DNA, 30 bp, Artificial Sequence
  Synthetic oligonucleotide
gtaaacactaatcatgctaggggagggaga

SEQ ID NO: 20484 - DNA, 30 bp, Artificial Sequence
  Synthetic oligonucleotide
gcacagagggacagtctcactgctgggaga

SEQ ID NO: 20485 - DNA, 30 bp, Artificial Sequence
  Synthetic oligonucleotide
acctgaacagcattagactaacgattgaga

SEQ ID NO: 20486 - DNA, 30 bp, Artificial Sequence
  Synthetic oligonucleotide
aaggccttgtccgcgctatgccagagtaga

SEQ ID NO: 20487 - DNA, 30 bp, Artificial Sequence
  Synthetic oligonucleotide
ggtgcaacacgacttgaattaaaacgtaga

SEQ ID NO: 20488 - DNA, 30 bp, Artificial Sequence
  Synthetic oligonucleotide
ctgccgtagctctagggccagagaggacga

SEQ ID NO: 20489 - DNA, 30 bp, Artificial Sequence
  Synthetic oligonucleotide
tcgtataaccaagggacatcagcactacga

SEQ ID NO: 20490 - DNA, 29 bp, Artificial Sequence
  Synthetic oligonucleotide
tgcgacccgcgggaagatggggcgtacga

SEQ ID NO: 20491 - DNA, 30 bp, Artificial Sequence
  Synthetic oligonucleotide
cagataagatggttatggcaagacttacga

SEQ ID NO: 20492 - DNA, 30 bp, Artificial Sequence
  Synthetic oligonucleotide
ctgacagggcatggatgaataggctaccga

SEQ ID NO: 20493 - DNA, 30 bp, Artificial Sequence
  Synthetic oligonucleotide
tcatcaccaattagaggagctgcaccccga

SEQ ID NO: 20494 - DNA, 30 bp, Artificial Sequence
  Synthetic oligonucleotide
gagagggataggtaaactgctgtgtcccga

SEQ ID NO: 20495 - DNA, 31 bp, Artificial Sequence
  Synthetic oligonucleotide
cggacacagagttggaagtacaagaggccga

SEQ ID NO: 20496 - DNA, 30 bp, Artificial Sequence
  Synthetic oligonucleotide
gtaggaggtaggccaagactgatcctgcga

SEQ ID NO: 20497 - DNA, 30 bp, Artificial Sequence
  Synthetic oligonucleotide
ctacggatgggcacttgggtgaatactcga

SEQ ID NO: 20498 - DNA, 30 bp, Artificial Sequence
  Synthetic oligonucleotide
ctggaaatagtagaaggggcccgtgctcga

SEQ ID NO: 20499 - DNA, 30 bp, Artificial Sequence
  Synthetic oligonucleotide
aggtacaaaatcggctaagcgacatttcga

SEQ ID NO: 20500 - DNA, 30 bp, Artificial Sequence
  Synthetic oligonucleotide
cgatggtgatacgagcctgcaaaggaagga

SEQ ID NO: 20501 - DNA, 30 bp, Artificial Sequence
  Synthetic oligonucleotide
catggtgtagtgaaatcagatattacagga

SEQ ID NO: 20502 - DNA, 30 bp, Artificial Sequence
  Synthetic oligonucleotide
acgattactaagagagaatccagacgagga

SEQ ID NO: 20503 - DNA, 30 bp, Artificial Sequence
  Synthetic oligonucleotide
cgtccaagctcatctcatcaggccggagga

SEQ ID NO: 20504 - DNA, 30 bp, Artificial Sequence
  Synthetic oligonucleotide
tcgagtgcaataatgataaagactggagga

SEQ ID NO: 20505 - DNA, 30 bp, Artificial Sequence
  Synthetic oligonucleotide
tcgcggtaaggtcatgctaaagctggagga

SEQ ID NO: 20506 - DNA, 30 bp, Artificial Sequence
  Synthetic oligonucleotide
ccgacacgaggtggtcgttaagaatgagga

SEQ ID NO: 20507 - DNA, 30 bp, Artificial Sequence
  Synthetic oligonucleotide
ggtcgggagggaaactgagctaagctagga

SEQ ID NO: 20508 - DNA, 30 bp, Artificial Sequence
  Synthetic oligonucleotide
tgacgagacatgccggcgtaaggggtagga

SEQ ID NO: 20509 - DNA, 30 bp, Artificial Sequence
  Synthetic oligonucleotide
ggtacggaacgtagaattaaagaacccgga

SEQ ID NO: 20510 - DNA, 30 bp, Artificial Sequence
  Synthetic oligonucleotide
tgataagctaatgggagaaatgggatcgga

SEQ ID NO: 20511 - DNA, 30 bp, Artificial Sequence
  Synthetic oligonucleotide
tggtctagaatccaagtgcctaagaaggga

SEQ ID NO: 20512 - DNA, 30 bp, Artificial Sequence
  Synthetic oligonucleotide
aagcacattagctggaagcgagcggaggga

SEQ ID NO: 20513 - DNA, 30 bp, Artificial Sequence
  Synthetic oligonucleotide
gcgcaagtagggagtataaaaaaaccggga

SEQ ID NO: 20514 - DNA, 29 bp, Artificial Sequence
  Synthetic oligonucleotide
gggacagtgcaagctcatccgctaatgga

SEQ ID NO: 20515 - DNA, 30 bp, Artificial Sequence
  Synthetic oligonucleotide
ggggagagacatgtgtatgtgatacgtgga

SEQ ID NO: 20516 - DNA, 30 bp, Artificial Sequence
  Synthetic oligonucleotide
caaactcgactatggagaagccgagaatga

SEQ ID NO: 20517 - DNA, 30 bp, Artificial Sequence
  Synthetic oligonucleotide
caatcgtgggcaggtcacaagggggaatga

SEQ ID NO: 20518 - DNA, 30 bp, Artificial Sequence
  Synthetic oligonucleotide
cgacggtatgatgaagcgacaaggggatga

SEQ ID NO: 20519 - DNA, 30 bp, Artificial Sequence
  Synthetic oligonucleotide
tcgagaaaggcggtgaagagaagttgatga

SEQ ID NO: 20520 - DNA, 30 bp, Artificial Sequence
  Synthetic oligonucleotide
acgacactccgctggcaaacgatactatga

SEQ ID NO: 20521 - DNA, 30 bp, Artificial Sequence
  Synthetic oligonucleotide
aggtaccatctgagcgttgaacgacagtga

SEQ ID NO: 20522 - DNA, 30 bp, Artificial Sequence
  Synthetic oligonucleotide
gcggggggaggtgaaagcattgatgcgtga

SEQ ID NO: 20523 - DNA, 30 bp, Artificial Sequence
  Synthetic oligonucleotide
ggcatataggctgaggaaaggagtgcgtga

SEQ ID NO: 20524 - DNA, 30 bp, Artificial Sequence
  Synthetic oligonucleotide
cgctggaaggaaaaatagaattggtggtga

SEQ ID NO: 20525 - DNA, 30 bp, Artificial Sequence
  Synthetic oligonucleotide
gggcagagtatgcgtacgaaccgacattga

SEQ ID NO: 20526 - DNA, 30 bp, Artificial Sequence
  Synthetic oligonucleotide
cggaggggacatgggtttcatgcagattga

SEQ ID NO: 20527 - DNA, 30 bp, Artificial Sequence
  Synthetic oligonucleotide
ctgaaactacttaagagcgataggcgttga

SEQ ID NO: 20528 - DNA, 30 bp, Artificial Sequence
  Synthetic oligonucleotide
gtcgtgcaccggaaagcgcatggtgaaata

SEQ ID NO: 20529 - DNA, 30 bp, Artificial Sequence
  Synthetic oligonucleotide
ggcaaaggtagatagcgtgcaggatcaata

SEQ ID NO: 20530 - DNA, 30 bp, Artificial Sequence
  Synthetic oligonucleotide
agtcgtacgtaaaagtaactccggataata

SEQ ID NO: 20531 - DNA, 30 bp, Artificial Sequence
  Synthetic oligonucleotide
cggtaaggaaacaacggactattactaata

SEQ ID NO: 20532 - DNA, 30 bp, Artificial Sequence
  Synthetic oligonucleotide
gaaggccggacgaaatcctaacccgccata

SEQ ID NO: 20533 - DNA, 30 bp, Artificial Sequence
  Synthetic oligonucleotide
caaataaaggaagagttagccacgcgcata

SEQ ID NO: 20534 - DNA, 30 bp, Artificial Sequence
  Synthetic oligonucleotide
cgaaggtttacgagagcgccagaggtcata

SEQ ID NO: 20535 - DNA, 30 bp, Artificial Sequence
  Synthetic oligonucleotide
gcgggactgttcaaagcaaacgacaagata

SEQ ID NO: 20536 - DNA, 30 bp, Artificial Sequence
  Synthetic oligonucleotide
gcttggaaaggcgtatagaaagggtagata

SEQ ID NO: 20537 - DNA, 30 bp, Artificial Sequence
  Synthetic oligonucleotide
cgactgtaaataaatgaaagccttgcgata

SEQ ID NO: 20538 - DNA, 30 bp, Artificial Sequence
  Synthetic oligonucleotide
gtcgggaagcggtattatcgtctgcaacta

SEQ ID NO: 20539 - DNA, 30 bp, Artificial Sequence
  Synthetic oligonucleotide
cctgcaagagtaggacattgcgatatacta

SEQ ID NO: 20540 - DNA, 30 bp, Artificial Sequence
  Synthetic oligonucleotide
cctggagacagaggggaggaacgctagcta

SEQ ID NO: 20541 - DNA, 30 bp, Artificial Sequence
  Synthetic oligonucleotide
gtgagcggagaagcaagaaggagttcgcta

SEQ ID NO: 20542 - DNA, 30 bp, Artificial Sequence
  Synthetic oligonucleotide
agcggaacttgcagtggcgacacccatcta

SEQ ID NO: 20543 - DNA, 30 bp, Artificial Sequence
  Synthetic oligonucleotide
aaacggcaatagcggagagctaggcaagta

SEQ ID NO: 20544 - DNA, 30 bp, Artificial Sequence
  Synthetic oligonucleotide
cctatcagagtaaaaggaagctcggaagta

SEQ ID NO: 20545 - DNA, 30 bp, Artificial Sequence
  Synthetic oligonucleotide
tcagtgggggaggagggaacgtaatcagta

SEQ ID NO: 20546 - DNA, 30 bp, Artificial Sequence
  Synthetic oligonucleotide
tcttgaataggttgaaaaagactgagagta

SEQ ID NO: 20547 - DNA, 30 bp, Artificial Sequence
  Synthetic oligonucleotide
gcgaaaagcagtggcatctaatatagagta

SEQ ID NO: 20548 - DNA, 30 bp, Artificial Sequence
  Synthetic oligonucleotide
gtatggaagaggaggctaagacttagagta

SEQ ID NO: 20549 - DNA, 30 bp, Artificial Sequence
  Synthetic oligonucleotide
atggaggaagtcgtttggcgaggaatagta

SEQ ID NO: 20550 - DNA, 30 bp, Artificial Sequence
  Synthetic oligonucleotide
caagaccgtagggcgggcatattgaacgta

SEQ ID NO: 20551 - DNA, 30 bp, Artificial Sequence
  Synthetic oligonucleotide
ggtgggccacaagagacaatagtctacgta

SEQ ID NO: 20552 - DNA, 30 bp, Artificial Sequence
  Synthetic oligonucleotide
aggggcacgttcgtctggtggcggatcgta

SEQ ID NO: 20553 - DNA, 30 bp, Artificial Sequence
  Synthetic oligonucleotide
agaaggggtcagcgtcatgttagtctcgta

SEQ ID NO: 20554 - DNA, 30 bp, Artificial Sequence
  Synthetic oligonucleotide
ggacgaaaagggcgactacgaggcgcggta

SEQ ID NO: 20555 - DNA, 30 bp, Artificial Sequence
  Synthetic oligonucleotide
tcggacaaaggtgagtgcgtcaagcgggta

SEQ ID NO: 20556 - DNA, 30 bp, Artificial Sequence
  Synthetic oligonucleotide
atcgatagagaacagggtcggttgcgggta

SEQ ID NO: 20557 - DNA, 30 bp, Artificial Sequence
  Synthetic oligonucleotide
tcgagcagaagcactgagcgatagctggta

SEQ ID NO: 20558 - DNA, 30 bp, Artificial Sequence
  Synthetic oligonucleotide
aggaaagacagcgggaacagatctttggta

SEQ ID NO: 20559 - DNA, 31 bp, Artificial Sequence
  Synthetic oligonucleotide
tggtggagtgagtgcagactatgaaagtgta

SEQ ID NO: 20560 - DNA, 30 bp, Artificial Sequence
  Synthetic oligonucleotide
caattacgagtgaattagacagtacgtgta

SEQ ID NO: 20561 - DNA, 30 bp, Artificial Sequence
  Synthetic oligonucleotide
acgtgtccaaaagtgtgccagtcagaatta

SEQ ID NO: 20562 - DNA, 30 bp, Artificial Sequence
  Synthetic oligonucleotide
cgatgactaggtatgctacaaacggcatta

SEQ ID NO: 20563 - DNA, 30 bp, Artificial Sequence
  Synthetic oligonucleotide
agtacgtgatgaaagcagtgatcggcatta

SEQ ID NO: 20564 - DNA, 30 bp, Artificial Sequence
  Synthetic oligonucleotide
gagcactagagactggacagaggtgcatta

SEQ ID NO: 20565 - DNA, 30 bp, Artificial Sequence
  Synthetic oligonucleotide
ccaaaatccaaccttaccatgagcgactta

SEQ ID NO: 20566 - DNA, 30 bp, Artificial Sequence
  Synthetic oligonucleotide
aatggaagcgtggggagcggtatgtactta

SEQ ID NO: 20567 - DNA, 30 bp, Artificial Sequence
  Synthetic oligonucleotide
caggacaaagatgggtcgatcaacgcctta

SEQ ID NO: 20568 - DNA, 30 bp, Artificial Sequence
  Synthetic oligonucleotide
acgggagggatcatgccacaacgactctta

SEQ ID NO: 20569 - DNA, 30 bp, Artificial Sequence
  Synthetic oligonucleotide
caaagatagctacagtccaatatgccgtta

SEQ ID NO: 20570 - DNA, 30 bp, Artificial Sequence
  Synthetic oligonucleotide
gaggaaaaggctaaagtaacgatcaaaaac

SEQ ID NO: 20571 - DNA, 30 bp, Artificial Sequence
  Synthetic oligonucleotide
ctatgaccaaaggcgagggcacaagaaaac

SEQ ID NO: 20572 - DNA, 30 bp, Artificial Sequence
  Synthetic oligonucleotide
ggagtaccgaaaaccatctgaggggcaaac

SEQ ID NO: 20573 - DNA, 30 bp, Artificial Sequence
  Synthetic oligonucleotide
catagacatagtgaggcggtgggaggaaac

SEQ ID NO: 20574 - DNA, 30 bp, Artificial Sequence
  Synthetic oligonucleotide
tgaaaaaacacggataagggccggtacaac

SEQ ID NO: 20575 - DNA, 30 bp, Artificial Sequence
  Synthetic oligonucleotide
cgattgtcaggggcacgtgggatcatcaac

SEQ ID NO: 20576 - DNA, 30 bp, Artificial Sequence
  Synthetic oligonucleotide
cagtccgagcacaaacacccctacgtcaac

SEQ ID NO: 20577 - DNA, 30 bp, Artificial Sequence
  Synthetic oligonucleotide
aacgtcacagaaaataacagtacaaagaac

SEQ ID NO: 20578 - DNA, 30 bp, Artificial Sequence
  Synthetic oligonucleotide
ggagcgatgtcgggtagatgcggtgcgaac

SEQ ID NO: 20579 - DNA, 30 bp, Artificial Sequence
  Synthetic oligonucleotide
gggctgagacctaaccaaaactctgggaac

SEQ ID NO: 20580 - DNA, 30 bp, Artificial Sequence
  Synthetic oligonucleotide
aggatgtgcgaggccaaaagaattgggaac

SEQ ID NO: 20581 - DNA, 30 bp, Artificial Sequence
  Synthetic oligonucleotide
cagtcgattaataaggaaacaactactaac

SEQ ID NO: 20582 - DNA, 30 bp, Artificial Sequence
  Synthetic oligonucleotide
cagaggggcatggtgcgactatggtttaac

SEQ ID NO: 20583 - DNA, 30 bp, Artificial Sequence
  Synthetic oligonucleotide
taagggtatcaggaagagcgaatataacac

SEQ ID NO: 20584 - DNA, 30 bp, Artificial Sequence
  Synthetic oligonucleotide
atgagcgcgcgaagaaatacgcccacacac

SEQ ID NO: 20585 - DNA, 30 bp, Artificial Sequence
  Synthetic oligonucleotide
tcgagccaactatgatcgagatacacccac

SEQ ID NO: 20586 - DNA, 30 bp, Artificial Sequence
  Synthetic oligonucleotide
ggaacatgcaattagccagcttgaggccac

SEQ ID NO: 20587 - DNA, 30 bp, Artificial Sequence
  Synthetic oligonucleotide
tatacaacagactcgcgaacaaaacagcac

SEQ ID NO: 20588 - DNA, 30 bp, Artificial Sequence
  Synthetic oligonucleotide
acctagcgaagcactgtataattcgagcac

SEQ ID NO: 20589 - DNA, 30 bp, Artificial Sequence
  Synthetic oligonucleotide
tggcaacggtagcacgacgaggaagcgcac

SEQ ID NO: 20590 - DNA, 30 bp, Artificial Sequence
  Synthetic oligonucleotide
ggggagcccagtagtcacatcaacattcac

SEQ ID NO: 20591 - DNA, 30 bp, Artificial Sequence
  Synthetic oligonucleotide
agaacggtgtaggcgtgcccgatctttcac

SEQ ID NO: 20592 - DNA, 30 bp, Artificial Sequence
  Synthetic oligonucleotide
ggcggaccggtacgaacggcaaccaaagac

SEQ ID NO: 20593 - DNA, 30 bp, Artificial Sequence
  Synthetic oligonucleotide
cacgatgagagcccgaaagctcgacgagac

SEQ ID NO: 20594 - DNA, 30 bp, Artificial Sequence
  Synthetic oligonucleotide
caagcgtagtattcgtggaaaccgtgagac

SEQ ID NO: 20595 - DNA, 30 bp, Artificial Sequence
  Synthetic oligonucleotide
atgggcggaggatcaccagtgctgctagac

SEQ ID NO: 20596 - DNA, 30 bp, Artificial Sequence
  Synthetic oligonucleotide
cgggacaaaagtaaggatagaggatccgac

SEQ ID NO: 20597 - DNA, 30 bp, Artificial Sequence
  Synthetic oligonucleotide
atagctgaacggaagaacgccaatctcgac

SEQ ID NO: 20598 - DNA, 30 bp, Artificial Sequence
  Synthetic oligonucleotide
cgttatgagaagtgacagattccaacggac

SEQ ID NO: 20599 - DNA, 30 bp, Artificial Sequence
  Synthetic oligonucleotide
tgaacgaggggaaacgggaaatacacggac

SEQ ID NO: 20600 - DNA, 30 bp, Artificial Sequence
  Synthetic oligonucleotide
tacgtgaaagtaacgagttaaagcactgac

SEQ ID NO: 20601 - DNA, 30 bp, Artificial Sequence
  Synthetic oligonucleotide
gtacagggtactagtgtaaagaaccgtgac

SEQ ID NO: 20602 - DNA, 30 bp, Artificial Sequence
  Synthetic oligonucleotide
gccaggaagagcgagcatacgccctgtgac

SEQ ID NO: 20603 - DNA, 30 bp, Artificial Sequence
  Synthetic oligonucleotide
gggggagggggagaccgacaacgctgtgac

SEQ ID NO: 20604 - DNA, 30 bp, Artificial Sequence
  Synthetic oligonucleotide
aagcaaacgaatgaggcgagacggcttgac

SEQ ID NO: 20605 - DNA, 30 bp, Artificial Sequence
  Synthetic oligonucleotide
cgaccaaacgaagaaataagtccacaatac

SEQ ID NO: 20606 - DNA, 30 bp, Artificial Sequence
  Synthetic oligonucleotide
cgaaggataaatggagaagcggtgctatac

SEQ ID NO: 20607 - DNA, 30 bp, Artificial Sequence
  Synthetic oligonucleotide
tgaggacggcaagtggacttcgcgcactac

SEQ ID NO: 20608 - DNA, 30 bp, Artificial Sequence
  Synthetic oligonucleotide
agagcggggaaaggatatcgaaacgcctac

SEQ ID NO: 20609 - DNA, 31 bp, Artificial Sequence
  Synthetic oligonucleotide
ggcacaaacgagtcggatcatgttttgctac

SEQ ID NO: 20610 - DNA, 30 bp, Artificial Sequence
  Synthetic oligonucleotide
actgcacatggagagccctagagatcgtac

SEQ ID NO: 20611 - DNA, 30 bp, Artificial Sequence
  Synthetic oligonucleotide
gcgagacgaagagtagggggttccaggtac

SEQ ID NO: 20612 - DNA, 30 bp, Artificial Sequence
  Synthetic oligonucleotide
agtggcggtggaatgagcagaactaattac

SEQ ID NO: 20613 - DNA, 30 bp, Artificial Sequence
  Synthetic oligonucleotide
acacgagcgagatgacgtattattcaaacc

SEQ ID NO: 20614 - DNA, 30 bp, Artificial Sequence
  Synthetic oligonucleotide
tacaaacaggaccaccatgatagcgaaacc

SEQ ID NO: 20615 - DNA, 30 bp, Artificial Sequence
  Synthetic oligonucleotide
ggcgaagatagccagggtgcgcgaacaacc

SEQ ID NO: 20616 - DNA, 30 bp, Artificial Sequence
  Synthetic oligonucleotide
accgtccatgcgttgagggatagagcaacc

SEQ ID NO: 20617 - DNA, 30 bp, Artificial Sequence
  Synthetic oligonucleotide
acaagaagcccattaccggaacactacacc

SEQ ID NO: 20618 - DNA, 30 bp, Artificial Sequence
  Synthetic oligonucleotide
tataggcgaggtacgttcgagaagagcacc

SEQ ID NO: 20619 - DNA, 30 bp, Artificial Sequence
  Synthetic oligonucleotide
ccactcaagagtgggaagcacaagttcacc

SEQ ID NO: 20620 - DNA, 30 bp, Artificial Sequence
  Synthetic oligonucleotide
aggctgcgacaaggtatgcacgcgaagacc

SEQ ID NO: 20621 - DNA, 30 bp, Artificial Sequence
  Synthetic oligonucleotide
aagatcgagtaagattaggagttaaggacc

SEQ ID NO: 20622 - DNA, 30 bp, Artificial Sequence
  Synthetic oligonucleotide
atgaacgcgattggcgccgaagtgaggacc

SEQ ID NO: 20623 - DNA, 30 bp, Artificial Sequence
  Synthetic oligonucleotide
cgtgggacaagataagtcgtactagctacc

SEQ ID NO: 20624 - DNA, 30 bp, Artificial Sequence
  Synthetic oligonucleotide
tattgaaaaacaaccaaacccaggagtacc

SEQ ID NO: 20625 - DNA, 30 bp, Artificial Sequence
  Synthetic oligonucleotide
gcggagaaaaacagaatattactcgttacc

SEQ ID NO: 20626 - DNA, 30 bp, Artificial Sequence
  Synthetic oligonucleotide
cacggagacgtggatggattgagaccaccc

SEQ ID NO: 20627 - DNA, 30 bp, Artificial Sequence
  Synthetic oligonucleotide
tgaacgatggccgagtccgaaaagcccccc

SEQ ID NO: 20628 - DNA, 30 bp, Artificial Sequence
  Synthetic oligonucleotide
tagcgcatcgaagaataaacgcgcatcccc

SEQ ID NO: 20629 - DNA, 30 bp, Artificial Sequence
  Synthetic oligonucleotide
cgagccccattaaccgtcaacttctagccc

SEQ ID NO: 20630 - DNA, 30 bp, Artificial Sequence
  Synthetic oligonucleotide
agggaaccggaggtaatatcgcgaaggccc

SEQ ID NO: 20631 - DNA, 30 bp, Artificial Sequence
  Synthetic oligonucleotide
tagactcgggagatatcaaaagtgaaagcc

SEQ ID NO: 20632 - DNA, 30 bp, Artificial Sequence
  Synthetic oligonucleotide
caacagagcagcattggcaggaggcaagcc

SEQ ID NO: 20633 - DNA, 30 bp, Artificial Sequence
  Synthetic oligonucleotide
gcgggggtaagactctaatgggtgtaagcc

SEQ ID NO: 20634 - DNA, 30 bp, Artificial Sequence
  Synthetic oligonucleotide
aggggcataaaaaagcacgccctgagagcc

SEQ ID NO: 20635 - DNA, 30 bp, Artificial Sequence
  Synthetic oligonucleotide
tggaaaaggttcaaacctagacagctagcc

SEQ ID NO: 20636 - DNA, 30 bp, Artificial Sequence
  Synthetic oligonucleotide
cgacgccacccaacaaaggagaaggccgcc

SEQ ID NO: 20637 - DNA, 30 bp, Artificial Sequence
  Synthetic oligonucleotide
cgtgcctggacacatccgaagaaactcgcc

SEQ ID NO: 20638 - DNA, 30 bp, Artificial Sequence
  Synthetic oligonucleotide
acgtgggcagggtcatcagatcttacggcc

SEQ ID NO: 20639 - DNA, 30 bp, Artificial Sequence
  Synthetic oligonucleotide
acgtgccgactacactgaacgatgatggcc

SEQ ID NO: 20640 - DNA, 30 bp, Artificial Sequence
  Synthetic oligonucleotide
caggtgtaaaaatactgaacaggggaatcc

SEQ ID NO: 20641 - DNA, 30 bp, Artificial Sequence
  Synthetic oligonucleotide
gggcaatcaggatgtacgagtggaggctcc

SEQ ID NO: 20642 - DNA, 30 bp, Artificial Sequence
  Synthetic oligonucleotide
cccaagcatggctaggaagatggcgcgtcc

SEQ ID NO: 20643 - DNA, 30 bp, Artificial Sequence
  Synthetic oligonucleotide
atggaaaatgccaaaaaaggggtgcggtcc

SEQ ID NO: 20644 - DNA, 30 bp, Artificial Sequence
  Synthetic oligonucleotide
tcgcagggaggcacagacaggccactaagc

SEQ ID NO: 20645 - DNA, 30 bp, Artificial Sequence
  Synthetic oligonucleotide
acaaggtgcccacgatcaaagaacgacagc

SEQ ID NO: 20646 - DNA, 30 bp, Artificial Sequence
  Synthetic oligonucleotide
acgccttaggcgcgaacaagtaggggcagc

SEQ ID NO: 20647 - DNA, 30 bp, Artificial Sequence
  Synthetic oligonucleotide
aggtggaaacgcaatcaatggatgctcagc

SEQ ID NO: 20648 - DNA, 30 bp, Artificial Sequence
  Synthetic oligonucleotide
cagacgttgatgagtctatagagggtcagc

SEQ ID NO: 20649 - DNA, 30 bp, Artificial Sequence
  Synthetic oligonucleotide
ggtcacagcatggactgatggagtgagagc

SEQ ID NO: 20650 - DNA, 30 bp, Artificial Sequence
  Synthetic oligonucleotide
ggtaacgaatcgagtgagtcattcgggagc

SEQ ID NO: 20651 - DNA, 30 bp, Artificial Sequence
  Synthetic oligonucleotide
tagtgagagcgcgagaccagcgggcatagc

SEQ ID NO: 20652 - DNA, 30 bp, Artificial Sequence
  Synthetic oligonucleotide
gcgaaactcgccacattggaaagtgatagc

SEQ ID NO: 20653 - DNA, 30 bp, Artificial Sequence
  Synthetic oligonucleotide
gcaaaagggcgacaagttacgtgctatagc

SEQ ID NO: 20654 - DNA, 30 bp, Artificial Sequence
  Synthetic oligonucleotide
tacgactgggatagggggatactaagtagc

SEQ ID NO: 20655 - DNA, 30 bp, Artificial Sequence
  Synthetic oligonucleotide
tccgatgagaatggctgcccacagagtagc

SEQ ID NO: 20656 - DNA, 30 bp, Artificial Sequence
  Synthetic oligonucleotide
cagagcgtcaaagactaagaatagagtagc

SEQ ID NO: 20657 - DNA, 30 bp, Artificial Sequence
  Synthetic oligonucleotide
aggaacatggctaaatggcgtccaggtagc

SEQ ID NO: 20658 - DNA, 30 bp, Artificial Sequence
  Synthetic oligonucleotide
cgagggaaagctgactagtgggattgtagc

SEQ ID NO: 20659 - DNA, 30 bp, Artificial Sequence
  Synthetic oligonucleotide
cgcatcaccacaatataacgagaggaacgc

SEQ ID NO: 20660 - DNA, 31 bp, Artificial Sequence
  Synthetic oligonucleotide
gcgtgaacaaagcatctgtcacaccacccgc

SEQ ID NO: 20661 - DNA, 30 bp, Artificial Sequence
  Synthetic oligonucleotide
cagggccggagatctgcggaatataagcgc

SEQ ID NO: 20662 - DNA, 30 bp, Artificial Sequence
  Synthetic oligonucleotide
ggcaatggaaatatatacctgattaaaggc

SEQ ID NO: 20663 - DNA, 30 bp, Artificial Sequence
  Synthetic oligonucleotide
agtggaacgactccgggacatcccacaggc

SEQ ID NO: 20664 - DNA, 30 bp, Artificial Sequence
  Synthetic oligonucleotide
agcagagggcataaccgtcaggcatcaggc

SEQ ID NO: 20665 - DNA, 30 bp, Artificial Sequence
  Synthetic oligonucleotide
aaaggtgcggatcagcgaggtcaatgaggc

SEQ ID NO: 20666 - DNA, 30 bp, Artificial Sequence
  Synthetic oligonucleotide
caacaacggcgaaacgtcagctggataggc

SEQ ID NO: 20667 - DNA, 30 bp, Artificial Sequence
  Synthetic oligonucleotide
cgcggtgaggaaaagattgatgaccccggc

SEQ ID NO: 20668 - DNA, 30 bp, Artificial Sequence
  Synthetic oligonucleotide
ccatgaagggcacataaggtatactccggc

SEQ ID NO: 20669 - DNA, 30 bp, Artificial Sequence
  Synthetic oligonucleotide
agctagtcacaacatcgcaatgaacagggc

SEQ ID NO: 20670 - DNA, 30 bp, Artificial Sequence
  Synthetic oligonucleotide
tgtcaagggaccgttacagcgagatagggc

SEQ ID NO: 20671 - DNA, 30 bp, Artificial Sequence
  Synthetic oligonucleotide
aaacgaaggtattaaattggaggagcgggc

SEQ ID NO: 20672 - DNA, 30 bp, Artificial Sequence
  Synthetic oligonucleotide
ccataaagacgaaagttactaatatcgggc

SEQ ID NO: 20673 - DNA, 30 bp, Artificial Sequence
  Synthetic oligonucleotide
acacggaaaacagtctcacgggggtggggc

SEQ ID NO: 20674 - DNA, 30 bp, Artificial Sequence
  Synthetic oligonucleotide
aagaaacactttaacaatcacagagctggc

SEQ ID NO: 20675 - DNA, 30 bp, Artificial Sequence
  Synthetic oligonucleotide
gaaggggtacggggaacacgatcttcatgc

SEQ ID NO: 20676 - DNA, 30 bp, Artificial Sequence
  Synthetic oligonucleotide
gctcgtaaagaaccatagttaagaacctgc

SEQ ID NO: 20677 - DNA, 30 bp, Artificial Sequence
  Synthetic oligonucleotide
tgaagaacgaggcatagggctaacacgtgc

SEQ ID NO: 20678 - DNA, 30 bp, Artificial Sequence
  Synthetic oligonucleotide
cgcgatgacaagtgagaatcgtacggttgc

SEQ ID NO: 20679 - DNA, 30 bp, Artificial Sequence
  Synthetic oligonucleotide
cgagcgtctaatacgagtggagaagcaatc

SEQ ID NO: 20680 - DNA, 30 bp, Artificial Sequence
  Synthetic oligonucleotide
aaagggaaaagatgcagagcaccaggaatc

SEQ ID NO: 20681 - DNA, 30 bp, Artificial Sequence
  Synthetic oligonucleotide
acgtaaaacgatccaagctacgagataatc

SEQ ID NO: 20682 - DNA, 30 bp, Artificial Sequence
  Synthetic oligonucleotide
acactaaggccgagatggtacctgcacatc

SEQ ID NO: 20683 - DNA, 30 bp, Artificial Sequence
  Synthetic oligonucleotide
acggagggttggtggaagacgcacgagatc

SEQ ID NO: 20684 - DNA, 30 bp, Artificial Sequence
  Synthetic oligonucleotide
tcataatcacaggtgacgggtggactgatc

SEQ ID NO: 20685 - DNA, 30 bp, Artificial Sequence
  Synthetic oligonucleotide
caacggtaaattaatcaatagttagcactc

SEQ ID NO: 20686 - DNA, 30 bp, Artificial Sequence
  Synthetic oligonucleotide
tatgcggaacgggcacgacaactggcactc

SEQ ID NO: 20687 - DNA, 30 bp, Artificial Sequence
  Synthetic oligonucleotide
gggtggtaccctctgaacagataaggactc

SEQ ID NO: 20688 - DNA, 30 bp, Artificial Sequence
  Synthetic oligonucleotide
actagaggctaacatgtcggactaccgctc

SEQ ID NO: 20689 - DNA, 30 bp, Artificial Sequence
  Synthetic oligonucleotide
tcgatacacaccgcgaaagagacccatctc

SEQ ID NO: 20690 - DNA, 30 bp, Artificial Sequence
  Synthetic oligonucleotide
atgaccccaaataacagaaagggagctctc

SEQ ID NO: 20691 - DNA, 30 bp, Artificial Sequence
  Synthetic oligonucleotide
tgctcgacccacactaaaaccccaaaagtc

SEQ ID NO: 20692 - DNA, 30 bp, Artificial Sequence
  Synthetic oligonucleotide
cgaggccaaaagtaggagcagttagccgtc

SEQ ID NO: 20693 - DNA, 30 bp, Artificial Sequence
  Synthetic oligonucleotide
tcgaagcgagggagcatcagtactgccgtc

SEQ ID NO: 20694 - DNA, 30 bp, Artificial Sequence
  Synthetic oligonucleotide
agccggcgaccggaggaatgtactagcgtc

SEQ ID NO: 20695 - DNA, 30 bp, Artificial Sequence
  Synthetic oligonucleotide
acatgggttggaaagggctaaatggtcgtc

SEQ ID NO: 20696 - DNA, 30 bp, Artificial Sequence
  Synthetic oligonucleotide
aagcgtgccacaacggtgcaaagcgaggtc

SEQ ID NO: 20697 - DNA, 30 bp, Artificial Sequence
  Synthetic oligonucleotide
cgaccctcggtgttgagaaagagcaatgtc

SEQ ID NO: 20698 - DNA, 30 bp, Artificial Sequence
  Synthetic oligonucleotide
aagagacaacatggcaaaatgcataatgtc

SEQ ID NO: 20699 - DNA, 30 bp, Artificial Sequence
  Synthetic oligonucleotide
cggagtgagacacagggtcgacactacttc

SEQ ID NO: 20700 - DNA, 30 bp, Artificial Sequence
  Synthetic oligonucleotide
ggaggccagtaccgtgaagcgcattcgttc

SEQ ID NO: 20701 - DNA, 30 bp, Artificial Sequence
  Synthetic oligonucleotide
aagcgagaaagtgcatagaagcgatgtttc

SEQ ID NO: 20702 - DNA, 30 bp, Artificial Sequence
  Synthetic oligonucleotide
cgacgttaagcgtatcagcatccaaaaaag

SEQ ID NO: 20703 - DNA, 30 bp, Artificial Sequence
  Synthetic oligonucleotide
tgctcgtcacggatagagataggagaaaag

SEQ ID NO: 20704 - DNA, 30 bp, Artificial Sequence
  Synthetic oligonucleotide
tagaacgacaatctgatcaggtcgtcaaag

SEQ ID NO: 20705 - DNA, 30 bp, Artificial Sequence
  Synthetic oligonucleotide
agggggaaatcccgcacgcatgatgtaaag

SEQ ID NO: 20706 - DNA, 30 bp, Artificial Sequence
  Synthetic oligonucleotide
acaaacaaaaaagaatcactcggtaacaag

SEQ ID NO: 20707 - DNA, 30 bp, Artificial Sequence
  Synthetic oligonucleotide
cgaaaggtaaagataatgttttaggacaag

SEQ ID NO: 20708 - DNA, 30 bp, Artificial Sequence
  Synthetic oligonucleotide
agcatcgtggccaatatacctgaatacaag

SEQ ID NO: 20709 - DNA, 30 bp, Artificial Sequence
  Synthetic oligonucleotide
gctaacccgcgtcacatcaattcgaccaag

SEQ ID NO: 20710 - DNA, 30 bp, Artificial Sequence
  Synthetic oligonucleotide
taagaggcgatgcaagggacaacccgcaag

SEQ ID NO: 20711 - DNA, 30 bp, Artificial Sequence
  Synthetic oligonucleotide
gcaggcgtgacacaagaatgttaaggcaag

SEQ ID NO: 20712 - DNA, 30 bp, Artificial Sequence
  Synthetic oligonucleotide
tggacctggcagctcaaaagaaaatgcaag

SEQ ID NO: 20713 - DNA, 30 bp, Artificial Sequence
  Synthetic oligonucleotide
tgttagcaataacatgcactggttaagaag

SEQ ID NO: 20714 - DNA, 30 bp, Artificial Sequence
  Synthetic oligonucleotide
agaaactatggaggctgagcatgtcagaag

SEQ ID NO: 20715 - DNA, 30 bp, Artificial Sequence
  Synthetic oligonucleotide
cacactcaatgtttcctcggaagagagaag

SEQ ID NO: 20716 - DNA, 30 bp, Artificial Sequence
  Synthetic oligonucleotide
tccttggcaacgtagtagataggatagaag

SEQ ID NO: 20717 - DNA, 30 bp, Artificial Sequence
  Synthetic oligonucleotide
ggcaggtgtagaaaaatagttcctacgaag

SEQ ID NO: 20718 - DNA, 30 bp, Artificial Sequence
  Synthetic oligonucleotide
tgccgggagggtacgacagaccattcgaag

SEQ ID NO: 20719 - DNA, 30 bp, Artificial Sequence
  Synthetic oligonucleotide
ggcttgtgcggcttaaggagaatgaggaag

SEQ ID NO: 20720 - DNA, 30 bp, Artificial Sequence
  Synthetic oligonucleotide
cagacgaaatctctcccacgggttcggaag

SEQ ID NO: 20721 - DNA, 30 bp, Artificial Sequence
  Synthetic oligonucleotide
cgtaacaggcaggaattatcactaatgaag

SEQ ID NO: 20722 - DNA, 30 bp, Artificial Sequence
  Synthetic oligonucleotide
gggacaatcgatttgcggtgaaacgtgaag

SEQ ID NO: 20723 - DNA, 30 bp, Artificial Sequence
  Synthetic oligonucleotide
atcgtgaaaagtacccatagctgattgaag

SEQ ID NO: 20724 - DNA, 30 bp, Artificial Sequence
  Synthetic oligonucleotide
gctgcccatggaaggcgagtcccggataag

SEQ ID NO: 20725 - DNA, 30 bp, Artificial Sequence
  Synthetic oligonucleotide
aggtcaagatggaaccctccaagcactaag

SEQ ID NO: 20726 - DNA, 30 bp, Artificial Sequence
  Synthetic oligonucleotide
gcatactcggtagtcgagagggcgcgtaag

SEQ ID NO: 20727 - DNA, 30 bp, Artificial Sequence
  Synthetic oligonucleotide
gcaaaggaaggcgatccgcggaccggtaag

SEQ ID NO: 20728 - DNA, 30 bp, Artificial Sequence
  Synthetic oligonucleotide
tagaggcataaaacgatacgcaagggtaag

SEQ ID NO: 20729 - DNA, 30 bp, Artificial Sequence
  Synthetic oligonucleotide
cgtaaattctcagagaggagctatggtaag

SEQ ID NO: 20730 - DNA, 30 bp, Artificial Sequence
  Synthetic oligonucleotide
agtgccgggacaatacgggaactcaaacag

SEQ ID NO: 20731 - DNA, 30 bp, Artificial Sequence
  Synthetic oligonucleotide
cggcccgtacggtatgaagttccgaaacag

SEQ ID NO: 20732 - DNA, 30 bp, Artificial Sequence
  Synthetic oligonucleotide
aagtcgcaggccaaactcagggatcaacag

SEQ ID NO: 20733 - DNA, 30 bp, Artificial Sequence
  Synthetic oligonucleotide
gaagacgaccgtcgtgaagctttggaacag

SEQ ID NO: 20734 - DNA, 30 bp, Artificial Sequence
  Synthetic oligonucleotide
agaagaacagagttatatctttaatcacag

SEQ ID NO: 20735 - DNA, 30 bp, Artificial Sequence
  Synthetic oligonucleotide
gtaagatacagaagagagtgggtccgacag

SEQ ID NO: 20736 - DNA, 30 bp, Artificial Sequence
  Synthetic oligonucleotide
ctatgggttaccgaaagaagacaaggacag

SEQ ID NO: 20737 - DNA, 30 bp, Artificial Sequence
  Synthetic oligonucleotide
agatactaaacaccactctataccggacag

SEQ ID NO: 20738 - DNA, 30 bp, Artificial Sequence
  Synthetic oligonucleotide
ggtacagaagcgcgatctagtatgtgacag

SEQ ID NO: 20739 - DNA, 30 bp, Artificial Sequence
  Synthetic oligonucleotide
agctcaaaatgggggtggtaacgtatacag

SEQ ID NO: 20740 - DNA, 30 bp, Artificial Sequence
  Synthetic oligonucleotide
gcaggaaaattatgggaagctgggttacag

SEQ ID NO: 20741 - DNA, 30 bp, Artificial Sequence
  Synthetic oligonucleotide
tgcgaaagccgtggctgcccaaaggaccag

SEQ ID NO: 20742 - DNA, 30 bp, Artificial Sequence
  Synthetic oligonucleotide
aggcgatggattaaatcggctcgtgaccag

SEQ ID NO: 20743 - DNA, 30 bp, Artificial Sequence
  Synthetic oligonucleotide
ggtaaagccgagacgttcacgaggtaccag

SEQ ID NO: 20744 - DNA, 30 bp, Artificial Sequence
  Synthetic oligonucleotide
gtaacagactgggcacaaagtaaaggccag

SEQ ID NO: 20745 - DNA, 30 bp, Artificial Sequence
  Synthetic oligonucleotide
agaacacacggattgtaacaggaattccag

SEQ ID NO: 20746 - DNA, 30 bp, Artificial Sequence
  Synthetic oligonucleotide
agggataaacccgttaaggaaccgaagcag

SEQ ID NO: 20747 - DNA, 30 bp, Artificial Sequence
  Synthetic oligonucleotide
ccgacaaggtatgaacggattacccagcag

SEQ ID NO: 20748 - DNA, 30 bp, Artificial Sequence
  Synthetic oligonucleotide
tcatgagagcgagagtgcggtccgcagcag

SEQ ID NO: 20749 - DNA, 30 bp, Artificial Sequence
  Synthetic oligonucleotide
gacgtgaatccagtctaaatttccgagcag

SEQ ID NO: 20750 - DNA, 30 bp, Artificial Sequence
  Synthetic oligonucleotide
gggtgaagtccgtgggagaatgatgagcag

SEQ ID NO: 20751 - DNA, 30 bp, Artificial Sequence
  Synthetic oligonucleotide
aaggtcagtttaagcgagggtggatagcag

SEQ ID NO: 20752 - DNA, 30 bp, Artificial Sequence
  Synthetic oligonucleotide
gaaggaaggataatcagtctggtaccgcag

SEQ ID NO: 20753 - DNA, 30 bp, Artificial Sequence
  Synthetic oligonucleotide
cagacggatgaggccaagaccaaaaatcag

SEQ ID NO: 20754 - DNA, 30 bp, Artificial Sequence
  Synthetic oligonucleotide
tgagagccatcataccggacacaccatcag

SEQ ID NO: 20755 - DNA, 30 bp, Artificial Sequence
  Synthetic oligonucleotide
caatcggggatgaggatcagagcaactcag

SEQ ID NO: 20756 - DNA, 30 bp, Artificial Sequence
  Synthetic oligonucleotide
gggtagtgaagatctgtcgcgatgactcag

SEQ ID NO: 20757 - DNA, 30 bp, Artificial Sequence
  Synthetic oligonucleotide
tccgagtgagcggaaaatgtcaggagtcag

SEQ ID NO: 20758 - DNA, 30 bp, Artificial Sequence
  Synthetic oligonucleotide
cgaaattaaagaattcgtaaagtacgtcag

SEQ ID NO: 20759 - DNA, 30 bp, Artificial Sequence
  Synthetic oligonucleotide
ggtgaagccccaacatagatacagcaagag

SEQ ID NO: 20760 - DNA, 30 bp, Artificial Sequence
  Synthetic oligonucleotide
agaaacccagcgtatgttacccaggaagag

SEQ ID NO: 20761 - DNA, 30 bp, Artificial Sequence
  Synthetic oligonucleotide
cgtgaaaatgcgcgatctataaaataagag

SEQ ID NO: 20762 - DNA, 30 bp, Artificial Sequence
  Synthetic oligonucleotide
gtcgagacgggctcataatcccattgagag

SEQ ID NO: 20763 - DNA, 30 bp, Artificial Sequence
  Synthetic oligonucleotide
ggcggcgaccacagagcgcatagactagag

SEQ ID NO: 20764 - DNA, 30 bp, Artificial Sequence
  Synthetic oligonucleotide
gaaggccaggttacatagtgcagcctagag

SEQ ID NO: 20765 - DNA, 30 bp, Artificial Sequence
  Synthetic oligonucleotide
tggtcacgcataggatgttcgcatctagag

SEQ ID NO: 20766 - DNA, 30 bp, Artificial Sequence
  Synthetic oligonucleotide
aggcttcgagaaacaattggtacattagag

SEQ ID NO: 20767 - DNA, 30 bp, Artificial Sequence
  Synthetic oligonucleotide
tctgtcaaaagccgtactacagggaacgag

SEQ ID NO: 20768 - DNA, 30 bp, Artificial Sequence
  Synthetic oligonucleotide
tcacgtcggtaggataagctacgccacgag

SEQ ID NO: 20769 - DNA, 30 bp, Artificial Sequence
  Synthetic oligonucleotide
gtgggttgccgccgattgaagggcgacgag

SEQ ID NO: 20770 - DNA, 30 bp, Artificial Sequence
  Synthetic oligonucleotide
gaagcggaaaatgcgtggcaagtgtccgag

SEQ ID NO: 20771 - DNA, 30 bp, Artificial Sequence
  Synthetic oligonucleotide
ccatacacgggagacaaggtgtccgtcgag

SEQ ID NO: 20772 - DNA, 30 bp, Artificial Sequence
  Synthetic oligonucleotide
gtagaattacatgcctacagaagggtcgag

SEQ ID NO: 20773 - DNA, 30 bp, Artificial Sequence
  Synthetic oligonucleotide
cggcgaaagtaggacccgtgtcatgtcgag

SEQ ID NO: 20774 - DNA, 30 bp, Artificial Sequence
  Synthetic oligonucleotide
tggaaaagaggggtgttcatcggattcgag

SEQ ID NO: 20775 - DNA, 30 bp, Artificial Sequence
  Synthetic oligonucleotide
tctccggattcacgcgccataactaaggag

SEQ ID NO: 20776 - DNA, 30 bp, Artificial Sequence
  Synthetic oligonucleotide
agaggcctaggaagacgtcaggtacaggag

SEQ ID NO: 20777 - DNA, 30 bp, Artificial Sequence
  Synthetic oligonucleotide
cgcaacaagctgttggtaaagtcccaggag

SEQ ID NO: 20778 - DNA, 30 bp, Artificial Sequence
  Synthetic oligonucleotide
acagcgaacggggtccatgccagagaggag

SEQ ID NO: 20779 - DNA, 30 bp, Artificial Sequence
  Synthetic oligonucleotide
cagggcaccgtaaagaactcaaaataggag

SEQ ID NO: 20780 - DNA, 30 bp, Artificial Sequence
  Synthetic oligonucleotide
cggagttctcaggcgaatccgagataggag

SEQ ID NO: 20781 - DNA, 30 bp, Artificial Sequence
  Synthetic oligonucleotide
gtgggattaagtgcaatgacgttaccggag

SEQ ID NO: 20782 - DNA, 30 bp, Artificial Sequence
  Synthetic oligonucleotide
catgacaatcatcgtattagcgagccggag

SEQ ID NO: 20783 - DNA, 30 bp, Artificial Sequence
  Synthetic oligonucleotide
cgaaaagttgtctcactcggaacgtcggag

SEQ ID NO: 20784 - DNA, 30 bp, Artificial Sequence
  Synthetic oligonucleotide
acagcacaaggcggtctcatagtaagggag

SEQ ID NO: 20785 - DNA, 30 bp, Artificial Sequence
  Synthetic oligonucleotide
gtgtataaaagggcacatcggaccagggag

SEQ ID NO: 20786 - DNA, 30 bp, Artificial Sequence
  Synthetic oligonucleotide
agaacacaggggtcaagaagtaggggggag

SEQ ID NO: 20787 - DNA, 30 bp, Artificial Sequence
  Synthetic oligonucleotide
atcaggaataaggaaacctggcgagtggag

SEQ ID NO: 20788 - DNA, 30 bp, Artificial Sequence
  Synthetic oligonucleotide
ctaatggaagactcgaaaacttaggtggag

SEQ ID NO: 20789 - DNA, 30 bp, Artificial Sequence
  Synthetic oligonucleotide
ccttacaccggagattgcggtgccaatgag

SEQ ID NO: 20790 - DNA, 30 bp, Artificial Sequence
  Synthetic oligonucleotide
catcgactacggaatattacctcgaatgag

SEQ ID NO: 20791 - DNA, 30 bp, Artificial Sequence
  Synthetic oligonucleotide
atctaggcaacgtccccgagggagtatgag

SEQ ID NO: 20792 - DNA, 30 bp, Artificial Sequence
  Synthetic oligonucleotide
ggaggactagtactagttcaaggaactgag

SEQ ID NO: 20793 - DNA, 30 bp, Artificial Sequence
  Synthetic oligonucleotide
cgttacatggggtataattacacagctgag

SEQ ID NO: 20794 - DNA, 30 bp, Artificial Sequence
  Synthetic oligonucleotide
gcgatgtccagctaccacaagacatctgag

SEQ ID NO: 20795 - DNA, 30 bp, Artificial Sequence
  Synthetic oligonucleotide
aggtccaatagtgtgcagggtgacggtgag

SEQ ID NO: 20796 - DNA, 30 bp, Artificial Sequence
  Synthetic oligonucleotide
gaggggagacctataaacgatctcggtgag

SEQ ID NO: 20797 - DNA, 30 bp, Artificial Sequence
  Synthetic oligonucleotide
taaaccacggaaatgtaggactacattgag

SEQ ID NO: 20798 - DNA, 30 bp, Artificial Sequence
  Synthetic oligonucleotide
agaacggtcacgctaccagagtggcttgag

SEQ ID NO: 20799 - DNA, 30 bp, Artificial Sequence
  Synthetic oligonucleotide
tgagtacgccaggtaccgataccagaatag

SEQ ID NO: 20800 - DNA, 30 bp, Artificial Sequence
  Synthetic oligonucleotide
ccatagcagaacggggtgacttcaccatag

SEQ ID NO: 20801 - DNA, 30 bp, Artificial Sequence
  Synthetic oligonucleotide
tctaagatggataacaccttgaacggatag

SEQ ID NO: 20802 - DNA, 30 bp, Artificial Sequence
  Synthetic oligonucleotide
gaggaacccaaagtactggctaatggatag

SEQ ID NO: 20803 - DNA, 30 bp, Artificial Sequence
  Synthetic oligonucleotide
gcgatggaagacgattcgtggtgcatatag

SEQ ID NO: 20804 - DNA, 30 bp, Artificial Sequence
  Synthetic oligonucleotide
gaggacaatgcgagttcgatccaagactag

SEQ ID NO: 20805 - DNA, 30 bp, Artificial Sequence
  Synthetic oligonucleotide
cgatgcggagttataaacgttcgaacctag

SEQ ID NO: 20806 - DNA, 30 bp, Artificial Sequence
  Synthetic oligonucleotide
acgcaagacaggggacaggaattaggctag

SEQ ID NO: 20807 - DNA, 30 bp, Artificial Sequence
  Synthetic oligonucleotide
agcggttaatcagtcgtgtaggagggctag

SEQ ID NO: 20808 - DNA, 30 bp, Artificial Sequence
  Synthetic oligonucleotide
cggtcgaagggatgataatcatgtatctag

SEQ ID NO: 20809 - DNA, 30 bp, Artificial Sequence
  Synthetic oligonucleotide
gcgaactcggctgaccgtgcgtagaagtag

SEQ ID NO: 20810 - DNA, 30 bp, Artificial Sequence
  Synthetic oligonucleotide
ggagatggggagctacacgaccggacgtag

SEQ ID NO: 20811 - DNA, 30 bp, Artificial Sequence
  Synthetic oligonucleotide
ggcagtagtcacggaatgggccgaaggtag

SEQ ID NO: 20812 - DNA, 30 bp, Artificial Sequence
  Synthetic oligonucleotide
ggggaatggcactattcagaagatcggtag

SEQ ID NO: 20813 - DNA, 30 bp, Artificial Sequence
  Synthetic oligonucleotide
cacgcatagcgacaaaactatcgagggtag

SEQ ID NO: 20814 - DNA, 30 bp, Artificial Sequence
  Synthetic oligonucleotide
tcgtgcccagcaatgtgattctcgtggtag

SEQ ID NO: 20815 - DNA, 30 bp, Artificial Sequence
  Synthetic oligonucleotide
agtgaggagtaaagcaaggtatgggattag

SEQ ID NO: 20816 - DNA, 30 bp, Artificial Sequence
  Synthetic oligonucleotide
cgtccgggtgcacacaaggggtacagttag

SEQ ID NO: 20817 - DNA, 30 bp, Artificial Sequence
  Synthetic oligonucleotide
caaggattcgacatctatggtaagagttag

SEQ ID NO: 20818 - DNA, 30 bp, Artificial Sequence
  Synthetic oligonucleotide
gcggggcaaccctatgattccgatggttag

SEQ ID NO: 20819 - DNA, 30 bp, Artificial Sequence
  Synthetic oligonucleotide
gtaacgaaagccacgaaatctagaaaaacg

SEQ ID NO: 20820 - DNA, 30 bp, Artificial Sequence
  Synthetic oligonucleotide
agagcaaataccccgtgctataagaaaacg

SEQ ID NO: 20821 - DNA, 30 bp, Artificial Sequence
  Synthetic oligonucleotide
aagggagtactggtcaggcactaataaacg

SEQ ID NO: 20822 - DNA, 30 bp, Artificial Sequence
  Synthetic oligonucleotide
cggcatagttgaaatcaagattgctaaacg

SEQ ID NO: 20823 - DNA, 30 bp, Artificial Sequence
  Synthetic oligonucleotide
atcggaacaaatggtccacacgcgtaaacg

SEQ ID NO: 20824 - DNA, 30 bp, Artificial Sequence
  Synthetic oligonucleotide
ggcccagggaatacttggaaatagacaacg

SEQ ID NO: 20825 - DNA, 30 bp, Artificial Sequence
  Synthetic oligonucleotide
cttcaacacataggatagacaaaggcaacg

SEQ ID NO: 20826 - DNA, 30 bp, Artificial Sequence
  Synthetic oligonucleotide
tctacacaaacaagcggtgggagatcaacg

SEQ ID NO: 20827 - DNA, 30 bp, Artificial Sequence
  Synthetic oligonucleotide
acaggcgaaggtaataaaacaggctcaacg

SEQ ID NO: 20828 - DNA, 30 bp, Artificial Sequence
  Synthetic oligonucleotide
tcatcaagaccgataacgccaatgtcaacg

SEQ ID NO: 20829 - DNA, 30 bp, Artificial Sequence
  Synthetic oligonucleotide
acgaggtagcttagatcagggaatctaacg

SEQ ID NO: 20830 - DNA, 30 bp, Artificial Sequence
  Synthetic oligonucleotide
ggcaaggtgccacacctacaataagacacg

SEQ ID NO: 20831 - DNA, 30 bp, Artificial Sequence
  Synthetic oligonucleotide
cgttaaaccctaataatgcaagtcatcacg

SEQ ID NO: 20832 - DNA, 30 bp, Artificial Sequence
  Synthetic oligonucleotide
aaaggaccagcgcgaaaatcccgacagacg

SEQ ID NO: 20833 - DNA, 30 bp, Artificial Sequence
  Synthetic oligonucleotide
aagggtcgcaagggcaaggagctccagacg

SEQ ID NO: 20834 - DNA, 30 bp, Artificial Sequence
  Synthetic oligonucleotide
ggtcccgaggtgaattgaacacatcagacg

SEQ ID NO: 20835 - DNA, 30 bp, Artificial Sequence
  Synthetic oligonucleotide
tgcccgtaaaaaagcccatccgagccgacg

SEQ ID NO: 20836 - DNA, 30 bp, Artificial Sequence
  Synthetic oligonucleotide
cctgcctaatgggcatagtgactgccgacg

SEQ ID NO: 20837 - DNA, 30 bp, Artificial Sequence
  Synthetic oligonucleotide
ggcacatgaacaaagtgcgtctgaaggacg

SEQ ID NO: 20838 - DNA, 30 bp, Artificial Sequence
  Synthetic oligonucleotide
gggctgagttaaacttaagcacgcgggacg

SEQ ID NO: 20839 - DNA, 30 bp, Artificial Sequence
  Synthetic oligonucleotide
ccgtaccgcgtgtgcccagcaaaacaaccg

SEQ ID NO: 20840 - DNA, 30 bp, Artificial Sequence
  Synthetic oligonucleotide
gcgaatacgaagataccacttgaggaaccg

SEQ ID NO: 20841 - DNA, 30 bp, Artificial Sequence
  Synthetic oligonucleotide
aaaggcaacaccgaacggttaaatgcaccg

SEQ ID NO: 20842 - DNA, 30 bp, Artificial Sequence
  Synthetic oligonucleotide
caggtctaaacgatacagagttggaacccg

SEQ ID NO: 20843 - DNA, 30 bp, Artificial Sequence
  Synthetic oligonucleotide
acggaggcataattcaacgctgagctcccg

SEQ ID NO: 20844 - DNA, 30 bp, Artificial Sequence
  Synthetic oligonucleotide
cccgaacagccaaaagtagtctagctcccg

SEQ ID NO: 20845 - DNA, 30 bp, Artificial Sequence
  Synthetic oligonucleotide
gtaactgaggcgatagacgaaagaccgccg

SEQ ID NO: 20846 - DNA, 30 bp, Artificial Sequence
  Synthetic oligonucleotide
acgtcgatatggtcaagtagctaaaggccg

SEQ ID NO: 20847 - DNA, 30 bp, Artificial Sequence
  Synthetic oligonucleotide
cgtcgaacgatgccaggagacccgcggccg

SEQ ID NO: 20848 - DNA, 30 bp, Artificial Sequence
  Synthetic oligonucleotide
gactagcgtacaagtgagaagggaagtccg

SEQ ID NO: 20849 - DNA, 30 bp, Artificial Sequence
  Synthetic oligonucleotide
cgaatggagagcgagtgcgcctcgtaagcg

SEQ ID NO: 20850 - DNA, 30 bp, Artificial Sequence
  Synthetic oligonucleotide
cgtaaacacgtagctgaatcaaacacagcg

SEQ ID NO: 20851 - DNA, 30 bp, Artificial Sequence
  Synthetic oligonucleotide
acgtcgatcaatgcaagcctcatctcagcg

SEQ ID NO: 20852 - DNA, 30 bp, Artificial Sequence
  Synthetic oligonucleotide
cggacagttgaatcgagagagtgtaacgcg

SEQ ID NO: 20853 - DNA, 30 bp, Artificial Sequence
  Synthetic oligonucleotide
agggacggaacggctaccacctcaaccgcg

SEQ ID NO: 20854 - DNA, 30 bp, Artificial Sequence
  Synthetic oligonucleotide
cgatactcgcgaagatcgcaagccaaggcg

SEQ ID NO: 20855 - DNA, 30 bp, Artificial Sequence
  Synthetic oligonucleotide
tccgcaatgaccagtgtgaaaacgaaggcg

SEQ ID NO: 20856 - DNA, 30 bp, Artificial Sequence
  Synthetic oligonucleotide
acggggacgaaaatccgagatgatgcggcg

SEQ ID NO: 20857 - DNA, 30 bp, Artificial Sequence
  Synthetic oligonucleotide
ggtacagatcatgagtaggatgcttcggcg

SEQ ID NO: 20858 - DNA, 30 bp, Artificial Sequence
  Synthetic oligonucleotide
catcgaccacaagtcagattaaacaatgcg

SEQ ID NO: 20859 - DNA, 30 bp, Artificial Sequence
  Synthetic oligonucleotide
cggcacacgatgccgtcctcaaaacatgcg

SEQ ID NO: 20860 - DNA, 30 bp, Artificial Sequence
  Synthetic oligonucleotide
tcaggggtatccatcacaaaagggcctgcg

SEQ ID NO: 20861 - DNA, 30 bp, Artificial Sequence
  Synthetic oligonucleotide
aggctgctgtaaaaaggtgccctagctgcg

SEQ ID NO: 20862 - DNA, 30 bp, Artificial Sequence
  Synthetic oligonucleotide
cgggtaagtcatagtgggagaatgggtgcg

SEQ ID NO: 20863 - DNA, 30 bp, Artificial Sequence
  Synthetic oligonucleotide
tcgtcagtacgggctgcgggtgaataatcg

SEQ ID NO: 20864 - DNA, 30 bp, Artificial Sequence
  Synthetic oligonucleotide
ggacaacgaaaataaaagttgtgcagatcg

SEQ ID NO: 20865 - DNA, 30 bp, Artificial Sequence
  Synthetic oligonucleotide
cgtgataagttgcccgaggaaagcggatcg

SEQ ID NO: 20866 - DNA, 30 bp, Artificial Sequence
  Synthetic oligonucleotide
acagacgtataggcagatggatagatctcg

SEQ ID NO: 20867 - DNA, 31 bp, Artificial Sequence
  Synthetic oligonucleotide
ctccacgcctaacacacaagttgcgaagtcg

SEQ ID NO: 20868 - DNA, 30 bp, Artificial Sequence
  Synthetic oligonucleotide
agcactgaggctagactaaatcagcagtcg

SEQ ID NO: 20869 - DNA, 30 bp, Artificial Sequence
  Synthetic oligonucleotide
agagcgtgttagagagtcaaggtagagtcg

SEQ ID NO: 20870 - DNA, 30 bp, Artificial Sequence
  Synthetic oligonucleotide
ggtcaaaagaactcgaggggtcgtacgtcg

SEQ ID NO: 20871 - DNA, 30 bp, Artificial Sequence
  Synthetic oligonucleotide
cgtgaaggacttggggttccaatcgcgtcg

SEQ ID NO: 20872 - DNA, 30 bp, Artificial Sequence
  Synthetic oligonucleotide
acgggtgaaaatcaacgagaagttcggtcg

SEQ ID NO: 20873 - DNA, 30 bp, Artificial Sequence
  Synthetic oligonucleotide
ccgtcagacaagggtaacaccatcagttcg

SEQ ID NO: 20874 - DNA, 30 bp, Artificial Sequence
  Synthetic oligonucleotide
gggctgagatattgtaaactcgcacgttcg

SEQ ID NO: 20875 - DNA, 30 bp, Artificial Sequence
  Synthetic oligonucleotide
aagggaaaaataccatcccggatgcgttcg

SEQ ID NO: 20876 - DNA, 30 bp, Artificial Sequence
  Synthetic oligonucleotide
caggaaggtctacggaaaactcgtctttcg

SEQ ID NO: 20877 - DNA, 30 bp, Artificial Sequence
  Synthetic oligonucleotide
gcgactgacgggagtaagcttatcgtttcg

SEQ ID NO: 20878 - DNA, 30 bp, Artificial Sequence
  Synthetic oligonucleotide
ccaaggcacccacaacggttaggggtttcg

SEQ ID NO: 20879 - DNA, 30 bp, Artificial Sequence
  Synthetic oligonucleotide
gcgaagattgcagcgtaagtgggacaaagg

SEQ ID NO: 20880 - DNA, 30 bp, Artificial Sequence
  Synthetic oligonucleotide
cgattagtaacgacacttagccctcaaagg

SEQ ID NO: 20881 - DNA, 30 bp, Artificial Sequence
  Synthetic oligonucleotide
tgagaagacttacctgaggctaaagaaagg

SEQ ID NO: 20882 - DNA, 30 bp, Artificial Sequence
  Synthetic oligonucleotide
agtggagcggtgtgaacgaggtacgaaagg

SEQ ID NO: 20883 - DNA, 30 bp, Artificial Sequence
  Synthetic oligonucleotide
cagtctaaatgatcagaagctcaggaaagg

SEQ ID NO: 20884 - DNA, 30 bp, Artificial Sequence
  Synthetic oligonucleotide
gcggatgggatgacatagacgatggaaagg

SEQ ID NO: 20885 - DNA, 30 bp, Artificial Sequence
  Synthetic oligonucleotide
cggtcaaaatcaagagtatgcgcaccaagg

SEQ ID NO: 20886 - DNA, 30 bp, Artificial Sequence
  Synthetic oligonucleotide
caagaagggacgtatccaattatgagaagg

SEQ ID NO: 20887 - DNA, 30 bp, Artificial Sequence
  Synthetic oligonucleotide
tgaccacgcgagatatagcccgaacgaagg

SEQ ID NO: 20888 - DNA, 30 bp, Artificial Sequence
  Synthetic oligonucleotide
cctaaaagcatgcaaagatatcgacgaagg

SEQ ID NO: 20889 - DNA, 30 bp, Artificial Sequence
  Synthetic oligonucleotide
cgtggggggtaaagaaatatgttcgtaagg

SEQ ID NO: 20890 - DNA, 30 bp, Artificial Sequence
  Synthetic oligonucleotide
aaagcaggataggaacagggtaaagacagg

SEQ ID NO: 20891 - DNA, 30 bp, Artificial Sequence
  Synthetic oligonucleotide
atcttacaaggtaaggcgaaaaaaaccagg

SEQ ID NO: 20892 - DNA, 30 bp, Artificial Sequence
  Synthetic oligonucleotide
cgggagacatcgtacaacaggtgcctcagg

SEQ ID NO: 20893 - DNA, 30 bp, Artificial Sequence
  Synthetic oligonucleotide
aacaccaatcttacggcaatacgagtcagg

SEQ ID NO: 20894 - DNA, 30 bp, Artificial Sequence
  Synthetic oligonucleotide
ctaacccgggcgcaaaagtagataaagagg

SEQ ID NO: 20895 - DNA, 30 bp, Artificial Sequence
  Synthetic oligonucleotide
gcgttacgtataagacataggtcagagagg

SEQ ID NO: 20896 - DNA, 35 bp, Artificial Sequence
  Synthetic oligonucleotide
cggattagggtgctggcggtagggaggaggagagg

SEQ ID NO: 20897 - DNA, 30 bp, Artificial Sequence
  Synthetic oligonucleotide
aagccccgaacgactatcgcactaaggagg

SEQ ID NO: 20898 - DNA, 30 bp, Artificial Sequence
  Synthetic oligonucleotide
agtggtatacccaaaacgagaacacggagg

SEQ ID NO: 20899 - DNA, 30 bp, Artificial Sequence
  Synthetic oligonucleotide
ggacagcctacgaagaacgtagaagggagg

SEQ ID NO: 20900 - DNA, 30 bp, Artificial Sequence
  Synthetic oligonucleotide
cacaggcgaccaagaccgaagtacatgagg

SEQ ID NO: 20901 - DNA, 30 bp, Artificial Sequence
  Synthetic oligonucleotide
cacgagccacaggagtccgtaggttgtagg

SEQ ID NO: 20902 - DNA, 30 bp, Artificial Sequence
  Synthetic oligonucleotide
gacaggaggccgaatcgaatctcacttagg

SEQ ID NO: 20903 - DNA, 30 bp, Artificial Sequence
  Synthetic oligonucleotide
gagatcggcatacgaaaggataaacaacgg

SEQ ID NO: 20904 - DNA, 30 bp, Artificial Sequence
  Synthetic oligonucleotide
atcatgtgtggaccataaaagggagagcgg

SEQ ID NO: 20905 - DNA, 30 bp, Artificial Sequence
  Synthetic oligonucleotide
gggatcgacagtaagtccggaggatcgcgg

SEQ ID NO: 20906 - DNA, 30 bp, Artificial Sequence
  Synthetic oligonucleotide
gtgagggctagcgagtgatacaacattcgg

SEQ ID NO: 20907 - DNA, 30 bp, Artificial Sequence
  Synthetic oligonucleotide
acgtgagtatctatttgacaggaggttcgg

SEQ ID NO: 20908 - DNA, 30 bp, Artificial Sequence
  Synthetic oligonucleotide
aacggacggcaggttcgatgctcgcaaggg

SEQ ID NO: 20909 - DNA, 30 bp, Artificial Sequence
  Synthetic oligonucleotide
ccgagaacgggagcgacagttgctgcaggg

SEQ ID NO: 20910 - DNA, 30 bp, Artificial Sequence
  Synthetic oligonucleotide
acgcgtggatgcaagacatttagctcaggg

SEQ ID NO: 20911 - DNA, 30 bp, Artificial Sequence
  Synthetic oligonucleotide
tgggagagaacacaagtcactacttcaggg

SEQ ID NO: 20912 - DNA, 30 bp, Artificial Sequence
  Synthetic oligonucleotide
actaaggacatgagggtaccgctgagaggg

SEQ ID NO: 20913 - DNA, 30 bp, Artificial Sequence
  Synthetic oligonucleotide
tcgagacctatggtacttatagaccgaggg

SEQ ID NO: 20914 - DNA, 30 bp, Artificial Sequence
  Synthetic oligonucleotide
tgggaatgaaaaagaaacacgttcggaggg

SEQ ID NO: 20915 - DNA, 30 bp, Artificial Sequence
  Synthetic oligonucleotide
tcggagatcgtgaggaaacgcactataggg

SEQ ID NO: 20916 - DNA, 30 bp, Artificial Sequence
  Synthetic oligonucleotide
acgaaaatattggcgaatggccgtataggg

SEQ ID NO: 20917 - DNA, 30 bp, Artificial Sequence
  Synthetic oligonucleotide
aaggaagtacatggtggattcgaactaggg

SEQ ID NO: 20918 - DNA, 30 bp, Artificial Sequence
  Synthetic oligonucleotide
ggagttaaagcgagagaggcttgactaggg

SEQ ID NO: 20919 - DNA, 30 bp, Artificial Sequence
  Synthetic oligonucleotide
cacagagcaaaaacgagatcaccagtaggg

SEQ ID NO: 20920 - DNA, 30 bp, Artificial Sequence
  Synthetic oligonucleotide
cataactcgtaaaggctcgccaaggtaggg

SEQ ID NO: 20921 - DNA, 30 bp, Artificial Sequence
  Synthetic oligonucleotide
tgtgcgaatgtatctgcctgggagaacggg

SEQ ID NO: 20922 - DNA, 30 bp, Artificial Sequence
  Synthetic oligonucleotide
ccgtataaacagatcgcgattaaaagcggg

SEQ ID NO: 20923 - DNA, 30 bp, Artificial Sequence
  Synthetic oligonucleotide
gatggactggaaattgctcgtcaaagcggg

SEQ ID NO: 20924 - DNA, 30 bp, Artificial Sequence
  Synthetic oligonucleotide
acccgaaaatgatatagaaatgcgagcggg

SEQ ID NO: 20925 - DNA, 30 bp, Artificial Sequence
  Synthetic oligonucleotide
acgagtcatcaaacagctaataggggcggg

SEQ ID NO: 20926 - DNA, 30 bp, Artificial Sequence
  Synthetic oligonucleotide
tgtcgcacgttggtacagatgacaaagggg

SEQ ID NO: 20927 - DNA, 30 bp, Artificial Sequence
  Synthetic oligonucleotide
gaagattaatggagatcgaactggaagggg

SEQ ID NO: 20928 - DNA, 30 bp, Artificial Sequence
  Synthetic oligonucleotide
tcaggcgtgaatgccaacgatctcatgggg

SEQ ID NO: 20929 - DNA, 30 bp, Artificial Sequence
  Synthetic oligonucleotide
aacgggcaatctaaaggagaagacagtggg

SEQ ID NO: 20930 - DNA, 31 bp, Artificial Sequence
  Synthetic oligonucleotide
agaggtttagtcgacttagatacggcaatgg

SEQ ID NO: 20931 - DNA, 30 bp, Artificial Sequence
  Synthetic oligonucleotide
ctagcttggccaacactaaactacgaatgg

SEQ ID NO: 20932 - DNA, 30 bp, Artificial Sequence
  Synthetic oligonucleotide
agcgggcatctcaacgtcacactctcatgg

SEQ ID NO: 20933 - DNA, 30 bp, Artificial Sequence
  Synthetic oligonucleotide
ttacatatgaatgcacaggacaaaagatgg

SEQ ID NO: 20934 - DNA, 30 bp, Artificial Sequence
  Synthetic oligonucleotide
gcgtgtaatatatggtagccaaacggatgg

SEQ ID NO: 20935 - DNA, 30 bp, Artificial Sequence
  Synthetic oligonucleotide
atgcatagaacaacgcgttaaggcgcctgg

SEQ ID NO: 20936 - DNA, 30 bp, Artificial Sequence
  Synthetic oligonucleotide
ggtaggtgcaaaccatagtgccgatgctgg

SEQ ID NO: 20937 - DNA, 30 bp, Artificial Sequence
  Synthetic oligonucleotide
ccctagctacgaatctgacggaaagagtgg

SEQ ID NO: 20938 - DNA, 30 bp, Artificial Sequence
  Synthetic oligonucleotide
cgaaacagcagaggtagtactgtaacgtgg

SEQ ID NO: 20939 - DNA, 40 bp, Artificial Sequence
  Synthetic oligonucleotide
gaatgacggagagtgacgaatgacggatgggcttaggtgg

SEQ ID NO: 20940 - DNA, 30 bp, Artificial Sequence
  Synthetic oligonucleotide
gggcgggaaacaatgcgcgtccaaaattgg

SEQ ID NO: 20941 - DNA, 31 bp, Artificial Sequence
  Synthetic oligonucleotide
gttcggaagtcgttaacaataacaagattgg

SEQ ID NO: 20942 - DNA, 30 bp, Artificial Sequence
  Synthetic oligonucleotide
caggcgtctccgaaggtattaggggaaatg

SEQ ID NO: 20943 - DNA, 30 bp, Artificial Sequence
  Synthetic oligonucleotide
agtcgatacaaagattcaggcaggtgaatg

SEQ ID NO: 20944 - DNA, 30 bp, Artificial Sequence
  Synthetic oligonucleotide
agtacaggtaggcaaaaccacctgataatg

SEQ ID NO: 20945 - DNA, 30 bp, Artificial Sequence
  Synthetic oligonucleotide
acgagtaagagtataggactggtaaccatg

SEQ ID NO: 20946 - DNA, 30 bp, Artificial Sequence
  Synthetic oligonucleotide
aggcactatcgtcattatgcgaagatcatg

SEQ ID NO: 20947 - DNA, 30 bp, Artificial Sequence
  Synthetic oligonucleotide
tgataccaaggcgaagatgccagattcatg

SEQ ID NO: 20948 - DNA, 30 bp, Artificial Sequence
  Synthetic oligonucleotide
tctcacgagccaataatagcaatatagatg

SEQ ID NO: 20949 - DNA, 30 bp, Artificial Sequence
  Synthetic oligonucleotide
cacgcgacatacttagtcatcaatccgatg

SEQ ID NO: 20950 - DNA, 31 bp, Artificial Sequence
  Synthetic oligonucleotide
taaccatgaagcatttaggaggaccaggatg

SEQ ID NO: 20951 - DNA, 30 bp, Artificial Sequence
  Synthetic oligonucleotide
gctatacgtaaaagggccgggaaaatgatg

SEQ ID NO: 20952 - DNA, 30 bp, Artificial Sequence
  Synthetic oligonucleotide
taggaaagaggtaagtgaagtcgtctgatg

SEQ ID NO: 20953 - DNA, 30 bp, Artificial Sequence
  Synthetic oligonucleotide
gcaaggacaggatagggaattcaattgatg

SEQ ID NO: 20954 - DNA, 30 bp, Artificial Sequence
  Synthetic oligonucleotide
agggcacaaccgtattgctgagagtatatg

SEQ ID NO: 20955 - DNA, 30 bp, Artificial Sequence
  Synthetic oligonucleotide
cgcgccactaattatgaaactcaccgtatg

SEQ ID NO: 20956 - DNA, 30 bp, Artificial Sequence
  Synthetic oligonucleotide
gcgtcggaagcgacactaaaagggcgtatg

SEQ ID NO: 20957 - DNA, 30 bp, Artificial Sequence
  Synthetic oligonucleotide
caggtagagactagttagcacacgaaactg

SEQ ID NO: 20958 - DNA, 30 bp, Artificial Sequence
  Synthetic oligonucleotide
tcctgtaggacaagattgaaagaagaactg

SEQ ID NO: 20959 - DNA, 30 bp, Artificial Sequence
  Synthetic oligonucleotide
actgcgagccagtggtaaactacgtaactg

SEQ ID NO: 20960 - DNA, 30 bp, Artificial Sequence
  Synthetic oligonucleotide
agactggtaaagcccacccgaaagtgcctg

SEQ ID NO: 20961 - DNA, 30 bp, Artificial Sequence
  Synthetic oligonucleotide
cgaatgaatagggctggagtagacttcctg

SEQ ID NO: 20962 - DNA, 30 bp, Artificial Sequence
  Synthetic oligonucleotide
taggctcacgataagaagatatgaaagctg

SEQ ID NO: 20963 - DNA, 30 bp, Artificial Sequence
  Synthetic oligonucleotide
agctaacgtcaaggaaggaccatacagctg

SEQ ID NO: 20964 - DNA, 30 bp, Artificial Sequence
  Synthetic oligonucleotide
acagggggcgaggacactaactgcgcgctg

SEQ ID NO: 20965 - DNA, 30 bp, Artificial Sequence
  Synthetic oligonucleotide
aggcgactcgaagagacgatcagcttgctg

SEQ ID NO: 20966 - DNA, 30 bp, Artificial Sequence
  Synthetic oligonucleotide
gggagggaccactcgaaggataagaatctg

SEQ ID NO: 20967 - DNA, 30 bp, Artificial Sequence
  Synthetic oligonucleotide
aacaggtcagcaggccgagcatggcaagtg

SEQ ID NO: 20968 - DNA, 30 bp, Artificial Sequence
  Synthetic oligonucleotide
cccacgaacccacgacctctaaacgaagtg

SEQ ID NO: 20969 - DNA, 30 bp, Artificial Sequence
  Synthetic oligonucleotide
gagcccggaggtcgtcgagatcttgaagtg

SEQ ID NO: 20970 - DNA, 30 bp, Artificial Sequence
  Synthetic oligonucleotide
ttgaggggaacaagtgacttccagtaagtg

SEQ ID NO: 20971 - DNA, 30 bp, Artificial Sequence
  Synthetic oligonucleotide
aggtcgggatggcagtcccactagacagtg

SEQ ID NO: 20972 - DNA, 30 bp, Artificial Sequence
  Synthetic oligonucleotide
acaggctgtaaacgaactctggctacagtg

SEQ ID NO: 20973 - DNA, 31 bp, Artificial Sequence
  Synthetic oligonucleotide
accgcaccagtaaggcagtgggtattcagtg

SEQ ID NO: 20974 - DNA, 30 bp, Artificial Sequence
  Synthetic oligonucleotide
agtaagggggtataaaataaacaaagagtg

SEQ ID NO: 20975 - DNA, 30 bp, Artificial Sequence
  Synthetic oligonucleotide
aagccgaaataagaggacggctcaagagtg

SEQ ID NO: 20976 - DNA, 30 bp, Artificial Sequence
  Synthetic oligonucleotide
gtgaaaagagtgtggaacaggcagcgagtg

SEQ ID NO: 20977 - DNA, 30 bp, Artificial Sequence
  Synthetic oligonucleotide
acgcaatggagtgttataaacaggatagtg

SEQ ID NO: 20978 - DNA, 30 bp, Artificial Sequence
  Synthetic oligonucleotide
acgaaacttaacattcacccggggatagtg

SEQ ID NO: 20979 - DNA, 31 bp, Artificial Sequence
  Synthetic oligonucleotide
ggcaaacaaccaaagactttccgccttagtg

SEQ ID NO: 20980 - DNA, 30 bp, Artificial Sequence
  Synthetic oligonucleotide
ccgaaaagaggcaataagacatgccacgtg

SEQ ID NO: 20981 - DNA, 30 bp, Artificial Sequence
  Synthetic oligonucleotide
ccaataatcggcaaaaaacaacatgccgtg

SEQ ID NO: 20982 - DNA, 30 bp, Artificial Sequence
  Synthetic oligonucleotide
ggactgctagaattcagggaaatcgtcgtg

SEQ ID NO: 20983 - DNA, 30 bp, Artificial Sequence
  Synthetic oligonucleotide
atgactgaaactataactaaggcagaggtg

SEQ ID NO: 20984 - DNA, 30 bp, Artificial Sequence
  Synthetic oligonucleotide
aggttggaaacgaccatcgacatgtaggtg

SEQ ID NO: 20985 - DNA, 30 bp, Artificial Sequence
  Synthetic oligonucleotide
ccagtacgaaaaaaacaaagtgaaagggtg

SEQ ID NO: 20986 - DNA, 30 bp, Artificial Sequence
  Synthetic oligonucleotide
gactgaagataaaacatccaagctcgggtg

SEQ ID NO: 20987 - DNA, 30 bp, Artificial Sequence
  Synthetic oligonucleotide
aggagatcatataagcatcaacacggggtg

SEQ ID NO: 20988 - DNA, 30 bp, Artificial Sequence
  Synthetic oligonucleotide
ggagcgcaaaacctagcgggaggatatgtg

SEQ ID NO: 20989 - DNA, 30 bp, Artificial Sequence
  Synthetic oligonucleotide
gcgagtcataatacagatccaggcagtgtg

SEQ ID NO: 20990 - DNA, 30 bp, Artificial Sequence
  Synthetic oligonucleotide
agcaccctgctgaaaaagagacaagttgtg

SEQ ID NO: 20991 - DNA, 30 bp, Artificial Sequence
  Synthetic oligonucleotide
tctgattacggagtcgaagagggcggattg

SEQ ID NO: 20992 - DNA, 30 bp, Artificial Sequence
  Synthetic oligonucleotide
tggccagaaacgagtcgagtacatggattg

SEQ ID NO: 20993 - DNA, 30 bp, Artificial Sequence
  Synthetic oligonucleotide
acacgcggacagttcaggcgtaacatattg

SEQ ID NO: 20994 - DNA, 30 bp, Artificial Sequence
  Synthetic oligonucleotide
acgcgtacgacttacacagaattgaccttg

SEQ ID NO: 20995 - DNA, 30 bp, Artificial Sequence
  Synthetic oligonucleotide
cgcgaccagggccaaaccttagcatgcttg

SEQ ID NO: 20996 - DNA, 30 bp, Artificial Sequence
  Synthetic oligonucleotide
gtagaccagagactatgggcgaaggagttg

SEQ ID NO: 20997 - DNA, 30 bp, Artificial Sequence
  Synthetic oligonucleotide
acgtcgccctaaggccgtgacagggagttg

SEQ ID NO: 20998 - DNA, 30 bp, Artificial Sequence
  Synthetic oligonucleotide
gcattgatcaccgagatcgagtgtacgttg

SEQ ID NO: 20999 - DNA, 30 bp, Artificial Sequence
  Synthetic oligonucleotide
ttgaaccgggacatgaaagctgaaaatttg

SEQ ID NO: 21000 - DNA, 30 bp, Artificial Sequence
  Synthetic oligonucleotide
ctgctagaacaatctccgagaccaagtttg

SEQ ID NO: 21001 - DNA, 30 bp, Artificial Sequence
  Synthetic oligonucleotide
cggaaaaggacccaagtgcagtagctaaat

SEQ ID NO: 21002 - DNA, 30 bp, Artificial Sequence
  Synthetic oligonucleotide
cctgacatgctgcgaaccatgaacaacaat

SEQ ID NO: 21003 - DNA, 30 bp, Artificial Sequence
  Synthetic oligonucleotide
ccaggactgccgccaggggaacataacaat

SEQ ID NO: 21004 - DNA, 30 bp, Artificial Sequence
  Synthetic oligonucleotide
gcgaacatgacaaccagtgagacgcgtaat

SEQ ID NO: 21005 - DNA, 30 bp, Artificial Sequence
  Synthetic oligonucleotide
tacaccagaacaggttacagaaaccaacat

SEQ ID NO: 21006 - DNA, 32 bp, Artificial Sequence
  Synthetic oligonucleotide
tacgtagcggtgaagcgtatatgcaaggacat

SEQ ID NO: 21007 - DNA, 30 bp, Artificial Sequence
  Synthetic oligonucleotide
ctaaaggacactgctagaagggcaggacat

SEQ ID NO: 21008 - DNA, 30 bp, Artificial Sequence
  Synthetic oligonucleotide
cacgatagcgccccaacgaactccagccat

SEQ ID NO: 21009 - DNA, 30 bp, Artificial Sequence
  Synthetic oligonucleotide
gacgggattaagaagagaacctagggccat

SEQ ID NO: 21010 - DNA, 30 bp, Artificial Sequence
  Synthetic oligonucleotide
acagtgggaccggggaaagacgaatgccat

SEQ ID NO: 21011 - DNA, 30 bp, Artificial Sequence
  Synthetic oligonucleotide
tgagcctaaattgtggagccaaatgagcat

SEQ ID NO: 21012 - DNA, 30 bp, Artificial Sequence
  Synthetic oligonucleotide
agtactaagacaggagctcgaaatccgcat

SEQ ID NO: 21013 - DNA, 30 bp, Artificial Sequence
  Synthetic oligonucleotide
tcattgtcggttcatccccgagtttcgcat

SEQ ID NO: 21014 - DNA, 30 bp, Artificial Sequence
  Synthetic oligonucleotide
cgactcataggtgaactccagaagtgtcat

SEQ ID NO: 21015 - DNA, 30 bp, Artificial Sequence
  Synthetic oligonucleotide
ttgagttgagatagtcaaaatggcccagat

SEQ ID NO: 21016 - DNA, 30 bp, Artificial Sequence
  Synthetic oligonucleotide
aggcgccccaaagctgtaaagccgccagat

SEQ ID NO: 21017 - DNA, 30 bp, Artificial Sequence
  Synthetic oligonucleotide
tggtgtcaggaaaaggatctctgcctagat

SEQ ID NO: 21018 - DNA, 30 bp, Artificial Sequence
  Synthetic oligonucleotide
caaggtcactcaagccaagagctatgcgat

SEQ ID NO: 21019 - DNA, 30 bp, Artificial Sequence
  Synthetic oligonucleotide
tcgagaacatacgtctatgaacgattcgat

SEQ ID NO: 21020 - DNA, 30 bp, Artificial Sequence
  Synthetic oligonucleotide
gagagagatgaggaatgggtgcgaaaggat

SEQ ID NO: 21021 - DNA, 30 bp, Artificial Sequence
  Synthetic oligonucleotide
actaggtcacgagacacgagaagagtggat

SEQ ID NO: 21022 - DNA, 30 bp, Artificial Sequence
  Synthetic oligonucleotide
taaccagggcaaggtggacgaagaagtgat

SEQ ID NO: 21023 - DNA, 30 bp, Artificial Sequence
  Synthetic oligonucleotide
acgccaaggattctaagcagaccgagtgat

SEQ ID NO: 21024 - DNA, 30 bp, Artificial Sequence
  Synthetic oligonucleotide
aagttgggagactaaacgaagaaacgtgat

SEQ ID NO: 21025 - DNA, 30 bp, Artificial Sequence
  Synthetic oligonucleotide
gcggggaacagtattgccaacgacagatat

SEQ ID NO: 21026 - DNA, 30 bp, Artificial Sequence
  Synthetic oligonucleotide
aggctagccaaaacacagactgaccgatat

SEQ ID NO: 21027 - DNA, 30 bp, Artificial Sequence
  Synthetic oligonucleotide
ccgtatgagagtgagagagtatatcgatat

SEQ ID NO: 21028 - DNA, 30 bp, Artificial Sequence
  Synthetic oligonucleotide
gtagatggaatacctgacaagagagactat

SEQ ID NO: 21029 - DNA, 30 bp, Artificial Sequence
  Synthetic oligonucleotide
ggtgcggaggcgcgcccgaaatacggctat

SEQ ID NO: 21030 - DNA, 30 bp, Artificial Sequence
  Synthetic oligonucleotide
gggtgaaaaggcagagtcgcagagtgctat

SEQ ID NO: 21031 - DNA, 30 bp, Artificial Sequence
  Synthetic oligonucleotide
tcataatgccagcaagtaaagcaacagtat

SEQ ID NO: 21032 - DNA, 30 bp, Artificial Sequence
  Synthetic oligonucleotide
acgaccaacaagccgtgagactctgagtat

SEQ ID NO: 21033 - DNA, 30 bp, Artificial Sequence
  Synthetic oligonucleotide
gggcgcacattagccaagatcagcaaaact

SEQ ID NO: 21034 - DNA, 30 bp, Artificial Sequence
  Synthetic oligonucleotide
ggtagaggaacctgaaacagacataaaact

SEQ ID NO: 21035 - DNA, 30 bp, Artificial Sequence
  Synthetic oligonucleotide
aggacatagaaggtatacaacacgcaaact

SEQ ID NO: 21036 - DNA, 30 bp, Artificial Sequence
  Synthetic oligonucleotide
ccacgaggcacaatcaataccgtcgcaact

SEQ ID NO: 21037 - DNA, 30 bp, Artificial Sequence
  Synthetic oligonucleotide
cgagctgaggcctgtggagaattgcgcact

SEQ ID NO: 21038 - DNA, 30 bp, Artificial Sequence
  Synthetic oligonucleotide
atgcatcaaaacatagcagagtatgggact

SEQ ID NO: 21039 - DNA, 30 bp, Artificial Sequence
  Synthetic oligonucleotide
cgatgggcagaaaagcaccttatcattact

SEQ ID NO: 21040 - DNA, 30 bp, Artificial Sequence
  Synthetic oligonucleotide
catcgtaatctcggaaaggaagaagaacct

SEQ ID NO: 21041 - DNA, 30 bp, Artificial Sequence
  Synthetic oligonucleotide
tctatcgatgatgtctttaagttaacacct

SEQ ID NO: 21042 - DNA, 30 bp, Artificial Sequence
  Synthetic oligonucleotide
tgtcgacgggaaaagaaggagagaggacct

SEQ ID NO: 21043 - DNA, 30 bp, Artificial Sequence
  Synthetic oligonucleotide
tgtcacaaggagaaaaagttaaagtagcct

SEQ ID NO: 21044 - DNA, 30 bp, Artificial Sequence
  Synthetic oligonucleotide
cgaagaatcagggtgacataggctccagct

SEQ ID NO: 21045 - DNA, 30 bp, Artificial Sequence
  Synthetic oligonucleotide
cagcacagaaaagagtgtataacaaacgct

SEQ ID NO: 21046 - DNA, 30 bp, Artificial Sequence
  Synthetic oligonucleotide
gggtggaactaatcaaagaagtatatcgct

SEQ ID NO: 21047 - DNA, 30 bp, Artificial Sequence
  Synthetic oligonucleotide
taacccatcatgtcttgttactccttcgct

SEQ ID NO: 21048 - DNA, 31 bp, Artificial Sequence
  Synthetic oligonucleotide
cgggaagcagagaaaatgggcgtacgcgtct

SEQ ID NO: 21049 - DNA, 30 bp, Artificial Sequence
  Synthetic oligonucleotide
gcgataaaacaacatctccactgtctgtct

SEQ ID NO: 21050 - DNA, 30 bp, Artificial Sequence
  Synthetic oligonucleotide
caagttcgcatcaggtggccgggaaaaagt

SEQ ID NO: 21051 - DNA, 30 bp, Artificial Sequence
  Synthetic oligonucleotide
cggaccgtcgctgtgagccaacacgaaagt

SEQ ID NO: 21052 - DNA, 30 bp, Artificial Sequence
  Synthetic oligonucleotide
gtgatagcagagaatcagcgggcggaaagt

SEQ ID NO: 21053 - DNA, 30 bp, Artificial Sequence
  Synthetic oligonucleotide
gcggccatgcctagcgagtagaaagcaagt

SEQ ID NO: 21054 - DNA, 30 bp, Artificial Sequence
  Synthetic oligonucleotide
tcagggtgtaagtcgtcaactttagcaagt

SEQ ID NO: 21055 - DNA, 30 bp, Artificial Sequence
  Synthetic oligonucleotide
aacgaaccgaagtacagatgtgccagaagt

SEQ ID NO: 21056 - DNA, 30 bp, Artificial Sequence
  Synthetic oligonucleotide
caaacaaaagcacatcagcgtgagagcagt

SEQ ID NO: 21057 - DNA, 30 bp, Artificial Sequence
  Synthetic oligonucleotide
aggtgactaccaaaatttaggccctagagt

SEQ ID NO: 21058 - DNA, 30 bp, Artificial Sequence
  Synthetic oligonucleotide
tcatgtggccaagcacaacagagaccgagt

SEQ ID NO: 21059 - DNA, 30 bp, Artificial Sequence
  Synthetic oligonucleotide
ccatggcgagtaagagaaaatctactgagt

SEQ ID NO: 21060 - DNA, 30 bp, Artificial Sequence
  Synthetic oligonucleotide
gggagggaagcgaagcaaatcatccttagt

SEQ ID NO: 21061 - DNA, 30 bp, Artificial Sequence
  Synthetic oligonucleotide
ggcacaggactcataggaccaaagtaacgt

SEQ ID NO: 21062 - DNA, 30 bp, Artificial Sequence
  Synthetic oligonucleotide
agaggagacgaatcggagagaaccgcgcgt

SEQ ID NO: 21063 - DNA, 30 bp, Artificial Sequence
  Synthetic oligonucleotide
caagcctgtaggaatatgagtgtccgaggt

SEQ ID NO: 21064 - DNA, 30 bp, Artificial Sequence
  Synthetic oligonucleotide
cgatccgcacaaacgagtgatgcgataggt

SEQ ID NO: 21065 - DNA, 30 bp, Artificial Sequence
  Synthetic oligonucleotide
gaggggataccgagagaacatgcgctaggt

SEQ ID NO: 21066 - DNA, 30 bp, Artificial Sequence
  Synthetic oligonucleotide
cagtacggggagagctggtgcgagagcggt

SEQ ID NO: 21067 - DNA, 30 bp, Artificial Sequence
  Synthetic oligonucleotide
acgcacagtaagggaaaagacgaggagggt

SEQ ID NO: 21068 - DNA, 30 bp, Artificial Sequence
  Synthetic oligonucleotide
ttggaactagaaaagatagtgggtgagggt

SEQ ID NO: 21069 - DNA, 30 bp, Artificial Sequence
  Synthetic oligonucleotide
acgaacatgctggaactaaaggtggcgggt

SEQ ID NO: 21070 - DNA, 30 bp, Artificial Sequence
  Synthetic oligonucleotide
acatagaaacacactcactcaatgcgatgt

SEQ ID NO: 21071 - DNA, 30 bp, Artificial Sequence
  Synthetic oligonucleotide
acgtgaacaaatatggtcgtcgtgcgctgt

SEQ ID NO: 21072 - DNA, 30 bp, Artificial Sequence
  Synthetic oligonucleotide
caggggtggaatcaagaaagtacggacatt

SEQ ID NO: 21073 - DNA, 30 bp, Artificial Sequence
  Synthetic oligonucleotide
cgaaagatactgctgaataaagagccgatt

SEQ ID NO: 21074 - DNA, 30 bp, Artificial Sequence
  Synthetic oligonucleotide
acggcgaacgccatataagggaagtggatt

SEQ ID NO: 21075 - DNA, 30 bp, Artificial Sequence
  Synthetic oligonucleotide
ggcagagactgtcaccacgcccaccgactt

SEQ ID NO: 21076 - DNA, 30 bp, Artificial Sequence
  Synthetic oligonucleotide
aaggggagaacaaggcgagaggttaccctt

SEQ ID NO: 21077 - DNA, 30 bp, Artificial Sequence
  Synthetic oligonucleotide
atcgtgcgaacgtggaataaggagtgcctt

SEQ ID NO: 21078 - DNA, 30 bp, Artificial Sequence
  Synthetic oligonucleotide
gtacgagttcatattaggagagagtagctt

SEQ ID NO: 21079 - DNA, 31 bp, Artificial Sequence
  Synthetic oligonucleotide
acgtcgggggcaaacagggtcgaagcgtctt

SEQ ID NO: 21080 - DNA, 30 bp, Artificial Sequence
  Synthetic oligonucleotide
gggaaagtctcaggcaggaaaaaggcagtt

SEQ ID NO: 21081 - DNA, 30 bp, Artificial Sequence
  Synthetic oligonucleotide
cgggtaggagggcatcgaacgtactgagtt

SEQ ID NO: 21082 - DNA, 30 bp, Artificial Sequence
  Synthetic oligonucleotide
ggagcaccatcaggaccagggtagaccgtt

SEQ ID NO: 21083 - DNA, 30 bp, Artificial Sequence
  Synthetic oligonucleotide
gcgcccgcaaggtagggaaagtagtgcgtt

SEQ ID NO: 21084 - DNA, 30 bp, Artificial Sequence
  Synthetic oligonucleotide
atacagtggcaaagtgaacaatgctaggtt

SEQ ID NO: 21085 - DNA, 30 bp, Artificial Sequence
  Synthetic oligonucleotide
acgttgaaatcagggaagagagtcggggtt

SEQ ID NO: 21086 - DNA, 30 bp, Artificial Sequence
  Synthetic oligonucleotide
cgaaacaaaggatgatagttaatgtgggtt

SEQ ID NO: 21087 - DNA, 30 bp, Artificial Sequence
  Synthetic oligonucleotide
ggaggtaacagtaaaaggtgcacgcttgtt

SEQ ID NO: 21088 - DNA, 30 bp, Artificial Sequence
  Synthetic oligonucleotide
cgtggtgaaagagaaacgagccataggttt

SEQ ID NO: 21089 - DNA, 30 bp, Artificial Sequence
  Synthetic oligonucleotide
agaccacgaaaaaagtaaggggaaggtttt

SEQ ID NO: 21090 - DNA, 30 bp, Artificial Sequence
  Synthetic oligonucleotide
aaagaaggcgcgaggaggaacttgattttt

SEQ ID NO: 21091 - DNA, 30 bp, Artificial Sequence
  Synthetic oligonucleotide
gggatagcaccacgcccggacctccaaaaa

SEQ ID NO: 21092 - DNA, 30 bp, Artificial Sequence
  Synthetic oligonucleotide
aggacggaaggccgcgaagaatgcgaaaaa

SEQ ID NO: 21093 - DNA, 30 bp, Artificial Sequence
  Synthetic oligonucleotide
tcgcaagcggcgtggttcgagaaaacaaaa

SEQ ID NO: 21094 - DNA, 30 bp, Artificial Sequence
  Synthetic oligonucleotide
caacggaggaccatctccaaaccgccaaaa

SEQ ID NO: 21095 - DNA, 30 bp, Artificial Sequence
  Synthetic oligonucleotide
tcggccgtcagaaacaataggccagcaaaa

SEQ ID NO: 21096 - DNA, 30 bp, Artificial Sequence
  Synthetic oligonucleotide
atgggtgtgcagttacaaaagcgctcaaaa

SEQ ID NO: 21097 - DNA, 30 bp, Artificial Sequence
  Synthetic oligonucleotide
aggcaggcagtagacaccctccgtagaaaa

SEQ ID NO: 21098 - DNA, 30 bp, Artificial Sequence
  Synthetic oligonucleotide
aaggcacctaaacatacagaacgcggaaaa

SEQ ID NO: 21099 - DNA, 30 bp, Artificial Sequence
  Synthetic oligonucleotide
tcgtgcaacgagaatgttagtgttggaaaa

SEQ ID NO: 21100 - DNA, 30 bp, Artificial Sequence
  Synthetic oligonucleotide
accgctaatcagagagtattggcgataaaa

SEQ ID NO: 21101 - DNA, 30 bp, Artificial Sequence
  Synthetic oligonucleotide
aaaccgggcacatgtgaaaaaggtgacaaa

SEQ ID NO: 21102 - DNA, 30 bp, Artificial Sequence
  Synthetic oligonucleotide
cgtgtagagctacgcaagatccgaaccaaa

SEQ ID NO: 21103 - DNA, 30 bp, Artificial Sequence
  Synthetic oligonucleotide
atgtgggacaactgccgagtgcaagccaaa

SEQ ID NO: 21104 - DNA, 30 bp, Artificial Sequence
  Synthetic oligonucleotide
ggataatcaaataggaataaaagaggcaaa

SEQ ID NO: 21105 - DNA, 30 bp, Artificial Sequence
  Synthetic oligonucleotide
caaggcctgccaagtaataggcggtagaaa

SEQ ID NO: 21106 - DNA, 30 bp, Artificial Sequence
  Synthetic oligonucleotide
cggactaatctgaaggtatagtacacgaaa

SEQ ID NO: 21107 - DNA, 30 bp, Artificial Sequence
  Synthetic oligonucleotide
atcagcgcgaatgctataacagcagggaaa

SEQ ID NO: 21108 - DNA, 30 bp, Artificial Sequence
  Synthetic oligonucleotide
acaatcaccggataagaatcgctcatgaaa

SEQ ID NO: 21109 - DNA, 30 bp, Artificial Sequence
  Synthetic oligonucleotide
gcaccggtgagatcgaataccatcaataaa

SEQ ID NO: 21110 - DNA, 30 bp, Artificial Sequence
  Synthetic oligonucleotide
tgaggacctatgagctgctaccgaactaaa

SEQ ID NO: 21111 - DNA, 30 bp, Artificial Sequence
  Synthetic oligonucleotide
gggaaggtaaatgcgcggagagacggtaaa

SEQ ID NO: 21112 - DNA, 30 bp, Artificial Sequence
  Synthetic oligonucleotide
cgacgacgacaaaacgaatatgcatgtaaa

SEQ ID NO: 21113 - DNA, 30 bp, Artificial Sequence
  Synthetic oligonucleotide
cgggcaaaaacgcgtgaatatcagcttaaa

SEQ ID NO: 21114 - DNA, 30 bp, Artificial Sequence
  Synthetic oligonucleotide
acgaattctcgaacaagaaggcgcgttaaa

SEQ ID NO: 21115 - DNA, 30 bp, Artificial Sequence
  Synthetic oligonucleotide
agaagaggagggtggatcacaatttttaaa

SEQ ID NO: 21116 - DNA, 30 bp, Artificial Sequence
  Synthetic oligonucleotide
gcataacacccatatcgtccgaacaaacaa

SEQ ID NO: 21117 - DNA, 30 bp, Artificial Sequence
  Synthetic oligonucleotide
atagggctaaggaaaggaacgcgtcaacaa

SEQ ID NO: 21118 - DNA, 30 bp, Artificial Sequence
  Synthetic oligonucleotide
ccattcccaaataccggcaaaaaagaacaa

SEQ ID NO: 21119 - DNA, 30 bp, Artificial Sequence
  Synthetic oligonucleotide
acggcagcatcaactatagaaagaccacaa

SEQ ID NO: 21120 - DNA, 30 bp, Artificial Sequence
  Synthetic oligonucleotide
acgccaactaatagactagctcgagcacaa

SEQ ID NO: 21121 - DNA, 30 bp, Artificial Sequence
  Synthetic oligonucleotide
cggagagcgtctcgaagtcaaaaggcacaa

SEQ ID NO: 21122 - DNA, 30 bp, Artificial Sequence
  Synthetic oligonucleotide
accgaaatgggggaactagggtggcgacaa

SEQ ID NO: 21123 - DNA, 30 bp, Artificial Sequence
  Synthetic oligonucleotide
tgccggataagtgggcttggagctcgacaa

SEQ ID NO: 21124 - DNA, 30 bp, Artificial Sequence
  Synthetic oligonucleotide
ggtaagcgactgagagaacgatatttacaa

SEQ ID NO: 21125 - DNA, 30 bp, Artificial Sequence
  Synthetic oligonucleotide
gtgcgaacgagagttcttagataagaccaa

SEQ ID NO: 21126 - DNA, 30 bp, Artificial Sequence
  Synthetic oligonucleotide
ggaagcgggcaaatcatgctcatgtaccaa

SEQ ID NO: 21127 - DNA, 30 bp, Artificial Sequence
  Synthetic oligonucleotide
ggaaccaaacacgcattcggcaaaacccaa

SEQ ID NO: 21128 - DNA, 30 bp, Artificial Sequence
  Synthetic oligonucleotide
tggtggcagagccataagtgtgtccagcaa

SEQ ID NO: 21129 - DNA, 30 bp, Artificial Sequence
  Synthetic oligonucleotide
acaggtaccgtaaagaagtgtccagagcaa

SEQ ID NO: 21130 - DNA, 30 bp, Artificial Sequence
  Synthetic oligonucleotide
aacacaacttcggaaaccatgtgatagcaa

SEQ ID NO: 21131 - DNA, 30 bp, Artificial Sequence
  Synthetic oligonucleotide
gatacagtaagtggagaggggtaggcgcaa

SEQ ID NO: 21132 - DNA, 30 bp, Artificial Sequence
  Synthetic oligonucleotide
cccggggaaaggtaactgaaaccatcgcaa

SEQ ID NO: 21133 - DNA, 30 bp, Artificial Sequence
  Synthetic oligonucleotide
gcgcgcacaatgagatagcaccgagggcaa

SEQ ID NO: 21134 - DNA, 30 bp, Artificial Sequence
  Synthetic oligonucleotide
atcggtaagcacaaactgagttcgcgtcaa

SEQ ID NO: 21135 - DNA, 30 bp, Artificial Sequence
  Synthetic oligonucleotide
agcaggacttgatgggtgcgcgagtgtcaa

SEQ ID NO: 21136 - DNA, 30 bp, Artificial Sequence
  Synthetic oligonucleotide
aagcaggaacaggagttcgcgagccttcaa

SEQ ID NO: 21137 - DNA, 30 bp, Artificial Sequence
  Synthetic oligonucleotide
tgatgaacggaagttgtgaccgataaagaa

SEQ ID NO: 21138 - DNA, 30 bp, Artificial Sequence
  Synthetic oligonucleotide
tgaatcagcacgaataagtgtcaacaagaa

SEQ ID NO: 21139 - DNA, 30 bp, Artificial Sequence
  Synthetic oligonucleotide
gtaggttggcagaagggagcagagtaagaa

SEQ ID NO: 21140 - DNA, 30 bp, Artificial Sequence
  Synthetic oligonucleotide
aatgggcaccaagtcggcaataacacagaa

SEQ ID NO: 21141 - DNA, 30 bp, Artificial Sequence
  Synthetic oligonucleotide
aatactacgacaaatctcgagctaccagaa

SEQ ID NO: 21142 - DNA, 30 bp, Artificial Sequence
  Synthetic oligonucleotide
ggatcacagcgtgataaaaccagtgcagaa

SEQ ID NO: 21143 - DNA, 30 bp, Artificial Sequence
  Synthetic oligonucleotide
acggtgctcacggcggtgtgtaacagagaa

SEQ ID NO: 21144 - DNA, 30 bp, Artificial Sequence
  Synthetic oligonucleotide
cgggggtagtaagtaccagttaggagagaa

SEQ ID NO: 21145 - DNA, 30 bp, Artificial Sequence
  Synthetic oligonucleotide
aacggtagcggtgccagaaatactagagaa

SEQ ID NO: 21146 - DNA, 30 bp, Artificial Sequence
  Synthetic oligonucleotide
tactggaaagggatcaacctagggggagaa

SEQ ID NO: 21147 - DNA, 30 bp, Artificial Sequence
  Synthetic oligonucleotide
ggagtgaggagttagtagtctgtatgagaa

SEQ ID NO: 21148 - DNA, 30 bp, Artificial Sequence
  Synthetic oligonucleotide
gtgagcgagaatgggttcctccagctagaa

SEQ ID NO: 21149 - DNA, 30 bp, Artificial Sequence
  Synthetic oligonucleotide
atgccgacaagcatgcaagcaaaatacgaa

SEQ ID NO: 21150 - DNA, 30 bp, Artificial Sequence
  Synthetic oligonucleotide
tggtcataagcaggactgggatcgaccgaa

SEQ ID NO: 21151 - DNA, 30 bp, Artificial Sequence
  Synthetic oligonucleotide
ggggcgtaatcaccgcaataaagctccgaa

SEQ ID NO: 21152 - DNA, 30 bp, Artificial Sequence
  Synthetic oligonucleotide
ttgccagagcgaggacaagccgagtccgaa

SEQ ID NO: 21153 - DNA, 30 bp, Artificial Sequence
  Synthetic oligonucleotide
tggacaggtgatactggtctgaatagcgaa

SEQ ID NO: 21154 - DNA, 30 bp, Artificial Sequence
  Synthetic oligonucleotide
tggacgtttcaatgaccgagggaaaaggaa

SEQ ID NO: 21155 - DNA, 30 bp, Artificial Sequence
  Synthetic oligonucleotide
ggcacatttcagtaagagtttgagcaggaa

SEQ ID NO: 21156 - DNA, 30 bp, Artificial Sequence
  Synthetic oligonucleotide
ttgacgtaagttagaaaaagggagccggaa

SEQ ID NO: 21157 - DNA, 30 bp, Artificial Sequence
  Synthetic oligonucleotide
tacgctctgcactatattgtgaacagggaa

SEQ ID NO: 21158 - DNA, 30 bp, Artificial Sequence
  Synthetic oligonucleotide
cgccaaacacgtaaacgtcatccgcgggaa

SEQ ID NO: 21159 - DNA, 30 bp, Artificial Sequence
  Synthetic oligonucleotide
ctggcgaagcacagcgtggagcgtgtggaa

SEQ ID NO: 21160 - DNA, 30 bp, Artificial Sequence
  Synthetic oligonucleotide
catctacgaagggttgggacatagttggaa

SEQ ID NO: 21161 - DNA, 30 bp, Artificial Sequence
  Synthetic oligonucleotide
ggagagatgccgatatatccacaggctgaa

SEQ ID NO: 21162 - DNA, 30 bp, Artificial Sequence
  Synthetic oligonucleotide
tcggattgagaatacccatagcagattgaa

SEQ ID NO: 21163 - DNA, 30 bp, Artificial Sequence
  Synthetic oligonucleotide
tgaatacggaaaaacctaagagctaaataa

SEQ ID NO: 21164 - DNA, 30 bp, Artificial Sequence
  Synthetic oligonucleotide
acagtacaacatacgtcccacatgcaataa

SEQ ID NO: 21165 - DNA, 30 bp, Artificial Sequence
  Synthetic oligonucleotide
tggcaagtgagaggtgggttatagacataa

SEQ ID NO: 21166 - DNA, 30 bp, Artificial Sequence
  Synthetic oligonucleotide
aaccggcaagctaagagtacataagcataa

SEQ ID NO: 21167 - DNA, 30 bp, Artificial Sequence
  Synthetic oligonucleotide
ggggagggccaacgtcacttggtagcataa

SEQ ID NO: 21168 - DNA, 30 bp, Artificial Sequence
  Synthetic oligonucleotide
acggagacgtaatacgtccaagcaatataa

SEQ ID NO: 21169 - DNA, 30 bp, Artificial Sequence
  Synthetic oligonucleotide
gatgctgaaggggaggcaattgtgacctaa

SEQ ID NO: 21170 - DNA, 30 bp, Artificial Sequence
  Synthetic oligonucleotide
acggaacagagtattggcgaaaacggctaa

SEQ ID NO: 21171 - DNA, 30 bp, Artificial Sequence
  Synthetic oligonucleotide
cgataataagtccgaatcttgggcgtctaa

SEQ ID NO: 21172 - DNA, 30 bp, Artificial Sequence
  Synthetic oligonucleotide
tcaaatcaagaagcctgcgcaactgcgtaa

SEQ ID NO: 21173 - DNA, 30 bp, Artificial Sequence
  Synthetic oligonucleotide
gaaacacaaggtgatgtcaaaggaaggtaa

SEQ ID NO: 21174 - DNA, 30 bp, Artificial Sequence
  Synthetic oligonucleotide
agataagaagatagatgtcactgcttgtaa

SEQ ID NO: 21175 - DNA, 30 bp, Artificial Sequence
  Synthetic oligonucleotide
ctggcgaaaaagatcaggcgccaccattaa

SEQ ID NO: 21176 - DNA, 30 bp, Artificial Sequence
  Synthetic oligonucleotide
ggggaatgatactggtccacgagtgattaa

SEQ ID NO: 21177 - DNA, 30 bp, Artificial Sequence
  Synthetic oligonucleotide
actggcggataggcggggggaaccagttaa

SEQ ID NO: 21178 - DNA, 30 bp, Artificial Sequence
  Synthetic oligonucleotide
aacgtcgtctgcaggccgaggtccagttaa

SEQ ID NO: 21179 - DNA, 30 bp, Artificial Sequence
  Synthetic oligonucleotide
agggaggcgacaagcactaggcgagtttaa

SEQ ID NO: 21180 - DNA, 30 bp, Artificial Sequence
  Synthetic oligonucleotide
atgagaactatcggagcggcttgcgaaaca

SEQ ID NO: 21181 - DNA, 30 bp, Artificial Sequence
  Synthetic oligonucleotide
agtccgataataaggcaattgagcacaaca

SEQ ID NO: 21182 - DNA, 30 bp, Artificial Sequence
  Synthetic oligonucleotide
agaggagctaagcgtatcctagtggcaaca

SEQ ID NO: 21183 - DNA, 30 bp, Artificial Sequence
  Synthetic oligonucleotide
gggcggtgcacagagaaagggatcagaaca

SEQ ID NO: 21184 - DNA, 30 bp, Artificial Sequence
  Synthetic oligonucleotide
cggaatcgcgctacgtccctcacgagaaca

SEQ ID NO: 21185 - DNA, 30 bp, Artificial Sequence
  Synthetic oligonucleotide
acgataggttggacaaacatctgaataaca

SEQ ID NO: 21186 - DNA, 30 bp, Artificial Sequence
  Synthetic oligonucleotide
ctgatcgatatacagacacaagatgtaaca

SEQ ID NO: 21187 - DNA, 30 bp, Artificial Sequence
  Synthetic oligonucleotide
catacaagaatcaagtaggggacacacaca

SEQ ID NO: 21188 - DNA, 30 bp, Artificial Sequence
  Synthetic oligonucleotide
tgatcgaatacgccaaacagcgctcacaca

SEQ ID NO: 21189 - DNA, 30 bp, Artificial Sequence
  Synthetic oligonucleotide
acaattggaacatgaaagccaaacgacaca

SEQ ID NO: 21190 - DNA, 30 bp, Artificial Sequence
  Synthetic oligonucleotide
cgctagaagaaaaaaattagtttcagcaca

SEQ ID NO: 21191 - DNA, 30 bp, Artificial Sequence
  Synthetic oligonucleotide
aagcgagcttcgatccagcagtagcgcaca

SEQ ID NO: 21192 - DNA, 30 bp, Artificial Sequence
  Synthetic oligonucleotide
gtgagaggagtcactcgagaattgcgcaca

SEQ ID NO: 21193 - DNA, 30 bp, Artificial Sequence
  Synthetic oligonucleotide
acggatcgccgagcttccagtgacatcaca

SEQ ID NO: 21194 - DNA, 30 bp, Artificial Sequence
  Synthetic oligonucleotide
caaggaagactgttcatcgatagtatcaca

SEQ ID NO: 21195 - DNA, 30 bp, Artificial Sequence
  Synthetic oligonucleotide
agatgtggctcttacataagcccagagaca

SEQ ID NO: 21196 - DNA, 30 bp, Artificial Sequence
  Synthetic oligonucleotide
cgtaaatctcaaaagccaaggaaatagaca

SEQ ID NO: 21197 - DNA, 30 bp, Artificial Sequence
  Synthetic oligonucleotide
gctcgccagagaatagtatgtccgccgaca

SEQ ID NO: 21198 - DNA, 30 bp, Artificial Sequence
  Synthetic oligonucleotide
ggaactacgggctacaaccaacggcggaca

SEQ ID NO: 21199 - DNA, 30 bp, Artificial Sequence
  Synthetic oligonucleotide
gggccagattatgacgatgtaccatggaca

SEQ ID NO: 21200 - DNA, 30 bp, Artificial Sequence
  Synthetic oligonucleotide
gaggaagagaatcacatattgctgtggaca

SEQ ID NO: 21201 - DNA, 30 bp, Artificial Sequence
  Synthetic oligonucleotide
ggcccgacggtaacgagtacggaaaataca

SEQ ID NO: 21202 - DNA, 30 bp, Artificial Sequence
  Synthetic oligonucleotide
cgagggcaagtaaaggcagaatggactaca

SEQ ID NO: 21203 - DNA, 30 bp, Artificial Sequence
  Synthetic oligonucleotide
cgagcaacgatcgcgcgataccatagtaca

SEQ ID NO: 21204 - DNA, 30 bp, Artificial Sequence
  Synthetic oligonucleotide
acatgtaatcaacatatcacaccggaacca

SEQ ID NO: 21205 - DNA, 30 bp, Artificial Sequence
  Synthetic oligonucleotide
actcaagagccaacacatgaaacttcacca

SEQ ID NO: 21206 - DNA, 30 bp, Artificial Sequence
  Synthetic oligonucleotide
ccgagaatagcgagctccacacccagacca

SEQ ID NO: 21207 - DNA, 30 bp, Artificial Sequence
  Synthetic oligonucleotide
acagagcactagcaatagctgggcagccca

SEQ ID NO: 21208 - DNA, 30 bp, Artificial Sequence
  Synthetic oligonucleotide
cgccagtgtaagcaggtcgcaagcggccca

SEQ ID NO: 21209 - DNA, 30 bp, Artificial Sequence
  Synthetic oligonucleotide
tgtagcaaaagaaagtgtgagtagatccca

SEQ ID NO: 21210 - DNA, 30 bp, Artificial Sequence
  Synthetic oligonucleotide
agaaggtgtgggcatggagtgtcgaagcca

SEQ ID NO: 21211 - DNA, 30 bp, Artificial Sequence
  Synthetic oligonucleotide
ccacatgtatcgagtgcaactgagtagcca

SEQ ID NO: 21212 - DNA, 30 bp, Artificial Sequence
  Synthetic oligonucleotide
cctagcgaactaacacacatacacccgcca

SEQ ID NO: 21213 - DNA, 30 bp, Artificial Sequence
  Synthetic oligonucleotide
cgaacctaaactgccaagcagtcgtcgcca

SEQ ID NO: 21214 - DNA, 30 bp, Artificial Sequence
  Synthetic oligonucleotide
cgtgagtcgatactatgcgtagtgatgcca

SEQ ID NO: 21215 - DNA, 30 bp, Artificial Sequence
  Synthetic oligonucleotide
cagagcctagacctgagacagggtacagca

SEQ ID NO: 21216 - DNA, 30 bp, Artificial Sequence
  Synthetic oligonucleotide
agatatagaatgagacttctcaccagagca

SEQ ID NO: 21217 - DNA, 30 bp, Artificial Sequence
  Synthetic oligonucleotide
cgtggaaacagttgtaaaatactggtagca

SEQ ID NO: 21218 - DNA, 30 bp, Artificial Sequence
  Synthetic oligonucleotide
agaacgacaaagcggacaaattccttagca

SEQ ID NO: 21219 - DNA, 30 bp, Artificial Sequence
  Synthetic oligonucleotide
cacggttgagtaaaacagaggtatttagca

SEQ ID NO: 21220 - DNA, 30 bp, Artificial Sequence
  Synthetic oligonucleotide
agcgaatcgctagggctgcgggtagaggca

SEQ ID NO: 21221 - DNA, 30 bp, Artificial Sequence
  Synthetic oligonucleotide
acacggaggcaaagacacgcatccgaggca

SEQ ID NO: 21222 - DNA, 30 bp, Artificial Sequence
  Synthetic oligonucleotide
agttgaatcgagagacgtagttgtagggca

SEQ ID NO: 21223 - DNA, 30 bp, Artificial Sequence
  Synthetic oligonucleotide
catacatgagggagtcagagggaacatgca

SEQ ID NO: 21224 - DNA, 30 bp, Artificial Sequence
  Synthetic oligonucleotide
cgcaagggcgaacagaaacagatatatgca

SEQ ID NO: 21225 - DNA, 30 bp, Artificial Sequence
  Synthetic oligonucleotide
agtgtaccggggaaaacagcatcttgtgca

SEQ ID NO: 21226 - DNA, 30 bp, Artificial Sequence
  Synthetic oligonucleotide
cggacgaattgactaaagggcaagtttgca

SEQ ID NO: 21227 - DNA, 30 bp, Artificial Sequence
  Synthetic oligonucleotide
ggcatgtagggtgaagaagggatagaatca

SEQ ID NO: 21228 - DNA, 30 bp, Artificial Sequence
  Synthetic oligonucleotide
gctagcgaaggtcaaacccatagtgaatca

SEQ ID NO: 21229 - DNA, 30 bp, Artificial Sequence
  Synthetic oligonucleotide
tcgtaaactgcaattcaaacctcgacatca

SEQ ID NO: 21230 - DNA, 30 bp, Artificial Sequence
  Synthetic oligonucleotide
atggagcgcaatgctcctcgacaaagatca

SEQ ID NO: 21231 - DNA, 30 bp, Artificial Sequence
  Synthetic oligonucleotide
cgtcgtgtgagaatatcgagaagcagatca

SEQ ID NO: 21232 - DNA, 30 bp, Artificial Sequence
  Synthetic oligonucleotide
agggtaatgattgtagtggaaatgagctca

SEQ ID NO: 21233 - DNA, 30 bp, Artificial Sequence
  Synthetic oligonucleotide
ctcgttggactcgaagcagagcgacagtca

SEQ ID NO: 21234 - DNA, 30 bp, Artificial Sequence
  Synthetic oligonucleotide
cggaagcggaccgaaggacgccagacgtca

SEQ ID NO: 21235 - DNA, 30 bp, Artificial Sequence
  Synthetic oligonucleotide
ggattagtcggtaccacgaacaacccgtca

SEQ ID NO: 21236 - DNA, 30 bp, Artificial Sequence
  Synthetic oligonucleotide
tacagacgagaacaagtgtgcataaggtca

SEQ ID NO: 21237 - DNA, 30 bp, Artificial Sequence
  Synthetic oligonucleotide
aaacgaggatcaggcacgcgcgaaatgtca

SEQ ID NO: 21238 - DNA, 30 bp, Artificial Sequence
  Synthetic oligonucleotide
ccagaggcaatgcagaaagatgctgattca

SEQ ID NO: 21239 - DNA, 30 bp, Artificial Sequence
  Synthetic oligonucleotide
gggtccgaagcagaaaaatgggagcaaaga

SEQ ID NO: 21240 - DNA, 30 bp, Artificial Sequence
  Synthetic oligonucleotide
gctctaatcggtaataacagaatgcaaaga

SEQ ID NO: 21241 - DNA, 30 bp, Artificial Sequence
  Synthetic oligonucleotide
cgaagtgatggcggatcagtaaccccaaga

SEQ ID NO: 21242 - DNA, 30 bp, Artificial Sequence
  Synthetic oligonucleotide
agtcaagtggtggaggtctatcatcgaaga

SEQ ID NO: 21243 - DNA, 30 bp, Artificial Sequence
  Synthetic oligonucleotide
agttaggagtgagacttactaggaggaaga

SEQ ID NO: 21244 - DNA, 30 bp, Artificial Sequence
  Synthetic oligonucleotide
gatcaaactgctatcagagccgagggaaga

SEQ ID NO: 21245 - DNA, 30 bp, Artificial Sequence
  Synthetic oligonucleotide
gtaacgggtgaaaatcaacgaggtggaaga

SEQ ID NO: 21246 - DNA, 30 bp, Artificial Sequence
  Synthetic oligonucleotide
tcgatctcgatatcacctagtaggataaga

SEQ ID NO: 21247 - DNA, 30 bp, Artificial Sequence
  Synthetic oligonucleotide
ccttgtggtcggaaaaagggcttgataaga

SEQ ID NO: 21248 - DNA, 30 bp, Artificial Sequence
  Synthetic oligonucleotide
tcttcacgggtgtaataaggggggcacaga

SEQ ID NO: 21249 - DNA, 30 bp, Artificial Sequence
  Synthetic oligonucleotide
ctggcgatagcagccacgactatgcacaga

SEQ ID NO: 21250 - DNA, 30 bp, Artificial Sequence
  Synthetic oligonucleotide
aggaatagcccggagaatagctcggacaga

SEQ ID NO: 21251 - DNA, 30 bp, Artificial Sequence
  Synthetic oligonucleotide
cacaaggctcagtatcgtaaaacctacaga

SEQ ID NO: 21252 - DNA, 30 bp, Artificial Sequence
  Synthetic oligonucleotide
tagcaagcaagcgagttcaataacaccaga

SEQ ID NO: 21253 - DNA, 30 bp, Artificial Sequence
  Synthetic oligonucleotide
acgaggattttgcctgttctgcccgccaga

SEQ ID NO: 21254 - DNA, 30 bp, Artificial Sequence
  Synthetic oligonucleotide
tggcagtgcttaaacagtgcccgtgccaga

SEQ ID NO: 21255 - DNA, 30 bp, Artificial Sequence
  Synthetic oligonucleotide
atcagtgggaacagagcaagagacggcaga

SEQ ID NO: 21256 - DNA, 30 bp, Artificial Sequence
  Synthetic oligonucleotide
gcgggtaaatggtgagactagactggcaga

SEQ ID NO: 21257 - DNA, 30 bp, Artificial Sequence
  Synthetic oligonucleotide
ccagggcacatggttatatgcacatgcaga

SEQ ID NO: 21258 - DNA, 30 bp, Artificial Sequence
  Synthetic oligonucleotide
taacggaccaggcaccgtagtggcctcaga

SEQ ID NO: 21259 - DNA, 30 bp, Artificial Sequence
  Synthetic oligonucleotide
gacaggaataactctcaacccgtaaagaga

SEQ ID NO: 21260 - DNA, 30 bp, Artificial Sequence
  Synthetic oligonucleotide
tatgccaaagactattaggttacacagaga

SEQ ID NO: 21261 - DNA, 30 bp, Artificial Sequence
  Synthetic oligonucleotide
cgcaaatgcgggctgctgttcggtgagaga

SEQ ID NO: 21262 - DNA, 30 bp, Artificial Sequence
  Synthetic oligonucleotide
aggtatggttcgagggatcgaatctagaga

SEQ ID NO: 21263 - DNA, 30 bp, Artificial Sequence
  Synthetic oligonucleotide
cgacggaaaatgagaacatcaaaaaggaga

SEQ ID NO: 21264 - DNA, 30 bp, Artificial Sequence
  Synthetic oligonucleotide
tacttagcgtgataagatagagaaaggaga

SEQ ID NO: 21265 - DNA, 30 bp, Artificial Sequence
  Synthetic oligonucleotide
ggtcaggattacaagcaacgctagaggaga

SEQ ID NO: 21266 - DNA, 30 bp, Artificial Sequence
  Synthetic oligonucleotide
ccacgccgaattggtacaagggtcgggaga

SEQ ID NO: 21267 - DNA, 30 bp, Artificial Sequence
  Synthetic oligonucleotide
gggaagtaggcggcaatgatcccactgaga

SEQ ID NO: 21268 - DNA, 30 bp, Artificial Sequence
  Synthetic oligonucleotide
acgatattacgagttacggtaagtgtgaga

SEQ ID NO: 21269 - DNA, 30 bp, Artificial Sequence
  Synthetic oligonucleotide
atcgtacagcggtgaatttagtgcttgaga

SEQ ID NO: 21270 - DNA, 30 bp, Artificial Sequence
  Synthetic oligonucleotide
cgggtgtgaagagctgaagcgacaaataga

SEQ ID NO: 21271 - DNA, 30 bp, Artificial Sequence
  Synthetic oligonucleotide
taacgggctcacacgatgaacctacataga

SEQ ID NO: 21272 - DNA, 30 bp, Artificial Sequence
  Synthetic oligonucleotide
cataacagcgacggtgcgggaaaagataga

SEQ ID NO: 21273 - DNA, 30 bp, Artificial Sequence
  Synthetic oligonucleotide
aaaccggtaatcgaaggaaagcgtgctaga

SEQ ID NO: 21274 - DNA, 30 bp, Artificial Sequence
  Synthetic oligonucleotide
ctgtggaagtagaagaccattcgaggtaga

SEQ ID NO: 21275 - DNA, 30 bp, Artificial Sequence
  Synthetic oligonucleotide
taccggcactacgacccaaaaacccaacga

SEQ ID NO: 21276 - DNA, 30 bp, Artificial Sequence
  Synthetic oligonucleotide
ctaagcgattatagcagtagcccgtaacga

SEQ ID NO: 21277 - DNA, 30 bp, Artificial Sequence
  Synthetic oligonucleotide
ccgcaacggagcccataaaacaatacacga

SEQ ID NO: 21278 - DNA, 30 bp, Artificial Sequence
  Synthetic oligonucleotide
cataccgcggggtaaggtgtcgggggacga

SEQ ID NO: 21279 - DNA, 30 bp, Artificial Sequence
  Synthetic oligonucleotide
tgagaacaaggcatcacaccattcgtacga

SEQ ID NO: 21280 - DNA, 30 bp, Artificial Sequence
  Synthetic oligonucleotide
tctaagagagaaataaaatctaagttccga

SEQ ID NO: 21281 - DNA, 30 bp, Artificial Sequence
  Synthetic oligonucleotide
ggcccaggccacctaaagtcaaccaagcga

SEQ ID NO: 21282 - DNA, 31 bp, Artificial Sequence
  Synthetic oligonucleotide
ctcgatatagaaacagagaaactggtcgcga

SEQ ID NO: 21283 - DNA, 30 bp, Artificial Sequence
  Synthetic oligonucleotide
gcgggtggctctgaaagcgaaaacgggcga

SEQ ID NO: 21284 - DNA, 30 bp, Artificial Sequence
  Synthetic oligonucleotide
caagtgacgtcaacacccaaaatcatgcga

SEQ ID NO: 21285 - DNA, 30 bp, Artificial Sequence
  Synthetic oligonucleotide
acgagcgctgtagtcaaaagtagcgtgcga

SEQ ID NO: 21286 - DNA, 30 bp, Artificial Sequence
  Synthetic oligonucleotide
gtggtggacaatcaaaggtgtaatgtgcga

SEQ ID NO: 21287 - DNA, 30 bp, Artificial Sequence
  Synthetic oligonucleotide
taagggcgaagaaataccatgtagttgcga

SEQ ID NO: 21288 - DNA, 30 bp, Artificial Sequence
  Synthetic oligonucleotide
gctcgcaaagtaggattcaagcgtcatcga

SEQ ID NO: 21289 - DNA, 30 bp, Artificial Sequence
  Synthetic oligonucleotide
cacactatggtgcttaaaagggagtatcga

SEQ ID NO: 21290 - DNA, 30 bp, Artificial Sequence
  Synthetic oligonucleotide
tcgagcggacagagtgggggaggttatcga

SEQ ID NO: 21291 - DNA, 30 bp, Artificial Sequence
  Synthetic oligonucleotide
cctcaagcaggataaaggccagcggctcga

SEQ ID NO: 21292 - DNA, 30 bp, Artificial Sequence
  Synthetic oligonucleotide
aggaaggatctggagagacacggcaaagga

SEQ ID NO: 21293 - DNA, 30 bp, Artificial Sequence
  Synthetic oligonucleotide
acgcaaagcgagtcccaacacagtacagga

SEQ ID NO: 21294 - DNA, 30 bp, Artificial Sequence
  Synthetic oligonucleotide
cagtcagacgatacgacactcacagcagga

SEQ ID NO: 21295 - DNA, 30 bp, Artificial Sequence
  Synthetic oligonucleotide
cgaccatgaggaggacaccattcatcagga

SEQ ID NO: 21296 - DNA, 30 bp, Artificial Sequence
  Synthetic oligonucleotide
aggattcgtgagaagaggtacatccgagga

SEQ ID NO: 21297 - DNA, 30 bp, Artificial Sequence
  Synthetic oligonucleotide
aacatccattagctaacagaaaggcgagga

SEQ ID NO: 21298 - DNA, 30 bp, Artificial Sequence
  Synthetic oligonucleotide
cgttaagtgcttcgtagctaatagggagga

SEQ ID NO: 21299 - DNA, 30 bp, Artificial Sequence
  Synthetic oligonucleotide
tgacaaatatacactactataccgcccgga

SEQ ID NO: 21300 - DNA, 30 bp, Artificial Sequence
  Synthetic oligonucleotide
ccgtaacgcgtatacaaaggaacatccgga

SEQ ID NO: 21301 - DNA, 30 bp, Artificial Sequence
  Synthetic oligonucleotide
tcgggatcagggtagcgcgatcatggcgga

SEQ ID NO: 21302 - DNA, 30 bp, Artificial Sequence
  Synthetic oligonucleotide
ggaagagattggaaactcgaagtcaaggga

SEQ ID NO: 21303 - DNA, 30 bp, Artificial Sequence
  Synthetic oligonucleotide
agaataatagtgcacaaaattcgcgaggga

SEQ ID NO: 21304 - DNA, 30 bp, Artificial Sequence
  Synthetic oligonucleotide
actgcgacaatgtgcgtattgtgaccggga

SEQ ID NO: 21305 - DNA, 30 bp, Artificial Sequence
  Synthetic oligonucleotide
caacttcagagaggccagttagcttcggga

SEQ ID NO: 21306 - DNA, 30 bp, Artificial Sequence
  Synthetic oligonucleotide
gcgtacatctacagagtggaacagagggga

SEQ ID NO: 21307 - DNA, 30 bp, Artificial Sequence
  Synthetic oligonucleotide
tgttaaggggtaaaaagcgaagatagggga

SEQ ID NO: 21308 - DNA, 30 bp, Artificial Sequence
  Synthetic oligonucleotide
agagcggataaaagcattaatacgggggga

SEQ ID NO: 21309 - DNA, 30 bp, Artificial Sequence
  Synthetic oligonucleotide
gacagatcgaagtacaggcatactggggga

SEQ ID NO: 21310 - DNA, 30 bp, Artificial Sequence
  Synthetic oligonucleotide
ccatagaccaggggcgtgactcggatggga

SEQ ID NO: 21311 - DNA, 30 bp, Artificial Sequence
  Synthetic oligonucleotide
acgacgcgccggacacgagtagcagatgga

SEQ ID NO: 21312 - DNA, 30 bp, Artificial Sequence
  Synthetic oligonucleotide
gcgaaaacgcgctgagtaatacactatgga

SEQ ID NO: 21313 - DNA, 30 bp, Artificial Sequence
  Synthetic oligonucleotide
aaacacaacacacgctgtcgatatgctgga

SEQ ID NO: 21314 - DNA, 30 bp, Artificial Sequence
  Synthetic oligonucleotide
aggaggagccaacattaactgagccgtgga

SEQ ID NO: 21315 - DNA, 30 bp, Artificial Sequence
  Synthetic oligonucleotide
aggacatcgtcatatattaaaagtggtgga

SEQ ID NO: 21316 - DNA, 30 bp, Artificial Sequence
  Synthetic oligonucleotide
ctgctaacttaagaagtccaaccacaatga

SEQ ID NO: 21317 - DNA, 30 bp, Artificial Sequence
  Synthetic oligonucleotide
ggagaacaggaaaaatatccgagacaatga

SEQ ID NO: 21318 - DNA, 30 bp, Artificial Sequence
  Synthetic oligonucleotide
ccgacgaagacgtacgttggcagtcaatga

SEQ ID NO: 21319 - DNA, 30 bp, Artificial Sequence
  Synthetic oligonucleotide
ttgaaggaaatggtgacgtccagtgtatga

SEQ ID NO: 21320 - DNA, 30 bp, Artificial Sequence
  Synthetic oligonucleotide
acacaaggcatggataagtaacccaactga

SEQ ID NO: 21321 - DNA, 30 bp, Artificial Sequence
  Synthetic oligonucleotide
ggaacacaattgtacagtaccccgaagtga

SEQ ID NO: 21322 - DNA, 31 bp, Artificial Sequence
  Synthetic oligonucleotide
cactaggctaagcagtccgtaccacgagtga

SEQ ID NO: 21323 - DNA, 30 bp, Artificial Sequence
  Synthetic oligonucleotide
taagagagaccacgccactgttatgagtga

SEQ ID NO: 21324 - DNA, 30 bp, Artificial Sequence
  Synthetic oligonucleotide
cgatataccagttaatcaggtcttgagtga

SEQ ID NO: 21325 - DNA, 30 bp, Artificial Sequence
  Synthetic oligonucleotide
aaggaggggcgtcgccgagaattgtagtga

SEQ ID NO: 21326 - DNA, 30 bp, Artificial Sequence
  Synthetic oligonucleotide
ttggacatgattgcccagcgaacgaggtga

SEQ ID NO: 21327 - DNA, 30 bp, Artificial Sequence
  Synthetic oligonucleotide
gtcgggcgcgacccggtcaagtaagggtga

SEQ ID NO: 21328 - DNA, 30 bp, Artificial Sequence
  Synthetic oligonucleotide
tccgatggaggacggagggtaagaatgtga

SEQ ID NO: 21329 - DNA, 30 bp, Artificial Sequence
  Synthetic oligonucleotide
tcggaaagctaaatcgtgacgagagtgtga

SEQ ID NO: 21330 - DNA, 30 bp, Artificial Sequence
  Synthetic oligonucleotide
acgacaaaacgtctacggtcctgctattga

SEQ ID NO: 21331 - DNA, 30 bp, Artificial Sequence
  Synthetic oligonucleotide
cataactcagaggggaagaacgcacgttga

SEQ ID NO: 21332 - DNA, 30 bp, Artificial Sequence
  Synthetic oligonucleotide
ccaagcagtacggcggaagagcgttaaata

SEQ ID NO: 21333 - DNA, 30 bp, Artificial Sequence
  Synthetic oligonucleotide
aggcaagtgttatcccagaggtcgtcaata

SEQ ID NO: 21334 - DNA, 30 bp, Artificial Sequence
  Synthetic oligonucleotide
aacgcggcgctggcaaggaacgaatgaata

SEQ ID NO: 21335 - DNA, 30 bp, Artificial Sequence
  Synthetic oligonucleotide
aggaccatctaagcagaaccgacatacata

SEQ ID NO: 21336 - DNA, 30 bp, Artificial Sequence
  Synthetic oligonucleotide
acgtgatcggcacaattgaataacaccata

SEQ ID NO: 21337 - DNA, 30 bp, Artificial Sequence
  Synthetic oligonucleotide
gcgaacaaagccaggtggagaatgcgcata

SEQ ID NO: 21338 - DNA, 30 bp, Artificial Sequence
  Synthetic oligonucleotide
aagcgaagccgactcatggagaaggtcata

SEQ ID NO: 21339 - DNA, 30 bp, Artificial Sequence
  Synthetic oligonucleotide
ctaaaccaggaccgaaacttataggcgata

SEQ ID NO: 21340 - DNA, 30 bp, Artificial Sequence
  Synthetic oligonucleotide
gcaaggtgtgcgatagagggtgaggggata

SEQ ID NO: 21341 - DNA, 30 bp, Artificial Sequence
  Synthetic oligonucleotide
gcacccagcgaagcagagaagcttatgata

SEQ ID NO: 21342 - DNA, 30 bp, Artificial Sequence
  Synthetic oligonucleotide
acggagtggacaacgcagttaaacgatata

SEQ ID NO: 21343 - DNA, 30 bp, Artificial Sequence
  Synthetic oligonucleotide
caacttgaacgaggggtggggctacaccta

SEQ ID NO: 21344 - DNA, 30 bp, Artificial Sequence
  Synthetic oligonucleotide
aacagaaaggcaggcgacaatttcagccta

SEQ ID NO: 21345 - DNA, 30 bp, Artificial Sequence
  Synthetic oligonucleotide
caagccagagtcaataggttcaaaatccta

SEQ ID NO: 21346 - DNA, 30 bp, Artificial Sequence
  Synthetic oligonucleotide
tgcacgaaaggtgacttggggacattccta

SEQ ID NO: 21347 - DNA, 30 bp, Artificial Sequence
  Synthetic oligonucleotide
ccgggcagagagagtccatgtggtaagcta

SEQ ID NO: 21348 - DNA, 30 bp, Artificial Sequence
  Synthetic oligonucleotide
acagatgggtaaaaacttgagaagcggcta

SEQ ID NO: 21349 - DNA, 30 bp, Artificial Sequence
  Synthetic oligonucleotide
gaaggcatctccaaaatccagtgcgggcta

SEQ ID NO: 21350 - DNA, 30 bp, Artificial Sequence
  Synthetic oligonucleotide
tagaggaggcttaagcgagatgtgtggcta

SEQ ID NO: 21351 - DNA, 30 bp, Artificial Sequence
  Synthetic oligonucleotide
caggtacgaacaggtcttagataaaaagta

SEQ ID NO: 21352 - DNA, 30 bp, Artificial Sequence
  Synthetic oligonucleotide
caaagcgcaaaccaattacgaagagaagta

SEQ ID NO: 21353 - DNA, 30 bp, Artificial Sequence
  Synthetic oligonucleotide
ttgtctcagaaaagactaaaactcgaagta

SEQ ID NO: 21354 - DNA, 30 bp, Artificial Sequence
  Synthetic oligonucleotide
ccccaaggccggataacaatagaaacagta

SEQ ID NO: 21355 - DNA, 30 bp, Artificial Sequence
  Synthetic oligonucleotide
atgcattaaataggcgaaatactcggagta

SEQ ID NO: 21356 - DNA, 30 bp, Artificial Sequence
  Synthetic oligonucleotide
aggatggttcggtgatacacagaaatagta

SEQ ID NO: 21357 - DNA, 30 bp, Artificial Sequence
  Synthetic oligonucleotide
atggtggaatgcacaacccaaaatggcgta

SEQ ID NO: 21358 - DNA, 30 bp, Artificial Sequence
  Synthetic oligonucleotide
gggggtgataccagataatacatcatcgta

SEQ ID NO: 21359 - DNA, 30 bp, Artificial Sequence
  Synthetic oligonucleotide
acgatatgtcgaatcaatgtcgtactggta

SEQ ID NO: 21360 - DNA, 30 bp, Artificial Sequence
  Synthetic oligonucleotide
agagagcggcacggggtagctcgattggta

SEQ ID NO: 21361 - DNA, 30 bp, Artificial Sequence
  Synthetic oligonucleotide
aggatcaaagagttctgagggaagctatta

SEQ ID NO: 21362 - DNA, 30 bp, Artificial Sequence
  Synthetic oligonucleotide
aggagtaagcgcatgcatgagacctactta

SEQ ID NO: 21363 - DNA, 30 bp, Artificial Sequence
  Synthetic oligonucleotide
cacgttagaggagaacggccaagaagctta

SEQ ID NO: 21364 - DNA, 30 bp, Artificial Sequence
  Synthetic oligonucleotide
agtaccacggaagaaggccatcagtcgtta

SEQ ID NO: 21365 - DNA, 30 bp, Artificial Sequence
  Synthetic oligonucleotide
gaggtggcgactaggtagtaacacatgtta

SEQ ID NO: 21366 - DNA, 30 bp, Artificial Sequence
  Synthetic oligonucleotide
acgtcaggaggaccaagagcctaatattta

SEQ ID NO: 21367 - DNA, 30 bp, Artificial Sequence
  Synthetic oligonucleotide
cagggagacaggcagcccatacaggaaaac

SEQ ID NO: 21368 - DNA, 31 bp, Artificial Sequence
  Synthetic oligonucleotide
ggtgaataggcctcgttgcggacacataaac

SEQ ID NO: 21369 - DNA, 30 bp, Artificial Sequence
  Synthetic oligonucleotide
ggggtgcaactagacaaggagagtgacaac

SEQ ID NO: 21370 - DNA, 30 bp, Artificial Sequence
  Synthetic oligonucleotide
gggaacatacacctgagtgctagtatcaac

SEQ ID NO: 21371 - DNA, 30 bp, Artificial Sequence
  Synthetic oligonucleotide
cggggaaaatccagatcgtctcaatagaac

SEQ ID NO: 21372 - DNA, 30 bp, Artificial Sequence
  Synthetic oligonucleotide
atgctgaaatagcatgtgtggagtgcgaac

SEQ ID NO: 21373 - DNA, 30 bp, Artificial Sequence
  Synthetic oligonucleotide
gcgcaacgggattgaattagggggcggaac

SEQ ID NO: 21374 - DNA, 30 bp, Artificial Sequence
  Synthetic oligonucleotide
tcagaaaagacaagggctcaagccgggaac

SEQ ID NO: 21375 - DNA, 30 bp, Artificial Sequence
  Synthetic oligonucleotide
cgaaggagagcttgagatactgttgggaac

SEQ ID NO: 21376 - DNA, 30 bp, Artificial Sequence
  Synthetic oligonucleotide
gcgccgaagcgggagggtaccaattggaac

SEQ ID NO: 21377 - DNA, 30 bp, Artificial Sequence
  Synthetic oligonucleotide
cgaaatcgacagtaaccggcccgcaataac

SEQ ID NO: 21378 - DNA, 30 bp, Artificial Sequence
  Synthetic oligonucleotide
acaacgaaaagaaagttcatacagtgtaac

SEQ ID NO: 21379 - DNA, 30 bp, Artificial Sequence
  Synthetic oligonucleotide
cggatgtagacacaccggattcaccaacac

SEQ ID NO: 21380 - DNA, 30 bp, Artificial Sequence
  Synthetic oligonucleotide
ggtggggagggtattgcaacatagtaacac

SEQ ID NO: 21381 - DNA, 30 bp, Artificial Sequence
  Synthetic oligonucleotide
cgtaacaaaggaacgagggccgggacccac

SEQ ID NO: 21382 - DNA, 30 bp, Artificial Sequence
  Synthetic oligonucleotide
ggtagcccgtacaagttaccatgtaagcac

SEQ ID NO: 21383 - DNA, 30 bp, Artificial Sequence
  Synthetic oligonucleotide
atgagcggtacatgaacaaattactagcac

SEQ ID NO: 21384 - DNA, 30 bp, Artificial Sequence
  Synthetic oligonucleotide
atacaatgagcgatagtaatgaagaatcac

SEQ ID NO: 21385 - DNA, 30 bp, Artificial Sequence
  Synthetic oligonucleotide
ggtaaaaacattaggtccagccagtatcac

SEQ ID NO: 21386 - DNA, 30 bp, Artificial Sequence
  Synthetic oligonucleotide
cgccttgataaaaactatgtgaagagtcac

SEQ ID NO: 21387 - DNA, 30 bp, Artificial Sequence
  Synthetic oligonucleotide
agtaaggatcgaatagagaacactcgtcac

SEQ ID NO: 21388 - DNA, 30 bp, Artificial Sequence
  Synthetic oligonucleotide
gcataagctggagtaggatctggtcaagac

SEQ ID NO: 21389 - DNA, 30 bp, Artificial Sequence
  Synthetic oligonucleotide
aaaacagcaggtaggctagtacaatgcgac

SEQ ID NO: 21390 - DNA, 30 bp, Artificial Sequence
  Synthetic oligonucleotide
ttgcaacataagtggacaagggacaaggac

SEQ ID NO: 21391 - DNA, 30 bp, Artificial Sequence
  Synthetic oligonucleotide
ggtacggaagagaccgtctagagcaaggac

SEQ ID NO: 21392 - DNA, 30 bp, Artificial Sequence
  Synthetic oligonucleotide
gtagcaggtggaagtaggtccgagcgggac

SEQ ID NO: 21393 - DNA, 31 bp, Artificial Sequence
  Synthetic oligonucleotide
tcgggcaagactaaggcatgaaggaggggac

SEQ ID NO: 21394 - DNA, 30 bp, Artificial Sequence
  Synthetic oligonucleotide
atactgagcaattaggagagcatcggggac

SEQ ID NO: 21395 - DNA, 30 bp, Artificial Sequence
  Synthetic oligonucleotide
agaactgaaagagggaaaaatatacgatac

SEQ ID NO: 21396 - DNA, 30 bp, Artificial Sequence
  Synthetic oligonucleotide
gggcacaccagctcaggggacagccagtac

SEQ ID NO: 21397 - DNA, 30 bp, Artificial Sequence
  Synthetic oligonucleotide
agataaacatacggtatggaaatagagtac

SEQ ID NO: 21398 - DNA, 30 bp, Artificial Sequence
  Synthetic oligonucleotide
tgatacacaggggtgtagaccaaagggtac

SEQ ID NO: 21399 - DNA, 30 bp, Artificial Sequence
  Synthetic oligonucleotide
cgtaggggcgcaagaagggaaggagattac

SEQ ID NO: 21400 - DNA, 30 bp, Artificial Sequence
  Synthetic oligonucleotide
atcggattgcaaatgtgcagagcgacttac

SEQ ID NO: 21401 - DNA, 30 bp, Artificial Sequence
  Synthetic oligonucleotide
agcggccgaaggaggtcaagactgatttac

SEQ ID NO: 21402 - DNA, 30 bp, Artificial Sequence
  Synthetic oligonucleotide
acatatgagtagggaccacaggaaaaaacc

SEQ ID NO: 21403 - DNA, 30 bp, Artificial Sequence
  Synthetic oligonucleotide
acagcgagttggattacactactgtgaacc

SEQ ID NO: 21404 - DNA, 30 bp, Artificial Sequence
  Synthetic oligonucleotide
agacaagtgaatatctgaaattcggcgacc

SEQ ID NO: 21405 - DNA, 31 bp, Artificial Sequence
  Synthetic oligonucleotide
atagaaagaaaaaaacgagcgcaggttaccc

SEQ ID NO: 21406 - DNA, 30 bp, Artificial Sequence
  Synthetic oligonucleotide
acggtcagcgagcaaatgtgcatggacccc

SEQ ID NO: 21407 - DNA, 30 bp, Artificial Sequence
  Synthetic oligonucleotide
ggccgagaaagtggaagcgtatcacccccc

SEQ ID NO: 21408 - DNA, 30 bp, Artificial Sequence
  Synthetic oligonucleotide
cacgagtacaaagtacggggatacgccccc

SEQ ID NO: 21409 - DNA, 30 bp, Artificial Sequence
  Synthetic oligonucleotide
agcgaaagaggcgacgtagtaggacagccc

SEQ ID NO: 21410 - DNA, 30 bp, Artificial Sequence
  Synthetic oligonucleotide
gcgaaaagggtaaacggtattgtcatgccc

SEQ ID NO: 21411 - DNA, 30 bp, Artificial Sequence
  Synthetic oligonucleotide
ccgacatcagatcgtcaatgcggaacagcc

SEQ ID NO: 21412 - DNA, 30 bp, Artificial Sequence
  Synthetic oligonucleotide
gggagagagataaaaaaccgcaatgcagcc

SEQ ID NO: 21413 - DNA, 30 bp, Artificial Sequence
  Synthetic oligonucleotide
acgaaccgcacaaaccttagctagagagcc

SEQ ID NO: 21414 - DNA, 30 bp, Artificial Sequence
  Synthetic oligonucleotide
agcacgagaagtgaagcttacggcgtagcc

SEQ ID NO: 21415 - DNA, 30 bp, Artificial Sequence
  Synthetic oligonucleotide
acgcacaaagaacatccgcgccctgaggcc

SEQ ID NO: 21416 - DNA, 30 bp, Artificial Sequence
  Synthetic oligonucleotide
ggactacggaagccaatacgaaactaggcc

SEQ ID NO: 21417 - DNA, 30 bp, Artificial Sequence
  Synthetic oligonucleotide
tgagtgatgatcaccacaataagagcggcc

SEQ ID NO: 21418 - DNA, 30 bp, Artificial Sequence
  Synthetic oligonucleotide
tacggacatgagtaggagagctgctcggcc

SEQ ID NO: 21419 - DNA, 30 bp, Artificial Sequence
  Synthetic oligonucleotide
cacgtaacgggatataaaagtgggcgtgcc

SEQ ID NO: 21420 - DNA, 30 bp, Artificial Sequence
  Synthetic oligonucleotide
tccaggcgggggcatgaaccaagcgcgtcc

SEQ ID NO: 21421 - DNA, 30 bp, Artificial Sequence
  Synthetic oligonucleotide
ggtgaaaaactagagacagataaatcgtcc

SEQ ID NO: 21422 - DNA, 30 bp, Artificial Sequence
  Synthetic oligonucleotide
agatcaacaacactcgatccattaaggtcc

SEQ ID NO: 21423 - DNA, 30 bp, Artificial Sequence
  Synthetic oligonucleotide
tgggcggaaaaaccgagagaactcatttcc

SEQ ID NO: 21424 - DNA, 30 bp, Artificial Sequence
  Synthetic oligonucleotide
ggcgattcctcagatcaggcacacaaaagc

SEQ ID NO: 21425 - DNA, 30 bp, Artificial Sequence
  Synthetic oligonucleotide
gcgcggaaagcatgtcataagagtttcagc

SEQ ID NO: 21426 - DNA, 30 bp, Artificial Sequence
  Synthetic oligonucleotide
taatgcgtaagggaaaggcggggagagagc

SEQ ID NO: 21427 - DNA, 30 bp, Artificial Sequence
  Synthetic oligonucleotide
cgaaggtaatgagactgcacggtagagagc

SEQ ID NO: 21428 - DNA, 30 bp, Artificial Sequence
  Synthetic oligonucleotide
catatcctaagggaaagtcaacgtccgagc

SEQ ID NO: 21429 - DNA, 30 bp, Artificial Sequence
  Synthetic oligonucleotide
cgaggaggctcacactaccagacactgagc

SEQ ID NO: 21430 - DNA, 30 bp, Artificial Sequence
  Synthetic oligonucleotide
aggaaacaagatcttatcaccatcctgagc

SEQ ID NO: 21431 - DNA, 30 bp, Artificial Sequence
  Synthetic oligonucleotide
tgagggcataagaggcgactgactctgagc

SEQ ID NO: 21432 - DNA, 30 bp, Artificial Sequence
  Synthetic oligonucleotide
gagcagttagggaaaggaaatcgagatagc

SEQ ID NO: 21433 - DNA, 30 bp, Artificial Sequence
  Synthetic oligonucleotide
gctcgagcgggacaagcaagaatgtttagc

SEQ ID NO: 21434 - DNA, 30 bp, Artificial Sequence
  Synthetic oligonucleotide
acgaactacacacaagaagaaatagtacgc

SEQ ID NO: 21435 - DNA, 30 bp, Artificial Sequence
  Synthetic oligonucleotide
catgcgaattgatacactaaataactccgc

SEQ ID NO: 21436 - DNA, 30 bp, Artificial Sequence
  Synthetic oligonucleotide
acggtgagagctgtgagagcagaaccgcgc

SEQ ID NO: 21437 - DNA, 30 bp, Artificial Sequence
  Synthetic oligonucleotide
aaggctgcgaaaaagacccggagtgcgcgc

SEQ ID NO: 21438 - DNA, 30 bp, Artificial Sequence
  Synthetic oligonucleotide
gggggaacattggaaccgtacggcgtgcgc

SEQ ID NO: 21439 - DNA, 30 bp, Artificial Sequence
  Synthetic oligonucleotide
cacagatgttacgaggagggatgaactcgc

SEQ ID NO: 21440 - DNA, 30 bp, Artificial Sequence
  Synthetic oligonucleotide
acatgggaatgggtgtcccgcttgagtcgc

SEQ ID NO: 21441 - DNA, 30 bp, Artificial Sequence
  Synthetic oligonucleotide
aagggagcgagtgcctgagggtgatttcgc

SEQ ID NO: 21442 - DNA, 30 bp, Artificial Sequence
  Synthetic oligonucleotide
gtgaatccagatataaagggccaagaaggc

SEQ ID NO: 21443 - DNA, 30 bp, Artificial Sequence
  Synthetic oligonucleotide
gataagcaggcgcgagcgagagtggaaggc

SEQ ID NO: 21444 - DNA, 30 bp, Artificial Sequence
  Synthetic oligonucleotide
tgcaaactggaccaaataggactgtaaggc

SEQ ID NO: 21445 - DNA, 30 bp, Artificial Sequence
  Synthetic oligonucleotide
agtaaagaaagcgaaattctgtaaataggc

SEQ ID NO: 21446 - DNA, 30 bp, Artificial Sequence
  Synthetic oligonucleotide
ggagagtgatcacgcactgcaaaggtaggc

SEQ ID NO: 21447 - DNA, 30 bp, Artificial Sequence
  Synthetic oligonucleotide
ccggaacactgagtgtagtagtgcttaggc

SEQ ID NO: 21448 - DNA, 30 bp, Artificial Sequence
  Synthetic oligonucleotide
gcgaccaagtttagaaagacagtgtacggc

SEQ ID NO: 21449 - DNA, 30 bp, Artificial Sequence
  Synthetic oligonucleotide
agtcgagatatagaatcgcatgagtccggc

SEQ ID NO: 21450 - DNA, 30 bp, Artificial Sequence
  Synthetic oligonucleotide
ggcaaaaaagtgccgaaggggtaggtcggc

SEQ ID NO: 21451 - DNA, 30 bp, Artificial Sequence
  Synthetic oligonucleotide
ccggagaagagcacaaacgtgatccagggc

SEQ ID NO: 21452 - DNA, 30 bp, Artificial Sequence
  Synthetic oligonucleotide
agtgcataagtggggcgtgctcgaacgggc

SEQ ID NO: 21453 - DNA, 30 bp, Artificial Sequence
  Synthetic oligonucleotide
acggcggtccatctacaaccgacaactggc

SEQ ID NO: 21454 - DNA, 30 bp, Artificial Sequence
  Synthetic oligonucleotide
caacgtgaagggccgaatcgacgctctggc

SEQ ID NO: 21455 - DNA, 30 bp, Artificial Sequence
  Synthetic oligonucleotide
cagtctaaaagacaacaactgagagcatgc

SEQ ID NO: 21456 - DNA, 30 bp, Artificial Sequence
  Synthetic oligonucleotide
ggagcagggagacaaaaatagcccgtatgc

SEQ ID NO: 21457 - DNA, 30 bp, Artificial Sequence
  Synthetic oligonucleotide
cgcgacgtactcgggaacaacagtgtatgc

SEQ ID NO: 21458 - DNA, 30 bp, Artificial Sequence
  Synthetic oligonucleotide
ccgttagtgcgataaacaacaatgaggtgc

SEQ ID NO: 21459 - DNA, 30 bp, Artificial Sequence
  Synthetic oligonucleotide
agagatatccgagaattcgtgaataggtgc

SEQ ID NO: 21460 - DNA, 30 bp, Artificial Sequence
  Synthetic oligonucleotide
taaggtgaggtacaagggagaacgttgtgc

SEQ ID NO: 21461 - DNA, 30 bp, Artificial Sequence
  Synthetic oligonucleotide
tcaagaactaagagattcacgtgcccttgc

SEQ ID NO: 21462 - DNA, 30 bp, Artificial Sequence
  Synthetic oligonucleotide
acgataaagcgcagtgtttacgcgagttgc

SEQ ID NO: 21463 - DNA, 30 bp, Artificial Sequence
  Synthetic oligonucleotide
agggatgggggatccgctagaagtgaaatc

SEQ ID NO: 21464 - DNA, 30 bp, Artificial Sequence
  Synthetic oligonucleotide
cgacggcgccacgagacctggagctcaatc

SEQ ID NO: 21465 - DNA, 30 bp, Artificial Sequence
  Synthetic oligonucleotide
gcagcgcggcacgaaccaggtaccaacatc

SEQ ID NO: 21466 - DNA, 30 bp, Artificial Sequence
  Synthetic oligonucleotide
tacgagggcgcaatgggcaggatagccatc

SEQ ID NO: 21467 - DNA, 30 bp, Artificial Sequence
  Synthetic oligonucleotide
aggcgcctagttagccagactgttcgcatc

SEQ ID NO: 21468 - DNA, 30 bp, Artificial Sequence
  Synthetic oligonucleotide
ggtgcatgagagtcgcatacaggatagatc

SEQ ID NO: 21469 - DNA, 30 bp, Artificial Sequence
  Synthetic oligonucleotide
ccgtgacaactgaagtagatatgccggatc

SEQ ID NO: 21470 - DNA, 30 bp, Artificial Sequence
  Synthetic oligonucleotide
cgagggtgaggtcattgaggggcattgatc

SEQ ID NO: 21471 - DNA, 30 bp, Artificial Sequence
  Synthetic oligonucleotide
agggctgaatgagcgaatgcgccgttgatc

SEQ ID NO: 21472 - DNA, 30 bp, Artificial Sequence
  Synthetic oligonucleotide
ccaagcggtgaacaaagctaaggatctatc

SEQ ID NO: 21473 - DNA, 30 bp, Artificial Sequence
  Synthetic oligonucleotide
cgtagaggacaggtgagataacaaggtatc

SEQ ID NO: 21474 - DNA, 30 bp, Artificial Sequence
  Synthetic oligonucleotide
accgtaaagtaaggtgaaggtagttaactc

SEQ ID NO: 21475 - DNA, 30 bp, Artificial Sequence
  Synthetic oligonucleotide
cgcaaaaatgccgtaatgttcagatgactc

SEQ ID NO: 21476 - DNA, 30 bp, Artificial Sequence
  Synthetic oligonucleotide
caaacgggagaggccatagaagtgtgactc

SEQ ID NO: 21477 - DNA, 30 bp, Artificial Sequence
  Synthetic oligonucleotide
gggcagtacacgggagtaggaagaaacctc

SEQ ID NO: 21478 - DNA, 30 bp, Artificial Sequence
  Synthetic oligonucleotide
atggaagagtgccaattagtgtgcaacctc

SEQ ID NO: 21479 - DNA, 30 bp, Artificial Sequence
  Synthetic oligonucleotide
cgaagcgtcgaagacattggtggatacctc

SEQ ID NO: 21480 - DNA, 30 bp, Artificial Sequence
  Synthetic oligonucleotide
acgactaaagcagcaaccaagtcttccctc

SEQ ID NO: 21481 - DNA, 30 bp, Artificial Sequence
  Synthetic oligonucleotide
caagtgaagacacgtgaccggacgtcgctc

SEQ ID NO: 21482 - DNA, 30 bp, Artificial Sequence
  Synthetic oligonucleotide
cgggagtaatagcacctagaatccatgctc

SEQ ID NO: 21483 - DNA, 30 bp, Artificial Sequence
  Synthetic oligonucleotide
aggtgaaagctggatgccgactgacttctc

SEQ ID NO: 21484 - DNA, 30 bp, Artificial Sequence
  Synthetic oligonucleotide
cataggccctaggcaaagcatgaagaagtc

SEQ ID NO: 21485 - DNA, 30 bp, Artificial Sequence
  Synthetic oligonucleotide
tcggaagagtagcattgtcgtcggagagtc

SEQ ID NO: 21486 - DNA, 30 bp, Artificial Sequence
  Synthetic oligonucleotide
actggtgcccatatcacaactaaccgagtc

SEQ ID NO: 21487 - DNA, 30 bp, Artificial Sequence
  Synthetic oligonucleotide
aaagggagcaatcgagttcaaatgcccgtc

SEQ ID NO: 21488 - DNA, 30 bp, Artificial Sequence
  Synthetic oligonucleotide
ttgagacaggatacgttgggtggaagcgtc

SEQ ID NO: 21489 - DNA, 30 bp, Artificial Sequence
  Synthetic oligonucleotide
cgtaagtgctacaccatatgccaacgcgtc

SEQ ID NO: 21490 - DNA, 30 bp, Artificial Sequence
  Synthetic oligonucleotide
acaatgcgatttatcgttcgagtctgcgtc

SEQ ID NO: 21491 - DNA, 30 bp, Artificial Sequence
  Synthetic oligonucleotide
aaaagagacgagaaggccaacgacatcgtc

SEQ ID NO: 21492 - DNA, 30 bp, Artificial Sequence
  Synthetic oligonucleotide
ggcataatactagtaaagaagtacatcgtc

SEQ ID NO: 21493 - DNA, 30 bp, Artificial Sequence
  Synthetic oligonucleotide
acattgcctatggccaaatcaagtgtcgtc

SEQ ID NO: 21494 - DNA, 30 bp, Artificial Sequence
  Synthetic oligonucleotide
cgagaagatgttaggtaacgggcgacggtc

SEQ ID NO: 21495 - DNA, 30 bp, Artificial Sequence
  Synthetic oligonucleotide
gaaacgtgtaggcaagagtgaagatcggtc

SEQ ID NO: 21496 - DNA, 30 bp, Artificial Sequence
  Synthetic oligonucleotide
cgagtcgtacggaggggtaagatatgggtc

SEQ ID NO: 21497 - DNA, 30 bp, Artificial Sequence
  Synthetic oligonucleotide
aggaagtgattgcgagacaccgatcagttc

SEQ ID NO: 21498 - DNA, 30 bp, Artificial Sequence
  Synthetic oligonucleotide
cagtgggaagaatacctaaggatagaaaag

SEQ ID NO: 21499 - DNA, 30 bp, Artificial Sequence
  Synthetic oligonucleotide
ggagaaacgtgacgtttggaactataaaag

SEQ ID NO: 21500 - DNA, 30 bp, Artificial Sequence
  Synthetic oligonucleotide
aaccaccctacaacgacatcgggaacaaag

SEQ ID NO: 21501 - DNA, 30 bp, Artificial Sequence
  Synthetic oligonucleotide
atagaacagacaaccgttaagacgccaaag

SEQ ID NO: 21502 - DNA, 30 bp, Artificial Sequence
  Synthetic oligonucleotide
cctgaccgggctccacataggcagagaaag

SEQ ID NO: 21503 - DNA, 30 bp, Artificial Sequence
  Synthetic oligonucleotide
gtcatagagaacggcccacgacctagaaag

SEQ ID NO: 21504 - DNA, 30 bp, Artificial Sequence
  Synthetic oligonucleotide
agcgtacagggataggtctcttggttaaag

SEQ ID NO: 21505 - DNA, 30 bp, Artificial Sequence
  Synthetic oligonucleotide
ttaaacaatggctgagtccccaggaacaag

SEQ ID NO: 21506 - DNA, 30 bp, Artificial Sequence
  Synthetic oligonucleotide
aaccgggaaaactagtcacgccgacacaag

SEQ ID NO: 21507 - DNA, 30 bp, Artificial Sequence
  Synthetic oligonucleotide
aacaactgatgaatagcgaatactcccaag

SEQ ID NO: 21508 - DNA, 30 bp, Artificial Sequence
  Synthetic oligonucleotide
accgaaaggcacgggcctccacctgccaag

SEQ ID NO: 21509 - DNA, 30 bp, Artificial Sequence
  Synthetic oligonucleotide
caaaaagtcgattcactaacgacgtccaag

SEQ ID NO: 21510 - DNA, 30 bp, Artificial Sequence
  Synthetic oligonucleotide
aggaagacagacgggcgaggatctcgcaag

SEQ ID NO: 21511 - DNA, 30 bp, Artificial Sequence
  Synthetic oligonucleotide
ccgaaagagcgggcattgtgccagatcaag

SEQ ID NO: 21512 - DNA, 30 bp, Artificial Sequence
  Synthetic oligonucleotide
aacggccggtgatagtctacacaaaagaag

SEQ ID NO: 21513 - DNA, 30 bp, Artificial Sequence
  Synthetic oligonucleotide
ggccgtcaccgggcaatcagttgatagaag

SEQ ID NO: 21514 - DNA, 30 bp, Artificial Sequence
  Synthetic oligonucleotide
cgaggatgcattgccatcgaagtatagaag

SEQ ID NO: 21515 - DNA, 30 bp, Artificial Sequence
  Synthetic oligonucleotide
cggagaatggaacagtggggtataacgaag

SEQ ID NO: 21516 - DNA, 30 bp, Artificial Sequence
  Synthetic oligonucleotide
cacgtggtcagtagccaagacctcgggaag

SEQ ID NO: 21517 - DNA, 30 bp, Artificial Sequence
  Synthetic oligonucleotide
gtgcgagtatccaagccggtcagggggaag

SEQ ID NO: 21518 - DNA, 30 bp, Artificial Sequence
  Synthetic oligonucleotide
acccgtgtaagttgagaagagagtatgaag

SEQ ID NO: 21519 - DNA, 30 bp, Artificial Sequence
  Synthetic oligonucleotide
gtgcacgactacttaagggaaaaactgaag

SEQ ID NO: 21520 - DNA, 30 bp, Artificial Sequence
  Synthetic oligonucleotide
ggggcacctgggtatgagacacttgtgaag

SEQ ID NO: 21521 - DNA, 30 bp, Artificial Sequence
  Synthetic oligonucleotide
ggaaactgctaggacctaacgcccaataag

SEQ ID NO: 21522 - DNA, 30 bp, Artificial Sequence
  Synthetic oligonucleotide
cgatcaattgcacgtaatgtatacgataag

SEQ ID NO: 21523 - DNA, 30 bp, Artificial Sequence
  Synthetic oligonucleotide
ccgcaacgccatgagaggtttagggataag

SEQ ID NO: 21524 - DNA, 30 bp, Artificial Sequence
  Synthetic oligonucleotide
cgatcaatacgcaagttgtacagggctaag

SEQ ID NO: 21525 - DNA, 30 bp, Artificial Sequence
  Synthetic oligonucleotide
acatgctagacaaattggaatggaagtaag

SEQ ID NO: 21526 - DNA, 30 bp, Artificial Sequence
  Synthetic oligonucleotide
cacagaatcgatgtcgtcgaaacgtgtaag

SEQ ID NO: 21527 - DNA, 30 bp, Artificial Sequence
  Synthetic oligonucleotide
tgcacggcgtaatcacacagtcacattaag

SEQ ID NO: 21528 - DNA, 30 bp, Artificial Sequence
  Synthetic oligonucleotide
tgtgcccacggagatattaggaagattaag

SEQ ID NO: 21529 - DNA, 30 bp, Artificial Sequence
  Synthetic oligonucleotide
gctggtaacgaaaaccgtacaccgaaacag

SEQ ID NO: 21530 - DNA, 30 bp, Artificial Sequence
  Synthetic oligonucleotide
tgacgcgaagatcggcgacaaaggaaacag

SEQ ID NO: 21531 - DNA, 30 bp, Artificial Sequence
  Synthetic oligonucleotide
ggaccggggcgaacaacaattccgtaacag

SEQ ID NO: 21532 - DNA, 30 bp, Artificial Sequence
  Synthetic oligonucleotide
tccagtcgatcagggaagttcagggcacag

SEQ ID NO: 21533 - DNA, 30 bp, Artificial Sequence
  Synthetic oligonucleotide
gcaacgtgccggtacgctacgaaaggacag

SEQ ID NO: 21534 - DNA, 30 bp, Artificial Sequence
  Synthetic oligonucleotide
gaaaagcgagactgaaattcacaaggacag

SEQ ID NO: 21535 - DNA, 30 bp, Artificial Sequence
  Synthetic oligonucleotide
caagtaatcgcgaatagcacgagaggacag

SEQ ID NO: 21536 - DNA, 30 bp, Artificial Sequence
  Synthetic oligonucleotide
accggcattaaacctaggacatcaaaccag

SEQ ID NO: 21537 - DNA, 30 bp, Artificial Sequence
  Synthetic oligonucleotide
gcgagattaaccggacatgctggcaaccag

SEQ ID NO: 21538 - DNA, 30 bp, Artificial Sequence
  Synthetic oligonucleotide
caacgcctacagacaccaagtggtacccag

SEQ ID NO: 21539 - DNA, 30 bp, Artificial Sequence
  Synthetic oligonucleotide
tgacagataacttctgaacagatacgccag

SEQ ID NO: 21540 - DNA, 30 bp, Artificial Sequence
  Synthetic oligonucleotide
ggatacctgtatggagccaaggcggtccag

SEQ ID NO: 21541 - DNA, 30 bp, Artificial Sequence
  Synthetic oligonucleotide
ggaacatcgcaaccataagcgcctgagcag

SEQ ID NO: 21542 - DNA, 30 bp, Artificial Sequence
  Synthetic oligonucleotide
cgttaccgtatacctgaaggctcttagcag

SEQ ID NO: 21543 - DNA, 30 bp, Artificial Sequence
  Synthetic oligonucleotide
tcaatacagagaccaggagcgagctcgcag

SEQ ID NO: 21544 - DNA, 30 bp, Artificial Sequence
  Synthetic oligonucleotide
cgaactgagacggccgcgttcaacaggcag

SEQ ID NO: 21545 - DNA, 30 bp, Artificial Sequence
  Synthetic oligonucleotide
agttaaccacaaccgctacatatcaggcag

SEQ ID NO: 21546 - DNA, 30 bp, Artificial Sequence
  Synthetic oligonucleotide
cgatcttcagactacgttgggaaaatgcag

SEQ ID NO: 21547 - DNA, 30 bp, Artificial Sequence
  Synthetic oligonucleotide
ggcagaaaaaacccaagaggcgtggatcag

SEQ ID NO: 21548 - DNA, 30 bp, Artificial Sequence
  Synthetic oligonucleotide
cataaacactcaaccagtcactgcagtcag

SEQ ID NO: 21549 - DNA, 30 bp, Artificial Sequence
  Synthetic oligonucleotide
tgctcgagcgcgagaaaagtcttcagtcag

SEQ ID NO: 21550 - DNA, 30 bp, Artificial Sequence
  Synthetic oligonucleotide
aggtctgagtgttgtacaataaagcgtcag

SEQ ID NO: 21551 - DNA, 30 bp, Artificial Sequence
  Synthetic oligonucleotide
agggaatgcttgctcttcgagtgtcgtcag

SEQ ID NO: 21552 - DNA, 30 bp, Artificial Sequence
  Synthetic oligonucleotide
cgacgtaacgccggggcaccatgaaaagag

SEQ ID NO: 21553 - DNA, 30 bp, Artificial Sequence
  Synthetic oligonucleotide
gaatcagacagcgaaaagtaccacaaagag

SEQ ID NO: 21554 - DNA, 30 bp, Artificial Sequence
  Synthetic oligonucleotide
taccgggggacagagcgtacaggagaagag

SEQ ID NO: 21555 - DNA, 30 bp, Artificial Sequence
  Synthetic oligonucleotide
actccgcagctgtcaaagacgaaggaagag

SEQ ID NO: 21556 - DNA, 30 bp, Artificial Sequence
  Synthetic oligonucleotide
ggtacgtgtctccccggcaaataggaagag

SEQ ID NO: 21557 - DNA, 30 bp, Artificial Sequence
  Synthetic oligonucleotide
ggactcgcgaccatccacgtcaatgaagag

SEQ ID NO: 21558 - DNA, 30 bp, Artificial Sequence
  Synthetic oligonucleotide
agggcatccatcacaagcaaatacacagag

SEQ ID NO: 21559 - DNA, 30 bp, Artificial Sequence
  Synthetic oligonucleotide
acagaacacacaaagtgatagttgacagag

SEQ ID NO: 21560 - DNA, 30 bp, Artificial Sequence
  Synthetic oligonucleotide
taaaatcaacagaaacagaaagggagagag

SEQ ID NO: 21561 - DNA, 30 bp, Artificial Sequence
  Synthetic oligonucleotide
gctaagaatcagcagtgtcgtccaggagag

SEQ ID NO: 21562 - DNA, 30 bp, Artificial Sequence
  Synthetic oligonucleotide
ccacgccaaaccggttacacgctatgagag

SEQ ID NO: 21563 - DNA, 30 bp, Artificial Sequence
  Synthetic oligonucleotide
ggagcaaacactgtctccgacaacatagag

SEQ ID NO: 21564 - DNA, 30 bp, Artificial Sequence
  Synthetic oligonucleotide
cgagatcaagggttatgcttgaggctagag

SEQ ID NO: 21565 - DNA, 30 bp, Artificial Sequence
  Synthetic oligonucleotide
accataggcctacaggaacggcccgtagag

SEQ ID NO: 21566 - DNA, 30 bp, Artificial Sequence
  Synthetic oligonucleotide
aggggattgtccatacagcacatggtagag

SEQ ID NO: 21567 - DNA, 30 bp, Artificial Sequence
  Synthetic oligonucleotide
agccacagatccagtagactaacattagag

SEQ ID NO: 21568 - DNA, 30 bp, Artificial Sequence
  Synthetic oligonucleotide
ggccagacgaattaggccatggaatacgag

SEQ ID NO: 21569 - DNA, 30 bp, Artificial Sequence
  Synthetic oligonucleotide
ttagccaaaacttaacaggccagatacgag

SEQ ID NO: 21570 - DNA, 30 bp, Artificial Sequence
  Synthetic oligonucleotide
taacgcgaagaagagagtttcgtcaccgag

SEQ ID NO: 21571 - DNA, 30 bp, Artificial Sequence
  Synthetic oligonucleotide
gactaacctcaacaaaggggagagctcgag

SEQ ID NO: 21572 - DNA, 30 bp, Artificial Sequence
  Synthetic oligonucleotide
gctagaacgcaatcttccacctatctcgag

SEQ ID NO: 21573 - DNA, 30 bp, Artificial Sequence
  Synthetic oligonucleotide
cgtcacagactcggaaggggttaggtcgag

SEQ ID NO: 21574 - DNA, 30 bp, Artificial Sequence
  Synthetic oligonucleotide
cggaaggacaaaatccgattctcattcgag

SEQ ID NO: 21575 - DNA, 30 bp, Artificial Sequence
  Synthetic oligonucleotide
gtggacgagggtaaggtctatgcacaggag

SEQ ID NO: 21576 - DNA, 30 bp, Artificial Sequence
  Synthetic oligonucleotide
aggtcgaacgcgttctgagtgccccaggag

SEQ ID NO: 21577 - DNA, 30 bp, Artificial Sequence
  Synthetic oligonucleotide
tcatagagggttagggttcgtagtcaggag

SEQ ID NO: 21578 - DNA, 30 bp, Artificial Sequence
  Synthetic oligonucleotide
acaatgtggcgtagtaagaaagtctaggag

SEQ ID NO: 21579 - DNA, 30 bp, Artificial Sequence
  Synthetic oligonucleotide
agtagcttaacgagcaagagaatcacggag

SEQ ID NO: 21580 - DNA, 30 bp, Artificial Sequence
  Synthetic oligonucleotide
gtcgagactgacatttcaccaaggacggag

SEQ ID NO: 21581 - DNA, 30 bp, Artificial Sequence
  Synthetic oligonucleotide
actaataaaagagtctgggcaaacagggag

SEQ ID NO: 21582 - DNA, 30 bp, Artificial Sequence
  Synthetic oligonucleotide
ggaaaaggggagcgaagatgcaacatggag

SEQ ID NO: 21583 - DNA, 30 bp, Artificial Sequence
  Synthetic oligonucleotide
gggaactattagcaacaacccagcatggag

SEQ ID NO: 21584 - DNA, 30 bp, Artificial Sequence
  Synthetic oligonucleotide
tgggagtagggttagttagtggttaatgag

SEQ ID NO: 21585 - DNA, 30 bp, Artificial Sequence
  Synthetic oligonucleotide
taacaggtgcagacattcagaggacatgag

SEQ ID NO: 21586 - DNA, 30 bp, Artificial Sequence
  Synthetic oligonucleotide
ggcgtaccgggccatcgagtagcgcatgag

SEQ ID NO: 21587 - DNA, 30 bp, Artificial Sequence
  Synthetic oligonucleotide
gcgagcgaattcactgcttggcggcatgag

SEQ ID NO: 21588 - DNA, 30 bp, Artificial Sequence
  Synthetic oligonucleotide
cgaagaggggcatcaagctgcggagatgag

SEQ ID NO: 21589 - DNA, 30 bp, Artificial Sequence
  Synthetic oligonucleotide
cgagagtattaagggctcgtagttgatgag

SEQ ID NO: 21590 - DNA, 30 bp, Artificial Sequence
  Synthetic oligonucleotide
cgcgccgaccaacactgttttaaatatgag

SEQ ID NO: 21591 - DNA, 30 bp, Artificial Sequence
  Synthetic oligonucleotide
aacaggacctggcatagagcgcgacctgag

SEQ ID NO: 21592 - DNA, 30 bp, Artificial Sequence
  Synthetic oligonucleotide
agggcacccctggcacactgatctcctgag

SEQ ID NO: 21593 - DNA, 30 bp, Artificial Sequence
  Synthetic oligonucleotide
tcgcaatcgaacatcacgagggtatctgag

SEQ ID NO: 21594 - DNA, 30 bp, Artificial Sequence
  Synthetic oligonucleotide
ccgacatgtactacagggacgaagtctgag

SEQ ID NO: 21595 - DNA, 30 bp, Artificial Sequence
  Synthetic oligonucleotide
gtaaaggacaagccatagaactaaagtgag

SEQ ID NO: 21596 - DNA, 30 bp, Artificial Sequence
  Synthetic oligonucleotide
ctaccaatattaatctgtgagtaaagtgag

SEQ ID NO: 21597 - DNA, 30 bp, Artificial Sequence
  Synthetic oligonucleotide
aagtcaaacgcaattcactggaagggtgag

SEQ ID NO: 21598 - DNA, 30 bp, Artificial Sequence
  Synthetic oligonucleotide
ggatatgaacagatgtcacgagacattgag

SEQ ID NO: 21599 - DNA, 30 bp, Artificial Sequence
  Synthetic oligonucleotide
tggggaggatgcccggcgagcatcattgag

SEQ ID NO: 21600 - DNA, 30 bp, Artificial Sequence
  Synthetic oligonucleotide
caatttctacaaaatgcacatcgaccatag

SEQ ID NO: 21601 - DNA, 30 bp, Artificial Sequence
  Synthetic oligonucleotide
acacgaatgaatcaggacccatatgcatag

SEQ ID NO: 21602 - DNA, 31 bp, Artificial Sequence
  Synthetic oligonucleotide
caggacgaggtctccagctaggatcggatag

SEQ ID NO: 21603 - DNA, 30 bp, Artificial Sequence
  Synthetic oligonucleotide
acacagaagattgtaagacatgcgcactag

SEQ ID NO: 21604 - DNA, 30 bp, Artificial Sequence
  Synthetic oligonucleotide
catcgcttagtcgaggaagggttcacctag

SEQ ID NO: 21605 - DNA, 30 bp, Artificial Sequence
  Synthetic oligonucleotide
ggggtccaacacgtgatcttaagtggctag

SEQ ID NO: 21606 - DNA, 30 bp, Artificial Sequence
  Synthetic oligonucleotide
acgatggcatatctctgtccaatgaagtag

SEQ ID NO: 21607 - DNA, 30 bp, Artificial Sequence
  Synthetic oligonucleotide
agaagcggtgaacggaagctttgcgagtag

SEQ ID NO: 21608 - DNA, 30 bp, Artificial Sequence
  Synthetic oligonucleotide
agactcggaaagttaactattccaacgtag

SEQ ID NO: 21609 - DNA, 30 bp, Artificial Sequence
  Synthetic oligonucleotide
cgaagttatactgagtaaatgccgacgtag

SEQ ID NO: 21610 - DNA, 30 bp, Artificial Sequence
  Synthetic oligonucleotide
cgaaagccacaggccgagagctttacgtag

SEQ ID NO: 21611 - DNA, 30 bp, Artificial Sequence
  Synthetic oligonucleotide
tcgcaaaggtgagtgccgccgtcagcgtag

SEQ ID NO: 21612 - DNA, 30 bp, Artificial Sequence
  Synthetic oligonucleotide
tcaacagtccatagcattcgagcgtcgtag

SEQ ID NO: 21613 - DNA, 30 bp, Artificial Sequence
  Synthetic oligonucleotide
ggtgggactagataacacgtactgtcgtag

SEQ ID NO: 21614 - DNA, 30 bp, Artificial Sequence
  Synthetic oligonucleotide
ggtcaaaaagaaataatgatcgagatgtag

SEQ ID NO: 21615 - DNA, 30 bp, Artificial Sequence
  Synthetic oligonucleotide
ggctacagcgtcaacgacagaaatatgtag

SEQ ID NO: 21616 - DNA, 30 bp, Artificial Sequence
  Synthetic oligonucleotide
actaacgagcgtacaaaaggatcggtgtag

SEQ ID NO: 21617 - DNA, 30 bp, Artificial Sequence
  Synthetic oligonucleotide
tcgaggtcactcaggcggaccaataattag

SEQ ID NO: 21618 - DNA, 30 bp, Artificial Sequence
  Synthetic oligonucleotide
tccctgagtcgatgaaaagccaaaggttag

SEQ ID NO: 21619 - DNA, 30 bp, Artificial Sequence
  Synthetic oligonucleotide
tgcgggagggacgtgtgagcagaaggttag

SEQ ID NO: 21620 - DNA, 30 bp, Artificial Sequence
  Synthetic oligonucleotide
ggagaggacataagcaacaagcgttgttag

SEQ ID NO: 21621 - DNA, 30 bp, Artificial Sequence
  Synthetic oligonucleotide
cggacaacaaacaatgacatgcgccaaacg

SEQ ID NO: 21622 - DNA, 30 bp, Artificial Sequence
  Synthetic oligonucleotide
agcatcaatagggaaatataggcataaacg

SEQ ID NO: 21623 - DNA, 30 bp, Artificial Sequence
  Synthetic oligonucleotide
caggaaaacttgggaaatcggttcacaacg

SEQ ID NO: 21624 - DNA, 30 bp, Artificial Sequence
  Synthetic oligonucleotide
tcaaaggaacccaccaaaaggttagcaacg

SEQ ID NO: 21625 - DNA, 30 bp, Artificial Sequence
  Synthetic oligonucleotide
cggtcaggctatgtaaaatatcaaggaacg

SEQ ID NO: 21626 - DNA, 30 bp, Artificial Sequence
  Synthetic oligonucleotide
tcgaatatacaccggaagaatctcggaacg

SEQ ID NO: 21627 - DNA, 30 bp, Artificial Sequence
  Synthetic oligonucleotide
ggcggggaaagaaagtttgccacatgaacg

SEQ ID NO: 21628 - DNA, 30 bp, Artificial Sequence
  Synthetic oligonucleotide
cgttaaaggcgagggaaatttggcgtaacg

SEQ ID NO: 21629 - DNA, 30 bp, Artificial Sequence
  Synthetic oligonucleotide
tgggaaatggtaccaaggtgtaaggtaacg

SEQ ID NO: 21630 - DNA, 30 bp, Artificial Sequence
  Synthetic oligonucleotide
gcggctgctgcgatataaagtgacttaacg

SEQ ID NO: 21631 - DNA, 30 bp, Artificial Sequence
  Synthetic oligonucleotide
aacgtgaccactttcgaaactcataccacg

SEQ ID NO: 21632 - DNA, 30 bp, Artificial Sequence
  Synthetic oligonucleotide
cagtccgaagagtactgatagcgaaagacg

SEQ ID NO: 21633 - DNA, 30 bp, Artificial Sequence
  Synthetic oligonucleotide
cacaagaactaatgagttctggggaagacg

SEQ ID NO: 21634 - DNA, 30 bp, Artificial Sequence
  Synthetic oligonucleotide
agtaagccggacaaggacacggaacagacg

SEQ ID NO: 21635 - DNA, 30 bp, Artificial Sequence
  Synthetic oligonucleotide
ggccagagagggacaacccttgaccagacg

SEQ ID NO: 21636 - DNA, 30 bp, Artificial Sequence
  Synthetic oligonucleotide
ctatgccaggttaggaggaacgaggatacg

SEQ ID NO: 21637 - DNA, 30 bp, Artificial Sequence
  Synthetic oligonucleotide
atcaggaacaacgagccagccgttaaaccg

SEQ ID NO: 21638 - DNA, 30 bp, Artificial Sequence
  Synthetic oligonucleotide
cagaaggatggcgtatgtcgacacgaaccg

SEQ ID NO: 21639 - DNA, 30 bp, Artificial Sequence
  Synthetic oligonucleotide
tggcccagacgagcgccaacgacaacaccg

SEQ ID NO: 21640 - DNA, 30 bp, Artificial Sequence
  Synthetic oligonucleotide
acggtgggtgcggaaaaaagatctcacccg

SEQ ID NO: 21641 - DNA, 30 bp, Artificial Sequence
  Synthetic oligonucleotide
cggttccccgaagcgaactgaacatacccg

SEQ ID NO: 21642 - DNA, 30 bp, Artificial Sequence
  Synthetic oligonucleotide
ggcacatgaagaacgcaaagtgaaaagccg

SEQ ID NO: 21643 - DNA, 30 bp, Artificial Sequence
  Synthetic oligonucleotide
tcctatggggtggaatgagagaaaacgccg

SEQ ID NO: 21644 - DNA, 30 bp, Artificial Sequence
  Synthetic oligonucleotide
agacgacatgggcaaggaaaaagactgccg

SEQ ID NO: 21645 - DNA, 30 bp, Artificial Sequence
  Synthetic oligonucleotide
ccgacagggagtccacagtttacccatccg

SEQ ID NO: 21646 - DNA, 30 bp, Artificial Sequence
  Synthetic oligonucleotide
cgaacaatgacatgggtaattacatatccg

SEQ ID NO: 21647 - DNA, 30 bp, Artificial Sequence
  Synthetic oligonucleotide
ggtaaaaacaaaacaggctaacgcattccg

SEQ ID NO: 21648 - DNA, 30 bp, Artificial Sequence
  Synthetic oligonucleotide
gggaggaaacgaacagtaacctccgttccg

SEQ ID NO: 21649 - DNA, 30 bp, Artificial Sequence
  Synthetic oligonucleotide
ctagctagagtgtaaggaggctgaaaagcg

SEQ ID NO: 21650 - DNA, 30 bp, Artificial Sequence
  Synthetic oligonucleotide
atgctacgattaagatgggcctagtaagcg

SEQ ID NO: 21651 - DNA, 30 bp, Artificial Sequence
  Synthetic oligonucleotide
taccgtaggccgatgtgaccactaccagcg

SEQ ID NO: 21652 - DNA, 30 bp, Artificial Sequence
  Synthetic oligonucleotide
cacaacgcgtaatcgaaatcgcctgcagcg

SEQ ID NO: 21653 - DNA, 30 bp, Artificial Sequence
  Synthetic oligonucleotide
tcaacatggttagggtgttagagagtagcg

SEQ ID NO: 21654 - DNA, 30 bp, Artificial Sequence
  Synthetic oligonucleotide
acaaaaaagaatgaaattgcagtagtcgcg

SEQ ID NO: 21655 - DNA, 30 bp, Artificial Sequence
  Synthetic oligonucleotide
tgaggattaggttcagctaaacaaaaggcg

SEQ ID NO: 21656 - DNA, 30 bp, Artificial Sequence
  Synthetic oligonucleotide
agggcggacgaccgtcaaaatcgcccggcg

SEQ ID NO: 21657 - DNA, 30 bp, Artificial Sequence
  Synthetic oligonucleotide
cgccgataaccgttcgaccatgagagggcg

SEQ ID NO: 21658 - DNA, 30 bp, Artificial Sequence
  Synthetic oligonucleotide
cgagaaatagcagacttccatagcgtggcg

SEQ ID NO: 21659 - DNA, 30 bp, Artificial Sequence
  Synthetic oligonucleotide
gggtaaaagagcggaatcgtcgtcaatgcg

SEQ ID NO: 21660 - DNA, 30 bp, Artificial Sequence
  Synthetic oligonucleotide
cgattcttcaaggccacaaggggaagtgcg

SEQ ID NO: 21661 - DNA, 30 bp, Artificial Sequence
  Synthetic oligonucleotide
cacgtaacagcaggaatacttcaccttgcg

SEQ ID NO: 21662 - DNA, 30 bp, Artificial Sequence
  Synthetic oligonucleotide
acgacactcccatgcaatcggatagttgcg

SEQ ID NO: 21663 - DNA, 30 bp, Artificial Sequence
  Synthetic oligonucleotide
cgatctcgaggccgtatcataacaaaatcg

SEQ ID NO: 21664 - DNA, 30 bp, Artificial Sequence
  Synthetic oligonucleotide
gcggagattctgcaataatgggagaaatcg

SEQ ID NO: 21665 - DNA, 30 bp, Artificial Sequence
  Synthetic oligonucleotide
ttgagtcgcgagtaggctaaacttcaatcg

SEQ ID NO: 21666 - DNA, 30 bp, Artificial Sequence
  Synthetic oligonucleotide
gtaaaaggtttggaagagtaaggagaatcg

SEQ ID NO: 21667 - DNA, 30 bp, Artificial Sequence
  Synthetic oligonucleotide
tacggaaggtgcgcgttatgagctagatcg

SEQ ID NO: 21668 - DNA, 30 bp, Artificial Sequence
  Synthetic oligonucleotide
gcaactaacgacaacagatggcacggatcg

SEQ ID NO: 21669 - DNA, 30 bp, Artificial Sequence
  Synthetic oligonucleotide
catcaaagcggctctccagaaccacactcg

SEQ ID NO: 21670 - DNA, 30 bp, Artificial Sequence
  Synthetic oligonucleotide
taggcatggggggagaaagcgctaccctcg

SEQ ID NO: 21671 - DNA, 30 bp, Artificial Sequence
  Synthetic oligonucleotide
tagagcaaactcgacaatggtcacggctcg

SEQ ID NO: 21672 - DNA, 30 bp, Artificial Sequence
  Synthetic oligonucleotide
caatgagagacggatggatatctacagtcg

SEQ ID NO: 21673 - DNA, 30 bp, Artificial Sequence
  Synthetic oligonucleotide
cgttgtcactgtgtgaattcaaaagagtcg

SEQ ID NO: 21674 - DNA, 30 bp, Artificial Sequence
  Synthetic oligonucleotide
tctcaggacacgaatcattatcgtgagtcg

SEQ ID NO: 21675 - DNA, 30 bp, Artificial Sequence
  Synthetic oligonucleotide
tgtcacactgggagtaggacctcgtcgtcg

SEQ ID NO: 21676 - DNA, 30 bp, Artificial Sequence
  Synthetic oligonucleotide
aacagggtaggaaagacgaatctgtggtcg

SEQ ID NO: 21677 - DNA, 30 bp, Artificial Sequence
  Synthetic oligonucleotide
cacaaaacagatgaggagatgggatattcg

SEQ ID NO: 21678 - DNA, 30 bp, Artificial Sequence
  Synthetic oligonucleotide
cggcaatgcaaagttcaagatgaaagttcg

SEQ ID NO: 21679 - DNA, 30 bp, Artificial Sequence
  Synthetic oligonucleotide
ccaattgaacctagtggcaaggcgagttcg

SEQ ID NO: 21680 - DNA, 30 bp, Artificial Sequence
  Synthetic oligonucleotide
cgtggacttggggggcaatatcggaaaagg

SEQ ID NO: 21681 - DNA, 30 bp, Artificial Sequence
  Synthetic oligonucleotide
cacaaagtagtgacaatccgtactaaaagg

SEQ ID NO: 21682 - DNA, 30 bp, Artificial Sequence
  Synthetic oligonucleotide
cgtgaacaggtatagacttgctctcaaagg

SEQ ID NO: 21683 - DNA, 30 bp, Artificial Sequence
  Synthetic oligonucleotide
atggtggtaaaccagtagagcaattaaagg

SEQ ID NO: 21684 - DNA, 31 bp, Artificial Sequence
  Synthetic oligonucleotide
actcgtgaacgaactaattaaccattaaagg

SEQ ID NO: 21685 - DNA, 30 bp, Artificial Sequence
  Synthetic oligonucleotide
tgacagagcgcaatcaagccaaaaccaagg

SEQ ID NO: 21686 - DNA, 30 bp, Artificial Sequence
  Synthetic oligonucleotide
cggtaatggaagaatgattgtggtccaagg

SEQ ID NO: 21687 - DNA, 30 bp, Artificial Sequence
  Synthetic oligonucleotide
gagcaatcgagtagaacaaaactgcgaagg

SEQ ID NO: 21688 - DNA, 30 bp, Artificial Sequence
  Synthetic oligonucleotide
atgggagcacggatgttgtaatatggaagg

SEQ ID NO: 21689 - DNA, 30 bp, Artificial Sequence
  Synthetic oligonucleotide
taagaccacgttcctgcaacgaaatgaagg

SEQ ID NO: 21690 - DNA, 30 bp, Artificial Sequence
  Synthetic oligonucleotide
tgacggcgagattacgtgtcgaatataagg

SEQ ID NO: 21691 - DNA, 30 bp, Artificial Sequence
  Synthetic oligonucleotide
atggatggctacgatcaaacgcctgtaagg

SEQ ID NO: 21692 - DNA, 30 bp, Artificial Sequence
  Synthetic oligonucleotide
gagaagggcgagtcggaacttagcttaagg

SEQ ID NO: 21693 - DNA, 30 bp, Artificial Sequence
  Synthetic oligonucleotide
gtgcagtggggacactccgtacgagacagg

SEQ ID NO: 21694 - DNA, 30 bp, Artificial Sequence
  Synthetic oligonucleotide
gataggtatagtgcatacagaaaggacagg

SEQ ID NO: 21695 - DNA, 30 bp, Artificial Sequence
  Synthetic oligonucleotide
aaggcaagaccagagaaccatggggacagg

SEQ ID NO: 21696 - DNA, 30 bp, Artificial Sequence
  Synthetic oligonucleotide
agtggtggcacgaagcgaaaggcgtacagg

SEQ ID NO: 21697 - DNA, 30 bp, Artificial Sequence
  Synthetic oligonucleotide
gaggccctagccttaagagctcgtcccagg

SEQ ID NO: 21698 - DNA, 30 bp, Artificial Sequence
  Synthetic oligonucleotide
atggcgattaatgcgtcgtaaacctagagg

SEQ ID NO: 21699 - DNA, 30 bp, Artificial Sequence
  Synthetic oligonucleotide
cgggaacagccacagcaaggttcgacgagg

SEQ ID NO: 21700 - DNA, 30 bp, Artificial Sequence
  Synthetic oligonucleotide
ccaacgaaatggaaatgcactgaatcgagg

SEQ ID NO: 21701 - DNA, 30 bp, Artificial Sequence
  Synthetic oligonucleotide
aaaccagctcagagtaaggtgacatcgagg

SEQ ID NO: 21702 - DNA, 30 bp, Artificial Sequence
  Synthetic oligonucleotide
ccctgaaagtcggtaaaggatacatcgagg

SEQ ID NO: 21703 - DNA, 30 bp, Artificial Sequence
  Synthetic oligonucleotide
agagtcagcgtcaattattgagaaaggagg

SEQ ID NO: 21704 - DNA, 29 bp, Artificial Sequence
  Synthetic oligonucleotide
ctaagaggggtagagttgagggaaggagg

SEQ ID NO: 21705 - DNA, 30 bp, Artificial Sequence
  Synthetic oligonucleotide
gtaggagagcttagcgaacaccaaatgagg

SEQ ID NO: 21706 - DNA, 30 bp, Artificial Sequence
  Synthetic oligonucleotide
tgaggaagtgctgcggaatagacggtgagg

SEQ ID NO: 21707 - DNA, 30 bp, Artificial Sequence
  Synthetic oligonucleotide
tgaccatacagtgaaattacacggaatagg

SEQ ID NO: 21708 - DNA, 30 bp, Artificial Sequence
  Synthetic oligonucleotide
gggttcaagtaactgagcaaggaacatagg

SEQ ID NO: 21709 - DNA, 30 bp, Artificial Sequence
  Synthetic oligonucleotide
tcaaaaaagcgcttaagcggatgacctagg

SEQ ID NO: 21710 - DNA, 30 bp, Artificial Sequence
  Synthetic oligonucleotide
taacacgggatcgaacggccgtcgagtagg

SEQ ID NO: 21711 - DNA, 30 bp, Artificial Sequence
  Synthetic oligonucleotide
tccaagactaagagagtttgcgcacgtagg

SEQ ID NO: 21712 - DNA, 30 bp, Artificial Sequence
  Synthetic oligonucleotide
agggcaccgtcccaaaatcacataattagg

SEQ ID NO: 21713 - DNA, 30 bp, Artificial Sequence
  Synthetic oligonucleotide
atgggacgaggagacgtaatgaaccttagg

SEQ ID NO: 21714 - DNA, 30 bp, Artificial Sequence
  Synthetic oligonucleotide
cgagaaggggtgattataagaacaaaccgg

SEQ ID NO: 21715 - DNA, 30 bp, Artificial Sequence
  Synthetic oligonucleotide
cacaagctgccgttaaggcaagagggccgg

SEQ ID NO: 21716 - DNA, 30 bp, Artificial Sequence
  Synthetic oligonucleotide
ggactaaatggattacgagagctatgccgg

SEQ ID NO: 21717 - DNA, 30 bp, Artificial Sequence
  Synthetic oligonucleotide
agcggaggtgatacgaaaaaaaagaagcgg

SEQ ID NO: 21718 - DNA, 30 bp, Artificial Sequence
  Synthetic oligonucleotide
agtcaagtgtcacctcaacatagatagcgg

SEQ ID NO: 21719 - DNA, 30 bp, Artificial Sequence
  Synthetic oligonucleotide
cgaaaggaggccacactgtacttcaggcgg

SEQ ID NO: 21720 - DNA, 30 bp, Artificial Sequence
  Synthetic oligonucleotide
acgcgggcacgtcgtggagcaaaaaatcgg

SEQ ID NO: 21721 - DNA, 30 bp, Artificial Sequence
  Synthetic oligonucleotide
gctaagaggaagtcgtatacacgggatcgg

SEQ ID NO: 21722 - DNA, 30 bp, Artificial Sequence
  Synthetic oligonucleotide
acgattgtgggcggacggaagtcgtatcgg

SEQ ID NO: 21723 - DNA, 30 bp, Artificial Sequence
  Synthetic oligonucleotide
tcgtcatgtggaaatggttcgcaacctcgg

SEQ ID NO: 21724 - DNA, 30 bp, Artificial Sequence
  Synthetic oligonucleotide
ttgtctgcagaaaatatcggcacgagtcgg

SEQ ID NO: 21725 - DNA, 30 bp, Artificial Sequence
  Synthetic oligonucleotide
ggaacctctgtcgaaggacagaataaaggg

SEQ ID NO: 21726 - DNA, 30 bp, Artificial Sequence
  Synthetic oligonucleotide
agaggaattatgcctatagagccggaaggg

SEQ ID NO: 21727 - DNA, 30 bp, Artificial Sequence
  Synthetic oligonucleotide
ggaccgctaataccaataagggcggaaggg

SEQ ID NO: 21728 - DNA, 30 bp, Artificial Sequence
  Synthetic oligonucleotide
catgtggatcttacacacggagagtaaggg

SEQ ID NO: 21729 - DNA, 30 bp, Artificial Sequence
  Synthetic oligonucleotide
cgcagggtcacaacagatgtgcgttaaggg

SEQ ID NO: 21730 - DNA, 30 bp, Artificial Sequence
  Synthetic oligonucleotide
cagactgtccggataggacattgagcaggg

SEQ ID NO: 21731 - DNA, 30 bp, Artificial Sequence
  Synthetic oligonucleotide
atcagaaagcaacaaaacagaccaagaggg

SEQ ID NO: 21732 - DNA, 30 bp, Artificial Sequence
  Synthetic oligonucleotide
cgacttacgtaaaaggaacagcctagaggg

SEQ ID NO: 21733 - DNA, 30 bp, Artificial Sequence
  Synthetic oligonucleotide
agcagagcgtgatcaggcctacgcggaggg

SEQ ID NO: 21734 - DNA, 30 bp, Artificial Sequence
  Synthetic oligonucleotide
cgggatagcaagtacttgagagtttgaggg

SEQ ID NO: 21735 - DNA, 30 bp, Artificial Sequence
  Synthetic oligonucleotide
tgttactgcttgatcacatcgcaaaagggg

SEQ ID NO: 21736 - DNA, 30 bp, Artificial Sequence
  Synthetic oligonucleotide
ggtcgcaccacaagctacgaacctgagggg

SEQ ID NO: 21737 - DNA, 30 bp, Artificial Sequence
  Synthetic oligonucleotide
cgagtcgggaagaggcggacgacttagggg

SEQ ID NO: 21738 - DNA, 30 bp, Artificial Sequence
  Synthetic oligonucleotide
cgggctgtgtaaggtaaaaataacgcgggg

SEQ ID NO: 21739 - DNA, 30 bp, Artificial Sequence
  Synthetic oligonucleotide
gtgcacaataataatgaaacgtaggcgggg

SEQ ID NO: 21740 - DNA, 30 bp, Artificial Sequence
  Synthetic oligonucleotide
ggcgtcaacgattgatagtacactgcgggg

SEQ ID NO: 21741 - DNA, 39 bp, Artificial Sequence
  Synthetic oligonucleotide
aagataatacattcatggtatggtcggggatcggggggg

SEQ ID NO: 21742 - DNA, 30 bp, Artificial Sequence
  Synthetic oligonucleotide
cgcgtctgacaagaggagcggataatgggg

(The sequence listing continues in the following parts.)
